United States Patent Application Publication US 2008/0113351 A1 - sequence listing, part 30

SEQ ID NO: 734985 - DNA, 19 bp, Mus musculus
  siRNA target sequence for 1700048E23Rik (NM_028521.1,911-929).
gagaatttatagataaaca

SEQ ID NO: 734986 - DNA, 19 bp, Mus musculus
  siRNA target sequence for 1700048E23Rik (NM_028521.1,934-952).
caaaagggcgtgagatata

SEQ ID NO: 734987 - DNA, 19 bp, Mus musculus
  siRNA target sequence for 1700048E23Rik (NM_028521.1,945-963).
gagatatacacggattgtt

SEQ ID NO: 734988 - DNA, 19 bp, Mus musculus
  siRNA target sequence for 1700048E23Rik (NM_028521.1,947-965).
gatatacacggattgttta

SEQ ID NO: 734989 - DNA, 19 bp, Mus musculus
  siRNA target sequence for 1700048E23Rik (NM_028521.1,1025-1043).
ccatgccacgggaaggata

SEQ ID NO: 734990 - DNA, 19 bp, Mus musculus
  siRNA target sequence for 1700048E23Rik (NM_028521.1,1026-1044).
catgccacgggaaggatat

SEQ ID NO: 734991 - DNA, 19 bp, Mus musculus
  siRNA target sequence for 1700048E23Rik (NM_028521.1,1029-1047).
gccacgggaaggatatact

SEQ ID NO: 734992 - DNA, 19 bp, Mus musculus
  siRNA target sequence for 1700048E23Rik (NM_028521.1,1030-1048).
ccacgggaaggatatactt

SEQ ID NO: 734993 - DNA, 19 bp, Mus musculus
  siRNA target sequence for 1700048E23Rik (NM_028521.1,1031-1049).
cacgggaaggatatacttt

SEQ ID NO: 734994 - DNA, 19 bp, Mus musculus
  siRNA target sequence for 1700048E23Rik (NM_028521.1,1034-1052).
gggaaggatatactttaca

SEQ ID NO: 734995 - DNA, 19 bp, Mus musculus
  siRNA target sequence for 1700048E23Rik (NM_028521.1,1036-1054).
gaaggatatactttacata

SEQ ID NO: 734996 - DNA, 19 bp, Mus musculus
  siRNA target sequence for 1700048E23Rik (NM_028521.1,1081-1099).
cttgagcctatggaatctt

SEQ ID NO: 734997 - DNA, 19 bp, Mus musculus
  siRNA target sequence for 1700048E23Rik (NM_028521.1,1086-1104).
gcctatggaatcttctatt

SEQ ID NO: 734998 - DNA, 19 bp, Mus musculus
  siRNA target sequence for 1700048E23Rik (NM_028521.1,1121-1139).
gtgttgaaataatttctca

SEQ ID NO: 734999 - DNA, 19 bp, Mus musculus
  siRNA target sequence for 1700047I17Rik (NM_028527.1,181-199).
gacgcgacacggcagataa

SEQ ID NO: 735000 - DNA, 19 bp, Mus musculus
  siRNA target sequence for 1700047I17Rik (NM_028527.1,183-201).
cgcgacacggcagataagt

SEQ ID NO: 735001 - DNA, 19 bp, Mus musculus
  siRNA target sequence for 1700047I17Rik (NM_028527.1,184-202).
gcgacacggcagataagta

SEQ ID NO: 735002 - DNA, 19 bp, Mus musculus
  siRNA target sequence for 1700047I17Rik (NM_028527.1,185-203).
cgacacggcagataagtaa

SEQ ID NO: 735003 - DNA, 19 bp, Mus musculus
  siRNA target sequence for 1700047I17Rik (NM_028527.1,186-204).
gacacggcagataagtaat

SEQ ID NO: 735004 - DNA, 19 bp, Mus musculus
  siRNA target sequence for 1700047I17Rik (NM_028527.1,188-206).
cacggcagataagtaatga

SEQ ID NO: 735005 - DNA, 19 bp, Mus musculus
  siRNA target sequence for 1700047I17Rik (NM_028527.1,190-208).
cggcagataagtaatgaaa

SEQ ID NO: 735006 - DNA, 19 bp, Mus musculus
  siRNA target sequence for 1700047I17Rik (NM_028527.1,209-227).
gaggatttgagaatgtaga

SEQ ID NO: 735007 - DNA, 19 bp, Mus musculus
  siRNA target sequence for 1700047I17Rik (NM_028527.1,357-375).
cactgtcgacccgacaaaa

SEQ ID NO: 735008 - DNA, 19 bp, Mus musculus
  siRNA target sequence for 1700047I17Rik (NM_028527.1,359-377).
ctgtcgacccgacaaaact

SEQ ID NO: 735009 - DNA, 19 bp, Mus musculus
  siRNA target sequence for 1700047I17Rik (NM_028527.1,361-379).
gtcgacccgacaaaactta

SEQ ID NO: 735010 - DNA, 19 bp, Mus musculus
  siRNA target sequence for 1700047I17Rik (NM_028527.1,388-406).
ccctacctatggttttaca

SEQ ID NO: 735011 - DNA, 19 bp, Mus musculus
  siRNA target sequence for 1700047I17Rik (NM_028527.1,454-472).
gagaagattgcgtcagttt

SEQ ID NO: 735012 - DNA, 19 bp, Mus musculus
  siRNA target sequence for 1700047I17Rik (NM_028527.1,476-494).
gcatcagcaccccaaaata

SEQ ID NO: 735013 - DNA, 19 bp, Mus musculus
  siRNA target sequence for 1700047I17Rik (NM_028527.1,511-529).
gagtattaccggatgaaga

SEQ ID NO: 735014 - DNA, 19 bp, Mus musculus
  siRNA target sequence for 1700047I17Rik (NM_028527.1,600-618).
gctgcaggccgattccatt

SEQ ID NO: 735015 - DNA, 19 bp, Mus musculus
  siRNA target sequence for 1700047I17Rik (NM_028527.1,603-621).
gcaggccgattccattgta

SEQ ID NO: 735016 - DNA, 19 bp, Mus musculus
  siRNA target sequence for 1700047I17Rik (NM_028527.1,647-665).
cgtccagctttgtaaatat

SEQ ID NO: 735017 - DNA, 19 bp, Mus musculus
  siRNA target sequence for 1700047I17Rik (NM_028527.1,650-668).
ccagctttgtaaatattaa

SEQ ID NO: 735018 - DNA, 19 bp, Mus musculus
  siRNA target sequence for 1700055M20Rik (NM_028532.1,250-268).
catcgaagattggtctaaa

SEQ ID NO: 735019 - DNA, 19 bp, Mus musculus
  siRNA target sequence for 1700055M20Rik (NM_028532.1,276-294).
ccaggtccgaagagttcaa

SEQ ID NO: 735020 - DNA, 19 bp, Mus musculus
  siRNA target sequence for 1700055M20Rik (NM_028532.1,470-488).
cactacagtcgcatcaact

SEQ ID NO: 735021 - DNA, 19 bp, Mus musculus
  siRNA target sequence for 1700055M20Rik (NM_028532.1,472-490).
ctacagtcgcatcaactat

SEQ ID NO: 735022 - DNA, 19 bp, Mus musculus
  siRNA target sequence for 1700065D16Rik (NM_028533.2,602-620).
caccgagcggctctcaaaa

SEQ ID NO: 735023 - DNA, 19 bp, Mus musculus
  siRNA target sequence for 1700065D16Rik (NM_028533.2,604-622).
ccgagcggctctcaaaaca

SEQ ID NO: 735024 - DNA, 19 bp, Mus musculus
  siRNA target sequence for 1700065D16Rik (NM_028533.2,824-842).
ctactccacgggtattttt

SEQ ID NO: 735025 - DNA, 19 bp, Mus musculus
  siRNA target sequence for 1700065D16Rik (NM_028533.2,897-915).
gacctgacgacccaacaaa

SEQ ID NO: 735026 - DNA, 19 bp, Mus musculus
  siRNA target sequence for 1700065D16Rik (NM_028533.2,899-917).
cctgacgacccaacaaagt

SEQ ID NO: 735027 - DNA, 19 bp, Mus musculus
  siRNA target sequence for 1700065D16Rik (NM_028533.2,900-918).
ctgacgacccaacaaagtt

SEQ ID NO: 735028 - DNA, 19 bp, Mus musculus
  siRNA target sequence for 1700052K11Rik (NM_028539.1,675-693).
ggaggttccatcttaacct

SEQ ID NO: 735029 - DNA, 19 bp, Mus musculus
  siRNA target sequence for 1700072E05Rik (NM_028554.1,248-266).
cctcacctgcgatatacaa

SEQ ID NO: 735030 - DNA, 19 bp, Mus musculus
  siRNA target sequence for 1700072E05Rik (NM_028554.1,251-269).
cacctgcgatatacaaaga

SEQ ID NO: 735031 - DNA, 19 bp, Mus musculus
  siRNA target sequence for 1700072E05Rik (NM_028554.1,253-271).
cctgcgatatacaaagatt

SEQ ID NO: 735032 - DNA, 19 bp, Mus musculus
  siRNA target sequence for 1700072E05Rik (NM_028554.1,254-272).
ctgcgatatacaaagattt

SEQ ID NO: 735033 - DNA, 19 bp, Mus musculus
  siRNA target sequence for 1700072E05Rik (NM_028554.1,257-275).
cgatatacaaagatttgct

SEQ ID NO: 735034 - DNA, 19 bp, Mus musculus
  siRNA target sequence for 1700072E05Rik (NM_028554.1,274-292).
ctgtgtcaaaggaatatat

SEQ ID NO: 735035 - DNA, 19 bp, Mus musculus
  siRNA target sequence for 1700072E05Rik (NM_028554.1,276-294).
gtgtcaaaggaatatatct

SEQ ID NO: 735036 - DNA, 19 bp, Mus musculus
  siRNA target sequence for 1700072E05Rik (NM_028554.1,296-314).
cagactgagtggactcatt

SEQ ID NO: 735037 - DNA, 19 bp, Mus musculus
  siRNA target sequence for 1700072E05Rik (NM_028554.1,300-318).
ctgagtggactcatttgca

SEQ ID NO: 735038 - DNA, 19 bp, Mus musculus
  siRNA target sequence for 1700072E05Rik (NM_028554.1,377-395).
ggaatttgacgataagact

SEQ ID NO: 735039 - DNA, 19 bp, Mus musculus
  siRNA target sequence for 1700072E05Rik (NM_028554.1,427-445).
cttattaccatcaagtgtt

SEQ ID NO: 735040 - DNA, 19 bp, Mus musculus
  siRNA target sequence for 1700072E05Rik (NM_028554.1,435-453).
catcaagtgtttaacatct

SEQ ID NO: 735041 - DNA, 19 bp, Mus musculus
  siRNA target sequence for 1700072E05Rik (NM_028554.1,522-540).
cactatgcacagacattga

SEQ ID NO: 735042 - DNA, 19 bp, Mus musculus
  siRNA target sequence for 1700072E05Rik (NM_028554.1,564-582).
cctgtagtcctacttttta

SEQ ID NO: 735043 - DNA, 19 bp, Mus musculus
  siRNA target sequence for 1700072E05Rik (NM_028554.1,570-588).
gtcctactttttaatgcaa

SEQ ID NO: 735044 - DNA, 19 bp, Mus musculus
  siRNA target sequence for 1700072E05Rik (NM_028554.1,608-626).
cacgaatgactcgtttgtt

SEQ ID NO: 735045 - DNA, 19 bp, Mus musculus
  siRNA target sequence for 1700072E05Rik (NM_028554.1,610-628).
cgaatgactcgtttgttaa

SEQ ID NO: 735046 - DNA, 19 bp, Mus musculus
  siRNA target sequence for 1700072E05Rik (NM_028554.1,631-649).
gacagatgcttttgtacaa

SEQ ID NO: 735047 - DNA, 19 bp, Mus musculus
  siRNA target sequence for 1700072E05Rik (NM_028554.1,657-675).
gcctcacttttgtgtatta

SEQ ID NO: 735048 - DNA, 19 bp, Mus musculus
  siRNA target sequence for 1700072E05Rik (NM_028554.1,729-747).
ggccaaaccacacttgatt

SEQ ID NO: 735049 - DNA, 19 bp, Mus musculus
  siRNA target sequence for 1700072E05Rik (NM_028554.1,730-748).
gccaaaccacacttgattt

SEQ ID NO: 735050 - DNA, 19 bp, Mus musculus
  siRNA target sequence for 1700072E05Rik (NM_028554.1,731-749).
ccaaaccacacttgatttt

SEQ ID NO: 735051 - DNA, 19 bp, Mus musculus
  siRNA target sequence for 1700072E05Rik (NM_028554.1,913-931).
cttccagactgatcaatca

SEQ ID NO: 735052 - DNA, 19 bp, Mus musculus
  siRNA target sequence for 1700072E05Rik (NM_028554.1,916-934).
ccagactgatcaatcaaaa

SEQ ID NO: 735053 - DNA, 19 bp, Mus musculus
  siRNA target sequence for Mbd3l1 (NM_028557.1,191-209).
ccttgaggatgtctagtta

SEQ ID NO: 735054 - DNA, 19 bp, Mus musculus
  siRNA target sequence for Mbd3l1 (NM_028557.1,192-210).
cttgaggatgtctagttat

SEQ ID NO: 735055 - DNA, 19 bp, Mus musculus
  siRNA target sequence for Mbd3l1 (NM_028557.1,195-213).
gaggatgtctagttataca

SEQ ID NO: 735056 - DNA, 19 bp, Mus musculus
  siRNA target sequence for Mbd3l1 (NM_028557.1,197-215).
ggatgtctagttatacatt

SEQ ID NO: 735057 - DNA, 19 bp, Mus musculus
  siRNA target sequence for Mbd3l1 (NM_028557.1,247-265).
ctgggcaatgaggtaagat

SEQ ID NO: 735058 - DNA, 19 bp, Mus musculus
  siRNA target sequence for Mbd3l1 (NM_028557.1,250-268).
ggcaatgaggtaagatact

SEQ ID NO: 735059 - DNA, 19 bp, Mus musculus
  siRNA target sequence for Mbd3l1 (NM_028557.1,251-269).
gcaatgaggtaagatacta

SEQ ID NO: 735060 - DNA, 19 bp, Mus musculus
  siRNA target sequence for Mbd3l1 (NM_028557.1,371-389).
cagaccttgccaagacttt

SEQ ID NO: 735061 - DNA, 19 bp, Mus musculus
  siRNA target sequence for Mbd3l1 (NM_028557.1,381-399).
caagactttgaaagatctt

SEQ ID NO: 735062 - DNA, 19 bp, Mus musculus
  siRNA target sequence for Mbd3l1 (NM_028557.1,384-402).
gactttgaaagatcttaca

SEQ ID NO: 735063 - DNA, 19 bp, Mus musculus
  siRNA target sequence for Mbd3l1 (NM_028557.1,436-454).
caagccaccagcattgaca

SEQ ID NO: 735064 - DNA, 19 bp, Mus musculus
  siRNA target sequence for Mbd3l1 (NM_028557.1,466-484).
cccacccttgagtcatctt

SEQ ID NO: 735065 - DNA, 19 bp, Mus musculus
  siRNA target sequence for Mbd3l1 (NM_028557.1,471-489).
ccttgagtcatcttcacat

SEQ ID NO: 735066 - DNA, 19 bp, Mus musculus
  siRNA target sequence for Mbd3l1 (NM_028557.1,472-490).
cttgagtcatcttcacatt

SEQ ID NO: 735067 - DNA, 19 bp, Mus musculus
  siRNA target sequence for Mbd3l1 (NM_028557.1,543-561).
ggtcactgaacaggatatt

SEQ ID NO: 735068 - DNA, 19 bp, Mus musculus
  siRNA target sequence for Speer4b (NM_028561.1,589-607).
gcaaggaagtactagctaa

SEQ ID NO: 735069 - DNA, 19 bp, Mus musculus
  siRNA target sequence for 1700080E11Rik (NM_028562.1,158-176).
ggccacgcccactaagata

SEQ ID NO: 735070 - DNA, 19 bp, Mus musculus
  siRNA target sequence for 1700080E11Rik (NM_028562.1,160-178).
ccacgcccactaagataga

SEQ ID NO: 735071 - DNA, 19 bp, Mus musculus
  siRNA target sequence for 1700080E11Rik (NM_028562.1,163-181).
cgcccactaagatagactt

SEQ ID NO: 735072 - DNA, 19 bp, Mus musculus
  siRNA target sequence for 1700080E11Rik (NM_028562.1,206-224).
cagctggcggcatctttgt

SEQ ID NO: 735073 - DNA, 19 bp, Mus musculus
  siRNA target sequence for 1700080E11Rik (NM_028562.1,268-286).
gccgtatcttgctgaacta

SEQ ID NO: 735074 - DNA, 19 bp, Mus musculus
  siRNA target sequence for 1700080E11Rik (NM_028562.1,269-287).
ccgtatcttgctgaactat

SEQ ID NO: 735075 - DNA, 19 bp, Mus musculus
  siRNA target sequence for 1700080E11Rik (NM_028562.1,296-314).
gatgtccatgcgctttgat

SEQ ID NO: 735076 - DNA, 19 bp, Mus musculus
  siRNA target sequence for 1700080E11Rik (NM_028562.1,405-423).
gagggagtgtccactttca

SEQ ID NO: 735077 - DNA, 19 bp, Mus musculus
  siRNA target sequence for 1810006A16Rik (NM_028584.1,659-677).
cagtatggaggggcttata

SEQ ID NO: 735078 - DNA, 19 bp, Mus musculus
  siRNA target sequence for 1810006A16Rik (NM_028584.1,712-730).
gcagttggacgttcagttt

SEQ ID NO: 735079 - DNA, 19 bp, Mus musculus
  siRNA target sequence for 1810006A16Rik (NM_028584.1,713-731).
cagttggacgttcagtttt

SEQ ID NO: 735080 - DNA, 19 bp, Mus musculus
  siRNA target sequence for 1810006A16Rik (NM_028584.1,843-861).
cactatggctggtgattga

SEQ ID NO: 735081 - DNA, 19 bp, Mus musculus
  siRNA target sequence for 1810006A16Rik (NM_028584.1,865-883).
cttaatggatgcactcatt

SEQ ID NO: 735082 - DNA, 19 bp, Mus musculus
  siRNA target sequence for 1810006A16Rik (NM_028584.1,900-918).
caggcttgtacttcttctt

SEQ ID NO: 735083 - DNA, 19 bp, Mus musculus
  siRNA target sequence for 1810006A16Rik (NM_028584.1,925-943).
cctctctgccgcctatagt

SEQ ID NO: 735084 - DNA, 19 bp, Mus musculus
  siRNA target sequence for 1810006A16Rik (NM_028584.1,926-944).
ctctctgccgcctatagtt

SEQ ID NO: 735085 - DNA, 19 bp, Mus musculus
  siRNA target sequence for 1810006A16Rik (NM_028584.1,928-946).
ctctgccgcctatagttca

SEQ ID NO: 735086 - DNA, 19 bp, Mus musculus
  siRNA target sequence for 1810006A16Rik (NM_028584.1,976-994).
ccagagcaaaggttatagt

SEQ ID NO: 735087 - DNA, 19 bp, Mus musculus
  siRNA target sequence for 1810006A16Rik (NM_028584.1,986-1004).
ggttatagtggcttcaact

SEQ ID NO: 735088 - DNA, 19 bp, Mus musculus
  siRNA target sequence for 1810006A16Rik (NM_028584.1,1092-1110).
ggggttaccgaaaagtcaa

SEQ ID NO: 735089 - DNA, 19 bp, Mus musculus
  siRNA target sequence for 1700129L04Rik (NM_028588.1,578-596).
caaagtcgaagctgtatgt

SEQ ID NO: 735090 - DNA, 19 bp, Mus musculus
  siRNA target sequence for 1700129L04Rik (NM_028588.1,582-600).
gtcgaagctgtatgtcaat

SEQ ID NO: 735091 - DNA, 19 bp, Mus musculus
  siRNA target sequence for 1700129L04Rik (NM_028588.1,584-602).
cgaagctgtatgtcaatgt

SEQ ID NO: 735092 - DNA, 19 bp, Mus musculus
  siRNA target sequence for 1700129L04Rik (NM_028588.1,595-613).
gtcaatgtgctgcatatct

SEQ ID NO: 735093 - DNA, 19 bp, Mus musculus
  siRNA target sequence for 1700129L04Rik (NM_028588.1,725-743).
caccacaggcacgttcttt

SEQ ID NO: 735094 - DNA, 19 bp, Mus musculus
  siRNA target sequence for 1700129L04Rik (NM_028588.1,727-745).
ccacaggcacgttctttga

SEQ ID NO: 735095 - DNA, 19 bp, Mus musculus
  siRNA target sequence for 1700129L04Rik (NM_028588.1,733-751).
gcacgttctttgagacaaa

SEQ ID NO: 735096 - DNA, 19 bp, Mus musculus
  siRNA target sequence for 1700129L04Rik (NM_028588.1,778-796).
cagtgagttgggctattga

SEQ ID NO: 735097 - DNA, 19 bp, Mus musculus
  siRNA target sequence for Ms4a6c (NM_028595.1,610-628).
ctgcctcagagcaatgcaa

SEQ ID NO: 735098 - DNA, 19 bp, Mus musculus
  siRNA target sequence for Ms4a6c (NM_028595.1,646-664).
gtctaattgaacatgacta

SEQ ID NO: 735099 - DNA, 19 bp, Mus musculus
  siRNA target sequence for Ms4a6c (NM_028595.1,700-718).
gtgccgtcaccaagtctat

SEQ ID NO: 735100 - DNA, 19 bp, Mus musculus
  siRNA target sequence for Ms4a6c (NM_028595.1,705-723).
gtcaccaagtctattctga

SEQ ID NO: 735101 - DNA, 19 bp, Mus musculus
  siRNA target sequence for 2410044K02Rik (NM_028597.1,275-293).
cggctggtcaaagaaaaca

SEQ ID NO: 735102 - DNA, 19 bp, Mus musculus
  siRNA target sequence for 2410044K02Rik (NM_028597.1,497-515).
gacgacgttgtgactttca

SEQ ID NO: 735103 - DNA, 19 bp, Mus musculus
  siRNA target sequence for 2410044K02Rik (NM_028597.1,542-560).
gcggaggagcagttcaagt

SEQ ID NO: 735104 - DNA, 19 bp, Mus musculus
  siRNA target sequence for 2410044K02Rik (NM_028597.1,608-626).
ctgaccaacggcaatggtt

SEQ ID NO: 735105 - DNA, 19 bp, Mus musculus
  siRNA target sequence for 2410044K02Rik (NM_028597.1,693-711).
gcatctgtatcaagtttga

SEQ ID NO: 735106 - DNA, 19 bp, Mus musculus
  siRNA target sequence for 2410044K02Rik (NM_028597.1,767-785).
gacgttgacgagttagtgt

SEQ ID NO: 735107 - DNA, 19 bp, Mus musculus
  siRNA target sequence for 2410044K02Rik (NM_028597.1,782-800).
gtgtgcgtgcggtgctttt

SEQ ID NO: 735108 - DNA, 19 bp, Mus musculus
  siRNA target sequence for Tex19 (NM_028602.2,360-378).
ggcagctttcctattgaat

SEQ ID NO: 735109 - DNA, 19 bp, Mus musculus
  siRNA target sequence for Tex19 (NM_028602.2,442-460).
gatctcctggaatacttgt

SEQ ID NO: 735110 - DNA, 19 bp, Mus musculus
  siRNA target sequence for Tex19 (NM_028602.2,516-534).
gggattggggtccctttat

SEQ ID NO: 735111 - DNA, 19 bp, Mus musculus
  siRNA target sequence for Tex19 (NM_028602.2,518-536).
gattggggtccctttatgt

SEQ ID NO: 735112 - DNA, 19 bp, Mus musculus
  siRNA target sequence for Tex19 (NM_028602.2,848-866).
ggttgcaagaccagaagtt

SEQ ID NO: 735113 - DNA, 19 bp, Mus musculus
  siRNA target sequence for Tex19 (NM_028602.2,849-867).
gttgcaagaccagaagttt

SEQ ID NO: 735114 - DNA, 19 bp, Mus musculus
  siRNA target sequence for Tex19 (NM_028602.2,896-914).
ggtgccacctgctgtcaat

SEQ ID NO: 735115 - DNA, 19 bp, Mus musculus
  siRNA target sequence for Tex19 (NM_028602.2,987-1005).
ggcccattttcggaaagaa

SEQ ID NO: 735116 - DNA, 19 bp, Mus musculus
  siRNA target sequence for Tex19 (NM_028602.2,1072-1090).
gaattagggatggagttat

SEQ ID NO: 735117 - DNA, 19 bp, Mus musculus
  siRNA target sequence for Tex19 (NM_028602.2,1100-1118).
cctgctacctgtggaataa

SEQ ID NO: 735118 - DNA, 19 bp, Mus musculus
  siRNA target sequence for Tex19 (NM_028602.2,1101-1119).
ctgctacctgtggaataaa

SEQ ID NO: 735119 - DNA, 19 bp, Mus musculus
  siRNA target sequence for Dppa4 (NM_028610.1,103-121).
gtggaattgcagatgtcta

SEQ ID NO: 735120 - DNA, 19 bp, Mus musculus
  siRNA target sequence for Dppa4 (NM_028610.1,174-192).
gaagtcggagacagataat

SEQ ID NO: 735121 - DNA, 19 bp, Mus musculus
  siRNA target sequence for Dppa4 (NM_028610.1,177-195).
gtcggagacagataatggt

SEQ ID NO: 735122 - DNA, 19 bp, Mus musculus
  siRNA target sequence for Dppa4 (NM_028610.1,183-201).
gacagataatggttgtaaa

SEQ ID NO: 735123 - DNA, 19 bp, Mus musculus
  siRNA target sequence for Dppa4 (NM_028610.1,245-263).
ctcgtaggaaggtaccaat

SEQ ID NO: 735124 - DNA, 19 bp, Mus musculus
  siRNA target sequence for Dppa4 (NM_028610.1,287-305).
ccccagtgaacctgattca

SEQ ID NO: 735125 - DNA, 19 bp, Mus musculus
  siRNA target sequence for Dppa4 (NM_028610.1,298-316).
ctgattcaccgagatgttt

SEQ ID NO: 735126 - DNA, 19 bp, Mus musculus
  siRNA target sequence for Dppa4 (NM_028610.1,796-814).
gcctgggtacccgataaga

SEQ ID NO: 735127 - DNA, 19 bp, Mus musculus
  siRNA target sequence for Dppa4 (NM_028610.1,797-815).
cctgggtacccgataagaa

SEQ ID NO: 735128 - DNA, 19 bp, Mus musculus
  siRNA target sequence for Dppa4 (NM_028610.1,798-816).
ctgggtacccgataagaaa

SEQ ID NO: 735129 - DNA, 19 bp, Mus musculus
  siRNA target sequence for Dppa4 (NM_028610.1,840-858).
gcttccggcctgcacattt

SEQ ID NO: 735130 - DNA, 19 bp, Mus musculus
  siRNA target sequence for Dppa4 (NM_028610.1,888-906).
gtgccccaagtgtgttcat

SEQ ID NO: 735131 - DNA, 19 bp, Mus musculus
  siRNA target sequence for Dppa4 (NM_028610.1,892-910).
cccaagtgtgttcataaga

SEQ ID NO: 735132 - DNA, 19 bp, Mus musculus
  siRNA target sequence for Dppa4 (NM_028610.1,899-917).
gtgttcataagaacaagat

SEQ ID NO: 735133 - DNA, 19 bp, Mus musculus
  siRNA target sequence for 2410091C18Rik (NM_028611.1,66-84).
ggccttccctgtatttgga

SEQ ID NO: 735134 - DNA, 19 bp, Mus musculus
  siRNA target sequence for 2410091C18Rik (NM_028611.1,138-156).
ccgatgctgcggcatctta

SEQ ID NO: 735135 - DNA, 19 bp, Mus musculus
  siRNA target sequence for 2410091C18Rik (NM_028611.1,139-157).
cgatgctgcggcatcttat

SEQ ID NO: 735136 - DNA, 19 bp, Mus musculus
  siRNA target sequence for 2410091C18Rik (NM_028611.1,144-162).
ctgcggcatcttatgtaca

SEQ ID NO: 735137 - DNA, 19 bp, Mus musculus
  siRNA target sequence for 2410091C18Rik (NM_028611.1,146-164).
gcggcatcttatgtacaaa

SEQ ID NO: 735138 - DNA, 19 bp, Mus musculus
  siRNA target sequence for 2410091C18Rik (NM_028611.1,147-165).
cggcatcttatgtacaaaa

SEQ ID NO: 735139 - DNA, 19 bp, Mus musculus
  siRNA target sequence for 2410091C18Rik (NM_028611.1,148-166).
ggcatcttatgtacaaaat

SEQ ID NO: 735140 - DNA, 19 bp, Mus musculus
  siRNA target sequence for 2410091C18Rik (NM_028611.1,149-167).
gcatcttatgtacaaaata

SEQ ID NO: 735141 - DNA, 19 bp, Mus musculus
  siRNA target sequence for 2410091C18Rik (NM_028611.1,187-205).
ctgtggccgagtacatgaa

SEQ ID NO: 735142 - DNA, 19 bp, Mus musculus
  siRNA target sequence for 2410091C18Rik (NM_028611.1,223-241).
cagccaagggatattatgt

SEQ ID NO: 735143 - DNA, 19 bp, Mus musculus
  siRNA target sequence for 2410091C18Rik (NM_028611.1,315-333).
ctaggggtgtggtttgtta

SEQ ID NO: 735144 - DNA, 19 bp, Mus musculus
  siRNA target sequence for 2410091C18Rik (NM_028611.1,319-337).
gggtgtggtttgttagtga

SEQ ID NO: 735145 - DNA, 19 bp, Mus musculus
  siRNA target sequence for 2410091C18Rik (NM_028611.1,320-338).
ggtgtggtttgttagtgaa

SEQ ID NO: 735146 - DNA, 19 bp, Mus musculus
  siRNA target sequence for 2410091C18Rik (NM_028611.1,321-339).
gtgtggtttgttagtgaat

SEQ ID NO: 735147 - DNA, 19 bp, Mus musculus
  siRNA target sequence for 2410091C18Rik (NM_028611.1,397-415).
gcaccctcacagcagatat

SEQ ID NO: 735148 - DNA, 19 bp, Mus musculus
  siRNA target sequence for 2410091C18Rik (NM_028611.1,400-418).
ccctcacagcagatatttt

SEQ ID NO: 735149 - DNA, 19 bp, Mus musculus
  siRNA target sequence for 2410091C18Rik (NM_028611.1,454-472).
cctgtgccatctcaataca

SEQ ID NO: 735150 - DNA, 19 bp, Mus musculus
  siRNA target sequence for 2410091C18Rik (NM_028611.1,480-498).
gaggtgagccagaaactaa

SEQ ID NO: 735151 - DNA, 19 bp, Mus musculus
  siRNA target sequence for 2410091C18Rik (NM_028611.1,482-500).
ggtgagccagaaactaagt

SEQ ID NO: 735152 - DNA, 19 bp, Mus musculus
  siRNA target sequence for 2410091C18Rik (NM_028611.1,553-571).
ctgaatccctggtgtacat

SEQ ID NO: 735153 - DNA, 19 bp, Mus musculus
  siRNA target sequence for 2410091C18Rik (NM_028611.1,555-573).
gaatccctggtgtacatga

SEQ ID NO: 735154 - DNA, 19 bp, Mus musculus
  siRNA target sequence for 2410091C18Rik (NM_028611.1,647-665).
gtacctcgcccatgagttt

SEQ ID NO: 735155 - DNA, 19 bp, Mus musculus
  siRNA target sequence for 2410091C18Rik (NM_028611.1,650-668).
cctcgcccatgagtttttt

SEQ ID NO: 735156 - DNA, 19 bp, Mus musculus
  siRNA target sequence for 2410091C18Rik (NM_028611.1,653-671).
cgcccatgagttttttgat

SEQ ID NO: 735157 - DNA, 19 bp, Mus musculus
  siRNA target sequence for 2410091C18Rik (NM_028611.1,734-752).
cgacccacaagcttctgat

SEQ ID NO: 735158 - DNA, 19 bp, Mus musculus
  siRNA target sequence for 2410091C18Rik (NM_028611.1,737-755).
cccacaagcttctgataaa

SEQ ID NO: 735159 - DNA, 19 bp, Mus musculus
  siRNA target sequence for 2410091C18Rik (NM_028611.1,739-757).
cacaagcttctgataaact

SEQ ID NO: 735160 - DNA, 19 bp, Mus musculus
  siRNA target sequence for 2410091C18Rik (NM_028611.1,787-805).
ctgcagaagccttcattca

SEQ ID NO: 735161 - DNA, 19 bp, Mus musculus
  siRNA target sequence for 2410091C18Rik (NM_028611.1,821-839).
ggaacatgtggaagtatgt

SEQ ID NO: 735162 - DNA, 19 bp, Mus musculus
  siRNA target sequence for 2410091C18Rik (NM_028611.1,840-858).
cccgatgctggggttatca

SEQ ID NO: 735163 - DNA, 19 bp, Mus musculus
  siRNA target sequence for 2410091C18Rik (NM_028611.1,841-859).
ccgatgctggggttatcat

SEQ ID NO: 735164 - DNA, 19 bp, Mus musculus
  siRNA target sequence for 2410091C18Rik (NM_028611.1,918-936).
ggtcacgatggcacaaaga

SEQ ID NO: 735165 - DNA, 19 bp, Mus musculus
  siRNA target sequence for 2410091C18Rik (NM_028611.1,941-959).
caccttgagagggttttat

SEQ ID NO: 735166 - DNA, 19 bp, Mus musculus
  siRNA target sequence for 2410091C18Rik (NM_028611.1,966-984).
cagcttcacgatgtcttaa

SEQ ID NO: 735167 - DNA, 19 bp, Mus musculus
  siRNA target sequence for 2410091C18Rik (NM_028611.1,1072-1090).
cagtggaacagcgaacatt

SEQ ID NO: 735168 - DNA, 19 bp, Mus musculus
  siRNA target sequence for 2410091C18Rik (NM_028611.1,1074-1092).
gtggaacagcgaacatttt

SEQ ID NO: 735169 - DNA, 19 bp, Mus musculus
  siRNA target sequence for 2410091C18Rik (NM_028611.1,1076-1094).
ggaacagcgaacattttta

SEQ ID NO: 735170 - DNA, 19 bp, Mus musculus
  siRNA target sequence for 2410091C18Rik (NM_028611.1,1119-1137).
ctgaaggttctcttggata

SEQ ID NO: 735171 - DNA, 19 bp, Mus musculus
  siRNA target sequence for 2410091C18Rik (NM_028611.1,1166-1184).
gctacttggagggtatgat

SEQ ID NO: 735172 - DNA, 19 bp, Mus musculus
  siRNA target sequence for 2410091C18Rik (NM_028611.1,1167-1185).
ctacttggagggtatgata

SEQ ID NO: 735173 - DNA, 19 bp, Mus musculus
  siRNA target sequence for 2410091C18Rik (NM_028611.1,1170-1188).
cttggagggtatgatatgt

SEQ ID NO: 735174 - DNA, 19 bp, Mus musculus
  siRNA target sequence for 2410091C18Rik (NM_028611.1,1173-1191).
ggagggtatgatatgttaa

SEQ ID NO: 735175 - DNA, 19 bp, Mus musculus
  siRNA target sequence for 2410091C18Rik (NM_028611.1,1174-1192).
gagggtatgatatgttaat

SEQ ID NO: 735176 - DNA, 19 bp, Mus musculus
  siRNA target sequence for 2410091C18Rik (NM_028611.1,1176-1194).
gggtatgatatgttaatga

SEQ ID NO: 735177 - DNA, 19 bp, Mus musculus
  siRNA target sequence for 2410091C18Rik (NM_028611.1,1177-1195).
ggtatgatatgttaatgaa

SEQ ID NO: 735178 - DNA, 19 bp, Mus musculus
  siRNA target sequence for 2410091C18Rik (NM_028611.1,1254-1272).
catggggggagtcaagaaa

SEQ ID NO: 735179 - DNA, 19 bp, Mus musculus
  siRNA target sequence for 2410091C18Rik (NM_028611.1,1258-1276).
gggggagtcaagaaaggaa

SEQ ID NO: 735180 - DNA, 19 bp, Mus musculus
  siRNA target sequence for 2410091C18Rik (NM_028611.1,1274-1292).
gaatgcctgccagtcaaaa

SEQ ID NO: 735181 - DNA, 19 bp, Mus musculus
  siRNA target sequence for 2410091C18Rik (NM_028611.1,1306-1324).
ctgtagctgggtttgatga

SEQ ID NO: 735182 - DNA, 19 bp, Mus musculus
  siRNA target sequence for 2410091C18Rik (NM_028611.1,1314-1332).
gggtttgatgaacttgttt

SEQ ID NO: 735183 - DNA, 19 bp, Mus musculus
  siRNA target sequence for 1110012M11Rik (NM_028617.2,632-650).
gaggaccgactccatctat

SEQ ID NO: 735184 - DNA, 19 bp, Mus musculus
  siRNA target sequence for 1110012M11Rik (NM_028617.2,634-652).
ggaccgactccatctatga

SEQ ID NO: 735185 - DNA, 19 bp, Mus musculus
  siRNA target sequence for 1110012M11Rik (NM_028617.2,659-677).
cagtctctatggcatatca

SEQ ID NO: 735186 - DNA, 19 bp, Mus musculus
  siRNA target sequence for 1110012M11Rik (NM_028617.2,756-774).
ggggacctgacgatcaaat

SEQ ID NO: 735187 - DNA, 19 bp, Mus musculus
  siRNA target sequence for 1110012M11Rik (NM_028617.2,758-776).
ggacctgacgatcaaatca

SEQ ID NO: 735188 - DNA, 19 bp, Mus musculus
  siRNA target sequence for 1110007H17Rik (NM_028627.1,591-609).
gtgggggaggcctgatcaa

SEQ ID NO: 735189 - DNA, 19 bp, Mus musculus
  siRNA target sequence for 1110007H17Rik (NM_028627.1,594-612).
ggggaggcctgatcaagtt

SEQ ID NO: 735190 - DNA, 19 bp, Mus musculus
  siRNA target sequence for 1110007H17Rik (NM_028627.1,595-613).
gggaggcctgatcaagttt

SEQ ID NO: 735191 - DNA, 19 bp, Mus musculus
  siRNA target sequence for 1110007H17Rik (NM_028627.1,844-862).
gcctccaccctcattaaaa

SEQ ID NO: 735192 - DNA, 19 bp, Mus musculus
  siRNA target sequence for 1110020L19Rik (NM_028633.1,213-231).
cctcgacggcctgtatatt

SEQ ID NO: 735193 - DNA, 19 bp, Mus musculus
  siRNA target sequence for 1110020L19Rik (NM_028633.1,214-232).
ctcgacggcctgtatatta

SEQ ID NO: 735194 - DNA, 19 bp, Mus musculus
  siRNA target sequence for 1110020L19Rik (NM_028633.1,216-234).
cgacggcctgtatattaca

SEQ ID NO: 735195 - DNA, 19 bp, Mus musculus
  siRNA target sequence for 1110020L19Rik (NM_028633.1,219-237).
cggcctgtatattacagaa

SEQ ID NO: 735196 - DNA, 19 bp, Mus musculus
  siRNA target sequence for 1110020L19Rik (NM_028633.1,259-277).
ctgtgtaggccctcaaagt

SEQ ID NO: 735197 - DNA, 19 bp, Mus musculus
  siRNA target sequence for 1110020L19Rik (NM_028633.1,344-362).
cactgaaagggaatgcatt

SEQ ID NO: 735198 - DNA, 19 bp, Mus musculus
  siRNA target sequence for 1110020L19Rik (NM_028633.1,353-371).
ggaatgcattggatttgaa

SEQ ID NO: 735199 - DNA, 19 bp, Mus musculus
  siRNA target sequence for 1110020L19Rik (NM_028633.1,394-412).
ggccatgagctgatgtttt

SEQ ID NO: 735200 - DNA, 19 bp, Mus musculus
  siRNA target sequence for 1110020L19Rik (NM_028633.1,421-439).
gatgaccaggatcttctaa

SEQ ID NO: 735201 - DNA, 19 bp, Mus musculus
  siRNA target sequence for 1110020L19Rik (NM_028633.1,452-470).
gtccccagaagcaactaca

SEQ ID NO: 735202 - DNA, 19 bp, Mus musculus
  siRNA target sequence for 1110020L19Rik (NM_028633.1,649-667).
gacatgcagtcctctctaa

SEQ ID NO: 735203 - DNA, 19 bp, Mus musculus
  siRNA target sequence for 1110020L19Rik (NM_028633.1,662-680).
ctctaaacaagcaatctga

SEQ ID NO: 735204 - DNA, 19 bp, Mus musculus
  siRNA target sequence for 1110020L19Rik (NM_028633.1,753-771).
ggagagtgctactaagctt

SEQ ID NO: 735205 - DNA, 19 bp, Mus musculus
  siRNA target sequence for 1110020L19Rik (NM_028633.1,824-842).
gcaccatagaccagaaact

SEQ ID NO: 735206 - DNA, 19 bp, Mus musculus
  siRNA target sequence for 1110020L19Rik (NM_028633.1,957-975).
catcatccaagctgtctat

SEQ ID NO: 735207 - DNA, 19 bp, Mus musculus
  siRNA target sequence for 1110020L19Rik (NM_028633.1,1031-1049).
cctctgccgaagctatgaa

SEQ ID NO: 735208 - DNA, 19 bp, Mus musculus
  siRNA target sequence for 1110020L19Rik (NM_028633.1,1032-1050).
ctctgccgaagctatgaaa

SEQ ID NO: 735209 - DNA, 19 bp, Mus musculus
  siRNA target sequence for 1110020L19Rik (NM_028633.1,1121-1139).
gaattgatgaagtaacaca

SEQ ID NO: 735210 - DNA, 19 bp, Mus musculus
  siRNA target sequence for 1110020L19Rik (NM_028633.1,1132-1150).
gtaacacagaagtacaaga

SEQ ID NO: 735211 - DNA, 19 bp, Mus musculus
  siRNA target sequence for 1110020L19Rik (NM_028633.1,1149-1167).
gatccttactgacagattt

SEQ ID NO: 735212 - DNA, 19 bp, Mus musculus
  siRNA target sequence for 1110020L19Rik (NM_028633.1,1153-1171).
cttactgacagatttcaca

SEQ ID NO: 735213 - DNA, 19 bp, Mus musculus
  siRNA target sequence for 1110014P06Rik (NM_028634.2,208-226).
ccaacctacattctttaga

SEQ ID NO: 735214 - DNA, 19 bp, Mus musculus
  siRNA target sequence for 1110014P06Rik (NM_028634.2,209-227).
caacctacattctttagat

SEQ ID NO: 735215 - DNA, 19 bp, Mus musculus
  siRNA target sequence for 1110014P06Rik (NM_028634.2,249-267).
ctggggctcgactatggaa

SEQ ID NO: 735216 - DNA, 19 bp, Mus musculus
  siRNA target sequence for 1110014P06Rik (NM_028634.2,366-384).
cagcgcctgcgcaaacgaa

SEQ ID NO: 735217 - DNA, 19 bp, Mus musculus
  siRNA target sequence for 1110014P06Rik (NM_028634.2,371-389).
cctgcgcaaacgaaaccaa

SEQ ID NO: 735218 - DNA, 19 bp, Mus musculus
  siRNA target sequence for 1110014P06Rik (NM_028634.2,437-455).
gctggacatgctttcagaa

SEQ ID NO: 735219 - DNA, 19 bp, Mus musculus
  siRNA target sequence for 1110014P06Rik (NM_028634.2,460-478).
ctgctgagtcccacctaaa

SEQ ID NO: 735220 - DNA, 19 bp, Mus musculus
  siRNA target sequence for 1110014P06Rik (NM_028634.2,463-481).
ctgagtcccacctaaagga

SEQ ID NO: 735221 - DNA, 19 bp, Mus musculus
  siRNA target sequence for Ttc7 (NM_028639.1,526-544).
ccgatgactttgtgaaatt

SEQ ID NO: 735222 - DNA, 19 bp, Mus musculus
  siRNA target sequence for Ttc7 (NM_028639.1,582-600).
gataaccacgacaaaataa

SEQ ID NO: 735223 - DNA, 19 bp, Mus musculus
  siRNA target sequence for Ttc7 (NM_028639.1,687-705).
ctgccgccacagtacatgt

SEQ ID NO: 735224 - DNA, 19 bp, Mus musculus
  siRNA target sequence for Ttc7 (NM_028639.1,758-776).
ggacgctgtcagcatgtat

SEQ ID NO: 735225 - DNA, 19 bp, Mus musculus
  siRNA target sequence for Ttc7 (NM_028639.1,781-799).
gggctgggatcgatgacat

SEQ ID NO: 735226 - DNA, 19 bp, Mus musculus
  siRNA target sequence for Ttc7 (NM_028639.1,782-800).
ggctgggatcgatgacata

SEQ ID NO: 735227 - DNA, 19 bp, Mus musculus
  siRNA target sequence for Ttc7 (NM_028639.1,837-855).
ctgtcggaggcctttgtca

SEQ ID NO: 735228 - DNA, 19 bp, Mus musculus
  siRNA target sequence for Ttc7 (NM_028639.1,1030-1048).
gcctctcgcctgactatga

SEQ ID NO: 735229 - DNA, 19 bp, Mus musculus
  siRNA target sequence for Ttc7 (NM_028639.1,1072-1090).
ccctccagagcgcatatgt

SEQ ID NO: 735230 - DNA, 19 bp, Mus musculus
  siRNA target sequence for Ttc7 (NM_028639.1,1074-1092).
ctccagagcgcatatgtga

SEQ ID NO: 735231 - DNA, 19 bp, Mus musculus
  siRNA target sequence for Ttc7 (NM_028639.1,1097-1115).
cctgaaaaaggggaatatt

SEQ ID NO: 735232 - DNA, 19 bp, Mus musculus
  siRNA target sequence for Ttc7 (NM_028639.1,1131-1149).
gagctccgggagattctga

SEQ ID NO: 735233 - DNA, 19 bp, Mus musculus
  siRNA target sequence for Ttc7 (NM_028639.1,1225-1243).
ccctgagcgaggactgtta

SEQ ID NO: 735234 - DNA, 19 bp, Mus musculus
  siRNA target sequence for Ttc7 (NM_028639.1,1354-1372).
gccccaaagacaacataga

SEQ ID NO: 735235 - DNA, 19 bp, Mus musculus
  siRNA target sequence for Ttc7 (NM_028639.1,1475-1493).
gaatgcttcagccatttat

SEQ ID NO: 735236 - DNA, 19 bp, Mus musculus
  siRNA target sequence for Ttc7 (NM_028639.1,1519-1537).
ggcgaggccagtatgtcat

SEQ ID NO: 735237 - DNA, 19 bp, Mus musculus
  siRNA target sequence for Ttc7 (NM_028639.1,1524-1542).
ggccagtatgtcatgctat

SEQ ID NO: 735238 - DNA, 19 bp, Mus musculus
  siRNA target sequence for Ttc7 (NM_028639.1,1551-1569).
ctagagcgagccatgaagt

SEQ ID NO: 735239 - DNA, 19 bp, Mus musculus
  siRNA target sequence for Ttc7 (NM_028639.1,1579-1597).
gagaatttcacctttggta

SEQ ID NO: 735240 - DNA, 19 bp, Mus musculus
  siRNA target sequence for Ttc7 (NM_028639.1,1653-1671).
ctgcgtgagtgcatgaagt

SEQ ID NO: 735241 - DNA, 19 bp, Mus musculus
  siRNA target sequence for Ttc7 (NM_028639.1,1754-1772).
ctttgccacggtagtaatt

SEQ ID NO: 735242 - DNA, 19 bp, Mus musculus
  siRNA target sequence for Ttc7 (NM_028639.1,1929-1947).
cccgatgatccccaaatta

SEQ ID NO: 735243 - DNA, 19 bp, Mus musculus
  siRNA target sequence for Ttc7 (NM_028639.1,1930-1948).
ccgatgatccccaaattat

SEQ ID NO: 735244 - DNA, 19 bp, Mus musculus
  siRNA target sequence for Ttc7 (NM_028639.1,1932-1950).
gatgatccccaaattatct

SEQ ID NO: 735245 - DNA, 19 bp, Mus musculus
  siRNA target sequence for Ttc7 (NM_028639.1,2096-2114).
cgccctggacgtcatcaat

SEQ ID NO: 735246 - DNA, 19 bp, Mus musculus
  siRNA target sequence for Ttc7 (NM_028639.1,2097-2115).
gccctggacgtcatcaata

SEQ ID NO: 735247 - DNA, 19 bp, Mus musculus
  siRNA target sequence for Ttc7 (NM_028639.1,2098-2116).
ccctggacgtcatcaatat

SEQ ID NO: 735248 - DNA, 19 bp, Mus musculus
  siRNA target sequence for Ttc7 (NM_028639.1,2125-2143).
ccgagcatcctgaaaattt

SEQ ID NO: 735249 - DNA, 19 bp, Mus musculus
  siRNA target sequence for Ttc7 (NM_028639.1,2202-2220).
ctcgtgacttgcagacaaa

SEQ ID NO: 735250 - DNA, 19 bp, Mus musculus
  siRNA target sequence for Ttc7 (NM_028639.1,2235-2253).
cagaccctctacaacttct

SEQ ID NO: 735251 - DNA, 19 bp, Mus musculus
  siRNA target sequence for Ttc7 (NM_028639.1,2400-2418).
gaggccatgtcggaattaa

SEQ ID NO: 735252 - DNA, 19 bp, Mus musculus
  siRNA target sequence for Ttc7 (NM_028639.1,2403-2421).
gccatgtcggaattaacct

SEQ ID NO: 735253 - DNA, 19 bp, Mus musculus
  siRNA target sequence for Ttc7 (NM_028639.1,2404-2422).
ccatgtcggaattaacctt

SEQ ID NO: 735254 - DNA, 19 bp, Mus musculus
  siRNA target sequence for Ttc7 (NM_028639.1,2405-2423).
catgtcggaattaacctta

SEQ ID NO: 735255 - DNA, 19 bp, Mus musculus
  siRNA target sequence for Ttc7 (NM_028639.1,2408-2426).
gtcggaattaaccttaaca

SEQ ID NO: 735256 - DNA, 19 bp, Mus musculus
  siRNA target sequence for Ttc7 (NM_028639.1,2569-2587).
cctctcactcggtactcta

SEQ ID NO: 735257 - DNA, 19 bp, Mus musculus
  siRNA target sequence for Ttc7 (NM_028639.1,2572-2590).
ctcactcggtactctacat

SEQ ID NO: 735258 - DNA, 19 bp, Mus musculus
  siRNA target sequence for 1110018J12Rik (NM_028658.2,179-197).
ggacagtttgacatttcga

SEQ ID NO: 735259 - DNA, 19 bp, Mus musculus
  siRNA target sequence for 1110018J12Rik (NM_028658.2,180-198).
gacagtttgacatttcgaa

SEQ ID NO: 735260 - DNA, 19 bp, Mus musculus
  siRNA target sequence for 1110018J12Rik (NM_028658.2,184-202).
gtttgacatttcgaaatct

SEQ ID NO: 735261 - DNA, 19 bp, Mus musculus
  siRNA target sequence for 1110018J12Rik (NM_028658.2,255-273).
cctcgaggcaagaaaaaca

SEQ ID NO: 735262 - DNA, 19 bp, Mus musculus
  siRNA target sequence for 1110018J12Rik (NM_028658.2,275-293).
gaaaagtggtgaatcttct

SEQ ID NO: 735263 - DNA, 19 bp, Mus musculus
  siRNA target sequence for 1110018J12Rik (NM_028658.2,429-447).
cggctggccactcttgaaa

SEQ ID NO: 735264 - DNA, 19 bp, Mus musculus
  siRNA target sequence for 1110018J12Rik (NM_028658.2,431-449).
gctggccactcttgaaaca

SEQ ID NO: 735265 - DNA, 19 bp, Mus musculus
  siRNA target sequence for 1110018J12Rik (NM_028658.2,521-539).
gagcgacaaggcaaagcta

SEQ ID NO: 735266 - DNA, 19 bp, Mus musculus
  siRNA target sequence for 1110018J12Rik (NM_028658.2,527-545).
caaggcaaagctagaagta

SEQ ID NO: 735267 - DNA, 19 bp, Mus musculus
  siRNA target sequence for 1110018J12Rik (NM_028658.2,582-600).
cgactgcgaacagaagaat

SEQ ID NO: 735268 - DNA, 19 bp, Mus musculus
  siRNA target sequence for 1110018J12Rik (NM_028658.2,588-606).
cgaacagaagaatgtcaat

SEQ ID NO: 735269 - DNA, 19 bp, Mus musculus
  siRNA target sequence for 1110018J12Rik (NM_028658.2,589-607).
gaacagaagaatgtcaatt

SEQ ID NO: 735270 - DNA, 19 bp, Mus musculus
  siRNA target sequence for 1110018J12Rik (NM_028658.2,707-725).
gtacaacgctctcaatgtt

SEQ ID NO: 735271 - DNA, 19 bp, Mus musculus
  siRNA target sequence for 1110018J12Rik (NM_028658.2,749-767).
gctgaagatgcgagatata

SEQ ID NO: 735272 - DNA, 19 bp, Mus musculus
  siRNA target sequence for 1110018J12Rik (NM_028658.2,752-770).
gaagatgcgagatatagct

SEQ ID NO: 735273 - DNA, 19 bp, Mus musculus
  siRNA target sequence for 1110018J12Rik (NM_028658.2,818-836).
ctttcacacctatacagaa

SEQ ID NO: 735274 - DNA, 19 bp, Mus musculus
  siRNA target sequence for 1110018J12Rik (NM_028658.2,858-876).
gttgattctgccatagaca

SEQ ID NO: 735275 - DNA, 19 bp, Mus musculus
  siRNA target sequence for 1110018J12Rik (NM_028658.2,885-903).
ccattgaatcagaagttct

SEQ ID NO: 735276 - DNA, 19 bp, Mus musculus
  siRNA target sequence for 1110018J12Rik (NM_028658.2,960-978).
cacttattcgagagcatta

SEQ ID NO: 735277 - DNA, 19 bp, Mus musculus
  siRNA target sequence for 1110018J12Rik (NM_028658.2,962-980).
cttattcgagagcattaca

SEQ ID NO: 735278 - DNA, 19 bp, Mus musculus
  siRNA target sequence for 1110018J12Rik (NM_028658.2,1061-1079).
gaggaagatccttccttat

SEQ ID NO: 735279 - DNA, 19 bp, Mus musculus
  siRNA target sequence for 1110018J12Rik (NM_028658.2,1063-1081).
ggaagatccttccttatca

SEQ ID NO: 735280 - DNA, 19 bp, Mus musculus
  siRNA target sequence for 1110018J12Rik (NM_028658.2,1070-1088).
ccttccttatcagttaaaa

SEQ ID NO: 735281 - DNA, 19 bp, Mus musculus
  siRNA target sequence for 1110018J12Rik (NM_028658.2,1214-1232).
cctcgccttgccaagtaca

SEQ ID NO: 735282 - DNA, 19 bp, Mus musculus
  siRNA target sequence for 1110018J12Rik (NM_028658.2,1242-1260).
ggactccttcgaacaaact

SEQ ID NO: 735283 - DNA, 19 bp, Mus musculus
  siRNA target sequence for 1110018J12Rik (NM_028658.2,1243-1261).
gactccttcgaacaaacta

SEQ ID NO: 735284 - DNA, 19 bp, Mus musculus
  siRNA target sequence for 1110018J12Rik (NM_028658.2,1245-1263).
ctccttcgaacaaactaca

SEQ ID NO: 735285 - DNA, 19 bp, Mus musculus
  siRNA target sequence for 1110018J12Rik (NM_028658.2,1259-1277).
ctacacttccgtcttaaca

SEQ ID NO: 735286 - DNA, 19 bp, Mus musculus
  siRNA target sequence for 1110018J12Rik (NM_028658.2,1262-1280).
cacttccgtcttaacaaat

SEQ ID NO: 735287 - DNA, 19 bp, Mus musculus
  siRNA target sequence for 1110018J12Rik (NM_028658.2,1264-1282).
cttccgtcttaacaaatgt

SEQ ID NO: 735288 - DNA, 19 bp, Mus musculus
  siRNA target sequence for 1110018J12Rik (NM_028658.2,1300-1318).
gatttcatgatgtcatgaa

SEQ ID NO: 735289 - DNA, 19 bp, Mus musculus
  siRNA target sequence for 1110018J12Rik (NM_028658.2,1347-1365).
gcttccatagagcatgaaa

SEQ ID NO: 735290 - DNA, 19 bp, Mus musculus
  siRNA target sequence for 1110018J12Rik (NM_028658.2,1374-1392).
gcaacacagaagctagtaa

SEQ ID NO: 735291 - DNA, 19 bp, Mus musculus
  siRNA target sequence for 1110018J12Rik (NM_028658.2,1443-1461).
ggcaagattgcgtctttct

SEQ ID NO: 735292 - DNA, 19 bp, Mus musculus
  siRNA target sequence for 1110018J12Rik (NM_028658.2,1444-1462).
gcaagattgcgtctttctt

SEQ ID NO: 735293 - DNA, 19 bp, Mus musculus
  siRNA target sequence for 1110018J12Rik (NM_028658.2,1511-1529).
gacagccagcggattcatt

SEQ ID NO: 735294 - DNA, 19 bp, Mus musculus
  siRNA target sequence for 1110018J12Rik (NM_028658.2,1578-1596).
gcctatatgaagtctttga

SEQ ID NO: 735295 - DNA, 19 bp, Mus musculus
  siRNA target sequence for 1110018J12Rik (NM_028658.2,1694-1712).
ggttcagcagagtttggaa

SEQ ID NO: 735296 - DNA, 19 bp, Mus musculus
  siRNA target sequence for 1110018J12Rik (NM_028658.2,1748-1766).
gatgctagaagcacagtta

SEQ ID NO: 735297 - DNA, 19 bp, Mus musculus
  siRNA target sequence for 1110018J12Rik (NM_028658.2,1758-1776).
gcacagttagccaaaatca

SEQ ID NO: 735298 - DNA, 19 bp, Mus musculus
  siRNA target sequence for 1110018J12Rik (NM_028658.2,1931-1949).
cagtctggttgggatgtta

SEQ ID NO: 735299 - DNA, 19 bp, Mus musculus
  siRNA target sequence for 1110018J12Rik (NM_028658.2,1985-2003).
gtcccgtgaagacctaatt

SEQ ID NO: 735300 - DNA, 19 bp, Mus musculus
  siRNA target sequence for 1110018J12Rik (NM_028658.2,1987-2005).
cccgtgaagacctaattaa

SEQ ID NO: 735301 - DNA, 19 bp, Mus musculus
  siRNA target sequence for 1110018J12Rik (NM_028658.2,1989-2007).
cgtgaagacctaattaaga

SEQ ID NO: 735302 - DNA, 19 bp, Mus musculus
  siRNA target sequence for 1110018J12Rik (NM_028658.2,2155-2173).
ggctagccagtcagaacat

SEQ ID NO: 735303 - DNA, 19 bp, Mus musculus
  siRNA target sequence for 1110018J12Rik (NM_028658.2,2306-2324).
ggccagtaaggggaattct

SEQ ID NO: 735304 - DNA, 19 bp, Mus musculus
  siRNA target sequence for 1110018J12Rik (NM_028658.2,2307-2325).
gccagtaaggggaattcta

SEQ ID NO: 735305 - DNA, 19 bp, Mus musculus
  siRNA target sequence for 1110018J12Rik (NM_028658.2,2308-2326).
ccagtaaggggaattctaa

SEQ ID NO: 735306 - DNA, 19 bp, Mus musculus
  siRNA target sequence for 1200009C21Rik (NM_028659.1,347-365).
gatcgaccaggcacatcaa

SEQ ID NO: 735307 - DNA, 19 bp, Mus musculus
  siRNA target sequence for 1200009C21Rik (NM_028659.1,350-368).
cgaccaggcacatcaagaa

SEQ ID NO: 735308 - DNA, 19 bp, Mus musculus
  siRNA target sequence for 1200009C21Rik (NM_028659.1,376-394).
ccatccggcagatcttgta

SEQ ID NO: 735309 - DNA, 19 bp, Mus musculus
  siRNA target sequence for 1200016C12Rik (NM_028660.1,183-201).
gagccacgctcatcaatga

SEQ ID NO: 735310 - DNA, 19 bp, Mus musculus
  siRNA target sequence for 1200016C12Rik (NM_028660.1,187-205).
cacgctcatcaatgatcaa

SEQ ID NO: 735311 - DNA, 19 bp, Mus musculus
  siRNA target sequence for 1200016C12Rik (NM_028660.1,252-270).
gccttggggagcatcatct

SEQ ID NO: 735312 - DNA, 19 bp, Mus musculus
  siRNA target sequence for 1200016C12Rik (NM_028660.1,319-337).
cccccatcctgggttcaat

SEQ ID NO: 735313 - DNA, 19 bp, Mus musculus
  siRNA target sequence for 1200016C12Rik (NM_028660.1,356-374).
gaccacaatgatgatatta

SEQ ID NO: 735314 - DNA, 19 bp, Mus musculus
  siRNA target sequence for 1200016C12Rik (NM_028660.1,456-474).
gcacccagtgccttatctt

SEQ ID NO: 735315 - DNA, 19 bp, Mus musculus
  siRNA target sequence for 1200016C12Rik (NM_028660.1,672-690).
gaaccttggcaggtatagt

SEQ ID NO: 735316 - DNA, 19 bp, Mus musculus
  siRNA target sequence for 1200016C12Rik (NM_028660.1,720-738).
cccggagacccgctgttta

SEQ ID NO: 735317 - DNA, 19 bp, Mus musculus
  siRNA target sequence for 1200016C12Rik (NM_028660.1,722-740).
cggagacccgctgtttaca

SEQ ID NO: 735318 - DNA, 19 bp, Mus musculus
  siRNA target sequence for 1200016C12Rik (NM_028660.1,724-742).
gagacccgctgtttacact

SEQ ID NO: 735319 - DNA, 19 bp, Mus musculus
  siRNA target sequence for 1200016C12Rik (NM_028660.1,726-744).
gacccgctgtttacactaa

SEQ ID NO: 735320 - DNA, 19 bp, Mus musculus
  siRNA target sequence for 1200016C12Rik (NM_028660.1,730-748).
cgctgtttacactaacgtt

SEQ ID NO: 735321 - DNA, 19 bp, Mus musculus
  siRNA target sequence for 1200016C12Rik (NM_028660.1,754-772).
ctacctggagtggattgaa

SEQ ID NO: 735322 - DNA, 19 bp, Mus musculus
  siRNA target sequence for 4933417L02Rik (NM_028665.1,1858-1876).
gtggctaagaggtataaaa

SEQ ID NO: 735323 - DNA, 19 bp, Mus musculus
  siRNA target sequence for 5430432M24Rik (NM_028666.1,625-643).
ctcatcaacttgtgtgata

SEQ ID NO: 735324 - DNA, 19 bp, Mus musculus
  siRNA target sequence for 5430432M24Rik (NM_028666.1,786-804).
cctgctcggccctatccat

SEQ ID NO: 735325 - DNA, 19 bp, Mus musculus
  siRNA target sequence for 4930415G15Rik (NM_028667.1,239-257).
ggaggttagtgctccatta

SEQ ID NO: 735326 - DNA, 19 bp, Mus musculus
  siRNA target sequence for 4930415G15Rik (NM_028667.1,240-258).
gaggttagtgctccattat

SEQ ID NO: 735327 - DNA, 19 bp, Mus musculus
  siRNA target sequence for 4930415G15Rik (NM_028667.1,243-261).
gttagtgctccattattca

SEQ ID NO: 735328 - DNA, 19 bp, Mus musculus
  siRNA target sequence for 4930415G15Rik (NM_028667.1,247-265).
gtgctccattattcaatga

SEQ ID NO: 735329 - DNA, 19 bp, Mus musculus
  siRNA target sequence for 4930415G15Rik (NM_028667.1,302-320).
cagtgaactgtggaattat

SEQ ID NO: 735330 - DNA, 19 bp, Mus musculus
  siRNA target sequence for 4930415G15Rik (NM_028667.1,348-366).
gatacaactaagcagtatt

SEQ ID NO: 735331 - DNA, 19 bp, Mus musculus
  siRNA target sequence for 4930415G15Rik (NM_028667.1,382-400).
gtccgcatggacaacattt

SEQ ID NO: 735332 - DNA, 19 bp, Mus musculus
  siRNA target sequence for 4930415G15Rik (NM_028667.1,385-403).
cgcatggacaacatttagt

SEQ ID NO: 735333 - DNA, 19 bp, Mus musculus
  siRNA target sequence for 4930415G15Rik (NM_028667.1,441-459).
gagctcccattatcattca

SEQ ID NO: 735334 - DNA, 19 bp, Mus musculus
  siRNA target sequence for 4930415G15Rik (NM_028667.1,489-507).
ggtgaagcttatattcctt

SEQ ID NO: 735335 - DNA, 19 bp, Mus musculus
  siRNA target sequence for 4930415G15Rik (NM_028667.1,511-529).
gttatttcccaccaaatgt

SEQ ID NO: 735336 - DNA, 19 bp, Mus musculus
  siRNA target sequence for 4930415G15Rik (NM_028667.1,574-592).
gagtttatgaggcacttta

SEQ ID NO: 735337 - DNA, 19 bp, Mus musculus
  siRNA target sequence for 4930415G15Rik (NM_028667.1,601-619).
cacagcatgagctacaaca

SEQ ID NO: 735338 - DNA, 19 bp, Mus musculus
  siRNA target sequence for 4930415G15Rik (NM_028667.1,633-651).
gacttccatcgtctagaat

SEQ ID NO: 735339 - DNA, 19 bp, Mus musculus
  siRNA target sequence for 4930415G15Rik (NM_028667.1,635-653).
cttccatcgtctagaatat

SEQ ID NO: 735340 - DNA, 19 bp, Mus musculus
  siRNA target sequence for 4930415G15Rik (NM_028667.1,639-657).
catcgtctagaatatttca

SEQ ID NO: 735341 - DNA, 19 bp, Mus musculus
  siRNA target sequence for 4930432H15Rik (NM_028671.1,101-119).
ccagatacgctccaaaatt

SEQ ID NO: 735342 - DNA, 19 bp, Mus musculus
  siRNA target sequence for 4930432H15Rik (NM_028671.1,102-120).
cagatacgctccaaaattt

SEQ ID NO: 735343 - DNA, 19 bp, Mus musculus
  siRNA target sequence for 4930432H15Rik (NM_028671.1,121-139).
ccaacttggcagaggtttt

SEQ ID NO: 735344 - DNA, 19 bp, Mus musculus
  siRNA target sequence for 4930432H15Rik (NM_028671.1,122-140).
caacttggcagaggtttta

SEQ ID NO: 735345 - DNA, 19 bp, Mus musculus
  siRNA target sequence for 4930432H15Rik (NM_028671.1,209-227).
gtagacatcagctacgtta

SEQ ID NO: 735346 - DNA, 19 bp, Mus musculus
  siRNA target sequence for 4930432H15Rik (NM_028671.1,244-262).
cccttcggtcaatggattt

SEQ ID NO: 735347 - DNA, 19 bp, Mus musculus
  siRNA target sequence for 4930432H15Rik (NM_028671.1,313-331).
cggctccccctttctgaat

SEQ ID NO: 735348 - DNA, 19 bp, Mus musculus
  siRNA target sequence for 4930432H15Rik (NM_028671.1,334-352).
gcatggattgctgtttcta

SEQ ID NO: 735349 - DNA, 19 bp, Mus musculus
  siRNA target sequence for 4930432H15Rik (NM_028671.1,372-390).
ctgccaaccggattttcca

SEQ ID NO: 735350 - DNA, 19 bp, Mus musculus
  siRNA target sequence for 4930432H15Rik (NM_028671.1,374-392).
gccaaccggattttccaaa

SEQ ID NO: 735351 - DNA, 19 bp, Mus musculus
  siRNA target sequence for 4930432H15Rik (NM_028671.1,375-393).
ccaaccggattttccaaat

SEQ ID NO: 735352 - DNA, 19 bp, Mus musculus
  siRNA target sequence for 4930432H15Rik (NM_028671.1,381-399).
ggattttccaaatcaaaca

SEQ ID NO: 735353 - DNA, 19 bp, Mus musculus
  siRNA target sequence for 4930432H15Rik (NM_028671.1,407-425).
gggatggatatggcaatta

SEQ ID NO: 735354 - DNA, 19 bp, Mus musculus
  siRNA target sequence for 4930432H15Rik (NM_028671.1,409-427).
gatggatatggcaattaga

SEQ ID NO: 735355 - DNA, 19 bp, Mus musculus
  siRNA target sequence for 4930432H15Rik (NM_028671.1,412-430).
ggatatggcaattagagaa

SEQ ID NO: 735356 - DNA, 19 bp, Mus musculus
  siRNA target sequence for 4930432H15Rik (NM_028671.1,474-492).
ggagtacggaacaatgtct

SEQ ID NO: 735357 - DNA, 19 bp, Mus musculus
  siRNA target sequence for 4930432H15Rik (NM_028671.1,475-493).
gagtacggaacaatgtcta

SEQ ID NO: 735358 - DNA, 19 bp, Mus musculus
  siRNA target sequence for 4930432H15Rik (NM_028671.1,477-495).
gtacggaacaatgtctaaa

SEQ ID NO: 735359 - DNA, 19 bp, Mus musculus
  siRNA target sequence for 4930432H15Rik (NM_028671.1,480-498).
cggaacaatgtctaaatct

SEQ ID NO: 735360 - DNA, 19 bp, Mus musculus
  siRNA target sequence for 4930432H15Rik (NM_028671.1,489-507).
gtctaaatctgaatgacaa

SEQ ID NO: 735361 - DNA, 19 bp, Mus musculus
  siRNA target sequence for 4930432H15Rik (NM_028671.1,515-533).
gtgaagtcatccactatga

SEQ ID NO: 735362 - DNA, 19 bp, Mus musculus
  siRNA target sequence for 4930432H15Rik (NM_028671.1,526-544).
cactatgaggaacatcaat

SEQ ID NO: 735363 - DNA, 19 bp, Mus musculus
  siRNA target sequence for 4930432H15Rik (NM_028671.1,532-550).
gaggaacatcaatccaaat

SEQ ID NO: 735364 - DNA, 19 bp, Mus musculus
  siRNA target sequence for 4930432H15Rik (NM_028671.1,535-553).
gaacatcaatccaaatcca

SEQ ID NO: 735365 - DNA, 19 bp, Mus musculus
  siRNA target sequence for 4930432H15Rik (NM_028671.1,538-556).
catcaatccaaatccattt

SEQ ID NO: 735366 - DNA, 19 bp, Mus musculus
  siRNA target sequence for 4930432H15Rik (NM_028671.1,577-595).
caaaagacctaggaagaat

SEQ ID NO: 735367 - DNA, 19 bp, Mus musculus
  siRNA target sequence for 4930432H15Rik (NM_028671.1,602-620).
cacgaccatctgacctttt

SEQ ID NO: 735368 - DNA, 19 bp, Mus musculus
  siRNA target sequence for 4930430E16Rik (NM_028672.1,417-435).
gtaccaggacaagctaaat

SEQ ID NO: 735369 - DNA, 19 bp, Mus musculus
  siRNA target sequence for 4930430E16Rik (NM_028672.1,421-439).
caggacaagctaaatataa

SEQ ID NO: 735370 - DNA, 19 bp, Mus musculus
  siRNA target sequence for 4930430E16Rik (NM_028672.1,573-591).
cttgtccacaactactgat

SEQ ID NO: 735371 - DNA, 19 bp, Mus musculus
  siRNA target sequence for 4930430E16Rik (NM_028672.1,601-619).
cccgacctagaggaaaaga

SEQ ID NO: 735372 - DNA, 19 bp, Mus musculus
  siRNA target sequence for 4930430E16Rik (NM_028672.1,603-621).
cgacctagaggaaaagact

SEQ ID NO: 735373 - DNA, 19 bp, Mus musculus
  siRNA target sequence for 4930430E16Rik (NM_028672.1,678-696).
cgacttttctgttgaagat

SEQ ID NO: 735374 - DNA, 19 bp, Mus musculus
  siRNA target sequence for 4930430E16Rik (NM_028672.1,686-704).
ctgttgaagattatattca

SEQ ID NO: 735375 - DNA, 19 bp, Mus musculus
  siRNA target sequence for 4930430E16Rik (NM_028672.1,694-712).
gattatattcagtatgact

SEQ ID NO: 735376 - DNA, 19 bp, Mus musculus
  siRNA target sequence for 4930430E16Rik (NM_028672.1,717-735).
ctcccgaacagctaagaaa

SEQ ID NO: 735377 - DNA, 19 bp, Mus musculus
  siRNA target sequence for 4930430E16Rik (NM_028672.1,719-737).
cccgaacagctaagaaaaa

SEQ ID NO: 735378 - DNA, 19 bp, Mus musculus
  siRNA target sequence for 4930430E16Rik (NM_028672.1,720-738).
ccgaacagctaagaaaaaa

SEQ ID NO: 735379 - DNA, 19 bp, Mus musculus
  siRNA target sequence for 4930430E16Rik (NM_028672.1,740-758).
ggaagaaagctaaatcctt

SEQ ID NO: 735380 - DNA, 19 bp, Mus musculus
  siRNA target sequence for 4930430E16Rik (NM_028672.1,775-793).
gtgcctgtaccctttgaaa

SEQ ID NO: 735381 - DNA, 19 bp, Mus musculus
  siRNA target sequence for 4930430E16Rik (NM_028672.1,838-856).
cggtcagatctggaaacaa

SEQ ID NO: 735382 - DNA, 19 bp, Mus musculus
  siRNA target sequence for 4930430E16Rik (NM_028672.1,927-945).
cgtgctccttcccctttat

SEQ ID NO: 735383 - DNA, 19 bp, Mus musculus
  siRNA target sequence for 4930430E16Rik (NM_028672.1,1098-1116).
ggctaaaaggaaaacgaat

SEQ ID NO: 735384 - DNA, 19 bp, Mus musculus
  siRNA target sequence for 4930430E16Rik (NM_028672.1,1128-1146).
caaacctgtgcctcgtttt

SEQ ID NO: 735385 - DNA, 19 bp, Mus musculus
  siRNA target sequence for 4930430E16Rik (NM_028672.1,1135-1153).
gtgcctcgttttatttaca

SEQ ID NO: 735386 - DNA, 19 bp, Mus musculus
  siRNA target sequence for 4930430E16Rik (NM_028672.1,1329-1347).
gaggcgtgatggagactta

SEQ ID NO: 735387 - DNA, 19 bp, Mus musculus
  siRNA target sequence for 4930430E16Rik (NM_028672.1,1331-1349).
ggcgtgatggagacttaga

SEQ ID NO: 735388 - DNA, 19 bp, Mus musculus
  siRNA target sequence for 4930430E16Rik (NM_028672.1,1332-1350).
gcgtgatggagacttagaa

SEQ ID NO: 735389 - DNA, 19 bp, Mus musculus
  siRNA target sequence for 4930430E16Rik (NM_028672.1,1372-1390).
gaatacagctttctgaaat

SEQ ID NO: 735390 - DNA, 19 bp, Mus musculus
  siRNA target sequence for 4930430E16Rik (NM_028672.1,1609-1627).
cgggagcaagccatcagaa

SEQ ID NO: 735391 - DNA, 19 bp, Mus musculus
  siRNA target sequence for 4930430E16Rik (NM_028672.1,1649-1667).
gagaatattggcaagaact

SEQ ID NO: 735392 - DNA, 19 bp, Mus musculus
  siRNA target sequence for 4930430E16Rik (NM_028672.1,1692-1710).
gaagaggccgatgttgttt

SEQ ID NO: 735393 - DNA, 19 bp, Mus musculus
  siRNA target sequence for 4930430E16Rik (NM_028672.1,1695-1713).
gaggccgatgttgtttgaa

SEQ ID NO: 735394 - DNA, 19 bp, Mus musculus
  siRNA target sequence for 4930430E16Rik (NM_028672.1,1698-1716).
gccgatgttgtttgaaaga

SEQ ID NO: 735395 - DNA, 19 bp, Mus musculus
  siRNA target sequence for 4930430E16Rik (NM_028672.1,1715-1733).
gagtcacccaggttgtgtt

SEQ ID NO: 735396 - DNA, 19 bp, Mus musculus
  siRNA target sequence for 4930406E24Rik (NM_028688.1,189-207).
cgtcaagaacacaccttaa

SEQ ID NO: 735397 - DNA, 19 bp, Mus musculus
  siRNA target sequence for 4930406E24Rik (NM_028688.1,286-304).
ccacgcacctcctagcttt

SEQ ID NO: 735398 - DNA, 19 bp, Mus musculus
  siRNA target sequence for 4930406E24Rik (NM_028688.1,369-387).
cacccctcatcccaatctt

SEQ ID NO: 735399 - DNA, 19 bp, Mus musculus
  siRNA target sequence for 4930406E24Rik (NM_028688.1,374-392).
ctcatcccaatcttaccat

SEQ ID NO: 735400 - DNA, 19 bp, Mus musculus
  siRNA target sequence for 4930406E24Rik (NM_028688.1,379-397).
cccaatcttaccatactta

SEQ ID NO: 735401 - DNA, 19 bp, Mus musculus
  siRNA target sequence for 4930406E24Rik (NM_028688.1,380-398).
ccaatcttaccatacttat

SEQ ID NO: 735402 - DNA, 19 bp, Mus musculus
  siRNA target sequence for 4930406E24Rik (NM_028688.1,445-463).
gtgttcccaaaattgagta

SEQ ID NO: 735403 - DNA, 19 bp, Mus musculus
  siRNA target sequence for 5830411E10Rik (NM_028696.1,524-542).
cattaaggccggactgaaa

SEQ ID NO: 735404 - DNA, 19 bp, Mus musculus
  siRNA target sequence for 5830411E10Rik (NM_028696.1,545-563).
cttaaatgtcgtctttatt

SEQ ID NO: 735405 - DNA, 19 bp, Mus musculus
  siRNA target sequence for 5830411E10Rik (NM_028696.1,634-652).
gaacgggaagcatcactat

SEQ ID NO: 735406 - DNA, 19 bp, Mus musculus
  siRNA target sequence for 5830411E10Rik (NM_028696.1,709-727).
ccagagggtatgcatcaat

SEQ ID NO: 735407 - DNA, 19 bp, Mus musculus
  siRNA target sequence for 5830411E10Rik (NM_028696.1,763-781).
gtggtgaacttcaaaaaat

SEQ ID NO: 735408 - DNA, 19 bp, Mus musculus
  siRNA target sequence for 5830411E10Rik (NM_028696.1,825-843).
gagccaaacccagattata

SEQ ID NO: 735409 - DNA, 19 bp, Mus musculus
  siRNA target sequence for 5830411E10Rik (NM_028696.1,827-845).
gccaaacccagattataga

SEQ ID NO: 735410 - DNA, 19 bp, Mus musculus
  siRNA target sequence for 5830411E10Rik (NM_028696.1,854-872).
gaatagaggggtacaaaat

SEQ ID NO: 735411 - DNA, 19 bp, Mus musculus
  siRNA target sequence for 5830411E10Rik (NM_028696.1,859-877).
gaggggtacaaaatgaaca

SEQ ID NO: 735412 - DNA, 19 bp, Mus musculus
  siRNA target sequence for 5830411E10Rik (NM_028696.1,882-900).
gataaactgagcaccaata

SEQ ID NO: 735413 - DNA, 19 bp, Mus musculus
  siRNA target sequence for 5830411E10Rik (NM_028696.1,890-908).
gagcaccaatacatttgga

SEQ ID NO: 735414 - DNA, 19 bp, Mus musculus
  siRNA target sequence for 5830411E10Rik (NM_028696.1,937-955).
ctgaatctaggggatatca

SEQ ID NO: 735415 - DNA, 19 bp, Mus musculus
  siRNA target sequence for 5830411E10Rik (NM_028696.1,947-965).
gggatatcatcttccatat

SEQ ID NO: 735416 - DNA, 19 bp, Mus musculus
  siRNA target sequence for Herc3 (NM_028705.2,188-206).
ccaggtgtgccgctttgta

SEQ ID NO: 735417 - DNA, 19 bp, Mus musculus
  siRNA target sequence for Herc3 (NM_028705.2,189-207).
caggtgtgccgctttgtat

SEQ ID NO: 735418 - DNA, 19 bp, Mus musculus
  siRNA target sequence for Herc3 (NM_028705.2,332-350).
caagccagaacaaattgga

SEQ ID NO: 735419 - DNA, 19 bp, Mus musculus
  siRNA target sequence for Herc3 (NM_028705.2,358-376).
ctgatcagcatatcataca

SEQ ID NO: 735420 - DNA, 19 bp, Mus musculus
  siRNA target sequence for Herc3 (NM_028705.2,416-434).
ccggggtcagctgttttct

SEQ ID NO: 735421 - DNA, 19 bp, Mus musculus
  siRNA target sequence for Herc3 (NM_028705.2,417-435).
cggggtcagctgttttctt

SEQ ID NO: 735422 - DNA, 19 bp, Mus musculus
  siRNA target sequence for Herc3 (NM_028705.2,490-508).
ctgtgcccaggctaatcca

SEQ ID NO: 735423 - DNA, 19 bp, Mus musculus
  siRNA target sequence for Herc3 (NM_028705.2,496-514).
ccaggctaatccagaaact

SEQ ID NO: 735424 - DNA, 19 bp, Mus musculus
  siRNA target sequence for Herc3 (NM_028705.2,521-539).
gcagaccatattacaagtt

SEQ ID NO: 735425 - DNA, 19 bp, Mus musculus
  siRNA target sequence for Herc3 (NM_028705.2,703-721).
caggaggggctcatagctt

SEQ ID NO: 735426 - DNA, 19 bp, Mus musculus
  siRNA target sequence for Herc3 (NM_028705.2,752-770).
ctggggaatgaataatgca

SEQ ID NO: 735427 - DNA, 19 bp, Mus musculus
  siRNA target sequence for Herc3 (NM_028705.2,835-853).
cacagaaagtcgtctatat

SEQ ID NO: 735428 - DNA, 19 bp, Mus musculus
  siRNA target sequence for Herc3 (NM_028705.2,839-857).
gaaagtcgtctatattagt

SEQ ID NO: 735429 - DNA, 19 bp, Mus musculus
  siRNA target sequence for Herc3 (NM_028705.2,986-1004).
gatgggcagtgaagtaact

SEQ ID NO: 735430 - DNA, 19 bp, Mus musculus
  siRNA target sequence for Herc3 (NM_028705.2,1045-1063).
cttcttctggactcatcta

SEQ ID NO: 735431 - DNA, 19 bp, Mus musculus
  siRNA target sequence for Herc3 (NM_028705.2,1056-1074).
ctcatctatgcatttggtt

SEQ ID NO: 735432 - DNA, 19 bp, Mus musculus
  siRNA target sequence for Herc3 (NM_028705.2,1091-1109).
gctgggaaccggacataca

SEQ ID NO: 735433 - DNA, 19 bp, Mus musculus
  siRNA target sequence for Herc3 (NM_028705.2,1099-1117).
ccggacatacatgtaatgt

SEQ ID NO: 735434 - DNA, 19 bp, Mus musculus
  siRNA target sequence for Herc3 (NM_028705.2,1102-1120).
gacatacatgtaatgtcaa

SEQ ID NO: 735435 - DNA, 19 bp, Mus musculus
  siRNA target sequence for Herc3 (NM_028705.2,1200-1218).
gtcgttaagcagatcttct

SEQ ID NO: 735436 - DNA, 19 bp, Mus musculus
  siRNA target sequence for Herc3 (NM_028705.2,1219-1237).
ctggaggggaccagacttt

SEQ ID NO: 735437 - DNA, 19 bp, Mus musculus
  siRNA target sequence for Herc3 (NM_028705.2,1222-1240).
gaggggaccagacttttgt

SEQ ID NO: 735438 - DNA, 19 bp, Mus musculus
  siRNA target sequence for Herc3 (NM_028705.2,1225-1243).
gggaccagacttttgtact

SEQ ID NO: 735439 - DNA, 19 bp, Mus musculus
  siRNA target sequence for Herc3 (NM_028705.2,1227-1245).
gaccagacttttgtacttt

SEQ ID NO: 735440 - DNA, 19 bp, Mus musculus
  siRNA target sequence for Herc3 (NM_028705.2,1247-1265).
ctccacgtatgagaattct

SEQ ID NO: 735441 - DNA, 19 bp, Mus musculus
  siRNA target sequence for Herc3 (NM_028705.2,1290-1308).
gtgaaccaaacacattata

SEQ ID NO: 735442 - DNA, 19 bp, Mus musculus
  siRNA target sequence for Herc3 (NM_028705.2,1300-1318).
cacattataccaacttaat

SEQ ID NO: 735443 - DNA, 19 bp, Mus musculus
  siRNA target sequence for Herc3 (NM_028705.2,1302-1320).
cattataccaacttaataa

SEQ ID NO: 735444 - DNA, 19 bp, Mus musculus
  siRNA target sequence for Herc3 (NM_028705.2,1309-1327).
ccaacttaataaatgatga

SEQ ID NO: 735445 - DNA, 19 bp, Mus musculus
  siRNA target sequence for Herc3 (NM_028705.2,1367-1385).
caacgcaaatactgtcaat

SEQ ID NO: 735446 - DNA, 19 bp, Mus musculus
  siRNA target sequence for Herc3 (NM_028705.2,1386-1404).
ggtgttgttcagatactgt

SEQ ID NO: 735447 - DNA, 19 bp, Mus musculus
  siRNA target sequence for Herc3 (NM_028705.2,1410-1428).
gcagcttgttggaatggaa

SEQ ID NO: 735448 - DNA, 19 bp, Mus musculus
  siRNA target sequence for Herc3 (NM_028705.2,1498-1516).
caactaggattttatttga

SEQ ID NO: 735449 - DNA, 19 bp, Mus musculus
  siRNA target sequence for Herc3 (NM_028705.2,1540-1558).
ccatgattctagaacagat

SEQ ID NO: 735450 - DNA, 19 bp, Mus musculus
  siRNA target sequence for Herc3 (NM_028705.2,1541-1559).
catgattctagaacagata

SEQ ID NO: 735451 - DNA, 19 bp, Mus musculus
  siRNA target sequence for Herc3 (NM_028705.2,1544-1562).
gattctagaacagatatta

SEQ ID NO: 735452 - DNA, 19 bp, Mus musculus
  siRNA target sequence for Herc3 (NM_028705.2,1581-1599).
ctcattccccagttatcaa

SEQ ID NO: 735453 - DNA, 19 bp, Mus musculus
  siRNA target sequence for Herc3 (NM_028705.2,1583-1601).
cattccccagttatcaagt

SEQ ID NO: 735454 - DNA, 19 bp, Mus musculus
  siRNA target sequence for Herc3 (NM_028705.2,1606-1624).
ccccagatgtggaagcaat

SEQ ID NO: 735455 - DNA, 19 bp, Mus musculus
  siRNA target sequence for Herc3 (NM_028705.2,1616-1634).
ggaagcaatgagaatctat

SEQ ID NO: 735456 - DNA, 19 bp, Mus musculus
  siRNA target sequence for Herc3 (NM_028705.2,1617-1635).
gaagcaatgagaatctatt

SEQ ID NO: 735457 - DNA, 19 bp, Mus musculus
  siRNA target sequence for Herc3 (NM_028705.2,1654-1672).
cgctgcttcaggactctaa

SEQ ID NO: 735458 - DNA, 19 bp, Mus musculus
  siRNA target sequence for Herc3 (NM_028705.2,1658-1676).
gcttcaggactctaagtat

SEQ ID NO: 735459 - DNA, 19 bp, Mus musculus
  siRNA target sequence for Herc3 (NM_028705.2,1659-1677).
cttcaggactctaagtatt

SEQ ID NO: 735460 - DNA, 19 bp, Mus musculus
  siRNA target sequence for Herc3 (NM_028705.2,1662-1680).
caggactctaagtattaca

SEQ ID NO: 735461 - DNA, 19 bp, Mus musculus
  siRNA target sequence for Herc3 (NM_028705.2,1664-1682).
ggactctaagtattacata

SEQ ID NO: 735462 - DNA, 19 bp, Mus musculus
  siRNA target sequence for Herc3 (NM_028705.2,1732-1750).
ctagcaaagtattagataa

SEQ ID NO: 735463 - DNA, 19 bp, Mus musculus
  siRNA target sequence for Herc3 (NM_028705.2,1759-1777).
ctcaggcatgccccaaata

SEQ ID NO: 735464 - DNA, 19 bp, Mus musculus
  siRNA target sequence for Herc3 (NM_028705.2,1768-1786).
gccccaaatatttcatgaa

SEQ ID NO: 735465 - DNA, 19 bp, Mus musculus
  siRNA target sequence for Herc3 (NM_028705.2,1787-1805).
gctggtaaccctgtataaa

SEQ ID NO: 735466 - DNA, 19 bp, Mus musculus
  siRNA target sequence for Herc3 (NM_028705.2,1830-1848).
ggaaggaagacattcctaa

SEQ ID NO: 735467 - DNA, 19 bp, Mus musculus
  siRNA target sequence for Herc3 (NM_028705.2,1844-1862).
cctaatcccggtactgttt

SEQ ID NO: 735468 - DNA, 19 bp, Mus musculus
  siRNA target sequence for Herc3 (NM_028705.2,1845-1863).
ctaatcccggtactgttta

SEQ ID NO: 735469 - DNA, 19 bp, Mus musculus
  siRNA target sequence for Herc3 (NM_028705.2,1851-1869).
ccggtactgtttaacaact

SEQ ID NO: 735470 - DNA, 19 bp, Mus musculus
  siRNA target sequence for Herc3 (NM_028705.2,1896-1914).
gagaagttgtacaaggtaa

SEQ ID NO: 735471 - DNA, 19 bp, Mus musculus
  siRNA target sequence for Herc3 (NM_028705.2,1898-1916).
gaagttgtacaaggtaaat

SEQ ID NO: 735472 - DNA, 19 bp, Mus musculus
  siRNA target sequence for Herc3 (NM_028705.2,1901-1919).
gttgtacaaggtaaatctt

SEQ ID NO: 735473 - DNA, 19 bp, Mus musculus
  siRNA target sequence for Herc3 (NM_028705.2,1929-1947).
catgtggaatacgataagt

SEQ ID NO: 735474 - DNA, 19 bp, Mus musculus
  siRNA target sequence for Herc3 (NM_028705.2,1932-1950).
gtggaatacgataagtttt

SEQ ID NO: 735475 - DNA, 19 bp, Mus musculus
  siRNA target sequence for Herc3 (NM_028705.2,1946-1964).
gttttatatccctgagatt

SEQ ID NO: 735476 - DNA, 19 bp, Mus musculus
  siRNA target sequence for Herc3 (NM_028705.2,2116-2134).
ctgatgccgagttacagat

SEQ ID NO: 735477 - DNA, 19 bp, Mus musculus
  siRNA target sequence for Herc3 (NM_028705.2,2152-2170).
gagccaacctgcagaatgt

SEQ ID NO: 735478 - DNA, 19 bp, Mus musculus
  siRNA target sequence for Herc3 (NM_028705.2,2347-2365).
gtgttacgaaggagttctt

SEQ ID NO: 735479 - DNA, 19 bp, Mus musculus
  siRNA target sequence for Herc3 (NM_028705.2,2357-2375).
ggagttctttcttttgcta

SEQ ID NO: 735480 - DNA, 19 bp, Mus musculus
  siRNA target sequence for Herc3 (NM_028705.2,2394-2412).
cccatttatgggatgttta

SEQ ID NO: 735481 - DNA, 19 bp, Mus musculus
  siRNA target sequence for Herc3 (NM_028705.2,2404-2422).
ggatgtttacctactatca

SEQ ID NO: 735482 - DNA, 19 bp, Mus musculus
  siRNA target sequence for Herc3 (NM_028705.2,2405-2423).
gatgtttacctactatcaa

SEQ ID NO: 735483 - DNA, 19 bp, Mus musculus
  siRNA target sequence for Herc3 (NM_028705.2,2413-2431).
cctactatcaagattcaaa

SEQ ID NO: 735484 - DNA, 19 bp, Mus musculus
  siRNA target sequence for Herc3 (NM_028705.2,2463-2481).
gagcacaactggtttcact

SEQ ID NO: 735485 - DNA, 19 bp, Mus musculus
  siRNA target sequence for Herc3 (NM_028705.2,2468-2486).
caactggtttcacttgatt

SEQ ID NO: 735486 - DNA, 19 bp, Mus musculus
  siRNA target sequence for Herc3 (NM_028705.2,2489-2507).
cataacctgtggattagct

SEQ ID NO: 735487 - DNA, 19 bp, Mus musculus
  siRNA target sequence for Herc3 (NM_028705.2,2497-2515).
gtggattagctatctacaa

SEQ ID NO: 735488 - DNA, 19 bp, Mus musculus
  siRNA target sequence for Herc3 (NM_028705.2,2541-2559).
ccgttggctctctacaaga

SEQ ID NO: 735489 - DNA, 19 bp, Mus musculus
  siRNA target sequence for Herc3 (NM_028705.2,2542-2560).
cgttggctctctacaagaa

SEQ ID NO: 735490 - DNA, 19 bp, Mus musculus
  siRNA target sequence for Herc3 (NM_028705.2,2686-2704).
cggtgtgccgagaaagcta

SEQ ID NO: 735491 - DNA, 19 bp, Mus musculus
  siRNA target sequence for Herc3 (NM_028705.2,2687-2705).
ggtgtgccgagaaagctat

SEQ ID NO: 735492 - DNA, 19 bp, Mus musculus
  siRNA target sequence for Herc3 (NM_028705.2,2701-2719).
gctatggggtgatagaaca

SEQ ID NO: 735493 - DNA, 19 bp, Mus musculus
  siRNA target sequence for Herc3 (NM_028705.2,2780-2798).
cgtggacgcttatgtgaat

SEQ ID NO: 735494 - DNA, 19 bp, Mus musculus
  siRNA target sequence for Herc3 (NM_028705.2,2781-2799).
gtggacgcttatgtgaatt

SEQ ID NO: 735495 - DNA, 19 bp, Mus musculus
  siRNA target sequence for Herc3 (NM_028705.2,2784-2802).
gacgcttatgtgaattaca

SEQ ID NO: 735496 - DNA, 19 bp, Mus musculus
  siRNA target sequence for Herc3 (NM_028705.2,2963-2981).
ctacaggggtgattattca

SEQ ID NO: 735497 - DNA, 19 bp, Mus musculus
  siRNA target sequence for Herc3 (NM_028705.2,3094-3112).
gcatggccagtcttcagat

SEQ ID NO: 735498 - DNA, 19 bp, Mus musculus
  siRNA target sequence for Herc3 (NM_028705.2,3163-3181).
cctgctacaaccttcttga

SEQ ID NO: 735499 - DNA, 19 bp, Mus musculus
  siRNA target sequence for Herc3 (NM_028705.2,3226-3244).
cccaggccctcgacaacta

SEQ ID NO: 735500 - DNA, 19 bp, Mus musculus
  siRNA target sequence for Herc3 (NM_028705.2,3227-3245).
ccaggccctcgacaactat

SEQ ID NO: 735501 - DNA, 19 bp, Mus musculus
  siRNA target sequence for Herc3 (NM_028705.2,3237-3255).
gacaactatgagggtttta

SEQ ID NO: 735502 - DNA, 19 bp, Mus musculus
  siRNA target sequence for Herc3 (NM_028705.2,3239-3257).
caactatgagggttttagt

SEQ ID NO: 735503 - DNA, 19 bp, Mus musculus
  siRNA target sequence for 6330404E20Rik (NM_028707.2,562-580).
gtgccacttttgagaagat

SEQ ID NO: 735504 - DNA, 19 bp, Mus musculus
  siRNA target sequence for 6330404E20Rik (NM_028707.2,565-583).
ccacttttgagaagattct

SEQ ID NO: 735505 - DNA, 19 bp, Mus musculus
  siRNA target sequence for 6330404E20Rik (NM_028707.2,619-637).
gcctggactctttagatgt

SEQ ID NO: 735506 - DNA, 19 bp, Mus musculus
  siRNA target sequence for 6330404E20Rik (NM_028707.2,816-834).
ctgaggcggtccatctcta

SEQ ID NO: 735507 - DNA, 19 bp, Mus musculus
  siRNA target sequence for 6330404E20Rik (NM_028707.2,838-856).
gccgctcagagaatgtctt

SEQ ID NO: 735508 - DNA, 19 bp, Mus musculus
  siRNA target sequence for 6330404E20Rik (NM_028707.2,1191-1209).
ggggagtacctcagtttct

SEQ ID NO: 735509 - DNA, 19 bp, Mus musculus
  siRNA target sequence for 6330404E20Rik (NM_028707.2,1192-1210).
gggagtacctcagtttctt

SEQ ID NO: 735510 - DNA, 19 bp, Mus musculus
  siRNA target sequence for 6330404E20Rik (NM_028707.2,1318-1336).
gccggtactgccagtgtaa

SEQ ID NO: 735511 - DNA, 19 bp, Mus musculus
  siRNA target sequence for 6330404E20Rik (NM_028707.2,1439-1457).
gtcctgccagcaattcatt

SEQ ID NO: 735512 - DNA, 19 bp, Mus musculus
  siRNA target sequence for 6330404E20Rik (NM_028707.2,1759-1777).
ggcgtggctggaagaaatt

SEQ ID NO: 735513 - DNA, 19 bp, Mus musculus
  siRNA target sequence for 6330404E20Rik (NM_028707.2,1761-1779).
cgtggctggaagaaattct

SEQ ID NO: 735514 - DNA, 19 bp, Mus musculus
  siRNA target sequence for 6330404E20Rik (NM_028707.2,1762-1780).
gtggctggaagaaattcta

SEQ ID NO: 735515 - DNA, 19 bp, Mus musculus
  siRNA target sequence for 6330404E20Rik (NM_028707.2,1897-1915).
gggcttctgactacagtaa

SEQ ID NO: 735516 - DNA, 19 bp, Mus musculus
  siRNA target sequence for 6330404E20Rik (NM_028707.2,2016-2034).
ctagtagccgccatcttct

SEQ ID NO: 735517 - DNA, 19 bp, Mus musculus
  siRNA target sequence for 6330404E20Rik (NM_028707.2,2129-2147).
gctgcggtctcatgagaat

SEQ ID NO: 735518 - DNA, 19 bp, Mus musculus
  siRNA target sequence for 6330404E20Rik (NM_028707.2,2133-2151).
cggtctcatgagaataagt

SEQ ID NO: 735519 - DNA, 19 bp, Mus musculus
  siRNA target sequence for 6330404E20Rik (NM_028707.2,2234-2252).
ccgtctgaaggaacactat

SEQ ID NO: 735520 - DNA, 19 bp, Mus musculus
  siRNA target sequence for 6330404E20Rik (NM_028707.2,2236-2254).
gtctgaaggaacactatct

SEQ ID NO: 735521 - DNA, 19 bp, Mus musculus
  siRNA target sequence for 6330404E20Rik (NM_028707.2,2262-2280).
gagaaaagccgttatgaga

SEQ ID NO: 735522 - DNA, 19 bp, Mus musculus
  siRNA target sequence for 6330404E20Rik (NM_028707.2,2269-2287).
gccgttatgagacctatat

SEQ ID NO: 735523 - DNA, 19 bp, Mus musculus
  siRNA target sequence for 6330404E20Rik (NM_028707.2,2270-2288).
ccgttatgagacctatatt

SEQ ID NO: 735524 - DNA, 19 bp, Mus musculus
  siRNA target sequence for 6330404E20Rik (NM_028707.2,2272-2290).
gttatgagacctatattca

SEQ ID NO: 735525 - DNA, 19 bp, Mus musculus
  siRNA target sequence for 6330404E20Rik (NM_028707.2,2289-2307).
cacctcctggccgtgaaaa

SEQ ID NO: 735526 - DNA, 19 bp, Mus musculus
  siRNA target sequence for 6330404E20Rik (NM_028707.2,2342-2360).
ggcacggctggctactata

SEQ ID NO: 735527 - DNA, 19 bp, Mus musculus
  siRNA target sequence for 6330404E20Rik (NM_028707.2,2344-2362).
cacggctggctactataga

SEQ ID NO: 735528 - DNA, 19 bp, Mus musculus
  siRNA target sequence for 6330404E20Rik (NM_028707.2,2372-2390).
cccagctctccggaaaaca

SEQ ID NO: 735529 - DNA, 19 bp, Mus musculus
  siRNA target sequence for Als2 (NM_028717.2,237-255).
gggtggaaagacagttctt

SEQ ID NO: 735530 - DNA, 19 bp, Mus musculus
  siRNA target sequence for Als2 (NM_028717.2,239-257).
gtggaaagacagttcttca

SEQ ID NO: 735531 - DNA, 19 bp, Mus musculus
  siRNA target sequence for Als2 (NM_028717.2,359-377).
caagcagcccccttctaga

SEQ ID NO: 735532 - DNA, 19 bp, Mus musculus
  siRNA target sequence for Als2 (NM_028717.2,363-381).
cagcccccttctagaaagt

SEQ ID NO: 735533 - DNA, 19 bp, Mus musculus
  siRNA target sequence for Als2 (NM_028717.2,383-401).
ccctggttgggcatcatgt

SEQ ID NO: 735534 - DNA, 19 bp, Mus musculus
  siRNA target sequence for Als2 (NM_028717.2,384-402).
cctggttgggcatcatgtt

SEQ ID NO: 735535 - DNA, 19 bp, Mus musculus
  siRNA target sequence for Als2 (NM_028717.2,388-406).
gttgggcatcatgttatta

SEQ ID NO: 735536 - DNA, 19 bp, Mus musculus
  siRNA target sequence for Als2 (NM_028717.2,392-410).
ggcatcatgttattactgt

SEQ ID NO: 735537 - DNA, 19 bp, Mus musculus
  siRNA target sequence for Als2 (NM_028717.2,485-503).
ggcagtgtgcggtagctaa

SEQ ID NO: 735538 - DNA, 19 bp, Mus musculus
  siRNA target sequence for Als2 (NM_028717.2,523-541).
ccgagtcctgtcagcattt

SEQ ID NO: 735539 - DNA, 19 bp, Mus musculus
  siRNA target sequence for Als2 (NM_028717.2,549-567).
ggagaccagcccgtcatta

SEQ ID NO: 735540 - DNA, 19 bp, Mus musculus
  siRNA target sequence for Als2 (NM_028717.2,560-578).
cgtcattagcagttaggat

SEQ ID NO: 735541 - DNA, 19 bp, Mus musculus
  siRNA target sequence for Als2 (NM_028717.2,561-579).
gtcattagcagttaggatt

SEQ ID NO: 735542 - DNA, 19 bp, Mus musculus
  siRNA target sequence for Als2 (NM_028717.2,569-587).
cagttaggattctgcaatt

SEQ ID NO: 735543 - DNA, 19 bp, Mus musculus
  siRNA target sequence for Als2 (NM_028717.2,855-873).
caaagaggaccatgtgata

SEQ ID NO: 735544 - DNA, 19 bp, Mus musculus
  siRNA target sequence for Als2 (NM_028717.2,859-877).
gaggaccatgtgataatat

SEQ ID NO: 735545 - DNA, 19 bp, Mus musculus
  siRNA target sequence for Als2 (NM_028717.2,885-903).
ccattgctgccctttaggt

SEQ ID NO: 735546 - DNA, 19 bp, Mus musculus
  siRNA target sequence for Als2 (NM_028717.2,1431-1449).
cccagaaagtctgaaagat

SEQ ID NO: 735547 - DNA, 19 bp, Mus musculus
  siRNA target sequence for Als2 (NM_028717.2,1576-1594).
gtttcccccaggctcttaa

SEQ ID NO: 735548 - DNA, 19 bp, Mus musculus
  siRNA target sequence for Als2 (NM_028717.2,1580-1598).
cccccaggctcttaaggaa

SEQ ID NO: 735549 - DNA, 19 bp, Mus musculus
  siRNA target sequence for Als2 (NM_028717.2,1821-1839).
cgcactcactgcgaaatct

SEQ ID NO: 735550 - DNA, 19 bp, Mus musculus
  siRNA target sequence for Als2 (NM_028717.2,1831-1849).
gcgaaatctcaggtttact

SEQ ID NO: 735551 - DNA, 19 bp, Mus musculus
  siRNA target sequence for Als2 (NM_028717.2,1850-1868).
catggggcagtaatacctt

SEQ ID NO: 735552 - DNA, 19 bp, Mus musculus
  siRNA target sequence for Als2 (NM_028717.2,1871-1889).
gtcagcttgggcattctga

SEQ ID NO: 735553 - DNA, 19 bp, Mus musculus
  siRNA target sequence for Als2 (NM_028717.2,1901-1919).
cggttcctcgactctcaaa

SEQ ID NO: 735554 - DNA, 19 bp, Mus musculus
  siRNA target sequence for Als2 (NM_028717.2,1906-1924).
cctcgactctcaaaggtta

SEQ ID NO: 735555 - DNA, 19 bp, Mus musculus
  siRNA target sequence for Als2 (NM_028717.2,1916-1934).
caaaggttagcagtgaaaa

SEQ ID NO: 735556 - DNA, 19 bp, Mus musculus
  siRNA target sequence for Als2 (NM_028717.2,1954-1972).
gcaggccaagattattcct

SEQ ID NO: 735557 - DNA, 19 bp, Mus musculus
  siRNA target sequence for Als2 (NM_028717.2,1955-1973).
caggccaagattattcctt

SEQ ID NO: 735558 - DNA, 19 bp, Mus musculus
  siRNA target sequence for Als2 (NM_028717.2,1995-2013).
cttccagcctgggttgtat

SEQ ID NO: 735559 - DNA, 19 bp, Mus musculus
  siRNA target sequence for Als2 (NM_028717.2,2083-2101).
gtacttctctcctgtagta

SEQ ID NO: 735560 - DNA, 19 bp, Mus musculus
  siRNA target sequence for Als2 (NM_028717.2,2093-2111).
cctgtagtaagcttggata

SEQ ID NO: 735561 - DNA, 19 bp, Mus musculus
  siRNA target sequence for Als2 (NM_028717.2,2096-2114).
gtagtaagcttggatacat

SEQ ID NO: 735562 - DNA, 19 bp, Mus musculus
  siRNA target sequence for Als2 (NM_028717.2,2122-2140).
gtaacagcaggaaaagata

SEQ ID NO: 735563 - DNA, 19 bp, Mus musculus
  siRNA target sequence for Als2 (NM_028717.2,2225-2243).
caaaactgagcgaaatcaa

SEQ ID NO: 735564 - DNA, 19 bp, Mus musculus
  siRNA target sequence for Als2 (NM_028717.2,2235-2253).
cgaaatcaaatcacagata

SEQ ID NO: 735565 - DNA, 19 bp, Mus musculus
  siRNA target sequence for Als2 (NM_028717.2,2326-2344).
cggttcagcaagttgtgtt

SEQ ID NO: 735566 - DNA, 19 bp, Mus musculus
  siRNA target sequence for Als2 (NM_028717.2,2327-2345).
ggttcagcaagttgtgtta

SEQ ID NO: 735567 - DNA, 19 bp, Mus musculus
  siRNA target sequence for Als2 (NM_028717.2,2356-2374).
cagcatggagcctcactaa

SEQ ID NO: 735568 - DNA, 19 bp, Mus musculus
  siRNA target sequence for Als2 (NM_028717.2,2418-2436).
catgaagcactcaagtctt

SEQ ID NO: 735569 - DNA, 19 bp, Mus musculus
  siRNA target sequence for Als2 (NM_028717.2,2455-2473).
gagtactgcacatcagttt

SEQ ID NO: 735570 - DNA, 19 bp, Mus musculus
  siRNA target sequence for Als2 (NM_028717.2,2457-2475).
gtactgcacatcagtttca

SEQ ID NO: 735571 - DNA, 19 bp, Mus musculus
  siRNA target sequence for Als2 (NM_028717.2,2460-2478).
ctgcacatcagtttcaaat

SEQ ID NO: 735572 - DNA, 19 bp, Mus musculus
  siRNA target sequence for Als2 (NM_028717.2,2462-2480).
gcacatcagtttcaaattt

SEQ ID NO: 735573 - DNA, 19 bp, Mus musculus
  siRNA target sequence for Als2 (NM_028717.2,2515-2533).
cctgccattgatttcctaa

SEQ ID NO: 735574 - DNA, 19 bp, Mus musculus
  siRNA target sequence for Als2 (NM_028717.2,2516-2534).
ctgccattgatttcctaaa

SEQ ID NO: 735575 - DNA, 19 bp, Mus musculus
  siRNA target sequence for Als2 (NM_028717.2,2542-2560).
caagaactcttgcaagatt

SEQ ID NO: 735576 - DNA, 19 bp, Mus musculus
  siRNA target sequence for Als2 (NM_028717.2,2545-2563).
gaactcttgcaagatttgt

SEQ ID NO: 735577 - DNA, 19 bp, Mus musculus
  siRNA target sequence for Als2 (NM_028717.2,2622-2640).
gccaatcagacgacttcat

SEQ ID NO: 735578 - DNA, 19 bp, Mus musculus
  siRNA target sequence for Als2 (NM_028717.2,2628-2646).
cagacgacttcataattat

SEQ ID NO: 735579 - DNA, 19 bp, Mus musculus
  siRNA target sequence for Als2 (NM_028717.2,2632-2650).
cgacttcataattatgcaa

SEQ ID NO: 735580 - DNA, 19 bp, Mus musculus
  siRNA target sequence for Als2 (NM_028717.2,2685-2703).
gacatctccagagtatcaa

SEQ ID NO: 735581 - DNA, 19 bp, Mus musculus
  siRNA target sequence for Als2 (NM_028717.2,2889-2907).
cggcaggttttctgtgaat

SEQ ID NO: 735582 - DNA, 19 bp, Mus musculus
  siRNA target sequence for Als2 (NM_028717.2,2894-2912).
ggttttctgtgaattggtt

SEQ ID NO: 735583 - DNA, 19 bp, Mus musculus
  siRNA target sequence for Als2 (NM_028717.2,2902-2920).
gtgaattggttcattctct

SEQ ID NO: 735584 - DNA, 19 bp, Mus musculus
  siRNA target sequence for Als2 (NM_028717.2,3011-3029).
gtagcgtgaatggcttaaa

SEQ ID NO: 735585 - DNA, 19 bp, Mus musculus
  siRNA target sequence for Als2 (NM_028717.2,3014-3032).
gcgtgaatggcttaaagat

SEQ ID NO: 735586 - DNA, 19 bp, Mus musculus
  siRNA target sequence for Als2 (NM_028717.2,3018-3036).
gaatggcttaaagataact

SEQ ID NO: 735587 - DNA, 19 bp, Mus musculus
  siRNA target sequence for Als2 (NM_028717.2,3030-3048).
gataactacacctgaagaa

SEQ ID NO: 735588 - DNA, 19 bp, Mus musculus
  siRNA target sequence for Als2 (NM_028717.2,3046-3064).
gaacaattcacactcattt

SEQ ID NO: 735589 - DNA, 19 bp, Mus musculus
  siRNA target sequence for Als2 (NM_028717.2,3137-3155).
cgtccgatttcccacttta

SEQ ID NO: 735590 - DNA, 19 bp, Mus musculus
  siRNA target sequence for Als2 (NM_028717.2,3184-3202).
gaaccacccatctcaagaa

SEQ ID NO: 735591 - DNA, 19 bp, Mus musculus
  siRNA target sequence for Als2 (NM_028717.2,3200-3218).
gaagtgccaaatacacttt

SEQ ID NO: 735592 - DNA, 19 bp, Mus musculus
  siRNA target sequence for Als2 (NM_028717.2,3478-3496).
ggctgctttcaagataaca

SEQ ID NO: 735593 - DNA, 19 bp, Mus musculus
  siRNA target sequence for Als2 (NM_028717.2,3542-3560).
cttctcctagcatgttcat

SEQ ID NO: 735594 - DNA, 19 bp, Mus musculus
  siRNA target sequence for Als2 (NM_028717.2,3562-3580).
ggccagtgggtaatggata

SEQ ID NO: 735595 - DNA, 19 bp, Mus musculus
  siRNA target sequence for Als2 (NM_028717.2,3567-3585).
gtgggtaatggataagaaa

SEQ ID NO: 735596 - DNA, 19 bp, Mus musculus
  siRNA target sequence for Als2 (NM_028717.2,3576-3594).
ggataagaaagcaggatat

SEQ ID NO: 735597 - DNA, 19 bp, Mus musculus
  siRNA target sequence for Als2 (NM_028717.2,3587-3605).
caggatatggcgtctttga

SEQ ID NO: 735598 - DNA, 19 bp, Mus musculus
  siRNA target sequence for Als2 (NM_028717.2,3590-3608).
gatatggcgtctttgatga

SEQ ID NO: 735599 - DNA, 19 bp, Mus musculus
  siRNA target sequence for Als2 (NM_028717.2,3595-3613).
ggcgtctttgatgatatca

SEQ ID NO: 735600 - DNA, 19 bp, Mus musculus
  siRNA target sequence for Als2 (NM_028717.2,3704-3722).
gcaacttccacctgaataa

SEQ ID NO: 735601 - DNA, 19 bp, Mus musculus
  siRNA target sequence for Als2 (NM_028717.2,3738-3756).
ggttttgctttctgaagat

SEQ ID NO: 735602 - DNA, 19 bp, Mus musculus
  siRNA target sequence for Als2 (NM_028717.2,3783-3801).
cgatgactggacacttagt

SEQ ID NO: 735603 - DNA, 19 bp, Mus musculus
  siRNA target sequence for Als2 (NM_028717.2,3803-3821).
gaaagggaacgctgactat

SEQ ID NO: 735604 - DNA, 19 bp, Mus musculus
  siRNA target sequence for Als2 (NM_028717.2,3818-3836).
ctatgccacatggagatta

SEQ ID NO: 735605 - DNA, 19 bp, Mus musculus
  siRNA target sequence for Als2 (NM_028717.2,3882-3900).
cactgggacctacttcaaa

SEQ ID NO: 735606 - DNA, 19 bp, Mus musculus
  siRNA target sequence for Als2 (NM_028717.2,3886-3904).
gggacctacttcaaaccta

SEQ ID NO: 735607 - DNA, 19 bp, Mus musculus
  siRNA target sequence for Als2 (NM_028717.2,3964-3982).
gtggcagcagacgagaaat

SEQ ID NO: 735608 - DNA, 19 bp, Mus musculus
  siRNA target sequence for Als2 (NM_028717.2,3967-3985).
gcagcagacgagaaatgga

SEQ ID NO: 735609 - DNA, 19 bp, Mus musculus
  siRNA target sequence for Als2 (NM_028717.2,4035-4053).
ccaaggggaggtttggaaa

SEQ ID NO: 735610 - DNA, 19 bp, Mus musculus
  siRNA target sequence for Als2 (NM_028717.2,4039-4057).
ggggaggtttggaaagcat

SEQ ID NO: 735611 - DNA, 19 bp, Mus musculus
  siRNA target sequence for Als2 (NM_028717.2,4085-4103).
cgaaccgtcgccagcataa

SEQ ID NO: 735612 - DNA, 19 bp, Mus musculus
  siRNA target sequence for Als2 (NM_028717.2,4086-4104).
gaaccgtcgccagcataaa

SEQ ID NO: 735613 - DNA, 19 bp, Mus musculus
  siRNA target sequence for Als2 (NM_028717.2,4136-4154).
ctcagaccctggagagttt

SEQ ID NO: 735614 - DNA, 19 bp, Mus musculus
  siRNA target sequence for Als2 (NM_028717.2,4272-4290).
cctggttgcggtgtataga

SEQ ID NO: 735615 - DNA, 19 bp, Mus musculus
  siRNA target sequence for Als2 (NM_028717.2,4273-4291).
ctggttgcggtgtatagaa

SEQ ID NO: 735616 - DNA, 19 bp, Mus musculus
  siRNA target sequence for Als2 (NM_028717.2,4280-4298).
cggtgtatagaatgacata

SEQ ID NO: 735617 - DNA, 19 bp, Mus musculus
  siRNA target sequence for Als2 (NM_028717.2,4499-4517).
cagaaccaggttatgtagt

SEQ ID NO: 735618 - DNA, 19 bp, Mus musculus
  siRNA target sequence for Als2 (NM_028717.2,4501-4519).
gaaccaggttatgtagtaa

SEQ ID NO: 735619 - DNA, 19 bp, Mus musculus
  siRNA target sequence for Als2 (NM_028717.2,4504-4522).
ccaggttatgtagtaacaa

SEQ ID NO: 735620 - DNA, 19 bp, Mus musculus
  siRNA target sequence for Als2 (NM_028717.2,4507-4525).
ggttatgtagtaacaagtt

SEQ ID NO: 735621 - DNA, 19 bp, Mus musculus
  siRNA target sequence for Als2 (NM_028717.2,4667-4685).
gcttccttggagtacagaa

SEQ ID NO: 735622 - DNA, 19 bp, Mus musculus
  siRNA target sequence for Als2 (NM_028717.2,4709-4727).
caatccttggagagagtaa

SEQ ID NO: 735623 - DNA, 19 bp, Mus musculus
  siRNA target sequence for Als2 (NM_028717.2,4734-4752).
gttgtcaaccacaaaggat

SEQ ID NO: 735624 - DNA, 19 bp, Mus musculus
  siRNA target sequence for Als2 (NM_028717.2,4758-4776).
ctttgcatctgcagtagaa

SEQ ID NO: 735625 - DNA, 19 bp, Mus musculus
  siRNA target sequence for Als2 (NM_028717.2,4783-4801).
cagcagatcagcacaacat

SEQ ID NO: 735626 - DNA, 19 bp, Mus musculus
  siRNA target sequence for Als2 (NM_028717.2,4805-4823).
ctccatcagacaagcttaa

SEQ ID NO: 735627 - DNA, 19 bp, Mus musculus
  siRNA target sequence for Als2 (NM_028717.2,4808-4826).
catcagacaagcttaaagt

SEQ ID NO: 735628 - DNA, 19 bp, Mus musculus
  siRNA target sequence for Als2 (NM_028717.2,4892-4910).
ggtccatggatgacttgtt

SEQ ID NO: 735629 - DNA, 19 bp, Mus musculus
  siRNA target sequence for Als2 (NM_028717.2,4905-4923).
cttgttccccgtcttctta

SEQ ID NO: 735630 - DNA, 19 bp, Mus musculus
  siRNA target sequence for Als2 (NM_028717.2,4961-4979).
ctgaagttcacctcattga

SEQ ID NO: 735631 - DNA, 19 bp, Mus musculus
  siRNA target sequence for Als2 (NM_028717.2,5033-5051).
ccttgaaggcctgttactt

SEQ ID NO: 735632 - DNA, 19 bp, Mus musculus
  siRNA target sequence for 4121402D02Rik (NM_028722.1,1069-1087).
ctgaagtccgagagagata

SEQ ID NO: 735633 - DNA, 19 bp, Mus musculus
  siRNA target sequence for 4121402D02Rik (NM_028722.1,1089-1107).
gctccttgctcggattgaa

SEQ ID NO: 735634 - DNA, 19 bp, Mus musculus
  siRNA target sequence for 4121402D02Rik (NM_028722.1,1099-1117).
cggattgaacgtatggaaa

SEQ ID NO: 735635 - DNA, 19 bp, Mus musculus
  siRNA target sequence for 4121402D02Rik (NM_028722.1,1202-1220).
cagagttgtctgagaaaat

SEQ ID NO: 735636 - DNA, 19 bp, Mus musculus
  siRNA target sequence for 4121402D02Rik (NM_028722.1,1314-1332).
gaaaaccccatttggaaat

SEQ ID NO: 735637 - DNA, 19 bp, Mus musculus
  siRNA target sequence for 4121402D02Rik (NM_028722.1,1319-1337).
ccccatttggaaatacaga

SEQ ID NO: 735638 - DNA, 19 bp, Mus musculus
  siRNA target sequence for 4121402D02Rik (NM_028722.1,1320-1338).
cccatttggaaatacagaa

SEQ ID NO: 735639 - DNA, 19 bp, Mus musculus
  siRNA target sequence for 4121402D02Rik (NM_028722.1,1397-1415).
ctaagcactctcccattaa

SEQ ID NO: 735640 - DNA, 19 bp, Mus musculus
  siRNA target sequence for 4121402D02Rik (NM_028722.1,1420-1438).
gaaccctgtggttccatat

SEQ ID NO: 735641 - DNA, 19 bp, Mus musculus
  siRNA target sequence for 4121402D02Rik (NM_028722.1,1430-1448).
gttccatatcagaaactgt

SEQ ID NO: 735642 - DNA, 19 bp, Mus musculus
  siRNA target sequence for 4121402D02Rik (NM_028722.1,1445-1463).
ctgtttgtaaacgtgaatt

SEQ ID NO: 735643 - DNA, 19 bp, Mus musculus
  siRNA target sequence for 4121402D02Rik (NM_028722.1,1640-1658).
ccccatcaccgttaccatt

SEQ ID NO: 735644 - DNA, 19 bp, Mus musculus
  siRNA target sequence for 4121402D02Rik (NM_028722.1,1777-1795).
ctaagggacccaaatcctt

SEQ ID NO: 735645 - DNA, 19 bp, Mus musculus
  siRNA target sequence for 4121402D02Rik (NM_028722.1,1871-1889).
gaaaacgatgggatattca

SEQ ID NO: 735646 - DNA, 19 bp, Mus musculus
  siRNA target sequence for 4121402D02Rik (NM_028722.1,1893-1911).
gatcagggaacaaagaatt

SEQ ID NO: 735647 - DNA, 19 bp, Mus musculus
  siRNA target sequence for 4121402D02Rik (NM_028722.1,1918-1936).
cgactgcagctcagaatgt

SEQ ID NO: 735648 - DNA, 19 bp, Mus musculus
  siRNA target sequence for 4121402D02Rik (NM_028722.1,1923-1941).
gcagctcagaatgtataaa

SEQ ID NO: 735649 - DNA, 19 bp, Mus musculus
  siRNA target sequence for 4121402D02Rik (NM_028722.1,1927-1945).
ctcagaatgtataaaaaga

SEQ ID NO: 735650 - DNA, 19 bp, Mus musculus
  siRNA target sequence for 4121402D02Rik (NM_028722.1,1965-1983).
gcctgaggttacctcattt

SEQ ID NO: 735651 - DNA, 19 bp, Mus musculus
  siRNA target sequence for 4121402D02Rik (NM_028722.1,1966-1984).
cctgaggttacctcatttt

SEQ ID NO: 735652 - DNA, 19 bp, Mus musculus
  siRNA target sequence for 4121402D02Rik (NM_028722.1,2047-2065).
ggacggccattgccaaaat

SEQ ID NO: 735653 - DNA, 19 bp, Mus musculus
  siRNA target sequence for 4121402D02Rik (NM_028722.1,2048-2066).
gacggccattgccaaaatt

SEQ ID NO: 735654 - DNA, 19 bp, Mus musculus
  siRNA target sequence for 4121402D02Rik (NM_028722.1,2052-2070).
gccattgccaaaattagct

SEQ ID NO: 735655 - DNA, 19 bp, Mus musculus
  siRNA target sequence for Rin2 (NM_028724.2,463-481).
cgagactctggctatgaca

SEQ ID NO: 735656 - DNA, 19 bp, Mus musculus
  siRNA target sequence for Rin2 (NM_028724.2,607-625).
gttcggaaatcctccaaaa

SEQ ID NO: 735657 - DNA, 19 bp, Mus musculus
  siRNA target sequence for Rin2 (NM_028724.2,646-664).
cttcgcctgccctgtgaat

SEQ ID NO: 735658 - DNA, 19 bp, Mus musculus
  siRNA target sequence for Rin2 (NM_028724.2,667-685).
ggagcacctctcaaagagt

SEQ ID NO: 735659 - DNA, 19 bp, Mus musculus
  siRNA target sequence for Rin2 (NM_028724.2,673-691).
cctctcaaagagtttacta

SEQ ID NO: 735660 - DNA, 19 bp, Mus musculus
  siRNA target sequence for Rin2 (NM_028724.2,676-694).
ctcaaagagtttactataa

SEQ ID NO: 735661 - DNA, 19 bp, Mus musculus
  siRNA target sequence for Rin2 (NM_028724.2,682-700).
gagtttactataaaggaaa

SEQ ID NO: 735662 - DNA, 19 bp, Mus musculus
  siRNA target sequence for Rin2 (NM_028724.2,836-854).
cggagtctcagcttgaaga

SEQ ID NO: 735663 - DNA, 19 bp, Mus musculus
  siRNA target sequence for Rin2 (NM_028724.2,837-855).
ggagtctcagcttgaagaa

SEQ ID NO: 735664 - DNA, 19 bp, Mus musculus
  siRNA target sequence for Rin2 (NM_028724.2,840-858).
gtctcagcttgaagaacta

SEQ ID NO: 735665 - DNA, 19 bp, Mus musculus
  siRNA target sequence for Rin2 (NM_028724.2,966-984).
gcgtcagctctgccttata

SEQ ID NO: 735666 - DNA, 19 bp, Mus musculus
  siRNA target sequence for Rin2 (NM_028724.2,967-985).
cgtcagctctgccttataa

SEQ ID NO: 735667 - DNA, 19 bp, Mus musculus
  siRNA target sequence for Rin2 (NM_028724.2,968-986).
gtcagctctgccttataaa

SEQ ID NO: 735668 - DNA, 19 bp, Mus musculus
  siRNA target sequence for Rin2 (NM_028724.2,1041-1059).
caacggagccttgtgtttt

SEQ ID NO: 735669 - DNA, 19 bp, Mus musculus
  siRNA target sequence for Rin2 (NM_028724.2,1182-1200).
gccacccgctattaatagt

SEQ ID NO: 735670 - DNA, 19 bp, Mus musculus
  siRNA target sequence for Rin2 (NM_028724.2,1184-1202).
cacccgctattaatagtct

SEQ ID NO: 735671 - DNA, 19 bp, Mus musculus
  siRNA target sequence for Rin2 (NM_028724.2,1241-1259).
cgagcatgccagaaacagt

SEQ ID NO: 735672 - DNA, 19 bp, Mus musculus
  siRNA target sequence for Rin2 (NM_028724.2,1696-1714).
cctcccatcaagtccaaaa

SEQ ID NO: 735673 - DNA, 19 bp, Mus musculus
  siRNA target sequence for Rin2 (NM_028724.2,1831-1849).
gagctgtcccgggacaaat

SEQ ID NO: 735674 - DNA, 19 bp, Mus musculus
  siRNA target sequence for Rin2 (NM_028724.2,1834-1852).
ctgtcccgggacaaatgca

SEQ ID NO: 735675 - DNA, 19 bp, Mus musculus
  siRNA target sequence for Rin2 (NM_028724.2,1840-1858).
cgggacaaatgcacctatt

SEQ ID NO: 735676 - DNA, 19 bp, Mus musculus
  siRNA target sequence for Rin2 (NM_028724.2,1936-1954).
cagaccatccggcagttta

SEQ ID NO: 735677 - DNA, 19 bp, Mus musculus
  siRNA target sequence for Rin2 (NM_028724.2,1956-1974).
gacccaggtcaagaactat

SEQ ID NO: 735678 - DNA, 19 bp, Mus musculus
  siRNA target sequence for Rin2 (NM_028724.2,1958-1976).
cccaggtcaagaactattt

SEQ ID NO: 735679 - DNA, 19 bp, Mus musculus
  siRNA target sequence for Rin2 (NM_028724.2,1960-1978).
caggtcaagaactatttgt

SEQ ID NO: 735680 - DNA, 19 bp, Mus musculus
  siRNA target sequence for Rin2 (NM_028724.2,1962-1980).
ggtcaagaactatttgtct

SEQ ID NO: 735681 - DNA, 19 bp, Mus musculus
  siRNA target sequence for Rin2 (NM_028724.2,1993-2011).
ctggacccccctattgagt

SEQ ID NO: 735682 - DNA, 19 bp, Mus musculus
  siRNA target sequence for Rin2 (NM_028724.2,2021-2039).
cagaagaccaaattgatgt

SEQ ID NO: 735683 - DNA, 19 bp, Mus musculus
  siRNA target sequence for Rin2 (NM_028724.2,2129-2147).
gctcgtggaaacaactcaa

SEQ ID NO: 735684 - DNA, 19 bp, Mus musculus
  siRNA target sequence for Rin2 (NM_028724.2,2270-2288).
cgccagaaaagaaagtcat

SEQ ID NO: 735685 - DNA, 19 bp, Mus musculus
  siRNA target sequence for Rin2 (NM_028724.2,2300-2318).
gggtctgtaagctcatcta

SEQ ID NO: 735686 - DNA, 19 bp, Mus musculus
  siRNA target sequence for Rin2 (NM_028724.2,2302-2320).
gtctgtaagctcatctaca

SEQ ID NO: 735687 - DNA, 19 bp, Mus musculus
  siRNA target sequence for Rin2 (NM_028724.2,2371-2389).
ccagtcctgacctatgtca

SEQ ID NO: 735688 - DNA, 19 bp, Mus musculus
  siRNA target sequence for Rin2 (NM_028724.2,2420-2438).
cggaaatcgagtacatgat

SEQ ID NO: 735689 - DNA, 19 bp, Mus musculus
  siRNA target sequence for Rin2 (NM_028724.2,2503-2521).
gcgctatctctgataaaga

SEQ ID NO: 735690 - DNA, 19 bp, Mus musculus
  siRNA target sequence for Rin2 (NM_028724.2,2504-2522).
cgctatctctgataaagaa

SEQ ID NO: 735691 - DNA, 19 bp, Mus musculus
  siRNA target sequence for Rin2 (NM_028724.2,2597-2615).
gaaccaccaaccgaactat

SEQ ID NO: 735692 - DNA, 19 bp, Mus musculus
  siRNA target sequence for Rin2 (NM_028724.2,2618-2636).
cctccgttgacgactttca

SEQ ID NO: 735693 - DNA, 19 bp, Mus musculus
  siRNA target sequence for Rin2 (NM_028724.2,2621-2639).
ccgttgacgactttcagaa

SEQ ID NO: 735694 - DNA, 19 bp, Mus musculus
  siRNA target sequence for Rin2 (NM_028724.2,2622-2640).
cgttgacgactttcagaat

SEQ ID NO: 735695 - DNA, 19 bp, Mus musculus
  siRNA target sequence for Rin2 (NM_028724.2,2695-2713).
cttgtgagaccgtacatca

SEQ ID NO: 735696 - DNA, 19 bp, Mus musculus
  siRNA target sequence for Rin2 (NM_028724.2,2777-2795).
gcctgtttctctttgttga

SEQ ID NO: 735697 - DNA, 19 bp, Mus musculus
  siRNA target sequence for Rin2 (NM_028724.2,2814-2832).
ggcagaggacacttatcct

SEQ ID NO: 735698 - DNA, 19 bp, Mus musculus
  siRNA target sequence for Rin2 (NM_028724.2,2887-2905).
gtctacaaacgaatcaaga

SEQ ID NO: 735699 - DNA, 19 bp, Mus musculus
  siRNA target sequence for Rin2 (NM_028724.2,2897-2915).
gaatcaagagtgatcctta

SEQ ID NO: 735700 - DNA, 19 bp, Mus musculus
  siRNA target sequence for Rin2 (NM_028724.2,2908-2926).
gatccttacggggtgattt

SEQ ID NO: 735701 - DNA, 19 bp, Mus musculus
  siRNA target sequence for 4632404H12Rik (NM_028726.1,716-734).
ctttactaggccaagttta

SEQ ID NO: 735702 - DNA, 19 bp, Mus musculus
  siRNA target sequence for 4632404H12Rik (NM_028726.1,784-802).
ccaatcccttcatgagatt

SEQ ID NO: 735703 - DNA, 19 bp, Mus musculus
  siRNA target sequence for 4632404H12Rik (NM_028726.1,807-825).
gcctggtgtgactcttata

SEQ ID NO: 735704 - DNA, 19 bp, Mus musculus
  siRNA target sequence for 4632404H12Rik (NM_028726.1,808-826).
cctggtgtgactcttataa

SEQ ID NO: 735705 - DNA, 19 bp, Mus musculus
  siRNA target sequence for 4921501M20Rik (NM_028728.1,185-203).
cccaatgttcagtcaaaga

SEQ ID NO: 735706 - DNA, 19 bp, Mus musculus
  siRNA target sequence for 4921501M20Rik (NM_028728.1,186-204).
ccaatgttcagtcaaagaa

SEQ ID NO: 735707 - DNA, 19 bp, Mus musculus
  siRNA target sequence for 4921501M20Rik (NM_028728.1,246-264).
gagatttgcctgttaagtt

SEQ ID NO: 735708 - DNA, 19 bp, Mus musculus
  siRNA target sequence for 4921501M20Rik (NM_028728.1,293-311).
cgctgggagaagcagatta

SEQ ID NO: 735709 - DNA, 19 bp, Mus musculus
  siRNA target sequence for 4921501M20Rik (NM_028728.1,348-366).
gggattgcatggttaaact

SEQ ID NO: 735710 - DNA, 19 bp, Mus musculus
  siRNA target sequence for 4921501M20Rik (NM_028728.1,387-405).
ccacaggcatttactactt

SEQ ID NO: 735711 - DNA, 19 bp, Mus musculus
  siRNA target sequence for 4921501M20Rik (NM_028728.1,390-408).
caggcatttactacttcat

SEQ ID NO: 735712 - DNA, 19 bp, Mus musculus
  siRNA target sequence for 4921501M20Rik (NM_028728.1,393-411).
gcatttactacttcatagt

SEQ ID NO: 735713 - DNA, 19 bp, Mus musculus
  siRNA target sequence for 4921501M20Rik (NM_028728.1,410-428).
gtcgaaggagaggaaacat

SEQ ID NO: 735714 - DNA, 19 bp, Mus musculus
  siRNA target sequence for 4921501M20Rik (NM_028728.1,433-451).
gagcgatggcgttgtcatt

SEQ ID NO: 735715 - DNA, 19 bp, Mus musculus
  siRNA target sequence for 4921501M20Rik (NM_028728.1,435-453).
gcgatggcgttgtcattct

SEQ ID NO: 735716 - DNA, 19 bp, Mus musculus
  siRNA target sequence for 4921501M20Rik (NM_028728.1,599-617).
cacactgctaagacttgtt

SEQ ID NO: 735717 - DNA, 19 bp, Mus musculus
  siRNA target sequence for 4921501M20Rik (NM_028728.1,610-628).
gacttgttctggtctcaaa

SEQ ID NO: 735718 - DNA, 19 bp, Mus musculus
  siRNA target sequence for 4921501M20Rik (NM_028728.1,695-713).
gaggtctacgcctgtatga

SEQ ID NO: 735719 - DNA, 19 bp, Mus musculus
  siRNA target sequence for 4632428M11Rik (NM_028730.2,948-966).
ctggagctgtgcatccttt

SEQ ID NO: 735720 - DNA, 19 bp, Mus musculus
  siRNA target sequence for 4632428M11Rik (NM_028730.2,951-969).
gagctgtgcatccttttat

SEQ ID NO: 735721 - DNA, 19 bp, Mus musculus
  siRNA target sequence for 4632428M11Rik (NM_028730.2,954-972).
ctgtgcatccttttataca

SEQ ID NO: 735722 - DNA, 19 bp, Mus musculus
  siRNA target sequence for 4632428M11Rik (NM_028730.2,1018-1036).
ggctccaagatccagataa

SEQ ID NO: 735723 - DNA, 19 bp, Mus musculus
  siRNA target sequence for 4632428M11Rik (NM_028730.2,1037-1055).
ccagggccttcctgattat

SEQ ID NO: 735724 - DNA, 19 bp, Mus musculus
  siRNA target sequence for 4632428M11Rik (NM_028730.2,1267-1285).
gttcgttctcccagaagtt

SEQ ID NO: 735725 - DNA, 19 bp, Mus musculus
  siRNA target sequence for D12Ertd551e (NM_028731.2,1606-1624).
caagagagtaagattcgat

SEQ ID NO: 735726 - DNA, 19 bp, Mus musculus
  siRNA target sequence for D12Ertd551e (NM_028731.2,1617-1635).
gattcgatacaaaactagt

SEQ ID NO: 735727 - DNA, 19 bp, Mus musculus
  siRNA target sequence for D12Ertd551e (NM_028731.2,1765-1783).
cttacaagtgacaacatga

SEQ ID NO: 735728 - DNA, 19 bp, Mus musculus
  siRNA target sequence for D12Ertd551e (NM_028731.2,1769-1787).
caagtgacaacatgactat

SEQ ID NO: 735729 - DNA, 19 bp, Mus musculus
  siRNA target sequence for D12Ertd551e (NM_028731.2,1817-1835).
gtccaaacagcaccttaaa

SEQ ID NO: 735730 - DNA, 19 bp, Mus musculus
  siRNA target sequence for D12Ertd551e (NM_028731.2,1896-1914).
gcattcagctcaagtgaaa

SEQ ID NO: 735731 - DNA, 19 bp, Mus musculus
  siRNA target sequence for D12Ertd551e (NM_028731.2,1938-1956).
gaggaaaatgcctatcaaa

SEQ ID NO: 735732 - DNA, 19 bp, Mus musculus
  siRNA target sequence for D12Ertd551e (NM_028731.2,1941-1959).
gaaaatgcctatcaaatct

SEQ ID NO: 735733 - DNA, 19 bp, Mus musculus
  siRNA target sequence for D12Ertd551e (NM_028731.2,2232-2250).
gacaaccctgggacaatct

SEQ ID NO: 735734 - DNA, 19 bp, Mus musculus
  siRNA target sequence for D12Ertd551e (NM_028731.2,2258-2276).
ggcagatccagctgactat

SEQ ID NO: 735735 - DNA, 19 bp, Mus musculus
  siRNA target sequence for D12Ertd551e (NM_028731.2,2281-2299).
cacagctcccaaaggaata

SEQ ID NO: 735736 - DNA, 19 bp, Mus musculus
  siRNA target sequence for D12Ertd551e (NM_028731.2,2361-2379).
cccatatgtccgcatgtat

SEQ ID NO: 735737 - DNA, 19 bp, Mus musculus
  siRNA target sequence for D12Ertd551e (NM_028731.2,2362-2380).
ccatatgtccgcatgtatt

SEQ ID NO: 735738 - DNA, 19 bp, Mus musculus
  siRNA target sequence for D12Ertd551e (NM_028731.2,2363-2381).
catatgtccgcatgtattt

SEQ ID NO: 735739 - DNA, 19 bp, Mus musculus
  siRNA target sequence for D12Ertd551e (NM_028731.2,2370-2388).
ccgcatgtatttattacca

SEQ ID NO: 735740 - DNA, 19 bp, Mus musculus
  siRNA target sequence for D12Ertd551e (NM_028731.2,2561-2579).
gcaaagtgctggttgttct

SEQ ID NO: 735741 - DNA, 19 bp, Mus musculus
  siRNA target sequence for 4632428N05Rik (NM_028732.2,221-239).
ggtcaccactccatattct

SEQ ID NO: 735742 - DNA, 19 bp, Mus musculus
  siRNA target sequence for 4632428N05Rik (NM_028732.2,309-327).
cacgatgtgaccatctaca

SEQ ID NO: 735743 - DNA, 19 bp, Mus musculus
  siRNA target sequence for 4632428N05Rik (NM_028732.2,356-374).
ggtccagatgtgcaaagaa

SEQ ID NO: 735744 - DNA, 19 bp, Mus musculus
  siRNA target sequence for 4632428N05Rik (NM_028732.2,381-399).
cccatacgcaacttcacat

SEQ ID NO: 735745 - DNA, 19 bp, Mus musculus
  siRNA target sequence for 4632428N05Rik (NM_028732.2,382-400).
ccatacgcaacttcacatt

SEQ ID NO: 735746 - DNA, 19 bp, Mus musculus
  siRNA target sequence for 4632428N05Rik (NM_028732.2,486-504).
gaccaccacggtaacttct

SEQ ID NO: 735747 - DNA, 19 bp, Mus musculus
  siRNA target sequence for 4632428N05Rik (NM_028732.2,489-507).
caccacggtaacttctcta

SEQ ID NO: 735748 - DNA, 19 bp, Mus musculus
  siRNA target sequence for 4632428N05Rik (NM_028732.2,492-510).
cacggtaacttctctatca

SEQ ID NO: 735749 - DNA, 19 bp, Mus musculus
  siRNA target sequence for 4632428N05Rik (NM_028732.2,644-662).
cacatgcatggcgtctaat

SEQ ID NO: 735750 - DNA, 19 bp, Mus musculus
  siRNA target sequence for 4632428N05Rik (NM_028732.2,646-664).
catgcatggcgtctaatga

SEQ ID NO: 735751 - DNA, 19 bp, Mus musculus
  siRNA target sequence for 4931406B18Rik (NM_028737.2,816-834).
ggtcccttgtgtgattgaa

SEQ ID NO: 735752 - DNA, 19 bp, Mus musculus
  siRNA target sequence for 4931406B18Rik (NM_028737.2,817-835).
gtcccttgtgtgattgaat

SEQ ID NO: 735753 - DNA, 19 bp, Mus musculus
  siRNA target sequence for 4931406B18Rik (NM_028737.2,824-842).
gtgtgattgaattttacaa

SEQ ID NO: 735754 - DNA, 19 bp, Mus musculus
  siRNA target sequence for 4931406B18Rik (NM_028737.2,870-888).
gagctataggcttaatgaa

SEQ ID NO: 735755 - DNA, 19 bp, Mus musculus
  siRNA target sequence for 4931406B18Rik (NM_028737.2,1002-1020).
catgaccaattcactctat

SEQ ID NO: 735756 - DNA, 19 bp, Mus musculus
  siRNA target sequence for 4931406B18Rik (NM_028737.2,1138-1156).
cccaacgctctttttctct

SEQ ID NO: 735757 - DNA, 19 bp, Mus musculus
  siRNA target sequence for 4931406B18Rik (NM_028737.2,1211-1229).
cagcactggccattgaact

SEQ ID NO: 735758 - DNA, 19 bp, Mus musculus
  siRNA target sequence for 4931406B18Rik (NM_028737.2,1257-1275).
cagatgccacttaaagcta

SEQ ID NO: 735759 - DNA, 19 bp, Mus musculus
  siRNA target sequence for 4931406B18Rik (NM_028737.2,1273-1291).
ctatccctagataacttgt

SEQ ID NO: 735760 - DNA, 19 bp, Mus musculus
  siRNA target sequence for 4931406B18Rik (NM_028737.2,1435-1453).
cctgtgagtgtgaatagaa

SEQ ID NO: 735761 - DNA, 19 bp, Mus musculus
  siRNA target sequence for 4931406B18Rik (NM_028737.2,1436-1454).
ctgtgagtgtgaatagaat

SEQ ID NO: 735762 - DNA, 19 bp, Mus musculus
  siRNA target sequence for 4931406B18Rik (NM_028737.2,1489-1507).
gaaccctggaccaatagca

SEQ ID NO: 735763 - DNA, 19 bp, Mus musculus
  siRNA target sequence for 4931406B18Rik (NM_028737.2,1666-1684).
gccatagcgtcggctttat

SEQ ID NO: 735764 - DNA, 19 bp, Mus musculus
  siRNA target sequence for 4931406B18Rik (NM_028737.2,1667-1685).
ccatagcgtcggctttatt

SEQ ID NO: 735765 - DNA, 19 bp, Mus musculus
  siRNA target sequence for 4931406B18Rik (NM_028737.2,1676-1694).
cggctttattcctcttctt

SEQ ID NO: 735766 - DNA, 19 bp, Mus musculus
  siRNA target sequence for 4931406B18Rik (NM_028737.2,1707-1725).
ggtaatgaagatgcttaat

SEQ ID NO: 735767 - DNA, 19 bp, Mus musculus
  siRNA target sequence for 4931406B18Rik (NM_028737.2,1708-1726).
gtaatgaagatgcttaatt

SEQ ID NO: 735768 - DNA, 19 bp, Mus musculus
  siRNA target sequence for 4933404G15Rik (NM_028739.1,390-408).
ggacagggcaagaacaact

SEQ ID NO: 735769 - DNA, 19 bp, Mus musculus
  siRNA target sequence for 4933404G15Rik (NM_028739.1,420-438).
caccctggcgaaaaacgat

SEQ ID NO: 735770 - DNA, 19 bp, Mus musculus
  siRNA target sequence for 4933404G15Rik (NM_028739.1,422-440).
ccctggcgaaaaacgatat

SEQ ID NO: 735771 - DNA, 19 bp, Mus musculus
  siRNA target sequence for 4933404G15Rik (NM_028739.1,423-441).
cctggcgaaaaacgatata

SEQ ID NO: 735772 - DNA, 19 bp, Mus musculus
  siRNA target sequence for 4933404G15Rik (NM_028739.1,427-445).
gcgaaaaacgatatactat

SEQ ID NO: 735773 - DNA, 19 bp, Mus musculus
  siRNA target sequence for 4933404G15Rik (NM_028739.1,465-483).
ccatcctggacaaatagta

SEQ ID NO: 735774 - DNA, 19 bp, Mus musculus
  siRNA target sequence for 4933404G15Rik (NM_028739.1,473-491).
gacaaatagtacaacttca

SEQ ID NO: 735775 - DNA, 19 bp, Mus musculus
  siRNA target sequence for 4933404G15Rik (NM_028739.1,512-530).
cacctgcatgtcgtatcat

SEQ ID NO: 735776 - DNA, 19 bp, Mus musculus
  siRNA target sequence for 4933404G15Rik (NM_028739.1,581-599).
cattcatggtggcatcaaa

SEQ ID NO: 735777 - DNA, 19 bp, Mus musculus
  siRNA target sequence for 4933404G15Rik (NM_028739.1,585-603).
catggtggcatcaaaaaat

SEQ ID NO: 735778 - DNA, 19 bp, Mus musculus
  siRNA target sequence for 4933404G15Rik (NM_028739.1,596-614).
caaaaaatggcaacattgt

SEQ ID NO: 735779 - DNA, 19 bp, Mus musculus
  siRNA target sequence for 4933404G15Rik (NM_028739.1,621-639).
ggatgactatgtgaatata

SEQ ID NO: 735780 - DNA, 19 bp, Mus musculus
  siRNA target sequence for 4933404G15Rik (NM_028739.1,625-643).
gactatgtgaatatagtga

SEQ ID NO: 735781 - DNA, 19 bp, Mus musculus
  siRNA target sequence for 4933404G15Rik (NM_028739.1,667-685).
gctactgatttgtttgcta

SEQ ID NO: 735782 - DNA, 19 bp, Mus musculus
  siRNA target sequence for 4933404G15Rik (NM_028739.1,668-686).
ctactgatttgtttgctaa

SEQ ID NO: 735783 - DNA, 19 bp, Mus musculus
  siRNA target sequence for 4933404G15Rik (NM_028739.1,717-735).
gattgaagagacaggaatt

SEQ ID NO: 735784 - DNA, 19 bp, Mus musculus
  siRNA target sequence for 4933404G15Rik (NM_028739.1,721-739).
gaagagacaggaattacca

SEQ ID NO: 735785 - DNA, 19 bp, Mus musculus
  siRNA target sequence for 4933404G15Rik (NM_028739.1,780-798).
ggaggataccacaagcaaa

SEQ ID NO: 735786 - DNA, 19 bp, Mus musculus
  siRNA target sequence for 4933404G15Rik (NM_028739.1,910-928).
ggtgaggagacatattatt

SEQ ID NO: 735787 - DNA, 19 bp, Mus musculus
  siRNA target sequence for 4933404G15Rik (NM_028739.1,1004-1022).
ccaggcccgtggttcctaa

SEQ ID NO: 735788 - DNA, 19 bp, Mus musculus
  siRNA target sequence for 4933404G15Rik (NM_028739.1,1005-1023).
caggcccgtggttcctaaa

SEQ ID NO: 735789 - DNA, 19 bp, Mus musculus
  siRNA target sequence for 4933404G15Rik (NM_028739.1,1084-1102).
ggcagtgtatacaaccttt

SEQ ID NO: 735790 - DNA, 19 bp, Mus musculus
  siRNA target sequence for 4933404G15Rik (NM_028739.1,1085-1103).
gcagtgtatacaacctttt

SEQ ID NO: 735791 - DNA, 19 bp, Mus musculus
  siRNA target sequence for 4933403M22Rik (NM_028742.1,211-229).
gtgtcaccagcatcaataa

SEQ ID NO: 735792 - DNA, 19 bp, Mus musculus
  siRNA target sequence for 4933403M22Rik (NM_028742.1,246-264).
caggatggagagataagaa

SEQ ID NO: 735793 - DNA, 19 bp, Mus musculus
  siRNA target sequence for 4933403M22Rik (NM_028742.1,288-306).
ccatcgaaacagcattctt

SEQ ID NO: 735794 - DNA, 19 bp, Mus musculus
  siRNA target sequence for 4933403M22Rik (NM_028742.1,356-374).
cccgttgtcccgctcattt

SEQ ID NO: 735795 - DNA, 19 bp, Mus musculus
  siRNA target sequence for 4933403M22Rik (NM_028742.1,357-375).
ccgttgtcccgctcatttt

SEQ ID NO: 735796 - DNA, 19 bp, Mus musculus
  siRNA target sequence for 4933403M22Rik (NM_028742.1,444-462).
ggacagctggcttctaaat

SEQ ID NO: 735797 - DNA, 19 bp, Mus musculus
  siRNA target sequence for 4933403M22Rik (NM_028742.1,447-465).
cagctggcttctaaatcca

SEQ ID NO: 735798 - DNA, 19 bp, Mus musculus
  siRNA target sequence for 4933403M22Rik (NM_028742.1,550-568).
gctctgacgtggatacgta

SEQ ID NO: 735799 - DNA, 19 bp, Mus musculus
  siRNA target sequence for 4933403M22Rik (NM_028742.1,551-569).
ctctgacgtggatacgtat

SEQ ID NO: 735800 - DNA, 19 bp, Mus musculus
  siRNA target sequence for 4933403M22Rik (NM_028742.1,555-573).
gacgtggatacgtatactt

SEQ ID NO: 735801 - DNA, 19 bp, Mus musculus
  siRNA target sequence for 4933403M22Rik (NM_028742.1,577-595).
ggaatggtgaggattattt

SEQ ID NO: 735802 - DNA, 19 bp, Mus musculus
  siRNA target sequence for 4933403M22Rik (NM_028742.1,582-600).
ggtgaggattatttccttt

SEQ ID NO: 735803 - DNA, 19 bp, Mus musculus
  siRNA target sequence for 4933403M22Rik (NM_028742.1,681-699).
gaggaagtcggccaattta

SEQ ID NO: 735804 - DNA, 19 bp, Mus musculus
  siRNA target sequence for 4933403M22Rik (NM_028742.1,683-701).
ggaagtcggccaatttaca

SEQ ID NO: 735805 - DNA, 19 bp, Mus musculus
  siRNA target sequence for 4933403M22Rik (NM_028742.1,978-996).
gactgcacgaccatcttgt

SEQ ID NO: 735806 - DNA, 19 bp, Mus musculus
  siRNA target sequence for 4933403M22Rik (NM_028742.1,1071-1089).
gacattgaattcgaaagat

SEQ ID NO: 735807 - DNA, 19 bp, Mus musculus
  siRNA target sequence for 4933403M22Rik (NM_028742.1,1095-1113).
gtggtggtcccatcaatga

SEQ ID NO: 735808 - DNA, 19 bp, Mus musculus
  siRNA target sequence for 4933403M22Rik (NM_028742.1,1097-1115).
ggtggtcccatcaatgaga

SEQ ID NO: 735809 - DNA, 19 bp, Mus musculus
  siRNA target sequence for 4933403M22Rik (NM_028742.1,1118-1136).
ccacatgtttggatggata

SEQ ID NO: 735810 - DNA, 19 bp, Mus musculus
  siRNA target sequence for 4933403M22Rik (NM_028742.1,1294-1312).
cgtacagctctctgattga

SEQ ID NO: 735811 - DNA, 19 bp, Mus musculus
  siRNA target sequence for 4933403M22Rik (NM_028742.1,1328-1346).
catttccgaaagcagttta

SEQ ID NO: 735812 - DNA, 19 bp, Mus musculus
  siRNA target sequence for Npl (NM_028749.1,86-104).
ggccttccctaagaagaaa

SEQ ID NO: 735813 - DNA, 19 bp, Mus musculus
  siRNA target sequence for Npl (NM_028749.1,131-149).
cactccaatgacagagaat

SEQ ID NO: 735814 - DNA, 19 bp, Mus musculus
  siRNA target sequence for Npl (NM_028749.1,175-193).
gtcagtatgtggattacct

SEQ ID NO: 735815 - DNA, 19 bp, Mus musculus
  siRNA target sequence for Npl (NM_028749.1,200-218).
ggaacagggggtgaagaat

SEQ ID NO: 735816 - DNA, 19 bp, Mus musculus
  siRNA target sequence for Npl (NM_028749.1,283-301).
cggaggaatgggttaacca

SEQ ID NO: 735817 - DNA, 19 bp, Mus musculus
  siRNA target sequence for Npl (NM_028749.1,350-368).
cgtgaaggagtcacaagaa

SEQ ID NO: 735818 - DNA, 19 bp, Mus musculus
  siRNA target sequence for Npl (NM_028749.1,409-427).
ctgtcattgcgcctttctt

SEQ ID NO: 735819 - DNA, 19 bp, Mus musculus
  siRNA target sequence for Npl (NM_028749.1,411-429).
gtcattgcgcctttctttt

SEQ ID NO: 735820 - DNA, 19 bp, Mus musculus
  siRNA target sequence for Npl (NM_028749.1,486-504).
gctcctactttgccatttt

SEQ ID NO: 735821 - DNA, 19 bp, Mus musculus
  siRNA target sequence for Npl (NM_028749.1,489-507).
cctactttgccattttatt

SEQ ID NO: 735822 - DNA, 19 bp, Mus musculus
  siRNA target sequence for Npl (NM_028749.1,524-542).
catgaccggggtaaagatt

SEQ ID NO: 735823 - DNA, 19 bp, Mus musculus
  siRNA target sequence for Npl (NM_028749.1,631-649).
gccaatgtgtcgatcagaa

SEQ ID NO: 735824 - DNA, 19 bp, Mus musculus
  siRNA target sequence for Npl (NM_028749.1,632-650).
ccaatgtgtcgatcagaat

SEQ ID NO: 735825 - DNA, 19 bp, Mus musculus
  siRNA target sequence for Npl (NM_028749.1,647-665).
gaatcaccagcgacagttt

SEQ ID NO: 735826 - DNA, 19 bp, Mus musculus
  siRNA target sequence for Npl (NM_028749.1,727-745).
cagtaggcagtacctataa

SEQ ID NO: 735827 - DNA, 19 bp, Mus musculus
  siRNA target sequence for Npl (NM_028749.1,729-747).
gtaggcagtacctataact

SEQ ID NO: 735828 - DNA, 19 bp, Mus musculus
  siRNA target sequence for Npl (NM_028749.1,746-764).
ctacctgggaaaaaagaca

SEQ ID NO: 735829 - DNA, 19 bp, Mus musculus
  siRNA target sequence for Npl (NM_028749.1,810-828).
ctcagttaccagtttcgta

SEQ ID NO: 735830 - DNA, 19 bp, Mus musculus
  siRNA target sequence for Npl (NM_028749.1,825-843).
cgtatccagagatttatca

SEQ ID NO: 735831 - DNA, 19 bp, Mus musculus
  siRNA target sequence for Npl (NM_028749.1,851-869).
gatcaagctaggttttgga

SEQ ID NO: 735832 - DNA, 19 bp, Mus musculus
  siRNA target sequence for 0610041D19Rik (NM_028751.2,413-431).
gcccctgctaagaaacctt

SEQ ID NO: 735833 - DNA, 19 bp, Mus musculus
  siRNA target sequence for 0610041D19Rik (NM_028751.2,414-432).
cccctgctaagaaacctta

SEQ ID NO: 735834 - DNA, 19 bp, Mus musculus
  siRNA target sequence for 0610041D19Rik (NM_028751.2,516-534).
cagagcggatgaaactttt

SEQ ID NO: 735835 - DNA, 19 bp, Mus musculus
  siRNA target sequence for 0610041D19Rik (NM_028751.2,746-764).
ctgcacgcactgatcaaga

SEQ ID NO: 735836 - DNA, 19 bp, Mus musculus
  siRNA target sequence for 0610041D19Rik (NM_028751.2,786-804).
cgctggactgggagattgt

SEQ ID NO: 735837 - DNA, 19 bp, Mus musculus
  siRNA target sequence for 0610041D19Rik (NM_028751.2,834-852).
ggaacaccatcaataaact

SEQ ID NO: 735838 - DNA, 19 bp, Mus musculus
  siRNA target sequence for 0610041D19Rik (NM_028751.2,902-920).
cttctcaagtgcaacaagt

SEQ ID NO: 735839 - DNA, 19 bp, Mus musculus
  siRNA target sequence for 0610041D19Rik (NM_028751.2,967-985).
ggacatggttcgaaaacat

SEQ ID NO: 735840 - DNA, 19 bp, Mus musculus
  siRNA target sequence for 0610041D19Rik (NM_028751.2,1054-1072).
ggtgcctacctcagtcatt

SEQ ID NO: 735841 - DNA, 19 bp, Mus musculus
  siRNA target sequence for 0610041D19Rik (NM_028751.2,1094-1112).
gagtctctcttgctcaatt

SEQ ID NO: 735842 - DNA, 19 bp, Mus musculus
  siRNA target sequence for 0610041D19Rik (NM_028751.2,1139-1157).
cccttggctgaggatgtat

SEQ ID NO: 735843 - DNA, 19 bp, Mus musculus
  siRNA target sequence for 0610041D19Rik (NM_028751.2,1363-1381).
ggacaagatccgaattcct

SEQ ID NO: 735844 - DNA, 19 bp, Mus musculus
  siRNA target sequence for 0610041D19Rik (NM_028751.2,1591-1609).
cagctggcagcgtgcattt

SEQ ID NO: 735845 - DNA, 19 bp, Mus musculus
  siRNA target sequence for 0610041D19Rik (NM_028751.2,1673-1691).
cccgagctacaattgcatt

SEQ ID NO: 735846 - DNA, 19 bp, Mus musculus
  siRNA target sequence for 0610041D19Rik (NM_028751.2,1674-1692).
ccgagctacaattgcattt

SEQ ID NO: 735847 - DNA, 19 bp, Mus musculus
  siRNA target sequence for 0610041D19Rik (NM_028751.2,1676-1694).
gagctacaattgcatttct

SEQ ID NO: 735848 - DNA, 19 bp, Mus musculus
  siRNA target sequence for 0610037N12Rik (NM_028753.1,257-275).
cggaggcccaacgacattt

SEQ ID NO: 735849 - DNA, 19 bp, Mus musculus
  siRNA target sequence for 0610037N12Rik (NM_028753.1,258-276).
ggaggcccaacgacattta

SEQ ID NO: 735850 - DNA, 19 bp, Mus musculus
  siRNA target sequence for 0610037N12Rik (NM_028753.1,261-279).
ggcccaacgacatttatgt

SEQ ID NO: 735851 - DNA, 19 bp, Mus musculus
  siRNA target sequence for 0610037N12Rik (NM_028753.1,263-281).
cccaacgacatttatgtca

SEQ ID NO: 735852 - DNA, 19 bp, Mus musculus
  siRNA target sequence for 0610037N12Rik (NM_028753.1,264-282).
ccaacgacatttatgtcaa

SEQ ID NO: 735853 - DNA, 19 bp, Mus musculus
  siRNA target sequence for 0610037L13Rik (NM_028754.1,290-308).
cggtggtacctgaagatga

SEQ ID NO: 735854 - DNA, 19 bp, Mus musculus
  siRNA target sequence for 0610037L13Rik (NM_028754.1,291-309).
ggtggtacctgaagatgaa

SEQ ID NO: 735855 - DNA, 19 bp, Mus musculus
  siRNA target sequence for 0610037L13Rik (NM_028754.1,314-332).
ggcaactgtggtgagattt

SEQ ID NO: 735856 - DNA, 19 bp, Mus musculus
  siRNA target sequence for 0610037L13Rik (NM_028754.1,333-351).
cagagaagtggcaatacat

SEQ ID NO: 735857 - DNA, 19 bp, Mus musculus
  siRNA target sequence for 0610037L13Rik (NM_028754.1,429-447).
gggaaaactctattgacat

SEQ ID NO: 735858 - DNA, 19 bp, Mus musculus
  siRNA target sequence for 0610037L13Rik (NM_028754.1,430-448).
ggaaaactctattgacatt

SEQ ID NO: 735859 - DNA, 19 bp, Mus musculus
  siRNA target sequence for 0610037L13Rik (NM_028754.1,456-474).
gcaccatcaaggcttacaa

SEQ ID NO: 735860 - DNA, 19 bp, Mus musculus
  siRNA target sequence for 0610037L13Rik (NM_028754.1,468-486).
cttacaacgctgaagacaa

SEQ ID NO: 735861 - DNA, 19 bp, Mus musculus
  siRNA target sequence for 0610037L13Rik (NM_028754.1,525-543).
gccttgaaccagttgactt

SEQ ID NO: 735862 - DNA, 19 bp, Mus musculus
  siRNA target sequence for 0610037L13Rik (NM_028754.1,624-642).
ggacagactatgatgaaaa

SEQ ID NO: 735863 - DNA, 19 bp, Mus musculus
  siRNA target sequence for 0610037L13Rik (NM_028754.1,667-685).
cgaggtcacccatcagttt

SEQ ID NO: 735864 - DNA, 19 bp, Mus musculus
  siRNA target sequence for 0710001E13Rik (NM_028755.2,499-517).
gatctggaggggaaagtca

SEQ ID NO: 735865 - DNA, 19 bp, Mus musculus
  siRNA target sequence for 1200008O12Rik (NM_028760.1,385-403).
gaagtcccaaagatttaat

SEQ ID NO: 735866 - DNA, 19 bp, Mus musculus
  siRNA target sequence for 1200008O12Rik (NM_028760.1,577-595).
ccgagagagaaaagaatgt

SEQ ID NO: 735867 - DNA, 19 bp, Mus musculus
  siRNA target sequence for 1200008O12Rik (NM_028760.1,641-659).
ccacctaaggtcaagatat

SEQ ID NO: 735868 - DNA, 19 bp, Mus musculus
  siRNA target sequence for 1200008O12Rik (NM_028760.1,642-660).
cacctaaggtcaagatata

SEQ ID NO: 735869 - DNA, 19 bp, Mus musculus
  siRNA target sequence for 1200008O12Rik (NM_028760.1,645-663).
ctaaggtcaagatatagct

SEQ ID NO: 735870 - DNA, 19 bp, Mus musculus
  siRNA target sequence for 1200008O12Rik (NM_028760.1,768-786).
ctgtccgccacgacgaaaa

SEQ ID NO: 735871 - DNA, 19 bp, Mus musculus
  siRNA target sequence for 1200008O12Rik (NM_028760.1,770-788).
gtccgccacgacgaaaaga

SEQ ID NO: 735872 - DNA, 19 bp, Mus musculus
  siRNA target sequence for 1200008O12Rik (NM_028760.1,772-790).
ccgccacgacgaaaagact

SEQ ID NO: 735873 - DNA, 19 bp, Mus musculus
  siRNA target sequence for 1200008O12Rik (NM_028760.1,773-791).
cgccacgacgaaaagactt

SEQ ID NO: 735874 - DNA, 19 bp, Mus musculus
  siRNA target sequence for 1200008O12Rik (NM_028760.1,774-792).
gccacgacgaaaagacttt

SEQ ID NO: 735875 - DNA, 19 bp, Mus musculus
  siRNA target sequence for 1200008O12Rik (NM_028760.1,776-794).
cacgacgaaaagactttct

SEQ ID NO: 735876 - DNA, 19 bp, Mus musculus
  siRNA target sequence for 1200008O12Rik (NM_028760.1,778-796).
cgacgaaaagactttctga

SEQ ID NO: 735877 - DNA, 19 bp, Mus musculus
  siRNA target sequence for 1200008O12Rik (NM_028760.1,779-797).
gacgaaaagactttctgaa

SEQ ID NO: 735878 - DNA, 19 bp, Mus musculus
  siRNA target sequence for 1200008O12Rik (NM_028760.1,850-868).
gcttcaactcctcaatgaa

SEQ ID NO: 735879 - DNA, 19 bp, Mus musculus
  siRNA target sequence for 1200008O12Rik (NM_028760.1,851-869).
cttcaactcctcaatgaat

SEQ ID NO: 735880 - DNA, 19 bp, Mus musculus
  siRNA target sequence for 1200008O12Rik (NM_028760.1,857-875).
ctcctcaatgaatagtatt

SEQ ID NO: 735881 - DNA, 19 bp, Mus musculus
  siRNA target sequence for 1200008O12Rik (NM_028760.1,860-878).
ctcaatgaatagtattcat

SEQ ID NO: 735882 - DNA, 19 bp, Mus musculus
  siRNA target sequence for 1200008O12Rik (NM_028760.1,862-880).
caatgaatagtattcatga

SEQ ID NO: 735883 - DNA, 19 bp, Mus musculus
  siRNA target sequence for 1200008O12Rik (NM_028760.1,942-960).
cagcgagaggcctacgtta

SEQ ID NO: 735884 - DNA, 19 bp, Mus musculus
  siRNA target sequence for 1200008O12Rik (NM_028760.1,944-962).
gcgagaggcctacgttaaa

SEQ ID NO: 735885 - DNA, 19 bp, Mus musculus
  siRNA target sequence for 1200008O12Rik (NM_028760.1,953-971).
ctacgttaaagggctttta

SEQ ID NO: 735886 - DNA, 19 bp, Mus musculus
  siRNA target sequence for 1200008O12Rik (NM_028760.1,963-981).
gggcttttagcaaagatct

SEQ ID NO: 735887 - DNA, 19 bp, Mus musculus
  siRNA target sequence for 1200008O12Rik (NM_028760.1,1136-1154).
gactcagttgcgtttagaa

SEQ ID NO: 735888 - DNA, 19 bp, Mus musculus
  siRNA target sequence for 1200008O12Rik (NM_028760.1,1146-1164).
cgtttagaactcgatgaat

SEQ ID NO: 735889 - DNA, 19 bp, Mus musculus
  siRNA target sequence for 1200008O12Rik (NM_028760.1,1147-1165).
gtttagaactcgatgaatt

SEQ ID NO: 735890 - DNA, 19 bp, Mus musculus
  siRNA target sequence for 1200008O12Rik (NM_028760.1,1152-1170).
gaactcgatgaatttcgaa

SEQ ID NO: 735891 - DNA, 19 bp, Mus musculus
  siRNA target sequence for 1200008O12Rik (NM_028760.1,1157-1175).
cgatgaatttcgaaggaaa

SEQ ID NO: 735892 - DNA, 19 bp, Mus musculus
  siRNA target sequence for 1200008O12Rik (NM_028760.1,1365-1383).
gtccgaattctctacgatt

SEQ ID NO: 735893 - DNA, 19 bp, Mus musculus
  siRNA target sequence for 1200008O12Rik (NM_028760.1,1369-1387).
gaattctctacgattctct

SEQ ID NO: 735894 - DNA, 19 bp, Mus musculus
  siRNA target sequence for 1200008O12Rik (NM_028760.1,1374-1392).
ctctacgattctctgttaa

SEQ ID NO: 735895 - DNA, 19 bp, Mus musculus
  siRNA target sequence for 1200008O12Rik (NM_028760.1,1436-1454).
gatgcaggcatgtactcta

SEQ ID NO: 735896 - DNA, 19 bp, Mus musculus
  siRNA target sequence for 1200008O12Rik (NM_028760.1,1442-1460).
ggcatgtactctagacttt

SEQ ID NO: 735897 - DNA, 19 bp, Mus musculus
  siRNA target sequence for 1200008O12Rik (NM_028760.1,1447-1465).
gtactctagactttgaaaa

SEQ ID NO: 735898 - DNA, 19 bp, Mus musculus
  siRNA target sequence for 1200008O12Rik (NM_028760.1,1493-1511).
gcatcaactctatgtgatt

SEQ ID NO: 735899 - DNA, 19 bp, Mus musculus
  siRNA target sequence for 1200008O12Rik (NM_028760.1,1518-1536).
gaactccgaaaagcaaaaa

SEQ ID NO: 735900 - DNA, 19 bp, Mus musculus
  siRNA target sequence for 1200008O12Rik (NM_028760.1,1563-1581).
cagctacatgggtttacca

SEQ ID NO: 735901 - DNA, 19 bp, Mus musculus
  siRNA target sequence for 1200008O12Rik (NM_028760.1,1740-1758).
gtcgaatactgcatgaagt

SEQ ID NO: 735902 - DNA, 19 bp, Mus musculus
  siRNA target sequence for 1200015A22Rik (NM_028766.1,251-269).
ggggctaatgaccttctta

SEQ ID NO: 735903 - DNA, 19 bp, Mus musculus
  siRNA target sequence for 1200015A22Rik (NM_028766.1,253-271).
ggctaatgaccttcttact

SEQ ID NO: 735904 - DNA, 19 bp, Mus musculus
  siRNA target sequence for 1200015A22Rik (NM_028766.1,255-273).
ctaatgaccttcttactct

SEQ ID NO: 735905 - DNA, 19 bp, Mus musculus
  siRNA target sequence for 1200015A22Rik (NM_028766.1,393-411).
ggaagactggtacacataa

SEQ ID NO: 735906 - DNA, 19 bp, Mus musculus
  siRNA target sequence for 1200015A22Rik (NM_028766.1,435-453).
ctcttgtctgacccaaatt

SEQ ID NO: 735907 - DNA, 19 bp, Mus musculus
  siRNA target sequence for 1200015A22Rik (NM_028766.1,437-455).
cttgtctgacccaaattat

SEQ ID NO: 735908 - DNA, 19 bp, Mus musculus
  siRNA target sequence for 1200015A22Rik (NM_028766.1,583-601).
cagagtggaggtcagaaat

SEQ ID NO: 735909 - DNA, 19 bp, Mus musculus
  siRNA target sequence for 1200015A22Rik (NM_028766.1,589-607).
ggaggtcagaaattgtcaa

SEQ ID NO: 735910 - DNA, 19 bp, Mus musculus
  siRNA target sequence for 1200015A22Rik (NM_028766.1,624-642).
cgagagattggccacaaaa

SEQ ID NO: 735911 - DNA, 19 bp, Mus musculus
  siRNA target sequence for 1200015A22Rik (NM_028766.1,776-794).
cccccatgtggacatcatt

SEQ ID NO: 735912 - DNA, 19 bp, Mus musculus
  siRNA target sequence for 1200015A22Rik (NM_028766.1,907-925).
cggctcacgtggttactgt

SEQ ID NO: 735913 - DNA, 19 bp, Mus musculus
  siRNA target sequence for 1200015A22Rik (NM_028766.1,936-954).
caacgaggtgaccaactaa

SEQ ID NO: 735914 - DNA, 19 bp, Mus musculus
  siRNA target sequence for 1200015A22Rik (NM_028766.1,1014-1032).
gctgaggaggtgtttcgta

SEQ ID NO: 735915 - DNA, 19 bp, Mus musculus
  siRNA target sequence for 1200015A22Rik (NM_028766.1,1019-1037).
ggaggtgtttcgtagagaa

SEQ ID NO: 735916 - DNA, 19 bp, Mus musculus
  siRNA target sequence for 1200015A22Rik (NM_028766.1,1035-1053).
gaacagaagagcaattcca

SEQ ID NO: 735917 - DNA, 19 bp, Mus musculus
  siRNA target sequence for 1200015A22Rik (NM_028766.1,1081-1099).
gatggatggccatgtttat

SEQ ID NO: 735918 - DNA, 19 bp, Mus musculus
  siRNA target sequence for 1200015A22Rik (NM_028766.1,1157-1175).
ccgagaccttgtcaacatt

SEQ ID NO: 735919 - DNA, 19 bp, Mus musculus
  siRNA target sequence for 1200015A22Rik (NM_028766.1,1255-1273).
cgctgtgggctgctctaat

SEQ ID NO: 735920 - DNA, 19 bp, Mus musculus
  siRNA target sequence for 1200015A22Rik (NM_028766.1,1312-1330).
cccgggtgccagccaaaaa

SEQ ID NO: 735921 - DNA, 19 bp, Mus musculus
  siRNA target sequence for 1200015A22Rik (NM_028766.1,1315-1333).
gggtgccagccaaaaagct

SEQ ID NO: 735922 - DNA, 19 bp, Mus musculus
  siRNA target sequence for 1200015K23Rik (NM_028768.1,310-328).
ctagcagtcgccactatgt

SEQ ID NO: 735923 - DNA, 19 bp, Mus musculus
  siRNA target sequence for 1200015K23Rik (NM_028768.1,313-331).
gcagtcgccactatgttga

SEQ ID NO: 735924 - DNA, 19 bp, Mus musculus
  siRNA target sequence for 1200015K23Rik (NM_028768.1,323-341).
ctatgttgacaggctattt

SEQ ID NO: 735925 - DNA, 19 bp, Mus musculus
  siRNA target sequence for 1200015K23Rik (NM_028768.1,363-381).
ctccaaggtgtcatagaca

SEQ ID NO: 735926 - DNA, 19 bp, Mus musculus
  siRNA target sequence for 1200015K23Rik (NM_028768.1,370-388).
gtgtcatagacatgaaaaa

SEQ ID NO: 735927 - DNA, 19 bp, Mus musculus
  siRNA target sequence for 1200015K23Rik (NM_028768.1,390-408).
gctgtaattggaaacaata

SEQ ID NO: 735928 - DNA, 19 bp, Mus musculus
  siRNA target sequence for 1200015K23Rik (NM_028768.1,391-409).
ctgtaattggaaacaataa

SEQ ID NO: 735929 - DNA, 19 bp, Mus musculus
  siRNA target sequence for 1200015K23Rik (NM_028768.1,435-453).
ggagcggttccaagattgt

SEQ ID NO: 735930 - DNA, 19 bp, Mus musculus
  siRNA target sequence for 1200015K23Rik (NM_028768.1,436-454).
gagcggttccaagattgtt

SEQ ID NO: 735931 - DNA, 19 bp, Mus musculus
  siRNA target sequence for 1200015K23Rik (NM_028768.1,438-456).
gcggttccaagattgttgt

SEQ ID NO: 735932 - DNA, 19 bp, Mus musculus
  siRNA target sequence for 1200015K23Rik (NM_028768.1,439-457).
cggttccaagattgttgta

SEQ ID NO: 735933 - DNA, 19 bp, Mus musculus
  siRNA target sequence for 1200015K23Rik (NM_028768.1,440-458).
ggttccaagattgttgtat

SEQ ID NO: 735934 - DNA, 19 bp, Mus musculus
  siRNA target sequence for 1200015K23Rik (NM_028768.1,452-470).
gttgtatttgcttcaacaa

SEQ ID NO: 735935 - DNA, 19 bp, Mus musculus
  siRNA target sequence for 1200015K23Rik (NM_028768.1,633-651).
cgatgcctccggacaatct

SEQ ID NO: 735936 - DNA, 19 bp, Mus musculus
  siRNA target sequence for 1200015K23Rik (NM_028768.1,634-652).
gatgcctccggacaatctt

SEQ ID NO: 735937 - DNA, 19 bp, Mus musculus
  siRNA target sequence for 1200015K23Rik (NM_028768.1,778-796).
gcaaagggccagatcatca

SEQ ID NO: 735938 - DNA, 19 bp, Mus musculus
  siRNA target sequence for 1200015K23Rik (NM_028768.1,787-805).
cagatcatcaaacaatttt

SEQ ID NO: 735939 - DNA, 19 bp, Mus musculus
  siRNA target sequence for 1200015K23Rik (NM_028768.1,843-861).
ctaacctcaccctcttaca

SEQ ID NO: 735940 - DNA, 19 bp, Mus musculus
  siRNA target sequence for 1200015K23Rik (NM_028768.1,847-865).
cctcaccctcttacaaagt

SEQ ID NO: 735941 - DNA, 19 bp, Mus musculus
  siRNA target sequence for 1200015K23Rik (NM_028768.1,848-866).
ctcaccctcttacaaagtt

SEQ ID NO: 735942 - DNA, 19 bp, Mus musculus
  siRNA target sequence for 1200015K23Rik (NM_028768.1,853-871).
cctcttacaaagttcgaat

SEQ ID NO: 735943 - DNA, 19 bp, Mus musculus
  siRNA target sequence for 1200015K23Rik (NM_028768.1,867-885).
cgaatgcaagcactgaaat

SEQ ID NO: 735944 - DNA, 19 bp, Mus musculus
  siRNA target sequence for 1200015K23Rik (NM_028768.1,922-940).
cgatgaccctggtaaacgt

SEQ ID NO: 735945 - DNA, 19 bp, Mus musculus
  siRNA target sequence for 1200015K23Rik (NM_028768.1,923-941).
gatgaccctggtaaacgtt

SEQ ID NO: 735946 - DNA, 19 bp, Mus musculus
  siRNA target sequence for 1200015K23Rik (NM_028768.1,928-946).
ccctggtaaacgttttggt

SEQ ID NO: 735947 - DNA, 19 bp, Mus musculus
  siRNA target sequence for 1200015K23Rik (NM_028768.1,944-962).
ggttgatggggagttgtta

SEQ ID NO: 735948 - DNA, 19 bp, Mus musculus
  siRNA target sequence for 1200015K23Rik (NM_028768.1,956-974).
gttgttaccacagatattt

SEQ ID NO: 735949 - DNA, 19 bp, Mus musculus
  siRNA target sequence for 1200015K23Rik (NM_028768.1,991-1009).
gggataagcctattgagat

SEQ ID NO: 735950 - DNA, 19 bp, Mus musculus
  siRNA target sequence for 1200015K23Rik (NM_028768.1,1010-1028).
gcagctcacgtcagcaaaa

SEQ ID NO: 735951 - DNA, 19 bp, Mus musculus
  siRNA target sequence for 1200015K23Rik (NM_028768.1,1011-1029).
cagctcacgtcagcaaaat

SEQ ID NO: 735952 - DNA, 19 bp, Mus musculus
  siRNA target sequence for 1200015K23Rik (NM_028768.1,1013-1031).
gctcacgtcagcaaaatgt

SEQ ID NO: 735953 - DNA, 19 bp, Mus musculus
  siRNA target sequence for 1200015K23Rik (NM_028768.1,1014-1032).
ctcacgtcagcaaaatgtt

SEQ ID NO: 735954 - DNA, 19 bp, Mus musculus
  siRNA target sequence for 1200015K23Rik (NM_028768.1,1016-1034).
cacgtcagcaaaatgttta

SEQ ID NO: 735955 - DNA, 19 bp, Mus musculus
  siRNA target sequence for 1200015K23Rik (NM_028768.1,1021-1039).
cagcaaaatgtttaactta

SEQ ID NO: 735956 - DNA, 19 bp, Mus musculus
  siRNA target sequence for 1200015K23Rik (NM_028768.1,1023-1041).
gcaaaatgtttaacttaca

SEQ ID NO: 735957 - DNA, 19 bp, Mus musculus
  siRNA target sequence for 1200015K23Rik (NM_028768.1,1043-1061).
gtgcagagctggagcaatt

SEQ ID NO: 735958 - DNA, 19 bp, Mus musculus
  siRNA target sequence for 1200015K23Rik (NM_028768.1,1118-1136).
cagtaaggagaggttacta

SEQ ID NO: 735959 - DNA, 19 bp, Mus musculus
  siRNA target sequence for 1200015K23Rik (NM_028768.1,1120-1138).
gtaaggagaggttactaga

SEQ ID NO: 735960 - DNA, 19 bp, Mus musculus
  siRNA target sequence for 1200015K23Rik (NM_028768.1,1162-1180).
ccctcgcctatctgattga

SEQ ID NO: 735961 - DNA, 19 bp, Mus musculus
  siRNA target sequence for 1200015K23Rik (NM_028768.1,1196-1214).
gcagagaatcgctagcata

SEQ ID NO: 735962 - DNA, 19 bp, Mus musculus
  siRNA target sequence for 1200015K23Rik (NM_028768.1,1197-1215).
cagagaatcgctagcataa

SEQ ID NO: 735963 - DNA, 19 bp, Mus musculus
  siRNA target sequence for 1200015K23Rik (NM_028768.1,1230-1248).
gccatgctggctgactatt

SEQ ID NO: 735964 - DNA, 19 bp, Mus musculus
  siRNA target sequence for 1200015K23Rik (NM_028768.1,1231-1249).
ccatgctggctgactattt

SEQ ID NO: 735965 - DNA, 19 bp, Mus musculus
  siRNA target sequence for 1200015K23Rik (NM_028768.1,1272-1290).
gccatcactgacattaaaa

SEQ ID NO: 735966 - DNA, 19 bp, Mus musculus
  siRNA target sequence for 1200015K23Rik (NM_028768.1,1405-1423).
ctatgatggaccgaattgt

SEQ ID NO: 735967 - DNA, 19 bp, Mus musculus
  siRNA target sequence for 1200015K23Rik (NM_028768.1,1570-1588).
ccgatgaaatcctagtagt

SEQ ID NO: 735968 - DNA, 19 bp, Mus musculus
  siRNA target sequence for 1200015K23Rik (NM_028768.1,1571-1589).
cgatgaaatcctagtagta

SEQ ID NO: 735969 - DNA, 19 bp, Mus musculus
  siRNA target sequence for 1200015K23Rik (NM_028768.1,1601-1619).
gttatgtaaccttcttctt

SEQ ID NO: 735970 - DNA, 19 bp, Mus musculus
  siRNA target sequence for 1200015K23Rik (NM_028768.1,1677-1695).
gggttgacacagagtgaaa

SEQ ID NO: 735971 - DNA, 19 bp, Mus musculus
  siRNA target sequence for 1200015K23Rik (NM_028768.1,1678-1696).
ggttgacacagagtgaaaa

SEQ ID NO: 735972 - DNA, 19 bp, Mus musculus
  siRNA target sequence for 1200015K23Rik (NM_028768.1,1717-1735).
ggatttgggctttaatgaa

SEQ ID NO: 735973 - DNA, 19 bp, Mus musculus
  siRNA target sequence for 1200015K23Rik (NM_028768.1,1748-1766).
ggcggaacaaaaaataaaa

SEQ ID NO: 735974 - DNA, 19 bp, Mus musculus
  siRNA target sequence for 1200015K23Rik (NM_028768.1,1844-1862).
gacattggggcttcttaga

SEQ ID NO: 735975 - DNA, 19 bp, Mus musculus
  siRNA target sequence for 1200015K23Rik (NM_028768.1,1871-1889).
ctccactcggcctcatata

SEQ ID NO: 735976 - DNA, 19 bp, Mus musculus
  siRNA target sequence for 1200015K23Rik (NM_028768.1,1873-1891).
ccactcggcctcatataga

SEQ ID NO: 735977 - DNA, 19 bp, Mus musculus
  siRNA target sequence for 1200015K23Rik (NM_028768.1,1874-1892).
cactcggcctcatatagat

SEQ ID NO: 735978 - DNA, 19 bp, Mus musculus
  siRNA target sequence for 1200015K23Rik (NM_028768.1,1876-1894).
ctcggcctcatatagataa

SEQ ID NO: 735979 - DNA, 19 bp, Mus musculus
  siRNA target sequence for 1200015K23Rik (NM_028768.1,1878-1896).
cggcctcatatagataaaa

SEQ ID NO: 735980 - DNA, 19 bp, Mus musculus
  siRNA target sequence for 1200015K23Rik (NM_028768.1,1879-1897).
ggcctcatatagataaaat

SEQ ID NO: 735981 - DNA, 19 bp, Mus musculus
  siRNA target sequence for 1200015K23Rik (NM_028768.1,1884-1902).
catatagataaaatcatga

SEQ ID NO: 735982 - DNA, 19 bp, Mus musculus
  siRNA target sequence for 1200015K23Rik (NM_028768.1,1955-1973).
gcatagcattgaagtcaaa

SEQ ID NO: 735983 - DNA, 19 bp, Mus musculus
  siRNA target sequence for 1200015K23Rik (NM_028768.1,2017-2035).
cagcaaaagagcttattat

SEQ ID NO: 735984 - DNA, 19 bp, Mus musculus
  siRNA target sequence for 1200015K23Rik (NM_028768.1,2075-2093).
gggtcattcacatgtcaaa

SEQ ID NO: 735985 - DNA, 19 bp, Mus musculus
  siRNA target sequence for 1200015K23Rik (NM_028768.1,2077-2095).
gtcattcacatgtcaaact

SEQ ID NO: 735986 - DNA, 19 bp, Mus musculus
  siRNA target sequence for 1200015K23Rik (NM_028768.1,2106-2124).
gccatgttttgtatatcaa

SEQ ID NO: 735987 - DNA, 19 bp, Mus musculus
  siRNA target sequence for 1200015K23Rik (NM_028768.1,2152-2170).
cacaggaacgccaggataa

SEQ ID NO: 735988 - DNA, 19 bp, Mus musculus
  siRNA target sequence for 1200015K23Rik (NM_028768.1,2156-2174).
ggaacgccaggataaatta

SEQ ID NO: 735989 - DNA, 19 bp, Mus musculus
  siRNA target sequence for 1200010C09Rik (NM_028769.4,724-742).
gtcctggtacgctgttact

SEQ ID NO: 735990 - DNA, 19 bp, Mus musculus
  siRNA target sequence for 1200010C09Rik (NM_028769.4,726-744).
cctggtacgctgttactga

SEQ ID NO: 735991 - DNA, 19 bp, Mus musculus
  siRNA target sequence for 1200010C09Rik (NM_028769.4,762-780).
ccgtttttcgggatgactt

SEQ ID NO: 735992 - DNA, 19 bp, Mus musculus
  siRNA target sequence for 1200010C09Rik (NM_028769.4,788-806).
cgctttgtggcgctcttta

SEQ ID NO: 735993 - DNA, 19 bp, Mus musculus
  siRNA target sequence for 1200010C09Rik (NM_028769.4,811-829).
gctcctcttcctcaaatgt

SEQ ID NO: 735994 - DNA, 19 bp, Mus musculus
  siRNA target sequence for 1200010C09Rik (NM_028769.4,850-868).
ccgtgtggactttatggaa

SEQ ID NO: 735995 - DNA, 19 bp, Mus musculus
  siRNA target sequence for 1200010C09Rik (NM_028769.4,866-884).
gaacgcagccccaacatct

SEQ ID NO: 735996 - DNA, 19 bp, Mus musculus
  siRNA target sequence for 1200010C09Rik (NM_028769.4,950-968).
gtcagccacgcttatcaca

SEQ ID NO: 735997 - DNA, 19 bp, Mus musculus
  siRNA target sequence for 1200010C09Rik (NM_028769.4,1100-1118).
gacaacaaggctgtataca

SEQ ID NO: 735998 - DNA, 19 bp, Mus musculus
  siRNA target sequence for 1200010C09Rik (NM_028769.4,1121-1139).
ctctacacggagctgttta

SEQ ID NO: 735999 - DNA, 19 bp, Mus musculus
  siRNA target sequence for 1200010C09Rik (NM_028769.4,1123-1141).
ctacacggagctgtttaca

SEQ ID NO: 736000 - DNA, 19 bp, Mus musculus
  siRNA target sequence for 1200010C09Rik (NM_028769.4,1283-1301).
cgagccatccgcaacatga

SEQ ID NO: 736001 - DNA, 19 bp, Mus musculus
  siRNA target sequence for 1200010C09Rik (NM_028769.4,1378-1396).
ggtgactggtgctaagaga

SEQ ID NO: 736002 - DNA, 19 bp, Mus musculus
  siRNA target sequence for 1200010C09Rik (NM_028769.4,1379-1397).
gtgactggtgctaagagat

SEQ ID NO: 736003 - DNA, 19 bp, Mus musculus
  siRNA target sequence for 1200010C09Rik (NM_028769.4,1399-1417).
gccttgcaaccacatcttt

SEQ ID NO: 736004 - DNA, 19 bp, Mus musculus
  siRNA target sequence for 1200010C09Rik (NM_028769.4,1978-1996).
gcagagtctgcgcaacata

SEQ ID NO: 736005 - DNA, 19 bp, Mus musculus
  siRNA target sequence for 1200010C09Rik (NM_028769.4,2173-2191).
gggagcttccccaccaatt

SEQ ID NO: 736006 - DNA, 19 bp, Mus musculus
  siRNA target sequence for D7Ertd462e (NM_028771.1,471-489).
gagaccaccgtgctgattt

SEQ ID NO: 736007 - DNA, 19 bp, Mus musculus
  siRNA target sequence for D7Ertd462e (NM_028771.1,476-494).
caccgtgctgatttctact

SEQ ID NO: 736008 - DNA, 19 bp, Mus musculus
  siRNA target sequence for D7Ertd462e (NM_028771.1,550-568).
gcgtaaccggcgttatgct

SEQ ID NO: 736009 - DNA, 19 bp, Mus musculus
  siRNA target sequence for D7Ertd462e (NM_028771.1,586-604).
ccaaggaggcgagtacttt

SEQ ID NO: 736010 - DNA, 19 bp, Mus musculus
  siRNA target sequence for D7Ertd462e (NM_028771.1,621-639).
ggttccgtgccccactatt

SEQ ID NO: 736011 - DNA, 19 bp, Mus musculus
  siRNA target sequence for D7Ertd462e (NM_028771.1,625-643).
ccgtgccccactattgtat

SEQ ID NO: 736012 - DNA, 19 bp, Mus musculus
  siRNA target sequence for D7Ertd462e (NM_028771.1,627-645).
gtgccccactattgtatga

SEQ ID NO: 736013 - DNA, 19 bp, Mus musculus
  siRNA target sequence for 1200014D15Rik (NM_028772.1,113-131).
cctcacccccagaatggaa

SEQ ID NO: 736014 - DNA, 19 bp, Mus musculus
  siRNA target sequence for 1200014D15Rik (NM_028772.1,137-155).
gagcagagactgtgatcat

SEQ ID NO: 736015 - DNA, 19 bp, Mus musculus
  siRNA target sequence for 1200014D15Rik (NM_028772.1,173-191).
gcgtgagcctggcttatca

SEQ ID NO: 736016 - DNA, 19 bp, Mus musculus
  siRNA target sequence for 1200014D15Rik (NM_028772.1,174-192).
cgtgagcctggcttatcat

SEQ ID NO: 736017 - DNA, 19 bp, Mus musculus
  siRNA target sequence for 1200014D15Rik (NM_028772.1,261-279).
gcacgcagcaggtttaaca

SEQ ID NO: 736018 - DNA, 19 bp, Mus musculus
  siRNA target sequence for 1200014D15Rik (NM_028772.1,262-280).
cacgcagcaggtttaacaa

SEQ ID NO: 736019 - DNA, 19 bp, Mus musculus
  siRNA target sequence for 1200014D15Rik (NM_028772.1,264-282).
cgcagcaggtttaacaact

SEQ ID NO: 736020 - DNA, 19 bp, Mus musculus
  siRNA target sequence for 1200014D15Rik (NM_028772.1,265-283).
gcagcaggtttaacaactt

SEQ ID NO: 736021 - DNA, 19 bp, Mus musculus
  siRNA target sequence for 1200014D15Rik (NM_028772.1,266-284).
cagcaggtttaacaactta

SEQ ID NO: 736022 - DNA, 19 bp, Mus musculus
  siRNA target sequence for 1200014D15Rik (NM_028772.1,294-312).
cgggataaacttgaagaaa

SEQ ID NO: 736023 - DNA, 19 bp, Mus musculus
  siRNA target sequence for 1200014D15Rik (NM_028772.1,379-397).
catcaaccaggtagtatca

SEQ ID NO: 736024 - DNA, 19 bp, Mus musculus
  siRNA target sequence for 1200014D15Rik (NM_028772.1,413-431).
ctgtaagggtggacgaatt

SEQ ID NO: 736025 - DNA, 19 bp, Mus musculus
  siRNA target sequence for 1200014D15Rik (NM_028772.1,415-433).
gtaagggtggacgaattta

SEQ ID NO: 736026 - DNA, 19 bp, Mus musculus
  siRNA target sequence for 1200014D15Rik (NM_028772.1,419-437).
gggtggacgaatttaaata

SEQ ID NO: 736027 - DNA, 19 bp, Mus musculus
  siRNA target sequence for 1200014D15Rik (NM_028772.1,458-476).
ggcacgccacggaacagta

SEQ ID NO: 736028 - DNA, 19 bp, Mus musculus
  siRNA target sequence for 1200014D15Rik (NM_028772.1,459-477).
gcacgccacggaacagtat

SEQ ID NO: 736029 - DNA, 19 bp, Mus musculus
  siRNA target sequence for 1200014D15Rik (NM_028772.1,460-478).
cacgccacggaacagtata

SEQ ID NO: 736030 - DNA, 19 bp, Mus musculus
  siRNA target sequence for 1200014D15Rik (NM_028772.1,462-480).
cgccacggaacagtatatt

SEQ ID NO: 736031 - DNA, 19 bp, Mus musculus
  siRNA target sequence for 1200014D15Rik (NM_028772.1,464-482).
ccacggaacagtatattat

SEQ ID NO: 736032 - DNA, 19 bp, Mus musculus
  siRNA target sequence for 1200014D15Rik (NM_028772.1,467-485).
cggaacagtatattattga

SEQ ID NO: 736033 - DNA, 19 bp, Mus musculus
  siRNA target sequence for 1200014D15Rik (NM_028772.1,531-549).
gattttagccggactgtat

SEQ ID NO: 736034 - DNA, 19 bp, Mus musculus
  siRNA target sequence for 1200014D15Rik (NM_028772.1,599-617).
ctgctggtgctaggaaata

SEQ ID NO: 736035 - DNA, 19 bp, Mus musculus
  siRNA target sequence for 1200014D15Rik (NM_028772.1,704-722).
ctgtgagagcaaataggat

SEQ ID NO: 736036 - DNA, 19 bp, Mus musculus
  siRNA target sequence for 1200014D15Rik (NM_028772.1,745-763).
gctcgtgaagtgggtaaaa

SEQ ID NO: 736037 - DNA, 19 bp, Mus musculus
  siRNA target sequence for 1200014D15Rik (NM_028772.1,746-764).
ctcgtgaagtgggtaaaat

SEQ ID NO: 736038 - DNA, 19 bp, Mus musculus
  siRNA target sequence for 1200014D15Rik (NM_028772.1,791-809).
ccgtccaacatcaatatgt

SEQ ID NO: 736039 - DNA, 19 bp, Mus musculus
  siRNA target sequence for 1200014D15Rik (NM_028772.1,818-836).
caacaatcccagaagtgaa

SEQ ID NO: 736040 - DNA, 19 bp, Mus musculus
  siRNA target sequence for 1200014D15Rik (NM_028772.1,898-916).
gaaagggatgggcttttgt

SEQ ID NO: 736041 - DNA, 19 bp, Mus musculus
  siRNA target sequence for 1200014D15Rik (NM_028772.1,915-933).
gtttggtccctatgaaagt

SEQ ID NO: 736042 - DNA, 19 bp, Mus musculus
  siRNA target sequence for 1200014D15Rik (NM_028772.1,987-1005).
ctttggaaaggagcttttt

SEQ ID NO: 736043 - DNA, 19 bp, Mus musculus
  siRNA target sequence for 1200014D15Rik (NM_028772.1,1071-1089).
gaaggcggacatcatcaat

SEQ ID NO: 736044 - DNA, 19 bp, Mus musculus
  siRNA target sequence for 1200014D15Rik (NM_028772.1,1144-1162).
catcagggggtcagaaact

SEQ ID NO: 736045 - DNA, 19 bp, Mus musculus
  siRNA target sequence for 1200014D15Rik (NM_028772.1,1168-1186).
gtggcgactggctttggat

SEQ ID NO: 736046 - DNA, 19 bp, Mus musculus
  siRNA target sequence for 1200014D15Rik (NM_028772.1,1250-1268).
ctccttttgacctgataga

SEQ ID NO: 736047 - DNA, 19 bp, Mus musculus
  siRNA target sequence for 1200014D15Rik (NM_028772.1,1253-1271).
cttttgacctgatagaact

SEQ ID NO: 736048 - DNA, 19 bp, Mus musculus
  siRNA target sequence for 1200014D15Rik (NM_028772.1,1317-1335).
ggccaaagcccgagaatca

SEQ ID NO: 736049 - DNA, 19 bp, Mus musculus
  siRNA target sequence for 1200014D15Rik (NM_028772.1,1318-1336).
gccaaagcccgagaatcat

SEQ ID NO: 736050 - DNA, 19 bp, Mus musculus
  siRNA target sequence for 1200014D15Rik (NM_028772.1,1320-1338).
caaagcccgagaatcatat

SEQ ID NO: 736051 - DNA, 19 bp, Mus musculus
  siRNA target sequence for 1200014D15Rik (NM_028772.1,1344-1362).
caacaacattgttggttat

SEQ ID NO: 736052 - DNA, 19 bp, Mus musculus
  siRNA target sequence for 1200014D15Rik (NM_028772.1,1347-1365).
caacattgttggttatcct

SEQ ID NO: 736053 - DNA, 19 bp, Mus musculus
  siRNA target sequence for 1200014D15Rik (NM_028772.1,1400-1418).
gagtcagtggactttacaa

SEQ ID NO: 736054 - DNA, 19 bp, Mus musculus
  siRNA target sequence for 1200014D15Rik (NM_028772.1,1489-1507).
ggccaggacactcagtata

SEQ ID NO: 736055 - DNA, 19 bp, Mus musculus
  siRNA target sequence for 1200014D15Rik (NM_028772.1,1499-1517).
ctcagtataggccaagttt

SEQ ID NO: 736056 - DNA, 19 bp, Mus musculus
  siRNA target sequence for 1200014D15Rik (NM_028772.1,1550-1568).
ctgagtacaaacaggttat

SEQ ID NO: 736057 - DNA, 19 bp, Mus musculus
  siRNA target sequence for 1200014D15Rik (NM_028772.1,1554-1572).
gtacaaacaggttatgcaa

SEQ ID NO: 736058 - DNA, 19 bp, Mus musculus
  siRNA target sequence for 1200014D15Rik (NM_028772.1,1597-1615).
ccatttggcaagttcaaca

SEQ ID NO: 736059 - DNA, 19 bp, Mus musculus
  siRNA target sequence for 1200014D15Rik (NM_028772.1,1598-1616).
catttggcaagttcaacat

SEQ ID NO: 736060 - DNA, 19 bp, Mus musculus
  siRNA target sequence for 1200014D15Rik (NM_028772.1,1674-1692).
ggtgggttttacaaacata

SEQ ID NO: 736061 - DNA, 19 bp, Mus musculus
  siRNA target sequence for 1200014D15Rik (NM_028772.1,1756-1774).
ggggagttcctgttgatca

SEQ ID NO: 736062 - DNA, 19 bp, Mus musculus
  siRNA target sequence for 1200014D15Rik (NM_028772.1,1789-1807).
gagcttcacgaccttagat

SEQ ID NO: 736063 - DNA, 19 bp, Mus musculus
  siRNA target sequence for 1200014D15Rik (NM_028772.1,1800-1818).
ccttagatggattgaagaa

SEQ ID NO: 736064 - DNA, 19 bp, Mus musculus
  siRNA target sequence for 1200014D15Rik (NM_028772.1,1823-1841).
ccttcagaggtggatatga

SEQ ID NO: 736065 - DNA, 19 bp, Mus musculus
  siRNA target sequence for 1200014D15Rik (NM_028772.1,1940-1958).
gcgatgatgcattcaagtt

SEQ ID NO: 736066 - DNA, 19 bp, Mus musculus
  siRNA target sequence for 1200014D15Rik (NM_028772.1,1953-1971).
caagtttcttcaaaccaaa

SEQ ID NO: 736067 - DNA, 19 bp, Mus musculus
  siRNA target sequence for 1200014D15Rik (NM_028772.1,1993-2011).
ccagtcactgctatcagaa

SEQ ID NO: 736068 - DNA, 19 bp, Mus musculus
  siRNA target sequence for 1200014D15Rik (NM_028772.1,2071-2089).
ctttatgagcgcatcatga

SEQ ID NO: 736069 - DNA, 19 bp, Mus musculus
  siRNA target sequence for 1200014D15Rik (NM_028772.1,2107-2125).
ggcatcggcgactttggaa

SEQ ID NO: 736070 - DNA, 19 bp, Mus musculus
  siRNA target sequence for 1200014D15Rik (NM_028772.1,2168-2186).
cctggggctccgagatgaa

SEQ ID NO: 736071 - DNA, 19 bp, Mus musculus
  siRNA target sequence for 1200014D15Rik (NM_028772.1,2205-2223).
ggaagctgggctggaatat

SEQ ID NO: 736072 - DNA, 19 bp, Mus musculus
  siRNA target sequence for 1200014D15Rik (NM_028772.1,2206-2224).
gaagctgggctggaatatt

SEQ ID NO: 736073 - DNA, 19 bp, Mus musculus
  siRNA target sequence for 1200014D15Rik (NM_028772.1,2377-2395).
gtggttggcaacacaacat

SEQ ID NO: 736074 - DNA, 19 bp, Mus musculus
  siRNA target sequence for 1200014D15Rik (NM_028772.1,2393-2411).
catctggaagctacagtta

SEQ ID NO: 736075 - DNA, 19 bp, Mus musculus
  siRNA target sequence for 1200014D15Rik (NM_028772.1,2472-2490).
gcaagtggaggttgaacta

SEQ ID NO: 736076 - DNA, 19 bp, Mus musculus
  siRNA target sequence for 1200014D15Rik (NM_028772.1,2560-2578).
cttcagaaagacggtaaaa

SEQ ID NO: 736077 - DNA, 19 bp, Mus musculus
  siRNA target sequence for 1200014D15Rik (NM_028772.1,2563-2581).
cagaaagacggtaaaaaga

SEQ ID NO: 736078 - DNA, 19 bp, Mus musculus
  siRNA target sequence for 1200014D15Rik (NM_028772.1,2571-2589).
cggtaaaaagacaaatctt

SEQ ID NO: 736079 - DNA, 19 bp, Mus musculus
  siRNA target sequence for 1200013B08Rik (NM_028773.2,153-171).
ctccaacgccagtgacaaa

SEQ ID NO: 736080 - DNA, 19 bp, Mus musculus
  siRNA target sequence for 1200013B08Rik (NM_028773.2,252-270).
cgtggtgagcgagaaagaa

SEQ ID NO: 736081 - DNA, 19 bp, Mus musculus
  siRNA target sequence for 1200013B08Rik (NM_028773.2,255-273).
ggtgagcgagaaagaattt

SEQ ID NO: 736082 - DNA, 19 bp, Mus musculus
  siRNA target sequence for 1200013B08Rik (NM_028773.2,256-274).
gtgagcgagaaagaattta

SEQ ID NO: 736083 - DNA, 19 bp, Mus musculus
  siRNA target sequence for 1200013B08Rik (NM_028773.2,260-278).
gcgagaaagaatttaacct

SEQ ID NO: 736084 - DNA, 19 bp, Mus musculus
  siRNA target sequence for 1200013B08Rik (NM_028773.2,276-294).
cctggatgataatattcca

SEQ ID NO: 736085 - DNA, 19 bp, Mus musculus
  siRNA target sequence for 1200013B08Rik (NM_028773.2,510-528).
gatggccctggcctttact

SEQ ID NO: 736086 - DNA, 19 bp, Mus musculus
  siRNA target sequence for 1200013B08Rik (NM_028773.2,698-716).
cttatgaccacgactcatt

SEQ ID NO: 736087 - DNA, 19 bp, Mus musculus
  siRNA target sequence for 1200013B08Rik (NM_028773.2,736-754).
gtgatccagatcgttgaaa

SEQ ID NO: 736088 - DNA, 19 bp, Mus musculus
  siRNA target sequence for 1200013B08Rik (NM_028773.2,790-808).
ggcaagctgggttctttca

SEQ ID NO: 736089 - DNA, 19 bp, Mus musculus
  siRNA target sequence for 1200013B08Rik (NM_028773.2,972-990).
gacgctcgaagacttcaaa

SEQ ID NO: 736090 - DNA, 19 bp, Mus musculus
  siRNA target sequence for 1200013B08Rik (NM_028773.2,974-992).
cgctcgaagacttcaaaga

SEQ ID NO: 736091 - DNA, 19 bp, Mus musculus
  siRNA target sequence for 1200013B08Rik (NM_028773.2,998-1016).
gggaaacgcacctcaatga

SEQ ID NO: 736092 - DNA, 19 bp, Mus musculus
  siRNA target sequence for Robo4 (NM_028783.2,260-278).
ccaccccagacctacatta

SEQ ID NO: 736093 - DNA, 19 bp, Mus musculus
  siRNA target sequence for Robo4 (NM_028783.2,264-282).
cccagacctacattacctt

SEQ ID NO: 736094 - DNA, 19 bp, Mus musculus
  siRNA target sequence for Robo4 (NM_028783.2,265-283).
ccagacctacattaccttt

SEQ ID NO: 736095 - DNA, 19 bp, Mus musculus
  siRNA target sequence for Robo4 (NM_028783.2,640-658).
gactcggggacctatatgt

SEQ ID NO: 736096 - DNA, 19 bp, Mus musculus
  siRNA target sequence for Robo4 (NM_028783.2,642-660).
ctcggggacctatatgtgt

SEQ ID NO: 736097 - DNA, 19 bp, Mus musculus
  siRNA target sequence for Robo4 (NM_028783.2,644-662).
cggggacctatatgtgtat

SEQ ID NO: 736098 - DNA, 19 bp, Mus musculus
  siRNA target sequence for Robo4 (NM_028783.2,657-675).
gtgtatggccaccaacaat

SEQ ID NO: 736099 - DNA, 19 bp, Mus musculus
  siRNA target sequence for Robo4 (NM_028783.2,792-810).
ccccgaacctgtaaaaggt

SEQ ID NO: 736100 - DNA, 19 bp, Mus musculus
  siRNA target sequence for Robo4 (NM_028783.2,981-999).
ctggggccaagactatgaa

SEQ ID NO: 736101 - DNA, 19 bp, Mus musculus
  siRNA target sequence for Robo4 (NM_028783.2,983-1001).
ggggccaagactatgaatt

SEQ ID NO: 736102 - DNA, 19 bp, Mus musculus
  siRNA target sequence for Robo4 (NM_028783.2,1034-1052).
gccctgacagcaatgtgtt

SEQ ID NO: 736103 - DNA, 19 bp, Mus musculus
  siRNA target sequence for Robo4 (NM_028783.2,1090-1108).
cctcaaggagtgaccttaa

SEQ ID NO: 736104 - DNA, 19 bp, Mus musculus
  siRNA target sequence for Robo4 (NM_028783.2,1115-1133).
gcaacggtagtgtctttgt

SEQ ID NO: 736105 - DNA, 19 bp, Mus musculus
  siRNA target sequence for Robo4 (NM_028783.2,1479-1497).
gctgctactaggcattact

SEQ ID NO: 736106 - DNA, 19 bp, Mus musculus
  siRNA target sequence for Robo4 (NM_028783.2,1489-1507).
ggcattactgtgtgtatct

SEQ ID NO: 736107 - DNA, 19 bp, Mus musculus
  siRNA target sequence for Robo4 (NM_028783.2,1490-1508).
gcattactgtgtgtatcta

SEQ ID NO: 736108 - DNA, 19 bp, Mus musculus
  siRNA target sequence for Robo4 (NM_028783.2,1537-1555).
ggcccaggtctgtacagat

SEQ ID NO: 736109 - DNA, 19 bp, Mus musculus
  siRNA target sequence for Robo4 (NM_028783.2,1540-1558).
ccaggtctgtacagataca

SEQ ID NO: 736110 - DNA, 19 bp, Mus musculus
  siRNA target sequence for Robo4 (NM_028783.2,1562-1580).
gcgaggacgccattctaaa

SEQ ID NO: 736111 - DNA, 19 bp, Mus musculus
  siRNA target sequence for Robo4 (NM_028783.2,1563-1581).
cgaggacgccattctaaaa

SEQ ID NO: 736112 - DNA, 19 bp, Mus musculus
  siRNA target sequence for Robo4 (NM_028783.2,1567-1585).
gacgccattctaaaacaca

SEQ ID NO: 736113 - DNA, 19 bp, Mus musculus
  siRNA target sequence for Robo4 (NM_028783.2,1711-1729).
ggcaggcgctccttgatct

SEQ ID NO: 736114 - DNA, 19 bp, Mus musculus
  siRNA target sequence for Robo4 (NM_028783.2,1765-1783).
ccagacacgagcacgtttt

SEQ ID NO: 736115 - DNA, 19 bp, Mus musculus
  siRNA target sequence for Robo4 (NM_028783.2,1766-1784).
cagacacgagcacgtttta

SEQ ID NO: 736116 - DNA, 19 bp, Mus musculus
  siRNA target sequence for Robo4 (NM_028783.2,1892-1910).
gggctagctcagatagtct

SEQ ID NO: 736117 - DNA, 19 bp, Mus musculus
  siRNA target sequence for Robo4 (NM_028783.2,2023-2041).
ggcagccaccccatggaaa

SEQ ID NO: 736118 - DNA, 19 bp, Mus musculus
  siRNA target sequence for Robo4 (NM_028783.2,2516-2534).
caacaacctatggctatat

SEQ ID NO: 736119 - DNA, 19 bp, Mus musculus
  siRNA target sequence for Robo4 (NM_028783.2,2653-2671).
ggctccctggccaatggtt

SEQ ID NO: 736120 - DNA, 19 bp, Mus musculus
  siRNA target sequence for Robo4 (NM_028783.2,2715-2733).
cctggttagctcttctgat

SEQ ID NO: 736121 - DNA, 19 bp, Mus musculus
  siRNA target sequence for Robo4 (NM_028783.2,2738-2756).
ccttcctcgctgatactca

SEQ ID NO: 736122 - DNA, 19 bp, Mus musculus
  siRNA target sequence for Robo4 (NM_028783.2,2742-2760).
cctcgctgatactcacttt

SEQ ID NO: 736123 - DNA, 19 bp, Mus musculus
  siRNA target sequence for F13a (NM_028784.2,198-216).
gggtgtcaacctgaaagat

SEQ ID NO: 736124 - DNA, 19 bp, Mus musculus
  siRNA target sequence for F13a (NM_028784.2,200-218).
gtgtcaacctgaaagatta

SEQ ID NO: 736125 - DNA, 19 bp, Mus musculus
  siRNA target sequence for F13a (NM_028784.2,257-275).
gggacagtaacaagattga

SEQ ID NO: 736126 - DNA, 19 bp, Mus musculus
  siRNA target sequence for F13a (NM_028784.2,258-276).
ggacagtaacaagattgat

SEQ ID NO: 736127 - DNA, 19 bp, Mus musculus
  siRNA target sequence for F13a (NM_028784.2,320-338).
gagggcagaccttctacat

SEQ ID NO: 736128 - DNA, 19 bp, Mus musculus
  siRNA target sequence for F13a (NM_028784.2,476-494).
ggggagccaaggttatcat

SEQ ID NO: 736129 - DNA, 19 bp, Mus musculus
  siRNA target sequence for F13a (NM_028784.2,528-546).
gtcttctccggaatgcatt

SEQ ID NO: 736130 - DNA, 19 bp, Mus musculus
  siRNA target sequence for F13a (NM_028784.2,549-567).
ggggaaattccgcatgtat

SEQ ID NO: 736131 - DNA, 19 bp, Mus musculus
  siRNA target sequence for F13a (NM_028784.2,696-714).
gtacgtcctgaatgacatt

SEQ ID NO: 736132 - DNA, 19 bp, Mus musculus
  siRNA target sequence for F13a (NM_028784.2,705-723).
gaatgacattggagtgata

SEQ ID NO: 736133 - DNA, 19 bp, Mus musculus
  siRNA target sequence for F13a (NM_028784.2,711-729).
cattggagtgatattttat

SEQ ID NO: 736134 - DNA, 19 bp, Mus musculus
  siRNA target sequence for F13a (NM_028784.2,793-811).
gatacttgcttgtatgtga

SEQ ID NO: 736135 - DNA, 19 bp, Mus musculus
  siRNA target sequence for F13a (NM_028784.2,917-935).
gatcatgggacaatgtcta

SEQ ID NO: 736136 - DNA, 19 bp, Mus musculus
  siRNA target sequence for F13a (NM_028784.2,965-983).
caggaagtgttgacattct

SEQ ID NO: 736137 - DNA, 19 bp, Mus musculus
  siRNA target sequence for F13a (NM_028784.2,968-986).
gaagtgttgacattctact

SEQ ID NO: 736138 - DNA, 19 bp, Mus musculus
  siRNA target sequence for F13a (NM_028784.2,973-991).
gttgacattctactagaat

SEQ ID NO: 736139 - DNA, 19 bp, Mus musculus
  siRNA target sequence for F13a (NM_028784.2,976-994).
gacattctactagaataca

SEQ ID NO: 736140 - DNA, 19 bp, Mus musculus
  siRNA target sequence for F13a (NM_028784.2,1039-1057).
gctggtgtctttaacacat

SEQ ID NO: 736141 - DNA, 19 bp, Mus musculus
  siRNA target sequence for F13a (NM_028784.2,1040-1058).
ctggtgtctttaacacatt

SEQ ID NO: 736142 - DNA, 19 bp, Mus musculus
  siRNA target sequence for F13a (NM_028784.2,1042-1060).
ggtgtctttaacacatttt

SEQ ID NO: 736143 - DNA, 19 bp, Mus musculus
  siRNA target sequence for F13a (NM_028784.2,1079-1097).
ctgcacgagtcattaccaa

SEQ ID NO: 736144 - DNA, 19 bp, Mus musculus
  siRNA target sequence for F13a (NM_028784.2,1081-1099).
gcacgagtcattaccaatt

SEQ ID NO: 736145 - DNA, 19 bp, Mus musculus
  siRNA target sequence for F13a (NM_028784.2,1082-1100).
cacgagtcattaccaatta

SEQ ID NO: 736146 - DNA, 19 bp, Mus musculus
  siRNA target sequence for F13a (NM_028784.2,1084-1102).
cgagtcattaccaattact

SEQ ID NO: 736147 - DNA, 19 bp, Mus musculus
  siRNA target sequence for F13a (NM_028784.2,1085-1103).
gagtcattaccaattactt

SEQ ID NO: 736148 - DNA, 19 bp, Mus musculus
  siRNA target sequence for F13a (NM_028784.2,1104-1122).
ctcggcccacgacaatgat

SEQ ID NO: 736149 - DNA, 19 bp, Mus musculus
  siRNA target sequence for F13a (NM_028784.2,1224-1242).
gatgacaaggcctgatctt

SEQ ID NO: 736150 - DNA, 19 bp, Mus musculus
  siRNA target sequence for F13a (NM_028784.2,1325-1343).
ctgtccaagccgttaagca

SEQ ID NO: 736151 - DNA, 19 bp, Mus musculus
  siRNA target sequence for F13a (NM_028784.2,1389-1407).
ggtcaacagtgatcttgtt

SEQ ID NO: 736152 - DNA, 19 bp, Mus musculus
  siRNA target sequence for F13a (NM_028784.2,1460-1478).
cccatatcgggaagctaat

SEQ ID NO: 736153 - DNA, 19 bp, Mus musculus
  siRNA target sequence for F13a (NM_028784.2,1461-1479).
ccatatcgggaagctaatt

SEQ ID NO: 736154 - DNA, 19 bp, Mus musculus
  siRNA target sequence for F13a (NM_028784.2,1474-1492).
ctaattgtgaccaagcaaa

SEQ ID NO: 736155 - DNA, 19 bp, Mus musculus
  siRNA target sequence for F13a (NM_028784.2,1499-1517).
gagatggcatgcaggatat

SEQ ID NO: 736156 - DNA, 19 bp, Mus musculus
  siRNA target sequence for F13a (NM_028784.2,1510-1528).
caggatatcacggatactt

SEQ ID NO: 736157 - DNA, 19 bp, Mus musculus
  siRNA target sequence for F13a (NM_028784.2,1518-1536).
cacggatacttacaaattt

SEQ ID NO: 736158 - DNA, 19 bp, Mus musculus
  siRNA target sequence for F13a (NM_028784.2,1520-1538).
cggatacttacaaatttca

SEQ ID NO: 736159 - DNA, 19 bp, Mus musculus
  siRNA target sequence for F13a (NM_028784.2,1521-1539).
ggatacttacaaatttcaa

SEQ ID NO: 736160 - DNA, 19 bp, Mus musculus
  siRNA target sequence for F13a (NM_028784.2,1675-1693).
ggaaaggacttcaaagtga

SEQ ID NO: 736161 - DNA, 19 bp, Mus musculus
  siRNA target sequence for F13a (NM_028784.2,1694-1712).
ctatcaccttccagaacaa

SEQ ID NO: 736162 - DNA, 19 bp, Mus musculus
  siRNA target sequence for F13a (NM_028784.2,1767-1785).
cactggggtatccaagaaa

SEQ ID NO: 736163 - DNA, 19 bp, Mus musculus
  siRNA target sequence for F13a (NM_028784.2,1769-1787).
ctggggtatccaagaaaga

SEQ ID NO: 736164 - DNA, 19 bp, Mus musculus
  siRNA target sequence for F13a (NM_028784.2,1772-1790).
gggtatccaagaaagagtt

SEQ ID NO: 736165 - DNA, 19 bp, Mus musculus
  siRNA target sequence for F13a (NM_028784.2,1869-1887).
catgagccaccttctagaa

SEQ ID NO: 736166 - DNA, 19 bp, Mus musculus
  siRNA target sequence for F13a (NM_028784.2,1939-1957).
gtcctggccaaacaaaagt

SEQ ID NO: 736167 - DNA, 19 bp, Mus musculus
  siRNA target sequence for F13a (NM_028784.2,1946-1964).
ccaaacaaaagtccataat

SEQ ID NO: 736168 - DNA, 19 bp, Mus musculus
  siRNA target sequence for F13a (NM_028784.2,1947-1965).
caaacaaaagtccataata

SEQ ID NO: 736169 - DNA, 19 bp, Mus musculus
  siRNA target sequence for F13a (NM_028784.2,1951-1969).
caaaagtccataatactga

SEQ ID NO: 736170 - DNA, 19 bp, Mus musculus
  siRNA target sequence for F13a (NM_028784.2,1966-1984).
ctgactatccccaagatca

SEQ ID NO: 736171 - DNA, 19 bp, Mus musculus
  siRNA target sequence for F13a (NM_028784.2,2031-2049).
gactgttgagttcactaat

SEQ ID NO: 736172 - DNA, 19 bp, Mus musculus
  siRNA target sequence for F13a (NM_028784.2,2038-2056).
gagttcactaatcctttaa

SEQ ID NO: 736173 - DNA, 19 bp, Mus musculus
  siRNA target sequence for F13a (NM_028784.2,2101-2119).
gtgatgagacccaagagaa

SEQ ID NO: 736174 - DNA, 19 bp, Mus musculus
  siRNA target sequence for F13a (NM_028784.2,2117-2135).
gaaaggtgttccgtgaaat

SEQ ID NO: 736175 - DNA, 19 bp, Mus musculus
  siRNA target sequence for F13a (NM_028784.2,2263-2281).
caaagacgacctactatgt

SEQ ID NO: 736176 - DNA, 19 bp, Mus musculus
  siRNA target sequence for Dock8 (NM_028785.2,330-348).
cgtcagctttcagaatatt

SEQ ID NO: 736177 - DNA, 19 bp, Mus musculus
  siRNA target sequence for Dock8 (NM_028785.2,492-510).
cttgtacgagacggttaat

SEQ ID NO: 736178 - DNA, 19 bp, Mus musculus
  siRNA target sequence for Dock8 (NM_028785.2,495-513).
gtacgagacggttaatgaa

SEQ ID NO: 736179 - DNA, 19 bp, Mus musculus
  siRNA target sequence for Dock8 (NM_028785.2,503-521).
cggttaatgaagtctacaa

SEQ ID NO: 736180 - DNA, 19 bp, Mus musculus
  siRNA target sequence for Dock8 (NM_028785.2,589-607).
cagaaggccttcgataaca

SEQ ID NO: 736181 - DNA, 19 bp, Mus musculus
  siRNA target sequence for Dock8 (NM_028785.2,595-613).
gccttcgataacatcatca

SEQ ID NO: 736182 - DNA, 19 bp, Mus musculus
  siRNA target sequence for Dock8 (NM_028785.2,618-636).
ggaccataagaggatgttt

SEQ ID NO: 736183 - DNA, 19 bp, Mus musculus
  siRNA target sequence for Dock8 (NM_028785.2,641-659).
cctacttccgagttggttt

SEQ ID NO: 736184 - DNA, 19 bp, Mus musculus
  siRNA target sequence for Dock8 (NM_028785.2,727-745).
ctcccggagatctcacata

SEQ ID NO: 736185 - DNA, 19 bp, Mus musculus
  siRNA target sequence for Dock8 (NM_028785.2,729-747).
cccggagatctcacataga

SEQ ID NO: 736186 - DNA, 19 bp, Mus musculus
  siRNA target sequence for Dock8 (NM_028785.2,731-749).
cggagatctcacatagact

SEQ ID NO: 736187 - DNA, 19 bp, Mus musculus
  siRNA target sequence for Dock8 (NM_028785.2,732-750).
ggagatctcacatagacta

SEQ ID NO: 736188 - DNA, 19 bp, Mus musculus
  siRNA target sequence for Dock8 (NM_028785.2,755-773).
gattttatggccagtgttt

SEQ ID NO: 736189 - DNA, 19 bp, Mus musculus
  siRNA target sequence for Dock8 (NM_028785.2,768-786).
gtgtttcggtgcagagttt

SEQ ID NO: 736190 - DNA, 19 bp, Mus musculus
  siRNA target sequence for Dock8 (NM_028785.2,770-788).
gtttcggtgcagagtttgt

SEQ ID NO: 736191 - DNA, 19 bp, Mus musculus
  siRNA target sequence for Dock8 (NM_028785.2,787-805).
gtggaagtgataaaagact

SEQ ID NO: 736192 - DNA, 19 bp, Mus musculus
  siRNA target sequence for Dock8 (NM_028785.2,836-854).
ctaacaaggcctacattca

SEQ ID NO: 736193 - DNA, 19 bp, Mus musculus
  siRNA target sequence for Dock8 (NM_028785.2,844-862).
gcctacattcagatcactt

SEQ ID NO: 736194 - DNA, 19 bp, Mus musculus
  siRNA target sequence for Dock8 (NM_028785.2,845-863).
cctacattcagatcacttt

SEQ ID NO: 736195 - DNA, 19 bp, Mus musculus
  siRNA target sequence for Dock8 (NM_028785.2,846-864).
ctacattcagatcactttt

SEQ ID NO: 736196 - DNA, 19 bp, Mus musculus
  siRNA target sequence for Dock8 (NM_028785.2,860-878).
cttttgtggagccttactt

SEQ ID NO: 736197 - DNA, 19 bp, Mus musculus
  siRNA target sequence for Dock8 (NM_028785.2,868-886).
gagccttactttgatgaat

SEQ ID NO: 736198 - DNA, 19 bp, Mus musculus
  siRNA target sequence for Dock8 (NM_028785.2,908-926).
cctacttcgagaagaattt

SEQ ID NO: 736199 - DNA, 19 bp, Mus musculus
  siRNA target sequence for Dock8 (NM_028785.2,1033-1051).
gccttcccctacatcaaga

SEQ ID NO: 736200 - DNA, 19 bp, Mus musculus
  siRNA target sequence for Dock8 (NM_028785.2,1310-1328).
gcttcaaggagttcataat

SEQ ID NO: 736201 - DNA, 19 bp, Mus musculus
  siRNA target sequence for Dock8 (NM_028785.2,1430-1448).
gcctcaggcccatgattga

SEQ ID NO: 736202 - DNA, 19 bp, Mus musculus
  siRNA target sequence for Dock8 (NM_028785.2,1439-1457).
ccatgattgagcggaaaat

SEQ ID NO: 736203 - DNA, 19 bp, Mus musculus
  siRNA target sequence for 1300003P13Rik (NM_028787.2,292-310).
cgctttgcaggcattgcat

SEQ ID NO: 736204 - DNA, 19 bp, Mus musculus
  siRNA target sequence for 1300003P13Rik (NM_028787.2,341-359).
gactgcaaatggtttatgt

SEQ ID NO: 736205 - DNA, 19 bp, Mus musculus
  siRNA target sequence for 1300003P13Rik (NM_028787.2,346-364).
caaatggtttatgtgttta

SEQ ID NO: 736206 - DNA, 19 bp, Mus musculus
  siRNA target sequence for 1300003P13Rik (NM_028787.2,417-435).
ggccctggggatagtgatt

SEQ ID NO: 736207 - DNA, 19 bp, Mus musculus
  siRNA target sequence for 1300003P13Rik (NM_028787.2,419-437).
ccctggggatagtgattct

SEQ ID NO: 736208 - DNA, 19 bp, Mus musculus
  siRNA target sequence for 1300003P13Rik (NM_028787.2,472-490).
gaactcacctcgtatgtct

SEQ ID NO: 736209 - DNA, 19 bp, Mus musculus
  siRNA target sequence for 1300003P13Rik (NM_028787.2,527-545).
cgaaaacatccatgtttgt

SEQ ID NO: 736210 - DNA, 19 bp, Mus musculus
  siRNA target sequence for 1300003P13Rik (NM_028787.2,553-571).
cttttgggcttcattattt

SEQ ID NO: 736211 - DNA, 19 bp, Mus musculus
  siRNA target sequence for 1300003P13Rik (NM_028787.2,589-607).
cagtgtacaagaggattta

SEQ ID NO: 736212 - DNA, 19 bp, Mus musculus
  siRNA target sequence for 1300003P13Rik (NM_028787.2,632-650).
cagatgctgaaggttactt

SEQ ID NO: 736213 - DNA, 19 bp, Mus musculus
  siRNA target sequence for 1300003P13Rik (NM_028787.2,652-670).
gctgcgtgcacaacagata

SEQ ID NO: 736214 - DNA, 19 bp, Mus musculus
  siRNA target sequence for 1300003P13Rik (NM_028787.2,655-673).
gcgtgcacaacagatacaa

SEQ ID NO: 736215 - DNA, 19 bp, Mus musculus
  siRNA target sequence for 1300003P13Rik (NM_028787.2,667-685).
gatacaagcatgagtagtt

SEQ ID NO: 736216 - DNA, 19 bp, Mus musculus
  siRNA target sequence for 1300003P13Rik (NM_028787.2,671-689).
caagcatgagtagttcttt

SEQ ID NO: 736217 - DNA, 19 bp, Mus musculus
  siRNA target sequence for 1300003P13Rik (NM_028787.2,710-728).
ctgtgaagtttcatgatct

SEQ ID NO: 736218 - DNA, 19 bp, Mus musculus
  siRNA target sequence for 1300003P13Rik (NM_028787.2,741-759).
gctcgagagcacaaacatt

SEQ ID NO: 736219 - DNA, 19 bp, Mus musculus
  siRNA target sequence for 1300003P13Rik (NM_028787.2,787-805).
cgtgtaaggttcagcaata

SEQ ID NO: 736220 - DNA, 19 bp, Mus musculus
  siRNA target sequence for 1300003P13Rik (NM_028787.2,788-806).
gtgtaaggttcagcaatat

SEQ ID NO: 736221 - DNA, 19 bp, Mus musculus
  siRNA target sequence for 1300003P13Rik (NM_028787.2,790-808).
gtaaggttcagcaatatca

SEQ ID NO: 736222 - DNA, 19 bp, Mus musculus
  siRNA target sequence for 1300003P13Rik (NM_028787.2,852-870).
gctctctcggatgtcttat

SEQ ID NO: 736223 - DNA, 19 bp, Mus musculus
  siRNA target sequence for 1300003P13Rik (NM_028787.2,903-921).
gactgtagggaaattgact

SEQ ID NO: 736224 - DNA, 19 bp, Mus musculus
  siRNA target sequence for 1300003P13Rik (NM_028787.2,961-979).
gtgtggtttttggcaaatt

SEQ ID NO: 736225 - DNA, 19 bp, Mus musculus
  siRNA target sequence for 1300003P13Rik (NM_028787.2,1011-1029).
ggttgccatagtgaatatt

SEQ ID NO: 736226 - DNA, 19 bp, Mus musculus
  siRNA target sequence for 1300003P13Rik (NM_028787.2,1097-1115).
ggtttaccctctctaaact

SEQ ID NO: 736227 - DNA, 19 bp, Mus musculus
  siRNA target sequence for 1300003P13Rik (NM_028787.2,1098-1116).
gtttaccctctctaaacta

SEQ ID NO: 736228 - DNA, 19 bp, Mus musculus
  siRNA target sequence for 1300003P13Rik (NM_028787.2,1109-1127).
ctaaactattagctgtaat

SEQ ID NO: 736229 - DNA, 19 bp, Mus musculus
  siRNA target sequence for 1300003P13Rik (NM_028787.2,1159-1177).
ctgtctgggtctgaaaagt

SEQ ID NO: 736230 - DNA, 19 bp, Mus musculus
  siRNA target sequence for 1300003P13Rik (NM_028787.2,1183-1201).
ggaagagacacaataggtt

SEQ ID NO: 736231 - DNA, 19 bp, Mus musculus
  siRNA target sequence for 1300003P13Rik (NM_028787.2,1211-1229).
cccttgctggagctatgtt

SEQ ID NO: 736232 - DNA, 19 bp, Mus musculus
  siRNA target sequence for 1300003P13Rik (NM_028787.2,1213-1231).
cttgctggagctatgttct

SEQ ID NO: 736233 - DNA, 19 bp, Mus musculus
  siRNA target sequence for 1300003P13Rik (NM_028787.2,1235-1253).
ctgtctacattgtgatgat

SEQ ID NO: 736234 - DNA, 19 bp, Mus musculus
  siRNA target sequence for 1300003P13Rik (NM_028787.2,1248-1266).
gatgatcaagagaaaggta

SEQ ID NO: 736235 - DNA, 19 bp, Mus musculus
  siRNA target sequence for 1300003P13Rik (NM_028787.2,1343-1361).
ggttcttcttactgcatta

SEQ ID NO: 736236 - DNA, 19 bp, Mus musculus
  siRNA target sequence for 1300003P13Rik (NM_028787.2,1344-1362).
gttcttcttactgcattat

SEQ ID NO: 736237 - DNA, 19 bp, Mus musculus
  siRNA target sequence for 1300003P13Rik (NM_028787.2,1347-1365).
cttcttactgcattatact

SEQ ID NO: 736238 - DNA, 19 bp, Mus musculus
  siRNA target sequence for 1300003P13Rik (NM_028787.2,1396-1414).
gtggtactgttgtgtatca

SEQ ID NO: 736239 - DNA, 19 bp, Mus musculus
  siRNA target sequence for 1300003P13Rik (NM_028787.2,1398-1416).
ggtactgttgtgtatcatt

SEQ ID NO: 736240 - DNA, 19 bp, Mus musculus
  siRNA target sequence for 1300003P13Rik (NM_028787.2,1399-1417).
gtactgttgtgtatcatta

SEQ ID NO: 736241 - DNA, 19 bp, Mus musculus
  siRNA target sequence for 1300003P13Rik (NM_028787.2,1422-1440).
cggcctcatcggaacagtt

SEQ ID NO: 736242 - DNA, 19 bp, Mus musculus
  siRNA target sequence for 1300003P13Rik (NM_028787.2,1436-1454).
cagttctgtccgagtttct

SEQ ID NO: 736243 - DNA, 19 bp, Mus musculus
  siRNA target sequence for 1300003P13Rik (NM_028787.2,1515-1533).
gatacctctctccatcata

SEQ ID NO: 736244 - DNA, 19 bp, Mus musculus
  siRNA target sequence for 1300003P13Rik (NM_028787.2,1554-1572).
ggtgcagttttcttggtta

SEQ ID NO: 736245 - DNA, 19 bp, Mus musculus
  siRNA target sequence for 1300003P13Rik (NM_028787.2,1555-1573).
gtgcagttttcttggttat

SEQ ID NO: 736246 - DNA, 19 bp, Mus musculus
  siRNA target sequence for 1300003P13Rik (NM_028787.2,1580-1598).
caggcgctatccctgtatt

SEQ ID NO: 736247 - DNA, 19 bp, Mus musculus
  siRNA target sequence for 1300003P13Rik (NM_028787.2,1582-1600).
ggcgctatccctgtatttt

SEQ ID NO: 736248 - DNA, 19 bp, Mus musculus
  siRNA target sequence for 1300003P13Rik (NM_028787.2,1583-1601).
gcgctatccctgtattttt

SEQ ID NO: 736249 - DNA, 19 bp, Mus musculus
  siRNA target sequence for 1300003P13Rik (NM_028787.2,1680-1698).
ctttatatgcagaaaacat

SEQ ID NO: 736250 - DNA, 19 bp, Mus musculus
  siRNA target sequence for 1300003P13Rik (NM_028787.2,1688-1706).
gcagaaaacatcgaattca

SEQ ID NO: 736251 - DNA, 19 bp, Mus musculus
  siRNA target sequence for 1300003P13Rik (NM_028787.2,1729-1747).
cagtgcgagagcctcattt

SEQ ID NO: 736252 - DNA, 19 bp, Mus musculus
  siRNA target sequence for 1300003P13Rik (NM_028787.2,1731-1749).
gtgcgagagcctcatttct

SEQ ID NO: 736253 - DNA, 19 bp, Mus musculus
  siRNA target sequence for 1300004O04Rik (NM_028790.1,200-218).
ggacacagcgagaattgga

SEQ ID NO: 736254 - DNA, 19 bp, Mus musculus
  siRNA target sequence for 1300004O04Rik (NM_028790.1,207-225).
gcgagaattggacaaatta

SEQ ID NO: 736255 - DNA, 19 bp, Mus musculus
  siRNA target sequence for 1300004O04Rik (NM_028790.1,208-226).
cgagaattggacaaattat

SEQ ID NO: 736256 - DNA, 19 bp, Mus musculus
  siRNA target sequence for 1300004O04Rik (NM_028790.1,265-283).
gcatggagatcagtatcaa

SEQ ID NO: 736257 - DNA, 19 bp, Mus musculus
  siRNA target sequence for 1300004O04Rik (NM_028790.1,338-356).
ctctacgtttgtagctaaa

SEQ ID NO: 736258 - DNA, 19 bp, Mus musculus
  siRNA target sequence for 1300004O04Rik (NM_028790.1,499-517).
gcaggttcagcgattccat

SEQ ID NO: 736259 - DNA, 19 bp, Mus musculus
  siRNA target sequence for 1300004O04Rik (NM_028790.1,503-521).
gttcagcgattccatttgt

SEQ ID NO: 736260 - DNA, 19 bp, Mus musculus
  siRNA target sequence for 1300004O04Rik (NM_028790.1,506-524).
cagcgattccatttgtaat

SEQ ID NO: 736261 - DNA, 19 bp, Mus musculus
  siRNA target sequence for 1300004O04Rik (NM_028790.1,508-526).
gcgattccatttgtaatga

SEQ ID NO: 736262 - DNA, 19 bp, Mus musculus
  siRNA target sequence for 1300004O04Rik (NM_028790.1,509-527).
cgattccatttgtaatgaa

SEQ ID NO: 736263 - DNA, 19 bp, Mus musculus
  siRNA target sequence for 1300004O04Rik (NM_028790.1,613-631).
catttggtggccagatcat

SEQ ID NO: 736264 - DNA, 19 bp, Mus musculus
  siRNA target sequence for 1300004O04Rik (NM_028790.1,642-660).
gagacagtcgccaccattt

SEQ ID NO: 736265 - DNA, 19 bp, Mus musculus
  siRNA target sequence for 1300004O04Rik (NM_028790.1,678-696).
catgggcatccctttctga

SEQ ID NO: 736266 - DNA, 19 bp, Mus musculus
  siRNA target sequence for 1300004O04Rik (NM_028790.1,698-716).
gtctgtggatatgtttaaa

SEQ ID NO: 736267 - DNA, 19 bp, Mus musculus
  siRNA target sequence for 1300004O04Rik (NM_028790.1,700-718).
ctgtggatatgtttaaatt

SEQ ID NO: 736268 - DNA, 19 bp, Mus musculus
  siRNA target sequence for 1300004O04Rik (NM_028790.1,804-822).
cgtgttgaggcctttgact

SEQ ID NO: 736269 - DNA, 19 bp, Mus musculus
  siRNA target sequence for 1300004O04Rik (NM_028790.1,862-880).
gcgcttttctcatttacaa

SEQ ID NO: 736270 - DNA, 19 bp, Mus musculus
  siRNA target sequence for 1300004O04Rik (NM_028790.1,863-881).
cgcttttctcatttacaat

SEQ ID NO: 736271 - DNA, 19 bp, Mus musculus
  siRNA target sequence for 1300004O04Rik (NM_028790.1,985-1003).
gcctaggcaggaaatatgt

SEQ ID NO: 736272 - DNA, 19 bp, Mus musculus
  siRNA target sequence for 1300004O04Rik (NM_028790.1,986-1004).
cctaggcaggaaatatgtt

SEQ ID NO: 736273 - DNA, 19 bp, Mus musculus
  siRNA target sequence for 1300004O04Rik (NM_028790.1,987-1005).
ctaggcaggaaatatgtta

SEQ ID NO: 736274 - DNA, 19 bp, Mus musculus
  siRNA target sequence for 1300004O04Rik (NM_028790.1,1031-1049).
cagtgcacagtgggatata

SEQ ID NO: 736275 - DNA, 19 bp, Mus musculus
  siRNA target sequence for 1300004O04Rik (NM_028790.1,1035-1053).
gcacagtgggatataagca

SEQ ID NO: 736276 - DNA, 19 bp, Mus musculus
  siRNA target sequence for 1300004O04Rik (NM_028790.1,1166-1184).
gcaagatgccatatctgtt

SEQ ID NO: 736277 - DNA, 19 bp, Mus musculus
  siRNA target sequence for 1300004O04Rik (NM_028790.1,1167-1185).
caagatgccatatctgtta

SEQ ID NO: 736278 - DNA, 19 bp, Mus musculus
  siRNA target sequence for 1300004O04Rik (NM_028790.1,1213-1231).
cccacatagcttatcatct

SEQ ID NO: 736279 - DNA, 19 bp, Mus musculus
  siRNA target sequence for 1300004O04Rik (NM_028790.1,1241-1259).
cctcacaaagcgaccttta

SEQ ID NO: 736280 - DNA, 19 bp, Mus musculus
  siRNA target sequence for 1300004O04Rik (NM_028790.1,1242-1260).
ctcacaaagcgacctttat

SEQ ID NO: 736281 - DNA, 19 bp, Mus musculus
  siRNA target sequence for 1300004O04Rik (NM_028790.1,1262-1280).
ggacccccattacatatct

SEQ ID NO: 736282 - DNA, 19 bp, Mus musculus
  siRNA target sequence for 1300004O04Rik (NM_028790.1,1263-1281).
gacccccattacatatctt

SEQ ID NO: 736283 - DNA, 19 bp, Mus musculus
  siRNA target sequence for 1300004O04Rik (NM_028790.1,1265-1283).
cccccattacatatcttgt

SEQ ID NO: 736284 - DNA, 19 bp, Mus musculus
  siRNA target sequence for 1300004O04Rik (NM_028790.1,1268-1286).
ccattacatatcttgtgaa

SEQ ID NO: 736285 - DNA, 19 bp, Mus musculus
  siRNA target sequence for 1300004O04Rik (NM_028790.1,1301-1319).
gagcgaggacgatcagata

SEQ ID NO: 736286 - DNA, 19 bp, Mus musculus
  siRNA target sequence for 1300004O04Rik (NM_028790.1,1303-1321).
gcgaggacgatcagatata

SEQ ID NO: 736287 - DNA, 19 bp, Mus musculus
  siRNA target sequence for 1300004O04Rik (NM_028790.1,1304-1322).
cgaggacgatcagatatat

SEQ ID NO: 736288 - DNA, 19 bp, Mus musculus
  siRNA target sequence for 1300004O04Rik (NM_028790.1,1305-1323).
gaggacgatcagatatatt

SEQ ID NO: 736289 - DNA, 19 bp, Mus musculus
  siRNA target sequence for 1300004O04Rik (NM_028790.1,1308-1326).
gacgatcagatatattaca

SEQ ID NO: 736290 - DNA, 19 bp, Mus musculus
  siRNA target sequence for 1300004O04Rik (NM_028790.1,1311-1329).
gatcagatatattacatca

SEQ ID NO: 736291 - DNA, 19 bp, Mus musculus
  siRNA target sequence for 1300004O04Rik (NM_028790.1,1314-1332).
cagatatattacatcactt

SEQ ID NO: 736292 - DNA, 19 bp, Mus musculus
  siRNA target sequence for 1300004O04Rik (NM_028790.1,1328-1346).
cacttgctcggtggtaaat

SEQ ID NO: 736293 - DNA, 19 bp, Mus musculus
  siRNA target sequence for 1300004O04Rik (NM_028790.1,1337-1355).
ggtggtaaatggagacaaa

SEQ ID NO: 736294 - DNA, 19 bp, Mus musculus
  siRNA target sequence for 1300004O04Rik (NM_028790.1,1384-1402).
gaagaaagcccctcaaaga

SEQ ID NO: 736295 - DNA, 19 bp, Mus musculus
  siRNA target sequence for 1300004O04Rik (NM_028790.1,1506-1524).
caggctgtcgacagcaatt

SEQ ID NO: 736296 - DNA, 19 bp, Mus musculus
  siRNA target sequence for 1300004O04Rik (NM_028790.1,1509-1527).
gctgtcgacagcaattcgt

SEQ ID NO: 736297 - DNA, 19 bp, Mus musculus
  siRNA target sequence for 1300004O04Rik (NM_028790.1,1574-1592).
ctttgctggcaatattggt

SEQ ID NO: 736298 - DNA, 19 bp, Mus musculus
  siRNA target sequence for 1300004O04Rik (NM_028790.1,1590-1608).
ggtggctggtcaaaatcca

SEQ ID NO: 736299 - DNA, 19 bp, Mus musculus
  siRNA target sequence for 1300004O04Rik (NM_028790.1,1591-1609).
gtggctggtcaaaatccat

SEQ ID NO: 736300 - DNA, 19 bp, Mus musculus
  siRNA target sequence for 1300004O04Rik (NM_028790.1,1614-1632).
gaagctgcagcctcttgta

SEQ ID NO: 736301 - DNA, 19 bp, Mus musculus
  siRNA target sequence for 1300004O04Rik (NM_028790.1,1657-1675).
ctgatggacttaaaagtgt

SEQ ID NO: 736302 - DNA, 19 bp, Mus musculus
  siRNA target sequence for 1300006C06Rik (NM_028792.1,907-925).
gagttgcgtgccatggaaa

SEQ ID NO: 736303 - DNA, 19 bp, Mus musculus
  siRNA target sequence for 1300006C06Rik (NM_028792.1,975-993).
cacaaatctaccatgagaa

SEQ ID NO: 736304 - DNA, 19 bp, Mus musculus
  siRNA target sequence for 1300006C06Rik (NM_028792.1,1089-1107).
ggctgtctccgaacactat

SEQ ID NO: 736305 - DNA, 19 bp, Mus musculus
  siRNA target sequence for 1810018F18Rik (NM_028795.1,901-919).
gcaaaatgtggttttgtga

SEQ ID NO: 736306 - DNA, 19 bp, Mus musculus
  siRNA target sequence for 1810018F18Rik (NM_028795.1,910-928).
ggttttgtgacgtttggaa

SEQ ID NO: 736307 - DNA, 19 bp, Mus musculus
  siRNA target sequence for 1810018F18Rik (NM_028795.1,911-929).
gttttgtgacgtttggaat

SEQ ID NO: 736308 - DNA, 19 bp, Mus musculus
  siRNA target sequence for 1810018F18Rik (NM_028795.1,938-956).
cttctcagagagtgtacaa

SEQ ID NO: 736309 - DNA, 19 bp, Mus musculus
  siRNA target sequence for 1810018F18Rik (NM_028795.1,945-963).
gagagtgtacaaatgctaa

SEQ ID NO: 736310 - DNA, 19 bp, Mus musculus
  siRNA target sequence for 1810018F18Rik (NM_028795.1,1009-1027).
gttggtcaccattggttaa

SEQ ID NO: 736311 - DNA, 19 bp, Mus musculus
  siRNA target sequence for 2300002G24Rik (NM_028798.1,109-127).
cgccaaaggcttttccaaa

SEQ ID NO: 736312 - DNA, 19 bp, Mus musculus
  siRNA target sequence for Tgm5 (NM_028799.1,162-180).
ggcaccacacggaagagat

SEQ ID NO: 736313 - DNA, 19 bp, Mus musculus
  siRNA target sequence for Tgm5 (NM_028799.1,183-201).
gtgttgaccggcttgttgt

SEQ ID NO: 736314 - DNA, 19 bp, Mus musculus
  siRNA target sequence for Tgm5 (NM_028799.1,257-275).
ccaggcatggacagtatca

SEQ ID NO: 736315 - DNA, 19 bp, Mus musculus
  siRNA target sequence for Tgm5 (NM_028799.1,317-335).
gggactcgggcagtattca

SEQ ID NO: 736316 - DNA, 19 bp, Mus musculus
  siRNA target sequence for Tgm5 (NM_028799.1,440-458).
ggccgatacctcctgaaaa

SEQ ID NO: 736317 - DNA, 19 bp, Mus musculus
  siRNA target sequence for Tgm5 (NM_028799.1,535-553).
cccagcggattcagtgtat

SEQ ID NO: 736318 - DNA, 19 bp, Mus musculus
  siRNA target sequence for Tgm5 (NM_028799.1,537-555).
cagcggattcagtgtatct

SEQ ID NO: 736319 - DNA, 19 bp, Mus musculus
  siRNA target sequence for Tgm5 (NM_028799.1,567-585).
cccagaggcaggagtatgt

SEQ ID NO: 736320 - DNA, 19 bp, Mus musculus
  siRNA target sequence for Tgm5 (NM_028799.1,634-652).
cccatgcccctggaactat

SEQ ID NO: 736321 - DNA, 19 bp, Mus musculus
  siRNA target sequence for Tgm5 (NM_028799.1,665-683).
gagaatatcatagatatct

SEQ ID NO: 736322 - DNA, 19 bp, Mus musculus
  siRNA target sequence for Tgm5 (NM_028799.1,821-839).
ggcaactggagtgagaatt

SEQ ID NO: 736323 - DNA, 19 bp, Mus musculus
  siRNA target sequence for Tgm5 (NM_028799.1,822-840).
gcaactggagtgagaatta

SEQ ID NO: 736324 - DNA, 19 bp, Mus musculus
  siRNA target sequence for Tgm5 (NM_028799.1,823-841).
caactggagtgagaattat

SEQ ID NO: 736325 - DNA, 19 bp, Mus musculus
  siRNA target sequence for Tgm5 (NM_028799.1,873-891).
gcagcgtggccatccttaa

SEQ ID NO: 736326 - DNA, 19 bp, Mus musculus
  siRNA target sequence for Tgm5 (NM_028799.1,876-894).
gcgtggccatccttaagca

SEQ ID NO: 736327 - DNA, 19 bp, Mus musculus
  siRNA target sequence for Tgm5 (NM_028799.1,991-1009).
ccgcgtgatcaccaacttt

SEQ ID NO: 736328 - DNA, 19 bp, Mus musculus
  siRNA target sequence for Tgm5 (NM_028799.1,1026-1044).
ccgatgggaacctgatcat

SEQ ID NO: 736329 - DNA, 19 bp, Mus musculus
  siRNA target sequence for Tgm5 (NM_028799.1,1027-1045).
cgatgggaacctgatcatt

SEQ ID NO: 736330 - DNA, 19 bp, Mus musculus
  siRNA target sequence for Tgm5 (NM_028799.1,1037-1055).
ctgatcattgatgagtatt

SEQ ID NO: 736331 - DNA, 19 bp, Mus musculus
  siRNA target sequence for Tgm5 (NM_028799.1,1278-1296).
cacgctttgcattttctat

SEQ ID NO: 736332 - DNA, 19 bp, Mus musculus
  siRNA target sequence for Tgm5 (NM_028799.1,1332-1350).
gcgggaaggagcagaaact

SEQ ID NO: 736333 - DNA, 19 bp, Mus musculus
  siRNA target sequence for Tgm5 (NM_028799.1,1364-1382).
gctactgttgggaatttta

SEQ ID NO: 736334 - DNA, 19 bp, Mus musculus
  siRNA target sequence for Tgm5 (NM_028799.1,1404-1422).
gtgatgagcgtgatgacat

SEQ ID NO: 736335 - DNA, 19 bp, Mus musculus
  siRNA target sequence for Tgm5 (NM_028799.1,1651-1669).
caaaatgggccaagacata

SEQ ID NO: 736336 - DNA, 19 bp, Mus musculus
  siRNA target sequence for Tgm5 (NM_028799.1,1657-1675).
gggccaagacataaacttt

SEQ ID NO: 736337 - DNA, 19 bp, Mus musculus
  siRNA target sequence for Tgm5 (NM_028799.1,1676-1694).
gtcctgttggctgtcaata

SEQ ID NO: 736338 - DNA, 19 bp, Mus musculus
  siRNA target sequence for Tgm5 (NM_028799.1,1712-1730).
gatctcaaactcaacttga

SEQ ID NO: 736339 - DNA, 19 bp, Mus musculus
  siRNA target sequence for Tgm5 (NM_028799.1,1845-1863).
cacagtacagccagtatct

SEQ ID NO: 736340 - DNA, 19 bp, Mus musculus
  siRNA target sequence for Tgm5 (NM_028799.1,1847-1865).
cagtacagccagtatctgt

SEQ ID NO: 736341 - DNA, 19 bp, Mus musculus
  siRNA target sequence for Tgm5 (NM_028799.1,1862-1880).
ctgtcgacggacaagctaa

SEQ ID NO: 736342 - DNA, 19 bp, Mus musculus
  siRNA target sequence for Tgm5 (NM_028799.1,1890-1908).
gtgccctgggtgaagagaa

SEQ ID NO: 736343 - DNA, 19 bp, Mus musculus
  siRNA target sequence for Tgm5 (NM_028799.1,1960-1978).
gggcatcatgattaatgtt

SEQ ID NO: 736344 - DNA, 19 bp, Mus musculus
  siRNA target sequence for Tgm5 (NM_028799.1,1983-2001).
gagctgcctttgtgaatca

SEQ ID NO: 736345 - DNA, 19 bp, Mus musculus
  siRNA target sequence for Tgm5 (NM_028799.1,2181-2199).
ggcagatccaagctaatct

SEQ ID NO: 736346 - DNA, 19 bp, Mus musculus
  siRNA target sequence for Tgm5 (NM_028799.1,2192-2210).
gctaatctgaggagcaata

SEQ ID NO: 736347 - DNA, 19 bp, Mus musculus
  siRNA target sequence for Tgm5 (NM_028799.1,2198-2216).
ctgaggagcaataggttta

SEQ ID NO: 736348 - DNA, 19 bp, Mus musculus
  siRNA target sequence for Tgm5 (NM_028799.1,2202-2220).
ggagcaataggtttaaaga

SEQ ID NO: 736349 - DNA, 19 bp, Mus musculus
  siRNA target sequence for Tgm5 (NM_028799.1,2229-2247).
gctacaagaacgtgtatgt

SEQ ID NO: 736350 - DNA, 19 bp, Mus musculus
  siRNA target sequence for Tgm5 (NM_028799.1,2230-2248).
ctacaagaacgtgtatgta

SEQ ID NO: 736351 - DNA, 19 bp, Mus musculus
  siRNA target sequence for 1200009I06Rik (NM_028807.1,196-214).
cccctgggccagaggtaaa

SEQ ID NO: 736352 - DNA, 19 bp, Mus musculus
  siRNA target sequence for 1200009I06Rik (NM_028807.1,431-449).
cttgagacgggccatagat

SEQ ID NO: 736353 - DNA, 19 bp, Mus musculus
  siRNA target sequence for 1200009I06Rik (NM_028807.1,434-452).
gagacgggccatagatgaa

SEQ ID NO: 736354 - DNA, 19 bp, Mus musculus
  siRNA target sequence for 1200009I06Rik (NM_028807.1,560-578).
ggaaccccaggcagaaagt

SEQ ID NO: 736355 - DNA, 19 bp, Mus musculus
  siRNA target sequence for 1200009I06Rik (NM_028807.1,601-619).
ctgagcggcagctagtgaa

SEQ ID NO: 736356 - DNA, 19 bp, Mus musculus
  siRNA target sequence for 1200009I06Rik (NM_028807.1,611-629).
gctagtgaaggcctttgaa

SEQ ID NO: 736357 - DNA, 19 bp, Mus musculus
  siRNA target sequence for 1200009I06Rik (NM_028807.1,615-633).
gtgaaggcctttgaacaat

SEQ ID NO: 736358 - DNA, 19 bp, Mus musculus
  siRNA target sequence for 1200009I06Rik (NM_028807.1,653-671).
gctggtagccgacaaaact

SEQ ID NO: 736359 - DNA, 19 bp, Mus musculus
  siRNA target sequence for 1200009I06Rik (NM_028807.1,654-672).
ctggtagccgacaaaactt

SEQ ID NO: 736360 - DNA, 19 bp, Mus musculus
  siRNA target sequence for 1200009I06Rik (NM_028807.1,670-688).
cttcccgcacctttacaca

SEQ ID NO: 736361 - DNA, 19 bp, Mus musculus
  siRNA target sequence for 1200009I06Rik (NM_028807.1,712-730).
gcgctatggacctttgtct

SEQ ID NO: 736362 - DNA, 19 bp, Mus musculus
  siRNA target sequence for 1200009I06Rik (NM_028807.1,713-731).
cgctatggacctttgtcta

SEQ ID NO: 736363 - DNA, 19 bp, Mus musculus
  siRNA target sequence for 1200009I06Rik (NM_028807.1,862-880).
cccaggccgagggtgattt

SEQ ID NO: 736364 - DNA, 19 bp, Mus musculus
  siRNA target sequence for 1200009I06Rik (NM_028807.1,864-882).
caggccgagggtgatttct

SEQ ID NO: 736365 - DNA, 19 bp, Mus musculus
  siRNA target sequence for 1200009I06Rik (NM_028807.1,867-885).
gccgagggtgatttcttga

SEQ ID NO: 736366 - DNA, 19 bp, Mus musculus
  siRNA target sequence for 1200009I06Rik (NM_028807.1,870-888).
gagggtgatttcttgagta

SEQ ID NO: 736367 - DNA, 19 bp, Mus musculus
  siRNA target sequence for 1200009I06Rik (NM_028807.1,954-972).
caggcaggcgcaaaagtca

SEQ ID NO: 736368 - DNA, 19 bp, Mus musculus
  siRNA target sequence for 1200009I06Rik (NM_028807.1,1050-1068).
cagaaggtgcgcttagaga

SEQ ID NO: 736369 - DNA, 19 bp, Mus musculus
  siRNA target sequence for 1200009I06Rik (NM_028807.1,1271-1289).
gccgctgcccccacttcta

SEQ ID NO: 736370 - DNA, 19 bp, Mus musculus
  siRNA target sequence for 1200009I06Rik (NM_028807.1,1303-1321).
gggctcgactggaaagtga

SEQ ID NO: 736371 - DNA, 19 bp, Mus musculus
  siRNA target sequence for 1200009I06Rik (NM_028807.1,1311-1329).
ctggaaagtgactacacta

SEQ ID NO: 736372 - DNA, 19 bp, Mus musculus
  siRNA target sequence for 1200009I06Rik (NM_028807.1,1343-1361).
caagatcacaagctgtttt

SEQ ID NO: 736373 - DNA, 19 bp, Mus musculus
  siRNA target sequence for 1200009I06Rik (NM_028807.1,1606-1624).
ggtacctgggtgcttacat

SEQ ID NO: 736374 - DNA, 19 bp, Mus musculus
  siRNA target sequence for 1200009I06Rik (NM_028807.1,1752-1770).
gacatgcagcctctattta

SEQ ID NO: 736375 - DNA, 19 bp, Mus musculus
  siRNA target sequence for 1200009I06Rik (NM_028807.1,1762-1780).
ctctatttaaggtgctata

SEQ ID NO: 736376 - DNA, 19 bp, Mus musculus
  siRNA target sequence for 1200009I06Rik (NM_028807.1,1968-1986).
cgactgaagggctctaata

SEQ ID NO: 736377 - DNA, 19 bp, Mus musculus
  siRNA target sequence for 1200009I06Rik (NM_028807.1,1969-1987).
gactgaagggctctaataa

SEQ ID NO: 736378 - DNA, 19 bp, Mus musculus
  siRNA target sequence for 1200009I06Rik (NM_028807.1,1998-2016).
gatgcccaggccattagca

SEQ ID NO: 736379 - DNA, 19 bp, Mus musculus
  siRNA target sequence for 1200009I06Rik (NM_028807.1,2084-2102).
cctgggcgagacatacaaa

SEQ ID NO: 736380 - DNA, 19 bp, Mus musculus
  siRNA target sequence for 1200009I06Rik (NM_028807.1,2116-2134).
ggcacctggaaacacttat

SEQ ID NO: 736381 - DNA, 19 bp, Mus musculus
  siRNA target sequence for 1200009I06Rik (NM_028807.1,2308-2326).
cctctgtggacgtgctaat

SEQ ID NO: 736382 - DNA, 19 bp, Mus musculus
  siRNA target sequence for Arpc5l (NM_028809.1,92-110).
gcgtggatatcgacgaatt

SEQ ID NO: 736383 - DNA, 19 bp, Mus musculus
  siRNA target sequence for Arpc5l (NM_028809.1,93-111).
cgtggatatcgacgaattt

SEQ ID NO: 736384 - DNA, 19 bp, Mus musculus
  siRNA target sequence for Arpc5l (NM_028809.1,291-309).
gggtgtagtcctgaaagta

SEQ ID NO: 736385 - DNA, 19 bp, Mus musculus
  siRNA target sequence for Arpc5l (NM_028809.1,293-311).
gtgtagtcctgaaagtact

SEQ ID NO: 736386 - DNA, 19 bp, Mus musculus
  siRNA target sequence for Arpc5l (NM_028809.1,318-336).
ctttaagagcagcgaaatt

SEQ ID NO: 736387 - DNA, 19 bp, Mus musculus
  siRNA target sequence for Arpc5l (NM_028809.1,357-375).
ggacagaaatggcattgat

SEQ ID NO: 736388 - DNA, 19 bp, Mus musculus
  siRNA target sequence for Arpc5l (NM_028809.1,402-420).
gtttgagaagcctacagaa

SEQ ID NO: 736389 - DNA, 19 bp, Mus musculus
  siRNA target sequence for Arpc5l (NM_028809.1,406-424).
gagaagcctacagaaaata

SEQ ID NO: 736390 - DNA, 19 bp, Mus musculus
  siRNA target sequence for Arpc5l (NM_028809.1,469-487).
ggaggactaggctccatta

SEQ ID NO: 736391 - DNA, 19 bp, Mus musculus
  siRNA target sequence for Arpc5l (NM_028809.1,470-488).
gaggactaggctccattat

SEQ ID NO: 736392 - DNA, 19 bp, Mus musculus
  siRNA target sequence for Arpc5l (NM_028809.1,480-498).
ctccattataagagttctt

SEQ ID NO: 736393 - DNA, 19 bp, Mus musculus
  siRNA target sequence for Arpc5l (NM_028809.1,483-501).
cattataagagttcttaca

SEQ ID NO: 736394 - DNA, 19 bp, Mus musculus
  siRNA target sequence for 2810403A07Rik (NM_028814.1,227-245).
ctgccaagatcaatgctat

SEQ ID NO: 736395 - DNA, 19 bp, Mus musculus
  siRNA target sequence for 2810403A07Rik (NM_028814.1,309-327).
caaaagcctaactagcaat

SEQ ID NO: 736396 - DNA, 19 bp, Mus musculus
  siRNA target sequence for 2810403A07Rik (NM_028814.1,404-422).
gaggacagacacaagatga

SEQ ID NO: 736397 - DNA, 19 bp, Mus musculus
  siRNA target sequence for 2810403A07Rik (NM_028814.1,500-518).
ctggagaccgtccattgta

SEQ ID NO: 736398 - DNA, 19 bp, Mus musculus
  siRNA target sequence for 2810403A07Rik (NM_028814.1,507-525).
ccgtccattgtatcttcat

SEQ ID NO: 736399 - DNA, 19 bp, Mus musculus
  siRNA target sequence for 2810403A07Rik (NM_028814.1,509-527).
gtccattgtatcttcatgt

SEQ ID NO: 736400 - DNA, 19 bp, Mus musculus
  siRNA target sequence for 2810403A07Rik (NM_028814.1,611-629).
cagggacaagtccaacttt

SEQ ID NO: 736401 - DNA, 19 bp, Mus musculus
  siRNA target sequence for 2810403A07Rik (NM_028814.1,615-633).
gacaagtccaactttcaat

SEQ ID NO: 736402 - DNA, 19 bp, Mus musculus
  siRNA target sequence for 2810403A07Rik (NM_028814.1,664-682).
gctcccattgctcagttat

SEQ ID NO: 736403 - DNA, 19 bp, Mus musculus
  siRNA target sequence for 2810403A07Rik (NM_028814.1,676-694).
cagttatcacctgctatta

SEQ ID NO: 736404 - DNA, 19 bp, Mus musculus
  siRNA target sequence for 2810403A07Rik (NM_028814.1,708-726).
cttccagtccggaatgcat

SEQ ID NO: 736405 - DNA, 19 bp, Mus musculus
  siRNA target sequence for 2810403A07Rik (NM_028814.1,711-729).
ccagtccggaatgcattat

SEQ ID NO: 736406 - DNA, 19 bp, Mus musculus
  siRNA target sequence for 2810403A07Rik (NM_028814.1,714-732).
gtccggaatgcattatgtt

SEQ ID NO: 736407 - DNA, 19 bp, Mus musculus
  siRNA target sequence for 2810403A07Rik (NM_028814.1,716-734).
ccggaatgcattatgttca

SEQ ID NO: 736408 - DNA, 19 bp, Mus musculus
  siRNA target sequence for 2810403A07Rik (NM_028814.1,717-735).
cggaatgcattatgttcaa

SEQ ID NO: 736409 - DNA, 19 bp, Mus musculus
  siRNA target sequence for 2810403A07Rik (NM_028814.1,765-783).
ggtgcccacttttaatgtt

SEQ ID NO: 736410 - DNA, 19 bp, Mus musculus
  siRNA target sequence for 2810403A07Rik (NM_028814.1,766-784).
gtgcccacttttaatgtta

SEQ ID NO: 736411 - DNA, 19 bp, Mus musculus
  siRNA target sequence for 2810403A07Rik (NM_028814.1,799-817).
ggtccaggctgctcttatt

SEQ ID NO: 736412 - DNA, 19 bp, Mus musculus
  siRNA target sequence for 2810403A07Rik (NM_028814.1,812-830).
cttatttgcaacacattca

SEQ ID NO: 736413 - DNA, 19 bp, Mus musculus
  siRNA target sequence for 2810403A07Rik (NM_028814.1,903-921).
ggcttttgaacccatgtat

SEQ ID NO: 736414 - DNA, 19 bp, Mus musculus
  siRNA target sequence for 2810403A07Rik (NM_028814.1,905-923).
cttttgaacccatgtatat

SEQ ID NO: 736415 - DNA, 19 bp, Mus musculus
  siRNA target sequence for 2810403A07Rik (NM_028814.1,969-987).
gctctgcgagaatctctta

SEQ ID NO: 736416 - DNA, 19 bp, Mus musculus
  siRNA target sequence for 2810403A07Rik (NM_028814.1,972-990).
ctgcgagaatctcttacaa

SEQ ID NO: 736417 - DNA, 19 bp, Mus musculus
  siRNA target sequence for 2810403A07Rik (NM_028814.1,975-993).
cgagaatctcttacaaaca

SEQ ID NO: 736418 - DNA, 19 bp, Mus musculus
  siRNA target sequence for 2810403A07Rik (NM_028814.1,1060-1078).
caaccctctgctataagta

SEQ ID NO: 736419 - DNA, 19 bp, Mus musculus
  siRNA target sequence for 2810403A07Rik (NM_028814.1,1083-1101).
ccctcctcaaccaccatat

SEQ ID NO: 736420 - DNA, 19 bp, Mus musculus
  siRNA target sequence for 2810403A07Rik (NM_028814.1,1090-1108).
caaccaccatattatccat

SEQ ID NO: 736421 - DNA, 19 bp, Mus musculus
  siRNA target sequence for 2810403A07Rik (NM_028814.1,1105-1123).
ccatccaatggctatcagt

SEQ ID NO: 736422 - DNA, 19 bp, Mus musculus
  siRNA target sequence for 2810403A07Rik (NM_028814.1,1122-1140).
gtctggttaccctgttgtt

SEQ ID NO: 736423 - DNA, 19 bp, Mus musculus
  siRNA target sequence for 2810403A07Rik (NM_028814.1,1259-1277).
cacagtatccgataacaca

SEQ ID NO: 736424 - DNA, 19 bp, Mus musculus
  siRNA target sequence for 2810403A07Rik (NM_028814.1,1308-1326).
cccaataagtgctcctttt

SEQ ID NO: 736425 - DNA, 19 bp, Mus musculus
  siRNA target sequence for 2810403A07Rik (NM_028814.1,1309-1327).
ccaataagtgctcctttta

SEQ ID NO: 736426 - DNA, 19 bp, Mus musculus
  siRNA target sequence for 2810403A07Rik (NM_028814.1,1310-1328).
caataagtgctccttttat

SEQ ID NO: 736427 - DNA, 19 bp, Mus musculus
  siRNA target sequence for 2810403A07Rik (NM_028814.1,1468-1486).
catggacccattcatatga

SEQ ID NO: 736428 - DNA, 19 bp, Mus musculus
  siRNA target sequence for 2810403A07Rik (NM_028814.1,1472-1490).
gacccattcatatgactaa

SEQ ID NO: 736429 - DNA, 19 bp, Mus musculus
  siRNA target sequence for 2810403A07Rik (NM_028814.1,1476-1494).
cattcatatgactaattta

SEQ ID NO: 736430 - DNA, 19 bp, Mus musculus
  siRNA target sequence for 2810403A07Rik (NM_028814.1,1480-1498).
catatgactaatttaggta

SEQ ID NO: 736431 - DNA, 19 bp, Mus musculus
  siRNA target sequence for 2810403A07Rik (NM_028814.1,1662-1680).
cggaagccatgattatcca

SEQ ID NO: 736432 - DNA, 19 bp, Mus musculus
  siRNA target sequence for 2810403A07Rik (NM_028814.1,1672-1690).
gattatccagccaagaaga

SEQ ID NO: 736433 - DNA, 19 bp, Mus musculus
  siRNA target sequence for 2810403A07Rik (NM_028814.1,1709-1727).
gatttggcttagtagctta

SEQ ID NO: 736434 - DNA, 19 bp, Mus musculus
  siRNA target sequence for 2610511M17Rik (NM_028818.1,225-243).
catggagcgcccaaaacca

SEQ ID NO: 736435 - DNA, 19 bp, Mus musculus
  siRNA target sequence for 2610511M17Rik (NM_028818.1,282-300).
cgccatgactggaagcatt

SEQ ID NO: 736436 - DNA, 19 bp, Mus musculus
  siRNA target sequence for 2610511M17Rik (NM_028818.1,344-362).
ctcccaataggcattccaa

SEQ ID NO: 736437 - DNA, 19 bp, Mus musculus
  siRNA target sequence for 2610511M17Rik (NM_028818.1,588-606).
caagcctcccggaaatata

SEQ ID NO: 736438 - DNA, 19 bp, Mus musculus
  siRNA target sequence for 2610511M17Rik (NM_028818.1,591-609).
gcctcccggaaatataggt

SEQ ID NO: 736439 - DNA, 19 bp, Mus musculus
  siRNA target sequence for 2610511M17Rik (NM_028818.1,816-834).
ccccactcaggtttacaaa

SEQ ID NO: 736440 - DNA, 19 bp, Mus musculus
  siRNA target sequence for 2610511M17Rik (NM_028818.1,902-920).
ccgtccccaagtctttctt

SEQ ID NO: 736441 - DNA, 19 bp, Mus musculus
  siRNA target sequence for 2610511M17Rik (NM_028818.1,931-949).
cccgcacacaacaagcatt

SEQ ID NO: 736442 - DNA, 19 bp, Mus musculus
  siRNA target sequence for 1700028P05Rik (NM_028833.2,212-230).
gtctgctattacctttgaa

SEQ ID NO: 736443 - DNA, 19 bp, Mus musculus
  siRNA target sequence for 1700028P05Rik (NM_028833.2,217-235).
ctattacctttgaatctga

SEQ ID NO: 736444 - DNA, 19 bp, Mus musculus
  siRNA target sequence for 1700028P05Rik (NM_028833.2,234-252).
gacattgagtcgaaaacaa

SEQ ID NO: 736445 - DNA, 19 bp, Mus musculus
  siRNA target sequence for 1700028P05Rik (NM_028833.2,236-254).
cattgagtcgaaaacaaaa

SEQ ID NO: 736446 - DNA, 19 bp, Mus musculus
  siRNA target sequence for 1700028P05Rik (NM_028833.2,288-306).
ccaaagtcgccctactact

SEQ ID NO: 736447 - DNA, 19 bp, Mus musculus
  siRNA target sequence for 1700028P05Rik (NM_028833.2,606-624).
gagatcatcgagttgaaga

SEQ ID NO: 736448 - DNA, 19 bp, Mus musculus
  siRNA target sequence for 1700028P05Rik (NM_028833.2,648-666).
gatgtggatctgatgagaa

SEQ ID NO: 736449 - DNA, 19 bp, Mus musculus
  siRNA target sequence for 1700028P05Rik (NM_028833.2,700-718).
gaaaggatcggcagataga

SEQ ID NO: 736450 - DNA, 19 bp, Mus musculus
  siRNA target sequence for 1700028P05Rik (NM_028833.2,794-812).
catcaccgggctcaaacaa

SEQ ID NO: 736451 - DNA, 19 bp, Mus musculus
  siRNA target sequence for 1700028P05Rik (NM_028833.2,799-817).
ccgggctcaaacaaaggat

SEQ ID NO: 736452 - DNA, 19 bp, Mus musculus
  siRNA target sequence for 1700028P05Rik (NM_028833.2,907-925).
gcattgccatggaaacata

SEQ ID NO: 736453 - DNA, 19 bp, Mus musculus
  siRNA target sequence for 1700028P05Rik (NM_028833.2,1109-1127).
ccgcatgctgagcaattca

SEQ ID NO: 736454 - DNA, 19 bp, Mus musculus
  siRNA target sequence for 1700028P05Rik (NM_028833.2,1217-1235).
ctcagaaagcccaaagcaa

SEQ ID NO: 736455 - DNA, 19 bp, Mus musculus
  siRNA target sequence for 1700028P05Rik (NM_028833.2,1272-1290).
cgctccccatccaacatct

SEQ ID NO: 736456 - DNA, 19 bp, Mus musculus
  siRNA target sequence for 1700028P05Rik (NM_028833.2,1551-1569).
gaagcactcaccaaaaaat

SEQ ID NO: 736457 - DNA, 19 bp, Mus musculus
  siRNA target sequence for 1700028P05Rik (NM_028833.2,1555-1573).
cactcaccaaaaaatgtca

SEQ ID NO: 736458 - DNA, 19 bp, Mus musculus
  siRNA target sequence for 1700028P05Rik (NM_028833.2,1676-1694).
cgagccagactctgacaat

SEQ ID NO: 736459 - DNA, 19 bp, Mus musculus
  siRNA target sequence for 1700028P05Rik (NM_028833.2,2007-2025).
gaggaggctgtcatcgtta

SEQ ID NO: 736460 - DNA, 19 bp, Mus musculus
  siRNA target sequence for 1700028P05Rik (NM_028833.2,2072-2090).
cagctgctgtcgagagatt

SEQ ID NO: 736461 - DNA, 19 bp, Mus musculus
  siRNA target sequence for 1700028P05Rik (NM_028833.2,2099-2117).
ctctcagagggaaactgtt

SEQ ID NO: 736462 - DNA, 19 bp, Mus musculus
  siRNA target sequence for 1700028P05Rik (NM_028833.2,2103-2121).
cagagggaaactgtttcat

SEQ ID NO: 736463 - DNA, 19 bp, Mus musculus
  siRNA target sequence for 2310014H19Rik (NM_028839.2,312-330).
ccgtggaggatatggtttt

SEQ ID NO: 736464 - DNA, 19 bp, Mus musculus
  siRNA target sequence for 2310014H19Rik (NM_028839.2,313-331).
cgtggaggatatggttttt

SEQ ID NO: 736465 - DNA, 19 bp, Mus musculus
  siRNA target sequence for 2310014H19Rik (NM_028839.2,415-433).
gttcactgtacctcatcaa

SEQ ID NO: 736466 - DNA, 19 bp, Mus musculus
  siRNA target sequence for 2310014H19Rik (NM_028839.2,422-440).
gtacctcatcaactttctt

SEQ ID NO: 736467 - DNA, 19 bp, Mus musculus
  siRNA target sequence for 2310014H19Rik (NM_028839.2,574-592).
gacagtgcgccctctacat

SEQ ID NO: 736468 - DNA, 19 bp, Mus musculus
  siRNA target sequence for 2310014H19Rik (NM_028839.2,657-675).
gtggccctattgaatccaa

SEQ ID NO: 736469 - DNA, 19 bp, Mus musculus
  siRNA target sequence for 2310014H19Rik (NM_028839.2,659-677).
ggccctattgaatccaatt

SEQ ID NO: 736470 - DNA, 19 bp, Mus musculus
  siRNA target sequence for 2310014H19Rik (NM_028839.2,661-679).
ccctattgaatccaattga

SEQ ID NO: 736471 - DNA, 19 bp, Mus musculus
  siRNA target sequence for 2310014H19Rik (NM_028839.2,663-681).
ctattgaatccaattgaaa

SEQ ID NO: 736472 - DNA, 19 bp, Mus musculus
  siRNA target sequence for 2310014H19Rik (NM_028839.2,710-728).
gctgatagtccccttcttt

SEQ ID NO: 736473 - DNA, 19 bp, Mus musculus
  siRNA target sequence for 2310014H19Rik (NM_028839.2,720-738).
cccttctttgtcaatgctt

SEQ ID NO: 736474 - DNA, 19 bp, Mus musculus
  siRNA target sequence for 2310014H19Rik (NM_028839.2,748-766).
gggtagtggacaatttcct

SEQ ID NO: 736475 - DNA, 19 bp, Mus musculus
  siRNA target sequence for 2310014H19Rik (NM_028839.2,779-797).
gaagacgaaagctaaacta

SEQ ID NO: 736476 - DNA, 19 bp, Mus musculus
  siRNA target sequence for 2310014H19Rik (NM_028839.2,935-953).
cctccggagacctgtgaaa

SEQ ID NO: 736477 - DNA, 19 bp, Mus musculus
  siRNA target sequence for 2310014H19Rik (NM_028839.2,939-957).
cggagacctgtgaaaaaga

SEQ ID NO: 736478 - DNA, 19 bp, Mus musculus
  siRNA target sequence for 2310016N05Rik (NM_028840.2,215-233).
cctcttctactatgaatga

SEQ ID NO: 736479 - DNA, 19 bp, Mus musculus
  siRNA target sequence for 2310016N05Rik (NM_028840.2,241-259).
gatgctctatcagtagtta

SEQ ID NO: 736480 - DNA, 19 bp, Mus musculus
  siRNA target sequence for 2310016N05Rik (NM_028840.2,277-295).
gcagcagatccactaaata

SEQ ID NO: 736481 - DNA, 19 bp, Mus musculus
  siRNA target sequence for 2310016N05Rik (NM_028840.2,280-298).
gcagatccactaaatagaa

SEQ ID NO: 736482 - DNA, 19 bp, Mus musculus
  siRNA target sequence for 2310016N05Rik (NM_028840.2,410-428).
gccgtgcgaatagagaaaa

SEQ ID NO: 736483 - DNA, 19 bp, Mus musculus
  siRNA target sequence for 2310016N05Rik (NM_028840.2,412-430).
cgtgcgaatagagaaaaga

SEQ ID NO: 736484 - DNA, 19 bp, Mus musculus
  siRNA target sequence for 2310016N05Rik (NM_028840.2,416-434).
cgaatagagaaaagatgaa

SEQ ID NO: 736485 - DNA, 19 bp, Mus musculus
  siRNA target sequence for 2310016N05Rik (NM_028840.2,549-567).
ggctgatggtgatagtttt

SEQ ID NO: 736486 - DNA, 19 bp, Mus musculus
  siRNA target sequence for 2310016N05Rik (NM_028840.2,576-594).
gaattcgcgtagaaggaaa

SEQ ID NO: 736487 - DNA, 19 bp, Mus musculus
  siRNA target sequence for 2310016N05Rik (NM_028840.2,621-639).
caaacgggccaaaacagta

SEQ ID NO: 736488 - DNA, 19 bp, Mus musculus
  siRNA target sequence for 2310016N05Rik (NM_028840.2,625-643).
cgggccaaaacagtagttt

SEQ ID NO: 736489 - DNA, 19 bp, Mus musculus
  siRNA target sequence for 2310016N05Rik (NM_028840.2,635-653).
cagtagttttgcacataga

SEQ ID NO: 736490 - DNA, 19 bp, Mus musculus
  siRNA target sequence for 2310016N05Rik (NM_028840.2,669-687).
gtctcgacgaaatctatgt

SEQ ID NO: 736491 - DNA, 19 bp, Mus musculus
  siRNA target sequence for 2310016N05Rik (NM_028840.2,686-704).
gtgaagaggccttgttaaa

SEQ ID NO: 736492 - DNA, 19 bp, Mus musculus
  siRNA target sequence for 2310016N05Rik (NM_028840.2,691-709).
gaggccttgttaaaaatta

SEQ ID NO: 736493 - DNA, 19 bp, Mus musculus
  siRNA target sequence for 2310016N05Rik (NM_028840.2,712-730).
ggtgtcattagctttactt

SEQ ID NO: 736494 - DNA, 19 bp, Mus musculus
  siRNA target sequence for 2310016N05Rik (NM_028840.2,733-751).
caaatggctgttcaaagat

SEQ ID NO: 736495 - DNA, 19 bp, Mus musculus
  siRNA target sequence for 2310016N05Rik (NM_028840.2,790-808).
ctggcgtcagcaatagcat

SEQ ID NO: 736496 - DNA, 19 bp, Mus musculus
  siRNA target sequence for 2210021G21Rik (NM_028841.1,175-193).
ggctgctgcgggaaatact

SEQ ID NO: 736497 - DNA, 19 bp, Mus musculus
  siRNA target sequence for 2210021G21Rik (NM_028841.1,176-194).
gctgctgcgggaaatactt

SEQ ID NO: 736498 - DNA, 19 bp, Mus musculus
  siRNA target sequence for 2210021G21Rik (NM_028841.1,494-512).
ggatccgagaccaacttaa

SEQ ID NO: 736499 - DNA, 19 bp, Mus musculus
  siRNA target sequence for 2210021G21Rik (NM_028841.1,495-513).
gatccgagaccaacttaat

SEQ ID NO: 736500 - DNA, 19 bp, Mus musculus
  siRNA target sequence for 2210021G21Rik (NM_028841.1,499-517).
cgagaccaacttaatctct

SEQ ID NO: 736501 - DNA, 19 bp, Mus musculus
  siRNA target sequence for 2210021G21Rik (NM_028841.1,508-526).
cttaatctcttcatcaaca

SEQ ID NO: 736502 - DNA, 19 bp, Mus musculus
  siRNA target sequence for 2210021G21Rik (NM_028841.1,744-762).
ctatgacatccgactcaaa

SEQ ID NO: 736503 - DNA, 19 bp, Mus musculus
  siRNA target sequence for 2210021G21Rik (NM_028841.1,870-888).
cgccctcctccagatattt

SEQ ID NO: 736504 - DNA, 19 bp, Mus musculus
  siRNA target sequence for 1700045I19Rik (NM_028842.1,367-385).
gcctccaccacgtcttata

SEQ ID NO: 736505 - DNA, 19 bp, Mus musculus
  siRNA target sequence for 1700045I19Rik (NM_028842.1,369-387).
ctccaccacgtcttatact

SEQ ID NO: 736506 - DNA, 19 bp, Mus musculus
  siRNA target sequence for 1700045I19Rik (NM_028842.1,371-389).
ccaccacgtcttatactga

SEQ ID NO: 736507 - DNA, 19 bp, Mus musculus
  siRNA target sequence for 1700045I19Rik (NM_028842.1,372-390).
caccacgtcttatactgaa

SEQ ID NO: 736508 - DNA, 19 bp, Mus musculus
  siRNA target sequence for 1700045I19Rik (NM_028842.1,377-395).
cgtcttatactgaagatga

SEQ ID NO: 736509 - DNA, 19 bp, Mus musculus
  siRNA target sequence for 1700045I19Rik (NM_028842.1,404-422).
gtccgatatgccaagaagt

SEQ ID NO: 736510 - DNA, 19 bp, Mus musculus
  siRNA target sequence for 1700045I19Rik (NM_028842.1,407-425).
cgatatgccaagaagtctt

SEQ ID NO: 736511 - DNA, 19 bp, Mus musculus
  siRNA target sequence for 1700045I19Rik (NM_028842.1,571-589).
gacctcgaaaccatcatga

SEQ ID NO: 736512 - DNA, 19 bp, Mus musculus
  siRNA target sequence for 1700045I19Rik (NM_028842.1,617-635).
gttcccagcgcgttgaact

SEQ ID NO: 736513 - DNA, 19 bp, Mus musculus
  siRNA target sequence for 1700045I19Rik (NM_028842.1,620-638).
cccagcgcgttgaactcta

SEQ ID NO: 736514 - DNA, 19 bp, Mus musculus
  siRNA target sequence for 1700045I19Rik (NM_028842.1,621-639).
ccagcgcgttgaactctat

SEQ ID NO: 736515 - DNA, 19 bp, Mus musculus
  siRNA target sequence for 1700045I19Rik (NM_028842.1,625-643).
cgcgttgaactctatcgta

SEQ ID NO: 736516 - DNA, 19 bp, Mus musculus
  siRNA target sequence for 1700045I19Rik (NM_028842.1,626-644).
gcgttgaactctatcgtat

SEQ ID NO: 736517 - DNA, 19 bp, Mus musculus
  siRNA target sequence for 1700045I19Rik (NM_028842.1,645-663).
gaggcagcactacaaaact

SEQ ID NO: 736518 - DNA, 19 bp, Mus musculus
  siRNA target sequence for 1700045I19Rik (NM_028842.1,672-690).
gtaccaggatgaatttgga

SEQ ID NO: 736519 - DNA, 19 bp, Mus musculus
  siRNA target sequence for 1700045I19Rik (NM_028842.1,682-700).
gaatttggagtttctacat

SEQ ID NO: 736520 - DNA, 19 bp, Mus musculus
  siRNA target sequence for 1700045I19Rik (NM_028842.1,731-749).
ccgtgggcaacagtaacaa

SEQ ID NO: 736521 - DNA, 19 bp, Mus musculus
  siRNA target sequence for 1700045I19Rik (NM_028842.1,764-782).
cagcgaatgctgaggtttt

SEQ ID NO: 736522 - DNA, 19 bp, Mus musculus
  siRNA target sequence for 1700045I19Rik (NM_028842.1,767-785).
cgaatgctgaggttttaca

SEQ ID NO: 736523 - DNA, 19 bp, Mus musculus
  siRNA target sequence for 1700045I19Rik (NM_028842.1,865-883).
caacgtttgctggatcatt

SEQ ID NO: 736524 - DNA, 19 bp, Mus musculus
  siRNA target sequence for 1700045I19Rik (NM_028842.1,899-917).
gaggtcgtgtcgtttcagt

SEQ ID NO: 736525 - DNA, 19 bp, Mus musculus
  siRNA target sequence for 1700045I19Rik (NM_028842.1,966-984).
caccagaaattttgttagt

SEQ ID NO: 736526 - DNA, 19 bp, Mus musculus
  siRNA target sequence for 1700045I19Rik (NM_028842.1,968-986).
ccagaaattttgttagtca

SEQ ID NO: 736527 - DNA, 19 bp, Mus musculus
  siRNA target sequence for 1700045I19Rik (NM_028842.1,979-997).
gttagtcaccttaatcaga

SEQ ID NO: 736528 - DNA, 19 bp, Mus musculus
  siRNA target sequence for 1700045I19Rik (NM_028842.1,1014-1032).
cggagatttcgtgaatctt

SEQ ID NO: 736529 - DNA, 19 bp, Mus musculus
  siRNA target sequence for 4930513F16Rik (NM_028848.1,185-203).
gagactaatagtaacaatt

SEQ ID NO: 736530 - DNA, 19 bp, Mus musculus
  siRNA target sequence for 4930513F16Rik (NM_028848.1,223-241).
gaaggacatggctacttta

SEQ ID NO: 736531 - DNA, 19 bp, Mus musculus
  siRNA target sequence for 4930513F16Rik (NM_028848.1,269-287).
ctagaaagtcagtactact

SEQ ID NO: 736532 - DNA, 19 bp, Mus musculus
  siRNA target sequence for 4930513F16Rik (NM_028848.1,276-294).
gtcagtactactttaggaa

SEQ ID NO: 736533 - DNA, 19 bp, Mus musculus
  siRNA target sequence for 4930513F16Rik (NM_028848.1,299-317).
gccgttgattcatttagga

SEQ ID NO: 736534 - DNA, 19 bp, Mus musculus
  siRNA target sequence for 4930513F16Rik (NM_028848.1,300-318).
ccgttgattcatttaggaa

SEQ ID NO: 736535 - DNA, 19 bp, Mus musculus
  siRNA target sequence for 4930513F16Rik (NM_028848.1,301-319).
cgttgattcatttaggaaa

SEQ ID NO: 736536 - DNA, 19 bp, Mus musculus
  siRNA target sequence for 4930513F16Rik (NM_028848.1,302-320).
gttgattcatttaggaaat

SEQ ID NO: 736537 - DNA, 19 bp, Mus musculus
  siRNA target sequence for 4930513F16Rik (NM_028848.1,399-417).
gagtagtgacaattattca

SEQ ID NO: 736538 - DNA, 19 bp, Mus musculus
  siRNA target sequence for 4930513F16Rik (NM_028848.1,432-450).
gctacttaggcagaaaatt

SEQ ID NO: 736539 - DNA, 19 bp, Mus musculus
  siRNA target sequence for 4930513F16Rik (NM_028848.1,433-451).
ctacttaggcagaaaattt

SEQ ID NO: 736540 - DNA, 19 bp, Mus musculus
  siRNA target sequence for 4930513F16Rik (NM_028848.1,444-462).
gaaaattttaccaacttgt

SEQ ID NO: 736541 - DNA, 19 bp, Mus musculus
  siRNA target sequence for 4930513F16Rik (NM_028848.1,461-479).
gttgttgaggcagcatatt

SEQ ID NO: 736542 - DNA, 19 bp, Mus musculus
  siRNA target sequence for 4930513F16Rik (NM_028848.1,464-482).
gttgaggcagcatattata

SEQ ID NO: 736543 - DNA, 19 bp, Mus musculus
  siRNA target sequence for 4930513F16Rik (NM_028848.1,467-485).
gaggcagcatattatacta

SEQ ID NO: 736544 - DNA, 19 bp, Mus musculus
  siRNA target sequence for 4930513F16Rik (NM_028848.1,540-558).
gctttaggatccggaaata

SEQ ID NO: 736545 - DNA, 19 bp, Mus musculus
  siRNA target sequence for 4930513F16Rik (NM_028848.1,546-564).
ggatccggaaatattgctt

SEQ ID NO: 736546 - DNA, 19 bp, Mus musculus
  siRNA target sequence for 4930513F16Rik (NM_028848.1,710-728).
caagcccgcaagatgcatt

SEQ ID NO: 736547 - DNA, 19 bp, Mus musculus
  siRNA target sequence for 4930513F16Rik (NM_028848.1,714-732).
cccgcaagatgcattacct

SEQ ID NO: 736548 - DNA, 19 bp, Mus musculus
  siRNA target sequence for 4930513F16Rik (NM_028848.1,961-979).
cttccgagacatcaatgaa

SEQ ID NO: 736549 - DNA, 19 bp, Mus musculus
  siRNA target sequence for 4930513F16Rik (NM_028848.1,980-998).
gtcttggaacagcgttata

SEQ ID NO: 736550 - DNA, 19 bp, Mus musculus
  siRNA target sequence for 4930513F16Rik (NM_028848.1,1090-1108).
cgtgcaagacaagatgttt

SEQ ID NO: 736551 - DNA, 19 bp, Mus musculus
  siRNA target sequence for 4930513F16Rik (NM_028848.1,1119-1137).
cttcctaccataaaaagga

SEQ ID NO: 736552 - DNA, 19 bp, Mus musculus
  siRNA target sequence for 4930513F16Rik (NM_028848.1,1159-1177).
ctcgtcaagtgcgtataat

SEQ ID NO: 736553 - DNA, 19 bp, Mus musculus
  siRNA target sequence for 4930513F16Rik (NM_028848.1,1162-1180).
gtcaagtgcgtataattct

SEQ ID NO: 736554 - DNA, 19 bp, Mus musculus
  siRNA target sequence for 4930513F16Rik (NM_028848.1,1164-1182).
caagtgcgtataattctga

SEQ ID NO: 736555 - DNA, 19 bp, Mus musculus
  siRNA target sequence for 4930513F16Rik (NM_028848.1,1170-1188).
cgtataattctgactctta

SEQ ID NO: 736556 - DNA, 19 bp, Mus musculus
  siRNA target sequence for 4930513F16Rik (NM_028848.1,1227-1245).
ggatctctgacaaggattt

SEQ ID NO: 736557 - DNA, 19 bp, Mus musculus
  siRNA target sequence for 4930513F16Rik (NM_028848.1,1276-1294).
ctcgaagtatggaaagtta

SEQ ID NO: 736558 - DNA, 19 bp, Mus musculus
  siRNA target sequence for 4930513F16Rik (NM_028848.1,1278-1296).
cgaagtatggaaagttata

SEQ ID NO: 736559 - DNA, 19 bp, Mus musculus
  siRNA target sequence for 4930513F16Rik (NM_028848.1,1299-1317).
cgaaagctggagaaattgt

SEQ ID NO: 736560 - DNA, 19 bp, Mus musculus
  siRNA target sequence for Chic2 (NM_028850.1,332-350).
gcggatttcgatgaaatct

SEQ ID NO: 736561 - DNA, 19 bp, Mus musculus
  siRNA target sequence for Chic2 (NM_028850.1,333-351).
cggatttcgatgaaatcta

SEQ ID NO: 736562 - DNA, 19 bp, Mus musculus
  siRNA target sequence for Chic2 (NM_028850.1,433-451).
cggtcacgtcaccgtattt

SEQ ID NO: 736563 - DNA, 19 bp, Mus musculus
  siRNA target sequence for Chic2 (NM_028850.1,486-504).
cttcattaactggaaaagt

SEQ ID NO: 736564 - DNA, 19 bp, Mus musculus
  siRNA target sequence for Chic2 (NM_028850.1,524-542).
gccagcatcaacagagtta

SEQ ID NO: 736565 - DNA, 19 bp, Mus musculus
  siRNA target sequence for Chic2 (NM_028850.1,525-543).
ccagcatcaacagagttaa

SEQ ID NO: 736566 - DNA, 19 bp, Mus musculus
  siRNA target sequence for Chic2 (NM_028850.1,547-565).
ctgtctcaggaagaatctt

SEQ ID NO: 736567 - DNA, 19 bp, Mus musculus
  siRNA target sequence for Chic2 (NM_028850.1,624-642).
gcagtatgtggccagttat

SEQ ID NO: 736568 - DNA, 19 bp, Mus musculus
  siRNA target sequence for Chic2 (NM_028850.1,625-643).
cagtatgtggccagttatt

SEQ ID NO: 736569 - DNA, 19 bp, Mus musculus
  siRNA target sequence for Chic2 (NM_028850.1,660-678).
cacgaagatcgattgagaa

SEQ ID NO: 736570 - DNA, 19 bp, Mus musculus
  siRNA target sequence for Chic2 (NM_028850.1,686-704).
gaatgggaaaacaataggt

SEQ ID NO: 736571 - DNA, 19 bp, Mus musculus
  siRNA target sequence for Chic2 (NM_028850.1,690-708).
gggaaaacaataggttata

SEQ ID NO: 736572 - DNA, 19 bp, Mus musculus
  siRNA target sequence for Chic2 (NM_028850.1,756-774).
cgaacaacatgatggaata

SEQ ID NO: 736573 - DNA, 19 bp, Mus musculus
  siRNA target sequence for Chic2 (NM_028850.1,757-775).
gaacaacatgatggaatat

SEQ ID NO: 736574 - DNA, 19 bp, Mus musculus
  siRNA target sequence for Chic2 (NM_028850.1,776-794).
gtcatcctcatagaatttt

SEQ ID NO: 736575 - DNA, 19 bp, Mus musculus
  siRNA target sequence for 2410002I16Rik (NM_028868.1,501-519).
ccgaagctggagattcgtt

SEQ ID NO: 736576 - DNA, 19 bp, Mus musculus
  siRNA target sequence for 2410002I16Rik (NM_028868.1,502-520).
cgaagctggagattcgtta

SEQ ID NO: 736577 - DNA, 19 bp, Mus musculus
  siRNA target sequence for 2410002I16Rik (NM_028868.1,516-534).
cgttaccgccacaaaaagt

SEQ ID NO: 736578 - DNA, 19 bp, Mus musculus
  siRNA target sequence for 2410002I16Rik (NM_028868.1,678-696).
gcttccccccacaaatctt

SEQ ID NO: 736579 - DNA, 19 bp, Mus musculus
  siRNA target sequence for 2410002I16Rik (NM_028868.1,915-933).
gcacgggaatcgtacaagt

SEQ ID NO: 736580 - DNA, 19 bp, Mus musculus
  siRNA target sequence for 2410002I16Rik (NM_028868.1,916-934).
cacgggaatcgtacaagta

SEQ ID NO: 736581 - DNA, 19 bp, Mus musculus
  siRNA target sequence for 2410002I16Rik (NM_028868.1,918-936).
cgggaatcgtacaagtact

SEQ ID NO: 736582 - DNA, 19 bp, Mus musculus
  siRNA target sequence for 2410002I16Rik (NM_028868.1,919-937).
gggaatcgtacaagtactt

SEQ ID NO: 736583 - DNA, 19 bp, Mus musculus
  siRNA target sequence for 2410002I16Rik (NM_028868.1,1028-1046).
gaagctggggcgtattcgt

SEQ ID NO: 736584 - DNA, 19 bp, Mus musculus
  siRNA target sequence for 2410002I16Rik (NM_028868.1,1034-1052).
ggggcgtattcgtgaagat

SEQ ID NO: 736585 - DNA, 19 bp, Mus musculus
  siRNA target sequence for 2410002I16Rik (NM_028868.1,1036-1054).
ggcgtattcgtgaagatga

SEQ ID NO: 736586 - DNA, 19 bp, Mus musculus
  siRNA target sequence for 2410002I16Rik (NM_028868.1,1135-1153).
cactggaccccgatctgta

SEQ ID NO: 736587 - DNA, 19 bp, Mus musculus
  siRNA target sequence for 2410002I16Rik (NM_028868.1,1168-1186).
ctggggcctttgatgatca

SEQ ID NO: 736588 - DNA, 19 bp, Mus musculus
  siRNA target sequence for 2410002I16Rik (NM_028868.1,1437-1455).
cctgggtccaagtattgtt

SEQ ID NO: 736589 - DNA, 19 bp, Mus musculus
  siRNA target sequence for 2410002I16Rik (NM_028868.1,1480-1498).
cagccaaccgaatctatga

SEQ ID NO: 736590 - DNA, 19 bp, Mus musculus
  siRNA target sequence for 2410002I16Rik (NM_028868.1,1482-1500).
gccaaccgaatctatgaga

SEQ ID NO: 736591 - DNA, 19 bp, Mus musculus
  siRNA target sequence for 2410002I16Rik (NM_028868.1,1483-1501).
ccaaccgaatctatgagat

SEQ ID NO: 736592 - DNA, 19 bp, Mus musculus
  siRNA target sequence for 2410002I16Rik (NM_028868.1,1637-1655).
cgagcttgaggccatcatt

SEQ ID NO: 736593 - DNA, 19 bp, Mus musculus
  siRNA target sequence for 2410002I16Rik (NM_028868.1,1890-1908).
cagagcaagacatattgta

SEQ ID NO: 736594 - DNA, 19 bp, Mus musculus
  siRNA target sequence for 2410002I16Rik (NM_028868.1,1981-1999).
cacttgtacgtgatgtctt

SEQ ID NO: 736595 - DNA, 19 bp, Mus musculus
  siRNA target sequence for 2410002I16Rik (NM_028868.1,2027-2045).
gcccaagcgccagtgtaat

SEQ ID NO: 736596 - DNA, 19 bp, Mus musculus
  siRNA target sequence for 2410002I16Rik (NM_028868.1,2036-2054).
ccagtgtaatcgccattat

SEQ ID NO: 736597 - DNA, 19 bp, Mus musculus
  siRNA target sequence for 2410002I16Rik (NM_028868.1,2037-2055).
cagtgtaatcgccattatt

SEQ ID NO: 736598 - DNA, 19 bp, Mus musculus
  siRNA target sequence for Cltb (NM_028870.1,210-228).
catgagtactacagtcaat

SEQ ID NO: 736599 - DNA, 19 bp, Mus musculus
  siRNA target sequence for Cltb (NM_028870.1,221-239).
cagtcaatggagatgtgtt

SEQ ID NO: 736600 - DNA, 19 bp, Mus musculus
  siRNA target sequence for Cltb (NM_028870.1,425-443).
ggaaccagcgccaaagtga

SEQ ID NO: 736601 - DNA, 19 bp, Mus musculus
  siRNA target sequence for Cltb (NM_028870.1,426-444).
gaaccagcgccaaagtgaa

SEQ ID NO: 736602 - DNA, 19 bp, Mus musculus
  siRNA target sequence for Cltb (NM_028870.1,479-497).
cggaagaggcttttgtgaa

SEQ ID NO: 736603 - DNA, 19 bp, Mus musculus
  siRNA target sequence for Cltb (NM_028870.1,480-498).
ggaagaggcttttgtgaaa

SEQ ID NO: 736604 - DNA, 19 bp, Mus musculus
  siRNA target sequence for Cltb (NM_028870.1,570-588).
cagcaagcagtgtaaagat

SEQ ID NO: 736605 - DNA, 19 bp, Mus musculus
  siRNA target sequence for 4632415K11Rik (NM_028883.1,191-209).
gtggcaacggggacattct

SEQ ID NO: 736606 - DNA, 19 bp, Mus musculus
  siRNA target sequence for 4632415K11Rik (NM_028883.1,193-211).
ggcaacggggacattctct

SEQ ID NO: 736607 - DNA, 19 bp, Mus musculus
  siRNA target sequence for 4632415K11Rik (NM_028883.1,385-403).
ggaaaaaggcctaatggtt

SEQ ID NO: 736608 - DNA, 19 bp, Mus musculus
  siRNA target sequence for 4632415K11Rik (NM_028883.1,386-404).
gaaaaaggcctaatggtta

SEQ ID NO: 736609 - DNA, 19 bp, Mus musculus
  siRNA target sequence for 4632415K11Rik (NM_028883.1,393-411).
gcctaatggttatgaacat

SEQ ID NO: 736610 - DNA, 19 bp, Mus musculus
  siRNA target sequence for 4632415K11Rik (NM_028883.1,733-751).
cctgggttcatcctttgat

SEQ ID NO: 736611 - DNA, 19 bp, Mus musculus
  siRNA target sequence for 4632415K11Rik (NM_028883.1,1129-1147).
gcaaaccatgcctaatgga

SEQ ID NO: 736612 - DNA, 19 bp, Mus musculus
  siRNA target sequence for 4632415K11Rik (NM_028883.1,1302-1320).
gacttggcaacctcttaga

SEQ ID NO: 736613 - DNA, 19 bp, Mus musculus
  siRNA target sequence for 4931400A14Rik (NM_028887.2,235-253).
gtcatggagggtcaaagaa

SEQ ID NO: 736614 - DNA, 19 bp, Mus musculus
  siRNA target sequence for 4931400A14Rik (NM_028887.2,258-276).
ctggtggaacttaaagtca

SEQ ID NO: 736615 - DNA, 19 bp, Mus musculus
  siRNA target sequence for 4931400A14Rik (NM_028887.2,260-278).
ggtggaacttaaagtcata

SEQ ID NO: 736616 - DNA, 19 bp, Mus musculus
  siRNA target sequence for 4931400A14Rik (NM_028887.2,281-299).
gcacacttcaagtggaaat

SEQ ID NO: 736617 - DNA, 19 bp, Mus musculus
  siRNA target sequence for 4931400A14Rik (NM_028887.2,282-300).
cacacttcaagtggaaata

SEQ ID NO: 736618 - DNA, 19 bp, Mus musculus
  siRNA target sequence for 4931400A14Rik (NM_028887.2,303-321).
gaaatcatttcacatatca

SEQ ID NO: 736619 - DNA, 19 bp, Mus musculus
  siRNA target sequence for 4931400A14Rik (NM_028887.2,372-390).
cagaaactgggtaattata

SEQ ID NO: 736620 - DNA, 19 bp, Mus musculus
  siRNA target sequence for 4931400A14Rik (NM_028887.2,378-396).
ctgggtaattatacattga

SEQ ID NO: 736621 - DNA, 19 bp, Mus musculus
  siRNA target sequence for 4931400A14Rik (NM_028887.2,448-466).
cactaccgtccaaagtaat

SEQ ID NO: 736622 - DNA, 19 bp, Mus musculus
  siRNA target sequence for 4931400A14Rik (NM_028887.2,450-468).
ctaccgtccaaagtaatta

SEQ ID NO: 736623 - DNA, 19 bp, Mus musculus
  siRNA target sequence for 4931400A14Rik (NM_028887.2,453-471).
ccgtccaaagtaattaaat

SEQ ID NO: 736624 - DNA, 19 bp, Mus musculus
  siRNA target sequence for 4931400A14Rik (NM_028887.2,454-472).
cgtccaaagtaattaaatt

SEQ ID NO: 736625 - DNA, 19 bp, Mus musculus
  siRNA target sequence for 4931400A14Rik (NM_028887.2,491-509).
gccagaaaagttttcgttt

SEQ ID NO: 736626 - DNA, 19 bp, Mus musculus
  siRNA target sequence for 4931400A14Rik (NM_028887.2,530-548).
ccgtgttggagttccattt

SEQ ID NO: 736627 - DNA, 19 bp, Mus musculus
  siRNA target sequence for 4931400A14Rik (NM_028887.2,531-549).
cgtgttggagttccattta

SEQ ID NO: 736628 - DNA, 19 bp, Mus musculus
  siRNA target sequence for 4931400A14Rik (NM_028887.2,532-550).
gtgttggagttccatttaa

SEQ ID NO: 736629 - DNA, 19 bp, Mus musculus
  siRNA target sequence for 4931400A14Rik (NM_028887.2,579-597).
ggtcacactacccaactat

SEQ ID NO: 736630 - DNA, 19 bp, Mus musculus
  siRNA target sequence for 4931400A14Rik (NM_028887.2,580-598).
gtcacactacccaactatt

SEQ ID NO: 736631 - DNA, 19 bp, Mus musculus
  siRNA target sequence for 4931400A14Rik (NM_028887.2,584-602).
cactacccaactattgtct

SEQ ID NO: 736632 - DNA, 19 bp, Mus musculus
  siRNA target sequence for 4931400A14Rik (NM_028887.2,642-660).
cattatgaaggaataacca

SEQ ID NO: 736633 - DNA, 19 bp, Mus musculus
  siRNA target sequence for 4931400A14Rik (NM_028887.2,664-682).
gcccgaattgtgtaattca

SEQ ID NO: 736634 - DNA, 19 bp, Mus musculus
  siRNA target sequence for 4931400A14Rik (NM_028887.2,665-683).
cccgaattgtgtaattcaa

SEQ ID NO: 736635 - DNA, 19 bp, Mus musculus
  siRNA target sequence for 4931400A14Rik (NM_028887.2,710-728).
ctcttgccagggcaagaat

SEQ ID NO: 736636 - DNA, 19 bp, Mus musculus
  siRNA target sequence for 4931400A14Rik (NM_028887.2,715-733).
gccagggcaagaattttaa

SEQ ID NO: 736637 - DNA, 19 bp, Mus musculus
  siRNA target sequence for 4931400A14Rik (NM_028887.2,716-734).
ccagggcaagaattttaat

SEQ ID NO: 736638 - DNA, 19 bp, Mus musculus
  siRNA target sequence for 4931400A14Rik (NM_028887.2,762-780).
gaagactcacagattttga

SEQ ID NO: 736639 - DNA, 19 bp, Mus musculus
  siRNA target sequence for 4931400A14Rik (NM_028887.2,796-814).
ctggtccccctcatcaact

SEQ ID NO: 736640 - DNA, 19 bp, Mus musculus
  siRNA target sequence for 4931400A14Rik (NM_028887.2,887-905).
ggatgagtcagacaacata

SEQ ID NO: 736641 - DNA, 19 bp, Mus musculus
  siRNA target sequence for 4931400A14Rik (NM_028887.2,888-906).
gatgagtcagacaacataa

SEQ ID NO: 736642 - DNA, 19 bp, Mus musculus
  siRNA target sequence for 4931400A14Rik (NM_028887.2,926-944).
cgtccactgtaagtttcta

SEQ ID NO: 736643 - DNA, 19 bp, Mus musculus
  siRNA target sequence for 4931400A14Rik (NM_028887.2,1006-1024).
cagggtcacccattcaagt

SEQ ID NO: 736644 - DNA, 19 bp, Mus musculus
  siRNA target sequence for 4931400A14Rik (NM_028887.2,1053-1071).
ctgaccgccaggattgaga

SEQ ID NO: 736645 - DNA, 19 bp, Mus musculus
  siRNA target sequence for 4931400A14Rik (NM_028887.2,1059-1077).
gccaggattgagataccta

SEQ ID NO: 736646 - DNA, 19 bp, Mus musculus
  siRNA target sequence for 4931400A14Rik (NM_028887.2,1098-1116).
gttgaaaagacgatcaagt

SEQ ID NO: 736647 - DNA, 19 bp, Mus musculus
  siRNA target sequence for 4931400A14Rik (NM_028887.2,1174-1192).
cgatccagatcaaacatca

SEQ ID NO: 736648 - DNA, 19 bp, Mus musculus
  siRNA target sequence for 4931400A14Rik (NM_028887.2,1208-1226).
ggtagcaggtgatgtaata

SEQ ID NO: 736649 - DNA, 19 bp, Mus musculus
  siRNA target sequence for 4931400A14Rik (NM_028887.2,1218-1236).
gatgtaatacgcaatctaa

SEQ ID NO: 736650 - DNA, 19 bp, Mus musculus
  siRNA target sequence for 4931400A14Rik (NM_028887.2,1221-1239).
gtaatacgcaatctaattt

SEQ ID NO: 736651 - DNA, 19 bp, Mus musculus
  siRNA target sequence for 4931400A14Rik (NM_028887.2,1279-1297).
caccatccttggcagaaaa

SEQ ID NO: 736652 - DNA, 19 bp, Mus musculus
  siRNA target sequence for 4931400A14Rik (NM_028887.2,1291-1309).
cagaaaaaattaaggttaa

SEQ ID NO: 736653 - DNA, 19 bp, Mus musculus
  siRNA target sequence for 4931400A14Rik (NM_028887.2,1293-1311).
gaaaaaattaaggttaatt

SEQ ID NO: 736654 - DNA, 19 bp, Mus musculus
  siRNA target sequence for 4931400A14Rik (NM_028887.2,1436-1454).
gagcgcctttacagtaaga

SEQ ID NO: 736655 - DNA, 19 bp, Mus musculus
  siRNA target sequence for 4931400A14Rik (NM_028887.2,1526-1544).
gcttcaaggagaaatagtt

SEQ ID NO: 736656 - DNA, 19 bp, Mus musculus
  siRNA target sequence for 4931400A14Rik (NM_028887.2,1560-1578).
cagtatggaaatcagattt

SEQ ID NO: 736657 - DNA, 19 bp, Mus musculus
  siRNA target sequence for 4931400A14Rik (NM_028887.2,1582-1600).
cattttcacctgattcctt

SEQ ID NO: 736658 - DNA, 19 bp, Mus musculus
  siRNA target sequence for 4931400A14Rik (NM_028887.2,1591-1609).
ctgattccttatctacttt

SEQ ID NO: 736659 - DNA, 19 bp, Mus musculus
  siRNA target sequence for 4931400A14Rik (NM_028887.2,1593-1611).
gattccttatctactttgt

SEQ ID NO: 736660 - DNA, 19 bp, Mus musculus
  siRNA target sequence for 4931400A14Rik (NM_028887.2,1626-1644).
ggccttgacagctcaaact

SEQ ID NO: 736661 - DNA, 19 bp, Mus musculus
  siRNA target sequence for 4931400A14Rik (NM_028887.2,1627-1645).
gccttgacagctcaaactt

SEQ ID NO: 736662 - DNA, 19 bp, Mus musculus
  siRNA target sequence for 4931400A14Rik (NM_028887.2,1629-1647).
cttgacagctcaaacttga

SEQ ID NO: 736663 - DNA, 19 bp, Mus musculus
  siRNA target sequence for 4931400A14Rik (NM_028887.2,1683-1701).
gtgcaaggcatcaggttta

SEQ ID NO: 736664 - DNA, 19 bp, Mus musculus
  siRNA target sequence for 4931400A14Rik (NM_028887.2,1738-1756).
cttggcgagagttttctga

SEQ ID NO: 736665 - DNA, 19 bp, Mus musculus
  siRNA target sequence for 4931400A14Rik (NM_028887.2,1742-1760).
gcgagagttttctgacttt

SEQ ID NO: 736666 - DNA, 19 bp, Mus musculus
  siRNA target sequence for 4931400A14Rik (NM_028887.2,1832-1850).
cattcctgtgattaatgga

SEQ ID NO: 736667 - DNA, 19 bp, Mus musculus
  siRNA target sequence for 4931400A14Rik (NM_028887.2,1911-1929).
gtcccaaacgttaaaatat

SEQ ID NO: 736668 - DNA, 19 bp, Mus musculus
  siRNA target sequence for 4931400A14Rik (NM_028887.2,1913-1931).
cccaaacgttaaaatatgt

SEQ ID NO: 736669 - DNA, 19 bp, Mus musculus
  siRNA target sequence for 4931400A14Rik (NM_028887.2,1915-1933).
caaacgttaaaatatgtct

SEQ ID NO: 736670 - DNA, 19 bp, Mus musculus
  siRNA target sequence for 4931400A14Rik (NM_028887.2,1919-1937).
cgttaaaatatgtctcata

SEQ ID NO: 736671 - DNA, 19 bp, Mus musculus
  siRNA target sequence for 4931400A14Rik (NM_028887.2,1963-1981).
cttcaaaccagcagcataa

SEQ ID NO: 736672 - DNA, 19 bp, Mus musculus
  siRNA target sequence for 4931400A14Rik (NM_028887.2,1989-2007).
gataagggcagagctaatt

SEQ ID NO: 736673 - DNA, 19 bp, Mus musculus
  siRNA target sequence for 4931400A14Rik (NM_028887.2,2045-2063).
cactgtgcaggttaaaggt

SEQ ID NO: 736674 - DNA, 19 bp, Mus musculus
  siRNA target sequence for 4931400A14Rik (NM_028887.2,2051-2069).
gcaggttaaaggtgtctat

SEQ ID NO: 736675 - DNA, 19 bp, Mus musculus
  siRNA target sequence for 4931400A14Rik (NM_028887.2,2052-2070).
caggttaaaggtgtctata

SEQ ID NO: 736676 - DNA, 19 bp, Mus musculus
  siRNA target sequence for 4931400A14Rik (NM_028887.2,2080-2098).
ctatagaagggcctacaat

SEQ ID NO: 736677 - DNA, 19 bp, Mus musculus
  siRNA target sequence for 4931400A14Rik (NM_028887.2,2085-2103).
gaagggcctacaattaagt

SEQ ID NO: 736678 - DNA, 19 bp, Mus musculus
  siRNA target sequence for 4931400A14Rik (NM_028887.2,2092-2110).
ctacaattaagttaacaat

SEQ ID NO: 736679 - DNA, 19 bp, Mus musculus
  siRNA target sequence for 4931400A14Rik (NM_028887.2,2095-2113).
caattaagttaacaattct

SEQ ID NO: 736680 - DNA, 19 bp, Mus musculus
  siRNA target sequence for 4931400A14Rik (NM_028887.2,2131-2149).
ccattcgcctcaatgttaa

SEQ ID NO: 736681 - DNA, 19 bp, Mus musculus
  siRNA target sequence for 4931400A14Rik (NM_028887.2,2132-2150).
cattcgcctcaatgttaaa

SEQ ID NO: 736682 - DNA, 19 bp, Mus musculus
  siRNA target sequence for 4931400A14Rik (NM_028887.2,2180-2198).
ggacatattcactgatttt

SEQ ID NO: 736683 - DNA, 19 bp, Mus musculus
  siRNA target sequence for 4931400A14Rik (NM_028887.2,2201-2219).
ggttagtgtgatttctgaa

SEQ ID NO: 736684 - DNA, 19 bp, Mus musculus
  siRNA target sequence for 4931400A14Rik (NM_028887.2,2310-2328).
gcagaaacctttagttgta

SEQ ID NO: 736685 - DNA, 19 bp, Mus musculus
  siRNA target sequence for 4931400A14Rik (NM_028887.2,2311-2329).
cagaaacctttagttgtaa

SEQ ID NO: 736686 - DNA, 19 bp, Mus musculus
  siRNA target sequence for 4931400A14Rik (NM_028887.2,2313-2331).
gaaacctttagttgtaata

SEQ ID NO: 736687 - DNA, 19 bp, Mus musculus
  siRNA target sequence for 4931400A14Rik (NM_028887.2,2366-2384).
ctatttcagggagaaaact

SEQ ID NO: 736688 - DNA, 19 bp, Mus musculus
  siRNA target sequence for 4931400A14Rik (NM_028887.2,2404-2422).
catattgtatccagtttga

SEQ ID NO: 736689 - DNA, 19 bp, Mus musculus
  siRNA target sequence for 4931400A14Rik (NM_028887.2,2452-2470).
gcagccaacaggttatagt

SEQ ID NO: 736690 - DNA, 19 bp, Mus musculus
  siRNA target sequence for 4931400A14Rik (NM_028887.2,2453-2471).
cagccaacaggttatagtt

SEQ ID NO: 736691 - DNA, 19 bp, Mus musculus
  siRNA target sequence for 4931400A14Rik (NM_028887.2,2455-2473).
gccaacaggttatagttga

SEQ ID NO: 736692 - DNA, 19 bp, Mus musculus
  siRNA target sequence for 4931400A14Rik (NM_028887.2,2456-2474).
ccaacaggttatagttgat

SEQ ID NO: 736693 - DNA, 19 bp, Mus musculus
  siRNA target sequence for 4931400A14Rik (NM_028887.2,2481-2499).
cccaaccagcctatgaagt

SEQ ID NO: 736694 - DNA, 19 bp, Mus musculus
  siRNA target sequence for 4931400A14Rik (NM_028887.2,2482-2500).
ccaaccagcctatgaagtt

SEQ ID NO: 736695 - DNA, 19 bp, Mus musculus
  siRNA target sequence for 4931400A14Rik (NM_028887.2,2520-2538).
gctaccccagctgtttcta

SEQ ID NO: 736696 - DNA, 19 bp, Mus musculus
  siRNA target sequence for 4931400A14Rik (NM_028887.2,2557-2575).
gcaggaccttggtcaaaga

SEQ ID NO: 736697 - DNA, 19 bp, Mus musculus
  siRNA target sequence for 4931400A14Rik (NM_028887.2,2580-2598).
cgcctcagtatcacagata

SEQ ID NO: 736698 - DNA, 19 bp, Mus musculus
  siRNA target sequence for 4931400A14Rik (NM_028887.2,2581-2599).
gcctcagtatcacagataa

SEQ ID NO: 736699 - DNA, 19 bp, Mus musculus
  siRNA target sequence for 4931400A14Rik (NM_028887.2,2583-2601).
ctcagtatcacagataatt

SEQ ID NO: 736700 - DNA, 19 bp, Mus musculus
  siRNA target sequence for 4931400A14Rik (NM_028887.2,2585-2603).
cagtatcacagataattat

SEQ ID NO: 736701 - DNA, 19 bp, Mus musculus
  siRNA target sequence for 4931400A14Rik (NM_028887.2,2633-2651).
cactgtagtagcaaccatt

SEQ ID NO: 736702 - DNA, 19 bp, Mus musculus
  siRNA target sequence for 4931400A14Rik (NM_028887.2,2635-2653).
ctgtagtagcaaccattaa

SEQ ID NO: 736703 - DNA, 19 bp, Mus musculus
  siRNA target sequence for 4931400A14Rik (NM_028887.2,2674-2692).
ctgataccccactcttcat

SEQ ID NO: 736704 - DNA, 19 bp, Mus musculus
  siRNA target sequence for 4931400A14Rik (NM_028887.2,2685-2703).
ctcttcatcgggaaggtta

SEQ ID NO: 736705 - DNA, 19 bp, Mus musculus
  siRNA target sequence for 4931400A14Rik (NM_028887.2,2699-2717).
ggttaggacgcttgagttt

SEQ ID NO: 736706 - DNA, 19 bp, Mus musculus
  siRNA target sequence for 4931400A14Rik (NM_028887.2,2775-2793).
ggaagggatagtactgaat

SEQ ID NO: 736707 - DNA, 19 bp, Mus musculus
  siRNA target sequence for 4931400A14Rik (NM_028887.2,2776-2794).
gaagggatagtactgaata

SEQ ID NO: 736708 - DNA, 19 bp, Mus musculus
  siRNA target sequence for 4931400A14Rik (NM_028887.2,2810-2828).
gcctcggctgtcaactgta

SEQ ID NO: 736709 - DNA, 19 bp, Mus musculus
  siRNA target sequence for 4931400A14Rik (NM_028887.2,2811-2829).
cctcggctgtcaactgtat

SEQ ID NO: 736710 - DNA, 19 bp, Mus musculus
  siRNA target sequence for 4931400A14Rik (NM_028887.2,2824-2842).
ctgtatcaggaacattaga

SEQ ID NO: 736711 - DNA, 19 bp, Mus musculus
  siRNA target sequence for 4931400A14Rik (NM_028887.2,2826-2844).
gtatcaggaacattagaat

SEQ ID NO: 736712 - DNA, 19 bp, Mus musculus
  siRNA target sequence for 4931400A14Rik (NM_028887.2,2845-2863).
catatagcctgccatttat

SEQ ID NO: 736713 - DNA, 19 bp, Mus musculus
  siRNA target sequence for 4931400A14Rik (NM_028887.2,2853-2871).
ctgccatttatgttttaca

SEQ ID NO: 736714 - DNA, 19 bp, Mus musculus
  siRNA target sequence for 4931400A14Rik (NM_028887.2,2855-2873).
gccatttatgttttacaat

SEQ ID NO: 736715 - DNA, 19 bp, Mus musculus
  siRNA target sequence for 4931400A14Rik (NM_028887.2,2929-2947).
ccaagtccatcactatgta

SEQ ID NO: 736716 - DNA, 19 bp, Mus musculus
  siRNA target sequence for 4931400A14Rik (NM_028887.2,2973-2991).
cagcttgtggatgaaatga

SEQ ID NO: 736717 - DNA, 19 bp, Mus musculus
  siRNA target sequence for 4931400A14Rik (NM_028887.2,2975-2993).
gcttgtggatgaaatgaaa

SEQ ID NO: 736718 - DNA, 19 bp, Mus musculus
  siRNA target sequence for 4931400A14Rik (NM_028887.2,3026-3044).
ccagctacgaaatgaacta

SEQ ID NO: 736719 - DNA, 19 bp, Mus musculus
  siRNA target sequence for 4931400A14Rik (NM_028887.2,3027-3045).
cagctacgaaatgaactaa

SEQ ID NO: 736720 - DNA, 19 bp, Mus musculus
  siRNA target sequence for 4931400A14Rik (NM_028887.2,3085-3103).
ctcatattgaagcactttt

SEQ ID NO: 736721 - DNA, 19 bp, Mus musculus
  siRNA target sequence for 4931400A14Rik (NM_028887.2,3118-3136).
cagaacagaacgagcttaa

SEQ ID NO: 736722 - DNA, 19 bp, Mus musculus
  siRNA target sequence for 4931400A14Rik (NM_028887.2,3187-3205).
gagatattttgggaaagat

SEQ ID NO: 736723 - DNA, 19 bp, Mus musculus
  siRNA target sequence for 4931400A14Rik (NM_028887.2,3208-3226).
cacatctagcacaaattga

SEQ ID NO: 736724 - DNA, 19 bp, Mus musculus
  siRNA target sequence for 4931400A14Rik (NM_028887.2,3231-3249).
gatcgagctgccatggtta

SEQ ID NO: 736725 - DNA, 19 bp, Mus musculus
  siRNA target sequence for 4931400A14Rik (NM_028887.2,3234-3252).
cgagctgccatggttatct

SEQ ID NO: 736726 - DNA, 19 bp, Mus musculus
  siRNA target sequence for 4931400A14Rik (NM_028887.2,3304-3322).
ccgcacgcgctatctatga

SEQ ID NO: 736727 - DNA, 19 bp, Mus musculus
  siRNA target sequence for 4931400A14Rik (NM_028887.2,3313-3331).
ctatctatgacgaaactca

SEQ ID NO: 736728 - DNA, 19 bp, Mus musculus
  siRNA target sequence for 4931400A14Rik (NM_028887.2,3345-3363).
gtgttgccccttgattcta

SEQ ID NO: 736729 - DNA, 19 bp, Mus musculus
  siRNA target sequence for 4931400A14Rik (NM_028887.2,3347-3365).
gttgccccttgattctatt

SEQ ID NO: 736730 - DNA, 19 bp, Mus musculus
  siRNA target sequence for 4931400A14Rik (NM_028887.2,3351-3369).
ccccttgattctatttaca

SEQ ID NO: 736731 - DNA, 19 bp, Mus musculus
  siRNA target sequence for 4931400A14Rik (NM_028887.2,3405-3423).
catttccgaaatggtaaat

SEQ ID NO: 736732 - DNA, 19 bp, Mus musculus
  siRNA target sequence for 4931400A14Rik (NM_028887.2,3450-3468).
gtctttgcccgagatttgt

SEQ ID NO: 736733 - DNA, 19 bp, Mus musculus
  siRNA target sequence for 4931400A14Rik (NM_028887.2,3452-3470).
ctttgcccgagatttgtta

SEQ ID NO: 736734 - DNA, 19 bp, Mus musculus
  siRNA target sequence for 4931400A14Rik (NM_028887.2,3457-3475).
cccgagatttgttaacatt

SEQ ID NO: 736735 - DNA, 19 bp, Mus musculus
  siRNA target sequence for 4931400A14Rik (NM_028887.2,3518-3536).
gttaggagacaccattatt

SEQ ID NO: 736736 - DNA, 19 bp, Mus musculus
  siRNA target sequence for 4931400A14Rik (NM_028887.2,3527-3545).
caccattattttggataat

SEQ ID NO: 736737 - DNA, 19 bp, Mus musculus
  siRNA target sequence for 4931400A14Rik (NM_028887.2,3546-3564).
ctggatgcagccaatcatt

SEQ ID NO: 736738 - DNA, 19 bp, Mus musculus
  siRNA target sequence for 4931400A14Rik (NM_028887.2,3667-3685).
ctccgccaatggacaaact

SEQ ID NO: 736739 - DNA, 19 bp, Mus musculus
  siRNA target sequence for 4931400A14Rik (NM_028887.2,3728-3746).
ggtcttggggaaacaaata

SEQ ID NO: 736740 - DNA, 19 bp, Mus musculus
  siRNA target sequence for 4931400A14Rik (NM_028887.2,3734-3752).
ggggaaacaaatagatctt

SEQ ID NO: 736741 - DNA, 19 bp, Mus musculus
  siRNA target sequence for 4931400A14Rik (NM_028887.2,3825-3843).
cttcacactcctgatatga

SEQ ID NO: 736742 - DNA, 19 bp, Mus musculus
  siRNA target sequence for 4931400A14Rik (NM_028887.2,3873-3891).
gaaaaaagtctgaaacgaa

SEQ ID NO: 736743 - DNA, 19 bp, Mus musculus
  siRNA target sequence for 4931400A14Rik (NM_028887.2,3918-3936).
gtgcgcaggtgtaatgagt

SEQ ID NO: 736744 - DNA, 19 bp, Mus musculus
  siRNA target sequence for 4931400A14Rik (NM_028887.2,3928-3946).
gtaatgagtcactttgtca

SEQ ID NO: 736745 - DNA, 19 bp, Mus musculus
  siRNA target sequence for 4931400A14Rik (NM_028887.2,3943-3961).
gtcactcaccaaagattga

SEQ ID NO: 736746 - DNA, 19 bp, Mus musculus
  siRNA target sequence for 4931400A14Rik (NM_028887.2,3971-3989).
gtgcccaatccctactaaa

SEQ ID NO: 736747 - DNA, 19 bp, Mus musculus
  siRNA target sequence for 4931400A14Rik (NM_028887.2,3975-3993).
ccaatccctactaaaagaa

SEQ ID NO: 736748 - DNA, 19 bp, Mus musculus
  siRNA target sequence for 4931400A14Rik (NM_028887.2,3981-3999).
cctactaaaagaatgagaa

SEQ ID NO: 736749 - DNA, 19 bp, Mus musculus
  siRNA target sequence for 4931400A14Rik (NM_028887.2,4002-4020).
gaatccaccagacagaata

SEQ ID NO: 736750 - DNA, 19 bp, Mus musculus
  siRNA target sequence for 4931400A14Rik (NM_028887.2,4027-4045).
caaaaggtgacgtaccaaa

SEQ ID NO: 736751 - DNA, 19 bp, Mus musculus
  siRNA target sequence for 4931430I01Rik (NM_028889.1,308-326).
ccgctctaaggtcttcaat

SEQ ID NO: 736752 - DNA, 19 bp, Mus musculus
  siRNA target sequence for 4931430I01Rik (NM_028889.1,534-552).
cgggagttcctgctcattt

SEQ ID NO: 736753 - DNA, 19 bp, Mus musculus
  siRNA target sequence for 4931430I01Rik (NM_028889.1,608-626).
caagttttccgagattgat

SEQ ID NO: 736754 - DNA, 19 bp, Mus musculus
  siRNA target sequence for 4931430I01Rik (NM_028889.1,642-660).
gtcagaggtgccaagaact

SEQ ID NO: 736755 - DNA, 19 bp, Mus musculus
  siRNA target sequence for 4931430I01Rik (NM_028889.1,701-719).
gttcgaagctgagttaaaa

SEQ ID NO: 736756 - DNA, 19 bp, Mus musculus
  siRNA target sequence for 4931414P19Rik (NM_028890.1,965-983).
ctctgagggttcaatacaa

SEQ ID NO: 736757 - DNA, 19 bp, Mus musculus
  siRNA target sequence for 4931414P19Rik (NM_028890.1,1213-1231).
gagggactggccagaaaaa

SEQ ID NO: 736758 - DNA, 19 bp, Mus musculus
  siRNA target sequence for 4931414P19Rik (NM_028890.1,1215-1233).
gggactggccagaaaaact

SEQ ID NO: 736759 - DNA, 19 bp, Mus musculus
  siRNA target sequence for 4931414P19Rik (NM_028890.1,1294-1312).
ccaatgacaagagattcaa

SEQ ID NO: 736760 - DNA, 19 bp, Mus musculus
  siRNA target sequence for 4931414P19Rik (NM_028890.1,1295-1313).
caatgacaagagattcaat

SEQ ID NO: 736761 - DNA, 19 bp, Mus musculus
  siRNA target sequence for 4931414P19Rik (NM_028890.1,1314-1332).
gggtcagaaagcattaagt

SEQ ID NO: 736762 - DNA, 19 bp, Mus musculus
  siRNA target sequence for 4931414P19Rik (NM_028890.1,1325-1343).
cattaagtcgtcttggaat

SEQ ID NO: 736763 - DNA, 19 bp, Mus musculus
  siRNA target sequence for 4931414P19Rik (NM_028890.1,1333-1351).
cgtcttggaatatttcagt

SEQ ID NO: 736764 - DNA, 19 bp, Mus musculus
  siRNA target sequence for 4931414P19Rik (NM_028890.1,1392-1410).
gtgagcccccacaattaca

SEQ ID NO: 736765 - DNA, 19 bp, Mus musculus
  siRNA target sequence for 4931414P19Rik (NM_028890.1,1460-1478).
gcgagagtaccgcaattct

SEQ ID NO: 736766 - DNA, 19 bp, Mus musculus
  siRNA target sequence for 4931414P19Rik (NM_028890.1,1462-1480).
gagagtaccgcaattctct

SEQ ID NO: 736767 - DNA, 19 bp, Mus musculus
  siRNA target sequence for 4931414P19Rik (NM_028890.1,1539-1557).
cggcttttcgccaatcgat

SEQ ID NO: 736768 - DNA, 19 bp, Mus musculus
  siRNA target sequence for 4931414P19Rik (NM_028890.1,1548-1566).
gccaatcgatccagtatca

SEQ ID NO: 736769 - DNA, 19 bp, Mus musculus
  siRNA target sequence for 4931414P19Rik (NM_028890.1,1715-1733).
ccacctggatgctaactct

SEQ ID NO: 736770 - DNA, 19 bp, Mus musculus
  siRNA target sequence for 4931414P19Rik (NM_028890.1,1867-1885).
gacctgtctccccatctta

SEQ ID NO: 736771 - DNA, 19 bp, Mus musculus
  siRNA target sequence for 4931414P19Rik (NM_028890.1,1887-1905).
gaccagccccacaagacat

SEQ ID NO: 736772 - DNA, 19 bp, Mus musculus
  siRNA target sequence for 4931414P19Rik (NM_028890.1,1911-1929).
cctgacttgaactcgttta

SEQ ID NO: 736773 - DNA, 19 bp, Mus musculus
  siRNA target sequence for 4931414P19Rik (NM_028890.1,1912-1930).
ctgacttgaactcgtttat

SEQ ID NO: 736774 - DNA, 19 bp, Mus musculus
  siRNA target sequence for 4931414P19Rik (NM_028890.1,1916-1934).
cttgaactcgtttattgaa

SEQ ID NO: 736775 - DNA, 19 bp, Mus musculus
  siRNA target sequence for 4931414P19Rik (NM_028890.1,1941-1959).
gtggaaaaggatgaataca

SEQ ID NO: 736776 - DNA, 19 bp, Mus musculus
  siRNA target sequence for 4931427F14Rik (NM_028892.1,788-806).
gagcttggcattcctataa

SEQ ID NO: 736777 - DNA, 19 bp, Mus musculus
  siRNA target sequence for 4931427F14Rik (NM_028892.1,791-809).
cttggcattcctataacca

SEQ ID NO: 736778 - DNA, 19 bp, Mus musculus
  siRNA target sequence for 4931427F14Rik (NM_028892.1,950-968).
gaggttttctggaagtact

SEQ ID NO: 736779 - DNA, 19 bp, Mus musculus
  siRNA target sequence for 4931427F14Rik (NM_028892.1,974-992).
ccaatcctgaataatgaga

SEQ ID NO: 736780 - DNA, 19 bp, Mus musculus
  siRNA target sequence for 4931427F14Rik (NM_028892.1,1089-1107).
cattgggcaccgagatctt

SEQ ID NO: 736781 - DNA, 19 bp, Mus musculus
  siRNA target sequence for 4931427F14Rik (NM_028892.1,1093-1111).
gggcaccgagatctttgaa

SEQ ID NO: 736782 - DNA, 19 bp, Mus musculus
  siRNA target sequence for 4931427F14Rik (NM_028892.1,1109-1127).
gaaaacattgcctgtttga

SEQ ID NO: 736783 - DNA, 19 bp, Mus musculus
  siRNA target sequence for 4931427F14Rik (NM_028892.1,1118-1136).
gcctgtttgatgtacgata

SEQ ID NO: 736784 - DNA, 19 bp, Mus musculus
  siRNA target sequence for 4931427F14Rik (NM_028892.1,1220-1238).
gtgctagaggcaatcacaa

SEQ ID NO: 736785 - DNA, 19 bp, Mus musculus
  siRNA target sequence for 4931427F14Rik (NM_028892.1,1317-1335).
caacagtggcttttatcat

SEQ ID NO: 736786 - DNA, 19 bp, Mus musculus
  siRNA target sequence for 4931427F14Rik (NM_028892.1,1322-1340).
gtggcttttatcatcacaa

SEQ ID NO: 736787 - DNA, 19 bp, Mus musculus
  siRNA target sequence for 4931427F14Rik (NM_028892.1,1491-1509).
gagcagacgggttagacta

SEQ ID NO: 736788 - DNA, 19 bp, Mus musculus
  siRNA target sequence for 4931427F14Rik (NM_028892.1,1510-1528).
cagaatcgcagctcacatt

SEQ ID NO: 736789 - DNA, 19 bp, Mus musculus
  siRNA target sequence for 4931427F14Rik (NM_028892.1,1570-1588).
gaagaatcttcgtgagata

SEQ ID NO: 736790 - DNA, 19 bp, Mus musculus
  siRNA target sequence for 4931427F14Rik (NM_028892.1,1577-1595).
cttcgtgagatattcttaa

SEQ ID NO: 736791 - DNA, 19 bp, Mus musculus
  siRNA target sequence for 4931427F14Rik (NM_028892.1,1632-1650).
gtcccctcctactgaacta

SEQ ID NO: 736792 - DNA, 19 bp, Mus musculus
  siRNA target sequence for 4931427F14Rik (NM_028892.1,1658-1676).
gcgcatgcccacaagaagt

SEQ ID NO: 736793 - DNA, 19 bp, Mus musculus
  siRNA target sequence for 4931427F14Rik (NM_028892.1,1803-1821).
ccactattcacgagcttat

SEQ ID NO: 736794 - DNA, 19 bp, Mus musculus
  siRNA target sequence for 4931427F14Rik (NM_028892.1,1806-1824).
ctattcacgagcttatgca

SEQ ID NO: 736795 - DNA, 19 bp, Mus musculus
  siRNA target sequence for 4931427F14Rik (NM_028892.1,1813-1831).
cgagcttatgcatttctgt

SEQ ID NO: 736796 - DNA, 19 bp, Mus musculus
  siRNA target sequence for 4931427F14Rik (NM_028892.1,1814-1832).
gagcttatgcatttctgta

SEQ ID NO: 736797 - DNA, 19 bp, Mus musculus
  siRNA target sequence for 4931427F14Rik (NM_028892.1,1862-1880).
gaacgagccttcaaggtat

SEQ ID NO: 736798 - DNA, 19 bp, Mus musculus
  siRNA target sequence for 4931427F14Rik (NM_028892.1,1868-1886).
gccttcaaggtatttactt

SEQ ID NO: 736799 - DNA, 19 bp, Mus musculus
  siRNA target sequence for 4931427F14Rik (NM_028892.1,2011-2029).
gataaggcagcggtacatt

SEQ ID NO: 736800 - DNA, 19 bp, Mus musculus
  siRNA target sequence for 4931427F14Rik (NM_028892.1,2055-2073).
cgccagtagtagtagagat

SEQ ID NO: 736801 - DNA, 19 bp, Mus musculus
  siRNA target sequence for 4931427F14Rik (NM_028892.1,2056-2074).
gccagtagtagtagagatt

SEQ ID NO: 736802 - DNA, 19 bp, Mus musculus
  siRNA target sequence for 4931427F14Rik (NM_028892.1,2164-2182).
cgagcctgatgctattagt

SEQ ID NO: 736803 - DNA, 19 bp, Mus musculus
  siRNA target sequence for 4931427F14Rik (NM_028892.1,2213-2231).
ccctggaattctagtaata

SEQ ID NO: 736804 - DNA, 19 bp, Mus musculus
  siRNA target sequence for 4931427F14Rik (NM_028892.1,2296-2314).
catggacactgagatcaaa

SEQ ID NO: 736805 - DNA, 19 bp, Mus musculus
  siRNA target sequence for 4931427F14Rik (NM_028892.1,2332-2350).
ggatgattctcctgaaaaa

SEQ ID NO: 736806 - DNA, 19 bp, Mus musculus
  siRNA target sequence for 4931427F14Rik (NM_028892.1,2375-2393).
gccgacatagaggacatta

SEQ ID NO: 736807 - DNA, 19 bp, Mus musculus
  siRNA target sequence for 4931427F14Rik (NM_028892.1,2376-2394).
ccgacatagaggacattaa

SEQ ID NO: 736808 - DNA, 19 bp, Mus musculus
  siRNA target sequence for 4931427F14Rik (NM_028892.1,2377-2395).
cgacatagaggacattaaa

SEQ ID NO: 736809 - DNA, 19 bp, Mus musculus
  siRNA target sequence for 4931427F14Rik (NM_028892.1,2492-2510).
cgatgtgttgactcttact

SEQ ID NO: 736810 - DNA, 19 bp, Mus musculus
  siRNA target sequence for 4931427F14Rik (NM_028892.1,2493-2511).
gatgtgttgactcttacta

SEQ ID NO: 736811 - DNA, 19 bp, Mus musculus
  siRNA target sequence for 4931427F14Rik (NM_028892.1,2512-2530).
ccacacgcaggataactct

SEQ ID NO: 736812 - DNA, 19 bp, Mus musculus
  siRNA target sequence for 4931427F14Rik (NM_028892.1,2513-2531).
cacacgcaggataactctt

SEQ ID NO: 736813 - DNA, 19 bp, Mus musculus
  siRNA target sequence for 4931427F14Rik (NM_028892.1,2515-2533).
cacgcaggataactcttta

SEQ ID NO: 736814 - DNA, 19 bp, Mus musculus
  siRNA target sequence for 4931427F14Rik (NM_028892.1,2517-2535).
cgcaggataactctttact

SEQ ID NO: 736815 - DNA, 19 bp, Mus musculus
  siRNA target sequence for 4931427F14Rik (NM_028892.1,2518-2536).
gcaggataactctttactt

SEQ ID NO: 736816 - DNA, 19 bp, Mus musculus
  siRNA target sequence for 4931427F14Rik (NM_028892.1,2566-2584).
gcgtctgcaatgtgaacat

SEQ ID NO: 736817 - DNA, 19 bp, Mus musculus
  siRNA target sequence for 4931427F14Rik (NM_028892.1,2567-2585).
cgtctgcaatgtgaacatt

SEQ ID NO: 736818 - DNA, 19 bp, Mus musculus
  siRNA target sequence for 4931427F14Rik (NM_028892.1,2572-2590).
gcaatgtgaacattggaat

SEQ ID NO: 736819 - DNA, 19 bp, Mus musculus
  siRNA target sequence for 4931427F14Rik (NM_028892.1,2573-2591).
caatgtgaacattggaata

SEQ ID NO: 736820 - DNA, 19 bp, Mus musculus
  siRNA target sequence for 4931427F14Rik (NM_028892.1,2609-2627).
gtcggattcaggaattact

SEQ ID NO: 736821 - DNA, 19 bp, Mus musculus
  siRNA target sequence for 4931427F14Rik (NM_028892.1,2611-2629).
cggattcaggaattactta

SEQ ID NO: 736822 - DNA, 19 bp, Mus musculus
  siRNA target sequence for 4931427F14Rik (NM_028892.1,2613-2631).
gattcaggaattacttaga

SEQ ID NO: 736823 - DNA, 19 bp, Mus musculus
  siRNA target sequence for 4931427F14Rik (NM_028892.1,2617-2635).
caggaattacttagaactt

SEQ ID NO: 736824 - DNA, 19 bp, Mus musculus
  siRNA target sequence for 4931427F14Rik (NM_028892.1,2619-2637).
ggaattacttagaacttgt

SEQ ID NO: 736825 - DNA, 19 bp, Mus musculus
  siRNA target sequence for 4931427F14Rik (NM_028892.1,2620-2638).
gaattacttagaacttgtt

SEQ ID NO: 736826 - DNA, 19 bp, Mus musculus
  siRNA target sequence for 4932408F18Rik (NM_028897.2,1029-1047).
cgtgagcagccctgtgtta

SEQ ID NO: 736827 - DNA, 19 bp, Mus musculus
  siRNA target sequence for 4932408F18Rik (NM_028897.2,1068-1086).
gagggccatttcagctttt

SEQ ID NO: 736828 - DNA, 19 bp, Mus musculus
  siRNA target sequence for 4932408F18Rik (NM_028897.2,1151-1169).
ccatgctgagccgatgtat

SEQ ID NO: 736829 - DNA, 19 bp, Mus musculus
  siRNA target sequence for 4932408F18Rik (NM_028897.2,1207-1225).
ggccacgcttgcagtagaa

SEQ ID NO: 736830 - DNA, 19 bp, Mus musculus
  siRNA target sequence for 4932408F18Rik (NM_028897.2,1295-1313).
gcaggctggctgtggaatt

SEQ ID NO: 736831 - DNA, 19 bp, Mus musculus
  siRNA target sequence for 4932408F18Rik (NM_028897.2,1380-1398).
ggaggccttctcagagtat

SEQ ID NO: 736832 - DNA, 19 bp, Mus musculus
  siRNA target sequence for 4932408F18Rik (NM_028897.2,1520-1538).
cccacatgaaggtgaagtt

SEQ ID NO: 736833 - DNA, 19 bp, Mus musculus
  siRNA target sequence for 4932408F18Rik (NM_028897.2,1611-1629).
gagtcactcgtccctaaat

SEQ ID NO: 736834 - DNA, 19 bp, Mus musculus
  siRNA target sequence for 4932408F18Rik (NM_028897.2,1613-1631).
gtcactcgtccctaaatca

SEQ ID NO: 736835 - DNA, 19 bp, Mus musculus
  siRNA target sequence for 4932408F18Rik (NM_028897.2,1741-1759).
catggactgccccacataa

SEQ ID NO: 736836 - DNA, 19 bp, Mus musculus
  siRNA target sequence for 4932408F18Rik (NM_028897.2,1744-1762).
ggactgccccacataagca

SEQ ID NO: 736837 - DNA, 19 bp, Mus musculus
  siRNA target sequence for 4932408F18Rik (NM_028897.2,1889-1907).
ctgaggcggagctctttgt

SEQ ID NO: 736838 - DNA, 19 bp, Mus musculus
  siRNA target sequence for 4932408F18Rik (NM_028897.2,2193-2211).
ctacgagaacctagatgat

SEQ ID NO: 736839 - DNA, 19 bp, Mus musculus
  siRNA target sequence for 4932408F18Rik (NM_028897.2,2372-2390).
gggagaatgaggatgtcaa

SEQ ID NO: 736840 - DNA, 19 bp, Mus musculus
  siRNA target sequence for 4932408F18Rik (NM_028897.2,2594-2612).
gccctgcacatgtggatat

SEQ ID NO: 736841 - DNA, 19 bp, Mus musculus
  siRNA target sequence for 4932408F18Rik (NM_028897.2,2621-2639).
cctccttcaacttcttgta

SEQ ID NO: 736842 - DNA, 19 bp, Mus musculus
  siRNA target sequence for 4932408F18Rik (NM_028897.2,2634-2652).
cttgtactggagtcttcat

SEQ ID NO: 736843 - DNA, 19 bp, Mus musculus
  siRNA target sequence for 4932408F18Rik (NM_028897.2,2841-2859).
gcaggtccatcggacatta

SEQ ID NO: 736844 - DNA, 19 bp, Mus musculus
  siRNA target sequence for 4932408F18Rik (NM_028897.2,2842-2860).
caggtccatcggacattat

SEQ ID NO: 736845 - DNA, 19 bp, Mus musculus
  siRNA target sequence for 4932408F18Rik (NM_028897.2,2844-2862).
ggtccatcggacattatct

SEQ ID NO: 736846 - DNA, 19 bp, Mus musculus
  siRNA target sequence for 4932408F18Rik (NM_028897.2,2863-2881).
gtggaactgaaccaagtat

SEQ ID NO: 736847 - DNA, 19 bp, Mus musculus
  siRNA target sequence for 4932408F18Rik (NM_028897.2,2866-2884).
gaactgaaccaagtattga

SEQ ID NO: 736848 - DNA, 19 bp, Mus musculus
  siRNA target sequence for 4932408F18Rik (NM_028897.2,2924-2942).
cagctgccatcctacgatt

SEQ ID NO: 736849 - DNA, 19 bp, Mus musculus
  siRNA target sequence for 4932408F18Rik (NM_028897.2,2947-2965).
cggacagccttgcaacaaa

SEQ ID NO: 736850 - DNA, 19 bp, Mus musculus
  siRNA target sequence for 4932408F18Rik (NM_028897.2,3058-3076).
caagtgctagccctgttaa

SEQ ID NO: 736851 - DNA, 19 bp, Mus musculus
  siRNA target sequence for 4932408F18Rik (NM_028897.2,3102-3120).
gaaagaccctctgttatct

SEQ ID NO: 736852 - DNA, 19 bp, Mus musculus
  siRNA target sequence for 4932408F18Rik (NM_028897.2,3255-3273).
cttcctcagacctgagata

SEQ ID NO: 736853 - DNA, 19 bp, Mus musculus
  siRNA target sequence for 4932408F18Rik (NM_028897.2,3265-3283).
cctgagatactgagactta

SEQ ID NO: 736854 - DNA, 19 bp, Mus musculus
  siRNA target sequence for 4932408F18Rik (NM_028897.2,3268-3286).
gagatactgagacttatga

SEQ ID NO: 736855 - DNA, 19 bp, Mus musculus
  siRNA target sequence for 4932408F18Rik (NM_028897.2,3348-3366).
gcaaggtgcagctttggtt

SEQ ID NO: 736856 - DNA, 19 bp, Mus musculus
  siRNA target sequence for 4932408F18Rik (NM_028897.2,3431-3449).
gcatgggtctcctaaatga

SEQ ID NO: 736857 - DNA, 19 bp, Mus musculus
  siRNA target sequence for 4932408F18Rik (NM_028897.2,3462-3480).
ccagaccttgcaatcatct

SEQ ID NO: 736858 - DNA, 19 bp, Mus musculus
  siRNA target sequence for 4932408F18Rik (NM_028897.2,3463-3481).
cagaccttgcaatcatctt

SEQ ID NO: 736859 - DNA, 19 bp, Mus musculus
  siRNA target sequence for 4932408F18Rik (NM_028897.2,3541-3559).
ctcggaggtgtgtctgttt

SEQ ID NO: 736860 - DNA, 19 bp, Mus musculus
  siRNA target sequence for 4932417H02Rik (NM_028898.1,52-70).
gaggcggaccttacagatt

SEQ ID NO: 736861 - DNA, 19 bp, Mus musculus
  siRNA target sequence for 4932417H02Rik (NM_028898.1,56-74).
cggaccttacagattggaa

SEQ ID NO: 736862 - DNA, 19 bp, Mus musculus
  siRNA target sequence for 4932417H02Rik (NM_028898.1,101-119).
gacattgtgagaaaatcga

SEQ ID NO: 736863 - DNA, 19 bp, Mus musculus
  siRNA target sequence for 4932417H02Rik (NM_028898.1,260-278).
ggatcgatcctctgtctat

SEQ ID NO: 736864 - DNA, 19 bp, Mus musculus
  siRNA target sequence for 4932417H02Rik (NM_028898.1,381-399).
ggatgaagtcaagaaactt

SEQ ID NO: 736865 - DNA, 19 bp, Mus musculus
  siRNA target sequence for 4932417H02Rik (NM_028898.1,382-400).
gatgaagtcaagaaacttt

SEQ ID NO: 736866 - DNA, 19 bp, Mus musculus
  siRNA target sequence for 4932417H02Rik (NM_028898.1,435-453).
ggtccttttccactacaat

SEQ ID NO: 736867 - DNA, 19 bp, Mus musculus
  siRNA target sequence for 4932417H02Rik (NM_028898.1,494-512).
gggtcttcaacaagaacta

SEQ ID NO: 736868 - DNA, 19 bp, Mus musculus
  siRNA target sequence for 4932417H02Rik (NM_028898.1,496-514).
gtcttcaacaagaactaca

SEQ ID NO: 736869 - DNA, 19 bp, Mus musculus
  siRNA target sequence for 4932417H02Rik (NM_028898.1,603-621).
catcgtcaagtccttcaaa

SEQ ID NO: 736870 - DNA, 19 bp, Mus musculus
  siRNA target sequence for 4932417H02Rik (NM_028898.1,607-625).
gtcaagtccttcaaacagt

SEQ ID NO: 736871 - DNA, 19 bp, Mus musculus
  siRNA target sequence for 4932417H02Rik (NM_028898.1,609-627).
caagtccttcaaacagttt

SEQ ID NO: 736872 - DNA, 19 bp, Mus musculus
  siRNA target sequence for 4932417H02Rik (NM_028898.1,700-718).
cctccctcaatgaaaaact

SEQ ID NO: 736873 - DNA, 19 bp, Mus musculus
  siRNA target sequence for 4932417H02Rik (NM_028898.1,799-817).
ctcaccactcccatcaaga

SEQ ID NO: 736874 - DNA, 19 bp, Mus musculus
  siRNA target sequence for 4932417H02Rik (NM_028898.1,866-884).
gagtcacactggatttgat

SEQ ID NO: 736875 - DNA, 19 bp, Mus musculus
  siRNA target sequence for 4932417H02Rik (NM_028898.1,870-888).
cacactggatttgatagaa

SEQ ID NO: 736876 - DNA, 19 bp, Mus musculus
  siRNA target sequence for 4932417H02Rik (NM_028898.1,986-1004).
ctcgggatctcttccaaaa

SEQ ID NO: 736877 - DNA, 19 bp, Mus musculus
  siRNA target sequence for 4932417H02Rik (NM_028898.1,1021-1039).
ctgctcgtggcaagtttgt

SEQ ID NO: 736878 - DNA, 19 bp, Mus musculus
  siRNA target sequence for 4932417H02Rik (NM_028898.1,1023-1041).
gctcgtggcaagtttgttt

SEQ ID NO: 736879 - DNA, 19 bp, Mus musculus
  siRNA target sequence for 4932417H02Rik (NM_028898.1,1024-1042).
ctcgtggcaagtttgttta

SEQ ID NO: 736880 - DNA, 19 bp, Mus musculus
  siRNA target sequence for 4932417H02Rik (NM_028898.1,1026-1044).
cgtggcaagtttgtttaga

SEQ ID NO: 736881 - DNA, 19 bp, Mus musculus
  siRNA target sequence for 4932417H02Rik (NM_028898.1,1027-1045).
gtggcaagtttgtttagaa

SEQ ID NO: 736882 - DNA, 19 bp, Mus musculus
  siRNA target sequence for 4932417H02Rik (NM_028898.1,1029-1047).
ggcaagtttgtttagaaat

SEQ ID NO: 736883 - DNA, 19 bp, Mus musculus
  siRNA target sequence for 4932417H02Rik (NM_028898.1,1209-1227).
caggcacagcccattcttt

SEQ ID NO: 736884 - DNA, 19 bp, Mus musculus
  siRNA target sequence for 4932417H02Rik (NM_028898.1,1410-1428).
gggcatcttcccctatgta

SEQ ID NO: 736885 - DNA, 19 bp, Mus musculus
  siRNA target sequence for 4932417H02Rik (NM_028898.1,1412-1430).
gcatcttcccctatgtact

SEQ ID NO: 736886 - DNA, 19 bp, Mus musculus
  siRNA target sequence for 4932417H02Rik (NM_028898.1,1534-1552).
gacaacggtcacaagtact

SEQ ID NO: 736887 - DNA, 19 bp, Mus musculus
  siRNA target sequence for 4932417H02Rik (NM_028898.1,1798-1816).
gcccacgaaaagctctata

SEQ ID NO: 736888 - DNA, 19 bp, Mus musculus
  siRNA target sequence for 4932417H02Rik (NM_028898.1,1845-1863).
ccgatgtgcagctgtattt

SEQ ID NO: 736889 - DNA, 19 bp, Mus musculus
  siRNA target sequence for 4932417H02Rik (NM_028898.1,1913-1931).
ccaccattgaccacaatgt

SEQ ID NO: 736890 - DNA, 19 bp, Mus musculus
  siRNA target sequence for 4932417H02Rik (NM_028898.1,2003-2021).
gtcaccttgtagtccaata

SEQ ID NO: 736891 - DNA, 19 bp, Mus musculus
  siRNA target sequence for 4932417H02Rik (NM_028898.1,2008-2026).
cttgtagtccaatatgaaa

SEQ ID NO: 736892 - DNA, 19 bp, Mus musculus
  siRNA target sequence for 4932417H02Rik (NM_028898.1,2198-2216).
ggaacctgaacaaatcttt

SEQ ID NO: 736893 - DNA, 19 bp, Mus musculus
  siRNA target sequence for 4932417H02Rik (NM_028898.1,2393-2411).
ccctcataggagtttcttt

SEQ ID NO: 736894 - DNA, 19 bp, Mus musculus
  siRNA target sequence for 4932417H02Rik (NM_028898.1,2497-2515).
gtcctcaacagcattgctt

SEQ ID NO: 736895 - DNA, 19 bp, Mus musculus
  siRNA target sequence for 4932417H02Rik (NM_028898.1,2657-2675).
gcagcctgaccaatgatgt

SEQ ID NO: 736896 - DNA, 19 bp, Mus musculus
  siRNA target sequence for 4932417H02Rik (NM_028898.1,2770-2788).
cctcgaacacgaaagatgt

SEQ ID NO: 736897 - DNA, 19 bp, Mus musculus
  siRNA target sequence for 4932417H02Rik (NM_028898.1,2771-2789).
ctcgaacacgaaagatgtt

SEQ ID NO: 736898 - DNA, 19 bp, Mus musculus
  siRNA target sequence for 4932417H02Rik (NM_028898.1,2883-2901).
ctggagtgcccgctacttt

SEQ ID NO: 736899 - DNA, 19 bp, Mus musculus
  siRNA target sequence for 4932417H02Rik (NM_028898.1,3035-3053).
gactggacgatcagatctt

SEQ ID NO: 736900 - DNA, 19 bp, Mus musculus
  siRNA target sequence for 4932417H02Rik (NM_028898.1,3040-3058).
gacgatcagatctttctga

SEQ ID NO: 736901 - DNA, 19 bp, Mus musculus
  siRNA target sequence for 4932417H02Rik (NM_028898.1,3073-3091).
gttccttctgtggtcaaat

SEQ ID NO: 736902 - DNA, 19 bp, Mus musculus
  siRNA target sequence for 4932417H02Rik (NM_028898.1,3385-3403).
gtagactgggaacaagaaa

SEQ ID NO: 736903 - DNA, 19 bp, Mus musculus
  siRNA target sequence for 4932417H02Rik (NM_028898.1,3527-3545).
cgcaccgttcgctcattgt

SEQ ID NO: 736904 - DNA, 19 bp, Mus musculus
  siRNA target sequence for 4932417H02Rik (NM_028898.1,3730-3748).
cccgagtctgtgaatgtaa

SEQ ID NO: 736905 - DNA, 19 bp, Mus musculus
  siRNA target sequence for 4932417H02Rik (NM_028898.1,3731-3749).
ccgagtctgtgaatgtaat

SEQ ID NO: 736906 - DNA, 19 bp, Mus musculus
  siRNA target sequence for 4932417H02Rik (NM_028898.1,3861-3879).
caacaacatcaaatactat

SEQ ID NO: 736907 - DNA, 19 bp, Mus musculus
  siRNA target sequence for 4932417H02Rik (NM_028898.1,3864-3882).
caacatcaaatactatgat

SEQ ID NO: 736908 - DNA, 19 bp, Mus musculus
  siRNA target sequence for 4932417H02Rik (NM_028898.1,3949-3967).
gccgtaggaagcaatgact

SEQ ID NO: 736909 - DNA, 19 bp, Mus musculus
  siRNA target sequence for 4932432N11Rik (NM_028904.2,381-399).
gtgtagctagtgctgtatt

SEQ ID NO: 736910 - DNA, 19 bp, Mus musculus
  siRNA target sequence for 4932432N11Rik (NM_028904.2,383-401).
gtagctagtgctgtattaa

SEQ ID NO: 736911 - DNA, 19 bp, Mus musculus
  siRNA target sequence for 4932432N11Rik (NM_028904.2,387-405).
ctagtgctgtattaagagt

SEQ ID NO: 736912 - DNA, 19 bp, Mus musculus
  siRNA target sequence for 4932432N11Rik (NM_028904.2,423-441).
caacatggcatgttaaggt

SEQ ID NO: 736913 - DNA, 19 bp, Mus musculus
  siRNA target sequence for 4932432N11Rik (NM_028904.2,474-492).
ggatccaagaagaaaataa

SEQ ID NO: 736914 - DNA, 19 bp, Mus musculus
  siRNA target sequence for 4932432N11Rik (NM_028904.2,475-493).
gatccaagaagaaaataat

SEQ ID NO: 736915 - DNA, 19 bp, Mus musculus
  siRNA target sequence for 4932432N11Rik (NM_028904.2,501-519).
ctttgagtcaggcacaaat

SEQ ID NO: 736916 - DNA, 19 bp, Mus musculus
  siRNA target sequence for 4932432N11Rik (NM_028904.2,505-523).
gagtcaggcacaaataaat

SEQ ID NO: 736917 - DNA, 19 bp, Mus musculus
  siRNA target sequence for 4932432N11Rik (NM_028904.2,624-642).
ggttttatgctctacagat

SEQ ID NO: 736918 - DNA, 19 bp, Mus musculus
  siRNA target sequence for 4932432N11Rik (NM_028904.2,632-650).
gctctacagatcaattctt

SEQ ID NO: 736919 - DNA, 19 bp, Mus musculus
  siRNA target sequence for 4932432N11Rik (NM_028904.2,659-677).
gtgagtcagcctgcttatt

SEQ ID NO: 736920 - DNA, 19 bp, Mus musculus
  siRNA target sequence for 4932432N11Rik (NM_028904.2,667-685).
gcctgcttattcacagata

SEQ ID NO: 736921 - DNA, 19 bp, Mus musculus
  siRNA target sequence for 4932432N11Rik (NM_028904.2,736-754).
gcagagtactccaaaacca

SEQ ID NO: 736922 - DNA, 19 bp, Mus musculus
  siRNA target sequence for 4932432N11Rik (NM_028904.2,737-755).
cagagtactccaaaaccat

SEQ ID NO: 736923 - DNA, 19 bp, Mus musculus
  siRNA target sequence for 4932432N11Rik (NM_028904.2,819-837).
gaatggagtatcagtctat

SEQ ID NO: 736924 - DNA, 19 bp, Mus musculus
  siRNA target sequence for 4932432N11Rik (NM_028904.2,857-875).
cttcctccaggtacaaaaa

SEQ ID NO: 736925 - DNA, 19 bp, Mus musculus
  siRNA target sequence for 4932432N11Rik (NM_028904.2,861-879).
ctccaggtacaaaaatttt

SEQ ID NO: 736926 - DNA, 19 bp, Mus musculus
  siRNA target sequence for 4932432N11Rik (NM_028904.2,864-882).
caggtacaaaaattttagt

SEQ ID NO: 736927 - DNA, 19 bp, Mus musculus
  siRNA target sequence for 4932432N11Rik (NM_028904.2,901-919).
ccgtcttggtgttctctta

SEQ ID NO: 736928 - DNA, 19 bp, Mus musculus
  siRNA target sequence for 4932432N11Rik (NM_028904.2,903-921).
gtcttggtgttctcttact

SEQ ID NO: 736929 - DNA, 19 bp, Mus musculus
  siRNA target sequence for 4932432N11Rik (NM_028904.2,959-977).
gatggtctttcagaagaaa

SEQ ID NO: 736930 - DNA, 19 bp, Mus musculus
  siRNA target sequence for 4932432N11Rik (NM_028904.2,1002-1020).
gattaattggggaacttga

SEQ ID NO: 736931 - DNA, 19 bp, Mus musculus
  siRNA target sequence for 4932432N11Rik (NM_028904.2,1036-1054).
cattccaaataattccatt

SEQ ID NO: 736932 - DNA, 19 bp, Mus musculus
  siRNA target sequence for 4932432N11Rik (NM_028904.2,1055-1073).
cacaacgtgcccaaagttt

SEQ ID NO: 736933 - DNA, 19 bp, Mus musculus
  siRNA target sequence for 4932432N11Rik (NM_028904.2,1057-1075).
caacgtgcccaaagtttca

SEQ ID NO: 736934 - DNA, 19 bp, Mus musculus
  siRNA target sequence for 4932432N11Rik (NM_028904.2,1101-1119).
cctcggatgaagaactctt

SEQ ID NO: 736935 - DNA, 19 bp, Mus musculus
  siRNA target sequence for 4932432N11Rik (NM_028904.2,1117-1135).
cttggcaagtcttgatgaa

SEQ ID NO: 736936 - DNA, 19 bp, Mus musculus
  siRNA target sequence for 4932432N11Rik (NM_028904.2,1139-1157).
gaagagtctgcagcaaata

SEQ ID NO: 736937 - DNA, 19 bp, Mus musculus
  siRNA target sequence for 4932432N11Rik (NM_028904.2,1193-1211).
ggcacttcctcaaatacta

SEQ ID NO: 736938 - DNA, 19 bp, Mus musculus
  siRNA target sequence for 4932432N11Rik (NM_028904.2,1216-1234).
gacaaatccgtctggtttt

SEQ ID NO: 736939 - DNA, 19 bp, Mus musculus
  siRNA target sequence for 4932432N11Rik (NM_028904.2,1218-1236).
caaatccgtctggttttga

SEQ ID NO: 736940 - DNA, 19 bp, Mus musculus
  siRNA target sequence for 4932432N11Rik (NM_028904.2,1230-1248).
gttttgagccaggatgtaa

SEQ ID NO: 736941 - DNA, 19 bp, Mus musculus
  siRNA target sequence for 4932432N11Rik (NM_028904.2,1235-1253).
gagccaggatgtaacattt

SEQ ID NO: 736942 - DNA, 19 bp, Mus musculus
  siRNA target sequence for 4932432N11Rik (NM_028904.2,1237-1255).
gccaggatgtaacatttct

SEQ ID NO: 736943 - DNA, 19 bp, Mus musculus
  siRNA target sequence for 4932432N11Rik (NM_028904.2,1238-1256).
ccaggatgtaacatttctt

SEQ ID NO: 736944 - DNA, 19 bp, Mus musculus
  siRNA target sequence for 4932432N11Rik (NM_028904.2,1382-1400).
gcatcgcagccactaactt

SEQ ID NO: 736945 - DNA, 19 bp, Mus musculus
  siRNA target sequence for 4932432N11Rik (NM_028904.2,1383-1401).
catcgcagccactaacttt

SEQ ID NO: 736946 - DNA, 19 bp, Mus musculus
  siRNA target sequence for 4932432N11Rik (NM_028904.2,1386-1404).
cgcagccactaactttgaa

SEQ ID NO: 736947 - DNA, 19 bp, Mus musculus
  siRNA target sequence for 4932432N11Rik (NM_028904.2,1462-1480).
cacagctttgattcataaa

SEQ ID NO: 736948 - DNA, 19 bp, Mus musculus
  siRNA target sequence for 4932432N11Rik (NM_028904.2,1544-1562).
gattgtgcatctactagaa

SEQ ID NO: 736949 - DNA, 19 bp, Mus musculus
  siRNA target sequence for 4932432N11Rik (NM_028904.2,1573-1591).
gagattctcagctcatgat

SEQ ID NO: 736950 - DNA, 19 bp, Mus musculus
  siRNA target sequence for 4932432N11Rik (NM_028904.2,1641-1659).
ccctcagcagttcaaatgt

SEQ ID NO: 736951 - DNA, 19 bp, Mus musculus
  siRNA target sequence for 4932432N11Rik (NM_028904.2,1642-1660).
cctcagcagttcaaatgta

SEQ ID NO: 736952 - DNA, 19 bp, Mus musculus
  siRNA target sequence for 4932432N11Rik (NM_028904.2,1650-1668).
gttcaaatgtacattgctt

SEQ ID NO: 736953 - DNA, 19 bp, Mus musculus
  siRNA target sequence for 4932432N11Rik (NM_028904.2,1658-1676).
gtacattgcttacgtaata

SEQ ID NO: 736954 - DNA, 19 bp, Mus musculus
  siRNA target sequence for 4932432N11Rik (NM_028904.2,1696-1714).
ggacctatcagaaaagagt

SEQ ID NO: 736955 - DNA, 19 bp, Mus musculus
  siRNA target sequence for 4932432N11Rik (NM_028904.2,1748-1766).
caggcttgttcttcaagat

SEQ ID NO: 736956 - DNA, 19 bp, Mus musculus
  siRNA target sequence for 4932432N11Rik (NM_028904.2,1774-1792).
gaataatacttatctatct

SEQ ID NO: 736957 - DNA, 19 bp, Mus musculus
  siRNA target sequence for 4932432N11Rik (NM_028904.2,1791-1809).
ctattggcatggacttaca

SEQ ID NO: 736958 - DNA, 19 bp, Mus musculus
  siRNA target sequence for 4932432N11Rik (NM_028904.2,1875-1893).
cagtcaaagcgtttattgt

SEQ ID NO: 736959 - DNA, 19 bp, Mus musculus
  siRNA target sequence for 4932432N11Rik (NM_028904.2,1877-1895).
gtcaaagcgtttattgtca

SEQ ID NO: 736960 - DNA, 19 bp, Mus musculus
  siRNA target sequence for 4932432N11Rik (NM_028904.2,1932-1950).
ggggtgtaactgcaaaagt

SEQ ID NO: 736961 - DNA, 19 bp, Mus musculus
  siRNA target sequence for 4932432N11Rik (NM_028904.2,1933-1951).
gggtgtaactgcaaaagtt

SEQ ID NO: 736962 - DNA, 19 bp, Mus musculus
  siRNA target sequence for 4932432N11Rik (NM_028904.2,1991-2009).
gaaatacttaccagtatga

SEQ ID NO: 736963 - DNA, 19 bp, Mus musculus
  siRNA target sequence for 4932432N11Rik (NM_028904.2,2002-2020).
cagtatgatagggtattca

SEQ ID NO: 736964 - DNA, 19 bp, Mus musculus
  siRNA target sequence for 4932432N11Rik (NM_028904.2,2004-2022).
gtatgatagggtattcagt

SEQ ID NO: 736965 - DNA, 19 bp, Mus musculus
  siRNA target sequence for 4932432N11Rik (NM_028904.2,2043-2061).
gaaaggaccctcttaaata

SEQ ID NO: 736966 - DNA, 19 bp, Mus musculus
  siRNA target sequence for 4932432N11Rik (NM_028904.2,2051-2069).
cctcttaaatataaaacat

SEQ ID NO: 736967 - DNA, 19 bp, Mus musculus
  siRNA target sequence for 4932432N11Rik (NM_028904.2,2093-2111).
cagcgagatctgatcgatt

SEQ ID NO: 736968 - DNA, 19 bp, Mus musculus
  siRNA target sequence for 4932432N11Rik (NM_028904.2,2096-2114).
cgagatctgatcgatttgt

SEQ ID NO: 736969 - DNA, 19 bp, Mus musculus
  siRNA target sequence for 4932432N11Rik (NM_028904.2,2099-2117).
gatctgatcgatttgtgtt

SEQ ID NO: 736970 - DNA, 19 bp, Mus musculus
  siRNA target sequence for 4932432N11Rik (NM_028904.2,2122-2140).
gatgactatttcatacgat

SEQ ID NO: 736971 - DNA, 19 bp, Mus musculus
  siRNA target sequence for 4932432N11Rik (NM_028904.2,2137-2155).
cgatccttcttcatgtaaa

SEQ ID NO: 736972 - DNA, 19 bp, Mus musculus
  siRNA target sequence for 4932432N11Rik (NM_028904.2,2173-2191).
gcaagatgttggtatggaa

SEQ ID NO: 736973 - DNA, 19 bp, Mus musculus
  siRNA target sequence for 4932432N11Rik (NM_028904.2,2203-2221).
cctaaagaaacggttgaat

SEQ ID NO: 736974 - DNA, 19 bp, Mus musculus
  siRNA target sequence for 4932432N11Rik (NM_028904.2,2204-2222).
ctaaagaaacggttgaata

SEQ ID NO: 736975 - DNA, 19 bp, Mus musculus
  siRNA target sequence for 4932438H23Rik (NM_028905.1,411-429).
gtccatgctggacaagaat

SEQ ID NO: 736976 - DNA, 19 bp, Mus musculus
  siRNA target sequence for 4932438H23Rik (NM_028905.1,514-532).
cacactgattttcacaaaa

SEQ ID NO: 736977 - DNA, 19 bp, Mus musculus
  siRNA target sequence for 4932438H23Rik (NM_028905.1,573-591).
gggactgtgactacagttt

SEQ ID NO: 736978 - DNA, 19 bp, Mus musculus
  siRNA target sequence for 4932438H23Rik (NM_028905.1,637-655).
ggagcaaaccagctatcat

SEQ ID NO: 736979 - DNA, 19 bp, Mus musculus
  siRNA target sequence for 4932438H23Rik (NM_028905.1,695-713).
ggccacgtgctgaagttca

SEQ ID NO: 736980 - DNA, 19 bp, Mus musculus
  siRNA target sequence for 4932438H23Rik (NM_028905.1,719-737).
gtccaagacttgaagcttt

SEQ ID NO: 736981 - DNA, 19 bp, Mus musculus
  siRNA target sequence for 4932438H23Rik (NM_028905.1,791-809).
cagaggcttcgcatccata

SEQ ID NO: 736982 - DNA, 19 bp, Mus musculus
  siRNA target sequence for 4932438H23Rik (NM_028905.1,795-813).
ggcttcgcatccatactaa

SEQ ID NO: 736983 - DNA, 19 bp, Mus musculus
  siRNA target sequence for 4932438H23Rik (NM_028905.1,888-906).
ggcaaacatgtatgttcat

SEQ ID NO: 736984 - DNA, 19 bp, Mus musculus
  siRNA target sequence for 4932438H23Rik (NM_028905.1,931-949).
caacggggactcatcttta

SEQ ID NO: 736985 - DNA, 19 bp, Mus musculus
  siRNA target sequence for 4932438H23Rik (NM_028905.1,938-956).
gactcatctttaaagtcat

SEQ ID NO: 736986 - DNA, 19 bp, Mus musculus
  siRNA target sequence for 4932438H23Rik (NM_028905.1,945-963).
ctttaaagtcatacagtat

SEQ ID NO: 736987 - DNA, 19 bp, Mus musculus
  siRNA target sequence for 4932438H23Rik (NM_028905.1,1032-1050).
gcaacagaagctatgttgt

SEQ ID NO: 736988 - DNA, 19 bp, Mus musculus
  siRNA target sequence for 4932438H23Rik (NM_028905.1,1042-1060).
ctatgttgtcacagttatt

SEQ ID NO: 736989 - DNA, 19 bp, Mus musculus
  siRNA target sequence for 4932438H23Rik (NM_028905.1,1046-1064).
gttgtcacagttatttact

SEQ ID NO: 736990 - DNA, 19 bp, Mus musculus
  siRNA target sequence for 4933403G14Rik (NM_028908.1,815-833).
gccctcctccactgtatta

SEQ ID NO: 736991 - DNA, 19 bp, Mus musculus
  siRNA target sequence for 4933403G14Rik (NM_028908.1,836-854).
ctcacctgactcaggaaaa

SEQ ID NO: 736992 - DNA, 19 bp, Mus musculus
  siRNA target sequence for 4933403G14Rik (NM_028908.1,865-883).
gccagggttgaaatcacta

SEQ ID NO: 736993 - DNA, 19 bp, Mus musculus
  siRNA target sequence for 4933403G14Rik (NM_028908.1,866-884).
ccagggttgaaatcactat

SEQ ID NO: 736994 - DNA, 19 bp, Mus musculus
  siRNA target sequence for 4933403G14Rik (NM_028908.1,867-885).
cagggttgaaatcactatt

SEQ ID NO: 736995 - DNA, 19 bp, Mus musculus
  siRNA target sequence for 4933403G14Rik (NM_028908.1,919-937).
gacatttttcccgaaacaa

SEQ ID NO: 736996 - DNA, 19 bp, Mus musculus
  siRNA target sequence for 4933403G14Rik (NM_028908.1,953-971).
ccttaaggccagtgaaaca

SEQ ID NO: 736997 - DNA, 19 bp, Mus musculus
  siRNA target sequence for 4933403G14Rik (NM_028908.1,998-1016).
ctcctgtgcttccaaatct

SEQ ID NO: 736998 - DNA, 19 bp, Mus musculus
  siRNA target sequence for 4933403G14Rik (NM_028908.1,1055-1073).
cgtgtcctcctcagattga

SEQ ID NO: 736999 - DNA, 19 bp, Mus musculus
  siRNA target sequence for 4933403G14Rik (NM_028908.1,1082-1100).
cagtcaatgctataagaca

SEQ ID NO: 737000 - DNA, 19 bp, Mus musculus
  siRNA target sequence for 4933403G14Rik (NM_028908.1,1097-1115).
gacagctgccactattgaa

SEQ ID NO: 737001 - DNA, 19 bp, Mus musculus
  siRNA target sequence for 4933403G14Rik (NM_028908.1,1102-1120).
ctgccactattgaatgctt

SEQ ID NO: 737002 - DNA, 19 bp, Mus musculus
  siRNA target sequence for 4933403G14Rik (NM_028908.1,1105-1123).
ccactattgaatgctttat

SEQ ID NO: 737003 - DNA, 19 bp, Mus musculus
  siRNA target sequence for 4933403G14Rik (NM_028908.1,1183-1201).
catttagcctggttgtaca

SEQ ID NO: 737004 - DNA, 19 bp, Mus musculus
  siRNA target sequence for 4933403G14Rik (NM_028908.1,1296-1314).
ggtgaatccccagtctaaa

SEQ ID NO: 737005 - DNA, 19 bp, Mus musculus
  siRNA target sequence for 4933403G14Rik (NM_028908.1,1355-1373).
ccccaccaaaggttacaaa

SEQ ID NO: 737006 - DNA, 19 bp, Mus musculus
  siRNA target sequence for 4933403G14Rik (NM_028908.1,1384-1402).
ctgtatggcttaacaaata

SEQ ID NO: 737007 - DNA, 19 bp, Mus musculus
  siRNA target sequence for 4933403G14Rik (NM_028908.1,1386-1404).
gtatggcttaacaaataca

SEQ ID NO: 737008 - DNA, 19 bp, Mus musculus
  siRNA target sequence for 4933403G14Rik (NM_028908.1,1403-1421).
cactgagactgcgtttaca

SEQ ID NO: 737009 - DNA, 19 bp, Mus musculus
  siRNA target sequence for 4933403G14Rik (NM_028908.1,1434-1452).
caacatgctggttgtacat

SEQ ID NO: 737010 - DNA, 19 bp, Mus musculus
  siRNA target sequence for 4933403G14Rik (NM_028908.1,1437-1455).
catgctggttgtacatgaa

SEQ ID NO: 737011 - DNA, 19 bp, Mus musculus
  siRNA target sequence for 4933403G14Rik (NM_028908.1,1441-1459).
ctggttgtacatgaaaaga

SEQ ID NO: 737012 - DNA, 19 bp, Mus musculus
  siRNA target sequence for 4933403G14Rik (NM_028908.1,1467-1485).
gtacaggaggtcacagata

SEQ ID NO: 737013 - DNA, 19 bp, Mus musculus
  siRNA target sequence for 4933403G14Rik (NM_028908.1,1470-1488).
caggaggtcacagatacaa

SEQ ID NO: 737014 - DNA, 19 bp, Mus musculus
  siRNA target sequence for 4933403G14Rik (NM_028908.1,1684-1702).
gaggaaggtagtgatactt

SEQ ID NO: 737015 - DNA, 19 bp, Mus musculus
  siRNA target sequence for 4933403G14Rik (NM_028908.1,1686-1704).
ggaaggtagtgatacttca

SEQ ID NO: 737016 - DNA, 19 bp, Mus musculus
  siRNA target sequence for 4933403G14Rik (NM_028908.1,1687-1705).
gaaggtagtgatacttcaa

SEQ ID NO: 737017 - DNA, 19 bp, Mus musculus
  siRNA target sequence for 4933403G14Rik (NM_028908.1,1694-1712).
gtgatacttcaatgcaaat

SEQ ID NO: 737018 - DNA, 19 bp, Mus musculus
  siRNA target sequence for 4933403G14Rik (NM_028908.1,1726-1744).
gatgagtcaagcacaacta

SEQ ID NO: 737019 - DNA, 19 bp, Mus musculus
  siRNA target sequence for 4933403G14Rik (NM_028908.1,1736-1754).
gcacaactaaagaagtgaa

SEQ ID NO: 737020 - DNA, 19 bp, Mus musculus
  siRNA target sequence for 4933403G14Rik (NM_028908.1,1758-1776).
gagccatgccatgaaacaa

SEQ ID NO: 737021 - DNA, 19 bp, Mus musculus
  siRNA target sequence for 4933403G14Rik (NM_028908.1,1767-1785).
catgaaacaagaaatggtt

SEQ ID NO: 737022 - DNA, 19 bp, Mus musculus
  siRNA target sequence for 4933403G14Rik (NM_028908.1,1865-1883).
ctcttcgatcaaatagttt

SEQ ID NO: 737023 - DNA, 19 bp, Mus musculus
  siRNA target sequence for 4933403G14Rik (NM_028908.1,1926-1944).
cctacaggaacctactgtt

SEQ ID NO: 737024 - DNA, 19 bp, Mus musculus
  siRNA target sequence for 4933403G14Rik (NM_028908.1,1977-1995).
gcaagtcaaagccataagt

SEQ ID NO: 737025 - DNA, 19 bp, Mus musculus
  siRNA target sequence for 4933403G14Rik (NM_028908.1,2020-2038).
ccaaccagtagaaaaagtt

SEQ ID NO: 737026 - DNA, 19 bp, Mus musculus
  siRNA target sequence for 4933403G14Rik (NM_028908.1,2043-2061).
cgagagcatctcagaacta

SEQ ID NO: 737027 - DNA, 19 bp, Mus musculus
  siRNA target sequence for 4933403G14Rik (NM_028908.1,2076-2094).
gttcaccagcccttgttat

SEQ ID NO: 737028 - DNA, 19 bp, Mus musculus
  siRNA target sequence for 4933403G14Rik (NM_028908.1,2079-2097).
caccagcccttgttattct

SEQ ID NO: 737029 - DNA, 19 bp, Mus musculus
  siRNA target sequence for 4933403G14Rik (NM_028908.1,2278-2296).
ccagtgtgttctcataaaa

SEQ ID NO: 737030 - DNA, 19 bp, Mus musculus
  siRNA target sequence for 4933403G14Rik (NM_028908.1,2281-2299).
gtgtgttctcataaaagat

SEQ ID NO: 737031 - DNA, 19 bp, Mus musculus
  siRNA target sequence for 4933403G14Rik (NM_028908.1,2297-2315).
gatcccgtgcactgaagat

SEQ ID NO: 737032 - DNA, 19 bp, Mus musculus
  siRNA target sequence for 4933403G14Rik (NM_028908.1,2305-2323).
gcactgaagattcatgata

SEQ ID NO: 737033 - DNA, 19 bp, Mus musculus
  siRNA target sequence for 4933403G14Rik (NM_028908.1,2346-2364).
ctctaccagtgacttttca

SEQ ID NO: 737034 - DNA, 19 bp, Mus musculus
  siRNA target sequence for 4933403G14Rik (NM_028908.1,2394-2412).
ggcagatccaggtagttca

SEQ ID NO: 737035 - DNA, 19 bp, Mus musculus
  siRNA target sequence for 4933403G14Rik (NM_028908.1,2395-2413).
gcagatccaggtagttcaa

SEQ ID NO: 737036 - DNA, 19 bp, Mus musculus
  siRNA target sequence for 4933403G14Rik (NM_028908.1,2396-2414).
cagatccaggtagttcaaa

SEQ ID NO: 737037 - DNA, 19 bp, Mus musculus
  siRNA target sequence for 4933403G14Rik (NM_028908.1,2433-2451).
ggacagctccactaaactt

SEQ ID NO: 737038 - DNA, 19 bp, Mus musculus
  siRNA target sequence for 4933403G14Rik (NM_028908.1,2434-2452).
gacagctccactaaactta

SEQ ID NO: 737039 - DNA, 19 bp, Mus musculus
  siRNA target sequence for 4933403G14Rik (NM_028908.1,2513-2531).
gttcttacgagccatcaaa

SEQ ID NO: 737040 - DNA, 19 bp, Mus musculus
  siRNA target sequence for 4933403G14Rik (NM_028908.1,2516-2534).
cttacgagccatcaaattt

SEQ ID NO: 737041 - DNA, 19 bp, Mus musculus
  siRNA target sequence for 4933403G14Rik (NM_028908.1,2556-2574).
catagatgacagtgactta

SEQ ID NO: 737042 - DNA, 19 bp, Mus musculus
  siRNA target sequence for 4933403G14Rik (NM_028908.1,2637-2655).
catctgcgagttagtaata

SEQ ID NO: 737043 - DNA, 19 bp, Mus musculus
  siRNA target sequence for 4933403G14Rik (NM_028908.1,2640-2658).
ctgcgagttagtaataaat

SEQ ID NO: 737044 - DNA, 19 bp, Mus musculus
  siRNA target sequence for 4933403G14Rik (NM_028908.1,2642-2660).
gcgagttagtaataaataa

SEQ ID NO: 737045 - DNA, 19 bp, Mus musculus
  siRNA target sequence for 4933401E19Rik (NM_028911.1,1066-1084).
cacgttccggactttttta

SEQ ID NO: 737046 - DNA, 19 bp, Mus musculus
  siRNA target sequence for 4933401E19Rik (NM_028911.1,1191-1209).
gatggcacctcgtctatct

SEQ ID NO: 737047 - DNA, 19 bp, Mus musculus
  siRNA target sequence for 4933401E19Rik (NM_028911.1,1304-1322).
cccgctcccatgtatgcaa

SEQ ID NO: 737048 - DNA, 19 bp, Mus musculus
  siRNA target sequence for 4933401E19Rik (NM_028911.1,1305-1323).
ccgctcccatgtatgcaaa

SEQ ID NO: 737049 - DNA, 19 bp, Mus musculus
  siRNA target sequence for 4933401E19Rik (NM_028911.1,1306-1324).
cgctcccatgtatgcaaaa

SEQ ID NO: 737050 - DNA, 19 bp, Mus musculus
  siRNA target sequence for 4933401E19Rik (NM_028911.1,1342-1360).
gagtcacctgtgaaagtct

SEQ ID NO: 737051 - DNA, 19 bp, Mus musculus
  siRNA target sequence for 4933401E19Rik (NM_028911.1,1344-1362).
gtcacctgtgaaagtctat

SEQ ID NO: 737052 - DNA, 19 bp, Mus musculus
  siRNA target sequence for 1200008A14Rik (NM_028915.1,158-176).
cggtgtgtagcgaaatcga

SEQ ID NO: 737053 - DNA, 19 bp, Mus musculus
  siRNA target sequence for 1200008A14Rik (NM_028915.1,159-177).
ggtgtgtagcgaaatcgaa

SEQ ID NO: 737054 - DNA, 19 bp, Mus musculus
  siRNA target sequence for 1200008A14Rik (NM_028915.1,222-240).
caaaggcctgcacagtata

SEQ ID NO: 737055 - DNA, 19 bp, Mus musculus
  siRNA target sequence for 1200008A14Rik (NM_028915.1,227-245).
gcctgcacagtatatcaga

SEQ ID NO: 737056 - DNA, 19 bp, Mus musculus
  siRNA target sequence for 1200008A14Rik (NM_028915.1,232-250).
cacagtatatcagagttat

SEQ ID NO: 737057 - DNA, 19 bp, Mus musculus
  siRNA target sequence for 1200008A14Rik (NM_028915.1,234-252).
cagtatatcagagttatct

SEQ ID NO: 737058 - DNA, 19 bp, Mus musculus
  siRNA target sequence for 1200008A14Rik (NM_028915.1,268-286).
catgccatcaatttgcatt

SEQ ID NO: 737059 - DNA, 19 bp, Mus musculus
  siRNA target sequence for 1200008A14Rik (NM_028915.1,271-289).
gccatcaatttgcattgta

SEQ ID NO: 737060 - DNA, 19 bp, Mus musculus
  siRNA target sequence for 1200008A14Rik (NM_028915.1,272-290).
ccatcaatttgcattgtaa

SEQ ID NO: 737061 - DNA, 19 bp, Mus musculus
  siRNA target sequence for 1200008A14Rik (NM_028915.1,327-345).
gaacctacgacatttagat

SEQ ID NO: 737062 - DNA, 19 bp, Mus musculus
  siRNA target sequence for 1200008A14Rik (NM_028915.1,346-364).
ctgtcatctaatcaaataa

SEQ ID NO: 737063 - DNA, 19 bp, Mus musculus
  siRNA target sequence for 1200008A14Rik (NM_028915.1,348-366).
gtcatctaatcaaataagt

SEQ ID NO: 737064 - DNA, 19 bp, Mus musculus
  siRNA target sequence for 1200008A14Rik (NM_028915.1,350-368).
catctaatcaaataagtca

SEQ ID NO: 737065 - DNA, 19 bp, Mus musculus
  siRNA target sequence for 1200008A14Rik (NM_028915.1,390-408).
gacaaagctatgcacttta

SEQ ID NO: 737066 - DNA, 19 bp, Mus musculus
  siRNA target sequence for 1200008A14Rik (NM_028915.1,448-466).
gaagcactggttaatctga

SEQ ID NO: 737067 - DNA, 19 bp, Mus musculus
  siRNA target sequence for 1200008A14Rik (NM_028915.1,452-470).
cactggttaatctgactaa

SEQ ID NO: 737068 - DNA, 19 bp, Mus musculus
  siRNA target sequence for 1200008A14Rik (NM_028915.1,517-535).
ccccttcatggactaaagt

SEQ ID NO: 737069 - DNA, 19 bp, Mus musculus
  siRNA target sequence for 1200008A14Rik (NM_028915.1,518-536).
cccttcatggactaaagta

SEQ ID NO: 737070 - DNA, 19 bp, Mus musculus
  siRNA target sequence for 1200008A14Rik (NM_028915.1,520-538).
cttcatggactaaagtata

SEQ ID NO: 737071 - DNA, 19 bp, Mus musculus
  siRNA target sequence for 1200008A14Rik (NM_028915.1,604-622).
gtaggattgcacttcctaa

SEQ ID NO: 737072 - DNA, 19 bp, Mus musculus
  siRNA target sequence for 1200008A14Rik (NM_028915.1,608-626).
gattgcacttcctaaccaa

SEQ ID NO: 737073 - DNA, 19 bp, Mus musculus
  siRNA target sequence for 1200008A14Rik (NM_028915.1,623-641).
ccaatcttattttagagaa

SEQ ID NO: 737074 - DNA, 19 bp, Mus musculus
  siRNA target sequence for 1200008A14Rik (NM_028915.1,674-692).
cagggtaccgagcaatcat

SEQ ID NO: 737075 - DNA, 19 bp, Mus musculus
  siRNA target sequence for 1200008A14Rik (NM_028915.1,701-719).
ctttaccacaactgagaat

SEQ ID NO: 737076 - DNA, 19 bp, Mus musculus
  siRNA target sequence for 1200008A14Rik (NM_028915.1,707-725).
cacaactgagaatcttaga

SEQ ID NO: 737077 - DNA, 19 bp, Mus musculus
  siRNA target sequence for 1200008A14Rik (NM_028915.1,751-769).
gtaagcttggaagaaataa

SEQ ID NO: 737078 - DNA, 19 bp, Mus musculus
  siRNA target sequence for 1200008A14Rik (NM_028915.1,797-815).
gacttttggataacttagt

SEQ ID NO: 737079 - DNA, 19 bp, Mus musculus
  siRNA target sequence for 1200008A14Rik (NM_028915.1,821-839).
ctgattcccccctgaatat

SEQ ID NO: 737080 - DNA, 19 bp, Mus musculus
  siRNA target sequence for 1200008A14Rik (NM_028915.1,823-841).
gattcccccctgaatataa

SEQ ID NO: 737081 - DNA, 19 bp, Mus musculus
  siRNA target sequence for 1200008A14Rik (NM_028915.1,827-845).
cccccctgaatataagtga

SEQ ID NO: 737082 - DNA, 19 bp, Mus musculus
  siRNA target sequence for 1200008A14Rik (NM_028915.1,828-846).
ccccctgaatataagtgaa

SEQ ID NO: 737083 - DNA, 19 bp, Mus musculus
  siRNA target sequence for 1200008A14Rik (NM_028915.1,831-849).
cctgaatataagtgaagat

SEQ ID NO: 737084 - DNA, 19 bp, Mus musculus
  siRNA target sequence for 1200008A14Rik (NM_028915.1,872-890).
caccaccaatggatgtgtt

SEQ ID NO: 737085 - DNA, 19 bp, Mus musculus
  siRNA target sequence for 1200008A14Rik (NM_028915.1,883-901).
gatgtgttgccttctttga

SEQ ID NO: 737086 - DNA, 19 bp, Mus musculus
  siRNA target sequence for 1200008A14Rik (NM_028915.1,931-949).
gttttagcctcacttttat

SEQ ID NO: 737087 - DNA, 19 bp, Mus musculus
  siRNA target sequence for 1200008A14Rik (NM_028915.1,1039-1057).
ctacagcttctcaatgaaa

SEQ ID NO: 737088 - DNA, 19 bp, Mus musculus
  siRNA target sequence for 1200008A14Rik (NM_028915.1,1042-1060).
cagcttctcaatgaaacta

SEQ ID NO: 737089 - DNA, 19 bp, Mus musculus
  siRNA target sequence for 1200008A14Rik (NM_028915.1,1044-1062).
gcttctcaatgaaactaat

SEQ ID NO: 737090 - DNA, 19 bp, Mus musculus
  siRNA target sequence for 1200008A14Rik (NM_028915.1,1113-1131).
cacagatataacttctgaa

SEQ ID NO: 737091 - DNA, 19 bp, Mus musculus
  siRNA target sequence for 1200008A14Rik (NM_028915.1,1168-1186).
gttcccaggagaacaaaaa

SEQ ID NO: 737092 - DNA, 19 bp, Mus musculus
  siRNA target sequence for 1200008A14Rik (NM_028915.1,1200-1218).
cagaactattcaaaccatt

SEQ ID NO: 737093 - DNA, 19 bp, Mus musculus
  siRNA target sequence for 1200008A14Rik (NM_028915.1,1249-1267).
gtaagttgtaatcgtaaaa

SEQ ID NO: 737094 - DNA, 19 bp, Mus musculus
  siRNA target sequence for 1200008A14Rik (NM_028915.1,1347-1365).
gaagactggcgtaattaaa

SEQ ID NO: 737095 - DNA, 19 bp, Mus musculus
  siRNA target sequence for 1200008A14Rik (NM_028915.1,1350-1368).
gactggcgtaattaaagta

SEQ ID NO: 737096 - DNA, 19 bp, Mus musculus
  siRNA target sequence for 1200008A14Rik (NM_028915.1,1352-1370).
ctggcgtaattaaagtaga

SEQ ID NO: 737097 - DNA, 19 bp, Mus musculus
  siRNA target sequence for 1200008A14Rik (NM_028915.1,1355-1373).
gcgtaattaaagtagacaa

SEQ ID NO: 737098 - DNA, 19 bp, Mus musculus
  siRNA target sequence for 1200008A14Rik (NM_028915.1,1400-1418).
ggtccctcgtggaacagtt

SEQ ID NO: 737099 - DNA, 19 bp, Mus musculus
  siRNA target sequence for 1200008A14Rik (NM_028915.1,1401-1419).
gtccctcgtggaacagtta

SEQ ID NO: 737100 - DNA, 19 bp, Mus musculus
  siRNA target sequence for 1200008A14Rik (NM_028915.1,1482-1500).
cgatgagctacataagcaa

SEQ ID NO: 737101 - DNA, 19 bp, Mus musculus
  siRNA target sequence for 1200008A14Rik (NM_028915.1,1531-1549).
gctctcattaccacagata

SEQ ID NO: 737102 - DNA, 19 bp, Mus musculus
  siRNA target sequence for 1200008A14Rik (NM_028915.1,1536-1554).
cattaccacagatagacta

SEQ ID NO: 737103 - DNA, 19 bp, Mus musculus
  siRNA target sequence for 1200008A14Rik (NM_028915.1,1541-1559).
ccacagatagactaaagga

SEQ ID NO: 737104 - DNA, 19 bp, Mus musculus
  siRNA target sequence for 1200008A14Rik (NM_028915.1,1542-1560).
cacagatagactaaaggat

SEQ ID NO: 737105 - DNA, 19 bp, Mus musculus
  siRNA target sequence for 1200008A14Rik (NM_028915.1,1583-1601).
gcaaggctcaacttgaaat

SEQ ID NO: 737106 - DNA, 19 bp, Mus musculus
  siRNA target sequence for 1200008A14Rik (NM_028915.1,1584-1602).
caaggctcaacttgaaatt

SEQ ID NO: 737107 - DNA, 19 bp, Mus musculus
  siRNA target sequence for 1200008A14Rik (NM_028915.1,1587-1605).
ggctcaacttgaaattata

SEQ ID NO: 737108 - DNA, 19 bp, Mus musculus
  siRNA target sequence for 1200008A14Rik (NM_028915.1,1796-1814).
ctgatcgagaaataaactt

SEQ ID NO: 737109 - DNA, 19 bp, Mus musculus
  siRNA target sequence for 1200008A14Rik (NM_028915.1,1812-1830).
cttacttcgaacttctctt

SEQ ID NO: 737110 - DNA, 19 bp, Mus musculus
  siRNA target sequence for 1200008A14Rik (NM_028915.1,1935-1953).
gttccaggatgcattaact

SEQ ID NO: 737111 - DNA, 19 bp, Mus musculus
  siRNA target sequence for 1200008A14Rik (NM_028915.1,1945-1963).
gcattaactaaacgattat

SEQ ID NO: 737112 - DNA, 19 bp, Mus musculus
  siRNA target sequence for 1200008A14Rik (NM_028915.1,2053-2071).
gagttccgtattgctttaa

SEQ ID NO: 737113 - DNA, 19 bp, Mus musculus
  siRNA target sequence for 1200008A14Rik (NM_028915.1,2055-2073).
gttccgtattgctttaact

SEQ ID NO: 737114 - DNA, 19 bp, Mus musculus
  siRNA target sequence for 1200008A14Rik (NM_028915.1,2058-2076).
ccgtattgctttaactgtt

SEQ ID NO: 737115 - DNA, 19 bp, Mus musculus
  siRNA target sequence for 1200008A14Rik (NM_028915.1,2072-2090).
ctgttgaagctagaagatt

SEQ ID NO: 737116 - DNA, 19 bp, Mus musculus
  siRNA target sequence for 1200008A14Rik (NM_028915.1,2126-2144).
ctgagttagcgaagagtaa

SEQ ID NO: 737117 - DNA, 19 bp, Mus musculus
  siRNA target sequence for 1200008A14Rik (NM_028915.1,2130-2148).
gttagcgaagagtaaacat

SEQ ID NO: 737118 - DNA, 19 bp, Mus musculus
  siRNA target sequence for 1200008A14Rik (NM_028915.1,2159-2177).
gggctcagcgtaaagaaaa

SEQ ID NO: 737119 - DNA, 19 bp, Mus musculus
  siRNA target sequence for 1200008A14Rik (NM_028915.1,2160-2178).
ggctcagcgtaaagaaaat

SEQ ID NO: 737120 - DNA, 19 bp, Mus musculus
  siRNA target sequence for 1200008A14Rik (NM_028915.1,2183-2201).
cgtcttctttaattaaaga

SEQ ID NO: 737121 - DNA, 19 bp, Mus musculus
  siRNA target sequence for 1200008A14Rik (NM_028915.1,2270-2288).
cagccaatttacagaatca

SEQ ID NO: 737122 - DNA, 19 bp, Mus musculus
  siRNA target sequence for 1200008A14Rik (NM_028915.1,2287-2305).
caaatcaacactcttgaaa

SEQ ID NO: 737123 - DNA, 19 bp, Mus musculus
  siRNA target sequence for 1200008A14Rik (NM_028915.1,2322-2340).
caagcagaagagcattcaa

SEQ ID NO: 737124 - DNA, 19 bp, Mus musculus
  siRNA target sequence for 1200008A14Rik (NM_028915.1,2333-2351).
gcattcaaatagaacttct

SEQ ID NO: 737125 - DNA, 19 bp, Mus musculus
  siRNA target sequence for 1200008A14Rik (NM_028915.1,2359-2377).
gaaaaaacccagctgattt

SEQ ID NO: 737126 - DNA, 19 bp, Mus musculus
  siRNA target sequence for 1200008A14Rik (NM_028915.1,2411-2429).
gcttacggactgagagaaa

SEQ ID NO: 737127 - DNA, 19 bp, Mus musculus
  siRNA target sequence for 1200008A14Rik (NM_028915.1,2416-2434).
cggactgagagaaaagtat

SEQ ID NO: 737128 - DNA, 19 bp, Mus musculus
  siRNA target sequence for 1200008A14Rik (NM_028915.1,2471-2489).
cccagagtcgtgggaaatt

SEQ ID NO: 737129 - DNA, 19 bp, Mus musculus
  siRNA target sequence for 1200008A14Rik (NM_028915.1,2472-2490).
ccagagtcgtgggaaatta

SEQ ID NO: 737130 - DNA, 19 bp, Mus musculus
  siRNA target sequence for 1200008A14Rik (NM_028915.1,2475-2493).
gagtcgtgggaaattagaa

SEQ ID NO: 737131 - DNA, 19 bp, Mus musculus
  siRNA target sequence for 1200008A14Rik (NM_028915.1,2494-2512).
gcccagattgaaagtttat

SEQ ID NO: 737132 - DNA, 19 bp, Mus musculus
  siRNA target sequence for 1200008A14Rik (NM_028915.1,2497-2515).
cagattgaaagtttatgca

SEQ ID NO: 737133 - DNA, 19 bp, Mus musculus
  siRNA target sequence for 1200008A14Rik (NM_028915.1,2557-2575).
gatgcattgagaataaagt

SEQ ID NO: 737134 - DNA, 19 bp, Mus musculus
  siRNA target sequence for 1200008A14Rik (NM_028915.1,2567-2585).
gaataaagtgcaagatcat

SEQ ID NO: 737135 - DNA, 19 bp, Mus musculus
  siRNA target sequence for 1200008A14Rik (NM_028915.1,2599-2617).
gaaaccatccggaaactaa

SEQ ID NO: 737136 - DNA, 19 bp, Mus musculus
  siRNA target sequence for 1200008A14Rik (NM_028915.1,2670-2688).
cgctctcatcgaaaagtgt

SEQ ID NO: 737137 - DNA, 19 bp, Mus musculus
  siRNA target sequence for 1200008A14Rik (NM_028915.1,2671-2689).
gctctcatcgaaaagtgtt

SEQ ID NO: 737138 - DNA, 19 bp, Mus musculus
  siRNA target sequence for 1200008A14Rik (NM_028915.1,2676-2694).
catcgaaaagtgttctcaa

SEQ ID NO: 737139 - DNA, 19 bp, Mus musculus
  siRNA target sequence for 1200008A14Rik (NM_028915.1,2717-2735).
cacaactagattctatagt

SEQ ID NO: 737140 - DNA, 19 bp, Mus musculus
  siRNA target sequence for 1200008A14Rik (NM_028915.1,2729-2747).
ctatagttgagaaactaga

SEQ ID NO: 737141 - DNA, 19 bp, Mus musculus
  siRNA target sequence for 1200008A14Rik (NM_028915.1,2994-3012).
catggatgatgcctttaga

SEQ ID NO: 737142 - DNA, 19 bp, Mus musculus
  siRNA target sequence for 1200008A14Rik (NM_028915.1,3081-3099).
gtatattgactgtgcaaat

SEQ ID NO: 737143 - DNA, 19 bp, Mus musculus
  siRNA target sequence for Tmc5 (NM_028930.1,299-317).
cacctagtctcaagtcaaa

SEQ ID NO: 737144 - DNA, 19 bp, Mus musculus
  siRNA target sequence for Tmc5 (NM_028930.1,301-319).
cctagtctcaagtcaaatt

SEQ ID NO: 737145 - DNA, 19 bp, Mus musculus
  siRNA target sequence for Tmc5 (NM_028930.1,381-399).
gggtagactgtcagatttt

SEQ ID NO: 737146 - DNA, 19 bp, Mus musculus
  siRNA target sequence for Tmc5 (NM_028930.1,383-401).
gtagactgtcagattttca

SEQ ID NO: 737147 - DNA, 19 bp, Mus musculus
  siRNA target sequence for Tmc5 (NM_028930.1,527-545).
gttcaaggacagaaactaa

SEQ ID NO: 737148 - DNA, 19 bp, Mus musculus
  siRNA target sequence for Tmc5 (NM_028930.1,702-720).
gtctgggctccctttcact

SEQ ID NO: 737149 - DNA, 19 bp, Mus musculus
  siRNA target sequence for Tmc5 (NM_028930.1,708-726).
gctccctttcactgactta

SEQ ID NO: 737150 - DNA, 19 bp, Mus musculus
  siRNA target sequence for Tmc5 (NM_028930.1,793-811).
ggtcatcggaggcaagttt

SEQ ID NO: 737151 - DNA, 19 bp, Mus musculus
  siRNA target sequence for Tmc5 (NM_028930.1,849-867).
ggcttttgaagttcaacat

SEQ ID NO: 737152 - DNA, 19 bp, Mus musculus
  siRNA target sequence for Tmc5 (NM_028930.1,851-869).
cttttgaagttcaacatct

SEQ ID NO: 737153 - DNA, 19 bp, Mus musculus
  siRNA target sequence for Tmc5 (NM_028930.1,981-999).
gggacacggtgatgtacta

SEQ ID NO: 737154 - DNA, 19 bp, Mus musculus
  siRNA target sequence for Tmc5 (NM_028930.1,982-1000).
ggacacggtgatgtactat

SEQ ID NO: 737155 - DNA, 19 bp, Mus musculus
  siRNA target sequence for Tmc5 (NM_028930.1,1017-1035).
ctacaatccgacataggat

SEQ ID NO: 737156 - DNA, 19 bp, Mus musculus
  siRNA target sequence for Tmc5 (NM_028930.1,1037-1055).
ggtggagcatcctacaaca

SEQ ID NO: 737157 - DNA, 19 bp, Mus musculus
  siRNA target sequence for Tmc5 (NM_028930.1,1038-1056).
gtggagcatcctacaacat

SEQ ID NO: 737158 - DNA, 19 bp, Mus musculus
  siRNA target sequence for Tmc5 (NM_028930.1,1176-1194).
ggattgctaagctcatctt

SEQ ID NO: 737159 - DNA, 19 bp, Mus musculus
  siRNA target sequence for Tmc5 (NM_028930.1,1177-1195).
gattgctaagctcatcttt

SEQ ID NO: 737160 - DNA, 19 bp, Mus musculus
  siRNA target sequence for Tmc5 (NM_028930.1,1215-1233).
cccatgaaaaagctgtaaa

SEQ ID NO: 737161 - DNA, 19 bp, Mus musculus
  siRNA target sequence for Tmc5 (NM_028930.1,1283-1301).
ctccgccaggagaactaca

SEQ ID NO: 737162 - DNA, 19 bp, Mus musculus
  siRNA target sequence for Tmc5 (NM_028930.1,1316-1334).
cagcagctgacccgatttt

SEQ ID NO: 737163 - DNA, 19 bp, Mus musculus
  siRNA target sequence for Tmc5 (NM_028930.1,1318-1336).
gcagctgacccgattttct

SEQ ID NO: 737164 - DNA, 19 bp, Mus musculus
  siRNA target sequence for Tmc5 (NM_028930.1,1386-1404).
gtgtagctgtctactactt

SEQ ID NO: 737165 - DNA, 19 bp, Mus musculus
  siRNA target sequence for Tmc5 (NM_028930.1,1396-1414).
ctactacttggctgagtat

SEQ ID NO: 737166 - DNA, 19 bp, Mus musculus
  siRNA target sequence for Tmc5 (NM_028930.1,1402-1420).
cttggctgagtataactct

SEQ ID NO: 737167 - DNA, 19 bp, Mus musculus
  siRNA target sequence for Tmc5 (NM_028930.1,1456-1474).
gttgttgctgccctttgtt

SEQ ID NO: 737168 - DNA, 19 bp, Mus musculus
  siRNA target sequence for Tmc5 (NM_028930.1,1493-1511).
gccgtgcctcgcttctact

SEQ ID NO: 737169 - DNA, 19 bp, Mus musculus
  siRNA target sequence for Tmc5 (NM_028930.1,1523-1541).
ctggtggagaggtatgaga

SEQ ID NO: 737170 - DNA, 19 bp, Mus musculus
  siRNA target sequence for Tmc5 (NM_028930.1,1565-1583).
ctcttggtccgaaacatct

SEQ ID NO: 737171 - DNA, 19 bp, Mus musculus
  siRNA target sequence for Tmc5 (NM_028930.1,1571-1589).
gtccgaaacatctttttga

SEQ ID NO: 737172 - DNA, 19 bp, Mus musculus
  siRNA target sequence for Tmc5 (NM_028930.1,1591-1609).
gatctccattgttggaatt

SEQ ID NO: 737173 - DNA, 19 bp, Mus musculus
  siRNA target sequence for Tmc5 (NM_028930.1,1614-1632).
gttactattggctcaacat

SEQ ID NO: 737174 - DNA, 19 bp, Mus musculus
  siRNA target sequence for Tmc5 (NM_028930.1,1714-1732).
ctccttggccgattcctta

SEQ ID NO: 737175 - DNA, 19 bp, Mus musculus
  siRNA target sequence for Tmc5 (NM_028930.1,1728-1746).
ccttactgggggagtttct

SEQ ID NO: 737176 - DNA, 19 bp, Mus musculus
  siRNA target sequence for Tmc5 (NM_028930.1,1782-1800).
gcctacaggagtttgacat

SEQ ID NO: 737177 - DNA, 19 bp, Mus musculus
  siRNA target sequence for Tmc5 (NM_028930.1,1783-1801).
cctacaggagtttgacatt

SEQ ID NO: 737178 - DNA, 19 bp, Mus musculus
  siRNA target sequence for Tmc5 (NM_028930.1,1874-1892).
ccttttatccaaatgatca

SEQ ID NO: 737179 - DNA, 19 bp, Mus musculus
  siRNA target sequence for Tmc5 (NM_028930.1,1922-1940).
gtcagcctgatgatgaact

SEQ ID NO: 737180 - DNA, 19 bp, Mus musculus
  siRNA target sequence for Tmc5 (NM_028930.1,1966-1984).
ggcctcacagatgataact

SEQ ID NO: 737181 - DNA, 19 bp, Mus musculus
  siRNA target sequence for Tmc5 (NM_028930.1,1967-1985).
gcctcacagatgataactt

SEQ ID NO: 737182 - DNA, 19 bp, Mus musculus
  siRNA target sequence for Tmc5 (NM_028930.1,2190-2208).
gaagtgtgcacttcttctt

SEQ ID NO: 737183 - DNA, 19 bp, Mus musculus
  siRNA target sequence for Tmc5 (NM_028930.1,2217-2235).
ccctcattgtgctaatcat

SEQ ID NO: 737184 - DNA, 19 bp, Mus musculus
  siRNA target sequence for Tmc5 (NM_028930.1,2219-2237).
ctcattgtgctaatcatca

SEQ ID NO: 737185 - DNA, 19 bp, Mus musculus
  siRNA target sequence for Tmc5 (NM_028930.1,2227-2245).
gctaatcatcacctatctt

SEQ ID NO: 737186 - DNA, 19 bp, Mus musculus
  siRNA target sequence for Tmc5 (NM_028930.1,2263-2281).
ggggaggaaggtcatgatt

SEQ ID NO: 737187 - DNA, 19 bp, Mus musculus
  siRNA target sequence for Tmc5 (NM_028930.1,2268-2286).
ggaaggtcatgattcgatt

SEQ ID NO: 737188 - DNA, 19 bp, Mus musculus
  siRNA target sequence for Tmc5 (NM_028930.1,2283-2301).
gattgctccatgaacagat

SEQ ID NO: 737189 - DNA, 19 bp, Mus musculus
  siRNA target sequence for Eaf1 (NM_028932.2,218-236).
cacacgattcgctacgatt

SEQ ID NO: 737190 - DNA, 19 bp, Mus musculus
  siRNA target sequence for Eaf1 (NM_028932.2,220-238).
cacgattcgctacgatttt

SEQ ID NO: 737191 - DNA, 19 bp, Mus musculus
  siRNA target sequence for Eaf1 (NM_028932.2,222-240).
cgattcgctacgattttaa

SEQ ID NO: 737192 - DNA, 19 bp, Mus musculus
  siRNA target sequence for Eaf1 (NM_028932.2,336-354).
cgccaatgacggtgttcaa

SEQ ID NO: 737193 - DNA, 19 bp, Mus musculus
  siRNA target sequence for Eaf1 (NM_028932.2,337-355).
gccaatgacggtgttcaaa

SEQ ID NO: 737194 - DNA, 19 bp, Mus musculus
  siRNA target sequence for Eaf1 (NM_028932.2,400-418).
ccacgacactggagagtat

SEQ ID NO: 737195 - DNA, 19 bp, Mus musculus
  siRNA target sequence for Eaf1 (NM_028932.2,469-487).
gggaagcagtaaaatccaa

SEQ ID NO: 737196 - DNA, 19 bp, Mus musculus
  siRNA target sequence for Eaf1 (NM_028932.2,581-599).
ccagctggacccaaaactt

SEQ ID NO: 737197 - DNA, 19 bp, Mus musculus
  siRNA target sequence for Eaf1 (NM_028932.2,597-615).
cttctcccctgaaggataa

SEQ ID NO: 737198 - DNA, 19 bp, Mus musculus
  siRNA target sequence for Eaf1 (NM_028932.2,660-678).
gggccgaggtggacattat

SEQ ID NO: 737199 - DNA, 19 bp, Mus musculus
  siRNA target sequence for Eaf1 (NM_028932.2,663-681).
ccgaggtggacattattga

SEQ ID NO: 737200 - DNA, 19 bp, Mus musculus
  siRNA target sequence for Eaf1 (NM_028932.2,757-775).
cagcgcaggcgaagacaat

SEQ ID NO: 737201 - DNA, 19 bp, Mus musculus
  siRNA target sequence for Eaf1 (NM_028932.2,874-892).
catgaacacgctcagaaat

SEQ ID NO: 737202 - DNA, 19 bp, Mus musculus
  siRNA target sequence for 4933406L09Rik (NM_028934.2,257-275).
gtaccagggaggtgcattt

SEQ ID NO: 737203 - DNA, 19 bp, Mus musculus
  siRNA target sequence for 4933406L09Rik (NM_028934.2,264-282).
ggaggtgcatttgttgaaa

SEQ ID NO: 737204 - DNA, 19 bp, Mus musculus
  siRNA target sequence for 4933406L09Rik (NM_028934.2,265-283).
gaggtgcatttgttgaaat

SEQ ID NO: 737205 - DNA, 19 bp, Mus musculus
  siRNA target sequence for 4933406L09Rik (NM_028934.2,290-308).
cgctcaggggaaaaatcct

SEQ ID NO: 737206 - DNA, 19 bp, Mus musculus
  siRNA target sequence for 4933406L09Rik (NM_028934.2,329-347).
gggcagtccgtctgtgatt

SEQ ID NO: 737207 - DNA, 19 bp, Mus musculus
  siRNA target sequence for 4933406L09Rik (NM_028934.2,330-348).
ggcagtccgtctgtgattt

SEQ ID NO: 737208 - DNA, 19 bp, Mus musculus
  siRNA target sequence for 4933406L09Rik (NM_028934.2,420-438).
cagttaccgaaggagaata

SEQ ID NO: 737209 - DNA, 19 bp, Mus musculus
  siRNA target sequence for 4933406L09Rik (NM_028934.2,431-449).
ggagaataagcaaatcctt

SEQ ID NO: 737210 - DNA, 19 bp, Mus musculus
  siRNA target sequence for 4933406L09Rik (NM_028934.2,509-527).
cactgaattactaattact

SEQ ID NO: 737211 - DNA, 19 bp, Mus musculus
  siRNA target sequence for 4933406L09Rik (NM_028934.2,511-529).
ctgaattactaattactga

SEQ ID NO: 737212 - DNA, 19 bp, Mus musculus
  siRNA target sequence for 4933406L09Rik (NM_028934.2,519-537).
ctaattactgatttaggaa

SEQ ID NO: 737213 - DNA, 19 bp, Mus musculus
  siRNA target sequence for 4933406L09Rik (NM_028934.2,526-544).
ctgatttaggaaacatcaa

SEQ ID NO: 737214 - DNA, 19 bp, Mus musculus
  siRNA target sequence for 4933406L09Rik (NM_028934.2,539-557).
catcaaaagaaggttgtat

SEQ ID NO: 737215 - DNA, 19 bp, Mus musculus
  siRNA target sequence for 4933406L09Rik (NM_028934.2,542-560).
caaaagaaggttgtattta

SEQ ID NO: 737216 - DNA, 19 bp, Mus musculus
  siRNA target sequence for 4933406L09Rik (NM_028934.2,601-619).
caaaaatcccactcttcat

SEQ ID NO: 737217 - DNA, 19 bp, Mus musculus
  siRNA target sequence for 4933406L09Rik (NM_028934.2,617-635).
catgatccagcgtaaaatt

SEQ ID NO: 737218 - DNA, 19 bp, Mus musculus
  siRNA target sequence for 4933406L09Rik (NM_028934.2,664-682).
ccttcaccagtgagatatt

SEQ ID NO: 737219 - DNA, 19 bp, Mus musculus
  siRNA target sequence for 4933406L09Rik (NM_028934.2,716-734).
catcgtctctgctaactgt

SEQ ID NO: 737220 - DNA, 19 bp, Mus musculus
  siRNA target sequence for 4933406L09Rik (NM_028934.2,733-751).
gtaagctgcggaagatctt

SEQ ID NO: 737221 - DNA, 19 bp, Mus musculus
  siRNA target sequence for 4933406L09Rik (NM_028934.2,792-810).
gatgaacccacagatatta

SEQ ID NO: 737222 - DNA, 19 bp, Mus musculus
  siRNA target sequence for 4933406L09Rik (NM_028934.2,849-867).
gttacacagctgctaaaca

SEQ ID NO: 737223 - DNA, 19 bp, Mus musculus
  siRNA target sequence for 4933406L09Rik (NM_028934.2,871-889).
caaaactccgccaaactga

SEQ ID NO: 737224 - DNA, 19 bp, Mus musculus
  siRNA target sequence for 4933406L09Rik (NM_028934.2,876-894).
ctccgccaaactgaaatta

SEQ ID NO: 737225 - DNA, 19 bp, Mus musculus
  siRNA target sequence for 4933406L09Rik (NM_028934.2,900-918).
ggaggtcatcctctaagat

SEQ ID NO: 737226 - DNA, 19 bp, Mus musculus
  siRNA target sequence for 4933406L09Rik (NM_028934.2,959-977).
cgtccagaacagtaaaggt

SEQ ID NO: 737227 - DNA, 19 bp, Mus musculus
  siRNA target sequence for 4933406L09Rik (NM_028934.2,1033-1051).
ctggcagacggaataacct

SEQ ID NO: 737228 - DNA, 19 bp, Mus musculus
  siRNA target sequence for 4933406L09Rik (NM_028934.2,1035-1053).
ggcagacggaataacctaa

SEQ ID NO: 737229 - DNA, 19 bp, Mus musculus
  siRNA target sequence for 4933406L09Rik (NM_028934.2,1076-1094).
gtccattcggtacaaaaat

SEQ ID NO: 737230 - DNA, 19 bp, Mus musculus
  siRNA target sequence for 4933406L09Rik (NM_028934.2,1119-1137).
gaagagaggagtgttaaca

SEQ ID NO: 737231 - DNA, 19 bp, Mus musculus
  siRNA target sequence for 4933406L09Rik (NM_028934.2,1122-1140).
gagaggagtgttaacagta

SEQ ID NO: 737232 - DNA, 19 bp, Mus musculus
  siRNA target sequence for 4933406L09Rik (NM_028934.2,1183-1201).
gaagtgctcgccctttgaa

SEQ ID NO: 737233 - DNA, 19 bp, Mus musculus
  siRNA target sequence for 4933406L09Rik (NM_028934.2,1274-1292).
gggtagcaaccgaagaaga

SEQ ID NO: 737234 - DNA, 19 bp, Mus musculus
  siRNA target sequence for 4933406L09Rik (NM_028934.2,1338-1356).
ggttgctcctcgggaaata

SEQ ID NO: 737235 - DNA, 19 bp, Mus musculus
  siRNA target sequence for 4933406L09Rik (NM_028934.2,1339-1357).
gttgctcctcgggaaataa

SEQ ID NO: 737236 - DNA, 19 bp, Mus musculus
  siRNA target sequence for 4933406L09Rik (NM_028934.2,1377-1395).
gtcatggccctcaacagta

SEQ ID NO: 737237 - DNA, 19 bp, Mus musculus
  siRNA target sequence for 4933406L09Rik (NM_028934.2,1455-1473).
caaccagatgagtggatat

SEQ ID NO: 737238 - DNA, 19 bp, Mus musculus
  siRNA target sequence for 4933406L09Rik (NM_028934.2,1615-1633).
gggctcccaaggacatttt

SEQ ID NO: 737239 - DNA, 19 bp, Mus musculus
  siRNA target sequence for 4933406L09Rik (NM_028934.2,1617-1635).
gctcccaaggacattttta

SEQ ID NO: 737240 - DNA, 19 bp, Mus musculus
  siRNA target sequence for 4933406L09Rik (NM_028934.2,1620-1638).
cccaaggacatttttacct

SEQ ID NO: 737241 - DNA, 19 bp, Mus musculus
  siRNA target sequence for 4933406L09Rik (NM_028934.2,1668-1686).
gggaaaagtcatgatatgt

SEQ ID NO: 737242 - DNA, 19 bp, Mus musculus
  siRNA target sequence for 4933406L09Rik (NM_028934.2,1689-1707).
cccaaggggtgcccattta

SEQ ID NO: 737243 - DNA, 19 bp, Mus musculus
  siRNA target sequence for 4933406L09Rik (NM_028934.2,1691-1709).
caaggggtgcccatttact

SEQ ID NO: 737244 - DNA, 19 bp, Mus musculus
  siRNA target sequence for 4933406L09Rik (NM_028934.2,1754-1772).
gttggaaggcggcttctat

SEQ ID NO: 737245 - DNA, 19 bp, Mus musculus
  siRNA target sequence for 4933406L09Rik (NM_028934.2,1794-1812).
gaatataactggagaaact

SEQ ID NO: 737246 - DNA, 19 bp, Mus musculus
  siRNA target sequence for 4933406L09Rik (NM_028934.2,1921-1939).
ctcaggtagaccactgtaa

SEQ ID NO: 737247 - DNA, 19 bp, Mus musculus
  siRNA target sequence for 4933406L09Rik (NM_028934.2,2009-2027).
gggccgtcactatcagaaa

SEQ ID NO: 737248 - DNA, 19 bp, Mus musculus
  siRNA target sequence for 4933406L09Rik (NM_028934.2,2011-2029).
gccgtcactatcagaaaga

SEQ ID NO: 737249 - DNA, 19 bp, Mus musculus
  siRNA target sequence for 4933406L09Rik (NM_028934.2,2012-2030).
ccgtcactatcagaaagaa

SEQ ID NO: 737250 - DNA, 19 bp, Mus musculus
  siRNA target sequence for 4933406L09Rik (NM_028934.2,2056-2074).
ctcgagactggctgaacat

SEQ ID NO: 737251 - DNA, 19 bp, Mus musculus
  siRNA target sequence for 4933406L09Rik (NM_028934.2,2058-2076).
cgagactggctgaacatgt

SEQ ID NO: 737252 - DNA, 19 bp, Mus musculus
  siRNA target sequence for 4933406L09Rik (NM_028934.2,2059-2077).
gagactggctgaacatgtt

SEQ ID NO: 737253 - DNA, 19 bp, Mus musculus
  siRNA target sequence for 4933406L09Rik (NM_028934.2,2061-2079).
gactggctgaacatgttga

SEQ ID NO: 737254 - DNA, 19 bp, Mus musculus
  siRNA target sequence for 4933406L09Rik (NM_028934.2,2235-2253).
cctcagactggcaaatact

SEQ ID NO: 737255 - DNA, 19 bp, Mus musculus
  siRNA target sequence for 4933406N12Rik (NM_028937.1,69-87).
ggcagggcagagtaaatct

SEQ ID NO: 737256 - DNA, 19 bp, Mus musculus
  siRNA target sequence for 4933406N12Rik (NM_028937.1,71-89).
cagggcagagtaaatcttt

SEQ ID NO: 737257 - DNA, 19 bp, Mus musculus
  siRNA target sequence for 4933406N12Rik (NM_028937.1,95-113).
gttggagatgccacaagat

SEQ ID NO: 737258 - DNA, 19 bp, Mus musculus
  siRNA target sequence for 4933406N12Rik (NM_028937.1,98-116).
ggagatgccacaagatact

SEQ ID NO: 737259 - DNA, 19 bp, Mus musculus
  siRNA target sequence for 4933406N12Rik (NM_028937.1,99-117).
gagatgccacaagatactt

SEQ ID NO: 737260 - DNA, 19 bp, Mus musculus
  siRNA target sequence for 4933406N12Rik (NM_028937.1,209-227).
gctaactcgtttgacataa

SEQ ID NO: 737261 - DNA, 19 bp, Mus musculus
  siRNA target sequence for 4933406N12Rik (NM_028937.1,210-228).
ctaactcgtttgacataat

SEQ ID NO: 737262 - DNA, 19 bp, Mus musculus
  siRNA target sequence for 4933406N12Rik (NM_028937.1,268-286).
ggaggctgccaagttaatt

SEQ ID NO: 737263 - DNA, 19 bp, Mus musculus
  siRNA target sequence for 4933406N12Rik (NM_028937.1,269-287).
gaggctgccaagttaatta

SEQ ID NO: 737264 - DNA, 19 bp, Mus musculus
  siRNA target sequence for 4933406N12Rik (NM_028937.1,271-289).
ggctgccaagttaattaga

SEQ ID NO: 737265 - DNA, 19 bp, Mus musculus
  siRNA target sequence for 4933406N12Rik (NM_028937.1,319-337).
gtttgcttttgtaatacct

SEQ ID NO: 737266 - DNA, 19 bp, Mus musculus
  siRNA target sequence for 4933406N12Rik (NM_028937.1,368-386).
ggagctgacattagtttca

SEQ ID NO: 737267 - DNA, 19 bp, Mus musculus
  siRNA target sequence for 4933406N12Rik (NM_028937.1,419-437).
gtgatacactactggaaaa

SEQ ID NO: 737268 - DNA, 19 bp, Mus musculus
  siRNA target sequence for 4933406N12Rik (NM_028937.1,430-448).
ctggaaaacgtatttcaca

SEQ ID NO: 737269 - DNA, 19 bp, Mus musculus
  siRNA target sequence for 4933406N12Rik (NM_028937.1,515-533).
gaactcggagggcgttttt

SEQ ID NO: 737270 - DNA, 19 bp, Mus musculus
  siRNA target sequence for 4933406N12Rik (NM_028937.1,518-536).
ctcggagggcgtttttcta

SEQ ID NO: 737271 - DNA, 19 bp, Mus musculus
  siRNA target sequence for 4933406N12Rik (NM_028937.1,520-538).
cggagggcgtttttctaca

SEQ ID NO: 737272 - DNA, 19 bp, Mus musculus
  siRNA target sequence for 4933406N12Rik (NM_028937.1,524-542).
gggcgtttttctacagata

SEQ ID NO: 737273 - DNA, 19 bp, Mus musculus
  siRNA target sequence for 4933406N12Rik (NM_028937.1,525-543).
ggcgtttttctacagatat

SEQ ID NO: 737274 - DNA, 19 bp, Mus musculus
  siRNA target sequence for 4933406N12Rik (NM_028937.1,565-583).
gaagaatgacgctagactt

SEQ ID NO: 737275 - DNA, 19 bp, Mus musculus
  siRNA target sequence for 4933406N12Rik (NM_028937.1,572-590).
gacgctagacttggattaa

SEQ ID NO: 737276 - DNA, 19 bp, Mus musculus
  siRNA target sequence for 4933406N12Rik (NM_028937.1,597-615).
cgttgtcgagtctagacaa

SEQ ID NO: 737277 - DNA, 19 bp, Mus musculus
  siRNA target sequence for 4933406N12Rik (NM_028937.1,598-616).
gttgtcgagtctagacaaa

SEQ ID NO: 737278 - DNA, 19 bp, Mus musculus
  siRNA target sequence for 4933406N12Rik (NM_028937.1,603-621).
cgagtctagacaaaagcaa

SEQ ID NO: 737279 - DNA, 19 bp, Mus musculus
  siRNA target sequence for 4933406N12Rik (NM_028937.1,604-622).
gagtctagacaaaagcaaa

SEQ ID NO: 737280 - DNA, 19 bp, Mus musculus
  siRNA target sequence for 4933406N12Rik (NM_028937.1,618-636).
gcaaacaggcgtcttttct

SEQ ID NO: 737281 - DNA, 19 bp, Mus musculus
  siRNA target sequence for 4933406N12Rik (NM_028937.1,619-637).
caaacaggcgtcttttctt

SEQ ID NO: 737282 - DNA, 19 bp, Mus musculus
  siRNA target sequence for 4933406N12Rik (NM_028937.1,753-771).
ccacagttgattatgtgaa

SEQ ID NO: 737283 - DNA, 19 bp, Mus musculus
  siRNA target sequence for 4933406N12Rik (NM_028937.1,821-839).
gccattcagaacaatagaa

SEQ ID NO: 737284 - DNA, 19 bp, Mus musculus
  siRNA target sequence for 4933406N12Rik (NM_028937.1,868-886).
gctgttccttccattctca

SEQ ID NO: 737285 - DNA, 19 bp, Mus musculus
  siRNA target sequence for 4933406N12Rik (NM_028937.1,965-983).
ggcctgaacgtgtattcca

SEQ ID NO: 737286 - DNA, 19 bp, Mus musculus
  siRNA target sequence for 4933406N12Rik (NM_028937.1,966-984).
gcctgaacgtgtattccat

SEQ ID NO: 737287 - DNA, 19 bp, Mus musculus
  siRNA target sequence for 4933406N12Rik (NM_028937.1,1050-1068).
ctattgaggatctgtataa

SEQ ID NO: 737288 - DNA, 19 bp, Mus musculus
  siRNA target sequence for 4933406N12Rik (NM_028937.1,1108-1126).
ccactctgtcaaatacact

SEQ ID NO: 737289 - DNA, 19 bp, Mus musculus
  siRNA target sequence for 4933406N12Rik (NM_028937.1,1229-1247).
cactgcaatgccatgcttt

SEQ ID NO: 737290 - DNA, 19 bp, Mus musculus
  siRNA target sequence for 4933406N12Rik (NM_028937.1,1403-1421).
cagcctcacgacagtagtt

SEQ ID NO: 737291 - DNA, 19 bp, Mus musculus
  siRNA target sequence for 4933406N12Rik (NM_028937.1,1406-1424).
cctcacgacagtagttact

SEQ ID NO: 737292 - DNA, 19 bp, Mus musculus
  siRNA target sequence for 4933406N12Rik (NM_028937.1,1407-1425).
ctcacgacagtagttactt

SEQ ID NO: 737293 - DNA, 19 bp, Mus musculus
  siRNA target sequence for 4933406N12Rik (NM_028937.1,1409-1427).
cacgacagtagttactttt

SEQ ID NO: 737294 - DNA, 19 bp, Mus musculus
  siRNA target sequence for 4933403H06Rik (NM_028938.1,305-323).
ctaacaacttccttactga

SEQ ID NO: 737295 - DNA, 19 bp, Mus musculus
  siRNA target sequence for 4933403H06Rik (NM_028938.1,341-359).
gctgcaaaaagctcatcaa

SEQ ID NO: 737296 - DNA, 19 bp, Mus musculus
  siRNA target sequence for 4933403H06Rik (NM_028938.1,413-431).
gtggactcaagaacctaaa

SEQ ID NO: 737297 - DNA, 19 bp, Mus musculus
  siRNA target sequence for 4933403H06Rik (NM_028938.1,416-434).
gactcaagaacctaaaact

SEQ ID NO: 737298 - DNA, 19 bp, Mus musculus
  siRNA target sequence for 4933403H06Rik (NM_028938.1,426-444).
cctaaaactcctctatctt

SEQ ID NO: 737299 - DNA, 19 bp, Mus musculus
  siRNA target sequence for 4933403H06Rik (NM_028938.1,466-484).
ctgaagaacatctgtgtat

SEQ ID NO: 737300 - DNA, 19 bp, Mus musculus
  siRNA target sequence for 4933403H06Rik (NM_028938.1,508-526).
gggctgaccatgtttgact

SEQ ID NO: 737301 - DNA, 19 bp, Mus musculus
  siRNA target sequence for 4933403H06Rik (NM_028938.1,570-588).
cagtatctggcctctaaaa

SEQ ID NO: 737302 - DNA, 19 bp, Mus musculus
  siRNA target sequence for 4933403H06Rik (NM_028938.1,592-610).
ctggaccatcacgtgatat

SEQ ID NO: 737303 - DNA, 19 bp, Mus musculus
  siRNA target sequence for 4933403H06Rik (NM_028938.1,603-621).
cgtgatatccgatgaagaa

SEQ ID NO: 737304 - DNA, 19 bp, Mus musculus
  siRNA target sequence for 4933403H06Rik (NM_028938.1,611-629).
ccgatgaagaaatcattca

SEQ ID NO: 737305 - DNA, 19 bp, Mus musculus
  siRNA target sequence for 4933403H06Rik (NM_028938.1,659-677).
cgttcagccccagtctatt

SEQ ID NO: 737306 - DNA, 19 bp, Mus musculus
  siRNA target sequence for 4933403H06Rik (NM_028938.1,665-683).
gccccagtctattctttaa

SEQ ID NO: 737307 - DNA, 19 bp, Mus musculus
  siRNA target sequence for 4933403H06Rik (NM_028938.1,668-686).
ccagtctattctttaacct

SEQ ID NO: 737308 - DNA, 19 bp, Mus musculus
  siRNA target sequence for 4933403H06Rik (NM_028938.1,787-805).
gtgttgattatccaaagat

SEQ ID NO: 737309 - DNA, 19 bp, Mus musculus
  siRNA target sequence for 4933403H06Rik (NM_028938.1,803-821).
gatggatacgtggtttcat

SEQ ID NO: 737310 - DNA, 19 bp, Mus musculus
  siRNA target sequence for 4933403H06Rik (NM_028938.1,806-824).
ggatacgtggtttcatagt

SEQ ID NO: 737311 - DNA, 19 bp, Mus musculus
  siRNA target sequence for 4933403H06Rik (NM_028938.1,807-825).
gatacgtggtttcatagtt

SEQ ID NO: 737312 - DNA, 19 bp, Mus musculus
  siRNA target sequence for 4933403H06Rik (NM_028938.1,812-830).
gtggtttcatagttaggaa

SEQ ID NO: 737313 - DNA, 19 bp, Mus musculus
  siRNA target sequence for 4933403H06Rik (NM_028938.1,819-837).
catagttaggaaacactta

SEQ ID NO: 737314 - DNA, 19 bp, Mus musculus
  siRNA target sequence for 4933403H06Rik (NM_028938.1,839-857).
gcccctattttaaacataa

SEQ ID NO: 737315 - DNA, 19 bp, Mus musculus
  siRNA target sequence for 4933403H06Rik (NM_028938.1,862-880).
cattaccacggcaaaatga

SEQ ID NO: 737316 - DNA, 19 bp, Mus musculus
  siRNA target sequence for 4933403H06Rik (NM_028938.1,879-897).
gattagggtgcttgaaaca

SEQ ID NO: 737317 - DNA, 19 bp, Mus musculus
  siRNA target sequence for 4933403H06Rik (NM_028938.1,991-1009).
cactggaaacaaatgagat

SEQ ID NO: 737318 - DNA, 19 bp, Mus musculus
  siRNA target sequence for 4933403H06Rik (NM_028938.1,1034-1052).
ctactgagtacggaaaaca

SEQ ID NO: 737319 - DNA, 19 bp, Mus musculus
  siRNA target sequence for 4933403H06Rik (NM_028938.1,1037-1055).
ctgagtacggaaaacacat

SEQ ID NO: 737320 - DNA, 19 bp, Mus musculus
  siRNA target sequence for 4933403H06Rik (NM_028938.1,1039-1057).
gagtacggaaaacacattt

SEQ ID NO: 737321 - DNA, 19 bp, Mus musculus
  siRNA target sequence for 4933403H06Rik (NM_028938.1,1061-1079).
gtctttcatatgaattgaa

SEQ ID NO: 737322 - DNA, 19 bp, Mus musculus
  siRNA target sequence for 4933403H06Rik (NM_028938.1,1111-1129).
ccaagacatcacattcata

SEQ ID NO: 737323 - DNA, 19 bp, Mus musculus
  siRNA target sequence for 4933403H06Rik (NM_028938.1,1168-1186).
gaagtggacaccgagttta

SEQ ID NO: 737324 - DNA, 19 bp, Mus musculus
  siRNA target sequence for 4933403H06Rik (NM_028938.1,1171-1189).
gtggacaccgagtttagga

SEQ ID NO: 737325 - DNA, 19 bp, Mus musculus
  siRNA target sequence for 4933403H06Rik (NM_028938.1,1173-1191).
ggacaccgagtttaggata

SEQ ID NO: 737326 - DNA, 19 bp, Mus musculus
  siRNA target sequence for 4933403H06Rik (NM_028938.1,1174-1192).
gacaccgagtttaggatat

SEQ ID NO: 737327 - DNA, 19 bp, Mus musculus
  siRNA target sequence for 4933403H06Rik (NM_028938.1,1176-1194).
caccgagtttaggatatct

SEQ ID NO: 737328 - DNA, 19 bp, Mus musculus
  siRNA target sequence for 4933403H06Rik (NM_028938.1,1327-1345).
gagactctatggaagctaa

SEQ ID NO: 737329 - DNA, 19 bp, Mus musculus
  siRNA target sequence for 4933403H06Rik (NM_028938.1,1331-1349).
ctctatggaagctaaagaa

SEQ ID NO: 737330 - DNA, 19 bp, Mus musculus
  siRNA target sequence for 4933403H06Rik (NM_028938.1,1398-1416).
gtttgatgatgttgataaa

SEQ ID NO: 737331 - DNA, 19 bp, Mus musculus
  siRNA target sequence for 4933403H06Rik (NM_028938.1,1467-1485).
catggttacagcacaagtt

SEQ ID NO: 737332 - DNA, 19 bp, Mus musculus
  siRNA target sequence for 4933403H06Rik (NM_028938.1,1499-1517).
ctagtgtcaacattagaga

SEQ ID NO: 737333 - DNA, 19 bp, Mus musculus
  siRNA target sequence for 4933403H06Rik (NM_028938.1,1564-1582).
gataatgagacaattcaga

SEQ ID NO: 737334 - DNA, 19 bp, Mus musculus
  siRNA target sequence for 4933403H06Rik (NM_028938.1,1610-1628).
gactcgcctacctggaaaa

SEQ ID NO: 737335 - DNA, 19 bp, Mus musculus
  siRNA target sequence for 4933403H06Rik (NM_028938.1,1617-1635).
ctacctggaaaaagttaga

SEQ ID NO: 737336 - DNA, 19 bp, Mus musculus
  siRNA target sequence for 4933403H06Rik (NM_028938.1,1630-1648).
gttagagagcggaaattta

SEQ ID NO: 737337 - DNA, 19 bp, Mus musculus
  siRNA target sequence for 4933403H06Rik (NM_028938.1,1634-1652).
gagagcggaaatttatgtt

SEQ ID NO: 737338 - DNA, 19 bp, Mus musculus
  siRNA target sequence for 4933403H06Rik (NM_028938.1,1638-1656).
gcggaaatttatgtttcta

SEQ ID NO: 737339 - DNA, 19 bp, Mus musculus
  siRNA target sequence for 4933403H06Rik (NM_028938.1,1680-1698).
cagaccagtctttagttat

SEQ ID NO: 737340 - DNA, 19 bp, Mus musculus
  siRNA target sequence for 4933403H06Rik (NM_028938.1,1682-1700).
gaccagtctttagttattt

SEQ ID NO: 737341 - DNA, 19 bp, Mus musculus
  siRNA target sequence for 4933405A16Rik (NM_028943.1,703-721).
ggcaaacccaagaccttat

SEQ ID NO: 737342 - DNA, 19 bp, Mus musculus
  siRNA target sequence for 4933405A16Rik (NM_028943.1,733-751).
cgaaagggtgccaaaaaat

SEQ ID NO: 737343 - DNA, 19 bp, Mus musculus
  siRNA target sequence for 4933405A16Rik (NM_028943.1,734-752).
gaaagggtgccaaaaaata

SEQ ID NO: 737344 - DNA, 19 bp, Mus musculus
  siRNA target sequence for 4933405A16Rik (NM_028943.1,754-772).
ccggactacatccagattt

SEQ ID NO: 737345 - DNA, 19 bp, Mus musculus
  siRNA target sequence for 4933405A16Rik (NM_028943.1,778-796).
cccaacgactccaagaaca

SEQ ID NO: 737346 - DNA, 19 bp, Mus musculus
  siRNA target sequence for 4933405A16Rik (NM_028943.1,859-877).
ctgacaaccgtcatgatca

SEQ ID NO: 737347 - DNA, 19 bp, Mus musculus
  siRNA target sequence for 4933405A16Rik (NM_028943.1,920-938).
cgctcccagacaagttttt

SEQ ID NO: 737348 - DNA, 19 bp, Mus musculus
  siRNA target sequence for 4933405A16Rik (NM_028943.1,952-970).
cgggtcaaatgggcatttt

SEQ ID NO: 737349 - DNA, 19 bp, Mus musculus
  siRNA target sequence for 4933405A16Rik (NM_028943.1,979-997).
gaaataaacgggatggtat

SEQ ID NO: 737350 - DNA, 19 bp, Mus musculus
  siRNA target sequence for 4933405A16Rik (NM_028943.1,1054-1072).
cgcagattcttcttcatca

SEQ ID NO: 737351 - DNA, 19 bp, Mus musculus
  siRNA target sequence for 4933405A16Rik (NM_028943.1,1087-1105).
ctgtatcgctgtataacta

SEQ ID NO: 737352 - DNA, 19 bp, Mus musculus
  siRNA target sequence for 4933405A16Rik (NM_028943.1,1189-1207).
cggattctccggctgattt

SEQ ID NO: 737353 - DNA, 19 bp, Mus musculus
  siRNA target sequence for 4933405A16Rik (NM_028943.1,1191-1209).
gattctccggctgatttct

SEQ ID NO: 737354 - DNA, 19 bp, Mus musculus
  siRNA target sequence for 4933405A16Rik (NM_028943.1,1276-1294).
gtcgtgctcacacttactt

SEQ ID NO: 737355 - DNA, 19 bp, Mus musculus
  siRNA target sequence for 4933405A16Rik (NM_028943.1,1386-1404).
cgtagcgcatgaacactat

SEQ ID NO: 737356 - DNA, 19 bp, Mus musculus
  siRNA target sequence for 4933405A16Rik (NM_028943.1,1387-1405).
gtagcgcatgaacactata

SEQ ID NO: 737357 - DNA, 19 bp, Mus musculus
  siRNA target sequence for 4933405A16Rik (NM_028943.1,1408-1426).
gtggacgtcatcattgctt

SEQ ID NO: 737358 - DNA, 19 bp, Mus musculus
  siRNA target sequence for 4933405A16Rik (NM_028943.1,1413-1431).
cgtcatcattgcttactat

SEQ ID NO: 737359 - DNA, 19 bp, Mus musculus
  siRNA target sequence for 4933405A16Rik (NM_028943.1,1414-1432).
gtcatcattgcttactata

SEQ ID NO: 737360 - DNA, 19 bp, Mus musculus
  siRNA target sequence for 4933405A16Rik (NM_028943.1,1419-1437).
cattgcttactatatcaca

SEQ ID NO: 737361 - DNA, 19 bp, Mus musculus
  siRNA target sequence for 4933405A16Rik (NM_028943.1,1459-1477).
cattccatggccaacgaaa

SEQ ID NO: 737362 - DNA, 19 bp, Mus musculus
  siRNA target sequence for 4933405A16Rik (NM_028943.1,1468-1486).
gccaacgaaaagaacttga

SEQ ID NO: 737363 - DNA, 19 bp, Mus musculus
  siRNA target sequence for 4933405A16Rik (NM_028943.1,1469-1487).
ccaacgaaaagaacttgaa

SEQ ID NO: 737364 - DNA, 19 bp, Mus musculus
  siRNA target sequence for 4933405A16Rik (NM_028943.1,1523-1541).
ggtggttccccatcttcta

SEQ ID NO: 737365 - DNA, 19 bp, Mus musculus
  siRNA target sequence for 4933405A16Rik (NM_028943.1,1526-1544).
ggttccccatcttctactt

SEQ ID NO: 737366 - DNA, 19 bp, Mus musculus
  siRNA target sequence for 4933405A16Rik (NM_028943.1,1527-1545).
gttccccatcttctacttt

SEQ ID NO: 737367 - DNA, 19 bp, Mus musculus
  siRNA target sequence for 4933405A16Rik (NM_028943.1,1554-1572).
gaatgtgcaaggctcaatt

SEQ ID NO: 737368 - DNA, 19 bp, Mus musculus
  siRNA target sequence for 4933405A16Rik (NM_028943.1,1620-1638).
gtcatcgtgcagaaagtat

SEQ ID NO: 737369 - DNA, 19 bp, Mus musculus
  siRNA target sequence for 4933405A16Rik (NM_028943.1,1650-1668).
gaagatcggggaggataat

SEQ ID NO: 737370 - DNA, 19 bp, Mus musculus
  siRNA target sequence for 4933417E01Rik (NM_028954.1,478-496).
ggacctggaactatctgaa

SEQ ID NO: 737371 - DNA, 19 bp, Mus musculus
  siRNA target sequence for 4933417E01Rik (NM_028954.1,481-499).
cctggaactatctgaaagt

SEQ ID NO: 737372 - DNA, 19 bp, Mus musculus
  siRNA target sequence for 4933417E01Rik (NM_028954.1,701-719).
ccatgttgctgctgataga

SEQ ID NO: 737373 - DNA, 19 bp, Mus musculus
  siRNA target sequence for 4933435A13Rik (NM_028956.1,127-145).
ccaagatgcatcttaagat

SEQ ID NO: 737374 - DNA, 19 bp, Mus musculus
  siRNA target sequence for 4933435A13Rik (NM_028956.1,128-146).
caagatgcatcttaagatt

SEQ ID NO: 737375 - DNA, 19 bp, Mus musculus
  siRNA target sequence for 4933435A13Rik (NM_028956.1,185-203).
ccaaggagttgctcaatga

SEQ ID NO: 737376 - DNA, 19 bp, Mus musculus
  siRNA target sequence for 4933435A13Rik (NM_028956.1,196-214).
ctcaatgagctacaaaaat

SEQ ID NO: 737377 - DNA, 19 bp, Mus musculus
  siRNA target sequence for 4933435A13Rik (NM_028956.1,251-269).
ctccaaacccaccattgaa

SEQ ID NO: 737378 - DNA, 19 bp, Mus musculus
  siRNA target sequence for 4933435A13Rik (NM_028956.1,286-304).
gaagatgggattgataatt

SEQ ID NO: 737379 - DNA, 19 bp, Mus musculus
  siRNA target sequence for 4933435A13Rik (NM_028956.1,289-307).
gatgggattgataatttga

SEQ ID NO: 737380 - DNA, 19 bp, Mus musculus
  siRNA target sequence for 4933435A13Rik (NM_028956.1,418-436).
gagaaggggtttattacga

SEQ ID NO: 737381 - DNA, 19 bp, Mus musculus
  siRNA target sequence for 4933435A13Rik (NM_028956.1,476-494).
ccagcgtggttttatctgt

SEQ ID NO: 737382 - DNA, 19 bp, Mus musculus
  siRNA target sequence for 4933435A13Rik (NM_028956.1,530-548).
ctgcatggttgctggtaaa

SEQ ID NO: 737383 - DNA, 19 bp, Mus musculus
  siRNA target sequence for 4933435A13Rik (NM_028956.1,611-629).
cctacaagtggataactca

SEQ ID NO: 737384 - DNA, 19 bp, Mus musculus
  siRNA target sequence for 4933435A13Rik (NM_028956.1,653-671).
gcgttcccactgatggaaa

SEQ ID NO: 737385 - DNA, 19 bp, Mus musculus
  siRNA target sequence for 4933435A13Rik (NM_028956.1,726-744).
ccatttcctaggtgaagtt

SEQ ID NO: 737386 - DNA, 19 bp, Mus musculus
  siRNA target sequence for 4933435A13Rik (NM_028956.1,742-760).
gtttgccgagattgtttca

SEQ ID NO: 737387 - DNA, 19 bp, Mus musculus
  siRNA target sequence for 4933435A13Rik (NM_028956.1,925-943).
gtcgctggcagatataata

SEQ ID NO: 737388 - DNA, 19 bp, Mus musculus
  siRNA target sequence for 4933435A13Rik (NM_028956.1,927-945).
cgctggcagatataataaa

SEQ ID NO: 737389 - DNA, 19 bp, Mus musculus
  siRNA target sequence for 4933435A13Rik (NM_028956.1,961-979).
ccacaaactccttggataa

SEQ ID NO: 737390 - DNA, 19 bp, Mus musculus
  siRNA target sequence for 4933435A13Rik (NM_028956.1,962-980).
cacaaactccttggataat

SEQ ID NO: 737391 - DNA, 19 bp, Mus musculus
  siRNA target sequence for 4933435A13Rik (NM_028956.1,1030-1048).
catcttctggcagtattca

SEQ ID NO: 737392 - DNA, 19 bp, Mus musculus
  siRNA target sequence for 4933435A13Rik (NM_028956.1,1087-1105).
gacgtagacgtgagaacat

SEQ ID NO: 737393 - DNA, 19 bp, Mus musculus
  siRNA target sequence for 4933435A13Rik (NM_028956.1,1089-1107).
cgtagacgtgagaacatta

SEQ ID NO: 737394 - DNA, 19 bp, Mus musculus
  siRNA target sequence for 4933435A13Rik (NM_028956.1,1118-1136).
ggccctttgcagttgaact

SEQ ID NO: 737395 - DNA, 19 bp, Mus musculus
  siRNA target sequence for 4933435A13Rik (NM_028956.1,1144-1162).
cctcatcgagtgcatttca

SEQ ID NO: 737396 - DNA, 19 bp, Mus musculus
  siRNA target sequence for 4933435A13Rik (NM_028956.1,1155-1173).
gcatttcacctcacaagaa

SEQ ID NO: 737397 - DNA, 19 bp, Mus musculus
  siRNA target sequence for 4933435A13Rik (NM_028956.1,1183-1201).
ctccagcagacaattaata

SEQ ID NO: 737398 - DNA, 19 bp, Mus musculus
  siRNA target sequence for 4933435A13Rik (NM_028956.1,1249-1267).
gaggcaatagggcatatga

SEQ ID NO: 737399 - DNA, 19 bp, Mus musculus
  siRNA target sequence for 4933435A13Rik (NM_028956.1,1305-1323).
cttgatatggacgaataga

SEQ ID NO: 737400 - DNA, 19 bp, Mus musculus
  siRNA target sequence for 4933435A13Rik (NM_028956.1,1346-1364).
ggttcctggacgacttaaa

SEQ ID NO: 737401 - DNA, 19 bp, Mus musculus
  siRNA target sequence for 4933435A13Rik (NM_028956.1,1354-1372).
gacgacttaaaggacttaa

SEQ ID NO: 737402 - DNA, 19 bp, Mus musculus
  siRNA target sequence for 4933435A13Rik (NM_028956.1,1432-1450).
cgggccattcactctatga

SEQ ID NO: 737403 - DNA, 19 bp, Mus musculus
  siRNA target sequence for 4933435A13Rik (NM_028956.1,1433-1451).
gggccattcactctatgaa

SEQ ID NO: 737404 - DNA, 19 bp, Mus musculus
  siRNA target sequence for 4933435A13Rik (NM_028956.1,1502-1520).
ctggaacctacattaaaga

SEQ ID NO: 737405 - DNA, 19 bp, Mus musculus
  siRNA target sequence for 4933435A13Rik (NM_028956.1,1575-1593).
cgtgactgcagacattctt

SEQ ID NO: 737406 - DNA, 19 bp, Mus musculus
  siRNA target sequence for 4933435A13Rik (NM_028956.1,1599-1617).
ggatgtggagtctgtagat

SEQ ID NO: 737407 - DNA, 19 bp, Mus musculus
  siRNA target sequence for Taf7l (NM_028958.2,109-127).
gagtgtaaggcttgaatgt

SEQ ID NO: 737408 - DNA, 19 bp, Mus musculus
  siRNA target sequence for Taf7l (NM_028958.2,133-151).
cgttgaggaacagtttata

SEQ ID NO: 737409 - DNA, 19 bp, Mus musculus
  siRNA target sequence for Taf7l (NM_028958.2,134-152).
gttgaggaacagtttatat

SEQ ID NO: 737410 - DNA, 19 bp, Mus musculus
  siRNA target sequence for Taf7l (NM_028958.2,212-230).
gcttggaaggataaactaa

SEQ ID NO: 737411 - DNA, 19 bp, Mus musculus
  siRNA target sequence for Taf7l (NM_028958.2,216-234).
ggaaggataaactaaaaat

SEQ ID NO: 737412 - DNA, 19 bp, Mus musculus
  siRNA target sequence for Taf7l (NM_028958.2,252-270).
gccaccatgcggttgttca

SEQ ID NO: 737413 - DNA, 19 bp, Mus musculus
  siRNA target sequence for Taf7l (NM_028958.2,253-271).
ccaccatgcggttgttcaa

SEQ ID NO: 737414 - DNA, 19 bp, Mus musculus
  siRNA target sequence for Taf7l (NM_028958.2,256-274).
ccatgcggttgttcaagta

SEQ ID NO: 737415 - DNA, 19 bp, Mus musculus
  siRNA target sequence for Taf7l (NM_028958.2,261-279).
cggttgttcaagtagacaa

SEQ ID NO: 737416 - DNA, 19 bp, Mus musculus
  siRNA target sequence for Taf7l (NM_028958.2,289-307).
gcctgctaaactggttaat

SEQ ID NO: 737417 - DNA, 19 bp, Mus musculus
  siRNA target sequence for Taf7l (NM_028958.2,291-309).
ctgctaaactggttaatct

SEQ ID NO: 737418 - DNA, 19 bp, Mus musculus
  siRNA target sequence for Taf7l (NM_028958.2,301-319).
ggttaatctgccttgtgtt

SEQ ID NO: 737419 - DNA, 19 bp, Mus musculus
  siRNA target sequence for Taf7l (NM_028958.2,336-354).
ctattgacagaaagacatt

SEQ ID NO: 737420 - DNA, 19 bp, Mus musculus
  siRNA target sequence for Taf7l (NM_028958.2,438-456).
ctactggtcctactgtaat

SEQ ID NO: 737421 - DNA, 19 bp, Mus musculus
  siRNA target sequence for Taf7l (NM_028958.2,444-462).
gtcctactgtaattggaat

SEQ ID NO: 737422 - DNA, 19 bp, Mus musculus
  siRNA target sequence for Taf7l (NM_028958.2,450-468).
ctgtaattggaattagtga

SEQ ID NO: 737423 - DNA, 19 bp, Mus musculus
  siRNA target sequence for Taf7l (NM_028958.2,496-514).
ctggaagcatggcattact

SEQ ID NO: 737424 - DNA, 19 bp, Mus musculus
  siRNA target sequence for Taf7l (NM_028958.2,507-525).
gcattactccaccacttaa

SEQ ID NO: 737425 - DNA, 19 bp, Mus musculus
  siRNA target sequence for Taf7l (NM_028958.2,515-533).
ccaccacttaagaatgtca

SEQ ID NO: 737426 - DNA, 19 bp, Mus musculus
  siRNA target sequence for Taf7l (NM_028958.2,565-583).
gctcccagatgtgaaacaa

SEQ ID NO: 737427 - DNA, 19 bp, Mus musculus
  siRNA target sequence for Taf7l (NM_028958.2,698-716).
gatgatgatgctaaggaaa

SEQ ID NO: 737428 - DNA, 19 bp, Mus musculus
  siRNA target sequence for Taf7l (NM_028958.2,760-778).
gatgggtggtgctagttta

SEQ ID NO: 737429 - DNA, 19 bp, Mus musculus
  siRNA target sequence for Taf7l (NM_028958.2,765-783).
gtggtgctagtttatcaga

SEQ ID NO: 737430 - DNA, 19 bp, Mus musculus
  siRNA target sequence for Taf7l (NM_028958.2,771-789).
ctagtttatcagactatga

SEQ ID NO: 737431 - DNA, 19 bp, Mus musculus
  siRNA target sequence for Taf7l (NM_028958.2,774-792).
gtttatcagactatgatgt

SEQ ID NO: 737432 - DNA, 19 bp, Mus musculus
  siRNA target sequence for Taf7l (NM_028958.2,998-1016).
caagattacagttcaataa

SEQ ID NO: 737433 - DNA, 19 bp, Mus musculus
  siRNA target sequence for Taf7l (NM_028958.2,1011-1029).
caataaccatggcaattca

SEQ ID NO: 737434 - DNA, 19 bp, Mus musculus
  siRNA target sequence for Taf7l (NM_028958.2,1021-1039).
ggcaattcagaaactgatt

SEQ ID NO: 737435 - DNA, 19 bp, Mus musculus
  siRNA target sequence for Taf7l (NM_028958.2,1054-1072).
gaggctccagatgatttat

SEQ ID NO: 737436 - DNA, 19 bp, Mus musculus
  siRNA target sequence for Taf7l (NM_028958.2,1156-1174).
gcttaacataatggaaaaa

SEQ ID NO: 737437 - DNA, 19 bp, Mus musculus
  siRNA target sequence for 4933427D14Rik (NM_028963.1,248-266).
cttctacatgtgttcatct

SEQ ID NO: 737438 - DNA, 19 bp, Mus musculus
  siRNA target sequence for 4933427D14Rik (NM_028963.1,327-345).
gctgcaatttaataggaat

SEQ ID NO: 737439 - DNA, 19 bp, Mus musculus
  siRNA target sequence for 4933427D14Rik (NM_028963.1,383-401).
cttgcccacatggaattaa

SEQ ID NO: 737440 - DNA, 19 bp, Mus musculus
  siRNA target sequence for 4933427D14Rik (NM_028963.1,386-404).
gcccacatggaattaaaat

SEQ ID NO: 737441 - DNA, 19 bp, Mus musculus
  siRNA target sequence for 4933427D14Rik (NM_028963.1,418-436).
cactcatacaatgaattga

SEQ ID NO: 737442 - DNA, 19 bp, Mus musculus
  siRNA target sequence for 4933427D14Rik (NM_028963.1,422-440).
catacaatgaattgaatca

SEQ ID NO: 737443 - DNA, 19 bp, Mus musculus
  siRNA target sequence for 4933427D14Rik (NM_028963.1,487-505).
gtctcattttctgtcatat

SEQ ID NO: 737444 - DNA, 19 bp, Mus musculus
  siRNA target sequence for 4933427D14Rik (NM_028963.1,535-553).
ctagccaagagagatgtaa

SEQ ID NO: 737445 - DNA, 19 bp, Mus musculus
  siRNA target sequence for 4933427D14Rik (NM_028963.1,540-558).
caagagagatgtaaaacga

SEQ ID NO: 737446 - DNA, 19 bp, Mus musculus
  siRNA target sequence for 4933427D14Rik (NM_028963.1,600-618).
gccccatagctctcacaaa

SEQ ID NO: 737447 - DNA, 19 bp, Mus musculus
  siRNA target sequence for 4933427D14Rik (NM_028963.1,679-697).
caccagccgtccagagtaa

SEQ ID NO: 737448 - DNA, 19 bp, Mus musculus
  siRNA target sequence for 4933427D14Rik (NM_028963.1,713-731).
gcgctaaggtgtatgtgta

SEQ ID NO: 737449 - DNA, 19 bp, Mus musculus
  siRNA target sequence for 4933427D14Rik (NM_028963.1,741-759).
gccaggacgagctgatctt

SEQ ID NO: 737450 - DNA, 19 bp, Mus musculus
  siRNA target sequence for 4933427D14Rik (NM_028963.1,746-764).
gacgagctgatcttactgt

SEQ ID NO: 737451 - DNA, 19 bp, Mus musculus
  siRNA target sequence for 4933427D14Rik (NM_028963.1,754-772).
gatcttactgtgccaaatt

SEQ ID NO: 737452 - DNA, 19 bp, Mus musculus
  siRNA target sequence for 4933427D14Rik (NM_028963.1,887-905).
gttgtatccgtaagataga

SEQ ID NO: 737453 - DNA, 19 bp, Mus musculus
  siRNA target sequence for 4933427D14Rik (NM_028963.1,900-918).
gatagaagcactaacgaaa

SEQ ID NO: 737454 - DNA, 19 bp, Mus musculus
  siRNA target sequence for 4933427D14Rik (NM_028963.1,907-925).
gcactaacgaaaaaagata

SEQ ID NO: 737455 - DNA, 19 bp, Mus musculus
  siRNA target sequence for 4933427D14Rik (NM_028963.1,1004-1022).
gcatgctctacgttcttca

SEQ ID NO: 737456 - DNA, 19 bp, Mus musculus
  siRNA target sequence for 4933427D14Rik (NM_028963.1,1062-1080).
gagtccacaaaaaattaaa

SEQ ID NO: 737457 - DNA, 19 bp, Mus musculus
  siRNA target sequence for 4933427D14Rik (NM_028963.1,1141-1159).
gccttgcaagtgtttgtca

SEQ ID NO: 737458 - DNA, 19 bp, Mus musculus
  siRNA target sequence for 4933427D14Rik (NM_028963.1,1150-1168).
gtgtttgtcactcagttta

SEQ ID NO: 737459 - DNA, 19 bp, Mus musculus
  siRNA target sequence for 4933427D14Rik (NM_028963.1,1152-1170).
gtttgtcactcagtttact

SEQ ID NO: 737460 - DNA, 19 bp, Mus musculus
  siRNA target sequence for 4933427D14Rik (NM_028963.1,1209-1227).
gctgggcagccttattcgt

SEQ ID NO: 737461 - DNA, 19 bp, Mus musculus
  siRNA target sequence for 4933427D14Rik (NM_028963.1,1387-1405).
cctgttggtagccaaaaga

SEQ ID NO: 737462 - DNA, 19 bp, Mus musculus
  siRNA target sequence for 4933427D14Rik (NM_028963.1,1390-1408).
gttggtagccaaaagatct

SEQ ID NO: 737463 - DNA, 19 bp, Mus musculus
  siRNA target sequence for 4933427D14Rik (NM_028963.1,1394-1412).
gtagccaaaagatcttaga

SEQ ID NO: 737464 - DNA, 19 bp, Mus musculus
  siRNA target sequence for 4933427D14Rik (NM_028963.1,1424-1442).
ctgtactgcccaaaagtga

SEQ ID NO: 737465 - DNA, 19 bp, Mus musculus
  siRNA target sequence for 4933427D14Rik (NM_028963.1,1509-1527).
gcttcttgcagctatgtgt

SEQ ID NO: 737466 - DNA, 19 bp, Mus musculus
  siRNA target sequence for 4933427D14Rik (NM_028963.1,1572-1590).
gctggatgcacatcttctt

SEQ ID NO: 737467 - DNA, 19 bp, Mus musculus
  siRNA target sequence for 4933427D14Rik (NM_028963.1,1606-1624).
cgtatagaggacaatggta

SEQ ID NO: 737468 - DNA, 19 bp, Mus musculus
  siRNA target sequence for 4933427D14Rik (NM_028963.1,1695-1713).
catgccgattaggaagaaa

SEQ ID NO: 737469 - DNA, 19 bp, Mus musculus
  siRNA target sequence for 4933427D14Rik (NM_028963.1,1811-1829).
cagtgtcatccagattaaa

SEQ ID NO: 737470 - DNA, 19 bp, Mus musculus
  siRNA target sequence for 4933427D14Rik (NM_028963.1,1833-1851).
gaaccgacagcctatgaaa

SEQ ID NO: 737471 - DNA, 19 bp, Mus musculus
  siRNA target sequence for 4933427D14Rik (NM_028963.1,1854-1872).
ccatagggctccttggata

SEQ ID NO: 737472 - DNA, 19 bp, Mus musculus
  siRNA target sequence for 4933427D14Rik (NM_028963.1,2044-2062).
gatgctgagtcttccaaaa

SEQ ID NO: 737473 - DNA, 19 bp, Mus musculus
  siRNA target sequence for 4933427D14Rik (NM_028963.1,2195-2213).
gacttcaaaaattaagtgt

SEQ ID NO: 737474 - DNA, 19 bp, Mus musculus
  siRNA target sequence for 4933427D14Rik (NM_028963.1,2261-2279).
ggttgaagcccctcttgat

SEQ ID NO: 737475 - DNA, 19 bp, Mus musculus
  siRNA target sequence for 4933427D14Rik (NM_028963.1,2303-2321).
cggtggaagcaaatagtca

SEQ ID NO: 737476 - DNA, 19 bp, Mus musculus
  siRNA target sequence for 4933427D14Rik (NM_028963.1,2305-2323).
gtggaagcaaatagtcatt

SEQ ID NO: 737477 - DNA, 19 bp, Mus musculus
  siRNA target sequence for 4933427D14Rik (NM_028963.1,2376-2394).
ggcttcagatgtacgtttt

SEQ ID NO: 737478 - DNA, 19 bp, Mus musculus
  siRNA target sequence for 4933427D14Rik (NM_028963.1,2419-2437).
cgtgactgtttggaagata

SEQ ID NO: 737479 - DNA, 19 bp, Mus musculus
  siRNA target sequence for 4933427D14Rik (NM_028963.1,2456-2474).
ctaggactcaggataagat

SEQ ID NO: 737480 - DNA, 19 bp, Mus musculus
  siRNA target sequence for 4933427D14Rik (NM_028963.1,2459-2477).
ggactcaggataagatctt

SEQ ID NO: 737481 - DNA, 19 bp, Mus musculus
  siRNA target sequence for 4933427D14Rik (NM_028963.1,2572-2590).
gagacagttcgccaaagat

SEQ ID NO: 737482 - DNA, 19 bp, Mus musculus
  siRNA target sequence for 4933427D14Rik (NM_028963.1,2574-2592).
gacagttcgccaaagatat

SEQ ID NO: 737483 - DNA, 19 bp, Mus musculus
  siRNA target sequence for 4933427D14Rik (NM_028963.1,2576-2594).
cagttcgccaaagatataa

SEQ ID NO: 737484 - DNA, 19 bp, Mus musculus
  siRNA target sequence for 4933427D14Rik (NM_028963.1,2581-2599).
cgccaaagatataataaaa

SEQ ID NO: 737485 - DNA, 19 bp, Mus musculus
  siRNA target sequence for 4933427D14Rik (NM_028963.1,2608-2626).
gctgaccctcacttatgga

SEQ ID NO: 737486 - DNA, 19 bp, Mus musculus
  siRNA target sequence for 4933427D14Rik (NM_028963.1,2609-2627).
ctgaccctcacttatggat

SEQ ID NO: 737487 - DNA, 19 bp, Mus musculus
  siRNA target sequence for 4933427D14Rik (NM_028963.1,2702-2720).
ccaagacagcaactcaaaa

SEQ ID NO: 737488 - DNA, 19 bp, Mus musculus
  siRNA target sequence for 4933427D14Rik (NM_028963.1,2723-2741).
gccctgctgtgaacatctt

SEQ ID NO: 737489 - DNA, 19 bp, Mus musculus
  siRNA target sequence for 4933427D14Rik (NM_028963.1,2761-2779).
gccaactcactggatgaaa

SEQ ID NO: 737490 - DNA, 19 bp, Mus musculus
  siRNA target sequence for 4933427D14Rik (NM_028963.1,2763-2781).
caactcactggatgaaagt

SEQ ID NO: 737491 - DNA, 19 bp, Mus musculus
  siRNA target sequence for 4933427D14Rik (NM_028963.1,2770-2788).
ctggatgaaagtgtaacaa

SEQ ID NO: 737492 - DNA, 19 bp, Mus musculus
  siRNA target sequence for 4933427D14Rik (NM_028963.1,2772-2790).
ggatgaaagtgtaacaaca

SEQ ID NO: 737493 - DNA, 19 bp, Mus musculus
  siRNA target sequence for 4933427D14Rik (NM_028963.1,2895-2913).
cagcattggtgcttactgt

SEQ ID NO: 737494 - DNA, 19 bp, Mus musculus
  siRNA target sequence for 4933427D14Rik (NM_028963.1,2912-2930).
gtagccggtttgagcaatt

SEQ ID NO: 737495 - DNA, 19 bp, Mus musculus
  siRNA target sequence for 4933427D14Rik (NM_028963.1,2915-2933).
gccggtttgagcaattcct

SEQ ID NO: 737496 - DNA, 19 bp, Mus musculus
  siRNA target sequence for 4933427D14Rik (NM_028963.1,2916-2934).
ccggtttgagcaattccta

SEQ ID NO: 737497 - DNA, 19 bp, Mus musculus
  siRNA target sequence for 4933427D14Rik (NM_028963.1,2925-2943).
gcaattcctacggatcata

SEQ ID NO: 737498 - DNA, 19 bp, Mus musculus
  siRNA target sequence for 4933427D14Rik (NM_028963.1,2975-2993).
ggctaatagctgaaagctt

SEQ ID NO: 737499 - DNA, 19 bp, Mus musculus
  siRNA target sequence for 4933438K12Rik (NM_028968.1,899-917).
gatctccaagcctgattat

SEQ ID NO: 737500 - DNA, 19 bp, Mus musculus
  siRNA target sequence for Gorasp1 (NM_028976.1,141-159).
ccctacttcgacttcatca

SEQ ID NO: 737501 - DNA, 19 bp, Mus musculus
  siRNA target sequence for Gorasp1 (NM_028976.1,142-160).
cctacttcgacttcatcat

SEQ ID NO: 737502 - DNA, 19 bp, Mus musculus
  siRNA target sequence for Gorasp1 (NM_028976.1,169-187).
ggcactcgaggctgaacaa

SEQ ID NO: 737503 - DNA, 19 bp, Mus musculus
  siRNA target sequence for Gorasp1 (NM_028976.1,235-253).
cggtgaagctggaggtatt

SEQ ID NO: 737504 - DNA, 19 bp, Mus musculus
  siRNA target sequence for Gorasp1 (NM_028976.1,288-306).
gtggtgcccagcaacatgt

SEQ ID NO: 737505 - DNA, 19 bp, Mus musculus
  siRNA target sequence for Gorasp1 (NM_028976.1,427-445).
gcccttacacagactacat

SEQ ID NO: 737506 - DNA, 19 bp, Mus musculus
  siRNA target sequence for Gorasp1 (NM_028976.1,428-446).
cccttacacagactacata

SEQ ID NO: 737507 - DNA, 19 bp, Mus musculus
  siRNA target sequence for Gorasp1 (NM_028976.1,430-448).
cttacacagactacatagt

SEQ ID NO: 737508 - DNA, 19 bp, Mus musculus
  siRNA target sequence for Gorasp1 (NM_028976.1,473-491).
gtcagaagacttctttact

SEQ ID NO: 737509 - DNA, 19 bp, Mus musculus
  siRNA target sequence for Gorasp1 (NM_028976.1,519-537).
ctgaagctgatggtgtata

SEQ ID NO: 737510 - DNA, 19 bp, Mus musculus
  siRNA target sequence for Gorasp1 (NM_028976.1,606-624).
ctggggtgtggtattggtt

SEQ ID NO: 737511 - DNA, 19 bp, Mus musculus
  siRNA target sequence for Gorasp1 (NM_028976.1,705-723).
gctacgacctcacaactta

SEQ ID NO: 737512 - DNA, 19 bp, Mus musculus
  siRNA target sequence for Gorasp1 (NM_028976.1,793-811).
ccaggcagagtgacttcat

SEQ ID NO: 737513 - DNA, 19 bp, Mus musculus
  siRNA target sequence for Gorasp1 (NM_028976.1,1135-1153).
cagggtcagagtttgagat

SEQ ID NO: 737514 - DNA, 19 bp, Mus musculus
  siRNA target sequence for 8430415E04Rik (NM_028980.1,216-234).
gatctcagtgatattgaca

SEQ ID NO: 737515 - DNA, 19 bp, Mus musculus
  siRNA target sequence for 8430415E04Rik (NM_028980.1,284-302).
gattgcaaaccttccattt

SEQ ID NO: 737516 - DNA, 19 bp, Mus musculus
  siRNA target sequence for 8430415E04Rik (NM_028980.1,420-438).
cttcaggaagaatcaatgt

SEQ ID NO: 737517 - DNA, 19 bp, Mus musculus
  siRNA target sequence for 8430415E04Rik (NM_028980.1,531-549).
cttctctccgcagtagaat

SEQ ID NO: 737518 - DNA, 19 bp, Mus musculus
  siRNA target sequence for 8430415E04Rik (NM_028980.1,534-552).
ctctccgcagtagaattat

SEQ ID NO: 737519 - DNA, 19 bp, Mus musculus
  siRNA target sequence for 8430415E04Rik (NM_028980.1,578-596).
gattctcaatccacttgtt

SEQ ID NO: 737520 - DNA, 19 bp, Mus musculus
  siRNA target sequence for 8430415E04Rik (NM_028980.1,619-637).
ccgtccagtcgcgtttagt

SEQ ID NO: 737521 - DNA, 19 bp, Mus musculus
  siRNA target sequence for 8430415E04Rik (NM_028980.1,620-638).
cgtccagtcgcgtttagtt

SEQ ID NO: 737522 - DNA, 19 bp, Mus musculus
  siRNA target sequence for 8430415E04Rik (NM_028980.1,621-639).
gtccagtcgcgtttagtta

SEQ ID NO: 737523 - DNA, 19 bp, Mus musculus
  siRNA target sequence for 8430415E04Rik (NM_028980.1,629-647).
gcgtttagttagctgtaaa

SEQ ID NO: 737524 - DNA, 19 bp, Mus musculus
  siRNA target sequence for 8430415E04Rik (NM_028980.1,630-648).
cgtttagttagctgtaaaa

SEQ ID NO: 737525 - DNA, 19 bp, Mus musculus
  siRNA target sequence for 8430415E04Rik (NM_028980.1,631-649).
gtttagttagctgtaaaat

SEQ ID NO: 737526 - DNA, 19 bp, Mus musculus
  siRNA target sequence for 8430415E04Rik (NM_028980.1,754-772).
gtatgtgtcgccagttaga

SEQ ID NO: 737527 - DNA, 19 bp, Mus musculus
  siRNA target sequence for 8430415E04Rik (NM_028980.1,792-810).
ggggcagaactgacaaaga

SEQ ID NO: 737528 - DNA, 19 bp, Mus musculus
  siRNA target sequence for 8430415E04Rik (NM_028980.1,793-811).
gggcagaactgacaaagaa

SEQ ID NO: 737529 - DNA, 19 bp, Mus musculus
  siRNA target sequence for 8430415E04Rik (NM_028980.1,794-812).
ggcagaactgacaaagaat

SEQ ID NO: 737530 - DNA, 19 bp, Mus musculus
  siRNA target sequence for 8430415E04Rik (NM_028980.1,813-831).
gtggtgcttcccgaactaa

SEQ ID NO: 737531 - DNA, 19 bp, Mus musculus
  siRNA target sequence for 8430415E04Rik (NM_028980.1,818-836).
gcttcccgaactaatagaa

SEQ ID NO: 737532 - DNA, 19 bp, Mus musculus
  siRNA target sequence for 8430415E04Rik (NM_028980.1,873-891).
gcttttgaaaccttggtta

SEQ ID NO: 737533 - DNA, 19 bp, Mus musculus
  siRNA target sequence for 8430415E04Rik (NM_028980.1,920-938).
cagaagtcaaactatactt

SEQ ID NO: 737534 - DNA, 19 bp, Mus musculus
  siRNA target sequence for 8430415E04Rik (NM_028980.1,936-954).
cttcccttagtgaaatcgt

SEQ ID NO: 737535 - DNA, 19 bp, Mus musculus
  siRNA target sequence for 8430415E04Rik (NM_028980.1,952-970).
cgttctgtgaaaagtcttt

SEQ ID NO: 737536 - DNA, 19 bp, Mus musculus
  siRNA target sequence for 8430415E04Rik (NM_028980.1,971-989).
caaagcagatgaatccatt

SEQ ID NO: 737537 - DNA, 19 bp, Mus musculus
  siRNA target sequence for 8430415E04Rik (NM_028980.1,1019-1037).
gctatgccatggactctat

SEQ ID NO: 737538 - DNA, 19 bp, Mus musculus
  siRNA target sequence for 8430415E04Rik (NM_028980.1,1053-1071).
gatcagcacttgagatttt

SEQ ID NO: 737539 - DNA, 19 bp, Mus musculus
  siRNA target sequence for 8430415E04Rik (NM_028980.1,1100-1118).
gggtttgcaacaagaaaat

SEQ ID NO: 737540 - DNA, 19 bp, Mus musculus
  siRNA target sequence for 8430415E04Rik (NM_028980.1,1136-1154).
gattccatcccaaatcgta

SEQ ID NO: 737541 - DNA, 19 bp, Mus musculus
  siRNA target sequence for 8430415E04Rik (NM_028980.1,1199-1217).
caactttccggccatgatt

SEQ ID NO: 737542 - DNA, 19 bp, Mus musculus
  siRNA target sequence for 8430415E04Rik (NM_028980.1,1242-1260).
cacatggaactctactcta

SEQ ID NO: 737543 - DNA, 19 bp, Mus musculus
  siRNA target sequence for 8430415E04Rik (NM_028980.1,1248-1266).
gaactctactctacattct

SEQ ID NO: 737544 - DNA, 19 bp, Mus musculus
  siRNA target sequence for 8430415E04Rik (NM_028980.1,1251-1269).
ctctactctacattcttct

SEQ ID NO: 737545 - DNA, 19 bp, Mus musculus
  siRNA target sequence for 8430415E04Rik (NM_028980.1,1298-1316).
cagacacactattgctatt

SEQ ID NO: 737546 - DNA, 19 bp, Mus musculus
  siRNA target sequence for 8430415E04Rik (NM_028980.1,1302-1320).
cacactattgctatttgct

SEQ ID NO: 737547 - DNA, 19 bp, Mus musculus
  siRNA target sequence for 8430415E04Rik (NM_028980.1,1318-1336).
gcttttatgaagtatctaa

SEQ ID NO: 737548 - DNA, 19 bp, Mus musculus
  siRNA target sequence for 8430415E04Rik (NM_028980.1,1341-1359).
ctgaattctggagtacatt

SEQ ID NO: 737549 - DNA, 19 bp, Mus musculus
  siRNA target sequence for 8430415E04Rik (NM_028980.1,1348-1366).
ctggagtacatttaattca

SEQ ID NO: 737550 - DNA, 19 bp, Mus musculus
  siRNA target sequence for 8430415E04Rik (NM_028980.1,1350-1368).
ggagtacatttaattcaca

SEQ ID NO: 737551 - DNA, 19 bp, Mus musculus
  siRNA target sequence for 8430415E04Rik (NM_028980.1,1351-1369).
gagtacatttaattcacaa

SEQ ID NO: 737552 - DNA, 19 bp, Mus musculus
  siRNA target sequence for 8430415E04Rik (NM_028980.1,1373-1391).
gctgataacattgttacaa

SEQ ID NO: 737553 - DNA, 19 bp, Mus musculus
  siRNA target sequence for 8430415E04Rik (NM_028980.1,1376-1394).
gataacattgttacaagat

SEQ ID NO: 737554 - DNA, 19 bp, Mus musculus
  siRNA target sequence for 8430415E04Rik (NM_028980.1,1437-1455).
gaaatcttggaacttatgt

SEQ ID NO: 737555 - DNA, 19 bp, Mus musculus
  siRNA target sequence for 8430415E04Rik (NM_028980.1,1496-1514).
ctcagtgccagacttgatt

SEQ ID NO: 737556 - DNA, 19 bp, Mus musculus
  siRNA target sequence for 8430415E04Rik (NM_028980.1,1595-1613).
ctgtctgcctcatatcata

SEQ ID NO: 737557 - DNA, 19 bp, Mus musculus
  siRNA target sequence for 8430415E04Rik (NM_028980.1,1599-1617).
ctgcctcatatcatatcga

SEQ ID NO: 737558 - DNA, 19 bp, Mus musculus
  siRNA target sequence for 8430415E04Rik (NM_028980.1,1615-1633).
cgagtgaccagatttatta

SEQ ID NO: 737559 - DNA, 19 bp, Mus musculus
  siRNA target sequence for 8430415E04Rik (NM_028980.1,1635-1653).
cgtttcttacaaagaatgt

SEQ ID NO: 737560 - DNA, 19 bp, Mus musculus
  siRNA target sequence for 8430415E04Rik (NM_028980.1,1699-1717).
ctgcacgaactctatgcat

SEQ ID NO: 737561 - DNA, 19 bp, Mus musculus
  siRNA target sequence for 8430415E04Rik (NM_028980.1,1701-1719).
gcacgaactctatgcattt

SEQ ID NO: 737562 - DNA, 19 bp, Mus musculus
  siRNA target sequence for 8430415E04Rik (NM_028980.1,1702-1720).
cacgaactctatgcatttt

SEQ ID NO: 737563 - DNA, 19 bp, Mus musculus
  siRNA target sequence for 8430415E04Rik (NM_028980.1,1714-1732).
gcatttttctacgatataa

SEQ ID NO: 737564 - DNA, 19 bp, Mus musculus
  siRNA target sequence for 8430415E04Rik (NM_028980.1,1715-1733).
catttttctacgatataat

SEQ ID NO: 737565 - DNA, 19 bp, Mus musculus
  siRNA target sequence for 8430415E04Rik (NM_028980.1,1726-1744).
gatataatcgtaaacaaga

SEQ ID NO: 737566 - DNA, 19 bp, Mus musculus
  siRNA target sequence for 8430415E04Rik (NM_028980.1,1748-1766).
gaggcatgaagtcattcaa

SEQ ID NO: 737567 - DNA, 19 bp, Mus musculus
  siRNA target sequence for 8430415E04Rik (NM_028980.1,1750-1768).
ggcatgaagtcattcaaaa

SEQ ID NO: 737568 - DNA, 19 bp, Mus musculus
  siRNA target sequence for 8430415E04Rik (NM_028980.1,1755-1773).
gaagtcattcaaaaactaa

SEQ ID NO: 737569 - DNA, 19 bp, Mus musculus
  siRNA target sequence for 8430415E04Rik (NM_028980.1,1784-1802).
gggccaaggaaaaagttat

SEQ ID NO: 737570 - DNA, 19 bp, Mus musculus
  siRNA target sequence for 8430415E04Rik (NM_028980.1,1785-1803).
ggccaaggaaaaagttatt

SEQ ID NO: 737571 - DNA, 19 bp, Mus musculus
  siRNA target sequence for 8430415E04Rik (NM_028980.1,1845-1863).
gagatattttccagatcat

SEQ ID NO: 737572 - DNA, 19 bp, Mus musculus
  siRNA target sequence for 8430415E04Rik (NM_028980.1,1884-1902).
ctacctgttattgaactaa

SEQ ID NO: 737573 - DNA, 19 bp, Mus musculus
  siRNA target sequence for 8430415E04Rik (NM_028980.1,1958-1976).
gaagtctgcgctgaagatt

SEQ ID NO: 737574 - DNA, 19 bp, Mus musculus
  siRNA target sequence for 8430415E04Rik (NM_028980.1,1995-2013).
ctccagcagctagaaatgt

SEQ ID NO: 737575 - DNA, 19 bp, Mus musculus
  siRNA target sequence for 8430415E04Rik (NM_028980.1,2049-2067).
gacgtcctggctattgtga

SEQ ID NO: 737576 - DNA, 19 bp, Mus musculus
  siRNA target sequence for 8430415E04Rik (NM_028980.1,2054-2072).
cctggctattgtgaagaaa

SEQ ID NO: 737577 - DNA, 19 bp, Mus musculus
  siRNA target sequence for 8430415E04Rik (NM_028980.1,2097-2115).
gagatgtctatggatatgt

SEQ ID NO: 737578 - DNA, 19 bp, Mus musculus
  siRNA target sequence for 8430415E04Rik (NM_028980.1,2357-2375).
caagaaatccaaattgact

SEQ ID NO: 737579 - DNA, 19 bp, Mus musculus
  siRNA target sequence for 8430415E04Rik (NM_028980.1,2372-2390).
gactcgaagccaatctttt

SEQ ID NO: 737580 - DNA, 19 bp, Mus musculus
  siRNA target sequence for 8430415E04Rik (NM_028980.1,2374-2392).
ctcgaagccaatcttttaa

SEQ ID NO: 737581 - DNA, 19 bp, Mus musculus
  siRNA target sequence for 8430415E04Rik (NM_028980.1,2376-2394).
cgaagccaatcttttaata

SEQ ID NO: 737582 - DNA, 19 bp, Mus musculus
  siRNA target sequence for 8430415E04Rik (NM_028980.1,2380-2398).
gccaatcttttaataatca

SEQ ID NO: 737583 - DNA, 19 bp, Mus musculus
  siRNA target sequence for 8430415E04Rik (NM_028980.1,2503-2521).
cactaactgatgactcatt

SEQ ID NO: 737584 - DNA, 19 bp, Mus musculus
  siRNA target sequence for 8430415E04Rik (NM_028980.1,2516-2534).
ctcattccgaactcgaaat

SEQ ID NO: 737585 - DNA, 19 bp, Mus musculus
  siRNA target sequence for 8430415E04Rik (NM_028980.1,2599-2617).
gtaacacagccgatccaaa

SEQ ID NO: 737586 - DNA, 19 bp, Mus musculus
  siRNA target sequence for 8430415E04Rik (NM_028980.1,2645-2663).
ccggaaggctaccttaaaa

SEQ ID NO: 737587 - DNA, 19 bp, Mus musculus
  siRNA target sequence for 8430415E04Rik (NM_028980.1,2646-2664).
cggaaggctaccttaaaat

SEQ ID NO: 737588 - DNA, 19 bp, Mus musculus
  siRNA target sequence for 8430406I07Rik (NM_028984.2,132-150).
ctgcttagcaggttaaaca

SEQ ID NO: 737589 - DNA, 19 bp, Mus musculus
  siRNA target sequence for 8430406I07Rik (NM_028984.2,135-153).
cttagcaggttaaacagat

SEQ ID NO: 737590 - DNA, 19 bp, Mus musculus
  siRNA target sequence for 8430406I07Rik (NM_028984.2,177-195).
gtgagtttctccactttct

SEQ ID NO: 737591 - DNA, 19 bp, Mus musculus
  siRNA target sequence for 8430406I07Rik (NM_028984.2,237-255).
gtagaccaagcgaagtact

SEQ ID NO: 737592 - DNA, 19 bp, Mus musculus
  siRNA target sequence for 8430406I07Rik (NM_028984.2,247-265).
cgaagtactctcgtttagt

SEQ ID NO: 737593 - DNA, 19 bp, Mus musculus
  siRNA target sequence for 8430406I07Rik (NM_028984.2,248-266).
gaagtactctcgtttagta

SEQ ID NO: 737594 - DNA, 19 bp, Mus musculus
  siRNA target sequence for 8430406I07Rik (NM_028984.2,298-316).
ctccagagtcgttgttcaa

SEQ ID NO: 737595 - DNA, 19 bp, Mus musculus
  siRNA target sequence for 8430406I07Rik (NM_028984.2,336-354).
ggaccagtgagtaagcata

SEQ ID NO: 737596 - DNA, 19 bp, Mus musculus
  siRNA target sequence for 8430406I07Rik (NM_028984.2,397-415).
gctttcctatcttcaatga

SEQ ID NO: 737597 - DNA, 19 bp, Mus musculus
  siRNA target sequence for 8430406I07Rik (NM_028984.2,398-416).
ctttcctatcttcaatgaa

SEQ ID NO: 737598 - DNA, 19 bp, Mus musculus
  siRNA target sequence for 8430406I07Rik (NM_028984.2,585-603).
gacgggtttgcagaatata

SEQ ID NO: 737599 - DNA, 19 bp, Mus musculus
  siRNA target sequence for 8430406I07Rik (NM_028984.2,587-605).
cgggtttgcagaatatact

SEQ ID NO: 737600 - DNA, 19 bp, Mus musculus
  siRNA target sequence for 8430406I07Rik (NM_028984.2,699-717).
cagtgtggctacatcgaaa

SEQ ID NO: 737601 - DNA, 19 bp, Mus musculus
  siRNA target sequence for 8430406I07Rik (NM_028984.2,703-721).
gtggctacatcgaaagcat

SEQ ID NO: 737602 - DNA, 19 bp, Mus musculus
  siRNA target sequence for 8430406I07Rik (NM_028984.2,713-731).
cgaaagcatccagcatatt

SEQ ID NO: 737603 - DNA, 19 bp, Mus musculus
  siRNA target sequence for 8430406I07Rik (NM_028984.2,774-792).
cagcatgaggccttgaagt

SEQ ID NO: 737604 - DNA, 19 bp, Mus musculus
  siRNA target sequence for 8430406I07Rik (NM_028984.2,776-794).
gcatgaggccttgaagtat

SEQ ID NO: 737605 - DNA, 19 bp, Mus musculus
  siRNA target sequence for 8430406I07Rik (NM_028984.2,867-885).
ccaaaacctttaattcgaa

SEQ ID NO: 737606 - DNA, 19 bp, Mus musculus
  siRNA target sequence for 8430406I07Rik (NM_028984.2,868-886).
caaaacctttaattcgaaa

SEQ ID NO: 737607 - DNA, 19 bp, Mus musculus
  siRNA target sequence for 8430406I07Rik (NM_028984.2,920-938).
catgggtgccgtaaaccat

SEQ ID NO: 737608 - DNA, 19 bp, Mus musculus
  siRNA target sequence for 8430406I07Rik (NM_028984.2,936-954).
catgatgcccactacagtt

SEQ ID NO: 737609 - DNA, 19 bp, Mus musculus
  siRNA target sequence for 8430406I07Rik (NM_028984.2,957-975).
caggttcagtgtggattaa

SEQ ID NO: 737610 - DNA, 19 bp, Mus musculus
  siRNA target sequence for 8430406I07Rik (NM_028984.2,1003-1021).
ctgcgcaccctcacttcat

SEQ ID NO: 737611 - DNA, 19 bp, Mus musculus
  siRNA target sequence for 8430406I07Rik (NM_028984.2,1055-1073).
gtggcttctccgactagaa

SEQ ID NO: 737612 - DNA, 19 bp, Mus musculus
  siRNA target sequence for 8430406I07Rik (NM_028984.2,1058-1076).
gcttctccgactagaagaa

SEQ ID NO: 737613 - DNA, 19 bp, Mus musculus
  siRNA target sequence for 8430406I07Rik (NM_028984.2,1059-1077).
cttctccgactagaagaat

SEQ ID NO: 737614 - DNA, 19 bp, Mus musculus
  siRNA target sequence for 8430406I07Rik (NM_028984.2,1062-1080).
ctccgactagaagaatata

SEQ ID NO: 737615 - DNA, 19 bp, Mus musculus
  siRNA target sequence for 8430406I07Rik (NM_028984.2,1064-1082).
ccgactagaagaatataca

SEQ ID NO: 737616 - DNA, 19 bp, Mus musculus
  siRNA target sequence for 8430437G11Rik (NM_028990.2,363-381).
cagatcactgcgatactgt

SEQ ID NO: 737617 - DNA, 19 bp, Mus musculus
  siRNA target sequence for 8430437G11Rik (NM_028990.2,372-390).
gcgatactgtgttagtcat

SEQ ID NO: 737618 - DNA, 19 bp, Mus musculus
  siRNA target sequence for 8430437G11Rik (NM_028990.2,373-391).
cgatactgtgttagtcatt

SEQ ID NO: 737619 - DNA, 19 bp, Mus musculus
  siRNA target sequence for 8430437G11Rik (NM_028990.2,408-426).
gactaggctggaagaagta

SEQ ID NO: 737620 - DNA, 19 bp, Mus musculus
  siRNA target sequence for 8430437G11Rik (NM_028990.2,456-474).
gcggtacctcggctatcta

SEQ ID NO: 737621 - DNA, 19 bp, Mus musculus
  siRNA target sequence for 8430437G11Rik (NM_028990.2,533-551).
cagcaaattccttaatttt

SEQ ID NO: 737622 - DNA, 19 bp, Mus musculus
  siRNA target sequence for 8430437G11Rik (NM_028990.2,564-582).
cctcggcctctttgttctt

SEQ ID NO: 737623 - DNA, 19 bp, Mus musculus
  siRNA target sequence for 8430437G11Rik (NM_028990.2,583-601).
gggatcgccagcatactct

SEQ ID NO: 737624 - DNA, 19 bp, Mus musculus
  siRNA target sequence for 8430437G11Rik (NM_028990.2,588-606).
cgccagcatactctactat

SEQ ID NO: 737625 - DNA, 19 bp, Mus musculus
  siRNA target sequence for 8430437G11Rik (NM_028990.2,589-607).
gccagcatactctactatt

SEQ ID NO: 737626 - DNA, 19 bp, Mus musculus
  siRNA target sequence for 8430437G11Rik (NM_028990.2,590-608).
ccagcatactctactatta

SEQ ID NO: 737627 - DNA, 19 bp, Mus musculus
  siRNA target sequence for 8430437G11Rik (NM_028990.2,594-612).
catactctactattacttt

SEQ ID NO: 737628 - DNA, 19 bp, Mus musculus
  siRNA target sequence for 8430437G11Rik (NM_028990.2,598-616).
ctctactattacttttcaa

SEQ ID NO: 737629 - DNA, 19 bp, Mus musculus
  siRNA target sequence for 8430437G11Rik (NM_028990.2,682-700).
cttgataattcatccttta

SEQ ID NO: 737630 - DNA, 19 bp, Mus musculus
  siRNA target sequence for 8430437G11Rik (NM_028990.2,735-753).
gcttctgacatctatagtt

SEQ ID NO: 737631 - DNA, 19 bp, Mus musculus
  siRNA target sequence for 8430437G11Rik (NM_028990.2,743-761).
catctatagttttaaggat

SEQ ID NO: 737632 - DNA, 19 bp, Mus musculus
  siRNA target sequence for 8430437G11Rik (NM_028990.2,777-795).
ggagagaatttctggatat

SEQ ID NO: 737633 - DNA, 19 bp, Mus musculus
  siRNA target sequence for 8430437G11Rik (NM_028990.2,798-816).
ccgccatcggcctacttta

SEQ ID NO: 737634 - DNA, 19 bp, Mus musculus
  siRNA target sequence for 8430437G11Rik (NM_028990.2,800-818).
gccatcggcctactttact

SEQ ID NO: 737635 - DNA, 19 bp, Mus musculus
  siRNA target sequence for 8430437G11Rik (NM_028990.2,801-819).
ccatcggcctactttacta

SEQ ID NO: 737636 - DNA, 19 bp, Mus musculus
  siRNA target sequence for 8430437G11Rik (NM_028990.2,802-820).
catcggcctactttactaa

SEQ ID NO: 737637 - DNA, 19 bp, Mus musculus
  siRNA target sequence for 8430437G11Rik (NM_028990.2,853-871).
gccatcgccagcacaacta

SEQ ID NO: 737638 - DNA, 19 bp, Mus musculus
  siRNA target sequence for 8430437G11Rik (NM_028990.2,913-931).
gctttggccatgctcatta

SEQ ID NO: 737639 - DNA, 19 bp, Mus musculus
  siRNA target sequence for 8430437G11Rik (NM_028990.2,948-966).
gtcttttctagctattcca

SEQ ID NO: 737640 - DNA, 19 bp, Mus musculus
  siRNA target sequence for 8430437G11Rik (NM_028990.2,958-976).
gctattccaaacttaatca

SEQ ID NO: 737641 - DNA, 19 bp, Mus musculus
  siRNA target sequence for 8430437G11Rik (NM_028990.2,959-977).
ctattccaaacttaatcat

SEQ ID NO: 737642 - DNA, 19 bp, Mus musculus
  siRNA target sequence for 8430437G11Rik (NM_028990.2,1056-1074).
ggtaactgatccttttctt

SEQ ID NO: 737643 - DNA, 19 bp, Mus musculus
  siRNA target sequence for 8430437G11Rik (NM_028990.2,1123-1141).
ctgcatcgtgggagaattt

SEQ ID NO: 737644 - DNA, 19 bp, Mus musculus
  siRNA target sequence for 8430437G11Rik (NM_028990.2,1126-1144).
catcgtgggagaatttgca

SEQ ID NO: 737645 - DNA, 19 bp, Mus musculus
  siRNA target sequence for 8430437G11Rik (NM_028990.2,1168-1186).
gcaatgattgagcttacat

SEQ ID NO: 737646 - DNA, 19 bp, Mus musculus
  siRNA target sequence for 8430437G11Rik (NM_028990.2,1169-1187).
caatgattgagcttacatt

SEQ ID NO: 737647 - DNA, 19 bp, Mus musculus
  siRNA target sequence for 8430437G11Rik (NM_028990.2,1194-1212).
cctttcagcatttaaactt

SEQ ID NO: 737648 - DNA, 19 bp, Mus musculus
  siRNA target sequence for 8430437G11Rik (NM_028990.2,1216-1234).
gacactcatctctggtatt

SEQ ID NO: 737649 - DNA, 19 bp, Mus musculus
  siRNA target sequence for 8430437G11Rik (NM_028990.2,1260-1278).
cggatttttctggatgatt

SEQ ID NO: 737650 - DNA, 19 bp, Mus musculus
  siRNA target sequence for 8430437G11Rik (NM_028990.2,1269-1287).
ctggatgatttgccatatt

SEQ ID NO: 737651 - DNA, 19 bp, Mus musculus
  siRNA target sequence for 8430437G11Rik (NM_028990.2,1271-1289).
ggatgatttgccatattat

SEQ ID NO: 737652 - DNA, 19 bp, Mus musculus
  siRNA target sequence for 8430437G11Rik (NM_028990.2,1303-1321).
ctttggggatttcatacta

SEQ ID NO: 737653 - DNA, 19 bp, Mus musculus
  siRNA target sequence for 8430437G11Rik (NM_028990.2,1309-1327).
ggatttcatactaagttga

SEQ ID NO: 737654 - DNA, 19 bp, Mus musculus
  siRNA target sequence for 8430437G11Rik (NM_028990.2,1310-1328).
gatttcatactaagttgaa

SEQ ID NO: 737655 - DNA, 19 bp, Mus musculus
  siRNA target sequence for 8430437G11Rik (NM_028990.2,1315-1333).
catactaagttgaatgact

SEQ ID NO: 737656 - DNA, 19 bp, Mus musculus
  siRNA target sequence for 8430437G11Rik (NM_028990.2,1323-1341).
gttgaatgactgccataaa

SEQ ID NO: 737657 - DNA, 19 bp, Mus musculus
  siRNA target sequence for 8430437G11Rik (NM_028990.2,1334-1352).
gccataaagtgtatatcaa

SEQ ID NO: 737658 - DNA, 19 bp, Mus musculus
  siRNA target sequence for 8430437G11Rik (NM_028990.2,1394-1412).
ccaaagggatgcgtcattt

SEQ ID NO: 737659 - DNA, 19 bp, Mus musculus
  siRNA target sequence for 8430437G11Rik (NM_028990.2,1399-1417).
gggatgcgtcatttttgct

SEQ ID NO: 737660 - DNA, 19 bp, Mus musculus
  siRNA target sequence for 8430437G11Rik (NM_028990.2,1400-1418).
ggatgcgtcatttttgctt

SEQ ID NO: 737661 - DNA, 19 bp, Mus musculus
  siRNA target sequence for 8430437G11Rik (NM_028990.2,1401-1419).
gatgcgtcatttttgctta

SEQ ID NO: 737662 - DNA, 19 bp, Mus musculus
  siRNA target sequence for 8430437G11Rik (NM_028990.2,1404-1422).
gcgtcatttttgcttaatt

SEQ ID NO: 737663 - DNA, 19 bp, Mus musculus
  siRNA target sequence for 8430437G11Rik (NM_028990.2,1424-1442).
cagagcagttagttttttt

SEQ ID NO: 737664 - DNA, 19 bp, Mus musculus
  siRNA target sequence for 8430437G11Rik (NM_028990.2,1447-1465).
cttcttgcaacggcaattt

SEQ ID NO: 737665 - DNA, 19 bp, Mus musculus
  siRNA target sequence for 8430437G11Rik (NM_028990.2,1476-1494).
ctcctggcagccaaccaat

SEQ ID NO: 737666 - DNA, 19 bp, Mus musculus
  siRNA target sequence for 8430437G11Rik (NM_028990.2,1486-1504).
ccaaccaatggaatcttct

SEQ ID NO: 737667 - DNA, 19 bp, Mus musculus
  siRNA target sequence for 8430437G11Rik (NM_028990.2,1503-1521).
cttgagcatgtttctcatt

SEQ ID NO: 737668 - DNA, 19 bp, Mus musculus
  siRNA target sequence for 8430437G11Rik (NM_028990.2,1580-1598).
ggggaacctctgttggata

SEQ ID NO: 737669 - DNA, 19 bp, Mus musculus
  siRNA target sequence for 8430437G11Rik (NM_028990.2,1589-1607).
ctgttggatacgctattgt

SEQ ID NO: 737670 - DNA, 19 bp, Mus musculus
  siRNA target sequence for 8430437G11Rik (NM_028990.2,1591-1609).
gttggatacgctattgtga

SEQ ID NO: 737671 - DNA, 19 bp, Mus musculus
  siRNA target sequence for 8430437G11Rik (NM_028990.2,1699-1717).
ctcaatgccatccaaagat

SEQ ID NO: 737672 - DNA, 19 bp, Mus musculus
  siRNA target sequence for 8430437G11Rik (NM_028990.2,1701-1719).
caatgccatccaaagattt

SEQ ID NO: 737673 - DNA, 19 bp, Mus musculus
  siRNA target sequence for 8430437G11Rik (NM_028990.2,1707-1725).
catccaaagattttttgca

SEQ ID NO: 737674 - DNA, 19 bp, Mus musculus
  siRNA target sequence for 8430437G11Rik (NM_028990.2,1763-1781).
caagtgggctgtcttttga

SEQ ID NO: 737675 - DNA, 19 bp, Mus musculus
  siRNA target sequence for 8430437G11Rik (NM_028990.2,1784-1802).
ctctgcattccaaactgaa

SEQ ID NO: 737676 - DNA, 19 bp, Mus musculus
  siRNA target sequence for 8430437G11Rik (NM_028990.2,1828-1846).
gatggacctagacatgata

SEQ ID NO: 737677 - DNA, 19 bp, Mus musculus
  siRNA target sequence for 8430437G11Rik (NM_028990.2,1831-1849).
ggacctagacatgatacat

SEQ ID NO: 737678 - DNA, 19 bp, Mus musculus
  siRNA target sequence for 8430437G11Rik (NM_028990.2,1832-1850).
gacctagacatgatacata

SEQ ID NO: 737679 - DNA, 19 bp, Mus musculus
  siRNA target sequence for 8430437G11Rik (NM_028990.2,1896-1914).
cctcgcaggtggagacata

SEQ ID NO: 737680 - DNA, 19 bp, Mus musculus
  siRNA target sequence for 8430437G11Rik (NM_028990.2,1899-1917).
cgcaggtggagacatactt

SEQ ID NO: 737681 - DNA, 19 bp, Mus musculus
  siRNA target sequence for 8430437G11Rik (NM_028990.2,1909-1927).
gacatacttcgccttgata

SEQ ID NO: 737682 - DNA, 19 bp, Mus musculus
  siRNA target sequence for 8430437G11Rik (NM_028990.2,1919-1937).
gccttgatacgcttttaga

SEQ ID NO: 737683 - DNA, 19 bp, Mus musculus
  siRNA target sequence for 8430437G11Rik (NM_028990.2,1971-1989).
ccggcttatcatcatctta

SEQ ID NO: 737684 - DNA, 19 bp, Mus musculus
  siRNA target sequence for 8430437G11Rik (NM_028990.2,1973-1991).
ggcttatcatcatcttaga

SEQ ID NO: 737685 - DNA, 19 bp, Mus musculus
  siRNA target sequence for 8430437G11Rik (NM_028990.2,1986-2004).
cttagacagcgagaattca

SEQ ID NO: 737686 - DNA, 19 bp, Mus musculus
  siRNA target sequence for 8430437G11Rik (NM_028990.2,2067-2085).
gctggcgaagacagtagat

SEQ ID NO: 737687 - DNA, 19 bp, Mus musculus
  siRNA target sequence for 8430437G11Rik (NM_028990.2,2068-2086).
ctggcgaagacagtagata

SEQ ID NO: 737688 - DNA, 19 bp, Mus musculus
  siRNA target sequence for 8430437G11Rik (NM_028990.2,2070-2088).
ggcgaagacagtagatatt

SEQ ID NO: 737689 - DNA, 19 bp, Mus musculus
  siRNA target sequence for 8430437G11Rik (NM_028990.2,2072-2090).
cgaagacagtagatattga

SEQ ID NO: 737690 - DNA, 19 bp, Mus musculus
  siRNA target sequence for 8430437G11Rik (NM_028990.2,2109-2127).
gctgggtgactttactaga

SEQ ID NO: 737691 - DNA, 19 bp, Mus musculus
  siRNA target sequence for 8430437G11Rik (NM_028990.2,2123-2141).
ctagagactgggtagaata

SEQ ID NO: 737692 - DNA, 19 bp, Mus musculus
  siRNA target sequence for 8430437G11Rik (NM_028990.2,2126-2144).
gagactgggtagaatacaa

SEQ ID NO: 737693 - DNA, 19 bp, Mus musculus
  siRNA target sequence for 8430437G11Rik (NM_028990.2,2128-2146).
gactgggtagaatacaact

SEQ ID NO: 737694 - DNA, 19 bp, Mus musculus
  siRNA target sequence for 8430437G11Rik (NM_028990.2,2198-2216).
ccgtgtatggcgtgtcaaa

SEQ ID NO: 737695 - DNA, 19 bp, Mus musculus
  siRNA target sequence for 8430437G11Rik (NM_028990.2,2262-2280).
ggccaagcactggatgtta

SEQ ID NO: 737696 - DNA, 19 bp, Mus musculus
  siRNA target sequence for 8430437G11Rik (NM_028990.2,2283-2301).
cttccctcgggttacgtat

SEQ ID NO: 737697 - DNA, 19 bp, Mus musculus
  siRNA target sequence for 8430437G11Rik (NM_028990.2,2313-2331).
cttggccaactggttatgt

SEQ ID NO: 737698 - DNA, 19 bp, Mus musculus
  siRNA target sequence for 8430437G11Rik (NM_028990.2,2420-2438).
caggacaaggctttaaact

SEQ ID NO: 737699 - DNA, 19 bp, Mus musculus
  siRNA target sequence for 9130404D08Rik (NM_028993.2,371-389).
gtttgaagatgttaaattt

SEQ ID NO: 737700 - DNA, 19 bp, Mus musculus
  siRNA target sequence for 9130404D08Rik (NM_028993.2,407-425).
gtcagagctgtattgtcaa

SEQ ID NO: 737701 - DNA, 19 bp, Mus musculus
  siRNA target sequence for 9130404D08Rik (NM_028993.2,431-449).
ctccgtggatgcagcaaaa

SEQ ID NO: 737702 - DNA, 19 bp, Mus musculus
  siRNA target sequence for 9130404D08Rik (NM_028993.2,434-452).
cgtggatgcagcaaaacca

SEQ ID NO: 737703 - DNA, 19 bp, Mus musculus
  siRNA target sequence for 9130404D08Rik (NM_028993.2,609-627).
gaatatacaagggcattat

SEQ ID NO: 737704 - DNA, 19 bp, Mus musculus
  siRNA target sequence for 9130404D08Rik (NM_028993.2,700-718).
gtgggcagattgtagagaa

SEQ ID NO: 737705 - DNA, 19 bp, Mus musculus
  siRNA target sequence for 9130404D08Rik (NM_028993.2,851-869).
gaccatctccacactacat

SEQ ID NO: 737706 - DNA, 19 bp, Mus musculus
  siRNA target sequence for 9130404D08Rik (NM_028993.2,859-877).
ccacactacatgatgatga

SEQ ID NO: 737707 - DNA, 19 bp, Mus musculus
  siRNA target sequence for 9130404D08Rik (NM_028993.2,860-878).
cacactacatgatgatgaa

SEQ ID NO: 737708 - DNA, 19 bp, Mus musculus
  siRNA target sequence for 9130404D08Rik (NM_028993.2,862-880).
cactacatgatgatgaaat

SEQ ID NO: 737709 - DNA, 19 bp, Mus musculus
  siRNA target sequence for 9130404D08Rik (NM_028993.2,948-966).
ctggtcacagtgatgcatt

SEQ ID NO: 737710 - DNA, 19 bp, Mus musculus
  siRNA target sequence for 9130404D08Rik (NM_028993.2,1083-1101).
ctgctggagcatatcatca

SEQ ID NO: 737711 - DNA, 19 bp, Mus musculus
  siRNA target sequence for 9130404D08Rik (NM_028993.2,1240-1258).
ccgtgaactgcatggataa

SEQ ID NO: 737712 - DNA, 19 bp, Mus musculus
  siRNA target sequence for 9130404D08Rik (NM_028993.2,1241-1259).
cgtgaactgcatggataat

SEQ ID NO: 737713 - DNA, 19 bp, Mus musculus
  siRNA target sequence for 9130404D08Rik (NM_028993.2,1260-1278).
gctgaagcccaatttacca

SEQ ID NO: 737714 - DNA, 19 bp, Mus musculus
  siRNA target sequence for 9130404D08Rik (NM_028993.2,1328-1346).
caaccttgcgagtgtgtat

SEQ ID NO: 737715 - DNA, 19 bp, Mus musculus
  siRNA target sequence for 9130404D08Rik (NM_028993.2,1331-1349).
ccttgcgagtgtgtatata

SEQ ID NO: 737716 - DNA, 19 bp, Mus musculus
  siRNA target sequence for 9130404D08Rik (NM_028993.2,1493-1511).
cgaagccaagcggtttctt

SEQ ID NO: 737717 - DNA, 19 bp, Mus musculus
  siRNA target sequence for 9130404D08Rik (NM_028993.2,1502-1520).
gcggtttcttcgagaaact

SEQ ID NO: 737718 - DNA, 19 bp, Mus musculus
  siRNA target sequence for 9130404D08Rik (NM_028993.2,1504-1522).
ggtttcttcgagaaactct

SEQ ID NO: 737719 - DNA, 19 bp, Mus musculus
  siRNA target sequence for 9130404D08Rik (NM_028993.2,1575-1593).
ctgctgggtcacatcttct

SEQ ID NO: 737720 - DNA, 19 bp, Mus musculus
  siRNA target sequence for 9130404D08Rik (NM_028993.2,1577-1595).
gctgggtcacatcttctat

SEQ ID NO: 737721 - DNA, 19 bp, Mus musculus
  siRNA target sequence for 9130404D08Rik (NM_028993.2,1608-1626).
cacagggagagtaacaaca

SEQ ID NO: 737722 - DNA, 19 bp, Mus musculus
  siRNA target sequence for 9130002C22Rik (NM_029000.2,967-985).
gaacatggcaccgaaataa

SEQ ID NO: 737723 - DNA, 19 bp, Mus musculus
  siRNA target sequence for 9130002C22Rik (NM_029000.2,974-992).
gcaccgaaataaaaacgat

SEQ ID NO: 737724 - DNA, 19 bp, Mus musculus
  siRNA target sequence for 9130002C22Rik (NM_029000.2,1075-1093).
ggcgaaggatggggattta

SEQ ID NO: 737725 - DNA, 19 bp, Mus musculus
  siRNA target sequence for 9130002C22Rik (NM_029000.2,1077-1095).
cgaaggatggggatttagt

SEQ ID NO: 737726 - DNA, 19 bp, Mus musculus
  siRNA target sequence for 9130002C22Rik (NM_029000.2,1555-1573).
gaaacagcatcattcagta

SEQ ID NO: 737727 - DNA, 19 bp, Mus musculus
  siRNA target sequence for 9130002C22Rik (NM_029000.2,1589-1607).
ctcaaaccaaggtacaact

SEQ ID NO: 737728 - DNA, 19 bp, Mus musculus
  siRNA target sequence for 9130002C22Rik (NM_029000.2,1591-1609).
caaaccaaggtacaactat

SEQ ID NO: 737729 - DNA, 19 bp, Mus musculus
  siRNA target sequence for 9130002C22Rik (NM_029000.2,1595-1613).
ccaaggtacaactatctgt

SEQ ID NO: 737730 - DNA, 19 bp, Mus musculus
  siRNA target sequence for 9130002C22Rik (NM_029000.2,1596-1614).
caaggtacaactatctgta

SEQ ID NO: 737731 - DNA, 19 bp, Mus musculus
  siRNA target sequence for 9130002C22Rik (NM_029000.2,1664-1682).
ctggccttgtagttagcaa

SEQ ID NO: 737732 - DNA, 19 bp, Mus musculus
  siRNA target sequence for 9130002C22Rik (NM_029000.2,1668-1686).
ccttgtagttagcaatcaa

SEQ ID NO: 737733 - DNA, 19 bp, Mus musculus
  siRNA target sequence for 9130002C22Rik (NM_029000.2,1669-1687).
cttgtagttagcaatcaaa

SEQ ID NO: 737734 - DNA, 19 bp, Mus musculus
  siRNA target sequence for 9130002C22Rik (NM_029000.2,1924-1942).
gaacaacttacaaagttat

SEQ ID NO: 737735 - DNA, 19 bp, Mus musculus
  siRNA target sequence for 9130002C22Rik (NM_029000.2,2022-2040).
gcagaattttctaataaat

SEQ ID NO: 737736 - DNA, 19 bp, Mus musculus
  siRNA target sequence for 9130002C22Rik (NM_029000.2,2063-2081).
cacccacttataaaactca

SEQ ID NO: 737737 - DNA, 19 bp, Mus musculus
  siRNA target sequence for 9130002C22Rik (NM_029000.2,2149-2167).
gcacactccatcatacagt

SEQ ID NO: 737738 - DNA, 19 bp, Mus musculus
  siRNA target sequence for 9130002C22Rik (NM_029000.2,2157-2175).
catcatacagtggatcaat

SEQ ID NO: 737739 - DNA, 19 bp, Mus musculus
  siRNA target sequence for 9130002C22Rik (NM_029000.2,2169-2187).
gatcaatcagtcagagtat

SEQ ID NO: 737740 - DNA, 19 bp, Mus musculus
  siRNA target sequence for 9130002C22Rik (NM_029000.2,2419-2437).
gcaggctatcagttggtaa

SEQ ID NO: 737741 - DNA, 19 bp, Mus musculus
  siRNA target sequence for 9130002C22Rik (NM_029000.2,2420-2438).
caggctatcagttggtaaa

SEQ ID NO: 737742 - DNA, 19 bp, Mus musculus
  siRNA target sequence for 9130002C22Rik (NM_029000.2,2422-2440).
ggctatcagttggtaaaca

SEQ ID NO: 737743 - DNA, 19 bp, Mus musculus
  siRNA target sequence for 9130002C22Rik (NM_029000.2,2428-2446).
cagttggtaaacagtattt

SEQ ID NO: 737744 - DNA, 19 bp, Mus musculus
  siRNA target sequence for 9130002C22Rik (NM_029000.2,2458-2476).
ctggggtgtgatgagttaa

SEQ ID NO: 737745 - DNA, 19 bp, Mus musculus
  siRNA target sequence for 9130002C22Rik (NM_029000.2,2461-2479).
gggtgtgatgagttaaact

SEQ ID NO: 737746 - DNA, 19 bp, Mus musculus
  siRNA target sequence for 9130002C22Rik (NM_029000.2,2462-2480).
ggtgtgatgagttaaactt

SEQ ID NO: 737747 - DNA, 19 bp, Mus musculus
  siRNA target sequence for 9130002C22Rik (NM_029000.2,2585-2603).
cagttgaaatcacagatat

SEQ ID NO: 737748 - DNA, 19 bp, Mus musculus
  siRNA target sequence for 9130002C22Rik (NM_029000.2,2621-2639).
gacaacgtttggcattaat

SEQ ID NO: 737749 - DNA, 19 bp, Mus musculus
  siRNA target sequence for 9130002C22Rik (NM_029000.2,2623-2641).
caacgtttggcattaatta

SEQ ID NO: 737750 - DNA, 19 bp, Mus musculus
  siRNA target sequence for 9130002C22Rik (NM_029000.2,2631-2649).
ggcattaattaaacaacat

SEQ ID NO: 737751 - DNA, 19 bp, Mus musculus
  siRNA target sequence for 9130002C22Rik (NM_029000.2,2745-2763).
cattgagggggactataaa

SEQ ID NO: 737752 - DNA, 19 bp, Mus musculus
  siRNA target sequence for 9130002C22Rik (NM_029000.2,2765-2783).
ccaccacccattacttaca

SEQ ID NO: 737753 - DNA, 19 bp, Mus musculus
  siRNA target sequence for 9130002C22Rik (NM_029000.2,2766-2784).
caccacccattacttacaa

SEQ ID NO: 737754 - DNA, 19 bp, Mus musculus
  siRNA target sequence for 9130002C22Rik (NM_029000.2,2768-2786).
ccacccattacttacaaat

SEQ ID NO: 737755 - DNA, 19 bp, Mus musculus
  siRNA target sequence for 9130002C22Rik (NM_029000.2,2771-2789).
cccattacttacaaatgga

SEQ ID NO: 737756 - DNA, 19 bp, Mus musculus
  siRNA target sequence for 9130002C22Rik (NM_029000.2,2772-2790).
ccattacttacaaatggat

SEQ ID NO: 737757 - DNA, 19 bp, Mus musculus
  siRNA target sequence for 9130002C22Rik (NM_029000.2,2813-2831).
gtctctgccatggaaagaa

SEQ ID NO: 737758 - DNA, 19 bp, Mus musculus
  siRNA target sequence for 9130002C22Rik (NM_029000.2,2824-2842).
ggaaagaaacagacctata

SEQ ID NO: 737759 - DNA, 19 bp, Mus musculus
  siRNA target sequence for 9130002C22Rik (NM_029000.2,2825-2843).
gaaagaaacagacctataa

SEQ ID NO: 737760 - DNA, 19 bp, Mus musculus
  siRNA target sequence for 9130002C22Rik (NM_029000.2,2862-2880).
catcacaaaaggaatgata

SEQ ID NO: 737761 - DNA, 19 bp, Mus musculus
  siRNA target sequence for 9130002C22Rik (NM_029000.2,2867-2885).
caaaaggaatgatagaaaa

SEQ ID NO: 737762 - DNA, 19 bp, Mus musculus
  siRNA target sequence for 9130002C22Rik (NM_029000.2,2911-2929).
cgtctaggcctagacaatt

SEQ ID NO: 737763 - DNA, 19 bp, Mus musculus
  siRNA target sequence for 9130002C22Rik (NM_029000.2,2912-2930).
gtctaggcctagacaatta

SEQ ID NO: 737764 - DNA, 19 bp, Mus musculus
  siRNA target sequence for 9130002C22Rik (NM_029000.2,2914-2932).
ctaggcctagacaattact

SEQ ID NO: 737765 - DNA, 19 bp, Mus musculus
  siRNA target sequence for 9130002C22Rik (NM_029000.2,2978-2996).
cctctgtgtacaattcaca

SEQ ID NO: 737766 - DNA, 19 bp, Mus musculus
  siRNA target sequence for 9130002C22Rik (NM_029000.2,3015-3033).
gcttccattctatttccta

SEQ ID NO: 737767 - DNA, 19 bp, Mus musculus
  siRNA target sequence for 9130002C22Rik (NM_029000.2,3039-3057).
gctactgatgttggattat

SEQ ID NO: 737768 - DNA, 19 bp, Mus musculus
  siRNA target sequence for 9130002C22Rik (NM_029000.2,3065-3083).
gacatctgatagtcaaaga

SEQ ID NO: 737769 - DNA, 19 bp, Mus musculus
  siRNA target sequence for 9130002C22Rik (NM_029000.2,3072-3090).
gatagtcaaagatgatgaa

SEQ ID NO: 737770 - DNA, 19 bp, Mus musculus
  siRNA target sequence for 9130002C22Rik (NM_029000.2,3116-3134).
gttcctccaatcacgaaaa

SEQ ID NO: 737771 - DNA, 19 bp, Mus musculus
  siRNA target sequence for 9130002C22Rik (NM_029000.2,3120-3138).
ctccaatcacgaaaatgaa

SEQ ID NO: 737772 - DNA, 19 bp, Mus musculus
  siRNA target sequence for 9130002C22Rik (NM_029000.2,3123-3141).
caatcacgaaaatgaagat

SEQ ID NO: 737773 - DNA, 19 bp, Mus musculus
  siRNA target sequence for 9130002C22Rik (NM_029000.2,3149-3167).
catatgacgatgtcattat

SEQ ID NO: 737774 - DNA, 19 bp, Mus musculus
  siRNA target sequence for 9130002C22Rik (NM_029000.2,3156-3174).
cgatgtcattatagacaat

SEQ ID NO: 737775 - DNA, 19 bp, Mus musculus
  siRNA target sequence for 9130002C22Rik (NM_029000.2,3339-3357).
cacttctcagattgaattt

SEQ ID NO: 737776 - DNA, 19 bp, Mus musculus
  siRNA target sequence for 9130002C22Rik (NM_029000.2,3341-3359).
cttctcagattgaatttta

SEQ ID NO: 737777 - DNA, 19 bp, Mus musculus
  siRNA target sequence for 9130002C22Rik (NM_029000.2,3389-3407).
gttggcaagatgcaagtaa

SEQ ID NO: 737778 - DNA, 19 bp, Mus musculus
  siRNA target sequence for 9130002C22Rik (NM_029000.2,3393-3411).
gcaagatgcaagtaaatct

SEQ ID NO: 737779 - DNA, 19 bp, Mus musculus
  siRNA target sequence for 9130002C22Rik (NM_029000.2,3654-3672).
ggacacgtttgaaaattgt

SEQ ID NO: 737780 - DNA, 19 bp, Mus musculus
  siRNA target sequence for 9130002C22Rik (NM_029000.2,3878-3896).
ctggtaaaagaatgagaat

SEQ ID NO: 737781 - DNA, 19 bp, Mus musculus
  siRNA target sequence for 9130002C22Rik (NM_029000.2,3891-3909).
gagaattggcatcaagaat

SEQ ID NO: 737782 - DNA, 19 bp, Mus musculus
  siRNA target sequence for 9130002C22Rik (NM_029000.2,4010-4028).
ctagagagctaggattcat

SEQ ID NO: 737783 - DNA, 19 bp, Mus musculus
  siRNA target sequence for 9130002C22Rik (NM_029000.2,4013-4031).
gagagctaggattcattat

SEQ ID NO: 737784 - DNA, 19 bp, Mus musculus
  siRNA target sequence for 9130002C22Rik (NM_029000.2,4017-4035).
gctaggattcattattgat

SEQ ID NO: 737785 - DNA, 19 bp, Mus musculus
  siRNA target sequence for 9130002C22Rik (NM_029000.2,4093-4111).
ctggaggaatacaagttat

SEQ ID NO: 737786 - DNA, 19 bp, Mus musculus
  siRNA target sequence for 9130002C22Rik (NM_029000.2,4095-4113).
ggaggaatacaagttatct

SEQ ID NO: 737787 - DNA, 19 bp, Mus musculus
  siRNA target sequence for 9130002C22Rik (NM_029000.2,4155-4173).
gcacctttggtgtaagaaa

SEQ ID NO: 737788 - DNA, 19 bp, Mus musculus
  siRNA target sequence for 9130002C22Rik (NM_029000.2,4442-4460).
ggttaaggatacaaacaga

SEQ ID NO: 737789 - DNA, 19 bp, Mus musculus
  siRNA target sequence for 9130002C22Rik (NM_029000.2,4481-4499).
gcaactctgtgcagaatca

SEQ ID NO: 737790 - DNA, 19 bp, Mus musculus
  siRNA target sequence for 9130002C22Rik (NM_029000.2,4519-4537).
gagattcataactgtactt

SEQ ID NO: 737791 - DNA, 19 bp, Mus musculus
  siRNA target sequence for 9130002C22Rik (NM_029000.2,4710-4728).
gtgggtagcagctattttt

SEQ ID NO: 737792 - DNA, 19 bp, Mus musculus
  siRNA target sequence for 9130002C22Rik (NM_029000.2,4712-4730).
gggtagcagctatttttga

SEQ ID NO: 737793 - DNA, 19 bp, Mus musculus
  siRNA target sequence for 9130002C22Rik (NM_029000.2,4714-4732).
gtagcagctatttttgaca

SEQ ID NO: 737794 - DNA, 19 bp, Mus musculus
  siRNA target sequence for 9130002C22Rik (NM_029000.2,4741-4759).
gagaaagttggagacaaaa

SEQ ID NO: 737795 - DNA, 19 bp, Mus musculus
  siRNA target sequence for 9130002C22Rik (NM_029000.2,4799-4817).
ggaagtctaccctactgaa

SEQ ID NO: 737796 - DNA, 19 bp, Mus musculus
  siRNA target sequence for 9130002C22Rik (NM_029000.2,4800-4818).
gaagtctaccctactgaat

SEQ ID NO: 737797 - DNA, 19 bp, Mus musculus
  siRNA target sequence for 9130002C22Rik (NM_029000.2,4958-4976).
gagctccagaactcaacaa

SEQ ID NO: 737798 - DNA, 19 bp, Mus musculus
  siRNA target sequence for 9130002C22Rik (NM_029000.2,5001-5019).
gttggcaacattagtcatt

SEQ ID NO: 737799 - DNA, 19 bp, Mus musculus
  siRNA target sequence for 9130002C22Rik (NM_029000.2,5027-5045).
gaaacttgactctgatcaa

SEQ ID NO: 737800 - DNA, 19 bp, Mus musculus
  siRNA target sequence for 9130002C22Rik (NM_029000.2,5031-5049).
cttgactctgatcaatatt

SEQ ID NO: 737801 - DNA, 19 bp, Mus musculus
  siRNA target sequence for 9130002C22Rik (NM_029000.2,5155-5173).
cagaatgtgggagaagtta

SEQ ID NO: 737802 - DNA, 19 bp, Mus musculus
  siRNA target sequence for AW125753 (NM_029007.2,311-329).
gacccatctgggattgaga

SEQ ID NO: 737803 - DNA, 19 bp, Mus musculus
  siRNA target sequence for AW125753 (NM_029007.2,344-362).
gtcggggttgcctacttct

SEQ ID NO: 737804 - DNA, 19 bp, Mus musculus
  siRNA target sequence for AW125753 (NM_029007.2,347-365).
ggggttgcctacttcttct

SEQ ID NO: 737805 - DNA, 19 bp, Mus musculus
  siRNA target sequence for AW125753 (NM_029007.2,527-545).
caggaatgcatcttttcca

SEQ ID NO: 737806 - DNA, 19 bp, Mus musculus
  siRNA target sequence for AW125753 (NM_029007.2,969-987).
cgcaacagcagtattatct

SEQ ID NO: 737807 - DNA, 19 bp, Mus musculus
  siRNA target sequence for AW125753 (NM_029007.2,971-989).
caacagcagtattatctca

SEQ ID NO: 737808 - DNA, 19 bp, Mus musculus
  siRNA target sequence for 4833409J19Rik (NM_029018.1,92-110).
gcctgagtcaagttgttca

SEQ ID NO: 737809 - DNA, 19 bp, Mus musculus
  siRNA target sequence for 4833409J19Rik (NM_029018.1,126-144).
gagatcccaccggatgatt

SEQ ID NO: 737810 - DNA, 19 bp, Mus musculus
  siRNA target sequence for 4833409J19Rik (NM_029018.1,128-146).
gatcccaccggatgattca

SEQ ID NO: 737811 - DNA, 19 bp, Mus musculus
  siRNA target sequence for 4833409J19Rik (NM_029018.1,131-149).
cccaccggatgattcattt

SEQ ID NO: 737812 - DNA, 19 bp, Mus musculus
  siRNA target sequence for 4833409J19Rik (NM_029018.1,135-153).
ccggatgattcatttcctt

SEQ ID NO: 737813 - DNA, 19 bp, Mus musculus
  siRNA target sequence for 4833409J19Rik (NM_029018.1,136-154).
cggatgattcatttccttt

SEQ ID NO: 737814 - DNA, 19 bp, Mus musculus
  siRNA target sequence for 4833409J19Rik (NM_029018.1,187-205).
gcgtcaccatggagattga

SEQ ID NO: 737815 - DNA, 19 bp, Mus musculus
  siRNA target sequence for 4833409J19Rik (NM_029018.1,197-215).
ggagattgagattatcact

SEQ ID NO: 737816 - DNA, 19 bp, Mus musculus
  siRNA target sequence for 4833409J19Rik (NM_029018.1,256-274).
gtcatcctagtccatcaaa

SEQ ID NO: 737817 - DNA, 19 bp, Mus musculus
  siRNA target sequence for 4833409J19Rik (NM_029018.1,345-363).
gagttgcagcagatcagta

SEQ ID NO: 737818 - DNA, 19 bp, Mus musculus
  siRNA target sequence for 4833409J19Rik (NM_029018.1,347-365).
gttgcagcagatcagtaaa

SEQ ID NO: 737819 - DNA, 19 bp, Mus musculus
  siRNA target sequence for 4833409J19Rik (NM_029018.1,350-368).
gcagcagatcagtaaaaaa

SEQ ID NO: 737820 - DNA, 19 bp, Mus musculus
  siRNA target sequence for 4833409J19Rik (NM_029018.1,420-438).
gaccttcccatcaaatcaa

SEQ ID NO: 737821 - DNA, 19 bp, Mus musculus
  siRNA target sequence for 4833409J19Rik (NM_029018.1,481-499).
caacagatgggattttcca

SEQ ID NO: 737822 - DNA, 19 bp, Mus musculus
  siRNA target sequence for 4833409J19Rik (NM_029018.1,583-601).
ctgttctcatcgtaggatt

SEQ ID NO: 737823 - DNA, 19 bp, Mus musculus
  siRNA target sequence for 4833409J19Rik (NM_029018.1,590-608).
catcgtaggatttgctttt

SEQ ID NO: 737824 - DNA, 19 bp, Mus musculus
  siRNA target sequence for 4833422F24Rik (NM_029021.1,100-118).
ggcttggggtggaagttct

SEQ ID NO: 737825 - DNA, 19 bp, Mus musculus
  siRNA target sequence for 4833422F24Rik (NM_029021.1,191-209).
ccagctgtaacgaactact

SEQ ID NO: 737826 - DNA, 19 bp, Mus musculus
  siRNA target sequence for 4833422F24Rik (NM_029021.1,273-291).
ggtctctttgcagctttat

SEQ ID NO: 737827 - DNA, 19 bp, Mus musculus
  siRNA target sequence for 4833422F24Rik (NM_029021.1,328-346).
ggtctcttcgtcttcctaa

SEQ ID NO: 737828 - DNA, 19 bp, Mus musculus
  siRNA target sequence for 4833422F24Rik (NM_029021.1,363-381).
ccccatccgctgcctattt

SEQ ID NO: 737829 - DNA, 19 bp, Mus musculus
  siRNA target sequence for 4833422F24Rik (NM_029021.1,644-662).
cagccttccgccttcacat

SEQ ID NO: 737830 - DNA, 19 bp, Mus musculus
  siRNA target sequence for 4833422F24Rik (NM_029021.1,811-829).
gacctgcgtttcgacaata

SEQ ID NO: 737831 - DNA, 19 bp, Mus musculus
  siRNA target sequence for 4833422F24Rik (NM_029021.1,814-832).
ctgcgtttcgacaatatct

SEQ ID NO: 737832 - DNA, 19 bp, Mus musculus
  siRNA target sequence for 4833422F24Rik (NM_029021.1,1098-1116).
caaatatgacgcctcatat

SEQ ID NO: 737833 - DNA, 19 bp, Mus musculus
  siRNA target sequence for 4833422F24Rik (NM_029021.1,1215-1233).
gccccacgactgtcatcta

SEQ ID NO: 737834 - DNA, 19 bp, Mus musculus
  siRNA target sequence for 4833422F24Rik (NM_029021.1,1425-1443).
gagtgaccacctgaacaaa

SEQ ID NO: 737835 - DNA, 19 bp, Mus musculus
  siRNA target sequence for 4833422F24Rik (NM_029021.1,1530-1548).
ctcccttgggcctccatat

SEQ ID NO: 737836 - DNA, 19 bp, Mus musculus
  siRNA target sequence for 4833422F24Rik (NM_029021.1,1532-1550).
cccttgggcctccatatga

SEQ ID NO: 737837 - DNA, 19 bp, Mus musculus
  siRNA target sequence for 4930429O20Rik (NM_029025.1,569-587).
ctggggccatcgtttttat

SEQ ID NO: 737838 - DNA, 19 bp, Mus musculus
  siRNA target sequence for 4930429O20Rik (NM_029025.1,588-606).
ccttaggagtctgttatca

SEQ ID NO: 737839 - DNA, 19 bp, Mus musculus
  siRNA target sequence for 4930429O20Rik (NM_029025.1,589-607).
cttaggagtctgttatcaa

SEQ ID NO: 737840 - DNA, 19 bp, Mus musculus
  siRNA target sequence for 4930429O20Rik (NM_029025.1,596-614).
gtctgttatcaataaccta

SEQ ID NO: 737841 - DNA, 19 bp, Mus musculus
  siRNA target sequence for 4930429O20Rik (NM_029025.1,665-683).
ccgtggggagagtcattgt

SEQ ID NO: 737842 - DNA, 19 bp, Mus musculus
  siRNA target sequence for 4930429O20Rik (NM_029025.1,938-956).
ctactaacgacgagctttt

SEQ ID NO: 737843 - DNA, 19 bp, Mus musculus
  siRNA target sequence for 4930429O20Rik (NM_029025.1,968-986).
gagccaattccccctttat

SEQ ID NO: 737844 - DNA, 19 bp, Mus musculus
  siRNA target sequence for 4930429O20Rik (NM_029025.1,1033-1051).
gacgtgcagctgctaaaaa

SEQ ID NO: 737845 - DNA, 19 bp, Mus musculus
  siRNA target sequence for 4930429O20Rik (NM_029025.1,1088-1106).
gggtccttcctccaaagtt

SEQ ID NO: 737846 - DNA, 19 bp, Mus musculus
  siRNA target sequence for 4930429O20Rik (NM_029025.1,1093-1111).
cttcctccaaagttggtaa

SEQ ID NO: 737847 - DNA, 19 bp, Mus musculus
  siRNA target sequence for 4930429O20Rik (NM_029025.1,1097-1115).
ctccaaagttggtaaacct

SEQ ID NO: 737848 - DNA, 19 bp, Mus musculus
  siRNA target sequence for 4930429O20Rik (NM_029025.1,1100-1118).
caaagttggtaaacctaaa

SEQ ID NO: 737849 - DNA, 19 bp, Mus musculus
  siRNA target sequence for 4930429O20Rik (NM_029025.1,1229-1247).
cggccttgggcataggaat

SEQ ID NO: 737850 - DNA, 19 bp, Mus musculus
  siRNA target sequence for 4930435C18Rik (NM_029039.2,585-603).
ccctccgccttcaatagct

SEQ ID NO: 737851 - DNA, 19 bp, Mus musculus
  siRNA target sequence for 4930435C18Rik (NM_029039.2,586-604).
cctccgccttcaatagctt

SEQ ID NO: 737852 - DNA, 19 bp, Mus musculus
  siRNA target sequence for 4930435C18Rik (NM_029039.2,587-605).
ctccgccttcaatagcttt

SEQ ID NO: 737853 - DNA, 19 bp, Mus musculus
  siRNA target sequence for 4930435C18Rik (NM_029039.2,589-607).
ccgccttcaatagctttat

SEQ ID NO: 737854 - DNA, 19 bp, Mus musculus
  siRNA target sequence for 4930435C18Rik (NM_029039.2,592-610).
ccttcaatagctttatcca

SEQ ID NO: 737855 - DNA, 19 bp, Mus musculus
  siRNA target sequence for 4930435C18Rik (NM_029039.2,653-671).
gatccggagccctaacatt

SEQ ID NO: 737856 - DNA, 19 bp, Mus musculus
  siRNA target sequence for 4930435C18Rik (NM_029039.2,662-680).
ccctaacattcgcatcaaa

SEQ ID NO: 737857 - DNA, 19 bp, Mus musculus
  siRNA target sequence for 4930435C18Rik (NM_029039.2,672-690).
cgcatcaaagcagttttca

SEQ ID NO: 737858 - DNA, 19 bp, Mus musculus
  siRNA target sequence for 4930435C18Rik (NM_029039.2,705-723).
gtccgggtggaggatcaaa

SEQ ID NO: 737859 - DNA, 19 bp, Mus musculus
  siRNA target sequence for 4930435C18Rik (NM_029039.2,735-753).
ggcaacgtggctgtcttta

SEQ ID NO: 737860 - DNA, 19 bp, Mus musculus
  siRNA target sequence for 4930435C18Rik (NM_029039.2,769-787).
cttcagtgcaggaatacgt

SEQ ID NO: 737861 - DNA, 19 bp, Mus musculus
  siRNA target sequence for 4930435C18Rik (NM_029039.2,845-863).
ggcatatcgtctgttgttt

SEQ ID NO: 737862 - DNA, 19 bp, Mus musculus
  siRNA target sequence for 4930435C18Rik (NM_029039.2,847-865).
catatcgtctgttgtttga

SEQ ID NO: 737863 - DNA, 19 bp, Mus musculus
  siRNA target sequence for 4930435C18Rik (NM_029039.2,888-906).
cattctccagggtttgaga

SEQ ID NO: 737864 - DNA, 19 bp, Mus musculus
  siRNA target sequence for 4930449E07Rik (NM_029044.1,222-240).
caaaagtaatggatgatga

SEQ ID NO: 737865 - DNA, 19 bp, Mus musculus
  siRNA target sequence for 4930449E07Rik (NM_029044.1,307-325).
gggcatcctcttcaaagat

SEQ ID NO: 737866 - DNA, 19 bp, Mus musculus
  siRNA target sequence for 4930449E07Rik (NM_029044.1,438-456).
gcctgacgaacctcataca

SEQ ID NO: 737867 - DNA, 19 bp, Mus musculus
  siRNA target sequence for 4930449E07Rik (NM_029044.1,458-476).
ctcgtctggctggatttgt

SEQ ID NO: 737868 - DNA, 19 bp, Mus musculus
  siRNA target sequence for 4930449E07Rik (NM_029044.1,465-483).
ggctggatttgtcctttaa

SEQ ID NO: 737869 - DNA, 19 bp, Mus musculus
  siRNA target sequence for 4930449E07Rik (NM_029044.1,559-577).
caaggtggactctctagat

SEQ ID NO: 737870 - DNA, 19 bp, Mus musculus
  siRNA target sequence for 4930449E07Rik (NM_029044.1,617-635).
cagattagcaacatgatga

SEQ ID NO: 737871 - DNA, 19 bp, Mus musculus
  siRNA target sequence for 4930449E07Rik (NM_029044.1,624-642).
gcaacatgatgaatatcat

SEQ ID NO: 737872 - DNA, 19 bp, Mus musculus
  siRNA target sequence for 4930449E07Rik (NM_029044.1,712-730).
gtacaagatgttcatctat

SEQ ID NO: 737873 - DNA, 19 bp, Mus musculus
  siRNA target sequence for 4930449E07Rik (NM_029044.1,937-955).
cctgtttgacagcatgtat

SEQ ID NO: 737874 - DNA, 19 bp, Mus musculus
  siRNA target sequence for 4930449E07Rik (NM_029044.1,938-956).
ctgtttgacagcatgtatt

SEQ ID NO: 737875 - DNA, 19 bp, Mus musculus
  siRNA target sequence for 4930449E07Rik (NM_029044.1,985-1003).
ctacctgcctggtgttaga

SEQ ID NO: 737876 - DNA, 19 bp, Mus musculus
  siRNA target sequence for 4930449E07Rik (NM_029044.1,1091-1109).
gtagagttagacactttca

SEQ ID NO: 737877 - DNA, 19 bp, Mus musculus
  siRNA target sequence for 4930449E07Rik (NM_029044.1,1263-1281).
gcatcggtgagctgttcaa

SEQ ID NO: 737878 - DNA, 19 bp, Mus musculus
  siRNA target sequence for 4930449E07Rik (NM_029044.1,1324-1342).
ggagaccataaacatattt

SEQ ID NO: 737879 - DNA, 19 bp, Mus musculus
  siRNA target sequence for 4930449E07Rik (NM_029044.1,1356-1374).
ctgacttggtgggactatt

SEQ ID NO: 737880 - DNA, 19 bp, Mus musculus
  siRNA target sequence for 4930449E07Rik (NM_029044.1,1358-1376).
gacttggtgggactattta

SEQ ID NO: 737881 - DNA, 19 bp, Mus musculus
  siRNA target sequence for 4930449E07Rik (NM_029044.1,1363-1381).
ggtgggactatttattgaa

SEQ ID NO: 737882 - DNA, 19 bp, Mus musculus
  siRNA target sequence for 4930449E07Rik (NM_029044.1,1442-1460).
ctggagatcgccatcaaca

SEQ ID NO: 737883 - DNA, 19 bp, Mus musculus
  siRNA target sequence for 4930449E07Rik (NM_029044.1,1518-1536).
cgctttttgttgacaaaga

SEQ ID NO: 737884 - DNA, 19 bp, Mus musculus
  siRNA target sequence for 4930449E07Rik (NM_029044.1,1626-1644).
cttggtgtgcacatctagt

SEQ ID NO: 737885 - DNA, 19 bp, Mus musculus
  siRNA target sequence for 4930449E07Rik (NM_029044.1,1632-1650).
gtgcacatctagtagacaa

SEQ ID NO: 737886 - DNA, 19 bp, Mus musculus
  siRNA target sequence for 4930449E07Rik (NM_029044.1,1635-1653).
cacatctagtagacaagat

SEQ ID NO: 737887 - DNA, 19 bp, Mus musculus
  siRNA target sequence for 4930449E07Rik (NM_029044.1,1688-1706).
gtgaaggagatcaatcaat

SEQ ID NO: 737888 - DNA, 19 bp, Mus musculus
  siRNA target sequence for 4930517G15Rik (NM_029061.1,392-410).
catccatcaaccattagta

SEQ ID NO: 737889 - DNA, 19 bp, Mus musculus
  siRNA target sequence for 4930517G15Rik (NM_029061.1,399-417).
caaccattagtatgaaatt

SEQ ID NO: 737890 - DNA, 19 bp, Mus musculus
  siRNA target sequence for 4930517G15Rik (NM_029061.1,418-436).
gacaagtgttccagaatta

SEQ ID NO: 737891 - DNA, 19 bp, Mus musculus
  siRNA target sequence for 4930517G15Rik (NM_029061.1,423-441).
gtgttccagaattacctta

SEQ ID NO: 737892 - DNA, 19 bp, Mus musculus
  siRNA target sequence for 4930517G15Rik (NM_029061.1,425-443).
gttccagaattaccttata

SEQ ID NO: 737893 - DNA, 19 bp, Mus musculus
  siRNA target sequence for 4930517G15Rik (NM_029061.1,462-480).
catcacctaagccaaaaga

SEQ ID NO: 737894 - DNA, 19 bp, Mus musculus
  siRNA target sequence for 4930517G15Rik (NM_029061.1,485-503).
cataatgccaagtcaaagt

SEQ ID NO: 737895 - DNA, 19 bp, Mus musculus
  siRNA target sequence for 4930517G15Rik (NM_029061.1,491-509).
gccaagtcaaagtatggta

SEQ ID NO: 737896 - DNA, 19 bp, Mus musculus
  siRNA target sequence for 4930517G15Rik (NM_029061.1,493-511).
caagtcaaagtatggtaaa

SEQ ID NO: 737897 - DNA, 19 bp, Mus musculus
  siRNA target sequence for 4930517G15Rik (NM_029061.1,496-514).
gtcaaagtatggtaaaaat

SEQ ID NO: 737898 - DNA, 19 bp, Mus musculus
  siRNA target sequence for 4930517G15Rik (NM_029061.1,498-516).
caaagtatggtaaaaatga

SEQ ID NO: 737899 - DNA, 19 bp, Mus musculus
  siRNA target sequence for 4930517G15Rik (NM_029061.1,541-559).
cacaggagagtcaattgta

SEQ ID NO: 737900 - DNA, 19 bp, Mus musculus
  siRNA target sequence for 4930517G15Rik (NM_029061.1,571-589).
gccaataccattgagtaaa

SEQ ID NO: 737901 - DNA, 19 bp, Mus musculus
  siRNA target sequence for 4930517G15Rik (NM_029061.1,572-590).
ccaataccattgagtaaaa

SEQ ID NO: 737902 - DNA, 19 bp, Mus musculus
  siRNA target sequence for 4930517G15Rik (NM_029061.1,585-603).
gtaaaacgaaggacaaaat

SEQ ID NO: 737903 - DNA, 19 bp, Mus musculus
  siRNA target sequence for 4930517G15Rik (NM_029061.1,627-645).
ggattaccacaaatctgaa

SEQ ID NO: 737904 - DNA, 19 bp, Mus musculus
  siRNA target sequence for 4930517G15Rik (NM_029061.1,719-737).
gaagcagaaggcttgtcta

SEQ ID NO: 737905 - DNA, 19 bp, Mus musculus
  siRNA target sequence for 4930517G15Rik (NM_029061.1,769-787).
ctgttcacaatttacatct

SEQ ID NO: 737906 - DNA, 19 bp, Mus musculus
  siRNA target sequence for 4930517G15Rik (NM_029061.1,818-836).
ggcgctttggagtctcttt

SEQ ID NO: 737907 - DNA, 19 bp, Mus musculus
  siRNA target sequence for 4930517G15Rik (NM_029061.1,843-861).
ggtttcagcaacaagtcaa

SEQ ID NO: 737908 - DNA, 19 bp, Mus musculus
  siRNA target sequence for 4930517G15Rik (NM_029061.1,863-881).
caaatggaggagattagca

SEQ ID NO: 737909 - DNA, 19 bp, Mus musculus
  siRNA target sequence for 4930517G15Rik (NM_029061.1,880-898).
caaggaccaaagtaattta

SEQ ID NO: 737910 - DNA, 19 bp, Mus musculus
  siRNA target sequence for 4930517G15Rik (NM_029061.1,891-909).
gtaatttagaagaacttca

SEQ ID NO: 737911 - DNA, 19 bp, Mus musculus
  siRNA target sequence for 4930517G15Rik (NM_029061.1,917-935).
ggtaaaacggccagtttga

SEQ ID NO: 737912 - DNA, 19 bp, Mus musculus
  siRNA target sequence for 4930517G15Rik (NM_029061.1,918-936).
gtaaaacggccagtttgaa

SEQ ID NO: 737913 - DNA, 19 bp, Mus musculus
  siRNA target sequence for 4930517G15Rik (NM_029061.1,924-942).
cggccagtttgaacattgt

SEQ ID NO: 737914 - DNA, 19 bp, Mus musculus
  siRNA target sequence for 4930517G15Rik (NM_029061.1,925-943).
ggccagtttgaacattgta

SEQ ID NO: 737915 - DNA, 19 bp, Mus musculus
  siRNA target sequence for 4930517G15Rik (NM_029061.1,927-945).
ccagtttgaacattgtaca

SEQ ID NO: 737916 - DNA, 19 bp, Mus musculus
  siRNA target sequence for 4930517G15Rik (NM_029061.1,950-968).
gcaaaactggcacgtaaat

SEQ ID NO: 737917 - DNA, 19 bp, Mus musculus
  siRNA target sequence for 4930517G15Rik (NM_029061.1,951-969).
caaaactggcacgtaaatt

SEQ ID NO: 737918 - DNA, 19 bp, Mus musculus
  siRNA target sequence for 4930517G15Rik (NM_029061.1,959-977).
gcacgtaaattcgaagatt

SEQ ID NO: 737919 - DNA, 19 bp, Mus musculus
  siRNA target sequence for 4930517G15Rik (NM_029061.1,960-978).
cacgtaaattcgaagattt

SEQ ID NO: 737920 - DNA, 19 bp, Mus musculus
  siRNA target sequence for 4930517G15Rik (NM_029061.1,1003-1021).
ggaggtcatgcagactaaa

SEQ ID NO: 737921 - DNA, 19 bp, Mus musculus
  siRNA target sequence for 4930517G15Rik (NM_029061.1,1081-1099).
gattgaagagttcataaca

SEQ ID NO: 737922 - DNA, 19 bp, Mus musculus
  siRNA target sequence for 4930517G15Rik (NM_029061.1,1199-1217).
cagtcaactatgttagaga

SEQ ID NO: 737923 - DNA, 19 bp, Mus musculus
  siRNA target sequence for 4930517G15Rik (NM_029061.1,1423-1441).
cgacatgaagatatgttat

SEQ ID NO: 737924 - DNA, 19 bp, Mus musculus
  siRNA target sequence for 4930517G15Rik (NM_029061.1,1426-1444).
catgaagatatgttatctt

SEQ ID NO: 737925 - DNA, 19 bp, Mus musculus
  siRNA target sequence for 4930517G15Rik (NM_029061.1,1457-1475).
cttgtaaaaatgtacctta

SEQ ID NO: 737926 - DNA, 19 bp, Mus musculus
  siRNA target sequence for 4930517G15Rik (NM_029061.1,1471-1489).
ccttaatcacggtttattt

SEQ ID NO: 737927 - DNA, 19 bp, Mus musculus
  siRNA target sequence for 4930517G15Rik (NM_029061.1,1472-1490).
cttaatcacggtttatttt

SEQ ID NO: 737928 - DNA, 19 bp, Mus musculus
  siRNA target sequence for 5830411J07Rik (NM_029082.1,1438-1456).
ggaatcttcaggattttta

SEQ ID NO: 737929 - DNA, 19 bp, Mus musculus
  siRNA target sequence for 5830413E08Rik (NM_029083.1,139-157).
ctagcctctgggatcgttt

SEQ ID NO: 737930 - DNA, 19 bp, Mus musculus
  siRNA target sequence for 5830413E08Rik (NM_029083.1,518-536).
cctgcgcctggcatacagt

SEQ ID NO: 737931 - DNA, 19 bp, Mus musculus
  siRNA target sequence for 5830413E08Rik (NM_029083.1,741-759).
cagtccctgacgctaagta

SEQ ID NO: 737932 - DNA, 19 bp, Mus musculus
  siRNA target sequence for 5830413E08Rik (NM_029083.1,762-780).
ggcttcagagtcatcaaga

SEQ ID NO: 737933 - DNA, 19 bp, Mus musculus
  siRNA target sequence for 5830413E08Rik (NM_029083.1,796-814).
ccgagcagctgctcattga

SEQ ID NO: 737934 - DNA, 19 bp, Mus musculus
  siRNA target sequence for D16Ertd454e (NM_029092.1,306-324).
gtgactgtccgtttcttaa

SEQ ID NO: 737935 - DNA, 19 bp, Mus musculus
  siRNA target sequence for D16Ertd454e (NM_029092.1,314-332).
ccgtttcttaagacctttt

SEQ ID NO: 737936 - DNA, 19 bp, Mus musculus
  siRNA target sequence for D16Ertd454e (NM_029092.1,345-363).
gtgccatatacctttcata

SEQ ID NO: 737937 - DNA, 19 bp, Mus musculus
  siRNA target sequence for D16Ertd454e (NM_029092.1,390-408).
gttctgcagagatacatgt

SEQ ID NO: 737938 - DNA, 19 bp, Mus musculus
  siRNA target sequence for D16Ertd454e (NM_029092.1,420-438).
ccttctttgtcttgtcata

SEQ ID NO: 737939 - DNA, 19 bp, Mus musculus
  siRNA target sequence for D16Ertd454e (NM_029092.1,500-518).
gtcgagcattcaagaagat

SEQ ID NO: 737940 - DNA, 19 bp, Mus musculus
  siRNA target sequence for D16Ertd454e (NM_029092.1,530-548).
ggtctcagacaaagatgaa

SEQ ID NO: 737941 - DNA, 19 bp, Mus musculus
  siRNA target sequence for D16Ertd454e (NM_029092.1,557-575).
cgcctcaaccagagaacta

SEQ ID NO: 737942 - DNA, 19 bp, Mus musculus
  siRNA target sequence for D16Ertd454e (NM_029092.1,558-576).
gcctcaaccagagaactaa

SEQ ID NO: 737943 - DNA, 19 bp, Mus musculus
  siRNA target sequence for D16Ertd454e (NM_029092.1,559-577).
cctcaaccagagaactaat

SEQ ID NO: 737944 - DNA, 19 bp, Mus musculus
  siRNA target sequence for D16Ertd454e (NM_029092.1,560-578).
ctcaaccagagaactaatt

SEQ ID NO: 737945 - DNA, 19 bp, Mus musculus
  siRNA target sequence for D16Ertd454e (NM_029092.1,562-580).
caaccagagaactaattga

SEQ ID NO: 737946 - DNA, 19 bp, Mus musculus
  siRNA target sequence for D16Ertd454e (NM_029092.1,565-583).
ccagagaactaattgagat

SEQ ID NO: 737947 - DNA, 19 bp, Mus musculus
  siRNA target sequence for D16Ertd454e (NM_029092.1,589-607).
gattgcttggcaaagaagt

SEQ ID NO: 737948 - DNA, 19 bp, Mus musculus
  siRNA target sequence for D16Ertd454e (NM_029092.1,701-719).
ggaaaaggcgaaaaaagct

SEQ ID NO: 737949 - DNA, 19 bp, Mus musculus
  siRNA target sequence for D16Ertd454e (NM_029092.1,702-720).
gaaaaggcgaaaaaagcta

SEQ ID NO: 737950 - DNA, 19 bp, Mus musculus
  siRNA target sequence for D16Ertd454e (NM_029092.1,785-803).
gaccaccgcagaagaacaa

SEQ ID NO: 737951 - DNA, 19 bp, Mus musculus
  siRNA target sequence for D16Ertd454e (NM_029092.1,801-819).
caacagcaagacttcatgt

SEQ ID NO: 737952 - DNA, 19 bp, Mus musculus
  siRNA target sequence for D16Ertd454e (NM_029092.1,832-850).
gggatcgacagatcaacat

SEQ ID NO: 737953 - DNA, 19 bp, Mus musculus
  siRNA target sequence for D16Ertd454e (NM_029092.1,833-851).
ggatcgacagatcaacatt

SEQ ID NO: 737954 - DNA, 19 bp, Mus musculus
  siRNA target sequence for D16Ertd454e (NM_029092.1,933-951).
ccaagtgaactgcagaata

SEQ ID NO: 737955 - DNA, 19 bp, Mus musculus
  siRNA target sequence for D16Ertd454e (NM_029092.1,999-1017).
gatcctttccacatttatt

SEQ ID NO: 737956 - DNA, 19 bp, Mus musculus
  siRNA target sequence for D16Ertd454e (NM_029092.1,1022-1040).
caatcttaaaatagatagt

SEQ ID NO: 737957 - DNA, 19 bp, Mus musculus
  siRNA target sequence for D16Ertd454e (NM_029092.1,1039-1057).
gtgcttatcatagagaatt

SEQ ID NO: 737958 - DNA, 19 bp, Mus musculus
  siRNA target sequence for D16Ertd454e (NM_029092.1,1051-1069).
gagaattagttaaacgtta

SEQ ID NO: 737959 - DNA, 19 bp, Mus musculus
  siRNA target sequence for D16Ertd454e (NM_029092.1,1053-1071).
gaattagttaaacgttata

SEQ ID NO: 737960 - DNA, 19 bp, Mus musculus
  siRNA target sequence for D16Ertd454e (NM_029092.1,1136-1154).
ggacagtattatatattta

SEQ ID NO: 737961 - DNA, 19 bp, Mus musculus
  siRNA target sequence for D16Ertd454e (NM_029092.1,1139-1157).
cagtattatatatttaact

SEQ ID NO: 737962 - DNA, 19 bp, Mus musculus
  siRNA target sequence for D16Ertd454e (NM_029092.1,1158-1176).
gcagattctcccaatgtta

SEQ ID NO: 737963 - DNA, 19 bp, Mus musculus
  siRNA target sequence for D16Ertd454e (NM_029092.1,1159-1177).
cagattctcccaatgttat

SEQ ID NO: 737964 - DNA, 19 bp, Mus musculus
  siRNA target sequence for D16Ertd454e (NM_029092.1,1180-1198).
ctaccttcaagcatgataa

SEQ ID NO: 737965 - DNA, 19 bp, Mus musculus
  siRNA target sequence for D16Ertd454e (NM_029092.1,1212-1230).
ggatcatttgttgataaaa

SEQ ID NO: 737966 - DNA, 19 bp, Mus musculus
  siRNA target sequence for D16Ertd454e (NM_029092.1,1286-1304).
gtgccttccactagataaa

SEQ ID NO: 737967 - DNA, 19 bp, Mus musculus
  siRNA target sequence for D16Ertd454e (NM_029092.1,1344-1362).
gatcagatgatccgaattt

SEQ ID NO: 737968 - DNA, 19 bp, Mus musculus
  siRNA target sequence for D16Ertd454e (NM_029092.1,1410-1428).
gttcccaggagaaagcata

SEQ ID NO: 737969 - DNA, 19 bp, Mus musculus
  siRNA target sequence for D16Ertd454e (NM_029092.1,1420-1438).
gaaagcatactggttattt

SEQ ID NO: 737970 - DNA, 19 bp, Mus musculus
  siRNA target sequence for D16Ertd454e (NM_029092.1,1432-1450).
gttatttagaggtttctga

SEQ ID NO: 737971 - DNA, 19 bp, Mus musculus
  siRNA target sequence for D16Ertd454e (NM_029092.1,1451-1469).
gcaatctcaggaacttgtt

SEQ ID NO: 737972 - DNA, 19 bp, Mus musculus
  siRNA target sequence for D16Ertd454e (NM_029092.1,1452-1470).
caatctcaggaacttgtta

SEQ ID NO: 737973 - DNA, 19 bp, Mus musculus
  siRNA target sequence for D16Ertd454e (NM_029092.1,1490-1508).
gactttaaattcatttcga

SEQ ID NO: 737974 - DNA, 19 bp, Mus musculus
  siRNA target sequence for D16Ertd454e (NM_029092.1,1492-1510).
ctttaaattcatttcgaaa

SEQ ID NO: 737975 - DNA, 19 bp, Mus musculus
  siRNA target sequence for D16Ertd454e (NM_029092.1,1507-1525).
gaaaaggctccttaaatgt

SEQ ID NO: 737976 - DNA, 19 bp, Mus musculus
  siRNA target sequence for D16Ertd454e (NM_029092.1,1524-1542).
gtgcgcacgtggaaaaggt

SEQ ID NO: 737977 - DNA, 19 bp, Mus musculus
  siRNA target sequence for 1110008J03Rik (NM_029096.1,487-505).
ctgcccaaccagactttga

SEQ ID NO: 737978 - DNA, 19 bp, Mus musculus
  siRNA target sequence for 1110008J03Rik (NM_029096.1,507-525).
ccaccctgggtgcagaatt

SEQ ID NO: 737979 - DNA, 19 bp, Mus musculus
  siRNA target sequence for 1110008J03Rik (NM_029096.1,674-692).
ctgcgatgagtcactgttt

SEQ ID NO: 737980 - DNA, 19 bp, Mus musculus
  siRNA target sequence for 1110008J03Rik (NM_029096.1,934-952).
cactcacccacctaactgt

SEQ ID NO: 737981 - DNA, 19 bp, Mus musculus
  siRNA target sequence for 1110013E13Rik (NM_029098.2,236-254).
gtccgcgagtgcatcatct

SEQ ID NO: 737982 - DNA, 19 bp, Mus musculus
  siRNA target sequence for 1110013E13Rik (NM_029098.2,239-257).
cgcgagtgcatcatctcaa

SEQ ID NO: 737983 - DNA, 19 bp, Mus musculus
  siRNA target sequence for 1110013E13Rik (NM_029098.2,240-258).
gcgagtgcatcatctcaat

SEQ ID NO: 737984 - DNA, 19 bp, Mus musculus
  siRNA target sequence for 1110013E13Rik (NM_029098.2,241-259).
cgagtgcatcatctcaata

SEQ ID NO: 737985 - DNA, 19 bp, Mus musculus
  siRNA target sequence for 1110013E13Rik (NM_029098.2,244-262).
gtgcatcatctcaatactt

SEQ ID NO: 737986 - DNA, 19 bp, Mus musculus
  siRNA target sequence for 1110013E13Rik (NM_029098.2,250-268).
catctcaatacttctgttt

SEQ ID NO: 737987 - DNA, 19 bp, Mus musculus
  siRNA target sequence for 1110013E13Rik (NM_029098.2,459-477).
cgttgccacgcaactacta

SEQ ID NO: 737988 - DNA, 19 bp, Mus musculus
  siRNA target sequence for 1110013E13Rik (NM_029098.2,510-528).
gtctgtggaacctcgtttt

SEQ ID NO: 737989 - DNA, 19 bp, Mus musculus
  siRNA target sequence for 1110013E13Rik (NM_029098.2,542-560).
ctgtccctcgtcttcctta

SEQ ID NO: 737990 - DNA, 19 bp, Mus musculus
  siRNA target sequence for 1110013E13Rik (NM_029098.2,556-574).
ccttatgccctttgcatat

SEQ ID NO: 737991 - DNA, 19 bp, Mus musculus
  siRNA target sequence for 1110013E13Rik (NM_029098.2,557-575).
cttatgccctttgcatatt

SEQ ID NO: 737992 - DNA, 19 bp, Mus musculus
  siRNA target sequence for 1110013E13Rik (NM_029098.2,688-706).
ggtggcatccgccattgta

SEQ ID NO: 737993 - DNA, 19 bp, Mus musculus
  siRNA target sequence for 1110013E13Rik (NM_029098.2,693-711).
catccgccattgtagacaa

SEQ ID NO: 737994 - DNA, 19 bp, Mus musculus
  siRNA target sequence for 1110013E13Rik (NM_029098.2,696-714).
ccgccattgtagacaatga

SEQ ID NO: 737995 - DNA, 19 bp, Mus musculus
  siRNA target sequence for 1110013E13Rik (NM_029098.2,926-944).
gctctgactcgaagaatct

SEQ ID NO: 737996 - DNA, 19 bp, Mus musculus
  siRNA target sequence for 1110013E13Rik (NM_029098.2,1213-1231).
ctccaaactgggatccttt

SEQ ID NO: 737997 - DNA, 19 bp, Mus musculus
  siRNA target sequence for 1110013E13Rik (NM_029098.2,1243-1261).
ccaggttgtgctgatattt

SEQ ID NO: 737998 - DNA, 19 bp, Mus musculus
  siRNA target sequence for 1110013E13Rik (NM_029098.2,1338-1356).
catcgatgacacagatcat

SEQ ID NO: 737999 - DNA, 19 bp, Mus musculus
  siRNA target sequence for 1110013E13Rik (NM_029098.2,1445-1463).
gactttggacgcttcaact

SEQ ID NO: 738000 - DNA, 19 bp, Mus musculus
  siRNA target sequence for 1110013E13Rik (NM_029098.2,1464-1482).
ggctaggcaatttctacat

SEQ ID NO: 738001 - DNA, 19 bp, Mus musculus
  siRNA target sequence for 1110019I12Rik (NM_029100.1,475-493).
ccggagtctgtttcaaact

SEQ ID NO: 738002 - DNA, 19 bp, Mus musculus
  siRNA target sequence for Armet (NM_029103.1,92-110).
gagactgtgaagtttgtat

SEQ ID NO: 738003 - DNA, 19 bp, Mus musculus
  siRNA target sequence for Armet (NM_029103.1,113-131).
cttatctgggacgatttta

SEQ ID NO: 738004 - DNA, 19 bp, Mus musculus
  siRNA target sequence for Armet (NM_029103.1,484-502).
gactatatccggaagataa

SEQ ID NO: 738005 - DNA, 19 bp, Mus musculus
  siRNA target sequence for Armet (NM_029103.1,494-512).
ggaagataaatgaactgat

SEQ ID NO: 738006 - DNA, 19 bp, Mus musculus
  siRNA target sequence for 4930455F23Rik (NM_029115.1,247-265).
gacttggagtggttgatca

SEQ ID NO: 738007 - DNA, 19 bp, Mus musculus
  siRNA target sequence for 4930455F23Rik (NM_029115.1,249-267).
cttggagtggttgatcaat

SEQ ID NO: 738008 - DNA, 19 bp, Mus musculus
  siRNA target sequence for 4930455F23Rik (NM_029115.1,252-270).
ggagtggttgatcaatgat

SEQ ID NO: 738009 - DNA, 19 bp, Mus musculus
  siRNA target sequence for 4930455F23Rik (NM_029115.1,253-271).
gagtggttgatcaatgata

SEQ ID NO: 738010 - DNA, 19 bp, Mus musculus
  siRNA target sequence for 4930455F23Rik (NM_029115.1,255-273).
gtggttgatcaatgataaa

SEQ ID NO: 738011 - DNA, 19 bp, Mus musculus
  siRNA target sequence for 4930455F23Rik (NM_029115.1,257-275).
ggttgatcaatgataaaga

SEQ ID NO: 738012 - DNA, 19 bp, Mus musculus
  siRNA target sequence for 4930455F23Rik (NM_029115.1,281-299).
gtaatggcagcacaataga

SEQ ID NO: 738013 - DNA, 19 bp, Mus musculus
  siRNA target sequence for 4930455F23Rik (NM_029115.1,322-340).
gatcttgaccaggtattaa

SEQ ID NO: 738014 - DNA, 19 bp, Mus musculus
  siRNA target sequence for 4930455F23Rik (NM_029115.1,328-346).
gaccaggtattaaaagaga

SEQ ID NO: 738015 - DNA, 19 bp, Mus musculus
  siRNA target sequence for 4930455F23Rik (NM_029115.1,432-450).
catttctgtcccaagtatt

SEQ ID NO: 738016 - DNA, 19 bp, Mus musculus
  siRNA target sequence for 4930455F23Rik (NM_029115.1,547-565).
gaagtaaggagatacatta

SEQ ID NO: 738017 - DNA, 19 bp, Mus musculus
  siRNA target sequence for 4930455F23Rik (NM_029115.1,557-575).
gatacattatggagaaaat

SEQ ID NO: 738018 - DNA, 19 bp, Mus musculus
  siRNA target sequence for 4930455F23Rik (NM_029115.1,630-648).
gcgaaaactgaagttcaaa

SEQ ID NO: 738019 - DNA, 19 bp, Mus musculus
  siRNA target sequence for 4930455F23Rik (NM_029115.1,682-700).
gaagacagtgatacttgta

SEQ ID NO: 738020 - DNA, 19 bp, Mus musculus
  siRNA target sequence for 4930455F23Rik (NM_029115.1,687-705).
cagtgatacttgtaaagct

SEQ ID NO: 738021 - DNA, 19 bp, Mus musculus
  siRNA target sequence for 4930455F23Rik (NM_029115.1,698-716).
gtaaagctctcttagaaaa

SEQ ID NO: 738022 - DNA, 19 bp, Mus musculus
  siRNA target sequence for 4930455F23Rik (NM_029115.1,712-730).
gaaaacgagacccatatgt

SEQ ID NO: 738023 - DNA, 19 bp, Mus musculus
  siRNA target sequence for 4930455F23Rik (NM_029115.1,724-742).
catatgtctgggaaactgt

SEQ ID NO: 738024 - DNA, 19 bp, Mus musculus
  siRNA target sequence for 4930455F23Rik (NM_029115.1,733-751).
gggaaactgtcccagttat

SEQ ID NO: 738025 - DNA, 19 bp, Mus musculus
  siRNA target sequence for 4930455F23Rik (NM_029115.1,752-770).
gtatttctggtgacttaga

SEQ ID NO: 738026 - DNA, 19 bp, Mus musculus
  siRNA target sequence for 4930455F23Rik (NM_029115.1,804-822).
cagctgtgaagaaaacgat

SEQ ID NO: 738027 - DNA, 19 bp, Mus musculus
  siRNA target sequence for 4930455F23Rik (NM_029115.1,901-919).
cccattagcagcgctaata

SEQ ID NO: 738028 - DNA, 19 bp, Mus musculus
  siRNA target sequence for 4930455F23Rik (NM_029115.1,903-921).
cattagcagcgctaatagt

SEQ ID NO: 738029 - DNA, 19 bp, Mus musculus
  siRNA target sequence for 4930455F23Rik (NM_029115.1,1096-1114).
gccaacccagatgtaacta

SEQ ID NO: 738030 - DNA, 19 bp, Mus musculus
  siRNA target sequence for 4930455F23Rik (NM_029115.1,1097-1115).
ccaacccagatgtaactaa

SEQ ID NO: 738031 - DNA, 19 bp, Mus musculus
  siRNA target sequence for 4930455F23Rik (NM_029115.1,1120-1138).
gccaggaggtccaatcaca

SEQ ID NO: 738032 - DNA, 19 bp, Mus musculus
  siRNA target sequence for 4930455F23Rik (NM_029115.1,1160-1178).
ctccagtgacctcaacata

SEQ ID NO: 738033 - DNA, 19 bp, Mus musculus
  siRNA target sequence for 4930455F23Rik (NM_029115.1,1162-1180).
ccagtgacctcaacatact

SEQ ID NO: 738034 - DNA, 19 bp, Mus musculus
  siRNA target sequence for 4930455F23Rik (NM_029115.1,1492-1510).
caagaggagtgtttgttct

SEQ ID NO: 738035 - DNA, 19 bp, Mus musculus
  siRNA target sequence for 4930465P12Rik (NM_029122.1,230-248).
gtcgaacctaatgtacaat

SEQ ID NO: 738036 - DNA, 19 bp, Mus musculus
  siRNA target sequence for 4930465P12Rik (NM_029122.1,232-250).
cgaacctaatgtacaataa

SEQ ID NO: 738037 - DNA, 19 bp, Mus musculus
  siRNA target sequence for 4930465P12Rik (NM_029122.1,325-343).
caaacaaggtcctagtctt

SEQ ID NO: 738038 - DNA, 19 bp, Mus musculus
  siRNA target sequence for 4930465P12Rik (NM_029122.1,350-368).
gttagccaccttctacata

SEQ ID NO: 738039 - DNA, 19 bp, Mus musculus
  siRNA target sequence for 4930465P12Rik (NM_029122.1,413-431).
gatagtccatccacagaaa

SEQ ID NO: 738040 - DNA, 19 bp, Mus musculus
  siRNA target sequence for 4930465P12Rik (NM_029122.1,469-487).
gtcgcattctggaactgaa

SEQ ID NO: 738041 - DNA, 19 bp, Mus musculus
  siRNA target sequence for 4930465P12Rik (NM_029122.1,514-532).
cagagttccattattttga

SEQ ID NO: 738042 - DNA, 19 bp, Mus musculus
  siRNA target sequence for 4930465P12Rik (NM_029122.1,580-598).
ccatacccaggtatttcct

SEQ ID NO: 738043 - DNA, 19 bp, Mus musculus
  siRNA target sequence for 4930465P12Rik (NM_029122.1,602-620).
ggagaggttggaagtcata

SEQ ID NO: 738044 - DNA, 19 bp, Mus musculus
  siRNA target sequence for 4930465P12Rik (NM_029122.1,638-656).
cctggctcggatcttaact

SEQ ID NO: 738045 - DNA, 19 bp, Mus musculus
  siRNA target sequence for 4930465P12Rik (NM_029122.1,641-659).
ggctcggatcttaactgaa

SEQ ID NO: 738046 - DNA, 19 bp, Mus musculus
  siRNA target sequence for 4930465P12Rik (NM_029122.1,642-660).
gctcggatcttaactgaat

SEQ ID NO: 738047 - DNA, 19 bp, Mus musculus
  siRNA target sequence for 4930465P12Rik (NM_029122.1,680-698).
gaaatatgccgcaaagagt

SEQ ID NO: 738048 - DNA, 19 bp, Mus musculus
  siRNA target sequence for 4930465P12Rik (NM_029122.1,687-705).
gccgcaaagagtatagctt

SEQ ID NO: 738049 - DNA, 19 bp, Mus musculus
  siRNA target sequence for 4930465P12Rik (NM_029122.1,688-706).
ccgcaaagagtatagcttt

SEQ ID NO: 738050 - DNA, 19 bp, Mus musculus
  siRNA target sequence for 4930465P12Rik (NM_029122.1,757-775).
gcctcagagctctgttcat

SEQ ID NO: 738051 - DNA, 19 bp, Mus musculus
  siRNA target sequence for 4930465P12Rik (NM_029122.1,815-833).
gaagctgttgggacataga

SEQ ID NO: 738052 - DNA, 19 bp, Mus musculus
  siRNA target sequence for 4930465P12Rik (NM_029122.1,819-837).
ctgttgggacatagattat

SEQ ID NO: 738053 - DNA, 19 bp, Mus musculus
  siRNA target sequence for 4930465P12Rik (NM_029122.1,825-843).
ggacatagattattagaca

SEQ ID NO: 738054 - DNA, 19 bp, Mus musculus
  siRNA target sequence for 4930465P12Rik (NM_029122.1,1043-1061).
ctaccaggaagccttagta

SEQ ID NO: 738055 - DNA, 19 bp, Mus musculus
  siRNA target sequence for 4930465P12Rik (NM_029122.1,1050-1068).
gaagccttagtaaatatca

SEQ ID NO: 738056 - DNA, 19 bp, Mus musculus
  siRNA target sequence for 4930465P12Rik (NM_029122.1,1124-1142).
gatccggcagtggttcatt

SEQ ID NO: 738057 - DNA, 19 bp, Mus musculus
  siRNA target sequence for 4930465P12Rik (NM_029122.1,1128-1146).
cggcagtggttcattgagt

SEQ ID NO: 738058 - DNA, 19 bp, Mus musculus
  siRNA target sequence for 4930500J03Rik (NM_029141.1,412-430).
gagccagtcaactttagct

SEQ ID NO: 738059 - DNA, 19 bp, Mus musculus
  siRNA target sequence for 4930500J03Rik (NM_029141.1,423-441).
ctttagctctggagatcat

SEQ ID NO: 738060 - DNA, 19 bp, Mus musculus
  siRNA target sequence for 4930500J03Rik (NM_029141.1,523-541).
gtacaagaagccgtacaat

SEQ ID NO: 738061 - DNA, 19 bp, Mus musculus
  siRNA target sequence for 4930500J03Rik (NM_029141.1,543-561).
ctcacatccaaggaataga

SEQ ID NO: 738062 - DNA, 19 bp, Mus musculus
  siRNA target sequence for 4930500J03Rik (NM_029141.1,597-615).
ggatgttactccctcaaat

SEQ ID NO: 738063 - DNA, 19 bp, Mus musculus
  siRNA target sequence for 4930500J03Rik (NM_029141.1,601-619).
gttactccctcaaatgaga

SEQ ID NO: 738064 - DNA, 19 bp, Mus musculus
  siRNA target sequence for 4930500J03Rik (NM_029141.1,607-625).
ccctcaaatgagactgtaa

SEQ ID NO: 738065 - DNA, 19 bp, Mus musculus
  siRNA target sequence for 4930500J03Rik (NM_029141.1,643-661).
gaaaacacgtctattcgta

SEQ ID NO: 738066 - DNA, 19 bp, Mus musculus
  siRNA target sequence for 4930500J03Rik (NM_029141.1,648-666).
cacgtctattcgtaatgat

SEQ ID NO: 738067 - DNA, 19 bp, Mus musculus
  siRNA target sequence for 4930500J03Rik (NM_029141.1,650-668).
cgtctattcgtaatgattt

SEQ ID NO: 738068 - DNA, 19 bp, Mus musculus
  siRNA target sequence for 4930500J03Rik (NM_029141.1,653-671).
ctattcgtaatgatttcat

SEQ ID NO: 738069 - DNA, 19 bp, Mus musculus
  siRNA target sequence for 4930500J03Rik (NM_029141.1,658-676).
cgtaatgatttcattatga

SEQ ID NO: 738070 - DNA, 19 bp, Mus musculus
  siRNA target sequence for 4930500J03Rik (NM_029141.1,720-738).
gattatcggcatctttgtt

SEQ ID NO: 738071 - DNA, 19 bp, Mus musculus
  siRNA target sequence for 4930500J03Rik (NM_029141.1,795-813).
cctcccagcagttatgatt

SEQ ID NO: 738072 - DNA, 19 bp, Mus musculus
  siRNA target sequence for 4930500J03Rik (NM_029141.1,853-871).
caagtgcccgcaaactaca

SEQ ID NO: 738073 - DNA, 19 bp, Mus musculus
  siRNA target sequence for 4930500J03Rik (NM_029141.1,874-892).
ctcctggcgttctttacca

SEQ ID NO: 738074 - DNA, 19 bp, Mus musculus
  siRNA target sequence for 4930500J03Rik (NM_029141.1,933-951).
cagagcagaagagatacta

SEQ ID NO: 738075 - DNA, 19 bp, Mus musculus
  siRNA target sequence for 4930500J03Rik (NM_029141.1,976-994).
gtgacactagtgctaactt

SEQ ID NO: 738076 - DNA, 19 bp, Mus musculus
  siRNA target sequence for 4930500J03Rik (NM_029141.1,1016-1034).
gggattttaccctgctaaa

SEQ ID NO: 738077 - DNA, 19 bp, Mus musculus
  siRNA target sequence for 4930500J03Rik (NM_029141.1,1085-1103).
cacttgtgattcgatcata

SEQ ID NO: 738078 - DNA, 19 bp, Mus musculus
  siRNA target sequence for 4930500J03Rik (NM_029141.1,1087-1105).
cttgtgattcgatcatact

SEQ ID NO: 738079 - DNA, 19 bp, Mus musculus
  siRNA target sequence for 4930500J03Rik (NM_029141.1,1136-1154).
cattgctcttctccatata

SEQ ID NO: 738080 - DNA, 19 bp, Mus musculus
  siRNA target sequence for 4930500J03Rik (NM_029141.1,1159-1177).
gtgatggacgtgcaaatga

SEQ ID NO: 738081 - DNA, 19 bp, Mus musculus
  siRNA target sequence for 4930500J03Rik (NM_029141.1,1188-1206).
gcgctaccattatgagata

SEQ ID NO: 738082 - DNA, 19 bp, Mus musculus
  siRNA target sequence for 4930500J03Rik (NM_029141.1,1189-1207).
cgctaccattatgagataa

SEQ ID NO: 738083 - DNA, 19 bp, Mus musculus
  siRNA target sequence for 4930500J03Rik (NM_029141.1,1212-1230).
cgaagagtacatttttgct

SEQ ID NO: 738084 - DNA, 19 bp, Mus musculus
  siRNA target sequence for 4930500J03Rik (NM_029141.1,1249-1267).
gacatcatcagccttttca

SEQ ID NO: 738085 - DNA, 19 bp, Mus musculus
  siRNA target sequence for 4930483N21Rik (NM_029144.1,313-331).
gaagcctatcacatcttat

SEQ ID NO: 738086 - DNA, 19 bp, Mus musculus
  siRNA target sequence for 4930483N21Rik (NM_029144.1,317-335).
cctatcacatcttatctga

SEQ ID NO: 738087 - DNA, 19 bp, Mus musculus
  siRNA target sequence for 4930483N21Rik (NM_029144.1,365-383).
cccgatggaaccgaaacaa

SEQ ID NO: 738088 - DNA, 19 bp, Mus musculus
  siRNA target sequence for 4930483N21Rik (NM_029144.1,578-596).
cttccccattctttactgt

SEQ ID NO: 738089 - DNA, 19 bp, Mus musculus
  siRNA target sequence for 4930483N21Rik (NM_029144.1,616-634).
ggattttctacgtttgtgt

SEQ ID NO: 738090 - DNA, 19 bp, Mus musculus
  siRNA target sequence for 4930483N21Rik (NM_029144.1,636-654).
ccatgaatccaggtcttat

SEQ ID NO: 738091 - DNA, 19 bp, Mus musculus
  siRNA target sequence for 4930483N21Rik (NM_029144.1,637-655).
catgaatccaggtcttatt

SEQ ID NO: 738092 - DNA, 19 bp, Mus musculus
  siRNA target sequence for 4930483N21Rik (NM_029144.1,665-683).
ctgaaacatttgtaccata

SEQ ID NO: 738093 - DNA, 19 bp, Mus musculus
  siRNA target sequence for 4930483N21Rik (NM_029144.1,732-750).
gacagtgaatggtaagaga

SEQ ID NO: 738094 - DNA, 19 bp, Mus musculus
  siRNA target sequence for 4930483N21Rik (NM_029144.1,743-761).
gtaagagagttgtcacaaa

SEQ ID NO: 738095 - DNA, 19 bp, Mus musculus
  siRNA target sequence for 4921511F01Rik (NM_029150.1,1713-1731).
ccaaaaggtcggacgaata

SEQ ID NO: 738096 - DNA, 19 bp, Mus musculus
  siRNA target sequence for 4921511F01Rik (NM_029150.1,1750-1768).
ctagaagacagcttcttaa

SEQ ID NO: 738097 - DNA, 19 bp, Mus musculus
  siRNA target sequence for 4930512M02Rik (NM_029171.1,549-567).
caatggtacagccaatcat

SEQ ID NO: 738098 - DNA, 19 bp, Mus musculus
  siRNA target sequence for 4930512M02Rik (NM_029171.1,568-586).
ccacatgaggcgaacatct

SEQ ID NO: 738099 - DNA, 19 bp, Mus musculus
  siRNA target sequence for 4930512M02Rik (NM_029171.1,587-605).
cacagggtgccctgtttat

SEQ ID NO: 738100 - DNA, 19 bp, Mus musculus
  siRNA target sequence for 4930512M02Rik (NM_029171.1,652-670).
gctgaggtgcacataatat

SEQ ID NO: 738101 - DNA, 19 bp, Mus musculus
  siRNA target sequence for 4930538D17Rik (NM_029186.1,245-263).
ccttcgtctcagtgtataa

SEQ ID NO: 738102 - DNA, 19 bp, Mus musculus
  siRNA target sequence for 4930538D17Rik (NM_029186.1,250-268).
gtctcagtgtataagatca

SEQ ID NO: 738103 - DNA, 19 bp, Mus musculus
  siRNA target sequence for 4930538D17Rik (NM_029186.1,252-270).
ctcagtgtataagatcaat

SEQ ID NO: 738104 - DNA, 19 bp, Mus musculus
  siRNA target sequence for 4930538D17Rik (NM_029186.1,494-512).
ctggcttgcaattcttact

SEQ ID NO: 738105 - DNA, 19 bp, Mus musculus
  siRNA target sequence for 4930538D17Rik (NM_029186.1,496-514).
ggcttgcaattcttactgt

SEQ ID NO: 738106 - DNA, 19 bp, Mus musculus
  siRNA target sequence for 4930538D17Rik (NM_029186.1,661-679).
gcctcctacgccttttgga

SEQ ID NO: 738107 - DNA, 19 bp, Mus musculus
  siRNA target sequence for 4930538D17Rik (NM_029186.1,662-680).
cctcctacgccttttggaa

SEQ ID NO: 738108 - DNA, 19 bp, Mus musculus
  siRNA target sequence for 4930538D17Rik (NM_029186.1,904-922).
ctggcacgccaccaaaact

SEQ ID NO: 738109 - DNA, 19 bp, Mus musculus
  siRNA target sequence for 4930538D17Rik (NM_029186.1,967-985).
cacttcaacagtaacttct

SEQ ID NO: 738110 - DNA, 19 bp, Mus musculus
  siRNA target sequence for 4930538D17Rik (NM_029186.1,1413-1431).
cacaggtcacgaccttttt

SEQ ID NO: 738111 - DNA, 19 bp, Mus musculus
  siRNA target sequence for 4930542N07Rik (NM_029199.1,160-178).
cacccttgatacacaaaga

SEQ ID NO: 738112 - DNA, 19 bp, Mus musculus
  siRNA target sequence for 4930542N07Rik (NM_029199.1,254-272).
gccattgccagcaatcaat

SEQ ID NO: 738113 - DNA, 19 bp, Mus musculus
  siRNA target sequence for 4930542N07Rik (NM_029199.1,332-350).
ggagcttattaccctaaat

SEQ ID NO: 738114 - DNA, 19 bp, Mus musculus
  siRNA target sequence for 4930542N07Rik (NM_029199.1,333-351).
gagcttattaccctaaatt

SEQ ID NO: 738115 - DNA, 19 bp, Mus musculus
  siRNA target sequence for 4930542N07Rik (NM_029199.1,335-353).
gcttattaccctaaattat

SEQ ID NO: 738116 - DNA, 19 bp, Mus musculus
  siRNA target sequence for 4930542N07Rik (NM_029199.1,385-403).
ggttcacaaccctattgat

SEQ ID NO: 738117 - DNA, 19 bp, Mus musculus
  siRNA target sequence for 4930542N07Rik (NM_029199.1,386-404).
gttcacaaccctattgatt

SEQ ID NO: 738118 - DNA, 19 bp, Mus musculus
  siRNA target sequence for 4930542N07Rik (NM_029199.1,505-523).
caggattagctgcatgaaa

SEQ ID NO: 738119 - DNA, 19 bp, Mus musculus
  siRNA target sequence for 4930542N07Rik (NM_029199.1,507-525).
ggattagctgcatgaaaga

SEQ ID NO: 738120 - DNA, 19 bp, Mus musculus
  siRNA target sequence for 4930542N07Rik (NM_029199.1,508-526).
gattagctgcatgaaagat

SEQ ID NO: 738121 - DNA, 19 bp, Mus musculus
  siRNA target sequence for 4930542N07Rik (NM_029199.1,513-531).
gctgcatgaaagatccatt

SEQ ID NO: 738122 - DNA, 19 bp, Mus musculus
  siRNA target sequence for 4930542N07Rik (NM_029199.1,533-551).
ctaatgatgcagatatatt

SEQ ID NO: 738123 - DNA, 19 bp, Mus musculus
  siRNA target sequence for 4930542N07Rik (NM_029199.1,556-574).
caagttctctaccttagtt

SEQ ID NO: 738124 - DNA, 19 bp, Mus musculus
  siRNA target sequence for 4930542N07Rik (NM_029199.1,577-595).
gggtattagcagtcttttt

SEQ ID NO: 738125 - DNA, 19 bp, Mus musculus
  siRNA target sequence for 4930542N07Rik (NM_029199.1,578-596).
ggtattagcagtcttttta

SEQ ID NO: 738126 - DNA, 19 bp, Mus musculus
  siRNA target sequence for 4930542N07Rik (NM_029199.1,605-623).
gctgtgagctggaaccata

SEQ ID NO: 738127 - DNA, 19 bp, Mus musculus
  siRNA target sequence for 4930542N07Rik (NM_029199.1,655-673).
ctttccacccaaatttcct

SEQ ID NO: 738128 - DNA, 19 bp, Mus musculus
  siRNA target sequence for 4930542N07Rik (NM_029199.1,735-753).
ctgcaaccatgtcactttt

SEQ ID NO: 738129 - DNA, 19 bp, Mus musculus
  siRNA target sequence for 4930535B06Rik (NM_029200.1,523-541).
caggatcacggtctacaat

SEQ ID NO: 738130 - DNA, 19 bp, Mus musculus
  siRNA target sequence for 4930535B06Rik (NM_029200.1,525-543).
ggatcacggtctacaataa

SEQ ID NO: 738131 - DNA, 19 bp, Mus musculus
  siRNA target sequence for 4930535B06Rik (NM_029200.1,582-600).
ggaaacctgacgtcctttt

SEQ ID NO: 738132 - DNA, 19 bp, Mus musculus
  siRNA target sequence for 4930544L10Rik (NM_029211.1,290-308).
gacttgcaggttgatatgt

SEQ ID NO: 738133 - DNA, 19 bp, Mus musculus
  siRNA target sequence for 4930544L10Rik (NM_029211.1,340-358).
cgaacatgctcgaatgcat

SEQ ID NO: 738134 - DNA, 19 bp, Mus musculus
  siRNA target sequence for 4930544L10Rik (NM_029211.1,465-483).
cccgttcttacaatatggt

SEQ ID NO: 738135 - DNA, 19 bp, Mus musculus
  siRNA target sequence for 4930544L10Rik (NM_029211.1,501-519).
gggttgttcccctctattt

SEQ ID NO: 738136 - DNA, 19 bp, Mus musculus
  siRNA target sequence for 4930544L10Rik (NM_029211.1,503-521).
gttgttcccctctatttca

SEQ ID NO: 738137 - DNA, 19 bp, Mus musculus
  siRNA target sequence for 4930544L10Rik (NM_029211.1,551-569).
gtgatctggatcttcttct

SEQ ID NO: 738138 - DNA, 19 bp, Mus musculus
  siRNA target sequence for 4930544L10Rik (NM_029211.1,624-642).
caaccccaaggttggttta

SEQ ID NO: 738139 - DNA, 19 bp, Mus musculus
  siRNA target sequence for 4930544L10Rik (NM_029211.1,628-646).
cccaaggttggtttataaa

SEQ ID NO: 738140 - DNA, 19 bp, Mus musculus
  siRNA target sequence for 4930544L10Rik (NM_029211.1,629-647).
ccaaggttggtttataaat

SEQ ID NO: 738141 - DNA, 19 bp, Mus musculus
  siRNA target sequence for 4930544L10Rik (NM_029211.1,633-651).
ggttggtttataaatggtt

SEQ ID NO: 738142 - DNA, 19 bp, Mus musculus
  siRNA target sequence for 4930544L10Rik (NM_029211.1,648-666).
ggtttctgctgatctataa

SEQ ID NO: 738143 - DNA, 19 bp, Mus musculus
  siRNA target sequence for 4930544L10Rik (NM_029211.1,919-937).
gtgtgggcagcagatcttt

SEQ ID NO: 738144 - DNA, 19 bp, Mus musculus
  siRNA target sequence for 4930544L10Rik (NM_029211.1,984-1002).
cctgcaatcacgtattcca

SEQ ID NO: 738145 - DNA, 19 bp, Mus musculus
  siRNA target sequence for 4930544L10Rik (NM_029211.1,985-1003).
ctgcaatcacgtattccat

SEQ ID NO: 738146 - DNA, 19 bp, Mus musculus
  siRNA target sequence for 4930544L10Rik (NM_029211.1,992-1010).
cacgtattccatgaattct

SEQ ID NO: 738147 - DNA, 19 bp, Mus musculus
  siRNA target sequence for 4930544L10Rik (NM_029211.1,994-1012).
cgtattccatgaattctgt

SEQ ID NO: 738148 - DNA, 19 bp, Mus musculus
  siRNA target sequence for 4930563C04Rik (NM_029231.2,117-135).
cgtctgctgctgttagaga

SEQ ID NO: 738149 - DNA, 19 bp, Mus musculus
  siRNA target sequence for 4930563C04Rik (NM_029231.2,123-141).
ctgctgttagagagcattt

SEQ ID NO: 738150 - DNA, 19 bp, Mus musculus
  siRNA target sequence for 4930563C04Rik (NM_029231.2,134-152).
gagcatttccgggttgtta

SEQ ID NO: 738151 - DNA, 19 bp, Mus musculus
  siRNA target sequence for 4930563C04Rik (NM_029231.2,136-154).
gcatttccgggttgttaca

SEQ ID NO: 738152 - DNA, 19 bp, Mus musculus
  siRNA target sequence for 4930563C04Rik (NM_029231.2,219-237).
gggctcatgtgcttattga

SEQ ID NO: 738153 - DNA, 19 bp, Mus musculus
  siRNA target sequence for 4930563C04Rik (NM_029231.2,282-300).
ggggcattggtgaatctca

SEQ ID NO: 738154 - DNA, 19 bp, Mus musculus
  siRNA target sequence for 4930563C04Rik (NM_029231.2,290-308).
ggtgaatctcagtaatgca

SEQ ID NO: 738155 - DNA, 19 bp, Mus musculus
  siRNA target sequence for 4930563C04Rik (NM_029231.2,369-387).
gagagccccacagagttat

SEQ ID NO: 738156 - DNA, 19 bp, Mus musculus
  siRNA target sequence for 4930563C04Rik (NM_029231.2,373-391).
gccccacagagttattcca

SEQ ID NO: 738157 - DNA, 19 bp, Mus musculus
  siRNA target sequence for 4930563C04Rik (NM_029231.2,381-399).
gagttattccagcaacatt

SEQ ID NO: 738158 - DNA, 19 bp, Mus musculus
  siRNA target sequence for 4930563C04Rik (NM_029231.2,617-635).
ggcttgtgtgacctatttt

SEQ ID NO: 738159 - DNA, 19 bp, Mus musculus
  siRNA target sequence for 4930563C04Rik (NM_029231.2,644-662).
ctgtggctctctaaaagga

SEQ ID NO: 738160 - DNA, 19 bp, Mus musculus
  siRNA target sequence for 4930563C04Rik (NM_029231.2,720-738).
ctggcctgcgagtgttact

SEQ ID NO: 738161 - DNA, 19 bp, Mus musculus
  siRNA target sequence for 4930563C04Rik (NM_029231.2,913-931).
cccactcagaagatggtaa

SEQ ID NO: 738162 - DNA, 19 bp, Mus musculus
  siRNA target sequence for 4930563C04Rik (NM_029231.2,1058-1076).
ccggatccttggtatcagt

SEQ ID NO: 738163 - DNA, 19 bp, Mus musculus
  siRNA target sequence for 4930563C04Rik (NM_029231.2,1059-1077).
cggatccttggtatcagta

SEQ ID NO: 738164 - DNA, 19 bp, Mus musculus
  siRNA target sequence for 4930563C04Rik (NM_029231.2,1069-1087).
gtatcagtagcaagaatat

SEQ ID NO: 738165 - DNA, 19 bp, Mus musculus
  siRNA target sequence for 4930563C04Rik (NM_029231.2,1177-1195).
cgtgtggaagtcgactttt

SEQ ID NO: 738166 - DNA, 19 bp, Mus musculus
  siRNA target sequence for 4930563C04Rik (NM_029231.2,1249-1267).
gcactgggagggatactct

SEQ ID NO: 738167 - DNA, 19 bp, Mus musculus
  siRNA target sequence for 4930563C04Rik (NM_029231.2,1250-1268).
cactgggagggatactcta

SEQ ID NO: 738168 - DNA, 19 bp, Mus musculus
  siRNA target sequence for 4930563C04Rik (NM_029231.2,1297-1315).
ccattcggaccaaagtgta

SEQ ID NO: 738169 - DNA, 19 bp, Mus musculus
  siRNA target sequence for 4930563C04Rik (NM_029231.2,1298-1316).
cattcggaccaaagtgtat

SEQ ID NO: 738170 - DNA, 19 bp, Mus musculus
  siRNA target sequence for 4930563C04Rik (NM_029231.2,1302-1320).
cggaccaaagtgtatgcta

SEQ ID NO: 738171 - DNA, 19 bp, Mus musculus
  siRNA target sequence for 4930563C04Rik (NM_029231.2,1303-1321).
ggaccaaagtgtatgctat

SEQ ID NO: 738172 - DNA, 19 bp, Mus musculus
  siRNA target sequence for 4930563C04Rik (NM_029231.2,1423-1441).
ctccagctgatgctcttaa

SEQ ID NO: 738173 - DNA, 19 bp, Mus musculus
  siRNA target sequence for 4930563C04Rik (NM_029231.2,1428-1446).
gctgatgctcttaagctat

SEQ ID NO: 738174 - DNA, 19 bp, Mus musculus
  siRNA target sequence for 4930563C04Rik (NM_029231.2,1463-1481).
ctctgatggaggtttgcaa

SEQ ID NO: 738175 - DNA, 19 bp, Mus musculus
  siRNA target sequence for 4930563C04Rik (NM_029231.2,1605-1623).
ctcagtcggaccatcctta

SEQ ID NO: 738176 - DNA, 19 bp, Mus musculus
  siRNA target sequence for 4930563C04Rik (NM_029231.2,1657-1675).
ggagacttcatgatctagt

SEQ ID NO: 738177 - DNA, 19 bp, Mus musculus
  siRNA target sequence for 4930563C04Rik (NM_029231.2,1761-1779).
cgcctgctgctggctttat

SEQ ID NO: 738178 - DNA, 19 bp, Mus musculus
  siRNA target sequence for 4930563C04Rik (NM_029231.2,1860-1878).
cttgaggtctcctcttttt

SEQ ID NO: 738179 - DNA, 19 bp, Mus musculus
  siRNA target sequence for 4930563C04Rik (NM_029231.2,1863-1881).
gaggtctcctctttttgct

SEQ ID NO: 738180 - DNA, 19 bp, Mus musculus
  siRNA target sequence for 4930563C04Rik (NM_029231.2,2267-2285).
gacccctccgcctagcata

SEQ ID NO: 738181 - DNA, 19 bp, Mus musculus
  siRNA target sequence for 4930563C04Rik (NM_029231.2,2282-2300).
catacctccagatgaaact

SEQ ID NO: 738182 - DNA, 19 bp, Mus musculus
  siRNA target sequence for 4930563C04Rik (NM_029231.2,2325-2343).
gcctttgtccactacgata

SEQ ID NO: 738183 - DNA, 19 bp, Mus musculus
  siRNA target sequence for 4930563C04Rik (NM_029231.2,2647-2665).
cagccatggaagaagattt

SEQ ID NO: 738184 - DNA, 19 bp, Mus musculus
  siRNA target sequence for 4930563C04Rik (NM_029231.2,2661-2679).
gatttgacagttattaata

SEQ ID NO: 738185 - DNA, 19 bp, Mus musculus
  siRNA target sequence for 4930563C04Rik (NM_029231.2,2974-2992).
cagactcgcccaaagtaca

SEQ ID NO: 738186 - DNA, 19 bp, Mus musculus
  siRNA target sequence for 4930563C04Rik (NM_029231.2,3340-3358).
gtccccctgacgatgagaa

SEQ ID NO: 738187 - DNA, 19 bp, Mus musculus
  siRNA target sequence for 4930556L07Rik (NM_029235.1,936-954).
cctgcgttgacttcagaat

SEQ ID NO: 738188 - DNA, 19 bp, Mus musculus
  siRNA target sequence for 4930556L07Rik (NM_029235.1,1036-1054).
ggtgtttaccacgagatat

SEQ ID NO: 738189 - DNA, 19 bp, Mus musculus
  siRNA target sequence for 4930556P03Rik (NM_029236.1,44-62).
gccgcagacgggacattgt

SEQ ID NO: 738190 - DNA, 19 bp, Mus musculus
  siRNA target sequence for 4930556P03Rik (NM_029236.1,46-64).
cgcagacgggacattgtca

SEQ ID NO: 738191 - DNA, 19 bp, Mus musculus
  siRNA target sequence for 4930556P03Rik (NM_029236.1,133-151).
cggaaatttccctcattat

SEQ ID NO: 738192 - DNA, 19 bp, Mus musculus
  siRNA target sequence for 4930556P03Rik (NM_029236.1,254-272).
ctcgacgtggggtgtaact

SEQ ID NO: 738193 - DNA, 19 bp, Mus musculus
  siRNA target sequence for 4930556P03Rik (NM_029236.1,287-305).
gtggctctgtacaaacatt

SEQ ID NO: 738194 - DNA, 19 bp, Mus musculus
  siRNA target sequence for 4930556P03Rik (NM_029236.1,358-376).
catcctctgctgtgatata

SEQ ID NO: 738195 - DNA, 19 bp, Mus musculus
  siRNA target sequence for 4930556P03Rik (NM_029236.1,422-440).
gaggctttgacctttatca

SEQ ID NO: 738196 - DNA, 19 bp, Mus musculus
  siRNA target sequence for 4930556P03Rik (NM_029236.1,684-702).
gactccacagttttgatca

SEQ ID NO: 738197 - DNA, 19 bp, Mus musculus
  siRNA target sequence for 4930556P03Rik (NM_029236.1,740-758).
cagatcgtgcggatcttga

SEQ ID NO: 738198 - DNA, 19 bp, Mus musculus
  siRNA target sequence for 4930556P03Rik (NM_029236.1,862-880).
ccccgaatcgtcaacaaaa

SEQ ID NO: 738199 - DNA, 19 bp, Mus musculus
  siRNA target sequence for 4930556P03Rik (NM_029236.1,864-882).
ccgaatcgtcaacaaaaga

SEQ ID NO: 738200 - DNA, 19 bp, Mus musculus
  siRNA target sequence for 4930550C14Rik (NM_029247.1,63-81).
catatccaggacaattcaa

SEQ ID NO: 738201 - DNA, 19 bp, Mus musculus
  siRNA target sequence for 4930550C14Rik (NM_029247.1,93-111).
gctgcaagaatcattcaga

SEQ ID NO: 738202 - DNA, 19 bp, Mus musculus
  siRNA target sequence for 4930550C14Rik (NM_029247.1,114-132).
gcctggaaaactttcctta

SEQ ID NO: 738203 - DNA, 19 bp, Mus musculus
  siRNA target sequence for 4930550C14Rik (NM_029247.1,139-157).
ccgtataccagcattttaa

SEQ ID NO: 738204 - DNA, 19 bp, Mus musculus
  siRNA target sequence for 4930550C14Rik (NM_029247.1,140-158).
cgtataccagcattttaaa

SEQ ID NO: 738205 - DNA, 19 bp, Mus musculus
  siRNA target sequence for 4930550C14Rik (NM_029247.1,186-204).
gagccacgtcagatagtga

SEQ ID NO: 738206 - DNA, 19 bp, Mus musculus
  siRNA target sequence for 4930550C14Rik (NM_029247.1,205-223).
ggtacattaaccctaaaga

SEQ ID NO: 738207 - DNA, 19 bp, Mus musculus
  siRNA target sequence for 4930550C14Rik (NM_029247.1,288-306).
ccacctgagatatactata

SEQ ID NO: 738208 - DNA, 19 bp, Mus musculus
  siRNA target sequence for 4930550C14Rik (NM_029247.1,291-309).
cctgagatatactataaaa

SEQ ID NO: 738209 - DNA, 19 bp, Mus musculus
  siRNA target sequence for 4930550C14Rik (NM_029247.1,296-314).
gatatactataaaattttt

SEQ ID NO: 738210 - DNA, 19 bp, Mus musculus
  siRNA target sequence for 4930550C14Rik (NM_029247.1,342-360).
gctaacagccctagagatt

SEQ ID NO: 738211 - DNA, 19 bp, Mus musculus
  siRNA target sequence for 4930550C14Rik (NM_029247.1,343-361).
ctaacagccctagagatta

SEQ ID NO: 738212 - DNA, 19 bp, Mus musculus
  siRNA target sequence for 4930550C14Rik (NM_029247.1,347-365).
cagccctagagattacaca

SEQ ID NO: 738213 - DNA, 19 bp, Mus musculus
  siRNA target sequence for 4930550C14Rik (NM_029247.1,349-367).
gccctagagattacacaaa

SEQ ID NO: 738214 - DNA, 19 bp, Mus musculus
  siRNA target sequence for 4930550C14Rik (NM_029247.1,369-387).
cttccagcaagatacacat

SEQ ID NO: 738215 - DNA, 19 bp, Mus musculus
  siRNA target sequence for 4930550C14Rik (NM_029247.1,383-401).
cacatcccacaacaaagat

SEQ ID NO: 738216 - DNA, 19 bp, Mus musculus
  siRNA target sequence for 4930550C14Rik (NM_029247.1,385-403).
catcccacaacaaagatga

SEQ ID NO: 738217 - DNA, 19 bp, Mus musculus
  siRNA target sequence for 4930550C14Rik (NM_029247.1,419-437).
ggacaacagtggttggtat

SEQ ID NO: 738218 - DNA, 19 bp, Mus musculus
  siRNA target sequence for 4930550C14Rik (NM_029247.1,433-451).
ggtatcgccgtgtagagaa

SEQ ID NO: 738219 - DNA, 19 bp, Mus musculus
  siRNA target sequence for 4930550C14Rik (NM_029247.1,463-481).
ggcctgtttcctacagatt

SEQ ID NO: 738220 - DNA, 19 bp, Mus musculus
  siRNA target sequence for 4930550C14Rik (NM_029247.1,464-482).
gcctgtttcctacagattt

SEQ ID NO: 738221 - DNA, 19 bp, Mus musculus
  siRNA target sequence for 4930550C14Rik (NM_029247.1,515-533).
cacaaaggaaagcgaattt

SEQ ID NO: 738222 - DNA, 19 bp, Mus musculus
  siRNA target sequence for 4930550C14Rik (NM_029247.1,517-535).
caaaggaaagcgaatttca

SEQ ID NO: 738223 - DNA, 19 bp, Mus musculus
  siRNA target sequence for 4930550C14Rik (NM_029247.1,526-544).
gcgaatttcatttctctaa

SEQ ID NO: 738224 - DNA, 19 bp, Mus musculus
  siRNA target sequence for 4930550C14Rik (NM_029247.1,527-545).
cgaatttcatttctctaaa

SEQ ID NO: 738225 - DNA, 19 bp, Mus musculus
  siRNA target sequence for 4930550C14Rik (NM_029247.1,632-650).
ggccaaggcaacagataat

SEQ ID NO: 738226 - DNA, 19 bp, Mus musculus
  siRNA target sequence for 4930550C14Rik (NM_029247.1,634-652).
ccaaggcaacagataatga

SEQ ID NO: 738227 - DNA, 19 bp, Mus musculus
  siRNA target sequence for 4930550C14Rik (NM_029247.1,640-658).
caacagataatgagacttt

SEQ ID NO: 738228 - DNA, 19 bp, Mus musculus
  siRNA target sequence for 4930550C14Rik (NM_029247.1,655-673).
ctttaggtctaattcacaa

SEQ ID NO: 738229 - DNA, 19 bp, Mus musculus
  siRNA target sequence for 4930550C14Rik (NM_029247.1,675-693).
gcaacaaaaggcctaatca

SEQ ID NO: 738230 - DNA, 19 bp, Mus musculus
  siRNA target sequence for 4930550C14Rik (NM_029247.1,676-694).
caacaaaaggcctaatcaa

SEQ ID NO: 738231 - DNA, 19 bp, Mus musculus
  siRNA target sequence for 4930550C14Rik (NM_029247.1,686-704).
cctaatcaagagtattgaa

SEQ ID NO: 738232 - DNA, 19 bp, Mus musculus
  siRNA target sequence for 4930550C14Rik (NM_029247.1,708-726).
ggtggagtggattctgtaa

SEQ ID NO: 738233 - DNA, 19 bp, Mus musculus
  siRNA target sequence for 4930550C14Rik (NM_029247.1,757-775).
ggacaaacacactcaactt

SEQ ID NO: 738234 - DNA, 19 bp, Mus musculus
  siRNA target sequence for 4930550C14Rik (NM_029247.1,758-776).
gacaaacacactcaacttt

SEQ ID NO: 738235 - DNA, 19 bp, Mus musculus
  siRNA target sequence for 4930550C14Rik (NM_029247.1,760-778).
caaacacactcaactttga

SEQ ID NO: 738236 - DNA, 19 bp, Mus musculus
  siRNA target sequence for 4930550C14Rik (NM_029247.1,766-784).
cactcaactttgatgagta

SEQ ID NO: 738237 - DNA, 19 bp, Mus musculus
  siRNA target sequence for 4930550C14Rik (NM_029247.1,773-791).
ctttgatgagtatattgca

SEQ ID NO: 738238 - DNA, 19 bp, Mus musculus
  siRNA target sequence for 4930550C14Rik (NM_029247.1,814-832).
gcaactcttcagctaactt

SEQ ID NO: 738239 - DNA, 19 bp, Mus musculus
  siRNA target sequence for 4930550C14Rik (NM_029247.1,815-833).
caactcttcagctaactta

SEQ ID NO: 738240 - DNA, 19 bp, Mus musculus
  siRNA target sequence for 4930550C14Rik (NM_029247.1,845-863).
gcttcagcgaatacagaaa

SEQ ID NO: 738241 - DNA, 19 bp, Mus musculus
  siRNA target sequence for 4930550C14Rik (NM_029247.1,846-864).
cttcagcgaatacagaaaa

SEQ ID NO: 738242 - DNA, 19 bp, Mus musculus
  siRNA target sequence for 4930550C14Rik (NM_029247.1,909-927).
gagtcactgtacgatgatt

SEQ ID NO: 738243 - DNA, 19 bp, Mus musculus
  siRNA target sequence for 4930550C14Rik (NM_029247.1,911-929).
gtcactgtacgatgattct

SEQ ID NO: 738244 - DNA, 19 bp, Mus musculus
  siRNA target sequence for 4930550C14Rik (NM_029247.1,915-933).
ctgtacgatgattctactt

SEQ ID NO: 738245 - DNA, 19 bp, Mus musculus
  siRNA target sequence for 4930550C14Rik (NM_029247.1,920-938).
cgatgattctacttactat

SEQ ID NO: 738246 - DNA, 19 bp, Mus musculus
  siRNA target sequence for 4930550C14Rik (NM_029247.1,931-949).
cttactatgaaaatgctta

SEQ ID NO: 738247 - DNA, 19 bp, Mus musculus
  siRNA target sequence for 4930550C14Rik (NM_029247.1,952-970).
caaaacagttcactagatt

SEQ ID NO: 738248 - DNA, 19 bp, Mus musculus
  siRNA target sequence for 4930550C14Rik (NM_029247.1,967-985).
gattaacacccgattccat

SEQ ID NO: 738249 - DNA, 19 bp, Mus musculus
  siRNA target sequence for 4930553M18Rik (NM_029248.1,54-72).
gctcaatcagaagtgaatt

SEQ ID NO: 738250 - DNA, 19 bp, Mus musculus
  siRNA target sequence for 4930553M18Rik (NM_029248.1,155-173).
gtgtgctccttcacctata

SEQ ID NO: 738251 - DNA, 19 bp, Mus musculus
  siRNA target sequence for 4930553M18Rik (NM_029248.1,197-215).
gaaacgtgttactttacct

SEQ ID NO: 738252 - DNA, 19 bp, Mus musculus
  siRNA target sequence for 4930553M18Rik (NM_029248.1,214-232).
ctgcaagtgttgaaacaga

SEQ ID NO: 738253 - DNA, 19 bp, Mus musculus
  siRNA target sequence for 4930553M18Rik (NM_029248.1,216-234).
gcaagtgttgaaacagatt

SEQ ID NO: 738254 - DNA, 19 bp, Mus musculus
  siRNA target sequence for 4930553M18Rik (NM_029248.1,381-399).
ggaacgaggatcactagaa

SEQ ID NO: 738255 - DNA, 19 bp, Mus musculus
  siRNA target sequence for 4930553M18Rik (NM_029248.1,392-410).
cactagaaggtcgcaaata

SEQ ID NO: 738256 - DNA, 19 bp, Mus musculus
  siRNA target sequence for 4930553M18Rik (NM_029248.1,394-412).
ctagaaggtcgcaaataga

SEQ ID NO: 738257 - DNA, 19 bp, Mus musculus
  siRNA target sequence for 4930553M18Rik (NM_029248.1,400-418).
ggtcgcaaatagatgcaaa

SEQ ID NO: 738258 - DNA, 19 bp, Mus musculus
  siRNA target sequence for 4930553M18Rik (NM_029248.1,401-419).
gtcgcaaatagatgcaaaa

SEQ ID NO: 738259 - DNA, 19 bp, Mus musculus
  siRNA target sequence for 4930553M18Rik (NM_029248.1,403-421).
cgcaaatagatgcaaaaca

SEQ ID NO: 738260 - DNA, 19 bp, Mus musculus
  siRNA target sequence for 4930553M18Rik (NM_029248.1,534-552).
caccacattgaaaaactca

SEQ ID NO: 738261 - DNA, 19 bp, Mus musculus
  siRNA target sequence for 4930553M18Rik (NM_029248.1,738-756).
gaagacagttgcttcataa

SEQ ID NO: 738262 - DNA, 19 bp, Mus musculus
  siRNA target sequence for 4930553M18Rik (NM_029248.1,917-935).
ccagcctcgcccttttgct

SEQ ID NO: 738263 - DNA, 19 bp, Mus musculus
  siRNA target sequence for 4930563D23Rik (NM_029252.1,14-32).
ggctcgcttcacaaactgt

SEQ ID NO: 738264 - DNA, 19 bp, Mus musculus
  siRNA target sequence for 4930563D23Rik (NM_029252.1,80-98).
gagacagtgccttcagtat

SEQ ID NO: 738265 - DNA, 19 bp, Mus musculus
  siRNA target sequence for 4930563D23Rik (NM_029252.1,115-133).
cgctgcaacacaatggata

SEQ ID NO: 738266 - DNA, 19 bp, Mus musculus
  siRNA target sequence for 4930563D23Rik (NM_029252.1,129-147).
ggatacaagaccgtgtatt

SEQ ID NO: 738267 - DNA, 19 bp, Mus musculus
  siRNA target sequence for 4930563D23Rik (NM_029252.1,130-148).
gatacaagaccgtgtattt

SEQ ID NO: 738268 - DNA, 19 bp, Mus musculus
  siRNA target sequence for 4930563D23Rik (NM_029252.1,196-214).
gtgacagctattacattca

SEQ ID NO: 738269 - DNA, 19 bp, Mus musculus
  siRNA target sequence for 4930563D23Rik (NM_029252.1,198-216).
gacagctattacattcaca

SEQ ID NO: 738270 - DNA, 19 bp, Mus musculus
  siRNA target sequence for 4930563D23Rik (NM_029252.1,443-461).
ctatgtcccaacaagcatt

SEQ ID NO: 738271 - DNA, 19 bp, Mus musculus
  siRNA target sequence for 4930563D23Rik (NM_029252.1,527-545).
gcctccctactataattat

SEQ ID NO: 738272 - DNA, 19 bp, Mus musculus
  siRNA target sequence for 4930563D23Rik (NM_029252.1,529-547).
ctccctactataattatct

SEQ ID NO: 738273 - DNA, 19 bp, Mus musculus
  siRNA target sequence for 4930563D23Rik (NM_029252.1,571-589).
cttccatgaaatggtttat

SEQ ID NO: 738274 - DNA, 19 bp, Mus musculus
  siRNA target sequence for 4930563D23Rik (NM_029252.1,596-614).
caaccggaaggagttttgt

SEQ ID NO: 738275 - DNA, 19 bp, Mus musculus
  siRNA target sequence for 4930563D23Rik (NM_029252.1,624-642).
gttgacaatgtctacactt

SEQ ID NO: 738276 - DNA, 19 bp, Mus musculus
  siRNA target sequence for 4930563D23Rik (NM_029252.1,629-647).
caatgtctacacttatcga

SEQ ID NO: 738277 - DNA, 19 bp, Mus musculus
  siRNA target sequence for 4930563D23Rik (NM_029252.1,635-653).
ctacacttatcgatacata

SEQ ID NO: 738278 - DNA, 19 bp, Mus musculus
  siRNA target sequence for 4930563D23Rik (NM_029252.1,650-668).
catactcttcagtgactta

SEQ ID NO: 738279 - DNA, 19 bp, Mus musculus
  siRNA target sequence for 4930563D23Rik (NM_029252.1,673-691).
gcaaagggattgaaaaggt

SEQ ID NO: 738280 - DNA, 19 bp, Mus musculus
  siRNA target sequence for 4930563D23Rik (NM_029252.1,731-749).
caggtgggagaactattat

SEQ ID NO: 738281 - DNA, 19 bp, Mus musculus
  siRNA target sequence for 4930563D23Rik (NM_029252.1,734-752).
gtgggagaactattatctt

SEQ ID NO: 738282 - DNA, 19 bp, Mus musculus
  siRNA target sequence for 4930554C01Rik (NM_029256.1,210-228).
ggcccttctggactatcat

SEQ ID NO: 738283 - DNA, 19 bp, Mus musculus
  siRNA target sequence for 4930554C01Rik (NM_029256.1,219-237).
ggactatcatcgtgaaata

SEQ ID NO: 738284 - DNA, 19 bp, Mus musculus
  siRNA target sequence for 4930554C01Rik (NM_029256.1,247-265).
gcggtggagcgattcatgt

SEQ ID NO: 738285 - DNA, 19 bp, Mus musculus
  siRNA target sequence for 4930554C01Rik (NM_029256.1,248-266).
cggtggagcgattcatgtt

SEQ ID NO: 738286 - DNA, 19 bp, Mus musculus
  siRNA target sequence for 4930554C01Rik (NM_029256.1,253-271).
gagcgattcatgttccata

SEQ ID NO: 738287 - DNA, 19 bp, Mus musculus
  siRNA target sequence for 4930554C01Rik (NM_029256.1,256-274).
cgattcatgttccatatca

SEQ ID NO: 738288 - DNA, 19 bp, Mus musculus
  siRNA target sequence for 4930554C01Rik (NM_029256.1,336-354).
gaattggcacataaagaat

SEQ ID NO: 738289 - DNA, 19 bp, Mus musculus
  siRNA target sequence for 4930554C01Rik (NM_029256.1,341-359).
ggcacataaagaatcttat

SEQ ID NO: 738290 - DNA, 19 bp, Mus musculus
  siRNA target sequence for 4930554C01Rik (NM_029256.1,342-360).
gcacataaagaatcttata

SEQ ID NO: 738291 - DNA, 19 bp, Mus musculus
  siRNA target sequence for 4930554C01Rik (NM_029256.1,384-402).
ggatgaggcaccaatagta

SEQ ID NO: 738292 - DNA, 19 bp, Mus musculus
  siRNA target sequence for 4930554C01Rik (NM_029256.1,390-408).
ggcaccaatagtaacaaga

SEQ ID NO: 738293 - DNA, 19 bp, Mus musculus
  siRNA target sequence for 4930554C01Rik (NM_029256.1,502-520).
gagaagctatttcttgaaa

SEQ ID NO: 738294 - DNA, 19 bp, Mus musculus
  siRNA target sequence for 4930554C01Rik (NM_029256.1,573-591).
gcacgctcaactcattgtt

SEQ ID NO: 738295 - DNA, 19 bp, Mus musculus
  siRNA target sequence for 4930554C01Rik (NM_029256.1,574-592).
cacgctcaactcattgttt

SEQ ID NO: 738296 - DNA, 19 bp, Mus musculus
  siRNA target sequence for 4930554C01Rik (NM_029256.1,606-624).
catcgacacagttaaagaa

SEQ ID NO: 738297 - DNA, 19 bp, Mus musculus
  siRNA target sequence for 4930554C01Rik (NM_029256.1,633-651).
gaaaatgtcagaacagtat

SEQ ID NO: 738298 - DNA, 19 bp, Mus musculus
  siRNA target sequence for 4930554C01Rik (NM_029256.1,667-685).
gatgaaaaaaagaggatat

SEQ ID NO: 738299 - DNA, 19 bp, Mus musculus
  siRNA target sequence for 4930554C01Rik (NM_029256.1,695-713).
caatgatccaactgaaaca

SEQ ID NO: 738300 - DNA, 19 bp, Mus musculus
  siRNA target sequence for 4930554C01Rik (NM_029256.1,731-749).
cacagcacgctgtaaggtt

SEQ ID NO: 738301 - DNA, 19 bp, Mus musculus
  siRNA target sequence for 4930554C01Rik (NM_029256.1,735-753).
gcacgctgtaaggttcatt

SEQ ID NO: 738302 - DNA, 19 bp, Mus musculus
  siRNA target sequence for 4930554C01Rik (NM_029256.1,867-885).
cacggcagaaccttgtgta

SEQ ID NO: 738303 - DNA, 19 bp, Mus musculus
  siRNA target sequence for 4930554C01Rik (NM_029256.1,899-917).
gcagaggttcccttaggat

SEQ ID NO: 738304 - DNA, 19 bp, Mus musculus
  siRNA target sequence for 4930554C01Rik (NM_029256.1,983-1001).
ctgatccagtctgcataat

SEQ ID NO: 738305 - DNA, 19 bp, Mus musculus
  siRNA target sequence for 4930554C01Rik (NM_029256.1,1012-1030).
ggaccaggacaaacaaaca

SEQ ID NO: 738306 - DNA, 19 bp, Mus musculus
  siRNA target sequence for 0610038O04Rik (NM_029269.1,343-361).
gacacattggtcatgaact

SEQ ID NO: 738307 - DNA, 19 bp, Mus musculus
  siRNA target sequence for 0610038O04Rik (NM_029269.1,347-365).
cattggtcatgaacttaga

SEQ ID NO: 738308 - DNA, 19 bp, Mus musculus
  siRNA target sequence for 0610038O04Rik (NM_029269.1,578-596).
cccacagacgaagaaatga

SEQ ID NO: 738309 - DNA, 19 bp, Mus musculus
  siRNA target sequence for 0610038O04Rik (NM_029269.1,579-597).
ccacagacgaagaaatgat

SEQ ID NO: 738310 - DNA, 19 bp, Mus musculus
  siRNA target sequence for 0610038O04Rik (NM_029269.1,644-662).
gtgaccggtcacttgaaat

SEQ ID NO: 738311 - DNA, 19 bp, Mus musculus
  siRNA target sequence for 0610038O04Rik (NM_029269.1,649-667).
cggtcacttgaaatcatga

SEQ ID NO: 738312 - DNA, 19 bp, Mus musculus
  siRNA target sequence for 0610038O04Rik (NM_029269.1,712-730).
cgcagagcaagagtaaatt

SEQ ID NO: 738313 - DNA, 19 bp, Mus musculus
  siRNA target sequence for 0610025G21Rik (NM_029270.1,599-617).
cccggtggtttgtgcttaa

SEQ ID NO: 738314 - DNA, 19 bp, Mus musculus
  siRNA target sequence for 0610025G21Rik (NM_029270.1,619-637).
ggggatcagctttattatt

SEQ ID NO: 738315 - DNA, 19 bp, Mus musculus
  siRNA target sequence for 0610025G21Rik (NM_029270.1,620-638).
gggatcagctttattattt

SEQ ID NO: 738316 - DNA, 19 bp, Mus musculus
  siRNA target sequence for 0610025G21Rik (NM_029270.1,657-675).
caagcccttggggactatt

SEQ ID NO: 738317 - DNA, 19 bp, Mus musculus
  siRNA target sequence for 0610025G21Rik (NM_029270.1,660-678).
gcccttggggactattttt

SEQ ID NO: 738318 - DNA, 19 bp, Mus musculus
  siRNA target sequence for 0610025G21Rik (NM_029270.1,662-680).
ccttggggactatttttct

SEQ ID NO: 738319 - DNA, 19 bp, Mus musculus
  siRNA target sequence for 0610025G21Rik (NM_029270.1,703-721).
catccgtgcaatgaagaaa

SEQ ID NO: 738320 - DNA, 19 bp, Mus musculus
  siRNA target sequence for 0610025G21Rik (NM_029270.1,725-743).
caggaaagttccttttcga

SEQ ID NO: 738321 - DNA, 19 bp, Mus musculus
  siRNA target sequence for 0610025G21Rik (NM_029270.1,805-823).
gcgagcacccagaatgaca

SEQ ID NO: 738322 - DNA, 19 bp, Mus musculus
  siRNA target sequence for 0610025G21Rik (NM_029270.1,806-824).
cgagcacccagaatgacat

SEQ ID NO: 738323 - DNA, 19 bp, Mus musculus
  siRNA target sequence for 0610025G21Rik (NM_029270.1,840-858).
gtccatccgccgagtcata

SEQ ID NO: 738324 - DNA, 19 bp, Mus musculus
  siRNA target sequence for 0610025G21Rik (NM_029270.1,901-919).
gacacagtccgatatgaaa

SEQ ID NO: 738325 - DNA, 19 bp, Mus musculus
  siRNA target sequence for 0610025G21Rik (NM_029270.1,1109-1127).
catccctgctgaaattgta

SEQ ID NO: 738326 - DNA, 19 bp, Mus musculus
  siRNA target sequence for 0610025G21Rik (NM_029270.1,1112-1130).
ccctgctgaaattgtatct

SEQ ID NO: 738327 - DNA, 19 bp, Mus musculus
  siRNA target sequence for 0610025G21Rik (NM_029270.1,1142-1160).
cagagcccgtcgttcctta

SEQ ID NO: 738328 - DNA, 19 bp, Mus musculus
  siRNA target sequence for 0610025G21Rik (NM_029270.1,1146-1164).
gcccgtcgttccttatgca

SEQ ID NO: 738329 - DNA, 19 bp, Mus musculus
  siRNA target sequence for 0610025G21Rik (NM_029270.1,1147-1165).
cccgtcgttccttatgcaa

SEQ ID NO: 738330 - DNA, 19 bp, Mus musculus
  siRNA target sequence for 0610025G21Rik (NM_029270.1,1148-1166).
ccgtcgttccttatgcaaa

SEQ ID NO: 738331 - DNA, 19 bp, Mus musculus
  siRNA target sequence for 0610025G21Rik (NM_029270.1,1152-1170).
cgttccttatgcaaagtat

SEQ ID NO: 738332 - DNA, 19 bp, Mus musculus
  siRNA target sequence for 0610025G21Rik (NM_029270.1,1217-1235).
caggtgttaaggagctaat

SEQ ID NO: 738333 - DNA, 19 bp, Mus musculus
  siRNA target sequence for 0610025G21Rik (NM_029270.1,1219-1237).
ggtgttaaggagctaatga

SEQ ID NO: 738334 - DNA, 19 bp, Mus musculus
  siRNA target sequence for 0610025G21Rik (NM_029270.1,1220-1238).
gtgttaaggagctaatgaa

SEQ ID NO: 738335 - DNA, 19 bp, Mus musculus
  siRNA target sequence for 0610025G21Rik (NM_029270.1,1300-1318).
gatgaagtgcagtcctatt

SEQ ID NO: 738336 - DNA, 19 bp, Mus musculus
  siRNA target sequence for 0610025G21Rik (NM_029270.1,1313-1331).
cctattcaggagttaacaa

SEQ ID NO: 738337 - DNA, 19 bp, Mus musculus
  siRNA target sequence for 0610025G21Rik (NM_029270.1,1423-1441).
gtggtccagcagttaatgt

SEQ ID NO: 738338 - DNA, 19 bp, Mus musculus
  siRNA target sequence for 0610025G21Rik (NM_029270.1,1434-1452).
gttaatgtcagtgatgatt

SEQ ID NO: 738339 - DNA, 19 bp, Mus musculus
  siRNA target sequence for 0610025G21Rik (NM_029270.1,1556-1574).
gtcagttgcagaacaaaga

SEQ ID NO: 738340 - DNA, 19 bp, Mus musculus
  siRNA target sequence for 0610025G21Rik (NM_029270.1,1669-1687).
gccctatcaggcagcaaaa

SEQ ID NO: 738341 - DNA, 19 bp, Mus musculus
  siRNA target sequence for 0610025G21Rik (NM_029270.1,1706-1724).
gtatccacaagctggatat

SEQ ID NO: 738342 - DNA, 19 bp, Mus musculus
  siRNA target sequence for 0610025G21Rik (NM_029270.1,1786-1804).
gtcaccaacgggtcattca

SEQ ID NO: 738343 - DNA, 19 bp, Mus musculus
  siRNA target sequence for 0610025G21Rik (NM_029270.1,1825-1843).
gtcgagaagcctcaaacta

SEQ ID NO: 738344 - DNA, 19 bp, Mus musculus
  siRNA target sequence for 0610025G21Rik (NM_029270.1,1827-1845).
cgagaagcctcaaactact

SEQ ID NO: 738345 - DNA, 19 bp, Mus musculus
  siRNA target sequence for 0610025G21Rik (NM_029270.1,1833-1851).
gcctcaaactactcctaat

SEQ ID NO: 738346 - DNA, 19 bp, Mus musculus
  siRNA target sequence for 0610025G21Rik (NM_029270.1,1884-1902).
gaagagttctggtaccaaa

SEQ ID NO: 738347 - DNA, 19 bp, Mus musculus
  siRNA target sequence for 0610025G21Rik (NM_029270.1,1907-1925).
gcactcacagtgtacagaa

SEQ ID NO: 738348 - DNA, 19 bp, Mus musculus
  siRNA target sequence for 0610025G21Rik (NM_029270.1,1908-1926).
cactcacagtgtacagaat

SEQ ID NO: 738349 - DNA, 19 bp, Mus musculus
  siRNA target sequence for 0610025G21Rik (NM_029270.1,1931-1949).
ctgtccgcatgggtattct

SEQ ID NO: 738350 - DNA, 19 bp, Mus musculus
  siRNA target sequence for 0610025G21Rik (NM_029270.1,1933-1951).
gtccgcatgggtattctga

SEQ ID NO: 738351 - DNA, 19 bp, Mus musculus
  siRNA target sequence for 0610025G21Rik (NM_029270.1,1957-1975).
gacacactagggaattcct

SEQ ID NO: 738352 - DNA, 19 bp, Mus musculus
  siRNA target sequence for 0610025G21Rik (NM_029270.1,2014-2032).
gtgaccctgagagataaca

SEQ ID NO: 738353 - DNA, 19 bp, Mus musculus
  siRNA target sequence for 0610025G21Rik (NM_029270.1,2219-2237).
cgtgcccagagcaagactt

SEQ ID NO: 738354 - DNA, 19 bp, Mus musculus
  siRNA target sequence for 0610025G21Rik (NM_029270.1,2222-2240).
gcccagagcaagacttcta

SEQ ID NO: 738355 - DNA, 19 bp, Mus musculus
  siRNA target sequence for 0610025G21Rik (NM_029270.1,2235-2253).
cttctacgttgggaacttt

SEQ ID NO: 738356 - DNA, 19 bp, Mus musculus
  siRNA target sequence for 0610025G21Rik (NM_029270.1,2273-2291).
gcccacctcaggatgatct

SEQ ID NO: 738357 - DNA, 19 bp, Mus musculus
  siRNA target sequence for 0610025G21Rik (NM_029270.1,2275-2293).
ccacctcaggatgatcttt

SEQ ID NO: 738358 - DNA, 19 bp, Mus musculus
  siRNA target sequence for 0610025G21Rik (NM_029270.1,2304-2322).
ggactatgagaacaaaagt

SEQ ID NO: 738359 - DNA, 19 bp, Mus musculus
  siRNA target sequence for 0610025G21Rik (NM_029270.1,2369-2387).
gcgataacagcgagacatt

SEQ ID NO: 738360 - DNA, 19 bp, Mus musculus
  siRNA target sequence for 0610025G21Rik (NM_029270.1,2470-2488).
gagtatgagtccaggataa

SEQ ID NO: 738361 - DNA, 19 bp, Mus musculus
  siRNA target sequence for 0610025G21Rik (NM_029270.1,2472-2490).
gtatgagtccaggataaaa

SEQ ID NO: 738362 - DNA, 19 bp, Mus musculus
  siRNA target sequence for 0610025G21Rik (NM_029270.1,2478-2496).
gtccaggataaaaagctta

SEQ ID NO: 738363 - DNA, 19 bp, Mus musculus
  siRNA target sequence for 0610025G21Rik (NM_029270.1,2502-2520).
gcggaatttgactttggaa

SEQ ID NO: 738364 - DNA, 19 bp, Mus musculus
  siRNA target sequence for 0610025G21Rik (NM_029270.1,2551-2569).
gatcaagagaggaaaaagt

SEQ ID NO: 738365 - DNA, 19 bp, Mus musculus
  siRNA target sequence for 0610025G21Rik (NM_029270.1,2562-2580).
gaaaaagttcaccatgata

SEQ ID NO: 738366 - DNA, 19 bp, Mus musculus
  siRNA target sequence for 0610025G21Rik (NM_029270.1,2658-2676).
gcagttcttctccacattt

SEQ ID NO: 738367 - DNA, 19 bp, Mus musculus
  siRNA target sequence for Slitrk5 (NM_029273.1,348-366).
gcagaaaccatcgattatt

SEQ ID NO: 738368 - DNA, 19 bp, Mus musculus
  siRNA target sequence for Slitrk5 (NM_029273.1,446-464).
catcagtctctctgaaatt

SEQ ID NO: 738369 - DNA, 19 bp, Mus musculus
  siRNA target sequence for Slitrk5 (NM_029273.1,469-487).
ctccccgtttcccaatcta

SEQ ID NO: 738370 - DNA, 19 bp, Mus musculus
  siRNA target sequence for Slitrk5 (NM_029273.1,481-499).
caatctatcacctcttgtt

SEQ ID NO: 738371 - DNA, 19 bp, Mus musculus
  siRNA target sequence for Slitrk5 (NM_029273.1,494-512).
cttgttgtctggaaacctt

SEQ ID NO: 738372 - DNA, 19 bp, Mus musculus
  siRNA target sequence for Slitrk5 (NM_029273.1,519-537).
cgcctctatcccaatgagt

SEQ ID NO: 738373 - DNA, 19 bp, Mus musculus
  siRNA target sequence for Slitrk5 (NM_029273.1,567-585).
catctgggtagcaatgtta

SEQ ID NO: 738374 - DNA, 19 bp, Mus musculus
  siRNA target sequence for Slitrk5 (NM_029273.1,572-590).
gggtagcaatgttatccaa

SEQ ID NO: 738375 - DNA, 19 bp, Mus musculus
  siRNA target sequence for Slitrk5 (NM_029273.1,577-595).
gcaatgttatccaagacat

SEQ ID NO: 738376 - DNA, 19 bp, Mus musculus
  siRNA target sequence for Slitrk5 (NM_029273.1,578-596).
caatgttatccaagacatt

SEQ ID NO: 738377 - DNA, 19 bp, Mus musculus
  siRNA target sequence for Slitrk5 (NM_029273.1,668-686).
gcgagatgatacctttctt

SEQ ID NO: 738378 - DNA, 19 bp, Mus musculus
  siRNA target sequence for Slitrk5 (NM_029273.1,711-729).
caggtcgattacaattaca

SEQ ID NO: 738379 - DNA, 19 bp, Mus musculus
  siRNA target sequence for Slitrk5 (NM_029273.1,714-732).
gtcgattacaattacatca

SEQ ID NO: 738380 - DNA, 19 bp, Mus musculus
  siRNA target sequence for Slitrk5 (NM_029273.1,722-740).
caattacatcagtgtcatt

SEQ ID NO: 738381 - DNA, 19 bp, Mus musculus
  siRNA target sequence for Slitrk5 (NM_029273.1,779-797).
gcttatcctcaatgacaat

SEQ ID NO: 738382 - DNA, 19 bp, Mus musculus
  siRNA target sequence for Slitrk5 (NM_029273.1,803-821).
gtcaggtttacccaacaat

SEQ ID NO: 738383 - DNA, 19 bp, Mus musculus
  siRNA target sequence for Slitrk5 (NM_029273.1,807-825).
ggtttacccaacaatcttt

SEQ ID NO: 738384 - DNA, 19 bp, Mus musculus
  siRNA target sequence for Slitrk5 (NM_029273.1,894-912).
ctgttgcaacacatggata

SEQ ID NO: 738385 - DNA, 19 bp, Mus musculus
  siRNA target sequence for Slitrk5 (NM_029273.1,947-965).
gaattgctcctgtgaacta

SEQ ID NO: 738386 - DNA, 19 bp, Mus musculus
  siRNA target sequence for Slitrk5 (NM_029273.1,1122-1140).
ccacagactcctttaagca

SEQ ID NO: 738387 - DNA, 19 bp, Mus musculus
  siRNA target sequence for Slitrk5 (NM_029273.1,1138-1156).
gcaccacggggtatctaca

SEQ ID NO: 738388 - DNA, 19 bp, Mus musculus
  siRNA target sequence for Slitrk5 (NM_029273.1,1139-1157).
caccacggggtatctacat

SEQ ID NO: 738389 - DNA, 19 bp, Mus musculus
  siRNA target sequence for Slitrk5 (NM_029273.1,1163-1181).
cccagcttctgtaaactct

SEQ ID NO: 738390 - DNA, 19 bp, Mus musculus
  siRNA target sequence for Slitrk5 (NM_029273.1,1235-1253).
gacccgccagcccaacaaa

SEQ ID NO: 738391 - DNA, 19 bp, Mus musculus
  siRNA target sequence for Slitrk5 (NM_029273.1,1273-1291).
ctaggcagccctctaaaga

SEQ ID NO: 738392 - DNA, 19 bp, Mus musculus
  siRNA target sequence for Slitrk5 (NM_029273.1,1390-1408).
ctgatctgggtctcaatgt

SEQ ID NO: 738393 - DNA, 19 bp, Mus musculus
  siRNA target sequence for Slitrk5 (NM_029273.1,1392-1410).
gatctgggtctcaatgtca

SEQ ID NO: 738394 - DNA, 19 bp, Mus musculus
  siRNA target sequence for Slitrk5 (NM_029273.1,1459-1477).
cctacaatcccaagaaaat

SEQ ID NO: 738395 - DNA, 19 bp, Mus musculus
  siRNA target sequence for Slitrk5 (NM_029273.1,1478-1496).
gtacctgacagagaactat

SEQ ID NO: 738396 - DNA, 19 bp, Mus musculus
  siRNA target sequence for Slitrk5 (NM_029273.1,1613-1631).
gagacgcctctatctgaat

SEQ ID NO: 738397 - DNA, 19 bp, Mus musculus
  siRNA target sequence for Slitrk5 (NM_029273.1,1652-1670).
gagcccagaattattctat

SEQ ID NO: 738398 - DNA, 19 bp, Mus musculus
  siRNA target sequence for Slitrk5 (NM_029273.1,1761-1779).
ctgctattcttgaataaca

SEQ ID NO: 738399 - DNA, 19 bp, Mus musculus
  siRNA target sequence for Slitrk5 (NM_029273.1,1889-1907).
gctgacttccctcattcaa

SEQ ID NO: 738400 - DNA, 19 bp, Mus musculus
  siRNA target sequence for Slitrk5 (NM_029273.1,1894-1912).
cttccctcattcaaataga

SEQ ID NO: 738401 - DNA, 19 bp, Mus musculus
  siRNA target sequence for Slitrk5 (NM_029273.1,1966-1984).
ggattgagcagctcaaagt

SEQ ID NO: 738402 - DNA, 19 bp, Mus musculus
  siRNA target sequence for Slitrk5 (NM_029273.1,1995-2013).
gtggacgaagtgatctgta

SEQ ID NO: 738403 - DNA, 19 bp, Mus musculus
  siRNA target sequence for Slitrk5 (NM_029273.1,2154-2172).
gctgtgaggttgaatagca

SEQ ID NO: 738404 - DNA, 19 bp, Mus musculus
  siRNA target sequence for Slitrk5 (NM_029273.1,2330-2348).
ccacaccagtaccaacaat

SEQ ID NO: 738405 - DNA, 19 bp, Mus musculus
  siRNA target sequence for Slitrk5 (NM_029273.1,2414-2432).
ggcgggaaagccaccattt

SEQ ID NO: 738406 - DNA, 19 bp, Mus musculus
  siRNA target sequence for 2810011M08Rik (NM_029277.1,250-268).
ctgcaggacaagcgtatat

SEQ ID NO: 738407 - DNA, 19 bp, Mus musculus
  siRNA target sequence for 2810011M08Rik (NM_029277.1,253-271).
caggacaagcgtatattga

SEQ ID NO: 738408 - DNA, 19 bp, Mus musculus
  siRNA target sequence for 2810011M08Rik (NM_029277.1,273-291).
gtggagtatgattatgagt

SEQ ID NO: 738409 - DNA, 19 bp, Mus musculus
  siRNA target sequence for 2810011M08Rik (NM_029277.1,379-397).
gacctgatgagaactcaaa

SEQ ID NO: 738410 - DNA, 19 bp, Mus musculus
  siRNA target sequence for 2810011M08Rik (NM_029277.1,469-487).
caacaggactgccaaataa

SEQ ID NO: 738411 - DNA, 19 bp, Mus musculus
  siRNA target sequence for 2810011M08Rik (NM_029277.1,474-492).
ggactgccaaataactcta

SEQ ID NO: 738412 - DNA, 19 bp, Mus musculus
  siRNA target sequence for 2810011M08Rik (NM_029277.1,475-493).
gactgccaaataactctat

SEQ ID NO: 738413 - DNA, 19 bp, Mus musculus
  siRNA target sequence for 2810011M08Rik (NM_029277.1,497-515).
gacaatacagagtatgcat

SEQ ID NO: 738414 - DNA, 19 bp, Mus musculus
  siRNA target sequence for 2810011M08Rik (NM_029277.1,523-541).
gatcgacagaaaatgtgaa

SEQ ID NO: 738415 - DNA, 19 bp, Mus musculus
  siRNA target sequence for 2810011M08Rik (NM_029277.1,572-590).
gccatcgtcatctgttcaa

SEQ ID NO: 738416 - DNA, 19 bp, Mus musculus
  siRNA target sequence for 2810011M08Rik (NM_029277.1,606-624).
cgtgatgccaatcagaatt

SEQ ID NO: 738417 - DNA, 19 bp, Mus musculus
  siRNA target sequence for 2810011M08Rik (NM_029277.1,618-636).
cagaatttcggatccaatt

SEQ ID NO: 738418 - DNA, 19 bp, Mus musculus
  siRNA target sequence for 2810011M08Rik (NM_029277.1,620-638).
gaatttcggatccaattat

SEQ ID NO: 738419 - DNA, 19 bp, Mus musculus
  siRNA target sequence for 2810011M08Rik (NM_029277.1,626-644).
cggatccaattataattca

SEQ ID NO: 738420 - DNA, 19 bp, Mus musculus
  siRNA target sequence for 2810011M08Rik (NM_029277.1,671-689).
cctgacccataataatgga

SEQ ID NO: 738421 - DNA, 19 bp, Mus musculus
  siRNA target sequence for 2810011M08Rik (NM_029277.1,672-690).
ctgacccataataatggaa

SEQ ID NO: 738422 - DNA, 19 bp, Mus musculus
  siRNA target sequence for 2810011M08Rik (NM_029277.1,676-694).
cccataataatggaaagtt

SEQ ID NO: 738423 - DNA, 19 bp, Mus musculus
  siRNA target sequence for 2810011M08Rik (NM_029277.1,704-722).
ctcacattctcctaaagtt

SEQ ID NO: 738424 - DNA, 19 bp, Mus musculus
  siRNA target sequence for 2810011M08Rik (NM_029277.1,731-749).
gaataggacacgcttattt

SEQ ID NO: 738425 - DNA, 19 bp, Mus musculus
  siRNA target sequence for 2810011M08Rik (NM_029277.1,739-757).
cacgcttatttggtcattt

SEQ ID NO: 738426 - DNA, 19 bp, Mus musculus
  siRNA target sequence for 2810011M08Rik (NM_029277.1,766-784).
cagagttcttggacataga

SEQ ID NO: 738427 - DNA, 19 bp, Mus musculus
  siRNA target sequence for 2810011M08Rik (NM_029277.1,768-786).
gagttcttggacatagaga

SEQ ID NO: 738428 - DNA, 19 bp, Mus musculus
  siRNA target sequence for 2810011M08Rik (NM_029277.1,825-843).
ggagaaggctccgaaagaa

SEQ ID NO: 738429 - DNA, 19 bp, Mus musculus
  siRNA target sequence for 2810011M08Rik (NM_029277.1,904-922).
caaccacaccccctaatca

SEQ ID NO: 738430 - DNA, 19 bp, Mus musculus
  siRNA target sequence for 2810011M08Rik (NM_029277.1,933-951).
gattctccagtctatgcta

SEQ ID NO: 738431 - DNA, 19 bp, Mus musculus
  siRNA target sequence for 2810011M08Rik (NM_029277.1,949-967).
ctaacctacaggaactgaa

SEQ ID NO: 738432 - DNA, 19 bp, Mus musculus
  siRNA target sequence for 2810011M08Rik (NM_029277.1,1000-1018).
ggagcccagcaattcaagt

SEQ ID NO: 738433 - DNA, 19 bp, Mus musculus
  siRNA target sequence for 2810011M08Rik (NM_029277.1,1003-1021).
gcccagcaattcaagttaa

SEQ ID NO: 738434 - DNA, 19 bp, Mus musculus
  siRNA target sequence for 2810011M08Rik (NM_029277.1,1051-1069).
caggccgttgttactacta

SEQ ID NO: 738435 - DNA, 19 bp, Mus musculus
  siRNA target sequence for 2810011M08Rik (NM_029277.1,1053-1071).
ggccgttgttactactata

SEQ ID NO: 738436 - DNA, 19 bp, Mus musculus
  siRNA target sequence for 2810011M08Rik (NM_029277.1,1054-1072).
gccgttgttactactataa

SEQ ID NO: 738437 - DNA, 19 bp, Mus musculus
  siRNA target sequence for 2810011M08Rik (NM_029277.1,1124-1142).
gagcacaagccgagatttt

SEQ ID NO: 738438 - DNA, 19 bp, Mus musculus
  siRNA target sequence for 2810011M08Rik (NM_029277.1,1126-1144).
gcacaagccgagattttca

SEQ ID NO: 738439 - DNA, 19 bp, Mus musculus
  siRNA target sequence for 2810011M08Rik (NM_029277.1,1263-1281).
cgtgggcataccttgtata

SEQ ID NO: 738440 - DNA, 19 bp, Mus musculus
  siRNA target sequence for 2810011M08Rik (NM_029277.1,1266-1284).
gggcataccttgtatacca

SEQ ID NO: 738441 - DNA, 19 bp, Mus musculus
  siRNA target sequence for 2810011M08Rik (NM_029277.1,1277-1295).
gtataccagtgactatact

SEQ ID NO: 738442 - DNA, 19 bp, Mus musculus
  siRNA target sequence for 2810011M08Rik (NM_029277.1,1285-1303).
gtgactatactaaggaaaa

SEQ ID NO: 738443 - DNA, 19 bp, Mus musculus
  siRNA target sequence for 2810011M08Rik (NM_029277.1,1307-1325).
gctcaagcatgttgatgat

SEQ ID NO: 738444 - DNA, 19 bp, Mus musculus
  siRNA target sequence for 2810011M08Rik (NM_029277.1,1310-1328).
caagcatgttgatgatcaa

SEQ ID NO: 738445 - DNA, 19 bp, Mus musculus
  siRNA target sequence for 2810011M08Rik (NM_029277.1,1323-1341).
gatcaaggtagacagtatt

SEQ ID NO: 738446 - DNA, 19 bp, Mus musculus
  siRNA target sequence for 2810011M08Rik (NM_029277.1,1326-1344).
caaggtagacagtattact

SEQ ID NO: 738447 - DNA, 19 bp, Mus musculus
  siRNA target sequence for 2810011M08Rik (NM_029277.1,1329-1347).
ggtagacagtattactaca

SEQ ID NO: 738448 - DNA, 19 bp, Mus musculus
  siRNA target sequence for 2810011M08Rik (NM_029277.1,1373-1391).
ggaattgccaaagtataat

SEQ ID NO: 738449 - DNA, 19 bp, Mus musculus
  siRNA target sequence for 2810011M08Rik (NM_029277.1,1452-1470).
gaaccaatagtgttaacta

SEQ ID NO: 738450 - DNA, 19 bp, Mus musculus
  siRNA target sequence for 2810011M08Rik (NM_029277.1,1455-1473).
ccaatagtgttaactaaat

SEQ ID NO: 738451 - DNA, 19 bp, Mus musculus
  siRNA target sequence for 2810011M08Rik (NM_029277.1,1477-1495).
gacatagcaccattgtgtt

SEQ ID NO: 738452 - DNA, 19 bp, Mus musculus
  siRNA target sequence for 2810011M08Rik (NM_029277.1,1506-1524).
gacaagggtcaggagaaat

SEQ ID NO: 738453 - DNA, 19 bp, Mus musculus
  siRNA target sequence for 2810011M08Rik (NM_029277.1,1572-1590).
cgaaagaactggttgtctt

SEQ ID NO: 738454 - DNA, 19 bp, Mus musculus
  siRNA target sequence for 2810011M08Rik (NM_029277.1,1608-1626).
ggttcgtctttacttttta

SEQ ID NO: 738455 - DNA, 19 bp, Mus musculus
  siRNA target sequence for 2810011M08Rik (NM_029277.1,1730-1748).
caaatcgagcaagaagaat

SEQ ID NO: 738456 - DNA, 19 bp, Mus musculus
  siRNA target sequence for 2810011M08Rik (NM_029277.1,1736-1754).
gagcaagaagaatgtattt

SEQ ID NO: 738457 - DNA, 19 bp, Mus musculus
  siRNA target sequence for 2810011M08Rik (NM_029277.1,1784-1802).
gctaattcagtctgataat

SEQ ID NO: 738458 - DNA, 19 bp, Mus musculus
  siRNA target sequence for 2810011M08Rik (NM_029277.1,1795-1813).
ctgataatgatgctgttat

SEQ ID NO: 738459 - DNA, 19 bp, Mus musculus
  siRNA target sequence for 2810011M08Rik (NM_029277.1,1807-1825).
ctgttattaatgattggtt

SEQ ID NO: 738460 - DNA, 19 bp, Mus musculus
  siRNA target sequence for 2810011M08Rik (NM_029277.1,1809-1827).
gttattaatgattggttta

SEQ ID NO: 738461 - DNA, 19 bp, Mus musculus
  siRNA target sequence for 2810011M08Rik (NM_029277.1,1818-1836).
gattggtttaaagttctta

SEQ ID NO: 738462 - DNA, 19 bp, Mus musculus
  siRNA target sequence for 2810011M08Rik (NM_029277.1,1830-1848).
gttcttagtagtactatca

SEQ ID NO: 738463 - DNA, 19 bp, Mus musculus
  siRNA target sequence for 2810011M08Rik (NM_029277.1,1896-1914).
gattcaccaggggtagaaa

SEQ ID NO: 738464 - DNA, 19 bp, Mus musculus
  siRNA target sequence for 2810011M08Rik (NM_029277.1,1907-1925).
ggtagaaaagcatgataaa

SEQ ID NO: 738465 - DNA, 19 bp, Mus musculus
  siRNA target sequence for 2810011M08Rik (NM_029277.1,1937-1955).
gaaggagcttaaaaaactt

SEQ ID NO: 738466 - DNA, 19 bp, Mus musculus
  siRNA target sequence for 2810011M08Rik (NM_029277.1,1953-1971).
cttcgctcaatgaaaggat

SEQ ID NO: 738467 - DNA, 19 bp, Mus musculus
  siRNA target sequence for 2810011M08Rik (NM_029277.1,2049-2067).
gctgttcgtgagaaaggtt

SEQ ID NO: 738468 - DNA, 19 bp, Mus musculus
  siRNA target sequence for 2810011M08Rik (NM_029277.1,2052-2070).
gttcgtgagaaaggttata

SEQ ID NO: 738469 - DNA, 19 bp, Mus musculus
  siRNA target sequence for 2810011M08Rik (NM_029277.1,2055-2073).
cgtgagaaaggttatatca

SEQ ID NO: 738470 - DNA, 19 bp, Mus musculus
  siRNA target sequence for 2810011M08Rik (NM_029277.1,2056-2074).
gtgagaaaggttatatcaa

SEQ ID NO: 738471 - DNA, 19 bp, Mus musculus
  siRNA target sequence for 2810011M08Rik (NM_029277.1,2089-2107).
gatctaatcttgctaatct

SEQ ID NO: 738472 - DNA, 19 bp, Mus musculus
  siRNA target sequence for 2810011M08Rik (NM_029277.1,2128-2146).
cagtgccaaagtttgtgaa

SEQ ID NO: 738473 - DNA, 19 bp, Mus musculus
  siRNA target sequence for 2810011M08Rik (NM_029277.1,2132-2150).
gccaaagtttgtgaagtta

SEQ ID NO: 738474 - DNA, 19 bp, Mus musculus
  siRNA target sequence for 2810011M08Rik (NM_029277.1,2231-2249).
gctgaggttcgcagtcaat

SEQ ID NO: 738475 - DNA, 19 bp, Mus musculus
  siRNA target sequence for 2810011M08Rik (NM_029277.1,2234-2252).
gaggttcgcagtcaatcat

SEQ ID NO: 738476 - DNA, 19 bp, Mus musculus
  siRNA target sequence for 2810011M08Rik (NM_029277.1,2236-2254).
ggttcgcagtcaatcatga

SEQ ID NO: 738477 - DNA, 19 bp, Mus musculus
  siRNA target sequence for 2810011M08Rik (NM_029277.1,2237-2255).
gttcgcagtcaatcatgat

SEQ ID NO: 738478 - DNA, 19 bp, Mus musculus
  siRNA target sequence for 2810011M08Rik (NM_029277.1,2265-2283).
gacttgaatgacagtaaat

SEQ ID NO: 738479 - DNA, 19 bp, Mus musculus
  siRNA target sequence for 2810011M08Rik (NM_029277.1,2305-2323).
cgggagcactcaaaatgtt

SEQ ID NO: 738480 - DNA, 19 bp, Mus musculus
  siRNA target sequence for 2810011M08Rik (NM_029277.1,2306-2324).
gggagcactcaaaatgttt

SEQ ID NO: 738481 - DNA, 19 bp, Mus musculus
  siRNA target sequence for 2610033H07Rik (NM_029278.1,115-133).
ccatttgaagtgaaagtca

SEQ ID NO: 738482 - DNA, 19 bp, Mus musculus
  siRNA target sequence for 2610033H07Rik (NM_029278.1,205-223).
cgtgccatcaggaagagaa

SEQ ID NO: 738483 - DNA, 19 bp, Mus musculus
  siRNA target sequence for 2610033H07Rik (NM_029278.1,215-233).
ggaagagaacccaaacttt

SEQ ID NO: 738484 - DNA, 19 bp, Mus musculus
  siRNA target sequence for 2610033H07Rik (NM_029278.1,221-239).
gaacccaaactttactaaa

SEQ ID NO: 738485 - DNA, 19 bp, Mus musculus
  siRNA target sequence for 2610033H07Rik (NM_029278.1,224-242).
cccaaactttactaaagga

SEQ ID NO: 738486 - DNA, 19 bp, Mus musculus
  siRNA target sequence for 2610033H07Rik (NM_029278.1,230-248).
ctttactaaaggagtacaa

SEQ ID NO: 738487 - DNA, 19 bp, Mus musculus
  siRNA target sequence for 2610033H07Rik (NM_029278.1,283-301).
cgctttggggagtataata

SEQ ID NO: 738488 - DNA, 19 bp, Mus musculus
  siRNA target sequence for 2610033H07Rik (NM_029278.1,291-309).
ggagtataatagcaacata

SEQ ID NO: 738489 - DNA, 19 bp, Mus musculus
  siRNA target sequence for 2610033H07Rik (NM_029278.1,375-393).
catctacaacctaaatgaa

SEQ ID NO: 738490 - DNA, 19 bp, Mus musculus
  siRNA target sequence for 2610033H07Rik (NM_029278.1,428-446).
ctgacattgaaaagcataa

SEQ ID NO: 738491 - DNA, 19 bp, Mus musculus
  siRNA target sequence for 2610033H07Rik (NM_029278.1,521-539).
gtggtggggtccacaagaa

SEQ ID NO: 738492 - DNA, 19 bp, Mus musculus
  siRNA target sequence for 2610033H07Rik (NM_029278.1,579-597).
gacacggaaggaactgatt

SEQ ID NO: 738493 - DNA, 19 bp, Mus musculus
  siRNA target sequence for 2610033H07Rik (NM_029278.1,601-619).
gagctcattgcaaagtcaa

SEQ ID NO: 738494 - DNA, 19 bp, Mus musculus
  siRNA target sequence for 2610033H07Rik (NM_029278.1,705-723).
gattctcatgtcacgaaaa

SEQ ID NO: 738495 - DNA, 19 bp, Mus musculus
  siRNA target sequence for 2610033H07Rik (NM_029278.1,709-727).
ctcatgtcacgaaaaccta

SEQ ID NO: 738496 - DNA, 19 bp, Mus musculus
  siRNA target sequence for 2610033H07Rik (NM_029278.1,761-779).
cccagcccgatgaatatga

SEQ ID NO: 738497 - DNA, 19 bp, Mus musculus
  siRNA target sequence for 2610033H07Rik (NM_029278.1,763-781).
cagcccgatgaatatgaca

SEQ ID NO: 738498 - DNA, 19 bp, Mus musculus
  siRNA target sequence for 2610033H07Rik (NM_029278.1,767-785).
ccgatgaatatgacatgat

SEQ ID NO: 738499 - DNA, 19 bp, Mus musculus
  siRNA target sequence for 2610033H07Rik (NM_029278.1,790-808).
cgtgagcttggctttgaaa

SEQ ID NO: 738500 - DNA, 19 bp, Mus musculus
  siRNA target sequence for 2610033H07Rik (NM_029278.1,819-837).
gccctctaacaggatgaaa

SEQ ID NO: 738501 - DNA, 19 bp, Mus musculus
  siRNA target sequence for 2610033H07Rik (NM_029278.1,890-908).
ctgaaagacttcgaagaat

SEQ ID NO: 738502 - DNA, 19 bp, Mus musculus
  siRNA target sequence for 2610033H07Rik (NM_029278.1,949-967).
catacatcagcagatgatt

SEQ ID NO: 738503 - DNA, 19 bp, Mus musculus
  siRNA target sequence for 2610033H07Rik (NM_029278.1,994-1012).
gacgataggcgcttgcttt

SEQ ID NO: 738504 - DNA, 19 bp, Mus musculus
  siRNA target sequence for 2610033H07Rik (NM_029278.1,997-1015).
gataggcgcttgctttctt

SEQ ID NO: 738505 - DNA, 19 bp, Mus musculus
  siRNA target sequence for 2610033H07Rik (NM_029278.1,1001-1019).
ggcgcttgctttcttacaa

SEQ ID NO: 738506 - DNA, 19 bp, Mus musculus
  siRNA target sequence for 2610033H07Rik (NM_029278.1,1172-1190).
cagacctagaatctaatat

SEQ ID NO: 738507 - DNA, 19 bp, Mus musculus
  siRNA target sequence for 2610033H07Rik (NM_029278.1,1291-1309).
gctgagctgccctatgtct

SEQ ID NO: 738508 - DNA, 19 bp, Mus musculus
  siRNA target sequence for 2610033H07Rik (NM_029278.1,1292-1310).
ctgagctgccctatgtctt

SEQ ID NO: 738509 - DNA, 19 bp, Mus musculus
  siRNA target sequence for 2610033H07Rik (NM_029278.1,1401-1419).
gtgcaaccatccaagtctt

SEQ ID NO: 738510 - DNA, 19 bp, Mus musculus
  siRNA target sequence for 2610033H07Rik (NM_029278.1,1423-1441).
gtaggaaacaaagcaaaat

SEQ ID NO: 738511 - DNA, 19 bp, Mus musculus
  siRNA target sequence for 2610033H07Rik (NM_029278.1,1456-1474).
ggcttcctcttgcaataca

SEQ ID NO: 738512 - DNA, 19 bp, Mus musculus
  siRNA target sequence for 2610033H07Rik (NM_029278.1,1458-1476).
cttcctcttgcaatacata

SEQ ID NO: 738513 - DNA, 19 bp, Mus musculus
  siRNA target sequence for 2610033H07Rik (NM_029278.1,1504-1522).
gacctcaagaccatcgata

SEQ ID NO: 738514 - DNA, 19 bp, Mus musculus
  siRNA target sequence for 2610033H07Rik (NM_029278.1,1658-1676).
ggttggatgtgctcattta

SEQ ID NO: 738515 - DNA, 19 bp, Mus musculus
  siRNA target sequence for 2610033H07Rik (NM_029278.1,1755-1773).
ccagatgcttactaagtgt

SEQ ID NO: 738516 - DNA, 19 bp, Mus musculus
  siRNA target sequence for 2610033H07Rik (NM_029278.1,1853-1871).
ggttcatccccgagctatt

SEQ ID NO: 738517 - DNA, 19 bp, Mus musculus
  siRNA target sequence for 2610033H07Rik (NM_029278.1,1860-1878).
ccccgagctattcaatttt

SEQ ID NO: 738518 - DNA, 19 bp, Mus musculus
  siRNA target sequence for 2610033H07Rik (NM_029278.1,1862-1880).
ccgagctattcaattttct

SEQ ID NO: 738519 - DNA, 19 bp, Mus musculus
  siRNA target sequence for 2610033H07Rik (NM_029278.1,1863-1881).
cgagctattcaattttcta

SEQ ID NO: 738520 - DNA, 19 bp, Mus musculus
  siRNA target sequence for 2610033H07Rik (NM_029278.1,1866-1884).
gctattcaattttctactt

SEQ ID NO: 738521 - DNA, 19 bp, Mus musculus
  siRNA target sequence for 2610033H07Rik (NM_029278.1,1885-1903).
gggattctttatatagcaa

SEQ ID NO: 738522 - DNA, 19 bp, Mus musculus
  siRNA target sequence for 2610033H07Rik (NM_029278.1,2026-2044).
cccttgcactgggcaaata

SEQ ID NO: 738523 - DNA, 19 bp, Mus musculus
  siRNA target sequence for 2610033H07Rik (NM_029278.1,2028-2046).
cttgcactgggcaaataga

SEQ ID NO: 738524 - DNA, 19 bp, Mus musculus
  siRNA target sequence for 2610033H07Rik (NM_029278.1,2060-2078).
cagcgactgaggcaaatca

SEQ ID NO: 738525 - DNA, 19 bp, Mus musculus
  siRNA target sequence for 2610033H07Rik (NM_029278.1,2062-2080).
gcgactgaggcaaatcaca

SEQ ID NO: 738526 - DNA, 19 bp, Mus musculus
  siRNA target sequence for 2610033H07Rik (NM_029278.1,2415-2433).
caaacacaagcgggaattt

SEQ ID NO: 738527 - DNA, 19 bp, Mus musculus
  siRNA target sequence for 2610033H07Rik (NM_029278.1,2567-2585).
gtgaatggaaggctcttaa

SEQ ID NO: 738528 - DNA, 19 bp, Mus musculus
  siRNA target sequence for 2610033H07Rik (NM_029278.1,2581-2599).
cttaagaggaaaaagttca

SEQ ID NO: 738529 - DNA, 19 bp, Mus musculus
  siRNA target sequence for 2610036D13Rik (NM_029282.1,381-399).
gaaacccgcagctttgtca

SEQ ID NO: 738530 - DNA, 19 bp, Mus musculus
  siRNA target sequence for 2610036D13Rik (NM_029282.1,424-442).
cagggacttagcaccttaa

SEQ ID NO: 738531 - DNA, 19 bp, Mus musculus
  siRNA target sequence for 2610036D13Rik (NM_029282.1,428-446).
gacttagcaccttaatgca

SEQ ID NO: 738532 - DNA, 19 bp, Mus musculus
  siRNA target sequence for 2610036D13Rik (NM_029282.1,449-467).
cagcttacagggacatcat

SEQ ID NO: 738533 - DNA, 19 bp, Mus musculus
  siRNA target sequence for 2610036D13Rik (NM_029282.1,458-476).
gggacatcattctgacttt

SEQ ID NO: 738534 - DNA, 19 bp, Mus musculus
  siRNA target sequence for 2610036D13Rik (NM_029282.1,459-477).
ggacatcattctgactttt

SEQ ID NO: 738535 - DNA, 19 bp, Mus musculus
  siRNA target sequence for 2610036D13Rik (NM_029282.1,486-504).
ctccattctgcctcgttta

SEQ ID NO: 738536 - DNA, 19 bp, Mus musculus
  siRNA target sequence for 2610036D13Rik (NM_029282.1,489-507).
cattctgcctcgtttagga

SEQ ID NO: 738537 - DNA, 19 bp, Mus musculus
  siRNA target sequence for 2610036D13Rik (NM_029282.1,495-513).
gcctcgtttaggatttgct

SEQ ID NO: 738538 - DNA, 19 bp, Mus musculus
  siRNA target sequence for 2610036D13Rik (NM_029282.1,514-532).
gtgtctttactgttaggat

SEQ ID NO: 738539 - DNA, 19 bp, Mus musculus
  siRNA target sequence for 2610036D13Rik (NM_029282.1,695-713).
ctgcgctgaccagaatcat

SEQ ID NO: 738540 - DNA, 19 bp, Mus musculus
  siRNA target sequence for 2610036D13Rik (NM_029282.1,697-715).
gcgctgaccagaatcatca

SEQ ID NO: 738541 - DNA, 19 bp, Mus musculus
  siRNA target sequence for 2610036D13Rik (NM_029282.1,741-759).
cattgtcgtgtcttctcta

SEQ ID NO: 738542 - DNA, 19 bp, Mus musculus
  siRNA target sequence for 2610036D13Rik (NM_029282.1,825-843).
ccaagcaaaacctgtagtt

SEQ ID NO: 738543 - DNA, 19 bp, Mus musculus
  siRNA target sequence for 2610036D13Rik (NM_029282.1,856-874).
gcagccctgatgattcaca

SEQ ID NO: 738544 - DNA, 19 bp, Mus musculus
  siRNA target sequence for 2610036D13Rik (NM_029282.1,877-895).
gaagcagactgggtaaaaa

SEQ ID NO: 738545 - DNA, 19 bp, Mus musculus
  siRNA target sequence for 2610036D13Rik (NM_029282.1,880-898).
gcagactgggtaaaaagta

SEQ ID NO: 738546 - DNA, 19 bp, Mus musculus
  siRNA target sequence for 2610036D13Rik (NM_029282.1,1034-1052).
ccacgggacccctcttgaa

SEQ ID NO: 738547 - DNA, 19 bp, Mus musculus
  siRNA target sequence for 2610036D13Rik (NM_029282.1,1056-1074).
gttagttggcctagtgaat

SEQ ID NO: 738548 - DNA, 19 bp, Mus musculus
  siRNA target sequence for 2610036D13Rik (NM_029282.1,1063-1081).
ggcctagtgaatgatgaaa

SEQ ID NO: 738549 - DNA, 19 bp, Mus musculus
  siRNA target sequence for 2610036D13Rik (NM_029282.1,1065-1083).
cctagtgaatgatgaaagt

SEQ ID NO: 738550 - DNA, 19 bp, Mus musculus
  siRNA target sequence for 2610036D13Rik (NM_029282.1,1118-1136).
ggcgtcttgcagatcagaa

SEQ ID NO: 738551 - DNA, 19 bp, Mus musculus
  siRNA target sequence for 2610036D13Rik (NM_029282.1,1119-1137).
gcgtcttgcagatcagaaa

SEQ ID NO: 738552 - DNA, 19 bp, Mus musculus
  siRNA target sequence for 2610036D13Rik (NM_029282.1,1121-1139).
gtcttgcagatcagaaagt

SEQ ID NO: 738553 - DNA, 19 bp, Mus musculus
  siRNA target sequence for 2610036D13Rik (NM_029282.1,1127-1145).
cagatcagaaagtagtagt

SEQ ID NO: 738554 - DNA, 19 bp, Mus musculus
  siRNA target sequence for 2610036D13Rik (NM_029282.1,1156-1174).
gccttggctgacatcttgt

SEQ ID NO: 738555 - DNA, 19 bp, Mus musculus
  siRNA target sequence for 2610036D13Rik (NM_029282.1,1260-1278).
gttacttgggtatctgaaa

SEQ ID NO: 738556 - DNA, 19 bp, Mus musculus
  siRNA target sequence for 2610036D13Rik (NM_029282.1,1287-1305).
ccccaaagtgcatgtgatt

SEQ ID NO: 738557 - DNA, 19 bp, Mus musculus
  siRNA target sequence for 2610036D13Rik (NM_029282.1,1460-1478).
gagtccagaggcgatactt

SEQ ID NO: 738558 - DNA, 19 bp, Mus musculus
  siRNA target sequence for 2610036D13Rik (NM_029282.1,1526-1544).
gtcagctcctgggttatta

SEQ ID NO: 738559 - DNA, 19 bp, Mus musculus
  siRNA target sequence for 2610036D13Rik (NM_029282.1,1612-1630).
caagctgccatgatcctta

SEQ ID NO: 738560 - DNA, 19 bp, Mus musculus
  siRNA target sequence for 2610036D13Rik (NM_029282.1,1619-1637).
ccatgatccttaatgaact

SEQ ID NO: 738561 - DNA, 19 bp, Mus musculus
  siRNA target sequence for 2610036D13Rik (NM_029282.1,1712-1730).
gagagattgtgaaatctat

SEQ ID NO: 738562 - DNA, 19 bp, Mus musculus
  siRNA target sequence for 2610036D13Rik (NM_029282.1,1764-1782).
cttgattacctgttttgaa

SEQ ID NO: 738563 - DNA, 19 bp, Mus musculus
  siRNA target sequence for 2610036D13Rik (NM_029282.1,1845-1863).
ccacacctgccaagttgta

SEQ ID NO: 738564 - DNA, 19 bp, Mus musculus
  siRNA target sequence for 2610036D13Rik (NM_029282.1,1850-1868).
cctgccaagttgtatcttt

SEQ ID NO: 738565 - DNA, 19 bp, Mus musculus
  siRNA target sequence for 2610036D13Rik (NM_029282.1,1946-1964).
ggattggccagtttgcata

SEQ ID NO: 738566 - DNA, 19 bp, Mus musculus
  siRNA target sequence for 2610036D13Rik (NM_029282.1,2000-2018).
cagctctctatccaatact

SEQ ID NO: 738567 - DNA, 19 bp, Mus musculus
  siRNA target sequence for 2610036D13Rik (NM_029282.1,2029-2047).
ggagatccaaccttgctta

SEQ ID NO: 738568 - DNA, 19 bp, Mus musculus
  siRNA target sequence for 2610036D13Rik (NM_029282.1,2030-2048).
gagatccaaccttgcttat

SEQ ID NO: 738569 - DNA, 19 bp, Mus musculus
  siRNA target sequence for 2610036D13Rik (NM_029282.1,2032-2050).
gatccaaccttgcttatta

SEQ ID NO: 738570 - DNA, 19 bp, Mus musculus
  siRNA target sequence for 2610036D13Rik (NM_029282.1,2063-2081).
ctagcaccatggtagatat

SEQ ID NO: 738571 - DNA, 19 bp, Mus musculus
  siRNA target sequence for 2610036D13Rik (NM_029282.1,2096-2114).
gctacaactctgtacaaca

SEQ ID NO: 738572 - DNA, 19 bp, Mus musculus
  siRNA target sequence for 2610036D13Rik (NM_029282.1,2142-2160).
ggtgaatggaatctcttta

SEQ ID NO: 738573 - DNA, 19 bp, Mus musculus
  siRNA target sequence for 2610036D13Rik (NM_029282.1,2145-2163).
gaatggaatctctttaaat

SEQ ID NO: 738574 - DNA, 19 bp, Mus musculus
  siRNA target sequence for 2610036D13Rik (NM_029282.1,2277-2295).
caccctggaccaattttat

SEQ ID NO: 738575 - DNA, 19 bp, Mus musculus
  siRNA target sequence for 2610036D13Rik (NM_029282.1,2279-2297).
ccctggaccaattttatga

SEQ ID NO: 738576 - DNA, 19 bp, Mus musculus
  siRNA target sequence for 2610036D13Rik (NM_029282.1,2284-2302).
gaccaattttatgataaga

SEQ ID NO: 738577 - DNA, 19 bp, Mus musculus
  siRNA target sequence for 2610036D13Rik (NM_029282.1,2286-2304).
ccaattttatgataagaga

SEQ ID NO: 738578 - DNA, 19 bp, Mus musculus
  siRNA target sequence for 2610036D13Rik (NM_029282.1,2361-2379).
cccagactcgggttctact

SEQ ID NO: 738579 - DNA, 19 bp, Mus musculus
  siRNA target sequence for 2610036D13Rik (NM_029282.1,2388-2406).
ccaacagcgtagtttagaa

SEQ ID NO: 738580 - DNA, 19 bp, Mus musculus
  siRNA target sequence for 2610036D13Rik (NM_029282.1,2650-2668).
cacttgtcagcagataaaa

SEQ ID NO: 738581 - DNA, 19 bp, Mus musculus
  siRNA target sequence for 2610036D13Rik (NM_029282.1,2652-2670).
cttgtcagcagataaaaat

SEQ ID NO: 738582 - DNA, 19 bp, Mus musculus
  siRNA target sequence for 2610036D13Rik (NM_029282.1,2657-2675).
cagcagataaaaatctgaa

SEQ ID NO: 738583 - DNA, 19 bp, Mus musculus
  siRNA target sequence for 2610036D13Rik (NM_029282.1,2776-2794).
ctcgtacaccgacttacaa

SEQ ID NO: 738584 - DNA, 19 bp, Mus musculus
  siRNA target sequence for 2610036D13Rik (NM_029282.1,2778-2796).
cgtacaccgacttacaagt

SEQ ID NO: 738585 - DNA, 19 bp, Mus musculus
  siRNA target sequence for 2610036D13Rik (NM_029282.1,2819-2837).
gagccttcaaggttttaca

SEQ ID NO: 738586 - DNA, 19 bp, Mus musculus
  siRNA target sequence for 2610036D13Rik (NM_029282.1,2821-2839).
gccttcaaggttttacaga

SEQ ID NO: 738587 - DNA, 19 bp, Mus musculus
  siRNA target sequence for 2610036D13Rik (NM_029282.1,2866-2884).
ctccggagtcggttctgta

SEQ ID NO: 738588 - DNA, 19 bp, Mus musculus
  siRNA target sequence for 2610036D13Rik (NM_029282.1,2868-2886).
ccggagtcggttctgtaaa

SEQ ID NO: 738589 - DNA, 19 bp, Mus musculus
  siRNA target sequence for 2610036D13Rik (NM_029282.1,2871-2889).
gagtcggttctgtaaagat

SEQ ID NO: 738590 - DNA, 19 bp, Mus musculus
  siRNA target sequence for 2610036D13Rik (NM_029282.1,2873-2891).
gtcggttctgtaaagatgt

SEQ ID NO: 738591 - DNA, 19 bp, Mus musculus
  siRNA target sequence for 2610036D13Rik (NM_029282.1,2939-2957).
ccagggctggaccagttta

SEQ ID NO: 738592 - DNA, 19 bp, Mus musculus
  siRNA target sequence for 2610036D13Rik (NM_029282.1,2940-2958).
cagggctggaccagtttat

SEQ ID NO: 738593 - DNA, 19 bp, Mus musculus
  siRNA target sequence for 2610036D13Rik (NM_029282.1,3035-3053).
gtgagggtgacctgaataa

SEQ ID NO: 738594 - DNA, 19 bp, Mus musculus
  siRNA target sequence for 2610036D13Rik (NM_029282.1,3086-3104).
ccaaacagcccgtgaaatt

SEQ ID NO: 738595 - DNA, 19 bp, Mus musculus
  siRNA target sequence for 2610036D13Rik (NM_029282.1,3087-3105).
caaacagcccgtgaaatta

SEQ ID NO: 738596 - DNA, 19 bp, Mus musculus
  siRNA target sequence for 1700001C02Rik (NM_029285.1,158-176).
ggcaacaccaccttcaagt

SEQ ID NO: 738597 - DNA, 19 bp, Mus musculus
  siRNA target sequence for 1700001C02Rik (NM_029285.1,266-284).
cccctggttctgactgata

SEQ ID NO: 738598 - DNA, 19 bp, Mus musculus
  siRNA target sequence for 1700001C02Rik (NM_029285.1,357-375).
ctgagctcactaactttta

SEQ ID NO: 738599 - DNA, 19 bp, Mus musculus
  siRNA target sequence for 1700001C02Rik (NM_029285.1,359-377).
gagctcactaacttttaca

SEQ ID NO: 738600 - DNA, 19 bp, Mus musculus
  siRNA target sequence for 1700001C02Rik (NM_029285.1,385-403).
ccagcagcagcggaagtat

SEQ ID NO: 738601 - DNA, 19 bp, Mus musculus
  siRNA target sequence for 1700001C02Rik (NM_029285.1,391-409).
gcagcggaagtattaccaa

SEQ ID NO: 738602 - DNA, 19 bp, Mus musculus
  siRNA target sequence for 1700001C02Rik (NM_029285.1,429-447).
cccgtgttccttactttgt

SEQ ID NO: 738603 - DNA, 19 bp, Mus musculus
  siRNA target sequence for 1700001C02Rik (NM_029285.1,430-448).
ccgtgttccttactttgta

SEQ ID NO: 738604 - DNA, 19 bp, Mus musculus
  siRNA target sequence for 1700001C02Rik (NM_029285.1,432-450).
gtgttccttactttgtact

SEQ ID NO: 738605 - DNA, 19 bp, Mus musculus
  siRNA target sequence for 1700001C02Rik (NM_029285.1,517-535).
gtggaacctactaagatta

SEQ ID NO: 738606 - DNA, 19 bp, Mus musculus
  siRNA target sequence for 1700001C02Rik (NM_029285.1,531-549).
gattatcccctgactacaa

SEQ ID NO: 738607 - DNA, 19 bp, Mus musculus
  siRNA target sequence for 1700001C02Rik (NM_029285.1,600-618).
gccaaaggcgggaccttta

SEQ ID NO: 738608 - DNA, 19 bp, Mus musculus
  siRNA target sequence for 1700001C02Rik (NM_029285.1,602-620).
caaaggcgggacctttact

SEQ ID NO: 738609 - DNA, 19 bp, Mus musculus
  siRNA target sequence for 1700011I11Rik (NM_029291.1,140-158).
gaaggcagaccggtatttt

SEQ ID NO: 738610 - DNA, 19 bp, Mus musculus
  siRNA target sequence for 1700011I11Rik (NM_029291.1,144-162).
gcagaccggtattttgtgt

SEQ ID NO: 738611 - DNA, 19 bp, Mus musculus
  siRNA target sequence for 1700011I11Rik (NM_029291.1,145-163).
cagaccggtattttgtgtt

SEQ ID NO: 738612 - DNA, 19 bp, Mus musculus
  siRNA target sequence for 1700011I11Rik (NM_029291.1,220-238).
gtgccaacttcgtagctaa

SEQ ID NO: 738613 - DNA, 19 bp, Mus musculus
  siRNA target sequence for 1700011I11Rik (NM_029291.1,223-241).
ccaacttcgtagctaatga

SEQ ID NO: 738614 - DNA, 19 bp, Mus musculus
  siRNA target sequence for 1700011I11Rik (NM_029291.1,257-275).
ggccttgcctcacgataaa

SEQ ID NO: 738615 - DNA, 19 bp, Mus musculus
  siRNA target sequence for 1700011I11Rik (NM_029291.1,258-276).
gccttgcctcacgataaat

SEQ ID NO: 738616 - DNA, 19 bp, Mus musculus
  siRNA target sequence for 1700011I11Rik (NM_029291.1,259-277).
ccttgcctcacgataaatt

SEQ ID NO: 738617 - DNA, 19 bp, Mus musculus
  siRNA target sequence for 1700011I11Rik (NM_029291.1,335-353).
ctatgtaccccgaaagttt

SEQ ID NO: 738618 - DNA, 19 bp, Mus musculus
  siRNA target sequence for 1700011I11Rik (NM_029291.1,439-457).
ccacgcacaaggaatccaa

SEQ ID NO: 738619 - DNA, 19 bp, Mus musculus
  siRNA target sequence for 1700011I11Rik (NM_029291.1,486-504).
ggagaaatcctctacaaca

SEQ ID NO: 738620 - DNA, 19 bp, Mus musculus
  siRNA target sequence for 1700011I11Rik (NM_029291.1,539-557).
ctgtgtgctctttggaaaa

SEQ ID NO: 738621 - DNA, 19 bp, Mus musculus
  siRNA target sequence for 1700011I11Rik (NM_029291.1,601-619).
cccagcagccaagttacta

SEQ ID NO: 738622 - DNA, 19 bp, Mus musculus
  siRNA target sequence for 1700011I11Rik (NM_029291.1,602-620).
ccagcagccaagttactat

SEQ ID NO: 738623 - DNA, 19 bp, Mus musculus
  siRNA target sequence for 1700011I11Rik (NM_029291.1,603-621).
cagcagccaagttactata

SEQ ID NO: 738624 - DNA, 19 bp, Mus musculus
  siRNA target sequence for 1700011I11Rik (NM_029291.1,605-623).
gcagccaagttactatact

SEQ ID NO: 738625 - DNA, 19 bp, Mus musculus
  siRNA target sequence for 1700011I11Rik (NM_029291.1,651-669).
cttcaggtcttcagcaata

SEQ ID NO: 738626 - DNA, 19 bp, Mus musculus
  siRNA target sequence for 1700011I11Rik (NM_029291.1,706-724).
gcaccacaccccagaaact

SEQ ID NO: 738627 - DNA, 19 bp, Mus musculus
  siRNA target sequence for 1700011I11Rik (NM_029291.1,853-871).
ccttccagaaacatgactt

SEQ ID NO: 738628 - DNA, 19 bp, Mus musculus
  siRNA target sequence for 1700011I11Rik (NM_029291.1,878-896).
cagactagcttccttttat

SEQ ID NO: 738629 - DNA, 19 bp, Mus musculus
  siRNA target sequence for 1700011I11Rik (NM_029291.1,880-898).
gactagcttccttttatga

SEQ ID NO: 738630 - DNA, 19 bp, Mus musculus
  siRNA target sequence for 1700011I11Rik (NM_029291.1,911-929).
ggaattggagtctgcaatt

SEQ ID NO: 738631 - DNA, 19 bp, Mus musculus
  siRNA target sequence for 1700011I11Rik (NM_029291.1,912-930).
gaattggagtctgcaatta

SEQ ID NO: 738632 - DNA, 19 bp, Mus musculus
  siRNA target sequence for 1700011I11Rik (NM_029291.1,1089-1107).
gaagaattccttcaaatct

SEQ ID NO: 738633 - DNA, 19 bp, Mus musculus
  siRNA target sequence for 1700011I11Rik (NM_029291.1,1140-1158).
cgtgactacgacacattct

SEQ ID NO: 738634 - DNA, 19 bp, Mus musculus
  siRNA target sequence for 1700011I11Rik (NM_029291.1,1161-1179).
cctgtagctgaagatatca

SEQ ID NO: 738635 - DNA, 19 bp, Mus musculus
  siRNA target sequence for 1700011I11Rik (NM_029291.1,1260-1278).
ggggttgacagacagaaaa

SEQ ID NO: 738636 - DNA, 19 bp, Mus musculus
  siRNA target sequence for 1700011I11Rik (NM_029291.1,1300-1318).
caagggccaagggttctaa

SEQ ID NO: 738637 - DNA, 19 bp, Mus musculus
  siRNA target sequence for 1700011I11Rik (NM_029291.1,1303-1321).
gggccaagggttctaataa

SEQ ID NO: 738638 - DNA, 19 bp, Mus musculus
  siRNA target sequence for 1700011I11Rik (NM_029291.1,1304-1322).
ggccaagggttctaataat

SEQ ID NO: 738639 - DNA, 19 bp, Mus musculus
  siRNA target sequence for 1700011I11Rik (NM_029291.1,1306-1324).
ccaagggttctaataatga

SEQ ID NO: 738640 - DNA, 19 bp, Mus musculus
  siRNA target sequence for 1700011I11Rik (NM_029291.1,1307-1325).
caagggttctaataatgaa

SEQ ID NO: 738641 - DNA, 19 bp, Mus musculus
  siRNA target sequence for 1700011I11Rik (NM_029291.1,1484-1502).
cctcggcgagggctttatt

SEQ ID NO: 738642 - DNA, 19 bp, Mus musculus
  siRNA target sequence for 1700011I11Rik (NM_029291.1,1590-1608).
ctggaccgaggcctagaaa

SEQ ID NO: 738643 - DNA, 19 bp, Mus musculus
  siRNA target sequence for 1700011I11Rik (NM_029291.1,1642-1660).
catctcgtcacaacatctt

SEQ ID NO: 738644 - DNA, 19 bp, Mus musculus
  siRNA target sequence for 1700011I11Rik (NM_029291.1,1658-1676).
cttccagaacgatgagttt

SEQ ID NO: 738645 - DNA, 19 bp, Mus musculus
  siRNA target sequence for 1700011I11Rik (NM_029291.1,1786-1804).
ggcagcgctaccagaagta

SEQ ID NO: 738646 - DNA, 19 bp, Mus musculus
  siRNA target sequence for 1700011I11Rik (NM_029291.1,1871-1889).
gtatgacgacacatacgat

SEQ ID NO: 738647 - DNA, 19 bp, Mus musculus
  siRNA target sequence for 1700011I11Rik (NM_029291.1,2040-2058).
cccaagccagaccatttca

SEQ ID NO: 738648 - DNA, 19 bp, Mus musculus
  siRNA target sequence for 1700011I11Rik (NM_029291.1,2138-2156).
gaactccacggcagtaaca

SEQ ID NO: 738649 - DNA, 19 bp, Mus musculus
  siRNA target sequence for 1700008F21Rik (NM_029292.1,387-405).
gctaatcgagtgactatga

SEQ ID NO: 738650 - DNA, 19 bp, Mus musculus
  siRNA target sequence for 1700008F21Rik (NM_029292.1,388-406).
ctaatcgagtgactatgat

SEQ ID NO: 738651 - DNA, 19 bp, Mus musculus
  siRNA target sequence for 1700008F21Rik (NM_029292.1,393-411).
cgagtgactatgatgatga

SEQ ID NO: 738652 - DNA, 19 bp, Mus musculus
  siRNA target sequence for 1700008F21Rik (NM_029292.1,432-450).
gctatgttacacaaagctt

SEQ ID NO: 738653 - DNA, 19 bp, Mus musculus
  siRNA target sequence for 1700008F21Rik (NM_029292.1,527-545).
cctgctagaaggtgaaata

SEQ ID NO: 738654 - DNA, 19 bp, Mus musculus
  siRNA target sequence for 1700008F21Rik (NM_029292.1,583-601).
ccaaattagagcgaactaa

SEQ ID NO: 738655 - DNA, 19 bp, Mus musculus
  siRNA target sequence for 1700008F21Rik (NM_029292.1,812-830).
ggttaagattgaagattca

SEQ ID NO: 738656 - DNA, 19 bp, Mus musculus
  siRNA target sequence for 1700008F21Rik (NM_029292.1,818-836).
gattgaagattcaaaggat

SEQ ID NO: 738657 - DNA, 19 bp, Mus musculus
  siRNA target sequence for 1700008F21Rik (NM_029292.1,890-908).
ctcatctgatcaaagtaaa

SEQ ID NO: 738658 - DNA, 19 bp, Mus musculus
  siRNA target sequence for 1700001L23Rik (NM_029299.1,52-70).
gatcattacaacatggatt

SEQ ID NO: 738659 - DNA, 19 bp, Mus musculus
  siRNA target sequence for 1700001L23Rik (NM_029299.1,60-78).
caacatggattatgtacat

SEQ ID NO: 738660 - DNA, 19 bp, Mus musculus
  siRNA target sequence for 1700001L23Rik (NM_029299.1,117-135).
gggtgaactcggacattga

SEQ ID NO: 738661 - DNA, 19 bp, Mus musculus
  siRNA target sequence for 1700001L23Rik (NM_029299.1,118-136).
ggtgaactcggacattgaa

SEQ ID NO: 738662 - DNA, 19 bp, Mus musculus
  siRNA target sequence for 1700001L23Rik (NM_029299.1,121-139).
gaactcggacattgaagtt

SEQ ID NO: 738663 - DNA, 19 bp, Mus musculus
  siRNA target sequence for 1700001L23Rik (NM_029299.1,124-142).
ctcggacattgaagttgaa

SEQ ID NO: 738664 - DNA, 19 bp, Mus musculus
  siRNA target sequence for 1700001L23Rik (NM_029299.1,166-184).
gcagcactggttgaacaaa

SEQ ID NO: 738665 - DNA, 19 bp, Mus musculus
  siRNA target sequence for 1700001L23Rik (NM_029299.1,167-185).
cagcactggttgaacaaaa

SEQ ID NO: 738666 - DNA, 19 bp, Mus musculus
  siRNA target sequence for 1700001L23Rik (NM_029299.1,312-330).
cagacccgagtcaagaagt

SEQ ID NO: 738667 - DNA, 19 bp, Mus musculus
  siRNA target sequence for 1700001L23Rik (NM_029299.1,366-384).
ggagccacacccgtatctt

SEQ ID NO: 738668 - DNA, 19 bp, Mus musculus
  siRNA target sequence for 1700001L23Rik (NM_029299.1,412-430).
cgtcatgcaggaacgaata

SEQ ID NO: 738669 - DNA, 19 bp, Mus musculus
  siRNA target sequence for 1700001L23Rik (NM_029299.1,415-433).
catgcaggaacgaatagat

SEQ ID NO: 738670 - DNA, 19 bp, Mus musculus
  siRNA target sequence for 1700001L23Rik (NM_029299.1,418-436).
gcaggaacgaatagatcaa

SEQ ID NO: 738671 - DNA, 19 bp, Mus musculus
  siRNA target sequence for 1700001L23Rik (NM_029299.1,439-457).
gagacgaagcgtatctcat

SEQ ID NO: 738672 - DNA, 19 bp, Mus musculus
  siRNA target sequence for 1700001L23Rik (NM_029299.1,444-462).
gaagcgtatctcatctcat

SEQ ID NO: 738673 - DNA, 19 bp, Mus musculus
  siRNA target sequence for 1700001L23Rik (NM_029299.1,460-478).
catgtgtgactcgtacaat

SEQ ID NO: 738674 - DNA, 19 bp, Mus musculus
  siRNA target sequence for 1700001L23Rik (NM_029299.1,463-481).
gtgtgactcgtacaatgat

SEQ ID NO: 738675 - DNA, 19 bp, Mus musculus
  siRNA target sequence for 1700009P17Rik (NM_029301.1,356-374).
gccaggccaacgaaagaga

SEQ ID NO: 738676 - DNA, 19 bp, Mus musculus
  siRNA target sequence for 1700009P17Rik (NM_029301.1,360-378).
ggccaacgaaagagaaaat

SEQ ID NO: 738677 - DNA, 19 bp, Mus musculus
  siRNA target sequence for 1700009P17Rik (NM_029301.1,552-570).
gacaacctcaccaaatgga

SEQ ID NO: 738678 - DNA, 19 bp, Mus musculus
  siRNA target sequence for 1700009P17Rik (NM_029301.1,554-572).
caacctcaccaaatggata

SEQ ID NO: 738679 - DNA, 19 bp, Mus musculus
  siRNA target sequence for 1700009P17Rik (NM_029301.1,606-624).
gggctgcgtcctgaaatct

SEQ ID NO: 738680 - DNA, 19 bp, Mus musculus
  siRNA target sequence for 1700009P17Rik (NM_029301.1,608-626).
gctgcgtcctgaaatctca

SEQ ID NO: 738681 - DNA, 19 bp, Mus musculus
  siRNA target sequence for 1700009P17Rik (NM_029301.1,674-692).
caccaagactgtacaacaa

SEQ ID NO: 738682 - DNA, 19 bp, Mus musculus
  siRNA target sequence for 1700009P17Rik (NM_029301.1,716-734).
cagctccccggttatccaa

SEQ ID NO: 738683 - DNA, 19 bp, Mus musculus
  siRNA target sequence for 1700009P17Rik (NM_029301.1,825-843).
cctccgagcccttgtaaga

SEQ ID NO: 738684 - DNA, 19 bp, Mus musculus
  siRNA target sequence for Pfn3 (NM_029303.1,407-425).
catggaggcatcctcaata

SEQ ID NO: 738685 - DNA, 19 bp, Mus musculus
  siRNA target sequence for Pfn3 (NM_029303.1,410-428).
ggaggcatcctcaataaga

SEQ ID NO: 738686 - DNA, 19 bp, Mus musculus
  siRNA target sequence for 1700012B09Rik (NM_029306.1,214-232).
gaaccgcataagagaatca

SEQ ID NO: 738687 - DNA, 19 bp, Mus musculus
  siRNA target sequence for 1700012B09Rik (NM_029306.1,244-262).
gaagaagaactttcaatca

SEQ ID NO: 738688 - DNA, 19 bp, Mus musculus
  siRNA target sequence for 1700010H22Rik (NM_029312.1,297-315).
caagtttcgtgcacatgaa

SEQ ID NO: 738689 - DNA, 19 bp, Mus musculus
  siRNA target sequence for 1700010H22Rik (NM_029312.1,334-352).
cactgggacccttactctt

SEQ ID NO: 738690 - DNA, 19 bp, Mus musculus
  siRNA target sequence for 1700010H22Rik (NM_029312.1,338-356).
gggacccttactcttcaat

SEQ ID NO: 738691 - DNA, 19 bp, Mus musculus
  siRNA target sequence for 1700010H22Rik (NM_029312.1,382-400).
gtgctgatgggagatagtt

SEQ ID NO: 738692 - DNA, 19 bp, Mus musculus
  siRNA target sequence for 1700010H22Rik (NM_029312.1,384-402).
gctgatgggagatagttta

SEQ ID NO: 738693 - DNA, 19 bp, Mus musculus
  siRNA target sequence for 1700010H22Rik (NM_029312.1,392-410).
gagatagtttaccttcaaa

SEQ ID NO: 738694 - DNA, 19 bp, Mus musculus
  siRNA target sequence for 1700010H22Rik (NM_029312.1,403-421).
ccttcaaattttttcaagt

SEQ ID NO: 738695 - DNA, 19 bp, Mus musculus
  siRNA target sequence for 1700010H22Rik (NM_029312.1,462-480).
gcccctcatgctaaagaga

SEQ ID NO: 738696 - DNA, 19 bp, Mus musculus
  siRNA target sequence for D14Ertd581e (NM_029320.1,378-396).
ctatggttatggtgctaat

SEQ ID NO: 738697 - DNA, 19 bp, Mus musculus
  siRNA target sequence for D14Ertd581e (NM_029320.1,407-425).
cagctaaaagacgactaaa

SEQ ID NO: 738698 - DNA, 19 bp, Mus musculus
  siRNA target sequence for D14Ertd581e (NM_029320.1,416-434).
gacgactaaagcaaagtgt

SEQ ID NO: 738699 - DNA, 19 bp, Mus musculus
  siRNA target sequence for D14Ertd581e (NM_029320.1,435-453).
ccacttggcaagaagagtt

SEQ ID NO: 738700 - DNA, 19 bp, Mus musculus
  siRNA target sequence for D14Ertd581e (NM_029320.1,499-517).
catcaaaagaaccaagtaa

SEQ ID NO: 738701 - DNA, 19 bp, Mus musculus
  siRNA target sequence for D14Ertd581e (NM_029320.1,534-552).
gcttgacagagccaattca

SEQ ID NO: 738702 - DNA, 19 bp, Mus musculus
  siRNA target sequence for D14Ertd581e (NM_029320.1,542-560).
gagccaattcactgttgaa

SEQ ID NO: 738703 - DNA, 19 bp, Mus musculus
  siRNA target sequence for D14Ertd581e (NM_029320.1,566-584).
ctcagcagccctacagata

SEQ ID NO: 738704 - DNA, 19 bp, Mus musculus
  siRNA target sequence for D14Ertd581e (NM_029320.1,738-756).
cagtcaccgcgaggaattt

SEQ ID NO: 738705 - DNA, 19 bp, Mus musculus
  siRNA target sequence for D14Ertd581e (NM_029320.1,765-783).
gaagcagatcatcattaat

SEQ ID NO: 738706 - DNA, 19 bp, Mus musculus
  siRNA target sequence for D14Ertd581e (NM_029320.1,769-787).
cagatcatcattaatatgt

SEQ ID NO: 738707 - DNA, 19 bp, Mus musculus
  siRNA target sequence for D14Ertd581e (NM_029320.1,777-795).
cattaatatgtgtagtaaa

SEQ ID NO: 738708 - DNA, 19 bp, Mus musculus
  siRNA target sequence for D14Ertd581e (NM_029320.1,904-922).
cccaagccaacgctcttta

SEQ ID NO: 738709 - DNA, 19 bp, Mus musculus
  siRNA target sequence for D14Ertd581e (NM_029320.1,906-924).
caagccaacgctctttact

SEQ ID NO: 738710 - DNA, 19 bp, Mus musculus
  siRNA target sequence for D14Ertd581e (NM_029320.1,909-927).
gccaacgctctttactaaa

SEQ ID NO: 738711 - DNA, 19 bp, Mus musculus
  siRNA target sequence for D14Ertd581e (NM_029320.1,910-928).
ccaacgctctttactaaaa

SEQ ID NO: 738712 - DNA, 19 bp, Mus musculus
  siRNA target sequence for D14Ertd581e (NM_029320.1,914-932).
cgctctttactaaaaagga

SEQ ID NO: 738713 - DNA, 19 bp, Mus musculus
  siRNA target sequence for D14Ertd581e (NM_029320.1,915-933).
gctctttactaaaaaggaa

SEQ ID NO: 738714 - DNA, 19 bp, Mus musculus
  siRNA target sequence for 1700019G17Rik (NM_029331.2,1132-1150).
gcatagccacaaggttaat

SEQ ID NO: 738715 - DNA, 19 bp, Mus musculus
  siRNA target sequence for 1700026D08Rik (NM_029335.1,55-73).
gcaactggaacgaagatgt

SEQ ID NO: 738716 - DNA, 19 bp, Mus musculus
  siRNA target sequence for 1700026D08Rik (NM_029335.1,59-77).
ctggaacgaagatgtctat

SEQ ID NO: 738717 - DNA, 19 bp, Mus musculus
  siRNA target sequence for 1700026D08Rik (NM_029335.1,61-79).
ggaacgaagatgtctattt

SEQ ID NO: 738718 - DNA, 19 bp, Mus musculus
  siRNA target sequence for 1700026D08Rik (NM_029335.1,187-205).
cggtatcggaagatggata

SEQ ID NO: 738719 - DNA, 19 bp, Mus musculus
  siRNA target sequence for 1700026D08Rik (NM_029335.1,188-206).
ggtatcggaagatggatat

SEQ ID NO: 738720 - DNA, 19 bp, Mus musculus
  siRNA target sequence for 1700026D08Rik (NM_029335.1,210-228).
cactatggcgataaagtga

SEQ ID NO: 738721 - DNA, 19 bp, Mus musculus
  siRNA target sequence for 1700026D08Rik (NM_029335.1,217-235).
gcgataaagtgatcattgt

SEQ ID NO: 738722 - DNA, 19 bp, Mus musculus
  siRNA target sequence for 1700026D08Rik (NM_029335.1,283-301).
gagacctgagcctgtgtat

SEQ ID NO: 738723 - DNA, 19 bp, Mus musculus
  siRNA target sequence for 1700026D08Rik (NM_029335.1,298-316).
gtatgagcccagatgaagt

SEQ ID NO: 738724 - DNA, 19 bp, Mus musculus
  siRNA target sequence for 1700026D08Rik (NM_029335.1,302-320).
gagcccagatgaagttaaa

SEQ ID NO: 738725 - DNA, 19 bp, Mus musculus
  siRNA target sequence for 1700026D08Rik (NM_029335.1,322-340).
cgcagcttagtgatgactt

SEQ ID NO: 738726 - DNA, 19 bp, Mus musculus
  siRNA target sequence for 1700026D08Rik (NM_029335.1,625-643).
cccaactgcgcctggaata

SEQ ID NO: 738727 - DNA, 19 bp, Mus musculus
  siRNA target sequence for 1700026D08Rik (NM_029335.1,711-729).
gcggtccaccggaatctct

SEQ ID NO: 738728 - DNA, 19 bp, Mus musculus
  siRNA target sequence for 1700026D08Rik (NM_029335.1,712-730).
cggtccaccggaatctctt

SEQ ID NO: 738729 - DNA, 19 bp, Mus musculus
  siRNA target sequence for 1700026D08Rik (NM_029335.1,716-734).
ccaccggaatctcttctta

SEQ ID NO: 738730 - DNA, 19 bp, Mus musculus
  siRNA target sequence for 1700026D08Rik (NM_029335.1,717-735).
caccggaatctcttcttaa

SEQ ID NO: 738731 - DNA, 19 bp, Mus musculus
  siRNA target sequence for 1700026D08Rik (NM_029335.1,720-738).
cggaatctcttcttaagga

SEQ ID NO: 738732 - DNA, 19 bp, Mus musculus
  siRNA target sequence for 1700026D08Rik (NM_029335.1,850-868).
cgaacaccatgctagacat

SEQ ID NO: 738733 - DNA, 19 bp, Mus musculus
  siRNA target sequence for 1700027N10Rik (NM_029338.1,60-78).
gccgacagcctcttgttgt

SEQ ID NO: 738734 - DNA, 19 bp, Mus musculus
  siRNA target sequence for 1700027N10Rik (NM_029338.1,172-190).
gcttcgcgagggtcctttt

SEQ ID NO: 738735 - DNA, 19 bp, Mus musculus
  siRNA target sequence for 1700027N10Rik (NM_029338.1,208-226).
gccttgtggcggattacta

SEQ ID NO: 738736 - DNA, 19 bp, Mus musculus
  siRNA target sequence for 1700027N10Rik (NM_029338.1,210-228).
cttgtggcggattactaca

SEQ ID NO: 738737 - DNA, 19 bp, Mus musculus
  siRNA target sequence for 1700027N10Rik (NM_029338.1,371-389).
cccttcacacgagtatgaa

SEQ ID NO: 738738 - DNA, 19 bp, Mus musculus
  siRNA target sequence for 1700027N10Rik (NM_029338.1,478-496).
ccatcattgaccagattga

SEQ ID NO: 738739 - DNA, 19 bp, Mus musculus
  siRNA target sequence for 1700027N10Rik (NM_029338.1,519-537).
cgaggtgccctcttcaaga

SEQ ID NO: 738740 - DNA, 19 bp, Mus musculus
  siRNA target sequence for 1700027N10Rik (NM_029338.1,530-548).
cttcaagaccccttttgga

SEQ ID NO: 738741 - DNA, 19 bp, Mus musculus
  siRNA target sequence for 1700027N10Rik (NM_029338.1,620-638).
cttcagggaggctattgat

SEQ ID NO: 738742 - DNA, 19 bp, Mus musculus
  siRNA target sequence for 1700027N10Rik (NM_029338.1,631-649).
ctattgatctgaagaacaa

SEQ ID NO: 738743 - DNA, 19 bp, Mus musculus
  siRNA target sequence for 1700023O11Rik (NM_029339.2,141-159).
gtctgctgattctcgaatt

SEQ ID NO: 738744 - DNA, 19 bp, Mus musculus
  siRNA target sequence for 1700023O11Rik (NM_029339.2,215-233).
cgagaagtgagcacaactt

SEQ ID NO: 738745 - DNA, 19 bp, Mus musculus
  siRNA target sequence for 1700023O11Rik (NM_029339.2,361-379).
cgcaaagcgctggataaga

SEQ ID NO: 738746 - DNA, 19 bp, Mus musculus
  siRNA target sequence for 1700023O11Rik (NM_029339.2,363-381).
caaagcgctggataagata

SEQ ID NO: 738747 - DNA, 19 bp, Mus musculus
  siRNA target sequence for 1700023O11Rik (NM_029339.2,651-669).
gtggatcctagctgaagta

SEQ ID NO: 738748 - DNA, 19 bp, Mus musculus
  siRNA target sequence for 1700023O11Rik (NM_029339.2,661-679).
gctgaagtagtcagttaca

SEQ ID NO: 738749 - DNA, 19 bp, Mus musculus
  siRNA target sequence for 1700023O11Rik (NM_029339.2,681-699).
ccatgctaccaacaagtat

SEQ ID NO: 738750 - DNA, 19 bp, Mus musculus
  siRNA target sequence for 1700023O11Rik (NM_029339.2,702-720).
ggtagacgacattgatgaa

SEQ ID NO: 738751 - DNA, 19 bp, Mus musculus
  siRNA target sequence for 1700023O11Rik (NM_029339.2,918-936).
gtttgaagacacctcttat

SEQ ID NO: 738752 - DNA, 19 bp, Mus musculus
  siRNA target sequence for 1700023O11Rik (NM_029339.2,974-992).
ggtacgtggtggcttgtaa

SEQ ID NO: 738753 - DNA, 19 bp, Mus musculus
  siRNA target sequence for 1700030K01Rik (NM_029343.1,164-182).
ggctccagaaggcaatcat

SEQ ID NO: 738754 - DNA, 19 bp, Mus musculus
  siRNA target sequence for 1700030K01Rik (NM_029343.1,176-194).
caatcatggaccttattga

SEQ ID NO: 738755 - DNA, 19 bp, Mus musculus
  siRNA target sequence for 1700030K01Rik (NM_029343.1,208-226).
gatctccctaccatcttaa

SEQ ID NO: 738756 - DNA, 19 bp, Mus musculus
  siRNA target sequence for 1700030K01Rik (NM_029343.1,211-229).
ctccctaccatcttaagat

SEQ ID NO: 738757 - DNA, 19 bp, Mus musculus
  siRNA target sequence for 1700030K01Rik (NM_029343.1,213-231).
ccctaccatcttaagatta

SEQ ID NO: 738758 - DNA, 19 bp, Mus musculus
  siRNA target sequence for 1700030K01Rik (NM_029343.1,237-255).
gtctagccagaaaacagat

SEQ ID NO: 738759 - DNA, 19 bp, Mus musculus
  siRNA target sequence for 1700030K01Rik (NM_029343.1,289-307).
ctcgccttagccaagatca

SEQ ID NO: 738760 - DNA, 19 bp, Mus musculus
  siRNA target sequence for 1700030K01Rik (NM_029343.1,309-327).
ccgtgggacgctcattcaa

SEQ ID NO: 738761 - DNA, 19 bp, Mus musculus
  siRNA target sequence for 1700030K01Rik (NM_029343.1,317-335).
cgctcattcaagggttaaa

SEQ ID NO: 738762 - DNA, 19 bp, Mus musculus
  siRNA target sequence for 1700030K01Rik (NM_029343.1,325-343).
caagggttaaaccacatat

SEQ ID NO: 738763 - DNA, 19 bp, Mus musculus
  siRNA target sequence for 1700030K01Rik (NM_029343.1,328-346).
gggttaaaccacatatcca

SEQ ID NO: 738764 - DNA, 19 bp, Mus musculus
  siRNA target sequence for 1700030K01Rik (NM_029343.1,389-407).
catacagactcctagaact

SEQ ID NO: 738765 - DNA, 19 bp, Mus musculus
  siRNA target sequence for 1700030K01Rik (NM_029343.1,458-476).
ccctgcacagcgtacagat

SEQ ID NO: 738766 - DNA, 19 bp, Mus musculus
  siRNA target sequence for 1700030K01Rik (NM_029343.1,511-529).
ccagcaaaaactgctttaa

SEQ ID NO: 738767 - DNA, 19 bp, Mus musculus
  siRNA target sequence for 1700030K01Rik (NM_029343.1,548-566).
cttatgcagcactaattta

SEQ ID NO: 738768 - DNA, 19 bp, Mus musculus
  siRNA target sequence for 1700030K01Rik (NM_029343.1,586-604).
gcggtgctggcaaagataa

SEQ ID NO: 738769 - DNA, 19 bp, Mus musculus
  siRNA target sequence for 1700030K01Rik (NM_029343.1,629-647).
ccattaggcaaaatagaga

SEQ ID NO: 738770 - DNA, 19 bp, Mus musculus
  siRNA target sequence for 1700030K01Rik (NM_029343.1,752-770).
cagacaaccttttagatca

SEQ ID NO: 738771 - DNA, 19 bp, Mus musculus
  siRNA target sequence for 1700030K01Rik (NM_029343.1,797-815).
gtaacaagatccaggtttt

SEQ ID NO: 738772 - DNA, 19 bp, Mus musculus
  siRNA target sequence for 1700030K01Rik (NM_029343.1,801-819).
caagatccaggttttacat

SEQ ID NO: 738773 - DNA, 19 bp, Mus musculus
  siRNA target sequence for 1700030K01Rik (NM_029343.1,810-828).
ggttttacattctgtgttt

SEQ ID NO: 738774 - DNA, 19 bp, Mus musculus
  siRNA target sequence for 1700030K01Rik (NM_029343.1,831-849).
ccaattggctgaattgaat

SEQ ID NO: 738775 - DNA, 19 bp, Mus musculus
  siRNA target sequence for 2410018G20Rik (NM_029354.1,481-499).
ggcgcttcggcggaagaaa

SEQ ID NO: 738776 - DNA, 19 bp, Mus musculus
  siRNA target sequence for 2410018G20Rik (NM_029354.1,483-501).
cgcttcggcggaagaaagt

SEQ ID NO: 738777 - DNA, 19 bp, Mus musculus
  siRNA target sequence for 2410018G20Rik (NM_029354.1,555-573).
ccatcgaccccgatgtgtt

SEQ ID NO: 738778 - DNA, 19 bp, Mus musculus
  siRNA target sequence for 2410018G20Rik (NM_029354.1,686-704).
cccatatctctgtctacat

SEQ ID NO: 738779 - DNA, 19 bp, Mus musculus
  siRNA target sequence for 2410018G20Rik (NM_029354.1,730-748).
ccgaggtggccccattctt

SEQ ID NO: 738780 - DNA, 19 bp, Mus musculus
  siRNA target sequence for 2410018G20Rik (NM_029354.1,746-764).
cttggcaatgtgaccatat

SEQ ID NO: 738781 - DNA, 19 bp, Mus musculus
  siRNA target sequence for 2610034E13Rik (NM_029365.1,161-179).
cctgccatagagtacttca

SEQ ID NO: 738782 - DNA, 19 bp, Mus musculus
  siRNA target sequence for 2610034E13Rik (NM_029365.1,301-319).
cagcagtgcctatgagttt

SEQ ID NO: 738783 - DNA, 19 bp, Mus musculus
  siRNA target sequence for 2610034E13Rik (NM_029365.1,303-321).
gcagtgcctatgagtttgt

SEQ ID NO: 738784 - DNA, 19 bp, Mus musculus
  siRNA target sequence for 2610034E13Rik (NM_029365.1,327-345).
ggctcgatggcatcaagtt

SEQ ID NO: 738785 - DNA, 19 bp, Mus musculus
  siRNA target sequence for 2610034E13Rik (NM_029365.1,329-347).
ctcgatggcatcaagttca

SEQ ID NO: 738786 - DNA, 19 bp, Mus musculus
  siRNA target sequence for 2610034E13Rik (NM_029365.1,407-425).
ctgttcgatgactttaaga

SEQ ID NO: 738787 - DNA, 19 bp, Mus musculus
  siRNA target sequence for 2610034E13Rik (NM_029365.1,603-621).
cagccctccggcttctgtt

SEQ ID NO: 738788 - DNA, 19 bp, Mus musculus
  siRNA target sequence for 2610034E13Rik (NM_029365.1,1432-1450).
ccggaactcaagaatggtt

SEQ ID NO: 738789 - DNA, 19 bp, Mus musculus
  siRNA target sequence for 1700025E21Rik (NM_029373.1,63-81).
gggacaccttttgtcttta

SEQ ID NO: 738790 - DNA, 19 bp, Mus musculus
  siRNA target sequence for 1700025E21Rik (NM_029373.1,278-296).
ccagtgcgtcactcagtaa

SEQ ID NO: 738791 - DNA, 19 bp, Mus musculus
  siRNA target sequence for 1700025E21Rik (NM_029373.1,279-297).
cagtgcgtcactcagtaaa

SEQ ID NO: 738792 - DNA, 19 bp, Mus musculus
  siRNA target sequence for 1700025E21Rik (NM_029373.1,283-301).
gcgtcactcagtaaagcaa

SEQ ID NO: 738793 - DNA, 19 bp, Mus musculus
  siRNA target sequence for 1700025E21Rik (NM_029373.1,317-335).
gtaagcgacaaaatagaga

SEQ ID NO: 738794 - DNA, 19 bp, Mus musculus
  siRNA target sequence for 1700025E21Rik (NM_029373.1,490-508).
gatagtgacaccactgaat

SEQ ID NO: 738795 - DNA, 19 bp, Mus musculus
  siRNA target sequence for 1700025E21Rik (NM_029373.1,509-527).
gtgacagcgaggaatcgaa

SEQ ID NO: 738796 - DNA, 19 bp, Mus musculus
  siRNA target sequence for 1700025E21Rik (NM_029373.1,706-724).
ccaagcgcctcagtaacaa

SEQ ID NO: 738797 - DNA, 19 bp, Mus musculus
  siRNA target sequence for 1700025E21Rik (NM_029373.1,766-784).
gggaccaacacaaaattca

SEQ ID NO: 738798 - DNA, 19 bp, Mus musculus
  siRNA target sequence for 1810054G18Rik (NM_029377.1,434-452).
ggtcctcagagatccaata

SEQ ID NO: 738799 - DNA, 19 bp, Mus musculus
  siRNA target sequence for 1810054G18Rik (NM_029377.1,438-456).
ctcagagatccaatacgta

SEQ ID NO: 738800 - DNA, 19 bp, Mus musculus
  siRNA target sequence for 1810054G18Rik (NM_029377.1,444-462).
gatccaatacgtatgtgat

SEQ ID NO: 738801 - DNA, 19 bp, Mus musculus
  siRNA target sequence for 1810054G18Rik (NM_029377.1,447-465).
ccaatacgtatgtgatcaa

SEQ ID NO: 738802 - DNA, 19 bp, Mus musculus
  siRNA target sequence for 1810054G18Rik (NM_029377.1,453-471).
cgtatgtgatcaagctatt

SEQ ID NO: 738803 - DNA, 19 bp, Mus musculus
  siRNA target sequence for 1810054G18Rik (NM_029377.1,623-641).
gaggtcatcaacagcaaaa

SEQ ID NO: 738804 - DNA, 19 bp, Mus musculus
  siRNA target sequence for 1810054G18Rik (NM_029377.1,636-654).
gcaaaaaccgtgatgtgta

SEQ ID NO: 738805 - DNA, 19 bp, Mus musculus
  siRNA target sequence for 1810054G18Rik (NM_029377.1,686-704).
cttggagatgcctgtagat

SEQ ID NO: 738806 - DNA, 19 bp, Mus musculus
  siRNA target sequence for 1810054G18Rik (NM_029377.1,857-875).
cagcttcgctactcagaaa

SEQ ID NO: 738807 - DNA, 19 bp, Mus musculus
  siRNA target sequence for 1810054G18Rik (NM_029377.1,860-878).
cttcgctactcagaaagta

SEQ ID NO: 738808 - DNA, 19 bp, Mus musculus
  siRNA target sequence for 1810054G18Rik (NM_029377.1,883-901).
gatcctacgggagatgtat

SEQ ID NO: 738809 - DNA, 19 bp, Mus musculus
  siRNA target sequence for 2310041H06Rik (NM_029385.1,547-565).
cccttcaggacttgaaact

SEQ ID NO: 738810 - DNA, 19 bp, Mus musculus
  siRNA target sequence for 2310041H06Rik (NM_029385.1,569-587).
ggatcctggcattattgca

SEQ ID NO: 738811 - DNA, 19 bp, Mus musculus
  siRNA target sequence for 2310041H06Rik (NM_029385.1,570-588).
gatcctggcattattgcaa

SEQ ID NO: 738812 - DNA, 19 bp, Mus musculus
  siRNA target sequence for Rab4b (NM_029391.1,354-372).
gtcggtgacgcggagttat

SEQ ID NO: 738813 - DNA, 19 bp, Mus musculus
  siRNA target sequence for Rab4b (NM_029391.1,356-374).
cggtgacgcggagttatta

SEQ ID NO: 738814 - DNA, 19 bp, Mus musculus
  siRNA target sequence for Rab4b (NM_029391.1,521-539).
ccgagcgtgaggtcacttt

SEQ ID NO: 738815 - DNA, 19 bp, Mus musculus
  siRNA target sequence for Rab4b (NM_029391.1,554-572).
gctttgctcaggagaatga

SEQ ID NO: 738816 - DNA, 19 bp, Mus musculus
  siRNA target sequence for Rab4b (NM_029391.1,594-612).
cgctctcacgggtgagaat

SEQ ID NO: 738817 - DNA, 19 bp, Mus musculus
  siRNA target sequence for 2010012L10Rik (NM_029392.1,540-558).
cagcgactcaccctgattt

SEQ ID NO: 738818 - DNA, 19 bp, Mus musculus
  siRNA target sequence for Rbm12 (NM_029397.2,366-384).
ggtgaggctttcatcgttt

SEQ ID NO: 738819 - DNA, 19 bp, Mus musculus
  siRNA target sequence for Rbm12 (NM_029397.2,367-385).
gtgaggctttcatcgtttt

SEQ ID NO: 738820 - DNA, 19 bp, Mus musculus
  siRNA target sequence for Rbm12 (NM_029397.2,419-437).
gcgcacaggtggtactatt

SEQ ID NO: 738821 - DNA, 19 bp, Mus musculus
  siRNA target sequence for Rbm12 (NM_029397.2,420-438).
cgcacaggtggtactatta

SEQ ID NO: 738822 - DNA, 19 bp, Mus musculus
  siRNA target sequence for Rbm12 (NM_029397.2,421-439).
gcacaggtggtactattaa

SEQ ID NO: 738823 - DNA, 19 bp, Mus musculus
  siRNA target sequence for Rbm12 (NM_029397.2,422-440).
cacaggtggtactattaaa

SEQ ID NO: 738824 - DNA, 19 bp, Mus musculus
  siRNA target sequence for Rbm12 (NM_029397.2,433-451).
ctattaaagggtcaaaagt

SEQ ID NO: 738825 - DNA, 19 bp, Mus musculus
  siRNA target sequence for Rbm12 (NM_029397.2,442-460).
ggtcaaaagtaacactatt

SEQ ID NO: 738826 - DNA, 19 bp, Mus musculus
  siRNA target sequence for Rbm12 (NM_029397.2,450-468).
gtaacactattattgagta

SEQ ID NO: 738827 - DNA, 19 bp, Mus musculus
  siRNA target sequence for Rbm12 (NM_029397.2,454-472).
cactattattgagtagtaa

SEQ ID NO: 738828 - DNA, 19 bp, Mus musculus
  siRNA target sequence for Rbm12 (NM_029397.2,500-518).
gagtcgtaggcgttttgaa

SEQ ID NO: 738829 - DNA, 19 bp, Mus musculus
  siRNA target sequence for Rbm12 (NM_029397.2,516-534).
gaaactgccaacttagata

SEQ ID NO: 738830 - DNA, 19 bp, Mus musculus
  siRNA target sequence for Rbm12 (NM_029397.2,606-624).
gcaatagtacccaacttta

SEQ ID NO: 738831 - DNA, 19 bp, Mus musculus
  siRNA target sequence for Rbm12 (NM_029397.2,607-625).
caatagtacccaactttaa

SEQ ID NO: 738832 - DNA, 19 bp, Mus musculus
  siRNA target sequence for Rbm12 (NM_029397.2,615-633).
cccaactttaataatcctt

SEQ ID NO: 738833 - DNA, 19 bp, Mus musculus
  siRNA target sequence for Rbm12 (NM_029397.2,652-670).
ctaccacttctgttcatga

SEQ ID NO: 738834 - DNA, 19 bp, Mus musculus
  siRNA target sequence for Rbm12 (NM_029397.2,744-762).
gggagcccaacgttcagtt

SEQ ID NO: 738835 - DNA, 19 bp, Mus musculus
  siRNA target sequence for Rbm12 (NM_029397.2,953-971).
cacactgcctcctatgtca

SEQ ID NO: 738836 - DNA, 19 bp, Mus musculus
  siRNA target sequence for Rbm12 (NM_029397.2,1036-1054).
cacctatcggtctgaacaa

SEQ ID NO: 738837 - DNA, 19 bp, Mus musculus
  siRNA target sequence for Rbm12 (NM_029397.2,1038-1056).
cctatcggtctgaacaata

SEQ ID NO: 738838 - DNA, 19 bp, Mus musculus
  siRNA target sequence for Rbm12 (NM_029397.2,1039-1057).
ctatcggtctgaacaataa

SEQ ID NO: 738839 - DNA, 19 bp, Mus musculus
  siRNA target sequence for Rbm12 (NM_029397.2,1044-1062).
ggtctgaacaataatatga

SEQ ID NO: 738840 - DNA, 19 bp, Mus musculus
  siRNA target sequence for Rbm12 (NM_029397.2,1045-1063).
gtctgaacaataatatgaa

SEQ ID NO: 738841 - DNA, 19 bp, Mus musculus
  siRNA target sequence for Rbm12 (NM_029397.2,1078-1096).
gtccattaaatcctgttaa

SEQ ID NO: 738842 - DNA, 19 bp, Mus musculus
  siRNA target sequence for Rbm12 (NM_029397.2,1089-1107).
cctgttaactctatacaga

SEQ ID NO: 738843 - DNA, 19 bp, Mus musculus
  siRNA target sequence for Rbm12 (NM_029397.2,1142-1160).
caaccctgatgatctgtat

SEQ ID NO: 738844 - DNA, 19 bp, Mus musculus
  siRNA target sequence for Rbm12 (NM_029397.2,1180-1198).
ccttttctgcaatggaaaa

SEQ ID NO: 738845 - DNA, 19 bp, Mus musculus
  siRNA target sequence for Rbm12 (NM_029397.2,1228-1246).
gagtcgatgcagtgcattt

SEQ ID NO: 738846 - DNA, 19 bp, Mus musculus
  siRNA target sequence for Rbm12 (NM_029397.2,1254-1272).
gatcatgtaggtcgaaata

SEQ ID NO: 738847 - DNA, 19 bp, Mus musculus
  siRNA target sequence for Rbm12 (NM_029397.2,1281-1299).
ggattggttaagtttctct

SEQ ID NO: 738848 - DNA, 19 bp, Mus musculus
  siRNA target sequence for Rbm12 (NM_029397.2,1300-1318).
cccctcaagatacatttga

SEQ ID NO: 738849 - DNA, 19 bp, Mus musculus
  siRNA target sequence for Rbm12 (NM_029397.2,1544-1562).
cttaaaagggctaccattt

SEQ ID NO: 738850 - DNA, 19 bp, Mus musculus
  siRNA target sequence for Rbm12 (NM_029397.2,1605-1623).
gatattgtggaagatagta

SEQ ID NO: 738851 - DNA, 19 bp, Mus musculus
  siRNA target sequence for Rbm12 (NM_029397.2,1659-1677).
ggtgaaggctttgtagaat

SEQ ID NO: 738852 - DNA, 19 bp, Mus musculus
  siRNA target sequence for Rbm12 (NM_029397.2,1705-1723).
ctctctgtcgtcataaaca

SEQ ID NO: 738853 - DNA, 19 bp, Mus musculus
  siRNA target sequence for Rbm12 (NM_029397.2,1711-1729).
gtcgtcataaacaatacat

SEQ ID NO: 738854 - DNA, 19 bp, Mus musculus
  siRNA target sequence for Rbm12 (NM_029397.2,1727-1745).
catgggcaatcgctttatt

SEQ ID NO: 738855 - DNA, 19 bp, Mus musculus
  siRNA target sequence for Rbm12 (NM_029397.2,1732-1750).
gcaatcgctttattcaagt

SEQ ID NO: 738856 - DNA, 19 bp, Mus musculus
  siRNA target sequence for Rbm12 (NM_029397.2,1733-1751).
caatcgctttattcaagtt

SEQ ID NO: 738857 - DNA, 19 bp, Mus musculus
  siRNA target sequence for Rbm12 (NM_029397.2,1746-1764).
caagttcatccaataacta

SEQ ID NO: 738858 - DNA, 19 bp, Mus musculus
  siRNA target sequence for Rbm12 (NM_029397.2,1749-1767).
gttcatccaataactaaga

SEQ ID NO: 738859 - DNA, 19 bp, Mus musculus
  siRNA target sequence for Rbm12 (NM_029397.2,1756-1774).
caataactaagaaaggtat

SEQ ID NO: 738860 - DNA, 19 bp, Mus musculus
  siRNA target sequence for Rbm12 (NM_029397.2,1784-1802).
gatagatatgattcgaaaa

SEQ ID NO: 738861 - DNA, 19 bp, Mus musculus
  siRNA target sequence for Rbm12 (NM_029397.2,1798-1816).
gaaaacgacttcagaactt

SEQ ID NO: 738862 - DNA, 19 bp, Mus musculus
  siRNA target sequence for Rbm12 (NM_029397.2,1827-1845).
cagagggaactggtgttaa

SEQ ID NO: 738863 - DNA, 19 bp, Mus musculus
  siRNA target sequence for Rbm12 (NM_029397.2,1829-1847).
gagggaactggtgttaaat

SEQ ID NO: 738864 - DNA, 19 bp, Mus musculus
  siRNA target sequence for Rbm12 (NM_029397.2,1860-1878).
gtcagttctgccaaagtct

SEQ ID NO: 738865 - DNA, 19 bp, Mus musculus
  siRNA target sequence for Rbm12 (NM_029397.2,1875-1893).
gtctgtgcccatataacaa

SEQ ID NO: 738866 - DNA, 19 bp, Mus musculus
  siRNA target sequence for Rbm12 (NM_029397.2,1879-1897).
gtgcccatataacaaacat

SEQ ID NO: 738867 - DNA, 19 bp, Mus musculus
  siRNA target sequence for Rbm12 (NM_029397.2,1963-1981).
ctgtgcatgttcttgttga

SEQ ID NO: 738868 - DNA, 19 bp, Mus musculus
  siRNA target sequence for Rbm12 (NM_029397.2,1965-1983).
gtgcatgttcttgttgata

SEQ ID NO: 738869 - DNA, 19 bp, Mus musculus
  siRNA target sequence for Rbm12 (NM_029397.2,1968-1986).
catgttcttgttgataaca

SEQ ID NO: 738870 - DNA, 19 bp, Mus musculus
  siRNA target sequence for Rbm12 (NM_029397.2,2012-2030).
ggttcagtttaaaactgaa

SEQ ID NO: 738871 - DNA, 19 bp, Mus musculus
  siRNA target sequence for Rbm12 (NM_029397.2,2028-2046).
gaagatgacgcacataaat

SEQ ID NO: 738872 - DNA, 19 bp, Mus musculus
  siRNA target sequence for Rbm12 (NM_029397.2,2049-2067).
gaacacttacaccgtaaaa

SEQ ID NO: 738873 - DNA, 19 bp, Mus musculus
  siRNA target sequence for Rbm12 (NM_029397.2,2187-2205).
gcagtaccagtgataccta

SEQ ID NO: 738874 - DNA, 19 bp, Mus musculus
  siRNA target sequence for Rbm12 (NM_029397.2,2615-2633).
caataatgggccaccattt

SEQ ID NO: 738875 - DNA, 19 bp, Mus musculus
  siRNA target sequence for Rbm12 (NM_029397.2,2636-2654).
cttccctggtaattttggt

SEQ ID NO: 738876 - DNA, 19 bp, Mus musculus
  siRNA target sequence for Rbm12 (NM_029397.2,2700-2718).
ggtgcctttggtgatgtta

SEQ ID NO: 738877 - DNA, 19 bp, Mus musculus
  siRNA target sequence for Rbm12 (NM_029397.2,2784-2802).
ggaggtgcaccaaataata

SEQ ID NO: 738878 - DNA, 19 bp, Mus musculus
  siRNA target sequence for Rbm12 (NM_029397.2,2785-2803).
gaggtgcaccaaataatat

SEQ ID NO: 738879 - DNA, 19 bp, Mus musculus
  siRNA target sequence for Rbm12 (NM_029397.2,2787-2805).
ggtgcaccaaataatataa

SEQ ID NO: 738880 - DNA, 19 bp, Mus musculus
  siRNA target sequence for Rbm12 (NM_029397.2,2825-2843).
ggggatccctcagaacttt

SEQ ID NO: 738881 - DNA, 19 bp, Mus musculus
  siRNA target sequence for Rbm12 (NM_029397.2,2845-2863).
gaaatggcccaggtagttt

SEQ ID NO: 738882 - DNA, 19 bp, Mus musculus
  siRNA target sequence for Rbm12 (NM_029397.2,2852-2870).
cccaggtagtttaaatgct

SEQ ID NO: 738883 - DNA, 19 bp, Mus musculus
  siRNA target sequence for Rbm12 (NM_029397.2,2956-2974).
ggcctggcccaatccatat

SEQ ID NO: 738884 - DNA, 19 bp, Mus musculus
  siRNA target sequence for Rbm12 (NM_029397.2,2957-2975).
gcctggcccaatccatatt

SEQ ID NO: 738885 - DNA, 19 bp, Mus musculus
  siRNA target sequence for Rbm12 (NM_029397.2,3007-3025).
gaaaaccaggacctacaat

SEQ ID NO: 738886 - DNA, 19 bp, Mus musculus
  siRNA target sequence for Rbm12 (NM_029397.2,3012-3030).
ccaggacctacaataatta

SEQ ID NO: 738887 - DNA, 19 bp, Mus musculus
  siRNA target sequence for Rbm12 (NM_029397.2,3013-3031).
caggacctacaataattaa

SEQ ID NO: 738888 - DNA, 19 bp, Mus musculus
  siRNA target sequence for Rbm12 (NM_029397.2,3016-3034).
gacctacaataattaaggt

SEQ ID NO: 738889 - DNA, 19 bp, Mus musculus
  siRNA target sequence for Rbm12 (NM_029397.2,3041-3059).
catgccttttactgtatct

SEQ ID NO: 738890 - DNA, 19 bp, Mus musculus
  siRNA target sequence for Rbm12 (NM_029397.2,3054-3072).
gtatctattgatgaaattt

SEQ ID NO: 738891 - DNA, 19 bp, Mus musculus
  siRNA target sequence for Rbm12 (NM_029397.2,3102-3120).
ccaggttcagtatgtttaa

SEQ ID NO: 738892 - DNA, 19 bp, Mus musculus
  siRNA target sequence for Rbm12 (NM_029397.2,3103-3121).
caggttcagtatgtttaaa

SEQ ID NO: 738893 - DNA, 19 bp, Mus musculus
  siRNA target sequence for Rbm12 (NM_029397.2,3155-3173).
catggtggcctttgaatct

SEQ ID NO: 738894 - DNA, 19 bp, Mus musculus
  siRNA target sequence for Rbm12 (NM_029397.2,3193-3211).
ctgtcattgacttaaatga

SEQ ID NO: 738895 - DNA, 19 bp, Mus musculus
  siRNA target sequence for 4933433C09Rik (NM_029408.1,200-218).
cacggactggccatccaaa

SEQ ID NO: 738896 - DNA, 19 bp, Mus musculus
  siRNA target sequence for 4933433C09Rik (NM_029408.1,262-280).
gaccttagtcccatccaaa

SEQ ID NO: 738897 - DNA, 19 bp, Mus musculus
  siRNA target sequence for 4933433C09Rik (NM_029408.1,323-341).
ctggatgaggccatacaca

SEQ ID NO: 738898 - DNA, 19 bp, Mus musculus
  siRNA target sequence for 4933433C09Rik (NM_029408.1,338-356).
cacaagatagagctgataa

SEQ ID NO: 738899 - DNA, 19 bp, Mus musculus
  siRNA target sequence for 4933433C09Rik (NM_029408.1,725-743).
cgaggtttcctctttgaga

SEQ ID NO: 738900 - DNA, 19 bp, Mus musculus
  siRNA target sequence for 4933433C09Rik (NM_029408.1,1028-1046).
gccaagacgcagcaagata

SEQ ID NO: 738901 - DNA, 19 bp, Mus musculus
  siRNA target sequence for 4933433C09Rik (NM_029408.1,1029-1047).
ccaagacgcagcaagatat

SEQ ID NO: 738902 - DNA, 19 bp, Mus musculus
  siRNA target sequence for 4933433C09Rik (NM_029408.1,1179-1197).
gcgagaagcaggacgaata

SEQ ID NO: 738903 - DNA, 19 bp, Mus musculus
  siRNA target sequence for 4933433C09Rik (NM_029408.1,1295-1313).
gccgagagcgagatcaatt

SEQ ID NO: 738904 - DNA, 19 bp, Mus musculus
  siRNA target sequence for 4933433C09Rik (NM_029408.1,1397-1415).
ctggtgcgctccatactca

SEQ ID NO: 738905 - DNA, 19 bp, Mus musculus
  siRNA target sequence for 5230400G24Rik (NM_029409.2,323-341).
gaaattagtcgaattcagt

SEQ ID NO: 738906 - DNA, 19 bp, Mus musculus
  siRNA target sequence for 5230400G24Rik (NM_029409.2,330-348).
gtcgaattcagtatgaaat

SEQ ID NO: 738907 - DNA, 19 bp, Mus musculus
  siRNA target sequence for 5230400G24Rik (NM_029409.2,349-367).
ggaatacaccgaaggtatt

SEQ ID NO: 738908 - DNA, 19 bp, Mus musculus
  siRNA target sequence for 5230400G24Rik (NM_029409.2,350-368).
gaatacaccgaaggtatta

SEQ ID NO: 738909 - DNA, 19 bp, Mus musculus
  siRNA target sequence for 5230400G24Rik (NM_029409.2,385-403).
cccggaaaaattaaaagta

SEQ ID NO: 738910 - DNA, 19 bp, Mus musculus
  siRNA target sequence for 5230400G24Rik (NM_029409.2,450-468).
caaatgccagtgtgataat

SEQ ID NO: 738911 - DNA, 19 bp, Mus musculus
  siRNA target sequence for 5230400G24Rik (NM_029409.2,484-502).
gatcgtggttacaggaaat

SEQ ID NO: 738912 - DNA, 19 bp, Mus musculus
  siRNA target sequence for 5230400G24Rik (NM_029409.2,528-546).
cagcagatcttgaccttat

SEQ ID NO: 738913 - DNA, 19 bp, Mus musculus
  siRNA target sequence for 5230400G24Rik (NM_029409.2,531-549).
cagatcttgaccttatcca

SEQ ID NO: 738914 - DNA, 19 bp, Mus musculus
  siRNA target sequence for 5230400G24Rik (NM_029409.2,547-565).
ccagtccactccctttaaa

SEQ ID NO: 738915 - DNA, 19 bp, Mus musculus
  siRNA target sequence for 5230400G24Rik (NM_029409.2,550-568).
gtccactccctttaaacct

SEQ ID NO: 738916 - DNA, 19 bp, Mus musculus
  siRNA target sequence for 5230400G24Rik (NM_029409.2,674-692).
gcagttggcaggctaaaaa

SEQ ID NO: 738917 - DNA, 19 bp, Mus musculus
  siRNA target sequence for 5230400G24Rik (NM_029409.2,734-752).
cagttggtcagaaacgatt

SEQ ID NO: 738918 - DNA, 19 bp, Mus musculus
  siRNA target sequence for 5230400G24Rik (NM_029409.2,787-805).
ctgtcctccccatatgcta

SEQ ID NO: 738919 - DNA, 19 bp, Mus musculus
  siRNA target sequence for 5230400G24Rik (NM_029409.2,840-858).
gcattttgtcgcttatcca

SEQ ID NO: 738920 - DNA, 19 bp, Mus musculus
  siRNA target sequence for 5230400G24Rik (NM_029409.2,850-868).
gcttatccagtcttctact

SEQ ID NO: 738921 - DNA, 19 bp, Mus musculus
  siRNA target sequence for 5230400G24Rik (NM_029409.2,936-954).
cagctgccgccacttctaa

SEQ ID NO: 738922 - DNA, 19 bp, Mus musculus
  siRNA target sequence for 5230400G24Rik (NM_029409.2,946-964).
cacttctaatcctcatcat

SEQ ID NO: 738923 - DNA, 19 bp, Mus musculus
  siRNA target sequence for 5230400G24Rik (NM_029409.2,951-969).
ctaatcctcatcatgacaa

SEQ ID NO: 738924 - DNA, 19 bp, Mus musculus
  siRNA target sequence for 5230400G24Rik (NM_029409.2,970-988).
cgtcaggtatggcatttca

SEQ ID NO: 738925 - DNA, 19 bp, Mus musculus
  siRNA target sequence for 5230400G24Rik (NM_029409.2,976-994).
gtatggcatttcaaaccta

SEQ ID NO: 738926 - DNA, 19 bp, Mus musculus
  siRNA target sequence for 5230400G24Rik (NM_029409.2,1003-1021).
cattgaaggagcttcagat

SEQ ID NO: 738927 - DNA, 19 bp, Mus musculus
  siRNA target sequence for 5230400G24Rik (NM_029409.2,1047-1065).
cattaagacgtcagataat

SEQ ID NO: 738928 - DNA, 19 bp, Mus musculus
  siRNA target sequence for 5230400G24Rik (NM_029409.2,1053-1071).
gacgtcagataatcaaatt

SEQ ID NO: 738929 - DNA, 19 bp, Mus musculus
  siRNA target sequence for 5230400G24Rik (NM_029409.2,1055-1073).
cgtcagataatcaaattaa

SEQ ID NO: 738930 - DNA, 19 bp, Mus musculus
  siRNA target sequence for 5230400G24Rik (NM_029409.2,1102-1120).
gaataaagagcgtgctaaa

SEQ ID NO: 738931 - DNA, 19 bp, Mus musculus
  siRNA target sequence for 5230400G24Rik (NM_029409.2,1124-1142).
gaaatggtcatgtattcaa

SEQ ID NO: 738932 - DNA, 19 bp, Mus musculus
  siRNA target sequence for Bcl2l12 (NM_029410.1,172-190).
gttctgacggccttcctta

SEQ ID NO: 738933 - DNA, 19 bp, Mus musculus
  siRNA target sequence for Bcl2l12 (NM_029410.1,567-585).
cccggctctgcatcgtaaa

SEQ ID NO: 738934 - DNA, 19 bp, Mus musculus
  siRNA target sequence for Bcl2l12 (NM_029410.1,569-587).
cggctctgcatcgtaaact

SEQ ID NO: 738935 - DNA, 19 bp, Mus musculus
  siRNA target sequence for Bcl2l12 (NM_029410.1,727-745).
ctggcactagccatggaat

SEQ ID NO: 738936 - DNA, 19 bp, Mus musculus
  siRNA target sequence for Bcl2l12 (NM_029410.1,730-748).
gcactagccatggaattga

SEQ ID NO: 738937 - DNA, 19 bp, Mus musculus
  siRNA target sequence for 9130401M01Rik (NM_029418.2,125-143).
gcgagccgcagtggtttta

SEQ ID NO: 738938 - DNA, 19 bp, Mus musculus
  siRNA target sequence for 9130401M01Rik (NM_029418.2,126-144).
cgagccgcagtggttttat

SEQ ID NO: 738939 - DNA, 19 bp, Mus musculus
  siRNA target sequence for 9130401M01Rik (NM_029418.2,129-147).
gccgcagtggttttatgaa

SEQ ID NO: 738940 - DNA, 19 bp, Mus musculus
  siRNA target sequence for 9130401M01Rik (NM_029418.2,131-149).
cgcagtggttttatgaaga

SEQ ID NO: 738941 - DNA, 19 bp, Mus musculus
  siRNA target sequence for 9130401M01Rik (NM_029418.2,152-170).
cagaatgtagtgacgatat

SEQ ID NO: 738942 - DNA, 19 bp, Mus musculus
  siRNA target sequence for 9130401M01Rik (NM_029418.2,158-176).
gtagtgacgatattgaagt

SEQ ID NO: 738943 - DNA, 19 bp, Mus musculus
  siRNA target sequence for 9130401M01Rik (NM_029418.2,161-179).
gtgacgatattgaagttct

SEQ ID NO: 738944 - DNA, 19 bp, Mus musculus
  siRNA target sequence for 9130401M01Rik (NM_029418.2,175-193).
gttctcactctcaagaaat

SEQ ID NO: 738945 - DNA, 19 bp, Mus musculus
  siRNA target sequence for 9130401M01Rik (NM_029418.2,251-269).
ccagtatctccgaacagtt

SEQ ID NO: 738946 - DNA, 19 bp, Mus musculus
  siRNA target sequence for 9130401M01Rik (NM_029418.2,252-270).
cagtatctccgaacagtta

SEQ ID NO: 738947 - DNA, 19 bp, Mus musculus
  siRNA target sequence for 9130401M01Rik (NM_029418.2,421-439).
ctccacctggccgtctttt

SEQ ID NO: 738948 - DNA, 19 bp, Mus musculus
  siRNA target sequence for 9130401M01Rik (NM_029418.2,638-656).
cgggaacaggctctctttt

SEQ ID NO: 738949 - DNA, 19 bp, Mus musculus
  siRNA target sequence for 9130401M01Rik (NM_029418.2,640-658).
ggaacaggctctcttttgt

SEQ ID NO: 738950 - DNA, 19 bp, Mus musculus
  siRNA target sequence for 9130401M01Rik (NM_029418.2,666-684).
cacgaccttgcctgagaat

SEQ ID NO: 738951 - DNA, 19 bp, Mus musculus
  siRNA target sequence for 9130401M01Rik (NM_029418.2,710-728).
gtagtgctcaggagaatat

SEQ ID NO: 738952 - DNA, 19 bp, Mus musculus
  siRNA target sequence for 9130401M01Rik (NM_029418.2,766-784).
gaggctcggaggaaagcat

SEQ ID NO: 738953 - DNA, 19 bp, Mus musculus
  siRNA target sequence for 9130401M01Rik (NM_029418.2,842-860).
cattcgcgttggagaagaa

SEQ ID NO: 738954 - DNA, 19 bp, Mus musculus
  siRNA target sequence for 9130401M01Rik (NM_029418.2,1033-1051).
gttgcgtcctccaaagagt

SEQ ID NO: 738955 - DNA, 19 bp, Mus musculus
  siRNA target sequence for 9130401M01Rik (NM_029418.2,1037-1055).
cgtcctccaaagagtttga

SEQ ID NO: 738956 - DNA, 19 bp, Mus musculus
  siRNA target sequence for 9130401M01Rik (NM_029418.2,1038-1056).
gtcctccaaagagtttgaa

SEQ ID NO: 738957 - DNA, 19 bp, Mus musculus
  siRNA target sequence for 9130401M01Rik (NM_029418.2,1062-1080).
gtggttcagaaagatcaaa

SEQ ID NO: 738958 - DNA, 19 bp, Mus musculus
  siRNA target sequence for 4930402H24Rik (NM_029432.1,155-173).
cgactccgccaggttcaaa

SEQ ID NO: 738959 - DNA, 19 bp, Mus musculus
  siRNA target sequence for 4930402H24Rik (NM_029432.1,255-273).
gtagagagctggcaaatta

SEQ ID NO: 738960 - DNA, 19 bp, Mus musculus
  siRNA target sequence for 4930402H24Rik (NM_029432.1,258-276).
gagagctggcaaattacct

SEQ ID NO: 738961 - DNA, 19 bp, Mus musculus
  siRNA target sequence for 4930402H24Rik (NM_029432.1,316-334).
gaaaacgggattttctgaa

SEQ ID NO: 738962 - DNA, 19 bp, Mus musculus
  siRNA target sequence for 4930402H24Rik (NM_029432.1,341-359).
ctagatgacgtgattttat

SEQ ID NO: 738963 - DNA, 19 bp, Mus musculus
  siRNA target sequence for 4930402H24Rik (NM_029432.1,397-415).
cgtcaactaccgctatctt

SEQ ID NO: 738964 - DNA, 19 bp, Mus musculus
  siRNA target sequence for 4930402H24Rik (NM_029432.1,398-416).
gtcaactaccgctatcttt

SEQ ID NO: 738965 - DNA, 19 bp, Mus musculus
  siRNA target sequence for 4930402H24Rik (NM_029432.1,451-469).
ccattgcatgacggaaaat

SEQ ID NO: 738966 - DNA, 19 bp, Mus musculus
  siRNA target sequence for 4930402H24Rik (NM_029432.1,456-474).
gcatgacggaaaatgagta

SEQ ID NO: 738967 - DNA, 19 bp, Mus musculus
  siRNA target sequence for 4930402H24Rik (NM_029432.1,460-478).
gacggaaaatgagtatgaa

SEQ ID NO: 738968 - DNA, 19 bp, Mus musculus
  siRNA target sequence for 4930402H24Rik (NM_029432.1,533-551).
gactgtagtaggattggta

SEQ ID NO: 738969 - DNA, 19 bp, Mus musculus
  siRNA target sequence for 4930402H24Rik (NM_029432.1,540-558).
gtaggattggtattcctta

SEQ ID NO: 738970 - DNA, 19 bp, Mus musculus
  siRNA target sequence for 4930402H24Rik (NM_029432.1,561-579).
gctcccaaggtcacttaca

SEQ ID NO: 738971 - DNA, 19 bp, Mus musculus
  siRNA target sequence for 4930402H24Rik (NM_029432.1,565-583).
ccaaggtcacttacagata

SEQ ID NO: 738972 - DNA, 19 bp, Mus musculus
  siRNA target sequence for 4930402H24Rik (NM_029432.1,780-798).
ggacgagcttctttgctaa

SEQ ID NO: 738973 - DNA, 19 bp, Mus musculus
  siRNA target sequence for 4930402H24Rik (NM_029432.1,784-802).
gagcttctttgctaacttt

SEQ ID NO: 738974 - DNA, 19 bp, Mus musculus
  siRNA target sequence for 4930402H24Rik (NM_029432.1,844-862).
ggcgggtgagccattcaga

SEQ ID NO: 738975 - DNA, 19 bp, Mus musculus
  siRNA target sequence for 4930402H24Rik (NM_029432.1,845-863).
gcgggtgagccattcagaa

SEQ ID NO: 738976 - DNA, 19 bp, Mus musculus
  siRNA target sequence for 4930402H24Rik (NM_029432.1,864-882).
gctacttcggtcatggaat

SEQ ID NO: 738977 - DNA, 19 bp, Mus musculus
  siRNA target sequence for 4930402H24Rik (NM_029432.1,1026-1044).
ggagctttgccaaacacat

SEQ ID NO: 738978 - DNA, 19 bp, Mus musculus
  siRNA target sequence for 4930402H24Rik (NM_029432.1,1081-1099).
ctgttcaagaacatacttt

SEQ ID NO: 738979 - DNA, 19 bp, Mus musculus
  siRNA target sequence for 4930402H24Rik (NM_029432.1,1083-1101).
gttcaagaacatacttttt

SEQ ID NO: 738980 - DNA, 19 bp, Mus musculus
  siRNA target sequence for 4930402H24Rik (NM_029432.1,1096-1114).
cttttttggagctactcat

SEQ ID NO: 738981 - DNA, 19 bp, Mus musculus
  siRNA target sequence for 4930402H24Rik (NM_029432.1,1104-1122).
gagctactcatgttcctta

SEQ ID NO: 738982 - DNA, 19 bp, Mus musculus
  siRNA target sequence for 4930402H24Rik (NM_029432.1,1157-1175).
gagcaaattaggctcttat

SEQ ID NO: 738983 - DNA, 19 bp, Mus musculus
  siRNA target sequence for 4930402H24Rik (NM_029432.1,1167-1185).
ggctcttatcccagatata

SEQ ID NO: 738984 - DNA, 19 bp, Mus musculus
  siRNA target sequence for 4930402H24Rik (NM_029432.1,1210-1228).
ggctggcattgcatgttat

SEQ ID NO: 738985 - DNA, 19 bp, Mus musculus
  siRNA target sequence for 4930402H24Rik (NM_029432.1,1214-1232).
ggcattgcatgttatgcta

SEQ ID NO: 738986 - DNA, 19 bp, Mus musculus
  siRNA target sequence for 4930402H24Rik (NM_029432.1,1215-1233).
gcattgcatgttatgctaa

SEQ ID NO: 738987 - DNA, 19 bp, Mus musculus
  siRNA target sequence for 4930402H24Rik (NM_029432.1,1220-1238).
gcatgttatgctaaaactt

SEQ ID NO: 738988 - DNA, 19 bp, Mus musculus
  siRNA target sequence for 4930402H24Rik (NM_029432.1,1299-1317).
ctgagttggttccattcaa

SEQ ID NO: 738989 - DNA, 19 bp, Mus musculus
  siRNA target sequence for 4930402H24Rik (NM_029432.1,1332-1350).
ccaaggtgacttttcatat

SEQ ID NO: 738990 - DNA, 19 bp, Mus musculus
  siRNA target sequence for 4930402H24Rik (NM_029432.1,1333-1351).
caaggtgacttttcatata

SEQ ID NO: 738991 - DNA, 19 bp, Mus musculus
  siRNA target sequence for 4930402H24Rik (NM_029432.1,1422-1440).
ctcgtatgaccgtctatga

SEQ ID NO: 738992 - DNA, 19 bp, Mus musculus
  siRNA target sequence for 4930402H24Rik (NM_029432.1,1424-1442).
cgtatgaccgtctatgaca

SEQ ID NO: 738993 - DNA, 19 bp, Mus musculus
  siRNA target sequence for 4930402H24Rik (NM_029432.1,1425-1443).
gtatgaccgtctatgacat

SEQ ID NO: 738994 - DNA, 19 bp, Mus musculus
  siRNA target sequence for 4930402H24Rik (NM_029432.1,1490-1508).
gtcttctcagagtcgtttt

SEQ ID NO: 738995 - DNA, 19 bp, Mus musculus
  siRNA target sequence for 4930402H24Rik (NM_029432.1,1512-1530).
catctcggatcttggttaa

SEQ ID NO: 738996 - DNA, 19 bp, Mus musculus
  siRNA target sequence for 4930402H24Rik (NM_029432.1,1517-1535).
cggatcttggttaaagaaa

SEQ ID NO: 738997 - DNA, 19 bp, Mus musculus
  siRNA target sequence for 4930402H24Rik (NM_029432.1,1599-1617).
gttcctggctggtagaaga

SEQ ID NO: 738998 - DNA, 19 bp, Mus musculus
  siRNA target sequence for 4930402H24Rik (NM_029432.1,1704-1722).
gagcgtatctttattccaa

SEQ ID NO: 738999 - DNA, 19 bp, Mus musculus
  siRNA target sequence for 4930402H24Rik (NM_029432.1,1908-1926).
ctcatctcccagttcactt

SEQ ID NO: 739000 - DNA, 19 bp, Mus musculus
  siRNA target sequence for 4930402H24Rik (NM_029432.1,2034-2052).
ggctttctttaaaagtgat

SEQ ID NO: 739001 - DNA, 19 bp, Mus musculus
  siRNA target sequence for 4930402H24Rik (NM_029432.1,2050-2068).
gatccaggaggatggatta

SEQ ID NO: 739002 - DNA, 19 bp, Mus musculus
  siRNA target sequence for 4930402H24Rik (NM_029432.1,2063-2081).
ggattatctgcggaacaaa

SEQ ID NO: 739003 - DNA, 19 bp, Mus musculus
  siRNA target sequence for 4930402H24Rik (NM_029432.1,2064-2082).
gattatctgcggaacaaaa

SEQ ID NO: 739004 - DNA, 19 bp, Mus musculus
  siRNA target sequence for 4930402H24Rik (NM_029432.1,2277-2295).
gccctgctcacgaagtaga

SEQ ID NO: 739005 - DNA, 19 bp, Mus musculus
  siRNA target sequence for 4930402H24Rik (NM_029432.1,2416-2434).
catggacagctctgaatgt

SEQ ID NO: 739006 - DNA, 19 bp, Mus musculus
  siRNA target sequence for 4930402H24Rik (NM_029432.1,2510-2528).
gcttacatccgcaagaaga

SEQ ID NO: 739007 - DNA, 19 bp, Mus musculus
  siRNA target sequence for 4930402H24Rik (NM_029432.1,2791-2809).
cctcatcagggcttccaat

SEQ ID NO: 739008 - DNA, 19 bp, Mus musculus
  siRNA target sequence for 4930402H24Rik (NM_029432.1,2811-2829).
ctaccgcagccttcattct

SEQ ID NO: 739009 - DNA, 19 bp, Mus musculus
  siRNA target sequence for 4930402H24Rik (NM_029432.1,2821-2839).
cttcattcttgccgaaaat

SEQ ID NO: 739010 - DNA, 19 bp, Mus musculus
  siRNA target sequence for 4930402H24Rik (NM_029432.1,2870-2888).
ctgattctctcagaaaata

SEQ ID NO: 739011 - DNA, 19 bp, Mus musculus
  siRNA target sequence for 4930402H24Rik (NM_029432.1,2908-2926).
gctacgttctcgatactta

SEQ ID NO: 739012 - DNA, 19 bp, Mus musculus
  siRNA target sequence for 4930402H24Rik (NM_029432.1,2913-2931).
gttctcgatacttactgtt

SEQ ID NO: 739013 - DNA, 19 bp, Mus musculus
  siRNA target sequence for 4930402H24Rik (NM_029432.1,2936-2954).
ggctggtatgaaggtaaat

SEQ ID NO: 739014 - DNA, 19 bp, Mus musculus
  siRNA target sequence for 4930402H24Rik (NM_029432.1,2937-2955).
gctggtatgaaggtaaatt

SEQ ID NO: 739015 - DNA, 19 bp, Mus musculus
  siRNA target sequence for 4930402H24Rik (NM_029432.1,2940-2958).
ggtatgaaggtaaatttga

SEQ ID NO: 739016 - DNA, 19 bp, Mus musculus
  siRNA target sequence for 4930402H24Rik (NM_029432.1,2967-2985).
ccgtctttccgctaatggt

SEQ ID NO: 739017 - DNA, 19 bp, Mus musculus
  siRNA target sequence for 4930402H24Rik (NM_029432.1,2968-2986).
cgtctttccgctaatggtt

SEQ ID NO: 739018 - DNA, 19 bp, Mus musculus
  siRNA target sequence for 4930402H24Rik (NM_029432.1,3139-3157).
ggaggtttgccacaatact

SEQ ID NO: 739019 - DNA, 19 bp, Mus musculus
  siRNA target sequence for 4930402H24Rik (NM_029432.1,3142-3160).
ggtttgccacaatacttta

SEQ ID NO: 739020 - DNA, 19 bp, Mus musculus
  siRNA target sequence for 4930402H24Rik (NM_029432.1,3174-3192).
ccattgtgccagttttgga

SEQ ID NO: 739021 - DNA, 19 bp, Mus musculus
  siRNA target sequence for 4930402H24Rik (NM_029432.1,3416-3434).
cctgcaggctatttttaca

SEQ ID NO: 739022 - DNA, 19 bp, Mus musculus
  siRNA target sequence for 4930402H24Rik (NM_029432.1,3433-3451).
caatggcacccagtttgtt

SEQ ID NO: 739023 - DNA, 19 bp, Mus musculus
  siRNA target sequence for 4930402H24Rik (NM_029432.1,3437-3455).
ggcacccagtttgttaact

SEQ ID NO: 739024 - DNA, 19 bp, Mus musculus
  siRNA target sequence for 4930402H24Rik (NM_029432.1,3438-3456).
gcacccagtttgttaactt

SEQ ID NO: 739025 - DNA, 19 bp, Mus musculus
  siRNA target sequence for 4930402H24Rik (NM_029432.1,3483-3501).
cactcatggaccagttcat

SEQ ID NO: 739026 - DNA, 19 bp, Mus musculus
  siRNA target sequence for 4930402H24Rik (NM_029432.1,3490-3508).
ggaccagttcatgaatgat

SEQ ID NO: 739027 - DNA, 19 bp, Mus musculus
  siRNA target sequence for 4930431B11Rik (NM_029434.1,244-262).
ccgaagtccagatattgaa

SEQ ID NO: 739028 - DNA, 19 bp, Mus musculus
  siRNA target sequence for 4930431B11Rik (NM_029434.1,252-270).
cagatattgaacaaggaaa

SEQ ID NO: 739029 - DNA, 19 bp, Mus musculus
  siRNA target sequence for 4930431B11Rik (NM_029434.1,287-305).
ccatactctcattattcgt

SEQ ID NO: 739030 - DNA, 19 bp, Mus musculus
  siRNA target sequence for 4930431B11Rik (NM_029434.1,370-388).
cagtactagggagaagaat

SEQ ID NO: 739031 - DNA, 19 bp, Mus musculus
  siRNA target sequence for 4930431B11Rik (NM_029434.1,424-442).
cccaaccgttaggaaagta

SEQ ID NO: 739032 - DNA, 19 bp, Mus musculus
  siRNA target sequence for 4930431B11Rik (NM_029434.1,425-443).
ccaaccgttaggaaagtaa

SEQ ID NO: 739033 - DNA, 19 bp, Mus musculus
  siRNA target sequence for 4930431B11Rik (NM_029434.1,524-542).
gatccagatatcgtaacaa

SEQ ID NO: 739034 - DNA, 19 bp, Mus musculus
  siRNA target sequence for 4930431B11Rik (NM_029434.1,536-554).
gtaacaaagcgggttcttt

SEQ ID NO: 739035 - DNA, 19 bp, Mus musculus
  siRNA target sequence for 4930431B11Rik (NM_029434.1,668-686).
gagaaagcgctgaataagt

SEQ ID NO: 739036 - DNA, 19 bp, Mus musculus
  siRNA target sequence for 4930431B11Rik (NM_029434.1,670-688).
gaaagcgctgaataagttt

SEQ ID NO: 739037 - DNA, 19 bp, Mus musculus
  siRNA target sequence for 4930431B11Rik (NM_029434.1,703-721).
cgagatctcacaacttata

SEQ ID NO: 739038 - DNA, 19 bp, Mus musculus
  siRNA target sequence for 4930431B11Rik (NM_029434.1,716-734).
cttatacaccgccataaca

SEQ ID NO: 739039 - DNA, 19 bp, Mus musculus
  siRNA target sequence for 4930431B11Rik (NM_029434.1,722-740).
caccgccataacaatgaga

SEQ ID NO: 739040 - DNA, 19 bp, Mus musculus
  siRNA target sequence for 4930431B11Rik (NM_029434.1,724-742).
ccgccataacaatgagatt

SEQ ID NO: 739041 - DNA, 19 bp, Mus musculus
  siRNA target sequence for 4930431B11Rik (NM_029434.1,725-743).
cgccataacaatgagatta

SEQ ID NO: 739042 - DNA, 19 bp, Mus musculus
  siRNA target sequence for 4930431B11Rik (NM_029434.1,739-757).
gattactgcgctcaaagaa

SEQ ID NO: 739043 - DNA, 19 bp, Mus musculus
  siRNA target sequence for 4930431B11Rik (NM_029434.1,821-839).
gaactatttaggacgaaat

SEQ ID NO: 739044 - DNA, 19 bp, Mus musculus
  siRNA target sequence for 4930431B11Rik (NM_029434.1,834-852).
cgaaattttccttacagaa

SEQ ID NO: 739045 - DNA, 19 bp, Mus musculus
  siRNA target sequence for 4930431B11Rik (NM_029434.1,911-929).
ctggtttcggcagagttaa

SEQ ID NO: 739046 - DNA, 19 bp, Mus musculus
  siRNA target sequence for 4930431B11Rik (NM_029434.1,913-931).
ggtttcggcagagttaaaa

SEQ ID NO: 739047 - DNA, 19 bp, Mus musculus
  siRNA target sequence for 4930431B11Rik (NM_029434.1,914-932).
gtttcggcagagttaaaat

SEQ ID NO: 739048 - DNA, 19 bp, Mus musculus
  siRNA target sequence for 4930431B11Rik (NM_029434.1,919-937).
ggcagagttaaaattagat

SEQ ID NO: 739049 - DNA, 19 bp, Mus musculus
  siRNA target sequence for 4930431B11Rik (NM_029434.1,1033-1051).
cgaggcttacgatgaaaat

SEQ ID NO: 739050 - DNA, 19 bp, Mus musculus
  siRNA target sequence for 4930431B11Rik (NM_029434.1,1034-1052).
gaggcttacgatgaaaata

SEQ ID NO: 739051 - DNA, 19 bp, Mus musculus
  siRNA target sequence for 4930431B11Rik (NM_029434.1,1036-1054).
ggcttacgatgaaaataaa

SEQ ID NO: 739052 - DNA, 19 bp, Mus musculus
  siRNA target sequence for 4930431B11Rik (NM_029434.1,1103-1121).
gagaaagaattggatataa

SEQ ID NO: 739053 - DNA, 19 bp, Mus musculus
  siRNA target sequence for 4930431B11Rik (NM_029434.1,1197-1215).
gccagagtgactttacaga

SEQ ID NO: 739054 - DNA, 19 bp, Mus musculus
  siRNA target sequence for 4930431B11Rik (NM_029434.1,1305-1323).
gatgggatgaaccagaata

SEQ ID NO: 739055 - DNA, 19 bp, Mus musculus
  siRNA target sequence for 4930431B11Rik (NM_029434.1,1308-1326).
gggatgaaccagaatatct

SEQ ID NO: 739056 - DNA, 19 bp, Mus musculus
  siRNA target sequence for 4930431B11Rik (NM_029434.1,1345-1363).
ccaggatctcaacaaacat

SEQ ID NO: 739057 - DNA, 19 bp, Mus musculus
  siRNA target sequence for 4930431B11Rik (NM_029434.1,1361-1379).
catggatcagagatgctaa

SEQ ID NO: 739058 - DNA, 19 bp, Mus musculus
  siRNA target sequence for 4930431B11Rik (NM_029434.1,1453-1471).
gcctgagagtggtaatctt

SEQ ID NO: 739059 - DNA, 19 bp, Mus musculus
  siRNA target sequence for 4930431B11Rik (NM_029434.1,1454-1472).
cctgagagtggtaatcttt

SEQ ID NO: 739060 - DNA, 19 bp, Mus musculus
  siRNA target sequence for 4930431B11Rik (NM_029434.1,1455-1473).
ctgagagtggtaatctttt

SEQ ID NO: 739061 - DNA, 19 bp, Mus musculus
  siRNA target sequence for 4930447C04Rik (NM_029444.1,121-139).
cagtatgagcaagacataa

SEQ ID NO: 739062 - DNA, 19 bp, Mus musculus
  siRNA target sequence for 4930447C04Rik (NM_029444.1,127-145).
gagcaagacataagtatta

SEQ ID NO: 739063 - DNA, 19 bp, Mus musculus
  siRNA target sequence for 4930447C04Rik (NM_029444.1,148-166).
gaagatacgattcaaagaa

SEQ ID NO: 739064 - DNA, 19 bp, Mus musculus
  siRNA target sequence for 4930447C04Rik (NM_029444.1,151-169).
gatacgattcaaagaatta

SEQ ID NO: 739065 - DNA, 19 bp, Mus musculus
  siRNA target sequence for 4930447C04Rik (NM_029444.1,155-173).
cgattcaaagaattaataa

SEQ ID NO: 739066 - DNA, 19 bp, Mus musculus
  siRNA target sequence for 4930447C04Rik (NM_029444.1,212-230).
ctaagctacgtgaagctat

SEQ ID NO: 739067 - DNA, 19 bp, Mus musculus
  siRNA target sequence for 4930447C04Rik (NM_029444.1,217-235).
ctacgtgaagctataaaca

SEQ ID NO: 739068 - DNA, 19 bp, Mus musculus
  siRNA target sequence for 4930447C04Rik (NM_029444.1,253-271).
gcttttcactataaacata

SEQ ID NO: 739069 - DNA, 19 bp, Mus musculus
  siRNA target sequence for 4930447C04Rik (NM_029444.1,303-321).
gaagccaacatgtgatgtt

SEQ ID NO: 739070 - DNA, 19 bp, Mus musculus
  siRNA target sequence for 4930447C04Rik (NM_029444.1,306-324).
gccaacatgtgatgttttt

SEQ ID NO: 739071 - DNA, 19 bp, Mus musculus
  siRNA target sequence for 4930447C04Rik (NM_029444.1,308-326).
caacatgtgatgtttttca

SEQ ID NO: 739072 - DNA, 19 bp, Mus musculus
  siRNA target sequence for 4930447C04Rik (NM_029444.1,415-433).
cagtatgaagatgttttga

SEQ ID NO: 739073 - DNA, 19 bp, Mus musculus
  siRNA target sequence for 4930447C04Rik (NM_029444.1,421-439).
gaagatgttttgaaacaat

SEQ ID NO: 739074 - DNA, 19 bp, Mus musculus
  siRNA target sequence for 4930447C04Rik (NM_029444.1,457-475).
gaaacacgtttttcatgta

SEQ ID NO: 739075 - DNA, 19 bp, Mus musculus
  siRNA target sequence for 4930447C04Rik (NM_029444.1,522-540).
gttggcatgtactgaacaa

SEQ ID NO: 739076 - DNA, 19 bp, Mus musculus
  siRNA target sequence for 4930447C04Rik (NM_029444.1,525-543).
ggcatgtactgaacaacta

SEQ ID NO: 739077 - DNA, 19 bp, Mus musculus
  siRNA target sequence for 4930447C04Rik (NM_029444.1,533-551).
ctgaacaactacaattgaa

SEQ ID NO: 739078 - DNA, 19 bp, Mus musculus
  siRNA target sequence for 4930447C04Rik (NM_029444.1,538-556).
caactacaattgaatgaaa

SEQ ID NO: 739079 - DNA, 19 bp, Mus musculus
  siRNA target sequence for 4930447C04Rik (NM_029444.1,602-620).
ctaaatggacattatacgt

SEQ ID NO: 739080 - DNA, 19 bp, Mus musculus
  siRNA target sequence for 4930447C04Rik (NM_029444.1,608-626).
ggacattatacgtagttaa

SEQ ID NO: 739081 - DNA, 19 bp, Mus musculus
  siRNA target sequence for 4930447C04Rik (NM_029444.1,609-627).
gacattatacgtagttaat

SEQ ID NO: 739082 - DNA, 19 bp, Mus musculus
  siRNA target sequence for 4930447C04Rik (NM_029444.1,611-629).
cattatacgtagttaattt

SEQ ID NO: 739083 - DNA, 19 bp, Mus musculus
  siRNA target sequence for 4930447C04Rik (NM_029444.1,652-670).
cttaaacgtgccaacaatt

SEQ ID NO: 739084 - DNA, 19 bp, Mus musculus
  siRNA target sequence for 4930447C04Rik (NM_029444.1,663-681).
caacaattttaccaaaaga

SEQ ID NO: 739085 - DNA, 19 bp, Mus musculus
  siRNA target sequence for 4930447C04Rik (NM_029444.1,666-684).
caattttaccaaaagatca

SEQ ID NO: 739086 - DNA, 19 bp, Mus musculus
  siRNA target sequence for 4930447C04Rik (NM_029444.1,674-692).
ccaaaagatcatttgaatt

SEQ ID NO: 739087 - DNA, 19 bp, Mus musculus
  siRNA target sequence for 4930447C04Rik (NM_029444.1,683-701).
catttgaattggagaaaga

SEQ ID NO: 739088 - DNA, 19 bp, Mus musculus
  siRNA target sequence for 4930447C04Rik (NM_029444.1,844-862).
gatgagcaagtatcaaaca

SEQ ID NO: 739089 - DNA, 19 bp, Mus musculus
  siRNA target sequence for 4930447C04Rik (NM_029444.1,896-914).
gtgagtctcagaaatttgt

SEQ ID NO: 739090 - DNA, 19 bp, Mus musculus
  siRNA target sequence for 4930447C04Rik (NM_029444.1,965-983).
gttcagccaatcagtcaaa

SEQ ID NO: 739091 - DNA, 19 bp, Mus musculus
  siRNA target sequence for 4930447C04Rik (NM_029444.1,968-986).
cagccaatcagtcaaagtt

SEQ ID NO: 739092 - DNA, 19 bp, Mus musculus
  siRNA target sequence for 4930447C04Rik (NM_029444.1,972-990).
caatcagtcaaagtttgtt

SEQ ID NO: 739093 - DNA, 19 bp, Mus musculus
  siRNA target sequence for 4930447C04Rik (NM_029444.1,1038-1056).
ctctggtatggatagtaat

SEQ ID NO: 739094 - DNA, 19 bp, Mus musculus
  siRNA target sequence for 4930447C04Rik (NM_029444.1,1043-1061).
gtatggatagtaattcaaa

SEQ ID NO: 739095 - DNA, 19 bp, Mus musculus
  siRNA target sequence for 4930447C04Rik (NM_029444.1,1088-1106).
gttcacaaggttttatgca

SEQ ID NO: 739096 - DNA, 19 bp, Mus musculus
  siRNA target sequence for 4930447C04Rik (NM_029444.1,1096-1114).
ggttttatgcaattcagat

SEQ ID NO: 739097 - DNA, 19 bp, Mus musculus
  siRNA target sequence for 4930447C04Rik (NM_029444.1,1110-1128).
cagattgaatcaaccaaat

SEQ ID NO: 739098 - DNA, 19 bp, Mus musculus
  siRNA target sequence for 4930447C04Rik (NM_029444.1,1112-1130).
gattgaatcaaccaaatta

SEQ ID NO: 739099 - DNA, 19 bp, Mus musculus
  siRNA target sequence for 4930447C04Rik (NM_029444.1,1184-1202).
cagtaagacaagtaagaga

SEQ ID NO: 739100 - DNA, 19 bp, Mus musculus
  siRNA target sequence for 4930447C04Rik (NM_029444.1,1186-1204).
gtaagacaagtaagagaat

SEQ ID NO: 739101 - DNA, 19 bp, Mus musculus
  siRNA target sequence for 4930447C04Rik (NM_029444.1,1214-1232).
gtacacaggccctatacat

SEQ ID NO: 739102 - DNA, 19 bp, Mus musculus
  siRNA target sequence for 4930447C04Rik (NM_029444.1,1239-1257).
ctttggaaagtccatagaa

SEQ ID NO: 739103 - DNA, 19 bp, Mus musculus
  siRNA target sequence for 4930447C04Rik (NM_029444.1,1348-1366).
cctgaatctatggagaaaa

SEQ ID NO: 739104 - DNA, 19 bp, Mus musculus
  siRNA target sequence for 4930447C04Rik (NM_029444.1,1349-1367).
ctgaatctatggagaaaat

SEQ ID NO: 739105 - DNA, 19 bp, Mus musculus
  siRNA target sequence for 4930447C04Rik (NM_029444.1,1412-1430).
catctgaaggacataaaca

SEQ ID NO: 739106 - DNA, 19 bp, Mus musculus
  siRNA target sequence for 4930447C04Rik (NM_029444.1,1435-1453).
gattctcctggattttcat

SEQ ID NO: 739107 - DNA, 19 bp, Mus musculus
  siRNA target sequence for 4930447C04Rik (NM_029444.1,1461-1479).
gagttacacctctagatca

SEQ ID NO: 739108 - DNA, 19 bp, Mus musculus
  siRNA target sequence for 4930447C04Rik (NM_029444.1,1472-1490).
ctagatcacctggactaaa

SEQ ID NO: 739109 - DNA, 19 bp, Mus musculus
  siRNA target sequence for 4930447C04Rik (NM_029444.1,1478-1496).
cacctggactaaatttatt

SEQ ID NO: 739110 - DNA, 19 bp, Mus musculus
  siRNA target sequence for 4930447C04Rik (NM_029444.1,1483-1501).
ggactaaatttatttgatt

SEQ ID NO: 739111 - DNA, 19 bp, Mus musculus
  siRNA target sequence for 4930447C04Rik (NM_029444.1,1502-1520).
cttctgtatctgattcaga

SEQ ID NO: 739112 - DNA, 19 bp, Mus musculus
  siRNA target sequence for 4930447C04Rik (NM_029444.1,1505-1523).
ctgtatctgattcagaaat

SEQ ID NO: 739113 - DNA, 19 bp, Mus musculus
  siRNA target sequence for 4930447C04Rik (NM_029444.1,1524-1542).
ctcatcggatcagtttaat

SEQ ID NO: 739114 - DNA, 19 bp, Mus musculus
  siRNA target sequence for 4930447C04Rik (NM_029444.1,1526-1544).
catcggatcagtttaatga

SEQ ID NO: 739115 - DNA, 19 bp, Mus musculus
  siRNA target sequence for 4930447C04Rik (NM_029444.1,1531-1549).
gatcagtttaatgaacatt

SEQ ID NO: 739116 - DNA, 19 bp, Mus musculus
  siRNA target sequence for 4930447C04Rik (NM_029444.1,1555-1573).
gcggtaaatctaaatcctt

SEQ ID NO: 739117 - DNA, 19 bp, Mus musculus
  siRNA target sequence for 4930447C04Rik (NM_029444.1,1574-1592).
cttcatcacaacaaggaat

SEQ ID NO: 739118 - DNA, 19 bp, Mus musculus
  siRNA target sequence for 4930447C04Rik (NM_029444.1,1585-1603).
caaggaattggaaacttat

SEQ ID NO: 739119 - DNA, 19 bp, Mus musculus
  siRNA target sequence for 4930447C04Rik (NM_029444.1,1711-1729).
caggatccaagcacaatga

SEQ ID NO: 739120 - DNA, 19 bp, Mus musculus
  siRNA target sequence for 4930447C04Rik (NM_029444.1,1713-1731).
ggatccaagcacaatgact

SEQ ID NO: 739121 - DNA, 19 bp, Mus musculus
  siRNA target sequence for 4930447C04Rik (NM_029444.1,1714-1732).
gatccaagcacaatgactt

SEQ ID NO: 739122 - DNA, 19 bp, Mus musculus
  siRNA target sequence for 4930511H01Rik (NM_029453.1,382-400).
gccttggagcgcaatggaa

SEQ ID NO: 739123 - DNA, 19 bp, Mus musculus
  siRNA target sequence for 4930511H01Rik (NM_029453.1,391-409).
cgcaatggaactatcaaga

SEQ ID NO: 739124 - DNA, 19 bp, Mus musculus
  siRNA target sequence for 4930511H01Rik (NM_029453.1,392-410).
gcaatggaactatcaagat

SEQ ID NO: 739125 - DNA, 19 bp, Mus musculus
  siRNA target sequence for 4930511H01Rik (NM_029453.1,462-480).
ggacgccatgccttaccta

SEQ ID NO: 739126 - DNA, 19 bp, Mus musculus
  siRNA target sequence for 4930511H01Rik (NM_029453.1,466-484).
gccatgccttacctacaat

SEQ ID NO: 739127 - DNA, 19 bp, Mus musculus
  siRNA target sequence for 4930511H01Rik (NM_029453.1,548-566).
cagacgttgagttaatcgt

SEQ ID NO: 739128 - DNA, 19 bp, Mus musculus
  siRNA target sequence for 4930511H01Rik (NM_029453.1,556-574).
gagttaatcgtccagaaaa

SEQ ID NO: 739129 - DNA, 19 bp, Mus musculus
  siRNA target sequence for 4930511H01Rik (NM_029453.1,570-588).
gaaaacctcccaacaaact

SEQ ID NO: 739130 - DNA, 19 bp, Mus musculus
  siRNA target sequence for 4930511H01Rik (NM_029453.1,576-594).
ctcccaacaaactaattat

SEQ ID NO: 739131 - DNA, 19 bp, Mus musculus
  siRNA target sequence for 4930511H01Rik (NM_029453.1,579-597).
ccaacaaactaattatagt

SEQ ID NO: 739132 - DNA, 19 bp, Mus musculus
  siRNA target sequence for 4930511H01Rik (NM_029453.1,618-636).
gaactgcattgatgtattt

SEQ ID NO: 739133 - DNA, 19 bp, Mus musculus
  siRNA target sequence for 4930511H01Rik (NM_029453.1,674-692).
caaatggcatgataatctt

SEQ ID NO: 739134 - DNA, 19 bp, Mus musculus
  siRNA target sequence for 4930511H01Rik (NM_029453.1,680-698).
gcatgataatcttatggaa

SEQ ID NO: 739135 - DNA, 19 bp, Mus musculus
  siRNA target sequence for 4930511H01Rik (NM_029453.1,681-699).
catgataatcttatggaat

SEQ ID NO: 739136 - DNA, 19 bp, Mus musculus
  siRNA target sequence for 4930511H01Rik (NM_029453.1,702-720).
catagcagcttctgtcaaa

SEQ ID NO: 739137 - DNA, 19 bp, Mus musculus
  siRNA target sequence for 4930511H01Rik (NM_029453.1,706-724).
gcagcttctgtcaaagaaa

SEQ ID NO: 739138 - DNA, 19 bp, Mus musculus
  siRNA target sequence for 4930511H01Rik (NM_029453.1,733-751).
cccgaggattgcttctcta

SEQ ID NO: 739139 - DNA, 19 bp, Mus musculus
  siRNA target sequence for 4930511H01Rik (NM_029453.1,738-756).
ggattgcttctctacagat

SEQ ID NO: 739140 - DNA, 19 bp, Mus musculus
  siRNA target sequence for 4930511H01Rik (NM_029453.1,766-784).
gatcccaaacgctttcgaa

SEQ ID NO: 739141 - DNA, 19 bp, Mus musculus
  siRNA target sequence for 4930511H01Rik (NM_029453.1,769-787).
cccaaacgctttcgaatta

SEQ ID NO: 739142 - DNA, 19 bp, Mus musculus
  siRNA target sequence for 4930511H01Rik (NM_029453.1,770-788).
ccaaacgctttcgaattaa

SEQ ID NO: 739143 - DNA, 19 bp, Mus musculus
  siRNA target sequence for 4930511H01Rik (NM_029453.1,771-789).
caaacgctttcgaattaat

SEQ ID NO: 739144 - DNA, 19 bp, Mus musculus
  siRNA target sequence for 4930511H01Rik (NM_029453.1,775-793).
cgctttcgaattaatgaca

SEQ ID NO: 739145 - DNA, 19 bp, Mus musculus
  siRNA target sequence for 4930511H01Rik (NM_029453.1,776-794).
gctttcgaattaatgacat

SEQ ID NO: 739146 - DNA, 19 bp, Mus musculus
  siRNA target sequence for 4930511H01Rik (NM_029453.1,804-822).
cttccgaagtcctgaatgt

SEQ ID NO: 739147 - DNA, 19 bp, Mus musculus
  siRNA target sequence for 4930511H01Rik (NM_029453.1,817-835).
gaatgtgtaaggagatcaa

SEQ ID NO: 739148 - DNA, 19 bp, Mus musculus
  siRNA target sequence for 4930511H01Rik (NM_029453.1,1066-1084).
ctggaggggaagctcataa

SEQ ID NO: 739149 - DNA, 19 bp, Mus musculus
  siRNA target sequence for 4930511H01Rik (NM_029453.1,1068-1086).
ggaggggaagctcataaaa

SEQ ID NO: 739150 - DNA, 19 bp, Mus musculus
  siRNA target sequence for 4930511H01Rik (NM_029453.1,1073-1091).
ggaagctcataaaagacat

SEQ ID NO: 739151 - DNA, 19 bp, Mus musculus
  siRNA target sequence for 4930511H01Rik (NM_029453.1,1176-1194).
ggaaggacacgttatcctt

SEQ ID NO: 739152 - DNA, 19 bp, Mus musculus
  siRNA target sequence for 4930511H01Rik (NM_029453.1,1177-1195).
gaaggacacgttatccttt

SEQ ID NO: 739153 - DNA, 19 bp, Mus musculus
  siRNA target sequence for 4930511H01Rik (NM_029453.1,1185-1203).
cgttatcctttgcagtatt

SEQ ID NO: 739154 - DNA, 19 bp, Mus musculus
  siRNA target sequence for 4930511H01Rik (NM_029453.1,1216-1234).
gatccacctcacgatgaaa

SEQ ID NO: 739155 - DNA, 19 bp, Mus musculus
  siRNA target sequence for 4930511H01Rik (NM_029453.1,1219-1237).
ccacctcacgatgaaaaga

SEQ ID NO: 739156 - DNA, 19 bp, Mus musculus
  siRNA target sequence for 4930511H01Rik (NM_029453.1,1220-1238).
cacctcacgatgaaaagaa

SEQ ID NO: 739157 - DNA, 19 bp, Mus musculus
  siRNA target sequence for 4930511H01Rik (NM_029453.1,1222-1240).
cctcacgatgaaaagaaat

SEQ ID NO: 739158 - DNA, 19 bp, Mus musculus
  siRNA target sequence for 4930511H01Rik (NM_029453.1,1225-1243).
cacgatgaaaagaaattca

SEQ ID NO: 739159 - DNA, 19 bp, Mus musculus
  siRNA target sequence for 4930511H01Rik (NM_029453.1,1259-1277).
ggcgtgcccattctttaga

SEQ ID NO: 739160 - DNA, 19 bp, Mus musculus
  siRNA target sequence for 4930511H01Rik (NM_029453.1,1288-1306).
gtgatctacgtggaagaaa

SEQ ID NO: 739161 - DNA, 19 bp, Mus musculus
  siRNA target sequence for 4930511H01Rik (NM_029453.1,1317-1335).
gcttactgcctccattgat

SEQ ID NO: 739162 - DNA, 19 bp, Mus musculus
  siRNA target sequence for 4930511H01Rik (NM_029453.1,1367-1385).
gtcattactgtgggtattt

SEQ ID NO: 739163 - DNA, 19 bp, Mus musculus
  siRNA target sequence for 4930511H01Rik (NM_029453.1,1388-1406).
gacaacgaagaatgtttga

SEQ ID NO: 739164 - DNA, 19 bp, Mus musculus
  siRNA target sequence for 4930511H01Rik (NM_029453.1,1413-1431).
ccaaacaagtgacttcatt

SEQ ID NO: 739165 - DNA, 19 bp, Mus musculus
  siRNA target sequence for 4930511H01Rik (NM_029453.1,1414-1432).
caaacaagtgacttcattt

SEQ ID NO: 739166 - DNA, 19 bp, Mus musculus
  siRNA target sequence for 4930511H01Rik (NM_029453.1,1434-1452).
gccttgtgatgttaatgaa

SEQ ID NO: 739167 - DNA, 19 bp, Mus musculus
  siRNA target sequence for 4930511H01Rik (NM_029453.1,1436-1454).
cttgtgatgttaatgaata

SEQ ID NO: 739168 - DNA, 19 bp, Mus musculus
  siRNA target sequence for 4930513H15Rik (NM_029454.2,325-343).
gcgagaaggtaaagtcaaa

SEQ ID NO: 739169 - DNA, 19 bp, Mus musculus
  siRNA target sequence for 4930513H15Rik (NM_029454.2,326-344).
cgagaaggtaaagtcaaaa

SEQ ID NO: 739170 - DNA, 19 bp, Mus musculus
  siRNA target sequence for 4930513H15Rik (NM_029454.2,346-364).
caccaggcagttaatcgaa

SEQ ID NO: 739171 - DNA, 19 bp, Mus musculus
  siRNA target sequence for 4930513H15Rik (NM_029454.2,380-398).
cataatattcagttactga

SEQ ID NO: 739172 - DNA, 19 bp, Mus musculus
  siRNA target sequence for 4930513H15Rik (NM_029454.2,424-442).
gatgatcgacaacttgaaa

SEQ ID NO: 739173 - DNA, 19 bp, Mus musculus
  siRNA target sequence for 4930513H15Rik (NM_029454.2,430-448).
cgacaacttgaaaatggat

SEQ ID NO: 739174 - DNA, 19 bp, Mus musculus
  siRNA target sequence for 4930513H15Rik (NM_029454.2,445-463).
ggattatcttacaaagatt

SEQ ID NO: 739175 - DNA, 19 bp, Mus musculus
  siRNA target sequence for 4930513H15Rik (NM_029454.2,469-487).
gctagaggaaaaacttaat

SEQ ID NO: 739176 - DNA, 19 bp, Mus musculus
  siRNA target sequence for 4930513H15Rik (NM_029454.2,516-534).
ctttgcgattagacaatca

SEQ ID NO: 739177 - DNA, 19 bp, Mus musculus
  siRNA target sequence for 4930513H15Rik (NM_029454.2,657-675).
gagatgttcgccgaaatct

SEQ ID NO: 739178 - DNA, 19 bp, Mus musculus
  siRNA target sequence for 4930513H15Rik (NM_029454.2,667-685).
ccgaaatctgcgagacttt

SEQ ID NO: 739179 - DNA, 19 bp, Mus musculus
  siRNA target sequence for 4930513H15Rik (NM_029454.2,700-718).
gcagtatgtgaagctaaaa

SEQ ID NO: 739180 - DNA, 19 bp, Mus musculus
  siRNA target sequence for 4930513H15Rik (NM_029454.2,701-719).
cagtatgtgaagctaaaat

SEQ ID NO: 739181 - DNA, 19 bp, Mus musculus
  siRNA target sequence for 4930513H15Rik (NM_029454.2,773-791).
gagctcgtgaacccattaa

SEQ ID NO: 739182 - DNA, 19 bp, Mus musculus
  siRNA target sequence for 4930513H15Rik (NM_029454.2,874-892).
gacggagacatatgaagaa

SEQ ID NO: 739183 - DNA, 19 bp, Mus musculus
  siRNA target sequence for 4930513H15Rik (NM_029454.2,907-925).
cgctgaacttctaattcga

SEQ ID NO: 739184 - DNA, 19 bp, Mus musculus
  siRNA target sequence for 4930513H15Rik (NM_029454.2,978-996).
gtgattaccgtcaagagaa

SEQ ID NO: 739185 - DNA, 19 bp, Mus musculus
  siRNA target sequence for 4930513H15Rik (NM_029454.2,1037-1055).
gacgtactcgagcttagaa

SEQ ID NO: 739186 - DNA, 19 bp, Mus musculus
  siRNA target sequence for 4930513H15Rik (NM_029454.2,1039-1057).
cgtactcgagcttagaaga

SEQ ID NO: 739187 - DNA, 19 bp, Mus musculus
  siRNA target sequence for 4930513H15Rik (NM_029454.2,1084-1102).
catagctcaagctaaggaa

SEQ ID NO: 739188 - DNA, 19 bp, Mus musculus
  siRNA target sequence for 4930513H15Rik (NM_029454.2,1099-1117).
ggaaaggaatgaattatca

SEQ ID NO: 739189 - DNA, 19 bp, Mus musculus
  siRNA target sequence for 4930513H15Rik (NM_029454.2,1258-1276).
caccaaaaaggctagagaa

SEQ ID NO: 739190 - DNA, 19 bp, Mus musculus
  siRNA target sequence for 4930513H15Rik (NM_029454.2,1269-1287).
ctagagaagagatgtatga

SEQ ID NO: 739191 - DNA, 19 bp, Mus musculus
  siRNA target sequence for 4930513H15Rik (NM_029454.2,1297-1315).
cacgtccagagaccattat

SEQ ID NO: 739192 - DNA, 19 bp, Mus musculus
  siRNA target sequence for 4930513H15Rik (NM_029454.2,1299-1317).
cgtccagagaccattataa

SEQ ID NO: 739193 - DNA, 19 bp, Mus musculus
  siRNA target sequence for 4930513H15Rik (NM_029454.2,1371-1389).
ctaatctagaaattgatca

SEQ ID NO: 739194 - DNA, 19 bp, Mus musculus
  siRNA target sequence for 4930513H15Rik (NM_029454.2,1402-1420).
ctctagggaaatgtatgaa

SEQ ID NO: 739195 - DNA, 19 bp, Mus musculus
  siRNA target sequence for 4930513H15Rik (NM_029454.2,1438-1456).
ccgtgaagcaagggataat

SEQ ID NO: 739196 - DNA, 19 bp, Mus musculus
  siRNA target sequence for 4930513H15Rik (NM_029454.2,1495-1513).
ggacgctctgggaaagcat

SEQ ID NO: 739197 - DNA, 19 bp, Mus musculus
  siRNA target sequence for 4930513H15Rik (NM_029454.2,1558-1576).
gagcaaggtatctgagttt

SEQ ID NO: 739198 - DNA, 19 bp, Mus musculus
  siRNA target sequence for 4930513H15Rik (NM_029454.2,1560-1578).
gcaaggtatctgagtttct

SEQ ID NO: 739199 - DNA, 19 bp, Mus musculus
  siRNA target sequence for 4930513H15Rik (NM_029454.2,1591-1609).
gttgaagtcctttgaaagt

SEQ ID NO: 739200 - DNA, 19 bp, Mus musculus
  siRNA target sequence for D19Ertd703e (NM_029456.1,366-384).
gaaccgcaagctcatagaa

SEQ ID NO: 739201 - DNA, 19 bp, Mus musculus
  siRNA target sequence for D19Ertd703e (NM_029456.1,369-387).
ccgcaagctcatagaattt

SEQ ID NO: 739202 - DNA, 19 bp, Mus musculus
  siRNA target sequence for D19Ertd703e (NM_029456.1,376-394).
ctcatagaatttctgttaa

SEQ ID NO: 739203 - DNA, 19 bp, Mus musculus
  siRNA target sequence for D19Ertd703e (NM_029456.1,420-438).
ctcattcattatagaagaa

SEQ ID NO: 739204 - DNA, 19 bp, Mus musculus
  siRNA target sequence for D19Ertd703e (NM_029456.1,465-483).
ccgatacaagtatccaaat

SEQ ID NO: 739205 - DNA, 19 bp, Mus musculus
  siRNA target sequence for D19Ertd703e (NM_029456.1,466-484).
cgatacaagtatccaaata

SEQ ID NO: 739206 - DNA, 19 bp, Mus musculus
  siRNA target sequence for D19Ertd703e (NM_029456.1,467-485).
gatacaagtatccaaatat

SEQ ID NO: 739207 - DNA, 19 bp, Mus musculus
  siRNA target sequence for D19Ertd703e (NM_029456.1,513-531).
ctcccagatgaatgataga

SEQ ID NO: 739208 - DNA, 19 bp, Mus musculus
  siRNA target sequence for D19Ertd703e (NM_029456.1,538-556).
gaagatgagtccttgctaa

SEQ ID NO: 739209 - DNA, 19 bp, Mus musculus
  siRNA target sequence for D19Ertd703e (NM_029456.1,598-616).
ccactactcgccagtttct

SEQ ID NO: 739210 - DNA, 19 bp, Mus musculus
  siRNA target sequence for D19Ertd703e (NM_029456.1,599-617).
cactactcgccagtttctt

SEQ ID NO: 739211 - DNA, 19 bp, Mus musculus
  siRNA target sequence for D19Ertd703e (NM_029456.1,601-619).
ctactcgccagtttcttca

SEQ ID NO: 739212 - DNA, 19 bp, Mus musculus
  siRNA target sequence for D19Ertd703e (NM_029456.1,621-639).
caaggtgctaagtattctt

SEQ ID NO: 739213 - DNA, 19 bp, Mus musculus
  siRNA target sequence for D19Ertd703e (NM_029456.1,780-798).
caggcaagatgttctgaat

SEQ ID NO: 739214 - DNA, 19 bp, Mus musculus
  siRNA target sequence for D19Ertd703e (NM_029456.1,846-864).
cccatcgcaagaagaagat

SEQ ID NO: 739215 - DNA, 19 bp, Mus musculus
  siRNA target sequence for D19Ertd703e (NM_029456.1,856-874).
gaagaagatcggcattcaa

SEQ ID NO: 739216 - DNA, 19 bp, Mus musculus
  siRNA target sequence for D19Ertd703e (NM_029456.1,878-896).
cctcacaatcactttgtga

SEQ ID NO: 739217 - DNA, 19 bp, Mus musculus
  siRNA target sequence for D19Ertd703e (NM_029456.1,879-897).
ctcacaatcactttgtgaa

SEQ ID NO: 739218 - DNA, 19 bp, Mus musculus
  siRNA target sequence for D19Ertd703e (NM_029456.1,909-927).
gagcagagaccagatgtta

SEQ ID NO: 739219 - DNA, 19 bp, Mus musculus
  siRNA target sequence for D19Ertd703e (NM_029456.1,912-930).
cagagaccagatgttacaa

SEQ ID NO: 739220 - DNA, 19 bp, Mus musculus
  siRNA target sequence for D19Ertd703e (NM_029456.1,914-932).
gagaccagatgttacaagt

SEQ ID NO: 739221 - DNA, 19 bp, Mus musculus
  siRNA target sequence for D19Ertd703e (NM_029456.1,1035-1053).
ggccatagtcagtgcaatt

SEQ ID NO: 739222 - DNA, 19 bp, Mus musculus
  siRNA target sequence for D19Ertd703e (NM_029456.1,1037-1055).
ccatagtcagtgcaattca

SEQ ID NO: 739223 - DNA, 19 bp, Mus musculus
  siRNA target sequence for D19Ertd703e (NM_029456.1,1096-1114).
gaaggccatatagaaatct

SEQ ID NO: 739224 - DNA, 19 bp, Mus musculus
  siRNA target sequence for D19Ertd703e (NM_029456.1,1132-1150).
cattcagcttgttcagtta

SEQ ID NO: 739225 - DNA, 19 bp, Mus musculus
  siRNA target sequence for D19Ertd703e (NM_029456.1,1136-1154).
cagcttgttcagttaacaa

SEQ ID NO: 739226 - DNA, 19 bp, Mus musculus
  siRNA target sequence for D19Ertd703e (NM_029456.1,1138-1156).
gcttgttcagttaacaaga

SEQ ID NO: 739227 - DNA, 19 bp, Mus musculus
  siRNA target sequence for D19Ertd703e (NM_029456.1,1257-1275).
cccacctgtggggaatact

SEQ ID NO: 739228 - DNA, 19 bp, Mus musculus
  siRNA target sequence for D19Ertd703e (NM_029456.1,1264-1282).
gtggggaatactcgattaa

SEQ ID NO: 739229 - DNA, 19 bp, Mus musculus
  siRNA target sequence for D19Ertd703e (NM_029456.1,1266-1284).
ggggaatactcgattaaat

SEQ ID NO: 739230 - DNA, 19 bp, Mus musculus
  siRNA target sequence for D19Ertd703e (NM_029456.1,1276-1294).
cgattaaatgtcattaggt

SEQ ID NO: 739231 - DNA, 19 bp, Mus musculus
  siRNA target sequence for D19Ertd703e (NM_029456.1,1277-1295).
gattaaatgtcattaggtt

SEQ ID NO: 739232 - DNA, 19 bp, Mus musculus
  siRNA target sequence for D19Ertd703e (NM_029456.1,1285-1303).
gtcattaggttgatatcca

SEQ ID NO: 739233 - DNA, 19 bp, Mus musculus
  siRNA target sequence for D19Ertd703e (NM_029456.1,1316-1334).
ccaataccagcagcataaa

SEQ ID NO: 739234 - DNA, 19 bp, Mus musculus
  siRNA target sequence for D19Ertd703e (NM_029456.1,1358-1376).
gcattggcgtcatattgga

SEQ ID NO: 739235 - DNA, 19 bp, Mus musculus
  siRNA target sequence for D19Ertd703e (NM_029456.1,1392-1410).
cacatggaataactttcta

SEQ ID NO: 739236 - DNA, 19 bp, Mus musculus
  siRNA target sequence for D19Ertd703e (NM_029456.1,1394-1412).
catggaataactttctaca

SEQ ID NO: 739237 - DNA, 19 bp, Mus musculus
  siRNA target sequence for D19Ertd703e (NM_029456.1,1411-1429).
cacacgcaagtggaaattt

SEQ ID NO: 739238 - DNA, 19 bp, Mus musculus
  siRNA target sequence for D19Ertd703e (NM_029456.1,1415-1433).
cgcaagtggaaatttgcat

SEQ ID NO: 739239 - DNA, 19 bp, Mus musculus
  siRNA target sequence for D19Ertd703e (NM_029456.1,1416-1434).
gcaagtggaaatttgcatt

SEQ ID NO: 739240 - DNA, 19 bp, Mus musculus
  siRNA target sequence for D19Ertd703e (NM_029456.1,1440-1458).
cattctggccagtcctttt

SEQ ID NO: 739241 - DNA, 19 bp, Mus musculus
  siRNA target sequence for D19Ertd703e (NM_029456.1,1475-1493).
gcacaattactgatcaaga

SEQ ID NO: 739242 - DNA, 19 bp, Mus musculus
  siRNA target sequence for D19Ertd703e (NM_029456.1,1542-1560).
gttaatagagcgaatactt

SEQ ID NO: 739243 - DNA, 19 bp, Mus musculus
  siRNA target sequence for D19Ertd703e (NM_029456.1,1601-1619).
gacgacggcatggttacat

SEQ ID NO: 739244 - DNA, 19 bp, Mus musculus
  siRNA target sequence for D19Ertd703e (NM_029456.1,1624-1642).
caccttacgaggatagcta

SEQ ID NO: 739245 - DNA, 19 bp, Mus musculus
  siRNA target sequence for D19Ertd703e (NM_029456.1,1631-1649).
cgaggatagctaactgtat

SEQ ID NO: 739246 - DNA, 19 bp, Mus musculus
  siRNA target sequence for D19Ertd703e (NM_029456.1,1634-1652).
ggatagctaactgtattgt

SEQ ID NO: 739247 - DNA, 19 bp, Mus musculus
  siRNA target sequence for D19Ertd703e (NM_029456.1,1673-1691).
cgaacagtgcgttagtaca

SEQ ID NO: 739248 - DNA, 19 bp, Mus musculus
  siRNA target sequence for D19Ertd703e (NM_029456.1,1773-1791).
gaggaacacggtagatcta

SEQ ID NO: 739249 - DNA, 19 bp, Mus musculus
  siRNA target sequence for D19Ertd703e (NM_029456.1,1786-1804).
gatctagccttttctgatt

SEQ ID NO: 739250 - DNA, 19 bp, Mus musculus
  siRNA target sequence for D19Ertd703e (NM_029456.1,1813-1831).
caacaaatgacgtccaatt

SEQ ID NO: 739251 - DNA, 19 bp, Mus musculus
  siRNA target sequence for D19Ertd703e (NM_029456.1,1816-1834).
caaatgacgtccaatttta

SEQ ID NO: 739252 - DNA, 19 bp, Mus musculus
  siRNA target sequence for D19Ertd703e (NM_029456.1,1876-1894).
gacgacattggcaatgttt

SEQ ID NO: 739253 - DNA, 19 bp, Mus musculus
  siRNA target sequence for D19Ertd703e (NM_029456.1,1908-1926).
gtcagatatcaactttact

SEQ ID NO: 739254 - DNA, 19 bp, Mus musculus
  siRNA target sequence for D19Ertd703e (NM_029456.1,1910-1928).
cagatatcaactttactct

SEQ ID NO: 739255 - DNA, 19 bp, Mus musculus
  siRNA target sequence for D19Ertd703e (NM_029456.1,2034-2052).
gaagcacattgcatttact

SEQ ID NO: 739256 - DNA, 19 bp, Mus musculus
  siRNA target sequence for D19Ertd703e (NM_029456.1,2129-2147).
ccaaacaagacctgtttga

SEQ ID NO: 739257 - DNA, 19 bp, Mus musculus
  siRNA target sequence for D19Ertd703e (NM_029456.1,2202-2220).
cacctggtcagccaacttt

SEQ ID NO: 739258 - DNA, 19 bp, Mus musculus
  siRNA target sequence for D19Ertd703e (NM_029456.1,2204-2222).
cctggtcagccaactttga

SEQ ID NO: 739259 - DNA, 19 bp, Mus musculus
  siRNA target sequence for D19Ertd703e (NM_029456.1,2217-2235).
ctttgacgtcccaatggaa

SEQ ID NO: 739260 - DNA, 19 bp, Mus musculus
  siRNA target sequence for D19Ertd703e (NM_029456.1,2242-2260).
catggtgctcccttagact

SEQ ID NO: 739261 - DNA, 19 bp, Mus musculus
  siRNA target sequence for D19Ertd703e (NM_029456.1,2289-2307).
ggagccaatgccaactaaa

SEQ ID NO: 739262 - DNA, 19 bp, Mus musculus
  siRNA target sequence for D19Ertd703e (NM_029456.1,2349-2367).
gagcacaaaggagtcttta

SEQ ID NO: 739263 - DNA, 19 bp, Mus musculus
  siRNA target sequence for D19Ertd703e (NM_029456.1,2372-2390).
gtaattcgcctgtggaaat

SEQ ID NO: 739264 - DNA, 19 bp, Mus musculus
  siRNA target sequence for D19Ertd703e (NM_029456.1,2513-2531).
gtacagacaaggtaactga

SEQ ID NO: 739265 - DNA, 19 bp, Mus musculus
  siRNA target sequence for D19Ertd703e (NM_029456.1,2546-2564).
gcggcatgaaggaaacact

SEQ ID NO: 739266 - DNA, 19 bp, Mus musculus
  siRNA target sequence for D19Ertd703e (NM_029456.1,2748-2766).
gccaagcgacccatcagtt

SEQ ID NO: 739267 - DNA, 19 bp, Mus musculus
  siRNA target sequence for D19Ertd703e (NM_029456.1,2749-2767).
ccaagcgacccatcagtta

SEQ ID NO: 739268 - DNA, 19 bp, Mus musculus
  siRNA target sequence for D19Ertd703e (NM_029456.1,2750-2768).
caagcgacccatcagttaa

SEQ ID NO: 739269 - DNA, 19 bp, Mus musculus
  siRNA target sequence for 4930562N12Rik (NM_029460.1,1041-1059).
cccctggaaggtaatatct

SEQ ID NO: 739270 - DNA, 19 bp, Mus musculus
  siRNA target sequence for 4930562N12Rik (NM_029460.1,1047-1065).
gaaggtaatatctcttact

SEQ ID NO: 739271 - DNA, 19 bp, Mus musculus
  siRNA target sequence for 4930583C14Rik (NM_029472.1,182-200).
ccccttcgacttccaattt

SEQ ID NO: 739272 - DNA, 19 bp, Mus musculus
  siRNA target sequence for 4930583C14Rik (NM_029472.1,184-202).
ccttcgacttccaatttgt

SEQ ID NO: 739273 - DNA, 19 bp, Mus musculus
  siRNA target sequence for 4930583C14Rik (NM_029472.1,229-247).
gcaaggaatacatcgaaat

SEQ ID NO: 739274 - DNA, 19 bp, Mus musculus
  siRNA target sequence for 4930583C14Rik (NM_029472.1,273-291).
ctcaaggacggcaagttca

SEQ ID NO: 739275 - DNA, 19 bp, Mus musculus
  siRNA target sequence for 4930583C14Rik (NM_029472.1,278-296).
ggacggcaagttcatctta

SEQ ID NO: 739276 - DNA, 19 bp, Mus musculus
  siRNA target sequence for 4930583C14Rik (NM_029472.1,304-322).
gtgtggctatcctcttcta

SEQ ID NO: 739277 - DNA, 19 bp, Mus musculus
  siRNA target sequence for 4930583C14Rik (NM_029472.1,404-422).
ctggcagcatacagctatt

SEQ ID NO: 739278 - DNA, 19 bp, Mus musculus
  siRNA target sequence for 4930583C14Rik (NM_029472.1,406-424).
ggcagcatacagctattca

SEQ ID NO: 739279 - DNA, 19 bp, Mus musculus
  siRNA target sequence for 4930583C14Rik (NM_029472.1,443-461).
cctgtggattaagttgata

SEQ ID NO: 739280 - DNA, 19 bp, Mus musculus
  siRNA target sequence for 4930583C14Rik (NM_029472.1,444-462).
ctgtggattaagttgataa

SEQ ID NO: 739281 - DNA, 19 bp, Mus musculus
  siRNA target sequence for 4930583C14Rik (NM_029472.1,485-503).
ggttcccactgagagatta

SEQ ID NO: 739282 - DNA, 19 bp, Mus musculus
  siRNA target sequence for 4930583C14Rik (NM_029472.1,489-507).
cccactgagagattagaga

SEQ ID NO: 739283 - DNA, 19 bp, Mus musculus
  siRNA target sequence for 4930583C14Rik (NM_029472.1,561-579).
caggacaagatgttcatca

SEQ ID NO: 739284 - DNA, 19 bp, Mus musculus
  siRNA target sequence for 4930583C14Rik (NM_029472.1,578-596).
cactggggaccatatctca

SEQ ID NO: 739285 - DNA, 19 bp, Mus musculus
  siRNA target sequence for 4930583C14Rik (NM_029472.1,633-651).
ccaatggggagtaatcaca

SEQ ID NO: 739286 - DNA, 19 bp, Mus musculus
  siRNA target sequence for 4930583C14Rik (NM_029472.1,634-652).
caatggggagtaatcacaa

SEQ ID NO: 739287 - DNA, 19 bp, Mus musculus
  siRNA target sequence for 4930583C14Rik (NM_029472.1,639-657).
gggagtaatcacaatgtct

SEQ ID NO: 739288 - DNA, 19 bp, Mus musculus
  siRNA target sequence for 4930583C14Rik (NM_029472.1,656-674).
ctttgtcagctctaagctt

SEQ ID NO: 739289 - DNA, 19 bp, Mus musculus
  siRNA target sequence for 4930583C14Rik (NM_029472.1,774-792).
ctagaccctacgatcaaga

SEQ ID NO: 739290 - DNA, 19 bp, Mus musculus
  siRNA target sequence for 4930583C14Rik (NM_029472.1,777-795).
gaccctacgatcaagatga

SEQ ID NO: 739291 - DNA, 19 bp, Mus musculus
  siRNA target sequence for 4930579A11Rik (NM_029478.2,135-153).
gaccagagacgcatagcaa

SEQ ID NO: 739292 - DNA, 19 bp, Mus musculus
  siRNA target sequence for 4930579A11Rik (NM_029478.2,140-158).
gagacgcatagcaatgagt

SEQ ID NO: 739293 - DNA, 19 bp, Mus musculus
  siRNA target sequence for 4930579A11Rik (NM_029478.2,142-160).
gacgcatagcaatgagtaa

SEQ ID NO: 739294 - DNA, 19 bp, Mus musculus
  siRNA target sequence for 4930579A11Rik (NM_029478.2,146-164).
catagcaatgagtaaggat

SEQ ID NO: 739295 - DNA, 19 bp, Mus musculus
  siRNA target sequence for 4930579A11Rik (NM_029478.2,217-235).
gggatcgggaagaaagaca

SEQ ID NO: 739296 - DNA, 19 bp, Mus musculus
  siRNA target sequence for 4930579A11Rik (NM_029478.2,261-279).
ctcattaccttgcagtatt

SEQ ID NO: 739297 - DNA, 19 bp, Mus musculus
  siRNA target sequence for 4930579A11Rik (NM_029478.2,309-327).
gaatggacctcaaaattgt

SEQ ID NO: 739298 - DNA, 19 bp, Mus musculus
  siRNA target sequence for 4930579A11Rik (NM_029478.2,326-344).
gtggcatcgtcaaagcatt

SEQ ID NO: 739299 - DNA, 19 bp, Mus musculus
  siRNA target sequence for 4930579A11Rik (NM_029478.2,400-418).
gagcgcaccaacagtatgt

SEQ ID NO: 739300 - DNA, 19 bp, Mus musculus
  siRNA target sequence for 4930579A11Rik (NM_029478.2,457-475).
ggataggcctggggatttt

SEQ ID NO: 739301 - DNA, 19 bp, Mus musculus
  siRNA target sequence for 4930579A11Rik (NM_029478.2,528-546).
ccacatatagcttcagtta

SEQ ID NO: 739302 - DNA, 19 bp, Mus musculus
  siRNA target sequence for 4930579A11Rik (NM_029478.2,531-549).
catatagcttcagttacat

SEQ ID NO: 739303 - DNA, 19 bp, Mus musculus
  siRNA target sequence for 4930579A11Rik (NM_029478.2,552-570).
gctgcttatgaatgcaatt

SEQ ID NO: 739304 - DNA, 19 bp, Mus musculus
  siRNA target sequence for 4930579A11Rik (NM_029478.2,561-579).
gaatgcaattcggtgaatt

SEQ ID NO: 739305 - DNA, 19 bp, Mus musculus
  siRNA target sequence for 4930579A11Rik (NM_029478.2,591-609).
ccctatcctgaccagatta

SEQ ID NO: 739306 - DNA, 19 bp, Mus musculus
  siRNA target sequence for 4930579A11Rik (NM_029478.2,629-647).
cgctgagggagccatttct

SEQ ID NO: 739307 - DNA, 19 bp, Mus musculus
  siRNA target sequence for 4930579A11Rik (NM_029478.2,652-670).
ggagtatcatctcaaaagt

SEQ ID NO: 739308 - DNA, 19 bp, Mus musculus
  siRNA target sequence for 4930579A11Rik (NM_029478.2,653-671).
gagtatcatctcaaaagtt

SEQ ID NO: 739309 - DNA, 19 bp, Mus musculus
  siRNA target sequence for 4930579A11Rik (NM_029478.2,850-868).
cagttcaaaaactagtaca

SEQ ID NO: 739310 - DNA, 19 bp, Mus musculus
  siRNA target sequence for 4930579A11Rik (NM_029478.2,869-887).
gaaagttggattttttgga

SEQ ID NO: 739311 - DNA, 19 bp, Mus musculus
  siRNA target sequence for 4930579A11Rik (NM_029478.2,893-911).
ggcctgtgcttctattcca

SEQ ID NO: 739312 - DNA, 19 bp, Mus musculus
  siRNA target sequence for 4930579A11Rik (NM_029478.2,924-942).
gacctggctggaataacgt

SEQ ID NO: 739313 - DNA, 19 bp, Mus musculus
  siRNA target sequence for 4930579A11Rik (NM_029478.2,946-964).
ggcacttccttgtaccttt

SEQ ID NO: 739314 - DNA, 19 bp, Mus musculus
  siRNA target sequence for 4930579A11Rik (NM_029478.2,989-1007).
gattgggaaagcaatcatt

SEQ ID NO: 739315 - DNA, 19 bp, Mus musculus
  siRNA target sequence for 4930579A11Rik (NM_029478.2,999-1017).
gcaatcattaaaatgcata

SEQ ID NO: 739316 - DNA, 19 bp, Mus musculus
  siRNA target sequence for 4930579A11Rik (NM_029478.2,1177-1195).
gcacaccgcagggagaaaa

SEQ ID NO: 739317 - DNA, 19 bp, Mus musculus
  siRNA target sequence for 4930579A11Rik (NM_029478.2,1198-1216).
ggttatcctggatgtttga

SEQ ID NO: 739318 - DNA, 19 bp, Mus musculus
  siRNA target sequence for 4930579A11Rik (NM_029478.2,1227-1245).
gttgcaatggtgtgttact

SEQ ID NO: 739319 - DNA, 19 bp, Mus musculus
  siRNA target sequence for 4930579A11Rik (NM_029478.2,1231-1249).
caatggtgtgttactttgt

SEQ ID NO: 739320 - DNA, 19 bp, Mus musculus
  siRNA target sequence for 4930579A11Rik (NM_029478.2,1240-1258).
gttactttgtcctgtctat

SEQ ID NO: 739321 - DNA, 19 bp, Mus musculus
  siRNA target sequence for 5033406L14Rik (NM_029492.2,147-165).
gagctgtgcgtgagtacta

SEQ ID NO: 739322 - DNA, 19 bp, Mus musculus
  siRNA target sequence for 5033406L14Rik (NM_029492.2,149-167).
gctgtgcgtgagtactatt

SEQ ID NO: 739323 - DNA, 19 bp, Mus musculus
  siRNA target sequence for 5033406L14Rik (NM_029492.2,150-168).
ctgtgcgtgagtactattt

SEQ ID NO: 739324 - DNA, 19 bp, Mus musculus
  siRNA target sequence for 5033406L14Rik (NM_029492.2,241-259).
ggtcttattggatgacaat

SEQ ID NO: 739325 - DNA, 19 bp, Mus musculus
  siRNA target sequence for 5033406L14Rik (NM_029492.2,273-291).
gctagcccttccaaagagt

SEQ ID NO: 739326 - DNA, 19 bp, Mus musculus
  siRNA target sequence for 5033406L14Rik (NM_029492.2,274-292).
ctagcccttccaaagagtt

SEQ ID NO: 739327 - DNA, 19 bp, Mus musculus
  siRNA target sequence for 5033406L14Rik (NM_029492.2,277-295).
gcccttccaaagagttcta

SEQ ID NO: 739328 - DNA, 19 bp, Mus musculus
  siRNA target sequence for 5033406L14Rik (NM_029492.2,288-306).
gagttctacttgtcaaact

SEQ ID NO: 739329 - DNA, 19 bp, Mus musculus
  siRNA target sequence for 5033406L14Rik (NM_029492.2,410-428).
ggctatccgatattgtgaa

SEQ ID NO: 739330 - DNA, 19 bp, Mus musculus
  siRNA target sequence for 5033406L14Rik (NM_029492.2,412-430).
ctatccgatattgtgaaaa

SEQ ID NO: 739331 - DNA, 19 bp, Mus musculus
  siRNA target sequence for 5033406L14Rik (NM_029492.2,416-434).
ccgatattgtgaaaaatgt

SEQ ID NO: 739332 - DNA, 19 bp, Mus musculus
  siRNA target sequence for 5033406L14Rik (NM_029492.2,528-546).
gtgggatttactaattaca

SEQ ID NO: 739333 - DNA, 19 bp, Mus musculus
  siRNA target sequence for 5033406L14Rik (NM_029492.2,566-584).
gttgtattctctactatat

SEQ ID NO: 739334 - DNA, 19 bp, Mus musculus
  siRNA target sequence for 5033406L14Rik (NM_029492.2,634-652).
cgaatgaaccaacagtttt

SEQ ID NO: 739335 - DNA, 19 bp, Mus musculus
  siRNA target sequence for 5033406L14Rik (NM_029492.2,720-738).
gtgctctcactatttagct

SEQ ID NO: 739336 - DNA, 19 bp, Mus musculus
  siRNA target sequence for 5033406L14Rik (NM_029492.2,766-784).
gaacgacaatagaatcatt

SEQ ID NO: 739337 - DNA, 19 bp, Mus musculus
  siRNA target sequence for 5033406L14Rik (NM_029492.2,770-788).
gacaatagaatcatttcgt

SEQ ID NO: 739338 - DNA, 19 bp, Mus musculus
  siRNA target sequence for 5033406L14Rik (NM_029492.2,781-799).
catttcgtgcacctatgtt

SEQ ID NO: 739339 - DNA, 19 bp, Mus musculus
  siRNA target sequence for 5033406L14Rik (NM_029492.2,797-815).
gttttcttatggaatagat

SEQ ID NO: 739340 - DNA, 19 bp, Mus musculus
  siRNA target sequence for 5033406L14Rik (NM_029492.2,807-825).
ggaatagatggaaatggtt

SEQ ID NO: 739341 - DNA, 19 bp, Mus musculus
  siRNA target sequence for 5033406L14Rik (NM_029492.2,834-852).
ggatgcagtaaaaattgga

SEQ ID NO: 739342 - DNA, 19 bp, Mus musculus
  siRNA target sequence for 5033406L14Rik (NM_029492.2,884-902).
gctagttccaatattctca

SEQ ID NO: 739343 - DNA, 19 bp, Mus musculus
  siRNA target sequence for 5033406L14Rik (NM_029492.2,979-997).
gtgactacgtcagaagtat

SEQ ID NO: 739344 - DNA, 19 bp, Mus musculus
  siRNA target sequence for 5033406L14Rik (NM_029492.2,1026-1044).
ccacttagtgaatcaaaaa

SEQ ID NO: 739345 - DNA, 19 bp, Mus musculus
  siRNA target sequence for 5033406L14Rik (NM_029492.2,1047-1065).
cgcttattggacagtgaat

SEQ ID NO: 739346 - DNA, 19 bp, Mus musculus
  siRNA target sequence for 5033406L14Rik (NM_029492.2,1049-1067).
cttattggacagtgaatct

SEQ ID NO: 739347 - DNA, 19 bp, Mus musculus
  siRNA target sequence for 5033406L14Rik (NM_029492.2,1110-1128).
gggacaaataaccatgtta

SEQ ID NO: 739348 - DNA, 19 bp, Mus musculus
  siRNA target sequence for 5033406L14Rik (NM_029492.2,1112-1130).
gacaaataaccatgttaca

SEQ ID NO: 739349 - DNA, 19 bp, Mus musculus
  siRNA target sequence for 2310046K10Rik (NM_029495.1,282-300).
ggaagcgcaggcacataca

SEQ ID NO: 739350 - DNA, 19 bp, Mus musculus
  siRNA target sequence for 2310046K10Rik (NM_029495.1,332-350).
gaagatacagagaattgct

SEQ ID NO: 739351 - DNA, 19 bp, Mus musculus
  siRNA target sequence for 2310046K10Rik (NM_029495.1,473-491).
gcaacagatgcgttctaaa

SEQ ID NO: 739352 - DNA, 19 bp, Mus musculus
  siRNA target sequence for 2310046K10Rik (NM_029495.1,474-492).
caacagatgcgttctaaat

SEQ ID NO: 739353 - DNA, 19 bp, Mus musculus
  siRNA target sequence for 2310046K10Rik (NM_029495.1,487-505).
ctaaataccagcaaaagct

SEQ ID NO: 739354 - DNA, 19 bp, Mus musculus
  siRNA target sequence for 2310046K10Rik (NM_029495.1,504-522).
ctcaagagggatgaatcta

SEQ ID NO: 739355 - DNA, 19 bp, Mus musculus
  siRNA target sequence for 2310046K10Rik (NM_029495.1,543-561).
gaggaagccaagttccaaa

SEQ ID NO: 739356 - DNA, 19 bp, Mus musculus
  siRNA target sequence for 2310046K10Rik (NM_029495.1,576-594).
cagagggagaagagtaata

SEQ ID NO: 739357 - DNA, 19 bp, Mus musculus
  siRNA target sequence for 2310046K10Rik (NM_029495.1,640-658).
catttcgagagcatcatca

SEQ ID NO: 739358 - DNA, 19 bp, Mus musculus
  siRNA target sequence for 2310046K10Rik (NM_029495.1,743-761).
gtcctcgagatggaaactt

SEQ ID NO: 739359 - DNA, 19 bp, Mus musculus
  siRNA target sequence for 2310046K10Rik (NM_029495.1,850-868).
cgagggatggacatcagaa

SEQ ID NO: 739360 - DNA, 19 bp, Mus musculus
  siRNA target sequence for 2310046K10Rik (NM_029495.1,855-873).
gatggacatcagaagaata

SEQ ID NO: 739361 - DNA, 19 bp, Mus musculus
  siRNA target sequence for 2310046K10Rik (NM_029495.1,1004-1022).
gtctggaggctgttgcaat

SEQ ID NO: 739362 - DNA, 19 bp, Mus musculus
  siRNA target sequence for 2310046K10Rik (NM_029495.1,1008-1026).
ggaggctgttgcaatatga

SEQ ID NO: 739363 - DNA, 19 bp, Mus musculus
  siRNA target sequence for 5830443C21Rik (NM_029508.1,325-343).
gtaaaggctatctgatcaa

SEQ ID NO: 739364 - DNA, 19 bp, Mus musculus
  siRNA target sequence for 5830443C21Rik (NM_029508.1,358-376).
cggaatgcctccatacatt

SEQ ID NO: 739365 - DNA, 19 bp, Mus musculus
  siRNA target sequence for 5830443C21Rik (NM_029508.1,360-378).
gaatgcctccatacattct

SEQ ID NO: 739366 - DNA, 19 bp, Mus musculus
  siRNA target sequence for 5830443C21Rik (NM_029508.1,364-382).
gcctccatacattctgtaa

SEQ ID NO: 739367 - DNA, 19 bp, Mus musculus
  siRNA target sequence for 5830443C21Rik (NM_029508.1,428-446).
gtgtggcaaccaagttcat

SEQ ID NO: 739368 - DNA, 19 bp, Mus musculus
  siRNA target sequence for 5830443C21Rik (NM_029508.1,432-450).
ggcaaccaagttcatgaaa

SEQ ID NO: 739369 - DNA, 19 bp, Mus musculus
  siRNA target sequence for 5830443C21Rik (NM_029508.1,484-502).
cgttggaggaaattatctt

SEQ ID NO: 739370 - DNA, 19 bp, Mus musculus
  siRNA target sequence for 5830443C21Rik (NM_029508.1,534-552).
cttcagcgtgagttggaat

SEQ ID NO: 739371 - DNA, 19 bp, Mus musculus
  siRNA target sequence for 5830443C21Rik (NM_029508.1,540-558).
cgtgagttggaattttgga

SEQ ID NO: 739372 - DNA, 19 bp, Mus musculus
  siRNA target sequence for 5830443C21Rik (NM_029508.1,582-600).
gggcaagatgatatttcga

SEQ ID NO: 739373 - DNA, 19 bp, Mus musculus
  siRNA target sequence for 5830443C21Rik (NM_029508.1,583-601).
ggcaagatgatatttcgaa

SEQ ID NO: 739374 - DNA, 19 bp, Mus musculus
  siRNA target sequence for 5830443C21Rik (NM_029508.1,598-616).
cgaaggttgacaagtctaa

SEQ ID NO: 739375 - DNA, 19 bp, Mus musculus
  siRNA target sequence for 5830443C21Rik (NM_029508.1,645-663).
gatgataaggactatcata

SEQ ID NO: 739376 - DNA, 19 bp, Mus musculus
  siRNA target sequence for 5830443C21Rik (NM_029508.1,667-685).
gtgacccgcaaattgctat

SEQ ID NO: 739377 - DNA, 19 bp, Mus musculus
  siRNA target sequence for 5830443C21Rik (NM_029508.1,686-704).
ctgtctggactgtttacga

SEQ ID NO: 739378 - DNA, 19 bp, Mus musculus
  siRNA target sequence for 5830443C21Rik (NM_029508.1,738-756).
ggtctcatgaagaaattta

SEQ ID NO: 739379 - DNA, 19 bp, Mus musculus
  siRNA target sequence for 5830443C21Rik (NM_029508.1,761-779).
ctgttctacacgagttact

SEQ ID NO: 739380 - DNA, 19 bp, Mus musculus
  siRNA target sequence for 5830443C21Rik (NM_029508.1,763-781).
gttctacacgagttactgt

SEQ ID NO: 739381 - DNA, 19 bp, Mus musculus
  siRNA target sequence for 5830443C21Rik (NM_029508.1,772-790).
gagttactgtaggaactat

SEQ ID NO: 739382 - DNA, 19 bp, Mus musculus
  siRNA target sequence for 5830443C21Rik (NM_029508.1,819-837).
cttccaagttcttatgagt

SEQ ID NO: 739383 - DNA, 19 bp, Mus musculus
  siRNA target sequence for 5830443C21Rik (NM_029508.1,845-863).
gctgtgcaatggtgaaatt

SEQ ID NO: 739384 - DNA, 19 bp, Mus musculus
  siRNA target sequence for 5830443C21Rik (NM_029508.1,846-864).
ctgtgcaatggtgaaatta

SEQ ID NO: 739385 - DNA, 19 bp, Mus musculus
  siRNA target sequence for 5830443C21Rik (NM_029508.1,928-946).
catacccgatggtattgca

SEQ ID NO: 739386 - DNA, 19 bp, Mus musculus
  siRNA target sequence for 5830443C21Rik (NM_029508.1,944-962).
gcagtatcgaccgagaatt

SEQ ID NO: 739387 - DNA, 19 bp, Mus musculus
  siRNA target sequence for 5830443L24Rik (NM_029509.2,488-506).
cctggagaaactacattat

SEQ ID NO: 739388 - DNA, 19 bp, Mus musculus
  siRNA target sequence for 5830443L24Rik (NM_029509.2,492-510).
gagaaactacattatgtca

SEQ ID NO: 739389 - DNA, 19 bp, Mus musculus
  siRNA target sequence for Bcor (NM_029510.1,150-168).
ccgcatgtgtggaacaagt

SEQ ID NO: 739390 - DNA, 19 bp, Mus musculus
  siRNA target sequence for Bcor (NM_029510.1,176-194).
ggaaaattcctgtgaatga

SEQ ID NO: 739391 - DNA, 19 bp, Mus musculus
  siRNA target sequence for Bcor (NM_029510.1,177-195).
gaaaattcctgtgaatgat

SEQ ID NO: 739392 - DNA, 19 bp, Mus musculus
  siRNA target sequence for Bcor (NM_029510.1,371-389).
gtggattgggctcagaaaa

SEQ ID NO: 739393 - DNA, 19 bp, Mus musculus
  siRNA target sequence for Bcor (NM_029510.1,456-474).
gcaattcaaaccgaatact

SEQ ID NO: 739394 - DNA, 19 bp, Mus musculus
  siRNA target sequence for Bcor (NM_029510.1,709-727).
ctcgactcgccaaataagt

SEQ ID NO: 739395 - DNA, 19 bp, Mus musculus
  siRNA target sequence for Bcor (NM_029510.1,711-729).
cgactcgccaaataagtat

SEQ ID NO: 739396 - DNA, 19 bp, Mus musculus
  siRNA target sequence for Bcor (NM_029510.1,716-734).
cgccaaataagtattcact

SEQ ID NO: 739397 - DNA, 19 bp, Mus musculus
  siRNA target sequence for Bcor (NM_029510.1,833-851).
cacccccacactatgtcaa

SEQ ID NO: 739398 - DNA, 19 bp, Mus musculus
  siRNA target sequence for Bcor (NM_029510.1,927-945).
cgtccactgctcagacaaa

SEQ ID NO: 739399 - DNA, 19 bp, Mus musculus
  siRNA target sequence for Bcor (NM_029510.1,928-946).
gtccactgctcagacaaaa

SEQ ID NO: 739400 - DNA, 19 bp, Mus musculus
  siRNA target sequence for Bcor (NM_029510.1,973-991).
cctgggaacccagtagatt

SEQ ID NO: 739401 - DNA, 19 bp, Mus musculus
  siRNA target sequence for Bcor (NM_029510.1,983-1001).
cagtagattcccacagtta

SEQ ID NO: 739402 - DNA, 19 bp, Mus musculus
  siRNA target sequence for Bcor (NM_029510.1,1038-1056).
ctctgccaaggcagtcaat

SEQ ID NO: 739403 - DNA, 19 bp, Mus musculus
  siRNA target sequence for Bcor (NM_029510.1,1202-1220).
ccctgacgaagccatacat

SEQ ID NO: 739404 - DNA, 19 bp, Mus musculus
  siRNA target sequence for Bcor (NM_029510.1,1225-1243).
gccaatagcgagttctcta

SEQ ID NO: 739405 - DNA, 19 bp, Mus musculus
  siRNA target sequence for Bcor (NM_029510.1,1266-1284).
gtaccccaaggctctagat

SEQ ID NO: 739406 - DNA, 19 bp, Mus musculus
  siRNA target sequence for Bcor (NM_029510.1,1322-1340).
ggaagacaacggttcaaga

SEQ ID NO: 739407 - DNA, 19 bp, Mus musculus
  siRNA target sequence for Bcor (NM_029510.1,1328-1346).
caacggttcaagacagaaa

SEQ ID NO: 739408 - DNA, 19 bp, Mus musculus
  siRNA target sequence for Bcor (NM_029510.1,1377-1395).
gcagaccgttaccaaagat

SEQ ID NO: 739409 - DNA, 19 bp, Mus musculus
  siRNA target sequence for Bcor (NM_029510.1,1533-1551).
gattccgaaagaaacacta

SEQ ID NO: 739410 - DNA, 19 bp, Mus musculus
  siRNA target sequence for Bcor (NM_029510.1,1562-1580).
gaaatggatgttctatcta

SEQ ID NO: 739411 - DNA, 19 bp, Mus musculus
  siRNA target sequence for Bcor (NM_029510.1,1567-1585).
ggatgttctatctatagat

SEQ ID NO: 739412 - DNA, 19 bp, Mus musculus
  siRNA target sequence for Bcor (NM_029510.1,1623-1641).
gccagggccaagtcctaat

SEQ ID NO: 739413 - DNA, 19 bp, Mus musculus
  siRNA target sequence for Bcor (NM_029510.1,1625-1643).
cagggccaagtcctaatga

SEQ ID NO: 739414 - DNA, 19 bp, Mus musculus
  siRNA target sequence for Bcor (NM_029510.1,1628-1646).
ggccaagtcctaatgaaga

SEQ ID NO: 739415 - DNA, 19 bp, Mus musculus
  siRNA target sequence for Bcor (NM_029510.1,1739-1757).
cagatgccgtggtcactaa

SEQ ID NO: 739416 - DNA, 19 bp, Mus musculus
  siRNA target sequence for Bcor (NM_029510.1,1956-1974).
cccagaaccgagcttcaaa

SEQ ID NO: 739417 - DNA, 19 bp, Mus musculus
  siRNA target sequence for Bcor (NM_029510.1,1989-2007).
cctcccgccaacctcaata

SEQ ID NO: 739418 - DNA, 19 bp, Mus musculus
  siRNA target sequence for Bcor (NM_029510.1,1990-2008).
ctcccgccaacctcaatat

SEQ ID NO: 739419 - DNA, 19 bp, Mus musculus
  siRNA target sequence for Bcor (NM_029510.1,1992-2010).
cccgccaacctcaatattt

SEQ ID NO: 739420 - DNA, 19 bp, Mus musculus
  siRNA target sequence for Bcor (NM_029510.1,2216-2234).
cgagcaggccagaatttgt

SEQ ID NO: 739421 - DNA, 19 bp, Mus musculus
  siRNA target sequence for Bcor (NM_029510.1,2291-2309).
cgcccattgagatcacaaa

SEQ ID NO: 739422 - DNA, 19 bp, Mus musculus
  siRNA target sequence for Bcor (NM_029510.1,2292-2310).
gcccattgagatcacaaaa

SEQ ID NO: 739423 - DNA, 19 bp, Mus musculus
  siRNA target sequence for Bcor (NM_029510.1,2370-2388).
cctccgtagccggttttct

SEQ ID NO: 739424 - DNA, 19 bp, Mus musculus
  siRNA target sequence for Bcor (NM_029510.1,2378-2396).
gccggttttctgagatgtt

SEQ ID NO: 739425 - DNA, 19 bp, Mus musculus
  siRNA target sequence for Bcor (NM_029510.1,2442-2460).
gaacctgaagccaaactct

SEQ ID NO: 739426 - DNA, 19 bp, Mus musculus
  siRNA target sequence for Bcor (NM_029510.1,2483-2501).
gggtcaaaagcgacaaact

SEQ ID NO: 739427 - DNA, 19 bp, Mus musculus
  siRNA target sequence for Bcor (NM_029510.1,2635-2653).
caacgccgtgaattcatct

SEQ ID NO: 739428 - DNA, 19 bp, Mus musculus
  siRNA target sequence for Bcor (NM_029510.1,2857-2875).
caagaggatcccaaaccat

SEQ ID NO: 739429 - DNA, 19 bp, Mus musculus
  siRNA target sequence for Bcor (NM_029510.1,2860-2878).
gaggatcccaaaccatttt

SEQ ID NO: 739430 - DNA, 19 bp, Mus musculus
  siRNA target sequence for Bcor (NM_029510.1,2885-2903).
gcggtgcccctccaaacat

SEQ ID NO: 739431 - DNA, 19 bp, Mus musculus
  siRNA target sequence for Bcor (NM_029510.1,2936-2954).
ctgatgaggccgaatccaa

SEQ ID NO: 739432 - DNA, 19 bp, Mus musculus
  siRNA target sequence for Bcor (NM_029510.1,3005-3023).
ctaactcggcaggttatgt

SEQ ID NO: 739433 - DNA, 19 bp, Mus musculus
  siRNA target sequence for Bcor (NM_029510.1,3022-3040).
gtgggcgaccgattcaagt

SEQ ID NO: 739434 - DNA, 19 bp, Mus musculus
  siRNA target sequence for Bcor (NM_029510.1,3041-3059).
gtgtcaccaccgaactgta

SEQ ID NO: 739435 - DNA, 19 bp, Mus musculus
  siRNA target sequence for Bcor (NM_029510.1,3110-3128).
gattacaagaggacagtat

SEQ ID NO: 739436 - DNA, 19 bp, Mus musculus
  siRNA target sequence for Bcor (NM_029510.1,3120-3138).
ggacagtattttatgtcta

SEQ ID NO: 739437 - DNA, 19 bp, Mus musculus
  siRNA target sequence for Bcor (NM_029510.1,3174-3192).
ctcagagttggagatgaaa

SEQ ID NO: 739438 - DNA, 19 bp, Mus musculus
  siRNA target sequence for Bcor (NM_029510.1,3208-3226).
cacccagcaaccaaagact

SEQ ID NO: 739439 - DNA, 19 bp, Mus musculus
  siRNA target sequence for Bcor (NM_029510.1,3223-3241).
gactccgaggtgtgcaaat

SEQ ID NO: 739440 - DNA, 19 bp, Mus musculus
  siRNA target sequence for Bcor (NM_029510.1,3252-3270).
cgactgggaaaggttgaaa

SEQ ID NO: 739441 - DNA, 19 bp, Mus musculus
  siRNA target sequence for Bcor (NM_029510.1,3314-3332).
ccattgccgaccagaatga

SEQ ID NO: 739442 - DNA, 19 bp, Mus musculus
  siRNA target sequence for Bcor (NM_029510.1,3359-3377).
gaaacaaacatgatctctt

SEQ ID NO: 739443 - DNA, 19 bp, Mus musculus
  siRNA target sequence for Bcor (NM_029510.1,3363-3381).
caaacatgatctctttgaa

SEQ ID NO: 739444 - DNA, 19 bp, Mus musculus
  siRNA target sequence for Bcor (NM_029510.1,3499-3517).
gacaggaaacgcaaactgt

SEQ ID NO: 739445 - DNA, 19 bp, Mus musculus
  siRNA target sequence for Bcor (NM_029510.1,3587-3605).
gacggatctccaaagatga

SEQ ID NO: 739446 - DNA, 19 bp, Mus musculus
  siRNA target sequence for Bcor (NM_029510.1,3610-3628).
cctgagagggaaatgacaa

SEQ ID NO: 739447 - DNA, 19 bp, Mus musculus
  siRNA target sequence for Bcor (NM_029510.1,3615-3633).
gagggaaatgacaaacagt

SEQ ID NO: 739448 - DNA, 19 bp, Mus musculus
  siRNA target sequence for Bcor (NM_029510.1,3632-3650).
gttcctctaaccacttaga

SEQ ID NO: 739449 - DNA, 19 bp, Mus musculus
  siRNA target sequence for Bcor (NM_029510.1,3635-3653).
cctctaaccacttagaaga

SEQ ID NO: 739450 - DNA, 19 bp, Mus musculus
  siRNA target sequence for Bcor (NM_029510.1,3913-3931).
gaagagtcgctcaaatcct

SEQ ID NO: 739451 - DNA, 19 bp, Mus musculus
  siRNA target sequence for Bcor (NM_029510.1,4129-4147).
gcctccccgctgcaaaaat

SEQ ID NO: 739452 - DNA, 19 bp, Mus musculus
  siRNA target sequence for Bcor (NM_029510.1,4134-4152).
cccgctgcaaaaatacaca

SEQ ID NO: 739453 - DNA, 19 bp, Mus musculus
  siRNA target sequence for Bcor (NM_029510.1,4233-4251).
gatcacaggcgactactat

SEQ ID NO: 739454 - DNA, 19 bp, Mus musculus
  siRNA target sequence for Bcor (NM_029510.1,4255-4273).
gagaacactgacactaaga

SEQ ID NO: 739455 - DNA, 19 bp, Mus musculus
  siRNA target sequence for Bcor (NM_029510.1,4275-4293).
gactgtgcggagattcaga

SEQ ID NO: 739456 - DNA, 19 bp, Mus musculus
  siRNA target sequence for Bcor (NM_029510.1,4277-4295).
ctgtgcggagattcagaaa

SEQ ID NO: 739457 - DNA, 19 bp, Mus musculus
  siRNA target sequence for Bcor (NM_029510.1,4281-4299).
gcggagattcagaaaacga

SEQ ID NO: 739458 - DNA, 19 bp, Mus musculus
  siRNA target sequence for Bcor (NM_029510.1,4306-4324).
cccagttcggactacgatt

SEQ ID NO: 739459 - DNA, 19 bp, Mus musculus
  siRNA target sequence for Bcor (NM_029510.1,4307-4325).
ccagttcggactacgattt

SEQ ID NO: 739460 - DNA, 19 bp, Mus musculus
  siRNA target sequence for Bcor (NM_029510.1,4362-4380).
ccgtctacaacaattgcta

SEQ ID NO: 739461 - DNA, 19 bp, Mus musculus
  siRNA target sequence for Bcor (NM_029510.1,4399-4417).
cagctgccacgctcaaatt

SEQ ID NO: 739462 - DNA, 19 bp, Mus musculus
  siRNA target sequence for Bcor (NM_029510.1,4401-4419).
gctgccacgctcaaattct

SEQ ID NO: 739463 - DNA, 19 bp, Mus musculus
  siRNA target sequence for Bcor (NM_029510.1,4459-4477).
gctcggagacttattgtca

SEQ ID NO: 739464 - DNA, 19 bp, Mus musculus
  siRNA target sequence for Bcor (NM_029510.1,4460-4478).
ctcggagacttattgtcaa

SEQ ID NO: 739465 - DNA, 19 bp, Mus musculus
  siRNA target sequence for Bcor (NM_029510.1,4557-4575).
caaggtctgtgatgtcaat

SEQ ID NO: 739466 - DNA, 19 bp, Mus musculus
  siRNA target sequence for Bcor (NM_029510.1,4639-4657).
gtgcgccacctccttgaat

SEQ ID NO: 739467 - DNA, 19 bp, Mus musculus
  siRNA target sequence for Bcor (NM_029510.1,4641-4659).
gcgccacctccttgaatat

SEQ ID NO: 739468 - DNA, 19 bp, Mus musculus
  siRNA target sequence for Bcor (NM_029510.1,4830-4848).
gaagtttttaacagactat

SEQ ID NO: 739469 - DNA, 19 bp, Mus musculus
  siRNA target sequence for Bcor (NM_029510.1,4833-4851).
gtttttaacagactattta

SEQ ID NO: 739470 - DNA, 19 bp, Mus musculus
  siRNA target sequence for Bcor (NM_029510.1,4984-5002).
gaggaagaggatacctata

SEQ ID NO: 739471 - DNA, 19 bp, Mus musculus
  siRNA target sequence for Bcor (NM_029510.1,4993-5011).
gatacctatagcgatttgt

SEQ ID NO: 739472 - DNA, 19 bp, Mus musculus
  siRNA target sequence for Bcor (NM_029510.1,4997-5015).
cctatagcgatttgtttga

SEQ ID NO: 739473 - DNA, 19 bp, Mus musculus
  siRNA target sequence for Bcor (NM_029510.1,5036-5054).
ccctcttgccgtgttataa

SEQ ID NO: 739474 - DNA, 19 bp, Mus musculus
  siRNA target sequence for Bcor (NM_029510.1,5038-5056).
ctcttgccgtgttataaca

SEQ ID NO: 739475 - DNA, 19 bp, Mus musculus
  siRNA target sequence for Bcor (NM_029510.1,5104-5122).
gacgtgctcaagaagttga

SEQ ID NO: 739476 - DNA, 19 bp, Mus musculus
  siRNA target sequence for Bcor (NM_029510.1,5133-5151).
ccggatattccgtagcaat

SEQ ID NO: 739477 - DNA, 19 bp, Mus musculus
  siRNA target sequence for Bcor (NM_029510.1,5134-5152).
cggatattccgtagcaatt

SEQ ID NO: 739478 - DNA, 19 bp, Mus musculus
  siRNA target sequence for Bcor (NM_029510.1,5135-5153).
ggatattccgtagcaattt

SEQ ID NO: 739479 - DNA, 19 bp, Mus musculus
  siRNA target sequence for Bcor (NM_029510.1,5196-5214).
ccgacaggtctcaacaagt

SEQ ID NO: 739480 - DNA, 19 bp, Mus musculus
  siRNA target sequence for Bcor (NM_029510.1,5246-5264).
ccttcaatcctgaaagcaa

SEQ ID NO: 739481 - DNA, 19 bp, Mus musculus
  siRNA target sequence for Bcor (NM_029510.1,5344-5362).
gacacgggccatgaaaact

SEQ ID NO: 739482 - DNA, 19 bp, Mus musculus
  siRNA target sequence for 5830462I21Rik (NM_029518.1,47-65).
gagacaaccctcttcaata

SEQ ID NO: 739483 - DNA, 19 bp, Mus musculus
  siRNA target sequence for 5830462I21Rik (NM_029518.1,242-260).
cctggcacagcgctttaca

SEQ ID NO: 739484 - DNA, 19 bp, Mus musculus
  siRNA target sequence for 5830462I21Rik (NM_029518.1,243-261).
ctggcacagcgctttacaa

SEQ ID NO: 739485 - DNA, 19 bp, Mus musculus
  siRNA target sequence for 5830462I21Rik (NM_029518.1,245-263).
ggcacagcgctttacaata

SEQ ID NO: 739486 - DNA, 19 bp, Mus musculus
  siRNA target sequence for 5830462I21Rik (NM_029518.1,247-265).
cacagcgctttacaatatt

SEQ ID NO: 739487 - DNA, 19 bp, Mus musculus
  siRNA target sequence for 5830462I21Rik (NM_029518.1,288-306).
ggggaaagtgggggattaa

SEQ ID NO: 739488 - DNA, 19 bp, Mus musculus
  siRNA target sequence for 5830462I21Rik (NM_029518.1,321-339).
gtataagtcggcaaagcaa

SEQ ID NO: 739489 - DNA, 19 bp, Mus musculus
  siRNA target sequence for 5830462I21Rik (NM_029518.1,327-345).
gtcggcaaagcaaatctgt

SEQ ID NO: 739490 - DNA, 19 bp, Mus musculus
  siRNA target sequence for 5830462I21Rik (NM_029518.1,527-545).
gaaggttctgcgtcaaata

SEQ ID NO: 739491 - DNA, 19 bp, Mus musculus
  siRNA target sequence for 5830462I21Rik (NM_029518.1,530-548).
ggttctgcgtcaaatagca

SEQ ID NO: 739492 - DNA, 19 bp, Mus musculus
  siRNA target sequence for 5830462I21Rik (NM_029518.1,537-555).
cgtcaaatagcaatagtga

SEQ ID NO: 739493 - DNA, 19 bp, Mus musculus
  siRNA target sequence for 5830462I21Rik (NM_029518.1,600-618).
cctctgctctgcattggtt

SEQ ID NO: 739494 - DNA, 19 bp, Mus musculus
  siRNA target sequence for 5830462I21Rik (NM_029518.1,671-689).
ctgcggtcggtgctcaata

SEQ ID NO: 739495 - DNA, 19 bp, Mus musculus
  siRNA target sequence for 5830462I21Rik (NM_029518.1,675-693).
ggtcggtgctcaataagga

SEQ ID NO: 739496 - DNA, 19 bp, Mus musculus
  siRNA target sequence for 5830462I21Rik (NM_029518.1,685-703).
caataaggagtctcattca

SEQ ID NO: 739497 - DNA, 19 bp, Mus musculus
  siRNA target sequence for 5830462I21Rik (NM_029518.1,713-731).
ctggactcattcaactcta

SEQ ID NO: 739498 - DNA, 19 bp, Mus musculus
  siRNA target sequence for 5830462I21Rik (NM_029518.1,802-820).
caaaactgagggttctagt

SEQ ID NO: 739499 - DNA, 19 bp, Mus musculus
  siRNA target sequence for 5830462I21Rik (NM_029518.1,1197-1215).
caggggtgcataaaaagct

SEQ ID NO: 739500 - DNA, 19 bp, Mus musculus
  siRNA target sequence for 5830462I21Rik (NM_029518.1,1279-1297).
ggtgaactgcaggaattgt

SEQ ID NO: 739501 - DNA, 19 bp, Mus musculus
  siRNA target sequence for 5830462I21Rik (NM_029518.1,1287-1305).
gcaggaattgtgctatcat

SEQ ID NO: 739502 - DNA, 19 bp, Mus musculus
  siRNA target sequence for 5830462I21Rik (NM_029518.1,1298-1316).
gctatcatttccgatgtta

SEQ ID NO: 739503 - DNA, 19 bp, Mus musculus
  siRNA target sequence for 5830462I21Rik (NM_029518.1,1299-1317).
ctatcatttccgatgttaa

SEQ ID NO: 739504 - DNA, 19 bp, Mus musculus
  siRNA target sequence for 5830462I21Rik (NM_029518.1,1303-1321).
catttccgatgttaaagtt

SEQ ID NO: 739505 - DNA, 19 bp, Mus musculus
  siRNA target sequence for 5830462I21Rik (NM_029518.1,1313-1331).
gttaaagttcgagatttct

SEQ ID NO: 739506 - DNA, 19 bp, Mus musculus
  siRNA target sequence for 5830462I21Rik (NM_029518.1,1338-1356).
gctttgagatcatatgcaa

SEQ ID NO: 739507 - DNA, 19 bp, Mus musculus
  siRNA target sequence for 5830462I21Rik (NM_029518.1,1382-1400).
ccaatggtgctcaaactca

SEQ ID NO: 739508 - DNA, 19 bp, Mus musculus
  siRNA target sequence for 5830462I21Rik (NM_029518.1,1383-1401).
caatggtgctcaaactcaa

SEQ ID NO: 739509 - DNA, 19 bp, Mus musculus
  siRNA target sequence for 5830462I21Rik (NM_029518.1,1521-1539).
ggctacccagctactttgt

SEQ ID NO: 739510 - DNA, 19 bp, Mus musculus
  siRNA target sequence for 5830462I21Rik (NM_029518.1,1567-1585).
caacgcctatggtttgata

SEQ ID NO: 739511 - DNA, 19 bp, Mus musculus
  siRNA target sequence for 5830462I21Rik (NM_029518.1,1570-1588).
cgcctatggtttgataaca

SEQ ID NO: 739512 - DNA, 19 bp, Mus musculus
  siRNA target sequence for 5830462I21Rik (NM_029518.1,1683-1701).
gtgctcacgatgaagaagt

SEQ ID NO: 739513 - DNA, 19 bp, Mus musculus
  siRNA target sequence for 5830462I21Rik (NM_029518.1,1690-1708).
cgatgaagaagtactcaaa

SEQ ID NO: 739514 - DNA, 19 bp, Mus musculus
  siRNA target sequence for 5830462I21Rik (NM_029518.1,1741-1759).
caagcagaggattcatgat

SEQ ID NO: 739515 - DNA, 19 bp, Mus musculus
  siRNA target sequence for 5830462I21Rik (NM_029518.1,1775-1793).
ggagctttatggcacattt

SEQ ID NO: 739516 - DNA, 19 bp, Mus musculus
  siRNA target sequence for 5830462I21Rik (NM_029518.1,1776-1794).
gagctttatggcacattta

SEQ ID NO: 739517 - DNA, 19 bp, Mus musculus
  siRNA target sequence for 5830462I21Rik (NM_029518.1,1869-1887).
cagatcatgacccaattca

SEQ ID NO: 739518 - DNA, 19 bp, Mus musculus
  siRNA target sequence for 5830462I21Rik (NM_029518.1,1915-1933).
cctccgaaagcgactcttt

SEQ ID NO: 739519 - DNA, 19 bp, Mus musculus
  siRNA target sequence for 5830462I21Rik (NM_029518.1,1918-1936).
ccgaaagcgactctttgaa

SEQ ID NO: 739520 - DNA, 19 bp, Mus musculus
  siRNA target sequence for 5830462I21Rik (NM_029518.1,1924-1942).
gcgactctttgaagagtat

SEQ ID NO: 739521 - DNA, 19 bp, Mus musculus
  siRNA target sequence for 5830462I21Rik (NM_029518.1,2015-2033).
gttcacaatctgtacagtt

SEQ ID NO: 739522 - DNA, 19 bp, Mus musculus
  siRNA target sequence for 5830462I21Rik (NM_029518.1,2035-2053).
cataaaggtcgcagaagat

SEQ ID NO: 739523 - DNA, 19 bp, Mus musculus
  siRNA target sequence for 5830462I21Rik (NM_029518.1,2041-2059).
ggtcgcagaagattttgta

SEQ ID NO: 739524 - DNA, 19 bp, Mus musculus
  siRNA target sequence for 5830462I21Rik (NM_029518.1,2042-2060).
gtcgcagaagattttgtat

SEQ ID NO: 739525 - DNA, 19 bp, Mus musculus
  siRNA target sequence for 5830462I21Rik (NM_029518.1,2044-2062).
cgcagaagattttgtatct

SEQ ID NO: 739526 - DNA, 19 bp, Mus musculus
  siRNA target sequence for 5830462I21Rik (NM_029518.1,2116-2134).
caacactcacaccaatcat

SEQ ID NO: 739527 - DNA, 19 bp, Mus musculus
  siRNA target sequence for 5830462I21Rik (NM_029518.1,2128-2146).
caatcatgaggataagcta

SEQ ID NO: 739528 - DNA, 19 bp, Mus musculus
  siRNA target sequence for 5830462I21Rik (NM_029518.1,2144-2162).
ctacaggtgaagaacatca

SEQ ID NO: 739529 - DNA, 19 bp, Mus musculus
  siRNA target sequence for 5830462I21Rik (NM_029518.1,2161-2179).
catataccacgcagtgaaa

SEQ ID NO: 739530 - DNA, 19 bp, Mus musculus
  siRNA target sequence for 5830462I21Rik (NM_029518.1,2254-2272).
gtcaagcaggcctttcaca

SEQ ID NO: 739531 - DNA, 19 bp, Mus musculus
  siRNA target sequence for 5830462I21Rik (NM_029518.1,2260-2278).
caggcctttcacaacactt

SEQ ID NO: 739532 - DNA, 19 bp, Mus musculus
  siRNA target sequence for 5830462I21Rik (NM_029518.1,2326-2344).
gccagtgtggtcagtatta

SEQ ID NO: 739533 - DNA, 19 bp, Mus musculus
  siRNA target sequence for 5830462I21Rik (NM_029518.1,2328-2346).
cagtgtggtcagtattaca

SEQ ID NO: 739534 - DNA, 19 bp, Mus musculus
  siRNA target sequence for 5830462I21Rik (NM_029518.1,2332-2350).
gtggtcagtattacaaact

SEQ ID NO: 739535 - DNA, 19 bp, Mus musculus
  siRNA target sequence for 5830462I21Rik (NM_029518.1,2349-2367).
ctccagccgctctttctgt

SEQ ID NO: 739536 - DNA, 19 bp, Mus musculus
  siRNA target sequence for 6330503C03Rik (NM_029528.1,317-335).
gaagcttaagcgaaactct

SEQ ID NO: 739537 - DNA, 19 bp, Mus musculus
  siRNA target sequence for 6330503C03Rik (NM_029528.1,320-338).
gcttaagcgaaactctaat

SEQ ID NO: 739538 - DNA, 19 bp, Mus musculus
  siRNA target sequence for 6330503C03Rik (NM_029528.1,359-377).
ggccaagtcatcattctca

SEQ ID NO: 739539 - DNA, 19 bp, Mus musculus
  siRNA target sequence for 6330503C03Rik (NM_029528.1,466-484).
gggggaaggctccaacaat

SEQ ID NO: 739540 - DNA, 19 bp, Mus musculus
  siRNA target sequence for 6330503C03Rik (NM_029528.1,467-485).
ggggaaggctccaacaatt

SEQ ID NO: 739541 - DNA, 19 bp, Mus musculus
  siRNA target sequence for 6330503C03Rik (NM_029528.1,469-487).
ggaaggctccaacaattca

SEQ ID NO: 739542 - DNA, 19 bp, Mus musculus
  siRNA target sequence for 6330503C03Rik (NM_029528.1,574-592).
caggtgtcatggaacagtt

SEQ ID NO: 739543 - DNA, 19 bp, Mus musculus
  siRNA target sequence for 6330503C03Rik (NM_029528.1,584-602).
ggaacagtttgctatttct

SEQ ID NO: 739544 - DNA, 19 bp, Mus musculus
  siRNA target sequence for 6330503C03Rik (NM_029528.1,641-659).
ggacatgagtgtcaattct

SEQ ID NO: 739545 - DNA, 19 bp, Mus musculus
  siRNA target sequence for 6330503C03Rik (NM_029528.1,642-660).
gacatgagtgtcaattcta

SEQ ID NO: 739546 - DNA, 19 bp, Mus musculus
  siRNA target sequence for 6330503C03Rik (NM_029528.1,765-783).
gtgtcacaggggatgtact

SEQ ID NO: 739547 - DNA, 19 bp, Mus musculus
  siRNA target sequence for 6330503C03Rik (NM_029528.1,800-818).
cgcctgggaagcaagtgat

SEQ ID NO: 739548 - DNA, 19 bp, Mus musculus
  siRNA target sequence for 6330503C03Rik (NM_029528.1,1065-1083).
cgggatctggagtcacttt

SEQ ID NO: 739549 - DNA, 19 bp, Mus musculus
  siRNA target sequence for 6330503C03Rik (NM_029528.1,1173-1191).
gaaggggatgccaacaact

SEQ ID NO: 739550 - DNA, 19 bp, Mus musculus
  siRNA target sequence for 6330516O17Rik (NM_029531.1,773-791).
gtgtatgatccttttaaga

SEQ ID NO: 739551 - DNA, 19 bp, Mus musculus
  siRNA target sequence for 6330516O17Rik (NM_029531.1,794-812).
gattgctctgagtcaactt

SEQ ID NO: 739552 - DNA, 19 bp, Mus musculus
  siRNA target sequence for 6330516O17Rik (NM_029531.1,828-846).
gccttgtctagtagaaaat

SEQ ID NO: 739553 - DNA, 19 bp, Mus musculus
  siRNA target sequence for 6330516O17Rik (NM_029531.1,829-847).
ccttgtctagtagaaaatt

SEQ ID NO: 739554 - DNA, 19 bp, Mus musculus
  siRNA target sequence for 6330516O17Rik (NM_029531.1,908-926).
gagttacagcacttataca

SEQ ID NO: 739555 - DNA, 19 bp, Mus musculus
  siRNA target sequence for 6330516O17Rik (NM_029531.1,910-928).
gttacagcacttatacaat

SEQ ID NO: 739556 - DNA, 19 bp, Mus musculus
  siRNA target sequence for 6330516O17Rik (NM_029531.1,914-932).
cagcacttatacaatgctt

SEQ ID NO: 739557 - DNA, 19 bp, Mus musculus
  siRNA target sequence for 6330516O17Rik (NM_029531.1,1067-1085).
cctgcaagatactgatagt

SEQ ID NO: 739558 - DNA, 19 bp, Mus musculus
  siRNA target sequence for 6330516O17Rik (NM_029531.1,1070-1088).
gcaagatactgatagtcta

SEQ ID NO: 739559 - DNA, 19 bp, Mus musculus
  siRNA target sequence for 6530411B15Rik (NM_029537.1,126-144).
ggtgtgctggccaccattt

SEQ ID NO: 739560 - DNA, 19 bp, Mus musculus
  siRNA target sequence for 6530411B15Rik (NM_029537.1,127-145).
gtgtgctggccaccatttt

SEQ ID NO: 739561 - DNA, 19 bp, Mus musculus
  siRNA target sequence for 6530411B15Rik (NM_029537.1,196-214).
ggcctcgagacctactaca

SEQ ID NO: 739562 - DNA, 19 bp, Mus musculus
  siRNA target sequence for 6530411B15Rik (NM_029537.1,375-393).
cactgcatcgccatcttga

SEQ ID NO: 739563 - DNA, 19 bp, Mus musculus
  siRNA target sequence for 6530411B15Rik (NM_029537.1,385-403).
ccatcttgaagatttgtca

SEQ ID NO: 739564 - DNA, 19 bp, Mus musculus
  siRNA target sequence for 6530411B15Rik (NM_029537.1,516-534).
gacgacgtcgtgaagtcaa

SEQ ID NO: 739565 - DNA, 19 bp, Mus musculus
  siRNA target sequence for 6530411B15Rik (NM_029537.1,519-537).
gacgtcgtgaagtcaatgt

SEQ ID NO: 739566 - DNA, 19 bp, Mus musculus
  siRNA target sequence for 6530411B15Rik (NM_029537.1,713-731).
ggcttctgagccagataaa

SEQ ID NO: 739567 - DNA, 19 bp, Mus musculus
  siRNA target sequence for Pwp2h (NM_029546.1,72-90).
gcttaccggttctcgaatt

SEQ ID NO: 739568 - DNA, 19 bp, Mus musculus
  siRNA target sequence for Pwp2h (NM_029546.1,73-91).
cttaccggttctcgaattt

SEQ ID NO: 739569 - DNA, 19 bp, Mus musculus
  siRNA target sequence for Pwp2h (NM_029546.1,108-126).
cggtgtggaaacttaaatt

SEQ ID NO: 739570 - DNA, 19 bp, Mus musculus
  siRNA target sequence for Pwp2h (NM_029546.1,109-127).
ggtgtggaaacttaaattt

SEQ ID NO: 739571 - DNA, 19 bp, Mus musculus
  siRNA target sequence for Pwp2h (NM_029546.1,154-172).
gccccgtgggaaatagagt

SEQ ID NO: 739572 - DNA, 19 bp, Mus musculus
  siRNA target sequence for Pwp2h (NM_029546.1,374-392).
ctctcccgatggcagaaaa

SEQ ID NO: 739573 - DNA, 19 bp, Mus musculus
  siRNA target sequence for Pwp2h (NM_029546.1,379-397).
ccgatggcagaaaattcgt

SEQ ID NO: 739574 - DNA, 19 bp, Mus musculus
  siRNA target sequence for Pwp2h (NM_029546.1,380-398).
cgatggcagaaaattcgtt

SEQ ID NO: 739575 - DNA, 19 bp, Mus musculus
  siRNA target sequence for Pwp2h (NM_029546.1,757-775).
ggaaggcagacatacttca

SEQ ID NO: 739576 - DNA, 19 bp, Mus musculus
  siRNA target sequence for Pwp2h (NM_029546.1,865-883).
gggtcgggaaagtgaaata

SEQ ID NO: 739577 - DNA, 19 bp, Mus musculus
  siRNA target sequence for Pwp2h (NM_029546.1,886-904).
cccgactggccaagtactt

SEQ ID NO: 739578 - DNA, 19 bp, Mus musculus
  siRNA target sequence for Pwp2h (NM_029546.1,1207-1225).
cccctgacgggcagtacat

SEQ ID NO: 739579 - DNA, 19 bp, Mus musculus
  siRNA target sequence for Pwp2h (NM_029546.1,1208-1226).
ccctgacgggcagtacatt

SEQ ID NO: 739580 - DNA, 19 bp, Mus musculus
  siRNA target sequence for Pwp2h (NM_029546.1,1210-1228).
ctgacgggcagtacattgt

SEQ ID NO: 739581 - DNA, 19 bp, Mus musculus
  siRNA target sequence for Pwp2h (NM_029546.1,1212-1230).
gacgggcagtacattgtca

SEQ ID NO: 739582 - DNA, 19 bp, Mus musculus
  siRNA target sequence for Pwp2h (NM_029546.1,1236-1254).
ggggacgatggcaaggtta

SEQ ID NO: 739583 - DNA, 19 bp, Mus musculus
  siRNA target sequence for Pwp2h (NM_029546.1,1237-1255).
gggacgatggcaaggttaa

SEQ ID NO: 739584 - DNA, 19 bp, Mus musculus
  siRNA target sequence for Pwp2h (NM_029546.1,1312-1330).
gggtcactggagtgacatt

SEQ ID NO: 739585 - DNA, 19 bp, Mus musculus
  siRNA target sequence for Pwp2h (NM_029546.1,1333-1351).
ccaccacgggccatgtcat

SEQ ID NO: 739586 - DNA, 19 bp, Mus musculus
  siRNA target sequence for Pwp2h (NM_029546.1,1491-1509).
gcgcaggactcctttgaga

SEQ ID NO: 739587 - DNA, 19 bp, Mus musculus
  siRNA target sequence for Pwp2h (NM_029546.1,1496-1514).
ggactcctttgagatcttt

SEQ ID NO: 739588 - DNA, 19 bp, Mus musculus
  siRNA target sequence for Pwp2h (NM_029546.1,1531-1549).
caggcaggcttcttgatgt

SEQ ID NO: 739589 - DNA, 19 bp, Mus musculus
  siRNA target sequence for Pwp2h (NM_029546.1,1571-1589).
cgtcagtggtctttgcttt

SEQ ID NO: 739590 - DNA, 19 bp, Mus musculus
  siRNA target sequence for Pwp2h (NM_029546.1,1655-1673).
cgacagttggagaaccaaa

SEQ ID NO: 739591 - DNA, 19 bp, Mus musculus
  siRNA target sequence for Pwp2h (NM_029546.1,1766-1784).
gttttgggaccctgagaat

SEQ ID NO: 739592 - DNA, 19 bp, Mus musculus
  siRNA target sequence for Pwp2h (NM_029546.1,1847-1865).
caagatcacagccaaacat

SEQ ID NO: 739593 - DNA, 19 bp, Mus musculus
  siRNA target sequence for Pwp2h (NM_029546.1,1882-1900).
ccttcactaccctgtgtta

SEQ ID NO: 739594 - DNA, 19 bp, Mus musculus
  siRNA target sequence for Pwp2h (NM_029546.1,1886-1904).
cactaccctgtgttactct

SEQ ID NO: 739595 - DNA, 19 bp, Mus musculus
  siRNA target sequence for Pwp2h (NM_029546.1,2125-2143).
gagtaaggaaaggtgatat

SEQ ID NO: 739596 - DNA, 19 bp, Mus musculus
  siRNA target sequence for Pwp2h (NM_029546.1,2127-2145).
gtaaggaaaggtgatatga

SEQ ID NO: 739597 - DNA, 19 bp, Mus musculus
  siRNA target sequence for Pwp2h (NM_029546.1,2446-2464).
ctgagctgtacgtagtgaa

SEQ ID NO: 739598 - DNA, 19 bp, Mus musculus
  siRNA target sequence for Pwp2h (NM_029546.1,2450-2468).
gctgtacgtagtgaaagta

SEQ ID NO: 739599 - DNA, 19 bp, Mus musculus
  siRNA target sequence for Pwp2h (NM_029546.1,2477-2495).
cttagctgcctcctttgaa

SEQ ID NO: 739600 - DNA, 19 bp, Mus musculus
  siRNA target sequence for Pwp2h (NM_029546.1,2484-2502).
gcctcctttgaagaatcta

SEQ ID NO: 739601 - DNA, 19 bp, Mus musculus
  siRNA target sequence for Pwp2h (NM_029546.1,2508-2526).
ctggaattctaccttatat

SEQ ID NO: 739602 - DNA, 19 bp, Mus musculus
  siRNA target sequence for Pwp2h (NM_029546.1,2511-2529).
gaattctaccttatatgga

SEQ ID NO: 739603 - DNA, 19 bp, Mus musculus
  siRNA target sequence for Pwp2h (NM_029546.1,2527-2545).
ggactcagaagttacttat

SEQ ID NO: 739604 - DNA, 19 bp, Mus musculus
  siRNA target sequence for Pwp2h (NM_029546.1,2741-2759).
ggactcagatgcatctgat

SEQ ID NO: 739605 - DNA, 19 bp, Mus musculus
  siRNA target sequence for Keg1 (NM_029550.1,261-279).
gaccttgaccactacaaca

SEQ ID NO: 739606 - DNA, 19 bp, Mus musculus
  siRNA target sequence for Keg1 (NM_029550.1,264-282).
cttgaccactacaacaaca

SEQ ID NO: 739607 - DNA, 19 bp, Mus musculus
  siRNA target sequence for Keg1 (NM_029550.1,267-285).
gaccactacaacaacactt

SEQ ID NO: 739608 - DNA, 19 bp, Mus musculus
  siRNA target sequence for Keg1 (NM_029550.1,269-287).
ccactacaacaacacttat

SEQ ID NO: 739609 - DNA, 19 bp, Mus musculus
  siRNA target sequence for Keg1 (NM_029550.1,272-290).
ctacaacaacacttatcta

SEQ ID NO: 739610 - DNA, 19 bp, Mus musculus
  siRNA target sequence for Keg1 (NM_029550.1,281-299).
cacttatctagtgtattca

SEQ ID NO: 739611 - DNA, 19 bp, Mus musculus
  siRNA target sequence for Keg1 (NM_029550.1,283-301).
cttatctagtgtattcaaa

SEQ ID NO: 739612 - DNA, 19 bp, Mus musculus
  siRNA target sequence for Keg1 (NM_029550.1,385-403).
cagacctgggcaaagtgat

SEQ ID NO: 739613 - DNA, 19 bp, Mus musculus
  siRNA target sequence for Keg1 (NM_029550.1,409-427).
gtcttggagccactaactt

SEQ ID NO: 739614 - DNA, 19 bp, Mus musculus
  siRNA target sequence for Keg1 (NM_029550.1,441-459).
cataagcagtgctttctct

SEQ ID NO: 739615 - DNA, 19 bp, Mus musculus
  siRNA target sequence for Keg1 (NM_029550.1,500-518).
gatggatgcaaagaactta

SEQ ID NO: 739616 - DNA, 19 bp, Mus musculus
  siRNA target sequence for Keg1 (NM_029550.1,543-561).
cctcttgaccagcagttat

SEQ ID NO: 739617 - DNA, 19 bp, Mus musculus
  siRNA target sequence for Keg1 (NM_029550.1,544-562).
ctcttgaccagcagttatt

SEQ ID NO: 739618 - DNA, 19 bp, Mus musculus
  siRNA target sequence for Keg1 (NM_029550.1,546-564).
cttgaccagcagttattca

SEQ ID NO: 739619 - DNA, 19 bp, Mus musculus
  siRNA target sequence for Keg1 (NM_029550.1,551-569).
ccagcagttattcaaattt

SEQ ID NO: 739620 - DNA, 19 bp, Mus musculus
  siRNA target sequence for Keg1 (NM_029550.1,632-650).
gaagagccagaagttcatt

SEQ ID NO: 739621 - DNA, 19 bp, Mus musculus
  siRNA target sequence for Keg1 (NM_029550.1,751-769).
gaggcaccttgcctaagta

SEQ ID NO: 739622 - DNA, 19 bp, Mus musculus
  siRNA target sequence for Ttc8 (NM_029553.1,112-130).
ggcctggagctattttaga

SEQ ID NO: 739623 - DNA, 19 bp, Mus musculus
  siRNA target sequence for Ttc8 (NM_029553.1,143-161).
cagctctgcgccgatctat

SEQ ID NO: 739624 - DNA, 19 bp, Mus musculus
  siRNA target sequence for Ttc8 (NM_029553.1,175-193).
ggagaaatccccttatgat

SEQ ID NO: 739625 - DNA, 19 bp, Mus musculus
  siRNA target sequence for Ttc8 (NM_029553.1,232-250).
gatggtgtacatagatgaa

SEQ ID NO: 739626 - DNA, 19 bp, Mus musculus
  siRNA target sequence for Ttc8 (NM_029553.1,283-301).
gatcctggatgaaaatgct

SEQ ID NO: 739627 - DNA, 19 bp, Mus musculus
  siRNA target sequence for Ttc8 (NM_029553.1,337-355).
gctccctggcactaaccaa

SEQ ID NO: 739628 - DNA, 19 bp, Mus musculus
  siRNA target sequence for Ttc8 (NM_029553.1,338-356).
ctccctggcactaaccaaa

SEQ ID NO: 739629 - DNA, 19 bp, Mus musculus
  siRNA target sequence for Ttc8 (NM_029553.1,404-422).
cccataacaggtttcctta

SEQ ID NO: 739630 - DNA, 19 bp, Mus musculus
  siRNA target sequence for Ttc8 (NM_029553.1,438-456).
gtggaagaccaggtacaat

SEQ ID NO: 739631 - DNA, 19 bp, Mus musculus
  siRNA target sequence for Ttc8 (NM_029553.1,490-508).
cacagcacgacctatcact

SEQ ID NO: 739632 - DNA, 19 bp, Mus musculus
  siRNA target sequence for Ttc8 (NM_029553.1,536-554).
gggactgcttccatgctta

SEQ ID NO: 739633 - DNA, 19 bp, Mus musculus
  siRNA target sequence for Ttc8 (NM_029553.1,558-576).
gtcccgatggaccatttat

SEQ ID NO: 739634 - DNA, 19 bp, Mus musculus
  siRNA target sequence for Ttc8 (NM_029553.1,560-578).
cccgatggaccatttataa

SEQ ID NO: 739635 - DNA, 19 bp, Mus musculus
  siRNA target sequence for Ttc8 (NM_029553.1,562-580).
cgatggaccatttataaat

SEQ ID NO: 739636 - DNA, 19 bp, Mus musculus
  siRNA target sequence for Ttc8 (NM_029553.1,563-581).
gatggaccatttataaatt

SEQ ID NO: 739637 - DNA, 19 bp, Mus musculus
  siRNA target sequence for Ttc8 (NM_029553.1,622-640).
gttggcaaaggctctattt

SEQ ID NO: 739638 - DNA, 19 bp, Mus musculus
  siRNA target sequence for Ttc8 (NM_029553.1,625-643).
ggcaaaggctctatttgaa

SEQ ID NO: 739639 - DNA, 19 bp, Mus musculus
  siRNA target sequence for Ttc8 (NM_029553.1,626-644).
gcaaaggctctatttgaat

SEQ ID NO: 739640 - DNA, 19 bp, Mus musculus
  siRNA target sequence for Ttc8 (NM_029553.1,653-671).
caccatgaaaacgatgtta

SEQ ID NO: 739641 - DNA, 19 bp, Mus musculus
  siRNA target sequence for Ttc8 (NM_029553.1,656-674).
catgaaaacgatgttaaga

SEQ ID NO: 739642 - DNA, 19 bp, Mus musculus
  siRNA target sequence for Ttc8 (NM_029553.1,694-712).
cctttccacggagtattct

SEQ ID NO: 739643 - DNA, 19 bp, Mus musculus
  siRNA target sequence for Ttc8 (NM_029553.1,702-720).
cggagtattctcagtacaa

SEQ ID NO: 739644 - DNA, 19 bp, Mus musculus
  siRNA target sequence for Ttc8 (NM_029553.1,772-790).
gtaccgtgaagcagagaaa

SEQ ID NO: 739645 - DNA, 19 bp, Mus musculus
  siRNA target sequence for Ttc8 (NM_029553.1,817-835).
ggaaatggtagacacattt

SEQ ID NO: 739646 - DNA, 19 bp, Mus musculus
  siRNA target sequence for Ttc8 (NM_029553.1,869-887).
caacctgtgactgctttaa

SEQ ID NO: 739647 - DNA, 19 bp, Mus musculus
  siRNA target sequence for Ttc8 (NM_029553.1,877-895).
gactgctttaaatctattt

SEQ ID NO: 739648 - DNA, 19 bp, Mus musculus
  siRNA target sequence for Ttc8 (NM_029553.1,942-960).
gaattgccaggatctatga

SEQ ID NO: 739649 - DNA, 19 bp, Mus musculus
  siRNA target sequence for Ttc8 (NM_029553.1,962-980).
gaaatgaataacagttcat

SEQ ID NO: 739650 - DNA, 19 bp, Mus musculus
  siRNA target sequence for Ttc8 (NM_029553.1,978-996).
catctgcagcagagtacta

SEQ ID NO: 739651 - DNA, 19 bp, Mus musculus
  siRNA target sequence for Ttc8 (NM_029553.1,984-1002).
cagcagagtactacaaaga

SEQ ID NO: 739652 - DNA, 19 bp, Mus musculus
  siRNA target sequence for Ttc8 (NM_029553.1,987-1005).
cagagtactacaaagaagt

SEQ ID NO: 739653 - DNA, 19 bp, Mus musculus
  siRNA target sequence for Ttc8 (NM_029553.1,1082-1100).
gttgcccttcggttttaca

SEQ ID NO: 739654 - DNA, 19 bp, Mus musculus
  siRNA target sequence for Ttc8 (NM_029553.1,1108-1126).
cttgcagatgggagtttat

SEQ ID NO: 739655 - DNA, 19 bp, Mus musculus
  siRNA target sequence for Ttc8 (NM_029553.1,1112-1130).
cagatgggagtttataact

SEQ ID NO: 739656 - DNA, 19 bp, Mus musculus
  siRNA target sequence for Ttc8 (NM_029553.1,1150-1168).
gggcctgtgctgcttctat

SEQ ID NO: 739657 - DNA, 19 bp, Mus musculus
  siRNA target sequence for Ttc8 (NM_029553.1,1169-1187).
gcccagcagtacgatatga

SEQ ID NO: 739658 - DNA, 19 bp, Mus musculus
  siRNA target sequence for Ttc8 (NM_029553.1,1186-1204).
gaccctgacctcgtttgaa

SEQ ID NO: 739659 - DNA, 19 bp, Mus musculus
  siRNA target sequence for Ttc8 (NM_029553.1,1274-1292).
gtgggaatcggagatacaa

SEQ ID NO: 739660 - DNA, 19 bp, Mus musculus
  siRNA target sequence for Ttc8 (NM_029553.1,1277-1295).
ggaatcggagatacaaact

SEQ ID NO: 739661 - DNA, 19 bp, Mus musculus
  siRNA target sequence for Ttc8 (NM_029553.1,1278-1296).
gaatcggagatacaaactt

SEQ ID NO: 739662 - DNA, 19 bp, Mus musculus
  siRNA target sequence for Ttc8 (NM_029553.1,1380-1398).
ggaagggtcacgttgaaca

SEQ ID NO: 739663 - DNA, 19 bp, Mus musculus
  siRNA target sequence for Ttc8 (NM_029553.1,1428-1446).
ctttggcaccccacatgta

SEQ ID NO: 739664 - DNA, 19 bp, Mus musculus
  siRNA target sequence for Ttc8 (NM_029553.1,1444-1462).
gtatgagccacactttaat

SEQ ID NO: 739665 - DNA, 19 bp, Mus musculus
  siRNA target sequence for Ttc8 (NM_029553.1,1547-1565).
gtggacacacagcacttaa

SEQ ID NO: 739666 - DNA, 19 bp, Mus musculus
  siRNA target sequence for 0610040J01Rik (NM_029554.2,309-327).
gggtgcaggtgttgtaaga

SEQ ID NO: 739667 - DNA, 19 bp, Mus musculus
  siRNA target sequence for 0610040J01Rik (NM_029554.2,365-383).
ctcgcctggttttgtcaat

SEQ ID NO: 739668 - DNA, 19 bp, Mus musculus
  siRNA target sequence for 0610040J01Rik (NM_029554.2,367-385).
cgcctggttttgtcaatga

SEQ ID NO: 739669 - DNA, 19 bp, Mus musculus
  siRNA target sequence for 0610040J01Rik (NM_029554.2,378-396).
gtcaatgaagtaaacaact

SEQ ID NO: 739670 - DNA, 19 bp, Mus musculus
  siRNA target sequence for 0610040J01Rik (NM_029554.2,411-429).
gatgacactgtcagactaa

SEQ ID NO: 739671 - DNA, 19 bp, Mus musculus
  siRNA target sequence for 0610040J01Rik (NM_029554.2,477-495).
gatgggagcctgagcaatt

SEQ ID NO: 739672 - DNA, 19 bp, Mus musculus
  siRNA target sequence for 0610040J01Rik (NM_029554.2,481-499).
ggagcctgagcaattcaga

SEQ ID NO: 739673 - DNA, 19 bp, Mus musculus
  siRNA target sequence for 0610040J01Rik (NM_029554.2,642-660).
ctccaccaggttgacaata

SEQ ID NO: 739674 - DNA, 19 bp, Mus musculus
  siRNA target sequence for Ndfip2 (NM_029561.1,190-208).
gctaccaggtgcttcacaa

SEQ ID NO: 739675 - DNA, 19 bp, Mus musculus
  siRNA target sequence for Ndfip2 (NM_029561.1,237-255).
gtggagcagccgtcaactt

SEQ ID NO: 739676 - DNA, 19 bp, Mus musculus
  siRNA target sequence for Ndfip2 (NM_029561.1,240-258).
gagcagccgtcaacttcta

SEQ ID NO: 739677 - DNA, 19 bp, Mus musculus
  siRNA target sequence for Ndfip2 (NM_029561.1,369-387).
gacgtgtatagtgagtttt

SEQ ID NO: 739678 - DNA, 19 bp, Mus musculus
  siRNA target sequence for Ndfip2 (NM_029561.1,430-448).
catatgacgaagctgaaaa

SEQ ID NO: 739679 - DNA, 19 bp, Mus musculus
  siRNA target sequence for Ndfip2 (NM_029561.1,514-532).
gtacgccacgggatgactt

SEQ ID NO: 739680 - DNA, 19 bp, Mus musculus
  siRNA target sequence for Ndfip2 (NM_029561.1,559-577).
gcaacgacggcattttcat

SEQ ID NO: 739681 - DNA, 19 bp, Mus musculus
  siRNA target sequence for Ndfip2 (NM_029561.1,690-708).
ctgatcaaatggatcctta

SEQ ID NO: 739682 - DNA, 19 bp, Mus musculus
  siRNA target sequence for Ndfip2 (NM_029561.1,692-710).
gatcaaatggatccttatt

SEQ ID NO: 739683 - DNA, 19 bp, Mus musculus
  siRNA target sequence for Ndfip2 (NM_029561.1,711-729).
gtcaggttttctgactatt

SEQ ID NO: 739684 - DNA, 19 bp, Mus musculus
  siRNA target sequence for Ndfip2 (NM_029561.1,737-755).
ctatttcaatggacagtat

SEQ ID NO: 739685 - DNA, 19 bp, Mus musculus
  siRNA target sequence for Ndfip2 (NM_029561.1,757-775).
ggctttggtggatatttct

SEQ ID NO: 739686 - DNA, 19 bp, Mus musculus
  siRNA target sequence for Ndfip2 (NM_029561.1,797-815).
cttcagagggtttgttaat

SEQ ID NO: 739687 - DNA, 19 bp, Mus musculus
  siRNA target sequence for Ndfip2 (NM_029561.1,802-820).
gagggtttgttaattacct

SEQ ID NO: 739688 - DNA, 19 bp, Mus musculus
  siRNA target sequence for Ndfip2 (NM_029561.1,804-822).
gggtttgttaattacctaa

SEQ ID NO: 739689 - DNA, 19 bp, Mus musculus
  siRNA target sequence for Ndfip2 (NM_029561.1,819-837).
ctaaaagtcagaaacatgt

SEQ ID NO: 739690 - DNA, 19 bp, Mus musculus
  siRNA target sequence for 1110007F23Rik (NM_029568.1,244-262).
gtcttctgcgacatgacaa

SEQ ID NO: 739691 - DNA, 19 bp, Mus musculus
  siRNA target sequence for 1110007F23Rik (NM_029568.1,272-290).
gcaagtggacggttttcca

SEQ ID NO: 739692 - DNA, 19 bp, Mus musculus
  siRNA target sequence for 1110007F23Rik (NM_029568.1,281-299).
cggttttccagaaaagatt

SEQ ID NO: 739693 - DNA, 19 bp, Mus musculus
  siRNA target sequence for 1110007F23Rik (NM_029568.1,686-704).
ccaatctcaacggtttcta

SEQ ID NO: 739694 - DNA, 19 bp, Mus musculus
  siRNA target sequence for 1110007F23Rik (NM_029568.1,741-759).
caattgggcccaatggaaa

SEQ ID NO: 739695 - DNA, 19 bp, Mus musculus
  siRNA target sequence for 1110007F23Rik (NM_029568.1,777-795).
caagcgcacggagatgaaa

SEQ ID NO: 739696 - DNA, 19 bp, Mus musculus
  siRNA target sequence for 1110007F23Rik (NM_029568.1,783-801).
cacggagatgaaaattcgt

SEQ ID NO: 739697 - DNA, 19 bp, Mus musculus
  siRNA target sequence for 1110001A12Rik (NM_029571.1,267-285).
ctggactcggtgaactaca

SEQ ID NO: 739698 - DNA, 19 bp, Mus musculus
  siRNA target sequence for 1110001A12Rik (NM_029571.1,332-350).
cacgccgctctgcttactt

SEQ ID NO: 739699 - DNA, 19 bp, Mus musculus
  siRNA target sequence for 1110001A12Rik (NM_029571.1,334-352).
cgccgctctgcttacttta

SEQ ID NO: 739700 - DNA, 19 bp, Mus musculus
  siRNA target sequence for 1110001A12Rik (NM_029571.1,336-354).
ccgctctgcttactttact

SEQ ID NO: 739701 - DNA, 19 bp, Mus musculus
  siRNA target sequence for 1110001A12Rik (NM_029571.1,755-773).
gatccggtctgccttgttt

SEQ ID NO: 739702 - DNA, 19 bp, Mus musculus
  siRNA target sequence for 1110001A12Rik (NM_029571.1,759-777).
cggtctgccttgtttgaga

SEQ ID NO: 739703 - DNA, 19 bp, Mus musculus
  siRNA target sequence for 1110001A12Rik (NM_029571.1,760-778).
ggtctgccttgtttgagaa

SEQ ID NO: 739704 - DNA, 19 bp, Mus musculus
  siRNA target sequence for 1110001A12Rik (NM_029571.1,984-1002).
cgcctccgtcgccagttta

SEQ ID NO: 739705 - DNA, 19 bp, Mus musculus
  siRNA target sequence for 1110001A12Rik (NM_029571.1,986-1004).
cctccgtcgccagtttatt

SEQ ID NO: 739706 - DNA, 19 bp, Mus musculus
  siRNA target sequence for 1110001A12Rik (NM_029571.1,987-1005).
ctccgtcgccagtttattt

SEQ ID NO: 739707 - DNA, 19 bp, Mus musculus
  siRNA target sequence for 1110001A12Rik (NM_029571.1,1012-1030).
ccaaaatgcatcccaataa

SEQ ID NO: 739708 - DNA, 19 bp, Mus musculus
  siRNA target sequence for 1110001A12Rik (NM_029571.1,1042-1060).
ctcaattggccaacatgtt

SEQ ID NO: 739709 - DNA, 19 bp, Mus musculus
  siRNA target sequence for 2610027O18Rik (NM_029580.2,29-47).
gaatcgtatggaagctatt

SEQ ID NO: 739710 - DNA, 19 bp, Mus musculus
  siRNA target sequence for 2610027O18Rik (NM_029580.2,33-51).
cgtatggaagctatttgga

SEQ ID NO: 739711 - DNA, 19 bp, Mus musculus
  siRNA target sequence for 2610027O18Rik (NM_029580.2,34-52).
gtatggaagctatttggat

SEQ ID NO: 739712 - DNA, 19 bp, Mus musculus
  siRNA target sequence for 2610027O18Rik (NM_029580.2,85-103).
caccccagtgaatcaatat

SEQ ID NO: 739713 - DNA, 19 bp, Mus musculus
  siRNA target sequence for 2610027O18Rik (NM_029580.2,117-135).
ggtgccgagacttaggaaa

SEQ ID NO: 739714 - DNA, 19 bp, Mus musculus
  siRNA target sequence for 2610027O18Rik (NM_029580.2,136-154).
gcgccttctgttttcttgt

SEQ ID NO: 739715 - DNA, 19 bp, Mus musculus
  siRNA target sequence for 2610027O18Rik (NM_029580.2,174-192).
ctcaaccatgccagaaata

SEQ ID NO: 739716 - DNA, 19 bp, Mus musculus
  siRNA target sequence for 2610027O18Rik (NM_029580.2,202-220).
gtgagagatagtgaattat

SEQ ID NO: 739717 - DNA, 19 bp, Mus musculus
  siRNA target sequence for 2610027O18Rik (NM_029580.2,285-303).
gtccatccctgtgcttaaa

SEQ ID NO: 739718 - DNA, 19 bp, Mus musculus
  siRNA target sequence for 2610027O18Rik (NM_029580.2,297-315).
gcttaaagcgaggaaagaa

SEQ ID NO: 739719 - DNA, 19 bp, Mus musculus
  siRNA target sequence for 2610027O18Rik (NM_029580.2,305-323).
cgaggaaagaagtagtcaa

SEQ ID NO: 739720 - DNA, 19 bp, Mus musculus
  siRNA target sequence for 2610027O18Rik (NM_029580.2,313-331).
gaagtagtcaacagattga

SEQ ID NO: 739721 - DNA, 19 bp, Mus musculus
  siRNA target sequence for 2610027O18Rik (NM_029580.2,366-384).
gggcataaagcgagtgatt

SEQ ID NO: 739722 - DNA, 19 bp, Mus musculus
  siRNA target sequence for 2610027O18Rik (NM_029580.2,424-442).
gacccctacaggatgctta

SEQ ID NO: 739723 - DNA, 19 bp, Mus musculus
  siRNA target sequence for 2610027O18Rik (NM_029580.2,438-456).
gcttactgctgattccttt

SEQ ID NO: 739724 - DNA, 19 bp, Mus musculus
  siRNA target sequence for 2610027O18Rik (NM_029580.2,464-482).
cagaactcggagttttaaa

SEQ ID NO: 739725 - DNA, 19 bp, Mus musculus
  siRNA target sequence for 2610027O18Rik (NM_029580.2,471-489).
cggagttttaaaagaactt

SEQ ID NO: 739726 - DNA, 19 bp, Mus musculus
  siRNA target sequence for 2610027O18Rik (NM_029580.2,500-518).
cacagttatcccagtacaa

SEQ ID NO: 739727 - DNA, 19 bp, Mus musculus
  siRNA target sequence for 2610027O18Rik (NM_029580.2,513-531).
gtacaacttggaactaaca

SEQ ID NO: 739728 - DNA, 19 bp, Mus musculus
  siRNA target sequence for 2610027O18Rik (NM_029580.2,516-534).
caacttggaactaacatat

SEQ ID NO: 739729 - DNA, 19 bp, Mus musculus
  siRNA target sequence for 2610027O18Rik (NM_029580.2,603-621).
cagcagggttgggcatatt

SEQ ID NO: 739730 - DNA, 19 bp, Mus musculus
  siRNA target sequence for 2610027O18Rik (NM_029580.2,606-624).
cagggttgggcatattgca

SEQ ID NO: 739731 - DNA, 19 bp, Mus musculus
  siRNA target sequence for 2610027O18Rik (NM_029580.2,648-666).
gctgcccttcaagcattta

SEQ ID NO: 739732 - DNA, 19 bp, Mus musculus
  siRNA target sequence for 2610027O18Rik (NM_029580.2,651-669).
gcccttcaagcatttaatt

SEQ ID NO: 739733 - DNA, 19 bp, Mus musculus
  siRNA target sequence for 2610027O18Rik (NM_029580.2,661-679).
catttaattggccaagtta

SEQ ID NO: 739734 - DNA, 19 bp, Mus musculus
  siRNA target sequence for 2610027O18Rik (NM_029580.2,671-689).
gccaagttatggttgacaa

SEQ ID NO: 739735 - DNA, 19 bp, Mus musculus
  siRNA target sequence for 2610027O18Rik (NM_029580.2,672-690).
ccaagttatggttgacaaa

SEQ ID NO: 739736 - DNA, 19 bp, Mus musculus
  siRNA target sequence for 2610027O18Rik (NM_029580.2,733-751).
gacaatacgtaccgaaatt

SEQ ID NO: 739737 - DNA, 19 bp, Mus musculus
  siRNA target sequence for 2610027O18Rik (NM_029580.2,740-758).
cgtaccgaaatttccaaat

SEQ ID NO: 739738 - DNA, 19 bp, Mus musculus
  siRNA target sequence for 2610027O18Rik (NM_029580.2,791-809).
ccaaggttcgagaaaacaa

SEQ ID NO: 739739 - DNA, 19 bp, Mus musculus
  siRNA target sequence for 2610027O18Rik (NM_029580.2,810-828).
ctacacgtatgagtttgat

SEQ ID NO: 739740 - DNA, 19 bp, Mus musculus
  siRNA target sequence for 2610027O18Rik (NM_029580.2,872-890).
gccggatcactgaacttct

SEQ ID NO: 739741 - DNA, 19 bp, Mus musculus
  siRNA target sequence for 2610027O18Rik (NM_029580.2,987-1005).
caatcctgagtcccataaa

SEQ ID NO: 739742 - DNA, 19 bp, Mus musculus
  siRNA target sequence for 2610027O18Rik (NM_029580.2,1007-1025).
ggctgttgcacaattgtaa

SEQ ID NO: 739743 - DNA, 19 bp, Mus musculus
  siRNA target sequence for 2610027O18Rik (NM_029580.2,1008-1026).
gctgttgcacaattgtaaa

SEQ ID NO: 739744 - DNA, 19 bp, Mus musculus
  siRNA target sequence for 2610027O18Rik (NM_029580.2,1091-1109).
cagtcagagaagagttaat

SEQ ID NO: 739745 - DNA, 19 bp, Mus musculus
  siRNA target sequence for 2610027O18Rik (NM_029580.2,1110-1128).
gcttcggctaggattgtca

SEQ ID NO: 739746 - DNA, 19 bp, Mus musculus
  siRNA target sequence for 2610027O18Rik (NM_029580.2,1121-1139).
gattgtcagctgaagctaa

SEQ ID NO: 739747 - DNA, 19 bp, Mus musculus
  siRNA target sequence for 2610027O18Rik (NM_029580.2,1145-1163).
ctgtccacattgtcatgaa

SEQ ID NO: 739748 - DNA, 19 bp, Mus musculus
  siRNA target sequence for 2610027O18Rik (NM_029580.2,1168-1186).
ccagctaaggccatagagt

SEQ ID NO: 739749 - DNA, 19 bp, Mus musculus
  siRNA target sequence for 2610027O18Rik (NM_029580.2,1169-1187).
cagctaaggccatagagtt

SEQ ID NO: 739750 - DNA, 19 bp, Mus musculus
  siRNA target sequence for 2610027O18Rik (NM_029580.2,1185-1203).
gtttctcagtgttttcaga

SEQ ID NO: 739751 - DNA, 19 bp, Mus musculus
  siRNA target sequence for 2610027O18Rik (NM_029580.2,1329-1347).
cttggagaccagtagttca

SEQ ID NO: 739752 - DNA, 19 bp, Mus musculus
  siRNA target sequence for 2610027O18Rik (NM_029580.2,1332-1350).
ggagaccagtagttcagtt

SEQ ID NO: 739753 - DNA, 19 bp, Mus musculus
  siRNA target sequence for 2610027O18Rik (NM_029580.2,1335-1353).
gaccagtagttcagttcat

SEQ ID NO: 739754 - DNA, 19 bp, Mus musculus
  siRNA target sequence for 2610027O18Rik (NM_029580.2,1346-1364).
cagttcatctcgtaaggaa

SEQ ID NO: 739755 - DNA, 19 bp, Mus musculus
  siRNA target sequence for 2610027O18Rik (NM_029580.2,1361-1379).
ggaatgtggcccctaacaa

SEQ ID NO: 739756 - DNA, 19 bp, Mus musculus
  siRNA target sequence for 2610027O18Rik (NM_029580.2,1436-1454).
gcctcagtctacagaatga

SEQ ID NO: 739757 - DNA, 19 bp, Mus musculus
  siRNA target sequence for 2610027O18Rik (NM_029580.2,1507-1525).
ccacagatcgcatcagatt

SEQ ID NO: 739758 - DNA, 19 bp, Mus musculus
  siRNA target sequence for 2610027O18Rik (NM_029580.2,1510-1528).
cagatcgcatcagattctt

SEQ ID NO: 739759 - DNA, 19 bp, Mus musculus
  siRNA target sequence for 2610034H20Rik (NM_029585.2,135-153).
caattaaacctcgaagaat

SEQ ID NO: 739760 - DNA, 19 bp, Mus musculus
  siRNA target sequence for 2610034H20Rik (NM_029585.2,144-162).
ctcgaagaatccaaaatca

SEQ ID NO: 739761 - DNA, 19 bp, Mus musculus
  siRNA target sequence for 2610034H20Rik (NM_029585.2,267-285).
cggttgtcaacgtcgaaaa

SEQ ID NO: 739762 - DNA, 19 bp, Mus musculus
  siRNA target sequence for 2610034H20Rik (NM_029585.2,291-309).
cttgtttcttacggaaatt

SEQ ID NO: 739763 - DNA, 19 bp, Mus musculus
  siRNA target sequence for 2610034H20Rik (NM_029585.2,350-368).
cagacatctcttgaaatct

SEQ ID NO: 739764 - DNA, 19 bp, Mus musculus
  siRNA target sequence for 2610034H20Rik (NM_029585.2,400-418).
cctcttgcagggatacgaa

SEQ ID NO: 739765 - DNA, 19 bp, Mus musculus
  siRNA target sequence for 2610034H20Rik (NM_029585.2,411-429).
gatacgaaggggagatctt

SEQ ID NO: 739766 - DNA, 19 bp, Mus musculus
  siRNA target sequence for 2610034H20Rik (NM_029585.2,491-509).
gttctgctgcacattacca

SEQ ID NO: 739767 - DNA, 19 bp, Mus musculus
  siRNA target sequence for 2610034H20Rik (NM_029585.2,685-703).
ctattccctccacatcatt

SEQ ID NO: 739768 - DNA, 19 bp, Mus musculus
  siRNA target sequence for 2610034H20Rik (NM_029585.2,736-754).
cacattcaagtgtgacaaa

SEQ ID NO: 739769 - DNA, 19 bp, Mus musculus
  siRNA target sequence for 2610034H20Rik (NM_029585.2,757-775).
ggtcttgtcgcacaatcaa

SEQ ID NO: 739770 - DNA, 19 bp, Mus musculus
  siRNA target sequence for 2610034H20Rik (NM_029585.2,776-794).
gggctctacttgtataaaa

SEQ ID NO: 739771 - DNA, 19 bp, Mus musculus
  siRNA target sequence for 2610034H20Rik (NM_029585.2,777-795).
ggctctacttgtataaaaa

SEQ ID NO: 739772 - DNA, 19 bp, Mus musculus
  siRNA target sequence for 2610034H20Rik (NM_029585.2,779-797).
ctctacttgtataaaaaca

SEQ ID NO: 739773 - DNA, 19 bp, Mus musculus
  siRNA target sequence for 2610034H20Rik (NM_029585.2,849-867).
cccctgaaggcacctttat

SEQ ID NO: 739774 - DNA, 19 bp, Mus musculus
  siRNA target sequence for 2610034H20Rik (NM_029585.2,1065-1083).
ggcggttcttccagtactt

SEQ ID NO: 739775 - DNA, 19 bp, Mus musculus
  siRNA target sequence for 2610034H20Rik (NM_029585.2,1347-1365).
cagcttctagcaacaactt

SEQ ID NO: 739776 - DNA, 19 bp, Mus musculus
  siRNA target sequence for 2610034H20Rik (NM_029585.2,1385-1403).
cggttcaaagacacgatta

SEQ ID NO: 739777 - DNA, 19 bp, Mus musculus
  siRNA target sequence for 2610034H20Rik (NM_029585.2,1386-1404).
ggttcaaagacacgattat

SEQ ID NO: 739778 - DNA, 19 bp, Mus musculus
  siRNA target sequence for 2610034H20Rik (NM_029585.2,1399-1417).
gattataaatgccaagtat

SEQ ID NO: 739779 - DNA, 19 bp, Mus musculus
  siRNA target sequence for 2610034H20Rik (NM_029585.2,1717-1735).
gactaacgcagagtatgtt

SEQ ID NO: 739780 - DNA, 19 bp, Mus musculus
  siRNA target sequence for 2610034H20Rik (NM_029585.2,1719-1737).
ctaacgcagagtatgttgt

SEQ ID NO: 739781 - DNA, 19 bp, Mus musculus
  siRNA target sequence for 2610034H20Rik (NM_029585.2,1725-1743).
cagagtatgttgtcaactt

SEQ ID NO: 739782 - DNA, 19 bp, Mus musculus
  siRNA target sequence for 1700001M19Rik (NM_029586.1,236-254).
ccatcggtccccaaagaaa

SEQ ID NO: 739783 - DNA, 19 bp, Mus musculus
  siRNA target sequence for 1700001M19Rik (NM_029586.1,237-255).
catcggtccccaaagaaaa

SEQ ID NO: 739784 - DNA, 19 bp, Mus musculus
  siRNA target sequence for 1700001M19Rik (NM_029586.1,338-356).
gcgcaggagcagataatgt

SEQ ID NO: 739785 - DNA, 19 bp, Mus musculus
  siRNA target sequence for 1700001M19Rik (NM_029586.1,343-361).
ggagcagataatgtacata

SEQ ID NO: 739786 - DNA, 19 bp, Mus musculus
  siRNA target sequence for 1700001M19Rik (NM_029586.1,355-373).
gtacatacgacaagaatat

SEQ ID NO: 739787 - DNA, 19 bp, Mus musculus
  siRNA target sequence for 1700001M19Rik (NM_029586.1,358-376).
catacgacaagaatatgaa

SEQ ID NO: 739788 - DNA, 19 bp, Mus musculus
  siRNA target sequence for 1700001M19Rik (NM_029586.1,397-415).
gccagcgtctctaagacaa

SEQ ID NO: 739789 - DNA, 19 bp, Mus musculus
  siRNA target sequence for 1700001M19Rik (NM_029586.1,416-434).
gaacttgaggacaccatat

SEQ ID NO: 739790 - DNA, 19 bp, Mus musculus
  siRNA target sequence for 1700001M19Rik (NM_029586.1,472-490).
ggcatctatccttcaagaa

SEQ ID NO: 739791 - DNA, 19 bp, Mus musculus
  siRNA target sequence for 1700012A03Rik (NM_029587.1,401-419).
catgagacgagcatacact

SEQ ID NO: 739792 - DNA, 19 bp, Mus musculus
  siRNA target sequence for 1700012A03Rik (NM_029587.1,406-424).
gacgagcatacactgttat

SEQ ID NO: 739793 - DNA, 19 bp, Mus musculus
  siRNA target sequence for 1700012A03Rik (NM_029587.1,510-528).
ggagcggtgagtaagagaa

SEQ ID NO: 739794 - DNA, 19 bp, Mus musculus
  siRNA target sequence for 1700012A03Rik (NM_029587.1,511-529).
gagcggtgagtaagagaaa

SEQ ID NO: 739795 - DNA, 19 bp, Mus musculus
  siRNA target sequence for 1700012A03Rik (NM_029587.1,515-533).
ggtgagtaagagaaagcaa

SEQ ID NO: 739796 - DNA, 19 bp, Mus musculus
  siRNA target sequence for 1700012A03Rik (NM_029587.1,516-534).
gtgagtaagagaaagcaaa

SEQ ID NO: 739797 - DNA, 19 bp, Mus musculus
  siRNA target sequence for 1700012A03Rik (NM_029587.1,719-737).
cactgtagagacaagtgta

SEQ ID NO: 739798 - DNA, 19 bp, Mus musculus
  siRNA target sequence for 1700012A03Rik (NM_029587.1,728-746).
gacaagtgtagcaccttat

SEQ ID NO: 739799 - DNA, 19 bp, Mus musculus
  siRNA target sequence for 1700012A03Rik (NM_029587.1,730-748).
caagtgtagcaccttatca

SEQ ID NO: 739800 - DNA, 19 bp, Mus musculus
  siRNA target sequence for 1700023A18Rik (NM_029595.1,203-221).
gcacagacccggaagcatt

SEQ ID NO: 739801 - DNA, 19 bp, Mus musculus
  siRNA target sequence for 1700023A18Rik (NM_029595.1,204-222).
cacagacccggaagcattt

SEQ ID NO: 739802 - DNA, 19 bp, Mus musculus
  siRNA target sequence for 1700018B08Rik (NM_029597.1,325-343).
ccaatgctacaccaagttt

SEQ ID NO: 739803 - DNA, 19 bp, Mus musculus
  siRNA target sequence for 1700018B08Rik (NM_029597.1,616-634).
ggactcaagcagatggtat

SEQ ID NO: 739804 - DNA, 19 bp, Mus musculus
  siRNA target sequence for 1700018B08Rik (NM_029597.1,757-775).
cctccccatcagcttcaat

SEQ ID NO: 739805 - DNA, 19 bp, Mus musculus
  siRNA target sequence for 1700018B08Rik (NM_029597.1,807-825).
ccatcatagccatttgtca

SEQ ID NO: 739806 - DNA, 19 bp, Mus musculus
  siRNA target sequence for 1700019E19Rik (NM_029601.1,111-129).
gtcgactcaggctgagaat

SEQ ID NO: 739807 - DNA, 19 bp, Mus musculus
  siRNA target sequence for 1700019E19Rik (NM_029601.1,121-139).
gctgagaattacttaaaca

SEQ ID NO: 739808 - DNA, 19 bp, Mus musculus
  siRNA target sequence for 1700019E19Rik (NM_029601.1,212-230).
cggatgactccatgaagat

SEQ ID NO: 739809 - DNA, 19 bp, Mus musculus
  siRNA target sequence for 1700019E19Rik (NM_029601.1,434-452).
gagaaattgacctgaaact

SEQ ID NO: 739810 - DNA, 19 bp, Mus musculus
  siRNA target sequence for 1700019E19Rik (NM_029601.1,506-524).
gggactgggaccatctgta

SEQ ID NO: 739811 - DNA, 19 bp, Mus musculus
  siRNA target sequence for 1700019E19Rik (NM_029601.1,592-610).
ggaccatctaggtacatct

SEQ ID NO: 739812 - DNA, 19 bp, Mus musculus
  siRNA target sequence for 1700022C21Rik (NM_029602.1,94-112).
gacgtcgactaagttaaga

SEQ ID NO: 739813 - DNA, 19 bp, Mus musculus
  siRNA target sequence for 1700022C21Rik (NM_029602.1,96-114).
cgtcgactaagttaagatt

SEQ ID NO: 739814 - DNA, 19 bp, Mus musculus
  siRNA target sequence for 1700022C21Rik (NM_029602.1,135-153).
gagaccctaggatttcaga

SEQ ID NO: 739815 - DNA, 19 bp, Mus musculus
  siRNA target sequence for 1700022C21Rik (NM_029602.1,216-234).
caagacacttgataactca

SEQ ID NO: 739816 - DNA, 19 bp, Mus musculus
  siRNA target sequence for 1700022C21Rik (NM_029602.1,300-318).
caaaagcagagtcgtatta

SEQ ID NO: 739817 - DNA, 19 bp, Mus musculus
  siRNA target sequence for 1700022C21Rik (NM_029602.1,305-323).
gcagagtcgtattataata

SEQ ID NO: 739818 - DNA, 19 bp, Mus musculus
  siRNA target sequence for 1700022C21Rik (NM_029602.1,306-324).
cagagtcgtattataataa

SEQ ID NO: 739819 - DNA, 19 bp, Mus musculus
  siRNA target sequence for 1700022C21Rik (NM_029602.1,310-328).
gtcgtattataataagaga

SEQ ID NO: 739820 - DNA, 19 bp, Mus musculus
  siRNA target sequence for 1700022C21Rik (NM_029602.1,501-519).
caagccatgccagagaatt

SEQ ID NO: 739821 - DNA, 19 bp, Mus musculus
  siRNA target sequence for 1700022C21Rik (NM_029602.1,511-529).
cagagaatttacagacaaa

SEQ ID NO: 739822 - DNA, 19 bp, Mus musculus
  siRNA target sequence for 1700022C21Rik (NM_029602.1,542-560).
ccacgactcttcagtgaaa

SEQ ID NO: 739823 - DNA, 19 bp, Mus musculus
  siRNA target sequence for 1700022C21Rik (NM_029602.1,550-568).
cttcagtgaaacaacacta

SEQ ID NO: 739824 - DNA, 19 bp, Mus musculus
  siRNA target sequence for 1700022C21Rik (NM_029602.1,561-579).
caacactacccaaaattgt

SEQ ID NO: 739825 - DNA, 19 bp, Mus musculus
  siRNA target sequence for 1700022C21Rik (NM_029602.1,747-765).
ctgagaagcgtgatcaagt

SEQ ID NO: 739826 - DNA, 19 bp, Mus musculus
  siRNA target sequence for 1700022C21Rik (NM_029602.1,822-840).
cctgtaccagtaggattaa

SEQ ID NO: 739827 - DNA, 19 bp, Mus musculus
  siRNA target sequence for 1700022C21Rik (NM_029602.1,823-841).
ctgtaccagtaggattaaa

SEQ ID NO: 739828 - DNA, 19 bp, Mus musculus
  siRNA target sequence for 1700022C21Rik (NM_029602.1,825-843).
gtaccagtaggattaaagt

SEQ ID NO: 739829 - DNA, 19 bp, Mus musculus
  siRNA target sequence for 1700022C21Rik (NM_029602.1,828-846).
ccagtaggattaaagtaga

SEQ ID NO: 739830 - DNA, 19 bp, Mus musculus
  siRNA target sequence for 1700022C21Rik (NM_029602.1,829-847).
cagtaggattaaagtagat

SEQ ID NO: 739831 - DNA, 19 bp, Mus musculus
  siRNA target sequence for 1700022C21Rik (NM_029602.1,831-849).
gtaggattaaagtagatgt

SEQ ID NO: 739832 - DNA, 19 bp, Mus musculus
  siRNA target sequence for 1700022C21Rik (NM_029602.1,875-893).
gaggacttgagcacaatta

SEQ ID NO: 739833 - DNA, 19 bp, Mus musculus
  siRNA target sequence for 1700022C21Rik (NM_029602.1,883-901).
gagcacaattataaaacct

SEQ ID NO: 739834 - DNA, 19 bp, Mus musculus
  siRNA target sequence for 1700001M19Rik (NM_029606.1,274-292).
gatcgagaaggaatacact

SEQ ID NO: 739835 - DNA, 19 bp, Mus musculus
  siRNA target sequence for 1700001M19Rik (NM_029606.1,390-408).
ggcggctccaggatgttat

SEQ ID NO: 739836 - DNA, 19 bp, Mus musculus
  siRNA target sequence for 1700001M19Rik (NM_029606.1,391-409).
gcggctccaggatgttata

SEQ ID NO: 739837 - DNA, 19 bp, Mus musculus
  siRNA target sequence for 1700001M19Rik (NM_029606.1,393-411).
ggctccaggatgttataca

SEQ ID NO: 739838 - DNA, 19 bp, Mus musculus
  siRNA target sequence for 1700001M19Rik (NM_029606.1,394-412).
gctccaggatgttatacaa

SEQ ID NO: 739839 - DNA, 19 bp, Mus musculus
  siRNA target sequence for 1700001M19Rik (NM_029606.1,398-416).
caggatgttatacaaaagt

SEQ ID NO: 739840 - DNA, 19 bp, Mus musculus
  siRNA target sequence for 1700001M19Rik (NM_029606.1,433-451).
gcagctgattagagataat

SEQ ID NO: 739841 - DNA, 19 bp, Mus musculus
  siRNA target sequence for 4930404J24Rik (NM_029610.1,425-443).
cagcaacccgacaagaagt

SEQ ID NO: 739842 - DNA, 19 bp, Mus musculus
  siRNA target sequence for 4930404J24Rik (NM_029610.1,447-465).
ctgcctctaccgaagcatt

SEQ ID NO: 739843 - DNA, 19 bp, Mus musculus
  siRNA target sequence for 4930404J24Rik (NM_029610.1,449-467).
gcctctaccgaagcatttt

SEQ ID NO: 739844 - DNA, 19 bp, Mus musculus
  siRNA target sequence for 4930404J24Rik (NM_029610.1,515-533).
ccatcgaagaaaaacagta

SEQ ID NO: 739845 - DNA, 19 bp, Mus musculus
  siRNA target sequence for 4930404J24Rik (NM_029610.1,519-537).
cgaagaaaaacagtacata

SEQ ID NO: 739846 - DNA, 19 bp, Mus musculus
  siRNA target sequence for 4930404J24Rik (NM_029610.1,591-609).
gctgattaaacaatgcata

SEQ ID NO: 739847 - DNA, 19 bp, Mus musculus
  siRNA target sequence for 4930404J24Rik (NM_029610.1,703-721).
cgaggtcggggacttcaaa

SEQ ID NO: 739848 - DNA, 19 bp, Mus musculus
  siRNA target sequence for 4930404J24Rik (NM_029610.1,756-774).
gtatctgaagtctcatgat

SEQ ID NO: 739849 - DNA, 19 bp, Mus musculus
  siRNA target sequence for 4930404J24Rik (NM_029610.1,762-780).
gaagtctcatgatgaagtt

SEQ ID NO: 739850 - DNA, 19 bp, Mus musculus
  siRNA target sequence for Slamf9 (NM_029612.2,217-235).
gtgtcctgcaagagtctat

SEQ ID NO: 739851 - DNA, 19 bp, Mus musculus
  siRNA target sequence for Slamf9 (NM_029612.2,236-254).
caacctctctctggaaata

SEQ ID NO: 739852 - DNA, 19 bp, Mus musculus
  siRNA target sequence for Slamf9 (NM_029612.2,240-258).
ctctctctggaaataccat

SEQ ID NO: 739853 - DNA, 19 bp, Mus musculus
  siRNA target sequence for Slamf9 (NM_029612.2,248-266).
ggaaataccatccaatgaa

SEQ ID NO: 739854 - DNA, 19 bp, Mus musculus
  siRNA target sequence for Slamf9 (NM_029612.2,278-296).
catagactggctctttcaa

SEQ ID NO: 739855 - DNA, 19 bp, Mus musculus
  siRNA target sequence for Slamf9 (NM_029612.2,286-304).
ggctctttcaaaacaacat

SEQ ID NO: 739856 - DNA, 19 bp, Mus musculus
  siRNA target sequence for Slamf9 (NM_029612.2,330-348).
ggacagccagccgttatca

SEQ ID NO: 739857 - DNA, 19 bp, Mus musculus
  siRNA target sequence for Slamf9 (NM_029612.2,331-349).
gacagccagccgttatcat

SEQ ID NO: 739858 - DNA, 19 bp, Mus musculus
  siRNA target sequence for Slamf9 (NM_029612.2,395-413).
cagctactccctgcatatt

SEQ ID NO: 739859 - DNA, 19 bp, Mus musculus
  siRNA target sequence for Slamf9 (NM_029612.2,848-866).
cctactcttggcaattcta

SEQ ID NO: 739860 - DNA, 19 bp, Mus musculus
  siRNA target sequence for Slamf9 (NM_029612.2,849-867).
ctactcttggcaattctaa

SEQ ID NO: 739861 - DNA, 19 bp, Mus musculus
  siRNA target sequence for Slamf9 (NM_029612.2,887-905).
ccgagcccagaaaagctat

SEQ ID NO: 739862 - DNA, 19 bp, Mus musculus
  siRNA target sequence for Slamf9 (NM_029612.2,929-947).
caagagaaaccgcatcaaa

SEQ ID NO: 739863 - DNA, 19 bp, Mus musculus
  siRNA target sequence for 2310050L06Rik (NM_029619.2,138-156).
gacacagggtctcttacaa

SEQ ID NO: 739864 - DNA, 19 bp, Mus musculus
  siRNA target sequence for 2310050L06Rik (NM_029619.2,200-218).
gaccccggaacagttctat

SEQ ID NO: 739865 - DNA, 19 bp, Mus musculus
  siRNA target sequence for 2310050L06Rik (NM_029619.2,255-273).
ggaatgtatttgaacaaca

SEQ ID NO: 739866 - DNA, 19 bp, Mus musculus
  siRNA target sequence for 2310050L06Rik (NM_029619.2,306-324).
gatagcccactcttcagtt

SEQ ID NO: 739867 - DNA, 19 bp, Mus musculus
  siRNA target sequence for 2310050L06Rik (NM_029619.2,346-364).
gcaccggctggccttcatt

SEQ ID NO: 739868 - DNA, 19 bp, Mus musculus
  siRNA target sequence for 2310050L06Rik (NM_029619.2,347-365).
caccggctggccttcattt

SEQ ID NO: 739869 - DNA, 19 bp, Mus musculus
  siRNA target sequence for 2310050L06Rik (NM_029619.2,350-368).
cggctggccttcattttct

SEQ ID NO: 739870 - DNA, 19 bp, Mus musculus
  siRNA target sequence for 2310050L06Rik (NM_029619.2,423-441).
ctggacacttccttaggat

SEQ ID NO: 739871 - DNA, 19 bp, Mus musculus
  siRNA target sequence for 2310050L06Rik (NM_029619.2,512-530).
gcccactggccaaaggttt

SEQ ID NO: 739872 - DNA, 19 bp, Mus musculus
  siRNA target sequence for 2310050L06Rik (NM_029619.2,513-531).
cccactggccaaaggtttt

SEQ ID NO: 739873 - DNA, 19 bp, Mus musculus
  siRNA target sequence for Pcolce2 (NM_029620.1,240-258).
ccagagagacctgttttca

SEQ ID NO: 739874 - DNA, 19 bp, Mus musculus
  siRNA target sequence for Pcolce2 (NM_029620.1,257-275).
cacatgtggcggcattctt

SEQ ID NO: 739875 - DNA, 19 bp, Mus musculus
  siRNA target sequence for Pcolce2 (NM_029620.1,277-295).
ccggagagtctggatttat

SEQ ID NO: 739876 - DNA, 19 bp, Mus musculus
  siRNA target sequence for Pcolce2 (NM_029620.1,278-296).
cggagagtctggatttatt

SEQ ID NO: 739877 - DNA, 19 bp, Mus musculus
  siRNA target sequence for Pcolce2 (NM_029620.1,320-338).
gtaccctccgaatagcaaa

SEQ ID NO: 739878 - DNA, 19 bp, Mus musculus
  siRNA target sequence for Pcolce2 (NM_029620.1,324-342).
cctccgaatagcaaatgta

SEQ ID NO: 739879 - DNA, 19 bp, Mus musculus
  siRNA target sequence for Pcolce2 (NM_029620.1,327-345).
ccgaatagcaaatgtactt

SEQ ID NO: 739880 - DNA, 19 bp, Mus musculus
  siRNA target sequence for Pcolce2 (NM_029620.1,367-385).
gcaaagtggtcgtcttgaa

SEQ ID NO: 739881 - DNA, 19 bp, Mus musculus
  siRNA target sequence for Pcolce2 (NM_029620.1,368-386).
caaagtggtcgtcttgaat

SEQ ID NO: 739882 - DNA, 19 bp, Mus musculus
  siRNA target sequence for Pcolce2 (NM_029620.1,374-392).
ggtcgtcttgaattttcga

SEQ ID NO: 739883 - DNA, 19 bp, Mus musculus
  siRNA target sequence for Pcolce2 (NM_029620.1,375-393).
gtcgtcttgaattttcgat

SEQ ID NO: 739884 - DNA, 19 bp, Mus musculus
  siRNA target sequence for Pcolce2 (NM_029620.1,513-531).
gccagcggcaacaagatga

SEQ ID NO: 739885 - DNA, 19 bp, Mus musculus
  siRNA target sequence for Pcolce2 (NM_029620.1,527-545).
gatgacggtacaaatgatt

SEQ ID NO: 739886 - DNA, 19 bp, Mus musculus
  siRNA target sequence for Pcolce2 (NM_029620.1,532-550).
cggtacaaatgatttctga

SEQ ID NO: 739887 - DNA, 19 bp, Mus musculus
  siRNA target sequence for Pcolce2 (NM_029620.1,625-643).
gtggaggacgccttgaaaa

SEQ ID NO: 739888 - DNA, 19 bp, Mus musculus
  siRNA target sequence for Pcolce2 (NM_029620.1,630-648).
ggacgccttgaaaaacctt

SEQ ID NO: 739889 - DNA, 19 bp, Mus musculus
  siRNA target sequence for Pcolce2 (NM_029620.1,689-707).
ccccgtgggagttacttgt

SEQ ID NO: 739890 - DNA, 19 bp, Mus musculus
  siRNA target sequence for Pcolce2 (NM_029620.1,724-742).
ctccgaagaaccagcttat

SEQ ID NO: 739891 - DNA, 19 bp, Mus musculus
  siRNA target sequence for Pcolce2 (NM_029620.1,735-753).
cagcttatagagttaaagt

SEQ ID NO: 739892 - DNA, 19 bp, Mus musculus
  siRNA target sequence for Pcolce2 (NM_029620.1,765-783).
gatgttgagcgcgataact

SEQ ID NO: 739893 - DNA, 19 bp, Mus musculus
  siRNA target sequence for Pcolce2 (NM_029620.1,768-786).
gttgagcgcgataactact

SEQ ID NO: 739894 - DNA, 19 bp, Mus musculus
  siRNA target sequence for Pcolce2 (NM_029620.1,877-895).
cgatcgtgtctgagagaaa

SEQ ID NO: 739895 - DNA, 19 bp, Mus musculus
  siRNA target sequence for Pcolce2 (NM_029620.1,878-896).
gatcgtgtctgagagaaat

SEQ ID NO: 739896 - DNA, 19 bp, Mus musculus
  siRNA target sequence for Pcolce2 (NM_029620.1,892-910).
gaaatgaacttcttattca

SEQ ID NO: 739897 - DNA, 19 bp, Mus musculus
  siRNA target sequence for Pcolce2 (NM_029620.1,911-929).
gttcttatcagacttaagt

SEQ ID NO: 739898 - DNA, 19 bp, Mus musculus
  siRNA target sequence for Pcolce2 (NM_029620.1,928-946).
gtttaacagcggatggttt

SEQ ID NO: 739899 - DNA, 19 bp, Mus musculus
  siRNA target sequence for Pcolce2 (NM_029620.1,943-961).
gttttattggtcactacaa

SEQ ID NO: 739900 - DNA, 19 bp, Mus musculus
  siRNA target sequence for Pcolce2 (NM_029620.1,1010-1028).
cacactccccgtaactaca

SEQ ID NO: 739901 - DNA, 19 bp, Mus musculus
  siRNA target sequence for Pcolce2 (NM_029620.1,1018-1036).
ccgtaactacaggtctaaa

SEQ ID NO: 739902 - DNA, 19 bp, Mus musculus
  siRNA target sequence for Pcolce2 (NM_029620.1,1083-1101).
ctggagagcaattactgtt

SEQ ID NO: 739903 - DNA, 19 bp, Mus musculus
  siRNA target sequence for Pcolce2 (NM_029620.1,1113-1131).
gtgttagccggcacagtta

SEQ ID NO: 739904 - DNA, 19 bp, Mus musculus
  siRNA target sequence for Pcolce2 (NM_029620.1,1164-1182).
gccacagtctcgatcatca

SEQ ID NO: 739905 - DNA, 19 bp, Mus musculus
  siRNA target sequence for Pcolce2 (NM_029620.1,1272-1290).
ctcagacgaggtctcaatt

SEQ ID NO: 739906 - DNA, 19 bp, Mus musculus
  siRNA target sequence for Pcolce2 (NM_029620.1,1276-1294).
gacgaggtctcaattacat

SEQ ID NO: 739907 - DNA, 19 bp, Mus musculus
  siRNA target sequence for Pcolce2 (NM_029620.1,1278-1296).
cgaggtctcaattacatta

SEQ ID NO: 739908 - DNA, 19 bp, Mus musculus
  siRNA target sequence for Pcolce2 (NM_029620.1,1279-1297).
gaggtctcaattacattat

SEQ ID NO: 739909 - DNA, 19 bp, Mus musculus
  siRNA target sequence for Pcolce2 (NM_029620.1,1317-1335).
gatgggcgtggcaaaatca

SEQ ID NO: 739910 - DNA, 19 bp, Mus musculus
  siRNA target sequence for Pcolce2 (NM_029620.1,1338-1356).
ccaaacagctttgtcaaaa

SEQ ID NO: 739911 - DNA, 19 bp, Mus musculus
  siRNA target sequence for 2410004L22Rik (NM_029621.1,171-189).
gtcccggtatctgcaatat

SEQ ID NO: 739912 - DNA, 19 bp, Mus musculus
  siRNA target sequence for 2410004L22Rik (NM_029621.1,173-191).
cccggtatctgcaatatga

SEQ ID NO: 739913 - DNA, 19 bp, Mus musculus
  siRNA target sequence for 2410004L22Rik (NM_029621.1,175-193).
cggtatctgcaatatgaca

SEQ ID NO: 739914 - DNA, 19 bp, Mus musculus
  siRNA target sequence for 2410004L22Rik (NM_029621.1,176-194).
ggtatctgcaatatgacaa

SEQ ID NO: 739915 - DNA, 19 bp, Mus musculus
  siRNA target sequence for 2410004L22Rik (NM_029621.1,359-377).
ctgccatcgacgacaaaat

SEQ ID NO: 739916 - DNA, 19 bp, Mus musculus
  siRNA target sequence for 2400010D15Rik (NM_029623.1,119-137).
cggttaactgcgtgttctt

SEQ ID NO: 739917 - DNA, 19 bp, Mus musculus
  siRNA target sequence for 2400010D15Rik (NM_029623.1,182-200).
ctacaggagtggtcgttaa

SEQ ID NO: 739918 - DNA, 19 bp, Mus musculus
  siRNA target sequence for 2400010D15Rik (NM_029623.1,195-213).
cgttaaaggcccagatgat

SEQ ID NO: 739919 - DNA, 19 bp, Mus musculus
  siRNA target sequence for 2400010D15Rik (NM_029623.1,196-214).
gttaaaggcccagatgata

SEQ ID NO: 739920 - DNA, 19 bp, Mus musculus
  siRNA target sequence for 2400010D15Rik (NM_029623.1,252-270).
ggtgaagtgcatcaagttt

SEQ ID NO: 739921 - DNA, 19 bp, Mus musculus
  siRNA target sequence for 2400010D15Rik (NM_029623.1,253-271).
gtgaagtgcatcaagtttt

SEQ ID NO: 739922 - DNA, 19 bp, Mus musculus
  siRNA target sequence for 2400010D15Rik (NM_029623.1,258-276).
gtgcatcaagttttcttta

SEQ ID NO: 739923 - DNA, 19 bp, Mus musculus
  siRNA target sequence for 2400010D15Rik (NM_029623.1,260-278).
gcatcaagttttctttaga

SEQ ID NO: 739924 - DNA, 19 bp, Mus musculus
  siRNA target sequence for 2400010D15Rik (NM_029623.1,307-325).
gcgaaggctgtggactttt

SEQ ID NO: 739925 - DNA, 19 bp, Mus musculus
  siRNA target sequence for 2400010D15Rik (NM_029623.1,312-330).
ggctgtggacttttgtaat

SEQ ID NO: 739926 - DNA, 19 bp, Mus musculus
  siRNA target sequence for 2400010D15Rik (NM_029623.1,377-395).
ccaagaatgccaacatact

SEQ ID NO: 739927 - DNA, 19 bp, Mus musculus
  siRNA target sequence for 2400010D15Rik (NM_029623.1,416-434).
ctactgagatcgtcttcat

SEQ ID NO: 739928 - DNA, 19 bp, Mus musculus
  siRNA target sequence for 2400010D15Rik (NM_029623.1,439-457).
gaccaaggcatcgaatttt

SEQ ID NO: 739929 - DNA, 19 bp, Mus musculus
  siRNA target sequence for 2400010D15Rik (NM_029623.1,463-481).
gtgatgcctgagaaacgaa

SEQ ID NO: 739930 - DNA, 19 bp, Mus musculus
  siRNA target sequence for 2400010D15Rik (NM_029623.1,514-532).
gtgaactggtacacgtatt

SEQ ID NO: 739931 - DNA, 19 bp, Mus musculus
  siRNA target sequence for 2400010D15Rik (NM_029623.1,560-578).
ccaccacagtccttgagaa

SEQ ID NO: 739932 - DNA, 19 bp, Mus musculus
  siRNA target sequence for 2400010D15Rik (NM_029623.1,563-581).
ccacagtccttgagaatgt

SEQ ID NO: 739933 - DNA, 19 bp, Mus musculus
  siRNA target sequence for 2400010D15Rik (NM_029623.1,625-643).
cccaagttcgagattgagt

SEQ ID NO: 739934 - DNA, 19 bp, Mus musculus
  siRNA target sequence for 2400010D15Rik (NM_029623.1,626-644).
ccaagttcgagattgagtt

SEQ ID NO: 739935 - DNA, 19 bp, Mus musculus
  siRNA target sequence for 2400010D15Rik (NM_029623.1,627-645).
caagttcgagattgagtta

SEQ ID NO: 739936 - DNA, 19 bp, Mus musculus
  siRNA target sequence for 2400010D15Rik (NM_029623.1,646-664).
ccagctgcaccgaagtcaa

SEQ ID NO: 739937 - DNA, 19 bp, Mus musculus
  siRNA target sequence for 2400010D15Rik (NM_029623.1,650-668).
ctgcaccgaagtcaactaa

SEQ ID NO: 739938 - DNA, 19 bp, Mus musculus
  siRNA target sequence for 2400010D15Rik (NM_029623.1,655-673).
ccgaagtcaactaaactta

SEQ ID NO: 739939 - DNA, 19 bp, Mus musculus
  siRNA target sequence for 2400010D15Rik (NM_029623.1,704-722).
ccatatacgggcagcttta

SEQ ID NO: 739940 - DNA, 19 bp, Mus musculus
  siRNA target sequence for 2400010D15Rik (NM_029623.1,742-760).
cactctcggacgtctaaca

SEQ ID NO: 739941 - DNA, 19 bp, Mus musculus
  siRNA target sequence for 2400010D15Rik (NM_029623.1,799-817).
gagggtgcatgtaaaaaga

SEQ ID NO: 739942 - DNA, 19 bp, Mus musculus
  siRNA target sequence for 2400010D15Rik (NM_029623.1,809-827).
gtaaaaagatgcacatact

SEQ ID NO: 739943 - DNA, 19 bp, Mus musculus
  siRNA target sequence for 2400010D15Rik (NM_029623.1,972-990).
gcttccagcccgatcaatt

SEQ ID NO: 739944 - DNA, 19 bp, Mus musculus
  siRNA target sequence for 2400010D15Rik (NM_029623.1,980-998).
cccgatcaattcaacctta

SEQ ID NO: 739945 - DNA, 19 bp, Mus musculus
  siRNA target sequence for 2400010D15Rik (NM_029623.1,1045-1063).
gtcccctgtaaactctatt

SEQ ID NO: 739946 - DNA, 19 bp, Mus musculus
  siRNA target sequence for 2400010D15Rik (NM_029623.1,1048-1066).
ccctgtaaactctattcct

SEQ ID NO: 739947 - DNA, 19 bp, Mus musculus
  siRNA target sequence for 2400010D15Rik (NM_029623.1,1067-1085).
cttcatggatcgtctttca

SEQ ID NO: 739948 - DNA, 19 bp, Mus musculus
  siRNA target sequence for 2400010D15Rik (NM_029623.1,1159-1177).
ctcttgccagataaaggaa

SEQ ID NO: 739949 - DNA, 19 bp, Mus musculus
  siRNA target sequence for 2400010D15Rik (NM_029623.1,1330-1348).
gctgatcagagctacacaa

SEQ ID NO: 739950 - DNA, 19 bp, Mus musculus
  siRNA target sequence for 2400010D15Rik (NM_029623.1,1374-1392).
gagcaacccacctctcaaa

SEQ ID NO: 739951 - DNA, 19 bp, Mus musculus
  siRNA target sequence for 2400010D15Rik (NM_029623.1,1451-1469).
caccattcgtggaaaacaa

SEQ ID NO: 739952 - DNA, 19 bp, Mus musculus
  siRNA target sequence for 2400010D15Rik (NM_029623.1,1476-1494).
gccgcacaagtttgtgata

SEQ ID NO: 739953 - DNA, 19 bp, Mus musculus
  siRNA target sequence for 2400010D15Rik (NM_029623.1,1495-1513).
gctgtgctgatggaatata

SEQ ID NO: 739954 - DNA, 19 bp, Mus musculus
  siRNA target sequence for 2400010D15Rik (NM_029623.1,1496-1514).
ctgtgctgatggaatatat

SEQ ID NO: 739955 - DNA, 19 bp, Mus musculus
  siRNA target sequence for 2400010D15Rik (NM_029623.1,1517-1535).
gttctctgaaccagtttca

SEQ ID NO: 739956 - DNA, 19 bp, Mus musculus
  siRNA target sequence for 2400010D15Rik (NM_029623.1,1520-1538).
ctctgaaccagtttcagat

SEQ ID NO: 739957 - DNA, 19 bp, Mus musculus
  siRNA target sequence for 2400010D15Rik (NM_029623.1,1548-1566).
gcactacttacatgaactt

SEQ ID NO: 739958 - DNA, 19 bp, Mus musculus
  siRNA target sequence for 2400010D15Rik (NM_029623.1,1577-1595).
cactggtccagcataacct

SEQ ID NO: 739959 - DNA, 19 bp, Mus musculus
  siRNA target sequence for 2400010D15Rik (NM_029623.1,1585-1603).
cagcataacctcttctaca

SEQ ID NO: 739960 - DNA, 19 bp, Mus musculus
  siRNA target sequence for 2400010D15Rik (NM_029623.1,1668-1686).
gtccctagagagcttttat

SEQ ID NO: 739961 - DNA, 19 bp, Mus musculus
  siRNA target sequence for 2400010D15Rik (NM_029623.1,1671-1689).
cctagagagcttttatcct

SEQ ID NO: 739962 - DNA, 19 bp, Mus musculus
  siRNA target sequence for 2400010D15Rik (NM_029623.1,1805-1823).
gcattggtggccatgacaa

SEQ ID NO: 739963 - DNA, 19 bp, Mus musculus
  siRNA target sequence for 2400010D15Rik (NM_029623.1,1829-1847).
ctgctcgcaaattcttaga

SEQ ID NO: 739964 - DNA, 19 bp, Mus musculus
  siRNA target sequence for 2400010D15Rik (NM_029623.1,1856-1874).
ggcagaccgacgatgtcat

SEQ ID NO: 739965 - DNA, 19 bp, Mus musculus
  siRNA target sequence for 2400010D15Rik (NM_029623.1,1866-1884).
cgatgtcatgctcttctat

SEQ ID NO: 739966 - DNA, 19 bp, Mus musculus
  siRNA target sequence for 2400010D15Rik (NM_029623.1,1867-1885).
gatgtcatgctcttctata

SEQ ID NO: 739967 - DNA, 19 bp, Mus musculus
  siRNA target sequence for 2400010D15Rik (NM_029623.1,1870-1888).
gtcatgctcttctatacca

SEQ ID NO: 739968 - DNA, 19 bp, Mus musculus
  siRNA target sequence for 2400010D15Rik (NM_029623.1,1872-1890).
catgctcttctataccata

SEQ ID NO: 739969 - DNA, 19 bp, Mus musculus
  siRNA target sequence for 2400010D15Rik (NM_029623.1,1924-1942).
cgagggaaccctaacttca

SEQ ID NO: 739970 - DNA, 19 bp, Mus musculus
  siRNA target sequence for 2400010D15Rik (NM_029623.1,1993-2011).
ggagaacaagctctaatga

SEQ ID NO: 739971 - DNA, 19 bp, Mus musculus
  siRNA target sequence for 2400010G15Rik (NM_029624.2,52-70).
ccgaggggtcgctgagaaa

SEQ ID NO: 739972 - DNA, 19 bp, Mus musculus
  siRNA target sequence for 2400010G15Rik (NM_029624.2,53-71).
cgaggggtcgctgagaaaa

SEQ ID NO: 739973 - DNA, 19 bp, Mus musculus
  siRNA target sequence for 2400010G15Rik (NM_029624.2,220-238).
cctttttggtggcattcaa

SEQ ID NO: 739974 - DNA, 19 bp, Mus musculus
  siRNA target sequence for 2400010G15Rik (NM_029624.2,341-359).
gacctatgcaccaaccatt

SEQ ID NO: 739975 - DNA, 19 bp, Mus musculus
  siRNA target sequence for 2400010G15Rik (NM_029624.2,343-361).
cctatgcaccaaccattat

SEQ ID NO: 739976 - DNA, 19 bp, Mus musculus
  siRNA target sequence for 2400010G15Rik (NM_029624.2,376-394).
ggtcagacatgaacttcaa

SEQ ID NO: 739977 - DNA, 19 bp, Mus musculus
  siRNA target sequence for 2400010G15Rik (NM_029624.2,449-467).
cggctgtgccaacatgata

SEQ ID NO: 739978 - DNA, 19 bp, Mus musculus
  siRNA target sequence for 2400010G15Rik (NM_029624.2,454-472).
gtgccaacatgatactcat

SEQ ID NO: 739979 - DNA, 19 bp, Mus musculus
  siRNA target sequence for 2400010G15Rik (NM_029624.2,646-664).
gcttccgctggctgatctt

SEQ ID NO: 739980 - DNA, 19 bp, Mus musculus
  siRNA target sequence for 2400010G15Rik (NM_029624.2,730-748).
gcatggacttccactatga

SEQ ID NO: 739981 - DNA, 19 bp, Mus musculus
  siRNA target sequence for 2400010G15Rik (NM_029624.2,875-893).
gcggatgcgcattcttcat

SEQ ID NO: 739982 - DNA, 19 bp, Mus musculus
  siRNA target sequence for 2400010G15Rik (NM_029624.2,1023-1041).
ggacctcaaggcctaaaga

SEQ ID NO: 739983 - DNA, 19 bp, Mus musculus
  siRNA target sequence for 2400010G15Rik (NM_029624.2,1024-1042).
gacctcaaggcctaaagaa

SEQ ID NO: 739984 - DNA, 19 bp, Mus musculus
  siRNA target sequence for 2400010G15Rik (NM_029624.2,1059-1077).
cagagggaagatacacaaa

SEQ ID NO: 739985 - DNA, 19 bp, Mus musculus
  siRNA target sequence for 2400010G15Rik (NM_029624.2,1116-1134).
cggcaagtggtcaacatct

SEQ ID NO: 739986 - DNA, 19 bp, Mus musculus
  siRNA target sequence for Ppp1r11 (NM_029632.1,268-286).
gagaatcagagcctaacta

SEQ ID NO: 739987 - DNA, 19 bp, Mus musculus
  siRNA target sequence for Ppp1r11 (NM_029632.1,276-294).
gagcctaactatgaaactt

SEQ ID NO: 739988 - DNA, 19 bp, Mus musculus
  siRNA target sequence for Ppp1r11 (NM_029632.1,338-356).
ctgtggacaatgagcatat

SEQ ID NO: 739989 - DNA, 19 bp, Mus musculus
  siRNA target sequence for Ppp1r11 (NM_029632.1,358-376).
gggcgacgctcgtcgaaat

SEQ ID NO: 739990 - DNA, 19 bp, Mus musculus
  siRNA target sequence for Ppp1r11 (NM_029632.1,361-379).
cgacgctcgtcgaaatgct

SEQ ID NO: 739991 - DNA, 19 bp, Mus musculus
  siRNA target sequence for Ppp1r11 (NM_029632.1,369-387).
gtcgaaatgctgctgtatt

SEQ ID NO: 739992 - DNA, 19 bp, Mus musculus
  siRNA target sequence for 1810029F08Rik (NM_029635.1,62-80).
ggcctcctcaaaagatgtt

SEQ ID NO: 739993 - DNA, 19 bp, Mus musculus
  siRNA target sequence for 1810029F08Rik (NM_029635.1,84-102).
cgacaactgtgccaagaaa

SEQ ID NO: 739994 - DNA, 19 bp, Mus musculus
  siRNA target sequence for 1810029F08Rik (NM_029635.1,251-269).
ggcgattctggctctcttt

SEQ ID NO: 739995 - DNA, 19 bp, Mus musculus
  siRNA target sequence for 1810029F08Rik (NM_029635.1,260-278).
ggctctctttccggaaaat

SEQ ID NO: 739996 - DNA, 19 bp, Mus musculus
  siRNA target sequence for 1810029F08Rik (NM_029635.1,261-279).
gctctctttccggaaaatt

SEQ ID NO: 739997 - DNA, 19 bp, Mus musculus
  siRNA target sequence for 1810029F08Rik (NM_029635.1,271-289).
cggaaaatttccaccaaaa

SEQ ID NO: 739998 - DNA, 19 bp, Mus musculus
  siRNA target sequence for 1810029F08Rik (NM_029635.1,541-559).
cgctggacaccatgttaga

SEQ ID NO: 739999 - DNA, 19 bp, Mus musculus
  siRNA target sequence for 1810029F08Rik (NM_029635.1,584-602).
gctttctgctgtagctaat

SEQ ID NO: 740000 - DNA, 19 bp, Mus musculus
  siRNA target sequence for 1600029D21Rik (NM_029639.1,111-129).
cctctctgccagtgataat

SEQ ID NO: 740001 - DNA, 19 bp, Mus musculus
  siRNA target sequence for 1600029D21Rik (NM_029639.1,134-152).
cctgcgtggtccttgataa

SEQ ID NO: 740002 - DNA, 19 bp, Mus musculus
  siRNA target sequence for 1600029D21Rik (NM_029639.1,137-155).
gcgtggtccttgataacat

SEQ ID NO: 740003 - DNA, 19 bp, Mus musculus
  siRNA target sequence for 1600029D21Rik (NM_029639.1,296-314).
gcacctggagtggaacata

SEQ ID NO: 740004 - DNA, 19 bp, Mus musculus
  siRNA target sequence for 1600029D21Rik (NM_029639.1,332-350).
gcagtgtctactataactt

SEQ ID NO: 740005 - DNA, 19 bp, Mus musculus
  siRNA target sequence for 1600029D21Rik (NM_029639.1,398-416).
cttccgaggatgtgactaa

SEQ ID NO: 740006 - DNA, 19 bp, Mus musculus
  siRNA target sequence for 1600029D21Rik (NM_029639.1,401-419).
ccgaggatgtgactaaagt

SEQ ID NO: 740007 - DNA, 19 bp, Mus musculus
  siRNA target sequence for 1600029D21Rik (NM_029639.1,403-421).
gaggatgtgactaaagtca

SEQ ID NO: 740008 - DNA, 19 bp, Mus musculus
  siRNA target sequence for 1600029D21Rik (NM_029639.1,462-480).
gtcatccgtgaaaatggaa

SEQ ID NO: 740009 - DNA, 19 bp, Mus musculus
  siRNA target sequence for 1600029D21Rik (NM_029639.1,468-486).
cgtgaaaatggaacaagta

SEQ ID NO: 740010 - DNA, 19 bp, Mus musculus
  siRNA target sequence for 1600029D21Rik (NM_029639.1,711-729).
ctccatatcctgcttgttt

SEQ ID NO: 740011 - DNA, 19 bp, Mus musculus
  siRNA target sequence for 1600029D21Rik (NM_029639.1,722-740).
gcttgtttttctcattagt

SEQ ID NO: 740012 - DNA, 19 bp, Mus musculus
  siRNA target sequence for 1600029D21Rik (NM_029639.1,791-809).
catcctcccgagctcattt

SEQ ID NO: 740013 - DNA, 19 bp, Mus musculus
  siRNA target sequence for 1600029D21Rik (NM_029639.1,810-828).
caggccagtgcttaaacat

SEQ ID NO: 740014 - DNA, 19 bp, Mus musculus
  siRNA target sequence for 1600029D21Rik (NM_029639.1,826-844).
catacccgaatgaaggttt

SEQ ID NO: 740015 - DNA, 19 bp, Mus musculus
  siRNA target sequence for 1810044A24Rik (NM_029640.1,172-190).
gctcctgcgctcagtgaat

SEQ ID NO: 740016 - DNA, 19 bp, Mus musculus
  siRNA target sequence for 1810044A24Rik (NM_029640.1,176-194).
ctgcgctcagtgaatgact

SEQ ID NO: 740017 - DNA, 19 bp, Mus musculus
  siRNA target sequence for 1810044A24Rik (NM_029640.1,228-246).
gctcggcttcagtcattta

SEQ ID NO: 740018 - DNA, 19 bp, Mus musculus
  siRNA target sequence for 1810044A24Rik (NM_029640.1,229-247).
ctcggcttcagtcatttat

SEQ ID NO: 740019 - DNA, 19 bp, Mus musculus
  siRNA target sequence for 1810044A24Rik (NM_029640.1,376-394).
caccaacggcataaatcct

SEQ ID NO: 740020 - DNA, 19 bp, Mus musculus
  siRNA target sequence for 1810044A24Rik (NM_029640.1,409-427).
gatcggaagggccaagaat

SEQ ID NO: 740021 - DNA, 19 bp, Mus musculus
  siRNA target sequence for 1810044A24Rik (NM_029640.1,443-461).
gacatcattgacaaataca

SEQ ID NO: 740022 - DNA, 19 bp, Mus musculus
  siRNA target sequence for 1810044A24Rik (NM_029640.1,464-482).
gaggccatctcctattaca

SEQ ID NO: 740023 - DNA, 19 bp, Mus musculus
  siRNA target sequence for 1810044A24Rik (NM_029640.1,536-554).
cgcgtcctagcgattcaga

SEQ ID NO: 740024 - DNA, 19 bp, Mus musculus
  siRNA target sequence for 1810044A24Rik (NM_029640.1,537-555).
gcgtcctagcgattcagaa

SEQ ID NO: 740025 - DNA, 19 bp, Mus musculus
  siRNA target sequence for 1810044A24Rik (NM_029640.1,750-768).
gctggagggcctgttacaa

SEQ ID NO: 740026 - DNA, 19 bp, Mus musculus
  siRNA target sequence for 1810044A24Rik (NM_029640.1,962-980).
ctgtctgaccaggaaaaga

SEQ ID NO: 740027 - DNA, 19 bp, Mus musculus
  siRNA target sequence for 1810044A24Rik (NM_029640.1,1067-1085).
cctcccgtgccgtttacca

SEQ ID NO: 740028 - DNA, 19 bp, Mus musculus
  siRNA target sequence for 1810044A24Rik (NM_029640.1,1068-1086).
ctcccgtgccgtttaccaa

SEQ ID NO: 740029 - DNA, 19 bp, Mus musculus
  siRNA target sequence for 1810044A24Rik (NM_029640.1,1136-1154).
cgaccccacaaggtgaaaa

SEQ ID NO: 740030 - DNA, 19 bp, Mus musculus
  siRNA target sequence for 1810044A24Rik (NM_029640.1,1200-1218).
cgccaatcatcgcacataa

SEQ ID NO: 740031 - DNA, 19 bp, Mus musculus
  siRNA target sequence for 1810044A24Rik (NM_029640.1,1232-1250).
cgcaacaaaaaaatagatt

SEQ ID NO: 740032 - DNA, 19 bp, Mus musculus
  siRNA target sequence for 1810044A24Rik (NM_029640.1,1313-1331).
gagctccgcgtggaaaaca

SEQ ID NO: 740033 - DNA, 19 bp, Mus musculus
  siRNA target sequence for 1810044A24Rik (NM_029640.1,1433-1451).
cagactacaggaatgatca

SEQ ID NO: 740034 - DNA, 19 bp, Mus musculus
  siRNA target sequence for 1810044A24Rik (NM_029640.1,1533-1551).
gctccaccgtggaagtcat

SEQ ID NO: 740035 - DNA, 19 bp, Mus musculus
  siRNA target sequence for 1810044A24Rik (NM_029640.1,1628-1646).
gagatcgccaccaacgtat

SEQ ID NO: 740036 - DNA, 19 bp, Mus musculus
  siRNA target sequence for 1810044A24Rik (NM_029640.1,1633-1651).
cgccaccaacgtatctgtt

SEQ ID NO: 740037 - DNA, 19 bp, Mus musculus
  siRNA target sequence for 1810044A24Rik (NM_029640.1,1835-1853).
gctactttcaccatcaaca

SEQ ID NO: 740038 - DNA, 19 bp, Mus musculus
  siRNA target sequence for 1810044A24Rik (NM_029640.1,1873-1891).
ctcttgccaggagaatctt

SEQ ID NO: 740039 - DNA, 19 bp, Mus musculus
  siRNA target sequence for 1810044A24Rik (NM_029640.1,1875-1893).
cttgccaggagaatcttct

SEQ ID NO: 740040 - DNA, 19 bp, Mus musculus
  siRNA target sequence for 1810044A24Rik (NM_029640.1,2048-2066).
gtcctgaacttcaagtact

SEQ ID NO: 740041 - DNA, 19 bp, Mus musculus
  siRNA target sequence for 1810044A24Rik (NM_029640.1,2131-2149).
cgagccttctgtgtttttt

SEQ ID NO: 740042 - DNA, 19 bp, Mus musculus
  siRNA target sequence for 1810044A24Rik (NM_029640.1,2237-2255).
gtctgcgccaggaacaact

SEQ ID NO: 740043 - DNA, 19 bp, Mus musculus
  siRNA target sequence for 1810044A24Rik (NM_029640.1,2351-2369).
ggacactttgcaaatctga

SEQ ID NO: 740044 - DNA, 19 bp, Mus musculus
  siRNA target sequence for 1810044A24Rik (NM_029640.1,2428-2446).
catccgctggagaattcct

SEQ ID NO: 740045 - DNA, 19 bp, Mus musculus
  siRNA target sequence for D15Ertd747e (NM_029643.2,713-731).
ggcctgctgtgcttctaat

SEQ ID NO: 740046 - DNA, 19 bp, Mus musculus
  siRNA target sequence for D15Ertd747e (NM_029643.2,768-786).
ccctttttacggtctttct

SEQ ID NO: 740047 - DNA, 19 bp, Mus musculus
  siRNA target sequence for D15Ertd747e (NM_029643.2,899-917).
cgaggtgtctcccattaat

SEQ ID NO: 740048 - DNA, 19 bp, Mus musculus
  siRNA target sequence for D15Ertd747e (NM_029643.2,992-1010).
ccaaggcctcctgttacta

SEQ ID NO: 740049 - DNA, 19 bp, Mus musculus
  siRNA target sequence for D15Ertd747e (NM_029643.2,1161-1179).
gcccatcagctgttctctt

SEQ ID NO: 740050 - DNA, 19 bp, Mus musculus
  siRNA target sequence for D15Ertd747e (NM_029643.2,1242-1260).
cccgctgtacagagctttt

SEQ ID NO: 740051 - DNA, 19 bp, Mus musculus
  siRNA target sequence for D15Ertd747e (NM_029643.2,1421-1439).
gacactggcagccttaagt

SEQ ID NO: 740052 - DNA, 19 bp, Mus musculus
  siRNA target sequence for D15Ertd747e (NM_029643.2,1506-1524).
gcaggcacgttctcgtata

SEQ ID NO: 740053 - DNA, 19 bp, Mus musculus
  siRNA target sequence for D15Ertd747e (NM_029643.2,1507-1525).
caggcacgttctcgtatat

SEQ ID NO: 740054 - DNA, 19 bp, Mus musculus
  siRNA target sequence for D15Ertd747e (NM_029643.2,1509-1527).
ggcacgttctcgtatatca

SEQ ID NO: 740055 - DNA, 19 bp, Mus musculus
  siRNA target sequence for D15Ertd747e (NM_029643.2,1510-1528).
gcacgttctcgtatatcaa

SEQ ID NO: 740056 - DNA, 19 bp, Mus musculus
  siRNA target sequence for D15Ertd747e (NM_029643.2,1532-1550).
ggcgatcagttccatgtta

SEQ ID NO: 740057 - DNA, 19 bp, Mus musculus
  siRNA target sequence for D15Ertd747e (NM_029643.2,1640-1658).
cagcatctaccgagtattt

SEQ ID NO: 740058 - DNA, 19 bp, Mus musculus
  siRNA target sequence for 2010004A03Rik (NM_029646.1,560-578).
gtcttgggatcctacttga

SEQ ID NO: 740059 - DNA, 19 bp, Mus musculus
  siRNA target sequence for 2010004A03Rik (NM_029646.1,584-602).
ctttgggaaacgagaattt

SEQ ID NO: 740060 - DNA, 19 bp, Mus musculus
  siRNA target sequence for 2010004A03Rik (NM_029646.1,611-629).
ggactctgacccaagataa

SEQ ID NO: 740061 - DNA, 19 bp, Mus musculus
  siRNA target sequence for 2010004A03Rik (NM_029646.1,680-698).
ggcttcagtacatgaaaca

SEQ ID NO: 740062 - DNA, 19 bp, Mus musculus
  siRNA target sequence for 2010004A03Rik (NM_029646.1,685-703).
cagtacatgaaacattact

SEQ ID NO: 740063 - DNA, 19 bp, Mus musculus
  siRNA target sequence for 2010004A03Rik (NM_029646.1,813-831).
ggtcttggtgagtctcaat

SEQ ID NO: 740064 - DNA, 19 bp, Mus musculus
  siRNA target sequence for 2010004A03Rik (NM_029646.1,867-885).
ccacccgtcctggaagtat

SEQ ID NO: 740065 - DNA, 19 bp, Mus musculus
  siRNA target sequence for 2010004A03Rik (NM_029646.1,870-888).
cccgtcctggaagtatcta

SEQ ID NO: 740066 - DNA, 19 bp, Mus musculus
  siRNA target sequence for 2010004A03Rik (NM_029646.1,872-890).
cgtcctggaagtatctaca

SEQ ID NO: 740067 - DNA, 19 bp, Mus musculus
  siRNA target sequence for 2010004A03Rik (NM_029646.1,1002-1020).
cccatgggccagatcattt

SEQ ID NO: 740068 - DNA, 19 bp, Mus musculus
  siRNA target sequence for 2010004A03Rik (NM_029646.1,1004-1022).
catgggccagatcatttga

SEQ ID NO: 740069 - DNA, 19 bp, Mus musculus
  siRNA target sequence for 2010004A03Rik (NM_029646.1,1028-1046).
gctgggagcttctgatgat

SEQ ID NO: 740070 - DNA, 19 bp, Mus musculus
  siRNA target sequence for 2010004A03Rik (NM_029646.1,1070-1088).
cacgtggaagctgtgttat

SEQ ID NO: 740071 - DNA, 19 bp, Mus musculus
  siRNA target sequence for 2310065H12Rik (NM_029648.3,661-679).
ggctgatgcggatgcatat

SEQ ID NO: 740072 - DNA, 19 bp, Mus musculus
  siRNA target sequence for 2310065H12Rik (NM_029648.3,665-683).
gatgcggatgcatatgaga

SEQ ID NO: 740073 - DNA, 19 bp, Mus musculus
  siRNA target sequence for 2310065H12Rik (NM_029648.3,690-708).
cttctgggattcccttaaa

SEQ ID NO: 740074 - DNA, 19 bp, Mus musculus
  siRNA target sequence for 2310065H12Rik (NM_029648.3,695-713).
gggattcccttaaacatat

SEQ ID NO: 740075 - DNA, 19 bp, Mus musculus
  siRNA target sequence for 2310065H12Rik (NM_029648.3,701-719).
cccttaaacatatggaata

SEQ ID NO: 740076 - DNA, 19 bp, Mus musculus
  siRNA target sequence for 2310065H12Rik (NM_029648.3,733-751).
gcataaaaaaaattctgaa

SEQ ID NO: 740077 - DNA, 19 bp, Mus musculus
  siRNA target sequence for 2310065H12Rik (NM_029648.3,880-898).
gtattttggagccaatgat

SEQ ID NO: 740078 - DNA, 19 bp, Mus musculus
  siRNA target sequence for 2310065H12Rik (NM_029648.3,888-906).
gagccaatgatagatttga

SEQ ID NO: 740079 - DNA, 19 bp, Mus musculus
  siRNA target sequence for 2310065H12Rik (NM_029648.3,900-918).
gatttgaaccccctgttaa

SEQ ID NO: 740080 - DNA, 19 bp, Mus musculus
  siRNA target sequence for 2310065H12Rik (NM_029648.3,1020-1038).
ctcgagagctcggtgtaaa

SEQ ID NO: 740081 - DNA, 19 bp, Mus musculus
  siRNA target sequence for 2310065H12Rik (NM_029648.3,1103-1121).
gctgctcgaaagaagaaga

SEQ ID NO: 740082 - DNA, 19 bp, Mus musculus
  siRNA target sequence for 2310065H12Rik (NM_029648.3,1128-1146).
catgggggtttgaagcaaa

SEQ ID NO: 740083 - DNA, 19 bp, Mus musculus
  siRNA target sequence for 2310065H12Rik (NM_029648.3,1131-1149).
gggggtttgaagcaaagaa

SEQ ID NO: 740084 - DNA, 19 bp, Mus musculus
  siRNA target sequence for 2610511E22Rik (NM_029649.1,105-123).
ggctgcttcagccaactta

SEQ ID NO: 740085 - DNA, 19 bp, Mus musculus
  siRNA target sequence for 2610511E22Rik (NM_029649.1,109-127).
gcttcagccaacttatgtt

SEQ ID NO: 740086 - DNA, 19 bp, Mus musculus
  siRNA target sequence for 2610511E22Rik (NM_029649.1,169-187).
cagtgccttatctatattt

SEQ ID NO: 740087 - DNA, 19 bp, Mus musculus
  siRNA target sequence for 2610511E22Rik (NM_029649.1,283-301).
gcacctacaccgcttacat

SEQ ID NO: 740088 - DNA, 19 bp, Mus musculus
  siRNA target sequence for 2610511E22Rik (NM_029649.1,328-346).
ggctaaaggtccgtatgta

SEQ ID NO: 740089 - DNA, 19 bp, Mus musculus
  siRNA target sequence for 2610511E22Rik (NM_029649.1,329-347).
gctaaaggtccgtatgtat

SEQ ID NO: 740090 - DNA, 19 bp, Mus musculus
  siRNA target sequence for 2610511E22Rik (NM_029649.1,330-348).
ctaaaggtccgtatgtatt

SEQ ID NO: 740091 - DNA, 19 bp, Mus musculus
  siRNA target sequence for 2610511E22Rik (NM_029649.1,463-481).
gcatctacctcatttgtgt

SEQ ID NO: 740092 - DNA, 19 bp, Mus musculus
  siRNA target sequence for 2610511E22Rik (NM_029649.1,560-578).
gctgttcttcgtgctttat

SEQ ID NO: 740093 - DNA, 19 bp, Mus musculus
  siRNA target sequence for 2610511E22Rik (NM_029649.1,595-613).
ccttcttgtcgggttacta

SEQ ID NO: 740094 - DNA, 19 bp, Mus musculus
  siRNA target sequence for 2610511E22Rik (NM_029649.1,596-614).
cttcttgtcgggttactat

SEQ ID NO: 740095 - DNA, 19 bp, Mus musculus
  siRNA target sequence for 2610511E22Rik (NM_029649.1,652-670).
ctcctgtcatgctgcttat

SEQ ID NO: 740096 - DNA, 19 bp, Mus musculus
  siRNA target sequence for 2610511E22Rik (NM_029649.1,655-673).
ctgtcatgctgcttatcga

SEQ ID NO: 740097 - DNA, 19 bp, Mus musculus
  siRNA target sequence for 2610511E22Rik (NM_029649.1,672-690).
gacggcaacgtctcctatt

SEQ ID NO: 740098 - DNA, 19 bp, Mus musculus
  siRNA target sequence for 2610511E22Rik (NM_029649.1,767-785).
cgtcatcttggctactgat

SEQ ID NO: 740099 - DNA, 19 bp, Mus musculus
  siRNA target sequence for 2410024A21Rik (NM_029654.3,467-485).
gaccataaccgcagtaaaa

SEQ ID NO: 740100 - DNA, 19 bp, Mus musculus
  siRNA target sequence for 2410024A21Rik (NM_029654.3,470-488).
cataaccgcagtaaaatct

SEQ ID NO: 740101 - DNA, 19 bp, Mus musculus
  siRNA target sequence for 2410024A21Rik (NM_029654.3,476-494).
cgcagtaaaatctgattct

SEQ ID NO: 740102 - DNA, 19 bp, Mus musculus
  siRNA target sequence for 2410024A21Rik (NM_029654.3,478-496).
cagtaaaatctgattctga

SEQ ID NO: 740103 - DNA, 19 bp, Mus musculus
  siRNA target sequence for 2410024A21Rik (NM_029654.3,540-558).
gacgtcgtgcacatcagaa

SEQ ID NO: 740104 - DNA, 19 bp, Mus musculus
  siRNA target sequence for 2410024A21Rik (NM_029654.3,584-602).
gatgaacctcattcagtat

SEQ ID NO: 740105 - DNA, 19 bp, Mus musculus
  siRNA target sequence for 2410024A21Rik (NM_029654.3,961-979).
ccggtgtgaccgctgaaaa

SEQ ID NO: 740106 - DNA, 19 bp, Mus musculus
  siRNA target sequence for 2410024A21Rik (NM_029654.3,964-982).
gtgtgaccgctgaaaatga

SEQ ID NO: 740107 - DNA, 19 bp, Mus musculus
  siRNA target sequence for 2410024A21Rik (NM_029654.3,1061-1079).
cgacgccattgtgataaaa

SEQ ID NO: 740108 - DNA, 19 bp, Mus musculus
  siRNA target sequence for 2410024A21Rik (NM_029654.3,1064-1082).
cgccattgtgataaaagat

SEQ ID NO: 740109 - DNA, 19 bp, Mus musculus
  siRNA target sequence for 2410024A21Rik (NM_029654.3,1145-1163).
ccctgccgtccgatatgtt

SEQ ID NO: 740110 - DNA, 19 bp, Mus musculus
  siRNA target sequence for 2410024A21Rik (NM_029654.3,1147-1165).
ctgccgtccgatatgttgt

SEQ ID NO: 740111 - DNA, 19 bp, Mus musculus
  siRNA target sequence for 2410024A21Rik (NM_029654.3,1149-1167).
gccgtccgatatgttgtta

SEQ ID NO: 740112 - DNA, 19 bp, Mus musculus
  siRNA target sequence for 2410024A21Rik (NM_029654.3,1150-1168).
ccgtccgatatgttgttaa

SEQ ID NO: 740113 - DNA, 19 bp, Mus musculus
  siRNA target sequence for 2410024A21Rik (NM_029654.3,1151-1169).
cgtccgatatgttgttaaa

SEQ ID NO: 740114 - DNA, 19 bp, Mus musculus
  siRNA target sequence for 2410024A21Rik (NM_029654.3,1181-1199).
ggtgtggcatctttatgga

SEQ ID NO: 740115 - DNA, 19 bp, Mus musculus
  siRNA target sequence for 2410024A21Rik (NM_029654.3,1228-1246).
cttctccagctaagagtta

SEQ ID NO: 740116 - DNA, 19 bp, Mus musculus
  siRNA target sequence for 2410024A21Rik (NM_029654.3,1326-1344).
catgacttcttgatggaaa

SEQ ID NO: 740117 - DNA, 19 bp, Mus musculus
  siRNA target sequence for 2410024A21Rik (NM_029654.3,1334-1352).
cttgatggaaatacagtta

SEQ ID NO: 740118 - DNA, 19 bp, Mus musculus
  siRNA target sequence for 2410024A21Rik (NM_029654.3,1349-1367).
gttaagcaaggtgaagttt

SEQ ID NO: 740119 - DNA, 19 bp, Mus musculus
  siRNA target sequence for 2410024A21Rik (NM_029654.3,1402-1420).
gtgagtccagcctcttaga

SEQ ID NO: 740120 - DNA, 19 bp, Mus musculus
  siRNA target sequence for 2410024A21Rik (NM_029654.3,1448-1466).
cgtgcaggaccttgaaatt

SEQ ID NO: 740121 - DNA, 19 bp, Mus musculus
  siRNA target sequence for 2410024A21Rik (NM_029654.3,1451-1469).
gcaggaccttgaaattcga

SEQ ID NO: 740122 - DNA, 19 bp, Mus musculus
  siRNA target sequence for 2410024A21Rik (NM_029654.3,1479-1497).
gcaacatcacagatgaata

SEQ ID NO: 740123 - DNA, 19 bp, Mus musculus
  siRNA target sequence for 2410024A21Rik (NM_029654.3,1531-1549).
ctcgtaaagcccattccaa

SEQ ID NO: 740124 - DNA, 19 bp, Mus musculus
  siRNA target sequence for 2410024A21Rik (NM_029654.3,1547-1565).
caacatgctgacaattaaa

SEQ ID NO: 740125 - DNA, 19 bp, Mus musculus
  siRNA target sequence for 2410024A21Rik (NM_029654.3,1631-1649).
gcctcttcgcctcaatatt

SEQ ID NO: 740126 - DNA, 19 bp, Mus musculus
  siRNA target sequence for 2410024A21Rik (NM_029654.3,1633-1651).
ctcttcgcctcaatattga

SEQ ID NO: 740127 - DNA, 19 bp, Mus musculus
  siRNA target sequence for 2410024A21Rik (NM_029654.3,1650-1668).
gaccaggacgccttgttct

SEQ ID NO: 740128 - DNA, 19 bp, Mus musculus
  siRNA target sequence for 2410024A21Rik (NM_029654.3,1725-1743).
gatccagaagttacaaagt

SEQ ID NO: 740129 - DNA, 19 bp, Mus musculus
  siRNA target sequence for 2410024A21Rik (NM_029654.3,1790-1808).
ctcaaaggagccaaatcta

SEQ ID NO: 740130 - DNA, 19 bp, Mus musculus
  siRNA target sequence for 2410024A21Rik (NM_029654.3,1792-1810).
caaaggagccaaatctagt

SEQ ID NO: 740131 - DNA, 19 bp, Mus musculus
  siRNA target sequence for 2410024A21Rik (NM_029654.3,1800-1818).
ccaaatctagtcgtttctt

SEQ ID NO: 740132 - DNA, 19 bp, Mus musculus
  siRNA target sequence for 2410024A21Rik (NM_029654.3,1801-1819).
caaatctagtcgtttcttt

SEQ ID NO: 740133 - DNA, 19 bp, Mus musculus
  siRNA target sequence for 2410024A21Rik (NM_029654.3,1816-1834).
cttttcctgggccaaaaca

SEQ ID NO: 740134 - DNA, 19 bp, Mus musculus
  siRNA target sequence for 2410024A21Rik (NM_029654.3,1999-2017).
cgatggatcagggtacatt

SEQ ID NO: 740135 - DNA, 19 bp, Mus musculus
  siRNA target sequence for 2410024A21Rik (NM_029654.3,2011-2029).
gtacattggctgggatttt

SEQ ID NO: 740136 - DNA, 19 bp, Mus musculus
  siRNA target sequence for 2410024A21Rik (NM_029654.3,2081-2099).
ctatcggcatggtttgcta

SEQ ID NO: 740137 - DNA, 19 bp, Mus musculus
  siRNA target sequence for 2410024A21Rik (NM_029654.3,2097-2115).
ctaggtattgacaaattgt

SEQ ID NO: 740138 - DNA, 19 bp, Mus musculus
  siRNA target sequence for 2410024A21Rik (NM_029654.3,2100-2118).
ggtattgacaaattgttct

SEQ ID NO: 740139 - DNA, 19 bp, Mus musculus
  siRNA target sequence for 2410024A21Rik (NM_029654.3,2132-2150).
ggaatggctcagtgacatt

SEQ ID NO: 740140 - DNA, 19 bp, Mus musculus
  siRNA target sequence for 2410024A21Rik (NM_029654.3,2133-2151).
gaatggctcagtgacatta

SEQ ID NO: 740141 - DNA, 19 bp, Mus musculus
  siRNA target sequence for 2410024A21Rik (NM_029654.3,2181-2199).
ggtgttggccctatgcatt

SEQ ID NO: 740142 - DNA, 19 bp, Mus musculus
  siRNA target sequence for 2410024A21Rik (NM_029654.3,2189-2207).
ccctatgcattcactagtt

SEQ ID NO: 740143 - DNA, 19 bp, Mus musculus
  siRNA target sequence for 2410024A21Rik (NM_029654.3,2220-2238).
ggcctgaaggacttggtat

SEQ ID NO: 740144 - DNA, 19 bp, Mus musculus
  siRNA target sequence for 2410024A21Rik (NM_029654.3,2239-2257).
ggctgcccattgagcaata

SEQ ID NO: 740145 - DNA, 19 bp, Mus musculus
  siRNA target sequence for 2410024A21Rik (NM_029654.3,2348-2366).
cagaatggtccaaaccata

SEQ ID NO: 740146 - DNA, 19 bp, Mus musculus
  siRNA target sequence for 2410024A21Rik (NM_029654.3,2374-2392).
ccgcagagactgcatatga

SEQ ID NO: 740147 - DNA, 19 bp, Mus musculus
  siRNA target sequence for 2410024A21Rik (NM_029654.3,2425-2443).
ccaagaaggcaaagagatt

SEQ ID NO: 740148 - DNA, 19 bp, Mus musculus
  siRNA target sequence for 2410024A21Rik (NM_029654.3,2429-2447).
gaaggcaaagagatttcct

SEQ ID NO: 740149 - DNA, 19 bp, Mus musculus
  siRNA target sequence for 2410024A21Rik (NM_029654.3,2498-2516).
ggcctacagcgttgtaaaa

SEQ ID NO: 740150 - DNA, 19 bp, Mus musculus
  siRNA target sequence for 2410024A21Rik (NM_029654.3,2500-2518).
cctacagcgttgtaaaaga

SEQ ID NO: 740151 - DNA, 19 bp, Mus musculus
  siRNA target sequence for 2410024A21Rik (NM_029654.3,2630-2648).
ggtcagacccctgattgta

SEQ ID NO: 740152 - DNA, 19 bp, Mus musculus
  siRNA target sequence for 2410024A21Rik (NM_029654.3,2651-2669).
caccgaggcgacatcaaat

SEQ ID NO: 740153 - DNA, 19 bp, Mus musculus
  siRNA target sequence for 2410024A21Rik (NM_029654.3,2653-2671).
ccgaggcgacatcaaatgt

SEQ ID NO: 740154 - DNA, 19 bp, Mus musculus
  siRNA target sequence for 2410024A21Rik (NM_029654.3,2655-2673).
gaggcgacatcaaatgtgt

SEQ ID NO: 740155 - DNA, 19 bp, Mus musculus
  siRNA target sequence for 2410024A21Rik (NM_029654.3,2657-2675).
ggcgacatcaaatgtgtta

SEQ ID NO: 740156 - DNA, 19 bp, Mus musculus
  siRNA target sequence for 2410024A21Rik (NM_029654.3,2679-2697).
ggcatgagaaaccaaatta

SEQ ID NO: 740157 - DNA, 19 bp, Mus musculus
  siRNA target sequence for 2410024A21Rik (NM_029654.3,2712-2730).
caggacgagtcgcagaaat

SEQ ID NO: 740158 - DNA, 19 bp, Mus musculus
  siRNA target sequence for 1700027D21Rik (NM_029661.1,99-117).
cagagggtagcgaactgat

SEQ ID NO: 740159 - DNA, 19 bp, Mus musculus
  siRNA target sequence for 1700027D21Rik (NM_029661.1,289-307).
gaatggaggtccagatttt

SEQ ID NO: 740160 - DNA, 19 bp, Mus musculus
  siRNA target sequence for 1700027D21Rik (NM_029661.1,429-447).
cctctcagatgcctttcaa

SEQ ID NO: 740161 - DNA, 19 bp, Mus musculus
  siRNA target sequence for 1700027D21Rik (NM_029661.1,523-541).
ggactccctggctgacaaa

SEQ ID NO: 740162 - DNA, 19 bp, Mus musculus
  siRNA target sequence for 1700027D21Rik (NM_029661.1,528-546).
ccctggctgacaaaacact

SEQ ID NO: 740163 - DNA, 19 bp, Mus musculus
  siRNA target sequence for 1700027D21Rik (NM_029661.1,621-639).
gcaggaggacctattacct

SEQ ID NO: 740164 - DNA, 19 bp, Mus musculus
  siRNA target sequence for 1700027D21Rik (NM_029661.1,630-648).
cctattacctcaatgagat

SEQ ID NO: 740165 - DNA, 19 bp, Mus musculus
  siRNA target sequence for 1700027D21Rik (NM_029661.1,716-734).
cgtatcctggcctatgtgt

SEQ ID NO: 740166 - DNA, 19 bp, Mus musculus
  siRNA target sequence for 1700027D21Rik (NM_029661.1,717-735).
gtatcctggcctatgtgtt

SEQ ID NO: 740167 - DNA, 19 bp, Mus musculus
  siRNA target sequence for 1700027D21Rik (NM_029661.1,848-866).
ctgacgcatcgctatctga

SEQ ID NO: 740168 - DNA, 19 bp, Mus musculus
  siRNA target sequence for 1700027D21Rik (NM_029661.1,913-931).
cccggtgttcagtgagttt

SEQ ID NO: 740169 - DNA, 19 bp, Mus musculus
  siRNA target sequence for 1700027D21Rik (NM_029661.1,926-944).
gagtttctcatcaatacct

SEQ ID NO: 740170 - DNA, 19 bp, Mus musculus
  siRNA target sequence for 1700027D21Rik (NM_029661.1,1006-1024).
cctgcgcaaactagtcatt

SEQ ID NO: 740171 - DNA, 19 bp, Mus musculus
  siRNA target sequence for 1700027D21Rik (NM_029661.1,1010-1028).
cgcaaactagtcattgaca

SEQ ID NO: 740172 - DNA, 19 bp, Mus musculus
  siRNA target sequence for 1700027D21Rik (NM_029661.1,1012-1030).
caaactagtcattgacatt

SEQ ID NO: 740173 - DNA, 19 bp, Mus musculus
  siRNA target sequence for 1700027D21Rik (NM_029661.1,1074-1092).
gcctatgtgagctttccaa

SEQ ID NO: 740174 - DNA, 19 bp, Mus musculus
  siRNA target sequence for 1700027D21Rik (NM_029661.1,1090-1108).
caaggaggacagtaaacca

SEQ ID NO: 740175 - DNA, 19 bp, Mus musculus
  siRNA target sequence for 1700027D21Rik (NM_029661.1,1096-1114).
ggacagtaaaccactcttt

SEQ ID NO: 740176 - DNA, 19 bp, Mus musculus
  siRNA target sequence for Immt (NM_029673.1,285-303).
gccatcagagtcaactgtt

SEQ ID NO: 740177 - DNA, 19 bp, Mus musculus
  siRNA target sequence for Immt (NM_029673.1,312-330).
gaatttacccaggctttaa

SEQ ID NO: 740178 - DNA, 19 bp, Mus musculus
  siRNA target sequence for Immt (NM_029673.1,382-400).
ccctaagagcccgtttcta

SEQ ID NO: 740179 - DNA, 19 bp, Mus musculus
  siRNA target sequence for Immt (NM_029673.1,383-401).
cctaagagcccgtttctat

SEQ ID NO: 740180 - DNA, 19 bp, Mus musculus
  siRNA target sequence for Immt (NM_029673.1,393-411).
cgtttctatgctgttcaaa

SEQ ID NO: 740181 - DNA, 19 bp, Mus musculus
  siRNA target sequence for Immt (NM_029673.1,419-437).
ccgaagggtagcgatgatt

SEQ ID NO: 740182 - DNA, 19 bp, Mus musculus
  siRNA target sequence for Immt (NM_029673.1,434-452).
gattgacgaaaccagaaat

SEQ ID NO: 740183 - DNA, 19 bp, Mus musculus
  siRNA target sequence for Immt (NM_029673.1,448-466).
gaaatagcctgtaccaata

SEQ ID NO: 740184 - DNA, 19 bp, Mus musculus
  siRNA target sequence for Immt (NM_029673.1,566-584).
ctcatatgcctcctattgt

SEQ ID NO: 740185 - DNA, 19 bp, Mus musculus
  siRNA target sequence for Immt (NM_029673.1,568-586).
catatgcctcctattgtat

SEQ ID NO: 740186 - DNA, 19 bp, Mus musculus
  siRNA target sequence for Immt (NM_029673.1,675-693).
gcccgaatgaccctagaaa

SEQ ID NO: 740187 - DNA, 19 bp, Mus musculus
  siRNA target sequence for Immt (NM_029673.1,678-696).
cgaatgaccctagaaacta

SEQ ID NO: 740188 - DNA, 19 bp, Mus musculus
  siRNA target sequence for Immt (NM_029673.1,725-743).
cgccagcgccgtaggaata

SEQ ID NO: 740189 - DNA, 19 bp, Mus musculus
  siRNA target sequence for Immt (NM_029673.1,728-746).
cagcgccgtaggaatagga

SEQ ID NO: 740190 - DNA, 19 bp, Mus musculus
  siRNA target sequence for 1700111I05Rik (NM_029681.1,223-241).
gccagcttccggaagtcat

SEQ ID NO: 740191 - DNA, 19 bp, Mus musculus
  siRNA target sequence for 1700111I05Rik (NM_029681.1,227-245).
gcttccggaagtcatcata

SEQ ID NO: 740192 - DNA, 19 bp, Mus musculus
  siRNA target sequence for 1700111I05Rik (NM_029681.1,231-249).
ccggaagtcatcataacct

SEQ ID NO: 740193 - DNA, 19 bp, Mus musculus
  siRNA target sequence for 1700111I05Rik (NM_029681.1,503-521).
gcagaaagcccatcacttt

SEQ ID NO: 740194 - DNA, 19 bp, Mus musculus
  siRNA target sequence for 1700111I05Rik (NM_029681.1,504-522).
cagaaagcccatcacttta

SEQ ID NO: 740195 - DNA, 19 bp, Mus musculus
  siRNA target sequence for 1700111I05Rik (NM_029681.1,506-524).
gaaagcccatcactttagt

SEQ ID NO: 740196 - DNA, 19 bp, Mus musculus
  siRNA target sequence for 1700111I05Rik (NM_029681.1,585-603).
ccttccagtccttaccaat

SEQ ID NO: 740197 - DNA, 19 bp, Mus musculus
  siRNA target sequence for 1700111I05Rik (NM_029681.1,617-635).
cggaccctcctgcagaatt

SEQ ID NO: 740198 - DNA, 19 bp, Mus musculus
  siRNA target sequence for 1700111I05Rik (NM_029681.1,619-637).
gaccctcctgcagaattct

SEQ ID NO: 740199 - DNA, 19 bp, Mus musculus
  siRNA target sequence for 1700095N21Rik (NM_029682.2,187-205).
cctgaccatacagatgttt

SEQ ID NO: 740200 - DNA, 19 bp, Mus musculus
  siRNA target sequence for 1700095N21Rik (NM_029682.2,192-210).
ccatacagatgtttctcta

SEQ ID NO: 740201 - DNA, 19 bp, Mus musculus
  siRNA target sequence for 1700095N21Rik (NM_029682.2,193-211).
catacagatgtttctctaa

SEQ ID NO: 740202 - DNA, 19 bp, Mus musculus
  siRNA target sequence for 1700095N21Rik (NM_029682.2,239-257).
gcaaacttggttgtaatat

SEQ ID NO: 740203 - DNA, 19 bp, Mus musculus
  siRNA target sequence for 1700095N21Rik (NM_029682.2,248-266).
gttgtaatatctccattaa

SEQ ID NO: 740204 - DNA, 19 bp, Mus musculus
  siRNA target sequence for 1700095N21Rik (NM_029682.2,386-404).
cgttatttgtagaaaaact

SEQ ID NO: 740205 - DNA, 19 bp, Mus musculus
  siRNA target sequence for 1700095N21Rik (NM_029682.2,407-425).
ccagccaccgagattacca

SEQ ID NO: 740206 - DNA, 19 bp, Mus musculus
  siRNA target sequence for 1700095N21Rik (NM_029682.2,439-457).
ccagagaagcaggatatta

SEQ ID NO: 740207 - DNA, 19 bp, Mus musculus
  siRNA target sequence for 1700095N21Rik (NM_029682.2,484-502).
ccaaggacagacgaattga

SEQ ID NO: 740208 - DNA, 19 bp, Mus musculus
  siRNA target sequence for 1700095N21Rik (NM_029682.2,485-503).
caaggacagacgaattgaa

SEQ ID NO: 740209 - DNA, 19 bp, Mus musculus
  siRNA target sequence for 1700095N21Rik (NM_029682.2,506-524).
cggacctgctaaggaaata

SEQ ID NO: 740210 - DNA, 19 bp, Mus musculus
  siRNA target sequence for 1700095N21Rik (NM_029682.2,508-526).
gacctgctaaggaaatata

SEQ ID NO: 740211 - DNA, 19 bp, Mus musculus
  siRNA target sequence for 1700095N21Rik (NM_029682.2,511-529).
ctgctaaggaaatataaca

SEQ ID NO: 740212 - DNA, 19 bp, Mus musculus
  siRNA target sequence for 1700095N21Rik (NM_029682.2,528-546).
catagaataccaagagtat

SEQ ID NO: 740213 - DNA, 19 bp, Mus musculus
  siRNA target sequence for 1700095N21Rik (NM_029682.2,571-589).
gccgaaattctcaaaaagt

SEQ ID NO: 740214 - DNA, 19 bp, Mus musculus
  siRNA target sequence for 1700095N21Rik (NM_029682.2,572-590).
ccgaaattctcaaaaagtt

SEQ ID NO: 740215 - DNA, 19 bp, Mus musculus
  siRNA target sequence for 1700095N21Rik (NM_029682.2,766-784).
gcgctgtcctgcttttcca

SEQ ID NO: 740216 - DNA, 19 bp, Mus musculus
  siRNA target sequence for 1700095N21Rik (NM_029682.2,817-835).
gcagatcaccctcataaaa

SEQ ID NO: 740217 - DNA, 19 bp, Mus musculus
  siRNA target sequence for 1700095N21Rik (NM_029682.2,842-860).
gaagcaatttcgctaacta

SEQ ID NO: 740218 - DNA, 19 bp, Mus musculus
  siRNA target sequence for 1700095N21Rik (NM_029682.2,900-918).
cctgagtgctgttcagaat

SEQ ID NO: 740219 - DNA, 19 bp, Mus musculus
  siRNA target sequence for 1700095N21Rik (NM_029682.2,931-949).
gggctgaggtgtgtagttt

SEQ ID NO: 740220 - DNA, 19 bp, Mus musculus
  siRNA target sequence for 1700095N21Rik (NM_029682.2,932-950).
ggctgaggtgtgtagtttt

SEQ ID NO: 740221 - DNA, 19 bp, Mus musculus
  siRNA target sequence for 1700095N21Rik (NM_029682.2,939-957).
gtgtgtagttttatcaaga

SEQ ID NO: 740222 - DNA, 19 bp, Mus musculus
  siRNA target sequence for 1700095N21Rik (NM_029682.2,946-964).
gttttatcaagagatcttt

SEQ ID NO: 740223 - DNA, 19 bp, Mus musculus
  siRNA target sequence for 1700095N21Rik (NM_029682.2,979-997).
ctgctggctgactctaaca

SEQ ID NO: 740224 - DNA, 19 bp, Mus musculus
  siRNA target sequence for 1700095N21Rik (NM_029682.2,981-999).
gctggctgactctaacaca

SEQ ID NO: 740225 - DNA, 19 bp, Mus musculus
  siRNA target sequence for 1700095N21Rik (NM_029682.2,1113-1131).
ggagaacgtcgaagaatta

SEQ ID NO: 740226 - DNA, 19 bp, Mus musculus
  siRNA target sequence for 1700095N21Rik (NM_029682.2,1114-1132).
gagaacgtcgaagaattat

SEQ ID NO: 740227 - DNA, 19 bp, Mus musculus
  siRNA target sequence for 1700095N21Rik (NM_029682.2,1119-1137).
cgtcgaagaattattcaat

SEQ ID NO: 740228 - DNA, 19 bp, Mus musculus
  siRNA target sequence for 1700095N21Rik (NM_029682.2,1122-1140).
cgaagaattattcaatgtt

SEQ ID NO: 740229 - DNA, 19 bp, Mus musculus
  siRNA target sequence for 1700095N21Rik (NM_029682.2,1232-1250).
gctcctaccagcttatgtt

SEQ ID NO: 740230 - DNA, 19 bp, Mus musculus
  siRNA target sequence for 1700095N21Rik (NM_029682.2,1270-1288).
gtgtgttccccaaagcata

SEQ ID NO: 740231 - DNA, 19 bp, Mus musculus
  siRNA target sequence for 1700095N21Rik (NM_029682.2,1274-1292).
gttccccaaagcataaaga

SEQ ID NO: 740232 - DNA, 19 bp, Mus musculus
  siRNA target sequence for 1700095N21Rik (NM_029682.2,1405-1423).
gtgttagtaaaggacataa

SEQ ID NO: 740233 - DNA, 19 bp, Mus musculus
  siRNA target sequence for Pkd1l2 (NM_029686.1,387-405).
cgggagtggtccttcatct

SEQ ID NO: 740234 - DNA, 19 bp, Mus musculus
  siRNA target sequence for Pkd1l2 (NM_029686.1,513-531).
ctcgggagaggtcattcta

SEQ ID NO: 740235 - DNA, 19 bp, Mus musculus
  siRNA target sequence for Pkd1l2 (NM_029686.1,515-533).
cgggagaggtcattctagt

SEQ ID NO: 740236 - DNA, 19 bp, Mus musculus
  siRNA target sequence for Pkd1l2 (NM_029686.1,776-794).
ccaacgggagcttcatctt

SEQ ID NO: 740237 - DNA, 19 bp, Mus musculus
  siRNA target sequence for Pkd1l2 (NM_029686.1,781-799).
gggagcttcatctttgaca

SEQ ID NO: 740238 - DNA, 19 bp, Mus musculus
  siRNA target sequence for Pkd1l2 (NM_029686.1,782-800).
ggagcttcatctttgacaa

SEQ ID NO: 740239 - DNA, 19 bp, Mus musculus
  siRNA target sequence for Pkd1l2 (NM_029686.1,783-801).
gagcttcatctttgacaat

SEQ ID NO: 740240 - DNA, 19 bp, Mus musculus
  siRNA target sequence for Pkd1l2 (NM_029686.1,864-882).
catgggagacggctatact

SEQ ID NO: 740241 - DNA, 19 bp, Mus musculus
  siRNA target sequence for Pkd1l2 (NM_029686.1,867-885).
gggagacggctatactttt

SEQ ID NO: 740242 - DNA, 19 bp, Mus musculus
  siRNA target sequence for Pkd1l2 (NM_029686.1,869-887).
gagacggctatacttttga

SEQ ID NO: 740243 - DNA, 19 bp, Mus musculus
  siRNA target sequence for Pkd1l2 (NM_029686.1,1026-1044).
ggagacgcctcgtatcact

SEQ ID NO: 740244 - DNA, 19 bp, Mus musculus
  siRNA target sequence for Pkd1l2 (NM_029686.1,1199-1217).
ggggctcgcagctttacaa

SEQ ID NO: 740245 - DNA, 19 bp, Mus musculus
  siRNA target sequence for Pkd1l2 (NM_029686.1,1200-1218).
gggctcgcagctttacaat

SEQ ID NO: 740246 - DNA, 19 bp, Mus musculus
  siRNA target sequence for Pkd1l2 (NM_029686.1,1202-1220).
gctcgcagctttacaatct

SEQ ID NO: 740247 - DNA, 19 bp, Mus musculus
  siRNA target sequence for Pkd1l2 (NM_029686.1,1256-1274).
ctgggaggcaccacctaaa

SEQ ID NO: 740248 - DNA, 19 bp, Mus musculus
  siRNA target sequence for Pkd1l2 (NM_029686.1,1259-1277).
ggaggcaccacctaaagat

SEQ ID NO: 740249 - DNA, 19 bp, Mus musculus
  siRNA target sequence for Pkd1l2 (NM_029686.1,1468-1486).
ggactcaacgcgaacttct

SEQ ID NO: 740250 - DNA, 19 bp, Mus musculus
  siRNA target sequence for Pkd1l2 (NM_029686.1,1719-1737).
gtacgtggaccctttcaca

SEQ ID NO: 740251 - DNA, 19 bp, Mus musculus
  siRNA target sequence for Pkd1l2 (NM_029686.1,2085-2103).
cgtgttcagctggtactta

SEQ ID NO: 740252 - DNA, 19 bp, Mus musculus
  siRNA target sequence for Pkd1l2 (NM_029686.1,2232-2250).
gacctggggacctgttatt

SEQ ID NO: 740253 - DNA, 19 bp, Mus musculus
  siRNA target sequence for Pkd1l2 (NM_029686.1,2282-2300).
cctacggggaggataccta

SEQ ID NO: 740254 - DNA, 19 bp, Mus musculus
  siRNA target sequence for Pkd1l2 (NM_029686.1,2288-2306).
gggaggatacctacatgat

SEQ ID NO: 740255 - DNA, 19 bp, Mus musculus
  siRNA target sequence for Pkd1l2 (NM_029686.1,2600-2618).
gttacacgggtgttgaaga

SEQ ID NO: 740256 - DNA, 19 bp, Mus musculus
  siRNA target sequence for Pkd1l2 (NM_029686.1,2819-2837).
ccaccggcctgcagaacat

SEQ ID NO: 740257 - DNA, 19 bp, Mus musculus
  siRNA target sequence for Pkd1l2 (NM_029686.1,3092-3110).
gccaggtggcttacattgt

SEQ ID NO: 740258 - DNA, 19 bp, Mus musculus
  siRNA target sequence for Pkd1l2 (NM_029686.1,3114-3132).
ccagctgcttcgggttata

SEQ ID NO: 740259 - DNA, 19 bp, Mus musculus
  siRNA target sequence for Pkd1l2 (NM_029686.1,3125-3143).
gggttatagaccattttca

SEQ ID NO: 740260 - DNA, 19 bp, Mus musculus
  siRNA target sequence for Pkd1l2 (NM_029686.1,3127-3145).
gttatagaccattttcaga

SEQ ID NO: 740261 - DNA, 19 bp, Mus musculus
  siRNA target sequence for Pkd1l2 (NM_029686.1,3197-3215).
ccccttccatctctgtata

SEQ ID NO: 740262 - DNA, 19 bp, Mus musculus
  siRNA target sequence for Pkd1l2 (NM_029686.1,3340-3358).
gtggacataaggatgatga

SEQ ID NO: 740263 - DNA, 19 bp, Mus musculus
  siRNA target sequence for Pkd1l2 (NM_029686.1,3383-3401).
cccgaagccaatttgatgt

SEQ ID NO: 740264 - DNA, 19 bp, Mus musculus
  siRNA target sequence for Pkd1l2 (NM_029686.1,3495-3513).
ccggatttcagcacacatt

SEQ ID NO: 740265 - DNA, 19 bp, Mus musculus
  siRNA target sequence for Pkd1l2 (NM_029686.1,3608-3626).
ctggagtcccactcatact

SEQ ID NO: 740266 - DNA, 19 bp, Mus musculus
  siRNA target sequence for Pkd1l2 (NM_029686.1,3610-3628).
ggagtcccactcatactca

SEQ ID NO: 740267 - DNA, 19 bp, Mus musculus
  siRNA target sequence for Pkd1l2 (NM_029686.1,3640-3658).
ggctaccatcccaatgaga

SEQ ID NO: 740268 - DNA, 19 bp, Mus musculus
  siRNA target sequence for Pkd1l2 (NM_029686.1,3747-3765).
cggagaaggagtctactat

SEQ ID NO: 740269 - DNA, 19 bp, Mus musculus
  siRNA target sequence for Pkd1l2 (NM_029686.1,3748-3766).
ggagaaggagtctactatt

SEQ ID NO: 740270 - DNA, 19 bp, Mus musculus
  siRNA target sequence for Pkd1l2 (NM_029686.1,3749-3767).
gagaaggagtctactattt

SEQ ID NO: 740271 - DNA, 19 bp, Mus musculus
  siRNA target sequence for Pkd1l2 (NM_029686.1,3751-3769).
gaaggagtctactatttga

SEQ ID NO: 740272 - DNA, 19 bp, Mus musculus
  siRNA target sequence for Pkd1l2 (NM_029686.1,3814-3832).
ctcacagttggcattacca

SEQ ID NO: 740273 - DNA, 19 bp, Mus musculus
  siRNA target sequence for Pkd1l2 (NM_029686.1,4159-4177).
ccctttgcccagtatcact

SEQ ID NO: 740274 - DNA, 19 bp, Mus musculus
  siRNA target sequence for Pkd1l2 (NM_029686.1,4160-4178).
cctttgcccagtatcacta

SEQ ID NO: 740275 - DNA, 19 bp, Mus musculus
  siRNA target sequence for Pkd1l2 (NM_029686.1,4289-4307).
ccgatgctgcggtttttga

SEQ ID NO: 740276 - DNA, 19 bp, Mus musculus
  siRNA target sequence for Pkd1l2 (NM_029686.1,4395-4413).
ggaccggccatcatggtat

SEQ ID NO: 740277 - DNA, 19 bp, Mus musculus
  siRNA target sequence for Pkd1l2 (NM_029686.1,4399-4417).
cggccatcatggtatgtga

SEQ ID NO: 740278 - DNA, 19 bp, Mus musculus
  siRNA target sequence for Pkd1l2 (NM_029686.1,4444-4462).
gtggaccggaagtggtatt

SEQ ID NO: 740279 - DNA, 19 bp, Mus musculus
  siRNA target sequence for Pkd1l2 (NM_029686.1,4556-4574).
gccacctgttcttcactaa

SEQ ID NO: 740280 - DNA, 19 bp, Mus musculus
  siRNA target sequence for Pkd1l2 (NM_029686.1,4557-4575).
ccacctgttcttcactaaa

SEQ ID NO: 740281 - DNA, 19 bp, Mus musculus
  siRNA target sequence for Pkd1l2 (NM_029686.1,4558-4576).
cacctgttcttcactaaaa

SEQ ID NO: 740282 - DNA, 19 bp, Mus musculus
  siRNA target sequence for Pkd1l2 (NM_029686.1,4820-4838).
ccatcaacctcctgattgt

SEQ ID NO: 740283 - DNA, 19 bp, Mus musculus
  siRNA target sequence for Pkd1l2 (NM_029686.1,5154-5172).
cacgcgtgggtctgtgaaa

SEQ ID NO: 740284 - DNA, 19 bp, Mus musculus
  siRNA target sequence for Pkd1l2 (NM_029686.1,5999-6017).
cactcgtgaagaacctata

SEQ ID NO: 740285 - DNA, 19 bp, Mus musculus
  siRNA target sequence for Pkd1l2 (NM_029686.1,6037-6055).
gtcactgacgggaactcta

SEQ ID NO: 740286 - DNA, 19 bp, Mus musculus
  siRNA target sequence for Pkd1l2 (NM_029686.1,6041-6059).
ctgacgggaactctaagtt

SEQ ID NO: 740287 - DNA, 19 bp, Mus musculus
  siRNA target sequence for Pkd1l2 (NM_029686.1,6107-6125).
gcgctgttgcccagcaatt

SEQ ID NO: 740288 - DNA, 19 bp, Mus musculus
  siRNA target sequence for Pkd1l2 (NM_029686.1,6108-6126).
cgctgttgcccagcaatta

SEQ ID NO: 740289 - DNA, 19 bp, Mus musculus
  siRNA target sequence for Pkd1l2 (NM_029686.1,6110-6128).
ctgttgcccagcaattaca

SEQ ID NO: 740290 - DNA, 19 bp, Mus musculus
  siRNA target sequence for Pkd1l2 (NM_029686.1,6155-6173).
catactccctgggtattga

SEQ ID NO: 740291 - DNA, 19 bp, Mus musculus
  siRNA target sequence for Pkd1l2 (NM_029686.1,6345-6363).
ccaaagcgcctcaaggatt

SEQ ID NO: 740292 - DNA, 19 bp, Mus musculus
  siRNA target sequence for Pkd1l2 (NM_029686.1,6364-6382).
ctccagtacctctttgaca

SEQ ID NO: 740293 - DNA, 19 bp, Mus musculus
  siRNA target sequence for Pkd1l2 (NM_029686.1,6428-6446).
ctgtctacaacgctaatgt

SEQ ID NO: 740294 - DNA, 19 bp, Mus musculus
  siRNA target sequence for Pkd1l2 (NM_029686.1,6430-6448).
gtctacaacgctaatgtca

SEQ ID NO: 740295 - DNA, 19 bp, Mus musculus
  siRNA target sequence for Pkd1l2 (NM_029686.1,6432-6450).
ctacaacgctaatgtcaat

SEQ ID NO: 740296 - DNA, 19 bp, Mus musculus
  siRNA target sequence for Pkd1l2 (NM_029686.1,6571-6589).
gcggcagagctcacttact

SEQ ID NO: 740297 - DNA, 19 bp, Mus musculus
  siRNA target sequence for Pkd1l2 (NM_029686.1,6577-6595).
gagctcacttactttctct

SEQ ID NO: 740298 - DNA, 19 bp, Mus musculus
  siRNA target sequence for Pkd1l2 (NM_029686.1,6640-6658).
cagaagtggggttactttt

SEQ ID NO: 740299 - DNA, 19 bp, Mus musculus
  siRNA target sequence for Pkd1l2 (NM_029686.1,6707-6725).
gtgccctcgtggtgtttgt

SEQ ID NO: 740300 - DNA, 19 bp, Mus musculus
  siRNA target sequence for Pkd1l2 (NM_029686.1,6710-6728).
ccctcgtggtgtttgtaaa

SEQ ID NO: 740301 - DNA, 19 bp, Mus musculus
  siRNA target sequence for Pkd1l2 (NM_029686.1,6712-6730).
ctcgtggtgtttgtaaaga

SEQ ID NO: 740302 - DNA, 19 bp, Mus musculus
  siRNA target sequence for Pkd1l2 (NM_029686.1,6772-6790).
cacagggaggggatcagtt

SEQ ID NO: 740303 - DNA, 19 bp, Mus musculus
  siRNA target sequence for Pkd1l2 (NM_029686.1,6809-6827).
ccgatgctgctcttggtta

SEQ ID NO: 740304 - DNA, 19 bp, Mus musculus
  siRNA target sequence for Pkd1l2 (NM_029686.1,6869-6887).
ggcacctgctcagattgaa

SEQ ID NO: 740305 - DNA, 19 bp, Mus musculus
  siRNA target sequence for Pkd1l2 (NM_029686.1,6870-6888).
gcacctgctcagattgaat

SEQ ID NO: 740306 - DNA, 19 bp, Mus musculus
  siRNA target sequence for Pkd1l2 (NM_029686.1,6944-6962).
gctttgtcgccgtcattct

SEQ ID NO: 740307 - DNA, 19 bp, Mus musculus
  siRNA target sequence for Pkd1l2 (NM_029686.1,6945-6963).
ctttgtcgccgtcattctt

SEQ ID NO: 740308 - DNA, 19 bp, Mus musculus
  siRNA target sequence for Pkd1l2 (NM_029686.1,6949-6967).
gtcgccgtcattcttatca

SEQ ID NO: 740309 - DNA, 19 bp, Mus musculus
  siRNA target sequence for Pkd1l2 (NM_029686.1,6978-6996).
gtattcctttgcgtcaaat

SEQ ID NO: 740310 - DNA, 19 bp, Mus musculus
  siRNA target sequence for Pkd1l2 (NM_029686.1,6983-7001).
cctttgcgtcaaatttagt

SEQ ID NO: 740311 - DNA, 19 bp, Mus musculus
  siRNA target sequence for Pkd1l2 (NM_029686.1,6984-7002).
ctttgcgtcaaatttagta

SEQ ID NO: 740312 - DNA, 19 bp, Mus musculus
  siRNA target sequence for Pkd1l2 (NM_029686.1,6990-7008).
gtcaaatttagtatttggt

SEQ ID NO: 740313 - DNA, 19 bp, Mus musculus
  siRNA target sequence for Pkd1l2 (NM_029686.1,7010-7028).
ggaaactccgttcctataa

SEQ ID NO: 740314 - DNA, 19 bp, Mus musculus
  siRNA target sequence for Pkd1l2 (NM_029686.1,7011-7029).
gaaactccgttcctataaa

SEQ ID NO: 740315 - DNA, 19 bp, Mus musculus
  siRNA target sequence for Pkd1l2 (NM_029686.1,7128-7146).
cattgggtcctgcatagtt

SEQ ID NO: 740316 - DNA, 19 bp, Mus musculus
  siRNA target sequence for Pkd1l2 (NM_029686.1,7132-7150).
gggtcctgcatagttttta

SEQ ID NO: 740317 - DNA, 19 bp, Mus musculus
  siRNA target sequence for Pkd1l2 (NM_029686.1,7159-7177).
gtggtactgaatctgttta

SEQ ID NO: 740318 - DNA, 19 bp, Mus musculus
  siRNA target sequence for Pkd1l2 (NM_029686.1,7355-7373).
ctcagccagcacaagcttt

SEQ ID NO: 740319 - DNA, 19 bp, Mus musculus
  siRNA target sequence for 1700127B04Rik (NM_029688.2,130-148).
cggtgcacaacgtaccaat

SEQ ID NO: 740320 - DNA, 19 bp, Mus musculus
  siRNA target sequence for 1700127B04Rik (NM_029688.2,248-266).
cgacgtcctctggatcaaa

SEQ ID NO: 740321 - DNA, 19 bp, Mus musculus
  siRNA target sequence for 1700127B04Rik (NM_029688.2,271-289).
cccagggtggcgactacta

SEQ ID NO: 740322 - DNA, 19 bp, Mus musculus
  siRNA target sequence for 1700127B04Rik (NM_029688.2,273-291).
cagggtggcgactactact

SEQ ID NO: 740323 - DNA, 19 bp, Mus musculus
  siRNA target sequence for 1700127B04Rik (NM_029688.2,275-293).
gggtggcgactactactat

SEQ ID NO: 740324 - DNA, 19 bp, Mus musculus
  siRNA target sequence for 1700127B04Rik (NM_029688.2,276-294).
ggtggcgactactactatt

SEQ ID NO: 740325 - DNA, 19 bp, Mus musculus
  siRNA target sequence for 1700127B04Rik (NM_029688.2,279-297).
ggcgactactactattcct

SEQ ID NO: 740326 - DNA, 19 bp, Mus musculus
  siRNA target sequence for 1700127B04Rik (NM_029688.2,280-298).
gcgactactactattcctt

SEQ ID NO: 740327 - DNA, 19 bp, Mus musculus
  siRNA target sequence for 1700124F02Rik (NM_029692.1,209-227).
catgagacctgacaagaat

SEQ ID NO: 740328 - DNA, 19 bp, Mus musculus
  siRNA target sequence for 1700124F02Rik (NM_029692.1,214-232).
gacctgacaagaatacata

SEQ ID NO: 740329 - DNA, 19 bp, Mus musculus
  siRNA target sequence for 1700124F02Rik (NM_029692.1,238-256).
gaaaacggtctgtgtatgt

SEQ ID NO: 740330 - DNA, 19 bp, Mus musculus
  siRNA target sequence for 1700124F02Rik (NM_029692.1,277-295).
gcatggacgaagacattct

SEQ ID NO: 740331 - DNA, 19 bp, Mus musculus
  siRNA target sequence for 1700124F02Rik (NM_029692.1,305-323).
ggatttaggaaccaaaaca

SEQ ID NO: 740332 - DNA, 19 bp, Mus musculus
  siRNA target sequence for 1700124F02Rik (NM_029692.1,326-344).
caacctaccagcaatgttt

SEQ ID NO: 740333 - DNA, 19 bp, Mus musculus
  siRNA target sequence for 1700124F02Rik (NM_029692.1,337-355).
caatgtttggggatgtaaa

SEQ ID NO: 740334 - DNA, 19 bp, Mus musculus
  siRNA target sequence for 1700124F02Rik (NM_029692.1,341-359).
gtttggggatgtaaagttt

SEQ ID NO: 740335 - DNA, 19 bp, Mus musculus
  siRNA target sequence for 1700124F02Rik (NM_029692.1,369-387).
ggtgggagcccgaacagaa

SEQ ID NO: 740336 - DNA, 19 bp, Mus musculus
  siRNA target sequence for 1700124F02Rik (NM_029692.1,372-390).
gggagcccgaacagaatga

SEQ ID NO: 740337 - DNA, 19 bp, Mus musculus
  siRNA target sequence for 1700124F02Rik (NM_029692.1,579-597).
gcacactgctgtgatgtta

SEQ ID NO: 740338 - DNA, 19 bp, Mus musculus
  siRNA target sequence for 1700124F02Rik (NM_029692.1,636-654).
gcaccaggctccgttgtaa

SEQ ID NO: 740339 - DNA, 19 bp, Mus musculus
  siRNA target sequence for 1700124F02Rik (NM_029692.1,637-655).
caccaggctccgttgtaat

SEQ ID NO: 740340 - DNA, 19 bp, Mus musculus
  siRNA target sequence for 1700124F02Rik (NM_029692.1,639-657).
ccaggctccgttgtaataa

SEQ ID NO: 740341 - DNA, 19 bp, Mus musculus
  siRNA target sequence for 1700124F02Rik (NM_029692.1,644-662).
ctccgttgtaataacagat

SEQ ID NO: 740342 - DNA, 19 bp, Mus musculus
  siRNA target sequence for 1700124F02Rik (NM_029692.1,647-665).
cgttgtaataacagataca

SEQ ID NO: 740343 - DNA, 19 bp, Mus musculus
  siRNA target sequence for 1700124F02Rik (NM_029692.1,727-745).
gaagcactgagcttgacaa

SEQ ID NO: 740344 - DNA, 19 bp, Mus musculus
  siRNA target sequence for 1700124F02Rik (NM_029692.1,730-748).
gcactgagcttgacaaaga

SEQ ID NO: 740345 - DNA, 19 bp, Mus musculus
  siRNA target sequence for 1700124F02Rik (NM_029692.1,753-771).
gctaatgatctgttcaact

SEQ ID NO: 740346 - DNA, 19 bp, Mus musculus
  siRNA target sequence for 1700124F02Rik (NM_029692.1,858-876).
ggggcgttatgctcctttt

SEQ ID NO: 740347 - DNA, 19 bp, Mus musculus
  siRNA target sequence for 1700124F02Rik (NM_029692.1,861-879).
gcgttatgctccttttcga

SEQ ID NO: 740348 - DNA, 19 bp, Mus musculus
  siRNA target sequence for 1700124F02Rik (NM_029692.1,921-939).
ggtgtcaggaacattgaaa

SEQ ID NO: 740349 - DNA, 19 bp, Mus musculus
  siRNA target sequence for 1700124F02Rik (NM_029692.1,1020-1038).
ctcgagagtgaccaaatca

SEQ ID NO: 740350 - DNA, 19 bp, Mus musculus
  siRNA target sequence for 1700124F02Rik (NM_029692.1,1023-1041).
gagagtgaccaaatcaatt

SEQ ID NO: 740351 - DNA, 19 bp, Mus musculus
  siRNA target sequence for 1700124F02Rik (NM_029692.1,1076-1094).
gccacagcttctaatctca

SEQ ID NO: 740352 - DNA, 19 bp, Mus musculus
  siRNA target sequence for 1700124F02Rik (NM_029692.1,1077-1095).
ccacagcttctaatctcaa

SEQ ID NO: 740353 - DNA, 19 bp, Mus musculus
  siRNA target sequence for 1700124F02Rik (NM_029692.1,1119-1137).
ctttgtgaccagatgtcat

SEQ ID NO: 740354 - DNA, 19 bp, Mus musculus
  siRNA target sequence for 1700128F08Rik (NM_029697.1,274-292).
gttctcccgtcccaaaact

SEQ ID NO: 740355 - DNA, 19 bp, Mus musculus
  siRNA target sequence for 1700128F08Rik (NM_029697.1,277-295).
ctcccgtcccaaaacttat

SEQ ID NO: 740356 - DNA, 19 bp, Mus musculus
  siRNA target sequence for 1700128F08Rik (NM_029697.1,280-298).
ccgtcccaaaacttatggt

SEQ ID NO: 740357 - DNA, 19 bp, Mus musculus
  siRNA target sequence for 1700128F08Rik (NM_029697.1,285-303).
ccaaaacttatggtgatat

SEQ ID NO: 740358 - DNA, 19 bp, Mus musculus
  siRNA target sequence for 1700128F08Rik (NM_029697.1,347-365).
cagcccagcaggtataaga

SEQ ID NO: 740359 - DNA, 19 bp, Mus musculus
  siRNA target sequence for Trdn (NM_029726.1,219-237).
caaccacaacggtgataga

SEQ ID NO: 740360 - DNA, 19 bp, Mus musculus
  siRNA target sequence for Trdn (NM_029726.1,222-240).
ccacaacggtgatagacaa

SEQ ID NO: 740361 - DNA, 19 bp, Mus musculus
  siRNA target sequence for Trdn (NM_029726.1,225-243).
caacggtgatagacaacaa

SEQ ID NO: 740362 - DNA, 19 bp, Mus musculus
  siRNA target sequence for Trdn (NM_029726.1,228-246).
cggtgatagacaacaaaaa

SEQ ID NO: 740363 - DNA, 19 bp, Mus musculus
  siRNA target sequence for Trdn (NM_029726.1,290-308).
gtcaccgaagacattgtga

SEQ ID NO: 740364 - DNA, 19 bp, Mus musculus
  siRNA target sequence for Trdn (NM_029726.1,296-314).
gaagacattgtgacaacat

SEQ ID NO: 740365 - DNA, 19 bp, Mus musculus
  siRNA target sequence for Trdn (NM_029726.1,374-392).
gctatcgtgatgtttgatt

SEQ ID NO: 740366 - DNA, 19 bp, Mus musculus
  siRNA target sequence for Trdn (NM_029726.1,438-456).
gctcagatcctctaaaact

SEQ ID NO: 740367 - DNA, 19 bp, Mus musculus
  siRNA target sequence for Trdn (NM_029726.1,735-753).
caactcacaaagagaaact

SEQ ID NO: 740368 - DNA, 19 bp, Mus musculus
  siRNA target sequence for Trdn (NM_029726.1,777-795).
cgaagatgatggcaaaaga

SEQ ID NO: 740369 - DNA, 19 bp, Mus musculus
  siRNA target sequence for Trdn (NM_029726.1,976-994).
gtatgcattctgtcgatat

SEQ ID NO: 740370 - DNA, 19 bp, Mus musculus
  siRNA target sequence for Trdn (NM_029726.1,980-998).
gcattctgtcgatatatga

SEQ ID NO: 740371 - DNA, 19 bp, Mus musculus
  siRNA target sequence for Trdn (NM_029726.1,981-999).
cattctgtcgatatatgat

SEQ ID NO: 740372 - DNA, 19 bp, Mus musculus
  siRNA target sequence for Trdn (NM_029726.1,987-1005).
gtcgatatatgattgacat

SEQ ID NO: 740373 - DNA, 19 bp, Mus musculus
  siRNA target sequence for Trdn (NM_029726.1,990-1008).
gatatatgattgacatgtt

SEQ ID NO: 740374 - DNA, 19 bp, Mus musculus
  siRNA target sequence for Trdn (NM_029726.1,1018-1036).
ggatttaaaaccaggtatt

SEQ ID NO: 740375 - DNA, 19 bp, Mus musculus
  siRNA target sequence for Trdn (NM_029726.1,1031-1049).
ggtattccaaacaattctt

SEQ ID NO: 740376 - DNA, 19 bp, Mus musculus
  siRNA target sequence for 2200001G21Rik (NM_029727.1,507-525).
gcagtactgtccagatgat

SEQ ID NO: 740377 - DNA, 19 bp, Mus musculus
  siRNA target sequence for 2200001G21Rik (NM_029727.1,958-976).
ggaggaggaccagattcta

SEQ ID NO: 740378 - DNA, 19 bp, Mus musculus
  siRNA target sequence for 2200001G21Rik (NM_029727.1,959-977).
gaggaggaccagattctaa

SEQ ID NO: 740379 - DNA, 19 bp, Mus musculus
  siRNA target sequence for 2610111M03Rik (NM_029738.1,133-151).
cgcgacctccgcaatttca

SEQ ID NO: 740380 - DNA, 19 bp, Mus musculus
  siRNA target sequence for 2610111M03Rik (NM_029738.1,143-161).
gcaatttcaccgagatgat

SEQ ID NO: 740381 - DNA, 19 bp, Mus musculus
  siRNA target sequence for 2610111M03Rik (NM_029738.1,172-190).
gggtacccacgccatattt

SEQ ID NO: 740382 - DNA, 19 bp, Mus musculus
  siRNA target sequence for 2610111M03Rik (NM_029738.1,174-192).
gtacccacgccatatttct

SEQ ID NO: 740383 - DNA, 19 bp, Mus musculus
  siRNA target sequence for 2610111M03Rik (NM_029738.1,343-361).
gccacaaaggcacatataa

SEQ ID NO: 740384 - DNA, 19 bp, Mus musculus
  siRNA target sequence for 2610111M03Rik (NM_029738.1,344-362).
ccacaaaggcacatataaa

SEQ ID NO: 740385 - DNA, 19 bp, Mus musculus
  siRNA target sequence for 2610111M03Rik (NM_029738.1,351-369).
ggcacatataaaactcaat

SEQ ID NO: 740386 - DNA, 19 bp, Mus musculus
  siRNA target sequence for 2610111M03Rik (NM_029738.1,352-370).
gcacatataaaactcaata

SEQ ID NO: 740387 - DNA, 19 bp, Mus musculus
  siRNA target sequence for 2610111M03Rik (NM_029738.1,355-373).
catataaaactcaatacca

SEQ ID NO: 740388 - DNA, 19 bp, Mus musculus
  siRNA target sequence for 2610111M03Rik (NM_029738.1,492-510).
cagcaaattcaagtttgat

SEQ ID NO: 740389 - DNA, 19 bp, Mus musculus
  siRNA target sequence for 2610111M03Rik (NM_029738.1,545-563).
gacagcttgcgtctgaaat

SEQ ID NO: 740390 - DNA, 19 bp, Mus musculus
  siRNA target sequence for 2610111M03Rik (NM_029738.1,570-588).
caaaggagcctctctgtat

SEQ ID NO: 740391 - DNA, 19 bp, Mus musculus
  siRNA target sequence for 2610111M03Rik (NM_029738.1,574-592).
ggagcctctctgtatgact

SEQ ID NO: 740392 - DNA, 19 bp, Mus musculus
  siRNA target sequence for 2610111M03Rik (NM_029738.1,575-593).
gagcctctctgtatgactt

SEQ ID NO: 740393 - DNA, 19 bp, Mus musculus
  siRNA target sequence for 2610111M03Rik (NM_029738.1,641-659).
ctagacctctagagatcaa

SEQ ID NO: 740394 - DNA, 19 bp, Mus musculus
  siRNA target sequence for 2610111M03Rik (NM_029738.1,646-664).
cctctagagatcaatgaga

SEQ ID NO: 740395 - DNA, 19 bp, Mus musculus
  siRNA target sequence for 2610111M03Rik (NM_029738.1,678-696).
gaggattgcaatcaaagat

SEQ ID NO: 740396 - DNA, 19 bp, Mus musculus
  siRNA target sequence for 2610111M03Rik (NM_029738.1,680-698).
ggattgcaatcaaagatct

SEQ ID NO: 740397 - DNA, 19 bp, Mus musculus
  siRNA target sequence for 2610111M03Rik (NM_029738.1,681-699).
gattgcaatcaaagatctt

SEQ ID NO: 740398 - DNA, 19 bp, Mus musculus
  siRNA target sequence for 2610111M03Rik (NM_029738.1,704-722).
cccaggttcagaagactaa

SEQ ID NO: 740399 - DNA, 19 bp, Mus musculus
  siRNA target sequence for 2610111M03Rik (NM_029738.1,705-723).
ccaggttcagaagactaaa

SEQ ID NO: 740400 - DNA, 19 bp, Mus musculus
  siRNA target sequence for 2610111M03Rik (NM_029738.1,717-735).
gactaaagacctgcttaat

SEQ ID NO: 740401 - DNA, 19 bp, Mus musculus
  siRNA target sequence for 2610111M03Rik (NM_029738.1,743-761).
cctctgatgaagcaaactt

SEQ ID NO: 740402 - DNA, 19 bp, Mus musculus
  siRNA target sequence for 2610111M03Rik (NM_029738.1,744-762).
ctctgatgaagcaaactta

SEQ ID NO: 740403 - DNA, 19 bp, Mus musculus
  siRNA target sequence for 2610111M03Rik (NM_029738.1,840-858).
ggcctttatggatgaatat

SEQ ID NO: 740404 - DNA, 19 bp, Mus musculus
  siRNA target sequence for 2610111M03Rik (NM_029738.1,885-903).
gcagtatgacgtctatcta

SEQ ID NO: 740405 - DNA, 19 bp, Mus musculus
  siRNA target sequence for 2410137M14Rik (NM_029747.1,355-373).
gaacctctcatcctgaaat

SEQ ID NO: 740406 - DNA, 19 bp, Mus musculus
  siRNA target sequence for 2410137M14Rik (NM_029747.1,363-381).
catcctgaaatggagtaaa

SEQ ID NO: 740407 - DNA, 19 bp, Mus musculus
  siRNA target sequence for 2410137M14Rik (NM_029747.1,470-488).
caaccatacccctggaata

SEQ ID NO: 740408 - DNA, 19 bp, Mus musculus
  siRNA target sequence for 2410137M14Rik (NM_029747.1,495-513).
gaggtctaggactaagagt

SEQ ID NO: 740409 - DNA, 19 bp, Mus musculus
  siRNA target sequence for 2410137M14Rik (NM_029747.1,497-515).
ggtctaggactaagagttt

SEQ ID NO: 740410 - DNA, 19 bp, Mus musculus
  siRNA target sequence for 2410137M14Rik (NM_029747.1,516-534).
cctctggaaccaaatcgtt

SEQ ID NO: 740411 - DNA, 19 bp, Mus musculus
  siRNA target sequence for 2510006D16Rik (NM_029748.1,157-175).
ggctctcttcgggaatact

SEQ ID NO: 740412 - DNA, 19 bp, Mus musculus
  siRNA target sequence for 2510006D16Rik (NM_029748.1,159-177).
ctctcttcgggaatactga

SEQ ID NO: 740413 - DNA, 19 bp, Mus musculus
  siRNA target sequence for 2510006D16Rik (NM_029748.1,207-225).
gtggatcccttctctacta

SEQ ID NO: 740414 - DNA, 19 bp, Mus musculus
  siRNA target sequence for 2510006D16Rik (NM_029748.1,283-301).
catcgtctttacactgatt

SEQ ID NO: 740415 - DNA, 19 bp, Mus musculus
  siRNA target sequence for 2510006D16Rik (NM_029748.1,286-304).
cgtctttacactgattgtt

SEQ ID NO: 740416 - DNA, 19 bp, Mus musculus
  siRNA target sequence for 2510006D16Rik (NM_029748.1,310-328).
ggtccttggagaagatatt

SEQ ID NO: 740417 - DNA, 19 bp, Mus musculus
  siRNA target sequence for D12Ertd553e (NM_029758.3,255-273).
ctgacccgggaaattgaga

SEQ ID NO: 740418 - DNA, 19 bp, Mus musculus
  siRNA target sequence for D12Ertd553e (NM_029758.3,257-275).
gacccgggaaattgagaat

SEQ ID NO: 740419 - DNA, 19 bp, Mus musculus
  siRNA target sequence for D12Ertd553e (NM_029758.3,259-277).
cccgggaaattgagaatta

SEQ ID NO: 740420 - DNA, 19 bp, Mus musculus
  siRNA target sequence for D12Ertd553e (NM_029758.3,260-278).
ccgggaaattgagaattat

SEQ ID NO: 740421 - DNA, 19 bp, Mus musculus
  siRNA target sequence for D12Ertd553e (NM_029758.3,497-515).
gctgaagaggttttacgaa

SEQ ID NO: 740422 - DNA, 19 bp, Mus musculus
  siRNA target sequence for D12Ertd553e (NM_029758.3,521-539).
catccgtcttgaaaaagca

SEQ ID NO: 740423 - DNA, 19 bp, Mus musculus
  siRNA target sequence for D12Ertd553e (NM_029758.3,538-556).
cacttcagagtttattgga

SEQ ID NO: 740424 - DNA, 19 bp, Mus musculus
  siRNA target sequence for D12Ertd553e (NM_029758.3,563-581).
gacgtgtccaccctataca

SEQ ID NO: 740425 - DNA, 19 bp, Mus musculus
  siRNA target sequence for D12Ertd553e (NM_029758.3,611-629).
cctcgcaaaggaatttgca

SEQ ID NO: 740426 - DNA, 19 bp, Mus musculus
  siRNA target sequence for D12Ertd553e (NM_029758.3,673-691).
ggaaccccgctattcagaa

SEQ ID NO: 740427 - DNA, 19 bp, Mus musculus
  siRNA target sequence for D12Ertd553e (NM_029758.3,693-711).
gacttcagttactatcgaa

SEQ ID NO: 740428 - DNA, 19 bp, Mus musculus
  siRNA target sequence for D12Ertd553e (NM_029758.3,698-716).
cagttactatcgaagaaca

SEQ ID NO: 740429 - DNA, 19 bp, Mus musculus
  siRNA target sequence for D12Ertd553e (NM_029758.3,721-739).
gtcgtaaccgtatcaacaa

SEQ ID NO: 740430 - DNA, 19 bp, Mus musculus
  siRNA target sequence for D12Ertd553e (NM_029758.3,723-741).
cgtaaccgtatcaacaaca

SEQ ID NO: 740431 - DNA, 19 bp, Mus musculus
  siRNA target sequence for D12Ertd553e (NM_029758.3,737-755).
caacatgcatctagacatt

SEQ ID NO: 740432 - DNA, 19 bp, Mus musculus
  siRNA target sequence for D12Ertd553e (NM_029758.3,743-761).
gcatctagacattgagaat

SEQ ID NO: 740433 - DNA, 19 bp, Mus musculus
  siRNA target sequence for D12Ertd553e (NM_029758.3,807-825).
gaagccacaccgatgttga

SEQ ID NO: 740434 - DNA, 19 bp, Mus musculus
  siRNA target sequence for D12Ertd553e (NM_029758.3,810-828).
gccacaccgatgttgaaga

SEQ ID NO: 740435 - DNA, 19 bp, Mus musculus
  siRNA target sequence for D12Ertd553e (NM_029758.3,821-839).
gttgaagactcttagcaat

SEQ ID NO: 740436 - DNA, 19 bp, Mus musculus
  siRNA target sequence for D12Ertd553e (NM_029758.3,848-866).
gcactttgtctccgaaaat

SEQ ID NO: 740437 - DNA, 19 bp, Mus musculus
  siRNA target sequence for D12Ertd553e (NM_029758.3,907-925).
cgatgacaagcgtctgtaa

SEQ ID NO: 740438 - DNA, 19 bp, Mus musculus
  siRNA target sequence for D12Ertd553e (NM_029758.3,908-926).
gatgacaagcgtctgtaaa

SEQ ID NO: 740439 - DNA, 19 bp, Mus musculus
  siRNA target sequence for D12Ertd553e (NM_029758.3,913-931).
caagcgtctgtaaagtcat

SEQ ID NO: 740440 - DNA, 19 bp, Mus musculus
  siRNA target sequence for D12Ertd553e (NM_029758.3,947-965).
gtacaggagcaggtttaca

SEQ ID NO: 740441 - DNA, 19 bp, Mus musculus
  siRNA target sequence for D12Ertd553e (NM_029758.3,968-986).
cgaggagacactgatgttt

SEQ ID NO: 740442 - DNA, 19 bp, Mus musculus
  siRNA target sequence for D12Ertd553e (NM_029758.3,1038-1056).
gtgggagctttctgcaaaa

SEQ ID NO: 740443 - DNA, 19 bp, Mus musculus
  siRNA target sequence for D12Ertd553e (NM_029758.3,1051-1069).
gcaaaacatccaagattga

SEQ ID NO: 740444 - DNA, 19 bp, Mus musculus
  siRNA target sequence for 2410166I05Rik (NM_029759.2,220-238).
ctgtccacgggcatccttt

SEQ ID NO: 740445 - DNA, 19 bp, Mus musculus
  siRNA target sequence for 2410166I05Rik (NM_029759.2,224-242).
ccacgggcatcctttgaga

SEQ ID NO: 740446 - DNA, 19 bp, Mus musculus
  siRNA target sequence for 2410166I05Rik (NM_029759.2,239-257).
gagaccctgcccaacatct

SEQ ID NO: 740447 - DNA, 19 bp, Mus musculus
  siRNA target sequence for 2410166I05Rik (NM_029759.2,341-359).
gctcgggtcaggagtgata

SEQ ID NO: 740448 - DNA, 19 bp, Mus musculus
  siRNA target sequence for 2410166I05Rik (NM_029759.2,387-405).
ctagccctctgattgtcat

SEQ ID NO: 740449 - DNA, 19 bp, Mus musculus
  siRNA target sequence for 2410166I05Rik (NM_029759.2,397-415).
gattgtcatgcaacgtaat

SEQ ID NO: 740450 - DNA, 19 bp, Mus musculus
  siRNA target sequence for 2410166I05Rik (NM_029759.2,527-545).
cgcagccagatcgctaaaa

SEQ ID NO: 740451 - DNA, 19 bp, Mus musculus
  siRNA target sequence for 2410166I05Rik (NM_029759.2,531-549).
gccagatcgctaaaatcgt

SEQ ID NO: 740452 - DNA, 19 bp, Mus musculus
  siRNA target sequence for 2410166I05Rik (NM_029759.2,559-577).
cgcagcttcggcttcatta

SEQ ID NO: 740453 - DNA, 19 bp, Mus musculus
  siRNA target sequence for 2410166I05Rik (NM_029759.2,560-578).
gcagcttcggcttcattaa

SEQ ID NO: 740454 - DNA, 19 bp, Mus musculus
  siRNA target sequence for 2410166I05Rik (NM_029759.2,570-588).
cttcattaacaccagattt

SEQ ID NO: 740455 - DNA, 19 bp, Mus musculus
  siRNA target sequence for 2410166I05Rik (NM_029759.2,657-675).
cttcctttgtcattagtga

SEQ ID NO: 740456 - DNA, 19 bp, Mus musculus
  siRNA target sequence for 2410166I05Rik (NM_029759.2,713-731).
ccaaccgtccccctacttt

SEQ ID NO: 740457 - DNA, 19 bp, Mus musculus
  siRNA target sequence for 2410166I05Rik (NM_029759.2,822-840).
gcagctttgcagacatgat

SEQ ID NO: 740458 - DNA, 19 bp, Mus musculus
  siRNA target sequence for 2410166I05Rik (NM_029759.2,884-902).
ctgagccggagtttactga

SEQ ID NO: 740459 - DNA, 19 bp, Mus musculus
  siRNA target sequence for 2810047L02Rik (NM_029766.1,152-170).
gaacgggtggtcttcacat

SEQ ID NO: 740460 - DNA, 19 bp, Mus musculus
  siRNA target sequence for 2810047L02Rik (NM_029766.1,174-192).
cctctacaatcccttctaa

SEQ ID NO: 740461 - DNA, 19 bp, Mus musculus
  siRNA target sequence for 2810047L02Rik (NM_029766.1,184-202).
cccttctaagtggttatca

SEQ ID NO: 740462 - DNA, 19 bp, Mus musculus
  siRNA target sequence for 2810047L02Rik (NM_029766.1,186-204).
cttctaagtggttatcagt

SEQ ID NO: 740463 - DNA, 19 bp, Mus musculus
  siRNA target sequence for 2810047L02Rik (NM_029766.1,195-213).
ggttatcagtgcaactgta

SEQ ID NO: 740464 - DNA, 19 bp, Mus musculus
  siRNA target sequence for 2810047L02Rik (NM_029766.1,196-214).
gttatcagtgcaactgtaa

SEQ ID NO: 740465 - DNA, 19 bp, Mus musculus
  siRNA target sequence for 2810047L02Rik (NM_029766.1,205-223).
gcaactgtaacgatgaaca

SEQ ID NO: 740466 - DNA, 19 bp, Mus musculus
  siRNA target sequence for 2810047L02Rik (NM_029766.1,215-233).
cgatgaacacacgtcttat

SEQ ID NO: 740467 - DNA, 19 bp, Mus musculus
  siRNA target sequence for 2810047L02Rik (NM_029766.1,224-242).
cacgtcttatggagaaaca

SEQ ID NO: 740468 - DNA, 19 bp, Mus musculus
  siRNA target sequence for 2810047L02Rik (NM_029766.1,283-301).
ctcccagtatggagcatat

SEQ ID NO: 740469 - DNA, 19 bp, Mus musculus
  siRNA target sequence for 2810047L02Rik (NM_029766.1,285-303).
cccagtatggagcatatat

SEQ ID NO: 740470 - DNA, 19 bp, Mus musculus
  siRNA target sequence for 2810047L02Rik (NM_029766.1,286-304).
ccagtatggagcatatatt

SEQ ID NO: 740471 - DNA, 19 bp, Mus musculus
  siRNA target sequence for 2810047L02Rik (NM_029766.1,324-342).
ggctttgtcagattatata

SEQ ID NO: 740472 - DNA, 19 bp, Mus musculus
  siRNA target sequence for 2810047L02Rik (NM_029766.1,325-343).
gctttgtcagattatataa

SEQ ID NO: 740473 - DNA, 19 bp, Mus musculus
  siRNA target sequence for 2810047L02Rik (NM_029766.1,422-440).
ggtccctggtgaacttaaa

SEQ ID NO: 740474 - DNA, 19 bp, Mus musculus
  siRNA target sequence for 2810047L02Rik (NM_029766.1,425-443).
ccctggtgaacttaaactt

SEQ ID NO: 740475 - DNA, 19 bp, Mus musculus
  siRNA target sequence for 2810047L02Rik (NM_029766.1,427-445).
ctggtgaacttaaacttgt

SEQ ID NO: 740476 - DNA, 19 bp, Mus musculus
  siRNA target sequence for 2810047L02Rik (NM_029766.1,582-600).
gggagagacggcaacatta

SEQ ID NO: 740477 - DNA, 19 bp, Mus musculus
  siRNA target sequence for 2810047L02Rik (NM_029766.1,583-601).
ggagagacggcaacattat

SEQ ID NO: 740478 - DNA, 19 bp, Mus musculus
  siRNA target sequence for 2810047L02Rik (NM_029766.1,586-604).
gagacggcaacattatgat

SEQ ID NO: 740479 - DNA, 19 bp, Mus musculus
  siRNA target sequence for 2810047L02Rik (NM_029766.1,607-625).
gggacaccaggtgtaacaa

SEQ ID NO: 740480 - DNA, 19 bp, Mus musculus
  siRNA target sequence for 2810047L02Rik (NM_029766.1,609-627).
gacaccaggtgtaacaaaa

SEQ ID NO: 740481 - DNA, 19 bp, Mus musculus
  siRNA target sequence for 2810047L02Rik (NM_029766.1,611-629).
caccaggtgtaacaaaaaa

SEQ ID NO: 740482 - DNA, 19 bp, Mus musculus
  siRNA target sequence for 2810047L02Rik (NM_029766.1,659-677).
cagtggagctcacaatact

SEQ ID NO: 740483 - DNA, 19 bp, Mus musculus
  siRNA target sequence for 2810047L02Rik (NM_029766.1,780-798).
gatgagaatacattagtct

SEQ ID NO: 740484 - DNA, 19 bp, Mus musculus
  siRNA target sequence for 2810047L02Rik (NM_029766.1,808-826).
ccgtggatggaataatcaa

SEQ ID NO: 740485 - DNA, 19 bp, Mus musculus
  siRNA target sequence for 2810047L02Rik (NM_029766.1,809-827).
cgtggatggaataatcaaa

SEQ ID NO: 740486 - DNA, 19 bp, Mus musculus
  siRNA target sequence for 2810047L02Rik (NM_029766.1,812-830).
ggatggaataatcaaagta

SEQ ID NO: 740487 - DNA, 19 bp, Mus musculus
  siRNA target sequence for 2810047L02Rik (NM_029766.1,832-850).
gggatttgcgcaagaatta

SEQ ID NO: 740488 - DNA, 19 bp, Mus musculus
  siRNA target sequence for 2810047L02Rik (NM_029766.1,834-852).
gatttgcgcaagaattaca

SEQ ID NO: 740489 - DNA, 19 bp, Mus musculus
  siRNA target sequence for 2810047L02Rik (NM_029766.1,851-869).
cactgcttatcgacaagaa

SEQ ID NO: 740490 - DNA, 19 bp, Mus musculus
  siRNA target sequence for 2810047L02Rik (NM_029766.1,942-960).
gactctactggctctactt

SEQ ID NO: 740491 - DNA, 19 bp, Mus musculus
  siRNA target sequence for 2810047L02Rik (NM_029766.1,946-964).
ctactggctctactttatt

SEQ ID NO: 740492 - DNA, 19 bp, Mus musculus
  siRNA target sequence for 2810047L02Rik (NM_029766.1,951-969).
ggctctactttatttgcta

SEQ ID NO: 740493 - DNA, 19 bp, Mus musculus
  siRNA target sequence for 2810047L02Rik (NM_029766.1,1021-1039).
ctccggtggctgtcttcaa

SEQ ID NO: 740494 - DNA, 19 bp, Mus musculus
  siRNA target sequence for 2810047L02Rik (NM_029766.1,1046-1064).
ccagaactctaccttttat

SEQ ID NO: 740495 - DNA, 19 bp, Mus musculus
  siRNA target sequence for 2810047L02Rik (NM_029766.1,1049-1067).
gaactctaccttttatgta

SEQ ID NO: 740496 - DNA, 19 bp, Mus musculus
  siRNA target sequence for 2810047L02Rik (NM_029766.1,1086-1104).
gatgaccagtttttaatca

SEQ ID NO: 740497 - DNA, 19 bp, Mus musculus
  siRNA target sequence for 2810047L02Rik (NM_029766.1,1169-1187).
gctcctgggtcattctcaa

SEQ ID NO: 740498 - DNA, 19 bp, Mus musculus
  siRNA target sequence for 2810047L02Rik (NM_029766.1,1259-1277).
gaaaatctggcgcttgaat

SEQ ID NO: 740499 - DNA, 19 bp, Mus musculus
  siRNA target sequence for 2810047L02Rik (NM_029766.1,1297-1315).
caggtgataaacattccat

SEQ ID NO: 740500 - DNA, 19 bp, Mus musculus
  siRNA target sequence for 2810047L02Rik (NM_029766.1,1493-1511).
ccccacattctcagtcaaa

SEQ ID NO: 740501 - DNA, 19 bp, Mus musculus
  siRNA target sequence for 2810047L02Rik (NM_029766.1,1579-1597).
cactctcatctttcaagat

SEQ ID NO: 740502 - DNA, 19 bp, Mus musculus
  siRNA target sequence for 2810047L02Rik (NM_029766.1,1656-1674).
gcttctgagacaaagatct

SEQ ID NO: 740503 - DNA, 19 bp, Mus musculus
  siRNA target sequence for 2810047L02Rik (NM_029766.1,1670-1688).
gatctcatctccaagaaaa

SEQ ID NO: 740504 - DNA, 19 bp, Mus musculus
  siRNA target sequence for 2810047L02Rik (NM_029766.1,1678-1696).
ctccaagaaaagctcttat

SEQ ID NO: 740505 - DNA, 19 bp, Mus musculus
  siRNA target sequence for 2810047L02Rik (NM_029766.1,1735-1753).
ctgaatctagaaatagagt

SEQ ID NO: 740506 - DNA, 19 bp, Mus musculus
  siRNA target sequence for 2810047L02Rik (NM_029766.1,1775-1793).
ctgtctggagagtgtgaaa

SEQ ID NO: 740507 - DNA, 19 bp, Mus musculus
  siRNA target sequence for 2810047L02Rik (NM_029766.1,1782-1800).
gagagtgtgaaacaaaagt

SEQ ID NO: 740508 - DNA, 19 bp, Mus musculus
  siRNA target sequence for 2810047L02Rik (NM_029766.1,1784-1802).
gagtgtgaaacaaaagtgt

SEQ ID NO: 740509 - DNA, 19 bp, Mus musculus
  siRNA target sequence for 2810047L02Rik (NM_029766.1,1844-1862).
ggagagtcttcgtttggat

SEQ ID NO: 740510 - DNA, 19 bp, Mus musculus
  siRNA target sequence for 2810047L02Rik (NM_029766.1,1904-1922).
ctccgagggtcctaccaaa

SEQ ID NO: 740511 - DNA, 19 bp, Mus musculus
  siRNA target sequence for 2810047L02Rik (NM_029766.1,1907-1925).
cgagggtcctaccaaatca

SEQ ID NO: 740512 - DNA, 19 bp, Mus musculus
  siRNA target sequence for 2810047L02Rik (NM_029766.1,2109-2127).
cgcaaggcagaaaattcat

SEQ ID NO: 740513 - DNA, 19 bp, Mus musculus
  siRNA target sequence for 2810047L02Rik (NM_029766.1,2230-2248).
gtacatactttcgtagaaa

SEQ ID NO: 740514 - DNA, 19 bp, Mus musculus
  siRNA target sequence for 2810047L02Rik (NM_029766.1,2274-2292).
gaacactcaactgaattat

SEQ ID NO: 740515 - DNA, 19 bp, Mus musculus
  siRNA target sequence for 2010315L10Rik (NM_029768.2,454-472).
cacatggatgtctttacct

SEQ ID NO: 740516 - DNA, 19 bp, Mus musculus
  siRNA target sequence for 2010315L10Rik (NM_029768.2,460-478).
gatgtctttacctatcact

SEQ ID NO: 740517 - DNA, 19 bp, Mus musculus
  siRNA target sequence for 2010315L10Rik (NM_029768.2,477-495).
ctactggggacctacaaat

SEQ ID NO: 740518 - DNA, 19 bp, Mus musculus
  siRNA target sequence for 4833420K19Rik (NM_029775.1,293-311).
gcctcaaaaagtgtaaaat

SEQ ID NO: 740519 - DNA, 19 bp, Mus musculus
  siRNA target sequence for 4833420K19Rik (NM_029775.1,387-405).
ggcttggttttatgagtat

SEQ ID NO: 740520 - DNA, 19 bp, Mus musculus
  siRNA target sequence for 4833420K19Rik (NM_029775.1,402-420).
gtatgcaggtcctgatgaa

SEQ ID NO: 740521 - DNA, 19 bp, Mus musculus
  siRNA target sequence for 4833420K19Rik (NM_029775.1,437-455).
gaatggaaaaattttgtga

SEQ ID NO: 740522 - DNA, 19 bp, Mus musculus
  siRNA target sequence for 4833420K19Rik (NM_029775.1,472-490).
cctgaaaacattattatgt

SEQ ID NO: 740523 - DNA, 19 bp, Mus musculus
  siRNA target sequence for 4833420K19Rik (NM_029775.1,521-539).
gcatgggattttttaccaa

SEQ ID NO: 740524 - DNA, 19 bp, Mus musculus
  siRNA target sequence for 4833420K19Rik (NM_029775.1,616-634).
cgctctcagctgaatgaca

SEQ ID NO: 740525 - DNA, 19 bp, Mus musculus
  siRNA target sequence for 4833420K19Rik (NM_029775.1,617-635).
gctctcagctgaatgacat

SEQ ID NO: 740526 - DNA, 19 bp, Mus musculus
  siRNA target sequence for 4833420K19Rik (NM_029775.1,622-640).
cagctgaatgacatctcat

SEQ ID NO: 740527 - DNA, 19 bp, Mus musculus
  siRNA target sequence for 4833420K19Rik (NM_029775.1,709-727).
gatactgcgaagtctatgt

SEQ ID NO: 740528 - DNA, 19 bp, Mus musculus
  siRNA target sequence for 4833420K19Rik (NM_029775.1,752-770).
ggccactcttttcagtatt

SEQ ID NO: 740529 - DNA, 19 bp, Mus musculus
  siRNA target sequence for 4833420K19Rik (NM_029775.1,753-771).
gccactcttttcagtattt

SEQ ID NO: 740530 - DNA, 19 bp, Mus musculus
  siRNA target sequence for 4833420K19Rik (NM_029775.1,791-809).
caaagtatcgtgttatgaa

SEQ ID NO: 740531 - DNA, 19 bp, Mus musculus
  siRNA target sequence for 4833420K19Rik (NM_029775.1,821-839).
ggtacaatgtattagaatt

SEQ ID NO: 740532 - DNA, 19 bp, Mus musculus
  siRNA target sequence for 4833420K19Rik (NM_029775.1,850-868).
gttcatgccgatcttagta

SEQ ID NO: 740533 - DNA, 19 bp, Mus musculus
  siRNA target sequence for 4833420K19Rik (NM_029775.1,853-871).
catgccgatcttagtaact

SEQ ID NO: 740534 - DNA, 19 bp, Mus musculus
  siRNA target sequence for 4833420K19Rik (NM_029775.1,921-939).
gcaaaaaatccgtcaaaca

SEQ ID NO: 740535 - DNA, 19 bp, Mus musculus
  siRNA target sequence for 4833420K19Rik (NM_029775.1,922-940).
caaaaaatccgtcaaacat

SEQ ID NO: 740536 - DNA, 19 bp, Mus musculus
  siRNA target sequence for 4930418P06Rik (NM_029777.2,135-153).
ctctctcaagtgttccaaa

SEQ ID NO: 740537 - DNA, 19 bp, Mus musculus
  siRNA target sequence for 4930418P06Rik (NM_029777.2,137-155).
ctctcaagtgttccaaatt

SEQ ID NO: 740538 - DNA, 19 bp, Mus musculus
  siRNA target sequence for 4930418P06Rik (NM_029777.2,244-262).
cctgcatcagcgtggaaaa

SEQ ID NO: 740539 - DNA, 19 bp, Mus musculus
  siRNA target sequence for 4930418P06Rik (NM_029777.2,315-333).
ggagatgactggcatttgt

SEQ ID NO: 740540 - DNA, 19 bp, Mus musculus
  siRNA target sequence for 4930418P06Rik (NM_029777.2,325-343).
ggcatttgtatttcaacat

SEQ ID NO: 740541 - DNA, 19 bp, Mus musculus
  siRNA target sequence for 4930418P06Rik (NM_029777.2,383-401).
gctgggaagccgatggttt

SEQ ID NO: 740542 - DNA, 19 bp, Mus musculus
  siRNA target sequence for 4930418P06Rik (NM_029777.2,433-451).
cgggggtggtgtatttgct

SEQ ID NO: 740543 - DNA, 19 bp, Mus musculus
  siRNA target sequence for 4930418P06Rik (NM_029777.2,479-497).
gaatcagcctgacttcaaa

SEQ ID NO: 740544 - DNA, 19 bp, Mus musculus
  siRNA target sequence for 4930418P06Rik (NM_029777.2,565-583).
ccggaggctttgtcaacat

SEQ ID NO: 740545 - DNA, 19 bp, Mus musculus
  siRNA target sequence for 4930418P06Rik (NM_029777.2,566-584).
cggaggctttgtcaacatt

SEQ ID NO: 740546 - DNA, 19 bp, Mus musculus
  siRNA target sequence for 4930418P06Rik (NM_029777.2,687-705).
ctggttggactgatgtaca

SEQ ID NO: 740547 - DNA, 19 bp, Mus musculus
  siRNA target sequence for 4930418P06Rik (NM_029777.2,706-724).
cgcaggggcctctgaagaa

SEQ ID NO: 740548 - DNA, 19 bp, Mus musculus
  siRNA target sequence for 4930418P06Rik (NM_029777.2,774-792).
ggacagcagaaccacttta

SEQ ID NO: 740549 - DNA, 19 bp, Mus musculus
  siRNA target sequence for 4930418P06Rik (NM_029777.2,775-793).
gacagcagaaccactttaa

SEQ ID NO: 740550 - DNA, 19 bp, Mus musculus
  siRNA target sequence for 4930418P06Rik (NM_029777.2,779-797).
gcagaaccactttaacaat

SEQ ID NO: 740551 - DNA, 19 bp, Mus musculus
  siRNA target sequence for 4930418P06Rik (NM_029777.2,799-817).
caggcccctccggatatca

SEQ ID NO: 740552 - DNA, 19 bp, Mus musculus
  siRNA target sequence for 4930418P06Rik (NM_029777.2,801-819).
ggcccctccggatatcaga

SEQ ID NO: 740553 - DNA, 19 bp, Mus musculus
  siRNA target sequence for 4930418P06Rik (NM_029777.2,802-820).
gcccctccggatatcagaa

SEQ ID NO: 740554 - DNA, 19 bp, Mus musculus
  siRNA target sequence for 4930418P06Rik (NM_029777.2,803-821).
cccctccggatatcagaat

SEQ ID NO: 740555 - DNA, 19 bp, Mus musculus
  siRNA target sequence for 4930418P06Rik (NM_029777.2,808-826).
ccggatatcagaatcacta

SEQ ID NO: 740556 - DNA, 19 bp, Mus musculus
  siRNA target sequence for 4930418P06Rik (NM_029777.2,836-854).
cagaccagtgacctatgat

SEQ ID NO: 740557 - DNA, 19 bp, Mus musculus
  siRNA target sequence for 4930418P06Rik (NM_029777.2,906-924).
cagctggaacgagcattaa

SEQ ID NO: 740558 - DNA, 19 bp, Mus musculus
  siRNA target sequence for 4930418P06Rik (NM_029777.2,908-926).
gctggaacgagcattaaga

SEQ ID NO: 740559 - DNA, 19 bp, Mus musculus
  siRNA target sequence for 4930418P06Rik (NM_029777.2,932-950).
catctgggaccgaggaaat

SEQ ID NO: 740560 - DNA, 19 bp, Mus musculus
  siRNA target sequence for 4930418P06Rik (NM_029777.2,941-959).
ccgaggaaataccagaaat

SEQ ID NO: 740561 - DNA, 19 bp, Mus musculus
  siRNA target sequence for 4930418P06Rik (NM_029777.2,981-999).
cggctcccaccagaagaaa

SEQ ID NO: 740562 - DNA, 19 bp, Mus musculus
  siRNA target sequence for 4930418P06Rik (NM_029777.2,1010-1028).
gcgtcttcacagatttgat

SEQ ID NO: 740563 - DNA, 19 bp, Mus musculus
  siRNA target sequence for 0610013E23Rik (NM_029788.2,261-279).
cccgtgtggtcattcaaga

SEQ ID NO: 740564 - DNA, 19 bp, Mus musculus
  siRNA target sequence for 0610013E23Rik (NM_029788.2,262-280).
ccgtgtggtcattcaagat

SEQ ID NO: 740565 - DNA, 19 bp, Mus musculus
  siRNA target sequence for 0610013E23Rik (NM_029788.2,327-345).
ctccggaccaaaagaatat

SEQ ID NO: 740566 - DNA, 19 bp, Mus musculus
  siRNA target sequence for 0610013E23Rik (NM_029788.2,330-348).
cggaccaaaagaatattct

SEQ ID NO: 740567 - DNA, 19 bp, Mus musculus
  siRNA target sequence for 0610013E23Rik (NM_029788.2,412-430).
ggtcgtttccggagttact

SEQ ID NO: 740568 - DNA, 19 bp, Mus musculus
  siRNA target sequence for 0610013E23Rik (NM_029788.2,448-466).
ccacctgatgactttgcta

SEQ ID NO: 740569 - DNA, 19 bp, Mus musculus
  siRNA target sequence for 0610013E23Rik (NM_029788.2,500-518).
cagaattccgctatctctt

SEQ ID NO: 740570 - DNA, 19 bp, Mus musculus
  siRNA target sequence for 0610013E23Rik (NM_029788.2,516-534).
cttcaagtggttgcaaaaa

SEQ ID NO: 740571 - DNA, 19 bp, Mus musculus
  siRNA target sequence for 0610013E23Rik (NM_029788.2,577-595).
cagcatataacaggaattt

SEQ ID NO: 740572 - DNA, 19 bp, Mus musculus
  siRNA target sequence for 0610013E23Rik (NM_029788.2,579-597).
gcatataacaggaatttct

SEQ ID NO: 740573 - DNA, 19 bp, Mus musculus
  siRNA target sequence for 0610013E23Rik (NM_029788.2,601-619).
ggaattgggctgctaacaa

SEQ ID NO: 740574 - DNA, 19 bp, Mus musculus
  siRNA target sequence for 0610013E23Rik (NM_029788.2,610-628).
ctgctaacaacttttatgt

SEQ ID NO: 740575 - DNA, 19 bp, Mus musculus
  siRNA target sequence for 0610013E23Rik (NM_029788.2,612-630).
gctaacaacttttatgtat

SEQ ID NO: 740576 - DNA, 19 bp, Mus musculus
  siRNA target sequence for 0610013E23Rik (NM_029788.2,661-679).
ctaagagaacggtcatcaa

SEQ ID NO: 740577 - DNA, 19 bp, Mus musculus
  siRNA target sequence for 0610013E23Rik (NM_029788.2,681-699).
gctccgctgtgcttggtta

SEQ ID NO: 740578 - DNA, 19 bp, Mus musculus
  siRNA target sequence for 0610013E23Rik (NM_029788.2,715-733).
ggttcctccgtcctcttat

SEQ ID NO: 740579 - DNA, 19 bp, Mus musculus
  siRNA target sequence for 0610013E23Rik (NM_029788.2,716-734).
gttcctccgtcctcttata

SEQ ID NO: 740580 - DNA, 19 bp, Mus musculus
  siRNA target sequence for 0610013E23Rik (NM_029788.2,719-737).
cctccgtcctcttatatta

SEQ ID NO: 740581 - DNA, 19 bp, Mus musculus
  siRNA target sequence for 0610013E23Rik (NM_029788.2,723-741).
cgtcctcttatattacact

SEQ ID NO: 740582 - DNA, 19 bp, Mus musculus
  siRNA target sequence for 0610013E23Rik (NM_029788.2,755-773).
cacttcattacagcttaat

SEQ ID NO: 740583 - DNA, 19 bp, Mus musculus
  siRNA target sequence for 0610013E23Rik (NM_029788.2,896-914).
ctttcatcatgccttttaa

SEQ ID NO: 740584 - DNA, 19 bp, Mus musculus
  siRNA target sequence for 0610013E23Rik (NM_029788.2,900-918).
catcatgccttttaaatca

SEQ ID NO: 740585 - DNA, 19 bp, Mus musculus
  siRNA target sequence for 0610013E23Rik (NM_029788.2,953-971).
gtcagtattaccgaatttt

SEQ ID NO: 740586 - DNA, 19 bp, Mus musculus
  siRNA target sequence for 0610013E23Rik (NM_029788.2,963-981).
ccgaatttttgttcctata

SEQ ID NO: 740587 - DNA, 19 bp, Mus musculus
  siRNA target sequence for 0610013E23Rik (NM_029788.2,985-1003).
gtttggtttcggtacctta

SEQ ID NO: 740588 - DNA, 19 bp, Mus musculus
  siRNA target sequence for 0610013E23Rik (NM_029788.2,1007-1025).
gctacggggagtttggtaa

SEQ ID NO: 740589 - DNA, 19 bp, Mus musculus
  siRNA target sequence for 0610013E23Rik (NM_029788.2,1008-1026).
ctacggggagtttggtaat

SEQ ID NO: 740590 - DNA, 19 bp, Mus musculus
  siRNA target sequence for 0610013E23Rik (NM_029788.2,1011-1029).
cggggagtttggtaatgta

SEQ ID NO: 740591 - DNA, 19 bp, Mus musculus
  siRNA target sequence for 0610013E23Rik (NM_029788.2,1012-1030).
ggggagtttggtaatgtaa

SEQ ID NO: 740592 - DNA, 19 bp, Mus musculus
  siRNA target sequence for 0610013E23Rik (NM_029788.2,1014-1032).
ggagtttggtaatgtaact

SEQ ID NO: 740593 - DNA, 19 bp, Mus musculus
  siRNA target sequence for 0610013E23Rik (NM_029788.2,1017-1035).
gtttggtaatgtaactaca

SEQ ID NO: 740594 - DNA, 19 bp, Mus musculus
  siRNA target sequence for 0610013E23Rik (NM_029788.2,1037-1055).
ggagtcttgggatattgct

SEQ ID NO: 740595 - DNA, 19 bp, Mus musculus
  siRNA target sequence for 0610013E23Rik (NM_029788.2,1075-1093).
ctaaaacttttggactttt

SEQ ID NO: 740596 - DNA, 19 bp, Mus musculus
  siRNA target sequence for 0610013E23Rik (NM_029788.2,1115-1133).
gacaggtcttacgagtatt

SEQ ID NO: 740597 - DNA, 19 bp, Mus musculus
  siRNA target sequence for 0610013E23Rik (NM_029788.2,1119-1137).
ggtcttacgagtatttttt

SEQ ID NO: 740598 - DNA, 19 bp, Mus musculus
  siRNA target sequence for 0610013E23Rik (NM_029788.2,1178-1196).
gttcagatatggatggtat

SEQ ID NO: 740599 - DNA, 19 bp, Mus musculus
  siRNA target sequence for 0610013E23Rik (NM_029788.2,1189-1207).
gatggtatttgtacaatat

SEQ ID NO: 740600 - DNA, 19 bp, Mus musculus
  siRNA target sequence for 0610013E23Rik (NM_029788.2,1261-1279).
gaagaatgtatcaccttat

SEQ ID NO: 740601 - DNA, 19 bp, Mus musculus
  siRNA target sequence for 0610013E23Rik (NM_029788.2,1268-1286).
gtatcaccttatggtttaa

SEQ ID NO: 740602 - DNA, 19 bp, Mus musculus
  siRNA target sequence for 1300008B03Rik (NM_029796.2,148-166).
gtgtccagcctcaaggaat

SEQ ID NO: 740603 - DNA, 19 bp, Mus musculus
  siRNA target sequence for 1300008B03Rik (NM_029796.2,755-773).
gcgtcctgttcctgaatga

SEQ ID NO: 740604 - DNA, 19 bp, Mus musculus
  siRNA target sequence for 1300008B03Rik (NM_029796.2,812-830).
gcctacagcacctggatat

SEQ ID NO: 740605 - DNA, 19 bp, Mus musculus
  siRNA target sequence for 1300008B03Rik (NM_029796.2,814-832).
ctacagcacctggatatgt

SEQ ID NO: 740606 - DNA, 19 bp, Mus musculus
  siRNA target sequence for 2610034E18Rik (NM_029797.1,223-241).
ggatcgggacgtccaatta

SEQ ID NO: 740607 - DNA, 19 bp, Mus musculus
  siRNA target sequence for 2610034E18Rik (NM_029797.1,227-245).
cgggacgtccaattactat

SEQ ID NO: 740608 - DNA, 19 bp, Mus musculus
  siRNA target sequence for 2610034E18Rik (NM_029797.1,228-246).
gggacgtccaattactatt

SEQ ID NO: 740609 - DNA, 19 bp, Mus musculus
  siRNA target sequence for 2610034E18Rik (NM_029797.1,350-368).
cattgagaaagcaagagtt

SEQ ID NO: 740610 - DNA, 19 bp, Mus musculus
  siRNA target sequence for 2610034E18Rik (NM_029797.1,455-473).
ggaaaaatatcgagaatgt

SEQ ID NO: 740611 - DNA, 19 bp, Mus musculus
  siRNA target sequence for 2610034E18Rik (NM_029797.1,478-496).
cacaggttgtggaagagat

SEQ ID NO: 740612 - DNA, 19 bp, Mus musculus
  siRNA target sequence for 2610034E18Rik (NM_029797.1,492-510).
gagatacgtgaagcaaata

SEQ ID NO: 740613 - DNA, 19 bp, Mus musculus
  siRNA target sequence for 2610034E18Rik (NM_029797.1,535-553).
gatggactgataacatatt

SEQ ID NO: 740614 - DNA, 19 bp, Mus musculus
  siRNA target sequence for 2610034E18Rik (NM_029797.1,539-557).
gactgataacatatttgca

SEQ ID NO: 740615 - DNA, 19 bp, Mus musculus
  siRNA target sequence for 2610034E18Rik (NM_029797.1,543-561).
gataacatatttgcaataa

SEQ ID NO: 740616 - DNA, 19 bp, Mus musculus
  siRNA target sequence for 2810417J12Rik (NM_029798.1,535-553).
gggtcaggggtgtcttctt

SEQ ID NO: 740617 - DNA, 19 bp, Mus musculus
  siRNA target sequence for 2810417J12Rik (NM_029798.1,541-559).
ggggtgtcttcttcaagtt

SEQ ID NO: 740618 - DNA, 19 bp, Mus musculus
  siRNA target sequence for Arfip2 (NM_029802.2,317-335).
caggacccaacctcaatga

SEQ ID NO: 740619 - DNA, 19 bp, Mus musculus
  siRNA target sequence for Arfip2 (NM_029802.2,454-472).
ggcatcgctggagaaaagt

SEQ ID NO: 740620 - DNA, 19 bp, Mus musculus
  siRNA target sequence for Arfip2 (NM_029802.2,455-473).
gcatcgctggagaaaagtt

SEQ ID NO: 740621 - DNA, 19 bp, Mus musculus
  siRNA target sequence for Arfip2 (NM_029802.2,491-509).
ggggcatcaacacatataa

SEQ ID NO: 740622 - DNA, 19 bp, Mus musculus
  siRNA target sequence for Arfip2 (NM_029802.2,493-511).
ggcatcaacacatataagt

SEQ ID NO: 740623 - DNA, 19 bp, Mus musculus
  siRNA target sequence for Arfip2 (NM_029802.2,603-621).
gaagcgcaagtatgaaagt

SEQ ID NO: 740624 - DNA, 19 bp, Mus musculus
  siRNA target sequence for Arfip2 (NM_029802.2,857-875).
cactcatgactgtcaaaca

SEQ ID NO: 740625 - DNA, 19 bp, Mus musculus
  siRNA target sequence for Arfip2 (NM_029802.2,859-877).
ctcatgactgtcaaacagt

SEQ ID NO: 740626 - DNA, 19 bp, Mus musculus
  siRNA target sequence for Arfip2 (NM_029802.2,884-902).
ctgccaggctggaatatga

SEQ ID NO: 740627 - DNA, 19 bp, Mus musculus
  siRNA target sequence for Arfip2 (NM_029802.2,905-923).
cctaccggacagacttaga

SEQ ID NO: 740628 - DNA, 19 bp, Mus musculus
  siRNA target sequence for Arfip2 (NM_029802.2,991-1009).
cagacccatcgggacaaat

SEQ ID NO: 740629 - DNA, 19 bp, Mus musculus
  siRNA target sequence for Arfip2 (NM_029802.2,993-1011).
gacccatcgggacaaatat

SEQ ID NO: 740630 - DNA, 19 bp, Mus musculus
  siRNA target sequence for Arfip2 (NM_029802.2,995-1013).
cccatcgggacaaatatga

SEQ ID NO: 740631 - DNA, 19 bp, Mus musculus
  siRNA target sequence for Arfip2 (NM_029802.2,997-1015).
catcgggacaaatatgaga

SEQ ID NO: 740632 - DNA, 19 bp, Mus musculus
  siRNA target sequence for Nt5c2 (NM_029810.2,100-118).
gtgcctgctaacatggata

SEQ ID NO: 740633 - DNA, 19 bp, Mus musculus
  siRNA target sequence for Nt5c2 (NM_029810.2,115-133).
gataagcatgccttgaaaa

SEQ ID NO: 740634 - DNA, 19 bp, Mus musculus
  siRNA target sequence for Nt5c2 (NM_029810.2,149-167).
cctatcaccgggtgtttgt

SEQ ID NO: 740635 - DNA, 19 bp, Mus musculus
  siRNA target sequence for Nt5c2 (NM_029810.2,162-180).
gtttgtgaaccgaagttta

SEQ ID NO: 740636 - DNA, 19 bp, Mus musculus
  siRNA target sequence for Nt5c2 (NM_029810.2,172-190).
cgaagtttagccatggaaa

SEQ ID NO: 740637 - DNA, 19 bp, Mus musculus
  siRNA target sequence for Nt5c2 (NM_029810.2,234-252).
gtacaagtctccagaatat

SEQ ID NO: 740638 - DNA, 19 bp, Mus musculus
  siRNA target sequence for Nt5c2 (NM_029810.2,270-288).
gcttactgtggagagatta

SEQ ID NO: 740639 - DNA, 19 bp, Mus musculus
  siRNA target sequence for Nt5c2 (NM_029810.2,321-339).
ctttgcatatgattctaca

SEQ ID NO: 740640 - DNA, 19 bp, Mus musculus
  siRNA target sequence for Nt5c2 (NM_029810.2,366-384).
cacgctctatggaaatctt

SEQ ID NO: 740641 - DNA, 19 bp, Mus musculus
  siRNA target sequence for Nt5c2 (NM_029810.2,424-442).
catggatttaacttcataa

SEQ ID NO: 740642 - DNA, 19 bp, Mus musculus
  siRNA target sequence for Nt5c2 (NM_029810.2,462-480).
gcagtatccaaataaattt

SEQ ID NO: 740643 - DNA, 19 bp, Mus musculus
  siRNA target sequence for Nt5c2 (NM_029810.2,463-481).
cagtatccaaataaattta

SEQ ID NO: 740644 - DNA, 19 bp, Mus musculus
  siRNA target sequence for Nt5c2 (NM_029810.2,493-511).
gacactgaacggttttaca

SEQ ID NO: 740645 - DNA, 19 bp, Mus musculus
  siRNA target sequence for Nt5c2 (NM_029810.2,495-513).
cactgaacggttttacatt

SEQ ID NO: 740646 - DNA, 19 bp, Mus musculus
  siRNA target sequence for Nt5c2 (NM_029810.2,497-515).
ctgaacggttttacattct

SEQ ID NO: 740647 - DNA, 19 bp, Mus musculus
  siRNA target sequence for Nt5c2 (NM_029810.2,499-517).
gaacggttttacattctga

SEQ ID NO: 740648 - DNA, 19 bp, Mus musculus
  siRNA target sequence for Nt5c2 (NM_029810.2,552-570).
ggcctgcctcgtagatttt

SEQ ID NO: 740649 - DNA, 19 bp, Mus musculus
  siRNA target sequence for Nt5c2 (NM_029810.2,553-571).
gcctgcctcgtagattttt

SEQ ID NO: 740650 - DNA, 19 bp, Mus musculus
  siRNA target sequence for Nt5c2 (NM_029810.2,559-577).
ctcgtagatttttttacta

SEQ ID NO: 740651 - DNA, 19 bp, Mus musculus
  siRNA target sequence for Nt5c2 (NM_029810.2,594-612).
cagttgtgacacaggattt

SEQ ID NO: 740652 - DNA, 19 bp, Mus musculus
  siRNA target sequence for Nt5c2 (NM_029810.2,596-614).
gttgtgacacaggatttaa

SEQ ID NO: 740653 - DNA, 19 bp, Mus musculus
  siRNA target sequence for Nt5c2 (NM_029810.2,710-728).
cggttgaaaatcttgagaa

SEQ ID NO: 740654 - DNA, 19 bp, Mus musculus
  siRNA target sequence for Nt5c2 (NM_029810.2,790-808).
gtgtttctggctactaaca

SEQ ID NO: 740655 - DNA, 19 bp, Mus musculus
  siRNA target sequence for Nt5c2 (NM_029810.2,798-816).
ggctactaacagtgactat

SEQ ID NO: 740656 - DNA, 19 bp, Mus musculus
  siRNA target sequence for Nt5c2 (NM_029810.2,811-829).
gactataagtacacagata

SEQ ID NO: 740657 - DNA, 19 bp, Mus musculus
  siRNA target sequence for Nt5c2 (NM_029810.2,925-943).
gctcggaaaccactctttt

SEQ ID NO: 740658 - DNA, 19 bp, Mus musculus
  siRNA target sequence for Nt5c2 (NM_029810.2,930-948).
gaaaccactcttttttgga

SEQ ID NO: 740659 - DNA, 19 bp, Mus musculus
  siRNA target sequence for Nt5c2 (NM_029810.2,963-981).
gcgtcaggtggacactaaa

SEQ ID NO: 740660 - DNA, 19 bp, Mus musculus
  siRNA target sequence for Nt5c2 (NM_029810.2,964-982).
cgtcaggtggacactaaaa

SEQ ID NO: 740661 - DNA, 19 bp, Mus musculus
  siRNA target sequence for Nt5c2 (NM_029810.2,1038-1056).
ctcagggggttcatctgat

SEQ ID NO: 740662 - DNA, 19 bp, Mus musculus
  siRNA target sequence for Nt5c2 (NM_029810.2,1045-1063).
ggttcatctgatacaatct

SEQ ID NO: 740663 - DNA, 19 bp, Mus musculus
  siRNA target sequence for Nt5c2 (NM_029810.2,1076-1094).
gagctaagggcaaagacat

SEQ ID NO: 740664 - DNA, 19 bp, Mus musculus
  siRNA target sequence for Nt5c2 (NM_029810.2,1123-1141).
gacattctgaagtcaaaga

SEQ ID NO: 740665 - DNA, 19 bp, Mus musculus
  siRNA target sequence for Nt5c2 (NM_029810.2,1147-1165).
caagggtggaggactttct

SEQ ID NO: 740666 - DNA, 19 bp, Mus musculus
  siRNA target sequence for Nt5c2 (NM_029810.2,1198-1216).
gtctggacggacaagagtt

SEQ ID NO: 740667 - DNA, 19 bp, Mus musculus
  siRNA target sequence for Nt5c2 (NM_029810.2,1228-1246).
gaacttcaaagcttggata

SEQ ID NO: 740668 - DNA, 19 bp, Mus musculus
  siRNA target sequence for Nt5c2 (NM_029810.2,1317-1335).
gagacggattaagaaagta

SEQ ID NO: 740669 - DNA, 19 bp, Mus musculus
  siRNA target sequence for Nt5c2 (NM_029810.2,1422-1440).
gcgctatgcagatctctat

SEQ ID NO: 740670 - DNA, 19 bp, Mus musculus
  siRNA target sequence for Nt5c2 (NM_029810.2,1531-1549).
cacacgcatgtggatatca

SEQ ID NO: 740671 - DNA, 19 bp, Mus musculus
  siRNA target sequence for Nt5c2 (NM_029810.2,1533-1551).
cacgcatgtggatatcaat

SEQ ID NO: 740672 - DNA, 19 bp, Mus musculus
  siRNA target sequence for Nt5c2 (NM_029810.2,1535-1553).
cgcatgtggatatcaatga

SEQ ID NO: 740673 - DNA, 19 bp, Mus musculus
  siRNA target sequence for Nt5c2 (NM_029810.2,1537-1555).
catgtggatatcaatgaga

SEQ ID NO: 740674 - DNA, 19 bp, Mus musculus
  siRNA target sequence for Nt5c2 (NM_029810.2,1582-1600).
cgcacgtcagtggatttca

SEQ ID NO: 740675 - DNA, 19 bp, Mus musculus
  siRNA target sequence for Nt5c2 (NM_029810.2,1584-1602).
cacgtcagtggatttcaaa

SEQ ID NO: 740676 - DNA, 19 bp, Mus musculus
  siRNA target sequence for Nt5c2 (NM_029810.2,1586-1604).
cgtcagtggatttcaaaga

SEQ ID NO: 740677 - DNA, 19 bp, Mus musculus
  siRNA target sequence for Nt5c2 (NM_029810.2,1624-1642).
cagcttacaaggtccatta

SEQ ID NO: 740678 - DNA, 19 bp, Mus musculus
  siRNA target sequence for St5 (NM_029811.1,270-288).
ccatcgtttgccacgatta

SEQ ID NO: 740679 - DNA, 19 bp, Mus musculus
  siRNA target sequence for St5 (NM_029811.1,422-440).
ccaagcttgtccaaagaat

SEQ ID NO: 740680 - DNA, 19 bp, Mus musculus
  siRNA target sequence for St5 (NM_029811.1,430-448).
gtccaaagaattaactcta

SEQ ID NO: 740681 - DNA, 19 bp, Mus musculus
  siRNA target sequence for St5 (NM_029811.1,476-494).
ggttgaaaaagctgtctat

SEQ ID NO: 740682 - DNA, 19 bp, Mus musculus
  siRNA target sequence for St5 (NM_029811.1,500-518).
gccttgagacagcatcatt

SEQ ID NO: 740683 - DNA, 19 bp, Mus musculus
  siRNA target sequence for St5 (NM_029811.1,502-520).
cttgagacagcatcattga

SEQ ID NO: 740684 - DNA, 19 bp, Mus musculus
  siRNA target sequence for St5 (NM_029811.1,658-676).
gagcgggagctttttgagt

SEQ ID NO: 740685 - DNA, 19 bp, Mus musculus
  siRNA target sequence for St5 (NM_029811.1,839-857).
ggctccctgtgtcagaata

SEQ ID NO: 740686 - DNA, 19 bp, Mus musculus
  siRNA target sequence for St5 (NM_029811.1,1057-1075).
gtctaccccttcatgagaa

SEQ ID NO: 740687 - DNA, 19 bp, Mus musculus
  siRNA target sequence for St5 (NM_029811.1,1142-1160).
ctggcaatgaggtgttaga

SEQ ID NO: 740688 - DNA, 19 bp, Mus musculus
  siRNA target sequence for St5 (NM_029811.1,1263-1281).
gttggaacgcagagtcatt

SEQ ID NO: 740689 - DNA, 19 bp, Mus musculus
  siRNA target sequence for St5 (NM_029811.1,1353-1371).
ctggcagcacacattcatt

SEQ ID NO: 740690 - DNA, 19 bp, Mus musculus
  siRNA target sequence for St5 (NM_029811.1,1385-1403).
cctccatgattgacattgt

SEQ ID NO: 740691 - DNA, 19 bp, Mus musculus
  siRNA target sequence for St5 (NM_029811.1,1527-1545).
cgacgaggacacactgtta

SEQ ID NO: 740692 - DNA, 19 bp, Mus musculus
  siRNA target sequence for St5 (NM_029811.1,1665-1683).
ggtgtttatccggttcttt

SEQ ID NO: 740693 - DNA, 19 bp, Mus musculus
  siRNA target sequence for St5 (NM_029811.1,1767-1785).
gtctgtggcctccaaaagt

SEQ ID NO: 740694 - DNA, 19 bp, Mus musculus
  siRNA target sequence for St5 (NM_029811.1,1784-1802).
gtatccgccgttttcttga

SEQ ID NO: 740695 - DNA, 19 bp, Mus musculus
  siRNA target sequence for St5 (NM_029811.1,1788-1806).
ccgccgttttcttgaagtt

SEQ ID NO: 740696 - DNA, 19 bp, Mus musculus
  siRNA target sequence for St5 (NM_029811.1,1789-1807).
cgccgttttcttgaagttt

SEQ ID NO: 740697 - DNA, 19 bp, Mus musculus
  siRNA target sequence for St5 (NM_029811.1,1790-1808).
gccgttttcttgaagtttt

SEQ ID NO: 740698 - DNA, 19 bp, Mus musculus
  siRNA target sequence for St5 (NM_029811.1,1791-1809).
ccgttttcttgaagttttt

SEQ ID NO: 740699 - DNA, 19 bp, Mus musculus
  siRNA target sequence for St5 (NM_029811.1,1889-1907).
gagtggaacagtatctaga

SEQ ID NO: 740700 - DNA, 19 bp, Mus musculus
  siRNA target sequence for Bcas1 (NM_029815.1,161-179).
gtgacgtcagacaatgagt

SEQ ID NO: 740701 - DNA, 19 bp, Mus musculus
  siRNA target sequence for Bcas1 (NM_029815.1,205-223).
gctgtccactcgtgtaatt

SEQ ID NO: 740702 - DNA, 19 bp, Mus musculus
  siRNA target sequence for Bcas1 (NM_029815.1,208-226).
gtccactcgtgtaattcaa

SEQ ID NO: 740703 - DNA, 19 bp, Mus musculus
  siRNA target sequence for Bcas1 (NM_029815.1,210-228).
ccactcgtgtaattcaaca

SEQ ID NO: 740704 - DNA, 19 bp, Mus musculus
  siRNA target sequence for Bcas1 (NM_029815.1,213-231).
ctcgtgtaattcaacacta

SEQ ID NO: 740705 - DNA, 19 bp, Mus musculus
  siRNA target sequence for Bcas1 (NM_029815.1,216-234).
gtgtaattcaacactatga

SEQ ID NO: 740706 - DNA, 19 bp, Mus musculus
  siRNA target sequence for Bcas1 (NM_029815.1,265-283).
ggataatgtggctacttct

SEQ ID NO: 740707 - DNA, 19 bp, Mus musculus
  siRNA target sequence for Bcas1 (NM_029815.1,266-284).
gataatgtggctacttctt

SEQ ID NO: 740708 - DNA, 19 bp, Mus musculus
  siRNA target sequence for Bcas1 (NM_029815.1,315-333).
gcgatgccagcggaaagaa

SEQ ID NO: 740709 - DNA, 19 bp, Mus musculus
  siRNA target sequence for Bcas1 (NM_029815.1,422-440).
gaccaaggcacggattcat

SEQ ID NO: 740710 - DNA, 19 bp, Mus musculus
  siRNA target sequence for Bcas1 (NM_029815.1,474-492).
gcgcagcgcctgagaacaa

SEQ ID NO: 740711 - DNA, 19 bp, Mus musculus
  siRNA target sequence for Bcas1 (NM_029815.1,475-493).
cgcagcgcctgagaacaaa

SEQ ID NO: 740712 - DNA, 19 bp, Mus musculus
  siRNA target sequence for Bcas1 (NM_029815.1,534-552).
cagggcaggctccagataa

SEQ ID NO: 740713 - DNA, 19 bp, Mus musculus
  siRNA target sequence for Bcas1 (NM_029815.1,536-554).
gggcaggctccagataaaa

SEQ ID NO: 740714 - DNA, 19 bp, Mus musculus
  siRNA target sequence for Bcas1 (NM_029815.1,656-674).
gatttcggctttttgaaca

SEQ ID NO: 740715 - DNA, 19 bp, Mus musculus
  siRNA target sequence for Bcas1 (NM_029815.1,804-822).
ctgcaggggaggacatagt

SEQ ID NO: 740716 - DNA, 19 bp, Mus musculus
  siRNA target sequence for Bcas1 (NM_029815.1,847-865).
cgttgacactctgagttat

SEQ ID NO: 740717 - DNA, 19 bp, Mus musculus
  siRNA target sequence for Bcas1 (NM_029815.1,848-866).
gttgacactctgagttatt

SEQ ID NO: 740718 - DNA, 19 bp, Mus musculus
  siRNA target sequence for Bcas1 (NM_029815.1,966-984).
cactggtttcacctaacaa

SEQ ID NO: 740719 - DNA, 19 bp, Mus musculus
  siRNA target sequence for Bcas1 (NM_029815.1,1173-1191).
cgacttcagccaatctcaa

SEQ ID NO: 740720 - DNA, 19 bp, Mus musculus
  siRNA target sequence for Bcas1 (NM_029815.1,1331-1349).
ctaccgctgggaaagttgt

SEQ ID NO: 740721 - DNA, 19 bp, Mus musculus
  siRNA target sequence for Bcas1 (NM_029815.1,1337-1355).
ctgggaaagttgttttgga

SEQ ID NO: 740722 - DNA, 19 bp, Mus musculus
  siRNA target sequence for Bcas1 (NM_029815.1,1353-1371).
ggaagaagtcagttaagga

SEQ ID NO: 740723 - DNA, 19 bp, Mus musculus
  siRNA target sequence for Bcas1 (NM_029815.1,1364-1382).
gttaaggaggatacacttt

SEQ ID NO: 740724 - DNA, 19 bp, Mus musculus
  siRNA target sequence for Bcas1 (NM_029815.1,1445-1463).
gtagaatccagcttacaaa

SEQ ID NO: 740725 - DNA, 19 bp, Mus musculus
  siRNA target sequence for Bcas1 (NM_029815.1,1491-1509).
ctgaacccacagacgtaaa

SEQ ID NO: 740726 - DNA, 19 bp, Mus musculus
  siRNA target sequence for Bcas1 (NM_029815.1,1550-1568).
gcgtttctcagacaaatgt

SEQ ID NO: 740727 - DNA, 19 bp, Mus musculus
  siRNA target sequence for Bcas1 (NM_029815.1,1604-1622).
gaaagtaacgtgaaagact

SEQ ID NO: 740728 - DNA, 19 bp, Mus musculus
  siRNA target sequence for Bcas1 (NM_029815.1,1635-1653).
cgtcaaactccgtggaaaa

SEQ ID NO: 740729 - DNA, 19 bp, Mus musculus
  siRNA target sequence for Bcas1 (NM_029815.1,1962-1980).
ccatcggaccagttggaaa

SEQ ID NO: 740730 - DNA, 19 bp, Mus musculus
  siRNA target sequence for Bcas1 (NM_029815.1,1963-1981).
catcggaccagttggaaaa

SEQ ID NO: 740731 - DNA, 19 bp, Mus musculus
  siRNA target sequence for 2410197A17Rik (NM_029834.1,542-560).
gagccatggggccaacatt

SEQ ID NO: 740732 - DNA, 19 bp, Mus musculus
  siRNA target sequence for Col25a1 (NM_029838.2,913-931).
cgaacatatggctaaaata

SEQ ID NO: 740733 - DNA, 19 bp, Mus musculus
  siRNA target sequence for Col25a1 (NM_029838.2,939-957).
ccagggaggcacctttaga

SEQ ID NO: 740734 - DNA, 19 bp, Mus musculus
  siRNA target sequence for Col25a1 (NM_029838.2,1094-1112).
cctcggatggtgtttccta

SEQ ID NO: 740735 - DNA, 19 bp, Mus musculus
  siRNA target sequence for Col25a1 (NM_029838.2,1095-1113).
ctcggatggtgtttcctaa

SEQ ID NO: 740736 - DNA, 19 bp, Mus musculus
  siRNA target sequence for Col25a1 (NM_029838.2,1102-1120).
ggtgtttcctaaaatcaat

SEQ ID NO: 740737 - DNA, 19 bp, Mus musculus
  siRNA target sequence for Col25a1 (NM_029838.2,1804-1822).
gggtgatcgtggagacaaa

SEQ ID NO: 740738 - DNA, 19 bp, Mus musculus
  siRNA target sequence for Col25a1 (NM_029838.2,1875-1893).
caggagccacagagatcat

SEQ ID NO: 740739 - DNA, 19 bp, Mus musculus
  siRNA target sequence for Col25a1 (NM_029838.2,1925-1943).
cagagaattaccaccttaa

SEQ ID NO: 740740 - DNA, 19 bp, Mus musculus
  siRNA target sequence for Col25a1 (NM_029838.2,1927-1945).
gagaattaccaccttaact

SEQ ID NO: 740741 - DNA, 19 bp, Mus musculus
  siRNA target sequence for Col25a1 (NM_029838.2,1929-1947).
gaattaccaccttaactgt

SEQ ID NO: 740742 - DNA, 19 bp, Mus musculus
  siRNA target sequence for Col25a1 (NM_029838.2,2121-2139).
cgggtgccaatggagtaaa

SEQ ID NO: 740743 - DNA, 19 bp, Mus musculus
  siRNA target sequence for Col25a1 (NM_029838.2,2122-2140).
gggtgccaatggagtaaaa

SEQ ID NO: 740744 - DNA, 19 bp, Mus musculus
  siRNA target sequence for Col25a1 (NM_029838.2,2169-2187).
gtcctcaggggccttctat

SEQ ID NO: 740745 - DNA, 19 bp, Mus musculus
  siRNA target sequence for Col25a1 (NM_029838.2,2171-2189).
cctcaggggccttctatca

SEQ ID NO: 740746 - DNA, 19 bp, Mus musculus
  siRNA target sequence for Col25a1 (NM_029838.2,2172-2190).
ctcaggggccttctatcat

SEQ ID NO: 740747 - DNA, 19 bp, Mus musculus
  siRNA target sequence for 2510039O18Rik (NM_029841.1,720-738).
gccgaccccacgtctatct

SEQ ID NO: 740748 - DNA, 19 bp, Mus musculus
  siRNA target sequence for 2510039O18Rik (NM_029841.1,742-760).
gcgcatccagctcaacaat

SEQ ID NO: 740749 - DNA, 19 bp, Mus musculus
  siRNA target sequence for 2510039O18Rik (NM_029841.1,919-937).
ggtgacctctaagaagtta

SEQ ID NO: 740750 - DNA, 19 bp, Mus musculus
  siRNA target sequence for 2510039O18Rik (NM_029841.1,1019-1037).
ccccaggtgctcaaaagca

SEQ ID NO: 740751 - DNA, 19 bp, Mus musculus
  siRNA target sequence for 2510039O18Rik (NM_029841.1,1021-1039).
ccaggtgctcaaaagcaaa

SEQ ID NO: 740752 - DNA, 19 bp, Mus musculus
  siRNA target sequence for 2510039O18Rik (NM_029841.1,1158-1176).
gtcccggtgtggagatgaa

SEQ ID NO: 740753 - DNA, 19 bp, Mus musculus
  siRNA target sequence for 2510039O18Rik (NM_029841.1,1160-1178).
cccggtgtggagatgaaga

SEQ ID NO: 740754 - DNA, 19 bp, Mus musculus
  siRNA target sequence for 2510039O18Rik (NM_029841.1,1300-1318).
ggaggcaacgctcaactat

SEQ ID NO: 740755 - DNA, 19 bp, Mus musculus
  siRNA target sequence for 2510039O18Rik (NM_029841.1,1303-1321).
ggcaacgctcaactatgaa

SEQ ID NO: 740756 - DNA, 19 bp, Mus musculus
  siRNA target sequence for 2510039O18Rik (NM_029841.1,1305-1323).
caacgctcaactatgaaga

SEQ ID NO: 740757 - DNA, 19 bp, Mus musculus
  siRNA target sequence for 2510039O18Rik (NM_029841.1,1508-1526).
gggctacagttcacagaaa

SEQ ID NO: 740758 - DNA, 19 bp, Mus musculus
  siRNA target sequence for 2510039O18Rik (NM_029841.1,1580-1598).
cacggcatccgctacaaga

SEQ ID NO: 740759 - DNA, 19 bp, Mus musculus
  siRNA target sequence for 2510039O18Rik (NM_029841.1,1644-1662).
cctacctgcatgtgtcttt

SEQ ID NO: 740760 - DNA, 19 bp, Mus musculus
  siRNA target sequence for 2510039O18Rik (NM_029841.1,1671-1689).
gaggccaacccgtcaagat

SEQ ID NO: 740761 - DNA, 19 bp, Mus musculus
  siRNA target sequence for 2510039O18Rik (NM_029841.1,1673-1691).
ggccaacccgtcaagatct

SEQ ID NO: 740762 - DNA, 19 bp, Mus musculus
  siRNA target sequence for 2510039O18Rik (NM_029841.1,1674-1692).
gccaacccgtcaagatcta

SEQ ID NO: 740763 - DNA, 19 bp, Mus musculus
  siRNA target sequence for 3110005O21Rik (NM_029842.1,186-204).
gacgctcctgcctgacaaa

SEQ ID NO: 740764 - DNA, 19 bp, Mus musculus
  siRNA target sequence for 3110005O21Rik (NM_029842.1,266-284).
ggcaggctgtgggtctatt

SEQ ID NO: 740765 - DNA, 19 bp, Mus musculus
  siRNA target sequence for 3110005O21Rik (NM_029842.1,320-338).
gtgaggccgtcctagacta

SEQ ID NO: 740766 - DNA, 19 bp, Mus musculus
  siRNA target sequence for 3110005O21Rik (NM_029842.1,512-530).
ccatcctcgaggacattct

SEQ ID NO: 740767 - DNA, 19 bp, Mus musculus
  siRNA target sequence for 3110005O21Rik (NM_029842.1,513-531).
catcctcgaggacattctt

SEQ ID NO: 740768 - DNA, 19 bp, Mus musculus
  siRNA target sequence for 3110005O21Rik (NM_029842.1,612-630).
caccaagaaggcaaagtgt

SEQ ID NO: 740769 - DNA, 19 bp, Mus musculus
  siRNA target sequence for 3110005O21Rik (NM_029842.1,641-659).
cagctcctgatgtcatgtt

SEQ ID NO: 740770 - DNA, 19 bp, Mus musculus
  siRNA target sequence for 3110005O21Rik (NM_029842.1,688-706).
ccacctctgcagtacttca

SEQ ID NO: 740771 - DNA, 19 bp, Mus musculus
  siRNA target sequence for 3110005O21Rik (NM_029842.1,689-707).
cacctctgcagtacttcaa

SEQ ID NO: 740772 - DNA, 19 bp, Mus musculus
  siRNA target sequence for 3110005O21Rik (NM_029842.1,1026-1044).
ggaagagatcactatcaat

SEQ ID NO: 740773 - DNA, 19 bp, Mus musculus
  siRNA target sequence for 3110005O21Rik (NM_029842.1,1124-1142).
ggaagtacatccgattgta

SEQ ID NO: 740774 - DNA, 19 bp, Mus musculus
  siRNA target sequence for 3110005O21Rik (NM_029842.1,1125-1143).
gaagtacatccgattgtat

SEQ ID NO: 740775 - DNA, 19 bp, Mus musculus
  siRNA target sequence for 3110005O21Rik (NM_029842.1,1282-1300).
ccaggagacaccctcttta

SEQ ID NO: 740776 - DNA, 19 bp, Mus musculus
  siRNA target sequence for 3110005O21Rik (NM_029842.1,1283-1301).
caggagacaccctctttat

SEQ ID NO: 740777 - DNA, 19 bp, Mus musculus
  siRNA target sequence for 4632433K11Rik (NM_029849.1,543-561).
cttacaacacaaccaaata

SEQ ID NO: 740778 - DNA, 19 bp, Mus musculus
  siRNA target sequence for 4632433K11Rik (NM_029849.1,596-614).
cattccagataatggataa

SEQ ID NO: 740779 - DNA, 19 bp, Mus musculus
  siRNA target sequence for 4632433K11Rik (NM_029849.1,610-628).
gataactacccagagaatt

SEQ ID NO: 740780 - DNA, 19 bp, Mus musculus
  siRNA target sequence for 4632433K11Rik (NM_029849.1,615-633).
ctacccagagaattggaat

SEQ ID NO: 740781 - DNA, 19 bp, Mus musculus
  siRNA target sequence for 4632433K11Rik (NM_029849.1,618-636).
cccagagaattggaataca

SEQ ID NO: 740782 - DNA, 19 bp, Mus musculus
  siRNA target sequence for 4632433K11Rik (NM_029849.1,619-637).
ccagagaattggaatacaa

SEQ ID NO: 740783 - DNA, 19 bp, Mus musculus
  siRNA target sequence for 4632433K11Rik (NM_029849.1,651-669).
gacttacagaaagtctttt

SEQ ID NO: 740784 - DNA, 19 bp, Mus musculus
  siRNA target sequence for 4632433K11Rik (NM_029849.1,710-728).
ctaactcccaagtcctttt

SEQ ID NO: 740785 - DNA, 19 bp, Mus musculus
  siRNA target sequence for 4632433K11Rik (NM_029849.1,732-750).
cccttaccacagtgtcatt

SEQ ID NO: 740786 - DNA, 19 bp, Mus musculus
  siRNA target sequence for 4632433K11Rik (NM_029849.1,779-797).
caaggtggtcactagctaa

SEQ ID NO: 740787 - DNA, 19 bp, Mus musculus
  siRNA target sequence for 4632433K11Rik (NM_029849.1,865-883).
ggaaatttctttatagaca

SEQ ID NO: 740788 - DNA, 19 bp, Mus musculus
  siRNA target sequence for Bcl7a (NM_029850.2,213-231).
gtgaccgttggcgatacat

SEQ ID NO: 740789 - DNA, 19 bp, Mus musculus
  siRNA target sequence for Bcl7a (NM_029850.2,229-247).
catccctacgaatctacaa

SEQ ID NO: 740790 - DNA, 19 bp, Mus musculus
  siRNA target sequence for Bcl7a (NM_029850.2,262-280).
cggagccaaaggttgatga

SEQ ID NO: 740791 - DNA, 19 bp, Mus musculus
  siRNA target sequence for Bcl7a (NM_029850.2,369-387).
gacatgcacgatgataaca

SEQ ID NO: 740792 - DNA, 19 bp, Mus musculus
  siRNA target sequence for Bcl7a (NM_029850.2,509-527).
ggcgcaggccgatggaaaa

SEQ ID NO: 740793 - DNA, 19 bp, Mus musculus
  siRNA target sequence for Bcl7a (NM_029850.2,511-529).
cgcaggccgatggaaaaga

SEQ ID NO: 740794 - DNA, 19 bp, Mus musculus
  siRNA target sequence for Bcl7a (NM_029850.2,549-567).
gcatccgaggagcaaaatt

SEQ ID NO: 740795 - DNA, 19 bp, Mus musculus
  siRNA target sequence for Bcl7a (NM_029850.2,553-571).
ccgaggagcaaaattcaca

SEQ ID NO: 740796 - DNA, 19 bp, Mus musculus
  siRNA target sequence for Bcl7a (NM_029850.2,570-588).
cagtcttcgatggaaaact

SEQ ID NO: 740797 - DNA, 19 bp, Mus musculus
  siRNA target sequence for Bcl7a (NM_029850.2,655-673).
cggcagtctctcaggattt

SEQ ID NO: 740798 - DNA, 19 bp, Mus musculus
  siRNA target sequence for Bcl7a (NM_029850.2,658-676).
cagtctctcaggatttgga

SEQ ID NO: 740799 - DNA, 19 bp, Mus musculus
  siRNA target sequence for 4921537D05Rik (NM_029852.1,571-589).
gagcctgagttccaaaata

SEQ ID NO: 740800 - DNA, 19 bp, Mus musculus
  siRNA target sequence for 4921537D05Rik (NM_029852.1,605-623).
gggtacgctgtgaacatca

SEQ ID NO: 740801 - DNA, 19 bp, Mus musculus
  siRNA target sequence for 4921537D05Rik (NM_029852.1,606-624).
ggtacgctgtgaacatcat

SEQ ID NO: 740802 - DNA, 19 bp, Mus musculus
  siRNA target sequence for 4921537D05Rik (NM_029852.1,607-625).
gtacgctgtgaacatcata

SEQ ID NO: 740803 - DNA, 19 bp, Mus musculus
  siRNA target sequence for 4921537D05Rik (NM_029852.1,611-629).
gctgtgaacatcataaaca

SEQ ID NO: 740804 - DNA, 19 bp, Mus musculus
  siRNA target sequence for 4921537D05Rik (NM_029852.1,641-659).
ctctgaaaattgaacacaa

SEQ ID NO: 740805 - DNA, 19 bp, Mus musculus
  siRNA target sequence for 4921537D05Rik (NM_029852.1,643-661).
ctgaaaattgaacacaaaa

SEQ ID NO: 740806 - DNA, 19 bp, Mus musculus
  siRNA target sequence for 4921537D05Rik (NM_029852.1,662-680).
ggttgcaggaagaatatgt

SEQ ID NO: 740807 - DNA, 19 bp, Mus musculus
  siRNA target sequence for 4921537D05Rik (NM_029852.1,694-712).
gaacttaaacgtgtattaa

SEQ ID NO: 740808 - DNA, 19 bp, Mus musculus
  siRNA target sequence for 4921537D05Rik (NM_029852.1,764-782).
ggggagaattagtagagaa

SEQ ID NO: 740809 - DNA, 19 bp, Mus musculus
  siRNA target sequence for 4921537D05Rik (NM_029852.1,821-839).
caccacaaaaattggaatt

SEQ ID NO: 740810 - DNA, 19 bp, Mus musculus
  siRNA target sequence for 4921537D05Rik (NM_029852.1,848-866).
cccaactacaacaagaatt

SEQ ID NO: 740811 - DNA, 19 bp, Mus musculus
  siRNA target sequence for 4921537D05Rik (NM_029852.1,849-867).
ccaactacaacaagaatta

SEQ ID NO: 740812 - DNA, 19 bp, Mus musculus
  siRNA target sequence for 4921537D05Rik (NM_029852.1,872-890).
ctccaatgcgagaacgttt

SEQ ID NO: 740813 - DNA, 19 bp, Mus musculus
  siRNA target sequence for 4921537D05Rik (NM_029852.1,887-905).
gttttcggactcttgatga

SEQ ID NO: 740814 - DNA, 19 bp, Mus musculus
  siRNA target sequence for 4921537D05Rik (NM_029852.1,917-935).
ggtacagagctgagtataa

SEQ ID NO: 740815 - DNA, 19 bp, Mus musculus
  siRNA target sequence for 4921537D05Rik (NM_029852.1,939-957).
gctgcgctacgagtataca

SEQ ID NO: 740816 - DNA, 19 bp, Mus musculus
  siRNA target sequence for 4921537D05Rik (NM_029852.1,940-958).
ctgcgctacgagtatacat

SEQ ID NO: 740817 - DNA, 19 bp, Mus musculus
  siRNA target sequence for 4921537D05Rik (NM_029852.1,942-960).
gcgctacgagtatacattt

SEQ ID NO: 740818 - DNA, 19 bp, Mus musculus
  siRNA target sequence for 4921537D05Rik (NM_029852.1,944-962).
gctacgagtatacatttct

SEQ ID NO: 740819 - DNA, 19 bp, Mus musculus
  siRNA target sequence for 4921537D05Rik (NM_029852.1,993-1011).
gtttactcgggtttcagaa

SEQ ID NO: 740820 - DNA, 19 bp, Mus musculus
  siRNA target sequence for 4921537D05Rik (NM_029852.1,1057-1075).
gacaaagaggagctacata

SEQ ID NO: 740821 - DNA, 19 bp, Mus musculus
  siRNA target sequence for 4921537D05Rik (NM_029852.1,1100-1118).
cgagagacagcaaacgaat

SEQ ID NO: 740822 - DNA, 19 bp, Mus musculus
  siRNA target sequence for 4921537D05Rik (NM_029852.1,1122-1140).
gcaacttgttcgagaaaaa

SEQ ID NO: 740823 - DNA, 19 bp, Mus musculus
  siRNA target sequence for 4921537D05Rik (NM_029852.1,1123-1141).
caacttgttcgagaaaaaa

SEQ ID NO: 740824 - DNA, 19 bp, Mus musculus
  siRNA target sequence for 4921537D05Rik (NM_029852.1,1315-1333).
caagctgagcgtttagaaa

SEQ ID NO: 740825 - DNA, 19 bp, Mus musculus
  siRNA target sequence for 4921537D05Rik (NM_029852.1,1319-1337).
ctgagcgtttagaaaaaga

SEQ ID NO: 740826 - DNA, 19 bp, Mus musculus
  siRNA target sequence for 4921537D05Rik (NM_029852.1,1323-1341).
gcgtttagaaaaagaacta

SEQ ID NO: 740827 - DNA, 19 bp, Mus musculus
  siRNA target sequence for 4921537D05Rik (NM_029852.1,1330-1348).
gaaaaagaactacaatcaa

SEQ ID NO: 740828 - DNA, 19 bp, Mus musculus
  siRNA target sequence for 4921537D05Rik (NM_029852.1,1418-1436).
gtgaagtgaaagagcttaa

SEQ ID NO: 740829 - DNA, 19 bp, Mus musculus
  siRNA target sequence for 4921537D05Rik (NM_029852.1,1476-1494).
ggcagcaagagctaagagt

SEQ ID NO: 740830 - DNA, 19 bp, Mus musculus
  siRNA target sequence for 4921537D05Rik (NM_029852.1,1542-1560).
gcagtcagacaatgaaatt

SEQ ID NO: 740831 - DNA, 19 bp, Mus musculus
  siRNA target sequence for 4921537D05Rik (NM_029852.1,1599-1617).
ggaaaaagatcgtgaatta

SEQ ID NO: 740832 - DNA, 19 bp, Mus musculus
  siRNA target sequence for 4921537D05Rik (NM_029852.1,1606-1624).
gatcgtgaattaatacgta

SEQ ID NO: 740833 - DNA, 19 bp, Mus musculus
  siRNA target sequence for 4921537D05Rik (NM_029852.1,1610-1628).
gtgaattaatacgtaaagt

SEQ ID NO: 740834 - DNA, 19 bp, Mus musculus
  siRNA target sequence for 4921537D05Rik (NM_029852.1,1634-1652).
ctgccaaggaagaaggtta

SEQ ID NO: 740835 - DNA, 19 bp, Mus musculus
  siRNA target sequence for 4921537D05Rik (NM_029852.1,1645-1663).
gaaggttaccagaaactca

SEQ ID NO: 740836 - DNA, 19 bp, Mus musculus
  siRNA target sequence for 4921537D05Rik (NM_029852.1,1821-1839).
gcagagcactaggttaaaa

SEQ ID NO: 740837 - DNA, 19 bp, Mus musculus
  siRNA target sequence for 4921537D05Rik (NM_029852.1,1826-1844).
gcactaggttaaaacttca

SEQ ID NO: 740838 - DNA, 19 bp, Mus musculus
  siRNA target sequence for 4921537D05Rik (NM_029852.1,1952-1970).
cggagaacgacttactgaa

SEQ ID NO: 740839 - DNA, 19 bp, Mus musculus
  siRNA target sequence for 4921537D05Rik (NM_029852.1,1953-1971).
ggagaacgacttactgaat

SEQ ID NO: 740840 - DNA, 19 bp, Mus musculus
  siRNA target sequence for 4921537D05Rik (NM_029852.1,2048-2066).
cacaactagacgttgaaaa

SEQ ID NO: 740841 - DNA, 19 bp, Mus musculus
  siRNA target sequence for 4921537D05Rik (NM_029852.1,2050-2068).
caactagacgttgaaaaga

SEQ ID NO: 740842 - DNA, 19 bp, Mus musculus
  siRNA target sequence for 4921537D05Rik (NM_029852.1,2175-2193).
cgcagcgactgctcagaaa

SEQ ID NO: 740843 - DNA, 19 bp, Mus musculus
  siRNA target sequence for 4921537D05Rik (NM_029852.1,2204-2222).
ctcttcatgagaacaaatt

SEQ ID NO: 740844 - DNA, 19 bp, Mus musculus
  siRNA target sequence for 4921537D05Rik (NM_029852.1,2228-2246).
gactacaggagaaagtaga

SEQ ID NO: 740845 - DNA, 19 bp, Mus musculus
  siRNA target sequence for 4921537D05Rik (NM_029852.1,2341-2359).
cgactaaaggacatacaga

SEQ ID NO: 740846 - DNA, 19 bp, Mus musculus
  siRNA target sequence for 4921537D05Rik (NM_029852.1,2371-2389).
gaatttcgaagtctaattt

SEQ ID NO: 740847 - DNA, 19 bp, Mus musculus
  siRNA target sequence for 4921537D05Rik (NM_029852.1,2403-2421).
gcctccaacagcatcgatt

SEQ ID NO: 740848 - DNA, 19 bp, Mus musculus
  siRNA target sequence for 4921537D05Rik (NM_029852.1,2404-2422).
cctccaacagcatcgatta

SEQ ID NO: 740849 - DNA, 19 bp, Mus musculus
  siRNA target sequence for 4921537D05Rik (NM_029852.1,2417-2435).
cgattagtcctgctaactt

SEQ ID NO: 740850 - DNA, 19 bp, Mus musculus
  siRNA target sequence for 4921537D05Rik (NM_029852.1,2514-2532).
ctctctccttcgcaaaaga

SEQ ID NO: 740851 - DNA, 19 bp, Mus musculus
  siRNA target sequence for 4921537D05Rik (NM_029852.1,2516-2534).
ctctccttcgcaaaagact

SEQ ID NO: 740852 - DNA, 19 bp, Mus musculus
  siRNA target sequence for 4921537D05Rik (NM_029852.1,2539-2557).
gaactggagactacacaaa

SEQ ID NO: 740853 - DNA, 19 bp, Mus musculus
  siRNA target sequence for 4921537D05Rik (NM_029852.1,2544-2562).
ggagactacacaaagaaaa

SEQ ID NO: 740854 - DNA, 19 bp, Mus musculus
  siRNA target sequence for 4921537D05Rik (NM_029852.1,2549-2567).
ctacacaaagaaaacaact

SEQ ID NO: 740855 - DNA, 19 bp, Mus musculus
  siRNA target sequence for 4632413C14Rik (NM_029857.2,961-979).
gtgacgggcctggtgaaat

SEQ ID NO: 740856 - DNA, 19 bp, Mus musculus
  siRNA target sequence for 4632413C14Rik (NM_029857.2,998-1016).
gtgtcctcccaaccataat

SEQ ID NO: 740857 - DNA, 19 bp, Mus musculus
  siRNA target sequence for 4632413C14Rik (NM_029857.2,1040-1058).
gcgaaggagccgacatctt

SEQ ID NO: 740858 - DNA, 19 bp, Mus musculus
  siRNA target sequence for 4632413C14Rik (NM_029857.2,1041-1059).
cgaaggagccgacatcttt

SEQ ID NO: 740859 - DNA, 19 bp, Mus musculus
  siRNA target sequence for 4632413C14Rik (NM_029857.2,1322-1340).
ggaaacgctatcttctgat

SEQ ID NO: 740860 - DNA, 19 bp, Mus musculus
  siRNA target sequence for 4632413C14Rik (NM_029857.2,1323-1341).
gaaacgctatcttctgata

SEQ ID NO: 740861 - DNA, 19 bp, Mus musculus
  siRNA target sequence for 4632413C14Rik (NM_029857.2,1465-1483).
gctggcatcgctgttatga

SEQ ID NO: 740862 - DNA, 19 bp, Mus musculus
  siRNA target sequence for 4632413C14Rik (NM_029857.2,1468-1486).
ggcatcgctgttatgactt

SEQ ID NO: 740863 - DNA, 19 bp, Mus musculus
  siRNA target sequence for 4632413C14Rik (NM_029857.2,1508-1526).
ctggcctgacaggatacaa

SEQ ID NO: 740864 - DNA, 19 bp, Mus musculus
  siRNA target sequence for 4632413C14Rik (NM_029857.2,1629-1647).
cggcagataccgcacattt

SEQ ID NO: 740865 - DNA, 19 bp, Mus musculus
  siRNA target sequence for 4632413C14Rik (NM_029857.2,1630-1648).
ggcagataccgcacattta

SEQ ID NO: 740866 - DNA, 19 bp, Mus musculus
  siRNA target sequence for 4632413C14Rik (NM_029857.2,1631-1649).
gcagataccgcacatttaa

SEQ ID NO: 740867 - DNA, 19 bp, Mus musculus
  siRNA target sequence for 4632413C14Rik (NM_029857.2,1632-1650).
cagataccgcacatttaat

SEQ ID NO: 740868 - DNA, 19 bp, Mus musculus
  siRNA target sequence for 4632413C14Rik (NM_029857.2,1884-1902).
ccaccgatcggcagaagtt

SEQ ID NO: 740869 - DNA, 19 bp, Mus musculus
  siRNA target sequence for 4632413C14Rik (NM_029857.2,1978-1996).
ggagccagagtcatctact

SEQ ID NO: 740870 - DNA, 19 bp, Mus musculus
  siRNA target sequence for 4632413C14Rik (NM_029857.2,1979-1997).
gagccagagtcatctactt

SEQ ID NO: 740871 - DNA, 19 bp, Mus musculus
  siRNA target sequence for 4632413C14Rik (NM_029857.2,2084-2102).
ccaagcactgggaaccatt

SEQ ID NO: 740872 - DNA, 19 bp, Mus musculus
  siRNA target sequence for 4632413C14Rik (NM_029857.2,2280-2298).
ctacgccaagcaaatggat

SEQ ID NO: 740873 - DNA, 19 bp, Mus musculus
  siRNA target sequence for 4632413C14Rik (NM_029857.2,2369-2387).
gcagcttgccccaagaaga

SEQ ID NO: 740874 - DNA, 19 bp, Mus musculus
  siRNA target sequence for 5330440M15Rik (NM_029868.1,1213-1231).
gttcctgcttggctaaatt

SEQ ID NO: 740875 - DNA, 19 bp, Mus musculus
  siRNA target sequence for 5330440M15Rik (NM_029868.1,1216-1234).
cctgcttggctaaatttct

SEQ ID NO: 740876 - DNA, 19 bp, Mus musculus
  siRNA target sequence for 5330440M15Rik (NM_029868.1,1239-1257).
gccacagtcatctaagtca

SEQ ID NO: 740877 - DNA, 19 bp, Mus musculus
  siRNA target sequence for 5330440M15Rik (NM_029868.1,1245-1263).
gtcatctaagtcatctaca

SEQ ID NO: 740878 - DNA, 19 bp, Mus musculus
  siRNA target sequence for 5330440M15Rik (NM_029868.1,1259-1277).
ctacagccacctttgacaa

SEQ ID NO: 740879 - DNA, 19 bp, Mus musculus
  siRNA target sequence for 5330440M15Rik (NM_029868.1,1324-1342).
cgtcgtcgacataattcct

SEQ ID NO: 740880 - DNA, 19 bp, Mus musculus
  siRNA target sequence for 5330440M15Rik (NM_029868.1,1343-1361).
ctgatggcttttttaacaa

SEQ ID NO: 740881 - DNA, 19 bp, Mus musculus
  siRNA target sequence for 5330440M15Rik (NM_029868.1,1372-1390).
cggactacgggagattctt

SEQ ID NO: 740882 - DNA, 19 bp, Mus musculus
  siRNA target sequence for 5330440M15Rik (NM_029868.1,1437-1455).
ctctaagggagcatatgct

SEQ ID NO: 740883 - DNA, 19 bp, Mus musculus
  siRNA target sequence for 5330440M15Rik (NM_029868.1,1481-1499).
cccgaggtcatgatggtat

SEQ ID NO: 740884 - DNA, 19 bp, Mus musculus
  siRNA target sequence for 5330440M15Rik (NM_029868.1,1507-1525).
cgtagtggaggtagtagta

SEQ ID NO: 740885 - DNA, 19 bp, Mus musculus
  siRNA target sequence for 5330440M15Rik (NM_029868.1,1566-1584).
gaaaggctgcgcctttcaa

SEQ ID NO: 740886 - DNA, 19 bp, Mus musculus
  siRNA target sequence for 5330440M15Rik (NM_029868.1,1570-1588).
ggctgcgcctttcaagaaa

SEQ ID NO: 740887 - DNA, 19 bp, Mus musculus
  siRNA target sequence for 5330440M15Rik (NM_029868.1,1571-1589).
gctgcgcctttcaagaaaa

SEQ ID NO: 740888 - DNA, 19 bp, Mus musculus
  siRNA target sequence for 5330440M15Rik (NM_029868.1,1575-1593).
cgcctttcaagaaaaaaca

SEQ ID NO: 740889 - DNA, 19 bp, Mus musculus
  siRNA target sequence for 5330440M15Rik (NM_029868.1,1751-1769).
ccaagcaaccctcaaagat

SEQ ID NO: 740890 - DNA, 19 bp, Mus musculus
  siRNA target sequence for 5330440M15Rik (NM_029868.1,1760-1778).
cctcaaagatgctagtcat

SEQ ID NO: 740891 - DNA, 19 bp, Mus musculus
  siRNA target sequence for 5330440M15Rik (NM_029868.1,1763-1781).
caaagatgctagtcatcaa

SEQ ID NO: 740892 - DNA, 19 bp, Mus musculus
  siRNA target sequence for 5330440M15Rik (NM_029868.1,1879-1897).
ccaagtgtctataagaact

SEQ ID NO: 740893 - DNA, 19 bp, Mus musculus
  siRNA target sequence for 5330440M15Rik (NM_029868.1,1880-1898).
caagtgtctataagaactt

SEQ ID NO: 740894 - DNA, 19 bp, Mus musculus
  siRNA target sequence for 5330440M15Rik (NM_029868.1,1935-1953).
cgcctggaaagctaacaga

SEQ ID NO: 740895 - DNA, 19 bp, Mus musculus
  siRNA target sequence for 5330440M15Rik (NM_029868.1,1996-2014).
gctttcaccaatccaattt

SEQ ID NO: 740896 - DNA, 19 bp, Mus musculus
  siRNA target sequence for 5330440M15Rik (NM_029868.1,2068-2086).
gagagtccctccagtacta

SEQ ID NO: 740897 - DNA, 19 bp, Mus musculus
  siRNA target sequence for 5330440M15Rik (NM_029868.1,2079-2097).
cagtactacccctccaatt

SEQ ID NO: 740898 - DNA, 19 bp, Mus musculus
  siRNA target sequence for 5330440M15Rik (NM_029868.1,2084-2102).
ctacccctccaattgagat

SEQ ID NO: 740899 - DNA, 19 bp, Mus musculus
  siRNA target sequence for 5330440M15Rik (NM_029868.1,2108-2126).
cctctcgtctgaccaaatt

SEQ ID NO: 740900 - DNA, 19 bp, Mus musculus
  siRNA target sequence for 5330440M15Rik (NM_029868.1,2168-2186).
ctctgaaggatgaacgaaa

SEQ ID NO: 740901 - DNA, 19 bp, Mus musculus
  siRNA target sequence for 5330440M15Rik (NM_029868.1,2188-2206).
ggagactgctcagaaagta

SEQ ID NO: 740902 - DNA, 19 bp, Mus musculus
  siRNA target sequence for 5330440M15Rik (NM_029868.1,2246-2264).
gccacacacccgaaccaaa

SEQ ID NO: 740903 - DNA, 19 bp, Mus musculus
  siRNA target sequence for 5330440M15Rik (NM_029868.1,2252-2270).
cacccgaaccaaaggaaaa

SEQ ID NO: 740904 - DNA, 19 bp, Mus musculus
  siRNA target sequence for 5330440M15Rik (NM_029868.1,2256-2274).
cgaaccaaaggaaaatgga

SEQ ID NO: 740905 - DNA, 19 bp, Mus musculus
  siRNA target sequence for 5330440M15Rik (NM_029868.1,2382-2400).
gcaggagtaccctgaaaat

SEQ ID NO: 740906 - DNA, 19 bp, Mus musculus
  siRNA target sequence for 5330440M15Rik (NM_029868.1,2385-2403).
ggagtaccctgaaaatgat

SEQ ID NO: 740907 - DNA, 19 bp, Mus musculus
  siRNA target sequence for Tbcd (NM_029878.1,215-233).
ggagcggttccgcgtaatt

SEQ ID NO: 740908 - DNA, 19 bp, Mus musculus
  siRNA target sequence for Tbcd (NM_029878.1,216-234).
gagcggttccgcgtaatta

SEQ ID NO: 740909 - DNA, 19 bp, Mus musculus
  siRNA target sequence for Tbcd (NM_029878.1,220-238).
ggttccgcgtaattatgga

SEQ ID NO: 740910 - DNA, 19 bp, Mus musculus
  siRNA target sequence for Tbcd (NM_029878.1,225-243).
cgcgtaattatggacaaat

SEQ ID NO: 740911 - DNA, 19 bp, Mus musculus
  siRNA target sequence for Tbcd (NM_029878.1,226-244).
gcgtaattatggacaaata

SEQ ID NO: 740912 - DNA, 19 bp, Mus musculus
  siRNA target sequence for Tbcd (NM_029878.1,273-291).
caccttgagtggatgatga

SEQ ID NO: 740913 - DNA, 19 bp, Mus musculus
  siRNA target sequence for Tbcd (NM_029878.1,339-357).
gtccatctggcttttaagt

SEQ ID NO: 740914 - DNA, 19 bp, Mus musculus
  siRNA target sequence for Tbcd (NM_029878.1,371-389).
caccaaggttcgtggatat

SEQ ID NO: 740915 - DNA, 19 bp, Mus musculus
  siRNA target sequence for Tbcd (NM_029878.1,373-391).
ccaaggttcgtggatataa

SEQ ID NO: 740916 - DNA, 19 bp, Mus musculus
  siRNA target sequence for Tbcd (NM_029878.1,374-392).
caaggttcgtggatataaa

SEQ ID NO: 740917 - DNA, 19 bp, Mus musculus
  siRNA target sequence for Tbcd (NM_029878.1,412-430).
ctcacgaagtggctaatgt

SEQ ID NO: 740918 - DNA, 19 bp, Mus musculus
  siRNA target sequence for Tbcd (NM_029878.1,432-450).
cagcctgtgttagatatgt

SEQ ID NO: 740919 - DNA, 19 bp, Mus musculus
  siRNA target sequence for Tbcd (NM_029878.1,490-508).
cacgctacatgcttctact

SEQ ID NO: 740920 - DNA, 19 bp, Mus musculus
  siRNA target sequence for Tbcd (NM_029878.1,523-541).
cctgcttgatcccttttga

SEQ ID NO: 740921 - DNA, 19 bp, Mus musculus
  siRNA target sequence for Tbcd (NM_029878.1,558-576).
gggaacctgtctactcaaa

SEQ ID NO: 740922 - DNA, 19 bp, Mus musculus
  siRNA target sequence for Tbcd (NM_029878.1,560-578).
gaacctgtctactcaaact

SEQ ID NO: 740923 - DNA, 19 bp, Mus musculus
  siRNA target sequence for Tbcd (NM_029878.1,672-690).
cttgtgtccaaatttatca

SEQ ID NO: 740924 - DNA, 19 bp, Mus musculus
  siRNA target sequence for Tbcd (NM_029878.1,697-715).
ccgatgtcaagcagagaaa

SEQ ID NO: 740925 - DNA, 19 bp, Mus musculus
  siRNA target sequence for Tbcd (NM_029878.1,806-824).
gcaggccctggctcaaata

SEQ ID NO: 740926 - DNA, 19 bp, Mus musculus
  siRNA target sequence for Tbcd (NM_029878.1,897-915).
ctccccgagagcagtcata

SEQ ID NO: 740927 - DNA, 19 bp, Mus musculus
  siRNA target sequence for Tbcd (NM_029878.1,1118-1136).
gggggtagaaactgtgata

SEQ ID NO: 740928 - DNA, 19 bp, Mus musculus
  siRNA target sequence for Tbcd (NM_029878.1,1183-1201).
ggtctgcagcgaaaggaat

SEQ ID NO: 740929 - DNA, 19 bp, Mus musculus
  siRNA target sequence for Tbcd (NM_029878.1,1184-1202).
gtctgcagcgaaaggaatt

SEQ ID NO: 740930 - DNA, 19 bp, Mus musculus
  siRNA target sequence for Tbcd (NM_029878.1,1188-1206).
gcagcgaaaggaattggta

SEQ ID NO: 740931 - DNA, 19 bp, Mus musculus
  siRNA target sequence for Tbcd (NM_029878.1,1390-1408).
cccttacctacgatgagaa

SEQ ID NO: 740932 - DNA, 19 bp, Mus musculus
  siRNA target sequence for Tbcd (NM_029878.1,1543-1561).
ctgtatttgaccgaaatgt

SEQ ID NO: 740933 - DNA, 19 bp, Mus musculus
  siRNA target sequence for Tbcd (NM_029878.1,1629-1647).
ggaattgatattttgacta

SEQ ID NO: 740934 - DNA, 19 bp, Mus musculus
  siRNA target sequence for Tbcd (NM_029878.1,1662-1680).
gcagttggtaacatatcta

SEQ ID NO: 740935 - DNA, 19 bp, Mus musculus
  siRNA target sequence for Tbcd (NM_029878.1,1663-1681).
cagttggtaacatatctaa

SEQ ID NO: 740936 - DNA, 19 bp, Mus musculus
  siRNA target sequence for Tbcd (NM_029878.1,1665-1683).
gttggtaacatatctaact

SEQ ID NO: 740937 - DNA, 19 bp, Mus musculus
  siRNA target sequence for Tbcd (NM_029878.1,1668-1686).
ggtaacatatctaactgtt

SEQ ID NO: 740938 - DNA, 19 bp, Mus musculus
  siRNA target sequence for Tbcd (NM_029878.1,1669-1687).
gtaacatatctaactgttt

SEQ ID NO: 740939 - DNA, 19 bp, Mus musculus
  siRNA target sequence for Tbcd (NM_029878.1,1682-1700).
ctgtttcctgattataagt

SEQ ID NO: 740940 - DNA, 19 bp, Mus musculus
  siRNA target sequence for Tbcd (NM_029878.1,1688-1706).
cctgattataagtgtgttt

SEQ ID NO: 740941 - DNA, 19 bp, Mus musculus
  siRNA target sequence for Tbcd (NM_029878.1,1860-1878).
cctgcactactgttgatga

SEQ ID NO: 740942 - DNA, 19 bp, Mus musculus
  siRNA target sequence for Tbcd (NM_029878.1,1972-1990).
ggcttgtcacagactatct

SEQ ID NO: 740943 - DNA, 19 bp, Mus musculus
  siRNA target sequence for Tbcd (NM_029878.1,2059-2077).
gtcttggaggagagcttat

SEQ ID NO: 740944 - DNA, 19 bp, Mus musculus
  siRNA target sequence for Tbcd (NM_029878.1,2061-2079).
cttggaggagagcttatga

SEQ ID NO: 740945 - DNA, 19 bp, Mus musculus
  siRNA target sequence for Tbcd (NM_029878.1,2086-2104).
cagtgtgcatcttaataga

SEQ ID NO: 740946 - DNA, 19 bp, Mus musculus
  siRNA target sequence for Tbcd (NM_029878.1,2158-2176).
ggcagtggctgataaatga

SEQ ID NO: 740947 - DNA, 19 bp, Mus musculus
  siRNA target sequence for Tbcd (NM_029878.1,2206-2224).
gccattccagacaacagat

SEQ ID NO: 740948 - DNA, 19 bp, Mus musculus
  siRNA target sequence for Tbcd (NM_029878.1,2444-2462).
gagaagagtcacctgtatt

SEQ ID NO: 740949 - DNA, 19 bp, Mus musculus
  siRNA target sequence for Tbcd (NM_029878.1,2458-2476).
gtatttctcccaatgatgt

SEQ ID NO: 740950 - DNA, 19 bp, Mus musculus
  siRNA target sequence for Tbcd (NM_029878.1,2502-2520).
ggtttgaaagcaatctcaa

SEQ ID NO: 740951 - DNA, 19 bp, Mus musculus
  siRNA target sequence for Tbcd (NM_029878.1,2554-2572).
ggcctccagatgaagtcat

SEQ ID NO: 740952 - DNA, 19 bp, Mus musculus
  siRNA target sequence for Tbcd (NM_029878.1,2556-2574).
cctccagatgaagtcatat

SEQ ID NO: 740953 - DNA, 19 bp, Mus musculus
  siRNA target sequence for Tbcd (NM_029878.1,2565-2583).
gaagtcatatgcaaagaga

SEQ ID NO: 740954 - DNA, 19 bp, Mus musculus
  siRNA target sequence for Tbcd (NM_029878.1,2878-2896).
gccaagaactggaaagtct

SEQ ID NO: 740955 - DNA, 19 bp, Mus musculus
  siRNA target sequence for Tbcd (NM_029878.1,2973-2991).
ggattgcctacctatagat

SEQ ID NO: 740956 - DNA, 19 bp, Mus musculus
  siRNA target sequence for Tbcd (NM_029878.1,2974-2992).
gattgcctacctatagata

SEQ ID NO: 740957 - DNA, 19 bp, Mus musculus
  siRNA target sequence for Tbcd (NM_029878.1,2978-2996).
gcctacctatagataccat

SEQ ID NO: 740958 - DNA, 19 bp, Mus musculus
  siRNA target sequence for Tbcd (NM_029878.1,3038-3056).
gtctacggtcagacattct

SEQ ID NO: 740959 - DNA, 19 bp, Mus musculus
  siRNA target sequence for Tbcd (NM_029878.1,3172-3190).
ctgtatcactgctgaaaat

SEQ ID NO: 740960 - DNA, 19 bp, Mus musculus
  siRNA target sequence for Tbcd (NM_029878.1,3207-3225).
gctaatgggtgctttgaca

SEQ ID NO: 740961 - DNA, 19 bp, Mus musculus
  siRNA target sequence for Tbcd (NM_029878.1,3208-3226).
ctaatgggtgctttgacat

SEQ ID NO: 740962 - DNA, 19 bp, Mus musculus
  siRNA target sequence for Tbcd (NM_029878.1,3266-3284).
gctcacactttgtaaggaa

SEQ ID NO: 740963 - DNA, 19 bp, Mus musculus
  siRNA target sequence for Tbcd (NM_029878.1,3536-3554).
cgcagagcttccagttgta

SEQ ID NO: 740964 - DNA, 19 bp, Mus musculus
  siRNA target sequence for Tbcd (NM_029878.1,3537-3555).
gcagagcttccagttgtaa

SEQ ID NO: 740965 - DNA, 19 bp, Mus musculus
  siRNA target sequence for Tbcd (NM_029878.1,3598-3616).
gaccccagctggttccaaa

SEQ ID NO: 740966 - DNA, 19 bp, Mus musculus
  siRNA target sequence for D13Bwg1146e (NM_029879.1,789-807).
cttgtccaagagttcaaca

SEQ ID NO: 740967 - DNA, 19 bp, Mus musculus
  siRNA target sequence for D13Bwg1146e (NM_029879.1,868-886).
cctctctgcgagctgaaat

SEQ ID NO: 740968 - DNA, 19 bp, Mus musculus
  siRNA target sequence for D13Bwg1146e (NM_029879.1,919-937).
cccgtcaggcacaccaaaa

SEQ ID NO: 740969 - DNA, 19 bp, Mus musculus
  siRNA target sequence for D13Bwg1146e (NM_029879.1,969-987).
gagatccatcccgaaatct

SEQ ID NO: 740970 - DNA, 19 bp, Mus musculus
  siRNA target sequence for D13Bwg1146e (NM_029879.1,981-999).
gaaatctgccggctttaca

SEQ ID NO: 740971 - DNA, 19 bp, Mus musculus
  siRNA target sequence for D13Bwg1146e (NM_029879.1,1099-1117).
gtgggggagcgaagaattt

SEQ ID NO: 740972 - DNA, 19 bp, Mus musculus
  siRNA target sequence for D13Bwg1146e (NM_029879.1,1102-1120).
ggggagcgaagaatttgga

SEQ ID NO: 740973 - DNA, 19 bp, Mus musculus
  siRNA target sequence for D13Bwg1146e (NM_029879.1,1155-1173).
ctggaggactccttgtcat

SEQ ID NO: 740974 - DNA, 19 bp, Mus musculus
  siRNA target sequence for D13Bwg1146e (NM_029879.1,1202-1220).
gcaggtcgccacagatatt

SEQ ID NO: 740975 - DNA, 19 bp, Mus musculus
  siRNA target sequence for D13Bwg1146e (NM_029879.1,1286-1304).
ctttaccactgaaaaatca

SEQ ID NO: 740976 - DNA, 19 bp, Mus musculus
  siRNA target sequence for C030011J08Rik (NM_029898.1,137-155).
gcacctcttctgtgtttga

SEQ ID NO: 740977 - DNA, 19 bp, Mus musculus
  siRNA target sequence for C030011J08Rik (NM_029898.1,162-180).
caaaggtgactcatctgaa

SEQ ID NO: 740978 - DNA, 19 bp, Mus musculus
  siRNA target sequence for C030011J08Rik (NM_029898.1,201-219).
gtatcaggcagcatcgaat

SEQ ID NO: 740979 - DNA, 19 bp, Mus musculus
  siRNA target sequence for C030011J08Rik (NM_029898.1,212-230).
catcgaatggagatgtcaa

SEQ ID NO: 740980 - DNA, 19 bp, Mus musculus
  siRNA target sequence for C030011J08Rik (NM_029898.1,325-343).
caagtggacacagtgaaat

SEQ ID NO: 740981 - DNA, 19 bp, Mus musculus
  siRNA target sequence for C030011J08Rik (NM_029898.1,357-375).
gggtgccaacattaacaca

SEQ ID NO: 740982 - DNA, 19 bp, Mus musculus
  siRNA target sequence for C030011J08Rik (NM_029898.1,384-402).
gtatggtcgcaccagttta

SEQ ID NO: 740983 - DNA, 19 bp, Mus musculus
  siRNA target sequence for C030011J08Rik (NM_029898.1,465-483).
gcacaacatcccagataaa

SEQ ID NO: 740984 - DNA, 19 bp, Mus musculus
  siRNA target sequence for C030011J08Rik (NM_029898.1,641-659).
cccaaatgctgttgaagaa

SEQ ID NO: 740985 - DNA, 19 bp, Mus musculus
  siRNA target sequence for C030011J08Rik (NM_029898.1,800-818).
ggaagacgtgcgtccatat

SEQ ID NO: 740986 - DNA, 19 bp, Mus musculus
  siRNA target sequence for C030011J08Rik (NM_029898.1,830-848).
ccggtttcggagacatcat

SEQ ID NO: 740987 - DNA, 19 bp, Mus musculus
  siRNA target sequence for C030011J08Rik (NM_029898.1,838-856).
ggagacatcatcaacgatt

SEQ ID NO: 740988 - DNA, 19 bp, Mus musculus
  siRNA target sequence for C030011J08Rik (NM_029898.1,980-998).
gcaacctaagggacattaa

SEQ ID NO: 740989 - DNA, 19 bp, Mus musculus
  siRNA target sequence for C030011J08Rik (NM_029898.1,1012-1030).
ctggcctacgccttgtact

SEQ ID NO: 740990 - DNA, 19 bp, Mus musculus
  siRNA target sequence for C030011J08Rik (NM_029898.1,1334-1352).
ggacctcggagaattcaaa

SEQ ID NO: 740991 - DNA, 19 bp, Mus musculus
  siRNA target sequence for C030011J08Rik (NM_029898.1,1337-1355).
cctcggagaattcaaagta

SEQ ID NO: 740992 - DNA, 19 bp, Mus musculus
  siRNA target sequence for C030011J08Rik (NM_029898.1,1338-1356).
ctcggagaattcaaagtat

SEQ ID NO: 740993 - DNA, 19 bp, Mus musculus
  siRNA target sequence for C030011J08Rik (NM_029898.1,1342-1360).
gagaattcaaagtatctct

SEQ ID NO: 740994 - DNA, 19 bp, Mus musculus
  siRNA target sequence for C030011J08Rik (NM_029898.1,1389-1407).
ggggctcccaccaatcaga

SEQ ID NO: 740995 - DNA, 19 bp, Mus musculus
  siRNA target sequence for C030011J08Rik (NM_029898.1,1390-1408).
gggctcccaccaatcagaa

SEQ ID NO: 740996 - DNA, 19 bp, Mus musculus
  siRNA target sequence for C030011J08Rik (NM_029898.1,1507-1525).
gcccagcgttctcagaaaa

SEQ ID NO: 740997 - DNA, 19 bp, Mus musculus
  siRNA target sequence for C030011J08Rik (NM_029898.1,1528-1546).
cgaagcgaacaggacttat

SEQ ID NO: 740998 - DNA, 19 bp, Mus musculus
  siRNA target sequence for C030011J08Rik (NM_029898.1,1529-1547).
gaagcgaacaggacttatt

SEQ ID NO: 740999 - DNA, 19 bp, Mus musculus
  siRNA target sequence for C030011J08Rik (NM_029898.1,1532-1550).
gcgaacaggacttattaaa

SEQ ID NO: 741000 - DNA, 19 bp, Mus musculus
  siRNA target sequence for C030011J08Rik (NM_029898.1,1565-1583).
gcccggtgtcactagagaa

SEQ ID NO: 741001 - DNA, 19 bp, Mus musculus
  siRNA target sequence for C030011J08Rik (NM_029898.1,1566-1584).
cccggtgtcactagagaat

SEQ ID NO: 741002 - DNA, 19 bp, Mus musculus
  siRNA target sequence for C030011J08Rik (NM_029898.1,1814-1832).
ctctgccagaccaaaaatt

SEQ ID NO: 741003 - DNA, 19 bp, Mus musculus
  siRNA target sequence for C030011J08Rik (NM_029898.1,1863-1881).
ggtgcttccagcaattcca

SEQ ID NO: 741004 - DNA, 19 bp, Mus musculus
  siRNA target sequence for C030011J08Rik (NM_029898.1,1972-1990).
cccacccatgatgaaaact

SEQ ID NO: 741005 - DNA, 19 bp, Mus musculus
  siRNA target sequence for Akr1c21 (NM_029901.1,376-394).
ggtcactgcaaaaacttca

SEQ ID NO: 741006 - DNA, 19 bp, Mus musculus
  siRNA target sequence for Akr1c21 (NM_029901.1,379-397).
cactgcaaaaacttcagtt

SEQ ID NO: 741007 - DNA, 19 bp, Mus musculus
  siRNA target sequence for Akr1c21 (NM_029901.1,657-675).
ccttatctcaaccaaatga

SEQ ID NO: 741008 - DNA, 19 bp, Mus musculus
  siRNA target sequence for Akr1c21 (NM_029901.1,750-768).
ggatgggtagaccagaatt

SEQ ID NO: 741009 - DNA, 19 bp, Mus musculus
  siRNA target sequence for Akr1c21 (NM_029901.1,974-992).
cagaaatatgcgatacata

SEQ ID NO: 741010 - DNA, 19 bp, Mus musculus
  siRNA target sequence for Akr1c21 (NM_029901.1,1014-1032).
caccctaattggccatttt

SEQ ID NO: 741011 - DNA, 19 bp, Mus musculus
  siRNA target sequence for C030022K24Rik (NM_029912.1,419-437).
ggcaatgtcaatgaatgtt

SEQ ID NO: 741012 - DNA, 19 bp, Mus musculus
  siRNA target sequence for C030022K24Rik (NM_029912.1,454-472).
gagccacaggtgtatccta

SEQ ID NO: 741013 - DNA, 19 bp, Mus musculus
  siRNA target sequence for C030022K24Rik (NM_029912.1,456-474).
gccacaggtgtatcctaat

SEQ ID NO: 741014 - DNA, 19 bp, Mus musculus
  siRNA target sequence for C030022K24Rik (NM_029912.1,503-521).
cccctgccttccaccaata

SEQ ID NO: 741015 - DNA, 19 bp, Mus musculus
  siRNA target sequence for C030022K24Rik (NM_029912.1,527-545).
gtctgcagcacactctatt

SEQ ID NO: 741016 - DNA, 19 bp, Mus musculus
  siRNA target sequence for C030022K24Rik (NM_029912.1,610-628).
cgtccatgcccagatgtta

SEQ ID NO: 741017 - DNA, 19 bp, Mus musculus
  siRNA target sequence for C030022K24Rik (NM_029912.1,611-629).
gtccatgcccagatgttat

SEQ ID NO: 741018 - DNA, 19 bp, Mus musculus
  siRNA target sequence for C030022K24Rik (NM_029912.1,618-636).
cccagatgttatataagaa

SEQ ID NO: 741019 - DNA, 19 bp, Mus musculus
  siRNA target sequence for C030022K24Rik (NM_029912.1,620-638).
cagatgttatataagaagt

SEQ ID NO: 741020 - DNA, 19 bp, Mus musculus
  siRNA target sequence for C030022K24Rik (NM_029912.1,940-958).
gtgctcacagaagagaatt

SEQ ID NO: 741021 - DNA, 19 bp, Mus musculus
  siRNA target sequence for 5730589L02Rik (NM_029934.2,794-812).
ccgaagaatggacatatct

SEQ ID NO: 741022 - DNA, 19 bp, Mus musculus
  siRNA target sequence for 5730589L02Rik (NM_029934.2,795-813).
cgaagaatggacatatcta

SEQ ID NO: 741023 - DNA, 19 bp, Mus musculus
  siRNA target sequence for 5730589L02Rik (NM_029934.2,898-916).
ggcctggggctcaccttat

SEQ ID NO: 741024 - DNA, 19 bp, Mus musculus
  siRNA target sequence for 5730589L02Rik (NM_029934.2,899-917).
gcctggggctcaccttatt

SEQ ID NO: 741025 - DNA, 19 bp, Mus musculus
  siRNA target sequence for 5730589L02Rik (NM_029934.2,962-980).
gaacctgggccctcattca

SEQ ID NO: 741026 - DNA, 19 bp, Mus musculus
  siRNA target sequence for 5730589L02Rik (NM_029934.2,1122-1140).
ggtgagtctagctagtgaa

SEQ ID NO: 741027 - DNA, 19 bp, Mus musculus
  siRNA target sequence for 5730589L02Rik (NM_029934.2,1217-1235).
ctgaggtcccctctttgat

SEQ ID NO: 741028 - DNA, 19 bp, Mus musculus
  siRNA target sequence for 5730589L02Rik (NM_029934.2,1652-1670).
cagcttccctggagtatga

SEQ ID NO: 741029 - DNA, 19 bp, Mus musculus
  siRNA target sequence for 5730589L02Rik (NM_029934.2,1660-1678).
ctggagtatgactatgaga

SEQ ID NO: 741030 - DNA, 19 bp, Mus musculus
  siRNA target sequence for 5730589L02Rik (NM_029934.2,1763-1781).
ggtggctggcacagtacat

SEQ ID NO: 741031 - DNA, 19 bp, Mus musculus
  siRNA target sequence for 5730589L02Rik (NM_029934.2,1771-1789).
gcacagtacatctacaaga

SEQ ID NO: 741032 - DNA, 19 bp, Mus musculus
  siRNA target sequence for 5730589L02Rik (NM_029934.2,1795-1813).
cctttccgctcctacgttt

SEQ ID NO: 741033 - DNA, 19 bp, Mus musculus
  siRNA target sequence for 5730589L02Rik (NM_029934.2,1796-1814).
ctttccgctcctacgtttt

SEQ ID NO: 741034 - DNA, 19 bp, Mus musculus
  siRNA target sequence for 5730589L02Rik (NM_029934.2,1861-1879).
caccctggttactacctaa

SEQ ID NO: 741035 - DNA, 19 bp, Mus musculus
  siRNA target sequence for 5730589L02Rik (NM_029934.2,1865-1883).
ctggttactacctaagctt

SEQ ID NO: 741036 - DNA, 19 bp, Mus musculus
  siRNA target sequence for 5730589L02Rik (NM_029934.2,1907-1925).
ctgctgagggctatttgga

SEQ ID NO: 741037 - DNA, 19 bp, Mus musculus
  siRNA target sequence for 5730589L02Rik (NM_029934.2,2076-2094).
cttctgggtccactttcta

SEQ ID NO: 741038 - DNA, 19 bp, Mus musculus
  siRNA target sequence for 5730589L02Rik (NM_029934.2,2174-2192).
gcagccaagcgaaggaaaa

SEQ ID NO: 741039 - DNA, 19 bp, Mus musculus
  siRNA target sequence for 4122402O22Rik (NM_029945.1,171-189).
gcctgaaagctgactctat

SEQ ID NO: 741040 - DNA, 19 bp, Mus musculus
  siRNA target sequence for 4122402O22Rik (NM_029945.1,175-193).
gaaagctgactctataaat

SEQ ID NO: 741041 - DNA, 19 bp, Mus musculus
  siRNA target sequence for 4122402O22Rik (NM_029945.1,203-221).
gcacaacgttgccaagatt

SEQ ID NO: 741042 - DNA, 19 bp, Mus musculus
  siRNA target sequence for 4122402O22Rik (NM_029945.1,239-257).
gattttccagccaaggaat

SEQ ID NO: 741043 - DNA, 19 bp, Mus musculus
  siRNA target sequence for 4122402O22Rik (NM_029945.1,370-388).
cacagcgatggaatttcta

SEQ ID NO: 741044 - DNA, 19 bp, Mus musculus
  siRNA target sequence for 4122402O22Rik (NM_029945.1,393-411).
caagtggtccaatgatgaa

SEQ ID NO: 741045 - DNA, 19 bp, Mus musculus
  siRNA target sequence for 4122402O22Rik (NM_029945.1,401-419).
ccaatgatgaagttggttt

SEQ ID NO: 741046 - DNA, 19 bp, Mus musculus
  siRNA target sequence for 4122402O22Rik (NM_029945.1,402-420).
caatgatgaagttggttta

SEQ ID NO: 741047 - DNA, 19 bp, Mus musculus
  siRNA target sequence for 4122402O22Rik (NM_029945.1,406-424).
gatgaagttggtttataaa

SEQ ID NO: 741048 - DNA, 19 bp, Mus musculus
  siRNA target sequence for 4122402O22Rik (NM_029945.1,409-427).
gaagttggtttataaactt

SEQ ID NO: 741049 - DNA, 19 bp, Mus musculus
  siRNA target sequence for 4122402O22Rik (NM_029945.1,412-430).
gttggtttataaacttcaa

SEQ ID NO: 741050 - DNA, 19 bp, Mus musculus
  siRNA target sequence for 4122402O22Rik (NM_029945.1,425-443).
cttcaagctgaagactata

SEQ ID NO: 741051 - DNA, 19 bp, Mus musculus
  siRNA target sequence for 4122402O22Rik (NM_029945.1,475-493).
ccctgtgaaggcatccatt

SEQ ID NO: 741052 - DNA, 19 bp, Mus musculus
  siRNA target sequence for 4122402O22Rik (NM_029945.1,484-502).
ggcatccattcaagagaat

SEQ ID NO: 741053 - DNA, 19 bp, Mus musculus
  siRNA target sequence for 4122402O22Rik (NM_029945.1,516-534).
gtcctctgtaccacaacaa

SEQ ID NO: 741054 - DNA, 19 bp, Mus musculus
  siRNA target sequence for 4122402O22Rik (NM_029945.1,571-589).
cctggccctcaatccattt

SEQ ID NO: 741055 - DNA, 19 bp, Mus musculus
  siRNA target sequence for 4122402O22Rik (NM_029945.1,574-592).
ggccctcaatccatttgaa

SEQ ID NO: 741056 - DNA, 19 bp, Mus musculus
  siRNA target sequence for 4122402O22Rik (NM_029945.1,575-593).
gccctcaatccatttgaat

SEQ ID NO: 741057 - DNA, 19 bp, Mus musculus
  siRNA target sequence for 4122402O22Rik (NM_029945.1,576-594).
ccctcaatccatttgaata

SEQ ID NO: 741058 - DNA, 19 bp, Mus musculus
  siRNA target sequence for 4122402O22Rik (NM_029945.1,580-598).
caatccatttgaatactat

SEQ ID NO: 741059 - DNA, 19 bp, Mus musculus
  siRNA target sequence for 4122402O22Rik (NM_029945.1,625-643).
ctctcaaaagccaatgtct

SEQ ID NO: 741060 - DNA, 19 bp, Mus musculus
  siRNA target sequence for 4122402O22Rik (NM_029945.1,663-681).
cttcggactgtgcctattt

SEQ ID NO: 741061 - DNA, 19 bp, Mus musculus
  siRNA target sequence for 4122402O22Rik (NM_029945.1,686-704).
ctggtggataggtacctat

SEQ ID NO: 741062 - DNA, 19 bp, Mus musculus
  siRNA target sequence for 4122402O22Rik (NM_029945.1,689-707).
gtggataggtacctatcat

SEQ ID NO: 741063 - DNA, 19 bp, Mus musculus
  siRNA target sequence for 4122402O22Rik (NM_029945.1,887-905).
gagatctggcggtcagaaa

SEQ ID NO: 741064 - DNA, 19 bp, Mus musculus
  siRNA target sequence for 4122402O22Rik (NM_029945.1,914-932).
caggtttttgtggaaatgt

SEQ ID NO: 741065 - DNA, 19 bp, Mus musculus
  siRNA target sequence for 4122402O22Rik (NM_029945.1,984-1002).
ccaagttggaggttctaca

SEQ ID NO: 741066 - DNA, 19 bp, Mus musculus
  siRNA target sequence for 4122402O22Rik (NM_029945.1,1078-1096).
gtccttcacgcctactgaa

SEQ ID NO: 741067 - DNA, 19 bp, Mus musculus
  siRNA target sequence for 4122402O22Rik (NM_029945.1,1350-1368).
ggtatgcccctgagaaaca

SEQ ID NO: 741068 - DNA, 19 bp, Mus musculus
  siRNA target sequence for 4122402O22Rik (NM_029945.1,1723-1741).
gggccaagactgcaaatat

SEQ ID NO: 741069 - DNA, 19 bp, Mus musculus
  siRNA target sequence for 4122402O22Rik (NM_029945.1,1746-1764).
caatgtttggtcctgaaat

SEQ ID NO: 741070 - DNA, 19 bp, Mus musculus
  siRNA target sequence for 4122402O22Rik (NM_029945.1,1824-1842).
ccatctctgatcagtatgt

SEQ ID NO: 741071 - DNA, 19 bp, Mus musculus
  siRNA target sequence for 4122402O22Rik (NM_029945.1,1886-1904).
ggcctcacagacacaaata

SEQ ID NO: 741072 - DNA, 19 bp, Mus musculus
  siRNA target sequence for 4122402O22Rik (NM_029945.1,2077-2095).
gcagctcccagattgcatt

SEQ ID NO: 741073 - DNA, 19 bp, Mus musculus
  siRNA target sequence for 4122402O22Rik (NM_029945.1,2102-2120).
gaagaaggactcatcctta

SEQ ID NO: 741074 - DNA, 19 bp, Mus musculus
  siRNA target sequence for 4122402O22Rik (NM_029945.1,2156-2174).
cgaaggttcgagattgagt

SEQ ID NO: 741075 - DNA, 19 bp, Mus musculus
  siRNA target sequence for 4122402O22Rik (NM_029945.1,2157-2175).
gaaggttcgagattgagta

SEQ ID NO: 741076 - DNA, 19 bp, Mus musculus
  siRNA target sequence for 4122402O22Rik (NM_029945.1,2253-2271).
ctgccatcaaccgtagatt

SEQ ID NO: 741077 - DNA, 19 bp, Mus musculus
  siRNA target sequence for 4122402O22Rik (NM_029945.1,2257-2275).
catcaaccgtagatttgca

SEQ ID NO: 741078 - DNA, 19 bp, Mus musculus
  siRNA target sequence for 4122402O22Rik (NM_029945.1,2540-2558).
gtcctctatgccatagcta

SEQ ID NO: 741079 - DNA, 19 bp, Mus musculus
  siRNA target sequence for 4930565F05Rik (NM_029947.1,208-226).
gacatttttaccagtgtat

SEQ ID NO: 741080 - DNA, 19 bp, Mus musculus
  siRNA target sequence for 4930565F05Rik (NM_029947.1,324-342).
cacggacaagagaacagta

SEQ ID NO: 741081 - DNA, 19 bp, Mus musculus
  siRNA target sequence for 4930565F05Rik (NM_029947.1,439-457).
cagaatctcgaagcttata

SEQ ID NO: 741082 - DNA, 19 bp, Mus musculus
  siRNA target sequence for 4930565F05Rik (NM_029947.1,441-459).
gaatctcgaagcttatata

SEQ ID NO: 741083 - DNA, 19 bp, Mus musculus
  siRNA target sequence for 4930565F05Rik (NM_029947.1,445-463).
ctcgaagcttatataaaaa

SEQ ID NO: 741084 - DNA, 19 bp, Mus musculus
  siRNA target sequence for 4930565F05Rik (NM_029947.1,447-465).
cgaagcttatataaaaaat

SEQ ID NO: 741085 - DNA, 19 bp, Mus musculus
  siRNA target sequence for 4930565F05Rik (NM_029947.1,561-579).
cccgtctagagctcacaaa

SEQ ID NO: 741086 - DNA, 19 bp, Mus musculus
  siRNA target sequence for 4930565F05Rik (NM_029947.1,562-580).
ccgtctagagctcacaaaa

SEQ ID NO: 741087 - DNA, 19 bp, Mus musculus
  siRNA target sequence for 4930565F05Rik (NM_029947.1,563-581).
cgtctagagctcacaaaat

SEQ ID NO: 741088 - DNA, 19 bp, Mus musculus
  siRNA target sequence for 4930565F05Rik (NM_029947.1,585-603).
cgggtcgtctccttacaca

SEQ ID NO: 741089 - DNA, 19 bp, Mus musculus
  siRNA target sequence for 4930565F05Rik (NM_029947.1,586-604).
gggtcgtctccttacacat

SEQ ID NO: 741090 - DNA, 19 bp, Mus musculus
  siRNA target sequence for 4930565F05Rik (NM_029947.1,617-635).
gccaacgtttccagtttga

SEQ ID NO: 741091 - DNA, 19 bp, Mus musculus
  siRNA target sequence for 4930565F05Rik (NM_029947.1,619-637).
caacgtttccagtttgagt

SEQ ID NO: 741092 - DNA, 19 bp, Mus musculus
  siRNA target sequence for 4930565F05Rik (NM_029947.1,937-955).
gctcgggaactggaaaact

SEQ ID NO: 741093 - DNA, 19 bp, Mus musculus
  siRNA target sequence for 4930565F05Rik (NM_029947.1,2048-2066).
ccgacctggtgtaccatat

SEQ ID NO: 741094 - DNA, 19 bp, Mus musculus
  siRNA target sequence for 4930565F05Rik (NM_029947.1,2069-2087).
ggtctcaccacaaaaagga

SEQ ID NO: 741095 - DNA, 19 bp, Mus musculus
  siRNA target sequence for 1810020H02Rik (NM_029949.1,73-91).
gcagctttccggaatacga

SEQ ID NO: 741096 - DNA, 19 bp, Mus musculus
  siRNA target sequence for 1810020H02Rik (NM_029949.1,297-315).
gtcgtgtgcggccttgata

SEQ ID NO: 741097 - DNA, 19 bp, Mus musculus
  siRNA target sequence for 1810020H02Rik (NM_029949.1,325-343).
gcctcggggaagatgaaga

SEQ ID NO: 741098 - DNA, 19 bp, Mus musculus
  siRNA target sequence for 1810020H02Rik (NM_029949.1,435-453).
cgcgcctgtagacaagaaa

SEQ ID NO: 741099 - DNA, 19 bp, Mus musculus
  siRNA target sequence for 1810020H02Rik (NM_029949.1,436-454).
gcgcctgtagacaagaaat

SEQ ID NO: 741100 - DNA, 19 bp, Mus musculus
  siRNA target sequence for 1810020H02Rik (NM_029949.1,438-456).
gcctgtagacaagaaatat

SEQ ID NO: 741101 - DNA, 19 bp, Mus musculus
  siRNA target sequence for 1810020H02Rik (NM_029949.1,439-457).
cctgtagacaagaaatatt

SEQ ID NO: 741102 - DNA, 19 bp, Mus musculus
  siRNA target sequence for 1810020H02Rik (NM_029949.1,522-540).
gaaggagagtgtatcctat

SEQ ID NO: 741103 - DNA, 19 bp, Mus musculus
  siRNA target sequence for 1810020H02Rik (NM_029949.1,627-645).
ctcacagaactgagagatt

SEQ ID NO: 741104 - DNA, 19 bp, Mus musculus
  siRNA target sequence for 1810020H02Rik (NM_029949.1,669-687).
cagatcggtggagaattca

SEQ ID NO: 741105 - DNA, 19 bp, Mus musculus
  siRNA target sequence for 1810020H02Rik (NM_029949.1,729-747).
ctctacaagtcggcttttt

SEQ ID NO: 741106 - DNA, 19 bp, Mus musculus
  siRNA target sequence for 1810020H02Rik (NM_029949.1,862-880).
ctgctagaatggaagattt

SEQ ID NO: 741107 - DNA, 19 bp, Mus musculus
  siRNA target sequence for 1810020H02Rik (NM_029949.1,864-882).
gctagaatggaagatttca

SEQ ID NO: 741108 - DNA, 19 bp, Mus musculus
  siRNA target sequence for 1810020H02Rik (NM_029949.1,883-901).
catttaatgacttgcatat

SEQ ID NO: 741109 - DNA, 19 bp, Mus musculus
  siRNA target sequence for 1810020H02Rik (NM_029949.1,909-927).
ggctttccttacttatact

SEQ ID NO: 741110 - DNA, 19 bp, Mus musculus
  siRNA target sequence for 1810020H02Rik (NM_029949.1,943-961).
gtgagcatgttgttgtcat

SEQ ID NO: 741111 - DNA, 19 bp, Mus musculus
  siRNA target sequence for 1810020H02Rik (NM_029949.1,987-1005).
gacgactgcttggatagaa

SEQ ID NO: 741112 - DNA, 19 bp, Mus musculus
  siRNA target sequence for 1810020H02Rik (NM_029949.1,989-1007).
cgactgcttggatagaaca

SEQ ID NO: 741113 - DNA, 19 bp, Mus musculus
  siRNA target sequence for 1810020H02Rik (NM_029949.1,1037-1055).
gctgtggaccagaaaatgt

SEQ ID NO: 741114 - DNA, 19 bp, Mus musculus
  siRNA target sequence for 1810020H02Rik (NM_029949.1,1081-1099).
gatgggtgacgaacaatga

SEQ ID NO: 741115 - DNA, 19 bp, Mus musculus
  siRNA target sequence for 1810020H02Rik (NM_029949.1,1175-1193).
caaactaggggaattcctt

SEQ ID NO: 741116 - DNA, 19 bp, Mus musculus
  siRNA target sequence for 1810020H02Rik (NM_029949.1,1190-1208).
ccttgcttatccttatgtt

SEQ ID NO: 741117 - DNA, 19 bp, Mus musculus
  siRNA target sequence for 1810020H02Rik (NM_029949.1,1206-1224).
gttgacccaggaaccttta

SEQ ID NO: 741118 - DNA, 19 bp, Mus musculus
  siRNA target sequence for 1810020H02Rik (NM_029949.1,1209-1227).
gacccaggaacctttaatt

SEQ ID NO: 741119 - DNA, 19 bp, Mus musculus
  siRNA target sequence for 4633402D15Rik (NM_029955.1,461-479).
cctgtcgtgcagaatttga

SEQ ID NO: 741120 - DNA, 19 bp, Mus musculus
  siRNA target sequence for 4633402D15Rik (NM_029955.1,478-496).
gagtccttgcgatgattct

SEQ ID NO: 741121 - DNA, 19 bp, Mus musculus
  siRNA target sequence for 4633402D15Rik (NM_029955.1,487-505).
cgatgattctggacgtaaa

SEQ ID NO: 741122 - DNA, 19 bp, Mus musculus
  siRNA target sequence for 4633402D15Rik (NM_029955.1,491-509).
gattctggacgtaaagcat

SEQ ID NO: 741123 - DNA, 19 bp, Mus musculus
  siRNA target sequence for Mmab (NM_029956.2,205-223).
ggagacaaagggttttcca

SEQ ID NO: 741124 - DNA, 19 bp, Mus musculus
  siRNA target sequence for Mmab (NM_029956.2,243-261).
gagacctaaagatgatcaa

SEQ ID NO: 741125 - DNA, 19 bp, Mus musculus
  siRNA target sequence for Mmab (NM_029956.2,248-266).
ctaaagatgatcaagtatt

SEQ ID NO: 741126 - DNA, 19 bp, Mus musculus
  siRNA target sequence for Mmab (NM_029956.2,481-499).
cggtggattgacaagtact

SEQ ID NO: 741127 - DNA, 19 bp, Mus musculus
  siRNA target sequence for Mmab (NM_029956.2,637-655).
gcaaacgtggcgaagttct

SEQ ID NO: 741128 - DNA, 19 bp, Mus musculus
  siRNA target sequence for Mmab (NM_029956.2,638-656).
caaacgtggcgaagttctt

SEQ ID NO: 741129 - DNA, 19 bp, Mus musculus
  siRNA target sequence for Mmab (NM_029956.2,643-661).
gtggcgaagttcttaaaca

SEQ ID NO: 741130 - DNA, 19 bp, Mus musculus
  siRNA target sequence for Mmab (NM_029956.2,681-699).
cactgtagccagatatgca

SEQ ID NO: 741131 - DNA, 19 bp, Mus musculus
  siRNA target sequence for A330104H05Rik (NM_029972.1,193-211).
caacagcctagcagtcaaa

SEQ ID NO: 741132 - DNA, 19 bp, Mus musculus
  siRNA target sequence for A330104H05Rik (NM_029972.1,238-256).
gagacccaggcatactaca

SEQ ID NO: 741133 - DNA, 19 bp, Mus musculus
  siRNA target sequence for A330104H05Rik (NM_029972.1,258-276).
ggttgaacccagtcttgaa

SEQ ID NO: 741134 - DNA, 19 bp, Mus musculus
  siRNA target sequence for A330104H05Rik (NM_029972.1,335-353).
ctaaagggcctgaagatga

SEQ ID NO: 741135 - DNA, 19 bp, Mus musculus
  siRNA target sequence for A330104H05Rik (NM_029972.1,556-574).
gatgcgagtacaactgaaa

SEQ ID NO: 741136 - DNA, 19 bp, Mus musculus
  siRNA target sequence for A330104H05Rik (NM_029972.1,560-578).
cgagtacaactgaaatcga

SEQ ID NO: 741137 - DNA, 19 bp, Mus musculus
  siRNA target sequence for A330104H05Rik (NM_029972.1,561-579).
gagtacaactgaaatcgaa

SEQ ID NO: 741138 - DNA, 19 bp, Mus musculus
  siRNA target sequence for A330104H05Rik (NM_029972.1,599-617).
ctcgtccagttgacatctt

SEQ ID NO: 741139 - DNA, 19 bp, Mus musculus
  siRNA target sequence for A330104H05Rik (NM_029972.1,604-622).
ccagttgacatcttgcatt

SEQ ID NO: 741140 - DNA, 19 bp, Mus musculus
  siRNA target sequence for A330104H05Rik (NM_029972.1,607-625).
gttgacatcttgcattcta

SEQ ID NO: 741141 - DNA, 19 bp, Mus musculus
  siRNA target sequence for A330104H05Rik (NM_029972.1,718-736).
gttcgagtaatagaattta

SEQ ID NO: 741142 - DNA, 19 bp, Mus musculus
  siRNA target sequence for D11Ertd497e (NM_029976.2,81-99).
gcggtggagaagctagttt

SEQ ID NO: 741143 - DNA, 19 bp, Mus musculus
  siRNA target sequence for D11Ertd497e (NM_029976.2,284-302).
cctgggttgcagttataat

SEQ ID NO: 741144 - DNA, 19 bp, Mus musculus
  siRNA target sequence for D11Ertd497e (NM_029976.2,285-303).
ctgggttgcagttataata

SEQ ID NO: 741145 - DNA, 19 bp, Mus musculus
  siRNA target sequence for D11Ertd497e (NM_029976.2,287-305).
gggttgcagttataataaa

SEQ ID NO: 741146 - DNA, 19 bp, Mus musculus
  siRNA target sequence for D11Ertd497e (NM_029976.2,289-307).
gttgcagttataataaaga

SEQ ID NO: 741147 - DNA, 19 bp, Mus musculus
  siRNA target sequence for D11Ertd497e (NM_029976.2,370-388).
caaccagaagcgaactaat

SEQ ID NO: 741148 - DNA, 19 bp, Mus musculus
  siRNA target sequence for D11Ertd497e (NM_029976.2,374-392).
cagaagcgaactaatgaga

SEQ ID NO: 741149 - DNA, 19 bp, Mus musculus
  siRNA target sequence for D11Ertd497e (NM_029976.2,380-398).
cgaactaatgagaaagcat

SEQ ID NO: 741150 - DNA, 19 bp, Mus musculus
  siRNA target sequence for D11Ertd497e (NM_029976.2,384-402).
ctaatgagaaagcatcaaa

SEQ ID NO: 741151 - DNA, 19 bp, Mus musculus
  siRNA target sequence for A930011F22Rik (NM_029985.1,210-228).
ggatccagggcccatctat

SEQ ID NO: 741152 - DNA, 19 bp, Mus musculus
  siRNA target sequence for A930011F22Rik (NM_029985.1,221-239).
ccatctatgttcgagaaaa

SEQ ID NO: 741153 - DNA, 19 bp, Mus musculus
  siRNA target sequence for A930011F22Rik (NM_029985.1,376-394).
gagaagaccgatcacttta

SEQ ID NO: 741154 - DNA, 19 bp, Mus musculus
  siRNA target sequence for A930011F22Rik (NM_029985.1,414-432).
ggggaatctgcgatactct

SEQ ID NO: 741155 - DNA, 19 bp, Mus musculus
  siRNA target sequence for A930011F22Rik (NM_029985.1,465-483).
catctccgacaatgttgat

SEQ ID NO: 741156 - DNA, 19 bp, Mus musculus
  siRNA target sequence for A930011F22Rik (NM_029985.1,470-488).
ccgacaatgttgatcacat

SEQ ID NO: 741157 - DNA, 19 bp, Mus musculus
  siRNA target sequence for A930011F22Rik (NM_029985.1,471-489).
cgacaatgttgatcacatt

SEQ ID NO: 741158 - DNA, 19 bp, Mus musculus
  siRNA target sequence for A930011F22Rik (NM_029985.1,578-596).
ggctcagggcgttacagaa

SEQ ID NO: 741159 - DNA, 19 bp, Mus musculus
  siRNA target sequence for A930011F22Rik (NM_029985.1,638-656).
gcttgcgaaacaggtattt

SEQ ID NO: 741160 - DNA, 19 bp, Mus musculus
  siRNA target sequence for A930011F22Rik (NM_029985.1,790-808).
cagctccacttgaaggata

SEQ ID NO: 741161 - DNA, 19 bp, Mus musculus
  siRNA target sequence for A930011F22Rik (NM_029985.1,792-810).
gctccacttgaaggataat

SEQ ID NO: 741162 - DNA, 19 bp, Mus musculus
  siRNA target sequence for A930011F22Rik (NM_029985.1,793-811).
ctccacttgaaggataatt

SEQ ID NO: 741163 - DNA, 19 bp, Mus musculus
  siRNA target sequence for A930011F22Rik (NM_029985.1,796-814).
cacttgaaggataattgct

SEQ ID NO: 741164 - DNA, 19 bp, Mus musculus
  siRNA target sequence for A930011F22Rik (NM_029985.1,798-816).
cttgaaggataattgctta

SEQ ID NO: 741165 - DNA, 19 bp, Mus musculus
  siRNA target sequence for A930011F22Rik (NM_029985.1,801-819).
gaaggataattgcttatct

SEQ ID NO: 741166 - DNA, 19 bp, Mus musculus
  siRNA target sequence for A930011F22Rik (NM_029985.1,804-822).
ggataattgcttatctgat

SEQ ID NO: 741167 - DNA, 19 bp, Mus musculus
  siRNA target sequence for A930011F22Rik (NM_029985.1,823-841).
gcaggcattcggaaaatga

SEQ ID NO: 741168 - DNA, 19 bp, Mus musculus
  siRNA target sequence for A930011F22Rik (NM_029985.1,886-904).
ctgttagacctgtcttgta

SEQ ID NO: 741169 - DNA, 19 bp, Mus musculus
  siRNA target sequence for A930011F22Rik (NM_029985.1,897-915).
gtcttgtaaccctgagata

SEQ ID NO: 741170 - DNA, 19 bp, Mus musculus
  siRNA target sequence for A930011F22Rik (NM_029985.1,912-930).
gataacagacgctggaatt

SEQ ID NO: 741171 - DNA, 19 bp, Mus musculus
  siRNA target sequence for A930011F22Rik (NM_029985.1,980-998).
caggactaaaggacatcaa

SEQ ID NO: 741172 - DNA, 19 bp, Mus musculus
  siRNA target sequence for A930011F22Rik (NM_029985.1,1011-1029).
caagctccgggcaaacata

SEQ ID NO: 741173 - DNA, 19 bp, Mus musculus
  siRNA target sequence for A930011F22Rik (NM_029985.1,1022-1040).
caaacataggccttgttca

SEQ ID NO: 741174 - DNA, 19 bp, Mus musculus
  siRNA target sequence for A930011F22Rik (NM_029985.1,1060-1078).
gaatttgatcatagtaact

SEQ ID NO: 741175 - DNA, 19 bp, Mus musculus
  siRNA target sequence for A930011F22Rik (NM_029985.1,1066-1084).
gatcatagtaactgcaaaa

SEQ ID NO: 741176 - DNA, 19 bp, Mus musculus
  siRNA target sequence for A930011F22Rik (NM_029985.1,1140-1158).
cgtgcggcagcggaaagat

SEQ ID NO: 741177 - DNA, 19 bp, Mus musculus
  siRNA target sequence for A930011F22Rik (NM_029985.1,1198-1216).
cgagctcgcacagaagtta

SEQ ID NO: 741178 - DNA, 19 bp, Mus musculus
  siRNA target sequence for A930011F22Rik (NM_029985.1,1303-1321).
ccactgttgagccaagaat

SEQ ID NO: 741179 - DNA, 19 bp, Mus musculus
  siRNA target sequence for A930011F22Rik (NM_029985.1,1306-1324).
ctgttgagccaagaatcaa

SEQ ID NO: 741180 - DNA, 19 bp, Mus musculus
  siRNA target sequence for A930011F22Rik (NM_029985.1,1417-1435).
gattgggatttgctcaatt

SEQ ID NO: 741181 - DNA, 19 bp, Mus musculus
  siRNA target sequence for Rpe65 (NM_029987.1,22-40).
cctgctggtggctacaaga

SEQ ID NO: 741182 - DNA, 19 bp, Mus musculus
  siRNA target sequence for Rpe65 (NM_029987.1,23-41).
ctgctggtggctacaagaa

SEQ ID NO: 741183 - DNA, 19 bp, Mus musculus
  siRNA target sequence for Rpe65 (NM_029987.1,28-46).
ggtggctacaagaaactat

SEQ ID NO: 741184 - DNA, 19 bp, Mus musculus
  siRNA target sequence for Rpe65 (NM_029987.1,29-47).
gtggctacaagaaactatt

SEQ ID NO: 741185 - DNA, 19 bp, Mus musculus
  siRNA target sequence for Rpe65 (NM_029987.1,137-155).
ggccagggctctttgaagt

SEQ ID NO: 741186 - DNA, 19 bp, Mus musculus
  siRNA target sequence for Rpe65 (NM_029987.1,158-176).
gatctgagcctttctatca

SEQ ID NO: 741187 - DNA, 19 bp, Mus musculus
  siRNA target sequence for Rpe65 (NM_029987.1,196-214).
cttttgcacaagtttgact

SEQ ID NO: 741188 - DNA, 19 bp, Mus musculus
  siRNA target sequence for Rpe65 (NM_029987.1,229-247).
gtcacataccacagaagat

SEQ ID NO: 741189 - DNA, 19 bp, Mus musculus
  siRNA target sequence for Rpe65 (NM_029987.1,233-251).
cataccacagaagattcat

SEQ ID NO: 741190 - DNA, 19 bp, Mus musculus
  siRNA target sequence for Rpe65 (NM_029987.1,252-270).
ccgcactgatgcttatgtt

SEQ ID NO: 741191 - DNA, 19 bp, Mus musculus
  siRNA target sequence for Rpe65 (NM_029987.1,388-406).
gacaatgcccttgtaaata

SEQ ID NO: 741192 - DNA, 19 bp, Mus musculus
  siRNA target sequence for Rpe65 (NM_029987.1,418-436).
ggagaagattactatgcat

SEQ ID NO: 741193 - DNA, 19 bp, Mus musculus
  siRNA target sequence for Rpe65 (NM_029987.1,442-460).
gagaccaactttatcacaa

SEQ ID NO: 741194 - DNA, 19 bp, Mus musculus
  siRNA target sequence for Rpe65 (NM_029987.1,476-494).
ccttggagacaattaagca

SEQ ID NO: 741195 - DNA, 19 bp, Mus musculus
  siRNA target sequence for Rpe65 (NM_029987.1,485-503).
caattaagcaggttgatct

SEQ ID NO: 741196 - DNA, 19 bp, Mus musculus
  siRNA target sequence for Rpe65 (NM_029987.1,495-513).
ggttgatctttgcaactat

SEQ ID NO: 741197 - DNA, 19 bp, Mus musculus
  siRNA target sequence for Rpe65 (NM_029987.1,533-551).
ctgctcatccacatattga

SEQ ID NO: 741198 - DNA, 19 bp, Mus musculus
  siRNA target sequence for Rpe65 (NM_029987.1,535-553).
gctcatccacatattgaaa

SEQ ID NO: 741199 - DNA, 19 bp, Mus musculus
  siRNA target sequence for Rpe65 (NM_029987.1,602-620).
cagttgcctacaacattat

SEQ ID NO: 741200 - DNA, 19 bp, Mus musculus
  siRNA target sequence for Rpe65 (NM_029987.1,604-622).
gttgcctacaacattatta

SEQ ID NO: 741201 - DNA, 19 bp, Mus musculus
  siRNA target sequence for Rpe65 (NM_029987.1,689-707).
cctgcagtgatcgtttcaa

SEQ ID NO: 741202 - DNA, 19 bp, Mus musculus
  siRNA target sequence for Rpe65 (NM_029987.1,701-719).
gtttcaagccatcttatgt

SEQ ID NO: 741203 - DNA, 19 bp, Mus musculus
  siRNA target sequence for Rpe65 (NM_029987.1,730-748).
ggtctgactcccaactata

SEQ ID NO: 741204 - DNA, 19 bp, Mus musculus
  siRNA target sequence for Rpe65 (NM_029987.1,731-749).
gtctgactcccaactatat

SEQ ID NO: 741205 - DNA, 19 bp, Mus musculus
  siRNA target sequence for Rpe65 (NM_029987.1,737-755).
ctcccaactatatcgtttt

SEQ ID NO: 741206 - DNA, 19 bp, Mus musculus
  siRNA target sequence for Rpe65 (NM_029987.1,740-758).
ccaactatatcgtttttgt

SEQ ID NO: 741207 - DNA, 19 bp, Mus musculus
  siRNA target sequence for Rpe65 (NM_029987.1,760-778).
gagactccagtcaaaatta

SEQ ID NO: 741208 - DNA, 19 bp, Mus musculus
  siRNA target sequence for Rpe65 (NM_029987.1,818-836).
ccaactacatggactgttt

SEQ ID NO: 741209 - DNA, 19 bp, Mus musculus
  siRNA target sequence for Rpe65 (NM_029987.1,863-881).
ggcttcatgttgctgataa

SEQ ID NO: 741210 - DNA, 19 bp, Mus musculus
  siRNA target sequence for Rpe65 (NM_029987.1,914-932).
ggacttcccctttcaatct

SEQ ID NO: 741211 - DNA, 19 bp, Mus musculus
  siRNA target sequence for Rpe65 (NM_029987.1,1040-1058).
gtgagaattgggaagaagt

SEQ ID NO: 741212 - DNA, 19 bp, Mus musculus
  siRNA target sequence for Rpe65 (NM_029987.1,1086-1104).
gcctgaagtcaggagatat

SEQ ID NO: 741213 - DNA, 19 bp, Mus musculus
  siRNA target sequence for Rpe65 (NM_029987.1,1097-1115).
ggagatatgtacttccttt

SEQ ID NO: 741214 - DNA, 19 bp, Mus musculus
  siRNA target sequence for Rpe65 (NM_029987.1,1108-1126).
cttcctttgacaattgaca

SEQ ID NO: 741215 - DNA, 19 bp, Mus musculus
  siRNA target sequence for Rpe65 (NM_029987.1,1128-1146).
ggtcgacacaggcagaaat

SEQ ID NO: 741216 - DNA, 19 bp, Mus musculus
  siRNA target sequence for Rpe65 (NM_029987.1,1129-1147).
gtcgacacaggcagaaatt

SEQ ID NO: 741217 - DNA, 19 bp, Mus musculus
  siRNA target sequence for Rpe65 (NM_029987.1,1152-1170).
cacactgccccatacaact

SEQ ID NO: 741218 - DNA, 19 bp, Mus musculus
  siRNA target sequence for Rpe65 (NM_029987.1,1234-1252).
cctcgtcaagcctttgaat

SEQ ID NO: 741219 - DNA, 19 bp, Mus musculus
  siRNA target sequence for Rpe65 (NM_029987.1,1235-1253).
ctcgtcaagcctttgaatt

SEQ ID NO: 741220 - DNA, 19 bp, Mus musculus
  siRNA target sequence for Rpe65 (NM_029987.1,1258-1276).
caaatcaattaccagaaat

SEQ ID NO: 741221 - DNA, 19 bp, Mus musculus
  siRNA target sequence for Rpe65 (NM_029987.1,1280-1298).
gagggaaaccttatactta

SEQ ID NO: 741222 - DNA, 19 bp, Mus musculus
  siRNA target sequence for Rpe65 (NM_029987.1,1284-1302).
gaaaccttatacttatgca

SEQ ID NO: 741223 - DNA, 19 bp, Mus musculus
  siRNA target sequence for Rpe65 (NM_029987.1,1306-1324).
ggacttgggttgaatcact

SEQ ID NO: 741224 - DNA, 19 bp, Mus musculus
  siRNA target sequence for Rpe65 (NM_029987.1,1307-1325).
gacttgggttgaatcactt

SEQ ID NO: 741225 - DNA, 19 bp, Mus musculus
  siRNA target sequence for Rpe65 (NM_029987.1,1350-1368).
gaacgtcaaaactaaagaa

SEQ ID NO: 741226 - DNA, 19 bp, Mus musculus
  siRNA target sequence for Rpe65 (NM_029987.1,1499-1517).
catatctcctggttctgaa

SEQ ID NO: 741227 - DNA, 19 bp, Mus musculus
  siRNA target sequence for Rpe65 (NM_029987.1,1510-1528).
gttctgaatgccaaagact

SEQ ID NO: 741228 - DNA, 19 bp, Mus musculus
  siRNA target sequence for Rpe65 (NM_029987.1,1546-1564).
gctgaagtggagactaata

SEQ ID NO: 741229 - DNA, 19 bp, Mus musculus
  siRNA target sequence for Rpe65 (NM_029987.1,1547-1565).
ctgaagtggagactaatat

SEQ ID NO: 741230 - DNA, 19 bp, Mus musculus
  siRNA target sequence for Rpe65 (NM_029987.1,1579-1597).
catggactgttcaaaagat

SEQ ID NO: 741231 - DNA, 19 bp, Mus musculus
  siRNA target sequence for A930031F18Rik (NM_029992.1,97-115).
cccacgttgccctcttatt

SEQ ID NO: 741232 - DNA, 19 bp, Mus musculus
  siRNA target sequence for A930031F18Rik (NM_029992.1,190-208).
cagaacagtcgctatttca

SEQ ID NO: 741233 - DNA, 19 bp, Mus musculus
  siRNA target sequence for A930031F18Rik (NM_029992.1,483-501).
gattgctgaacgactttta

SEQ ID NO: 741234 - DNA, 19 bp, Mus musculus
  siRNA target sequence for A930031F18Rik (NM_029992.1,488-506).
ctgaacgacttttatatga

SEQ ID NO: 741235 - DNA, 19 bp, Mus musculus
  siRNA target sequence for A930031F18Rik (NM_029992.1,558-576).
caagaagcacgtgataaat

SEQ ID NO: 741236 - DNA, 19 bp, Mus musculus
  siRNA target sequence for A930031F18Rik (NM_029992.1,561-579).
gaagcacgtgataaattct

SEQ ID NO: 741237 - DNA, 19 bp, Mus musculus
  siRNA target sequence for A930031F18Rik (NM_029992.1,774-792).
ggagatggaggcaaccaaa

SEQ ID NO: 741238 - DNA, 19 bp, Mus musculus
  siRNA target sequence for 6720416L16Rik (NM_029999.3,250-268).
cactgctctgactatctga

SEQ ID NO: 741239 - DNA, 19 bp, Mus musculus
  siRNA target sequence for 6720416L16Rik (NM_029999.3,335-353).
gcaaggatggcctttccta

SEQ ID NO: 741240 - DNA, 19 bp, Mus musculus
  siRNA target sequence for 6720416L16Rik (NM_029999.3,340-358).
gatggcctttcctatcaga

SEQ ID NO: 741241 - DNA, 19 bp, Mus musculus
  siRNA target sequence for 6720416L16Rik (NM_029999.3,365-383).
cggacccatcagactttga

SEQ ID NO: 741242 - DNA, 19 bp, Mus musculus
  siRNA target sequence for 6720416L16Rik (NM_029999.3,512-530).
gtgaagagacaacaaatga

SEQ ID NO: 741243 - DNA, 19 bp, Mus musculus
  siRNA target sequence for 6720467O09Rik (NM_030000.1,209-227).
gatgccgctgtcatctcat

SEQ ID NO: 741244 - DNA, 19 bp, Mus musculus
  siRNA target sequence for 6720467O09Rik (NM_030000.1,212-230).
gccgctgtcatctcatttt

SEQ ID NO: 741245 - DNA, 19 bp, Mus musculus
  siRNA target sequence for 6720467O09Rik (NM_030000.1,269-287).
gtccctttcacctttaatt

SEQ ID NO: 741246 - DNA, 19 bp, Mus musculus
  siRNA target sequence for 6720467O09Rik (NM_030000.1,402-420).
gtaggagtccggtatatta

SEQ ID NO: 741247 - DNA, 19 bp, Mus musculus
  siRNA target sequence for 6720467O09Rik (NM_030000.1,406-424).
gagtccggtatattacaga

SEQ ID NO: 741248 - DNA, 19 bp, Mus musculus
  siRNA target sequence for 6720467O09Rik (NM_030000.1,421-439).
cagaagccctcatcaaaaa

SEQ ID NO: 741249 - DNA, 19 bp, Mus musculus
  siRNA target sequence for 6720467O09Rik (NM_030000.1,426-444).
gccctcatcaaaaaactca

SEQ ID NO: 741250 - DNA, 19 bp, Mus musculus
  siRNA target sequence for 6720467O09Rik (NM_030000.1,467-485).
ggtgaagtctctgaatctt

SEQ ID NO: 741251 - DNA, 19 bp, Mus musculus
  siRNA target sequence for 6720467O09Rik (NM_030000.1,498-516).
gatggcggcaagaaattta

SEQ ID NO: 741252 - DNA, 19 bp, Mus musculus
  siRNA target sequence for 6720467O09Rik (NM_030000.1,501-519).
ggcggcaagaaatttaggt

SEQ ID NO: 741253 - DNA, 19 bp, Mus musculus
  siRNA target sequence for 6720467O09Rik (NM_030000.1,502-520).
gcggcaagaaatttaggta

SEQ ID NO: 741254 - DNA, 19 bp, Mus musculus
  siRNA target sequence for 6720467O09Rik (NM_030000.1,517-535).
ggtacatcgaaaatttgga

SEQ ID NO: 741255 - DNA, 19 bp, Mus musculus
  siRNA target sequence for 6720467O09Rik (NM_030000.1,518-536).
gtacatcgaaaatttggaa

SEQ ID NO: 741256 - DNA, 19 bp, Mus musculus
  siRNA target sequence for 6720467O09Rik (NM_030000.1,543-561).
gttaaacttgaagtactaa

SEQ ID NO: 741257 - DNA, 19 bp, Mus musculus
  siRNA target sequence for 6720467O09Rik (NM_030000.1,555-573).
gtactaaatctcagctata

SEQ ID NO: 741258 - DNA, 19 bp, Mus musculus
  siRNA target sequence for 6720467O09Rik (NM_030000.1,568-586).
gctataatctaatagtgaa

SEQ ID NO: 741259 - DNA, 19 bp, Mus musculus
  siRNA target sequence for 6720467O09Rik (NM_030000.1,599-617).
ggacaagctgttacgatta

SEQ ID NO: 741260 - DNA, 19 bp, Mus musculus
  siRNA target sequence for 6720467O09Rik (NM_030000.1,602-620).
caagctgttacgattacgt

SEQ ID NO: 741261 - DNA, 19 bp, Mus musculus
  siRNA target sequence for 6720467O09Rik (NM_030000.1,618-636).
cgtgaactcaacttatcat

SEQ ID NO: 741262 - DNA, 19 bp, Mus musculus
  siRNA target sequence for 6720467O09Rik (NM_030000.1,619-637).
gtgaactcaacttatcata

SEQ ID NO: 741263 - DNA, 19 bp, Mus musculus
  siRNA target sequence for 6720467O09Rik (NM_030000.1,621-639).
gaactcaacttatcatata

SEQ ID NO: 741264 - DNA, 19 bp, Mus musculus
  siRNA target sequence for 6720467O09Rik (NM_030000.1,660-678).
ggactagaaaacatgtgta

SEQ ID NO: 741265 - DNA, 19 bp, Mus musculus
  siRNA target sequence for 6720467O09Rik (NM_030000.1,661-679).
gactagaaaacatgtgtaa

SEQ ID NO: 741266 - DNA, 19 bp, Mus musculus
  siRNA target sequence for 6720467O09Rik (NM_030000.1,689-707).
gctaaacctagcaggtaat

SEQ ID NO: 741267 - DNA, 19 bp, Mus musculus
  siRNA target sequence for 6720467O09Rik (NM_030000.1,703-721).
gtaatgaaatcgagcatat

SEQ ID NO: 741268 - DNA, 19 bp, Mus musculus
  siRNA target sequence for 6720467O09Rik (NM_030000.1,740-758).
gaaattgaaatctttacga

SEQ ID NO: 741269 - DNA, 19 bp, Mus musculus
  siRNA target sequence for 6720467O09Rik (NM_030000.1,751-769).
ctttacgagtcctcaatct

SEQ ID NO: 741270 - DNA, 19 bp, Mus musculus
  siRNA target sequence for 6720467O09Rik (NM_030000.1,790-808).
cgctccaggatgtaagcaa

SEQ ID NO: 741271 - DNA, 19 bp, Mus musculus
  siRNA target sequence for 6720467O09Rik (NM_030000.1,806-824).
caagttgaagccacttcaa

SEQ ID NO: 741272 - DNA, 19 bp, Mus musculus
  siRNA target sequence for 6720467O09Rik (NM_030000.1,815-833).
gccacttcaagatttgact

SEQ ID NO: 741273 - DNA, 19 bp, Mus musculus
  siRNA target sequence for 6720467O09Rik (NM_030000.1,832-850).
cttctttagtcctcattga

SEQ ID NO: 741274 - DNA, 19 bp, Mus musculus
  siRNA target sequence for 6720467O09Rik (NM_030000.1,835-853).
ctttagtcctcattgacaa

SEQ ID NO: 741275 - DNA, 19 bp, Mus musculus
  siRNA target sequence for 6720467O09Rik (NM_030000.1,871-889).
cgcattacctccagttcat

SEQ ID NO: 741276 - DNA, 19 bp, Mus musculus
  siRNA target sequence for 6720467O09Rik (NM_030000.1,954-972).
gaggctttcgagagattca

SEQ ID NO: 741277 - DNA, 19 bp, Mus musculus
  siRNA target sequence for 6720467O09Rik (NM_030000.1,1051-1069).
caaagtttctcgaggaaat

SEQ ID NO: 741278 - DNA, 19 bp, Mus musculus
  siRNA target sequence for 6720467O09Rik (NM_030000.1,1204-1222).
catgtcagaagcagtatga

SEQ ID NO: 741279 - DNA, 19 bp, Mus musculus
  siRNA target sequence for 6720467O09Rik (NM_030000.1,1238-1256).
ggccttttataaaattgat

SEQ ID NO: 741280 - DNA, 19 bp, Mus musculus
  siRNA target sequence for 6720467O09Rik (NM_030000.1,1257-1275).
gccaagtttgagccattaa

SEQ ID NO: 741281 - DNA, 19 bp, Mus musculus
  siRNA target sequence for 6720467O09Rik (NM_030000.1,1268-1286).
gccattaaattattatcca

SEQ ID NO: 741282 - DNA, 19 bp, Mus musculus
  siRNA target sequence for 6720467O09Rik (NM_030000.1,1285-1303).
catcagagtatgctgaaat

SEQ ID NO: 741283 - DNA, 19 bp, Mus musculus
  siRNA target sequence for 6720467O09Rik (NM_030000.1,1326-1344).
ccttacattggcaaatcca

SEQ ID NO: 741284 - DNA, 19 bp, Mus musculus
  siRNA target sequence for 6720467O09Rik (NM_030000.1,1366-1384).
ccacggagacttacattgt

SEQ ID NO: 741285 - DNA, 19 bp, Mus musculus
  siRNA target sequence for 6720467O09Rik (NM_030000.1,1471-1489).
caccacctgatctacagtt

SEQ ID NO: 741286 - DNA, 19 bp, Mus musculus
  siRNA target sequence for 6720467O09Rik (NM_030000.1,1487-1505).
gttggaagatacggaaaaa

SEQ ID NO: 741287 - DNA, 19 bp, Mus musculus
  siRNA target sequence for 6720467O09Rik (NM_030000.1,1525-1543).
ctcgactgtcagaactaca

SEQ ID NO: 741288 - DNA, 19 bp, Mus musculus
  siRNA target sequence for 6720467O09Rik (NM_030000.1,1578-1596).
cgggctactcaagaattta

SEQ ID NO: 741289 - DNA, 19 bp, Mus musculus
  siRNA target sequence for 6720467O09Rik (NM_030000.1,1579-1597).
gggctactcaagaatttaa

SEQ ID NO: 741290 - DNA, 19 bp, Mus musculus
  siRNA target sequence for 6720467O09Rik (NM_030000.1,1580-1598).
ggctactcaagaatttaaa

SEQ ID NO: 741291 - DNA, 19 bp, Mus musculus
  siRNA target sequence for 6720467O09Rik (NM_030000.1,1661-1679).
gcagttgagtggtagacta

SEQ ID NO: 741292 - DNA, 19 bp, Mus musculus
  siRNA target sequence for 6720467O09Rik (NM_030000.1,1664-1682).
gttgagtggtagactacaa

SEQ ID NO: 741293 - DNA, 19 bp, Mus musculus
  siRNA target sequence for 6720467O09Rik (NM_030000.1,1677-1695).
ctacaacatctaaacagat

SEQ ID NO: 741294 - DNA, 19 bp, Mus musculus
  siRNA target sequence for 6720467O09Rik (NM_030000.1,1828-1846).
gtaaaatgggaaatcttga

SEQ ID NO: 741295 - DNA, 19 bp, Mus musculus
  siRNA target sequence for Peli1 (NM_030015.1,26-44).
gttttctcctgatcaagaa

SEQ ID NO: 741296 - DNA, 19 bp, Mus musculus
  siRNA target sequence for E130201N16Rik (NM_030024.2,590-608).
gaaaatcagcactccaata

SEQ ID NO: 741297 - DNA, 19 bp, Mus musculus
  siRNA target sequence for E130201N16Rik (NM_030024.2,630-648).
ccctcaggtcagataagtt

SEQ ID NO: 741298 - DNA, 19 bp, Mus musculus
  siRNA target sequence for E130201N16Rik (NM_030024.2,632-650).
ctcaggtcagataagttgt

SEQ ID NO: 741299 - DNA, 19 bp, Mus musculus
  siRNA target sequence for E130201N16Rik (NM_030024.2,666-684).
gcaatagtcggcgcaattt

SEQ ID NO: 741300 - DNA, 19 bp, Mus musculus
  siRNA target sequence for E130201N16Rik (NM_030024.2,672-690).
gtcggcgcaatttgaagat

SEQ ID NO: 741301 - DNA, 19 bp, Mus musculus
  siRNA target sequence for E130201N16Rik (NM_030024.2,674-692).
cggcgcaatttgaagatct

SEQ ID NO: 741302 - DNA, 19 bp, Mus musculus
  siRNA target sequence for E130201N16Rik (NM_030024.2,693-711).
cacgctctggcagattcaa

SEQ ID NO: 741303 - DNA, 19 bp, Mus musculus
  siRNA target sequence for 3010033I09Rik (NM_030066.1,667-685).
gtcttgtagtgacaaaact

SEQ ID NO: 741304 - DNA, 19 bp, Mus musculus
  siRNA target sequence for 3010033I09Rik (NM_030066.1,669-687).
cttgtagtgacaaaactga

SEQ ID NO: 741305 - DNA, 19 bp, Mus musculus
  siRNA target sequence for 3010033I09Rik (NM_030066.1,731-749).
cctcaagatgactcaaagt

SEQ ID NO: 741306 - DNA, 19 bp, Mus musculus
  siRNA target sequence for 3010033I09Rik (NM_030066.1,852-870).
cccttttcaagactctaaa

SEQ ID NO: 741307 - DNA, 19 bp, Mus musculus
  siRNA target sequence for 3010033I09Rik (NM_030066.1,897-915).
gaggcataaggcttcctaa

SEQ ID NO: 741308 - DNA, 19 bp, Mus musculus
  siRNA target sequence for 3010033I09Rik (NM_030066.1,900-918).
gcataaggcttcctaacat

SEQ ID NO: 741309 - DNA, 19 bp, Mus musculus
  siRNA target sequence for 3010033I09Rik (NM_030066.1,1014-1032).
ggacaagtgggaaagtcaa

SEQ ID NO: 741310 - DNA, 19 bp, Mus musculus
  siRNA target sequence for 3010033I09Rik (NM_030066.1,1106-1124).
ccctataaaattgatgata

SEQ ID NO: 741311 - DNA, 19 bp, Mus musculus
  siRNA target sequence for 3010033I09Rik (NM_030066.1,1107-1125).
cctataaaattgatgatat

SEQ ID NO: 741312 - DNA, 19 bp, Mus musculus
  siRNA target sequence for 3010033I09Rik (NM_030066.1,1173-1191).
caaatgacccttttactca

SEQ ID NO: 741313 - DNA, 19 bp, Mus musculus
  siRNA target sequence for 3010033I09Rik (NM_030066.1,1204-1222).
ggtcacactgggtaacaat

SEQ ID NO: 741314 - DNA, 19 bp, Mus musculus
  siRNA target sequence for 3010033I09Rik (NM_030066.1,1213-1231).
gggtaacaatgcagcatat

SEQ ID NO: 741315 - DNA, 19 bp, Mus musculus
  siRNA target sequence for 3010033I09Rik (NM_030066.1,1224-1242).
cagcatattcatttaatca

SEQ ID NO: 741316 - DNA, 19 bp, Mus musculus
  siRNA target sequence for 3010033I09Rik (NM_030066.1,1265-1283).
ggagtccccattattgcaa

SEQ ID NO: 741317 - DNA, 19 bp, Mus musculus
  siRNA target sequence for 3010033I09Rik (NM_030066.1,1266-1284).
gagtccccattattgcaaa

SEQ ID NO: 741318 - DNA, 19 bp, Mus musculus
  siRNA target sequence for 3010033I09Rik (NM_030066.1,1304-1322).
cccattattagggaaaaga

SEQ ID NO: 741319 - DNA, 19 bp, Mus musculus
  siRNA target sequence for 3010033I09Rik (NM_030066.1,1306-1324).
cattattagggaaaagact

SEQ ID NO: 741320 - DNA, 19 bp, Mus musculus
  siRNA target sequence for 3010033I09Rik (NM_030066.1,1321-1339).
gacttacaatgctcttaat

SEQ ID NO: 741321 - DNA, 19 bp, Mus musculus
  siRNA target sequence for 3010033I09Rik (NM_030066.1,1323-1341).
cttacaatgctcttaataa

SEQ ID NO: 741322 - DNA, 19 bp, Mus musculus
  siRNA target sequence for 3010033I09Rik (NM_030066.1,1366-1384).
gggcaagattaagacttat

SEQ ID NO: 741323 - DNA, 19 bp, Mus musculus
  siRNA target sequence for 3010033I09Rik (NM_030066.1,1368-1386).
gcaagattaagacttatat

SEQ ID NO: 741324 - DNA, 19 bp, Mus musculus
  siRNA target sequence for 3010033I09Rik (NM_030066.1,1372-1390).
gattaagacttatatcagt

SEQ ID NO: 741325 - DNA, 19 bp, Mus musculus
  siRNA target sequence for 3010033I09Rik (NM_030066.1,1433-1451).
gtccagatggctggattaa

SEQ ID NO: 741326 - DNA, 19 bp, Mus musculus
  siRNA target sequence for 3010033I09Rik (NM_030066.1,1446-1464).
gattaagactccttaccaa

SEQ ID NO: 741327 - DNA, 19 bp, Mus musculus
  siRNA target sequence for 3010033I09Rik (NM_030066.1,1476-1494).
ctaatcactaccaacattt

SEQ ID NO: 741328 - DNA, 19 bp, Mus musculus
  siRNA target sequence for 3010033I09Rik (NM_030066.1,1500-1518).
cctattctttcccagattt

SEQ ID NO: 741329 - DNA, 19 bp, Mus musculus
  siRNA target sequence for 3010033I09Rik (NM_030066.1,1667-1685).
gatagagagattcttctta

SEQ ID NO: 741330 - DNA, 19 bp, Mus musculus
  siRNA target sequence for 3010033I09Rik (NM_030066.1,1671-1689).
gagagattcttcttaacat

SEQ ID NO: 741331 - DNA, 19 bp, Mus musculus
  siRNA target sequence for 3010033I09Rik (NM_030066.1,1714-1732).
cgataacataaaaagtgaa

SEQ ID NO: 741332 - DNA, 19 bp, Mus musculus
  siRNA target sequence for 3010033I09Rik (NM_030066.1,1810-1828).
gaaaatcaaagcattagca

SEQ ID NO: 741333 - DNA, 19 bp, Mus musculus
  siRNA target sequence for 3010033I09Rik (NM_030066.1,1821-1839).
cattagcaagccataagga

SEQ ID NO: 741334 - DNA, 19 bp, Mus musculus
  siRNA target sequence for 3010033I09Rik (NM_030066.1,1855-1873).
gaaagttctaaaagtctta

SEQ ID NO: 741335 - DNA, 19 bp, Mus musculus
  siRNA target sequence for 4432416J03Rik (NM_030069.1,213-231).
gatgcttagtcctaggata

SEQ ID NO: 741336 - DNA, 19 bp, Mus musculus
  siRNA target sequence for 4432416J03Rik (NM_030069.1,327-345).
ccacacagagtttatggtt

SEQ ID NO: 741337 - DNA, 19 bp, Mus musculus
  siRNA target sequence for 4432416J03Rik (NM_030069.1,332-350).
cagagtttatggttcactt

SEQ ID NO: 741338 - DNA, 19 bp, Mus musculus
  siRNA target sequence for 4432416J03Rik (NM_030069.1,334-352).
gagtttatggttcacttaa

SEQ ID NO: 741339 - DNA, 19 bp, Mus musculus
  siRNA target sequence for 4432416J03Rik (NM_030069.1,348-366).
cttaaacaaccgcatcatt

SEQ ID NO: 741340 - DNA, 19 bp, Mus musculus
  siRNA target sequence for 4432416J03Rik (NM_030069.1,371-389).
gacgatggagcatcttcaa

SEQ ID NO: 741341 - DNA, 19 bp, Mus musculus
  siRNA target sequence for 4432416J03Rik (NM_030069.1,536-554).
gcacagctaccattcacaa

SEQ ID NO: 741342 - DNA, 19 bp, Mus musculus
  siRNA target sequence for 4432416J03Rik (NM_030069.1,600-618).
ggtggccaaggactatttt

SEQ ID NO: 741343 - DNA, 19 bp, Mus musculus
  siRNA target sequence for 4432416J03Rik (NM_030069.1,603-621).
ggccaaggactattttggt

SEQ ID NO: 741344 - DNA, 19 bp, Mus musculus
  siRNA target sequence for 4432416J03Rik (NM_030069.1,604-622).
gccaaggactattttggta

SEQ ID NO: 741345 - DNA, 19 bp, Mus musculus
  siRNA target sequence for 4432416J03Rik (NM_030069.1,889-907).
gaatgcggcctcaccttaa

SEQ ID NO: 741346 - DNA, 19 bp, Mus musculus
  siRNA target sequence for 4432416J03Rik (NM_030069.1,894-912).
cggcctcaccttaaacaca

SEQ ID NO: 741347 - DNA, 19 bp, Mus musculus
  siRNA target sequence for 4432416J03Rik (NM_030069.1,914-932).
gtgcggagctgtgtcaata

SEQ ID NO: 741348 - DNA, 19 bp, Mus musculus
  siRNA target sequence for 4432416J03Rik (NM_030069.1,917-935).
cggagctgtgtcaatatct

SEQ ID NO: 741349 - DNA, 19 bp, Mus musculus
  siRNA target sequence for 4432416J03Rik (NM_030069.1,1003-1021).
cacatgacgagcaagaaca

SEQ ID NO: 741350 - DNA, 19 bp, Mus musculus
  siRNA target sequence for 4432416J03Rik (NM_030069.1,1010-1028).
cgagcaagaacagtaacat

SEQ ID NO: 741351 - DNA, 19 bp, Mus musculus
  siRNA target sequence for 4432416J03Rik (NM_030069.1,1057-1075).
cttttccggaggttcaaca

SEQ ID NO: 741352 - DNA, 19 bp, Mus musculus
  siRNA target sequence for 4432416J03Rik (NM_030069.1,1079-1097).
gagttgaagtggtaaagaa

SEQ ID NO: 741353 - DNA, 19 bp, Mus musculus
  siRNA target sequence for 4432416J03Rik (NM_030069.1,1108-1126).
gtggtctcgccgtgtaaca

SEQ ID NO: 741354 - DNA, 19 bp, Mus musculus
  siRNA target sequence for 4432416J03Rik (NM_030069.1,1111-1129).
gtctcgccgtgtaacaaca

SEQ ID NO: 741355 - DNA, 19 bp, Mus musculus
  siRNA target sequence for 4432416J03Rik (NM_030069.1,1178-1196).
cccctggtggctatacttt

SEQ ID NO: 741356 - DNA, 19 bp, Mus musculus
  siRNA target sequence for 4432416J03Rik (NM_030069.1,1186-1204).
ggctatactttgaaaggaa

SEQ ID NO: 741357 - DNA, 19 bp, Mus musculus
  siRNA target sequence for 4432416J03Rik (NM_030069.1,1219-1237).
cattgtgaacagaatgagt

SEQ ID NO: 741358 - DNA, 19 bp, Mus musculus
  siRNA target sequence for 4432416J03Rik (NM_030069.1,1242-1260).
ggcaataaaagatataaat

SEQ ID NO: 741359 - DNA, 19 bp, Mus musculus
  siRNA target sequence for 4432416J03Rik (NM_030069.1,1266-1284).
cttgacaagaaaactgatt

SEQ ID NO: 741360 - DNA, 19 bp, Mus musculus
  siRNA target sequence for 4432416J03Rik (NM_030069.1,1271-1289).
caagaaaactgatttacct

SEQ ID NO: 741361 - DNA, 19 bp, Mus musculus
  siRNA target sequence for 4432416J03Rik (NM_030069.1,1287-1305).
cctcatgggtgattcaaca

SEQ ID NO: 741362 - DNA, 19 bp, Mus musculus
  siRNA target sequence for 4432416J03Rik (NM_030069.1,1304-1322).
cactgcgccagtggattta

SEQ ID NO: 741363 - DNA, 19 bp, Mus musculus
  siRNA target sequence for 4432416J03Rik (NM_030069.1,1309-1327).
cgccagtggatttactact

SEQ ID NO: 741364 - DNA, 19 bp, Mus musculus
  siRNA target sequence for 4432416J03Rik (NM_030069.1,1323-1341).
ctacttgcccaaagttgta

SEQ ID NO: 741365 - DNA, 19 bp, Mus musculus
  siRNA target sequence for 4432416J03Rik (NM_030069.1,1331-1349).
ccaaagttgtaaaaacctt

SEQ ID NO: 741366 - DNA, 19 bp, Mus musculus
  siRNA target sequence for 4432416J03Rik (NM_030069.1,1332-1350).
caaagttgtaaaaacctta

SEQ ID NO: 741367 - DNA, 19 bp, Mus musculus
  siRNA target sequence for 4432416J03Rik (NM_030069.1,1336-1354).
gttgtaaaaaccttaaaat

SEQ ID NO: 741368 - DNA, 19 bp, Mus musculus
  siRNA target sequence for 4432416J03Rik (NM_030069.1,1401-1419).
ggatactgaacgacatatt

SEQ ID NO: 741369 - DNA, 19 bp, Mus musculus
  siRNA target sequence for 4432416J03Rik (NM_030069.1,1406-1424).
ctgaacgacatatttttgt

SEQ ID NO: 741370 - DNA, 19 bp, Mus musculus
  siRNA target sequence for 4432416J03Rik (NM_030069.1,1442-1460).
gccatccctttgttactaa

SEQ ID NO: 741371 - DNA, 19 bp, Mus musculus
  siRNA target sequence for 4432416J03Rik (NM_030069.1,1443-1461).
ccatccctttgttactaat

SEQ ID NO: 741372 - DNA, 19 bp, Mus musculus
  siRNA target sequence for 4432416J03Rik (NM_030069.1,1464-1482).
gctgttctccatgaaagat

SEQ ID NO: 741373 - DNA, 19 bp, Mus musculus
  siRNA target sequence for 4432416J03Rik (NM_030069.1,1472-1490).
ccatgaaagatgacaacta

SEQ ID NO: 741374 - DNA, 19 bp, Mus musculus
  siRNA target sequence for 4432416J03Rik (NM_030069.1,1473-1491).
catgaaagatgacaactat

SEQ ID NO: 741375 - DNA, 19 bp, Mus musculus
  siRNA target sequence for 4432416J03Rik (NM_030069.1,1488-1506).
ctatattcctcgggaaatt

SEQ ID NO: 741376 - DNA, 19 bp, Mus musculus
  siRNA target sequence for 4432416J03Rik (NM_030069.1,1528-1546).
ggtacagcaattgtcatta

SEQ ID NO: 741377 - DNA, 19 bp, Mus musculus
  siRNA target sequence for 4432416J03Rik (NM_030069.1,1532-1550).
cagcaattgtcattagttt

SEQ ID NO: 741378 - DNA, 19 bp, Mus musculus
  siRNA target sequence for 4432416J03Rik (NM_030069.1,1568-1586).
cctttcccatcaacgtttt

SEQ ID NO: 741379 - DNA, 19 bp, Mus musculus
  siRNA target sequence for 4432416J03Rik (NM_030069.1,1595-1613).
gggccatcaacgtcaaaaa

SEQ ID NO: 741380 - DNA, 19 bp, Mus musculus
  siRNA target sequence for 4432416J03Rik (NM_030069.1,1617-1635).
catagagagactgttctta

SEQ ID NO: 741381 - DNA, 19 bp, Mus musculus
  siRNA target sequence for 4432416J03Rik (NM_030069.1,1643-1661).
ccgagaccaaggtgataat

SEQ ID NO: 741382 - DNA, 19 bp, Mus musculus
  siRNA target sequence for 4432416J03Rik (NM_030069.1,1644-1662).
cgagaccaaggtgataatt

SEQ ID NO: 741383 - DNA, 19 bp, Mus musculus
  siRNA target sequence for 4432416J03Rik (NM_030069.1,1645-1663).
gagaccaaggtgataatta

SEQ ID NO: 741384 - DNA, 19 bp, Mus musculus
  siRNA target sequence for 4432416J03Rik (NM_030069.1,1647-1665).
gaccaaggtgataattaaa

SEQ ID NO: 741385 - DNA, 19 bp, Mus musculus
  siRNA target sequence for 4432416J03Rik (NM_030069.1,1724-1742).
gcattcagaaccttattat

SEQ ID NO: 741386 - DNA, 19 bp, Mus musculus
  siRNA target sequence for 4432416J03Rik (NM_030069.1,1826-1844).
cgcctgaaagcgtgattga

SEQ ID NO: 741387 - DNA, 19 bp, Mus musculus
  siRNA target sequence for 4432416J03Rik (NM_030069.1,1827-1845).
gcctgaaagcgtgattgaa

SEQ ID NO: 741388 - DNA, 19 bp, Mus musculus
  siRNA target sequence for 4432416J03Rik (NM_030069.1,1828-1846).
cctgaaagcgtgattgaaa

SEQ ID NO: 741389 - DNA, 19 bp, Mus musculus
  siRNA target sequence for 4432416J03Rik (NM_030069.1,1847-1865).
gtcagattggcatgttctt

SEQ ID NO: 741390 - DNA, 19 bp, Mus musculus
  siRNA target sequence for 4432416J03Rik (NM_030069.1,1855-1873).
ggcatgttcttaaactaca

SEQ ID NO: 741391 - DNA, 19 bp, Mus musculus
  siRNA target sequence for 4432416J03Rik (NM_030069.1,1856-1874).
gcatgttcttaaactacat

SEQ ID NO: 741392 - DNA, 19 bp, Mus musculus
  siRNA target sequence for 4921529O18Rik (NM_030070.1,402-420).
ccccgaatagttggattat

SEQ ID NO: 741393 - DNA, 19 bp, Mus musculus
  siRNA target sequence for 4921529O18Rik (NM_030070.1,414-432).
ggattatcattgtttcata

SEQ ID NO: 741394 - DNA, 19 bp, Mus musculus
  siRNA target sequence for 4921529O18Rik (NM_030070.1,415-433).
gattatcattgtttcataa

SEQ ID NO: 741395 - DNA, 19 bp, Mus musculus
  siRNA target sequence for 4921529O18Rik (NM_030070.1,429-447).
cataatttatcaagtctta

SEQ ID NO: 741396 - DNA, 19 bp, Mus musculus
  siRNA target sequence for 4921529O18Rik (NM_030070.1,488-506).
gacttgcttacagcttaaa

SEQ ID NO: 741397 - DNA, 19 bp, Mus musculus
  siRNA target sequence for 4921529O18Rik (NM_030070.1,493-511).
gcttacagcttaaagaact

SEQ ID NO: 741398 - DNA, 19 bp, Mus musculus
  siRNA target sequence for 4921529O18Rik (NM_030070.1,522-540).
gaatgctgcatagagaaaa

SEQ ID NO: 741399 - DNA, 19 bp, Mus musculus
  siRNA target sequence for 4921529O18Rik (NM_030070.1,647-665).
gctgaaccacaatatgata

SEQ ID NO: 741400 - DNA, 19 bp, Mus musculus
  siRNA target sequence for 4921529O18Rik (NM_030070.1,648-666).
ctgaaccacaatatgataa

SEQ ID NO: 741401 - DNA, 19 bp, Mus musculus
  siRNA target sequence for 4921529O18Rik (NM_030070.1,710-728).
caaccttgcaggaaactta

SEQ ID NO: 741402 - DNA, 19 bp, Mus musculus
  siRNA target sequence for 4921529O18Rik (NM_030070.1,714-732).
cttgcaggaaacttagtca

SEQ ID NO: 741403 - DNA, 19 bp, Mus musculus
  siRNA target sequence for 4921529O18Rik (NM_030070.1,734-752).
cagcattggtcgatgtctt

SEQ ID NO: 741404 - DNA, 19 bp, Mus musculus
  siRNA target sequence for 4921529O18Rik (NM_030070.1,782-800).
cctttctggaaatcaaatt

SEQ ID NO: 741405 - DNA, 19 bp, Mus musculus
  siRNA target sequence for 4921529O18Rik (NM_030070.1,829-847).
ccaagctcactcgcttaaa

SEQ ID NO: 741406 - DNA, 19 bp, Mus musculus
  siRNA target sequence for 4921529O18Rik (NM_030070.1,858-876).
ctgaacgaccctcagtata

SEQ ID NO: 741407 - DNA, 19 bp, Mus musculus
  siRNA target sequence for 4921529O18Rik (NM_030070.1,890-908).
gtgtcagctgtgtaactat

SEQ ID NO: 741408 - DNA, 19 bp, Mus musculus
  siRNA target sequence for 4921529O18Rik (NM_030070.1,894-912).
cagctgtgtaactattcca

SEQ ID NO: 741409 - DNA, 19 bp, Mus musculus
  siRNA target sequence for 4921529O18Rik (NM_030070.1,960-978).
gacgtatcagcaaagcaaa

SEQ ID NO: 741410 - DNA, 19 bp, Mus musculus
  siRNA target sequence for 4921529O18Rik (NM_030070.1,963-981).
gtatcagcaaagcaaatca

SEQ ID NO: 741411 - DNA, 19 bp, Mus musculus
  siRNA target sequence for 4921529O18Rik (NM_030070.1,991-1009).
cggattccacagcaatgaa

SEQ ID NO: 741412 - DNA, 19 bp, Mus musculus
  siRNA target sequence for 4921529O18Rik (NM_030070.1,1028-1046).
catgcgaataaaaactgtt

SEQ ID NO: 741413 - DNA, 19 bp, Mus musculus
  siRNA target sequence for 4921529O18Rik (NM_030070.1,1087-1105).
gaaaatgcaagttacagaa

SEQ ID NO: 741414 - DNA, 19 bp, Mus musculus
  siRNA target sequence for 4921529O18Rik (NM_030070.1,1111-1129).
ccgaagaacggataaaatt

SEQ ID NO: 741415 - DNA, 19 bp, Mus musculus
  siRNA target sequence for 4921529O18Rik (NM_030070.1,1112-1130).
cgaagaacggataaaatta

SEQ ID NO: 741416 - DNA, 19 bp, Mus musculus
  siRNA target sequence for 4921529O18Rik (NM_030070.1,1119-1137).
cggataaaattattcaact

SEQ ID NO: 741417 - DNA, 19 bp, Mus musculus
  siRNA target sequence for 4921529O18Rik (NM_030070.1,1120-1138).
ggataaaattattcaactt

SEQ ID NO: 741418 - DNA, 19 bp, Mus musculus
  siRNA target sequence for 4921529O18Rik (NM_030070.1,1136-1154).
ctttgcaaagaaaacgtta

SEQ ID NO: 741419 - DNA, 19 bp, Mus musculus
  siRNA target sequence for 4921529O18Rik (NM_030070.1,1217-1235).
cgagaaaccccggaatagt

SEQ ID NO: 741420 - DNA, 19 bp, Mus musculus
  siRNA target sequence for 4921529O18Rik (NM_030070.1,1290-1308).
gctctggatgacagagtta

SEQ ID NO: 741421 - DNA, 19 bp, Mus musculus
  siRNA target sequence for 4921529O18Rik (NM_030070.1,1293-1311).
ctggatgacagagttacat

SEQ ID NO: 741422 - DNA, 19 bp, Mus musculus
  siRNA target sequence for 4921529O18Rik (NM_030070.1,1296-1314).
gatgacagagttacattct

SEQ ID NO: 741423 - DNA, 19 bp, Mus musculus
  siRNA target sequence for 4921529O18Rik (NM_030070.1,1420-1438).
ctgtgggcaatatccattt

SEQ ID NO: 741424 - DNA, 19 bp, Mus musculus
  siRNA target sequence for 4921529O18Rik (NM_030070.1,1424-1442).
gggcaatatccattttgaa

SEQ ID NO: 741425 - DNA, 19 bp, Mus musculus
  siRNA target sequence for 4921529O18Rik (NM_030070.1,1452-1470).
caggctgatgactggttta

SEQ ID NO: 741426 - DNA, 19 bp, Mus musculus
  siRNA target sequence for 4921529O18Rik (NM_030070.1,1455-1473).
gctgatgactggtttaact

SEQ ID NO: 741427 - DNA, 19 bp, Mus musculus
  siRNA target sequence for 4921529O18Rik (NM_030070.1,1552-1570).
gggtcattaaagtcaacaa

SEQ ID NO: 741428 - DNA, 19 bp, Mus musculus
  siRNA target sequence for 4921529O18Rik (NM_030070.1,1563-1581).
gtcaacaaccgtattctga

SEQ ID NO: 741429 - DNA, 19 bp, Mus musculus
  siRNA target sequence for 4921529O18Rik (NM_030070.1,1630-1648).
cacaagatccggagagtta

SEQ ID NO: 741430 - DNA, 19 bp, Mus musculus
  siRNA target sequence for 4921529O18Rik (NM_030070.1,1683-1701).
gatcccgaagtgactgtaa

SEQ ID NO: 741431 - DNA, 19 bp, Mus musculus
  siRNA target sequence for 4921529O18Rik (NM_030070.1,1687-1705).
ccgaagtgactgtaaagaa

SEQ ID NO: 741432 - DNA, 19 bp, Mus musculus
  siRNA target sequence for 4921529O18Rik (NM_030070.1,1709-1727).
gcatctgctacagatactt

SEQ ID NO: 741433 - DNA, 19 bp, Mus musculus
  siRNA target sequence for 4921529O18Rik (NM_030070.1,1812-1830).
gagtgtccccggatagagt

SEQ ID NO: 741434 - DNA, 19 bp, Mus musculus
  siRNA target sequence for 4921529O18Rik (NM_030070.1,1955-1973).
catcaataaagccaactat

SEQ ID NO: 741435 - DNA, 19 bp, Mus musculus
  siRNA target sequence for 4921529O18Rik (NM_030070.1,1966-1984).
ccaactatcccatggttaa

SEQ ID NO: 741436 - DNA, 19 bp, Mus musculus
  siRNA target sequence for 4921529O18Rik (NM_030070.1,1979-1997).
ggttaactcggtgtttgtt

SEQ ID NO: 741437 - DNA, 19 bp, Mus musculus
  siRNA target sequence for 4921529O18Rik (NM_030070.1,2010-2028).
gtgctaagacaaagaactt

SEQ ID NO: 741438 - DNA, 19 bp, Mus musculus
  siRNA target sequence for 4921529O18Rik (NM_030070.1,2035-2053).
gtggctaccggcagtacaa

SEQ ID NO: 741439 - DNA, 19 bp, Mus musculus
  siRNA target sequence for 4921529O18Rik (NM_030070.1,2037-2055).
ggctaccggcagtacaaat

SEQ ID NO: 741440 - DNA, 19 bp, Mus musculus
  siRNA target sequence for 4921529O18Rik (NM_030070.1,2042-2060).
ccggcagtacaaatggttt

SEQ ID NO: 741441 - DNA, 19 bp, Mus musculus
  siRNA target sequence for 4921529O18Rik (NM_030070.1,2046-2064).
cagtacaaatggtttgtct

SEQ ID NO: 741442 - DNA, 19 bp, Mus musculus
  siRNA target sequence for 4921529O18Rik (NM_030070.1,2111-2129).
cactacagtggtcaaagtt

SEQ ID NO: 741443 - DNA, 19 bp, Mus musculus
  siRNA target sequence for 4921529O18Rik (NM_030070.1,2143-2161).
ctacatcaaacaacgttat

SEQ ID NO: 741444 - DNA, 19 bp, Mus musculus
  siRNA target sequence for 4921529O18Rik (NM_030070.1,2146-2164).
catcaaacaacgttattct

SEQ ID NO: 741445 - DNA, 19 bp, Mus musculus
  siRNA target sequence for 4921529O18Rik (NM_030070.1,2149-2167).
caaacaacgttattctaga

SEQ ID NO: 741446 - DNA, 19 bp, Mus musculus
  siRNA target sequence for 4921529O18Rik (NM_030070.1,2180-2198).
gtattctgaaggattagta

SEQ ID NO: 741447 - DNA, 19 bp, Mus musculus
  siRNA target sequence for 4921529O18Rik (NM_030070.1,2260-2278).
gcccaaaactcattagttt

SEQ ID NO: 741448 - DNA, 19 bp, Mus musculus
  siRNA target sequence for 4921529O18Rik (NM_030070.1,2279-2297).
ggatgagaagactataatt

SEQ ID NO: 741449 - DNA, 19 bp, Mus musculus
  siRNA target sequence for 4921529O18Rik (NM_030070.1,2280-2298).
gatgagaagactataattt

SEQ ID NO: 741450 - DNA, 19 bp, Mus musculus
  siRNA target sequence for 4921529O18Rik (NM_030070.1,2290-2308).
ctataatttcccttgctaa

SEQ ID NO: 741451 - DNA, 19 bp, Mus musculus
  siRNA target sequence for 4921529O18Rik (NM_030070.1,2299-2317).
cccttgctaagactaatat

SEQ ID NO: 741452 - DNA, 19 bp, Mus musculus
  siRNA target sequence for 4921529O18Rik (NM_030070.1,2300-2318).
ccttgctaagactaatatt

SEQ ID NO: 741453 - DNA, 19 bp, Mus musculus
  siRNA target sequence for 4921529O18Rik (NM_030070.1,2304-2322).
gctaagactaatatttaca

SEQ ID NO: 741454 - DNA, 19 bp, Mus musculus
  siRNA target sequence for 4921529O18Rik (NM_030070.1,2346-2364).
cacgggaatagcttgagta

SEQ ID NO: 741455 - DNA, 19 bp, Mus musculus
  siRNA target sequence for 4921529O18Rik (NM_030070.1,2348-2366).
cgggaatagcttgagtaaa

SEQ ID NO: 741456 - DNA, 19 bp, Mus musculus
  siRNA target sequence for 4921529O18Rik (NM_030070.1,2350-2368).
ggaatagcttgagtaaact

SEQ ID NO: 741457 - DNA, 19 bp, Mus musculus
  siRNA target sequence for 4921529O18Rik (NM_030070.1,2408-2426).
cattagcttcaatgagttt

SEQ ID NO: 741458 - DNA, 19 bp, Mus musculus
  siRNA target sequence for 4921529O18Rik (NM_030070.1,2417-2435).
caatgagtttacttgctta

SEQ ID NO: 741459 - DNA, 19 bp, Mus musculus
  siRNA target sequence for 4921529O18Rik (NM_030070.1,2423-2441).
gtttacttgcttagatgat

SEQ ID NO: 741460 - DNA, 19 bp, Mus musculus
  siRNA target sequence for 4921529O18Rik (NM_030070.1,2428-2446).
cttgcttagatgatgtgta

SEQ ID NO: 741461 - DNA, 19 bp, Mus musculus
  siRNA target sequence for 4921529O18Rik (NM_030070.1,2450-2468).
cttgtacaaccttgagtat

SEQ ID NO: 741462 - DNA, 19 bp, Mus musculus
  siRNA target sequence for 4921529O18Rik (NM_030070.1,2471-2489).
ggacgccagccataaccat

SEQ ID NO: 741463 - DNA, 19 bp, Mus musculus
  siRNA target sequence for 4921529O18Rik (NM_030070.1,2665-2683).
gtgttattggcagactaaa

SEQ ID NO: 741464 - DNA, 19 bp, Mus musculus
  siRNA target sequence for 4921529O18Rik (NM_030070.1,2667-2685).
gttattggcagactaaaga

SEQ ID NO: 741465 - DNA, 19 bp, Mus musculus
  siRNA target sequence for 4921529O18Rik (NM_030070.1,2702-2720).
cggcctcgtcatttctgaa

SEQ ID NO: 741466 - DNA, 19 bp, Mus musculus
  siRNA target sequence for 4921529O18Rik (NM_030070.1,2705-2723).
cctcgtcatttctgaagaa

SEQ ID NO: 741467 - DNA, 19 bp, Mus musculus
  siRNA target sequence for 4921529O18Rik (NM_030070.1,2747-2765).
cattagtggaacgaagatt

SEQ ID NO: 741468 - DNA, 19 bp, Mus musculus
  siRNA target sequence for 4921529O18Rik (NM_030070.1,2811-2829).
cctcggatgctcagtacat

SEQ ID NO: 741469 - DNA, 19 bp, Mus musculus
  siRNA target sequence for 4921529O18Rik (NM_030070.1,2827-2845).
catggccctctgccaaaat

SEQ ID NO: 741470 - DNA, 19 bp, Mus musculus
  siRNA target sequence for 4921529O18Rik (NM_030070.1,2890-2908).
ggaactggtactcaaagat

SEQ ID NO: 741471 - DNA, 19 bp, Mus musculus
  siRNA target sequence for 4921529O18Rik (NM_030070.1,2891-2909).
gaactggtactcaaagata

SEQ ID NO: 741472 - DNA, 19 bp, Mus musculus
  siRNA target sequence for 4921529O18Rik (NM_030070.1,2939-2957).
ctttgaaatcacaaatcta

SEQ ID NO: 741473 - DNA, 19 bp, Mus musculus
  siRNA target sequence for 4921529O18Rik (NM_030070.1,2943-2961).
gaaatcacaaatctagaaa

SEQ ID NO: 741474 - DNA, 19 bp, Mus musculus
  siRNA target sequence for 4921529O18Rik (NM_030070.1,2955-2973).
ctagaaaaattggagaatt

SEQ ID NO: 741475 - DNA, 19 bp, Mus musculus
  siRNA target sequence for 4921529O18Rik (NM_030070.1,2980-2998).
gggcatcgttcagcaataa

SEQ ID NO: 741476 - DNA, 19 bp, Mus musculus
  siRNA target sequence for 4921529O18Rik (NM_030070.1,2981-2999).
ggcatcgttcagcaataat

SEQ ID NO: 741477 - DNA, 19 bp, Mus musculus
  siRNA target sequence for 4921529O18Rik (NM_030070.1,2986-3004).
cgttcagcaataataacct

SEQ ID NO: 741478 - DNA, 19 bp, Mus musculus
  siRNA target sequence for 4921529O18Rik (NM_030070.1,3057-3075).
gacggcaactgcatctcaa

SEQ ID NO: 741479 - DNA, 19 bp, Mus musculus
  siRNA target sequence for 4921529O18Rik (NM_030070.1,3060-3078).
ggcaactgcatctcaaaga

SEQ ID NO: 741480 - DNA, 19 bp, Mus musculus
  siRNA target sequence for 4921529O18Rik (NM_030070.1,3109-3127).
gccgcctcagcatgaacaa

SEQ ID NO: 741481 - DNA, 19 bp, Mus musculus
  siRNA target sequence for 4921529O18Rik (NM_030070.1,3214-3232).
ctctgagcgcgttacagaa

SEQ ID NO: 741482 - DNA, 19 bp, Mus musculus
  siRNA target sequence for 4921529O18Rik (NM_030070.1,3243-3261).
ctgatcgagttgtacataa

SEQ ID NO: 741483 - DNA, 19 bp, Mus musculus
  siRNA target sequence for 4921529O18Rik (NM_030070.1,3277-3295).
ctgtgaaccaggagatcta

SEQ ID NO: 741484 - DNA, 19 bp, Mus musculus
  siRNA target sequence for 4921529O18Rik (NM_030070.1,3284-3302).
ccaggagatctacaactta

SEQ ID NO: 741485 - DNA, 19 bp, Mus musculus
  siRNA target sequence for 4921529O18Rik (NM_030070.1,3285-3303).
caggagatctacaacttaa

SEQ ID NO: 741486 - DNA, 19 bp, Mus musculus
  siRNA target sequence for 4921529O18Rik (NM_030070.1,3339-3357).
ggaaacattattatatgga

SEQ ID NO: 741487 - DNA, 19 bp, Mus musculus
  siRNA target sequence for 4921529O18Rik (NM_030070.1,3368-3386).
ctaccggttctttgtaata

SEQ ID NO: 741488 - DNA, 19 bp, Mus musculus
  siRNA target sequence for 4921529O18Rik (NM_030070.1,3377-3395).
ctttgtaatatttcatctt

SEQ ID NO: 741489 - DNA, 19 bp, Mus musculus
  siRNA target sequence for 4921529O18Rik (NM_030070.1,3444-3462).
gagactgcaaaagatttgt

SEQ ID NO: 741490 - DNA, 19 bp, Mus musculus
  siRNA target sequence for 4921529O18Rik (NM_030070.1,3472-3490).
ggcttacctctgacatgat

SEQ ID NO: 741491 - DNA, 19 bp, Mus musculus
  siRNA target sequence for 4921529O18Rik (NM_030070.1,3498-3516).
cgacaaggacactcaaact

SEQ ID NO: 741492 - DNA, 19 bp, Mus musculus
  siRNA target sequence for 4921529O18Rik (NM_030070.1,3499-3517).
gacaaggacactcaaactt

SEQ ID NO: 741493 - DNA, 19 bp, Mus musculus
  siRNA target sequence for 4921529O18Rik (NM_030070.1,3501-3519).
caaggacactcaaacttta

SEQ ID NO: 741494 - DNA, 19 bp, Mus musculus
  siRNA target sequence for 4921529O18Rik (NM_030070.1,3505-3523).
gacactcaaactttatcca

SEQ ID NO: 741495 - DNA, 19 bp, Mus musculus
  siRNA target sequence for 4921529O18Rik (NM_030070.1,3533-3551).
gctaaactggacttcatca

SEQ ID NO: 741496 - DNA, 19 bp, Mus musculus
  siRNA target sequence for 4921529O18Rik (NM_030070.1,3582-3600).
gaccacttcaggaatgtga

SEQ ID NO: 741497 - DNA, 19 bp, Mus musculus
  siRNA target sequence for 4921529O18Rik (NM_030070.1,3634-3652).
cgttcagcggcctcatcta

SEQ ID NO: 741498 - DNA, 19 bp, Mus musculus
  siRNA target sequence for 4921529O18Rik (NM_030070.1,3702-3720).
gacatcagcacaagtttta

SEQ ID NO: 741499 - DNA, 19 bp, Mus musculus
  siRNA target sequence for 4921529O18Rik (NM_030070.1,3715-3733).
gttttaatcttcacttaca

SEQ ID NO: 741500 - DNA, 19 bp, Mus musculus
  siRNA target sequence for 5330430C04Rik (NM_030077.1,245-263).
gctcccggcttgactgtaa

SEQ ID NO: 741501 - DNA, 19 bp, Mus musculus
  siRNA target sequence for 5330430C04Rik (NM_030077.1,256-274).
gactgtaacagcatattct

SEQ ID NO: 741502 - DNA, 19 bp, Mus musculus
  siRNA target sequence for 5330430C04Rik (NM_030077.1,331-349).
gtacctgggggtttgaaga

SEQ ID NO: 741503 - DNA, 19 bp, Mus musculus
  siRNA target sequence for 5330430C04Rik (NM_030077.1,372-390).
ctgcatgggaggactagat

SEQ ID NO: 741504 - DNA, 19 bp, Mus musculus
  siRNA target sequence for 5330430C04Rik (NM_030077.1,374-392).
gcatgggaggactagattt

SEQ ID NO: 741505 - DNA, 19 bp, Mus musculus
  siRNA target sequence for 5330430C04Rik (NM_030077.1,375-393).
catgggaggactagattta

SEQ ID NO: 741506 - DNA, 19 bp, Mus musculus
  siRNA target sequence for 5330430C04Rik (NM_030077.1,380-398).
gaggactagatttacagaa

SEQ ID NO: 741507 - DNA, 19 bp, Mus musculus
  siRNA target sequence for 5330430C04Rik (NM_030077.1,456-474).
gggatgtgtcaaaagtcaa

SEQ ID NO: 741508 - DNA, 19 bp, Mus musculus
  siRNA target sequence for 5330430C04Rik (NM_030077.1,476-494).
ggcacagccgacttatact

SEQ ID NO: 741509 - DNA, 19 bp, Mus musculus
  siRNA target sequence for 5330430C04Rik (NM_030077.1,547-565).
cggggtccagccacaagat

SEQ ID NO: 741510 - DNA, 19 bp, Mus musculus
  siRNA target sequence for 1500032D16Rik (NM_030087.1,133-151).
cgggagaactggtttctgt

SEQ ID NO: 741511 - DNA, 19 bp, Mus musculus
  siRNA target sequence for 1500032D16Rik (NM_030087.1,198-216).
ctacatcccaagacacaaa

SEQ ID NO: 741512 - DNA, 19 bp, Mus musculus
  siRNA target sequence for 1500032D16Rik (NM_030087.1,274-292).
cagcggcactgtccaaaaa

SEQ ID NO: 741513 - DNA, 19 bp, Mus musculus
  siRNA target sequence for 1500032D16Rik (NM_030087.1,276-294).
gcggcactgtccaaaaact

SEQ ID NO: 741514 - DNA, 19 bp, Mus musculus
  siRNA target sequence for 1500032D16Rik (NM_030087.1,393-411).
ccgaagcatttgtcaagaa

SEQ ID NO: 741515 - DNA, 19 bp, Mus musculus
  siRNA target sequence for 1500032D16Rik (NM_030087.1,404-422).
gtcaagaaagactttggta

SEQ ID NO: 741516 - DNA, 19 bp, Mus musculus
  siRNA target sequence for 1500032D16Rik (NM_030087.1,424-442).
cgtttcctcagaaagttat

SEQ ID NO: 741517 - DNA, 19 bp, Mus musculus
  siRNA target sequence for 1500032D16Rik (NM_030087.1,457-475).
cacggggttctgactcaaa

SEQ ID NO: 741518 - DNA, 19 bp, Mus musculus
  siRNA target sequence for 1500032D16Rik (NM_030087.1,498-516).
gtgacaaacgattcatctt

SEQ ID NO: 741519 - DNA, 19 bp, Mus musculus
  siRNA target sequence for 1500032D16Rik (NM_030087.1,500-518).
gacaaacgattcatcttca

SEQ ID NO: 741520 - DNA, 19 bp, Mus musculus
  siRNA target sequence for 1500032D16Rik (NM_030087.1,1045-1063).
gatatccggaaccaaaagt

SEQ ID NO: 741521 - DNA, 19 bp, Mus musculus
  siRNA target sequence for 1500032D16Rik (NM_030087.1,1365-1383).
caccatgactacaacacat

SEQ ID NO: 741522 - DNA, 19 bp, Mus musculus
  siRNA target sequence for 3300001G02Rik (NM_030093.1,342-360).
ctgtggtcgtcgtacagaa

SEQ ID NO: 741523 - DNA, 19 bp, Mus musculus
  siRNA target sequence for 3300001G02Rik (NM_030093.1,538-556).
ccgagatgaggtttccttt

SEQ ID NO: 741524 - DNA, 19 bp, Mus musculus
  siRNA target sequence for 3300001G02Rik (NM_030093.1,539-557).
cgagatgaggtttccttta

SEQ ID NO: 741525 - DNA, 19 bp, Mus musculus
  siRNA target sequence for A030010B05Rik (NM_030100.2,89-107).
ggagggtcaaagaaggata

SEQ ID NO: 741526 - DNA, 19 bp, Mus musculus
  siRNA target sequence for A030010B05Rik (NM_030100.2,120-138).
ggaggtcccagtctatgaa

SEQ ID NO: 741527 - DNA, 19 bp, Mus musculus
  siRNA target sequence for A030010B05Rik (NM_030100.2,121-139).
gaggtcccagtctatgaaa

SEQ ID NO: 741528 - DNA, 19 bp, Mus musculus
  siRNA target sequence for A030010B05Rik (NM_030100.2,124-142).
gtcccagtctatgaaaaca

SEQ ID NO: 741529 - DNA, 19 bp, Mus musculus
  siRNA target sequence for A030010B05Rik (NM_030100.2,127-145).
ccagtctatgaaaacaagt

SEQ ID NO: 741530 - DNA, 19 bp, Mus musculus
  siRNA target sequence for A030010B05Rik (NM_030100.2,159-177).
caagagtaaaccagaactt

SEQ ID NO: 741531 - DNA, 19 bp, Mus musculus
  siRNA target sequence for A030010B05Rik (NM_030100.2,251-269).
ccaagacagccaaacgaaa

SEQ ID NO: 741532 - DNA, 19 bp, Mus musculus
  siRNA target sequence for A030010B05Rik (NM_030100.2,321-339).
cttgagcaggactcttgat

SEQ ID NO: 741533 - DNA, 19 bp, Mus musculus
  siRNA target sequence for D530033C11Rik (NM_030132.2,66-84).
cggctttttccgcaacaat

SEQ ID NO: 741534 - DNA, 19 bp, Mus musculus
  siRNA target sequence for D530033C11Rik (NM_030132.2,67-85).
ggctttttccgcaacaatt

SEQ ID NO: 741535 - DNA, 19 bp, Mus musculus
  siRNA target sequence for D530033C11Rik (NM_030132.2,68-86).
gctttttccgcaacaattt

SEQ ID NO: 741536 - DNA, 19 bp, Mus musculus
  siRNA target sequence for D530033C11Rik (NM_030132.2,209-227).
ccacgagatgtgtgttaaa

SEQ ID NO: 741537 - DNA, 19 bp, Mus musculus
  siRNA target sequence for D530033C11Rik (NM_030132.2,212-230).
cgagatgtgtgttaaagga

SEQ ID NO: 741538 - DNA, 19 bp, Mus musculus
  siRNA target sequence for D530033C11Rik (NM_030132.2,249-267).
ggaattatatggagcaaaa

SEQ ID NO: 741539 - DNA, 19 bp, Mus musculus
  siRNA target sequence for D530033C11Rik (NM_030132.2,355-373).
gaggggaaccctcatcatt

SEQ ID NO: 741540 - DNA, 19 bp, Mus musculus
  siRNA target sequence for D530033C11Rik (NM_030132.2,358-376).
gggaaccctcatcattatt

SEQ ID NO: 741541 - DNA, 19 bp, Mus musculus
  siRNA target sequence for D530033C11Rik (NM_030132.2,360-378).
gaaccctcatcattatttt

SEQ ID NO: 741542 - DNA, 19 bp, Mus musculus
  siRNA target sequence for D530033C11Rik (NM_030132.2,434-452).
ctctcatgttcattattca

SEQ ID NO: 741543 - DNA, 19 bp, Mus musculus
  siRNA target sequence for 9530039B02Rik (NM_030137.1,124-142).
gcacagaggatgtacgtta

SEQ ID NO: 741544 - DNA, 19 bp, Mus musculus
  siRNA target sequence for 9530039B02Rik (NM_030137.1,259-277).
cctggctcaccacatagtt

SEQ ID NO: 741545 - DNA, 19 bp, Mus musculus
  siRNA target sequence for 9530039B02Rik (NM_030137.1,260-278).
ctggctcaccacatagttt

SEQ ID NO: 741546 - DNA, 19 bp, Mus musculus
  siRNA target sequence for 9530039B02Rik (NM_030137.1,313-331).
gcctgcctttcaagttcaa

SEQ ID NO: 741547 - DNA, 19 bp, Mus musculus
  siRNA target sequence for 1700037B15Rik (NM_030143.2,275-293).
ctgggagtctgctaagtga

SEQ ID NO: 741548 - DNA, 19 bp, Mus musculus
  siRNA target sequence for 1700037B15Rik (NM_030143.2,277-295).
gggagtctgctaagtgatt

SEQ ID NO: 741549 - DNA, 19 bp, Mus musculus
  siRNA target sequence for 1700037B15Rik (NM_030143.2,333-351).
caacgaggtggtatttgaa

SEQ ID NO: 741550 - DNA, 19 bp, Mus musculus
  siRNA target sequence for 1700037B15Rik (NM_030143.2,362-380).
gccagaatttggttaaaat

SEQ ID NO: 741551 - DNA, 19 bp, Mus musculus
  siRNA target sequence for 1700037B15Rik (NM_030143.2,504-522).
cggccttcggggttgtgtt

SEQ ID NO: 741552 - DNA, 19 bp, Mus musculus
  siRNA target sequence for 1700037B15Rik (NM_030143.2,505-523).
ggccttcggggttgtgtta

SEQ ID NO: 741553 - DNA, 19 bp, Mus musculus
  siRNA target sequence for 1700037B15Rik (NM_030143.2,506-524).
gccttcggggttgtgttat

SEQ ID NO: 741554 - DNA, 19 bp, Mus musculus
  siRNA target sequence for 1700037B15Rik (NM_030143.2,534-552).
cttggagattgaaaatgta

SEQ ID NO: 741555 - DNA, 19 bp, Mus musculus
  siRNA target sequence for 1700037B15Rik (NM_030143.2,537-555).
ggagattgaaaatgtatgt

SEQ ID NO: 741556 - DNA, 19 bp, Mus musculus
  siRNA target sequence for 1700037B15Rik (NM_030143.2,538-556).
gagattgaaaatgtatgta

SEQ ID NO: 741557 - DNA, 19 bp, Mus musculus
  siRNA target sequence for 1700037B15Rik (NM_030143.2,690-708).
ccttaagcgaactctgatt

SEQ ID NO: 741558 - DNA, 19 bp, Mus musculus
  siRNA target sequence for 1700037B15Rik (NM_030143.2,716-734).
caggatttcgacttgtgaa

SEQ ID NO: 741559 - DNA, 19 bp, Mus musculus
  siRNA target sequence for 1700037B15Rik (NM_030143.2,719-737).
gatttcgacttgtgaagaa

SEQ ID NO: 741560 - DNA, 19 bp, Mus musculus
  siRNA target sequence for 1700037B15Rik (NM_030143.2,725-743).
gacttgtgaagaaaaaact

SEQ ID NO: 741561 - DNA, 19 bp, Mus musculus
  siRNA target sequence for C030004C14Rik (NM_030153.1,99-117).
gctcggggtcccggaaaaa

SEQ ID NO: 741562 - DNA, 19 bp, Mus musculus
  siRNA target sequence for C030004C14Rik (NM_030153.1,100-118).
ctcggggtcccggaaaaaa

SEQ ID NO: 741563 - DNA, 19 bp, Mus musculus
  siRNA target sequence for C030004C14Rik (NM_030153.1,104-122).
gggtcccggaaaaaatgga

SEQ ID NO: 741564 - DNA, 19 bp, Mus musculus
  siRNA target sequence for C030004C14Rik (NM_030153.1,105-123).
ggtcccggaaaaaatggaa

SEQ ID NO: 741565 - DNA, 19 bp, Mus musculus
  siRNA target sequence for C030004C14Rik (NM_030153.1,106-124).
gtcccggaaaaaatggaaa

SEQ ID NO: 741566 - DNA, 19 bp, Mus musculus
  siRNA target sequence for C030004C14Rik (NM_030153.1,276-294).
gatcgggaaccaagtgaat

SEQ ID NO: 741567 - DNA, 19 bp, Mus musculus
  siRNA target sequence for C030004C14Rik (NM_030153.1,279-297).
cgggaaccaagtgaataga

SEQ ID NO: 741568 - DNA, 19 bp, Mus musculus
  siRNA target sequence for C030004C14Rik (NM_030153.1,354-372).
cagcctgcctgaactgata

SEQ ID NO: 741569 - DNA, 19 bp, Mus musculus
  siRNA target sequence for C030004C14Rik (NM_030153.1,358-376).
ctgcctgaactgataggaa

SEQ ID NO: 741570 - DNA, 19 bp, Mus musculus
  siRNA target sequence for C030004C14Rik (NM_030153.1,574-592).
gatttccagtcaatgacat

SEQ ID NO: 741571 - DNA, 19 bp, Mus musculus
  siRNA target sequence for C030004C14Rik (NM_030153.1,584-602).
caatgacatacggatttaa

SEQ ID NO: 741572 - DNA, 19 bp, Mus musculus
  siRNA target sequence for C030004C14Rik (NM_030153.1,664-682).
ctgcaaaggcgagtaaaga

SEQ ID NO: 741573 - DNA, 19 bp, Mus musculus
  siRNA target sequence for C030004C14Rik (NM_030153.1,853-871).
caggcggcagaccttcttt

SEQ ID NO: 741574 - DNA, 19 bp, Mus musculus
  siRNA target sequence for C030004C14Rik (NM_030153.1,855-873).
ggcggcagaccttctttct

SEQ ID NO: 741575 - DNA, 19 bp, Mus musculus
  siRNA target sequence for C030004C14Rik (NM_030153.1,897-915).
cggcatccaggctcagaat

SEQ ID NO: 741576 - DNA, 19 bp, Mus musculus
  siRNA target sequence for C030004C14Rik (NM_030153.1,923-941).
ccaaaggagaccatccaat

SEQ ID NO: 741577 - DNA, 19 bp, Mus musculus
  siRNA target sequence for C030004C14Rik (NM_030153.1,924-942).
caaaggagaccatccaatt

SEQ ID NO: 741578 - DNA, 19 bp, Mus musculus
  siRNA target sequence for C030004C14Rik (NM_030153.1,960-978).
ccttgttaaccagagatta

SEQ ID NO: 741579 - DNA, 19 bp, Mus musculus
  siRNA target sequence for C030004C14Rik (NM_030153.1,989-1007).
ccttccctcgctatgcaaa

SEQ ID NO: 741580 - DNA, 19 bp, Mus musculus
  siRNA target sequence for C030004C14Rik (NM_030153.1,1071-1089).
ctgtgaagtcgtgaactta

SEQ ID NO: 741581 - DNA, 19 bp, Mus musculus
  siRNA target sequence for C030004C14Rik (NM_030153.1,1075-1093).
gaagtcgtgaacttaccaa

SEQ ID NO: 741582 - DNA, 19 bp, Mus musculus
  siRNA target sequence for C030004C14Rik (NM_030153.1,1080-1098).
cgtgaacttaccaaactta

SEQ ID NO: 741583 - DNA, 19 bp, Mus musculus
  siRNA target sequence for C030004C14Rik (NM_030153.1,1134-1152).
gcagtcaccatgtgttctt

SEQ ID NO: 741584 - DNA, 19 bp, Mus musculus
  siRNA target sequence for C030004C14Rik (NM_030153.1,1208-1226).
ctcatctcatgcaagacat

SEQ ID NO: 741585 - DNA, 19 bp, Mus musculus
  siRNA target sequence for C030004C14Rik (NM_030153.1,1278-1296).
gtgttgcctatataataat

SEQ ID NO: 741586 - DNA, 19 bp, Mus musculus
  siRNA target sequence for C030004C14Rik (NM_030153.1,1280-1298).
gttgcctatataataatca

SEQ ID NO: 741587 - DNA, 19 bp, Mus musculus
  siRNA target sequence for C030004C14Rik (NM_030153.1,1398-1416).
caagcttggtcacattctt

SEQ ID NO: 741588 - DNA, 19 bp, Mus musculus
  siRNA target sequence for C030004C14Rik (NM_030153.1,1456-1474).
gatgcagcgcttcatacta

SEQ ID NO: 741589 - DNA, 19 bp, Mus musculus
  siRNA target sequence for C030004C14Rik (NM_030153.1,1459-1477).
gcagcgcttcatactatgt

SEQ ID NO: 741590 - DNA, 19 bp, Mus musculus
  siRNA target sequence for C030004C14Rik (NM_030153.1,1460-1478).
cagcgcttcatactatgtt

SEQ ID NO: 741591 - DNA, 19 bp, Mus musculus
  siRNA target sequence for C030004C14Rik (NM_030153.1,1463-1481).
cgcttcatactatgttgtt

SEQ ID NO: 741592 - DNA, 19 bp, Mus musculus
  siRNA target sequence for C030004C14Rik (NM_030153.1,1537-1555).
cataacctccggattatga

SEQ ID NO: 741593 - DNA, 19 bp, Mus musculus
  siRNA target sequence for C030004C14Rik (NM_030153.1,1547-1565).
ggattatgatccagtatct

SEQ ID NO: 741594 - DNA, 19 bp, Mus musculus
  siRNA target sequence for C030004C14Rik (NM_030153.1,1595-1613).
gcatgcatgagtactacta

SEQ ID NO: 741595 - DNA, 19 bp, Mus musculus
  siRNA target sequence for C030004C14Rik (NM_030153.1,1603-1621).
gagtactactacatctact

SEQ ID NO: 741596 - DNA, 19 bp, Mus musculus
  siRNA target sequence for C030004C14Rik (NM_030153.1,1829-1847).
cgatggtcgcttttgacat

SEQ ID NO: 741597 - DNA, 19 bp, Mus musculus
  siRNA target sequence for C030004C14Rik (NM_030153.1,2109-2127).
ggttgccaagcccaacttt

SEQ ID NO: 741598 - DNA, 19 bp, Mus musculus
  siRNA target sequence for C330016H24Rik (NM_030155.1,155-173).
cgacgctcctgcgttctat

SEQ ID NO: 741599 - DNA, 19 bp, Mus musculus
  siRNA target sequence for C330016H24Rik (NM_030155.1,246-264).
ggctttcggccgacgttta

SEQ ID NO: 741600 - DNA, 19 bp, Mus musculus
  siRNA target sequence for C330016H24Rik (NM_030155.1,247-265).
gctttcggccgacgtttat

SEQ ID NO: 741601 - DNA, 19 bp, Mus musculus
  siRNA target sequence for 4632415D10Rik (NM_030165.2,366-384).
gtctagaagaggatcgatt

SEQ ID NO: 741602 - DNA, 19 bp, Mus musculus
  siRNA target sequence for 4632415D10Rik (NM_030165.2,422-440).
ctttgctcttcagtttagt

SEQ ID NO: 741603 - DNA, 19 bp, Mus musculus
  siRNA target sequence for 4632415D10Rik (NM_030165.2,426-444).
gctcttcagtttagtatta

SEQ ID NO: 741604 - DNA, 19 bp, Mus musculus
  siRNA target sequence for 4632415D10Rik (NM_030165.2,427-445).
ctcttcagtttagtattat

SEQ ID NO: 741605 - DNA, 19 bp, Mus musculus
  siRNA target sequence for 4632415D10Rik (NM_030165.2,597-615).
gattgcccagctaaagcaa

SEQ ID NO: 741606 - DNA, 19 bp, Mus musculus
  siRNA target sequence for 4632415D10Rik (NM_030165.2,733-751).
cttcactcccagatcgata

SEQ ID NO: 741607 - DNA, 19 bp, Mus musculus
  siRNA target sequence for 4632415D10Rik (NM_030165.2,793-811).
ggagtcgttccctttgaaa

SEQ ID NO: 741608 - DNA, 19 bp, Mus musculus
  siRNA target sequence for 4632415D10Rik (NM_030165.2,796-814).
gtcgttccctttgaaagtt

SEQ ID NO: 741609 - DNA, 19 bp, Mus musculus
  siRNA target sequence for 4632415D10Rik (NM_030165.2,798-816).
cgttccctttgaaagtttt

SEQ ID NO: 741610 - DNA, 19 bp, Mus musculus
  siRNA target sequence for 4632415D10Rik (NM_030165.2,799-817).
gttccctttgaaagtttta

SEQ ID NO: 741611 - DNA, 19 bp, Mus musculus
  siRNA target sequence for 4632415D10Rik (NM_030165.2,818-836).
ctttaatgaaagtatttca

SEQ ID NO: 741612 - DNA, 19 bp, Mus musculus
  siRNA target sequence for 4632415D10Rik (NM_030165.2,852-870).
cactcgccatcctgaagaa

SEQ ID NO: 741613 - DNA, 19 bp, Mus musculus
  siRNA target sequence for 4632415D10Rik (NM_030165.2,895-913).
gacgaactggtagaagtta

SEQ ID NO: 741614 - DNA, 19 bp, Mus musculus
  siRNA target sequence for 4632415D10Rik (NM_030165.2,897-915).
cgaactggtagaagttatt

SEQ ID NO: 741615 - DNA, 19 bp, Mus musculus
  siRNA target sequence for 4632415D10Rik (NM_030165.2,919-937).
gctggcgtggaggtcatta

SEQ ID NO: 741616 - DNA, 19 bp, Mus musculus
  siRNA target sequence for 4632415D10Rik (NM_030165.2,920-938).
ctggcgtggaggtcattaa

SEQ ID NO: 741617 - DNA, 19 bp, Mus musculus
  siRNA target sequence for 4632415D10Rik (NM_030165.2,922-940).
ggcgtggaggtcattaata

SEQ ID NO: 741618 - DNA, 19 bp, Mus musculus
  siRNA target sequence for 4632415D10Rik (NM_030165.2,1014-1032).
cttcatagaaggctattat

SEQ ID NO: 741619 - DNA, 19 bp, Mus musculus
  siRNA target sequence for 4632415D10Rik (NM_030165.2,1052-1070).
gcacgcagtatgaactgtt

SEQ ID NO: 741620 - DNA, 19 bp, Mus musculus
  siRNA target sequence for 4632415D10Rik (NM_030165.2,1055-1073).
cgcagtatgaactgttttt

SEQ ID NO: 741621 - DNA, 19 bp, Mus musculus
  siRNA target sequence for 4632415D10Rik (NM_030165.2,1121-1139).
cttttggacctctcatgaa

SEQ ID NO: 741622 - DNA, 19 bp, Mus musculus
  siRNA target sequence for 4632415D10Rik (NM_030165.2,1126-1144).
ggacctctcatgaaagtga

SEQ ID NO: 741623 - DNA, 19 bp, Mus musculus
  siRNA target sequence for 4632415D10Rik (NM_030165.2,1150-1168).
gaactgatcgacattacaa

SEQ ID NO: 741624 - DNA, 19 bp, Mus musculus
  siRNA target sequence for 4632415D10Rik (NM_030165.2,1153-1171).
ctgatcgacattacaagat

SEQ ID NO: 741625 - DNA, 19 bp, Mus musculus
  siRNA target sequence for 4632415D10Rik (NM_030165.2,1155-1173).
gatcgacattacaagatca

SEQ ID NO: 741626 - DNA, 19 bp, Mus musculus
  siRNA target sequence for 4632415D10Rik (NM_030165.2,1159-1177).
gacattacaagatcagtta

SEQ ID NO: 741627 - DNA, 19 bp, Mus musculus
  siRNA target sequence for 4632415D10Rik (NM_030165.2,1161-1179).
cattacaagatcagttatt

SEQ ID NO: 741628 - DNA, 19 bp, Mus musculus
  siRNA target sequence for 4632415D10Rik (NM_030165.2,1166-1184).
caagatcagttattaatat

SEQ ID NO: 741629 - DNA, 19 bp, Mus musculus
  siRNA target sequence for 4632415D10Rik (NM_030165.2,1169-1187).
gatcagttattaatatcat

SEQ ID NO: 741630 - DNA, 19 bp, Mus musculus
  siRNA target sequence for 4632415D10Rik (NM_030165.2,1205-1223).
ggacagaggcgttttcaca

SEQ ID NO: 741631 - DNA, 19 bp, Mus musculus
  siRNA target sequence for 4632415D10Rik (NM_030165.2,1210-1228).
gaggcgttttcacagttta

SEQ ID NO: 741632 - DNA, 19 bp, Mus musculus
  siRNA target sequence for 4632415D10Rik (NM_030165.2,1241-1259).
gagatgtttgtattcatca

SEQ ID NO: 741633 - DNA, 19 bp, Mus musculus
  siRNA target sequence for 4632415D10Rik (NM_030165.2,1306-1324).
ctatctaaagtcaagtcta

SEQ ID NO: 741634 - DNA, 19 bp, Mus musculus
  siRNA target sequence for 4632415D10Rik (NM_030165.2,1310-1328).
ctaaagtcaagtctattct

SEQ ID NO: 741635 - DNA, 19 bp, Mus musculus
  siRNA target sequence for 4632415D10Rik (NM_030165.2,1315-1333).
gtcaagtctattctagaat

SEQ ID NO: 741636 - DNA, 19 bp, Mus musculus
  siRNA target sequence for 4632415D10Rik (NM_030165.2,1336-1354).
gtctcaagtgagtctgatt

SEQ ID NO: 741637 - DNA, 19 bp, Mus musculus
  siRNA target sequence for 4632415D10Rik (NM_030165.2,1372-1390).
gtctcgttggacgaagaat

SEQ ID NO: 741638 - DNA, 19 bp, Mus musculus
  siRNA target sequence for 4632415D10Rik (NM_030165.2,1374-1392).
ctcgttggacgaagaattt

SEQ ID NO: 741639 - DNA, 19 bp, Mus musculus
  siRNA target sequence for 4632415D10Rik (NM_030165.2,1376-1394).
cgttggacgaagaatttaa

SEQ ID NO: 741640 - DNA, 19 bp, Mus musculus
  siRNA target sequence for 4632415D10Rik (NM_030165.2,1380-1398).
ggacgaagaatttaatcgt

SEQ ID NO: 741641 - DNA, 19 bp, Mus musculus
  siRNA target sequence for 4632415D10Rik (NM_030165.2,1397-1415).
gtggacgaggactaaatgt

SEQ ID NO: 741642 - DNA, 19 bp, Mus musculus
  siRNA target sequence for 4632415D10Rik (NM_030165.2,1520-1538).
caggtaaaaaggtgtttta

SEQ ID NO: 741643 - DNA, 19 bp, Mus musculus
  siRNA target sequence for 4632415D10Rik (NM_030165.2,1662-1680).
gatgacctgtcaatatcaa

SEQ ID NO: 741644 - DNA, 19 bp, Mus musculus
  siRNA target sequence for 4632415D10Rik (NM_030165.2,1741-1759).
gttcatctttaccgaaaat

SEQ ID NO: 741645 - DNA, 19 bp, Mus musculus
  siRNA target sequence for 4632415D10Rik (NM_030165.2,1761-1779).
cctacacggtgatcttatt

SEQ ID NO: 741646 - DNA, 19 bp, Mus musculus
  siRNA target sequence for 4632415D10Rik (NM_030165.2,1767-1785).
cggtgatcttattgtgatt

SEQ ID NO: 741647 - DNA, 19 bp, Mus musculus
  siRNA target sequence for 4632415D10Rik (NM_030165.2,1790-1808).
ctccagttcccggtctttt

SEQ ID NO: 741648 - DNA, 19 bp, Mus musculus
  siRNA target sequence for 4632415D10Rik (NM_030165.2,1909-1927).
ctgggaatgatggttttca

SEQ ID NO: 741649 - DNA, 19 bp, Mus musculus
  siRNA target sequence for 4632404H22Rik (NM_030167.1,170-188).
ggtttttgagccatatcca

SEQ ID NO: 741650 - DNA, 19 bp, Mus musculus
  siRNA target sequence for 4632404H22Rik (NM_030167.1,177-195).
gagccatatccacttagaa

SEQ ID NO: 741651 - DNA, 19 bp, Mus musculus
  siRNA target sequence for 4632404H22Rik (NM_030167.1,331-349).
gcctgagtgatagtgattt

SEQ ID NO: 741652 - DNA, 19 bp, Mus musculus
  siRNA target sequence for 4632404H22Rik (NM_030167.1,332-350).
cctgagtgatagtgatttt

SEQ ID NO: 741653 - DNA, 19 bp, Mus musculus
  siRNA target sequence for 4632404H22Rik (NM_030167.1,448-466).
cgccatccttgcaaatgtt

SEQ ID NO: 741654 - DNA, 19 bp, Mus musculus
  siRNA target sequence for 4632404H22Rik (NM_030167.1,451-469).
catccttgcaaatgtttgt

SEQ ID NO: 741655 - DNA, 19 bp, Mus musculus
  siRNA target sequence for 4632404H22Rik (NM_030167.1,487-505).
caccgagtcctgttctcaa

SEQ ID NO: 741656 - DNA, 19 bp, Mus musculus
  siRNA target sequence for 4632404H22Rik (NM_030167.1,498-516).
gttctcaatccaagacatt

SEQ ID NO: 741657 - DNA, 19 bp, Mus musculus
  siRNA target sequence for 4632404H22Rik (NM_030167.1,567-585).
cttggtcctcttaagagaa

SEQ ID NO: 741658 - DNA, 19 bp, Mus musculus
  siRNA target sequence for 4632404H22Rik (NM_030167.1,649-667).
ctaccaatcctgcacaatt

SEQ ID NO: 741659 - DNA, 19 bp, Mus musculus
  siRNA target sequence for 4632404H22Rik (NM_030167.1,653-671).
caatcctgcacaattgtct

SEQ ID NO: 741660 - DNA, 19 bp, Mus musculus
  siRNA target sequence for 4632404H22Rik (NM_030167.1,657-675).
cctgcacaattgtctgatt

SEQ ID NO: 741661 - DNA, 19 bp, Mus musculus
  siRNA target sequence for 4632404H22Rik (NM_030167.1,771-789).
gtagcatgctccaattcat

SEQ ID NO: 741662 - DNA, 19 bp, Mus musculus
  siRNA target sequence for 4632404H22Rik (NM_030167.1,790-808).
gctctccgttcatcttgat

SEQ ID NO: 741663 - DNA, 19 bp, Mus musculus
  siRNA target sequence for 4930507C10Rik (NM_030175.1,679-697).
cacaaccgcaagttctaca

SEQ ID NO: 741664 - DNA, 19 bp, Mus musculus
  siRNA target sequence for 4930507C10Rik (NM_030175.1,681-699).
caaccgcaagttctacatt

SEQ ID NO: 741665 - DNA, 19 bp, Mus musculus
  siRNA target sequence for 4930507C10Rik (NM_030175.1,684-702).
ccgcaagttctacatttat

SEQ ID NO: 741666 - DNA, 19 bp, Mus musculus
  siRNA target sequence for 4930507C10Rik (NM_030175.1,685-703).
cgcaagttctacatttatt

SEQ ID NO: 741667 - DNA, 19 bp, Mus musculus
  siRNA target sequence for 4930507C10Rik (NM_030175.1,690-708).
gttctacatttattattca

SEQ ID NO: 741668 - DNA, 19 bp, Mus musculus
  siRNA target sequence for 4930507C10Rik (NM_030175.1,729-747).
ggagaaaatccggattagt

SEQ ID NO: 741669 - DNA, 19 bp, Mus musculus
  siRNA target sequence for 4930507C10Rik (NM_030175.1,868-886).
ggttatctgtacatattca

SEQ ID NO: 741670 - DNA, 19 bp, Mus musculus
  siRNA target sequence for 4930507C10Rik (NM_030175.1,927-945).
cggaaatgctcagaacaaa

SEQ ID NO: 741671 - DNA, 19 bp, Mus musculus
  siRNA target sequence for 4930507C10Rik (NM_030175.1,952-970).
ctgctggggaaagtgttaa

SEQ ID NO: 741672 - DNA, 19 bp, Mus musculus
  siRNA target sequence for 4930507C10Rik (NM_030175.1,966-984).
gttaaggattgatgtgaat

SEQ ID NO: 741673 - DNA, 19 bp, Mus musculus
  siRNA target sequence for 4930507C10Rik (NM_030175.1,1054-1072).
caccctgccgtctatgctt

SEQ ID NO: 741674 - DNA, 19 bp, Mus musculus
  siRNA target sequence for 4930507C10Rik (NM_030175.1,1069-1087).
gcttacggggtcagaaaca

SEQ ID NO: 741675 - DNA, 19 bp, Mus musculus
  siRNA target sequence for 4930507C10Rik (NM_030175.1,1176-1194).
cgaggaagtcgaccttata

SEQ ID NO: 741676 - DNA, 19 bp, Mus musculus
  siRNA target sequence for 4930507C10Rik (NM_030175.1,1179-1197).
ggaagtcgaccttatagtt

SEQ ID NO: 741677 - DNA, 19 bp, Mus musculus
  siRNA target sequence for 4930507C10Rik (NM_030175.1,1224-1242).
caaggaagggtttgaatgt

SEQ ID NO: 741678 - DNA, 19 bp, Mus musculus
  siRNA target sequence for 4930507C10Rik (NM_030175.1,1227-1245).
ggaagggtttgaatgttat

SEQ ID NO: 741679 - DNA, 19 bp, Mus musculus
  siRNA target sequence for 4930507C10Rik (NM_030175.1,1231-1249).
gggtttgaatgttatgaca

SEQ ID NO: 741680 - DNA, 19 bp, Mus musculus
  siRNA target sequence for 4930507C10Rik (NM_030175.1,1305-1323).
ccatggggtaggaaagtca

SEQ ID NO: 741681 - DNA, 19 bp, Mus musculus
  siRNA target sequence for 4930507C10Rik (NM_030175.1,1324-1342).
gtcactggagggtatgtct

SEQ ID NO: 741682 - DNA, 19 bp, Mus musculus
  siRNA target sequence for 4930507C10Rik (NM_030175.1,1339-1357).
gtctaccgtgggtgtgaat

SEQ ID NO: 741683 - DNA, 19 bp, Mus musculus
  siRNA target sequence for 4930507C10Rik (NM_030175.1,1588-1606).
gcgccacatggatctattt

SEQ ID NO: 741684 - DNA, 19 bp, Mus musculus
  siRNA target sequence for 4930507C10Rik (NM_030175.1,1589-1607).
cgccacatggatctattta

SEQ ID NO: 741685 - DNA, 19 bp, Mus musculus
  siRNA target sequence for 4930507C10Rik (NM_030175.1,1592-1610).
cacatggatctatttacaa

SEQ ID NO: 741686 - DNA, 19 bp, Mus musculus
  siRNA target sequence for 4930507C10Rik (NM_030175.1,1594-1612).
catggatctatttacaagt

SEQ ID NO: 741687 - DNA, 19 bp, Mus musculus
  siRNA target sequence for 4930507C10Rik (NM_030175.1,1639-1657).
ccaggcaagtgcaaataca

SEQ ID NO: 741688 - DNA, 19 bp, Mus musculus
  siRNA target sequence for 4930507C10Rik (NM_030175.1,1640-1658).
caggcaagtgcaaatacaa

SEQ ID NO: 741689 - DNA, 19 bp, Mus musculus
  siRNA target sequence for 4930507C10Rik (NM_030175.1,1661-1679).
cagtgcccgtgaaaaccaa

SEQ ID NO: 741690 - DNA, 19 bp, Mus musculus
  siRNA target sequence for 4930507C10Rik (NM_030175.1,1666-1684).
cccgtgaaaaccaagagta

SEQ ID NO: 741691 - DNA, 19 bp, Mus musculus
  siRNA target sequence for 4930507C10Rik (NM_030175.1,1746-1764).
gaaagcagcccgaaaagca

SEQ ID NO: 741692 - DNA, 19 bp, Mus musculus
  siRNA target sequence for 2610039E05Rik (NM_030176.2,539-557).
ggtggccctaggttgcttt

SEQ ID NO: 741693 - DNA, 19 bp, Mus musculus
  siRNA target sequence for 2610039E05Rik (NM_030176.2,734-752).
gggcacacctgccacttat

SEQ ID NO: 741694 - DNA, 19 bp, Mus musculus
  siRNA target sequence for 2610039E05Rik (NM_030176.2,757-775).
ccccagtggacctgtatca

SEQ ID NO: 741695 - DNA, 19 bp, Mus musculus
  siRNA target sequence for 2610039E05Rik (NM_030176.2,878-896).
ggagcagagtgccaaacta

SEQ ID NO: 741696 - DNA, 19 bp, Mus musculus
  siRNA target sequence for 2610039E05Rik (NM_030176.2,920-938).
ggaaccgccagctgatgat

SEQ ID NO: 741697 - DNA, 19 bp, Mus musculus
  siRNA target sequence for 2610039E05Rik (NM_030176.2,925-943).
cgccagctgatgatatgca

SEQ ID NO: 741698 - DNA, 19 bp, Mus musculus
  siRNA target sequence for 2610039E05Rik (NM_030176.2,1034-1052).
gagtcgctcaggagactta

SEQ ID NO: 741699 - DNA, 19 bp, Mus musculus
  siRNA target sequence for 2610039E05Rik (NM_030176.2,1321-1339).
gagcacaggtggataacct

SEQ ID NO: 741700 - DNA, 19 bp, Mus musculus
  siRNA target sequence for 2610039E05Rik (NM_030176.2,1332-1350).
gataacctgctctatgaca

SEQ ID NO: 741701 - DNA, 19 bp, Mus musculus
  siRNA target sequence for 4833417L20Rik (NM_030179.2,150-168).
ggacctcccggatattcca

SEQ ID NO: 741702 - DNA, 19 bp, Mus musculus
  siRNA target sequence for 4833417L20Rik (NM_030179.2,156-174).
cccggatattccattggaa

SEQ ID NO: 741703 - DNA, 19 bp, Mus musculus
  siRNA target sequence for 4833417L20Rik (NM_030179.2,215-233).
gctcagatacatctgttat

SEQ ID NO: 741704 - DNA, 19 bp, Mus musculus
  siRNA target sequence for 4833417L20Rik (NM_030179.2,220-238).
gatacatctgttatcttct

SEQ ID NO: 741705 - DNA, 19 bp, Mus musculus
  siRNA target sequence for 4833417L20Rik (NM_030179.2,259-277).
ccttcggactgcgagtttt

SEQ ID NO: 741706 - DNA, 19 bp, Mus musculus
  siRNA target sequence for 4833417L20Rik (NM_030179.2,263-281).
cggactgcgagttttcttt

SEQ ID NO: 741707 - DNA, 19 bp, Mus musculus
  siRNA target sequence for 4833417L20Rik (NM_030179.2,299-317).
catcatgccaggaaattct

SEQ ID NO: 741708 - DNA, 19 bp, Mus musculus
  siRNA target sequence for 4833417L20Rik (NM_030179.2,387-405).
gaacatagacattattgga

SEQ ID NO: 741709 - DNA, 19 bp, Mus musculus
  siRNA target sequence for 4833417L20Rik (NM_030179.2,403-421).
ggaaatgagattcttaaga

SEQ ID NO: 741710 - DNA, 19 bp, Mus musculus
  siRNA target sequence for 4833417L20Rik (NM_030179.2,424-442).
ggctgcaatgtgaacgata

SEQ ID NO: 741711 - DNA, 19 bp, Mus musculus
  siRNA target sequence for 4833417L20Rik (NM_030179.2,428-446).
gcaatgtgaacgatagaga

SEQ ID NO: 741712 - DNA, 19 bp, Mus musculus
  siRNA target sequence for 4833417L20Rik (NM_030179.2,462-480).
gactctgctacattacact

SEQ ID NO: 741713 - DNA, 19 bp, Mus musculus
  siRNA target sequence for 4833417L20Rik (NM_030179.2,494-512).
ctcatggcatcggtgatat

SEQ ID NO: 741714 - DNA, 19 bp, Mus musculus
  siRNA target sequence for 4833417L20Rik (NM_030179.2,499-517).
ggcatcggtgatattgaga

SEQ ID NO: 741715 - DNA, 19 bp, Mus musculus
  siRNA target sequence for 4833417L20Rik (NM_030179.2,516-534).
gacagctgtaaaatttgct

SEQ ID NO: 741716 - DNA, 19 bp, Mus musculus
  siRNA target sequence for 4833417L20Rik (NM_030179.2,600-618).
gcattacgcttcgtacttt

SEQ ID NO: 741717 - DNA, 19 bp, Mus musculus
  siRNA target sequence for 4833417L20Rik (NM_030179.2,619-637).
gatgtcccagagcttatca

SEQ ID NO: 741718 - DNA, 19 bp, Mus musculus
  siRNA target sequence for 4833417L20Rik (NM_030179.2,651-669).
gacatcgaaaccaaaagat

SEQ ID NO: 741719 - DNA, 19 bp, Mus musculus
  siRNA target sequence for 4833417L20Rik (NM_030179.2,676-694).
gccacttgcagcgacttta

SEQ ID NO: 741720 - DNA, 19 bp, Mus musculus
  siRNA target sequence for 4833417L20Rik (NM_030179.2,680-698).
cttgcagcgactttaattt

SEQ ID NO: 741721 - DNA, 19 bp, Mus musculus
  siRNA target sequence for 4833417L20Rik (NM_030179.2,769-787).
gcgaaccctgcctttagga

SEQ ID NO: 741722 - DNA, 19 bp, Mus musculus
  siRNA target sequence for 4833417L20Rik (NM_030179.2,771-789).
gaaccctgcctttaggaat

SEQ ID NO: 741723 - DNA, 19 bp, Mus musculus
  siRNA target sequence for 4833417L20Rik (NM_030179.2,776-794).
ctgcctttaggaatgacaa

SEQ ID NO: 741724 - DNA, 19 bp, Mus musculus
  siRNA target sequence for 4833417L20Rik (NM_030179.2,859-877).
gcagcgatcgcgaaggaaa

SEQ ID NO: 741725 - DNA, 19 bp, Mus musculus
  siRNA target sequence for 4833417L20Rik (NM_030179.2,862-880).
gcgatcgcgaaggaaatca

SEQ ID NO: 741726 - DNA, 19 bp, Mus musculus
  siRNA target sequence for 4833417L20Rik (NM_030179.2,863-881).
cgatcgcgaaggaaatcaa

SEQ ID NO: 741727 - DNA, 19 bp, Mus musculus
  siRNA target sequence for 4833417L20Rik (NM_030179.2,864-882).
gatcgcgaaggaaatcaaa

SEQ ID NO: 741728 - DNA, 19 bp, Mus musculus
  siRNA target sequence for 4833417L20Rik (NM_030179.2,923-941).
ctaaggccgtgcttccaaa

SEQ ID NO: 741729 - DNA, 19 bp, Mus musculus
  siRNA target sequence for 4833417L20Rik (NM_030179.2,1018-1036).
cagaaggttggaacattaa

SEQ ID NO: 741730 - DNA, 19 bp, Mus musculus
  siRNA target sequence for 4833417L20Rik (NM_030179.2,1023-1041).
ggttggaacattaagattt

SEQ ID NO: 741731 - DNA, 19 bp, Mus musculus
  siRNA target sequence for 4833417L20Rik (NM_030179.2,1024-1042).
gttggaacattaagatttt

SEQ ID NO: 741732 - DNA, 19 bp, Mus musculus
  siRNA target sequence for 4833417L20Rik (NM_030179.2,1045-1063).
ggaacaacggagtttgcaa

SEQ ID NO: 741733 - DNA, 19 bp, Mus musculus
  siRNA target sequence for 4833417L20Rik (NM_030179.2,1171-1189).
cccctttcaaagataagta

SEQ ID NO: 741734 - DNA, 19 bp, Mus musculus
  siRNA target sequence for 4833417L20Rik (NM_030179.2,1278-1296).
cttcacatccagagtcaat

SEQ ID NO: 741735 - DNA, 19 bp, Mus musculus
  siRNA target sequence for 4833417L20Rik (NM_030179.2,1298-1316).
ccgggttgacgacatctaa

SEQ ID NO: 741736 - DNA, 19 bp, Mus musculus
  siRNA target sequence for 4833417L20Rik (NM_030179.2,1299-1317).
cgggttgacgacatctaaa

SEQ ID NO: 741737 - DNA, 19 bp, Mus musculus
  siRNA target sequence for 4833417L20Rik (NM_030179.2,1300-1318).
gggttgacgacatctaaaa

SEQ ID NO: 741738 - DNA, 19 bp, Mus musculus
  siRNA target sequence for 4833417L20Rik (NM_030179.2,1301-1319).
ggttgacgacatctaaaaa

SEQ ID NO: 741739 - DNA, 19 bp, Mus musculus
  siRNA target sequence for 4833417L20Rik (NM_030179.2,1356-1374).
cagtgaagaaccgaaaact

SEQ ID NO: 741740 - DNA, 19 bp, Mus musculus
  siRNA target sequence for 4833417L20Rik (NM_030179.2,1358-1376).
gtgaagaaccgaaaactgt

SEQ ID NO: 741741 - DNA, 19 bp, Mus musculus
  siRNA target sequence for 4833417L20Rik (NM_030179.2,1624-1642).
cgagtaggcaccattaagt

SEQ ID NO: 741742 - DNA, 19 bp, Mus musculus
  siRNA target sequence for 4833417L20Rik (NM_030179.2,1698-1716).
gccccacgggaagaatgat

SEQ ID NO: 741743 - DNA, 19 bp, Mus musculus
  siRNA target sequence for 4833417L20Rik (NM_030179.2,1721-1739).
cggttggaggtgtacagta

SEQ ID NO: 741744 - DNA, 19 bp, Mus musculus
  siRNA target sequence for 4833417L20Rik (NM_030179.2,1748-1766).
gctctccgagatatggaat

SEQ ID NO: 741745 - DNA, 19 bp, Mus musculus
  siRNA target sequence for 4833417L20Rik (NM_030179.2,1749-1767).
ctctccgagatatggaata

SEQ ID NO: 741746 - DNA, 19 bp, Mus musculus
  siRNA target sequence for 4833417L20Rik (NM_030179.2,1751-1769).
ctccgagatatggaatatt

SEQ ID NO: 741747 - DNA, 19 bp, Mus musculus
  siRNA target sequence for 4833417L20Rik (NM_030179.2,1786-1804).
gtacagaggctatcagatt

SEQ ID NO: 741748 - DNA, 19 bp, Mus musculus
  siRNA target sequence for 4833417L20Rik (NM_030179.2,1905-1923).
gattaacaggagaaatgct

SEQ ID NO: 741749 - DNA, 19 bp, Mus musculus
  siRNA target sequence for 4833417L20Rik (NM_030179.2,2025-2043).
gctcacaagctctaacgaa

SEQ ID NO: 741750 - DNA, 19 bp, Mus musculus
  siRNA target sequence for 4833417L20Rik (NM_030179.2,2026-2044).
ctcacaagctctaacgaaa

SEQ ID NO: 741751 - DNA, 19 bp, Mus musculus
  siRNA target sequence for 4833417L20Rik (NM_030179.2,2111-2129).
gaagtgccaaggggaaaaa

SEQ ID NO: 741752 - DNA, 19 bp, Mus musculus
  siRNA target sequence for 4833417L20Rik (NM_030179.2,2143-2161).
ggtgacaagcgctatttca

SEQ ID NO: 741753 - DNA, 19 bp, Mus musculus
  siRNA target sequence for 4930405J24Rik (NM_030181.1,158-176).
gactgttggatctaatgtt

SEQ ID NO: 741754 - DNA, 19 bp, Mus musculus
  siRNA target sequence for 4930405J24Rik (NM_030181.1,212-230).
cctggaaaagctttcaatt

SEQ ID NO: 741755 - DNA, 19 bp, Mus musculus
  siRNA target sequence for 4930405J24Rik (NM_030181.1,261-279).
gaggagccaatatctatct

SEQ ID NO: 741756 - DNA, 19 bp, Mus musculus
  siRNA target sequence for 4930405J24Rik (NM_030181.1,267-285).
ccaatatctatctactact

SEQ ID NO: 741757 - DNA, 19 bp, Mus musculus
  siRNA target sequence for 4930405J24Rik (NM_030181.1,307-325).
ctattgggcaattcaaaga

SEQ ID NO: 741758 - DNA, 19 bp, Mus musculus
  siRNA target sequence for 4930405J24Rik (NM_030181.1,328-346).
gaataattggggctactaa

SEQ ID NO: 741759 - DNA, 19 bp, Mus musculus
  siRNA target sequence for 4930405J24Rik (NM_030181.1,348-366).
cccggtaatgcatctatca

SEQ ID NO: 741760 - DNA, 19 bp, Mus musculus
  siRNA target sequence for 4930405J24Rik (NM_030181.1,358-376).
catctatcaccatattgca

SEQ ID NO: 741761 - DNA, 19 bp, Mus musculus
  siRNA target sequence for 4930405J24Rik (NM_030181.1,361-379).
ctatcaccatattgcatat

SEQ ID NO: 741762 - DNA, 19 bp, Mus musculus
  siRNA target sequence for 4930405J24Rik (NM_030181.1,383-401).
gccagcagacagtggaatt

SEQ ID NO: 741763 - DNA, 19 bp, Mus musculus
  siRNA target sequence for 4930405J24Rik (NM_030181.1,455-473).
ccttgacgtcactgtctta

SEQ ID NO: 741764 - DNA, 19 bp, Mus musculus
  siRNA target sequence for 4930405J24Rik (NM_030181.1,459-477).
gacgtcactgtcttagtca

SEQ ID NO: 741765 - DNA, 19 bp, Mus musculus
  siRNA target sequence for 4930405J24Rik (NM_030181.1,461-479).
cgtcactgtcttagtcaaa

SEQ ID NO: 741766 - DNA, 19 bp, Mus musculus
  siRNA target sequence for 4930405J24Rik (NM_030181.1,520-538).
caggccatcctatttcctt

SEQ ID NO: 741767 - DNA, 19 bp, Mus musculus
  siRNA target sequence for 4930405J24Rik (NM_030181.1,525-543).
catcctatttccttgtctt

SEQ ID NO: 741768 - DNA, 19 bp, Mus musculus
  siRNA target sequence for 4930405J24Rik (NM_030181.1,559-577).
gaacaccgtctcctttgta

SEQ ID NO: 741769 - DNA, 19 bp, Mus musculus
  siRNA target sequence for 4930405J24Rik (NM_030181.1,562-580).
caccgtctcctttgtatta

SEQ ID NO: 741770 - DNA, 19 bp, Mus musculus
  siRNA target sequence for 4930405J24Rik (NM_030181.1,570-588).
cctttgtattactggtata

SEQ ID NO: 741771 - DNA, 19 bp, Mus musculus
  siRNA target sequence for 4930405J24Rik (NM_030181.1,602-620).
caccattgtgccagtaaaa

SEQ ID NO: 741772 - DNA, 19 bp, Mus musculus
  siRNA target sequence for 4930405J24Rik (NM_030181.1,604-622).
ccattgtgccagtaaaaga

SEQ ID NO: 741773 - DNA, 19 bp, Mus musculus
  siRNA target sequence for 4930405J24Rik (NM_030181.1,605-623).
cattgtgccagtaaaagaa

SEQ ID NO: 741774 - DNA, 19 bp, Mus musculus
  siRNA target sequence for 4930405J24Rik (NM_030181.1,632-650).
cacggccactggagtttta

SEQ ID NO: 741775 - DNA, 19 bp, Mus musculus
  siRNA target sequence for 4930405J24Rik (NM_030181.1,634-652).
cggccactggagttttagt

SEQ ID NO: 741776 - DNA, 19 bp, Mus musculus
  siRNA target sequence for 4930405J24Rik (NM_030181.1,635-653).
ggccactggagttttagtt

SEQ ID NO: 741777 - DNA, 19 bp, Mus musculus
  siRNA target sequence for 4930405J24Rik (NM_030181.1,636-654).
gccactggagttttagtta

SEQ ID NO: 741778 - DNA, 19 bp, Mus musculus
  siRNA target sequence for 4930405J24Rik (NM_030181.1,637-655).
ccactggagttttagttat

SEQ ID NO: 741779 - DNA, 19 bp, Mus musculus
  siRNA target sequence for 4930405J24Rik (NM_030181.1,638-656).
cactggagttttagttatt

SEQ ID NO: 741780 - DNA, 19 bp, Mus musculus
  siRNA target sequence for 4930405J24Rik (NM_030181.1,667-685).
caaattttgaacaaggtta

SEQ ID NO: 741781 - DNA, 19 bp, Mus musculus
  siRNA target sequence for 4930405J24Rik (NM_030181.1,714-732).
ggcaatagttcctgtgaaa

SEQ ID NO: 741782 - DNA, 19 bp, Mus musculus
  siRNA target sequence for 4930405J24Rik (NM_030181.1,715-733).
gcaatagttcctgtgaaat

SEQ ID NO: 741783 - DNA, 19 bp, Mus musculus
  siRNA target sequence for 4930405J24Rik (NM_030181.1,754-772).
cagaagttgggatcatcat

SEQ ID NO: 741784 - DNA, 19 bp, Mus musculus
  siRNA target sequence for 4930405J24Rik (NM_030181.1,798-816).
ggagctgctgttatcatct

SEQ ID NO: 741785 - DNA, 19 bp, Mus musculus
  siRNA target sequence for 4930405J24Rik (NM_030181.1,831-849).
gccaggaacaaagttaaat

SEQ ID NO: 741786 - DNA, 19 bp, Mus musculus
  siRNA target sequence for 4930405J24Rik (NM_030181.1,915-933).
caacaaagtgaggcaattt

SEQ ID NO: 741787 - DNA, 19 bp, Mus musculus
  siRNA target sequence for 4930405J24Rik (NM_030181.1,989-1007).
caacaccgaacctactact

SEQ ID NO: 741788 - DNA, 19 bp, Mus musculus
  siRNA target sequence for 4930405J24Rik (NM_030181.1,1220-1238).
ccagtctggagtaataatt

SEQ ID NO: 741789 - DNA, 19 bp, Mus musculus
  siRNA target sequence for 4930405J24Rik (NM_030181.1,1253-1271).
ggcgggagaggatacagtt

SEQ ID NO: 741790 - DNA, 19 bp, Mus musculus
  siRNA target sequence for 4930506L13Rik (NM_030188.2,42-60).
gcaaagcagctctaaagtt

SEQ ID NO: 741791 - DNA, 19 bp, Mus musculus
  siRNA target sequence for 4930506L13Rik (NM_030188.2,1818-1836).
catgtcaaagcacatgata

SEQ ID NO: 741792 - DNA, 19 bp, Mus musculus
  siRNA target sequence for 4930506L13Rik (NM_030188.2,1839-1857).
gctttgtgacggtgttgtt

SEQ ID NO: 741793 - DNA, 19 bp, Mus musculus
  siRNA target sequence for 4930506L13Rik (NM_030188.2,2005-2023).
gaggtcatagggtggaata

SEQ ID NO: 741794 - DNA, 19 bp, Mus musculus
  siRNA target sequence for 4930506L13Rik (NM_030188.2,2008-2026).
gtcatagggtggaatatgt

SEQ ID NO: 741795 - DNA, 19 bp, Mus musculus
  siRNA target sequence for 4930555I21Rik (NM_030189.1,274-292).
cgccgacagagttcagaaa

SEQ ID NO: 741796 - DNA, 19 bp, Mus musculus
  siRNA target sequence for 4930555I21Rik (NM_030189.1,317-335).
cagtcctccatcccttata

SEQ ID NO: 741797 - DNA, 19 bp, Mus musculus
  siRNA target sequence for 4930555I21Rik (NM_030189.1,336-354).
gacacaggacgtcaataat

SEQ ID NO: 741798 - DNA, 19 bp, Mus musculus
  siRNA target sequence for 4930555I21Rik (NM_030189.1,346-364).
gtcaataatcccagaatca

SEQ ID NO: 741799 - DNA, 19 bp, Mus musculus
  siRNA target sequence for 4930555I21Rik (NM_030189.1,363-381).
cagaaaaaaagggatttaa

SEQ ID NO: 741800 - DNA, 19 bp, Mus musculus
  siRNA target sequence for 4930555I21Rik (NM_030189.1,382-400).
cagccaagccaggagattt

SEQ ID NO: 741801 - DNA, 19 bp, Mus musculus
  siRNA target sequence for 4930555I21Rik (NM_030189.1,384-402).
gccaagccaggagatttta

SEQ ID NO: 741802 - DNA, 19 bp, Mus musculus
  siRNA target sequence for 4930555I21Rik (NM_030189.1,390-408).
ccaggagattttatagcaa

SEQ ID NO: 741803 - DNA, 19 bp, Mus musculus
  siRNA target sequence for 4930555I21Rik (NM_030189.1,396-414).
gattttatagcaaaaagga

SEQ ID NO: 741804 - DNA, 19 bp, Mus musculus
  siRNA target sequence for 4930555I21Rik (NM_030189.1,487-505).
gagaggaacgtgcactttt

SEQ ID NO: 741805 - DNA, 19 bp, Mus musculus
  siRNA target sequence for 4930555I21Rik (NM_030189.1,551-569).
gctgccaacgcgtatacca

SEQ ID NO: 741806 - DNA, 19 bp, Mus musculus
  siRNA target sequence for 4930555I21Rik (NM_030189.1,552-570).
ctgccaacgcgtataccat

SEQ ID NO: 741807 - DNA, 19 bp, Mus musculus
  siRNA target sequence for 4930555I21Rik (NM_030189.1,725-743).
gctcgagccgggtttctgt

SEQ ID NO: 741808 - DNA, 19 bp, Mus musculus
  siRNA target sequence for 4930555I21Rik (NM_030189.1,731-749).
gccgggtttctgtcgaaaa

SEQ ID NO: 741809 - DNA, 19 bp, Mus musculus
  siRNA target sequence for 4930555I21Rik (NM_030189.1,792-810).
caccagggcattacaatgt

SEQ ID NO: 741810 - DNA, 19 bp, Mus musculus
  siRNA target sequence for 4930555I21Rik (NM_030189.1,794-812).
ccagggcattacaatgtca

SEQ ID NO: 741811 - DNA, 19 bp, Mus musculus
  siRNA target sequence for 4930555I21Rik (NM_030189.1,795-813).
cagggcattacaatgtcaa

SEQ ID NO: 741812 - DNA, 19 bp, Mus musculus
  siRNA target sequence for 4930555I21Rik (NM_030189.1,828-846).
ggcaatcgccaaagttctt

SEQ ID NO: 741813 - DNA, 19 bp, Mus musculus
  siRNA target sequence for 4930555I21Rik (NM_030189.1,829-847).
gcaatcgccaaagttctta

SEQ ID NO: 741814 - DNA, 19 bp, Mus musculus
  siRNA target sequence for 4930555I21Rik (NM_030189.1,830-848).
caatcgccaaagttcttaa

SEQ ID NO: 741815 - DNA, 19 bp, Mus musculus
  siRNA target sequence for 4930555I21Rik (NM_030189.1,844-862).
cttaatgtcctgcttcaaa

SEQ ID NO: 741816 - DNA, 19 bp, Mus musculus
  siRNA target sequence for 4930555I21Rik (NM_030189.1,867-885).
gaactggccgtggattaaa

SEQ ID NO: 741817 - DNA, 19 bp, Mus musculus
  siRNA target sequence for 4930555I21Rik (NM_030189.1,903-921).
cgggacccggttactacaa

SEQ ID NO: 741818 - DNA, 19 bp, Mus musculus
  siRNA target sequence for 4930555I21Rik (NM_030189.1,929-947).
gatcaaaccaagattctga

SEQ ID NO: 741819 - DNA, 19 bp, Mus musculus
  siRNA target sequence for 4930555I21Rik (NM_030189.1,1062-1080).
gacccccaaagcacttcat

SEQ ID NO: 741820 - DNA, 19 bp, Mus musculus
  siRNA target sequence for 4930555I21Rik (NM_030189.1,1078-1096).
catctccagtgcatcgttt

SEQ ID NO: 741821 - DNA, 19 bp, Mus musculus
  siRNA target sequence for 4930555I21Rik (NM_030189.1,1112-1130).
cggtggccaatgaagtcat

SEQ ID NO: 741822 - DNA, 19 bp, Mus musculus
  siRNA target sequence for 4930555I21Rik (NM_030189.1,1156-1174).
cacgtacaagccagagatt

SEQ ID NO: 741823 - DNA, 19 bp, Mus musculus
  siRNA target sequence for 4930555I21Rik (NM_030189.1,1183-1201).
gcaatccttcctctacaat

SEQ ID NO: 741824 - DNA, 19 bp, Mus musculus
  siRNA target sequence for 2700085M18Rik (NM_030198.1,216-234).
cgctccctcagggtacaaa

SEQ ID NO: 741825 - DNA, 19 bp, Mus musculus
  siRNA target sequence for 2700085M18Rik (NM_030198.1,217-235).
gctccctcagggtacaaaa

SEQ ID NO: 741826 - DNA, 19 bp, Mus musculus
  siRNA target sequence for 2700085M18Rik (NM_030198.1,220-238).
ccctcagggtacaaaactt

SEQ ID NO: 741827 - DNA, 19 bp, Mus musculus
  siRNA target sequence for 2700085M18Rik (NM_030198.1,222-240).
ctcagggtacaaaacttga

SEQ ID NO: 741828 - DNA, 19 bp, Mus musculus
  siRNA target sequence for 2700085M18Rik (NM_030198.1,226-244).
gggtacaaaacttgaactt

SEQ ID NO: 741829 - DNA, 19 bp, Mus musculus
  siRNA target sequence for 2700085M18Rik (NM_030198.1,253-271).
gctggctaaaggactcttt

SEQ ID NO: 741830 - DNA, 19 bp, Mus musculus
  siRNA target sequence for 2700085M18Rik (NM_030198.1,323-341).
ggatggaggactgtattca

SEQ ID NO: 741831 - DNA, 19 bp, Mus musculus
  siRNA target sequence for 2700085M18Rik (NM_030198.1,356-374).
gtcgtggacctccacaaaa

SEQ ID NO: 741832 - DNA, 19 bp, Mus musculus
  siRNA target sequence for 2700085M18Rik (NM_030198.1,402-420).
cacaactcctgcattttga

SEQ ID NO: 741833 - DNA, 19 bp, Mus musculus
  siRNA target sequence for 2700085M18Rik (NM_030198.1,404-422).
caactcctgcattttgaca

SEQ ID NO: 741834 - DNA, 19 bp, Mus musculus
  siRNA target sequence for 2700085M18Rik (NM_030198.1,425-443).
ccggagaatgcagatattt

SEQ ID NO: 741835 - DNA, 19 bp, Mus musculus
  siRNA target sequence for 2700085M18Rik (NM_030198.1,491-509).
gactcctcccagaattctt

SEQ ID NO: 741836 - DNA, 19 bp, Mus musculus
  siRNA target sequence for 2700085M18Rik (NM_030198.1,499-517).
ccagaattcttacaatgaa

SEQ ID NO: 741837 - DNA, 19 bp, Mus musculus
  siRNA target sequence for 2700085M18Rik (NM_030198.1,550-568).
gacagagaggggcttattt

SEQ ID NO: 741838 - DNA, 19 bp, Mus musculus
  siRNA target sequence for 2700085M18Rik (NM_030198.1,574-592).
cgggcagagaagtctaaat

SEQ ID NO: 741839 - DNA, 19 bp, Mus musculus
  siRNA target sequence for 2700085M18Rik (NM_030198.1,614-632).
ggacaagcttctcagatta

SEQ ID NO: 741840 - DNA, 19 bp, Mus musculus
  siRNA target sequence for 2700085M18Rik (NM_030198.1,640-658).
cagcctcgtccagaattat

SEQ ID NO: 741841 - DNA, 19 bp, Mus musculus
  siRNA target sequence for 2700085M18Rik (NM_030198.1,642-660).
gcctcgtccagaattataa

SEQ ID NO: 741842 - DNA, 19 bp, Mus musculus
  siRNA target sequence for 2700085M18Rik (NM_030198.1,646-664).
cgtccagaattataagaaa

SEQ ID NO: 741843 - DNA, 19 bp, Mus musculus
  siRNA target sequence for 2700085M18Rik (NM_030198.1,647-665).
gtccagaattataagaaaa

SEQ ID NO: 741844 - DNA, 19 bp, Mus musculus
  siRNA target sequence for 0610011B16Rik (NM_030205.2,175-193).
ggcctggatcagtgatatt

SEQ ID NO: 741845 - DNA, 19 bp, Mus musculus
  siRNA target sequence for 0610011B16Rik (NM_030205.2,178-196).
ctggatcagtgatattcgt

SEQ ID NO: 741846 - DNA, 19 bp, Mus musculus
  siRNA target sequence for 0610011B16Rik (NM_030205.2,213-231).
catgcgggaaccacatcaa

SEQ ID NO: 741847 - DNA, 19 bp, Mus musculus
  siRNA target sequence for 0610011B16Rik (NM_030205.2,217-235).
cgggaaccacatcaaatca

SEQ ID NO: 741848 - DNA, 19 bp, Mus musculus
  siRNA target sequence for 0610011B16Rik (NM_030205.2,240-258).
gcagcttgatcgctttcaa

SEQ ID NO: 741849 - DNA, 19 bp, Mus musculus
  siRNA target sequence for 0610011B16Rik (NM_030205.2,328-346).
ctaccttggctgtcattca

SEQ ID NO: 741850 - DNA, 19 bp, Mus musculus
  siRNA target sequence for 0610011B16Rik (NM_030205.2,405-423).
cagctgacaggacgataaa

SEQ ID NO: 741851 - DNA, 19 bp, Mus musculus
  siRNA target sequence for 0610011B16Rik (NM_030205.2,769-787).
ggcatggacaggcattcaa

SEQ ID NO: 741852 - DNA, 19 bp, Mus musculus
  siRNA target sequence for 0610011B16Rik (NM_030205.2,771-789).
catggacaggcattcaaga

SEQ ID NO: 741853 - DNA, 19 bp, Mus musculus
  siRNA target sequence for 0610011B16Rik (NM_030205.2,956-974).
ggtgagaatcagctatact

SEQ ID NO: 741854 - DNA, 19 bp, Mus musculus
  siRNA target sequence for 0610011B16Rik (NM_030205.2,1114-1132).
gagtgacacagccatcata

SEQ ID NO: 741855 - DNA, 19 bp, Mus musculus
  siRNA target sequence for 0610011B16Rik (NM_030205.2,1144-1162).
ccacgtgccccgaaaagct

SEQ ID NO: 741856 - DNA, 19 bp, Mus musculus
  siRNA target sequence for 0610011B16Rik (NM_030205.2,1152-1170).
cccgaaaagctgtagagtt

SEQ ID NO: 741857 - DNA, 19 bp, Mus musculus
  siRNA target sequence for 0610011B16Rik (NM_030205.2,1309-1327).
cctggtgcccactatggaa

SEQ ID NO: 741858 - DNA, 19 bp, Mus musculus
  siRNA target sequence for 0610011B16Rik (NM_030205.2,1378-1396).
cctaagtgagggcttttct

SEQ ID NO: 741859 - DNA, 19 bp, Mus musculus
  siRNA target sequence for 0610011B16Rik (NM_030205.2,1379-1397).
ctaagtgagggcttttctt

SEQ ID NO: 741860 - DNA, 19 bp, Mus musculus
  siRNA target sequence for 0610011B16Rik (NM_030205.2,1711-1729).
cacagcattgcctacactt

SEQ ID NO: 741861 - DNA, 19 bp, Mus musculus
  siRNA target sequence for 0610011B16Rik (NM_030205.2,1881-1899).
gccacacagaaaagatcta

SEQ ID NO: 741862 - DNA, 19 bp, Mus musculus
  siRNA target sequence for 0610011B16Rik (NM_030205.2,1936-1954).
ggcttccagttcctatgat

SEQ ID NO: 741863 - DNA, 19 bp, Mus musculus
  siRNA target sequence for 0610011B16Rik (NM_030205.2,2010-2028).
gccatcaggaccagatttt

SEQ ID NO: 741864 - DNA, 19 bp, Mus musculus
  siRNA target sequence for 0610011B16Rik (NM_030205.2,2015-2033).
caggaccagatttttagct

SEQ ID NO: 741865 - DNA, 19 bp, Mus musculus
  siRNA target sequence for 0610011B16Rik (NM_030205.2,2082-2100).
ggcatgtgcgggtctatga

SEQ ID NO: 741866 - DNA, 19 bp, Mus musculus
  siRNA target sequence for 0610011B16Rik (NM_030205.2,2364-2382).
cccgtgtgttcctgtatga

SEQ ID NO: 741867 - DNA, 19 bp, Mus musculus
  siRNA target sequence for 0610011B16Rik (NM_030205.2,2411-2429).
gagtgcaacagcttcacat

SEQ ID NO: 741868 - DNA, 19 bp, Mus musculus
  siRNA target sequence for 0610011B16Rik (NM_030205.2,2464-2482).
caagactgagtgtgacatt

SEQ ID NO: 741869 - DNA, 19 bp, Mus musculus
  siRNA target sequence for 0610011B16Rik (NM_030205.2,2555-2573).
cgggtcagaaaagaattct

SEQ ID NO: 741870 - DNA, 19 bp, Mus musculus
  siRNA target sequence for 0610011B16Rik (NM_030205.2,2635-2653).
ctggtttgagggtgctaat

SEQ ID NO: 741871 - DNA, 19 bp, Mus musculus
  siRNA target sequence for 0610011B16Rik (NM_030205.2,2736-2754).
ccccatcttcagcacaata

SEQ ID NO: 741872 - DNA, 19 bp, Mus musculus
  siRNA target sequence for 0610011B16Rik (NM_030205.2,2738-2756).
ccatcttcagcacaatact

SEQ ID NO: 741873 - DNA, 19 bp, Mus musculus
  siRNA target sequence for 2310047I15Rik (NM_030207.1,177-195).
gggatggtgtggttaagaa

SEQ ID NO: 741874 - DNA, 19 bp, Mus musculus
  siRNA target sequence for 2310047I15Rik (NM_030207.1,178-196).
ggatggtgtggttaagaaa

SEQ ID NO: 741875 - DNA, 19 bp, Mus musculus
  siRNA target sequence for 2310047I15Rik (NM_030207.1,182-200).
ggtgtggttaagaaacctt

SEQ ID NO: 741876 - DNA, 19 bp, Mus musculus
  siRNA target sequence for 2310047I15Rik (NM_030207.1,267-285).
gaagctgccactctatata

SEQ ID NO: 741877 - DNA, 19 bp, Mus musculus
  siRNA target sequence for 2310047I15Rik (NM_030207.1,270-288).
gctgccactctatatacta

SEQ ID NO: 741878 - DNA, 19 bp, Mus musculus
  siRNA target sequence for 2310047I15Rik (NM_030207.1,271-289).
ctgccactctatatactat

SEQ ID NO: 741879 - DNA, 19 bp, Mus musculus
  siRNA target sequence for 2310047I15Rik (NM_030207.1,273-291).
gccactctatatactatca

SEQ ID NO: 741880 - DNA, 19 bp, Mus musculus
  siRNA target sequence for 2310047I15Rik (NM_030207.1,274-292).
ccactctatatactatcat

SEQ ID NO: 741881 - DNA, 19 bp, Mus musculus
  siRNA target sequence for 2310047I15Rik (NM_030207.1,306-324).
ggactcggtaccgattaca

SEQ ID NO: 741882 - DNA, 19 bp, Mus musculus
  siRNA target sequence for 2310047I15Rik (NM_030207.1,307-325).
gactcggtaccgattacaa

SEQ ID NO: 741883 - DNA, 19 bp, Mus musculus
  siRNA target sequence for 2310047I15Rik (NM_030207.1,309-327).
ctcggtaccgattacaaga

SEQ ID NO: 741884 - DNA, 19 bp, Mus musculus
  siRNA target sequence for 2310047I15Rik (NM_030207.1,312-330).
ggtaccgattacaagaact

SEQ ID NO: 741885 - DNA, 19 bp, Mus musculus
  siRNA target sequence for 2310047I15Rik (NM_030207.1,313-331).
gtaccgattacaagaactt

SEQ ID NO: 741886 - DNA, 19 bp, Mus musculus
  siRNA target sequence for 2310047I15Rik (NM_030207.1,318-336).
gattacaagaacttcgaat

SEQ ID NO: 741887 - DNA, 19 bp, Mus musculus
  siRNA target sequence for 2310047I15Rik (NM_030207.1,339-357).
ggtgtgtggccagaaagtt

SEQ ID NO: 741888 - DNA, 19 bp, Mus musculus
  siRNA target sequence for 2310047I15Rik (NM_030207.1,347-365).
gccagaaagttcctgtatt

SEQ ID NO: 741889 - DNA, 19 bp, Mus musculus
  siRNA target sequence for 2310047I15Rik (NM_030207.1,367-385).
gtggattcgagtgactttt

SEQ ID NO: 741890 - DNA, 19 bp, Mus musculus
  siRNA target sequence for 2310047I15Rik (NM_030207.1,370-388).
gattcgagtgacttttgga

SEQ ID NO: 741891 - DNA, 19 bp, Mus musculus
  siRNA target sequence for 2310047I15Rik (NM_030207.1,506-524).
gctgactgtcactacagat

SEQ ID NO: 741892 - DNA, 19 bp, Mus musculus
  siRNA target sequence for 2310047I15Rik (NM_030207.1,507-525).
ctgactgtcactacagata

SEQ ID NO: 741893 - DNA, 19 bp, Mus musculus
  siRNA target sequence for 2310047I15Rik (NM_030207.1,513-531).
gtcactacagatactactt

SEQ ID NO: 741894 - DNA, 19 bp, Mus musculus
  siRNA target sequence for 2310047I15Rik (NM_030207.1,606-624).
ctgagcatcatgatacgaa

SEQ ID NO: 741895 - DNA, 19 bp, Mus musculus
  siRNA target sequence for 2310047I15Rik (NM_030207.1,617-635).
gatacgaagcagaagatgt

SEQ ID NO: 741896 - DNA, 19 bp, Mus musculus
  siRNA target sequence for 2310047I15Rik (NM_030207.1,643-661).
ctggaagtcctggttgata

SEQ ID NO: 741897 - DNA, 19 bp, Mus musculus
  siRNA target sequence for 2310047I15Rik (NM_030207.1,672-690).
ctcgtaggaccaaacttca

SEQ ID NO: 741898 - DNA, 19 bp, Mus musculus
  siRNA target sequence for 2310047I15Rik (NM_030207.1,675-693).
gtaggaccaaacttcacat

SEQ ID NO: 741899 - DNA, 19 bp, Mus musculus
  siRNA target sequence for 2310047I15Rik (NM_030207.1,1342-1360).
gctgtggtgggcgttacat

SEQ ID NO: 741900 - DNA, 19 bp, Mus musculus
  siRNA target sequence for 2310047I15Rik (NM_030207.1,1410-1428).
ctcaagcaagagttcacta

SEQ ID NO: 741901 - DNA, 19 bp, Mus musculus
  siRNA target sequence for 2310047I15Rik (NM_030207.1,1682-1700).
caccatctggggtgtatca

SEQ ID NO: 741902 - DNA, 19 bp, Mus musculus
  siRNA target sequence for 2310047I15Rik (NM_030207.1,1684-1702).
ccatctggggtgtatcaga

SEQ ID NO: 741903 - DNA, 19 bp, Mus musculus
  siRNA target sequence for 2310079F23Rik (NM_030208.1,416-434).
gagctcgacctgattctca

SEQ ID NO: 741904 - DNA, 19 bp, Mus musculus
  siRNA target sequence for 2310079F23Rik (NM_030208.1,573-591).
cgagcaacgtgtatcaact

SEQ ID NO: 741905 - DNA, 19 bp, Mus musculus
  siRNA target sequence for 2310079F23Rik (NM_030208.1,612-630).
gagaatggttcatatctgt

SEQ ID NO: 741906 - DNA, 19 bp, Mus musculus
  siRNA target sequence for 2310079F23Rik (NM_030208.1,687-705).
cctggctcggagaagaact

SEQ ID NO: 741907 - DNA, 19 bp, Mus musculus
  siRNA target sequence for 2310079F23Rik (NM_030208.1,823-841).
cagagacatggtaaaggtt

SEQ ID NO: 741908 - DNA, 19 bp, Mus musculus
  siRNA target sequence for 2310079F23Rik (NM_030208.1,838-856).
ggtttggcctgaagtaaca

SEQ ID NO: 741909 - DNA, 19 bp, Mus musculus
  siRNA target sequence for 2310079F23Rik (NM_030208.1,851-869).
gtaacagatcctgaaaagt

SEQ ID NO: 741910 - DNA, 19 bp, Mus musculus
  siRNA target sequence for 2310079F23Rik (NM_030208.1,861-879).
ctgaaaagtttgtctatga

SEQ ID NO: 741911 - DNA, 19 bp, Mus musculus
  siRNA target sequence for 2310079F23Rik (NM_030208.1,964-982).
ggacttggggtgtggaaat

SEQ ID NO: 741912 - DNA, 19 bp, Mus musculus
  siRNA target sequence for 2310079F23Rik (NM_030208.1,1018-1036).
cccaggtagagggattgat

SEQ ID NO: 741913 - DNA, 19 bp, Mus musculus
  siRNA target sequence for 2310079F23Rik (NM_030208.1,1019-1037).
ccaggtagagggattgata

SEQ ID NO: 741914 - DNA, 19 bp, Mus musculus
  siRNA target sequence for 2310079F23Rik (NM_030208.1,1030-1048).
gattgatatccgaagaaga

SEQ ID NO: 741915 - DNA, 19 bp, Mus musculus
  siRNA target sequence for 2310079F23Rik (NM_030208.1,1141-1159).
gattggtaaccattctgat

SEQ ID NO: 741916 - DNA, 19 bp, Mus musculus
  siRNA target sequence for 2310079F23Rik (NM_030208.1,1230-1248).
gctgttttttcgactttgt

SEQ ID NO: 741917 - DNA, 19 bp, Mus musculus
  siRNA target sequence for 2310079F23Rik (NM_030208.1,1279-1297).
gacacagtaccgagagtat

SEQ ID NO: 741918 - DNA, 19 bp, Mus musculus
  siRNA target sequence for 2310079F23Rik (NM_030208.1,1281-1299).
cacagtaccgagagtatct

SEQ ID NO: 741919 - DNA, 19 bp, Mus musculus
  siRNA target sequence for 2310079F23Rik (NM_030208.1,1355-1373).
ctcaggattccttctacta

SEQ ID NO: 741920 - DNA, 19 bp, Mus musculus
  siRNA target sequence for 2310079F23Rik (NM_030208.1,1669-1687).
cgagcgtgtgaggaattgt

SEQ ID NO: 741921 - DNA, 19 bp, Mus musculus
  siRNA target sequence for 2310079F23Rik (NM_030208.1,1727-1745).
caggtggcaaacttgttgt

SEQ ID NO: 741922 - DNA, 19 bp, Mus musculus
  siRNA target sequence for 2310079F23Rik (NM_030208.1,1729-1747).
ggtggcaaacttgttgtta

SEQ ID NO: 741923 - DNA, 19 bp, Mus musculus
  siRNA target sequence for 2310079F23Rik (NM_030208.1,1759-1777).
gttcaacacaggaaactct

SEQ ID NO: 741924 - DNA, 19 bp, Mus musculus
  siRNA target sequence for 2310079F23Rik (NM_030208.1,1887-1905).
gcctacagacccttctcaa

SEQ ID NO: 741925 - DNA, 19 bp, Mus musculus
  siRNA target sequence for 2310079F23Rik (NM_030208.1,1892-1910).
cagacccttctcaagaata

SEQ ID NO: 741926 - DNA, 19 bp, Mus musculus
  siRNA target sequence for 2310079F23Rik (NM_030208.1,1906-1924).
gaatagccatcaagtgttt

SEQ ID NO: 741927 - DNA, 19 bp, Mus musculus
  siRNA target sequence for 9130017N09Rik (NM_030218.1,290-308).
ccagaccagaccagatgta

SEQ ID NO: 741928 - DNA, 19 bp, Mus musculus
  siRNA target sequence for 9130017N09Rik (NM_030218.1,386-404).
ggatgaggagataaagtct

SEQ ID NO: 741929 - DNA, 19 bp, Mus musculus
  siRNA target sequence for 9130017N09Rik (NM_030218.1,387-405).
gatgaggagataaagtctt

SEQ ID NO: 741930 - DNA, 19 bp, Mus musculus
  siRNA target sequence for 9130017N09Rik (NM_030218.1,593-611).
ggtggacacggagcaaatt

SEQ ID NO: 741931 - DNA, 19 bp, Mus musculus
  siRNA target sequence for 9130017N09Rik (NM_030218.1,596-614).
ggacacggagcaaattgat

SEQ ID NO: 741932 - DNA, 19 bp, Mus musculus
  siRNA target sequence for 9130017N09Rik (NM_030218.1,597-615).
gacacggagcaaattgatt

SEQ ID NO: 741933 - DNA, 19 bp, Mus musculus
  siRNA target sequence for 9130017N09Rik (NM_030218.1,601-619).
cggagcaaattgatttcct

SEQ ID NO: 741934 - DNA, 19 bp, Mus musculus
  siRNA target sequence for 9130017N09Rik (NM_030218.1,622-640).
ctgctcgacagcaattcct

SEQ ID NO: 741935 - DNA, 19 bp, Mus musculus
  siRNA target sequence for 9130017N09Rik (NM_030218.1,756-774).
ctagccaatggctatacca

SEQ ID NO: 741936 - DNA, 19 bp, Mus musculus
  siRNA target sequence for 9130017N09Rik (NM_030218.1,778-796).
ccgtcacgtcaccaatgaa

SEQ ID NO: 741937 - DNA, 19 bp, Mus musculus
  siRNA target sequence for 9130017N09Rik (NM_030218.1,831-849).
ccagctagatccatccata

SEQ ID NO: 741938 - DNA, 19 bp, Mus musculus
  siRNA target sequence for 9130017N09Rik (NM_030218.1,832-850).
cagctagatccatccatat

SEQ ID NO: 741939 - DNA, 19 bp, Mus musculus
  siRNA target sequence for 9130017N09Rik (NM_030218.1,835-853).
ctagatccatccatatagt

SEQ ID NO: 741940 - DNA, 19 bp, Mus musculus
  siRNA target sequence for 9130017N09Rik (NM_030218.1,838-856).
gatccatccatatagtcaa

SEQ ID NO: 741941 - DNA, 19 bp, Mus musculus
  siRNA target sequence for 9130017N09Rik (NM_030218.1,842-860).
catccatatagtcaatgat

SEQ ID NO: 741942 - DNA, 19 bp, Mus musculus
  siRNA target sequence for 9130017N09Rik (NM_030218.1,1213-1231).
gcctgagctccgattgcat

SEQ ID NO: 741943 - DNA, 19 bp, Mus musculus
  siRNA target sequence for 9130017N09Rik (NM_030218.1,1326-1344).
gggacccctaaactagaat

SEQ ID NO: 741944 - DNA, 19 bp, Mus musculus
  siRNA target sequence for 9130017N09Rik (NM_030218.1,1327-1345).
ggacccctaaactagaatt

SEQ ID NO: 741945 - DNA, 19 bp, Mus musculus
  siRNA target sequence for 9130017N09Rik (NM_030218.1,1331-1349).
ccctaaactagaattctca

SEQ ID NO: 741946 - DNA, 19 bp, Mus musculus
  siRNA target sequence for 9130017N09Rik (NM_030218.1,1626-1644).
cccatattgaggctacaaa

SEQ ID NO: 741947 - DNA, 19 bp, Mus musculus
  siRNA target sequence for 9130017N09Rik (NM_030218.1,1627-1645).
ccatattgaggctacaaaa

SEQ ID NO: 741948 - DNA, 19 bp, Mus musculus
  siRNA target sequence for 9130017N09Rik (NM_030218.1,1914-1932).
cccccagggcagaagacta

SEQ ID NO: 741949 - DNA, 19 bp, Mus musculus
  siRNA target sequence for 9130017N09Rik (NM_030218.1,2003-2021).
ggtaaagcggcacaagaat

SEQ ID NO: 741950 - DNA, 19 bp, Mus musculus
  siRNA target sequence for 9130017N09Rik (NM_030218.1,2035-2053).
gctgggaagcacacatcta

SEQ ID NO: 741951 - DNA, 19 bp, Mus musculus
  siRNA target sequence for Sp2 (NM_030220.2,386-404).
ctgcttgctgcgacatgta

SEQ ID NO: 741952 - DNA, 19 bp, Mus musculus
  siRNA target sequence for Sp2 (NM_030220.2,392-410).
gctgcgacatgtagcaaaa

SEQ ID NO: 741953 - DNA, 19 bp, Mus musculus
  siRNA target sequence for Sp2 (NM_030220.2,471-489).
ggaaactggtccctatcaa

SEQ ID NO: 741954 - DNA, 19 bp, Mus musculus
  siRNA target sequence for Sp2 (NM_030220.2,506-524).
ctcagtccctgcaagaata

SEQ ID NO: 741955 - DNA, 19 bp, Mus musculus
  siRNA target sequence for Sp2 (NM_030220.2,512-530).
ccctgcaagaatagcttta

SEQ ID NO: 741956 - DNA, 19 bp, Mus musculus
  siRNA target sequence for Sp2 (NM_030220.2,520-538).
gaatagctttagcatctta

SEQ ID NO: 741957 - DNA, 19 bp, Mus musculus
  siRNA target sequence for Sp2 (NM_030220.2,532-550).
catcttatcatctaaagga

SEQ ID NO: 741958 - DNA, 19 bp, Mus musculus
  siRNA target sequence for Sp2 (NM_030220.2,625-643).
ccccaccctgatcaacaaa

SEQ ID NO: 741959 - DNA, 19 bp, Mus musculus
  siRNA target sequence for Sp2 (NM_030220.2,648-666).
gccgatcaaatgcaagtat

SEQ ID NO: 741960 - DNA, 19 bp, Mus musculus
  siRNA target sequence for Sp2 (NM_030220.2,772-790).
caccaccccgtcaacatct

SEQ ID NO: 741961 - DNA, 19 bp, Mus musculus
  siRNA target sequence for Sp2 (NM_030220.2,780-798).
cgtcaacatctggtcataa

SEQ ID NO: 741962 - DNA, 19 bp, Mus musculus
  siRNA target sequence for Sp2 (NM_030220.2,931-949).
ggtgaacaccagcgatatt

SEQ ID NO: 741963 - DNA, 19 bp, Mus musculus
  siRNA target sequence for Sp2 (NM_030220.2,987-1005).
ccccactgtctaagactaa

SEQ ID NO: 741964 - DNA, 19 bp, Mus musculus
  siRNA target sequence for Sp2 (NM_030220.2,1320-1338).
caacaccaacccaggttta

SEQ ID NO: 741965 - DNA, 19 bp, Mus musculus
  siRNA target sequence for Sp2 (NM_030220.2,1458-1476).
gtggcaccagcaaaaaaca

SEQ ID NO: 741966 - DNA, 19 bp, Mus musculus
  siRNA target sequence for Sp2 (NM_030220.2,1482-1500).
ctgccattctccgaaaaga

SEQ ID NO: 741967 - DNA, 19 bp, Mus musculus
  siRNA target sequence for 2900092E17Rik (NM_030240.1,761-779).
gatccagcggctctatgaa

SEQ ID NO: 741968 - DNA, 19 bp, Mus musculus
  siRNA target sequence for 2900092E17Rik (NM_030240.1,912-930).
ccgcacatgcctacagaat

SEQ ID NO: 741969 - DNA, 19 bp, Mus musculus
  siRNA target sequence for 2900092E17Rik (NM_030240.1,913-931).
cgcacatgcctacagaatt

SEQ ID NO: 741970 - DNA, 19 bp, Mus musculus
  siRNA target sequence for 2900092E17Rik (NM_030240.1,1018-1036).
gggaggcgcgtctggataa

SEQ ID NO: 741971 - DNA, 19 bp, Mus musculus
  siRNA target sequence for 2900092E17Rik (NM_030240.1,1047-1065).
gacatgaagcgccataaga

SEQ ID NO: 741972 - DNA, 19 bp, Mus musculus
  siRNA target sequence for 2900092E17Rik (NM_030240.1,1052-1070).
gaagcgccataagaaacta

SEQ ID NO: 741973 - DNA, 19 bp, Mus musculus
  siRNA target sequence for 2900092E17Rik (NM_030240.1,1098-1116).
gacctcttcagcttagact

SEQ ID NO: 741974 - DNA, 19 bp, Mus musculus
  siRNA target sequence for 2900092E17Rik (NM_030240.1,1173-1191).
cccagacagcggaagtact

SEQ ID NO: 741975 - DNA, 19 bp, Mus musculus
  siRNA target sequence for 2610524G09Rik (NM_030244.2,1007-1025).
gtggtgaccacggtagaaa

SEQ ID NO: 741976 - DNA, 19 bp, Mus musculus
  siRNA target sequence for 2610524G09Rik (NM_030244.2,1259-1277).
ccggacgcgtccaacatct

SEQ ID NO: 741977 - DNA, 19 bp, Mus musculus
  siRNA target sequence for 2610524G09Rik (NM_030244.2,1262-1280).
gacgcgtccaacatctcaa

SEQ ID NO: 741978 - DNA, 19 bp, Mus musculus
  siRNA target sequence for D1Ertd251e (NM_030245.2,161-179).
ggggacaacgtgaaacaat

SEQ ID NO: 741979 - DNA, 19 bp, Mus musculus
  siRNA target sequence for D1Ertd251e (NM_030245.2,162-180).
gggacaacgtgaaacaata

SEQ ID NO: 741980 - DNA, 19 bp, Mus musculus
  siRNA target sequence for D1Ertd251e (NM_030245.2,164-182).
gacaacgtgaaacaatact

SEQ ID NO: 741981 - DNA, 19 bp, Mus musculus
  siRNA target sequence for D1Ertd251e (NM_030245.2,265-283).
caatgtgcattctcacaat

SEQ ID NO: 741982 - DNA, 19 bp, Mus musculus
  siRNA target sequence for D1Ertd251e (NM_030245.2,301-319).
cctcacacgttgtcagatt

SEQ ID NO: 741983 - DNA, 19 bp, Mus musculus
  siRNA target sequence for D1Ertd251e (NM_030245.2,302-320).
ctcacacgttgtcagattt

SEQ ID NO: 741984 - DNA, 19 bp, Mus musculus
  siRNA target sequence for D1Ertd251e (NM_030245.2,306-324).
cacgttgtcagattttggt

SEQ ID NO: 741985 - DNA, 19 bp, Mus musculus
  siRNA target sequence for D1Ertd251e (NM_030245.2,308-326).
cgttgtcagattttggttt

SEQ ID NO: 741986 - DNA, 19 bp, Mus musculus
  siRNA target sequence for D1Ertd251e (NM_030245.2,395-413).
ggcaagaaaaagctttctt

SEQ ID NO: 741987 - DNA, 19 bp, Mus musculus
  siRNA target sequence for D1Ertd251e (NM_030245.2,414-432).
ctgttcgtcaaaaatttga

SEQ ID NO: 741988 - DNA, 19 bp, Mus musculus
  siRNA target sequence for D1Ertd251e (NM_030245.2,419-437).
cgtcaaaaatttgatcata

SEQ ID NO: 741989 - DNA, 19 bp, Mus musculus
  siRNA target sequence for D1Ertd251e (NM_030245.2,498-516).
gtgatgacgacttgaaact

SEQ ID NO: 741990 - DNA, 19 bp, Mus musculus
  siRNA target sequence for D1Ertd251e (NM_030245.2,503-521).
gacgacttgaaactttgtt

SEQ ID NO: 741991 - DNA, 19 bp, Mus musculus
  siRNA target sequence for D1Ertd251e (NM_030245.2,505-523).
cgacttgaaactttgttca

SEQ ID NO: 741992 - DNA, 19 bp, Mus musculus
  siRNA target sequence for D1Ertd251e (NM_030245.2,587-605).
cacgggctggacaatgtca

SEQ ID NO: 741993 - DNA, 19 bp, Mus musculus
  siRNA target sequence for D1Ertd251e (NM_030245.2,641-659).
gagaatcacctcaaagata

SEQ ID NO: 741994 - DNA, 19 bp, Mus musculus
  siRNA target sequence for D1Ertd251e (NM_030245.2,746-764).
cagccatacctgaagaata

SEQ ID NO: 741995 - DNA, 19 bp, Mus musculus
  siRNA target sequence for D1Ertd251e (NM_030245.2,748-766).
gccatacctgaagaatagt

SEQ ID NO: 741996 - DNA, 19 bp, Mus musculus
  siRNA target sequence for D1Ertd251e (NM_030245.2,919-937).
gcctccagtgaacatgtat

SEQ ID NO: 741997 - DNA, 19 bp, Mus musculus
  siRNA target sequence for D1Ertd251e (NM_030245.2,962-980).
cacagggaagtcattccta

SEQ ID NO: 741998 - DNA, 19 bp, Mus musculus
  siRNA target sequence for D1Ertd251e (NM_030245.2,987-1005).
ctgtgtatgcccttaacat

SEQ ID NO: 741999 - DNA, 19 bp, Mus musculus
  siRNA target sequence for D1Ertd251e (NM_030245.2,991-1009).
gtatgcccttaacattgaa

SEQ ID NO: 742000 - DNA, 19 bp, Mus musculus
  siRNA target sequence for BC003236 (NM_030249.2,373-391).
ccttgttatagaagcttta

SEQ ID NO: 742001 - DNA, 19 bp, Mus musculus
  siRNA target sequence for BC003236 (NM_030249.2,374-392).
cttgttatagaagctttaa

SEQ ID NO: 742002 - DNA, 19 bp, Mus musculus
  siRNA target sequence for BC003236 (NM_030249.2,396-414).
cccaacacagagatacttt

SEQ ID NO: 742003 - DNA, 19 bp, Mus musculus
  siRNA target sequence for BC003236 (NM_030249.2,398-416).
caacacagagatactttca

SEQ ID NO: 742004 - DNA, 19 bp, Mus musculus
  siRNA target sequence for BC003236 (NM_030249.2,403-421).
cagagatactttcattgaa

SEQ ID NO: 742005 - DNA, 19 bp, Mus musculus
  siRNA target sequence for BC003236 (NM_030249.2,405-423).
gagatactttcattgaaga

SEQ ID NO: 742006 - DNA, 19 bp, Mus musculus
  siRNA target sequence for BC003236 (NM_030249.2,631-649).
cctcgaccttgaagaagaa

SEQ ID NO: 742007 - DNA, 19 bp, Mus musculus
  siRNA target sequence for BC003236 (NM_030249.2,632-650).
ctcgaccttgaagaagaaa

SEQ ID NO: 742008 - DNA, 19 bp, Mus musculus
  siRNA target sequence for BC003236 (NM_030249.2,724-742).
gacgcagcagttggaattt

SEQ ID NO: 742009 - DNA, 19 bp, Mus musculus
  siRNA target sequence for BC003236 (NM_030249.2,726-744).
cgcagcagttggaatttga

SEQ ID NO: 742010 - DNA, 19 bp, Mus musculus
  siRNA target sequence for BC003236 (NM_030249.2,939-957).
gcaagctagaggaagagtt

SEQ ID NO: 742011 - DNA, 19 bp, Mus musculus
  siRNA target sequence for BC003236 (NM_030249.2,1215-1233).
gagtgtctgcgttttgtca

SEQ ID NO: 742012 - DNA, 19 bp, Mus musculus
  siRNA target sequence for BC003236 (NM_030249.2,1219-1237).
gtctgcgttttgtcaaaca

SEQ ID NO: 742013 - DNA, 19 bp, Mus musculus
  siRNA target sequence for BC003236 (NM_030249.2,1311-1329).
ccacggctgcttactcata

SEQ ID NO: 742014 - DNA, 19 bp, Mus musculus
  siRNA target sequence for BC003236 (NM_030249.2,1312-1330).
cacggctgcttactcatat

SEQ ID NO: 742015 - DNA, 19 bp, Mus musculus
  siRNA target sequence for BC003236 (NM_030249.2,1315-1333).
ggctgcttactcatatgct

SEQ ID NO: 742016 - DNA, 19 bp, Mus musculus
  siRNA target sequence for BC003236 (NM_030249.2,1316-1334).
gctgcttactcatatgcta

SEQ ID NO: 742017 - DNA, 19 bp, Mus musculus
  siRNA target sequence for BC003236 (NM_030249.2,1411-1429).
gcctccacgggagaaatct

SEQ ID NO: 742018 - DNA, 19 bp, Mus musculus
  siRNA target sequence for BC003236 (NM_030249.2,1673-1691).
catgccgctcggcacaaat

SEQ ID NO: 742019 - DNA, 19 bp, Mus musculus
  siRNA target sequence for BC003236 (NM_030249.2,1679-1697).
gctcggcacaaatttcagt

SEQ ID NO: 742020 - DNA, 19 bp, Mus musculus
  siRNA target sequence for BC003236 (NM_030249.2,1816-1834).
ggtgctctccagattcact

SEQ ID NO: 742021 - DNA, 19 bp, Mus musculus
  siRNA target sequence for BC003236 (NM_030249.2,1822-1840).
ctccagattcactaaccaa

SEQ ID NO: 742022 - DNA, 19 bp, Mus musculus
  siRNA target sequence for BC003236 (NM_030249.2,1881-1899).
ggacagactaccgaaatct

SEQ ID NO: 742023 - DNA, 19 bp, Mus musculus
  siRNA target sequence for BC003236 (NM_030249.2,2084-2102).
ccagtaaccaagactcatt

SEQ ID NO: 742024 - DNA, 19 bp, Mus musculus
  siRNA target sequence for BC003236 (NM_030249.2,2164-2182).
ggtggccaatggcaaagat

SEQ ID NO: 742025 - DNA, 19 bp, Mus musculus
  siRNA target sequence for BC003236 (NM_030249.2,2169-2187).
ccaatggcaaagatgttga

SEQ ID NO: 742026 - DNA, 19 bp, Mus musculus
  siRNA target sequence for D10Ertd438e (NM_030250.1,544-562).
cgtggggatctcctacatt

SEQ ID NO: 742027 - DNA, 19 bp, Mus musculus
  siRNA target sequence for D10Ertd438e (NM_030250.1,545-563).
gtggggatctcctacatta

SEQ ID NO: 742028 - DNA, 19 bp, Mus musculus
  siRNA target sequence for D10Ertd438e (NM_030250.1,572-590).
gaccaccaaggtattttca

SEQ ID NO: 742029 - DNA, 19 bp, Mus musculus
  siRNA target sequence for D10Ertd438e (NM_030250.1,575-593).
caccaaggtattttcaaga

SEQ ID NO: 742030 - DNA, 19 bp, Mus musculus
  siRNA target sequence for D10Ertd438e (NM_030250.1,594-612).
gaaataattccagattgat

SEQ ID NO: 742031 - DNA, 19 bp, Mus musculus
  siRNA target sequence for D10Ertd438e (NM_030250.1,603-621).
ccagattgatggatgaaat

SEQ ID NO: 742032 - DNA, 19 bp, Mus musculus
  siRNA target sequence for D10Ertd438e (NM_030250.1,641-659).
cttttgggccaagattgtt

SEQ ID NO: 742033 - DNA, 19 bp, Mus musculus
  siRNA target sequence for D10Ertd438e (NM_030250.1,648-666).
gccaagattgttccaaata

SEQ ID NO: 742034 - DNA, 19 bp, Mus musculus
  siRNA target sequence for D10Ertd438e (NM_030250.1,672-690).
cagagtttgcaaatagtaa

SEQ ID NO: 742035 - DNA, 19 bp, Mus musculus
  siRNA target sequence for D10Ertd438e (NM_030250.1,681-699).
caaatagtaatgacaaaga

SEQ ID NO: 742036 - DNA, 19 bp, Mus musculus
  siRNA target sequence for D10Ertd438e (NM_030250.1,694-712).
caaagacgatcaagattta

SEQ ID NO: 742037 - DNA, 19 bp, Mus musculus
  siRNA target sequence for D10Ertd438e (NM_030250.1,698-716).
gacgatcaagatttaaatt

SEQ ID NO: 742038 - DNA, 19 bp, Mus musculus
  siRNA target sequence for D10Ertd438e (NM_030250.1,752-770).
ggaaaagcggatattgtga

SEQ ID NO: 742039 - DNA, 19 bp, Mus musculus
  siRNA target sequence for D10Ertd438e (NM_030250.1,769-787).
gagagctgcccaggatttt

SEQ ID NO: 742040 - DNA, 19 bp, Mus musculus
  siRNA target sequence for D10Ertd438e (NM_030250.1,819-837).
ccacagatctggatgtaga

SEQ ID NO: 742041 - DNA, 19 bp, Mus musculus
  siRNA target sequence for D10Ertd438e (NM_030250.1,820-838).
cacagatctggatgtagat

SEQ ID NO: 742042 - DNA, 19 bp, Mus musculus
  siRNA target sequence for D10Ertd438e (NM_030250.1,841-859).
gctaggcagcttacttagt

SEQ ID NO: 742043 - DNA, 19 bp, Mus musculus
  siRNA target sequence for D10Ertd438e (NM_030250.1,872-890).
cctgatcctgacttagtgt

SEQ ID NO: 742044 - DNA, 19 bp, Mus musculus
  siRNA target sequence for D10Ertd438e (NM_030250.1,873-891).
ctgatcctgacttagtgtt

SEQ ID NO: 742045 - DNA, 19 bp, Mus musculus
  siRNA target sequence for D10Ertd438e (NM_030250.1,910-928).
cagcacattaggctttctt

SEQ ID NO: 742046 - DNA, 19 bp, Mus musculus
  siRNA target sequence for D10Ertd438e (NM_030250.1,926-944).
cttccctggcaaatcagat

SEQ ID NO: 742047 - DNA, 19 bp, Mus musculus
  siRNA target sequence for D10Ertd438e (NM_030250.1,931-949).
ctggcaaatcagattgact

SEQ ID NO: 742048 - DNA, 19 bp, Mus musculus
  siRNA target sequence for D10Ertd438e (NM_030250.1,962-980).
ctgccttctcacctaaaca

SEQ ID NO: 742049 - DNA, 19 bp, Mus musculus
  siRNA target sequence for D10Ertd438e (NM_030250.1,965-983).
ccttctcacctaaacatca

SEQ ID NO: 742050 - DNA, 19 bp, Mus musculus
  siRNA target sequence for BC003311 (NM_030254.2,229-247).
cctgcctactggtagcttt

SEQ ID NO: 742051 - DNA, 19 bp, Mus musculus
  siRNA target sequence for BC003311 (NM_030254.2,359-377).
cgctcgatcttcagaatga

SEQ ID NO: 742052 - DNA, 19 bp, Mus musculus
  siRNA target sequence for BC003311 (NM_030254.2,360-378).
gctcgatcttcagaatgaa

SEQ ID NO: 742053 - DNA, 19 bp, Mus musculus
  siRNA target sequence for BC003311 (NM_030254.2,382-400).
cgacaagttccggaagttt

SEQ ID NO: 742054 - DNA, 19 bp, Mus musculus
  siRNA target sequence for BC003311 (NM_030254.2,385-403).
caagttccggaagtttgta

SEQ ID NO: 742055 - DNA, 19 bp, Mus musculus
  siRNA target sequence for BC003311 (NM_030254.2,475-493).
gtgcaggcaggctaacgaa

SEQ ID NO: 742056 - DNA, 19 bp, Mus musculus
  siRNA target sequence for BC003311 (NM_030254.2,480-498).
ggcaggctaacgaagaata

SEQ ID NO: 742057 - DNA, 19 bp, Mus musculus
  siRNA target sequence for BC003311 (NM_030254.2,481-499).
gcaggctaacgaagaatat

SEQ ID NO: 742058 - DNA, 19 bp, Mus musculus
  siRNA target sequence for BC003311 (NM_030254.2,484-502).
ggctaacgaagaatatcaa

SEQ ID NO: 742059 - DNA, 19 bp, Mus musculus
  siRNA target sequence for BC003311 (NM_030254.2,485-503).
gctaacgaagaatatcaaa

SEQ ID NO: 742060 - DNA, 19 bp, Mus musculus
  siRNA target sequence for BC003311 (NM_030254.2,520-538).
gcgttattcatctgctttt

SEQ ID NO: 742061 - DNA, 19 bp, Mus musculus
  siRNA target sequence for BC003311 (NM_030254.2,541-559).
caacaaactgttttttgga

SEQ ID NO: 742062 - DNA, 19 bp, Mus musculus
  siRNA target sequence for BC003311 (NM_030254.2,558-576).
gaatggtggactatgatga

SEQ ID NO: 742063 - DNA, 19 bp, Mus musculus
  siRNA target sequence for BC003311 (NM_030254.2,593-611).
caacagctcaacatgaact

SEQ ID NO: 742064 - DNA, 19 bp, Mus musculus
  siRNA target sequence for BC003311 (NM_030254.2,614-632).
gctcccacattcatgcatt

SEQ ID NO: 742065 - DNA, 19 bp, Mus musculus
  siRNA target sequence for BC003311 (NM_030254.2,615-633).
ctcccacattcatgcattt

SEQ ID NO: 742066 - DNA, 19 bp, Mus musculus
  siRNA target sequence for BC003311 (NM_030254.2,671-689).
gaccttcaacgaattggat

SEQ ID NO: 742067 - DNA, 19 bp, Mus musculus
  siRNA target sequence for BC003311 (NM_030254.2,673-691).
ccttcaacgaattggattt

SEQ ID NO: 742068 - DNA, 19 bp, Mus musculus
  siRNA target sequence for BC003311 (NM_030254.2,720-738).
ccgacaggacggatgttca

SEQ ID NO: 742069 - DNA, 19 bp, Mus musculus
  siRNA target sequence for BC003311 (NM_030254.2,721-739).
cgacaggacggatgttcat

SEQ ID NO: 742070 - DNA, 19 bp, Mus musculus
  siRNA target sequence for BC003311 (NM_030254.2,722-740).
gacaggacggatgttcata

SEQ ID NO: 742071 - DNA, 19 bp, Mus musculus
  siRNA target sequence for BC003311 (NM_030254.2,727-745).
gacggatgttcatattcga

SEQ ID NO: 742072 - DNA, 19 bp, Mus musculus
  siRNA target sequence for BC003311 (NM_030254.2,828-846).
ggaacaacttggagtttat

SEQ ID NO: 742073 - DNA, 19 bp, Mus musculus
  siRNA target sequence for BC003311 (NM_030254.2,839-857).
gagtttatctataacaaga

SEQ ID NO: 742074 - DNA, 19 bp, Mus musculus
  siRNA target sequence for BC003311 (NM_030254.2,861-879).
gttgggccatggtatctct

SEQ ID NO: 742075 - DNA, 19 bp, Mus musculus
  siRNA target sequence for BC003311 (NM_030254.2,925-943).
ccgtggacctccatatgct

SEQ ID NO: 742076 - DNA, 19 bp, Mus musculus
  siRNA target sequence for BC003311 (NM_030254.2,1006-1024).
ggcagagtcacacatcatt

SEQ ID NO: 742077 - DNA, 19 bp, Mus musculus
  siRNA target sequence for BC003311 (NM_030254.2,1014-1032).
cacacatcattctagtact

SEQ ID NO: 742078 - DNA, 19 bp, Mus musculus
  siRNA target sequence for BC003311 (NM_030254.2,1051-1069).
ggggatggttcttctaaat

SEQ ID NO: 742079 - DNA, 19 bp, Mus musculus
  siRNA target sequence for BC003311 (NM_030254.2,1054-1072).
gatggttcttctaaatgaa

SEQ ID NO: 742080 - DNA, 19 bp, Mus musculus
  siRNA target sequence for BC003311 (NM_030254.2,1164-1182).
caatatttcgttcaaagta

SEQ ID NO: 742081 - DNA, 19 bp, Mus musculus
  siRNA target sequence for BC003321 (NM_030256.1,318-336).
gggtggcatcggtactgaa

SEQ ID NO: 742082 - DNA, 19 bp, Mus musculus
  siRNA target sequence for BC003321 (NM_030256.1,319-337).
ggtggcatcggtactgaat

SEQ ID NO: 742083 - DNA, 19 bp, Mus musculus
  siRNA target sequence for BC003321 (NM_030256.1,383-401).
cctgagttcgacttatcca

SEQ ID NO: 742084 - DNA, 19 bp, Mus musculus
  siRNA target sequence for BC003321 (NM_030256.1,483-501).
ccaatctgcatctcatgaa

SEQ ID NO: 742085 - DNA, 19 bp, Mus musculus
  siRNA target sequence for BC003321 (NM_030256.1,700-718).
catgacccagcagaatttt

SEQ ID NO: 742086 - DNA, 19 bp, Mus musculus
  siRNA target sequence for BC003321 (NM_030256.1,892-910).
gggcagcatggccaatcta

SEQ ID NO: 742087 - DNA, 19 bp, Mus musculus
  siRNA target sequence for BC003324 (NM_030259.1,243-261).
gtacgacatctcctatgta

SEQ ID NO: 742088 - DNA, 19 bp, Mus musculus
  siRNA target sequence for BC003324 (NM_030259.1,306-324).
ccggctgcagttcaagata

SEQ ID NO: 742089 - DNA, 19 bp, Mus musculus
  siRNA target sequence for BC003324 (NM_030259.1,309-327).
gctgcagttcaagatagta

SEQ ID NO: 742090 - DNA, 19 bp, Mus musculus
  siRNA target sequence for BC003324 (NM_030259.1,600-618).
ctacaggagtggtctactt

SEQ ID NO: 742091 - DNA, 19 bp, Mus musculus
  siRNA target sequence for BC003332 (NM_030260.1,1035-1053).
cggccttacaagtgtgatt

SEQ ID NO: 742092 - DNA, 19 bp, Mus musculus
  siRNA target sequence for BC003332 (NM_030260.1,1091-1109).
cctgttttcccataatcga

SEQ ID NO: 742093 - DNA, 19 bp, Mus musculus
  siRNA target sequence for BC003332 (NM_030260.1,1145-1163).
ctttcctgggtgcaataaa

SEQ ID NO: 742094 - DNA, 19 bp, Mus musculus
  siRNA target sequence for BC003332 (NM_030260.1,1149-1167).
cctgggtgcaataaacaat

SEQ ID NO: 742095 - DNA, 19 bp, Mus musculus
  siRNA target sequence for BC003332 (NM_030260.1,1153-1171).
ggtgcaataaacaatatga

SEQ ID NO: 742096 - DNA, 19 bp, Mus musculus
  siRNA target sequence for BC003332 (NM_030260.1,1180-1198).
gccgactgaaaattcactt

SEQ ID NO: 742097 - DNA, 19 bp, Mus musculus
  siRNA target sequence for BC003332 (NM_030260.1,1212-1230).
ggtgaaagaccatttattt

SEQ ID NO: 742098 - DNA, 19 bp, Mus musculus
  siRNA target sequence for BC003332 (NM_030260.1,1302-1320).
gatgaccggaggttcactt

SEQ ID NO: 742099 - DNA, 19 bp, Mus musculus
  siRNA target sequence for BC003332 (NM_030260.1,1313-1331).
gttcacttgccctgttgaa

SEQ ID NO: 742100 - DNA, 19 bp, Mus musculus
  siRNA target sequence for BC003332 (NM_030260.1,1697-1715).
ctctgacacacctgctaat

SEQ ID NO: 742101 - DNA, 19 bp, Mus musculus
  siRNA target sequence for BC003332 (NM_030260.1,1701-1719).
gacacacctgctaatagca

SEQ ID NO: 742102 - DNA, 19 bp, Mus musculus
  siRNA target sequence for BC003332 (NM_030260.1,1710-1728).
gctaatagcagcagttcaa

SEQ ID NO: 742103 - DNA, 19 bp, Mus musculus
  siRNA target sequence for BC003332 (NM_030260.1,1805-1823).
gaatctccctactaacaat

SEQ ID NO: 742104 - DNA, 19 bp, Mus musculus
  siRNA target sequence for BC003332 (NM_030260.1,1809-1827).
ctccctactaacaataact

SEQ ID NO: 742105 - DNA, 19 bp, Mus musculus
  siRNA target sequence for BC003332 (NM_030260.1,1867-1885).
gtgatatgcctccaagttt

SEQ ID NO: 742106 - DNA, 19 bp, Mus musculus
  siRNA target sequence for BC003332 (NM_030260.1,1937-1955).
cttcagtgcagatgattca

SEQ ID NO: 742107 - DNA, 19 bp, Mus musculus
  siRNA target sequence for BC003332 (NM_030260.1,1999-2017).
ctgtgaggaacttgaatca

SEQ ID NO: 742108 - DNA, 19 bp, Mus musculus
  siRNA target sequence for BC003332 (NM_030260.1,2061-2079).
ggtaccacaccaacttctt

SEQ ID NO: 742109 - DNA, 19 bp, Mus musculus
  siRNA target sequence for BC003332 (NM_030260.1,2112-2130).
gatctgctggttccaataa

SEQ ID NO: 742110 - DNA, 19 bp, Mus musculus
  siRNA target sequence for BC003332 (NM_030260.1,2336-2354).
gatcgtgttggggatgaat

SEQ ID NO: 742111 - DNA, 19 bp, Mus musculus
  siRNA target sequence for BC003332 (NM_030260.1,2345-2363).
ggggatgaatcctgtctat

SEQ ID NO: 742112 - DNA, 19 bp, Mus musculus
  siRNA target sequence for BC003494 (NM_030262.2,72-90).
cggcttcaggagaagaatt

SEQ ID NO: 742113 - DNA, 19 bp, Mus musculus
  siRNA target sequence for BC003494 (NM_030262.2,141-159).
gacggtacctcctgtatga

SEQ ID NO: 742114 - DNA, 19 bp, Mus musculus
  siRNA target sequence for BC003494 (NM_030262.2,185-203).
ctccgcagggatgtctata

SEQ ID NO: 742115 - DNA, 19 bp, Mus musculus
  siRNA target sequence for BC003494 (NM_030262.2,321-339).
cctggtccgagttttttga

SEQ ID NO: 742116 - DNA, 19 bp, Mus musculus
  siRNA target sequence for BC003494 (NM_030262.2,338-356).
gacctcccgagtctcaata

SEQ ID NO: 742117 - DNA, 19 bp, Mus musculus
  siRNA target sequence for BC003494 (NM_030262.2,361-379).
catccccgttatagagtat

SEQ ID NO: 742118 - DNA, 19 bp, Mus musculus
  siRNA target sequence for BC003494 (NM_030262.2,481-499).
ggacgcacggccctgtatt

SEQ ID NO: 742119 - DNA, 19 bp, Mus musculus
  siRNA target sequence for BC003494 (NM_030262.2,518-536).
caggacaagcatgagtatt

SEQ ID NO: 742120 - DNA, 19 bp, Mus musculus
  siRNA target sequence for BC003494 (NM_030262.2,617-635).
gtcgcgcctgtcctcttaa

SEQ ID NO: 742121 - DNA, 19 bp, Mus musculus
  siRNA target sequence for BC003494 (NM_030262.2,619-637).
cgcgcctgtcctcttaaaa

SEQ ID NO: 742122 - DNA, 19 bp, Mus musculus
  siRNA target sequence for BC003494 (NM_030262.2,620-638).
gcgcctgtcctcttaaaaa

SEQ ID NO: 742123 - DNA, 19 bp, Mus musculus
  siRNA target sequence for BC003494 (NM_030262.2,621-639).
cgcctgtcctcttaaaaaa

SEQ ID NO: 742124 - DNA, 19 bp, Mus musculus
  siRNA target sequence for BC003494 (NM_030262.2,661-679).
gctggaccgagctgagaat

SEQ ID NO: 742125 - DNA, 19 bp, Mus musculus
  siRNA target sequence for BC003494 (NM_030262.2,672-690).
ctgagaatctgcttcatga

SEQ ID NO: 742126 - DNA, 19 bp, Mus musculus
  siRNA target sequence for BC003494 (NM_030262.2,725-743).
cgcagcatggtgtttgcaa

SEQ ID NO: 742127 - DNA, 19 bp, Mus musculus
  siRNA target sequence for BC003494 (NM_030262.2,755-773).
gctgtgggagacgagttta

SEQ ID NO: 742128 - DNA, 19 bp, Mus musculus
  siRNA target sequence for BC003494 (NM_030262.2,758-776).
gtgggagacgagtttagga

SEQ ID NO: 742129 - DNA, 19 bp, Mus musculus
  siRNA target sequence for BC003494 (NM_030262.2,792-810).
cgacggatgccgctgataa

SEQ ID NO: 742130 - DNA, 19 bp, Mus musculus
  siRNA target sequence for BC003494 (NM_030262.2,795-813).
cggatgccgctgataagat

SEQ ID NO: 742131 - DNA, 19 bp, Mus musculus
  siRNA target sequence for BC003494 (NM_030262.2,834-852).
cgaagatgaaggtcaaact

SEQ ID NO: 742132 - DNA, 19 bp, Mus musculus
  siRNA target sequence for BC003494 (NM_030262.2,1137-1155).
gcgctcatgccaggttttt

SEQ ID NO: 742133 - DNA, 19 bp, Mus musculus
  siRNA target sequence for BC003494 (NM_030262.2,1138-1156).
cgctcatgccaggtttttt

SEQ ID NO: 742134 - DNA, 19 bp, Mus musculus
  siRNA target sequence for BC003494 (NM_030262.2,1182-1200).
cctttcggattcatgaaga

SEQ ID NO: 742135 - DNA, 19 bp, Mus musculus
  siRNA target sequence for BC003494 (NM_030262.2,1214-1232).
gggttggaccccaagacaa

SEQ ID NO: 742136 - DNA, 19 bp, Mus musculus
  siRNA target sequence for BC003498 (NM_030263.2,1819-1837).
cattgggatgacagtcttt

SEQ ID NO: 742137 - DNA, 19 bp, Mus musculus
  siRNA target sequence for BC003498 (NM_030263.2,1869-1887).
cagcctactgcccagttta

SEQ ID NO: 742138 - DNA, 19 bp, Mus musculus
  siRNA target sequence for BC003498 (NM_030263.2,1871-1889).
gcctactgcccagtttata

SEQ ID NO: 742139 - DNA, 19 bp, Mus musculus
  siRNA target sequence for BC003498 (NM_030263.2,1872-1890).
cctactgcccagtttatat

SEQ ID NO: 742140 - DNA, 19 bp, Mus musculus
  siRNA target sequence for Inpp4a (NM_030266.1,170-188).
ctccatcgctagatcgaaa

SEQ ID NO: 742141 - DNA, 19 bp, Mus musculus
  siRNA target sequence for Inpp4a (NM_030266.1,176-194).
cgctagatcgaaaaccaaa

SEQ ID NO: 742142 - DNA, 19 bp, Mus musculus
  siRNA target sequence for Inpp4a (NM_030266.1,272-290).
gaaccaacaaccctatctt

SEQ ID NO: 742143 - DNA, 19 bp, Mus musculus
  siRNA target sequence for Inpp4a (NM_030266.1,297-315).
cagcattgccttctttcaa

SEQ ID NO: 742144 - DNA, 19 bp, Mus musculus
  siRNA target sequence for Inpp4a (NM_030266.1,299-317).
gcattgccttctttcaaga

SEQ ID NO: 742145 - DNA, 19 bp, Mus musculus
  siRNA target sequence for Inpp4a (NM_030266.1,355-373).
gtgtatgatgtcaaagaca

SEQ ID NO: 742146 - DNA, 19 bp, Mus musculus
  siRNA target sequence for Inpp4a (NM_030266.1,374-392).
gatctcagggaacaatgta

SEQ ID NO: 742147 - DNA, 19 bp, Mus musculus
  siRNA target sequence for Inpp4a (NM_030266.1,410-428).
cattcgtggtcaaagatct

SEQ ID NO: 742148 - DNA, 19 bp, Mus musculus
  siRNA target sequence for Inpp4a (NM_030266.1,615-633).
cttgggaatccgatccaaa

SEQ ID NO: 742149 - DNA, 19 bp, Mus musculus
  siRNA target sequence for Inpp4a (NM_030266.1,618-636).
gggaatccgatccaaatat

SEQ ID NO: 742150 - DNA, 19 bp, Mus musculus
  siRNA target sequence for Inpp4a (NM_030266.1,646-664).
cgaaaagacagcttactga

SEQ ID NO: 742151 - DNA, 19 bp, Mus musculus
  siRNA target sequence for Inpp4a (NM_030266.1,887-905).
cccagtatcagactatcat

SEQ ID NO: 742152 - DNA, 19 bp, Mus musculus
  siRNA target sequence for Inpp4a (NM_030266.1,979-997).
gcagataaaaagttagaat

SEQ ID NO: 742153 - DNA, 19 bp, Mus musculus
  siRNA target sequence for Inpp4a (NM_030266.1,980-998).
cagataaaaagttagaatt

SEQ ID NO: 742154 - DNA, 19 bp, Mus musculus
  siRNA target sequence for Inpp4a (NM_030266.1,1025-1043).
ggatgcgagttcaagatga

SEQ ID NO: 742155 - DNA, 19 bp, Mus musculus
  siRNA target sequence for Inpp4a (NM_030266.1,1026-1044).
gatgcgagttcaagatgat

SEQ ID NO: 742156 - DNA, 19 bp, Mus musculus
  siRNA target sequence for Inpp4a (NM_030266.1,1062-1080).
ctacgatgtcgtcactatt

SEQ ID NO: 742157 - DNA, 19 bp, Mus musculus
  siRNA target sequence for Inpp4a (NM_030266.1,1065-1083).
cgatgtcgtcactattgga

SEQ ID NO: 742158 - DNA, 19 bp, Mus musculus
  siRNA target sequence for Inpp4a (NM_030266.1,1193-1211).
gtggccagtccatcatcta

SEQ ID NO: 742159 - DNA, 19 bp, Mus musculus
  siRNA target sequence for Inpp4a (NM_030266.1,1197-1215).
ccagtccatcatctacata

SEQ ID NO: 742160 - DNA, 19 bp, Mus musculus
  siRNA target sequence for Inpp4a (NM_030266.1,2124-2142).
cactcaggccacttcgaat

SEQ ID NO: 742161 - DNA, 19 bp, Mus musculus
  siRNA target sequence for Inpp4a (NM_030266.1,2128-2146).
caggccacttcgaatgcat

SEQ ID NO: 742162 - DNA, 19 bp, Mus musculus
  siRNA target sequence for Inpp4a (NM_030266.1,2174-2192).
gaaaccgggatggctttaa

SEQ ID NO: 742163 - DNA, 19 bp, Mus musculus
  siRNA target sequence for Inpp4a (NM_030266.1,2482-2500).
gtccatgcacgcaagaata

SEQ ID NO: 742164 - DNA, 19 bp, Mus musculus
  siRNA target sequence for Inpp4a (NM_030266.1,2485-2503).
catgcacgcaagaataaga

SEQ ID NO: 742165 - DNA, 19 bp, Mus musculus
  siRNA target sequence for Inpp4a (NM_030266.1,2692-2710).
ggttgtcggcgagaaaaca

SEQ ID NO: 742166 - DNA, 19 bp, Mus musculus
  siRNA target sequence for Inpp4a (NM_030266.1,2696-2714).
gtcggcgagaaaacacaat

SEQ ID NO: 742167 - DNA, 19 bp, Mus musculus
  siRNA target sequence for Inpp4a (NM_030266.1,2725-2743).
ggaagtcgcaaatatgcat

SEQ ID NO: 742168 - DNA, 19 bp, Mus musculus
  siRNA target sequence for Inpp4a (NM_030266.1,2726-2744).
gaagtcgcaaatatgcatt

SEQ ID NO: 742169 - DNA, 19 bp, Mus musculus
  siRNA target sequence for Inpp4a (NM_030266.1,2731-2749).
cgcaaatatgcatttaact

SEQ ID NO: 742170 - DNA, 19 bp, Mus musculus
  siRNA target sequence for Inpp4a (NM_030266.1,2795-2813).
ggacttacggaaaagttga

SEQ ID NO: 742171 - DNA, 19 bp, Mus musculus
  siRNA target sequence for BC004004 (NM_030561.2,155-173).
gatcagcatctatgacaaa

SEQ ID NO: 742172 - DNA, 19 bp, Mus musculus
  siRNA target sequence for BC004004 (NM_030561.2,174-192).
ctttcagagactgttgatt

SEQ ID NO: 742173 - DNA, 19 bp, Mus musculus
  siRNA target sequence for BC004004 (NM_030561.2,224-242).
gtccgagaaggcaatcgaa

SEQ ID NO: 742174 - DNA, 19 bp, Mus musculus
  siRNA target sequence for BC004004 (NM_030561.2,226-244).
ccgagaaggcaatcgaaaa

SEQ ID NO: 742175 - DNA, 19 bp, Mus musculus
  siRNA target sequence for BC004004 (NM_030561.2,227-245).
cgagaaggcaatcgaaaaa

SEQ ID NO: 742176 - DNA, 19 bp, Mus musculus
  siRNA target sequence for BC004004 (NM_030561.2,228-246).
gagaaggcaatcgaaaaat

SEQ ID NO: 742177 - DNA, 19 bp, Mus musculus
  siRNA target sequence for BC004004 (NM_030561.2,230-248).
gaaggcaatcgaaaaattt

SEQ ID NO: 742178 - DNA, 19 bp, Mus musculus
  siRNA target sequence for BC004004 (NM_030561.2,234-252).
gcaatcgaaaaatttatca

SEQ ID NO: 742179 - DNA, 19 bp, Mus musculus
  siRNA target sequence for BC004004 (NM_030561.2,374-392).
gccttttagctcattagca

SEQ ID NO: 742180 - DNA, 19 bp, Mus musculus
  siRNA target sequence for BC004004 (NM_030561.2,424-442).
ggcgctcactcgttcatca

SEQ ID NO: 742181 - DNA, 19 bp, Mus musculus
  siRNA target sequence for BC004004 (NM_030561.2,427-445).
gctcactcgttcatcacat

SEQ ID NO: 742182 - DNA, 19 bp, Mus musculus
  siRNA target sequence for BC004004 (NM_030561.2,428-446).
ctcactcgttcatcacatt

SEQ ID NO: 742183 - DNA, 19 bp, Mus musculus
  siRNA target sequence for BC004004 (NM_030561.2,461-479).
gcccattaccaagaagtat

SEQ ID NO: 742184 - DNA, 19 bp, Mus musculus
  siRNA target sequence for BC004004 (NM_030561.2,543-561).
gacccctggtcatcatata

SEQ ID NO: 742185 - DNA, 19 bp, Mus musculus
  siRNA target sequence for BC004004 (NM_030561.2,545-563).
cccctggtcatcatataat

SEQ ID NO: 742186 - DNA, 19 bp, Mus musculus
  siRNA target sequence for BC004004 (NM_030561.2,550-568).
ggtcatcatataattgtga

SEQ ID NO: 742187 - DNA, 19 bp, Mus musculus
  siRNA target sequence for BC004004 (NM_030561.2,675-693).
cggcctctggtgatcaaga

SEQ ID NO: 742188 - DNA, 19 bp, Mus musculus
  siRNA target sequence for BC004004 (NM_030561.2,808-826).
ggtggttcccatttcctta

SEQ ID NO: 742189 - DNA, 19 bp, Mus musculus
  siRNA target sequence for BC004004 (NM_030561.2,833-851).
gagaagacctctaaacaga

SEQ ID NO: 742190 - DNA, 19 bp, Mus musculus
  siRNA target sequence for BC004004 (NM_030561.2,843-861).
ctaaacagatcacagattt

SEQ ID NO: 742191 - DNA, 19 bp, Mus musculus
  siRNA target sequence for BC004004 (NM_030561.2,865-883).
gggaacttttccctgtttt

SEQ ID NO: 742192 - DNA, 19 bp, Mus musculus
  siRNA target sequence for BC004004 (NM_030561.2,906-924).
gactcctccttaaacaaat

SEQ ID NO: 742193 - DNA, 19 bp, Mus musculus
  siRNA target sequence for BC004004 (NM_030561.2,955-973).
gtagcaagatgcataaggt

SEQ ID NO: 742194 - DNA, 19 bp, Mus musculus
  siRNA target sequence for BC004004 (NM_030561.2,1056-1074).
gtggccatgccgatagagt

SEQ ID NO: 742195 - DNA, 19 bp, Mus musculus
  siRNA target sequence for BC004004 (NM_030561.2,1106-1124).
ctggaaggtctacattgta

SEQ ID NO: 742196 - DNA, 19 bp, Mus musculus
  siRNA target sequence for BC004022 (NM_030563.1,337-355).
ctcgcagttaccgttcaaa

SEQ ID NO: 742197 - DNA, 19 bp, Mus musculus
  siRNA target sequence for BC004022 (NM_030563.1,339-357).
cgcagttaccgttcaaaga

SEQ ID NO: 742198 - DNA, 19 bp, Mus musculus
  siRNA target sequence for BC004022 (NM_030563.1,341-359).
cagttaccgttcaaagact

SEQ ID NO: 742199 - DNA, 19 bp, Mus musculus
  siRNA target sequence for BC004022 (NM_030563.1,348-366).
cgttcaaagactctaaaca

SEQ ID NO: 742200 - DNA, 19 bp, Mus musculus
  siRNA target sequence for BC004022 (NM_030563.1,434-452).
ggttcaaagcagaactcaa

SEQ ID NO: 742201 - DNA, 19 bp, Mus musculus
  siRNA target sequence for BC004022 (NM_030563.1,507-525).
gccctaaagacatcagttt

SEQ ID NO: 742202 - DNA, 19 bp, Mus musculus
  siRNA target sequence for BC004022 (NM_030563.1,508-526).
ccctaaagacatcagtttt

SEQ ID NO: 742203 - DNA, 19 bp, Mus musculus
  siRNA target sequence for BC004022 (NM_030563.1,510-528).
ctaaagacatcagttttgt

SEQ ID NO: 742204 - DNA, 19 bp, Mus musculus
  siRNA target sequence for BC004022 (NM_030563.1,566-584).
gcttttcctgaaaatggtt

SEQ ID NO: 742205 - DNA, 19 bp, Mus musculus
  siRNA target sequence for BC004022 (NM_030563.1,662-680).
cctcagcctaagccaaatt

SEQ ID NO: 742206 - DNA, 19 bp, Mus musculus
  siRNA target sequence for BC004022 (NM_030563.1,663-681).
ctcagcctaagccaaatta

SEQ ID NO: 742207 - DNA, 19 bp, Mus musculus
  siRNA target sequence for BC004022 (NM_030563.1,747-765).
gagggtcctctgaccatat

SEQ ID NO: 742208 - DNA, 19 bp, Mus musculus
  siRNA target sequence for BC004022 (NM_030563.1,750-768).
ggtcctctgaccatatcga

SEQ ID NO: 742209 - DNA, 19 bp, Mus musculus
  siRNA target sequence for BC004022 (NM_030563.1,751-769).
gtcctctgaccatatcgat

SEQ ID NO: 742210 - DNA, 19 bp, Mus musculus
  siRNA target sequence for BC004022 (NM_030563.1,761-779).
catatcgattcctcagtta

SEQ ID NO: 742211 - DNA, 19 bp, Mus musculus
  siRNA target sequence for BC004022 (NM_030563.1,792-810).
gatttcgagataccttaaa

SEQ ID NO: 742212 - DNA, 19 bp, Mus musculus
  siRNA target sequence for BC004022 (NM_030563.1,842-860).
ccaggacgagcagatttga

SEQ ID NO: 742213 - DNA, 19 bp, Mus musculus
  siRNA target sequence for BC004022 (NM_030563.1,843-861).
caggacgagcagatttgaa

SEQ ID NO: 742214 - DNA, 19 bp, Mus musculus
  siRNA target sequence for BC004022 (NM_030563.1,848-866).
cgagcagatttgaagcata

SEQ ID NO: 742215 - DNA, 19 bp, Mus musculus
  siRNA target sequence for BC004022 (NM_030563.1,882-900).
gtaatgttgcaattacgtt

SEQ ID NO: 742216 - DNA, 19 bp, Mus musculus
  siRNA target sequence for BC004022 (NM_030563.1,999-1017).
ccaaaagactgcttcagta

SEQ ID NO: 742217 - DNA, 19 bp, Mus musculus
  siRNA target sequence for BC004022 (NM_030563.1,1117-1135).
catgcagccgctactcaat

SEQ ID NO: 742218 - DNA, 19 bp, Mus musculus
  siRNA target sequence for BC004022 (NM_030563.1,1143-1161).
caagtgtgggcacatttga

SEQ ID NO: 742219 - DNA, 19 bp, Mus musculus
  siRNA target sequence for BC004022 (NM_030563.1,1220-1238).
cggatccagacctcttcaa

SEQ ID NO: 742220 - DNA, 19 bp, Mus musculus
  siRNA target sequence for BC004022 (NM_030563.1,1352-1370).
gaggcgctgctaaagatct

SEQ ID NO: 742221 - DNA, 19 bp, Mus musculus
  siRNA target sequence for BC004022 (NM_030563.1,1412-1430).
gcagctcatccgtacatga

SEQ ID NO: 742222 - DNA, 19 bp, Mus musculus
  siRNA target sequence for BC004022 (NM_030563.1,1413-1431).
cagctcatccgtacatgaa

SEQ ID NO: 742223 - DNA, 19 bp, Mus musculus
  siRNA target sequence for BC004022 (NM_030563.1,1416-1434).
ctcatccgtacatgaaaga

SEQ ID NO: 742224 - DNA, 19 bp, Mus musculus
  siRNA target sequence for BC004044 (NM_030565.5,1545-1563).
gatgtgacgcgggataaga

SEQ ID NO: 742225 - DNA, 19 bp, Mus musculus
  siRNA target sequence for BC004044 (NM_030565.5,1591-1609).
cagccaacaacatctgttt

SEQ ID NO: 742226 - DNA, 19 bp, Mus musculus
  siRNA target sequence for BC004044 (NM_030565.5,1594-1612).
ccaacaacatctgtttcta

SEQ ID NO: 742227 - DNA, 19 bp, Mus musculus
  siRNA target sequence for BC004044 (NM_030565.5,1750-1768).
cctaccacaagcgaaagaa

SEQ ID NO: 742228 - DNA, 19 bp, Mus musculus
  siRNA target sequence for BC004044 (NM_030565.5,1779-1797).
gaagtcgaccctgattact

SEQ ID NO: 742229 - DNA, 19 bp, Mus musculus
  siRNA target sequence for BC004044 (NM_030565.5,1845-1863).
ctggacatcatggatatga

SEQ ID NO: 742230 - DNA, 19 bp, Mus musculus
  siRNA target sequence for BC004044 (NM_030565.5,1857-1875).
gatatgaccgtctttgatt

SEQ ID NO: 742231 - DNA, 19 bp, Mus musculus
  siRNA target sequence for BC004044 (NM_030565.5,1926-1944).
gggaatgagaccttcatca

SEQ ID NO: 742232 - DNA, 19 bp, Mus musculus
  siRNA target sequence for BC004044 (NM_030565.5,1964-1982).
cgggtttgggaaatactca

SEQ ID NO: 742233 - DNA, 19 bp, Mus musculus
  siRNA target sequence for BC004044 (NM_030565.5,1981-1999).
cacacgatgagctttccat

SEQ ID NO: 742234 - DNA, 19 bp, Mus musculus
  siRNA target sequence for BC004044 (NM_030565.5,2065-2083).
ccaaagaggaacacaaact

SEQ ID NO: 742235 - DNA, 19 bp, Mus musculus
  siRNA target sequence for Hist1h1a (NM_030609.1,70-88).
cgctcaggctgcttctact

SEQ ID NO: 742236 - DNA, 19 bp, Mus musculus
  siRNA target sequence for Hist1h1a (NM_030609.1,121-139).
caagaagccggcaaaagct

SEQ ID NO: 742237 - DNA, 19 bp, Mus musculus
  siRNA target sequence for Hist1h1a (NM_030609.1,184-202).
catcgtgcaggcagtttct

SEQ ID NO: 742238 - DNA, 19 bp, Mus musculus
  siRNA target sequence for Hist1h1a (NM_030609.1,187-205).
cgtgcaggcagtttcttct

SEQ ID NO: 742239 - DNA, 19 bp, Mus musculus
  siRNA target sequence for Hist1h1a (NM_030609.1,357-375).
ctgctggctcttttaagct

SEQ ID NO: 742240 - DNA, 19 bp, Mus musculus
  siRNA target sequence for Hist1h1a (NM_030609.1,363-381).
gctcttttaagctgaacaa

SEQ ID NO: 742241 - DNA, 19 bp, Mus musculus
  siRNA target sequence for Hist1h1a (NM_030609.1,443-461).
gctaagaaacctaagaaga

SEQ ID NO: 742242 - DNA, 19 bp, Mus musculus
  siRNA target sequence for Hist1h1a (NM_030609.1,620-638).
gcttccaaggcgaaagtga

SEQ ID NO: 742243 - DNA, 19 bp, Mus musculus
  siRNA target sequence for D3Ucla1 (NM_030685.1,299-317).
gaagcacagcaagaacata

SEQ ID NO: 742244 - DNA, 19 bp, Mus musculus
  siRNA target sequence for D3Ucla1 (NM_030685.1,302-320).
gcacagcaagaacataact

SEQ ID NO: 742245 - DNA, 19 bp, Mus musculus
  siRNA target sequence for D3Ucla1 (NM_030685.1,385-403).
ggttattggccctcttcat

SEQ ID NO: 742246 - DNA, 19 bp, Mus musculus
  siRNA target sequence for D3Ucla1 (NM_030685.1,386-404).
gttattggccctcttcatt

SEQ ID NO: 742247 - DNA, 19 bp, Mus musculus
  siRNA target sequence for D3Ucla1 (NM_030685.1,392-410).
ggccctcttcatttttgtt

SEQ ID NO: 742248 - DNA, 19 bp, Mus musculus
  siRNA target sequence for Rai14 (NM_030690.2,279-297).
caaacgagtggaacaagaa

SEQ ID NO: 742249 - DNA, 19 bp, Mus musculus
  siRNA target sequence for Rai14 (NM_030690.2,283-301).
cgagtggaacaagaatgat

SEQ ID NO: 742250 - DNA, 19 bp, Mus musculus
  siRNA target sequence for Rai14 (NM_030690.2,473-491).
gatgtgactgcccaagatt

SEQ ID NO: 742251 - DNA, 19 bp, Mus musculus
  siRNA target sequence for Rai14 (NM_030690.2,572-590).
ccagcggagaacattgaca

SEQ ID NO: 742252 - DNA, 19 bp, Mus musculus
  siRNA target sequence for Rai14 (NM_030690.2,573-591).
cagcggagaacattgacaa

SEQ ID NO: 742253 - DNA, 19 bp, Mus musculus
  siRNA target sequence for Rai14 (NM_030690.2,595-613).
ggggaaaacagctttgcat

SEQ ID NO: 742254 - DNA, 19 bp, Mus musculus
  siRNA target sequence for Rai14 (NM_030690.2,667-685).
gagccccataaaccttaaa

SEQ ID NO: 742255 - DNA, 19 bp, Mus musculus
  siRNA target sequence for Rai14 (NM_030690.2,669-687).
gccccataaaccttaaaga

SEQ ID NO: 742256 - DNA, 19 bp, Mus musculus
  siRNA target sequence for Rai14 (NM_030690.2,672-690).
ccataaaccttaaagactt

SEQ ID NO: 742257 - DNA, 19 bp, Mus musculus
  siRNA target sequence for Rai14 (NM_030690.2,735-753).
gtgaggcctgccactttct

SEQ ID NO: 742258 - DNA, 19 bp, Mus musculus
  siRNA target sequence for Rai14 (NM_030690.2,761-779).
cacggcgcagatgtcaatt

SEQ ID NO: 742259 - DNA, 19 bp, Mus musculus
  siRNA target sequence for Rai14 (NM_030690.2,806-824).
ctcatgctggcttgtgaaa

SEQ ID NO: 742260 - DNA, 19 bp, Mus musculus
  siRNA target sequence for Rai14 (NM_030690.2,838-856).
cactgtggacgccttaatt

SEQ ID NO: 742261 - DNA, 19 bp, Mus musculus
  siRNA target sequence for Rai14 (NM_030690.2,840-858).
ctgtggacgccttaattaa

SEQ ID NO: 742262 - DNA, 19 bp, Mus musculus
  siRNA target sequence for Rai14 (NM_030690.2,842-860).
gtggacgccttaattaaaa

SEQ ID NO: 742263 - DNA, 19 bp, Mus musculus
  siRNA target sequence for Rai14 (NM_030690.2,883-901).
cgattctctcggacacaat

SEQ ID NO: 742264 - DNA, 19 bp, Mus musculus
  siRNA target sequence for Rai14 (NM_030690.2,892-910).
cggacacaatgccttacat

SEQ ID NO: 742265 - DNA, 19 bp, Mus musculus
  siRNA target sequence for Rai14 (NM_030690.2,894-912).
gacacaatgccttacatta

SEQ ID NO: 742266 - DNA, 19 bp, Mus musculus
  siRNA target sequence for Rai14 (NM_030690.2,922-940).
ctcggaaaatgcaggaatt

SEQ ID NO: 742267 - DNA, 19 bp, Mus musculus
  siRNA target sequence for Rai14 (NM_030690.2,964-982).
ctctcaggatgctgattta

SEQ ID NO: 742268 - DNA, 19 bp, Mus musculus
  siRNA target sequence for Rai14 (NM_030690.2,970-988).
ggatgctgatttaaagact

SEQ ID NO: 742269 - DNA, 19 bp, Mus musculus
  siRNA target sequence for Rai14 (NM_030690.2,1006-1024).
gcatgaccaagtctctaaa

SEQ ID NO: 742270 - DNA, 19 bp, Mus musculus
  siRNA target sequence for Rai14 (NM_030690.2,1111-1129).
cccacgatcaataacatct

SEQ ID NO: 742271 - DNA, 19 bp, Mus musculus
  siRNA target sequence for Rai14 (NM_030690.2,1112-1130).
ccacgatcaataacatcta

SEQ ID NO: 742272 - DNA, 19 bp, Mus musculus
  siRNA target sequence for Rai14 (NM_030690.2,1140-1158).
caggaaaggagtcagtatt

SEQ ID NO: 742273 - DNA, 19 bp, Mus musculus
  siRNA target sequence for Rai14 (NM_030690.2,1249-1267).
gttggatataagttctgaa

SEQ ID NO: 742274 - DNA, 19 bp, Mus musculus
  siRNA target sequence for Rai14 (NM_030690.2,1314-1332).
cccttaccttacacaataa

SEQ ID NO: 742275 - DNA, 19 bp, Mus musculus
  siRNA target sequence for Rai14 (NM_030690.2,1327-1345).
caataaggagttacaagat

SEQ ID NO: 742276 - DNA, 19 bp, Mus musculus
  siRNA target sequence for Rai14 (NM_030690.2,1380-1398).
cggaagccgacctaagctt

SEQ ID NO: 742277 - DNA, 19 bp, Mus musculus
  siRNA target sequence for Rai14 (NM_030690.2,1381-1399).
ggaagccgacctaagcttt

SEQ ID NO: 742278 - DNA, 19 bp, Mus musculus
  siRNA target sequence for Rai14 (NM_030690.2,1385-1403).
gccgacctaagctttcagt

SEQ ID NO: 742279 - DNA, 19 bp, Mus musculus
  siRNA target sequence for Rai14 (NM_030690.2,1509-1527).
cgtccaccactgacaatga

SEQ ID NO: 742280 - DNA, 19 bp, Mus musculus
  siRNA target sequence for Rai14 (NM_030690.2,1510-1528).
gtccaccactgacaatgat

SEQ ID NO: 742281 - DNA, 19 bp, Mus musculus
  siRNA target sequence for Rai14 (NM_030690.2,1587-1605).
ccgaagcagagaagaaaca

SEQ ID NO: 742282 - DNA, 19 bp, Mus musculus
  siRNA target sequence for Rai14 (NM_030690.2,1613-1631).
gacgaactccagtcacaaa

SEQ ID NO: 742283 - DNA, 19 bp, Mus musculus
  siRNA target sequence for Rai14 (NM_030690.2,1637-1655).
gacacgctttgcttgaaca

SEQ ID NO: 742284 - DNA, 19 bp, Mus musculus
  siRNA target sequence for Rai14 (NM_030690.2,1746-1764).
gcgtgcagaaacagatgaa

SEQ ID NO: 742285 - DNA, 19 bp, Mus musculus
  siRNA target sequence for Rai14 (NM_030690.2,1834-1852).
catcgacacactaaagcaa

SEQ ID NO: 742286 - DNA, 19 bp, Mus musculus
  siRNA target sequence for Rai14 (NM_030690.2,1895-1913).
cgggtgcgggagttagaga

SEQ ID NO: 742287 - DNA, 19 bp, Mus musculus
  siRNA target sequence for Rai14 (NM_030690.2,1903-1921).
ggagttagagactaagctt

SEQ ID NO: 742288 - DNA, 19 bp, Mus musculus
  siRNA target sequence for Rai14 (NM_030690.2,1986-2004).
cctactgctctgttatcga

SEQ ID NO: 742289 - DNA, 19 bp, Mus musculus
  siRNA target sequence for Rai14 (NM_030690.2,1992-2010).
gctctgttatcgagaatat

SEQ ID NO: 742290 - DNA, 19 bp, Mus musculus
  siRNA target sequence for Rai14 (NM_030690.2,1995-2013).
ctgttatcgagaatatgaa

SEQ ID NO: 742291 - DNA, 19 bp, Mus musculus
  siRNA target sequence for Rai14 (NM_030690.2,2286-2304).
ggctgatgcacgtgtcaaa

SEQ ID NO: 742292 - DNA, 19 bp, Mus musculus
  siRNA target sequence for Rai14 (NM_030690.2,2344-2362).
gaagtctcagtattccaaa

SEQ ID NO: 742293 - DNA, 19 bp, Mus musculus
  siRNA target sequence for Rai14 (NM_030690.2,2392-2410).
gctggtggatgcacacaaa

SEQ ID NO: 742294 - DNA, 19 bp, Mus musculus
  siRNA target sequence for Rai14 (NM_030690.2,2432-2450).
gagcatttgcaagtgataa

SEQ ID NO: 742295 - DNA, 19 bp, Mus musculus
  siRNA target sequence for Rai14 (NM_030690.2,2459-2477).
cggacaacggccaaagaga

SEQ ID NO: 742296 - DNA, 19 bp, Mus musculus
  siRNA target sequence for Rai14 (NM_030690.2,2460-2478).
ggacaacggccaaagagat

SEQ ID NO: 742297 - DNA, 19 bp, Mus musculus
  siRNA target sequence for Rai14 (NM_030690.2,2582-2600).
gcgatggtccccaagtctt

SEQ ID NO: 742298 - DNA, 19 bp, Mus musculus
  siRNA target sequence for Rai14 (NM_030690.2,2622-2640).
ccttggagagcgaagtcaa

SEQ ID NO: 742299 - DNA, 19 bp, Mus musculus
  siRNA target sequence for Rai14 (NM_030690.2,2623-2641).
cttggagagcgaagtcaat

SEQ ID NO: 742300 - DNA, 19 bp, Mus musculus
  siRNA target sequence for Rai14 (NM_030690.2,2633-2651).
gaagtcaatgccttagcaa

SEQ ID NO: 742301 - DNA, 19 bp, Mus musculus
  siRNA target sequence for Rai14 (NM_030690.2,2787-2805).
ctgcgcttgtgcagaagtt

SEQ ID NO: 742302 - DNA, 19 bp, Mus musculus
  siRNA target sequence for Rai14 (NM_030690.2,2948-2966).
ctctcctactccacaagtt

SEQ ID NO: 742303 - DNA, 19 bp, Mus musculus
  siRNA target sequence for Rai14 (NM_030690.2,3029-3047).
cagctggctgaatgtaaga

SEQ ID NO: 742304 - DNA, 19 bp, Mus musculus
  siRNA target sequence for Rai14 (NM_030690.2,3056-3074).
caggaggtcatctcagttt

SEQ ID NO: 742305 - DNA, 19 bp, Mus musculus
  siRNA target sequence for Rai14 (NM_030690.2,3096-3114).
ccgttcagggccaaatgga

SEQ ID NO: 742306 - DNA, 19 bp, Mus musculus
  siRNA target sequence for Rai14 (NM_030690.2,3142-3160).
gatcctcaccatgtgtaaa

SEQ ID NO: 742307 - DNA, 19 bp, Mus musculus
  siRNA target sequence for Igsf6 (NM_030691.1,70-88).
cagcctgatccttttccaa

SEQ ID NO: 742308 - DNA, 19 bp, Mus musculus
  siRNA target sequence for Igsf6 (NM_030691.1,121-139).
gctgcaaccaggttaccta

SEQ ID NO: 742309 - DNA, 19 bp, Mus musculus
  siRNA target sequence for Igsf6 (NM_030691.1,162-180).
ccgtcaccatggagtgtaa

SEQ ID NO: 742310 - DNA, 19 bp, Mus musculus
  siRNA target sequence for Igsf6 (NM_030691.1,169-187).
catggagtgtaacttttct

SEQ ID NO: 742311 - DNA, 19 bp, Mus musculus
  siRNA target sequence for Igsf6 (NM_030691.1,323-341).
caagtcttcctcactgtta

SEQ ID NO: 742312 - DNA, 19 bp, Mus musculus
  siRNA target sequence for Igsf6 (NM_030691.1,353-371).
ccaaatgacagtgcaattt

SEQ ID NO: 742313 - DNA, 19 bp, Mus musculus
  siRNA target sequence for Igsf6 (NM_030691.1,411-429).
gcgctaaacacgttggaaa

SEQ ID NO: 742314 - DNA, 19 bp, Mus musculus
  siRNA target sequence for Igsf6 (NM_030691.1,443-461).
gtggtaagagaaagacttt

SEQ ID NO: 742315 - DNA, 19 bp, Mus musculus
  siRNA target sequence for Igsf6 (NM_030691.1,545-563).
gtcctcttcaaatcaaaat

SEQ ID NO: 742316 - DNA, 19 bp, Mus musculus
  siRNA target sequence for Igsf6 (NM_030691.1,607-625).
gagtgctcggcgtatcttt

SEQ ID NO: 742317 - DNA, 19 bp, Mus musculus
  siRNA target sequence for Igsf6 (NM_030691.1,609-627).
gtgctcggcgtatctttca

SEQ ID NO: 742318 - DNA, 19 bp, Mus musculus
  siRNA target sequence for Igsf6 (NM_030691.1,685-703).
gcaagagggcactgatgaa

SEQ ID NO: 742319 - DNA, 19 bp, Mus musculus
  siRNA target sequence for Sacm1l (NM_030692.1,20-38).
cagcctacgagcatctgaa

SEQ ID NO: 742320 - DNA, 19 bp, Mus musculus
  siRNA target sequence for Sacm1l (NM_030692.1,86-104).
gagcagatgatgtactcat

SEQ ID NO: 742321 - DNA, 19 bp, Mus musculus
  siRNA target sequence for Sacm1l (NM_030692.1,89-107).
cagatgatgtactcatcat

SEQ ID NO: 742322 - DNA, 19 bp, Mus musculus
  siRNA target sequence for Sacm1l (NM_030692.1,132-150).
ccttgcagtcaaaaaagat

SEQ ID NO: 742323 - DNA, 19 bp, Mus musculus
  siRNA target sequence for Sacm1l (NM_030692.1,156-174).
cccctctgctgttacaaga

SEQ ID NO: 742324 - DNA, 19 bp, Mus musculus
  siRNA target sequence for Sacm1l (NM_030692.1,163-181).
gctgttacaagaccaatat

SEQ ID NO: 742325 - DNA, 19 bp, Mus musculus
  siRNA target sequence for Sacm1l (NM_030692.1,186-204).
gatactgggcacaatccat

SEQ ID NO: 742326 - DNA, 19 bp, Mus musculus
  siRNA target sequence for Sacm1l (NM_030692.1,201-219).
ccatctggtggcaggtaat

SEQ ID NO: 742327 - DNA, 19 bp, Mus musculus
  siRNA target sequence for Sacm1l (NM_030692.1,207-225).
ggtggcaggtaattatctt

SEQ ID NO: 742328 - DNA, 19 bp, Mus musculus
  siRNA target sequence for Sacm1l (NM_030692.1,210-228).
ggcaggtaattatcttgtt

SEQ ID NO: 742329 - DNA, 19 bp, Mus musculus
  siRNA target sequence for Sacm1l (NM_030692.1,212-230).
caggtaattatcttgttgt

SEQ ID NO: 742330 - DNA, 19 bp, Mus musculus
  siRNA target sequence for Sacm1l (NM_030692.1,243-261).
gatgaaagtaggtgaatgt

SEQ ID NO: 742331 - DNA, 19 bp, Mus musculus
  siRNA target sequence for Sacm1l (NM_030692.1,276-294).
ctggagagccacagatttt

SEQ ID NO: 742332 - DNA, 19 bp, Mus musculus
  siRNA target sequence for Sacm1l (NM_030692.1,278-296).
ggagagccacagattttga

SEQ ID NO: 742333 - DNA, 19 bp, Mus musculus
  siRNA target sequence for Sacm1l (NM_030692.1,284-302).
ccacagattttgatgttct

SEQ ID NO: 742334 - DNA, 19 bp, Mus musculus
  siRNA target sequence for Sacm1l (NM_030692.1,295-313).
gatgttctttcttataaga

SEQ ID NO: 742335 - DNA, 19 bp, Mus musculus
  siRNA target sequence for Sacm1l (NM_030692.1,321-339).
gttgcacttgactgatatt

SEQ ID NO: 742336 - DNA, 19 bp, Mus musculus
  siRNA target sequence for Sacm1l (NM_030692.1,327-345).
cttgactgatattcagtta

SEQ ID NO: 742337 - DNA, 19 bp, Mus musculus
  siRNA target sequence for Sacm1l (NM_030692.1,332-350).
ctgatattcagttacaaga

SEQ ID NO: 742338 - DNA, 19 bp, Mus musculus
  siRNA target sequence for Sacm1l (NM_030692.1,342-360).
gttacaagataataaaact

SEQ ID NO: 742339 - DNA, 19 bp, Mus musculus
  siRNA target sequence for Sacm1l (NM_030692.1,359-377).
ctttcctagcaatgctaaa

SEQ ID NO: 742340 - DNA, 19 bp, Mus musculus
  siRNA target sequence for Sacm1l (NM_030692.1,368-386).
caatgctaaaccatgtctt

SEQ ID NO: 742341 - DNA, 19 bp, Mus musculus
  siRNA target sequence for Sacm1l (NM_030692.1,434-452).
ctttgcagcgactatctaa

SEQ ID NO: 742342 - DNA, 19 bp, Mus musculus
  siRNA target sequence for Sacm1l (NM_030692.1,449-467).
ctaacacgagtccagaatt

SEQ ID NO: 742343 - DNA, 19 bp, Mus musculus
  siRNA target sequence for Sacm1l (NM_030692.1,453-471).
cacgagtccagaattccaa

SEQ ID NO: 742344 - DNA, 19 bp, Mus musculus
  siRNA target sequence for Sacm1l (NM_030692.1,458-476).
gtccagaattccaagaaat

SEQ ID NO: 742345 - DNA, 19 bp, Mus musculus
  siRNA target sequence for Sacm1l (NM_030692.1,472-490).
gaaatgagtctcttagaaa

SEQ ID NO: 742346 - DNA, 19 bp, Mus musculus
  siRNA target sequence for Sacm1l (NM_030692.1,492-510).
ggcagatcagcggtttgta

SEQ ID NO: 742347 - DNA, 19 bp, Mus musculus
  siRNA target sequence for Sacm1l (NM_030692.1,493-511).
gcagatcagcggtttgtat

SEQ ID NO: 742348 - DNA, 19 bp, Mus musculus
  siRNA target sequence for Sacm1l (NM_030692.1,593-611).
ctatgcactcatgttctat

SEQ ID NO: 742349 - DNA, 19 bp, Mus musculus
  siRNA target sequence for Sacm1l (NM_030692.1,600-618).
ctcatgttctattaatgga

SEQ ID NO: 742350 - DNA, 19 bp, Mus musculus
  siRNA target sequence for Sacm1l (NM_030692.1,662-680).
gagctggtgttcgttatta

SEQ ID NO: 742351 - DNA, 19 bp, Mus musculus
  siRNA target sequence for Sacm1l (NM_030692.1,665-683).
ctggtgttcgttattatgt

SEQ ID NO: 742352 - DNA, 19 bp, Mus musculus
  siRNA target sequence for Sacm1l (NM_030692.1,667-685).
ggtgttcgttattatgtga

SEQ ID NO: 742353 - DNA, 19 bp, Mus musculus
  siRNA target sequence for Sacm1l (NM_030692.1,750-768).
cgggaacagggcttcgttt

SEQ ID NO: 742354 - DNA, 19 bp, Mus musculus
  siRNA target sequence for Sacm1l (NM_030692.1,774-792).
gactcgaggatcaatacct

SEQ ID NO: 742355 - DNA, 19 bp, Mus musculus
  siRNA target sequence for Sacm1l (NM_030692.1,776-794).
ctcgaggatcaatacctat

SEQ ID NO: 742356 - DNA, 19 bp, Mus musculus
  siRNA target sequence for Sacm1l (NM_030692.1,778-796).
cgaggatcaatacctattt

SEQ ID NO: 742357 - DNA, 19 bp, Mus musculus
  siRNA target sequence for Sacm1l (NM_030692.1,800-818).
ggtcacagagaccaaatct

SEQ ID NO: 742358 - DNA, 19 bp, Mus musculus
  siRNA target sequence for Sacm1l (NM_030692.1,809-827).
gaccaaatctaaagtacaa

SEQ ID NO: 742359 - DNA, 19 bp, Mus musculus
  siRNA target sequence for Sacm1l (NM_030692.1,845-863).
gcaaagtagcaaatcacat

SEQ ID NO: 742360 - DNA, 19 bp, Mus musculus
  siRNA target sequence for Sacm1l (NM_030692.1,879-897).
gcattttgattcacaagta

SEQ ID NO: 742361 - DNA, 19 bp, Mus musculus
  siRNA target sequence for Sacm1l (NM_030692.1,995-1013).
gaagtgggatgatcagata

SEQ ID NO: 742362 - DNA, 19 bp, Mus musculus
  siRNA target sequence for Sacm1l (NM_030692.1,1010-1028).
gatatattgcctttgactt

SEQ ID NO: 742363 - DNA, 19 bp, Mus musculus
  siRNA target sequence for Sacm1l (NM_030692.1,1095-1113).
gcaggatgaattaagttat

SEQ ID NO: 742364 - DNA, 19 bp, Mus musculus
  siRNA target sequence for Sacm1l (NM_030692.1,1165-1183).
cgcagcaactgcatggatt

SEQ ID NO: 742365 - DNA, 19 bp, Mus musculus
  siRNA target sequence for Sacm1l (NM_030692.1,1170-1188).
caactgcatggattgtcta

SEQ ID NO: 742366 - DNA, 19 bp, Mus musculus
  siRNA target sequence for Sacm1l (NM_030692.1,1186-1204).
ctagacagaacgaatgtga

SEQ ID NO: 742367 - DNA, 19 bp, Mus musculus
  siRNA target sequence for Sacm1l (NM_030692.1,1196-1214).
cgaatgtgatacagagttt

SEQ ID NO: 742368 - DNA, 19 bp, Mus musculus
  siRNA target sequence for Sacm1l (NM_030692.1,1203-1221).
gatacagagtttattagct

SEQ ID NO: 742369 - DNA, 19 bp, Mus musculus
  siRNA target sequence for Sacm1l (NM_030692.1,1318-1336).
gcctgggccgataatgcta

SEQ ID NO: 742370 - DNA, 19 bp, Mus musculus
  siRNA target sequence for Sacm1l (NM_030692.1,1319-1337).
cctgggccgataatgctaa

SEQ ID NO: 742371 - DNA, 19 bp, Mus musculus
  siRNA target sequence for Sacm1l (NM_030692.1,1320-1338).
ctgggccgataatgctaat

SEQ ID NO: 742372 - DNA, 19 bp, Mus musculus
  siRNA target sequence for Sacm1l (NM_030692.1,1323-1341).
ggccgataatgctaatgct

SEQ ID NO: 742373 - DNA, 19 bp, Mus musculus
  siRNA target sequence for Sacm1l (NM_030692.1,1324-1342).
gccgataatgctaatgctt

SEQ ID NO: 742374 - DNA, 19 bp, Mus musculus
  siRNA target sequence for Sacm1l (NM_030692.1,1371-1389).
cttgaagactgactttaca

SEQ ID NO: 742375 - DNA, 19 bp, Mus musculus
  siRNA target sequence for Sacm1l (NM_030692.1,1425-1443).
ggatggcttcaactcatta

SEQ ID NO: 742376 - DNA, 19 bp, Mus musculus
  siRNA target sequence for Sacm1l (NM_030692.1,1439-1457).
cattattacggtattacaa

SEQ ID NO: 742377 - DNA, 19 bp, Mus musculus
  siRNA target sequence for Sacm1l (NM_030692.1,1447-1465).
cggtattacaagaacaact

SEQ ID NO: 742378 - DNA, 19 bp, Mus musculus
  siRNA target sequence for Sacm1l (NM_030692.1,1449-1467).
gtattacaagaacaacttt

SEQ ID NO: 742379 - DNA, 19 bp, Mus musculus
  siRNA target sequence for Sacm1l (NM_030692.1,1455-1473).
caagaacaacttttctgat

SEQ ID NO: 742380 - DNA, 19 bp, Mus musculus
  siRNA target sequence for Sacm1l (NM_030692.1,1471-1489).
gatggatttagacaagatt

SEQ ID NO: 742381 - DNA, 19 bp, Mus musculus
  siRNA target sequence for Sacm1l (NM_030692.1,1475-1493).
gatttagacaagattccat

SEQ ID NO: 742382 - DNA, 19 bp, Mus musculus
  siRNA target sequence for Sacm1l (NM_030692.1,1481-1499).
gacaagattccatagactt

SEQ ID NO: 742383 - DNA, 19 bp, Mus musculus
  siRNA target sequence for Sacm1l (NM_030692.1,1483-1501).
caagattccatagacttat

SEQ ID NO: 742384 - DNA, 19 bp, Mus musculus
  siRNA target sequence for Sacm1l (NM_030692.1,1495-1513).
gacttatttcttggaaatt

SEQ ID NO: 742385 - DNA, 19 bp, Mus musculus
  siRNA target sequence for Sacm1l (NM_030692.1,1531-1549).
gaatctcatagccctttaa

SEQ ID NO: 742386 - DNA, 19 bp, Mus musculus
  siRNA target sequence for Sacm1l (NM_030692.1,1535-1553).
ctcatagccctttaagtgt

SEQ ID NO: 742387 - DNA, 19 bp, Mus musculus
  siRNA target sequence for Sacm1l (NM_030692.1,1613-1631).
gcatcatctgtttgcttat

SEQ ID NO: 742388 - DNA, 19 bp, Mus musculus
  siRNA target sequence for Maged2 (NM_030700.1,113-131).
cgctctcagggcaaagctt

SEQ ID NO: 742389 - DNA, 19 bp, Mus musculus
  siRNA target sequence for Maged2 (NM_030700.1,352-370).
ccaagttctggcaactgaa

SEQ ID NO: 742390 - DNA, 19 bp, Mus musculus
  siRNA target sequence for Maged2 (NM_030700.1,410-428).
gacctgcaggctatgacaa

SEQ ID NO: 742391 - DNA, 19 bp, Mus musculus
  siRNA target sequence for Maged2 (NM_030700.1,431-449).
cctacaaccccgaccaaaa

SEQ ID NO: 742392 - DNA, 19 bp, Mus musculus
  siRNA target sequence for Maged2 (NM_030700.1,432-450).
ctacaaccccgaccaaaaa

SEQ ID NO: 742393 - DNA, 19 bp, Mus musculus
  siRNA target sequence for Maged2 (NM_030700.1,435-453).
caaccccgaccaaaaaggt

SEQ ID NO: 742394 - DNA, 19 bp, Mus musculus
  siRNA target sequence for Maged2 (NM_030700.1,466-484).
cgatccaaaggtcaataca

SEQ ID NO: 742395 - DNA, 19 bp, Mus musculus
  siRNA target sequence for Maged2 (NM_030700.1,467-485).
gatccaaaggtcaatacaa

SEQ ID NO: 742396 - DNA, 19 bp, Mus musculus
  siRNA target sequence for Maged2 (NM_030700.1,678-696).
gtggtcgaagggtctcaaa

SEQ ID NO: 742397 - DNA, 19 bp, Mus musculus
  siRNA target sequence for Maged2 (NM_030700.1,924-942).
caaatgacttggtgaagta

SEQ ID NO: 742398 - DNA, 19 bp, Mus musculus
  siRNA target sequence for Maged2 (NM_030700.1,950-968).
gctaaagaccagacaaaga

SEQ ID NO: 742399 - DNA, 19 bp, Mus musculus
  siRNA target sequence for Maged2 (NM_030700.1,971-989).
cccatcagacgctcagata

SEQ ID NO: 742400 - DNA, 19 bp, Mus musculus
  siRNA target sequence for Maged2 (NM_030700.1,1017-1035).
ctgatgtataccctgaaat

SEQ ID NO: 742401 - DNA, 19 bp, Mus musculus
  siRNA target sequence for Maged2 (NM_030700.1,1040-1058).
gaacgagcaggctattcct

SEQ ID NO: 742402 - DNA, 19 bp, Mus musculus
  siRNA target sequence for Maged2 (NM_030700.1,1063-1081).
gaaggtatttggaatccaa

SEQ ID NO: 742403 - DNA, 19 bp, Mus musculus
  siRNA target sequence for Maged2 (NM_030700.1,1067-1085).
gtatttggaatccaattga

SEQ ID NO: 742404 - DNA, 19 bp, Mus musculus
  siRNA target sequence for Maged2 (NM_030700.1,1137-1155).
caactgatgcaggcatatt

SEQ ID NO: 742405 - DNA, 19 bp, Mus musculus
  siRNA target sequence for Maged2 (NM_030700.1,1285-1303).
gattcatcactcactcttt

SEQ ID NO: 742406 - DNA, 19 bp, Mus musculus
  siRNA target sequence for Maged2 (NM_030700.1,1361-1379).
gccagagtacccaatagca

SEQ ID NO: 742407 - DNA, 19 bp, Mus musculus
  siRNA target sequence for Maged2 (NM_030700.1,1362-1380).
ccagagtacccaatagcaa

SEQ ID NO: 742408 - DNA, 19 bp, Mus musculus
  siRNA target sequence for Maged2 (NM_030700.1,1363-1381).
cagagtacccaatagcaat

SEQ ID NO: 742409 - DNA, 19 bp, Mus musculus
  siRNA target sequence for Maged2 (NM_030700.1,1404-1422).
ggggcctacgctcttacta

SEQ ID NO: 742410 - DNA, 19 bp, Mus musculus
  siRNA target sequence for Maged2 (NM_030700.1,1405-1423).
gggcctacgctcttactat

SEQ ID NO: 742411 - DNA, 19 bp, Mus musculus
  siRNA target sequence for Maged2 (NM_030700.1,1407-1425).
gcctacgctcttactatga

SEQ ID NO: 742412 - DNA, 19 bp, Mus musculus
  siRNA target sequence for Maged2 (NM_030700.1,1409-1427).
ctacgctcttactatgaga

SEQ ID NO: 742413 - DNA, 19 bp, Mus musculus
  siRNA target sequence for Maged2 (NM_030700.1,1454-1472).
gcttgtaaggtgcaaaaga

SEQ ID NO: 742414 - DNA, 19 bp, Mus musculus
  siRNA target sequence for Maged2 (NM_030700.1,1455-1473).
cttgtaaggtgcaaaagaa

SEQ ID NO: 742415 - DNA, 19 bp, Mus musculus
  siRNA target sequence for Cryac (NM_030704.1,731-749).
gatggatacgtggaagttt

SEQ ID NO: 742416 - DNA, 19 bp, Mus musculus
  siRNA target sequence for Gats (NM_030719.2,358-376).
gcgtcgccaaggagagtat

SEQ ID NO: 742417 - DNA, 19 bp, Mus musculus
  siRNA target sequence for Gats (NM_030719.2,388-406).
cctacggcctcatcaaact

SEQ ID NO: 742418 - DNA, 19 bp, Mus musculus
  siRNA target sequence for Gats (NM_030719.2,389-407).
ctacggcctcatcaaactt

SEQ ID NO: 742419 - DNA, 19 bp, Mus musculus
  siRNA target sequence for Gats (NM_030719.2,594-612).
cccatcggtgtgacaaaga

SEQ ID NO: 742420 - DNA, 19 bp, Mus musculus
  siRNA target sequence for Gats (NM_030719.2,595-613).
ccatcggtgtgacaaagat

SEQ ID NO: 742421 - DNA, 19 bp, Mus musculus
  siRNA target sequence for Gats (NM_030719.2,596-614).
catcggtgtgacaaagatt

SEQ ID NO: 742422 - DNA, 19 bp, Mus musculus
  siRNA target sequence for Gats (NM_030719.2,634-652).
cactcgccgaccagaacat

SEQ ID NO: 742423 - DNA, 19 bp, Mus musculus
  siRNA target sequence for Gats (NM_030719.2,636-654).
ctcgccgaccagaacatct

SEQ ID NO: 742424 - DNA, 19 bp, Mus musculus
  siRNA target sequence for Gats (NM_030719.2,665-683).
gctgtccacctatcaaact

SEQ ID NO: 742425 - DNA, 19 bp, Mus musculus
  siRNA target sequence for Gats (NM_030719.2,748-766).
ccatcctacgcgttgtcaa

SEQ ID NO: 742426 - DNA, 19 bp, Mus musculus
  siRNA target sequence for Gats (NM_030719.2,749-767).
catcctacgcgttgtcaat

SEQ ID NO: 742427 - DNA, 19 bp, Mus musculus
  siRNA target sequence for Gats (NM_030719.2,919-937).
cccttctcatggatgtgat

SEQ ID NO: 742428 - DNA, 19 bp, Mus musculus
  siRNA target sequence for Gats (NM_030719.2,1134-1152).
cccttgggatttgatgaat

SEQ ID NO: 742429 - DNA, 19 bp, Mus musculus
  siRNA target sequence for Gats (NM_030719.2,1226-1244).
gttcgaccatgcattggtt

SEQ ID NO: 742430 - DNA, 19 bp, Mus musculus
  siRNA target sequence for 9930013L23Rik (NM_030728.2,870-888).
cattctgaccggtttgaca

SEQ ID NO: 742431 - DNA, 19 bp, Mus musculus
  siRNA target sequence for 9930013L23Rik (NM_030728.2,874-892).
ctgaccggtttgacactta

SEQ ID NO: 742432 - DNA, 19 bp, Mus musculus
  siRNA target sequence for 9930013L23Rik (NM_030728.2,876-894).
gaccggtttgacacttaca

SEQ ID NO: 742433 - DNA, 19 bp, Mus musculus
  siRNA target sequence for 9930013L23Rik (NM_030728.2,2047-2065).
ccaacggtctgttgatcaa

SEQ ID NO: 742434 - DNA, 19 bp, Mus musculus
  siRNA target sequence for 9930013L23Rik (NM_030728.2,2067-2085).
gatgttgtgggctataatt

SEQ ID NO: 742435 - DNA, 19 bp, Mus musculus
  siRNA target sequence for 9930013L23Rik (NM_030728.2,2118-2136).
ccagaggaacgcaacactt

SEQ ID NO: 742436 - DNA, 19 bp, Mus musculus
  siRNA target sequence for 9930013L23Rik (NM_030728.2,2119-2137).
cagaggaacgcaacacttt

SEQ ID NO: 742437 - DNA, 19 bp, Mus musculus
  siRNA target sequence for 9930013L23Rik (NM_030728.2,2146-2164).
gccttggcctccttgttaa

SEQ ID NO: 742438 - DNA, 19 bp, Mus musculus
  siRNA target sequence for 9930013L23Rik (NM_030728.2,2288-2306).
ggcgaatcccaacaacaat

SEQ ID NO: 742439 - DNA, 19 bp, Mus musculus
  siRNA target sequence for 9930013L23Rik (NM_030728.2,2290-2308).
cgaatcccaacaacaatct

SEQ ID NO: 742440 - DNA, 19 bp, Mus musculus
  siRNA target sequence for 9930013L23Rik (NM_030728.2,2426-2444).
gggtaaattctacaacaat

SEQ ID NO: 742441 - DNA, 19 bp, Mus musculus
  siRNA target sequence for 9930013L23Rik (NM_030728.2,2438-2456).
caacaatcgagcacattct

SEQ ID NO: 742442 - DNA, 19 bp, Mus musculus
  siRNA target sequence for 9930013L23Rik (NM_030728.2,2464-2482).
gggctggcatgatcataga

SEQ ID NO: 742443 - DNA, 19 bp, Mus musculus
  siRNA target sequence for 9930013L23Rik (NM_030728.2,2466-2484).
gctggcatgatcatagaca

SEQ ID NO: 742444 - DNA, 19 bp, Mus musculus
  siRNA target sequence for 9930013L23Rik (NM_030728.2,2467-2485).
ctggcatgatcatagacaa

SEQ ID NO: 742445 - DNA, 19 bp, Mus musculus
  siRNA target sequence for 9930013L23Rik (NM_030728.2,2502-2520).
gaggcctcagccaaggata

SEQ ID NO: 742446 - DNA, 19 bp, Mus musculus
  siRNA target sequence for 9930013L23Rik (NM_030728.2,2598-2616).
gccattatccgacacttta

SEQ ID NO: 742447 - DNA, 19 bp, Mus musculus
  siRNA target sequence for 9930013L23Rik (NM_030728.2,2600-2618).
cattatccgacactttact

SEQ ID NO: 742448 - DNA, 19 bp, Mus musculus
  siRNA target sequence for 9930013L23Rik (NM_030728.2,2610-2628).
cactttactgcctacaaga

SEQ ID NO: 742449 - DNA, 19 bp, Mus musculus
  siRNA target sequence for 9930013L23Rik (NM_030728.2,2677-2695).
gctgtaggtttgctgataa

SEQ ID NO: 742450 - DNA, 19 bp, Mus musculus
  siRNA target sequence for 9930013L23Rik (NM_030728.2,2722-2740).
gtggaaccttcccatatga

SEQ ID NO: 742451 - DNA, 19 bp, Mus musculus
  siRNA target sequence for 9930013L23Rik (NM_030728.2,2725-2743).
gaaccttcccatatgatga

SEQ ID NO: 742452 - DNA, 19 bp, Mus musculus
  siRNA target sequence for 9930013L23Rik (NM_030728.2,2873-2891).
ccagaattttcccattaga

SEQ ID NO: 742453 - DNA, 19 bp, Mus musculus
  siRNA target sequence for 9930013L23Rik (NM_030728.2,2884-2902).
ccattagaggaattcagtt

SEQ ID NO: 742454 - DNA, 19 bp, Mus musculus
  siRNA target sequence for 9930013L23Rik (NM_030728.2,2981-2999).
ggccttccgcctaaacaat

SEQ ID NO: 742455 - DNA, 19 bp, Mus musculus
  siRNA target sequence for 9930013L23Rik (NM_030728.2,3010-3028).
gctgccctcacaacaatgt

SEQ ID NO: 742456 - DNA, 19 bp, Mus musculus
  siRNA target sequence for 9930013L23Rik (NM_030728.2,3020-3038).
caacaatgtgaccaacata

SEQ ID NO: 742457 - DNA, 19 bp, Mus musculus
  siRNA target sequence for 9930013L23Rik (NM_030728.2,3045-3063).
gaggatgtcccgattactt

SEQ ID NO: 742458 - DNA, 19 bp, Mus musculus
  siRNA target sequence for 9930013L23Rik (NM_030728.2,3259-3277).
ggcgctatgcacagatgta

SEQ ID NO: 742459 - DNA, 19 bp, Mus musculus
  siRNA target sequence for 9930013L23Rik (NM_030728.2,3261-3279).
cgctatgcacagatgtaca

SEQ ID NO: 742460 - DNA, 19 bp, Mus musculus
  siRNA target sequence for 9930013L23Rik (NM_030728.2,3298-3316).
gcaatctgcgcatgaagat

SEQ ID NO: 742461 - DNA, 19 bp, Mus musculus
  siRNA target sequence for 9930013L23Rik (NM_030728.2,3306-3324).
cgcatgaagatcattaaga

SEQ ID NO: 742462 - DNA, 19 bp, Mus musculus
  siRNA target sequence for 9930013L23Rik (NM_030728.2,3408-3426).
ctgcagaagggctatacta

SEQ ID NO: 742463 - DNA, 19 bp, Mus musculus
  siRNA target sequence for 9930013L23Rik (NM_030728.2,3535-3553).
ccatcctttcagatgttca

SEQ ID NO: 742464 - DNA, 19 bp, Mus musculus
  siRNA target sequence for 9930013L23Rik (NM_030728.2,3554-3572).
caatcgcctgctaaagcaa

SEQ ID NO: 742465 - DNA, 19 bp, Mus musculus
  siRNA target sequence for 9930013L23Rik (NM_030728.2,3667-3685).
ctgggttgctcttcttgaa

SEQ ID NO: 742466 - DNA, 19 bp, Mus musculus
  siRNA target sequence for 8030499H02Rik (NM_030732.2,304-322).
gaggtcaacttcttggtat

SEQ ID NO: 742467 - DNA, 19 bp, Mus musculus
  siRNA target sequence for 8030499H02Rik (NM_030732.2,337-355).
gagtcaggattttctcatt

SEQ ID NO: 742468 - DNA, 19 bp, Mus musculus
  siRNA target sequence for 8030499H02Rik (NM_030732.2,350-368).
ctcattctgcgtttacctt

SEQ ID NO: 742469 - DNA, 19 bp, Mus musculus
  siRNA target sequence for 8030499H02Rik (NM_030732.2,356-374).
ctgcgtttacctttggtat

SEQ ID NO: 742470 - DNA, 19 bp, Mus musculus
  siRNA target sequence for 8030499H02Rik (NM_030732.2,370-388).
ggtatagagagccatataa

SEQ ID NO: 742471 - DNA, 19 bp, Mus musculus
  siRNA target sequence for 8030499H02Rik (NM_030732.2,466-484).
gaggcagaagttagcataa

SEQ ID NO: 742472 - DNA, 19 bp, Mus musculus
  siRNA target sequence for 8030499H02Rik (NM_030732.2,522-540).
gtctctgtccctgatagat

SEQ ID NO: 742473 - DNA, 19 bp, Mus musculus
  siRNA target sequence for 8030499H02Rik (NM_030732.2,530-548).
ccctgatagatgctgttat

SEQ ID NO: 742474 - DNA, 19 bp, Mus musculus
  siRNA target sequence for 8030499H02Rik (NM_030732.2,550-568).
cccgatgtagtccaaacaa

SEQ ID NO: 742475 - DNA, 19 bp, Mus musculus
  siRNA target sequence for 8030499H02Rik (NM_030732.2,552-570).
cgatgtagtccaaacaaga

SEQ ID NO: 742476 - DNA, 19 bp, Mus musculus
  siRNA target sequence for 8030499H02Rik (NM_030732.2,643-661).
cagcaaggatctgcaaaaa

SEQ ID NO: 742477 - DNA, 19 bp, Mus musculus
  siRNA target sequence for 8030499H02Rik (NM_030732.2,697-715).
gcacataccatcgcaaata

SEQ ID NO: 742478 - DNA, 19 bp, Mus musculus
  siRNA target sequence for 8030499H02Rik (NM_030732.2,748-766).
gtggaaatcccttccaata

SEQ ID NO: 742479 - DNA, 19 bp, Mus musculus
  siRNA target sequence for 8030499H02Rik (NM_030732.2,784-802).
ggccatgaatctgaagttt

SEQ ID NO: 742480 - DNA, 19 bp, Mus musculus
  siRNA target sequence for 8030499H02Rik (NM_030732.2,851-869).
gagactccacggcaagaat

SEQ ID NO: 742481 - DNA, 19 bp, Mus musculus
  siRNA target sequence for 8030499H02Rik (NM_030732.2,853-871).
gactccacggcaagaatct

SEQ ID NO: 742482 - DNA, 19 bp, Mus musculus
  siRNA target sequence for 8030499H02Rik (NM_030732.2,905-923).
cgcagctcgtgcttagaca

SEQ ID NO: 742483 - DNA, 19 bp, Mus musculus
  siRNA target sequence for 8030499H02Rik (NM_030732.2,943-961).
caggacgtgcccagtaaca

SEQ ID NO: 742484 - DNA, 19 bp, Mus musculus
  siRNA target sequence for 8030499H02Rik (NM_030732.2,963-981).
ggatgtcacgtctctagat

SEQ ID NO: 742485 - DNA, 19 bp, Mus musculus
  siRNA target sequence for 8030499H02Rik (NM_030732.2,964-982).
gatgtcacgtctctagatt

SEQ ID NO: 742486 - DNA, 19 bp, Mus musculus
  siRNA target sequence for 8030499H02Rik (NM_030732.2,969-987).
cacgtctctagattggaat

SEQ ID NO: 742487 - DNA, 19 bp, Mus musculus
  siRNA target sequence for 8030499H02Rik (NM_030732.2,972-990).
gtctctagattggaatagt

SEQ ID NO: 742488 - DNA, 19 bp, Mus musculus
  siRNA target sequence for 8030499H02Rik (NM_030732.2,974-992).
ctctagattggaatagtga

SEQ ID NO: 742489 - DNA, 19 bp, Mus musculus
  siRNA target sequence for 8030499H02Rik (NM_030732.2,1040-1058).
ggactaaagatggtaatct

SEQ ID NO: 742490 - DNA, 19 bp, Mus musculus
  siRNA target sequence for 8030499H02Rik (NM_030732.2,1041-1059).
gactaaagatggtaatctt

SEQ ID NO: 742491 - DNA, 19 bp, Mus musculus
  siRNA target sequence for 8030499H02Rik (NM_030732.2,1064-1082).
gcaccttggggcagcataa

SEQ ID NO: 742492 - DNA, 19 bp, Mus musculus
  siRNA target sequence for 8030499H02Rik (NM_030732.2,1065-1083).
caccttggggcagcataaa

SEQ ID NO: 742493 - DNA, 19 bp, Mus musculus
  siRNA target sequence for 8030499H02Rik (NM_030732.2,1068-1086).
cttggggcagcataaaggt

SEQ ID NO: 742494 - DNA, 19 bp, Mus musculus
  siRNA target sequence for 8030499H02Rik (NM_030732.2,1074-1092).
gcagcataaaggtcctata

SEQ ID NO: 742495 - DNA, 19 bp, Mus musculus
  siRNA target sequence for 8030499H02Rik (NM_030732.2,1075-1093).
cagcataaaggtcctatat

SEQ ID NO: 742496 - DNA, 19 bp, Mus musculus
  siRNA target sequence for 8030499H02Rik (NM_030732.2,1084-1102).
ggtcctatatttgcattaa

SEQ ID NO: 742497 - DNA, 19 bp, Mus musculus
  siRNA target sequence for 8030499H02Rik (NM_030732.2,1129-1147).
ctaagtgctggcgtagata

SEQ ID NO: 742498 - DNA, 19 bp, Mus musculus
  siRNA target sequence for 8030499H02Rik (NM_030732.2,1144-1162).
gataagaccaccatcattt

SEQ ID NO: 742499 - DNA, 19 bp, Mus musculus
  siRNA target sequence for 8030499H02Rik (NM_030732.2,1211-1229).
ccccagcattggatgttga

SEQ ID NO: 742500 - DNA, 19 bp, Mus musculus
  siRNA target sequence for 8030499H02Rik (NM_030732.2,1245-1263).
cacctttgcatcttgtagt

SEQ ID NO: 742501 - DNA, 19 bp, Mus musculus
  siRNA target sequence for 8030499H02Rik (NM_030732.2,1248-1266).
ctttgcatcttgtagtaca

SEQ ID NO: 742502 - DNA, 19 bp, Mus musculus
  siRNA target sequence for 8030499H02Rik (NM_030732.2,1252-1270).
gcatcttgtagtacagata

SEQ ID NO: 742503 - DNA, 19 bp, Mus musculus
  siRNA target sequence for 8030499H02Rik (NM_030732.2,1253-1271).
catcttgtagtacagatat

SEQ ID NO: 742504 - DNA, 19 bp, Mus musculus
  siRNA target sequence for 8030499H02Rik (NM_030732.2,1295-1313).
gacaagacagacctatcaa

SEQ ID NO: 742505 - DNA, 19 bp, Mus musculus
  siRNA target sequence for 8030499H02Rik (NM_030732.2,1300-1318).
gacagacctatcaaaacat

SEQ ID NO: 742506 - DNA, 19 bp, Mus musculus
  siRNA target sequence for 8030499H02Rik (NM_030732.2,1324-1342).
ggacacacgaatgaagtaa

SEQ ID NO: 742507 - DNA, 19 bp, Mus musculus
  siRNA target sequence for 8030499H02Rik (NM_030732.2,1331-1349).
cgaatgaagtaaatgctat

SEQ ID NO: 742508 - DNA, 19 bp, Mus musculus
  siRNA target sequence for 8030499H02Rik (NM_030732.2,1511-1529).
caaatgccaaccttatgct

SEQ ID NO: 742509 - DNA, 19 bp, Mus musculus
  siRNA target sequence for 8030499H02Rik (NM_030732.2,1570-1588).
gtagacagagggatttgca

SEQ ID NO: 742510 - DNA, 19 bp, Mus musculus
  siRNA target sequence for 8030499H02Rik (NM_030732.2,1580-1598).
ggatttgcatccatacttt

SEQ ID NO: 742511 - DNA, 19 bp, Mus musculus
  siRNA target sequence for 8030499H02Rik (NM_030732.2,1586-1604).
gcatccatactttgacaaa

SEQ ID NO: 742512 - DNA, 19 bp, Mus musculus
  siRNA target sequence for 8030499H02Rik (NM_030732.2,1706-1724).
gtgctctagttcacagtta

SEQ ID NO: 742513 - DNA, 19 bp, Mus musculus
  siRNA target sequence for 8030499H02Rik (NM_030732.2,1708-1726).
gctctagttcacagttaca

SEQ ID NO: 742514 - DNA, 19 bp, Mus musculus
  siRNA target sequence for 8030499H02Rik (NM_030732.2,1758-1776).
gaacgcagcaggagacaaa

SEQ ID NO: 742515 - DNA, 19 bp, Mus musculus
  siRNA target sequence for 8030499H02Rik (NM_030732.2,1793-1811).
cggacggttcagtttgtgt

SEQ ID NO: 742516 - DNA, 19 bp, Mus musculus
  siRNA target sequence for Defb5 (NM_030734.1,61-79).
gactttagcaaaacaatca

SEQ ID NO: 742517 - DNA, 19 bp, Mus musculus
  siRNA target sequence for Defb5 (NM_030734.1,85-103).
ccagtaagttgctgtatga

SEQ ID NO: 742518 - DNA, 19 bp, Mus musculus
  siRNA target sequence for Defb5 (NM_030734.1,109-127).
ggcatatgcaggtatctgt

SEQ ID NO: 742519 - DNA, 19 bp, Mus musculus
  siRNA target sequence for Zfp313 (NM_030743.3,93-111).
cccctcagccgctttacgt

SEQ ID NO: 742520 - DNA, 19 bp, Mus musculus
  siRNA target sequence for Zfp313 (NM_030743.3,115-133).
ccgtgtgcctggaagtatt

SEQ ID NO: 742521 - DNA, 19 bp, Mus musculus
  siRNA target sequence for Zfp313 (NM_030743.3,300-318).
catggctgccgtaagaatt

SEQ ID NO: 742522 - DNA, 19 bp, Mus musculus
  siRNA target sequence for Zfp313 (NM_030743.3,345-363).
gtgacgtcatgttccaaat

SEQ ID NO: 742523 - DNA, 19 bp, Mus musculus
  siRNA target sequence for Zfp313 (NM_030743.3,349-367).
cgtcatgttccaaatacca

SEQ ID NO: 742524 - DNA, 19 bp, Mus musculus
  siRNA target sequence for Zfp313 (NM_030743.3,358-376).
ccaaataccagaattacat

SEQ ID NO: 742525 - DNA, 19 bp, Mus musculus
  siRNA target sequence for Zfp313 (NM_030743.3,412-430).
cccttcagccgagaaacat

SEQ ID NO: 742526 - DNA, 19 bp, Mus musculus
  siRNA target sequence for Zfp313 (NM_030743.3,457-475).
cttactgtcccgagaagaa

SEQ ID NO: 742527 - DNA, 19 bp, Mus musculus
  siRNA target sequence for Zfp313 (NM_030743.3,466-484).
ccgagaagaactttgatca

SEQ ID NO: 742528 - DNA, 19 bp, Mus musculus
  siRNA target sequence for Zfp313 (NM_030743.3,495-513).
gtggagcactgcaaactca

SEQ ID NO: 742529 - DNA, 19 bp, Mus musculus
  siRNA target sequence for Zfp313 (NM_030743.3,615-633).
cgccgtcaccgcttttcct

SEQ ID NO: 742530 - DNA, 19 bp, Mus musculus
  siRNA target sequence for Zfp313 (NM_030743.3,616-634).
gccgtcaccgcttttccta

SEQ ID NO: 742531 - DNA, 19 bp, Mus musculus
  siRNA target sequence for Zfp313 (NM_030743.3,626-644).
cttttcctacgacactttt

SEQ ID NO: 742532 - DNA, 19 bp, Mus musculus
  siRNA target sequence for Zfp313 (NM_030743.3,638-656).
cacttttgtggattacgat

SEQ ID NO: 742533 - DNA, 19 bp, Mus musculus
  siRNA target sequence for Zfp313 (NM_030743.3,647-665).
ggattacgatgttgatgaa

SEQ ID NO: 742534 - DNA, 19 bp, Mus musculus
  siRNA target sequence for Zfp313 (NM_030743.3,686-704).
gttgcagcgctccatcatt

SEQ ID NO: 742535 - DNA, 19 bp, Mus musculus
  siRNA target sequence for 1810057E01Rik (NM_030749.1,148-166).
gttgacttcctgtttaact

SEQ ID NO: 742536 - DNA, 19 bp, Mus musculus
  siRNA target sequence for 1810057E01Rik (NM_030749.1,173-191).
ctcagctgtcagaactcaa

SEQ ID NO: 742537 - DNA, 19 bp, Mus musculus
  siRNA target sequence for 1810057E01Rik (NM_030749.1,178-196).
ctgtcagaactcaaataat

SEQ ID NO: 742538 - DNA, 19 bp, Mus musculus
  siRNA target sequence for 1810057E01Rik (NM_030749.1,184-202).
gaactcaaataattttgca

SEQ ID NO: 742539 - DNA, 19 bp, Mus musculus
  siRNA target sequence for 1810057E01Rik (NM_030749.1,289-307).
ggtgttccacccaactcaa

SEQ ID NO: 742540 - DNA, 19 bp, Mus musculus
  siRNA target sequence for 1810057E01Rik (NM_030749.1,653-671).
gttcggctgataaacaagt

SEQ ID NO: 742541 - DNA, 19 bp, Mus musculus
  siRNA target sequence for 1810057E01Rik (NM_030749.1,703-721).
ggttgctgcgctctttgat

SEQ ID NO: 742542 - DNA, 19 bp, Mus musculus
  siRNA target sequence for 1810057E01Rik (NM_030749.1,711-729).
cgctctttgatcttgagta

SEQ ID NO: 742543 - DNA, 19 bp, Mus musculus
  siRNA target sequence for 1810057E01Rik (NM_030749.1,768-786).
cctttggtggccttcaagt

SEQ ID NO: 742544 - DNA, 19 bp, Mus musculus
  siRNA target sequence for 1810057E01Rik (NM_030749.1,1148-1166).
gagttgacccaggattcat

SEQ ID NO: 742545 - DNA, 19 bp, Mus musculus
  siRNA target sequence for 1810057E01Rik (NM_030749.1,1462-1480).
cttgatgaaggaactaaga

SEQ ID NO: 742546 - DNA, 19 bp, Mus musculus
  siRNA target sequence for Ankrd17 (NM_030886.2,544-562).
gatgatttggagaatccaa

SEQ ID NO: 742547 - DNA, 19 bp, Mus musculus
  siRNA target sequence for Ankrd17 (NM_030886.2,574-592).
gcttccaagttgcttctat

SEQ ID NO: 742548 - DNA, 19 bp, Mus musculus
  siRNA target sequence for Ankrd17 (NM_030886.2,642-660).
ggctcgactggaagcttta

SEQ ID NO: 742549 - DNA, 19 bp, Mus musculus
  siRNA target sequence for Ankrd17 (NM_030886.2,644-662).
ctcgactggaagctttact

SEQ ID NO: 742550 - DNA, 19 bp, Mus musculus
  siRNA target sequence for Ankrd17 (NM_030886.2,647-665).
gactggaagctttactaga

SEQ ID NO: 742551 - DNA, 19 bp, Mus musculus
  siRNA target sequence for Ankrd17 (NM_030886.2,673-691).
ggaataggcaagttatcga

SEQ ID NO: 742552 - DNA, 19 bp, Mus musculus
  siRNA target sequence for Ankrd17 (NM_030886.2,721-739).
gaagtgctccgcaggttaa

SEQ ID NO: 742553 - DNA, 19 bp, Mus musculus
  siRNA target sequence for Ankrd17 (NM_030886.2,724-742).
gtgctccgcaggttaacat

SEQ ID NO: 742554 - DNA, 19 bp, Mus musculus
  siRNA target sequence for Ankrd17 (NM_030886.2,849-867).
gtgttcagaaggagatgta

SEQ ID NO: 742555 - DNA, 19 bp, Mus musculus
  siRNA target sequence for Ankrd17 (NM_030886.2,872-890).
ctgtgcggaaactactcat

SEQ ID NO: 742556 - DNA, 19 bp, Mus musculus
  siRNA target sequence for Ankrd17 (NM_030886.2,876-894).
gcggaaactactcattgaa

SEQ ID NO: 742557 - DNA, 19 bp, Mus musculus
  siRNA target sequence for Ankrd17 (NM_030886.2,1024-1042).
ggtgacatcacacctttaa

SEQ ID NO: 742558 - DNA, 19 bp, Mus musculus
  siRNA target sequence for Ankrd17 (NM_030886.2,1052-1070).
ctaatggaggacatgtcaa

SEQ ID NO: 742559 - DNA, 19 bp, Mus musculus
  siRNA target sequence for Ankrd17 (NM_030886.2,1058-1076).
gaggacatgtcaaaatcgt

SEQ ID NO: 742560 - DNA, 19 bp, Mus musculus
  siRNA target sequence for Ankrd17 (NM_030886.2,1080-1098).
gttgctgctagctcataaa

SEQ ID NO: 742561 - DNA, 19 bp, Mus musculus
  siRNA target sequence for Ankrd17 (NM_030886.2,1105-1123).
gtcaatgcacagtcttcaa

SEQ ID NO: 742562 - DNA, 19 bp, Mus musculus
  siRNA target sequence for Ankrd17 (NM_030886.2,1157-1175).
gaggctacgtagatgttgt

SEQ ID NO: 742563 - DNA, 19 bp, Mus musculus
  siRNA target sequence for Ankrd17 (NM_030886.2,1159-1177).
ggctacgtagatgttgtaa

SEQ ID NO: 742564 - DNA, 19 bp, Mus musculus
  siRNA target sequence for Ankrd17 (NM_030886.2,1160-1178).
gctacgtagatgttgtaaa

SEQ ID NO: 742565 - DNA, 19 bp, Mus musculus
  siRNA target sequence for Ankrd17 (NM_030886.2,1188-1206).
ggaatccggtgctagtatt

SEQ ID NO: 742566 - DNA, 19 bp, Mus musculus
  siRNA target sequence for Ankrd17 (NM_030886.2,1202-1220).
gtattgaggaccataatga

SEQ ID NO: 742567 - DNA, 19 bp, Mus musculus
  siRNA target sequence for Ankrd17 (NM_030886.2,1275-1293).
cagattgctgctagaaaat

SEQ ID NO: 742568 - DNA, 19 bp, Mus musculus
  siRNA target sequence for Ankrd17 (NM_030886.2,1301-1319).
gcatcaatacgcattccaa

SEQ ID NO: 742569 - DNA, 19 bp, Mus musculus
  siRNA target sequence for Ankrd17 (NM_030886.2,1302-1320).
catcaatacgcattccaat

SEQ ID NO: 742570 - DNA, 19 bp, Mus musculus
  siRNA target sequence for Ankrd17 (NM_030886.2,1305-1323).
caatacgcattccaatgaa

SEQ ID NO: 742571 - DNA, 19 bp, Mus musculus
  siRNA target sequence for Ankrd17 (NM_030886.2,1332-1350).
gagtgcccttacattagct

SEQ ID NO: 742572 - DNA, 19 bp, Mus musculus
  siRNA target sequence for Ankrd17 (NM_030886.2,1339-1357).
cttacattagcttgttata

SEQ ID NO: 742573 - DNA, 19 bp, Mus musculus
  siRNA target sequence for Ankrd17 (NM_030886.2,1374-1392).
ggtgcgatttcttttggaa

SEQ ID NO: 742574 - DNA, 19 bp, Mus musculus
  siRNA target sequence for Ankrd17 (NM_030886.2,1394-1412).
caggcgctgatcaagaaca

SEQ ID NO: 742575 - DNA, 19 bp, Mus musculus
  siRNA target sequence for Ankrd17 (NM_030886.2,1397-1415).
gcgctgatcaagaacataa

SEQ ID NO: 742576 - DNA, 19 bp, Mus musculus
  siRNA target sequence for Ankrd17 (NM_030886.2,1399-1417).
gctgatcaagaacataaga

SEQ ID NO: 742577 - DNA, 19 bp, Mus musculus
  siRNA target sequence for Ankrd17 (NM_030886.2,1493-1511).
gtggtgctcaagtgaacat

SEQ ID NO: 742578 - DNA, 19 bp, Mus musculus
  siRNA target sequence for Ankrd17 (NM_030886.2,1509-1527).
catgccagctgattcattt

SEQ ID NO: 742579 - DNA, 19 bp, Mus musculus
  siRNA target sequence for Ankrd17 (NM_030886.2,1566-1584).
ggaacttgcagccttactt

SEQ ID NO: 742580 - DNA, 19 bp, Mus musculus
  siRNA target sequence for Ankrd17 (NM_030886.2,1567-1585).
gaacttgcagccttactta

SEQ ID NO: 742581 - DNA, 19 bp, Mus musculus
  siRNA target sequence for Ankrd17 (NM_030886.2,1687-1705).
ggccaaggagcaaatatca

SEQ ID NO: 742582 - DNA, 19 bp, Mus musculus
  siRNA target sequence for Ankrd17 (NM_030886.2,1814-1832).
ggtgttctactcctttgat

SEQ ID NO: 742583 - DNA, 19 bp, Mus musculus
  siRNA target sequence for Ankrd17 (NM_030886.2,1852-1870).
cacttggagttagtgaaat

SEQ ID NO: 742584 - DNA, 19 bp, Mus musculus
  siRNA target sequence for Ankrd17 (NM_030886.2,1880-1898).
ctgcaggagctaatgttca

SEQ ID NO: 742585 - DNA, 19 bp, Mus musculus
  siRNA target sequence for Ankrd17 (NM_030886.2,2057-2075).
gcacagtccagttcttaat

SEQ ID NO: 742586 - DNA, 19 bp, Mus musculus
  siRNA target sequence for Ankrd17 (NM_030886.2,2058-2076).
cacagtccagttcttaatt

SEQ ID NO: 742587 - DNA, 19 bp, Mus musculus
  siRNA target sequence for Ankrd17 (NM_030886.2,2062-2080).
gtccagttcttaattagca

SEQ ID NO: 742588 - DNA, 19 bp, Mus musculus
  siRNA target sequence for Ankrd17 (NM_030886.2,2083-2101).
ggagcaaatgtgaatcgaa

SEQ ID NO: 742589 - DNA, 19 bp, Mus musculus
  siRNA target sequence for Ankrd17 (NM_030886.2,2094-2112).
gaatcgaaccacagctaat

SEQ ID NO: 742590 - DNA, 19 bp, Mus musculus
  siRNA target sequence for Ankrd17 (NM_030886.2,2099-2117).
gaaccacagctaataatga

SEQ ID NO: 742591 - DNA, 19 bp, Mus musculus
  siRNA target sequence for Ankrd17 (NM_030886.2,2103-2121).
cacagctaataatgatcat

SEQ ID NO: 742592 - DNA, 19 bp, Mus musculus
  siRNA target sequence for Ankrd17 (NM_030886.2,2108-2126).
ctaataatgatcatactgt

SEQ ID NO: 742593 - DNA, 19 bp, Mus musculus
  siRNA target sequence for Ankrd17 (NM_030886.2,2159-2177).
cagtggtagaactactttt

SEQ ID NO: 742594 - DNA, 19 bp, Mus musculus
  siRNA target sequence for Ankrd17 (NM_030886.2,2191-2209).
gaccctactcaccgtttaa

SEQ ID NO: 742595 - DNA, 19 bp, Mus musculus
  siRNA target sequence for Ankrd17 (NM_030886.2,2212-2230).
gatggctcaaccatgttga

SEQ ID NO: 742596 - DNA, 19 bp, Mus musculus
  siRNA target sequence for Ankrd17 (NM_030886.2,2280-2298).
ctatcccaataatctactt

SEQ ID NO: 742597 - DNA, 19 bp, Mus musculus
  siRNA target sequence for Ankrd17 (NM_030886.2,2332-2350).
cccccatcccatgatttaa

SEQ ID NO: 742598 - DNA, 19 bp, Mus musculus
  siRNA target sequence for Ankrd17 (NM_030886.2,2458-2476).
gctgcttctaaacaaaagt

SEQ ID NO: 742599 - DNA, 19 bp, Mus musculus
  siRNA target sequence for Ankrd17 (NM_030886.2,2506-2524).
gatgtacagggttacatca

SEQ ID NO: 742600 - DNA, 19 bp, Mus musculus
  siRNA target sequence for Ankrd17 (NM_030886.2,2515-2533).
ggttacatcaccaatcagt

SEQ ID NO: 742601 - DNA, 19 bp, Mus musculus
  siRNA target sequence for Ankrd17 (NM_030886.2,2532-2550).
gtctccagagagcattgta

SEQ ID NO: 742602 - DNA, 19 bp, Mus musculus
  siRNA target sequence for Ankrd17 (NM_030886.2,2554-2572).
gaggctcagggaaagttaa

SEQ ID NO: 742603 - DNA, 19 bp, Mus musculus
  siRNA target sequence for Ankrd17 (NM_030886.2,2556-2574).
ggctcagggaaagttaaca

SEQ ID NO: 742604 - DNA, 19 bp, Mus musculus
  siRNA target sequence for Ankrd17 (NM_030886.2,2687-2705).
cgagggaggaacaaattca

SEQ ID NO: 742605 - DNA, 19 bp, Mus musculus
  siRNA target sequence for Ankrd17 (NM_030886.2,2745-2763).
gcgagagctacaactgaaa

SEQ ID NO: 742606 - DNA, 19 bp, Mus musculus
  siRNA target sequence for Ankrd17 (NM_030886.2,2746-2764).
cgagagctacaactgaaaa

SEQ ID NO: 742607 - DNA, 19 bp, Mus musculus
  siRNA target sequence for Ankrd17 (NM_030886.2,2787-2805).
gtatctagaagttaaagct

SEQ ID NO: 742608 - DNA, 19 bp, Mus musculus
  siRNA target sequence for Ankrd17 (NM_030886.2,2886-2904).
gctttccgagggagactat

SEQ ID NO: 742609 - DNA, 19 bp, Mus musculus
  siRNA target sequence for Ankrd17 (NM_030886.2,2922-2940).
ggatcctgttttgcttaaa

SEQ ID NO: 742610 - DNA, 19 bp, Mus musculus
  siRNA target sequence for Ankrd17 (NM_030886.2,3040-3058).
gggtccatcgcaaatctta

SEQ ID NO: 742611 - DNA, 19 bp, Mus musculus
  siRNA target sequence for Ankrd17 (NM_030886.2,3042-3060).
gtccatcgcaaatcttaca

SEQ ID NO: 742612 - DNA, 19 bp, Mus musculus
  siRNA target sequence for Ankrd17 (NM_030886.2,3044-3062).
ccatcgcaaatcttacaga

SEQ ID NO: 742613 - DNA, 19 bp, Mus musculus
  siRNA target sequence for Ankrd17 (NM_030886.2,3048-3066).
cgcaaatcttacagaactt

SEQ ID NO: 742614 - DNA, 19 bp, Mus musculus
  siRNA target sequence for Ankrd17 (NM_030886.2,3050-3068).
caaatcttacagaacttca

SEQ ID NO: 742615 - DNA, 19 bp, Mus musculus
  siRNA target sequence for Ankrd17 (NM_030886.2,3143-3161).
cacaacaagggttaatggt

SEQ ID NO: 742616 - DNA, 19 bp, Mus musculus
  siRNA target sequence for Ankrd17 (NM_030886.2,3317-3335).
cagccatgctacctatcta

SEQ ID NO: 742617 - DNA, 19 bp, Mus musculus
  siRNA target sequence for Ankrd17 (NM_030886.2,3414-3432).
ggaactggtacaaacacta

SEQ ID NO: 742618 - DNA, 19 bp, Mus musculus
  siRNA target sequence for Ankrd17 (NM_030886.2,3534-3552).
ggacaatggtgcagacatt

SEQ ID NO: 742619 - DNA, 19 bp, Mus musculus
  siRNA target sequence for Ankrd17 (NM_030886.2,3633-3651).
gttagctcgcggtgcaaat

SEQ ID NO: 742620 - DNA, 19 bp, Mus musculus
  siRNA target sequence for Ankrd17 (NM_030886.2,3638-3656).
ctcgcggtgcaaataaaga

SEQ ID NO: 742621 - DNA, 19 bp, Mus musculus
  siRNA target sequence for Ankrd17 (NM_030886.2,3723-3741).
caaaatactgctaaatgca

SEQ ID NO: 742622 - DNA, 19 bp, Mus musculus
  siRNA target sequence for Ankrd17 (NM_030886.2,3739-3757).
gcaggagctgagatcaatt

SEQ ID NO: 742623 - DNA, 19 bp, Mus musculus
  siRNA target sequence for Ankrd17 (NM_030886.2,3742-3760).
ggagctgagatcaattcaa

SEQ ID NO: 742624 - DNA, 19 bp, Mus musculus
  siRNA target sequence for Ankrd17 (NM_030886.2,3843-3861).
catgggctctgacataaat

SEQ ID NO: 742625 - DNA, 19 bp, Mus musculus
  siRNA target sequence for Ankrd17 (NM_030886.2,3882-3900).
gaacactgcccttacatta

SEQ ID NO: 742626 - DNA, 19 bp, Mus musculus
  siRNA target sequence for Ankrd17 (NM_030886.2,3932-3950).
gccttctgcttgatcgaaa

SEQ ID NO: 742627 - DNA, 19 bp, Mus musculus
  siRNA target sequence for Ankrd17 (NM_030886.2,3933-3951).
ccttctgcttgatcgaaaa

SEQ ID NO: 742628 - DNA, 19 bp, Mus musculus
  siRNA target sequence for Ankrd17 (NM_030886.2,3937-3955).
ctgcttgatcgaaaagcaa

SEQ ID NO: 742629 - DNA, 19 bp, Mus musculus
  siRNA target sequence for Ankrd17 (NM_030886.2,3980-3998).
gcctcacaccattaatgga

SEQ ID NO: 742630 - DNA, 19 bp, Mus musculus
  siRNA target sequence for Ankrd17 (NM_030886.2,4026-4044).
gggccgagttcttttggat

SEQ ID NO: 742631 - DNA, 19 bp, Mus musculus
  siRNA target sequence for Ankrd17 (NM_030886.2,4027-4045).
ggccgagttcttttggata

SEQ ID NO: 742632 - DNA, 19 bp, Mus musculus
  siRNA target sequence for Ankrd17 (NM_030886.2,4028-4046).
gccgagttcttttggataa

SEQ ID NO: 742633 - DNA, 19 bp, Mus musculus
  siRNA target sequence for Ankrd17 (NM_030886.2,4029-4047).
ccgagttcttttggataaa

SEQ ID NO: 742634 - DNA, 19 bp, Mus musculus
  siRNA target sequence for Ankrd17 (NM_030886.2,4108-4126).
gcagataaagggcattata

SEQ ID NO: 742635 - DNA, 19 bp, Mus musculus
  siRNA target sequence for Ankrd17 (NM_030886.2,4109-4127).
cagataaagggcattataa

SEQ ID NO: 742636 - DNA, 19 bp, Mus musculus
  siRNA target sequence for Ankrd17 (NM_030886.2,4194-4212).
gttatggctagcagcaaat

SEQ ID NO: 742637 - DNA, 19 bp, Mus musculus
  siRNA target sequence for Ankrd17 (NM_030886.2,4270-4288).
gcagataaccgcaagataa

SEQ ID NO: 742638 - DNA, 19 bp, Mus musculus
  siRNA target sequence for Ankrd17 (NM_030886.2,4293-4311).
gctcatggctgcatttaga

SEQ ID NO: 742639 - DNA, 19 bp, Mus musculus
  siRNA target sequence for Ankrd17 (NM_030886.2,4294-4312).
ctcatggctgcatttagaa

SEQ ID NO: 742640 - DNA, 19 bp, Mus musculus
  siRNA target sequence for Ankrd17 (NM_030886.2,4327-4345).
gtggtgcgctacttagtca

SEQ ID NO: 742641 - DNA, 19 bp, Mus musculus
  siRNA target sequence for Ankrd17 (NM_030886.2,4329-4347).
ggtgcgctacttagtcaaa

SEQ ID NO: 742642 - DNA, 19 bp, Mus musculus
  siRNA target sequence for Ankrd17 (NM_030886.2,4342-4360).
gtcaaagaggtcaatcagt

SEQ ID NO: 742643 - DNA, 19 bp, Mus musculus
  siRNA target sequence for Ankrd17 (NM_030886.2,4344-4362).
caaagaggtcaatcagttt

SEQ ID NO: 742644 - DNA, 19 bp, Mus musculus
  siRNA target sequence for Ankrd17 (NM_030886.2,4373-4391).
cggaatgcatgaggtatat

SEQ ID NO: 742645 - DNA, 19 bp, Mus musculus
  siRNA target sequence for Ankrd17 (NM_030886.2,4374-4392).
ggaatgcatgaggtatata

SEQ ID NO: 742646 - DNA, 19 bp, Mus musculus
  siRNA target sequence for Ankrd17 (NM_030886.2,4436-4454).
gtatggagtcaatagtaca

SEQ ID NO: 742647 - DNA, 19 bp, Mus musculus
  siRNA target sequence for Ankrd17 (NM_030886.2,4512-4530).
gctagacctggaaaagtta

SEQ ID NO: 742648 - DNA, 19 bp, Mus musculus
  siRNA target sequence for Ankrd17 (NM_030886.2,4513-4531).
ctagacctggaaaagttaa

SEQ ID NO: 742649 - DNA, 19 bp, Mus musculus
  siRNA target sequence for Ankrd17 (NM_030886.2,4548-4566).
gctggctttggctgctaaa

SEQ ID NO: 742650 - DNA, 19 bp, Mus musculus
  siRNA target sequence for Ankrd17 (NM_030886.2,4549-4567).
ctggctttggctgctaaaa

SEQ ID NO: 742651 - DNA, 19 bp, Mus musculus
  siRNA target sequence for Ankrd17 (NM_030886.2,4551-4569).
ggctttggctgctaaaaga

SEQ ID NO: 742652 - DNA, 19 bp, Mus musculus
  siRNA target sequence for Ankrd17 (NM_030886.2,4739-4757).
ccaccactaccataggaat

SEQ ID NO: 742653 - DNA, 19 bp, Mus musculus
  siRNA target sequence for Ankrd17 (NM_030886.2,4740-4758).
caccactaccataggaata

SEQ ID NO: 742654 - DNA, 19 bp, Mus musculus
  siRNA target sequence for Ankrd17 (NM_030886.2,4743-4761).
cactaccataggaatatct

SEQ ID NO: 742655 - DNA, 19 bp, Mus musculus
  siRNA target sequence for Ankrd17 (NM_030886.2,4779-4797).
ggcaggttcccatggtaaa

SEQ ID NO: 742656 - DNA, 19 bp, Mus musculus
  siRNA target sequence for Ankrd17 (NM_030886.2,4780-4798).
gcaggttcccatggtaaaa

SEQ ID NO: 742657 - DNA, 19 bp, Mus musculus
  siRNA target sequence for Ankrd17 (NM_030886.2,5079-5097).
gcagccgtctgttcttgtt

SEQ ID NO: 742658 - DNA, 19 bp, Mus musculus
  siRNA target sequence for Ankrd17 (NM_030886.2,5080-5098).
cagccgtctgttcttgtta

SEQ ID NO: 742659 - DNA, 19 bp, Mus musculus
  siRNA target sequence for Ankrd17 (NM_030886.2,5082-5100).
gccgtctgttcttgttaca

SEQ ID NO: 742660 - DNA, 19 bp, Mus musculus
  siRNA target sequence for Ankrd17 (NM_030886.2,5083-5101).
ccgtctgttcttgttacat

SEQ ID NO: 742661 - DNA, 19 bp, Mus musculus
  siRNA target sequence for Ankrd17 (NM_030886.2,5084-5102).
cgtctgttcttgttacatt

SEQ ID NO: 742662 - DNA, 19 bp, Mus musculus
  siRNA target sequence for Ankrd17 (NM_030886.2,5132-5150).
gcaaggcttctataaaatt

SEQ ID NO: 742663 - DNA, 19 bp, Mus musculus
  siRNA target sequence for Ankrd17 (NM_030886.2,5163-5181).
caatgaagggaccagtaat

SEQ ID NO: 742664 - DNA, 19 bp, Mus musculus
  siRNA target sequence for Ankrd17 (NM_030886.2,5187-5205).
gtcaacttgtacaaaatct

SEQ ID NO: 742665 - DNA, 19 bp, Mus musculus
  siRNA target sequence for Ankrd17 (NM_030886.2,5292-5310).
ggtcgtaaggcggtcaaaa

SEQ ID NO: 742666 - DNA, 19 bp, Mus musculus
  siRNA target sequence for Ankrd17 (NM_030886.2,5293-5311).
gtcgtaaggcggtcaaaaa

SEQ ID NO: 742667 - DNA, 19 bp, Mus musculus
  siRNA target sequence for Ankrd17 (NM_030886.2,5295-5313).
cgtaaggcggtcaaaaaaa

SEQ ID NO: 742668 - DNA, 19 bp, Mus musculus
  siRNA target sequence for Ankrd17 (NM_030886.2,5304-5322).
gtcaaaaaaagtatctgtt

SEQ ID NO: 742669 - DNA, 19 bp, Mus musculus
  siRNA target sequence for Ankrd17 (NM_030886.2,5323-5341).
ccatcaactgtgatatcca

SEQ ID NO: 742670 - DNA, 19 bp, Mus musculus
  siRNA target sequence for Ankrd17 (NM_030886.2,5330-5348).
ctgtgatatccagagttat

SEQ ID NO: 742671 - DNA, 19 bp, Mus musculus
  siRNA target sequence for Ankrd17 (NM_030886.2,5334-5352).
gatatccagagttattgga

SEQ ID NO: 742672 - DNA, 19 bp, Mus musculus
  siRNA target sequence for Ankrd17 (NM_030886.2,5359-5377).
ggctgtaatatcaatgcta

SEQ ID NO: 742673 - DNA, 19 bp, Mus musculus
  siRNA target sequence for Ankrd17 (NM_030886.2,5431-5449).
ggagaccggataataacta

SEQ ID NO: 742674 - DNA, 19 bp, Mus musculus
  siRNA target sequence for Ankrd17 (NM_030886.2,5432-5450).
gagaccggataataactat

SEQ ID NO: 742675 - DNA, 19 bp, Mus musculus
  siRNA target sequence for Ankrd17 (NM_030886.2,5434-5452).
gaccggataataactataa

SEQ ID NO: 742676 - DNA, 19 bp, Mus musculus
  siRNA target sequence for Ankrd17 (NM_030886.2,5474-5492).
gacaagcaactcagttgat

SEQ ID NO: 742677 - DNA, 19 bp, Mus musculus
  siRNA target sequence for Ankrd17 (NM_030886.2,5476-5494).
caagcaactcagttgatca

SEQ ID NO: 742678 - DNA, 19 bp, Mus musculus
  siRNA target sequence for Ankrd17 (NM_030886.2,5483-5501).
ctcagttgatcaatgcttt

SEQ ID NO: 742679 - DNA, 19 bp, Mus musculus
  siRNA target sequence for Ankrd17 (NM_030886.2,5508-5526).
ggatccagacaaagaaatt

SEQ ID NO: 742680 - DNA, 19 bp, Mus musculus
  siRNA target sequence for Ankrd17 (NM_030886.2,5553-5571).
gaaaagctccacagcaaat

SEQ ID NO: 742681 - DNA, 19 bp, Mus musculus
  siRNA target sequence for Ankrd17 (NM_030886.2,5605-5623).
gctgctaacagttccttaa

SEQ ID NO: 742682 - DNA, 19 bp, Mus musculus
  siRNA target sequence for Ankrd17 (NM_030886.2,5606-5624).
ctgctaacagttccttaat

SEQ ID NO: 742683 - DNA, 19 bp, Mus musculus
  siRNA target sequence for Ankrd17 (NM_030886.2,5721-5739).
cattaagaaccctgtgaat

SEQ ID NO: 742684 - DNA, 19 bp, Mus musculus
  siRNA target sequence for Ankrd17 (NM_030886.2,5889-5907).
gtccacttggggtcctttt

SEQ ID NO: 742685 - DNA, 19 bp, Mus musculus
  siRNA target sequence for Ankrd17 (NM_030886.2,5924-5942).
gccctgccagagctactaa

SEQ ID NO: 742686 - DNA, 19 bp, Mus musculus
  siRNA target sequence for Ankrd17 (NM_030886.2,5968-5986).
cgccatagcaatcagaata

SEQ ID NO: 742687 - DNA, 19 bp, Mus musculus
  siRNA target sequence for Ankrd17 (NM_030886.2,6003-6021).
gaattcagcaggttctcta

SEQ ID NO: 742688 - DNA, 19 bp, Mus musculus
  siRNA target sequence for Ankrd17 (NM_030886.2,6010-6028).
gcaggttctctaacttcaa

SEQ ID NO: 742689 - DNA, 19 bp, Mus musculus
  siRNA target sequence for Ankrd17 (NM_030886.2,6061-6079).
gcggtgcctggtacaactt

SEQ ID NO: 742690 - DNA, 19 bp, Mus musculus
  siRNA target sequence for Ankrd17 (NM_030886.2,6124-6142).
gtcacagttgtgaagacat

SEQ ID NO: 742691 - DNA, 19 bp, Mus musculus
  siRNA target sequence for Ankrd17 (NM_030886.2,6198-6216).
cacaaacgccacatatcct

SEQ ID NO: 742692 - DNA, 19 bp, Mus musculus
  siRNA target sequence for Ankrd17 (NM_030886.2,6200-6218).
caaacgccacatatcctat

SEQ ID NO: 742693 - DNA, 19 bp, Mus musculus
  siRNA target sequence for Ankrd17 (NM_030886.2,6232-6250).
gaacactatccagtatcat

SEQ ID NO: 742694 - DNA, 19 bp, Mus musculus
  siRNA target sequence for Ankrd17 (NM_030886.2,6277-6295).
cagccaggaggggtttcta

SEQ ID NO: 742695 - DNA, 19 bp, Mus musculus
  siRNA target sequence for Ankrd17 (NM_030886.2,6317-6335).
gatcagcatccccaaataa

SEQ ID NO: 742696 - DNA, 19 bp, Mus musculus
  siRNA target sequence for Ankrd17 (NM_030886.2,6366-6384).
cagtccaccagtagtagaa

SEQ ID NO: 742697 - DNA, 19 bp, Mus musculus
  siRNA target sequence for Ankrd17 (NM_030886.2,6376-6394).
gtagtagaacctgcaaata

SEQ ID NO: 742698 - DNA, 19 bp, Mus musculus
  siRNA target sequence for Ankrd17 (NM_030886.2,6379-6397).
gtagaacctgcaaatagca

SEQ ID NO: 742699 - DNA, 19 bp, Mus musculus
  siRNA target sequence for Ankrd17 (NM_030886.2,6512-6530).
cttccccggatgtgagaat

SEQ ID NO: 742700 - DNA, 19 bp, Mus musculus
  siRNA target sequence for Ankrd17 (NM_030886.2,6516-6534).
cccggatgtgagaatgact

SEQ ID NO: 742701 - DNA, 19 bp, Mus musculus
  siRNA target sequence for Ankrd17 (NM_030886.2,6538-6556).
cctcctacagcaacaagtt

SEQ ID NO: 742702 - DNA, 19 bp, Mus musculus
  siRNA target sequence for Ankrd17 (NM_030886.2,6598-6616).
cctatgcctcagacacaaa

SEQ ID NO: 742703 - DNA, 19 bp, Mus musculus
  siRNA target sequence for Ankrd17 (NM_030886.2,6599-6617).
ctatgcctcagacacaaat

SEQ ID NO: 742704 - DNA, 19 bp, Mus musculus
  siRNA target sequence for Ankrd17 (NM_030886.2,6623-6641).
gctcccagcctcctaaaat

SEQ ID NO: 742705 - DNA, 19 bp, Mus musculus
  siRNA target sequence for Ankrd17 (NM_030886.2,6626-6644).
cccagcctcctaaaatgga

SEQ ID NO: 742706 - DNA, 19 bp, Mus musculus
  siRNA target sequence for Ankrd17 (NM_030886.2,6642-6660).
ggaagcccctgctattaga

SEQ ID NO: 742707 - DNA, 19 bp, Mus musculus
  siRNA target sequence for Ankrd17 (NM_030886.2,6719-6737).
ctgcttcagtcctcaatgt

SEQ ID NO: 742708 - DNA, 19 bp, Mus musculus
  siRNA target sequence for Ankrd17 (NM_030886.2,6729-6747).
cctcaatgtcaatcacatt

SEQ ID NO: 742709 - DNA, 19 bp, Mus musculus
  siRNA target sequence for Ankrd17 (NM_030886.2,6732-6750).
caatgtcaatcacattaaa

SEQ ID NO: 742710 - DNA, 19 bp, Mus musculus
  siRNA target sequence for Ankrd17 (NM_030886.2,6778-6796).
cagctaccttcgaccttaa

SEQ ID NO: 742711 - DNA, 19 bp, Mus musculus
  siRNA target sequence for Ankrd17 (NM_030886.2,6781-6799).
ctaccttcgaccttaagta

SEQ ID NO: 742712 - DNA, 19 bp, Mus musculus
  siRNA target sequence for Ankrd17 (NM_030886.2,6855-6873).
cttcagtgccccattacca

SEQ ID NO: 742713 - DNA, 19 bp, Mus musculus
  siRNA target sequence for Ankrd17 (NM_030886.2,6877-6895).
gggccctttagcacattgt

SEQ ID NO: 742714 - DNA, 19 bp, Mus musculus
  siRNA target sequence for Ankrd17 (NM_030886.2,6878-6896).
ggccctttagcacattgtt

SEQ ID NO: 742715 - DNA, 19 bp, Mus musculus
  siRNA target sequence for Ankrd17 (NM_030886.2,6930-6948).
gggaggacctgttgtttca

SEQ ID NO: 742716 - DNA, 19 bp, Mus musculus
  siRNA target sequence for Ankrd17 (NM_030886.2,6952-6970).
cagtcaacaccagaatcta

SEQ ID NO: 742717 - DNA, 19 bp, Mus musculus
  siRNA target sequence for Ankrd17 (NM_030886.2,6987-7005).
ctcgtatttgccaaattca

SEQ ID NO: 742718 - DNA, 19 bp, Mus musculus
  siRNA target sequence for Ankrd17 (NM_030886.2,6989-7007).
cgtatttgccaaattcaga

SEQ ID NO: 742719 - DNA, 19 bp, Mus musculus
  siRNA target sequence for Ankrd17 (NM_030886.2,7043-7061).
gttttaggccaccattaca

SEQ ID NO: 742720 - DNA, 19 bp, Mus musculus
  siRNA target sequence for Ankrd17 (NM_030886.2,7073-7091).
caagtccctcaggtattgt

SEQ ID NO: 742721 - DNA, 19 bp, Mus musculus
  siRNA target sequence for Ankrd17 (NM_030886.2,7095-7113).
catggacacaccatatggt

SEQ ID NO: 742722 - DNA, 19 bp, Mus musculus
  siRNA target sequence for Ankrd17 (NM_030886.2,7101-7119).
cacaccatatggttctgta

SEQ ID NO: 742723 - DNA, 19 bp, Mus musculus
  siRNA target sequence for Ankrd17 (NM_030886.2,7130-7148).
ctacacatttgggaaactt

SEQ ID NO: 742724 - DNA, 19 bp, Mus musculus
  siRNA target sequence for Ankrd17 (NM_030886.2,7220-7238).
cacctactgctgctaactt

SEQ ID NO: 742725 - DNA, 19 bp, Mus musculus
  siRNA target sequence for Ankrd17 (NM_030886.2,7222-7240).
cctactgctgctaacttta

SEQ ID NO: 742726 - DNA, 19 bp, Mus musculus
  siRNA target sequence for Ankrd17 (NM_030886.2,7357-7375).
gtacctttagggtctgaaa

SEQ ID NO: 742727 - DNA, 19 bp, Mus musculus
  siRNA target sequence for Ankrd17 (NM_030886.2,7389-7407).
ctctcaggacaggaaagta

SEQ ID NO: 742728 - DNA, 19 bp, Mus musculus
  siRNA target sequence for Ankrd17 (NM_030886.2,7471-7489).
gttattgggagtaatttgt

SEQ ID NO: 742729 - DNA, 19 bp, Mus musculus
  siRNA target sequence for Ankrd17 (NM_030886.2,7477-7495).
gggagtaatttgtctacat

SEQ ID NO: 742730 - DNA, 19 bp, Mus musculus
  siRNA target sequence for Ankrd17 (NM_030886.2,7479-7497).
gagtaatttgtctacatca

SEQ ID NO: 742731 - DNA, 19 bp, Mus musculus
  siRNA target sequence for Ankrd17 (NM_030886.2,7529-7547).
ggattggtggcaatcaaga

SEQ ID NO: 742732 - DNA, 19 bp, Mus musculus
  siRNA target sequence for Ankrd17 (NM_030886.2,7587-7605).
gattcacaggccaatgtct

SEQ ID NO: 742733 - DNA, 19 bp, Mus musculus
  siRNA target sequence for Ankrd17 (NM_030886.2,7602-7620).
gtctgacccaggagtgttt

SEQ ID NO: 742734 - DNA, 19 bp, Mus musculus
  siRNA target sequence for Ankrd17 (NM_030886.2,7633-7651).
gcaatggagcgagatagta

SEQ ID NO: 742735 - DNA, 19 bp, Mus musculus
  siRNA target sequence for Arf4l (NM_031160.1,699-717).
gcgcctgtatgagatgatt

SEQ ID NO: 742736 - DNA, 19 bp, Mus musculus
  siRNA target sequence for Trim17 (NM_031172.1,109-127).
gcttgccagacggttacaa

SEQ ID NO: 742737 - DNA, 19 bp, Mus musculus
  siRNA target sequence for Trim17 (NM_031172.1,141-159).
gttccatctgccttgacta

SEQ ID NO: 742738 - DNA, 19 bp, Mus musculus
  siRNA target sequence for Trim17 (NM_031172.1,148-166).
ctgccttgactactttact

SEQ ID NO: 742739 - DNA, 19 bp, Mus musculus
  siRNA target sequence for Trim17 (NM_031172.1,321-339).
ccaaccgcctcctgacaaa

SEQ ID NO: 742740 - DNA, 19 bp, Mus musculus
  siRNA target sequence for Trim17 (NM_031172.1,322-340).
caaccgcctcctgacaaaa

SEQ ID NO: 742741 - DNA, 19 bp, Mus musculus
  siRNA target sequence for Trim17 (NM_031172.1,507-525).
ctgcaagggagtataagct

SEQ ID NO: 742742 - DNA, 19 bp, Mus musculus
  siRNA target sequence for Trim17 (NM_031172.1,513-531).
gggagtataagctcaagtt

SEQ ID NO: 742743 - DNA, 19 bp, Mus musculus
  siRNA target sequence for Trim17 (NM_031172.1,1034-1052).
cgccagaggcggtacttga

SEQ ID NO: 742744 - DNA, 19 bp, Mus musculus
  siRNA target sequence for Trim17 (NM_031172.1,1115-1133).
gtggggcagaagagctttt

SEQ ID NO: 742745 - DNA, 19 bp, Mus musculus
  siRNA target sequence for Trim17 (NM_031172.1,1150-1168).
ctgggaagtgggcatgaat

SEQ ID NO: 742746 - DNA, 19 bp, Mus musculus
  siRNA target sequence for Trim17 (NM_031172.1,1400-1418).
gatgggtcccacttacaca

SEQ ID NO: 742747 - DNA, 19 bp, Mus musculus
  siRNA target sequence for Dscam (NM_031174.2,487-505).
cagagcttcgcgaatgttt

SEQ ID NO: 742748 - DNA, 19 bp, Mus musculus
  siRNA target sequence for Dscam (NM_031174.2,492-510).
cttcgcgaatgttttcagt

SEQ ID NO: 742749 - DNA, 19 bp, Mus musculus
  siRNA target sequence for Dscam (NM_031174.2,1053-1071).
cacgcggcacagatacaca

SEQ ID NO: 742750 - DNA, 19 bp, Mus musculus
  siRNA target sequence for Dscam (NM_031174.2,1318-1336).
gactcaggcagctatgtgt

SEQ ID NO: 742751 - DNA, 19 bp, Mus musculus
  siRNA target sequence for Dscam (NM_031174.2,1410-1428).
catcagtcccagaaaggtt

SEQ ID NO: 742752 - DNA, 19 bp, Mus musculus
  siRNA target sequence for Dscam (NM_031174.2,1552-1570).
ctcaaccacgcaaacctta

SEQ ID NO: 742753 - DNA, 19 bp, Mus musculus
  siRNA target sequence for Dscam (NM_031174.2,1554-1572).
caaccacgcaaaccttata

SEQ ID NO: 742754 - DNA, 19 bp, Mus musculus
  siRNA target sequence for Dscam (NM_031174.2,1560-1578).
cgcaaaccttataatggat

SEQ ID NO: 742755 - DNA, 19 bp, Mus musculus
  siRNA target sequence for Dscam (NM_031174.2,1632-1650).
gctatctgctcaagactat

SEQ ID NO: 742756 - DNA, 19 bp, Mus musculus
  siRNA target sequence for Dscam (NM_031174.2,1669-1687).
gacggaactcccaaaatca

SEQ ID NO: 742757 - DNA, 19 bp, Mus musculus
  siRNA target sequence for Dscam (NM_031174.2,1672-1690).
ggaactcccaaaatcattt

SEQ ID NO: 742758 - DNA, 19 bp, Mus musculus
  siRNA target sequence for Dscam (NM_031174.2,1691-1709).
ctgcctttagcgagaaagt

SEQ ID NO: 742759 - DNA, 19 bp, Mus musculus
  siRNA target sequence for Dscam (NM_031174.2,1816-1834).
caccgcatcagccaaatga

SEQ ID NO: 742760 - DNA, 19 bp, Mus musculus
  siRNA target sequence for Dscam (NM_031174.2,1852-1870).
gtggtcagctacctgaata

SEQ ID NO: 742761 - DNA, 19 bp, Mus musculus
  siRNA target sequence for Dscam (NM_031174.2,1855-1873).
gtcagctacctgaatatct

SEQ ID NO: 742762 - DNA, 19 bp, Mus musculus
  siRNA target sequence for Dscam (NM_031174.2,1906-1924).
cgctgcactgccaacaact

SEQ ID NO: 742763 - DNA, 19 bp, Mus musculus
  siRNA target sequence for Dscam (NM_031174.2,1938-1956).
cctgtaccaggctcgaata

SEQ ID NO: 742764 - DNA, 19 bp, Mus musculus
  siRNA target sequence for Dscam (NM_031174.2,1939-1957).
ctgtaccaggctcgaataa

SEQ ID NO: 742765 - DNA, 19 bp, Mus musculus
  siRNA target sequence for Dscam (NM_031174.2,2025-2043).
catccactgccgcgtaatt

SEQ ID NO: 742766 - DNA, 19 bp, Mus musculus
  siRNA target sequence for Dscam (NM_031174.2,2169-2187).
gggagagtacacgtgtaat

SEQ ID NO: 742767 - DNA, 19 bp, Mus musculus
  siRNA target sequence for Dscam (NM_031174.2,2171-2189).
gagagtacacgtgtaatgt

SEQ ID NO: 742768 - DNA, 19 bp, Mus musculus
  siRNA target sequence for Dscam (NM_031174.2,2249-2267).
ctttcatccaaccttttga

SEQ ID NO: 742769 - DNA, 19 bp, Mus musculus
  siRNA target sequence for Dscam (NM_031174.2,2380-2398).
ctcggagtaaccattgaca

SEQ ID NO: 742770 - DNA, 19 bp, Mus musculus
  siRNA target sequence for Dscam (NM_031174.2,2384-2402).
gagtaaccattgacaacat

SEQ ID NO: 742771 - DNA, 19 bp, Mus musculus
  siRNA target sequence for Dscam (NM_031174.2,2429-2447).
ccaacctctccctaatgca

SEQ ID NO: 742772 - DNA, 19 bp, Mus musculus
  siRNA target sequence for Dscam (NM_031174.2,2550-2568).
ggaccaggacgggatctat

SEQ ID NO: 742773 - DNA, 19 bp, Mus musculus
  siRNA target sequence for Dscam (NM_031174.2,2603-2621).
gttatcctgtgcctacaat

SEQ ID NO: 742774 - DNA, 19 bp, Mus musculus
  siRNA target sequence for Dscam (NM_031174.2,2614-2632).
cctacaattgtgtggaaat

SEQ ID NO: 742775 - DNA, 19 bp, Mus musculus
  siRNA target sequence for Dscam (NM_031174.2,2615-2633).
ctacaattgtgtggaaatt

SEQ ID NO: 742776 - DNA, 19 bp, Mus musculus
  siRNA target sequence for Dscam (NM_031174.2,2625-2643).
gtggaaattctcaaaaggt

SEQ ID NO: 742777 - DNA, 19 bp, Mus musculus
  siRNA target sequence for Dscam (NM_031174.2,2715-2733).
gatcaagcatgttgtagaa

SEQ ID NO: 742778 - DNA, 19 bp, Mus musculus
  siRNA target sequence for Dscam (NM_031174.2,2718-2736).
caagcatgttgtagaagaa

SEQ ID NO: 742779 - DNA, 19 bp, Mus musculus
  siRNA target sequence for Dscam (NM_031174.2,2799-2817).
gtacctcacagtgaaaatt

SEQ ID NO: 742780 - DNA, 19 bp, Mus musculus
  siRNA target sequence for Dscam (NM_031174.2,3285-3303).
gaactcggccaccatcatt

SEQ ID NO: 742781 - DNA, 19 bp, Mus musculus
  siRNA target sequence for Dscam (NM_031174.2,3288-3306).
ctcggccaccatcattgat

SEQ ID NO: 742782 - DNA, 19 bp, Mus musculus
  siRNA target sequence for Dscam (NM_031174.2,3290-3308).
cggccaccatcattgatat

SEQ ID NO: 742783 - DNA, 19 bp, Mus musculus
  siRNA target sequence for Dscam (NM_031174.2,3862-3880).
ggagagctgggcgagatta

SEQ ID NO: 742784 - DNA, 19 bp, Mus musculus
  siRNA target sequence for Dscam (NM_031174.2,3863-3881).
gagagctgggcgagattaa

SEQ ID NO: 742785 - DNA, 19 bp, Mus musculus
  siRNA target sequence for Dscam (NM_031174.2,3916-3934).
gatggactagagaaataca

SEQ ID NO: 742786 - DNA, 19 bp, Mus musculus
  siRNA target sequence for Dscam (NM_031174.2,3984-4002).
ccggagcgagcagatcttt

SEQ ID NO: 742787 - DNA, 19 bp, Mus musculus
  siRNA target sequence for Dscam (NM_031174.2,4289-4307).
ctgtggagcccctagctaa

SEQ ID NO: 742788 - DNA, 19 bp, Mus musculus
  siRNA target sequence for Dscam (NM_031174.2,4293-4311).
ggagcccctagctaaagct

SEQ ID NO: 742789 - DNA, 19 bp, Mus musculus
  siRNA target sequence for Dscam (NM_031174.2,4395-4413).
cccgtcacctgccgtaaaa

SEQ ID NO: 742790 - DNA, 19 bp, Mus musculus
  siRNA target sequence for Dscam (NM_031174.2,4396-4414).
ccgtcacctgccgtaaaat

SEQ ID NO: 742791 - DNA, 19 bp, Mus musculus
  siRNA target sequence for Dscam (NM_031174.2,4479-4497).
caatgggagtttcatcatt

SEQ ID NO: 742792 - DNA, 19 bp, Mus musculus
  siRNA target sequence for Dscam (NM_031174.2,4511-4529).
cagaggactctggctatta

SEQ ID NO: 742793 - DNA, 19 bp, Mus musculus
  siRNA target sequence for Dscam (NM_031174.2,4554-4572).
gggatcagatgagatcata

SEQ ID NO: 742794 - DNA, 19 bp, Mus musculus
  siRNA target sequence for Dscam (NM_031174.2,4561-4579).
gatgagatcatattaaatt

SEQ ID NO: 742795 - DNA, 19 bp, Mus musculus
  siRNA target sequence for Dscam (NM_031174.2,4688-4706).
gaggctacatcctgcaata

SEQ ID NO: 742796 - DNA, 19 bp, Mus musculus
  siRNA target sequence for Dscam (NM_031174.2,4690-4708).
ggctacatcctgcaatact

SEQ ID NO: 742797 - DNA, 19 bp, Mus musculus
  siRNA target sequence for Dscam (NM_031174.2,4702-4720).
caatactccgaggataaca

SEQ ID NO: 742798 - DNA, 19 bp, Mus musculus
  siRNA target sequence for Dscam (NM_031174.2,4748-4766).
gccccagcgagcgttcata

SEQ ID NO: 742799 - DNA, 19 bp, Mus musculus
  siRNA target sequence for Dscam (NM_031174.2,4759-4777).
cgttcataccgcttggaaa

SEQ ID NO: 742800 - DNA, 19 bp, Mus musculus
  siRNA target sequence for Dscam (NM_031174.2,4768-4786).
cgcttggaaaacctaaagt

SEQ ID NO: 742801 - DNA, 19 bp, Mus musculus
  siRNA target sequence for Dscam (NM_031174.2,4787-4805).
gtgggacttggtataagtt

SEQ ID NO: 742802 - DNA, 19 bp, Mus musculus
  siRNA target sequence for Dscam (NM_031174.2,4809-4827).
ccttactgcccaaaatgga

SEQ ID NO: 742803 - DNA, 19 bp, Mus musculus
  siRNA target sequence for Dscam (NM_031174.2,4905-4923).
gctcttcgccagcatcaat

SEQ ID NO: 742804 - DNA, 19 bp, Mus musculus
  siRNA target sequence for Dscam (NM_031174.2,4906-4924).
ctcttcgccagcatcaata

SEQ ID NO: 742805 - DNA, 19 bp, Mus musculus
  siRNA target sequence for Dscam (NM_031174.2,4979-4997).
cctcattcactcttgaata

SEQ ID NO: 742806 - DNA, 19 bp, Mus musculus
  siRNA target sequence for Dscam (NM_031174.2,5178-5196).
ccctccactcattaagtca

SEQ ID NO: 742807 - DNA, 19 bp, Mus musculus
  siRNA target sequence for Dscam (NM_031174.2,5273-5291).
gggttctactgctctttgt

SEQ ID NO: 742808 - DNA, 19 bp, Mus musculus
  siRNA target sequence for Dscam (NM_031174.2,5387-5405).
cacggacttcagatacctt

SEQ ID NO: 742809 - DNA, 19 bp, Mus musculus
  siRNA target sequence for Dscam (NM_031174.2,5389-5407).
cggacttcagataccttaa

SEQ ID NO: 742810 - DNA, 19 bp, Mus musculus
  siRNA target sequence for Dscam (NM_031174.2,5393-5411).
cttcagataccttaagcaa

SEQ ID NO: 742811 - DNA, 19 bp, Mus musculus
  siRNA target sequence for Dscam (NM_031174.2,5448-5466).
cagggctcagcttttgatt

SEQ ID NO: 742812 - DNA, 19 bp, Mus musculus
  siRNA target sequence for Dscam (NM_031174.2,5533-5551).
ggggaggcagccaaacaga

SEQ ID NO: 742813 - DNA, 19 bp, Mus musculus
  siRNA target sequence for Dscam (NM_031174.2,5567-5585).
ctcacacggtgcattacca

SEQ ID NO: 742814 - DNA, 19 bp, Mus musculus
  siRNA target sequence for Dscam (NM_031174.2,5569-5587).
cacacggtgcattaccaat

SEQ ID NO: 742815 - DNA, 19 bp, Mus musculus
  siRNA target sequence for Dscam (NM_031174.2,5817-5835).
cagcgtcagcccatcacaa

SEQ ID NO: 742816 - DNA, 19 bp, Mus musculus
  siRNA target sequence for Dscam (NM_031174.2,5997-6015).
gttgacggcagggacaaat

SEQ ID NO: 742817 - DNA, 19 bp, Mus musculus
  siRNA target sequence for Dscam (NM_031174.2,6396-6414).
gctgggacaggcagctaaa

SEQ ID NO: 742818 - DNA, 19 bp, Mus musculus
  siRNA target sequence for Dscam (NM_031174.2,6468-6486).
caatccctacgcaaaatct

SEQ ID NO: 742819 - DNA, 19 bp, Mus musculus
  siRNA target sequence for Dscam (NM_031174.2,6472-6490).
ccctacgcaaaatcttaca

SEQ ID NO: 742820 - DNA, 19 bp, Mus musculus
  siRNA target sequence for Wdr10 (NM_031177.1,153-171).
gttgacgtggagagacaaa

SEQ ID NO: 742821 - DNA, 19 bp, Mus musculus
  siRNA target sequence for Wdr10 (NM_031177.1,263-281).
ctgatggcaccttacttca

SEQ ID NO: 742822 - DNA, 19 bp, Mus musculus
  siRNA target sequence for Wdr10 (NM_031177.1,282-300).
gcccctgaagggacacaaa

SEQ ID NO: 742823 - DNA, 19 bp, Mus musculus
  siRNA target sequence for Wdr10 (NM_031177.1,378-396).
ctggacctcaaaacttgaa

SEQ ID NO: 742824 - DNA, 19 bp, Mus musculus
  siRNA target sequence for Wdr10 (NM_031177.1,411-429).
cacgcacaacgactctata

SEQ ID NO: 742825 - DNA, 19 bp, Mus musculus
  siRNA target sequence for Wdr10 (NM_031177.1,413-431).
cgcacaacgactctataca

SEQ ID NO: 742826 - DNA, 19 bp, Mus musculus
  siRNA target sequence for Wdr10 (NM_031177.1,415-433).
cacaacgactctatacagt

SEQ ID NO: 742827 - DNA, 19 bp, Mus musculus
  siRNA target sequence for Wdr10 (NM_031177.1,552-570).
ctgcagctggacaaacgat

SEQ ID NO: 742828 - DNA, 19 bp, Mus musculus
  siRNA target sequence for Wdr10 (NM_031177.1,596-614).
ccaatggcatcatcagtat

SEQ ID NO: 742829 - DNA, 19 bp, Mus musculus
  siRNA target sequence for Wdr10 (NM_031177.1,597-615).
caatggcatcatcagtata

SEQ ID NO: 742830 - DNA, 19 bp, Mus musculus
  siRNA target sequence for Wdr10 (NM_031177.1,698-716).
cttcaagagaggaacataa

SEQ ID NO: 742831 - DNA, 19 bp, Mus musculus
  siRNA target sequence for Wdr10 (NM_031177.1,818-836).
gcatcagctacttcactaa

SEQ ID NO: 742832 - DNA, 19 bp, Mus musculus
  siRNA target sequence for Wdr10 (NM_031177.1,1025-1043).
cagtccatgggctctacaa

SEQ ID NO: 742833 - DNA, 19 bp, Mus musculus
  siRNA target sequence for Wdr10 (NM_031177.1,1100-1118).
cagagcagaaagttaggat

SEQ ID NO: 742834 - DNA, 19 bp, Mus musculus
  siRNA target sequence for Wdr10 (NM_031177.1,1147-1165).
gccatctacaaaaatcgat

SEQ ID NO: 742835 - DNA, 19 bp, Mus musculus
  siRNA target sequence for Wdr10 (NM_031177.1,1149-1167).
catctacaaaaatcgatta

SEQ ID NO: 742836 - DNA, 19 bp, Mus musculus
  siRNA target sequence for Wdr10 (NM_031177.1,1152-1170).
ctacaaaaatcgattagct

SEQ ID NO: 742837 - DNA, 19 bp, Mus musculus
  siRNA target sequence for Wdr10 (NM_031177.1,1376-1394).
ctctcatccgctacatcaa

SEQ ID NO: 742838 - DNA, 19 bp, Mus musculus
  siRNA target sequence for Wdr10 (NM_031177.1,1464-1482).
ctttgtggacaatcttttt

SEQ ID NO: 742839 - DNA, 19 bp, Mus musculus
  siRNA target sequence for Wdr10 (NM_031177.1,1679-1697).
gaggaggctacctcaacat

SEQ ID NO: 742840 - DNA, 19 bp, Mus musculus
  siRNA target sequence for Wdr10 (NM_031177.1,1681-1699).
ggaggctacctcaacatca

SEQ ID NO: 742841 - DNA, 19 bp, Mus musculus
  siRNA target sequence for Wdr10 (NM_031177.1,1811-1829).
cacagtccgctccaatgta

SEQ ID NO: 742842 - DNA, 19 bp, Mus musculus
  siRNA target sequence for Wdr10 (NM_031177.1,1837-1855).
ctcgataggaagatgttca

SEQ ID NO: 742843 - DNA, 19 bp, Mus musculus
  siRNA target sequence for Wdr10 (NM_031177.1,1922-1940).
ctctagaaggactagagtt

SEQ ID NO: 742844 - DNA, 19 bp, Mus musculus
  siRNA target sequence for Wdr10 (NM_031177.1,1967-1985).
gagtccaggaccttcgata

SEQ ID NO: 742845 - DNA, 19 bp, Mus musculus
  siRNA target sequence for Wdr10 (NM_031177.1,1971-1989).
ccaggaccttcgataccta

SEQ ID NO: 742846 - DNA, 19 bp, Mus musculus
  siRNA target sequence for Wdr10 (NM_031177.1,2033-2051).
ccaacaatgacctgtttct

SEQ ID NO: 742847 - DNA, 19 bp, Mus musculus
  siRNA target sequence for Wdr10 (NM_031177.1,2046-2064).
gtttctggcagatgtgttt

SEQ ID NO: 742848 - DNA, 19 bp, Mus musculus
  siRNA target sequence for Wdr10 (NM_031177.1,2067-2085).
ctaccaggggaagtttcat

SEQ ID NO: 742849 - DNA, 19 bp, Mus musculus
  siRNA target sequence for Wdr10 (NM_031177.1,2086-2104).
gaagccgccaaactataca

SEQ ID NO: 742850 - DNA, 19 bp, Mus musculus
  siRNA target sequence for Wdr10 (NM_031177.1,2089-2107).
gccgccaaactatacaaga

SEQ ID NO: 742851 - DNA, 19 bp, Mus musculus
  siRNA target sequence for Wdr10 (NM_031177.1,2124-2142).
cctcgctctcgacatgtat

SEQ ID NO: 742852 - DNA, 19 bp, Mus musculus
  siRNA target sequence for Wdr10 (NM_031177.1,2125-2143).
ctcgctctcgacatgtata

SEQ ID NO: 742853 - DNA, 19 bp, Mus musculus
  siRNA target sequence for Wdr10 (NM_031177.1,2127-2145).
cgctctcgacatgtatact

SEQ ID NO: 742854 - DNA, 19 bp, Mus musculus
  siRNA target sequence for Wdr10 (NM_031177.1,2129-2147).
ctctcgacatgtatactga

SEQ ID NO: 742855 - DNA, 19 bp, Mus musculus
  siRNA target sequence for Wdr10 (NM_031177.1,2163-2181).
gtacgccaaggatttcctt

SEQ ID NO: 742856 - DNA, 19 bp, Mus musculus
  siRNA target sequence for Wdr10 (NM_031177.1,2228-2246).
ccgactgggccagaaacat

SEQ ID NO: 742857 - DNA, 19 bp, Mus musculus
  siRNA target sequence for Wdr10 (NM_031177.1,2234-2252).
gggccagaaacatcaatga

SEQ ID NO: 742858 - DNA, 19 bp, Mus musculus
  siRNA target sequence for Wdr10 (NM_031177.1,2327-2345).
gctgggtggacatgttgat

SEQ ID NO: 742859 - DNA, 19 bp, Mus musculus
  siRNA target sequence for Wdr10 (NM_031177.1,2328-2346).
ctgggtggacatgttgata

SEQ ID NO: 742860 - DNA, 19 bp, Mus musculus
  siRNA target sequence for Wdr10 (NM_031177.1,2330-2348).
gggtggacatgttgataga

SEQ ID NO: 742861 - DNA, 19 bp, Mus musculus
  siRNA target sequence for Wdr10 (NM_031177.1,2332-2350).
gtggacatgttgatagaca

SEQ ID NO: 742862 - DNA, 19 bp, Mus musculus
  siRNA target sequence for Wdr10 (NM_031177.1,2701-2719).
gacgctgcctattattact

SEQ ID NO: 742863 - DNA, 19 bp, Mus musculus
  siRNA target sequence for Wdr10 (NM_031177.1,2775-2793).
cgcgatgctggacaagttt

SEQ ID NO: 742864 - DNA, 19 bp, Mus musculus
  siRNA target sequence for Wdr10 (NM_031177.1,2777-2795).
cgatgctggacaagtttca

SEQ ID NO: 742865 - DNA, 19 bp, Mus musculus
  siRNA target sequence for Wdr10 (NM_031177.1,3343-3361).
gagacctcaagcaacaatt

SEQ ID NO: 742866 - DNA, 19 bp, Mus musculus
  siRNA target sequence for Wdr10 (NM_031177.1,3438-3456).
gcaaggtagctctgagttt

SEQ ID NO: 742867 - DNA, 19 bp, Mus musculus
  siRNA target sequence for Wdr10 (NM_031177.1,3468-3486).
ggtgaaccggtcagtacta

SEQ ID NO: 742868 - DNA, 19 bp, Mus musculus
  siRNA target sequence for Wdr10 (NM_031177.1,3489-3507).
ctccatgagccgaagagat

SEQ ID NO: 742869 - DNA, 19 bp, Mus musculus
  siRNA target sequence for Wdr10 (NM_031177.1,3492-3510).
catgagccgaagagatgtt

SEQ ID NO: 742870 - DNA, 19 bp, Mus musculus
  siRNA target sequence for Wdr10 (NM_031177.1,3533-3551).
cgctgcaatggcaatattt

SEQ ID NO: 742871 - DNA, 19 bp, Mus musculus
  siRNA target sequence for Wdr10 (NM_031177.1,3587-3605).
gcccctcctgctttcagat

SEQ ID NO: 742872 - DNA, 19 bp, Mus musculus
  siRNA target sequence for Tfap4 (NM_031182.1,231-249).
gaaggtgccctctttgcaa

SEQ ID NO: 742873 - DNA, 19 bp, Mus musculus
  siRNA target sequence for Tfap4 (NM_031182.1,377-395).
ggaggcgcatgcagagtat

SEQ ID NO: 742874 - DNA, 19 bp, Mus musculus
  siRNA target sequence for Tfap4 (NM_031182.1,380-398).
ggcgcatgcagagtatcaa

SEQ ID NO: 742875 - DNA, 19 bp, Mus musculus
  siRNA target sequence for Tfap4 (NM_031182.1,536-554).
cacagctcaagcgctttat

SEQ ID NO: 742876 - DNA, 19 bp, Mus musculus
  siRNA target sequence for Tfap4 (NM_031182.1,737-755).
ccctcgaggcccacatgta

SEQ ID NO: 742877 - DNA, 19 bp, Mus musculus
  siRNA target sequence for Tfap4 (NM_031182.1,747-765).
ccacatgtacccggaaaaa

SEQ ID NO: 742878 - DNA, 19 bp, Mus musculus
  siRNA target sequence for Tfap4 (NM_031182.1,992-1010).
ctacatcccggcaaaatct

SEQ ID NO: 742879 - DNA, 19 bp, Mus musculus
  siRNA target sequence for Tcfec (NM_031198.1,375-393).
gaaacccattcacaaatct

SEQ ID NO: 742880 - DNA, 19 bp, Mus musculus
  siRNA target sequence for Tcfec (NM_031198.1,472-490).
gggcatttcttcagctaat

SEQ ID NO: 742881 - DNA, 19 bp, Mus musculus
  siRNA target sequence for Tcfec (NM_031198.1,615-633).
gaagaaggtataatattaa

SEQ ID NO: 742882 - DNA, 19 bp, Mus musculus
  siRNA target sequence for Tcfec (NM_031198.1,618-636).
gaaggtataatattaatta

SEQ ID NO: 742883 - DNA, 19 bp, Mus musculus
  siRNA target sequence for Tcfec (NM_031198.1,649-667).
gcttggcactcttattcca

SEQ ID NO: 742884 - DNA, 19 bp, Mus musculus
  siRNA target sequence for Tcfec (NM_031198.1,650-668).
cttggcactcttattccaa

SEQ ID NO: 742885 - DNA, 19 bp, Mus musculus
  siRNA target sequence for Tcfec (NM_031198.1,716-734).
gcatcagtggactacatca

SEQ ID NO: 742886 - DNA, 19 bp, Mus musculus
  siRNA target sequence for Tcfec (NM_031198.1,717-735).
catcagtggactacatcaa

SEQ ID NO: 742887 - DNA, 19 bp, Mus musculus
  siRNA target sequence for Tcfec (NM_031198.1,823-841).
gattcaggaactagaaata

SEQ ID NO: 742888 - DNA, 19 bp, Mus musculus
  siRNA target sequence for Tcfec (NM_031198.1,976-994).
gacaagcccggagttctat

SEQ ID NO: 742889 - DNA, 19 bp, Mus musculus
  siRNA target sequence for Tcfec (NM_031198.1,978-996).
caagcccggagttctatga

SEQ ID NO: 742890 - DNA, 19 bp, Mus musculus
  siRNA target sequence for Tcfec (NM_031198.1,1028-1046).
cacttcacagatttatcct

SEQ ID NO: 742891 - DNA, 19 bp, Mus musculus
  siRNA target sequence for Tcfec (NM_031198.1,1044-1062).
cctttagtgccgctttgaa

SEQ ID NO: 742892 - DNA, 19 bp, Mus musculus
  siRNA target sequence for Tcfec (NM_031198.1,1045-1063).
ctttagtgccgctttgaaa

SEQ ID NO: 742893 - DNA, 19 bp, Mus musculus
  siRNA target sequence for Tcfec (NM_031198.1,1078-1096).
ggatggcatgctactaagt

SEQ ID NO: 742894 - DNA, 19 bp, Mus musculus
  siRNA target sequence for Tcfec (NM_031198.1,1084-1102).
catgctactaagtgataca

SEQ ID NO: 742895 - DNA, 19 bp, Mus musculus
  siRNA target sequence for 2010111E04Rik (NM_031248.2,96-114).
gcaccctgctgctgaataa

SEQ ID NO: 742896 - DNA, 19 bp, Mus musculus
  siRNA target sequence for 2010111E04Rik (NM_031248.2,97-115).
caccctgctgctgaataat

SEQ ID NO: 742897 - DNA, 19 bp, Mus musculus
  siRNA target sequence for 2010111E04Rik (NM_031248.2,170-188).
gcggccatcgccagtaaca

SEQ ID NO: 742898 - DNA, 19 bp, Mus musculus
  siRNA target sequence for 2010111E04Rik (NM_031248.2,211-229).
cgggaaccaagcgtttaat

SEQ ID NO: 742899 - DNA, 19 bp, Mus musculus
  siRNA target sequence for 2010111E04Rik (NM_031248.2,213-231).
ggaaccaagcgtttaatga

SEQ ID NO: 742900 - DNA, 19 bp, Mus musculus
  siRNA target sequence for 2010111E04Rik (NM_031248.2,269-287).
ggccgtgtagccattacga

SEQ ID NO: 742901 - DNA, 19 bp, Mus musculus
  siRNA target sequence for 2010111E04Rik (NM_031248.2,294-312).
ccaaccttctgctatgtat

SEQ ID NO: 742902 - DNA, 19 bp, Mus musculus
  siRNA target sequence for Il23a (NM_031252.1,118-136).
ggattgcagagcagtaata

SEQ ID NO: 742903 - DNA, 19 bp, Mus musculus
  siRNA target sequence for Il23a (NM_031252.1,119-137).
gattgcagagcagtaataa

SEQ ID NO: 742904 - DNA, 19 bp, Mus musculus
  siRNA target sequence for Il23a (NM_031252.1,123-141).
gcagagcagtaataatgct

SEQ ID NO: 742905 - DNA, 19 bp, Mus musculus
  siRNA target sequence for Il23a (NM_031252.1,257-275).
gcaccagcgggacatatga

SEQ ID NO: 742906 - DNA, 19 bp, Mus musculus
  siRNA target sequence for Il23a (NM_031252.1,261-279).
cagcgggacatatgaatct

SEQ ID NO: 742907 - DNA, 19 bp, Mus musculus
  siRNA target sequence for Il23a (NM_031252.1,264-282).
cgggacatatgaatctact

SEQ ID NO: 742908 - DNA, 19 bp, Mus musculus
  siRNA target sequence for Il23a (NM_031252.1,265-283).
gggacatatgaatctacta

SEQ ID NO: 742909 - DNA, 19 bp, Mus musculus
  siRNA target sequence for Il23a (NM_031252.1,322-340).
ccgtatccagtgtgaagat

SEQ ID NO: 742910 - DNA, 19 bp, Mus musculus
  siRNA target sequence for Il23a (NM_031252.1,395-413).
cgccaaggtctggcttttt

SEQ ID NO: 742911 - DNA, 19 bp, Mus musculus
  siRNA target sequence for Il23a (NM_031252.1,615-633).
gaagcctccaggccttttt

SEQ ID NO: 742912 - DNA, 19 bp, Mus musculus
  siRNA target sequence for Nrln1 (NM_031258.2,533-551).
cacatattgcgtgtttcaa

SEQ ID NO: 742913 - DNA, 19 bp, Mus musculus
  siRNA target sequence for Nrln1 (NM_031258.2,535-553).
catattgcgtgtttcaaga

SEQ ID NO: 742914 - DNA, 19 bp, Mus musculus
  siRNA target sequence for Nrln1 (NM_031258.2,543-561).
gtgtttcaagacaagaagt

SEQ ID NO: 742915 - DNA, 19 bp, Mus musculus
  siRNA target sequence for Nrln1 (NM_031258.2,597-615).
ccgtatggactggtttact

SEQ ID NO: 742916 - DNA, 19 bp, Mus musculus
  siRNA target sequence for Nrln1 (NM_031258.2,685-703).
gcctttcacccgtgcatat

SEQ ID NO: 742917 - DNA, 19 bp, Mus musculus
  siRNA target sequence for Nrln1 (NM_031258.2,686-704).
cctttcacccgtgcatatt

SEQ ID NO: 742918 - DNA, 19 bp, Mus musculus
  siRNA target sequence for Nrln1 (NM_031258.2,737-755).
cttaccaccagtgaacaat

SEQ ID NO: 742919 - DNA, 19 bp, Mus musculus
  siRNA target sequence for Nrln1 (NM_031258.2,742-760).
caccagtgaacaataaggt

SEQ ID NO: 742920 - DNA, 19 bp, Mus musculus
  siRNA target sequence for Nrln1 (NM_031258.2,766-784).
gcaagtcatgcgaatacaa

SEQ ID NO: 742921 - DNA, 19 bp, Mus musculus
  siRNA target sequence for Nrln1 (NM_031258.2,869-887).
ctgctcggaggggaatgta

SEQ ID NO: 742922 - DNA, 19 bp, Mus musculus
  siRNA target sequence for Nrln1 (NM_031258.2,875-893).
ggaggggaatgtatactgt

SEQ ID NO: 742923 - DNA, 19 bp, Mus musculus
  siRNA target sequence for Nrln1 (NM_031258.2,965-983).
cagaggggatgcagaatta

SEQ ID NO: 742924 - DNA, 19 bp, Mus musculus
  siRNA target sequence for Nrln1 (NM_031258.2,969-987).
ggggatgcagaattatcgt

SEQ ID NO: 742925 - DNA, 19 bp, Mus musculus
  siRNA target sequence for Nrln1 (NM_031258.2,993-1011).
catgcggatggtgatatct

SEQ ID NO: 742926 - DNA, 19 bp, Mus musculus
  siRNA target sequence for Nrln1 (NM_031258.2,1064-1082).
cgatcctccaccaaacaga

SEQ ID NO: 742927 - DNA, 19 bp, Mus musculus
  siRNA target sequence for Nrln1 (NM_031258.2,1120-1138).
gtcaccggggagctgttat

SEQ ID NO: 742928 - DNA, 19 bp, Mus musculus
  siRNA target sequence for Nrln1 (NM_031258.2,1124-1142).
ccggggagctgttatagat

SEQ ID NO: 742929 - DNA, 19 bp, Mus musculus
  siRNA target sequence for Nrln1 (NM_031258.2,1125-1143).
cggggagctgttatagatt

SEQ ID NO: 742930 - DNA, 19 bp, Mus musculus
  siRNA target sequence for Nrln1 (NM_031258.2,1159-1177).
ggaccatcgtgcagattgt

SEQ ID NO: 742931 - DNA, 19 bp, Mus musculus
  siRNA target sequence for Nrln1 (NM_031258.2,1253-1271).
cccaaatctacgagcattt

SEQ ID NO: 742932 - DNA, 19 bp, Mus musculus
  siRNA target sequence for Nrln1 (NM_031258.2,1285-1303).
gtgtactatgcacttgtaa

SEQ ID NO: 742933 - DNA, 19 bp, Mus musculus
  siRNA target sequence for Nrln1 (NM_031258.2,1358-1376).
gtatcctcaaaaaatagat

SEQ ID NO: 742934 - DNA, 19 bp, Mus musculus
  siRNA target sequence for Nrln1 (NM_031258.2,1388-1406).
caaggtgtgcccaggtaaa

SEQ ID NO: 742935 - DNA, 19 bp, Mus musculus
  siRNA target sequence for Tex15 (NM_031374.1,48-66).
gaataactgtacaattgct

SEQ ID NO: 742936 - DNA, 19 bp, Mus musculus
  siRNA target sequence for Tex15 (NM_031374.1,149-167).
gtccatgtaaagcactaaa

SEQ ID NO: 742937 - DNA, 19 bp, Mus musculus
  siRNA target sequence for Tex15 (NM_031374.1,181-199).
cctttcagctcagatactt

SEQ ID NO: 742938 - DNA, 19 bp, Mus musculus
  siRNA target sequence for Tex15 (NM_031374.1,186-204).
cagctcagatacttctagt

SEQ ID NO: 742939 - DNA, 19 bp, Mus musculus
  siRNA target sequence for Tex15 (NM_031374.1,236-254).
ctgtgcttgaagcatacaa

SEQ ID NO: 742940 - DNA, 19 bp, Mus musculus
  siRNA target sequence for Tex15 (NM_031374.1,265-283).
gaaaattcatcaaatctta

SEQ ID NO: 742941 - DNA, 19 bp, Mus musculus
  siRNA target sequence for Tex15 (NM_031374.1,284-302).
gagatgcttctcaagtata

SEQ ID NO: 742942 - DNA, 19 bp, Mus musculus
  siRNA target sequence for Tex15 (NM_031374.1,286-304).
gatgcttctcaagtataca

SEQ ID NO: 742943 - DNA, 19 bp, Mus musculus
  siRNA target sequence for Tex15 (NM_031374.1,295-313).
caagtatacacacacaatt

SEQ ID NO: 742944 - DNA, 19 bp, Mus musculus
  siRNA target sequence for Tex15 (NM_031374.1,327-345).
catacccactggtaacaca

SEQ ID NO: 742945 - DNA, 19 bp, Mus musculus
  siRNA target sequence for Tex15 (NM_031374.1,366-384).
gttcagtgtgacatatctt

SEQ ID NO: 742946 - DNA, 19 bp, Mus musculus
  siRNA target sequence for Tex15 (NM_031374.1,429-447).
caatactggctcaagtaca

SEQ ID NO: 742947 - DNA, 19 bp, Mus musculus
  siRNA target sequence for Tex15 (NM_031374.1,465-483).
cattaaggacccaagactt

SEQ ID NO: 742948 - DNA, 19 bp, Mus musculus
  siRNA target sequence for Tex15 (NM_031374.1,569-587).
gtgattcacaaataaagct

SEQ ID NO: 742949 - DNA, 19 bp, Mus musculus
  siRNA target sequence for Tex15 (NM_031374.1,620-638).
cggaagttcctgctgataa

SEQ ID NO: 742950 - DNA, 19 bp, Mus musculus
  siRNA target sequence for Tex15 (NM_031374.1,625-643).
gttcctgctgataatacca

SEQ ID NO: 742951 - DNA, 19 bp, Mus musculus
  siRNA target sequence for Tex15 (NM_031374.1,631-649).
gctgataataccattacta

SEQ ID NO: 742952 - DNA, 19 bp, Mus musculus
  siRNA target sequence for Tex15 (NM_031374.1,641-659).
ccattactagttgtttgaa

SEQ ID NO: 742953 - DNA, 19 bp, Mus musculus
  siRNA target sequence for Tex15 (NM_031374.1,642-660).
cattactagttgtttgaat

SEQ ID NO: 742954 - DNA, 19 bp, Mus musculus
  siRNA target sequence for Tex15 (NM_031374.1,692-710).
cacactatcaggctcataa

SEQ ID NO: 742955 - DNA, 19 bp, Mus musculus
  siRNA target sequence for Tex15 (NM_031374.1,719-737).
caaagggccatgactgtat

SEQ ID NO: 742956 - DNA, 19 bp, Mus musculus
  siRNA target sequence for Tex15 (NM_031374.1,723-741).
gggccatgactgtatagca

SEQ ID NO: 742957 - DNA, 19 bp, Mus musculus
  siRNA target sequence for Tex15 (NM_031374.1,724-742).
ggccatgactgtatagcat

SEQ ID NO: 742958 - DNA, 19 bp, Mus musculus
  siRNA target sequence for Tex15 (NM_031374.1,744-762).
cagtagcattgctgttaca

SEQ ID NO: 742959 - DNA, 19 bp, Mus musculus
  siRNA target sequence for Tex15 (NM_031374.1,746-764).
gtagcattgctgttacaga

SEQ ID NO: 742960 - DNA, 19 bp, Mus musculus
  siRNA target sequence for Tex15 (NM_031374.1,917-935).
ggaactccgatgaatcaga

SEQ ID NO: 742961 - DNA, 19 bp, Mus musculus
  siRNA target sequence for Tex15 (NM_031374.1,918-936).
gaactccgatgaatcagaa

SEQ ID NO: 742962 - DNA, 19 bp, Mus musculus
  siRNA target sequence for Tex15 (NM_031374.1,928-946).
gaatcagaaaatacttgta

SEQ ID NO: 742963 - DNA, 19 bp, Mus musculus
  siRNA target sequence for Tex15 (NM_031374.1,982-1000).
ccatcttctgatataaaca

SEQ ID NO: 742964 - DNA, 19 bp, Mus musculus
  siRNA target sequence for Tex15 (NM_031374.1,1012-1030).
gttggtcaccagatgtcta

SEQ ID NO: 742965 - DNA, 19 bp, Mus musculus
  siRNA target sequence for Tex15 (NM_031374.1,1054-1072).
ggaaatctatgtgaataca

SEQ ID NO: 742966 - DNA, 19 bp, Mus musculus
  siRNA target sequence for Tex15 (NM_031374.1,1075-1093).
caagatacgggaatgatga

SEQ ID NO: 742967 - DNA, 19 bp, Mus musculus
  siRNA target sequence for Tex15 (NM_031374.1,1118-1136).
gcactaaagatggagtaaa

SEQ ID NO: 742968 - DNA, 19 bp, Mus musculus
  siRNA target sequence for Tex15 (NM_031374.1,1121-1139).
ctaaagatggagtaaacca

SEQ ID NO: 742969 - DNA, 19 bp, Mus musculus
  siRNA target sequence for Tex15 (NM_031374.1,1142-1160).
cttggtgcaaagaaactgt

SEQ ID NO: 742970 - DNA, 19 bp, Mus musculus
  siRNA target sequence for Tex15 (NM_031374.1,1175-1193).
ctgttagtagcccaattga

SEQ ID NO: 742971 - DNA, 19 bp, Mus musculus
  siRNA target sequence for Tex15 (NM_031374.1,1177-1195).
gttagtagcccaattgata

SEQ ID NO: 742972 - DNA, 19 bp, Mus musculus
  siRNA target sequence for Tex15 (NM_031374.1,1184-1202).
gcccaattgataattccaa

SEQ ID NO: 742973 - DNA, 19 bp, Mus musculus
  siRNA target sequence for Tex15 (NM_031374.1,1185-1203).
cccaattgataattccaat

SEQ ID NO: 742974 - DNA, 19 bp, Mus musculus
  siRNA target sequence for Tex15 (NM_031374.1,1186-1204).
ccaattgataattccaata

SEQ ID NO: 742975 - DNA, 19 bp, Mus musculus
  siRNA target sequence for Tex15 (NM_031374.1,1192-1210).
gataattccaatacattgt

SEQ ID NO: 742976 - DNA, 19 bp, Mus musculus
  siRNA target sequence for Tex15 (NM_031374.1,1205-1223).
cattgtaccaggaacacaa

SEQ ID NO: 742977 - DNA, 19 bp, Mus musculus
  siRNA target sequence for Tex15 (NM_031374.1,1228-1246).
ggaggaaatcttaattctt

SEQ ID NO: 742978 - DNA, 19 bp, Mus musculus
  siRNA target sequence for Tex15 (NM_031374.1,1244-1262).
ctttaagtggtaattgtga

SEQ ID NO: 742979 - DNA, 19 bp, Mus musculus
  siRNA target sequence for Tex15 (NM_031374.1,1269-1287).
cggagttactcataagtta

SEQ ID NO: 742980 - DNA, 19 bp, Mus musculus
  siRNA target sequence for Tex15 (NM_031374.1,1293-1311).
gcccaagtttcccatatct

SEQ ID NO: 742981 - DNA, 19 bp, Mus musculus
  siRNA target sequence for Tex15 (NM_031374.1,1313-1331).
ccacaggggataaaaatga

SEQ ID NO: 742982 - DNA, 19 bp, Mus musculus
  siRNA target sequence for Tex15 (NM_031374.1,1361-1379).
gttctcttactccaactat

SEQ ID NO: 742983 - DNA, 19 bp, Mus musculus
  siRNA target sequence for Tex15 (NM_031374.1,1366-1384).
cttactccaactatagagt

SEQ ID NO: 742984 - DNA, 19 bp, Mus musculus
  siRNA target sequence for Tex15 (NM_031374.1,1416-1434).
ggagcatgaagataataca

SEQ ID NO: 742985 - DNA, 19 bp, Mus musculus
  siRNA target sequence for Tex15 (NM_031374.1,1417-1435).
gagcatgaagataatacaa

SEQ ID NO: 742986 - DNA, 19 bp, Mus musculus
  siRNA target sequence for Tex15 (NM_031374.1,1443-1461).
catgactcaagggctaata

SEQ ID NO: 742987 - DNA, 19 bp, Mus musculus
  siRNA target sequence for Tex15 (NM_031374.1,1446-1464).
gactcaagggctaatagaa

SEQ ID NO: 742988 - DNA, 19 bp, Mus musculus
  siRNA target sequence for Tex15 (NM_031374.1,1448-1466).
ctcaagggctaatagaatt

SEQ ID NO: 742989 - DNA, 19 bp, Mus musculus
  siRNA target sequence for Tex15 (NM_031374.1,1450-1468).
caagggctaatagaattaa

SEQ ID NO: 742990 - DNA, 19 bp, Mus musculus
  siRNA target sequence for Tex15 (NM_031374.1,1453-1471).
gggctaatagaattaaaaa

SEQ ID NO: 742991 - DNA, 19 bp, Mus musculus
  siRNA target sequence for Tex15 (NM_031374.1,1472-1490).
cagtacaaaataatcagaa

SEQ ID NO: 742992 - DNA, 19 bp, Mus musculus
  siRNA target sequence for Tex15 (NM_031374.1,1491-1509).
ctttggtaacattttgtct

SEQ ID NO: 742993 - DNA, 19 bp, Mus musculus
  siRNA target sequence for Tex15 (NM_031374.1,1545-1563).
cagtgaaaagctcattgat

SEQ ID NO: 742994 - DNA, 19 bp, Mus musculus
  siRNA target sequence for Tex15 (NM_031374.1,1613-1631).
gcaacataattggagaata

SEQ ID NO: 742995 - DNA, 19 bp, Mus musculus
  siRNA target sequence for Tex15 (NM_031374.1,1637-1655).
gtgtccggagggaaaatga

SEQ ID NO: 742996 - DNA, 19 bp, Mus musculus
  siRNA target sequence for Tex15 (NM_031374.1,1660-1678).
ggggaagcatcaccatata

SEQ ID NO: 742997 - DNA, 19 bp, Mus musculus
  siRNA target sequence for Tex15 (NM_031374.1,1661-1679).
gggaagcatcaccatataa

SEQ ID NO: 742998 - DNA, 19 bp, Mus musculus
  siRNA target sequence for Tex15 (NM_031374.1,1673-1691).
catataactgtcacaaaga

SEQ ID NO: 742999 - DNA, 19 bp, Mus musculus
  siRNA target sequence for Tex15 (NM_031374.1,1722-1740).
ggatcacagcctatcttat

SEQ ID NO: 743000 - DNA, 19 bp, Mus musculus
  siRNA target sequence for Tex15 (NM_031374.1,1813-1831).
gaggctaaagaacacaata

SEQ ID NO: 743001 - DNA, 19 bp, Mus musculus
  siRNA target sequence for Tex15 (NM_031374.1,1850-1868).
gtgagaaacaagattgtct

SEQ ID NO: 743002 - DNA, 19 bp, Mus musculus
  siRNA target sequence for Tex15 (NM_031374.1,1897-1915).
gaaatgagggaaattaaga

SEQ ID NO: 743003 - DNA, 19 bp, Mus musculus
  siRNA target sequence for Tex15 (NM_031374.1,1943-1961).
ctgaagaatgtttcacatt

SEQ ID NO: 743004 - DNA, 19 bp, Mus musculus
  siRNA target sequence for Tex15 (NM_031374.1,1952-1970).
gtttcacatttaactcatt

SEQ ID NO: 743005 - DNA, 19 bp, Mus musculus
  siRNA target sequence for Tex15 (NM_031374.1,1974-1992).
gggaaaaaacggtaaacca

SEQ ID NO: 743006 - DNA, 19 bp, Mus musculus
  siRNA target sequence for Tex15 (NM_031374.1,2034-2052).
gcatgcaccaaatgatcaa

SEQ ID NO: 743007 - DNA, 19 bp, Mus musculus
  siRNA target sequence for Tex15 (NM_031374.1,2106-2124).
gtgtgtagcctcaaatgct

SEQ ID NO: 743008 - DNA, 19 bp, Mus musculus
  siRNA target sequence for Tex15 (NM_031374.1,2165-2183).
caagtcttggggatcatca

SEQ ID NO: 743009 - DNA, 19 bp, Mus musculus
  siRNA target sequence for Tex15 (NM_031374.1,2179-2197).
catcaaaaagatgagttaa

SEQ ID NO: 743010 - DNA, 19 bp, Mus musculus
  siRNA target sequence for Tex15 (NM_031374.1,2210-2228).
cctctgagagttcagattt

SEQ ID NO: 743011 - DNA, 19 bp, Mus musculus
  siRNA target sequence for Tex15 (NM_031374.1,2342-2360).
gtgaaattgaggtagatct

SEQ ID NO: 743012 - DNA, 19 bp, Mus musculus
  siRNA target sequence for Tex15 (NM_031374.1,2406-2424).
gggaaatgacctttgtgaa

SEQ ID NO: 743013 - DNA, 19 bp, Mus musculus
  siRNA target sequence for Tex15 (NM_031374.1,2500-2518).
gaatcctcaagttttgcaa

SEQ ID NO: 743014 - DNA, 19 bp, Mus musculus
  siRNA target sequence for Tex15 (NM_031374.1,2527-2545).
ggtactgatcagcatagtt

SEQ ID NO: 743015 - DNA, 19 bp, Mus musculus
  siRNA target sequence for Tex15 (NM_031374.1,2538-2556).
gcatagttctacagaatgt

SEQ ID NO: 743016 - DNA, 19 bp, Mus musculus
  siRNA target sequence for Tex15 (NM_031374.1,2611-2629).
cttccagatctacaagtta

SEQ ID NO: 743017 - DNA, 19 bp, Mus musculus
  siRNA target sequence for Tex15 (NM_031374.1,2700-2718).
caaacaggtaactgaatct

SEQ ID NO: 743018 - DNA, 19 bp, Mus musculus
  siRNA target sequence for Tex15 (NM_031374.1,2818-2836).
ggtaattcagtgcaagaat

SEQ ID NO: 743019 - DNA, 19 bp, Mus musculus
  siRNA target sequence for Tex15 (NM_031374.1,2870-2888).
cttccaactcaagtcataa

SEQ ID NO: 743020 - DNA, 19 bp, Mus musculus
  siRNA target sequence for Tex15 (NM_031374.1,2877-2895).
ctcaagtcataatacacat

SEQ ID NO: 743021 - DNA, 19 bp, Mus musculus
  siRNA target sequence for Tex15 (NM_031374.1,2898-2916).
ggatcaaggatctggaaaa

SEQ ID NO: 743022 - DNA, 19 bp, Mus musculus
  siRNA target sequence for Tex15 (NM_031374.1,2917-2935).
ccaaacaatgactctttgt

SEQ ID NO: 743023 - DNA, 19 bp, Mus musculus
  siRNA target sequence for Tex15 (NM_031374.1,2944-2962).
ccatctaatgtcacagtaa

SEQ ID NO: 743024 - DNA, 19 bp, Mus musculus
  siRNA target sequence for Tex15 (NM_031374.1,2953-2971).
gtcacagtaatgaatgata

SEQ ID NO: 743025 - DNA, 19 bp, Mus musculus
  siRNA target sequence for Tex15 (NM_031374.1,2998-3016).
cctgtctttaatgatacta

SEQ ID NO: 743026 - DNA, 19 bp, Mus musculus
  siRNA target sequence for Tex15 (NM_031374.1,3033-3051).
gcaatcaagaagtagcaaa

SEQ ID NO: 743027 - DNA, 19 bp, Mus musculus
  siRNA target sequence for Tex15 (NM_031374.1,3071-3089).
cttccaggggtcagaacat

SEQ ID NO: 743028 - DNA, 19 bp, Mus musculus
  siRNA target sequence for Tex15 (NM_031374.1,3087-3105).
catagccaataaagactta

SEQ ID NO: 743029 - DNA, 19 bp, Mus musculus
  siRNA target sequence for Tex15 (NM_031374.1,3100-3118).
gacttaagggagcatgaaa

SEQ ID NO: 743030 - DNA, 19 bp, Mus musculus
  siRNA target sequence for Tex15 (NM_031374.1,3160-3178).
gaccgtttctcttccttat

SEQ ID NO: 743031 - DNA, 19 bp, Mus musculus
  siRNA target sequence for Tex15 (NM_031374.1,3174-3192).
cttatcccaaggacgaatt

SEQ ID NO: 743032 - DNA, 19 bp, Mus musculus
  siRNA target sequence for Tex15 (NM_031374.1,3180-3198).
ccaaggacgaattaaaaca

SEQ ID NO: 743033 - DNA, 19 bp, Mus musculus
  siRNA target sequence for Tex15 (NM_031374.1,3184-3202).
ggacgaattaaaacatttt

SEQ ID NO: 743034 - DNA, 19 bp, Mus musculus
  siRNA target sequence for Tex15 (NM_031374.1,3219-3237).
cattaggaatgtactgaat

SEQ ID NO: 743035 - DNA, 19 bp, Mus musculus
  siRNA target sequence for Tex15 (NM_031374.1,3322-3340).
catagaagagttcatacat

SEQ ID NO: 743036 - DNA, 19 bp, Mus musculus
  siRNA target sequence for Tex15 (NM_031374.1,3326-3344).
gaagagttcatacatcttt

SEQ ID NO: 743037 - DNA, 19 bp, Mus musculus
  siRNA target sequence for Tex15 (NM_031374.1,3378-3396).
gggcccattaccaaaagca

SEQ ID NO: 743038 - DNA, 19 bp, Mus musculus
  siRNA target sequence for Tex15 (NM_031374.1,3379-3397).
ggcccattaccaaaagcat

SEQ ID NO: 743039 - DNA, 19 bp, Mus musculus
  siRNA target sequence for Tex15 (NM_031374.1,3380-3398).
gcccattaccaaaagcata

SEQ ID NO: 743040 - DNA, 19 bp, Mus musculus
  siRNA target sequence for Tex15 (NM_031374.1,3395-3413).
catatgcagtaatacataa

SEQ ID NO: 743041 - DNA, 19 bp, Mus musculus
  siRNA target sequence for Tex15 (NM_031374.1,3436-3454).
catcaaggtgatagtttga

SEQ ID NO: 743042 - DNA, 19 bp, Mus musculus
  siRNA target sequence for Tex15 (NM_031374.1,3439-3457).
caaggtgatagtttgatgt

SEQ ID NO: 743043 - DNA, 19 bp, Mus musculus
  siRNA target sequence for Tex15 (NM_031374.1,3548-3566).
cattgaccccggtatcaaa

SEQ ID NO: 743044 - DNA, 19 bp, Mus musculus
  siRNA target sequence for Tex15 (NM_031374.1,3557-3575).
cggtatcaaagcacagatt

SEQ ID NO: 743045 - DNA, 19 bp, Mus musculus
  siRNA target sequence for Tex15 (NM_031374.1,3558-3576).
ggtatcaaagcacagatta

SEQ ID NO: 743046 - DNA, 19 bp, Mus musculus
  siRNA target sequence for Tex15 (NM_031374.1,3622-3640).
gtcatgtctgggcatgttt

SEQ ID NO: 743047 - DNA, 19 bp, Mus musculus
  siRNA target sequence for Tex15 (NM_031374.1,3660-3678).
ccatgtgagagaattttgt

SEQ ID NO: 743048 - DNA, 19 bp, Mus musculus
  siRNA target sequence for Tex15 (NM_031374.1,3666-3684).
gagagaattttgtgatgaa

SEQ ID NO: 743049 - DNA, 19 bp, Mus musculus
  siRNA target sequence for Tex15 (NM_031374.1,3701-3719).
cacagttacctctagctta

SEQ ID NO: 743050 - DNA, 19 bp, Mus musculus
  siRNA target sequence for Tex15 (NM_031374.1,3716-3734).
cttatacatctcagagtat

SEQ ID NO: 743051 - DNA, 19 bp, Mus musculus
  siRNA target sequence for Tex15 (NM_031374.1,3729-3747).
gagtataagtcagttagaa

SEQ ID NO: 743052 - DNA, 19 bp, Mus musculus
  siRNA target sequence for Tex15 (NM_031374.1,3731-3749).
gtataagtcagttagaata

SEQ ID NO: 743053 - DNA, 19 bp, Mus musculus
  siRNA target sequence for Tex15 (NM_031374.1,3737-3755).
gtcagttagaatacactaa

SEQ ID NO: 743054 - DNA, 19 bp, Mus musculus
  siRNA target sequence for Tex15 (NM_031374.1,3823-3841).
gacccaaaagaaacactaa

SEQ ID NO: 743055 - DNA, 19 bp, Mus musculus
  siRNA target sequence for Tex15 (NM_031374.1,3881-3899).
gtgactctgcaaaacttaa

SEQ ID NO: 743056 - DNA, 19 bp, Mus musculus
  siRNA target sequence for Tex15 (NM_031374.1,3903-3921).
ccatacaacacatagtatt

SEQ ID NO: 743057 - DNA, 19 bp, Mus musculus
  siRNA target sequence for Tex15 (NM_031374.1,3904-3922).
catacaacacatagtatta

SEQ ID NO: 743058 - DNA, 19 bp, Mus musculus
  siRNA target sequence for Tex15 (NM_031374.1,3917-3935).
gtattagggatatagcaaa

SEQ ID NO: 743059 - DNA, 19 bp, Mus musculus
  siRNA target sequence for Tex15 (NM_031374.1,3970-3988).
gaaagcaatccagtgtatt

SEQ ID NO: 743060 - DNA, 19 bp, Mus musculus
  siRNA target sequence for Tex15 (NM_031374.1,3975-3993).
caatccagtgtatttaagt

SEQ ID NO: 743061 - DNA, 19 bp, Mus musculus
  siRNA target sequence for Tex15 (NM_031374.1,4156-4174).
ggagaagcaatttttccta

SEQ ID NO: 743062 - DNA, 19 bp, Mus musculus
  siRNA target sequence for Tex15 (NM_031374.1,4197-4215).
ggagaccacatcaagcatt

SEQ ID NO: 743063 - DNA, 19 bp, Mus musculus
  siRNA target sequence for Tex15 (NM_031374.1,4211-4229).
gcattcctacggaaaatat

SEQ ID NO: 743064 - DNA, 19 bp, Mus musculus
  siRNA target sequence for Tex15 (NM_031374.1,4212-4230).
cattcctacggaaaatata

SEQ ID NO: 743065 - DNA, 19 bp, Mus musculus
  siRNA target sequence for Tex15 (NM_031374.1,4216-4234).
cctacggaaaatatagcaa

SEQ ID NO: 743066 - DNA, 19 bp, Mus musculus
  siRNA target sequence for Tex15 (NM_031374.1,4222-4240).
gaaaatatagcaagcaaaa

SEQ ID NO: 743067 - DNA, 19 bp, Mus musculus
  siRNA target sequence for Tex15 (NM_031374.1,4253-4271).
ctccggtctcatcaattct

SEQ ID NO: 743068 - DNA, 19 bp, Mus musculus
  siRNA target sequence for Tex15 (NM_031374.1,4313-4331).
gactcttcgatgtaaatga

SEQ ID NO: 743069 - DNA, 19 bp, Mus musculus
  siRNA target sequence for Tex15 (NM_031374.1,4315-4333).
ctcttcgatgtaaatgaga

SEQ ID NO: 743070 - DNA, 19 bp, Mus musculus
  siRNA target sequence for Tex15 (NM_031374.1,4349-4367).
ctatgcattctaaattaga

SEQ ID NO: 743071 - DNA, 19 bp, Mus musculus
  siRNA target sequence for Tex15 (NM_031374.1,4353-4371).
gcattctaaattagatcta

SEQ ID NO: 743072 - DNA, 19 bp, Mus musculus
  siRNA target sequence for Tex15 (NM_031374.1,4413-4431).
gaagaacctatcttgcaat

SEQ ID NO: 743073 - DNA, 19 bp, Mus musculus
  siRNA target sequence for Tex15 (NM_031374.1,4416-4434).
gaacctatcttgcaatgat

SEQ ID NO: 743074 - DNA, 19 bp, Mus musculus
  siRNA target sequence for Tex15 (NM_031374.1,4419-4437).
cctatcttgcaatgatagt

SEQ ID NO: 743075 - DNA, 19 bp, Mus musculus
  siRNA target sequence for Tex15 (NM_031374.1,4420-4438).
ctatcttgcaatgatagtt

SEQ ID NO: 743076 - DNA, 19 bp, Mus musculus
  siRNA target sequence for Tex15 (NM_031374.1,4424-4442).
cttgcaatgatagttctat

SEQ ID NO: 743077 - DNA, 19 bp, Mus musculus
  siRNA target sequence for Tex15 (NM_031374.1,4432-4450).
gatagttctatgctattaa

SEQ ID NO: 743078 - DNA, 19 bp, Mus musculus
  siRNA target sequence for Tex15 (NM_031374.1,4436-4454).
gttctatgctattaaagga

SEQ ID NO: 743079 - DNA, 19 bp, Mus musculus
  siRNA target sequence for Tex15 (NM_031374.1,4443-4461).
gctattaaaggagaatata

SEQ ID NO: 743080 - DNA, 19 bp, Mus musculus
  siRNA target sequence for Tex15 (NM_031374.1,4464-4482).
gggtccttcaaaaagatat

SEQ ID NO: 743081 - DNA, 19 bp, Mus musculus
  siRNA target sequence for Tex15 (NM_031374.1,4466-4484).
gtccttcaaaaagatatat

SEQ ID NO: 743082 - DNA, 19 bp, Mus musculus
  siRNA target sequence for Tex15 (NM_031374.1,4478-4496).
gatatatggcaaaatacat

SEQ ID NO: 743083 - DNA, 19 bp, Mus musculus
  siRNA target sequence for Tex15 (NM_031374.1,4524-4542).
gcaagcagtttacaaaaaa

SEQ ID NO: 743084 - DNA, 19 bp, Mus musculus
  siRNA target sequence for Tex15 (NM_031374.1,4559-4577).
cacctattagttttaagta

SEQ ID NO: 743085 - DNA, 19 bp, Mus musculus
  siRNA target sequence for Tex15 (NM_031374.1,4561-4579).
cctattagttttaagtaca

SEQ ID NO: 743086 - DNA, 19 bp, Mus musculus
  siRNA target sequence for Tex15 (NM_031374.1,4562-4580).
ctattagttttaagtacaa

SEQ ID NO: 743087 - DNA, 19 bp, Mus musculus
  siRNA target sequence for Tex15 (NM_031374.1,4593-4611).
gatcctaaaggaaaaatca

SEQ ID NO: 743088 - DNA, 19 bp, Mus musculus
  siRNA target sequence for Tex15 (NM_031374.1,4649-4667).
ctgattctcacctaagcat

SEQ ID NO: 743089 - DNA, 19 bp, Mus musculus
  siRNA target sequence for Tex15 (NM_031374.1,4693-4711).
gctttgaaagacattccta

SEQ ID NO: 743090 - DNA, 19 bp, Mus musculus
  siRNA target sequence for Tex15 (NM_031374.1,4708-4726).
cctaatcagcttaaagaaa

SEQ ID NO: 743091 - DNA, 19 bp, Mus musculus
  siRNA target sequence for Tex15 (NM_031374.1,4736-4754).
cagggcaaattaaagttaa

SEQ ID NO: 743092 - DNA, 19 bp, Mus musculus
  siRNA target sequence for Tex15 (NM_031374.1,4739-4757).
ggcaaattaaagttaataa

SEQ ID NO: 743093 - DNA, 19 bp, Mus musculus
  siRNA target sequence for Tex15 (NM_031374.1,4790-4808).
ccattgtagaaactaatca

SEQ ID NO: 743094 - DNA, 19 bp, Mus musculus
  siRNA target sequence for Tex15 (NM_031374.1,4802-4820).
ctaatcataggcctgtttt

SEQ ID NO: 743095 - DNA, 19 bp, Mus musculus
  siRNA target sequence for Tex15 (NM_031374.1,4830-4848).
ccctaaagttgctactctt

SEQ ID NO: 743096 - DNA, 19 bp, Mus musculus
  siRNA target sequence for Tex15 (NM_031374.1,4840-4858).
gctactcttcagaaggaat

SEQ ID NO: 743097 - DNA, 19 bp, Mus musculus
  siRNA target sequence for Tex15 (NM_031374.1,4841-4859).
ctactcttcagaaggaatt

SEQ ID NO: 743098 - DNA, 19 bp, Mus musculus
  siRNA target sequence for Tex15 (NM_031374.1,4864-4882).
gaacatcgctcacctaatt

SEQ ID NO: 743099 - DNA, 19 bp, Mus musculus
  siRNA target sequence for Tex15 (NM_031374.1,4867-4885).
catcgctcacctaattaca

SEQ ID NO: 743100 - DNA, 19 bp, Mus musculus
  siRNA target sequence for Tex15 (NM_031374.1,4870-4888).
cgctcacctaattacacat

SEQ ID NO: 743101 - DNA, 19 bp, Mus musculus
  siRNA target sequence for Tex15 (NM_031374.1,4962-4980).
gactaagctttgtcaaaat

SEQ ID NO: 743102 - DNA, 19 bp, Mus musculus
  siRNA target sequence for Tex15 (NM_031374.1,4988-5006).
ctttatttgttcaagcttt

SEQ ID NO: 743103 - DNA, 19 bp, Mus musculus
  siRNA target sequence for Tex15 (NM_031374.1,5024-5042).
gttcaattgaccaaatcct

SEQ ID NO: 743104 - DNA, 19 bp, Mus musculus
  siRNA target sequence for Tex15 (NM_031374.1,5056-5074).
ctattggtagaacaaaact

SEQ ID NO: 743105 - DNA, 19 bp, Mus musculus
  siRNA target sequence for Tex15 (NM_031374.1,5073-5091).
cttgtggaataattgtaga

SEQ ID NO: 743106 - DNA, 19 bp, Mus musculus
  siRNA target sequence for Tex15 (NM_031374.1,5076-5094).
gtggaataattgtagactt

SEQ ID NO: 743107 - DNA, 19 bp, Mus musculus
  siRNA target sequence for Tex15 (NM_031374.1,5104-5122).
ccatgtgctgttgatactt

SEQ ID NO: 743108 - DNA, 19 bp, Mus musculus
  siRNA target sequence for Tex15 (NM_031374.1,5249-5267).
gcaggccacgtggatatca

SEQ ID NO: 743109 - DNA, 19 bp, Mus musculus
  siRNA target sequence for Tex15 (NM_031374.1,5250-5268).
caggccacgtggatatcaa

SEQ ID NO: 743110 - DNA, 19 bp, Mus musculus
  siRNA target sequence for Tex15 (NM_031374.1,5252-5270).
ggccacgtggatatcaact

SEQ ID NO: 743111 - DNA, 19 bp, Mus musculus
  siRNA target sequence for Tex15 (NM_031374.1,5277-5295).
caatttctaccctggtttt

SEQ ID NO: 743112 - DNA, 19 bp, Mus musculus
  siRNA target sequence for Tex15 (NM_031374.1,5291-5309).
gttttcaaggacgactaaa

SEQ ID NO: 743113 - DNA, 19 bp, Mus musculus
  siRNA target sequence for Tex15 (NM_031374.1,5302-5320).
cgactaaaatacaatgcat

SEQ ID NO: 743114 - DNA, 19 bp, Mus musculus
  siRNA target sequence for Tex15 (NM_031374.1,5326-5344).
gagttacagaattatcata

SEQ ID NO: 743115 - DNA, 19 bp, Mus musculus
  siRNA target sequence for Tex15 (NM_031374.1,5390-5408).
catattacgcattattaaa

SEQ ID NO: 743116 - DNA, 19 bp, Mus musculus
  siRNA target sequence for Tex15 (NM_031374.1,5437-5455).
gccataatgaagcactatt

SEQ ID NO: 743117 - DNA, 19 bp, Mus musculus
  siRNA target sequence for Tex15 (NM_031374.1,5439-5457).
cataatgaagcactattct

SEQ ID NO: 743118 - DNA, 19 bp, Mus musculus
  siRNA target sequence for Tex15 (NM_031374.1,5579-5597).
ctcctaaagtccattccta

SEQ ID NO: 743119 - DNA, 19 bp, Mus musculus
  siRNA target sequence for Tex15 (NM_031374.1,5611-5629).
gatcatttgtggatcatta

SEQ ID NO: 743120 - DNA, 19 bp, Mus musculus
  siRNA target sequence for Tex15 (NM_031374.1,5638-5656).
gtctcctcaaaggttagtt

SEQ ID NO: 743121 - DNA, 19 bp, Mus musculus
  siRNA target sequence for Tex15 (NM_031374.1,5645-5663).
caaaggttagttttatcaa

SEQ ID NO: 743122 - DNA, 19 bp, Mus musculus
  siRNA target sequence for Tex15 (NM_031374.1,5681-5699).
gtatcaaaatctgtcttta

SEQ ID NO: 743123 - DNA, 19 bp, Mus musculus
  siRNA target sequence for Tex15 (NM_031374.1,5701-5719).
ggtctggagcatatatatt

SEQ ID NO: 743124 - DNA, 19 bp, Mus musculus
  siRNA target sequence for Tex15 (NM_031374.1,5702-5720).
gtctggagcatatatattt

SEQ ID NO: 743125 - DNA, 19 bp, Mus musculus
  siRNA target sequence for Tex15 (NM_031374.1,5868-5886).
caatgaacccactagtatt

SEQ ID NO: 743126 - DNA, 19 bp, Mus musculus
  siRNA target sequence for Tex15 (NM_031374.1,5879-5897).
ctagtattggacttcaaga

SEQ ID NO: 743127 - DNA, 19 bp, Mus musculus
  siRNA target sequence for Tex15 (NM_031374.1,5888-5906).
gacttcaagaagatgctat

SEQ ID NO: 743128 - DNA, 19 bp, Mus musculus
  siRNA target sequence for Tex15 (NM_031374.1,5929-5947).
ctaggtagcatatcaaact

SEQ ID NO: 743129 - DNA, 19 bp, Mus musculus
  siRNA target sequence for Tex15 (NM_031374.1,5932-5950).
ggtagcatatcaaactgta

SEQ ID NO: 743130 - DNA, 19 bp, Mus musculus
  siRNA target sequence for Tex15 (NM_031374.1,5942-5960).
caaactgtaggctgaacaa

SEQ ID NO: 743131 - DNA, 19 bp, Mus musculus
  siRNA target sequence for Tex15 (NM_031374.1,5966-5984).
ggctttcatatccagatat

SEQ ID NO: 743132 - DNA, 19 bp, Mus musculus
  siRNA target sequence for Tex15 (NM_031374.1,5967-5985).
gctttcatatccagatatt

SEQ ID NO: 743133 - DNA, 19 bp, Mus musculus
  siRNA target sequence for Tex15 (NM_031374.1,5968-5986).
ctttcatatccagatattt

SEQ ID NO: 743134 - DNA, 19 bp, Mus musculus
  siRNA target sequence for Tex15 (NM_031374.1,6000-6018).
gatactggatcaagctaaa

SEQ ID NO: 743135 - DNA, 19 bp, Mus musculus
  siRNA target sequence for Tex15 (NM_031374.1,6043-6061).
ggcctcactctcagatgta

SEQ ID NO: 743136 - DNA, 19 bp, Mus musculus
  siRNA target sequence for Tex15 (NM_031374.1,6056-6074).
gatgtacagatcacttaga

SEQ ID NO: 743137 - DNA, 19 bp, Mus musculus
  siRNA target sequence for Tex15 (NM_031374.1,6171-6189).
cctgggagcagtcatttta

SEQ ID NO: 743138 - DNA, 19 bp, Mus musculus
  siRNA target sequence for Tex15 (NM_031374.1,6194-6212).
ctgaagctattgagattta

SEQ ID NO: 743139 - DNA, 19 bp, Mus musculus
  siRNA target sequence for Tex15 (NM_031374.1,6276-6294).
gcacaaccagagatttcga

SEQ ID NO: 743140 - DNA, 19 bp, Mus musculus
  siRNA target sequence for Tex15 (NM_031374.1,6295-6313).
ggtatgctctggttcgatt

SEQ ID NO: 743141 - DNA, 19 bp, Mus musculus
  siRNA target sequence for Tex15 (NM_031374.1,6306-6324).
gttcgattggtctcttctt

SEQ ID NO: 743142 - DNA, 19 bp, Mus musculus
  siRNA target sequence for Tex15 (NM_031374.1,6413-6431).
caatttctgtccttaagaa

SEQ ID NO: 743143 - DNA, 19 bp, Mus musculus
  siRNA target sequence for Tex15 (NM_031374.1,6438-6456).
ggctgttatctatgaatat

SEQ ID NO: 743144 - DNA, 19 bp, Mus musculus
  siRNA target sequence for Tex15 (NM_031374.1,6471-6489).
ctgttcctatgctctacat

SEQ ID NO: 743145 - DNA, 19 bp, Mus musculus
  siRNA target sequence for Tex15 (NM_031374.1,6511-6529).
gaacttacaggcgttaaaa

SEQ ID NO: 743146 - DNA, 19 bp, Mus musculus
  siRNA target sequence for Tex15 (NM_031374.1,6521-6539).
gcgttaaaaggcttctgaa

SEQ ID NO: 743147 - DNA, 19 bp, Mus musculus
  siRNA target sequence for Tex15 (NM_031374.1,6522-6540).
cgttaaaaggcttctgaat

SEQ ID NO: 743148 - DNA, 19 bp, Mus musculus
  siRNA target sequence for Tex15 (NM_031374.1,6530-6548).
ggcttctgaataactctaa

SEQ ID NO: 743149 - DNA, 19 bp, Mus musculus
  siRNA target sequence for Tex15 (NM_031374.1,6556-6574).
gtttccacgtatattgact

SEQ ID NO: 743150 - DNA, 19 bp, Mus musculus
  siRNA target sequence for Tex15 (NM_031374.1,6605-6623).
gaaacactgtggcagaatt

SEQ ID NO: 743151 - DNA, 19 bp, Mus musculus
  siRNA target sequence for Tex15 (NM_031374.1,6741-6759).
gctgctaagtgctaaagat

SEQ ID NO: 743152 - DNA, 19 bp, Mus musculus
  siRNA target sequence for Tex15 (NM_031374.1,6789-6807).
ccaaatgctgcgcaacaaa

SEQ ID NO: 743153 - DNA, 19 bp, Mus musculus
  siRNA target sequence for Tex15 (NM_031374.1,6795-6813).
gctgcgcaacaaaaggaat

SEQ ID NO: 743154 - DNA, 19 bp, Mus musculus
  siRNA target sequence for Tex15 (NM_031374.1,6799-6817).
cgcaacaaaaggaatgctt

SEQ ID NO: 743155 - DNA, 19 bp, Mus musculus
  siRNA target sequence for Tex15 (NM_031374.1,6800-6818).
gcaacaaaaggaatgcttt

SEQ ID NO: 743156 - DNA, 19 bp, Mus musculus
  siRNA target sequence for Tex15 (NM_031374.1,6809-6827).
ggaatgctttgcaacaaaa

SEQ ID NO: 743157 - DNA, 19 bp, Mus musculus
  siRNA target sequence for Tex15 (NM_031374.1,6911-6929).
gtacagagtgcacagtaaa

SEQ ID NO: 743158 - DNA, 19 bp, Mus musculus
  siRNA target sequence for Tex15 (NM_031374.1,6918-6936).
gtgcacagtaaaaaacatt

SEQ ID NO: 743159 - DNA, 19 bp, Mus musculus
  siRNA target sequence for Tex15 (NM_031374.1,6933-6951).
catttcagactcctctaaa

SEQ ID NO: 743160 - DNA, 19 bp, Mus musculus
  siRNA target sequence for Tex15 (NM_031374.1,7040-7058).
ccatgaaagatgttggaaa

SEQ ID NO: 743161 - DNA, 19 bp, Mus musculus
  siRNA target sequence for Tex15 (NM_031374.1,7206-7224).
gtcacctgctgaaagtgta

SEQ ID NO: 743162 - DNA, 19 bp, Mus musculus
  siRNA target sequence for Tex15 (NM_031374.1,7230-7248).
cacttgcacaccaaagtca

SEQ ID NO: 743163 - DNA, 19 bp, Mus musculus
  siRNA target sequence for Tex15 (NM_031374.1,7270-7288).
gacagcttacctgattctt

SEQ ID NO: 743164 - DNA, 19 bp, Mus musculus
  siRNA target sequence for Tex15 (NM_031374.1,7309-7327).
caggaaaactcaaatgtca

SEQ ID NO: 743165 - DNA, 19 bp, Mus musculus
  siRNA target sequence for Tex15 (NM_031374.1,7354-7372).
gtggctgaaacaaatgata

SEQ ID NO: 743166 - DNA, 19 bp, Mus musculus
  siRNA target sequence for Tex15 (NM_031374.1,7357-7375).
gctgaaacaaatgataaga

SEQ ID NO: 743167 - DNA, 19 bp, Mus musculus
  siRNA target sequence for Tex15 (NM_031374.1,7394-7412).
cttgtgaccaaaaggatat

SEQ ID NO: 743168 - DNA, 19 bp, Mus musculus
  siRNA target sequence for Tex15 (NM_031374.1,7397-7415).
gtgaccaaaaggatataga

SEQ ID NO: 743169 - DNA, 19 bp, Mus musculus
  siRNA target sequence for Tex15 (NM_031374.1,7408-7426).
gatatagatgcctcttact

SEQ ID NO: 743170 - DNA, 19 bp, Mus musculus
  siRNA target sequence for Tex15 (NM_031374.1,7482-7500).
gatctctccttcaaaccta

SEQ ID NO: 743171 - DNA, 19 bp, Mus musculus
  siRNA target sequence for Tex15 (NM_031374.1,7563-7581).
gtcagagaaggacgtttat

SEQ ID NO: 743172 - DNA, 19 bp, Mus musculus
  siRNA target sequence for Tex15 (NM_031374.1,7629-7647).
gtctactgaagattgtaca

SEQ ID NO: 743173 - DNA, 19 bp, Mus musculus
  siRNA target sequence for Tex15 (NM_031374.1,7669-7687).
gtgtgtatcaaggacaaaa

SEQ ID NO: 743174 - DNA, 19 bp, Mus musculus
  siRNA target sequence for Tex15 (NM_031374.1,7695-7713).
cctgcaagtagataaaaca

SEQ ID NO: 743175 - DNA, 19 bp, Mus musculus
  siRNA target sequence for Tex15 (NM_031374.1,7793-7811).
ggaactcagcccttaatgt

SEQ ID NO: 743176 - DNA, 19 bp, Mus musculus
  siRNA target sequence for Tex15 (NM_031374.1,7903-7921).
gcatgttctccagtacata

SEQ ID NO: 743177 - DNA, 19 bp, Mus musculus
  siRNA target sequence for Tex15 (NM_031374.1,7943-7961).
gaacttcatatccatacta

SEQ ID NO: 743178 - DNA, 19 bp, Mus musculus
  siRNA target sequence for Tex15 (NM_031374.1,7992-8010).
caatggcactgctgttact

SEQ ID NO: 743179 - DNA, 19 bp, Mus musculus
  siRNA target sequence for Tex15 (NM_031374.1,8000-8018).
ctgctgttactcacacata

SEQ ID NO: 743180 - DNA, 19 bp, Mus musculus
  siRNA target sequence for Tex15 (NM_031374.1,8096-8114).
cacatttcaatcgttcata

SEQ ID NO: 743181 - DNA, 19 bp, Mus musculus
  siRNA target sequence for Tex15 (NM_031374.1,8098-8116).
catttcaatcgttcatact

SEQ ID NO: 743182 - DNA, 19 bp, Mus musculus
  siRNA target sequence for Tex15 (NM_031374.1,8107-8125).
cgttcatactctgaacatt

SEQ ID NO: 743183 - DNA, 19 bp, Mus musculus
  siRNA target sequence for Tex15 (NM_031374.1,8117-8135).
ctgaacattttagttactt

SEQ ID NO: 743184 - DNA, 19 bp, Mus musculus
  siRNA target sequence for Tex15 (NM_031374.1,8147-8165).
cacaagcaaattcctttaa

SEQ ID NO: 743185 - DNA, 19 bp, Mus musculus
  siRNA target sequence for Tex15 (NM_031374.1,8170-8188).
ggaaacgggtattttccat

SEQ ID NO: 743186 - DNA, 19 bp, Mus musculus
  siRNA target sequence for Tex15 (NM_031374.1,8193-8211).
cacgcctgtttcttacaat

SEQ ID NO: 743187 - DNA, 19 bp, Mus musculus
  siRNA target sequence for Tex15 (NM_031374.1,8195-8213).
cgcctgtttcttacaatta

SEQ ID NO: 743188 - DNA, 19 bp, Mus musculus
  siRNA target sequence for Pramel1 (NM_031377.1,248-266).
gatgacataccctcacttt

SEQ ID NO: 743189 - DNA, 19 bp, Mus musculus
  siRNA target sequence for Pramel1 (NM_031377.1,251-269).
gacataccctcacttttct

SEQ ID NO: 743190 - DNA, 19 bp, Mus musculus
  siRNA target sequence for Pramel1 (NM_031377.1,303-321).
gatatgttgggatcataaa

SEQ ID NO: 743191 - DNA, 19 bp, Mus musculus
  siRNA target sequence for Pramel1 (NM_031377.1,393-411).
ggagaatcttagagattat

SEQ ID NO: 743192 - DNA, 19 bp, Mus musculus
  siRNA target sequence for Pramel1 (NM_031377.1,419-437).
gggcttgatgccttgcttt

SEQ ID NO: 743193 - DNA, 19 bp, Mus musculus
  siRNA target sequence for Pramel1 (NM_031377.1,619-637).
caaggaaagcccactagat

SEQ ID NO: 743194 - DNA, 19 bp, Mus musculus
  siRNA target sequence for Pramel1 (NM_031377.1,656-674).
gttcagtgggtggataaca

SEQ ID NO: 743195 - DNA, 19 bp, Mus musculus
  siRNA target sequence for Pramel1 (NM_031377.1,715-733).
ctgggctatgtccatgtat

SEQ ID NO: 743196 - DNA, 19 bp, Mus musculus
  siRNA target sequence for Pramel1 (NM_031377.1,720-738).
ctatgtccatgtattacca

SEQ ID NO: 743197 - DNA, 19 bp, Mus musculus
  siRNA target sequence for Pramel1 (NM_031377.1,785-803).
cgtatgtactgcatcagta

SEQ ID NO: 743198 - DNA, 19 bp, Mus musculus
  siRNA target sequence for Pramel1 (NM_031377.1,1002-1020).
gtcatctggatgagctatt

SEQ ID NO: 743199 - DNA, 19 bp, Mus musculus
  siRNA target sequence for Pramel1 (NM_031377.1,1004-1022).
catctggatgagctattct

SEQ ID NO: 743200 - DNA, 19 bp, Mus musculus
  siRNA target sequence for Pramel1 (NM_031377.1,1048-1066).
cctgtctgtgattgattgt

SEQ ID NO: 743201 - DNA, 19 bp, Mus musculus
  siRNA target sequence for Pramel1 (NM_031377.1,1173-1191).
cccttcgagttctgttact

SEQ ID NO: 743202 - DNA, 19 bp, Mus musculus
  siRNA target sequence for Pramel1 (NM_031377.1,1174-1192).
ccttcgagttctgttacta

SEQ ID NO: 743203 - DNA, 19 bp, Mus musculus
  siRNA target sequence for Pramel1 (NM_031377.1,1175-1193).
cttcgagttctgttactaa

SEQ ID NO: 743204 - DNA, 19 bp, Mus musculus
  siRNA target sequence for Pramel1 (NM_031377.1,1178-1196).
cgagttctgttactaaaat

SEQ ID NO: 743205 - DNA, 19 bp, Mus musculus
  siRNA target sequence for Pramel1 (NM_031377.1,1206-1224).
ccctaacatccctggattt

SEQ ID NO: 743206 - DNA, 19 bp, Mus musculus
  siRNA target sequence for Pramel1 (NM_031377.1,1287-1305).
cacagctcaccaagtttaa

SEQ ID NO: 743207 - DNA, 19 bp, Mus musculus
  siRNA target sequence for Pramel1 (NM_031377.1,1289-1307).
cagctcaccaagtttaatt

SEQ ID NO: 743208 - DNA, 19 bp, Mus musculus
  siRNA target sequence for Pramel1 (NM_031377.1,1337-1355).
ctgagggagctggcatata

SEQ ID NO: 743209 - DNA, 19 bp, Mus musculus
  siRNA target sequence for Pramel1 (NM_031377.1,1341-1359).
gggagctggcatataacgt

SEQ ID NO: 743210 - DNA, 19 bp, Mus musculus
  siRNA target sequence for Pramel1 (NM_031377.1,1342-1360).
ggagctggcatataacgtt

SEQ ID NO: 743211 - DNA, 19 bp, Mus musculus
  siRNA target sequence for Pramel1 (NM_031377.1,1443-1461).
ctcagcctcatattgtgtt

SEQ ID NO: 743212 - DNA, 19 bp, Mus musculus
  siRNA target sequence for Pramel1 (NM_031377.1,1449-1467).
ctcatattgtgtttgtaga

SEQ ID NO: 743213 - DNA, 19 bp, Mus musculus
  siRNA target sequence for Mlze (NM_031378.1,265-283).
ctgcctgtttaacatactt

SEQ ID NO: 743214 - DNA, 19 bp, Mus musculus
  siRNA target sequence for Mlze (NM_031378.1,267-285).
gcctgtttaacatacttca

SEQ ID NO: 743215 - DNA, 19 bp, Mus musculus
  siRNA target sequence for Mlze (NM_031378.1,298-316).
ccggttggctttgaaaact

SEQ ID NO: 743216 - DNA, 19 bp, Mus musculus
  siRNA target sequence for Mlze (NM_031378.1,439-457).
cctggatgtcgaaaccatt

SEQ ID NO: 743217 - DNA, 19 bp, Mus musculus
  siRNA target sequence for Mlze (NM_031378.1,464-482).
ggagaagcagggtttgtta

SEQ ID NO: 743218 - DNA, 19 bp, Mus musculus
  siRNA target sequence for Mlze (NM_031378.1,467-485).
gaagcagggtttgttaagt

SEQ ID NO: 743219 - DNA, 19 bp, Mus musculus
  siRNA target sequence for Mlze (NM_031378.1,666-684).
gcacaagcaatagcaaatt

SEQ ID NO: 743220 - DNA, 19 bp, Mus musculus
  siRNA target sequence for Mlze (NM_031378.1,667-685).
cacaagcaatagcaaattt

SEQ ID NO: 743221 - DNA, 19 bp, Mus musculus
  siRNA target sequence for Mlze (NM_031378.1,672-690).
gcaatagcaaatttgcaat

SEQ ID NO: 743222 - DNA, 19 bp, Mus musculus
  siRNA target sequence for Mlze (NM_031378.1,686-704).
gcaatcaaagggatcatca

SEQ ID NO: 743223 - DNA, 19 bp, Mus musculus
  siRNA target sequence for Mlze (NM_031378.1,687-705).
caatcaaagggatcatcaa

SEQ ID NO: 743224 - DNA, 19 bp, Mus musculus
  siRNA target sequence for Mlze (NM_031378.1,836-854).
ctcacttctgctaacacta

SEQ ID NO: 743225 - DNA, 19 bp, Mus musculus
  siRNA target sequence for Mlze (NM_031378.1,840-858).
cttctgctaacactaagaa

SEQ ID NO: 743226 - DNA, 19 bp, Mus musculus
  siRNA target sequence for Mlze (NM_031378.1,877-895).
gagatttgtgggaatgtct

SEQ ID NO: 743227 - DNA, 19 bp, Mus musculus
  siRNA target sequence for Mlze (NM_031378.1,894-912).
ctggacatctaagatatca

SEQ ID NO: 743228 - DNA, 19 bp, Mus musculus
  siRNA target sequence for Mlze (NM_031378.1,906-924).
gatatcaggatctagtcat

SEQ ID NO: 743229 - DNA, 19 bp, Mus musculus
  siRNA target sequence for Mlze (NM_031378.1,1198-1216).
ctcgagcctttcatggatt

SEQ ID NO: 743230 - DNA, 19 bp, Mus musculus
  siRNA target sequence for Mlze (NM_031378.1,1203-1221).
gcctttcatggattaacct

SEQ ID NO: 743231 - DNA, 19 bp, Mus musculus
  siRNA target sequence for Mlze (NM_031378.1,1204-1222).
cctttcatggattaaccta

SEQ ID NO: 743232 - DNA, 19 bp, Mus musculus
  siRNA target sequence for Mlze (NM_031378.1,1205-1223).
ctttcatggattaacctaa

SEQ ID NO: 743233 - DNA, 19 bp, Mus musculus
  siRNA target sequence for Tktl1 (NM_031379.1,131-149).
cgaccactagctatctcat

SEQ ID NO: 743234 - DNA, 19 bp, Mus musculus
  siRNA target sequence for Tktl1 (NM_031379.1,132-150).
gaccactagctatctcata

SEQ ID NO: 743235 - DNA, 19 bp, Mus musculus
  siRNA target sequence for Tktl1 (NM_031379.1,178-196).
gtgctgttcttttatacaa

SEQ ID NO: 743236 - DNA, 19 bp, Mus musculus
  siRNA target sequence for Tktl1 (NM_031379.1,181-199).
ctgttcttttatacaatga

SEQ ID NO: 743237 - DNA, 19 bp, Mus musculus
  siRNA target sequence for Tktl1 (NM_031379.1,255-273).
gggactaccatttgttaat

SEQ ID NO: 743238 - DNA, 19 bp, Mus musculus
  siRNA target sequence for Tktl1 (NM_031379.1,257-275).
gactaccatttgttaatgt

SEQ ID NO: 743239 - DNA, 19 bp, Mus musculus
  siRNA target sequence for Tktl1 (NM_031379.1,310-328).
gcctgtgggatggcatata

SEQ ID NO: 743240 - DNA, 19 bp, Mus musculus
  siRNA target sequence for Tktl1 (NM_031379.1,312-330).
ctgtgggatggcatatact

SEQ ID NO: 743241 - DNA, 19 bp, Mus musculus
  siRNA target sequence for Tktl1 (NM_031379.1,323-341).
catatactggcaagtactt

SEQ ID NO: 743242 - DNA, 19 bp, Mus musculus
  siRNA target sequence for Tktl1 (NM_031379.1,420-438).
ctttgcatcctactacaat

SEQ ID NO: 743243 - DNA, 19 bp, Mus musculus
  siRNA target sequence for Tktl1 (NM_031379.1,659-677).
cccgaggcatgccaaatgt

SEQ ID NO: 743244 - DNA, 19 bp, Mus musculus
  siRNA target sequence for Tktl1 (NM_031379.1,660-678).
ccgaggcatgccaaatgtt

SEQ ID NO: 743245 - DNA, 19 bp, Mus musculus
  siRNA target sequence for Tktl1 (NM_031379.1,662-680).
gaggcatgccaaatgttga

SEQ ID NO: 743246 - DNA, 19 bp, Mus musculus
  siRNA target sequence for Tktl1 (NM_031379.1,722-740).
gagcagatgcaattgtcaa

SEQ ID NO: 743247 - DNA, 19 bp, Mus musculus
  siRNA target sequence for Tktl1 (NM_031379.1,731-749).
caattgtcaagttaattga

SEQ ID NO: 743248 - DNA, 19 bp, Mus musculus
  siRNA target sequence for Tktl1 (NM_031379.1,756-774).
gatacagaccaacaaaatt

SEQ ID NO: 743249 - DNA, 19 bp, Mus musculus
  siRNA target sequence for Tktl1 (NM_031379.1,796-814).
gaggactcgcctcaaatta

SEQ ID NO: 743250 - DNA, 19 bp, Mus musculus
  siRNA target sequence for Tktl1 (NM_031379.1,803-821).
cgcctcaaattaacatcat

SEQ ID NO: 743251 - DNA, 19 bp, Mus musculus
  siRNA target sequence for Tktl1 (NM_031379.1,862-880).
gacaaggtgtctactcaaa

SEQ ID NO: 743252 - DNA, 19 bp, Mus musculus
  siRNA target sequence for Tktl1 (NM_031379.1,864-882).
caaggtgtctactcaaaga

SEQ ID NO: 743253 - DNA, 19 bp, Mus musculus
  siRNA target sequence for Tktl1 (NM_031379.1,890-908).
gtttggctctagctaaact

SEQ ID NO: 743254 - DNA, 19 bp, Mus musculus
  siRNA target sequence for Tktl1 (NM_031379.1,901-919).
gctaaactgggccatgaaa

SEQ ID NO: 743255 - DNA, 19 bp, Mus musculus
  siRNA target sequence for Tktl1 (NM_031379.1,907-925).
ctgggccatgaaaatgaca

SEQ ID NO: 743256 - DNA, 19 bp, Mus musculus
  siRNA target sequence for Tktl1 (NM_031379.1,946-964).
gacaccaagaactgcaatt

SEQ ID NO: 743257 - DNA, 19 bp, Mus musculus
  siRNA target sequence for Tktl1 (NM_031379.1,948-966).
caccaagaactgcaatttt

SEQ ID NO: 743258 - DNA, 19 bp, Mus musculus
  siRNA target sequence for Tktl1 (NM_031379.1,998-1016).
gattcatccagtgttgtat

SEQ ID NO: 743259 - DNA, 19 bp, Mus musculus
  siRNA target sequence for Tktl1 (NM_031379.1,1059-1077).
ccgtgaccggaccattgtt

SEQ ID NO: 743260 - DNA, 19 bp, Mus musculus
  siRNA target sequence for Tktl1 (NM_031379.1,1060-1078).
cgtgaccggaccattgttt

SEQ ID NO: 743261 - DNA, 19 bp, Mus musculus
  siRNA target sequence for Tktl1 (NM_031379.1,1061-1079).
gtgaccggaccattgtttt

SEQ ID NO: 743262 - DNA, 19 bp, Mus musculus
  siRNA target sequence for Tktl1 (NM_031379.1,1065-1083).
ccggaccattgtttttgct

SEQ ID NO: 743263 - DNA, 19 bp, Mus musculus
  siRNA target sequence for Tktl1 (NM_031379.1,1067-1085).
ggaccattgtttttgctta

SEQ ID NO: 743264 - DNA, 19 bp, Mus musculus
  siRNA target sequence for Tktl1 (NM_031379.1,1227-1245).
ggccatgttccgagcaatt

SEQ ID NO: 743265 - DNA, 19 bp, Mus musculus
  siRNA target sequence for Tktl1 (NM_031379.1,1236-1254).
ccgagcaattcccaattgt

SEQ ID NO: 743266 - DNA, 19 bp, Mus musculus
  siRNA target sequence for Tktl1 (NM_031379.1,1307-1325).
cagccaatactaaggaaat

SEQ ID NO: 743267 - DNA, 19 bp, Mus musculus
  siRNA target sequence for Tktl1 (NM_031379.1,1348-1366).
gcagaaactgcaattattt

SEQ ID NO: 743268 - DNA, 19 bp, Mus musculus
  siRNA target sequence for Tktl1 (NM_031379.1,1368-1386).
caccactcaagaaaccttt

SEQ ID NO: 743269 - DNA, 19 bp, Mus musculus
  siRNA target sequence for Tktl1 (NM_031379.1,1411-1429).
cgccatagtgacaatgaca

SEQ ID NO: 743270 - DNA, 19 bp, Mus musculus
  siRNA target sequence for Tktl1 (NM_031379.1,1512-1530).
ccgtgtcattgacttgttt

SEQ ID NO: 743271 - DNA, 19 bp, Mus musculus
  siRNA target sequence for Tktl1 (NM_031379.1,1556-1574).
ccatcatttccaatgcaaa

SEQ ID NO: 743272 - DNA, 19 bp, Mus musculus
  siRNA target sequence for Tktl1 (NM_031379.1,1576-1594).
gccacaggtggccgaatta

SEQ ID NO: 743273 - DNA, 19 bp, Mus musculus
  siRNA target sequence for Tktl1 (NM_031379.1,1653-1671).
ctccatggagcctaacatt

SEQ ID NO: 743274 - DNA, 19 bp, Mus musculus
  siRNA target sequence for Tktl1 (NM_031379.1,1655-1673).
ccatggagcctaacattgt

SEQ ID NO: 743275 - DNA, 19 bp, Mus musculus
  siRNA target sequence for Tktl1 (NM_031379.1,1663-1681).
cctaacattgtggttcata

SEQ ID NO: 743276 - DNA, 19 bp, Mus musculus
  siRNA target sequence for Tktl1 (NM_031379.1,1746-1764).
cagttccagacacatcatt

SEQ ID NO: 743277 - DNA, 19 bp, Mus musculus
  siRNA target sequence for Fstl3 (NM_031380.1,185-203).
gtgcttccggcaacatcaa

SEQ ID NO: 743278 - DNA, 19 bp, Mus musculus
  siRNA target sequence for Fstl3 (NM_031380.1,187-205).
gcttccggcaacatcaaca

SEQ ID NO: 743279 - DNA, 19 bp, Mus musculus
  siRNA target sequence for Fstl3 (NM_031380.1,470-488).
cagacttgcgcgtcatgta

SEQ ID NO: 743280 - DNA, 19 bp, Mus musculus
  siRNA target sequence for Tex13 (NM_031381.2,125-143).
cgccatgccagggtgttaa

SEQ ID NO: 743281 - DNA, 19 bp, Mus musculus
  siRNA target sequence for Tex13 (NM_031381.2,131-149).
gccagggtgttaatgttca

SEQ ID NO: 743282 - DNA, 19 bp, Mus musculus
  siRNA target sequence for Tex13 (NM_031381.2,132-150).
ccagggtgttaatgttcat

SEQ ID NO: 743283 - DNA, 19 bp, Mus musculus
  siRNA target sequence for Tex13 (NM_031381.2,433-451).
cgaccagcacgagatagaa

SEQ ID NO: 743284 - DNA, 19 bp, Mus musculus
  siRNA target sequence for Tex13 (NM_031381.2,535-553).
gctactacacgcaagattt

SEQ ID NO: 743285 - DNA, 19 bp, Mus musculus
  siRNA target sequence for Tex13 (NM_031381.2,599-617).
caggtacaagcaagaatgt

SEQ ID NO: 743286 - DNA, 19 bp, Mus musculus
  siRNA target sequence for Tex13 (NM_031381.2,601-619).
ggtacaagcaagaatgtct

SEQ ID NO: 743287 - DNA, 19 bp, Mus musculus
  siRNA target sequence for Tex13 (NM_031381.2,602-620).
gtacaagcaagaatgtcta

SEQ ID NO: 743288 - DNA, 19 bp, Mus musculus
  siRNA target sequence for Tex13 (NM_031381.2,608-626).
gcaagaatgtctacaatta

SEQ ID NO: 743289 - DNA, 19 bp, Mus musculus
  siRNA target sequence for Tex13 (NM_031381.2,612-630).
gaatgtctacaattataca

SEQ ID NO: 743290 - DNA, 19 bp, Mus musculus
  siRNA target sequence for Tex13 (NM_031381.2,631-649).
gcctcttaacagaaatcgt

SEQ ID NO: 743291 - DNA, 19 bp, Mus musculus
  siRNA target sequence for Tex16 (NM_031382.1,100-118).
ggtagagcatcagtatcta

SEQ ID NO: 743292 - DNA, 19 bp, Mus musculus
  siRNA target sequence for Tex16 (NM_031382.1,101-119).
gtagagcatcagtatctaa

SEQ ID NO: 743293 - DNA, 19 bp, Mus musculus
  siRNA target sequence for Tex16 (NM_031382.1,104-122).
gagcatcagtatctaaaat

SEQ ID NO: 743294 - DNA, 19 bp, Mus musculus
  siRNA target sequence for Tex16 (NM_031382.1,129-147).
gatacaaattgatgaaaca

SEQ ID NO: 743295 - DNA, 19 bp, Mus musculus
  siRNA target sequence for Tex16 (NM_031382.1,158-176).
gaactaagagatacttgat

SEQ ID NO: 743296 - DNA, 19 bp, Mus musculus
  siRNA target sequence for Tex16 (NM_031382.1,315-333).
gtctgcaagtagaacaata

SEQ ID NO: 743297 - DNA, 19 bp, Mus musculus
  siRNA target sequence for Tex16 (NM_031382.1,317-335).
ctgcaagtagaacaataaa

SEQ ID NO: 743298 - DNA, 19 bp, Mus musculus
  siRNA target sequence for Tex16 (NM_031382.1,355-373).
gtgatgtcctctgattcta

SEQ ID NO: 743299 - DNA, 19 bp, Mus musculus
  siRNA target sequence for Tex16 (NM_031382.1,405-423).
gagtacctgtaatttggaa

SEQ ID NO: 743300 - DNA, 19 bp, Mus musculus
  siRNA target sequence for Tex16 (NM_031382.1,410-428).
cctgtaatttggaaagact

SEQ ID NO: 743301 - DNA, 19 bp, Mus musculus
  siRNA target sequence for Tex16 (NM_031382.1,462-480).
ctggttagatgctaaaaga

SEQ ID NO: 743302 - DNA, 19 bp, Mus musculus
  siRNA target sequence for Tex16 (NM_031382.1,510-528).
ctgggatagctctggaaaa

SEQ ID NO: 743303 - DNA, 19 bp, Mus musculus
  siRNA target sequence for Tex16 (NM_031382.1,512-530).
gggatagctctggaaaata

SEQ ID NO: 743304 - DNA, 19 bp, Mus musculus
  siRNA target sequence for Tex16 (NM_031382.1,518-536).
gctctggaaaatatcagtt

SEQ ID NO: 743305 - DNA, 19 bp, Mus musculus
  siRNA target sequence for Tex16 (NM_031382.1,571-589).
cgtcagggtgaccttcaaa

SEQ ID NO: 743306 - DNA, 19 bp, Mus musculus
  siRNA target sequence for Tex16 (NM_031382.1,576-594).
gggtgaccttcaaacgttt

SEQ ID NO: 743307 - DNA, 19 bp, Mus musculus
  siRNA target sequence for Tex16 (NM_031382.1,619-637).
gtaggatccagttctgata

SEQ ID NO: 743308 - DNA, 19 bp, Mus musculus
  siRNA target sequence for Tex16 (NM_031382.1,623-641).
gatccagttctgataaaca

SEQ ID NO: 743309 - DNA, 19 bp, Mus musculus
  siRNA target sequence for Tex16 (NM_031382.1,665-683).
gagatcaaagtgatcctaa

SEQ ID NO: 743310 - DNA, 19 bp, Mus musculus
  siRNA target sequence for Tex16 (NM_031382.1,686-704).
gtaaaagatacctcataaa

SEQ ID NO: 743311 - DNA, 19 bp, Mus musculus
  siRNA target sequence for Tex16 (NM_031382.1,721-739).
gacaatgaggggtttcaaa

SEQ ID NO: 743312 - DNA, 19 bp, Mus musculus
  siRNA target sequence for Tex16 (NM_031382.1,819-837).
ccggcttggtgctcgtaaa

SEQ ID NO: 743313 - DNA, 19 bp, Mus musculus
  siRNA target sequence for Tex16 (NM_031382.1,820-838).
cggcttggtgctcgtaaaa

SEQ ID NO: 743314 - DNA, 19 bp, Mus musculus
  siRNA target sequence for Tex16 (NM_031382.1,821-839).
ggcttggtgctcgtaaaaa

SEQ ID NO: 743315 - DNA, 19 bp, Mus musculus
  siRNA target sequence for Tex16 (NM_031382.1,847-865).
cgtcctccagggttttgga

SEQ ID NO: 743316 - DNA, 19 bp, Mus musculus
  siRNA target sequence for Tex16 (NM_031382.1,884-902).
ctaagcttgcccaggataa

SEQ ID NO: 743317 - DNA, 19 bp, Mus musculus
  siRNA target sequence for Tex16 (NM_031382.1,925-943).
gtacagcaaaaggataaca

SEQ ID NO: 743318 - DNA, 19 bp, Mus musculus
  siRNA target sequence for Tex16 (NM_031382.1,1030-1048).
ccactctcgcaagaaaagt

SEQ ID NO: 743319 - DNA, 19 bp, Mus musculus
  siRNA target sequence for Tex16 (NM_031382.1,1031-1049).
cactctcgcaagaaaagtt

SEQ ID NO: 743320 - DNA, 19 bp, Mus musculus
  siRNA target sequence for Tex16 (NM_031382.1,1033-1051).
ctctcgcaagaaaagttaa

SEQ ID NO: 743321 - DNA, 19 bp, Mus musculus
  siRNA target sequence for Tex16 (NM_031382.1,1078-1096).
ccagactctcccacattca

SEQ ID NO: 743322 - DNA, 19 bp, Mus musculus
  siRNA target sequence for Tex16 (NM_031382.1,1115-1133).
gaaaagctagcctgaaaat

SEQ ID NO: 743323 - DNA, 19 bp, Mus musculus
  siRNA target sequence for Tex16 (NM_031382.1,1146-1164).
gcgccagtgcaaggaatat

SEQ ID NO: 743324 - DNA, 19 bp, Mus musculus
  siRNA target sequence for Tex16 (NM_031382.1,1147-1165).
cgccagtgcaaggaatata

SEQ ID NO: 743325 - DNA, 19 bp, Mus musculus
  siRNA target sequence for Tex16 (NM_031382.1,1149-1167).
ccagtgcaaggaatataga

SEQ ID NO: 743326 - DNA, 19 bp, Mus musculus
  siRNA target sequence for Tex16 (NM_031382.1,1152-1170).
gtgcaaggaatatagatat

SEQ ID NO: 743327 - DNA, 19 bp, Mus musculus
  siRNA target sequence for Tex16 (NM_031382.1,1171-1189).
ccccatagttgtgaaagtt

SEQ ID NO: 743328 - DNA, 19 bp, Mus musculus
  siRNA target sequence for Tex16 (NM_031382.1,1172-1190).
cccatagttgtgaaagttt

SEQ ID NO: 743329 - DNA, 19 bp, Mus musculus
  siRNA target sequence for Tex16 (NM_031382.1,1181-1199).
gtgaaagtttgaagtatca

SEQ ID NO: 743330 - DNA, 19 bp, Mus musculus
  siRNA target sequence for Tex16 (NM_031382.1,1183-1201).
gaaagtttgaagtatcaaa

SEQ ID NO: 743331 - DNA, 19 bp, Mus musculus
  siRNA target sequence for Tex16 (NM_031382.1,1227-1245).
gacttgcacctctaatgta

SEQ ID NO: 743332 - DNA, 19 bp, Mus musculus
  siRNA target sequence for Tex16 (NM_031382.1,1233-1251).
cacctctaatgtatcatca

SEQ ID NO: 743333 - DNA, 19 bp, Mus musculus
  siRNA target sequence for Tex16 (NM_031382.1,1235-1253).
cctctaatgtatcatcatt

SEQ ID NO: 743334 - DNA, 19 bp, Mus musculus
  siRNA target sequence for Tex16 (NM_031382.1,1255-1273).
gttgacagcccaacttcta

SEQ ID NO: 743335 - DNA, 19 bp, Mus musculus
  siRNA target sequence for Tex16 (NM_031382.1,1279-1297).
cctaagtctgtcacaagaa

SEQ ID NO: 743336 - DNA, 19 bp, Mus musculus
  siRNA target sequence for Tex16 (NM_031382.1,1304-1322).
ctcgaagaagtattacata

SEQ ID NO: 743337 - DNA, 19 bp, Mus musculus
  siRNA target sequence for Tex16 (NM_031382.1,1306-1324).
cgaagaagtattacatatt

SEQ ID NO: 743338 - DNA, 19 bp, Mus musculus
  siRNA target sequence for Tex16 (NM_031382.1,1336-1354).
ggaagtcaaaaatgtacta

SEQ ID NO: 743339 - DNA, 19 bp, Mus musculus
  siRNA target sequence for Tex16 (NM_031382.1,1342-1360).
caaaaatgtactagatgtt

SEQ ID NO: 743340 - DNA, 19 bp, Mus musculus
  siRNA target sequence for Tex16 (NM_031382.1,1349-1367).
gtactagatgttttatgga

SEQ ID NO: 743341 - DNA, 19 bp, Mus musculus
  siRNA target sequence for Tex16 (NM_031382.1,1358-1376).
gttttatggaaatcagtaa

SEQ ID NO: 743342 - DNA, 19 bp, Mus musculus
  siRNA target sequence for Tex16 (NM_031382.1,1371-1389).
cagtaactcatcttatcat

SEQ ID NO: 743343 - DNA, 19 bp, Mus musculus
  siRNA target sequence for Tex16 (NM_031382.1,1395-1413).
cctcataaattctgatgat

SEQ ID NO: 743344 - DNA, 19 bp, Mus musculus
  siRNA target sequence for Tex16 (NM_031382.1,1438-1456).
ggccagatttcctcacatt

SEQ ID NO: 743345 - DNA, 19 bp, Mus musculus
  siRNA target sequence for Tex16 (NM_031382.1,1451-1469).
cacattctaaatattctct

SEQ ID NO: 743346 - DNA, 19 bp, Mus musculus
  siRNA target sequence for Tex16 (NM_031382.1,1466-1484).
ctctgcgctctaaaactat

SEQ ID NO: 743347 - DNA, 19 bp, Mus musculus
  siRNA target sequence for Tex16 (NM_031382.1,1468-1486).
ctgcgctctaaaactatca

SEQ ID NO: 743348 - DNA, 19 bp, Mus musculus
  siRNA target sequence for Tex16 (NM_031382.1,1470-1488).
gcgctctaaaactatcaga

SEQ ID NO: 743349 - DNA, 19 bp, Mus musculus
  siRNA target sequence for Tex16 (NM_031382.1,1491-1509).
cttcaagacttctcgaaat

SEQ ID NO: 743350 - DNA, 19 bp, Mus musculus
  siRNA target sequence for Tex16 (NM_031382.1,1505-1523).
gaaatcgccctttatctca

SEQ ID NO: 743351 - DNA, 19 bp, Mus musculus
  siRNA target sequence for Tex16 (NM_031382.1,1564-1582).
ctgcacagggaagattcta

SEQ ID NO: 743352 - DNA, 19 bp, Mus musculus
  siRNA target sequence for Tex16 (NM_031382.1,1628-1646).
catctcttcaaaaccttaa

SEQ ID NO: 743353 - DNA, 19 bp, Mus musculus
  siRNA target sequence for Tex16 (NM_031382.1,1719-1737).
catatcaggacctgtaaga

SEQ ID NO: 743354 - DNA, 19 bp, Mus musculus
  siRNA target sequence for Tex16 (NM_031382.1,1750-1768).
gaaagcaagttcaacctta

SEQ ID NO: 743355 - DNA, 19 bp, Mus musculus
  siRNA target sequence for Tex16 (NM_031382.1,1769-1787).
ctgctcaacctcaaaatga

SEQ ID NO: 743356 - DNA, 19 bp, Mus musculus
  siRNA target sequence for Tex16 (NM_031382.1,1798-1816).
gatgtcagtgatagaaata

SEQ ID NO: 743357 - DNA, 19 bp, Mus musculus
  siRNA target sequence for Tex16 (NM_031382.1,1881-1899).
gacaaatactgaagatgaa

SEQ ID NO: 743358 - DNA, 19 bp, Mus musculus
  siRNA target sequence for Tex16 (NM_031382.1,2090-2108).
gcaatgatggtgactctaa

SEQ ID NO: 743359 - DNA, 19 bp, Mus musculus
  siRNA target sequence for Tex16 (NM_031382.1,2091-2109).
caatgatggtgactctaaa

SEQ ID NO: 743360 - DNA, 19 bp, Mus musculus
  siRNA target sequence for Tex16 (NM_031382.1,2154-2172).
cgctaccaacagtgatgtt

SEQ ID NO: 743361 - DNA, 19 bp, Mus musculus
  siRNA target sequence for Tex16 (NM_031382.1,2167-2185).
gatgttaacttgaaatata

SEQ ID NO: 743362 - DNA, 19 bp, Mus musculus
  siRNA target sequence for Tex16 (NM_031382.1,2170-2188).
gttaacttgaaatatagca

SEQ ID NO: 743363 - DNA, 19 bp, Mus musculus
  siRNA target sequence for Tex16 (NM_031382.1,2194-2212).
gagacatgtaccaacaatt

SEQ ID NO: 743364 - DNA, 19 bp, Mus musculus
  siRNA target sequence for Tex16 (NM_031382.1,2201-2219).
gtaccaacaatttagacaa

SEQ ID NO: 743365 - DNA, 19 bp, Mus musculus
  siRNA target sequence for Tex16 (NM_031382.1,2232-2250).
ggcagaatatttcaatcat

SEQ ID NO: 743366 - DNA, 19 bp, Mus musculus
  siRNA target sequence for Tex16 (NM_031382.1,2244-2262).
caatcatcacaataatgct

SEQ ID NO: 743367 - DNA, 19 bp, Mus musculus
  siRNA target sequence for Tex16 (NM_031382.1,2343-2361).
ggacactggccctagaaat

SEQ ID NO: 743368 - DNA, 19 bp, Mus musculus
  siRNA target sequence for Tex16 (NM_031382.1,2344-2362).
gacactggccctagaaata

SEQ ID NO: 743369 - DNA, 19 bp, Mus musculus
  siRNA target sequence for Tex16 (NM_031382.1,2348-2366).
ctggccctagaaatacgat

SEQ ID NO: 743370 - DNA, 19 bp, Mus musculus
  siRNA target sequence for Tex16 (NM_031382.1,2352-2370).
ccctagaaatacgatgata

SEQ ID NO: 743371 - DNA, 19 bp, Mus musculus
  siRNA target sequence for Tex16 (NM_031382.1,2353-2371).
cctagaaatacgatgataa

SEQ ID NO: 743372 - DNA, 19 bp, Mus musculus
  siRNA target sequence for Tex16 (NM_031382.1,2354-2372).
ctagaaatacgatgataaa

SEQ ID NO: 743373 - DNA, 19 bp, Mus musculus
  siRNA target sequence for Tex16 (NM_031382.1,2357-2375).
gaaatacgatgataaaaga

SEQ ID NO: 743374 - DNA, 19 bp, Mus musculus
  siRNA target sequence for Tex16 (NM_031382.1,2383-2401).
gcttattctgagaatatta

SEQ ID NO: 743375 - DNA, 19 bp, Mus musculus
  siRNA target sequence for Tex16 (NM_031382.1,2407-2425).
ctttccaacagttatcaaa

SEQ ID NO: 743376 - DNA, 19 bp, Mus musculus
  siRNA target sequence for Tex16 (NM_031382.1,2412-2430).
caacagttatcaaaataat

SEQ ID NO: 743377 - DNA, 19 bp, Mus musculus
  siRNA target sequence for Tex16 (NM_031382.1,2492-2510).
caaaagaccttgactctaa

SEQ ID NO: 743378 - DNA, 19 bp, Mus musculus
  siRNA target sequence for Tex16 (NM_031382.1,2497-2515).
gaccttgactctaactcta

SEQ ID NO: 743379 - DNA, 19 bp, Mus musculus
  siRNA target sequence for Tex16 (NM_031382.1,2505-2523).
ctctaactctaatatcaat

SEQ ID NO: 743380 - DNA, 19 bp, Mus musculus
  siRNA target sequence for Tex16 (NM_031382.1,2525-2543).
ccagtaatgctactaacaa

SEQ ID NO: 743381 - DNA, 19 bp, Mus musculus
  siRNA target sequence for Tex16 (NM_031382.1,2526-2544).
cagtaatgctactaacaat

SEQ ID NO: 743382 - DNA, 19 bp, Mus musculus
  siRNA target sequence for Tex16 (NM_031382.1,2533-2551).
gctactaacaatactgtta

SEQ ID NO: 743383 - DNA, 19 bp, Mus musculus
  siRNA target sequence for Tex16 (NM_031382.1,2553-2571).
ccctaactatggtgcaaaa

SEQ ID NO: 743384 - DNA, 19 bp, Mus musculus
  siRNA target sequence for Tex16 (NM_031382.1,2554-2572).
cctaactatggtgcaaaat

SEQ ID NO: 743385 - DNA, 19 bp, Mus musculus
  siRNA target sequence for Tex16 (NM_031382.1,2573-2591).
ccacgagcactgctattta

SEQ ID NO: 743386 - DNA, 19 bp, Mus musculus
  siRNA target sequence for Tex16 (NM_031382.1,2576-2594).
cgagcactgctatttacaa

SEQ ID NO: 743387 - DNA, 19 bp, Mus musculus
  siRNA target sequence for Tex16 (NM_031382.1,2577-2595).
gagcactgctatttacaaa

SEQ ID NO: 743388 - DNA, 19 bp, Mus musculus
  siRNA target sequence for Tex16 (NM_031382.1,2602-2620).
gctgccctaaactattatt

SEQ ID NO: 743389 - DNA, 19 bp, Mus musculus
  siRNA target sequence for Tex16 (NM_031382.1,2613-2631).
ctattattcagatattaat

SEQ ID NO: 743390 - DNA, 19 bp, Mus musculus
  siRNA target sequence for Tex16 (NM_031382.1,2641-2659).
gggtttacatatgaagtaa

SEQ ID NO: 743391 - DNA, 19 bp, Mus musculus
  siRNA target sequence for Tex16 (NM_031382.1,2749-2767).
gatacaaataatgttatca

SEQ ID NO: 743392 - DNA, 19 bp, Mus musculus
  siRNA target sequence for Tex16 (NM_031382.1,2810-2828).
cctctgtcctagacactaa

SEQ ID NO: 743393 - DNA, 19 bp, Mus musculus
  siRNA target sequence for Tex16 (NM_031382.1,2815-2833).
gtcctagacactaaacatt

SEQ ID NO: 743394 - DNA, 19 bp, Mus musculus
  siRNA target sequence for Tex16 (NM_031382.1,2825-2843).
ctaaacattcccctagatt

SEQ ID NO: 743395 - DNA, 19 bp, Mus musculus
  siRNA target sequence for Tex16 (NM_031382.1,2855-2873).
ggagtttcaatgttatcat

SEQ ID NO: 743396 - DNA, 19 bp, Mus musculus
  siRNA target sequence for Tex16 (NM_031382.1,2866-2884).
gttatcatcagcccaaatt

SEQ ID NO: 743397 - DNA, 19 bp, Mus musculus
  siRNA target sequence for Tex16 (NM_031382.1,2877-2895).
cccaaattataatactaaa

SEQ ID NO: 743398 - DNA, 19 bp, Mus musculus
  siRNA target sequence for Tex16 (NM_031382.1,2918-2936).
ccagtatcagcaatattta

SEQ ID NO: 743399 - DNA, 19 bp, Mus musculus
  siRNA target sequence for Tex16 (NM_031382.1,2944-2962).
cctgccactgaattagaaa

SEQ ID NO: 743400 - DNA, 19 bp, Mus musculus
  siRNA target sequence for Tex16 (NM_031382.1,3027-3045).
ctatcctgattttttgata

SEQ ID NO: 743401 - DNA, 19 bp, Mus musculus
  siRNA target sequence for Tex16 (NM_031382.1,3072-3090).
gctttgtagagcttataaa

SEQ ID NO: 743402 - DNA, 19 bp, Mus musculus
  siRNA target sequence for Tex16 (NM_031382.1,3073-3091).
ctttgtagagcttataaaa

SEQ ID NO: 743403 - DNA, 19 bp, Mus musculus
  siRNA target sequence for Tex16 (NM_031382.1,3080-3098).
gagcttataaaatttttga

SEQ ID NO: 743404 - DNA, 19 bp, Mus musculus
  siRNA target sequence for Tex16 (NM_031382.1,3265-3283).
cctttcaaggtgttttcaa

SEQ ID NO: 743405 - DNA, 19 bp, Mus musculus
  siRNA target sequence for Tex16 (NM_031382.1,3266-3284).
ctttcaaggtgttttcaaa

SEQ ID NO: 743406 - DNA, 19 bp, Mus musculus
  siRNA target sequence for Tex16 (NM_031382.1,3298-3316).
gtccctagtttcgatgtta

SEQ ID NO: 743407 - DNA, 19 bp, Mus musculus
  siRNA target sequence for Tex16 (NM_031382.1,3300-3318).
ccctagtttcgatgttata

SEQ ID NO: 743408 - DNA, 19 bp, Mus musculus
  siRNA target sequence for Tex16 (NM_031382.1,3302-3320).
ctagtttcgatgttatagt

SEQ ID NO: 743409 - DNA, 19 bp, Mus musculus
  siRNA target sequence for Tex16 (NM_031382.1,3325-3343).
gctgaactgccagatatta

SEQ ID NO: 743410 - DNA, 19 bp, Mus musculus
  siRNA target sequence for Tex16 (NM_031382.1,3326-3344).
ctgaactgccagatattat

SEQ ID NO: 743411 - DNA, 19 bp, Mus musculus
  siRNA target sequence for Tex16 (NM_031382.1,3331-3349).
ctgccagatattatgaagt

SEQ ID NO: 743412 - DNA, 19 bp, Mus musculus
  siRNA target sequence for Tex16 (NM_031382.1,3334-3352).
ccagatattatgaagttta

SEQ ID NO: 743413 - DNA, 19 bp, Mus musculus
  siRNA target sequence for Tex16 (NM_031382.1,3368-3386).
ctgtgaatcaattatttca

SEQ ID NO: 743414 - DNA, 19 bp, Mus musculus
  siRNA target sequence for Tex11 (NM_031384.1,150-168).
ggaccgcattactgacttt

SEQ ID NO: 743415 - DNA, 19 bp, Mus musculus
  siRNA target sequence for Tex11 (NM_031384.1,151-169).
gaccgcattactgactttt

SEQ ID NO: 743416 - DNA, 19 bp, Mus musculus
  siRNA target sequence for Tex11 (NM_031384.1,154-172).
cgcattactgacttttact

SEQ ID NO: 743417 - DNA, 19 bp, Mus musculus
  siRNA target sequence for Tex11 (NM_031384.1,155-173).
gcattactgacttttactt

SEQ ID NO: 743418 - DNA, 19 bp, Mus musculus
  siRNA target sequence for Tex11 (NM_031384.1,177-195).
ggacttcagagaatctgtt

SEQ ID NO: 743419 - DNA, 19 bp, Mus musculus
  siRNA target sequence for Tex11 (NM_031384.1,193-211).
gttaaaaccctgatcataa

SEQ ID NO: 743420 - DNA, 19 bp, Mus musculus
  siRNA target sequence for Tex11 (NM_031384.1,201-219).
cctgatcataactggtaat

SEQ ID NO: 743421 - DNA, 19 bp, Mus musculus
  siRNA target sequence for Tex11 (NM_031384.1,202-220).
ctgatcataactggtaatt

SEQ ID NO: 743422 - DNA, 19 bp, Mus musculus
  siRNA target sequence for Tex11 (NM_031384.1,221-239).
catggagactacaagaaat

SEQ ID NO: 743423 - DNA, 19 bp, Mus musculus
  siRNA target sequence for Tex11 (NM_031384.1,224-242).
ggagactacaagaaatgat

SEQ ID NO: 743424 - DNA, 19 bp, Mus musculus
  siRNA target sequence for Tex11 (NM_031384.1,227-245).
gactacaagaaatgattga

SEQ ID NO: 743425 - DNA, 19 bp, Mus musculus
  siRNA target sequence for Tex11 (NM_031384.1,246-264).
cagattcttcacaaacata

SEQ ID NO: 743426 - DNA, 19 bp, Mus musculus
  siRNA target sequence for Tex11 (NM_031384.1,252-270).
cttcacaaacatatcaaat

SEQ ID NO: 743427 - DNA, 19 bp, Mus musculus
  siRNA target sequence for Tex11 (NM_031384.1,278-296).
gagagtctctgactgaaat

SEQ ID NO: 743428 - DNA, 19 bp, Mus musculus
  siRNA target sequence for Tex11 (NM_031384.1,292-310).
gaaatacagaatattcaga

SEQ ID NO: 743429 - DNA, 19 bp, Mus musculus
  siRNA target sequence for Tex11 (NM_031384.1,333-351).
gtggaactgggcagttact

SEQ ID NO: 743430 - DNA, 19 bp, Mus musculus
  siRNA target sequence for Tex11 (NM_031384.1,386-404).
cagctaaactgtgttatat

SEQ ID NO: 743431 - DNA, 19 bp, Mus musculus
  siRNA target sequence for Tex11 (NM_031384.1,406-424).
gcttgcaagctggtatata

SEQ ID NO: 743432 - DNA, 19 bp, Mus musculus
  siRNA target sequence for Tex11 (NM_031384.1,410-428).
gcaagctggtatatatgca

SEQ ID NO: 743433 - DNA, 19 bp, Mus musculus
  siRNA target sequence for Tex11 (NM_031384.1,411-429).
caagctggtatatatgcat

SEQ ID NO: 743434 - DNA, 19 bp, Mus musculus
  siRNA target sequence for Tex11 (NM_031384.1,490-508).
ggaaaagagtggttgtata

SEQ ID NO: 743435 - DNA, 19 bp, Mus musculus
  siRNA target sequence for Tex11 (NM_031384.1,554-572).
ctgatctggagagattata

SEQ ID NO: 743436 - DNA, 19 bp, Mus musculus
  siRNA target sequence for Tex11 (NM_031384.1,559-577).
ctggagagattatatgtca

SEQ ID NO: 743437 - DNA, 19 bp, Mus musculus
  siRNA target sequence for Tex11 (NM_031384.1,566-584).
gattatatgtcagattaat

SEQ ID NO: 743438 - DNA, 19 bp, Mus musculus
  siRNA target sequence for Tex11 (NM_031384.1,604-622).
gccaacgtgtgtgtgtata

SEQ ID NO: 743439 - DNA, 19 bp, Mus musculus
  siRNA target sequence for Tex11 (NM_031384.1,648-666).
ccatgtgctttcttaccaa

SEQ ID NO: 743440 - DNA, 19 bp, Mus musculus
  siRNA target sequence for Tex11 (NM_031384.1,679-697).
gttgctcaaggggatttca

SEQ ID NO: 743441 - DNA, 19 bp, Mus musculus
  siRNA target sequence for Tex11 (NM_031384.1,682-700).
gctcaaggggatttcaaga

SEQ ID NO: 743442 - DNA, 19 bp, Mus musculus
  siRNA target sequence for Tex11 (NM_031384.1,711-729).
gtgcgtcttacgttgcaaa

SEQ ID NO: 743443 - DNA, 19 bp, Mus musculus
  siRNA target sequence for Tex11 (NM_031384.1,714-732).
cgtcttacgttgcaaagat

SEQ ID NO: 743444 - DNA, 19 bp, Mus musculus
  siRNA target sequence for Tex11 (NM_031384.1,715-733).
gtcttacgttgcaaagata

SEQ ID NO: 743445 - DNA, 19 bp, Mus musculus
  siRNA target sequence for Tex11 (NM_031384.1,743-761).
gactccctaacatgacaaa

SEQ ID NO: 743446 - DNA, 19 bp, Mus musculus
  siRNA target sequence for Tex11 (NM_031384.1,745-763).
ctccctaacatgacaaaat

SEQ ID NO: 743447 - DNA, 19 bp, Mus musculus
  siRNA target sequence for Tex11 (NM_031384.1,749-767).
ctaacatgacaaaatatct

SEQ ID NO: 743448 - DNA, 19 bp, Mus musculus
  siRNA target sequence for Tex11 (NM_031384.1,766-784).
cttcatgtactctgttaca

SEQ ID NO: 743449 - DNA, 19 bp, Mus musculus
  siRNA target sequence for Tex11 (NM_031384.1,799-817).
gcaagcaagcggaataaat

SEQ ID NO: 743450 - DNA, 19 bp, Mus musculus
  siRNA target sequence for Tex11 (NM_031384.1,800-818).
caagcaagcggaataaata

SEQ ID NO: 743451 - DNA, 19 bp, Mus musculus
  siRNA target sequence for Tex11 (NM_031384.1,803-821).
gcaagcggaataaatacaa

SEQ ID NO: 743452 - DNA, 19 bp, Mus musculus
  siRNA target sequence for Tex11 (NM_031384.1,875-893).
gttctgttgagccacaaat

SEQ ID NO: 743453 - DNA, 19 bp, Mus musculus
  siRNA target sequence for Tex11 (NM_031384.1,886-904).
ccacaaatgctggctaaaa

SEQ ID NO: 743454 - DNA, 19 bp, Mus musculus
  siRNA target sequence for Tex11 (NM_031384.1,909-927).
gcggttactagccactatt

SEQ ID NO: 743455 - DNA, 19 bp, Mus musculus
  siRNA target sequence for Tex11 (NM_031384.1,910-928).
cggttactagccactattt

SEQ ID NO: 743456 - DNA, 19 bp, Mus musculus
  siRNA target sequence for Tex11 (NM_031384.1,911-929).
ggttactagccactattta

SEQ ID NO: 743457 - DNA, 19 bp, Mus musculus
  siRNA target sequence for Tex11 (NM_031384.1,912-930).
gttactagccactatttat

SEQ ID NO: 743458 - DNA, 19 bp, Mus musculus
  siRNA target sequence for Tex11 (NM_031384.1,916-934).
ctagccactatttatttga

SEQ ID NO: 743459 - DNA, 19 bp, Mus musculus
  siRNA target sequence for Tex11 (NM_031384.1,943-961).
ggcgaagcatattatacca

SEQ ID NO: 743460 - DNA, 19 bp, Mus musculus
  siRNA target sequence for Tex11 (NM_031384.1,960-978).
caaggccttcattgctata

SEQ ID NO: 743461 - DNA, 19 bp, Mus musculus
  siRNA target sequence for Tex11 (NM_031384.1,964-982).
gccttcattgctatactca

SEQ ID NO: 743462 - DNA, 19 bp, Mus musculus
  siRNA target sequence for Tex11 (NM_031384.1,965-983).
ccttcattgctatactcat

SEQ ID NO: 743463 - DNA, 19 bp, Mus musculus
  siRNA target sequence for Tex11 (NM_031384.1,966-984).
cttcattgctatactcatt

SEQ ID NO: 743464 - DNA, 19 bp, Mus musculus
  siRNA target sequence for Tex11 (NM_031384.1,974-992).
ctatactcattgcaaacaa

SEQ ID NO: 743465 - DNA, 19 bp, Mus musculus
  siRNA target sequence for Tex11 (NM_031384.1,1036-1054).
ctcatgaaaggcaactcat

SEQ ID NO: 743466 - DNA, 19 bp, Mus musculus
  siRNA target sequence for Tex11 (NM_031384.1,1041-1059).
gaaaggcaactcatgtaat

SEQ ID NO: 743467 - DNA, 19 bp, Mus musculus
  siRNA target sequence for Tex11 (NM_031384.1,1132-1150).
caattcctgatagataata

SEQ ID NO: 743468 - DNA, 19 bp, Mus musculus
  siRNA target sequence for Tex11 (NM_031384.1,1137-1155).
cctgatagataataaaaga

SEQ ID NO: 743469 - DNA, 19 bp, Mus musculus
  siRNA target sequence for Tex11 (NM_031384.1,1166-1184).
ggtttcgctttctgagaat

SEQ ID NO: 743470 - DNA, 19 bp, Mus musculus
  siRNA target sequence for Tex11 (NM_031384.1,1171-1189).
cgctttctgagaatcatct

SEQ ID NO: 743471 - DNA, 19 bp, Mus musculus
  siRNA target sequence for Tex11 (NM_031384.1,1228-1246).
ctgttgttctacattgaca

SEQ ID NO: 743472 - DNA, 19 bp, Mus musculus
  siRNA target sequence for Tex11 (NM_031384.1,1236-1254).
ctacattgacacgctttta

SEQ ID NO: 743473 - DNA, 19 bp, Mus musculus
  siRNA target sequence for Tex11 (NM_031384.1,1239-1257).
cattgacacgcttttacaa

SEQ ID NO: 743474 - DNA, 19 bp, Mus musculus
  siRNA target sequence for Tex11 (NM_031384.1,1245-1263).
cacgcttttacaaaaggat

SEQ ID NO: 743475 - DNA, 19 bp, Mus musculus
  siRNA target sequence for Tex11 (NM_031384.1,1300-1318).
cttaaaggttaccaaacaa

SEQ ID NO: 743476 - DNA, 19 bp, Mus musculus
  siRNA target sequence for Tex11 (NM_031384.1,1322-1340).
gtcgactgtcaagagattt

SEQ ID NO: 743477 - DNA, 19 bp, Mus musculus
  siRNA target sequence for Tex11 (NM_031384.1,1334-1352).
gagatttggtaaattggtt

SEQ ID NO: 743478 - DNA, 19 bp, Mus musculus
  siRNA target sequence for Tex11 (NM_031384.1,1385-1403).
gtgttaaggtccaaaaata

SEQ ID NO: 743479 - DNA, 19 bp, Mus musculus
  siRNA target sequence for Tex11 (NM_031384.1,1411-1429).
gccctacactggtacagtt

SEQ ID NO: 743480 - DNA, 19 bp, Mus musculus
  siRNA target sequence for Tex11 (NM_031384.1,1414-1432).
ctacactggtacagttatt

SEQ ID NO: 743481 - DNA, 19 bp, Mus musculus
  siRNA target sequence for Tex11 (NM_031384.1,1433-1451).
ctctgaagttgtatgagta

SEQ ID NO: 743482 - DNA, 19 bp, Mus musculus
  siRNA target sequence for Tex11 (NM_031384.1,1440-1458).
gttgtatgagtatgataaa

SEQ ID NO: 743483 - DNA, 19 bp, Mus musculus
  siRNA target sequence for Tex11 (NM_031384.1,1443-1461).
gtatgagtatgataaagca

SEQ ID NO: 743484 - DNA, 19 bp, Mus musculus
  siRNA target sequence for Tex11 (NM_031384.1,1506-1524).
cttatctttgaaacaactt

SEQ ID NO: 743485 - DNA, 19 bp, Mus musculus
  siRNA target sequence for Tex11 (NM_031384.1,1557-1575).
gcaaaaggatcctacacat

SEQ ID NO: 743486 - DNA, 19 bp, Mus musculus
  siRNA target sequence for Tex11 (NM_031384.1,1564-1582).
gatcctacacatgttttca

SEQ ID NO: 743487 - DNA, 19 bp, Mus musculus
  siRNA target sequence for Tex11 (NM_031384.1,1576-1594).
gttttcactcggtattata

SEQ ID NO: 743488 - DNA, 19 bp, Mus musculus
  siRNA target sequence for Tex11 (NM_031384.1,1583-1601).
ctcggtattatatattcaa

SEQ ID NO: 743489 - DNA, 19 bp, Mus musculus
  siRNA target sequence for Tex11 (NM_031384.1,1585-1603).
cggtattatatattcaaga

SEQ ID NO: 743490 - DNA, 19 bp, Mus musculus
  siRNA target sequence for Tex11 (NM_031384.1,1642-1660).
gtggtcagtgctttaaaga

SEQ ID NO: 743491 - DNA, 19 bp, Mus musculus
  siRNA target sequence for Tex11 (NM_031384.1,1647-1665).
cagtgctttaaagaaatca

SEQ ID NO: 743492 - DNA, 19 bp, Mus musculus
  siRNA target sequence for Tex11 (NM_031384.1,1720-1738).
ctcacaatcctaagtttat

SEQ ID NO: 743493 - DNA, 19 bp, Mus musculus
  siRNA target sequence for Tex11 (NM_031384.1,1724-1742).
caatcctaagtttatctat

SEQ ID NO: 743494 - DNA, 19 bp, Mus musculus
  siRNA target sequence for Tex11 (NM_031384.1,1728-1746).
cctaagtttatctatagat

SEQ ID NO: 743495 - DNA, 19 bp, Mus musculus
  siRNA target sequence for Tex11 (NM_031384.1,1729-1747).
ctaagtttatctatagatt

SEQ ID NO: 743496 - DNA, 19 bp, Mus musculus
  siRNA target sequence for Tex11 (NM_031384.1,1825-1843).
gaagtacttggaggtttaa

SEQ ID NO: 743497 - DNA, 19 bp, Mus musculus
  siRNA target sequence for Tex11 (NM_031384.1,1828-1846).
gtacttggaggtttaaagt

SEQ ID NO: 743498 - DNA, 19 bp, Mus musculus
  siRNA target sequence for Tex11 (NM_031384.1,1847-1865).
gtctcatgcggattattct

SEQ ID NO: 743499 - DNA, 19 bp, Mus musculus
  siRNA target sequence for Tex11 (NM_031384.1,1879-1897).
catatgccagaatctgaat

SEQ ID NO: 743500 - DNA, 19 bp, Mus musculus
  siRNA target sequence for Tex11 (NM_031384.1,1905-1923).
gaaagaaatgggtagactt

SEQ ID NO: 743501 - DNA, 19 bp, Mus musculus
  siRNA target sequence for Tex11 (NM_031384.1,1916-1934).
gtagactttggaactactt

SEQ ID NO: 743502 - DNA, 19 bp, Mus musculus
  siRNA target sequence for Tex11 (NM_031384.1,1947-1965).
cctgaaattttctgaatat

SEQ ID NO: 743503 - DNA, 19 bp, Mus musculus
  siRNA target sequence for Tex11 (NM_031384.1,1948-1966).
ctgaaattttctgaatatt

SEQ ID NO: 743504 - DNA, 19 bp, Mus musculus
  siRNA target sequence for Tex11 (NM_031384.1,1975-1993).
gctccctcaactttggatt

SEQ ID NO: 743505 - DNA, 19 bp, Mus musculus
  siRNA target sequence for Tex11 (NM_031384.1,1976-1994).
ctccctcaactttggatta

SEQ ID NO: 743506 - DNA, 19 bp, Mus musculus
  siRNA target sequence for Tex11 (NM_031384.1,1979-1997).
cctcaactttggattatat

SEQ ID NO: 743507 - DNA, 19 bp, Mus musculus
  siRNA target sequence for Tex11 (NM_031384.1,1999-2017).
gttaatgatgccaattggt

SEQ ID NO: 743508 - DNA, 19 bp, Mus musculus
  siRNA target sequence for Tex11 (NM_031384.1,2008-2026).
gccaattggttcaggaaaa

SEQ ID NO: 743509 - DNA, 19 bp, Mus musculus
  siRNA target sequence for Tex11 (NM_031384.1,2009-2027).
ccaattggttcaggaaaat

SEQ ID NO: 743510 - DNA, 19 bp, Mus musculus
  siRNA target sequence for Tex11 (NM_031384.1,2212-2230).
gagcagaacatgttactaa

SEQ ID NO: 743511 - DNA, 19 bp, Mus musculus
  siRNA target sequence for Tex11 (NM_031384.1,2217-2235).
gaacatgttactaagaaca

SEQ ID NO: 743512 - DNA, 19 bp, Mus musculus
  siRNA target sequence for Tex11 (NM_031384.1,2328-2346).
gctctatgaatttgaagtt

SEQ ID NO: 743513 - DNA, 19 bp, Mus musculus
  siRNA target sequence for Tex11 (NM_031384.1,2397-2415).
gaagatgcctgatttagaa

SEQ ID NO: 743514 - DNA, 19 bp, Mus musculus
  siRNA target sequence for Tex11 (NM_031384.1,2432-2450).
caatggcattactagctat

SEQ ID NO: 743515 - DNA, 19 bp, Mus musculus
  siRNA target sequence for Tex11 (NM_031384.1,2437-2455).
gcattactagctatggata

SEQ ID NO: 743516 - DNA, 19 bp, Mus musculus
  siRNA target sequence for Tex11 (NM_031384.1,2451-2469).
ggataaacctgcatactat

SEQ ID NO: 743517 - DNA, 19 bp, Mus musculus
  siRNA target sequence for Tex11 (NM_031384.1,2480-2498).
cacataaggccatgaaaaa

SEQ ID NO: 743518 - DNA, 19 bp, Mus musculus
  siRNA target sequence for Tex11 (NM_031384.1,2549-2567).
gcgtatgcatgcacaactt

SEQ ID NO: 743519 - DNA, 19 bp, Mus musculus
  siRNA target sequence for Tex11 (NM_031384.1,2551-2569).
gtatgcatgcacaacttga

SEQ ID NO: 743520 - DNA, 19 bp, Mus musculus
  siRNA target sequence for Tex11 (NM_031384.1,2555-2573).
gcatgcacaacttgattaa

SEQ ID NO: 743521 - DNA, 19 bp, Mus musculus
  siRNA target sequence for Tex11 (NM_031384.1,2584-2602).
gcagatgaagtatggaata

SEQ ID NO: 743522 - DNA, 19 bp, Mus musculus
  siRNA target sequence for Tex11 (NM_031384.1,2606-2624).
cgctgtatcccctaaaaga

SEQ ID NO: 743523 - DNA, 19 bp, Mus musculus
  siRNA target sequence for Tex11 (NM_031384.1,2654-2672).
gcatcattcgccaaaacga

SEQ ID NO: 743524 - DNA, 19 bp, Mus musculus
  siRNA target sequence for Tex11 (NM_031384.1,2706-2724).
gatcaagtcttggaatatt

SEQ ID NO: 743525 - DNA, 19 bp, Mus musculus
  siRNA target sequence for Tex11 (NM_031384.1,2712-2730).
gtcttggaatattggaata

SEQ ID NO: 743526 - DNA, 19 bp, Mus musculus
  siRNA target sequence for Tex11 (NM_031384.1,2714-2732).
cttggaatattggaatact

SEQ ID NO: 743527 - DNA, 19 bp, Mus musculus
  siRNA target sequence for Tex11 (NM_031384.1,2736-2754).
gtctagcaagaacaagtat

SEQ ID NO: 743528 - DNA, 19 bp, Mus musculus
  siRNA target sequence for Tex11 (NM_031384.1,2742-2760).
caagaacaagtatatatct

SEQ ID NO: 743529 - DNA, 19 bp, Mus musculus
  siRNA target sequence for Tex11 (NM_031384.1,2773-2791).
gctgcaatggcattggatt

SEQ ID NO: 743530 - DNA, 19 bp, Mus musculus
  siRNA target sequence for Tex11 (NM_031384.1,2774-2792).
ctgcaatggcattggattt

SEQ ID NO: 743531 - DNA, 19 bp, Mus musculus
  siRNA target sequence for Tex11 (NM_031384.1,2802-2820).
ccttagcaccctcaaaaca

SEQ ID NO: 743532 - DNA, 19 bp, Mus musculus
  siRNA target sequence for Tex11 (NM_031384.1,2803-2821).
cttagcaccctcaaaacaa

SEQ ID NO: 743533 - DNA, 19 bp, Mus musculus
  siRNA target sequence for Tex11 (NM_031384.1,2863-2881).
gaaatattagataaaaaga

SEQ ID NO: 743534 - DNA, 19 bp, Mus musculus
  siRNA target sequence for Tex11 (NM_031384.1,2872-2890).
gataaaaagacggatttaa

SEQ ID NO: 743535 - DNA, 19 bp, Mus musculus
  siRNA target sequence for Tex11 (NM_031384.1,2880-2898).
gacggatttaagatctaca

SEQ ID NO: 743536 - DNA, 19 bp, Mus musculus
  siRNA target sequence for Tex18 (NM_031385.1,911-929).
ggaatcattgccctttgat

SEQ ID NO: 743537 - DNA, 19 bp, Mus musculus
  siRNA target sequence for Tex18 (NM_031385.1,937-955).
ggagtttgcctccttttaa

SEQ ID NO: 743538 - DNA, 19 bp, Mus musculus
  siRNA target sequence for Tex18 (NM_031385.1,970-988).
gtgtggggctccagaaagt

SEQ ID NO: 743539 - DNA, 19 bp, Mus musculus
  siRNA target sequence for Tex18 (NM_031385.1,972-990).
gtggggctccagaaagtat

SEQ ID NO: 743540 - DNA, 19 bp, Mus musculus
  siRNA target sequence for Tex18 (NM_031385.1,974-992).
ggggctccagaaagtatta

SEQ ID NO: 743541 - DNA, 19 bp, Mus musculus
  siRNA target sequence for Tex18 (NM_031385.1,976-994).
ggctccagaaagtattaca

SEQ ID NO: 743542 - DNA, 19 bp, Mus musculus
  siRNA target sequence for Tex18 (NM_031385.1,1015-1033).
gcttgtaatatttgtaaca

SEQ ID NO: 743543 - DNA, 19 bp, Mus musculus
  siRNA target sequence for Tex18 (NM_031385.1,1070-1088).
ggacacattcgtcaattct

SEQ ID NO: 743544 - DNA, 19 bp, Mus musculus
  siRNA target sequence for Tex18 (NM_031385.1,1082-1100).
caattctgagaacttgtta

SEQ ID NO: 743545 - DNA, 19 bp, Mus musculus
  siRNA target sequence for Rnh2 (NM_031389.1,337-355).
ccaagataagaccaaaaca

SEQ ID NO: 743546 - DNA, 19 bp, Mus musculus
  siRNA target sequence for Rnh2 (NM_031389.1,348-366).
ccaaaacacaggaaatctt

SEQ ID NO: 743547 - DNA, 19 bp, Mus musculus
  siRNA target sequence for Rnh2 (NM_031389.1,575-593).
cagcttcagagcttgtgtt

SEQ ID NO: 743548 - DNA, 19 bp, Mus musculus
  siRNA target sequence for Rnh2 (NM_031389.1,1344-1362).
cagcctctttggtgttata

SEQ ID NO: 743549 - DNA, 19 bp, Mus musculus
  siRNA target sequence for Rnh2 (NM_031389.1,1350-1368).
ctttggtgttatatagtca

SEQ ID NO: 743550 - DNA, 19 bp, Mus musculus
  siRNA target sequence for Rnh2 (NM_031389.1,1415-1433).
gtgaccttcctatgtgata

SEQ ID NO: 743551 - DNA, 19 bp, Mus musculus
  siRNA target sequence for Rnh2 (NM_031389.1,2230-2248).
gtgtaccctgcatgtactt

SEQ ID NO: 743552 - DNA, 19 bp, Mus musculus
  siRNA target sequence for Rnh2 (NM_031389.1,2315-2333).
ccacacttgagcatcctaa

SEQ ID NO: 743553 - DNA, 19 bp, Mus musculus
  siRNA target sequence for Wdr6 (NM_031392.2,84-102).
gctttcggggactatgtct

SEQ ID NO: 743554 - DNA, 19 bp, Mus musculus
  siRNA target sequence for Wdr6 (NM_031392.2,112-130).
cgacttccgagctcatact

SEQ ID NO: 743555 - DNA, 19 bp, Mus musculus
  siRNA target sequence for Wdr6 (NM_031392.2,178-196).
gcgaggggcctgatttact

SEQ ID NO: 743556 - DNA, 19 bp, Mus musculus
  siRNA target sequence for Wdr6 (NM_031392.2,187-205).
ctgatttactggtgtacaa

SEQ ID NO: 743557 - DNA, 19 bp, Mus musculus
  siRNA target sequence for Wdr6 (NM_031392.2,248-266).
gaacctgcttggtcacttt

SEQ ID NO: 743558 - DNA, 19 bp, Mus musculus
  siRNA target sequence for Wdr6 (NM_031392.2,340-358).
ggagcaagggcctcaaagt

SEQ ID NO: 743559 - DNA, 19 bp, Mus musculus
  siRNA target sequence for Wdr6 (NM_031392.2,341-359).
gagcaagggcctcaaagtt

SEQ ID NO: 743560 - DNA, 19 bp, Mus musculus
  siRNA target sequence for Wdr6 (NM_031392.2,349-367).
gcctcaaagttgtgaaagt

SEQ ID NO: 743561 - DNA, 19 bp, Mus musculus
  siRNA target sequence for Wdr6 (NM_031392.2,446-464).
ctggatcgagggtaacgta

SEQ ID NO: 743562 - DNA, 19 bp, Mus musculus
  siRNA target sequence for Wdr6 (NM_031392.2,482-500).
caactcggtggtactgtat

SEQ ID NO: 743563 - DNA, 19 bp, Mus musculus
  siRNA target sequence for Wdr6 (NM_031392.2,649-667).
ctgctttaacagacaacaa

SEQ ID NO: 743564 - DNA, 19 bp, Mus musculus
  siRNA target sequence for Wdr6 (NM_031392.2,699-717).
catgtgggtgtcatcttta

SEQ ID NO: 743565 - DNA, 19 bp, Mus musculus
  siRNA target sequence for Wdr6 (NM_031392.2,746-764).
gctggcaactgcttcagaa

SEQ ID NO: 743566 - DNA, 19 bp, Mus musculus
  siRNA target sequence for Wdr6 (NM_031392.2,808-826).
ctgggggtcgggttcagaa

SEQ ID NO: 743567 - DNA, 19 bp, Mus musculus
  siRNA target sequence for Wdr6 (NM_031392.2,810-828).
gggggtcgggttcagaata

SEQ ID NO: 743568 - DNA, 19 bp, Mus musculus
  siRNA target sequence for Wdr6 (NM_031392.2,811-829).
ggggtcgggttcagaatat

SEQ ID NO: 743569 - DNA, 19 bp, Mus musculus
  siRNA target sequence for Wdr6 (NM_031392.2,812-830).
gggtcgggttcagaatatt

SEQ ID NO: 743570 - DNA, 19 bp, Mus musculus
  siRNA target sequence for Wdr6 (NM_031392.2,869-887).
gaagctcttagagaactat

SEQ ID NO: 743571 - DNA, 19 bp, Mus musculus
  siRNA target sequence for Wdr6 (NM_031392.2,1357-1375).
ctgccgtcgagcagaaact

SEQ ID NO: 743572 - DNA, 19 bp, Mus musculus
  siRNA target sequence for Wdr6 (NM_031392.2,1359-1377).
gccgtcgagcagaaactgt

SEQ ID NO: 743573 - DNA, 19 bp, Mus musculus
  siRNA target sequence for Wdr6 (NM_031392.2,1360-1378).
ccgtcgagcagaaactgtt

SEQ ID NO: 743574 - DNA, 19 bp, Mus musculus
  siRNA target sequence for Wdr6 (NM_031392.2,1417-1435).
gttacgaggagctgctttt

SEQ ID NO: 743575 - DNA, 19 bp, Mus musculus
  siRNA target sequence for Wdr6 (NM_031392.2,1425-1443).
gagctgcttttgttagcat

SEQ ID NO: 743576 - DNA, 19 bp, Mus musculus
  siRNA target sequence for Wdr6 (NM_031392.2,1449-1467).
cctggtggggtgatagctt

SEQ ID NO: 743577 - DNA, 19 bp, Mus musculus
  siRNA target sequence for Wdr6 (NM_031392.2,1489-1507).
ccactggcaaggctatctt

SEQ ID NO: 743578 - DNA, 19 bp, Mus musculus
  siRNA target sequence for Wdr6 (NM_031392.2,1494-1512).
ggcaaggctatctttgtca

SEQ ID NO: 743579 - DNA, 19 bp, Mus musculus
  siRNA target sequence for Wdr6 (NM_031392.2,1495-1513).
gcaaggctatctttgtcaa

SEQ ID NO: 743580 - DNA, 19 bp, Mus musculus
  siRNA target sequence for Wdr6 (NM_031392.2,1611-1629).
cgtggctctgtgatgctat

SEQ ID NO: 743581 - DNA, 19 bp, Mus musculus
  siRNA target sequence for Wdr6 (NM_031392.2,1612-1630).
gtggctctgtgatgctatt

SEQ ID NO: 743582 - DNA, 19 bp, Mus musculus
  siRNA target sequence for Wdr6 (NM_031392.2,1631-1649).
ccctgtcagaccatgtcta

SEQ ID NO: 743583 - DNA, 19 bp, Mus musculus
  siRNA target sequence for Wdr6 (NM_031392.2,1635-1653).
gtcagaccatgtctattca

SEQ ID NO: 743584 - DNA, 19 bp, Mus musculus
  siRNA target sequence for Wdr6 (NM_031392.2,1667-1685).
cggaagcaaggctattact

SEQ ID NO: 743585 - DNA, 19 bp, Mus musculus
  siRNA target sequence for Wdr6 (NM_031392.2,1785-1803).
cagggtgtgacctcagtta

SEQ ID NO: 743586 - DNA, 19 bp, Mus musculus
  siRNA target sequence for Wdr6 (NM_031392.2,1902-1920).
gcctgtcgaggcatgaact

SEQ ID NO: 743587 - DNA, 19 bp, Mus musculus
  siRNA target sequence for Wdr6 (NM_031392.2,1973-1991).
ccatgccaacgagtttgta

SEQ ID NO: 743588 - DNA, 19 bp, Mus musculus
  siRNA target sequence for Wdr6 (NM_031392.2,2170-2188).
gtctgcatggccgtgaaat

SEQ ID NO: 743589 - DNA, 19 bp, Mus musculus
  siRNA target sequence for Wdr6 (NM_031392.2,2174-2192).
gcatggccgtgaaatcaca

SEQ ID NO: 743590 - DNA, 19 bp, Mus musculus
  siRNA target sequence for Wdr6 (NM_031392.2,2175-2193).
catggccgtgaaatcacat

SEQ ID NO: 743591 - DNA, 19 bp, Mus musculus
  siRNA target sequence for Wdr6 (NM_031392.2,2180-2198).
ccgtgaaatcacatgtgta

SEQ ID NO: 743592 - DNA, 19 bp, Mus musculus
  siRNA target sequence for Wdr6 (NM_031392.2,2181-2199).
cgtgaaatcacatgtgtaa

SEQ ID NO: 743593 - DNA, 19 bp, Mus musculus
  siRNA target sequence for Wdr6 (NM_031392.2,2283-2301).
gggcctggtctgattgaca

SEQ ID NO: 743594 - DNA, 19 bp, Mus musculus
  siRNA target sequence for Wdr6 (NM_031392.2,2285-2303).
gcctggtctgattgacata

SEQ ID NO: 743595 - DNA, 19 bp, Mus musculus
  siRNA target sequence for Wdr6 (NM_031392.2,2289-2307).
ggtctgattgacatagtga

SEQ ID NO: 743596 - DNA, 19 bp, Mus musculus
  siRNA target sequence for Wdr6 (NM_031392.2,2568-2586).
catgtcatgcacctttcat

SEQ ID NO: 743597 - DNA, 19 bp, Mus musculus
  siRNA target sequence for Wdr6 (NM_031392.2,2587-2605).
cccaccggctggatgagta

SEQ ID NO: 743598 - DNA, 19 bp, Mus musculus
  siRNA target sequence for Wdr6 (NM_031392.2,2885-2903).
gtgcagtgcagctacagat

SEQ ID NO: 743599 - DNA, 19 bp, Mus musculus
  siRNA target sequence for Wdr6 (NM_031392.2,3024-3042).
catagctgtggcgtcaata

SEQ ID NO: 743600 - DNA, 19 bp, Mus musculus
  siRNA target sequence for Wdr6 (NM_031392.2,3170-3188).
gctggtgccccagttatgt

SEQ ID NO: 743601 - DNA, 19 bp, Mus musculus
  siRNA target sequence for Wdr6 (NM_031392.2,3315-3333).
ggtgagcccaccttcatga

SEQ ID NO: 743602 - DNA, 19 bp, Mus musculus
  siRNA target sequence for Wdr6 (NM_031392.2,3421-3439).
gtcagggacttgaggttta

SEQ ID NO: 743603 - DNA, 19 bp, Mus musculus
  siRNA target sequence for Wdr6 (NM_031392.2,3426-3444).
ggacttgaggtttacaact

SEQ ID NO: 743604 - DNA, 19 bp, Mus musculus
  siRNA target sequence for Cnnm1 (NM_031396.1,394-412).
gagatcagcaccttctaca

SEQ ID NO: 743605 - DNA, 19 bp, Mus musculus
  siRNA target sequence for Cnnm1 (NM_031396.1,541-559).
ctaggggactgcttcatgt

SEQ ID NO: 743606 - DNA, 19 bp, Mus musculus
  siRNA target sequence for Cnnm1 (NM_031396.1,566-584).
ctgacgccgtgcttgactt

SEQ ID NO: 743607 - DNA, 19 bp, Mus musculus
  siRNA target sequence for Cnnm1 (NM_031396.1,577-595).
cttgacttcgccactgtat

SEQ ID NO: 743608 - DNA, 19 bp, Mus musculus
  siRNA target sequence for Cnnm1 (NM_031396.1,620-638).
ctcgcatcccggtgtatga

SEQ ID NO: 743609 - DNA, 19 bp, Mus musculus
  siRNA target sequence for Cnnm1 (NM_031396.1,641-659).
gcgaccagaggcacaacat

SEQ ID NO: 743610 - DNA, 19 bp, Mus musculus
  siRNA target sequence for Cnnm1 (NM_031396.1,642-660).
cgaccagaggcacaacatt

SEQ ID NO: 743611 - DNA, 19 bp, Mus musculus
  siRNA target sequence for Cnnm1 (NM_031396.1,988-1006).
gagagaaggcggcatgatt

SEQ ID NO: 743612 - DNA, 19 bp, Mus musculus
  siRNA target sequence for Cnnm1 (NM_031396.1,1137-1155).
gctccggcttctgaaacat

SEQ ID NO: 743613 - DNA, 19 bp, Mus musculus
  siRNA target sequence for Cnnm1 (NM_031396.1,1167-1185).
ccaggagcttaagtttgat

SEQ ID NO: 743614 - DNA, 19 bp, Mus musculus
  siRNA target sequence for Cnnm1 (NM_031396.1,1330-1348).
ggtgttccagccatcatga

SEQ ID NO: 743615 - DNA, 19 bp, Mus musculus
  siRNA target sequence for Cnnm1 (NM_031396.1,1631-1649).
cccagtccccggatatgga

SEQ ID NO: 743616 - DNA, 19 bp, Mus musculus
  siRNA target sequence for Cnnm1 (NM_031396.1,1919-1937).
ctgaatgctgtaatatcca

SEQ ID NO: 743617 - DNA, 19 bp, Mus musculus
  siRNA target sequence for Cnnm1 (NM_031396.1,2047-2065).
cgagcctccgaggaaaact

SEQ ID NO: 743618 - DNA, 19 bp, Mus musculus
  siRNA target sequence for Cnnm1 (NM_031396.1,2055-2073).
cgaggaaaactccaattta

SEQ ID NO: 743619 - DNA, 19 bp, Mus musculus
  siRNA target sequence for Usmg1 (NM_031398.1,315-333).
ctcctcacagctttttggt

SEQ ID NO: 743620 - DNA, 19 bp, Mus musculus
  siRNA target sequence for Usmg1 (NM_031398.1,480-498).
cggggaagacgatgttaca

SEQ ID NO: 743621 - DNA, 19 bp, Mus musculus
  siRNA target sequence for Usmg1 (NM_031398.1,481-499).
ggggaagacgatgttacaa

SEQ ID NO: 743622 - DNA, 19 bp, Mus musculus
  siRNA target sequence for Usmg4 (NM_031401.2,527-545).
gaacggaatgtggtaactt

SEQ ID NO: 743623 - DNA, 19 bp, Mus musculus
  siRNA target sequence for Usmg4 (NM_031401.2,530-548).
cggaatgtggtaacttcta

SEQ ID NO: 743624 - DNA, 19 bp, Mus musculus
  siRNA target sequence for Dbr1 (NM_031403.1,369-387).
cttctacagatattactct

SEQ ID NO: 743625 - DNA, 19 bp, Mus musculus
  siRNA target sequence for Dbr1 (NM_031403.1,417-435).
cttcattggaggaaaccat

SEQ ID NO: 743626 - DNA, 19 bp, Mus musculus
  siRNA target sequence for Dbr1 (NM_031403.1,473-491).
gctgggtagcgccgaatat

SEQ ID NO: 743627 - DNA, 19 bp, Mus musculus
  siRNA target sequence for Dbr1 (NM_031403.1,474-492).
ctgggtagcgccgaatatt

SEQ ID NO: 743628 - DNA, 19 bp, Mus musculus
  siRNA target sequence for Dbr1 (NM_031403.1,476-494).
gggtagcgccgaatattta

SEQ ID NO: 743629 - DNA, 19 bp, Mus musculus
  siRNA target sequence for Dbr1 (NM_031403.1,477-495).
ggtagcgccgaatatttat

SEQ ID NO: 743630 - DNA, 19 bp, Mus musculus
  siRNA target sequence for Dbr1 (NM_031403.1,478-496).
gtagcgccgaatatttatt

SEQ ID NO: 743631 - DNA, 19 bp, Mus musculus
  siRNA target sequence for Dbr1 (NM_031403.1,481-499).
gcgccgaatatttattatt

SEQ ID NO: 743632 - DNA, 19 bp, Mus musculus
  siRNA target sequence for Dbr1 (NM_031403.1,542-560).
gtggcatctctggcatatt

SEQ ID NO: 743633 - DNA, 19 bp, Mus musculus
  siRNA target sequence for Dbr1 (NM_031403.1,551-569).
ctggcatatttaaatctca

SEQ ID NO: 743634 - DNA, 19 bp, Mus musculus
  siRNA target sequence for Dbr1 (NM_031403.1,614-632).
ctaccataaggagtatata

SEQ ID NO: 743635 - DNA, 19 bp, Mus musculus
  siRNA target sequence for Dbr1 (NM_031403.1,617-635).
ccataaggagtatatatca

SEQ ID NO: 743636 - DNA, 19 bp, Mus musculus
  siRNA target sequence for Dbr1 (NM_031403.1,618-636).
cataaggagtatatatcat

SEQ ID NO: 743637 - DNA, 19 bp, Mus musculus
  siRNA target sequence for Dbr1 (NM_031403.1,676-694).
cagcctgtacatatattct

SEQ ID NO: 743638 - DNA, 19 bp, Mus musculus
  siRNA target sequence for Dbr1 (NM_031403.1,700-718).
catgattggccaagaaata

SEQ ID NO: 743639 - DNA, 19 bp, Mus musculus
  siRNA target sequence for Dbr1 (NM_031403.1,707-725).
ggccaagaaatatatatca

SEQ ID NO: 743640 - DNA, 19 bp, Mus musculus
  siRNA target sequence for Dbr1 (NM_031403.1,708-726).
gccaagaaatatatatcat

SEQ ID NO: 743641 - DNA, 19 bp, Mus musculus
  siRNA target sequence for Dbr1 (NM_031403.1,744-762).
gcttcttaagaccaaatct

SEQ ID NO: 743642 - DNA, 19 bp, Mus musculus
  siRNA target sequence for Dbr1 (NM_031403.1,851-869).
ccgcgcacctgcatgtcaa

SEQ ID NO: 743643 - DNA, 19 bp, Mus musculus
  siRNA target sequence for Dbr1 (NM_031403.1,854-872).
cgcacctgcatgtcaagtt

SEQ ID NO: 743644 - DNA, 19 bp, Mus musculus
  siRNA target sequence for Dbr1 (NM_031403.1,888-906).
gcatcaggccacagataaa

SEQ ID NO: 743645 - DNA, 19 bp, Mus musculus
  siRNA target sequence for Dbr1 (NM_031403.1,975-993).
ggtgttagagatagaacat

SEQ ID NO: 743646 - DNA, 19 bp, Mus musculus
  siRNA target sequence for Dbr1 (NM_031403.1,1026-1044).
cgttgaatggcttactgtt

SEQ ID NO: 743647 - DNA, 19 bp, Mus musculus
  siRNA target sequence for Dbr1 (NM_031403.1,1053-1071).
cactgatgacctgattaat

SEQ ID NO: 743648 - DNA, 19 bp, Mus musculus
  siRNA target sequence for Dbr1 (NM_031403.1,1055-1073).
ctgatgacctgattaatgt

SEQ ID NO: 743649 - DNA, 19 bp, Mus musculus
  siRNA target sequence for Dbr1 (NM_031403.1,1113-1131).
gcacacaaggtgggattat

SEQ ID NO: 743650 - DNA, 19 bp, Mus musculus
  siRNA target sequence for Dbr1 (NM_031403.1,1114-1132).
cacacaaggtgggattata

SEQ ID NO: 743651 - DNA, 19 bp, Mus musculus
  siRNA target sequence for Dbr1 (NM_031403.1,1116-1134).
cacaaggtgggattatagt

SEQ ID NO: 743652 - DNA, 19 bp, Mus musculus
  siRNA target sequence for Dbr1 (NM_031403.1,1135-1153).
gcaacggaagaaactatga

SEQ ID NO: 743653 - DNA, 19 bp, Mus musculus
  siRNA target sequence for Dbr1 (NM_031403.1,1183-1201).
cctaaagtcccctgtaact

SEQ ID NO: 743654 - DNA, 19 bp, Mus musculus
  siRNA target sequence for Dbr1 (NM_031403.1,1184-1202).
ctaaagtcccctgtaactt

SEQ ID NO: 743655 - DNA, 19 bp, Mus musculus
  siRNA target sequence for Dbr1 (NM_031403.1,1205-1223).
ccatgacagctgcttgtta

SEQ ID NO: 743656 - DNA, 19 bp, Mus musculus
  siRNA target sequence for Dbr1 (NM_031403.1,1254-1272).
gctggttcacaggatcaat

SEQ ID NO: 743657 - DNA, 19 bp, Mus musculus
  siRNA target sequence for Dbr1 (NM_031403.1,1411-1429).
gaccggagtgagtacaaca

SEQ ID NO: 743658 - DNA, 19 bp, Mus musculus
  siRNA target sequence for Dbr1 (NM_031403.1,1608-1626).
cttaccaagttccatgttt

SEQ ID NO: 743659 - DNA, 19 bp, Mus musculus
  siRNA target sequence for Perq1 (NM_031408.1,306-324).
cttttaccaaagaagcatt

SEQ ID NO: 743660 - DNA, 19 bp, Mus musculus
  siRNA target sequence for Perq1 (NM_031408.1,394-412).
ggcgagaggcggtttgaga

SEQ ID NO: 743661 - DNA, 19 bp, Mus musculus
  siRNA target sequence for Perq1 (NM_031408.1,484-502).
cgctcagacagtgagaatt

SEQ ID NO: 743662 - DNA, 19 bp, Mus musculus
  siRNA target sequence for Perq1 (NM_031408.1,636-654).
ggagcggaggcgcaagttt

SEQ ID NO: 743663 - DNA, 19 bp, Mus musculus
  siRNA target sequence for Perq1 (NM_031408.1,639-657).
gcggaggcgcaagtttgat

SEQ ID NO: 743664 - DNA, 19 bp, Mus musculus
  siRNA target sequence for Perq1 (NM_031408.1,640-658).
cggaggcgcaagtttgatt

SEQ ID NO: 743665 - DNA, 19 bp, Mus musculus
  siRNA target sequence for Perq1 (NM_031408.1,644-662).
ggcgcaagtttgattttga

SEQ ID NO: 743666 - DNA, 19 bp, Mus musculus
  siRNA target sequence for Perq1 (NM_031408.1,645-663).
gcgcaagtttgattttgat

SEQ ID NO: 743667 - DNA, 19 bp, Mus musculus
  siRNA target sequence for Perq1 (NM_031408.1,744-762).
gctcgatggctttgaagat

SEQ ID NO: 743668 - DNA, 19 bp, Mus musculus
  siRNA target sequence for Perq1 (NM_031408.1,807-825).
ggagatgggcactttcgat

SEQ ID NO: 743669 - DNA, 19 bp, Mus musculus
  siRNA target sequence for Perq1 (NM_031408.1,1043-1061).
ctctctggacgacaaatga

SEQ ID NO: 743670 - DNA, 19 bp, Mus musculus
  siRNA target sequence for Perq1 (NM_031408.1,1336-1354).
gcccgaaagtggttctaca

SEQ ID NO: 743671 - DNA, 19 bp, Mus musculus
  siRNA target sequence for Perq1 (NM_031408.1,1475-1493).
ctctgggagaggtgatcaa

SEQ ID NO: 743672 - DNA, 19 bp, Mus musculus
  siRNA target sequence for Perq1 (NM_031408.1,1806-1824).
cttgtcggtgccagattca

SEQ ID NO: 743673 - DNA, 19 bp, Mus musculus
  siRNA target sequence for Perq1 (NM_031408.1,1828-1846).
cccctctgggacttacata

SEQ ID NO: 743674 - DNA, 19 bp, Mus musculus
  siRNA target sequence for Perq1 (NM_031408.1,1867-1885).
ggtggtgaggccagtcttt

SEQ ID NO: 743675 - DNA, 19 bp, Mus musculus
  siRNA target sequence for Perq1 (NM_031408.1,1880-1898).
gtctttgggacataccaat

SEQ ID NO: 743676 - DNA, 19 bp, Mus musculus
  siRNA target sequence for Perq1 (NM_031408.1,1882-1900).
ctttgggacataccaatta

SEQ ID NO: 743677 - DNA, 19 bp, Mus musculus
  siRNA target sequence for Perq1 (NM_031408.1,1887-1905).
ggacataccaattaactct

SEQ ID NO: 743678 - DNA, 19 bp, Mus musculus
  siRNA target sequence for Perq1 (NM_031408.1,1888-1906).
gacataccaattaactctt

SEQ ID NO: 743679 - DNA, 19 bp, Mus musculus
  siRNA target sequence for Perq1 (NM_031408.1,1907-1925).
cgactcagggtccaattct

SEQ ID NO: 743680 - DNA, 19 bp, Mus musculus
  siRNA target sequence for Perq1 (NM_031408.1,1910-1928).
ctcagggtccaattctaga

SEQ ID NO: 743681 - DNA, 19 bp, Mus musculus
  siRNA target sequence for Perq1 (NM_031408.1,1935-1953).
ccaactgcagcataaattt

SEQ ID NO: 743682 - DNA, 19 bp, Mus musculus
  siRNA target sequence for Perq1 (NM_031408.1,2537-2555).
gccgacctgttcgcaaaaa

SEQ ID NO: 743683 - DNA, 19 bp, Mus musculus
  siRNA target sequence for Perq1 (NM_031408.1,2539-2557).
cgacctgttcgcaaaaaga

SEQ ID NO: 743684 - DNA, 19 bp, Mus musculus
  siRNA target sequence for Perq1 (NM_031408.1,2703-2721).
ggtggagtccccttacgat

SEQ ID NO: 743685 - DNA, 19 bp, Mus musculus
  siRNA target sequence for Perq1 (NM_031408.1,2713-2731).
ccttacgatgtccatgatt

SEQ ID NO: 743686 - DNA, 19 bp, Mus musculus
  siRNA target sequence for Perq1 (NM_031408.1,2714-2732).
cttacgatgtccatgatta

SEQ ID NO: 743687 - DNA, 19 bp, Mus musculus
  siRNA target sequence for Perq1 (NM_031408.1,2718-2736).
cgatgtccatgattatatt

SEQ ID NO: 743688 - DNA, 19 bp, Mus musculus
  siRNA target sequence for Perq1 (NM_031408.1,2722-2740).
gtccatgattatattcgtt

SEQ ID NO: 743689 - DNA, 19 bp, Mus musculus
  siRNA target sequence for 2610528M18Rik (NM_031863.1,219-237).
gcacgtgcttctaggaaaa

SEQ ID NO: 743690 - DNA, 19 bp, Mus musculus
  siRNA target sequence for 2610528M18Rik (NM_031863.1,220-238).
cacgtgcttctaggaaaaa

SEQ ID NO: 743691 - DNA, 19 bp, Mus musculus
  siRNA target sequence for 2610528M18Rik (NM_031863.1,299-317).
gaatgaggttggaaacaca

SEQ ID NO: 743692 - DNA, 19 bp, Mus musculus
  siRNA target sequence for 2610528M18Rik (NM_031863.1,305-323).
ggttggaaacacagcaaaa

SEQ ID NO: 743693 - DNA, 19 bp, Mus musculus
  siRNA target sequence for 2610528M18Rik (NM_031863.1,329-347).
cagaagtcatgcaaagcat

SEQ ID NO: 743694 - DNA, 19 bp, Mus musculus
  siRNA target sequence for 2610528M18Rik (NM_031863.1,372-390).
gcaacgtatgttcatctaa

SEQ ID NO: 743695 - DNA, 19 bp, Mus musculus
  siRNA target sequence for 2610528M18Rik (NM_031863.1,384-402).
catctaaaacgggtaaaaa

SEQ ID NO: 743696 - DNA, 19 bp, Mus musculus
  siRNA target sequence for 2610528M18Rik (NM_031863.1,387-405).
ctaaaacgggtaaaaatat

SEQ ID NO: 743697 - DNA, 19 bp, Mus musculus
  siRNA target sequence for 2610528M18Rik (NM_031863.1,470-488).
gatggagtcagtcattctt

SEQ ID NO: 743698 - DNA, 19 bp, Mus musculus
  siRNA target sequence for 2610528M18Rik (NM_031863.1,489-507).
ggaattttattcaacataa

SEQ ID NO: 743699 - DNA, 19 bp, Mus musculus
  siRNA target sequence for 2610528M18Rik (NM_031863.1,588-606).
ccaagaaagttgaactatt

SEQ ID NO: 743700 - DNA, 19 bp, Mus musculus
  siRNA target sequence for 2610528M18Rik (NM_031863.1,596-614).
gttgaactatttaaaggat

SEQ ID NO: 743701 - DNA, 19 bp, Mus musculus
  siRNA target sequence for 2610528M18Rik (NM_031863.1,716-734).
gtcaatgactgagagtatt

SEQ ID NO: 743702 - DNA, 19 bp, Mus musculus
  siRNA target sequence for 2610528M18Rik (NM_031863.1,730-748).
gtattcaaagcctaaagaa

SEQ ID NO: 743703 - DNA, 19 bp, Mus musculus
  siRNA target sequence for 2610528M18Rik (NM_031863.1,812-830).
catagatagcaataaagta

SEQ ID NO: 743704 - DNA, 19 bp, Mus musculus
  siRNA target sequence for 2610528M18Rik (NM_031863.1,923-941).
gaaggacttggatgttctt

SEQ ID NO: 743705 - DNA, 19 bp, Mus musculus
  siRNA target sequence for 2610528M18Rik (NM_031863.1,932-950).
ggatgttcttcatgattca

SEQ ID NO: 743706 - DNA, 19 bp, Mus musculus
  siRNA target sequence for 2610528M18Rik (NM_031863.1,962-980).
gaatgtgtcagcattcatt

SEQ ID NO: 743707 - DNA, 19 bp, Mus musculus
  siRNA target sequence for D11Lgp1e (NM_031871.1,350-368).
ggaggacacagatatgaga

SEQ ID NO: 743708 - DNA, 19 bp, Mus musculus
  siRNA target sequence for D11Lgp1e (NM_031871.1,484-502).
ccaccctgctgggtctaat

SEQ ID NO: 743709 - DNA, 19 bp, Mus musculus
  siRNA target sequence for D11Lgp1e (NM_031871.1,495-513).
ggtctaataaccctaaaca

SEQ ID NO: 743710 - DNA, 19 bp, Mus musculus
  siRNA target sequence for D11Lgp1e (NM_031871.1,496-514).
gtctaataaccctaaacaa

SEQ ID NO: 743711 - DNA, 19 bp, Mus musculus
  siRNA target sequence for D11Lgp1e (NM_031871.1,530-548).
gctggctccaggaagtact

SEQ ID NO: 743712 - DNA, 19 bp, Mus musculus
  siRNA target sequence for D11Lgp1e (NM_031871.1,707-725).
ggagctcctggatgtcttt

SEQ ID NO: 743713 - DNA, 19 bp, Mus musculus
  siRNA target sequence for D11Lgp1e (NM_031871.1,942-960).
caagggctagccttcttct

SEQ ID NO: 743714 - DNA, 19 bp, Mus musculus
  siRNA target sequence for D11Lgp1e (NM_031871.1,985-1003).
gagtggtggccctaaacct

SEQ ID NO: 743715 - DNA, 19 bp, Mus musculus
  siRNA target sequence for D11Lgp1e (NM_031871.1,1013-1031).
gcgaccccaaggatcctat

SEQ ID NO: 743716 - DNA, 19 bp, Mus musculus
  siRNA target sequence for D11Lgp1e (NM_031871.1,1202-1220).
ggtggttggtacctacaat

SEQ ID NO: 743717 - DNA, 19 bp, Mus musculus
  siRNA target sequence for D11Lgp1e (NM_031871.1,1265-1283).
gaatgttcgaggagaagtt

SEQ ID NO: 743718 - DNA, 19 bp, Mus musculus
  siRNA target sequence for D11Lgp1e (NM_031871.1,1402-1420).
ccccacactacgaagtgtt

SEQ ID NO: 743719 - DNA, 19 bp, Mus musculus
  siRNA target sequence for D11Lgp1e (NM_031871.1,1403-1421).
cccacactacgaagtgttt

SEQ ID NO: 743720 - DNA, 19 bp, Mus musculus
  siRNA target sequence for D11Lgp1e (NM_031871.1,1405-1423).
cacactacgaagtgtttgt

SEQ ID NO: 743721 - DNA, 19 bp, Mus musculus
  siRNA target sequence for D11Lgp1e (NM_031871.1,1442-1460).
gaatctgtcggaggaaaat

SEQ ID NO: 743722 - DNA, 19 bp, Mus musculus
  siRNA target sequence for D11Lgp1e (NM_031871.1,1491-1509).
gcctccgcacagtacaagt

SEQ ID NO: 743723 - DNA, 19 bp, Mus musculus
  siRNA target sequence for Wasf1 (NM_031877.2,70-88).
cgttggtgaaaagaaacat

SEQ ID NO: 743724 - DNA, 19 bp, Mus musculus
  siRNA target sequence for Wasf1 (NM_031877.2,143-161).
ggaatgtgtaaccaacatt

SEQ ID NO: 743725 - DNA, 19 bp, Mus musculus
  siRNA target sequence for Wasf1 (NM_031877.2,144-162).
gaatgtgtaaccaacattt

SEQ ID NO: 743726 - DNA, 19 bp, Mus musculus
  siRNA target sequence for Wasf1 (NM_031877.2,186-204).
ctgagtagcctaagtaagt

SEQ ID NO: 743727 - DNA, 19 bp, Mus musculus
  siRNA target sequence for Wasf1 (NM_031877.2,188-206).
gagtagcctaagtaagtat

SEQ ID NO: 743728 - DNA, 19 bp, Mus musculus
  siRNA target sequence for Wasf1 (NM_031877.2,278-296).
gcgcgtggaccgattgtct

SEQ ID NO: 743729 - DNA, 19 bp, Mus musculus
  siRNA target sequence for Wasf1 (NM_031877.2,282-300).
gtggaccgattgtctgtta

SEQ ID NO: 743730 - DNA, 19 bp, Mus musculus
  siRNA target sequence for Wasf1 (NM_031877.2,284-302).
ggaccgattgtctgttagt

SEQ ID NO: 743731 - DNA, 19 bp, Mus musculus
  siRNA target sequence for Wasf1 (NM_031877.2,370-388).
ggagctccacaattcaaga

SEQ ID NO: 743732 - DNA, 19 bp, Mus musculus
  siRNA target sequence for Wasf1 (NM_031877.2,371-389).
gagctccacaattcaagat

SEQ ID NO: 743733 - DNA, 19 bp, Mus musculus
  siRNA target sequence for Wasf1 (NM_031877.2,407-425).
caagacgttgcctattcca

SEQ ID NO: 743734 - DNA, 19 bp, Mus musculus
  siRNA target sequence for Wasf1 (NM_031877.2,413-431).
gttgcctattccattgcaa

SEQ ID NO: 743735 - DNA, 19 bp, Mus musculus
  siRNA target sequence for Wasf1 (NM_031877.2,417-435).
cctattccattgcaagaaa

SEQ ID NO: 743736 - DNA, 19 bp, Mus musculus
  siRNA target sequence for Wasf1 (NM_031877.2,452-470).
gcaacctccgcctctcaat

SEQ ID NO: 743737 - DNA, 19 bp, Mus musculus
  siRNA target sequence for Wasf1 (NM_031877.2,453-471).
caacctccgcctctcaata

SEQ ID NO: 743738 - DNA, 19 bp, Mus musculus
  siRNA target sequence for Wasf1 (NM_031877.2,457-475).
ctccgcctctcaatatcct

SEQ ID NO: 743739 - DNA, 19 bp, Mus musculus
  siRNA target sequence for Wasf1 (NM_031877.2,501-519).
gaagggctgaagttttata

SEQ ID NO: 743740 - DNA, 19 bp, Mus musculus
  siRNA target sequence for Wasf1 (NM_031877.2,506-524).
gctgaagttttataccaat

SEQ ID NO: 743741 - DNA, 19 bp, Mus musculus
  siRNA target sequence for Wasf1 (NM_031877.2,725-743).
cctacacaagcatattgaa

SEQ ID NO: 743742 - DNA, 19 bp, Mus musculus
  siRNA target sequence for Wasf1 (NM_031877.2,754-772).
gcccagcctctcattatga

SEQ ID NO: 743743 - DNA, 19 bp, Mus musculus
  siRNA target sequence for Wasf1 (NM_031877.2,783-801).
cagacatacgtggatcata

SEQ ID NO: 743744 - DNA, 19 bp, Mus musculus
  siRNA target sequence for Wasf1 (NM_031877.2,787-805).
catacgtggatcatatgga

SEQ ID NO: 743745 - DNA, 19 bp, Mus musculus
  siRNA target sequence for Wasf1 (NM_031877.2,821-839).
ctctgccttgccattcagt

SEQ ID NO: 743746 - DNA, 19 bp, Mus musculus
  siRNA target sequence for Wasf1 (NM_031877.2,836-854).
cagtcagatgagtgaactt

SEQ ID NO: 743747 - DNA, 19 bp, Mus musculus
  siRNA target sequence for Wasf1 (NM_031877.2,958-976).
gttctgctacaggtttgat

SEQ ID NO: 743748 - DNA, 19 bp, Mus musculus
  siRNA target sequence for Wasf1 (NM_031877.2,964-982).
ctacaggtttgatagagaa

SEQ ID NO: 743749 - DNA, 19 bp, Mus musculus
  siRNA target sequence for Wasf1 (NM_031877.2,1193-1211).
gattgcccctggtgttctt

SEQ ID NO: 743750 - DNA, 19 bp, Mus musculus
  siRNA target sequence for Wasf1 (NM_031877.2,1454-1472).
gggtccccatgctccatta

SEQ ID NO: 743751 - DNA, 19 bp, Mus musculus
  siRNA target sequence for Wasf1 (NM_031877.2,1455-1473).
ggtccccatgctccattaa

SEQ ID NO: 743752 - DNA, 19 bp, Mus musculus
  siRNA target sequence for Wasf1 (NM_031877.2,1456-1474).
gtccccatgctccattaat

SEQ ID NO: 743753 - DNA, 19 bp, Mus musculus
  siRNA target sequence for Wasf1 (NM_031877.2,1528-1546).
catccaccctgcctgtaat

SEQ ID NO: 743754 - DNA, 19 bp, Mus musculus
  siRNA target sequence for Wasf1 (NM_031877.2,1532-1550).
caccctgcctgtaatcagt

SEQ ID NO: 743755 - DNA, 19 bp, Mus musculus
  siRNA target sequence for Wasf1 (NM_031877.2,1576-1594).
ccatccgaaaaggtattca

SEQ ID NO: 743756 - DNA, 19 bp, Mus musculus
  siRNA target sequence for Smarcd2 (NM_031878.1,277-295).
cccagcgccgagggttaaa

SEQ ID NO: 743757 - DNA, 19 bp, Mus musculus
  siRNA target sequence for Smarcd2 (NM_031878.1,279-297).
cagcgccgagggttaaaga

SEQ ID NO: 743758 - DNA, 19 bp, Mus musculus
  siRNA target sequence for Smarcd2 (NM_031878.1,349-367).
cagagtctcaggcatacat

SEQ ID NO: 743759 - DNA, 19 bp, Mus musculus
  siRNA target sequence for Smarcd2 (NM_031878.1,412-430).
gcaagcggatggagattca

SEQ ID NO: 743760 - DNA, 19 bp, Mus musculus
  siRNA target sequence for Smarcd2 (NM_031878.1,452-470).
gacgcaaaagcgaaaactt

SEQ ID NO: 743761 - DNA, 19 bp, Mus musculus
  siRNA target sequence for Smarcd2 (NM_031878.1,461-479).
gcgaaaacttcggatctat

SEQ ID NO: 743762 - DNA, 19 bp, Mus musculus
  siRNA target sequence for Smarcd2 (NM_031878.1,462-480).
cgaaaacttcggatctata

SEQ ID NO: 743763 - DNA, 19 bp, Mus musculus
  siRNA target sequence for Smarcd2 (NM_031878.1,463-481).
gaaaacttcggatctatat

SEQ ID NO: 743764 - DNA, 19 bp, Mus musculus
  siRNA target sequence for Smarcd2 (NM_031878.1,471-489).
cggatctatatttccaata

SEQ ID NO: 743765 - DNA, 19 bp, Mus musculus
  siRNA target sequence for Smarcd2 (NM_031878.1,502-520).
gcaaggcggatggagataa

SEQ ID NO: 743766 - DNA, 19 bp, Mus musculus
  siRNA target sequence for Smarcd2 (NM_031878.1,602-620).
gctggatgatcctagcaaa

SEQ ID NO: 743767 - DNA, 19 bp, Mus musculus
  siRNA target sequence for Smarcd2 (NM_031878.1,665-683).
gttggacaaggaactctat

SEQ ID NO: 743768 - DNA, 19 bp, Mus musculus
  siRNA target sequence for Smarcd2 (NM_031878.1,885-903).
caggcactgtggctttaca

SEQ ID NO: 743769 - DNA, 19 bp, Mus musculus
  siRNA target sequence for Smarcd2 (NM_031878.1,888-906).
gcactgtggctttacatca

SEQ ID NO: 743770 - DNA, 19 bp, Mus musculus
  siRNA target sequence for Smarcd2 (NM_031878.1,889-907).
cactgtggctttacatcaa

SEQ ID NO: 743771 - DNA, 19 bp, Mus musculus
  siRNA target sequence for Smarcd2 (NM_031878.1,928-946).
gccatgagcgcgagtacat

SEQ ID NO: 743772 - DNA, 19 bp, Mus musculus
  siRNA target sequence for Smarcd2 (NM_031878.1,933-951).
gagcgcgagtacatcaact

SEQ ID NO: 743773 - DNA, 19 bp, Mus musculus
  siRNA target sequence for Smarcd2 (NM_031878.1,1034-1052).
gcatccagaccccattgtt

SEQ ID NO: 743774 - DNA, 19 bp, Mus musculus
  siRNA target sequence for Smarcd2 (NM_031878.1,1038-1056).
ccagaccccattgttatta

SEQ ID NO: 743775 - DNA, 19 bp, Mus musculus
  siRNA target sequence for Smarcd2 (NM_031878.1,1064-1082).
cattagtgtggatcctaat

SEQ ID NO: 743776 - DNA, 19 bp, Mus musculus
  siRNA target sequence for Smarcd2 (NM_031878.1,1314-1332).
cgccgagacctcaagatca

SEQ ID NO: 743777 - DNA, 19 bp, Mus musculus
  siRNA target sequence for Smarcd2 (NM_031878.1,1315-1333).
gccgagacctcaagatcat

SEQ ID NO: 743778 - DNA, 19 bp, Mus musculus
  siRNA target sequence for Tmem2 (NM_031997.2,114-132).
gccgttctcaggtcaaagt

SEQ ID NO: 743779 - DNA, 19 bp, Mus musculus
  siRNA target sequence for Tmem2 (NM_031997.2,116-134).
cgttctcaggtcaaagtca

SEQ ID NO: 743780 - DNA, 19 bp, Mus musculus
  siRNA target sequence for Tmem2 (NM_031997.2,235-253).
gatggaggattcatgctat

SEQ ID NO: 743781 - DNA, 19 bp, Mus musculus
  siRNA target sequence for Tmem2 (NM_031997.2,265-283).
ctgccagttcttcgattat

SEQ ID NO: 743782 - DNA, 19 bp, Mus musculus
  siRNA target sequence for Tmem2 (NM_031997.2,267-285).
gccagttcttcgattatga

SEQ ID NO: 743783 - DNA, 19 bp, Mus musculus
  siRNA target sequence for Tmem2 (NM_031997.2,301-319).
cgtcatgatagagaagaat

SEQ ID NO: 743784 - DNA, 19 bp, Mus musculus
  siRNA target sequence for Tmem2 (NM_031997.2,381-399).
ggtatcctgtgcattttca

SEQ ID NO: 743785 - DNA, 19 bp, Mus musculus
  siRNA target sequence for Tmem2 (NM_031997.2,400-418).
cctgtgtggagatgtagat

SEQ ID NO: 743786 - DNA, 19 bp, Mus musculus
  siRNA target sequence for Tmem2 (NM_031997.2,403-421).
gtgtggagatgtagattct

SEQ ID NO: 743787 - DNA, 19 bp, Mus musculus
  siRNA target sequence for Tmem2 (NM_031997.2,405-423).
gtggagatgtagattctaa

SEQ ID NO: 743788 - DNA, 19 bp, Mus musculus
  siRNA target sequence for Tmem2 (NM_031997.2,500-518).
gggaccagtggcttgctaa

SEQ ID NO: 743789 - DNA, 19 bp, Mus musculus
  siRNA target sequence for Tmem2 (NM_031997.2,501-519).
ggaccagtggcttgctaat

SEQ ID NO: 743790 - DNA, 19 bp, Mus musculus
  siRNA target sequence for Tmem2 (NM_031997.2,572-590).
ggtgttgaacagcgaaata

SEQ ID NO: 743791 - DNA, 19 bp, Mus musculus
  siRNA target sequence for Tmem2 (NM_031997.2,573-591).
gtgttgaacagcgaaatat

SEQ ID NO: 743792 - DNA, 19 bp, Mus musculus
  siRNA target sequence for Tmem2 (NM_031997.2,575-593).
gttgaacagcgaaatattt

SEQ ID NO: 743793 - DNA, 19 bp, Mus musculus
  siRNA target sequence for Tmem2 (NM_031997.2,599-617).
cataacttggggcttctta

SEQ ID NO: 743794 - DNA, 19 bp, Mus musculus
  siRNA target sequence for Tmem2 (NM_031997.2,670-688).
catgcgtgatggagtgttt

SEQ ID NO: 743795 - DNA, 19 bp, Mus musculus
  siRNA target sequence for Tmem2 (NM_031997.2,720-738).
gcatggctgtttcaacttt

SEQ ID NO: 743796 - DNA, 19 bp, Mus musculus
  siRNA target sequence for Tmem2 (NM_031997.2,787-805).
ctcacaggatgctggaata

SEQ ID NO: 743797 - DNA, 19 bp, Mus musculus
  siRNA target sequence for Tmem2 (NM_031997.2,874-892).
cactccgctggggatattt

SEQ ID NO: 743798 - DNA, 19 bp, Mus musculus
  siRNA target sequence for Tmem2 (NM_031997.2,879-897).
cgctggggatattttataa

SEQ ID NO: 743799 - DNA, 19 bp, Mus musculus
  siRNA target sequence for Tmem2 (NM_031997.2,898-916).
caacagggttcattcaaat

SEQ ID NO: 743800 - DNA, 19 bp, Mus musculus
  siRNA target sequence for Tmem2 (NM_031997.2,901-919).
cagggttcattcaaatttt

SEQ ID NO: 743801 - DNA, 19 bp, Mus musculus
  siRNA target sequence for Tmem2 (NM_031997.2,997-1015).
ggataacagtgcaaggttt

SEQ ID NO: 743802 - DNA, 19 bp, Mus musculus
  siRNA target sequence for Tmem2 (NM_031997.2,1066-1084).
cgacaggctcattgctttt

SEQ ID NO: 743803 - DNA, 19 bp, Mus musculus
  siRNA target sequence for Tmem2 (NM_031997.2,1067-1085).
gacaggctcattgctttta

SEQ ID NO: 743804 - DNA, 19 bp, Mus musculus
  siRNA target sequence for Tmem2 (NM_031997.2,1288-1306).
gggcacagggggaatcgat

SEQ ID NO: 743805 - DNA, 19 bp, Mus musculus
  siRNA target sequence for Tmem2 (NM_031997.2,1293-1311).
cagggggaatcgatcagaa

SEQ ID NO: 743806 - DNA, 19 bp, Mus musculus
  siRNA target sequence for Tmem2 (NM_031997.2,1343-1361).
ccaatccgaggctttcaga

SEQ ID NO: 743807 - DNA, 19 bp, Mus musculus
  siRNA target sequence for Tmem2 (NM_031997.2,1350-1368).
gaggctttcagatttacga

SEQ ID NO: 743808 - DNA, 19 bp, Mus musculus
  siRNA target sequence for Tmem2 (NM_031997.2,1371-1389).
ggcctattcatctcacaaa

SEQ ID NO: 743809 - DNA, 19 bp, Mus musculus
  siRNA target sequence for Tmem2 (NM_031997.2,1373-1391).
cctattcatctcacaaaga

SEQ ID NO: 743810 - DNA, 19 bp, Mus musculus
  siRNA target sequence for Tmem2 (NM_031997.2,1379-1397).
catctcacaaagagtactt

SEQ ID NO: 743811 - DNA, 19 bp, Mus musculus
  siRNA target sequence for Tmem2 (NM_031997.2,1382-1400).
ctcacaaagagtactttca

SEQ ID NO: 743812 - DNA, 19 bp, Mus musculus
  siRNA target sequence for Tmem2 (NM_031997.2,1384-1402).
cacaaagagtactttcaaa

SEQ ID NO: 743813 - DNA, 19 bp, Mus musculus
  siRNA target sequence for Tmem2 (NM_031997.2,1390-1408).
gagtactttcaaaaagtat

SEQ ID NO: 743814 - DNA, 19 bp, Mus musculus
  siRNA target sequence for Tmem2 (NM_031997.2,1392-1410).
gtactttcaaaaagtatgt

SEQ ID NO: 743815 - DNA, 19 bp, Mus musculus
  siRNA target sequence for Tmem2 (NM_031997.2,1470-1488).
caacacccaggaataacgt

SEQ ID NO: 743816 - DNA, 19 bp, Mus musculus
  siRNA target sequence for Tmem2 (NM_031997.2,1548-1566).
cctggtttgaggattgtga

SEQ ID NO: 743817 - DNA, 19 bp, Mus musculus
  siRNA target sequence for Tmem2 (NM_031997.2,1565-1583).
gagctggacggcgataaga

SEQ ID NO: 743818 - DNA, 19 bp, Mus musculus
  siRNA target sequence for Tmem2 (NM_031997.2,1568-1586).
ctggacggcgataagaact

SEQ ID NO: 743819 - DNA, 19 bp, Mus musculus
  siRNA target sequence for Tmem2 (NM_031997.2,1608-1626).
gctctgtgacaggatacaa

SEQ ID NO: 743820 - DNA, 19 bp, Mus musculus
  siRNA target sequence for Tmem2 (NM_031997.2,1660-1678).
gatccgccatccaaactgt

SEQ ID NO: 743821 - DNA, 19 bp, Mus musculus
  siRNA target sequence for Tmem2 (NM_031997.2,1719-1737).
cctacgcccaggtgtatgt

SEQ ID NO: 743822 - DNA, 19 bp, Mus musculus
  siRNA target sequence for Tmem2 (NM_031997.2,1720-1738).
ctacgcccaggtgtatgtt

SEQ ID NO: 743823 - DNA, 19 bp, Mus musculus
  siRNA target sequence for Tmem2 (NM_031997.2,1754-1772).
ccgaatcttagcatgatca

SEQ ID NO: 743824 - DNA, 19 bp, Mus musculus
  siRNA target sequence for Tmem2 (NM_031997.2,1755-1773).
cgaatcttagcatgatcat

SEQ ID NO: 743825 - DNA, 19 bp, Mus musculus
  siRNA target sequence for Tmem2 (NM_031997.2,1898-1916).
gcgccacgaaccactttct

SEQ ID NO: 743826 - DNA, 19 bp, Mus musculus
  siRNA target sequence for Tmem2 (NM_031997.2,1899-1917).
cgccacgaaccactttctt

SEQ ID NO: 743827 - DNA, 19 bp, Mus musculus
  siRNA target sequence for Tmem2 (NM_031997.2,1902-1920).
cacgaaccactttcttgta

SEQ ID NO: 743828 - DNA, 19 bp, Mus musculus
  siRNA target sequence for Tmem2 (NM_031997.2,2011-2029).
gcggcagaacggctcatta

SEQ ID NO: 743829 - DNA, 19 bp, Mus musculus
  siRNA target sequence for Tmem2 (NM_031997.2,2014-2032).
gcagaacggctcattatct

SEQ ID NO: 743830 - DNA, 19 bp, Mus musculus
  siRNA target sequence for Tmem2 (NM_031997.2,2015-2033).
cagaacggctcattatcta

SEQ ID NO: 743831 - DNA, 19 bp, Mus musculus
  siRNA target sequence for Tmem2 (NM_031997.2,2017-2035).
gaacggctcattatctaga

SEQ ID NO: 743832 - DNA, 19 bp, Mus musculus
  siRNA target sequence for Tmem2 (NM_031997.2,2020-2038).
cggctcattatctagaatt

SEQ ID NO: 743833 - DNA, 19 bp, Mus musculus
  siRNA target sequence for Tmem2 (NM_031997.2,2022-2040).
gctcattatctagaattga

SEQ ID NO: 743834 - DNA, 19 bp, Mus musculus
  siRNA target sequence for Tmem2 (NM_031997.2,2031-2049).
ctagaattgaggactatga

SEQ ID NO: 743835 - DNA, 19 bp, Mus musculus
  siRNA target sequence for Tmem2 (NM_031997.2,2084-2102).
ccgtctgagagaaaattct

SEQ ID NO: 743836 - DNA, 19 bp, Mus musculus
  siRNA target sequence for Tmem2 (NM_031997.2,2115-2133).
gcacagggttattgtttct

SEQ ID NO: 743837 - DNA, 19 bp, Mus musculus
  siRNA target sequence for Tmem2 (NM_031997.2,2159-2177).
gatggccacagttactgtt

SEQ ID NO: 743838 - DNA, 19 bp, Mus musculus
  siRNA target sequence for Tmem2 (NM_031997.2,2181-2199).
ctcagggatgtgaaagagt

SEQ ID NO: 743839 - DNA, 19 bp, Mus musculus
  siRNA target sequence for Tmem2 (NM_031997.2,2213-2231).
gcaacagactccaaagata

SEQ ID NO: 743840 - DNA, 19 bp, Mus musculus
  siRNA target sequence for Tmem2 (NM_031997.2,2214-2232).
caacagactccaaagatat

SEQ ID NO: 743841 - DNA, 19 bp, Mus musculus
  siRNA target sequence for Tmem2 (NM_031997.2,2219-2237).
gactccaaagatatcagta

SEQ ID NO: 743842 - DNA, 19 bp, Mus musculus
  siRNA target sequence for Tmem2 (NM_031997.2,2252-2270).
gcgtacccgcagtattaca

SEQ ID NO: 743843 - DNA, 19 bp, Mus musculus
  siRNA target sequence for Tmem2 (NM_031997.2,2253-2271).
cgtacccgcagtattacaa

SEQ ID NO: 743844 - DNA, 19 bp, Mus musculus
  siRNA target sequence for Tmem2 (NM_031997.2,2336-2354).
caccagatggtgtttacca

SEQ ID NO: 743845 - DNA, 19 bp, Mus musculus
  siRNA target sequence for Tmem2 (NM_031997.2,2355-2373).
gtgaccctcacaaaagcta

SEQ ID NO: 743846 - DNA, 19 bp, Mus musculus
  siRNA target sequence for Tmem2 (NM_031997.2,2370-2388).
gctacctccctgtacgatt

SEQ ID NO: 743847 - DNA, 19 bp, Mus musculus
  siRNA target sequence for Tmem2 (NM_031997.2,2416-2434).
gcgaggagatccatccatt

SEQ ID NO: 743848 - DNA, 19 bp, Mus musculus
  siRNA target sequence for Tmem2 (NM_031997.2,2418-2436).
gaggagatccatccattat

SEQ ID NO: 743849 - DNA, 19 bp, Mus musculus
  siRNA target sequence for Tmem2 (NM_031997.2,2420-2438).
ggagatccatccattattt

SEQ ID NO: 743850 - DNA, 19 bp, Mus musculus
  siRNA target sequence for Tmem2 (NM_031997.2,2440-2458).
cgtcaatggtactgacttt

SEQ ID NO: 743851 - DNA, 19 bp, Mus musculus
  siRNA target sequence for Tmem2 (NM_031997.2,2441-2459).
gtcaatggtactgacttta

SEQ ID NO: 743852 - DNA, 19 bp, Mus musculus
  siRNA target sequence for Tmem2 (NM_031997.2,2525-2543).
gaaaagcggatgttccttt

SEQ ID NO: 743853 - DNA, 19 bp, Mus musculus
  siRNA target sequence for Tmem2 (NM_031997.2,2587-2605).
ccccccaaggtcaatcgtt

SEQ ID NO: 743854 - DNA, 19 bp, Mus musculus
  siRNA target sequence for Tmem2 (NM_031997.2,2592-2610).
caaggtcaatcgttctgtt

SEQ ID NO: 743855 - DNA, 19 bp, Mus musculus
  siRNA target sequence for Tmem2 (NM_031997.2,2636-2654).
ctgaatatctcggattcat

SEQ ID NO: 743856 - DNA, 19 bp, Mus musculus
  siRNA target sequence for Tmem2 (NM_031997.2,2638-2656).
gaatatctcggattcatta

SEQ ID NO: 743857 - DNA, 19 bp, Mus musculus
  siRNA target sequence for Tmem2 (NM_031997.2,2694-2712).
gcaaaggtagtgtcgtatt

SEQ ID NO: 743858 - DNA, 19 bp, Mus musculus
  siRNA target sequence for Tmem2 (NM_031997.2,2695-2713).
caaaggtagtgtcgtattt

SEQ ID NO: 743859 - DNA, 19 bp, Mus musculus
  siRNA target sequence for Tmem2 (NM_031997.2,2805-2823).
cgttgcagatggaggaata

SEQ ID NO: 743860 - DNA, 19 bp, Mus musculus
  siRNA target sequence for Tmem2 (NM_031997.2,2856-2874).
gagaccttgacctgttaca

SEQ ID NO: 743861 - DNA, 19 bp, Mus musculus
  siRNA target sequence for Tsga14 (NM_031998.2,31-49).
cattgggaatcctgagtat

SEQ ID NO: 743862 - DNA, 19 bp, Mus musculus
  siRNA target sequence for Tsga14 (NM_031998.2,110-128).
ggtaacagcatgaccaaat

SEQ ID NO: 743863 - DNA, 19 bp, Mus musculus
  siRNA target sequence for Tsga14 (NM_031998.2,117-135).
gcatgaccaaatacattga

SEQ ID NO: 743864 - DNA, 19 bp, Mus musculus
  siRNA target sequence for Tsga14 (NM_031998.2,179-197).
gaacttttcaagagactaa

SEQ ID NO: 743865 - DNA, 19 bp, Mus musculus
  siRNA target sequence for Tsga14 (NM_031998.2,213-231).
cccagctggtcattcaagt

SEQ ID NO: 743866 - DNA, 19 bp, Mus musculus
  siRNA target sequence for Tsga14 (NM_031998.2,233-251).
gcttccctgtcagatcaaa

SEQ ID NO: 743867 - DNA, 19 bp, Mus musculus
  siRNA target sequence for Tsga14 (NM_031998.2,237-255).
ccctgtcagatcaaacact

SEQ ID NO: 743868 - DNA, 19 bp, Mus musculus
  siRNA target sequence for Tsga14 (NM_031998.2,292-310).
caatgattctgcaacttca

SEQ ID NO: 743869 - DNA, 19 bp, Mus musculus
  siRNA target sequence for Tsga14 (NM_031998.2,467-485).
gacaaagggctcgtaaaga

SEQ ID NO: 743870 - DNA, 19 bp, Mus musculus
  siRNA target sequence for Tsga14 (NM_031998.2,475-493).
gctcgtaaagaaagaagaa

SEQ ID NO: 743871 - DNA, 19 bp, Mus musculus
  siRNA target sequence for Tsga14 (NM_031998.2,549-567).
gagacagagattcttatca

SEQ ID NO: 743872 - DNA, 19 bp, Mus musculus
  siRNA target sequence for Tsga14 (NM_031998.2,628-646).
cccctattcaaatgacatt

SEQ ID NO: 743873 - DNA, 19 bp, Mus musculus
  siRNA target sequence for Tsga14 (NM_031998.2,667-685).
cggcaagatcatcatctta

SEQ ID NO: 743874 - DNA, 19 bp, Mus musculus
  siRNA target sequence for Tsga14 (NM_031998.2,732-750).
gtgagcgtgggtttgaaaa

SEQ ID NO: 743875 - DNA, 19 bp, Mus musculus
  siRNA target sequence for Tsga14 (NM_031998.2,1000-1018).
gaataactctgctggaaaa

SEQ ID NO: 743876 - DNA, 19 bp, Mus musculus
  siRNA target sequence for Plvap (NM_032398.1,86-104).
ggtactacctgcgctattt

SEQ ID NO: 743877 - DNA, 19 bp, Mus musculus
  siRNA target sequence for Plvap (NM_032398.1,388-406).
ctgatcacctacataaact

SEQ ID NO: 743878 - DNA, 19 bp, Mus musculus
  siRNA target sequence for Plvap (NM_032398.1,390-408).
gatcacctacataaactat

SEQ ID NO: 743879 - DNA, 19 bp, Mus musculus
  siRNA target sequence for 1700109I12Rik (NM_032465.1,31-49).
ggacatattgtgttgttta

SEQ ID NO: 743880 - DNA, 19 bp, Mus musculus
  siRNA target sequence for 1700109I12Rik (NM_032465.1,52-70).
ccatcatccagatacagtt

SEQ ID NO: 743881 - DNA, 19 bp, Mus musculus
  siRNA target sequence for 1700109I12Rik (NM_032465.1,53-71).
catcatccagatacagttt

SEQ ID NO: 743882 - DNA, 19 bp, Mus musculus
  siRNA target sequence for 1700109I12Rik (NM_032465.1,83-101).
gtgggaagagctattcaat

SEQ ID NO: 743883 - DNA, 19 bp, Mus musculus
  siRNA target sequence for 1700109I12Rik (NM_032465.1,85-103).
gggaagagctattcaatgt

SEQ ID NO: 743884 - DNA, 19 bp, Mus musculus
  siRNA target sequence for 1700109I12Rik (NM_032465.1,86-104).
ggaagagctattcaatgtt

SEQ ID NO: 743885 - DNA, 19 bp, Mus musculus
  siRNA target sequence for 1700109I12Rik (NM_032465.1,215-233).
catgattgctctttatcat

SEQ ID NO: 743886 - DNA, 19 bp, Mus musculus
  siRNA target sequence for 1700109I12Rik (NM_032465.1,300-318).
gagaagggtgtaacaaatt

SEQ ID NO: 743887 - DNA, 19 bp, Mus musculus
  siRNA target sequence for 1700109I12Rik (NM_032465.1,313-331).
caaattggactctgtactt

SEQ ID NO: 743888 - DNA, 19 bp, Mus musculus
  siRNA target sequence for 1700109I12Rik (NM_032465.1,349-367).
ccctgggtggaaagtatga

SEQ ID NO: 743889 - DNA, 19 bp, Mus musculus
  siRNA target sequence for 1700109I12Rik (NM_032465.1,351-369).
ctgggtggaaagtatgagt

SEQ ID NO: 743890 - DNA, 19 bp, Mus musculus
  siRNA target sequence for 1700109I12Rik (NM_032465.1,368-386).
gtgcatctttactctgtat

SEQ ID NO: 743891 - DNA, 19 bp, Mus musculus
  siRNA target sequence for 1700109I12Rik (NM_032465.1,406-424).
cagtctacaacctcattgt

SEQ ID NO: 743892 - DNA, 19 bp, Mus musculus
  siRNA target sequence for 1700109I12Rik (NM_032465.1,419-437).
cattgtggaaccctataca

SEQ ID NO: 743893 - DNA, 19 bp, Mus musculus
  siRNA target sequence for 1700109I12Rik (NM_032465.1,425-443).
ggaaccctatacacaagat

SEQ ID NO: 743894 - DNA, 19 bp, Mus musculus
  siRNA target sequence for 1700109I12Rik (NM_032465.1,441-459).
gatgaacacaactatacaa

SEQ ID NO: 743895 - DNA, 19 bp, Mus musculus
  siRNA target sequence for 1700109I12Rik (NM_032465.1,472-490).
caaatcggactctggaaat

SEQ ID NO: 743896 - DNA, 19 bp, Mus musculus
  siRNA target sequence for 1700109I12Rik (NM_032465.1,477-495).
cggactctggaaataccat

SEQ ID NO: 743897 - DNA, 19 bp, Mus musculus
  siRNA target sequence for 1700109I12Rik (NM_032465.1,486-504).
gaaataccatgctttcaaa

SEQ ID NO: 743898 - DNA, 19 bp, Mus musculus
  siRNA target sequence for 1700109I12Rik (NM_032465.1,522-540).
ccacctaggttcacctttt

SEQ ID NO: 743899 - DNA, 19 bp, Mus musculus
  siRNA target sequence for 1700109I12Rik (NM_032465.1,587-605).
ccatcaccacgtcaacaat

SEQ ID NO: 743900 - DNA, 19 bp, Mus musculus
  siRNA target sequence for 1700109I12Rik (NM_032465.1,588-606).
catcaccacgtcaacaatt

SEQ ID NO: 743901 - DNA, 19 bp, Mus musculus
  siRNA target sequence for 1700109I12Rik (NM_032465.1,597-615).
gtcaacaattccacatcat

SEQ ID NO: 743902 - DNA, 19 bp, Mus musculus
  siRNA target sequence for 1700109I12Rik (NM_032465.1,720-738).
ctcaaagcctggaagatgt

SEQ ID NO: 743903 - DNA, 19 bp, Mus musculus
  siRNA target sequence for 1700109I12Rik (NM_032465.1,804-822).
gtcttaggagagagagtat

SEQ ID NO: 743904 - DNA, 19 bp, Mus musculus
  siRNA target sequence for 1700109I12Rik (NM_032465.1,829-847).
gcctactgaagaatgtgtt

SEQ ID NO: 743905 - DNA, 19 bp, Mus musculus
  siRNA target sequence for 1700109I12Rik (NM_032465.1,843-861).
gtgttccccaaggcaaata

SEQ ID NO: 743906 - DNA, 19 bp, Mus musculus
  siRNA target sequence for 1700109I12Rik (NM_032465.1,855-873).
gcaaatatcacctggttta

SEQ ID NO: 743907 - DNA, 19 bp, Mus musculus
  siRNA target sequence for 1700109I12Rik (NM_032465.1,869-887).
gtttatagacggaagattt

SEQ ID NO: 743908 - DNA, 19 bp, Mus musculus
  siRNA target sequence for 1700109I12Rik (NM_032465.1,899-917).
cgaagaaggaatatacatt

SEQ ID NO: 743909 - DNA, 19 bp, Mus musculus
  siRNA target sequence for 1700109I12Rik (NM_032465.1,985-1003).
gtggaccatcccaatcaaa

SEQ ID NO: 743910 - DNA, 19 bp, Mus musculus
  siRNA target sequence for 1700109I12Rik (NM_032465.1,990-1008).
ccatcccaatcaaacaaca

SEQ ID NO: 743911 - DNA, 19 bp, Mus musculus
  siRNA target sequence for 1700109I12Rik (NM_032465.1,991-1009).
catcccaatcaaacaacat

SEQ ID NO: 743912 - DNA, 19 bp, Mus musculus
  siRNA target sequence for 1700109I12Rik (NM_032465.1,1036-1054).
caggccccagaaataaaat

SEQ ID NO: 743913 - DNA, 19 bp, Mus musculus
  siRNA target sequence for 1700109I12Rik (NM_032465.1,1038-1056).
ggccccagaaataaaatgt

SEQ ID NO: 743914 - DNA, 19 bp, Mus musculus
  siRNA target sequence for 1700109I12Rik (NM_032465.1,1055-1073).
gtggaatacttcatcacaa

SEQ ID NO: 743915 - DNA, 19 bp, Mus musculus
  siRNA target sequence for 1700109I12Rik (NM_032465.1,1097-1115).
ggtgatagccccaacgaaa

SEQ ID NO: 743916 - DNA, 19 bp, Mus musculus
  siRNA target sequence for 1700109I12Rik (NM_032465.1,1100-1118).
gatagccccaacgaaacat

SEQ ID NO: 743917 - DNA, 19 bp, Mus musculus
  siRNA target sequence for 1700109I12Rik (NM_032465.1,1144-1162).
gtacacaacctttttcaga

SEQ ID NO: 743918 - DNA, 19 bp, Mus musculus
  siRNA target sequence for 1700109I12Rik (NM_032465.1,1198-1216).
cttcagtgacaattgtaga

SEQ ID NO: 743919 - DNA, 19 bp, Mus musculus
  siRNA target sequence for 1700109I12Rik (NM_032465.1,1261-1279).
ccagcatgactactaaaga

SEQ ID NO: 743920 - DNA, 19 bp, Mus musculus
  siRNA target sequence for 1700109I12Rik (NM_032465.1,1262-1280).
cagcatgactactaaagat

SEQ ID NO: 743921 - DNA, 19 bp, Mus musculus
  siRNA target sequence for 1700109I12Rik (NM_032465.1,1273-1291).
ctaaagatggcaactattt

SEQ ID NO: 743922 - DNA, 19 bp, Mus musculus
  siRNA target sequence for 1700109I12Rik (NM_032465.1,1433-1451).
ctccccagtttcatggata

SEQ ID NO: 743923 - DNA, 19 bp, Mus musculus
  siRNA target sequence for 1700109I12Rik (NM_032465.1,1487-1505).
cagcttagctcctcatgat

SEQ ID NO: 743924 - DNA, 19 bp, Mus musculus
  siRNA target sequence for 1700109I12Rik (NM_032465.1,1549-1567).
ctgcaaatggaactactaa

SEQ ID NO: 743925 - DNA, 19 bp, Mus musculus
  siRNA target sequence for 1700109I12Rik (NM_032465.1,1578-1596).
ggacctatcaccagtatca

SEQ ID NO: 743926 - DNA, 19 bp, Mus musculus
  siRNA target sequence for 1700109I12Rik (NM_032465.1,1586-1604).
caccagtatcatagttaat

SEQ ID NO: 743927 - DNA, 19 bp, Mus musculus
  siRNA target sequence for 1700109I12Rik (NM_032465.1,1588-1606).
ccagtatcatagttaatca

SEQ ID NO: 743928 - DNA, 19 bp, Mus musculus
  siRNA target sequence for 1700109I12Rik (NM_032465.1,1589-1607).
cagtatcatagttaatcaa

SEQ ID NO: 743929 - DNA, 19 bp, Mus musculus
  siRNA target sequence for 1700109I12Rik (NM_032465.1,1638-1656).
gtcgcggctttgctctttt

SEQ ID NO: 743930 - DNA, 19 bp, Mus musculus
  siRNA target sequence for 1700109I12Rik (NM_032465.1,1670-1688).
gtttgggcttggagtaaga

SEQ ID NO: 743931 - DNA, 19 bp, Mus musculus
  siRNA target sequence for 1700109I12Rik (NM_032465.1,1677-1695).
cttggagtaagaaaatggt

SEQ ID NO: 743932 - DNA, 19 bp, Mus musculus
  siRNA target sequence for 1700109I12Rik (NM_032465.1,1693-1711).
ggtatcggtatcaaaatga

SEQ ID NO: 743933 - DNA, 19 bp, Mus musculus
  siRNA target sequence for 1700109I12Rik (NM_032465.1,1694-1712).
gtatcggtatcaaaatgaa

SEQ ID NO: 743934 - DNA, 19 bp, Mus musculus
  siRNA target sequence for 1700109I12Rik (NM_032465.1,1698-1716).
cggtatcaaaatgaaatca

SEQ ID NO: 743935 - DNA, 19 bp, Mus musculus
  siRNA target sequence for 1700109I12Rik (NM_032465.1,1699-1717).
ggtatcaaaatgaaatcat

SEQ ID NO: 743936 - DNA, 19 bp, Mus musculus
  siRNA target sequence for 1700109I12Rik (NM_032465.1,1753-1771).
ccatcaagtacacgtatat

SEQ ID NO: 743937 - DNA, 19 bp, Mus musculus
  siRNA target sequence for 1700109I12Rik (NM_032465.1,1760-1778).
gtacacgtatattcaagaa

SEQ ID NO: 743938 - DNA, 19 bp, Mus musculus
  siRNA target sequence for Sval2 (NM_032542.1,32-50).
gagctcttatgcatctctt

SEQ ID NO: 743939 - DNA, 19 bp, Mus musculus
  siRNA target sequence for Sval2 (NM_032542.1,35-53).
ctcttatgcatctcttgat

SEQ ID NO: 743940 - DNA, 19 bp, Mus musculus
  siRNA target sequence for Sval2 (NM_032542.1,63-81).
gtttttggagactccttat

SEQ ID NO: 743941 - DNA, 19 bp, Mus musculus
  siRNA target sequence for Sval2 (NM_032542.1,99-117).
caatccactttcactagat

SEQ ID NO: 743942 - DNA, 19 bp, Mus musculus
  siRNA target sequence for Sval2 (NM_032542.1,103-121).
ccactttcactagatatga

SEQ ID NO: 743943 - DNA, 19 bp, Mus musculus
  siRNA target sequence for Sval2 (NM_032542.1,155-173).
cagtaacactccaggttaa

SEQ ID NO: 743944 - DNA, 19 bp, Mus musculus
  siRNA target sequence for Sval2 (NM_032542.1,185-203).
gccaatgtatggtggtaaa

SEQ ID NO: 743945 - DNA, 19 bp, Mus musculus
  siRNA target sequence for Sval2 (NM_032542.1,186-204).
ccaatgtatggtggtaaaa

SEQ ID NO: 743946 - DNA, 19 bp, Mus musculus
  siRNA target sequence for Sval2 (NM_032542.1,244-262).
gctcacgccatttacactt

SEQ ID NO: 743947 - DNA, 19 bp, Mus musculus
  siRNA target sequence for Sval2 (NM_032542.1,268-286).
ctttgcagtgcaaacaaat

SEQ ID NO: 743948 - DNA, 19 bp, Mus musculus
  siRNA target sequence for Sval2 (NM_032542.1,343-361).
gttccagctaagagcatat

SEQ ID NO: 743949 - DNA, 19 bp, Mus musculus
  siRNA target sequence for Sval2 (NM_032542.1,356-374).
gcatatgtcctgatgatga

SEQ ID NO: 743950 - DNA, 19 bp, Mus musculus
  siRNA target sequence for Sval2 (NM_032542.1,388-406).
gtaacttcctacgtagaaa

SEQ ID NO: 743951 - DNA, 19 bp, Mus musculus
  siRNA target sequence for Sval2 (NM_032542.1,415-433).
caaaaaatcattgtatcat

SEQ ID NO: 743952 - DNA, 19 bp, Mus musculus
  siRNA target sequence for Cdo1 (NM_033037.2,343-361).
ctttgtatgccaaattcga

SEQ ID NO: 743953 - DNA, 19 bp, Mus musculus
  siRNA target sequence for Cdo1 (NM_033037.2,359-377).
cgatcaatacaggtatact

SEQ ID NO: 743954 - DNA, 19 bp, Mus musculus
  siRNA target sequence for Cdo1 (NM_033037.2,368-386).
caggtatactcgaaatctt

SEQ ID NO: 743955 - DNA, 19 bp, Mus musculus
  siRNA target sequence for Cdo1 (NM_033037.2,370-388).
ggtatactcgaaatcttgt

SEQ ID NO: 743956 - DNA, 19 bp, Mus musculus
  siRNA target sequence for Cdo1 (NM_033037.2,397-415).
gaaatgggaagtttaatct

SEQ ID NO: 743957 - DNA, 19 bp, Mus musculus
  siRNA target sequence for Cdo1 (NM_033037.2,403-421).
ggaagtttaatctgatgat

SEQ ID NO: 743958 - DNA, 19 bp, Mus musculus
  siRNA target sequence for Cdo1 (NM_033037.2,404-422).
gaagtttaatctgatgatt

SEQ ID NO: 743959 - DNA, 19 bp, Mus musculus
  siRNA target sequence for Cdo1 (NM_033037.2,440-458).
gcacggcagcagtattcat

SEQ ID NO: 743960 - DNA, 19 bp, Mus musculus
  siRNA target sequence for Cdo1 (NM_033037.2,443-461).
cggcagcagtattcatgat

SEQ ID NO: 743961 - DNA, 19 bp, Mus musculus
  siRNA target sequence for Cdo1 (NM_033037.2,518-536).
gtttgactggcctgacaaa

SEQ ID NO: 743962 - DNA, 19 bp, Mus musculus
  siRNA target sequence for Cdo1 (NM_033037.2,522-540).
gactggcctgacaaaaaat

SEQ ID NO: 743963 - DNA, 19 bp, Mus musculus
  siRNA target sequence for Cdo1 (NM_033037.2,587-605).
gtgtgcctacattaatgat

SEQ ID NO: 743964 - DNA, 19 bp, Mus musculus
  siRNA target sequence for Cdo1 (NM_033037.2,592-610).
cctacattaatgattccat

SEQ ID NO: 743965 - DNA, 19 bp, Mus musculus
  siRNA target sequence for Cdo1 (NM_033037.2,593-611).
ctacattaatgattccatt

SEQ ID NO: 743966 - DNA, 19 bp, Mus musculus
  siRNA target sequence for Cdo1 (NM_033037.2,613-631).
gcttacaccgagtagagaa

SEQ ID NO: 743967 - DNA, 19 bp, Mus musculus
  siRNA target sequence for Cdo1 (NM_033037.2,652-670).
ccgtgagcctccacttgta

SEQ ID NO: 743968 - DNA, 19 bp, Mus musculus
  siRNA target sequence for Cdo1 (NM_033037.2,712-730).
cagggcataaaaacaaagt

SEQ ID NO: 743969 - DNA, 19 bp, Mus musculus
  siRNA target sequence for Cdo1 (NM_033037.2,737-755).
gacattccacagcaagttt

SEQ ID NO: 743970 - DNA, 19 bp, Mus musculus
  siRNA target sequence for Cdo1 (NM_033037.2,756-774).
ggaatcaggactccattta

SEQ ID NO: 743971 - DNA, 19 bp, Mus musculus
  siRNA target sequence for Ocm (NM_033039.1,250-268).
gccagccaattgaaggata

SEQ ID NO: 743972 - DNA, 19 bp, Mus musculus
  siRNA target sequence for Ocm (NM_033039.1,264-282).
ggatatcttccagttcata

SEQ ID NO: 743973 - DNA, 19 bp, Mus musculus
  siRNA target sequence for Ocm (NM_033039.1,342-360).
ccagagcgacgctagagaa

SEQ ID NO: 743974 - DNA, 19 bp, Mus musculus
  siRNA target sequence for Ocm (NM_033039.1,427-445).
gctgatgattccaggaaat

SEQ ID NO: 743975 - DNA, 19 bp, Mus musculus
  siRNA target sequence for Ocm (NM_033039.1,536-554).
ccaccctaccccgaactaa

SEQ ID NO: 743976 - DNA, 19 bp, Mus musculus
  siRNA target sequence for Ocm (NM_033039.1,537-555).
caccctaccccgaactaat

SEQ ID NO: 743977 - DNA, 19 bp, Mus musculus
  siRNA target sequence for Ocm (NM_033039.1,539-557).
ccctaccccgaactaattt

SEQ ID NO: 743978 - DNA, 19 bp, Mus musculus
  siRNA target sequence for Ocm (NM_033039.1,540-558).
cctaccccgaactaattta

SEQ ID NO: 743979 - DNA, 19 bp, Mus musculus
  siRNA target sequence for Ocm (NM_033039.1,544-562).
ccccgaactaatttaccaa

SEQ ID NO: 743980 - DNA, 19 bp, Mus musculus
  siRNA target sequence for Ocm (NM_033039.1,650-668).
gtcctgatgacttctgtaa

SEQ ID NO: 743981 - DNA, 19 bp, Mus musculus
  siRNA target sequence for D10Wsu93e (NM_033072.1,149-167).
cgtggccggaggagaaaat

SEQ ID NO: 743982 - DNA, 19 bp, Mus musculus
  siRNA target sequence for D10Wsu93e (NM_033072.1,150-168).
gtggccggaggagaaaata

SEQ ID NO: 743983 - DNA, 19 bp, Mus musculus
  siRNA target sequence for D10Wsu93e (NM_033072.1,269-287).
ggacgtcctgccaaaaata

SEQ ID NO: 743984 - DNA, 19 bp, Mus musculus
  siRNA target sequence for D10Wsu93e (NM_033072.1,270-288).
gacgtcctgccaaaaataa

SEQ ID NO: 743985 - DNA, 19 bp, Mus musculus
  siRNA target sequence for D10Wsu93e (NM_033072.1,272-290).
cgtcctgccaaaaataaga

SEQ ID NO: 743986 - DNA, 19 bp, Mus musculus
  siRNA target sequence for D6Mm5e (NM_033079.1,61-79).
gaaccgaaggaaaactact

SEQ ID NO: 743987 - DNA, 19 bp, Mus musculus
  siRNA target sequence for D6Mm5e (NM_033079.1,64-82).
ccgaaggaaaactactagt

SEQ ID NO: 743988 - DNA, 19 bp, Mus musculus
  siRNA target sequence for D6Mm5e (NM_033079.1,65-83).
cgaaggaaaactactagta

SEQ ID NO: 743989 - DNA, 19 bp, Mus musculus
  siRNA target sequence for D6Mm5e (NM_033079.1,88-106).
gacctccgctgccatgaaa

SEQ ID NO: 743990 - DNA, 19 bp, Mus musculus
  siRNA target sequence for D6Mm5e (NM_033079.1,122-140).
ccgaggcttctcattgtga

SEQ ID NO: 743991 - DNA, 19 bp, Mus musculus
  siRNA target sequence for D6Mm5e (NM_033079.1,123-141).
cgaggcttctcattgtgaa

SEQ ID NO: 743992 - DNA, 19 bp, Mus musculus
  siRNA target sequence for D6Mm5e (NM_033079.1,207-225).
cgatagcctgcagtttgat

SEQ ID NO: 743993 - DNA, 19 bp, Mus musculus
  siRNA target sequence for D6Mm5e (NM_033079.1,252-270).
gcttatacacagtacagaa

SEQ ID NO: 743994 - DNA, 19 bp, Mus musculus
  siRNA target sequence for D6Mm5e (NM_033079.1,333-351).
gcatctcggagcttcgaat

SEQ ID NO: 743995 - DNA, 19 bp, Mus musculus
  siRNA target sequence for D6Mm5e (NM_033079.1,337-355).
ctcggagcttcgaatgtta

SEQ ID NO: 743996 - DNA, 19 bp, Mus musculus
  siRNA target sequence for D6Mm5e (NM_033079.1,339-357).
cggagcttcgaatgttaca

SEQ ID NO: 743997 - DNA, 19 bp, Mus musculus
  siRNA target sequence for D6Mm5e (NM_033079.1,416-434).
ctccagcagttcaaacagt

SEQ ID NO: 743998 - DNA, 19 bp, Mus musculus
  siRNA target sequence for D6Mm5e (NM_033079.1,472-490).
gacttccctggagattact

SEQ ID NO: 743999 - DNA, 19 bp, Mus musculus
  siRNA target sequence for D6Mm5e (NM_033079.1,474-492).
cttccctggagattactgt

SEQ ID NO: 744000 - DNA, 19 bp, Mus musculus
  siRNA target sequence for D6Mm5e (NM_033079.1,541-559).
gttgaaagatataaaccta

SEQ ID NO: 744001 - DNA, 19 bp, Mus musculus
  siRNA target sequence for D6Mm5e (NM_033079.1,690-708).
cgctagacaacgatgttgt

SEQ ID NO: 744002 - DNA, 19 bp, Mus musculus
  siRNA target sequence for D6Mm5e (NM_033079.1,736-754).
gctgcataacagtgaaact

SEQ ID NO: 744003 - DNA, 19 bp, Mus musculus
  siRNA target sequence for D6Mm5e (NM_033079.1,810-828).
gagccaaggatcatccaat

SEQ ID NO: 744004 - DNA, 19 bp, Mus musculus
  siRNA target sequence for D6Mm5e (NM_033079.1,812-830).
gccaaggatcatccaatat

SEQ ID NO: 744005 - DNA, 19 bp, Mus musculus
  siRNA target sequence for D6Mm5e (NM_033079.1,814-832).
caaggatcatccaatatgt

SEQ ID NO: 744006 - DNA, 19 bp, Mus musculus
  siRNA target sequence for D6Mm5e (NM_033079.1,817-835).
ggatcatccaatatgtcta

SEQ ID NO: 744007 - DNA, 19 bp, Mus musculus
  siRNA target sequence for D6Mm5e (NM_033079.1,818-836).
gatcatccaatatgtctaa

SEQ ID NO: 744008 - DNA, 19 bp, Mus musculus
  siRNA target sequence for D6Mm5e (NM_033079.1,821-839).
catccaatatgtctaaaat

SEQ ID NO: 744009 - DNA, 19 bp, Mus musculus
  siRNA target sequence for D6Mm5e (NM_033079.1,845-863).
ctccaagagcgatttctca

SEQ ID NO: 744010 - DNA, 19 bp, Mus musculus
  siRNA target sequence for D6Mm5e (NM_033079.1,894-912).
gcgtgtcgagaatagatga

SEQ ID NO: 744011 - DNA, 19 bp, Mus musculus
  siRNA target sequence for D6Mm5e (NM_033079.1,957-975).
cttcagcctctccgtataa

SEQ ID NO: 744012 - DNA, 19 bp, Mus musculus
  siRNA target sequence for D6Mm5e (NM_033079.1,966-984).
ctccgtataagcttcaagt

SEQ ID NO: 744013 - DNA, 19 bp, Mus musculus
  siRNA target sequence for D6Mm5e (NM_033079.1,988-1006).
caaggctctgaaatctagt

SEQ ID NO: 744014 - DNA, 19 bp, Mus musculus
  siRNA target sequence for D6Mm5e (NM_033079.1,1031-1049).
ggactacccttcattctca

SEQ ID NO: 744015 - DNA, 19 bp, Mus musculus
  siRNA target sequence for D6Mm5e (NM_033079.1,1313-1331).
cctgaagacagcctaaaga

SEQ ID NO: 744016 - DNA, 19 bp, Mus musculus
  siRNA target sequence for D6Mm5e (NM_033079.1,1316-1334).
gaagacagcctaaagatca

SEQ ID NO: 744017 - DNA, 19 bp, Mus musculus
  siRNA target sequence for D6Mm5e (NM_033079.1,1388-1406).
gttgggagccacttgtact

SEQ ID NO: 744018 - DNA, 19 bp, Mus musculus
  siRNA target sequence for D6Mm5e (NM_033079.1,1436-1454).
cagggacggctctacacaa

SEQ ID NO: 744019 - DNA, 19 bp, Mus musculus
  siRNA target sequence for D7Rp2e (NM_033080.1,701-719).
cccatcagaggcaactgaa

SEQ ID NO: 744020 - DNA, 19 bp, Mus musculus
  siRNA target sequence for D7Rp2e (NM_033080.1,850-868).
ggctgccaataatactttt

SEQ ID NO: 744021 - DNA, 19 bp, Mus musculus
  siRNA target sequence for D7Rp2e (NM_033080.1,852-870).
ctgccaataatacttttaa

SEQ ID NO: 744022 - DNA, 19 bp, Mus musculus
  siRNA target sequence for D7Rp2e (NM_033080.1,941-959).
gaatatgtctactgacaaa

SEQ ID NO: 744023 - DNA, 19 bp, Mus musculus
  siRNA target sequence for D7Rp2e (NM_033080.1,947-965).
gtctactgacaaaaagact

SEQ ID NO: 744024 - DNA, 19 bp, Mus musculus
  siRNA target sequence for D7Rp2e (NM_033080.1,1015-1033).
gtccctatgtgtacgaaat

SEQ ID NO: 744025 - DNA, 19 bp, Mus musculus
  siRNA target sequence for D7Rp2e (NM_033080.1,1017-1035).
ccctatgtgtacgaaatct

SEQ ID NO: 744026 - DNA, 19 bp, Mus musculus
  siRNA target sequence for D7Rp2e (NM_033080.1,1018-1036).
cctatgtgtacgaaatcta

SEQ ID NO: 744027 - DNA, 19 bp, Mus musculus
  siRNA target sequence for D7Rp2e (NM_033080.1,1023-1041).
gtgtacgaaatctacatga

SEQ ID NO: 744028 - DNA, 19 bp, Mus musculus
  siRNA target sequence for D7Rp2e (NM_033080.1,1040-1058).
gactcttccgtcagagaat

SEQ ID NO: 744029 - DNA, 19 bp, Mus musculus
  siRNA target sequence for D7Rp2e (NM_033080.1,1067-1085).
gtaccctaggaactacata

SEQ ID NO: 744030 - DNA, 19 bp, Mus musculus
  siRNA target sequence for D7Rp2e (NM_033080.1,1072-1090).
ctaggaactacatagtgaa

SEQ ID NO: 744031 - DNA, 19 bp, Mus musculus
  siRNA target sequence for Ebfaz (NM_033327.1,263-281).
ctgcagccgcctcttcaaa

SEQ ID NO: 744032 - DNA, 19 bp, Mus musculus
  siRNA target sequence for Ebfaz (NM_033327.1,292-310).
gccgagaccggcacatcaa

SEQ ID NO: 744033 - DNA, 19 bp, Mus musculus
  siRNA target sequence for Ebfaz (NM_033327.1,367-385).
gcagcgaccacctcaagat

SEQ ID NO: 744034 - DNA, 19 bp, Mus musculus
  siRNA target sequence for Ebfaz (NM_033327.1,551-569).
ctactgcgaggataccttt

SEQ ID NO: 744035 - DNA, 19 bp, Mus musculus
  siRNA target sequence for Ebfaz (NM_033327.1,705-723).
cacgccaaccagaaacaca

SEQ ID NO: 744036 - DNA, 19 bp, Mus musculus
  siRNA target sequence for Ebfaz (NM_033327.1,982-1000).
gctgcccctattgttctaa

SEQ ID NO: 744037 - DNA, 19 bp, Mus musculus
  siRNA target sequence for Ebfaz (NM_033327.1,1043-1061).
gaccattcacgcggataaa

SEQ ID NO: 744038 - DNA, 19 bp, Mus musculus
  siRNA target sequence for Ebfaz (NM_033327.1,1046-1064).
cattcacgcggataaacct

SEQ ID NO: 744039 - DNA, 19 bp, Mus musculus
  siRNA target sequence for Ebfaz (NM_033327.1,1099-1117).
ccatgcccacgctctacaa

SEQ ID NO: 744040 - DNA, 19 bp, Mus musculus
  siRNA target sequence for Ebfaz (NM_033327.1,1188-1206).
gccttccactgcaactact

SEQ ID NO: 744041 - DNA, 19 bp, Mus musculus
  siRNA target sequence for Ebfaz (NM_033327.1,1280-1298).
cccccctgatgggaataat

SEQ ID NO: 744042 - DNA, 19 bp, Mus musculus
  siRNA target sequence for Ebfaz (NM_033327.1,1487-1505).
gaagctcactaaacacatt

SEQ ID NO: 744043 - DNA, 19 bp, Mus musculus
  siRNA target sequence for Ebfaz (NM_033327.1,1490-1508).
gctcactaaacacattaaa

SEQ ID NO: 744044 - DNA, 19 bp, Mus musculus
  siRNA target sequence for Ebfaz (NM_033327.1,1621-1639).
gcgccaactccatctctaa

SEQ ID NO: 744045 - DNA, 19 bp, Mus musculus
  siRNA target sequence for Ebfaz (NM_033327.1,1644-1662).
gagtacccctgcaatcagt

SEQ ID NO: 744046 - DNA, 19 bp, Mus musculus
  siRNA target sequence for Ebfaz (NM_033327.1,1659-1677).
cagtgcgacctcaagttct

SEQ ID NO: 744047 - DNA, 19 bp, Mus musculus
  siRNA target sequence for Ebfaz (NM_033327.1,1791-1809).
catctgacggtgcattaca

SEQ ID NO: 744048 - DNA, 19 bp, Mus musculus
  siRNA target sequence for Ebfaz (NM_033327.1,1800-1818).
gtgcattacatgactacat

SEQ ID NO: 744049 - DNA, 19 bp, Mus musculus
  siRNA target sequence for Ebfaz (NM_033327.1,2049-2067).
caggtgcacgtcaaacaca

SEQ ID NO: 744050 - DNA, 19 bp, Mus musculus
  siRNA target sequence for Ebfaz (NM_033327.1,2393-2411).
cgcatcagagcccatgtat

SEQ ID NO: 744051 - DNA, 19 bp, Mus musculus
  siRNA target sequence for Ebfaz (NM_033327.1,2467-2485).
gcctccgggatcacaacat

SEQ ID NO: 744052 - DNA, 19 bp, Mus musculus
  siRNA target sequence for Ebfaz (NM_033327.1,2553-2571).
gtgtgctctcggactttct

SEQ ID NO: 744053 - DNA, 19 bp, Mus musculus
  siRNA target sequence for Ebfaz (NM_033327.1,2719-2737).
cctgtcgcatctgcaaaat

SEQ ID NO: 744054 - DNA, 19 bp, Mus musculus
  siRNA target sequence for Ebfaz (NM_033327.1,2842-2860).
cctcgacgctggaactcaa

SEQ ID NO: 744055 - DNA, 19 bp, Mus musculus
  siRNA target sequence for Ebfaz (NM_033327.1,2845-2863).
cgacgctggaactcaagat

SEQ ID NO: 744056 - DNA, 19 bp, Mus musculus
  siRNA target sequence for Ebfaz (NM_033327.1,2990-3008).
ggtcaggcttgatgtcaat

SEQ ID NO: 744057 - DNA, 19 bp, Mus musculus
  siRNA target sequence for Ebfaz (NM_033327.1,3110-3128).
cctccgctgccctgaatgt

SEQ ID NO: 744058 - DNA, 19 bp, Mus musculus
  siRNA target sequence for Ebfaz (NM_033327.1,3111-3129).
ctccgctgccctgaatgta

SEQ ID NO: 744059 - DNA, 19 bp, Mus musculus
  siRNA target sequence for Ebfaz (NM_033327.1,3121-3139).
ctgaatgtaacgtgaagtt

SEQ ID NO: 744060 - DNA, 19 bp, Mus musculus
  siRNA target sequence for Ebfaz (NM_033327.1,3173-3191).
ggtggaccaccgtgatctt

SEQ ID NO: 744061 - DNA, 19 bp, Mus musculus
  siRNA target sequence for Ebfaz (NM_033327.1,3174-3192).
gtggaccaccgtgatctta

SEQ ID NO: 744062 - DNA, 19 bp, Mus musculus
  siRNA target sequence for Ebfaz (NM_033327.1,3176-3194).
ggaccaccgtgatcttaca

SEQ ID NO: 744063 - DNA, 19 bp, Mus musculus
  siRNA target sequence for Ebfaz (NM_033327.1,3329-3347).
cgaggaaggcattaaccat

SEQ ID NO: 744064 - DNA, 19 bp, Mus musculus
  siRNA target sequence for Ebfaz (NM_033327.1,3507-3525).
cacgggcaggaggacaaaa

SEQ ID NO: 744065 - DNA, 19 bp, Mus musculus
  siRNA target sequence for Rgpr (NM_033354.2,223-241).
ccatcaagggatacaaata

SEQ ID NO: 744066 - DNA, 19 bp, Mus musculus
  siRNA target sequence for Rgpr (NM_033354.2,245-263).
gacttcagagtggacatta

SEQ ID NO: 744067 - DNA, 19 bp, Mus musculus
  siRNA target sequence for Rgpr (NM_033354.2,283-301).
cagtacagtggagataagt

SEQ ID NO: 744068 - DNA, 19 bp, Mus musculus
  siRNA target sequence for Rgpr (NM_033354.2,423-441).
ctacttgaaaggatcttat

SEQ ID NO: 744069 - DNA, 19 bp, Mus musculus
  siRNA target sequence for Rgpr (NM_033354.2,500-518).
cgacaccgagggatgagta

SEQ ID NO: 744070 - DNA, 19 bp, Mus musculus
  siRNA target sequence for Rgpr (NM_033354.2,505-523).
ccgagggatgagtatgctt

SEQ ID NO: 744071 - DNA, 19 bp, Mus musculus
  siRNA target sequence for Rgpr (NM_033354.2,506-524).
cgagggatgagtatgctta

SEQ ID NO: 744072 - DNA, 19 bp, Mus musculus
  siRNA target sequence for Rgpr (NM_033354.2,507-525).
gagggatgagtatgcttat

SEQ ID NO: 744073 - DNA, 19 bp, Mus musculus
  siRNA target sequence for Rgpr (NM_033354.2,514-532).
gagtatgcttatggaaatt

SEQ ID NO: 744074 - DNA, 19 bp, Mus musculus
  siRNA target sequence for Rgpr (NM_033354.2,520-538).
gcttatggaaattactact

SEQ ID NO: 744075 - DNA, 19 bp, Mus musculus
  siRNA target sequence for Rgpr (NM_033354.2,521-539).
cttatggaaattactacta

SEQ ID NO: 744076 - DNA, 19 bp, Mus musculus
  siRNA target sequence for Rgpr (NM_033354.2,581-599).
ggcaagggagtccttatat

SEQ ID NO: 744077 - DNA, 19 bp, Mus musculus
  siRNA target sequence for Rgpr (NM_033354.2,593-611).
cttatatctggcatgaaga

SEQ ID NO: 744078 - DNA, 19 bp, Mus musculus
  siRNA target sequence for Rgpr (NM_033354.2,680-698).
gtgatacccagttccaatt

SEQ ID NO: 744079 - DNA, 19 bp, Mus musculus
  siRNA target sequence for Rgpr (NM_033354.2,682-700).
gatacccagttccaattta

SEQ ID NO: 744080 - DNA, 19 bp, Mus musculus
  siRNA target sequence for Rgpr (NM_033354.2,917-935).
cagcttggaggcctattca

SEQ ID NO: 744081 - DNA, 19 bp, Mus musculus
  siRNA target sequence for Rgpr (NM_033354.2,966-984).
ggcacctatgaggttctat

SEQ ID NO: 744082 - DNA, 19 bp, Mus musculus
  siRNA target sequence for Rgpr (NM_033354.2,1085-1103).
gcatggaggttttacttaa

SEQ ID NO: 744083 - DNA, 19 bp, Mus musculus
  siRNA target sequence for Rgpr (NM_033354.2,1086-1104).
catggaggttttacttaat

SEQ ID NO: 744084 - DNA, 19 bp, Mus musculus
  siRNA target sequence for Rgpr (NM_033354.2,1089-1107).
ggaggttttacttaatgat

SEQ ID NO: 744085 - DNA, 19 bp, Mus musculus
  siRNA target sequence for Rgpr (NM_033354.2,1165-1183).
cacaaggtggatatcatga

SEQ ID NO: 744086 - DNA, 19 bp, Mus musculus
  siRNA target sequence for Rgpr (NM_033354.2,1173-1191).
ggatatcatgacgttttgt

SEQ ID NO: 744087 - DNA, 19 bp, Mus musculus
  siRNA target sequence for Rgpr (NM_033354.2,1367-1385).
ctgtagccaacctcatcaa

SEQ ID NO: 744088 - DNA, 19 bp, Mus musculus
  siRNA target sequence for Rgpr (NM_033354.2,1471-1489).
gcgcagatcgtggagaaat

SEQ ID NO: 744089 - DNA, 19 bp, Mus musculus
  siRNA target sequence for Rgpr (NM_033354.2,1472-1490).
cgcagatcgtggagaaatt

SEQ ID NO: 744090 - DNA, 19 bp, Mus musculus
  siRNA target sequence for Rgpr (NM_033354.2,1628-1646).
gtacgctggcgctcaatga

SEQ ID NO: 744091 - DNA, 19 bp, Mus musculus
  siRNA target sequence for Rgpr (NM_033354.2,1700-1718).
cggtttgtggagacaaaca

SEQ ID NO: 744092 - DNA, 19 bp, Mus musculus
  siRNA target sequence for Rgpr (NM_033354.2,1766-1784).
ctggagatacagagttgta

SEQ ID NO: 744093 - DNA, 19 bp, Mus musculus
  siRNA target sequence for Rgpr (NM_033354.2,1809-1827).
ggataccctggctggaaaa

SEQ ID NO: 744094 - DNA, 19 bp, Mus musculus
  siRNA target sequence for Rgpr (NM_033354.2,1889-1907).
cggtgaagacagatcatct

SEQ ID NO: 744095 - DNA, 19 bp, Mus musculus
  siRNA target sequence for Rgpr (NM_033354.2,1927-1945).
cacagtcaagagtttatga

SEQ ID NO: 744096 - DNA, 19 bp, Mus musculus
  siRNA target sequence for Rgpr (NM_033354.2,1929-1947).
cagtcaagagtttatgaaa

SEQ ID NO: 744097 - DNA, 19 bp, Mus musculus
  siRNA target sequence for Rgpr (NM_033354.2,2027-2045).
cttctttccaggtgtataa

SEQ ID NO: 744098 - DNA, 19 bp, Mus musculus
  siRNA target sequence for Rgpr (NM_033354.2,2030-2048).
ctttccaggtgtataagct

SEQ ID NO: 744099 - DNA, 19 bp, Mus musculus
  siRNA target sequence for Rgpr (NM_033354.2,2058-2076).
ctcccgtctggcagattat

SEQ ID NO: 744100 - DNA, 19 bp, Mus musculus
  siRNA target sequence for Rgpr (NM_033354.2,2284-2302).
gacctggagcaaaatagaa

SEQ ID NO: 744101 - DNA, 19 bp, Mus musculus
  siRNA target sequence for Rgpr (NM_033354.2,2328-2346).
gactccttcagatatttat

SEQ ID NO: 744102 - DNA, 19 bp, Mus musculus
  siRNA target sequence for Rgpr (NM_033354.2,2489-2507).
ccctgcagcgagataccta

SEQ ID NO: 744103 - DNA, 19 bp, Mus musculus
  siRNA target sequence for Rgpr (NM_033354.2,2490-2508).
cctgcagcgagatacctat

SEQ ID NO: 744104 - DNA, 19 bp, Mus musculus
  siRNA target sequence for Rgpr (NM_033354.2,2491-2509).
ctgcagcgagatacctatt

SEQ ID NO: 744105 - DNA, 19 bp, Mus musculus
  siRNA target sequence for Rgpr (NM_033354.2,2493-2511).
gcagcgagatacctattca

SEQ ID NO: 744106 - DNA, 19 bp, Mus musculus
  siRNA target sequence for Rgpr (NM_033354.2,2618-2636).
gaagggttggagaggatat

SEQ ID NO: 744107 - DNA, 19 bp, Mus musculus
  siRNA target sequence for Rgpr (NM_033354.2,2654-2672).
cctttggagagaacacaat

SEQ ID NO: 744108 - DNA, 19 bp, Mus musculus
  siRNA target sequence for Rgpr (NM_033354.2,2696-2714).
ctgatggtctcgaagtcat

SEQ ID NO: 744109 - DNA, 19 bp, Mus musculus
  siRNA target sequence for Rgpr (NM_033354.2,2701-2719).
ggtctcgaagtcatttcca

SEQ ID NO: 744110 - DNA, 19 bp, Mus musculus
  siRNA target sequence for Rgpr (NM_033354.2,2740-2758).
cccagggttccaagttttt

SEQ ID NO: 744111 - DNA, 19 bp, Mus musculus
  siRNA target sequence for Rgpr (NM_033354.2,2742-2760).
cagggttccaagtttttct

SEQ ID NO: 744112 - DNA, 19 bp, Mus musculus
  siRNA target sequence for Rgpr (NM_033354.2,2744-2762).
gggttccaagtttttctga

SEQ ID NO: 744113 - DNA, 19 bp, Mus musculus
  siRNA target sequence for Rgpr (NM_033354.2,2829-2847).
ccccgatgcttcacagaaa

SEQ ID NO: 744114 - DNA, 19 bp, Mus musculus
  siRNA target sequence for Rgpr (NM_033354.2,2931-2949).
gtccacctctggagatgaa

SEQ ID NO: 744115 - DNA, 19 bp, Mus musculus
  siRNA target sequence for Rgpr (NM_033354.2,3227-3245).
gtgctgttcctctctacaa

SEQ ID NO: 744116 - DNA, 19 bp, Mus musculus
  siRNA target sequence for Rgpr (NM_033354.2,3232-3250).
gttcctctctacaatccat

SEQ ID NO: 744117 - DNA, 19 bp, Mus musculus
  siRNA target sequence for Tcfcp2 (NM_033476.1,96-114).
cgctagccgacgaagtgat

SEQ ID NO: 744118 - DNA, 19 bp, Mus musculus
  siRNA target sequence for Tcfcp2 (NM_033476.1,123-141).
ggcttgtgcaggactttga

SEQ ID NO: 744119 - DNA, 19 bp, Mus musculus
  siRNA target sequence for Tcfcp2 (NM_033476.1,170-188).
ctgggtgctggtgcttata

SEQ ID NO: 744120 - DNA, 19 bp, Mus musculus
  siRNA target sequence for Tcfcp2 (NM_033476.1,172-190).
gggtgctggtgcttatagt

SEQ ID NO: 744121 - DNA, 19 bp, Mus musculus
  siRNA target sequence for Tcfcp2 (NM_033476.1,173-191).
ggtgctggtgcttatagta

SEQ ID NO: 744122 - DNA, 19 bp, Mus musculus
  siRNA target sequence for Tcfcp2 (NM_033476.1,202-220).
cctcgcattgcccattttt

SEQ ID NO: 744123 - DNA, 19 bp, Mus musculus
  siRNA target sequence for Tcfcp2 (NM_033476.1,237-255).
gtttgcctcccgataatga

SEQ ID NO: 744124 - DNA, 19 bp, Mus musculus
  siRNA target sequence for Tcfcp2 (NM_033476.1,327-345).
ccctgacgtacctcaatca

SEQ ID NO: 744125 - DNA, 19 bp, Mus musculus
  siRNA target sequence for Tcfcp2 (NM_033476.1,328-346).
cctgacgtacctcaatcaa

SEQ ID NO: 744126 - DNA, 19 bp, Mus musculus
  siRNA target sequence for Tcfcp2 (NM_033476.1,364-382).
ccgaatgctagacaataga

SEQ ID NO: 744127 - DNA, 19 bp, Mus musculus
  siRNA target sequence for Tcfcp2 (NM_033476.1,426-444).
gcatattccgcgtagtgtt

SEQ ID NO: 744128 - DNA, 19 bp, Mus musculus
  siRNA target sequence for Tcfcp2 (NM_033476.1,516-534).
ggattctcgacatagatat

SEQ ID NO: 744129 - DNA, 19 bp, Mus musculus
  siRNA target sequence for Tcfcp2 (NM_033476.1,526-544).
catagatatcccaatgtct

SEQ ID NO: 744130 - DNA, 19 bp, Mus musculus
  siRNA target sequence for Tcfcp2 (NM_033476.1,702-720).
gagtgcagatcgatacctt

SEQ ID NO: 744131 - DNA, 19 bp, Mus musculus
  siRNA target sequence for Tcfcp2 (NM_033476.1,843-861).
ggacgccccatgaaaaaga

SEQ ID NO: 744132 - DNA, 19 bp, Mus musculus
  siRNA target sequence for Tcfcp2 (NM_033476.1,919-937).
gatcacctacgtcaacaat

SEQ ID NO: 744133 - DNA, 19 bp, Mus musculus
  siRNA target sequence for Tcfcp2 (NM_033476.1,1131-1149).
caggggcagatttactgaa

SEQ ID NO: 744134 - DNA, 19 bp, Mus musculus
  siRNA target sequence for Tcfcp2 (NM_033476.1,1139-1157).
gatttactgaaactaacta

SEQ ID NO: 744135 - DNA, 19 bp, Mus musculus
  siRNA target sequence for Tcfcp2 (NM_033476.1,1158-1176).
gagacgacgtgatccaaat

SEQ ID NO: 744136 - DNA, 19 bp, Mus musculus
  siRNA target sequence for Tcfcp2 (NM_033476.1,1160-1178).
gacgacgtgatccaaatct

SEQ ID NO: 744137 - DNA, 19 bp, Mus musculus
  siRNA target sequence for Tcfcp2 (NM_033476.1,1190-1208).
gatggaatcagactcttta

SEQ ID NO: 744138 - DNA, 19 bp, Mus musculus
  siRNA target sequence for Tcfcp2 (NM_033476.1,1231-1249).
gcggccaaggctaaccatt

SEQ ID NO: 744139 - DNA, 19 bp, Mus musculus
  siRNA target sequence for Tcfcp2 (NM_033476.1,1232-1250).
cggccaaggctaaccattt

SEQ ID NO: 744140 - DNA, 19 bp, Mus musculus
  siRNA target sequence for Tcfcp2 (NM_033476.1,1233-1251).
ggccaaggctaaccattta

SEQ ID NO: 744141 - DNA, 19 bp, Mus musculus
  siRNA target sequence for Tcfcp2 (NM_033476.1,1234-1252).
gccaaggctaaccatttat

SEQ ID NO: 744142 - DNA, 19 bp, Mus musculus
  siRNA target sequence for Tcfcp2 (NM_033476.1,1236-1254).
caaggctaaccatttatgt

SEQ ID NO: 744143 - DNA, 19 bp, Mus musculus
  siRNA target sequence for Tcfcp2 (NM_033476.1,1326-1344).
gggattcaaacggtacttt

SEQ ID NO: 744144 - DNA, 19 bp, Mus musculus
  siRNA target sequence for Tcfcp2 (NM_033476.1,1348-1366).
cgtgtaccatgctatctat

SEQ ID NO: 744145 - DNA, 19 bp, Mus musculus
  siRNA target sequence for Tcfcp2 (NM_033476.1,1385-1403).
gtcgaactcacagaaaaaa

SEQ ID NO: 744146 - DNA, 19 bp, Mus musculus
  siRNA target sequence for Tcfcp2 (NM_033476.1,1551-1569).
ccagtgacagctatcatgt

SEQ ID NO: 744147 - DNA, 19 bp, Mus musculus
  siRNA target sequence for Tcfcp2 (NM_033476.1,1560-1578).
gctatcatgtcattctcaa

SEQ ID NO: 744148 - DNA, 19 bp, Mus musculus
  siRNA target sequence for Ly6g6d (NM_033478.1,200-218).
cgaccttgagccatcacta

SEQ ID NO: 744149 - DNA, 19 bp, Mus musculus
  siRNA target sequence for Ferd3l (NM_033522.2,223-241).
gactgtcgcagtttgatga

SEQ ID NO: 744150 - DNA, 19 bp, Mus musculus
  siRNA target sequence for Ferd3l (NM_033522.2,225-243).
ctgtcgcagtttgatgaaa

SEQ ID NO: 744151 - DNA, 19 bp, Mus musculus
  siRNA target sequence for Ferd3l (NM_033522.2,227-245).
gtcgcagtttgatgaaaga

SEQ ID NO: 744152 - DNA, 19 bp, Mus musculus
  siRNA target sequence for Ferd3l (NM_033522.2,262-280).
gggacgaagtggaatatga

SEQ ID NO: 744153 - DNA, 19 bp, Mus musculus
  siRNA target sequence for Ferd3l (NM_033522.2,409-427).
ggatgttcaacctaaacga

SEQ ID NO: 744154 - DNA, 19 bp, Mus musculus
  siRNA target sequence for Ferd3l (NM_033522.2,437-455).
ccagctgcgcagaaaggta

SEQ ID NO: 744155 - DNA, 19 bp, Mus musculus
  siRNA target sequence for Ferd3l (NM_033522.2,456-474).
cccaccttcgcttatgaga

SEQ ID NO: 744156 - DNA, 19 bp, Mus musculus
  siRNA target sequence for Ferd3l (NM_033522.2,457-475).
ccaccttcgcttatgagaa

SEQ ID NO: 744157 - DNA, 19 bp, Mus musculus
  siRNA target sequence for Ferd3l (NM_033522.2,507-525).
gccatcgtctacatttcct

SEQ ID NO: 744158 - DNA, 19 bp, Mus musculus
  siRNA target sequence for Spred2 (NM_033523.2,667-685).
ccatggcgagcgacagaaa

SEQ ID NO: 744159 - DNA, 19 bp, Mus musculus
  siRNA target sequence for Spred2 (NM_033523.2,809-827).
gatgcacgagcctttgaca

SEQ ID NO: 744160 - DNA, 19 bp, Mus musculus
  siRNA target sequence for Spred2 (NM_033523.2,843-861).
ccattgaagaccttataga

SEQ ID NO: 744161 - DNA, 19 bp, Mus musculus
  siRNA target sequence for Spred2 (NM_033523.2,879-897).
cttccactctccataacga

SEQ ID NO: 744162 - DNA, 19 bp, Mus musculus
  siRNA target sequence for Spred2 (NM_033523.2,1003-1021).
ctgtgagcaccggaagatt

SEQ ID NO: 744163 - DNA, 19 bp, Mus musculus
  siRNA target sequence for Spred2 (NM_033523.2,1005-1023).
gtgagcaccggaagattta

SEQ ID NO: 744164 - DNA, 19 bp, Mus musculus
  siRNA target sequence for Spred2 (NM_033523.2,1007-1025).
gagcaccggaagatttata

SEQ ID NO: 744165 - DNA, 19 bp, Mus musculus
  siRNA target sequence for Spred2 (NM_033523.2,1147-1165).
ctggatgaccggttatgaa

SEQ ID NO: 744166 - DNA, 19 bp, Mus musculus
  siRNA target sequence for Spred2 (NM_033523.2,1149-1167).
ggatgaccggttatgaaga

SEQ ID NO: 744167 - DNA, 19 bp, Mus musculus
  siRNA target sequence for Spred2 (NM_033523.2,1394-1412).
gtgtactgcagggatatgt

SEQ ID NO: 744168 - DNA, 19 bp, Mus musculus
  siRNA target sequence for Spred2 (NM_033523.2,1396-1414).
gtactgcagggatatgttt

SEQ ID NO: 744169 - DNA, 19 bp, Mus musculus
  siRNA target sequence for Spred2 (NM_033523.2,1401-1419).
gcagggatatgtttaatca

SEQ ID NO: 744170 - DNA, 19 bp, Mus musculus
  siRNA target sequence for Spred2 (NM_033523.2,1594-1612).
ccggtggatggctctaatt

SEQ ID NO: 744171 - DNA, 19 bp, Mus musculus
  siRNA target sequence for Spred2 (NM_033523.2,1604-1622).
gctctaattgccttgtctt

SEQ ID NO: 744172 - DNA, 19 bp, Mus musculus
  siRNA target sequence for Spred2 (NM_033523.2,1605-1623).
ctctaattgccttgtcttt

SEQ ID NO: 744173 - DNA, 19 bp, Mus musculus
  siRNA target sequence for Spred2 (NM_033523.2,1620-1638).
ctttcctggccccttgtat

SEQ ID NO: 744174 - DNA, 19 bp, Mus musculus
  siRNA target sequence for Spred1 (NM_033524.1,16-34).
gcgacttctgacaacgata

SEQ ID NO: 744175 - DNA, 19 bp, Mus musculus
  siRNA target sequence for Spred1 (NM_033524.1,17-35).
cgacttctgacaacgataa

SEQ ID NO: 744176 - DNA, 19 bp, Mus musculus
  siRNA target sequence for Spred1 (NM_033524.1,18-36).
gacttctgacaacgataat

SEQ ID NO: 744177 - DNA, 19 bp, Mus musculus
  siRNA target sequence for Spred1 (NM_033524.1,141-159).
ccctcatcaggaagagaat

SEQ ID NO: 744178 - DNA, 19 bp, Mus musculus
  siRNA target sequence for Spred1 (NM_033524.1,216-234).
ggaatgtatgcttaagaaa

SEQ ID NO: 744179 - DNA, 19 bp, Mus musculus
  siRNA target sequence for Spred1 (NM_033524.1,291-309).
gaagtttggccttaccttt

SEQ ID NO: 744180 - DNA, 19 bp, Mus musculus
  siRNA target sequence for Spred1 (NM_033524.1,350-368).
gaagagctatagaggatat

SEQ ID NO: 744181 - DNA, 19 bp, Mus musculus
  siRNA target sequence for Spred1 (NM_033524.1,356-374).
ctatagaggatatatctct

SEQ ID NO: 744182 - DNA, 19 bp, Mus musculus
  siRNA target sequence for Spred1 (NM_033524.1,376-394).
gggtgcccagcgtcaaaaa

SEQ ID NO: 744183 - DNA, 19 bp, Mus musculus
  siRNA target sequence for Spred1 (NM_033524.1,378-396).
gtgcccagcgtcaaaaact

SEQ ID NO: 744184 - DNA, 19 bp, Mus musculus
  siRNA target sequence for Spred1 (NM_033524.1,380-398).
gcccagcgtcaaaaactga

SEQ ID NO: 744185 - DNA, 19 bp, Mus musculus
  siRNA target sequence for Spred1 (NM_033524.1,443-461).
cttcccgttccctagtgaa

SEQ ID NO: 744186 - DNA, 19 bp, Mus musculus
  siRNA target sequence for Spred1 (NM_033524.1,452-470).
ccctagtgaaagatcactt

SEQ ID NO: 744187 - DNA, 19 bp, Mus musculus
  siRNA target sequence for Spred1 (NM_033524.1,453-471).
cctagtgaaagatcacttt

SEQ ID NO: 744188 - DNA, 19 bp, Mus musculus
  siRNA target sequence for Spred1 (NM_033524.1,524-542).
gaccgttaccctttgaaga

SEQ ID NO: 744189 - DNA, 19 bp, Mus musculus
  siRNA target sequence for Spred1 (NM_033524.1,601-619).
caaggcctagacattcaga

SEQ ID NO: 744190 - DNA, 19 bp, Mus musculus
  siRNA target sequence for Spred1 (NM_033524.1,616-634).
cagagccgaagtatggaat

SEQ ID NO: 744191 - DNA, 19 bp, Mus musculus
  siRNA target sequence for Spred1 (NM_033524.1,618-636).
gagccgaagtatggaatat

SEQ ID NO: 744192 - DNA, 19 bp, Mus musculus
  siRNA target sequence for Spred1 (NM_033524.1,620-638).
gccgaagtatggaatatgt

SEQ ID NO: 744193 - DNA, 19 bp, Mus musculus
  siRNA target sequence for Spred1 (NM_033524.1,637-655).
gtacagcggcaaatatcta

SEQ ID NO: 744194 - DNA, 19 bp, Mus musculus
  siRNA target sequence for Spred1 (NM_033524.1,642-660).
gcggcaaatatctaaggaa

SEQ ID NO: 744195 - DNA, 19 bp, Mus musculus
  siRNA target sequence for Spred1 (NM_033524.1,643-661).
cggcaaatatctaaggaat

SEQ ID NO: 744196 - DNA, 19 bp, Mus musculus
  siRNA target sequence for Spred1 (NM_033524.1,690-708).
ccctttgaagtcaatcaga

SEQ ID NO: 744197 - DNA, 19 bp, Mus musculus
  siRNA target sequence for Spred1 (NM_033524.1,735-753).
gattgttagaataaatcct

SEQ ID NO: 744198 - DNA, 19 bp, Mus musculus
  siRNA target sequence for Spred1 (NM_033524.1,743-761).
gaataaatcctcgagatat

SEQ ID NO: 744199 - DNA, 19 bp, Mus musculus
  siRNA target sequence for Spred1 (NM_033524.1,762-780).
cttaatacgtcgatatgca

SEQ ID NO: 744200 - DNA, 19 bp, Mus musculus
  siRNA target sequence for Spred1 (NM_033524.1,794-812).
cggacatgtggaaaaatga

SEQ ID NO: 744201 - DNA, 19 bp, Mus musculus
  siRNA target sequence for Spred1 (NM_033524.1,830-848).
ctgactccagtgttccatt

SEQ ID NO: 744202 - DNA, 19 bp, Mus musculus
  siRNA target sequence for Spred1 (NM_033524.1,890-908).
gtggggatgagactaagtt

SEQ ID NO: 744203 - DNA, 19 bp, Mus musculus
  siRNA target sequence for Spred1 (NM_033524.1,892-910).
ggggatgagactaagttaa

SEQ ID NO: 744204 - DNA, 19 bp, Mus musculus
  siRNA target sequence for Spred1 (NM_033524.1,894-912).
ggatgagactaagttaagt

SEQ ID NO: 744205 - DNA, 19 bp, Mus musculus
  siRNA target sequence for Spred1 (NM_033524.1,895-913).
gatgagactaagttaagtt

SEQ ID NO: 744206 - DNA, 19 bp, Mus musculus
  siRNA target sequence for Spred1 (NM_033524.1,941-959).
cacagcctccctcgttaaa

SEQ ID NO: 744207 - DNA, 19 bp, Mus musculus
  siRNA target sequence for Spred1 (NM_033524.1,943-961).
cagcctccctcgttaaaat

SEQ ID NO: 744208 - DNA, 19 bp, Mus musculus
  siRNA target sequence for Spred1 (NM_033524.1,945-963).
gcctccctcgttaaaattt

SEQ ID NO: 744209 - DNA, 19 bp, Mus musculus
  siRNA target sequence for Spred1 (NM_033524.1,946-964).
cctccctcgttaaaattta

SEQ ID NO: 744210 - DNA, 19 bp, Mus musculus
  siRNA target sequence for Spred1 (NM_033524.1,949-967).
ccctcgttaaaatttaagt

SEQ ID NO: 744211 - DNA, 19 bp, Mus musculus
  siRNA target sequence for Spred1 (NM_033524.1,951-969).
ctcgttaaaatttaagtca

SEQ ID NO: 744212 - DNA, 19 bp, Mus musculus
  siRNA target sequence for Spred1 (NM_033524.1,994-1012).
cgttctcgctgcgtatact

SEQ ID NO: 744213 - DNA, 19 bp, Mus musculus
  siRNA target sequence for Spred1 (NM_033524.1,1022-1040).
ggtttaatcatgaagaaaa

SEQ ID NO: 744214 - DNA, 19 bp, Mus musculus
  siRNA target sequence for Spred1 (NM_033524.1,1062-1080).
cgctccagatcctgttaaa

SEQ ID NO: 744215 - DNA, 19 bp, Mus musculus
  siRNA target sequence for Spred1 (NM_033524.1,1066-1084).
ccagatcctgttaaaagat

SEQ ID NO: 744216 - DNA, 19 bp, Mus musculus
  siRNA target sequence for Spred1 (NM_033524.1,1072-1090).
cctgttaaaagatgcatat

SEQ ID NO: 744217 - DNA, 19 bp, Mus musculus
  siRNA target sequence for Spred1 (NM_033524.1,1112-1130).
gtgctgagagcatgctata

SEQ ID NO: 744218 - DNA, 19 bp, Mus musculus
  siRNA target sequence for Spred1 (NM_033524.1,1119-1137).
gagcatgctatatcattgt

SEQ ID NO: 744219 - DNA, 19 bp, Mus musculus
  siRNA target sequence for Spred1 (NM_033524.1,1121-1139).
gcatgctatatcattgtat

SEQ ID NO: 744220 - DNA, 19 bp, Mus musculus
  siRNA target sequence for Spred1 (NM_033524.1,1125-1143).
gctatatcattgtatgtca

SEQ ID NO: 744221 - DNA, 19 bp, Mus musculus
  siRNA target sequence for Spred1 (NM_033524.1,1254-1272).
ctgctacgtccctttgaga

SEQ ID NO: 744222 - DNA, 19 bp, Mus musculus
  siRNA target sequence for Spred1 (NM_033524.1,1256-1274).
gctacgtccctttgagaat

SEQ ID NO: 744223 - DNA, 19 bp, Mus musculus
  siRNA target sequence for D8Ertd531e (NM_033560.2,393-411).
gaactcccattccagtata

SEQ ID NO: 744224 - DNA, 19 bp, Mus musculus
  siRNA target sequence for D8Ertd531e (NM_033560.2,396-414).
ctcccattccagtatagct

SEQ ID NO: 744225 - DNA, 19 bp, Mus musculus
  siRNA target sequence for D8Ertd531e (NM_033560.2,404-422).
ccagtatagctgaaataca

SEQ ID NO: 744226 - DNA, 19 bp, Mus musculus
  siRNA target sequence for D8Ertd531e (NM_033560.2,405-423).
cagtatagctgaaatacaa

SEQ ID NO: 744227 - DNA, 19 bp, Mus musculus
  siRNA target sequence for D8Ertd531e (NM_033560.2,407-425).
gtatagctgaaatacaaaa

SEQ ID NO: 744228 - DNA, 19 bp, Mus musculus
  siRNA target sequence for D8Ertd531e (NM_033560.2,440-458).
gattgccattcacagtaaa

SEQ ID NO: 744229 - DNA, 19 bp, Mus musculus
  siRNA target sequence for D8Ertd531e (NM_033560.2,513-531).
gccagtgattagtgtttat

SEQ ID NO: 744230 - DNA, 19 bp, Mus musculus
  siRNA target sequence for D8Ertd531e (NM_033560.2,536-554).
caatcagacatcatttaat

SEQ ID NO: 744231 - DNA, 19 bp, Mus musculus
  siRNA target sequence for D8Ertd531e (NM_033560.2,540-558).
cagacatcatttaatggat

SEQ ID NO: 744232 - DNA, 19 bp, Mus musculus
  siRNA target sequence for D8Ertd531e (NM_033560.2,578-596).
cctctccattagtaagcaa

SEQ ID NO: 744233 - DNA, 19 bp, Mus musculus
  siRNA target sequence for D8Ertd531e (NM_033560.2,579-597).
ctctccattagtaagcaat

SEQ ID NO: 744234 - DNA, 19 bp, Mus musculus
  siRNA target sequence for D8Ertd531e (NM_033560.2,581-599).
ctccattagtaagcaattt

SEQ ID NO: 744235 - DNA, 19 bp, Mus musculus
  siRNA target sequence for D8Ertd531e (NM_033560.2,772-790).
ccagaagctaacaggaata

SEQ ID NO: 744236 - DNA, 19 bp, Mus musculus
  siRNA target sequence for D8Ertd531e (NM_033560.2,773-791).
cagaagctaacaggaatat

SEQ ID NO: 744237 - DNA, 19 bp, Mus musculus
  siRNA target sequence for D8Ertd531e (NM_033560.2,778-796).
gctaacaggaatatcacat

SEQ ID NO: 744238 - DNA, 19 bp, Mus musculus
  siRNA target sequence for D8Ertd531e (NM_033560.2,805-823).
gtagctgacactgtttctt

SEQ ID NO: 744239 - DNA, 19 bp, Mus musculus
  siRNA target sequence for D8Ertd531e (NM_033560.2,898-916).
gttcccacaactgaatctt

SEQ ID NO: 744240 - DNA, 19 bp, Mus musculus
  siRNA target sequence for D8Ertd531e (NM_033560.2,914-932).
cttcagcatcggttaacca

SEQ ID NO: 744241 - DNA, 19 bp, Mus musculus
  siRNA target sequence for D8Ertd531e (NM_033560.2,917-935).
cagcatcggttaaccaaaa

SEQ ID NO: 744242 - DNA, 19 bp, Mus musculus
  siRNA target sequence for D8Ertd531e (NM_033560.2,923-941).
cggttaaccaaaatggttt

SEQ ID NO: 744243 - DNA, 19 bp, Mus musculus
  siRNA target sequence for D8Ertd531e (NM_033560.2,924-942).
ggttaaccaaaatggtttt

SEQ ID NO: 744244 - DNA, 19 bp, Mus musculus
  siRNA target sequence for D8Ertd531e (NM_033560.2,1026-1044).
ggaggaggtattactagaa

SEQ ID NO: 744245 - DNA, 19 bp, Mus musculus
  siRNA target sequence for D8Ertd531e (NM_033560.2,1032-1050).
ggtattactagaacagttt

SEQ ID NO: 744246 - DNA, 19 bp, Mus musculus
  siRNA target sequence for D8Ertd531e (NM_033560.2,1056-1074).
gttgcctcaactaaaacaa

SEQ ID NO: 744247 - DNA, 19 bp, Mus musculus
  siRNA target sequence for D8Ertd531e (NM_033560.2,1113-1131).
ggaattagcaagaaaaaat

SEQ ID NO: 744248 - DNA, 19 bp, Mus musculus
  siRNA target sequence for D8Ertd531e (NM_033560.2,1163-1181).
ggcaaaccgttttagataa

SEQ ID NO: 744249 - DNA, 19 bp, Mus musculus
  siRNA target sequence for D8Ertd531e (NM_033560.2,1169-1187).
ccgttttagataagtatga

SEQ ID NO: 744250 - DNA, 19 bp, Mus musculus
  siRNA target sequence for D8Ertd531e (NM_033560.2,1170-1188).
cgttttagataagtatgaa

SEQ ID NO: 744251 - DNA, 19 bp, Mus musculus
  siRNA target sequence for D8Ertd531e (NM_033560.2,1182-1200).
gtatgaattacttctacaa

SEQ ID NO: 744252 - DNA, 19 bp, Mus musculus
  siRNA target sequence for D8Ertd531e (NM_033560.2,1297-1315).
cacgaagctgaggaagaat

SEQ ID NO: 744253 - DNA, 19 bp, Mus musculus
  siRNA target sequence for D8Ertd531e (NM_033560.2,1306-1324).
gaggaagaatcggataata

SEQ ID NO: 744254 - DNA, 19 bp, Mus musculus
  siRNA target sequence for D8Ertd531e (NM_033560.2,1346-1364).
gaaaaactgaaatagatga

SEQ ID NO: 744255 - DNA, 19 bp, Mus musculus
  siRNA target sequence for D8Ertd531e (NM_033560.2,1360-1378).
gatgattttctcaatagct

SEQ ID NO: 744256 - DNA, 19 bp, Mus musculus
  siRNA target sequence for D8Ertd531e (NM_033560.2,1369-1387).
ctcaatagcttcaaggaaa

SEQ ID NO: 744257 - DNA, 19 bp, Mus musculus
  siRNA target sequence for D8Ertd531e (NM_033560.2,1445-1463).
cgatgcacagccaatttca

SEQ ID NO: 744258 - DNA, 19 bp, Mus musculus
  siRNA target sequence for D8Ertd531e (NM_033560.2,1446-1464).
gatgcacagccaatttcat

SEQ ID NO: 744259 - DNA, 19 bp, Mus musculus
  siRNA target sequence for BC005682 (NM_033562.2,115-133).
gccgtgcagttggaattga

SEQ ID NO: 744260 - DNA, 19 bp, Mus musculus
  siRNA target sequence for BC005682 (NM_033562.2,116-134).
ccgtgcagttggaattgat

SEQ ID NO: 744261 - DNA, 19 bp, Mus musculus
  siRNA target sequence for BC005682 (NM_033562.2,118-136).
gtgcagttggaattgatca

SEQ ID NO: 744262 - DNA, 19 bp, Mus musculus
  siRNA target sequence for BC005682 (NM_033562.2,126-144).
ggaattgatcacacctttt

SEQ ID NO: 744263 - DNA, 19 bp, Mus musculus
  siRNA target sequence for BC005682 (NM_033562.2,132-150).
gatcacaccttttcagtta

SEQ ID NO: 744264 - DNA, 19 bp, Mus musculus
  siRNA target sequence for BC005682 (NM_033562.2,137-155).
caccttttcagttatactt

SEQ ID NO: 744265 - DNA, 19 bp, Mus musculus
  siRNA target sequence for BC005682 (NM_033562.2,153-171).
cttcaatcctgaattaatt

SEQ ID NO: 744266 - DNA, 19 bp, Mus musculus
  siRNA target sequence for BC005682 (NM_033562.2,194-212).
ggctaatcaccaatttctt

SEQ ID NO: 744267 - DNA, 19 bp, Mus musculus
  siRNA target sequence for BC005682 (NM_033562.2,195-213).
gctaatcaccaatttctta

SEQ ID NO: 744268 - DNA, 19 bp, Mus musculus
  siRNA target sequence for BC005682 (NM_033562.2,196-214).
ctaatcaccaatttcttat

SEQ ID NO: 744269 - DNA, 19 bp, Mus musculus
  siRNA target sequence for BC005682 (NM_033562.2,220-238).
ggtccagttggattcaatt

SEQ ID NO: 744270 - DNA, 19 bp, Mus musculus
  siRNA target sequence for BC005682 (NM_033562.2,230-248).
gattcaattttttgtttaa

SEQ ID NO: 744271 - DNA, 19 bp, Mus musculus
  siRNA target sequence for BC005682 (NM_033562.2,243-261).
gtttaacatgatttttcta

SEQ ID NO: 744272 - DNA, 19 bp, Mus musculus
  siRNA target sequence for BC005682 (NM_033562.2,264-282).
ccgttattgtcgaatgcta

SEQ ID NO: 744273 - DNA, 19 bp, Mus musculus
  siRNA target sequence for BC005682 (NM_033562.2,388-406).
ggccaggcctttacaataa

SEQ ID NO: 744274 - DNA, 19 bp, Mus musculus
  siRNA target sequence for BC005682 (NM_033562.2,389-407).
gccaggcctttacaataat

SEQ ID NO: 744275 - DNA, 19 bp, Mus musculus
  siRNA target sequence for BC005682 (NM_033562.2,436-454).
ccgtatgtccgcatgaact

SEQ ID NO: 744276 - DNA, 19 bp, Mus musculus
  siRNA target sequence for BC005682 (NM_033562.2,437-455).
cgtatgtccgcatgaactt

SEQ ID NO: 744277 - DNA, 19 bp, Mus musculus
  siRNA target sequence for BC005682 (NM_033562.2,450-468).
gaacttctttggtcttcta

SEQ ID NO: 744278 - DNA, 19 bp, Mus musculus
  siRNA target sequence for BC005682 (NM_033562.2,519-537).
gctggggaactcaattata

SEQ ID NO: 744279 - DNA, 19 bp, Mus musculus
  siRNA target sequence for BC005682 (NM_033562.2,530-548).
caattatagtggacctttt

SEQ ID NO: 744280 - DNA, 19 bp, Mus musculus
  siRNA target sequence for BC005682 (NM_033562.2,540-558).
ggaccttttgggtattgca

SEQ ID NO: 744281 - DNA, 19 bp, Mus musculus
  siRNA target sequence for BC005682 (NM_033562.2,556-574).
gcagttgggcacatatatt

SEQ ID NO: 744282 - DNA, 19 bp, Mus musculus
  siRNA target sequence for BC005682 (NM_033562.2,603-621).
gcctggtggaataagaatt

SEQ ID NO: 744283 - DNA, 19 bp, Mus musculus
  siRNA target sequence for BC005682 (NM_033562.2,605-623).
ctggtggaataagaattct

SEQ ID NO: 744284 - DNA, 19 bp, Mus musculus
  siRNA target sequence for BC005682 (NM_033562.2,662-680).
cagatgaggatcccaatta

SEQ ID NO: 744285 - DNA, 19 bp, Mus musculus
  siRNA target sequence for Mpv17l (NM_033564.1,189-207).
ccttccacggaaacttcaa

SEQ ID NO: 744286 - DNA, 19 bp, Mus musculus
  siRNA target sequence for Mpv17l (NM_033564.1,344-362).
caggggaaggatgacatat

SEQ ID NO: 744287 - DNA, 19 bp, Mus musculus
  siRNA target sequence for Mpv17l (NM_033564.1,379-397).
gaaattctggaatacgtat

SEQ ID NO: 744288 - DNA, 19 bp, Mus musculus
  siRNA target sequence for Mpv17l (NM_033564.1,494-512).
ctctgggccaccttcctat

SEQ ID NO: 744289 - DNA, 19 bp, Mus musculus
  siRNA target sequence for Mpv17l (NM_033564.1,536-554).
ggtacactgcagtccatat

SEQ ID NO: 744290 - DNA, 19 bp, Mus musculus
  siRNA target sequence for Mpv17l (NM_033564.1,537-555).
gtacactgcagtccatatt

SEQ ID NO: 744291 - DNA, 19 bp, Mus musculus
  siRNA target sequence for Mpv17l (NM_033564.1,570-588).
ggaaggaggcgagtgataa

SEQ ID NO: 744292 - DNA, 19 bp, Mus musculus
  siRNA target sequence for Laf4l (NM_033565.1,327-345).
gaatgtgctgcgcatgaaa

SEQ ID NO: 744293 - DNA, 19 bp, Mus musculus
  siRNA target sequence for Laf4l (NM_033565.1,387-405).
cgccttcccacctagttct

SEQ ID NO: 744294 - DNA, 19 bp, Mus musculus
  siRNA target sequence for Laf4l (NM_033565.1,415-433).
gctgagccatacaaagtca

SEQ ID NO: 744295 - DNA, 19 bp, Mus musculus
  siRNA target sequence for Laf4l (NM_033565.1,475-493).
cttggaaactacgatgaaa

SEQ ID NO: 744296 - DNA, 19 bp, Mus musculus
  siRNA target sequence for Laf4l (NM_033565.1,504-522).
cataggagacagatcgata

SEQ ID NO: 744297 - DNA, 19 bp, Mus musculus
  siRNA target sequence for Laf4l (NM_033565.1,578-596).
caaacccaaatttttttga

SEQ ID NO: 744298 - DNA, 19 bp, Mus musculus
  siRNA target sequence for Laf4l (NM_033565.1,600-618).
gagacatggaggatctcat

SEQ ID NO: 744299 - DNA, 19 bp, Mus musculus
  siRNA target sequence for Laf4l (NM_033565.1,802-820).
ggctcagagcactccaaat

SEQ ID NO: 744300 - DNA, 19 bp, Mus musculus
  siRNA target sequence for Laf4l (NM_033565.1,804-822).
ctcagagcactccaaatct

SEQ ID NO: 744301 - DNA, 19 bp, Mus musculus
  siRNA target sequence for Laf4l (NM_033565.1,847-865).
caggctgtttcttcattaa

SEQ ID NO: 744302 - DNA, 19 bp, Mus musculus
  siRNA target sequence for Laf4l (NM_033565.1,910-928).
gaacatcagcgctccaaat

SEQ ID NO: 744303 - DNA, 19 bp, Mus musculus
  siRNA target sequence for Laf4l (NM_033565.1,1012-1030).
ccttctttgatgtcaaaat

SEQ ID NO: 744304 - DNA, 19 bp, Mus musculus
  siRNA target sequence for Laf4l (NM_033565.1,1121-1139).
gcagccagtctcatggtaa

SEQ ID NO: 744305 - DNA, 19 bp, Mus musculus
  siRNA target sequence for Laf4l (NM_033565.1,1122-1140).
cagccagtctcatggtaat

SEQ ID NO: 744306 - DNA, 19 bp, Mus musculus
  siRNA target sequence for Laf4l (NM_033565.1,1126-1144).
cagtctcatggtaatagca

SEQ ID NO: 744307 - DNA, 19 bp, Mus musculus
  siRNA target sequence for Laf4l (NM_033565.1,1231-1249).
gtaagctgtgtagatgaaa

SEQ ID NO: 744308 - DNA, 19 bp, Mus musculus
  siRNA target sequence for Laf4l (NM_033565.1,1235-1253).
gctgtgtagatgaaatact

SEQ ID NO: 744309 - DNA, 19 bp, Mus musculus
  siRNA target sequence for Laf4l (NM_033565.1,1238-1256).
gtgtagatgaaatacttaa

SEQ ID NO: 744310 - DNA, 19 bp, Mus musculus
  siRNA target sequence for Laf4l (NM_033565.1,1280-1298).
cccctctaacggctattca

SEQ ID NO: 744311 - DNA, 19 bp, Mus musculus
  siRNA target sequence for Laf4l (NM_033565.1,1282-1300).
cctctaacggctattcata

SEQ ID NO: 744312 - DNA, 19 bp, Mus musculus
  siRNA target sequence for Laf4l (NM_033565.1,1414-1432).
caccagtcaaaatctatgt

SEQ ID NO: 744313 - DNA, 19 bp, Mus musculus
  siRNA target sequence for Laf4l (NM_033565.1,1416-1434).
ccagtcaaaatctatgtta

SEQ ID NO: 744314 - DNA, 19 bp, Mus musculus
  siRNA target sequence for Laf4l (NM_033565.1,1417-1435).
cagtcaaaatctatgttaa

SEQ ID NO: 744315 - DNA, 19 bp, Mus musculus
  siRNA target sequence for Laf4l (NM_033565.1,1474-1492).
ggggaacaggattgtgata

SEQ ID NO: 744316 - DNA, 19 bp, Mus musculus
  siRNA target sequence for Laf4l (NM_033565.1,1477-1495).
gaacaggattgtgataaga

SEQ ID NO: 744317 - DNA, 19 bp, Mus musculus
  siRNA target sequence for Laf4l (NM_033565.1,1505-1523).
ggagtacaccaggaagtaa

SEQ ID NO: 744318 - DNA, 19 bp, Mus musculus
  siRNA target sequence for Laf4l (NM_033565.1,1526-1544).
ctgaaccttcacaccataa

SEQ ID NO: 744319 - DNA, 19 bp, Mus musculus
  siRNA target sequence for Laf4l (NM_033565.1,1528-1546).
gaaccttcacaccataaca

SEQ ID NO: 744320 - DNA, 19 bp, Mus musculus
  siRNA target sequence for Laf4l (NM_033565.1,1700-1718).
caaacaagtggcaacttga

SEQ ID NO: 744321 - DNA, 19 bp, Mus musculus
  siRNA target sequence for Laf4l (NM_033565.1,1704-1722).
caagtggcaacttgataat

SEQ ID NO: 744322 - DNA, 19 bp, Mus musculus
  siRNA target sequence for Laf4l (NM_033565.1,1714-1732).
cttgataattggttgaata

SEQ ID NO: 744323 - DNA, 19 bp, Mus musculus
  siRNA target sequence for Laf4l (NM_033565.1,1735-1753).
gtgaacccacataaagtat

SEQ ID NO: 744324 - DNA, 19 bp, Mus musculus
  siRNA target sequence for Laf4l (NM_033565.1,1776-1794).
caacatcccatcttctcaa

SEQ ID NO: 744325 - DNA, 19 bp, Mus musculus
  siRNA target sequence for Laf4l (NM_033565.1,1790-1808).
ctcaagcctacaagaaaga

SEQ ID NO: 744326 - DNA, 19 bp, Mus musculus
  siRNA target sequence for Laf4l (NM_033565.1,1877-1895).
ccccaggacgagactctaa

SEQ ID NO: 744327 - DNA, 19 bp, Mus musculus
  siRNA target sequence for Laf4l (NM_033565.1,1878-1896).
cccaggacgagactctaaa

SEQ ID NO: 744328 - DNA, 19 bp, Mus musculus
  siRNA target sequence for Laf4l (NM_033565.1,1879-1897).
ccaggacgagactctaaaa

SEQ ID NO: 744329 - DNA, 19 bp, Mus musculus
  siRNA target sequence for Laf4l (NM_033565.1,1970-1988).
ggagaactgtcggcaaaaa

SEQ ID NO: 744330 - DNA, 19 bp, Mus musculus
  siRNA target sequence for Laf4l (NM_033565.1,1971-1989).
gagaactgtcggcaaaaaa

SEQ ID NO: 744331 - DNA, 19 bp, Mus musculus
  siRNA target sequence for Laf4l (NM_033565.1,1973-1991).
gaactgtcggcaaaaaaca

SEQ ID NO: 744332 - DNA, 19 bp, Mus musculus
  siRNA target sequence for Laf4l (NM_033565.1,2161-2179).
cctacggcagagaagaaga

SEQ ID NO: 744333 - DNA, 19 bp, Mus musculus
  siRNA target sequence for Laf4l (NM_033565.1,2279-2297).
cctcacagactcctaagta

SEQ ID NO: 744334 - DNA, 19 bp, Mus musculus
  siRNA target sequence for Laf4l (NM_033565.1,2307-2325).
caacaggactcctgtcaaa

SEQ ID NO: 744335 - DNA, 19 bp, Mus musculus
  siRNA target sequence for Laf4l (NM_033565.1,2351-2369).
gcttttttcggcaacgaat

SEQ ID NO: 744336 - DNA, 19 bp, Mus musculus
  siRNA target sequence for Laf4l (NM_033565.1,2426-2444).
ggtatccactcattgtgaa

SEQ ID NO: 744337 - DNA, 19 bp, Mus musculus
  siRNA target sequence for Laf4l (NM_033565.1,2432-2450).
cactcattgtgaagattga

SEQ ID NO: 744338 - DNA, 19 bp, Mus musculus
  siRNA target sequence for Laf4l (NM_033565.1,2442-2460).
gaagattgacctcaatctt

SEQ ID NO: 744339 - DNA, 19 bp, Mus musculus
  siRNA target sequence for Laf4l (NM_033565.1,2454-2472).
caatcttctgactcgaata

SEQ ID NO: 744340 - DNA, 19 bp, Mus musculus
  siRNA target sequence for Laf4l (NM_033565.1,2475-2493).
cgggaagccttacaaagaa

SEQ ID NO: 744341 - DNA, 19 bp, Mus musculus
  siRNA target sequence for Laf4l (NM_033565.1,2740-2758).
gctgggcccattctttcaa

SEQ ID NO: 744342 - DNA, 19 bp, Mus musculus
  siRNA target sequence for Laf4l (NM_033565.1,2803-2821).
cagtcgtcgtccttaaagt

SEQ ID NO: 744343 - DNA, 19 bp, Mus musculus
  siRNA target sequence for Laf4l (NM_033565.1,3011-3029).
caaagcttgcctttgatga

SEQ ID NO: 744344 - DNA, 19 bp, Mus musculus
  siRNA target sequence for Laf4l (NM_033565.1,3020-3038).
cctttgatgacagaaatta

SEQ ID NO: 744345 - DNA, 19 bp, Mus musculus
  siRNA target sequence for Laf4l (NM_033565.1,3136-3154).
gtagtgtctttcattgagt

SEQ ID NO: 744346 - DNA, 19 bp, Mus musculus
  siRNA target sequence for Laf4l (NM_033565.1,3158-3176).
ggaatgcattagagaagaa

SEQ ID NO: 744347 - DNA, 19 bp, Mus musculus
  siRNA target sequence for Laf4l (NM_033565.1,3218-3236).
cggtggagctcattaagta

SEQ ID NO: 744348 - DNA, 19 bp, Mus musculus
  siRNA target sequence for Laf4l (NM_033565.1,3285-3303).
caagagactcacagtactt

SEQ ID NO: 744349 - DNA, 19 bp, Mus musculus
  siRNA target sequence for Laf4l (NM_033565.1,3305-3323).
gcctgagatgccagtcatt

SEQ ID NO: 744350 - DNA, 19 bp, Mus musculus
  siRNA target sequence for Laf4l (NM_033565.1,3311-3329).
gatgccagtcattattgta

SEQ ID NO: 744351 - DNA, 19 bp, Mus musculus
  siRNA target sequence for Laf4l (NM_033565.1,3327-3345).
gtacctgaggctgttcaaa

SEQ ID NO: 744352 - DNA, 19 bp, Mus musculus
  siRNA target sequence for Laf4l (NM_033565.1,3551-3569).
ccattccacagaaaatcca

SEQ ID NO: 744353 - DNA, 19 bp, Mus musculus
  siRNA target sequence for Laf4l (NM_033565.1,3570-3588).
ccagatggcagcaagctat

SEQ ID NO: 744354 - DNA, 19 bp, Mus musculus
  siRNA target sequence for Laf4l (NM_033565.1,3585-3603).
ctatgtccaggttacatct

SEQ ID NO: 744355 - DNA, 19 bp, Mus musculus
  siRNA target sequence for Laf4l (NM_033565.1,3589-3607).
gtccaggttacatctaact

SEQ ID NO: 744356 - DNA, 19 bp, Mus musculus
  siRNA target sequence for Laf4l (NM_033565.1,3697-3715).
cctctcatctttaatgcaa

SEQ ID NO: 744357 - DNA, 19 bp, Mus musculus
  siRNA target sequence for Smarcf1 (NM_033566.1,252-270).
gggccagactccatactat

SEQ ID NO: 744358 - DNA, 19 bp, Mus musculus
  siRNA target sequence for Smarcf1 (NM_033566.1,253-271).
ggccagactccatactata

SEQ ID NO: 744359 - DNA, 19 bp, Mus musculus
  siRNA target sequence for Smarcf1 (NM_033566.1,650-668).
caccacaggagctttctca

SEQ ID NO: 744360 - DNA, 19 bp, Mus musculus
  siRNA target sequence for Smarcf1 (NM_033566.1,773-791).
ctgatctgtctggttcaat

SEQ ID NO: 744361 - DNA, 19 bp, Mus musculus
  siRNA target sequence for Smarcf1 (NM_033566.1,1066-1084).
cacccttccatgaaccaat

SEQ ID NO: 744362 - DNA, 19 bp, Mus musculus
  siRNA target sequence for Smarcf1 (NM_033566.1,1074-1092).
catgaaccaatcaagcatt

SEQ ID NO: 744363 - DNA, 19 bp, Mus musculus
  siRNA target sequence for Smarcf1 (NM_033566.1,1282-1300).
cctaggcagcctaactata

SEQ ID NO: 744364 - DNA, 19 bp, Mus musculus
  siRNA target sequence for Smarcf1 (NM_033566.1,1283-1301).
ctaggcagcctaactataa

SEQ ID NO: 744365 - DNA, 19 bp, Mus musculus
  siRNA target sequence for Smarcf1 (NM_033566.1,1331-1349).
caggcatggccggaagtat

SEQ ID NO: 744366 - DNA, 19 bp, Mus musculus
  siRNA target sequence for Smarcf1 (NM_033566.1,1451-1469).
ggccctatggccctaatat

SEQ ID NO: 744367 - DNA, 19 bp, Mus musculus
  siRNA target sequence for Smarcf1 (NM_033566.1,1460-1478).
gccctaatatggccaatat

SEQ ID NO: 744368 - DNA, 19 bp, Mus musculus
  siRNA target sequence for Smarcf1 (NM_033566.1,1510-1528).
ccaccagggggaatgaaca

SEQ ID NO: 744369 - DNA, 19 bp, Mus musculus
  siRNA target sequence for Smarcf1 (NM_033566.1,1558-1576).
catgttgctgccaactcta

SEQ ID NO: 744370 - DNA, 19 bp, Mus musculus
  siRNA target sequence for Smarcf1 (NM_033566.1,1564-1582).
gctgccaactctatccaaa

SEQ ID NO: 744371 - DNA, 19 bp, Mus musculus
  siRNA target sequence for Smarcf1 (NM_033566.1,1589-1607).
caccaggctacccaaatat

SEQ ID NO: 744372 - DNA, 19 bp, Mus musculus
  siRNA target sequence for Smarcf1 (NM_033566.1,1641-1659).
ctatggacaggggatcaat

SEQ ID NO: 744373 - DNA, 19 bp, Mus musculus
  siRNA target sequence for Smarcf1 (NM_033566.1,1645-1663).
ggacaggggatcaatagta

SEQ ID NO: 744374 - DNA, 19 bp, Mus musculus
  siRNA target sequence for Smarcf1 (NM_033566.1,1661-1679).
gtatggctggcatgatcaa

SEQ ID NO: 744375 - DNA, 19 bp, Mus musculus
  siRNA target sequence for Smarcf1 (NM_033566.1,1760-1778).
gccttggggatgttaagtt

SEQ ID NO: 744376 - DNA, 19 bp, Mus musculus
  siRNA target sequence for Smarcf1 (NM_033566.1,1761-1779).
ccttggggatgttaagtta

SEQ ID NO: 744377 - DNA, 19 bp, Mus musculus
  siRNA target sequence for Smarcf1 (NM_033566.1,1762-1780).
cttggggatgttaagttaa

SEQ ID NO: 744378 - DNA, 19 bp, Mus musculus
  siRNA target sequence for Smarcf1 (NM_033566.1,1776-1794).
gttaactcccgccacaaaa

SEQ ID NO: 744379 - DNA, 19 bp, Mus musculus
  siRNA target sequence for Smarcf1 (NM_033566.1,1821-1839).
caagacagaatccaaatct

SEQ ID NO: 744380 - DNA, 19 bp, Mus musculus
  siRNA target sequence for Smarcf1 (NM_033566.1,1956-1974).
ggccatgggcatgacaaat

SEQ ID NO: 744381 - DNA, 19 bp, Mus musculus
  siRNA target sequence for Smarcf1 (NM_033566.1,2005-2023).
ctctatcgcctctatgtgt

SEQ ID NO: 744382 - DNA, 19 bp, Mus musculus
  siRNA target sequence for Smarcf1 (NM_033566.1,2042-2060).
ggttgactcaggtcaacaa

SEQ ID NO: 744383 - DNA, 19 bp, Mus musculus
  siRNA target sequence for Smarcf1 (NM_033566.1,2091-2109).
cctcaatgtgggtacatca

SEQ ID NO: 744384 - DNA, 19 bp, Mus musculus
  siRNA target sequence for Smarcf1 (NM_033566.1,2092-2110).
ctcaatgtgggtacatcaa

SEQ ID NO: 744385 - DNA, 19 bp, Mus musculus
  siRNA target sequence for Smarcf1 (NM_033566.1,2351-2369).
catccacaccacatagtca

SEQ ID NO: 744386 - DNA, 19 bp, Mus musculus
  siRNA target sequence for Smarcf1 (NM_033566.1,2479-2497).
gggtaccagcccagtatga

SEQ ID NO: 744387 - DNA, 19 bp, Mus musculus
  siRNA target sequence for Smarcf1 (NM_033566.1,2532-2550).
gccaaataaggatccttat

SEQ ID NO: 744388 - DNA, 19 bp, Mus musculus
  siRNA target sequence for Smarcf1 (NM_033566.1,2562-2580).
gaaagcgccaggaagtgat

SEQ ID NO: 744389 - DNA, 19 bp, Mus musculus
  siRNA target sequence for Smarcf1 (NM_033566.1,2790-2808).
cccagattcggggatgtat

SEQ ID NO: 744390 - DNA, 19 bp, Mus musculus
  siRNA target sequence for Smarcf1 (NM_033566.1,2865-2883).
gcaacgacatgattcctat

SEQ ID NO: 744391 - DNA, 19 bp, Mus musculus
  siRNA target sequence for Smarcf1 (NM_033566.1,2933-2951).
gccagcagaccacaatgta

SEQ ID NO: 744392 - DNA, 19 bp, Mus musculus
  siRNA target sequence for Smarcf1 (NM_033566.1,2934-2952).
ccagcagaccacaatgtat

SEQ ID NO: 744393 - DNA, 19 bp, Mus musculus
  siRNA target sequence for Smarcf1 (NM_033566.1,2979-2997).
gccaatggatggcacatat

SEQ ID NO: 744394 - DNA, 19 bp, Mus musculus
  siRNA target sequence for Smarcf1 (NM_033566.1,3218-3236).
cccagaaccaatttccatt

SEQ ID NO: 744395 - DNA, 19 bp, Mus musculus
  siRNA target sequence for Smarcf1 (NM_033566.1,3359-3377).
ggcaggggcgaaatgacat

SEQ ID NO: 744396 - DNA, 19 bp, Mus musculus
  siRNA target sequence for Smarcf1 (NM_033566.1,3420-3438).
ccagggccctgcgtatcat

SEQ ID NO: 744397 - DNA, 19 bp, Mus musculus
  siRNA target sequence for Smarcf1 (NM_033566.1,3544-3562).
cctgttccccccatgacaa

SEQ ID NO: 744398 - DNA, 19 bp, Mus musculus
  siRNA target sequence for Smarcf1 (NM_033566.1,3592-3610).
ccaagcatgccgaatcaca

SEQ ID NO: 744399 - DNA, 19 bp, Mus musculus
  siRNA target sequence for Smarcf1 (NM_033566.1,3593-3611).
caagcatgccgaatcacat

SEQ ID NO: 744400 - DNA, 19 bp, Mus musculus
  siRNA target sequence for Smarcf1 (NM_033566.1,3648-3666).
catggagaaccgtacttct

SEQ ID NO: 744401 - DNA, 19 bp, Mus musculus
  siRNA target sequence for Smarcf1 (NM_033566.1,3690-3708).
ctctgggatgaaaatgcaa

SEQ ID NO: 744402 - DNA, 19 bp, Mus musculus
  siRNA target sequence for Smarcf1 (NM_033566.1,3833-3851).
gaaggcggctcacaatgaa

SEQ ID NO: 744403 - DNA, 19 bp, Mus musculus
  siRNA target sequence for Smarcf1 (NM_033566.1,3836-3854).
ggcggctcacaatgaaaga

SEQ ID NO: 744404 - DNA, 19 bp, Mus musculus
  siRNA target sequence for Smarcf1 (NM_033566.1,3838-3856).
cggctcacaatgaaagaca

SEQ ID NO: 744405 - DNA, 19 bp, Mus musculus
  siRNA target sequence for Smarcf1 (NM_033566.1,3868-3886).
gaggcatggcgggtaatga

SEQ ID NO: 744406 - DNA, 19 bp, Mus musculus
  siRNA target sequence for Smarcf1 (NM_033566.1,3871-3889).
gcatggcgggtaatgatgt

SEQ ID NO: 744407 - DNA, 19 bp, Mus musculus
  siRNA target sequence for Smarcf1 (NM_033566.1,3923-3941).
gggcgttagacaccattaa

SEQ ID NO: 744408 - DNA, 19 bp, Mus musculus
  siRNA target sequence for Smarcf1 (NM_033566.1,3926-3944).
cgttagacaccattaacat

SEQ ID NO: 744409 - DNA, 19 bp, Mus musculus
  siRNA target sequence for Smarcf1 (NM_033566.1,3927-3945).
gttagacaccattaacatt

SEQ ID NO: 744410 - DNA, 19 bp, Mus musculus
  siRNA target sequence for Smarcf1 (NM_033566.1,3935-3953).
ccattaacattctactgta

SEQ ID NO: 744411 - DNA, 19 bp, Mus musculus
  siRNA target sequence for Smarcf1 (NM_033566.1,3955-3973).
gatgacaacagcattatga

SEQ ID NO: 744412 - DNA, 19 bp, Mus musculus
  siRNA target sequence for Smarcf1 (NM_033566.1,4028-4046).
gtagatgcctaattgaaat

SEQ ID NO: 744413 - DNA, 19 bp, Mus musculus
  siRNA target sequence for Smarcf1 (NM_033566.1,4042-4060).
gaaatctttggcattttaa

SEQ ID NO: 744414 - DNA, 19 bp, Mus musculus
  siRNA target sequence for Smarcf1 (NM_033566.1,4099-4117).
ctagaccctgggagattca

SEQ ID NO: 744415 - DNA, 19 bp, Mus musculus
  siRNA target sequence for Smarcf1 (NM_033566.1,4264-4282).
gagaagctagtcagtaagt

SEQ ID NO: 744416 - DNA, 19 bp, Mus musculus
  siRNA target sequence for Smarcf1 (NM_033566.1,4266-4284).
gaagctagtcagtaagttt

SEQ ID NO: 744417 - DNA, 19 bp, Mus musculus
  siRNA target sequence for Smarcf1 (NM_033566.1,4270-4288).
ctagtcagtaagtttgaca

SEQ ID NO: 744418 - DNA, 19 bp, Mus musculus
  siRNA target sequence for Smarcf1 (NM_033566.1,4285-4303).
gacaagcttccggtaaaga

SEQ ID NO: 744419 - DNA, 19 bp, Mus musculus
  siRNA target sequence for Smarcf1 (NM_033566.1,4332-4350).
ggactgctcagataagctt

SEQ ID NO: 744420 - DNA, 19 bp, Mus musculus
  siRNA target sequence for Smarcf1 (NM_033566.1,4354-4372).
cgcgtgcaggagtttgaca

SEQ ID NO: 744421 - DNA, 19 bp, Mus musculus
  siRNA target sequence for Smarcf1 (NM_033566.1,4403-4421).
gggataccactgagcatat

SEQ ID NO: 744422 - DNA, 19 bp, Mus musculus
  siRNA target sequence for Smarcf1 (NM_033566.1,4494-4512).
gaaacacctcacaacagta

SEQ ID NO: 744423 - DNA, 19 bp, Mus musculus
  siRNA target sequence for Smarcf1 (NM_033566.1,4559-4577).
gccttccagagaaaaggat

SEQ ID NO: 744424 - DNA, 19 bp, Mus musculus
  siRNA target sequence for Smarcf1 (NM_033566.1,4608-4626).
ccggtctagcacattgact

SEQ ID NO: 744425 - DNA, 19 bp, Mus musculus
  siRNA target sequence for Smarcf1 (NM_033566.1,4700-4718).
gccaccggaacatcaaaat

SEQ ID NO: 744426 - DNA, 19 bp, Mus musculus
  siRNA target sequence for Smarcf1 (NM_033566.1,4701-4719).
ccaccggaacatcaaaatt

SEQ ID NO: 744427 - DNA, 19 bp, Mus musculus
  siRNA target sequence for Smarcf1 (NM_033566.1,4702-4720).
caccggaacatcaaaattt

SEQ ID NO: 744428 - DNA, 19 bp, Mus musculus
  siRNA target sequence for Smarcf1 (NM_033566.1,4704-4722).
ccggaacatcaaaatttta

SEQ ID NO: 744429 - DNA, 19 bp, Mus musculus
  siRNA target sequence for Smarcf1 (NM_033566.1,4840-4858).
ccaggcaacgactttgaga

SEQ ID NO: 744430 - DNA, 19 bp, Mus musculus
  siRNA target sequence for Smarcf1 (NM_033566.1,4929-4947).
gaagcaggcaccactaact

SEQ ID NO: 744431 - DNA, 19 bp, Mus musculus
  siRNA target sequence for Smarcf1 (NM_033566.1,4932-4950).
gcaggcaccactaacttat

SEQ ID NO: 744432 - DNA, 19 bp, Mus musculus
  siRNA target sequence for Smarcf1 (NM_033566.1,4936-4954).
gcaccactaacttatgaga

SEQ ID NO: 744433 - DNA, 19 bp, Mus musculus
  siRNA target sequence for Smarcf1 (NM_033566.1,4976-4994).
gggtgagctgtgacaaagt

SEQ ID NO: 744434 - DNA, 19 bp, Mus musculus
  siRNA target sequence for Smarcf1 (NM_033566.1,5070-5088).
ggacctatccccatatcct

SEQ ID NO: 744435 - DNA, 19 bp, Mus musculus
  siRNA target sequence for Smarcf1 (NM_033566.1,5215-5233).
gaaaccctcagcaaactca

SEQ ID NO: 744436 - DNA, 19 bp, Mus musculus
  siRNA target sequence for Smarcf1 (NM_033566.1,5282-5300).
gccgcctggagaagttgta

SEQ ID NO: 744437 - DNA, 19 bp, Mus musculus
  siRNA target sequence for Smarcf1 (NM_033566.1,5286-5304).
cctggagaagttgtatagt

SEQ ID NO: 744438 - DNA, 19 bp, Mus musculus
  siRNA target sequence for Smarcf1 (NM_033566.1,5287-5305).
ctggagaagttgtatagta

SEQ ID NO: 744439 - DNA, 19 bp, Mus musculus
  siRNA target sequence for Smarcf1 (NM_033566.1,5601-5619).
ctcagagttcactctgtat

SEQ ID NO: 744440 - DNA, 19 bp, Mus musculus
  siRNA target sequence for Cecr6 (NM_033567.1,285-303).
gacgacgacgagagcatta

SEQ ID NO: 744441 - DNA, 19 bp, Mus musculus
  siRNA target sequence for Cecr6 (NM_033567.1,288-306).
gacgacgagagcattagca

SEQ ID NO: 744442 - DNA, 19 bp, Mus musculus
  siRNA target sequence for Cecr6 (NM_033567.1,987-1005).
ctggcctggctcatctact

SEQ ID NO: 744443 - DNA, 19 bp, Mus musculus
  siRNA target sequence for Cecr6 (NM_033567.1,1090-1108).
cgggctttcgccttaccat

SEQ ID NO: 744444 - DNA, 19 bp, Mus musculus
  siRNA target sequence for Cecr6 (NM_033567.1,1247-1265).
cctgctggacagctttaca

SEQ ID NO: 744445 - DNA, 19 bp, Mus musculus
  siRNA target sequence for Cecr6 (NM_033567.1,1432-1450).
gcagccgccttttacgttt

SEQ ID NO: 744446 - DNA, 19 bp, Mus musculus
  siRNA target sequence for Cecr6 (NM_033567.1,1522-1540).
cgctgtccatctttatgct

SEQ ID NO: 744447 - DNA, 19 bp, Mus musculus
  siRNA target sequence for Cecr6 (NM_033567.1,1726-1744).
gccctcatggctatgtcaa

SEQ ID NO: 744448 - DNA, 19 bp, Mus musculus
  siRNA target sequence for D11Moh34 (NM_033568.1,149-167).
cagaggccaagtataagga

SEQ ID NO: 744449 - DNA, 19 bp, Mus musculus
  siRNA target sequence for Cnnm2 (NM_033569.1,213-231).
gcgaggagaagaagttctt

SEQ ID NO: 744450 - DNA, 19 bp, Mus musculus
  siRNA target sequence for Cnnm2 (NM_033569.1,245-263).
ctgcaagtgatcttcatct

SEQ ID NO: 744451 - DNA, 19 bp, Mus musculus
  siRNA target sequence for Cnnm2 (NM_033569.1,354-372).
gcggcacggagaaagagaa

SEQ ID NO: 744452 - DNA, 19 bp, Mus musculus
  siRNA target sequence for Cnnm2 (NM_033569.1,642-660).
cttcttatccggttagcaa

SEQ ID NO: 744453 - DNA, 19 bp, Mus musculus
  siRNA target sequence for Cnnm2 (NM_033569.1,732-750).
gggttactgacccctataa

SEQ ID NO: 744454 - DNA, 19 bp, Mus musculus
  siRNA target sequence for Cnnm2 (NM_033569.1,744-762).
cctataacgacctcgttaa

SEQ ID NO: 744455 - DNA, 19 bp, Mus musculus
  siRNA target sequence for Cnnm2 (NM_033569.1,1015-1033).
catcaccaagttttacaat

SEQ ID NO: 744456 - DNA, 19 bp, Mus musculus
  siRNA target sequence for Cnnm2 (NM_033569.1,1070-1088).
gacgctatgctggaagaat

SEQ ID NO: 744457 - DNA, 19 bp, Mus musculus
  siRNA target sequence for Cnnm2 (NM_033569.1,1072-1090).
cgctatgctggaagaattt

SEQ ID NO: 744458 - DNA, 19 bp, Mus musculus
  siRNA target sequence for Cnnm2 (NM_033569.1,1146-1164).
gggacccattttatgaagt

SEQ ID NO: 744459 - DNA, 19 bp, Mus musculus
  siRNA target sequence for Cnnm2 (NM_033569.1,1147-1165).
ggacccattttatgaagtt

SEQ ID NO: 744460 - DNA, 19 bp, Mus musculus
  siRNA target sequence for Cnnm2 (NM_033569.1,1199-1217).
gaaatcatcaaatctgaaa

SEQ ID NO: 744461 - DNA, 19 bp, Mus musculus
  siRNA target sequence for Cnnm2 (NM_033569.1,1232-1250).
gacctgtacaccgataaca

SEQ ID NO: 744462 - DNA, 19 bp, Mus musculus
  siRNA target sequence for Cnnm2 (NM_033569.1,1234-1252).
cctgtacaccgataacaga

SEQ ID NO: 744463 - DNA, 19 bp, Mus musculus
  siRNA target sequence for Cnnm2 (NM_033569.1,1235-1253).
ctgtacaccgataacagaa

SEQ ID NO: 744464 - DNA, 19 bp, Mus musculus
  siRNA target sequence for Cnnm2 (NM_033569.1,1313-1331).
gacagcgagatgaaggtta

SEQ ID NO: 744465 - DNA, 19 bp, Mus musculus
  siRNA target sequence for Cnnm2 (NM_033569.1,1318-1336).
cgagatgaaggttaaaata

SEQ ID NO: 744466 - DNA, 19 bp, Mus musculus
  siRNA target sequence for Cnnm2 (NM_033569.1,1319-1337).
gagatgaaggttaaaatat

SEQ ID NO: 744467 - DNA, 19 bp, Mus musculus
  siRNA target sequence for Cnnm2 (NM_033569.1,1354-1372).
ggccatgcaccgtttccta

SEQ ID NO: 744468 - DNA, 19 bp, Mus musculus
  siRNA target sequence for Cnnm2 (NM_033569.1,1512-1530).
ggaacaagcccgtagacta

SEQ ID NO: 744469 - DNA, 19 bp, Mus musculus
  siRNA target sequence for Cnnm2 (NM_033569.1,1654-1672).
cctgtctcgcacctttgtt

SEQ ID NO: 744470 - DNA, 19 bp, Mus musculus
  siRNA target sequence for Cnnm2 (NM_033569.1,1699-1717).
gggctctccaggggaaaat

SEQ ID NO: 744471 - DNA, 19 bp, Mus musculus
  siRNA target sequence for Cnnm2 (NM_033569.1,1731-1749).
gcccctgtggcctgaatca

SEQ ID NO: 744472 - DNA, 19 bp, Mus musculus
  siRNA target sequence for Cnnm2 (NM_033569.1,1880-1898).
ctacagttcgtcaagatct

SEQ ID NO: 744473 - DNA, 19 bp, Mus musculus
  siRNA target sequence for Cnnm2 (NM_033569.1,1928-1946).
gcgtctcggatggacaaaa

SEQ ID NO: 744474 - DNA, 19 bp, Mus musculus
  siRNA target sequence for Cnnm2 (NM_033569.1,1963-1981).
cagtgaaaatactaaaatt

SEQ ID NO: 744475 - DNA, 19 bp, Mus musculus
  siRNA target sequence for Cnnm4 (NM_033570.1,281-299).
gctgtcgggcatcttttct

SEQ ID NO: 744476 - DNA, 19 bp, Mus musculus
  siRNA target sequence for Cnnm4 (NM_033570.1,595-613).
gtgccaacactattgttct

SEQ ID NO: 744477 - DNA, 19 bp, Mus musculus
  siRNA target sequence for Cnnm4 (NM_033570.1,609-627).
gttctcaccaaagtcttta

SEQ ID NO: 744478 - DNA, 19 bp, Mus musculus
  siRNA target sequence for Cnnm4 (NM_033570.1,687-705).
caggagattcgcactgttt

SEQ ID NO: 744479 - DNA, 19 bp, Mus musculus
  siRNA target sequence for Cnnm4 (NM_033570.1,795-813).
ctggaactaaggaccaaaa

SEQ ID NO: 744480 - DNA, 19 bp, Mus musculus
  siRNA target sequence for Cnnm4 (NM_033570.1,837-855).
ctacacgactgcttcatga

SEQ ID NO: 744481 - DNA, 19 bp, Mus musculus
  siRNA target sequence for Cnnm4 (NM_033570.1,933-951).
gaagatgagcaatccaata

SEQ ID NO: 744482 - DNA, 19 bp, Mus musculus
  siRNA target sequence for Cnnm4 (NM_033570.1,946-964).
ccaatattgtagatatcct

SEQ ID NO: 744483 - DNA, 19 bp, Mus musculus
  siRNA target sequence for Cnnm4 (NM_033570.1,1034-1052).
caaccacccggtacatttt

SEQ ID NO: 744484 - DNA, 19 bp, Mus musculus
  siRNA target sequence for Cnnm4 (NM_033570.1,1037-1055).
ccacccggtacattttgtt

SEQ ID NO: 744485 - DNA, 19 bp, Mus musculus
  siRNA target sequence for Cnnm4 (NM_033570.1,1038-1056).
cacccggtacattttgttt

SEQ ID NO: 744486 - DNA, 19 bp, Mus musculus
  siRNA target sequence for Cnnm4 (NM_033570.1,1077-1095).
gccatgctagaggaattta

SEQ ID NO: 744487 - DNA, 19 bp, Mus musculus
  siRNA target sequence for Cnnm4 (NM_033570.1,1227-1245).
gatgagtcggacatgtaca

SEQ ID NO: 744488 - DNA, 19 bp, Mus musculus
  siRNA target sequence for Cnnm4 (NM_033570.1,1234-1252).
cggacatgtacactgataa

SEQ ID NO: 744489 - DNA, 19 bp, Mus musculus
  siRNA target sequence for Cnnm4 (NM_033570.1,1235-1253).
ggacatgtacactgataat

SEQ ID NO: 744490 - DNA, 19 bp, Mus musculus
  siRNA target sequence for Cnnm4 (NM_033570.1,1805-1823).
cacggacctgcagtacatt

SEQ ID NO: 744491 - DNA, 19 bp, Mus musculus
  siRNA target sequence for Cnnm4 (NM_033570.1,1807-1825).
cggacctgcagtacattaa

SEQ ID NO: 744492 - DNA, 19 bp, Mus musculus
  siRNA target sequence for Cnnm4 (NM_033570.1,1809-1827).
gacctgcagtacattaaga

SEQ ID NO: 744493 - DNA, 19 bp, Mus musculus
  siRNA target sequence for Cnnm4 (NM_033570.1,1960-1978).
ccacgactcttctcaatga

SEQ ID NO: 744494 - DNA, 19 bp, Mus musculus
  siRNA target sequence for Cnnm4 (NM_033570.1,1961-1979).
cacgactcttctcaatgaa

SEQ ID NO: 744495 - DNA, 19 bp, Mus musculus
  siRNA target sequence for Prcc (NM_033573.1,261-279).
ccagcagcgacgatagtga

SEQ ID NO: 744496 - DNA, 19 bp, Mus musculus
  siRNA target sequence for Prcc (NM_033573.1,663-681).
gaaccgaaccggttaggat

SEQ ID NO: 744497 - DNA, 19 bp, Mus musculus
  siRNA target sequence for Prcc (NM_033573.1,698-716).
cagaagggcgattcagatt

SEQ ID NO: 744498 - DNA, 19 bp, Mus musculus
  siRNA target sequence for Prcc (NM_033573.1,700-718).
gaagggcgattcagattct

SEQ ID NO: 744499 - DNA, 19 bp, Mus musculus
  siRNA target sequence for Prcc (NM_033573.1,725-743).
gatgaacctgcgaagaaga

SEQ ID NO: 744500 - DNA, 19 bp, Mus musculus
  siRNA target sequence for Prcc (NM_033573.1,848-866).
gccttctcccggaaacctt

SEQ ID NO: 744501 - DNA, 19 bp, Mus musculus
  siRNA target sequence for Prcc (NM_033573.1,855-873).
cccggaaaccttcagatat

SEQ ID NO: 744502 - DNA, 19 bp, Mus musculus
  siRNA target sequence for Prcc (NM_033573.1,881-899).
gatgctaagccctctagat

SEQ ID NO: 744503 - DNA, 19 bp, Mus musculus
  siRNA target sequence for Prcc (NM_033573.1,1248-1266).
cgaagcctggggatgacta

SEQ ID NO: 744504 - DNA, 19 bp, Mus musculus
  siRNA target sequence for Prcc (NM_033573.1,1258-1276).
ggatgactacagctacaat

SEQ ID NO: 744505 - DNA, 19 bp, Mus musculus
  siRNA target sequence for Prcc (NM_033573.1,1273-1291).
caatcagttttccacatat

SEQ ID NO: 744506 - DNA, 19 bp, Mus musculus
  siRNA target sequence for Prcc (NM_033573.1,1300-1318).
caatgctgctggtgcttat

SEQ ID NO: 744507 - DNA, 19 bp, Mus musculus
  siRNA target sequence for Prcc (NM_033573.1,1311-1329).
gtgcttattatcaggatta

SEQ ID NO: 744508 - DNA, 19 bp, Mus musculus
  siRNA target sequence for Prcc (NM_033573.1,1314-1332).
cttattatcaggattacta

SEQ ID NO: 744509 - DNA, 19 bp, Mus musculus
  siRNA target sequence for Prcc (NM_033573.1,1600-1618).
gaaacaccagatcacatat

SEQ ID NO: 744510 - DNA, 19 bp, Mus musculus
  siRNA target sequence for Prcc (NM_033573.1,1604-1622).
caccagatcacatatctga

SEQ ID NO: 744511 - DNA, 19 bp, Mus musculus
  siRNA target sequence for Prcc (NM_033573.1,1606-1624).
ccagatcacatatctgatt

SEQ ID NO: 744512 - DNA, 19 bp, Mus musculus
  siRNA target sequence for Prcc (NM_033573.1,1689-1707).
ggcagacccaagccaaata

SEQ ID NO: 744513 - DNA, 19 bp, Mus musculus
  siRNA target sequence for Pcdhgb1 (NM_033574.2,297-315).
ggactcagtatccaagaat

SEQ ID NO: 744514 - DNA, 19 bp, Mus musculus
  siRNA target sequence for Pcdhgb1 (NM_033574.2,336-354).
gttagtgcagaggattatt

SEQ ID NO: 744515 - DNA, 19 bp, Mus musculus
  siRNA target sequence for Pcdhgb1 (NM_033574.2,744-762).
cagagctcccatcacttaa

SEQ ID NO: 744516 - DNA, 19 bp, Mus musculus
  siRNA target sequence for Pcdhgb1 (NM_033574.2,827-845).
caccgacgccaatgacaat

SEQ ID NO: 744517 - DNA, 19 bp, Mus musculus
  siRNA target sequence for Pcdhgb1 (NM_033574.2,861-879).
caggacacttacaaagtta

SEQ ID NO: 744518 - DNA, 19 bp, Mus musculus
  siRNA target sequence for Pcdhgb1 (NM_033574.2,876-894).
gttagccttcgtgaaaaca

SEQ ID NO: 744519 - DNA, 19 bp, Mus musculus
  siRNA target sequence for Pcdhgb1 (NM_033574.2,893-911).
catacccccaggaacgtta

SEQ ID NO: 744520 - DNA, 19 bp, Mus musculus
  siRNA target sequence for Pcdhgb1 (NM_033574.2,931-949).
ctgatcaggatgagagtat

SEQ ID NO: 744521 - DNA, 19 bp, Mus musculus
  siRNA target sequence for Pcdhgb1 (NM_033574.2,983-1001).
cccagcaagtactaacctt

SEQ ID NO: 744522 - DNA, 19 bp, Mus musculus
  siRNA target sequence for Pcdhgb1 (NM_033574.2,988-1006).
caagtactaaccttgtctt

SEQ ID NO: 744523 - DNA, 19 bp, Mus musculus
  siRNA target sequence for Pcdhgb1 (NM_033574.2,1002-1020).
gtcttcaatctcaatccaa

SEQ ID NO: 744524 - DNA, 19 bp, Mus musculus
  siRNA target sequence for Pcdhgb1 (NM_033574.2,1007-1025).
caatctcaatccaaatact

SEQ ID NO: 744525 - DNA, 19 bp, Mus musculus
  siRNA target sequence for Pcdhgb1 (NM_033574.2,1029-1047).
gctatcacaactaatggta

SEQ ID NO: 744526 - DNA, 19 bp, Mus musculus
  siRNA target sequence for Pcdhgb1 (NM_033574.2,1039-1057).
ctaatggtacattggattt

SEQ ID NO: 744527 - DNA, 19 bp, Mus musculus
  siRNA target sequence for Pcdhgb1 (NM_033574.2,1045-1063).
gtacattggattttgaaga

SEQ ID NO: 744528 - DNA, 19 bp, Mus musculus
  siRNA target sequence for Pcdhgb1 (NM_033574.2,1109-1127).
gcacacggctcactgtaat

SEQ ID NO: 744529 - DNA, 19 bp, Mus musculus
  siRNA target sequence for Pcdhgb1 (NM_033574.2,1112-1130).
cacggctcactgtaatgtt

SEQ ID NO: 744530 - DNA, 19 bp, Mus musculus
  siRNA target sequence for Pcdhgb1 (NM_033574.2,1114-1132).
cggctcactgtaatgttca

SEQ ID NO: 744531 - DNA, 19 bp, Mus musculus
  siRNA target sequence for Pcdhgb1 (NM_033574.2,1117-1135).
ctcactgtaatgttcagat

SEQ ID NO: 744532 - DNA, 19 bp, Mus musculus
  siRNA target sequence for Pcdhgb1 (NM_033574.2,1123-1141).
gtaatgttcagatcgaaat

SEQ ID NO: 744533 - DNA, 19 bp, Mus musculus
  siRNA target sequence for Pcdhgb1 (NM_033574.2,1174-1192).
cattcatgtccttttctaa

SEQ ID NO: 744534 - DNA, 19 bp, Mus musculus
  siRNA target sequence for Pcdhgb1 (NM_033574.2,1210-1228).
cagtccttggaacagtaat

SEQ ID NO: 744535 - DNA, 19 bp, Mus musculus
  siRNA target sequence for Pcdhgb1 (NM_033574.2,1235-1253).
cattaaagttcgagacaaa

SEQ ID NO: 744536 - DNA, 19 bp, Mus musculus
  siRNA target sequence for Pcdhgb1 (NM_033574.2,1293-1311).
gaagaacttcccttcaaat

SEQ ID NO: 744537 - DNA, 19 bp, Mus musculus
  siRNA target sequence for Pcdhgb1 (NM_033574.2,1433-1451).
caagacatgtgttactgta

SEQ ID NO: 744538 - DNA, 19 bp, Mus musculus
  siRNA target sequence for Pcdhgb1 (NM_033574.2,1438-1456).
catgtgttactgtacacat

SEQ ID NO: 744539 - DNA, 19 bp, Mus musculus
  siRNA target sequence for Pcdhgb1 (NM_033574.2,2369-2387).
gacattaccctattcctat

SEQ ID NO: 744540 - DNA, 19 bp, Mus musculus
  siRNA target sequence for Pcdhgb1 (NM_033574.2,2391-2409).
ctctgcgttgcttcacatt

SEQ ID NO: 744541 - DNA, 19 bp, Mus musculus
  siRNA target sequence for Pcdhgb1 (NM_033574.2,2393-2411).
ctgcgttgcttcacattct

SEQ ID NO: 744542 - DNA, 19 bp, Mus musculus
  siRNA target sequence for Pcdhgb1 (NM_033574.2,2413-2431).
cgactatggcagggtttaa

SEQ ID NO: 744543 - DNA, 19 bp, Mus musculus
  siRNA target sequence for Pcdhgb1 (NM_033574.2,2414-2432).
gactatggcagggtttaat

SEQ ID NO: 744544 - DNA, 19 bp, Mus musculus
  siRNA target sequence for Pcdhgb1 (NM_033574.2,2416-2434).
ctatggcagggtttaattt

SEQ ID NO: 744545 - DNA, 19 bp, Mus musculus
  siRNA target sequence for Pcdhgb1 (NM_033574.2,2495-2513).
ggttgtatgtggcaataat

SEQ ID NO: 744546 - DNA, 19 bp, Mus musculus
  siRNA target sequence for Pcdhgb2 (NM_033575.2,176-194).
gagctctcgcggatcagat

SEQ ID NO: 744547 - DNA, 19 bp, Mus musculus
  siRNA target sequence for Pcdhgb2 (NM_033575.2,277-295).
ctgcccacccggaagctaa

SEQ ID NO: 744548 - DNA, 19 bp, Mus musculus
  siRNA target sequence for Pcdhgb2 (NM_033575.2,298-316).
gtcagcgcagagaaggatt

SEQ ID NO: 744549 - DNA, 19 bp, Mus musculus
  siRNA target sequence for Pcdhgb2 (NM_033575.2,300-318).
cagcgcagagaaggattat

SEQ ID NO: 744550 - DNA, 19 bp, Mus musculus
  siRNA target sequence for Pcdhgb2 (NM_033575.2,302-320).
gcgcagagaaggattattt

SEQ ID NO: 744551 - DNA, 19 bp, Mus musculus
  siRNA target sequence for Pcdhgb2 (NM_033575.2,304-322).
gcagagaaggattatttta

SEQ ID NO: 744552 - DNA, 19 bp, Mus musculus
  siRNA target sequence for Pcdhgb2 (NM_033575.2,352-370).
gtgggtgacagaatagaca

SEQ ID NO: 744553 - DNA, 19 bp, Mus musculus
  siRNA target sequence for Pcdhgb2 (NM_033575.2,447-465).
ccacgtagctgtaattctt

SEQ ID NO: 744554 - DNA, 19 bp, Mus musculus
  siRNA target sequence for Pcdhgb2 (NM_033575.2,528-546).
gtccaccagaccaggtaaa

SEQ ID NO: 744555 - DNA, 19 bp, Mus musculus
  siRNA target sequence for Pcdhgb2 (NM_033575.2,558-576).
ggatccagccctcgattta

SEQ ID NO: 744556 - DNA, 19 bp, Mus musculus
  siRNA target sequence for Pcdhgb2 (NM_033575.2,610-628).
ctcactgacaatgaatact

SEQ ID NO: 744557 - DNA, 19 bp, Mus musculus
  siRNA target sequence for Pcdhgb2 (NM_033575.2,612-630).
cactgacaatgaatacttt

SEQ ID NO: 744558 - DNA, 19 bp, Mus musculus
  siRNA target sequence for Pcdhgb2 (NM_033575.2,651-669).
cccagatggacgtaaatat

SEQ ID NO: 744559 - DNA, 19 bp, Mus musculus
  siRNA target sequence for Pcdhgb2 (NM_033575.2,662-680).
gtaaatatcctgagttgat

SEQ ID NO: 744560 - DNA, 19 bp, Mus musculus
  siRNA target sequence for Pcdhgb2 (NM_033575.2,675-693).
gttgattctaaaacgtttt

SEQ ID NO: 744561 - DNA, 19 bp, Mus musculus
  siRNA target sequence for Pcdhgb2 (NM_033575.2,771-789).
cacccagatccgaatccaa

SEQ ID NO: 744562 - DNA, 19 bp, Mus musculus
  siRNA target sequence for Pcdhgb2 (NM_033575.2,927-945).
cacctacgcttttcacaat

SEQ ID NO: 744563 - DNA, 19 bp, Mus musculus
  siRNA target sequence for Pcdhgb2 (NM_033575.2,955-973).
caagtggaacggattttta

SEQ ID NO: 744564 - DNA, 19 bp, Mus musculus
  siRNA target sequence for Pcdhgb2 (NM_033575.2,958-976).
gtggaacggatttttaact

SEQ ID NO: 744565 - DNA, 19 bp, Mus musculus
  siRNA target sequence for Pcdhgb2 (NM_033575.2,994-1012).
gaaatcacgacaaaggata

SEQ ID NO: 744566 - DNA, 19 bp, Mus musculus
  siRNA target sequence for Pcdhgb2 (NM_033575.2,1001-1019).
cgacaaaggataatttgga

SEQ ID NO: 744567 - DNA, 19 bp, Mus musculus
  siRNA target sequence for Pcdhgb2 (NM_033575.2,1002-1020).
gacaaaggataatttggat

SEQ ID NO: 744568 - DNA, 19 bp, Mus musculus
  siRNA target sequence for Pcdhgb2 (NM_033575.2,1035-1053).
gagttacaccctgaatgta

SEQ ID NO: 744569 - DNA, 19 bp, Mus musculus
  siRNA target sequence for Pcdhgb2 (NM_033575.2,1037-1055).
gttacaccctgaatgtaga

SEQ ID NO: 744570 - DNA, 19 bp, Mus musculus
  siRNA target sequence for Pcdhgb2 (NM_033575.2,1043-1061).
ccctgaatgtagaagcaaa

SEQ ID NO: 744571 - DNA, 19 bp, Mus musculus
  siRNA target sequence for Pcdhgb2 (NM_033575.2,1074-1092).
cctagcatcccattgtagt

SEQ ID NO: 744572 - DNA, 19 bp, Mus musculus
  siRNA target sequence for Pcdhgb2 (NM_033575.2,1075-1093).
ctagcatcccattgtagta

SEQ ID NO: 744573 - DNA, 19 bp, Mus musculus
  siRNA target sequence for Pcdhgb2 (NM_033575.2,1088-1106).
gtagtatccaagtgaaaat

SEQ ID NO: 744574 - DNA, 19 bp, Mus musculus
  siRNA target sequence for Pcdhgb2 (NM_033575.2,1091-1109).
gtatccaagtgaaaattct

SEQ ID NO: 744575 - DNA, 19 bp, Mus musculus
  siRNA target sequence for Pcdhgb2 (NM_033575.2,1120-1138).
gattgtgtaccggaagtaa

SEQ ID NO: 744576 - DNA, 19 bp, Mus musculus
  siRNA target sequence for Pcdhgb2 (NM_033575.2,1124-1142).
gtgtaccggaagtaattgt

SEQ ID NO: 744577 - DNA, 19 bp, Mus musculus
  siRNA target sequence for Pcdhgb2 (NM_033575.2,1135-1153).
gtaattgtgacgtcagtat

SEQ ID NO: 744578 - DNA, 19 bp, Mus musculus
  siRNA target sequence for Pcdhgb2 (NM_033575.2,1189-1207).
gtcatcgccttgataaaaa

SEQ ID NO: 744579 - DNA, 19 bp, Mus musculus
  siRNA target sequence for Pcdhgb2 (NM_033575.2,1247-1265).
gccatgtgttgggaaatga

SEQ ID NO: 744580 - DNA, 19 bp, Mus musculus
  siRNA target sequence for Pcdhgb2 (NM_033575.2,1259-1277).
gaaatgaagggtttgtatt

SEQ ID NO: 744581 - DNA, 19 bp, Mus musculus
  siRNA target sequence for Pcdhgb2 (NM_033575.2,1264-1282).
gaagggtttgtattgaaat

SEQ ID NO: 744582 - DNA, 19 bp, Mus musculus
  siRNA target sequence for Pcdhgb2 (NM_033575.2,1267-1285).
gggtttgtattgaaatctt

SEQ ID NO: 744583 - DNA, 19 bp, Mus musculus
  siRNA target sequence for Pcdhgb2 (NM_033575.2,1283-1301).
cttcttcgaagaattatta

SEQ ID NO: 744584 - DNA, 19 bp, Mus musculus
  siRNA target sequence for Pcdhgb2 (NM_033575.2,1289-1307).
cgaagaattattacaaact

SEQ ID NO: 744585 - DNA, 19 bp, Mus musculus
  siRNA target sequence for Pcdhgb2 (NM_033575.2,1333-1351).
gaggcgataccggaataca

SEQ ID NO: 744586 - DNA, 19 bp, Mus musculus
  siRNA target sequence for Pcdhgb2 (NM_033575.2,1387-1405).
ccgctctcctctaacgtaa

SEQ ID NO: 744587 - DNA, 19 bp, Mus musculus
  siRNA target sequence for Pcdhgb2 (NM_033575.2,1388-1406).
cgctctcctctaacgtaat

SEQ ID NO: 744588 - DNA, 19 bp, Mus musculus
  siRNA target sequence for Pcdhgb2 (NM_033575.2,2306-2324).
ctggagttctccccaatta

SEQ ID NO: 744589 - DNA, 19 bp, Mus musculus
  siRNA target sequence for Pcdhgb2 (NM_033575.2,2308-2326).
ggagttctccccaattaca

SEQ ID NO: 744590 - DNA, 19 bp, Mus musculus
  siRNA target sequence for Pcdhgb2 (NM_033575.2,2485-2503).
ccgtttgtctcggattcta

SEQ ID NO: 744591 - DNA, 19 bp, Mus musculus
  siRNA target sequence for Pcdhgb2 (NM_033575.2,2486-2504).
cgtttgtctcggattctat

SEQ ID NO: 744592 - DNA, 19 bp, Mus musculus
  siRNA target sequence for Pcdhgb2 (NM_033575.2,2491-2509).
gtctcggattctatctcaa

SEQ ID NO: 744593 - DNA, 19 bp, Mus musculus
  siRNA target sequence for Pcdhgb2 (NM_033575.2,2496-2514).
ggattctatctcaaagcaa

SEQ ID NO: 744594 - DNA, 19 bp, Mus musculus
  siRNA target sequence for Pcdhgb4 (NM_033576.1,399-417).
cgcgcacacttcctttgaa

SEQ ID NO: 744595 - DNA, 19 bp, Mus musculus
  siRNA target sequence for Pcdhgb4 (NM_033576.1,400-418).
gcgcacacttcctttgaat

SEQ ID NO: 744596 - DNA, 19 bp, Mus musculus
  siRNA target sequence for Pcdhgb4 (NM_033576.1,513-531).
gcttagtcccaatgatcat

SEQ ID NO: 744597 - DNA, 19 bp, Mus musculus
  siRNA target sequence for Pcdhgb4 (NM_033576.1,514-532).
cttagtcccaatgatcatt

SEQ ID NO: 744598 - DNA, 19 bp, Mus musculus
  siRNA target sequence for Pcdhgb4 (NM_033576.1,596-614).
ctctagaccgggaaaagca

SEQ ID NO: 744599 - DNA, 19 bp, Mus musculus
  siRNA target sequence for Pcdhgb4 (NM_033576.1,743-761).
gggtgagccttcctgaaaa

SEQ ID NO: 744600 - DNA, 19 bp, Mus musculus
  siRNA target sequence for Pcdhgb4 (NM_033576.1,822-840).
ctccgagatcacgttttct

SEQ ID NO: 744601 - DNA, 19 bp, Mus musculus
  siRNA target sequence for Pcdhgb4 (NM_033576.1,824-842).
ccgagatcacgttttcttt

SEQ ID NO: 744602 - DNA, 19 bp, Mus musculus
  siRNA target sequence for Pcdhgb4 (NM_033576.1,826-844).
gagatcacgttttctttca

SEQ ID NO: 744603 - DNA, 19 bp, Mus musculus
  siRNA target sequence for Pcdhgb4 (NM_033576.1,853-871).
ggccaggttacccaattta

SEQ ID NO: 744604 - DNA, 19 bp, Mus musculus
  siRNA target sequence for Pcdhgb4 (NM_033576.1,899-917).
caactctgcatacattaga

SEQ ID NO: 744605 - DNA, 19 bp, Mus musculus
  siRNA target sequence for Pcdhgb4 (NM_033576.1,980-998).
cgcaatgtacggtggaaat

SEQ ID NO: 744606 - DNA, 19 bp, Mus musculus
  siRNA target sequence for Pcdhgb4 (NM_033576.1,981-999).
gcaatgtacggtggaaata

SEQ ID NO: 744607 - DNA, 19 bp, Mus musculus
  siRNA target sequence for Pcdhgb4 (NM_033576.1,1027-1045).
cctgaagtgttattccaat

SEQ ID NO: 744608 - DNA, 19 bp, Mus musculus
  siRNA target sequence for Pcdhgb4 (NM_033576.1,1046-1064).
ctctacctgatctcataat

SEQ ID NO: 744609 - DNA, 19 bp, Mus musculus
  siRNA target sequence for Pcdhgb4 (NM_033576.1,1073-1091).
ctgagccagggacatatat

SEQ ID NO: 744610 - DNA, 19 bp, Mus musculus
  siRNA target sequence for Pcdhgb4 (NM_033576.1,1085-1103).
catatatcgctctgcttaa

SEQ ID NO: 744611 - DNA, 19 bp, Mus musculus
  siRNA target sequence for Pcdhgb4 (NM_033576.1,1098-1116).
gcttaaaacccgtgacaaa

SEQ ID NO: 744612 - DNA, 19 bp, Mus musculus
  siRNA target sequence for Pcdhgb4 (NM_033576.1,1123-1141).
ggacgcaatggagaagtta

SEQ ID NO: 744613 - DNA, 19 bp, Mus musculus
  siRNA target sequence for Pcdhgb4 (NM_033576.1,1126-1144).
cgcaatggagaagttatct

SEQ ID NO: 744614 - DNA, 19 bp, Mus musculus
  siRNA target sequence for Pcdhgb4 (NM_033576.1,1128-1146).
caatggagaagttatctgt

SEQ ID NO: 744615 - DNA, 19 bp, Mus musculus
  siRNA target sequence for Pcdhgb4 (NM_033576.1,1133-1151).
gagaagttatctgtaaatt

SEQ ID NO: 744616 - DNA, 19 bp, Mus musculus
  siRNA target sequence for Pcdhgb4 (NM_033576.1,1156-1174).
ggcggtgctccgtttaaaa

SEQ ID NO: 744617 - DNA, 19 bp, Mus musculus
  siRNA target sequence for Pcdhgb4 (NM_033576.1,1157-1175).
gcggtgctccgtttaaaat

SEQ ID NO: 744618 - DNA, 19 bp, Mus musculus
  siRNA target sequence for Pcdhgb4 (NM_033576.1,1158-1176).
cggtgctccgtttaaaata

SEQ ID NO: 744619 - DNA, 19 bp, Mus musculus
  siRNA target sequence for Pcdhgb4 (NM_033576.1,1160-1178).
gtgctccgtttaaaatact

SEQ ID NO: 744620 - DNA, 19 bp, Mus musculus
  siRNA target sequence for Pcdhgb4 (NM_033576.1,1162-1180).
gctccgtttaaaatactca

SEQ ID NO: 744621 - DNA, 19 bp, Mus musculus
  siRNA target sequence for Pcdhgb4 (NM_033576.1,1190-1208).
gaaacacgtataaactagt

SEQ ID NO: 744622 - DNA, 19 bp, Mus musculus
  siRNA target sequence for Pcdhgb4 (NM_033576.1,1209-1227).
gacggatggagttctagat

SEQ ID NO: 744623 - DNA, 19 bp, Mus musculus
  siRNA target sequence for Pcdhgb4 (NM_033576.1,1231-1249).
gagcagaacccggaataca

SEQ ID NO: 744624 - DNA, 19 bp, Mus musculus
  siRNA target sequence for Pcdhgb4 (NM_033576.1,1236-1254).
gaacccggaatacaacatt

SEQ ID NO: 744625 - DNA, 19 bp, Mus musculus
  siRNA target sequence for Pcdhgb4 (NM_033576.1,1301-1319).
caagtgtcaccttgcatat

SEQ ID NO: 744626 - DNA, 19 bp, Mus musculus
  siRNA target sequence for Pcdhgb4 (NM_033576.1,1342-1360).
ccagttttcacgaaggttt

SEQ ID NO: 744627 - DNA, 19 bp, Mus musculus
  siRNA target sequence for Pcdhgb4 (NM_033576.1,1442-1460).
ccaatggccaggttaccta

SEQ ID NO: 744628 - DNA, 19 bp, Mus musculus
  siRNA target sequence for Pcdhgb4 (NM_033576.1,1443-1461).
caatggccaggttacctat

SEQ ID NO: 744629 - DNA, 19 bp, Mus musculus
  siRNA target sequence for Pcdhgb4 (NM_033576.1,2248-2266).
gagtttaactccctaacat

SEQ ID NO: 744630 - DNA, 19 bp, Mus musculus
  siRNA target sequence for Pcdhgb4 (NM_033576.1,2256-2274).
ctccctaacatgtaatgat

SEQ ID NO: 744631 - DNA, 19 bp, Mus musculus
  siRNA target sequence for Pcdhgb4 (NM_033576.1,2258-2276).
ccctaacatgtaatgatca

SEQ ID NO: 744632 - DNA, 19 bp, Mus musculus
  siRNA target sequence for Pcdhgb4 (NM_033576.1,2264-2282).
catgtaatgatcagttgaa

SEQ ID NO: 744633 - DNA, 19 bp, Mus musculus
  siRNA target sequence for Pcdhgb4 (NM_033576.1,2332-2350).
ctttgtaattccaatgagt

SEQ ID NO: 744634 - DNA, 19 bp, Mus musculus
  siRNA target sequence for Pcdhgb5 (NM_033577.1,392-410).
caaacttcacgcacacttt

SEQ ID NO: 744635 - DNA, 19 bp, Mus musculus
  siRNA target sequence for Pcdhgb5 (NM_033577.1,407-425).
ctttctcggaactgcaaat

SEQ ID NO: 744636 - DNA, 19 bp, Mus musculus
  siRNA target sequence for Pcdhgb5 (NM_033577.1,442-460).
ccgggcactcgcttcattt

SEQ ID NO: 744637 - DNA, 19 bp, Mus musculus
  siRNA target sequence for Pcdhgb5 (NM_033577.1,443-461).
cgggcactcgcttcatttt

SEQ ID NO: 744638 - DNA, 19 bp, Mus musculus
  siRNA target sequence for Pcdhgb5 (NM_033577.1,444-462).
gggcactcgcttcatttta

SEQ ID NO: 744639 - DNA, 19 bp, Mus musculus
  siRNA target sequence for Pcdhgb5 (NM_033577.1,478-496).
gcagatattgccttaaatt

SEQ ID NO: 744640 - DNA, 19 bp, Mus musculus
  siRNA target sequence for Pcdhgb5 (NM_033577.1,488-506).
ccttaaattcgctacagaa

SEQ ID NO: 744641 - DNA, 19 bp, Mus musculus
  siRNA target sequence for Pcdhgb5 (NM_033577.1,489-507).
cttaaattcgctacagaat

SEQ ID NO: 744642 - DNA, 19 bp, Mus musculus
  siRNA target sequence for Pcdhgb5 (NM_033577.1,566-584).
gtaagtacccggaattggt

SEQ ID NO: 744643 - DNA, 19 bp, Mus musculus
  siRNA target sequence for Pcdhgb5 (NM_033577.1,604-622).
cgcgagcaacagaattact

SEQ ID NO: 744644 - DNA, 19 bp, Mus musculus
  siRNA target sequence for Pcdhgb5 (NM_033577.1,605-623).
gcgagcaacagaattacta

SEQ ID NO: 744645 - DNA, 19 bp, Mus musculus
  siRNA target sequence for Pcdhgb5 (NM_033577.1,675-693).
cactgagctgcgaatccaa

SEQ ID NO: 744646 - DNA, 19 bp, Mus musculus
  siRNA target sequence for Pcdhgb5 (NM_033577.1,726-744).
caaccaggaagtgtacaaa

SEQ ID NO: 744647 - DNA, 19 bp, Mus musculus
  siRNA target sequence for Pcdhgb5 (NM_033577.1,787-805).
cgagtgacagctacagata

SEQ ID NO: 744648 - DNA, 19 bp, Mus musculus
  siRNA target sequence for Pcdhgb5 (NM_033577.1,814-832).
ggcgtgaattcagagattt

SEQ ID NO: 744649 - DNA, 19 bp, Mus musculus
  siRNA target sequence for Pcdhgb5 (NM_033577.1,816-834).
cgtgaattcagagatttct

SEQ ID NO: 744650 - DNA, 19 bp, Mus musculus
  siRNA target sequence for Pcdhgb5 (NM_033577.1,900-918).
gaaaacactagatttcgaa

SEQ ID NO: 744651 - DNA, 19 bp, Mus musculus
  siRNA target sequence for Pcdhgb5 (NM_033577.1,966-984).
cctggttgcacaatgtaca

SEQ ID NO: 744652 - DNA, 19 bp, Mus musculus
  siRNA target sequence for Pcdhgb5 (NM_033577.1,973-991).
gcacaatgtacagttgaaa

SEQ ID NO: 744653 - DNA, 19 bp, Mus musculus
  siRNA target sequence for Pcdhgb5 (NM_033577.1,976-994).
caatgtacagttgaaatta

SEQ ID NO: 744654 - DNA, 19 bp, Mus musculus
  siRNA target sequence for Pcdhgb5 (NM_033577.1,980-998).
gtacagttgaaattaacat

SEQ ID NO: 744655 - DNA, 19 bp, Mus musculus
  siRNA target sequence for Pcdhgb5 (NM_033577.1,1011-1029).
cgacaacagaccagaaatt

SEQ ID NO: 744656 - DNA, 19 bp, Mus musculus
  siRNA target sequence for Pcdhgb5 (NM_033577.1,1037-1055).
gttctctgctagagatgat

SEQ ID NO: 744657 - DNA, 19 bp, Mus musculus
  siRNA target sequence for Pcdhgb5 (NM_033577.1,1076-1094).
gaacactaattgctttgat

SEQ ID NO: 744658 - DNA, 19 bp, Mus musculus
  siRNA target sequence for Pcdhgb5 (NM_033577.1,1081-1099).
ctaattgctttgatcaaaa

SEQ ID NO: 744659 - DNA, 19 bp, Mus musculus
  siRNA target sequence for Pcdhgb5 (NM_033577.1,1118-1136).
gagaaaacggggaggttaa

SEQ ID NO: 744660 - DNA, 19 bp, Mus musculus
  siRNA target sequence for Pcdhgb5 (NM_033577.1,1120-1138).
gaaaacggggaggttaatt

SEQ ID NO: 744661 - DNA, 19 bp, Mus musculus
  siRNA target sequence for Pcdhgb5 (NM_033577.1,1139-1157).
gtcgactagacgatgaagt

SEQ ID NO: 744662 - DNA, 19 bp, Mus musculus
  siRNA target sequence for Pcdhgb5 (NM_033577.1,1150-1168).
gatgaagtgccctttaaaa

SEQ ID NO: 744663 - DNA, 19 bp, Mus musculus
  siRNA target sequence for Pcdhgb5 (NM_033577.1,1156-1174).
gtgccctttaaaattatct

SEQ ID NO: 744664 - DNA, 19 bp, Mus musculus
  siRNA target sequence for Pcdhgb5 (NM_033577.1,1178-1196).
cttccaaaaactcgtataa

SEQ ID NO: 744665 - DNA, 19 bp, Mus musculus
  siRNA target sequence for Pcdhgb5 (NM_033577.1,1181-1199).
ccaaaaactcgtataaatt

SEQ ID NO: 744666 - DNA, 19 bp, Mus musculus
  siRNA target sequence for Pcdhgb5 (NM_033577.1,1352-1370).
cctcctacttggtgtacat

SEQ ID NO: 744667 - DNA, 19 bp, Mus musculus
  siRNA target sequence for Pcdhgb5 (NM_033577.1,2149-2167).
ccctcggtctggaattgct

SEQ ID NO: 744668 - DNA, 19 bp, Mus musculus
  siRNA target sequence for Pcdhgb5 (NM_033577.1,2150-2168).
cctcggtctggaattgctt

SEQ ID NO: 744669 - DNA, 19 bp, Mus musculus
  siRNA target sequence for Pcdhgb5 (NM_033577.1,2151-2169).
ctcggtctggaattgcttt

SEQ ID NO: 744670 - DNA, 19 bp, Mus musculus
  siRNA target sequence for Pcdhgb5 (NM_033577.1,2173-2191).
cctggattttgttctgaat

SEQ ID NO: 744671 - DNA, 19 bp, Mus musculus
  siRNA target sequence for Pcdhgb5 (NM_033577.1,2266-2284).
ggaaagaccgagtgtaatt

SEQ ID NO: 744672 - DNA, 19 bp, Mus musculus
  siRNA target sequence for Pcdhgb5 (NM_033577.1,2267-2285).
gaaagaccgagtgtaattt

SEQ ID NO: 744673 - DNA, 19 bp, Mus musculus
  siRNA target sequence for Pcdhgb5 (NM_033577.1,2271-2289).
gaccgagtgtaatttccta

SEQ ID NO: 744674 - DNA, 19 bp, Mus musculus
  siRNA target sequence for Pcdhgb5 (NM_033577.1,2273-2291).
ccgagtgtaatttcctaaa

SEQ ID NO: 744675 - DNA, 19 bp, Mus musculus
  siRNA target sequence for Pcdhgb5 (NM_033577.1,2385-2403).
ccaccccgaacctctaaca

SEQ ID NO: 744676 - DNA, 19 bp, Mus musculus
  siRNA target sequence for Pcdhgb6 (NM_033578.2,536-554).
ctcctcaattcgagaagaa

SEQ ID NO: 744677 - DNA, 19 bp, Mus musculus
  siRNA target sequence for Pcdhgb6 (NM_033578.2,541-559).
caattcgagaagaaagaaa

SEQ ID NO: 744678 - DNA, 19 bp, Mus musculus
  siRNA target sequence for Pcdhgb6 (NM_033578.2,552-570).
gaaagaaacgcgtttagaa

SEQ ID NO: 744679 - DNA, 19 bp, Mus musculus
  siRNA target sequence for Pcdhgb6 (NM_033578.2,556-574).
gaaacgcgtttagaaatct

SEQ ID NO: 744680 - DNA, 19 bp, Mus musculus
  siRNA target sequence for Pcdhgb6 (NM_033578.2,560-578).
cgcgtttagaaatcttaga

SEQ ID NO: 744681 - DNA, 19 bp, Mus musculus
  siRNA target sequence for Pcdhgb6 (NM_033578.2,561-579).
gcgtttagaaatcttagaa

SEQ ID NO: 744682 - DNA, 19 bp, Mus musculus
  siRNA target sequence for Pcdhgb6 (NM_033578.2,562-580).
cgtttagaaatcttagaaa

SEQ ID NO: 744683 - DNA, 19 bp, Mus musculus
  siRNA target sequence for Pcdhgb6 (NM_033578.2,585-603).
ggcggttggtacacgaata

SEQ ID NO: 744684 - DNA, 19 bp, Mus musculus
  siRNA target sequence for Pcdhgb6 (NM_033578.2,622-640).
gaccccgacataaatttga

SEQ ID NO: 744685 - DNA, 19 bp, Mus musculus
  siRNA target sequence for Pcdhgb6 (NM_033578.2,624-642).
ccccgacataaatttgaat

SEQ ID NO: 744686 - DNA, 19 bp, Mus musculus
  siRNA target sequence for Pcdhgb6 (NM_033578.2,625-643).
cccgacataaatttgaatt

SEQ ID NO: 744687 - DNA, 19 bp, Mus musculus
  siRNA target sequence for Pcdhgb6 (NM_033578.2,674-692).
cttatttctcattaatggt

SEQ ID NO: 744688 - DNA, 19 bp, Mus musculus
  siRNA target sequence for Pcdhgb6 (NM_033578.2,681-699).
ctcattaatggttagagtt

SEQ ID NO: 744689 - DNA, 19 bp, Mus musculus
  siRNA target sequence for Pcdhgb6 (NM_033578.2,762-780).
gaggtctcatcgcttgata

SEQ ID NO: 744690 - DNA, 19 bp, Mus musculus
  siRNA target sequence for Pcdhgb6 (NM_033578.2,764-782).
ggtctcatcgcttgatact

SEQ ID NO: 744691 - DNA, 19 bp, Mus musculus
  siRNA target sequence for Pcdhgb6 (NM_033578.2,817-835).
gccaccactcagatagaaa

SEQ ID NO: 744692 - DNA, 19 bp, Mus musculus
  siRNA target sequence for Pcdhgb6 (NM_033578.2,818-836).
ccaccactcagatagaaat

SEQ ID NO: 744693 - DNA, 19 bp, Mus musculus
  siRNA target sequence for Pcdhgb6 (NM_033578.2,819-837).
caccactcagatagaaata

SEQ ID NO: 744694 - DNA, 19 bp, Mus musculus
  siRNA target sequence for Pcdhgb6 (NM_033578.2,826-844).
cagatagaaatatctgtaa

SEQ ID NO: 744695 - DNA, 19 bp, Mus musculus
  siRNA target sequence for Pcdhgb6 (NM_033578.2,870-888).
gtttagcaaagaggaatat

SEQ ID NO: 744696 - DNA, 19 bp, Mus musculus
  siRNA target sequence for Pcdhgb6 (NM_033578.2,883-901).
gaatattgggtcagtgtta

SEQ ID NO: 744697 - DNA, 19 bp, Mus musculus
  siRNA target sequence for Pcdhgb6 (NM_033578.2,963-981).
cgtcaatgctgagatactt

SEQ ID NO: 744698 - DNA, 19 bp, Mus musculus
  siRNA target sequence for Pcdhgb6 (NM_033578.2,970-988).
gctgagatactttactact

SEQ ID NO: 744699 - DNA, 19 bp, Mus musculus
  siRNA target sequence for Pcdhgb6 (NM_033578.2,1043-1061).
gcgtgatcaagaataacca

SEQ ID NO: 744700 - DNA, 19 bp, Mus musculus
  siRNA target sequence for Pcdhgb6 (NM_033578.2,1088-1106).
ggtacaccatggaagtaga

SEQ ID NO: 744701 - DNA, 19 bp, Mus musculus
  siRNA target sequence for Pcdhgb6 (NM_033578.2,1126-1144).
ctctctacacggtgtaaaa

SEQ ID NO: 744702 - DNA, 19 bp, Mus musculus
  siRNA target sequence for Pcdhgb6 (NM_033578.2,1130-1148).
ctacacggtgtaaaatcat

SEQ ID NO: 744703 - DNA, 19 bp, Mus musculus
  siRNA target sequence for Pcdhgb6 (NM_033578.2,1199-1217).
ccctttctgatcatatctt

SEQ ID NO: 744704 - DNA, 19 bp, Mus musculus
  siRNA target sequence for Pcdhgb6 (NM_033578.2,1207-1225).
gatcatatcttggagaatt

SEQ ID NO: 744705 - DNA, 19 bp, Mus musculus
  siRNA target sequence for Pcdhgb6 (NM_033578.2,1285-1303).
ggggaagtcacgtgtgata

SEQ ID NO: 744706 - DNA, 19 bp, Mus musculus
  siRNA target sequence for Pcdhgb6 (NM_033578.2,1438-1456).
gcactctcttccagtacaa

SEQ ID NO: 744707 - DNA, 19 bp, Mus musculus
  siRNA target sequence for Pcdhgb6 (NM_033578.2,1492-1510).
gctccggctttccagaaat

SEQ ID NO: 744708 - DNA, 19 bp, Mus musculus
  siRNA target sequence for Pcdhgb6 (NM_033578.2,1503-1521).
ccagaaatcttcatacata

SEQ ID NO: 744709 - DNA, 19 bp, Mus musculus
  siRNA target sequence for Pcdhgb6 (NM_033578.2,2359-2377).
ggggtttctctcaactata

SEQ ID NO: 744710 - DNA, 19 bp, Mus musculus
  siRNA target sequence for Pcdhgb6 (NM_033578.2,2423-2441).
cgggaaaggcggagttaaa

SEQ ID NO: 744711 - DNA, 19 bp, Mus musculus
  siRNA target sequence for Pcdhgb6 (NM_033578.2,2424-2442).
gggaaaggcggagttaaat

SEQ ID NO: 744712 - DNA, 19 bp, Mus musculus
  siRNA target sequence for Pcdhgb6 (NM_033578.2,2431-2449).
gcggagttaaattttctga

SEQ ID NO: 744713 - DNA, 19 bp, Mus musculus
  siRNA target sequence for Pcdhgb6 (NM_033578.2,2432-2450).
cggagttaaattttctgaa

SEQ ID NO: 744714 - DNA, 19 bp, Mus musculus
  siRNA target sequence for Pcdhgb6 (NM_033578.2,2481-2499).
gatcgtttccggtagttct

SEQ ID NO: 744715 - DNA, 19 bp, Mus musculus
  siRNA target sequence for Pcdhgb6 (NM_033578.2,2523-2541).
ccttggagatgatttgaca

SEQ ID NO: 744716 - DNA, 19 bp, Mus musculus
  siRNA target sequence for Pcdhgb7 (NM_033579.1,387-405).
cgctcctcaatttccaaaa

SEQ ID NO: 744717 - DNA, 19 bp, Mus musculus
  siRNA target sequence for Pcdhgb7 (NM_033579.1,440-458).
gcccaggggcgagaacaat

SEQ ID NO: 744718 - DNA, 19 bp, Mus musculus
  siRNA target sequence for Pcdhgb7 (NM_033579.1,441-459).
cccaggggcgagaacaatt

SEQ ID NO: 744719 - DNA, 19 bp, Mus musculus
  siRNA target sequence for Pcdhgb7 (NM_033579.1,443-461).
caggggcgagaacaattct

SEQ ID NO: 744720 - DNA, 19 bp, Mus musculus
  siRNA target sequence for Pcdhgb7 (NM_033579.1,487-505).
ggtatgaattctctaagta

SEQ ID NO: 744721 - DNA, 19 bp, Mus musculus
  siRNA target sequence for Pcdhgb7 (NM_033579.1,499-517).
ctaagtaaataccagttaa

SEQ ID NO: 744722 - DNA, 19 bp, Mus musculus
  siRNA target sequence for Pcdhgb7 (NM_033579.1,518-536).
gtcctaacgactacttttt

SEQ ID NO: 744723 - DNA, 19 bp, Mus musculus
  siRNA target sequence for Pcdhgb7 (NM_033579.1,520-538).
cctaacgactactttttat

SEQ ID NO: 744724 - DNA, 19 bp, Mus musculus
  siRNA target sequence for Pcdhgb7 (NM_033579.1,552-570).
caatcctgatggtagtaaa

SEQ ID NO: 744725 - DNA, 19 bp, Mus musculus
  siRNA target sequence for Pcdhgb7 (NM_033579.1,563-581).
gtagtaaatacccagaatt

SEQ ID NO: 744726 - DNA, 19 bp, Mus musculus
  siRNA target sequence for Pcdhgb7 (NM_033579.1,814-832).
ggcatcaatgcagaattta

SEQ ID NO: 744727 - DNA, 19 bp, Mus musculus
  siRNA target sequence for Pcdhgb7 (NM_033579.1,843-861).
cctaggtgtggctaacaaa

SEQ ID NO: 744728 - DNA, 19 bp, Mus musculus
  siRNA target sequence for Pcdhgb7 (NM_033579.1,882-900).
cataacaggagatattgta

SEQ ID NO: 744729 - DNA, 19 bp, Mus musculus
  siRNA target sequence for Pcdhgb7 (NM_033579.1,902-920).
ctcgccagtcgttggattt

SEQ ID NO: 744730 - DNA, 19 bp, Mus musculus
  siRNA target sequence for Pcdhgb7 (NM_033579.1,912-930).
gttggattttgaagaagta

SEQ ID NO: 744731 - DNA, 19 bp, Mus musculus
  siRNA target sequence for Pcdhgb7 (NM_033579.1,925-943).
gaagtagagcaatatacga

SEQ ID NO: 744732 - DNA, 19 bp, Mus musculus
  siRNA target sequence for Pcdhgb7 (NM_033579.1,960-978).
ggaccgaggatctctttct

SEQ ID NO: 744733 - DNA, 19 bp, Mus musculus
  siRNA target sequence for Pcdhgb7 (NM_033579.1,961-979).
gaccgaggatctctttctt

SEQ ID NO: 744734 - DNA, 19 bp, Mus musculus
  siRNA target sequence for Pcdhgb7 (NM_033579.1,963-981).
ccgaggatctctttcttca

SEQ ID NO: 744735 - DNA, 19 bp, Mus musculus
  siRNA target sequence for Pcdhgb7 (NM_033579.1,1017-1035).
cgacaaccgcccagaaata

SEQ ID NO: 744736 - DNA, 19 bp, Mus musculus
  siRNA target sequence for Pcdhgb7 (NM_033579.1,1024-1042).
cgcccagaaataatcatca

SEQ ID NO: 744737 - DNA, 19 bp, Mus musculus
  siRNA target sequence for Pcdhgb7 (NM_033579.1,1104-1122).
ggtacgggatcgagattct

SEQ ID NO: 744738 - DNA, 19 bp, Mus musculus
  siRNA target sequence for Pcdhgb7 (NM_033579.1,1145-1163).
gcagtttaagcggaaacaa

SEQ ID NO: 744739 - DNA, 19 bp, Mus musculus
  siRNA target sequence for Pcdhgb7 (NM_033579.1,1146-1164).
cagtttaagcggaaacaat

SEQ ID NO: 744740 - DNA, 19 bp, Mus musculus
  siRNA target sequence for Pcdhgb7 (NM_033579.1,1154-1172).
gcggaaacaatccatttaa

SEQ ID NO: 744741 - DNA, 19 bp, Mus musculus
  siRNA target sequence for Pcdhgb7 (NM_033579.1,1354-1372).
cagcaggcctacctgataa

SEQ ID NO: 744742 - DNA, 19 bp, Mus musculus
  siRNA target sequence for Pcdhgb7 (NM_033579.1,1359-1377).
ggcctacctgataaacgta

SEQ ID NO: 744743 - DNA, 19 bp, Mus musculus
  siRNA target sequence for Pcdhgb7 (NM_033579.1,1966-1984).
gctacactgctcctagttt

SEQ ID NO: 744744 - DNA, 19 bp, Mus musculus
  siRNA target sequence for Pcdhgb7 (NM_033579.1,2113-2131).
gtaattttcgccattgctt

SEQ ID NO: 744745 - DNA, 19 bp, Mus musculus
  siRNA target sequence for Pcdhgb7 (NM_033579.1,2178-2196).
gtcggttcttggttccaaa

SEQ ID NO: 744746 - DNA, 19 bp, Mus musculus
  siRNA target sequence for Pcdhgb7 (NM_033579.1,2193-2211).
caaatctagaccagtactt

SEQ ID NO: 744747 - DNA, 19 bp, Mus musculus
  siRNA target sequence for Pcdhgb7 (NM_033579.1,2256-2274).
gtgcgtgccgggagatcaa

SEQ ID NO: 744748 - DNA, 19 bp, Mus musculus
  siRNA target sequence for Pcdhgb7 (NM_033579.1,2258-2276).
gcgtgccgggagatcaact

SEQ ID NO: 744749 - DNA, 19 bp, Mus musculus
  siRNA target sequence for Pcdhgb7 (NM_033579.1,2259-2277).
cgtgccgggagatcaactt

SEQ ID NO: 744750 - DNA, 19 bp, Mus musculus
  siRNA target sequence for Pcdhgb7 (NM_033579.1,2262-2280).
gccgggagatcaacttaaa

SEQ ID NO: 744751 - DNA, 19 bp, Mus musculus
  siRNA target sequence for Pcdhgb7 (NM_033579.1,2265-2283).
gggagatcaacttaaacca

SEQ ID NO: 744752 - DNA, 19 bp, Mus musculus
  siRNA target sequence for Pcdhgb7 (NM_033579.1,2275-2293).
cttaaaccagaatttaatt

SEQ ID NO: 744753 - DNA, 19 bp, Mus musculus
  siRNA target sequence for Pcdhgb7 (NM_033579.1,2284-2302).
gaatttaattacttctcat

SEQ ID NO: 744754 - DNA, 19 bp, Mus musculus
  siRNA target sequence for Pcdhgb7 (NM_033579.1,2315-2333).
gtccagccgcacaagatat

SEQ ID NO: 744755 - DNA, 19 bp, Mus musculus
  siRNA target sequence for Pcdhgb7 (NM_033579.1,2318-2336).
cagccgcacaagatattct

SEQ ID NO: 744756 - DNA, 19 bp, Mus musculus
  siRNA target sequence for Pcdhgb7 (NM_033579.1,2320-2338).
gccgcacaagatattctca

SEQ ID NO: 744757 - DNA, 19 bp, Mus musculus
  siRNA target sequence for Pcdhgb7 (NM_033579.1,2321-2339).
ccgcacaagatattctcaa

SEQ ID NO: 744758 - DNA, 19 bp, Mus musculus
  siRNA target sequence for Pcdhgb7 (NM_033579.1,2354-2372).
cggcactgttggctagtat

SEQ ID NO: 744759 - DNA, 19 bp, Mus musculus
  siRNA target sequence for Pcdhgb7 (NM_033579.1,2355-2373).
ggcactgttggctagtatt

SEQ ID NO: 744760 - DNA, 19 bp, Mus musculus
  siRNA target sequence for Pcdhgb7 (NM_033579.1,2361-2379).
gttggctagtattttaact

SEQ ID NO: 744761 - DNA, 19 bp, Mus musculus
  siRNA target sequence for Pcdhgb8 (NM_033580.1,94-112).
gagcaagtccggtactcta

SEQ ID NO: 744762 - DNA, 19 bp, Mus musculus
  siRNA target sequence for Pcdhgb8 (NM_033580.1,96-114).
gcaagtccggtactctatt

SEQ ID NO: 744763 - DNA, 19 bp, Mus musculus
  siRNA target sequence for Pcdhgb8 (NM_033580.1,172-190).
cctgttcaggacttactga

SEQ ID NO: 744764 - DNA, 19 bp, Mus musculus
  siRNA target sequence for Pcdhgb8 (NM_033580.1,189-207).
gacaagaaaccttagagtt

SEQ ID NO: 744765 - DNA, 19 bp, Mus musculus
  siRNA target sequence for Pcdhgb8 (NM_033580.1,191-209).
caagaaaccttagagttat

SEQ ID NO: 744766 - DNA, 19 bp, Mus musculus
  siRNA target sequence for Pcdhgb8 (NM_033580.1,237-255).
cccagagaacgggaacata

SEQ ID NO: 744767 - DNA, 19 bp, Mus musculus
  siRNA target sequence for Pcdhgb8 (NM_033580.1,267-285).
cagaatagaccgagagttt

SEQ ID NO: 744768 - DNA, 19 bp, Mus musculus
  siRNA target sequence for Pcdhgb8 (NM_033580.1,269-287).
gaatagaccgagagtttct

SEQ ID NO: 744769 - DNA, 19 bp, Mus musculus
  siRNA target sequence for Pcdhgb8 (NM_033580.1,309-327).
cgtcctgcccttagagatt

SEQ ID NO: 744770 - DNA, 19 bp, Mus musculus
  siRNA target sequence for Pcdhgb8 (NM_033580.1,332-350).
cagaaaatcccctaaacgt

SEQ ID NO: 744771 - DNA, 19 bp, Mus musculus
  siRNA target sequence for Pcdhgb8 (NM_033580.1,357-375).
cgtcagcgtggtgatagaa

SEQ ID NO: 744772 - DNA, 19 bp, Mus musculus
  siRNA target sequence for Pcdhgb8 (NM_033580.1,362-380).
gcgtggtgatagaagatat

SEQ ID NO: 744773 - DNA, 19 bp, Mus musculus
  siRNA target sequence for Pcdhgb8 (NM_033580.1,363-381).
cgtggtgatagaagatata

SEQ ID NO: 744774 - DNA, 19 bp, Mus musculus
  siRNA target sequence for Pcdhgb8 (NM_033580.1,366-384).
ggtgatagaagatataaat

SEQ ID NO: 744775 - DNA, 19 bp, Mus musculus
  siRNA target sequence for Pcdhgb8 (NM_033580.1,398-416).
gtttcctccaaaatagcat

SEQ ID NO: 744776 - DNA, 19 bp, Mus musculus
  siRNA target sequence for Pcdhgb8 (NM_033580.1,441-459).
gattccaggcactaggttt

SEQ ID NO: 744777 - DNA, 19 bp, Mus musculus
  siRNA target sequence for Pcdhgb8 (NM_033580.1,633-651).
ggtcctaaccgcagtagat

SEQ ID NO: 744778 - DNA, 19 bp, Mus musculus
  siRNA target sequence for Pcdhgb8 (NM_033580.1,671-689).
cgggcaccgctcagattca

SEQ ID NO: 744779 - DNA, 19 bp, Mus musculus
  siRNA target sequence for Pcdhgb8 (NM_033580.1,674-692).
gcaccgctcagattcagat

SEQ ID NO: 744780 - DNA, 19 bp, Mus musculus
  siRNA target sequence for Pcdhgb8 (NM_033580.1,721-739).
ccagtgttcagccaaagta

SEQ ID NO: 744781 - DNA, 19 bp, Mus musculus
  siRNA target sequence for Pcdhgb8 (NM_033580.1,729-747).
cagccaaagtacgtacaaa

SEQ ID NO: 744782 - DNA, 19 bp, Mus musculus
  siRNA target sequence for Pcdhgb8 (NM_033580.1,731-749).
gccaaagtacgtacaaagt

SEQ ID NO: 744783 - DNA, 19 bp, Mus musculus
  siRNA target sequence for Pcdhgb8 (NM_033580.1,733-751).
caaagtacgtacaaagtca

SEQ ID NO: 744784 - DNA, 19 bp, Mus musculus
  siRNA target sequence for Pcdhgb8 (NM_033580.1,776-794).
gcacgtctgtgctaacagt

SEQ ID NO: 744785 - DNA, 19 bp, Mus musculus
  siRNA target sequence for Pcdhgb8 (NM_033580.1,837-855).
ctactccttcaaatcacta

SEQ ID NO: 744786 - DNA, 19 bp, Mus musculus
  siRNA target sequence for Pcdhgb8 (NM_033580.1,846-864).
caaatcactaggagaagat

SEQ ID NO: 744787 - DNA, 19 bp, Mus musculus
  siRNA target sequence for Pcdhgb8 (NM_033580.1,856-874).
ggagaagatattagagata

SEQ ID NO: 744788 - DNA, 19 bp, Mus musculus
  siRNA target sequence for Pcdhgb8 (NM_033580.1,857-875).
gagaagatattagagataa

SEQ ID NO: 744789 - DNA, 19 bp, Mus musculus
  siRNA target sequence for Pcdhgb8 (NM_033580.1,911-929).
ccaaaggccctattgactt

SEQ ID NO: 744790 - DNA, 19 bp, Mus musculus
  siRNA target sequence for Pcdhgb8 (NM_033580.1,912-930).
caaaggccctattgacttt

SEQ ID NO: 744791 - DNA, 19 bp, Mus musculus
  siRNA target sequence for Pcdhgb8 (NM_033580.1,931-949).
gaaaccaagaggacttaca

SEQ ID NO: 744792 - DNA, 19 bp, Mus musculus
  siRNA target sequence for Pcdhgb8 (NM_033580.1,941-959).
ggacttacaccatgaacat

SEQ ID NO: 744793 - DNA, 19 bp, Mus musculus
  siRNA target sequence for Pcdhgb8 (NM_033580.1,989-1007).
cagaatgtaaagttgtagt

SEQ ID NO: 744794 - DNA, 19 bp, Mus musculus
  siRNA target sequence for Pcdhgb8 (NM_033580.1,1035-1053).
cccagaagtggtttttact

SEQ ID NO: 744795 - DNA, 19 bp, Mus musculus
  siRNA target sequence for Pcdhgb8 (NM_033580.1,1036-1054).
ccagaagtggtttttactt

SEQ ID NO: 744796 - DNA, 19 bp, Mus musculus
  siRNA target sequence for Pcdhgb8 (NM_033580.1,1052-1070).
cttccgtgtccaattctat

SEQ ID NO: 744797 - DNA, 19 bp, Mus musculus
  siRNA target sequence for Pcdhgb8 (NM_033580.1,1096-1114).
gtggtggctctgttcaaaa

SEQ ID NO: 744798 - DNA, 19 bp, Mus musculus
  siRNA target sequence for Pcdhgb8 (NM_033580.1,1115-1133).
cgtatgataaagattcaga

SEQ ID NO: 744799 - DNA, 19 bp, Mus musculus
  siRNA target sequence for Pcdhgb8 (NM_033580.1,1145-1163).
gagtgagttgcttcgtaaa

SEQ ID NO: 744800 - DNA, 19 bp, Mus musculus
  siRNA target sequence for Pcdhgb8 (NM_033580.1,1165-1183).
gaaacggttccttttagga

SEQ ID NO: 744801 - DNA, 19 bp, Mus musculus
  siRNA target sequence for Pcdhgb8 (NM_033580.1,1170-1188).
ggttccttttaggattgaa

SEQ ID NO: 744802 - DNA, 19 bp, Mus musculus
  siRNA target sequence for Pcdhgb8 (NM_033580.1,1196-1214).
ccagcaattactataagct

SEQ ID NO: 744803 - DNA, 19 bp, Mus musculus
  siRNA target sequence for Pcdhgb8 (NM_033580.1,1485-1503).
cgacctagagcctaaatca

SEQ ID NO: 744804 - DNA, 19 bp, Mus musculus
  siRNA target sequence for Pcdhgb8 (NM_033580.1,2164-2182).
cctgctgtctcagactatt

SEQ ID NO: 744805 - DNA, 19 bp, Mus musculus
  siRNA target sequence for Pcdhgb8 (NM_033580.1,2234-2252).
gcgaggggactcttcctta

SEQ ID NO: 744806 - DNA, 19 bp, Mus musculus
  siRNA target sequence for Pcdhgb8 (NM_033580.1,2235-2253).
cgaggggactcttccttat

SEQ ID NO: 744807 - DNA, 19 bp, Mus musculus
  siRNA target sequence for Pcdhgb8 (NM_033580.1,2265-2283).
ctatgttgcctccaattgt

SEQ ID NO: 744808 - DNA, 19 bp, Mus musculus
  siRNA target sequence for Pcdhgb8 (NM_033580.1,2276-2294).
ccaattgtcaaaagacaat

SEQ ID NO: 744809 - DNA, 19 bp, Mus musculus
  siRNA target sequence for Pcdhgb8 (NM_033580.1,2277-2295).
caattgtcaaaagacaatt

SEQ ID NO: 744810 - DNA, 19 bp, Mus musculus
  siRNA target sequence for Pcdhgb8 (NM_033580.1,2309-2327).
ccttgactccagaaatggt

SEQ ID NO: 744811 - DNA, 19 bp, Mus musculus
  siRNA target sequence for Pcdhgb8 (NM_033580.1,2329-2347).
cctccgcgagacctttgta

SEQ ID NO: 744812 - DNA, 19 bp, Mus musculus
  siRNA target sequence for Pcdhgb8 (NM_033580.1,2371-2389).
gtcgctgaggagaataaca

SEQ ID NO: 744813 - DNA, 19 bp, Mus musculus
  siRNA target sequence for Pcdhgb8 (NM_033580.1,2391-2409).
gatagtctcggattctatt

SEQ ID NO: 744814 - DNA, 19 bp, Mus musculus
  siRNA target sequence for Pcdhgb8 (NM_033580.1,2395-2413).
gtctcggattctattgctt

SEQ ID NO: 744815 - DNA, 19 bp, Mus musculus
  siRNA target sequence for Pcdhgc3 (NM_033581.1,41-59).
ggagaacggtgggagtttt

SEQ ID NO: 744816 - DNA, 19 bp, Mus musculus
  siRNA target sequence for Pcdhgc3 (NM_033581.1,44-62).
gaacggtgggagttttgct

SEQ ID NO: 744817 - DNA, 19 bp, Mus musculus
  siRNA target sequence for Pcdhgc3 (NM_033581.1,81-99).
cgaggcttccaccatcatt

SEQ ID NO: 744818 - DNA, 19 bp, Mus musculus
  siRNA target sequence for Pcdhgc3 (NM_033581.1,89-107).
ccaccatcattcactatga

SEQ ID NO: 744819 - DNA, 19 bp, Mus musculus
  siRNA target sequence for Pcdhgc3 (NM_033581.1,405-423).
ccccaccggggaaatgaaa

SEQ ID NO: 744820 - DNA, 19 bp, Mus musculus
  siRNA target sequence for Pcdhgc3 (NM_033581.1,406-424).
cccaccggggaaatgaaat

SEQ ID NO: 744821 - DNA, 19 bp, Mus musculus
  siRNA target sequence for Pcdhgc3 (NM_033581.1,410-428).
ccggggaaatgaaattgga

SEQ ID NO: 744822 - DNA, 19 bp, Mus musculus
  siRNA target sequence for Pcdhgc3 (NM_033581.1,497-515).
gcaactctttacaaaccta

SEQ ID NO: 744823 - DNA, 19 bp, Mus musculus
  siRNA target sequence for Pcdhgc3 (NM_033581.1,559-577).
cgagaagacggcacgaaat

SEQ ID NO: 744824 - DNA, 19 bp, Mus musculus
  siRNA target sequence for Pcdhgc3 (NM_033581.1,671-689).
gctccgccacccttccaat

SEQ ID NO: 744825 - DNA, 19 bp, Mus musculus
  siRNA target sequence for Pcdhgc3 (NM_033581.1,675-693).
cgccacccttccaattcgt

SEQ ID NO: 744826 - DNA, 19 bp, Mus musculus
  siRNA target sequence for Pcdhgc3 (NM_033581.1,676-694).
gccacccttccaattcgta

SEQ ID NO: 744827 - DNA, 19 bp, Mus musculus
  siRNA target sequence for Pcdhgc3 (NM_033581.1,677-695).
ccacccttccaattcgtat

SEQ ID NO: 744828 - DNA, 19 bp, Mus musculus
  siRNA target sequence for Pcdhgc3 (NM_033581.1,681-699).
ccttccaattcgtatcaca

SEQ ID NO: 744829 - DNA, 19 bp, Mus musculus
  siRNA target sequence for Pcdhgc3 (NM_033581.1,717-735).
caatgcgcctgccttcaat

SEQ ID NO: 744830 - DNA, 19 bp, Mus musculus
  siRNA target sequence for Pcdhgc3 (NM_033581.1,727-745).
gccttcaatcagtctttgt

SEQ ID NO: 744831 - DNA, 19 bp, Mus musculus
  siRNA target sequence for Pcdhgc3 (NM_033581.1,728-746).
ccttcaatcagtctttgta

SEQ ID NO: 744832 - DNA, 19 bp, Mus musculus
  siRNA target sequence for Pcdhgc3 (NM_033581.1,729-747).
cttcaatcagtctttgtat

SEQ ID NO: 744833 - DNA, 19 bp, Mus musculus
  siRNA target sequence for Pcdhgc3 (NM_033581.1,821-839).
gcctcaacggagaaatcgt

SEQ ID NO: 744834 - DNA, 19 bp, Mus musculus
  siRNA target sequence for Pcdhgc3 (NM_033581.1,822-840).
cctcaacggagaaatcgtt

SEQ ID NO: 744835 - DNA, 19 bp, Mus musculus
  siRNA target sequence for Pcdhgc3 (NM_033581.1,823-841).
ctcaacggagaaatcgttt

SEQ ID NO: 744836 - DNA, 19 bp, Mus musculus
  siRNA target sequence for Pcdhgc3 (NM_033581.1,865-883).
gctggggtgcgggaactat

SEQ ID NO: 744837 - DNA, 19 bp, Mus musculus
  siRNA target sequence for Pcdhgc3 (NM_033581.1,866-884).
ctggggtgcgggaactatt

SEQ ID NO: 744838 - DNA, 19 bp, Mus musculus
  siRNA target sequence for Pcdhgc3 (NM_033581.1,875-893).
gggaactattcgctttaga

SEQ ID NO: 744839 - DNA, 19 bp, Mus musculus
  siRNA target sequence for Pcdhgc3 (NM_033581.1,902-920).
ccggggtgctgacaatcaa

SEQ ID NO: 744840 - DNA, 19 bp, Mus musculus
  siRNA target sequence for Pcdhgc3 (NM_033581.1,942-960).
caccaaactccatgagatt

SEQ ID NO: 744841 - DNA, 19 bp, Mus musculus
  siRNA target sequence for Pcdhgc3 (NM_033581.1,944-962).
ccaaactccatgagattta

SEQ ID NO: 744842 - DNA, 19 bp, Mus musculus
  siRNA target sequence for Pcdhgc3 (NM_033581.1,992-1010).
ccgaaggagcgcattgcaa

SEQ ID NO: 744843 - DNA, 19 bp, Mus musculus
  siRNA target sequence for Pcdhgc3 (NM_033581.1,993-1011).
cgaaggagcgcattgcaaa

SEQ ID NO: 744844 - DNA, 19 bp, Mus musculus
  siRNA target sequence for Pcdhgc3 (NM_033581.1,998-1016).
gagcgcattgcaaagtact

SEQ ID NO: 744845 - DNA, 19 bp, Mus musculus
  siRNA target sequence for Pcdhgc3 (NM_033581.1,1001-1019).
cgcattgcaaagtacttgt

SEQ ID NO: 744846 - DNA, 19 bp, Mus musculus
  siRNA target sequence for Pcdhgc3 (NM_033581.1,1002-1020).
gcattgcaaagtacttgta

SEQ ID NO: 744847 - DNA, 19 bp, Mus musculus
  siRNA target sequence for Pcdhgc3 (NM_033581.1,1199-1217).
cttcttccctcaagaatta

SEQ ID NO: 744848 - DNA, 19 bp, Mus musculus
  siRNA target sequence for Pcdhgc3 (NM_033581.1,1254-1272).
gaccatgccagaatacaat

SEQ ID NO: 744849 - DNA, 19 bp, Mus musculus
  siRNA target sequence for Pcdhgc3 (NM_033581.1,1305-1323).
ctctctctcagctcttaca

SEQ ID NO: 744850 - DNA, 19 bp, Mus musculus
  siRNA target sequence for Pcdhgc3 (NM_033581.1,1379-1397).
cctcctacgacgtttatgt

SEQ ID NO: 744851 - DNA, 19 bp, Mus musculus
  siRNA target sequence for Pcdhgc3 (NM_033581.1,1380-1398).
ctcctacgacgtttatgtt

SEQ ID NO: 744852 - DNA, 19 bp, Mus musculus
  siRNA target sequence for Pcdhgc3 (NM_033581.1,1389-1407).
cgtttatgttgaggaaaat

SEQ ID NO: 744853 - DNA, 19 bp, Mus musculus
  siRNA target sequence for Pcdhgc3 (NM_033581.1,1418-1436).
gcgttcctatattaaacct

SEQ ID NO: 744854 - DNA, 19 bp, Mus musculus
  siRNA target sequence for Pcdhgc3 (NM_033581.1,1419-1437).
cgttcctatattaaaccta

SEQ ID NO: 744855 - DNA, 19 bp, Mus musculus
  siRNA target sequence for Pcdhgc3 (NM_033581.1,1511-1529).
ggctcgtgagtcgctattt

SEQ ID NO: 744856 - DNA, 19 bp, Mus musculus
  siRNA target sequence for Pcdhgc3 (NM_033581.1,1515-1533).
cgtgagtcgctatttcaca

SEQ ID NO: 744857 - DNA, 19 bp, Mus musculus
  siRNA target sequence for Pcdhgc3 (NM_033581.1,1516-1534).
gtgagtcgctatttcacaa

SEQ ID NO: 744858 - DNA, 19 bp, Mus musculus
  siRNA target sequence for Pcdhgc3 (NM_033581.1,1518-1536).
gagtcgctatttcacaata

SEQ ID NO: 744859 - DNA, 19 bp, Mus musculus
  siRNA target sequence for Pcdhgc3 (NM_033581.1,1524-1542).
ctatttcacaataaatcgt

SEQ ID NO: 744860 - DNA, 19 bp, Mus musculus
  siRNA target sequence for Pcdhgc3 (NM_033581.1,1530-1548).
cacaataaatcgtgacaat

SEQ ID NO: 744861 - DNA, 19 bp, Mus musculus
  siRNA target sequence for Pcdhgc3 (NM_033581.1,1588-1606).
cagagagagttccaactaa

SEQ ID NO: 744862 - DNA, 19 bp, Mus musculus
  siRNA target sequence for Pcdhgc3 (NM_033581.1,1590-1608).
gagagagttccaactaaca

SEQ ID NO: 744863 - DNA, 19 bp, Mus musculus
  siRNA target sequence for Pcdhgc3 (NM_033581.1,1600-1618).
caactaacagctcatataa

SEQ ID NO: 744864 - DNA, 19 bp, Mus musculus
  siRNA target sequence for Pcdhgc3 (NM_033581.1,1623-1641).
cggaggtaccccagtctta

SEQ ID NO: 744865 - DNA, 19 bp, Mus musculus
  siRNA target sequence for Pcdhgc3 (NM_033581.1,1636-1654).
gtcttagccaccaacatca

SEQ ID NO: 744866 - DNA, 19 bp, Mus musculus
  siRNA target sequence for Pcdhgc3 (NM_033581.1,1650-1668).
catcagcgtgaacgtattt

SEQ ID NO: 744867 - DNA, 19 bp, Mus musculus
  siRNA target sequence for Pcdhgc3 (NM_033581.1,1653-1671).
cagcgtgaacgtatttgtt

SEQ ID NO: 744868 - DNA, 19 bp, Mus musculus
  siRNA target sequence for Pcdhgc3 (NM_033581.1,1656-1674).
cgtgaacgtatttgttact

SEQ ID NO: 744869 - DNA, 19 bp, Mus musculus
  siRNA target sequence for Pcdhgc3 (NM_033581.1,1897-1915).
ccaatccaggacacagatt

SEQ ID NO: 744870 - DNA, 19 bp, Mus musculus
  siRNA target sequence for Pcdhgc3 (NM_033581.1,2130-2148).
gggagtgatcatattcaaa

SEQ ID NO: 744871 - DNA, 19 bp, Mus musculus
  siRNA target sequence for Pcdhgc3 (NM_033581.1,2306-2324).
gcgacccactgctgaagaa

SEQ ID NO: 744872 - DNA, 19 bp, Mus musculus
  siRNA target sequence for Pcdhgc3 (NM_033581.1,2361-2379).
cacgctgcgaagttgtgat

SEQ ID NO: 744873 - DNA, 19 bp, Mus musculus
  siRNA target sequence for Pcdhgc4 (NM_033582.2,528-546).
gccacctgggctacgttta

SEQ ID NO: 744874 - DNA, 19 bp, Mus musculus
  siRNA target sequence for Pcdhgc4 (NM_033582.2,529-547).
ccacctgggctacgtttat

SEQ ID NO: 744875 - DNA, 19 bp, Mus musculus
  siRNA target sequence for Pcdhgc4 (NM_033582.2,579-597).
cacaggaagggacttttgt

SEQ ID NO: 744876 - DNA, 19 bp, Mus musculus
  siRNA target sequence for Pcdhgc4 (NM_033582.2,600-618).
ggaatgtcgcccaagattt

SEQ ID NO: 744877 - DNA, 19 bp, Mus musculus
  siRNA target sequence for Pcdhgc4 (NM_033582.2,601-619).
gaatgtcgcccaagatttt

SEQ ID NO: 744878 - DNA, 19 bp, Mus musculus
  siRNA target sequence for Pcdhgc4 (NM_033582.2,623-641).
ctggatacagagagtctat

SEQ ID NO: 744879 - DNA, 19 bp, Mus musculus
  siRNA target sequence for Pcdhgc4 (NM_033582.2,662-680).
gctggagaggtgaaccaaa

SEQ ID NO: 744880 - DNA, 19 bp, Mus musculus
  siRNA target sequence for Pcdhgc4 (NM_033582.2,681-699).
gacacttccgtgtggattt

SEQ ID NO: 744881 - DNA, 19 bp, Mus musculus
  siRNA target sequence for Pcdhgc4 (NM_033582.2,705-723).
gcggagccctgctcatcaa

SEQ ID NO: 744882 - DNA, 19 bp, Mus musculus
  siRNA target sequence for Pcdhgc4 (NM_033582.2,718-736).
catcaaaaatccaatcgat

SEQ ID NO: 744883 - DNA, 19 bp, Mus musculus
  siRNA target sequence for Pcdhgc4 (NM_033582.2,772-790).
cgtgcccctggagtttgta

SEQ ID NO: 744884 - DNA, 19 bp, Mus musculus
  siRNA target sequence for Pcdhgc4 (NM_033582.2,773-791).
gtgcccctggagtttgtaa

SEQ ID NO: 744885 - DNA, 19 bp, Mus musculus
  siRNA target sequence for Pcdhgc4 (NM_033582.2,944-962).
gatgttgggagcaattcca

SEQ ID NO: 744886 - DNA, 19 bp, Mus musculus
  siRNA target sequence for Pcdhgc4 (NM_033582.2,947-965).
gttgggagcaattccatta

SEQ ID NO: 744887 - DNA, 19 bp, Mus musculus
  siRNA target sequence for Pcdhgc4 (NM_033582.2,950-968).
gggagcaattccattagca

SEQ ID NO: 744888 - DNA, 19 bp, Mus musculus
  siRNA target sequence for Pcdhgc4 (NM_033582.2,1286-1304).
ggtaacgtcaccttttctt

SEQ ID NO: 744889 - DNA, 19 bp, Mus musculus
  siRNA target sequence for Pcdhgc4 (NM_033582.2,1287-1305).
gtaacgtcaccttttcttt

SEQ ID NO: 744890 - DNA, 19 bp, Mus musculus
  siRNA target sequence for Pcdhgc4 (NM_033582.2,1317-1335).
cccctgaccgtgtgagaaa

SEQ ID NO: 744891 - DNA, 19 bp, Mus musculus
  siRNA target sequence for Pcdhgc4 (NM_033582.2,1352-1370).
cccactactggaaagctta

SEQ ID NO: 744892 - DNA, 19 bp, Mus musculus
  siRNA target sequence for Pcdhgc4 (NM_033582.2,1379-1397).
gggcctctagactttgaga

SEQ ID NO: 744893 - DNA, 19 bp, Mus musculus
  siRNA target sequence for Pcdhgc4 (NM_033582.2,1396-1414).
gagtgagaattattacgaa

SEQ ID NO: 744894 - DNA, 19 bp, Mus musculus
  siRNA target sequence for Pcdhgc4 (NM_033582.2,1398-1416).
gtgagaattattacgaatt

SEQ ID NO: 744895 - DNA, 19 bp, Mus musculus
  siRNA target sequence for Pcdhgc4 (NM_033582.2,1473-1491).
gggtggatcttctagatgt

SEQ ID NO: 744896 - DNA, 19 bp, Mus musculus
  siRNA target sequence for Pcdhgc4 (NM_033582.2,1560-1578).
gcactgtggtagcactaat

SEQ ID NO: 744897 - DNA, 19 bp, Mus musculus
  siRNA target sequence for Pcdhgc4 (NM_033582.2,1591-1609).
ccctgactcggggtcaaat

SEQ ID NO: 744898 - DNA, 19 bp, Mus musculus
  siRNA target sequence for Pcdhgc4 (NM_033582.2,1716-1734).
gatccagttacgacatcat

SEQ ID NO: 744899 - DNA, 19 bp, Mus musculus
  siRNA target sequence for Pcdhgc4 (NM_033582.2,1732-1750).
catggttaccgcttctgat

SEQ ID NO: 744900 - DNA, 19 bp, Mus musculus
  siRNA target sequence for Pcdhgc4 (NM_033582.2,1770-1788).
gcacccacaggacgatttt

SEQ ID NO: 744901 - DNA, 19 bp, Mus musculus
  siRNA target sequence for Pcdhgc4 (NM_033582.2,1792-1810).
caatatctcagatgtgaat

SEQ ID NO: 744902 - DNA, 19 bp, Mus musculus
  siRNA target sequence for Pcdhgc4 (NM_033582.2,1836-1854).
ggtcgcatgaggtgtttgt

SEQ ID NO: 744903 - DNA, 19 bp, Mus musculus
  siRNA target sequence for Pcdhgc4 (NM_033582.2,1837-1855).
gtcgcatgaggtgtttgtt

SEQ ID NO: 744904 - DNA, 19 bp, Mus musculus
  siRNA target sequence for Pcdhgc4 (NM_033582.2,1914-1932).
ctggcttaaacgcgttaat

SEQ ID NO: 744905 - DNA, 19 bp, Mus musculus
  siRNA target sequence for Pcdhgc4 (NM_033582.2,1916-1934).
ggcttaaacgcgttaatct

SEQ ID NO: 744906 - DNA, 19 bp, Mus musculus
  siRNA target sequence for Pcdhgc4 (NM_033582.2,1918-1936).
cttaaacgcgttaatctca

SEQ ID NO: 744907 - DNA, 19 bp, Mus musculus
  siRNA target sequence for Pcdhgc4 (NM_033582.2,2009-2027).
gccgttcatgctactagat

SEQ ID NO: 744908 - DNA, 19 bp, Mus musculus
  siRNA target sequence for Pcdhgc4 (NM_033582.2,2011-2029).
cgttcatgctactagatca

SEQ ID NO: 744909 - DNA, 19 bp, Mus musculus
  siRNA target sequence for Pcdhgc4 (NM_033582.2,2012-2030).
gttcatgctactagatcat

SEQ ID NO: 744910 - DNA, 19 bp, Mus musculus
  siRNA target sequence for Pcdhgc4 (NM_033582.2,2019-2037).
ctactagatcatttgacta

SEQ ID NO: 744911 - DNA, 19 bp, Mus musculus
  siRNA target sequence for Pcdhgc4 (NM_033582.2,2022-2040).
ctagatcatttgactatga

SEQ ID NO: 744912 - DNA, 19 bp, Mus musculus
  siRNA target sequence for Pcdhgc4 (NM_033582.2,2025-2043).
gatcatttgactatgaaca

SEQ ID NO: 744913 - DNA, 19 bp, Mus musculus
  siRNA target sequence for Pcdhgc4 (NM_033582.2,2046-2064).
cacagacactgcagtttga

SEQ ID NO: 744914 - DNA, 19 bp, Mus musculus
  siRNA target sequence for Pcdhgc4 (NM_033582.2,2112-2130).
cagtgcgcctgtttgttct

SEQ ID NO: 744915 - DNA, 19 bp, Mus musculus
  siRNA target sequence for Pcdhgc4 (NM_033582.2,2242-2260).
gacggctgtggacttagat

SEQ ID NO: 744916 - DNA, 19 bp, Mus musculus
  siRNA target sequence for Pcdhgc4 (NM_033582.2,2245-2263).
ggctgtggacttagattca

SEQ ID NO: 744917 - DNA, 19 bp, Mus musculus
  siRNA target sequence for Pcdhgc4 (NM_033582.2,2269-2287).
caatgcttgggtttcctat

SEQ ID NO: 744918 - DNA, 19 bp, Mus musculus
  siRNA target sequence for Pcdhgc4 (NM_033582.2,2482-2500).
ccccgatcttcgagaatct

SEQ ID NO: 744919 - DNA, 19 bp, Mus musculus
  siRNA target sequence for Pcdhgc4 (NM_033582.2,2483-2501).
cccgatcttcgagaatctt

SEQ ID NO: 744920 - DNA, 19 bp, Mus musculus
  siRNA target sequence for Pcdhgc4 (NM_033582.2,2485-2503).
cgatcttcgagaatcttca

SEQ ID NO: 744921 - DNA, 19 bp, Mus musculus
  siRNA target sequence for Pcdhgc4 (NM_033582.2,2555-2573).
gtggcgatctgctttgtct

SEQ ID NO: 744922 - DNA, 19 bp, Mus musculus
  siRNA target sequence for Pcdhgc4 (NM_033582.2,2588-2606).
gtggcactgctctctaagt

SEQ ID NO: 744923 - DNA, 19 bp, Mus musculus
  siRNA target sequence for Pcdhgc4 (NM_033582.2,2727-2745).
ggtcagaagatcctatcaa

SEQ ID NO: 744924 - DNA, 19 bp, Mus musculus
  siRNA target sequence for Pcdhgc4 (NM_033582.2,2730-2748).
cagaagatcctatcaagtt

SEQ ID NO: 744925 - DNA, 19 bp, Mus musculus
  siRNA target sequence for Pcdhgc4 (NM_033582.2,2795-2813).
gcgcctactcggagtgata

SEQ ID NO: 744926 - DNA, 19 bp, Mus musculus
  siRNA target sequence for Pcdhgc4 (NM_033582.2,2799-2817).
ctactcggagtgatagctt

SEQ ID NO: 744927 - DNA, 19 bp, Mus musculus
  siRNA target sequence for Pcdhgc4 (NM_033582.2,2872-2890).
ctgtccaccctctgatctt

SEQ ID NO: 744928 - DNA, 19 bp, Mus musculus
  siRNA target sequence for Pcdhgc5 (NM_033583.2,215-233).
ggcagcttcggtattcagt

SEQ ID NO: 744929 - DNA, 19 bp, Mus musculus
  siRNA target sequence for Pcdhgc5 (NM_033583.2,264-282).
ggggaacgttgctcaagat

SEQ ID NO: 744930 - DNA, 19 bp, Mus musculus
  siRNA target sequence for Pcdhgc5 (NM_033583.2,266-284).
ggaacgttgctcaagatct

SEQ ID NO: 744931 - DNA, 19 bp, Mus musculus
  siRNA target sequence for Pcdhgc5 (NM_033583.2,288-306).
cttaaaggggacagatcta

SEQ ID NO: 744932 - DNA, 19 bp, Mus musculus
  siRNA target sequence for Pcdhgc5 (NM_033583.2,336-354).
ggagaatgggcgctatttt

SEQ ID NO: 744933 - DNA, 19 bp, Mus musculus
  siRNA target sequence for Pcdhgc5 (NM_033583.2,337-355).
gagaatgggcgctattttt

SEQ ID NO: 744934 - DNA, 19 bp, Mus musculus
  siRNA target sequence for Pcdhgc5 (NM_033583.2,479-497).
cccgggtagaggtagagat

SEQ ID NO: 744935 - DNA, 19 bp, Mus musculus
  siRNA target sequence for Pcdhgc5 (NM_033583.2,669-687).
gcatgtgaagaccctaaaa

SEQ ID NO: 744936 - DNA, 19 bp, Mus musculus
  siRNA target sequence for Pcdhgc5 (NM_033583.2,806-824).
gccttatctcggtcattgt

SEQ ID NO: 744937 - DNA, 19 bp, Mus musculus
  siRNA target sequence for Pcdhgc5 (NM_033583.2,952-970).
ggccaactagactactctt

SEQ ID NO: 744938 - DNA, 19 bp, Mus musculus
  siRNA target sequence for Pcdhgc5 (NM_033583.2,953-971).
gccaactagactactcttt

SEQ ID NO: 744939 - DNA, 19 bp, Mus musculus
  siRNA target sequence for Pcdhgc5 (NM_033583.2,973-991).
ggagaccatacatctgaaa

SEQ ID NO: 744940 - DNA, 19 bp, Mus musculus
  siRNA target sequence for Pcdhgc5 (NM_033583.2,1039-1057).
gtgttgggtccagtagatt

SEQ ID NO: 744941 - DNA, 19 bp, Mus musculus
  siRNA target sequence for Pcdhgc5 (NM_033583.2,1051-1069).
gtagattttgaggaatcaa

SEQ ID NO: 744942 - DNA, 19 bp, Mus musculus
  siRNA target sequence for Pcdhgc5 (NM_033583.2,1054-1072).
gattttgaggaatcaaatt

SEQ ID NO: 744943 - DNA, 19 bp, Mus musculus
  siRNA target sequence for Pcdhgc5 (NM_033583.2,1062-1080).
ggaatcaaatttctatgaa

SEQ ID NO: 744944 - DNA, 19 bp, Mus musculus
  siRNA target sequence for Pcdhgc5 (NM_033583.2,1063-1081).
gaatcaaatttctatgaaa

SEQ ID NO: 744945 - DNA, 19 bp, Mus musculus
  siRNA target sequence for Pcdhgc5 (NM_033583.2,1122-1140).
gggccactgtgtaattcaa

SEQ ID NO: 744946 - DNA, 19 bp, Mus musculus
  siRNA target sequence for Pcdhgc5 (NM_033583.2,1124-1142).
gccactgtgtaattcaagt

SEQ ID NO: 744947 - DNA, 19 bp, Mus musculus
  siRNA target sequence for Pcdhgc5 (NM_033583.2,1128-1146).
ctgtgtaattcaagtagat

SEQ ID NO: 744948 - DNA, 19 bp, Mus musculus
  siRNA target sequence for Pcdhgc5 (NM_033583.2,1229-1247).
cggttgtggggttgtttaa

SEQ ID NO: 744949 - DNA, 19 bp, Mus musculus
  siRNA target sequence for Pcdhgc5 (NM_033583.2,1230-1248).
ggttgtggggttgtttaat

SEQ ID NO: 744950 - DNA, 19 bp, Mus musculus
  siRNA target sequence for Pcdhgc5 (NM_033583.2,1376-1394).
ccacatcccattataccat

SEQ ID NO: 744951 - DNA, 19 bp, Mus musculus
  siRNA target sequence for Pcdhgc5 (NM_033583.2,1443-1461).
caccctcaggctgaacatt

SEQ ID NO: 744952 - DNA, 19 bp, Mus musculus
  siRNA target sequence for Pcdhgc5 (NM_033583.2,1455-1473).
gaacatttcagacgttaat

SEQ ID NO: 744953 - DNA, 19 bp, Mus musculus
  siRNA target sequence for Pcdhgc5 (NM_033583.2,1474-1492).
gataacgcaccccatttca

SEQ ID NO: 744954 - DNA, 19 bp, Mus musculus
  siRNA target sequence for Pcdhgc5 (NM_033583.2,1498-1516).
cagctctacactgcttata

SEQ ID NO: 744955 - DNA, 19 bp, Mus musculus
  siRNA target sequence for Pcdhgc5 (NM_033583.2,1592-1610).
gcctcacctattctattgt

SEQ ID NO: 744956 - DNA, 19 bp, Mus musculus
  siRNA target sequence for Pcdhgc5 (NM_033583.2,1604-1622).
ctattgtggggagtcaaat

SEQ ID NO: 744957 - DNA, 19 bp, Mus musculus
  siRNA target sequence for Pcdhgc5 (NM_033583.2,1662-1680).
cgaggatggacgaatcttt

SEQ ID NO: 744958 - DNA, 19 bp, Mus musculus
  siRNA target sequence for Pcdhgc5 (NM_033583.2,1681-1699).
gcccagcggacctttgact

SEQ ID NO: 744959 - DNA, 19 bp, Mus musculus
  siRNA target sequence for Pcdhgc5 (NM_033583.2,1691-1709).
cctttgactatgagttact

SEQ ID NO: 744960 - DNA, 19 bp, Mus musculus
  siRNA target sequence for Pcdhgc5 (NM_033583.2,1751-1769).
ctccccgactgcatgctaa

SEQ ID NO: 744961 - DNA, 19 bp, Mus musculus
  siRNA target sequence for Pcdhgc5 (NM_033583.2,1756-1774).
cgactgcatgctaacacat

SEQ ID NO: 744962 - DNA, 19 bp, Mus musculus
  siRNA target sequence for Pcdhgc5 (NM_033583.2,1785-1803).
gtttgtcctcgatcagaat

SEQ ID NO: 744963 - DNA, 19 bp, Mus musculus
  siRNA target sequence for Pcdhgc5 (NM_033583.2,1791-1809).
cctcgatcagaatgataat

SEQ ID NO: 744964 - DNA, 19 bp, Mus musculus
  siRNA target sequence for Pcdhgc5 (NM_033583.2,1921-1939).
gacgctggtcacaatgcat

SEQ ID NO: 744965 - DNA, 19 bp, Mus musculus
  siRNA target sequence for Pcdhgc5 (NM_033583.2,2232-2250).
cagtctcttatccttagtt

SEQ ID NO: 744966 - DNA, 19 bp, Mus musculus
  siRNA target sequence for Pcdhgc5 (NM_033583.2,2243-2261).
ccttagttaccttcacttt

SEQ ID NO: 744967 - DNA, 19 bp, Mus musculus
  siRNA target sequence for Pcdhgc5 (NM_033583.2,2276-2294).
gtctgcggaggcatgaaga

SEQ ID NO: 744968 - DNA, 19 bp, Mus musculus
  siRNA target sequence for Pcdhgc5 (NM_033583.2,2338-2356).
ccctccagggagttctata

SEQ ID NO: 744969 - DNA, 19 bp, Mus musculus
  siRNA target sequence for Pcdhgc5 (NM_033583.2,2387-2405).
cagatggcacactaaagta

SEQ ID NO: 744970 - DNA, 19 bp, Mus musculus
  siRNA target sequence for Pcdhgc5 (NM_033583.2,2389-2407).
gatggcacactaaagtaca

SEQ ID NO: 744971 - DNA, 19 bp, Mus musculus
  siRNA target sequence for Pcdhga1 (NM_033584.1,3-21).
ggcgattccagagaagtta

SEQ ID NO: 744972 - DNA, 19 bp, Mus musculus
  siRNA target sequence for Pcdhga1 (NM_033584.1,342-360).
gaagcttctccctatcgaa

SEQ ID NO: 744973 - DNA, 19 bp, Mus musculus
  siRNA target sequence for Pcdhga1 (NM_033584.1,351-369).
ccctatcgaagtagagata

SEQ ID NO: 744974 - DNA, 19 bp, Mus musculus
  siRNA target sequence for Pcdhga1 (NM_033584.1,352-370).
cctatcgaagtagagataa

SEQ ID NO: 744975 - DNA, 19 bp, Mus musculus
  siRNA target sequence for Pcdhga1 (NM_033584.1,357-375).
cgaagtagagataattgat

SEQ ID NO: 744976 - DNA, 19 bp, Mus musculus
  siRNA target sequence for Pcdhga1 (NM_033584.1,389-407).
ctccccaattccagttaga

SEQ ID NO: 744977 - DNA, 19 bp, Mus musculus
  siRNA target sequence for Pcdhga1 (NM_033584.1,392-410).
cccaattccagttagaaga

SEQ ID NO: 744978 - DNA, 19 bp, Mus musculus
  siRNA target sequence for Pcdhga1 (NM_033584.1,478-496).
cttgatgtggggataaact

SEQ ID NO: 744979 - DNA, 19 bp, Mus musculus
  siRNA target sequence for Pcdhga1 (NM_033584.1,649-667).
ggcggcagcccaatacatt

SEQ ID NO: 744980 - DNA, 19 bp, Mus musculus
  siRNA target sequence for Pcdhga1 (NM_033584.1,668-686).
cagggactctgcaaattca

SEQ ID NO: 744981 - DNA, 19 bp, Mus musculus
  siRNA target sequence for Pcdhga1 (NM_033584.1,671-689).
ggactctgcaaattcatgt

SEQ ID NO: 744982 - DNA, 19 bp, Mus musculus
  siRNA target sequence for Pcdhga1 (NM_033584.1,709-727).
gacaacccaccagcattta

SEQ ID NO: 744983 - DNA, 19 bp, Mus musculus
  siRNA target sequence for Pcdhga1 (NM_033584.1,773-791).
gcactcggctactcaaagt

SEQ ID NO: 744984 - DNA, 19 bp, Mus musculus
  siRNA target sequence for Pcdhga1 (NM_033584.1,776-794).
ctcggctactcaaagtgaa

SEQ ID NO: 744985 - DNA, 19 bp, Mus musculus
  siRNA target sequence for Pcdhga1 (NM_033584.1,818-836).
ctaatggcagagtaaccta

SEQ ID NO: 744986 - DNA, 19 bp, Mus musculus
  siRNA target sequence for Pcdhga1 (NM_033584.1,829-847).
gtaacctactcctttcaca

SEQ ID NO: 744987 - DNA, 19 bp, Mus musculus
  siRNA target sequence for Pcdhga1 (NM_033584.1,860-878).
gtgtggtccggaaatttca

SEQ ID NO: 744988 - DNA, 19 bp, Mus musculus
  siRNA target sequence for Pcdhga1 (NM_033584.1,862-880).
gtggtccggaaatttcagt

SEQ ID NO: 744989 - DNA, 19 bp, Mus musculus
  siRNA target sequence for Pcdhga1 (NM_033584.1,886-904).
gcttacacgggagaactat

SEQ ID NO: 744990 - DNA, 19 bp, Mus musculus
  siRNA target sequence for Pcdhga1 (NM_033584.1,893-911).
cgggagaactatcaaataa

SEQ ID NO: 744991 - DNA, 19 bp, Mus musculus
  siRNA target sequence for Pcdhga1 (NM_033584.1,1043-1061).
gaatcacgtctgtcactaa

SEQ ID NO: 744992 - DNA, 19 bp, Mus musculus
  siRNA target sequence for Pcdhga1 (NM_033584.1,1062-1080).
cacagtaccagaaaacttt

SEQ ID NO: 744993 - DNA, 19 bp, Mus musculus
  siRNA target sequence for Pcdhga1 (NM_033584.1,1092-1110).
cacaattgctcttatcagt

SEQ ID NO: 744994 - DNA, 19 bp, Mus musculus
  siRNA target sequence for Pcdhga1 (NM_033584.1,1117-1135).
gatcaagacgctgataaca

SEQ ID NO: 744995 - DNA, 19 bp, Mus musculus
  siRNA target sequence for Pcdhga1 (NM_033584.1,1163-1181).
gcaacctaccctttaaact

SEQ ID NO: 744996 - DNA, 19 bp, Mus musculus
  siRNA target sequence for Pcdhga1 (NM_033584.1,1173-1191).
ctttaaactggaaaagcta

SEQ ID NO: 744997 - DNA, 19 bp, Mus musculus
  siRNA target sequence for Pcdhga1 (NM_033584.1,1183-1201).
gaaaagctagtcgacaatt

SEQ ID NO: 744998 - DNA, 19 bp, Mus musculus
  siRNA target sequence for Pcdhga1 (NM_033584.1,1197-1215).
caattattaccgcttagta

SEQ ID NO: 744999 - DNA, 19 bp, Mus musculus
  siRNA target sequence for Pcdhga1 (NM_033584.1,1206-1224).
ccgcttagtaacagaaaga

SEQ ID NO: 745000 - DNA, 19 bp, Mus musculus
  siRNA target sequence for Pcdhga1 (NM_033584.1,1207-1225).
cgcttagtaacagaaagaa

SEQ ID NO: 745001 - DNA, 19 bp, Mus musculus
  siRNA target sequence for Pcdhga1 (NM_033584.1,1320-1338).
gctagtgacagatatcaat

SEQ ID NO: 745002 - DNA, 19 bp, Mus musculus
  siRNA target sequence for Pcdhga1 (NM_033584.1,1469-1487).
ccctggtggaagacactat

SEQ ID NO: 745003 - DNA, 19 bp, Mus musculus
  siRNA target sequence for Pcdhga1 (NM_033584.1,1470-1488).
cctggtggaagacactatt

SEQ ID NO: 745004 - DNA, 19 bp, Mus musculus
  siRNA target sequence for Pcdhga1 (NM_033584.1,1532-1550).
ctggagttgtctatgcatt

SEQ ID NO: 745005 - DNA, 19 bp, Mus musculus
  siRNA target sequence for Pcdhga1 (NM_033584.1,1577-1595).
gagatttgcagctaagagt

SEQ ID NO: 745006 - DNA, 19 bp, Mus musculus
  siRNA target sequence for Pcdhga1 (NM_033584.1,1644-1662).
gagtctgttcatgatagat

SEQ ID NO: 745007 - DNA, 19 bp, Mus musculus
  siRNA target sequence for Pcdhga1 (NM_033584.1,1650-1668).
gttcatgatagatcagaat

SEQ ID NO: 745008 - DNA, 19 bp, Mus musculus
  siRNA target sequence for Pcdhga1 (NM_033584.1,1962-1980).
gtccaccacagtcacattt

SEQ ID NO: 745009 - DNA, 19 bp, Mus musculus
  siRNA target sequence for Pcdhga1 (NM_033584.1,2109-2127).
cttcctagcctttgtaata

SEQ ID NO: 745010 - DNA, 19 bp, Mus musculus
  siRNA target sequence for Pcdhga1 (NM_033584.1,2214-2232).
caactttgtaggtgttgat

SEQ ID NO: 745011 - DNA, 19 bp, Mus musculus
  siRNA target sequence for Pcdhga2 (NM_033585.1,299-317).
cgccctgtttggtgaactt

SEQ ID NO: 745012 - DNA, 19 bp, Mus musculus
  siRNA target sequence for Pcdhga2 (NM_033585.1,300-318).
gccctgtttggtgaacttt

SEQ ID NO: 745013 - DNA, 19 bp, Mus musculus
  siRNA target sequence for Pcdhga2 (NM_033585.1,301-319).
ccctgtttggtgaacttta

SEQ ID NO: 745014 - DNA, 19 bp, Mus musculus
  siRNA target sequence for Pcdhga2 (NM_033585.1,302-320).
cctgtttggtgaactttaa

SEQ ID NO: 745015 - DNA, 19 bp, Mus musculus
  siRNA target sequence for Pcdhga2 (NM_033585.1,321-339).
cctactactggaagataaa

SEQ ID NO: 745016 - DNA, 19 bp, Mus musculus
  siRNA target sequence for Pcdhga2 (NM_033585.1,322-340).
ctactactggaagataaat

SEQ ID NO: 745017 - DNA, 19 bp, Mus musculus
  siRNA target sequence for Pcdhga2 (NM_033585.1,363-381).
ggaggtaacagatgttaat

SEQ ID NO: 745018 - DNA, 19 bp, Mus musculus
  siRNA target sequence for Pcdhga2 (NM_033585.1,446-464).
gattcaggattcctcttaa

SEQ ID NO: 745019 - DNA, 19 bp, Mus musculus
  siRNA target sequence for Pcdhga2 (NM_033585.1,450-468).
caggattcctcttaagagt

SEQ ID NO: 745020 - DNA, 19 bp, Mus musculus
  siRNA target sequence for Pcdhga2 (NM_033585.1,497-515).
ccctccagaagtataaact

SEQ ID NO: 745021 - DNA, 19 bp, Mus musculus
  siRNA target sequence for Pcdhga2 (NM_033585.1,499-517).
ctccagaagtataaactca

SEQ ID NO: 745022 - DNA, 19 bp, Mus musculus
  siRNA target sequence for Pcdhga2 (NM_033585.1,693-711).
ggtcttggatgcaaacgat

SEQ ID NO: 745023 - DNA, 19 bp, Mus musculus
  siRNA target sequence for Pcdhga2 (NM_033585.1,708-726).
cgataacgctcctgctttt

SEQ ID NO: 745024 - DNA, 19 bp, Mus musculus
  siRNA target sequence for Pcdhga2 (NM_033585.1,709-727).
gataacgctcctgctttta

SEQ ID NO: 745025 - DNA, 19 bp, Mus musculus
  siRNA target sequence for Pcdhga2 (NM_033585.1,804-822).
cgcggatgagggatacaat

SEQ ID NO: 745026 - DNA, 19 bp, Mus musculus
  siRNA target sequence for Pcdhga2 (NM_033585.1,857-875).
gagaaactacagatgcatt

SEQ ID NO: 745027 - DNA, 19 bp, Mus musculus
  siRNA target sequence for Pcdhga2 (NM_033585.1,896-914).
gagatataacaatcacaaa

SEQ ID NO: 745028 - DNA, 19 bp, Mus musculus
  siRNA target sequence for Pcdhga2 (NM_033585.1,982-1000).
ctgactaggacgaaagtaa

SEQ ID NO: 745029 - DNA, 19 bp, Mus musculus
  siRNA target sequence for Pcdhga2 (NM_033585.1,984-1002).
gactaggacgaaagtaatt

SEQ ID NO: 745030 - DNA, 19 bp, Mus musculus
  siRNA target sequence for Pcdhga2 (NM_033585.1,986-1004).
ctaggacgaaagtaattgt

SEQ ID NO: 745031 - DNA, 19 bp, Mus musculus
  siRNA target sequence for Pcdhga2 (NM_033585.1,1033-1051).
ccggaattttacatgacat

SEQ ID NO: 745032 - DNA, 19 bp, Mus musculus
  siRNA target sequence for Pcdhga2 (NM_033585.1,1092-1110).
ggtaattgcactcttcaat

SEQ ID NO: 745033 - DNA, 19 bp, Mus musculus
  siRNA target sequence for Pcdhga2 (NM_033585.1,1160-1178).
ccgaaatgcttcctttcaa

SEQ ID NO: 745034 - DNA, 19 bp, Mus musculus
  siRNA target sequence for Pcdhga2 (NM_033585.1,1187-1205).
ggtcggtggacagttacta

SEQ ID NO: 745035 - DNA, 19 bp, Mus musculus
  siRNA target sequence for Pcdhga2 (NM_033585.1,1226-1244).
cccttgacagggaacagtt

SEQ ID NO: 745036 - DNA, 19 bp, Mus musculus
  siRNA target sequence for Pcdhga2 (NM_033585.1,1236-1254).
ggaacagttctccttctat

SEQ ID NO: 745037 - DNA, 19 bp, Mus musculus
  siRNA target sequence for Pcdhga2 (NM_033585.1,1240-1258).
cagttctccttctataaca

SEQ ID NO: 745038 - DNA, 19 bp, Mus musculus
  siRNA target sequence for Pcdhga2 (NM_033585.1,1260-1278).
cactgtaagcgccaaagat

SEQ ID NO: 745039 - DNA, 19 bp, Mus musculus
  siRNA target sequence for Pcdhga2 (NM_033585.1,1365-1383).
ggtctactctgcctacatt

SEQ ID NO: 745040 - DNA, 19 bp, Mus musculus
  siRNA target sequence for Pcdhga2 (NM_033585.1,1453-1471).
gcccacgtaacctactctt

SEQ ID NO: 745041 - DNA, 19 bp, Mus musculus
  siRNA target sequence for Pcdhga2 (NM_033585.1,1454-1472).
cccacgtaacctactcttt

SEQ ID NO: 745042 - DNA, 19 bp, Mus musculus
  siRNA target sequence for Pcdhga2 (NM_033585.1,1455-1473).
ccacgtaacctactcttta

SEQ ID NO: 745043 - DNA, 19 bp, Mus musculus
  siRNA target sequence for Pcdhga2 (NM_033585.1,1458-1476).
cgtaacctactctttagct

SEQ ID NO: 745044 - DNA, 19 bp, Mus musculus
  siRNA target sequence for Pcdhga2 (NM_033585.1,1636-1654).
gtgtccttgagcctgtttt

SEQ ID NO: 745045 - DNA, 19 bp, Mus musculus
  siRNA target sequence for Pcdhga2 (NM_033585.1,1638-1656).
gtccttgagcctgttttta

SEQ ID NO: 745046 - DNA, 19 bp, Mus musculus
  siRNA target sequence for Pcdhga2 (NM_033585.1,1640-1658).
ccttgagcctgtttttagt

SEQ ID NO: 745047 - DNA, 19 bp, Mus musculus
  siRNA target sequence for Pcdhga2 (NM_033585.1,2045-2063).
ccaaccctgacgattcaga

SEQ ID NO: 745048 - DNA, 19 bp, Mus musculus
  siRNA target sequence for Pcdhga2 (NM_033585.1,2046-2064).
caaccctgacgattcagaa

SEQ ID NO: 745049 - DNA, 19 bp, Mus musculus
  siRNA target sequence for Pcdhga2 (NM_033585.1,2169-2187).
gatgcttcaggcttcaaga

SEQ ID NO: 745050 - DNA, 19 bp, Mus musculus
  siRNA target sequence for Pcdhga2 (NM_033585.1,2172-2190).
gcttcaggcttcaagagat

SEQ ID NO: 745051 - DNA, 19 bp, Mus musculus
  siRNA target sequence for Pcdhga2 (NM_033585.1,2288-2306).
cagggaaaagccacattat

SEQ ID NO: 745052 - DNA, 19 bp, Mus musculus
  siRNA target sequence for Pcdhga2 (NM_033585.1,2378-2396).
cacctcagtctttacttga

SEQ ID NO: 745053 - DNA, 19 bp, Mus musculus
  siRNA target sequence for Pcdhga3 (NM_033586.2,181-199).
gaaccgcaggagctttgtt

SEQ ID NO: 745054 - DNA, 19 bp, Mus musculus
  siRNA target sequence for Pcdhga3 (NM_033586.2,513-531).
gttgacattagcgatatta

SEQ ID NO: 745055 - DNA, 19 bp, Mus musculus
  siRNA target sequence for Pcdhga3 (NM_033586.2,518-536).
cattagcgatattaatgat

SEQ ID NO: 745056 - DNA, 19 bp, Mus musculus
  siRNA target sequence for Pcdhga3 (NM_033586.2,547-565).
gttttccaacggaggaatt

SEQ ID NO: 745057 - DNA, 19 bp, Mus musculus
  siRNA target sequence for Pcdhga3 (NM_033586.2,598-616).
gaacccgattcccacttaa

SEQ ID NO: 745058 - DNA, 19 bp, Mus musculus
  siRNA target sequence for Pcdhga3 (NM_033586.2,659-677).
ctataagctcaattccaat

SEQ ID NO: 745059 - DNA, 19 bp, Mus musculus
  siRNA target sequence for Pcdhga3 (NM_033586.2,665-683).
gctcaattccaatgactat

SEQ ID NO: 745060 - DNA, 19 bp, Mus musculus
  siRNA target sequence for Pcdhga3 (NM_033586.2,666-684).
ctcaattccaatgactatt

SEQ ID NO: 745061 - DNA, 19 bp, Mus musculus
  siRNA target sequence for Pcdhga3 (NM_033586.2,748-766).
ccctggatcgtgagaaaaa

SEQ ID NO: 745062 - DNA, 19 bp, Mus musculus
  siRNA target sequence for Pcdhga3 (NM_033586.2,842-860).
gatagtctcggatgcaaat

SEQ ID NO: 745063 - DNA, 19 bp, Mus musculus
  siRNA target sequence for Pcdhga3 (NM_033586.2,1041-1059).
gtgaccggagatatatcaa

SEQ ID NO: 745064 - DNA, 19 bp, Mus musculus
  siRNA target sequence for Pcdhga3 (NM_033586.2,1043-1061).
gaccggagatatatcaata

SEQ ID NO: 745065 - DNA, 19 bp, Mus musculus
  siRNA target sequence for Pcdhga3 (NM_033586.2,1046-1064).
cggagatatatcaatatta

SEQ ID NO: 745066 - DNA, 19 bp, Mus musculus
  siRNA target sequence for Pcdhga3 (NM_033586.2,1047-1065).
ggagatatatcaatattaa

SEQ ID NO: 745067 - DNA, 19 bp, Mus musculus
  siRNA target sequence for Pcdhga3 (NM_033586.2,1121-1139).
cggaccaggtcttttttca

SEQ ID NO: 745068 - DNA, 19 bp, Mus musculus
  siRNA target sequence for Pcdhga3 (NM_033586.2,1240-1258).
gaagagaaatcgcacttat

SEQ ID NO: 745069 - DNA, 19 bp, Mus musculus
  siRNA target sequence for Pcdhga3 (NM_033586.2,1243-1261).
gagaaatcgcacttatcaa

SEQ ID NO: 745070 - DNA, 19 bp, Mus musculus
  siRNA target sequence for Pcdhga3 (NM_033586.2,1291-1309).
ggcaagtcacagtttttgt

SEQ ID NO: 745071 - DNA, 19 bp, Mus musculus
  siRNA target sequence for Pcdhga3 (NM_033586.2,1300-1318).
cagtttttgtcctaggaaa

SEQ ID NO: 745072 - DNA, 19 bp, Mus musculus
  siRNA target sequence for Pcdhga3 (NM_033586.2,1350-1368).
caatactaccgattagtga

SEQ ID NO: 745073 - DNA, 19 bp, Mus musculus
  siRNA target sequence for Pcdhga3 (NM_033586.2,1389-1407).
gaggaggtgtcccaatata

SEQ ID NO: 745074 - DNA, 19 bp, Mus musculus
  siRNA target sequence for Pcdhga3 (NM_033586.2,1391-1409).
ggaggtgtcccaatataat

SEQ ID NO: 745075 - DNA, 19 bp, Mus musculus
  siRNA target sequence for Pcdhga3 (NM_033586.2,1392-1410).
gaggtgtcccaatataata

SEQ ID NO: 745076 - DNA, 19 bp, Mus musculus
  siRNA target sequence for Pcdhga3 (NM_033586.2,1395-1413).
gtgtcccaatataatatca

SEQ ID NO: 745077 - DNA, 19 bp, Mus musculus
  siRNA target sequence for Pcdhga3 (NM_033586.2,1724-1742).
gtttagagacctgcaatta

SEQ ID NO: 745078 - DNA, 19 bp, Mus musculus
  siRNA target sequence for Pcdhga3 (NM_033586.2,1729-1747).
gagacctgcaattacaaat

SEQ ID NO: 745079 - DNA, 19 bp, Mus musculus
  siRNA target sequence for Pcdhga3 (NM_033586.2,1731-1749).
gacctgcaattacaaataa

SEQ ID NO: 745080 - DNA, 19 bp, Mus musculus
  siRNA target sequence for Pcdhga3 (NM_033586.2,1733-1751).
cctgcaattacaaataaca

SEQ ID NO: 745081 - DNA, 19 bp, Mus musculus
  siRNA target sequence for Pcdhga3 (NM_033586.2,1787-1805).
cacaacactgaacctattt

SEQ ID NO: 745082 - DNA, 19 bp, Mus musculus
  siRNA target sequence for Pcdhga3 (NM_033586.2,1789-1807).
caacactgaacctatttgt

SEQ ID NO: 745083 - DNA, 19 bp, Mus musculus
  siRNA target sequence for Pcdhga3 (NM_033586.2,1864-1882).
gttccacaggggttgagtt

SEQ ID NO: 745084 - DNA, 19 bp, Mus musculus
  siRNA target sequence for Pcdhga3 (NM_033586.2,2193-2211).
cctgctaacccccaaaatt

SEQ ID NO: 745085 - DNA, 19 bp, Mus musculus
  siRNA target sequence for Pcdhga3 (NM_033586.2,2298-2316).
cttcgacgttggtactcat

SEQ ID NO: 745086 - DNA, 19 bp, Mus musculus
  siRNA target sequence for Pcdhga3 (NM_033586.2,2513-2531).
cgagcctcttataatacct

SEQ ID NO: 745087 - DNA, 19 bp, Mus musculus
  siRNA target sequence for Pcdhga3 (NM_033586.2,2520-2538).
cttataatacctcaagatt

SEQ ID NO: 745088 - DNA, 19 bp, Mus musculus
  siRNA target sequence for Pcdhga3 (NM_033586.2,2529-2547).
cctcaagatttacttgaaa

SEQ ID NO: 745089 - DNA, 19 bp, Mus musculus
  siRNA target sequence for Pcdhga4 (NM_033587.2,131-149).
cggctccttacaaatcaga

SEQ ID NO: 745090 - DNA, 19 bp, Mus musculus
  siRNA target sequence for Pcdhga4 (NM_033587.2,146-164).
cagaccgcaggggactaat

SEQ ID NO: 745091 - DNA, 19 bp, Mus musculus
  siRNA target sequence for Pcdhga4 (NM_033587.2,422-440).
caaagtgtaccgcaaatct

SEQ ID NO: 745092 - DNA, 19 bp, Mus musculus
  siRNA target sequence for Pcdhga4 (NM_033587.2,431-449).
ccgcaaatctggagattct

SEQ ID NO: 745093 - DNA, 19 bp, Mus musculus
  siRNA target sequence for Pcdhga4 (NM_033587.2,456-474).
ggataaagtgaggattcta

SEQ ID NO: 745094 - DNA, 19 bp, Mus musculus
  siRNA target sequence for Pcdhga4 (NM_033587.2,467-485).
ggattctagccatagaagt

SEQ ID NO: 745095 - DNA, 19 bp, Mus musculus
  siRNA target sequence for Pcdhga4 (NM_033587.2,486-504).
ggagattatcgatgttaat

SEQ ID NO: 745096 - DNA, 19 bp, Mus musculus
  siRNA target sequence for Pcdhga4 (NM_033587.2,489-507).
gattatcgatgttaatgat

SEQ ID NO: 745097 - DNA, 19 bp, Mus musculus
  siRNA target sequence for Pcdhga4 (NM_033587.2,674-692).
gtggaccggatgggattaa

SEQ ID NO: 745098 - DNA, 19 bp, Mus musculus
  siRNA target sequence for Pcdhga4 (NM_033587.2,676-694).
ggaccggatgggattaagt

SEQ ID NO: 745099 - DNA, 19 bp, Mus musculus
  siRNA target sequence for Pcdhga4 (NM_033587.2,677-695).
gaccggatgggattaagta

SEQ ID NO: 745100 - DNA, 19 bp, Mus musculus
  siRNA target sequence for Pcdhga4 (NM_033587.2,789-807).
ctctggtactgccacaatt

SEQ ID NO: 745101 - DNA, 19 bp, Mus musculus
  siRNA target sequence for Pcdhga4 (NM_033587.2,791-809).
ctggtactgccacaattca

SEQ ID NO: 745102 - DNA, 19 bp, Mus musculus
  siRNA target sequence for Pcdhga4 (NM_033587.2,794-812).
gtactgccacaattcaagt

SEQ ID NO: 745103 - DNA, 19 bp, Mus musculus
  siRNA target sequence for Pcdhga4 (NM_033587.2,853-871).
cagccagagtaccacatta

SEQ ID NO: 745104 - DNA, 19 bp, Mus musculus
  siRNA target sequence for Pcdhga4 (NM_033587.2,855-873).
gccagagtaccacattagt

SEQ ID NO: 745105 - DNA, 19 bp, Mus musculus
  siRNA target sequence for Pcdhga4 (NM_033587.2,857-875).
cagagtaccacattagtgt

SEQ ID NO: 745106 - DNA, 19 bp, Mus musculus
  siRNA target sequence for Pcdhga4 (NM_033587.2,861-879).
gtaccacattagtgtgaaa

SEQ ID NO: 745107 - DNA, 19 bp, Mus musculus
  siRNA target sequence for Pcdhga4 (NM_033587.2,899-917).
cccggctgcttaccataaa

SEQ ID NO: 745108 - DNA, 19 bp, Mus musculus
  siRNA target sequence for Pcdhga4 (NM_033587.2,900-918).
ccggctgcttaccataaaa

SEQ ID NO: 745109 - DNA, 19 bp, Mus musculus
  siRNA target sequence for Pcdhga4 (NM_033587.2,945-963).
cggagaagtgacgtattct

SEQ ID NO: 745110 - DNA, 19 bp, Mus musculus
  siRNA target sequence for Pcdhga4 (NM_033587.2,962-980).
ctttccggaacgtaagaga

SEQ ID NO: 745111 - DNA, 19 bp, Mus musculus
  siRNA target sequence for Pcdhga4 (NM_033587.2,966-984).
ccggaacgtaagagagaaa

SEQ ID NO: 745112 - DNA, 19 bp, Mus musculus
  siRNA target sequence for Pcdhga4 (NM_033587.2,1099-1117).
ggtcttcgagccagaagta

SEQ ID NO: 745113 - DNA, 19 bp, Mus musculus
  siRNA target sequence for Pcdhga4 (NM_033587.2,1100-1118).
gtcttcgagccagaagtaa

SEQ ID NO: 745114 - DNA, 19 bp, Mus musculus
  siRNA target sequence for Pcdhga4 (NM_033587.2,1260-1278).
cggccttgtcacttgttct

SEQ ID NO: 745115 - DNA, 19 bp, Mus musculus
  siRNA target sequence for Pcdhga4 (NM_033587.2,1261-1279).
ggccttgtcacttgttcta

SEQ ID NO: 745116 - DNA, 19 bp, Mus musculus
  siRNA target sequence for Pcdhga4 (NM_033587.2,1263-1281).
ccttgtcacttgttctatt

SEQ ID NO: 745117 - DNA, 19 bp, Mus musculus
  siRNA target sequence for Pcdhga4 (NM_033587.2,1327-1345).
catcggttgttgatacaca

SEQ ID NO: 745118 - DNA, 19 bp, Mus musculus
  siRNA target sequence for Pcdhga4 (NM_033587.2,1366-1384).
gtctctgactataacatta

SEQ ID NO: 745119 - DNA, 19 bp, Mus musculus
  siRNA target sequence for Pcdhga4 (NM_033587.2,1424-1442).
cagagacttatatctcatt

SEQ ID NO: 745120 - DNA, 19 bp, Mus musculus
  siRNA target sequence for Pcdhga4 (NM_033587.2,2305-2323).
gcaggtaatgggttgtcat

SEQ ID NO: 745121 - DNA, 19 bp, Mus musculus
  siRNA target sequence for Pcdhga4 (NM_033587.2,2506-2524).
caagacttgcttgaaataa

SEQ ID NO: 745122 - DNA, 19 bp, Mus musculus
  siRNA target sequence for Pcdhga5 (NM_033588.1,321-339).
catcttggttgaaaataaa

SEQ ID NO: 745123 - DNA, 19 bp, Mus musculus
  siRNA target sequence for Pcdhga5 (NM_033588.1,358-376).
gaagtggaaatccttgata

SEQ ID NO: 745124 - DNA, 19 bp, Mus musculus
  siRNA target sequence for Pcdhga5 (NM_033588.1,361-379).
gtggaaatccttgatatta

SEQ ID NO: 745125 - DNA, 19 bp, Mus musculus
  siRNA target sequence for Pcdhga5 (NM_033588.1,370-388).
cttgatattaatgataact

SEQ ID NO: 745126 - DNA, 19 bp, Mus musculus
  siRNA target sequence for Pcdhga5 (NM_033588.1,399-417).
ccgcgatgaggagttaaaa

SEQ ID NO: 745127 - DNA, 19 bp, Mus musculus
  siRNA target sequence for Pcdhga5 (NM_033588.1,401-419).
gcgatgaggagttaaaagt

SEQ ID NO: 745128 - DNA, 19 bp, Mus musculus
  siRNA target sequence for Pcdhga5 (NM_033588.1,402-420).
cgatgaggagttaaaagta

SEQ ID NO: 745129 - DNA, 19 bp, Mus musculus
  siRNA target sequence for Pcdhga5 (NM_033588.1,403-421).
gatgaggagttaaaagtaa

SEQ ID NO: 745130 - DNA, 19 bp, Mus musculus
  siRNA target sequence for Pcdhga5 (NM_033588.1,552-570).
cggatctgacgggcaaaaa

SEQ ID NO: 745131 - DNA, 19 bp, Mus musculus
  siRNA target sequence for Pcdhga5 (NM_033588.1,693-711).
cgttcttgatgcaaacgat

SEQ ID NO: 745132 - DNA, 19 bp, Mus musculus
  siRNA target sequence for Pcdhga5 (NM_033588.1,694-712).
gttcttgatgcaaacgata

SEQ ID NO: 745133 - DNA, 19 bp, Mus musculus
  siRNA target sequence for Pcdhga5 (NM_033588.1,708-726).
cgataacgcacccttgttt

SEQ ID NO: 745134 - DNA, 19 bp, Mus musculus
  siRNA target sequence for Pcdhga5 (NM_033588.1,709-727).
gataacgcacccttgttta

SEQ ID NO: 745135 - DNA, 19 bp, Mus musculus
  siRNA target sequence for Pcdhga5 (NM_033588.1,723-741).
gtttacccaaagcgaatat

SEQ ID NO: 745136 - DNA, 19 bp, Mus musculus
  siRNA target sequence for Pcdhga5 (NM_033588.1,814-832).
ggaatcaacgcaaagttga

SEQ ID NO: 745137 - DNA, 19 bp, Mus musculus
  siRNA target sequence for Pcdhga5 (NM_033588.1,839-857).
ctttccgcaacgaagaaga

SEQ ID NO: 745138 - DNA, 19 bp, Mus musculus
  siRNA target sequence for Pcdhga5 (NM_033588.1,843-861).
ccgcaacgaagaagacaaa

SEQ ID NO: 745139 - DNA, 19 bp, Mus musculus
  siRNA target sequence for Pcdhga5 (NM_033588.1,846-864).
caacgaagaagacaaaatt

SEQ ID NO: 745140 - DNA, 19 bp, Mus musculus
  siRNA target sequence for Pcdhga5 (NM_033588.1,897-915).
ggaaatctcaactattcaa

SEQ ID NO: 745141 - DNA, 19 bp, Mus musculus
  siRNA target sequence for Pcdhga5 (NM_033588.1,1030-1048).
gccccagaagtgatactca

SEQ ID NO: 745142 - DNA, 19 bp, Mus musculus
  siRNA target sequence for Pcdhga5 (NM_033588.1,1077-1095).
ctgtctacccggaaccata

SEQ ID NO: 745143 - DNA, 19 bp, Mus musculus
  siRNA target sequence for Pcdhga5 (NM_033588.1,1079-1097).
gtctacccggaaccataat

SEQ ID NO: 745144 - DNA, 19 bp, Mus musculus
  siRNA target sequence for Pcdhga5 (NM_033588.1,1100-1118).
cgcttttcagcgtacatga

SEQ ID NO: 745145 - DNA, 19 bp, Mus musculus
  siRNA target sequence for Pcdhga5 (NM_033588.1,1110-1128).
cgtacatgatgctgattct

SEQ ID NO: 745146 - DNA, 19 bp, Mus musculus
  siRNA target sequence for Pcdhga5 (NM_033588.1,1132-1150).
gagaatggagaaatttcat

SEQ ID NO: 745147 - DNA, 19 bp, Mus musculus
  siRNA target sequence for Pcdhga5 (NM_033588.1,1148-1166).
catgttctattcccaaaaa

SEQ ID NO: 745148 - DNA, 19 bp, Mus musculus
  siRNA target sequence for Pcdhga5 (NM_033588.1,1180-1198).
ctggaaaagtcagttgata

SEQ ID NO: 745149 - DNA, 19 bp, Mus musculus
  siRNA target sequence for Pcdhga5 (NM_033588.1,1203-1221).
ctatcacctactaacaaca

SEQ ID NO: 745150 - DNA, 19 bp, Mus musculus
  siRNA target sequence for Pcdhga5 (NM_033588.1,1318-1336).
ctgaaagtagccgacataa

SEQ ID NO: 745151 - DNA, 19 bp, Mus musculus
  siRNA target sequence for Pcdhga5 (NM_033588.1,1320-1338).
gaaagtagccgacataaat

SEQ ID NO: 745152 - DNA, 19 bp, Mus musculus
  siRNA target sequence for Pcdhga5 (NM_033588.1,1889-1907).
gggctctgttggatagaga

SEQ ID NO: 745153 - DNA, 19 bp, Mus musculus
  siRNA target sequence for Pcdhga5 (NM_033588.1,1890-1908).
ggctctgttggatagagat

SEQ ID NO: 745154 - DNA, 19 bp, Mus musculus
  siRNA target sequence for Pcdhga5 (NM_033588.1,2327-2345).
ctgacaggctcattagtga

SEQ ID NO: 745155 - DNA, 19 bp, Mus musculus
  siRNA target sequence for Pcdhga5 (NM_033588.1,2361-2379).
gagtgagcctcttctgata

SEQ ID NO: 745156 - DNA, 19 bp, Mus musculus
  siRNA target sequence for Pcdhga5 (NM_033588.1,2369-2387).
ctcttctgatacctcataa

SEQ ID NO: 745157 - DNA, 19 bp, Mus musculus
  siRNA target sequence for Pcdhga6 (NM_033589.1,87-105).
gcagctccgctactctatt

SEQ ID NO: 745158 - DNA, 19 bp, Mus musculus
  siRNA target sequence for Pcdhga6 (NM_033589.1,324-342).
ccttatagaagataaatta

SEQ ID NO: 745159 - DNA, 19 bp, Mus musculus
  siRNA target sequence for Pcdhga6 (NM_033589.1,361-379).
gtagaaatagtggacatta

SEQ ID NO: 745160 - DNA, 19 bp, Mus musculus
  siRNA target sequence for Pcdhga6 (NM_033589.1,389-407).
cacccagattcttaaagga

SEQ ID NO: 745161 - DNA, 19 bp, Mus musculus
  siRNA target sequence for Pcdhga6 (NM_033589.1,414-432).
ggaattgaagattcttgaa

SEQ ID NO: 745162 - DNA, 19 bp, Mus musculus
  siRNA target sequence for Pcdhga6 (NM_033589.1,436-454).
gcagctctatcctctcatt

SEQ ID NO: 745163 - DNA, 19 bp, Mus musculus
  siRNA target sequence for Pcdhga6 (NM_033589.1,437-455).
cagctctatcctctcattt

SEQ ID NO: 745164 - DNA, 19 bp, Mus musculus
  siRNA target sequence for Pcdhga6 (NM_033589.1,510-528).
caagctcagcggtagtagt

SEQ ID NO: 745165 - DNA, 19 bp, Mus musculus
  siRNA target sequence for Pcdhga6 (NM_033589.1,668-686).
caggcatggcgcgaattct

SEQ ID NO: 745166 - DNA, 19 bp, Mus musculus
  siRNA target sequence for Pcdhga6 (NM_033589.1,671-689).
gcatggcgcgaattcttgt

SEQ ID NO: 745167 - DNA, 19 bp, Mus musculus
  siRNA target sequence for Pcdhga6 (NM_033589.1,672-690).
catggcgcgaattcttgta

SEQ ID NO: 745168 - DNA, 19 bp, Mus musculus
  siRNA target sequence for Pcdhga6 (NM_033589.1,675-693).
ggcgcgaattcttgtaact

SEQ ID NO: 745169 - DNA, 19 bp, Mus musculus
  siRNA target sequence for Pcdhga6 (NM_033589.1,773-791).
gtacacgagtgttaacagt

SEQ ID NO: 745170 - DNA, 19 bp, Mus musculus
  siRNA target sequence for Pcdhga6 (NM_033589.1,776-794).
cacgagtgttaacagttaa

SEQ ID NO: 745171 - DNA, 19 bp, Mus musculus
  siRNA target sequence for Pcdhga6 (NM_033589.1,800-818).
ccgaccaggatgaaggaat

SEQ ID NO: 745172 - DNA, 19 bp, Mus musculus
  siRNA target sequence for Pcdhga6 (NM_033589.1,814-832).
ggaatccatgcagaaataa

SEQ ID NO: 745173 - DNA, 19 bp, Mus musculus
  siRNA target sequence for Pcdhga6 (NM_033589.1,908-926).
cttccgaaactctagacta

SEQ ID NO: 745174 - DNA, 19 bp, Mus musculus
  siRNA target sequence for Pcdhga6 (NM_033589.1,911-929).
ccgaaactctagactatga

SEQ ID NO: 745175 - DNA, 19 bp, Mus musculus
  siRNA target sequence for Pcdhga6 (NM_033589.1,919-937).
ctagactatgaggattcaa

SEQ ID NO: 745176 - DNA, 19 bp, Mus musculus
  siRNA target sequence for Pcdhga6 (NM_033589.1,922-940).
gactatgaggattcaagat

SEQ ID NO: 745177 - DNA, 19 bp, Mus musculus
  siRNA target sequence for Pcdhga6 (NM_033589.1,955-973).
gttgaagcccgagatcaat

SEQ ID NO: 745178 - DNA, 19 bp, Mus musculus
  siRNA target sequence for Pcdhga6 (NM_033589.1,987-1005).
ccgagcaaaagttttaata

SEQ ID NO: 745179 - DNA, 19 bp, Mus musculus
  siRNA target sequence for Pcdhga6 (NM_033589.1,991-1009).
gcaaaagttttaataacca

SEQ ID NO: 745180 - DNA, 19 bp, Mus musculus
  siRNA target sequence for Pcdhga6 (NM_033589.1,1033-1051).
ccggaagtagtggttacat

SEQ ID NO: 745181 - DNA, 19 bp, Mus musculus
  siRNA target sequence for Pcdhga6 (NM_033589.1,1035-1053).
ggaagtagtggttacatct

SEQ ID NO: 745182 - DNA, 19 bp, Mus musculus
  siRNA target sequence for Pcdhga6 (NM_033589.1,1058-1076).
gcagagcaattgctgaaaa

SEQ ID NO: 745183 - DNA, 19 bp, Mus musculus
  siRNA target sequence for Pcdhga6 (NM_033589.1,1091-1109).
ccgtaattgctctttttca

SEQ ID NO: 745184 - DNA, 19 bp, Mus musculus
  siRNA target sequence for Pcdhga6 (NM_033589.1,1132-1150).
cggaatggcctggtaatat

SEQ ID NO: 745185 - DNA, 19 bp, Mus musculus
  siRNA target sequence for Pcdhga6 (NM_033589.1,1141-1159).
ctggtaatatgctccatat

SEQ ID NO: 745186 - DNA, 19 bp, Mus musculus
  siRNA target sequence for Pcdhga6 (NM_033589.1,1143-1161).
ggtaatatgctccatatca

SEQ ID NO: 745187 - DNA, 19 bp, Mus musculus
  siRNA target sequence for Pcdhga6 (NM_033589.1,1162-1180).
gaaagtctcccatttaaat

SEQ ID NO: 745188 - DNA, 19 bp, Mus musculus
  siRNA target sequence for Pcdhga6 (NM_033589.1,1186-1204).
gagtcattagacaattatt

SEQ ID NO: 745189 - DNA, 19 bp, Mus musculus
  siRNA target sequence for Pcdhga6 (NM_033589.1,1208-1226).
ggttagtgacaaatacaga

SEQ ID NO: 745190 - DNA, 19 bp, Mus musculus
  siRNA target sequence for Pcdhga6 (NM_033589.1,1231-1249).
gatcgcgaacaggtatctt

SEQ ID NO: 745191 - DNA, 19 bp, Mus musculus
  siRNA target sequence for Pcdhga6 (NM_033589.1,1236-1254).
cgaacaggtatcttcgtat

SEQ ID NO: 745192 - DNA, 19 bp, Mus musculus
  siRNA target sequence for Pcdhga6 (NM_033589.1,1237-1255).
gaacaggtatcttcgtata

SEQ ID NO: 745193 - DNA, 19 bp, Mus musculus
  siRNA target sequence for Pcdhga6 (NM_033589.1,1240-1258).
caggtatcttcgtataaca

SEQ ID NO: 745194 - DNA, 19 bp, Mus musculus
  siRNA target sequence for Pcdhga6 (NM_033589.1,1243-1261).
gtatcttcgtataacatca

SEQ ID NO: 745195 - DNA, 19 bp, Mus musculus
  siRNA target sequence for Pcdhga6 (NM_033589.1,1294-1312).
ctgtcaacaaaaatattca

SEQ ID NO: 745196 - DNA, 19 bp, Mus musculus
  siRNA target sequence for Pcdhga6 (NM_033589.1,1364-1382).
catcctactctgtctatgt

SEQ ID NO: 745197 - DNA, 19 bp, Mus musculus
  siRNA target sequence for Pcdhga6 (NM_033589.1,1631-1649).
gcaatgtgtcacttaacct

SEQ ID NO: 745198 - DNA, 19 bp, Mus musculus
  siRNA target sequence for Pcdhga6 (NM_033589.1,1962-1980).
ctcagctactgttacactt

SEQ ID NO: 745199 - DNA, 19 bp, Mus musculus
  siRNA target sequence for Pcdhga6 (NM_033589.1,1967-1985).
ctactgttacacttactgt

SEQ ID NO: 745200 - DNA, 19 bp, Mus musculus
  siRNA target sequence for Pcdhga6 (NM_033589.1,2056-2074).
gattcaagccttacaatct

SEQ ID NO: 745201 - DNA, 19 bp, Mus musculus
  siRNA target sequence for Pcdhga6 (NM_033589.1,2096-2114).
ctgtttcgtgcatcttctt

SEQ ID NO: 745202 - DNA, 19 bp, Mus musculus
  siRNA target sequence for Pcdhga6 (NM_033589.1,2152-2170).
cactggcacaagtcaagat

SEQ ID NO: 745203 - DNA, 19 bp, Mus musculus
  siRNA target sequence for Pcdhga6 (NM_033589.1,2183-2201).
caaggaaaggtgtgtcaaa

SEQ ID NO: 745204 - DNA, 19 bp, Mus musculus
  siRNA target sequence for Pcdhga6 (NM_033589.1,2380-2398).
caggaagactcggcttttt

SEQ ID NO: 745205 - DNA, 19 bp, Mus musculus
  siRNA target sequence for Pcdhga7 (NM_033590.1,27-45).
ctcgcactacagaggattt

SEQ ID NO: 745206 - DNA, 19 bp, Mus musculus
  siRNA target sequence for Pcdhga7 (NM_033590.1,29-47).
cgcactacagaggatttgt

SEQ ID NO: 745207 - DNA, 19 bp, Mus musculus
  siRNA target sequence for Pcdhga7 (NM_033590.1,307-325).
cgatgtctcgtgagcttta

SEQ ID NO: 745208 - DNA, 19 bp, Mus musculus
  siRNA target sequence for Pcdhga7 (NM_033590.1,308-326).
gatgtctcgtgagctttaa

SEQ ID NO: 745209 - DNA, 19 bp, Mus musculus
  siRNA target sequence for Pcdhga7 (NM_033590.1,393-411).
cgctcccagattcttaaca

SEQ ID NO: 745210 - DNA, 19 bp, Mus musculus
  siRNA target sequence for Pcdhga7 (NM_033590.1,452-470).
gggtgcggtttccactaaa

SEQ ID NO: 745211 - DNA, 19 bp, Mus musculus
  siRNA target sequence for Pcdhga7 (NM_033590.1,456-474).
gcggtttccactaaaggaa

SEQ ID NO: 745212 - DNA, 19 bp, Mus musculus
  siRNA target sequence for Pcdhga7 (NM_033590.1,771-789).
gccagtaggcacaagactt

SEQ ID NO: 745213 - DNA, 19 bp, Mus musculus
  siRNA target sequence for Pcdhga7 (NM_033590.1,782-800).
caagacttctcactgtaaa

SEQ ID NO: 745214 - DNA, 19 bp, Mus musculus
  siRNA target sequence for Pcdhga7 (NM_033590.1,810-828).
cttggatgagggaatctat

SEQ ID NO: 745215 - DNA, 19 bp, Mus musculus
  siRNA target sequence for Pcdhga7 (NM_033590.1,860-878).
ctccagaacttctacaaat

SEQ ID NO: 745216 - DNA, 19 bp, Mus musculus
  siRNA target sequence for Pcdhga7 (NM_033590.1,901-919).
ggagagctgtcgactttaa

SEQ ID NO: 745217 - DNA, 19 bp, Mus musculus
  siRNA target sequence for Pcdhga7 (NM_033590.1,912-930).
gactttaaaaggtctagat

SEQ ID NO: 745218 - DNA, 19 bp, Mus musculus
  siRNA target sequence for Pcdhga7 (NM_033590.1,986-1004).
gtctgaccaaggcaaaagt

SEQ ID NO: 745219 - DNA, 19 bp, Mus musculus
  siRNA target sequence for Pcdhga7 (NM_033590.1,1097-1115).
cagtgatcgctctcttcta

SEQ ID NO: 745220 - DNA, 19 bp, Mus musculus
  siRNA target sequence for Pcdhga7 (NM_033590.1,1157-1175).
gctctttgccagaaaacct

SEQ ID NO: 745221 - DNA, 19 bp, Mus musculus
  siRNA target sequence for Pcdhga7 (NM_033590.1,1185-1203).
gttagagcgatcaattgat

SEQ ID NO: 745222 - DNA, 19 bp, Mus musculus
  siRNA target sequence for Pcdhga7 (NM_033590.1,1189-1207).
gagcgatcaattgataatt

SEQ ID NO: 745223 - DNA, 19 bp, Mus musculus
  siRNA target sequence for Pcdhga7 (NM_033590.1,1191-1209).
gcgatcaattgataattat

SEQ ID NO: 745224 - DNA, 19 bp, Mus musculus
  siRNA target sequence for Pcdhga7 (NM_033590.1,1192-1210).
cgatcaattgataattatt

SEQ ID NO: 745225 - DNA, 19 bp, Mus musculus
  siRNA target sequence for Pcdhga7 (NM_033590.1,1313-1331).
ctcgcatgtccattcatgt

SEQ ID NO: 745226 - DNA, 19 bp, Mus musculus
  siRNA target sequence for Pcdhga7 (NM_033590.1,1364-1382).
ccgactcttcttactctat

SEQ ID NO: 745227 - DNA, 19 bp, Mus musculus
  siRNA target sequence for Pcdhga7 (NM_033590.1,1366-1384).
gactcttcttactctatct

SEQ ID NO: 745228 - DNA, 19 bp, Mus musculus
  siRNA target sequence for Pcdhga7 (NM_033590.1,1530-1548).
ctctgacacgggtatccta

SEQ ID NO: 745229 - DNA, 19 bp, Mus musculus
  siRNA target sequence for Pcdhga7 (NM_033590.1,1532-1550).
ctgacacgggtatcctata

SEQ ID NO: 745230 - DNA, 19 bp, Mus musculus
  siRNA target sequence for Pcdhga7 (NM_033590.1,1536-1554).
cacgggtatcctatatgca

SEQ ID NO: 745231 - DNA, 19 bp, Mus musculus
  siRNA target sequence for Pcdhga7 (NM_033590.1,1575-1593).
gcaatttcgggatctacaa

SEQ ID NO: 745232 - DNA, 19 bp, Mus musculus
  siRNA target sequence for Pcdhga7 (NM_033590.1,1795-1813).
gactcaggcccaaatgctt

SEQ ID NO: 745233 - DNA, 19 bp, Mus musculus
  siRNA target sequence for Pcdhga7 (NM_033590.1,2023-2041).
gcagacctaggcagcatta

SEQ ID NO: 745234 - DNA, 19 bp, Mus musculus
  siRNA target sequence for Pcdhga7 (NM_033590.1,2026-2044).
gacctaggcagcattagga

SEQ ID NO: 745235 - DNA, 19 bp, Mus musculus
  siRNA target sequence for Pcdhga7 (NM_033590.1,2046-2064).
ccccagtgaacctgatgat

SEQ ID NO: 745236 - DNA, 19 bp, Mus musculus
  siRNA target sequence for Pcdhga7 (NM_033590.1,2047-2065).
cccagtgaacctgatgatt

SEQ ID NO: 745237 - DNA, 19 bp, Mus musculus
  siRNA target sequence for Pcdhga7 (NM_033590.1,2049-2067).
cagtgaacctgatgattca

SEQ ID NO: 745238 - DNA, 19 bp, Mus musculus
  siRNA target sequence for Pcdhga7 (NM_033590.1,2056-2074).
cctgatgattcagatatca

SEQ ID NO: 745239 - DNA, 19 bp, Mus musculus
  siRNA target sequence for Pcdhga7 (NM_033590.1,2122-2140).
gtctttgtcactgtgttat

SEQ ID NO: 745240 - DNA, 19 bp, Mus musculus
  siRNA target sequence for Pcdhga7 (NM_033590.1,2154-2172).
gtggcgttggcacaaatca

SEQ ID NO: 745241 - DNA, 19 bp, Mus musculus
  siRNA target sequence for Pcdhga7 (NM_033590.1,2156-2174).
ggcgttggcacaaatcaca

SEQ ID NO: 745242 - DNA, 19 bp, Mus musculus
  siRNA target sequence for Pcdhga7 (NM_033590.1,2175-2193).
catgctacaggcttcttca

SEQ ID NO: 745243 - DNA, 19 bp, Mus musculus
  siRNA target sequence for Pcdhga7 (NM_033590.1,2247-2265).
ccaggctttcctacaaaca

SEQ ID NO: 745244 - DNA, 19 bp, Mus musculus
  siRNA target sequence for Pcdhga7 (NM_033590.1,2327-2345).
ccaattacgtggatacact

SEQ ID NO: 745245 - DNA, 19 bp, Mus musculus
  siRNA target sequence for Pcdhga8 (NM_033591.2,192-210).
ctgcttccaagaatcaaca

SEQ ID NO: 745246 - DNA, 19 bp, Mus musculus
  siRNA target sequence for Pcdhga8 (NM_033591.2,262-280).
gatcagcgtaggacagatt

SEQ ID NO: 745247 - DNA, 19 bp, Mus musculus
  siRNA target sequence for Pcdhga8 (NM_033591.2,483-501).
gcacgccttgtcttgtaaa

SEQ ID NO: 745248 - DNA, 19 bp, Mus musculus
  siRNA target sequence for Pcdhga8 (NM_033591.2,484-502).
cacgccttgtcttgtaaat

SEQ ID NO: 745249 - DNA, 19 bp, Mus musculus
  siRNA target sequence for Pcdhga8 (NM_033591.2,486-504).
cgccttgtcttgtaaatat

SEQ ID NO: 745250 - DNA, 19 bp, Mus musculus
  siRNA target sequence for Pcdhga8 (NM_033591.2,520-538).
ggagaaaggaaaactcttt

SEQ ID NO: 745251 - DNA, 19 bp, Mus musculus
  siRNA target sequence for Pcdhga8 (NM_033591.2,1173-1191).
ggaggagcaaagtgataat

SEQ ID NO: 745252 - DNA, 19 bp, Mus musculus
  siRNA target sequence for Pcdhga8 (NM_033591.2,1174-1192).
gaggagcaaagtgataatt

SEQ ID NO: 745253 - DNA, 19 bp, Mus musculus
  siRNA target sequence for Pcdhga8 (NM_033591.2,1220-1238).
ccagaagtaaccattacat

SEQ ID NO: 745254 - DNA, 19 bp, Mus musculus
  siRNA target sequence for Pcdhga8 (NM_033591.2,1243-1261).
gtttaatccggtattggaa

SEQ ID NO: 745255 - DNA, 19 bp, Mus musculus
  siRNA target sequence for Pcdhga8 (NM_033591.2,1251-1269).
cggtattggaaaattctct

SEQ ID NO: 745256 - DNA, 19 bp, Mus musculus
  siRNA target sequence for Pcdhga8 (NM_033591.2,1334-1352).
gtctgttacacgcatgata

SEQ ID NO: 745257 - DNA, 19 bp, Mus musculus
  siRNA target sequence for Pcdhga8 (NM_033591.2,1338-1356).
gttacacgcatgataactt

SEQ ID NO: 745258 - DNA, 19 bp, Mus musculus
  siRNA target sequence for Pcdhga8 (NM_033591.2,1367-1385).
ctagaaaagtcaatagata

SEQ ID NO: 745259 - DNA, 19 bp, Mus musculus
  siRNA target sequence for Pcdhga8 (NM_033591.2,1375-1393).
gtcaatagataattattat

SEQ ID NO: 745260 - DNA, 19 bp, Mus musculus
  siRNA target sequence for Pcdhga8 (NM_033591.2,1430-1448).
gtctctacctacaatatca

SEQ ID NO: 745261 - DNA, 19 bp, Mus musculus
  siRNA target sequence for Pcdhga8 (NM_033591.2,1507-1525).
gactgtggcagacactaat

SEQ ID NO: 745262 - DNA, 19 bp, Mus musculus
  siRNA target sequence for Pcdhga8 (NM_033591.2,1526-1544).
gacaaccctcctcgttttt

SEQ ID NO: 745263 - DNA, 19 bp, Mus musculus
  siRNA target sequence for Pcdhga8 (NM_033591.2,1734-1752).
cactgcaatcttttgactt

SEQ ID NO: 745264 - DNA, 19 bp, Mus musculus
  siRNA target sequence for Pcdhga8 (NM_033591.2,1739-1757).
caatcttttgactttgaga

SEQ ID NO: 745265 - DNA, 19 bp, Mus musculus
  siRNA target sequence for Pcdhga8 (NM_033591.2,1766-1784).
gacttgcagctattggtta

SEQ ID NO: 745266 - DNA, 19 bp, Mus musculus
  siRNA target sequence for Pcdhga8 (NM_033591.2,2204-2222).
gctgacttgagcagcatta

SEQ ID NO: 745267 - DNA, 19 bp, Mus musculus
  siRNA target sequence for Pcdhga8 (NM_033591.2,2205-2223).
ctgacttgagcagcattat

SEQ ID NO: 745268 - DNA, 19 bp, Mus musculus
  siRNA target sequence for Pcdhga8 (NM_033591.2,2207-2225).
gacttgagcagcattatga

SEQ ID NO: 745269 - DNA, 19 bp, Mus musculus
  siRNA target sequence for Pcdhga8 (NM_033591.2,2233-2251).
ggtaccagaggattctgat

SEQ ID NO: 745270 - DNA, 19 bp, Mus musculus
  siRNA target sequence for Pcdhga8 (NM_033591.2,2419-2437).
cggggtacaagcttttcta

SEQ ID NO: 745271 - DNA, 19 bp, Mus musculus
  siRNA target sequence for Pcdhga8 (NM_033591.2,2477-2495).
cagacaagccacattatct

SEQ ID NO: 745272 - DNA, 19 bp, Mus musculus
  siRNA target sequence for Pcdhga8 (NM_033591.2,2545-2563).
gaaaaatgattccttatta

SEQ ID NO: 745273 - DNA, 19 bp, Mus musculus
  siRNA target sequence for Pcdhga9 (NM_033592.1,117-135).
gacagaaaagggctatata

SEQ ID NO: 745274 - DNA, 19 bp, Mus musculus
  siRNA target sequence for Pcdhga9 (NM_033592.1,119-137).
cagaaaagggctatatagt

SEQ ID NO: 745275 - DNA, 19 bp, Mus musculus
  siRNA target sequence for Pcdhga9 (NM_033592.1,128-146).
gctatatagtgggaaacat

SEQ ID NO: 745276 - DNA, 19 bp, Mus musculus
  siRNA target sequence for Pcdhga9 (NM_033592.1,299-317).
gcgcgacttgtctcctaaa

SEQ ID NO: 745277 - DNA, 19 bp, Mus musculus
  siRNA target sequence for Pcdhga9 (NM_033592.1,301-319).
gcgacttgtctcctaaact

SEQ ID NO: 745278 - DNA, 19 bp, Mus musculus
  siRNA target sequence for Pcdhga9 (NM_033592.1,302-320).
cgacttgtctcctaaactt

SEQ ID NO: 745279 - DNA, 19 bp, Mus musculus
  siRNA target sequence for Pcdhga9 (NM_033592.1,305-323).
cttgtctcctaaactttaa

SEQ ID NO: 745280 - DNA, 19 bp, Mus musculus
  siRNA target sequence for Pcdhga9 (NM_033592.1,308-326).
gtctcctaaactttaaagt

SEQ ID NO: 745281 - DNA, 19 bp, Mus musculus
  siRNA target sequence for Pcdhga9 (NM_033592.1,405-423).
ggccgaaaatttgtttgta

SEQ ID NO: 745282 - DNA, 19 bp, Mus musculus
  siRNA target sequence for Pcdhga9 (NM_033592.1,406-424).
gccgaaaatttgtttgtaa

SEQ ID NO: 745283 - DNA, 19 bp, Mus musculus
  siRNA target sequence for Pcdhga9 (NM_033592.1,408-426).
cgaaaatttgtttgtaaaa

SEQ ID NO: 745284 - DNA, 19 bp, Mus musculus
  siRNA target sequence for Pcdhga9 (NM_033592.1,991-1009).
cggaccaaagtggtagtta

SEQ ID NO: 745285 - DNA, 19 bp, Mus musculus
  siRNA target sequence for Pcdhga9 (NM_033592.1,995-1013).
ccaaagtggtagttatggt

SEQ ID NO: 745286 - DNA, 19 bp, Mus musculus
  siRNA target sequence for Pcdhga9 (NM_033592.1,1036-1054).
ccggaagtgaccattacct

SEQ ID NO: 745287 - DNA, 19 bp, Mus musculus
  siRNA target sequence for Pcdhga9 (NM_033592.1,1044-1062).
gaccattacctctctgttt

SEQ ID NO: 745288 - DNA, 19 bp, Mus musculus
  siRNA target sequence for Pcdhga9 (NM_033592.1,1085-1103).
ccccagggacagtaatcct

SEQ ID NO: 745289 - DNA, 19 bp, Mus musculus
  siRNA target sequence for Pcdhga9 (NM_033592.1,1133-1151).
ggaagaatgggcaagttgt

SEQ ID NO: 745290 - DNA, 19 bp, Mus musculus
  siRNA target sequence for Pcdhga9 (NM_033592.1,1165-1183).
gagaacccatcctttaaat

SEQ ID NO: 745291 - DNA, 19 bp, Mus musculus
  siRNA target sequence for Pcdhga9 (NM_033592.1,1171-1189).
ccatcctttaaattagaaa

SEQ ID NO: 745292 - DNA, 19 bp, Mus musculus
  siRNA target sequence for Pcdhga9 (NM_033592.1,1195-1213).
gtagacgattactataggt

SEQ ID NO: 745293 - DNA, 19 bp, Mus musculus
  siRNA target sequence for Pcdhga9 (NM_033592.1,1201-1219).
gattactataggttgttga

SEQ ID NO: 745294 - DNA, 19 bp, Mus musculus
  siRNA target sequence for Pcdhga9 (NM_033592.1,1441-1459).
gacgacgaggagaatgcta

SEQ ID NO: 745295 - DNA, 19 bp, Mus musculus
  siRNA target sequence for Pcdhga9 (NM_033592.1,1447-1465).
gaggagaatgctaaggtta

SEQ ID NO: 745296 - DNA, 19 bp, Mus musculus
  siRNA target sequence for Pcdhga9 (NM_033592.1,1456-1474).
gctaaggttacttactctt

SEQ ID NO: 745297 - DNA, 19 bp, Mus musculus
  siRNA target sequence for Pcdhga9 (NM_033592.1,1647-1665).
gtctgtgtttctattggat

SEQ ID NO: 745298 - DNA, 19 bp, Mus musculus
  siRNA target sequence for Pcdhga9 (NM_033592.1,1863-1881).
gctacgctcaggcgaaata

SEQ ID NO: 745299 - DNA, 19 bp, Mus musculus
  siRNA target sequence for Pcdhga9 (NM_033592.1,2021-2039).
ctgacttgggcagtatcaa

SEQ ID NO: 745300 - DNA, 19 bp, Mus musculus
  siRNA target sequence for Pcdhga9 (NM_033592.1,2023-2041).
gacttgggcagtatcaaca

SEQ ID NO: 745301 - DNA, 19 bp, Mus musculus
  siRNA target sequence for Pcdhga9 (NM_033592.1,2045-2063).
ctgcagaccccgattctga

SEQ ID NO: 745302 - DNA, 19 bp, Mus musculus
  siRNA target sequence for Pcdhga9 (NM_033592.1,2050-2068).
gaccccgattctgacatta

SEQ ID NO: 745303 - DNA, 19 bp, Mus musculus
  siRNA target sequence for Pcdhga9 (NM_033592.1,2054-2072).
ccgattctgacattactct

SEQ ID NO: 745304 - DNA, 19 bp, Mus musculus
  siRNA target sequence for Pcdhga9 (NM_033592.1,2383-2401).
gttgagcccaagtttccta

SEQ ID NO: 745305 - DNA, 19 bp, Mus musculus
  siRNA target sequence for Pcdhga9 (NM_033592.1,2388-2406).
gcccaagtttcctattgat

SEQ ID NO: 745306 - DNA, 19 bp, Mus musculus
  siRNA target sequence for Pcdhga10 (NM_033593.2,159-177).
gccgctcaaaggaatctct

SEQ ID NO: 745307 - DNA, 19 bp, Mus musculus
  siRNA target sequence for Pcdhga10 (NM_033593.2,187-205).
ccaaactggtcctcctttt

SEQ ID NO: 745308 - DNA, 19 bp, Mus musculus
  siRNA target sequence for Pcdhga10 (NM_033593.2,236-254).
gcagatccgctattcagtt

SEQ ID NO: 745309 - DNA, 19 bp, Mus musculus
  siRNA target sequence for Pcdhga10 (NM_033593.2,491-509).
gaaacttttcgggatagaa

SEQ ID NO: 745310 - DNA, 19 bp, Mus musculus
  siRNA target sequence for Pcdhga10 (NM_033593.2,533-551).
caatgcgccaaaattccaa

SEQ ID NO: 745311 - DNA, 19 bp, Mus musculus
  siRNA target sequence for Pcdhga10 (NM_033593.2,559-577).
ctctagatgtaaaaattaa

SEQ ID NO: 745312 - DNA, 19 bp, Mus musculus
  siRNA target sequence for Pcdhga10 (NM_033593.2,590-608).
cccaggaatgcgttttcct

SEQ ID NO: 745313 - DNA, 19 bp, Mus musculus
  siRNA target sequence for Pcdhga10 (NM_033593.2,703-721).
gtgctaagggcgtcaagta

SEQ ID NO: 745314 - DNA, 19 bp, Mus musculus
  siRNA target sequence for Pcdhga10 (NM_033593.2,833-851).
cactgtgaccgtctttgat

SEQ ID NO: 745315 - DNA, 19 bp, Mus musculus
  siRNA target sequence for Pcdhga10 (NM_033593.2,839-857).
gaccgtctttgatgcaaat

SEQ ID NO: 745316 - DNA, 19 bp, Mus musculus
  siRNA target sequence for Pcdhga10 (NM_033593.2,841-859).
ccgtctttgatgcaaatga

SEQ ID NO: 745317 - DNA, 19 bp, Mus musculus
  siRNA target sequence for Pcdhga10 (NM_033593.2,870-888).
gtcttcacctccactgaat

SEQ ID NO: 745318 - DNA, 19 bp, Mus musculus
  siRNA target sequence for Pcdhga10 (NM_033593.2,883-901).
ctgaataccgcgtgaacat

SEQ ID NO: 745319 - DNA, 19 bp, Mus musculus
  siRNA target sequence for Pcdhga10 (NM_033593.2,922-940).
gcacccaactgctaaaggt

SEQ ID NO: 745320 - DNA, 19 bp, Mus musculus
  siRNA target sequence for Pcdhga10 (NM_033593.2,923-941).
cacccaactgctaaaggta

SEQ ID NO: 745321 - DNA, 19 bp, Mus musculus
  siRNA target sequence for Pcdhga10 (NM_033593.2,973-991).
gagaagtgacatatgcatt

SEQ ID NO: 745322 - DNA, 19 bp, Mus musculus
  siRNA target sequence for Pcdhga10 (NM_033593.2,1141-1159).
cgaaggtgctgattacagt

SEQ ID NO: 745323 - DNA, 19 bp, Mus musculus
  siRNA target sequence for Pcdhga10 (NM_033593.2,1142-1160).
gaaggtgctgattacagta

SEQ ID NO: 745324 - DNA, 19 bp, Mus musculus
  siRNA target sequence for Pcdhga10 (NM_033593.2,1148-1166).
gctgattacagtagaagat

SEQ ID NO: 745325 - DNA, 19 bp, Mus musculus
  siRNA target sequence for Pcdhga10 (NM_033593.2,1240-1258).
ctgtcatagccctactaaa

SEQ ID NO: 745326 - DNA, 19 bp, Mus musculus
  siRNA target sequence for Pcdhga10 (NM_033593.2,1251-1269).
ctactaaacgtccatgatt

SEQ ID NO: 745327 - DNA, 19 bp, Mus musculus
  siRNA target sequence for Pcdhga10 (NM_033593.2,1311-1329).
gggaatcttccgtttaagt

SEQ ID NO: 745328 - DNA, 19 bp, Mus musculus
  siRNA target sequence for Pcdhga10 (NM_033593.2,1312-1330).
ggaatcttccgtttaagtt

SEQ ID NO: 745329 - DNA, 19 bp, Mus musculus
  siRNA target sequence for Pcdhga10 (NM_033593.2,1337-1355).
gtccattgacaattactat

SEQ ID NO: 745330 - DNA, 19 bp, Mus musculus
  siRNA target sequence for Pcdhga10 (NM_033593.2,1389-1407).
caggtacccgcttacaaca

SEQ ID NO: 745331 - DNA, 19 bp, Mus musculus
  siRNA target sequence for Pcdhga10 (NM_033593.2,1465-1483).
ctctgcaagtggcagatat

SEQ ID NO: 745332 - DNA, 19 bp, Mus musculus
  siRNA target sequence for Pcdhga10 (NM_033593.2,1505-1523).
ctctcatccgtcctacttt

SEQ ID NO: 745333 - DNA, 19 bp, Mus musculus
  siRNA target sequence for Pcdhga10 (NM_033593.2,1695-1713).
gcgctctggtcctttgact

SEQ ID NO: 745334 - DNA, 19 bp, Mus musculus
  siRNA target sequence for Pcdhga10 (NM_033593.2,1696-1714).
cgctctggtcctttgacta

SEQ ID NO: 745335 - DNA, 19 bp, Mus musculus
  siRNA target sequence for Pcdhga10 (NM_033593.2,1770-1788).
cccctccacagtaatgtgt

SEQ ID NO: 745336 - DNA, 19 bp, Mus musculus
  siRNA target sequence for Pcdhga10 (NM_033593.2,2114-2132).
cgcaacggtcactttgact

SEQ ID NO: 745337 - DNA, 19 bp, Mus musculus
  siRNA target sequence for Pcdhga10 (NM_033593.2,2524-2542).
ctttgttagatgattccaa

SEQ ID NO: 745338 - DNA, 19 bp, Mus musculus
  siRNA target sequence for Pcdhga11 (NM_033594.2,205-223).
ctgatcccgctgtgcattt

SEQ ID NO: 745339 - DNA, 19 bp, Mus musculus
  siRNA target sequence for Pcdhga11 (NM_033594.2,374-392).
ggggacaatcgcagctttt

SEQ ID NO: 745340 - DNA, 19 bp, Mus musculus
  siRNA target sequence for Pcdhga11 (NM_033594.2,376-394).
ggacaatcgcagcttttct

SEQ ID NO: 745341 - DNA, 19 bp, Mus musculus
  siRNA target sequence for Pcdhga11 (NM_033594.2,442-460).
cgtgaagagctatgtgata

SEQ ID NO: 745342 - DNA, 19 bp, Mus musculus
  siRNA target sequence for Pcdhga11 (NM_033594.2,646-664).
ccagacgcagggatgaact

SEQ ID NO: 745343 - DNA, 19 bp, Mus musculus
  siRNA target sequence for Pcdhga11 (NM_033594.2,681-699).
gctcagcccaagcagttat

SEQ ID NO: 745344 - DNA, 19 bp, Mus musculus
  siRNA target sequence for Pcdhga11 (NM_033594.2,682-700).
ctcagcccaagcagttatt

SEQ ID NO: 745345 - DNA, 19 bp, Mus musculus
  siRNA target sequence for Pcdhga11 (NM_033594.2,723-741).
gactgatggggacaagaat

SEQ ID NO: 745346 - DNA, 19 bp, Mus musculus
  siRNA target sequence for Pcdhga11 (NM_033594.2,861-879).
ggtcctcgacgtcaatgat

SEQ ID NO: 745347 - DNA, 19 bp, Mus musculus
  siRNA target sequence for Pcdhga11 (NM_033594.2,906-924).
gtatagagtgagtattcct

SEQ ID NO: 745348 - DNA, 19 bp, Mus musculus
  siRNA target sequence for Pcdhga11 (NM_033594.2,911-929).
gagtgagtattcctgaaaa

SEQ ID NO: 745349 - DNA, 19 bp, Mus musculus
  siRNA target sequence for Pcdhga11 (NM_033594.2,944-962).
cgcgggtgctcgtggtaaa

SEQ ID NO: 745350 - DNA, 19 bp, Mus musculus
  siRNA target sequence for Pcdhga11 (NM_033594.2,945-963).
gcgggtgctcgtggtaaat

SEQ ID NO: 745351 - DNA, 19 bp, Mus musculus
  siRNA target sequence for Pcdhga11 (NM_033594.2,983-1001).
ggatcaacggggaagtgat

SEQ ID NO: 745352 - DNA, 19 bp, Mus musculus
  siRNA target sequence for Pcdhga11 (NM_033594.2,984-1002).
gatcaacggggaagtgata

SEQ ID NO: 745353 - DNA, 19 bp, Mus musculus
  siRNA target sequence for Pcdhga11 (NM_033594.2,990-1008).
cggggaagtgatatactct

SEQ ID NO: 745354 - DNA, 19 bp, Mus musculus
  siRNA target sequence for Pcdhga11 (NM_033594.2,1154-1172).
gcaccactacgttgttgat

SEQ ID NO: 745355 - DNA, 19 bp, Mus musculus
  siRNA target sequence for Pcdhga11 (NM_033594.2,1167-1185).
gttgatcacggttgaagat

SEQ ID NO: 745356 - DNA, 19 bp, Mus musculus
  siRNA target sequence for Pcdhga11 (NM_033594.2,1268-1286).
ctcttctaaacgttcaaga

SEQ ID NO: 745357 - DNA, 19 bp, Mus musculus
  siRNA target sequence for Pcdhga11 (NM_033594.2,1278-1296).
cgttcaagatcaagattct

SEQ ID NO: 745358 - DNA, 19 bp, Mus musculus
  siRNA target sequence for Pcdhga11 (NM_033594.2,1312-1330).
gtctcttgcttcattccta

SEQ ID NO: 745359 - DNA, 19 bp, Mus musculus
  siRNA target sequence for Pcdhga11 (NM_033594.2,1408-1426).
caggtggagagctacaata

SEQ ID NO: 745360 - DNA, 19 bp, Mus musculus
  siRNA target sequence for Pcdhga11 (NM_033594.2,1410-1428).
ggtggagagctacaatatt

SEQ ID NO: 745361 - DNA, 19 bp, Mus musculus
  siRNA target sequence for Pcdhga11 (NM_033594.2,1413-1431).
ggagagctacaatattaca

SEQ ID NO: 745362 - DNA, 19 bp, Mus musculus
  siRNA target sequence for Pcdhga11 (NM_033594.2,1414-1432).
gagagctacaatattacat

SEQ ID NO: 745363 - DNA, 19 bp, Mus musculus
  siRNA target sequence for Pcdhga11 (NM_033594.2,1430-1448).
cattgatcgccaaagatca

SEQ ID NO: 745364 - DNA, 19 bp, Mus musculus
  siRNA target sequence for Pcdhga11 (NM_033594.2,1564-1582).
cccagaggctcttctatct

SEQ ID NO: 745365 - DNA, 19 bp, Mus musculus
  siRNA target sequence for Pcdhga11 (NM_033594.2,1737-1755).
gcaattccagaccttacaa

SEQ ID NO: 745366 - DNA, 19 bp, Mus musculus
  siRNA target sequence for Pcdhga11 (NM_033594.2,1758-1776).
gggagtgaccgctagtgat

SEQ ID NO: 745367 - DNA, 19 bp, Mus musculus
  siRNA target sequence for Pcdhga11 (NM_033594.2,1759-1777).
ggagtgaccgctagtgata

SEQ ID NO: 745368 - DNA, 19 bp, Mus musculus
  siRNA target sequence for Pcdhga11 (NM_033594.2,1780-1798).
ggcgacccaccattaagca

SEQ ID NO: 745369 - DNA, 19 bp, Mus musculus
  siRNA target sequence for Pcdhga11 (NM_033594.2,1787-1805).
caccattaagcagcaatat

SEQ ID NO: 745370 - DNA, 19 bp, Mus musculus
  siRNA target sequence for Pcdhga11 (NM_033594.2,1789-1807).
ccattaagcagcaatattt

SEQ ID NO: 745371 - DNA, 19 bp, Mus musculus
  siRNA target sequence for Pcdhga11 (NM_033594.2,1837-1855).
gacaacactccagagattt

SEQ ID NO: 745372 - DNA, 19 bp, Mus musculus
  siRNA target sequence for Pcdhga11 (NM_033594.2,1839-1857).
caacactccagagatttta

SEQ ID NO: 745373 - DNA, 19 bp, Mus musculus
  siRNA target sequence for Pcdhga11 (NM_033594.2,1910-1928).
ccgcagagccgggttattt

SEQ ID NO: 745374 - DNA, 19 bp, Mus musculus
  siRNA target sequence for Pcdhga11 (NM_033594.2,1911-1929).
cgcagagccgggttattta

SEQ ID NO: 745375 - DNA, 19 bp, Mus musculus
  siRNA target sequence for Pcdhga11 (NM_033594.2,1913-1931).
cagagccgggttatttagt

SEQ ID NO: 745376 - DNA, 19 bp, Mus musculus
  siRNA target sequence for Pcdhga11 (NM_033594.2,1915-1933).
gagccgggttatttagtga

SEQ ID NO: 745377 - DNA, 19 bp, Mus musculus
  siRNA target sequence for Pcdhga11 (NM_033594.2,2319-2337).
gcgctggcactcattacgt

SEQ ID NO: 745378 - DNA, 19 bp, Mus musculus
  siRNA target sequence for Pcdhga11 (NM_033594.2,2529-2547).
cgagcctctcctgataact

SEQ ID NO: 745379 - DNA, 19 bp, Mus musculus
  siRNA target sequence for Pcdhga11 (NM_033594.2,2532-2550).
gcctctcctgataactgaa

SEQ ID NO: 745380 - DNA, 19 bp, Mus musculus
  siRNA target sequence for Pcdhga11 (NM_033594.2,2576-2594).
gtgaaccgacagatattca

SEQ ID NO: 745381 - DNA, 19 bp, Mus musculus
  siRNA target sequence for Bcl3 (NM_033601.1,257-275).
ggccggaggccctttacta

SEQ ID NO: 745382 - DNA, 19 bp, Mus musculus
  siRNA target sequence for Bcl3 (NM_033601.1,283-301).
cctttgatgcccatttact

SEQ ID NO: 745383 - DNA, 19 bp, Mus musculus
  siRNA target sequence for Bcl3 (NM_033601.1,470-488).
ccgctgtctaccgaatact

SEQ ID NO: 745384 - DNA, 19 bp, Mus musculus
  siRNA target sequence for Bcl3 (NM_033601.1,512-530).
gcgaagtagacgtccataa

SEQ ID NO: 745385 - DNA, 19 bp, Mus musculus
  siRNA target sequence for Bcl3 (NM_033601.1,514-532).
gaagtagacgtccataaca

SEQ ID NO: 745386 - DNA, 19 bp, Mus musculus
  siRNA target sequence for Bcl3 (NM_033601.1,726-744).
cctggaggttcgcaattat

SEQ ID NO: 745387 - DNA, 19 bp, Mus musculus
  siRNA target sequence for Bcl3 (NM_033601.1,729-747).
ggaggttcgcaattatgaa

SEQ ID NO: 745388 - DNA, 19 bp, Mus musculus
  siRNA target sequence for Bcl3 (NM_033601.1,927-945).
cgtgaacgctcagatgtat

SEQ ID NO: 745389 - DNA, 19 bp, Mus musculus
  siRNA target sequence for Bcl3 (NM_033601.1,1032-1050).
cctcaagaactgtcacaat

SEQ ID NO: 745390 - DNA, 19 bp, Mus musculus
  siRNA target sequence for Bcl3 (NM_033601.1,1073-1091).
gcagccgcagggtcattga

SEQ ID NO: 745391 - DNA, 19 bp, Mus musculus
  siRNA target sequence for Bcl3 (NM_033601.1,1076-1094).
gccgcagggtcattgatat

SEQ ID NO: 745392 - DNA, 19 bp, Mus musculus
  siRNA target sequence for Bcl3 (NM_033601.1,1078-1096).
cgcagggtcattgatatct

SEQ ID NO: 745393 - DNA, 19 bp, Mus musculus
  siRNA target sequence for Bcl3 (NM_033601.1,1079-1097).
gcagggtcattgatatctt

SEQ ID NO: 745394 - DNA, 19 bp, Mus musculus
  siRNA target sequence for Bcl3 (NM_033601.1,1233-1251).
gctgtctcccccgaaagat

SEQ ID NO: 745395 - DNA, 19 bp, Mus musculus
  siRNA target sequence for Bcl3 (NM_033601.1,1266-1284).
cgcgactccccaaaacttt

SEQ ID NO: 745396 - DNA, 19 bp, Mus musculus
  siRNA target sequence for Bcl3 (NM_033601.1,1267-1285).
gcgactccccaaaactttt

SEQ ID NO: 745397 - DNA, 19 bp, Mus musculus
  siRNA target sequence for Bcl3 (NM_033601.1,1268-1286).
cgactccccaaaacttttt

SEQ ID NO: 745398 - DNA, 19 bp, Mus musculus
  siRNA target sequence for Igsf9 (NM_033608.2,345-363).
ccgtcctcagcctgatcat

SEQ ID NO: 745399 - DNA, 19 bp, Mus musculus
  siRNA target sequence for Igsf9 (NM_033608.2,372-390).
gggctgacggtcgaagaaa

SEQ ID NO: 745400 - DNA, 19 bp, Mus musculus
  siRNA target sequence for Igsf9 (NM_033608.2,488-506).
gagtggctgcgctttggat

SEQ ID NO: 745401 - DNA, 19 bp, Mus musculus
  siRNA target sequence for Igsf9 (NM_033608.2,703-721).
ggtgcacctgacagtcaat

SEQ ID NO: 745402 - DNA, 19 bp, Mus musculus
  siRNA target sequence for Igsf9 (NM_033608.2,704-722).
gtgcacctgacagtcaatt

SEQ ID NO: 745403 - DNA, 19 bp, Mus musculus
  siRNA target sequence for Igsf9 (NM_033608.2,991-1009).
gctaggaccccctgtcatt

SEQ ID NO: 745404 - DNA, 19 bp, Mus musculus
  siRNA target sequence for Igsf9 (NM_033608.2,1041-1059).
cctctcaggatgtttcctt

SEQ ID NO: 745405 - DNA, 19 bp, Mus musculus
  siRNA target sequence for Igsf9 (NM_033608.2,1130-1148).
catatcagccgcttacagt

SEQ ID NO: 745406 - DNA, 19 bp, Mus musculus
  siRNA target sequence for Igsf9 (NM_033608.2,1351-1369).
gtgtccggttcgtgctaat

SEQ ID NO: 745407 - DNA, 19 bp, Mus musculus
  siRNA target sequence for Igsf9 (NM_033608.2,1365-1383).
ctaatcccccactactgtt

SEQ ID NO: 745408 - DNA, 19 bp, Mus musculus
  siRNA target sequence for Igsf9 (NM_033608.2,1370-1388).
cccccactactgtttgtca

SEQ ID NO: 745409 - DNA, 19 bp, Mus musculus
  siRNA target sequence for Igsf9 (NM_033608.2,1588-1606).
ccagcccaaggaagaatat

SEQ ID NO: 745410 - DNA, 19 bp, Mus musculus
  siRNA target sequence for Igsf9 (NM_033608.2,1589-1607).
cagcccaaggaagaatatt

SEQ ID NO: 745411 - DNA, 19 bp, Mus musculus
  siRNA target sequence for Igsf9 (NM_033608.2,1651-1669).
gggagaccctcctcctatt

SEQ ID NO: 745412 - DNA, 19 bp, Mus musculus
  siRNA target sequence for Igsf9 (NM_033608.2,1653-1671).
gagaccctcctcctattgt

SEQ ID NO: 745413 - DNA, 19 bp, Mus musculus
  siRNA target sequence for Igsf9 (NM_033608.2,1807-1825).
gaccacttccaccaatgta

SEQ ID NO: 745414 - DNA, 19 bp, Mus musculus
  siRNA target sequence for Igsf9 (NM_033608.2,1809-1827).
ccacttccaccaatgtata

SEQ ID NO: 745415 - DNA, 19 bp, Mus musculus
  siRNA target sequence for Igsf9 (NM_033608.2,1810-1828).
cacttccaccaatgtatat

SEQ ID NO: 745416 - DNA, 19 bp, Mus musculus
  siRNA target sequence for Igsf9 (NM_033608.2,1922-1940).
ggctatctgcagagattca

SEQ ID NO: 745417 - DNA, 19 bp, Mus musculus
  siRNA target sequence for Igsf9 (NM_033608.2,1924-1942).
ctatctgcagagattcagt

SEQ ID NO: 745418 - DNA, 19 bp, Mus musculus
  siRNA target sequence for Igsf9 (NM_033608.2,2048-2066).
gctcacgcgcagtatcagt

SEQ ID NO: 745419 - DNA, 19 bp, Mus musculus
  siRNA target sequence for Igsf9 (NM_033608.2,2049-2067).
ctcacgcgcagtatcagtt

SEQ ID NO: 745420 - DNA, 19 bp, Mus musculus
  siRNA target sequence for Igsf9 (NM_033608.2,2070-2088).
gtgtccttgctcagaataa

SEQ ID NO: 745421 - DNA, 19 bp, Mus musculus
  siRNA target sequence for Igsf9 (NM_033608.2,2113-2131).
gattgtcctgtctatacca

SEQ ID NO: 745422 - DNA, 19 bp, Mus musculus
  siRNA target sequence for Igsf9 (NM_033608.2,2380-2398).
catcaaggacgttctctat

SEQ ID NO: 745423 - DNA, 19 bp, Mus musculus
  siRNA target sequence for Igsf9 (NM_033608.2,2648-2666).
gatccgcctctgatcttct

SEQ ID NO: 745424 - DNA, 19 bp, Mus musculus
  siRNA target sequence for Igsf9 (NM_033608.2,2717-2735).
gacagcgtgaccaagttca

SEQ ID NO: 745425 - DNA, 19 bp, Mus musculus
  siRNA target sequence for Igsf9 (NM_033608.2,2832-2850).
ggggacccttaccattaga

SEQ ID NO: 745426 - DNA, 19 bp, Mus musculus
  siRNA target sequence for Igsf9 (NM_033608.2,2843-2861).
ccattagagcccatttgca

SEQ ID NO: 745427 - DNA, 19 bp, Mus musculus
  siRNA target sequence for Igsf9 (NM_033608.2,3084-3102).
gacccctgctccagtatct

SEQ ID NO: 745428 - DNA, 19 bp, Mus musculus
  siRNA target sequence for Igsf9 (NM_033608.2,3111-3129).
ccttcttccgagagatgaa

SEQ ID NO: 745429 - DNA, 19 bp, Mus musculus
  siRNA target sequence for Igsf9 (NM_033608.2,3112-3130).
cttcttccgagagatgaat

SEQ ID NO: 745430 - DNA, 19 bp, Mus musculus
  siRNA target sequence for Igsf9 (NM_033608.2,3170-3188).
gctccgcctccagatttca

SEQ ID NO: 745431 - DNA, 19 bp, Mus musculus
  siRNA target sequence for Igsf9 (NM_033608.2,3753-3771).
cccttcgggaggaattcct

SEQ ID NO: 745432 - DNA, 19 bp, Mus musculus
  siRNA target sequence for Igsf9 (NM_033608.2,3754-3772).
ccttcgggaggaattccta

SEQ ID NO: 745433 - DNA, 19 bp, Mus musculus
  siRNA target sequence for Dom3z (NM_033613.1,172-190).
cccagagggactaagagaa

SEQ ID NO: 745434 - DNA, 19 bp, Mus musculus
  siRNA target sequence for Dom3z (NM_033613.1,563-581).
ggcacctgacaaaattgct

SEQ ID NO: 745435 - DNA, 19 bp, Mus musculus
  siRNA target sequence for Dom3z (NM_033613.1,634-652).
caagggacactgtacctaa

SEQ ID NO: 745436 - DNA, 19 bp, Mus musculus
  siRNA target sequence for Dom3z (NM_033613.1,638-656).
ggacactgtacctaagtga

SEQ ID NO: 745437 - DNA, 19 bp, Mus musculus
  siRNA target sequence for Dom3z (NM_033613.1,720-738).
gtacatgggctacaaattt

SEQ ID NO: 745438 - DNA, 19 bp, Mus musculus
  siRNA target sequence for Dom3z (NM_033613.1,781-799).
ccctctggggaagttaaca

SEQ ID NO: 745439 - DNA, 19 bp, Mus musculus
  siRNA target sequence for Dom3z (NM_033613.1,956-974).
gccagtggaggagctttta

SEQ ID NO: 745440 - DNA, 19 bp, Mus musculus
  siRNA target sequence for Dom3z (NM_033613.1,958-976).
cagtggaggagcttttaca

SEQ ID NO: 745441 - DNA, 19 bp, Mus musculus
  siRNA target sequence for Dom3z (NM_033613.1,968-986).
gcttttacagacacaagtt

SEQ ID NO: 745442 - DNA, 19 bp, Mus musculus
  siRNA target sequence for Dom3z (NM_033613.1,1057-1075).
ggtttcgtctgttccttaa

SEQ ID NO: 745443 - DNA, 19 bp, Mus musculus
  siRNA target sequence for Dom3z (NM_033613.1,1088-1106).
ccatggagatgtttgaaaa

SEQ ID NO: 745444 - DNA, 19 bp, Mus musculus
  siRNA target sequence for Dom3z (NM_033613.1,1089-1107).
catggagatgtttgaaaat

SEQ ID NO: 745445 - DNA, 19 bp, Mus musculus
  siRNA target sequence for Dom3z (NM_033613.1,1135-1153).
ccctctgtgtgcatgaact

SEQ ID NO: 745446 - DNA, 19 bp, Mus musculus
  siRNA target sequence for Cntf (NM_053007.1,1131-1149).
ctggctagcaaggaagatt

SEQ ID NO: 745447 - DNA, 19 bp, Mus musculus
  siRNA target sequence for Cntf (NM_053007.1,1135-1153).
ctagcaaggaagattcgtt

SEQ ID NO: 745448 - DNA, 19 bp, Mus musculus
  siRNA target sequence for Cntf (NM_053007.1,1154-1172).
cagacctgactgctcttat

SEQ ID NO: 745449 - DNA, 19 bp, Mus musculus
  siRNA target sequence for Cntf (NM_053007.1,1166-1184).
ctcttatggaatcttatgt

SEQ ID NO: 745450 - DNA, 19 bp, Mus musculus
  siRNA target sequence for Cntf (NM_053007.1,1192-1210).
caaggcctgaataaaaata

SEQ ID NO: 745451 - DNA, 19 bp, Mus musculus
  siRNA target sequence for Cntf (NM_053007.1,1321-1339).
gggatgttaaccaagcttt

SEQ ID NO: 745452 - DNA, 19 bp, Mus musculus
  siRNA target sequence for Cntf (NM_053007.1,1387-1405).
caggcaatacatactctta

SEQ ID NO: 745453 - DNA, 19 bp, Mus musculus
  siRNA target sequence for Cntf (NM_053007.1,1491-1509).
gatgcctgtcacaattgga

SEQ ID NO: 745454 - DNA, 19 bp, Mus musculus
  siRNA target sequence for Cntf (NM_053007.1,1587-1605).
ccatgacctccgtgtcatt

SEQ ID NO: 745455 - DNA, 19 bp, Mus musculus
  siRNA target sequence for Cntf (NM_053007.1,1588-1606).
catgacctccgtgtcattt

SEQ ID NO: 745456 - DNA, 19 bp, Mus musculus
  siRNA target sequence for Cntf (NM_053007.1,1591-1609).
gacctccgtgtcatttctt

SEQ ID NO: 745457 - DNA, 19 bp, Mus musculus
  siRNA target sequence for Cntf (NM_053007.1,1596-1614).
ccgtgtcatttcttctcat

SEQ ID NO: 745458 - DNA, 19 bp, Mus musculus
  siRNA target sequence for Cntf (NM_053007.1,1642-1660).
cattatggggccaagcaaa

SEQ ID NO: 745459 - DNA, 19 bp, Mus musculus
  siRNA target sequence for Olig3 (NM_053008.1,245-263).
ccacacagggcgatatggt

SEQ ID NO: 745460 - DNA, 19 bp, Mus musculus
  siRNA target sequence for Olig3 (NM_053008.1,254-272).
gcgatatggtccagaagat

SEQ ID NO: 745461 - DNA, 19 bp, Mus musculus
  siRNA target sequence for D0H4S114 (NM_053078.3,152-170).
gccaagaaccgtttgcata

SEQ ID NO: 745462 - DNA, 19 bp, Mus musculus
  siRNA target sequence for D0H4S114 (NM_053078.3,269-287).
cgccaggcagccgtgaatt

SEQ ID NO: 745463 - DNA, 19 bp, Mus musculus
  siRNA target sequence for Loxl4 (NM_053083.1,217-235).
cgacagctgggctttgagt

SEQ ID NO: 745464 - DNA, 19 bp, Mus musculus
  siRNA target sequence for Loxl4 (NM_053083.1,249-267).
ggcacacagtgccaagtat

SEQ ID NO: 745465 - DNA, 19 bp, Mus musculus
  siRNA target sequence for Loxl4 (NM_053083.1,409-427).
cgccagcacggatatcact

SEQ ID NO: 745466 - DNA, 19 bp, Mus musculus
  siRNA target sequence for Loxl4 (NM_053083.1,646-664).
gtcaacagccactactaca

SEQ ID NO: 745467 - DNA, 19 bp, Mus musculus
  siRNA target sequence for Loxl4 (NM_053083.1,651-669).
cagccactactacagaaaa

SEQ ID NO: 745468 - DNA, 19 bp, Mus musculus
  siRNA target sequence for Loxl4 (NM_053083.1,653-671).
gccactactacagaaaagt

SEQ ID NO: 745469 - DNA, 19 bp, Mus musculus
  siRNA target sequence for Loxl4 (NM_053083.1,715-733).
ctgacaaaaaagaattcct

SEQ ID NO: 745470 - DNA, 19 bp, Mus musculus
  siRNA target sequence for Loxl4 (NM_053083.1,1188-1206).
gtcccagaatggttgtcaa

SEQ ID NO: 745471 - DNA, 19 bp, Mus musculus
  siRNA target sequence for Loxl4 (NM_053083.1,1191-1209).
ccagaatggttgtcaacat

SEQ ID NO: 745472 - DNA, 19 bp, Mus musculus
  siRNA target sequence for Loxl4 (NM_053083.1,1333-1351).
ccacgatgggggactgtat

SEQ ID NO: 745473 - DNA, 19 bp, Mus musculus
  siRNA target sequence for Loxl4 (NM_053083.1,1700-1718).
ccaagtccgctgatcacat

SEQ ID NO: 745474 - DNA, 19 bp, Mus musculus
  siRNA target sequence for Loxl4 (NM_053083.1,1804-1822).
ggacgccacagctggattt

SEQ ID NO: 745475 - DNA, 19 bp, Mus musculus
  siRNA target sequence for Loxl4 (NM_053083.1,1854-1872).
cgaagtcttcactcattat

SEQ ID NO: 745476 - DNA, 19 bp, Mus musculus
  siRNA target sequence for Loxl4 (NM_053083.1,1917-1935).
ggccagcttctgtctagaa

SEQ ID NO: 745477 - DNA, 19 bp, Mus musculus
  siRNA target sequence for Loxl4 (NM_053083.1,1920-1938).
cagcttctgtctagaagat

SEQ ID NO: 745478 - DNA, 19 bp, Mus musculus
  siRNA target sequence for Loxl4 (NM_053083.1,1923-1941).
cttctgtctagaagataca

SEQ ID NO: 745479 - DNA, 19 bp, Mus musculus
  siRNA target sequence for Loxl4 (NM_053083.1,2065-2083).
gtgggtccaggggactata

SEQ ID NO: 745480 - DNA, 19 bp, Mus musculus
  siRNA target sequence for Loxl4 (NM_053083.1,2068-2086).
ggtccaggggactatatct

SEQ ID NO: 745481 - DNA, 19 bp, Mus musculus
  siRNA target sequence for Loxl4 (NM_053083.1,2116-2134).
gttgcagagtccgatttct

SEQ ID NO: 745482 - DNA, 19 bp, Mus musculus
  siRNA target sequence for Tcf23 (NM_053085.1,140-158).
gagaagggcatggtcataa

SEQ ID NO: 745483 - DNA, 19 bp, Mus musculus
  siRNA target sequence for Tcf23 (NM_053085.1,456-474).
gctggccacaagctacatt

SEQ ID NO: 745484 - DNA, 19 bp, Mus musculus
  siRNA target sequence for Tcf23 (NM_053085.1,488-506).
ggaccctcggccatgagtt

SEQ ID NO: 745485 - DNA, 19 bp, Mus musculus
  siRNA target sequence for Tcf23 (NM_053085.1,573-591).
catgcgatctcgtctctat

SEQ ID NO: 745486 - DNA, 19 bp, Mus musculus
  siRNA target sequence for Tcf23 (NM_053085.1,681-699).
ctctgtagccgcagaaagt

SEQ ID NO: 745487 - DNA, 19 bp, Mus musculus
  siRNA target sequence for Tcf23 (NM_053085.1,683-701).
ctgtagccgcagaaagtct

SEQ ID NO: 745488 - DNA, 19 bp, Mus musculus
  siRNA target sequence for Tcf23 (NM_053085.1,712-730).
ccagcttttggtaacaaat

SEQ ID NO: 745489 - DNA, 19 bp, Mus musculus
  siRNA target sequence for 1110003J06Rik (NM_053088.1,128-146).
ctacaccacgagatcacat

SEQ ID NO: 745490 - DNA, 19 bp, Mus musculus
  siRNA target sequence for 1110003J06Rik (NM_053088.1,164-182).
gcacgatgtacctgaatct

SEQ ID NO: 745491 - DNA, 19 bp, Mus musculus
  siRNA target sequence for 1110003J06Rik (NM_053088.1,385-403).
gactctgcggctttcttca

SEQ ID NO: 745492 - DNA, 19 bp, Mus musculus
  siRNA target sequence for Drctnnb1a (NM_053090.1,1317-1335).
gaaacatctttgccaaatt

SEQ ID NO: 745493 - DNA, 19 bp, Mus musculus
  siRNA target sequence for Drctnnb1a (NM_053090.1,1577-1595).
ggtttacaacctggaaata

SEQ ID NO: 745494 - DNA, 19 bp, Mus musculus
  siRNA target sequence for Drctnnb1a (NM_053090.1,1601-1619).
caaacacggacatagtaaa

SEQ ID NO: 745495 - DNA, 19 bp, Mus musculus
  siRNA target sequence for Drctnnb1a (NM_053090.1,1605-1623).
cacggacatagtaaagtat

SEQ ID NO: 745496 - DNA, 19 bp, Mus musculus
  siRNA target sequence for Drctnnb1a (NM_053090.1,1608-1626).
ggacatagtaaagtattga

SEQ ID NO: 745497 - DNA, 19 bp, Mus musculus
  siRNA target sequence for Drctnnb1a (NM_053090.1,1611-1629).
catagtaaagtattgagtt

SEQ ID NO: 745498 - DNA, 19 bp, Mus musculus
  siRNA target sequence for Drctnnb1a (NM_053090.1,1633-1651).
caattccatctttatccaa

SEQ ID NO: 745499 - DNA, 19 bp, Mus musculus
  siRNA target sequence for Drctnnb1a (NM_053090.1,1649-1667).
caaaccatctgtatatcat

SEQ ID NO: 745500 - DNA, 19 bp, Mus musculus
  siRNA target sequence for Drctnnb1a (NM_053090.1,1712-1730).
gtcccagcatggcttatca

SEQ ID NO: 745501 - DNA, 19 bp, Mus musculus
  siRNA target sequence for Drctnnb1a (NM_053090.1,1714-1732).
cccagcatggcttatcaaa

SEQ ID NO: 745502 - DNA, 19 bp, Mus musculus
  siRNA target sequence for Drctnnb1a (NM_053090.1,1715-1733).
ccagcatggcttatcaaaa

SEQ ID NO: 745503 - DNA, 19 bp, Mus musculus
  siRNA target sequence for Drctnnb1a (NM_053090.1,1865-1883).
gtgtcagatttgttcaaga

SEQ ID NO: 745504 - DNA, 19 bp, Mus musculus
  siRNA target sequence for Drctnnb1a (NM_053090.1,1867-1885).
gtcagatttgttcaagaat

SEQ ID NO: 745505 - DNA, 19 bp, Mus musculus
  siRNA target sequence for Drctnnb1a (NM_053090.1,1897-1915).
gctatccccgacaacatgt

SEQ ID NO: 745506 - DNA, 19 bp, Mus musculus
  siRNA target sequence for Drctnnb1a (NM_053090.1,1898-1916).
ctatccccgacaacatgtt

SEQ ID NO: 745507 - DNA, 19 bp, Mus musculus
  siRNA target sequence for Drctnnb1a (NM_053090.1,1902-1920).
ccccgacaacatgttagaa

SEQ ID NO: 745508 - DNA, 19 bp, Mus musculus
  siRNA target sequence for Drctnnb1a (NM_053090.1,1904-1922).
ccgacaacatgttagaaaa

SEQ ID NO: 745509 - DNA, 19 bp, Mus musculus
  siRNA target sequence for Drctnnb1a (NM_053090.1,1937-1955).
cagcaggataccgatttca

SEQ ID NO: 745510 - DNA, 19 bp, Mus musculus
  siRNA target sequence for Drctnnb1a (NM_053090.1,1976-1994).
gctaacaggagtgtatttt

SEQ ID NO: 745511 - DNA, 19 bp, Mus musculus
  siRNA target sequence for Drctnnb1a (NM_053090.1,2036-2054).
ggatgacattatatacaga

SEQ ID NO: 745512 - DNA, 19 bp, Mus musculus
  siRNA target sequence for Drctnnb1a (NM_053090.1,2082-2100).
ctgctggttgctaatgcaa

SEQ ID NO: 745513 - DNA, 19 bp, Mus musculus
  siRNA target sequence for Drctnnb1a (NM_053090.1,2084-2102).
gctggttgctaatgcaata

SEQ ID NO: 745514 - DNA, 19 bp, Mus musculus
  siRNA target sequence for Drctnnb1a (NM_053090.1,2085-2103).
ctggttgctaatgcaataa

SEQ ID NO: 745515 - DNA, 19 bp, Mus musculus
  siRNA target sequence for Drctnnb1a (NM_053090.1,2121-2139).
ggtgccatgaaatctagta

SEQ ID NO: 745516 - DNA, 19 bp, Mus musculus
  siRNA target sequence for Drctnnb1a (NM_053090.1,2122-2140).
gtgccatgaaatctagtaa

SEQ ID NO: 745517 - DNA, 19 bp, Mus musculus
  siRNA target sequence for Drctnnb1a (NM_053090.1,2141-2159).
ggaaggtacaaggtgtatt

SEQ ID NO: 745518 - DNA, 19 bp, Mus musculus
  siRNA target sequence for Drctnnb1a (NM_053090.1,2175-2193).
ccaacctcctctagaatat

SEQ ID NO: 745519 - DNA, 19 bp, Mus musculus
  siRNA target sequence for Drctnnb1a (NM_053090.1,2202-2220).
gcagttaccagcatgtcaa

SEQ ID NO: 745520 - DNA, 19 bp, Mus musculus
  siRNA target sequence for Drctnnb1a (NM_053090.1,2203-2221).
cagttaccagcatgtcaat

SEQ ID NO: 745521 - DNA, 19 bp, Mus musculus
  siRNA target sequence for Drctnnb1a (NM_053090.1,2223-2241).
cgaggtcacaggtggaaaa

SEQ ID NO: 745522 - DNA, 19 bp, Mus musculus
  siRNA target sequence for Drctnnb1a (NM_053090.1,2292-2310).
gaagttgacgagggatttt

SEQ ID NO: 745523 - DNA, 19 bp, Mus musculus
  siRNA target sequence for Drctnnb1a (NM_053090.1,2295-2313).
gttgacgagggattttatt

SEQ ID NO: 745524 - DNA, 19 bp, Mus musculus
  siRNA target sequence for Drctnnb1a (NM_053090.1,2337-2355).
cagtcgggtctatcaaaca

SEQ ID NO: 745525 - DNA, 19 bp, Mus musculus
  siRNA target sequence for Drctnnb1a (NM_053090.1,2339-2357).
gtcgggtctatcaaacagt

SEQ ID NO: 745526 - DNA, 19 bp, Mus musculus
  siRNA target sequence for Drctnnb1a (NM_053090.1,2466-2484).
cactttgctcgcaagcaaa

SEQ ID NO: 745527 - DNA, 19 bp, Mus musculus
  siRNA target sequence for Drctnnb1a (NM_053090.1,2588-2606).
gactgcggccactgtattt

SEQ ID NO: 745528 - DNA, 19 bp, Mus musculus
  siRNA target sequence for Drctnnb1a (NM_053090.1,2593-2611).
cggccactgtatttagtaa

SEQ ID NO: 745529 - DNA, 19 bp, Mus musculus
  siRNA target sequence for Drctnnb1a (NM_053090.1,2594-2612).
ggccactgtatttagtaaa

SEQ ID NO: 745530 - DNA, 19 bp, Mus musculus
  siRNA target sequence for Drctnnb1a (NM_053090.1,2680-2698).
gagcagatgccaatagatt

SEQ ID NO: 745531 - DNA, 19 bp, Mus musculus
  siRNA target sequence for Sep15 (NM_053102.1,392-410).
gcagctcttgcgatcttct

SEQ ID NO: 745532 - DNA, 19 bp, Mus musculus
  siRNA target sequence for Sep15 (NM_053102.1,540-558).
ccctcaagtccaagctttt

SEQ ID NO: 745533 - DNA, 19 bp, Mus musculus
  siRNA target sequence for Sep15 (NM_053102.1,566-584).
gtgataaacccaaactctt

SEQ ID NO: 745534 - DNA, 19 bp, Mus musculus
  siRNA target sequence for Sep15 (NM_053102.1,590-608).
gtctacagatcaagtatgt

SEQ ID NO: 745535 - DNA, 19 bp, Mus musculus
  siRNA target sequence for Sep15 (NM_053102.1,614-632).
gctcagaccctgtactaaa

SEQ ID NO: 745536 - DNA, 19 bp, Mus musculus
  siRNA target sequence for Sep15 (NM_053102.1,619-637).
gaccctgtactaaagcttt

SEQ ID NO: 745537 - DNA, 19 bp, Mus musculus
  siRNA target sequence for Sep15 (NM_053102.1,651-669).
gaacattgctgaagaacta

SEQ ID NO: 745538 - DNA, 19 bp, Mus musculus
  siRNA target sequence for Gpr45 (NM_053107.2,620-638).
ggatctcgctggcaataat

SEQ ID NO: 745539 - DNA, 19 bp, Mus musculus
  siRNA target sequence for Gpr45 (NM_053107.2,651-669).
gatcgtggtaggattcctt

SEQ ID NO: 745540 - DNA, 19 bp, Mus musculus
  siRNA target sequence for Gpr45 (NM_053107.2,710-728).
ccatgcgttcagctatcaa

SEQ ID NO: 745541 - DNA, 19 bp, Mus musculus
  siRNA target sequence for Gpr45 (NM_053107.2,756-774).
cgacatcatgctgtcttta

SEQ ID NO: 745542 - DNA, 19 bp, Mus musculus
  siRNA target sequence for Gpr45 (NM_053107.2,905-923).
gcgtggaccggtttctcat

SEQ ID NO: 745543 - DNA, 19 bp, Mus musculus
  siRNA target sequence for Gpr45 (NM_053107.2,952-970).
ccacgcagggctaagatga

SEQ ID NO: 745544 - DNA, 19 bp, Mus musculus
  siRNA target sequence for Gpr45 (NM_053107.2,953-971).
cacgcagggctaagatgat

SEQ ID NO: 745545 - DNA, 19 bp, Mus musculus
  siRNA target sequence for Gpr45 (NM_053107.2,1091-1109).
ctgaacgcgcctatgtagt

SEQ ID NO: 745546 - DNA, 19 bp, Mus musculus
  siRNA target sequence for Gpr45 (NM_053107.2,1136-1154).
ctcccttcggcgtcatgtt

SEQ ID NO: 745547 - DNA, 19 bp, Mus musculus
  siRNA target sequence for Gpr45 (NM_053107.2,1138-1156).
cccttcggcgtcatgttgt

SEQ ID NO: 745548 - DNA, 19 bp, Mus musculus
  siRNA target sequence for Gpr45 (NM_053107.2,1516-1534).
cgcgaggcctgcatagagt

SEQ ID NO: 745549 - DNA, 19 bp, Mus musculus
  siRNA target sequence for Gpr45 (NM_053107.2,1517-1535).
gcgaggcctgcatagagtt

SEQ ID NO: 745550 - DNA, 19 bp, Mus musculus
  siRNA target sequence for Gpr45 (NM_053107.2,1573-1591).
gagcggatccagaggaaaa

SEQ ID NO: 745551 - DNA, 19 bp, Mus musculus
  siRNA target sequence for Clmn (NM_053155.1,174-192).
gcgacatccgtgtgcaaaa

SEQ ID NO: 745552 - DNA, 19 bp, Mus musculus
  siRNA target sequence for Clmn (NM_053155.1,228-246).
ctttcacacgatggataaa

SEQ ID NO: 745553 - DNA, 19 bp, Mus musculus
  siRNA target sequence for Clmn (NM_053155.1,285-303).
cggacctgtttgttgatat

SEQ ID NO: 745554 - DNA, 19 bp, Mus musculus
  siRNA target sequence for Clmn (NM_053155.1,286-304).
ggacctgtttgttgatatt

SEQ ID NO: 745555 - DNA, 19 bp, Mus musculus
  siRNA target sequence for Clmn (NM_053155.1,319-337).
cctaatggctctgttagaa

SEQ ID NO: 745556 - DNA, 19 bp, Mus musculus
  siRNA target sequence for Clmn (NM_053155.1,350-368).
cgaaatctgctgcatgaat

SEQ ID NO: 745557 - DNA, 19 bp, Mus musculus
  siRNA target sequence for Clmn (NM_053155.1,351-369).
gaaatctgctgcatgaata

SEQ ID NO: 745558 - DNA, 19 bp, Mus musculus
  siRNA target sequence for Clmn (NM_053155.1,359-377).
ctgcatgaatacaaatcct

SEQ ID NO: 745559 - DNA, 19 bp, Mus musculus
  siRNA target sequence for Clmn (NM_053155.1,375-393).
cctcatcacatcgtatttt

SEQ ID NO: 745560 - DNA, 19 bp, Mus musculus
  siRNA target sequence for Clmn (NM_053155.1,376-394).
ctcatcacatcgtattttt

SEQ ID NO: 745561 - DNA, 19 bp, Mus musculus
  siRNA target sequence for Clmn (NM_053155.1,386-404).
cgtatttttcggttgaaca

SEQ ID NO: 745562 - DNA, 19 bp, Mus musculus
  siRNA target sequence for Clmn (NM_053155.1,387-405).
gtatttttcggttgaacaa

SEQ ID NO: 745563 - DNA, 19 bp, Mus musculus
  siRNA target sequence for Clmn (NM_053155.1,457-475).
catcgatgcagcggaaata

SEQ ID NO: 745564 - DNA, 19 bp, Mus musculus
  siRNA target sequence for Clmn (NM_053155.1,494-512).
ctggttctcgggctgatat

SEQ ID NO: 745565 - DNA, 19 bp, Mus musculus
  siRNA target sequence for Clmn (NM_053155.1,503-521).
gggctgatatggaacatca

SEQ ID NO: 745566 - DNA, 19 bp, Mus musculus
  siRNA target sequence for Clmn (NM_053155.1,732-750).
gtgtggcagtccaagactt

SEQ ID NO: 745567 - DNA, 19 bp, Mus musculus
  siRNA target sequence for Clmn (NM_053155.1,1048-1066).
ctttgtccgcatcaaagaa

SEQ ID NO: 745568 - DNA, 19 bp, Mus musculus
  siRNA target sequence for Clmn (NM_053155.1,1215-1233).
gtgctcccagccacaaact

SEQ ID NO: 745569 - DNA, 19 bp, Mus musculus
  siRNA target sequence for Clmn (NM_053155.1,1217-1235).
gctcccagccacaaactgt

SEQ ID NO: 745570 - DNA, 19 bp, Mus musculus
  siRNA target sequence for Clmn (NM_053155.1,1325-1343).
ccagagtcgtccattttgt

SEQ ID NO: 745571 - DNA, 19 bp, Mus musculus
  siRNA target sequence for Clmn (NM_053155.1,1431-1449).
gtagtaaggaccctttcta

SEQ ID NO: 745572 - DNA, 19 bp, Mus musculus
  siRNA target sequence for Clmn (NM_053155.1,1827-1845).
cactaaaagcttcaaagtt

SEQ ID NO: 745573 - DNA, 19 bp, Mus musculus
  siRNA target sequence for Clmn (NM_053155.1,1873-1891).
caccagccaggcttttggt

SEQ ID NO: 745574 - DNA, 19 bp, Mus musculus
  siRNA target sequence for Clmn (NM_053155.1,2043-2061).
ccaaggatcccgaacaaga

SEQ ID NO: 745575 - DNA, 19 bp, Mus musculus
  siRNA target sequence for Clmn (NM_053155.1,2099-2117).
gacaaaaagcccaaagtgt

SEQ ID NO: 745576 - DNA, 19 bp, Mus musculus
  siRNA target sequence for Clmn (NM_053155.1,2264-2282).
gaagaaggtttggatttca

SEQ ID NO: 745577 - DNA, 19 bp, Mus musculus
  siRNA target sequence for Clmn (NM_053155.1,2318-2336).
ccccacgacctgttctact

SEQ ID NO: 745578 - DNA, 19 bp, Mus musculus
  siRNA target sequence for Clmn (NM_053155.1,2319-2337).
cccacgacctgttctacta

SEQ ID NO: 745579 - DNA, 19 bp, Mus musculus
  siRNA target sequence for Clmn (NM_053155.1,2710-2728).
gcccacaaagccattagaa

SEQ ID NO: 745580 - DNA, 19 bp, Mus musculus
  siRNA target sequence for Clmn (NM_053155.1,2719-2737).
gccattagaagaaaagtta

SEQ ID NO: 745581 - DNA, 19 bp, Mus musculus
  siRNA target sequence for Clmn (NM_053155.1,2720-2738).
ccattagaagaaaagttaa

SEQ ID NO: 745582 - DNA, 19 bp, Mus musculus
  siRNA target sequence for Clmn (NM_053155.1,2745-2763).
cctcaactagcagtaaaaa

SEQ ID NO: 745583 - DNA, 19 bp, Mus musculus
  siRNA target sequence for Clmn (NM_053155.1,2789-2807).
cacgtagaaagctcattat

SEQ ID NO: 745584 - DNA, 19 bp, Mus musculus
  siRNA target sequence for Clmn (NM_053155.1,2835-2853).
cagacgaccttgaagaaaa

SEQ ID NO: 745585 - DNA, 19 bp, Mus musculus
  siRNA target sequence for Trim9 (NM_053167.1,232-250).
ctgctctcacaatttatgt

SEQ ID NO: 745586 - DNA, 19 bp, Mus musculus
  siRNA target sequence for Trim9 (NM_053167.1,234-252).
gctctcacaatttatgtca

SEQ ID NO: 745587 - DNA, 19 bp, Mus musculus
  siRNA target sequence for Trim9 (NM_053167.1,322-340).
ctctggggtttctgactat

SEQ ID NO: 745588 - DNA, 19 bp, Mus musculus
  siRNA target sequence for Trim9 (NM_053167.1,710-728).
cagtgcgatgtcttctact

SEQ ID NO: 745589 - DNA, 19 bp, Mus musculus
  siRNA target sequence for Trim9 (NM_053167.1,1264-1282).
gtactgcttggaagtgatt

SEQ ID NO: 745590 - DNA, 19 bp, Mus musculus
  siRNA target sequence for Trim9 (NM_053167.1,1269-1287).
gcttggaagtgattaagga

SEQ ID NO: 745591 - DNA, 19 bp, Mus musculus
  siRNA target sequence for Trim9 (NM_053167.1,1327-1345).
cataaggcgagttcactta

SEQ ID NO: 745592 - DNA, 19 bp, Mus musculus
  siRNA target sequence for Trim9 (NM_053167.1,1419-1437).
gccctctgctgcagtctat

SEQ ID NO: 745593 - DNA, 19 bp, Mus musculus
  siRNA target sequence for Trim9 (NM_053167.1,1420-1438).
ccctctgctgcagtctatt

SEQ ID NO: 745594 - DNA, 19 bp, Mus musculus
  siRNA target sequence for Trim9 (NM_053167.1,1447-1465).
ggacttcgtgcaagtgaaa

SEQ ID NO: 745595 - DNA, 19 bp, Mus musculus
  siRNA target sequence for Trim9 (NM_053167.1,1618-1636).
gttccgggaagtgtatgtt

SEQ ID NO: 745596 - DNA, 19 bp, Mus musculus
  siRNA target sequence for Trim9 (NM_053167.1,1623-1641).
gggaagtgtatgttggaaa

SEQ ID NO: 745597 - DNA, 19 bp, Mus musculus
  siRNA target sequence for Trim9 (NM_053167.1,1624-1642).
ggaagtgtatgttggaaaa

SEQ ID NO: 745598 - DNA, 19 bp, Mus musculus
  siRNA target sequence for Trim9 (NM_053167.1,1661-1679).
gacggccttcacttcaaca

SEQ ID NO: 745599 - DNA, 19 bp, Mus musculus
  siRNA target sequence for Trim9 (NM_053167.1,1694-1712).
cgggttaaggccttcaaca

SEQ ID NO: 745600 - DNA, 19 bp, Mus musculus
  siRNA target sequence for Trim9 (NM_053167.1,1696-1714).
ggttaaggccttcaacaaa

SEQ ID NO: 745601 - DNA, 19 bp, Mus musculus
  siRNA target sequence for Trim9 (NM_053167.1,1697-1715).
gttaaggccttcaacaaaa

SEQ ID NO: 745602 - DNA, 19 bp, Mus musculus
  siRNA target sequence for Trim9 (NM_053167.1,1772-1790).
gcccatgagacaaaaccta

SEQ ID NO: 745603 - DNA, 19 bp, Mus musculus
  siRNA target sequence for Trim9 (NM_053167.1,1829-1847).
ccagtgccttcggaaagat

SEQ ID NO: 745604 - DNA, 19 bp, Mus musculus
  siRNA target sequence for Trim9 (NM_053167.1,1830-1848).
cagtgccttcggaaagatt

SEQ ID NO: 745605 - DNA, 19 bp, Mus musculus
  siRNA target sequence for Trim9 (NM_053167.1,1875-1893).
cctccacccttaatctaca

SEQ ID NO: 745606 - DNA, 19 bp, Mus musculus
  siRNA target sequence for Trim9 (NM_053167.1,1876-1894).
ctccacccttaatctacaa

SEQ ID NO: 745607 - DNA, 19 bp, Mus musculus
  siRNA target sequence for Trim9 (NM_053167.1,1907-1925).
gggaggtcctactttgatt

SEQ ID NO: 745608 - DNA, 19 bp, Mus musculus
  siRNA target sequence for Trim9 (NM_053167.1,1940-1958).
caccagctgagtttgcatt

SEQ ID NO: 745609 - DNA, 19 bp, Mus musculus
  siRNA target sequence for Trim9 (NM_053167.1,1948-1966).
gagtttgcattcttcttta

SEQ ID NO: 745610 - DNA, 19 bp, Mus musculus
  siRNA target sequence for Trim9 (NM_053167.1,1980-1998).
caccgggctgcaattttga

SEQ ID NO: 745611 - DNA, 19 bp, Mus musculus
  siRNA target sequence for Trim9 (NM_053167.1,1982-2000).
ccgggctgcaattttgaga

SEQ ID NO: 745612 - DNA, 19 bp, Mus musculus
  siRNA target sequence for Trim9 (NM_053167.1,2010-2028).
catcctactctcaattagt

SEQ ID NO: 745613 - DNA, 19 bp, Mus musculus
  siRNA target sequence for Trim9 (NM_053167.1,2013-2031).
cctactctcaattagttga

SEQ ID NO: 745614 - DNA, 19 bp, Mus musculus
  siRNA target sequence for Trim9 (NM_053167.1,2017-2035).
ctctcaattagttgacatt

SEQ ID NO: 745615 - DNA, 19 bp, Mus musculus
  siRNA target sequence for Trim9 (NM_053167.1,2084-2102).
cactccgacatcatcttct

SEQ ID NO: 745616 - DNA, 19 bp, Mus musculus
  siRNA target sequence for Trim9 (NM_053167.1,2188-2206).
ctgggagctgaccatagat

SEQ ID NO: 745617 - DNA, 19 bp, Mus musculus
  siRNA target sequence for Trim9 (NM_053167.1,2199-2217).
ccatagatcgctatgacaa

SEQ ID NO: 745618 - DNA, 19 bp, Mus musculus
  siRNA target sequence for Trim9 (NM_053167.1,2244-2262).
ctcgcatcgatgtgatgaa

SEQ ID NO: 745619 - DNA, 19 bp, Mus musculus
  siRNA target sequence for Trim9 (NM_053167.1,2287-2305).
caaagcttgggcaatgtat

SEQ ID NO: 745620 - DNA, 19 bp, Mus musculus
  siRNA target sequence for Trim9 (NM_053167.1,2297-2315).
gcaatgtatgtggacaata

SEQ ID NO: 745621 - DNA, 19 bp, Mus musculus
  siRNA target sequence for Trim9 (NM_053167.1,2390-2408).
ggggtcctcctcgacttaa

SEQ ID NO: 745622 - DNA, 19 bp, Mus musculus
  siRNA target sequence for Trim9 (NM_053167.1,2393-2411).
gtcctcctcgacttaaaca

SEQ ID NO: 745623 - DNA, 19 bp, Mus musculus
  siRNA target sequence for Trim9 (NM_053167.1,2395-2413).
cctcctcgacttaaacaga

SEQ ID NO: 745624 - DNA, 19 bp, Mus musculus
  siRNA target sequence for Trim9 (NM_053167.1,2396-2414).
ctcctcgacttaaacagaa

SEQ ID NO: 745625 - DNA, 19 bp, Mus musculus
  siRNA target sequence for Trim9 (NM_053167.1,2399-2417).
ctcgacttaaacagaaaga

SEQ ID NO: 745626 - DNA, 19 bp, Mus musculus
  siRNA target sequence for Trim9 (NM_053167.1,2424-2442).
cgtttttcgtcaacaatga

SEQ ID NO: 745627 - DNA, 19 bp, Mus musculus
  siRNA target sequence for Trim9 (NM_053167.1,2425-2443).
gtttttcgtcaacaatgaa

SEQ ID NO: 745628 - DNA, 19 bp, Mus musculus
  siRNA target sequence for Trim9 (NM_053167.1,2550-2568).
gctcaggttgctacttcaa

SEQ ID NO: 745629 - DNA, 19 bp, Mus musculus
  siRNA target sequence for Trim9 (NM_053167.1,2551-2569).
ctcaggttgctacttcaaa

SEQ ID NO: 745630 - DNA, 19 bp, Mus musculus
  siRNA target sequence for Trim9 (NM_053167.1,2553-2571).
caggttgctacttcaaagt

SEQ ID NO: 745631 - DNA, 19 bp, Mus musculus
  siRNA target sequence for Csmd1 (NM_053171.1,315-333).
gcgtggaggaaattcaagt

SEQ ID NO: 745632 - DNA, 19 bp, Mus musculus
  siRNA target sequence for Csmd1 (NM_053171.1,410-428).
cctggtacagggacctaat

SEQ ID NO: 745633 - DNA, 19 bp, Mus musculus
  siRNA target sequence for Csmd1 (NM_053171.1,482-500).
cacctggatcattattact

SEQ ID NO: 745634 - DNA, 19 bp, Mus musculus
  siRNA target sequence for Csmd1 (NM_053171.1,521-539).
gctatccttccataccttt

SEQ ID NO: 745635 - DNA, 19 bp, Mus musculus
  siRNA target sequence for Csmd1 (NM_053171.1,551-569).
ggactttgacattttatct

SEQ ID NO: 745636 - DNA, 19 bp, Mus musculus
  siRNA target sequence for Csmd1 (NM_053171.1,585-603).
ccccagcaagggaacttga

SEQ ID NO: 745637 - DNA, 19 bp, Mus musculus
  siRNA target sequence for Csmd1 (NM_053171.1,587-605).
ccagcaagggaacttgaaa

SEQ ID NO: 745638 - DNA, 19 bp, Mus musculus
  siRNA target sequence for Csmd1 (NM_053171.1,713-731).
catgtacgaagttttacct

SEQ ID NO: 745639 - DNA, 19 bp, Mus musculus
  siRNA target sequence for Csmd1 (NM_053171.1,777-795).
cacggaacgaggttcaaca

SEQ ID NO: 745640 - DNA, 19 bp, Mus musculus
  siRNA target sequence for Csmd1 (NM_053171.1,779-797).
cggaacgaggttcaacata

SEQ ID NO: 745641 - DNA, 19 bp, Mus musculus
  siRNA target sequence for Csmd1 (NM_053171.1,820-838).
gtctctccggctacatctt

SEQ ID NO: 745642 - DNA, 19 bp, Mus musculus
  siRNA target sequence for Csmd1 (NM_053171.1,848-866).
cgccattctgacttgcatt

SEQ ID NO: 745643 - DNA, 19 bp, Mus musculus
  siRNA target sequence for Csmd1 (NM_053171.1,948-966).
ggaaccagcggttccatat

SEQ ID NO: 745644 - DNA, 19 bp, Mus musculus
  siRNA target sequence for Csmd1 (NM_053171.1,1037-1055).
ggacaccattgctcttgtt

SEQ ID NO: 745645 - DNA, 19 bp, Mus musculus
  siRNA target sequence for Csmd1 (NM_053171.1,1038-1056).
gacaccattgctcttgttt

SEQ ID NO: 745646 - DNA, 19 bp, Mus musculus
  siRNA target sequence for Csmd1 (NM_053171.1,1106-1124).
gacagaagcaccatccata

SEQ ID NO: 745647 - DNA, 19 bp, Mus musculus
  siRNA target sequence for Csmd1 (NM_053171.1,1175-1193).
gctccgtctccactttaca

SEQ ID NO: 745648 - DNA, 19 bp, Mus musculus
  siRNA target sequence for Csmd1 (NM_053171.1,1199-1217).
cagcaatcaccgacgtaaa

SEQ ID NO: 745649 - DNA, 19 bp, Mus musculus
  siRNA target sequence for Csmd1 (NM_053171.1,1208-1226).
ccgacgtaaagggttcaat

SEQ ID NO: 745650 - DNA, 19 bp, Mus musculus
  siRNA target sequence for Csmd1 (NM_053171.1,1410-1428).
ggtgcaaatgtgcaattct

SEQ ID NO: 745651 - DNA, 19 bp, Mus musculus
  siRNA target sequence for Csmd1 (NM_053171.1,1429-1447).
cctgtgaggacaattacgt

SEQ ID NO: 745652 - DNA, 19 bp, Mus musculus
  siRNA target sequence for Csmd1 (NM_053171.1,1430-1448).
ctgtgaggacaattacgta

SEQ ID NO: 745653 - DNA, 19 bp, Mus musculus
  siRNA target sequence for Csmd1 (NM_053171.1,1463-1481).
gggaatcacctgtcaaaga

SEQ ID NO: 745654 - DNA, 19 bp, Mus musculus
  siRNA target sequence for Csmd1 (NM_053171.1,1490-1508).
gacccttgctgcatggaat

SEQ ID NO: 745655 - DNA, 19 bp, Mus musculus
  siRNA target sequence for Csmd1 (NM_053171.1,1493-1511).
ccttgctgcatggaatgat

SEQ ID NO: 745656 - DNA, 19 bp, Mus musculus
  siRNA target sequence for Csmd1 (NM_053171.1,1582-1600).
ctaactacccagtgcaata

SEQ ID NO: 745657 - DNA, 19 bp, Mus musculus
  siRNA target sequence for Csmd1 (NM_053171.1,1620-1638).
gtgtgggtcatcacaacaa

SEQ ID NO: 745658 - DNA, 19 bp, Mus musculus
  siRNA target sequence for Csmd1 (NM_053171.1,1625-1643).
ggtcatcacaacaactgat

SEQ ID NO: 745659 - DNA, 19 bp, Mus musculus
  siRNA target sequence for Csmd1 (NM_053171.1,1841-1859).
ctcaccagggtttaaagct

SEQ ID NO: 745660 - DNA, 19 bp, Mus musculus
  siRNA target sequence for Csmd1 (NM_053171.1,1947-1965).
gacacgctcacctttgagt

SEQ ID NO: 745661 - DNA, 19 bp, Mus musculus
  siRNA target sequence for Csmd1 (NM_053171.1,1998-2016).
gtgattacctgccagaaaa

SEQ ID NO: 745662 - DNA, 19 bp, Mus musculus
  siRNA target sequence for Csmd1 (NM_053171.1,2112-2130).
gaggagtatggcaacaaca

SEQ ID NO: 745663 - DNA, 19 bp, Mus musculus
  siRNA target sequence for Csmd1 (NM_053171.1,2132-2150).
gaactgtgtgtggttgatt

SEQ ID NO: 745664 - DNA, 19 bp, Mus musculus
  siRNA target sequence for Csmd1 (NM_053171.1,2219-2237).
ccttgccgtcaaagatgat

SEQ ID NO: 745665 - DNA, 19 bp, Mus musculus
  siRNA target sequence for Csmd1 (NM_053171.1,2299-2317).
ccagcagtggacacatagt

SEQ ID NO: 745666 - DNA, 19 bp, Mus musculus
  siRNA target sequence for Csmd1 (NM_053171.1,2316-2334).
gtacgcctggagtttcagt

SEQ ID NO: 745667 - DNA, 19 bp, Mus musculus
  siRNA target sequence for Csmd1 (NM_053171.1,2420-2438).
gaatggacggcgttttgga

SEQ ID NO: 745668 - DNA, 19 bp, Mus musculus
  siRNA target sequence for Csmd1 (NM_053171.1,2521-2539).
gcatcttgcaagatggaaa

SEQ ID NO: 745669 - DNA, 19 bp, Mus musculus
  siRNA target sequence for Csmd1 (NM_053171.1,2599-2617).
cttccagtggggtcatatt

SEQ ID NO: 745670 - DNA, 19 bp, Mus musculus
  siRNA target sequence for Csmd1 (NM_053171.1,2685-2703).
ggacattccatcaagataa

SEQ ID NO: 745671 - DNA, 19 bp, Mus musculus
  siRNA target sequence for Csmd1 (NM_053171.1,2717-2735).
ccagacagaagtcaattat

SEQ ID NO: 745672 - DNA, 19 bp, Mus musculus
  siRNA target sequence for Csmd1 (NM_053171.1,2720-2738).
gacagaagtcaattatgat

SEQ ID NO: 745673 - DNA, 19 bp, Mus musculus
  siRNA target sequence for Csmd1 (NM_053171.1,2961-2979).
catggcagtaactttggta

SEQ ID NO: 745674 - DNA, 19 bp, Mus musculus
  siRNA target sequence for Csmd1 (NM_053171.1,3328-3346).
ccattaaggctggtttgtt

SEQ ID NO: 745675 - DNA, 19 bp, Mus musculus
  siRNA target sequence for Csmd1 (NM_053171.1,3337-3355).
ctggtttgtttggaaactt

SEQ ID NO: 745676 - DNA, 19 bp, Mus musculus
  siRNA target sequence for Csmd1 (NM_053171.1,3360-3378).
gcacaactcaggttcatct

SEQ ID NO: 745677 - DNA, 19 bp, Mus musculus
  siRNA target sequence for Csmd1 (NM_053171.1,3399-3417).
gaaggcttcaacattacgt

SEQ ID NO: 745678 - DNA, 19 bp, Mus musculus
  siRNA target sequence for Csmd1 (NM_053171.1,3410-3428).
cattacgtttgcagaatat

SEQ ID NO: 745679 - DNA, 19 bp, Mus musculus
  siRNA target sequence for Csmd1 (NM_053171.1,3471-3489).
cgcagaattgggtttcagt

SEQ ID NO: 745680 - DNA, 19 bp, Mus musculus
  siRNA target sequence for Csmd1 (NM_053171.1,3524-3542).
ccagggataccgcttagaa

SEQ ID NO: 745681 - DNA, 19 bp, Mus musculus
  siRNA target sequence for Csmd1 (NM_053171.1,3621-3639).
ggagcaagcgtcaaaggaa

SEQ ID NO: 745682 - DNA, 19 bp, Mus musculus
  siRNA target sequence for Csmd1 (NM_053171.1,3622-3640).
gagcaagcgtcaaaggaaa

SEQ ID NO: 745683 - DNA, 19 bp, Mus musculus
  siRNA target sequence for Csmd1 (NM_053171.1,3668-3686).
cccatcccattatgataat

SEQ ID NO: 745684 - DNA, 19 bp, Mus musculus
  siRNA target sequence for Csmd1 (NM_053171.1,3670-3688).
catcccattatgataataa

SEQ ID NO: 745685 - DNA, 19 bp, Mus musculus
  siRNA target sequence for Csmd1 (NM_053171.1,3674-3692).
ccattatgataataaccat

SEQ ID NO: 745686 - DNA, 19 bp, Mus musculus
  siRNA target sequence for Csmd1 (NM_053171.1,3773-3791).
cactctaaaggtttacgat

SEQ ID NO: 745687 - DNA, 19 bp, Mus musculus
  siRNA target sequence for Csmd1 (NM_053171.1,3926-3944).
gctcacctacaccagtttt

SEQ ID NO: 745688 - DNA, 19 bp, Mus musculus
  siRNA target sequence for Csmd1 (NM_053171.1,3986-4004).
ctacaggatccgtgatgat

SEQ ID NO: 745689 - DNA, 19 bp, Mus musculus
  siRNA target sequence for Csmd1 (NM_053171.1,4099-4117).
gggtgtgggacaaacctat

SEQ ID NO: 745690 - DNA, 19 bp, Mus musculus
  siRNA target sequence for Csmd1 (NM_053171.1,4252-4270).
ccatcagcctccatttcat

SEQ ID NO: 745691 - DNA, 19 bp, Mus musculus
  siRNA target sequence for Csmd1 (NM_053171.1,4253-4271).
catcagcctccatttcatt

SEQ ID NO: 745692 - DNA, 19 bp, Mus musculus
  siRNA target sequence for Csmd1 (NM_053171.1,4258-4276).
gcctccatttcattgtgtt

SEQ ID NO: 745693 - DNA, 19 bp, Mus musculus
  siRNA target sequence for Csmd1 (NM_053171.1,4282-4300).
ctgaaacggcgcatgacat

SEQ ID NO: 745694 - DNA, 19 bp, Mus musculus
  siRNA target sequence for Csmd1 (NM_053171.1,4440-4458).
ggcttctccatccagtttt

SEQ ID NO: 745695 - DNA, 19 bp, Mus musculus
  siRNA target sequence for Csmd1 (NM_053171.1,4491-4509).
gggatgcctcagaatggta

SEQ ID NO: 745696 - DNA, 19 bp, Mus musculus
  siRNA target sequence for Csmd1 (NM_053171.1,4679-4697).
ccctgctggagtgattcta

SEQ ID NO: 745697 - DNA, 19 bp, Mus musculus
  siRNA target sequence for Csmd1 (NM_053171.1,4680-4698).
cctgctggagtgattctat

SEQ ID NO: 745698 - DNA, 19 bp, Mus musculus
  siRNA target sequence for Csmd1 (NM_053171.1,4734-4752).
gagtgcgactggaggatta

SEQ ID NO: 745699 - DNA, 19 bp, Mus musculus
  siRNA target sequence for Csmd1 (NM_053171.1,4755-4773).
gtgaacccagactttgtca

SEQ ID NO: 745700 - DNA, 19 bp, Mus musculus
  siRNA target sequence for Csmd1 (NM_053171.1,4810-4828).
gttatgacttcctgcatat

SEQ ID NO: 745701 - DNA, 19 bp, Mus musculus
  siRNA target sequence for Csmd1 (NM_053171.1,4955-4973).
gtcgggattcgccattgaa

SEQ ID NO: 745702 - DNA, 19 bp, Mus musculus
  siRNA target sequence for Csmd1 (NM_053171.1,4957-4975).
cgggattcgccattgaatt

SEQ ID NO: 745703 - DNA, 19 bp, Mus musculus
  siRNA target sequence for Csmd1 (NM_053171.1,4958-4976).
gggattcgccattgaattt

SEQ ID NO: 745704 - DNA, 19 bp, Mus musculus
  siRNA target sequence for Csmd1 (NM_053171.1,5032-5050).
ggattggaactgactttaa

SEQ ID NO: 745705 - DNA, 19 bp, Mus musculus
  siRNA target sequence for Csmd1 (NM_053171.1,5033-5051).
gattggaactgactttaaa

SEQ ID NO: 745706 - DNA, 19 bp, Mus musculus
  siRNA target sequence for Csmd1 (NM_053171.1,5100-5118).
gatccctcgtccattgagt

SEQ ID NO: 745707 - DNA, 19 bp, Mus musculus
  siRNA target sequence for Csmd1 (NM_053171.1,5199-5217).
ggctcggagggggtagttt

SEQ ID NO: 745708 - DNA, 19 bp, Mus musculus
  siRNA target sequence for Csmd1 (NM_053171.1,5200-5218).
gctcggagggggtagtttt

SEQ ID NO: 745709 - DNA, 19 bp, Mus musculus
  siRNA target sequence for Csmd1 (NM_053171.1,5223-5241).
ccaaactaccctcataact

SEQ ID NO: 745710 - DNA, 19 bp, Mus musculus
  siRNA target sequence for Csmd1 (NM_053171.1,5224-5242).
caaactaccctcataacta

SEQ ID NO: 745711 - DNA, 19 bp, Mus musculus
  siRNA target sequence for Csmd1 (NM_053171.1,5275-5293).
cggtgcccaaggaattcgt

SEQ ID NO: 745712 - DNA, 19 bp, Mus musculus
  siRNA target sequence for Csmd1 (NM_053171.1,5281-5299).
ccaaggaattcgtggtatt

SEQ ID NO: 745713 - DNA, 19 bp, Mus musculus
  siRNA target sequence for Csmd1 (NM_053171.1,5282-5300).
caaggaattcgtggtattt

SEQ ID NO: 745714 - DNA, 19 bp, Mus musculus
  siRNA target sequence for Csmd1 (NM_053171.1,5425-5443).
ctacatccaatcagattct

SEQ ID NO: 745715 - DNA, 19 bp, Mus musculus
  siRNA target sequence for Csmd1 (NM_053171.1,5789-5807).
ctgtgtgtggaagatcata

SEQ ID NO: 745716 - DNA, 19 bp, Mus musculus
  siRNA target sequence for Csmd1 (NM_053171.1,6013-6031).
gctttcacctggagtacaa

SEQ ID NO: 745717 - DNA, 19 bp, Mus musculus
  siRNA target sequence for Csmd1 (NM_053171.1,6014-6032).
ctttcacctggagtacaaa

SEQ ID NO: 745718 - DNA, 19 bp, Mus musculus
  siRNA target sequence for Csmd1 (NM_053171.1,6155-6173).
ccgctcacacatttcttgt

SEQ ID NO: 745719 - DNA, 19 bp, Mus musculus
  siRNA target sequence for Csmd1 (NM_053171.1,6156-6174).
cgctcacacatttcttgta

SEQ ID NO: 745720 - DNA, 19 bp, Mus musculus
  siRNA target sequence for Csmd1 (NM_053171.1,6157-6175).
gctcacacatttcttgtat

SEQ ID NO: 745721 - DNA, 19 bp, Mus musculus
  siRNA target sequence for Csmd1 (NM_053171.1,6283-6301).
gctcataccccaacaactt

SEQ ID NO: 745722 - DNA, 19 bp, Mus musculus
  siRNA target sequence for Csmd1 (NM_053171.1,6335-6353).
ctatggtgcacatatccaa

SEQ ID NO: 745723 - DNA, 19 bp, Mus musculus
  siRNA target sequence for Csmd1 (NM_053171.1,6340-6358).
gtgcacatatccaatttct

SEQ ID NO: 745724 - DNA, 19 bp, Mus musculus
  siRNA target sequence for Csmd1 (NM_053171.1,6342-6360).
gcacatatccaatttctaa

SEQ ID NO: 745725 - DNA, 19 bp, Mus musculus
  siRNA target sequence for Csmd1 (NM_053171.1,6446-6464).
ccctgacctgcctacatca

SEQ ID NO: 745726 - DNA, 19 bp, Mus musculus
  siRNA target sequence for Csmd1 (NM_053171.1,6447-6465).
cctgacctgcctacatcat

SEQ ID NO: 745727 - DNA, 19 bp, Mus musculus
  siRNA target sequence for Csmd1 (NM_053171.1,6448-6466).
ctgacctgcctacatcatt

SEQ ID NO: 745728 - DNA, 19 bp, Mus musculus
  siRNA target sequence for Csmd1 (NM_053171.1,6518-6536).
gaaccggcaaggatttaaa

SEQ ID NO: 745729 - DNA, 19 bp, Mus musculus
  siRNA target sequence for Csmd1 (NM_053171.1,6541-6559).
gttaccaagcttatgagtt

SEQ ID NO: 745730 - DNA, 19 bp, Mus musculus
  siRNA target sequence for Csmd1 (NM_053171.1,6602-6620).
gatcaactcggattacagt

SEQ ID NO: 745731 - DNA, 19 bp, Mus musculus
  siRNA target sequence for Csmd1 (NM_053171.1,6646-6664).
gctatcctggctatatctt

SEQ ID NO: 745732 - DNA, 19 bp, Mus musculus
  siRNA target sequence for Csmd1 (NM_053171.1,6737-6755).
cgctccctgtggatataat

SEQ ID NO: 745733 - DNA, 19 bp, Mus musculus
  siRNA target sequence for Csmd1 (NM_053171.1,6739-6757).
ctccctgtggatataatgt

SEQ ID NO: 745734 - DNA, 19 bp, Mus musculus
  siRNA target sequence for Csmd1 (NM_053171.1,6796-6814).
cagatgagtacccaattct

SEQ ID NO: 745735 - DNA, 19 bp, Mus musculus
  siRNA target sequence for Csmd1 (NM_053171.1,6798-6816).
gatgagtacccaattctga

SEQ ID NO: 745736 - DNA, 19 bp, Mus musculus
  siRNA target sequence for Csmd1 (NM_053171.1,6849-6867).
ggccacggagtgtacatca

SEQ ID NO: 745737 - DNA, 19 bp, Mus musculus
  siRNA target sequence for Csmd1 (NM_053171.1,6850-6868).
gccacggagtgtacatcaa

SEQ ID NO: 745738 - DNA, 19 bp, Mus musculus
  siRNA target sequence for Csmd1 (NM_053171.1,6886-6904).
ccgaggctgtaaatgacta

SEQ ID NO: 745739 - DNA, 19 bp, Mus musculus
  siRNA target sequence for Csmd1 (NM_053171.1,7313-7331).
cgggtacccaggcaactat

SEQ ID NO: 745740 - DNA, 19 bp, Mus musculus
  siRNA target sequence for Csmd1 (NM_053171.1,7314-7332).
gggtacccaggcaactatt

SEQ ID NO: 745741 - DNA, 19 bp, Mus musculus
  siRNA target sequence for Csmd1 (NM_053171.1,7315-7333).
ggtacccaggcaactattt

SEQ ID NO: 745742 - DNA, 19 bp, Mus musculus
  siRNA target sequence for Csmd1 (NM_053171.1,7316-7334).
gtacccaggcaactatttt

SEQ ID NO: 745743 - DNA, 19 bp, Mus musculus
  siRNA target sequence for Csmd1 (NM_053171.1,7320-7338).
ccaggcaactattttaact

SEQ ID NO: 745744 - DNA, 19 bp, Mus musculus
  siRNA target sequence for Csmd1 (NM_053171.1,7345-7363).
catgtgcttggagtattaa

SEQ ID NO: 745745 - DNA, 19 bp, Mus musculus
  siRNA target sequence for Csmd1 (NM_053171.1,7348-7366).
gtgcttggagtattaaagt

SEQ ID NO: 745746 - DNA, 19 bp, Mus musculus
  siRNA target sequence for Csmd1 (NM_053171.1,7497-7515).
gaacagtccaattttacca

SEQ ID NO: 745747 - DNA, 19 bp, Mus musculus
  siRNA target sequence for Csmd1 (NM_053171.1,7516-7534).
gcagaagtaaccatctgta

SEQ ID NO: 745748 - DNA, 19 bp, Mus musculus
  siRNA target sequence for Csmd1 (NM_053171.1,7625-7643).
gaatggtggcattttaaat

SEQ ID NO: 745749 - DNA, 19 bp, Mus musculus
  siRNA target sequence for Csmd1 (NM_053171.1,7663-7681).
ggagcaaggtacactactt

SEQ ID NO: 745750 - DNA, 19 bp, Mus musculus
  siRNA target sequence for Csmd1 (NM_053171.1,7679-7697).
cttctgcaagcctggatat

SEQ ID NO: 745751 - DNA, 19 bp, Mus musculus
  siRNA target sequence for Csmd1 (NM_053171.1,7684-7702).
gcaagcctggatatcgaat

SEQ ID NO: 745752 - DNA, 19 bp, Mus musculus
  siRNA target sequence for Csmd1 (NM_053171.1,7688-7706).
gcctggatatcgaatgatt

SEQ ID NO: 745753 - DNA, 19 bp, Mus musculus
  siRNA target sequence for Csmd1 (NM_053171.1,7737-7755).
ccagtgggcgtgtatcagt

SEQ ID NO: 745754 - DNA, 19 bp, Mus musculus
  siRNA target sequence for Csmd1 (NM_053171.1,7781-7799).
ggctgtgtcctgtggaatt

SEQ ID NO: 745755 - DNA, 19 bp, Mus musculus
  siRNA target sequence for Csmd1 (NM_053171.1,7850-7868).
cagtaaagtgacttatgaa

SEQ ID NO: 745756 - DNA, 19 bp, Mus musculus
  siRNA target sequence for Csmd1 (NM_053171.1,7899-7917).
caggaagccaccactgtat

SEQ ID NO: 745757 - DNA, 19 bp, Mus musculus
  siRNA target sequence for Csmd1 (NM_053171.1,8024-8042).
ggtttcgggatcactgaat

SEQ ID NO: 745758 - DNA, 19 bp, Mus musculus
  siRNA target sequence for Csmd1 (NM_053171.1,8029-8047).
cgggatcactgaatgaata

SEQ ID NO: 745759 - DNA, 19 bp, Mus musculus
  siRNA target sequence for Csmd1 (NM_053171.1,8149-8167).
gacccagatgtaaagtcat

SEQ ID NO: 745760 - DNA, 19 bp, Mus musculus
  siRNA target sequence for Csmd1 (NM_053171.1,8185-8203).
cctttcccccaaatggtaa

SEQ ID NO: 745761 - DNA, 19 bp, Mus musculus
  siRNA target sequence for Csmd1 (NM_053171.1,8406-8424).
gacacagtggtctaccaat

SEQ ID NO: 745762 - DNA, 19 bp, Mus musculus
  siRNA target sequence for Csmd1 (NM_053171.1,8447-8465).
gggcacctctgtgagaatt

SEQ ID NO: 745763 - DNA, 19 bp, Mus musculus
  siRNA target sequence for Csmd1 (NM_053171.1,8448-8466).
ggcacctctgtgagaattt

SEQ ID NO: 745764 - DNA, 19 bp, Mus musculus
  siRNA target sequence for Csmd1 (NM_053171.1,8574-8592).
ctgaacgaccttgtgaatt

SEQ ID NO: 745765 - DNA, 19 bp, Mus musculus
  siRNA target sequence for Csmd1 (NM_053171.1,8705-8723).
cggatctgtggaaaatgca

SEQ ID NO: 745766 - DNA, 19 bp, Mus musculus
  siRNA target sequence for Csmd1 (NM_053171.1,8728-8746).
gccatgggcaacagaactt

SEQ ID NO: 745767 - DNA, 19 bp, Mus musculus
  siRNA target sequence for Csmd1 (NM_053171.1,8729-8747).
ccatgggcaacagaacttt

SEQ ID NO: 745768 - DNA, 19 bp, Mus musculus
  siRNA target sequence for Csmd1 (NM_053171.1,8775-8793).
gtgatgtatcactgcaaaa

SEQ ID NO: 745769 - DNA, 19 bp, Mus musculus
  siRNA target sequence for Csmd1 (NM_053171.1,8788-8806).
gcaaaacggggttctactt

SEQ ID NO: 745770 - DNA, 19 bp, Mus musculus
  siRNA target sequence for Csmd1 (NM_053171.1,8918-8936).
gactggagaattgtttaca

SEQ ID NO: 745771 - DNA, 19 bp, Mus musculus
  siRNA target sequence for Csmd1 (NM_053171.1,8920-8938).
ctggagaattgtttacata

SEQ ID NO: 745772 - DNA, 19 bp, Mus musculus
  siRNA target sequence for Csmd1 (NM_053171.1,9027-9045).
ggatcccttcctcattgtt

SEQ ID NO: 745773 - DNA, 19 bp, Mus musculus
  siRNA target sequence for Csmd1 (NM_053171.1,9097-9115).
ctcgtcttggggatgagtt

SEQ ID NO: 745774 - DNA, 19 bp, Mus musculus
  siRNA target sequence for Csmd1 (NM_053171.1,9102-9120).
cttggggatgagtttaaga

SEQ ID NO: 745775 - DNA, 19 bp, Mus musculus
  siRNA target sequence for Csmd1 (NM_053171.1,9393-9411).
gctcctgactgcacaatca

SEQ ID NO: 745776 - DNA, 19 bp, Mus musculus
  siRNA target sequence for Csmd1 (NM_053171.1,9536-9554).
catccgctgcaccaaagat

SEQ ID NO: 745777 - DNA, 19 bp, Mus musculus
  siRNA target sequence for Csmd1 (NM_053171.1,9552-9570).
gatggcacatggaatcaga

SEQ ID NO: 745778 - DNA, 19 bp, Mus musculus
  siRNA target sequence for Csmd1 (NM_053171.1,9648-9666).
cgatggggtgccagcataa

SEQ ID NO: 745779 - DNA, 19 bp, Mus musculus
  siRNA target sequence for Csmd1 (NM_053171.1,9652-9670).
ggggtgccagcataagcta

SEQ ID NO: 745780 - DNA, 19 bp, Mus musculus
  siRNA target sequence for Csmd1 (NM_053171.1,9848-9866).
gtgcaagcccccattcgta

SEQ ID NO: 745781 - DNA, 19 bp, Mus musculus
  siRNA target sequence for Csmd1 (NM_053171.1,9851-9869).
caagcccccattcgtatta

SEQ ID NO: 745782 - DNA, 19 bp, Mus musculus
  siRNA target sequence for Csmd1 (NM_053171.1,9894-9912).
caggccgatgggatatgga

SEQ ID NO: 745783 - DNA, 19 bp, Mus musculus
  siRNA target sequence for Csmd1 (NM_053171.1,9916-9934).
gcatccagcccacttgtat

SEQ ID NO: 745784 - DNA, 19 bp, Mus musculus
  siRNA target sequence for Csmd1 (NM_053171.1,9917-9935).
catccagcccacttgtata

SEQ ID NO: 745785 - DNA, 19 bp, Mus musculus
  siRNA target sequence for Csmd1 (NM_053171.1,9966-9984).
ggcactccccactttggaa

SEQ ID NO: 745786 - DNA, 19 bp, Mus musculus
  siRNA target sequence for Csmd1 (NM_053171.1,9967-9985).
gcactccccactttggaat

SEQ ID NO: 745787 - DNA, 19 bp, Mus musculus
  siRNA target sequence for Csmd1 (NM_053171.1,9975-9993).
cactttggaatccagaata

SEQ ID NO: 745788 - DNA, 19 bp, Mus musculus
  siRNA target sequence for Csmd1 (NM_053171.1,10214-10232).
ccaccctggatttttcctt

SEQ ID NO: 745789 - DNA, 19 bp, Mus musculus
  siRNA target sequence for Csmd1 (NM_053171.1,10256-10274).
gtgtaaagcagatatgaaa

SEQ ID NO: 745790 - DNA, 19 bp, Mus musculus
  siRNA target sequence for Csmd1 (NM_053171.1,10373-10391).
ctcggtgtggaaaggatat

SEQ ID NO: 745791 - DNA, 19 bp, Mus musculus
  siRNA target sequence for Csmd1 (NM_053171.1,10375-10393).
cggtgtggaaaggatatta

SEQ ID NO: 745792 - DNA, 19 bp, Mus musculus
  siRNA target sequence for Csmd1 (NM_053171.1,10376-10394).
ggtgtggaaaggatattat

SEQ ID NO: 745793 - DNA, 19 bp, Mus musculus
  siRNA target sequence for Csmd1 (NM_053171.1,10427-10445).
cactgtggactggttcaat

SEQ ID NO: 745794 - DNA, 19 bp, Mus musculus
  siRNA target sequence for Csmd1 (NM_053171.1,10503-10521).
ctgaccggggtctacaaga

SEQ ID NO: 745795 - DNA, 19 bp, Mus musculus
  siRNA target sequence for Csmd1 (NM_053171.1,10538-10556).
gcttctgaaagcctttcat

SEQ ID NO: 745796 - DNA, 19 bp, Mus musculus
  siRNA target sequence for Csmd1 (NM_053171.1,10652-10670).
ctcctttcagggtgatata

SEQ ID NO: 745797 - DNA, 19 bp, Mus musculus
  siRNA target sequence for Csmd1 (NM_053171.1,10654-10672).
cctttcagggtgatataca

SEQ ID NO: 745798 - DNA, 19 bp, Mus musculus
  siRNA target sequence for Csmd1 (NM_053171.1,10655-10673).
ctttcagggtgatatacat

SEQ ID NO: 745799 - DNA, 19 bp, Mus musculus
  siRNA target sequence for Csmd1 (NM_053171.1,10665-10683).
gatatacatggaaaagatt

SEQ ID NO: 745800 - DNA, 19 bp, Mus musculus
  siRNA target sequence for Csmd1 (NM_053171.1,10718-10736).
caactccgatgcagattct

SEQ ID NO: 745801 - DNA, 19 bp, Mus musculus
  siRNA target sequence for Csmd1 (NM_053171.1,10721-10739).
ctccgatgcagattcttca

SEQ ID NO: 745802 - DNA, 19 bp, Mus musculus
  siRNA target sequence for Csmd1 (NM_053171.1,10792-10810).
ccttcttcgctctaattct

SEQ ID NO: 745803 - DNA, 19 bp, Mus musculus
  siRNA target sequence for Csmd1 (NM_053171.1,10793-10811).
cttcttcgctctaattcta

SEQ ID NO: 745804 - DNA, 19 bp, Mus musculus
  siRNA target sequence for Csmd1 (NM_053171.1,10796-10814).
cttcgctctaattctatca

SEQ ID NO: 745805 - DNA, 19 bp, Mus musculus
  siRNA target sequence for Csmd1 (NM_053171.1,10843-10861).
gaacaagaccaaaagttca

SEQ ID NO: 745806 - DNA, 19 bp, Mus musculus
  siRNA target sequence for Csmd1 (NM_053171.1,10891-10909).
gtaatggacaagcttcatt

SEQ ID NO: 745807 - DNA, 19 bp, Mus musculus
  siRNA target sequence for Csmd1 (NM_053171.1,10917-10935).
cccatgtatgatacaaact

SEQ ID NO: 745808 - DNA, 19 bp, Mus musculus
  siRNA target sequence for Csmd1 (NM_053171.1,10918-10936).
ccatgtatgatacaaactt

SEQ ID NO: 745809 - DNA, 19 bp, Mus musculus
  siRNA target sequence for E230019G03Rik (NM_053178.1,328-346).
cgcaaaccagctccttaat

SEQ ID NO: 745810 - DNA, 19 bp, Mus musculus
  siRNA target sequence for E230019G03Rik (NM_053178.1,329-347).
gcaaaccagctccttaatt

SEQ ID NO: 745811 - DNA, 19 bp, Mus musculus
  siRNA target sequence for E230019G03Rik (NM_053178.1,482-500).
gcgcctggaacctttctgt

SEQ ID NO: 745812 - DNA, 19 bp, Mus musculus
  siRNA target sequence for E230019G03Rik (NM_053178.1,483-501).
cgcctggaacctttctgta

SEQ ID NO: 745813 - DNA, 19 bp, Mus musculus
  siRNA target sequence for E230019G03Rik (NM_053178.1,590-608).
caagtgggagcgtatctct

SEQ ID NO: 745814 - DNA, 19 bp, Mus musculus
  siRNA target sequence for E230019G03Rik (NM_053178.1,595-613).
gggagcgtatctcttacta

SEQ ID NO: 745815 - DNA, 19 bp, Mus musculus
  siRNA target sequence for E230019G03Rik (NM_053178.1,623-641).
cctgattgcacgcaaagta

SEQ ID NO: 745816 - DNA, 19 bp, Mus musculus
  siRNA target sequence for E230019G03Rik (NM_053178.1,687-705).
gcgatccttggcttcaact

SEQ ID NO: 745817 - DNA, 19 bp, Mus musculus
  siRNA target sequence for E230019G03Rik (NM_053178.1,875-893).
gaaagacttgccacatcta

SEQ ID NO: 745818 - DNA, 19 bp, Mus musculus
  siRNA target sequence for E230019G03Rik (NM_053178.1,896-914).
ggcagtggtgatataccaa

SEQ ID NO: 745819 - DNA, 19 bp, Mus musculus
  siRNA target sequence for E230019G03Rik (NM_053178.1,949-967).
cgatggaggagctcataga

SEQ ID NO: 745820 - DNA, 19 bp, Mus musculus
  siRNA target sequence for E230019G03Rik (NM_053178.1,1442-1460).
ccttacctgccctagcaat

SEQ ID NO: 745821 - DNA, 19 bp, Mus musculus
  siRNA target sequence for E230019G03Rik (NM_053178.1,1481-1499).
cagactggcggattaccta

SEQ ID NO: 745822 - DNA, 19 bp, Mus musculus
  siRNA target sequence for E230019G03Rik (NM_053178.1,1487-1505).
ggcggattacctagtgtta

SEQ ID NO: 745823 - DNA, 19 bp, Mus musculus
  siRNA target sequence for E230019G03Rik (NM_053178.1,1777-1795).
ccatcttcatgggttatct

SEQ ID NO: 745824 - DNA, 19 bp, Mus musculus
  siRNA target sequence for E230019G03Rik (NM_053178.1,2262-2280).
caacgtgacttctccattt

SEQ ID NO: 745825 - DNA, 19 bp, Mus musculus
  siRNA target sequence for E230019G03Rik (NM_053178.1,2323-2341).
cggttctggagaagtacaa

SEQ ID NO: 745826 - DNA, 19 bp, Mus musculus
  siRNA target sequence for E230019G03Rik (NM_053178.1,2348-2366).
catcgattctttttatcaa

SEQ ID NO: 745827 - DNA, 19 bp, Mus musculus
  siRNA target sequence for F730007C19Rik (NM_053182.2,641-659).
gctgccgtggccatgttct

SEQ ID NO: 745828 - DNA, 19 bp, Mus musculus
  siRNA target sequence for F730007C19Rik (NM_053182.2,756-774).
cttccgacaaggacatgtt

SEQ ID NO: 745829 - DNA, 19 bp, Mus musculus
  siRNA target sequence for F730007C19Rik (NM_053182.2,1250-1268).
gtggacagaaacaaaaagt

SEQ ID NO: 745830 - DNA, 19 bp, Mus musculus
  siRNA target sequence for F730007C19Rik (NM_053182.2,1335-1353).
ctcctgtcccggttaagct

SEQ ID NO: 745831 - DNA, 19 bp, Mus musculus
  siRNA target sequence for F730007C19Rik (NM_053182.2,1469-1487).
gaagaagacccgactctta

SEQ ID NO: 745832 - DNA, 19 bp, Mus musculus
  siRNA target sequence for F730007C19Rik (NM_053182.2,1604-1622).
cctcagaggtcgtcatctt

SEQ ID NO: 745833 - DNA, 19 bp, Mus musculus
  siRNA target sequence for F730007C19Rik (NM_053182.2,1633-1651).
cctctatgccactgtgaaa

SEQ ID NO: 745834 - DNA, 19 bp, Mus musculus
  siRNA target sequence for F730007C19Rik (NM_053182.2,1735-1753).
catacagactctaaacaga

SEQ ID NO: 745835 - DNA, 19 bp, Mus musculus
  siRNA target sequence for Cnnm3 (NM_053186.1,284-302).
catccactccactttgtct

SEQ ID NO: 745836 - DNA, 19 bp, Mus musculus
  siRNA target sequence for Cnnm3 (NM_053186.1,636-654).
cccgagaggtggatgtgtt

SEQ ID NO: 745837 - DNA, 19 bp, Mus musculus
  siRNA target sequence for Cnnm3 (NM_053186.1,666-684).
gagtctctgagaaagtctt

SEQ ID NO: 745838 - DNA, 19 bp, Mus musculus
  siRNA target sequence for Cnnm3 (NM_053186.1,745-763).
cctggccgcacaccattat

SEQ ID NO: 745839 - DNA, 19 bp, Mus musculus
  siRNA target sequence for Cnnm3 (NM_053186.1,772-790).
gcgcagccagccagtagat

SEQ ID NO: 745840 - DNA, 19 bp, Mus musculus
  siRNA target sequence for Cnnm3 (NM_053186.1,773-791).
cgcagccagccagtagatt

SEQ ID NO: 745841 - DNA, 19 bp, Mus musculus
  siRNA target sequence for Cnnm3 (NM_053186.1,774-792).
gcagccagccagtagatta

SEQ ID NO: 745842 - DNA, 19 bp, Mus musculus
  siRNA target sequence for Cnnm3 (NM_053186.1,777-795).
gccagccagtagattactt

SEQ ID NO: 745843 - DNA, 19 bp, Mus musculus
  siRNA target sequence for Cnnm3 (NM_053186.1,779-797).
cagccagtagattacttca

SEQ ID NO: 745844 - DNA, 19 bp, Mus musculus
  siRNA target sequence for Cnnm3 (NM_053186.1,781-799).
gccagtagattacttcatt

SEQ ID NO: 745845 - DNA, 19 bp, Mus musculus
  siRNA target sequence for Cnnm3 (NM_053186.1,783-801).
cagtagattacttcattct

SEQ ID NO: 745846 - DNA, 19 bp, Mus musculus
  siRNA target sequence for Cnnm3 (NM_053186.1,813-831).
gcagagtcgaggtcgaaat

SEQ ID NO: 745847 - DNA, 19 bp, Mus musculus
  siRNA target sequence for Cnnm3 (NM_053186.1,814-832).
cagagtcgaggtcgaaatt

SEQ ID NO: 745848 - DNA, 19 bp, Mus musculus
  siRNA target sequence for Cnnm3 (NM_053186.1,979-997).
ccgctcctgcacatactgt

SEQ ID NO: 745849 - DNA, 19 bp, Mus musculus
  siRNA target sequence for Cnnm3 (NM_053186.1,1077-1095).
ctacccgagcccaaagctt

SEQ ID NO: 745850 - DNA, 19 bp, Mus musculus
  siRNA target sequence for Ucc1 (NM_053192.1,347-365).
ccaagcagtgctcaaagat

SEQ ID NO: 745851 - DNA, 19 bp, Mus musculus
  siRNA target sequence for Ucc1 (NM_053192.1,483-501).
gtcagctagatcctatgaa

SEQ ID NO: 745852 - DNA, 19 bp, Mus musculus
  siRNA target sequence for Ucc1 (NM_053192.1,541-559).
gtccaggaaacctttacca

SEQ ID NO: 745853 - DNA, 19 bp, Mus musculus
  siRNA target sequence for Ucc1 (NM_053192.1,543-561).
ccaggaaacctttaccata

SEQ ID NO: 745854 - DNA, 19 bp, Mus musculus
  siRNA target sequence for Ucc1 (NM_053192.1,544-562).
caggaaacctttaccataa

SEQ ID NO: 745855 - DNA, 19 bp, Mus musculus
  siRNA target sequence for Ucc1 (NM_053192.1,547-565).
gaaacctttaccataaact

SEQ ID NO: 745856 - DNA, 19 bp, Mus musculus
  siRNA target sequence for Ucc1 (NM_053192.1,595-613).
gacatccagctgggtatta

SEQ ID NO: 745857 - DNA, 19 bp, Mus musculus
  siRNA target sequence for AI114950 (NM_053194.2,150-168).
gaagagactcgcaaagcta

SEQ ID NO: 745858 - DNA, 19 bp, Mus musculus
  siRNA target sequence for AI114950 (NM_053194.2,222-240).
gcagactatccgaatccta

SEQ ID NO: 745859 - DNA, 19 bp, Mus musculus
  siRNA target sequence for AI114950 (NM_053194.2,223-241).
cagactatccgaatcctat

SEQ ID NO: 745860 - DNA, 19 bp, Mus musculus
  siRNA target sequence for AI114950 (NM_053194.2,273-291).
cagccgccagagcttacat

SEQ ID NO: 745861 - DNA, 19 bp, Mus musculus
  siRNA target sequence for AI114950 (NM_053194.2,298-316).
gcctgctatgctgacatta

SEQ ID NO: 745862 - DNA, 19 bp, Mus musculus
  siRNA target sequence for AI114950 (NM_053194.2,375-393).
caaatgcctgtgtaatctt

SEQ ID NO: 745863 - DNA, 19 bp, Mus musculus
  siRNA target sequence for AI114950 (NM_053194.2,491-509).
cccacgaagtccagttctt

SEQ ID NO: 745864 - DNA, 19 bp, Mus musculus
  siRNA target sequence for AI114950 (NM_053194.2,492-510).
ccacgaagtccagttcttt

SEQ ID NO: 745865 - DNA, 19 bp, Mus musculus
  siRNA target sequence for AI114950 (NM_053194.2,691-709).
ctcaaagtgctctttaata

SEQ ID NO: 745866 - DNA, 19 bp, Mus musculus
  siRNA target sequence for AI114950 (NM_053194.2,904-922).
cacgaaggatccttagagt

SEQ ID NO: 745867 - DNA, 19 bp, Mus musculus
  siRNA target sequence for AI114950 (NM_053194.2,919-937).
gagttcatgggagttaaca

SEQ ID NO: 745868 - DNA, 19 bp, Mus musculus
  siRNA target sequence for AI114950 (NM_053194.2,1021-1039).
ctgaacgtgttgacagaat

SEQ ID NO: 745869 - DNA, 19 bp, Mus musculus
  siRNA target sequence for AI114950 (NM_053194.2,1161-1179).
gacacacctggatacagat

SEQ ID NO: 745870 - DNA, 19 bp, Mus musculus
  siRNA target sequence for AI114950 (NM_053194.2,1197-1215).
cgagttcctctttgtctta

SEQ ID NO: 745871 - DNA, 19 bp, Mus musculus
  siRNA target sequence for AI114950 (NM_053194.2,1198-1216).
gagttcctctttgtcttat

SEQ ID NO: 745872 - DNA, 19 bp, Mus musculus
  siRNA target sequence for AI114950 (NM_053194.2,1226-1244).
gtgtgccccgattcatcaa

SEQ ID NO: 745873 - DNA, 19 bp, Mus musculus
  siRNA target sequence for AI114950 (NM_053194.2,1228-1246).
gtgccccgattcatcaagt

SEQ ID NO: 745874 - DNA, 19 bp, Mus musculus
  siRNA target sequence for AI114950 (NM_053194.2,1231-1249).
ccccgattcatcaagtaca

SEQ ID NO: 745875 - DNA, 19 bp, Mus musculus
  siRNA target sequence for AI114950 (NM_053194.2,1401-1419).
ggagaagccgcctaatcct

SEQ ID NO: 745876 - DNA, 19 bp, Mus musculus
  siRNA target sequence for AI114950 (NM_053194.2,1407-1425).
gccgcctaatcctatggaa

SEQ ID NO: 745877 - DNA, 19 bp, Mus musculus
  siRNA target sequence for Necl1 (NM_053199.2,248-266).
ctggacatctgatgaaaca

SEQ ID NO: 745878 - DNA, 19 bp, Mus musculus
  siRNA target sequence for Necl1 (NM_053199.2,250-268).
ggacatctgatgaaacagt

SEQ ID NO: 745879 - DNA, 19 bp, Mus musculus
  siRNA target sequence for Necl1 (NM_053199.2,345-363).
gctcagcagaccctatact

SEQ ID NO: 745880 - DNA, 19 bp, Mus musculus
  siRNA target sequence for Necl1 (NM_053199.2,475-493).
cgtgctccatcttcactat

SEQ ID NO: 745881 - DNA, 19 bp, Mus musculus
  siRNA target sequence for Necl1 (NM_053199.2,546-564).
cccataatcactggttata

SEQ ID NO: 745882 - DNA, 19 bp, Mus musculus
  siRNA target sequence for Necl1 (NM_053199.2,584-602).
ggagacagccactctaaat

SEQ ID NO: 745883 - DNA, 19 bp, Mus musculus
  siRNA target sequence for Necl1 (NM_053199.2,585-603).
gagacagccactctaaatt

SEQ ID NO: 745884 - DNA, 19 bp, Mus musculus
  siRNA target sequence for Necl1 (NM_053199.2,587-605).
gacagccactctaaattgt

SEQ ID NO: 745885 - DNA, 19 bp, Mus musculus
  siRNA target sequence for Necl1 (NM_053199.2,589-607).
cagccactctaaattgtca

SEQ ID NO: 745886 - DNA, 19 bp, Mus musculus
  siRNA target sequence for Necl1 (NM_053199.2,693-711).
gatcccaacgggaaaacct

SEQ ID NO: 745887 - DNA, 19 bp, Mus musculus
  siRNA target sequence for Necl1 (NM_053199.2,778-796).
ctgtgaaccatgaatctct

SEQ ID NO: 745888 - DNA, 19 bp, Mus musculus
  siRNA target sequence for Necl1 (NM_053199.2,815-833).
cacttctcagcgcattgaa

SEQ ID NO: 745889 - DNA, 19 bp, Mus musculus
  siRNA target sequence for Necl1 (NM_053199.2,817-835).
cttctcagcgcattgaagt

SEQ ID NO: 745890 - DNA, 19 bp, Mus musculus
  siRNA target sequence for Necl1 (NM_053199.2,820-838).
ctcagcgcattgaagtgtt

SEQ ID NO: 745891 - DNA, 19 bp, Mus musculus
  siRNA target sequence for Necl1 (NM_053199.2,822-840).
cagcgcattgaagtgttat

SEQ ID NO: 745892 - DNA, 19 bp, Mus musculus
  siRNA target sequence for Necl1 (NM_053199.2,889-907).
gccagaagctgttgttaca

SEQ ID NO: 745893 - DNA, 19 bp, Mus musculus
  siRNA target sequence for Necl1 (NM_053199.2,941-959).
gtacgtgtgggtaaaggaa

SEQ ID NO: 745894 - DNA, 19 bp, Mus musculus
  siRNA target sequence for Necl1 (NM_053199.2,964-982).
gtgagccacccctcaagat

SEQ ID NO: 745895 - DNA, 19 bp, Mus musculus
  siRNA target sequence for Necl1 (NM_053199.2,966-984).
gagccacccctcaagatga

SEQ ID NO: 745896 - DNA, 19 bp, Mus musculus
  siRNA target sequence for Necl1 (NM_053199.2,1150-1168).
gagggattgtggctttcat

SEQ ID NO: 745897 - DNA, 19 bp, Mus musculus
  siRNA target sequence for Necl1 (NM_053199.2,1179-1197).
ctgctcattctgctcattt

SEQ ID NO: 745898 - DNA, 19 bp, Mus musculus
  siRNA target sequence for Necl1 (NM_053199.2,1193-1211).
cattttccttggacactat

SEQ ID NO: 745899 - DNA, 19 bp, Mus musculus
  siRNA target sequence for Necl1 (NM_053199.2,1275-1293).
gcggatacggccatcatca

SEQ ID NO: 745900 - DNA, 19 bp, Mus musculus
  siRNA target sequence for Necl1 (NM_053199.2,1276-1294).
cggatacggccatcatcaa

SEQ ID NO: 745901 - DNA, 19 bp, Mus musculus
  siRNA target sequence for Magee1 (NM_053201.2,790-808).
cggagggaccgggtatcaa

SEQ ID NO: 745902 - DNA, 19 bp, Mus musculus
  siRNA target sequence for Magee1 (NM_053201.2,851-869).
gcccactgactctaatgga

SEQ ID NO: 745903 - DNA, 19 bp, Mus musculus
  siRNA target sequence for Magee1 (NM_053201.2,935-953).
ggaggaacccgacatcttt

SEQ ID NO: 745904 - DNA, 19 bp, Mus musculus
  siRNA target sequence for Magee1 (NM_053201.2,1022-1040).
ctgggtgtcgcccatcata

SEQ ID NO: 745905 - DNA, 19 bp, Mus musculus
  siRNA target sequence for Magee1 (NM_053201.2,1024-1042).
gggtgtcgcccatcataat

SEQ ID NO: 745906 - DNA, 19 bp, Mus musculus
  siRNA target sequence for Magee1 (NM_053201.2,1148-1166).
ctcgtccctgtcatccatt

SEQ ID NO: 745907 - DNA, 19 bp, Mus musculus
  siRNA target sequence for Magee1 (NM_053201.2,1330-1348).
ggatgcccactgaagctaa

SEQ ID NO: 745908 - DNA, 19 bp, Mus musculus
  siRNA target sequence for Magee1 (NM_053201.2,1331-1349).
gatgcccactgaagctaat

SEQ ID NO: 745909 - DNA, 19 bp, Mus musculus
  siRNA target sequence for Magee1 (NM_053201.2,1483-1501).
gagacagtaagaattccaa

SEQ ID NO: 745910 - DNA, 19 bp, Mus musculus
  siRNA target sequence for Magee1 (NM_053201.2,1531-1549).
cccgcgttgctcttacctt

SEQ ID NO: 745911 - DNA, 19 bp, Mus musculus
  siRNA target sequence for Magee1 (NM_053201.2,1625-1643).
ccctatcaaggaatctgat

SEQ ID NO: 745912 - DNA, 19 bp, Mus musculus
  siRNA target sequence for Magee1 (NM_053201.2,1626-1644).
cctatcaaggaatctgata

SEQ ID NO: 745913 - DNA, 19 bp, Mus musculus
  siRNA target sequence for Magee1 (NM_053201.2,1718-1736).
gtgcatttttcggtttgaa

SEQ ID NO: 745914 - DNA, 19 bp, Mus musculus
  siRNA target sequence for Magee1 (NM_053201.2,1720-1738).
gcatttttcggtttgaact

SEQ ID NO: 745915 - DNA, 19 bp, Mus musculus
  siRNA target sequence for Magee1 (NM_053201.2,1796-1814).
gccctttgaagggttagaa

SEQ ID NO: 745916 - DNA, 19 bp, Mus musculus
  siRNA target sequence for Magee1 (NM_053201.2,1838-1856).
gggcctcttgatgatgatt

SEQ ID NO: 745917 - DNA, 19 bp, Mus musculus
  siRNA target sequence for Magee1 (NM_053201.2,1859-1877).
gggacacatattactaaat

SEQ ID NO: 745918 - DNA, 19 bp, Mus musculus
  siRNA target sequence for Magee1 (NM_053201.2,1887-1905).
gcgagagaagctgatatct

SEQ ID NO: 745919 - DNA, 19 bp, Mus musculus
  siRNA target sequence for Magee1 (NM_053201.2,1925-1943).
cggagtgcagcgtgaaaga

SEQ ID NO: 745920 - DNA, 19 bp, Mus musculus
  siRNA target sequence for Magee1 (NM_053201.2,1936-1954).
gtgaaagaaggctttctgt

SEQ ID NO: 745921 - DNA, 19 bp, Mus musculus
  siRNA target sequence for Magee1 (NM_053201.2,1998-2016).
cagcgttacttggactata

SEQ ID NO: 745922 - DNA, 19 bp, Mus musculus
  siRNA target sequence for Magee1 (NM_053201.2,2009-2027).
ggactataggccactaact

SEQ ID NO: 745923 - DNA, 19 bp, Mus musculus
  siRNA target sequence for Magee1 (NM_053201.2,2032-2050).
gtgtgccagtcgagtatga

SEQ ID NO: 745924 - DNA, 19 bp, Mus musculus
  siRNA target sequence for Magee1 (NM_053201.2,2034-2052).
gtgccagtcgagtatgagt

SEQ ID NO: 745925 - DNA, 19 bp, Mus musculus
  siRNA target sequence for Magee1 (NM_053201.2,2036-2054).
gccagtcgagtatgagttt

SEQ ID NO: 745926 - DNA, 19 bp, Mus musculus
  siRNA target sequence for Magee1 (NM_053201.2,2038-2056).
cagtcgagtatgagtttta

SEQ ID NO: 745927 - DNA, 19 bp, Mus musculus
  siRNA target sequence for Magee1 (NM_053201.2,2040-2058).
gtcgagtatgagttttact

SEQ ID NO: 745928 - DNA, 19 bp, Mus musculus
  siRNA target sequence for Magee1 (NM_053201.2,2204-2222).
cagagttgctcgtccattt

SEQ ID NO: 745929 - DNA, 19 bp, Mus musculus
  siRNA target sequence for Magee1 (NM_053201.2,2208-2226).
gttgctcgtccatttagga

SEQ ID NO: 745930 - DNA, 19 bp, Mus musculus
  siRNA target sequence for Magee1 (NM_053201.2,2293-2311).
ggcctgagtcaagattaga

SEQ ID NO: 745931 - DNA, 19 bp, Mus musculus
  siRNA target sequence for Magee1 (NM_053201.2,2323-2341).
ggaaattggtccagttatt

SEQ ID NO: 745932 - DNA, 19 bp, Mus musculus
  siRNA target sequence for Magee1 (NM_053201.2,2359-2377).
ctaagctgcctataccaaa

SEQ ID NO: 745933 - DNA, 19 bp, Mus musculus
  siRNA target sequence for Magee1 (NM_053201.2,2403-2421).
cgagagtgcaccaaagtgt

SEQ ID NO: 745934 - DNA, 19 bp, Mus musculus
  siRNA target sequence for Magee1 (NM_053201.2,2443-2461).
ctgctcgcaccctaaacca

SEQ ID NO: 745935 - DNA, 19 bp, Mus musculus
  siRNA target sequence for Magee1 (NM_053201.2,2513-2531).
cctgtacaaccgaagagaa

SEQ ID NO: 745936 - DNA, 19 bp, Mus musculus
  siRNA target sequence for Magee1 (NM_053201.2,2575-2593).
gcaacaatttcttaatgca

SEQ ID NO: 745937 - DNA, 19 bp, Mus musculus
  siRNA target sequence for Magee1 (NM_053201.2,2640-2658).
gcagtctgggcctttctaa

SEQ ID NO: 745938 - DNA, 19 bp, Mus musculus
  siRNA target sequence for Magee1 (NM_053201.2,2747-2765).
cagtgatccggtgcaatat

SEQ ID NO: 745939 - DNA, 19 bp, Mus musculus
  siRNA target sequence for Magee1 (NM_053201.2,2751-2769).
gatccggtgcaatatgatt

SEQ ID NO: 745940 - DNA, 19 bp, Mus musculus
  siRNA target sequence for Magee1 (NM_053201.2,2755-2773).
cggtgcaatatgattttgt

SEQ ID NO: 745941 - DNA, 19 bp, Mus musculus
  siRNA target sequence for Magee1 (NM_053201.2,2756-2774).
ggtgcaatatgattttgta

SEQ ID NO: 745942 - DNA, 19 bp, Mus musculus
  siRNA target sequence for Rab6ip2 (NM_053204.1,643-661).
ggtcatcggcgaacaaata

SEQ ID NO: 745943 - DNA, 19 bp, Mus musculus
  siRNA target sequence for Rab6ip2 (NM_053204.1,646-664).
catcggcgaacaaatagta

SEQ ID NO: 745944 - DNA, 19 bp, Mus musculus
  siRNA target sequence for Rab6ip2 (NM_053204.1,723-741).
gaatatacagtccttaaat

SEQ ID NO: 745945 - DNA, 19 bp, Mus musculus
  siRNA target sequence for Rab6ip2 (NM_053204.1,761-779).
gccctatgtacctaagtga

SEQ ID NO: 745946 - DNA, 19 bp, Mus musculus
  siRNA target sequence for Rab6ip2 (NM_053204.1,792-810).
gggtgcagaaacacctaaa

SEQ ID NO: 745947 - DNA, 19 bp, Mus musculus
  siRNA target sequence for Rab6ip2 (NM_053204.1,793-811).
ggtgcagaaacacctaaaa

SEQ ID NO: 745948 - DNA, 19 bp, Mus musculus
  siRNA target sequence for Rab6ip2 (NM_053204.1,907-925).
gctagtgataccatagcat

SEQ ID NO: 745949 - DNA, 19 bp, Mus musculus
  siRNA target sequence for Rab6ip2 (NM_053204.1,908-926).
ctagtgataccatagcatt

SEQ ID NO: 745950 - DNA, 19 bp, Mus musculus
  siRNA target sequence for Rab6ip2 (NM_053204.1,918-936).
catagcatttggagaacat

SEQ ID NO: 745951 - DNA, 19 bp, Mus musculus
  siRNA target sequence for Rab6ip2 (NM_053204.1,937-955).
cacctccctcctgttagta

SEQ ID NO: 745952 - DNA, 19 bp, Mus musculus
  siRNA target sequence for Rab6ip2 (NM_053204.1,979-997).
cttcgtcaggcaagagata

SEQ ID NO: 745953 - DNA, 19 bp, Mus musculus
  siRNA target sequence for Rab6ip2 (NM_053204.1,982-1000).
cgtcaggcaagagataaca

SEQ ID NO: 745954 - DNA, 19 bp, Mus musculus
  siRNA target sequence for Rab6ip2 (NM_053204.1,1047-1065).
cgatcttttgaggaaagat

SEQ ID NO: 745955 - DNA, 19 bp, Mus musculus
  siRNA target sequence for Rab6ip2 (NM_053204.1,1069-1087).
gaagtaaaggagagcaaat

SEQ ID NO: 745956 - DNA, 19 bp, Mus musculus
  siRNA target sequence for Rab6ip2 (NM_053204.1,1091-1109).
gttcatcaatgaatagtat

SEQ ID NO: 745957 - DNA, 19 bp, Mus musculus
  siRNA target sequence for Rab6ip2 (NM_053204.1,1165-1183).
gcttccaaaatcaccattt

SEQ ID NO: 745958 - DNA, 19 bp, Mus musculus
  siRNA target sequence for Rab6ip2 (NM_053204.1,1188-1206).
ggagcagtaccgagttgta

SEQ ID NO: 745959 - DNA, 19 bp, Mus musculus
  siRNA target sequence for Rab6ip2 (NM_053204.1,1199-1217).
gagttgtacaggaggaaaa

SEQ ID NO: 745960 - DNA, 19 bp, Mus musculus
  siRNA target sequence for Rab6ip2 (NM_053204.1,1263-1281).
gatccagagggacttgaat

SEQ ID NO: 745961 - DNA, 19 bp, Mus musculus
  siRNA target sequence for Rab6ip2 (NM_053204.1,1465-1483).
cgggatgagtccatcaaga

SEQ ID NO: 745962 - DNA, 19 bp, Mus musculus
  siRNA target sequence for Rab6ip2 (NM_053204.1,1638-1656).
ggagatgcaccggagattt

SEQ ID NO: 745963 - DNA, 19 bp, Mus musculus
  siRNA target sequence for Rab6ip2 (NM_053204.1,1641-1659).
gatgcaccggagatttgaa

SEQ ID NO: 745964 - DNA, 19 bp, Mus musculus
  siRNA target sequence for Rab6ip2 (NM_053204.1,1644-1662).
gcaccggagatttgaaaat

SEQ ID NO: 745965 - DNA, 19 bp, Mus musculus
  siRNA target sequence for Rab6ip2 (NM_053204.1,1839-1857).
caggagccactcaaagttt

SEQ ID NO: 745966 - DNA, 19 bp, Mus musculus
  siRNA target sequence for Rab6ip2 (NM_053204.1,1884-1902).
ggaggagctaagttcgaaa

SEQ ID NO: 745967 - DNA, 19 bp, Mus musculus
  siRNA target sequence for Rab6ip2 (NM_053204.1,1887-1905).
ggagctaagttcgaaagat

SEQ ID NO: 745968 - DNA, 19 bp, Mus musculus
  siRNA target sequence for Rab6ip2 (NM_053204.1,2020-2038).
gaaactctcacgaaccaat

SEQ ID NO: 745969 - DNA, 19 bp, Mus musculus
  siRNA target sequence for Rab6ip2 (NM_053204.1,2042-2060).
cagacagtaagcaacatat

SEQ ID NO: 745970 - DNA, 19 bp, Mus musculus
  siRNA target sequence for Rab6ip2 (NM_053204.1,2134-2152).
cgattgcgtttggaagaaa

SEQ ID NO: 745971 - DNA, 19 bp, Mus musculus
  siRNA target sequence for Rab6ip2 (NM_053204.1,2155-2173).
gagactatgctgaataaaa

SEQ ID NO: 745972 - DNA, 19 bp, Mus musculus
  siRNA target sequence for Rab6ip2 (NM_053204.1,2177-2195).
ccaagcaaatccaagatat

SEQ ID NO: 745973 - DNA, 19 bp, Mus musculus
  siRNA target sequence for Rab6ip2 (NM_053204.1,2365-2383).
caggcggacaccactaaca

SEQ ID NO: 745974 - DNA, 19 bp, Mus musculus
  siRNA target sequence for Rab6ip2 (NM_053204.1,2367-2385).
ggcggacaccactaacaca

SEQ ID NO: 745975 - DNA, 19 bp, Mus musculus
  siRNA target sequence for Rab6ip2 (NM_053204.1,2490-2508).
gattgatacctacaaaaaa

SEQ ID NO: 745976 - DNA, 19 bp, Mus musculus
  siRNA target sequence for Rab6ip2 (NM_053204.1,2635-2653).
cggctcaagaccctagaaa

SEQ ID NO: 745977 - DNA, 19 bp, Mus musculus
  siRNA target sequence for Rab6ip2 (NM_053204.1,2636-2654).
ggctcaagaccctagaaat

SEQ ID NO: 745978 - DNA, 19 bp, Mus musculus
  siRNA target sequence for Rab6ip2 (NM_053204.1,2637-2655).
gctcaagaccctagaaatt

SEQ ID NO: 745979 - DNA, 19 bp, Mus musculus
  siRNA target sequence for Rab6ip2 (NM_053204.1,2640-2658).
caagaccctagaaattgct

SEQ ID NO: 745980 - DNA, 19 bp, Mus musculus
  siRNA target sequence for Rab6ip2 (NM_053204.1,2712-2730).
gcatgaagcaacattggaa

SEQ ID NO: 745981 - DNA, 19 bp, Mus musculus
  siRNA target sequence for Rab6ip2 (NM_053204.1,2753-2771).
gtgaccgaatacagcaatt

SEQ ID NO: 745982 - DNA, 19 bp, Mus musculus
  siRNA target sequence for Rab6ip2 (NM_053204.1,2781-2799).
gatttccaggtacaaagat

SEQ ID NO: 745983 - DNA, 19 bp, Mus musculus
  siRNA target sequence for Rab6ip2 (NM_053204.1,2824-2842).
gttgaccgtctcttggaaa

SEQ ID NO: 745984 - DNA, 19 bp, Mus musculus
  siRNA target sequence for Rab6ip2 (NM_053204.1,2827-2845).
gaccgtctcttggaaatct

SEQ ID NO: 745985 - DNA, 19 bp, Mus musculus
  siRNA target sequence for Rab6ip2 (NM_053204.1,2830-2848).
cgtctcttggaaatcttga

SEQ ID NO: 745986 - DNA, 19 bp, Mus musculus
  siRNA target sequence for Rab6ip2 (NM_053204.1,2831-2849).
gtctcttggaaatcttgaa

SEQ ID NO: 745987 - DNA, 19 bp, Mus musculus
  siRNA target sequence for Rab6ip2 (NM_053204.1,3226-3244).
ctggagtccatgaaagcta

SEQ ID NO: 745988 - DNA, 19 bp, Mus musculus
  siRNA target sequence for Rab6ip2 (NM_053204.1,3279-3297).
ggagacgcacctaaccaat

SEQ ID NO: 745989 - DNA, 19 bp, Mus musculus
  siRNA target sequence for Rab6ip2 (NM_053204.1,3371-3389).
gtgaaaaggatgctaacat

SEQ ID NO: 745990 - DNA, 19 bp, Mus musculus
  siRNA target sequence for Rab6ip2 (NM_053204.1,3443-3461).
cactgaaacgggaaaagga

SEQ ID NO: 745991 - DNA, 19 bp, Mus musculus
  siRNA target sequence for Rab6ip2 (NM_053204.1,3554-3572).
ccaatcagacgaaccataa

SEQ ID NO: 745992 - DNA, 19 bp, Mus musculus
  siRNA target sequence for Rab6ip2 (NM_053204.1,3555-3573).
caatcagacgaaccataaa

SEQ ID NO: 745993 - DNA, 19 bp, Mus musculus
  siRNA target sequence for Rab6ip2 (NM_053204.1,3615-3633).
ccaaaatagaagcaagtta

SEQ ID NO: 745994 - DNA, 19 bp, Mus musculus
  siRNA target sequence for Rab6ip2 (NM_053204.1,3623-3641).
gaagcaagttaaagttgta

SEQ ID NO: 745995 - DNA, 19 bp, Mus musculus
  siRNA target sequence for Rab6ip2 (NM_053204.1,3630-3648).
gttaaagttgtatattgga

SEQ ID NO: 745996 - DNA, 19 bp, Mus musculus
  siRNA target sequence for Rab6ip2 (NM_053204.1,3699-3717).
cactccaccagcttcttat

SEQ ID NO: 745997 - DNA, 19 bp, Mus musculus
  siRNA target sequence for Rab6ip2 (NM_053204.1,3786-3804).
cgagttggagaaagttgaa

SEQ ID NO: 745998 - DNA, 19 bp, Mus musculus
  siRNA target sequence for Rab6ip2 (NM_053204.1,3869-3887).
ctgacatcctcgaacaagt

SEQ ID NO: 745999 - DNA, 19 bp, Mus musculus
  siRNA target sequence for Tar1 (NM_053205.1,11-29).
gccacgctatcacaaacat

SEQ ID NO: 746000 - DNA, 19 bp, Mus musculus
  siRNA target sequence for Tar1 (NM_053205.1,12-30).
ccacgctatcacaaacatt

SEQ ID NO: 746001 - DNA, 19 bp, Mus musculus
  siRNA target sequence for Tar1 (NM_053205.1,42-60).
cagcgactggtcaagagaa

SEQ ID NO: 746002 - DNA, 19 bp, Mus musculus
  siRNA target sequence for Tar1 (NM_053205.1,68-86).
cttccctgtacagcttaat

SEQ ID NO: 746003 - DNA, 19 bp, Mus musculus
  siRNA target sequence for Tar1 (NM_053205.1,80-98).
gcttaatgtcactcataat

SEQ ID NO: 746004 - DNA, 19 bp, Mus musculus
  siRNA target sequence for Tar1 (NM_053205.1,105-123).
cactctggttggcaactta

SEQ ID NO: 746005 - DNA, 19 bp, Mus musculus
  siRNA target sequence for Tar1 (NM_053205.1,111-129).
ggttggcaacttaatagta

SEQ ID NO: 746006 - DNA, 19 bp, Mus musculus
  siRNA target sequence for Tar1 (NM_053205.1,112-130).
gttggcaacttaatagtaa

SEQ ID NO: 746007 - DNA, 19 bp, Mus musculus
  siRNA target sequence for Tar1 (NM_053205.1,115-133).
ggcaacttaatagtaataa

SEQ ID NO: 746008 - DNA, 19 bp, Mus musculus
  siRNA target sequence for Tar1 (NM_053205.1,116-134).
gcaacttaatagtaataat

SEQ ID NO: 746009 - DNA, 19 bp, Mus musculus
  siRNA target sequence for Tar1 (NM_053205.1,144-162).
ccatttcaagcaacttcat

SEQ ID NO: 746010 - DNA, 19 bp, Mus musculus
  siRNA target sequence for Tar1 (NM_053205.1,145-163).
catttcaagcaacttcata

SEQ ID NO: 746011 - DNA, 19 bp, Mus musculus
  siRNA target sequence for Tar1 (NM_053205.1,208-226).
ctgctgggctgtctgataa

SEQ ID NO: 746012 - DNA, 19 bp, Mus musculus
  siRNA target sequence for Tar1 (NM_053205.1,272-290).
gggaaatcctctgtaaagt

SEQ ID NO: 746013 - DNA, 19 bp, Mus musculus
  siRNA target sequence for Tar1 (NM_053205.1,273-291).
ggaaatcctctgtaaagtt

SEQ ID NO: 746014 - DNA, 19 bp, Mus musculus
  siRNA target sequence for Tar1 (NM_053205.1,402-420).
caatatctccactattctt

SEQ ID NO: 746015 - DNA, 19 bp, Mus musculus
  siRNA target sequence for Tar1 (NM_053205.1,410-428).
ccactattcttgtgatgat

SEQ ID NO: 746016 - DNA, 19 bp, Mus musculus
  siRNA target sequence for Tar1 (NM_053205.1,542-560).
gttctcccttctttagtaa

SEQ ID NO: 746017 - DNA, 19 bp, Mus musculus
  siRNA target sequence for Tar1 (NM_053205.1,545-563).
ctcccttctttagtaaagt

SEQ ID NO: 746018 - DNA, 19 bp, Mus musculus
  siRNA target sequence for Tar1 (NM_053205.1,571-589).
gtactggcgttcatgactt

SEQ ID NO: 746019 - DNA, 19 bp, Mus musculus
  siRNA target sequence for Tar1 (NM_053205.1,582-600).
catgacttccttctatata

SEQ ID NO: 746020 - DNA, 19 bp, Mus musculus
  siRNA target sequence for Tar1 (NM_053205.1,585-603).
gacttccttctatatacct

SEQ ID NO: 746021 - DNA, 19 bp, Mus musculus
  siRNA target sequence for Tar1 (NM_053205.1,594-612).
ctatatacctggatctgtt

SEQ ID NO: 746022 - DNA, 19 bp, Mus musculus
  siRNA target sequence for Tar1 (NM_053205.1,601-619).
cctggatctgttatgttat

SEQ ID NO: 746023 - DNA, 19 bp, Mus musculus
  siRNA target sequence for Tar1 (NM_053205.1,602-620).
ctggatctgttatgttatt

SEQ ID NO: 746024 - DNA, 19 bp, Mus musculus
  siRNA target sequence for Tar1 (NM_053205.1,653-671).
gacaagcaaggtcaatcaa

SEQ ID NO: 746025 - DNA, 19 bp, Mus musculus
  siRNA target sequence for Tar1 (NM_053205.1,658-676).
gcaaggtcaatcaatcgta

SEQ ID NO: 746026 - DNA, 19 bp, Mus musculus
  siRNA target sequence for Tar1 (NM_053205.1,663-681).
gtcaatcaatcgtacgaat

SEQ ID NO: 746027 - DNA, 19 bp, Mus musculus
  siRNA target sequence for Tar1 (NM_053205.1,669-687).
caatcgtacgaatgttcaa

SEQ ID NO: 746028 - DNA, 19 bp, Mus musculus
  siRNA target sequence for Tar1 (NM_053205.1,677-695).
cgaatgttcaagttggatt

SEQ ID NO: 746029 - DNA, 19 bp, Mus musculus
  siRNA target sequence for Tar1 (NM_053205.1,844-862).
ctgaatgacgcactgtatt

SEQ ID NO: 746030 - DNA, 19 bp, Mus musculus
  siRNA target sequence for Tar1 (NM_053205.1,883-901).
gccctcaatccgatggttt

SEQ ID NO: 746031 - DNA, 19 bp, Mus musculus
  siRNA target sequence for Tar1 (NM_053205.1,884-902).
ccctcaatccgatggttta

SEQ ID NO: 746032 - DNA, 19 bp, Mus musculus
  siRNA target sequence for Tar1 (NM_053205.1,897-915).
ggtttatgcctttttctat

SEQ ID NO: 746033 - DNA, 19 bp, Mus musculus
  siRNA target sequence for Tar1 (NM_053205.1,939-957).
gatggttctccttggtaaa

SEQ ID NO: 746034 - DNA, 19 bp, Mus musculus
  siRNA target sequence for Tar1 (NM_053205.1,942-960).
ggttctccttggtaaaatt

SEQ ID NO: 746035 - DNA, 19 bp, Mus musculus
  siRNA target sequence for Tar1 (NM_053205.1,948-966).
ccttggtaaaattttccaa

SEQ ID NO: 746036 - DNA, 19 bp, Mus musculus
  siRNA target sequence for Egln1 (NM_053207.1,70-88).
cgttgataacccaaatgga

SEQ ID NO: 746037 - DNA, 19 bp, Mus musculus
  siRNA target sequence for Egln1 (NM_053207.1,92-110).
ggaagatgcgtgacatgta

SEQ ID NO: 746038 - DNA, 19 bp, Mus musculus
  siRNA target sequence for Egln1 (NM_053207.1,96-114).
gatgcgtgacatgtatata

SEQ ID NO: 746039 - DNA, 19 bp, Mus musculus
  siRNA target sequence for Egln1 (NM_053207.1,128-146).
gactgggacgccaaggtaa

SEQ ID NO: 746040 - DNA, 19 bp, Mus musculus
  siRNA target sequence for Egln1 (NM_053207.1,139-157).
caaggtaagtggaggtatt

SEQ ID NO: 746041 - DNA, 19 bp, Mus musculus
  siRNA target sequence for Egln1 (NM_053207.1,147-165).
gtggaggtattcttcgaat

SEQ ID NO: 746042 - DNA, 19 bp, Mus musculus
  siRNA target sequence for Egln1 (NM_053207.1,149-167).
ggaggtattcttcgaattt

SEQ ID NO: 746043 - DNA, 19 bp, Mus musculus
  siRNA target sequence for Egln1 (NM_053207.1,150-168).
gaggtattcttcgaatttt

SEQ ID NO: 746044 - DNA, 19 bp, Mus musculus
  siRNA target sequence for Egln1 (NM_053207.1,240-258).
ggcgtaaccctcatgaagt

SEQ ID NO: 746045 - DNA, 19 bp, Mus musculus
  siRNA target sequence for Egln1 (NM_053207.1,241-259).
gcgtaaccctcatgaagta

SEQ ID NO: 746046 - DNA, 19 bp, Mus musculus
  siRNA target sequence for Egln1 (NM_053207.1,274-292).
cacaaggtacgcaataact

SEQ ID NO: 746047 - DNA, 19 bp, Mus musculus
  siRNA target sequence for Egln1 (NM_053207.1,276-294).
caaggtacgcaataactgt

SEQ ID NO: 746048 - DNA, 19 bp, Mus musculus
  siRNA target sequence for Egln1 (NM_053207.1,283-301).
cgcaataactgtttggtat

SEQ ID NO: 746049 - DNA, 19 bp, Mus musculus
  siRNA target sequence for Egln1 (NM_053207.1,284-302).
gcaataactgtttggtatt

SEQ ID NO: 746050 - DNA, 19 bp, Mus musculus
  siRNA target sequence for Egln1 (NM_053207.1,316-334).
gcgagcgagagctaaagta

SEQ ID NO: 746051 - DNA, 19 bp, Mus musculus
  siRNA target sequence for Egln1 (NM_053207.1,317-335).
cgagcgagagctaaagtaa

SEQ ID NO: 746052 - DNA, 19 bp, Mus musculus
  siRNA target sequence for Egln1 (NM_053207.1,318-336).
gagcgagagctaaagtaaa

SEQ ID NO: 746053 - DNA, 19 bp, Mus musculus
  siRNA target sequence for Egln1 (NM_053207.1,320-338).
gcgagagctaaagtaaaat

SEQ ID NO: 746054 - DNA, 19 bp, Mus musculus
  siRNA target sequence for Egln1 (NM_053207.1,321-339).
cgagagctaaagtaaaata

SEQ ID NO: 746055 - DNA, 19 bp, Mus musculus
  siRNA target sequence for Egln1 (NM_053207.1,322-340).
gagagctaaagtaaaatat

SEQ ID NO: 746056 - DNA, 19 bp, Mus musculus
  siRNA target sequence for Egln1 (NM_053207.1,324-342).
gagctaaagtaaaatatct

SEQ ID NO: 746057 - DNA, 19 bp, Mus musculus
  siRNA target sequence for 1700102P08Rik (NM_053216.1,204-222).
ctctgctgccccatactct

SEQ ID NO: 746058 - DNA, 19 bp, Mus musculus
  siRNA target sequence for 1700102P08Rik (NM_053216.1,268-286).
caccatattccggttaatt

SEQ ID NO: 746059 - DNA, 19 bp, Mus musculus
  siRNA target sequence for 1700102P08Rik (NM_053216.1,271-289).
catattccggttaattcaa

SEQ ID NO: 746060 - DNA, 19 bp, Mus musculus
  siRNA target sequence for 1700102P08Rik (NM_053216.1,278-296).
cggttaattcaaaacttca

SEQ ID NO: 746061 - DNA, 19 bp, Mus musculus
  siRNA target sequence for 1700102P08Rik (NM_053216.1,301-319).
cctctataccccaaaagga

SEQ ID NO: 746062 - DNA, 19 bp, Mus musculus
  siRNA target sequence for 1700102P08Rik (NM_053216.1,323-341).
ctctgaccagcaaggaaaa

SEQ ID NO: 746063 - DNA, 19 bp, Mus musculus
  siRNA target sequence for 1700102P08Rik (NM_053216.1,366-384).
ggcacgtgacagacagttt

SEQ ID NO: 746064 - DNA, 19 bp, Mus musculus
  siRNA target sequence for 1700102P08Rik (NM_053216.1,367-385).
gcacgtgacagacagtttt

SEQ ID NO: 746065 - DNA, 19 bp, Mus musculus
  siRNA target sequence for 1700102P08Rik (NM_053216.1,469-487).
gtactgctcagcagttcta

SEQ ID NO: 746066 - DNA, 19 bp, Mus musculus
  siRNA target sequence for 1700102P08Rik (NM_053216.1,485-503).
ctagccaagaggtcacaaa

SEQ ID NO: 746067 - DNA, 19 bp, Mus musculus
  siRNA target sequence for 1700102P08Rik (NM_053216.1,489-507).
ccaagaggtcacaaaggat

SEQ ID NO: 746068 - DNA, 19 bp, Mus musculus
  siRNA target sequence for 1700102P08Rik (NM_053216.1,514-532).
gacatgattgaccatacaa

SEQ ID NO: 746069 - DNA, 19 bp, Mus musculus
  siRNA target sequence for 1700102P08Rik (NM_053216.1,516-534).
catgattgaccatacaagt

SEQ ID NO: 746070 - DNA, 19 bp, Mus musculus
  siRNA target sequence for 1700102P08Rik (NM_053216.1,530-548).
caagtatccgaactattga

SEQ ID NO: 746071 - DNA, 19 bp, Mus musculus
  siRNA target sequence for 1700102P08Rik (NM_053216.1,690-708).
cctcaagcaggctttggat

SEQ ID NO: 746072 - DNA, 19 bp, Mus musculus
  siRNA target sequence for V1ra4 (NM_053219.1,776-794).
cctcaagagctatgttctt

SEQ ID NO: 746073 - DNA, 19 bp, Mus musculus
  siRNA target sequence for V1ra4 (NM_053219.1,795-813).
ggatgattcaacatgttat

SEQ ID NO: 746074 - DNA, 19 bp, Mus musculus
  siRNA target sequence for V1ra4 (NM_053219.1,796-814).
gatgattcaacatgttatt

SEQ ID NO: 746075 - DNA, 19 bp, Mus musculus
  siRNA target sequence for V1ra4 (NM_053219.1,799-817).
gattcaacatgttattcta

SEQ ID NO: 746076 - DNA, 19 bp, Mus musculus
  siRNA target sequence for V1ra4 (NM_053219.1,906-924).
catgtgtgagtggataata

SEQ ID NO: 746077 - DNA, 19 bp, Mus musculus
  siRNA target sequence for V1ra5 (NM_053220.1,32-50).
ctaacattgggaacacatt

SEQ ID NO: 746078 - DNA, 19 bp, Mus musculus
  siRNA target sequence for V1ra5 (NM_053220.1,537-555).
cctcgtggaaagcataaat

SEQ ID NO: 746079 - DNA, 19 bp, Mus musculus
  siRNA target sequence for V1ra5 (NM_053220.1,538-556).
ctcgtggaaagcataaatt

SEQ ID NO: 746080 - DNA, 19 bp, Mus musculus
  siRNA target sequence for V1ra5 (NM_053220.1,540-558).
cgtggaaagcataaattct

SEQ ID NO: 746081 - DNA, 19 bp, Mus musculus
  siRNA target sequence for V1ra5 (NM_053220.1,671-689).
ccagactttccctaaaaaa

SEQ ID NO: 746082 - DNA, 19 bp, Mus musculus
  siRNA target sequence for V1ra6 (NM_053221.1,26-44).
ctcattctatcataggaaa

SEQ ID NO: 746083 - DNA, 19 bp, Mus musculus
  siRNA target sequence for V1ra6 (NM_053221.1,28-46).
cattctatcataggaaaaa

SEQ ID NO: 746084 - DNA, 19 bp, Mus musculus
  siRNA target sequence for V1ra6 (NM_053221.1,32-50).
ctatcataggaaaaacatt

SEQ ID NO: 746085 - DNA, 19 bp, Mus musculus
  siRNA target sequence for V1ra7 (NM_053222.1,868-886).
ctcagtaatgaaaaacgta

SEQ ID NO: 746086 - DNA, 19 bp, Mus musculus
  siRNA target sequence for V1ra7 (NM_053222.1,870-888).
cagtaatgaaaaacgtata

SEQ ID NO: 746087 - DNA, 19 bp, Mus musculus
  siRNA target sequence for V1ra7 (NM_053222.1,894-912).
cctgttgatatccatgtat

SEQ ID NO: 746088 - DNA, 19 bp, Mus musculus
  siRNA target sequence for V1ra8 (NM_053223.1,774-792).
ctactcaagaactattatt

SEQ ID NO: 746089 - DNA, 19 bp, Mus musculus
  siRNA target sequence for V1ra8 (NM_053223.1,777-795).
ctcaagaactattattaca

SEQ ID NO: 746090 - DNA, 19 bp, Mus musculus
  siRNA target sequence for V1ra9 (NM_053224.1,24-42).
ccataacaccgagataaga

SEQ ID NO: 746091 - DNA, 19 bp, Mus musculus
  siRNA target sequence for V1ra9 (NM_053224.1,25-43).
cataacaccgagataagaa

SEQ ID NO: 746092 - DNA, 19 bp, Mus musculus
  siRNA target sequence for V1ra9 (NM_053224.1,30-48).
caccgagataagaaatgct

SEQ ID NO: 746093 - DNA, 19 bp, Mus musculus
  siRNA target sequence for V1ra9 (NM_053224.1,126-144).
gcagaggtccagacatatt

SEQ ID NO: 746094 - DNA, 19 bp, Mus musculus
  siRNA target sequence for V1ra9 (NM_053224.1,241-259).
ggtgacaccacatgcaaat

SEQ ID NO: 746095 - DNA, 19 bp, Mus musculus
  siRNA target sequence for V1ra9 (NM_053224.1,350-368).
gaaactcctgcttagaaaa

SEQ ID NO: 746096 - DNA, 19 bp, Mus musculus
  siRNA target sequence for V1ra9 (NM_053224.1,377-395).
gtaaatctccacactacat

SEQ ID NO: 746097 - DNA, 19 bp, Mus musculus
  siRNA target sequence for V1ra9 (NM_053224.1,419-437).
gtgtcttctatacattcat

SEQ ID NO: 746098 - DNA, 19 bp, Mus musculus
  siRNA target sequence for V1ra9 (NM_053224.1,440-458).
gcagtccccttgcaacata

SEQ ID NO: 746099 - DNA, 19 bp, Mus musculus
  siRNA target sequence for V1ra9 (NM_053224.1,441-459).
cagtccccttgcaacatat

SEQ ID NO: 746100 - DNA, 19 bp, Mus musculus
  siRNA target sequence for V1ra9 (NM_053224.1,443-461).
gtccccttgcaacatatat

SEQ ID NO: 746101 - DNA, 19 bp, Mus musculus
  siRNA target sequence for V1ra9 (NM_053224.1,445-463).
ccccttgcaacatatataa

SEQ ID NO: 746102 - DNA, 19 bp, Mus musculus
  siRNA target sequence for V1ra9 (NM_053224.1,480-498).
gacctcacctagctttaca

SEQ ID NO: 746103 - DNA, 19 bp, Mus musculus
  siRNA target sequence for V1ra9 (NM_053224.1,482-500).
cctcacctagctttacata

SEQ ID NO: 746104 - DNA, 19 bp, Mus musculus
  siRNA target sequence for V1ra9 (NM_053224.1,483-501).
ctcacctagctttacatat

SEQ ID NO: 746105 - DNA, 19 bp, Mus musculus
  siRNA target sequence for V1ra9 (NM_053224.1,487-505).
cctagctttacatatatca

SEQ ID NO: 746106 - DNA, 19 bp, Mus musculus
  siRNA target sequence for V1ra9 (NM_053224.1,520-538).
ctggcacccatgagttact

SEQ ID NO: 746107 - DNA, 19 bp, Mus musculus
  siRNA target sequence for V1ra9 (NM_053224.1,523-541).
gcacccatgagttactctt

SEQ ID NO: 746108 - DNA, 19 bp, Mus musculus
  siRNA target sequence for V1ra9 (NM_053224.1,524-542).
cacccatgagttactcttt

SEQ ID NO: 746109 - DNA, 19 bp, Mus musculus
  siRNA target sequence for V1ra9 (NM_053224.1,528-546).
catgagttactctttccat

SEQ ID NO: 746110 - DNA, 19 bp, Mus musculus
  siRNA target sequence for V1ra9 (NM_053224.1,769-787).
gtctcctacataagaagta

SEQ ID NO: 746111 - DNA, 19 bp, Mus musculus
  siRNA target sequence for V1ra9 (NM_053224.1,774-792).
ctacataagaagtatcgat

SEQ ID NO: 746112 - DNA, 19 bp, Mus musculus
  siRNA target sequence for V1ra9 (NM_053224.1,914-932).
ggatggtaaccatcatatt

SEQ ID NO: 746113 - DNA, 19 bp, Mus musculus
  siRNA target sequence for V1rb1 (NM_053225.1,474-492).
caattcaacctcagataat

SEQ ID NO: 746114 - DNA, 19 bp, Mus musculus
  siRNA target sequence for V1rb1 (NM_053225.1,537-555).
ctctagaacaagcatactt

SEQ ID NO: 746115 - DNA, 19 bp, Mus musculus
  siRNA target sequence for V1rb1 (NM_053225.1,796-814).
gatgtctcaacattcttct

SEQ ID NO: 746116 - DNA, 19 bp, Mus musculus
  siRNA target sequence for V1rb3 (NM_053226.1,26-44).
ctgacataaacctgaaaat

SEQ ID NO: 746117 - DNA, 19 bp, Mus musculus
  siRNA target sequence for V1rb3 (NM_053226.1,877-895).
gaaaagcgtataactaatt

SEQ ID NO: 746118 - DNA, 19 bp, Mus musculus
  siRNA target sequence for V1rb7 (NM_053228.1,19-37).
ctccgaactgacaaagaca

SEQ ID NO: 746119 - DNA, 19 bp, Mus musculus
  siRNA target sequence for V1rb7 (NM_053228.1,350-368).
gaagtttctgttcaacaaa

SEQ ID NO: 746120 - DNA, 19 bp, Mus musculus
  siRNA target sequence for V1rb7 (NM_053228.1,894-912).
gttttgggagtcaaagtgt

SEQ ID NO: 746121 - DNA, 19 bp, Mus musculus
  siRNA target sequence for V1rb8 (NM_053229.1,23-41).
gcaccgacacaaacatgaa

SEQ ID NO: 746122 - DNA, 19 bp, Mus musculus
  siRNA target sequence for V1rb8 (NM_053229.1,32-50).
caaacatgaaagtcatatt

SEQ ID NO: 746123 - DNA, 19 bp, Mus musculus
  siRNA target sequence for V1rb8 (NM_053229.1,251-269).
catgcacatttcttatgta

SEQ ID NO: 746124 - DNA, 19 bp, Mus musculus
  siRNA target sequence for V1rb8 (NM_053229.1,440-458).
gcagtgaactcttatcgat

SEQ ID NO: 746125 - DNA, 19 bp, Mus musculus
  siRNA target sequence for V1rb8 (NM_053229.1,456-474).
gattactgcttctctgaat

SEQ ID NO: 746126 - DNA, 19 bp, Mus musculus
  siRNA target sequence for V1rc1 (NM_053231.1,890-908).
caaaacatcaacagagatt

SEQ ID NO: 746127 - DNA, 19 bp, Mus musculus
  siRNA target sequence for V1rc2 (NM_053232.1,440-458).
gttttaccaacttaagtga

SEQ ID NO: 746128 - DNA, 19 bp, Mus musculus
  siRNA target sequence for V1rc2 (NM_053232.1,491-509).
cactcttaccaaagaacta

SEQ ID NO: 746129 - DNA, 19 bp, Mus musculus
  siRNA target sequence for V1rc3 (NM_053233.1,164-182).
ctgcaggagatattttgca

SEQ ID NO: 746130 - DNA, 19 bp, Mus musculus
  siRNA target sequence for V1rc3 (NM_053233.1,166-184).
gcaggagatattttgcata

SEQ ID NO: 746131 - DNA, 19 bp, Mus musculus
  siRNA target sequence for V1rc3 (NM_053233.1,172-190).
gatattttgcatacagata

SEQ ID NO: 746132 - DNA, 19 bp, Mus musculus
  siRNA target sequence for V1rc3 (NM_053233.1,850-868).
gataacagaataattaact

SEQ ID NO: 746133 - DNA, 19 bp, Mus musculus
  siRNA target sequence for V1rc4 (NM_053234.1,60-78).
gtttcttcttcattcgtat

SEQ ID NO: 746134 - DNA, 19 bp, Mus musculus
  siRNA target sequence for V1rc4 (NM_053234.1,64-82).
cttcttcattcgtatattt

SEQ ID NO: 746135 - DNA, 19 bp, Mus musculus
  siRNA target sequence for V1rc4 (NM_053234.1,407-425).
cttccagttgtgatgcaat

SEQ ID NO: 746136 - DNA, 19 bp, Mus musculus
  siRNA target sequence for V1rc4 (NM_053234.1,410-428).
ccagttgtgatgcaatatt

SEQ ID NO: 746137 - DNA, 19 bp, Mus musculus
  siRNA target sequence for V1rc5 (NM_053235.1,491-509).
gctcaatcttgccaatgaa

SEQ ID NO: 746138 - DNA, 19 bp, Mus musculus
  siRNA target sequence for V1rc5 (NM_053235.1,494-512).
caatcttgccaatgaacta

SEQ ID NO: 746139 - DNA, 19 bp, Mus musculus
  siRNA target sequence for V1rc6 (NM_053236.1,8-26).
cggtagagaatgtccttta

SEQ ID NO: 746140 - DNA, 19 bp, Mus musculus
  siRNA target sequence for V1rc6 (NM_053236.1,196-214).
gggtttctaaacattgaga

SEQ ID NO: 746141 - DNA, 19 bp, Mus musculus
  siRNA target sequence for V1rc6 (NM_053236.1,399-417).
caatttgtctgtttgtagt

SEQ ID NO: 746142 - DNA, 19 bp, Mus musculus
  siRNA target sequence for V1rc6 (NM_053236.1,413-431).
gtagtaacatgcttttctt

SEQ ID NO: 746143 - DNA, 19 bp, Mus musculus
  siRNA target sequence for V1rc6 (NM_053236.1,513-531).
catcagggaattaattgtt

SEQ ID NO: 746144 - DNA, 19 bp, Mus musculus
  siRNA target sequence for V1rc7 (NM_053237.1,14-32).
cctttatgtcttcattatt

SEQ ID NO: 746145 - DNA, 19 bp, Mus musculus
  siRNA target sequence for V1rc7 (NM_053237.1,26-44).
cattattagagaatattct

SEQ ID NO: 746146 - DNA, 19 bp, Mus musculus
  siRNA target sequence for V1rc7 (NM_053237.1,338-356).
gtcataggaactctttgtt

SEQ ID NO: 746147 - DNA, 19 bp, Mus musculus
  siRNA target sequence for V1rc7 (NM_053237.1,414-432).
gactttcaatttgtcttta

SEQ ID NO: 746148 - DNA, 19 bp, Mus musculus
  siRNA target sequence for V1rc8 (NM_053238.1,137-155).
cccttgctcatatattgtt

SEQ ID NO: 746149 - DNA, 19 bp, Mus musculus
  siRNA target sequence for V1rc8 (NM_053238.1,413-431).
gtagtcacctgttagtcta

SEQ ID NO: 746150 - DNA, 19 bp, Mus musculus
  siRNA target sequence for V1rc8 (NM_053238.1,798-816).
gctcatagtgactgtctat

SEQ ID NO: 746151 - DNA, 19 bp, Mus musculus
  siRNA target sequence for V1rb10 (NM_053240.1,41-59).
cttcctatccacatatgat

SEQ ID NO: 746152 - DNA, 19 bp, Mus musculus
  siRNA target sequence for V1rb10 (NM_053240.1,44-62).
cctatccacatatgatgaa

SEQ ID NO: 746153 - DNA, 19 bp, Mus musculus
  siRNA target sequence for V1rb10 (NM_053240.1,45-63).
ctatccacatatgatgaat

SEQ ID NO: 746154 - DNA, 19 bp, Mus musculus
  siRNA target sequence for Crip3 (NM_053250.1,32-50).
gtcagcaacccgtttactt

SEQ ID NO: 746155 - DNA, 19 bp, Mus musculus
  siRNA target sequence for Crip3 (NM_053250.1,85-103).
caccgtttctgcctgaaat

SEQ ID NO: 746156 - DNA, 19 bp, Mus musculus
  siRNA target sequence for Crip3 (NM_053250.1,87-105).
ccgtttctgcctgaaatgt

SEQ ID NO: 746157 - DNA, 19 bp, Mus musculus
  siRNA target sequence for Crip3 (NM_053250.1,277-295).
ctcagccccagcaacttta

SEQ ID NO: 746158 - DNA, 19 bp, Mus musculus
  siRNA target sequence for Crip3 (NM_053250.1,341-359).
ctccctacttgaagacatt

SEQ ID NO: 746159 - DNA, 19 bp, Mus musculus
  siRNA target sequence for Crip3 (NM_053250.1,343-361).
ccctacttgaagacattca

SEQ ID NO: 746160 - DNA, 19 bp, Mus musculus
  siRNA target sequence for Crip3 (NM_053250.1,409-427).
gctgagaaagtgatgtctt

SEQ ID NO: 746161 - DNA, 19 bp, Mus musculus
  siRNA target sequence for Crip3 (NM_053250.1,526-544).
cacatcccctgctatggat

SEQ ID NO: 746162 - DNA, 19 bp, Mus musculus
  siRNA target sequence for Crip3 (NM_053250.1,557-575).
ccaaaggtgggcaatctga

SEQ ID NO: 746163 - DNA, 19 bp, Mus musculus
  siRNA target sequence for Crip3 (NM_053250.1,581-599).
gacactggacctatgagaa

SEQ ID NO: 746164 - DNA, 19 bp, Mus musculus
  siRNA target sequence for LOC114601 (NM_053252.1,307-325).
gtttgtggcgtgttaccat

SEQ ID NO: 746165 - DNA, 19 bp, Mus musculus
  siRNA target sequence for LOC114601 (NM_053252.1,450-468).
gtggcaccgtggtatggat

SEQ ID NO: 746166 - DNA, 19 bp, Mus musculus
  siRNA target sequence for LOC114601 (NM_053252.1,513-531).
ctcatgtggaccagtatga

SEQ ID NO: 746167 - DNA, 19 bp, Mus musculus
  siRNA target sequence for LOC114601 (NM_053252.1,520-538).
ggaccagtatgaaaccaaa

SEQ ID NO: 746168 - DNA, 19 bp, Mus musculus
  siRNA target sequence for LOC114601 (NM_053252.1,732-750).
gccgtgccacggatgatga

SEQ ID NO: 746169 - DNA, 19 bp, Mus musculus
  siRNA target sequence for LOC114601 (NM_053252.1,1214-1232).
gatgaggtccccaatacct

SEQ ID NO: 746170 - DNA, 19 bp, Mus musculus
  siRNA target sequence for LOC114601 (NM_053252.1,1339-1357).
ggtcagaggctccaaagat

SEQ ID NO: 746171 - DNA, 19 bp, Mus musculus
  siRNA target sequence for LOC114601 (NM_053252.1,1340-1358).
gtcagaggctccaaagatt

SEQ ID NO: 746172 - DNA, 19 bp, Mus musculus
  siRNA target sequence for LOC114601 (NM_053252.1,1488-1506).
cagaacttcatcaagtaga

SEQ ID NO: 746173 - DNA, 19 bp, Mus musculus
  siRNA target sequence for LOC114601 (NM_053252.1,1864-1882).
ccagggggtgaaatctaga

SEQ ID NO: 746174 - DNA, 19 bp, Mus musculus
  siRNA target sequence for LOC114601 (NM_053252.1,1912-1930).
ggagtcaagggttctagaa

SEQ ID NO: 746175 - DNA, 19 bp, Mus musculus
  siRNA target sequence for LOC114601 (NM_053252.1,1913-1931).
gagtcaagggttctagaaa

SEQ ID NO: 746176 - DNA, 19 bp, Mus musculus
  siRNA target sequence for LOC114601 (NM_053252.1,1945-1963).
ggtgccatgggaggttata

SEQ ID NO: 746177 - DNA, 19 bp, Mus musculus
  siRNA target sequence for LOC114601 (NM_053252.1,1958-1976).
gttatagggacatcaaaga

SEQ ID NO: 746178 - DNA, 19 bp, Mus musculus
  siRNA target sequence for LOC114601 (NM_053252.1,2022-2040).
cagagtctgaaatattgga

SEQ ID NO: 746179 - DNA, 19 bp, Mus musculus
  siRNA target sequence for LOC114601 (NM_053252.1,2235-2253).
cagtgatagcagaaactga

SEQ ID NO: 746180 - DNA, 19 bp, Mus musculus
  siRNA target sequence for LOC114601 (NM_053252.1,2239-2257).
gatagcagaaactgagata

SEQ ID NO: 746181 - DNA, 19 bp, Mus musculus
  siRNA target sequence for LOC114601 (NM_053252.1,2462-2480).
gagatttggaggattccaa

SEQ ID NO: 746182 - DNA, 19 bp, Mus musculus
  siRNA target sequence for LOC114601 (NM_053252.1,2542-2560).
gatgcaacctagactagta

SEQ ID NO: 746183 - DNA, 19 bp, Mus musculus
  siRNA target sequence for LOC114601 (NM_053252.1,2633-2651).
gcaggttgtggagtacttt

SEQ ID NO: 746184 - DNA, 19 bp, Mus musculus
  siRNA target sequence for LOC114601 (NM_053252.1,2665-2683).
gataccagaatccaagatt

SEQ ID NO: 746185 - DNA, 19 bp, Mus musculus
  siRNA target sequence for LOC114601 (NM_053252.1,2669-2687).
ccagaatccaagattgaca

SEQ ID NO: 746186 - DNA, 19 bp, Mus musculus
  siRNA target sequence for LOC114601 (NM_053252.1,3040-3058).
gacccaggaaatatcatct

SEQ ID NO: 746187 - DNA, 19 bp, Mus musculus
  siRNA target sequence for LOC114601 (NM_053252.1,3325-3343).
gacagctcgggatgaagaa

SEQ ID NO: 746188 - DNA, 19 bp, Mus musculus
  siRNA target sequence for LOC114601 (NM_053252.1,3400-3418).
gtgggcagggactgtagtt

SEQ ID NO: 746189 - DNA, 19 bp, Mus musculus
  siRNA target sequence for LOC114601 (NM_053252.1,3402-3420).
gggcagggactgtagtttt

SEQ ID NO: 746190 - DNA, 19 bp, Mus musculus
  siRNA target sequence for LOC114601 (NM_053252.1,3405-3423).
cagggactgtagttttgga

SEQ ID NO: 746191 - DNA, 19 bp, Mus musculus
  siRNA target sequence for LOC114601 (NM_053252.1,3430-3448).
ggaagtaaaggctgacatt

SEQ ID NO: 746192 - DNA, 19 bp, Mus musculus
  siRNA target sequence for LOC114601 (NM_053252.1,3468-3486).
gatcttggggagctcttaa

SEQ ID NO: 746193 - DNA, 19 bp, Mus musculus
  siRNA target sequence for LOC114601 (NM_053252.1,3474-3492).
ggggagctcttaaatatga

SEQ ID NO: 746194 - DNA, 19 bp, Mus musculus
  siRNA target sequence for LOC114601 (NM_053252.1,3503-3521).
gtccccgtaactaagcaaa

SEQ ID NO: 746195 - DNA, 19 bp, Mus musculus
  siRNA target sequence for LOC114601 (NM_053252.1,3650-3668).
gagtctccagagaataaat

SEQ ID NO: 746196 - DNA, 19 bp, Mus musculus
  siRNA target sequence for LOC114601 (NM_053252.1,3654-3672).
ctccagagaataaatctaa

SEQ ID NO: 746197 - DNA, 19 bp, Mus musculus
  siRNA target sequence for LOC114601 (NM_053252.1,3990-4008).
gtgctattttacatcgatt

SEQ ID NO: 746198 - DNA, 19 bp, Mus musculus
  siRNA target sequence for LOC114601 (NM_053252.1,4014-4032).
cagacaagatcgattattt

SEQ ID NO: 746199 - DNA, 19 bp, Mus musculus
  siRNA target sequence for LOC114601 (NM_053252.1,4016-4034).
gacaagatcgattatttct

SEQ ID NO: 746200 - DNA, 19 bp, Mus musculus
  siRNA target sequence for LOC114601 (NM_053252.1,4035-4053).
cccttgatcccctcaacat

SEQ ID NO: 746201 - DNA, 19 bp, Mus musculus
  siRNA target sequence for LOC114601 (NM_053252.1,4037-4055).
cttgatcccctcaacatca

SEQ ID NO: 746202 - DNA, 19 bp, Mus musculus
  siRNA target sequence for LOC114601 (NM_053252.1,4234-4252).
cggtggctctggcacttat

SEQ ID NO: 746203 - DNA, 19 bp, Mus musculus
  siRNA target sequence for LOC114601 (NM_053252.1,4414-4432).
gagctgctcctctaaggat

SEQ ID NO: 746204 - DNA, 19 bp, Mus musculus
  siRNA target sequence for LOC114601 (NM_053252.1,4570-4588).
gagacggtcctctgtcaat

SEQ ID NO: 746205 - DNA, 19 bp, Mus musculus
  siRNA target sequence for LOC114601 (NM_053252.1,4642-4660).
gcgggacgccgatttgcta

SEQ ID NO: 746206 - DNA, 19 bp, Mus musculus
  siRNA target sequence for LOC114601 (NM_053252.1,4643-4661).
cgggacgccgatttgctaa

SEQ ID NO: 746207 - DNA, 19 bp, Mus musculus
  siRNA target sequence for LOC114601 (NM_053252.1,4644-4662).
gggacgccgatttgctaaa

SEQ ID NO: 746208 - DNA, 19 bp, Mus musculus
  siRNA target sequence for LOC114601 (NM_053252.1,4646-4664).
gacgccgatttgctaaaga

SEQ ID NO: 746209 - DNA, 19 bp, Mus musculus
  siRNA target sequence for LOC114601 (NM_053252.1,4670-4688).
cgatcgaggttaaggaata

SEQ ID NO: 746210 - DNA, 19 bp, Mus musculus
  siRNA target sequence for Zmynd10 (NM_053253.2,229-247).
ggctctgaagggtggaata

SEQ ID NO: 746211 - DNA, 19 bp, Mus musculus
  siRNA target sequence for Zmynd10 (NM_053253.2,230-248).
gctctgaagggtggaataa

SEQ ID NO: 746212 - DNA, 19 bp, Mus musculus
  siRNA target sequence for Zmynd10 (NM_053253.2,549-567).
cttggacctagtagactat

SEQ ID NO: 746213 - DNA, 19 bp, Mus musculus
  siRNA target sequence for Zmynd10 (NM_053253.2,569-587).
gccaccgcaagctgatact

SEQ ID NO: 746214 - DNA, 19 bp, Mus musculus
  siRNA target sequence for Zmynd10 (NM_053253.2,848-866).
gcaagctgcagcattttga

SEQ ID NO: 746215 - DNA, 19 bp, Mus musculus
  siRNA target sequence for Zmynd10 (NM_053253.2,936-954).
gatcgccctgtacaatcta

SEQ ID NO: 746216 - DNA, 19 bp, Mus musculus
  siRNA target sequence for Zmynd10 (NM_053253.2,976-994).
gcccgttactgccttacaa

SEQ ID NO: 746217 - DNA, 19 bp, Mus musculus
  siRNA target sequence for Zmynd10 (NM_053253.2,1005-1023).
gggacagctgcttaagctt

SEQ ID NO: 746218 - DNA, 19 bp, Mus musculus
  siRNA target sequence for Zmynd10 (NM_053253.2,1050-1068).
cgaccagttgcccaatctt

SEQ ID NO: 746219 - DNA, 19 bp, Mus musculus
  siRNA target sequence for Zmynd10 (NM_053253.2,1061-1079).
ccaatcttgccgatctgaa

SEQ ID NO: 746220 - DNA, 19 bp, Mus musculus
  siRNA target sequence for Zmynd10 (NM_053253.2,1121-1139).
ctaagaaggacctagtgtt

SEQ ID NO: 746221 - DNA, 19 bp, Mus musculus
  siRNA target sequence for Zmynd10 (NM_053253.2,1422-1440).
gcacggaaagacatgtgtt

SEQ ID NO: 746222 - DNA, 19 bp, Mus musculus
  siRNA target sequence for Elac1 (NM_053255.2,83-101).
gacaggagcagcatatcca

SEQ ID NO: 746223 - DNA, 19 bp, Mus musculus
  siRNA target sequence for Elac1 (NM_053255.2,145-163).
gcgagtgctggctctttga

SEQ ID NO: 746224 - DNA, 19 bp, Mus musculus
  siRNA target sequence for Elac1 (NM_053255.2,175-193).
gaacacagacccagcttat

SEQ ID NO: 746225 - DNA, 19 bp, Mus musculus
  siRNA target sequence for Elac1 (NM_053255.2,178-196).
cacagacccagcttatgaa

SEQ ID NO: 746226 - DNA, 19 bp, Mus musculus
  siRNA target sequence for Elac1 (NM_053255.2,214-232).
ggagaattaccaagatctt

SEQ ID NO: 746227 - DNA, 19 bp, Mus musculus
  siRNA target sequence for Elac1 (NM_053255.2,245-263).
ccatggcgaccacttcttt

SEQ ID NO: 746228 - DNA, 19 bp, Mus musculus
  siRNA target sequence for Elac1 (NM_053255.2,315-333).
gccaggcagcctattgaga

SEQ ID NO: 746229 - DNA, 19 bp, Mus musculus
  siRNA target sequence for Elac1 (NM_053255.2,319-337).
ggcagcctattgagatcta

SEQ ID NO: 746230 - DNA, 19 bp, Mus musculus
  siRNA target sequence for Elac1 (NM_053255.2,345-363).
gtcgggcttcgggacttta

SEQ ID NO: 746231 - DNA, 19 bp, Mus musculus
  siRNA target sequence for Elac1 (NM_053255.2,348-366).
gggcttcgggactttatct

SEQ ID NO: 746232 - DNA, 19 bp, Mus musculus
  siRNA target sequence for Elac1 (NM_053255.2,450-468).
gtagaagaactgagagaat

SEQ ID NO: 746233 - DNA, 19 bp, Mus musculus
  siRNA target sequence for Elac1 (NM_053255.2,521-539).
cttgctagatgcagaagaa

SEQ ID NO: 746234 - DNA, 19 bp, Mus musculus
  siRNA target sequence for Elac1 (NM_053255.2,563-581).
cgagcagtttgtggtaaaa

SEQ ID NO: 746235 - DNA, 19 bp, Mus musculus
  siRNA target sequence for Elac1 (NM_053255.2,566-584).
gcagtttgtggtaaaagca

SEQ ID NO: 746236 - DNA, 19 bp, Mus musculus
  siRNA target sequence for Elac1 (NM_053255.2,567-585).
cagtttgtggtaaaagcat

SEQ ID NO: 746237 - DNA, 19 bp, Mus musculus
  siRNA target sequence for Elac1 (NM_053255.2,707-725).
gctgaaaaacggaatttct

SEQ ID NO: 746238 - DNA, 19 bp, Mus musculus
  siRNA target sequence for Elac1 (NM_053255.2,734-752).
ggataatggagttacaatt

SEQ ID NO: 746239 - DNA, 19 bp, Mus musculus
  siRNA target sequence for Elac1 (NM_053255.2,754-772).
ctccccaagacgtcttaaa

SEQ ID NO: 746240 - DNA, 19 bp, Mus musculus
  siRNA target sequence for Elac1 (NM_053255.2,757-775).
cccaagacgtcttaaaaaa

SEQ ID NO: 746241 - DNA, 19 bp, Mus musculus
  siRNA target sequence for Elac1 (NM_053255.2,776-794).
gcctatggttggaagaaaa

SEQ ID NO: 746242 - DNA, 19 bp, Mus musculus
  siRNA target sequence for Elac1 (NM_053255.2,967-985).
gtgccaagaggctagttct

SEQ ID NO: 746243 - DNA, 19 bp, Mus musculus
  siRNA target sequence for Elac1 (NM_053255.2,1097-1115).
gactctagcagaagatttt

SEQ ID NO: 746244 - DNA, 19 bp, Mus musculus
  siRNA target sequence for Elac1 (NM_053255.2,1124-1142).
cggcattccgatcaagaaa

SEQ ID NO: 746245 - DNA, 19 bp, Mus musculus
  siRNA target sequence for Tifp39 (NM_053256.1,365-383).
cgctggctggactcttaca

SEQ ID NO: 746246 - DNA, 19 bp, Mus musculus
  siRNA target sequence for Etos1 (NM_053258.1,459-477).
cggctccgtccctcagtaa

SEQ ID NO: 746247 - DNA, 19 bp, Mus musculus
  siRNA target sequence for Etos1 (NM_053258.1,469-487).
cctcagtaaggcagatact

SEQ ID NO: 746248 - DNA, 19 bp, Mus musculus
  siRNA target sequence for Etos1 (NM_053258.1,631-649).
ggtcccatatggtgtattt

SEQ ID NO: 746249 - DNA, 19 bp, Mus musculus
  siRNA target sequence for Etos1 (NM_053258.1,636-654).
catatggtgtatttatgca

SEQ ID NO: 746250 - DNA, 19 bp, Mus musculus
  siRNA target sequence for Etos1 (NM_053258.1,662-680).
ccaggggagcaggtatgta

SEQ ID NO: 746251 - DNA, 19 bp, Mus musculus
  siRNA target sequence for Etos1 (NM_053258.1,692-710).
ccagttagggtttctatta

SEQ ID NO: 746252 - DNA, 19 bp, Mus musculus
  siRNA target sequence for Ttyh2 (NM_053273.1,183-201).
gcctgggcctgaatctcat

SEQ ID NO: 746253 - DNA, 19 bp, Mus musculus
  siRNA target sequence for Ttyh2 (NM_053273.1,369-387).
ggatgcatcagctgatcta

SEQ ID NO: 746254 - DNA, 19 bp, Mus musculus
  siRNA target sequence for Ttyh2 (NM_053273.1,633-651).
ctgcctatgtggaatacta

SEQ ID NO: 746255 - DNA, 19 bp, Mus musculus
  siRNA target sequence for Ttyh2 (NM_053273.1,635-653).
gcctatgtggaatactaca

SEQ ID NO: 746256 - DNA, 19 bp, Mus musculus
  siRNA target sequence for Ttyh2 (NM_053273.1,1056-1074).
gcatccagcttctgctaaa

SEQ ID NO: 746257 - DNA, 19 bp, Mus musculus
  siRNA target sequence for Ttyh2 (NM_053273.1,1245-1263).
gacctcgtgcctggaaata

SEQ ID NO: 746258 - DNA, 19 bp, Mus musculus
  siRNA target sequence for Ttyh2 (NM_053273.1,1250-1268).
cgtgcctggaaatacttca

SEQ ID NO: 746259 - DNA, 19 bp, Mus musculus
  siRNA target sequence for Ttyh2 (NM_053273.1,1253-1271).
gcctggaaatacttcatca

SEQ ID NO: 746260 - DNA, 19 bp, Mus musculus
  siRNA target sequence for Ttyh2 (NM_053273.1,1254-1272).
cctggaaatacttcatcaa

SEQ ID NO: 746261 - DNA, 19 bp, Mus musculus
  siRNA target sequence for Ttyh2 (NM_053273.1,1484-1502).
gggaacccacgatacgaaa

SEQ ID NO: 746262 - DNA, 19 bp, Mus musculus
  siRNA target sequence for Ttyh2 (NM_053273.1,1485-1503).
ggaacccacgatacgaaaa

SEQ ID NO: 746263 - DNA, 19 bp, Mus musculus
  siRNA target sequence for Ttyh2 (NM_053273.1,1486-1504).
gaacccacgatacgaaaat

SEQ ID NO: 746264 - DNA, 19 bp, Mus musculus
  siRNA target sequence for Prosc (NM_054057.1,124-142).
ctcgttgcggtcagcaaaa

SEQ ID NO: 746265 - DNA, 19 bp, Mus musculus
  siRNA target sequence for Prosc (NM_054057.1,126-144).
cgttgcggtcagcaaaaca

SEQ ID NO: 746266 - DNA, 19 bp, Mus musculus
  siRNA target sequence for Prosc (NM_054057.1,180-198).
cggccagcgcacttttgga

SEQ ID NO: 746267 - DNA, 19 bp, Mus musculus
  siRNA target sequence for Prosc (NM_054057.1,188-206).
gcacttttggagagaacta

SEQ ID NO: 746268 - DNA, 19 bp, Mus musculus
  siRNA target sequence for Prosc (NM_054057.1,230-248).
catcaaaccctaagattct

SEQ ID NO: 746269 - DNA, 19 bp, Mus musculus
  siRNA target sequence for Prosc (NM_054057.1,264-282).
gatcaagtggcacttcatt

SEQ ID NO: 746270 - DNA, 19 bp, Mus musculus
  siRNA target sequence for Prosc (NM_054057.1,298-316).
caaaacgtcaacaaactga

SEQ ID NO: 746271 - DNA, 19 bp, Mus musculus
  siRNA target sequence for Prosc (NM_054057.1,440-458).
ccagcggagaggacagtaa

SEQ ID NO: 746272 - DNA, 19 bp, Mus musculus
  siRNA target sequence for Prosc (NM_054057.1,443-461).
gcggagaggacagtaaaca

SEQ ID NO: 746273 - DNA, 19 bp, Mus musculus
  siRNA target sequence for Prosc (NM_054057.1,488-506).
ctgtcgtggaacacataaa

SEQ ID NO: 746274 - DNA, 19 bp, Mus musculus
  siRNA target sequence for Prosc (NM_054057.1,555-573).
ctttggacatgatctaagt

SEQ ID NO: 746275 - DNA, 19 bp, Mus musculus
  siRNA target sequence for Prosc (NM_054057.1,687-705).
ccagcatgctattgaagta

SEQ ID NO: 746276 - DNA, 19 bp, Mus musculus
  siRNA target sequence for Prosc (NM_054057.1,720-738).
ccggatagggagcactatt

SEQ ID NO: 746277 - DNA, 19 bp, Mus musculus
  siRNA target sequence for Prosc (NM_054057.1,721-739).
cggatagggagcactattt

SEQ ID NO: 746278 - DNA, 19 bp, Mus musculus
  siRNA target sequence for Prosc (NM_054057.1,722-740).
ggatagggagcactatttt

SEQ ID NO: 746279 - DNA, 19 bp, Mus musculus
  siRNA target sequence for Prosc (NM_054057.1,723-741).
gatagggagcactattttt

SEQ ID NO: 746280 - DNA, 19 bp, Mus musculus
  siRNA target sequence for Prosc (NM_054057.1,743-761).
gagagcgggactactcaaa

SEQ ID NO: 746281 - DNA, 19 bp, Mus musculus
  siRNA target sequence for Prosc (NM_054057.1,745-763).
gagcgggactactcaaaga

SEQ ID NO: 746282 - DNA, 19 bp, Mus musculus
  siRNA target sequence for Psg28 (NM_054063.2,269-287).
gcaattgcactgtactata

SEQ ID NO: 746283 - DNA, 19 bp, Mus musculus
  siRNA target sequence for Psbpc1 (NM_054069.1,71-89).
gccagatctgtgaacttgt

SEQ ID NO: 746284 - DNA, 19 bp, Mus musculus
  siRNA target sequence for Psbpc1 (NM_054069.1,91-109).
gctcatgaaaccataagct

SEQ ID NO: 746285 - DNA, 19 bp, Mus musculus
  siRNA target sequence for Psbpc1 (NM_054069.1,92-110).
ctcatgaaaccataagctt

SEQ ID NO: 746286 - DNA, 19 bp, Mus musculus
  siRNA target sequence for Psbpc1 (NM_054069.1,138-156).
gaaggaacttgagatgtat

SEQ ID NO: 746287 - DNA, 19 bp, Mus musculus
  siRNA target sequence for Psbpc1 (NM_054069.1,219-237).
caatggagacagattggta

SEQ ID NO: 746288 - DNA, 19 bp, Mus musculus
  siRNA target sequence for Psbpc1 (NM_054069.1,242-260).
cagaaacactggtatacat

SEQ ID NO: 746289 - DNA, 19 bp, Mus musculus
  siRNA target sequence for Psbpc1 (NM_054069.1,244-262).
gaaacactggtatacattt

SEQ ID NO: 746290 - DNA, 19 bp, Mus musculus
  siRNA target sequence for Psbpc1 (NM_054069.1,277-295).
gtgaaacaatgggtagaaa

SEQ ID NO: 746291 - DNA, 19 bp, Mus musculus
  siRNA target sequence for Pcdha1 (NM_054072.1,366-384).
gaaggttaaagatattaat

SEQ ID NO: 746292 - DNA, 19 bp, Mus musculus
  siRNA target sequence for Pcdha1 (NM_054072.1,406-424).
ggcgcagagcaaaggatat

SEQ ID NO: 746293 - DNA, 19 bp, Mus musculus
  siRNA target sequence for Pcdha1 (NM_054072.1,554-572).
caacagacgaactcagtaa

SEQ ID NO: 746294 - DNA, 19 bp, Mus musculus
  siRNA target sequence for Pcdha1 (NM_054072.1,593-611).
gaaaatctttggatagaga

SEQ ID NO: 746295 - DNA, 19 bp, Mus musculus
  siRNA target sequence for Pcdha1 (NM_054072.1,620-638).
cagaacttcagttattact

SEQ ID NO: 746296 - DNA, 19 bp, Mus musculus
  siRNA target sequence for Pcdha1 (NM_054072.1,744-762).
cagagcacagttagtagaa

SEQ ID NO: 746297 - DNA, 19 bp, Mus musculus
  siRNA target sequence for Pcdha1 (NM_054072.1,748-766).
gcacagttagtagaatcta

SEQ ID NO: 746298 - DNA, 19 bp, Mus musculus
  siRNA target sequence for Pcdha1 (NM_054072.1,769-787).
gtgaatgggacattagtga

SEQ ID NO: 746299 - DNA, 19 bp, Mus musculus
  siRNA target sequence for Pcdha1 (NM_054072.1,779-797).
cattagtgacgacgttaaa

SEQ ID NO: 746300 - DNA, 19 bp, Mus musculus
  siRNA target sequence for Pcdha1 (NM_054072.1,911-929).
gagtgatcggtgatctaga

SEQ ID NO: 746301 - DNA, 19 bp, Mus musculus
  siRNA target sequence for Pcdha1 (NM_054072.1,913-931).
gtgatcggtgatctagatt

SEQ ID NO: 746302 - DNA, 19 bp, Mus musculus
  siRNA target sequence for Pcdha1 (NM_054072.1,915-933).
gatcggtgatctagattat

SEQ ID NO: 746303 - DNA, 19 bp, Mus musculus
  siRNA target sequence for Pcdha1 (NM_054072.1,980-998).
ggactccctccatgtcaaa

SEQ ID NO: 746304 - DNA, 19 bp, Mus musculus
  siRNA target sequence for Pcdha1 (NM_054072.1,1045-1063).
ccagagctgtcgatcacat

SEQ ID NO: 746305 - DNA, 19 bp, Mus musculus
  siRNA target sequence for Pcdha1 (NM_054072.1,1065-1083).
cttgtctttgcccatcaaa

SEQ ID NO: 746306 - DNA, 19 bp, Mus musculus
  siRNA target sequence for Pcdha1 (NM_054072.1,1103-1121).
ctatcatcgcactcatcaa

SEQ ID NO: 746307 - DNA, 19 bp, Mus musculus
  siRNA target sequence for Pcdha1 (NM_054072.1,1890-1908).
caccacacgctccttagat

SEQ ID NO: 746308 - DNA, 19 bp, Mus musculus
  siRNA target sequence for Pcdha1 (NM_054072.1,1892-1910).
ccacacgctccttagatga

SEQ ID NO: 746309 - DNA, 19 bp, Mus musculus
  siRNA target sequence for Pcdha1 (NM_054072.1,2026-2044).
gcctctttgcctgtattaa

SEQ ID NO: 746310 - DNA, 19 bp, Mus musculus
  siRNA target sequence for Pcdha1 (NM_054072.1,2120-2138).
gcctgttagtgctcacttt

SEQ ID NO: 746311 - DNA, 19 bp, Mus musculus
  siRNA target sequence for Pcdha1 (NM_054072.1,2318-2336).
gtttagccccaggtttgaa

SEQ ID NO: 746312 - DNA, 19 bp, Mus musculus
  siRNA target sequence for Pcdha1 (NM_054072.1,2334-2352).
gaacatagcggaaagaagt

SEQ ID NO: 746313 - DNA, 19 bp, Mus musculus
  siRNA target sequence for Pcdha1 (NM_054072.1,2351-2369).
gtgaccacgcagaagtaaa

SEQ ID NO: 746314 - DNA, 19 bp, Mus musculus
  siRNA target sequence for Pcdha1 (NM_054072.1,2353-2371).
gaccacgcagaagtaaatt

SEQ ID NO: 746315 - DNA, 19 bp, Mus musculus
  siRNA target sequence for Pcdha1 (NM_054072.1,2355-2373).
ccacgcagaagtaaattca

SEQ ID NO: 746316 - DNA, 19 bp, Mus musculus
  siRNA target sequence for Tsga13 (NM_054073.1,239-257).
gaaaaattccaagtttcaa

SEQ ID NO: 746317 - DNA, 19 bp, Mus musculus
  siRNA target sequence for Tsga13 (NM_054073.1,327-345).
gaagagatgtatgatacaa

SEQ ID NO: 746318 - DNA, 19 bp, Mus musculus
  siRNA target sequence for Tsga13 (NM_054073.1,343-361).
caactgcacaatcgaaatt

SEQ ID NO: 746319 - DNA, 19 bp, Mus musculus
  siRNA target sequence for Tsga13 (NM_054073.1,346-364).
ctgcacaatcgaaatttgt

SEQ ID NO: 746320 - DNA, 19 bp, Mus musculus
  siRNA target sequence for Tsga13 (NM_054073.1,567-585).
gatggtgctccaatatact

SEQ ID NO: 746321 - DNA, 19 bp, Mus musculus
  siRNA target sequence for Tsga13 (NM_054073.1,592-610).
cggagtttcagttaaagga

SEQ ID NO: 746322 - DNA, 19 bp, Mus musculus
  siRNA target sequence for Tsga13 (NM_054073.1,621-639).
cggtgcaaacccaacaaga

SEQ ID NO: 746323 - DNA, 19 bp, Mus musculus
  siRNA target sequence for Tsga13 (NM_054073.1,622-640).
ggtgcaaacccaacaagaa

SEQ ID NO: 746324 - DNA, 19 bp, Mus musculus
  siRNA target sequence for Tsga13 (NM_054073.1,623-641).
gtgcaaacccaacaagaat

SEQ ID NO: 746325 - DNA, 19 bp, Mus musculus
  siRNA target sequence for Tsga13 (NM_054073.1,644-662).
cttctttcccacaatgtct

SEQ ID NO: 746326 - DNA, 19 bp, Mus musculus
  siRNA target sequence for Tsga13 (NM_054073.1,735-753).
ggacaacaatggtttaggt

SEQ ID NO: 746327 - DNA, 19 bp, Mus musculus
  siRNA target sequence for Tsga13 (NM_054073.1,736-754).
gacaacaatggtttaggtt

SEQ ID NO: 746328 - DNA, 19 bp, Mus musculus
  siRNA target sequence for Tsga13 (NM_054073.1,751-769).
ggttttctaccgacaatga

SEQ ID NO: 746329 - DNA, 19 bp, Mus musculus
  siRNA target sequence for Tsga13 (NM_054073.1,752-770).
gttttctaccgacaatgat

SEQ ID NO: 746330 - DNA, 19 bp, Mus musculus
  siRNA target sequence for Tsga13 (NM_054073.1,757-775).
ctaccgacaatgatttcaa

SEQ ID NO: 746331 - DNA, 19 bp, Mus musculus
  siRNA target sequence for Tsga13 (NM_054073.1,760-778).
ccgacaatgatttcaacat

SEQ ID NO: 746332 - DNA, 19 bp, Mus musculus
  siRNA target sequence for Tsga13 (NM_054073.1,773-791).
caacatcgaagggaagtat

SEQ ID NO: 746333 - DNA, 19 bp, Mus musculus
  siRNA target sequence for Tsga13 (NM_054073.1,776-794).
catcgaagggaagtattct

SEQ ID NO: 746334 - DNA, 19 bp, Mus musculus
  siRNA target sequence for Tsga13 (NM_054073.1,906-924).
ccaacttcgcaagtatttt

SEQ ID NO: 746335 - DNA, 19 bp, Mus musculus
  siRNA target sequence for Tsga13 (NM_054073.1,926-944).
ggaacccctgacattttca

SEQ ID NO: 746336 - DNA, 19 bp, Mus musculus
  siRNA target sequence for Tsga13 (NM_054073.1,927-945).
gaacccctgacattttcaa

SEQ ID NO: 746337 - DNA, 19 bp, Mus musculus
  siRNA target sequence for Tsga13 (NM_054073.1,977-995).
gccaggggagagcttcttt

SEQ ID NO: 746338 - DNA, 19 bp, Mus musculus
  siRNA target sequence for Tsga13 (NM_054073.1,1010-1028).
ccagcagtggattgtcaaa

SEQ ID NO: 746339 - DNA, 19 bp, Mus musculus
  siRNA target sequence for Tsga13 (NM_054073.1,1013-1031).
gcagtggattgtcaaagat

SEQ ID NO: 746340 - DNA, 19 bp, Mus musculus
  siRNA target sequence for Defb6 (NM_054074.1,86-104).
ccttttcccaattaatcaa

SEQ ID NO: 746341 - DNA, 19 bp, Mus musculus
  siRNA target sequence for Defb6 (NM_054074.1,178-196).
cattgtggccatcctaaaa

SEQ ID NO: 746342 - DNA, 19 bp, Mus musculus
  siRNA target sequence for Defb6 (NM_054074.1,184-202).
ggccatcctaaaatcagat

SEQ ID NO: 746343 - DNA, 19 bp, Mus musculus
  siRNA target sequence for Akr1c20 (NM_054080.1,305-323).
cagccaggagagaattatt

SEQ ID NO: 746344 - DNA, 19 bp, Mus musculus
  siRNA target sequence for Necab2 (NM_054095.1,526-544).
gccgtcatcctggacattt

SEQ ID NO: 746345 - DNA, 19 bp, Mus musculus
  siRNA target sequence for Necab2 (NM_054095.1,527-545).
ccgtcatcctggacatttt

SEQ ID NO: 746346 - DNA, 19 bp, Mus musculus
  siRNA target sequence for Necab2 (NM_054095.1,608-626).
cagatggcgtccttaatga

SEQ ID NO: 746347 - DNA, 19 bp, Mus musculus
  siRNA target sequence for Necab2 (NM_054095.1,643-661).
ctcttccataccatcgatt

SEQ ID NO: 746348 - DNA, 19 bp, Mus musculus
  siRNA target sequence for Necab2 (NM_054095.1,1158-1176).
gcgcctctcggatgaagaa

SEQ ID NO: 746349 - DNA, 19 bp, Mus musculus
  siRNA target sequence for AI481214 (NM_054098.2,96-114).
gtttcctctgactactgat

SEQ ID NO: 746350 - DNA, 19 bp, Mus musculus
  siRNA target sequence for AI481214 (NM_054098.2,186-204).
gcttcagtgtggctattct

SEQ ID NO: 746351 - DNA, 19 bp, Mus musculus
  siRNA target sequence for AI481214 (NM_054098.2,187-205).
cttcagtgtggctattcta

SEQ ID NO: 746352 - DNA, 19 bp, Mus musculus
  siRNA target sequence for AI481214 (NM_054098.2,256-274).
gcagaggtcctgagctatt

SEQ ID NO: 746353 - DNA, 19 bp, Mus musculus
  siRNA target sequence for AI481214 (NM_054098.2,335-353).
ccctcacggaactagttga

SEQ ID NO: 746354 - DNA, 19 bp, Mus musculus
  siRNA target sequence for AI481214 (NM_054098.2,336-354).
cctcacggaactagttgat

SEQ ID NO: 746355 - DNA, 19 bp, Mus musculus
  siRNA target sequence for AI481214 (NM_054098.2,337-355).
ctcacggaactagttgatt

SEQ ID NO: 746356 - DNA, 19 bp, Mus musculus
  siRNA target sequence for AI481214 (NM_054098.2,341-359).
cggaactagttgattatct

SEQ ID NO: 746357 - DNA, 19 bp, Mus musculus
  siRNA target sequence for AI481214 (NM_054098.2,343-361).
gaactagttgattatctca

SEQ ID NO: 746358 - DNA, 19 bp, Mus musculus
  siRNA target sequence for AI481214 (NM_054098.2,393-411).
ccgcaaaatcaatcagtat

SEQ ID NO: 746359 - DNA, 19 bp, Mus musculus
  siRNA target sequence for AI481214 (NM_054098.2,417-435).
gtcaaatgcggaatacctt

SEQ ID NO: 746360 - DNA, 19 bp, Mus musculus
  siRNA target sequence for AI481214 (NM_054098.2,456-474).
ccacgtggtcaaagcattt

SEQ ID NO: 746361 - DNA, 19 bp, Mus musculus
  siRNA target sequence for AI481214 (NM_054098.2,457-475).
cacgtggtcaaagcattta

SEQ ID NO: 746362 - DNA, 19 bp, Mus musculus
  siRNA target sequence for AI481214 (NM_054098.2,460-478).
gtggtcaaagcatttaaca

SEQ ID NO: 746363 - DNA, 19 bp, Mus musculus
  siRNA target sequence for AI481214 (NM_054098.2,498-516).
ccagtcaggaacactagat

SEQ ID NO: 746364 - DNA, 19 bp, Mus musculus
  siRNA target sequence for AI481214 (NM_054098.2,528-546).
ggtgtttgtctgtggaaat

SEQ ID NO: 746365 - DNA, 19 bp, Mus musculus
  siRNA target sequence for AI481214 (NM_054098.2,557-575).
ccaaacaaagagtaatgga

SEQ ID NO: 746366 - DNA, 19 bp, Mus musculus
  siRNA target sequence for AI481214 (NM_054098.2,573-591).
ggacattgctcgtactctt

SEQ ID NO: 746367 - DNA, 19 bp, Mus musculus
  siRNA target sequence for AI481214 (NM_054098.2,629-647).
ccagtgaaattgaaaacta

SEQ ID NO: 746368 - DNA, 19 bp, Mus musculus
  siRNA target sequence for AI481214 (NM_054098.2,665-683).
caatgtggaggtttccttt

SEQ ID NO: 746369 - DNA, 19 bp, Mus musculus
  siRNA target sequence for AI481214 (NM_054098.2,669-687).
gtggaggtttcctttctat

SEQ ID NO: 746370 - DNA, 19 bp, Mus musculus
  siRNA target sequence for AI481214 (NM_054098.2,727-745).
gcaatacgagaggtgatat

SEQ ID NO: 746371 - DNA, 19 bp, Mus musculus
  siRNA target sequence for AI481214 (NM_054098.2,728-746).
caatacgagaggtgatata

SEQ ID NO: 746372 - DNA, 19 bp, Mus musculus
  siRNA target sequence for AI481214 (NM_054098.2,750-768).
ctacgtgaatgggaaaaca

SEQ ID NO: 746373 - DNA, 19 bp, Mus musculus
  siRNA target sequence for AI481214 (NM_054098.2,795-813).
catcccgaatcgtgtcttt

SEQ ID NO: 746374 - DNA, 19 bp, Mus musculus
  siRNA target sequence for AI481214 (NM_054098.2,799-817).
ccgaatcgtgtctttccta

SEQ ID NO: 746375 - DNA, 19 bp, Mus musculus
  siRNA target sequence for AI481214 (NM_054098.2,800-818).
cgaatcgtgtctttcctat

SEQ ID NO: 746376 - DNA, 19 bp, Mus musculus
  siRNA target sequence for AI481214 (NM_054098.2,801-819).
gaatcgtgtctttcctata

SEQ ID NO: 746377 - DNA, 19 bp, Mus musculus
  siRNA target sequence for AI481214 (NM_054098.2,843-861).
ggtgtacctccctggtatt

SEQ ID NO: 746378 - DNA, 19 bp, Mus musculus
  siRNA target sequence for AI481214 (NM_054098.2,880-898).
ctctatcgaggcacaaagt

SEQ ID NO: 746379 - DNA, 19 bp, Mus musculus
  siRNA target sequence for AI481214 (NM_054098.2,919-937).
cttgaccattggatgcttt

SEQ ID NO: 746380 - DNA, 19 bp, Mus musculus
  siRNA target sequence for AI481214 (NM_054098.2,987-1005).
catctacacacttgtgatt

SEQ ID NO: 746381 - DNA, 19 bp, Mus musculus
  siRNA target sequence for AI481214 (NM_054098.2,1002-1020).
gattcctatccgttactat

SEQ ID NO: 746382 - DNA, 19 bp, Mus musculus
  siRNA target sequence for AI481214 (NM_054098.2,1033-1051).
ctgagaaatgcaaccatta

SEQ ID NO: 746383 - DNA, 19 bp, Mus musculus
  siRNA target sequence for AI481214 (NM_054098.2,1052-1070).
ctcaggccctaactaataa

SEQ ID NO: 746384 - DNA, 19 bp, Mus musculus
  siRNA target sequence for AI481214 (NM_054098.2,1072-1090).
gacagcccatttattacct

SEQ ID NO: 746385 - DNA, 19 bp, Mus musculus
  siRNA target sequence for AI481214 (NM_054098.2,1089-1107).
ctcttatgcctggattaat

SEQ ID NO: 746386 - DNA, 19 bp, Mus musculus
  siRNA target sequence for AI481214 (NM_054098.2,1091-1109).
cttatgcctggattaatga

SEQ ID NO: 746387 - DNA, 19 bp, Mus musculus
  siRNA target sequence for AI481214 (NM_054098.2,1169-1187).
ccttgccatcagtaagcaa

SEQ ID NO: 746388 - DNA, 19 bp, Mus musculus
  siRNA target sequence for AI481214 (NM_054098.2,1270-1288).
gtgtatggcggaaagagat

SEQ ID NO: 746389 - DNA, 19 bp, Mus musculus
  siRNA target sequence for AI481214 (NM_054098.2,1380-1398).
cctcatcatgccatgcata

SEQ ID NO: 746390 - DNA, 19 bp, Mus musculus
  siRNA target sequence for AI481214 (NM_054098.2,1420-1438).
cgccagggctgggaaagaa

SEQ ID NO: 746391 - DNA, 19 bp, Mus musculus
  siRNA target sequence for AI481214 (NM_054098.2,1464-1482).
gaacggaaaatcggatatt

SEQ ID NO: 746392 - DNA, 19 bp, Mus musculus
  siRNA target sequence for 2310034C09Rik (NM_054100.1,528-546).
ctcagtggggtatggaaat

SEQ ID NO: 746393 - DNA, 19 bp, Mus musculus
  siRNA target sequence for 2310034C09Rik (NM_054100.1,550-568).
ggcttcagacccctcaatt

SEQ ID NO: 746394 - DNA, 19 bp, Mus musculus
  siRNA target sequence for 2310034C09Rik (NM_054100.1,608-626).
gatattgctctccaatcta

SEQ ID NO: 746395 - DNA, 19 bp, Mus musculus
  siRNA target sequence for Ghitm (NM_078478.1,196-214).
gtgaagaattccatcacaa

SEQ ID NO: 746396 - DNA, 19 bp, Mus musculus
  siRNA target sequence for Ghitm (NM_078478.1,250-268).
gctaccaagacaagaatta

SEQ ID NO: 746397 - DNA, 19 bp, Mus musculus
  siRNA target sequence for Ghitm (NM_078478.1,312-330).
cttggaaccatcaatggaa

SEQ ID NO: 746398 - DNA, 19 bp, Mus musculus
  siRNA target sequence for Ghitm (NM_078478.1,430-448).
gagattggagctatcgaaa

SEQ ID NO: 746399 - DNA, 19 bp, Mus musculus
  siRNA target sequence for Ghitm (NM_078478.1,462-480).
gcctcagtatgtaaaggat

SEQ ID NO: 746400 - DNA, 19 bp, Mus musculus
  siRNA target sequence for Ghitm (NM_078478.1,463-481).
cctcagtatgtaaaggata

SEQ ID NO: 746401 - DNA, 19 bp, Mus musculus
  siRNA target sequence for Ghitm (NM_078478.1,468-486).
gtatgtaaaggatagaatt

SEQ ID NO: 746402 - DNA, 19 bp, Mus musculus
  siRNA target sequence for Ghitm (NM_078478.1,482-500).
gaattcattctacttacat

SEQ ID NO: 746403 - DNA, 19 bp, Mus musculus
  siRNA target sequence for Ghitm (NM_078478.1,508-526).
gcaggaagtattggtttaa

SEQ ID NO: 746404 - DNA, 19 bp, Mus musculus
  siRNA target sequence for Ghitm (NM_078478.1,563-581).
ctctcatgaacttcatgat

SEQ ID NO: 746405 - DNA, 19 bp, Mus musculus
  siRNA target sequence for Ghitm (NM_078478.1,588-606).
ctcttgggtgacaattggt

SEQ ID NO: 746406 - DNA, 19 bp, Mus musculus
  siRNA target sequence for Ghitm (NM_078478.1,624-642).
gattggagctggaatgctt

SEQ ID NO: 746407 - DNA, 19 bp, Mus musculus
  siRNA target sequence for Ghitm (NM_078478.1,629-647).
gagctggaatgcttgtaca

SEQ ID NO: 746408 - DNA, 19 bp, Mus musculus
  siRNA target sequence for Ghitm (NM_078478.1,640-658).
cttgtacactcaatatcat

SEQ ID NO: 746409 - DNA, 19 bp, Mus musculus
  siRNA target sequence for Ghitm (NM_078478.1,726-744).
ggctcctctgacgatctta

SEQ ID NO: 746410 - DNA, 19 bp, Mus musculus
  siRNA target sequence for Ghitm (NM_078478.1,773-791).
ggtacaccgctggtattgt

SEQ ID NO: 746411 - DNA, 19 bp, Mus musculus
  siRNA target sequence for Ghitm (NM_078478.1,821-839).
cgcctagtgagaagtttct

SEQ ID NO: 746412 - DNA, 19 bp, Mus musculus
  siRNA target sequence for Ghitm (NM_078478.1,823-841).
cctagtgagaagtttctga

SEQ ID NO: 746413 - DNA, 19 bp, Mus musculus
  siRNA target sequence for Ghitm (NM_078478.1,939-957).
gtactcagtggcaatgtat

SEQ ID NO: 746414 - DNA, 19 bp, Mus musculus
  siRNA target sequence for Ghitm (NM_078478.1,948-966).
ggcaatgtatggtggatta

SEQ ID NO: 746415 - DNA, 19 bp, Mus musculus
  siRNA target sequence for Ghitm (NM_078478.1,994-1012).
gatactcagaaagtaatca

SEQ ID NO: 746416 - DNA, 19 bp, Mus musculus
  siRNA target sequence for Ghitm (NM_078478.1,1035-1053).
gtatggagctcaaaagtat

SEQ ID NO: 746417 - DNA, 19 bp, Mus musculus
  siRNA target sequence for Ghitm (NM_078478.1,1057-1075).
cccatcaattcgatgttga

SEQ ID NO: 746418 - DNA, 19 bp, Mus musculus
  siRNA target sequence for Ghitm (NM_078478.1,1067-1085).
cgatgttgacaatctacat

SEQ ID NO: 746419 - DNA, 19 bp, Mus musculus
  siRNA target sequence for Ghitm (NM_078478.1,1076-1094).
caatctacatggatacatt

SEQ ID NO: 746420 - DNA, 19 bp, Mus musculus
  siRNA target sequence for Ghitm (NM_078478.1,1107-1125).
gcgagttgcaactatgcta

SEQ ID NO: 746421 - DNA, 19 bp, Mus musculus
  siRNA target sequence for Elmo2 (NM_080287.1,5-23).
gccgcctccgtctgacatt

SEQ ID NO: 746422 - DNA, 19 bp, Mus musculus
  siRNA target sequence for Elmo2 (NM_080287.1,7-25).
cgcctccgtctgacattgt

SEQ ID NO: 746423 - DNA, 19 bp, Mus musculus
  siRNA target sequence for Elmo2 (NM_080287.1,9-27).
cctccgtctgacattgtca

SEQ ID NO: 746424 - DNA, 19 bp, Mus musculus
  siRNA target sequence for Elmo2 (NM_080287.1,10-28).
ctccgtctgacattgtcaa

SEQ ID NO: 746425 - DNA, 19 bp, Mus musculus
  siRNA target sequence for Elmo2 (NM_080287.1,87-105).
ccgctggcatccatcatca

SEQ ID NO: 746426 - DNA, 19 bp, Mus musculus
  siRNA target sequence for Elmo2 (NM_080287.1,88-106).
cgctggcatccatcatcaa

SEQ ID NO: 746427 - DNA, 19 bp, Mus musculus
  siRNA target sequence for Elmo2 (NM_080287.1,132-150).
ccgaacccggagtactaca

SEQ ID NO: 746428 - DNA, 19 bp, Mus musculus
  siRNA target sequence for Elmo2 (NM_080287.1,187-205).
cggagcagacccgaaatga

SEQ ID NO: 746429 - DNA, 19 bp, Mus musculus
  siRNA target sequence for Elmo2 (NM_080287.1,189-207).
gagcagacccgaaatgaca

SEQ ID NO: 746430 - DNA, 19 bp, Mus musculus
  siRNA target sequence for Elmo2 (NM_080287.1,191-209).
gcagacccgaaatgacatt

SEQ ID NO: 746431 - DNA, 19 bp, Mus musculus
  siRNA target sequence for Elmo2 (NM_080287.1,192-210).
cagacccgaaatgacatta

SEQ ID NO: 746432 - DNA, 19 bp, Mus musculus
  siRNA target sequence for Elmo2 (NM_080287.1,196-214).
cccgaaatgacattaagaa

SEQ ID NO: 746433 - DNA, 19 bp, Mus musculus
  siRNA target sequence for Elmo2 (NM_080287.1,270-288).
gaaaggacccagtcatcta

SEQ ID NO: 746434 - DNA, 19 bp, Mus musculus
  siRNA target sequence for Elmo2 (NM_080287.1,274-292).
ggacccagtcatctagtat

SEQ ID NO: 746435 - DNA, 19 bp, Mus musculus
  siRNA target sequence for Elmo2 (NM_080287.1,445-463).
ccctgactgccttcttaga

SEQ ID NO: 746436 - DNA, 19 bp, Mus musculus
  siRNA target sequence for Elmo2 (NM_080287.1,497-515).
ggtttcagtcacctttatt

SEQ ID NO: 746437 - DNA, 19 bp, Mus musculus
  siRNA target sequence for Elmo2 (NM_080287.1,585-603).
ctagagagcatggtactaa

SEQ ID NO: 746438 - DNA, 19 bp, Mus musculus
  siRNA target sequence for Elmo2 (NM_080287.1,695-713).
ctacgccattgctctgatt

SEQ ID NO: 746439 - DNA, 19 bp, Mus musculus
  siRNA target sequence for Elmo2 (NM_080287.1,814-832).
gagggaatcgtccaatcaa

SEQ ID NO: 746440 - DNA, 19 bp, Mus musculus
  siRNA target sequence for Elmo2 (NM_080287.1,816-834).
gggaatcgtccaatcaaaa

SEQ ID NO: 746441 - DNA, 19 bp, Mus musculus
  siRNA target sequence for Elmo2 (NM_080287.1,866-884).
ggtcttgacctttaacctt

SEQ ID NO: 746442 - DNA, 19 bp, Mus musculus
  siRNA target sequence for Elmo2 (NM_080287.1,1017-1035).
cgcaaggccatgtatacca

SEQ ID NO: 746443 - DNA, 19 bp, Mus musculus
  siRNA target sequence for Elmo2 (NM_080287.1,1018-1036).
gcaaggccatgtataccaa

SEQ ID NO: 746444 - DNA, 19 bp, Mus musculus
  siRNA target sequence for Elmo2 (NM_080287.1,1265-1283).
cggggagctccctaatgaa

SEQ ID NO: 746445 - DNA, 19 bp, Mus musculus
  siRNA target sequence for Elmo2 (NM_080287.1,1387-1405).
gggcgacagccgaggattt

SEQ ID NO: 746446 - DNA, 19 bp, Mus musculus
  siRNA target sequence for Elmo2 (NM_080287.1,1398-1416).
gaggatttcaacaaggtta

SEQ ID NO: 746447 - DNA, 19 bp, Mus musculus
  siRNA target sequence for Elmo2 (NM_080287.1,1452-1470).
ccctctaaacccaactctt

SEQ ID NO: 746448 - DNA, 19 bp, Mus musculus
  siRNA target sequence for Elmo2 (NM_080287.1,1462-1480).
ccaactctttggatcagtt

SEQ ID NO: 746449 - DNA, 19 bp, Mus musculus
  siRNA target sequence for Elmo2 (NM_080287.1,1472-1490).
ggatcagttcaagagtaaa

SEQ ID NO: 746450 - DNA, 19 bp, Mus musculus
  siRNA target sequence for Elmo2 (NM_080287.1,1713-1731).
gcactgaaccacaaggttt

SEQ ID NO: 746451 - DNA, 19 bp, Mus musculus
  siRNA target sequence for Elmo2 (NM_080287.1,1819-1837).
ccattgttactggaaaaga

SEQ ID NO: 746452 - DNA, 19 bp, Mus musculus
  siRNA target sequence for Elmo2 (NM_080287.1,1898-1916).
cttctccatcctgtatgat

SEQ ID NO: 746453 - DNA, 19 bp, Mus musculus
  siRNA target sequence for Elmo2 (NM_080287.1,1942-1960).
ctcccaacaagtatgagta

SEQ ID NO: 746454 - DNA, 19 bp, Mus musculus
  siRNA target sequence for Elmo2 (NM_080287.1,2131-2149).
gctatgacttcgtctatca

SEQ ID NO: 746455 - DNA, 19 bp, Mus musculus
  siRNA target sequence for Igsf8 (NM_080419.1,267-285).
ctgcaacgtgagtgactat

SEQ ID NO: 746456 - DNA, 19 bp, Mus musculus
  siRNA target sequence for Igsf8 (NM_080419.1,269-287).
gcaacgtgagtgactatga

SEQ ID NO: 746457 - DNA, 19 bp, Mus musculus
  siRNA target sequence for Igsf8 (NM_080419.1,378-396).
gttctcctatgctgtcttt

SEQ ID NO: 746458 - DNA, 19 bp, Mus musculus
  siRNA target sequence for Igsf8 (NM_080419.1,993-1011).
ggcagtcctggctcatgtt

SEQ ID NO: 746459 - DNA, 19 bp, Mus musculus
  siRNA target sequence for Igsf8 (NM_080419.1,995-1013).
cagtcctggctcatgttga

SEQ ID NO: 746460 - DNA, 19 bp, Mus musculus
  siRNA target sequence for Igsf8 (NM_080419.1,1076-1094).
caggcgaacccttagaact

SEQ ID NO: 746461 - DNA, 19 bp, Mus musculus
  siRNA target sequence for Igsf8 (NM_080419.1,1497-1515).
ctccctgctatgcaacata

SEQ ID NO: 746462 - DNA, 19 bp, Mus musculus
  siRNA target sequence for Igsf8 (NM_080419.1,1500-1518).
cctgctatgcaacatatct

SEQ ID NO: 746463 - DNA, 19 bp, Mus musculus
  siRNA target sequence for Zfp312 (NM_080433.1,354-372).
gcgtcaccggccacttcta

SEQ ID NO: 746464 - DNA, 19 bp, Mus musculus
  siRNA target sequence for Zfp312 (NM_080433.1,355-373).
cgtcaccggccacttctaa

SEQ ID NO: 746465 - DNA, 19 bp, Mus musculus
  siRNA target sequence for Zfp312 (NM_080433.1,356-374).
gtcaccggccacttctaaa

SEQ ID NO: 746466 - DNA, 19 bp, Mus musculus
  siRNA target sequence for Zfp312 (NM_080433.1,361-379).
cggccacttctaaaacact

SEQ ID NO: 746467 - DNA, 19 bp, Mus musculus
  siRNA target sequence for Zfp312 (NM_080433.1,367-385).
cttctaaaacactagcttt

SEQ ID NO: 746468 - DNA, 19 bp, Mus musculus
  siRNA target sequence for Zfp312 (NM_080433.1,499-517).
cgccgctgccctgtatgat

SEQ ID NO: 746469 - DNA, 19 bp, Mus musculus
  siRNA target sequence for Zfp312 (NM_080433.1,550-568).
ccaagacgctgctcagtta

SEQ ID NO: 746470 - DNA, 19 bp, Mus musculus
  siRNA target sequence for Zfp312 (NM_080433.1,652-670).
gcggcttgtgcaaaaccaa

SEQ ID NO: 746471 - DNA, 19 bp, Mus musculus
  siRNA target sequence for Zfp312 (NM_080433.1,784-802).
ctctctactacttcaacta

SEQ ID NO: 746472 - DNA, 19 bp, Mus musculus
  siRNA target sequence for Zfp312 (NM_080433.1,898-916).
ctcaccccaagctttttct

SEQ ID NO: 746473 - DNA, 19 bp, Mus musculus
  siRNA target sequence for Zfp312 (NM_080433.1,940-958).
gcctggctgcggacaagtt

SEQ ID NO: 746474 - DNA, 19 bp, Mus musculus
  siRNA target sequence for Zfp312 (NM_080433.1,970-988).
cttcctatccccataagga

SEQ ID NO: 746475 - DNA, 19 bp, Mus musculus
  siRNA target sequence for Zfp312 (NM_080433.1,1133-1151).
ggtgttcaatgctcactat

SEQ ID NO: 746476 - DNA, 19 bp, Mus musculus
  siRNA target sequence for Zfp312 (NM_080433.1,1182-1200).
ggagctagaccgtttgtgt

SEQ ID NO: 746477 - DNA, 19 bp, Mus musculus
  siRNA target sequence for Zfp312 (NM_080433.1,1432-1450).
gcggcgagaagcagtacaa

SEQ ID NO: 746478 - DNA, 19 bp, Mus musculus
  siRNA target sequence for Zfp312 (NM_080433.1,1443-1461).
cagtacaaatgcactatct

SEQ ID NO: 746479 - DNA, 19 bp, Mus musculus
  siRNA target sequence for Zfp312 (NM_080433.1,1539-1557).
gccacttgcggcaaaggtt

SEQ ID NO: 746480 - DNA, 19 bp, Mus musculus
  siRNA target sequence for Zfp312 (NM_080433.1,1540-1558).
ccacttgcggcaaaggttt

SEQ ID NO: 746481 - DNA, 19 bp, Mus musculus
  siRNA target sequence for Stk22d (NM_080442.1,534-552).
gcccaccgggaccttaagt

SEQ ID NO: 746482 - DNA, 19 bp, Mus musculus
  siRNA target sequence for Synpo2 (NM_080451.1,3-21).
gattccttgcagtcatcaa

SEQ ID NO: 746483 - DNA, 19 bp, Mus musculus
  siRNA target sequence for Synpo2 (NM_080451.1,14-32).
gtcatcaattcagtacaat

SEQ ID NO: 746484 - DNA, 19 bp, Mus musculus
  siRNA target sequence for Synpo2 (NM_080451.1,386-404).
ctggactggtggacattga

SEQ ID NO: 746485 - DNA, 19 bp, Mus musculus
  siRNA target sequence for Synpo2 (NM_080451.1,388-406).
ggactggtggacattgaaa

SEQ ID NO: 746486 - DNA, 19 bp, Mus musculus
  siRNA target sequence for Synpo2 (NM_080451.1,389-407).
gactggtggacattgaaaa

SEQ ID NO: 746487 - DNA, 19 bp, Mus musculus
  siRNA target sequence for Synpo2 (NM_080451.1,393-411).
ggtggacattgaaaagaga

SEQ ID NO: 746488 - DNA, 19 bp, Mus musculus
  siRNA target sequence for Synpo2 (NM_080451.1,418-436).
cgaggggacaagatggaaa

SEQ ID NO: 746489 - DNA, 19 bp, Mus musculus
  siRNA target sequence for Synpo2 (NM_080451.1,419-437).
gaggggacaagatggaaat

SEQ ID NO: 746490 - DNA, 19 bp, Mus musculus
  siRNA target sequence for Synpo2 (NM_080451.1,421-439).
ggggacaagatggaaatgt

SEQ ID NO: 746491 - DNA, 19 bp, Mus musculus
  siRNA target sequence for Synpo2 (NM_080451.1,456-474).
caagggagcgctcatgttt

SEQ ID NO: 746492 - DNA, 19 bp, Mus musculus
  siRNA target sequence for Synpo2 (NM_080451.1,1486-1504).
gcagtagtggtcagtcata

SEQ ID NO: 746493 - DNA, 19 bp, Mus musculus
  siRNA target sequence for Synpo2 (NM_080451.1,1487-1505).
cagtagtggtcagtcataa

SEQ ID NO: 746494 - DNA, 19 bp, Mus musculus
  siRNA target sequence for Synpo2 (NM_080451.1,1525-1543).
gcacccacaccattagtaa

SEQ ID NO: 746495 - DNA, 19 bp, Mus musculus
  siRNA target sequence for Synpo2 (NM_080451.1,1526-1544).
cacccacaccattagtaaa

SEQ ID NO: 746496 - DNA, 19 bp, Mus musculus
  siRNA target sequence for Synpo2 (NM_080451.1,1606-1624).
gcccaactcttcgctaaaa

SEQ ID NO: 746497 - DNA, 19 bp, Mus musculus
  siRNA target sequence for Synpo2 (NM_080451.1,1753-1771).
cccgtggcctacaatccta

SEQ ID NO: 746498 - DNA, 19 bp, Mus musculus
  siRNA target sequence for Synpo2 (NM_080451.1,1754-1772).
ccgtggcctacaatcctat

SEQ ID NO: 746499 - DNA, 19 bp, Mus musculus
  siRNA target sequence for Synpo2 (NM_080451.1,1758-1776).
ggcctacaatcctatccat

SEQ ID NO: 746500 - DNA, 19 bp, Mus musculus
  siRNA target sequence for Synpo2 (NM_080451.1,1759-1777).
gcctacaatcctatccatt

SEQ ID NO: 746501 - DNA, 19 bp, Mus musculus
  siRNA target sequence for Synpo2 (NM_080451.1,1789-1807).
ccactggctgctatcaagt

SEQ ID NO: 746502 - DNA, 19 bp, Mus musculus
  siRNA target sequence for Synpo2 (NM_080451.1,1822-1840).
gcccaggcttccaaaacga

SEQ ID NO: 746503 - DNA, 19 bp, Mus musculus
  siRNA target sequence for Synpo2 (NM_080451.1,1852-1870).
ggcaagaaacctcttaaca

SEQ ID NO: 746504 - DNA, 19 bp, Mus musculus
  siRNA target sequence for Synpo2 (NM_080451.1,1900-1918).
cagctcaacgcgtctttgt

SEQ ID NO: 746505 - DNA, 19 bp, Mus musculus
  siRNA target sequence for Synpo2 (NM_080451.1,1902-1920).
gctcaacgcgtctttgttt

SEQ ID NO: 746506 - DNA, 19 bp, Mus musculus
  siRNA target sequence for Synpo2 (NM_080451.1,1903-1921).
ctcaacgcgtctttgttta

SEQ ID NO: 746507 - DNA, 19 bp, Mus musculus
  siRNA target sequence for Synpo2 (NM_080451.1,1908-1926).
cgcgtctttgtttaccttt

SEQ ID NO: 746508 - DNA, 19 bp, Mus musculus
  siRNA target sequence for Synpo2 (NM_080451.1,1948-1966).
ggcctccctcagaagtcaa

SEQ ID NO: 746509 - DNA, 19 bp, Mus musculus
  siRNA target sequence for Synpo2 (NM_080451.1,2174-2192).
cgacctccacatcctattt

SEQ ID NO: 746510 - DNA, 19 bp, Mus musculus
  siRNA target sequence for Synpo2 (NM_080451.1,2175-2193).
gacctccacatcctatttt

SEQ ID NO: 746511 - DNA, 19 bp, Mus musculus
  siRNA target sequence for Synpo2 (NM_080451.1,2211-2229).
gttctcagccaagaaaagt

SEQ ID NO: 746512 - DNA, 19 bp, Mus musculus
  siRNA target sequence for Bsnd (NM_080458.1,295-313).
ggtctacggcaccttctat

SEQ ID NO: 746513 - DNA, 19 bp, Mus musculus
  siRNA target sequence for Bsnd (NM_080458.1,351-369).
ggagcatgtgccaatgcta

SEQ ID NO: 746514 - DNA, 19 bp, Mus musculus
  siRNA target sequence for Bsnd (NM_080458.1,352-370).
gagcatgtgccaatgctat

SEQ ID NO: 746515 - DNA, 19 bp, Mus musculus
  siRNA target sequence for Bsnd (NM_080458.1,362-380).
caatgctatcctaagatca

SEQ ID NO: 746516 - DNA, 19 bp, Mus musculus
  siRNA target sequence for Bsnd (NM_080458.1,401-419).
gacttccaaggcatcttgt

SEQ ID NO: 746517 - DNA, 19 bp, Mus musculus
  siRNA target sequence for Bsnd (NM_080458.1,699-717).
gagagaaatcccattctca

SEQ ID NO: 746518 - DNA, 19 bp, Mus musculus
  siRNA target sequence for Bsnd (NM_080458.1,1077-1095).
ccctacccgacaaagagtt

SEQ ID NO: 746519 - DNA, 19 bp, Mus musculus
  siRNA target sequence for Strc (NM_080459.1,149-167).
ctactgggcctcagtcttt

SEQ ID NO: 746520 - DNA, 19 bp, Mus musculus
  siRNA target sequence for Strc (NM_080459.1,258-276).
cctggccaacatttcttca

SEQ ID NO: 746521 - DNA, 19 bp, Mus musculus
  siRNA target sequence for Strc (NM_080459.1,336-354).
ccctgcacttcgacttcat

SEQ ID NO: 746522 - DNA, 19 bp, Mus musculus
  siRNA target sequence for Strc (NM_080459.1,338-356).
ctgcacttcgacttcatga

SEQ ID NO: 746523 - DNA, 19 bp, Mus musculus
  siRNA target sequence for Strc (NM_080459.1,340-358).
gcacttcgacttcatgatt

SEQ ID NO: 746524 - DNA, 19 bp, Mus musculus
  siRNA target sequence for Strc (NM_080459.1,596-614).
ggttgccttctctgatgtt

SEQ ID NO: 746525 - DNA, 19 bp, Mus musculus
  siRNA target sequence for Strc (NM_080459.1,605-623).
ctctgatgttgttattaga

SEQ ID NO: 746526 - DNA, 19 bp, Mus musculus
  siRNA target sequence for Strc (NM_080459.1,660-678).
cagtgtggacccaaccaat

SEQ ID NO: 746527 - DNA, 19 bp, Mus musculus
  siRNA target sequence for Strc (NM_080459.1,700-718).
gagccagctcctcactttt

SEQ ID NO: 746528 - DNA, 19 bp, Mus musculus
  siRNA target sequence for Strc (NM_080459.1,835-853).
ctactgcgagtcactcatt

SEQ ID NO: 746529 - DNA, 19 bp, Mus musculus
  siRNA target sequence for Strc (NM_080459.1,862-880).
gatgaggtcttttctatta

SEQ ID NO: 746530 - DNA, 19 bp, Mus musculus
  siRNA target sequence for Strc (NM_080459.1,949-967).
ggcatgcggaacaaccttt

SEQ ID NO: 746531 - DNA, 19 bp, Mus musculus
  siRNA target sequence for Strc (NM_080459.1,977-995).
cccgagcactgggttttct

SEQ ID NO: 746532 - DNA, 19 bp, Mus musculus
  siRNA target sequence for Strc (NM_080459.1,978-996).
ccgagcactgggttttcta

SEQ ID NO: 746533 - DNA, 19 bp, Mus musculus
  siRNA target sequence for Strc (NM_080459.1,1370-1388).
gccagacagctgtatggta

SEQ ID NO: 746534 - DNA, 19 bp, Mus musculus
  siRNA target sequence for Strc (NM_080459.1,1438-1456).
gatcagtttcctgatcaat

SEQ ID NO: 746535 - DNA, 19 bp, Mus musculus
  siRNA target sequence for Strc (NM_080459.1,1450-1468).
gatcaatttctggatatga

SEQ ID NO: 746536 - DNA, 19 bp, Mus musculus
  siRNA target sequence for Strc (NM_080459.1,1470-1488).
ctgcggcaacctctcattt

SEQ ID NO: 746537 - DNA, 19 bp, Mus musculus
  siRNA target sequence for Strc (NM_080459.1,1473-1491).
cggcaacctctcattttca

SEQ ID NO: 746538 - DNA, 19 bp, Mus musculus
  siRNA target sequence for Strc (NM_080459.1,1588-1606).
ctcaccccagaaatattct

SEQ ID NO: 746539 - DNA, 19 bp, Mus musculus
  siRNA target sequence for Strc (NM_080459.1,1724-1742).
ccttggacgccactgattt

SEQ ID NO: 746540 - DNA, 19 bp, Mus musculus
  siRNA target sequence for Strc (NM_080459.1,1728-1746).
ggacgccactgattttcca

SEQ ID NO: 746541 - DNA, 19 bp, Mus musculus
  siRNA target sequence for Strc (NM_080459.1,1882-1900).
cgtggaggaaatgatactt

SEQ ID NO: 746542 - DNA, 19 bp, Mus musculus
  siRNA target sequence for Strc (NM_080459.1,2044-2062).
caccccacgcgcctacatt

SEQ ID NO: 746543 - DNA, 19 bp, Mus musculus
  siRNA target sequence for Strc (NM_080459.1,2048-2066).
ccacgcgcctacattacct

SEQ ID NO: 746544 - DNA, 19 bp, Mus musculus
  siRNA target sequence for Strc (NM_080459.1,2112-2130).
cgagacgcaggggatgtta

SEQ ID NO: 746545 - DNA, 19 bp, Mus musculus
  siRNA target sequence for Strc (NM_080459.1,2216-2234).
ggacagtcggagagtactt

SEQ ID NO: 746546 - DNA, 19 bp, Mus musculus
  siRNA target sequence for Strc (NM_080459.1,2327-2345).
ctgtactgtgggatctact

SEQ ID NO: 746547 - DNA, 19 bp, Mus musculus
  siRNA target sequence for Strc (NM_080459.1,2570-2588).
cctcccaactctttatcga

SEQ ID NO: 746548 - DNA, 19 bp, Mus musculus
  siRNA target sequence for Strc (NM_080459.1,2914-2932).
gtgcttcgtagcctagtaa

SEQ ID NO: 746549 - DNA, 19 bp, Mus musculus
  siRNA target sequence for Strc (NM_080459.1,3098-3116).
gacgggtggcatatgaact

SEQ ID NO: 746550 - DNA, 19 bp, Mus musculus
  siRNA target sequence for Strc (NM_080459.1,3101-3119).
gggtggcatatgaacttct

SEQ ID NO: 746551 - DNA, 19 bp, Mus musculus
  siRNA target sequence for Strc (NM_080459.1,3480-3498).
gcagacctttcgggtaaaa

SEQ ID NO: 746552 - DNA, 19 bp, Mus musculus
  siRNA target sequence for Strc (NM_080459.1,3483-3501).
gacctttcgggtaaaagat

SEQ ID NO: 746553 - DNA, 19 bp, Mus musculus
  siRNA target sequence for Strc (NM_080459.1,3633-3651).
ggcaaaccgaagactctat

SEQ ID NO: 746554 - DNA, 19 bp, Mus musculus
  siRNA target sequence for Strc (NM_080459.1,3673-3691).
caacaggcacagtttctct

SEQ ID NO: 746555 - DNA, 19 bp, Mus musculus
  siRNA target sequence for Strc (NM_080459.1,3761-3779).
gcatgacctgcgagtttct

SEQ ID NO: 746556 - DNA, 19 bp, Mus musculus
  siRNA target sequence for Strc (NM_080459.1,3783-3801).
gcagatcagctcaatggtt

SEQ ID NO: 746557 - DNA, 19 bp, Mus musculus
  siRNA target sequence for Strc (NM_080459.1,3789-3807).
cagctcaatggttgacttt

SEQ ID NO: 746558 - DNA, 19 bp, Mus musculus
  siRNA target sequence for Strc (NM_080459.1,3794-3812).
caatggttgactttcttga

SEQ ID NO: 746559 - DNA, 19 bp, Mus musculus
  siRNA target sequence for Strc (NM_080459.1,3979-3997).
cagctgatggacagattgt

SEQ ID NO: 746560 - DNA, 19 bp, Mus musculus
  siRNA target sequence for Strc (NM_080459.1,4087-4105).
gcagagcgagcacttaaaa

SEQ ID NO: 746561 - DNA, 19 bp, Mus musculus
  siRNA target sequence for Strc (NM_080459.1,4197-4215).
gatccctttacccattcta

SEQ ID NO: 746562 - DNA, 19 bp, Mus musculus
  siRNA target sequence for Strc (NM_080459.1,4342-4360).
caagctggacgcctagtat

SEQ ID NO: 746563 - DNA, 19 bp, Mus musculus
  siRNA target sequence for Strc (NM_080459.1,4345-4363).
gctggacgcctagtattca

SEQ ID NO: 746564 - DNA, 19 bp, Mus musculus
  siRNA target sequence for Strc (NM_080459.1,4600-4618).
gcctggtctgcgacacaaa

SEQ ID NO: 746565 - DNA, 19 bp, Mus musculus
  siRNA target sequence for Strc (NM_080459.1,4605-4623).
gtctgcgacacaaatctca

SEQ ID NO: 746566 - DNA, 19 bp, Mus musculus
  siRNA target sequence for Strc (NM_080459.1,4844-4862).
gcagcctggggcaaataga

SEQ ID NO: 746567 - DNA, 19 bp, Mus musculus
  siRNA target sequence for Strc (NM_080459.1,4953-4971).
gacagcactgggttacaca

SEQ ID NO: 746568 - DNA, 19 bp, Mus musculus
  siRNA target sequence for Strc (NM_080459.1,5114-5132).
gctttggcccagtcagtaa

SEQ ID NO: 746569 - DNA, 19 bp, Mus musculus
  siRNA target sequence for Strc (NM_080459.1,5141-5159).
ctgagatcttcactgaaat

SEQ ID NO: 746570 - DNA, 19 bp, Mus musculus
  siRNA target sequence for Strc (NM_080459.1,5231-5249).
ctcctcttgccatttctgt

SEQ ID NO: 746571 - DNA, 19 bp, Mus musculus
  siRNA target sequence for Strc (NM_080459.1,5280-5298).
caaccccatccagttatct

SEQ ID NO: 746572 - DNA, 19 bp, Mus musculus
  siRNA target sequence for Strc (NM_080459.1,5412-5430).
gcagctgggtcgaaactca

SEQ ID NO: 746573 - DNA, 19 bp, Mus musculus
  siRNA target sequence for Strc (NM_080459.1,5486-5504).
gcatttttggccacctatt

SEQ ID NO: 746574 - DNA, 19 bp, Mus musculus
  siRNA target sequence for Strc (NM_080459.1,5487-5505).
catttttggccacctatta

SEQ ID NO: 746575 - DNA, 19 bp, Mus musculus
  siRNA target sequence for Zfp358 (NM_080461.1,567-585).
ctgccacccccgaaatctt

SEQ ID NO: 746576 - DNA, 19 bp, Mus musculus
  siRNA target sequence for Zfp358 (NM_080461.1,1006-1024).
gggctctgcgctacttaaa

SEQ ID NO: 746577 - DNA, 19 bp, Mus musculus
  siRNA target sequence for Zfp358 (NM_080461.1,1460-1478).
ggtttgagcccagtatcta

SEQ ID NO: 746578 - DNA, 19 bp, Mus musculus
  siRNA target sequence for Zfp358 (NM_080461.1,1627-1645).
ccactcaggatctatctct

SEQ ID NO: 746579 - DNA, 19 bp, Mus musculus
  siRNA target sequence for Zfp358 (NM_080461.1,1642-1660).
ctctagtcccgatcttgtt

SEQ ID NO: 746580 - DNA, 19 bp, Mus musculus
  siRNA target sequence for Zfp358 (NM_080461.1,1644-1662).
ctagtcccgatcttgtttt

SEQ ID NO: 746581 - DNA, 19 bp, Mus musculus
  siRNA target sequence for Zfp358 (NM_080461.1,1737-1755).
gccctaaccccgatcttgt

SEQ ID NO: 746582 - DNA, 19 bp, Mus musculus
  siRNA target sequence for Zfp358 (NM_080461.1,1845-1863).
gtcccaagtgggtaaagga

SEQ ID NO: 746583 - DNA, 19 bp, Mus musculus
  siRNA target sequence for Ppp1r3a (NM_080464.1,23-41).
gtcagattagcaaagataa

SEQ ID NO: 746584 - DNA, 19 bp, Mus musculus
  siRNA target sequence for Ppp1r3a (NM_080464.1,27-45).
gattagcaaagataacttt

SEQ ID NO: 746585 - DNA, 19 bp, Mus musculus
  siRNA target sequence for Ppp1r3a (NM_080464.1,146-164).
gatcttcggaagacatgta

SEQ ID NO: 746586 - DNA, 19 bp, Mus musculus
  siRNA target sequence for Ppp1r3a (NM_080464.1,222-240).
cagccttgtgtctgttaaa

SEQ ID NO: 746587 - DNA, 19 bp, Mus musculus
  siRNA target sequence for Ppp1r3a (NM_080464.1,225-243).
ccttgtgtctgttaaagaa

SEQ ID NO: 746588 - DNA, 19 bp, Mus musculus
  siRNA target sequence for Ppp1r3a (NM_080464.1,226-244).
cttgtgtctgttaaagaat

SEQ ID NO: 746589 - DNA, 19 bp, Mus musculus
  siRNA target sequence for Ppp1r3a (NM_080464.1,255-273).
ggaactacccagtgtttca

SEQ ID NO: 746590 - DNA, 19 bp, Mus musculus
  siRNA target sequence for Ppp1r3a (NM_080464.1,262-280).
cccagtgtttcaactgatt

SEQ ID NO: 746591 - DNA, 19 bp, Mus musculus
  siRNA target sequence for Ppp1r3a (NM_080464.1,266-284).
gtgtttcaactgattttga

SEQ ID NO: 746592 - DNA, 19 bp, Mus musculus
  siRNA target sequence for Ppp1r3a (NM_080464.1,426-444).
catgaagggcattattcga

SEQ ID NO: 746593 - DNA, 19 bp, Mus musculus
  siRNA target sequence for Ppp1r3a (NM_080464.1,458-476).
cttttgagaagttagtgta

SEQ ID NO: 746594 - DNA, 19 bp, Mus musculus
  siRNA target sequence for Ppp1r3a (NM_080464.1,493-511).
gatgactggcagacacatt

SEQ ID NO: 746595 - DNA, 19 bp, Mus musculus
  siRNA target sequence for Ppp1r3a (NM_080464.1,500-518).
ggcagacacattatgacat

SEQ ID NO: 746596 - DNA, 19 bp, Mus musculus
  siRNA target sequence for Ppp1r3a (NM_080464.1,501-519).
gcagacacattatgacatt

SEQ ID NO: 746597 - DNA, 19 bp, Mus musculus
  siRNA target sequence for Ppp1r3a (NM_080464.1,502-520).
cagacacattatgacattt

SEQ ID NO: 746598 - DNA, 19 bp, Mus musculus
  siRNA target sequence for Ppp1r3a (NM_080464.1,555-573).
gactgaccaattctctttt

SEQ ID NO: 746599 - DNA, 19 bp, Mus musculus
  siRNA target sequence for Ppp1r3a (NM_080464.1,559-577).
gaccaattctcttttaaga

SEQ ID NO: 746600 - DNA, 19 bp, Mus musculus
  siRNA target sequence for Ppp1r3a (NM_080464.1,581-599).
cattggttccaccttatca

SEQ ID NO: 746601 - DNA, 19 bp, Mus musculus
  siRNA target sequence for Ppp1r3a (NM_080464.1,607-625).
ggcggtaaagtggagtttt

SEQ ID NO: 746602 - DNA, 19 bp, Mus musculus
  siRNA target sequence for Ppp1r3a (NM_080464.1,609-627).
cggtaaagtggagttttgt

SEQ ID NO: 746603 - DNA, 19 bp, Mus musculus
  siRNA target sequence for Ppp1r3a (NM_080464.1,621-639).
gttttgtatacgctatgaa

SEQ ID NO: 746604 - DNA, 19 bp, Mus musculus
  siRNA target sequence for Ppp1r3a (NM_080464.1,739-757).
gaagcacctagcagacaaa

SEQ ID NO: 746605 - DNA, 19 bp, Mus musculus
  siRNA target sequence for Ppp1r3a (NM_080464.1,742-760).
gcacctagcagacaaataa

SEQ ID NO: 746606 - DNA, 19 bp, Mus musculus
  siRNA target sequence for Ppp1r3a (NM_080464.1,743-761).
cacctagcagacaaataaa

SEQ ID NO: 746607 - DNA, 19 bp, Mus musculus
  siRNA target sequence for Ppp1r3a (NM_080464.1,763-781).
ggctgcttaaaggtaaaat

SEQ ID NO: 746608 - DNA, 19 bp, Mus musculus
  siRNA target sequence for Ppp1r3a (NM_080464.1,765-783).
ctgcttaaaggtaaaatca

SEQ ID NO: 746609 - DNA, 19 bp, Mus musculus
  siRNA target sequence for Ppp1r3a (NM_080464.1,774-792).
ggtaaaatcacgcagtaaa

SEQ ID NO: 746610 - DNA, 19 bp, Mus musculus
  siRNA target sequence for Ppp1r3a (NM_080464.1,785-803).
gcagtaaagaagaaccatt

SEQ ID NO: 746611 - DNA, 19 bp, Mus musculus
  siRNA target sequence for Ppp1r3a (NM_080464.1,804-822).
gctagcaccagaagaaaat

SEQ ID NO: 746612 - DNA, 19 bp, Mus musculus
  siRNA target sequence for Ppp1r3a (NM_080464.1,851-869).
cctacatcccaacaatcat

SEQ ID NO: 746613 - DNA, 19 bp, Mus musculus
  siRNA target sequence for Ppp1r3a (NM_080464.1,852-870).
ctacatcccaacaatcatt

SEQ ID NO: 746614 - DNA, 19 bp, Mus musculus
  siRNA target sequence for Ppp1r3a (NM_080464.1,855-873).
catcccaacaatcatttgt

SEQ ID NO: 746615 - DNA, 19 bp, Mus musculus
  siRNA target sequence for Ppp1r3a (NM_080464.1,858-876).
cccaacaatcatttgttct

SEQ ID NO: 746616 - DNA, 19 bp, Mus musculus
  siRNA target sequence for Ppp1r3a (NM_080464.1,897-915).
gggagccaatcatccaaat

SEQ ID NO: 746617 - DNA, 19 bp, Mus musculus
  siRNA target sequence for Ppp1r3a (NM_080464.1,899-917).
gagccaatcatccaaatgt

SEQ ID NO: 746618 - DNA, 19 bp, Mus musculus
  siRNA target sequence for Ppp1r3a (NM_080464.1,910-928).
ccaaatgtagacgatatca

SEQ ID NO: 746619 - DNA, 19 bp, Mus musculus
  siRNA target sequence for Ppp1r3a (NM_080464.1,911-929).
caaatgtagacgatatcaa

SEQ ID NO: 746620 - DNA, 19 bp, Mus musculus
  siRNA target sequence for Ppp1r3a (NM_080464.1,933-951).
gaagcatgacgaacacaat

SEQ ID NO: 746621 - DNA, 19 bp, Mus musculus
  siRNA target sequence for Ppp1r3a (NM_080464.1,957-975).
ggagctagacttgatgata

SEQ ID NO: 746622 - DNA, 19 bp, Mus musculus
  siRNA target sequence for Ppp1r3a (NM_080464.1,958-976).
gagctagacttgatgataa

SEQ ID NO: 746623 - DNA, 19 bp, Mus musculus
  siRNA target sequence for Ppp1r3a (NM_080464.1,972-990).
gataaaccaacggttaata

SEQ ID NO: 746624 - DNA, 19 bp, Mus musculus
  siRNA target sequence for Ppp1r3a (NM_080464.1,1018-1036).
gcaacagatacagtcaatt

SEQ ID NO: 746625 - DNA, 19 bp, Mus musculus
  siRNA target sequence for Ppp1r3a (NM_080464.1,1062-1080).
gaagaagcaagcttaccat

SEQ ID NO: 746626 - DNA, 19 bp, Mus musculus
  siRNA target sequence for Ppp1r3a (NM_080464.1,1069-1087).
caagcttaccatgaaatca

SEQ ID NO: 746627 - DNA, 19 bp, Mus musculus
  siRNA target sequence for Ppp1r3a (NM_080464.1,1098-1116).
gttcatggggcctttgtct

SEQ ID NO: 746628 - DNA, 19 bp, Mus musculus
  siRNA target sequence for Ppp1r3a (NM_080464.1,1106-1124).
ggcctttgtctccaagttt

SEQ ID NO: 746629 - DNA, 19 bp, Mus musculus
  siRNA target sequence for Ppp1r3a (NM_080464.1,1136-1154).
gttccttaaagcgagattt

SEQ ID NO: 746630 - DNA, 19 bp, Mus musculus
  siRNA target sequence for Ppp1r3a (NM_080464.1,1139-1157).
ccttaaagcgagatttcta

SEQ ID NO: 746631 - DNA, 19 bp, Mus musculus
  siRNA target sequence for Ppp1r3a (NM_080464.1,1140-1158).
cttaaagcgagatttctat

SEQ ID NO: 746632 - DNA, 19 bp, Mus musculus
  siRNA target sequence for Ppp1r3a (NM_080464.1,1155-1173).
ctatcatagcagaagttct

SEQ ID NO: 746633 - DNA, 19 bp, Mus musculus
  siRNA target sequence for Ppp1r3a (NM_080464.1,1176-1194).
cccaggaaatgaatatggt

SEQ ID NO: 746634 - DNA, 19 bp, Mus musculus
  siRNA target sequence for Ppp1r3a (NM_080464.1,1254-1272).
cactagttctgatgagtta

SEQ ID NO: 746635 - DNA, 19 bp, Mus musculus
  siRNA target sequence for Ppp1r3a (NM_080464.1,1259-1277).
gttctgatgagttaatgca

SEQ ID NO: 746636 - DNA, 19 bp, Mus musculus
  siRNA target sequence for Ppp1r3a (NM_080464.1,1347-1365).
ctcttccttcgatcaaaga

SEQ ID NO: 746637 - DNA, 19 bp, Mus musculus
  siRNA target sequence for Ppp1r3a (NM_080464.1,1349-1367).
cttccttcgatcaaagaat

SEQ ID NO: 746638 - DNA, 19 bp, Mus musculus
  siRNA target sequence for Ppp1r3a (NM_080464.1,1368-1386).
ggcatgtggtctcaagaat

SEQ ID NO: 746639 - DNA, 19 bp, Mus musculus
  siRNA target sequence for Ppp1r3a (NM_080464.1,1370-1388).
catgtggtctcaagaataa

SEQ ID NO: 746640 - DNA, 19 bp, Mus musculus
  siRNA target sequence for Ppp1r3a (NM_080464.1,1373-1391).
gtggtctcaagaataatga

SEQ ID NO: 746641 - DNA, 19 bp, Mus musculus
  siRNA target sequence for Ppp1r3a (NM_080464.1,1409-1427).
ctggaatacaagattacaa

SEQ ID NO: 746642 - DNA, 19 bp, Mus musculus
  siRNA target sequence for Ppp1r3a (NM_080464.1,1439-1457).
gagattccacaaaattgga

SEQ ID NO: 746643 - DNA, 19 bp, Mus musculus
  siRNA target sequence for Ppp1r3a (NM_080464.1,1509-1527).
ggagaagcaaacatgctta

SEQ ID NO: 746644 - DNA, 19 bp, Mus musculus
  siRNA target sequence for Ppp1r3a (NM_080464.1,1520-1538).
catgcttaggtgttaatga

SEQ ID NO: 746645 - DNA, 19 bp, Mus musculus
  siRNA target sequence for Ppp1r3a (NM_080464.1,1585-1603).
cacatggggtacccaaaaa

SEQ ID NO: 746646 - DNA, 19 bp, Mus musculus
  siRNA target sequence for Ppp1r3a (NM_080464.1,1587-1605).
catggggtacccaaaaata

SEQ ID NO: 746647 - DNA, 19 bp, Mus musculus
  siRNA target sequence for Ppp1r3a (NM_080464.1,1591-1609).
gggtacccaaaaataagca

SEQ ID NO: 746648 - DNA, 19 bp, Mus musculus
  siRNA target sequence for Ppp1r3a (NM_080464.1,1610-1628).
ctgaaggggataaagctaa

SEQ ID NO: 746649 - DNA, 19 bp, Mus musculus
  siRNA target sequence for Ppp1r3a (NM_080464.1,1612-1630).
gaaggggataaagctaata

SEQ ID NO: 746650 - DNA, 19 bp, Mus musculus
  siRNA target sequence for Ppp1r3a (NM_080464.1,1616-1634).
gggataaagctaataacca

SEQ ID NO: 746651 - DNA, 19 bp, Mus musculus
  siRNA target sequence for Ppp1r3a (NM_080464.1,1617-1635).
ggataaagctaataaccaa

SEQ ID NO: 746652 - DNA, 19 bp, Mus musculus
  siRNA target sequence for Ppp1r3a (NM_080464.1,1698-1716).
ctgtccttccacaaatgca

SEQ ID NO: 746653 - DNA, 19 bp, Mus musculus
  siRNA target sequence for Ppp1r3a (NM_080464.1,1759-1777).
ccaggaactagtgatctta

SEQ ID NO: 746654 - DNA, 19 bp, Mus musculus
  siRNA target sequence for Ppp1r3a (NM_080464.1,1796-1814).
gccctctgactgatgatca

SEQ ID NO: 746655 - DNA, 19 bp, Mus musculus
  siRNA target sequence for Ppp1r3a (NM_080464.1,1801-1819).
ctgactgatgatcatcttt

SEQ ID NO: 746656 - DNA, 19 bp, Mus musculus
  siRNA target sequence for Ppp1r3a (NM_080464.1,1956-1974).
caaagaacaagcagagtat

SEQ ID NO: 746657 - DNA, 19 bp, Mus musculus
  siRNA target sequence for Ppp1r3a (NM_080464.1,1996-2014).
gataacagtaggaatctga

SEQ ID NO: 746658 - DNA, 19 bp, Mus musculus
  siRNA target sequence for Ppp1r3a (NM_080464.1,2018-2036).
ctactcctacagaacactt

SEQ ID NO: 746659 - DNA, 19 bp, Mus musculus
  siRNA target sequence for Ppp1r3a (NM_080464.1,2045-2063).
gccgagagacagaatgcta

SEQ ID NO: 746660 - DNA, 19 bp, Mus musculus
  siRNA target sequence for Ppp1r3a (NM_080464.1,2077-2095).
cttgctgatcatggtatta

SEQ ID NO: 746661 - DNA, 19 bp, Mus musculus
  siRNA target sequence for Ppp1r3a (NM_080464.1,2100-2118).
gaaagcacaagcagttaca

SEQ ID NO: 746662 - DNA, 19 bp, Mus musculus
  siRNA target sequence for Ppp1r3a (NM_080464.1,2107-2125).
caagcagttacagcttata

SEQ ID NO: 746663 - DNA, 19 bp, Mus musculus
  siRNA target sequence for Ppp1r3a (NM_080464.1,2110-2128).
gcagttacagcttatataa

SEQ ID NO: 746664 - DNA, 19 bp, Mus musculus
  siRNA target sequence for Ppp1r3a (NM_080464.1,2165-2183).
ctgctagaggaaaagcaat

SEQ ID NO: 746665 - DNA, 19 bp, Mus musculus
  siRNA target sequence for Ppp1r3a (NM_080464.1,2173-2191).
ggaaaagcaataattgcta

SEQ ID NO: 746666 - DNA, 19 bp, Mus musculus
  siRNA target sequence for Ppp1r3a (NM_080464.1,2174-2192).
gaaaagcaataattgctaa

SEQ ID NO: 746667 - DNA, 19 bp, Mus musculus
  siRNA target sequence for Ppp1r3a (NM_080464.1,2222-2240).
ggcccatcgaggtaaaaga

SEQ ID NO: 746668 - DNA, 19 bp, Mus musculus
  siRNA target sequence for Ppp1r3a (NM_080464.1,2223-2241).
gcccatcgaggtaaaagaa

SEQ ID NO: 746669 - DNA, 19 bp, Mus musculus
  siRNA target sequence for Ppp1r3a (NM_080464.1,2226-2244).
catcgaggtaaaagaaaca

SEQ ID NO: 746670 - DNA, 19 bp, Mus musculus
  siRNA target sequence for Ppp1r3a (NM_080464.1,2260-2278).
gaagggaggaaagatgatt

SEQ ID NO: 746671 - DNA, 19 bp, Mus musculus
  siRNA target sequence for Ppp1r3a (NM_080464.1,2309-2327).
caggtgtaatccatgacaa

SEQ ID NO: 746672 - DNA, 19 bp, Mus musculus
  siRNA target sequence for Ppp1r3a (NM_080464.1,2343-2361).
gtcacatttagatatttgt

SEQ ID NO: 746673 - DNA, 19 bp, Mus musculus
  siRNA target sequence for Ppp1r3a (NM_080464.1,2440-2458).
catggaattggaagtgtaa

SEQ ID NO: 746674 - DNA, 19 bp, Mus musculus
  siRNA target sequence for Ppp1r3a (NM_080464.1,2450-2468).
gaagtgtaacatctataga

SEQ ID NO: 746675 - DNA, 19 bp, Mus musculus
  siRNA target sequence for Ppp1r3a (NM_080464.1,2470-2488).
gaaccttcacaggtcatta

SEQ ID NO: 746676 - DNA, 19 bp, Mus musculus
  siRNA target sequence for Ppp1r3a (NM_080464.1,2481-2499).
ggtcattacaggcaatcaa

SEQ ID NO: 746677 - DNA, 19 bp, Mus musculus
  siRNA target sequence for Ppp1r3a (NM_080464.1,2504-2522).
ctacgtcaaaactggattt

SEQ ID NO: 746678 - DNA, 19 bp, Mus musculus
  siRNA target sequence for Ppp1r3a (NM_080464.1,2510-2528).
caaaactggatttacattt

SEQ ID NO: 746679 - DNA, 19 bp, Mus musculus
  siRNA target sequence for Ppp1r3a (NM_080464.1,2524-2542).
catttgggagtgttaccaa

SEQ ID NO: 746680 - DNA, 19 bp, Mus musculus
  siRNA target sequence for Ppp1r3a (NM_080464.1,2580-2598).
gctgcttcaagaattatca

SEQ ID NO: 746681 - DNA, 19 bp, Mus musculus
  siRNA target sequence for Ppp1r3a (NM_080464.1,2581-2599).
ctgcttcaagaattatcaa

SEQ ID NO: 746682 - DNA, 19 bp, Mus musculus
  siRNA target sequence for Ppp1r3a (NM_080464.1,2616-2634).
cgccgttccctctgcattt

SEQ ID NO: 746683 - DNA, 19 bp, Mus musculus
  siRNA target sequence for Ppp1r3a (NM_080464.1,2736-2754).
cacaaccctccagtctatt

SEQ ID NO: 746684 - DNA, 19 bp, Mus musculus
  siRNA target sequence for Ppp1r3a (NM_080464.1,2746-2764).
cagtctattcctaccaaat

SEQ ID NO: 746685 - DNA, 19 bp, Mus musculus
  siRNA target sequence for Ppp1r3a (NM_080464.1,2748-2766).
gtctattcctaccaaatca

SEQ ID NO: 746686 - DNA, 19 bp, Mus musculus
  siRNA target sequence for Ppp1r3a (NM_080464.1,2755-2773).
cctaccaaatcagaatata

SEQ ID NO: 746687 - DNA, 19 bp, Mus musculus
  siRNA target sequence for Ppp1r3a (NM_080464.1,2802-2820).
ccatgccatgtctaaacct

SEQ ID NO: 746688 - DNA, 19 bp, Mus musculus
  siRNA target sequence for Ppp1r3a (NM_080464.1,2881-2899).
ggtccgattctccaacaaa

SEQ ID NO: 746689 - DNA, 19 bp, Mus musculus
  siRNA target sequence for Ppp1r3a (NM_080464.1,2882-2900).
gtccgattctccaacaaaa

SEQ ID NO: 746690 - DNA, 19 bp, Mus musculus
  siRNA target sequence for Ppp1r3a (NM_080464.1,2885-2903).
cgattctccaacaaaaaga

SEQ ID NO: 746691 - DNA, 19 bp, Mus musculus
  siRNA target sequence for Ppp1r3a (NM_080464.1,2928-2946).
cccgatgttttttaccaat

SEQ ID NO: 746692 - DNA, 19 bp, Mus musculus
  siRNA target sequence for Ppp1r3a (NM_080464.1,2942-2960).
ccaatgagcctcttgagaa

SEQ ID NO: 746693 - DNA, 19 bp, Mus musculus
  siRNA target sequence for Ppp1r3a (NM_080464.1,2943-2961).
caatgagcctcttgagaat

SEQ ID NO: 746694 - DNA, 19 bp, Mus musculus
  siRNA target sequence for Ppp1r3a (NM_080464.1,2978-2996).
ctgaaaatgaagggttaat

SEQ ID NO: 746695 - DNA, 19 bp, Mus musculus
  siRNA target sequence for Ppp1r3a (NM_080464.1,3015-3033).
gtgttatctgggtgacaaa

SEQ ID NO: 746696 - DNA, 19 bp, Mus musculus
  siRNA target sequence for Ppp1r3a (NM_080464.1,3025-3043).
ggtgacaaaggattagtga

SEQ ID NO: 746697 - DNA, 19 bp, Mus musculus
  siRNA target sequence for Ppp1r3a (NM_080464.1,3092-3110).
gggagtctctgctttcaat

SEQ ID NO: 746698 - DNA, 19 bp, Mus musculus
  siRNA target sequence for Ppp1r3a (NM_080464.1,3107-3125).
caatatccaccaactctaa

SEQ ID NO: 746699 - DNA, 19 bp, Mus musculus
  siRNA target sequence for Ppp1r3a (NM_080464.1,3114-3132).
caccaactctaaaatacca

SEQ ID NO: 746700 - DNA, 19 bp, Mus musculus
  siRNA target sequence for Ppp1r3a (NM_080464.1,3116-3134).
ccaactctaaaataccata

SEQ ID NO: 746701 - DNA, 19 bp, Mus musculus
  siRNA target sequence for Ppp1r3a (NM_080464.1,3117-3135).
caactctaaaataccatat

SEQ ID NO: 746702 - DNA, 19 bp, Mus musculus
  siRNA target sequence for Ppp1r3a (NM_080464.1,3191-3209).
gcttggcgttctacctttt

SEQ ID NO: 746703 - DNA, 19 bp, Mus musculus
  siRNA target sequence for Ppp1r3a (NM_080464.1,3192-3210).
cttggcgttctaccttttt

SEQ ID NO: 746704 - DNA, 19 bp, Mus musculus
  siRNA target sequence for Ppp1r3a (NM_080464.1,3195-3213).
ggcgttctaccttttttca

SEQ ID NO: 746705 - DNA, 19 bp, Mus musculus
  siRNA target sequence for Ppp1r3a (NM_080464.1,3196-3214).
gcgttctaccttttttcat

SEQ ID NO: 746706 - DNA, 19 bp, Mus musculus
  siRNA target sequence for Ppp1r3a (NM_080464.1,3244-3262).
caaagagagtctgttaaga

SEQ ID NO: 746707 - DNA, 19 bp, Mus musculus
  siRNA target sequence for Ankrd6 (NM_080471.2,165-183).
cggtcgctgcgctttcaga

SEQ ID NO: 746708 - DNA, 19 bp, Mus musculus
  siRNA target sequence for Ankrd6 (NM_080471.2,166-184).
ggtcgctgcgctttcagaa

SEQ ID NO: 746709 - DNA, 19 bp, Mus musculus
  siRNA target sequence for Ankrd6 (NM_080471.2,190-208).
gctcatagctgcgtacaaa

SEQ ID NO: 746710 - DNA, 19 bp, Mus musculus
  siRNA target sequence for Ankrd6 (NM_080471.2,249-267).
ccaaggtagccgttaccaa

SEQ ID NO: 746711 - DNA, 19 bp, Mus musculus
  siRNA target sequence for Ankrd6 (NM_080471.2,720-738).
gactcctcctcaatgcttt

SEQ ID NO: 746712 - DNA, 19 bp, Mus musculus
  siRNA target sequence for Ankrd6 (NM_080471.2,1217-1235).
cagcctggacaccaaaaga

SEQ ID NO: 746713 - DNA, 19 bp, Mus musculus
  siRNA target sequence for Ankrd6 (NM_080471.2,1245-1263).
gtcatcaccaccccaaaaa

SEQ ID NO: 746714 - DNA, 19 bp, Mus musculus
  siRNA target sequence for Ankrd6 (NM_080471.2,1340-1358).
ggcgaggatggaaaagtga

SEQ ID NO: 746715 - DNA, 19 bp, Mus musculus
  siRNA target sequence for Ankrd6 (NM_080471.2,1355-1373).
gtgatgcaggcaccaataa

SEQ ID NO: 746716 - DNA, 19 bp, Mus musculus
  siRNA target sequence for Ankrd6 (NM_080471.2,1357-1375).
gatgcaggcaccaataaaa

SEQ ID NO: 746717 - DNA, 19 bp, Mus musculus
  siRNA target sequence for Ankrd6 (NM_080471.2,1360-1378).
gcaggcaccaataaaaggt

SEQ ID NO: 746718 - DNA, 19 bp, Mus musculus
  siRNA target sequence for Ankrd6 (NM_080471.2,1361-1379).
caggcaccaataaaaggtt

SEQ ID NO: 746719 - DNA, 19 bp, Mus musculus
  siRNA target sequence for Ankrd6 (NM_080471.2,1380-1398).
gtcgctgtgaacctctaat

SEQ ID NO: 746720 - DNA, 19 bp, Mus musculus
  siRNA target sequence for Ankrd6 (NM_080471.2,1382-1400).
cgctgtgaacctctaatca

SEQ ID NO: 746721 - DNA, 19 bp, Mus musculus
  siRNA target sequence for Ankrd6 (NM_080471.2,1386-1404).
gtgaacctctaatcaacaa

SEQ ID NO: 746722 - DNA, 19 bp, Mus musculus
  siRNA target sequence for Ankrd6 (NM_080471.2,1435-1453).
ggaaatcagagctgagtta

SEQ ID NO: 746723 - DNA, 19 bp, Mus musculus
  siRNA target sequence for Ankrd6 (NM_080471.2,1455-1473).
gctcggtgcaggataaagt

SEQ ID NO: 746724 - DNA, 19 bp, Mus musculus
  siRNA target sequence for Ankrd6 (NM_080471.2,1521-1539).
gcgttttggacaaactgat

SEQ ID NO: 746725 - DNA, 19 bp, Mus musculus
  siRNA target sequence for Ankrd6 (NM_080471.2,1552-1570).
gtccgcggagagaacagaa

SEQ ID NO: 746726 - DNA, 19 bp, Mus musculus
  siRNA target sequence for Ankrd6 (NM_080471.2,1709-1727).
cggaccttcagagctaaat

SEQ ID NO: 746727 - DNA, 19 bp, Mus musculus
  siRNA target sequence for Ankrd6 (NM_080471.2,1817-1835).
gttgtgaggcccaaggata

SEQ ID NO: 746728 - DNA, 19 bp, Mus musculus
  siRNA target sequence for Ankrd6 (NM_080471.2,1896-1914).
cagggtctgggttaaggaa

SEQ ID NO: 746729 - DNA, 19 bp, Mus musculus
  siRNA target sequence for Ankrd6 (NM_080471.2,2102-2120).
ctggagctaactcagtatt

SEQ ID NO: 746730 - DNA, 19 bp, Mus musculus
  siRNA target sequence for Ankrd6 (NM_080471.2,2132-2150).
gtttctgcacagatggaaa

SEQ ID NO: 746731 - DNA, 19 bp, Mus musculus
  siRNA target sequence for Ankrd6 (NM_080471.2,2152-2170).
gtggtatgaacggaaaatt

SEQ ID NO: 746732 - DNA, 19 bp, Mus musculus
  siRNA target sequence for Ankrd6 (NM_080471.2,2154-2172).
ggtatgaacggaaaattga

SEQ ID NO: 746733 - DNA, 19 bp, Mus musculus
  siRNA target sequence for Ankrd6 (NM_080471.2,2155-2173).
gtatgaacggaaaattgaa

SEQ ID NO: 746734 - DNA, 19 bp, Mus musculus
  siRNA target sequence for Ankrd6 (NM_080471.2,2217-2235).
ccacattgaaggaacacat

SEQ ID NO: 746735 - DNA, 19 bp, Mus musculus
  siRNA target sequence for Rnf36 (NM_080510.1,233-251).
caactatgttgaaatgagt

SEQ ID NO: 746736 - DNA, 19 bp, Mus musculus
  siRNA target sequence for Rnf36 (NM_080510.1,275-293).
ctcaaaagtggtgatacaa

SEQ ID NO: 746737 - DNA, 19 bp, Mus musculus
  siRNA target sequence for Rnf36 (NM_080510.1,429-447).
cctgactgtaagatgctat

SEQ ID NO: 746738 - DNA, 19 bp, Mus musculus
  siRNA target sequence for Rnf36 (NM_080510.1,450-468).
cagtatagcaactgtacat

SEQ ID NO: 746739 - DNA, 19 bp, Mus musculus
  siRNA target sequence for Rnf36 (NM_080510.1,489-507).
ctcgtggagaagattaaga

SEQ ID NO: 746740 - DNA, 19 bp, Mus musculus
  siRNA target sequence for Rnf36 (NM_080510.1,584-602).
caaaatgatctgctttcaa

SEQ ID NO: 746741 - DNA, 19 bp, Mus musculus
  siRNA target sequence for Rnf36 (NM_080510.1,655-673).
ctgaagctgtccgtttctt

SEQ ID NO: 746742 - DNA, 19 bp, Mus musculus
  siRNA target sequence for Rnf36 (NM_080510.1,657-675).
gaagctgtccgtttcttta

SEQ ID NO: 746743 - DNA, 19 bp, Mus musculus
  siRNA target sequence for Rnf36 (NM_080510.1,681-699).
gagcttgctatctatcaga

SEQ ID NO: 746744 - DNA, 19 bp, Mus musculus
  siRNA target sequence for Rnf36 (NM_080510.1,726-744).
cttcagtctctcagaacaa

SEQ ID NO: 746745 - DNA, 19 bp, Mus musculus
  siRNA target sequence for Rnf36 (NM_080510.1,763-781).
ctgcttacaaggacaacaa

SEQ ID NO: 746746 - DNA, 19 bp, Mus musculus
  siRNA target sequence for Rnf36 (NM_080510.1,766-784).
cttacaaggacaacaagat

SEQ ID NO: 746747 - DNA, 19 bp, Mus musculus
  siRNA target sequence for Rnf36 (NM_080510.1,805-823).
ccttggagtttctaaagct

SEQ ID NO: 746748 - DNA, 19 bp, Mus musculus
  siRNA target sequence for Rnf36 (NM_080510.1,1085-1103).
gagcctaggccgcttcaaa

SEQ ID NO: 746749 - DNA, 19 bp, Mus musculus
  siRNA target sequence for Rnf36 (NM_080510.1,1104-1122).
ggtcctatccagtatatca

SEQ ID NO: 746750 - DNA, 19 bp, Mus musculus
  siRNA target sequence for Rnf36 (NM_080510.1,1105-1123).
gtcctatccagtatatcat

SEQ ID NO: 746751 - DNA, 19 bp, Mus musculus
  siRNA target sequence for Rnf36 (NM_080510.1,1152-1170).
ccaggcccatctcaattaa

SEQ ID NO: 746752 - DNA, 19 bp, Mus musculus
  siRNA target sequence for Rnf36 (NM_080510.1,1156-1174).
gcccatctcaattaactct

SEQ ID NO: 746753 - DNA, 19 bp, Mus musculus
  siRNA target sequence for Rnf36 (NM_080510.1,1194-1212).
cccaatctggtgttatcca

SEQ ID NO: 746754 - DNA, 19 bp, Mus musculus
  siRNA target sequence for Rnf36 (NM_080510.1,1231-1249).
gtcactgtgatgttaagca

SEQ ID NO: 746755 - DNA, 19 bp, Mus musculus
  siRNA target sequence for Rnf36 (NM_080510.1,1289-1307).
ggctgtactgggctcaaaa

SEQ ID NO: 746756 - DNA, 19 bp, Mus musculus
  siRNA target sequence for Rnf36 (NM_080510.1,1308-1326).
ggcttcacctctggaaaat

SEQ ID NO: 746757 - DNA, 19 bp, Mus musculus
  siRNA target sequence for Rnf36 (NM_080510.1,1376-1394).
cgtcagagagtccatcatt

SEQ ID NO: 746758 - DNA, 19 bp, Mus musculus
  siRNA target sequence for Rnf36 (NM_080510.1,1545-1563).
gggcaagtatccttctaca

SEQ ID NO: 746759 - DNA, 19 bp, Mus musculus
  siRNA target sequence for Rnf36 (NM_080510.1,1546-1564).
ggcaagtatccttctacaa

SEQ ID NO: 746760 - DNA, 19 bp, Mus musculus
  siRNA target sequence for Rnf36 (NM_080510.1,1570-1588).
caaccatgacccatcttta

SEQ ID NO: 746761 - DNA, 19 bp, Mus musculus
  siRNA target sequence for Rnf36 (NM_080510.1,1628-1646).
cttgtgcccctgccttaat

SEQ ID NO: 746762 - DNA, 19 bp, Mus musculus
  siRNA target sequence for Ppap2b (NM_080555.1,491-509).
cgatcgtccctgagagtaa

SEQ ID NO: 746763 - DNA, 19 bp, Mus musculus
  siRNA target sequence for Ppap2b (NM_080555.1,647-665).
cttaccgtcgagggtttta

SEQ ID NO: 746764 - DNA, 19 bp, Mus musculus
  siRNA target sequence for Ppap2b (NM_080555.1,696-714).
gaaagtcagtgagactata

SEQ ID NO: 746765 - DNA, 19 bp, Mus musculus
  siRNA target sequence for Ppap2b (NM_080555.1,750-768).
cgccatcctggcgatcatt

SEQ ID NO: 746766 - DNA, 19 bp, Mus musculus
  siRNA target sequence for Ppap2b (NM_080555.1,751-769).
gccatcctggcgatcatta

SEQ ID NO: 746767 - DNA, 19 bp, Mus musculus
  siRNA target sequence for Ppap2b (NM_080555.1,753-771).
catcctggcgatcattaca

SEQ ID NO: 746768 - DNA, 19 bp, Mus musculus
  siRNA target sequence for Ppap2b (NM_080555.1,774-792).
ggaattctaccggatctat

SEQ ID NO: 746769 - DNA, 19 bp, Mus musculus
  siRNA target sequence for Ppap2b (NM_080555.1,775-793).
gaattctaccggatctatt

SEQ ID NO: 746770 - DNA, 19 bp, Mus musculus
  siRNA target sequence for Ppap2b (NM_080555.1,853-871).
caagtgggatgcttccttt

SEQ ID NO: 746771 - DNA, 19 bp, Mus musculus
  siRNA target sequence for Ppap2b (NM_080555.1,988-1006).
ggctacattcagaactaca

SEQ ID NO: 746772 - DNA, 19 bp, Mus musculus
  siRNA target sequence for Ppap2b (NM_080555.1,1070-1088).
ccttctccatgttcactat

SEQ ID NO: 746773 - DNA, 19 bp, Mus musculus
  siRNA target sequence for Ppap2b (NM_080555.1,1150-1168).
cccctcctgcagttcactt

SEQ ID NO: 746774 - DNA, 19 bp, Mus musculus
  siRNA target sequence for Ppap2b (NM_080555.1,1193-1211).
gattgtcacgggtatctga

SEQ ID NO: 746775 - DNA, 19 bp, Mus musculus
  siRNA target sequence for Ppap2b (NM_080555.1,1199-1217).
cacgggtatctgactacaa

SEQ ID NO: 746776 - DNA, 19 bp, Mus musculus
  siRNA target sequence for Ppap2b (NM_080555.1,1268-1286).
cctgctgcatagtgttctt

SEQ ID NO: 746777 - DNA, 19 bp, Mus musculus
  siRNA target sequence for Ppap2b (NM_080555.1,1292-1310).
ccgacctcttcaagactaa

SEQ ID NO: 746778 - DNA, 19 bp, Mus musculus
  siRNA target sequence for Ssfa2 (NM_080558.3,425-443).
gactacagtttcatcagaa

SEQ ID NO: 746779 - DNA, 19 bp, Mus musculus
  siRNA target sequence for Ssfa2 (NM_080558.3,632-650).
gcatagacattaaagtatt

SEQ ID NO: 746780 - DNA, 19 bp, Mus musculus
  siRNA target sequence for Ssfa2 (NM_080558.3,707-725).
gccgatttcgccaaattga

SEQ ID NO: 746781 - DNA, 19 bp, Mus musculus
  siRNA target sequence for Ssfa2 (NM_080558.3,708-726).
ccgatttcgccaaattgaa

SEQ ID NO: 746782 - DNA, 19 bp, Mus musculus
  siRNA target sequence for Ssfa2 (NM_080558.3,710-728).
gatttcgccaaattgaagt

SEQ ID NO: 746783 - DNA, 19 bp, Mus musculus
  siRNA target sequence for Ssfa2 (NM_080558.3,734-752).
ctactgtggccaatgcatt

SEQ ID NO: 746784 - DNA, 19 bp, Mus musculus
  siRNA target sequence for Ssfa2 (NM_080558.3,896-914).
caaaactgaacttatgtgt

SEQ ID NO: 746785 - DNA, 19 bp, Mus musculus
  siRNA target sequence for Ssfa2 (NM_080558.3,901-919).
ctgaacttatgtgttgata

SEQ ID NO: 746786 - DNA, 19 bp, Mus musculus
  siRNA target sequence for Ssfa2 (NM_080558.3,903-921).
gaacttatgtgttgataaa

SEQ ID NO: 746787 - DNA, 19 bp, Mus musculus
  siRNA target sequence for Ssfa2 (NM_080558.3,906-924).
cttatgtgttgataaaaca

SEQ ID NO: 746788 - DNA, 19 bp, Mus musculus
  siRNA target sequence for Ssfa2 (NM_080558.3,1081-1099).
gaagtctcaggtagttcat

SEQ ID NO: 746789 - DNA, 19 bp, Mus musculus
  siRNA target sequence for Ssfa2 (NM_080558.3,1084-1102).
gtctcaggtagttcatcaa

SEQ ID NO: 746790 - DNA, 19 bp, Mus musculus
  siRNA target sequence for Ssfa2 (NM_080558.3,1316-1334).
cgtcttcgagcgagaaaga

SEQ ID NO: 746791 - DNA, 19 bp, Mus musculus
  siRNA target sequence for Ssfa2 (NM_080558.3,1357-1375).
ccatccatacggaacataa

SEQ ID NO: 746792 - DNA, 19 bp, Mus musculus
  siRNA target sequence for Ssfa2 (NM_080558.3,1678-1696).
cagccttacttcaatgagt

SEQ ID NO: 746793 - DNA, 19 bp, Mus musculus
  siRNA target sequence for Ssfa2 (NM_080558.3,1917-1935).
gagtgtcgagagtgatgta

SEQ ID NO: 746794 - DNA, 19 bp, Mus musculus
  siRNA target sequence for Ssfa2 (NM_080558.3,1919-1937).
gtgtcgagagtgatgtaga

SEQ ID NO: 746795 - DNA, 19 bp, Mus musculus
  siRNA target sequence for Ssfa2 (NM_080558.3,1923-1941).
cgagagtgatgtagagaaa

SEQ ID NO: 746796 - DNA, 19 bp, Mus musculus
  siRNA target sequence for Ssfa2 (NM_080558.3,1965-1983).
gtacaccacacaccatatt

SEQ ID NO: 746797 - DNA, 19 bp, Mus musculus
  siRNA target sequence for Ssfa2 (NM_080558.3,2490-2508).
cccacagttcgctccaata

SEQ ID NO: 746798 - DNA, 19 bp, Mus musculus
  siRNA target sequence for Ssfa2 (NM_080558.3,2734-2752).
gtgttgcatgatattagaa

SEQ ID NO: 746799 - DNA, 19 bp, Mus musculus
  siRNA target sequence for Ssfa2 (NM_080558.3,2948-2966).
ccgtggtgtaccctcatat

SEQ ID NO: 746800 - DNA, 19 bp, Mus musculus
  siRNA target sequence for Ssfa2 (NM_080558.3,2950-2968).
gtggtgtaccctcatatga

SEQ ID NO: 746801 - DNA, 19 bp, Mus musculus
  siRNA target sequence for Ssfa2 (NM_080558.3,2952-2970).
ggtgtaccctcatatgaca

SEQ ID NO: 746802 - DNA, 19 bp, Mus musculus
  siRNA target sequence for Ssfa2 (NM_080558.3,2973-2991).
ggaggacaggtatgaagtt

SEQ ID NO: 746803 - DNA, 19 bp, Mus musculus
  siRNA target sequence for Ssfa2 (NM_080558.3,2976-2994).
ggacaggtatgaagttgat

SEQ ID NO: 746804 - DNA, 19 bp, Mus musculus
  siRNA target sequence for Ssfa2 (NM_080558.3,3012-3030).
gaactctgtccgaatggaa

SEQ ID NO: 746805 - DNA, 19 bp, Mus musculus
  siRNA target sequence for Ssfa2 (NM_080558.3,3142-3160).
ggcagcaggagcgtagata

SEQ ID NO: 746806 - DNA, 19 bp, Mus musculus
  siRNA target sequence for Ssfa2 (NM_080558.3,3143-3161).
gcagcaggagcgtagataa

SEQ ID NO: 746807 - DNA, 19 bp, Mus musculus
  siRNA target sequence for Ssfa2 (NM_080558.3,3147-3165).
caggagcgtagataactta

SEQ ID NO: 746808 - DNA, 19 bp, Mus musculus
  siRNA target sequence for Ssfa2 (NM_080558.3,3150-3168).
gagcgtagataacttatca

SEQ ID NO: 746809 - DNA, 19 bp, Mus musculus
  siRNA target sequence for Ssfa2 (NM_080558.3,3256-3274).
ggagacatggcgtatgaaa

SEQ ID NO: 746810 - DNA, 19 bp, Mus musculus
  siRNA target sequence for Ssfa2 (NM_080558.3,3257-3275).
gagacatggcgtatgaaat

SEQ ID NO: 746811 - DNA, 19 bp, Mus musculus
  siRNA target sequence for Ssfa2 (NM_080558.3,3261-3279).
catggcgtatgaaattcct

SEQ ID NO: 746812 - DNA, 19 bp, Mus musculus
  siRNA target sequence for Ssfa2 (NM_080558.3,3291-3309).
ctcggagtccgttttctct

SEQ ID NO: 746813 - DNA, 19 bp, Mus musculus
  siRNA target sequence for Ssfa2 (NM_080558.3,3639-3657).
gcaagtcatccgagagatt

SEQ ID NO: 746814 - DNA, 19 bp, Mus musculus
  siRNA target sequence for Ssfa2 (NM_080558.3,3640-3658).
caagtcatccgagagatta

SEQ ID NO: 746815 - DNA, 19 bp, Mus musculus
  siRNA target sequence for Ssfa2 (NM_080558.3,3654-3672).
gattaaagagtctattgtt

SEQ ID NO: 746816 - DNA, 19 bp, Mus musculus
  siRNA target sequence for Ssfa2 (NM_080558.3,3663-3681).
gtctattgttggggaaatt

SEQ ID NO: 746817 - DNA, 19 bp, Mus musculus
  siRNA target sequence for Ssfa2 (NM_080558.3,3674-3692).
gggaaattcgacgagaaat

SEQ ID NO: 746818 - DNA, 19 bp, Mus musculus
  siRNA target sequence for C330018L13Rik (NM_080562.2,318-336).
gtcagctgatggttacgaa

SEQ ID NO: 746819 - DNA, 19 bp, Mus musculus
  siRNA target sequence for C330018L13Rik (NM_080562.2,323-341).
ctgatggttacgaagtaga

SEQ ID NO: 746820 - DNA, 19 bp, Mus musculus
  siRNA target sequence for C330018L13Rik (NM_080562.2,325-343).
gatggttacgaagtagaaa

SEQ ID NO: 746821 - DNA, 19 bp, Mus musculus
  siRNA target sequence for C330018L13Rik (NM_080562.2,329-347).
gttacgaagtagaaaatct

SEQ ID NO: 746822 - DNA, 19 bp, Mus musculus
  siRNA target sequence for C330018L13Rik (NM_080562.2,355-373).
gaagacctcataaaaagaa

SEQ ID NO: 746823 - DNA, 19 bp, Mus musculus
  siRNA target sequence for C330018L13Rik (NM_080562.2,387-405).
gacagagtatttcattaga

SEQ ID NO: 746824 - DNA, 19 bp, Mus musculus
  siRNA target sequence for C330018L13Rik (NM_080562.2,399-417).
cattagacctccaatctat

SEQ ID NO: 746825 - DNA, 19 bp, Mus musculus
  siRNA target sequence for C330018L13Rik (NM_080562.2,414-432).
ctatgtgacagtttccttt

SEQ ID NO: 746826 - DNA, 19 bp, Mus musculus
  siRNA target sequence for C330018L13Rik (NM_080562.2,435-453).
ctttaatgtggaaatctgt

SEQ ID NO: 746827 - DNA, 19 bp, Mus musculus
  siRNA target sequence for C330018L13Rik (NM_080562.2,445-463).
gaaatctgtagggttaata

SEQ ID NO: 746828 - DNA, 19 bp, Mus musculus
  siRNA target sequence for C330018L13Rik (NM_080562.2,450-468).
ctgtagggttaatatagat

SEQ ID NO: 746829 - DNA, 19 bp, Mus musculus
  siRNA target sequence for C330018L13Rik (NM_080562.2,476-494).
ctgggggatatcagaatgt

SEQ ID NO: 746830 - DNA, 19 bp, Mus musculus
  siRNA target sequence for C330018L13Rik (NM_080562.2,501-519).
cctggaattatatacatct

SEQ ID NO: 746831 - DNA, 19 bp, Mus musculus
  siRNA target sequence for C330018L13Rik (NM_080562.2,669-687).
caaggccaggccacctttt

SEQ ID NO: 746832 - DNA, 19 bp, Mus musculus
  siRNA target sequence for C330018L13Rik (NM_080562.2,990-1008).
gcactctccctgtacctta

SEQ ID NO: 746833 - DNA, 19 bp, Mus musculus
  siRNA target sequence for C330018L13Rik (NM_080562.2,1097-1115).
cctcaggcaaggtcattga

SEQ ID NO: 746834 - DNA, 19 bp, Mus musculus
  siRNA target sequence for C330018L13Rik (NM_080562.2,1254-1272).
cctactccagcactctatt

SEQ ID NO: 746835 - DNA, 19 bp, Mus musculus
  siRNA target sequence for C330018L13Rik (NM_080562.2,1255-1273).
ctactccagcactctattt

SEQ ID NO: 746836 - DNA, 19 bp, Mus musculus
  siRNA target sequence for C330018L13Rik (NM_080562.2,1412-1430).
ctgccacaagccctttatt

SEQ ID NO: 746837 - DNA, 19 bp, Mus musculus
  siRNA target sequence for C330018L13Rik (NM_080562.2,1539-1557).
ggcgcaaagtctggaaatt

SEQ ID NO: 746838 - DNA, 19 bp, Mus musculus
  siRNA target sequence for C330018L13Rik (NM_080562.2,1552-1570).
gaaattgccctgacttcta

SEQ ID NO: 746839 - DNA, 19 bp, Mus musculus
  siRNA target sequence for C330018L13Rik (NM_080562.2,1727-1745).
cttcctactccacaaatga

SEQ ID NO: 746840 - DNA, 19 bp, Mus musculus
  siRNA target sequence for C330018L13Rik (NM_080562.2,1807-1825).
cgttcccagcccatgatgt

SEQ ID NO: 746841 - DNA, 19 bp, Mus musculus
  siRNA target sequence for C330018L13Rik (NM_080562.2,1861-1879).
gtgctgcgggtccatttct

SEQ ID NO: 746842 - DNA, 19 bp, Mus musculus
  siRNA target sequence for Baalc (NM_080640.1,355-373).
gcaagagaagtggctatta

SEQ ID NO: 746843 - DNA, 19 bp, Mus musculus
  siRNA target sequence for Baalc (NM_080640.1,356-374).
caagagaagtggctattaa

SEQ ID NO: 746844 - DNA, 19 bp, Mus musculus
  siRNA target sequence for Baalc (NM_080640.1,391-409).
cggcagatggacagaagta

SEQ ID NO: 746845 - DNA, 19 bp, Mus musculus
  siRNA target sequence for Caskin2 (NM_080643.2,486-504).
gtcgtgaacaggaccttat

SEQ ID NO: 746846 - DNA, 19 bp, Mus musculus
  siRNA target sequence for Caskin2 (NM_080643.2,489-507).
gtgaacaggaccttatcct

SEQ ID NO: 746847 - DNA, 19 bp, Mus musculus
  siRNA target sequence for Caskin2 (NM_080643.2,591-609).
cgaagagactcaacattaa

SEQ ID NO: 746848 - DNA, 19 bp, Mus musculus
  siRNA target sequence for Caskin2 (NM_080643.2,849-867).
cgcagtacgggcattatga

SEQ ID NO: 746849 - DNA, 19 bp, Mus musculus
  siRNA target sequence for Caskin2 (NM_080643.2,897-915).
ctaacccatgcctagtcaa

SEQ ID NO: 746850 - DNA, 19 bp, Mus musculus
  siRNA target sequence for Caskin2 (NM_080643.2,902-920).
ccatgcctagtcaacaagt

SEQ ID NO: 746851 - DNA, 19 bp, Mus musculus
  siRNA target sequence for Caskin2 (NM_080643.2,903-921).
catgcctagtcaacaagtt

SEQ ID NO: 746852 - DNA, 19 bp, Mus musculus
  siRNA target sequence for Caskin2 (NM_080643.2,1031-1049).
ccatgtgaccccaactaca

SEQ ID NO: 746853 - DNA, 19 bp, Mus musculus
  siRNA target sequence for Caskin2 (NM_080643.2,1209-1227).
gaggtgtggacgtgaatat

SEQ ID NO: 746854 - DNA, 19 bp, Mus musculus
  siRNA target sequence for Caskin2 (NM_080643.2,1222-1240).
gaatatccggaacacatat

SEQ ID NO: 746855 - DNA, 19 bp, Mus musculus
  siRNA target sequence for Caskin2 (NM_080643.2,1248-1266).
cggcgctggacatagtcaa

SEQ ID NO: 746856 - DNA, 19 bp, Mus musculus
  siRNA target sequence for Caskin2 (NM_080643.2,1316-1334).
gaggcttcagggatcttga

SEQ ID NO: 746857 - DNA, 19 bp, Mus musculus
  siRNA target sequence for Caskin2 (NM_080643.2,1336-1354).
ggttcgagcgcttaaggat

SEQ ID NO: 746858 - DNA, 19 bp, Mus musculus
  siRNA target sequence for Caskin2 (NM_080643.2,1337-1355).
gttcgagcgcttaaggatt

SEQ ID NO: 746859 - DNA, 19 bp, Mus musculus
  siRNA target sequence for Caskin2 (NM_080643.2,1340-1358).
cgagcgcttaaggatttct

SEQ ID NO: 746860 - DNA, 19 bp, Mus musculus
  siRNA target sequence for Caskin2 (NM_080643.2,1578-1596).
gcttctcccggatatcaca

SEQ ID NO: 746861 - DNA, 19 bp, Mus musculus
  siRNA target sequence for Caskin2 (NM_080643.2,1579-1597).
cttctcccggatatcacaa

SEQ ID NO: 746862 - DNA, 19 bp, Mus musculus
  siRNA target sequence for Caskin2 (NM_080643.2,1767-1785).
gcactggcctcctgattga

SEQ ID NO: 746863 - DNA, 19 bp, Mus musculus
  siRNA target sequence for Caskin2 (NM_080643.2,1770-1788).
ctggcctcctgattgagaa

SEQ ID NO: 746864 - DNA, 19 bp, Mus musculus
  siRNA target sequence for Caskin2 (NM_080643.2,2113-2131).
gattgcccagcttagcatt

SEQ ID NO: 746865 - DNA, 19 bp, Mus musculus
  siRNA target sequence for Caskin2 (NM_080643.2,2133-2151).
ctgagtggctgcccaatta

SEQ ID NO: 746866 - DNA, 19 bp, Mus musculus
  siRNA target sequence for Caskin2 (NM_080643.2,2135-2153).
gagtggctgcccaattata

SEQ ID NO: 746867 - DNA, 19 bp, Mus musculus
  siRNA target sequence for Caskin2 (NM_080643.2,2220-2238).
gcagcggctacgactctat

SEQ ID NO: 746868 - DNA, 19 bp, Mus musculus
  siRNA target sequence for Caskin2 (NM_080643.2,2302-2320).
ccagaagaagctaatgcta

SEQ ID NO: 746869 - DNA, 19 bp, Mus musculus
  siRNA target sequence for Caskin2 (NM_080643.2,2326-2344).
gaaacggctggcagaactt

SEQ ID NO: 746870 - DNA, 19 bp, Mus musculus
  siRNA target sequence for Caskin2 (NM_080643.2,2692-2710).
cccctctaagctttgttct

SEQ ID NO: 746871 - DNA, 19 bp, Mus musculus
  siRNA target sequence for Caskin2 (NM_080643.2,2727-2745).
gacctgccccatatgtctt

SEQ ID NO: 746872 - DNA, 19 bp, Mus musculus
  siRNA target sequence for Caskin2 (NM_080643.2,2732-2750).
gccccatatgtctttatgt

SEQ ID NO: 746873 - DNA, 19 bp, Mus musculus
  siRNA target sequence for Caskin2 (NM_080643.2,3052-3070).
cctccgtgcccgtcgtaaa

SEQ ID NO: 746874 - DNA, 19 bp, Mus musculus
  siRNA target sequence for Caskin2 (NM_080643.2,3329-3347).
gaggggaacctgactatca

SEQ ID NO: 746875 - DNA, 19 bp, Mus musculus
  siRNA target sequence for Caskin2 (NM_080643.2,3415-3433).
cctcacagagtcagatact

SEQ ID NO: 746876 - DNA, 19 bp, Mus musculus
  siRNA target sequence for Caskin2 (NM_080643.2,3494-3512).
ggggtagtgggcagtgata

SEQ ID NO: 746877 - DNA, 19 bp, Mus musculus
  siRNA target sequence for Caskin2 (NM_080643.2,4008-4026).
cgtctaccaagcacattct

SEQ ID NO: 746878 - DNA, 19 bp, Mus musculus
  siRNA target sequence for Caskin2 (NM_080643.2,4018-4036).
gcacattctggatgacatt

SEQ ID NO: 746879 - DNA, 19 bp, Mus musculus
  siRNA target sequence for Tmprss3 (NM_080727.1,556-574).
cgacttcgtgtccatcaat

SEQ ID NO: 746880 - DNA, 19 bp, Mus musculus
  siRNA target sequence for Tmprss3 (NM_080727.1,608-626).
caccactctgtgtacatga

SEQ ID NO: 746881 - DNA, 19 bp, Mus musculus
  siRNA target sequence for Tmprss3 (NM_080727.1,647-665).
cacgtggtcaccttgaagt

SEQ ID NO: 746882 - DNA, 19 bp, Mus musculus
  siRNA target sequence for Tmprss3 (NM_080727.1,816-834).
ctgcggcacactgtgttta

SEQ ID NO: 746883 - DNA, 19 bp, Mus musculus
  siRNA target sequence for Tmprss3 (NM_080727.1,1127-1145).
cacgcggctgtccctttaa

SEQ ID NO: 746884 - DNA, 19 bp, Mus musculus
  siRNA target sequence for Tmprss3 (NM_080727.1,1294-1312).
gttagtgggtgcaacaagt

SEQ ID NO: 746885 - DNA, 19 bp, Mus musculus
  siRNA target sequence for Tmprss3 (NM_080727.1,1300-1318).
gggtgcaacaagttttgga

SEQ ID NO: 746886 - DNA, 19 bp, Mus musculus
  siRNA target sequence for Tmprss3 (NM_080727.1,1301-1319).
ggtgcaacaagttttggaa

SEQ ID NO: 746887 - DNA, 19 bp, Mus musculus
  siRNA target sequence for Myh7 (NM_080728.1,704-722).
ctaagagggtcatccaata

SEQ ID NO: 746888 - DNA, 19 bp, Mus musculus
  siRNA target sequence for Myh7 (NM_080728.1,711-729).
ggtcatccaatattttgct

SEQ ID NO: 746889 - DNA, 19 bp, Mus musculus
  siRNA target sequence for Myh7 (NM_080728.1,717-735).
ccaatattttgctgttatt

SEQ ID NO: 746890 - DNA, 19 bp, Mus musculus
  siRNA target sequence for Myh7 (NM_080728.1,1053-1071).
caacaacccctacgattat

SEQ ID NO: 746891 - DNA, 19 bp, Mus musculus
  siRNA target sequence for Myh7 (NM_080728.1,1171-1189).
gaagagaagaactccattt

SEQ ID NO: 746892 - DNA, 19 bp, Mus musculus
  siRNA target sequence for Myh7 (NM_080728.1,1174-1192).
gagaagaactccatttaca

SEQ ID NO: 746893 - DNA, 19 bp, Mus musculus
  siRNA target sequence for Myh7 (NM_080728.1,1340-1358).
gccatcctagagtcaaagt

SEQ ID NO: 746894 - DNA, 19 bp, Mus musculus
  siRNA target sequence for Myh7 (NM_080728.1,1895-1913).
ctgtggactacaatatcct

SEQ ID NO: 746895 - DNA, 19 bp, Mus musculus
  siRNA target sequence for Myh7 (NM_080728.1,1983-2001).
caagctgctcagcaatcta

SEQ ID NO: 746896 - DNA, 19 bp, Mus musculus
  siRNA target sequence for Myh7 (NM_080728.1,1995-2013).
caatctatttgccaactat

SEQ ID NO: 746897 - DNA, 19 bp, Mus musculus
  siRNA target sequence for Myh7 (NM_080728.1,2084-2102).
ctgctctgcacagagaaaa

SEQ ID NO: 746898 - DNA, 19 bp, Mus musculus
  siRNA target sequence for Myh7 (NM_080728.1,2130-2148).
ctccacgcaccctcacttt

SEQ ID NO: 746899 - DNA, 19 bp, Mus musculus
  siRNA target sequence for Myh7 (NM_080728.1,2163-2181).
ccccaatgagacaaagtct

SEQ ID NO: 746900 - DNA, 19 bp, Mus musculus
  siRNA target sequence for Myh7 (NM_080728.1,2564-2582).
gagactccctgctgattat

SEQ ID NO: 746901 - DNA, 19 bp, Mus musculus
  siRNA target sequence for Myh7 (NM_080728.1,2988-3006).
gctcaagcgggatatcgat

SEQ ID NO: 746902 - DNA, 19 bp, Mus musculus
  siRNA target sequence for Myh7 (NM_080728.1,3390-3408).
ggactttgagttaaatgca

SEQ ID NO: 746903 - DNA, 19 bp, Mus musculus
  siRNA target sequence for Myh7 (NM_080728.1,3938-3956).
cgcagcgttctgtcaatga

SEQ ID NO: 746904 - DNA, 19 bp, Mus musculus
  siRNA target sequence for 2310056K19Rik (NM_080846.1,416-434).
ctgtccaagaagttcctaa

SEQ ID NO: 746905 - DNA, 19 bp, Mus musculus
  siRNA target sequence for 2310056K19Rik (NM_080846.1,535-553).
gctctccatccatctgatt

SEQ ID NO: 746906 - DNA, 19 bp, Mus musculus
  siRNA target sequence for 2310056K19Rik (NM_080846.1,603-621).
gtgccatgtatacaatgta

SEQ ID NO: 746907 - DNA, 19 bp, Mus musculus
  siRNA target sequence for Asb12 (NM_080858.1,260-278).
cactggcaccggggaaaaa

SEQ ID NO: 746908 - DNA, 19 bp, Mus musculus
  siRNA target sequence for Asb12 (NM_080858.1,283-301).
ctctcaatcaagctgtata

SEQ ID NO: 746909 - DNA, 19 bp, Mus musculus
  siRNA target sequence for Asb12 (NM_080858.1,333-351).
ctacaccaggaacgttata

SEQ ID NO: 746910 - DNA, 19 bp, Mus musculus
  siRNA target sequence for Asb12 (NM_080858.1,345-363).
cgttataaacggttcatca

SEQ ID NO: 746911 - DNA, 19 bp, Mus musculus
  siRNA target sequence for Asb12 (NM_080858.1,346-364).
gttataaacggttcatcaa

SEQ ID NO: 746912 - DNA, 19 bp, Mus musculus
  siRNA target sequence for Asb12 (NM_080858.1,401-419).
gcgtttggcagcttcttat

SEQ ID NO: 746913 - DNA, 19 bp, Mus musculus
  siRNA target sequence for Asb12 (NM_080858.1,476-494).
ggatgtcaaagcacaaaca

SEQ ID NO: 746914 - DNA, 19 bp, Mus musculus
  siRNA target sequence for Asb12 (NM_080858.1,527-545).
ggagtgcgtgagaatgctt

SEQ ID NO: 746915 - DNA, 19 bp, Mus musculus
  siRNA target sequence for Asb12 (NM_080858.1,528-546).
gagtgcgtgagaatgcttt

SEQ ID NO: 746916 - DNA, 19 bp, Mus musculus
  siRNA target sequence for Asb12 (NM_080858.1,532-550).
gcgtgagaatgcttttaga

SEQ ID NO: 746917 - DNA, 19 bp, Mus musculus
  siRNA target sequence for Asb12 (NM_080858.1,533-551).
cgtgagaatgcttttagaa

SEQ ID NO: 746918 - DNA, 19 bp, Mus musculus
  siRNA target sequence for Asb12 (NM_080858.1,568-586).
gtggtagcatctacaacaa

SEQ ID NO: 746919 - DNA, 19 bp, Mus musculus
  siRNA target sequence for Asb12 (NM_080858.1,570-588).
ggtagcatctacaacaatt

SEQ ID NO: 746920 - DNA, 19 bp, Mus musculus
  siRNA target sequence for Asb12 (NM_080858.1,619-637).
gggcttttgccatcttaca

SEQ ID NO: 746921 - DNA, 19 bp, Mus musculus
  siRNA target sequence for Asb12 (NM_080858.1,654-672).
ggtgccgaggctaatgtca

SEQ ID NO: 746922 - DNA, 19 bp, Mus musculus
  siRNA target sequence for Asb12 (NM_080858.1,655-673).
gtgccgaggctaatgtcaa

SEQ ID NO: 746923 - DNA, 19 bp, Mus musculus
  siRNA target sequence for Asb12 (NM_080858.1,664-682).
ctaatgtcaaagctaaact

SEQ ID NO: 746924 - DNA, 19 bp, Mus musculus
  siRNA target sequence for Asb12 (NM_080858.1,684-702).
ccagtctgggcgtcaaata

SEQ ID NO: 746925 - DNA, 19 bp, Mus musculus
  siRNA target sequence for Asb12 (NM_080858.1,685-703).
cagtctgggcgtcaaatat

SEQ ID NO: 746926 - DNA, 19 bp, Mus musculus
  siRNA target sequence for Asb12 (NM_080858.1,695-713).
gtcaaatatagcttcatgt

SEQ ID NO: 746927 - DNA, 19 bp, Mus musculus
  siRNA target sequence for Asb12 (NM_080858.1,725-743).
ctatctggctgcagtctat

SEQ ID NO: 746928 - DNA, 19 bp, Mus musculus
  siRNA target sequence for Asb12 (NM_080858.1,740-758).
ctatgggcaccttgattgt

SEQ ID NO: 746929 - DNA, 19 bp, Mus musculus
  siRNA target sequence for Asb12 (NM_080858.1,781-799).
gggcagatcctgattacaa

SEQ ID NO: 746930 - DNA, 19 bp, Mus musculus
  siRNA target sequence for Asb12 (NM_080858.1,837-855).
cctcgcacactccttgaaa

SEQ ID NO: 746931 - DNA, 19 bp, Mus musculus
  siRNA target sequence for Asb12 (NM_080858.1,838-856).
ctcgcacactccttgaaat

SEQ ID NO: 746932 - DNA, 19 bp, Mus musculus
  siRNA target sequence for Asb12 (NM_080858.1,884-902).
gtacatccagcttttaata

SEQ ID NO: 746933 - DNA, 19 bp, Mus musculus
  siRNA target sequence for Asb12 (NM_080858.1,935-953).
ccctgtggacccaacttca

SEQ ID NO: 746934 - DNA, 19 bp, Mus musculus
  siRNA target sequence for Asb12 (NM_080858.1,941-959).
ggacccaacttcacaagat

SEQ ID NO: 746935 - DNA, 19 bp, Mus musculus
  siRNA target sequence for Asb12 (NM_080858.1,1013-1031).
gtcccagacccgtttagtt

SEQ ID NO: 746936 - DNA, 19 bp, Mus musculus
  siRNA target sequence for Asb12 (NM_080858.1,1015-1033).
cccagacccgtttagttat

SEQ ID NO: 746937 - DNA, 19 bp, Mus musculus
  siRNA target sequence for Asb12 (NM_080858.1,1089-1107).
ccccctgtgttgattagct

SEQ ID NO: 746938 - DNA, 19 bp, Mus musculus
  siRNA target sequence for Asb12 (NM_080858.1,1090-1108).
cccctgtgttgattagcta

SEQ ID NO: 746939 - DNA, 19 bp, Mus musculus
  siRNA target sequence for Asb12 (NM_080858.1,1100-1118).
gattagctacctcaaacat

SEQ ID NO: 746940 - DNA, 19 bp, Mus musculus
  siRNA target sequence for Krtap16-4 (NM_130873.1,244-262).
cctatgggggatatggatt

SEQ ID NO: 746941 - DNA, 19 bp, Mus musculus
  siRNA target sequence for AJ430384 (NM_130880.1,434-452).
cacttctacatgatcctat

SEQ ID NO: 746942 - DNA, 19 bp, Mus musculus
  siRNA target sequence for AJ430384 (NM_130880.1,445-463).
gatcctatgacgcttgata

SEQ ID NO: 746943 - DNA, 19 bp, Mus musculus
  siRNA target sequence for AJ430384 (NM_130880.1,449-467).
ctatgacgcttgatatgga

SEQ ID NO: 746944 - DNA, 19 bp, Mus musculus
  siRNA target sequence for AJ430384 (NM_130880.1,468-486).
cgcagtcctgtcagacttt

SEQ ID NO: 746945 - DNA, 19 bp, Mus musculus
  siRNA target sequence for AJ430384 (NM_130880.1,557-575).
ctgcactaagcgactatga

SEQ ID NO: 746946 - DNA, 19 bp, Mus musculus
  siRNA target sequence for AJ430384 (NM_130880.1,779-797).
gatcccacgtggcaaatga

SEQ ID NO: 746947 - DNA, 19 bp, Mus musculus
  siRNA target sequence for AJ430384 (NM_130880.1,791-809).
caaatgagtgcaacaatga

SEQ ID NO: 746948 - DNA, 19 bp, Mus musculus
  siRNA target sequence for AJ430384 (NM_130880.1,823-841).
gagatgcccatctatacat

SEQ ID NO: 746949 - DNA, 19 bp, Mus musculus
  siRNA target sequence for AJ430384 (NM_130880.1,906-924).
cgagcaggccactatggta

SEQ ID NO: 746950 - DNA, 19 bp, Mus musculus
  siRNA target sequence for AJ430384 (NM_130880.1,964-982).
gtgtgcacgagctgtaaaa

SEQ ID NO: 746951 - DNA, 19 bp, Mus musculus
  siRNA target sequence for AJ430384 (NM_130880.1,1227-1245).
cacacacttcagcaagaat

SEQ ID NO: 746952 - DNA, 19 bp, Mus musculus
  siRNA target sequence for AJ430384 (NM_130880.1,1479-1497).
ctacgatcaagctcacttt

SEQ ID NO: 746953 - DNA, 19 bp, Mus musculus
  siRNA target sequence for AJ430384 (NM_130880.1,1482-1500).
cgatcaagctcacttttca

SEQ ID NO: 746954 - DNA, 19 bp, Mus musculus
  siRNA target sequence for AJ430384 (NM_130880.1,1842-1860).
caattccaacagcaataat

SEQ ID NO: 746955 - DNA, 19 bp, Mus musculus
  siRNA target sequence for AJ430384 (NM_130880.1,1851-1869).
cagcaataatggcaagaat

SEQ ID NO: 746956 - DNA, 19 bp, Mus musculus
  siRNA target sequence for AJ430384 (NM_130880.1,1961-1979).
cgctgggcatcaagctaaa

SEQ ID NO: 746957 - DNA, 19 bp, Mus musculus
  siRNA target sequence for AJ430384 (NM_130880.1,1965-1983).
gggcatcaagctaaagaaa

SEQ ID NO: 746958 - DNA, 19 bp, Mus musculus
  siRNA target sequence for AJ430384 (NM_130880.1,2003-2021).
gcctggtgcacggtaagat

SEQ ID NO: 746959 - DNA, 19 bp, Mus musculus
  siRNA target sequence for AJ430384 (NM_130880.1,2068-2086).
cgcaacaaggagaaaaagt

SEQ ID NO: 746960 - DNA, 19 bp, Mus musculus
  siRNA target sequence for AJ430384 (NM_130880.1,2281-2299).
caaggcgagcgcaaattca

SEQ ID NO: 746961 - DNA, 19 bp, Mus musculus
  siRNA target sequence for AJ430384 (NM_130880.1,2284-2302).
ggcgagcgcaaattcatct

SEQ ID NO: 746962 - DNA, 19 bp, Mus musculus
  siRNA target sequence for AJ430384 (NM_130880.1,2285-2303).
gcgagcgcaaattcatctt

SEQ ID NO: 746963 - DNA, 19 bp, Mus musculus
  siRNA target sequence for AJ430384 (NM_130880.1,2851-2869).
gcgctgcgcaccgtcaata

SEQ ID NO: 746964 - DNA, 19 bp, Mus musculus
  siRNA target sequence for AJ430384 (NM_130880.1,2853-2871).
gctgcgcaccgtcaataca

SEQ ID NO: 746965 - DNA, 19 bp, Mus musculus
  siRNA target sequence for AF119384 (NM_130883.1,146-164).
cctgccctgtatgaacaaa

SEQ ID NO: 746966 - DNA, 19 bp, Mus musculus
  siRNA target sequence for AF119384 (NM_130883.1,248-266).
ccttggctacagttagtta

SEQ ID NO: 746967 - DNA, 19 bp, Mus musculus
  siRNA target sequence for AF119384 (NM_130883.1,322-340).
gagagctggtccagagatt

SEQ ID NO: 746968 - DNA, 19 bp, Mus musculus
  siRNA target sequence for Scrt1 (NM_130893.2,487-505).
ctgctggcggctacatcaa

SEQ ID NO: 746969 - DNA, 19 bp, Mus musculus
  siRNA target sequence for Scrt1 (NM_130893.2,537-555).
gccgacgccttcttcatca

SEQ ID NO: 746970 - DNA, 19 bp, Mus musculus
  siRNA target sequence for Scrt1 (NM_130893.2,1137-1155).
gcgctcaagtcttatctca

SEQ ID NO: 746971 - DNA, 19 bp, Mus musculus
  siRNA target sequence for Scrt1 (NM_130893.2,1138-1156).
cgctcaagtcttatctcaa

SEQ ID NO: 746972 - DNA, 19 bp, Mus musculus
  siRNA target sequence for 0610011C19Rik (NM_133185.1,268-286).
cggatgtgaacctgaagat

SEQ ID NO: 746973 - DNA, 19 bp, Mus musculus
  siRNA target sequence for 0610011C19Rik (NM_133185.1,289-307).
ctcggaacaaccagttgtt

SEQ ID NO: 746974 - DNA, 19 bp, Mus musculus
  siRNA target sequence for 0610011C19Rik (NM_133185.1,536-554).
cggcctcacgcggatgttt

SEQ ID NO: 746975 - DNA, 19 bp, Mus musculus
  siRNA target sequence for 0610011C19Rik (NM_133185.1,743-761).
cgtgcacaaggtagaatgt

SEQ ID NO: 746976 - DNA, 19 bp, Mus musculus
  siRNA target sequence for 0610011C19Rik (NM_133185.1,749-767).
caaggtagaatgtgtgata

SEQ ID NO: 746977 - DNA, 19 bp, Mus musculus
  siRNA target sequence for 0610011C19Rik (NM_133185.1,780-798).
gatgccctggtatacttca

SEQ ID NO: 746978 - DNA, 19 bp, Mus musculus
  siRNA target sequence for 0610011C19Rik (NM_133185.1,830-848).
ggacaagatcgctgtgttt

SEQ ID NO: 746979 - DNA, 19 bp, Mus musculus
  siRNA target sequence for 1110032E23Rik (NM_133187.1,267-285).
ctcgtaaactggtttgtct

SEQ ID NO: 746980 - DNA, 19 bp, Mus musculus
  siRNA target sequence for 1110032E23Rik (NM_133187.1,298-316).
ccccacgagtgtgtaaact

SEQ ID NO: 746981 - DNA, 19 bp, Mus musculus
  siRNA target sequence for 1110032E23Rik (NM_133187.1,300-318).
ccacgagtgtgtaaacttt

SEQ ID NO: 746982 - DNA, 19 bp, Mus musculus
  siRNA target sequence for 1110032E23Rik (NM_133187.1,451-469).
ccaacggtcacgacatctt

SEQ ID NO: 746983 - DNA, 19 bp, Mus musculus
  siRNA target sequence for 1110032E23Rik (NM_133187.1,519-537).
gagttgcagggcaatggaa

SEQ ID NO: 746984 - DNA, 19 bp, Mus musculus
  siRNA target sequence for 1110032E23Rik (NM_133187.1,549-567).
cccaacgtggtgtacatta

SEQ ID NO: 746985 - DNA, 19 bp, Mus musculus
  siRNA target sequence for 1110032E23Rik (NM_133187.1,551-569).
caacgtggtgtacattact

SEQ ID NO: 746986 - DNA, 19 bp, Mus musculus
  siRNA target sequence for 1110032E23Rik (NM_133187.1,674-692).
ggttagaccatcccttata

SEQ ID NO: 746987 - DNA, 19 bp, Mus musculus
  siRNA target sequence for 1110032E23Rik (NM_133187.1,802-820).
gaactagaggttcaaactt

SEQ ID NO: 746988 - DNA, 19 bp, Mus musculus
  siRNA target sequence for 1110032E23Rik (NM_133187.1,837-855).
cgagagagcaacattagga

SEQ ID NO: 746989 - DNA, 19 bp, Mus musculus
  siRNA target sequence for 1110032E23Rik (NM_133187.1,842-860).
gagcaacattaggatttat

SEQ ID NO: 746990 - DNA, 19 bp, Mus musculus
  siRNA target sequence for 1110032E23Rik (NM_133187.1,908-926).
gcgcctcctggctgatagt

SEQ ID NO: 746991 - DNA, 19 bp, Mus musculus
  siRNA target sequence for 1110032E23Rik (NM_133187.1,937-955).
gcatcctacctatctctaa

SEQ ID NO: 746992 - DNA, 19 bp, Mus musculus
  siRNA target sequence for 1110032E23Rik (NM_133187.1,1110-1128).
ccatctgtgagcaggaaat

SEQ ID NO: 746993 - DNA, 19 bp, Mus musculus
  siRNA target sequence for 1110032E23Rik (NM_133187.1,1120-1138).
gcaggaaattagagttcat

SEQ ID NO: 746994 - DNA, 19 bp, Mus musculus
  siRNA target sequence for 1110032E23Rik (NM_133187.1,1200-1218).
gatagccattcctctgtta

SEQ ID NO: 746995 - DNA, 19 bp, Mus musculus
  siRNA target sequence for 1110032E23Rik (NM_133187.1,1204-1222).
gccattcctctgttaagat

SEQ ID NO: 746996 - DNA, 19 bp, Mus musculus
  siRNA target sequence for 1110032E23Rik (NM_133187.1,1220-1238).
gatcacctggggaacttat

SEQ ID NO: 746997 - DNA, 19 bp, Mus musculus
  siRNA target sequence for 1110032E23Rik (NM_133187.1,1234-1252).
cttatcagcggttgctaaa

SEQ ID NO: 746998 - DNA, 19 bp, Mus musculus
  siRNA target sequence for 1110032E23Rik (NM_133187.1,1239-1257).
cagcggttgctaaaacaga

SEQ ID NO: 746999 - DNA, 19 bp, Mus musculus
  siRNA target sequence for 1110032E23Rik (NM_133187.1,1290-1308).
gagtgggactgcactgaaa

SEQ ID NO: 747000 - DNA, 19 bp, Mus musculus
  siRNA target sequence for 1110032E23Rik (NM_133187.1,1368-1386).
cgcttggatacaaattgct

SEQ ID NO: 747001 - DNA, 19 bp, Mus musculus
  siRNA target sequence for 1110032E23Rik (NM_133187.1,1465-1483).
cgttagcacacattatcca

SEQ ID NO: 747002 - DNA, 19 bp, Mus musculus
  siRNA target sequence for 1110032E23Rik (NM_133187.1,1501-1519).
ggcatttggtcttcataaa

SEQ ID NO: 747003 - DNA, 19 bp, Mus musculus
  siRNA target sequence for 1110032E23Rik (NM_133187.1,1503-1521).
catttggtcttcataaaca

SEQ ID NO: 747004 - DNA, 19 bp, Mus musculus
  siRNA target sequence for 1110032E23Rik (NM_133187.1,1536-1554).
gatagaagcgaagataact

SEQ ID NO: 747005 - DNA, 19 bp, Mus musculus
  siRNA target sequence for 1110032E23Rik (NM_133187.1,1543-1561).
gcgaagataacttaaactt

SEQ ID NO: 747006 - DNA, 19 bp, Mus musculus
  siRNA target sequence for 1110032E23Rik (NM_133187.1,1580-1598).
ccgagagtttcctgaatct

SEQ ID NO: 747007 - DNA, 19 bp, Mus musculus
  siRNA target sequence for 1110032E23Rik (NM_133187.1,1696-1714).
gcatcgagaagcttatcga

SEQ ID NO: 747008 - DNA, 19 bp, Mus musculus
  siRNA target sequence for 1110032E23Rik (NM_133187.1,1725-1743).
cggagagccagaatcctta

SEQ ID NO: 747009 - DNA, 19 bp, Mus musculus
  siRNA target sequence for 1110032E23Rik (NM_133187.1,1763-1781).
cggggctagagtattacct

SEQ ID NO: 747010 - DNA, 19 bp, Mus musculus
  siRNA target sequence for 1110032E23Rik (NM_133187.1,1764-1782).
ggggctagagtattaccta

SEQ ID NO: 747011 - DNA, 19 bp, Mus musculus
  siRNA target sequence for 1110032E23Rik (NM_133187.1,1765-1783).
gggctagagtattacctat

SEQ ID NO: 747012 - DNA, 19 bp, Mus musculus
  siRNA target sequence for 1110032E23Rik (NM_133187.1,1768-1786).
ctagagtattacctatgaa

SEQ ID NO: 747013 - DNA, 19 bp, Mus musculus
  siRNA target sequence for Cacng7 (NM_133189.1,235-253).
cttgaaccagagatcaact

SEQ ID NO: 747014 - DNA, 19 bp, Mus musculus
  siRNA target sequence for Cacng7 (NM_133189.1,260-278).
cggaaaacacggagaatat

SEQ ID NO: 747015 - DNA, 19 bp, Mus musculus
  siRNA target sequence for Cacng7 (NM_133189.1,578-596).
gagtcatgtccgtgtactt

SEQ ID NO: 747016 - DNA, 19 bp, Mus musculus
  siRNA target sequence for Cacng7 (NM_133189.1,608-626).
gctacgcggaggaagagat

SEQ ID NO: 747017 - DNA, 19 bp, Mus musculus
  siRNA target sequence for Cacng7 (NM_133189.1,753-771).
cattcagatgacgcaaaat

SEQ ID NO: 747018 - DNA, 19 bp, Mus musculus
  siRNA target sequence for Eps8l2 (NM_133191.2,214-232).
ccaactccaacgtcatcat

SEQ ID NO: 747019 - DNA, 19 bp, Mus musculus
  siRNA target sequence for Eps8l2 (NM_133191.2,463-481).
gccagacagtgctaaacca

SEQ ID NO: 747020 - DNA, 19 bp, Mus musculus
  siRNA target sequence for Eps8l2 (NM_133191.2,536-554).
gcccgacatccacttcttt

SEQ ID NO: 747021 - DNA, 19 bp, Mus musculus
  siRNA target sequence for Eps8l2 (NM_133191.2,540-558).
gacatccacttctttcact

SEQ ID NO: 747022 - DNA, 19 bp, Mus musculus
  siRNA target sequence for Eps8l2 (NM_133191.2,672-690).
cgccagcggcagtctatct

SEQ ID NO: 747023 - DNA, 19 bp, Mus musculus
  siRNA target sequence for Eps8l2 (NM_133191.2,674-692).
ccagcggcagtctatctta

SEQ ID NO: 747024 - DNA, 19 bp, Mus musculus
  siRNA target sequence for Eps8l2 (NM_133191.2,863-881).
gaaggagacgcaaatcctt

SEQ ID NO: 747025 - DNA, 19 bp, Mus musculus
  siRNA target sequence for Eps8l2 (NM_133191.2,867-885).
gagacgcaaatccttaact

SEQ ID NO: 747026 - DNA, 19 bp, Mus musculus
  siRNA target sequence for Eps8l2 (NM_133191.2,997-1015).
cagagggtgtccttacact

SEQ ID NO: 747027 - DNA, 19 bp, Mus musculus
  siRNA target sequence for Eps8l2 (NM_133191.2,1028-1046).
cccctcggagggagagttt

SEQ ID NO: 747028 - DNA, 19 bp, Mus musculus
  siRNA target sequence for Eps8l2 (NM_133191.2,1158-1176).
gatctgatcatcaacacat

SEQ ID NO: 747029 - DNA, 19 bp, Mus musculus
  siRNA target sequence for Eps8l2 (NM_133191.2,1331-1349).
gccacaggtgccactctat

SEQ ID NO: 747030 - DNA, 19 bp, Mus musculus
  siRNA target sequence for Eps8l2 (NM_133191.2,1454-1472).
caagaatcgactatctgta

SEQ ID NO: 747031 - DNA, 19 bp, Mus musculus
  siRNA target sequence for Eps8l2 (NM_133191.2,1537-1555).
gcagctccccacatgctaa

SEQ ID NO: 747032 - DNA, 19 bp, Mus musculus
  siRNA target sequence for Eps8l2 (NM_133191.2,1593-1611).
gtcaagatcctctatgatt

SEQ ID NO: 747033 - DNA, 19 bp, Mus musculus
  siRNA target sequence for Eps8l2 (NM_133191.2,1598-1616).
gatcctctatgatttcaca

SEQ ID NO: 747034 - DNA, 19 bp, Mus musculus
  siRNA target sequence for Eps8l2 (NM_133191.2,1685-1703).
gtggtggaagctacgaaat

SEQ ID NO: 747035 - DNA, 19 bp, Mus musculus
  siRNA target sequence for Eps8l2 (NM_133191.2,1821-1839).
cacaaactgcccccaattt

SEQ ID NO: 747036 - DNA, 19 bp, Mus musculus
  siRNA target sequence for Eps8l2 (NM_133191.2,1883-1901).
caatgacgagctcatgaaa

SEQ ID NO: 747037 - DNA, 19 bp, Mus musculus
  siRNA target sequence for Eps8l2 (NM_133191.2,2223-2241).
gccgaggacagctatacca

SEQ ID NO: 747038 - DNA, 19 bp, Mus musculus
  siRNA target sequence for Scml2 (NM_133194.2,216-234).
ggggcaaacagcgaatgaa

SEQ ID NO: 747039 - DNA, 19 bp, Mus musculus
  siRNA target sequence for Scml2 (NM_133194.2,218-236).
ggcaaacagcgaatgaaga

SEQ ID NO: 747040 - DNA, 19 bp, Mus musculus
  siRNA target sequence for Scml2 (NM_133194.2,219-237).
gcaaacagcgaatgaagat

SEQ ID NO: 747041 - DNA, 19 bp, Mus musculus
  siRNA target sequence for Scml2 (NM_133194.2,224-242).
cagcgaatgaagatcattt

SEQ ID NO: 747042 - DNA, 19 bp, Mus musculus
  siRNA target sequence for Scml2 (NM_133194.2,244-262).
gactgggacaagtacttga

SEQ ID NO: 747043 - DNA, 19 bp, Mus musculus
  siRNA target sequence for Scml2 (NM_133194.2,308-326).
ctaagactccaccaactaa

SEQ ID NO: 747044 - DNA, 19 bp, Mus musculus
  siRNA target sequence for Scml2 (NM_133194.2,312-330).
gactccaccaactaatgaa

SEQ ID NO: 747045 - DNA, 19 bp, Mus musculus
  siRNA target sequence for Scml2 (NM_133194.2,356-374).
cccgtgaccctcgcaatat

SEQ ID NO: 747046 - DNA, 19 bp, Mus musculus
  siRNA target sequence for Scml2 (NM_133194.2,357-375).
ccgtgaccctcgcaatatt

SEQ ID NO: 747047 - DNA, 19 bp, Mus musculus
  siRNA target sequence for Scml2 (NM_133194.2,361-379).
gaccctcgcaatattgatt

SEQ ID NO: 747048 - DNA, 19 bp, Mus musculus
  siRNA target sequence for Scml2 (NM_133194.2,388-406).
gttgcttcggtcattggaa

SEQ ID NO: 747049 - DNA, 19 bp, Mus musculus
  siRNA target sequence for Scml2 (NM_133194.2,391-409).
gcttcggtcattggaatta

SEQ ID NO: 747050 - DNA, 19 bp, Mus musculus
  siRNA target sequence for Scml2 (NM_133194.2,540-558).
ggggtacacactgaatact

SEQ ID NO: 747051 - DNA, 19 bp, Mus musculus
  siRNA target sequence for Scml2 (NM_133194.2,573-591).
gttcttactacgtgtacta

SEQ ID NO: 747052 - DNA, 19 bp, Mus musculus
  siRNA target sequence for Scml2 (NM_133194.2,576-594).
cttactacgtgtactaact

SEQ ID NO: 747053 - DNA, 19 bp, Mus musculus
  siRNA target sequence for Scml2 (NM_133194.2,637-655).
ccacgtccactccaaaata

SEQ ID NO: 747054 - DNA, 19 bp, Mus musculus
  siRNA target sequence for Scml2 (NM_133194.2,638-656).
cacgtccactccaaaataa

SEQ ID NO: 747055 - DNA, 19 bp, Mus musculus
  siRNA target sequence for Scml2 (NM_133194.2,640-658).
cgtccactccaaaataatt

SEQ ID NO: 747056 - DNA, 19 bp, Mus musculus
  siRNA target sequence for Scml2 (NM_133194.2,643-661).
ccactccaaaataatttca

SEQ ID NO: 747057 - DNA, 19 bp, Mus musculus
  siRNA target sequence for Scml2 (NM_133194.2,679-697).
gaagctgtcgatagaaaaa

SEQ ID NO: 747058 - DNA, 19 bp, Mus musculus
  siRNA target sequence for Scml2 (NM_133194.2,685-703).
gtcgatagaaaaaatccat

SEQ ID NO: 747059 - DNA, 19 bp, Mus musculus
  siRNA target sequence for Scml2 (NM_133194.2,687-705).
cgatagaaaaaatccattt

SEQ ID NO: 747060 - DNA, 19 bp, Mus musculus
  siRNA target sequence for Scml2 (NM_133194.2,708-726).
gatctgtcctgccacaatt

SEQ ID NO: 747061 - DNA, 19 bp, Mus musculus
  siRNA target sequence for Scml2 (NM_133194.2,711-729).
ctgtcctgccacaattgga

SEQ ID NO: 747062 - DNA, 19 bp, Mus musculus
  siRNA target sequence for Scml2 (NM_133194.2,742-760).
gatcaacttcatatcactt

SEQ ID NO: 747063 - DNA, 19 bp, Mus musculus
  siRNA target sequence for Scml2 (NM_133194.2,775-793).
ggagcatttgattattggt

SEQ ID NO: 747064 - DNA, 19 bp, Mus musculus
  siRNA target sequence for Scml2 (NM_133194.2,835-853).
cgcctcacaggagatgtat

SEQ ID NO: 747065 - DNA, 19 bp, Mus musculus
  siRNA target sequence for Scml2 (NM_133194.2,860-878).
caccaggaaaaattgttga

SEQ ID NO: 747066 - DNA, 19 bp, Mus musculus
  siRNA target sequence for Scml2 (NM_133194.2,1211-1229).
gaggattcacccaaccttt

SEQ ID NO: 747067 - DNA, 19 bp, Mus musculus
  siRNA target sequence for Scml2 (NM_133194.2,2206-2224).
gcaggaaaatctaagtcta

SEQ ID NO: 747068 - DNA, 19 bp, Mus musculus
  siRNA target sequence for Scml2 (NM_133194.2,2241-2259).
ccctaagaagggcattact

SEQ ID NO: 747069 - DNA, 19 bp, Mus musculus
  siRNA target sequence for Scml2 (NM_133194.2,2243-2261).
ctaagaagggcattactat

SEQ ID NO: 747070 - DNA, 19 bp, Mus musculus
  siRNA target sequence for Scml2 (NM_133194.2,2247-2265).
gaagggcattactattaaa

SEQ ID NO: 747071 - DNA, 19 bp, Mus musculus
  siRNA target sequence for Scml2 (NM_133194.2,2250-2268).
gggcattactattaaaatt

SEQ ID NO: 747072 - DNA, 19 bp, Mus musculus
  siRNA target sequence for Scml2 (NM_133194.2,2286-2304).
gggtggaaagtctggaaaa

SEQ ID NO: 747073 - DNA, 19 bp, Mus musculus
  siRNA target sequence for Scml2 (NM_133194.2,2287-2305).
ggtggaaagtctggaaaaa

SEQ ID NO: 747074 - DNA, 19 bp, Mus musculus
  siRNA target sequence for Scml2 (NM_133194.2,2349-2367).
ctttaagtacactgatgaa

SEQ ID NO: 747075 - DNA, 19 bp, Mus musculus
  siRNA target sequence for Scml2 (NM_133194.2,2362-2380).
gatgaaaagttcttcatct

SEQ ID NO: 747076 - DNA, 19 bp, Mus musculus
  siRNA target sequence for Zfp371 (NM_133204.1,187-205).
cggtttcagtgtactgaat

SEQ ID NO: 747077 - DNA, 19 bp, Mus musculus
  siRNA target sequence for Zfp371 (NM_133204.1,493-511).
gtccatttccgcatccatt

SEQ ID NO: 747078 - DNA, 19 bp, Mus musculus
  siRNA target sequence for B830022L21Rik (NM_133206.1,398-416).
cggaggggtgccctttagt

SEQ ID NO: 747079 - DNA, 19 bp, Mus musculus
  siRNA target sequence for B830022L21Rik (NM_133206.1,712-730).
gcctgtcctacaatgatga

SEQ ID NO: 747080 - DNA, 19 bp, Mus musculus
  siRNA target sequence for B830022L21Rik (NM_133206.1,811-829).
gcctgtgcatctatcacaa

SEQ ID NO: 747081 - DNA, 19 bp, Mus musculus
  siRNA target sequence for Pilrb (NM_133209.1,432-450).
ccaagcccagtactttagt

SEQ ID NO: 747082 - DNA, 19 bp, Mus musculus
  siRNA target sequence for Pilrb (NM_133209.1,441-459).
gtactttagtcgagttaat

SEQ ID NO: 747083 - DNA, 19 bp, Mus musculus
  siRNA target sequence for Gig1 (NM_133218.1,811-829).
gtgaaggtggggagtttta

SEQ ID NO: 747084 - DNA, 19 bp, Mus musculus
  siRNA target sequence for Gig1 (NM_133218.1,840-858).
gaccttcacgtttcaatca

SEQ ID NO: 747085 - DNA, 19 bp, Mus musculus
  siRNA target sequence for Gig1 (NM_133218.1,842-860).
ccttcacgtttcaatcaga

SEQ ID NO: 747086 - DNA, 19 bp, Mus musculus
  siRNA target sequence for Gig1 (NM_133218.1,869-887).
gacgtgactccagtaagaa

SEQ ID NO: 747087 - DNA, 19 bp, Mus musculus
  siRNA target sequence for Gig1 (NM_133218.1,1005-1023).
gcagaagcggaaagtagtt

SEQ ID NO: 747088 - DNA, 19 bp, Mus musculus
  siRNA target sequence for Gig1 (NM_133218.1,1139-1157).
ctcctgtgcggcctaatga

SEQ ID NO: 747089 - DNA, 19 bp, Mus musculus
  siRNA target sequence for Gig1 (NM_133218.1,1513-1531).
ggggaagaagacttctact

SEQ ID NO: 747090 - DNA, 19 bp, Mus musculus
  siRNA target sequence for Gig1 (NM_133218.1,1514-1532).
gggaagaagacttctacta

SEQ ID NO: 747091 - DNA, 19 bp, Mus musculus
  siRNA target sequence for Gig1 (NM_133218.1,1857-1875).
ggtgtctcctccacatcat

SEQ ID NO: 747092 - DNA, 19 bp, Mus musculus
  siRNA target sequence for Gig1 (NM_133218.1,1940-1958).
ggacagtcaccctaaggaa

SEQ ID NO: 747093 - DNA, 19 bp, Mus musculus
  siRNA target sequence for Gig1 (NM_133218.1,2043-2061).
ggcctgccagcggttcatt

SEQ ID NO: 747094 - DNA, 19 bp, Mus musculus
  siRNA target sequence for Gig1 (NM_133218.1,2045-2063).
cctgccagcggttcattga

SEQ ID NO: 747095 - DNA, 19 bp, Mus musculus
  siRNA target sequence for Dscr6 (NM_133229.1,335-353).
cgtttcaaagcgtcaagaa

SEQ ID NO: 747096 - DNA, 19 bp, Mus musculus
  siRNA target sequence for Dscr6 (NM_133229.1,336-354).
gtttcaaagcgtcaagaat

SEQ ID NO: 747097 - DNA, 19 bp, Mus musculus
  siRNA target sequence for Dscr6 (NM_133229.1,399-417).
caagccaccattcatttct

SEQ ID NO: 747098 - DNA, 19 bp, Mus musculus
  siRNA target sequence for Bbc3 (NM_133234.1,537-555).
gcccagcagcacttagagt

SEQ ID NO: 747099 - DNA, 19 bp, Mus musculus
  siRNA target sequence for Bbc3 (NM_133234.1,736-754).
caccctggagggtcatgta

SEQ ID NO: 747100 - DNA, 19 bp, Mus musculus
  siRNA target sequence for Bbc3 (NM_133234.1,742-760).
ggagggtcatgtacaatct

SEQ ID NO: 747101 - DNA, 19 bp, Mus musculus
  siRNA target sequence for Bbc3 (NM_133234.1,745-763).
gggtcatgtacaatctctt

SEQ ID NO: 747102 - DNA, 19 bp, Mus musculus
  siRNA target sequence for Glcci1 (NM_133236.1,393-411).
ctgaccacgtactctcata

SEQ ID NO: 747103 - DNA, 19 bp, Mus musculus
  siRNA target sequence for Glcci1 (NM_133236.1,397-415).
ccacgtactctcatacgat

SEQ ID NO: 747104 - DNA, 19 bp, Mus musculus
  siRNA target sequence for Glcci1 (NM_133236.1,424-442).
caacttgtcccgattctgt

SEQ ID NO: 747105 - DNA, 19 bp, Mus musculus
  siRNA target sequence for AB023957 (NM_133237.1,230-248).
gagtcaccctgttactaga

SEQ ID NO: 747106 - DNA, 19 bp, Mus musculus
  siRNA target sequence for AB023957 (NM_133237.1,232-250).
gtcaccctgttactagaat

SEQ ID NO: 747107 - DNA, 19 bp, Mus musculus
  siRNA target sequence for AB023957 (NM_133237.1,370-388).
cgccacccattcctttgta

SEQ ID NO: 747108 - DNA, 19 bp, Mus musculus
  siRNA target sequence for AB023957 (NM_133237.1,394-412).
gcaactggtgctataaaca

SEQ ID NO: 747109 - DNA, 19 bp, Mus musculus
  siRNA target sequence for AB023957 (NM_133237.1,452-470).
gaggagagacaaaaaacct

SEQ ID NO: 747110 - DNA, 19 bp, Mus musculus
  siRNA target sequence for Mlc1 (NM_133241.1,594-612).
gctacacccctgactcaaa

SEQ ID NO: 747111 - DNA, 19 bp, Mus musculus
  siRNA target sequence for Mlc1 (NM_133241.1,647-665).
ccgtgcttcagctacaaga

SEQ ID NO: 747112 - DNA, 19 bp, Mus musculus
  siRNA target sequence for Mlc1 (NM_133241.1,711-729).
ctgggttttcgctctactt

SEQ ID NO: 747113 - DNA, 19 bp, Mus musculus
  siRNA target sequence for Mlc1 (NM_133241.1,783-801).
gcatcccctcagcaattgt

SEQ ID NO: 747114 - DNA, 19 bp, Mus musculus
  siRNA target sequence for Mlc1 (NM_133241.1,808-826).
cgctgtagggaggagaaat

SEQ ID NO: 747115 - DNA, 19 bp, Mus musculus
  siRNA target sequence for Mlc1 (NM_133241.1,829-847).
cagtgcgattcccaacttt

SEQ ID NO: 747116 - DNA, 19 bp, Mus musculus
  siRNA target sequence for Mlc1 (NM_133241.1,831-849).
gtgcgattcccaactttca

SEQ ID NO: 747117 - DNA, 19 bp, Mus musculus
  siRNA target sequence for Mlc1 (NM_133241.1,834-852).
cgattcccaactttcagat

SEQ ID NO: 747118 - DNA, 19 bp, Mus musculus
  siRNA target sequence for Mlc1 (NM_133241.1,835-853).
gattcccaactttcagata

SEQ ID NO: 747119 - DNA, 19 bp, Mus musculus
  siRNA target sequence for Mlc1 (NM_133241.1,839-857).
cccaactttcagatattgt

SEQ ID NO: 747120 - DNA, 19 bp, Mus musculus
  siRNA target sequence for Mlc1 (NM_133241.1,923-941).
ccttcagccataaacatta

SEQ ID NO: 747121 - DNA, 19 bp, Mus musculus
  siRNA target sequence for Mlc1 (NM_133241.1,924-942).
cttcagccataaacattaa

SEQ ID NO: 747122 - DNA, 19 bp, Mus musculus
  siRNA target sequence for Mlc1 (NM_133241.1,983-1001).
gcagccacggtgatcattt

SEQ ID NO: 747123 - DNA, 19 bp, Mus musculus
  siRNA target sequence for Mlc1 (NM_133241.1,1050-1068).
ccgatggctctaacattct

SEQ ID NO: 747124 - DNA, 19 bp, Mus musculus
  siRNA target sequence for Mlc1 (NM_133241.1,1085-1103).
cctgctcgggtcctaaagt

SEQ ID NO: 747125 - DNA, 19 bp, Mus musculus
  siRNA target sequence for Mlc1 (NM_133241.1,1149-1167).
gtggggtgatcgctctaaa

SEQ ID NO: 747126 - DNA, 19 bp, Mus musculus
  siRNA target sequence for Mlc1 (NM_133241.1,1152-1170).
gggtgatcgctctaaacgt

SEQ ID NO: 747127 - DNA, 19 bp, Mus musculus
  siRNA target sequence for Mlc1 (NM_133241.1,1153-1171).
ggtgatcgctctaaacgta

SEQ ID NO: 747128 - DNA, 19 bp, Mus musculus
  siRNA target sequence for Mlc1 (NM_133241.1,1196-1214).
ctctcggtgacgttctttt

SEQ ID NO: 747129 - DNA, 19 bp, Mus musculus
  siRNA target sequence for Mlc1 (NM_133241.1,1200-1218).
cggtgacgttcttttggat

SEQ ID NO: 747130 - DNA, 19 bp, Mus musculus
  siRNA target sequence for Mlc1 (NM_133241.1,1201-1219).
ggtgacgttcttttggatt

SEQ ID NO: 747131 - DNA, 19 bp, Mus musculus
  siRNA target sequence for Mlc1 (NM_133241.1,1202-1220).
gtgacgttcttttggattt

SEQ ID NO: 747132 - DNA, 19 bp, Mus musculus
  siRNA target sequence for Mlc1 (NM_133241.1,1204-1222).
gacgttcttttggatttta

SEQ ID NO: 747133 - DNA, 19 bp, Mus musculus
  siRNA target sequence for Mlc1 (NM_133241.1,1368-1386).
gagtcgtggagatttttaa

SEQ ID NO: 747134 - DNA, 19 bp, Mus musculus
  siRNA target sequence for Mlc1 (NM_133241.1,1372-1390).
cgtggagatttttaaagat

SEQ ID NO: 747135 - DNA, 19 bp, Mus musculus
  siRNA target sequence for Mlc1 (NM_133241.1,1395-1413).
cgccagccatcaaatctta

SEQ ID NO: 747136 - DNA, 19 bp, Mus musculus
  siRNA target sequence for Mlc1 (NM_133241.1,1401-1419).
ccatcaaatcttatgatgt

SEQ ID NO: 747137 - DNA, 19 bp, Mus musculus
  siRNA target sequence for Mlc1 (NM_133241.1,1402-1420).
catcaaatcttatgatgtt

SEQ ID NO: 747138 - DNA, 19 bp, Mus musculus
  siRNA target sequence for Mlc1 (NM_133241.1,1584-1602).
ccctcaaggagtttgacaa

SEQ ID NO: 747139 - DNA, 19 bp, Mus musculus
  siRNA target sequence for AY036118 (NM_133243.1,191-209).
gacacgcgaggccagaaaa

SEQ ID NO: 747140 - DNA, 19 bp, Mus musculus
  siRNA target sequence for AY036118 (NM_133243.1,232-250).
cccacacgcgacactacat

SEQ ID NO: 747141 - DNA, 19 bp, Mus musculus
  siRNA target sequence for AY036118 (NM_133243.1,233-251).
ccacacgcgacactacatt

SEQ ID NO: 747142 - DNA, 19 bp, Mus musculus
  siRNA target sequence for AY036118 (NM_133243.1,268-286).
ccgcccagccaacgttaaa

SEQ ID NO: 747143 - DNA, 19 bp, Mus musculus
  siRNA target sequence for AY036118 (NM_133243.1,269-287).
cgcccagccaacgttaaaa

SEQ ID NO: 747144 - DNA, 19 bp, Mus musculus
  siRNA target sequence for AY036118 (NM_133243.1,377-395).
gacgtaccgcccttcgtaa

SEQ ID NO: 747145 - DNA, 19 bp, Mus musculus
  siRNA target sequence for AY036118 (NM_133243.1,666-684).
cacagtctcccgttaatga

SEQ ID NO: 747146 - DNA, 19 bp, Mus musculus
  siRNA target sequence for AY036118 (NM_133243.1,711-729).
ccttgttacgacttttact

SEQ ID NO: 747147 - DNA, 19 bp, Mus musculus
  siRNA target sequence for AY036118 (NM_133243.1,722-740).
cttttacttcctctagata

SEQ ID NO: 747148 - DNA, 19 bp, Mus musculus
  siRNA target sequence for AY036118 (NM_133243.1,728-746).
cttcctctagatagtcaaa

SEQ ID NO: 747149 - DNA, 19 bp, Mus musculus
  siRNA target sequence for AY036118 (NM_133243.1,731-749).
cctctagatagtcaaagtt

SEQ ID NO: 747150 - DNA, 19 bp, Mus musculus
  siRNA target sequence for B130039D23Rik (NM_133244.2,173-191).
ctccggatggaaaaagaaa

SEQ ID NO: 747151 - DNA, 19 bp, Mus musculus
  siRNA target sequence for B130039D23Rik (NM_133244.2,247-265).
cagggtagagcgaatcagt

SEQ ID NO: 747152 - DNA, 19 bp, Mus musculus
  siRNA target sequence for B130039D23Rik (NM_133244.2,363-381).
ggcagcccctcgcaaactt

SEQ ID NO: 747153 - DNA, 19 bp, Mus musculus
  siRNA target sequence for B130039D23Rik (NM_133244.2,415-433).
gggcacacggacactaaaa

SEQ ID NO: 747154 - DNA, 19 bp, Mus musculus
  siRNA target sequence for B130039D23Rik (NM_133244.2,460-478).
gttccaaggcagaaatcca

SEQ ID NO: 747155 - DNA, 19 bp, Mus musculus
  siRNA target sequence for B130039D23Rik (NM_133244.2,471-489).
gaaatccatcagagacatt

SEQ ID NO: 747156 - DNA, 19 bp, Mus musculus
  siRNA target sequence for Glmn (NM_133248.1,80-98).
ggaacttcagagcataata

SEQ ID NO: 747157 - DNA, 19 bp, Mus musculus
  siRNA target sequence for Glmn (NM_133248.1,87-105).
cagagcataataaaaagat

SEQ ID NO: 747158 - DNA, 19 bp, Mus musculus
  siRNA target sequence for Glmn (NM_133248.1,89-107).
gagcataataaaaagatgt

SEQ ID NO: 747159 - DNA, 19 bp, Mus musculus
  siRNA target sequence for Glmn (NM_133248.1,172-190).
gatgcattgaagatggtta

SEQ ID NO: 747160 - DNA, 19 bp, Mus musculus
  siRNA target sequence for Glmn (NM_133248.1,197-215).
ccagctgctagagattatt

SEQ ID NO: 747161 - DNA, 19 bp, Mus musculus
  siRNA target sequence for Glmn (NM_133248.1,200-218).
gctgctagagattattcaa

SEQ ID NO: 747162 - DNA, 19 bp, Mus musculus
  siRNA target sequence for Glmn (NM_133248.1,245-263).
gtctatggggtggaatctt

SEQ ID NO: 747163 - DNA, 19 bp, Mus musculus
  siRNA target sequence for Glmn (NM_133248.1,247-265).
ctatggggtggaatcttgt

SEQ ID NO: 747164 - DNA, 19 bp, Mus musculus
  siRNA target sequence for Glmn (NM_133248.1,336-354).
gatttgctggtgaagttat

SEQ ID NO: 747165 - DNA, 19 bp, Mus musculus
  siRNA target sequence for Glmn (NM_133248.1,341-359).
gctggtgaagttatgtaat

SEQ ID NO: 747166 - DNA, 19 bp, Mus musculus
  siRNA target sequence for Glmn (NM_133248.1,345-363).
gtgaagttatgtaatccaa

SEQ ID NO: 747167 - DNA, 19 bp, Mus musculus
  siRNA target sequence for Glmn (NM_133248.1,355-373).
gtaatccaaaggaattgtt

SEQ ID NO: 747168 - DNA, 19 bp, Mus musculus
  siRNA target sequence for Glmn (NM_133248.1,465-483).
cagaaacttcctaacaaca

SEQ ID NO: 747169 - DNA, 19 bp, Mus musculus
  siRNA target sequence for Glmn (NM_133248.1,494-512).
cgttggactagcattgtca

SEQ ID NO: 747170 - DNA, 19 bp, Mus musculus
  siRNA target sequence for Glmn (NM_133248.1,495-513).
gttggactagcattgtcaa

SEQ ID NO: 747171 - DNA, 19 bp, Mus musculus
  siRNA target sequence for Glmn (NM_133248.1,501-519).
ctagcattgtcaacacttt

SEQ ID NO: 747172 - DNA, 19 bp, Mus musculus
  siRNA target sequence for Glmn (NM_133248.1,633-651).
gaagaagtaataagtgata

SEQ ID NO: 747173 - DNA, 19 bp, Mus musculus
  siRNA target sequence for Glmn (NM_133248.1,770-788).
cccttttcggtgttttgca

SEQ ID NO: 747174 - DNA, 19 bp, Mus musculus
  siRNA target sequence for Glmn (NM_133248.1,777-795).
cggtgttttgcatctgaaa

SEQ ID NO: 747175 - DNA, 19 bp, Mus musculus
  siRNA target sequence for Glmn (NM_133248.1,781-799).
gttttgcatctgaaataat

SEQ ID NO: 747176 - DNA, 19 bp, Mus musculus
  siRNA target sequence for Glmn (NM_133248.1,932-950).
gacatatctagtatttgtt

SEQ ID NO: 747177 - DNA, 19 bp, Mus musculus
  siRNA target sequence for Glmn (NM_133248.1,969-987).
cagctgcccatggtcttaa

SEQ ID NO: 747178 - DNA, 19 bp, Mus musculus
  siRNA target sequence for Glmn (NM_133248.1,994-1012).
cgtaccttctgcagttgaa

SEQ ID NO: 747179 - DNA, 19 bp, Mus musculus
  siRNA target sequence for Glmn (NM_133248.1,1063-1081).
ccaaaggattggaacttct

SEQ ID NO: 747180 - DNA, 19 bp, Mus musculus
  siRNA target sequence for Glmn (NM_133248.1,1077-1095).
cttctggagactagcttat

SEQ ID NO: 747181 - DNA, 19 bp, Mus musculus
  siRNA target sequence for Glmn (NM_133248.1,1080-1098).
ctggagactagcttattga

SEQ ID NO: 747182 - DNA, 19 bp, Mus musculus
  siRNA target sequence for Glmn (NM_133248.1,1083-1101).
gagactagcttattgagat

SEQ ID NO: 747183 - DNA, 19 bp, Mus musculus
  siRNA target sequence for Glmn (NM_133248.1,1085-1103).
gactagcttattgagatta

SEQ ID NO: 747184 - DNA, 19 bp, Mus musculus
  siRNA target sequence for Glmn (NM_133248.1,1087-1105).
ctagcttattgagattaga

SEQ ID NO: 747185 - DNA, 19 bp, Mus musculus
  siRNA target sequence for Glmn (NM_133248.1,1155-1173).
gtgcctcagggcttagtca

SEQ ID NO: 747186 - DNA, 19 bp, Mus musculus
  siRNA target sequence for Glmn (NM_133248.1,1157-1175).
gcctcagggcttagtcaaa

SEQ ID NO: 747187 - DNA, 19 bp, Mus musculus
  siRNA target sequence for Glmn (NM_133248.1,1166-1184).
cttagtcaaagttatgaca

SEQ ID NO: 747188 - DNA, 19 bp, Mus musculus
  siRNA target sequence for Glmn (NM_133248.1,1199-1217).
gacattgaggaaaaaaggt

SEQ ID NO: 747189 - DNA, 19 bp, Mus musculus
  siRNA target sequence for Glmn (NM_133248.1,1222-1240).
ctatgcttcagctgtttat

SEQ ID NO: 747190 - DNA, 19 bp, Mus musculus
  siRNA target sequence for Glmn (NM_133248.1,1257-1275).
caaggcaaatatacattat

SEQ ID NO: 747191 - DNA, 19 bp, Mus musculus
  siRNA target sequence for Glmn (NM_133248.1,1282-1300).
gcttactaaatacaagtaa

SEQ ID NO: 747192 - DNA, 19 bp, Mus musculus
  siRNA target sequence for Glmn (NM_133248.1,1469-1487).
caggattatggcttcatta

SEQ ID NO: 747193 - DNA, 19 bp, Mus musculus
  siRNA target sequence for Glmn (NM_133248.1,1498-1516).
ggtatttggttatcaaaga

SEQ ID NO: 747194 - DNA, 19 bp, Mus musculus
  siRNA target sequence for Glmn (NM_133248.1,1499-1517).
gtatttggttatcaaagat

SEQ ID NO: 747195 - DNA, 19 bp, Mus musculus
  siRNA target sequence for Glmn (NM_133248.1,1585-1603).
cacttcatataggacttaa

SEQ ID NO: 747196 - DNA, 19 bp, Mus musculus
  siRNA target sequence for Glmn (NM_133248.1,1590-1608).
catataggacttaatatgt

SEQ ID NO: 747197 - DNA, 19 bp, Mus musculus
  siRNA target sequence for Glmn (NM_133248.1,1615-1633).
cacattatgaagcagaaat

SEQ ID NO: 747198 - DNA, 19 bp, Mus musculus
  siRNA target sequence for Glmn (NM_133248.1,1617-1635).
cattatgaagcagaaatta

SEQ ID NO: 747199 - DNA, 19 bp, Mus musculus
  siRNA target sequence for Glmn (NM_133248.1,1733-1751).
gcagcttaaggtcttacat

SEQ ID NO: 747200 - DNA, 19 bp, Mus musculus
  siRNA target sequence for Glmn (NM_133248.1,1749-1767).
cattccgctctcttcacat

SEQ ID NO: 747201 - DNA, 19 bp, Mus musculus
  siRNA target sequence for Glmn (NM_133248.1,1753-1771).
ccgctctcttcacatttga

SEQ ID NO: 747202 - DNA, 19 bp, Mus musculus
  siRNA target sequence for Glmn (NM_133248.1,1763-1781).
cacatttgacttgattgaa

SEQ ID NO: 747203 - DNA, 19 bp, Mus musculus
  siRNA target sequence for Glmn (NM_133248.1,1792-1810).
ctcgagtagaagaactcat

SEQ ID NO: 747204 - DNA, 19 bp, Mus musculus
  siRNA target sequence for 4631412G21Rik (NM_133249.1,202-220).
gctggacgccagtgacttt

SEQ ID NO: 747205 - DNA, 19 bp, Mus musculus
  siRNA target sequence for 4631412G21Rik (NM_133249.1,316-334).
gattgacagtgagaatgaa

SEQ ID NO: 747206 - DNA, 19 bp, Mus musculus
  siRNA target sequence for 4631412G21Rik (NM_133249.1,699-717).
cttgtacggaactgcataa

SEQ ID NO: 747207 - DNA, 19 bp, Mus musculus
  siRNA target sequence for 4631412G21Rik (NM_133249.1,702-720).
gtacggaactgcataagca

SEQ ID NO: 747208 - DNA, 19 bp, Mus musculus
  siRNA target sequence for 4631412G21Rik (NM_133249.1,736-754).
gccctgtcccagagtgaaa

SEQ ID NO: 747209 - DNA, 19 bp, Mus musculus
  siRNA target sequence for 4631412G21Rik (NM_133249.1,938-956).
ctcattcgctacatgcata

SEQ ID NO: 747210 - DNA, 19 bp, Mus musculus
  siRNA target sequence for 4631412G21Rik (NM_133249.1,1075-1093).
gactgagttctctatccta

SEQ ID NO: 747211 - DNA, 19 bp, Mus musculus
  siRNA target sequence for 4631412G21Rik (NM_133249.1,1086-1104).
ctatcctaagggaacttct

SEQ ID NO: 747212 - DNA, 19 bp, Mus musculus
  siRNA target sequence for 4631412G21Rik (NM_133249.1,1144-1162).
cctggccatacctgtctat

SEQ ID NO: 747213 - DNA, 19 bp, Mus musculus
  siRNA target sequence for 4631412G21Rik (NM_133249.1,1148-1166).
gccatacctgtctatgctt

SEQ ID NO: 747214 - DNA, 19 bp, Mus musculus
  siRNA target sequence for 4631412G21Rik (NM_133249.1,1444-1462).
cctgccatggaccaaacta

SEQ ID NO: 747215 - DNA, 19 bp, Mus musculus
  siRNA target sequence for 4631412G21Rik (NM_133249.1,1498-1516).
gcgctccaggagactgaat

SEQ ID NO: 747216 - DNA, 19 bp, Mus musculus
  siRNA target sequence for 4631412G21Rik (NM_133249.1,1572-1590).
cgatgtgcctggatacaga

SEQ ID NO: 747217 - DNA, 19 bp, Mus musculus
  siRNA target sequence for 4631412G21Rik (NM_133249.1,2385-2403).
gtaaaagcccggagtatga

SEQ ID NO: 747218 - DNA, 19 bp, Mus musculus
  siRNA target sequence for 4631412G21Rik (NM_133249.1,2395-2413).
ggagtatgacaccgtattt

SEQ ID NO: 747219 - DNA, 19 bp, Mus musculus
  siRNA target sequence for 4631412G21Rik (NM_133249.1,2636-2654).
gccacccggaagaacttca

SEQ ID NO: 747220 - DNA, 19 bp, Mus musculus
  siRNA target sequence for 4631412G21Rik (NM_133249.1,2741-2759).
cgtgtggtatacattcgaa

SEQ ID NO: 747221 - DNA, 19 bp, Mus musculus
  siRNA target sequence for 4631412G21Rik (NM_133249.1,2742-2760).
gtgtggtatacattcgaaa

SEQ ID NO: 747222 - DNA, 19 bp, Mus musculus
  siRNA target sequence for 4631412G21Rik (NM_133249.1,2747-2765).
gtatacattcgaaatctct

SEQ ID NO: 747223 - DNA, 19 bp, Mus musculus
  siRNA target sequence for 4631412G21Rik (NM_133249.1,2778-2796).
gctctcgggaactaaagaa

SEQ ID NO: 747224 - DNA, 19 bp, Mus musculus
  siRNA target sequence for 4631412G21Rik (NM_133249.1,2806-2824).
ggtgttcggtgagattgta

SEQ ID NO: 747225 - DNA, 19 bp, Mus musculus
  siRNA target sequence for 4631412G21Rik (NM_133249.1,2855-2873).
ggccagaagcacggtttta

SEQ ID NO: 747226 - DNA, 19 bp, Mus musculus
  siRNA target sequence for 4631412G21Rik (NM_133249.1,2856-2874).
gccagaagcacggttttat

SEQ ID NO: 747227 - DNA, 19 bp, Mus musculus
  siRNA target sequence for 4631412G21Rik (NM_133249.1,2983-3001).
ccgttggcccagatacact

SEQ ID NO: 747228 - DNA, 19 bp, Mus musculus
  siRNA target sequence for 4631412G21Rik (NM_133249.1,2989-3007).
gcccagatacactgactat

SEQ ID NO: 747229 - DNA, 19 bp, Mus musculus
  siRNA target sequence for 4631412G21Rik (NM_133249.1,3052-3070).
gtacgaagccatggatttt

SEQ ID NO: 747230 - DNA, 19 bp, Mus musculus
  siRNA target sequence for Vgll1 (NM_133251.1,332-350).
gaacgccggttctgtcatt

SEQ ID NO: 747231 - DNA, 19 bp, Mus musculus
  siRNA target sequence for Vgll1 (NM_133251.1,336-354).
gccggttctgtcattttca

SEQ ID NO: 747232 - DNA, 19 bp, Mus musculus
  siRNA target sequence for Vgll1 (NM_133251.1,470-488).
caagaacggggtgaataaa

SEQ ID NO: 747233 - DNA, 19 bp, Mus musculus
  siRNA target sequence for Vgll1 (NM_133251.1,530-548).
cgaatccagtcaaactgaa

SEQ ID NO: 747234 - DNA, 19 bp, Mus musculus
  siRNA target sequence for Vgll1 (NM_133251.1,579-597).
gaggagaagggaaccaata

SEQ ID NO: 747235 - DNA, 19 bp, Mus musculus
  siRNA target sequence for Vgll1 (NM_133251.1,680-698).
cagcagcttggatgaatat

SEQ ID NO: 747236 - DNA, 19 bp, Mus musculus
  siRNA target sequence for Vgll1 (NM_133251.1,963-981).
catttagtccagcaagata

SEQ ID NO: 747237 - DNA, 19 bp, Mus musculus
  siRNA target sequence for Vgll1 (NM_133251.1,971-989).
ccagcaagatagataccaa

SEQ ID NO: 747238 - DNA, 19 bp, Mus musculus
  siRNA target sequence for Vgll1 (NM_133251.1,1121-1139).
cagtgccagtcttgatgat

SEQ ID NO: 747239 - DNA, 19 bp, Mus musculus
  siRNA target sequence for Tram2 (NM_133252.1,107-125).
cgtaggaggacgaaaagtt

SEQ ID NO: 747240 - DNA, 19 bp, Mus musculus
  siRNA target sequence for Tram2 (NM_133252.1,108-126).
gtaggaggacgaaaagtta

SEQ ID NO: 747241 - DNA, 19 bp, Mus musculus
  siRNA target sequence for Tram2 (NM_133252.1,194-212).
gtcctcatcgggcttatgt

SEQ ID NO: 747242 - DNA, 19 bp, Mus musculus
  siRNA target sequence for Tram2 (NM_133252.1,224-242).
gccaagactgccttcctat

SEQ ID NO: 747243 - DNA, 19 bp, Mus musculus
  siRNA target sequence for Tram2 (NM_133252.1,225-243).
ccaagactgccttcctatt

SEQ ID NO: 747244 - DNA, 19 bp, Mus musculus
  siRNA target sequence for Tram2 (NM_133252.1,252-270).
ctcagtataacattagtgt

SEQ ID NO: 747245 - DNA, 19 bp, Mus musculus
  siRNA target sequence for Tram2 (NM_133252.1,370-388).
ggtccaggagtacatctta

SEQ ID NO: 747246 - DNA, 19 bp, Mus musculus
  siRNA target sequence for Tram2 (NM_133252.1,376-394).
ggagtacatcttagacaaa

SEQ ID NO: 747247 - DNA, 19 bp, Mus musculus
  siRNA target sequence for Tram2 (NM_133252.1,430-448).
cagcaagttcaatgaatct

SEQ ID NO: 747248 - DNA, 19 bp, Mus musculus
  siRNA target sequence for Tram2 (NM_133252.1,478-496).
ggtggcgtggtgcttctat

SEQ ID NO: 747249 - DNA, 19 bp, Mus musculus
  siRNA target sequence for Tram2 (NM_133252.1,567-585).
ccttccaggtgaagttttt

SEQ ID NO: 747250 - DNA, 19 bp, Mus musculus
  siRNA target sequence for Tram2 (NM_133252.1,665-683).
cgccagctgcaatacattt

SEQ ID NO: 747251 - DNA, 19 bp, Mus musculus
  siRNA target sequence for Tram2 (NM_133252.1,667-685).
ccagctgcaatacatttgt

SEQ ID NO: 747252 - DNA, 19 bp, Mus musculus
  siRNA target sequence for Tram2 (NM_133252.1,768-786).
ccgaggccctctttcacat

SEQ ID NO: 747253 - DNA, 19 bp, Mus musculus
  siRNA target sequence for Tram2 (NM_133252.1,855-873).
gggtcacgcgtctcttcat

SEQ ID NO: 747254 - DNA, 19 bp, Mus musculus
  siRNA target sequence for Tram2 (NM_133252.1,906-924).
gattggctcgggtggaaaa

SEQ ID NO: 747255 - DNA, 19 bp, Mus musculus
  siRNA target sequence for Tram2 (NM_133252.1,910-928).
ggctcgggtggaaaaccaa

SEQ ID NO: 747256 - DNA, 19 bp, Mus musculus
  siRNA target sequence for Tram2 (NM_133252.1,937-955).
ccccgagaaagggaacttt

SEQ ID NO: 747257 - DNA, 19 bp, Mus musculus
  siRNA target sequence for Tram2 (NM_133252.1,939-957).
ccgagaaagggaactttaa

SEQ ID NO: 747258 - DNA, 19 bp, Mus musculus
  siRNA target sequence for Tram2 (NM_133252.1,1043-1061).
cggcactggcgggagtatt

SEQ ID NO: 747259 - DNA, 19 bp, Mus musculus
  siRNA target sequence for Tram2 (NM_133252.1,1046-1064).
cactggcgggagtattgga

SEQ ID NO: 747260 - DNA, 19 bp, Mus musculus
  siRNA target sequence for Tram2 (NM_133252.1,1126-1144).
gagagaacctggttaccat

SEQ ID NO: 747261 - DNA, 19 bp, Mus musculus
  siRNA target sequence for Tram2 (NM_133252.1,1176-1194).
cctcctcacggactaagaa

SEQ ID NO: 747262 - DNA, 19 bp, Mus musculus
  siRNA target sequence for Tram2 (NM_133252.1,1177-1195).
ctcctcacggactaagaaa

SEQ ID NO: 747263 - DNA, 19 bp, Mus musculus
  siRNA target sequence for Tram2 (NM_133252.1,1182-1200).
cacggactaagaaactcaa

SEQ ID NO: 747264 - DNA, 19 bp, Mus musculus
  siRNA target sequence for 2410041A17Rik (NM_133348.1,208-226).
gatcatgcgtccagatgat

SEQ ID NO: 747265 - DNA, 19 bp, Mus musculus
  siRNA target sequence for 2410041A17Rik (NM_133348.1,472-490).
catcctcacaggtaccaaa

SEQ ID NO: 747266 - DNA, 19 bp, Mus musculus
  siRNA target sequence for 2410041A17Rik (NM_133348.1,486-504).
ccaaaaagctgaccaataa

SEQ ID NO: 747267 - DNA, 19 bp, Mus musculus
  siRNA target sequence for 2410041A17Rik (NM_133348.1,557-575).
gaggtgcctcccattgtgt

SEQ ID NO: 747268 - DNA, 19 bp, Mus musculus
  siRNA target sequence for 2410041A17Rik (NM_133348.1,559-577).
ggtgcctcccattgtgtat

SEQ ID NO: 747269 - DNA, 19 bp, Mus musculus
  siRNA target sequence for 2410041A17Rik (NM_133348.1,601-619).
gggtcggaaacgctatgaa

SEQ ID NO: 747270 - DNA, 19 bp, Mus musculus
  siRNA target sequence for 2410041A17Rik (NM_133348.1,826-844).
ccactgcaagaccaacata

SEQ ID NO: 747271 - DNA, 19 bp, Mus musculus
  siRNA target sequence for 2410041A17Rik (NM_133348.1,914-932).
ggacgcatgaccttcacaa

SEQ ID NO: 747272 - DNA, 19 bp, Mus musculus
  siRNA target sequence for Oosp1 (NM_133353.2,134-152).
gaccactggttccatctaa

SEQ ID NO: 747273 - DNA, 19 bp, Mus musculus
  siRNA target sequence for Oosp1 (NM_133353.2,153-171).
ggatcaggcctacgatatt

SEQ ID NO: 747274 - DNA, 19 bp, Mus musculus
  siRNA target sequence for Oosp1 (NM_133353.2,154-172).
gatcaggcctacgatattt

SEQ ID NO: 747275 - DNA, 19 bp, Mus musculus
  siRNA target sequence for Oosp1 (NM_133353.2,162-180).
ctacgatatttcacaacat

SEQ ID NO: 747276 - DNA, 19 bp, Mus musculus
  siRNA target sequence for Oosp1 (NM_133353.2,166-184).
gatatttcacaacattttt

SEQ ID NO: 747277 - DNA, 19 bp, Mus musculus
  siRNA target sequence for Oosp1 (NM_133353.2,187-205).
ggaacccgatgaagtgttt

SEQ ID NO: 747278 - DNA, 19 bp, Mus musculus
  siRNA target sequence for Oosp1 (NM_133353.2,188-206).
gaacccgatgaagtgtttt

SEQ ID NO: 747279 - DNA, 19 bp, Mus musculus
  siRNA target sequence for Oosp1 (NM_133353.2,193-211).
cgatgaagtgtttttagga

SEQ ID NO: 747280 - DNA, 19 bp, Mus musculus
  siRNA target sequence for Oosp1 (NM_133353.2,194-212).
gatgaagtgtttttaggaa

SEQ ID NO: 747281 - DNA, 19 bp, Mus musculus
  siRNA target sequence for Oosp1 (NM_133353.2,228-246).
ccactacctggccaaatga

SEQ ID NO: 747282 - DNA, 19 bp, Mus musculus
  siRNA target sequence for Oosp1 (NM_133353.2,229-247).
cactacctggccaaatgat

SEQ ID NO: 747283 - DNA, 19 bp, Mus musculus
  siRNA target sequence for Oosp1 (NM_133353.2,235-253).
ctggccaaatgatacctat

SEQ ID NO: 747284 - DNA, 19 bp, Mus musculus
  siRNA target sequence for Oosp1 (NM_133353.2,239-257).
ccaaatgatacctatgaat

SEQ ID NO: 747285 - DNA, 19 bp, Mus musculus
  siRNA target sequence for Oosp1 (NM_133353.2,277-295).
ctgcggcattgccaataaa

SEQ ID NO: 747286 - DNA, 19 bp, Mus musculus
  siRNA target sequence for Oosp1 (NM_133353.2,279-297).
gcggcattgccaataaagt

SEQ ID NO: 747287 - DNA, 19 bp, Mus musculus
  siRNA target sequence for Oosp1 (NM_133353.2,280-298).
cggcattgccaataaagtt

SEQ ID NO: 747288 - DNA, 19 bp, Mus musculus
  siRNA target sequence for Oosp1 (NM_133353.2,282-300).
gcattgccaataaagttct

SEQ ID NO: 747289 - DNA, 19 bp, Mus musculus
  siRNA target sequence for Oosp1 (NM_133353.2,283-301).
cattgccaataaagttctt

SEQ ID NO: 747290 - DNA, 19 bp, Mus musculus
  siRNA target sequence for Oosp1 (NM_133353.2,316-334).
gctgaagacgcaacttaca

SEQ ID NO: 747291 - DNA, 19 bp, Mus musculus
  siRNA target sequence for Oosp1 (NM_133353.2,317-335).
ctgaagacgcaacttacat

SEQ ID NO: 747292 - DNA, 19 bp, Mus musculus
  siRNA target sequence for Oosp1 (NM_133353.2,326-344).
caacttacatacatctcaa

SEQ ID NO: 747293 - DNA, 19 bp, Mus musculus
  siRNA target sequence for Oosp1 (NM_133353.2,329-347).
cttacatacatctcaaaaa

SEQ ID NO: 747294 - DNA, 19 bp, Mus musculus
  siRNA target sequence for Oosp1 (NM_133353.2,356-374).
ctacaagctgagatgagtt

SEQ ID NO: 747295 - DNA, 19 bp, Mus musculus
  siRNA target sequence for Oosp1 (NM_133353.2,359-377).
caagctgagatgagtttgt

SEQ ID NO: 747296 - DNA, 19 bp, Mus musculus
  siRNA target sequence for Oosp1 (NM_133353.2,372-390).
gtttgtcctgtgttatgca

SEQ ID NO: 747297 - DNA, 19 bp, Mus musculus
  siRNA target sequence for Oosp1 (NM_133353.2,409-427).
ctgtgaagcagaaagtaga

SEQ ID NO: 747298 - DNA, 19 bp, Mus musculus
  siRNA target sequence for Oosp1 (NM_133353.2,503-521).
gtgcaaccaaacctttcaa

SEQ ID NO: 747299 - DNA, 19 bp, Mus musculus
  siRNA target sequence for Oosp1 (NM_133353.2,505-523).
gcaaccaaacctttcaaca

SEQ ID NO: 747300 - DNA, 19 bp, Mus musculus
  siRNA target sequence for Oosp1 (NM_133353.2,506-524).
caaccaaacctttcaacat

SEQ ID NO: 747301 - DNA, 19 bp, Mus musculus
  siRNA target sequence for Oosp1 (NM_133353.2,596-614).
cctagcttcatggatcaaa

SEQ ID NO: 747302 - DNA, 19 bp, Mus musculus
  siRNA target sequence for Oosp1 (NM_133353.2,597-615).
ctagcttcatggatcaaaa

SEQ ID NO: 747303 - DNA, 19 bp, Mus musculus
  siRNA target sequence for Erdr1 (NM_133362.1,690-708).
caggacggagcgattctca

SEQ ID NO: 747304 - DNA, 19 bp, Mus musculus
  siRNA target sequence for B230212M13Rik (NM_133364.1,175-193).
cccactctggggtttagtt

SEQ ID NO: 747305 - DNA, 19 bp, Mus musculus
  siRNA target sequence for B230212M13Rik (NM_133364.1,373-391).
gtctggtctggtgatcatt

SEQ ID NO: 747306 - DNA, 19 bp, Mus musculus
  siRNA target sequence for B230212M13Rik (NM_133364.1,375-393).
ctggtctggtgatcattgt

SEQ ID NO: 747307 - DNA, 19 bp, Mus musculus
  siRNA target sequence for 1110032A04Rik (NM_133675.1,180-198).
gcgcgtgaaggagtatttt

SEQ ID NO: 747308 - DNA, 19 bp, Mus musculus
  siRNA target sequence for 1110032A04Rik (NM_133675.1,203-221).
ggctctattatcaatacca

SEQ ID NO: 747309 - DNA, 19 bp, Mus musculus
  siRNA target sequence for 1110032A04Rik (NM_133675.1,304-322).
gtatacactgcctatgtct

SEQ ID NO: 747310 - DNA, 19 bp, Mus musculus
  siRNA target sequence for 1110032A04Rik (NM_133675.1,373-391).
ggctatgacagttccattt

SEQ ID NO: 747311 - DNA, 19 bp, Mus musculus
  siRNA target sequence for 2310061J03Rik (NM_133677.1,390-408).
ggatcttccgcttgacatt

SEQ ID NO: 747312 - DNA, 19 bp, Mus musculus
  siRNA target sequence for 2410004C24Rik (NM_133678.1,820-838).
caaccatgcccgactgttt

SEQ ID NO: 747313 - DNA, 19 bp, Mus musculus
  siRNA target sequence for 2410004C24Rik (NM_133678.1,874-892).
cgcagtgcaggaacacatt

SEQ ID NO: 747314 - DNA, 19 bp, Mus musculus
  siRNA target sequence for 2410004C24Rik (NM_133678.1,961-979).
gcctttggacttcatagaa

SEQ ID NO: 747315 - DNA, 19 bp, Mus musculus
  siRNA target sequence for 2410004C24Rik (NM_133678.1,963-981).
ctttggacttcatagaaca

SEQ ID NO: 747316 - DNA, 19 bp, Mus musculus
  siRNA target sequence for 2410004C24Rik (NM_133678.1,1066-1084).
cctgaggggtcaatactct

SEQ ID NO: 747317 - DNA, 19 bp, Mus musculus
  siRNA target sequence for 2410004C24Rik (NM_133678.1,1107-1125).
gtgcctaccacatattagt

SEQ ID NO: 747318 - DNA, 19 bp, Mus musculus
  siRNA target sequence for 2410004C24Rik (NM_133678.1,1172-1190).
gaggaaggtgacattcaca

SEQ ID NO: 747319 - DNA, 19 bp, Mus musculus
  siRNA target sequence for 2810428F02Rik (NM_133683.1,247-265).
gacgacactacgtgcaaaa

SEQ ID NO: 747320 - DNA, 19 bp, Mus musculus
  siRNA target sequence for 2810428F02Rik (NM_133683.1,257-275).
cgtgcaaaaggtatataaa

SEQ ID NO: 747321 - DNA, 19 bp, Mus musculus
  siRNA target sequence for 2810428F02Rik (NM_133683.1,322-340).
ctagcgttctggattatgt

SEQ ID NO: 747322 - DNA, 19 bp, Mus musculus
  siRNA target sequence for 2810428F02Rik (NM_133683.1,325-343).
gcgttctggattatgtcaa

SEQ ID NO: 747323 - DNA, 19 bp, Mus musculus
  siRNA target sequence for 2810428F02Rik (NM_133683.1,345-363).
gactgctagcacctattat

SEQ ID NO: 747324 - DNA, 19 bp, Mus musculus
  siRNA target sequence for 2810428F02Rik (NM_133683.1,349-367).
gctagcacctattatggta

SEQ ID NO: 747325 - DNA, 19 bp, Mus musculus
  siRNA target sequence for 2810428F02Rik (NM_133683.1,350-368).
ctagcacctattatggtaa

SEQ ID NO: 747326 - DNA, 19 bp, Mus musculus
  siRNA target sequence for 2810428F02Rik (NM_133683.1,353-371).
gcacctattatggtaactt

SEQ ID NO: 747327 - DNA, 19 bp, Mus musculus
  siRNA target sequence for 2810428F02Rik (NM_133683.1,479-497).
ggttggtggtcggattcat

SEQ ID NO: 747328 - DNA, 19 bp, Mus musculus
  siRNA target sequence for 2810428F02Rik (NM_133683.1,483-501).
ggtggtcggattcatctta

SEQ ID NO: 747329 - DNA, 19 bp, Mus musculus
  siRNA target sequence for 2810428F02Rik (NM_133683.1,484-502).
gtggtcggattcatcttaa

SEQ ID NO: 747330 - DNA, 19 bp, Mus musculus
  siRNA target sequence for 2810428F02Rik (NM_133683.1,487-505).
gtcggattcatcttaacca

SEQ ID NO: 747331 - DNA, 19 bp, Mus musculus
  siRNA target sequence for 2810428F02Rik (NM_133683.1,507-525).
cgcaaatttcagctttttt

SEQ ID NO: 747332 - DNA, 19 bp, Mus musculus
  siRNA target sequence for 2810428F02Rik (NM_133683.1,537-555).
gacgtttttcctttcatct

SEQ ID NO: 747333 - DNA, 19 bp, Mus musculus
  siRNA target sequence for 2810428F02Rik (NM_133683.1,592-610).
caactggactcagagtata

SEQ ID NO: 747334 - DNA, 19 bp, Mus musculus
  siRNA target sequence for 2810428F02Rik (NM_133683.1,633-651).
ggtccaggtgttctgtaat

SEQ ID NO: 747335 - DNA, 19 bp, Mus musculus
  siRNA target sequence for 2810428F02Rik (NM_133683.1,996-1014).
gtggcccattattgcattt

SEQ ID NO: 747336 - DNA, 19 bp, Mus musculus
  siRNA target sequence for 2810428F02Rik (NM_133683.1,999-1017).
gcccattattgcatttggt

SEQ ID NO: 747337 - DNA, 19 bp, Mus musculus
  siRNA target sequence for 2810428F02Rik (NM_133683.1,1145-1163).
ggaaaccgatcctggataa

SEQ ID NO: 747338 - DNA, 19 bp, Mus musculus
  siRNA target sequence for 2810484M10Rik (NM_133684.2,194-212).
ggcacggtgtcgaaggttt

SEQ ID NO: 747339 - DNA, 19 bp, Mus musculus
  siRNA target sequence for 2810484M10Rik (NM_133684.2,198-216).
cggtgtcgaaggtttggat

SEQ ID NO: 747340 - DNA, 19 bp, Mus musculus
  siRNA target sequence for 2810484M10Rik (NM_133684.2,446-464).
ctcccttcttcgaataaga

SEQ ID NO: 747341 - DNA, 19 bp, Mus musculus
  siRNA target sequence for 2810484M10Rik (NM_133684.2,597-615).
gaacaacgaagaaacttta

SEQ ID NO: 747342 - DNA, 19 bp, Mus musculus
  siRNA target sequence for 2810484M10Rik (NM_133684.2,616-634).
cccttctgaaagttacctt

SEQ ID NO: 747343 - DNA, 19 bp, Mus musculus
  siRNA target sequence for 2810484M10Rik (NM_133684.2,690-708).
cctccttagtcgatctcaa

SEQ ID NO: 747344 - DNA, 19 bp, Mus musculus
  siRNA target sequence for 2810484M10Rik (NM_133684.2,724-742).
gaaagtgaagatggaatat

SEQ ID NO: 747345 - DNA, 19 bp, Mus musculus
  siRNA target sequence for 2810484M10Rik (NM_133684.2,871-889).
cccagacaccggcatcata

SEQ ID NO: 747346 - DNA, 19 bp, Mus musculus
  siRNA target sequence for 2810484M10Rik (NM_133684.2,875-893).
gacaccggcatcatagaca

SEQ ID NO: 747347 - DNA, 19 bp, Mus musculus
  siRNA target sequence for 2810484M10Rik (NM_133684.2,939-957).
cttctgtgaagagtatata

SEQ ID NO: 747348 - DNA, 19 bp, Mus musculus
  siRNA target sequence for 2810484M10Rik (NM_133684.2,942-960).
ctgtgaagagtatatacca

SEQ ID NO: 747349 - DNA, 19 bp, Mus musculus
  siRNA target sequence for 2410027J01Rik (NM_133686.1,206-224).
ggcagggcgacccttcttt

SEQ ID NO: 747350 - DNA, 19 bp, Mus musculus
  siRNA target sequence for 2410027J01Rik (NM_133686.1,208-226).
cagggcgacccttctttga

SEQ ID NO: 747351 - DNA, 19 bp, Mus musculus
  siRNA target sequence for 2410027J01Rik (NM_133686.1,229-247).
ccatcttcactcaactcaa

SEQ ID NO: 747352 - DNA, 19 bp, Mus musculus
  siRNA target sequence for 2410027J01Rik (NM_133686.1,343-361).
gggaacgggtggctcttaa

SEQ ID NO: 747353 - DNA, 19 bp, Mus musculus
  siRNA target sequence for 2410027J01Rik (NM_133686.1,345-363).
gaacgggtggctcttaaca

SEQ ID NO: 747354 - DNA, 19 bp, Mus musculus
  siRNA target sequence for 2410027J01Rik (NM_133686.1,688-706).
gggctgacctggtaatgct

SEQ ID NO: 747355 - DNA, 19 bp, Mus musculus
  siRNA target sequence for 2410027J01Rik (NM_133686.1,734-752).
ccccacagcagctacactt

SEQ ID NO: 747356 - DNA, 19 bp, Mus musculus
  siRNA target sequence for 2410027J01Rik (NM_133686.1,735-753).
cccacagcagctacactta

SEQ ID NO: 747357 - DNA, 19 bp, Mus musculus
  siRNA target sequence for 2410027J01Rik (NM_133686.1,737-755).
cacagcagctacacttaaa

SEQ ID NO: 747358 - DNA, 19 bp, Mus musculus
  siRNA target sequence for 4930469P12Rik (NM_133688.1,814-832).
cgttacgaggagaagtact

SEQ ID NO: 747359 - DNA, 19 bp, Mus musculus
  siRNA target sequence for 4930469P12Rik (NM_133688.1,828-846).
gtactgactctttataaaa

SEQ ID NO: 747360 - DNA, 19 bp, Mus musculus
  siRNA target sequence for 4930469P12Rik (NM_133688.1,858-876).
cttggacgggactatccaa

SEQ ID NO: 747361 - DNA, 19 bp, Mus musculus
  siRNA target sequence for 4930469P12Rik (NM_133688.1,879-897).
ggagcagactattttaaaa

SEQ ID NO: 747362 - DNA, 19 bp, Mus musculus
  siRNA target sequence for 4930469P12Rik (NM_133688.1,898-916).
ggcgtttgaagaacgtttt

SEQ ID NO: 747363 - DNA, 19 bp, Mus musculus
  siRNA target sequence for 4930469P12Rik (NM_133688.1,969-987).
cgaggagaatttgtaatga

SEQ ID NO: 747364 - DNA, 19 bp, Mus musculus
  siRNA target sequence for 4930469P12Rik (NM_133688.1,990-1008).
gagctagaggccttgtact

SEQ ID NO: 747365 - DNA, 19 bp, Mus musculus
  siRNA target sequence for 4930469P12Rik (NM_133688.1,996-1014).
gaggccttgtacttcctta

SEQ ID NO: 747366 - DNA, 19 bp, Mus musculus
  siRNA target sequence for 4930469P12Rik (NM_133688.1,1015-1033).
ggaaatacagagctatgaa

SEQ ID NO: 747367 - DNA, 19 bp, Mus musculus
  siRNA target sequence for 4930469P12Rik (NM_133688.1,1024-1042).
gagctatgaagcaacgtta

SEQ ID NO: 747368 - DNA, 19 bp, Mus musculus
  siRNA target sequence for 4930469P12Rik (NM_133688.1,1027-1045).
ctatgaagcaacgttacta

SEQ ID NO: 747369 - DNA, 19 bp, Mus musculus
  siRNA target sequence for 4930469P12Rik (NM_133688.1,1031-1049).
gaagcaacgttactattca

SEQ ID NO: 747370 - DNA, 19 bp, Mus musculus
  siRNA target sequence for 4930469P12Rik (NM_133688.1,1034-1052).
gcaacgttactattcagat

SEQ ID NO: 747371 - DNA, 19 bp, Mus musculus
  siRNA target sequence for 4930579J09Rik (NM_133689.1,120-138).
gggttgtctctccatatgt

SEQ ID NO: 747372 - DNA, 19 bp, Mus musculus
  siRNA target sequence for 4930579J09Rik (NM_133689.1,122-140).
gttgtctctccatatgtga

SEQ ID NO: 747373 - DNA, 19 bp, Mus musculus
  siRNA target sequence for 4930579J09Rik (NM_133689.1,160-178).
ctctgaccctctgaagttt

SEQ ID NO: 747374 - DNA, 19 bp, Mus musculus
  siRNA target sequence for 4930579J09Rik (NM_133689.1,242-260).
gtaggcacaggctacaaat

SEQ ID NO: 747375 - DNA, 19 bp, Mus musculus
  siRNA target sequence for 4930579J09Rik (NM_133689.1,314-332).
cctgccatagggcaacaaa

SEQ ID NO: 747376 - DNA, 19 bp, Mus musculus
  siRNA target sequence for 4930579J09Rik (NM_133689.1,366-384).
gctactctcccctagaagt

SEQ ID NO: 747377 - DNA, 19 bp, Mus musculus
  siRNA target sequence for 4930579J09Rik (NM_133689.1,509-527).
cacgggcctcagactatca

SEQ ID NO: 747378 - DNA, 19 bp, Mus musculus
  siRNA target sequence for 4930579J09Rik (NM_133689.1,511-529).
cgggcctcagactatcaca

SEQ ID NO: 747379 - DNA, 19 bp, Mus musculus
  siRNA target sequence for 4930579J09Rik (NM_133689.1,660-678).
caaaccacccagatctctt

SEQ ID NO: 747380 - DNA, 19 bp, Mus musculus
  siRNA target sequence for 4930579J09Rik (NM_133689.1,671-689).
gatctcttgcttaagaaga

SEQ ID NO: 747381 - DNA, 19 bp, Mus musculus
  siRNA target sequence for 4930579J09Rik (NM_133689.1,680-698).
cttaagaagacaattggtt

SEQ ID NO: 747382 - DNA, 19 bp, Mus musculus
  siRNA target sequence for 4930579J09Rik (NM_133689.1,685-703).
gaagacaattggttccaaa

SEQ ID NO: 747383 - DNA, 19 bp, Mus musculus
  siRNA target sequence for 4930579J09Rik (NM_133689.1,791-809).
catccaggacggagtatca

SEQ ID NO: 747384 - DNA, 19 bp, Mus musculus
  siRNA target sequence for 4930579J09Rik (NM_133689.1,991-1009).
gcggatgcaacagacaaat

SEQ ID NO: 747385 - DNA, 19 bp, Mus musculus
  siRNA target sequence for 4930579J09Rik (NM_133689.1,994-1012).
gatgcaacagacaaatgtt

SEQ ID NO: 747386 - DNA, 19 bp, Mus musculus
  siRNA target sequence for 4930579J09Rik (NM_133689.1,1053-1071).
cagggttcactcttaacaa

SEQ ID NO: 747387 - DNA, 19 bp, Mus musculus
  siRNA target sequence for 4930579J09Rik (NM_133689.1,1136-1154).
caagggtacttcgagaata

SEQ ID NO: 747388 - DNA, 19 bp, Mus musculus
  siRNA target sequence for 0710008C12Rik (NM_133694.1,786-804).
ccgcctgtcgtcaactcaa

SEQ ID NO: 747389 - DNA, 19 bp, Mus musculus
  siRNA target sequence for 0710008C12Rik (NM_133694.1,847-865).
cctccgcagcctctcatta

SEQ ID NO: 747390 - DNA, 19 bp, Mus musculus
  siRNA target sequence for 0710008C12Rik (NM_133694.1,850-868).
ccgcagcctctcattagca

SEQ ID NO: 747391 - DNA, 19 bp, Mus musculus
  siRNA target sequence for 0710008C12Rik (NM_133694.1,1136-1154).
ggcttcgcaccctttgtca

SEQ ID NO: 747392 - DNA, 19 bp, Mus musculus
  siRNA target sequence for 1500002M01Rik (NM_133702.1,30-48).
gttgtctactggagtctta

SEQ ID NO: 747393 - DNA, 19 bp, Mus musculus
  siRNA target sequence for 1500002M01Rik (NM_133702.1,122-140).
gcaggaccgtcgtccttta

SEQ ID NO: 747394 - DNA, 19 bp, Mus musculus
  siRNA target sequence for 1500002M01Rik (NM_133702.1,125-143).
ggaccgtcgtcctttacaa

SEQ ID NO: 747395 - DNA, 19 bp, Mus musculus
  siRNA target sequence for 1500002M01Rik (NM_133702.1,130-148).
gtcgtcctttacaaggttt

SEQ ID NO: 747396 - DNA, 19 bp, Mus musculus
  siRNA target sequence for 1500002M01Rik (NM_133702.1,204-222).
ccctgctgtgtgcaacttt

SEQ ID NO: 747397 - DNA, 19 bp, Mus musculus
  siRNA target sequence for 1500002M01Rik (NM_133702.1,219-237).
ctttcagactggagagtat

SEQ ID NO: 747398 - DNA, 19 bp, Mus musculus
  siRNA target sequence for 1500002M01Rik (NM_133702.1,223-241).
cagactggagagtatatta

SEQ ID NO: 747399 - DNA, 19 bp, Mus musculus
  siRNA target sequence for 1500002M01Rik (NM_133702.1,227-245).
ctggagagtatattatggt

SEQ ID NO: 747400 - DNA, 19 bp, Mus musculus
  siRNA target sequence for 1500002M01Rik (NM_133702.1,243-261).
ggtacatgaccataaggtt

SEQ ID NO: 747401 - DNA, 19 bp, Mus musculus
  siRNA target sequence for 1500002M01Rik (NM_133702.1,244-262).
gtacatgaccataaggttt

SEQ ID NO: 747402 - DNA, 19 bp, Mus musculus
  siRNA target sequence for 1500002M01Rik (NM_133702.1,247-265).
catgaccataaggttttga

SEQ ID NO: 747403 - DNA, 19 bp, Mus musculus
  siRNA target sequence for 1500002M01Rik (NM_133702.1,258-276).
ggttttgagaatatggaat

SEQ ID NO: 747404 - DNA, 19 bp, Mus musculus
  siRNA target sequence for 1500002M01Rik (NM_133702.1,285-303).
cgtaaacgtggataaagta

SEQ ID NO: 747405 - DNA, 19 bp, Mus musculus
  siRNA target sequence for 1500002M01Rik (NM_133702.1,342-360).
ctcagtacaaagaacagaa

SEQ ID NO: 747406 - DNA, 19 bp, Mus musculus
  siRNA target sequence for 1500002M01Rik (NM_133702.1,467-485).
ggtcagaggttttcatgtt

SEQ ID NO: 747407 - DNA, 19 bp, Mus musculus
  siRNA target sequence for 1500002M01Rik (NM_133702.1,470-488).
cagaggttttcatgttatt

SEQ ID NO: 747408 - DNA, 19 bp, Mus musculus
  siRNA target sequence for 1500002M01Rik (NM_133702.1,492-510).
gcaaccagttttaattttt

SEQ ID NO: 747409 - DNA, 19 bp, Mus musculus
  siRNA target sequence for 1500002M01Rik (NM_133702.1,515-533).
ctgaaaatcatggtcatta

SEQ ID NO: 747410 - DNA, 19 bp, Mus musculus
  siRNA target sequence for 1500002M01Rik (NM_133702.1,538-556).
gcttatgtacgattatgca

SEQ ID NO: 747411 - DNA, 19 bp, Mus musculus
  siRNA target sequence for 1500002M01Rik (NM_133702.1,539-557).
cttatgtacgattatgcaa

SEQ ID NO: 747412 - DNA, 19 bp, Mus musculus
  siRNA target sequence for 1500002M01Rik (NM_133702.1,564-582).
cagcttaagcaaatacaca

SEQ ID NO: 747413 - DNA, 19 bp, Mus musculus
  siRNA target sequence for 1500002M01Rik (NM_133702.1,572-590).
gcaaatacacactcttact

SEQ ID NO: 747414 - DNA, 19 bp, Mus musculus
  siRNA target sequence for 1500002M01Rik (NM_133702.1,573-591).
caaatacacactcttactt

SEQ ID NO: 747415 - DNA, 19 bp, Mus musculus
  siRNA target sequence for 1500002M01Rik (NM_133702.1,693-711).
cttgataccaatatattca

SEQ ID NO: 747416 - DNA, 19 bp, Mus musculus
  siRNA target sequence for 1500002M01Rik (NM_133702.1,696-714).
gataccaatatattcaagt

SEQ ID NO: 747417 - DNA, 19 bp, Mus musculus
  siRNA target sequence for 1500002M01Rik (NM_133702.1,768-786).
gtctggcggtgttcgaaat

SEQ ID NO: 747418 - DNA, 19 bp, Mus musculus
  siRNA target sequence for 1500002M01Rik (NM_133702.1,862-880).
ctctccatatggaacataa

SEQ ID NO: 747419 - DNA, 19 bp, Mus musculus
  siRNA target sequence for 1500002M01Rik (NM_133702.1,873-891).
gaacataaagtttcaaaca

SEQ ID NO: 747420 - DNA, 19 bp, Mus musculus
  siRNA target sequence for 1500002M01Rik (NM_133702.1,943-961).
catggggaagtactattca

SEQ ID NO: 747421 - DNA, 19 bp, Mus musculus
  siRNA target sequence for 1500002M01Rik (NM_133702.1,1067-1085).
ctgtgccccactttgtaaa

SEQ ID NO: 747422 - DNA, 19 bp, Mus musculus
  siRNA target sequence for 1500002M01Rik (NM_133702.1,1069-1087).
gtgccccactttgtaaact

SEQ ID NO: 747423 - DNA, 19 bp, Mus musculus
  siRNA target sequence for 1500002M01Rik (NM_133702.1,1089-1107).
ggaaacatgttcaggatat

SEQ ID NO: 747424 - DNA, 19 bp, Mus musculus
  siRNA target sequence for 1500002M01Rik (NM_133702.1,1094-1112).
catgttcaggatatgaact

SEQ ID NO: 747425 - DNA, 19 bp, Mus musculus
  siRNA target sequence for 1500002M01Rik (NM_133702.1,1187-1205).
caggattcaaacaactttt

SEQ ID NO: 747426 - DNA, 19 bp, Mus musculus
  siRNA target sequence for 1500002M01Rik (NM_133702.1,1243-1261).
gtagaactccgtaagtttt

SEQ ID NO: 747427 - DNA, 19 bp, Mus musculus
  siRNA target sequence for 1500002M01Rik (NM_133702.1,1274-1292).
cacctgcctttcatactat

SEQ ID NO: 747428 - DNA, 19 bp, Mus musculus
  siRNA target sequence for 1500002M01Rik (NM_133702.1,1289-1307).
ctataattggagacttagt

SEQ ID NO: 747429 - DNA, 19 bp, Mus musculus
  siRNA target sequence for 1500002M01Rik (NM_133702.1,1400-1418).
gcttatgccctgacttgat

SEQ ID NO: 747430 - DNA, 19 bp, Mus musculus
  siRNA target sequence for 1500002M01Rik (NM_133702.1,1496-1514).
ccacctgtgcttgcttaaa

SEQ ID NO: 747431 - DNA, 19 bp, Mus musculus
  siRNA target sequence for 1500002M01Rik (NM_133702.1,1497-1515).
cacctgtgcttgcttaaaa

SEQ ID NO: 747432 - DNA, 19 bp, Mus musculus
  siRNA target sequence for 1500002M01Rik (NM_133702.1,1539-1557).
ctgtcttcgagacagtaat

SEQ ID NO: 747433 - DNA, 19 bp, Mus musculus
  siRNA target sequence for 1500002M01Rik (NM_133702.1,1541-1559).
gtcttcgagacagtaatat

SEQ ID NO: 747434 - DNA, 19 bp, Mus musculus
  siRNA target sequence for 1500002M01Rik (NM_133702.1,1546-1564).
cgagacagtaatatcaaca

SEQ ID NO: 747435 - DNA, 19 bp, Mus musculus
  siRNA target sequence for 1500002M01Rik (NM_133702.1,1547-1565).
gagacagtaatatcaacat

SEQ ID NO: 747436 - DNA, 19 bp, Mus musculus
  siRNA target sequence for 1500002M01Rik (NM_133702.1,1569-1587).
gtcagtttttgattatagt

SEQ ID NO: 747437 - DNA, 19 bp, Mus musculus
  siRNA target sequence for 1500002M01Rik (NM_133702.1,1675-1693).
gaagatagtcagcagttaa

SEQ ID NO: 747438 - DNA, 19 bp, Mus musculus
  siRNA target sequence for 1500002M01Rik (NM_133702.1,1764-1782).
gcgagcagctctgctaaat

SEQ ID NO: 747439 - DNA, 19 bp, Mus musculus
  siRNA target sequence for 1500002M01Rik (NM_133702.1,1940-1958).
ccgtgagccagattatgga

SEQ ID NO: 747440 - DNA, 19 bp, Mus musculus
  siRNA target sequence for 1500002M01Rik (NM_133702.1,1947-1965).
ccagattatggattggata

SEQ ID NO: 747441 - DNA, 19 bp, Mus musculus
  siRNA target sequence for 1500002M01Rik (NM_133702.1,1948-1966).
cagattatggattggatat

SEQ ID NO: 747442 - DNA, 19 bp, Mus musculus
  siRNA target sequence for 1500002M01Rik (NM_133702.1,1968-1986).
cctacttctagatgctaat

SEQ ID NO: 747443 - DNA, 19 bp, Mus musculus
  siRNA target sequence for 1500002M01Rik (NM_133702.1,1969-1987).
ctacttctagatgctaatt

SEQ ID NO: 747444 - DNA, 19 bp, Mus musculus
  siRNA target sequence for 1500002M01Rik (NM_133702.1,2101-2119).
cgggagctgcagagattaa

SEQ ID NO: 747445 - DNA, 19 bp, Mus musculus
  siRNA target sequence for 1500002M01Rik (NM_133702.1,2102-2120).
gggagctgcagagattaaa

SEQ ID NO: 747446 - DNA, 19 bp, Mus musculus
  siRNA target sequence for Sec22l2 (NM_133704.3,166-184).
gtctgcatccactgattat

SEQ ID NO: 747447 - DNA, 19 bp, Mus musculus
  siRNA target sequence for Sec22l2 (NM_133704.3,168-186).
ctgcatccactgattatga

SEQ ID NO: 747448 - DNA, 19 bp, Mus musculus
  siRNA target sequence for Sec22l2 (NM_133704.3,234-252).
ccaggaaacttgctcaatt

SEQ ID NO: 747449 - DNA, 19 bp, Mus musculus
  siRNA target sequence for Sec22l2 (NM_133704.3,245-263).
gctcaatttcctgatagat

SEQ ID NO: 747450 - DNA, 19 bp, Mus musculus
  siRNA target sequence for Sec22l2 (NM_133704.3,281-299).
cgctataacattaatttca

SEQ ID NO: 747451 - DNA, 19 bp, Mus musculus
  siRNA target sequence for Sec22l2 (NM_133704.3,314-332).
gtgagctacatgatgttgt

SEQ ID NO: 747452 - DNA, 19 bp, Mus musculus
  siRNA target sequence for Sec22l2 (NM_133704.3,331-349).
gtgcagtgagaattatcca

SEQ ID NO: 747453 - DNA, 19 bp, Mus musculus
  siRNA target sequence for Sec22l2 (NM_133704.3,336-354).
gtgagaattatccaaatgt

SEQ ID NO: 747454 - DNA, 19 bp, Mus musculus
  siRNA target sequence for Sec22l2 (NM_133704.3,383-401).
cagaaggagttcattacta

SEQ ID NO: 747455 - DNA, 19 bp, Mus musculus
  siRNA target sequence for Sec22l2 (NM_133704.3,385-403).
gaaggagttcattactact

SEQ ID NO: 747456 - DNA, 19 bp, Mus musculus
  siRNA target sequence for Sec22l2 (NM_133704.3,388-406).
ggagttcattactacttat

SEQ ID NO: 747457 - DNA, 19 bp, Mus musculus
  siRNA target sequence for Sec22l2 (NM_133704.3,474-492).
ggaccaagcagcgatataa

SEQ ID NO: 747458 - DNA, 19 bp, Mus musculus
  siRNA target sequence for Sec22l2 (NM_133704.3,475-493).
gaccaagcagcgatataat

SEQ ID NO: 747459 - DNA, 19 bp, Mus musculus
  siRNA target sequence for Sec22l2 (NM_133704.3,477-495).
ccaagcagcgatataataa

SEQ ID NO: 747460 - DNA, 19 bp, Mus musculus
  siRNA target sequence for Sec22l2 (NM_133704.3,478-496).
caagcagcgatataataat

SEQ ID NO: 747461 - DNA, 19 bp, Mus musculus
  siRNA target sequence for Sec22l2 (NM_133704.3,497-515).
cccaggtctctttcaacaa

SEQ ID NO: 747462 - DNA, 19 bp, Mus musculus
  siRNA target sequence for Sec22l2 (NM_133704.3,684-702).
cagggattgtggcgtttat

SEQ ID NO: 747463 - DNA, 19 bp, Mus musculus
  siRNA target sequence for Sec22l2 (NM_133704.3,687-705).
ggattgtggcgtttatcct

SEQ ID NO: 747464 - DNA, 19 bp, Mus musculus
  siRNA target sequence for Sec22l2 (NM_133704.3,688-706).
gattgtggcgtttatcctt

SEQ ID NO: 747465 - DNA, 19 bp, Mus musculus
  siRNA target sequence for Sec22l2 (NM_133704.3,695-713).
gcgtttatccttagtcttt

SEQ ID NO: 747466 - DNA, 19 bp, Mus musculus
  siRNA target sequence for Sec22l2 (NM_133704.3,696-714).
cgtttatccttagtctttt

SEQ ID NO: 747467 - DNA, 19 bp, Mus musculus
  siRNA target sequence for Sec22l2 (NM_133704.3,697-715).
gtttatccttagtctttta

SEQ ID NO: 747468 - DNA, 19 bp, Mus musculus
  siRNA target sequence for Sec22l2 (NM_133704.3,777-795).
gtgaggatcttaattacat

SEQ ID NO: 747469 - DNA, 19 bp, Mus musculus
  siRNA target sequence for Sec22l2 (NM_133704.3,816-834).
cagcagcctgcctttacca

SEQ ID NO: 747470 - DNA, 19 bp, Mus musculus
  siRNA target sequence for Sec22l2 (NM_133704.3,822-840).
cctgcctttaccagtgtta

SEQ ID NO: 747471 - DNA, 19 bp, Mus musculus
  siRNA target sequence for Sec22l2 (NM_133704.3,823-841).
ctgcctttaccagtgttat

SEQ ID NO: 747472 - DNA, 19 bp, Mus musculus
  siRNA target sequence for Sec22l2 (NM_133704.3,826-844).
cctttaccagtgttattta

SEQ ID NO: 747473 - DNA, 19 bp, Mus musculus
  siRNA target sequence for Sec22l2 (NM_133704.3,961-979).
gactgtgggagcgtttgtt

SEQ ID NO: 747474 - DNA, 19 bp, Mus musculus
  siRNA target sequence for 1810019J16Rik (NM_133707.1,216-234).
gagagtatcaccttcattt

SEQ ID NO: 747475 - DNA, 19 bp, Mus musculus
  siRNA target sequence for 1810019J16Rik (NM_133707.1,524-542).
cttcagctaccctgatgtt

SEQ ID NO: 747476 - DNA, 19 bp, Mus musculus
  siRNA target sequence for 1810019J16Rik (NM_133707.1,529-547).
gctaccctgatgttaagct

SEQ ID NO: 747477 - DNA, 19 bp, Mus musculus
  siRNA target sequence for 1810019J16Rik (NM_133707.1,760-778).
gggagatcgacgtgcttat

SEQ ID NO: 747478 - DNA, 19 bp, Mus musculus
  siRNA target sequence for 1810019J16Rik (NM_133707.1,761-779).
ggagatcgacgtgcttatt

SEQ ID NO: 747479 - DNA, 19 bp, Mus musculus
  siRNA target sequence for 1810012N01Rik (NM_133708.1,153-171).
ccatgatccagcaccatat

SEQ ID NO: 747480 - DNA, 19 bp, Mus musculus
  siRNA target sequence for 1810012N01Rik (NM_133708.1,154-172).
catgatccagcaccatata

SEQ ID NO: 747481 - DNA, 19 bp, Mus musculus
  siRNA target sequence for 1810012N01Rik (NM_133708.1,157-175).
gatccagcaccatatagaa

SEQ ID NO: 747482 - DNA, 19 bp, Mus musculus
  siRNA target sequence for 1810012N01Rik (NM_133708.1,486-504).
ggacacaatccctcaacta

SEQ ID NO: 747483 - DNA, 19 bp, Mus musculus
  siRNA target sequence for 1810012N01Rik (NM_133708.1,505-523).
cggctgcatcgttgagaat

SEQ ID NO: 747484 - DNA, 19 bp, Mus musculus
  siRNA target sequence for 1810012N01Rik (NM_133708.1,554-572).
gagaaacccagcaccttta

SEQ ID NO: 747485 - DNA, 19 bp, Mus musculus
  siRNA target sequence for 1810012N01Rik (NM_133708.1,1246-1264).
cttgaactcgattgttcta

SEQ ID NO: 747486 - DNA, 19 bp, Mus musculus
  siRNA target sequence for Chl2 (NM_133709.2,225-243).
gccttttcggtgaaaagat

SEQ ID NO: 747487 - DNA, 19 bp, Mus musculus
  siRNA target sequence for Chl2 (NM_133709.2,226-244).
ccttttcggtgaaaagata

SEQ ID NO: 747488 - DNA, 19 bp, Mus musculus
  siRNA target sequence for Chl2 (NM_133709.2,227-245).
cttttcggtgaaaagatat

SEQ ID NO: 747489 - DNA, 19 bp, Mus musculus
  siRNA target sequence for Chl2 (NM_133709.2,281-299).
ccacaaggcacgatatact

SEQ ID NO: 747490 - DNA, 19 bp, Mus musculus
  siRNA target sequence for Chl2 (NM_133709.2,322-340).
gaatggacatgtgaattgt

SEQ ID NO: 747491 - DNA, 19 bp, Mus musculus
  siRNA target sequence for Chl2 (NM_133709.2,482-500).
caacatggagagatcttca

SEQ ID NO: 747492 - DNA, 19 bp, Mus musculus
  siRNA target sequence for Chl2 (NM_133709.2,698-716).
cagcatggagagagacatt

SEQ ID NO: 747493 - DNA, 19 bp, Mus musculus
  siRNA target sequence for Chl2 (NM_133709.2,823-841).
cagcacaaccatcaagatt

SEQ ID NO: 747494 - DNA, 19 bp, Mus musculus
  siRNA target sequence for Chl2 (NM_133709.2,831-849).
ccatcaagattatcttgaa

SEQ ID NO: 747495 - DNA, 19 bp, Mus musculus
  siRNA target sequence for Chl2 (NM_133709.2,851-869).
gagaaacataaaaaagctt

SEQ ID NO: 747496 - DNA, 19 bp, Mus musculus
  siRNA target sequence for Chl2 (NM_133709.2,1014-1032).
gcagtcaacccaagaaagt

SEQ ID NO: 747497 - DNA, 19 bp, Mus musculus
  siRNA target sequence for Chl2 (NM_133709.2,1197-1215).
ctgaccaggtagagatgta

SEQ ID NO: 747498 - DNA, 19 bp, Mus musculus
  siRNA target sequence for Chl2 (NM_133709.2,1202-1220).
caggtagagatgtacattt

SEQ ID NO: 747499 - DNA, 19 bp, Mus musculus
  siRNA target sequence for Chl2 (NM_133709.2,1244-1262).
cacttggttcagatcaaga

SEQ ID NO: 747500 - DNA, 19 bp, Mus musculus
  siRNA target sequence for Chl2 (NM_133709.2,1314-1332).
ccggcacccatgaaggtta

SEQ ID NO: 747501 - DNA, 19 bp, Mus musculus
  siRNA target sequence for Chl2 (NM_133709.2,1376-1394).
gccagcccagacaaagtga

SEQ ID NO: 747502 - DNA, 19 bp, Mus musculus
  siRNA target sequence for 1700001N01Rik (NM_133711.2,190-208).
ggctccagggcctagatct

SEQ ID NO: 747503 - DNA, 19 bp, Mus musculus
  siRNA target sequence for 1700001N01Rik (NM_133711.2,255-273).
ctagttgcagagatattct

SEQ ID NO: 747504 - DNA, 19 bp, Mus musculus
  siRNA target sequence for 1700001N01Rik (NM_133711.2,287-305).
ctgggaccttcgattatca

SEQ ID NO: 747505 - DNA, 19 bp, Mus musculus
  siRNA target sequence for 1700001N01Rik (NM_133711.2,293-311).
ccttcgattatcatccttt

SEQ ID NO: 747506 - DNA, 19 bp, Mus musculus
  siRNA target sequence for 1700001N01Rik (NM_133711.2,297-315).
cgattatcatcctttgaaa

SEQ ID NO: 747507 - DNA, 19 bp, Mus musculus
  siRNA target sequence for 1700001N01Rik (NM_133711.2,318-336).
ggaacctccttaaaagtca

SEQ ID NO: 747508 - DNA, 19 bp, Mus musculus
  siRNA target sequence for 1700001N01Rik (NM_133711.2,319-337).
gaacctccttaaaagtcaa

SEQ ID NO: 747509 - DNA, 19 bp, Mus musculus
  siRNA target sequence for 1700001N01Rik (NM_133711.2,322-340).
cctccttaaaagtcaagtt

SEQ ID NO: 747510 - DNA, 19 bp, Mus musculus
  siRNA target sequence for 1700001N01Rik (NM_133711.2,369-387).
ctagcgaaaaagaagttta

SEQ ID NO: 747511 - DNA, 19 bp, Mus musculus
  siRNA target sequence for 1700001N01Rik (NM_133711.2,373-391).
cgaaaaagaagtttaaact

SEQ ID NO: 747512 - DNA, 19 bp, Mus musculus
  siRNA target sequence for 1700001N01Rik (NM_133711.2,380-398).
gaagtttaaactacctaaa

SEQ ID NO: 747513 - DNA, 19 bp, Mus musculus
  siRNA target sequence for 1700001N01Rik (NM_133711.2,433-451).
gggtacctgaaatactgat

SEQ ID NO: 747514 - DNA, 19 bp, Mus musculus
  siRNA target sequence for 1700001N01Rik (NM_133711.2,434-452).
ggtacctgaaatactgata

SEQ ID NO: 747515 - DNA, 19 bp, Mus musculus
  siRNA target sequence for 1700001N01Rik (NM_133711.2,447-465).
ctgatacaggagatttaca

SEQ ID NO: 747516 - DNA, 19 bp, Mus musculus
  siRNA target sequence for 1700001N01Rik (NM_133711.2,449-467).
gatacaggagatttacact

SEQ ID NO: 747517 - DNA, 19 bp, Mus musculus
  siRNA target sequence for 1700001N01Rik (NM_133711.2,455-473).
ggagatttacactttacta

SEQ ID NO: 747518 - DNA, 19 bp, Mus musculus
  siRNA target sequence for 1700001N01Rik (NM_133711.2,471-489).
ctaacacatcaagaaatta

SEQ ID NO: 747519 - DNA, 19 bp, Mus musculus
  siRNA target sequence for 1700001N01Rik (NM_133711.2,501-519).
gatgatctcgctaatttca

SEQ ID NO: 747520 - DNA, 19 bp, Mus musculus
  siRNA target sequence for 1700001N01Rik (NM_133711.2,509-527).
cgctaatttcacagactat

SEQ ID NO: 747521 - DNA, 19 bp, Mus musculus
  siRNA target sequence for 1700001N01Rik (NM_133711.2,520-538).
cagactatatttaccaaat

SEQ ID NO: 747522 - DNA, 19 bp, Mus musculus
  siRNA target sequence for 1700001N01Rik (NM_133711.2,546-564).
cccctggttcctaggaata

SEQ ID NO: 747523 - DNA, 19 bp, Mus musculus
  siRNA target sequence for 1700001N01Rik (NM_133711.2,552-570).
gttcctaggaatacagtat

SEQ ID NO: 747524 - DNA, 19 bp, Mus musculus
  siRNA target sequence for 1700001N01Rik (NM_133711.2,555-573).
cctaggaatacagtatcaa

SEQ ID NO: 747525 - DNA, 19 bp, Mus musculus
  siRNA target sequence for 1700001N01Rik (NM_133711.2,567-585).
gtatcaaaatctattaaga

SEQ ID NO: 747526 - DNA, 19 bp, Mus musculus
  siRNA target sequence for 1700001N01Rik (NM_133711.2,603-621).
gaactactaagcaatccta

SEQ ID NO: 747527 - DNA, 19 bp, Mus musculus
  siRNA target sequence for 1700001N01Rik (NM_133711.2,679-697).
gaaaattaagcagaaaact

SEQ ID NO: 747528 - DNA, 19 bp, Mus musculus
  siRNA target sequence for 1700001N01Rik (NM_133711.2,753-771).
cttcctgcccatagctata

SEQ ID NO: 747529 - DNA, 19 bp, Mus musculus
  siRNA target sequence for 1700001N01Rik (NM_133711.2,810-828).
gcacaacctttatcaaaat

SEQ ID NO: 747530 - DNA, 19 bp, Mus musculus
  siRNA target sequence for 2310037I24Rik (NM_133714.2,481-499).
ctgcattaagcacattctt

SEQ ID NO: 747531 - DNA, 19 bp, Mus musculus
  siRNA target sequence for 2310037I24Rik (NM_133714.2,483-501).
gcattaagcacattcttga

SEQ ID NO: 747532 - DNA, 19 bp, Mus musculus
  siRNA target sequence for 2310037I24Rik (NM_133714.2,536-554).
gtctcgacgaagaatggaa

SEQ ID NO: 747533 - DNA, 19 bp, Mus musculus
  siRNA target sequence for 2310037I24Rik (NM_133714.2,538-556).
ctcgacgaagaatggaaaa

SEQ ID NO: 747534 - DNA, 19 bp, Mus musculus
  siRNA target sequence for 2310037I24Rik (NM_133714.2,612-630).
ccgaacatgctcgaagaaa

SEQ ID NO: 747535 - DNA, 19 bp, Mus musculus
  siRNA target sequence for 2310037I24Rik (NM_133714.2,613-631).
cgaacatgctcgaagaaat

SEQ ID NO: 747536 - DNA, 19 bp, Mus musculus
  siRNA target sequence for 2310037I24Rik (NM_133714.2,705-723).
gctcatacgctaaaacaga

SEQ ID NO: 747537 - DNA, 19 bp, Mus musculus
  siRNA target sequence for 2310037I24Rik (NM_133714.2,1271-1289).
gtgcgctgctccaatcagt

SEQ ID NO: 747538 - DNA, 19 bp, Mus musculus
  siRNA target sequence for 2310037I24Rik (NM_133714.2,1319-1337).
catatctgtcaggatacaa

SEQ ID NO: 747539 - DNA, 19 bp, Mus musculus
  siRNA target sequence for 2310037I24Rik (NM_133714.2,1540-1558).
gcccactgagagtttacca

SEQ ID NO: 747540 - DNA, 19 bp, Mus musculus
  siRNA target sequence for 2310069I04Rik (NM_133715.1,641-659).
ggctgggtgcctacctaaa

SEQ ID NO: 747541 - DNA, 19 bp, Mus musculus
  siRNA target sequence for 2310069I04Rik (NM_133715.1,743-761).
cagccttaggcaaacagtt

SEQ ID NO: 747542 - DNA, 19 bp, Mus musculus
  siRNA target sequence for 2310069I04Rik (NM_133715.1,746-764).
ccttaggcaaacagttgaa

SEQ ID NO: 747543 - DNA, 19 bp, Mus musculus
  siRNA target sequence for 1810031K02Rik (NM_133716.2,518-536).
ggaacatcggggtgttcat

SEQ ID NO: 747544 - DNA, 19 bp, Mus musculus
  siRNA target sequence for 1810031K02Rik (NM_133716.2,576-594).
gcatatatccagggtaaaa

SEQ ID NO: 747545 - DNA, 19 bp, Mus musculus
  siRNA target sequence for 1810031K02Rik (NM_133716.2,606-624).
cgaccagtggactcaagaa

SEQ ID NO: 747546 - DNA, 19 bp, Mus musculus
  siRNA target sequence for 1810031K02Rik (NM_133716.2,614-632).
ggactcaagaacagattca

SEQ ID NO: 747547 - DNA, 19 bp, Mus musculus
  siRNA target sequence for 1810031K02Rik (NM_133716.2,696-714).
ctttcggcgacctcagata

SEQ ID NO: 747548 - DNA, 19 bp, Mus musculus
  siRNA target sequence for 1810031K02Rik (NM_133716.2,730-748).
ggatttattcgagataaat

SEQ ID NO: 747549 - DNA, 19 bp, Mus musculus
  siRNA target sequence for 1810031K02Rik (NM_133716.2,771-789).
ccgaagtctggacatcaat

SEQ ID NO: 747550 - DNA, 19 bp, Mus musculus
  siRNA target sequence for 1810031K02Rik (NM_133716.2,816-834).
gtggaaacgagggaatgaa

SEQ ID NO: 747551 - DNA, 19 bp, Mus musculus
  siRNA target sequence for 1810031K02Rik (NM_133716.2,832-850).
gaacccgctccggagaaaa

SEQ ID NO: 747552 - DNA, 19 bp, Mus musculus
  siRNA target sequence for 1810031K02Rik (NM_133716.2,836-854).
ccgctccggagaaaaagat

SEQ ID NO: 747553 - DNA, 19 bp, Mus musculus
  siRNA target sequence for 1810031K02Rik (NM_133716.2,907-925).
cagctacctcggaaaagct

SEQ ID NO: 747554 - DNA, 19 bp, Mus musculus
  siRNA target sequence for 1810031K02Rik (NM_133716.2,918-936).
gaaaagctctccgaaatct

SEQ ID NO: 747555 - DNA, 19 bp, Mus musculus
  siRNA target sequence for 1810031K02Rik (NM_133716.2,941-959).
cccctgtcatggacttgtt

SEQ ID NO: 747556 - DNA, 19 bp, Mus musculus
  siRNA target sequence for 1810031K02Rik (NM_133716.2,981-999).
ctgctcaattgcaaacagt

SEQ ID NO: 747557 - DNA, 19 bp, Mus musculus
  siRNA target sequence for 1810031K02Rik (NM_133716.2,983-1001).
gctcaattgcaaacagtaa

SEQ ID NO: 747558 - DNA, 19 bp, Mus musculus
  siRNA target sequence for 1810031K02Rik (NM_133716.2,1117-1135).
cctgaaaacctgaacctat

SEQ ID NO: 747559 - DNA, 19 bp, Mus musculus
  siRNA target sequence for 1810031K02Rik (NM_133716.2,1211-1229).
gatcccagacgcctcaaat

SEQ ID NO: 747560 - DNA, 19 bp, Mus musculus
  siRNA target sequence for 1810031K02Rik (NM_133716.2,1231-1249).
cctgcccaagcaatgttca

SEQ ID NO: 747561 - DNA, 19 bp, Mus musculus
  siRNA target sequence for 1810031K02Rik (NM_133716.2,1232-1250).
ctgcccaagcaatgttcat

SEQ ID NO: 747562 - DNA, 19 bp, Mus musculus
  siRNA target sequence for 1810031K02Rik (NM_133716.2,1365-1383).
gggagcctctggaatgcta

SEQ ID NO: 747563 - DNA, 19 bp, Mus musculus
  siRNA target sequence for 1810031K02Rik (NM_133716.2,1441-1459).
gtgccgaacgggatgatga

SEQ ID NO: 747564 - DNA, 19 bp, Mus musculus
  siRNA target sequence for 1810031K02Rik (NM_133716.2,1553-1571).
ctcagatgacccagcaaat

SEQ ID NO: 747565 - DNA, 19 bp, Mus musculus
  siRNA target sequence for 1810031K02Rik (NM_133716.2,1620-1638).
gtcaatgggcggtggaaat

SEQ ID NO: 747566 - DNA, 19 bp, Mus musculus
  siRNA target sequence for 2010200I23Rik (NM_133718.2,448-466).
ccgtgagatcgagattgat

SEQ ID NO: 747567 - DNA, 19 bp, Mus musculus
  siRNA target sequence for 2010200I23Rik (NM_133718.2,449-467).
cgtgagatcgagattgatt

SEQ ID NO: 747568 - DNA, 19 bp, Mus musculus
  siRNA target sequence for 2010200I23Rik (NM_133718.2,450-468).
gtgagatcgagattgatta

SEQ ID NO: 747569 - DNA, 19 bp, Mus musculus
  siRNA target sequence for 2010200I23Rik (NM_133718.2,452-470).
gagatcgagattgattaca

SEQ ID NO: 747570 - DNA, 19 bp, Mus musculus
  siRNA target sequence for 2010200I23Rik (NM_133718.2,454-472).
gatcgagattgattacact

SEQ ID NO: 747571 - DNA, 19 bp, Mus musculus
  siRNA target sequence for 2010200I23Rik (NM_133718.2,482-500).
ccttccagcccctgcaata

SEQ ID NO: 747572 - DNA, 19 bp, Mus musculus
  siRNA target sequence for 2010200I23Rik (NM_133718.2,528-546).
gtgcttgtaccattaactt

SEQ ID NO: 747573 - DNA, 19 bp, Mus musculus
  siRNA target sequence for 2010200I23Rik (NM_133718.2,530-548).
gcttgtaccattaacttca

SEQ ID NO: 747574 - DNA, 19 bp, Mus musculus
  siRNA target sequence for 2010200I23Rik (NM_133718.2,538-556).
cattaacttcacactgaaa

SEQ ID NO: 747575 - DNA, 19 bp, Mus musculus
  siRNA target sequence for 2010200I23Rik (NM_133718.2,583-601).
gtattatggactgtctaat

SEQ ID NO: 747576 - DNA, 19 bp, Mus musculus
  siRNA target sequence for 2010200I23Rik (NM_133718.2,591-609).
gactgtctaatttctatca

SEQ ID NO: 747577 - DNA, 19 bp, Mus musculus
  siRNA target sequence for 2010200I23Rik (NM_133718.2,593-611).
ctgtctaatttctatcaaa

SEQ ID NO: 747578 - DNA, 19 bp, Mus musculus
  siRNA target sequence for 2010200I23Rik (NM_133718.2,595-613).
gtctaatttctatcaaaat

SEQ ID NO: 747579 - DNA, 19 bp, Mus musculus
  siRNA target sequence for 2010200I23Rik (NM_133718.2,614-632).
catcgtcgctacgtgaaat

SEQ ID NO: 747580 - DNA, 19 bp, Mus musculus
  siRNA target sequence for 2010200I23Rik (NM_133718.2,625-643).
cgtgaaatctcgagatgat

SEQ ID NO: 747581 - DNA, 19 bp, Mus musculus
  siRNA target sequence for 2010200I23Rik (NM_133718.2,635-653).
cgagatgatagccagttaa

SEQ ID NO: 747582 - DNA, 19 bp, Mus musculus
  siRNA target sequence for 2010200I23Rik (NM_133718.2,659-677).
gaccctagtgctttgctta

SEQ ID NO: 747583 - DNA, 19 bp, Mus musculus
  siRNA target sequence for 2010200I23Rik (NM_133718.2,673-691).
gcttaatccaagtaaggaa

SEQ ID NO: 747584 - DNA, 19 bp, Mus musculus
  siRNA target sequence for 2010200I23Rik (NM_133718.2,674-692).
cttaatccaagtaaggaat

SEQ ID NO: 747585 - DNA, 19 bp, Mus musculus
  siRNA target sequence for 2010200I23Rik (NM_133718.2,757-775).
gtttaatgatacgttagaa

SEQ ID NO: 747586 - DNA, 19 bp, Mus musculus
  siRNA target sequence for 2010200I23Rik (NM_133718.2,784-802).
ggttgccaatgaatctgat

SEQ ID NO: 747587 - DNA, 19 bp, Mus musculus
  siRNA target sequence for 2010200I23Rik (NM_133718.2,849-867).
ggacagataaaaatgtgaa

SEQ ID NO: 747588 - DNA, 19 bp, Mus musculus
  siRNA target sequence for 2010200I23Rik (NM_133718.2,894-912).
gcctcgaagaaaagtttaa

SEQ ID NO: 747589 - DNA, 19 bp, Mus musculus
  siRNA target sequence for 2010200I23Rik (NM_133718.2,895-913).
cctcgaagaaaagtttaaa

SEQ ID NO: 747590 - DNA, 19 bp, Mus musculus
  siRNA target sequence for 2010200I23Rik (NM_133718.2,898-916).
cgaagaaaagtttaaagat

SEQ ID NO: 747591 - DNA, 19 bp, Mus musculus
  siRNA target sequence for 2010200I23Rik (NM_133718.2,934-952).
ctggcataaggcagtatat

SEQ ID NO: 747592 - DNA, 19 bp, Mus musculus
  siRNA target sequence for 2010200I23Rik (NM_133718.2,1012-1030).
gatgcgtactgcagcatta

SEQ ID NO: 747593 - DNA, 19 bp, Mus musculus
  siRNA target sequence for 2010200I23Rik (NM_133718.2,1026-1044).
cattacctacttttcgtaa

SEQ ID NO: 747594 - DNA, 19 bp, Mus musculus
  siRNA target sequence for 2010200I23Rik (NM_133718.2,1031-1049).
cctacttttcgtaagttgt

SEQ ID NO: 747595 - DNA, 19 bp, Mus musculus
  siRNA target sequence for 2010200I23Rik (NM_133718.2,1032-1050).
ctacttttcgtaagttgta

SEQ ID NO: 747596 - DNA, 19 bp, Mus musculus
  siRNA target sequence for 2010200I23Rik (NM_133718.2,1057-1075).
catagagcggagagatgat

SEQ ID NO: 747597 - DNA, 19 bp, Mus musculus
  siRNA target sequence for 2010200I23Rik (NM_133718.2,1094-1112).
gctggacagtactttttga

SEQ ID NO: 747598 - DNA, 19 bp, Mus musculus
  siRNA target sequence for 2010200I23Rik (NM_133718.2,1095-1113).
ctggacagtactttttgaa

SEQ ID NO: 747599 - DNA, 19 bp, Mus musculus
  siRNA target sequence for 2010200I23Rik (NM_133718.2,1097-1115).
ggacagtactttttgaaca

SEQ ID NO: 747600 - DNA, 19 bp, Mus musculus
  siRNA target sequence for 2010200I23Rik (NM_133718.2,1148-1166).
ggacggaaacggatgatct

SEQ ID NO: 747601 - DNA, 19 bp, Mus musculus
  siRNA target sequence for 2010200I23Rik (NM_133718.2,1151-1169).
cggaaacggatgatcttga

SEQ ID NO: 747602 - DNA, 19 bp, Mus musculus
  siRNA target sequence for 2010200I23Rik (NM_133718.2,1159-1177).
gatgatcttgagcactatt

SEQ ID NO: 747603 - DNA, 19 bp, Mus musculus
  siRNA target sequence for 2010200I23Rik (NM_133718.2,1162-1180).
gatcttgagcactatttca

SEQ ID NO: 747604 - DNA, 19 bp, Mus musculus
  siRNA target sequence for 2010200I23Rik (NM_133718.2,1208-1226).
ggaattgcttacatcacta

SEQ ID NO: 747605 - DNA, 19 bp, Mus musculus
  siRNA target sequence for 2010200I23Rik (NM_133718.2,1209-1227).
gaattgcttacatcactat

SEQ ID NO: 747606 - DNA, 19 bp, Mus musculus
  siRNA target sequence for 2010200I23Rik (NM_133718.2,1224-1242).
ctattggatccatctcttt

SEQ ID NO: 747607 - DNA, 19 bp, Mus musculus
  siRNA target sequence for 2010200I23Rik (NM_133718.2,1261-1279).
gctagtaattaatcataaa

SEQ ID NO: 747608 - DNA, 19 bp, Mus musculus
  siRNA target sequence for 2010200I23Rik (NM_133718.2,1262-1280).
ctagtaattaatcataaat

SEQ ID NO: 747609 - DNA, 19 bp, Mus musculus
  siRNA target sequence for Asph (NM_133723.1,390-408).
ctaaggctaaagctaaaga

SEQ ID NO: 747610 - DNA, 19 bp, Mus musculus
  siRNA target sequence for Asph (NM_133723.1,584-602).
gccagctctgacaagagtt

SEQ ID NO: 747611 - DNA, 19 bp, Mus musculus
  siRNA target sequence for Asph (NM_133723.1,598-616).
gagttccaagtctaaggaa

SEQ ID NO: 747612 - DNA, 19 bp, Mus musculus
  siRNA target sequence for Asph (NM_133723.1,635-653).
gagacaaaggctgtttcta

SEQ ID NO: 747613 - DNA, 19 bp, Mus musculus
  siRNA target sequence for Asph (NM_133723.1,637-655).
gacaaaggctgtttctagt

SEQ ID NO: 747614 - DNA, 19 bp, Mus musculus
  siRNA target sequence for Kptn (NM_133727.1,110-128).
gcttctcgtcgcaaagcaa

SEQ ID NO: 747615 - DNA, 19 bp, Mus musculus
  siRNA target sequence for Kptn (NM_133727.1,198-216).
gctcggcttccgctatcaa

SEQ ID NO: 747616 - DNA, 19 bp, Mus musculus
  siRNA target sequence for Kptn (NM_133727.1,214-232).
caagacctccgacagaaaa

SEQ ID NO: 747617 - DNA, 19 bp, Mus musculus
  siRNA target sequence for Kptn (NM_133727.1,244-262).
gctaaagagctgcaattca

SEQ ID NO: 747618 - DNA, 19 bp, Mus musculus
  siRNA target sequence for Kptn (NM_133727.1,245-263).
ctaaagagctgcaattcaa

SEQ ID NO: 747619 - DNA, 19 bp, Mus musculus
  siRNA target sequence for Kptn (NM_133727.1,252-270).
gctgcaattcaactacatt

SEQ ID NO: 747620 - DNA, 19 bp, Mus musculus
  siRNA target sequence for Kptn (NM_133727.1,369-387).
caagggcagtccgtttctt

SEQ ID NO: 747621 - DNA, 19 bp, Mus musculus
  siRNA target sequence for Kptn (NM_133727.1,375-393).
cagtccgtttcttaacatt

SEQ ID NO: 747622 - DNA, 19 bp, Mus musculus
  siRNA target sequence for Kptn (NM_133727.1,377-395).
gtccgtttcttaacattta

SEQ ID NO: 747623 - DNA, 19 bp, Mus musculus
  siRNA target sequence for Kptn (NM_133727.1,379-397).
ccgtttcttaacatttact

SEQ ID NO: 747624 - DNA, 19 bp, Mus musculus
  siRNA target sequence for Kptn (NM_133727.1,381-399).
gtttcttaacatttactgt

SEQ ID NO: 747625 - DNA, 19 bp, Mus musculus
  siRNA target sequence for Kptn (NM_133727.1,439-457).
gcagagagctgcctgaatt

SEQ ID NO: 747626 - DNA, 19 bp, Mus musculus
  siRNA target sequence for Kptn (NM_133727.1,543-561).
gaacgatccagctattcat

SEQ ID NO: 747627 - DNA, 19 bp, Mus musculus
  siRNA target sequence for Kptn (NM_133727.1,705-723).
cggctgccagagtggttat

SEQ ID NO: 747628 - DNA, 19 bp, Mus musculus
  siRNA target sequence for Kptn (NM_133727.1,738-756).
cgtggaccagaagaatcaa

SEQ ID NO: 747629 - DNA, 19 bp, Mus musculus
  siRNA target sequence for Kptn (NM_133727.1,929-947).
gtctggatgaccaacttct

SEQ ID NO: 747630 - DNA, 19 bp, Mus musculus
  siRNA target sequence for Kptn (NM_133727.1,1050-1068).
gctgctctgctataagtat

SEQ ID NO: 747631 - DNA, 19 bp, Mus musculus
  siRNA target sequence for Kptn (NM_133727.1,1174-1192).
cgggagctggccgtgatat

SEQ ID NO: 747632 - DNA, 19 bp, Mus musculus
  siRNA target sequence for Kptn (NM_133727.1,1251-1269).
gacacggcttcgtcatcaa

SEQ ID NO: 747633 - DNA, 19 bp, Mus musculus
  siRNA target sequence for Kptn (NM_133727.1,1253-1271).
cacggcttcgtcatcaagt

SEQ ID NO: 747634 - DNA, 19 bp, Mus musculus
  siRNA target sequence for 4631426H08Rik (NM_133730.1,125-143).
cttcggagctggaaatgca

SEQ ID NO: 747635 - DNA, 19 bp, Mus musculus
  siRNA target sequence for 4631426H08Rik (NM_133730.1,498-516).
gctgtactgcagattgaca

SEQ ID NO: 747636 - DNA, 19 bp, Mus musculus
  siRNA target sequence for 4631426H08Rik (NM_133730.1,499-517).
ctgtactgcagattgacaa

SEQ ID NO: 747637 - DNA, 19 bp, Mus musculus
  siRNA target sequence for 4631426H08Rik (NM_133730.1,984-1002).
ctcctggccacgaaacact

SEQ ID NO: 747638 - DNA, 19 bp, Mus musculus
  siRNA target sequence for 4631426H08Rik (NM_133730.1,1209-1227).
gaaggggcctgtaagtctt

SEQ ID NO: 747639 - DNA, 19 bp, Mus musculus
  siRNA target sequence for 4631426H08Rik (NM_133730.1,1219-1237).
gtaagtcttcgagttacaa

SEQ ID NO: 747640 - DNA, 19 bp, Mus musculus
  siRNA target sequence for 4631426H08Rik (NM_133730.1,1225-1243).
cttcgagttacaagtctaa

SEQ ID NO: 747641 - DNA, 19 bp, Mus musculus
  siRNA target sequence for 4631426H08Rik (NM_133730.1,1228-1246).
cgagttacaagtctaaaga

SEQ ID NO: 747642 - DNA, 19 bp, Mus musculus
  siRNA target sequence for 4631426H08Rik (NM_133730.1,1229-1247).
gagttacaagtctaaagat

SEQ ID NO: 747643 - DNA, 19 bp, Mus musculus
  siRNA target sequence for 4631426H08Rik (NM_133730.1,1257-1275).
ggaaacgccggaaaccaaa

SEQ ID NO: 747644 - DNA, 19 bp, Mus musculus
  siRNA target sequence for 4631426H08Rik (NM_133730.1,1258-1276).
gaaacgccggaaaccaaat

SEQ ID NO: 747645 - DNA, 19 bp, Mus musculus
  siRNA target sequence for 4631426H08Rik (NM_133730.1,1325-1343).
ggatcagcgcagcaagata

SEQ ID NO: 747646 - DNA, 19 bp, Mus musculus
  siRNA target sequence for 4631426H08Rik (NM_133730.1,1329-1347).
cagcgcagcaagatactga

SEQ ID NO: 747647 - DNA, 19 bp, Mus musculus
  siRNA target sequence for 4931406C07Rik (NM_133732.1,240-258).
ggttgactgcccagattta

SEQ ID NO: 747648 - DNA, 19 bp, Mus musculus
  siRNA target sequence for 4931406C07Rik (NM_133732.1,289-307).
ggcatctgtgggcaaacta

SEQ ID NO: 747649 - DNA, 19 bp, Mus musculus
  siRNA target sequence for 4931406C07Rik (NM_133732.1,291-309).
catctgtgggcaaactaga

SEQ ID NO: 747650 - DNA, 19 bp, Mus musculus
  siRNA target sequence for 4931406C07Rik (NM_133732.1,322-340).
ggaggtgtgccttacttat

SEQ ID NO: 747651 - DNA, 19 bp, Mus musculus
  siRNA target sequence for 4931406C07Rik (NM_133732.1,370-388).
gacctaaatgaaattgcaa

SEQ ID NO: 747652 - DNA, 19 bp, Mus musculus
  siRNA target sequence for 4931406C07Rik (NM_133732.1,446-464).
cgcttgggttcaattctga

SEQ ID NO: 747653 - DNA, 19 bp, Mus musculus
  siRNA target sequence for 4931406C07Rik (NM_133732.1,468-486).
catgccaattgttcaaaca

SEQ ID NO: 747654 - DNA, 19 bp, Mus musculus
  siRNA target sequence for 4931406C07Rik (NM_133732.1,505-523).
cctgtgaatggaagttact

SEQ ID NO: 747655 - DNA, 19 bp, Mus musculus
  siRNA target sequence for 4931406C07Rik (NM_133732.1,551-569).
cgtgcctgctggagaaata

SEQ ID NO: 747656 - DNA, 19 bp, Mus musculus
  siRNA target sequence for 4931406C07Rik (NM_133732.1,561-579).
ggagaaatacagccaaaaa

SEQ ID NO: 747657 - DNA, 19 bp, Mus musculus
  siRNA target sequence for 4931406C07Rik (NM_133732.1,596-614).
gtgcactactggctaatct

SEQ ID NO: 747658 - DNA, 19 bp, Mus musculus
  siRNA target sequence for 4931406C07Rik (NM_133732.1,598-616).
gcactactggctaatcttt

SEQ ID NO: 747659 - DNA, 19 bp, Mus musculus
  siRNA target sequence for 4931406C07Rik (NM_133732.1,599-617).
cactactggctaatctttt

SEQ ID NO: 747660 - DNA, 19 bp, Mus musculus
  siRNA target sequence for 4931406C07Rik (NM_133732.1,789-807).
catgcctgcagagttttct

SEQ ID NO: 747661 - DNA, 19 bp, Mus musculus
  siRNA target sequence for 4931406C07Rik (NM_133732.1,923-941).
gactggagcacacacattt

SEQ ID NO: 747662 - DNA, 19 bp, Mus musculus
  siRNA target sequence for 4931406C07Rik (NM_133732.1,925-943).
ctggagcacacacatttct

SEQ ID NO: 747663 - DNA, 19 bp, Mus musculus
  siRNA target sequence for 4931406C07Rik (NM_133732.1,964-982).
ggacactaccactacgata

SEQ ID NO: 747664 - DNA, 19 bp, Mus musculus
  siRNA target sequence for 4931406C07Rik (NM_133732.1,1029-1047).
gttcctctatcgcattgat

SEQ ID NO: 747665 - DNA, 19 bp, Mus musculus
  siRNA target sequence for 9030425E11Rik (NM_133733.2,543-561).
ggaaccaaaaagtggttat

SEQ ID NO: 747666 - DNA, 19 bp, Mus musculus
  siRNA target sequence for 9030425E11Rik (NM_133733.2,842-860).
ggaactaagcccattgtgt

SEQ ID NO: 747667 - DNA, 19 bp, Mus musculus
  siRNA target sequence for 9030425E11Rik (NM_133733.2,911-929).
cccaaatccagaattgatt

SEQ ID NO: 747668 - DNA, 19 bp, Mus musculus
  siRNA target sequence for 9030425E11Rik (NM_133733.2,912-930).
ccaaatccagaattgatta

SEQ ID NO: 747669 - DNA, 19 bp, Mus musculus
  siRNA target sequence for 9030425E11Rik (NM_133733.2,1109-1127).
ctcattttcctcctgatat

SEQ ID NO: 747670 - DNA, 19 bp, Mus musculus
  siRNA target sequence for 9030425E11Rik (NM_133733.2,1129-1147).
gctgctaatacgaaggaaa

SEQ ID NO: 747671 - DNA, 19 bp, Mus musculus
  siRNA target sequence for 9030425E11Rik (NM_133733.2,1130-1148).
ctgctaatacgaaggaaaa

SEQ ID NO: 747672 - DNA, 19 bp, Mus musculus
  siRNA target sequence for 9030425E11Rik (NM_133733.2,1133-1151).
ctaatacgaaggaaaagca

SEQ ID NO: 747673 - DNA, 19 bp, Mus musculus
  siRNA target sequence for 9030425E11Rik (NM_133733.2,1395-1413).
gaggttctgaaccaaagaa

SEQ ID NO: 747674 - DNA, 19 bp, Mus musculus
  siRNA target sequence for Wdr23 (NM_133734.1,91-109).
cggatccgggtccttagaa

SEQ ID NO: 747675 - DNA, 19 bp, Mus musculus
  siRNA target sequence for Wdr23 (NM_133734.1,243-261).
gaagaggtgcagcaaattt

SEQ ID NO: 747676 - DNA, 19 bp, Mus musculus
  siRNA target sequence for Wdr23 (NM_133734.1,246-264).
gaggtgcagcaaatttaca

SEQ ID NO: 747677 - DNA, 19 bp, Mus musculus
  siRNA target sequence for Wdr23 (NM_133734.1,318-336).
gtcgccttggagatcgata

SEQ ID NO: 747678 - DNA, 19 bp, Mus musculus
  siRNA target sequence for Wdr23 (NM_133734.1,320-338).
cgccttggagatcgatata

SEQ ID NO: 747679 - DNA, 19 bp, Mus musculus
  siRNA target sequence for Wdr23 (NM_133734.1,321-339).
gccttggagatcgatataa

SEQ ID NO: 747680 - DNA, 19 bp, Mus musculus
  siRNA target sequence for Wdr23 (NM_133734.1,367-385).
ccgggagctggaatacaat

SEQ ID NO: 747681 - DNA, 19 bp, Mus musculus
  siRNA target sequence for Wdr23 (NM_133734.1,371-389).
gagctggaatacaatgaga

SEQ ID NO: 747682 - DNA, 19 bp, Mus musculus
  siRNA target sequence for Wdr23 (NM_133734.1,438-456).
ctgcgctgcagcagagttt

SEQ ID NO: 747683 - DNA, 19 bp, Mus musculus
  siRNA target sequence for Wdr23 (NM_133734.1,451-469).
gagttttccgcagatgtta

SEQ ID NO: 747684 - DNA, 19 bp, Mus musculus
  siRNA target sequence for Wdr23 (NM_133734.1,528-546).
gagtgatgtctcacttctt

SEQ ID NO: 747685 - DNA, 19 bp, Mus musculus
  siRNA target sequence for Wdr23 (NM_133734.1,554-572).
gatctaagcttcactgata

SEQ ID NO: 747686 - DNA, 19 bp, Mus musculus
  siRNA target sequence for Wdr23 (NM_133734.1,595-613).
cggcatctacagcaaagat

SEQ ID NO: 747687 - DNA, 19 bp, Mus musculus
  siRNA target sequence for Wdr23 (NM_133734.1,772-790).
cagctggtctgactacatt

SEQ ID NO: 747688 - DNA, 19 bp, Mus musculus
  siRNA target sequence for Wdr23 (NM_133734.1,774-792).
gctggtctgactacattca

SEQ ID NO: 747689 - DNA, 19 bp, Mus musculus
  siRNA target sequence for Wdr23 (NM_133734.1,777-795).
ggtctgactacattcatat

SEQ ID NO: 747690 - DNA, 19 bp, Mus musculus
  siRNA target sequence for Wdr23 (NM_133734.1,920-938).
gatggctgcctatatgtct

SEQ ID NO: 747691 - DNA, 19 bp, Mus musculus
  siRNA target sequence for Wdr23 (NM_133734.1,924-942).
gctgcctatatgtctttga

SEQ ID NO: 747692 - DNA, 19 bp, Mus musculus
  siRNA target sequence for Wdr23 (NM_133734.1,935-953).
gtctttgaccgagaacaaa

SEQ ID NO: 747693 - DNA, 19 bp, Mus musculus
  siRNA target sequence for Wdr23 (NM_133734.1,978-996).
ctcatgaggacgatgtgaa

SEQ ID NO: 747694 - DNA, 19 bp, Mus musculus
  siRNA target sequence for Wdr23 (NM_133734.1,1001-1019).
gtggcctttgctgacataa

SEQ ID NO: 747695 - DNA, 19 bp, Mus musculus
  siRNA target sequence for Wdr23 (NM_133734.1,1129-1147).
ggatggcatcacctttatt

SEQ ID NO: 747696 - DNA, 19 bp, Mus musculus
  siRNA target sequence for Wdr23 (NM_133734.1,1185-1203).
ccaaagatcagaccattaa

SEQ ID NO: 747697 - DNA, 19 bp, Mus musculus
  siRNA target sequence for Wdr23 (NM_133734.1,1211-1229).
gatatcaggcgcttttcca

SEQ ID NO: 747698 - DNA, 19 bp, Mus musculus
  siRNA target sequence for Wdr23 (NM_133734.1,1413-1431).
gcaccggccagcagttcat

SEQ ID NO: 747699 - DNA, 19 bp, Mus musculus
  siRNA target sequence for Wdr23 (NM_133734.1,1416-1434).
ccggccagcagttcatcta

SEQ ID NO: 747700 - DNA, 19 bp, Mus musculus
  siRNA target sequence for Wdr23 (NM_133734.1,1418-1436).
ggccagcagttcatctaca

SEQ ID NO: 747701 - DNA, 19 bp, Mus musculus
  siRNA target sequence for Wdr23 (NM_133734.1,1474-1492).
cttgagcggccacattgtt

SEQ ID NO: 747702 - DNA, 19 bp, Mus musculus
  siRNA target sequence for Wdr23 (NM_133734.1,1479-1497).
gcggccacattgttaagaa

SEQ ID NO: 747703 - DNA, 19 bp, Mus musculus
  siRNA target sequence for Wdr23 (NM_133734.1,1536-1554).
ggcatccctttgaagaaaa

SEQ ID NO: 747704 - DNA, 19 bp, Mus musculus
  siRNA target sequence for Wdr23 (NM_133734.1,1538-1556).
catccctttgaagaaaaga

SEQ ID NO: 747705 - DNA, 19 bp, Mus musculus
  siRNA target sequence for 1110069M14Rik (NM_133735.1,705-723).
ccctcggatgccacataca

SEQ ID NO: 747706 - DNA, 19 bp, Mus musculus
  siRNA target sequence for 1110069M14Rik (NM_133735.1,819-837).
cagctcaacctgaaaacgt

SEQ ID NO: 747707 - DNA, 19 bp, Mus musculus
  siRNA target sequence for 1110069M14Rik (NM_133735.1,821-839).
gctcaacctgaaaacgtat

SEQ ID NO: 747708 - DNA, 19 bp, Mus musculus
  siRNA target sequence for 1110069M14Rik (NM_133735.1,824-842).
caacctgaaaacgtatcat

SEQ ID NO: 747709 - DNA, 19 bp, Mus musculus
  siRNA target sequence for 1110069M14Rik (NM_133735.1,1658-1676).
caacacgctgataaggaaa

SEQ ID NO: 747710 - DNA, 19 bp, Mus musculus
  siRNA target sequence for 1110069M14Rik (NM_133735.1,1746-1764).
cccaatcttcggactttct

SEQ ID NO: 747711 - DNA, 19 bp, Mus musculus
  siRNA target sequence for 1110069M14Rik (NM_133735.1,1840-1858).
gccctaacatccacatcta

SEQ ID NO: 747712 - DNA, 19 bp, Mus musculus
  siRNA target sequence for 1110069M14Rik (NM_133735.1,2004-2022).
gaccggtacaaaggaaaaa

SEQ ID NO: 747713 - DNA, 19 bp, Mus musculus
  siRNA target sequence for 1110069M14Rik (NM_133735.1,2043-2061).
gatggctttcgggcttatt

SEQ ID NO: 747714 - DNA, 19 bp, Mus musculus
  siRNA target sequence for 1700003F10Rik (NM_133737.1,616-634).
ccctaacgggaagattgtt

SEQ ID NO: 747715 - DNA, 19 bp, Mus musculus
  siRNA target sequence for 1700003F10Rik (NM_133737.1,650-668).
cgtatccagaccaaaatca

SEQ ID NO: 747716 - DNA, 19 bp, Mus musculus
  siRNA target sequence for 1700003F10Rik (NM_133737.1,651-669).
gtatccagaccaaaatcaa

SEQ ID NO: 747717 - DNA, 19 bp, Mus musculus
  siRNA target sequence for 1700003F10Rik (NM_133737.1,658-676).
gaccaaaatcaaagatctt

SEQ ID NO: 747718 - DNA, 19 bp, Mus musculus
  siRNA target sequence for 1700003F10Rik (NM_133737.1,741-759).
ggacaggcatagcactttt

SEQ ID NO: 747719 - DNA, 19 bp, Mus musculus
  siRNA target sequence for 1700003F10Rik (NM_133737.1,744-762).
caggcatagcacttttgta

SEQ ID NO: 747720 - DNA, 19 bp, Mus musculus
  siRNA target sequence for 1700003F10Rik (NM_133737.1,846-864).
gtggtcgcagagtcacttt

SEQ ID NO: 747721 - DNA, 19 bp, Mus musculus
  siRNA target sequence for 1700003F10Rik (NM_133737.1,891-909).
ctgtgggagctgtgatata

SEQ ID NO: 747722 - DNA, 19 bp, Mus musculus
  siRNA target sequence for 1700003F10Rik (NM_133737.1,897-915).
gagctgtgatatatcataa

SEQ ID NO: 747723 - DNA, 19 bp, Mus musculus
  siRNA target sequence for 1700003F10Rik (NM_133737.1,945-963).
gcatcacaaaacttctaca

SEQ ID NO: 747724 - DNA, 19 bp, Mus musculus
  siRNA target sequence for 1700003F10Rik (NM_133737.1,1048-1066).
gtacctgaacacagagatt

SEQ ID NO: 747725 - DNA, 19 bp, Mus musculus
  siRNA target sequence for 1700003F10Rik (NM_133737.1,1100-1118).
gaggtagtcagtgctatta

SEQ ID NO: 747726 - DNA, 19 bp, Mus musculus
  siRNA target sequence for 1700003F10Rik (NM_133737.1,1102-1120).
ggtagtcagtgctattatt

SEQ ID NO: 747727 - DNA, 19 bp, Mus musculus
  siRNA target sequence for 1700003F10Rik (NM_133737.1,1123-1141).
gtcgggaaagagtctatca

SEQ ID NO: 747728 - DNA, 19 bp, Mus musculus
  siRNA target sequence for 1700003F10Rik (NM_133737.1,1262-1280).
gtggaccaagaaaccttaa

SEQ ID NO: 747729 - DNA, 19 bp, Mus musculus
  siRNA target sequence for 1700003F10Rik (NM_133737.1,1288-1306).
ggtgaaacccagcattgat

SEQ ID NO: 747730 - DNA, 19 bp, Mus musculus
  siRNA target sequence for 1700003F10Rik (NM_133737.1,1327-1345).
ccgatctggaaattatcca

SEQ ID NO: 747731 - DNA, 19 bp, Mus musculus
  siRNA target sequence for 1700003F10Rik (NM_133737.1,1328-1346).
cgatctggaaattatccat

SEQ ID NO: 747732 - DNA, 19 bp, Mus musculus
  siRNA target sequence for 1700003F10Rik (NM_133737.1,1334-1352).
ggaaattatccatcatcat

SEQ ID NO: 747733 - DNA, 19 bp, Mus musculus
  siRNA target sequence for 1700003F10Rik (NM_133737.1,1335-1353).
gaaattatccatcatcatt

SEQ ID NO: 747734 - DNA, 19 bp, Mus musculus
  siRNA target sequence for 1700003F10Rik (NM_133737.1,1350-1368).
cattaagcaatgaaacaga

SEQ ID NO: 747735 - DNA, 19 bp, Mus musculus
  siRNA target sequence for 1700003F10Rik (NM_133737.1,1356-1374).
gcaatgaaacagatcgatt

SEQ ID NO: 747736 - DNA, 19 bp, Mus musculus
  siRNA target sequence for 1700003F10Rik (NM_133737.1,1421-1439).
caggcataccaggttttta

SEQ ID NO: 747737 - DNA, 19 bp, Mus musculus
  siRNA target sequence for 1700003F10Rik (NM_133737.1,1425-1443).
cataccaggtttttaagga

SEQ ID NO: 747738 - DNA, 19 bp, Mus musculus
  siRNA target sequence for 1700003F10Rik (NM_133737.1,1468-1486).
ggagtgtagcgatgtgatt

SEQ ID NO: 747739 - DNA, 19 bp, Mus musculus
  siRNA target sequence for 1700003F10Rik (NM_133737.1,1469-1487).
gagtgtagcgatgtgattt

SEQ ID NO: 747740 - DNA, 19 bp, Mus musculus
  siRNA target sequence for 1700003F10Rik (NM_133737.1,1496-1514).
ggtctgctccggaaaggtt

SEQ ID NO: 747741 - DNA, 19 bp, Mus musculus
  siRNA target sequence for 1700003F10Rik (NM_133737.1,1497-1515).
gtctgctccggaaaggtta

SEQ ID NO: 747742 - DNA, 19 bp, Mus musculus
  siRNA target sequence for 1700003F10Rik (NM_133737.1,1502-1520).
ctccggaaaggttatggaa

SEQ ID NO: 747743 - DNA, 19 bp, Mus musculus
  siRNA target sequence for 1700003F10Rik (NM_133737.1,1536-1554).
ctggcaatggctattcctt

SEQ ID NO: 747744 - DNA, 19 bp, Mus musculus
  siRNA target sequence for 1700003F10Rik (NM_133737.1,1569-1587).
gcctgacgcaggataagaa

SEQ ID NO: 747745 - DNA, 19 bp, Mus musculus
  siRNA target sequence for 1700003F10Rik (NM_133737.1,1571-1589).
ctgacgcaggataagaagt

SEQ ID NO: 747746 - DNA, 19 bp, Mus musculus
  siRNA target sequence for 1700003F10Rik (NM_133737.1,1594-1612).
ctatcgagcttgtaagttt

SEQ ID NO: 747747 - DNA, 19 bp, Mus musculus
  siRNA target sequence for 2310061G07Rik (NM_133743.1,638-656).
gacgggtccaggattcaca

SEQ ID NO: 747748 - DNA, 19 bp, Mus musculus
  siRNA target sequence for 2310061G07Rik (NM_133743.1,826-844).
cgaccacctccatcatcaa

SEQ ID NO: 747749 - DNA, 19 bp, Mus musculus
  siRNA target sequence for 2310061G07Rik (NM_133743.1,978-996).
caccaagaccgcagcaata

SEQ ID NO: 747750 - DNA, 19 bp, Mus musculus
  siRNA target sequence for 2600016J21Rik (NM_133744.2,175-193).
ctccacggcagggaagaaa

SEQ ID NO: 747751 - DNA, 19 bp, Mus musculus
  siRNA target sequence for 2600016J21Rik (NM_133744.2,205-223).
ggccctgcttgtgtttaat

SEQ ID NO: 747752 - DNA, 19 bp, Mus musculus
  siRNA target sequence for 2600016J21Rik (NM_133744.2,295-313).
cttccaaccgaccattctt

SEQ ID NO: 747753 - DNA, 19 bp, Mus musculus
  siRNA target sequence for 2600016J21Rik (NM_133744.2,326-344).
gtctatggttatagttcat

SEQ ID NO: 747754 - DNA, 19 bp, Mus musculus
  siRNA target sequence for 2600016J21Rik (NM_133744.2,403-421).
cacgtcacttcccaaaact

SEQ ID NO: 747755 - DNA, 19 bp, Mus musculus
  siRNA target sequence for 2600016J21Rik (NM_133744.2,562-580).
caacagcagtggtacaaca

SEQ ID NO: 747756 - DNA, 19 bp, Mus musculus
  siRNA target sequence for 2600016J21Rik (NM_133744.2,666-684).
ctccctgcttggacgttaa

SEQ ID NO: 747757 - DNA, 19 bp, Mus musculus
  siRNA target sequence for 2600016J21Rik (NM_133744.2,669-687).
cctgcttggacgttaagca

SEQ ID NO: 747758 - DNA, 19 bp, Mus musculus
  siRNA target sequence for 2600016J21Rik (NM_133744.2,762-780).
ccaaagcaccccgaaaaat

SEQ ID NO: 747759 - DNA, 19 bp, Mus musculus
  siRNA target sequence for 2600016J21Rik (NM_133744.2,786-804).
gcaagggcctcaaacatct

SEQ ID NO: 747760 - DNA, 19 bp, Mus musculus
  siRNA target sequence for 2600016J21Rik (NM_133744.2,915-933).
catctcaaaccctgatcaa

SEQ ID NO: 747761 - DNA, 19 bp, Mus musculus
  siRNA target sequence for 2600016J21Rik (NM_133744.2,1062-1080).
caaaagacaaggtaatcca

SEQ ID NO: 747762 - DNA, 19 bp, Mus musculus
  siRNA target sequence for 2600016J21Rik (NM_133744.2,1276-1294).
gcctggaacggcaaaacct

SEQ ID NO: 747763 - DNA, 19 bp, Mus musculus
  siRNA target sequence for 2600016J21Rik (NM_133744.2,1295-1313).
cgaaagtcccagaccataa

SEQ ID NO: 747764 - DNA, 19 bp, Mus musculus
  siRNA target sequence for 2600016J21Rik (NM_133744.2,1296-1314).
gaaagtcccagaccataaa

SEQ ID NO: 747765 - DNA, 19 bp, Mus musculus
  siRNA target sequence for 2600016J21Rik (NM_133744.2,1300-1318).
gtcccagaccataaaggta

SEQ ID NO: 747766 - DNA, 19 bp, Mus musculus
  siRNA target sequence for 2600016J21Rik (NM_133744.2,1360-1378).
gcagatcctccgtgtgaat

SEQ ID NO: 747767 - DNA, 19 bp, Mus musculus
  siRNA target sequence for 2600016J21Rik (NM_133744.2,1400-1418).
cagcccttgctaccatttt

SEQ ID NO: 747768 - DNA, 19 bp, Mus musculus
  siRNA target sequence for 2810048G17Rik (NM_133746.2,604-622).
gagcaaggatgtgatgatt

SEQ ID NO: 747769 - DNA, 19 bp, Mus musculus
  siRNA target sequence for 2810048G17Rik (NM_133746.2,606-624).
gcaaggatgtgatgatttt

SEQ ID NO: 747770 - DNA, 19 bp, Mus musculus
  siRNA target sequence for 2810048G17Rik (NM_133746.2,718-736).
gtatggactgacagcaatt

SEQ ID NO: 747771 - DNA, 19 bp, Mus musculus
  siRNA target sequence for 2810048G17Rik (NM_133746.2,761-779).
cttatcggagtcattctca

SEQ ID NO: 747772 - DNA, 19 bp, Mus musculus
  siRNA target sequence for 2810048G17Rik (NM_133746.2,923-941).
cgaggggaggcctatgtct

SEQ ID NO: 747773 - DNA, 19 bp, Mus musculus
  siRNA target sequence for 2810048G17Rik (NM_133746.2,942-960).
gtgctctcagtgagtttgt

SEQ ID NO: 747774 - DNA, 19 bp, Mus musculus
  siRNA target sequence for 2810048G17Rik (NM_133746.2,973-991).
gctcacagctggggataaa

SEQ ID NO: 747775 - DNA, 19 bp, Mus musculus
  siRNA target sequence for 2810048G17Rik (NM_133746.2,1081-1099).
cagccgcaggctcaagtat

SEQ ID NO: 747776 - DNA, 19 bp, Mus musculus
  siRNA target sequence for 2810048G17Rik (NM_133746.2,1083-1101).
gccgcaggctcaagtatga

SEQ ID NO: 747777 - DNA, 19 bp, Mus musculus
  siRNA target sequence for 2810048G17Rik (NM_133746.2,1085-1103).
cgcaggctcaagtatgagt

SEQ ID NO: 747778 - DNA, 19 bp, Mus musculus
  siRNA target sequence for 2810048G17Rik (NM_133746.2,1288-1306).
caacgtgcgccgtttcttt

SEQ ID NO: 747779 - DNA, 19 bp, Mus musculus
  siRNA target sequence for 2810405J04Rik (NM_133747.1,83-101).
ggagtcgttggaagatcta

SEQ ID NO: 747780 - DNA, 19 bp, Mus musculus
  siRNA target sequence for 2810405J04Rik (NM_133747.1,88-106).
cgttggaagatctaggtta

SEQ ID NO: 747781 - DNA, 19 bp, Mus musculus
  siRNA target sequence for 2810405J04Rik (NM_133747.1,103-121).
gttacaagggcccattgtt

SEQ ID NO: 747782 - DNA, 19 bp, Mus musculus
  siRNA target sequence for 2810405J04Rik (NM_133747.1,163-181).
cttccccggagtttaccaa

SEQ ID NO: 747783 - DNA, 19 bp, Mus musculus
  siRNA target sequence for 2810405J04Rik (NM_133747.1,190-208).
cttggctggtgtctgaatt

SEQ ID NO: 747784 - DNA, 19 bp, Mus musculus
  siRNA target sequence for 2810405J04Rik (NM_133747.1,204-222).
gaattaagagtcctttgta

SEQ ID NO: 747785 - DNA, 19 bp, Mus musculus
  siRNA target sequence for 2810405J04Rik (NM_133747.1,211-229).
gagtcctttgtaaactaga

SEQ ID NO: 747786 - DNA, 19 bp, Mus musculus
  siRNA target sequence for 2810405J04Rik (NM_133747.1,256-274).
caagcgaagctgaagagtt

SEQ ID NO: 747787 - DNA, 19 bp, Mus musculus
  siRNA target sequence for 2810405J04Rik (NM_133747.1,294-312).
ctacttggggagatgaact

SEQ ID NO: 747788 - DNA, 19 bp, Mus musculus
  siRNA target sequence for 2810405J04Rik (NM_133747.1,346-364).
ccaagcgccttcttgttga

SEQ ID NO: 747789 - DNA, 19 bp, Mus musculus
  siRNA target sequence for 2810405J04Rik (NM_133747.1,429-447).
gtgaatgctcctccaaaaa

SEQ ID NO: 747790 - DNA, 19 bp, Mus musculus
  siRNA target sequence for 2810405J04Rik (NM_133747.1,464-482).
cggtagtgaggtctttcaa

SEQ ID NO: 747791 - DNA, 19 bp, Mus musculus
  siRNA target sequence for 2810405J04Rik (NM_133747.1,485-503).
gttgaaaggcatatgtatt

SEQ ID NO: 747792 - DNA, 19 bp, Mus musculus
  siRNA target sequence for 2810405J04Rik (NM_133747.1,517-535).
ccaaacctccagccaatat

SEQ ID NO: 747793 - DNA, 19 bp, Mus musculus
  siRNA target sequence for 2810405J04Rik (NM_133747.1,518-536).
caaacctccagccaatata

SEQ ID NO: 747794 - DNA, 19 bp, Mus musculus
  siRNA target sequence for 2810405J04Rik (NM_133747.1,522-540).
cctccagccaatataacta

SEQ ID NO: 747795 - DNA, 19 bp, Mus musculus
  siRNA target sequence for 2810405J04Rik (NM_133747.1,523-541).
ctccagccaatataactat

SEQ ID NO: 747796 - DNA, 19 bp, Mus musculus
  siRNA target sequence for 2810405J04Rik (NM_133747.1,557-575).
cgggattgagaaaaaatta

SEQ ID NO: 747797 - DNA, 19 bp, Mus musculus
  siRNA target sequence for 2810405J04Rik (NM_133747.1,589-607).
caaaagttccgcctaatca

SEQ ID NO: 747798 - DNA, 19 bp, Mus musculus
  siRNA target sequence for 2810405J04Rik (NM_133747.1,613-631).
gaaagccgttactgaagaa

SEQ ID NO: 747799 - DNA, 19 bp, Mus musculus
  siRNA target sequence for 2810405J04Rik (NM_133747.1,659-677).
gatagaagccattaaccaa

SEQ ID NO: 747800 - DNA, 19 bp, Mus musculus
  siRNA target sequence for 2810405J04Rik (NM_133747.1,674-692).
ccaagccatagccaatgaa

SEQ ID NO: 747801 - DNA, 19 bp, Mus musculus
  siRNA target sequence for 2810405J04Rik (NM_133747.1,675-693).
caagccatagccaatgaat

SEQ ID NO: 747802 - DNA, 19 bp, Mus musculus
  siRNA target sequence for 2810405J04Rik (NM_133747.1,816-834).
ctcttgtcgcctaaaggta

SEQ ID NO: 747803 - DNA, 19 bp, Mus musculus
  siRNA target sequence for 2810405J04Rik (NM_133747.1,865-883).
gacaagacttgtcaaagat

SEQ ID NO: 747804 - DNA, 19 bp, Mus musculus
  siRNA target sequence for 2810405J04Rik (NM_133747.1,867-885).
caagacttgtcaaagattt

SEQ ID NO: 747805 - DNA, 19 bp, Mus musculus
  siRNA target sequence for 2810405J04Rik (NM_133747.1,870-888).
gacttgtcaaagattttaa

SEQ ID NO: 747806 - DNA, 19 bp, Mus musculus
  siRNA target sequence for 2810405J04Rik (NM_133747.1,896-914).
cagtgggtccataagagaa

SEQ ID NO: 747807 - DNA, 19 bp, Mus musculus
  siRNA target sequence for 2810405J04Rik (NM_133747.1,917-935).
gactgcctgtgccattaat

SEQ ID NO: 747808 - DNA, 19 bp, Mus musculus
  siRNA target sequence for 2810405J04Rik (NM_133747.1,919-937).
ctgcctgtgccattaataa

SEQ ID NO: 747809 - DNA, 19 bp, Mus musculus
  siRNA target sequence for 2810405J04Rik (NM_133747.1,922-940).
cctgtgccattaataaggt

SEQ ID NO: 747810 - DNA, 19 bp, Mus musculus
  siRNA target sequence for 2810405J04Rik (NM_133747.1,962-980).
cagaggcggcagacctaat

SEQ ID NO: 747811 - DNA, 19 bp, Mus musculus
  siRNA target sequence for 2810405J04Rik (NM_133747.1,964-982).
gaggcggcagacctaatga

SEQ ID NO: 747812 - DNA, 19 bp, Mus musculus
  siRNA target sequence for 2810405J04Rik (NM_133747.1,966-984).
ggcggcagacctaatgaaa

SEQ ID NO: 747813 - DNA, 19 bp, Mus musculus
  siRNA target sequence for 2810405J04Rik (NM_133747.1,967-985).
gcggcagacctaatgaaat

SEQ ID NO: 747814 - DNA, 19 bp, Mus musculus
  siRNA target sequence for 2810405J04Rik (NM_133747.1,968-986).
cggcagacctaatgaaatt

SEQ ID NO: 747815 - DNA, 19 bp, Mus musculus
  siRNA target sequence for 2810405J04Rik (NM_133747.1,970-988).
gcagacctaatgaaattga

SEQ ID NO: 747816 - DNA, 19 bp, Mus musculus
  siRNA target sequence for 2810405J04Rik (NM_133747.1,1007-1025).
gccaccgtggcagaaaaga

SEQ ID NO: 747817 - DNA, 19 bp, Mus musculus
  siRNA target sequence for 2810405J04Rik (NM_133747.1,1362-1380).
ggataccagcaagacaata

SEQ ID NO: 747818 - DNA, 19 bp, Mus musculus
  siRNA target sequence for 2810405J04Rik (NM_133747.1,1370-1388).
gcaagacaatagataccaa

SEQ ID NO: 747819 - DNA, 19 bp, Mus musculus
  siRNA target sequence for 2810405J04Rik (NM_133747.1,1489-1507).
gagggagccagacttatca

SEQ ID NO: 747820 - DNA, 19 bp, Mus musculus
  siRNA target sequence for 2810405J04Rik (NM_133747.1,1539-1557).
catggaggctatcagtata

SEQ ID NO: 747821 - DNA, 19 bp, Mus musculus
  siRNA target sequence for 2810405J04Rik (NM_133747.1,1547-1565).
ctatcagtatagtcattct

SEQ ID NO: 747822 - DNA, 19 bp, Mus musculus
  siRNA target sequence for 2810405J04Rik (NM_133747.1,1553-1571).
gtatagtcattctggattt

SEQ ID NO: 747823 - DNA, 19 bp, Mus musculus
  siRNA target sequence for 2810405J04Rik (NM_133747.1,1575-1593).
caaggaagacattatacta

SEQ ID NO: 747824 - DNA, 19 bp, Mus musculus
  siRNA target sequence for 2900064A13Rik (NM_133749.1,67-85).
ccgtcctgcttctgttatt

SEQ ID NO: 747825 - DNA, 19 bp, Mus musculus
  siRNA target sequence for 2900064A13Rik (NM_133749.1,68-86).
cgtcctgcttctgttatta

SEQ ID NO: 747826 - DNA, 19 bp, Mus musculus
  siRNA target sequence for 2900064A13Rik (NM_133749.1,69-87).
gtcctgcttctgttattat

SEQ ID NO: 747827 - DNA, 19 bp, Mus musculus
  siRNA target sequence for 2900064A13Rik (NM_133749.1,152-170).
cggcctgggagatcgtttt

SEQ ID NO: 747828 - DNA, 19 bp, Mus musculus
  siRNA target sequence for 2900064A13Rik (NM_133749.1,153-171).
ggcctgggagatcgtttta

SEQ ID NO: 747829 - DNA, 19 bp, Mus musculus
  siRNA target sequence for 2900064A13Rik (NM_133749.1,154-172).
gcctgggagatcgttttaa

SEQ ID NO: 747830 - DNA, 19 bp, Mus musculus
  siRNA target sequence for 2900064A13Rik (NM_133749.1,156-174).
ctgggagatcgttttaaga

SEQ ID NO: 747831 - DNA, 19 bp, Mus musculus
  siRNA target sequence for 2900064A13Rik (NM_133749.1,280-298).
ggagctttgtggttcatga

SEQ ID NO: 747832 - DNA, 19 bp, Mus musculus
  siRNA target sequence for 2900064A13Rik (NM_133749.1,304-322).
cctctggctcttatgtagt

SEQ ID NO: 747833 - DNA, 19 bp, Mus musculus
  siRNA target sequence for 2900064A13Rik (NM_133749.1,334-352).
ctcctgcttacaagtttga

SEQ ID NO: 747834 - DNA, 19 bp, Mus musculus
  siRNA target sequence for 2900064A13Rik (NM_133749.1,354-372).
cctgtccgagtcgatatca

SEQ ID NO: 747835 - DNA, 19 bp, Mus musculus
  siRNA target sequence for 2900064A13Rik (NM_133749.1,357-375).
gtccgagtcgatatcactt

SEQ ID NO: 747836 - DNA, 19 bp, Mus musculus
  siRNA target sequence for 2900064A13Rik (NM_133749.1,360-378).
cgagtcgatatcacttcaa

SEQ ID NO: 747837 - DNA, 19 bp, Mus musculus
  siRNA target sequence for 2900064A13Rik (NM_133749.1,361-379).
gagtcgatatcacttcaaa

SEQ ID NO: 747838 - DNA, 19 bp, Mus musculus
  siRNA target sequence for 2900064A13Rik (NM_133749.1,365-383).
cgatatcacttcaaaagga

SEQ ID NO: 747839 - DNA, 19 bp, Mus musculus
  siRNA target sequence for 2900064A13Rik (NM_133749.1,389-407).
gcgagcaagatatgtgaat

SEQ ID NO: 747840 - DNA, 19 bp, Mus musculus
  siRNA target sequence for 2900064A13Rik (NM_133749.1,391-409).
gagcaagatatgtgaatta

SEQ ID NO: 747841 - DNA, 19 bp, Mus musculus
  siRNA target sequence for 2900064A13Rik (NM_133749.1,393-411).
gcaagatatgtgaattaca

SEQ ID NO: 747842 - DNA, 19 bp, Mus musculus
  siRNA target sequence for 2900064A13Rik (NM_133749.1,394-412).
caagatatgtgaattacat

SEQ ID NO: 747843 - DNA, 19 bp, Mus musculus
  siRNA target sequence for 2900064A13Rik (NM_133749.1,397-415).
gatatgtgaattacatcaa

SEQ ID NO: 747844 - DNA, 19 bp, Mus musculus
  siRNA target sequence for 2900064A13Rik (NM_133749.1,516-534).
ctgatgaacccaatggtta

SEQ ID NO: 747845 - DNA, 19 bp, Mus musculus
  siRNA target sequence for 2900064A13Rik (NM_133749.1,542-560).
ggttctcccgttattgata

SEQ ID NO: 747846 - DNA, 19 bp, Mus musculus
  siRNA target sequence for 2900064A13Rik (NM_133749.1,573-591).
cctaaagtggtgaacacaa

SEQ ID NO: 747847 - DNA, 19 bp, Mus musculus
  siRNA target sequence for 2900064A13Rik (NM_133749.1,701-719).
ctctggcaaatctagtagt

SEQ ID NO: 747848 - DNA, 19 bp, Mus musculus
  siRNA target sequence for 3110048E14Rik (NM_133750.1,110-128).
gagcctcattagaaagcaa

SEQ ID NO: 747849 - DNA, 19 bp, Mus musculus
  siRNA target sequence for 3110048E14Rik (NM_133750.1,327-345).
gatctgatccggaagatgt

SEQ ID NO: 747850 - DNA, 19 bp, Mus musculus
  siRNA target sequence for 3110048E14Rik (NM_133750.1,581-599).
gtgggcaagaggccatatt

SEQ ID NO: 747851 - DNA, 19 bp, Mus musculus
  siRNA target sequence for 3110048E14Rik (NM_133750.1,583-601).
gggcaagaggccatattaa

SEQ ID NO: 747852 - DNA, 19 bp, Mus musculus
  siRNA target sequence for 3110048E14Rik (NM_133750.1,585-603).
gcaagaggccatattaagt

SEQ ID NO: 747853 - DNA, 19 bp, Mus musculus
  siRNA target sequence for 3110048E14Rik (NM_133750.1,656-674).
ggatccatcgggctataaa

SEQ ID NO: 747854 - DNA, 19 bp, Mus musculus
  siRNA target sequence for 3110048E14Rik (NM_133750.1,760-778).
cacttcgggaccagatatt

SEQ ID NO: 747855 - DNA, 19 bp, Mus musculus
  siRNA target sequence for 3110048E14Rik (NM_133750.1,869-887).
gcatcaggcagatatgctt

SEQ ID NO: 747856 - DNA, 19 bp, Mus musculus
  siRNA target sequence for 3110048E14Rik (NM_133750.1,884-902).
gcttttgcatggaattaaa

SEQ ID NO: 747857 - DNA, 19 bp, Mus musculus
  siRNA target sequence for 3110048E14Rik (NM_133750.1,1065-1083).
ggaattgaagtcacaaaaa

SEQ ID NO: 747858 - DNA, 19 bp, Mus musculus
  siRNA target sequence for 1700060H10Rik (NM_133751.1,463-481).
cggctgcgcacctaaggat

SEQ ID NO: 747859 - DNA, 19 bp, Mus musculus
  siRNA target sequence for 1700060H10Rik (NM_133751.1,516-534).
gaggtgatggcgactcaaa

SEQ ID NO: 747860 - DNA, 19 bp, Mus musculus
  siRNA target sequence for 1700060H10Rik (NM_133751.1,632-650).
gcggacgactgttactaca

SEQ ID NO: 747861 - DNA, 19 bp, Mus musculus
  siRNA target sequence for 1700060H10Rik (NM_133751.1,633-651).
cggacgactgttactacat

SEQ ID NO: 747862 - DNA, 19 bp, Mus musculus
  siRNA target sequence for 1700060H10Rik (NM_133751.1,878-896).
gaacaggctcagtacgaaa

SEQ ID NO: 747863 - DNA, 19 bp, Mus musculus
  siRNA target sequence for 1700060H10Rik (NM_133751.1,1157-1175).
ctgttcccgcacttgcaaa

SEQ ID NO: 747864 - DNA, 19 bp, Mus musculus
  siRNA target sequence for 1700060H10Rik (NM_133751.1,1363-1381).
gcatttactgcgactgttt

SEQ ID NO: 747865 - DNA, 19 bp, Mus musculus
  siRNA target sequence for 1700060H10Rik (NM_133751.1,1426-1444).
gaatctgaaggcactactt

SEQ ID NO: 747866 - DNA, 19 bp, Mus musculus
  siRNA target sequence for 1300002F13Rik (NM_133753.1,268-286).
gagttgctgctcaggatat

SEQ ID NO: 747867 - DNA, 19 bp, Mus musculus
  siRNA target sequence for 1300002F13Rik (NM_133753.1,282-300).
gatattcgagtcccattaa

SEQ ID NO: 747868 - DNA, 19 bp, Mus musculus
  siRNA target sequence for 1300002F13Rik (NM_133753.1,293-311).
cccattaaaaactggattt

SEQ ID NO: 747869 - DNA, 19 bp, Mus musculus
  siRNA target sequence for 1300002F13Rik (NM_133753.1,356-374).
cagtcacagtgagtttgaa

SEQ ID NO: 747870 - DNA, 19 bp, Mus musculus
  siRNA target sequence for 1300002F13Rik (NM_133753.1,429-447).
gctcaggagcacctaacaa

SEQ ID NO: 747871 - DNA, 19 bp, Mus musculus
  siRNA target sequence for 1300002F13Rik (NM_133753.1,434-452).
ggagcacctaacaactgtt

SEQ ID NO: 747872 - DNA, 19 bp, Mus musculus
  siRNA target sequence for 1300002F13Rik (NM_133753.1,523-541).
gcttgccccctcttgttat

SEQ ID NO: 747873 - DNA, 19 bp, Mus musculus
  siRNA target sequence for 1300002F13Rik (NM_133753.1,527-545).
gccccctcttgttatctca

SEQ ID NO: 747874 - DNA, 19 bp, Mus musculus
  siRNA target sequence for 1300002F13Rik (NM_133753.1,567-585).
cgtgaagaggatcaagtta

SEQ ID NO: 747875 - DNA, 19 bp, Mus musculus
  siRNA target sequence for 1300002F13Rik (NM_133753.1,568-586).
gtgaagaggatcaagttat

SEQ ID NO: 747876 - DNA, 19 bp, Mus musculus
  siRNA target sequence for 1300002F13Rik (NM_133753.1,639-657).
cttacacccattaaaagct

SEQ ID NO: 747877 - DNA, 19 bp, Mus musculus
  siRNA target sequence for 1300002F13Rik (NM_133753.1,807-825).
gactctgcgccttcagatt

SEQ ID NO: 747878 - DNA, 19 bp, Mus musculus
  siRNA target sequence for 1300002F13Rik (NM_133753.1,811-829).
ctgcgccttcagatttcaa

SEQ ID NO: 747879 - DNA, 19 bp, Mus musculus
  siRNA target sequence for 1300002F13Rik (NM_133753.1,814-832).
cgccttcagatttcaaata

SEQ ID NO: 747880 - DNA, 19 bp, Mus musculus
  siRNA target sequence for 1300002F13Rik (NM_133753.1,817-835).
cttcagatttcaaatacga

SEQ ID NO: 747881 - DNA, 19 bp, Mus musculus
  siRNA target sequence for 1300002F13Rik (NM_133753.1,859-877).
gtgggtgcggccagatcaa

SEQ ID NO: 747882 - DNA, 19 bp, Mus musculus
  siRNA target sequence for 1300002F13Rik (NM_133753.1,862-880).
ggtgcggccagatcaacta

SEQ ID NO: 747883 - DNA, 19 bp, Mus musculus
  siRNA target sequence for 1300002F13Rik (NM_133753.1,863-881).
gtgcggccagatcaactat

SEQ ID NO: 747884 - DNA, 19 bp, Mus musculus
  siRNA target sequence for 1300002F13Rik (NM_133753.1,867-885).
ggccagatcaactatgcat

SEQ ID NO: 747885 - DNA, 19 bp, Mus musculus
  siRNA target sequence for 1300002F13Rik (NM_133753.1,868-886).
gccagatcaactatgcata

SEQ ID NO: 747886 - DNA, 19 bp, Mus musculus
  siRNA target sequence for 1300002F13Rik (NM_133753.1,903-921).
gtttctgtggcagatctta

SEQ ID NO: 747887 - DNA, 19 bp, Mus musculus
  siRNA target sequence for 1300002F13Rik (NM_133753.1,1009-1027).
gaccagctgggtcatttaa

SEQ ID NO: 747888 - DNA, 19 bp, Mus musculus
  siRNA target sequence for 1300002F13Rik (NM_133753.1,1031-1049).
gccagccattcggatatct

SEQ ID NO: 747889 - DNA, 19 bp, Mus musculus
  siRNA target sequence for 1300002F13Rik (NM_133753.1,1032-1050).
ccagccattcggatatcta

SEQ ID NO: 747890 - DNA, 19 bp, Mus musculus
  siRNA target sequence for 1300002F13Rik (NM_133753.1,1211-1229).
cccgagagaacctttgtct

SEQ ID NO: 747891 - DNA, 19 bp, Mus musculus
  siRNA target sequence for 1300002F13Rik (NM_133753.1,1221-1239).
cctttgtctcggagtaact

SEQ ID NO: 747892 - DNA, 19 bp, Mus musculus
  siRNA target sequence for 1300002F13Rik (NM_133753.1,1241-1259).
ccgtaccccaagtcctaaa

SEQ ID NO: 747893 - DNA, 19 bp, Mus musculus
  siRNA target sequence for 1300002F13Rik (NM_133753.1,1307-1325).
cgctcctgaccccaagtat

SEQ ID NO: 747894 - DNA, 19 bp, Mus musculus
  siRNA target sequence for 1300002F13Rik (NM_133753.1,1311-1329).
cctgaccccaagtatgtca

SEQ ID NO: 747895 - DNA, 19 bp, Mus musculus
  siRNA target sequence for 1300002F13Rik (NM_133753.1,1384-1402).
gcatcctgcccattattga

SEQ ID NO: 747896 - DNA, 19 bp, Mus musculus
  siRNA target sequence for 1300002F13Rik (NM_133753.1,1388-1406).
cctgcccattattgaaaat

SEQ ID NO: 747897 - DNA, 19 bp, Mus musculus
  siRNA target sequence for 1300002F13Rik (NM_133753.1,1415-1433).
ggttagctcaacgcattat

SEQ ID NO: 747898 - DNA, 19 bp, Mus musculus
  siRNA target sequence for 1300002F13Rik (NM_133753.1,1420-1438).
gctcaacgcattattactt

SEQ ID NO: 747899 - DNA, 19 bp, Mus musculus
  siRNA target sequence for 1300002F13Rik (NM_133753.1,1421-1439).
ctcaacgcattattactta

SEQ ID NO: 747900 - DNA, 19 bp, Mus musculus
  siRNA target sequence for 1300002F13Rik (NM_133753.1,1423-1441).
caacgcattattacttact

SEQ ID NO: 747901 - DNA, 19 bp, Mus musculus
  siRNA target sequence for 1300002F13Rik (NM_133753.1,1453-1471).
caccgtacctggacaaata

SEQ ID NO: 747902 - DNA, 19 bp, Mus musculus
  siRNA target sequence for 1300002F13Rik (NM_133753.1,1514-1532).
ccaaattcagccattacct

SEQ ID NO: 747903 - DNA, 19 bp, Mus musculus
  siRNA target sequence for 1300002F13Rik (NM_133753.1,1568-1586).
ggcctccagaatgaaaata

SEQ ID NO: 747904 - DNA, 19 bp, Mus musculus
  siRNA target sequence for 1300002F13Rik (NM_133753.1,1599-1617).
cacgggaagcgcaaacact

SEQ ID NO: 747905 - DNA, 19 bp, Mus musculus
  siRNA target sequence for 1300002F13Rik (NM_133753.1,1601-1619).
cgggaagcgcaaacactta

SEQ ID NO: 747906 - DNA, 19 bp, Mus musculus
  siRNA target sequence for Mitc1 (NM_133761.1,131-149).
gtcgagctgagcaagagat

SEQ ID NO: 747907 - DNA, 19 bp, Mus musculus
  siRNA target sequence for Mitc1 (NM_133761.1,169-187).
caacacgacccctatatca

SEQ ID NO: 747908 - DNA, 19 bp, Mus musculus
  siRNA target sequence for Mitc1 (NM_133761.1,214-232).
gtcgccctgtacactttct

SEQ ID NO: 747909 - DNA, 19 bp, Mus musculus
  siRNA target sequence for Mitc1 (NM_133761.1,262-280).
gatatagaagggacgttat

SEQ ID NO: 747910 - DNA, 19 bp, Mus musculus
  siRNA target sequence for Mitc1 (NM_133761.1,268-286).
gaagggacgttatttgtat

SEQ ID NO: 747911 - DNA, 19 bp, Mus musculus
  siRNA target sequence for Mitc1 (NM_133761.1,294-312).
gtcagcttcgccttaccat

SEQ ID NO: 747912 - DNA, 19 bp, Mus musculus
  siRNA target sequence for Mitc1 (NM_133761.1,305-323).
cttaccatggctttaccat

SEQ ID NO: 747913 - DNA, 19 bp, Mus musculus
  siRNA target sequence for Mitc1 (NM_133761.1,349-367).
ctggttgagccagtgaata

SEQ ID NO: 747914 - DNA, 19 bp, Mus musculus
  siRNA target sequence for Mitc1 (NM_133761.1,419-437).
gtttgtcaatatacagtat

SEQ ID NO: 747915 - DNA, 19 bp, Mus musculus
  siRNA target sequence for Mitc1 (NM_133761.1,457-475).
gactgtcatcgcatagcaa

SEQ ID NO: 747916 - DNA, 19 bp, Mus musculus
  siRNA target sequence for Mitc1 (NM_133761.1,459-477).
ctgtcatcgcatagcaaaa

SEQ ID NO: 747917 - DNA, 19 bp, Mus musculus
  siRNA target sequence for Mitc1 (NM_133761.1,461-479).
gtcatcgcatagcaaaact

SEQ ID NO: 747918 - DNA, 19 bp, Mus musculus
  siRNA target sequence for Mitc1 (NM_133761.1,568-586).
gaccagaggcccatagata

SEQ ID NO: 747919 - DNA, 19 bp, Mus musculus
  siRNA target sequence for Mitc1 (NM_133761.1,674-692).
gcactcagctctctaatct

SEQ ID NO: 747920 - DNA, 19 bp, Mus musculus
  siRNA target sequence for Mitc1 (NM_133761.1,698-716).
gcaccgagactctagaaga

SEQ ID NO: 747921 - DNA, 19 bp, Mus musculus
  siRNA target sequence for Mitc1 (NM_133761.1,746-764).
ctccgtctggtcataaaca

SEQ ID NO: 747922 - DNA, 19 bp, Mus musculus
  siRNA target sequence for Mitc1 (NM_133761.1,857-875).
gagatgcatcacagaaaga

SEQ ID NO: 747923 - DNA, 19 bp, Mus musculus
  siRNA target sequence for Mitc1 (NM_133761.1,1114-1132).
cacttacctcggaatagca

SEQ ID NO: 747924 - DNA, 19 bp, Mus musculus
  siRNA target sequence for Mitc1 (NM_133761.1,1124-1142).
ggaatagcaccatgataca

SEQ ID NO: 747925 - DNA, 19 bp, Mus musculus
  siRNA target sequence for Mitc1 (NM_133761.1,1286-1304).
gcgttgatctgcttcagaa

SEQ ID NO: 747926 - DNA, 19 bp, Mus musculus
  siRNA target sequence for Mitc1 (NM_133761.1,1316-1334).
ccccacagcatgaccaaat

SEQ ID NO: 747927 - DNA, 19 bp, Mus musculus
  siRNA target sequence for Mitc1 (NM_133761.1,1317-1335).
cccacagcatgaccaaata

SEQ ID NO: 747928 - DNA, 19 bp, Mus musculus
  siRNA target sequence for Mitc1 (NM_133761.1,1342-1360).
cagccgcttggaaaaggaa

SEQ ID NO: 747929 - DNA, 19 bp, Mus musculus
  siRNA target sequence for Mitc1 (NM_133761.1,1401-1419).
cacccctgagagcttcata

SEQ ID NO: 747930 - DNA, 19 bp, Mus musculus
  siRNA target sequence for Mitc1 (NM_133761.1,1516-1534).
caggatcctgaagtatttt

SEQ ID NO: 747931 - DNA, 19 bp, Mus musculus
  siRNA target sequence for Mitc1 (NM_133761.1,1770-1788).
gatacacctaataaagaat

SEQ ID NO: 747932 - DNA, 19 bp, Mus musculus
  siRNA target sequence for Mitc1 (NM_133761.1,1805-1823).
gtacgcttcatgcagttta

SEQ ID NO: 747933 - DNA, 19 bp, Mus musculus
  siRNA target sequence for 5830426I05Rik (NM_133762.2,256-274).
catggcatccaccttctaa

SEQ ID NO: 747934 - DNA, 19 bp, Mus musculus
  siRNA target sequence for 5830426I05Rik (NM_133762.2,301-319).
cgagaggtgctgagttact

SEQ ID NO: 747935 - DNA, 19 bp, Mus musculus
  siRNA target sequence for 5830426I05Rik (NM_133762.2,302-320).
gagaggtgctgagttactt

SEQ ID NO: 747936 - DNA, 19 bp, Mus musculus
  siRNA target sequence for 5830426I05Rik (NM_133762.2,354-372).
gatgctgtataggttatat

SEQ ID NO: 747937 - DNA, 19 bp, Mus musculus
  siRNA target sequence for 5830426I05Rik (NM_133762.2,419-437).
gatcaaatgctgcattgtt

SEQ ID NO: 747938 - DNA, 19 bp, Mus musculus
  siRNA target sequence for 5830426I05Rik (NM_133762.2,522-540).
gtataaccttatagaagat

SEQ ID NO: 747939 - DNA, 19 bp, Mus musculus
  siRNA target sequence for 5830426I05Rik (NM_133762.2,528-546).
ccttatagaagatccttat

SEQ ID NO: 747940 - DNA, 19 bp, Mus musculus
  siRNA target sequence for 5830426I05Rik (NM_133762.2,609-627).
gatgccccctaacattctt

SEQ ID NO: 747941 - DNA, 19 bp, Mus musculus
  siRNA target sequence for 5830426I05Rik (NM_133762.2,612-630).
gccccctaacattcttgtt

SEQ ID NO: 747942 - DNA, 19 bp, Mus musculus
  siRNA target sequence for 5830426I05Rik (NM_133762.2,614-632).
cccctaacattcttgttga

SEQ ID NO: 747943 - DNA, 19 bp, Mus musculus
  siRNA target sequence for 5830426I05Rik (NM_133762.2,652-670).
ggggagctggcatttgata

SEQ ID NO: 747944 - DNA, 19 bp, Mus musculus
  siRNA target sequence for 5830426I05Rik (NM_133762.2,653-671).
gggagctggcatttgatat

SEQ ID NO: 747945 - DNA, 19 bp, Mus musculus
  siRNA target sequence for 5830426I05Rik (NM_133762.2,654-672).
ggagctggcatttgatata

SEQ ID NO: 747946 - DNA, 19 bp, Mus musculus
  siRNA target sequence for 5830426I05Rik (NM_133762.2,655-673).
gagctggcatttgatataa

SEQ ID NO: 747947 - DNA, 19 bp, Mus musculus
  siRNA target sequence for 5830426I05Rik (NM_133762.2,707-725).
gtttgccaattattttgga

SEQ ID NO: 747948 - DNA, 19 bp, Mus musculus
  siRNA target sequence for 5830426I05Rik (NM_133762.2,735-753).
gagccacccattattagaa

SEQ ID NO: 747949 - DNA, 19 bp, Mus musculus
  siRNA target sequence for 5830426I05Rik (NM_133762.2,764-782).
caacactcaggtatagtct

SEQ ID NO: 747950 - DNA, 19 bp, Mus musculus
  siRNA target sequence for 5830426I05Rik (NM_133762.2,773-791).
ggtatagtctccacgataa

SEQ ID NO: 747951 - DNA, 19 bp, Mus musculus
  siRNA target sequence for 5830426I05Rik (NM_133762.2,872-890).
gccccatggaggacatttt

SEQ ID NO: 747952 - DNA, 19 bp, Mus musculus
  siRNA target sequence for 5830426I05Rik (NM_133762.2,1030-1048).
gccaggaggttctatcagt

SEQ ID NO: 747953 - DNA, 19 bp, Mus musculus
  siRNA target sequence for 5830426I05Rik (NM_133762.2,1032-1050).
caggaggttctatcagtat

SEQ ID NO: 747954 - DNA, 19 bp, Mus musculus
  siRNA target sequence for 5830426I05Rik (NM_133762.2,1176-1194).
gaatgccagtgtactagat

SEQ ID NO: 747955 - DNA, 19 bp, Mus musculus
  siRNA target sequence for 5830426I05Rik (NM_133762.2,1182-1200).
cagtgtactagataaaaca

SEQ ID NO: 747956 - DNA, 19 bp, Mus musculus
  siRNA target sequence for 5830426I05Rik (NM_133762.2,1223-1241).
ccatggcaggcttactaga

SEQ ID NO: 747957 - DNA, 19 bp, Mus musculus
  siRNA target sequence for 5830426I05Rik (NM_133762.2,1269-1287).
ccatagaagcctggaaaat

SEQ ID NO: 747958 - DNA, 19 bp, Mus musculus
  siRNA target sequence for 5830426I05Rik (NM_133762.2,1270-1288).
catagaagcctggaaaata

SEQ ID NO: 747959 - DNA, 19 bp, Mus musculus
  siRNA target sequence for 5830426I05Rik (NM_133762.2,1296-1314).
ggctaaaatttataccatt

SEQ ID NO: 747960 - DNA, 19 bp, Mus musculus
  siRNA target sequence for 5830426I05Rik (NM_133762.2,1297-1315).
gctaaaatttataccatta

SEQ ID NO: 747961 - DNA, 19 bp, Mus musculus
  siRNA target sequence for 5830426I05Rik (NM_133762.2,1336-1354).
ccagagtacctgaaggtat

SEQ ID NO: 747962 - DNA, 19 bp, Mus musculus
  siRNA target sequence for 5830426I05Rik (NM_133762.2,1337-1355).
cagagtacctgaaggtatt

SEQ ID NO: 747963 - DNA, 19 bp, Mus musculus
  siRNA target sequence for 5830426I05Rik (NM_133762.2,1367-1385).
gctgcaagatccctttgtt

SEQ ID NO: 747964 - DNA, 19 bp, Mus musculus
  siRNA target sequence for 5830426I05Rik (NM_133762.2,1487-1505).
gtaccttgctcgattgtct

SEQ ID NO: 747965 - DNA, 19 bp, Mus musculus
  siRNA target sequence for 5830426I05Rik (NM_133762.2,1828-1846).
gcctttggtctgtactgta

SEQ ID NO: 747966 - DNA, 19 bp, Mus musculus
  siRNA target sequence for 5830426I05Rik (NM_133762.2,1855-1873).
gtccatcttcagtacaagt

SEQ ID NO: 747967 - DNA, 19 bp, Mus musculus
  siRNA target sequence for 5830426I05Rik (NM_133762.2,1858-1876).
catcttcagtacaagttct

SEQ ID NO: 747968 - DNA, 19 bp, Mus musculus
  siRNA target sequence for 5830426I05Rik (NM_133762.2,1980-1998).
gcttcggaaggatgtttat

SEQ ID NO: 747969 - DNA, 19 bp, Mus musculus
  siRNA target sequence for 5830426I05Rik (NM_133762.2,2026-2044).
gtgtgtaaagatgttgtta

SEQ ID NO: 747970 - DNA, 19 bp, Mus musculus
  siRNA target sequence for 5830426I05Rik (NM_133762.2,2049-2067).
gggacttggagatcctaaa

SEQ ID NO: 747971 - DNA, 19 bp, Mus musculus
  siRNA target sequence for 5830426I05Rik (NM_133762.2,2050-2068).
ggacttggagatcctaaat

SEQ ID NO: 747972 - DNA, 19 bp, Mus musculus
  siRNA target sequence for 5830426I05Rik (NM_133762.2,2051-2069).
gacttggagatcctaaatt

SEQ ID NO: 747973 - DNA, 19 bp, Mus musculus
  siRNA target sequence for 5830426I05Rik (NM_133762.2,2056-2074).
ggagatcctaaatttcaaa

SEQ ID NO: 747974 - DNA, 19 bp, Mus musculus
  siRNA target sequence for 5830426I05Rik (NM_133762.2,2057-2075).
gagatcctaaatttcaaat

SEQ ID NO: 747975 - DNA, 19 bp, Mus musculus
  siRNA target sequence for 5830426I05Rik (NM_133762.2,2086-2104).
cagcggagttttggaataa

SEQ ID NO: 747976 - DNA, 19 bp, Mus musculus
  siRNA target sequence for 5830426I05Rik (NM_133762.2,2089-2107).
cggagttttggaataatga

SEQ ID NO: 747977 - DNA, 19 bp, Mus musculus
  siRNA target sequence for 5830426I05Rik (NM_133762.2,2167-2185).
ggaaacaccataattcaca

SEQ ID NO: 747978 - DNA, 19 bp, Mus musculus
  siRNA target sequence for 5830426I05Rik (NM_133762.2,2168-2186).
gaaacaccataattcacaa

SEQ ID NO: 747979 - DNA, 19 bp, Mus musculus
  siRNA target sequence for 5830426I05Rik (NM_133762.2,2210-2228).
cagtgctgtttgacttagt

SEQ ID NO: 747980 - DNA, 19 bp, Mus musculus
  siRNA target sequence for 5830426I05Rik (NM_133762.2,2317-2335).
cagacccctcttcatgaat

SEQ ID NO: 747981 - DNA, 19 bp, Mus musculus
  siRNA target sequence for 5830426I05Rik (NM_133762.2,2405-2423).
ctgcacctgtggttgagat

SEQ ID NO: 747982 - DNA, 19 bp, Mus musculus
  siRNA target sequence for 5830426I05Rik (NM_133762.2,2407-2425).
gcacctgtggttgagataa

SEQ ID NO: 747983 - DNA, 19 bp, Mus musculus
  siRNA target sequence for 5830426I05Rik (NM_133762.2,2411-2429).
ctgtggttgagataagtca

SEQ ID NO: 747984 - DNA, 19 bp, Mus musculus
  siRNA target sequence for 5830426I05Rik (NM_133762.2,2482-2500).
catgaccttcctccatttt

SEQ ID NO: 747985 - DNA, 19 bp, Mus musculus
  siRNA target sequence for 5830426I05Rik (NM_133762.2,2507-2525).
gtttagtgggagtgatcat

SEQ ID NO: 747986 - DNA, 19 bp, Mus musculus
  siRNA target sequence for 5830426I05Rik (NM_133762.2,2563-2581).
ctgaaggcatgtgtaactt

SEQ ID NO: 747987 - DNA, 19 bp, Mus musculus
  siRNA target sequence for 5830426I05Rik (NM_133762.2,2565-2583).
gaaggcatgtgtaacttct

SEQ ID NO: 747988 - DNA, 19 bp, Mus musculus
  siRNA target sequence for 5830426I05Rik (NM_133762.2,2634-2652).
ggttattaacaaaggtaaa

SEQ ID NO: 747989 - DNA, 19 bp, Mus musculus
  siRNA target sequence for 2310046N15Rik (NM_133765.2,552-570).
gcggttcaagccactgttt

SEQ ID NO: 747990 - DNA, 19 bp, Mus musculus
  siRNA target sequence for 2310046N15Rik (NM_133765.2,553-571).
cggttcaagccactgttta

SEQ ID NO: 747991 - DNA, 19 bp, Mus musculus
  siRNA target sequence for 2310046N15Rik (NM_133765.2,799-817).
ctgattctgatgaagttca

SEQ ID NO: 747992 - DNA, 19 bp, Mus musculus
  siRNA target sequence for 2310046N15Rik (NM_133765.2,1298-1316).
gctcgaggaacgaggatta

SEQ ID NO: 747993 - DNA, 19 bp, Mus musculus
  siRNA target sequence for 2310046N15Rik (NM_133765.2,1321-1339).
cgcacttgccgcctatgtt

SEQ ID NO: 747994 - DNA, 19 bp, Mus musculus
  siRNA target sequence for 2310046N15Rik (NM_133765.2,1420-1438).
gaccgctttggatttctgt

SEQ ID NO: 747995 - DNA, 19 bp, Mus musculus
  siRNA target sequence for C920006C10Rik (NM_133766.1,252-270).
cgtctggtggacaacatat

SEQ ID NO: 747996 - DNA, 19 bp, Mus musculus
  siRNA target sequence for C920006C10Rik (NM_133766.1,283-301).
ccaaagatggccttgttaa

SEQ ID NO: 747997 - DNA, 19 bp, Mus musculus
  siRNA target sequence for C920006C10Rik (NM_133766.1,292-310).
gccttgttaaagctgatat

SEQ ID NO: 747998 - DNA, 19 bp, Mus musculus
  siRNA target sequence for C920006C10Rik (NM_133766.1,343-361).
cagagaaactcgatcgaat

SEQ ID NO: 747999 - DNA, 19 bp, Mus musculus
  siRNA target sequence for C920006C10Rik (NM_133766.1,408-426).
cgttctgggtacgttctaa

SEQ ID NO: 748000 - DNA, 19 bp, Mus musculus
  siRNA target sequence for C920006C10Rik (NM_133766.1,409-427).
gttctgggtacgttctaat

SEQ ID NO: 748001 - DNA, 19 bp, Mus musculus
  siRNA target sequence for C920006C10Rik (NM_133766.1,438-456).
gcattggaccagcttctta

SEQ ID NO: 748002 - DNA, 19 bp, Mus musculus
  siRNA target sequence for C920006C10Rik (NM_133766.1,549-567).
gttcttggaacaaattctt

SEQ ID NO: 748003 - DNA, 19 bp, Mus musculus
  siRNA target sequence for C920006C10Rik (NM_133766.1,594-612).
gatacaccgtcctatcata

SEQ ID NO: 748004 - DNA, 19 bp, Mus musculus
  siRNA target sequence for C920006C10Rik (NM_133766.1,604-622).
cctatcatagacgttatga

SEQ ID NO: 748005 - DNA, 19 bp, Mus musculus
  siRNA target sequence for C920006C10Rik (NM_133766.1,650-668).
gtgtcactcctgtcatagt

SEQ ID NO: 748006 - DNA, 19 bp, Mus musculus
  siRNA target sequence for C920006C10Rik (NM_133766.1,652-670).
gtcactcctgtcatagtga

SEQ ID NO: 748007 - DNA, 19 bp, Mus musculus
  siRNA target sequence for C920006C10Rik (NM_133766.1,689-707).
gattcgcattgctggaata

SEQ ID NO: 748008 - DNA, 19 bp, Mus musculus
  siRNA target sequence for C920006C10Rik (NM_133766.1,721-739).
gtgtggttcgcaaaacagt

SEQ ID NO: 748009 - DNA, 19 bp, Mus musculus
  siRNA target sequence for C920006C10Rik (NM_133766.1,723-741).
gtggttcgcaaaacagtta

SEQ ID NO: 748010 - DNA, 19 bp, Mus musculus
  siRNA target sequence for C920006C10Rik (NM_133766.1,725-743).
ggttcgcaaaacagttaat

SEQ ID NO: 748011 - DNA, 19 bp, Mus musculus
  siRNA target sequence for C920006C10Rik (NM_133766.1,747-765).
gaacttcgggctaccattt

SEQ ID NO: 748012 - DNA, 19 bp, Mus musculus
  siRNA target sequence for C920006C10Rik (NM_133766.1,933-951).
gcaacttttgggaatatga

SEQ ID NO: 748013 - DNA, 19 bp, Mus musculus
  siRNA target sequence for C920006C10Rik (NM_133766.1,965-983).
gccagtttttgcgcattta

SEQ ID NO: 748014 - DNA, 19 bp, Mus musculus
  siRNA target sequence for C920006C10Rik (NM_133766.1,967-985).
cagtttttgcgcatttaga

SEQ ID NO: 748015 - DNA, 19 bp, Mus musculus
  siRNA target sequence for C920006C10Rik (NM_133766.1,976-994).
cgcatttagatcatcacaa

SEQ ID NO: 748016 - DNA, 19 bp, Mus musculus
  siRNA target sequence for C920006C10Rik (NM_133766.1,1101-1119).
gatgctcgtaggaaggatt

SEQ ID NO: 748017 - DNA, 19 bp, Mus musculus
  siRNA target sequence for C920006C10Rik (NM_133766.1,1126-1144).
gggttcgagcaggtatcat

SEQ ID NO: 748018 - DNA, 19 bp, Mus musculus
  siRNA target sequence for C920006C10Rik (NM_133766.1,1127-1145).
ggttcgagcaggtatcatt

SEQ ID NO: 748019 - DNA, 19 bp, Mus musculus
  siRNA target sequence for C920006C10Rik (NM_133766.1,1138-1156).
gtatcattcaggttctgtt

SEQ ID NO: 748020 - DNA, 19 bp, Mus musculus
  siRNA target sequence for C920006C10Rik (NM_133766.1,1166-1184).
cgccattgctgctaaaggt

SEQ ID NO: 748021 - DNA, 19 bp, Mus musculus
  siRNA target sequence for C920006C10Rik (NM_133766.1,1340-1358).
catccagacaataggattt

SEQ ID NO: 748022 - DNA, 19 bp, Mus musculus
  siRNA target sequence for C920006C10Rik (NM_133766.1,1366-1384).
gtaacttaccagactatca

SEQ ID NO: 748023 - DNA, 19 bp, Mus musculus
  siRNA target sequence for C920006C10Rik (NM_133766.1,1431-1449).
ggaacatccactcatactt

SEQ ID NO: 748024 - DNA, 19 bp, Mus musculus
  siRNA target sequence for C920006C10Rik (NM_133766.1,1432-1450).
gaacatccactcatacttt

SEQ ID NO: 748025 - DNA, 19 bp, Mus musculus
  siRNA target sequence for C920006C10Rik (NM_133766.1,1530-1548).
ggatacaaagccaagacaa

SEQ ID NO: 748026 - DNA, 19 bp, Mus musculus
  siRNA target sequence for C920006C10Rik (NM_133766.1,1531-1549).
gatacaaagccaagacaat

SEQ ID NO: 748027 - DNA, 19 bp, Mus musculus
  siRNA target sequence for C920006C10Rik (NM_133766.1,1623-1641).
cagttagtcttggaagtaa

SEQ ID NO: 748028 - DNA, 19 bp, Mus musculus
  siRNA target sequence for C920006C10Rik (NM_133766.1,1680-1698).
ctccgcggtatcaggataa

SEQ ID NO: 748029 - DNA, 19 bp, Mus musculus
  siRNA target sequence for C920006C10Rik (NM_133766.1,1682-1700).
ccgcggtatcaggataata

SEQ ID NO: 748030 - DNA, 19 bp, Mus musculus
  siRNA target sequence for C920006C10Rik (NM_133766.1,1707-1725).
gtggctgacttgaagataa

SEQ ID NO: 748031 - DNA, 19 bp, Mus musculus
  siRNA target sequence for C920006C10Rik (NM_133766.1,1733-1751).
gaaaatttgtcgacaagat

SEQ ID NO: 748032 - DNA, 19 bp, Mus musculus
  siRNA target sequence for C920006C10Rik (NM_133766.1,1746-1764).
caagatacgagcttcatga

SEQ ID NO: 748033 - DNA, 19 bp, Mus musculus
  siRNA target sequence for C920006C10Rik (NM_133766.1,1749-1767).
gatacgagcttcatgaaaa

SEQ ID NO: 748034 - DNA, 19 bp, Mus musculus
  siRNA target sequence for C920006C10Rik (NM_133766.1,1753-1771).
cgagcttcatgaaaaagaa

SEQ ID NO: 748035 - DNA, 19 bp, Mus musculus
  siRNA target sequence for C920006C10Rik (NM_133766.1,1754-1772).
gagcttcatgaaaaagaat

SEQ ID NO: 748036 - DNA, 19 bp, Mus musculus
  siRNA target sequence for C920006C10Rik (NM_133766.1,1882-1900).
ccaatgaagaggtggttat

SEQ ID NO: 748037 - DNA, 19 bp, Mus musculus
  siRNA target sequence for C920006C10Rik (NM_133766.1,1883-1901).
caatgaagaggtggttatt

SEQ ID NO: 748038 - DNA, 19 bp, Mus musculus
  siRNA target sequence for C920006C10Rik (NM_133766.1,1931-1949).
ggacagtgcaattatcaat

SEQ ID NO: 748039 - DNA, 19 bp, Mus musculus
  siRNA target sequence for C920006C10Rik (NM_133766.1,1936-1954).
gtgcaattatcaatgaaga

SEQ ID NO: 748040 - DNA, 19 bp, Mus musculus
  siRNA target sequence for C920006C10Rik (NM_133766.1,1990-2008).
ccctggttgcagcttatct

SEQ ID NO: 748041 - DNA, 19 bp, Mus musculus
  siRNA target sequence for C920006C10Rik (NM_133766.1,1992-2010).
ctggttgcagcttatctca

SEQ ID NO: 748042 - DNA, 19 bp, Mus musculus
  siRNA target sequence for C920006C10Rik (NM_133766.1,2012-2030).
ctttgtgagtcagatgata

SEQ ID NO: 748043 - DNA, 19 bp, Mus musculus
  siRNA target sequence for C920006C10Rik (NM_133766.1,2040-2058).
gcattttgccagcatgtta

SEQ ID NO: 748044 - DNA, 19 bp, Mus musculus
  siRNA target sequence for C920006C10Rik (NM_133766.1,2049-2067).
cagcatgttagcaaggtta

SEQ ID NO: 748045 - DNA, 19 bp, Mus musculus
  siRNA target sequence for C920006C10Rik (NM_133766.1,2051-2069).
gcatgttagcaaggttatt

SEQ ID NO: 748046 - DNA, 19 bp, Mus musculus
  siRNA target sequence for C920006C10Rik (NM_133766.1,2080-2098).
ctatggaagccccttattt

SEQ ID NO: 748047 - DNA, 19 bp, Mus musculus
  siRNA target sequence for C920006C10Rik (NM_133766.1,2084-2102).
ggaagccccttattttcta

SEQ ID NO: 748048 - DNA, 19 bp, Mus musculus
  siRNA target sequence for C920006C10Rik (NM_133766.1,2108-2126).
gcatattttccgagataaa

SEQ ID NO: 748049 - DNA, 19 bp, Mus musculus
  siRNA target sequence for C920006C10Rik (NM_133766.1,2109-2127).
catattttccgagataaat

SEQ ID NO: 748050 - DNA, 19 bp, Mus musculus
  siRNA target sequence for C920006C10Rik (NM_133766.1,2128-2146).
gcatgcttccgaaatcttt

SEQ ID NO: 748051 - DNA, 19 bp, Mus musculus
  siRNA target sequence for C920006C10Rik (NM_133766.1,2133-2151).
cttccgaaatctttagaga

SEQ ID NO: 748052 - DNA, 19 bp, Mus musculus
  siRNA target sequence for C920006C10Rik (NM_133766.1,2148-2166).
gagaaacatgacaaaaatt

SEQ ID NO: 748053 - DNA, 19 bp, Mus musculus
  siRNA target sequence for C920006C10Rik (NM_133766.1,2259-2277).
gatgaagatcgcctttcta

SEQ ID NO: 748054 - DNA, 19 bp, Mus musculus
  siRNA target sequence for C920006C10Rik (NM_133766.1,2305-2323).
ctattcaggtggatatttt

SEQ ID NO: 748055 - DNA, 19 bp, Mus musculus
  siRNA target sequence for C920006C10Rik (NM_133766.1,2394-2412).
gcaattgataccaatggaa

SEQ ID NO: 748056 - DNA, 19 bp, Mus musculus
  siRNA target sequence for C920006C10Rik (NM_133766.1,2395-2413).
caattgataccaatggaat

SEQ ID NO: 748057 - DNA, 19 bp, Mus musculus
  siRNA target sequence for C920006C10Rik (NM_133766.1,2494-2512).
gtgaatccaaagcaaattt

SEQ ID NO: 748058 - DNA, 19 bp, Mus musculus
  siRNA target sequence for C920006C10Rik (NM_133766.1,2563-2581).
ccagtccatctggaacatt

SEQ ID NO: 748059 - DNA, 19 bp, Mus musculus
  siRNA target sequence for C920006C10Rik (NM_133766.1,2574-2592).
ggaacattgaccgttactt

SEQ ID NO: 748060 - DNA, 19 bp, Mus musculus
  siRNA target sequence for C920006C10Rik (NM_133766.1,2609-2627).
ccagtccgtcccagtctat

SEQ ID NO: 748061 - DNA, 19 bp, Mus musculus
  siRNA target sequence for 0610012P18Rik (NM_133770.1,748-766).
caagacatccggaatcaga

SEQ ID NO: 748062 - DNA, 19 bp, Mus musculus
  siRNA target sequence for 0610012P18Rik (NM_133770.1,789-807).
gtgtctgcgggaactgttt

SEQ ID NO: 748063 - DNA, 19 bp, Mus musculus
  siRNA target sequence for 0610012P18Rik (NM_133770.1,802-820).
ctgtttgagttcagattca

SEQ ID NO: 748064 - DNA, 19 bp, Mus musculus
  siRNA target sequence for 0610012P18Rik (NM_133770.1,873-891).
ggtgactctactggatttt

SEQ ID NO: 748065 - DNA, 19 bp, Mus musculus
  siRNA target sequence for 0610012P18Rik (NM_133770.1,876-894).
gactctactggattttggt

SEQ ID NO: 748066 - DNA, 19 bp, Mus musculus
  siRNA target sequence for 0610012P18Rik (NM_133770.1,914-932).
cagagttcacggaccatta

SEQ ID NO: 748067 - DNA, 19 bp, Mus musculus
  siRNA target sequence for 0610012P18Rik (NM_133770.1,916-934).
gagttcacggaccattaca

SEQ ID NO: 748068 - DNA, 19 bp, Mus musculus
  siRNA target sequence for 0610012P18Rik (NM_133770.1,918-936).
gttcacggaccattacatt

SEQ ID NO: 748069 - DNA, 19 bp, Mus musculus
  siRNA target sequence for 0610012P18Rik (NM_133770.1,970-988).
gatcgagttctacagaaat

SEQ ID NO: 748070 - DNA, 19 bp, Mus musculus
  siRNA target sequence for 0610012P18Rik (NM_133770.1,1133-1151).
gcctcatcccggtattgct

SEQ ID NO: 748071 - DNA, 19 bp, Mus musculus
  siRNA target sequence for 0610012P18Rik (NM_133770.1,1134-1152).
cctcatcccggtattgctt

SEQ ID NO: 748072 - DNA, 19 bp, Mus musculus
  siRNA target sequence for 0610012P18Rik (NM_133770.1,1255-1273).
cgggacctcttccaagata

SEQ ID NO: 748073 - DNA, 19 bp, Mus musculus
  siRNA target sequence for 0610016J10Rik (NM_133771.1,257-275).
ggaaggttggctttcacaa

SEQ ID NO: 748074 - DNA, 19 bp, Mus musculus
  siRNA target sequence for 0610016J10Rik (NM_133771.1,273-291).
caagtacagtctacgaaaa

SEQ ID NO: 748075 - DNA, 19 bp, Mus musculus
  siRNA target sequence for 0610016J10Rik (NM_133771.1,292-310).
gacctgctagagccattat

SEQ ID NO: 748076 - DNA, 19 bp, Mus musculus
  siRNA target sequence for 0610016J10Rik (NM_133771.1,318-336).
catgcgggatacacatact

SEQ ID NO: 748077 - DNA, 19 bp, Mus musculus
  siRNA target sequence for 0610016J10Rik (NM_133771.1,352-370).
cccatgcttacaaacaagt

SEQ ID NO: 748078 - DNA, 19 bp, Mus musculus
  siRNA target sequence for 0610016J10Rik (NM_133771.1,366-384).
caagtggatccatctgtta

SEQ ID NO: 748079 - DNA, 19 bp, Mus musculus
  siRNA target sequence for 0610016J10Rik (NM_133771.1,379-397).
ctgttacccggagaatttt

SEQ ID NO: 748080 - DNA, 19 bp, Mus musculus
  siRNA target sequence for 0610016J10Rik (NM_133771.1,381-399).
gttacccggagaattttca

SEQ ID NO: 748081 - DNA, 19 bp, Mus musculus
  siRNA target sequence for 0610016J10Rik (NM_133771.1,443-461).
ctccagtgtggatatatat

SEQ ID NO: 748082 - DNA, 19 bp, Mus musculus
  siRNA target sequence for 0610016J10Rik (NM_133771.1,480-498).
cttcgtattgaccaaaaga

SEQ ID NO: 748083 - DNA, 19 bp, Mus musculus
  siRNA target sequence for 0610016J10Rik (NM_133771.1,520-538).
caggaatgtttgaacgaat

SEQ ID NO: 748084 - DNA, 19 bp, Mus musculus
  siRNA target sequence for 0610016J10Rik (NM_133771.1,573-591).
gaaatgcatttgccttata

SEQ ID NO: 748085 - DNA, 19 bp, Mus musculus
  siRNA target sequence for 0610016J10Rik (NM_133771.1,612-630).
cataaagatgagtttacca

SEQ ID NO: 748086 - DNA, 19 bp, Mus musculus
  siRNA target sequence for 0610016J10Rik (NM_133771.1,705-723).
gcggatcctagtaatctct

SEQ ID NO: 748087 - DNA, 19 bp, Mus musculus
  siRNA target sequence for 0610016J10Rik (NM_133771.1,707-725).
ggatcctagtaatctcttt

SEQ ID NO: 748088 - DNA, 19 bp, Mus musculus
  siRNA target sequence for 0610016J10Rik (NM_133771.1,756-774).
caaaggttccgttacagtt

SEQ ID NO: 748089 - DNA, 19 bp, Mus musculus
  siRNA target sequence for 0610016J10Rik (NM_133771.1,760-778).
ggttccgttacagttacta

SEQ ID NO: 748090 - DNA, 19 bp, Mus musculus
  siRNA target sequence for 0610016J10Rik (NM_133771.1,761-779).
gttccgttacagttactat

SEQ ID NO: 748091 - DNA, 19 bp, Mus musculus
  siRNA target sequence for 0610016J10Rik (NM_133771.1,764-782).
ccgttacagttactatgat

SEQ ID NO: 748092 - DNA, 19 bp, Mus musculus
  siRNA target sequence for 0610016J10Rik (NM_133771.1,783-801).
gaatcccagggggagattt

SEQ ID NO: 748093 - DNA, 19 bp, Mus musculus
  siRNA target sequence for 0610016J10Rik (NM_133771.1,788-806).
ccagggggagatttataga

SEQ ID NO: 748094 - DNA, 19 bp, Mus musculus
  siRNA target sequence for 0610016J10Rik (NM_133771.1,789-807).
cagggggagatttatagat

SEQ ID NO: 748095 - DNA, 19 bp, Mus musculus
  siRNA target sequence for 0610016J10Rik (NM_133771.1,808-826).
ccattgaacatctagataa

SEQ ID NO: 748096 - DNA, 19 bp, Mus musculus
  siRNA target sequence for 0610016J10Rik (NM_133771.1,822-840).
gataaaatgggtatgagta

SEQ ID NO: 748097 - DNA, 19 bp, Mus musculus
  siRNA target sequence for 0610016J10Rik (NM_133771.1,830-848).
gggtatgagtattatagaa

SEQ ID NO: 748098 - DNA, 19 bp, Mus musculus
  siRNA target sequence for 0610016J10Rik (NM_133771.1,832-850).
gtatgagtattatagaaca

SEQ ID NO: 748099 - DNA, 19 bp, Mus musculus
  siRNA target sequence for 0610016J10Rik (NM_133771.1,849-867).
caattagatcctgtatctt

SEQ ID NO: 748100 - DNA, 19 bp, Mus musculus
  siRNA target sequence for 0610016J10Rik (NM_133771.1,855-873).
gatcctgtatcttttagca

SEQ ID NO: 748101 - DNA, 19 bp, Mus musculus
  siRNA target sequence for 0610016J10Rik (NM_133771.1,859-877).
ctgtatcttttagcaatta

SEQ ID NO: 748102 - DNA, 19 bp, Mus musculus
  siRNA target sequence for 0610016J10Rik (NM_133771.1,912-930).
catcccattggggtgttat

SEQ ID NO: 748103 - DNA, 19 bp, Mus musculus
  siRNA target sequence for 0610016J10Rik (NM_133771.1,915-933).
cccattggggtgttattaa

SEQ ID NO: 748104 - DNA, 19 bp, Mus musculus
  siRNA target sequence for 0610016J10Rik (NM_133771.1,916-934).
ccattggggtgttattaaa

SEQ ID NO: 748105 - DNA, 19 bp, Mus musculus
  siRNA target sequence for 0610016J10Rik (NM_133771.1,965-983).
gaatatgagcttttccttt

SEQ ID NO: 748106 - DNA, 19 bp, Mus musculus
  siRNA target sequence for 0610016J10Rik (NM_133771.1,996-1014).
cagtcgagccagtgtagaa

SEQ ID NO: 748107 - DNA, 19 bp, Mus musculus
  siRNA target sequence for 9230117N10Rik (NM_133775.1,39-57).
gagacctagaatgaagtat

SEQ ID NO: 748108 - DNA, 19 bp, Mus musculus
  siRNA target sequence for 9230117N10Rik (NM_133775.1,54-72).
gtattccaactccaagatt

SEQ ID NO: 748109 - DNA, 19 bp, Mus musculus
  siRNA target sequence for 9230117N10Rik (NM_133775.1,108-126).
cctggtcccgccttgcaaa

SEQ ID NO: 748110 - DNA, 19 bp, Mus musculus
  siRNA target sequence for 9230117N10Rik (NM_133775.1,109-127).
ctggtcccgccttgcaaaa

SEQ ID NO: 748111 - DNA, 19 bp, Mus musculus
  siRNA target sequence for 9230117N10Rik (NM_133775.1,184-202).
cgttctggcctcaccataa

SEQ ID NO: 748112 - DNA, 19 bp, Mus musculus
  siRNA target sequence for 9230117N10Rik (NM_133775.1,233-251).
ccacgaaaagatattcact

SEQ ID NO: 748113 - DNA, 19 bp, Mus musculus
  siRNA target sequence for 9230117N10Rik (NM_133775.1,257-275).
cgggtaccaagcatgaaga

SEQ ID NO: 748114 - DNA, 19 bp, Mus musculus
  siRNA target sequence for 9230117N10Rik (NM_133775.1,286-304).
gcctatccacgggattcta

SEQ ID NO: 748115 - DNA, 19 bp, Mus musculus
  siRNA target sequence for 9230117N10Rik (NM_133775.1,295-313).
cgggattctaggaagagat

SEQ ID NO: 748116 - DNA, 19 bp, Mus musculus
  siRNA target sequence for 9230117N10Rik (NM_133775.1,343-361).
gcgtctgttgacacattga

SEQ ID NO: 748117 - DNA, 19 bp, Mus musculus
  siRNA target sequence for 9230117N10Rik (NM_133775.1,367-385).
caaggaacttcacttttaa

SEQ ID NO: 748118 - DNA, 19 bp, Mus musculus
  siRNA target sequence for 9230117N10Rik (NM_133775.1,371-389).
gaacttcacttttaacaca

SEQ ID NO: 748119 - DNA, 19 bp, Mus musculus
  siRNA target sequence for 9230117N10Rik (NM_133775.1,399-417).
ctccctgagtacatacaat

SEQ ID NO: 748120 - DNA, 19 bp, Mus musculus
  siRNA target sequence for 9230117N10Rik (NM_133775.1,420-438).
ccaatctgttagttttgtt

SEQ ID NO: 748121 - DNA, 19 bp, Mus musculus
  siRNA target sequence for 9230117N10Rik (NM_133775.1,449-467).
gatgttatgtgatcaatgt

SEQ ID NO: 748122 - DNA, 19 bp, Mus musculus
  siRNA target sequence for 9230117N10Rik (NM_133775.1,501-519).
ggtgctactacgctactat

SEQ ID NO: 748123 - DNA, 19 bp, Mus musculus
  siRNA target sequence for 9230117N10Rik (NM_133775.1,505-523).
ctactacgctactatgagt

SEQ ID NO: 748124 - DNA, 19 bp, Mus musculus
  siRNA target sequence for 9230117N10Rik (NM_133775.1,579-597).
gaacatgagtcccatcaaa

SEQ ID NO: 748125 - DNA, 19 bp, Mus musculus
  siRNA target sequence for 9230117N10Rik (NM_133775.1,702-720).
gtcctcggactttgtttca

SEQ ID NO: 748126 - DNA, 19 bp, Mus musculus
  siRNA target sequence for 9230117N10Rik (NM_133775.1,707-725).
cggactttgtttcatttga

SEQ ID NO: 748127 - DNA, 19 bp, Mus musculus
  siRNA target sequence for 9230117N10Rik (NM_133775.1,743-761).
gcacttacataggagtaaa

SEQ ID NO: 748128 - DNA, 19 bp, Mus musculus
  siRNA target sequence for 9230117N10Rik (NM_133775.1,746-764).
cttacataggagtaaaaga

SEQ ID NO: 748129 - DNA, 19 bp, Mus musculus
  siRNA target sequence for 9230117N10Rik (NM_133775.1,793-811).
gatgagagctgcaacaata

SEQ ID NO: 748130 - DNA, 19 bp, Mus musculus
  siRNA target sequence for 9230117N10Rik (NM_133775.1,801-819).
ctgcaacaatattatgttt

SEQ ID NO: 748131 - DNA, 19 bp, Mus musculus
  siRNA target sequence for Cab39 (NM_133781.2,187-205).
ctccggcagatattgtgaa

SEQ ID NO: 748132 - DNA, 19 bp, Mus musculus
  siRNA target sequence for Cab39 (NM_133781.2,190-208).
cggcagatattgtgaagaa

SEQ ID NO: 748133 - DNA, 19 bp, Mus musculus
  siRNA target sequence for Cab39 (NM_133781.2,296-314).
ggtcgccatgaaagaaatt

SEQ ID NO: 748134 - DNA, 19 bp, Mus musculus
  siRNA target sequence for Cab39 (NM_133781.2,315-333).
ctgtacggcaccaatgaga

SEQ ID NO: 748135 - DNA, 19 bp, Mus musculus
  siRNA target sequence for Cab39 (NM_133781.2,400-418).
ccctggtagctgacttaca

SEQ ID NO: 748136 - DNA, 19 bp, Mus musculus
  siRNA target sequence for Cab39 (NM_133781.2,493-511).
gaactcctactgttgaata

SEQ ID NO: 748137 - DNA, 19 bp, Mus musculus
  siRNA target sequence for Cab39 (NM_133781.2,515-533).
ctgcacccaacagaatatt

SEQ ID NO: 748138 - DNA, 19 bp, Mus musculus
  siRNA target sequence for Cab39 (NM_133781.2,542-560).
gttattgaaagggtatgaa

SEQ ID NO: 748139 - DNA, 19 bp, Mus musculus
  siRNA target sequence for Cab39 (NM_133781.2,564-582).
ccagaaatagctcttaatt

SEQ ID NO: 748140 - DNA, 19 bp, Mus musculus
  siRNA target sequence for Cab39 (NM_133781.2,640-658).
ggtcagaacagttttatga

SEQ ID NO: 748141 - DNA, 19 bp, Mus musculus
  siRNA target sequence for Cab39 (NM_133781.2,643-661).
cagaacagttttatgactt

SEQ ID NO: 748142 - DNA, 19 bp, Mus musculus
  siRNA target sequence for Cab39 (NM_133781.2,665-683).
cagatatgttgaaatgtca

SEQ ID NO: 748143 - DNA, 19 bp, Mus musculus
  siRNA target sequence for Cab39 (NM_133781.2,712-730).
ctacattcaaggatttact

SEQ ID NO: 748144 - DNA, 19 bp, Mus musculus
  siRNA target sequence for Cab39 (NM_133781.2,723-741).
gatttacttacaagacata

SEQ ID NO: 748145 - DNA, 19 bp, Mus musculus
  siRNA target sequence for 2310058J06Rik (NM_133784.1,337-355).
gctcatggcggaaaaagat

SEQ ID NO: 748146 - DNA, 19 bp, Mus musculus
  siRNA target sequence for 2310058J06Rik (NM_133784.1,357-375).
ctcccggagtccttcttta

SEQ ID NO: 748147 - DNA, 19 bp, Mus musculus
  siRNA target sequence for 2310058J06Rik (NM_133784.1,619-637).
cggccactggccagagata

SEQ ID NO: 748148 - DNA, 19 bp, Mus musculus
  siRNA target sequence for 2310058J06Rik (NM_133784.1,627-645).
ggccagagatacttcctta

SEQ ID NO: 748149 - DNA, 19 bp, Mus musculus
  siRNA target sequence for 2310058J06Rik (NM_133784.1,629-647).
ccagagatacttccttaat

SEQ ID NO: 748150 - DNA, 19 bp, Mus musculus
  siRNA target sequence for 2310058J06Rik (NM_133784.1,634-652).
gatacttccttaatcacat

SEQ ID NO: 748151 - DNA, 19 bp, Mus musculus
  siRNA target sequence for 2310058J06Rik (NM_133784.1,641-659).
ccttaatcacatagagaaa

SEQ ID NO: 748152 - DNA, 19 bp, Mus musculus
  siRNA target sequence for 2310058J06Rik (NM_133784.1,679-697).
ccaggaaggtgatgaatca

SEQ ID NO: 748153 - DNA, 19 bp, Mus musculus
  siRNA target sequence for 2310058J06Rik (NM_133784.1,692-710).
gaatcagcctctgaatcat

SEQ ID NO: 748154 - DNA, 19 bp, Mus musculus
  siRNA target sequence for 2310058J06Rik (NM_133784.1,773-791).
gccgaatctcgcaatgaat

SEQ ID NO: 748155 - DNA, 19 bp, Mus musculus
  siRNA target sequence for 2310058J06Rik (NM_133784.1,775-793).
cgaatctcgcaatgaatca

SEQ ID NO: 748156 - DNA, 19 bp, Mus musculus
  siRNA target sequence for 2310058J06Rik (NM_133784.1,1049-1067).
catgagcacagatatgaga

SEQ ID NO: 748157 - DNA, 19 bp, Mus musculus
  siRNA target sequence for 2310058J06Rik (NM_133784.1,1100-1118).
caatggagggccctatcat

SEQ ID NO: 748158 - DNA, 19 bp, Mus musculus
  siRNA target sequence for 2310058J06Rik (NM_133784.1,1286-1304).
ctgccttccaggaacaaat

SEQ ID NO: 748159 - DNA, 19 bp, Mus musculus
  siRNA target sequence for 2310058J06Rik (NM_133784.1,1373-1391).
caaaagcgagccctttcta

SEQ ID NO: 748160 - DNA, 19 bp, Mus musculus
  siRNA target sequence for R74862 (NM_133790.1,182-200).
gccttcccactggaatact

SEQ ID NO: 748161 - DNA, 19 bp, Mus musculus
  siRNA target sequence for R74862 (NM_133790.1,188-206).
ccactggaatactgctatt

SEQ ID NO: 748162 - DNA, 19 bp, Mus musculus
  siRNA target sequence for R74862 (NM_133790.1,221-239).
ctacagccgtcaaagatct

SEQ ID NO: 748163 - DNA, 19 bp, Mus musculus
  siRNA target sequence for R74862 (NM_133790.1,238-256).
ctgatctgtccgtggttaa

SEQ ID NO: 748164 - DNA, 19 bp, Mus musculus
  siRNA target sequence for R74862 (NM_133790.1,274-292).
gtcttccacttgttgctat

SEQ ID NO: 748165 - DNA, 19 bp, Mus musculus
  siRNA target sequence for D8Ertd594e (NM_133791.1,1771-1789).
gttccagtgaactctatta

SEQ ID NO: 748166 - DNA, 19 bp, Mus musculus
  siRNA target sequence for D8Ertd594e (NM_133791.1,1811-1829).
ggacacagactatcagtat

SEQ ID NO: 748167 - DNA, 19 bp, Mus musculus
  siRNA target sequence for D8Ertd594e (NM_133791.1,1816-1834).
cagactatcagtataaact

SEQ ID NO: 748168 - DNA, 19 bp, Mus musculus
  siRNA target sequence for D8Ertd594e (NM_133791.1,2270-2288).
gtgtgagggcgcaacagat

SEQ ID NO: 748169 - DNA, 19 bp, Mus musculus
  siRNA target sequence for D8Ertd594e (NM_133791.1,2278-2296).
gcgcaacagatgtggaaaa

SEQ ID NO: 748170 - DNA, 19 bp, Mus musculus
  siRNA target sequence for D8Ertd594e (NM_133791.1,2297-2315).
gtcgttacccaaaagaaga

SEQ ID NO: 748171 - DNA, 19 bp, Mus musculus
  siRNA target sequence for D8Ertd594e (NM_133791.1,2486-2504).
gataggactcagatacgat

SEQ ID NO: 748172 - DNA, 19 bp, Mus musculus
  siRNA target sequence for D8Ertd594e (NM_133791.1,2490-2508).
ggactcagatacgatacaa

SEQ ID NO: 748173 - DNA, 19 bp, Mus musculus
  siRNA target sequence for D8Ertd594e (NM_133791.1,2491-2509).
gactcagatacgatacaaa

SEQ ID NO: 748174 - DNA, 19 bp, Mus musculus
  siRNA target sequence for D8Ertd594e (NM_133791.1,2502-2520).
gatacaaagagttcaagtt

SEQ ID NO: 748175 - DNA, 19 bp, Mus musculus
  siRNA target sequence for D8Ertd594e (NM_133791.1,2506-2524).
caaagagttcaagtttcat

SEQ ID NO: 748176 - DNA, 19 bp, Mus musculus
  siRNA target sequence for D8Ertd594e (NM_133791.1,2558-2576).
cttctcgatacctcattct

SEQ ID NO: 748177 - DNA, 19 bp, Mus musculus
  siRNA target sequence for D8Ertd594e (NM_133791.1,2561-2579).
ctcgatacctcattcttca

SEQ ID NO: 748178 - DNA, 19 bp, Mus musculus
  siRNA target sequence for D8Ertd594e (NM_133791.1,2563-2581).
cgatacctcattcttcaaa

SEQ ID NO: 748179 - DNA, 19 bp, Mus musculus
  siRNA target sequence for D8Ertd594e (NM_133791.1,2564-2582).
gatacctcattcttcaaaa

SEQ ID NO: 748180 - DNA, 19 bp, Mus musculus
  siRNA target sequence for D8Ertd594e (NM_133791.1,2568-2586).
cctcattcttcaaaagtgt

SEQ ID NO: 748181 - DNA, 19 bp, Mus musculus
  siRNA target sequence for D8Ertd594e (NM_133791.1,2569-2587).
ctcattcttcaaaagtgta

SEQ ID NO: 748182 - DNA, 19 bp, Mus musculus
  siRNA target sequence for D8Ertd594e (NM_133791.1,2626-2644).
gctgtctgtttcgaacaaa

SEQ ID NO: 748183 - DNA, 19 bp, Mus musculus
  siRNA target sequence for D8Ertd594e (NM_133791.1,2627-2645).
ctgtctgtttcgaacaaaa

SEQ ID NO: 748184 - DNA, 19 bp, Mus musculus
  siRNA target sequence for D8Ertd594e (NM_133791.1,2629-2647).
gtctgtttcgaacaaaagt

SEQ ID NO: 748185 - DNA, 19 bp, Mus musculus
  siRNA target sequence for D8Ertd594e (NM_133791.1,2659-2677).
ccgaatctgtgctgtacaa

SEQ ID NO: 748186 - DNA, 19 bp, Mus musculus
  siRNA target sequence for D8Ertd594e (NM_133791.1,2789-2807).
gatcagcctggcggattta

SEQ ID NO: 748187 - DNA, 19 bp, Mus musculus
  siRNA target sequence for D8Ertd594e (NM_133791.1,2794-2812).
gcctggcggatttaccatt

SEQ ID NO: 748188 - DNA, 19 bp, Mus musculus
  siRNA target sequence for D8Ertd594e (NM_133791.1,2795-2813).
cctggcggatttaccattt

SEQ ID NO: 748189 - DNA, 19 bp, Mus musculus
  siRNA target sequence for D8Ertd594e (NM_133791.1,2796-2814).
ctggcggatttaccatttt

SEQ ID NO: 748190 - DNA, 19 bp, Mus musculus
  siRNA target sequence for D8Ertd594e (NM_133791.1,2799-2817).
gcggatttaccattttcca

SEQ ID NO: 748191 - DNA, 19 bp, Mus musculus
  siRNA target sequence for D8Ertd594e (NM_133791.1,2825-2843).
cttcatgctgtggtataat

SEQ ID NO: 748192 - DNA, 19 bp, Mus musculus
  siRNA target sequence for D8Ertd594e (NM_133791.1,2831-2849).
gctgtggtataatttgctt

SEQ ID NO: 748193 - DNA, 19 bp, Mus musculus
  siRNA target sequence for D8Ertd594e (NM_133791.1,2920-2938).
ccatgctcgaccctataga

SEQ ID NO: 748194 - DNA, 19 bp, Mus musculus
  siRNA target sequence for D8Ertd594e (NM_133791.1,2945-2963).
cgccgtgtcagccttactt

SEQ ID NO: 748195 - DNA, 19 bp, Mus musculus
  siRNA target sequence for D8Ertd594e (NM_133791.1,3055-3073).
ggagagactgcctaacgat

SEQ ID NO: 748196 - DNA, 19 bp, Mus musculus
  siRNA target sequence for D8Ertd594e (NM_133791.1,3060-3078).
gactgcctaacgatgctaa

SEQ ID NO: 748197 - DNA, 19 bp, Mus musculus
  siRNA target sequence for D8Ertd594e (NM_133791.1,3092-3110).
cgaacctgcggctttgaga

SEQ ID NO: 748198 - DNA, 19 bp, Mus musculus
  siRNA target sequence for D8Ertd594e (NM_133791.1,3249-3267).
gtcgataaggagacgaata

SEQ ID NO: 748199 - DNA, 19 bp, Mus musculus
  siRNA target sequence for D8Ertd594e (NM_133791.1,3251-3269).
cgataaggagacgaataca

SEQ ID NO: 748200 - DNA, 19 bp, Mus musculus
  siRNA target sequence for D8Ertd594e (NM_133791.1,3273-3291).
gaagtggttgacagcaata

SEQ ID NO: 748201 - DNA, 19 bp, Mus musculus
  siRNA target sequence for D8Ertd594e (NM_133791.1,3336-3354).
catccattcgtgagaaaca

SEQ ID NO: 748202 - DNA, 19 bp, Mus musculus
  siRNA target sequence for D8Ertd594e (NM_133791.1,3357-3375).
gtgatagtgcgctcacaaa

SEQ ID NO: 748203 - DNA, 19 bp, Mus musculus
  siRNA target sequence for D8Ertd594e (NM_133791.1,3388-3406).
gcgagcgaagtcagtacat

SEQ ID NO: 748204 - DNA, 19 bp, Mus musculus
  siRNA target sequence for D8Ertd594e (NM_133791.1,3390-3408).
gagcgaagtcagtacatct

SEQ ID NO: 748205 - DNA, 19 bp, Mus musculus
  siRNA target sequence for D8Ertd594e (NM_133791.1,3399-3417).
cagtacatctgcaggttaa

SEQ ID NO: 748206 - DNA, 19 bp, Mus musculus
  siRNA target sequence for D8Ertd594e (NM_133791.1,3448-3466).
ccaaaaaatccttgtttgt

SEQ ID NO: 748207 - DNA, 19 bp, Mus musculus
  siRNA target sequence for D8Ertd594e (NM_133791.1,3486-3504).
cgcagtttgcgggtcaaaa

SEQ ID NO: 748208 - DNA, 19 bp, Mus musculus
  siRNA target sequence for D8Ertd594e (NM_133791.1,3601-3619).
gccagagtcgcctcaatga

SEQ ID NO: 748209 - DNA, 19 bp, Mus musculus
  siRNA target sequence for Ttc1 (NM_133795.1,243-261).
cacaggacgaccatgttga

SEQ ID NO: 748210 - DNA, 19 bp, Mus musculus
  siRNA target sequence for Ttc1 (NM_133795.1,331-349).
caaagccagcgatgattct

SEQ ID NO: 748211 - DNA, 19 bp, Mus musculus
  siRNA target sequence for Ttc1 (NM_133795.1,335-353).
gccagcgatgattctagtt

SEQ ID NO: 748212 - DNA, 19 bp, Mus musculus
  siRNA target sequence for Ttc1 (NM_133795.1,337-355).
cagcgatgattctagttct

SEQ ID NO: 748213 - DNA, 19 bp, Mus musculus
  siRNA target sequence for Ttc1 (NM_133795.1,423-441).
gagaggagagcgctaaact

SEQ ID NO: 748214 - DNA, 19 bp, Mus musculus
  siRNA target sequence for Ttc1 (NM_133795.1,425-443).
gaggagagcgctaaactaa

SEQ ID NO: 748215 - DNA, 19 bp, Mus musculus
  siRNA target sequence for Ttc1 (NM_133795.1,535-553).
ccagaaagatcgatctgtt

SEQ ID NO: 748216 - DNA, 19 bp, Mus musculus
  siRNA target sequence for Ttc1 (NM_133795.1,570-588).
ctgctgcgaggatgaaaca

SEQ ID NO: 748217 - DNA, 19 bp, Mus musculus
  siRNA target sequence for Ttc1 (NM_133795.1,643-661).
cacctatatccgtgcaata

SEQ ID NO: 748218 - DNA, 19 bp, Mus musculus
  siRNA target sequence for Ttc1 (NM_133795.1,645-663).
cctatatccgtgcaatact

SEQ ID NO: 748219 - DNA, 19 bp, Mus musculus
  siRNA target sequence for Ttc1 (NM_133795.1,664-682).
gaggagagctgaattatat

SEQ ID NO: 748220 - DNA, 19 bp, Mus musculus
  siRNA target sequence for Ttc1 (NM_133795.1,666-684).
ggagagctgaattatatga

SEQ ID NO: 748221 - DNA, 19 bp, Mus musculus
  siRNA target sequence for Ttc1 (NM_133795.1,669-687).
gagctgaattatatgagaa

SEQ ID NO: 748222 - DNA, 19 bp, Mus musculus
  siRNA target sequence for Ttc1 (NM_133795.1,707-725).
gcactggaagattataaat

SEQ ID NO: 748223 - DNA, 19 bp, Mus musculus
  siRNA target sequence for Ttc1 (NM_133795.1,767-785).
gcttgtatgagattaccta

SEQ ID NO: 748224 - DNA, 19 bp, Mus musculus
  siRNA target sequence for Ttc1 (NM_133795.1,768-786).
cttgtatgagattacctaa

SEQ ID NO: 748225 - DNA, 19 bp, Mus musculus
  siRNA target sequence for Ttc1 (NM_133795.1,820-838).
ggagatgttaggtaaacta

SEQ ID NO: 748226 - DNA, 19 bp, Mus musculus
  siRNA target sequence for Ttc1 (NM_133795.1,826-844).
gttaggtaaactaaaagat

SEQ ID NO: 748227 - DNA, 19 bp, Mus musculus
  siRNA target sequence for Ttc1 (NM_133795.1,917-935).
ggctcctactccatcaatt

SEQ ID NO: 748228 - DNA, 19 bp, Mus musculus
  siRNA target sequence for Ttc1 (NM_133795.1,918-936).
gctcctactccatcaattt

SEQ ID NO: 748229 - DNA, 19 bp, Mus musculus
  siRNA target sequence for Ttc1 (NM_133795.1,919-937).
ctcctactccatcaatttt

SEQ ID NO: 748230 - DNA, 19 bp, Mus musculus
  siRNA target sequence for Ttc1 (NM_133795.1,938-956).
gttcaaaatccgaataata

SEQ ID NO: 748231 - DNA, 19 bp, Mus musculus
  siRNA target sequence for 4833439L19Rik (NM_133797.1,414-432).
ggcattcagctatgatgat

SEQ ID NO: 748232 - DNA, 19 bp, Mus musculus
  siRNA target sequence for 4833439L19Rik (NM_133797.1,486-504).
cccctggaagccagtgatt

SEQ ID NO: 748233 - DNA, 19 bp, Mus musculus
  siRNA target sequence for C78541 (NM_133800.2,112-130).
ggctcgttctcaactttga

SEQ ID NO: 748234 - DNA, 19 bp, Mus musculus
  siRNA target sequence for C78541 (NM_133800.2,113-131).
gctcgttctcaactttgat

SEQ ID NO: 748235 - DNA, 19 bp, Mus musculus
  siRNA target sequence for C78541 (NM_133800.2,192-210).
gcagccattgaagagataa

SEQ ID NO: 748236 - DNA, 19 bp, Mus musculus
  siRNA target sequence for C78541 (NM_133800.2,340-358).
cagagtcggtgcagtatga

SEQ ID NO: 748237 - DNA, 19 bp, Mus musculus
  siRNA target sequence for C78541 (NM_133800.2,674-692).
ccgtcggatgactggaaaa

SEQ ID NO: 748238 - DNA, 19 bp, Mus musculus
  siRNA target sequence for C76800 (NM_133801.1,235-253).
gccaaaagatacaacataa

SEQ ID NO: 748239 - DNA, 19 bp, Mus musculus
  siRNA target sequence for C76800 (NM_133801.1,236-254).
ccaaaagatacaacataat

SEQ ID NO: 748240 - DNA, 19 bp, Mus musculus
  siRNA target sequence for C76800 (NM_133801.1,313-331).
cgagatctgagcaacaaga

SEQ ID NO: 748241 - DNA, 19 bp, Mus musculus
  siRNA target sequence for C76800 (NM_133801.1,323-341).
gcaacaagaagatttacca

SEQ ID NO: 748242 - DNA, 19 bp, Mus musculus
  siRNA target sequence for C76800 (NM_133801.1,468-486).
ccgtgtcaatggcaaatca

SEQ ID NO: 748243 - DNA, 19 bp, Mus musculus
  siRNA target sequence for C76800 (NM_133801.1,668-686).
ggaacaaggtcctaaacca

SEQ ID NO: 748244 - DNA, 19 bp, Mus musculus
  siRNA target sequence for C76800 (NM_133801.1,776-794).
gtgagctgcgcattcatga

SEQ ID NO: 748245 - DNA, 19 bp, Mus musculus
  siRNA target sequence for C76800 (NM_133801.1,1249-1267).
ctcttcatggcgaagaaga

SEQ ID NO: 748246 - DNA, 19 bp, Mus musculus
  siRNA target sequence for C76800 (NM_133801.1,1595-1613).
gcagcgagcagacagtaaa

SEQ ID NO: 748247 - DNA, 19 bp, Mus musculus
  siRNA target sequence for 6720481D13Rik (NM_133804.1,1421-1439).
gtgagtcagccaatacaca

SEQ ID NO: 748248 - DNA, 19 bp, Mus musculus
  siRNA target sequence for 6720481D13Rik (NM_133804.1,1534-1552).
cgacttcgggcctcactaa

SEQ ID NO: 748249 - DNA, 19 bp, Mus musculus
  siRNA target sequence for 6720481D13Rik (NM_133804.1,1535-1553).
gacttcgggcctcactaaa

SEQ ID NO: 748250 - DNA, 19 bp, Mus musculus
  siRNA target sequence for 6720481D13Rik (NM_133804.1,2505-2523).
gggtattaggggcaagttt

SEQ ID NO: 748251 - DNA, 19 bp, Mus musculus
  siRNA target sequence for 6720481D13Rik (NM_133804.1,2644-2662).
cttctgggcatcttctgtt

SEQ ID NO: 748252 - DNA, 19 bp, Mus musculus
  siRNA target sequence for 6720481D13Rik (NM_133804.1,2853-2871).
gggctgcccttgtgaaagt

SEQ ID NO: 748253 - DNA, 19 bp, Mus musculus
  siRNA target sequence for 6720481D13Rik (NM_133804.1,2969-2987).
ggaagcgagtcgagtttgt

SEQ ID NO: 748254 - DNA, 19 bp, Mus musculus
  siRNA target sequence for 6720481D13Rik (NM_133804.1,2979-2997).
cgagtttgtgacatttgca

SEQ ID NO: 748255 - DNA, 19 bp, Mus musculus
  siRNA target sequence for 6720481D13Rik (NM_133804.1,3118-3136).
gaggagcttcgaaactaca

SEQ ID NO: 748256 - DNA, 19 bp, Mus musculus
  siRNA target sequence for Cops8 (NM_133805.2,605-623).
gcggacaacgccttcagtt

SEQ ID NO: 748257 - DNA, 19 bp, Mus musculus
  siRNA target sequence for Cops8 (NM_133805.2,606-624).
cggacaacgccttcagttt

SEQ ID NO: 748258 - DNA, 19 bp, Mus musculus
  siRNA target sequence for Cops8 (NM_133805.2,608-626).
gacaacgccttcagtttca

SEQ ID NO: 748259 - DNA, 19 bp, Mus musculus
  siRNA target sequence for Cops8 (NM_133805.2,724-742).
ccagaacgacatgaataat

SEQ ID NO: 748260 - DNA, 19 bp, Mus musculus
  siRNA target sequence for Cops8 (NM_133805.2,760-778).
gaggataccacctgctata

SEQ ID NO: 748261 - DNA, 19 bp, Mus musculus
  siRNA target sequence for Cops8 (NM_133805.2,762-780).
ggataccacctgctataaa

SEQ ID NO: 748262 - DNA, 19 bp, Mus musculus
  siRNA target sequence for Cops8 (NM_133805.2,823-841).
gcgaatctggcaaagagat

SEQ ID NO: 748263 - DNA, 19 bp, Mus musculus
  siRNA target sequence for Cops8 (NM_133805.2,824-842).
cgaatctggcaaagagatt

SEQ ID NO: 748264 - DNA, 19 bp, Mus musculus
  siRNA target sequence for Cops8 (NM_133805.2,943-961).
cctggtctctcaagcttat

SEQ ID NO: 748265 - DNA, 19 bp, Mus musculus
  siRNA target sequence for Cops8 (NM_133805.2,964-982).
ctccatcatcgcagatgat

SEQ ID NO: 748266 - DNA, 19 bp, Mus musculus
  siRNA target sequence for Cops8 (NM_133805.2,970-988).
catcgcagatgattttgca

SEQ ID NO: 748267 - DNA, 19 bp, Mus musculus
  siRNA target sequence for Cops8 (NM_133805.2,1049-1067).
gccgactccaccacaagaa

SEQ ID NO: 748268 - DNA, 19 bp, Mus musculus
  siRNA target sequence for Cops8 (NM_133805.2,1050-1068).
ccgactccaccacaagaat

SEQ ID NO: 748269 - DNA, 19 bp, Mus musculus
  siRNA target sequence for Cops8 (NM_133805.2,1106-1124).
gtctccttgaacaggttta

SEQ ID NO: 748270 - DNA, 19 bp, Mus musculus
  siRNA target sequence for Cops8 (NM_133805.2,1117-1135).
caggtttatccccttatca

SEQ ID NO: 748271 - DNA, 19 bp, Mus musculus
  siRNA target sequence for Cops8 (NM_133805.2,1119-1137).
ggtttatccccttatcaga

SEQ ID NO: 748272 - DNA, 19 bp, Mus musculus
  siRNA target sequence for Cops8 (NM_133805.2,1196-1214).
gtggctttcctggaaaact

SEQ ID NO: 748273 - DNA, 19 bp, Mus musculus
  siRNA target sequence for AA959742 (NM_133807.1,249-267).
gcctcagcgacctgaatga

SEQ ID NO: 748274 - DNA, 19 bp, Mus musculus
  siRNA target sequence for AA959742 (NM_133807.1,298-316).
caaggctacggtattggat

SEQ ID NO: 748275 - DNA, 19 bp, Mus musculus
  siRNA target sequence for AA959742 (NM_133807.1,360-378).
gcctcacacacctggtaaa

SEQ ID NO: 748276 - DNA, 19 bp, Mus musculus
  siRNA target sequence for AA959742 (NM_133807.1,406-424).
gcagctacccgcagacttt

SEQ ID NO: 748277 - DNA, 19 bp, Mus musculus
  siRNA target sequence for AA959742 (NM_133807.1,807-825).
ccaagcgggagcaagagaa

SEQ ID NO: 748278 - DNA, 19 bp, Mus musculus
  siRNA target sequence for AA959742 (NM_133807.1,959-977).
gcaggagggctggttgtat

SEQ ID NO: 748279 - DNA, 19 bp, Mus musculus
  siRNA target sequence for AA959742 (NM_133807.1,1050-1068).
gcctgcgtcatcatgagat

SEQ ID NO: 748280 - DNA, 19 bp, Mus musculus
  siRNA target sequence for Sh3bp4 (NM_133816.1,398-416).
cggaggggactctgataga

SEQ ID NO: 748281 - DNA, 19 bp, Mus musculus
  siRNA target sequence for Sh3bp4 (NM_133816.1,440-458).
caagctttaatgatgtcaa

SEQ ID NO: 748282 - DNA, 19 bp, Mus musculus
  siRNA target sequence for Sh3bp4 (NM_133816.1,443-461).
gctttaatgatgtcaaagt

SEQ ID NO: 748283 - DNA, 19 bp, Mus musculus
  siRNA target sequence for Sh3bp4 (NM_133816.1,489-507).
caaccccacgccttttgga

SEQ ID NO: 748284 - DNA, 19 bp, Mus musculus
  siRNA target sequence for Sh3bp4 (NM_133816.1,506-524).
gaaacgcaaaggaagtgat

SEQ ID NO: 748285 - DNA, 19 bp, Mus musculus
  siRNA target sequence for Sh3bp4 (NM_133816.1,535-553).
gactattgcccaaacaact

SEQ ID NO: 748286 - DNA, 19 bp, Mus musculus
  siRNA target sequence for Sh3bp4 (NM_133816.1,662-680).
cctacgtgcagccattaaa

SEQ ID NO: 748287 - DNA, 19 bp, Mus musculus
  siRNA target sequence for Sh3bp4 (NM_133816.1,707-725).
gtggcatgatcgacaatct

SEQ ID NO: 748288 - DNA, 19 bp, Mus musculus
  siRNA target sequence for Sh3bp4 (NM_133816.1,779-797).
ggaccgatgaccagaaaga

SEQ ID NO: 748289 - DNA, 19 bp, Mus musculus
  siRNA target sequence for Sh3bp4 (NM_133816.1,802-820).
ggcaggccctatagtaaca

SEQ ID NO: 748290 - DNA, 19 bp, Mus musculus
  siRNA target sequence for Sh3bp4 (NM_133816.1,803-821).
gcaggccctatagtaacaa

SEQ ID NO: 748291 - DNA, 19 bp, Mus musculus
  siRNA target sequence for Sh3bp4 (NM_133816.1,875-893).
ccagtacggatgagctaaa

SEQ ID NO: 748292 - DNA, 19 bp, Mus musculus
  siRNA target sequence for Sh3bp4 (NM_133816.1,896-914).
ccaagagtaccgtggattt

SEQ ID NO: 748293 - DNA, 19 bp, Mus musculus
  siRNA target sequence for Sh3bp4 (NM_133816.1,974-992).
gcaccggcaacatctttga

SEQ ID NO: 748294 - DNA, 19 bp, Mus musculus
  siRNA target sequence for Sh3bp4 (NM_133816.1,975-993).
caccggcaacatctttgat

SEQ ID NO: 748295 - DNA, 19 bp, Mus musculus
  siRNA target sequence for Sh3bp4 (NM_133816.1,977-995).
ccggcaacatctttgatga

SEQ ID NO: 748296 - DNA, 19 bp, Mus musculus
  siRNA target sequence for Sh3bp4 (NM_133816.1,1039-1057).
cgggacaacccctttttca

SEQ ID NO: 748297 - DNA, 19 bp, Mus musculus
  siRNA target sequence for Sh3bp4 (NM_133816.1,1042-1060).
gacaacccctttttcagaa

SEQ ID NO: 748298 - DNA, 19 bp, Mus musculus
  siRNA target sequence for Sh3bp4 (NM_133816.1,1151-1169).
cgcctgtcccggaacagtt

SEQ ID NO: 748299 - DNA, 19 bp, Mus musculus
  siRNA target sequence for Sh3bp4 (NM_133816.1,1152-1170).
gcctgtcccggaacagttt

SEQ ID NO: 748300 - DNA, 19 bp, Mus musculus
  siRNA target sequence for Sh3bp4 (NM_133816.1,1156-1174).
gtcccggaacagtttcaaa

SEQ ID NO: 748301 - DNA, 19 bp, Mus musculus
  siRNA target sequence for Sh3bp4 (NM_133816.1,1333-1351).
cttcctgacaccaacatca

SEQ ID NO: 748302 - DNA, 19 bp, Mus musculus
  siRNA target sequence for Sh3bp4 (NM_133816.1,1423-1441).
cctccgctggaccttaaca

SEQ ID NO: 748303 - DNA, 19 bp, Mus musculus
  siRNA target sequence for Sh3bp4 (NM_133816.1,1476-1494).
ggtgaagctgagtaaccta

SEQ ID NO: 748304 - DNA, 19 bp, Mus musculus
  siRNA target sequence for Sh3bp4 (NM_133816.1,1495-1513).
gaggtgagtaccttcatca

SEQ ID NO: 748305 - DNA, 19 bp, Mus musculus
  siRNA target sequence for Sh3bp4 (NM_133816.1,1498-1516).
gtgagtaccttcatcatct

SEQ ID NO: 748306 - DNA, 19 bp, Mus musculus
  siRNA target sequence for Sh3bp4 (NM_133816.1,1539-1557).
ggtgaagggcgacatcttt

SEQ ID NO: 748307 - DNA, 19 bp, Mus musculus
  siRNA target sequence for Sh3bp4 (NM_133816.1,1540-1558).
gtgaagggcgacatcttta

SEQ ID NO: 748308 - DNA, 19 bp, Mus musculus
  siRNA target sequence for Sh3bp4 (NM_133816.1,1730-1748).
ccaccgtgtgggatttcat

SEQ ID NO: 748309 - DNA, 19 bp, Mus musculus
  siRNA target sequence for Sh3bp4 (NM_133816.1,1733-1751).
ccgtgtgggatttcatcaa

SEQ ID NO: 748310 - DNA, 19 bp, Mus musculus
  siRNA target sequence for Sh3bp4 (NM_133816.1,1734-1752).
cgtgtgggatttcatcaat

SEQ ID NO: 748311 - DNA, 19 bp, Mus musculus
  siRNA target sequence for Sh3bp4 (NM_133816.1,1735-1753).
gtgtgggatttcatcaata

SEQ ID NO: 748312 - DNA, 19 bp, Mus musculus
  siRNA target sequence for Sh3bp4 (NM_133816.1,1758-1776).
ggtcaccgtgggtctctat

SEQ ID NO: 748313 - DNA, 19 bp, Mus musculus
  siRNA target sequence for Sh3bp4 (NM_133816.1,1815-1833).
gaccatttttggacatgat

SEQ ID NO: 748314 - DNA, 19 bp, Mus musculus
  siRNA target sequence for Sh3bp4 (NM_133816.1,1967-1985).
ccaatatgactaactatga

SEQ ID NO: 748315 - DNA, 19 bp, Mus musculus
  siRNA target sequence for Sh3bp4 (NM_133816.1,2174-2192).
cccctaaaagcgccattaa

SEQ ID NO: 748316 - DNA, 19 bp, Mus musculus
  siRNA target sequence for Sh3bp4 (NM_133816.1,2175-2193).
ccctaaaagcgccattaaa

SEQ ID NO: 748317 - DNA, 19 bp, Mus musculus
  siRNA target sequence for Sh3bp4 (NM_133816.1,2199-2217).
gggacagaggaggtttctt

SEQ ID NO: 748318 - DNA, 19 bp, Mus musculus
  siRNA target sequence for Sh3bp4 (NM_133816.1,2200-2218).
ggacagaggaggtttctta

SEQ ID NO: 748319 - DNA, 19 bp, Mus musculus
  siRNA target sequence for Sh3bp4 (NM_133816.1,2201-2219).
gacagaggaggtttcttaa

SEQ ID NO: 748320 - DNA, 19 bp, Mus musculus
  siRNA target sequence for Sh3bp4 (NM_133816.1,2203-2221).
cagaggaggtttcttaaga

SEQ ID NO: 748321 - DNA, 19 bp, Mus musculus
  siRNA target sequence for Sh3bp4 (NM_133816.1,2227-2245).
gaggtcgggaagatcatct

SEQ ID NO: 748322 - DNA, 19 bp, Mus musculus
  siRNA target sequence for Sh3bp4 (NM_133816.1,2230-2248).
gtcgggaagatcatcttgt

SEQ ID NO: 748323 - DNA, 19 bp, Mus musculus
  siRNA target sequence for Sh3bp4 (NM_133816.1,2260-2278).
gttacaaccaagtatccaa

SEQ ID NO: 748324 - DNA, 19 bp, Mus musculus
  siRNA target sequence for Sh3bp4 (NM_133816.1,2295-2313).
cgtgtctagcctcaagttt

SEQ ID NO: 748325 - DNA, 19 bp, Mus musculus
  siRNA target sequence for Sh3bp4 (NM_133816.1,2579-2597).
cctgcaagttccttaccta

SEQ ID NO: 748326 - DNA, 19 bp, Mus musculus
  siRNA target sequence for Sh3bp4 (NM_133816.1,2609-2627).
ctgtgcggaccttactcat

SEQ ID NO: 748327 - DNA, 19 bp, Mus musculus
  siRNA target sequence for Sh3bp4 (NM_133816.1,2765-2783).
gtaacaaccctgacaacaa

SEQ ID NO: 748328 - DNA, 19 bp, Mus musculus
  siRNA target sequence for Sh3bp4 (NM_133816.1,3022-3040).
gcctatgacttcttactca

SEQ ID NO: 748329 - DNA, 19 bp, Mus musculus
  siRNA target sequence for 4930515K21Rik (NM_133817.1,87-105).
cggagataatagaatctgt

SEQ ID NO: 748330 - DNA, 19 bp, Mus musculus
  siRNA target sequence for 4930515K21Rik (NM_133817.1,131-149).
gagtctaccacggatgaaa

SEQ ID NO: 748331 - DNA, 19 bp, Mus musculus
  siRNA target sequence for 4930515K21Rik (NM_133817.1,151-169).
cgaagatgacattcagttt

SEQ ID NO: 748332 - DNA, 19 bp, Mus musculus
  siRNA target sequence for 4930515K21Rik (NM_133817.1,160-178).
cattcagtttgttagtgaa

SEQ ID NO: 748333 - DNA, 19 bp, Mus musculus
  siRNA target sequence for 4930515K21Rik (NM_133817.1,183-201).
cgttaagacccgttttgga

SEQ ID NO: 748334 - DNA, 19 bp, Mus musculus
  siRNA target sequence for 4930515K21Rik (NM_133817.1,184-202).
gttaagacccgttttggaa

SEQ ID NO: 748335 - DNA, 19 bp, Mus musculus
  siRNA target sequence for 4930515K21Rik (NM_133817.1,189-207).
gacccgttttggaatacat

SEQ ID NO: 748336 - DNA, 19 bp, Mus musculus
  siRNA target sequence for 4930515K21Rik (NM_133817.1,270-288).
gcaaagactatatagatca

SEQ ID NO: 748337 - DNA, 19 bp, Mus musculus
  siRNA target sequence for 4930515K21Rik (NM_133817.1,295-313).
ggataaagttgctttaact

SEQ ID NO: 748338 - DNA, 19 bp, Mus musculus
  siRNA target sequence for 4930515K21Rik (NM_133817.1,296-314).
gataaagttgctttaactt

SEQ ID NO: 748339 - DNA, 19 bp, Mus musculus
  siRNA target sequence for 4930515K21Rik (NM_133817.1,329-347).
cgccatgttgaagtagaaa

SEQ ID NO: 748340 - DNA, 19 bp, Mus musculus
  siRNA target sequence for 4930515K21Rik (NM_133817.1,331-349).
ccatgttgaagtagaaaaa

SEQ ID NO: 748341 - DNA, 19 bp, Mus musculus
  siRNA target sequence for 4930515K21Rik (NM_133817.1,370-388).
cagggcatttagggaaaaa

SEQ ID NO: 748342 - DNA, 19 bp, Mus musculus
  siRNA target sequence for 4930515K21Rik (NM_133817.1,400-418).
gcacgctcatggtttacaa

SEQ ID NO: 748343 - DNA, 19 bp, Mus musculus
  siRNA target sequence for 4930515K21Rik (NM_133817.1,561-579).
ggtctgagaagccaatttt

SEQ ID NO: 748344 - DNA, 19 bp, Mus musculus
  siRNA target sequence for 4930515K21Rik (NM_133817.1,572-590).
ccaattttgtgtcctataa

SEQ ID NO: 748345 - DNA, 19 bp, Mus musculus
  siRNA target sequence for 4930515K21Rik (NM_133817.1,584-602).
cctataatgcactgtaaca

SEQ ID NO: 748346 - DNA, 19 bp, Mus musculus
  siRNA target sequence for 4930515K21Rik (NM_133817.1,585-603).
ctataatgcactgtaacaa

SEQ ID NO: 748347 - DNA, 19 bp, Mus musculus
  siRNA target sequence for 4930515K21Rik (NM_133817.1,597-615).
gtaacaaggaatttgacaa

SEQ ID NO: 748348 - DNA, 19 bp, Mus musculus
  siRNA target sequence for 4930515K21Rik (NM_133817.1,626-644).
ctgttgggacatttgaaaa

SEQ ID NO: 748349 - DNA, 19 bp, Mus musculus
  siRNA target sequence for 4930515K21Rik (NM_133817.1,659-677).
ccatgtgatcccacaatta

SEQ ID NO: 748350 - DNA, 19 bp, Mus musculus
  siRNA target sequence for 4930515K21Rik (NM_133817.1,663-681).
gtgatcccacaattacgtt

SEQ ID NO: 748351 - DNA, 19 bp, Mus musculus
  siRNA target sequence for 4930515K21Rik (NM_133817.1,686-704).
ggacctctggctaattcgt

SEQ ID NO: 748352 - DNA, 19 bp, Mus musculus
  siRNA target sequence for 4930515K21Rik (NM_133817.1,687-705).
gacctctggctaattcgtt

SEQ ID NO: 748353 - DNA, 19 bp, Mus musculus
  siRNA target sequence for 4930515K21Rik (NM_133817.1,718-736).
gtgctatgaacatttcgtt

SEQ ID NO: 748354 - DNA, 19 bp, Mus musculus
  siRNA target sequence for 4930515K21Rik (NM_133817.1,780-798).
cagccgatggacatagcaa

SEQ ID NO: 748355 - DNA, 19 bp, Mus musculus
  siRNA target sequence for 4930515K21Rik (NM_133817.1,782-800).
gccgatggacatagcaata

SEQ ID NO: 748356 - DNA, 19 bp, Mus musculus
  siRNA target sequence for 4930515K21Rik (NM_133817.1,801-819).
gccttcttcctcagattat

SEQ ID NO: 748357 - DNA, 19 bp, Mus musculus
  siRNA target sequence for 4930515K21Rik (NM_133817.1,802-820).
ccttcttcctcagattatt

SEQ ID NO: 748358 - DNA, 19 bp, Mus musculus
  siRNA target sequence for 4930515K21Rik (NM_133817.1,806-824).
cttcctcagattattcaat

SEQ ID NO: 748359 - DNA, 19 bp, Mus musculus
  siRNA target sequence for 4930515K21Rik (NM_133817.1,809-827).
cctcagattattcaatgtt

SEQ ID NO: 748360 - DNA, 19 bp, Mus musculus
  siRNA target sequence for 4930515K21Rik (NM_133817.1,810-828).
ctcagattattcaatgtta

SEQ ID NO: 748361 - DNA, 19 bp, Mus musculus
  siRNA target sequence for 4930515K21Rik (NM_133817.1,814-832).
gattattcaatgttatgct

SEQ ID NO: 748362 - DNA, 19 bp, Mus musculus
  siRNA target sequence for 4930515K21Rik (NM_133817.1,869-887).
gagtgtttgaagcatatgt

SEQ ID NO: 748363 - DNA, 19 bp, Mus musculus
  siRNA target sequence for 4930515K21Rik (NM_133817.1,871-889).
gtgtttgaagcatatgtct

SEQ ID NO: 748364 - DNA, 19 bp, Mus musculus
  siRNA target sequence for 4930515K21Rik (NM_133817.1,913-931).
ctttaaactgagtgataat

SEQ ID NO: 748365 - DNA, 19 bp, Mus musculus
  siRNA target sequence for 4930515K21Rik (NM_133817.1,993-1011).
gcaaagatgttccatttca

SEQ ID NO: 748366 - DNA, 19 bp, Mus musculus
  siRNA target sequence for 4930515K21Rik (NM_133817.1,1072-1090).
cagggttcgttgtcaaaat

SEQ ID NO: 748367 - DNA, 19 bp, Mus musculus
  siRNA target sequence for 4930515K21Rik (NM_133817.1,1075-1093).
ggttcgttgtcaaaatgct

SEQ ID NO: 748368 - DNA, 19 bp, Mus musculus
  siRNA target sequence for 4930515K21Rik (NM_133817.1,1103-1121).
gctatagctgaaaaaagca

SEQ ID NO: 748369 - DNA, 19 bp, Mus musculus
  siRNA target sequence for 4930515K21Rik (NM_133817.1,1104-1122).
ctatagctgaaaaaagcat

SEQ ID NO: 748370 - DNA, 19 bp, Mus musculus
  siRNA target sequence for 4930515K21Rik (NM_133817.1,1110-1128).
ctgaaaaaagcattactca

SEQ ID NO: 748371 - DNA, 19 bp, Mus musculus
  siRNA target sequence for 4930515K21Rik (NM_133817.1,1120-1138).
cattactcaggttgcaaaa

SEQ ID NO: 748372 - DNA, 19 bp, Mus musculus
  siRNA target sequence for 4930515K21Rik (NM_133817.1,1127-1145).
caggttgcaaaagaattca

SEQ ID NO: 748373 - DNA, 19 bp, Mus musculus
  siRNA target sequence for 4930515K21Rik (NM_133817.1,1129-1147).
ggttgcaaaagaattcata

SEQ ID NO: 748374 - DNA, 19 bp, Mus musculus
  siRNA target sequence for 4930515K21Rik (NM_133817.1,1144-1162).
catagtaagaggttattgt

SEQ ID NO: 748375 - DNA, 19 bp, Mus musculus
  siRNA target sequence for 4930515K21Rik (NM_133817.1,1155-1173).
gttattgttcagattgcaa

SEQ ID NO: 748376 - DNA, 19 bp, Mus musculus
  siRNA target sequence for 4930515K21Rik (NM_133817.1,1170-1188).
gcaaccaggtctttatgga

SEQ ID NO: 748377 - DNA, 19 bp, Mus musculus
  siRNA target sequence for 4930515K21Rik (NM_133817.1,1198-1216).
cacccaaagtcacaagaat

SEQ ID NO: 748378 - DNA, 19 bp, Mus musculus
  siRNA target sequence for 4930515K21Rik (NM_133817.1,1238-1256).
gcgaactcggtggaagaat

SEQ ID NO: 748379 - DNA, 19 bp, Mus musculus
  siRNA target sequence for 4930515K21Rik (NM_133817.1,1240-1258).
gaactcggtggaagaatct

SEQ ID NO: 748380 - DNA, 19 bp, Mus musculus
  siRNA target sequence for 4930515K21Rik (NM_133817.1,1288-1306).
gagtcggcctccttgtgat

SEQ ID NO: 748381 - DNA, 19 bp, Mus musculus
  siRNA target sequence for 4930515K21Rik (NM_133817.1,1294-1312).
gcctccttgtgatttacat

SEQ ID NO: 748382 - DNA, 19 bp, Mus musculus
  siRNA target sequence for 4930515K21Rik (NM_133817.1,1347-1365).
ggattctgtccgttaaaga

SEQ ID NO: 748383 - DNA, 19 bp, Mus musculus
  siRNA target sequence for 4930515K21Rik (NM_133817.1,1368-1386).
ccagtgcagaggattgtat

SEQ ID NO: 748384 - DNA, 19 bp, Mus musculus
  siRNA target sequence for 4930515K21Rik (NM_133817.1,1503-1521).
gtgaagaggcggtagaaaa

SEQ ID NO: 748385 - DNA, 19 bp, Mus musculus
  siRNA target sequence for 4930515K21Rik (NM_133817.1,1512-1530).
cggtagaaaagcatgtttt

SEQ ID NO: 748386 - DNA, 19 bp, Mus musculus
  siRNA target sequence for 4930515K21Rik (NM_133817.1,1531-1549).
ctcggcaaacacaatgtgt

SEQ ID NO: 748387 - DNA, 19 bp, Mus musculus
  siRNA target sequence for 4930515K21Rik (NM_133817.1,1534-1552).
ggcaaacacaatgtgttat

SEQ ID NO: 748388 - DNA, 19 bp, Mus musculus
  siRNA target sequence for 4930515K21Rik (NM_133817.1,1540-1558).
cacaatgtgttataagtgt

SEQ ID NO: 748389 - DNA, 19 bp, Mus musculus
  siRNA target sequence for 4930515K21Rik (NM_133817.1,1587-1605).
cgggggtcatgcgtttaca

SEQ ID NO: 748390 - DNA, 19 bp, Mus musculus
  siRNA target sequence for 4930515K21Rik (NM_133817.1,1590-1608).
gggtcatgcgtttacacat

SEQ ID NO: 748391 - DNA, 19 bp, Mus musculus
  siRNA target sequence for 4930515K21Rik (NM_133817.1,1653-1671).
ggtgtcggacgtgcaaaaa

SEQ ID NO: 748392 - DNA, 19 bp, Mus musculus
  siRNA target sequence for 4930515K21Rik (NM_133817.1,1656-1674).
gtcggacgtgcaaaaagga

SEQ ID NO: 748393 - DNA, 19 bp, Mus musculus
  siRNA target sequence for 4930515K21Rik (NM_133817.1,1662-1680).
cgtgcaaaaaggagttagt

SEQ ID NO: 748394 - DNA, 19 bp, Mus musculus
  siRNA target sequence for 4930515K21Rik (NM_133817.1,1663-1681).
gtgcaaaaaggagttagta

SEQ ID NO: 748395 - DNA, 19 bp, Mus musculus
  siRNA target sequence for 4930515K21Rik (NM_133817.1,1795-1813).
ggagagccatttgaatact

SEQ ID NO: 748396 - DNA, 19 bp, Mus musculus
  siRNA target sequence for 4930515K21Rik (NM_133817.1,1953-1971).
gccaccggtttcacagata

SEQ ID NO: 748397 - DNA, 19 bp, Mus musculus
  siRNA target sequence for 4930515K21Rik (NM_133817.1,1979-1997).
gcccactgcagaaagactt

SEQ ID NO: 748398 - DNA, 19 bp, Mus musculus
  siRNA target sequence for 4930515K21Rik (NM_133817.1,2042-2060).
gacagtgagatcatgatga

SEQ ID NO: 748399 - DNA, 19 bp, Mus musculus
  siRNA target sequence for 4930515K21Rik (NM_133817.1,2134-2152).
cagcatagattatgtgttt

SEQ ID NO: 748400 - DNA, 19 bp, Mus musculus
  siRNA target sequence for 4930515K21Rik (NM_133817.1,2190-2208).
gcgattttaaaatagtaga

SEQ ID NO: 748401 - DNA, 19 bp, Mus musculus
  siRNA target sequence for 4930515K21Rik (NM_133817.1,2207-2225).
gagaccagtagtttactaa

SEQ ID NO: 748402 - DNA, 19 bp, Mus musculus
  siRNA target sequence for 4930515K21Rik (NM_133817.1,2351-2369).
cagaatgtgaccgacatta

SEQ ID NO: 748403 - DNA, 19 bp, Mus musculus
  siRNA target sequence for 4930515K21Rik (NM_133817.1,2417-2435).
cagcagtatgtgatcaagt

SEQ ID NO: 748404 - DNA, 19 bp, Mus musculus
  siRNA target sequence for 4930515K21Rik (NM_133817.1,2704-2722).
gcggaccatgactcacata

SEQ ID NO: 748405 - DNA, 19 bp, Mus musculus
  siRNA target sequence for 4930515K21Rik (NM_133817.1,2706-2724).
ggaccatgactcacatagt

SEQ ID NO: 748406 - DNA, 19 bp, Mus musculus
  siRNA target sequence for 4930515K21Rik (NM_133817.1,2709-2727).
ccatgactcacatagtctt

SEQ ID NO: 748407 - DNA, 19 bp, Mus musculus
  siRNA target sequence for 4930515K21Rik (NM_133817.1,2715-2733).
ctcacatagtctttgtaga

SEQ ID NO: 748408 - DNA, 19 bp, Mus musculus
  siRNA target sequence for 4930515K21Rik (NM_133817.1,2717-2735).
cacatagtctttgtagatt

SEQ ID NO: 748409 - DNA, 19 bp, Mus musculus
  siRNA target sequence for 4930515K21Rik (NM_133817.1,2743-2761).
ctggtccaacttttttggt

SEQ ID NO: 748410 - DNA, 19 bp, Mus musculus
  siRNA target sequence for 4930515K21Rik (NM_133817.1,2749-2767).
caacttttttggtcatcta

SEQ ID NO: 748411 - DNA, 19 bp, Mus musculus
  siRNA target sequence for 4930515K21Rik (NM_133817.1,2837-2855).
ctcagctgtaaggtctata

SEQ ID NO: 748412 - DNA, 19 bp, Mus musculus
  siRNA target sequence for 4930515K21Rik (NM_133817.1,2839-2857).
cagctgtaaggtctataat

SEQ ID NO: 748413 - DNA, 19 bp, Mus musculus
  siRNA target sequence for 4930515K21Rik (NM_133817.1,2841-2859).
gctgtaaggtctataatta

SEQ ID NO: 748414 - DNA, 19 bp, Mus musculus
  siRNA target sequence for 4930515K21Rik (NM_133817.1,2844-2862).
gtaaggtctataattactt

SEQ ID NO: 748415 - DNA, 19 bp, Mus musculus
  siRNA target sequence for 4930515K21Rik (NM_133817.1,2888-2906).
catcctcgctgcagtaaaa

SEQ ID NO: 748416 - DNA, 19 bp, Mus musculus
  siRNA target sequence for 4930515K21Rik (NM_133817.1,2918-2936).
gcggattttgccatatgta

SEQ ID NO: 748417 - DNA, 19 bp, Mus musculus
  siRNA target sequence for 4930515K21Rik (NM_133817.1,2919-2937).
cggattttgccatatgtat

SEQ ID NO: 748418 - DNA, 19 bp, Mus musculus
  siRNA target sequence for 4930515K21Rik (NM_133817.1,3011-3029).
ctggagctagagaatcaat

SEQ ID NO: 748419 - DNA, 19 bp, Mus musculus
  siRNA target sequence for 4930515K21Rik (NM_133817.1,3085-3103).
catgatgtgtgccttgtta

SEQ ID NO: 748420 - DNA, 19 bp, Mus musculus
  siRNA target sequence for 4930515K21Rik (NM_133817.1,3095-3113).
gccttgttaaatagcatat

SEQ ID NO: 748421 - DNA, 19 bp, Mus musculus
  siRNA target sequence for 4930515K21Rik (NM_133817.1,3142-3160).
cgatagctcggggatgaaa

SEQ ID NO: 748422 - DNA, 19 bp, Mus musculus
  siRNA target sequence for AI597479 (NM_133818.1,243-261).
ggatttgccaaagaataga

SEQ ID NO: 748423 - DNA, 19 bp, Mus musculus
  siRNA target sequence for AI597479 (NM_133818.1,291-309).
gcatcatgaagtgaaaaat

SEQ ID NO: 748424 - DNA, 19 bp, Mus musculus
  siRNA target sequence for AI597479 (NM_133818.1,328-346).
gctgtagatggattaagga

SEQ ID NO: 748425 - DNA, 19 bp, Mus musculus
  siRNA target sequence for AI597479 (NM_133818.1,329-347).
ctgtagatggattaaggaa

SEQ ID NO: 748426 - DNA, 19 bp, Mus musculus
  siRNA target sequence for AI597479 (NM_133818.1,344-362).
ggaaaaggcccctcattgt

SEQ ID NO: 748427 - DNA, 19 bp, Mus musculus
  siRNA target sequence for AI597479 (NM_133818.1,380-398).
ccagcacaagcatcaaagt

SEQ ID NO: 748428 - DNA, 19 bp, Mus musculus
  siRNA target sequence for AI597479 (NM_133818.1,383-401).
gcacaagcatcaaagtgaa

SEQ ID NO: 748429 - DNA, 19 bp, Mus musculus
  siRNA target sequence for AI597479 (NM_133818.1,384-402).
cacaagcatcaaagtgaaa

SEQ ID NO: 748430 - DNA, 19 bp, Mus musculus
  siRNA target sequence for AI597479 (NM_133818.1,497-515).
ggatttcacccctagtgtt

SEQ ID NO: 748431 - DNA, 19 bp, Mus musculus
  siRNA target sequence for AI597479 (NM_133818.1,505-523).
cccctagtgttgttttcca

SEQ ID NO: 748432 - DNA, 19 bp, Mus musculus
  siRNA target sequence for AI597479 (NM_133818.1,506-524).
ccctagtgttgttttccaa

SEQ ID NO: 748433 - DNA, 19 bp, Mus musculus
  siRNA target sequence for AI597479 (NM_133818.1,507-525).
cctagtgttgttttccaat

SEQ ID NO: 748434 - DNA, 19 bp, Mus musculus
  siRNA target sequence for AI597479 (NM_133818.1,538-556).
cataaaatggagcacaata

SEQ ID NO: 748435 - DNA, 19 bp, Mus musculus
  siRNA target sequence for AI597479 (NM_133818.1,547-565).
gagcacaataataatgaca

SEQ ID NO: 748436 - DNA, 19 bp, Mus musculus
  siRNA target sequence for AI597479 (NM_133818.1,630-648).
gtcccctgttggaactact

SEQ ID NO: 748437 - DNA, 19 bp, Mus musculus
  siRNA target sequence for AI597479 (NM_133818.1,663-681).
gcgggctgctcctaaggaa

SEQ ID NO: 748438 - DNA, 19 bp, Mus musculus
  siRNA target sequence for Ppp1r15b (NM_133819.1,395-413).
cgccttcctctcgacaaaa

SEQ ID NO: 748439 - DNA, 19 bp, Mus musculus
  siRNA target sequence for Ppp1r15b (NM_133819.1,449-467).
ggtactggaccaaattgct

SEQ ID NO: 748440 - DNA, 19 bp, Mus musculus
  siRNA target sequence for Ppp1r15b (NM_133819.1,559-577).
gattttgccgcaagttaca

SEQ ID NO: 748441 - DNA, 19 bp, Mus musculus
  siRNA target sequence for Ppp1r15b (NM_133819.1,672-690).
ggttgtcagttctcttgat

SEQ ID NO: 748442 - DNA, 19 bp, Mus musculus
  siRNA target sequence for Ppp1r15b (NM_133819.1,859-877).
cgagaacttgactcttcat

SEQ ID NO: 748443 - DNA, 19 bp, Mus musculus
  siRNA target sequence for Ppp1r15b (NM_133819.1,893-911).
gcgttcagagcttaggtaa

SEQ ID NO: 748444 - DNA, 19 bp, Mus musculus
  siRNA target sequence for Ppp1r15b (NM_133819.1,894-912).
cgttcagagcttaggtaat

SEQ ID NO: 748445 - DNA, 19 bp, Mus musculus
  siRNA target sequence for Ppp1r15b (NM_133819.1,895-913).
gttcagagcttaggtaatt

SEQ ID NO: 748446 - DNA, 19 bp, Mus musculus
  siRNA target sequence for Ppp1r15b (NM_133819.1,898-916).
cagagcttaggtaatttca

SEQ ID NO: 748447 - DNA, 19 bp, Mus musculus
  siRNA target sequence for Ppp1r15b (NM_133819.1,1009-1027).
gtgggtttccgaacactaa

SEQ ID NO: 748448 - DNA, 19 bp, Mus musculus
  siRNA target sequence for Ppp1r15b (NM_133819.1,1146-1164).
ccaccaccttcgtatgaaa

SEQ ID NO: 748449 - DNA, 19 bp, Mus musculus
  siRNA target sequence for Ppp1r15b (NM_133819.1,1156-1174).
cgtatgaaacggctagaat

SEQ ID NO: 748450 - DNA, 19 bp, Mus musculus
  siRNA target sequence for Ppp1r15b (NM_133819.1,1157-1175).
gtatgaaacggctagaatt

SEQ ID NO: 748451 - DNA, 19 bp, Mus musculus
  siRNA target sequence for Ppp1r15b (NM_133819.1,1215-1233).
ccaagataatggctatcat

SEQ ID NO: 748452 - DNA, 19 bp, Mus musculus
  siRNA target sequence for Ppp1r15b (NM_133819.1,1261-1279).
cggatggacccacaacatt

SEQ ID NO: 748453 - DNA, 19 bp, Mus musculus
  siRNA target sequence for Ppp1r15b (NM_133819.1,1324-1342).
ccggagcccactgagaaaa

SEQ ID NO: 748454 - DNA, 19 bp, Mus musculus
  siRNA target sequence for Ppp1r15b (NM_133819.1,1325-1343).
cggagcccactgagaaaaa

SEQ ID NO: 748455 - DNA, 19 bp, Mus musculus
  siRNA target sequence for Ppp1r15b (NM_133819.1,1380-1398).
ccagggaagcagtctgttt

SEQ ID NO: 748456 - DNA, 19 bp, Mus musculus
  siRNA target sequence for Ppp1r15b (NM_133819.1,1383-1401).
gggaagcagtctgttttgt

SEQ ID NO: 748457 - DNA, 19 bp, Mus musculus
  siRNA target sequence for Ppp1r15b (NM_133819.1,1385-1403).
gaagcagtctgttttgtga

SEQ ID NO: 748458 - DNA, 19 bp, Mus musculus
  siRNA target sequence for Ppp1r15b (NM_133819.1,1400-1418).
gtgaattacccgtggaaaa

SEQ ID NO: 748459 - DNA, 19 bp, Mus musculus
  siRNA target sequence for Ppp1r15b (NM_133819.1,1424-1442).
gtgaagaggaccacactaa

SEQ ID NO: 748460 - DNA, 19 bp, Mus musculus
  siRNA target sequence for Ppp1r15b (NM_133819.1,1429-1447).
gaggaccacactaatgcaa

SEQ ID NO: 748461 - DNA, 19 bp, Mus musculus
  siRNA target sequence for Ppp1r15b (NM_133819.1,1444-1462).
gcaactgacctctcagata

SEQ ID NO: 748462 - DNA, 19 bp, Mus musculus
  siRNA target sequence for Ppp1r15b (NM_133819.1,1495-1513).
gtttgtagcaacaaactga

SEQ ID NO: 748463 - DNA, 19 bp, Mus musculus
  siRNA target sequence for Ppp1r15b (NM_133819.1,1499-1517).
gtagcaacaaactgataga

SEQ ID NO: 748464 - DNA, 19 bp, Mus musculus
  siRNA target sequence for Ppp1r15b (NM_133819.1,1502-1520).
gcaacaaactgatagatta

SEQ ID NO: 748465 - DNA, 19 bp, Mus musculus
  siRNA target sequence for Ppp1r15b (NM_133819.1,1594-1612).
gaggacgatggctttgata

SEQ ID NO: 748466 - DNA, 19 bp, Mus musculus
  siRNA target sequence for Ppp1r15b (NM_133819.1,1619-1637).
gctccctgtctgaatcaga

SEQ ID NO: 748467 - DNA, 19 bp, Mus musculus
  siRNA target sequence for Ppp1r15b (NM_133819.1,1863-1881).
ggaaccgagtgcagatgaa

SEQ ID NO: 748468 - DNA, 19 bp, Mus musculus
  siRNA target sequence for Ppp1r15b (NM_133819.1,1921-1939).
gaggacccctacaaccttt

SEQ ID NO: 748469 - DNA, 19 bp, Mus musculus
  siRNA target sequence for Ppp1r15b (NM_133819.1,1923-1941).
ggacccctacaacctttta

SEQ ID NO: 748470 - DNA, 19 bp, Mus musculus
  siRNA target sequence for Ppp1r15b (NM_133819.1,1924-1942).
gacccctacaaccttttaa

SEQ ID NO: 748471 - DNA, 19 bp, Mus musculus
  siRNA target sequence for Ppp1r15b (NM_133819.1,1926-1944).
cccctacaaccttttaaat

SEQ ID NO: 748472 - DNA, 19 bp, Mus musculus
  siRNA target sequence for Ppp1r15b (NM_133819.1,1960-1978).
caaccgtcagggaagaatt

SEQ ID NO: 748473 - DNA, 19 bp, Mus musculus
  siRNA target sequence for Ppp1r15b (NM_133819.1,1963-1981).
ccgtcagggaagaattgga

SEQ ID NO: 748474 - DNA, 19 bp, Mus musculus
  siRNA target sequence for Ppp1r15b (NM_133819.1,1964-1982).
cgtcagggaagaattggaa

SEQ ID NO: 748475 - DNA, 19 bp, Mus musculus
  siRNA target sequence for Ppp1r15b (NM_133819.1,2023-2041).
gccttctctggccatcata

SEQ ID NO: 748476 - DNA, 19 bp, Mus musculus
  siRNA target sequence for Ppp1r15b (NM_133819.1,2034-2052).
ccatcataccttactttct

SEQ ID NO: 748477 - DNA, 19 bp, Mus musculus
  siRNA target sequence for Ppp1r15b (NM_133819.1,2038-2056).
cataccttactttcttgta

SEQ ID NO: 748478 - DNA, 19 bp, Mus musculus
  siRNA target sequence for Ppp1r15b (NM_133819.1,2054-2072).
gtaaggcccagctgttaga

SEQ ID NO: 748479 - DNA, 19 bp, Mus musculus
  siRNA target sequence for Ppp1r15b (NM_133819.1,2112-2130).
ggctcttgctggagaaaga

SEQ ID NO: 748480 - DNA, 19 bp, Mus musculus
  siRNA target sequence for Ppp1r15b (NM_133819.1,2170-2188).
gaagttactgagtattata

SEQ ID NO: 748481 - DNA, 19 bp, Mus musculus
  siRNA target sequence for Ppp1r15b (NM_133819.1,2243-2261).
gcaggttccagaaacgaat

SEQ ID NO: 748482 - DNA, 19 bp, Mus musculus
  siRNA target sequence for Ppp1r15b (NM_133819.1,2244-2262).
caggttccagaaacgaatt

SEQ ID NO: 748483 - DNA, 19 bp, Mus musculus
  siRNA target sequence for Ppp1r15b (NM_133819.1,2246-2264).
ggttccagaaacgaattca

SEQ ID NO: 748484 - DNA, 19 bp, Mus musculus
  siRNA target sequence for Ppp1r15b (NM_133819.1,2247-2265).
gttccagaaacgaattcaa

SEQ ID NO: 748485 - DNA, 19 bp, Mus musculus
  siRNA target sequence for Ppp1r15b (NM_133819.1,2327-2345).
gactgaggatcgagtcaaa

SEQ ID NO: 748486 - DNA, 19 bp, Mus musculus
  siRNA target sequence for Ppp1r15b (NM_133819.1,2338-2356).
gagtcaaaggacttactgt

SEQ ID NO: 748487 - DNA, 19 bp, Mus musculus
  siRNA target sequence for Ppp1r15b (NM_133819.1,2342-2360).
caaaggacttactgttgta

SEQ ID NO: 748488 - DNA, 19 bp, Mus musculus
  siRNA target sequence for Ppp1r15b (NM_133819.1,2353-2371).
ctgttgtacagcaatgtta

SEQ ID NO: 748489 - DNA, 19 bp, Mus musculus
  siRNA target sequence for D1Ertd622e (NM_133825.2,433-451).
cacatggactctaactact

SEQ ID NO: 748490 - DNA, 19 bp, Mus musculus
  siRNA target sequence for D1Ertd622e (NM_133825.2,470-488).
gtgaggaactcctgaagtt

SEQ ID NO: 748491 - DNA, 19 bp, Mus musculus
  siRNA target sequence for D1Ertd622e (NM_133825.2,573-591).
gcgttcctctcgtctgtat

SEQ ID NO: 748492 - DNA, 19 bp, Mus musculus
  siRNA target sequence for D1Ertd622e (NM_133825.2,574-592).
cgttcctctcgtctgtata

SEQ ID NO: 748493 - DNA, 19 bp, Mus musculus
  siRNA target sequence for D1Ertd622e (NM_133825.2,575-593).
gttcctctcgtctgtataa

SEQ ID NO: 748494 - DNA, 19 bp, Mus musculus
  siRNA target sequence for D1Ertd622e (NM_133825.2,579-597).
ctctcgtctgtataaaact

SEQ ID NO: 748495 - DNA, 19 bp, Mus musculus
  siRNA target sequence for D1Ertd622e (NM_133825.2,583-601).
cgtctgtataaaactagaa

SEQ ID NO: 748496 - DNA, 19 bp, Mus musculus
  siRNA target sequence for D1Ertd622e (NM_133825.2,605-623).
ggtactatcagccatatga

SEQ ID NO: 748497 - DNA, 19 bp, Mus musculus
  siRNA target sequence for D1Ertd622e (NM_133825.2,680-698).
gcaccaaacccttacctta

SEQ ID NO: 748498 - DNA, 19 bp, Mus musculus
  siRNA target sequence for D1Ertd622e (NM_133825.2,683-701).
ccaaacccttaccttatga

SEQ ID NO: 748499 - DNA, 19 bp, Mus musculus
  siRNA target sequence for D1Ertd622e (NM_133825.2,689-707).
ccttaccttatgaacctta

SEQ ID NO: 748500 - DNA, 19 bp, Mus musculus
  siRNA target sequence for D1Ertd622e (NM_133825.2,690-708).
cttaccttatgaaccttat

SEQ ID NO: 748501 - DNA, 19 bp, Mus musculus
  siRNA target sequence for D1Ertd622e (NM_133825.2,723-741).
gcccttgcctctatgtctt

SEQ ID NO: 748502 - DNA, 19 bp, Mus musculus
  siRNA target sequence for D1Ertd622e (NM_133825.2,729-747).
gcctctatgtcttcttaaa

SEQ ID NO: 748503 - DNA, 19 bp, Mus musculus
  siRNA target sequence for D1Ertd622e (NM_133825.2,753-771).
gagggctcactccaaatct

SEQ ID NO: 748504 - DNA, 19 bp, Mus musculus
  siRNA target sequence for D1Ertd622e (NM_133825.2,774-792).
ggactacctcaatctagat

SEQ ID NO: 748505 - DNA, 19 bp, Mus musculus
  siRNA target sequence for D1Ertd622e (NM_133825.2,775-793).
gactacctcaatctagata

SEQ ID NO: 748506 - DNA, 19 bp, Mus musculus
  siRNA target sequence for D1Ertd622e (NM_133825.2,781-799).
ctcaatctagataaaatga

SEQ ID NO: 748507 - DNA, 19 bp, Mus musculus
  siRNA target sequence for D1Ertd622e (NM_133825.2,858-876).
ccgaggggaccgagtgttt

SEQ ID NO: 748508 - DNA, 19 bp, Mus musculus
  siRNA target sequence for D1Ertd622e (NM_133825.2,868-886).
cgagtgtttgctagaaaca

SEQ ID NO: 748509 - DNA, 19 bp, Mus musculus
  siRNA target sequence for D1Ertd622e (NM_133825.2,869-887).
gagtgtttgctagaaacaa

SEQ ID NO: 748510 - DNA, 19 bp, Mus musculus
  siRNA target sequence for D1Ertd622e (NM_133825.2,871-889).
gtgtttgctagaaacaata

SEQ ID NO: 748511 - DNA, 19 bp, Mus musculus
  siRNA target sequence for D1Ertd622e (NM_133825.2,873-891).
gtttgctagaaacaataca

SEQ ID NO: 748512 - DNA, 19 bp, Mus musculus
  siRNA target sequence for AW212394 (NM_133829.1,492-510).
ggtattggaatcgactata

SEQ ID NO: 748513 - DNA, 19 bp, Mus musculus
  siRNA target sequence for AW212394 (NM_133829.1,498-516).
ggaatcgactatactcata

SEQ ID NO: 748514 - DNA, 19 bp, Mus musculus
  siRNA target sequence for AW212394 (NM_133829.1,499-517).
gaatcgactatactcatat

SEQ ID NO: 748515 - DNA, 19 bp, Mus musculus
  siRNA target sequence for AW212394 (NM_133829.1,503-521).
cgactatactcatatagat

SEQ ID NO: 748516 - DNA, 19 bp, Mus musculus
  siRNA target sequence for AW212394 (NM_133829.1,561-579).
cggaactaccagattgtct

SEQ ID NO: 748517 - DNA, 19 bp, Mus musculus
  siRNA target sequence for AW212394 (NM_133829.1,562-580).
ggaactaccagattgtctt

SEQ ID NO: 748518 - DNA, 19 bp, Mus musculus
  siRNA target sequence for AW212394 (NM_133829.1,639-657).
cgctacaaccacttcaaca

SEQ ID NO: 748519 - DNA, 19 bp, Mus musculus
  siRNA target sequence for AW212394 (NM_133829.1,644-662).
caaccacttcaacaatagt

SEQ ID NO: 748520 - DNA, 19 bp, Mus musculus
  siRNA target sequence for AW212394 (NM_133829.1,647-665).
ccacttcaacaatagtgat

SEQ ID NO: 748521 - DNA, 19 bp, Mus musculus
  siRNA target sequence for AW212394 (NM_133829.1,653-671).
caacaatagtgatggtaaa

SEQ ID NO: 748522 - DNA, 19 bp, Mus musculus
  siRNA target sequence for AW212394 (NM_133829.1,774-792).
gacttgatcaagttgctat

SEQ ID NO: 748523 - DNA, 19 bp, Mus musculus
  siRNA target sequence for AW212394 (NM_133829.1,829-847).
ggttcatgggttttggata

SEQ ID NO: 748524 - DNA, 19 bp, Mus musculus
  siRNA target sequence for AW212394 (NM_133829.1,874-892).
ggcatctggaagacctaaa

SEQ ID NO: 748525 - DNA, 19 bp, Mus musculus
  siRNA target sequence for AW212394 (NM_133829.1,940-958).
ccgagttgaccgcttactt

SEQ ID NO: 748526 - DNA, 19 bp, Mus musculus
  siRNA target sequence for AW212394 (NM_133829.1,942-960).
gagttgaccgcttacttct

SEQ ID NO: 748527 - DNA, 19 bp, Mus musculus
  siRNA target sequence for AW212394 (NM_133829.1,964-982).
gccacaagcttattgagtt

SEQ ID NO: 748528 - DNA, 19 bp, Mus musculus
  siRNA target sequence for AW212394 (NM_133829.1,978-996).
gagttgattggccatatca

SEQ ID NO: 748529 - DNA, 19 bp, Mus musculus
  siRNA target sequence for AW212394 (NM_133829.1,987-1005).
ggccatatcagggttttat

SEQ ID NO: 748530 - DNA, 19 bp, Mus musculus
  siRNA target sequence for AW212394 (NM_133829.1,1021-1039).
gtaatacagctcgctatat

SEQ ID NO: 748531 - DNA, 19 bp, Mus musculus
  siRNA target sequence for AW212394 (NM_133829.1,1027-1045).
cagctcgctatatttacat

SEQ ID NO: 748532 - DNA, 19 bp, Mus musculus
  siRNA target sequence for AW212394 (NM_133829.1,1029-1047).
gctcgctatatttacattt

SEQ ID NO: 748533 - DNA, 19 bp, Mus musculus
  siRNA target sequence for AW212394 (NM_133829.1,1067-1085).
gactgtcctccctatggaa

SEQ ID NO: 748534 - DNA, 19 bp, Mus musculus
  siRNA target sequence for AW212394 (NM_133829.1,1073-1091).
cctccctatggaagttctt

SEQ ID NO: 748535 - DNA, 19 bp, Mus musculus
  siRNA target sequence for AW212394 (NM_133829.1,1117-1135).
gggcagcgtgcatctctta

SEQ ID NO: 748536 - DNA, 19 bp, Mus musculus
  siRNA target sequence for AW212394 (NM_133829.1,1232-1250).
cggaggcgtgttagtcaat

SEQ ID NO: 748537 - DNA, 19 bp, Mus musculus
  siRNA target sequence for AW212394 (NM_133829.1,1233-1251).
ggaggcgtgttagtcaatt

SEQ ID NO: 748538 - DNA, 19 bp, Mus musculus
  siRNA target sequence for AW212394 (NM_133829.1,1234-1252).
gaggcgtgttagtcaatta

SEQ ID NO: 748539 - DNA, 19 bp, Mus musculus
  siRNA target sequence for AW212394 (NM_133829.1,1236-1254).
ggcgtgttagtcaattatt

SEQ ID NO: 748540 - DNA, 19 bp, Mus musculus
  siRNA target sequence for AW212394 (NM_133829.1,1238-1256).
cgtgttagtcaattatttt

SEQ ID NO: 748541 - DNA, 19 bp, Mus musculus
  siRNA target sequence for AW212394 (NM_133829.1,1331-1349).
gctggcagtaccagatgaa

SEQ ID NO: 748542 - DNA, 19 bp, Mus musculus
  siRNA target sequence for AW212394 (NM_133829.1,1546-1564).
cttgggtgacctttgtcta

SEQ ID NO: 748543 - DNA, 19 bp, Mus musculus
  siRNA target sequence for AW212394 (NM_133829.1,1574-1592).
ccaagttaaagagctaatt

SEQ ID NO: 748544 - DNA, 19 bp, Mus musculus
  siRNA target sequence for AW212394 (NM_133829.1,1618-1636).
ctgagatacaacctttaca

SEQ ID NO: 748545 - DNA, 19 bp, Mus musculus
  siRNA target sequence for AW212394 (NM_133829.1,1682-1700).
gcgtgccccacgtgaaact

SEQ ID NO: 748546 - DNA, 19 bp, Mus musculus
  siRNA target sequence for AW212394 (NM_133829.1,1684-1702).
gtgccccacgtgaaactca

SEQ ID NO: 748547 - DNA, 19 bp, Mus musculus
  siRNA target sequence for 1110033G07Rik (NM_133835.1,349-367).
gtgacccaccacaagctaa

SEQ ID NO: 748548 - DNA, 19 bp, Mus musculus
  siRNA target sequence for 1110033G07Rik (NM_133835.1,354-372).
ccaccacaagctaatacat

SEQ ID NO: 748549 - DNA, 19 bp, Mus musculus
  siRNA target sequence for 1110033G07Rik (NM_133835.1,407-425).
cgatcttggaagaaaacat

SEQ ID NO: 748550 - DNA, 19 bp, Mus musculus
  siRNA target sequence for 1110033G07Rik (NM_133835.1,429-447).
ggaccaagacgtcttgtta

SEQ ID NO: 748551 - DNA, 19 bp, Mus musculus
  siRNA target sequence for 1110033G07Rik (NM_133835.1,430-448).
gaccaagacgtcttgttat

SEQ ID NO: 748552 - DNA, 19 bp, Mus musculus
  siRNA target sequence for 1110033G07Rik (NM_133835.1,436-454).
gacgtcttgttattgataa

SEQ ID NO: 748553 - DNA, 19 bp, Mus musculus
  siRNA target sequence for 1110033G07Rik (NM_133835.1,684-702).
gaatcccgatgcagttgaa

SEQ ID NO: 748554 - DNA, 19 bp, Mus musculus
  siRNA target sequence for G431001I09Rik (NM_133837.2,88-106).
ccgcgtggtacccactttt

SEQ ID NO: 748555 - DNA, 19 bp, Mus musculus
  siRNA target sequence for G431001I09Rik (NM_133837.2,108-126).
cgaagccttaccatcaaga

SEQ ID NO: 748556 - DNA, 19 bp, Mus musculus
  siRNA target sequence for G431001I09Rik (NM_133837.2,138-156).
ccgcttcctcagaatgtga

SEQ ID NO: 748557 - DNA, 19 bp, Mus musculus
  siRNA target sequence for G431001I09Rik (NM_133837.2,139-157).
cgcttcctcagaatgtgaa

SEQ ID NO: 748558 - DNA, 19 bp, Mus musculus
  siRNA target sequence for G431001I09Rik (NM_133837.2,140-158).
gcttcctcagaatgtgaaa

SEQ ID NO: 748559 - DNA, 19 bp, Mus musculus
  siRNA target sequence for G431001I09Rik (NM_133837.2,145-163).
ctcagaatgtgaaagacta

SEQ ID NO: 748560 - DNA, 19 bp, Mus musculus
  siRNA target sequence for G431001I09Rik (NM_133837.2,149-167).
gaatgtgaaagactatcta

SEQ ID NO: 748561 - DNA, 19 bp, Mus musculus
  siRNA target sequence for G431001I09Rik (NM_133837.2,155-173).
gaaagactatctacttgat

SEQ ID NO: 748562 - DNA, 19 bp, Mus musculus
  siRNA target sequence for G431001I09Rik (NM_133837.2,224-242).
gtcagacagtggtaacgaa

SEQ ID NO: 748563 - DNA, 19 bp, Mus musculus
  siRNA target sequence for G431001I09Rik (NM_133837.2,253-271).
cacagtggtccgatgatga

SEQ ID NO: 748564 - DNA, 19 bp, Mus musculus
  siRNA target sequence for G431001I09Rik (NM_133837.2,270-288).
gagagcacagccacactta

SEQ ID NO: 748565 - DNA, 19 bp, Mus musculus
  siRNA target sequence for G431001I09Rik (NM_133837.2,354-372).
gtcttccctaagcttaact

SEQ ID NO: 748566 - DNA, 19 bp, Mus musculus
  siRNA target sequence for G431001I09Rik (NM_133837.2,415-433).
ccctgaagtgtaaaactct

SEQ ID NO: 748567 - DNA, 19 bp, Mus musculus
  siRNA target sequence for G431001I09Rik (NM_133837.2,485-503).
cacacagccgtttattcat

SEQ ID NO: 748568 - DNA, 19 bp, Mus musculus
  siRNA target sequence for G431001I09Rik (NM_133837.2,517-535).
ctccagacccttgtataga

SEQ ID NO: 748569 - DNA, 19 bp, Mus musculus
  siRNA target sequence for G431001I09Rik (NM_133837.2,540-558).
gagcttgttctccgaaaat

SEQ ID NO: 748570 - DNA, 19 bp, Mus musculus
  siRNA target sequence for G431001I09Rik (NM_133837.2,549-567).
ctccgaaaatggtgtgaat

SEQ ID NO: 748571 - DNA, 19 bp, Mus musculus
  siRNA target sequence for G431001I09Rik (NM_133837.2,551-569).
ccgaaaatggtgtgaatta

SEQ ID NO: 748572 - DNA, 19 bp, Mus musculus
  siRNA target sequence for G431001I09Rik (NM_133837.2,552-570).
cgaaaatggtgtgaattaa

SEQ ID NO: 748573 - DNA, 19 bp, Mus musculus
  siRNA target sequence for G431001I09Rik (NM_133837.2,578-596).
ggctgaattccgatgtttt

SEQ ID NO: 748574 - DNA, 19 bp, Mus musculus
  siRNA target sequence for G431001I09Rik (NM_133837.2,580-598).
ctgaattccgatgttttgt

SEQ ID NO: 748575 - DNA, 19 bp, Mus musculus
  siRNA target sequence for G431001I09Rik (NM_133837.2,587-605).
ccgatgttttgtcaaagaa

SEQ ID NO: 748576 - DNA, 19 bp, Mus musculus
  siRNA target sequence for G431001I09Rik (NM_133837.2,627-645).
cagagggattacacacaat

SEQ ID NO: 748577 - DNA, 19 bp, Mus musculus
  siRNA target sequence for G431001I09Rik (NM_133837.2,631-649).
gggattacacacaatacta

SEQ ID NO: 748578 - DNA, 19 bp, Mus musculus
  siRNA target sequence for G431001I09Rik (NM_133837.2,632-650).
ggattacacacaatactat

SEQ ID NO: 748579 - DNA, 19 bp, Mus musculus
  siRNA target sequence for G431001I09Rik (NM_133837.2,638-656).
cacacaatactatgatcat

SEQ ID NO: 748580 - DNA, 19 bp, Mus musculus
  siRNA target sequence for G431001I09Rik (NM_133837.2,642-660).
caatactatgatcatattt

SEQ ID NO: 748581 - DNA, 19 bp, Mus musculus
  siRNA target sequence for G431001I09Rik (NM_133837.2,688-706).
gcattcaagactttttcaa

SEQ ID NO: 748582 - DNA, 19 bp, Mus musculus
  siRNA target sequence for G431001I09Rik (NM_133837.2,704-722).
caaggaacacctacagtat

SEQ ID NO: 748583 - DNA, 19 bp, Mus musculus
  siRNA target sequence for G431001I09Rik (NM_133837.2,711-729).
cacctacagtataaattct

SEQ ID NO: 748584 - DNA, 19 bp, Mus musculus
  siRNA target sequence for G431001I09Rik (NM_133837.2,713-731).
cctacagtataaattctta

SEQ ID NO: 748585 - DNA, 19 bp, Mus musculus
  siRNA target sequence for G431001I09Rik (NM_133837.2,735-753).
gaagactttgtgttcgata

SEQ ID NO: 748586 - DNA, 19 bp, Mus musculus
  siRNA target sequence for G431001I09Rik (NM_133837.2,738-756).
gactttgtgttcgatatat

SEQ ID NO: 748587 - DNA, 19 bp, Mus musculus
  siRNA target sequence for G431001I09Rik (NM_133837.2,783-801).
ctcattgactttaatccat

SEQ ID NO: 748588 - DNA, 19 bp, Mus musculus
  siRNA target sequence for G431001I09Rik (NM_133837.2,812-830).
cacagactcactgttgttt

SEQ ID NO: 748589 - DNA, 19 bp, Mus musculus
  siRNA target sequence for G431001I09Rik (NM_133837.2,816-834).
gactcactgttgtttactt

SEQ ID NO: 748590 - DNA, 19 bp, Mus musculus
  siRNA target sequence for G431001I09Rik (NM_133837.2,909-927).
gccttccgttgcacaaaca

SEQ ID NO: 748591 - DNA, 19 bp, Mus musculus
  siRNA target sequence for G431001I09Rik (NM_133837.2,968-986).
gctgcccaaggactttgta

SEQ ID NO: 748592 - DNA, 19 bp, Mus musculus
  siRNA target sequence for G431001I09Rik (NM_133837.2,1008-1026).
gctcacaagctcatcgatt

SEQ ID NO: 748593 - DNA, 19 bp, Mus musculus
  siRNA target sequence for 2010311D03Rik (NM_133839.1,107-125).
gagccagactggtttccta

SEQ ID NO: 748594 - DNA, 19 bp, Mus musculus
  siRNA target sequence for 2010311D03Rik (NM_133839.1,123-141).
ctatctcccaggattttgt

SEQ ID NO: 748595 - DNA, 19 bp, Mus musculus
  siRNA target sequence for 2010311D03Rik (NM_133839.1,162-180).
caatccaagagccttttca

SEQ ID NO: 748596 - DNA, 19 bp, Mus musculus
  siRNA target sequence for 2010311D03Rik (NM_133839.1,250-268).
gtgtggcctgatgaaacta

SEQ ID NO: 748597 - DNA, 19 bp, Mus musculus
  siRNA target sequence for 2010311D03Rik (NM_133839.1,300-318).
ccagcttcctgggaatata

SEQ ID NO: 748598 - DNA, 19 bp, Mus musculus
  siRNA target sequence for 2010311D03Rik (NM_133839.1,310-328).
gggaatataggcttcgatt

SEQ ID NO: 748599 - DNA, 19 bp, Mus musculus
  siRNA target sequence for 2010311D03Rik (NM_133839.1,341-359).
ggactgcctcacagaagaa

SEQ ID NO: 748600 - DNA, 19 bp, Mus musculus
  siRNA target sequence for 2010311D03Rik (NM_133839.1,357-375).
gaaaagccaggcccataaa

SEQ ID NO: 748601 - DNA, 19 bp, Mus musculus
  siRNA target sequence for 2010311D03Rik (NM_133839.1,362-380).
gccaggcccataaaacttt

SEQ ID NO: 748602 - DNA, 19 bp, Mus musculus
  siRNA target sequence for 2010311D03Rik (NM_133839.1,399-417).
gcctctttcaactgaaaga

SEQ ID NO: 748603 - DNA, 19 bp, Mus musculus
  siRNA target sequence for 2010311D03Rik (NM_133839.1,410-428).
ctgaaagacacgagtttgt

SEQ ID NO: 748604 - DNA, 19 bp, Mus musculus
  siRNA target sequence for 2010311D03Rik (NM_133839.1,433-451).
gcgcagtatgtaaatgagt

SEQ ID NO: 748605 - DNA, 19 bp, Mus musculus
  siRNA target sequence for 2010311D03Rik (NM_133839.1,434-452).
cgcagtatgtaaatgagtt

SEQ ID NO: 748606 - DNA, 19 bp, Mus musculus
  siRNA target sequence for 2010311D03Rik (NM_133839.1,461-479).
gtgatgcacctgttgaaca

SEQ ID NO: 748607 - DNA, 19 bp, Mus musculus
  siRNA target sequence for 2010311D03Rik (NM_133839.1,472-490).
gttgaacaagaaattaaca

SEQ ID NO: 748608 - DNA, 19 bp, Mus musculus
  siRNA target sequence for 2010311D03Rik (NM_133839.1,547-565).
gagctgctgcggagagatt

SEQ ID NO: 748609 - DNA, 19 bp, Mus musculus
  siRNA target sequence for 2010311D03Rik (NM_133839.1,549-567).
gctgctgcggagagatttt

SEQ ID NO: 748610 - DNA, 19 bp, Mus musculus
  siRNA target sequence for 2010311D03Rik (NM_133839.1,580-598).
ccagaagtggctaatagca

SEQ ID NO: 748611 - DNA, 19 bp, Mus musculus
  siRNA target sequence for 2010311D03Rik (NM_133839.1,581-599).
cagaagtggctaatagcaa

SEQ ID NO: 748612 - DNA, 19 bp, Mus musculus
  siRNA target sequence for 2010311D03Rik (NM_133839.1,586-604).
gtggctaatagcaaactaa

SEQ ID NO: 748613 - DNA, 19 bp, Mus musculus
  siRNA target sequence for 2010311D03Rik (NM_133839.1,620-638).
cccagaaaactgaaaatga

SEQ ID NO: 748614 - DNA, 19 bp, Mus musculus
  siRNA target sequence for 2010311D03Rik (NM_133839.1,787-805).
ggaccatataccaacaaca

SEQ ID NO: 748615 - DNA, 19 bp, Mus musculus
  siRNA target sequence for 2010311D03Rik (NM_133839.1,801-819).
caacacactttttgaaaca

SEQ ID NO: 748616 - DNA, 19 bp, Mus musculus
  siRNA target sequence for 2010311D03Rik (NM_133839.1,826-844).
cggtaccggcatttaggat

SEQ ID NO: 748617 - DNA, 19 bp, Mus musculus
  siRNA target sequence for 2010311D03Rik (NM_133839.1,827-845).
ggtaccggcatttaggatt

SEQ ID NO: 748618 - DNA, 19 bp, Mus musculus
  siRNA target sequence for 2010311D03Rik (NM_133839.1,910-928).
gtaggaagtatcttcacta

SEQ ID NO: 748619 - DNA, 19 bp, Mus musculus
  siRNA target sequence for AI462438 (NM_133840.1,131-149).
gagcgaggaatccaatgat

SEQ ID NO: 748620 - DNA, 19 bp, Mus musculus
  siRNA target sequence for AI462438 (NM_133840.1,133-151).
gcgaggaatccaatgatga

SEQ ID NO: 748621 - DNA, 19 bp, Mus musculus
  siRNA target sequence for AI462438 (NM_133840.1,158-176).
gccaacgactaagtttgaa

SEQ ID NO: 748622 - DNA, 19 bp, Mus musculus
  siRNA target sequence for AI462438 (NM_133840.1,160-178).
caacgactaagtttgaact

SEQ ID NO: 748623 - DNA, 19 bp, Mus musculus
  siRNA target sequence for AI462438 (NM_133840.1,163-181).
cgactaagtttgaactaga

SEQ ID NO: 748624 - DNA, 19 bp, Mus musculus
  siRNA target sequence for AI462438 (NM_133840.1,184-202).
gagaaacagagcttcgatt

SEQ ID NO: 748625 - DNA, 19 bp, Mus musculus
  siRNA target sequence for AI462438 (NM_133840.1,214-232).
cctctcaatcggttcagtt

SEQ ID NO: 748626 - DNA, 19 bp, Mus musculus
  siRNA target sequence for AI462438 (NM_133840.1,223-241).
cggttcagttggagttgtt

SEQ ID NO: 748627 - DNA, 19 bp, Mus musculus
  siRNA target sequence for AI462438 (NM_133840.1,244-262).
ctggcatggcggagatctt

SEQ ID NO: 748628 - DNA, 19 bp, Mus musculus
  siRNA target sequence for AI462438 (NM_133840.1,278-296).
cagaaacaagaaattcact

SEQ ID NO: 748629 - DNA, 19 bp, Mus musculus
  siRNA target sequence for AI462438 (NM_133840.1,361-379).
ggactgaggtggcttatgt

SEQ ID NO: 748630 - DNA, 19 bp, Mus musculus
  siRNA target sequence for AI462438 (NM_133840.1,382-400).
ctaaggacacccctatgtt

SEQ ID NO: 748631 - DNA, 19 bp, Mus musculus
  siRNA target sequence for AI462438 (NM_133840.1,387-405).
gacacccctatgttgcttt

SEQ ID NO: 748632 - DNA, 19 bp, Mus musculus
  siRNA target sequence for AI462438 (NM_133840.1,391-409).
cccctatgttgctttacct

SEQ ID NO: 748633 - DNA, 19 bp, Mus musculus
  siRNA target sequence for AI462438 (NM_133840.1,402-420).
ctttacctcaacactcata

SEQ ID NO: 748634 - DNA, 19 bp, Mus musculus
  siRNA target sequence for AI462438 (NM_133840.1,482-500).
ggtagtaggtcctactgat

SEQ ID NO: 748635 - DNA, 19 bp, Mus musculus
  siRNA target sequence for AI462438 (NM_133840.1,520-538).
gtcgactgctactcaacta

SEQ ID NO: 748636 - DNA, 19 bp, Mus musculus
  siRNA target sequence for AI462438 (NM_133840.1,562-580).
ctacttacgtggagttaga

SEQ ID NO: 748637 - DNA, 19 bp, Mus musculus
  siRNA target sequence for AI462438 (NM_133840.1,565-583).
cttacgtggagttagatgt

SEQ ID NO: 748638 - DNA, 19 bp, Mus musculus
  siRNA target sequence for AI462438 (NM_133840.1,671-689).
ggcccctcttgtgtatcat

SEQ ID NO: 748639 - DNA, 19 bp, Mus musculus
  siRNA target sequence for AI462438 (NM_133840.1,672-690).
gcccctcttgtgtatcatt

SEQ ID NO: 748640 - DNA, 19 bp, Mus musculus
  siRNA target sequence for AI462438 (NM_133840.1,709-727).
gcaccaacatcaagcttta

SEQ ID NO: 748641 - DNA, 19 bp, Mus musculus
  siRNA target sequence for AI462438 (NM_133840.1,742-760).
ctcgcttagcagatgtgtt

SEQ ID NO: 748642 - DNA, 19 bp, Mus musculus
  siRNA target sequence for AI462438 (NM_133840.1,750-768).
gcagatgtgttcaaccaaa

SEQ ID NO: 748643 - DNA, 19 bp, Mus musculus
  siRNA target sequence for AI462438 (NM_133840.1,826-844).
gggtcaagggctatggtta

SEQ ID NO: 748644 - DNA, 19 bp, Mus musculus
  siRNA target sequence for AI462438 (NM_133840.1,909-927).
cgactgtacaacgaattga

SEQ ID NO: 748645 - DNA, 19 bp, Mus musculus
  siRNA target sequence for AI462438 (NM_133840.1,910-928).
gactgtacaacgaattgaa

SEQ ID NO: 748646 - DNA, 19 bp, Mus musculus
  siRNA target sequence for AI462438 (NM_133840.1,912-930).
ctgtacaacgaattgaaaa

SEQ ID NO: 748647 - DNA, 19 bp, Mus musculus
  siRNA target sequence for AI462438 (NM_133840.1,1032-1050).
cgtgagtatttctatggat

SEQ ID NO: 748648 - DNA, 19 bp, Mus musculus
  siRNA target sequence for AI462438 (NM_133840.1,1047-1065).
ggatttcgaggctgtttct

SEQ ID NO: 748649 - DNA, 19 bp, Mus musculus
  siRNA target sequence for AI462438 (NM_133840.1,1048-1066).
gatttcgaggctgtttcta

SEQ ID NO: 748650 - DNA, 19 bp, Mus musculus
  siRNA target sequence for AI462438 (NM_133840.1,1191-1209).
gtcacccctggtagagata

SEQ ID NO: 748651 - DNA, 19 bp, Mus musculus
  siRNA target sequence for AI462438 (NM_133840.1,1195-1213).
cccctggtagagatatggt

SEQ ID NO: 748652 - DNA, 19 bp, Mus musculus
  siRNA target sequence for AI462438 (NM_133840.1,1271-1289).
cagtgtggctggattcatt

SEQ ID NO: 748653 - DNA, 19 bp, Mus musculus
  siRNA target sequence for AI462438 (NM_133840.1,1349-1367).
cccattgcctaagaacttt

SEQ ID NO: 748654 - DNA, 19 bp, Mus musculus
  siRNA target sequence for 2310010I22Rik (NM_133850.1,550-568).
gcgatgggcagggtttcaa

SEQ ID NO: 748655 - DNA, 19 bp, Mus musculus
  siRNA target sequence for 2310010I22Rik (NM_133850.1,566-584).
caacctggttaaaggttat

SEQ ID NO: 748656 - DNA, 19 bp, Mus musculus
  siRNA target sequence for 2310010I22Rik (NM_133850.1,569-587).
cctggttaaaggttatcca

SEQ ID NO: 748657 - DNA, 19 bp, Mus musculus
  siRNA target sequence for 2310010I22Rik (NM_133850.1,570-588).
ctggttaaaggttatccaa

SEQ ID NO: 748658 - DNA, 19 bp, Mus musculus
  siRNA target sequence for 2310010I22Rik (NM_133850.1,633-651).
ggttcgaacatcaaaagtt

SEQ ID NO: 748659 - DNA, 19 bp, Mus musculus
  siRNA target sequence for 2310010I22Rik (NM_133850.1,666-684).
gctttgtgagccactttct

SEQ ID NO: 748660 - DNA, 19 bp, Mus musculus
  siRNA target sequence for Nusap1 (NM_133851.1,111-129).
ctggactcctttaagtaca

SEQ ID NO: 748661 - DNA, 19 bp, Mus musculus
  siRNA target sequence for Nusap1 (NM_133851.1,365-383).
caagaccatccatggaatt

SEQ ID NO: 748662 - DNA, 19 bp, Mus musculus
  siRNA target sequence for Nusap1 (NM_133851.1,368-386).
gaccatccatggaattcct

SEQ ID NO: 748663 - DNA, 19 bp, Mus musculus
  siRNA target sequence for Nusap1 (NM_133851.1,397-415).
ctttgttgcaggatcattt

SEQ ID NO: 748664 - DNA, 19 bp, Mus musculus
  siRNA target sequence for Nusap1 (NM_133851.1,432-450).
gatagtagtaacttccaaa

SEQ ID NO: 748665 - DNA, 19 bp, Mus musculus
  siRNA target sequence for Nusap1 (NM_133851.1,436-454).
gtagtaacttccaaaatca

SEQ ID NO: 748666 - DNA, 19 bp, Mus musculus
  siRNA target sequence for Nusap1 (NM_133851.1,527-545).
cggcaatgcggcttcttca

SEQ ID NO: 748667 - DNA, 19 bp, Mus musculus
  siRNA target sequence for Nusap1 (NM_133851.1,564-582).
gacattaaagattcaaaga

SEQ ID NO: 748668 - DNA, 19 bp, Mus musculus
  siRNA target sequence for Nusap1 (NM_133851.1,601-619).
ctctatgcacggatgagtt

SEQ ID NO: 748669 - DNA, 19 bp, Mus musculus
  siRNA target sequence for Nusap1 (NM_133851.1,603-621).
ctatgcacggatgagtttt

SEQ ID NO: 748670 - DNA, 19 bp, Mus musculus
  siRNA target sequence for Nusap1 (NM_133851.1,622-640).
ctaaacttgggaacaataa

SEQ ID NO: 748671 - DNA, 19 bp, Mus musculus
  siRNA target sequence for Nusap1 (NM_133851.1,627-645).
cttgggaacaataaaagga

SEQ ID NO: 748672 - DNA, 19 bp, Mus musculus
  siRNA target sequence for Nusap1 (NM_133851.1,675-693).
cttcatgaggctcgtttta

SEQ ID NO: 748673 - DNA, 19 bp, Mus musculus
  siRNA target sequence for Nusap1 (NM_133851.1,752-770).
cagttcacttaatgaacta

SEQ ID NO: 748674 - DNA, 19 bp, Mus musculus
  siRNA target sequence for Nusap1 (NM_133851.1,754-772).
gttcacttaatgaactaaa

SEQ ID NO: 748675 - DNA, 19 bp, Mus musculus
  siRNA target sequence for Nusap1 (NM_133851.1,862-880).
gccactcagcaactaaaat

SEQ ID NO: 748676 - DNA, 19 bp, Mus musculus
  siRNA target sequence for Nusap1 (NM_133851.1,901-919).
ctactaaagacaatgaaca

SEQ ID NO: 748677 - DNA, 19 bp, Mus musculus
  siRNA target sequence for Nusap1 (NM_133851.1,1023-1041).
gccactgaaaggacttcta

SEQ ID NO: 748678 - DNA, 19 bp, Mus musculus
  siRNA target sequence for Nusap1 (NM_133851.1,1025-1043).
cactgaaaggacttctatt

SEQ ID NO: 748679 - DNA, 19 bp, Mus musculus
  siRNA target sequence for Nusap1 (NM_133851.1,1033-1051).
ggacttctattgcagttat

SEQ ID NO: 748680 - DNA, 19 bp, Mus musculus
  siRNA target sequence for Nusap1 (NM_133851.1,1034-1052).
gacttctattgcagttatt

SEQ ID NO: 748681 - DNA, 19 bp, Mus musculus
  siRNA target sequence for Nusap1 (NM_133851.1,1087-1105).
ctccaagttctagtaagaa

SEQ ID NO: 748682 - DNA, 19 bp, Mus musculus
  siRNA target sequence for Nusap1 (NM_133851.1,1096-1114).
ctagtaagaagccagtatt

SEQ ID NO: 748683 - DNA, 19 bp, Mus musculus
  siRNA target sequence for Nusap1 (NM_133851.1,1106-1124).
gccagtatttgatctcaaa

SEQ ID NO: 748684 - DNA, 19 bp, Mus musculus
  siRNA target sequence for Nusap1 (NM_133851.1,1216-1234).
gtgtaagcagagttacctt

SEQ ID NO: 748685 - DNA, 19 bp, Mus musculus
  siRNA target sequence for Snap25bp (NM_133854.2,160-178).
gtgcacgcggtcagagaaa

SEQ ID NO: 748686 - DNA, 19 bp, Mus musculus
  siRNA target sequence for Snap25bp (NM_133854.2,184-202).
gtagagctccgggaacaaa

SEQ ID NO: 748687 - DNA, 19 bp, Mus musculus
  siRNA target sequence for Snap25bp (NM_133854.2,230-248).
ggatcaatgaggatcagaa

SEQ ID NO: 748688 - DNA, 19 bp, Mus musculus
  siRNA target sequence for Snap25bp (NM_133854.2,258-276).
ggatctggacccctatgtt

SEQ ID NO: 748689 - DNA, 19 bp, Mus musculus
  siRNA target sequence for Snap25bp (NM_133854.2,259-277).
gatctggacccctatgtta

SEQ ID NO: 748690 - DNA, 19 bp, Mus musculus
  siRNA target sequence for Snap25bp (NM_133854.2,293-311).
ccaggcgacgagttgtctt

SEQ ID NO: 748691 - DNA, 19 bp, Mus musculus
  siRNA target sequence for Snap25bp (NM_133854.2,304-322).
gttgtcttggtcaacaata

SEQ ID NO: 748692 - DNA, 19 bp, Mus musculus
  siRNA target sequence for Snap25bp (NM_133854.2,307-325).
gtcttggtcaacaatattt

SEQ ID NO: 748693 - DNA, 19 bp, Mus musculus
  siRNA target sequence for Snap25bp (NM_133854.2,309-327).
cttggtcaacaatatttta

SEQ ID NO: 748694 - DNA, 19 bp, Mus musculus
  siRNA target sequence for Snap25bp (NM_133854.2,344-362).
gactaaggcggttaaacca

SEQ ID NO: 748695 - DNA, 19 bp, Mus musculus
  siRNA target sequence for Snap25bp (NM_133854.2,361-379).
cacagcgtggccaaggaaa

SEQ ID NO: 748696 - DNA, 19 bp, Mus musculus
  siRNA target sequence for 2810002E22Rik (NM_133859.1,171-189).
ccgagcttcgggacttcaa

SEQ ID NO: 748697 - DNA, 19 bp, Mus musculus
  siRNA target sequence for 2810002E22Rik (NM_133859.1,172-190).
cgagcttcgggacttcaaa

SEQ ID NO: 748698 - DNA, 19 bp, Mus musculus
  siRNA target sequence for 2810002E22Rik (NM_133859.1,375-393).
gcaagggccgaagaaatga

SEQ ID NO: 748699 - DNA, 19 bp, Mus musculus
  siRNA target sequence for 2810002E22Rik (NM_133859.1,379-397).
gggccgaagaaatgagaaa

SEQ ID NO: 748700 - DNA, 19 bp, Mus musculus
  siRNA target sequence for 2810002E22Rik (NM_133859.1,380-398).
ggccgaagaaatgagaaat

SEQ ID NO: 748701 - DNA, 19 bp, Mus musculus
  siRNA target sequence for 2810002E22Rik (NM_133859.1,432-450).
ctcaggtgaggtcaatgaa

SEQ ID NO: 748702 - DNA, 19 bp, Mus musculus
  siRNA target sequence for 2810002E22Rik (NM_133859.1,653-671).
gtgtacggtggcttccttt

SEQ ID NO: 748703 - DNA, 19 bp, Mus musculus
  siRNA target sequence for 2810002E22Rik (NM_133859.1,655-673).
gtacggtggcttcctttat

SEQ ID NO: 748704 - DNA, 19 bp, Mus musculus
  siRNA target sequence for 2810002E22Rik (NM_133859.1,658-676).
cggtggcttcctttattat

SEQ ID NO: 748705 - DNA, 19 bp, Mus musculus
  siRNA target sequence for 2810002E22Rik (NM_133859.1,699-717).
ctggagggggtggtgaatt

SEQ ID NO: 748706 - DNA, 19 bp, Mus musculus
  siRNA target sequence for 2810002E22Rik (NM_133859.1,724-742).
cactctgcagctgatcaaa

SEQ ID NO: 748707 - DNA, 19 bp, Mus musculus
  siRNA target sequence for 2810002E22Rik (NM_133859.1,812-830).
ggcctgacagcagatacat

SEQ ID NO: 748708 - DNA, 19 bp, Mus musculus
  siRNA target sequence for 2810002E22Rik (NM_133859.1,814-832).
cctgacagcagatacatat

SEQ ID NO: 748709 - DNA, 19 bp, Mus musculus
  siRNA target sequence for 2810002E22Rik (NM_133859.1,815-833).
ctgacagcagatacatata

SEQ ID NO: 748710 - DNA, 19 bp, Mus musculus
  siRNA target sequence for 2810002E22Rik (NM_133859.1,819-837).
cagcagatacatatatcga

SEQ ID NO: 748711 - DNA, 19 bp, Mus musculus
  siRNA target sequence for 2810002E22Rik (NM_133859.1,884-902).
gatgatgacaggcatttgt

SEQ ID NO: 748712 - DNA, 19 bp, Mus musculus
  siRNA target sequence for 2810002E22Rik (NM_133859.1,999-1017).
ggaccctgtacgttgtcta

SEQ ID NO: 748713 - DNA, 19 bp, Mus musculus
  siRNA target sequence for 2810002E22Rik (NM_133859.1,1000-1018).
gaccctgtacgttgtctat

SEQ ID NO: 748714 - DNA, 19 bp, Mus musculus
  siRNA target sequence for 2810002E22Rik (NM_133859.1,1002-1020).
ccctgtacgttgtctataa

SEQ ID NO: 748715 - DNA, 19 bp, Mus musculus
  siRNA target sequence for 2810002E22Rik (NM_133859.1,1032-1050).
ccagtagggctcgtattca

SEQ ID NO: 748716 - DNA, 19 bp, Mus musculus
  siRNA target sequence for 2810002E22Rik (NM_133859.1,1089-1107).
gggcagcactctcctattt

SEQ ID NO: 748717 - DNA, 19 bp, Mus musculus
  siRNA target sequence for 2810002E22Rik (NM_133859.1,1090-1108).
ggcagcactctcctatttt

SEQ ID NO: 748718 - DNA, 19 bp, Mus musculus
  siRNA target sequence for Fgg (NM_133862.1,74-92).
caacgggcctggcatatgt

SEQ ID NO: 748719 - DNA, 19 bp, Mus musculus
  siRNA target sequence for Fgg (NM_133862.1,91-109).
gtggctaccagagataact

SEQ ID NO: 748720 - DNA, 19 bp, Mus musculus
  siRNA target sequence for Fgg (NM_133862.1,93-111).
ggctaccagagataactgt

SEQ ID NO: 748721 - DNA, 19 bp, Mus musculus
  siRNA target sequence for Fgg (NM_133862.1,124-142).
gagagattcggtagtttct

SEQ ID NO: 748722 - DNA, 19 bp, Mus musculus
  siRNA target sequence for Fgg (NM_133862.1,152-170).
cctgtggtatcgcagattt

SEQ ID NO: 748723 - DNA, 19 bp, Mus musculus
  siRNA target sequence for Fgg (NM_133862.1,188-206).
ccgacgtggacaatgatct

SEQ ID NO: 748724 - DNA, 19 bp, Mus musculus
  siRNA target sequence for Fgg (NM_133862.1,212-230).
cgctggaagacatcttatt

SEQ ID NO: 748725 - DNA, 19 bp, Mus musculus
  siRNA target sequence for Fgg (NM_133862.1,308-326).
caaagccaggtatgataga

SEQ ID NO: 748726 - DNA, 19 bp, Mus musculus
  siRNA target sequence for Fgg (NM_133862.1,331-349).
gccactcagaagtctaaga

SEQ ID NO: 748727 - DNA, 19 bp, Mus musculus
  siRNA target sequence for Fgg (NM_133862.1,399-417).
gacaagcattcggtattta

SEQ ID NO: 748728 - DNA, 19 bp, Mus musculus
  siRNA target sequence for Fgg (NM_133862.1,401-419).
caagcattcggtatttaca

SEQ ID NO: 748729 - DNA, 19 bp, Mus musculus
  siRNA target sequence for Fgg (NM_133862.1,588-606).
cttcattcgacctttgaaa

SEQ ID NO: 748730 - DNA, 19 bp, Mus musculus
  siRNA target sequence for Fgg (NM_133862.1,708-726).
ctggattcagtataaagaa

SEQ ID NO: 748731 - DNA, 19 bp, Mus musculus
  siRNA target sequence for Fgg (NM_133862.1,772-790).
ggaaatgagaagattcatt

SEQ ID NO: 748732 - DNA, 19 bp, Mus musculus
  siRNA target sequence for Fgg (NM_133862.1,804-822).
gtccacaattccatatgca

SEQ ID NO: 748733 - DNA, 19 bp, Mus musculus
  siRNA target sequence for Fgg (NM_133862.1,888-906).
gggtcccgagtctgacaaa

SEQ ID NO: 748734 - DNA, 19 bp, Mus musculus
  siRNA target sequence for Fgg (NM_133862.1,889-907).
ggtcccgagtctgacaaat

SEQ ID NO: 748735 - DNA, 19 bp, Mus musculus
  siRNA target sequence for Fgg (NM_133862.1,890-908).
gtcccgagtctgacaaata

SEQ ID NO: 748736 - DNA, 19 bp, Mus musculus
  siRNA target sequence for Fgg (NM_133862.1,953-971).
ccttcgacggctacgattt

SEQ ID NO: 748737 - DNA, 19 bp, Mus musculus
  siRNA target sequence for Fgg (NM_133862.1,979-997).
gaccccagtgacaagtttt

SEQ ID NO: 748738 - DNA, 19 bp, Mus musculus
  siRNA target sequence for Fgg (NM_133862.1,1031-1049).
gggacaacgacaacgataa

SEQ ID NO: 748739 - DNA, 19 bp, Mus musculus
  siRNA target sequence for Fgg (NM_133862.1,1033-1051).
gacaacgacaacgataagt

SEQ ID NO: 748740 - DNA, 19 bp, Mus musculus
  siRNA target sequence for Fgg (NM_133862.1,1035-1053).
caacgacaacgataagttt

SEQ ID NO: 748741 - DNA, 19 bp, Mus musculus
  siRNA target sequence for Fgg (NM_133862.1,1038-1056).
cgacaacgataagtttgaa

SEQ ID NO: 748742 - DNA, 19 bp, Mus musculus
  siRNA target sequence for Fgg (NM_133862.1,1088-1106).
ggtggatgaacaaatgtca

SEQ ID NO: 748743 - DNA, 19 bp, Mus musculus
  siRNA target sequence for Fgg (NM_133862.1,1112-1130).
gccacctcaatggagttta

SEQ ID NO: 748744 - DNA, 19 bp, Mus musculus
  siRNA target sequence for Fgg (NM_133862.1,1132-1150).
caccaaggtggtacttact

SEQ ID NO: 748745 - DNA, 19 bp, Mus musculus
  siRNA target sequence for Fgg (NM_133862.1,1134-1152).
ccaaggtggtacttactca

SEQ ID NO: 748746 - DNA, 19 bp, Mus musculus
  siRNA target sequence for Fgg (NM_133862.1,1138-1156).
ggtggtacttactcaaaat

SEQ ID NO: 748747 - DNA, 19 bp, Mus musculus
  siRNA target sequence for Fgg (NM_133862.1,1141-1159).
ggtacttactcaaaatcat

SEQ ID NO: 748748 - DNA, 19 bp, Mus musculus
  siRNA target sequence for Fgg (NM_133862.1,1151-1169).
caaaatcatctactactaa

SEQ ID NO: 748749 - DNA, 19 bp, Mus musculus
  siRNA target sequence for Fgg (NM_133862.1,1172-1190).
gtttcgacgacggcattat

SEQ ID NO: 748750 - DNA, 19 bp, Mus musculus
  siRNA target sequence for Dclre1b (NM_133865.1,58-76).
ccctggttctgtcatgttt

SEQ ID NO: 748751 - DNA, 19 bp, Mus musculus
  siRNA target sequence for Dclre1b (NM_133865.1,60-78).
ctggttctgtcatgtttct

SEQ ID NO: 748752 - DNA, 19 bp, Mus musculus
  siRNA target sequence for Dclre1b (NM_133865.1,109-127).
cacaggtgattttcgatat

SEQ ID NO: 748753 - DNA, 19 bp, Mus musculus
  siRNA target sequence for Dclre1b (NM_133865.1,157-175).
gatactggggaaacagatt

SEQ ID NO: 748754 - DNA, 19 bp, Mus musculus
  siRNA target sequence for Dclre1b (NM_133865.1,164-182).
gggaaacagattcatactt

SEQ ID NO: 748755 - DNA, 19 bp, Mus musculus
  siRNA target sequence for Dclre1b (NM_133865.1,188-206).
ctagacaacactaattgca

SEQ ID NO: 748756 - DNA, 19 bp, Mus musculus
  siRNA target sequence for Dclre1b (NM_133865.1,297-315).
gactctatagtctaggaaa

SEQ ID NO: 748757 - DNA, 19 bp, Mus musculus
  siRNA target sequence for Dclre1b (NM_133865.1,306-324).
gtctaggaaaagaatcact

SEQ ID NO: 748758 - DNA, 19 bp, Mus musculus
  siRNA target sequence for Dclre1b (NM_133865.1,331-349).
gcaactagcccttgagttt

SEQ ID NO: 748759 - DNA, 19 bp, Mus musculus
  siRNA target sequence for Dclre1b (NM_133865.1,350-368).
cggacctgggtggtattaa

SEQ ID NO: 748760 - DNA, 19 bp, Mus musculus
  siRNA target sequence for Dclre1b (NM_133865.1,352-370).
gacctgggtggtattaagt

SEQ ID NO: 748761 - DNA, 19 bp, Mus musculus
  siRNA target sequence for Dclre1b (NM_133865.1,496-514).
ccagagtcaccctaccatt

SEQ ID NO: 748762 - DNA, 19 bp, Mus musculus
  siRNA target sequence for Dclre1b (NM_133865.1,501-519).
gtcaccctaccattgctat

SEQ ID NO: 748763 - DNA, 19 bp, Mus musculus
  siRNA target sequence for Dclre1b (NM_133865.1,503-521).
caccctaccattgctattt

SEQ ID NO: 748764 - DNA, 19 bp, Mus musculus
  siRNA target sequence for Dclre1b (NM_133865.1,595-613).
ctccgagctccgtgctttt

SEQ ID NO: 748765 - DNA, 19 bp, Mus musculus
  siRNA target sequence for Dclre1b (NM_133865.1,597-615).
ccgagctccgtgcttttgt

SEQ ID NO: 748766 - DNA, 19 bp, Mus musculus
  siRNA target sequence for Dclre1b (NM_133865.1,641-659).
gtgcccatcgtccatcaaa

SEQ ID NO: 748767 - DNA, 19 bp, Mus musculus
  siRNA target sequence for Dclre1b (NM_133865.1,663-681).
cttgtggagagttctttca

SEQ ID NO: 748768 - DNA, 19 bp, Mus musculus
  siRNA target sequence for Dclre1b (NM_133865.1,700-718).
gctcgctatgcctctgatt

SEQ ID NO: 748769 - DNA, 19 bp, Mus musculus
  siRNA target sequence for Dclre1b (NM_133865.1,728-746).
gtgcagcagtacatgagtt

SEQ ID NO: 748770 - DNA, 19 bp, Mus musculus
  siRNA target sequence for Dclre1b (NM_133865.1,804-822).
gaactcagggtgttgtgtt

SEQ ID NO: 748771 - DNA, 19 bp, Mus musculus
  siRNA target sequence for Dclre1b (NM_133865.1,831-849).
ctgaggagaaagctaatca

SEQ ID NO: 748772 - DNA, 19 bp, Mus musculus
  siRNA target sequence for Dclre1b (NM_133865.1,843-861).
ctaatcaggttaaagttga

SEQ ID NO: 748773 - DNA, 19 bp, Mus musculus
  siRNA target sequence for Dclre1b (NM_133865.1,1045-1063).
ggaattctcagtgcaatta

SEQ ID NO: 748774 - DNA, 19 bp, Mus musculus
  siRNA target sequence for Dclre1b (NM_133865.1,1053-1071).
cagtgcaattacaacctat

SEQ ID NO: 748775 - DNA, 19 bp, Mus musculus
  siRNA target sequence for Dclre1b (NM_133865.1,1057-1075).
gcaattacaacctatagat

SEQ ID NO: 748776 - DNA, 19 bp, Mus musculus
  siRNA target sequence for Dclre1b (NM_133865.1,1100-1118).
gagaaaattggcttagagt

SEQ ID NO: 748777 - DNA, 19 bp, Mus musculus
  siRNA target sequence for Dclre1b (NM_133865.1,1237-1255).
caggggcctggcgctaaaa

SEQ ID NO: 748778 - DNA, 19 bp, Mus musculus
  siRNA target sequence for Dclre1b (NM_133865.1,1242-1260).
gcctggcgctaaaatacct

SEQ ID NO: 748779 - DNA, 19 bp, Mus musculus
  siRNA target sequence for Dclre1b (NM_133865.1,1243-1261).
cctggcgctaaaatacctt

SEQ ID NO: 748780 - DNA, 19 bp, Mus musculus
  siRNA target sequence for 9930118K05Rik (NM_133869.2,167-185).
gcatcggtcaacaaggaaa

SEQ ID NO: 748781 - DNA, 19 bp, Mus musculus
  siRNA target sequence for 9930118K05Rik (NM_133869.2,171-189).
cggtcaacaaggaaacgat

SEQ ID NO: 748782 - DNA, 19 bp, Mus musculus
  siRNA target sequence for 9930118K05Rik (NM_133869.2,216-234).
gtgggctttgggcatatga

SEQ ID NO: 748783 - DNA, 19 bp, Mus musculus
  siRNA target sequence for 9930118K05Rik (NM_133869.2,218-236).
gggctttgggcatatgagt

SEQ ID NO: 748784 - DNA, 19 bp, Mus musculus
  siRNA target sequence for 9930118K05Rik (NM_133869.2,238-256).
ctacagggtgtgtattaaa

SEQ ID NO: 748785 - DNA, 19 bp, Mus musculus
  siRNA target sequence for 9930118K05Rik (NM_133869.2,343-361).
cccttctcgagcccttaat

SEQ ID NO: 748786 - DNA, 19 bp, Mus musculus
  siRNA target sequence for 9930118K05Rik (NM_133869.2,400-418).
catggattgccccaaatct

SEQ ID NO: 748787 - DNA, 19 bp, Mus musculus
  siRNA target sequence for 9930118K05Rik (NM_133869.2,403-421).
ggattgccccaaatctcat

SEQ ID NO: 748788 - DNA, 19 bp, Mus musculus
  siRNA target sequence for 9930118K05Rik (NM_133869.2,422-440).
caccatcattggactatca

SEQ ID NO: 748789 - DNA, 19 bp, Mus musculus
  siRNA target sequence for 9930118K05Rik (NM_133869.2,424-442).
ccatcattggactatcaat

SEQ ID NO: 748790 - DNA, 19 bp, Mus musculus
  siRNA target sequence for 9930118K05Rik (NM_133869.2,425-443).
catcattggactatcaata

SEQ ID NO: 748791 - DNA, 19 bp, Mus musculus
  siRNA target sequence for 9930118K05Rik (NM_133869.2,432-450).
ggactatcaataaatatct

SEQ ID NO: 748792 - DNA, 19 bp, Mus musculus
  siRNA target sequence for 9930118K05Rik (NM_133869.2,498-516).
gcacctctgtgggcttata

SEQ ID NO: 748793 - DNA, 19 bp, Mus musculus
  siRNA target sequence for 9930118K05Rik (NM_133869.2,499-517).
cacctctgtgggcttatat

SEQ ID NO: 748794 - DNA, 19 bp, Mus musculus
  siRNA target sequence for 9930118K05Rik (NM_133869.2,529-547).
gtggccttttcatttacca

SEQ ID NO: 748795 - DNA, 19 bp, Mus musculus
  siRNA target sequence for 9930118K05Rik (NM_133869.2,573-591).
caggccagaagaactaaca

SEQ ID NO: 748796 - DNA, 19 bp, Mus musculus
  siRNA target sequence for 9930118K05Rik (NM_133869.2,576-594).
gccagaagaactaacagta

SEQ ID NO: 748797 - DNA, 19 bp, Mus musculus
  siRNA target sequence for 9930118K05Rik (NM_133869.2,630-648).
gactcactatcgacagttt

SEQ ID NO: 748798 - DNA, 19 bp, Mus musculus
  siRNA target sequence for 9930118K05Rik (NM_133869.2,634-652).
cactatcgacagtttttgt

SEQ ID NO: 748799 - DNA, 19 bp, Mus musculus
  siRNA target sequence for 9930118K05Rik (NM_133869.2,664-682).
cttgtattgcagtacaact

SEQ ID NO: 748800 - DNA, 19 bp, Mus musculus
  siRNA target sequence for 9930118K05Rik (NM_133869.2,747-765).
cactggcaaacatatgttt

SEQ ID NO: 748801 - DNA, 19 bp, Mus musculus
  siRNA target sequence for 9930118K05Rik (NM_133869.2,757-775).
catatgtttctggaacatt

SEQ ID NO: 748802 - DNA, 19 bp, Mus musculus
  siRNA target sequence for 9930118K05Rik (NM_133869.2,772-790).
cattgcgatttggaataat

SEQ ID NO: 748803 - DNA, 19 bp, Mus musculus
  siRNA target sequence for 9930118K05Rik (NM_133869.2,799-817).
ctgaagtgcaaatcttcat

SEQ ID NO: 748804 - DNA, 19 bp, Mus musculus
  siRNA target sequence for 9930118K05Rik (NM_133869.2,804-822).
gtgcaaatcttcataataa

SEQ ID NO: 748805 - DNA, 19 bp, Mus musculus
  siRNA target sequence for 9930118K05Rik (NM_133869.2,807-825).
caaatcttcataataatca

SEQ ID NO: 748806 - DNA, 19 bp, Mus musculus
  siRNA target sequence for 9930118K05Rik (NM_133869.2,852-870).
ccacctttttggcaatcta

SEQ ID NO: 748807 - DNA, 19 bp, Mus musculus
  siRNA target sequence for 9930118K05Rik (NM_133869.2,853-871).
cacctttttggcaatctat

SEQ ID NO: 748808 - DNA, 19 bp, Mus musculus
  siRNA target sequence for 9930118K05Rik (NM_133869.2,856-874).
ctttttggcaatctatgat

SEQ ID NO: 748809 - DNA, 19 bp, Mus musculus
  siRNA target sequence for 9930118K05Rik (NM_133869.2,919-937).
ctgtggcagggaccatatt

SEQ ID NO: 748810 - DNA, 19 bp, Mus musculus
  siRNA target sequence for 9930118K05Rik (NM_133869.2,924-942).
gcagggaccatattttcct

SEQ ID NO: 748811 - DNA, 19 bp, Mus musculus
  siRNA target sequence for 9930118K05Rik (NM_133869.2,983-1001).
caaaaatgggtcaaccata

SEQ ID NO: 748812 - DNA, 19 bp, Mus musculus
  siRNA target sequence for 9930118K05Rik (NM_133869.2,1051-1069).
cgttagctgttatgatcta

SEQ ID NO: 748813 - DNA, 19 bp, Mus musculus
  siRNA target sequence for 9930118K05Rik (NM_133869.2,1134-1152).
gtgtcggctaaaatcacta

SEQ ID NO: 748814 - DNA, 19 bp, Mus musculus
  siRNA target sequence for 9930118K05Rik (NM_133869.2,1136-1154).
gtcggctaaaatcactaat

SEQ ID NO: 748815 - DNA, 19 bp, Mus musculus
  siRNA target sequence for 9930118K05Rik (NM_133869.2,1138-1156).
cggctaaaatcactaataa

SEQ ID NO: 748816 - DNA, 19 bp, Mus musculus
  siRNA target sequence for 9930118K05Rik (NM_133869.2,1260-1278).
gatgaatatatagtacttt

SEQ ID NO: 748817 - DNA, 19 bp, Mus musculus
  siRNA target sequence for 9930118K05Rik (NM_133869.2,1275-1293).
ctttggattgccttgatct

SEQ ID NO: 748818 - DNA, 19 bp, Mus musculus
  siRNA target sequence for 9930118K05Rik (NM_133869.2,1314-1332).
cgttactgtgtcagtgttt

SEQ ID NO: 748819 - DNA, 19 bp, Mus musculus
  siRNA target sequence for 9930118K05Rik (NM_133869.2,1384-1402).
ctacagctcactctaatca

SEQ ID NO: 748820 - DNA, 19 bp, Mus musculus
  siRNA target sequence for 9930118K05Rik (NM_133869.2,1387-1405).
cagctcactctaatcatca

SEQ ID NO: 748821 - DNA, 19 bp, Mus musculus
  siRNA target sequence for A430056A10Rik (NM_133871.1,78-96).
catgagaactcgtttgaca

SEQ ID NO: 748822 - DNA, 19 bp, Mus musculus
  siRNA target sequence for A430056A10Rik (NM_133871.1,114-132).
cctgcagaattattttgga

SEQ ID NO: 748823 - DNA, 19 bp, Mus musculus
  siRNA target sequence for A430056A10Rik (NM_133871.1,159-177).
ggcgagtgtgcagaagttt

SEQ ID NO: 748824 - DNA, 19 bp, Mus musculus
  siRNA target sequence for A430056A10Rik (NM_133871.1,160-178).
gcgagtgtgcagaagtttt

SEQ ID NO: 748825 - DNA, 19 bp, Mus musculus
  siRNA target sequence for A430056A10Rik (NM_133871.1,218-236).
ctaccatgatagtggttta

SEQ ID NO: 748826 - DNA, 19 bp, Mus musculus
  siRNA target sequence for A430056A10Rik (NM_133871.1,231-249).
ggtttacagtgaaaagtgt

SEQ ID NO: 748827 - DNA, 19 bp, Mus musculus
  siRNA target sequence for A430056A10Rik (NM_133871.1,313-331).
ctccaagagactggatttt

SEQ ID NO: 748828 - DNA, 19 bp, Mus musculus
  siRNA target sequence for A430056A10Rik (NM_133871.1,346-364).
ggaccagattcaccatatt

SEQ ID NO: 748829 - DNA, 19 bp, Mus musculus
  siRNA target sequence for A430056A10Rik (NM_133871.1,347-365).
gaccagattcaccatattt

SEQ ID NO: 748830 - DNA, 19 bp, Mus musculus
  siRNA target sequence for A430056A10Rik (NM_133871.1,349-367).
ccagattcaccatatttat

SEQ ID NO: 748831 - DNA, 19 bp, Mus musculus
  siRNA target sequence for A430056A10Rik (NM_133871.1,352-370).
gattcaccatatttattgt

SEQ ID NO: 748832 - DNA, 19 bp, Mus musculus
  siRNA target sequence for A430056A10Rik (NM_133871.1,427-445).
gtaagttcagcaatctgta

SEQ ID NO: 748833 - DNA, 19 bp, Mus musculus
  siRNA target sequence for A430056A10Rik (NM_133871.1,461-479).
ctgctcgcaataatgtcat

SEQ ID NO: 748834 - DNA, 19 bp, Mus musculus
  siRNA target sequence for A430056A10Rik (NM_133871.1,466-484).
cgcaataatgtcataccta

SEQ ID NO: 748835 - DNA, 19 bp, Mus musculus
  siRNA target sequence for A430056A10Rik (NM_133871.1,467-485).
gcaataatgtcatacctat

SEQ ID NO: 748836 - DNA, 19 bp, Mus musculus
  siRNA target sequence for A430056A10Rik (NM_133871.1,489-507).
ggagtgtgaagcttttcga

SEQ ID NO: 748837 - DNA, 19 bp, Mus musculus
  siRNA target sequence for A430056A10Rik (NM_133871.1,500-518).
cttttcgatgtgaagagtt

SEQ ID NO: 748838 - DNA, 19 bp, Mus musculus
  siRNA target sequence for A430056A10Rik (NM_133871.1,514-532).
gagttgttggatgaaagaa

SEQ ID NO: 748839 - DNA, 19 bp, Mus musculus
  siRNA target sequence for A430056A10Rik (NM_133871.1,543-561).
cattgctgtgttacatagt

SEQ ID NO: 748840 - DNA, 19 bp, Mus musculus
  siRNA target sequence for A430056A10Rik (NM_133871.1,695-713).
gcatcacacaccagatctt

SEQ ID NO: 748841 - DNA, 19 bp, Mus musculus
  siRNA target sequence for A430056A10Rik (NM_133871.1,782-800).
gtgaccccctgccatttat

SEQ ID NO: 748842 - DNA, 19 bp, Mus musculus
  siRNA target sequence for A430056A10Rik (NM_133871.1,850-868).
gatgtatggcacatcttaa

SEQ ID NO: 748843 - DNA, 19 bp, Mus musculus
  siRNA target sequence for A430056A10Rik (NM_133871.1,883-901).
gacagataccagttcgatt

SEQ ID NO: 748844 - DNA, 19 bp, Mus musculus
  siRNA target sequence for A430056A10Rik (NM_133871.1,887-905).
gataccagttcgattccat

SEQ ID NO: 748845 - DNA, 19 bp, Mus musculus
  siRNA target sequence for A430056A10Rik (NM_133871.1,1104-1122).
cctggatctgattacaaaa

SEQ ID NO: 748846 - DNA, 19 bp, Mus musculus
  siRNA target sequence for A430056A10Rik (NM_133871.1,1123-1141).
gaagacatgacagacatat

SEQ ID NO: 748847 - DNA, 19 bp, Mus musculus
  siRNA target sequence for A430056A10Rik (NM_133871.1,1126-1144).
gacatgacagacatataca

SEQ ID NO: 748848 - DNA, 19 bp, Mus musculus
  siRNA target sequence for A430056A10Rik (NM_133871.1,1131-1149).
gacagacatatacaactat

SEQ ID NO: 748849 - DNA, 19 bp, Mus musculus
  siRNA target sequence for A430056A10Rik (NM_133871.1,1173-1191).
ggcattccatggagtcttt

SEQ ID NO: 748850 - DNA, 19 bp, Mus musculus
  siRNA target sequence for A430056A10Rik (NM_133871.1,1212-1230).
cttggtggtgagtaattat

SEQ ID NO: 748851 - DNA, 19 bp, Mus musculus
  siRNA target sequence for A430056A10Rik (NM_133871.1,1290-1308).
gatcctgtatactgcaaat

SEQ ID NO: 748852 - DNA, 19 bp, Mus musculus
  siRNA target sequence for A430056A10Rik (NM_133871.1,1293-1311).
cctgtatactgcaaatgaa

SEQ ID NO: 748853 - DNA, 19 bp, Mus musculus
  siRNA target sequence for A430056A10Rik (NM_133871.1,1294-1312).
ctgtatactgcaaatgaat

SEQ ID NO: 748854 - DNA, 19 bp, Mus musculus
  siRNA target sequence for A430056A10Rik (NM_133871.1,1320-1338).
ggatttgcctttgaacaaa

SEQ ID NO: 748855 - DNA, 19 bp, Mus musculus
  siRNA target sequence for A430056A10Rik (NM_133871.1,1321-1339).
gatttgcctttgaacaaat

SEQ ID NO: 748856 - DNA, 19 bp, Mus musculus
  siRNA target sequence for D4Wsu114e (NM_133873.1,268-286).
gcagcatcagggtcaaact

SEQ ID NO: 748857 - DNA, 19 bp, Mus musculus
  siRNA target sequence for D4Wsu114e (NM_133873.1,277-295).
gggtcaaacttggattgta

SEQ ID NO: 748858 - DNA, 19 bp, Mus musculus
  siRNA target sequence for D4Wsu114e (NM_133873.1,404-422).
gagatgacacgtttgatgt

SEQ ID NO: 748859 - DNA, 19 bp, Mus musculus
  siRNA target sequence for D4Wsu114e (NM_133873.1,424-442).
gcctggtatgtcaagttca

SEQ ID NO: 748860 - DNA, 19 bp, Mus musculus
  siRNA target sequence for D4Wsu114e (NM_133873.1,447-465).
caggatggactctttccta

SEQ ID NO: 748861 - DNA, 19 bp, Mus musculus
  siRNA target sequence for D4Wsu114e (NM_133873.1,555-573).
gtctttgggaggaccaaaa

SEQ ID NO: 748862 - DNA, 19 bp, Mus musculus
  siRNA target sequence for D4Wsu114e (NM_133873.1,620-638).
gactaagcaagccatctaa

SEQ ID NO: 748863 - DNA, 19 bp, Mus musculus
  siRNA target sequence for D4Wsu114e (NM_133873.1,684-702).
gcactctaggccataccta

SEQ ID NO: 748864 - DNA, 19 bp, Mus musculus
  siRNA target sequence for D4Wsu114e (NM_133873.1,693-711).
gccatacctaggctatgat

SEQ ID NO: 748865 - DNA, 19 bp, Mus musculus
  siRNA target sequence for D4Wsu114e (NM_133873.1,694-712).
ccatacctaggctatgatt

SEQ ID NO: 748866 - DNA, 19 bp, Mus musculus
  siRNA target sequence for D4Wsu114e (NM_133873.1,699-717).
cctaggctatgattggatt

SEQ ID NO: 748867 - DNA, 19 bp, Mus musculus
  siRNA target sequence for D4Wsu114e (NM_133873.1,718-736).
gcagggtccctggacaata

SEQ ID NO: 748868 - DNA, 19 bp, Mus musculus
  siRNA target sequence for D4Wsu114e (NM_133873.1,721-739).
gggtccctggacaatagct

SEQ ID NO: 748869 - DNA, 19 bp, Mus musculus
  siRNA target sequence for D4Wsu114e (NM_133873.1,757-775).
cccgaggccttcttctcta

SEQ ID NO: 748870 - DNA, 19 bp, Mus musculus
  siRNA target sequence for D4Wsu114e (NM_133873.1,781-799).
cagaggtttcgagaaaaca

SEQ ID NO: 748871 - DNA, 19 bp, Mus musculus
  siRNA target sequence for D4Wsu114e (NM_133873.1,785-803).
ggtttcgagaaaacaacaa

SEQ ID NO: 748872 - DNA, 19 bp, Mus musculus
  siRNA target sequence for 4833432B22Rik (NM_133874.1,539-557).
ctttggccgtgattggtaa

SEQ ID NO: 748873 - DNA, 19 bp, Mus musculus
  siRNA target sequence for 4833432B22Rik (NM_133874.1,633-651).
ccacgagcagtttaatgat

SEQ ID NO: 748874 - DNA, 19 bp, Mus musculus
  siRNA target sequence for 4833432B22Rik (NM_133874.1,634-652).
cacgagcagtttaatgatt

SEQ ID NO: 748875 - DNA, 19 bp, Mus musculus
  siRNA target sequence for 4833432B22Rik (NM_133874.1,649-667).
gattcttcagggactcata

SEQ ID NO: 748876 - DNA, 19 bp, Mus musculus
  siRNA target sequence for 4833432B22Rik (NM_133874.1,653-671).
cttcagggactcatattct

SEQ ID NO: 748877 - DNA, 19 bp, Mus musculus
  siRNA target sequence for 4833432B22Rik (NM_133874.1,699-717).
gactaagattgctcagttt

SEQ ID NO: 748878 - DNA, 19 bp, Mus musculus
  siRNA target sequence for 4833432B22Rik (NM_133874.1,701-719).
ctaagattgctcagtttct

SEQ ID NO: 748879 - DNA, 19 bp, Mus musculus
  siRNA target sequence for 4833432B22Rik (NM_133874.1,705-723).
gattgctcagtttctagaa

SEQ ID NO: 748880 - DNA, 19 bp, Mus musculus
  siRNA target sequence for 4833432B22Rik (NM_133874.1,721-739).
gaaactgtagccaaaatgt

SEQ ID NO: 748881 - DNA, 19 bp, Mus musculus
  siRNA target sequence for 4833432B22Rik (NM_133874.1,910-928).
cccaattcacgggattcta

SEQ ID NO: 748882 - DNA, 19 bp, Mus musculus
  siRNA target sequence for 4833432B22Rik (NM_133874.1,911-929).
ccaattcacgggattctat

SEQ ID NO: 748883 - DNA, 19 bp, Mus musculus
  siRNA target sequence for 4833432B22Rik (NM_133874.1,922-940).
gattctatcttggacatta

SEQ ID NO: 748884 - DNA, 19 bp, Mus musculus
  siRNA target sequence for 4833432B22Rik (NM_133874.1,926-944).
ctatcttggacattaaagt

SEQ ID NO: 748885 - DNA, 19 bp, Mus musculus
  siRNA target sequence for 4833432B22Rik (NM_133874.1,933-951).
ggacattaaagtaccaata

SEQ ID NO: 748886 - DNA, 19 bp, Mus musculus
  siRNA target sequence for Chc1 (NM_133878.1,30-48).
ccacccaagcgcatagcta

SEQ ID NO: 748887 - DNA, 19 bp, Mus musculus
  siRNA target sequence for Chc1 (NM_133878.1,31-49).
cacccaagcgcatagctaa

SEQ ID NO: 748888 - DNA, 19 bp, Mus musculus
  siRNA target sequence for Chc1 (NM_133878.1,35-53).
caagcgcatagctaagaga

SEQ ID NO: 748889 - DNA, 19 bp, Mus musculus
  siRNA target sequence for Chc1 (NM_133878.1,337-355).
cagtcgaaggctcagaaat

SEQ ID NO: 748890 - DNA, 19 bp, Mus musculus
  siRNA target sequence for Chc1 (NM_133878.1,435-453).
gacggccgtgtcttccttt

SEQ ID NO: 748891 - DNA, 19 bp, Mus musculus
  siRNA target sequence for Chc1 (NM_133878.1,456-474).
ggctctttccgggacaata

SEQ ID NO: 748892 - DNA, 19 bp, Mus musculus
  siRNA target sequence for Chc1 (NM_133878.1,457-475).
gctctttccgggacaataa

SEQ ID NO: 748893 - DNA, 19 bp, Mus musculus
  siRNA target sequence for Chc1 (NM_133878.1,458-476).
ctctttccgggacaataat

SEQ ID NO: 748894 - DNA, 19 bp, Mus musculus
  siRNA target sequence for Chc1 (NM_133878.1,511-529).
gcatggtacctgttcaagt

SEQ ID NO: 748895 - DNA, 19 bp, Mus musculus
  siRNA target sequence for Chc1 (NM_133878.1,638-656).
gggccgtgtacctgaatta

SEQ ID NO: 748896 - DNA, 19 bp, Mus musculus
  siRNA target sequence for Chc1 (NM_133878.1,640-658).
gccgtgtacctgaattatt

SEQ ID NO: 748897 - DNA, 19 bp, Mus musculus
  siRNA target sequence for Chc1 (NM_133878.1,641-659).
ccgtgtacctgaattattt

SEQ ID NO: 748898 - DNA, 19 bp, Mus musculus
  siRNA target sequence for Chc1 (NM_133878.1,760-778).
ccttctgtggcgcctattt

SEQ ID NO: 748899 - DNA, 19 bp, Mus musculus
  siRNA target sequence for Chc1 (NM_133878.1,766-784).
gtggcgcctatttcacttt

SEQ ID NO: 748900 - DNA, 19 bp, Mus musculus
  siRNA target sequence for Chc1 (NM_133878.1,815-833).
ctttggcctctccaactat

SEQ ID NO: 748901 - DNA, 19 bp, Mus musculus
  siRNA target sequence for Chc1 (NM_133878.1,854-872).
cactggatcttgcttcatt

SEQ ID NO: 748902 - DNA, 19 bp, Mus musculus
  siRNA target sequence for Chc1 (NM_133878.1,865-883).
gcttcattcctcaaaactt

SEQ ID NO: 748903 - DNA, 19 bp, Mus musculus
  siRNA target sequence for Chc1 (NM_133878.1,1108-1126).
ccaaggatggtcgtgtttt

SEQ ID NO: 748904 - DNA, 19 bp, Mus musculus
  siRNA target sequence for Chc1 (NM_133878.1,1109-1127).
caaggatggtcgtgttttt

SEQ ID NO: 748905 - DNA, 19 bp, Mus musculus
  siRNA target sequence for Chc1 (NM_133878.1,1180-1198).
cctggagtcctgtggaaat

SEQ ID NO: 748906 - DNA, 19 bp, Mus musculus
  siRNA target sequence for Chc1 (NM_133878.1,1217-1235).
gaaccgtgtggtgttaact

SEQ ID NO: 748907 - DNA, 19 bp, Mus musculus
  siRNA target sequence for Chc1 (NM_133878.1,1249-1267).
gccagcacacggtcttact

SEQ ID NO: 748908 - DNA, 19 bp, Mus musculus
  siRNA target sequence for Chc1 (NM_133878.1,1254-1272).
cacacggtcttactagtta

SEQ ID NO: 748909 - DNA, 19 bp, Mus musculus
  siRNA target sequence for Chc1 (NM_133878.1,1258-1276).
cggtcttactagttaagga

SEQ ID NO: 748910 - DNA, 19 bp, Mus musculus
  siRNA target sequence for C8b (NM_133882.1,173-191).
ggtgggaagcccgatttct

SEQ ID NO: 748911 - DNA, 19 bp, Mus musculus
  siRNA target sequence for C8b (NM_133882.1,174-192).
gtgggaagcccgatttctt

SEQ ID NO: 748912 - DNA, 19 bp, Mus musculus
  siRNA target sequence for C8b (NM_133882.1,430-448).
gagtcaagtacgatgtgaa

SEQ ID NO: 748913 - DNA, 19 bp, Mus musculus
  siRNA target sequence for C8b (NM_133882.1,440-458).
cgatgtgaaggctttgtgt

SEQ ID NO: 748914 - DNA, 19 bp, Mus musculus
  siRNA target sequence for C8b (NM_133882.1,536-554).
gccaactgtaggaggattt

SEQ ID NO: 748915 - DNA, 19 bp, Mus musculus
  siRNA target sequence for C8b (NM_133882.1,547-565).
gaggatttataaaaactgt

SEQ ID NO: 748916 - DNA, 19 bp, Mus musculus
  siRNA target sequence for C8b (NM_133882.1,600-618).
ggctggccagtgggataaa

SEQ ID NO: 748917 - DNA, 19 bp, Mus musculus
  siRNA target sequence for C8b (NM_133882.1,601-619).
gctggccagtgggataaat

SEQ ID NO: 748918 - DNA, 19 bp, Mus musculus
  siRNA target sequence for C8b (NM_133882.1,605-623).
gccagtgggataaatctgt

SEQ ID NO: 748919 - DNA, 19 bp, Mus musculus
  siRNA target sequence for C8b (NM_133882.1,606-624).
ccagtgggataaatctgtt

SEQ ID NO: 748920 - DNA, 19 bp, Mus musculus
  siRNA target sequence for C8b (NM_133882.1,611-629).
gggataaatctgttcacaa

SEQ ID NO: 748921 - DNA, 19 bp, Mus musculus
  siRNA target sequence for C8b (NM_133882.1,612-630).
ggataaatctgttcacaaa

SEQ ID NO: 748922 - DNA, 19 bp, Mus musculus
  siRNA target sequence for C8b (NM_133882.1,652-670).
cgatcaccggtattatgct

SEQ ID NO: 748923 - DNA, 19 bp, Mus musculus
  siRNA target sequence for C8b (NM_133882.1,675-693).
gatgctccccccactacat

SEQ ID NO: 748924 - DNA, 19 bp, Mus musculus
  siRNA target sequence for C8b (NM_133882.1,717-735).
catacaacgtagaaagcta

SEQ ID NO: 748925 - DNA, 19 bp, Mus musculus
  siRNA target sequence for C8b (NM_133882.1,738-756).
ccccacagaccaaatgtga

SEQ ID NO: 748926 - DNA, 19 bp, Mus musculus
  siRNA target sequence for C8b (NM_133882.1,800-818).
gaacgtctagtgatagaaa

SEQ ID NO: 748927 - DNA, 19 bp, Mus musculus
  siRNA target sequence for C8b (NM_133882.1,864-882).
gcgttatggatcttggaat

SEQ ID NO: 748928 - DNA, 19 bp, Mus musculus
  siRNA target sequence for C8b (NM_133882.1,865-883).
cgttatggatcttggaatt

SEQ ID NO: 748929 - DNA, 19 bp, Mus musculus
  siRNA target sequence for C8b (NM_133882.1,929-947).
cgcttcgcccacactcaaa

SEQ ID NO: 748930 - DNA, 19 bp, Mus musculus
  siRNA target sequence for C8b (NM_133882.1,1008-1026).
gcctcatgctccattatga

SEQ ID NO: 748931 - DNA, 19 bp, Mus musculus
  siRNA target sequence for C8b (NM_133882.1,1009-1027).
cctcatgctccattatgaa

SEQ ID NO: 748932 - DNA, 19 bp, Mus musculus
  siRNA target sequence for C8b (NM_133882.1,1010-1028).
ctcatgctccattatgaat

SEQ ID NO: 748933 - DNA, 19 bp, Mus musculus
  siRNA target sequence for C8b (NM_133882.1,1051-1069).
gcccctggagtatagctat

SEQ ID NO: 748934 - DNA, 19 bp, Mus musculus
  siRNA target sequence for C8b (NM_133882.1,1094-1112).
gacttcgggacccatttca

SEQ ID NO: 748935 - DNA, 19 bp, Mus musculus
  siRNA target sequence for C8b (NM_133882.1,1142-1160).
gagtacacgcttatcatga

SEQ ID NO: 748936 - DNA, 19 bp, Mus musculus
  siRNA target sequence for C8b (NM_133882.1,1147-1165).
cacgcttatcatgaacaaa

SEQ ID NO: 748937 - DNA, 19 bp, Mus musculus
  siRNA target sequence for C8b (NM_133882.1,1149-1167).
cgcttatcatgaacaaaga

SEQ ID NO: 748938 - DNA, 19 bp, Mus musculus
  siRNA target sequence for C8b (NM_133882.1,1236-1254).
gtggtatggtctataaagt

SEQ ID NO: 748939 - DNA, 19 bp, Mus musculus
  siRNA target sequence for C8b (NM_133882.1,1244-1262).
gtctataaagtctatgtca

SEQ ID NO: 748940 - DNA, 19 bp, Mus musculus
  siRNA target sequence for C8b (NM_133882.1,1267-1285).
gggcgtttccgcaaagaaa

SEQ ID NO: 748941 - DNA, 19 bp, Mus musculus
  siRNA target sequence for C8b (NM_133882.1,1268-1286).
ggcgtttccgcaaagaaat

SEQ ID NO: 748942 - DNA, 19 bp, Mus musculus
  siRNA target sequence for C8b (NM_133882.1,1271-1289).
gtttccgcaaagaaatgca

SEQ ID NO: 748943 - DNA, 19 bp, Mus musculus
  siRNA target sequence for C8b (NM_133882.1,1287-1305).
gcagtgacattatgaaaga

SEQ ID NO: 748944 - DNA, 19 bp, Mus musculus
  siRNA target sequence for C8b (NM_133882.1,1365-1383).
gagggacaagtgaggatat

SEQ ID NO: 748945 - DNA, 19 bp, Mus musculus
  siRNA target sequence for C8b (NM_133882.1,1369-1387).
gacaagtgaggatatcact

SEQ ID NO: 748946 - DNA, 19 bp, Mus musculus
  siRNA target sequence for C8b (NM_133882.1,1434-1452).
ggggcgatgctgtgaagta

SEQ ID NO: 748947 - DNA, 19 bp, Mus musculus
  siRNA target sequence for C8b (NM_133882.1,1436-1454).
ggcgatgctgtgaagtaca

SEQ ID NO: 748948 - DNA, 19 bp, Mus musculus
  siRNA target sequence for C8b (NM_133882.1,1437-1455).
gcgatgctgtgaagtacaa

SEQ ID NO: 748949 - DNA, 19 bp, Mus musculus
  siRNA target sequence for C8b (NM_133882.1,1458-1476).
cagcaatcattaagatcaa

SEQ ID NO: 748950 - DNA, 19 bp, Mus musculus
  siRNA target sequence for C8b (NM_133882.1,1527-1545).
gcacagtgaagcagaactt

SEQ ID NO: 748951 - DNA, 19 bp, Mus musculus
  siRNA target sequence for C8b (NM_133882.1,1530-1548).
cagtgaagcagaacttaaa

SEQ ID NO: 748952 - DNA, 19 bp, Mus musculus
  siRNA target sequence for C8b (NM_133882.1,1685-1703).
gttacctatcggaaagaca

SEQ ID NO: 748953 - DNA, 19 bp, Mus musculus
  siRNA target sequence for C8b (NM_133882.1,1696-1714).
gaaagacatccccatagat

SEQ ID NO: 748954 - DNA, 19 bp, Mus musculus
  siRNA target sequence for C8b (NM_133882.1,1786-1804).
caatccagcccctcacaaa

SEQ ID NO: 748955 - DNA, 19 bp, Mus musculus
  siRNA target sequence for C8b (NM_133882.1,1824-1842).
gtcctgcttccgaaacact

SEQ ID NO: 748956 - DNA, 19 bp, Mus musculus
  siRNA target sequence for 1110054A24Rik (NM_133888.1,273-291).
ctcccagcctgtgctaaat

SEQ ID NO: 748957 - DNA, 19 bp, Mus musculus
  siRNA target sequence for 1110054A24Rik (NM_133888.1,325-343).
ccttgggcccttatcaact

SEQ ID NO: 748958 - DNA, 19 bp, Mus musculus
  siRNA target sequence for 1110054A24Rik (NM_133888.1,412-430).
ccgcacgtccccaatgaga

SEQ ID NO: 748959 - DNA, 19 bp, Mus musculus
  siRNA target sequence for 1110054A24Rik (NM_133888.1,443-461).
cagctgtgctggcaattgt

SEQ ID NO: 748960 - DNA, 19 bp, Mus musculus
  siRNA target sequence for 1110054A24Rik (NM_133888.1,562-580).
cagagcaaccgcatctata

SEQ ID NO: 748961 - DNA, 19 bp, Mus musculus
  siRNA target sequence for 1110054A24Rik (NM_133888.1,566-584).
gcaaccgcatctataacca

SEQ ID NO: 748962 - DNA, 19 bp, Mus musculus
  siRNA target sequence for 1110054A24Rik (NM_133888.1,604-622).
ccctggcttagtaacgaat

SEQ ID NO: 748963 - DNA, 19 bp, Mus musculus
  siRNA target sequence for 1110054A24Rik (NM_133888.1,608-626).
ggcttagtaacgaatccta

SEQ ID NO: 748964 - DNA, 19 bp, Mus musculus
  siRNA target sequence for 1110054A24Rik (NM_133888.1,624-642).
ctacgctctcttcaaaaga

SEQ ID NO: 748965 - DNA, 19 bp, Mus musculus
  siRNA target sequence for 1110054A24Rik (NM_133888.1,636-654).
caaaagaggtgccttctat

SEQ ID NO: 748966 - DNA, 19 bp, Mus musculus
  siRNA target sequence for 1110054A24Rik (NM_133888.1,965-983).
ccgacagcttccgaatgtt

SEQ ID NO: 748967 - DNA, 19 bp, Mus musculus
  siRNA target sequence for 1110054A24Rik (NM_133888.1,967-985).
gacagcttccgaatgttct

SEQ ID NO: 748968 - DNA, 19 bp, Mus musculus
  siRNA target sequence for 1110054A24Rik (NM_133888.1,971-989).
gcttccgaatgttctatga

SEQ ID NO: 748969 - DNA, 19 bp, Mus musculus
  siRNA target sequence for 1110054A24Rik (NM_133888.1,995-1013).
caggtgcccccataaacgt

SEQ ID NO: 748970 - DNA, 19 bp, Mus musculus
  siRNA target sequence for 1110054A24Rik (NM_133888.1,1001-1019).
cccccataaacgtcatgtt

SEQ ID NO: 748971 - DNA, 19 bp, Mus musculus
  siRNA target sequence for 1110054A24Rik (NM_133888.1,1002-1020).
ccccataaacgtcatgttt

SEQ ID NO: 748972 - DNA, 19 bp, Mus musculus
  siRNA target sequence for 1110054A24Rik (NM_133888.1,1041-1059).
gtggaagaccacattacct

SEQ ID NO: 748973 - DNA, 19 bp, Mus musculus
  siRNA target sequence for 1110054A24Rik (NM_133888.1,1085-1103).
cagggatacgcattttcga

SEQ ID NO: 748974 - DNA, 19 bp, Mus musculus
  siRNA target sequence for 1110054A24Rik (NM_133888.1,1111-1129).
cgagccacactcaacttga

SEQ ID NO: 748975 - DNA, 19 bp, Mus musculus
  siRNA target sequence for 1110054A24Rik (NM_133888.1,1112-1130).
gagccacactcaacttgaa

SEQ ID NO: 748976 - DNA, 19 bp, Mus musculus
  siRNA target sequence for 1110054A24Rik (NM_133888.1,1132-1150).
gacttggtgacttacttct

SEQ ID NO: 748977 - DNA, 19 bp, Mus musculus
  siRNA target sequence for 1110054A24Rik (NM_133888.1,1158-1176).
gaggcaggcgaatgtacaa

SEQ ID NO: 748978 - DNA, 19 bp, Mus musculus
  siRNA target sequence for 1110054A24Rik (NM_133888.1,1285-1303).
cacatcctgcaacgttatt

SEQ ID NO: 748979 - DNA, 19 bp, Mus musculus
  siRNA target sequence for 1110054A24Rik (NM_133888.1,1294-1312).
caacgttattacgtctata

SEQ ID NO: 748980 - DNA, 19 bp, Mus musculus
  siRNA target sequence for 1110054A24Rik (NM_133888.1,1297-1315).
cgttattacgtctataact

SEQ ID NO: 748981 - DNA, 19 bp, Mus musculus
  siRNA target sequence for 1110054A24Rik (NM_133888.1,1316-1334).
cggtcagctacaaccattt

SEQ ID NO: 748982 - DNA, 19 bp, Mus musculus
  siRNA target sequence for 1110054A24Rik (NM_133888.1,1318-1336).
gtcagctacaaccatttga

SEQ ID NO: 748983 - DNA, 19 bp, Mus musculus
  siRNA target sequence for 1110054A24Rik (NM_133888.1,1359-1377).
cgagcacgtttgtgctata

SEQ ID NO: 748984 - DNA, 19 bp, Mus musculus
  siRNA target sequence for 1110054A24Rik (NM_133888.1,1378-1396).
caacacgtggctttcaaca

SEQ ID NO: 748985 - DNA, 19 bp, Mus musculus
  siRNA target sequence for 1110054A24Rik (NM_133888.1,1383-1401).
cgtggctttcaacacttat

SEQ ID NO: 748986 - DNA, 19 bp, Mus musculus
  siRNA target sequence for 1110054A24Rik (NM_133888.1,1386-1404).
ggctttcaacacttatgct

SEQ ID NO: 748987 - DNA, 19 bp, Mus musculus
  siRNA target sequence for 1110054A24Rik (NM_133888.1,1387-1405).
gctttcaacacttatgcta

SEQ ID NO: 748988 - DNA, 19 bp, Mus musculus
  siRNA target sequence for 1110063F24Rik (NM_133889.2,66-84).
gctaccaggcagtcaaaga

SEQ ID NO: 748989 - DNA, 19 bp, Mus musculus
  siRNA target sequence for 1110063F24Rik (NM_133889.2,115-133).
gcgggacctgacagaattt

SEQ ID NO: 748990 - DNA, 19 bp, Mus musculus
  siRNA target sequence for 1110063F24Rik (NM_133889.2,116-134).
cgggacctgacagaattta

SEQ ID NO: 748991 - DNA, 19 bp, Mus musculus
  siRNA target sequence for 1110063F24Rik (NM_133889.2,244-262).
ggggttatccgacttctta

SEQ ID NO: 748992 - DNA, 19 bp, Mus musculus
  siRNA target sequence for 1110063F24Rik (NM_133889.2,557-575).
gtttcccattcggaattct

SEQ ID NO: 748993 - DNA, 19 bp, Mus musculus
  siRNA target sequence for 1110063F24Rik (NM_133889.2,574-592).
ctggcatcggtatttctat

SEQ ID NO: 748994 - DNA, 19 bp, Mus musculus
  siRNA target sequence for 1110063F24Rik (NM_133889.2,576-594).
ggcatcggtatttctataa

SEQ ID NO: 748995 - DNA, 19 bp, Mus musculus
  siRNA target sequence for 1110063F24Rik (NM_133889.2,577-595).
gcatcggtatttctataaa

SEQ ID NO: 748996 - DNA, 19 bp, Mus musculus
  siRNA target sequence for 1110063F24Rik (NM_133889.2,644-662).
cgggcagaccagagtatct

SEQ ID NO: 748997 - DNA, 19 bp, Mus musculus
  siRNA target sequence for 1110063F24Rik (NM_133889.2,646-664).
ggcagaccagagtatctct

SEQ ID NO: 748998 - DNA, 19 bp, Mus musculus
  siRNA target sequence for 1110063F24Rik (NM_133889.2,898-916).
ggcgccagagctacctaaa

SEQ ID NO: 748999 - DNA, 19 bp, Mus musculus
  siRNA target sequence for 1110063F24Rik (NM_133889.2,1085-1103).
gaggtgcccacagacttaa

SEQ ID NO: 749000 - DNA, 19 bp, Mus musculus
  siRNA target sequence for 1110063F24Rik (NM_133889.2,1135-1153).
gtctacaccctccaacaat

SEQ ID NO: 749001 - DNA, 19 bp, Mus musculus
  siRNA target sequence for AW547365 (NM_133891.1,337-355).
gccacagctatcaatagca

SEQ ID NO: 749002 - DNA, 19 bp, Mus musculus
  siRNA target sequence for AW547365 (NM_133891.1,363-381).
ctgcacctcagcaaaggat

SEQ ID NO: 749003 - DNA, 19 bp, Mus musculus
  siRNA target sequence for AW547365 (NM_133891.1,378-396).
ggatgccttcgtcattcta

SEQ ID NO: 749004 - DNA, 19 bp, Mus musculus
  siRNA target sequence for AW547365 (NM_133891.1,412-430).
cgagtggctgccatcaaca

SEQ ID NO: 749005 - DNA, 19 bp, Mus musculus
  siRNA target sequence for AW547365 (NM_133891.1,457-475).
ggcaaggtgctgatagtct

SEQ ID NO: 749006 - DNA, 19 bp, Mus musculus
  siRNA target sequence for AW547365 (NM_133891.1,482-500).
ccggtttggctgggattat

SEQ ID NO: 749007 - DNA, 19 bp, Mus musculus
  siRNA target sequence for AW547365 (NM_133891.1,494-512).
ggattatgctgctcaacta

SEQ ID NO: 749008 - DNA, 19 bp, Mus musculus
  siRNA target sequence for AW547365 (NM_133891.1,505-523).
ctcaactaccagcaagatt

SEQ ID NO: 749009 - DNA, 19 bp, Mus musculus
  siRNA target sequence for AW547365 (NM_133891.1,510-528).
ctaccagcaagattacaca

SEQ ID NO: 749010 - DNA, 19 bp, Mus musculus
  siRNA target sequence for AW547365 (NM_133891.1,533-551).
gggtgctgcctctgatcat

SEQ ID NO: 749011 - DNA, 19 bp, Mus musculus
  siRNA target sequence for AW547365 (NM_133891.1,591-609).
gtccatttacgaaatggta

SEQ ID NO: 749012 - DNA, 19 bp, Mus musculus
  siRNA target sequence for AW547365 (NM_133891.1,601-619).
gaaatggtagtggatgtat

SEQ ID NO: 749013 - DNA, 19 bp, Mus musculus
  siRNA target sequence for AW547365 (NM_133891.1,607-625).
gtagtggatgtattgttct

SEQ ID NO: 749014 - DNA, 19 bp, Mus musculus
  siRNA target sequence for AW547365 (NM_133891.1,659-677).
ggagccctggccgagaatt

SEQ ID NO: 749015 - DNA, 19 bp, Mus musculus
  siRNA target sequence for AW547365 (NM_133891.1,662-680).
gccctggccgagaattcta

SEQ ID NO: 749016 - DNA, 19 bp, Mus musculus
  siRNA target sequence for AW547365 (NM_133891.1,663-681).
ccctggccgagaattctat

SEQ ID NO: 749017 - DNA, 19 bp, Mus musculus
  siRNA target sequence for AW547365 (NM_133891.1,664-682).
cctggccgagaattctata

SEQ ID NO: 749018 - DNA, 19 bp, Mus musculus
  siRNA target sequence for AW547365 (NM_133891.1,665-683).
ctggccgagaattctatat

SEQ ID NO: 749019 - DNA, 19 bp, Mus musculus
  siRNA target sequence for E430036I04Rik (NM_133897.1,330-348).
cggtggccatgctgatgat

SEQ ID NO: 749020 - DNA, 19 bp, Mus musculus
  siRNA target sequence for E430036I04Rik (NM_133897.1,340-358).
gctgatgatcggagtgttt

SEQ ID NO: 749021 - DNA, 19 bp, Mus musculus
  siRNA target sequence for E430036I04Rik (NM_133897.1,349-367).
cggagtgtttggatgtact

SEQ ID NO: 749022 - DNA, 19 bp, Mus musculus
  siRNA target sequence for E430036I04Rik (NM_133897.1,350-368).
ggagtgtttggatgtactt

SEQ ID NO: 749023 - DNA, 19 bp, Mus musculus
  siRNA target sequence for E430036I04Rik (NM_133897.1,545-563).
gaccttcagcagtacagtt

SEQ ID NO: 749024 - DNA, 19 bp, Mus musculus
  siRNA target sequence for E430036I04Rik (NM_133897.1,548-566).
cttcagcagtacagtttca

SEQ ID NO: 749025 - DNA, 19 bp, Mus musculus
  siRNA target sequence for E430036I04Rik (NM_133897.1,551-569).
cagcagtacagtttcatca

SEQ ID NO: 749026 - DNA, 19 bp, Mus musculus
  siRNA target sequence for E430036I04Rik (NM_133897.1,679-697).
ccccggatccagttccaaa

SEQ ID NO: 749027 - DNA, 19 bp, Mus musculus
  siRNA target sequence for E430036I04Rik (NM_133897.1,680-698).
cccggatccagttccaaaa

SEQ ID NO: 749028 - DNA, 19 bp, Mus musculus
  siRNA target sequence for E430036I04Rik (NM_133897.1,681-699).
ccggatccagttccaaaat

SEQ ID NO: 749029 - DNA, 19 bp, Mus musculus
  siRNA target sequence for E430036I04Rik (NM_133897.1,682-700).
cggatccagttccaaaata

SEQ ID NO: 749030 - DNA, 19 bp, Mus musculus
  siRNA target sequence for E430036I04Rik (NM_133897.1,892-910).
gttcgtggttgacaaatct

SEQ ID NO: 749031 - DNA, 19 bp, Mus musculus
  siRNA target sequence for E430036I04Rik (NM_133897.1,1043-1061).
gtcatcaaattcctaatca

SEQ ID NO: 749032 - DNA, 19 bp, Mus musculus
  siRNA target sequence for E430036I04Rik (NM_133897.1,1130-1148).
gacatgacgggctataaga

SEQ ID NO: 749033 - DNA, 19 bp, Mus musculus
  siRNA target sequence for E430036I04Rik (NM_133897.1,1135-1153).
gacgggctataagaacttt

SEQ ID NO: 749034 - DNA, 19 bp, Mus musculus
  siRNA target sequence for E430036I04Rik (NM_133897.1,1226-1244).
ggcctgacgtgcctttaca

SEQ ID NO: 749035 - DNA, 19 bp, Mus musculus
  siRNA target sequence for E430036I04Rik (NM_133897.1,1245-1263).
ccttatactggctgttcta

SEQ ID NO: 749036 - DNA, 19 bp, Mus musculus
  siRNA target sequence for E430036I04Rik (NM_133897.1,1306-1324).
gacgggaatcgatgacatt

SEQ ID NO: 749037 - DNA, 19 bp, Mus musculus
  siRNA target sequence for E430036I04Rik (NM_133897.1,1319-1337).
gacattccggatgtgaaaa

SEQ ID NO: 749038 - DNA, 19 bp, Mus musculus
  siRNA target sequence for E430036I04Rik (NM_133897.1,1321-1339).
cattccggatgtgaaaaat

SEQ ID NO: 749039 - DNA, 19 bp, Mus musculus
  siRNA target sequence for E430036I04Rik (NM_133897.1,1418-1436).
gtcagcgagaacaagttaa

SEQ ID NO: 749040 - DNA, 19 bp, Mus musculus
  siRNA target sequence for E430036I04Rik (NM_133897.1,1420-1438).
cagcgagaacaagttaaaa

SEQ ID NO: 749041 - DNA, 19 bp, Mus musculus
  siRNA target sequence for E430036I04Rik (NM_133897.1,1422-1440).
gcgagaacaagttaaaaca

SEQ ID NO: 749042 - DNA, 19 bp, Mus musculus
  siRNA target sequence for E430036I04Rik (NM_133897.1,1423-1441).
cgagaacaagttaaaacaa

SEQ ID NO: 749043 - DNA, 19 bp, Mus musculus
  siRNA target sequence for E430036I04Rik (NM_133897.1,1544-1562).
ccggacaccgtgtttgaaa

SEQ ID NO: 749044 - DNA, 19 bp, Mus musculus
  siRNA target sequence for E430036I04Rik (NM_133897.1,1545-1563).
cggacaccgtgtttgaaat

SEQ ID NO: 749045 - DNA, 19 bp, Mus musculus
  siRNA target sequence for E430036I04Rik (NM_133897.1,1852-1870).
ggacctcaaaagccttaaa

SEQ ID NO: 749046 - DNA, 19 bp, Mus musculus
  siRNA target sequence for E430036I04Rik (NM_133897.1,1853-1871).
gacctcaaaagccttaaaa

SEQ ID NO: 749047 - DNA, 19 bp, Mus musculus
  siRNA target sequence for E430036I04Rik (NM_133897.1,1942-1960).
gatgtgcgtccacaatgat

SEQ ID NO: 749048 - DNA, 19 bp, Mus musculus
  siRNA target sequence for E430036I04Rik (NM_133897.1,2150-2168).
ctgaccgtgctcaaactgt

SEQ ID NO: 749049 - DNA, 19 bp, Mus musculus
  siRNA target sequence for E430036I04Rik (NM_133897.1,2370-2388).
ccatcacttgtaacaaagt

SEQ ID NO: 749050 - DNA, 19 bp, Mus musculus
  siRNA target sequence for E430036I04Rik (NM_133897.1,2399-2417).
ccagatgaactctacttct

SEQ ID NO: 749051 - DNA, 19 bp, Mus musculus
  siRNA target sequence for E430036I04Rik (NM_133897.1,2413-2431).
cttctgcaagaaacttaaa

SEQ ID NO: 749052 - DNA, 19 bp, Mus musculus
  siRNA target sequence for E430036I04Rik (NM_133897.1,2460-2478).
ccgtactttcaccaaaaat

SEQ ID NO: 749053 - DNA, 19 bp, Mus musculus
  siRNA target sequence for E430036I04Rik (NM_133897.1,2465-2483).
ctttcaccaaaaattggaa

SEQ ID NO: 749054 - DNA, 19 bp, Mus musculus
  siRNA target sequence for E430036I04Rik (NM_133897.1,2507-2525).
gacatcaaaggcaatcact

SEQ ID NO: 749055 - DNA, 19 bp, Mus musculus
  siRNA target sequence for B230342M21Rik (NM_133898.1,380-398).
cccccattattattgataa

SEQ ID NO: 749056 - DNA, 19 bp, Mus musculus
  siRNA target sequence for B230342M21Rik (NM_133898.1,382-400).
cccattattattgataaca

SEQ ID NO: 749057 - DNA, 19 bp, Mus musculus
  siRNA target sequence for B230342M21Rik (NM_133898.1,441-459).
ggctcttgagaataactat

SEQ ID NO: 749058 - DNA, 19 bp, Mus musculus
  siRNA target sequence for B230342M21Rik (NM_133898.1,443-461).
ctcttgagaataactatga

SEQ ID NO: 749059 - DNA, 19 bp, Mus musculus
  siRNA target sequence for B230342M21Rik (NM_133898.1,448-466).
gagaataactatgaagtta

SEQ ID NO: 749060 - DNA, 19 bp, Mus musculus
  siRNA target sequence for B230342M21Rik (NM_133898.1,478-496).
cccgacactcgctggaaat

SEQ ID NO: 749061 - DNA, 19 bp, Mus musculus
  siRNA target sequence for B230342M21Rik (NM_133898.1,479-497).
ccgacactcgctggaaatt

SEQ ID NO: 749062 - DNA, 19 bp, Mus musculus
  siRNA target sequence for B230342M21Rik (NM_133898.1,481-499).
gacactcgctggaaattca

SEQ ID NO: 749063 - DNA, 19 bp, Mus musculus
  siRNA target sequence for B230342M21Rik (NM_133898.1,568-586).
cggtatgaacacaatgtta

SEQ ID NO: 749064 - DNA, 19 bp, Mus musculus
  siRNA target sequence for B230342M21Rik (NM_133898.1,577-595).
cacaatgttacctttcaca

SEQ ID NO: 749065 - DNA, 19 bp, Mus musculus
  siRNA target sequence for B230342M21Rik (NM_133898.1,617-635).
cgagcagagcgaacagaaa

SEQ ID NO: 749066 - DNA, 19 bp, Mus musculus
  siRNA target sequence for Spon2 (NM_133903.2,357-375).
gctagatacagcatcactt

SEQ ID NO: 749067 - DNA, 19 bp, Mus musculus
  siRNA target sequence for Spon2 (NM_133903.2,358-376).
ctagatacagcatcacttt

SEQ ID NO: 749068 - DNA, 19 bp, Mus musculus
  siRNA target sequence for Spon2 (NM_133903.2,361-379).
gatacagcatcactttcat

SEQ ID NO: 749069 - DNA, 19 bp, Mus musculus
  siRNA target sequence for Spon2 (NM_133903.2,485-503).
gtggcggaagaatgagtat

SEQ ID NO: 749070 - DNA, 19 bp, Mus musculus
  siRNA target sequence for Spon2 (NM_133903.2,489-507).
cggaagaatgagtatgtca

SEQ ID NO: 749071 - DNA, 19 bp, Mus musculus
  siRNA target sequence for Spon2 (NM_133903.2,638-656).
gcagacttccacagagtta

SEQ ID NO: 749072 - DNA, 19 bp, Mus musculus
  siRNA target sequence for Spon2 (NM_133903.2,776-794).
ggtcctggatctttatcca

SEQ ID NO: 749073 - DNA, 19 bp, Mus musculus
  siRNA target sequence for Spon2 (NM_133903.2,890-908).
cagccacccagcaaattca

SEQ ID NO: 749074 - DNA, 19 bp, Mus musculus
  siRNA target sequence for Spon2 (NM_133903.2,892-910).
gccacccagcaaattcatt

SEQ ID NO: 749075 - DNA, 19 bp, Mus musculus
  siRNA target sequence for Spon2 (NM_133903.2,897-915).
ccagcaaattcattctact

SEQ ID NO: 749076 - DNA, 19 bp, Mus musculus
  siRNA target sequence for Spon2 (NM_133903.2,936-954).
cctcccatcgccaaagtga

SEQ ID NO: 749077 - DNA, 19 bp, Mus musculus
  siRNA target sequence for Spon2 (NM_133903.2,1011-1029).
gccagccgaggcaacgaaa

SEQ ID NO: 749078 - DNA, 19 bp, Mus musculus
  siRNA target sequence for Spon2 (NM_133903.2,1012-1030).
ccagccgaggcaacgaaat

SEQ ID NO: 749079 - DNA, 19 bp, Mus musculus
  siRNA target sequence for Spon2 (NM_133903.2,1015-1033).
gccgaggcaacgaaatcgt

SEQ ID NO: 749080 - DNA, 19 bp, Mus musculus
  siRNA target sequence for Spon2 (NM_133903.2,1016-1034).
ccgaggcaacgaaatcgtt

SEQ ID NO: 749081 - DNA, 19 bp, Mus musculus
  siRNA target sequence for Spon2 (NM_133903.2,1180-1198).
cctgtcccgagcttgaaga

SEQ ID NO: 749082 - DNA, 19 bp, Mus musculus
  siRNA target sequence for D5Ertd110e (NM_133910.2,1280-1298).
ccattggcaacgagttgaa

SEQ ID NO: 749083 - DNA, 19 bp, Mus musculus
  siRNA target sequence for D5Ertd110e (NM_133910.2,1285-1303).
ggcaacgagttgaacatca

SEQ ID NO: 749084 - DNA, 19 bp, Mus musculus
  siRNA target sequence for D5Ertd110e (NM_133910.2,1420-1438).
gccagtctggagcttatta

SEQ ID NO: 749085 - DNA, 19 bp, Mus musculus
  siRNA target sequence for D5Ertd110e (NM_133910.2,1421-1439).
ccagtctggagcttattaa

SEQ ID NO: 749086 - DNA, 19 bp, Mus musculus
  siRNA target sequence for D5Ertd110e (NM_133910.2,1422-1440).
cagtctggagcttattaaa

SEQ ID NO: 749087 - DNA, 19 bp, Mus musculus
  siRNA target sequence for D5Ertd110e (NM_133910.2,1482-1500).
gcaaggtggtccgtatcat

SEQ ID NO: 749088 - DNA, 19 bp, Mus musculus
  siRNA target sequence for D5Ertd110e (NM_133910.2,1487-1505).
gtggtccgtatcatgacat

SEQ ID NO: 749089 - DNA, 19 bp, Mus musculus
  siRNA target sequence for D5Ertd110e (NM_133910.2,1544-1562).
cggatgtgggttatgttca

SEQ ID NO: 749090 - DNA, 19 bp, Mus musculus
  siRNA target sequence for D5Ertd110e (NM_133910.2,1563-1581).
gggcatgtcctttatagct

SEQ ID NO: 749091 - DNA, 19 bp, Mus musculus
  siRNA target sequence for D5Ertd110e (NM_133910.2,1649-1667).
cctgtcaaatggcgttttt

SEQ ID NO: 749092 - DNA, 19 bp, Mus musculus
  siRNA target sequence for D5Ertd110e (NM_133910.2,1702-1720).
gctgcatttgaggtattct

SEQ ID NO: 749093 - DNA, 19 bp, Mus musculus
  siRNA target sequence for D5Ertd110e (NM_133910.2,1726-1744).
gaaaacttgccgaaattgt

SEQ ID NO: 749094 - DNA, 19 bp, Mus musculus
  siRNA target sequence for D5Ertd110e (NM_133910.2,1775-1793).
cagatatctacctaatcga

SEQ ID NO: 749095 - DNA, 19 bp, Mus musculus
  siRNA target sequence for D5Ertd110e (NM_133910.2,1777-1795).
gatatctacctaatcgatt

SEQ ID NO: 749096 - DNA, 19 bp, Mus musculus
  siRNA target sequence for D5Ertd110e (NM_133910.2,1782-1800).
ctacctaatcgattggatt

SEQ ID NO: 749097 - DNA, 19 bp, Mus musculus
  siRNA target sequence for D5Ertd110e (NM_133910.2,1841-1859).
gccgcatctgggacgtatt

SEQ ID NO: 749098 - DNA, 19 bp, Mus musculus
  siRNA target sequence for D5Ertd110e (NM_133910.2,1843-1861).
cgcatctgggacgtattct

SEQ ID NO: 749099 - DNA, 19 bp, Mus musculus
  siRNA target sequence for D5Ertd110e (NM_133910.2,1986-2004).
gcccgcagatgaagtgttt

SEQ ID NO: 749100 - DNA, 19 bp, Mus musculus
  siRNA target sequence for 2010209O12Rik (NM_133913.1,1519-1537).
cttactacagggatcctaa

SEQ ID NO: 749101 - DNA, 19 bp, Mus musculus
  siRNA target sequence for 2010209O12Rik (NM_133913.1,1533-1551).
cctaacaagccctacaaga

SEQ ID NO: 749102 - DNA, 19 bp, Mus musculus
  siRNA target sequence for 2010209O12Rik (NM_133913.1,1534-1552).
ctaacaagccctacaagaa

SEQ ID NO: 749103 - DNA, 19 bp, Mus musculus
  siRNA target sequence for 2010209O12Rik (NM_133913.1,1556-1574).
gctcaggactcggtatata

SEQ ID NO: 749104 - DNA, 19 bp, Mus musculus
  siRNA target sequence for 2010209O12Rik (NM_133913.1,1652-1670).
cgcggttaaccgtacagta

SEQ ID NO: 749105 - DNA, 19 bp, Mus musculus
  siRNA target sequence for 2010209O12Rik (NM_133913.1,1677-1695).
cacttccctcggttactct

SEQ ID NO: 749106 - DNA, 19 bp, Mus musculus
  siRNA target sequence for 2010209O12Rik (NM_133913.1,1683-1701).
cctcggttactctacttca

SEQ ID NO: 749107 - DNA, 19 bp, Mus musculus
  siRNA target sequence for 2010209O12Rik (NM_133913.1,1818-1836).
gactatgactggttcttca

SEQ ID NO: 749108 - DNA, 19 bp, Mus musculus
  siRNA target sequence for 2010209O12Rik (NM_133913.1,1838-1856).
catgcaggacgacacatat

SEQ ID NO: 749109 - DNA, 19 bp, Mus musculus
  siRNA target sequence for 2010209O12Rik (NM_133913.1,1922-1940).
ccatgcagaggaattcatt

SEQ ID NO: 749110 - DNA, 19 bp, Mus musculus
  siRNA target sequence for 2010209O12Rik (NM_133913.1,1926-1944).
gcagaggaattcattggta

SEQ ID NO: 749111 - DNA, 19 bp, Mus musculus
  siRNA target sequence for 2010209O12Rik (NM_133913.1,2032-2050).
gctgccgaggggacattct

SEQ ID NO: 749112 - DNA, 19 bp, Mus musculus
  siRNA target sequence for 2010209O12Rik (NM_133913.1,2279-2297).
gcgggcttacagcgaaata

SEQ ID NO: 749113 - DNA, 19 bp, Mus musculus
  siRNA target sequence for 2010209O12Rik (NM_133913.1,2281-2299).
gggcttacagcgaaataga

SEQ ID NO: 749114 - DNA, 19 bp, Mus musculus
  siRNA target sequence for 2010209O12Rik (NM_133913.1,2282-2300).
ggcttacagcgaaatagaa

SEQ ID NO: 749115 - DNA, 19 bp, Mus musculus
  siRNA target sequence for 2010209O12Rik (NM_133913.1,2284-2302).
cttacagcgaaatagaaca

SEQ ID NO: 749116 - DNA, 19 bp, Mus musculus
  siRNA target sequence for Emilin1 (NM_133918.1,364-382).
cccactgttcccgaagtat

SEQ ID NO: 749117 - DNA, 19 bp, Mus musculus
  siRNA target sequence for Emilin1 (NM_133918.1,409-427).
gctatcgggtggcttacaa

SEQ ID NO: 749118 - DNA, 19 bp, Mus musculus
  siRNA target sequence for Emilin1 (NM_133918.1,873-891).
caccttaacaaccatcata

SEQ ID NO: 749119 - DNA, 19 bp, Mus musculus
  siRNA target sequence for Emilin1 (NM_133918.1,875-893).
ccttaacaaccatcataat

SEQ ID NO: 749120 - DNA, 19 bp, Mus musculus
  siRNA target sequence for Emilin1 (NM_133918.1,948-966).
cccagtgaagaactgttaa

SEQ ID NO: 749121 - DNA, 19 bp, Mus musculus
  siRNA target sequence for Emilin1 (NM_133918.1,1416-1434).
gctccaggacggctagaaa

SEQ ID NO: 749122 - DNA, 19 bp, Mus musculus
  siRNA target sequence for Emilin1 (NM_133918.1,1420-1438).
caggacggctagaaaagct

SEQ ID NO: 749123 - DNA, 19 bp, Mus musculus
  siRNA target sequence for Emilin1 (NM_133918.1,1443-1461).
ggactactagccaatgtga

SEQ ID NO: 749124 - DNA, 19 bp, Mus musculus
  siRNA target sequence for Emilin1 (NM_133918.1,1560-1578).
gattctcgggtcaatgaga

SEQ ID NO: 749125 - DNA, 19 bp, Mus musculus
  siRNA target sequence for Emilin1 (NM_133918.1,1760-1778).
cttactgcgcctcaatctt

SEQ ID NO: 749126 - DNA, 19 bp, Mus musculus
  siRNA target sequence for Emilin1 (NM_133918.1,2026-2044).
gagaactctctgaggttat

SEQ ID NO: 749127 - DNA, 19 bp, Mus musculus
  siRNA target sequence for Emilin1 (NM_133918.1,2031-2049).
ctctctgaggttattctca

SEQ ID NO: 749128 - DNA, 19 bp, Mus musculus
  siRNA target sequence for Emilin1 (NM_133918.1,2309-2327).
cgtggcagggggactacaa

SEQ ID NO: 749129 - DNA, 19 bp, Mus musculus
  siRNA target sequence for Emilin1 (NM_133918.1,2460-2478).
cttggtgccctcaacaatt

SEQ ID NO: 749130 - DNA, 19 bp, Mus musculus
  siRNA target sequence for Emilin1 (NM_133918.1,2496-2514).
gaccgtctgcagcaactta

SEQ ID NO: 749131 - DNA, 19 bp, Mus musculus
  siRNA target sequence for Emilin1 (NM_133918.1,2692-2710).
ctgtgcctagggtagcatt

SEQ ID NO: 749132 - DNA, 19 bp, Mus musculus
  siRNA target sequence for Emilin1 (NM_133918.1,2774-2792).
caatgatggaggctactat

SEQ ID NO: 749133 - DNA, 19 bp, Mus musculus
  siRNA target sequence for Emilin1 (NM_133918.1,2821-2839).
cactggctggacgctattt

SEQ ID NO: 749134 - DNA, 19 bp, Mus musculus
  siRNA target sequence for Emilin1 (NM_133918.1,2840-2858).
gctgagcgctgtacttact

SEQ ID NO: 749135 - DNA, 19 bp, Mus musculus
  siRNA target sequence for Emilin1 (NM_133918.1,2857-2875).
ctgggcaccggcatgagaa

SEQ ID NO: 749136 - DNA, 19 bp, Mus musculus
  siRNA target sequence for Emilin1 (NM_133918.1,2940-2958).
cccgagggactggagaata

SEQ ID NO: 749137 - DNA, 19 bp, Mus musculus
  siRNA target sequence for Emilin1 (NM_133918.1,2941-2959).
ccgagggactggagaataa

SEQ ID NO: 749138 - DNA, 19 bp, Mus musculus
  siRNA target sequence for Emilin1 (NM_133918.1,2998-3016).
gcgtcttcagcctcattct

SEQ ID NO: 749139 - DNA, 19 bp, Mus musculus
  siRNA target sequence for A930040G15Rik (NM_133922.1,371-389).
ccccatttggagcatagtt

SEQ ID NO: 749140 - DNA, 19 bp, Mus musculus
  siRNA target sequence for A930040G15Rik (NM_133922.1,518-536).
ctggatggggagcaaacaa

SEQ ID NO: 749141 - DNA, 19 bp, Mus musculus
  siRNA target sequence for A930040G15Rik (NM_133922.1,574-592).
ccgaggcctgctcaattct

SEQ ID NO: 749142 - DNA, 19 bp, Mus musculus
  siRNA target sequence for A930040G15Rik (NM_133922.1,576-594).
gaggcctgctcaattctct

SEQ ID NO: 749143 - DNA, 19 bp, Mus musculus
  siRNA target sequence for A930040G15Rik (NM_133922.1,688-706).
ccccttacctgctagaact

SEQ ID NO: 749144 - DNA, 19 bp, Mus musculus
  siRNA target sequence for A930040G15Rik (NM_133922.1,691-709).
cttacctgctagaactgat

SEQ ID NO: 749145 - DNA, 19 bp, Mus musculus
  siRNA target sequence for A930040G15Rik (NM_133922.1,707-725).
gatgataagccattatcta

SEQ ID NO: 749146 - DNA, 19 bp, Mus musculus
  siRNA target sequence for A930040G15Rik (NM_133922.1,787-805).
ccagagcaagagttaccta

SEQ ID NO: 749147 - DNA, 19 bp, Mus musculus
  siRNA target sequence for A930040G15Rik (NM_133922.1,788-806).
cagagcaagagttacctaa

SEQ ID NO: 749148 - DNA, 19 bp, Mus musculus
  siRNA target sequence for A930040G15Rik (NM_133922.1,792-810).
gcaagagttacctaagaca

SEQ ID NO: 749149 - DNA, 19 bp, Mus musculus
  siRNA target sequence for A930040G15Rik (NM_133922.1,855-873).
cattgcaaggcctcatcaa

SEQ ID NO: 749150 - DNA, 19 bp, Mus musculus
  siRNA target sequence for A930040G15Rik (NM_133922.1,864-882).
gcctcatcaactgtttgaa

SEQ ID NO: 749151 - DNA, 19 bp, Mus musculus
  siRNA target sequence for A930040G15Rik (NM_133922.1,1063-1081).
gaaggagatcccaaaagct

SEQ ID NO: 749152 - DNA, 19 bp, Mus musculus
  siRNA target sequence for A930040G15Rik (NM_133922.1,1132-1150).
ggacccagggaaaagacat

SEQ ID NO: 749153 - DNA, 19 bp, Mus musculus
  siRNA target sequence for A930040G15Rik (NM_133922.1,1133-1151).
gacccagggaaaagacatt

SEQ ID NO: 749154 - DNA, 19 bp, Mus musculus
  siRNA target sequence for A930040G15Rik (NM_133922.1,1449-1467).
gtgatggggatctggattt

SEQ ID NO: 749155 - DNA, 19 bp, Mus musculus
  siRNA target sequence for A930040G15Rik (NM_133922.1,1498-1516).
gcttgggaaaggctatcta

SEQ ID NO: 749156 - DNA, 19 bp, Mus musculus
  siRNA target sequence for A930040G15Rik (NM_133922.1,1605-1623).
ctgtcaacaggggattgaa

SEQ ID NO: 749157 - DNA, 19 bp, Mus musculus
  siRNA target sequence for A930040G15Rik (NM_133922.1,1607-1625).
gtcaacaggggattgaaga

SEQ ID NO: 749158 - DNA, 19 bp, Mus musculus
  siRNA target sequence for A930040G15Rik (NM_133922.1,1722-1740).
gcaggagtctgcatcaaga

SEQ ID NO: 749159 - DNA, 19 bp, Mus musculus
  siRNA target sequence for A930040G15Rik (NM_133922.1,2072-2090).
ccaagagtcaacagcaata

SEQ ID NO: 749160 - DNA, 19 bp, Mus musculus
  siRNA target sequence for A930040G15Rik (NM_133922.1,2224-2242).
caccaatgctgaaggaaaa

SEQ ID NO: 749161 - DNA, 19 bp, Mus musculus
  siRNA target sequence for A930040G15Rik (NM_133922.1,2422-2440).
cacaactgtcttgtcaaaa

SEQ ID NO: 749162 - DNA, 19 bp, Mus musculus
  siRNA target sequence for A930040G15Rik (NM_133922.1,2620-2638).
gagccttggcccaaaaggt

SEQ ID NO: 749163 - DNA, 19 bp, Mus musculus
  siRNA target sequence for A930040G15Rik (NM_133922.1,2736-2754).
ggcccagaccaaagattct

SEQ ID NO: 749164 - DNA, 19 bp, Mus musculus
  siRNA target sequence for A930040G15Rik (NM_133922.1,2765-2783).
gcagaaggctgcaagacta

SEQ ID NO: 749165 - DNA, 19 bp, Mus musculus
  siRNA target sequence for A930040G15Rik (NM_133922.1,2843-2861).
gcttccttggtagaatctt

SEQ ID NO: 749166 - DNA, 19 bp, Mus musculus
  siRNA target sequence for A930040G15Rik (NM_133922.1,3059-3077).
gcagccatcagcattccaa

SEQ ID NO: 749167 - DNA, 19 bp, Mus musculus
  siRNA target sequence for 2810014D17Rik (NM_133928.1,216-234).
ctgcctaacggagatatta

SEQ ID NO: 749168 - DNA, 19 bp, Mus musculus
  siRNA target sequence for 2810014D17Rik (NM_133928.1,219-237).
cctaacggagatattaact

SEQ ID NO: 749169 - DNA, 19 bp, Mus musculus
  siRNA target sequence for 2810014D17Rik (NM_133928.1,225-243).
ggagatattaactggaatt

SEQ ID NO: 749170 - DNA, 19 bp, Mus musculus
  siRNA target sequence for Rpn1 (NM_133933.2,440-458).
ccgtatccgactcagataa

SEQ ID NO: 749171 - DNA, 19 bp, Mus musculus
  siRNA target sequence for Rpn1 (NM_133933.2,442-460).
gtatccgactcagataact

SEQ ID NO: 749172 - DNA, 19 bp, Mus musculus
  siRNA target sequence for Rpn1 (NM_133933.2,482-500).
gtgtttgagggcaaccatt

SEQ ID NO: 749173 - DNA, 19 bp, Mus musculus
  siRNA target sequence for Rpn1 (NM_133933.2,556-574).
ccgaaatgtggaaagctat

SEQ ID NO: 749174 - DNA, 19 bp, Mus musculus
  siRNA target sequence for Rpn1 (NM_133933.2,557-575).
cgaaatgtggaaagctata

SEQ ID NO: 749175 - DNA, 19 bp, Mus musculus
  siRNA target sequence for Rpn1 (NM_133933.2,600-618).
ctgaggacgtccttgatta

SEQ ID NO: 749176 - DNA, 19 bp, Mus musculus
  siRNA target sequence for Rpn1 (NM_133933.2,611-629).
cttgattatgggcctttta

SEQ ID NO: 749177 - DNA, 19 bp, Mus musculus
  siRNA target sequence for Rpn1 (NM_133933.2,657-675).
ctttcaaagtacattacga

SEQ ID NO: 749178 - DNA, 19 bp, Mus musculus
  siRNA target sequence for Rpn1 (NM_133933.2,714-732).
gggtcatcgaggtatctca

SEQ ID NO: 749179 - DNA, 19 bp, Mus musculus
  siRNA target sequence for Rpn1 (NM_133933.2,797-815).
cctttctcccgctacgatt

SEQ ID NO: 749180 - DNA, 19 bp, Mus musculus
  siRNA target sequence for Rpn1 (NM_133933.2,798-816).
ctttctcccgctacgatta

SEQ ID NO: 749181 - DNA, 19 bp, Mus musculus
  siRNA target sequence for Rpn1 (NM_133933.2,836-854).
gggatctcctccattcgtt

SEQ ID NO: 749182 - DNA, 19 bp, Mus musculus
  siRNA target sequence for Rpn1 (NM_133933.2,898-916).
ccgggatgagattggtaat

SEQ ID NO: 749183 - DNA, 19 bp, Mus musculus
  siRNA target sequence for Rpn1 (NM_133933.2,1002-1020).
cacactacatcgttggtta

SEQ ID NO: 749184 - DNA, 19 bp, Mus musculus
  siRNA target sequence for Rpn1 (NM_133933.2,1021-1039).
caacctcccaagctatgaa

SEQ ID NO: 749185 - DNA, 19 bp, Mus musculus
  siRNA target sequence for Rpn1 (NM_133933.2,1032-1050).
gctatgaatacctctataa

SEQ ID NO: 749186 - DNA, 19 bp, Mus musculus
  siRNA target sequence for Rpn1 (NM_133933.2,1033-1051).
ctatgaatacctctataat

SEQ ID NO: 749187 - DNA, 19 bp, Mus musculus
  siRNA target sequence for Rpn1 (NM_133933.2,1166-1184).
gtggacagtccctacgata

SEQ ID NO: 749188 - DNA, 19 bp, Mus musculus
  siRNA target sequence for Rpn1 (NM_133933.2,1194-1212).
ccccagacgagctgcatta

SEQ ID NO: 749189 - DNA, 19 bp, Mus musculus
  siRNA target sequence for Rpn1 (NM_133933.2,1195-1213).
cccagacgagctgcattat

SEQ ID NO: 749190 - DNA, 19 bp, Mus musculus
  siRNA target sequence for Rpn1 (NM_133933.2,1196-1214).
ccagacgagctgcattata

SEQ ID NO: 749191 - DNA, 19 bp, Mus musculus
  siRNA target sequence for Rpn1 (NM_133933.2,1199-1217).
gacgagctgcattatacct

SEQ ID NO: 749192 - DNA, 19 bp, Mus musculus
  siRNA target sequence for Rpn1 (NM_133933.2,1239-1257).
cggtgattgtggcttacaa

SEQ ID NO: 749193 - DNA, 19 bp, Mus musculus
  siRNA target sequence for Rpn1 (NM_133933.2,1531-1549).
gcagtcccgggatatctct

SEQ ID NO: 749194 - DNA, 19 bp, Mus musculus
  siRNA target sequence for Rpn1 (NM_133933.2,1532-1550).
cagtcccgggatatctcta

SEQ ID NO: 749195 - DNA, 19 bp, Mus musculus
  siRNA target sequence for 5830446M03Rik (NM_133934.2,121-139).
ggcccgaaatgcagaaaaa

SEQ ID NO: 749196 - DNA, 19 bp, Mus musculus
  siRNA target sequence for 5830446M03Rik (NM_133934.2,250-268).
gtggagacggcagatcatt

SEQ ID NO: 749197 - DNA, 19 bp, Mus musculus
  siRNA target sequence for 5830446M03Rik (NM_133934.2,330-348).
gggacctgaatgacgaaat

SEQ ID NO: 749198 - DNA, 19 bp, Mus musculus
  siRNA target sequence for 5830446M03Rik (NM_133934.2,331-349).
ggacctgaatgacgaaatt

SEQ ID NO: 749199 - DNA, 19 bp, Mus musculus
  siRNA target sequence for 5830446M03Rik (NM_133934.2,332-350).
gacctgaatgacgaaatta

SEQ ID NO: 749200 - DNA, 19 bp, Mus musculus
  siRNA target sequence for 5830446M03Rik (NM_133934.2,405-423).
gtcctgattatggaaaagt

SEQ ID NO: 749201 - DNA, 19 bp, Mus musculus
  siRNA target sequence for 5830446M03Rik (NM_133934.2,465-483).
gaaatcgaggttacaagta

SEQ ID NO: 749202 - DNA, 19 bp, Mus musculus
  siRNA target sequence for 5830446M03Rik (NM_133934.2,507-525).
ctggtgtcagagagctatt

SEQ ID NO: 749203 - DNA, 19 bp, Mus musculus
  siRNA target sequence for 5830446M03Rik (NM_133934.2,510-528).
gtgtcagagagctatttga

SEQ ID NO: 749204 - DNA, 19 bp, Mus musculus
  siRNA target sequence for 5830446M03Rik (NM_133934.2,569-587).
ctcatgaaggccatcgatt

SEQ ID NO: 749205 - DNA, 19 bp, Mus musculus
  siRNA target sequence for 5830446M03Rik (NM_133934.2,571-589).
catgaaggccatcgatttt

SEQ ID NO: 749206 - DNA, 19 bp, Mus musculus
  siRNA target sequence for 5830446M03Rik (NM_133934.2,631-649).
gcccttggaacaagagtat

SEQ ID NO: 749207 - DNA, 19 bp, Mus musculus
  siRNA target sequence for 5830446M03Rik (NM_133934.2,881-899).
cttgtacggaggaagaaaa

SEQ ID NO: 749208 - DNA, 19 bp, Mus musculus
  siRNA target sequence for 5830446M03Rik (NM_133934.2,905-923).
ctgctccagaaatatgcaa

SEQ ID NO: 749209 - DNA, 19 bp, Mus musculus
  siRNA target sequence for 6720456B07Rik (NM_133937.1,54-72).
gggcgaaccgggagtacat

SEQ ID NO: 749210 - DNA, 19 bp, Mus musculus
  siRNA target sequence for 6720456B07Rik (NM_133937.1,55-73).
ggcgaaccgggagtacatt

SEQ ID NO: 749211 - DNA, 19 bp, Mus musculus
  siRNA target sequence for 6720456B07Rik (NM_133937.1,57-75).
cgaaccgggagtacattga

SEQ ID NO: 749212 - DNA, 19 bp, Mus musculus
  siRNA target sequence for 6720456B07Rik (NM_133937.1,115-133).
caactctttcgatatgtct

SEQ ID NO: 749213 - DNA, 19 bp, Mus musculus
  siRNA target sequence for 6720456B07Rik (NM_133937.1,141-159).
caagactcgcaacactaaa

SEQ ID NO: 749214 - DNA, 19 bp, Mus musculus
  siRNA target sequence for 6720456B07Rik (NM_133937.1,144-162).
gactcgcaacactaaatga

SEQ ID NO: 749215 - DNA, 19 bp, Mus musculus
  siRNA target sequence for 6720456B07Rik (NM_133937.1,148-166).
cgcaacactaaatgagaaa

SEQ ID NO: 749216 - DNA, 19 bp, Mus musculus
  siRNA target sequence for 6720456B07Rik (NM_133937.1,174-192).
cccttgaacggagaataga

SEQ ID NO: 749217 - DNA, 19 bp, Mus musculus
  siRNA target sequence for 6720456B07Rik (NM_133937.1,176-194).
cttgaacggagaatagagt

SEQ ID NO: 749218 - DNA, 19 bp, Mus musculus
  siRNA target sequence for 6720456B07Rik (NM_133937.1,183-201).
ggagaatagagtacattga

SEQ ID NO: 749219 - DNA, 19 bp, Mus musculus
  siRNA target sequence for 6720456B07Rik (NM_133937.1,184-202).
gagaatagagtacattgaa

SEQ ID NO: 749220 - DNA, 19 bp, Mus musculus
  siRNA target sequence for Lsm8 (NM_133939.1,128-146).
ccggactgtggctgttatt

SEQ ID NO: 749221 - DNA, 19 bp, Mus musculus
  siRNA target sequence for Lsm8 (NM_133939.1,131-149).
gactgtggctgttattact

SEQ ID NO: 749222 - DNA, 19 bp, Mus musculus
  siRNA target sequence for Lsm8 (NM_133939.1,137-155).
ggctgttattacttctgat

SEQ ID NO: 749223 - DNA, 19 bp, Mus musculus
  siRNA target sequence for Lsm8 (NM_133939.1,168-186).
gtgggaacactaaaaggtt

SEQ ID NO: 749224 - DNA, 19 bp, Mus musculus
  siRNA target sequence for Lsm8 (NM_133939.1,170-188).
gggaacactaaaaggtttt

SEQ ID NO: 749225 - DNA, 19 bp, Mus musculus
  siRNA target sequence for Lsm8 (NM_133939.1,172-190).
gaacactaaaaggttttga

SEQ ID NO: 749226 - DNA, 19 bp, Mus musculus
  siRNA target sequence for Lsm8 (NM_133939.1,183-201).
ggttttgaccagaccatta

SEQ ID NO: 749227 - DNA, 19 bp, Mus musculus
  siRNA target sequence for Lsm8 (NM_133939.1,184-202).
gttttgaccagaccattaa

SEQ ID NO: 749228 - DNA, 19 bp, Mus musculus
  siRNA target sequence for Lsm8 (NM_133939.1,191-209).
ccagaccattaacttgatt

SEQ ID NO: 749229 - DNA, 19 bp, Mus musculus
  siRNA target sequence for Lsm8 (NM_133939.1,192-210).
cagaccattaacttgattt

SEQ ID NO: 749230 - DNA, 19 bp, Mus musculus
  siRNA target sequence for Lsm8 (NM_133939.1,263-281).
ggtgttggggttatacatt

SEQ ID NO: 749231 - DNA, 19 bp, Mus musculus
  siRNA target sequence for Lsm8 (NM_133939.1,290-308).
cgacaatgtagcagtcatt

SEQ ID NO: 749232 - DNA, 19 bp, Mus musculus
  siRNA target sequence for Lsm8 (NM_133939.1,301-319).
cagtcattggggaaataga

SEQ ID NO: 749233 - DNA, 19 bp, Mus musculus
  siRNA target sequence for AW322056 (NM_133940.1,440-458).
ctgcgcgctctcaacttga

SEQ ID NO: 749234 - DNA, 19 bp, Mus musculus
  siRNA target sequence for AW322056 (NM_133940.1,594-612).
gcctcaagagccttaatct

SEQ ID NO: 749235 - DNA, 19 bp, Mus musculus
  siRNA target sequence for AW322056 (NM_133940.1,1226-1244).
ccctgcctcaaggtactta

SEQ ID NO: 749236 - DNA, 19 bp, Mus musculus
  siRNA target sequence for Ddx32 (NM_133941.1,471-489).
ctccagagaaacgctattt

SEQ ID NO: 749237 - DNA, 19 bp, Mus musculus
  siRNA target sequence for Ddx32 (NM_133941.1,566-584).
gacggcttaccgtattcat

SEQ ID NO: 749238 - DNA, 19 bp, Mus musculus
  siRNA target sequence for Ddx32 (NM_133941.1,575-593).
ccgtattcatcgcgatatt

SEQ ID NO: 749239 - DNA, 19 bp, Mus musculus
  siRNA target sequence for Ddx32 (NM_133941.1,576-594).
cgtattcatcgcgatatta

SEQ ID NO: 749240 - DNA, 19 bp, Mus musculus
  siRNA target sequence for Ddx32 (NM_133941.1,582-600).
catcgcgatattacaaact

SEQ ID NO: 749241 - DNA, 19 bp, Mus musculus
  siRNA target sequence for Ddx32 (NM_133941.1,585-603).
cgcgatattacaaactttt

SEQ ID NO: 749242 - DNA, 19 bp, Mus musculus
  siRNA target sequence for Ddx32 (NM_133941.1,587-605).
cgatattacaaacttttga

SEQ ID NO: 749243 - DNA, 19 bp, Mus musculus
  siRNA target sequence for Ddx32 (NM_133941.1,614-632).
gaagagcttccgatatgga

SEQ ID NO: 749244 - DNA, 19 bp, Mus musculus
  siRNA target sequence for Ddx32 (NM_133941.1,619-637).
gcttccgatatggaaagaa

SEQ ID NO: 749245 - DNA, 19 bp, Mus musculus
  siRNA target sequence for Ddx32 (NM_133941.1,620-638).
cttccgatatggaaagaaa

SEQ ID NO: 749246 - DNA, 19 bp, Mus musculus
  siRNA target sequence for Ddx32 (NM_133941.1,624-642).
cgatatggaaagaaaagta

SEQ ID NO: 749247 - DNA, 19 bp, Mus musculus
  siRNA target sequence for Ddx32 (NM_133941.1,723-741).
ctcagtggtgtgctgaata

SEQ ID NO: 749248 - DNA, 19 bp, Mus musculus
  siRNA target sequence for Ddx32 (NM_133941.1,828-846).
ccgacgagatggatgtgaa

SEQ ID NO: 749249 - DNA, 19 bp, Mus musculus
  siRNA target sequence for Ddx32 (NM_133941.1,829-847).
cgacgagatggatgtgaat

SEQ ID NO: 749250 - DNA, 19 bp, Mus musculus
  siRNA target sequence for Ddx32 (NM_133941.1,854-872).
cacgaagtcggctatgtga

SEQ ID NO: 749251 - DNA, 19 bp, Mus musculus
  siRNA target sequence for Ddx32 (NM_133941.1,856-874).
cgaagtcggctatgtgatt

SEQ ID NO: 749252 - DNA, 19 bp, Mus musculus
  siRNA target sequence for Ddx32 (NM_133941.1,860-878).
gtcggctatgtgattcctt

SEQ ID NO: 749253 - DNA, 19 bp, Mus musculus
  siRNA target sequence for Ddx32 (NM_133941.1,862-880).
cggctatgtgattcctttt

SEQ ID NO: 749254 - DNA, 19 bp, Mus musculus
  siRNA target sequence for Ddx32 (NM_133941.1,864-882).
gctatgtgattccttttga

SEQ ID NO: 749255 - DNA, 19 bp, Mus musculus
  siRNA target sequence for Ddx32 (NM_133941.1,907-925).
cctgaggtactgtactgat

SEQ ID NO: 749256 - DNA, 19 bp, Mus musculus
  siRNA target sequence for Ddx32 (NM_133941.1,955-973).
ccctttcctgggtagctat

SEQ ID NO: 749257 - DNA, 19 bp, Mus musculus
  siRNA target sequence for Ddx32 (NM_133941.1,966-984).
gtagctatggcgtcatcat

SEQ ID NO: 749258 - DNA, 19 bp, Mus musculus
  siRNA target sequence for Ddx32 (NM_133941.1,969-987).
gctatggcgtcatcatctt

SEQ ID NO: 749259 - DNA, 19 bp, Mus musculus
  siRNA target sequence for Ddx32 (NM_133941.1,1024-1042).
gctgctcggactccttaaa

SEQ ID NO: 749260 - DNA, 19 bp, Mus musculus
  siRNA target sequence for Ddx32 (NM_133941.1,1027-1045).
gctcggactccttaaagat

SEQ ID NO: 749261 - DNA, 19 bp, Mus musculus
  siRNA target sequence for Ddx32 (NM_133941.1,1064-1082).
gagctgaagctcatagtta

SEQ ID NO: 749262 - DNA, 19 bp, Mus musculus
  siRNA target sequence for Ddx32 (NM_133941.1,1090-1108).
gcctctcctcaccagtaaa

SEQ ID NO: 749263 - DNA, 19 bp, Mus musculus
  siRNA target sequence for Ddx32 (NM_133941.1,1125-1143).
gagacgtgcctgtcataga

SEQ ID NO: 749264 - DNA, 19 bp, Mus musculus
  siRNA target sequence for Ddx32 (NM_133941.1,1209-1227).
ctgtcatacgccttatctt

SEQ ID NO: 749265 - DNA, 19 bp, Mus musculus
  siRNA target sequence for Ddx32 (NM_133941.1,1213-1231).
catacgccttatctttgaa

SEQ ID NO: 749266 - DNA, 19 bp, Mus musculus
  siRNA target sequence for Ddx32 (NM_133941.1,1271-1289).
ctggcctgtgaacaagata

SEQ ID NO: 749267 - DNA, 19 bp, Mus musculus
  siRNA target sequence for Ddx32 (NM_133941.1,1316-1334).
caggaaggatccaacttaa

SEQ ID NO: 749268 - DNA, 19 bp, Mus musculus
  siRNA target sequence for Ddx32 (NM_133941.1,1403-1421).
gtggacgaaaccgagaaaa

SEQ ID NO: 749269 - DNA, 19 bp, Mus musculus
  siRNA target sequence for Ddx32 (NM_133941.1,1485-1503).
gccacacggtcaaatttgt

SEQ ID NO: 749270 - DNA, 19 bp, Mus musculus
  siRNA target sequence for Ddx32 (NM_133941.1,1487-1505).
cacacggtcaaatttgtca

SEQ ID NO: 749271 - DNA, 19 bp, Mus musculus
  siRNA target sequence for Ddx32 (NM_133941.1,1489-1507).
cacggtcaaatttgtcatt

SEQ ID NO: 749272 - DNA, 19 bp, Mus musculus
  siRNA target sequence for Ddx32 (NM_133941.1,1491-1509).
cggtcaaatttgtcattga

SEQ ID NO: 749273 - DNA, 19 bp, Mus musculus
  siRNA target sequence for Ddx32 (NM_133941.1,1766-1784).
cgctgcgacttcatgaaca

SEQ ID NO: 749274 - DNA, 19 bp, Mus musculus
  siRNA target sequence for Ddx32 (NM_133941.1,1906-1924).
gctctcaaagtctatctta

SEQ ID NO: 749275 - DNA, 19 bp, Mus musculus
  siRNA target sequence for Ddx32 (NM_133941.1,1942-1960).
ctgtgtagacgaaatgcta

SEQ ID NO: 749276 - DNA, 19 bp, Mus musculus
  siRNA target sequence for Ddx32 (NM_133941.1,2056-2074).
ccctgaaggtgatcacttt

SEQ ID NO: 749277 - DNA, 19 bp, Mus musculus
  siRNA target sequence for Ddx32 (NM_133941.1,2057-2075).
cctgaaggtgatcacttta

SEQ ID NO: 749278 - DNA, 19 bp, Mus musculus
  siRNA target sequence for Ddx32 (NM_133941.1,2076-2094).
cgctcatcaatgtctacaa

SEQ ID NO: 749279 - DNA, 19 bp, Mus musculus
  siRNA target sequence for Ddx32 (NM_133941.1,2201-2219).
cgagcagaactcttagaga

SEQ ID NO: 749280 - DNA, 19 bp, Mus musculus
  siRNA target sequence for Ddx32 (NM_133941.1,2336-2354).
gacgggtcaggtaactact

SEQ ID NO: 749281 - DNA, 19 bp, Mus musculus
  siRNA target sequence for Ddx32 (NM_133941.1,2339-2357).
gggtcaggtaactacttga

SEQ ID NO: 749282 - DNA, 19 bp, Mus musculus
  siRNA target sequence for Ddx32 (NM_133941.1,2340-2358).
ggtcaggtaactacttgat

SEQ ID NO: 749283 - DNA, 19 bp, Mus musculus
  siRNA target sequence for Ddx32 (NM_133941.1,2345-2363).
ggtaactacttgatgctta

SEQ ID NO: 749284 - DNA, 19 bp, Mus musculus
  siRNA target sequence for Ddx32 (NM_133941.1,2350-2368).
ctacttgatgcttacacat

SEQ ID NO: 749285 - DNA, 19 bp, Mus musculus
  siRNA target sequence for Ddx32 (NM_133941.1,2391-2409).
ccttatcaagctattccat

SEQ ID NO: 749286 - DNA, 19 bp, Mus musculus
  siRNA target sequence for Ddx32 (NM_133941.1,2440-2458).
ccaccagttcagcatatct

SEQ ID NO: 749287 - DNA, 19 bp, Mus musculus
  siRNA target sequence for Ddx32 (NM_133941.1,2487-2505).
cagtctcccctgagctatt

SEQ ID NO: 749288 - DNA, 19 bp, Mus musculus
  siRNA target sequence for Ddx32 (NM_133941.1,2512-2530).
gctggtaccacagtactat

SEQ ID NO: 749289 - DNA, 19 bp, Mus musculus
  siRNA target sequence for Ddx32 (NM_133941.1,2513-2531).
ctggtaccacagtactatt

SEQ ID NO: 749290 - DNA, 19 bp, Mus musculus
  siRNA target sequence for Ddx32 (NM_133941.1,2516-2534).
gtaccacagtactatttca

SEQ ID NO: 749291 - DNA, 19 bp, Mus musculus
  siRNA target sequence for Ddx32 (NM_133941.1,2519-2537).
ccacagtactatttcagta

SEQ ID NO: 749292 - DNA, 19 bp, Mus musculus
  siRNA target sequence for AA960558 (NM_133942.1,264-282).
gagccattaaacttaccta

SEQ ID NO: 749293 - DNA, 19 bp, Mus musculus
  siRNA target sequence for AA960558 (NM_133942.1,268-286).
cattaaacttacctacatt

SEQ ID NO: 749294 - DNA, 19 bp, Mus musculus
  siRNA target sequence for AA960558 (NM_133942.1,358-376).
gaagcaagtgtcttacaga

SEQ ID NO: 749295 - DNA, 19 bp, Mus musculus
  siRNA target sequence for AA960558 (NM_133942.1,367-385).
gtcttacagaactgacatt

SEQ ID NO: 749296 - DNA, 19 bp, Mus musculus
  siRNA target sequence for AA960558 (NM_133942.1,406-424).
cacgccgacgcagaaagaa

SEQ ID NO: 749297 - DNA, 19 bp, Mus musculus
  siRNA target sequence for AA960558 (NM_133942.1,411-429).
cgacgcagaaagaagaagt

SEQ ID NO: 749298 - DNA, 19 bp, Mus musculus
  siRNA target sequence for AA960558 (NM_133942.1,441-459).
gtgagagtctggatagaaa

SEQ ID NO: 749299 - DNA, 19 bp, Mus musculus
  siRNA target sequence for AA960558 (NM_133942.1,445-463).
gagtctggatagaaacaat

SEQ ID NO: 749300 - DNA, 19 bp, Mus musculus
  siRNA target sequence for AA960558 (NM_133942.1,447-465).
gtctggatagaaacaattt

SEQ ID NO: 749301 - DNA, 19 bp, Mus musculus
  siRNA target sequence for AA960558 (NM_133942.1,550-568).
gcaaggagcggtgatgaaa

SEQ ID NO: 749302 - DNA, 19 bp, Mus musculus
  siRNA target sequence for AA960558 (NM_133942.1,551-569).
caaggagcggtgatgaaaa

SEQ ID NO: 749303 - DNA, 19 bp, Mus musculus
  siRNA target sequence for AA960558 (NM_133942.1,554-572).
ggagcggtgatgaaaaact

SEQ ID NO: 749304 - DNA, 19 bp, Mus musculus
  siRNA target sequence for AA960558 (NM_133942.1,604-622).
cacaataggctacttcaaa

SEQ ID NO: 749305 - DNA, 19 bp, Mus musculus
  siRNA target sequence for AA960558 (NM_133942.1,646-664).
gcgggtgataccacttaaa

SEQ ID NO: 749306 - DNA, 19 bp, Mus musculus
  siRNA target sequence for AA960558 (NM_133942.1,648-666).
gggtgataccacttaaaga

SEQ ID NO: 749307 - DNA, 19 bp, Mus musculus
  siRNA target sequence for AA960558 (NM_133942.1,735-753).
cgacatctcggactttcta

SEQ ID NO: 749308 - DNA, 19 bp, Mus musculus
  siRNA target sequence for AA960558 (NM_133942.1,776-794).
gagatgcacagttggatta

SEQ ID NO: 749309 - DNA, 19 bp, Mus musculus
  siRNA target sequence for AA960558 (NM_133942.1,781-799).
gcacagttggattaaagca

SEQ ID NO: 749310 - DNA, 19 bp, Mus musculus
  siRNA target sequence for AA960558 (NM_133942.1,905-923).
gcagccaccgcctcacatt

SEQ ID NO: 749311 - DNA, 19 bp, Mus musculus
  siRNA target sequence for AA960558 (NM_133942.1,970-988).
gaagcgaggagtttaccaa

SEQ ID NO: 749312 - DNA, 19 bp, Mus musculus
  siRNA target sequence for Psip2 (NM_133948.2,1030-1048).
gaatctaaacggaaaaatt

SEQ ID NO: 749313 - DNA, 19 bp, Mus musculus
  siRNA target sequence for Psip2 (NM_133948.2,1386-1404).
ggatgaactcgcttcactt

SEQ ID NO: 749314 - DNA, 19 bp, Mus musculus
  siRNA target sequence for AW538196 (NM_133952.1,171-189).
ggcaacgagctgttcaaat

SEQ ID NO: 749315 - DNA, 19 bp, Mus musculus
  siRNA target sequence for AW538196 (NM_133952.1,329-347).
ggcgtctaaagccattgaa

SEQ ID NO: 749316 - DNA, 19 bp, Mus musculus
  siRNA target sequence for AW538196 (NM_133952.1,448-466).
gcctagaacccaagaacaa

SEQ ID NO: 749317 - DNA, 19 bp, Mus musculus
  siRNA target sequence for AW538196 (NM_133952.1,476-494).
ggagtcgctgaggaacatt

SEQ ID NO: 749318 - DNA, 19 bp, Mus musculus
  siRNA target sequence for AW538196 (NM_133952.1,552-570).
cagatgtttcagatactgt

SEQ ID NO: 749319 - DNA, 19 bp, Mus musculus
  siRNA target sequence for AW538196 (NM_133952.1,869-887).
gctgcaggttatctttgat

SEQ ID NO: 749320 - DNA, 19 bp, Mus musculus
  siRNA target sequence for AW538196 (NM_133952.1,921-939).
ggcaaagaaggtgctatta

SEQ ID NO: 749321 - DNA, 19 bp, Mus musculus
  siRNA target sequence for AW538196 (NM_133952.1,922-940).
gcaaagaaggtgctattat

SEQ ID NO: 749322 - DNA, 19 bp, Mus musculus
  siRNA target sequence for AW538196 (NM_133952.1,955-973).
gggagctgaaggttctcat

SEQ ID NO: 749323 - DNA, 19 bp, Mus musculus
  siRNA target sequence for AW538196 (NM_133952.1,1039-1057).
ccctcctcattaaaatggt

SEQ ID NO: 749324 - DNA, 19 bp, Mus musculus
  siRNA target sequence for AW538196 (NM_133952.1,1240-1258).
gtgatgccgagcgagaaaa

SEQ ID NO: 749325 - DNA, 19 bp, Mus musculus
  siRNA target sequence for AW538196 (NM_133952.1,1266-1284).
cgactctgtgagaactaca

SEQ ID NO: 749326 - DNA, 19 bp, Mus musculus
  siRNA target sequence for AW538196 (NM_133952.1,1742-1760).
ggcttacctcacctttgat

SEQ ID NO: 749327 - DNA, 19 bp, Mus musculus
  siRNA target sequence for AW538196 (NM_133952.1,1762-1780).
cggacgtgaaggaagagtt

SEQ ID NO: 749328 - DNA, 19 bp, Mus musculus
  siRNA target sequence for AW538196 (NM_133952.1,1857-1875).
ggctcggcattggtcaatt

SEQ ID NO: 749329 - DNA, 19 bp, Mus musculus
  siRNA target sequence for AW538196 (NM_133952.1,2223-2241).
cttgccaagctgaccatta

SEQ ID NO: 749330 - DNA, 19 bp, Mus musculus
  siRNA target sequence for AW538196 (NM_133952.1,2346-2364).
gccctcatggccctaacaa

SEQ ID NO: 749331 - DNA, 19 bp, Mus musculus
  siRNA target sequence for AW538196 (NM_133952.1,2426-2444).
gattgagggctacatgttt

SEQ ID NO: 749332 - DNA, 19 bp, Mus musculus
  siRNA target sequence for AW538196 (NM_133952.1,2477-2495).
cgagtgcatgtgtaactta

SEQ ID NO: 749333 - DNA, 19 bp, Mus musculus
  siRNA target sequence for AW538196 (NM_133952.1,2876-2894).
gaaagcagtggaatataga

SEQ ID NO: 749334 - DNA, 19 bp, Mus musculus
  siRNA target sequence for AA960436 (NM_133954.1,211-229).
ggacgacagtgcaaagcat

SEQ ID NO: 749335 - DNA, 19 bp, Mus musculus
  siRNA target sequence for AA960436 (NM_133954.1,232-250).
cggtcgaatccgaaccttt

SEQ ID NO: 749336 - DNA, 19 bp, Mus musculus
  siRNA target sequence for AA960436 (NM_133954.1,339-357).
cccgagctcagatgtttgt

SEQ ID NO: 749337 - DNA, 19 bp, Mus musculus
  siRNA target sequence for AA960436 (NM_133954.1,468-486).
ctttccaaaggttcttctt

SEQ ID NO: 749338 - DNA, 19 bp, Mus musculus
  siRNA target sequence for AA960436 (NM_133954.1,491-509).
gccaacagggtaaagattt

SEQ ID NO: 749339 - DNA, 19 bp, Mus musculus
  siRNA target sequence for AA960436 (NM_133954.1,492-510).
ccaacagggtaaagattta

SEQ ID NO: 749340 - DNA, 19 bp, Mus musculus
  siRNA target sequence for Arhgef18 (NM_133962.2,229-247).
ggtgcgacttggaccaatt

SEQ ID NO: 749341 - DNA, 19 bp, Mus musculus
  siRNA target sequence for Arhgef18 (NM_133962.2,273-291).
ccgtgtttttaaagttgaa

SEQ ID NO: 749342 - DNA, 19 bp, Mus musculus
  siRNA target sequence for Arhgef18 (NM_133962.2,333-351).
ctgagtctgttttcataga

SEQ ID NO: 749343 - DNA, 19 bp, Mus musculus
  siRNA target sequence for Arhgef18 (NM_133962.2,350-368).
gaagacccttacattgctt

SEQ ID NO: 749344 - DNA, 19 bp, Mus musculus
  siRNA target sequence for Arhgef18 (NM_133962.2,371-389).
ctgaggtgtgagatcgaat

SEQ ID NO: 749345 - DNA, 19 bp, Mus musculus
  siRNA target sequence for Arhgef18 (NM_133962.2,424-442).
cctctctgtggatttagca

SEQ ID NO: 749346 - DNA, 19 bp, Mus musculus
  siRNA target sequence for Arhgef18 (NM_133962.2,427-445).
ctctgtggatttagcatat

SEQ ID NO: 749347 - DNA, 19 bp, Mus musculus
  siRNA target sequence for Arhgef18 (NM_133962.2,475-493).
gagacaggacgtcctatat

SEQ ID NO: 749348 - DNA, 19 bp, Mus musculus
  siRNA target sequence for Arhgef18 (NM_133962.2,477-495).
gacaggacgtcctatatga

SEQ ID NO: 749349 - DNA, 19 bp, Mus musculus
  siRNA target sequence for Arhgef18 (NM_133962.2,515-533).
catcacgtgcgcacactaa

SEQ ID NO: 749350 - DNA, 19 bp, Mus musculus
  siRNA target sequence for Arhgef18 (NM_133962.2,518-536).
cacgtgcgcacactaaaga

SEQ ID NO: 749351 - DNA, 19 bp, Mus musculus
  siRNA target sequence for Arhgef18 (NM_133962.2,693-711).
gcagtgatcggaattacgt

SEQ ID NO: 749352 - DNA, 19 bp, Mus musculus
  siRNA target sequence for Arhgef18 (NM_133962.2,701-719).
cggaattacgtcatccaaa

SEQ ID NO: 749353 - DNA, 19 bp, Mus musculus
  siRNA target sequence for Arhgef18 (NM_133962.2,753-771).
gagaaaccggggagagaat

SEQ ID NO: 749354 - DNA, 19 bp, Mus musculus
  siRNA target sequence for Arhgef18 (NM_133962.2,793-811).
ctgtagtggccacaatgat

SEQ ID NO: 749355 - DNA, 19 bp, Mus musculus
  siRNA target sequence for Arhgef18 (NM_133962.2,846-864).
gcaagaagtttcaaaactt

SEQ ID NO: 749356 - DNA, 19 bp, Mus musculus
  siRNA target sequence for Arhgef18 (NM_133962.2,929-947).
gtcacacagcgcataacca

SEQ ID NO: 749357 - DNA, 19 bp, Mus musculus
  siRNA target sequence for Arhgef18 (NM_133962.2,1052-1070).
caagtggacgccaaagtca

SEQ ID NO: 749358 - DNA, 19 bp, Mus musculus
  siRNA target sequence for Arhgef18 (NM_133962.2,1060-1078).
cgccaaagtcagtgagtat

SEQ ID NO: 749359 - DNA, 19 bp, Mus musculus
  siRNA target sequence for Arhgef18 (NM_133962.2,1126-1144).
gtcgtctggcaaactcaaa

SEQ ID NO: 749360 - DNA, 19 bp, Mus musculus
  siRNA target sequence for Arhgef18 (NM_133962.2,1411-1429).
gcaggggccagagatgtat

SEQ ID NO: 749361 - DNA, 19 bp, Mus musculus
  siRNA target sequence for Arhgef18 (NM_133962.2,1415-1433).
gggccagagatgtatgaga

SEQ ID NO: 749362 - DNA, 19 bp, Mus musculus
  siRNA target sequence for Arhgef18 (NM_133962.2,1510-1528).
ggaggaggacgttttcagt

SEQ ID NO: 749363 - DNA, 19 bp, Mus musculus
  siRNA target sequence for Taf5l (NM_133966.1,260-278).
ctcacagtccaatcagaat

SEQ ID NO: 749364 - DNA, 19 bp, Mus musculus
  siRNA target sequence for Taf5l (NM_133966.1,262-280).
cacagtccaatcagaatct

SEQ ID NO: 749365 - DNA, 19 bp, Mus musculus
  siRNA target sequence for Taf5l (NM_133966.1,383-401).
cagtacagccgtgaagtta

SEQ ID NO: 749366 - DNA, 19 bp, Mus musculus
  siRNA target sequence for Taf5l (NM_133966.1,591-609).
gtgcattcctggacaacaa

SEQ ID NO: 749367 - DNA, 19 bp, Mus musculus
  siRNA target sequence for Taf5l (NM_133966.1,695-713).
cttgccgtgcacattcact

SEQ ID NO: 749368 - DNA, 19 bp, Mus musculus
  siRNA target sequence for Taf5l (NM_133966.1,699-717).
ccgtgcacattcacttaga

SEQ ID NO: 749369 - DNA, 19 bp, Mus musculus
  siRNA target sequence for Taf5l (NM_133966.1,845-863).
gtcttgcaggagagtatca

SEQ ID NO: 749370 - DNA, 19 bp, Mus musculus
  siRNA target sequence for Taf5l (NM_133966.1,949-967).
gatctcctccgatagcaaa

SEQ ID NO: 749371 - DNA, 19 bp, Mus musculus
  siRNA target sequence for Taf5l (NM_133966.1,1008-1026).
ggagcttgcgatccaaaaa

SEQ ID NO: 749372 - DNA, 19 bp, Mus musculus
  siRNA target sequence for Taf5l (NM_133966.1,1011-1029).
gcttgcgatccaaaaagct

SEQ ID NO: 749373 - DNA, 19 bp, Mus musculus
  siRNA target sequence for Taf5l (NM_133966.1,1208-1226).
gaagatatgtccatcagat

SEQ ID NO: 749374 - DNA, 19 bp, Mus musculus
  siRNA target sequence for Taf5l (NM_133966.1,1303-1321).
ccccttcagcctgtacttt

SEQ ID NO: 749375 - DNA, 19 bp, Mus musculus
  siRNA target sequence for Taf5l (NM_133966.1,1345-1363).
cgccaggctgtggtctttt

SEQ ID NO: 749376 - DNA, 19 bp, Mus musculus
  siRNA target sequence for Taf5l (NM_133966.1,1348-1366).
caggctgtggtcttttgat

SEQ ID NO: 749377 - DNA, 19 bp, Mus musculus
  siRNA target sequence for Taf5l (NM_133966.1,1371-1389).
cgtacccgctgaggatata

SEQ ID NO: 749378 - DNA, 19 bp, Mus musculus
  siRNA target sequence for Taf5l (NM_133966.1,1375-1393).
cccgctgaggatatatgca

SEQ ID NO: 749379 - DNA, 19 bp, Mus musculus
  siRNA target sequence for Taf5l (NM_133966.1,1406-1424).
gatgtggactgtgtcaaat

SEQ ID NO: 749380 - DNA, 19 bp, Mus musculus
  siRNA target sequence for Taf5l (NM_133966.1,1429-1447).
ccccaactcaaactactta

SEQ ID NO: 749381 - DNA, 19 bp, Mus musculus
  siRNA target sequence for Taf5l (NM_133966.1,1455-1473).
ggtccactgacaaaactgt

SEQ ID NO: 749382 - DNA, 19 bp, Mus musculus
  siRNA target sequence for Taf5l (NM_133966.1,1584-1602).
gtgaggaccagcggttaaa

SEQ ID NO: 749383 - DNA, 19 bp, Mus musculus
  siRNA target sequence for Taf5l (NM_133966.1,1589-1607).
gaccagcggttaaagttgt

SEQ ID NO: 749384 - DNA, 19 bp, Mus musculus
  siRNA target sequence for Taf5l (NM_133966.1,1616-1634).
gcctctgggacacttttta

SEQ ID NO: 749385 - DNA, 19 bp, Mus musculus
  siRNA target sequence for Taf5l (NM_133966.1,1617-1635).
cctctgggacactttttaa

SEQ ID NO: 749386 - DNA, 19 bp, Mus musculus
  siRNA target sequence for 0610007H10Rik (NM_133968.1,100-118).
gcgagatgcggcatctact

SEQ ID NO: 749387 - DNA, 19 bp, Mus musculus
  siRNA target sequence for 0610007H10Rik (NM_133968.1,199-217).
ccgagatctgtcgctttat

SEQ ID NO: 749388 - DNA, 19 bp, Mus musculus
  siRNA target sequence for 0610007H10Rik (NM_133968.1,466-484).
gaaaggcactggtgttctt

SEQ ID NO: 749389 - DNA, 19 bp, Mus musculus
  siRNA target sequence for 0610007H10Rik (NM_133968.1,503-521).
gaaggatcctgcatctgaa

SEQ ID NO: 749390 - DNA, 19 bp, Mus musculus
  siRNA target sequence for 0610007H10Rik (NM_133968.1,778-796).
cagctgtggtccttaacct

SEQ ID NO: 749391 - DNA, 19 bp, Mus musculus
  siRNA target sequence for D8Ertd354e (NM_133970.1,513-531).
cgctttctccattttgtat

SEQ ID NO: 749392 - DNA, 19 bp, Mus musculus
  siRNA target sequence for D8Ertd354e (NM_133970.1,582-600).
gatttactctggacatttt

SEQ ID NO: 749393 - DNA, 19 bp, Mus musculus
  siRNA target sequence for D8Ertd354e (NM_133970.1,772-790).
cgtaccgccgtggtttcat

SEQ ID NO: 749394 - DNA, 19 bp, Mus musculus
  siRNA target sequence for D8Ertd354e (NM_133970.1,823-841).
gtgtcatgttgtctgattt

SEQ ID NO: 749395 - DNA, 19 bp, Mus musculus
  siRNA target sequence for D8Ertd354e (NM_133970.1,825-843).
gtcatgttgtctgatttta

SEQ ID NO: 749396 - DNA, 19 bp, Mus musculus
  siRNA target sequence for Ankrd10 (NM_133971.1,274-292).
ggcaagttggagtgcttaa

SEQ ID NO: 749397 - DNA, 19 bp, Mus musculus
  siRNA target sequence for Ankrd10 (NM_133971.1,275-293).
gcaagttggagtgcttaat

SEQ ID NO: 749398 - DNA, 19 bp, Mus musculus
  siRNA target sequence for Ankrd10 (NM_133971.1,357-375).
ccacatcgctgcttttgga

SEQ ID NO: 749399 - DNA, 19 bp, Mus musculus
  siRNA target sequence for Ankrd10 (NM_133971.1,442-460).
ggggaaactcccattcaca

SEQ ID NO: 749400 - DNA, 19 bp, Mus musculus
  siRNA target sequence for Ankrd10 (NM_133971.1,443-461).
gggaaactcccattcacaa

SEQ ID NO: 749401 - DNA, 19 bp, Mus musculus
  siRNA target sequence for Ankrd10 (NM_133971.1,624-642).
gagccgtttctgtcataat

SEQ ID NO: 749402 - DNA, 19 bp, Mus musculus
  siRNA target sequence for Ankrd10 (NM_133971.1,777-795).
cgccatgcctctagcaaat

SEQ ID NO: 749403 - DNA, 19 bp, Mus musculus
  siRNA target sequence for Ankrd10 (NM_133971.1,780-798).
catgcctctagcaaatgga

SEQ ID NO: 749404 - DNA, 19 bp, Mus musculus
  siRNA target sequence for Ankrd10 (NM_133971.1,867-885).
cagtagctccgtgttgaat

SEQ ID NO: 749405 - DNA, 19 bp, Mus musculus
  siRNA target sequence for Ankrd10 (NM_133971.1,882-900).
gaatacattgacaaatgga

SEQ ID NO: 749406 - DNA, 19 bp, Mus musculus
  siRNA target sequence for Ankrd10 (NM_133971.1,902-920).
gtgtcgtcaatggacattt

SEQ ID NO: 749407 - DNA, 19 bp, Mus musculus
  siRNA target sequence for Ankrd10 (NM_133971.1,963-981).
gagtcacccgtgcttaaca

SEQ ID NO: 749408 - DNA, 19 bp, Mus musculus
  siRNA target sequence for Ankrd10 (NM_133971.1,983-1001).
gatctaatggcgttagcaa

SEQ ID NO: 749409 - DNA, 19 bp, Mus musculus
  siRNA target sequence for Ankrd10 (NM_133971.1,1179-1197).
cggacactaccatggattt

SEQ ID NO: 749410 - DNA, 19 bp, Mus musculus
  siRNA target sequence for 2410153K17Rik (NM_133972.1,378-396).
gcatcacccaggaaacctt

SEQ ID NO: 749411 - DNA, 19 bp, Mus musculus
  siRNA target sequence for 2410153K17Rik (NM_133972.1,508-526).
gaagacaataccgaaagta

SEQ ID NO: 749412 - DNA, 19 bp, Mus musculus
  siRNA target sequence for 2410153K17Rik (NM_133972.1,511-529).
gacaataccgaaagtatca

SEQ ID NO: 749413 - DNA, 19 bp, Mus musculus
  siRNA target sequence for 2410153K17Rik (NM_133972.1,562-580).
ccttcaggcccttaacgat

SEQ ID NO: 749414 - DNA, 19 bp, Mus musculus
  siRNA target sequence for 2410153K17Rik (NM_133972.1,835-853).
ggccacgctagcacagaat

SEQ ID NO: 749415 - DNA, 19 bp, Mus musculus
  siRNA target sequence for 2410153K17Rik (NM_133972.1,897-915).
gccatgtctgcctaaagca

SEQ ID NO: 749416 - DNA, 19 bp, Mus musculus
  siRNA target sequence for 2410153K17Rik (NM_133972.1,907-925).
cctaaagcacgaacagaat

SEQ ID NO: 749417 - DNA, 19 bp, Mus musculus
  siRNA target sequence for 2410153K17Rik (NM_133972.1,959-977).
ctgctcacagcggctatta

SEQ ID NO: 749418 - DNA, 19 bp, Mus musculus
  siRNA target sequence for 2410153K17Rik (NM_133972.1,1027-1045).
gcgggtcatgacctttgat

SEQ ID NO: 749419 - DNA, 19 bp, Mus musculus
  siRNA target sequence for 2410153K17Rik (NM_133972.1,1029-1047).
gggtcatgacctttgatga

SEQ ID NO: 749420 - DNA, 19 bp, Mus musculus
  siRNA target sequence for 2410153K17Rik (NM_133972.1,1081-1099).
gcacgccaagatgattgtt

SEQ ID NO: 749421 - DNA, 19 bp, Mus musculus
  siRNA target sequence for 2410153K17Rik (NM_133972.1,1199-1217).
gctgttcggaatgaattct

SEQ ID NO: 749422 - DNA, 19 bp, Mus musculus
  siRNA target sequence for 2410153K17Rik (NM_133972.1,1329-1347).
caggcaacgacgacgtaaa

SEQ ID NO: 749423 - DNA, 19 bp, Mus musculus
  siRNA target sequence for 2410153K17Rik (NM_133972.1,1332-1350).
gcaacgacgacgtaaagga

SEQ ID NO: 749424 - DNA, 19 bp, Mus musculus
  siRNA target sequence for 2410153K17Rik (NM_133972.1,1333-1351).
caacgacgacgtaaaggat

SEQ ID NO: 749425 - DNA, 19 bp, Mus musculus
  siRNA target sequence for 2410153K17Rik (NM_133972.1,1472-1490).
gacaacagccgggtcatta

SEQ ID NO: 749426 - DNA, 19 bp, Mus musculus
  siRNA target sequence for 2410153K17Rik (NM_133972.1,1474-1492).
caacagccgggtcattatt

SEQ ID NO: 749427 - DNA, 19 bp, Mus musculus
  siRNA target sequence for 2410153K17Rik (NM_133972.1,1632-1650).
gggcagaggagctcatttt

SEQ ID NO: 749428 - DNA, 19 bp, Mus musculus
  siRNA target sequence for E030027H19Rik (NM_133974.1,280-298).
gcatataaccgagttgatt

SEQ ID NO: 749429 - DNA, 19 bp, Mus musculus
  siRNA target sequence for E030027H19Rik (NM_133974.1,281-299).
catataaccgagttgatta

SEQ ID NO: 749430 - DNA, 19 bp, Mus musculus
  siRNA target sequence for E030027H19Rik (NM_133974.1,345-363).
cagagaagcactttgtctt

SEQ ID NO: 749431 - DNA, 19 bp, Mus musculus
  siRNA target sequence for E030027H19Rik (NM_133974.1,391-409).
gtcaggcccgtgtcctttt

SEQ ID NO: 749432 - DNA, 19 bp, Mus musculus
  siRNA target sequence for E030027H19Rik (NM_133974.1,443-461).
ctacccatcctcaacagaa

SEQ ID NO: 749433 - DNA, 19 bp, Mus musculus
  siRNA target sequence for E030027H19Rik (NM_133974.1,463-481).
cttcatctgggatgttaga

SEQ ID NO: 749434 - DNA, 19 bp, Mus musculus
  siRNA target sequence for E030027H19Rik (NM_133974.1,471-489).
gggatgttagagctcataa

SEQ ID NO: 749435 - DNA, 19 bp, Mus musculus
  siRNA target sequence for E030027H19Rik (NM_133974.1,574-592).
ctccatcagtggccatata

SEQ ID NO: 749436 - DNA, 19 bp, Mus musculus
  siRNA target sequence for E030027H19Rik (NM_133974.1,576-594).
ccatcagtggccatataga

SEQ ID NO: 749437 - DNA, 19 bp, Mus musculus
  siRNA target sequence for E030027H19Rik (NM_133974.1,577-595).
catcagtggccatatagat

SEQ ID NO: 749438 - DNA, 19 bp, Mus musculus
  siRNA target sequence for E030027H19Rik (NM_133974.1,636-654).
ccgtgtcccggatcaagat

SEQ ID NO: 749439 - DNA, 19 bp, Mus musculus
  siRNA target sequence for E030027H19Rik (NM_133974.1,652-670).
gatgcaagagggtgtgaaa

SEQ ID NO: 749440 - DNA, 19 bp, Mus musculus
  siRNA target sequence for E030027H19Rik (NM_133974.1,709-727).
ctcaggcttcagtattgca

SEQ ID NO: 749441 - DNA, 19 bp, Mus musculus
  siRNA target sequence for E030027H19Rik (NM_133974.1,711-729).
caggcttcagtattgcaaa

SEQ ID NO: 749442 - DNA, 19 bp, Mus musculus
  siRNA target sequence for E030027H19Rik (NM_133974.1,725-743).
gcaaatcggtcatctatca

SEQ ID NO: 749443 - DNA, 19 bp, Mus musculus
  siRNA target sequence for E030027H19Rik (NM_133974.1,726-744).
caaatcggtcatctatcaa

SEQ ID NO: 749444 - DNA, 19 bp, Mus musculus
  siRNA target sequence for E030027H19Rik (NM_133974.1,753-771).
gcatcatcgagtcagtatt

SEQ ID NO: 749445 - DNA, 19 bp, Mus musculus
  siRNA target sequence for E030027H19Rik (NM_133974.1,754-772).
catcatcgagtcagtattt

SEQ ID NO: 749446 - DNA, 19 bp, Mus musculus
  siRNA target sequence for E030027H19Rik (NM_133974.1,1103-1121).
caggatgaaagcaataaaa

SEQ ID NO: 749447 - DNA, 19 bp, Mus musculus
  siRNA target sequence for E030027H19Rik (NM_133974.1,1171-1189).
gccacggccagtaaaacat

SEQ ID NO: 749448 - DNA, 19 bp, Mus musculus
  siRNA target sequence for E030027H19Rik (NM_133974.1,1223-1241).
ctagagtctcggacttgta

SEQ ID NO: 749449 - DNA, 19 bp, Mus musculus
  siRNA target sequence for E030027H19Rik (NM_133974.1,1265-1283).
ggctccatacacaagattt

SEQ ID NO: 749450 - DNA, 19 bp, Mus musculus
  siRNA target sequence for E030027H19Rik (NM_133974.1,1305-1323).
cacgcctgtgggtgaatgt

SEQ ID NO: 749451 - DNA, 19 bp, Mus musculus
  siRNA target sequence for E030027H19Rik (NM_133974.1,1334-1352).
ctaagtatgcccttaccaa

SEQ ID NO: 749452 - DNA, 19 bp, Mus musculus
  siRNA target sequence for AI604832 (NM_133979.1,133-151).
cacctctagtggtcataga

SEQ ID NO: 749453 - DNA, 19 bp, Mus musculus
  siRNA target sequence for AI604832 (NM_133979.1,136-154).
ctctagtggtcatagaact

SEQ ID NO: 749454 - DNA, 19 bp, Mus musculus
  siRNA target sequence for AI604832 (NM_133979.1,155-173).
cgcccaggatgtcaaagat

SEQ ID NO: 749455 - DNA, 19 bp, Mus musculus
  siRNA target sequence for AI604832 (NM_133979.1,223-241).
gaggtgcccagctattgtt

SEQ ID NO: 749456 - DNA, 19 bp, Mus musculus
  siRNA target sequence for AI604832 (NM_133979.1,239-257).
gtttagaccactgctaaat

SEQ ID NO: 749457 - DNA, 19 bp, Mus musculus
  siRNA target sequence for AI604832 (NM_133979.1,275-293).
cctagaaaaccagaattta

SEQ ID NO: 749458 - DNA, 19 bp, Mus musculus
  siRNA target sequence for AI604832 (NM_133979.1,308-326).
ctccaatgtccgactgtta

SEQ ID NO: 749459 - DNA, 19 bp, Mus musculus
  siRNA target sequence for AI604832 (NM_133979.1,310-328).
ccaatgtccgactgttact

SEQ ID NO: 749460 - DNA, 19 bp, Mus musculus
  siRNA target sequence for AI604832 (NM_133979.1,393-411).
ggaacacgccacaacttta

SEQ ID NO: 749461 - DNA, 19 bp, Mus musculus
  siRNA target sequence for AI604832 (NM_133979.1,394-412).
gaacacgccacaactttaa

SEQ ID NO: 749462 - DNA, 19 bp, Mus musculus
  siRNA target sequence for AI604832 (NM_133979.1,399-417).
cgccacaactttaaaggtt

SEQ ID NO: 749463 - DNA, 19 bp, Mus musculus
  siRNA target sequence for AI604832 (NM_133979.1,415-433).
gtttccatgataacaataa

SEQ ID NO: 749464 - DNA, 19 bp, Mus musculus
  siRNA target sequence for AI604832 (NM_133979.1,450-468).
gctgagtgtcagttcatta

SEQ ID NO: 749465 - DNA, 19 bp, Mus musculus
  siRNA target sequence for AI604832 (NM_133979.1,451-469).
ctgagtgtcagttcattat

SEQ ID NO: 749466 - DNA, 19 bp, Mus musculus
  siRNA target sequence for AI604832 (NM_133979.1,470-488).
caaacacgaacttgagaat

SEQ ID NO: 749467 - DNA, 19 bp, Mus musculus
  siRNA target sequence for AI604832 (NM_133979.1,476-494).
cgaacttgagaatcttaga

SEQ ID NO: 749468 - DNA, 19 bp, Mus musculus
  siRNA target sequence for AI604832 (NM_133979.1,496-514).
ctagagacgagaagatgat

SEQ ID NO: 749469 - DNA, 19 bp, Mus musculus
  siRNA target sequence for AI604832 (NM_133979.1,649-667).
ctcggtttgctctcaagta

SEQ ID NO: 749470 - DNA, 19 bp, Mus musculus
  siRNA target sequence for AI604832 (NM_133979.1,672-690).
cccatagacagcattcgta

SEQ ID NO: 749471 - DNA, 19 bp, Mus musculus
  siRNA target sequence for AI604832 (NM_133979.1,680-698).
cagcattcgtagctacttt

SEQ ID NO: 749472 - DNA, 19 bp, Mus musculus
  siRNA target sequence for AI604832 (NM_133979.1,691-709).
gctactttggggagacaat

SEQ ID NO: 749473 - DNA, 19 bp, Mus musculus
  siRNA target sequence for AI604832 (NM_133979.1,692-710).
ctactttggggagacaatt

SEQ ID NO: 749474 - DNA, 19 bp, Mus musculus
  siRNA target sequence for AI604832 (NM_133979.1,695-713).
ctttggggagacaattgct

SEQ ID NO: 749475 - DNA, 19 bp, Mus musculus
  siRNA target sequence for AI604832 (NM_133979.1,797-815).
ggaagactacgacaagtat

SEQ ID NO: 749476 - DNA, 19 bp, Mus musculus
  siRNA target sequence for AI604832 (NM_133979.1,801-819).
gactacgacaagtatgtca

SEQ ID NO: 749477 - DNA, 19 bp, Mus musculus
  siRNA target sequence for AI604832 (NM_133979.1,825-843).
gcctcgttcaacctcatat

SEQ ID NO: 749478 - DNA, 19 bp, Mus musculus
  siRNA target sequence for AI604832 (NM_133979.1,954-972).
ggagtccttggcatcaatt

SEQ ID NO: 749479 - DNA, 19 bp, Mus musculus
  siRNA target sequence for AI604832 (NM_133979.1,1035-1053).
gtctctctgccatttgtgt

SEQ ID NO: 749480 - DNA, 19 bp, Mus musculus
  siRNA target sequence for AI604832 (NM_133979.1,1186-1204).
ccgttgtgattgagatcat

SEQ ID NO: 749481 - DNA, 19 bp, Mus musculus
  siRNA target sequence for AI604832 (NM_133979.1,1188-1206).
gttgtgattgagatcatga

SEQ ID NO: 749482 - DNA, 19 bp, Mus musculus
  siRNA target sequence for AI604832 (NM_133979.1,1205-1223).
gaaccgcctctatcgatat

SEQ ID NO: 749483 - DNA, 19 bp, Mus musculus
  siRNA target sequence for AI604832 (NM_133979.1,1208-1226).
ccgcctctatcgatatgct

SEQ ID NO: 749484 - DNA, 19 bp, Mus musculus
  siRNA target sequence for AI604832 (NM_133979.1,1224-1242).
gctgccgagttcctaacat

SEQ ID NO: 749485 - DNA, 19 bp, Mus musculus
  siRNA target sequence for AI604832 (NM_133979.1,1227-1245).
gccgagttcctaacatctt

SEQ ID NO: 749486 - DNA, 19 bp, Mus musculus
  siRNA target sequence for AI604832 (NM_133979.1,1243-1261).
cttgggagaatcacagatt

SEQ ID NO: 749487 - DNA, 19 bp, Mus musculus
  siRNA target sequence for AI604832 (NM_133979.1,1277-1295).
gaatcatctcgttctgaaa

SEQ ID NO: 749488 - DNA, 19 bp, Mus musculus
  siRNA target sequence for AI604832 (NM_133979.1,1413-1431).
ctgaaccaagtcgtagaat

SEQ ID NO: 749489 - DNA, 19 bp, Mus musculus
  siRNA target sequence for AI604832 (NM_133979.1,1415-1433).
gaaccaagtcgtagaatct

SEQ ID NO: 749490 - DNA, 19 bp, Mus musculus
  siRNA target sequence for AI604832 (NM_133979.1,1418-1436).
ccaagtcgtagaatctctt

SEQ ID NO: 749491 - DNA, 19 bp, Mus musculus
  siRNA target sequence for AI604832 (NM_133979.1,1479-1497).
cggaaggttcaggcattaa

SEQ ID NO: 749492 - DNA, 19 bp, Mus musculus
  siRNA target sequence for AI604832 (NM_133979.1,1484-1502).
ggttcaggcattaaagtct

SEQ ID NO: 749493 - DNA, 19 bp, Mus musculus
  siRNA target sequence for AI604832 (NM_133979.1,1556-1574).
gtacctgggaacctttgat

SEQ ID NO: 749494 - DNA, 19 bp, Mus musculus
  siRNA target sequence for AI604832 (NM_133979.1,1560-1578).
ctgggaacctttgatgatt

SEQ ID NO: 749495 - DNA, 19 bp, Mus musculus
  siRNA target sequence for AI604832 (NM_133979.1,1564-1582).
gaacctttgatgattacct

SEQ ID NO: 749496 - DNA, 19 bp, Mus musculus
  siRNA target sequence for AI604832 (NM_133979.1,1602-1620).
ggctatgtgagccttttct

SEQ ID NO: 749497 - DNA, 19 bp, Mus musculus
  siRNA target sequence for AI604832 (NM_133979.1,1644-1662).
gcctttgctgtgttaaata

SEQ ID NO: 749498 - DNA, 19 bp, Mus musculus
  siRNA target sequence for AI604832 (NM_133979.1,1645-1663).
cctttgctgtgttaaataa

SEQ ID NO: 749499 - DNA, 19 bp, Mus musculus
  siRNA target sequence for AI604832 (NM_133979.1,1650-1668).
gctgtgttaaataacttca

SEQ ID NO: 749500 - DNA, 19 bp, Mus musculus
  siRNA target sequence for AI604832 (NM_133979.1,1676-1694).
caactcagatgccttgaaa

SEQ ID NO: 749501 - DNA, 19 bp, Mus musculus
  siRNA target sequence for AI604832 (NM_133979.1,1764-1782).
gaaacgatgagcgttatat

SEQ ID NO: 749502 - DNA, 19 bp, Mus musculus
  siRNA target sequence for AI604832 (NM_133979.1,1790-1808).
cactaactgtgctctgatt

SEQ ID NO: 749503 - DNA, 19 bp, Mus musculus
  siRNA target sequence for AI604832 (NM_133979.1,1833-1851).
gtctttccagaatccaaaa

SEQ ID NO: 749504 - DNA, 19 bp, Mus musculus
  siRNA target sequence for AI604832 (NM_133979.1,1888-1906).
cactcttggctctgaagtt

SEQ ID NO: 749505 - DNA, 19 bp, Mus musculus
  siRNA target sequence for AI604832 (NM_133979.1,1936-1954).
cacggcacatccaacagaa

SEQ ID NO: 749506 - DNA, 19 bp, Mus musculus
  siRNA target sequence for AI604832 (NM_133979.1,1958-1976).
ggccagattggaattcgaa

SEQ ID NO: 749507 - DNA, 19 bp, Mus musculus
  siRNA target sequence for AI604832 (NM_133979.1,1963-1981).
gattggaattcgaatcttt

SEQ ID NO: 749508 - DNA, 19 bp, Mus musculus
  siRNA target sequence for Dibd1 (NM_133981.1,291-309).
cggactgtgatgaaacatt

SEQ ID NO: 749509 - DNA, 19 bp, Mus musculus
  siRNA target sequence for Dibd1 (NM_133981.1,297-315).
gtgatgaaacattcaacta

SEQ ID NO: 749510 - DNA, 19 bp, Mus musculus
  siRNA target sequence for Dibd1 (NM_133981.1,379-397).
gtatgccatccgctcatat

SEQ ID NO: 749511 - DNA, 19 bp, Mus musculus
  siRNA target sequence for Dibd1 (NM_133981.1,383-401).
gccatccgctcatatgctt

SEQ ID NO: 749512 - DNA, 19 bp, Mus musculus
  siRNA target sequence for Dibd1 (NM_133981.1,384-402).
ccatccgctcatatgctta

SEQ ID NO: 749513 - DNA, 19 bp, Mus musculus
  siRNA target sequence for Dibd1 (NM_133981.1,417-435).
cctggccagctgcatttca

SEQ ID NO: 749514 - DNA, 19 bp, Mus musculus
  siRNA target sequence for Dibd1 (NM_133981.1,438-456).
cacggattctgcagactaa

SEQ ID NO: 749515 - DNA, 19 bp, Mus musculus
  siRNA target sequence for Dibd1 (NM_133981.1,440-458).
cggattctgcagactaaca

SEQ ID NO: 749516 - DNA, 19 bp, Mus musculus
  siRNA target sequence for Dibd1 (NM_133981.1,441-459).
ggattctgcagactaacaa

SEQ ID NO: 749517 - DNA, 19 bp, Mus musculus
  siRNA target sequence for Dibd1 (NM_133981.1,448-466).
gcagactaacaagattctt

SEQ ID NO: 749518 - DNA, 19 bp, Mus musculus
  siRNA target sequence for Dibd1 (NM_133981.1,509-527).
gtttgtgaactttactttt

SEQ ID NO: 749519 - DNA, 19 bp, Mus musculus
  siRNA target sequence for Dibd1 (NM_133981.1,590-608).
ctcagcacgggcatgttct

SEQ ID NO: 749520 - DNA, 19 bp, Mus musculus
  siRNA target sequence for Dibd1 (NM_133981.1,661-679).
cgccatgacgggatggtat

SEQ ID NO: 749521 - DNA, 19 bp, Mus musculus
  siRNA target sequence for Dibd1 (NM_133981.1,662-680).
gccatgacgggatggtata

SEQ ID NO: 749522 - DNA, 19 bp, Mus musculus
  siRNA target sequence for Dibd1 (NM_133981.1,663-681).
ccatgacgggatggtatat

SEQ ID NO: 749523 - DNA, 19 bp, Mus musculus
  siRNA target sequence for Dibd1 (NM_133981.1,727-745).
cttagggtggccgtttagt

SEQ ID NO: 749524 - DNA, 19 bp, Mus musculus
  siRNA target sequence for Dibd1 (NM_133981.1,848-866).
cccgtggtggtcattgaca

SEQ ID NO: 749525 - DNA, 19 bp, Mus musculus
  siRNA target sequence for Dibd1 (NM_133981.1,856-874).
ggtcattgacagctactat

SEQ ID NO: 749526 - DNA, 19 bp, Mus musculus
  siRNA target sequence for Dibd1 (NM_133981.1,857-875).
gtcattgacagctactatt

SEQ ID NO: 749527 - DNA, 19 bp, Mus musculus
  siRNA target sequence for Dibd1 (NM_133981.1,889-907).
ggttgcccctctcaacatt

SEQ ID NO: 749528 - DNA, 19 bp, Mus musculus
  siRNA target sequence for Dibd1 (NM_133981.1,935-953).
ggacctgatctttatggta

SEQ ID NO: 749529 - DNA, 19 bp, Mus musculus
  siRNA target sequence for Dibd1 (NM_133981.1,950-968).
ggtacagaaccatggtatt

SEQ ID NO: 749530 - DNA, 19 bp, Mus musculus
  siRNA target sequence for Dibd1 (NM_133981.1,951-969).
gtacagaaccatggtattt

SEQ ID NO: 749531 - DNA, 19 bp, Mus musculus
  siRNA target sequence for Dibd1 (NM_133981.1,954-972).
cagaaccatggtatttcta

SEQ ID NO: 749532 - DNA, 19 bp, Mus musculus
  siRNA target sequence for Dibd1 (NM_133981.1,1065-1083).
ggttccatgttcagaattt

SEQ ID NO: 749533 - DNA, 19 bp, Mus musculus
  siRNA target sequence for Dibd1 (NM_133981.1,1069-1087).
ccatgttcagaatttagga

SEQ ID NO: 749534 - DNA, 19 bp, Mus musculus
  siRNA target sequence for Dibd1 (NM_133981.1,1104-1122).
ccttggcgccaatgtatat

SEQ ID NO: 749535 - DNA, 19 bp, Mus musculus
  siRNA target sequence for Dibd1 (NM_133981.1,1105-1123).
cttggcgccaatgtatatt

SEQ ID NO: 749536 - DNA, 19 bp, Mus musculus
  siRNA target sequence for Dibd1 (NM_133981.1,1141-1159).
catccagcctcataaagaa

SEQ ID NO: 749537 - DNA, 19 bp, Mus musculus
  siRNA target sequence for Dibd1 (NM_133981.1,1175-1193).
ccagtctatccgctcatat

SEQ ID NO: 749538 - DNA, 19 bp, Mus musculus
  siRNA target sequence for Dibd1 (NM_133981.1,1233-1251).
gctaccactttgtgtttca

SEQ ID NO: 749539 - DNA, 19 bp, Mus musculus
  siRNA target sequence for Dibd1 (NM_133981.1,1254-1272).
gataccgcctggagcatta

SEQ ID NO: 749540 - DNA, 19 bp, Mus musculus
  siRNA target sequence for Dibd1 (NM_133981.1,1460-1478).
ggaaaagagtggtatcgat

SEQ ID NO: 749541 - DNA, 19 bp, Mus musculus
  siRNA target sequence for Dibd1 (NM_133981.1,1461-1479).
gaaaagagtggtatcgatt

SEQ ID NO: 749542 - DNA, 19 bp, Mus musculus
  siRNA target sequence for Dibd1 (NM_133981.1,1511-1529).
cagcttcagttcattccat

SEQ ID NO: 749543 - DNA, 19 bp, Mus musculus
  siRNA target sequence for Dibd1 (NM_133981.1,1653-1671).
gccattacttagtggattt

SEQ ID NO: 749544 - DNA, 19 bp, Mus musculus
  siRNA target sequence for Dibd1 (NM_133981.1,1672-1690).
ggataccatgagagaaaca

SEQ ID NO: 749545 - DNA, 19 bp, Mus musculus
  siRNA target sequence for Dibd1 (NM_133981.1,1689-1707).
cacctcgggagccaaacta

SEQ ID NO: 749546 - DNA, 19 bp, Mus musculus
  siRNA target sequence for Dibd1 (NM_133981.1,1691-1709).
cctcgggagccaaactact

SEQ ID NO: 749547 - DNA, 19 bp, Mus musculus
  siRNA target sequence for Dibd1 (NM_133981.1,1694-1712).
cgggagccaaactactcat

SEQ ID NO: 749548 - DNA, 19 bp, Mus musculus
  siRNA target sequence for Dibd1 (NM_133981.1,1777-1795).
gttgcttcgggcattctat

SEQ ID NO: 749549 - DNA, 19 bp, Mus musculus
  siRNA target sequence for Dibd1 (NM_133981.1,1780-1798).
gcttcgggcattctatgtt

SEQ ID NO: 749550 - DNA, 19 bp, Mus musculus
  siRNA target sequence for Dibd1 (NM_133981.1,1864-1882).
gccgagcaggaagaaaagt

SEQ ID NO: 749551 - DNA, 19 bp, Mus musculus
  siRNA target sequence for AI851155 (NM_133982.1,504-522).
cgccagtctcagtgtactt

SEQ ID NO: 749552 - DNA, 19 bp, Mus musculus
  siRNA target sequence for AI851155 (NM_133982.1,506-524).
ccagtctcagtgtacttaa

SEQ ID NO: 749553 - DNA, 19 bp, Mus musculus
  siRNA target sequence for AI851155 (NM_133982.1,509-527).
gtctcagtgtacttaagaa

SEQ ID NO: 749554 - DNA, 19 bp, Mus musculus
  siRNA target sequence for AI851155 (NM_133982.1,538-556).
ctcgccatcctactttcaa

SEQ ID NO: 749555 - DNA, 19 bp, Mus musculus
  siRNA target sequence for 6030411F23Rik (NM_133983.1,1042-1060).
gacggacaagaaattgctt

SEQ ID NO: 749556 - DNA, 19 bp, Mus musculus
  siRNA target sequence for 9130410M22Rik (NM_133986.1,27-45).
ggcagtttctgcaagcttt

SEQ ID NO: 749557 - DNA, 19 bp, Mus musculus
  siRNA target sequence for 9130410M22Rik (NM_133986.1,145-163).
gctgtggttggtgttaagt

SEQ ID NO: 749558 - DNA, 19 bp, Mus musculus
  siRNA target sequence for 9130410M22Rik (NM_133986.1,202-220).
cacagtgaccgggttgtat

SEQ ID NO: 749559 - DNA, 19 bp, Mus musculus
  siRNA target sequence for 9130410M22Rik (NM_133986.1,204-222).
cagtgaccgggttgtatca

SEQ ID NO: 749560 - DNA, 19 bp, Mus musculus
  siRNA target sequence for 9130410M22Rik (NM_133986.1,344-362).
gcaaatgaagctctcaaaa

SEQ ID NO: 749561 - DNA, 19 bp, Mus musculus
  siRNA target sequence for Ftsj (NM_133991.1,179-197).
gggacggacatctaaggat

SEQ ID NO: 749562 - DNA, 19 bp, Mus musculus
  siRNA target sequence for Ftsj (NM_133991.1,180-198).
ggacggacatctaaggata

SEQ ID NO: 749563 - DNA, 19 bp, Mus musculus
  siRNA target sequence for Ftsj (NM_133991.1,181-199).
gacggacatctaaggataa

SEQ ID NO: 749564 - DNA, 19 bp, Mus musculus
  siRNA target sequence for Ftsj (NM_133991.1,318-336).
gtgtgtgcagccccttttt

SEQ ID NO: 749565 - DNA, 19 bp, Mus musculus
  siRNA target sequence for Ftsj (NM_133991.1,424-442).
caggtgtgatacagataca

SEQ ID NO: 749566 - DNA, 19 bp, Mus musculus
  siRNA target sequence for Ftsj (NM_133991.1,629-647).
ctgcttcgtggccaagata

SEQ ID NO: 749567 - DNA, 19 bp, Mus musculus
  siRNA target sequence for Ftsj (NM_133991.1,679-697).
gccaactacgtatcttctt

SEQ ID NO: 749568 - DNA, 19 bp, Mus musculus
  siRNA target sequence for Ftsj (NM_133991.1,728-746).
cagccggaactctagcatt

SEQ ID NO: 749569 - DNA, 19 bp, Mus musculus
  siRNA target sequence for Ftsj (NM_133991.1,812-830).
cctgctgaaccactcatat

SEQ ID NO: 749570 - DNA, 19 bp, Mus musculus
  siRNA target sequence for Ftsj (NM_133991.1,815-833).
gctgaaccactcatatgat

SEQ ID NO: 749571 - DNA, 19 bp, Mus musculus
  siRNA target sequence for Ftsj (NM_133991.1,816-834).
ctgaaccactcatatgatt

SEQ ID NO: 749572 - DNA, 19 bp, Mus musculus
  siRNA target sequence for Ftsj (NM_133991.1,888-906).
gacctcagcgcctacgatt

SEQ ID NO: 749573 - DNA, 19 bp, Mus musculus
  siRNA target sequence for Ftsj (NM_133991.1,903-921).
gattcggaccgcacttact

SEQ ID NO: 749574 - DNA, 19 bp, Mus musculus
  siRNA target sequence for Ftsj (NM_133991.1,935-953).
catcgcacccccataccaa

SEQ ID NO: 749575 - DNA, 19 bp, Mus musculus
  siRNA target sequence for Ftsj (NM_133991.1,993-1011).
gaactcctcccccaagaat

SEQ ID NO: 749576 - DNA, 19 bp, Mus musculus
  siRNA target sequence for 2310058A11Rik (NM_133993.1,146-164).
gacaaggtagagctaagta

SEQ ID NO: 749577 - DNA, 19 bp, Mus musculus
  siRNA target sequence for 2310058A11Rik (NM_133993.1,148-166).
caaggtagagctaagtaaa

SEQ ID NO: 749578 - DNA, 19 bp, Mus musculus
  siRNA target sequence for 2310058A11Rik (NM_133993.1,180-198).
gtctcatcgctgaagcaaa

SEQ ID NO: 749579 - DNA, 19 bp, Mus musculus
  siRNA target sequence for 2310058A11Rik (NM_133993.1,189-207).
ctgaagcaaaaggaaagtt

SEQ ID NO: 749580 - DNA, 19 bp, Mus musculus
  siRNA target sequence for 2310058A11Rik (NM_133993.1,238-256).
ggcaggcaacccttcagaa

SEQ ID NO: 749581 - DNA, 19 bp, Mus musculus
  siRNA target sequence for 2310058A11Rik (NM_133993.1,355-373).
ggggtacgacttagataat

SEQ ID NO: 749582 - DNA, 19 bp, Mus musculus
  siRNA target sequence for 2310058A11Rik (NM_133993.1,356-374).
gggtacgacttagataatt

SEQ ID NO: 749583 - DNA, 19 bp, Mus musculus
  siRNA target sequence for 2310058A11Rik (NM_133993.1,357-375).
ggtacgacttagataatta

SEQ ID NO: 749584 - DNA, 19 bp, Mus musculus
  siRNA target sequence for 2310058A11Rik (NM_133993.1,358-376).
gtacgacttagataattat

SEQ ID NO: 749585 - DNA, 19 bp, Mus musculus
  siRNA target sequence for 2310058A11Rik (NM_133993.1,432-450).
cggtctatggcagtaatga

SEQ ID NO: 749586 - DNA, 19 bp, Mus musculus
  siRNA target sequence for 2310058A11Rik (NM_133993.1,444-462).
gtaatgaccaggatccata

SEQ ID NO: 749587 - DNA, 19 bp, Mus musculus
  siRNA target sequence for 2310058A11Rik (NM_133993.1,449-467).
gaccaggatccatatgtca

SEQ ID NO: 749588 - DNA, 19 bp, Mus musculus
  siRNA target sequence for 2310058A11Rik (NM_133993.1,472-490).
gaaagacacggaacaatat

SEQ ID NO: 749589 - DNA, 19 bp, Mus musculus
  siRNA target sequence for 2310058A11Rik (NM_133993.1,537-555).
gtggccgtgctgaacaaga

SEQ ID NO: 749590 - DNA, 19 bp, Mus musculus
  siRNA target sequence for 2310058A11Rik (NM_133993.1,778-796).
gggaagcaagctttccaaa

SEQ ID NO: 749591 - DNA, 19 bp, Mus musculus
  siRNA target sequence for 2310058A11Rik (NM_133993.1,854-872).
cttgacctatcctggaata

SEQ ID NO: 749592 - DNA, 19 bp, Mus musculus
  siRNA target sequence for 2310058A11Rik (NM_133993.1,1007-1025).
gaagcacagactctgattt

SEQ ID NO: 749593 - DNA, 19 bp, Mus musculus
  siRNA target sequence for 2310058A11Rik (NM_133993.1,1039-1057).
caaatcggtggctctgtat

SEQ ID NO: 749594 - DNA, 19 bp, Mus musculus
  siRNA target sequence for 2310058A11Rik (NM_133993.1,1130-1148).
cacttctcaccgtgtcatt

SEQ ID NO: 749595 - DNA, 19 bp, Mus musculus
  siRNA target sequence for 2310058A11Rik (NM_133993.1,1201-1219).
caagccaatctttacactt

SEQ ID NO: 749596 - DNA, 19 bp, Mus musculus
  siRNA target sequence for 2310058A11Rik (NM_133993.1,1223-1241).
gcacacaacgatgaaatct

SEQ ID NO: 749597 - DNA, 19 bp, Mus musculus
  siRNA target sequence for 2310058A11Rik (NM_133993.1,1282-1300).
gactgcttccgctgacaaa

SEQ ID NO: 749598 - DNA, 19 bp, Mus musculus
  siRNA target sequence for 2310058A11Rik (NM_133993.1,1290-1308).
ccgctgacaaatttgtgaa

SEQ ID NO: 749599 - DNA, 19 bp, Mus musculus
  siRNA target sequence for 2310058A11Rik (NM_133993.1,1392-1410).
gtcctgacttgccatttgt

SEQ ID NO: 749600 - DNA, 19 bp, Mus musculus
  siRNA target sequence for 2310058A11Rik (NM_133993.1,1459-1477).
cactgtgtcttcagtaaat

SEQ ID NO: 749601 - DNA, 19 bp, Mus musculus
  siRNA target sequence for 2310058A11Rik (NM_133993.1,1491-1509).
gacgggagcgactcgttat

SEQ ID NO: 749602 - DNA, 19 bp, Mus musculus
  siRNA target sequence for 2310058A11Rik (NM_133993.1,1511-1529).
ggcggcacgaaaggtttat

SEQ ID NO: 749603 - DNA, 19 bp, Mus musculus
  siRNA target sequence for 2310058A11Rik (NM_133993.1,1513-1531).
cggcacgaaaggtttatct

SEQ ID NO: 749604 - DNA, 19 bp, Mus musculus
  siRNA target sequence for 2310058A11Rik (NM_133993.1,1515-1533).
gcacgaaaggtttatctgt

SEQ ID NO: 749605 - DNA, 19 bp, Mus musculus
  siRNA target sequence for D10Ucla2 (NM_133996.2,777-795).
gaacaagctccctcctatt

SEQ ID NO: 749606 - DNA, 19 bp, Mus musculus
  siRNA target sequence for D10Ucla2 (NM_133996.2,896-914).
gtagcccagaacttaaaga

SEQ ID NO: 749607 - DNA, 19 bp, Mus musculus
  siRNA target sequence for D10Ucla2 (NM_133996.2,926-944).
ccgttgaagatcgagtata

SEQ ID NO: 749608 - DNA, 19 bp, Mus musculus
  siRNA target sequence for D10Ucla2 (NM_133996.2,955-973).
cagcttgcagtcgttttaa

SEQ ID NO: 749609 - DNA, 19 bp, Mus musculus
  siRNA target sequence for D10Ucla2 (NM_133996.2,987-1005).
gaaccttgtgtgggaatat

SEQ ID NO: 749610 - DNA, 19 bp, Mus musculus
  siRNA target sequence for D10Ucla2 (NM_133996.2,990-1008).
ccttgtgtgggaatatttt

SEQ ID NO: 749611 - DNA, 19 bp, Mus musculus
  siRNA target sequence for Apof (NM_133997.1,804-822).
cgactcatcctgatgtcaa

SEQ ID NO: 749612 - DNA, 19 bp, Mus musculus
  siRNA target sequence for Apof (NM_133997.1,976-994).
ccctgcctggcttcactta

SEQ ID NO: 749613 - DNA, 19 bp, Mus musculus
  siRNA target sequence for Apof (NM_133997.1,1236-1254).
ccaaagagggccaaacgtt

SEQ ID NO: 749614 - DNA, 19 bp, Mus musculus
  siRNA target sequence for Apof (NM_133997.1,1241-1259).
gagggccaaacgttcgatt

SEQ ID NO: 749615 - DNA, 19 bp, Mus musculus
  siRNA target sequence for Apof (NM_133997.1,1245-1263).
gccaaacgttcgatttcca

SEQ ID NO: 749616 - DNA, 19 bp, Mus musculus
  siRNA target sequence for Apof (NM_133997.1,1246-1264).
ccaaacgttcgatttccaa

SEQ ID NO: 749617 - DNA, 19 bp, Mus musculus
  siRNA target sequence for Apof (NM_133997.1,1267-1285).
cagactgcgacaatgatca

SEQ ID NO: 749618 - DNA, 19 bp, Mus musculus
  siRNA target sequence for Apof (NM_133997.1,1323-1341).
gcagtaggcacctactaca

SEQ ID NO: 749619 - DNA, 19 bp, Mus musculus
  siRNA target sequence for Apof (NM_133997.1,1324-1342).
cagtaggcacctactacaa

SEQ ID NO: 749620 - DNA, 19 bp, Mus musculus
  siRNA target sequence for Apof (NM_133997.1,1343-1361).
cctaggcacagctttgtat

SEQ ID NO: 749621 - DNA, 19 bp, Mus musculus
  siRNA target sequence for Apof (NM_133997.1,1344-1362).
ctaggcacagctttgtatt

SEQ ID NO: 749622 - DNA, 19 bp, Mus musculus
  siRNA target sequence for Apof (NM_133997.1,1354-1372).
ctttgtattacgccattaa

SEQ ID NO: 749623 - DNA, 19 bp, Mus musculus
  siRNA target sequence for Apof (NM_133997.1,1405-1423).
gagatggggccatagatct

SEQ ID NO: 749624 - DNA, 19 bp, Mus musculus
  siRNA target sequence for Apof (NM_133997.1,1521-1539).
cagcggctgatccagtatt

SEQ ID NO: 749625 - DNA, 19 bp, Mus musculus
  siRNA target sequence for Apof (NM_133997.1,1526-1544).
gctgatccagtattattat

SEQ ID NO: 749626 - DNA, 19 bp, Mus musculus
  siRNA target sequence for Apof (NM_133997.1,1535-1553).
gtattattatgatgagaaa

SEQ ID NO: 749627 - DNA, 19 bp, Mus musculus
  siRNA target sequence for Apof (NM_133997.1,1625-1643).
cggtgttgtggaagaaata

SEQ ID NO: 749628 - DNA, 19 bp, Mus musculus
  siRNA target sequence for Apof (NM_133997.1,1638-1656).
gaaatagccatgtctaatt

SEQ ID NO: 749629 - DNA, 19 bp, Mus musculus
  siRNA target sequence for Apof (NM_133997.1,1661-1679).
gtcagaagttgaaagtaca

SEQ ID NO: 749630 - DNA, 19 bp, Mus musculus
  siRNA target sequence for Apof (NM_133997.1,1688-1706).
ctgggagtggcctttatta

SEQ ID NO: 749631 - DNA, 19 bp, Mus musculus
  siRNA target sequence for Apof (NM_133997.1,1690-1708).
gggagtggcctttattaaa

SEQ ID NO: 749632 - DNA, 19 bp, Mus musculus
  siRNA target sequence for Apof (NM_133997.1,1716-1734).
ggtgtcttggcgtacaaga

SEQ ID NO: 749633 - DNA, 19 bp, Mus musculus
  siRNA target sequence for Apof (NM_133997.1,1719-1737).
gtcttggcgtacaagagat

SEQ ID NO: 749634 - DNA, 19 bp, Mus musculus
  siRNA target sequence for 1810008A18Rik (NM_133998.1,181-199).
gaaggactggacattcgtt

SEQ ID NO: 749635 - DNA, 19 bp, Mus musculus
  siRNA target sequence for 1810008A18Rik (NM_133998.1,187-205).
ctggacattcgttcacaat

SEQ ID NO: 749636 - DNA, 19 bp, Mus musculus
  siRNA target sequence for 1810008A18Rik (NM_133998.1,344-362).
cgtgagcgatggttacaga

SEQ ID NO: 749637 - DNA, 19 bp, Mus musculus
  siRNA target sequence for 1810008A18Rik (NM_133998.1,345-363).
gtgagcgatggttacagaa

SEQ ID NO: 749638 - DNA, 19 bp, Mus musculus
  siRNA target sequence for 1810008A18Rik (NM_133998.1,349-367).
gcgatggttacagaaaatt

SEQ ID NO: 749639 - DNA, 19 bp, Mus musculus
  siRNA target sequence for A530089I17Rik (NM_133999.1,251-269).
gagctagatactttctagt

SEQ ID NO: 749640 - DNA, 19 bp, Mus musculus
  siRNA target sequence for A530089I17Rik (NM_133999.1,275-293).
gcaatcatgcagaaacgaa

SEQ ID NO: 749641 - DNA, 19 bp, Mus musculus
  siRNA target sequence for A530089I17Rik (NM_133999.1,298-316).
cgtgtcctgaaaattgata

SEQ ID NO: 749642 - DNA, 19 bp, Mus musculus
  siRNA target sequence for A530089I17Rik (NM_133999.1,464-482).
cttttggagtcgtaggttt

SEQ ID NO: 749643 - DNA, 19 bp, Mus musculus
  siRNA target sequence for A530089I17Rik (NM_133999.1,469-487).
ggagtcgtaggttttgtca

SEQ ID NO: 749644 - DNA, 19 bp, Mus musculus
  siRNA target sequence for A530089I17Rik (NM_133999.1,496-514).
gaaggctactatattgtat

SEQ ID NO: 749645 - DNA, 19 bp, Mus musculus
  siRNA target sequence for A530089I17Rik (NM_133999.1,499-517).
ggctactatattgtattaa

SEQ ID NO: 749646 - DNA, 19 bp, Mus musculus
  siRNA target sequence for A530089I17Rik (NM_133999.1,571-589).
gaagatacaagtatgattt

SEQ ID NO: 749647 - DNA, 19 bp, Mus musculus
  siRNA target sequence for A530089I17Rik (NM_133999.1,621-639).
ccccgacgaagctaggtat

SEQ ID NO: 749648 - DNA, 19 bp, Mus musculus
  siRNA target sequence for A530089I17Rik (NM_133999.1,624-642).
cgacgaagctaggtatcta

SEQ ID NO: 749649 - DNA, 19 bp, Mus musculus
  siRNA target sequence for A530089I17Rik (NM_133999.1,631-649).
gctaggtatctaaggatat

SEQ ID NO: 749650 - DNA, 19 bp, Mus musculus
  siRNA target sequence for A530089I17Rik (NM_133999.1,632-650).
ctaggtatctaaggatatt

SEQ ID NO: 749651 - DNA, 19 bp, Mus musculus
  siRNA target sequence for A530089I17Rik (NM_133999.1,660-678).
ggatctatctagcaatttt

SEQ ID NO: 749652 - DNA, 19 bp, Mus musculus
  siRNA target sequence for A530089I17Rik (NM_133999.1,661-679).
gatctatctagcaattttt

SEQ ID NO: 749653 - DNA, 19 bp, Mus musculus
  siRNA target sequence for A530089I17Rik (NM_133999.1,664-682).
ctatctagcaatttttact

SEQ ID NO: 749654 - DNA, 19 bp, Mus musculus
  siRNA target sequence for A530089I17Rik (NM_133999.1,702-720).
gtcacactcacttcagtat

SEQ ID NO: 749655 - DNA, 19 bp, Mus musculus
  siRNA target sequence for A530089I17Rik (NM_133999.1,742-760).
cccctggagatgttaaagt

SEQ ID NO: 749656 - DNA, 19 bp, Mus musculus
  siRNA target sequence for A530089I17Rik (NM_133999.1,783-801).
ggagagcttcgacatcttt

SEQ ID NO: 749657 - DNA, 19 bp, Mus musculus
  siRNA target sequence for A530089I17Rik (NM_133999.1,788-806).
gcttcgacatctttgaaga

SEQ ID NO: 749658 - DNA, 19 bp, Mus musculus
  siRNA target sequence for A530089I17Rik (NM_133999.1,854-872).
gtgagccttatatgaagta

SEQ ID NO: 749659 - DNA, 19 bp, Mus musculus
  siRNA target sequence for A530089I17Rik (NM_133999.1,858-876).
gccttatatgaagtatgta

SEQ ID NO: 749660 - DNA, 19 bp, Mus musculus
  siRNA target sequence for A530089I17Rik (NM_133999.1,882-900).
cggtgaacttctggatata

SEQ ID NO: 749661 - DNA, 19 bp, Mus musculus
  siRNA target sequence for A530089I17Rik (NM_133999.1,919-937).
cgtgactggctattgtata

SEQ ID NO: 749662 - DNA, 19 bp, Mus musculus
  siRNA target sequence for A530089I17Rik (NM_133999.1,920-938).
gtgactggctattgtatat

SEQ ID NO: 749663 - DNA, 19 bp, Mus musculus
  siRNA target sequence for A530089I17Rik (NM_133999.1,922-940).
gactggctattgtatatca

SEQ ID NO: 749664 - DNA, 19 bp, Mus musculus
  siRNA target sequence for A530089I17Rik (NM_133999.1,926-944).
ggctattgtatatcattca

SEQ ID NO: 749665 - DNA, 19 bp, Mus musculus
  siRNA target sequence for A530089I17Rik (NM_133999.1,953-971).
gcgggcagtccaagctttt

SEQ ID NO: 749666 - DNA, 19 bp, Mus musculus
  siRNA target sequence for A530089I17Rik (NM_133999.1,956-974).
ggcagtccaagcttttgat

SEQ ID NO: 749667 - DNA, 19 bp, Mus musculus
  siRNA target sequence for A530089I17Rik (NM_133999.1,960-978).
gtccaagcttttgatctat

SEQ ID NO: 749668 - DNA, 19 bp, Mus musculus
  siRNA target sequence for A530089I17Rik (NM_133999.1,979-997).
ggacgaccagtgtatgtga

SEQ ID NO: 749669 - DNA, 19 bp, Mus musculus
  siRNA target sequence for A530089I17Rik (NM_133999.1,1008-1026).
caggagatccagtaggttt

SEQ ID NO: 749670 - DNA, 19 bp, Mus musculus
  siRNA target sequence for A530089I17Rik (NM_133999.1,1028-1046).
ctgggacgcgctttctcaa

SEQ ID NO: 749671 - DNA, 19 bp, Mus musculus
  siRNA target sequence for A530089I17Rik (NM_133999.1,1044-1062).
caagagaggcgcaaactgt

SEQ ID NO: 749672 - DNA, 19 bp, Mus musculus
  siRNA target sequence for A530089I17Rik (NM_133999.1,1163-1181).
gaggatccgttcccttatt

SEQ ID NO: 749673 - DNA, 19 bp, Mus musculus
  siRNA target sequence for A530089I17Rik (NM_133999.1,1165-1183).
ggatccgttcccttattct

SEQ ID NO: 749674 - DNA, 19 bp, Mus musculus
  siRNA target sequence for A530089I17Rik (NM_133999.1,1209-1227).
gccgaaaccacccattaca

SEQ ID NO: 749675 - DNA, 19 bp, Mus musculus
  siRNA target sequence for A530089I17Rik (NM_133999.1,1301-1319).
ccatcatcatcttgaactt

SEQ ID NO: 749676 - DNA, 19 bp, Mus musculus
  siRNA target sequence for A530089I17Rik (NM_133999.1,1302-1320).
catcatcatcttgaactta

SEQ ID NO: 749677 - DNA, 19 bp, Mus musculus
  siRNA target sequence for A530089I17Rik (NM_133999.1,1445-1463).
ccaagtacaccaagagtaa

SEQ ID NO: 749678 - DNA, 19 bp, Mus musculus
  siRNA target sequence for A530089I17Rik (NM_133999.1,1479-1497).
cgatcggctgaatgtgatt

SEQ ID NO: 749679 - DNA, 19 bp, Mus musculus
  siRNA target sequence for A530089I17Rik (NM_133999.1,1498-1516).
gcggaaagcgtggtaaaga

SEQ ID NO: 749680 - DNA, 19 bp, Mus musculus
  siRNA target sequence for A530089I17Rik (NM_133999.1,1499-1517).
cggaaagcgtggtaaagaa

SEQ ID NO: 749681 - DNA, 19 bp, Mus musculus
  siRNA target sequence for A530089I17Rik (NM_133999.1,1667-1685).
ccaacactgcgcagttcat

SEQ ID NO: 749682 - DNA, 19 bp, Mus musculus
  siRNA target sequence for A530089I17Rik (NM_133999.1,1705-1723).
gcttaccagctgtattcct

SEQ ID NO: 749683 - DNA, 19 bp, Mus musculus
  siRNA target sequence for A530089I17Rik (NM_133999.1,1721-1739).
ccttagggctgattgacaa

SEQ ID NO: 749684 - DNA, 19 bp, Mus musculus
  siRNA target sequence for A530089I17Rik (NM_133999.1,1772-1790).
ggttgtttgaggaactcta

SEQ ID NO: 749685 - DNA, 19 bp, Mus musculus
  siRNA target sequence for A530089I17Rik (NM_133999.1,1776-1794).
gtttgaggaactctatgaa

SEQ ID NO: 749686 - DNA, 19 bp, Mus musculus
  siRNA target sequence for A530089I17Rik (NM_133999.1,1846-1864).
cgggtaaagacctacagaa

SEQ ID NO: 749687 - DNA, 19 bp, Mus musculus
  siRNA target sequence for A530089I17Rik (NM_133999.1,1932-1950).
cttctcggatgctgataga

SEQ ID NO: 749688 - DNA, 19 bp, Mus musculus
  siRNA target sequence for A530089I17Rik (NM_133999.1,2013-2031).
ggaactccccacagacttt

SEQ ID NO: 749689 - DNA, 19 bp, Mus musculus
  siRNA target sequence for A530089I17Rik (NM_133999.1,2014-2032).
gaactccccacagactttt

SEQ ID NO: 749690 - DNA, 19 bp, Mus musculus
  siRNA target sequence for A530089I17Rik (NM_133999.1,2069-2087).
ccagaaggagttatactta

SEQ ID NO: 749691 - DNA, 19 bp, Mus musculus
  siRNA target sequence for A530089I17Rik (NM_133999.1,2121-2139).
gctgccttacgatgaagtt

SEQ ID NO: 749692 - DNA, 19 bp, Mus musculus
  siRNA target sequence for A530089I17Rik (NM_133999.1,2122-2140).
ctgccttacgatgaagtta

SEQ ID NO: 749693 - DNA, 19 bp, Mus musculus
  siRNA target sequence for A530089I17Rik (NM_133999.1,2146-2164).
gctgcaaacttaaagaagt

SEQ ID NO: 749694 - DNA, 19 bp, Mus musculus
  siRNA target sequence for A530089I17Rik (NM_133999.1,2227-2245).
ccgtatgaattgagtagtt

SEQ ID NO: 749695 - DNA, 19 bp, Mus musculus
  siRNA target sequence for A530089I17Rik (NM_133999.1,2228-2246).
cgtatgaattgagtagttt

SEQ ID NO: 749696 - DNA, 19 bp, Mus musculus
  siRNA target sequence for A530089I17Rik (NM_133999.1,2229-2247).
gtatgaattgagtagtttt

SEQ ID NO: 749697 - DNA, 19 bp, Mus musculus
  siRNA target sequence for A530089I17Rik (NM_133999.1,2273-2291).
caagttcagcacgtgattt

SEQ ID NO: 749698 - DNA, 19 bp, Mus musculus
  siRNA target sequence for A530089I17Rik (NM_133999.1,2276-2294).
gttcagcacgtgattttat

SEQ ID NO: 749699 - DNA, 19 bp, Mus musculus
  siRNA target sequence for A530089I17Rik (NM_133999.1,2284-2302).
cgtgattttatgcctaaaa

SEQ ID NO: 749700 - DNA, 19 bp, Mus musculus
  siRNA target sequence for A530089I17Rik (NM_133999.1,2331-2349).
cgtgcgaaaaccagatgaa

SEQ ID NO: 749701 - DNA, 19 bp, Mus musculus
  siRNA target sequence for A530089I17Rik (NM_133999.1,2332-2350).
gtgcgaaaaccagatgaaa

SEQ ID NO: 749702 - DNA, 19 bp, Mus musculus
  siRNA target sequence for A530089I17Rik (NM_133999.1,2478-2496).
caccgaccgggaagatgaa

SEQ ID NO: 749703 - DNA, 19 bp, Mus musculus
  siRNA target sequence for A530089I17Rik (NM_133999.1,2577-2595).
gcccatgaaggaagtgtat

SEQ ID NO: 749704 - DNA, 19 bp, Mus musculus
  siRNA target sequence for A530089I17Rik (NM_133999.1,2623-2641).
gaggaggatcactccattt

SEQ ID NO: 749705 - DNA, 19 bp, Mus musculus
  siRNA target sequence for A530089I17Rik (NM_133999.1,2711-2729).
gttgctcagatggagttat

SEQ ID NO: 749706 - DNA, 19 bp, Mus musculus
  siRNA target sequence for A530089I17Rik (NM_133999.1,2747-2765).
cagctttctcgcaagacaa

SEQ ID NO: 749707 - DNA, 19 bp, Mus musculus
  siRNA target sequence for A530089I17Rik (NM_133999.1,2750-2768).
ctttctcgcaagacaacat

SEQ ID NO: 749708 - DNA, 19 bp, Mus musculus
  siRNA target sequence for A530089I17Rik (NM_133999.1,2754-2772).
ctcgcaagacaacatttat

SEQ ID NO: 749709 - DNA, 19 bp, Mus musculus
  siRNA target sequence for A530089I17Rik (NM_133999.1,2756-2774).
cgcaagacaacatttatga

SEQ ID NO: 749710 - DNA, 19 bp, Mus musculus
  siRNA target sequence for A530089I17Rik (NM_133999.1,2757-2775).
gcaagacaacatttatgaa

SEQ ID NO: 749711 - DNA, 19 bp, Mus musculus
  siRNA target sequence for A530089I17Rik (NM_133999.1,2783-2801).
ctccaagagtagacagaaa

SEQ ID NO: 749712 - DNA, 19 bp, Mus musculus
  siRNA target sequence for A530089I17Rik (NM_133999.1,2876-2894).
ccatgtaccgggagtacat

SEQ ID NO: 749713 - DNA, 19 bp, Mus musculus
  siRNA target sequence for A530089I17Rik (NM_133999.1,2892-2910).
catcagaaaccgctactta

SEQ ID NO: 749714 - DNA, 19 bp, Mus musculus
  siRNA target sequence for AI429613 (NM_134000.2,439-457).
cgtggaggttgatgaatca

SEQ ID NO: 749715 - DNA, 19 bp, Mus musculus
  siRNA target sequence for AI429613 (NM_134000.2,442-460).
ggaggttgatgaatcagaa

SEQ ID NO: 749716 - DNA, 19 bp, Mus musculus
  siRNA target sequence for AI429613 (NM_134000.2,458-476).
gaaccattcccgagtcaat

SEQ ID NO: 749717 - DNA, 19 bp, Mus musculus
  siRNA target sequence for AI429613 (NM_134000.2,462-480).
cattcccgagtcaattgct

SEQ ID NO: 749718 - DNA, 19 bp, Mus musculus
  siRNA target sequence for AI429613 (NM_134000.2,622-640).
cacctgcctgcgagctaaa

SEQ ID NO: 749719 - DNA, 19 bp, Mus musculus
  siRNA target sequence for AI429613 (NM_134000.2,624-642).
cctgcctgcgagctaaagt

SEQ ID NO: 749720 - DNA, 19 bp, Mus musculus
  siRNA target sequence for AI429613 (NM_134000.2,681-699).
ctgaacttggcaaagatat

SEQ ID NO: 749721 - DNA, 19 bp, Mus musculus
  siRNA target sequence for AI429613 (NM_134000.2,758-776).
gagcatcggttcacactta

SEQ ID NO: 749722 - DNA, 19 bp, Mus musculus
  siRNA target sequence for AI429613 (NM_134000.2,766-784).
gttcacacttacggaaaaa

SEQ ID NO: 749723 - DNA, 19 bp, Mus musculus
  siRNA target sequence for AI429613 (NM_134000.2,835-853).
ccatgaatcagacaaatca

SEQ ID NO: 749724 - DNA, 19 bp, Mus musculus
  siRNA target sequence for AI429613 (NM_134000.2,857-875).
ccaagtttacctaatgctt

SEQ ID NO: 749725 - DNA, 19 bp, Mus musculus
  siRNA target sequence for AI429613 (NM_134000.2,891-909).
gtggtggccaagagatgat

SEQ ID NO: 749726 - DNA, 19 bp, Mus musculus
  siRNA target sequence for AI429613 (NM_134000.2,970-988).
gatagacactggctatgat

SEQ ID NO: 749727 - DNA, 19 bp, Mus musculus
  siRNA target sequence for AI429613 (NM_134000.2,1098-1116).
cacctcagtttgaacttga

SEQ ID NO: 749728 - DNA, 19 bp, Mus musculus
  siRNA target sequence for AI429613 (NM_134000.2,1109-1127).
gaacttgagaggtatccaa

SEQ ID NO: 749729 - DNA, 19 bp, Mus musculus
  siRNA target sequence for AI429613 (NM_134000.2,1170-1188).
catggaactgtcagtacta

SEQ ID NO: 749730 - DNA, 19 bp, Mus musculus
  siRNA target sequence for AI429613 (NM_134000.2,1423-1441).
ctaccgcccaccatctaat

SEQ ID NO: 749731 - DNA, 19 bp, Mus musculus
  siRNA target sequence for AI429613 (NM_134000.2,1426-1444).
ccgcccaccatctaatgga

SEQ ID NO: 749732 - DNA, 19 bp, Mus musculus
  siRNA target sequence for AI429613 (NM_134000.2,1592-1610).
cggaaagtctttatcactt

SEQ ID NO: 749733 - DNA, 19 bp, Mus musculus
  siRNA target sequence for AI429613 (NM_134000.2,1593-1611).
ggaaagtctttatcactta

SEQ ID NO: 749734 - DNA, 19 bp, Mus musculus
  siRNA target sequence for AI429613 (NM_134000.2,1598-1616).
gtctttatcacttattcta

SEQ ID NO: 749735 - DNA, 19 bp, Mus musculus
  siRNA target sequence for AI429613 (NM_134000.2,1672-1690).
ccaaactgcgattgacata

SEQ ID NO: 749736 - DNA, 19 bp, Mus musculus
  siRNA target sequence for AI429613 (NM_134000.2,1677-1695).
ctgcgattgacatatttga

SEQ ID NO: 749737 - DNA, 19 bp, Mus musculus
  siRNA target sequence for AI429613 (NM_134000.2,1685-1703).
gacatatttgaggatagaa

SEQ ID NO: 749738 - DNA, 19 bp, Mus musculus
  siRNA target sequence for AI429613 (NM_134000.2,1701-1719).
gaatccggggtattgatat

SEQ ID NO: 749739 - DNA, 19 bp, Mus musculus
  siRNA target sequence for AI429613 (NM_134000.2,1705-1723).
ccggggtattgatatcatt

SEQ ID NO: 749740 - DNA, 19 bp, Mus musculus
  siRNA target sequence for AI429613 (NM_134000.2,1706-1724).
cggggtattgatatcatta

SEQ ID NO: 749741 - DNA, 19 bp, Mus musculus
  siRNA target sequence for AI429613 (NM_134000.2,1707-1725).
ggggtattgatatcattaa

SEQ ID NO: 749742 - DNA, 19 bp, Mus musculus
  siRNA target sequence for AI429613 (NM_134000.2,1708-1726).
gggtattgatatcattaaa

SEQ ID NO: 749743 - DNA, 19 bp, Mus musculus
  siRNA target sequence for AI429613 (NM_134000.2,1736-1754).
cgctatcttcgagataaga

SEQ ID NO: 749744 - DNA, 19 bp, Mus musculus
  siRNA target sequence for AI429613 (NM_134000.2,1738-1756).
ctatcttcgagataagaca

SEQ ID NO: 749745 - DNA, 19 bp, Mus musculus
  siRNA target sequence for AI429613 (NM_134000.2,1753-1771).
gacagtgatgataatcgta

SEQ ID NO: 749746 - DNA, 19 bp, Mus musculus
  siRNA target sequence for AI429613 (NM_134000.2,1772-1790).
gcaatcagccccaaataca

SEQ ID NO: 749747 - DNA, 19 bp, Mus musculus
  siRNA target sequence for AI429613 (NM_134000.2,1773-1791).
caatcagccccaaatacaa

SEQ ID NO: 749748 - DNA, 19 bp, Mus musculus
  siRNA target sequence for AI429613 (NM_134000.2,1828-1846).
ggacgagcatggcttacat

SEQ ID NO: 749749 - DNA, 19 bp, Mus musculus
  siRNA target sequence for AI429613 (NM_134000.2,1832-1850).
gagcatggcttacatacta

SEQ ID NO: 749750 - DNA, 19 bp, Mus musculus
  siRNA target sequence for AI429613 (NM_134000.2,1838-1856).
ggcttacatactaagtaca

SEQ ID NO: 749751 - DNA, 19 bp, Mus musculus
  siRNA target sequence for AI429613 (NM_134000.2,1839-1857).
gcttacatactaagtacat

SEQ ID NO: 749752 - DNA, 19 bp, Mus musculus
  siRNA target sequence for AI429613 (NM_134000.2,1840-1858).
cttacatactaagtacatt

SEQ ID NO: 749753 - DNA, 19 bp, Mus musculus
  siRNA target sequence for AI429613 (NM_134000.2,1863-1881).
ggatgatgcagattgagtt

SEQ ID NO: 749754 - DNA, 19 bp, Mus musculus
  siRNA target sequence for AI429613 (NM_134000.2,1867-1885).
gatgcagattgagttcata

SEQ ID NO: 749755 - DNA, 19 bp, Mus musculus
  siRNA target sequence for AI429613 (NM_134000.2,1870-1888).
gcagattgagttcataagt

SEQ ID NO: 749756 - DNA, 19 bp, Mus musculus
  siRNA target sequence for AI429613 (NM_134000.2,1887-1905).
gtcagggaagcatgaactt

SEQ ID NO: 749757 - DNA, 19 bp, Mus musculus
  siRNA target sequence for AI429613 (NM_134000.2,1893-1911).
gaagcatgaacttcagatt

SEQ ID NO: 749758 - DNA, 19 bp, Mus musculus
  siRNA target sequence for D10Ertd214e (NM_134007.2,195-213).
gttctacgctaaagagaat

SEQ ID NO: 749759 - DNA, 19 bp, Mus musculus
  siRNA target sequence for D10Ertd214e (NM_134007.2,218-236).
ccaaagctatggtgaatct

SEQ ID NO: 749760 - DNA, 19 bp, Mus musculus
  siRNA target sequence for D10Ertd214e (NM_134007.2,312-330).
ccgatgctggaggtctaaa

SEQ ID NO: 749761 - DNA, 19 bp, Mus musculus
  siRNA target sequence for D10Ertd214e (NM_134007.2,313-331).
cgatgctggaggtctaaaa

SEQ ID NO: 749762 - DNA, 19 bp, Mus musculus
  siRNA target sequence for D10Ertd214e (NM_134007.2,342-360).
ctgcgatggggctcacata

SEQ ID NO: 749763 - DNA, 19 bp, Mus musculus
  siRNA target sequence for D10Ertd214e (NM_134007.2,344-362).
gcgatggggctcacataaa

SEQ ID NO: 749764 - DNA, 19 bp, Mus musculus
  siRNA target sequence for D10Ertd214e (NM_134007.2,388-406).
gtaggacctctgatcatca

SEQ ID NO: 749765 - DNA, 19 bp, Mus musculus
  siRNA target sequence for AW541137 (NM_134010.1,170-188).
gcacagtgctcacaaaaga

SEQ ID NO: 749766 - DNA, 19 bp, Mus musculus
  siRNA target sequence for AW541137 (NM_134010.1,173-191).
cagtgctcacaaaagagtt

SEQ ID NO: 749767 - DNA, 19 bp, Mus musculus
  siRNA target sequence for AW541137 (NM_134010.1,206-224).
ccaagaggacaattttggt

SEQ ID NO: 749768 - DNA, 19 bp, Mus musculus
  siRNA target sequence for AW541137 (NM_134010.1,207-225).
caagaggacaattttggta

SEQ ID NO: 749769 - DNA, 19 bp, Mus musculus
  siRNA target sequence for AW541137 (NM_134010.1,309-327).
ctgagacacccggatattt

SEQ ID NO: 749770 - DNA, 19 bp, Mus musculus
  siRNA target sequence for AW541137 (NM_134010.1,313-331).
gacacccggatatttccta

SEQ ID NO: 749771 - DNA, 19 bp, Mus musculus
  siRNA target sequence for AW541137 (NM_134010.1,317-335).
cccggatatttcctacatt

SEQ ID NO: 749772 - DNA, 19 bp, Mus musculus
  siRNA target sequence for AW541137 (NM_134010.1,319-337).
cggatatttcctacattct

SEQ ID NO: 749773 - DNA, 19 bp, Mus musculus
  siRNA target sequence for AW541137 (NM_134010.1,378-396).
gggtacttgggaaatcttt

SEQ ID NO: 749774 - DNA, 19 bp, Mus musculus
  siRNA target sequence for AW541137 (NM_134010.1,397-415).
ctatggtgactaatcttga

SEQ ID NO: 749775 - DNA, 19 bp, Mus musculus
  siRNA target sequence for AW541137 (NM_134010.1,450-468).
cgtttagggctctacacaa

SEQ ID NO: 749776 - DNA, 19 bp, Mus musculus
  siRNA target sequence for AW541137 (NM_134010.1,451-469).
gtttagggctctacacaaa

SEQ ID NO: 749777 - DNA, 19 bp, Mus musculus
  siRNA target sequence for AW541137 (NM_134010.1,492-510).
gaggatgtgaacctaagta

SEQ ID NO: 749778 - DNA, 19 bp, Mus musculus
  siRNA target sequence for AW541137 (NM_134010.1,494-512).
ggatgtgaacctaagtact

SEQ ID NO: 749779 - DNA, 19 bp, Mus musculus
  siRNA target sequence for AW541137 (NM_134010.1,608-626).
ctttgatctcgtagaagaa

SEQ ID NO: 749780 - DNA, 19 bp, Mus musculus
  siRNA target sequence for AW541137 (NM_134010.1,615-633).
ctcgtagaagaatatgaaa

SEQ ID NO: 749781 - DNA, 19 bp, Mus musculus
  siRNA target sequence for AW541137 (NM_134010.1,643-661).
gtagtcaggtgaatatcct

SEQ ID NO: 749782 - DNA, 19 bp, Mus musculus
  siRNA target sequence for AW541137 (NM_134010.1,650-668).
ggtgaatatcctcagtaaa

SEQ ID NO: 749783 - DNA, 19 bp, Mus musculus
  siRNA target sequence for AW541137 (NM_134010.1,685-703).
cgcctggactgcagaagtt

SEQ ID NO: 749784 - DNA, 19 bp, Mus musculus
  siRNA target sequence for AW541137 (NM_134010.1,690-708).
ggactgcagaagttttcca

SEQ ID NO: 749785 - DNA, 19 bp, Mus musculus
  siRNA target sequence for AW541137 (NM_134010.1,759-777).
ctgctcgcctctttgtaca

SEQ ID NO: 749786 - DNA, 19 bp, Mus musculus
  siRNA target sequence for AW541137 (NM_134010.1,784-802).
gaatacagtcttcattaga

SEQ ID NO: 749787 - DNA, 19 bp, Mus musculus
  siRNA target sequence for AW541137 (NM_134010.1,943-961).
gagaattctcggacaatat

SEQ ID NO: 749788 - DNA, 19 bp, Mus musculus
  siRNA target sequence for AW541137 (NM_134010.1,950-968).
ctcggacaatattgagttt

SEQ ID NO: 749789 - DNA, 19 bp, Mus musculus
  siRNA target sequence for AW541137 (NM_134010.1,952-970).
cggacaatattgagtttta

SEQ ID NO: 749790 - DNA, 19 bp, Mus musculus
  siRNA target sequence for AW541137 (NM_134010.1,953-971).
ggacaatattgagttttat

SEQ ID NO: 749791 - DNA, 19 bp, Mus musculus
  siRNA target sequence for AW541137 (NM_134010.1,1070-1088).
cccagacgctcccattaga

SEQ ID NO: 749792 - DNA, 19 bp, Mus musculus
  siRNA target sequence for AW541137 (NM_134010.1,1072-1090).
cagacgctcccattagaca

SEQ ID NO: 749793 - DNA, 19 bp, Mus musculus
  siRNA target sequence for AW541137 (NM_134010.1,1078-1096).
ctcccattagacagaagtt

SEQ ID NO: 749794 - DNA, 19 bp, Mus musculus
  siRNA target sequence for AW541137 (NM_134010.1,1230-1248).
ctggaaggctggaaactgt

SEQ ID NO: 749795 - DNA, 19 bp, Mus musculus
  siRNA target sequence for AW541137 (NM_134010.1,1387-1405).
cactgagtgggaaccttaa

SEQ ID NO: 749796 - DNA, 19 bp, Mus musculus
  siRNA target sequence for AW541137 (NM_134010.1,1487-1505).
ggagattcggacatcagta

SEQ ID NO: 749797 - DNA, 19 bp, Mus musculus
  siRNA target sequence for AW541137 (NM_134010.1,1488-1506).
gagattcggacatcagtaa

SEQ ID NO: 749798 - DNA, 19 bp, Mus musculus
  siRNA target sequence for AW541137 (NM_134010.1,1551-1569).
gccaattggaccttagaaa

SEQ ID NO: 749799 - DNA, 19 bp, Mus musculus
  siRNA target sequence for AW541137 (NM_134010.1,1581-1599).
gaacttcaagccactgata

SEQ ID NO: 749800 - DNA, 19 bp, Mus musculus
  siRNA target sequence for AW541137 (NM_134010.1,1663-1681).
gagacgttgatggtttgat

SEQ ID NO: 749801 - DNA, 19 bp, Mus musculus
  siRNA target sequence for AW541137 (NM_134010.1,1822-1840).
catatatacagctgttaat

SEQ ID NO: 749802 - DNA, 19 bp, Mus musculus
  siRNA target sequence for AW541137 (NM_134010.1,1860-1878).
ctcatagcgttctatacct

SEQ ID NO: 749803 - DNA, 19 bp, Mus musculus
  siRNA target sequence for AW541137 (NM_134010.1,1904-1922).
ggcccagtatgccttattt

SEQ ID NO: 749804 - DNA, 19 bp, Mus musculus
  siRNA target sequence for AW541137 (NM_134010.1,1925-1943).
ggaaggtgttacggaattt

SEQ ID NO: 749805 - DNA, 19 bp, Mus musculus
  siRNA target sequence for AW541137 (NM_134010.1,1989-2007).
gatgttgcgacgataacga

SEQ ID NO: 749806 - DNA, 19 bp, Mus musculus
  siRNA target sequence for AW541137 (NM_134010.1,1992-2010).
gttgcgacgataacgaaaa

SEQ ID NO: 749807 - DNA, 19 bp, Mus musculus
  siRNA target sequence for AW541137 (NM_134010.1,1996-2014).
cgacgataacgaaaactgt

SEQ ID NO: 749808 - DNA, 19 bp, Mus musculus
  siRNA target sequence for AW541137 (NM_134010.1,1997-2015).
gacgataacgaaaactgta

SEQ ID NO: 749809 - DNA, 19 bp, Mus musculus
  siRNA target sequence for AW541137 (NM_134010.1,2099-2117).
ggaccgcctgaagattgat

SEQ ID NO: 749810 - DNA, 19 bp, Mus musculus
  siRNA target sequence for AW541137 (NM_134010.1,2180-2198).
catcatgaggaagttctta

SEQ ID NO: 749811 - DNA, 19 bp, Mus musculus
  siRNA target sequence for AW541137 (NM_134010.1,2186-2204).
gaggaagttcttagcatta

SEQ ID NO: 749812 - DNA, 19 bp, Mus musculus
  siRNA target sequence for AW541137 (NM_134010.1,2220-2238).
gcaaaagaagtgtttgtga

SEQ ID NO: 749813 - DNA, 19 bp, Mus musculus
  siRNA target sequence for AW541137 (NM_134010.1,2255-2273).
catcgcagagatctataat

SEQ ID NO: 749814 - DNA, 19 bp, Mus musculus
  siRNA target sequence for AW541137 (NM_134010.1,2259-2277).
gcagagatctataatcagt

SEQ ID NO: 749815 - DNA, 19 bp, Mus musculus
  siRNA target sequence for AW541137 (NM_134010.1,2304-2322).
cttcctgccgaggatgata

SEQ ID NO: 749816 - DNA, 19 bp, Mus musculus
  siRNA target sequence for AW541137 (NM_134010.1,2367-2385).
catgaaaccttcaacgaat

SEQ ID NO: 749817 - DNA, 19 bp, Mus musculus
  siRNA target sequence for AW541137 (NM_134010.1,2374-2392).
ccttcaacgaatggtttaa

SEQ ID NO: 749818 - DNA, 19 bp, Mus musculus
  siRNA target sequence for AW541137 (NM_134010.1,2378-2396).
caacgaatggtttaaacat

SEQ ID NO: 749819 - DNA, 19 bp, Mus musculus
  siRNA target sequence for AW541137 (NM_134010.1,2399-2417).
gaattcggctccacagaaa

SEQ ID NO: 749820 - DNA, 19 bp, Mus musculus
  siRNA target sequence for AW541137 (NM_134010.1,2410-2428).
cacagaaacctacattact

SEQ ID NO: 749821 - DNA, 19 bp, Mus musculus
  siRNA target sequence for AW541137 (NM_134010.1,2412-2430).
cagaaacctacattactat

SEQ ID NO: 749822 - DNA, 19 bp, Mus musculus
  siRNA target sequence for AW541137 (NM_134010.1,2414-2432).
gaaacctacattactatct

SEQ ID NO: 749823 - DNA, 19 bp, Mus musculus
  siRNA target sequence for AW541137 (NM_134010.1,2427-2445).
ctatctcaagcaactttta

SEQ ID NO: 749824 - DNA, 19 bp, Mus musculus
  siRNA target sequence for AW541137 (NM_134010.1,2431-2449).
ctcaagcaacttttacaga

SEQ ID NO: 749825 - DNA, 19 bp, Mus musculus
  siRNA target sequence for AW541137 (NM_134010.1,2483-2501).
cgagatggatcataatatt

SEQ ID NO: 749826 - DNA, 19 bp, Mus musculus
  siRNA target sequence for AW541137 (NM_134010.1,2521-2539).
ccctaactgctgatgtgaa

SEQ ID NO: 749827 - DNA, 19 bp, Mus musculus
  siRNA target sequence for AW541137 (NM_134010.1,2552-2570).
caacgtcttgttgtttgtt

SEQ ID NO: 749828 - DNA, 19 bp, Mus musculus
  siRNA target sequence for AW541137 (NM_134010.1,2622-2640).
cggacgcatcagatggttt

SEQ ID NO: 749829 - DNA, 19 bp, Mus musculus
  siRNA target sequence for AW541137 (NM_134010.1,2623-2641).
ggacgcatcagatggtttt

SEQ ID NO: 749830 - DNA, 19 bp, Mus musculus
  siRNA target sequence for AW541137 (NM_134010.1,2624-2642).
gacgcatcagatggtttta

SEQ ID NO: 749831 - DNA, 19 bp, Mus musculus
  siRNA target sequence for AW541137 (NM_134010.1,2626-2644).
cgcatcagatggttttact

SEQ ID NO: 749832 - DNA, 19 bp, Mus musculus
  siRNA target sequence for AW541137 (NM_134010.1,2812-2830).
gggagtcctctctaatgct

SEQ ID NO: 749833 - DNA, 19 bp, Mus musculus
  siRNA target sequence for AW541137 (NM_134010.1,2851-2869).
cgcttggctatgaaattca

SEQ ID NO: 749834 - DNA, 19 bp, Mus musculus
  siRNA target sequence for AW541137 (NM_134010.1,2853-2871).
cttggctatgaaattcagt

SEQ ID NO: 749835 - DNA, 19 bp, Mus musculus
  siRNA target sequence for Tbrg4 (NM_134011.1,238-256).
ccgcctagttcctactgtt

SEQ ID NO: 749836 - DNA, 19 bp, Mus musculus
  siRNA target sequence for Tbrg4 (NM_134011.1,355-373).
gaaagagcaggtgtttact

SEQ ID NO: 749837 - DNA, 19 bp, Mus musculus
  siRNA target sequence for Tbrg4 (NM_134011.1,397-415).
ggacttcctcattgagaaa

SEQ ID NO: 749838 - DNA, 19 bp, Mus musculus
  siRNA target sequence for Tbrg4 (NM_134011.1,567-585).
gacttgtcaagctagttga

SEQ ID NO: 749839 - DNA, 19 bp, Mus musculus
  siRNA target sequence for Tbrg4 (NM_134011.1,577-595).
gctagttgatagtcagata

SEQ ID NO: 749840 - DNA, 19 bp, Mus musculus
  siRNA target sequence for Tbrg4 (NM_134011.1,578-596).
ctagttgatagtcagataa

SEQ ID NO: 749841 - DNA, 19 bp, Mus musculus
  siRNA target sequence for Tbrg4 (NM_134011.1,581-599).
gttgatagtcagataactt

SEQ ID NO: 749842 - DNA, 19 bp, Mus musculus
  siRNA target sequence for Tbrg4 (NM_134011.1,705-723).
gtctgcggaggctcaagta

SEQ ID NO: 749843 - DNA, 19 bp, Mus musculus
  siRNA target sequence for Tbrg4 (NM_134011.1,707-725).
ctgcggaggctcaagtaca

SEQ ID NO: 749844 - DNA, 19 bp, Mus musculus
  siRNA target sequence for Tbrg4 (NM_134011.1,1020-1038).
cctaccacctggtacagaa

SEQ ID NO: 749845 - DNA, 19 bp, Mus musculus
  siRNA target sequence for Tbrg4 (NM_134011.1,1318-1336).
gaactttcatcctgaacaa

SEQ ID NO: 749846 - DNA, 19 bp, Mus musculus
  siRNA target sequence for Tbrg4 (NM_134011.1,1627-1645).
cccctcaccctctaataaa

SEQ ID NO: 749847 - DNA, 19 bp, Mus musculus
  siRNA target sequence for Tbrg4 (NM_134011.1,1628-1646).
ccctcaccctctaataaaa

SEQ ID NO: 749848 - DNA, 19 bp, Mus musculus
  siRNA target sequence for Tbrg4 (NM_134011.1,1629-1647).
cctcaccctctaataaaaa

SEQ ID NO: 749849 - DNA, 19 bp, Mus musculus
  siRNA target sequence for Tbrg4 (NM_134011.1,1634-1652).
ccctctaataaaaagatga

SEQ ID NO: 749850 - DNA, 19 bp, Mus musculus
  siRNA target sequence for Tbrg4 (NM_134011.1,1720-1738).
ggaggtggccacacagtat

SEQ ID NO: 749851 - DNA, 19 bp, Mus musculus
  siRNA target sequence for Tbrg4 (NM_134011.1,1781-1799).
cacttcctgcccctaagaa

SEQ ID NO: 749852 - DNA, 19 bp, Mus musculus
  siRNA target sequence for Tbrg4 (NM_134011.1,1847-1865).
cccccaggagctaaaagga

SEQ ID NO: 749853 - DNA, 19 bp, Mus musculus
  siRNA target sequence for Tbrg4 (NM_134011.1,1881-1899).
gggagttccccaacttcaa

SEQ ID NO: 749854 - DNA, 19 bp, Mus musculus
  siRNA target sequence for Tbrg4 (NM_134011.1,1959-1977).
caggcttcctggtagtaga

SEQ ID NO: 749855 - DNA, 19 bp, Mus musculus
  siRNA target sequence for Tbrg4 (NM_134011.1,1962-1980).
gcttcctggtagtagatgt

SEQ ID NO: 749856 - DNA, 19 bp, Mus musculus
  siRNA target sequence for Tbrg4 (NM_134011.1,1976-1994).
gatgtcccatattatgaat

SEQ ID NO: 749857 - DNA, 19 bp, Mus musculus
  siRNA target sequence for Tbrg4 (NM_134011.1,1997-2015).
ctggatctgaagtctgaat

SEQ ID NO: 749858 - DNA, 19 bp, Mus musculus
  siRNA target sequence for Tbrg4 (NM_134011.1,2038-2056).
ggacaagatgcgaaaagca

SEQ ID NO: 749859 - DNA, 19 bp, Mus musculus
  siRNA target sequence for Mbtd1 (NM_134012.1,61-79).
ggacctgctggggtgatat

SEQ ID NO: 749860 - DNA, 19 bp, Mus musculus
  siRNA target sequence for Mbtd1 (NM_134012.1,71-89).
gggtgatatctcggaaaat

SEQ ID NO: 749861 - DNA, 19 bp, Mus musculus
  siRNA target sequence for Mbtd1 (NM_134012.1,80-98).
ctcggaaaatgtaaggata

SEQ ID NO: 749862 - DNA, 19 bp, Mus musculus
  siRNA target sequence for Mbtd1 (NM_134012.1,95-113).
gatagaagttcccaataca

SEQ ID NO: 749863 - DNA, 19 bp, Mus musculus
  siRNA target sequence for Mbtd1 (NM_134012.1,121-139).
gtctacctaccaaagtctt

SEQ ID NO: 749864 - DNA, 19 bp, Mus musculus
  siRNA target sequence for Mbtd1 (NM_134012.1,168-186).
ggttataatgcccttttga

SEQ ID NO: 749865 - DNA, 19 bp, Mus musculus
  siRNA target sequence for Mbtd1 (NM_134012.1,266-284).
gtgtgcagctagtggaaaa

SEQ ID NO: 749866 - DNA, 19 bp, Mus musculus
  siRNA target sequence for Mbtd1 (NM_134012.1,290-308).
cgttcctcctagaactgtt

SEQ ID NO: 749867 - DNA, 19 bp, Mus musculus
  siRNA target sequence for Mbtd1 (NM_134012.1,297-315).
cctagaactgttcaacata

SEQ ID NO: 749868 - DNA, 19 bp, Mus musculus
  siRNA target sequence for Mbtd1 (NM_134012.1,306-324).
gttcaacataaatatacaa

SEQ ID NO: 749869 - DNA, 19 bp, Mus musculus
  siRNA target sequence for Mbtd1 (NM_134012.1,328-346).
ggaaagcttttctagtaaa

SEQ ID NO: 749870 - DNA, 19 bp, Mus musculus
  siRNA target sequence for Mbtd1 (NM_134012.1,372-390).
cctcctgatttctcacaaa

SEQ ID NO: 749871 - DNA, 19 bp, Mus musculus
  siRNA target sequence for Mbtd1 (NM_134012.1,378-396).
gatttctcacaaaaggttt

SEQ ID NO: 749872 - DNA, 19 bp, Mus musculus
  siRNA target sequence for Mbtd1 (NM_134012.1,403-421).
gtatgcaatatcctttcaa

SEQ ID NO: 749873 - DNA, 19 bp, Mus musculus
  siRNA target sequence for Mbtd1 (NM_134012.1,455-473).
gcatttatgtcgaacaaga

SEQ ID NO: 749874 - DNA, 19 bp, Mus musculus
  siRNA target sequence for Mbtd1 (NM_134012.1,477-495).
gcagtggtggaaagtgtaa

SEQ ID NO: 749875 - DNA, 19 bp, Mus musculus
  siRNA target sequence for Mbtd1 (NM_134012.1,505-523).
gactacggctggtgtatga

SEQ ID NO: 749876 - DNA, 19 bp, Mus musculus
  siRNA target sequence for Mbtd1 (NM_134012.1,568-586).
gccccttaatccaccatat

SEQ ID NO: 749877 - DNA, 19 bp, Mus musculus
  siRNA target sequence for Mbtd1 (NM_134012.1,569-587).
ccccttaatccaccatatt

SEQ ID NO: 749878 - DNA, 19 bp, Mus musculus
  siRNA target sequence for Mbtd1 (NM_134012.1,572-590).
cttaatccaccatattgga

SEQ ID NO: 749879 - DNA, 19 bp, Mus musculus
  siRNA target sequence for Mbtd1 (NM_134012.1,598-616).
gaagcataggccatcgatt

SEQ ID NO: 749880 - DNA, 19 bp, Mus musculus
  siRNA target sequence for Mbtd1 (NM_134012.1,601-619).
gcataggccatcgattcaa

SEQ ID NO: 749881 - DNA, 19 bp, Mus musculus
  siRNA target sequence for Mbtd1 (NM_134012.1,612-630).
cgattcaagagatcagata

SEQ ID NO: 749882 - DNA, 19 bp, Mus musculus
  siRNA target sequence for Mbtd1 (NM_134012.1,642-660).
caggacggacatttcgata

SEQ ID NO: 749883 - DNA, 19 bp, Mus musculus
  siRNA target sequence for Mbtd1 (NM_134012.1,735-753).
gaagctatagacccattaa

SEQ ID NO: 749884 - DNA, 19 bp, Mus musculus
  siRNA target sequence for Mbtd1 (NM_134012.1,739-757).
ctatagacccattaaatct

SEQ ID NO: 749885 - DNA, 19 bp, Mus musculus
  siRNA target sequence for Mbtd1 (NM_134012.1,747-765).
ccattaaatctttctacaa

SEQ ID NO: 749886 - DNA, 19 bp, Mus musculus
  siRNA target sequence for Mbtd1 (NM_134012.1,844-862).
gatctgactggttctgtta

SEQ ID NO: 749887 - DNA, 19 bp, Mus musculus
  siRNA target sequence for Mbtd1 (NM_134012.1,867-885).
gcaacctctccttccattt

SEQ ID NO: 749888 - DNA, 19 bp, Mus musculus
  siRNA target sequence for Mbtd1 (NM_134012.1,899-917).
ctgtgaaattaacatgata

SEQ ID NO: 749889 - DNA, 19 bp, Mus musculus
  siRNA target sequence for Mbtd1 (NM_134012.1,901-919).
gtgaaattaacatgataga

SEQ ID NO: 749890 - DNA, 19 bp, Mus musculus
  siRNA target sequence for Mbtd1 (NM_134012.1,931-949).
ccagaggttacacaaaact

SEQ ID NO: 749891 - DNA, 19 bp, Mus musculus
  siRNA target sequence for Mbtd1 (NM_134012.1,932-950).
cagaggttacacaaaactt

SEQ ID NO: 749892 - DNA, 19 bp, Mus musculus
  siRNA target sequence for Mbtd1 (NM_134012.1,988-1006).
ccattgcagcaccagtaaa

SEQ ID NO: 749893 - DNA, 19 bp, Mus musculus
  siRNA target sequence for Mbtd1 (NM_134012.1,993-1011).
gcagcaccagtaaaactat

SEQ ID NO: 749894 - DNA, 19 bp, Mus musculus
  siRNA target sequence for Mbtd1 (NM_134012.1,994-1012).
cagcaccagtaaaactatt

SEQ ID NO: 749895 - DNA, 19 bp, Mus musculus
  siRNA target sequence for Mbtd1 (NM_134012.1,996-1014).
gcaccagtaaaactattta

SEQ ID NO: 749896 - DNA, 19 bp, Mus musculus
  siRNA target sequence for Mbtd1 (NM_134012.1,1036-1054).
gattccgtgtaggaatgaa

SEQ ID NO: 749897 - DNA, 19 bp, Mus musculus
  siRNA target sequence for Mbtd1 (NM_134012.1,1040-1058).
ccgtgtaggaatgaaatta

SEQ ID NO: 749898 - DNA, 19 bp, Mus musculus
  siRNA target sequence for Mbtd1 (NM_134012.1,1073-1091).
catggagccacggttaata

SEQ ID NO: 749899 - DNA, 19 bp, Mus musculus
  siRNA target sequence for Mbtd1 (NM_134012.1,1076-1094).
ggagccacggttaatatgt

SEQ ID NO: 749900 - DNA, 19 bp, Mus musculus
  siRNA target sequence for Mbtd1 (NM_134012.1,1079-1097).
gccacggttaatatgtgta

SEQ ID NO: 749901 - DNA, 19 bp, Mus musculus
  siRNA target sequence for Mbtd1 (NM_134012.1,1098-1116).
gccacagttactcgaatta

SEQ ID NO: 749902 - DNA, 19 bp, Mus musculus
  siRNA target sequence for Mbtd1 (NM_134012.1,1099-1117).
ccacagttactcgaattat

SEQ ID NO: 749903 - DNA, 19 bp, Mus musculus
  siRNA target sequence for Mbtd1 (NM_134012.1,1100-1118).
cacagttactcgaattatt

SEQ ID NO: 749904 - DNA, 19 bp, Mus musculus
  siRNA target sequence for Mbtd1 (NM_134012.1,1102-1120).
cagttactcgaattattca

SEQ ID NO: 749905 - DNA, 19 bp, Mus musculus
  siRNA target sequence for Mbtd1 (NM_134012.1,1121-1139).
ccgtctcttgaggatacat

SEQ ID NO: 749906 - DNA, 19 bp, Mus musculus
  siRNA target sequence for Mbtd1 (NM_134012.1,1122-1140).
cgtctcttgaggatacatt

SEQ ID NO: 749907 - DNA, 19 bp, Mus musculus
  siRNA target sequence for Mbtd1 (NM_134012.1,1213-1231).
gtcagttaactggatatca

SEQ ID NO: 749908 - DNA, 19 bp, Mus musculus
  siRNA target sequence for Mbtd1 (NM_134012.1,1267-1285).
gccaatcagcttcttcaaa

SEQ ID NO: 749909 - DNA, 19 bp, Mus musculus
  siRNA target sequence for Mbtd1 (NM_134012.1,1362-1380).
ctggacggggaggactata

SEQ ID NO: 749910 - DNA, 19 bp, Mus musculus
  siRNA target sequence for Mbtd1 (NM_134012.1,1426-1444).
ccgtctacatcaaacaaga

SEQ ID NO: 749911 - DNA, 19 bp, Mus musculus
  siRNA target sequence for Psme4 (NM_134013.2,147-165).
gcggaaactctccacttat

SEQ ID NO: 749912 - DNA, 19 bp, Mus musculus
  siRNA target sequence for Psme4 (NM_134013.2,148-166).
cggaaactctccacttata

SEQ ID NO: 749913 - DNA, 19 bp, Mus musculus
  siRNA target sequence for Psme4 (NM_134013.2,158-176).
ccacttatatccgacttta

SEQ ID NO: 749914 - DNA, 19 bp, Mus musculus
  siRNA target sequence for Psme4 (NM_134013.2,168-186).
ccgactttatgggagaaaa

SEQ ID NO: 749915 - DNA, 19 bp, Mus musculus
  siRNA target sequence for Psme4 (NM_134013.2,225-243).
gtatgagctggtatcaatt

SEQ ID NO: 749916 - DNA, 19 bp, Mus musculus
  siRNA target sequence for Psme4 (NM_134013.2,229-247).
gagctggtatcaattccaa

SEQ ID NO: 749917 - DNA, 19 bp, Mus musculus
  siRNA target sequence for Psme4 (NM_134013.2,277-295).
gcccgtctcttgatcaact

SEQ ID NO: 749918 - DNA, 19 bp, Mus musculus
  siRNA target sequence for Psme4 (NM_134013.2,280-298).
cgtctcttgatcaacttgt

SEQ ID NO: 749919 - DNA, 19 bp, Mus musculus
  siRNA target sequence for Psme4 (NM_134013.2,283-301).
ctcttgatcaacttgttaa

SEQ ID NO: 749920 - DNA, 19 bp, Mus musculus
  siRNA target sequence for Psme4 (NM_134013.2,313-331).
cttctttcaagagatgatt

SEQ ID NO: 749921 - DNA, 19 bp, Mus musculus
  siRNA target sequence for Psme4 (NM_134013.2,325-343).
gatgatttagagttacctt

SEQ ID NO: 749922 - DNA, 19 bp, Mus musculus
  siRNA target sequence for Psme4 (NM_134013.2,352-370).
ctttatgacttggtagaaa

SEQ ID NO: 749923 - DNA, 19 bp, Mus musculus
  siRNA target sequence for Psme4 (NM_134013.2,360-378).
cttggtagaaagaatatta

SEQ ID NO: 749924 - DNA, 19 bp, Mus musculus
  siRNA target sequence for Psme4 (NM_134013.2,391-409).
gagcacctgagattaaatt

SEQ ID NO: 749925 - DNA, 19 bp, Mus musculus
  siRNA target sequence for Psme4 (NM_134013.2,393-411).
gcacctgagattaaattca

SEQ ID NO: 749926 - DNA, 19 bp, Mus musculus
  siRNA target sequence for Psme4 (NM_134013.2,394-412).
cacctgagattaaattcat

SEQ ID NO: 749927 - DNA, 19 bp, Mus musculus
  siRNA target sequence for Psme4 (NM_134013.2,540-558).
gcaaaaggccatcagttat

SEQ ID NO: 749928 - DNA, 19 bp, Mus musculus
  siRNA target sequence for Psme4 (NM_134013.2,541-559).
caaaaggccatcagttatt

SEQ ID NO: 749929 - DNA, 19 bp, Mus musculus
  siRNA target sequence for Psme4 (NM_134013.2,546-564).
ggccatcagttattttgaa

SEQ ID NO: 749930 - DNA, 19 bp, Mus musculus
  siRNA target sequence for Psme4 (NM_134013.2,547-565).
gccatcagttattttgaaa

SEQ ID NO: 749931 - DNA, 19 bp, Mus musculus
  siRNA target sequence for Psme4 (NM_134013.2,548-566).
ccatcagttattttgaaat

SEQ ID NO: 749932 - DNA, 19 bp, Mus musculus
  siRNA target sequence for Psme4 (NM_134013.2,586-604).
cctccagaactgcatcata

SEQ ID NO: 749933 - DNA, 19 bp, Mus musculus
  siRNA target sequence for Psme4 (NM_134013.2,595-613).
ctgcatcataaaggtttta

SEQ ID NO: 749934 - DNA, 19 bp, Mus musculus
  siRNA target sequence for Psme4 (NM_134013.2,644-662).
gggtttcagtgcaaaatct

SEQ ID NO: 749935 - DNA, 19 bp, Mus musculus
  siRNA target sequence for Psme4 (NM_134013.2,669-687).
gtgggaggggcaattagta

SEQ ID NO: 749936 - DNA, 19 bp, Mus musculus
  siRNA target sequence for Psme4 (NM_134013.2,672-690).
ggaggggcaattagtaaat

SEQ ID NO: 749937 - DNA, 19 bp, Mus musculus
  siRNA target sequence for Psme4 (NM_134013.2,676-694).
gggcaattagtaaatctct

SEQ ID NO: 749938 - DNA, 19 bp, Mus musculus
  siRNA target sequence for Psme4 (NM_134013.2,697-715).
gctcgattggctacagata

SEQ ID NO: 749939 - DNA, 19 bp, Mus musculus
  siRNA target sequence for Psme4 (NM_134013.2,700-718).
cgattggctacagataata

SEQ ID NO: 749940 - DNA, 19 bp, Mus musculus
  siRNA target sequence for Psme4 (NM_134013.2,701-719).
gattggctacagataatat

SEQ ID NO: 749941 - DNA, 19 bp, Mus musculus
  siRNA target sequence for Psme4 (NM_134013.2,705-723).
ggctacagataatatagga

SEQ ID NO: 749942 - DNA, 19 bp, Mus musculus
  siRNA target sequence for Psme4 (NM_134013.2,739-757).
ccatatgtaccgaagatat

SEQ ID NO: 749943 - DNA, 19 bp, Mus musculus
  siRNA target sequence for Psme4 (NM_134013.2,740-758).
catatgtaccgaagatatt

SEQ ID NO: 749944 - DNA, 19 bp, Mus musculus
  siRNA target sequence for Psme4 (NM_134013.2,745-763).
gtaccgaagatatttacaa

SEQ ID NO: 749945 - DNA, 19 bp, Mus musculus
  siRNA target sequence for Psme4 (NM_134013.2,748-766).
ccgaagatatttacaagaa

SEQ ID NO: 749946 - DNA, 19 bp, Mus musculus
  siRNA target sequence for Psme4 (NM_134013.2,792-810).
gggaagcagtcaagtttta

SEQ ID NO: 749947 - DNA, 19 bp, Mus musculus
  siRNA target sequence for Psme4 (NM_134013.2,805-823).
gttttagtcccaagatttt

SEQ ID NO: 749948 - DNA, 19 bp, Mus musculus
  siRNA target sequence for Psme4 (NM_134013.2,873-891).
gatgggtggaccaagtaaa

SEQ ID NO: 749949 - DNA, 19 bp, Mus musculus
  siRNA target sequence for Psme4 (NM_134013.2,876-894).
gggtggaccaagtaaatta

SEQ ID NO: 749950 - DNA, 19 bp, Mus musculus
  siRNA target sequence for Psme4 (NM_134013.2,881-899).
gaccaagtaaattagtaca

SEQ ID NO: 749951 - DNA, 19 bp, Mus musculus
  siRNA target sequence for Psme4 (NM_134013.2,883-901).
ccaagtaaattagtacaaa

SEQ ID NO: 749952 - DNA, 19 bp, Mus musculus
  siRNA target sequence for Psme4 (NM_134013.2,958-976).
gggcgttggctgaacaagt

SEQ ID NO: 749953 - DNA, 19 bp, Mus musculus
  siRNA target sequence for Psme4 (NM_134013.2,959-977).
ggcgttggctgaacaagtt

SEQ ID NO: 749954 - DNA, 19 bp, Mus musculus
  siRNA target sequence for Psme4 (NM_134013.2,960-978).
gcgttggctgaacaagtta

SEQ ID NO: 749955 - DNA, 19 bp, Mus musculus
  siRNA target sequence for Psme4 (NM_134013.2,961-979).
cgttggctgaacaagttaa

SEQ ID NO: 749956 - DNA, 19 bp, Mus musculus
  siRNA target sequence for Psme4 (NM_134013.2,966-984).
gctgaacaagttaatgaaa

SEQ ID NO: 749957 - DNA, 19 bp, Mus musculus
  siRNA target sequence for Psme4 (NM_134013.2,1005-1023).
cagtgttgttaggagatta

SEQ ID NO: 749958 - DNA, 19 bp, Mus musculus
  siRNA target sequence for Psme4 (NM_134013.2,1007-1025).
gtgttgttaggagattaca

SEQ ID NO: 749959 - DNA, 19 bp, Mus musculus
  siRNA target sequence for Psme4 (NM_134013.2,1019-1037).
gattacatcgtgaaagatt

SEQ ID NO: 749960 - DNA, 19 bp, Mus musculus
  siRNA target sequence for Psme4 (NM_134013.2,1066-1084).
cctgaaagccataagctta

SEQ ID NO: 749961 - DNA, 19 bp, Mus musculus
  siRNA target sequence for Psme4 (NM_134013.2,1137-1155).
ggctatgtttagcaaaact

SEQ ID NO: 749962 - DNA, 19 bp, Mus musculus
  siRNA target sequence for Psme4 (NM_134013.2,1219-1237).
ccccctgtgcttgaaagaa

SEQ ID NO: 749963 - DNA, 19 bp, Mus musculus
  siRNA target sequence for Psme4 (NM_134013.2,1242-1260).
ccctgctttagagacatta

SEQ ID NO: 749964 - DNA, 19 bp, Mus musculus
  siRNA target sequence for Psme4 (NM_134013.2,1247-1265).
ctttagagacattaacaga

SEQ ID NO: 749965 - DNA, 19 bp, Mus musculus
  siRNA target sequence for Psme4 (NM_134013.2,1273-1291).
cagctcacagctactttaa

SEQ ID NO: 749966 - DNA, 19 bp, Mus musculus
  siRNA target sequence for Psme4 (NM_134013.2,1275-1293).
gctcacagctactttaaat

SEQ ID NO: 749967 - DNA, 19 bp, Mus musculus
  siRNA target sequence for Psme4 (NM_134013.2,1278-1296).
cacagctactttaaattgt

SEQ ID NO: 749968 - DNA, 19 bp, Mus musculus
  siRNA target sequence for Psme4 (NM_134013.2,1306-1324).
gtagcccgaagtttggtat

SEQ ID NO: 749969 - DNA, 19 bp, Mus musculus
  siRNA target sequence for Psme4 (NM_134013.2,1393-1411).
gtagatccaaacgacttta

SEQ ID NO: 749970 - DNA, 19 bp, Mus musculus
  siRNA target sequence for Psme4 (NM_134013.2,1399-1417).
ccaaacgactttagtaagt

SEQ ID NO: 749971 - DNA, 19 bp, Mus musculus
  siRNA target sequence for Psme4 (NM_134013.2,1412-1430).
gtaagtgcatgatcacatt

SEQ ID NO: 749972 - DNA, 19 bp, Mus musculus
  siRNA target sequence for Psme4 (NM_134013.2,1418-1436).
gcatgatcacattccaatt

SEQ ID NO: 749973 - DNA, 19 bp, Mus musculus
  siRNA target sequence for Psme4 (NM_134013.2,1422-1440).
gatcacattccaatttata

SEQ ID NO: 749974 - DNA, 19 bp, Mus musculus
  siRNA target sequence for Psme4 (NM_134013.2,1462-1480).
cctttagtagactgttcat

SEQ ID NO: 749975 - DNA, 19 bp, Mus musculus
  siRNA target sequence for Psme4 (NM_134013.2,1549-1567).
gaggattttgtgttacaat

SEQ ID NO: 749976 - DNA, 19 bp, Mus musculus
  siRNA target sequence for Psme4 (NM_134013.2,1551-1569).
ggattttgtgttacaattt

SEQ ID NO: 749977 - DNA, 19 bp, Mus musculus
  siRNA target sequence for Psme4 (NM_134013.2,1577-1595).
gatgctttggactaataga

SEQ ID NO: 749978 - DNA, 19 bp, Mus musculus
  siRNA target sequence for Psme4 (NM_134013.2,1653-1671).
ggagagtttggttgaatta

SEQ ID NO: 749979 - DNA, 19 bp, Mus musculus
  siRNA target sequence for Psme4 (NM_134013.2,1679-1697).
cttctacgtttagtacaat

SEQ ID NO: 749980 - DNA, 19 bp, Mus musculus
  siRNA target sequence for Psme4 (NM_134013.2,1698-1716).
cctcacacaatgttccaaa

SEQ ID NO: 749981 - DNA, 19 bp, Mus musculus
  siRNA target sequence for Psme4 (NM_134013.2,1705-1723).
caatgttccaaagacatat

SEQ ID NO: 749982 - DNA, 19 bp, Mus musculus
  siRNA target sequence for Psme4 (NM_134013.2,1735-1753).
cttcagaaggtctttaact

SEQ ID NO: 749983 - DNA, 19 bp, Mus musculus
  siRNA target sequence for Psme4 (NM_134013.2,1738-1756).
cagaaggtctttaactttt

SEQ ID NO: 749984 - DNA, 19 bp, Mus musculus
  siRNA target sequence for Psme4 (NM_134013.2,1743-1761).
ggtctttaacttttctgtt

SEQ ID NO: 749985 - DNA, 19 bp, Mus musculus
  siRNA target sequence for Psme4 (NM_134013.2,1813-1831).
cgagctgctgtgaagtgtt

SEQ ID NO: 749986 - DNA, 19 bp, Mus musculus
  siRNA target sequence for Psme4 (NM_134013.2,1876-1894).
gttataactcagcttacaa

SEQ ID NO: 749987 - DNA, 19 bp, Mus musculus
  siRNA target sequence for Psme4 (NM_134013.2,2019-2037).
gattctccagcgaacctta

SEQ ID NO: 749988 - DNA, 19 bp, Mus musculus
  siRNA target sequence for Psme4 (NM_134013.2,2092-2110).
cttcgttctaccacactaa

SEQ ID NO: 749989 - DNA, 19 bp, Mus musculus
  siRNA target sequence for Psme4 (NM_134013.2,2095-2113).
cgttctaccacactaatct

SEQ ID NO: 749990 - DNA, 19 bp, Mus musculus
  siRNA target sequence for Psme4 (NM_134013.2,2096-2114).
gttctaccacactaatcta

SEQ ID NO: 749991 - DNA, 19 bp, Mus musculus
  siRNA target sequence for Psme4 (NM_134013.2,2186-2204).
ggggtaagcctggagattt

SEQ ID NO: 749992 - DNA, 19 bp, Mus musculus
  siRNA target sequence for Psme4 (NM_134013.2,2188-2206).
ggtaagcctggagatttgt

SEQ ID NO: 749993 - DNA, 19 bp, Mus musculus
  siRNA target sequence for Psme4 (NM_134013.2,2317-2335).
gatggagaacttgaaatgt

SEQ ID NO: 749994 - DNA, 19 bp, Mus musculus
  siRNA target sequence for Psme4 (NM_134013.2,2329-2347).
gaaatgtctagagatgata

SEQ ID NO: 749995 - DNA, 19 bp, Mus musculus
  siRNA target sequence for Psme4 (NM_134013.2,2336-2354).
ctagagatgatattctaca

SEQ ID NO: 749996 - DNA, 19 bp, Mus musculus
  siRNA target sequence for Psme4 (NM_134013.2,2412-2430).
gaaaggagaggcagttact

SEQ ID NO: 749997 - DNA, 19 bp, Mus musculus
  siRNA target sequence for Psme4 (NM_134013.2,2416-2434).
ggagaggcagttactaact

SEQ ID NO: 749998 - DNA, 19 bp, Mus musculus
  siRNA target sequence for Psme4 (NM_134013.2,2417-2435).
gagaggcagttactaactt

SEQ ID NO: 749999 - DNA, 19 bp, Mus musculus
  siRNA target sequence for Psme4 (NM_134013.2,2508-2526).
ctaccgagaagtaattgct

SEQ ID NO: 750000 - DNA, 19 bp, Mus musculus
  siRNA target sequence for Psme4 (NM_134013.2,2518-2536).
gtaattgctagtgtcataa

SEQ ID NO: 750001 - DNA, 19 bp, Mus musculus
  siRNA target sequence for Psme4 (NM_134013.2,2545-2563).
cttagccacatacttgata

SEQ ID NO: 750002 - DNA, 19 bp, Mus musculus
  siRNA target sequence for Psme4 (NM_134013.2,2585-2603).
cactgtttctcatcataaa

SEQ ID NO: 750003 - DNA, 19 bp, Mus musculus
  siRNA target sequence for Psme4 (NM_134013.2,2623-2641).
cacttccaaggatctcata

SEQ ID NO: 750004 - DNA, 19 bp, Mus musculus
  siRNA target sequence for Psme4 (NM_134013.2,2663-2681).
ggaaaagctttaacttagt

SEQ ID NO: 750005 - DNA, 19 bp, Mus musculus
  siRNA target sequence for Psme4 (NM_134013.2,2664-2682).
gaaaagctttaacttagta

SEQ ID NO: 750006 - DNA, 19 bp, Mus musculus
  siRNA target sequence for Psme4 (NM_134013.2,2718-2736).
gcaacatatcagagcatta

SEQ ID NO: 750007 - DNA, 19 bp, Mus musculus
  siRNA target sequence for Psme4 (NM_134013.2,2761-2779).
catgagttgcgaacactaa

SEQ ID NO: 750008 - DNA, 19 bp, Mus musculus
  siRNA target sequence for Psme4 (NM_134013.2,2766-2784).
gttgcgaacactaactgtt

SEQ ID NO: 750009 - DNA, 19 bp, Mus musculus
  siRNA target sequence for Psme4 (NM_134013.2,2792-2810).
gtgagtacaaaaaaataca

SEQ ID NO: 750010 - DNA, 19 bp, Mus musculus
  siRNA target sequence for Psme4 (NM_134013.2,2823-2841).
cagagatcttcttcgatta

SEQ ID NO: 750011 - DNA, 19 bp, Mus musculus
  siRNA target sequence for Psme4 (NM_134013.2,2827-2845).
gatcttcttcgattatcaa

SEQ ID NO: 750012 - DNA, 19 bp, Mus musculus
  siRNA target sequence for Psme4 (NM_134013.2,2852-2870).
catacagtcaggtcagaaa

SEQ ID NO: 750013 - DNA, 19 bp, Mus musculus
  siRNA target sequence for Psme4 (NM_134013.2,2894-2912).
ctgctttgggggcatataa

SEQ ID NO: 750014 - DNA, 19 bp, Mus musculus
  siRNA target sequence for Psme4 (NM_134013.2,2896-2914).
gctttgggggcatataact

SEQ ID NO: 750015 - DNA, 19 bp, Mus musculus
  siRNA target sequence for Psme4 (NM_134013.2,2897-2915).
ctttgggggcatataactt

SEQ ID NO: 750016 - DNA, 19 bp, Mus musculus
  siRNA target sequence for Psme4 (NM_134013.2,2902-2920).
ggggcatataacttctgtt

SEQ ID NO: 750017 - DNA, 19 bp, Mus musculus
  siRNA target sequence for Psme4 (NM_134013.2,2997-3015).
cgccttatattgtctactt

SEQ ID NO: 750018 - DNA, 19 bp, Mus musculus
  siRNA target sequence for Psme4 (NM_134013.2,3037-3055).
ctggcaaaccttcatgatt

SEQ ID NO: 750019 - DNA, 19 bp, Mus musculus
  siRNA target sequence for Psme4 (NM_134013.2,3072-3090).
gacctggccagcacttgtt

SEQ ID NO: 750020 - DNA, 19 bp, Mus musculus
  siRNA target sequence for Psme4 (NM_134013.2,3116-3134).
cactggaaaagccatcaat

SEQ ID NO: 750021 - DNA, 19 bp, Mus musculus
  siRNA target sequence for Psme4 (NM_134013.2,3127-3145).
ccatcaatagtgagactat

SEQ ID NO: 750022 - DNA, 19 bp, Mus musculus
  siRNA target sequence for Psme4 (NM_134013.2,3128-3146).
catcaatagtgagactatt

SEQ ID NO: 750023 - DNA, 19 bp, Mus musculus
  siRNA target sequence for Psme4 (NM_134013.2,3131-3149).
caatagtgagactatttga

SEQ ID NO: 750024 - DNA, 19 bp, Mus musculus
  siRNA target sequence for Psme4 (NM_134013.2,3213-3231).
gtcatgtgctgcaatagca

SEQ ID NO: 750025 - DNA, 19 bp, Mus musculus
  siRNA target sequence for Psme4 (NM_134013.2,3261-3279).
cattagccagacactactt

SEQ ID NO: 750026 - DNA, 19 bp, Mus musculus
  siRNA target sequence for Psme4 (NM_134013.2,3272-3290).
cactacttagcccagaaaa

SEQ ID NO: 750027 - DNA, 19 bp, Mus musculus
  siRNA target sequence for Psme4 (NM_134013.2,3277-3295).
cttagcccagaaaagatta

SEQ ID NO: 750028 - DNA, 19 bp, Mus musculus
  siRNA target sequence for Psme4 (NM_134013.2,3302-3320).
gacagaagcgtcaacaaga

SEQ ID NO: 750029 - DNA, 19 bp, Mus musculus
  siRNA target sequence for Psme4 (NM_134013.2,3304-3322).
cagaagcgtcaacaagata

SEQ ID NO: 750030 - DNA, 19 bp, Mus musculus
  siRNA target sequence for Psme4 (NM_134013.2,3309-3327).
gcgtcaacaagataagaat

SEQ ID NO: 750031 - DNA, 19 bp, Mus musculus
  siRNA target sequence for Psme4 (NM_134013.2,3357-3375).
ggtaaatactttactagat

SEQ ID NO: 750032 - DNA, 19 bp, Mus musculus
  siRNA target sequence for Psme4 (NM_134013.2,3463-3481).
cctcttcgtgccatacgtt

SEQ ID NO: 750033 - DNA, 19 bp, Mus musculus
  siRNA target sequence for Psme4 (NM_134013.2,3464-3482).
ctcttcgtgccatacgttt

SEQ ID NO: 750034 - DNA, 19 bp, Mus musculus
  siRNA target sequence for Psme4 (NM_134013.2,3473-3491).
ccatacgtttttttgttga

SEQ ID NO: 750035 - DNA, 19 bp, Mus musculus
  siRNA target sequence for Psme4 (NM_134013.2,3509-3527).
caattgttgttcgaaagat

SEQ ID NO: 750036 - DNA, 19 bp, Mus musculus
  siRNA target sequence for Psme4 (NM_134013.2,3534-3552).
ctcagctgttgctggtatt

SEQ ID NO: 750037 - DNA, 19 bp, Mus musculus
  siRNA target sequence for Psme4 (NM_134013.2,3538-3556).
gctgttgctggtattctca

SEQ ID NO: 750038 - DNA, 19 bp, Mus musculus
  siRNA target sequence for Psme4 (NM_134013.2,3548-3566).
gtattctcaagcagctaaa

SEQ ID NO: 750039 - DNA, 19 bp, Mus musculus
  siRNA target sequence for Psme4 (NM_134013.2,3585-3603).
gactatcaacccttatgaa

SEQ ID NO: 750040 - DNA, 19 bp, Mus musculus
  siRNA target sequence for Psme4 (NM_134013.2,3587-3605).
ctatcaacccttatgaaat

SEQ ID NO: 750041 - DNA, 19 bp, Mus musculus
  siRNA target sequence for Psme4 (NM_134013.2,3638-3656).
ctggtgatagacctgataa

SEQ ID NO: 750042 - DNA, 19 bp, Mus musculus
  siRNA target sequence for Psme4 (NM_134013.2,3647-3665).
gacctgataaccattggtt

SEQ ID NO: 750043 - DNA, 19 bp, Mus musculus
  siRNA target sequence for Psme4 (NM_134013.2,3657-3675).
ccattggttgcattatgat

SEQ ID NO: 750044 - DNA, 19 bp, Mus musculus
  siRNA target sequence for Psme4 (NM_134013.2,3662-3680).
ggttgcattatgatagtaa

SEQ ID NO: 750045 - DNA, 19 bp, Mus musculus
  siRNA target sequence for Psme4 (NM_134013.2,3663-3681).
gttgcattatgatagtaaa

SEQ ID NO: 750046 - DNA, 19 bp, Mus musculus
  siRNA target sequence for Psme4 (NM_134013.2,3747-3765).
ctacaactggccaaagaat

SEQ ID NO: 750047 - DNA, 19 bp, Mus musculus
  siRNA target sequence for Psme4 (NM_134013.2,3757-3775).
ccaaagaatatggttgttt

SEQ ID NO: 750048 - DNA, 19 bp, Mus musculus
  siRNA target sequence for Psme4 (NM_134013.2,3809-3827).
gaagcagggaggatatgat

SEQ ID NO: 750049 - DNA, 19 bp, Mus musculus
  siRNA target sequence for Psme4 (NM_134013.2,3825-3843).
gatagaggcagaacagatt

SEQ ID NO: 750050 - DNA, 19 bp, Mus musculus
  siRNA target sequence for Psme4 (NM_134013.2,3840-3858).
gattatatatgatcgtttt

SEQ ID NO: 750051 - DNA, 19 bp, Mus musculus
  siRNA target sequence for Psme4 (NM_134013.2,3879-3897).
gcagttaatcacatttcta

SEQ ID NO: 750052 - DNA, 19 bp, Mus musculus
  siRNA target sequence for Psme4 (NM_134013.2,3951-3969).
ctttaagggtatatttaga

SEQ ID NO: 750053 - DNA, 19 bp, Mus musculus
  siRNA target sequence for Psme4 (NM_134013.2,4016-4034).
gtttggttgcagattctca

SEQ ID NO: 750054 - DNA, 19 bp, Mus musculus
  siRNA target sequence for Psme4 (NM_134013.2,4020-4038).
ggttgcagattctcatgaa

SEQ ID NO: 750055 - DNA, 19 bp, Mus musculus
  siRNA target sequence for Psme4 (NM_134013.2,4021-4039).
gttgcagattctcatgaaa

SEQ ID NO: 750056 - DNA, 19 bp, Mus musculus
  siRNA target sequence for Psme4 (NM_134013.2,4073-4091).
gtttaatcagaggttctaa

SEQ ID NO: 750057 - DNA, 19 bp, Mus musculus
  siRNA target sequence for Psme4 (NM_134013.2,4167-4185).
gacagtggagacatacaat

SEQ ID NO: 750058 - DNA, 19 bp, Mus musculus
  siRNA target sequence for Psme4 (NM_134013.2,4171-4189).
gtggagacatacaatgact

SEQ ID NO: 750059 - DNA, 19 bp, Mus musculus
  siRNA target sequence for Psme4 (NM_134013.2,4260-4278).
cttggagtcaccattgagt

SEQ ID NO: 750060 - DNA, 19 bp, Mus musculus
  siRNA target sequence for Psme4 (NM_134013.2,4349-4367).
ggagagtccctgaactatt

SEQ ID NO: 750061 - DNA, 19 bp, Mus musculus
  siRNA target sequence for Psme4 (NM_134013.2,4439-4457).
gtgtgctgacctacatatt

SEQ ID NO: 750062 - DNA, 19 bp, Mus musculus
  siRNA target sequence for Psme4 (NM_134013.2,4449-4467).
ctacatatttatgatagat

SEQ ID NO: 750063 - DNA, 19 bp, Mus musculus
  siRNA target sequence for Psme4 (NM_134013.2,4452-4470).
catatttatgatagatgtt

SEQ ID NO: 750064 - DNA, 19 bp, Mus musculus
  siRNA target sequence for Psme4 (NM_134013.2,4465-4483).
gatgtttctttgccaaata

SEQ ID NO: 750065 - DNA, 19 bp, Mus musculus
  siRNA target sequence for Psme4 (NM_134013.2,4523-4541).
ctcgcgtcctagaaaaact

SEQ ID NO: 750066 - DNA, 19 bp, Mus musculus
  siRNA target sequence for Psme4 (NM_134013.2,4525-4543).
cgcgtcctagaaaaactga

SEQ ID NO: 750067 - DNA, 19 bp, Mus musculus
  siRNA target sequence for Psme4 (NM_134013.2,4526-4544).
gcgtcctagaaaaactgaa

SEQ ID NO: 750068 - DNA, 19 bp, Mus musculus
  siRNA target sequence for Psme4 (NM_134013.2,4598-4616).
gcattggtgaagaagatga

SEQ ID NO: 750069 - DNA, 19 bp, Mus musculus
  siRNA target sequence for Psme4 (NM_134013.2,4622-4640).
ctcagggcattaaactctt

SEQ ID NO: 750070 - DNA, 19 bp, Mus musculus
  siRNA target sequence for Psme4 (NM_134013.2,4624-4642).
cagggcattaaactcttaa

SEQ ID NO: 750071 - DNA, 19 bp, Mus musculus
  siRNA target sequence for Psme4 (NM_134013.2,4626-4644).
gggcattaaactcttaaaa

SEQ ID NO: 750072 - DNA, 19 bp, Mus musculus
  siRNA target sequence for Psme4 (NM_134013.2,4734-4752).
gatcgctccagtggaaaat

SEQ ID NO: 750073 - DNA, 19 bp, Mus musculus
  siRNA target sequence for Psme4 (NM_134013.2,4741-4759).
ccagtggaaaatgacaata

SEQ ID NO: 750074 - DNA, 19 bp, Mus musculus
  siRNA target sequence for Psme4 (NM_134013.2,4789-4807).
ctctgtttgtcactaatgt

SEQ ID NO: 750075 - DNA, 19 bp, Mus musculus
  siRNA target sequence for Psme4 (NM_134013.2,4877-4895).
gttcttggcatgcaagata

SEQ ID NO: 750076 - DNA, 19 bp, Mus musculus
  siRNA target sequence for Psme4 (NM_134013.2,4883-4901).
ggcatgcaagatatacagt

SEQ ID NO: 750077 - DNA, 19 bp, Mus musculus
  siRNA target sequence for Psme4 (NM_134013.2,4974-4992).
catcagatggctgattata

SEQ ID NO: 750078 - DNA, 19 bp, Mus musculus
  siRNA target sequence for Psme4 (NM_134013.2,5031-5049).
ggctgctaccaccttaagt

SEQ ID NO: 750079 - DNA, 19 bp, Mus musculus
  siRNA target sequence for Psme4 (NM_134013.2,5040-5058).
caccttaagtggtctgtta

SEQ ID NO: 750080 - DNA, 19 bp, Mus musculus
  siRNA target sequence for Psme4 (NM_134013.2,5048-5066).
gtggtctgttacagtgtaa

SEQ ID NO: 750081 - DNA, 19 bp, Mus musculus
  siRNA target sequence for Psme4 (NM_134013.2,5050-5068).
ggtctgttacagtgtaact

SEQ ID NO: 750082 - DNA, 19 bp, Mus musculus
  siRNA target sequence for Psme4 (NM_134013.2,5084-5102).
gtgctatgcagattcattt

SEQ ID NO: 750083 - DNA, 19 bp, Mus musculus
  siRNA target sequence for Psme4 (NM_134013.2,5215-5233).
cttggtgcatgtgttcttt

SEQ ID NO: 750084 - DNA, 19 bp, Mus musculus
  siRNA target sequence for Psme4 (NM_134013.2,5283-5301).
cagtgcacatttgaatgat

SEQ ID NO: 750085 - DNA, 19 bp, Mus musculus
  siRNA target sequence for Psme4 (NM_134013.2,5308-5326).
cctattgagatgactgtaa

SEQ ID NO: 750086 - DNA, 19 bp, Mus musculus
  siRNA target sequence for Psme4 (NM_134013.2,5309-5327).
ctattgagatgactgtaaa

SEQ ID NO: 750087 - DNA, 19 bp, Mus musculus
  siRNA target sequence for Psme4 (NM_134013.2,5348-5366).
gaaggacacatcatgacaa

SEQ ID NO: 750088 - DNA, 19 bp, Mus musculus
  siRNA target sequence for Psme4 (NM_134013.2,5424-5442).
ccttgtgtcaccatgctat

SEQ ID NO: 750089 - DNA, 19 bp, Mus musculus
  siRNA target sequence for Psme4 (NM_134013.2,5430-5448).
gtcaccatgctattatgca

SEQ ID NO: 750090 - DNA, 19 bp, Mus musculus
  siRNA target sequence for Xpo1 (NM_134014.2,413-431).
ccagcaattatgacaatgt

SEQ ID NO: 750091 - DNA, 19 bp, Mus musculus
  siRNA target sequence for Xpo1 (NM_134014.2,414-432).
cagcaattatgacaatgtt

SEQ ID NO: 750092 - DNA, 19 bp, Mus musculus
  siRNA target sequence for Xpo1 (NM_134014.2,457-475).
gcttgatttcagccaaaaa

SEQ ID NO: 750093 - DNA, 19 bp, Mus musculus
  siRNA target sequence for Xpo1 (NM_134014.2,468-486).
gccaaaaactggatatcaa

SEQ ID NO: 750094 - DNA, 19 bp, Mus musculus
  siRNA target sequence for Xpo1 (NM_134014.2,494-512).
gacaacgtggtgaattgct

SEQ ID NO: 750095 - DNA, 19 bp, Mus musculus
  siRNA target sequence for Xpo1 (NM_134014.2,496-514).
caacgtggtgaattgctta

SEQ ID NO: 750096 - DNA, 19 bp, Mus musculus
  siRNA target sequence for Xpo1 (NM_134014.2,502-520).
ggtgaattgcttataccat

SEQ ID NO: 750097 - DNA, 19 bp, Mus musculus
  siRNA target sequence for Xpo1 (NM_134014.2,588-606).
ggacacgggtcgacacaat

SEQ ID NO: 750098 - DNA, 19 bp, Mus musculus
  siRNA target sequence for Xpo1 (NM_134014.2,589-607).
gacacgggtcgacacaata

SEQ ID NO: 750099 - DNA, 19 bp, Mus musculus
  siRNA target sequence for Xpo1 (NM_134014.2,591-609).
cacgggtcgacacaatatt

SEQ ID NO: 750100 - DNA, 19 bp, Mus musculus
  siRNA target sequence for Xpo1 (NM_134014.2,594-612).
gggtcgacacaatattgga

SEQ ID NO: 750101 - DNA, 19 bp, Mus musculus
  siRNA target sequence for Xpo1 (NM_134014.2,625-643).
catgaacacgaaatactat

SEQ ID NO: 750102 - DNA, 19 bp, Mus musculus
  siRNA target sequence for Xpo1 (NM_134014.2,697-715).
gaaccagtgtgaaggaata

SEQ ID NO: 750103 - DNA, 19 bp, Mus musculus
  siRNA target sequence for Xpo1 (NM_134014.2,725-743).
gttgttggtctcattatca

SEQ ID NO: 750104 - DNA, 19 bp, Mus musculus
  siRNA target sequence for Xpo1 (NM_134014.2,731-749).
ggtctcattatcaagacat

SEQ ID NO: 750105 - DNA, 19 bp, Mus musculus
  siRNA target sequence for Xpo1 (NM_134014.2,757-775).
cccaacttgtgtagagaaa

SEQ ID NO: 750106 - DNA, 19 bp, Mus musculus
  siRNA target sequence for Xpo1 (NM_134014.2,759-777).
caacttgtgtagagaaaga

SEQ ID NO: 750107 - DNA, 19 bp, Mus musculus
  siRNA target sequence for Xpo1 (NM_134014.2,837-855).
ctaagcattggccaacttt

SEQ ID NO: 750108 - DNA, 19 bp, Mus musculus
  siRNA target sequence for Xpo1 (NM_134014.2,842-860).
cattggccaacttttatca

SEQ ID NO: 750109 - DNA, 19 bp, Mus musculus
  siRNA target sequence for Xpo1 (NM_134014.2,852-870).
cttttatcagtgacattgt

SEQ ID NO: 750110 - DNA, 19 bp, Mus musculus
  siRNA target sequence for Xpo1 (NM_134014.2,877-895).
gagtaggaccagtgaaagt

SEQ ID NO: 750111 - DNA, 19 bp, Mus musculus
  siRNA target sequence for Xpo1 (NM_134014.2,879-897).
gtaggaccagtgaaagtct

SEQ ID NO: 750112 - DNA, 19 bp, Mus musculus
  siRNA target sequence for Xpo1 (NM_134014.2,883-901).
gaccagtgaaagtctatgt

SEQ ID NO: 750113 - DNA, 19 bp, Mus musculus
  siRNA target sequence for Xpo1 (NM_134014.2,890-908).
gaaagtctatgtcaaaata

SEQ ID NO: 750114 - DNA, 19 bp, Mus musculus
  siRNA target sequence for Xpo1 (NM_134014.2,928-946).
cttgagtgaagaagtgttt

SEQ ID NO: 750115 - DNA, 19 bp, Mus musculus
  siRNA target sequence for Xpo1 (NM_134014.2,931-949).
gagtgaagaagtgtttgat

SEQ ID NO: 750116 - DNA, 19 bp, Mus musculus
  siRNA target sequence for Xpo1 (NM_134014.2,1000-1018).
catgtgcaatgagttttca

SEQ ID NO: 750117 - DNA, 19 bp, Mus musculus
  siRNA target sequence for Xpo1 (NM_134014.2,1003-1021).
gtgcaatgagttttcacaa

SEQ ID NO: 750118 - DNA, 19 bp, Mus musculus
  siRNA target sequence for Xpo1 (NM_134014.2,1068-1086).
cccttgttcatgctacatt

SEQ ID NO: 750119 - DNA, 19 bp, Mus musculus
  siRNA target sequence for Xpo1 (NM_134014.2,1073-1091).
gttcatgctacattagaaa

SEQ ID NO: 750120 - DNA, 19 bp, Mus musculus
  siRNA target sequence for Xpo1 (NM_134014.2,1119-1137).
cactgggatacatctttga

SEQ ID NO: 750121 - DNA, 19 bp, Mus musculus
  siRNA target sequence for Xpo1 (NM_134014.2,1240-1258).
ccaatatgaggaacaattt

SEQ ID NO: 750122 - DNA, 19 bp, Mus musculus
  siRNA target sequence for Xpo1 (NM_134014.2,1253-1271).
caatttgaaactctgttta

SEQ ID NO: 750123 - DNA, 19 bp, Mus musculus
  siRNA target sequence for Xpo1 (NM_134014.2,1259-1277).
gaaactctgtttacactta

SEQ ID NO: 750124 - DNA, 19 bp, Mus musculus
  siRNA target sequence for Xpo1 (NM_134014.2,1263-1281).
ctctgtttacacttacaat

SEQ ID NO: 750125 - DNA, 19 bp, Mus musculus
  siRNA target sequence for Xpo1 (NM_134014.2,1300-1318).
gcttcctttaaacactaat

SEQ ID NO: 750126 - DNA, 19 bp, Mus musculus
  siRNA target sequence for Xpo1 (NM_134014.2,1314-1332).
ctaatatccgacttgcata

SEQ ID NO: 750127 - DNA, 19 bp, Mus musculus
  siRNA target sequence for Xpo1 (NM_134014.2,1333-1351).
ctcgaatgggaaagatgat

SEQ ID NO: 750128 - DNA, 19 bp, Mus musculus
  siRNA target sequence for Xpo1 (NM_134014.2,1421-1439).
gaaaaacgactgaatctca

SEQ ID NO: 750129 - DNA, 19 bp, Mus musculus
  siRNA target sequence for Xpo1 (NM_134014.2,1454-1472).
gaggctcttcattatatgt

SEQ ID NO: 750130 - DNA, 19 bp, Mus musculus
  siRNA target sequence for Xpo1 (NM_134014.2,1457-1475).
gctcttcattatatgttgt

SEQ ID NO: 750131 - DNA, 19 bp, Mus musculus
  siRNA target sequence for Xpo1 (NM_134014.2,1549-1567).
ctacagagagagtccattt

SEQ ID NO: 750132 - DNA, 19 bp, Mus musculus
  siRNA target sequence for Xpo1 (NM_134014.2,1595-1613).
ggaagtcaacactttgata

SEQ ID NO: 750133 - DNA, 19 bp, Mus musculus
  siRNA target sequence for Xpo1 (NM_134014.2,1596-1614).
gaagtcaacactttgatat

SEQ ID NO: 750134 - DNA, 19 bp, Mus musculus
  siRNA target sequence for Xpo1 (NM_134014.2,1631-1649).
ctgtacttgaccgtgttat

SEQ ID NO: 750135 - DNA, 19 bp, Mus musculus
  siRNA target sequence for Xpo1 (NM_134014.2,1650-1668).
caaaggtccgtttattgat

SEQ ID NO: 750136 - DNA, 19 bp, Mus musculus
  siRNA target sequence for Xpo1 (NM_134014.2,1694-1712).
gaggtactggttgtagaaa

SEQ ID NO: 750137 - DNA, 19 bp, Mus musculus
  siRNA target sequence for Xpo1 (NM_134014.2,1715-1733).
gatcagggagaagttgtaa

SEQ ID NO: 750138 - DNA, 19 bp, Mus musculus
  siRNA target sequence for Xpo1 (NM_134014.2,1738-1756).
gttcatgaaggatactgat

SEQ ID NO: 750139 - DNA, 19 bp, Mus musculus
  siRNA target sequence for Xpo1 (NM_134014.2,1744-1762).
gaaggatactgattccata

SEQ ID NO: 750140 - DNA, 19 bp, Mus musculus
  siRNA target sequence for Xpo1 (NM_134014.2,1747-1765).
ggatactgattccataaat

SEQ ID NO: 750141 - DNA, 19 bp, Mus musculus
  siRNA target sequence for Xpo1 (NM_134014.2,1748-1766).
gatactgattccataaatt

SEQ ID NO: 750142 - DNA, 19 bp, Mus musculus
  siRNA target sequence for Xpo1 (NM_134014.2,1782-1800).
gagaaacattagtttatct

SEQ ID NO: 750143 - DNA, 19 bp, Mus musculus
  siRNA target sequence for Xpo1 (NM_134014.2,1788-1806).
cattagtttatcttactca

SEQ ID NO: 750144 - DNA, 19 bp, Mus musculus
  siRNA target sequence for Xpo1 (NM_134014.2,1824-1842).
cggaaataataatgactaa

SEQ ID NO: 750145 - DNA, 19 bp, Mus musculus
  siRNA target sequence for Xpo1 (NM_134014.2,1856-1874).
caagtgaatggtacagaat

SEQ ID NO: 750146 - DNA, 19 bp, Mus musculus
  siRNA target sequence for Xpo1 (NM_134014.2,1871-1889).
gaatggtcatggaagaatt

SEQ ID NO: 750147 - DNA, 19 bp, Mus musculus
  siRNA target sequence for Xpo1 (NM_134014.2,1918-1936).
catcagtggcgcaatgcat

SEQ ID NO: 750148 - DNA, 19 bp, Mus musculus
  siRNA target sequence for Xpo1 (NM_134014.2,1946-1964).
gagaagcggtttcttgtta

SEQ ID NO: 750149 - DNA, 19 bp, Mus musculus
  siRNA target sequence for Xpo1 (NM_134014.2,1975-1993).
ggatcttttaggattatgt

SEQ ID NO: 750150 - DNA, 19 bp, Mus musculus
  siRNA target sequence for Xpo1 (NM_134014.2,2021-2039).
gctattattgcatcgaata

SEQ ID NO: 750151 - DNA, 19 bp, Mus musculus
  siRNA target sequence for Xpo1 (NM_134014.2,2022-2040).
ctattattgcatcgaatat

SEQ ID NO: 750152 - DNA, 19 bp, Mus musculus
  siRNA target sequence for Xpo1 (NM_134014.2,2030-2048).
gcatcgaatatcatgtaca

SEQ ID NO: 750153 - DNA, 19 bp, Mus musculus
  siRNA target sequence for Xpo1 (NM_134014.2,2031-2049).
catcgaatatcatgtacat

SEQ ID NO: 750154 - DNA, 19 bp, Mus musculus
  siRNA target sequence for Xpo1 (NM_134014.2,2034-2052).
cgaatatcatgtacatagt

SEQ ID NO: 750155 - DNA, 19 bp, Mus musculus
  siRNA target sequence for Xpo1 (NM_134014.2,2035-2053).
gaatatcatgtacatagta

SEQ ID NO: 750156 - DNA, 19 bp, Mus musculus
  siRNA target sequence for Xpo1 (NM_134014.2,2054-2072).
ggtcaatacccaagatttt

SEQ ID NO: 750157 - DNA, 19 bp, Mus musculus
  siRNA target sequence for Xpo1 (NM_134014.2,2078-2096).
gcacactggaaatttttga

SEQ ID NO: 750158 - DNA, 19 bp, Mus musculus
  siRNA target sequence for Xpo1 (NM_134014.2,2100-2118).
cagtagtaaacaagctatt

SEQ ID NO: 750159 - DNA, 19 bp, Mus musculus
  siRNA target sequence for Xpo1 (NM_134014.2,2105-2123).
gtaaacaagctattcgaat

SEQ ID NO: 750160 - DNA, 19 bp, Mus musculus
  siRNA target sequence for Xpo1 (NM_134014.2,2160-2178).
cttgtgacacatttattaa

SEQ ID NO: 750161 - DNA, 19 bp, Mus musculus
  siRNA target sequence for Xpo1 (NM_134014.2,2193-2211).
gccgtaggcattttgttca

SEQ ID NO: 750162 - DNA, 19 bp, Mus musculus
  siRNA target sequence for Xpo1 (NM_134014.2,2233-2251).
gccgttcattgatgagatt

SEQ ID NO: 750163 - DNA, 19 bp, Mus musculus
  siRNA target sequence for Xpo1 (NM_134014.2,2234-2252).
ccgttcattgatgagattt

SEQ ID NO: 750164 - DNA, 19 bp, Mus musculus
  siRNA target sequence for Xpo1 (NM_134014.2,2257-2275).
caacataaatactataatt

SEQ ID NO: 750165 - DNA, 19 bp, Mus musculus
  siRNA target sequence for Xpo1 (NM_134014.2,2287-2305).
gcctcagcaggttcataca

SEQ ID NO: 750166 - DNA, 19 bp, Mus musculus
  siRNA target sequence for Xpo1 (NM_134014.2,2291-2309).
cagcaggttcatacatttt

SEQ ID NO: 750167 - DNA, 19 bp, Mus musculus
  siRNA target sequence for Xpo1 (NM_134014.2,2396-2414).
caagtgtgggacagtataa

SEQ ID NO: 750168 - DNA, 19 bp, Mus musculus
  siRNA target sequence for Xpo1 (NM_134014.2,2468-2486).
cagctgggtagcatattaa

SEQ ID NO: 750169 - DNA, 19 bp, Mus musculus
  siRNA target sequence for Xpo1 (NM_134014.2,2470-2488).
gctgggtagcatattaaaa

SEQ ID NO: 750170 - DNA, 19 bp, Mus musculus
  siRNA target sequence for Xpo1 (NM_134014.2,2471-2489).
ctgggtagcatattaaaaa

SEQ ID NO: 750171 - DNA, 19 bp, Mus musculus
  siRNA target sequence for Xpo1 (NM_134014.2,2473-2491).
gggtagcatattaaaaaca

SEQ ID NO: 750172 - DNA, 19 bp, Mus musculus
  siRNA target sequence for Xpo1 (NM_134014.2,2474-2492).
ggtagcatattaaaaacaa

SEQ ID NO: 750173 - DNA, 19 bp, Mus musculus
  siRNA target sequence for Xpo1 (NM_134014.2,2517-2535).
gtcatccctttgtaattca

SEQ ID NO: 750174 - DNA, 19 bp, Mus musculus
  siRNA target sequence for Xpo1 (NM_134014.2,2555-2573).
gacatgcttaatgtatata

SEQ ID NO: 750175 - DNA, 19 bp, Mus musculus
  siRNA target sequence for Xpo1 (NM_134014.2,2632-2650).
gcaaccattgattagaagt

SEQ ID NO: 750176 - DNA, 19 bp, Mus musculus
  siRNA target sequence for Xpo1 (NM_134014.2,2633-2651).
caaccattgattagaagta

SEQ ID NO: 750177 - DNA, 19 bp, Mus musculus
  siRNA target sequence for Xpo1 (NM_134014.2,2646-2664).
gaagtatgcggacagtaaa

SEQ ID NO: 750178 - DNA, 19 bp, Mus musculus
  siRNA target sequence for Xpo1 (NM_134014.2,2695-2713).
ggtgagccgttccaatgat

SEQ ID NO: 750179 - DNA, 19 bp, Mus musculus
  siRNA target sequence for Xpo1 (NM_134014.2,2749-2767).
gttggatgcagttcttatt

SEQ ID NO: 750180 - DNA, 19 bp, Mus musculus
  siRNA target sequence for Xpo1 (NM_134014.2,2801-2819).
ccagaagtgcttagtacta

SEQ ID NO: 750181 - DNA, 19 bp, Mus musculus
  siRNA target sequence for Xpo1 (NM_134014.2,2802-2820).
cagaagtgcttagtactat

SEQ ID NO: 750182 - DNA, 19 bp, Mus musculus
  siRNA target sequence for Xpo1 (NM_134014.2,2817-2835).
ctatggccattattgtcaa

SEQ ID NO: 750183 - DNA, 19 bp, Mus musculus
  siRNA target sequence for Xpo1 (NM_134014.2,2821-2839).
ggccattattgtcaacaaa

SEQ ID NO: 750184 - DNA, 19 bp, Mus musculus
  siRNA target sequence for Xpo1 (NM_134014.2,2836-2854).
caaattaggtggacatata

SEQ ID NO: 750185 - DNA, 19 bp, Mus musculus
  siRNA target sequence for Xpo1 (NM_134014.2,2858-2876).
gctgaaatacctcaaatat

SEQ ID NO: 750186 - DNA, 19 bp, Mus musculus
  siRNA target sequence for Xpo1 (NM_134014.2,2859-2877).
ctgaaatacctcaaatatt

SEQ ID NO: 750187 - DNA, 19 bp, Mus musculus
  siRNA target sequence for Xpo1 (NM_134014.2,2885-2903).
gtttttgagtgcacattga

SEQ ID NO: 750188 - DNA, 19 bp, Mus musculus
  siRNA target sequence for Xpo1 (NM_134014.2,2895-2913).
gcacattgaatatgataaa

SEQ ID NO: 750189 - DNA, 19 bp, Mus musculus
  siRNA target sequence for Xpo1 (NM_134014.2,2989-3007).
cccagcattcctagctatt

SEQ ID NO: 750190 - DNA, 19 bp, Mus musculus
  siRNA target sequence for Xpo1 (NM_134014.2,3039-3057).
ctattatttgggcttttaa

SEQ ID NO: 750191 - DNA, 19 bp, Mus musculus
  siRNA target sequence for Xpo1 (NM_134014.2,3067-3085).
gaggaatgttgcagataca

SEQ ID NO: 750192 - DNA, 19 bp, Mus musculus
  siRNA target sequence for Xpo1 (NM_134014.2,3135-3153).
ctgccgcacagagttttta

SEQ ID NO: 750193 - DNA, 19 bp, Mus musculus
  siRNA target sequence for Xpo1 (NM_134014.2,3138-3156).
ccgcacagagtttttatca

SEQ ID NO: 750194 - DNA, 19 bp, Mus musculus
  siRNA target sequence for Xpo1 (NM_134014.2,3139-3157).
cgcacagagtttttatcaa

SEQ ID NO: 750195 - DNA, 19 bp, Mus musculus
  siRNA target sequence for Xpo1 (NM_134014.2,3228-3246).
caatgcatgcatcaattct

SEQ ID NO: 750196 - DNA, 19 bp, Mus musculus
  siRNA target sequence for Xpo1 (NM_134014.2,3341-3359).
gtggctaatctccttaaat

SEQ ID NO: 750197 - DNA, 19 bp, Mus musculus
  siRNA target sequence for Xpo1 (NM_134014.2,3384-3402).
ctcaagtaaagctctttgt

SEQ ID NO: 750198 - DNA, 19 bp, Mus musculus
  siRNA target sequence for Xpo1 (NM_134014.2,3386-3404).
caagtaaagctctttgtaa

SEQ ID NO: 750199 - DNA, 19 bp, Mus musculus
  siRNA target sequence for Xpo1 (NM_134014.2,3415-3433).
cagcttaaatcaggatatt

SEQ ID NO: 750200 - DNA, 19 bp, Mus musculus
  siRNA target sequence for Xpo1 (NM_134014.2,3418-3436).
cttaaatcaggatattcct

SEQ ID NO: 750201 - DNA, 19 bp, Mus musculus
  siRNA target sequence for Xpo1 (NM_134014.2,3478-3496).
ggagtttgcaggtgaagat

SEQ ID NO: 750202 - DNA, 19 bp, Mus musculus
  siRNA target sequence for Xpo1 (NM_134014.2,3491-3509).
gaagatacatcggatctat

SEQ ID NO: 750203 - DNA, 19 bp, Mus musculus
  siRNA target sequence for Xpo1 (NM_134014.2,3494-3512).
gatacatcggatctatttt

SEQ ID NO: 750204 - DNA, 19 bp, Mus musculus
  siRNA target sequence for Xpo1 (NM_134014.2,3542-3560).
gctcaggaggagaaacata

SEQ ID NO: 750205 - DNA, 19 bp, Mus musculus
  siRNA target sequence for Xpo1 (NM_134014.2,3571-3589).
gtctgtacctgggattctt

SEQ ID NO: 750206 - DNA, 19 bp, Mus musculus
  siRNA target sequence for Xpo1 (NM_134014.2,3605-3623).
ccagaagaaatgtgtgatt

SEQ ID NO: 750207 - DNA, 19 bp, Mus musculus
  siRNA target sequence for Fbxw1b (NM_134015.1,22-40).
gcccgactcggtgattgaa

SEQ ID NO: 750208 - DNA, 19 bp, Mus musculus
  siRNA target sequence for Fbxw1b (NM_134015.1,171-189).
cagttatggaagatcaaaa

SEQ ID NO: 750209 - DNA, 19 bp, Mus musculus
  siRNA target sequence for Fbxw1b (NM_134015.1,215-233).
gctctttggcagatcagta

SEQ ID NO: 750210 - DNA, 19 bp, Mus musculus
  siRNA target sequence for Fbxw1b (NM_134015.1,237-255).
gaacgtcatctgtgattgt

SEQ ID NO: 750211 - DNA, 19 bp, Mus musculus
  siRNA target sequence for Fbxw1b (NM_134015.1,299-317).
gacttgtgcattaagtact

SEQ ID NO: 750212 - DNA, 19 bp, Mus musculus
  siRNA target sequence for Fbxw1b (NM_134015.1,454-472).
gcaaggcttagatcacata

SEQ ID NO: 750213 - DNA, 19 bp, Mus musculus
  siRNA target sequence for Fbxw1b (NM_134015.1,639-657).
gggatcagtacctgtttaa

SEQ ID NO: 750214 - DNA, 19 bp, Mus musculus
  siRNA target sequence for Fbxw1b (NM_134015.1,675-693).
gccctcccaactcatttta

SEQ ID NO: 750215 - DNA, 19 bp, Mus musculus
  siRNA target sequence for Fbxw1b (NM_134015.1,696-714).
gatcattatacccaaagat

SEQ ID NO: 750216 - DNA, 19 bp, Mus musculus
  siRNA target sequence for Fbxw1b (NM_134015.1,722-740).
gacatagagaccatagaat

SEQ ID NO: 750217 - DNA, 19 bp, Mus musculus
  siRNA target sequence for Fbxw1b (NM_134015.1,750-768).
ggtgtggacgacacaactt

SEQ ID NO: 750218 - DNA, 19 bp, Mus musculus
  siRNA target sequence for Fbxw1b (NM_134015.1,781-799).
gtgccgctctgaaaatagt

SEQ ID NO: 750219 - DNA, 19 bp, Mus musculus
  siRNA target sequence for Fbxw1b (NM_134015.1,783-801).
gccgctctgaaaatagtaa

SEQ ID NO: 750220 - DNA, 19 bp, Mus musculus
  siRNA target sequence for Fbxw1b (NM_134015.1,798-816).
gtaagggtgtctactgttt

SEQ ID NO: 750221 - DNA, 19 bp, Mus musculus
  siRNA target sequence for Fbxw1b (NM_134015.1,802-820).
gggtgtctactgtttgcaa

SEQ ID NO: 750222 - DNA, 19 bp, Mus musculus
  siRNA target sequence for Fbxw1b (NM_134015.1,803-821).
ggtgtctactgtttgcaat

SEQ ID NO: 750223 - DNA, 19 bp, Mus musculus
  siRNA target sequence for Fbxw1b (NM_134015.1,813-831).
gtttgcaatatgatgatga

SEQ ID NO: 750224 - DNA, 19 bp, Mus musculus
  siRNA target sequence for Fbxw1b (NM_134015.1,818-836).
caatatgatgatgacaaaa

SEQ ID NO: 750225 - DNA, 19 bp, Mus musculus
  siRNA target sequence for Fbxw1b (NM_134015.1,845-863).
ggcctccgggacaactcta

SEQ ID NO: 750226 - DNA, 19 bp, Mus musculus
  siRNA target sequence for Fbxw1b (NM_134015.1,846-864).
gcctccgggacaactctat

SEQ ID NO: 750227 - DNA, 19 bp, Mus musculus
  siRNA target sequence for Fbxw1b (NM_134015.1,848-866).
ctccgggacaactctatca

SEQ ID NO: 750228 - DNA, 19 bp, Mus musculus
  siRNA target sequence for Fbxw1b (NM_134015.1,852-870).
gggacaactctatcaagat

SEQ ID NO: 750229 - DNA, 19 bp, Mus musculus
  siRNA target sequence for Fbxw1b (NM_134015.1,940-958).
gtatgatgagcgagtcatt

SEQ ID NO: 750230 - DNA, 19 bp, Mus musculus
  siRNA target sequence for Fbxw1b (NM_134015.1,1121-1139).
gcttctgccaccgatatca

SEQ ID NO: 750231 - DNA, 19 bp, Mus musculus
  siRNA target sequence for Fbxw1b (NM_134015.1,1125-1143).
ctgccaccgatatcacttt

SEQ ID NO: 750232 - DNA, 19 bp, Mus musculus
  siRNA target sequence for Fbxw1b (NM_134015.1,1165-1183).
ccgtgctgctgtcaatgta

SEQ ID NO: 750233 - DNA, 19 bp, Mus musculus
  siRNA target sequence for Fbxw1b (NM_134015.1,1261-1279).
gtttgtccgcactctgaat

SEQ ID NO: 750234 - DNA, 19 bp, Mus musculus
  siRNA target sequence for Fbxw1b (NM_134015.1,1312-1330).
ccgcgaccggcttgttgtt

SEQ ID NO: 750235 - DNA, 19 bp, Mus musculus
  siRNA target sequence for Fbxw1b (NM_134015.1,1313-1331).
cgcgaccggcttgttgtta

SEQ ID NO: 750236 - DNA, 19 bp, Mus musculus
  siRNA target sequence for Fbxw1b (NM_134015.1,1315-1333).
cgaccggcttgttgttagt

SEQ ID NO: 750237 - DNA, 19 bp, Mus musculus
  siRNA target sequence for Fbxw1b (NM_134015.1,1328-1346).
gttagtggatcatcagata

SEQ ID NO: 750238 - DNA, 19 bp, Mus musculus
  siRNA target sequence for Fbxw1b (NM_134015.1,1351-1369).
catccggttatgggatatt

SEQ ID NO: 750239 - DNA, 19 bp, Mus musculus
  siRNA target sequence for Fbxw1b (NM_134015.1,1354-1372).
ccggttatgggatattgaa

SEQ ID NO: 750240 - DNA, 19 bp, Mus musculus
  siRNA target sequence for Fbxw1b (NM_134015.1,1355-1373).
cggttatgggatattgaat

SEQ ID NO: 750241 - DNA, 19 bp, Mus musculus
  siRNA target sequence for Fbxw1b (NM_134015.1,1357-1375).
gttatgggatattgaatgt

SEQ ID NO: 750242 - DNA, 19 bp, Mus musculus
  siRNA target sequence for Fbxw1b (NM_134015.1,1394-1412).
ctagaggggcacgaagaat

SEQ ID NO: 750243 - DNA, 19 bp, Mus musculus
  siRNA target sequence for Fbxw1b (NM_134015.1,1418-1436).
cggtgcatccgttttgata

SEQ ID NO: 750244 - DNA, 19 bp, Mus musculus
  siRNA target sequence for Fbxw1b (NM_134015.1,1419-1437).
ggtgcatccgttttgataa

SEQ ID NO: 750245 - DNA, 19 bp, Mus musculus
  siRNA target sequence for Fbxw1b (NM_134015.1,1433-1451).
gataacaagaggattgtca

SEQ ID NO: 750246 - DNA, 19 bp, Mus musculus
  siRNA target sequence for Fbxw1b (NM_134015.1,1603-1621).
ctcccatgatgacactatt

SEQ ID NO: 750247 - DNA, 19 bp, Mus musculus
  siRNA target sequence for Fbxw1b (NM_134015.1,1680-1698).
ccagaacctacacctatat

SEQ ID NO: 750248 - DNA, 19 bp, Mus musculus
  siRNA target sequence for 6330403K07Rik (NM_134022.1,91-109).
cagagcagatgtatttcga

SEQ ID NO: 750249 - DNA, 19 bp, Mus musculus
  siRNA target sequence for 6330403K07Rik (NM_134022.1,93-111).
gagcagatgtatttcgatt

SEQ ID NO: 750250 - DNA, 19 bp, Mus musculus
  siRNA target sequence for 6330403K07Rik (NM_134022.1,191-209).
ctcggctggcaggaaatct

SEQ ID NO: 750251 - DNA, 19 bp, Mus musculus
  siRNA target sequence for Tbc1d10 (NM_134023.1,838-856).
cagccgccagaagattgat

SEQ ID NO: 750252 - DNA, 19 bp, Mus musculus
  siRNA target sequence for Tbc1d10 (NM_134023.1,972-990).
gcgtggggctggtactact

SEQ ID NO: 750253 - DNA, 19 bp, Mus musculus
  siRNA target sequence for Tbc1d10 (NM_134023.1,1065-1083).
gcctcagccccaagatcat

SEQ ID NO: 750254 - DNA, 19 bp, Mus musculus
  siRNA target sequence for Tbc1d10 (NM_134023.1,1483-1501).
ccctactcctcagaactta

SEQ ID NO: 750255 - DNA, 19 bp, Mus musculus
  siRNA target sequence for 4632423N09Rik (NM_134030.1,143-161).
gtgtcgctttccactgtat

SEQ ID NO: 750256 - DNA, 19 bp, Mus musculus
  siRNA target sequence for 4632423N09Rik (NM_134030.1,215-233).
gtcctgtgctcataagact

SEQ ID NO: 750257 - DNA, 19 bp, Mus musculus
  siRNA target sequence for 4632423N09Rik (NM_134030.1,245-263).
ggacacatttacttcgttt

SEQ ID NO: 750258 - DNA, 19 bp, Mus musculus
  siRNA target sequence for 4632423N09Rik (NM_134030.1,295-313).
ggcaagaagggcttcctta

SEQ ID NO: 750259 - DNA, 19 bp, Mus musculus
  siRNA target sequence for Hoxb2 (NM_134032.1,651-669).
ggcaggattcgccttttct

SEQ ID NO: 750260 - DNA, 19 bp, Mus musculus
  siRNA target sequence for Hoxb2 (NM_134032.1,668-686).
ctaccggacctcaatttct

SEQ ID NO: 750261 - DNA, 19 bp, Mus musculus
  siRNA target sequence for BC018601 (NM_134033.1,275-293).
ggacgtgtttccattcact

SEQ ID NO: 750262 - DNA, 19 bp, Mus musculus
  siRNA target sequence for BC018601 (NM_134033.1,312-330).
ggttggcggaggatgatga

SEQ ID NO: 750263 - DNA, 19 bp, Mus musculus
  siRNA target sequence for BC018601 (NM_134033.1,329-347).
gagtgtccagtaagaaaga

SEQ ID NO: 750264 - DNA, 19 bp, Mus musculus
  siRNA target sequence for BC018601 (NM_134033.1,400-418).
cgcacatcagggaagagaa

SEQ ID NO: 750265 - DNA, 19 bp, Mus musculus
  siRNA target sequence for BC018601 (NM_134033.1,416-434).
gaaggtcatggggtaaaca

SEQ ID NO: 750266 - DNA, 19 bp, Mus musculus
  siRNA target sequence for BC018601 (NM_134033.1,528-546).
gaaggcggctgcaagagat

SEQ ID NO: 750267 - DNA, 19 bp, Mus musculus
  siRNA target sequence for BC018601 (NM_134033.1,531-549).
ggcggctgcaagagattga

SEQ ID NO: 750268 - DNA, 19 bp, Mus musculus
  siRNA target sequence for BC018601 (NM_134033.1,544-562).
gattgaggacaggataatt

SEQ ID NO: 750269 - DNA, 19 bp, Mus musculus
  siRNA target sequence for BC018601 (NM_134033.1,667-685).
cttcacaaagaggatgatt

SEQ ID NO: 750270 - DNA, 19 bp, Mus musculus
  siRNA target sequence for BC018601 (NM_134033.1,690-708).
ctatgagccgtccttctat

SEQ ID NO: 750271 - DNA, 19 bp, Mus musculus
  siRNA target sequence for BC018601 (NM_134033.1,762-780).
catcatctagccctaagaa

SEQ ID NO: 750272 - DNA, 19 bp, Mus musculus
  siRNA target sequence for BC018601 (NM_134033.1,765-783).
catctagccctaagaacta

SEQ ID NO: 750273 - DNA, 19 bp, Mus musculus
  siRNA target sequence for AW011752 (NM_134034.1,337-355).
ggtctatacccttaacgaa

SEQ ID NO: 750274 - DNA, 19 bp, Mus musculus
  siRNA target sequence for AW011752 (NM_134034.1,388-406).
cgtctcctccacttacgta

SEQ ID NO: 750275 - DNA, 19 bp, Mus musculus
  siRNA target sequence for AW011752 (NM_134034.1,447-465).
ccgacggatcgctactctt

SEQ ID NO: 750276 - DNA, 19 bp, Mus musculus
  siRNA target sequence for AW011752 (NM_134034.1,448-466).
cgacggatcgctactctta

SEQ ID NO: 750277 - DNA, 19 bp, Mus musculus
  siRNA target sequence for AW011752 (NM_134034.1,456-474).
cgctactcttagagtcaaa

SEQ ID NO: 750278 - DNA, 19 bp, Mus musculus
  siRNA target sequence for AW011752 (NM_134034.1,461-479).
ctcttagagtcaaagataa

SEQ ID NO: 750279 - DNA, 19 bp, Mus musculus
  siRNA target sequence for AW011752 (NM_134034.1,483-501).
caaacactgcatatcagaa

SEQ ID NO: 750280 - DNA, 19 bp, Mus musculus
  siRNA target sequence for AW011752 (NM_134034.1,499-517).
gaaacagcaggatacatta

SEQ ID NO: 750281 - DNA, 19 bp, Mus musculus
  siRNA target sequence for AW011752 (NM_134034.1,505-523).
gcaggatacattaattgtt

SEQ ID NO: 750282 - DNA, 19 bp, Mus musculus
  siRNA target sequence for AW011752 (NM_134034.1,541-559).
ctatgatctggctctaagt

SEQ ID NO: 750283 - DNA, 19 bp, Mus musculus
  siRNA target sequence for AW011752 (NM_134034.1,550-568).
ggctctaagttttcaagaa

SEQ ID NO: 750284 - DNA, 19 bp, Mus musculus
  siRNA target sequence for AW011752 (NM_134034.1,685-703).
gccagaaactagtcatcta

SEQ ID NO: 750285 - DNA, 19 bp, Mus musculus
  siRNA target sequence for AW011752 (NM_134034.1,686-704).
ccagaaactagtcatctaa

SEQ ID NO: 750286 - DNA, 19 bp, Mus musculus
  siRNA target sequence for AW011752 (NM_134034.1,687-705).
cagaaactagtcatctaat

SEQ ID NO: 750287 - DNA, 19 bp, Mus musculus
  siRNA target sequence for AW011752 (NM_134034.1,777-795).
ctatccgtagggaaaagct

SEQ ID NO: 750288 - DNA, 19 bp, Mus musculus
  siRNA target sequence for AW011752 (NM_134034.1,819-837).
gctatatcaaaaaactact

SEQ ID NO: 750289 - DNA, 19 bp, Mus musculus
  siRNA target sequence for AW011752 (NM_134034.1,820-838).
ctatatcaaaaaactacta

SEQ ID NO: 750290 - DNA, 19 bp, Mus musculus
  siRNA target sequence for AW011752 (NM_134034.1,906-924).
gaggaatcttattcctaaa

SEQ ID NO: 750291 - DNA, 19 bp, Mus musculus
  siRNA target sequence for AW011752 (NM_134034.1,919-937).
cctaaataaggcaacactt

SEQ ID NO: 750292 - DNA, 19 bp, Mus musculus
  siRNA target sequence for AW011752 (NM_134034.1,1006-1024).
ggctcagccaaaaagacat

SEQ ID NO: 750293 - DNA, 19 bp, Mus musculus
  siRNA target sequence for AW011752 (NM_134034.1,1046-1064).
gcaaagtttaaggaagtta

SEQ ID NO: 750294 - DNA, 19 bp, Mus musculus
  siRNA target sequence for AW011752 (NM_134034.1,1080-1098).
cggaactaaggcaaaaaat

SEQ ID NO: 750295 - DNA, 19 bp, Mus musculus
  siRNA target sequence for AW011752 (NM_134034.1,1107-1125).
cttacagggtacagtacat

SEQ ID NO: 750296 - DNA, 19 bp, Mus musculus
  siRNA target sequence for AW011752 (NM_134034.1,1141-1159).
gcctacaccatctgttttt

SEQ ID NO: 750297 - DNA, 19 bp, Mus musculus
  siRNA target sequence for AW011752 (NM_134034.1,1143-1161).
ctacaccatctgtttttga

SEQ ID NO: 750298 - DNA, 19 bp, Mus musculus
  siRNA target sequence for AW011752 (NM_134034.1,1301-1319).
cgcgagttggttaatttct

SEQ ID NO: 750299 - DNA, 19 bp, Mus musculus
  siRNA target sequence for AW011752 (NM_134034.1,1302-1320).
gcgagttggttaatttctt

SEQ ID NO: 750300 - DNA, 19 bp, Mus musculus
  siRNA target sequence for AW011752 (NM_134034.1,1304-1322).
gagttggttaatttcttca

SEQ ID NO: 750301 - DNA, 19 bp, Mus musculus
  siRNA target sequence for AW011752 (NM_134034.1,1306-1324).
gttggttaatttcttcaaa

SEQ ID NO: 750302 - DNA, 19 bp, Mus musculus
  siRNA target sequence for AW011752 (NM_134034.1,1449-1467).
gatcagctgctacagatat

SEQ ID NO: 750303 - DNA, 19 bp, Mus musculus
  siRNA target sequence for AW011752 (NM_134034.1,1461-1479).
cagatatattctcttatct

SEQ ID NO: 750304 - DNA, 19 bp, Mus musculus
  siRNA target sequence for AW011752 (NM_134034.1,1534-1552).
gagtgatgatgatgtactt

SEQ ID NO: 750305 - DNA, 19 bp, Mus musculus
  siRNA target sequence for AW011752 (NM_134034.1,1624-1642).
gggacttcttcgtactcta

SEQ ID NO: 750306 - DNA, 19 bp, Mus musculus
  siRNA target sequence for AW011752 (NM_134034.1,1625-1643).
ggacttcttcgtactctaa

SEQ ID NO: 750307 - DNA, 19 bp, Mus musculus
  siRNA target sequence for AW011752 (NM_134034.1,1626-1644).
gacttcttcgtactctaat

SEQ ID NO: 750308 - DNA, 19 bp, Mus musculus
  siRNA target sequence for AW011752 (NM_134034.1,1657-1675).
catgttggctacaactaat

SEQ ID NO: 750309 - DNA, 19 bp, Mus musculus
  siRNA target sequence for AW011752 (NM_134034.1,1660-1678).
gttggctacaactaataaa

SEQ ID NO: 750310 - DNA, 19 bp, Mus musculus
  siRNA target sequence for AW011752 (NM_134034.1,1663-1681).
ggctacaactaataaaact

SEQ ID NO: 750311 - DNA, 19 bp, Mus musculus
  siRNA target sequence for AW011752 (NM_134034.1,1739-1757).
ccacttttgaccaatacgt

SEQ ID NO: 750312 - DNA, 19 bp, Mus musculus
  siRNA target sequence for AW011752 (NM_134034.1,1749-1767).
ccaatacgtcagaagacaa

SEQ ID NO: 750313 - DNA, 19 bp, Mus musculus
  siRNA target sequence for AW011752 (NM_134034.1,1765-1783).
caaatgcgagaaagataat

SEQ ID NO: 750314 - DNA, 19 bp, Mus musculus
  siRNA target sequence for AW011752 (NM_134034.1,1770-1788).
gcgagaaagataatatgct

SEQ ID NO: 750315 - DNA, 19 bp, Mus musculus
  siRNA target sequence for AW011752 (NM_134034.1,1807-1825).
cacaatttgccctgataat

SEQ ID NO: 750316 - DNA, 19 bp, Mus musculus
  siRNA target sequence for AW011752 (NM_134034.1,1809-1827).
caatttgccctgataatta

SEQ ID NO: 750317 - DNA, 19 bp, Mus musculus
  siRNA target sequence for AW011752 (NM_134034.1,1836-1854).
cacagctgcttgccttaat

SEQ ID NO: 750318 - DNA, 19 bp, Mus musculus
  siRNA target sequence for AW011752 (NM_134034.1,1840-1858).
gctgcttgccttaatttta

SEQ ID NO: 750319 - DNA, 19 bp, Mus musculus
  siRNA target sequence for AW011752 (NM_134034.1,1848-1866).
ccttaattttagagttact

SEQ ID NO: 750320 - DNA, 19 bp, Mus musculus
  siRNA target sequence for AW011752 (NM_134034.1,1932-1950).
gaagagtcttggtgttgat

SEQ ID NO: 750321 - DNA, 19 bp, Mus musculus
  siRNA target sequence for AW011752 (NM_134034.1,1988-2006).
cgctttatgaggcgaataa

SEQ ID NO: 750322 - DNA, 19 bp, Mus musculus
  siRNA target sequence for AW011752 (NM_134034.1,1989-2007).
gctttatgaggcgaataat

SEQ ID NO: 750323 - DNA, 19 bp, Mus musculus
  siRNA target sequence for AW011752 (NM_134034.1,1990-2008).
ctttatgaggcgaataatt

SEQ ID NO: 750324 - DNA, 19 bp, Mus musculus
  siRNA target sequence for AW011752 (NM_134034.1,2033-2051).
cgttacatcaccaaaggaa

SEQ ID NO: 750325 - DNA, 19 bp, Mus musculus
  siRNA target sequence for AW011752 (NM_134034.1,2090-2108).
ggaactcggtacaatcttt

SEQ ID NO: 750326 - DNA, 19 bp, Mus musculus
  siRNA target sequence for AW011752 (NM_134034.1,2091-2109).
gaactcggtacaatctttt

SEQ ID NO: 750327 - DNA, 19 bp, Mus musculus
  siRNA target sequence for AW011752 (NM_134034.1,2161-2179).
gtctcttactgcacatata

SEQ ID NO: 750328 - DNA, 19 bp, Mus musculus
  siRNA target sequence for AW011752 (NM_134034.1,2169-2187).
ctgcacatatagttgaaaa

SEQ ID NO: 750329 - DNA, 19 bp, Mus musculus
  siRNA target sequence for AW011752 (NM_134034.1,2174-2192).
catatagttgaaaactttt

SEQ ID NO: 750330 - DNA, 19 bp, Mus musculus
  siRNA target sequence for AW011752 (NM_134034.1,2198-2216).
gcacttgaatcgattgaat

SEQ ID NO: 750331 - DNA, 19 bp, Mus musculus
  siRNA target sequence for AW011752 (NM_134034.1,2199-2217).
cacttgaatcgattgaata

SEQ ID NO: 750332 - DNA, 19 bp, Mus musculus
  siRNA target sequence for AW011752 (NM_134034.1,2219-2237).
gttcagacattcaaaggat

SEQ ID NO: 750333 - DNA, 19 bp, Mus musculus
  siRNA target sequence for AW011752 (NM_134034.1,2295-2313).
catctatattgcgtagtaa

SEQ ID NO: 750334 - DNA, 19 bp, Mus musculus
  siRNA target sequence for AW011752 (NM_134034.1,2384-2402).
gaaggaaaggcagtcataa

SEQ ID NO: 750335 - DNA, 19 bp, Mus musculus
  siRNA target sequence for AW011752 (NM_134034.1,2396-2414).
gtcataacaccagttgaaa

SEQ ID NO: 750336 - DNA, 19 bp, Mus musculus
  siRNA target sequence for AW011752 (NM_134034.1,2403-2421).
caccagttgaaaaatctaa

SEQ ID NO: 750337 - DNA, 19 bp, Mus musculus
  siRNA target sequence for AW011752 (NM_134034.1,2405-2423).
ccagttgaaaaatctaaga

SEQ ID NO: 750338 - DNA, 19 bp, Mus musculus
  siRNA target sequence for AW011752 (NM_134034.1,2522-2540).
ggtggcttcaaatttactt

SEQ ID NO: 750339 - DNA, 19 bp, Mus musculus
  siRNA target sequence for AW011752 (NM_134034.1,2523-2541).
gtggcttcaaatttacttt

SEQ ID NO: 750340 - DNA, 19 bp, Mus musculus
  siRNA target sequence for AW011752 (NM_134034.1,2607-2625).
caacaccagcaagttctaa

SEQ ID NO: 750341 - DNA, 19 bp, Mus musculus
  siRNA target sequence for AW011752 (NM_134034.1,2629-2647).
ggcctcttccaaaactaca

SEQ ID NO: 750342 - DNA, 19 bp, Mus musculus
  siRNA target sequence for AW011752 (NM_134034.1,2630-2648).
gcctcttccaaaactacaa

SEQ ID NO: 750343 - DNA, 19 bp, Mus musculus
  siRNA target sequence for AW011752 (NM_134034.1,2671-2689).
cacaaagggaaatttggtt

SEQ ID NO: 750344 - DNA, 19 bp, Mus musculus
  siRNA target sequence for AW011752 (NM_134034.1,2695-2713).
ggtagactatccagatgat

SEQ ID NO: 750345 - DNA, 19 bp, Mus musculus
  siRNA target sequence for AW011752 (NM_134034.1,2735-2753).
gaatcatcccctaggaaaa

SEQ ID NO: 750346 - DNA, 19 bp, Mus musculus
  siRNA target sequence for Slc16a6 (NM_134038.1,297-315).
caaaagaactcgaagcttt

SEQ ID NO: 750347 - DNA, 19 bp, Mus musculus
  siRNA target sequence for Slc16a6 (NM_134038.1,316-334).
gtgccagagccaatgtgta

SEQ ID NO: 750348 - DNA, 19 bp, Mus musculus
  siRNA target sequence for Slc16a6 (NM_134038.1,318-336).
gccagagccaatgtgtata

SEQ ID NO: 750349 - DNA, 19 bp, Mus musculus
  siRNA target sequence for Slc16a6 (NM_134038.1,379-397).
cttttttcttcgttgaagt

SEQ ID NO: 750350 - DNA, 19 bp, Mus musculus
  siRNA target sequence for Slc16a6 (NM_134038.1,462-480).
gaatccaatagcaagatct

SEQ ID NO: 750351 - DNA, 19 bp, Mus musculus
  siRNA target sequence for Slc16a6 (NM_134038.1,476-494).
gatctcatggataatatca

SEQ ID NO: 750352 - DNA, 19 bp, Mus musculus
  siRNA target sequence for Slc16a6 (NM_134038.1,484-502).
ggataatatcaatatgtgt

SEQ ID NO: 750353 - DNA, 19 bp, Mus musculus
  siRNA target sequence for Slc16a6 (NM_134038.1,628-646).
gggtctaccacatgtacat

SEQ ID NO: 750354 - DNA, 19 bp, Mus musculus
  siRNA target sequence for Slc16a6 (NM_134038.1,703-721).
ccattctgtcgcagtactt

SEQ ID NO: 750355 - DNA, 19 bp, Mus musculus
  siRNA target sequence for Slc16a6 (NM_134038.1,704-722).
cattctgtcgcagtacttt

SEQ ID NO: 750356 - DNA, 19 bp, Mus musculus
  siRNA target sequence for Slc16a6 (NM_134038.1,708-726).
ctgtcgcagtactttgaca

SEQ ID NO: 750357 - DNA, 19 bp, Mus musculus
  siRNA target sequence for Slc16a6 (NM_134038.1,710-728).
gtcgcagtactttgacaaa

SEQ ID NO: 750358 - DNA, 19 bp, Mus musculus
  siRNA target sequence for Slc16a6 (NM_134038.1,769-787).
gcttcgcggtgtttgcttt

SEQ ID NO: 750359 - DNA, 19 bp, Mus musculus
  siRNA target sequence for Slc16a6 (NM_134038.1,816-834).
catattggctggagataca

SEQ ID NO: 750360 - DNA, 19 bp, Mus musculus
  siRNA target sequence for Slc16a6 (NM_134038.1,881-899).
cgccttgctaagaccaatt

SEQ ID NO: 750361 - DNA, 19 bp, Mus musculus
  siRNA target sequence for Slc16a6 (NM_134038.1,1004-1022).
catcgactcaggagtagaa

SEQ ID NO: 750362 - DNA, 19 bp, Mus musculus
  siRNA target sequence for Slc16a6 (NM_134038.1,1007-1025).
cgactcaggagtagaacta

SEQ ID NO: 750363 - DNA, 19 bp, Mus musculus
  siRNA target sequence for Slc16a6 (NM_134038.1,1008-1026).
gactcaggagtagaactaa

SEQ ID NO: 750364 - DNA, 19 bp, Mus musculus
  siRNA target sequence for Slc16a6 (NM_134038.1,1010-1028).
ctcaggagtagaactaact

SEQ ID NO: 750365 - DNA, 19 bp, Mus musculus
  siRNA target sequence for Slc16a6 (NM_134038.1,1023-1041).
ctaactacctcaccaaaaa

SEQ ID NO: 750366 - DNA, 19 bp, Mus musculus
  siRNA target sequence for Slc16a6 (NM_134038.1,1111-1129).
ccaagcacagccagatgaa

SEQ ID NO: 750367 - DNA, 19 bp, Mus musculus
  siRNA target sequence for Slc16a6 (NM_134038.1,1142-1160).
ggacttctccgtcttgaaa

SEQ ID NO: 750368 - DNA, 19 bp, Mus musculus
  siRNA target sequence for Slc16a6 (NM_134038.1,1148-1166).
ctccgtcttgaaagagaaa

SEQ ID NO: 750369 - DNA, 19 bp, Mus musculus
  siRNA target sequence for Slc16a6 (NM_134038.1,1219-1237).
cgccttccctctacatcat

SEQ ID NO: 750370 - DNA, 19 bp, Mus musculus
  siRNA target sequence for Slc16a6 (NM_134038.1,1220-1238).
gccttccctctacatcatt

SEQ ID NO: 750371 - DNA, 19 bp, Mus musculus
  siRNA target sequence for Slc16a6 (NM_134038.1,1225-1243).
ccctctacatcattccttt

SEQ ID NO: 750372 - DNA, 19 bp, Mus musculus
  siRNA target sequence for Slc16a6 (NM_134038.1,1267-1285).
ctgaccgcgctgcgttttt

SEQ ID NO: 750373 - DNA, 19 bp, Mus musculus
  siRNA target sequence for Slc16a6 (NM_134038.1,1353-1371).
cccattcgcaagatctaca

SEQ ID NO: 750374 - DNA, 19 bp, Mus musculus
  siRNA target sequence for Slc16a6 (NM_134038.1,1354-1372).
ccattcgcaagatctacat

SEQ ID NO: 750375 - DNA, 19 bp, Mus musculus
  siRNA target sequence for Slc16a6 (NM_134038.1,1527-1545).
gttgggatcgagaagatgt

SEQ ID NO: 750376 - DNA, 19 bp, Mus musculus
  siRNA target sequence for Slc16a6 (NM_134038.1,1551-1569).
gcagctggagtctatgtct

SEQ ID NO: 750377 - DNA, 19 bp, Mus musculus
  siRNA target sequence for Slc16a6 (NM_134038.1,1552-1570).
cagctggagtctatgtctt

SEQ ID NO: 750378 - DNA, 19 bp, Mus musculus
  siRNA target sequence for Slc16a6 (NM_134038.1,1558-1576).
gagtctatgtcttcattca

SEQ ID NO: 750379 - DNA, 19 bp, Mus musculus
  siRNA target sequence for Slc16a6 (NM_134038.1,1619-1637).
ggttgaccagagcaagata

SEQ ID NO: 750380 - DNA, 19 bp, Mus musculus
  siRNA target sequence for Slc16a6 (NM_134038.1,1620-1638).
gttgaccagagcaagatat

SEQ ID NO: 750381 - DNA, 19 bp, Mus musculus
  siRNA target sequence for Slc16a6 (NM_134038.1,1698-1716).
ctggtaagaccctgtaaaa

SEQ ID NO: 750382 - DNA, 19 bp, Mus musculus
  siRNA target sequence for Slc16a6 (NM_134038.1,1724-1742).
gtgccagaattctcattca

SEQ ID NO: 750383 - DNA, 19 bp, Mus musculus
  siRNA target sequence for Slc16a6 (NM_134038.1,1784-1802).
ggacatacccgaagacttt

SEQ ID NO: 750384 - DNA, 19 bp, Mus musculus
  siRNA target sequence for Slc16a6 (NM_134038.1,1830-1848).
cacagggctcatatgaaaa

SEQ ID NO: 750385 - DNA, 19 bp, Mus musculus
  siRNA target sequence for Slc16a6 (NM_134038.1,1834-1852).
gggctcatatgaaaatgga

SEQ ID NO: 750386 - DNA, 19 bp, Mus musculus
  siRNA target sequence for 4930427A07Rik (NM_134041.1,864-882).
gctggagtccgttaaacaa

SEQ ID NO: 750387 - DNA, 19 bp, Mus musculus
  siRNA target sequence for 4930427A07Rik (NM_134041.1,1084-1102).
catcgactggtgagaagta

SEQ ID NO: 750388 - DNA, 19 bp, Mus musculus
  siRNA target sequence for AI413782 (NM_134044.2,239-257).
gatgagctctcacagttaa

SEQ ID NO: 750389 - DNA, 19 bp, Mus musculus
  siRNA target sequence for AI413782 (NM_134044.2,249-267).
cacagttaaaggaatccaa

SEQ ID NO: 750390 - DNA, 19 bp, Mus musculus
  siRNA target sequence for AI413782 (NM_134044.2,342-360).
gagaacctgtgggaagtat

SEQ ID NO: 750391 - DNA, 19 bp, Mus musculus
  siRNA target sequence for AI413782 (NM_134044.2,428-446).
ggccgaaacagcttctaca

SEQ ID NO: 750392 - DNA, 19 bp, Mus musculus
  siRNA target sequence for AI413782 (NM_134044.2,455-473).
cccaaacctccttctactt

SEQ ID NO: 750393 - DNA, 19 bp, Mus musculus
  siRNA target sequence for AI413782 (NM_134044.2,456-474).
ccaaacctccttctactta

SEQ ID NO: 750394 - DNA, 19 bp, Mus musculus
  siRNA target sequence for AI413782 (NM_134044.2,487-505).
cttcttcagaggtagaact

SEQ ID NO: 750395 - DNA, 19 bp, Mus musculus
  siRNA target sequence for AI413782 (NM_134044.2,547-565).
cacacctgccaaaagttat

SEQ ID NO: 750396 - DNA, 19 bp, Mus musculus
  siRNA target sequence for AI413782 (NM_134044.2,724-742).
caaagagatcctttttcga

SEQ ID NO: 750397 - DNA, 19 bp, Mus musculus
  siRNA target sequence for AI413782 (NM_134044.2,856-874).
ggcgctatcccattatcga

SEQ ID NO: 750398 - DNA, 19 bp, Mus musculus
  siRNA target sequence for AI413782 (NM_134044.2,896-914).
cctgaaaaacgaaaagaat

SEQ ID NO: 750399 - DNA, 19 bp, Mus musculus
  siRNA target sequence for AI413782 (NM_134044.2,960-978).
cgcatgtacaagaccatta

SEQ ID NO: 750400 - DNA, 19 bp, Mus musculus
  siRNA target sequence for AI413782 (NM_134044.2,962-980).
catgtacaagaccattaca

SEQ ID NO: 750401 - DNA, 19 bp, Mus musculus
  siRNA target sequence for AI413782 (NM_134044.2,1032-1050).
cttcagggcagactgatat

SEQ ID NO: 750402 - DNA, 19 bp, Mus musculus
  siRNA target sequence for AI413782 (NM_134044.2,1035-1053).
cagggcagactgatatctt

SEQ ID NO: 750403 - DNA, 19 bp, Mus musculus
  siRNA target sequence for AI413782 (NM_134044.2,1057-1075).
gaagcacccccgtaaagct

SEQ ID NO: 750404 - DNA, 19 bp, Mus musculus
  siRNA target sequence for AI413782 (NM_134044.2,1063-1081).
cccccgtaaagcttccatt

SEQ ID NO: 750405 - DNA, 19 bp, Mus musculus
  siRNA target sequence for AI413782 (NM_134044.2,1108-1126).
cttctacgcctgcttctat

SEQ ID NO: 750406 - DNA, 19 bp, Mus musculus
  siRNA target sequence for AI413782 (NM_134044.2,1158-1176).
gtcccatcaacctgaagaa

SEQ ID NO: 750407 - DNA, 19 bp, Mus musculus
  siRNA target sequence for AI413782 (NM_134044.2,1186-1204).
gatcccagacaaacagtat

SEQ ID NO: 750408 - DNA, 19 bp, Mus musculus
  siRNA target sequence for AI413782 (NM_134044.2,1259-1277).
gccctgttcaccacaaaga

SEQ ID NO: 750409 - DNA, 19 bp, Mus musculus
  siRNA target sequence for AI413782 (NM_134044.2,1318-1336).
ccatcgagttgtggaaatt

SEQ ID NO: 750410 - DNA, 19 bp, Mus musculus
  siRNA target sequence for AI413782 (NM_134044.2,1319-1337).
catcgagttgtggaaattt

SEQ ID NO: 750411 - DNA, 19 bp, Mus musculus
  siRNA target sequence for AI413782 (NM_134044.2,1436-1454).
catgatgtcgtcattgata

SEQ ID NO: 750412 - DNA, 19 bp, Mus musculus
  siRNA target sequence for AI413782 (NM_134044.2,1439-1457).
gatgtcgtcattgatactt

SEQ ID NO: 750413 - DNA, 19 bp, Mus musculus
  siRNA target sequence for AI413782 (NM_134044.2,1491-1509).
catacaggagcaaagtaga

SEQ ID NO: 750414 - DNA, 19 bp, Mus musculus
  siRNA target sequence for AI413782 (NM_134044.2,1549-1567).
cagcagctcgcaaattcga

SEQ ID NO: 750415 - DNA, 19 bp, Mus musculus
  siRNA target sequence for AI413782 (NM_134044.2,1559-1577).
caaattcgatggaagaact

SEQ ID NO: 750416 - DNA, 19 bp, Mus musculus
  siRNA target sequence for 2810429O05Rik (NM_134046.3,629-647).
gagtctgcaaatactttgt

SEQ ID NO: 750417 - DNA, 19 bp, Mus musculus
  siRNA target sequence for 2810429O05Rik (NM_134046.3,661-679).
gtgcaaaggaggtgtttta

SEQ ID NO: 750418 - DNA, 19 bp, Mus musculus
  siRNA target sequence for 2810429O05Rik (NM_134046.3,693-711).
gactagaggctcaaacgaa

SEQ ID NO: 750419 - DNA, 19 bp, Mus musculus
  siRNA target sequence for 2810429O05Rik (NM_134046.3,698-716).
gaggctcaaacgaacatat

SEQ ID NO: 750420 - DNA, 19 bp, Mus musculus
  siRNA target sequence for 2810429O05Rik (NM_134046.3,701-719).
gctcaaacgaacatatcga

SEQ ID NO: 750421 - DNA, 19 bp, Mus musculus
  siRNA target sequence for 2810429O05Rik (NM_134046.3,702-720).
ctcaaacgaacatatcgaa

SEQ ID NO: 750422 - DNA, 19 bp, Mus musculus
  siRNA target sequence for 2810429O05Rik (NM_134046.3,704-722).
caaacgaacatatcgaata

SEQ ID NO: 750423 - DNA, 19 bp, Mus musculus
  siRNA target sequence for 2810429O05Rik (NM_134046.3,708-726).
cgaacatatcgaatagaaa

SEQ ID NO: 750424 - DNA, 19 bp, Mus musculus
  siRNA target sequence for 2810429O05Rik (NM_134046.3,712-730).
catatcgaatagaaagtct

SEQ ID NO: 750425 - DNA, 19 bp, Mus musculus
  siRNA target sequence for 2810429O05Rik (NM_134046.3,734-752).
gaaccagcagttcgtaaaa

SEQ ID NO: 750426 - DNA, 19 bp, Mus musculus
  siRNA target sequence for 2810429O05Rik (NM_134046.3,738-756).
cagcagttcgtaaaaagga

SEQ ID NO: 750427 - DNA, 19 bp, Mus musculus
  siRNA target sequence for 2810429O05Rik (NM_134046.3,740-758).
gcagttcgtaaaaaggaaa

SEQ ID NO: 750428 - DNA, 19 bp, Mus musculus
  siRNA target sequence for 2810429O05Rik (NM_134046.3,743-761).
gttcgtaaaaaggaaagtt

SEQ ID NO: 750429 - DNA, 19 bp, Mus musculus
  siRNA target sequence for 2810429O05Rik (NM_134046.3,789-807).
ggcaacaacgagataagct

SEQ ID NO: 750430 - DNA, 19 bp, Mus musculus
  siRNA target sequence for 2810429O05Rik (NM_134046.3,826-844).
gtggggagccagagttaaa

SEQ ID NO: 750431 - DNA, 19 bp, Mus musculus
  siRNA target sequence for 2810429O05Rik (NM_134046.3,953-971).
gggctcagcgggaagttga

SEQ ID NO: 750432 - DNA, 19 bp, Mus musculus
  siRNA target sequence for 2810429O05Rik (NM_134046.3,1014-1032).
ggaacctactagattccta

SEQ ID NO: 750433 - DNA, 19 bp, Mus musculus
  siRNA target sequence for 2810429O05Rik (NM_134046.3,1037-1055).
gtggacctcgtcatagaga

SEQ ID NO: 750434 - DNA, 19 bp, Mus musculus
  siRNA target sequence for 2810429O05Rik (NM_134046.3,1039-1057).
ggacctcgtcatagagaaa

SEQ ID NO: 750435 - DNA, 19 bp, Mus musculus
  siRNA target sequence for 2810429O05Rik (NM_134046.3,1155-1173).
gactctgggaatacctaaa

SEQ ID NO: 750436 - DNA, 19 bp, Mus musculus
  siRNA target sequence for 2810429O05Rik (NM_134046.3,1320-1338).
gtgccaggttgctgtatga

SEQ ID NO: 750437 - DNA, 19 bp, Mus musculus
  siRNA target sequence for Cbll1 (NM_134048.1,26-44).
gttacaaggcactaatagt

SEQ ID NO: 750438 - DNA, 19 bp, Mus musculus
  siRNA target sequence for Cbll1 (NM_134048.1,72-90).
cgcagaagaatccctataa

SEQ ID NO: 750439 - DNA, 19 bp, Mus musculus
  siRNA target sequence for Cbll1 (NM_134048.1,76-94).
gaagaatccctataaagct

SEQ ID NO: 750440 - DNA, 19 bp, Mus musculus
  siRNA target sequence for Cbll1 (NM_134048.1,101-119).
caaacaagccagcaaagtt

SEQ ID NO: 750441 - DNA, 19 bp, Mus musculus
  siRNA target sequence for Cbll1 (NM_134048.1,172-190).
cgcaaggtgatgaaggatt

SEQ ID NO: 750442 - DNA, 19 bp, Mus musculus
  siRNA target sequence for Cbll1 (NM_134048.1,209-227).
gcgatatgactgtaaagga

SEQ ID NO: 750443 - DNA, 19 bp, Mus musculus
  siRNA target sequence for Cbll1 (NM_134048.1,220-238).
gtaaaggaggcgaactctt

SEQ ID NO: 750444 - DNA, 19 bp, Mus musculus
  siRNA target sequence for Cbll1 (NM_134048.1,274-292).
gggatttcaagataaacat

SEQ ID NO: 750445 - DNA, 19 bp, Mus musculus
  siRNA target sequence for Cbll1 (NM_134048.1,305-323).
ggacgatacaccagtacat

SEQ ID NO: 750446 - DNA, 19 bp, Mus musculus
  siRNA target sequence for Cbll1 (NM_134048.1,306-324).
gacgatacaccagtacatt

SEQ ID NO: 750447 - DNA, 19 bp, Mus musculus
  siRNA target sequence for Cbll1 (NM_134048.1,337-355).
gtggactgcctattaaagt

SEQ ID NO: 750448 - DNA, 19 bp, Mus musculus
  siRNA target sequence for Cbll1 (NM_134048.1,339-357).
ggactgcctattaaagtct

SEQ ID NO: 750449 - DNA, 19 bp, Mus musculus
  siRNA target sequence for Cbll1 (NM_134048.1,340-358).
gactgcctattaaagtcta

SEQ ID NO: 750450 - DNA, 19 bp, Mus musculus
  siRNA target sequence for Cbll1 (NM_134048.1,381-399).
catgtcttttgctatgact

SEQ ID NO: 750451 - DNA, 19 bp, Mus musculus
  siRNA target sequence for Cbll1 (NM_134048.1,431-449).
gatgtgcccaggatgtagt

SEQ ID NO: 750452 - DNA, 19 bp, Mus musculus
  siRNA target sequence for Cbll1 (NM_134048.1,434-452).
gtgcccaggatgtagtgat

SEQ ID NO: 750453 - DNA, 19 bp, Mus musculus
  siRNA target sequence for Cbll1 (NM_134048.1,476-494).
cacacgaggttctctcttt

SEQ ID NO: 750454 - DNA, 19 bp, Mus musculus
  siRNA target sequence for Cbll1 (NM_134048.1,480-498).
cgaggttctctctttatgt

SEQ ID NO: 750455 - DNA, 19 bp, Mus musculus
  siRNA target sequence for Cbll1 (NM_134048.1,541-559).
gagacttacaagctcatat

SEQ ID NO: 750456 - DNA, 19 bp, Mus musculus
  siRNA target sequence for Cbll1 (NM_134048.1,543-561).
gacttacaagctcatatca

SEQ ID NO: 750457 - DNA, 19 bp, Mus musculus
  siRNA target sequence for Cbll1 (NM_134048.1,560-578).
caaccatcgccatatgaga

SEQ ID NO: 750458 - DNA, 19 bp, Mus musculus
  siRNA target sequence for Cbll1 (NM_134048.1,590-608).
cgttacccgtgcttcactt

SEQ ID NO: 750459 - DNA, 19 bp, Mus musculus
  siRNA target sequence for Cbll1 (NM_134048.1,595-613).
cccgtgcttcacttgagaa

SEQ ID NO: 750460 - DNA, 19 bp, Mus musculus
  siRNA target sequence for Cbll1 (NM_134048.1,596-614).
ccgtgcttcacttgagaat

SEQ ID NO: 750461 - DNA, 19 bp, Mus musculus
  siRNA target sequence for Cbll1 (NM_134048.1,598-616).
gtgcttcacttgagaatgt

SEQ ID NO: 750462 - DNA, 19 bp, Mus musculus
  siRNA target sequence for Cbll1 (NM_134048.1,611-629).
gaatgttcatcctcctatt

SEQ ID NO: 750463 - DNA, 19 bp, Mus musculus
  siRNA target sequence for Cbll1 (NM_134048.1,647-665).
catccccgatcggttcata

SEQ ID NO: 750464 - DNA, 19 bp, Mus musculus
  siRNA target sequence for Cbll1 (NM_134048.1,670-688).
caccagacaagcatcatat

SEQ ID NO: 750465 - DNA, 19 bp, Mus musculus
  siRNA target sequence for Cbll1 (NM_134048.1,672-690).
ccagacaagcatcatatga

SEQ ID NO: 750466 - DNA, 19 bp, Mus musculus
  siRNA target sequence for Cbll1 (NM_134048.1,680-698).
gcatcatatgagccatatt

SEQ ID NO: 750467 - DNA, 19 bp, Mus musculus
  siRNA target sequence for Cbll1 (NM_134048.1,700-718).
ctccaaagcagcacatcat

SEQ ID NO: 750468 - DNA, 19 bp, Mus musculus
  siRNA target sequence for Cbll1 (NM_134048.1,703-721).
caaagcagcacatcatgat

SEQ ID NO: 750469 - DNA, 19 bp, Mus musculus
  siRNA target sequence for Cbll1 (NM_134048.1,767-785).
gccacatgaggatattcgt

SEQ ID NO: 750470 - DNA, 19 bp, Mus musculus
  siRNA target sequence for Cbll1 (NM_134048.1,784-802).
gtgctcctccggcagaatt

SEQ ID NO: 750471 - DNA, 19 bp, Mus musculus
  siRNA target sequence for Cbll1 (NM_134048.1,786-804).
gctcctccggcagaattgt

SEQ ID NO: 750472 - DNA, 19 bp, Mus musculus
  siRNA target sequence for Cbll1 (NM_134048.1,829-847).
cggtcagtcaggaaacctt

SEQ ID NO: 750473 - DNA, 19 bp, Mus musculus
  siRNA target sequence for Cbll1 (NM_134048.1,830-848).
ggtcagtcaggaaaccttt

SEQ ID NO: 750474 - DNA, 19 bp, Mus musculus
  siRNA target sequence for Cbll1 (NM_134048.1,835-853).
gtcaggaaacctttcgtat

SEQ ID NO: 750475 - DNA, 19 bp, Mus musculus
  siRNA target sequence for Cbll1 (NM_134048.1,837-855).
caggaaacctttcgtattt

SEQ ID NO: 750476 - DNA, 19 bp, Mus musculus
  siRNA target sequence for Cbll1 (NM_134048.1,839-857).
ggaaacctttcgtatttca

SEQ ID NO: 750477 - DNA, 19 bp, Mus musculus
  siRNA target sequence for Cbll1 (NM_134048.1,845-863).
ctttcgtatttcaacaaga

SEQ ID NO: 750478 - DNA, 19 bp, Mus musculus
  siRNA target sequence for Cbll1 (NM_134048.1,973-991).
gtcagcccgtggtatctca

SEQ ID NO: 750479 - DNA, 19 bp, Mus musculus
  siRNA target sequence for Cbll1 (NM_134048.1,983-1001).
ggtatctcaccctcatcat

SEQ ID NO: 750480 - DNA, 19 bp, Mus musculus
  siRNA target sequence for Cbll1 (NM_134048.1,984-1002).
gtatctcaccctcatcata

SEQ ID NO: 750481 - DNA, 19 bp, Mus musculus
  siRNA target sequence for Cbll1 (NM_134048.1,988-1006).
ctcaccctcatcatattat

SEQ ID NO: 750482 - DNA, 19 bp, Mus musculus
  siRNA target sequence for Cbll1 (NM_134048.1,1090-1108).
gtactcctcacttggtata

SEQ ID NO: 750483 - DNA, 19 bp, Mus musculus
  siRNA target sequence for Cbll1 (NM_134048.1,1156-1174).
cccctccccctggacatat

SEQ ID NO: 750484 - DNA, 19 bp, Mus musculus
  siRNA target sequence for Cbll1 (NM_134048.1,1159-1177).
ctccccctggacatattat

SEQ ID NO: 750485 - DNA, 19 bp, Mus musculus
  siRNA target sequence for Cbll1 (NM_134048.1,1180-1198).
cccagatgccaccttatat

SEQ ID NO: 750486 - DNA, 19 bp, Mus musculus
  siRNA target sequence for Cbll1 (NM_134048.1,1184-1202).
gatgccaccttatatgaat

SEQ ID NO: 750487 - DNA, 19 bp, Mus musculus
  siRNA target sequence for Cbll1 (NM_134048.1,1264-1282).
ctcaccattacaatcctaa

SEQ ID NO: 750488 - DNA, 19 bp, Mus musculus
  siRNA target sequence for Cbll1 (NM_134048.1,1268-1286).
ccattacaatcctaactct

SEQ ID NO: 750489 - DNA, 19 bp, Mus musculus
  siRNA target sequence for Cbll1 (NM_134048.1,1269-1287).
cattacaatcctaactctt

SEQ ID NO: 750490 - DNA, 19 bp, Mus musculus
  siRNA target sequence for Cbll1 (NM_134048.1,1283-1301).
ctctttaccccagtttact

SEQ ID NO: 750491 - DNA, 19 bp, Mus musculus
  siRNA target sequence for Cbll1 (NM_134048.1,1285-1303).
ctttaccccagtttactga

SEQ ID NO: 750492 - DNA, 19 bp, Mus musculus
  siRNA target sequence for Cbll1 (NM_134048.1,1344-1362).
ggaatgagtcctggtatat

SEQ ID NO: 750493 - DNA, 19 bp, Mus musculus
  siRNA target sequence for Cbll1 (NM_134048.1,1443-1461).
ccagatcaaacaagataca

SEQ ID NO: 750494 - DNA, 19 bp, Mus musculus
  siRNA target sequence for Cbll1 (NM_134048.1,1453-1471).
caagatacagaccgtatta

SEQ ID NO: 750495 - DNA, 19 bp, Mus musculus
  siRNA target sequence for Cbll1 (NM_134048.1,1456-1474).
gatacagaccgtattacca

SEQ ID NO: 750496 - DNA, 19 bp, Mus musculus
  siRNA target sequence for AL024210 (NM_134052.1,146-164).
ctcggagtgctctattgga

SEQ ID NO: 750497 - DNA, 19 bp, Mus musculus
  siRNA target sequence for AL024210 (NM_134052.1,244-262).
catcaccatatgcaaagat

SEQ ID NO: 750498 - DNA, 19 bp, Mus musculus
  siRNA target sequence for AL024210 (NM_134052.1,247-265).
caccatatgcaaagataca

SEQ ID NO: 750499 - DNA, 19 bp, Mus musculus
  siRNA target sequence for AL024210 (NM_134052.1,250-268).
catatgcaaagatacactt

SEQ ID NO: 750500 - DNA, 19 bp, Mus musculus
  siRNA target sequence for AL024210 (NM_134052.1,404-422).
gagaagggggacatgatta

SEQ ID NO: 750501 - DNA, 19 bp, Mus musculus
  siRNA target sequence for AL024210 (NM_134052.1,409-427).
gggggacatgattactctt

SEQ ID NO: 750502 - DNA, 19 bp, Mus musculus
  siRNA target sequence for AL024210 (NM_134052.1,453-471).
cactggacgagaagaatta

SEQ ID NO: 750503 - DNA, 19 bp, Mus musculus
  siRNA target sequence for AL024210 (NM_134052.1,545-563).
gcccgtgtacagtacatga

SEQ ID NO: 750504 - DNA, 19 bp, Mus musculus
  siRNA target sequence for AL024210 (NM_134052.1,548-566).
cgtgtacagtacatgagtt

SEQ ID NO: 750505 - DNA, 19 bp, Mus musculus
  siRNA target sequence for AL024210 (NM_134052.1,551-569).
gtacagtacatgagttttt

SEQ ID NO: 750506 - DNA, 19 bp, Mus musculus
  siRNA target sequence for AL024210 (NM_134052.1,556-574).
gtacatgagttttttggaa

SEQ ID NO: 750507 - DNA, 19 bp, Mus musculus
  siRNA target sequence for 1110002B05Rik (NM_134054.1,49-67).
cagatgtcctggttctact

SEQ ID NO: 750508 - DNA, 19 bp, Mus musculus
  siRNA target sequence for 1110002B05Rik (NM_134054.1,110-128).
gggagcgaaccgtgttcaa

SEQ ID NO: 750509 - DNA, 19 bp, Mus musculus
  siRNA target sequence for 1110002B05Rik (NM_134054.1,112-130).
gagcgaaccgtgttcaatt

SEQ ID NO: 750510 - DNA, 19 bp, Mus musculus
  siRNA target sequence for 1110002B05Rik (NM_134054.1,115-133).
cgaaccgtgttcaattcga

SEQ ID NO: 750511 - DNA, 19 bp, Mus musculus
  siRNA target sequence for 1110002B05Rik (NM_134054.1,116-134).
gaaccgtgttcaattcgat

SEQ ID NO: 750512 - DNA, 19 bp, Mus musculus
  siRNA target sequence for 1110002B05Rik (NM_134054.1,200-218).
ctattctgcattactttga

SEQ ID NO: 750513 - DNA, 19 bp, Mus musculus
  siRNA target sequence for 4921526O06Rik (NM_134060.2,253-271).
ccatgtcgccgcacatcaa

SEQ ID NO: 750514 - DNA, 19 bp, Mus musculus
  siRNA target sequence for 4921526O06Rik (NM_134060.2,420-438).
ccttacggctggtacctta

SEQ ID NO: 750515 - DNA, 19 bp, Mus musculus
  siRNA target sequence for 4921526O06Rik (NM_134060.2,425-443).
cggctggtaccttacctta

SEQ ID NO: 750516 - DNA, 19 bp, Mus musculus
  siRNA target sequence for 4921526O06Rik (NM_134060.2,444-462).
gtgcagtttgccttttact

SEQ ID NO: 750517 - DNA, 19 bp, Mus musculus
  siRNA target sequence for 4921526O06Rik (NM_134060.2,463-481).
ccgtatttggcctaatcga

SEQ ID NO: 750518 - DNA, 19 bp, Mus musculus
  siRNA target sequence for 4921526O06Rik (NM_134060.2,530-548).
catgctaatagcttttcta

SEQ ID NO: 750519 - DNA, 19 bp, Mus musculus
  siRNA target sequence for 4921526O06Rik (NM_134060.2,533-551).
gctaatagcttttctaact

SEQ ID NO: 750520 - DNA, 19 bp, Mus musculus
  siRNA target sequence for 4921526O06Rik (NM_134060.2,554-572).
gggtactatgggcttatca

SEQ ID NO: 750521 - DNA, 19 bp, Mus musculus
  siRNA target sequence for 4921526O06Rik (NM_134060.2,555-573).
ggtactatgggcttatcaa

SEQ ID NO: 750522 - DNA, 19 bp, Mus musculus
  siRNA target sequence for 4921526O06Rik (NM_134060.2,580-598).
ccttgggctacctgaatta

SEQ ID NO: 750523 - DNA, 19 bp, Mus musculus
  siRNA target sequence for 4921526O06Rik (NM_134060.2,714-732).
ctgggcctgatctggttta

SEQ ID NO: 750524 - DNA, 19 bp, Mus musculus
  siRNA target sequence for 4921526O06Rik (NM_134060.2,746-764).
cacaattgcaccaaacttt

SEQ ID NO: 750525 - DNA, 19 bp, Mus musculus
  siRNA target sequence for 4921526O06Rik (NM_134060.2,753-771).
gcaccaaactttaatctga

SEQ ID NO: 750526 - DNA, 19 bp, Mus musculus
  siRNA target sequence for 4921526O06Rik (NM_134060.2,768-786).
ctgacaggtgtgatgctta

SEQ ID NO: 750527 - DNA, 19 bp, Mus musculus
  siRNA target sequence for 4921526O06Rik (NM_134060.2,863-881).
ctcggagatggttttgtat

SEQ ID NO: 750528 - DNA, 19 bp, Mus musculus
  siRNA target sequence for 4921526O06Rik (NM_134060.2,889-907).
caatcgggtttgtgtacat

SEQ ID NO: 750529 - DNA, 19 bp, Mus musculus
  siRNA target sequence for 4921526O06Rik (NM_134060.2,945-963).
gcagtggcattttgttcaa

SEQ ID NO: 750530 - DNA, 19 bp, Mus musculus
  siRNA target sequence for 4921526O06Rik (NM_134060.2,946-964).
cagtggcattttgttcaaa

SEQ ID NO: 750531 - DNA, 19 bp, Mus musculus
  siRNA target sequence for 4921526O06Rik (NM_134060.2,948-966).
gtggcattttgttcaaaga

SEQ ID NO: 750532 - DNA, 19 bp, Mus musculus
  siRNA target sequence for 4921526O06Rik (NM_134060.2,1032-1050).
gttctggccctcattaaaa

SEQ ID NO: 750533 - DNA, 19 bp, Mus musculus
  siRNA target sequence for 4921526O06Rik (NM_134060.2,1035-1053).
ctggccctcattaaaatct

SEQ ID NO: 750534 - DNA, 19 bp, Mus musculus
  siRNA target sequence for 4921526O06Rik (NM_134060.2,1060-1078).
cacttctggctgtaacagt

SEQ ID NO: 750535 - DNA, 19 bp, Mus musculus
  siRNA target sequence for 4921526O06Rik (NM_134060.2,1129-1147).
ctaagccgttcacttttca

SEQ ID NO: 750536 - DNA, 19 bp, Mus musculus
  siRNA target sequence for 4921526O06Rik (NM_134060.2,1133-1151).
gccgttcacttttcagtat

SEQ ID NO: 750537 - DNA, 19 bp, Mus musculus
  siRNA target sequence for 4921526O06Rik (NM_134060.2,1134-1152).
ccgttcacttttcagtata

SEQ ID NO: 750538 - DNA, 19 bp, Mus musculus
  siRNA target sequence for 4921526O06Rik (NM_134060.2,1135-1153).
cgttcacttttcagtatat

SEQ ID NO: 750539 - DNA, 19 bp, Mus musculus
  siRNA target sequence for 4921526O06Rik (NM_134060.2,1156-1174).
ggtctggcttgttagttgt

SEQ ID NO: 750540 - DNA, 19 bp, Mus musculus
  siRNA target sequence for 4921526O06Rik (NM_134060.2,1173-1191).
gtccttggcatatttctca

SEQ ID NO: 750541 - DNA, 19 bp, Mus musculus
  siRNA target sequence for 4921526O06Rik (NM_134060.2,1188-1206).
ctcaatgtttacagcaaaa

SEQ ID NO: 750542 - DNA, 19 bp, Mus musculus
  siRNA target sequence for 4921526O06Rik (NM_134060.2,1222-1240).
gattgccatcggtgtacaa

SEQ ID NO: 750543 - DNA, 19 bp, Mus musculus
  siRNA target sequence for 4921526O06Rik (NM_134060.2,1227-1245).
ccatcggtgtacaacatga

SEQ ID NO: 750544 - DNA, 19 bp, Mus musculus
  siRNA target sequence for 4921526O06Rik (NM_134060.2,1228-1246).
catcggtgtacaacatgat

SEQ ID NO: 750545 - DNA, 19 bp, Mus musculus
  siRNA target sequence for 4921526O06Rik (NM_134060.2,1254-1272).
gccatggacatgaaaaagt

SEQ ID NO: 750546 - DNA, 19 bp, Mus musculus
  siRNA target sequence for Rnf44 (NM_134064.1,497-515).
gcatgctccgtgatgttca

SEQ ID NO: 750547 - DNA, 19 bp, Mus musculus
  siRNA target sequence for Rnf44 (NM_134064.1,681-699).
caccgcttgggcagtttgt

SEQ ID NO: 750548 - DNA, 19 bp, Mus musculus
  siRNA target sequence for Rnf44 (NM_134064.1,683-701).
ccgcttgggcagtttgtgt

SEQ ID NO: 750549 - DNA, 19 bp, Mus musculus
  siRNA target sequence for Rnf44 (NM_134064.1,776-794).
cccttgggtagcttcactt

SEQ ID NO: 750550 - DNA, 19 bp, Mus musculus
  siRNA target sequence for Rnf44 (NM_134064.1,777-795).
ccttgggtagcttcactta

SEQ ID NO: 750551 - DNA, 19 bp, Mus musculus
  siRNA target sequence for Rnf44 (NM_134064.1,915-933).
gactgagcacacagagata

SEQ ID NO: 750552 - DNA, 19 bp, Mus musculus
  siRNA target sequence for AW209491 (NM_134067.2,367-385).
ccatgctctccgacagaat

SEQ ID NO: 750553 - DNA, 19 bp, Mus musculus
  siRNA target sequence for AW209491 (NM_134067.2,368-386).
catgctctccgacagaatt

SEQ ID NO: 750554 - DNA, 19 bp, Mus musculus
  siRNA target sequence for AW209491 (NM_134067.2,372-390).
ctctccgacagaattgtca

SEQ ID NO: 750555 - DNA, 19 bp, Mus musculus
  siRNA target sequence for AW209491 (NM_134067.2,517-535).
ggaaggtagctattaaaga

SEQ ID NO: 750556 - DNA, 19 bp, Mus musculus
  siRNA target sequence for AW209491 (NM_134067.2,518-536).
gaaggtagctattaaagaa

SEQ ID NO: 750557 - DNA, 19 bp, Mus musculus
  siRNA target sequence for AW209491 (NM_134067.2,539-557).
ccatttacagagcactaat

SEQ ID NO: 750558 - DNA, 19 bp, Mus musculus
  siRNA target sequence for AW209491 (NM_134067.2,671-689).
ggacgttgtagcaaatgga

SEQ ID NO: 750559 - DNA, 19 bp, Mus musculus
  siRNA target sequence for AW209491 (NM_134067.2,723-741).
gctgaagcgctgcataaca

SEQ ID NO: 750560 - DNA, 19 bp, Mus musculus
  siRNA target sequence for AW209491 (NM_134067.2,759-777).
cagtacggtgacaaaagca

SEQ ID NO: 750561 - DNA, 19 bp, Mus musculus
  siRNA target sequence for AW209491 (NM_134067.2,830-848).
gtacagcaaccctcacatt

SEQ ID NO: 750562 - DNA, 19 bp, Mus musculus
  siRNA target sequence for AW209491 (NM_134067.2,896-914).
gaaagatatgggcatatct

SEQ ID NO: 750563 - DNA, 19 bp, Mus musculus
  siRNA target sequence for AW209491 (NM_134067.2,930-948).
gtagccgtcaactctctat

SEQ ID NO: 750564 - DNA, 19 bp, Mus musculus
  siRNA target sequence for AW209491 (NM_134067.2,935-953).
cgtcaactctctattaaat

SEQ ID NO: 750565 - DNA, 19 bp, Mus musculus
  siRNA target sequence for AW209491 (NM_134067.2,1024-1042).
gagtcgacagagacaatgt

SEQ ID NO: 750566 - DNA, 19 bp, Mus musculus
  siRNA target sequence for AW209491 (NM_134067.2,1047-1065).
gcacgcgttgcctttccaa

SEQ ID NO: 750567 - DNA, 19 bp, Mus musculus
  siRNA target sequence for AW209491 (NM_134067.2,1076-1094).
ggtcgatgtgtgcaaaaaa

SEQ ID NO: 750568 - DNA, 19 bp, Mus musculus
  siRNA target sequence for AW209491 (NM_134067.2,1095-1113).
gtcaacctggacattacta

SEQ ID NO: 750569 - DNA, 19 bp, Mus musculus
  siRNA target sequence for AW209491 (NM_134067.2,1147-1165).
gaggctgccactttgtctt

SEQ ID NO: 750570 - DNA, 19 bp, Mus musculus
  siRNA target sequence for AW209491 (NM_134067.2,1270-1288).
ctgctgtcaaggactttca

SEQ ID NO: 750571 - DNA, 19 bp, Mus musculus
  siRNA target sequence for AW209491 (NM_134067.2,1328-1346).
gagggccgatgtgctaatt

SEQ ID NO: 750572 - DNA, 19 bp, Mus musculus
  siRNA target sequence for AW209491 (NM_134067.2,1330-1348).
gggccgatgtgctaattaa

SEQ ID NO: 750573 - DNA, 19 bp, Mus musculus
  siRNA target sequence for AW209491 (NM_134067.2,1331-1349).
ggccgatgtgctaattaaa

SEQ ID NO: 750574 - DNA, 19 bp, Mus musculus
  siRNA target sequence for AW209491 (NM_134067.2,1334-1352).
cgatgtgctaattaaacga

SEQ ID NO: 750575 - DNA, 19 bp, Mus musculus
  siRNA target sequence for AW209491 (NM_134067.2,1340-1358).
gctaattaaacgaatcagt

SEQ ID NO: 750576 - DNA, 19 bp, Mus musculus
  siRNA target sequence for AW209491 (NM_134067.2,1391-1409).
gagactagtggcaagttca

SEQ ID NO: 750577 - DNA, 19 bp, Mus musculus
  siRNA target sequence for AW209491 (NM_134067.2,1393-1411).
gactagtggcaagttcaaa

SEQ ID NO: 750578 - DNA, 19 bp, Mus musculus
  siRNA target sequence for AW209491 (NM_134067.2,1395-1413).
ctagtggcaagttcaaaaa

SEQ ID NO: 750579 - DNA, 19 bp, Mus musculus
  siRNA target sequence for AW209491 (NM_134067.2,1420-1438).
gccgttccttaacaatttt

SEQ ID NO: 750580 - DNA, 19 bp, Mus musculus
  siRNA target sequence for AW209491 (NM_134067.2,1421-1439).
ccgttccttaacaattttt

SEQ ID NO: 750581 - DNA, 19 bp, Mus musculus
  siRNA target sequence for AW209491 (NM_134067.2,1466-1484).
cacaatgactgccaatagt

SEQ ID NO: 750582 - DNA, 19 bp, Mus musculus
  siRNA target sequence for AW209491 (NM_134067.2,1476-1494).
gccaatagtggttttgtca

SEQ ID NO: 750583 - DNA, 19 bp, Mus musculus
  siRNA target sequence for AW209491 (NM_134067.2,1501-1519).
ccaacaatcagggtgttaa

SEQ ID NO: 750584 - DNA, 19 bp, Mus musculus
  siRNA target sequence for AW209491 (NM_134067.2,1502-1520).
caacaatcagggtgttaaa

SEQ ID NO: 750585 - DNA, 19 bp, Mus musculus
  siRNA target sequence for AW209491 (NM_134067.2,1576-1594).
ccgtgcccttaccaaaaga

SEQ ID NO: 750586 - DNA, 19 bp, Mus musculus
  siRNA target sequence for C730024G01Rik (NM_134071.1,308-326).
gaaatgtgatccgacatat

SEQ ID NO: 750587 - DNA, 19 bp, Mus musculus
  siRNA target sequence for C730024G01Rik (NM_134071.1,331-349).
gatgacttaggaagttata

SEQ ID NO: 750588 - DNA, 19 bp, Mus musculus
  siRNA target sequence for C730024G01Rik (NM_134071.1,416-434).
cctggcttcaaatgtttgt

SEQ ID NO: 750589 - DNA, 19 bp, Mus musculus
  siRNA target sequence for C730024G01Rik (NM_134071.1,598-616).
ccttgcctagagtctcaaa

SEQ ID NO: 750590 - DNA, 19 bp, Mus musculus
  siRNA target sequence for C730024G01Rik (NM_134071.1,665-683).
ggccagagctcctagagtt

SEQ ID NO: 750591 - DNA, 19 bp, Mus musculus
  siRNA target sequence for C730024G01Rik (NM_134071.1,666-684).
gccagagctcctagagtta

SEQ ID NO: 750592 - DNA, 19 bp, Mus musculus
  siRNA target sequence for C730024G01Rik (NM_134071.1,667-685).
ccagagctcctagagttaa

SEQ ID NO: 750593 - DNA, 19 bp, Mus musculus
  siRNA target sequence for C730024G01Rik (NM_134071.1,679-697).
gagttaaaccgtgctaaat

SEQ ID NO: 750594 - DNA, 19 bp, Mus musculus
  siRNA target sequence for C730024G01Rik (NM_134071.1,681-699).
gttaaaccgtgctaaatgt

SEQ ID NO: 750595 - DNA, 19 bp, Mus musculus
  siRNA target sequence for C730024G01Rik (NM_134071.1,691-709).
gctaaatgttcctcatcat

SEQ ID NO: 750596 - DNA, 19 bp, Mus musculus
  siRNA target sequence for C730024G01Rik (NM_134071.1,692-710).
ctaaatgttcctcatcatt

SEQ ID NO: 750597 - DNA, 19 bp, Mus musculus
  siRNA target sequence for C730024G01Rik (NM_134071.1,701-719).
cctcatcattgaaaaaatt

SEQ ID NO: 750598 - DNA, 19 bp, Mus musculus
  siRNA target sequence for C730024G01Rik (NM_134071.1,726-744).
gaagtcagaggaattgtca

SEQ ID NO: 750599 - DNA, 19 bp, Mus musculus
  siRNA target sequence for C730024G01Rik (NM_134071.1,756-774).
gaattgcccatctttggtt

SEQ ID NO: 750600 - DNA, 19 bp, Mus musculus
  siRNA target sequence for C730024G01Rik (NM_134071.1,767-785).
ctttggttacaaagatgaa

SEQ ID NO: 750601 - DNA, 19 bp, Mus musculus
  siRNA target sequence for C730024G01Rik (NM_134071.1,783-801).
gaattttcataaaactaat

SEQ ID NO: 750602 - DNA, 19 bp, Mus musculus
  siRNA target sequence for C730024G01Rik (NM_134071.1,820-838).
ctgcatagagtttgcataa

SEQ ID NO: 750603 - DNA, 19 bp, Mus musculus
  siRNA target sequence for C730024G01Rik (NM_134071.1,849-867).
ggagaaattgattatcctt

SEQ ID NO: 750604 - DNA, 19 bp, Mus musculus
  siRNA target sequence for C730024G01Rik (NM_134071.1,888-906).
catcaatgttaaagacaat

SEQ ID NO: 750605 - DNA, 19 bp, Mus musculus
  siRNA target sequence for C730024G01Rik (NM_134071.1,924-942).
gcatgaagcctgcaactat

SEQ ID NO: 750606 - DNA, 19 bp, Mus musculus
  siRNA target sequence for C730024G01Rik (NM_134071.1,950-968).
cggagtgtgtccaggaaat

SEQ ID NO: 750607 - DNA, 19 bp, Mus musculus
  siRNA target sequence for C730024G01Rik (NM_134071.1,1011-1029).
cggggtgacgcctttgcat

SEQ ID NO: 750608 - DNA, 19 bp, Mus musculus
  siRNA target sequence for C730024G01Rik (NM_134071.1,1118-1136).
gggagttgcccttggatta

SEQ ID NO: 750609 - DNA, 19 bp, Mus musculus
  siRNA target sequence for C730024G01Rik (NM_134071.1,1119-1137).
ggagttgcccttggattat

SEQ ID NO: 750610 - DNA, 19 bp, Mus musculus
  siRNA target sequence for C730024G01Rik (NM_134071.1,1162-1180).
gaactatttgccattacaa

SEQ ID NO: 750611 - DNA, 19 bp, Mus musculus
  siRNA target sequence for C730024G01Rik (NM_134071.1,1178-1196).
caaatatagacgatacagt

SEQ ID NO: 750612 - DNA, 19 bp, Mus musculus
  siRNA target sequence for C730024G01Rik (NM_134071.1,1188-1206).
cgatacagtggacaacttt

SEQ ID NO: 750613 - DNA, 19 bp, Mus musculus
  siRNA target sequence for C730024G01Rik (NM_134071.1,1210-1228).
gctaagacacagaaacatt

SEQ ID NO: 750614 - DNA, 19 bp, Mus musculus
  siRNA target sequence for C730024G01Rik (NM_134071.1,1264-1282).
cttagtaggatgttgatta

SEQ ID NO: 750615 - DNA, 19 bp, Mus musculus
  siRNA target sequence for C730024G01Rik (NM_134071.1,1268-1286).
gtaggatgttgattaattt

SEQ ID NO: 750616 - DNA, 19 bp, Mus musculus
  siRNA target sequence for C730024G01Rik (NM_134071.1,1329-1347).
caaagggttaggtcatcta

SEQ ID NO: 750617 - DNA, 19 bp, Mus musculus
  siRNA target sequence for C730024G01Rik (NM_134071.1,1334-1352).
ggttaggtcatctaaatga

SEQ ID NO: 750618 - DNA, 19 bp, Mus musculus
  siRNA target sequence for C730024G01Rik (NM_134071.1,1342-1360).
catctaaatgagttgctta

SEQ ID NO: 750619 - DNA, 19 bp, Mus musculus
  siRNA target sequence for C730024G01Rik (NM_134071.1,1353-1371).
gttgcttatggcatgcaat

SEQ ID NO: 750620 - DNA, 19 bp, Mus musculus
  siRNA target sequence for C730024G01Rik (NM_134071.1,1356-1374).
gcttatggcatgcaatagt

SEQ ID NO: 750621 - DNA, 19 bp, Mus musculus
  siRNA target sequence for C730024G01Rik (NM_134071.1,1362-1380).
ggcatgcaatagtgataca

SEQ ID NO: 750622 - DNA, 19 bp, Mus musculus
  siRNA target sequence for C730024G01Rik (NM_134071.1,1413-1431).
ggatgtttatgctaggaat

SEQ ID NO: 750623 - DNA, 19 bp, Mus musculus
  siRNA target sequence for C730024G01Rik (NM_134071.1,1414-1432).
gatgtttatgctaggaata

SEQ ID NO: 750624 - DNA, 19 bp, Mus musculus
  siRNA target sequence for C730024G01Rik (NM_134071.1,1536-1554).
gatgtgtcagtcaatcaca

SEQ ID NO: 750625 - DNA, 19 bp, Mus musculus
  siRNA target sequence for 9030611N15Rik (NM_134072.1,55-73).
ccccacgtgtggtactaaa

SEQ ID NO: 750626 - DNA, 19 bp, Mus musculus
  siRNA target sequence for 9030611N15Rik (NM_134072.1,58-76).
cacgtgtggtactaaacga

SEQ ID NO: 750627 - DNA, 19 bp, Mus musculus
  siRNA target sequence for 9030611N15Rik (NM_134072.1,110-128).
cactgtgcccgataaggtt

SEQ ID NO: 750628 - DNA, 19 bp, Mus musculus
  siRNA target sequence for 9030611N15Rik (NM_134072.1,119-137).
cgataaggttcctaaggat

SEQ ID NO: 750629 - DNA, 19 bp, Mus musculus
  siRNA target sequence for 9030611N15Rik (NM_134072.1,141-159).
cttatcaaggctactaaaa

SEQ ID NO: 750630 - DNA, 19 bp, Mus musculus
  siRNA target sequence for 9030611N15Rik (NM_134072.1,193-211).
ccgcttatttgtaccaaat

SEQ ID NO: 750631 - DNA, 19 bp, Mus musculus
  siRNA target sequence for 9030611N15Rik (NM_134072.1,324-342).
gtccgatcttgcttggaaa

SEQ ID NO: 750632 - DNA, 19 bp, Mus musculus
  siRNA target sequence for 9030611N15Rik (NM_134072.1,327-345).
cgatcttgcttggaaaaga

SEQ ID NO: 750633 - DNA, 19 bp, Mus musculus
  siRNA target sequence for 9030611N15Rik (NM_134072.1,403-421).
ctttgcagcctggagataa

SEQ ID NO: 750634 - DNA, 19 bp, Mus musculus
  siRNA target sequence for 9030611N15Rik (NM_134072.1,430-448).
cacgagacgaacatggaaa

SEQ ID NO: 750635 - DNA, 19 bp, Mus musculus
  siRNA target sequence for 9030611N15Rik (NM_134072.1,532-550).
gagtgtcgaactttaactt

SEQ ID NO: 750636 - DNA, 19 bp, Mus musculus
  siRNA target sequence for 9030611N15Rik (NM_134072.1,534-552).
gtgtcgaactttaacttca

SEQ ID NO: 750637 - DNA, 19 bp, Mus musculus
  siRNA target sequence for 9030611N15Rik (NM_134072.1,641-659).
ccaaatgctggactattgt

SEQ ID NO: 750638 - DNA, 19 bp, Mus musculus
  siRNA target sequence for 9030611N15Rik (NM_134072.1,642-660).
caaatgctggactattgta

SEQ ID NO: 750639 - DNA, 19 bp, Mus musculus
  siRNA target sequence for 9030611N15Rik (NM_134072.1,698-716).
gggaagttcacgagacaaa

SEQ ID NO: 750640 - DNA, 19 bp, Mus musculus
  siRNA target sequence for 9030611N15Rik (NM_134072.1,736-754).
gtccagttctcttagatga

SEQ ID NO: 750641 - DNA, 19 bp, Mus musculus
  siRNA target sequence for 9030611N15Rik (NM_134072.1,803-821).
gattgccattcgttaccaa

SEQ ID NO: 750642 - DNA, 19 bp, Mus musculus
  siRNA target sequence for 9030611N15Rik (NM_134072.1,808-826).
ccattcgttaccaattaca

SEQ ID NO: 750643 - DNA, 19 bp, Mus musculus
  siRNA target sequence for 9030611N15Rik (NM_134072.1,878-896).
gttcatgaaggtttttgaa

SEQ ID NO: 750644 - DNA, 19 bp, Mus musculus
  siRNA target sequence for 9030611N15Rik (NM_134072.1,929-947).
ggatggcttgcacagaaat

SEQ ID NO: 750645 - DNA, 19 bp, Mus musculus
  siRNA target sequence for 9030611N15Rik (NM_134072.1,956-974).
caatactgcgagttatttt

SEQ ID NO: 750646 - DNA, 19 bp, Mus musculus
  siRNA target sequence for 9030611N15Rik (NM_134072.1,961-979).
ctgcgagttattttgatga

SEQ ID NO: 750647 - DNA, 19 bp, Mus musculus
  siRNA target sequence for 9030611N15Rik (NM_134072.1,985-1003).
ccaatcatccatttactga

SEQ ID NO: 750648 - DNA, 19 bp, Mus musculus
  siRNA target sequence for Kctd9 (NM_134073.1,923-941).
gcaacctcgcacatgcaaa

SEQ ID NO: 750649 - DNA, 19 bp, Mus musculus
  siRNA target sequence for Kctd9 (NM_134073.1,924-942).
caacctcgcacatgcaaat

SEQ ID NO: 750650 - DNA, 19 bp, Mus musculus
  siRNA target sequence for Kctd9 (NM_134073.1,958-976).
cttgaacgagctgatcttt

SEQ ID NO: 750651 - DNA, 19 bp, Mus musculus
  siRNA target sequence for Kctd9 (NM_134073.1,1068-1086).
ggatccttcgggtcttaaa

SEQ ID NO: 750652 - DNA, 19 bp, Mus musculus
  siRNA target sequence for Kctd9 (NM_134073.1,1077-1095).
gggtcttaaagccaactta

SEQ ID NO: 750653 - DNA, 19 bp, Mus musculus
  siRNA target sequence for Kctd9 (NM_134073.1,1079-1097).
gtcttaaagccaacttaga

SEQ ID NO: 750654 - DNA, 19 bp, Mus musculus
  siRNA target sequence for Kctd9 (NM_134073.1,1164-1182).
caccttaaaaaatgcaaaa

SEQ ID NO: 750655 - DNA, 19 bp, Mus musculus
  siRNA target sequence for Kctd9 (NM_134073.1,1216-1234).
gcaggaaccgatttagaaa

SEQ ID NO: 750656 - DNA, 19 bp, Mus musculus
  siRNA target sequence for Kctd9 (NM_134073.1,1290-1308).
gaagggtgccatatttgaa

SEQ ID NO: 750657 - DNA, 19 bp, Mus musculus
  siRNA target sequence for Kctd9 (NM_134073.1,1295-1313).
gtgccatatttgaagagat

SEQ ID NO: 750658 - DNA, 19 bp, Mus musculus
  siRNA target sequence for 5330419I01Rik (NM_134081.2,192-210).
gacgcggctaccacaaagt

SEQ ID NO: 750659 - DNA, 19 bp, Mus musculus
  siRNA target sequence for 5330419I01Rik (NM_134081.2,194-212).
cgcggctaccacaaagtgt

SEQ ID NO: 750660 - DNA, 19 bp, Mus musculus
  siRNA target sequence for 5330419I01Rik (NM_134081.2,380-398).
cgggactgggatgcatatt

SEQ ID NO: 750661 - DNA, 19 bp, Mus musculus
  siRNA target sequence for 5330419I01Rik (NM_134081.2,392-410).
gcatattggagattactct

SEQ ID NO: 750662 - DNA, 19 bp, Mus musculus
  siRNA target sequence for 5330419I01Rik (NM_134081.2,393-411).
catattggagattactctt

SEQ ID NO: 750663 - DNA, 19 bp, Mus musculus
  siRNA target sequence for 5330419I01Rik (NM_134081.2,462-480).
gctccgaagaagagctaaa

SEQ ID NO: 750664 - DNA, 19 bp, Mus musculus
  siRNA target sequence for 5330419I01Rik (NM_134081.2,465-483).
ccgaagaagagctaaacga

SEQ ID NO: 750665 - DNA, 19 bp, Mus musculus
  siRNA target sequence for 5330419I01Rik (NM_134081.2,466-484).
cgaagaagagctaaacgat

SEQ ID NO: 750666 - DNA, 19 bp, Mus musculus
  siRNA target sequence for 5330419I01Rik (NM_134081.2,532-550).
ggagtctgtactttgtgta

SEQ ID NO: 750667 - DNA, 19 bp, Mus musculus
  siRNA target sequence for 5330419I01Rik (NM_134081.2,563-581).
gaacccaggataagaaaca

SEQ ID NO: 750668 - DNA, 19 bp, Mus musculus
  siRNA target sequence for 5330419I01Rik (NM_134081.2,566-584).
cccaggataagaaacatca

SEQ ID NO: 750669 - DNA, 19 bp, Mus musculus
  siRNA target sequence for 5330419I01Rik (NM_134081.2,570-588).
ggataagaaacatcattca

SEQ ID NO: 750670 - DNA, 19 bp, Mus musculus
  siRNA target sequence for 5330419I01Rik (NM_134081.2,627-645).
ccttcgtcaaagagtctaa

SEQ ID NO: 750671 - DNA, 19 bp, Mus musculus
  siRNA target sequence for 5330419I01Rik (NM_134081.2,628-646).
cttcgtcaaagagtctaaa

SEQ ID NO: 750672 - DNA, 19 bp, Mus musculus
  siRNA target sequence for 5330419I01Rik (NM_134081.2,631-649).
cgtcaaagagtctaaacaa

SEQ ID NO: 750673 - DNA, 19 bp, Mus musculus
  siRNA target sequence for 5330419I01Rik (NM_134081.2,728-746).
gaaggagtggataacttga

SEQ ID NO: 750674 - DNA, 19 bp, Mus musculus
  siRNA target sequence for AA409316 (NM_134087.1,165-183).
cctgccacctcactacaaa

SEQ ID NO: 750675 - DNA, 19 bp, Mus musculus
  siRNA target sequence for AA409316 (NM_134087.1,168-186).
gccacctcactacaaagaa

SEQ ID NO: 750676 - DNA, 19 bp, Mus musculus
  siRNA target sequence for AA409316 (NM_134087.1,194-212).
gcctagcggtggatgcatt

SEQ ID NO: 750677 - DNA, 19 bp, Mus musculus
  siRNA target sequence for AA409316 (NM_134087.1,626-644).
ggcgagtcccggtctacat

SEQ ID NO: 750678 - DNA, 19 bp, Mus musculus
  siRNA target sequence for AA409316 (NM_134087.1,627-645).
gcgagtcccggtctacatt

SEQ ID NO: 750679 - DNA, 19 bp, Mus musculus
  siRNA target sequence for AA409316 (NM_134087.1,698-716).
gcgtcaacctgcatcatgt

SEQ ID NO: 750680 - DNA, 19 bp, Mus musculus
  siRNA target sequence for AA409316 (NM_134087.1,737-755).
cagtggcaggtcctactta

SEQ ID NO: 750681 - DNA, 19 bp, Mus musculus
  siRNA target sequence for AA409316 (NM_134087.1,739-757).
gtggcaggtcctacttact

SEQ ID NO: 750682 - DNA, 19 bp, Mus musculus
  siRNA target sequence for AA409316 (NM_134087.1,742-760).
gcaggtcctacttactact

SEQ ID NO: 750683 - DNA, 19 bp, Mus musculus
  siRNA target sequence for AA409316 (NM_134087.1,761-779).
gccgcactgggaagtcttt

SEQ ID NO: 750684 - DNA, 19 bp, Mus musculus
  siRNA target sequence for AA409316 (NM_134087.1,776-794).
ctttcaagggccatctaaa

SEQ ID NO: 750685 - DNA, 19 bp, Mus musculus
  siRNA target sequence for AA409316 (NM_134087.1,787-805).
catctaaaggagaagttct

SEQ ID NO: 750686 - DNA, 19 bp, Mus musculus
  siRNA target sequence for AA409316 (NM_134087.1,826-844).
gtgatgagcggcagttata

SEQ ID NO: 750687 - DNA, 19 bp, Mus musculus
  siRNA target sequence for AA409316 (NM_134087.1,835-853).
ggcagttatagcttcatgt

SEQ ID NO: 750688 - DNA, 19 bp, Mus musculus
  siRNA target sequence for AA409316 (NM_134087.1,911-929).
ccagcttcgacgaagagtt

SEQ ID NO: 750689 - DNA, 19 bp, Mus musculus
  siRNA target sequence for AA409316 (NM_134087.1,1298-1316).
caaggcacctggaaatgga

SEQ ID NO: 750690 - DNA, 19 bp, Mus musculus
  siRNA target sequence for AA409316 (NM_134087.1,1319-1337).
ccttcaagcggcatagcta

SEQ ID NO: 750691 - DNA, 19 bp, Mus musculus
  siRNA target sequence for AA409316 (NM_134087.1,1386-1404).
gcaggtgtcacgacaaaca

SEQ ID NO: 750692 - DNA, 19 bp, Mus musculus
  siRNA target sequence for AA409316 (NM_134087.1,1387-1405).
caggtgtcacgacaaacat

SEQ ID NO: 750693 - DNA, 19 bp, Mus musculus
  siRNA target sequence for AA409316 (NM_134087.1,1735-1753).
ctgggccagcgttttccat

SEQ ID NO: 750694 - DNA, 19 bp, Mus musculus
  siRNA target sequence for AA409316 (NM_134087.1,2850-2868).
gagccccacgtctggattt

SEQ ID NO: 750695 - DNA, 19 bp, Mus musculus
  siRNA target sequence for AA409316 (NM_134087.1,2885-2903).
gcccaaccacaggattgat

SEQ ID NO: 750696 - DNA, 19 bp, Mus musculus
  siRNA target sequence for AA409316 (NM_134087.1,3328-3346).
gccattctggagcaaatta

SEQ ID NO: 750697 - DNA, 19 bp, Mus musculus
  siRNA target sequence for AA409316 (NM_134087.1,3408-3426).
cgtaggtcgtccaacaact

SEQ ID NO: 750698 - DNA, 19 bp, Mus musculus
  siRNA target sequence for AA409316 (NM_134087.1,3450-3468).
gtccgacaaggacaaatgt

SEQ ID NO: 750699 - DNA, 19 bp, Mus musculus
  siRNA target sequence for 1810012I01Rik (NM_134091.1,193-211).
gccctgactccaagcatat

SEQ ID NO: 750700 - DNA, 19 bp, Mus musculus
  siRNA target sequence for 1810012I01Rik (NM_134091.1,264-282).
gccagagctctgctatgat

SEQ ID NO: 750701 - DNA, 19 bp, Mus musculus
  siRNA target sequence for 1810012I01Rik (NM_134091.1,275-293).
gctatgatgagtttggttt

SEQ ID NO: 750702 - DNA, 19 bp, Mus musculus
  siRNA target sequence for 1810012I01Rik (NM_134091.1,393-411).
ggagttcacccataaccat

SEQ ID NO: 750703 - DNA, 19 bp, Mus musculus
  siRNA target sequence for 1810012I01Rik (NM_134091.1,567-585).
gtcctaccgtgagattata

SEQ ID NO: 750704 - DNA, 19 bp, Mus musculus
  siRNA target sequence for 1810012I01Rik (NM_134091.1,608-626).
ccatcgctgccaaacagat

SEQ ID NO: 750705 - DNA, 19 bp, Mus musculus
  siRNA target sequence for 1810012I01Rik (NM_134091.1,816-834).
gatgatgtgtgccattatt

SEQ ID NO: 750706 - DNA, 19 bp, Mus musculus
  siRNA target sequence for 1810012I01Rik (NM_134091.1,924-942).
cctgcctcgcttagacaaa

SEQ ID NO: 750707 - DNA, 19 bp, Mus musculus
  siRNA target sequence for 1810012I01Rik (NM_134091.1,928-946).
cctcgcttagacaaactgt

SEQ ID NO: 750708 - DNA, 19 bp, Mus musculus
  siRNA target sequence for 1810012I01Rik (NM_134091.1,929-947).
ctcgcttagacaaactgtt

SEQ ID NO: 750709 - DNA, 19 bp, Mus musculus
  siRNA target sequence for 1810012I01Rik (NM_134091.1,1036-1054).
cgcatctgggacctgtttt

SEQ ID NO: 750710 - DNA, 19 bp, Mus musculus
  siRNA target sequence for 1810012I01Rik (NM_134091.1,1037-1055).
gcatctgggacctgttttt

SEQ ID NO: 750711 - DNA, 19 bp, Mus musculus
  siRNA target sequence for 1810012I01Rik (NM_134091.1,1152-1170).
caacacgctgtcagacatt

SEQ ID NO: 750712 - DNA, 19 bp, Mus musculus
  siRNA target sequence for 1810012I01Rik (NM_134091.1,1266-1284).
gcacctggcctaccttatt

SEQ ID NO: 750713 - DNA, 19 bp, Mus musculus
  siRNA target sequence for 1810012I01Rik (NM_134091.1,1359-1377).
gaggaagtctggtatcact

SEQ ID NO: 750714 - DNA, 19 bp, Mus musculus
  siRNA target sequence for 1810012I01Rik (NM_134091.1,1644-1662).
gctaggcttccgcaaaaat

SEQ ID NO: 750715 - DNA, 19 bp, Mus musculus
  siRNA target sequence for 1810012I01Rik (NM_134091.1,1648-1666).
ggcttccgcaaaaatgaca

SEQ ID NO: 750716 - DNA, 19 bp, Mus musculus
  siRNA target sequence for 1810012I01Rik (NM_134091.1,1733-1751).
ggtttccagccaagtttgt

SEQ ID NO: 750717 - DNA, 19 bp, Mus musculus
  siRNA target sequence for 1810012I01Rik (NM_134091.1,1762-1780).
gatgagcgaagcaaagagt

SEQ ID NO: 750718 - DNA, 19 bp, Mus musculus
  siRNA target sequence for 1810012I01Rik (NM_134091.1,1948-1966).
gtcgaaagagactttgatt

SEQ ID NO: 750719 - DNA, 19 bp, Mus musculus
  siRNA target sequence for 1810012I01Rik (NM_134091.1,1950-1968).
cgaaagagactttgattct

SEQ ID NO: 750720 - DNA, 19 bp, Mus musculus
  siRNA target sequence for 1810012I01Rik (NM_134091.1,1976-1994).
cccgcctggtgctctgtaa

SEQ ID NO: 750721 - DNA, 19 bp, Mus musculus
  siRNA target sequence for 1810012I01Rik (NM_134091.1,1978-1996).
cgcctggtgctctgtaaga

SEQ ID NO: 750722 - DNA, 19 bp, Mus musculus
  siRNA target sequence for 1810012I01Rik (NM_134091.1,1981-1999).
ctggtgctctgtaagacat

SEQ ID NO: 750723 - DNA, 19 bp, Mus musculus
  siRNA target sequence for 1810012I01Rik (NM_134091.1,1984-2002).
gtgctctgtaagacataca

SEQ ID NO: 750724 - DNA, 19 bp, Mus musculus
  siRNA target sequence for 1810012I01Rik (NM_134091.1,2104-2122).
gtcaagctccgctcactta

SEQ ID NO: 750725 - DNA, 19 bp, Mus musculus
  siRNA target sequence for 1810012I01Rik (NM_134091.1,2124-2142).
ctgcgtggggctaaatgaa

SEQ ID NO: 750726 - DNA, 19 bp, Mus musculus
  siRNA target sequence for 1810012I01Rik (NM_134091.1,2126-2144).
gcgtggggctaaatgaaca

SEQ ID NO: 750727 - DNA, 19 bp, Mus musculus
  siRNA target sequence for 1810012I01Rik (NM_134091.1,2233-2251).
ggctgggtccagatcaagt

SEQ ID NO: 750728 - DNA, 19 bp, Mus musculus
  siRNA target sequence for D15Ertd412e (NM_134094.2,584-602).
ctgccccagcggacattta

SEQ ID NO: 750729 - DNA, 19 bp, Mus musculus
  siRNA target sequence for D15Ertd412e (NM_134094.2,587-605).
ccccagcggacatttatca

SEQ ID NO: 750730 - DNA, 19 bp, Mus musculus
  siRNA target sequence for D15Ertd412e (NM_134094.2,647-665).
cggggatgcttccaaattt

SEQ ID NO: 750731 - DNA, 19 bp, Mus musculus
  siRNA target sequence for D15Ertd412e (NM_134094.2,650-668).
ggatgcttccaaatttgca

SEQ ID NO: 750732 - DNA, 19 bp, Mus musculus
  siRNA target sequence for D15Ertd412e (NM_134094.2,706-724).
ggacaatagactttagaga

SEQ ID NO: 750733 - DNA, 19 bp, Mus musculus
  siRNA target sequence for D15Wsu75e (NM_134095.2,253-271).
catcatgctggggaaacaa

SEQ ID NO: 750734 - DNA, 19 bp, Mus musculus
  siRNA target sequence for D15Wsu75e (NM_134095.2,280-298).
catctggcacacctctata

SEQ ID NO: 750735 - DNA, 19 bp, Mus musculus
  siRNA target sequence for D15Wsu75e (NM_134095.2,283-301).
ctggcacacctctatagtt

SEQ ID NO: 750736 - DNA, 19 bp, Mus musculus
  siRNA target sequence for D15Wsu75e (NM_134095.2,291-309).
cctctatagttgtacacaa

SEQ ID NO: 750737 - DNA, 19 bp, Mus musculus
  siRNA target sequence for D15Wsu75e (NM_134095.2,496-514).
ctgtaacacctttagcaat

SEQ ID NO: 750738 - DNA, 19 bp, Mus musculus
  siRNA target sequence for D15Wsu75e (NM_134095.2,537-555).
ggcgaaagatcccttctta

SEQ ID NO: 750739 - DNA, 19 bp, Mus musculus
  siRNA target sequence for D15Wsu75e (NM_134095.2,539-557).
cgaaagatcccttcttaca

SEQ ID NO: 750740 - DNA, 19 bp, Mus musculus
  siRNA target sequence for D15Wsu75e (NM_134095.2,562-580).
cgacctgccctcagaagtt

SEQ ID NO: 750741 - DNA, 19 bp, Mus musculus
  siRNA target sequence for D15Wsu75e (NM_134095.2,565-583).
cctgccctcagaagttctt

SEQ ID NO: 750742 - DNA, 19 bp, Mus musculus
  siRNA target sequence for AW049604 (NM_134096.1,269-287).
cgctggaacctgtgagatt

SEQ ID NO: 750743 - DNA, 19 bp, Mus musculus
  siRNA target sequence for AW049604 (NM_134096.1,402-420).
gtggacgctcgaattatca

SEQ ID NO: 750744 - DNA, 19 bp, Mus musculus
  siRNA target sequence for AW049604 (NM_134096.1,405-423).
gacgctcgaattatcaaga

SEQ ID NO: 750745 - DNA, 19 bp, Mus musculus
  siRNA target sequence for AW049604 (NM_134096.1,409-427).
ctcgaattatcaagacaaa

SEQ ID NO: 750746 - DNA, 19 bp, Mus musculus
  siRNA target sequence for Fbxo4 (NM_134099.1,322-340).
cgcggctgccggttgatgt

SEQ ID NO: 750747 - DNA, 19 bp, Mus musculus
  siRNA target sequence for Fbxo4 (NM_134099.1,331-349).
cggttgatgtgcagttgta

SEQ ID NO: 750748 - DNA, 19 bp, Mus musculus
  siRNA target sequence for Fbxo4 (NM_134099.1,332-350).
ggttgatgtgcagttgtat

SEQ ID NO: 750749 - DNA, 19 bp, Mus musculus
  siRNA target sequence for Fbxo4 (NM_134099.1,333-351).
gttgatgtgcagttgtata

SEQ ID NO: 750750 - DNA, 19 bp, Mus musculus
  siRNA target sequence for Fbxo4 (NM_134099.1,336-354).
gatgtgcagttgtatatct

SEQ ID NO: 750751 - DNA, 19 bp, Mus musculus
  siRNA target sequence for Fbxo4 (NM_134099.1,347-365).
gtatatcttgtcgtttctt

SEQ ID NO: 750752 - DNA, 19 bp, Mus musculus
  siRNA target sequence for Fbxo4 (NM_134099.1,387-405).
ctgggaagtacagatcatt

SEQ ID NO: 750753 - DNA, 19 bp, Mus musculus
  siRNA target sequence for Fbxo4 (NM_134099.1,472-490).
ggtcttcggttgattggaa

SEQ ID NO: 750754 - DNA, 19 bp, Mus musculus
  siRNA target sequence for Fbxo4 (NM_134099.1,536-554).
caccgacagcacttgtctt

SEQ ID NO: 750755 - DNA, 19 bp, Mus musculus
  siRNA target sequence for Fbxo4 (NM_134099.1,555-573).
gattacatggaggtttata

SEQ ID NO: 750756 - DNA, 19 bp, Mus musculus
  siRNA target sequence for Fbxo4 (NM_134099.1,627-645).
ggagtggttacctctttct

SEQ ID NO: 750757 - DNA, 19 bp, Mus musculus
  siRNA target sequence for Fbxo4 (NM_134099.1,633-651).
gttacctctttcttacact

SEQ ID NO: 750758 - DNA, 19 bp, Mus musculus
  siRNA target sequence for Fbxo4 (NM_134099.1,644-662).
cttacactcactgatcatt

SEQ ID NO: 750759 - DNA, 19 bp, Mus musculus
  siRNA target sequence for Fbxo4 (NM_134099.1,648-666).
cactcactgatcattcaga

SEQ ID NO: 750760 - DNA, 19 bp, Mus musculus
  siRNA target sequence for Fbxo4 (NM_134099.1,780-798).
cagattgatggtattggat

SEQ ID NO: 750761 - DNA, 19 bp, Mus musculus
  siRNA target sequence for Fbxo4 (NM_134099.1,854-872).
ctcgactaccagaaaagaa

SEQ ID NO: 750762 - DNA, 19 bp, Mus musculus
  siRNA target sequence for Fbxo4 (NM_134099.1,1082-1100).
gacagacccagcttttgga

SEQ ID NO: 750763 - DNA, 19 bp, Mus musculus
  siRNA target sequence for Fbxo4 (NM_134099.1,1223-1241).
ggatacagaggctgaaact

SEQ ID NO: 750764 - DNA, 19 bp, Mus musculus
  siRNA target sequence for Fbxo4 (NM_134099.1,1287-1305).
gaatctaagcgtgcaaaat

SEQ ID NO: 750765 - DNA, 19 bp, Mus musculus
  siRNA target sequence for Psmd2 (NM_134101.1,218-236).
cgactcggggagaaagata

SEQ ID NO: 750766 - DNA, 19 bp, Mus musculus
  siRNA target sequence for Psmd2 (NM_134101.1,221-239).
ctcggggagaaagatacat

SEQ ID NO: 750767 - DNA, 19 bp, Mus musculus
  siRNA target sequence for Psmd2 (NM_134101.1,223-241).
cggggagaaagatacatct

SEQ ID NO: 750768 - DNA, 19 bp, Mus musculus
  siRNA target sequence for Psmd2 (NM_134101.1,1677-1695).
ctgagctcaaggataccta

SEQ ID NO: 750769 - DNA, 19 bp, Mus musculus
  siRNA target sequence for Psmd2 (NM_134101.1,1735-1753).
ggggaaaggcgaagctatt

SEQ ID NO: 750770 - DNA, 19 bp, Mus musculus
  siRNA target sequence for Psmd2 (NM_134101.1,1865-1883).
cagctcctccacatctgta

SEQ ID NO: 750771 - DNA, 19 bp, Mus musculus
  siRNA target sequence for Psmd2 (NM_134101.1,2001-2019).
gcattgcacttattgctat

SEQ ID NO: 750772 - DNA, 19 bp, Mus musculus
  siRNA target sequence for Psmd2 (NM_134101.1,2041-2059).
gatggcattgcgaactttt

SEQ ID NO: 750773 - DNA, 19 bp, Mus musculus
  siRNA target sequence for Psmd2 (NM_134101.1,2092-2110).
ccgtcgcgctgtaccttta

SEQ ID NO: 750774 - DNA, 19 bp, Mus musculus
  siRNA target sequence for Psmd2 (NM_134101.1,2114-2132).
ctggcactaatttctgttt

SEQ ID NO: 750775 - DNA, 19 bp, Mus musculus
  siRNA target sequence for Psmd2 (NM_134101.1,2116-2134).
ggcactaatttctgtttca

SEQ ID NO: 750776 - DNA, 19 bp, Mus musculus
  siRNA target sequence for Psmd2 (NM_134101.1,2117-2135).
gcactaatttctgtttcaa

SEQ ID NO: 750777 - DNA, 19 bp, Mus musculus
  siRNA target sequence for Psmd2 (NM_134101.1,2133-2151).
caaatccacgactcaacat

SEQ ID NO: 750778 - DNA, 19 bp, Mus musculus
  siRNA target sequence for Psmd2 (NM_134101.1,2153-2171).
ctggatacgctaagcaaat

SEQ ID NO: 750779 - DNA, 19 bp, Mus musculus
  siRNA target sequence for Psmd2 (NM_134101.1,2156-2174).
gatacgctaagcaaattct

SEQ ID NO: 750780 - DNA, 19 bp, Mus musculus
  siRNA target sequence for Psmd2 (NM_134101.1,2186-2204).
gatccagaagtttcctata

SEQ ID NO: 750781 - DNA, 19 bp, Mus musculus
  siRNA target sequence for Psmd2 (NM_134101.1,2269-2287).
gcgccagttagctcaatat

SEQ ID NO: 750782 - DNA, 19 bp, Mus musculus
  siRNA target sequence for Psmd2 (NM_134101.1,2271-2289).
gccagttagctcaatatca

SEQ ID NO: 750783 - DNA, 19 bp, Mus musculus
  siRNA target sequence for Psmd2 (NM_134101.1,2272-2290).
ccagttagctcaatatcat

SEQ ID NO: 750784 - DNA, 19 bp, Mus musculus
  siRNA target sequence for Psmd2 (NM_134101.1,2327-2345).
gcacagggcttgacacatt

SEQ ID NO: 750785 - DNA, 19 bp, Mus musculus
  siRNA target sequence for Psmd2 (NM_134101.1,2389-2407).
gcagctcatgagtcaagta

SEQ ID NO: 750786 - DNA, 19 bp, Mus musculus
  siRNA target sequence for Psmd2 (NM_134101.1,2514-2532).
ctcggatgctggttacatt

SEQ ID NO: 750787 - DNA, 19 bp, Mus musculus
  siRNA target sequence for Psmd2 (NM_134101.1,2517-2535).
ggatgctggttacatttga

SEQ ID NO: 750788 - DNA, 19 bp, Mus musculus
  siRNA target sequence for Psmd2 (NM_134101.1,2518-2536).
gatgctggttacatttgat

SEQ ID NO: 750789 - DNA, 19 bp, Mus musculus
  siRNA target sequence for AU041483 (NM_134109.1,207-225).
cacacagaacgctatgtta

SEQ ID NO: 750790 - DNA, 19 bp, Mus musculus
  siRNA target sequence for AU041483 (NM_134109.1,209-227).
cacagaacgctatgttact

SEQ ID NO: 750791 - DNA, 19 bp, Mus musculus
  siRNA target sequence for AU041483 (NM_134109.1,211-229).
cagaacgctatgttactct

SEQ ID NO: 750792 - DNA, 19 bp, Mus musculus
  siRNA target sequence for AU041483 (NM_134109.1,291-309).
gtgacatggcgcttcaagt

SEQ ID NO: 750793 - DNA, 19 bp, Mus musculus
  siRNA target sequence for AU041483 (NM_134109.1,386-404).
caatgactgtagtgacaat

SEQ ID NO: 750794 - DNA, 19 bp, Mus musculus
  siRNA target sequence for AU041483 (NM_134109.1,451-469).
ccgtgctgggggtggatta

SEQ ID NO: 750795 - DNA, 19 bp, Mus musculus
  siRNA target sequence for AU041483 (NM_134109.1,497-515).
ccgagcagatcttgtgatt

SEQ ID NO: 750796 - DNA, 19 bp, Mus musculus
  siRNA target sequence for AU041483 (NM_134109.1,498-516).
cgagcagatcttgtgatta

SEQ ID NO: 750797 - DNA, 19 bp, Mus musculus
  siRNA target sequence for AU041483 (NM_134109.1,499-517).
gagcagatcttgtgattaa

SEQ ID NO: 750798 - DNA, 19 bp, Mus musculus
  siRNA target sequence for AU041483 (NM_134109.1,529-547).
ggtgggatcatggagtata

SEQ ID NO: 750799 - DNA, 19 bp, Mus musculus
  siRNA target sequence for AU041483 (NM_134109.1,577-595).
cgtcaggagacccagataa

SEQ ID NO: 750800 - DNA, 19 bp, Mus musculus
  siRNA target sequence for AU041483 (NM_134109.1,618-636).
cattggctgacagtgattt

SEQ ID NO: 750801 - DNA, 19 bp, Mus musculus
  siRNA target sequence for AU041483 (NM_134109.1,622-640).
ggctgacagtgattttcat

SEQ ID NO: 750802 - DNA, 19 bp, Mus musculus
  siRNA target sequence for AU041483 (NM_134109.1,802-820).
ccctaggtcctcagatgat

SEQ ID NO: 750803 - DNA, 19 bp, Mus musculus
  siRNA target sequence for AU041483 (NM_134109.1,894-912).
cgagatctgtccttacagt

SEQ ID NO: 750804 - DNA, 19 bp, Mus musculus
  siRNA target sequence for AU041483 (NM_134109.1,1113-1131).
cacctgcccccactaatca

SEQ ID NO: 750805 - DNA, 19 bp, Mus musculus
  siRNA target sequence for AU041483 (NM_134109.1,1115-1133).
cctgcccccactaatcaga

SEQ ID NO: 750806 - DNA, 19 bp, Mus musculus
  siRNA target sequence for AU041483 (NM_134109.1,1231-1249).
gccatcactccgatttcct

SEQ ID NO: 750807 - DNA, 19 bp, Mus musculus
  siRNA target sequence for Eaf2 (NM_134111.2,495-513).
gcctaggacttccaatctt

SEQ ID NO: 750808 - DNA, 19 bp, Mus musculus
  siRNA target sequence for Eaf2 (NM_134111.2,497-515).
ctaggacttccaatcttgt

SEQ ID NO: 750809 - DNA, 19 bp, Mus musculus
  siRNA target sequence for Eaf2 (NM_134111.2,526-544).
ccatcagaagagaagatgt

SEQ ID NO: 750810 - DNA, 19 bp, Mus musculus
  siRNA target sequence for Eaf2 (NM_134111.2,545-563).
ctccaacgtctctaatgga

SEQ ID NO: 750811 - DNA, 19 bp, Mus musculus
  siRNA target sequence for Eaf2 (NM_134111.2,551-569).
cgtctctaatggatgatat

SEQ ID NO: 750812 - DNA, 19 bp, Mus musculus
  siRNA target sequence for Eaf2 (NM_134111.2,603-621).
ggaccagatgagtagttgt

SEQ ID NO: 750813 - DNA, 19 bp, Mus musculus
  siRNA target sequence for Eaf2 (NM_134111.2,607-625).
cagatgagtagttgtgata

SEQ ID NO: 750814 - DNA, 19 bp, Mus musculus
  siRNA target sequence for Eaf2 (NM_134111.2,634-652).
gattccaaaagttcttcat

SEQ ID NO: 750815 - DNA, 19 bp, Mus musculus
  siRNA target sequence for Eaf2 (NM_134111.2,664-682).
gaggatagttctagtgatt

SEQ ID NO: 750816 - DNA, 19 bp, Mus musculus
  siRNA target sequence for Eaf2 (NM_134111.2,666-684).
ggatagttctagtgattct

SEQ ID NO: 750817 - DNA, 19 bp, Mus musculus
  siRNA target sequence for Eaf2 (NM_134111.2,685-703).
gaagatgatgaccaattct

SEQ ID NO: 750818 - DNA, 19 bp, Mus musculus
  siRNA target sequence for 5630401J11Rik (NM_134114.1,418-436).
gctctgtgggtaagttata

SEQ ID NO: 750819 - DNA, 19 bp, Mus musculus
  siRNA target sequence for 5630401J11Rik (NM_134114.1,419-437).
ctctgtgggtaagttatat

SEQ ID NO: 750820 - DNA, 19 bp, Mus musculus
  siRNA target sequence for Gpsn2 (NM_134118.1,454-472).
cgcaaatacgactttacgt

SEQ ID NO: 750821 - DNA, 19 bp, Mus musculus
  siRNA target sequence for Nrm (NM_134122.1,129-147).
gcaccggagtggaattcgt

SEQ ID NO: 750822 - DNA, 19 bp, Mus musculus
  siRNA target sequence for Nrm (NM_134122.1,331-349).
gtggacatcccggtacttt

SEQ ID NO: 750823 - DNA, 19 bp, Mus musculus
  siRNA target sequence for Nrm (NM_134122.1,565-583).
gggcctcaagcaggtttat

SEQ ID NO: 750824 - DNA, 19 bp, Mus musculus
  siRNA target sequence for Nrm (NM_134122.1,571-589).
caagcaggtttattaccat

SEQ ID NO: 750825 - DNA, 19 bp, Mus musculus
  siRNA target sequence for D19Wsu55e (NM_134129.2,172-190).
gctcgatctccaatgaagt

SEQ ID NO: 750826 - DNA, 19 bp, Mus musculus
  siRNA target sequence for D19Wsu55e (NM_134129.2,205-223).
gcgtgtcccctgtctctaa

SEQ ID NO: 750827 - DNA, 19 bp, Mus musculus
  siRNA target sequence for D19Wsu55e (NM_134129.2,206-224).
cgtgtcccctgtctctaat

SEQ ID NO: 750828 - DNA, 19 bp, Mus musculus
  siRNA target sequence for D19Wsu55e (NM_134129.2,230-248).
gtatgagcggcgactcatt

SEQ ID NO: 750829 - DNA, 19 bp, Mus musculus
  siRNA target sequence for D19Wsu55e (NM_134129.2,240-258).
cgactcattgagaagtaca

SEQ ID NO: 750830 - DNA, 19 bp, Mus musculus
  siRNA target sequence for D19Wsu55e (NM_134129.2,367-385).
gcatcccagccattctgaa

SEQ ID NO: 750831 - DNA, 19 bp, Mus musculus
  siRNA target sequence for D19Wsu55e (NM_134129.2,565-583).
cacaggctgggcttattgt

SEQ ID NO: 750832 - DNA, 19 bp, Mus musculus
  siRNA target sequence for D19Wsu55e (NM_134129.2,872-890).
cactggtggggcagataaa

SEQ ID NO: 750833 - DNA, 19 bp, Mus musculus
  siRNA target sequence for D19Wsu55e (NM_134129.2,881-899).
ggcagataaaaatgttgtt

SEQ ID NO: 750834 - DNA, 19 bp, Mus musculus
  siRNA target sequence for D19Wsu55e (NM_134129.2,934-952).
ctctcaaaggccataccaa

SEQ ID NO: 750835 - DNA, 19 bp, Mus musculus
  siRNA target sequence for D19Wsu55e (NM_134129.2,1003-1021).
cgtcccctgatgctactat

SEQ ID NO: 750836 - DNA, 19 bp, Mus musculus
  siRNA target sequence for D19Wsu55e (NM_134129.2,1014-1032).
gctactatcaggatttggt

SEQ ID NO: 750837 - DNA, 19 bp, Mus musculus
  siRNA target sequence for D19Wsu55e (NM_134129.2,1168-1186).
cagggcgtgtgctcactaa

SEQ ID NO: 750838 - DNA, 19 bp, Mus musculus
  siRNA target sequence for D19Wsu55e (NM_134129.2,1235-1253).
ccctgatgggctcatcttt

SEQ ID NO: 750839 - DNA, 19 bp, Mus musculus
  siRNA target sequence for D19Wsu55e (NM_134129.2,1239-1257).
gatgggctcatctttggaa

SEQ ID NO: 750840 - DNA, 19 bp, Mus musculus
  siRNA target sequence for D19Wsu55e (NM_134129.2,1292-1310).
cttgaaggagcgtaccaat

SEQ ID NO: 750841 - DNA, 19 bp, Mus musculus
  siRNA target sequence for D19Wsu55e (NM_134129.2,1414-1432).
gggacttacgcaagttgaa

SEQ ID NO: 750842 - DNA, 19 bp, Mus musculus
  siRNA target sequence for D19Wsu55e (NM_134129.2,1416-1434).
gacttacgcaagttgaaga

SEQ ID NO: 750843 - DNA, 19 bp, Mus musculus
  siRNA target sequence for D19Wsu55e (NM_134129.2,1469-1487).
ggtgaagtcactaatcttt

SEQ ID NO: 750844 - DNA, 19 bp, Mus musculus
  siRNA target sequence for D19Wsu55e (NM_134129.2,1532-1550).
gatctacatctgcaaacaa

SEQ ID NO: 750845 - DNA, 19 bp, Mus musculus
  siRNA target sequence for D19Wsu55e (NM_134129.2,1619-1637).
caagttcatcgcttcaact

SEQ ID NO: 750846 - DNA, 19 bp, Mus musculus
  siRNA target sequence for E130304C20Rik (NM_134131.1,103-121).
gctacagatgtcttcaatt

SEQ ID NO: 750847 - DNA, 19 bp, Mus musculus
  siRNA target sequence for E130304C20Rik (NM_134131.1,109-127).
gatgtcttcaattccaaaa

SEQ ID NO: 750848 - DNA, 19 bp, Mus musculus
  siRNA target sequence for E130304C20Rik (NM_134131.1,133-151).
gccgttcaggcacaaaaga

SEQ ID NO: 750849 - DNA, 19 bp, Mus musculus
  siRNA target sequence for E130304C20Rik (NM_134131.1,134-152).
ccgttcaggcacaaaagaa

SEQ ID NO: 750850 - DNA, 19 bp, Mus musculus
  siRNA target sequence for E130304C20Rik (NM_134131.1,159-177).
gggcaaaatggtatccaaa

SEQ ID NO: 750851 - DNA, 19 bp, Mus musculus
  siRNA target sequence for E130304C20Rik (NM_134131.1,272-290).
cggagagggtcatcaagaa

SEQ ID NO: 750852 - DNA, 19 bp, Mus musculus
  siRNA target sequence for E130304C20Rik (NM_134131.1,521-539).
ctcacggacgggttaataa

SEQ ID NO: 750853 - DNA, 19 bp, Mus musculus
  siRNA target sequence for E130304C20Rik (NM_134131.1,526-544).
ggacgggttaataatgtct

SEQ ID NO: 750854 - DNA, 19 bp, Mus musculus
  siRNA target sequence for E130304C20Rik (NM_134131.1,527-545).
gacgggttaataatgtctt

SEQ ID NO: 750855 - DNA, 19 bp, Mus musculus
  siRNA target sequence for E130304C20Rik (NM_134131.1,530-548).
gggttaataatgtctttga

SEQ ID NO: 750856 - DNA, 19 bp, Mus musculus
  siRNA target sequence for E130304C20Rik (NM_134131.1,607-625).
cctcacttacagaaacttt

SEQ ID NO: 750857 - DNA, 19 bp, Mus musculus
  siRNA target sequence for E130304C20Rik (NM_134131.1,622-640).
ctttgcgacggcatcaaca

SEQ ID NO: 750858 - DNA, 19 bp, Mus musculus
  siRNA target sequence for E130304C20Rik (NM_134131.1,626-644).
gcgacggcatcaacaaaat

SEQ ID NO: 750859 - DNA, 19 bp, Mus musculus
  siRNA target sequence for E130304C20Rik (NM_134131.1,628-646).
gacggcatcaacaaaatgt

SEQ ID NO: 750860 - DNA, 19 bp, Mus musculus
  siRNA target sequence for AI195350 (NM_134133.1,265-283).
ccactgcggtcatcatcta

SEQ ID NO: 750861 - DNA, 19 bp, Mus musculus
  siRNA target sequence for AI195350 (NM_134133.1,270-288).
gcggtcatcatctatcgaa

SEQ ID NO: 750862 - DNA, 19 bp, Mus musculus
  siRNA target sequence for AI195350 (NM_134133.1,271-289).
cggtcatcatctatcgaat

SEQ ID NO: 750863 - DNA, 19 bp, Mus musculus
  siRNA target sequence for 2510002C16Rik (NM_134134.1,1812-1830).
ctccaagctcacaaaaagt

SEQ ID NO: 750864 - DNA, 19 bp, Mus musculus
  siRNA target sequence for 2510002C16Rik (NM_134134.1,1998-2016).
gctttccccctggataaga

SEQ ID NO: 750865 - DNA, 19 bp, Mus musculus
  siRNA target sequence for 2510002C16Rik (NM_134134.1,2089-2107).
ctagcactggtgaagtaaa

SEQ ID NO: 750866 - DNA, 19 bp, Mus musculus
  siRNA target sequence for 2510002C16Rik (NM_134134.1,2092-2110).
gcactggtgaagtaaagct

SEQ ID NO: 750867 - DNA, 19 bp, Mus musculus
  siRNA target sequence for 2510002C16Rik (NM_134134.1,2093-2111).
cactggtgaagtaaagcta

SEQ ID NO: 750868 - DNA, 19 bp, Mus musculus
  siRNA target sequence for 2510002C16Rik (NM_134134.1,2098-2116).
gtgaagtaaagctatccaa

SEQ ID NO: 750869 - DNA, 19 bp, Mus musculus
  siRNA target sequence for 2510002C16Rik (NM_134134.1,2131-2149).
ggaccccacagttggaaat

SEQ ID NO: 750870 - DNA, 19 bp, Mus musculus
  siRNA target sequence for 2510002C16Rik (NM_134134.1,2134-2152).
ccccacagttggaaatcgt

SEQ ID NO: 750871 - DNA, 19 bp, Mus musculus
  siRNA target sequence for 2510002C16Rik (NM_134134.1,2135-2153).
cccacagttggaaatcgta

SEQ ID NO: 750872 - DNA, 19 bp, Mus musculus
  siRNA target sequence for 2510002C16Rik (NM_134134.1,2166-2184).
gacctgttccctctgtata

SEQ ID NO: 750873 - DNA, 19 bp, Mus musculus
  siRNA target sequence for 2510002C16Rik (NM_134134.1,2171-2189).
gttccctctgtataagtat

SEQ ID NO: 750874 - DNA, 19 bp, Mus musculus
  siRNA target sequence for 2510002C16Rik (NM_134134.1,2175-2193).
cctctgtataagtatagct

SEQ ID NO: 750875 - DNA, 19 bp, Mus musculus
  siRNA target sequence for 2510002C16Rik (NM_134134.1,2232-2250).
ggacggggaaagtgcaaaa

SEQ ID NO: 750876 - DNA, 19 bp, Mus musculus
  siRNA target sequence for 2510002C16Rik (NM_134134.1,2233-2251).
gacggggaaagtgcaaaaa

SEQ ID NO: 750877 - DNA, 19 bp, Mus musculus
  siRNA target sequence for 2510002C16Rik (NM_134134.1,2253-2271).
ccctcctgtagctatgtct

SEQ ID NO: 750878 - DNA, 19 bp, Mus musculus
  siRNA target sequence for 2510002C16Rik (NM_134134.1,2270-2288).
ctacaccaaccgacacaaa

SEQ ID NO: 750879 - DNA, 19 bp, Mus musculus
  siRNA target sequence for 2510002C16Rik (NM_134134.1,2577-2595).
cagacctcttggtcgaatt

SEQ ID NO: 750880 - DNA, 19 bp, Mus musculus
  siRNA target sequence for 2510002C16Rik (NM_134134.1,2579-2597).
gacctcttggtcgaattat

SEQ ID NO: 750881 - DNA, 19 bp, Mus musculus
  siRNA target sequence for 2510002C16Rik (NM_134134.1,2581-2599).
cctcttggtcgaattatta

SEQ ID NO: 750882 - DNA, 19 bp, Mus musculus
  siRNA target sequence for 2510002C16Rik (NM_134134.1,2582-2600).
ctcttggtcgaattattat

SEQ ID NO: 750883 - DNA, 19 bp, Mus musculus
  siRNA target sequence for 2510002C16Rik (NM_134134.1,2735-2753).
gtgtctgaaccctcattgt

SEQ ID NO: 750884 - DNA, 19 bp, Mus musculus
  siRNA target sequence for 2510002C16Rik (NM_134134.1,2973-2991).
ggctattgggcttttgagt

SEQ ID NO: 750885 - DNA, 19 bp, Mus musculus
  siRNA target sequence for 2510002C16Rik (NM_134134.1,2996-3014).
cactgttcgcgactacaat

SEQ ID NO: 750886 - DNA, 19 bp, Mus musculus
  siRNA target sequence for 2510002C16Rik (NM_134134.1,2998-3016).
ctgttcgcgactacaatga

SEQ ID NO: 750887 - DNA, 19 bp, Mus musculus
  siRNA target sequence for 2510002C16Rik (NM_134134.1,3000-3018).
gttcgcgactacaatgaca

SEQ ID NO: 750888 - DNA, 19 bp, Mus musculus
  siRNA target sequence for 2510002C16Rik (NM_134134.1,3004-3022).
gcgactacaatgacatgat

SEQ ID NO: 750889 - DNA, 19 bp, Mus musculus
  siRNA target sequence for 2510002C16Rik (NM_134134.1,3138-3156).
gtgaacgtagaggactttt

SEQ ID NO: 750890 - DNA, 19 bp, Mus musculus
  siRNA target sequence for 2510002C16Rik (NM_134134.1,3163-3181).
caatggagacggaagtgat

SEQ ID NO: 750891 - DNA, 19 bp, Mus musculus
  siRNA target sequence for 2510002C16Rik (NM_134134.1,3221-3239).
gttcgatgcctctgttatt

SEQ ID NO: 750892 - DNA, 19 bp, Mus musculus
  siRNA target sequence for 2510002C16Rik (NM_134134.1,3476-3494).
cttgttggccctctatgaa

SEQ ID NO: 750893 - DNA, 19 bp, Mus musculus
  siRNA target sequence for 2510002C16Rik (NM_134134.1,3578-3596).
ggtctgtggttccaagtat

SEQ ID NO: 750894 - DNA, 19 bp, Mus musculus
  siRNA target sequence for 2510002C16Rik (NM_134134.1,3660-3678).
cctgtctatgtggtagata

SEQ ID NO: 750895 - DNA, 19 bp, Mus musculus
  siRNA target sequence for 2510002C16Rik (NM_134134.1,3804-3822).
ctcttggaccagcattatt

SEQ ID NO: 750896 - DNA, 19 bp, Mus musculus
  siRNA target sequence for 2510002C16Rik (NM_134134.1,3883-3901).
ggcgcattgtccatgcaaa

SEQ ID NO: 750897 - DNA, 19 bp, Mus musculus
  siRNA target sequence for 2510002C16Rik (NM_134134.1,3930-3948).
gctggccaccgttccttat

SEQ ID NO: 750898 - DNA, 19 bp, Mus musculus
  siRNA target sequence for 2510002C16Rik (NM_134134.1,3934-3952).
gccaccgttccttatcact

SEQ ID NO: 750899 - DNA, 19 bp, Mus musculus
  siRNA target sequence for 2510002C16Rik (NM_134134.1,3956-3974).
cccagagctggcaccttat

SEQ ID NO: 750900 - DNA, 19 bp, Mus musculus
  siRNA target sequence for 2510002C16Rik (NM_134134.1,4015-4033).
ggcccatcgcctttgacaa

SEQ ID NO: 750901 - DNA, 19 bp, Mus musculus
  siRNA target sequence for 2510002C16Rik (NM_134134.1,4016-4034).
gcccatcgcctttgacaat

SEQ ID NO: 750902 - DNA, 19 bp, Mus musculus
  siRNA target sequence for 2510002C16Rik (NM_134134.1,4029-4047).
gacaatgccacccactatt

SEQ ID NO: 750903 - DNA, 19 bp, Mus musculus
  siRNA target sequence for 2510002C16Rik (NM_134134.1,4059-4077).
cgcctcatggacttcctta

SEQ ID NO: 750904 - DNA, 19 bp, Mus musculus
  siRNA target sequence for 2510002C16Rik (NM_134134.1,4073-4091).
ccttaccagccgagagatt

SEQ ID NO: 750905 - DNA, 19 bp, Mus musculus
  siRNA target sequence for 6030410I24Rik (NM_134136.1,186-204).
gtgaggtcgctgaggaaat

SEQ ID NO: 750906 - DNA, 19 bp, Mus musculus
  siRNA target sequence for 6030410I24Rik (NM_134136.1,232-250).
gaaccagctgtcacatgaa

SEQ ID NO: 750907 - DNA, 19 bp, Mus musculus
  siRNA target sequence for 6030410I24Rik (NM_134136.1,287-305).
gacatcatgtgcatggaat

SEQ ID NO: 750908 - DNA, 19 bp, Mus musculus
  siRNA target sequence for 6030410I24Rik (NM_134136.1,306-324).
gcctctctcggaagctaaa

SEQ ID NO: 750909 - DNA, 19 bp, Mus musculus
  siRNA target sequence for 6030410I24Rik (NM_134136.1,325-343).
ggaggcagtcactctgtat

SEQ ID NO: 750910 - DNA, 19 bp, Mus musculus
  siRNA target sequence for 6030410I24Rik (NM_134136.1,420-438).
gtttcctaacccttttgaa

SEQ ID NO: 750911 - DNA, 19 bp, Mus musculus
  siRNA target sequence for 6030410I24Rik (NM_134136.1,565-583).
ggtgggtgtagaaacatct

SEQ ID NO: 750912 - DNA, 19 bp, Mus musculus
  siRNA target sequence for 6030410I24Rik (NM_134136.1,568-586).
gggtgtagaaacatctcat

SEQ ID NO: 750913 - DNA, 19 bp, Mus musculus
  siRNA target sequence for 6030410I24Rik (NM_134136.1,569-587).
ggtgtagaaacatctcatt

SEQ ID NO: 750914 - DNA, 19 bp, Mus musculus
  siRNA target sequence for 6030410I24Rik (NM_134136.1,590-608).
gagttggtagaatccattt

SEQ ID NO: 750915 - DNA, 19 bp, Mus musculus
  siRNA target sequence for 6030410I24Rik (NM_134136.1,599-617).
gaatccatttggacatata

SEQ ID NO: 750916 - DNA, 19 bp, Mus musculus
  siRNA target sequence for 6030410I24Rik (NM_134136.1,612-630).
catatatgccgcatgttca

SEQ ID NO: 750917 - DNA, 19 bp, Mus musculus
  siRNA target sequence for 6030410I24Rik (NM_134136.1,637-655).
ggggaaatttcgtaatcgt

SEQ ID NO: 750918 - DNA, 19 bp, Mus musculus
  siRNA target sequence for 6030410I24Rik (NM_134136.1,638-656).
gggaaatttcgtaatcgta

SEQ ID NO: 750919 - DNA, 19 bp, Mus musculus
  siRNA target sequence for 6030410I24Rik (NM_134136.1,639-657).
ggaaatttcgtaatcgtaa

SEQ ID NO: 750920 - DNA, 19 bp, Mus musculus
  siRNA target sequence for 6030410I24Rik (NM_134136.1,674-692).
cctcctgaaaataaactga

SEQ ID NO: 750921 - DNA, 19 bp, Mus musculus
  siRNA target sequence for 6030410I24Rik (NM_134136.1,699-717).
ccataggagccaaaatcca

SEQ ID NO: 750922 - DNA, 19 bp, Mus musculus
  siRNA target sequence for 6030410I24Rik (NM_134136.1,700-718).
cataggagccaaaatccaa

SEQ ID NO: 750923 - DNA, 19 bp, Mus musculus
  siRNA target sequence for 6030410I24Rik (NM_134136.1,724-742).
gcatttagttggtgtcaat

SEQ ID NO: 750924 - DNA, 19 bp, Mus musculus
  siRNA target sequence for 6030410I24Rik (NM_134136.1,735-753).
gtgtcaatgttcctgaaat

SEQ ID NO: 750925 - DNA, 19 bp, Mus musculus
  siRNA target sequence for 6030410I24Rik (NM_134136.1,754-772).
cccttgtatccctatgcta

SEQ ID NO: 750926 - DNA, 19 bp, Mus musculus
  siRNA target sequence for 6030410I24Rik (NM_134136.1,790-808).
gtgggtgagactcactaaa

SEQ ID NO: 750927 - DNA, 19 bp, Mus musculus
  siRNA target sequence for 6030410I24Rik (NM_134136.1,793-811).
ggtgagactcactaaacca

SEQ ID NO: 750928 - DNA, 19 bp, Mus musculus
  siRNA target sequence for 6030410I24Rik (NM_134136.1,804-822).
ctaaaccacagccgtttaa

SEQ ID NO: 750929 - DNA, 19 bp, Mus musculus
  siRNA target sequence for 6030410I24Rik (NM_134136.1,810-828).
cacagccgtttaaagattt

SEQ ID NO: 750930 - DNA, 19 bp, Mus musculus
  siRNA target sequence for 6030410I24Rik (NM_134136.1,814-832).
gccgtttaaagatttcctt

SEQ ID NO: 750931 - DNA, 19 bp, Mus musculus
  siRNA target sequence for 6030410I24Rik (NM_134136.1,815-833).
ccgtttaaagatttccttt

SEQ ID NO: 750932 - DNA, 19 bp, Mus musculus
  siRNA target sequence for 6030410I24Rik (NM_134136.1,834-852).
gcatcagcttgcgaacttt

SEQ ID NO: 750933 - DNA, 19 bp, Mus musculus
  siRNA target sequence for 6030410I24Rik (NM_134136.1,835-853).
catcagcttgcgaactttt

SEQ ID NO: 750934 - DNA, 19 bp, Mus musculus
  siRNA target sequence for 6030410I24Rik (NM_134136.1,876-894).
caacaaactccttgaaata

SEQ ID NO: 750935 - DNA, 19 bp, Mus musculus
  siRNA target sequence for 6030410I24Rik (NM_134136.1,879-897).
caaactccttgaaatacgt

SEQ ID NO: 750936 - DNA, 19 bp, Mus musculus
  siRNA target sequence for 6030410I24Rik (NM_134136.1,924-942).
cccgtaacctggaacactt

SEQ ID NO: 750937 - DNA, 19 bp, Mus musculus
  siRNA target sequence for 6030410I24Rik (NM_134136.1,1039-1057).
cttaggagcttgcaagaat

SEQ ID NO: 750938 - DNA, 19 bp, Mus musculus
  siRNA target sequence for 6030410I24Rik (NM_134136.1,1090-1108).
cactgctgcgcgaaggtta

SEQ ID NO: 750939 - DNA, 19 bp, Mus musculus
  siRNA target sequence for 6030410I24Rik (NM_134136.1,1095-1113).
ctgcgcgaaggttacatga

SEQ ID NO: 750940 - DNA, 19 bp, Mus musculus
  siRNA target sequence for 6030410I24Rik (NM_134136.1,1099-1117).
gcgaaggttacatgaagtt

SEQ ID NO: 750941 - DNA, 19 bp, Mus musculus
  siRNA target sequence for 6030410I24Rik (NM_134136.1,1148-1166).
gtcttttctgccctaaaga

SEQ ID NO: 750942 - DNA, 19 bp, Mus musculus
  siRNA target sequence for 6030410I24Rik (NM_134136.1,1197-1215).
cccttcatctgggatatgt

SEQ ID NO: 750943 - DNA, 19 bp, Mus musculus
  siRNA target sequence for 6030410I24Rik (NM_134136.1,1198-1216).
ccttcatctgggatatgta

SEQ ID NO: 750944 - DNA, 19 bp, Mus musculus
  siRNA target sequence for 6030410I24Rik (NM_134136.1,1379-1397).
ctacacaacccatacaatt

SEQ ID NO: 750945 - DNA, 19 bp, Mus musculus
  siRNA target sequence for 6030410I24Rik (NM_134136.1,1382-1400).
cacaacccatacaattgga

SEQ ID NO: 750946 - DNA, 19 bp, Mus musculus
  siRNA target sequence for 6030410I24Rik (NM_134136.1,1419-1437).
ggatgcgactggttgatat

SEQ ID NO: 750947 - DNA, 19 bp, Mus musculus
  siRNA target sequence for 6030410I24Rik (NM_134136.1,1607-1625).
gtcagcaaccagaattcca

SEQ ID NO: 750948 - DNA, 19 bp, Mus musculus
  siRNA target sequence for 6030410I24Rik (NM_134136.1,1618-1636).
gaattccaacaatgacaat

SEQ ID NO: 750949 - DNA, 19 bp, Mus musculus
  siRNA target sequence for 6030410I24Rik (NM_134136.1,1662-1680).
ccaacctccatgataacaa

SEQ ID NO: 750950 - DNA, 19 bp, Mus musculus
  siRNA target sequence for 6030410I24Rik (NM_134136.1,1701-1719).
cggatgacgacaatgactt

SEQ ID NO: 750951 - DNA, 19 bp, Mus musculus
  siRNA target sequence for 6030410I24Rik (NM_134136.1,1702-1720).
ggatgacgacaatgacttt

SEQ ID NO: 750952 - DNA, 19 bp, Mus musculus
  siRNA target sequence for 6030410I24Rik (NM_134136.1,1755-1773).
cagccgatgcgttgaatga

SEQ ID NO: 750953 - DNA, 19 bp, Mus musculus
  siRNA target sequence for 6030410I24Rik (NM_134136.1,1757-1775).
gccgatgcgttgaatgaga

SEQ ID NO: 750954 - DNA, 19 bp, Mus musculus
  siRNA target sequence for 6030410I24Rik (NM_134136.1,1758-1776).
ccgatgcgttgaatgagat

SEQ ID NO: 750955 - DNA, 19 bp, Mus musculus
  siRNA target sequence for 6030410I24Rik (NM_134136.1,1807-1825).
ggtagccgagagtggaaat

SEQ ID NO: 750956 - DNA, 19 bp, Mus musculus
  siRNA target sequence for 6030410I24Rik (NM_134136.1,1811-1829).
gccgagagtggaaatggta

SEQ ID NO: 750957 - DNA, 19 bp, Mus musculus
  siRNA target sequence for 6030410I24Rik (NM_134136.1,1812-1830).
ccgagagtggaaatggtat

SEQ ID NO: 750958 - DNA, 19 bp, Mus musculus
  siRNA target sequence for 6030410I24Rik (NM_134136.1,1836-1854).
ctcacaatcgggaagttct

SEQ ID NO: 750959 - DNA, 19 bp, Mus musculus
  siRNA target sequence for 6030410I24Rik (NM_134136.1,1893-1911).
gtctacaacgcgtggtaaa

SEQ ID NO: 750960 - DNA, 19 bp, Mus musculus
  siRNA target sequence for 6030410I24Rik (NM_134136.1,1898-1916).
caacgcgtggtaaaaccta

SEQ ID NO: 750961 - DNA, 19 bp, Mus musculus
  siRNA target sequence for 6030410I24Rik (NM_134136.1,1906-1924).
ggtaaaacctacaccaatt

SEQ ID NO: 750962 - DNA, 19 bp, Mus musculus
  siRNA target sequence for 6030410I24Rik (NM_134136.1,2050-2068).
cagggaaacggcagtaagt

SEQ ID NO: 750963 - DNA, 19 bp, Mus musculus
  siRNA target sequence for 6030410I24Rik (NM_134136.1,2186-2204).
cagatcaaagccgatatga

SEQ ID NO: 750964 - DNA, 19 bp, Mus musculus
  siRNA target sequence for 6030410I24Rik (NM_134136.1,2188-2206).
gatcaaagccgatatgaaa

SEQ ID NO: 750965 - DNA, 19 bp, Mus musculus
  siRNA target sequence for 6030410I24Rik (NM_134136.1,2324-2342).
cagagcccggactttgcaa

SEQ ID NO: 750966 - DNA, 19 bp, Mus musculus
  siRNA target sequence for 6030410I24Rik (NM_134136.1,2376-2394).
gccctccagaagtagatgt

SEQ ID NO: 750967 - DNA, 19 bp, Mus musculus
  siRNA target sequence for 6030410I24Rik (NM_134136.1,2377-2395).
ccctccagaagtagatgta

SEQ ID NO: 750968 - DNA, 19 bp, Mus musculus
  siRNA target sequence for 6030410I24Rik (NM_134136.1,2556-2574).
gccgagcctgtgttgtgaa

SEQ ID NO: 750969 - DNA, 19 bp, Mus musculus
  siRNA target sequence for 6030410I24Rik (NM_134136.1,2557-2575).
ccgagcctgtgttgtgaat

SEQ ID NO: 750970 - DNA, 19 bp, Mus musculus
  siRNA target sequence for 6030410I24Rik (NM_134136.1,2589-2607).
cgagatccgccttttcctt

SEQ ID NO: 750971 - DNA, 19 bp, Mus musculus
  siRNA target sequence for 6030410I24Rik (NM_134136.1,2590-2608).
gagatccgccttttccttt

SEQ ID NO: 750972 - DNA, 19 bp, Mus musculus
  siRNA target sequence for 6030410I24Rik (NM_134136.1,2718-2736).
gttgtgacgtgcagtctaa

SEQ ID NO: 750973 - DNA, 19 bp, Mus musculus
  siRNA target sequence for 6030410I24Rik (NM_134136.1,2721-2739).
gtgacgtgcagtctaatga

SEQ ID NO: 750974 - DNA, 19 bp, Mus musculus
  siRNA target sequence for 6030410I24Rik (NM_134136.1,2785-2803).
ccatgtaccgctgatatct

SEQ ID NO: 750975 - DNA, 19 bp, Mus musculus
  siRNA target sequence for 6030410I24Rik (NM_134136.1,2797-2815).
gatatctgagtcagaagtt

SEQ ID NO: 750976 - DNA, 19 bp, Mus musculus
  siRNA target sequence for 6030410I24Rik (NM_134136.1,2851-2869).
gcgaactgcagataagtct

SEQ ID NO: 750977 - DNA, 19 bp, Mus musculus
  siRNA target sequence for 6030410I24Rik (NM_134136.1,2852-2870).
cgaactgcagataagtcta

SEQ ID NO: 750978 - DNA, 19 bp, Mus musculus
  siRNA target sequence for 6030410I24Rik (NM_134136.1,2902-2920).
ccacgtacaggttcttgta

SEQ ID NO: 750979 - DNA, 19 bp, Mus musculus
  siRNA target sequence for 6030410I24Rik (NM_134136.1,2903-2921).
cacgtacaggttcttgtat

SEQ ID NO: 750980 - DNA, 19 bp, Mus musculus
  siRNA target sequence for 6030410I24Rik (NM_134136.1,2905-2923).
cgtacaggttcttgtatta

SEQ ID NO: 750981 - DNA, 19 bp, Mus musculus
  siRNA target sequence for 6030410I24Rik (NM_134136.1,2906-2924).
gtacaggttcttgtattaa

SEQ ID NO: 750982 - DNA, 19 bp, Mus musculus
  siRNA target sequence for 6030410I24Rik (NM_134136.1,2912-2930).
gttcttgtattaaaatcca

SEQ ID NO: 750983 - DNA, 19 bp, Mus musculus
  siRNA target sequence for 6030410I24Rik (NM_134136.1,2936-2954).
cttgttggagtcacaatga

SEQ ID NO: 750984 - DNA, 19 bp, Mus musculus
  siRNA target sequence for 6030410I24Rik (NM_134136.1,2942-2960).
ggagtcacaatgaccaatt

SEQ ID NO: 750985 - DNA, 19 bp, Mus musculus
  siRNA target sequence for 6030410I24Rik (NM_134136.1,2953-2971).
gaccaattgtggaatcaca

SEQ ID NO: 750986 - DNA, 19 bp, Mus musculus
  siRNA target sequence for 6030410I24Rik (NM_134136.1,2968-2986).
cacagatctagtactgaaa

SEQ ID NO: 750987 - DNA, 19 bp, Mus musculus
  siRNA target sequence for 6030410I24Rik (NM_134136.1,2970-2988).
cagatctagtactgaaaga

SEQ ID NO: 750988 - DNA, 19 bp, Mus musculus
  siRNA target sequence for 6030410I24Rik (NM_134136.1,2972-2990).
gatctagtactgaaagact

SEQ ID NO: 750989 - DNA, 19 bp, Mus musculus
  siRNA target sequence for 6030410I24Rik (NM_134136.1,3046-3064).
ggtagaaaatgcaccaatt

SEQ ID NO: 750990 - DNA, 19 bp, Mus musculus
  siRNA target sequence for 6030410I24Rik (NM_134136.1,3060-3078).
caattgtaaaccgatttga

SEQ ID NO: 750991 - DNA, 19 bp, Mus musculus
  siRNA target sequence for 6030410I24Rik (NM_134136.1,3083-3101).
gcacagtgcaagaaactaa

SEQ ID NO: 750992 - DNA, 19 bp, Mus musculus
  siRNA target sequence for 6030410I24Rik (NM_134136.1,3090-3108).
gcaagaaactaaatatgga

SEQ ID NO: 750993 - DNA, 19 bp, Mus musculus
  siRNA target sequence for 6030410I24Rik (NM_134136.1,3113-3131).
gtactagaccaaatactga

SEQ ID NO: 750994 - DNA, 19 bp, Mus musculus
  siRNA target sequence for 6030410I24Rik (NM_134136.1,3176-3194).
cagcaggtagacacactaa

SEQ ID NO: 750995 - DNA, 19 bp, Mus musculus
  siRNA target sequence for 6030410I24Rik (NM_134136.1,3284-3302).
gtgcgcatccgcaattgga

SEQ ID NO: 750996 - DNA, 19 bp, Mus musculus
  siRNA target sequence for 6030410I24Rik (NM_134136.1,3307-3325).
cacgatagccaacatcaat

SEQ ID NO: 750997 - DNA, 19 bp, Mus musculus
  siRNA target sequence for 6030410I24Rik (NM_134136.1,3309-3327).
cgatagccaacatcaatca

SEQ ID NO: 750998 - DNA, 19 bp, Mus musculus
  siRNA target sequence for 6030410I24Rik (NM_134136.1,3310-3328).
gatagccaacatcaatcaa

SEQ ID NO: 750999 - DNA, 19 bp, Mus musculus
  siRNA target sequence for 6030410I24Rik (NM_134136.1,3332-3350).
ctcattaaatacgaattct

SEQ ID NO: 751000 - DNA, 19 bp, Mus musculus
  siRNA target sequence for 6030410I24Rik (NM_134136.1,3363-3381).
ctcggactgaagaggattt

SEQ ID NO: 751001 - DNA, 19 bp, Mus musculus
  siRNA target sequence for 6030410I24Rik (NM_134136.1,3365-3383).
cggactgaagaggatttaa

SEQ ID NO: 751002 - DNA, 19 bp, Mus musculus
  siRNA target sequence for 6030410I24Rik (NM_134136.1,3366-3384).
ggactgaagaggatttaaa

SEQ ID NO: 751003 - DNA, 19 bp, Mus musculus
  siRNA target sequence for 6030410I24Rik (NM_134136.1,3411-3429).
gagaaatctacactttaga

SEQ ID NO: 751004 - DNA, 19 bp, Mus musculus
  siRNA target sequence for 6030410I24Rik (NM_134136.1,3421-3439).
cactttagagggtgttgta

SEQ ID NO: 751005 - DNA, 19 bp, Mus musculus
  siRNA target sequence for 6030410I24Rik (NM_134136.1,3423-3441).
ctttagagggtgttgtaga

SEQ ID NO: 751006 - DNA, 19 bp, Mus musculus
  siRNA target sequence for 6030410I24Rik (NM_134136.1,3440-3458).
gatggagcgccgtattcca

SEQ ID NO: 751007 - DNA, 19 bp, Mus musculus
  siRNA target sequence for 6030410I24Rik (NM_134136.1,3446-3464).
gcgccgtattccatgattt

SEQ ID NO: 751008 - DNA, 19 bp, Mus musculus
  siRNA target sequence for 6030410I24Rik (NM_134136.1,3553-3571).
ctatgctcctcgaagaaaa

SEQ ID NO: 751009 - DNA, 19 bp, Mus musculus
  siRNA target sequence for 6030410I24Rik (NM_134136.1,3574-3592).
gcagttgtctgcagacatt

SEQ ID NO: 751010 - DNA, 19 bp, Mus musculus
  siRNA target sequence for 6030410I24Rik (NM_134136.1,3676-3694).
ccactactgtgatgtcaat

SEQ ID NO: 751011 - DNA, 19 bp, Mus musculus
  siRNA target sequence for 6030410I24Rik (NM_134136.1,3704-3722).
gttgaagacgactacattt

SEQ ID NO: 751012 - DNA, 19 bp, Mus musculus
  siRNA target sequence for 1700017I17Rik (NM_134138.1,103-121).
cggtccccgacctaacgaa

SEQ ID NO: 751013 - DNA, 19 bp, Mus musculus
  siRNA target sequence for 1700017I17Rik (NM_134138.1,107-125).
ccccgacctaacgaacttt

SEQ ID NO: 751014 - DNA, 19 bp, Mus musculus
  siRNA target sequence for 1700017I17Rik (NM_134138.1,108-126).
cccgacctaacgaacttta

SEQ ID NO: 751015 - DNA, 19 bp, Mus musculus
  siRNA target sequence for 1700017I17Rik (NM_134138.1,110-128).
cgacctaacgaactttaca

SEQ ID NO: 751016 - DNA, 19 bp, Mus musculus
  siRNA target sequence for 1700017I17Rik (NM_134138.1,139-157).
cagcagtatccgttggaaa

SEQ ID NO: 751017 - DNA, 19 bp, Mus musculus
  siRNA target sequence for 1700017I17Rik (NM_134138.1,167-185).
gcttgcaatagatctgatt

SEQ ID NO: 751018 - DNA, 19 bp, Mus musculus
  siRNA target sequence for 1700017I17Rik (NM_134138.1,168-186).
cttgcaatagatctgatta

SEQ ID NO: 751019 - DNA, 19 bp, Mus musculus
  siRNA target sequence for 1700017I17Rik (NM_134138.1,171-189).
gcaatagatctgattattt

SEQ ID NO: 751020 - DNA, 19 bp, Mus musculus
  siRNA target sequence for 1700017I17Rik (NM_134138.1,200-218).
catgtgtaagattggttat

SEQ ID NO: 751021 - DNA, 19 bp, Mus musculus
  siRNA target sequence for 1700017I17Rik (NM_134138.1,205-223).
gtaagattggttatttcta

SEQ ID NO: 751022 - DNA, 19 bp, Mus musculus
  siRNA target sequence for 1700017I17Rik (NM_134138.1,209-227).
gattggttatttctatact

SEQ ID NO: 751023 - DNA, 19 bp, Mus musculus
  siRNA target sequence for 1700017I17Rik (NM_134138.1,213-231).
ggttatttctatactgatt

SEQ ID NO: 751024 - DNA, 19 bp, Mus musculus
  siRNA target sequence for 1700017I17Rik (NM_134138.1,295-313).
gtataaatactgaagtgta

SEQ ID NO: 751025 - DNA, 19 bp, Mus musculus
  siRNA target sequence for 1700017I17Rik (NM_134138.1,332-350).
gctagtggtgcttcagtta

SEQ ID NO: 751026 - DNA, 19 bp, Mus musculus
  siRNA target sequence for 1700017I17Rik (NM_134138.1,345-363).
cagttaaggtccatcttta

SEQ ID NO: 751027 - DNA, 19 bp, Mus musculus
  siRNA target sequence for 1700017I17Rik (NM_134138.1,347-365).
gttaaggtccatctttatt

SEQ ID NO: 751028 - DNA, 19 bp, Mus musculus
  siRNA target sequence for 1700017I17Rik (NM_134138.1,352-370).
ggtccatctttattaagta

SEQ ID NO: 751029 - DNA, 19 bp, Mus musculus
  siRNA target sequence for 1700017I17Rik (NM_134138.1,371-389).
caaatcgaagtcattctgt

SEQ ID NO: 751030 - DNA, 19 bp, Mus musculus
  siRNA target sequence for 1700017I17Rik (NM_134138.1,443-461).
ctcaagcagccattcgtat

SEQ ID NO: 751031 - DNA, 19 bp, Mus musculus
  siRNA target sequence for 1700017I17Rik (NM_134138.1,506-524).
gcttacaccttgtttgcaa

SEQ ID NO: 751032 - DNA, 19 bp, Mus musculus
  siRNA target sequence for 1700017I17Rik (NM_134138.1,550-568).
gcctgaactggctagaaat

SEQ ID NO: 751033 - DNA, 19 bp, Mus musculus
  siRNA target sequence for 1700017I17Rik (NM_134138.1,596-614).
gagcgattctgagttttgt

SEQ ID NO: 751034 - DNA, 19 bp, Mus musculus
  siRNA target sequence for 1700017I17Rik (NM_134138.1,598-616).
gcgattctgagttttgtat

SEQ ID NO: 751035 - DNA, 19 bp, Mus musculus
  siRNA target sequence for 1700017I17Rik (NM_134138.1,683-701).
ggcagttctgctaaaattt

SEQ ID NO: 751036 - DNA, 19 bp, Mus musculus
  siRNA target sequence for 1700017I17Rik (NM_134138.1,685-703).
cagttctgctaaaatttgt

SEQ ID NO: 751037 - DNA, 19 bp, Mus musculus
  siRNA target sequence for 1700017I17Rik (NM_134138.1,736-754).
gccttgtggagtaccttaa

SEQ ID NO: 751038 - DNA, 19 bp, Mus musculus
  siRNA target sequence for 1700017I17Rik (NM_134138.1,741-759).
gtggagtaccttaatgaat

SEQ ID NO: 751039 - DNA, 19 bp, Mus musculus
  siRNA target sequence for 1700017I17Rik (NM_134138.1,756-774).
gaatggcttcagataatca

SEQ ID NO: 751040 - DNA, 19 bp, Mus musculus
  siRNA target sequence for 5730436H21Rik (NM_134139.1,82-100).
cggaaacatgcggcaaatt

SEQ ID NO: 751041 - DNA, 19 bp, Mus musculus
  siRNA target sequence for 5730436H21Rik (NM_134139.1,83-101).
ggaaacatgcggcaaattt

SEQ ID NO: 751042 - DNA, 19 bp, Mus musculus
  siRNA target sequence for 5730436H21Rik (NM_134139.1,195-213).
cagaaccgtgaggtacttt

SEQ ID NO: 751043 - DNA, 19 bp, Mus musculus
  siRNA target sequence for 5730436H21Rik (NM_134139.1,201-219).
cgtgaggtactttaatgct

SEQ ID NO: 751044 - DNA, 19 bp, Mus musculus
  siRNA target sequence for 5730436H21Rik (NM_134139.1,289-307).
gcggatggcacccttatca

SEQ ID NO: 751045 - DNA, 19 bp, Mus musculus
  siRNA target sequence for 5730436H21Rik (NM_134139.1,291-309).
ggatggcacccttatcaca

SEQ ID NO: 751046 - DNA, 19 bp, Mus musculus
  siRNA target sequence for 5730436H21Rik (NM_134139.1,292-310).
gatggcacccttatcacat

SEQ ID NO: 751047 - DNA, 19 bp, Mus musculus
  siRNA target sequence for 5730436H21Rik (NM_134139.1,488-506).
ggtctgaggagcctgtatt

SEQ ID NO: 751048 - DNA, 19 bp, Mus musculus
  siRNA target sequence for 5730436H21Rik (NM_134139.1,513-531).
caaaaatgtgcggaatgat

SEQ ID NO: 751049 - DNA, 19 bp, Mus musculus
  siRNA target sequence for 5730436H21Rik (NM_134139.1,618-636).
ccaggtccgtgtctatgat

SEQ ID NO: 751050 - DNA, 19 bp, Mus musculus
  siRNA target sequence for 5730436H21Rik (NM_134139.1,905-923).
cacgtgggctagagcataa

SEQ ID NO: 751051 - DNA, 19 bp, Mus musculus
  siRNA target sequence for 5730436H21Rik (NM_134139.1,908-926).
gtgggctagagcataaggt

SEQ ID NO: 751052 - DNA, 19 bp, Mus musculus
  siRNA target sequence for 5730436H21Rik (NM_134139.1,910-928).
gggctagagcataaggttt

SEQ ID NO: 751053 - DNA, 19 bp, Mus musculus
  siRNA target sequence for 5730436H21Rik (NM_134139.1,911-929).
ggctagagcataaggttta

SEQ ID NO: 751054 - DNA, 19 bp, Mus musculus
  siRNA target sequence for 5730436H21Rik (NM_134139.1,912-930).
gctagagcataaggtttat

SEQ ID NO: 751055 - DNA, 19 bp, Mus musculus
  siRNA target sequence for 5730436H21Rik (NM_134139.1,916-934).
gagcataaggtttatctca

SEQ ID NO: 751056 - DNA, 19 bp, Mus musculus
  siRNA target sequence for 5730436H21Rik (NM_134139.1,1076-1094).
ggaagctcccagatttgga

SEQ ID NO: 751057 - DNA, 19 bp, Mus musculus
  siRNA target sequence for 1110006I15Rik (NM_134142.1,113-131).
cacagcactccgttatgga

SEQ ID NO: 751058 - DNA, 19 bp, Mus musculus
  siRNA target sequence for 1110006I15Rik (NM_134142.1,242-260).
gagacctcagctgatattt

SEQ ID NO: 751059 - DNA, 19 bp, Mus musculus
  siRNA target sequence for 1110006I15Rik (NM_134142.1,318-336).
ccatgcatgtgatttcaga

SEQ ID NO: 751060 - DNA, 19 bp, Mus musculus
  siRNA target sequence for 1110006I15Rik (NM_134142.1,577-595).
cctggggggtctgaaactt

SEQ ID NO: 751061 - DNA, 19 bp, Mus musculus
  siRNA target sequence for 1110006I15Rik (NM_134142.1,580-598).
ggggggtctgaaacttgtt

SEQ ID NO: 751062 - DNA, 19 bp, Mus musculus
  siRNA target sequence for 1110006I15Rik (NM_134142.1,582-600).
ggggtctgaaacttgttct

SEQ ID NO: 751063 - DNA, 19 bp, Mus musculus
  siRNA target sequence for 1110006I15Rik (NM_134142.1,583-601).
gggtctgaaacttgttctt

SEQ ID NO: 751064 - DNA, 19 bp, Mus musculus
  siRNA target sequence for D930010J01Rik (NM_134147.2,360-378).
ggaaggaggccaaatcctt

SEQ ID NO: 751065 - DNA, 19 bp, Mus musculus
  siRNA target sequence for D930010J01Rik (NM_134147.2,365-383).
gaggccaaatcctttctga

SEQ ID NO: 751066 - DNA, 19 bp, Mus musculus
  siRNA target sequence for D930010J01Rik (NM_134147.2,418-436).
cttctgcaaggatttcatt

SEQ ID NO: 751067 - DNA, 19 bp, Mus musculus
  siRNA target sequence for D930010J01Rik (NM_134147.2,491-509).
gtggaggaccccaagtata

SEQ ID NO: 751068 - DNA, 19 bp, Mus musculus
  siRNA target sequence for D930010J01Rik (NM_134147.2,515-533).
gacaagcaactgaatgaga

SEQ ID NO: 751069 - DNA, 19 bp, Mus musculus
  siRNA target sequence for D930010J01Rik (NM_134147.2,1021-1039).
ggagcgccttccccattat

SEQ ID NO: 751070 - DNA, 19 bp, Mus musculus
  siRNA target sequence for D930010J01Rik (NM_134147.2,1022-1040).
gagcgccttccccattatt

SEQ ID NO: 751071 - DNA, 19 bp, Mus musculus
  siRNA target sequence for AI837181 (NM_134149.1,744-762).
cgtgctgcaggcattaagt

SEQ ID NO: 751072 - DNA, 19 bp, Mus musculus
  siRNA target sequence for AI837181 (NM_134149.1,761-779).
gtgcttgctcacttacaaa

SEQ ID NO: 751073 - DNA, 19 bp, Mus musculus
  siRNA target sequence for AI837181 (NM_134149.1,772-790).
cttacaaacctgatgtcta

SEQ ID NO: 751074 - DNA, 19 bp, Mus musculus
  siRNA target sequence for AI837181 (NM_134149.1,827-845).
cctttgccccactctctat

SEQ ID NO: 751075 - DNA, 19 bp, Mus musculus
  siRNA target sequence for Otub1 (NM_134150.1,72-90).
gcgactccgaaggtgttaa

SEQ ID NO: 751076 - DNA, 19 bp, Mus musculus
  siRNA target sequence for Otub1 (NM_134150.1,74-92).
gactccgaaggtgttaact

SEQ ID NO: 751077 - DNA, 19 bp, Mus musculus
  siRNA target sequence for Otub1 (NM_134150.1,120-138).
ctcagcaggaccgaattca

SEQ ID NO: 751078 - DNA, 19 bp, Mus musculus
  siRNA target sequence for Il17rc (NM_134159.2,559-577).
cgtgggttctgcggtattt

SEQ ID NO: 751079 - DNA, 19 bp, Mus musculus
  siRNA target sequence for Il17rc (NM_134159.2,563-581).
ggttctgcggtatttgact

SEQ ID NO: 751080 - DNA, 19 bp, Mus musculus
  siRNA target sequence for Il17rc (NM_134159.2,567-585).
ctgcggtatttgactgttt

SEQ ID NO: 751081 - DNA, 19 bp, Mus musculus
  siRNA target sequence for Il17rc (NM_134159.2,580-598).
ctgtttcgaggctagtctt

SEQ ID NO: 751082 - DNA, 19 bp, Mus musculus
  siRNA target sequence for Il17rc (NM_134159.2,667-685).
gctgcctgatggtgacaat

SEQ ID NO: 751083 - DNA, 19 bp, Mus musculus
  siRNA target sequence for Il17rc (NM_134159.2,710-728).
gaggagcaggactttagct

SEQ ID NO: 751084 - DNA, 19 bp, Mus musculus
  siRNA target sequence for Il17rc (NM_134159.2,763-781).
caaatccttgtggtacaaa

SEQ ID NO: 751085 - DNA, 19 bp, Mus musculus
  siRNA target sequence for Il17rc (NM_134159.2,768-786).
ccttgtggtacaaaaacct

SEQ ID NO: 751086 - DNA, 19 bp, Mus musculus
  siRNA target sequence for Il17rc (NM_134159.2,794-812).
cctcagaacattactttaa

SEQ ID NO: 751087 - DNA, 19 bp, Mus musculus
  siRNA target sequence for Il17rc (NM_134159.2,1079-1097).
gtgaatgagccacaagatt

SEQ ID NO: 751088 - DNA, 19 bp, Mus musculus
  siRNA target sequence for Il17rc (NM_134159.2,1713-1731).
gcgtggtaatccttctctt

SEQ ID NO: 751089 - DNA, 19 bp, Mus musculus
  siRNA target sequence for Il17rc (NM_134159.2,1824-1842).
gcgtgctacccgatttcct

SEQ ID NO: 751090 - DNA, 19 bp, Mus musculus
  siRNA target sequence for Il17rc (NM_134159.2,2110-2128).
gggaccctgcactacacta

SEQ ID NO: 751091 - DNA, 19 bp, Mus musculus
  siRNA target sequence for V1rc12 (NM_134167.1,856-874).
cgaataagcatgatgctaa

SEQ ID NO: 751092 - DNA, 19 bp, Mus musculus
  siRNA target sequence for V1rc13 (NM_134168.1,317-335).
gtcccaactccgctttgtt

SEQ ID NO: 751093 - DNA, 19 bp, Mus musculus
  siRNA target sequence for V1rc13 (NM_134168.1,520-538).
ggactaatttcaacaatca

SEQ ID NO: 751094 - DNA, 19 bp, Mus musculus
  siRNA target sequence for V1rc13 (NM_134168.1,521-539).
gactaatttcaacaatcat

SEQ ID NO: 751095 - DNA, 19 bp, Mus musculus
  siRNA target sequence for V1rc13 (NM_134168.1,537-555).
cataaccttaagagatgta

SEQ ID NO: 751096 - DNA, 19 bp, Mus musculus
  siRNA target sequence for V1rc13 (NM_134168.1,856-874).
cgaatactcatgattctaa

SEQ ID NO: 751097 - DNA, 19 bp, Mus musculus
  siRNA target sequence for V1rc13 (NM_134168.1,862-880).
ctcatgattctaaaaagta

SEQ ID NO: 751098 - DNA, 19 bp, Mus musculus
  siRNA target sequence for V1rc14 (NM_134169.1,855-873).
ccgaataaacattatgata

SEQ ID NO: 751099 - DNA, 19 bp, Mus musculus
  siRNA target sequence for V1rc14 (NM_134169.1,856-874).
cgaataaacattatgataa

SEQ ID NO: 751100 - DNA, 19 bp, Mus musculus
  siRNA target sequence for V1rc16 (NM_134171.1,732-750).
cttcatcatatcatctaca

SEQ ID NO: 751101 - DNA, 19 bp, Mus musculus
  siRNA target sequence for V1rc17 (NM_134172.1,479-497).
gcaaatactgctcatactt

SEQ ID NO: 751102 - DNA, 19 bp, Mus musculus
  siRNA target sequence for V1rc17 (NM_134172.1,480-498).
caaatactgctcatacttt

SEQ ID NO: 751103 - DNA, 19 bp, Mus musculus
  siRNA target sequence for V1rc17 (NM_134172.1,491-509).
catactttcccacaaacaa

SEQ ID NO: 751104 - DNA, 19 bp, Mus musculus
  siRNA target sequence for V1rc17 (NM_134172.1,864-882).
caaatgccaccaagctttt

SEQ ID NO: 751105 - DNA, 19 bp, Mus musculus
  siRNA target sequence for V1rc17 (NM_134172.1,890-908).
gggcaatttttgtcttctt

SEQ ID NO: 751106 - DNA, 19 bp, Mus musculus
  siRNA target sequence for V1rc17 (NM_134172.1,949-967).
gccactttggatctgaatt

SEQ ID NO: 751107 - DNA, 19 bp, Mus musculus
  siRNA target sequence for V1rc18 (NM_134173.1,838-856).
caaatcacttcggatgaaa

SEQ ID NO: 751108 - DNA, 19 bp, Mus musculus
  siRNA target sequence for V1rc18 (NM_134173.1,843-861).
cacttcggatgaaagaata

SEQ ID NO: 751109 - DNA, 19 bp, Mus musculus
  siRNA target sequence for V1rc18 (NM_134173.1,845-863).
cttcggatgaaagaataat

SEQ ID NO: 751110 - DNA, 19 bp, Mus musculus
  siRNA target sequence for V1rc18 (NM_134173.1,848-866).
cggatgaaagaataatcaa

SEQ ID NO: 751111 - DNA, 19 bp, Mus musculus
  siRNA target sequence for V1rc19 (NM_134174.1,730-748).
gacttaatcatttcaatga

SEQ ID NO: 751112 - DNA, 19 bp, Mus musculus
  siRNA target sequence for V1rc19 (NM_134174.1,888-906).
caaaacaccaccatatgta

SEQ ID NO: 751113 - DNA, 19 bp, Mus musculus
  siRNA target sequence for V1rc21 (NM_134176.1,405-423).
ctctgtcagtactgacata

SEQ ID NO: 751114 - DNA, 19 bp, Mus musculus
  siRNA target sequence for V1rc21 (NM_134176.1,407-425).
ctgtcagtactgacataat

SEQ ID NO: 751115 - DNA, 19 bp, Mus musculus
  siRNA target sequence for V1rc21 (NM_134176.1,409-427).
gtcagtactgacataatat

SEQ ID NO: 751116 - DNA, 19 bp, Mus musculus
  siRNA target sequence for V1rc21 (NM_134176.1,413-431).
gtactgacataatattcta

SEQ ID NO: 751117 - DNA, 19 bp, Mus musculus
  siRNA target sequence for V1rc21 (NM_134176.1,468-486).
gataatggtcactaaatct

SEQ ID NO: 751118 - DNA, 19 bp, Mus musculus
  siRNA target sequence for V1rc22 (NM_134177.1,864-882).
caacgtgttgaaaaactca

SEQ ID NO: 751119 - DNA, 19 bp, Mus musculus
  siRNA target sequence for V1rc24 (NM_134179.1,166-184).
gcaggagataattggttta

SEQ ID NO: 751120 - DNA, 19 bp, Mus musculus
  siRNA target sequence for V1rc26 (NM_134181.1,821-839).
caatttctcctttagttca

SEQ ID NO: 751121 - DNA, 19 bp, Mus musculus
  siRNA target sequence for V1rc27 (NM_134182.1,44-62).
gactcctaccaaatatgtt

SEQ ID NO: 751122 - DNA, 19 bp, Mus musculus
  siRNA target sequence for V1rc27 (NM_134182.1,543-561).
gtccagagatatatgtctt

SEQ ID NO: 751123 - DNA, 19 bp, Mus musculus
  siRNA target sequence for V1rc27 (NM_134182.1,896-914).
ctccaagtgccagtagatt

SEQ ID NO: 751124 - DNA, 19 bp, Mus musculus
  siRNA target sequence for V1rc27 (NM_134182.1,898-916).
ccaagtgccagtagatttt

SEQ ID NO: 751125 - DNA, 19 bp, Mus musculus
  siRNA target sequence for V1rc28 (NM_134183.1,392-410).
ggtccttcaatgtattatt

SEQ ID NO: 751126 - DNA, 19 bp, Mus musculus
  siRNA target sequence for V1rc28 (NM_134183.1,403-421).
gtattattcagtagtagat

SEQ ID NO: 751127 - DNA, 19 bp, Mus musculus
  siRNA target sequence for V1re1 (NM_134190.1,212-230).
gatggaatgacttattcga

SEQ ID NO: 751128 - DNA, 19 bp, Mus musculus
  siRNA target sequence for V1re1 (NM_134190.1,235-253).
gttgggtgtaaactaatta

SEQ ID NO: 751129 - DNA, 19 bp, Mus musculus
  siRNA target sequence for V1re1 (NM_134190.1,238-256).
gggtgtaaactaattatgt

SEQ ID NO: 751130 - DNA, 19 bp, Mus musculus
  siRNA target sequence for V1re1 (NM_134190.1,239-257).
ggtgtaaactaattatgta

SEQ ID NO: 751131 - DNA, 19 bp, Mus musculus
  siRNA target sequence for V1re1 (NM_134190.1,603-621).
caccatgatagtcatactt

SEQ ID NO: 751132 - DNA, 19 bp, Mus musculus
  siRNA target sequence for V1re1 (NM_134190.1,671-689).
ctaggacctctgctgaaaa

SEQ ID NO: 751133 - DNA, 19 bp, Mus musculus
  siRNA target sequence for V1re1 (NM_134190.1,893-911).
cctgtataggaaatctaaa

SEQ ID NO: 751134 - DNA, 19 bp, Mus musculus
  siRNA target sequence for V1re1 (NM_134190.1,894-912).
ctgtataggaaatctaaaa

SEQ ID NO: 751135 - DNA, 19 bp, Mus musculus
  siRNA target sequence for V1re2 (NM_134191.1,3-21).
ggacttgaggaccatgata

SEQ ID NO: 751136 - DNA, 19 bp, Mus musculus
  siRNA target sequence for V1re2 (NM_134191.1,185-203).
gactccctgaagtagtgaa

SEQ ID NO: 751137 - DNA, 19 bp, Mus musculus
  siRNA target sequence for V1re2 (NM_134191.1,190-208).
cctgaagtagtgaaagctt

SEQ ID NO: 751138 - DNA, 19 bp, Mus musculus
  siRNA target sequence for V1re2 (NM_134191.1,191-209).
ctgaagtagtgaaagcttt

SEQ ID NO: 751139 - DNA, 19 bp, Mus musculus
  siRNA target sequence for V1re2 (NM_134191.1,238-256).
gggtgcaaacttactaatt

SEQ ID NO: 751140 - DNA, 19 bp, Mus musculus
  siRNA target sequence for V1re2 (NM_134191.1,239-257).
ggtgcaaacttactaatta

SEQ ID NO: 751141 - DNA, 19 bp, Mus musculus
  siRNA target sequence for V1re2 (NM_134191.1,451-469).
gctaccaataggaataaaa

SEQ ID NO: 751142 - DNA, 19 bp, Mus musculus
  siRNA target sequence for V1re2 (NM_134191.1,452-470).
ctaccaataggaataaaaa

SEQ ID NO: 751143 - DNA, 19 bp, Mus musculus
  siRNA target sequence for V1re2 (NM_134191.1,589-607).
gtaagttccagtgctttta

SEQ ID NO: 751144 - DNA, 19 bp, Mus musculus
  siRNA target sequence for V1re2 (NM_134191.1,593-611).
gttccagtgcttttatgat

SEQ ID NO: 751145 - DNA, 19 bp, Mus musculus
  siRNA target sequence for V1re2 (NM_134191.1,711-729).
gactctggtttgtacattt

SEQ ID NO: 751146 - DNA, 19 bp, Mus musculus
  siRNA target sequence for V1re2 (NM_134191.1,713-731).
ctctggtttgtacatttct

SEQ ID NO: 751147 - DNA, 19 bp, Mus musculus
  siRNA target sequence for V1re4 (NM_134193.1,61-79).
gaaaacttacttcaataca

SEQ ID NO: 751148 - DNA, 19 bp, Mus musculus
  siRNA target sequence for V1re4 (NM_134193.1,92-110).
gtgattattaccataattt

SEQ ID NO: 751149 - DNA, 19 bp, Mus musculus
  siRNA target sequence for V1re4 (NM_134193.1,94-112).
gattattaccataatttaa

SEQ ID NO: 751150 - DNA, 19 bp, Mus musculus
  siRNA target sequence for V1re4 (NM_134193.1,122-140).
cgttgaatgacctaatgga

SEQ ID NO: 751151 - DNA, 19 bp, Mus musculus
  siRNA target sequence for V1re4 (NM_134193.1,258-276).
gatcagagacatgattcta

SEQ ID NO: 751152 - DNA, 19 bp, Mus musculus
  siRNA target sequence for V1re4 (NM_134193.1,261-279).
cagagacatgattctagta

SEQ ID NO: 751153 - DNA, 19 bp, Mus musculus
  siRNA target sequence for V1re4 (NM_134193.1,479-497).
cccattggaagaaatttaa

SEQ ID NO: 751154 - DNA, 19 bp, Mus musculus
  siRNA target sequence for V1re4 (NM_134193.1,587-605).
ctaccaagacgaatagcaa

SEQ ID NO: 751155 - DNA, 19 bp, Mus musculus
  siRNA target sequence for V1re4 (NM_134193.1,590-608).
ccaagacgaatagcaaaaa

SEQ ID NO: 751156 - DNA, 19 bp, Mus musculus
  siRNA target sequence for V1re4 (NM_134193.1,741-759).
catgattgcaatacttcat

SEQ ID NO: 751157 - DNA, 19 bp, Mus musculus
  siRNA target sequence for V1re4 (NM_134193.1,744-762).
gattgcaatacttcatgta

SEQ ID NO: 751158 - DNA, 19 bp, Mus musculus
  siRNA target sequence for V1re4 (NM_134193.1,789-807).
ctgtactcatacttatcca

SEQ ID NO: 751159 - DNA, 19 bp, Mus musculus
  siRNA target sequence for V1re4 (NM_134193.1,796-814).
catacttatccaagaagat

SEQ ID NO: 751160 - DNA, 19 bp, Mus musculus
  siRNA target sequence for V1re4 (NM_134193.1,1028-1046).
cctgtataagaaatataga

SEQ ID NO: 751161 - DNA, 19 bp, Mus musculus
  siRNA target sequence for V1re5 (NM_134194.1,19-37).
gcaataggaatcatactct

SEQ ID NO: 751162 - DNA, 19 bp, Mus musculus
  siRNA target sequence for V1re5 (NM_134194.1,20-38).
caataggaatcatactctt

SEQ ID NO: 751163 - DNA, 19 bp, Mus musculus
  siRNA target sequence for V1re5 (NM_134194.1,102-120).
ctacaaggaatgcacatta

SEQ ID NO: 751164 - DNA, 19 bp, Mus musculus
  siRNA target sequence for V1re5 (NM_134194.1,116-134).
cattaaagattgtagactt

SEQ ID NO: 751165 - DNA, 19 bp, Mus musculus
  siRNA target sequence for V1re5 (NM_134194.1,385-403).
ggactcttgattttactct

SEQ ID NO: 751166 - DNA, 19 bp, Mus musculus
  siRNA target sequence for V1re5 (NM_134194.1,416-434).
gcctgctagtaaatacttt

SEQ ID NO: 751167 - DNA, 19 bp, Mus musculus
  siRNA target sequence for V1re5 (NM_134194.1,417-435).
cctgctagtaaatactttt

SEQ ID NO: 751168 - DNA, 19 bp, Mus musculus
  siRNA target sequence for V1re5 (NM_134194.1,509-527).
ctcaaggtcgtgacaaagt

SEQ ID NO: 751169 - DNA, 19 bp, Mus musculus
  siRNA target sequence for V1re5 (NM_134194.1,609-627).
gattgtgacactttatgga

SEQ ID NO: 751170 - DNA, 19 bp, Mus musculus
  siRNA target sequence for V1re5 (NM_134194.1,636-654).
gagggttcaaggtattctt

SEQ ID NO: 751171 - DNA, 19 bp, Mus musculus
  siRNA target sequence for V1re5 (NM_134194.1,659-677).
cacatgcttcacaacgaat

SEQ ID NO: 751172 - DNA, 19 bp, Mus musculus
  siRNA target sequence for V1re5 (NM_134194.1,853-871).
gtgatgagtcattattcca

SEQ ID NO: 751173 - DNA, 19 bp, Mus musculus
  siRNA target sequence for V1re6 (NM_134195.1,27-45).
gcaagaaaacttcagtata

SEQ ID NO: 751174 - DNA, 19 bp, Mus musculus
  siRNA target sequence for V1re6 (NM_134195.1,64-82).
caattgctgcctcgattta

SEQ ID NO: 751175 - DNA, 19 bp, Mus musculus
  siRNA target sequence for V1re6 (NM_134195.1,69-87).
gctgcctcgatttaaaaaa

SEQ ID NO: 751176 - DNA, 19 bp, Mus musculus
  siRNA target sequence for V1re6 (NM_134195.1,100-118).
gccagaatggacttgagaa

SEQ ID NO: 751177 - DNA, 19 bp, Mus musculus
  siRNA target sequence for V1re6 (NM_134195.1,196-214).
ctaatcctttacttcaata

SEQ ID NO: 751178 - DNA, 19 bp, Mus musculus
  siRNA target sequence for V1re6 (NM_134195.1,201-219).
cctttacttcaataaacat

SEQ ID NO: 751179 - DNA, 19 bp, Mus musculus
  siRNA target sequence for V1re6 (NM_134195.1,263-281).
ccaactccttgattaatat

SEQ ID NO: 751180 - DNA, 19 bp, Mus musculus
  siRNA target sequence for V1re6 (NM_134195.1,320-338).
ggaatctggtattcaatga

SEQ ID NO: 751181 - DNA, 19 bp, Mus musculus
  siRNA target sequence for V1re6 (NM_134195.1,321-339).
gaatctggtattcaatgat

SEQ ID NO: 751182 - DNA, 19 bp, Mus musculus
  siRNA target sequence for V1re6 (NM_134195.1,342-360).
cgggtgcaagcttcttttt

SEQ ID NO: 751183 - DNA, 19 bp, Mus musculus
  siRNA target sequence for V1re6 (NM_134195.1,619-637).
gaccatgataaaatagtat

SEQ ID NO: 751184 - DNA, 19 bp, Mus musculus
  siRNA target sequence for V1re6 (NM_134195.1,679-697).
ctttctatactccttgtat

SEQ ID NO: 751185 - DNA, 19 bp, Mus musculus
  siRNA target sequence for V1re6 (NM_134195.1,831-849).
ctttgtagtattttgtact

SEQ ID NO: 751186 - DNA, 19 bp, Mus musculus
  siRNA target sequence for V1re6 (NM_134195.1,892-910).
cccagtcggtggttgatga

SEQ ID NO: 751187 - DNA, 19 bp, Mus musculus
  siRNA target sequence for V1re6 (NM_134195.1,893-911).
ccagtcggtggttgatgaa

SEQ ID NO: 751188 - DNA, 19 bp, Mus musculus
  siRNA target sequence for V1re6 (NM_134195.1,949-967).
ggtccatttgtgataggtt

SEQ ID NO: 751189 - DNA, 19 bp, Mus musculus
  siRNA target sequence for V1re6 (NM_134195.1,958-976).
gtgataggttgtgatttca

SEQ ID NO: 751190 - DNA, 19 bp, Mus musculus
  siRNA target sequence for V1re6 (NM_134195.1,993-1011).
ctttacatggacaagaaat

SEQ ID NO: 751191 - DNA, 19 bp, Mus musculus
  siRNA target sequence for V1re8 (NM_134197.1,96-114).
gagtacagttgggattcta

SEQ ID NO: 751192 - DNA, 19 bp, Mus musculus
  siRNA target sequence for V1re8 (NM_134197.1,127-145).
ctcctttcctactacttga

SEQ ID NO: 751193 - DNA, 19 bp, Mus musculus
  siRNA target sequence for V1re8 (NM_134197.1,129-147).
cctttcctactacttgatt

SEQ ID NO: 751194 - DNA, 19 bp, Mus musculus
  siRNA target sequence for V1re8 (NM_134197.1,130-148).
ctttcctactacttgatta

SEQ ID NO: 751195 - DNA, 19 bp, Mus musculus
  siRNA target sequence for V1re8 (NM_134197.1,195-213).
gcatctgatcatagtgaat

SEQ ID NO: 751196 - DNA, 19 bp, Mus musculus
  siRNA target sequence for V1re8 (NM_134197.1,196-214).
catctgatcatagtgaata

SEQ ID NO: 751197 - DNA, 19 bp, Mus musculus
  siRNA target sequence for V1re8 (NM_134197.1,199-217).
ctgatcatagtgaatatct

SEQ ID NO: 751198 - DNA, 19 bp, Mus musculus
  siRNA target sequence for V1re8 (NM_134197.1,225-243).
gctctcgaaaggaatgtct

SEQ ID NO: 751199 - DNA, 19 bp, Mus musculus
  siRNA target sequence for V1re8 (NM_134197.1,280-298).
gatgattggagctatcaat

SEQ ID NO: 751200 - DNA, 19 bp, Mus musculus
  siRNA target sequence for V1re8 (NM_134197.1,462-480).
cttgtacatcttcataaat

SEQ ID NO: 751201 - DNA, 19 bp, Mus musculus
  siRNA target sequence for V1re8 (NM_134197.1,490-508).
cctttgtacatgtccataa

SEQ ID NO: 751202 - DNA, 19 bp, Mus musculus
  siRNA target sequence for V1re8 (NM_134197.1,546-564).
caaactctatactattgta

SEQ ID NO: 751203 - DNA, 19 bp, Mus musculus
  siRNA target sequence for V1re8 (NM_134197.1,552-570).
ctatactattgtaggatat

SEQ ID NO: 751204 - DNA, 19 bp, Mus musculus
  siRNA target sequence for V1re8 (NM_134197.1,557-575).
ctattgtaggatatgacaa

SEQ ID NO: 751205 - DNA, 19 bp, Mus musculus
  siRNA target sequence for V1re8 (NM_134197.1,649-667).
ggtagctcagtgattgtca

SEQ ID NO: 751206 - DNA, 19 bp, Mus musculus
  siRNA target sequence for V1re8 (NM_134197.1,650-668).
gtagctcagtgattgtcat

SEQ ID NO: 751207 - DNA, 19 bp, Mus musculus
  siRNA target sequence for V1re8 (NM_134197.1,677-695).
ggcacaaacagcaagttca

SEQ ID NO: 751208 - DNA, 19 bp, Mus musculus
  siRNA target sequence for V1re8 (NM_134197.1,678-696).
gcacaaacagcaagttcaa

SEQ ID NO: 751209 - DNA, 19 bp, Mus musculus
  siRNA target sequence for V1re8 (NM_134197.1,773-791).
ccatctttatggcttttta

SEQ ID NO: 751210 - DNA, 19 bp, Mus musculus
  siRNA target sequence for V1re8 (NM_134197.1,777-795).
ctttatggctttttataca

SEQ ID NO: 751211 - DNA, 19 bp, Mus musculus
  siRNA target sequence for V1re8 (NM_134197.1,803-821).
ccatcttacatgcttacaa

SEQ ID NO: 751212 - DNA, 19 bp, Mus musculus
  siRNA target sequence for V1re8 (NM_134197.1,804-822).
catcttacatgcttacaat

SEQ ID NO: 751213 - DNA, 19 bp, Mus musculus
  siRNA target sequence for V1re8 (NM_134197.1,815-833).
cttacaatgctctatttca

SEQ ID NO: 751214 - DNA, 19 bp, Mus musculus
  siRNA target sequence for V1re8 (NM_134197.1,823-841).
gctctatttcacagttcaa

SEQ ID NO: 751215 - DNA, 19 bp, Mus musculus
  siRNA target sequence for V1re8 (NM_134197.1,861-879).
cgcaaacattatatcttta

SEQ ID NO: 751216 - DNA, 19 bp, Mus musculus
  siRNA target sequence for V1re8 (NM_134197.1,904-922).
gtacttatgagtcaatcat

SEQ ID NO: 751217 - DNA, 19 bp, Mus musculus
  siRNA target sequence for V1rf1 (NM_134198.1,51-69).
ggcagaagggtctcatcaa

SEQ ID NO: 751218 - DNA, 19 bp, Mus musculus
  siRNA target sequence for V1rf1 (NM_134198.1,58-76).
gggtctcatcaaatcactt

SEQ ID NO: 751219 - DNA, 19 bp, Mus musculus
  siRNA target sequence for V1rf1 (NM_134198.1,124-142).
ggagttttgggcaattcgt

SEQ ID NO: 751220 - DNA, 19 bp, Mus musculus
  siRNA target sequence for V1rf1 (NM_134198.1,141-159).
gtgtctcctctacaattat

SEQ ID NO: 751221 - DNA, 19 bp, Mus musculus
  siRNA target sequence for V1rf1 (NM_134198.1,203-221).
ggattttgatgcacttgat

SEQ ID NO: 751222 - DNA, 19 bp, Mus musculus
  siRNA target sequence for V1rf1 (NM_134198.1,204-222).
gattttgatgcacttgatt

SEQ ID NO: 751223 - DNA, 19 bp, Mus musculus
  siRNA target sequence for V1rf1 (NM_134198.1,270-288).
ggcagcttttggttttcaa

SEQ ID NO: 751224 - DNA, 19 bp, Mus musculus
  siRNA target sequence for V1rf1 (NM_134198.1,358-376).
ggcagtgcatgcttattga

SEQ ID NO: 751225 - DNA, 19 bp, Mus musculus
  siRNA target sequence for V1rf1 (NM_134198.1,360-378).
cagtgcatgcttattgagt

SEQ ID NO: 751226 - DNA, 19 bp, Mus musculus
  siRNA target sequence for V1rf1 (NM_134198.1,462-480).
cctatacttgacttggatt

SEQ ID NO: 751227 - DNA, 19 bp, Mus musculus
  siRNA target sequence for V1rf1 (NM_134198.1,468-486).
cttgacttggattctatct

SEQ ID NO: 751228 - DNA, 19 bp, Mus musculus
  siRNA target sequence for V1rf1 (NM_134198.1,497-515).
gcattgtttcccttaagta

SEQ ID NO: 751229 - DNA, 19 bp, Mus musculus
  siRNA target sequence for V1rf1 (NM_134198.1,538-556).
gttaacaacacaaatctca

SEQ ID NO: 751230 - DNA, 19 bp, Mus musculus
  siRNA target sequence for V1rf1 (NM_134198.1,565-583).
ggttactgttcttctcttt

SEQ ID NO: 751231 - DNA, 19 bp, Mus musculus
  siRNA target sequence for V1rf1 (NM_134198.1,610-628).
catgcagcacacgtgatta

SEQ ID NO: 751232 - DNA, 19 bp, Mus musculus
  siRNA target sequence for V1rf1 (NM_134198.1,701-719).
ggcagaggatggaacatat

SEQ ID NO: 751233 - DNA, 19 bp, Mus musculus
  siRNA target sequence for V1rf1 (NM_134198.1,715-733).
catatgattaggagcaata

SEQ ID NO: 751234 - DNA, 19 bp, Mus musculus
  siRNA target sequence for V1rf1 (NM_134198.1,764-782).
caacacaaaccattcttct

SEQ ID NO: 751235 - DNA, 19 bp, Mus musculus
  siRNA target sequence for V1rf1 (NM_134198.1,784-802).
ctagtgagtacctttgtat

SEQ ID NO: 751236 - DNA, 19 bp, Mus musculus
  siRNA target sequence for V1rf1 (NM_134198.1,860-878).
cctggcatctagtgagtat

SEQ ID NO: 751237 - DNA, 19 bp, Mus musculus
  siRNA target sequence for V1rf1 (NM_134198.1,864-882).
gcatctagtgagtatccat

SEQ ID NO: 751238 - DNA, 19 bp, Mus musculus
  siRNA target sequence for V1rf1 (NM_134198.1,945-963).
cacatccatccattgcttt

SEQ ID NO: 751239 - DNA, 19 bp, Mus musculus
  siRNA target sequence for V1rf1 (NM_134198.1,960-978).
ctttgcttgggtaaactat

SEQ ID NO: 751240 - DNA, 19 bp, Mus musculus
  siRNA target sequence for V1rf1 (NM_134198.1,964-982).
gcttgggtaaactatcaaa

SEQ ID NO: 751241 - DNA, 19 bp, Mus musculus
  siRNA target sequence for V1rf3 (NM_134200.1,11-29).
gtgacattgtaattagtgt

SEQ ID NO: 751242 - DNA, 19 bp, Mus musculus
  siRNA target sequence for V1rf3 (NM_134200.1,36-54).
cttatcacagactgtagtt

SEQ ID NO: 751243 - DNA, 19 bp, Mus musculus
  siRNA target sequence for V1rf3 (NM_134200.1,65-83).
gcaactccttcttagtcta

SEQ ID NO: 751244 - DNA, 19 bp, Mus musculus
  siRNA target sequence for V1rf3 (NM_134200.1,71-89).
ccttcttagtctaccatta

SEQ ID NO: 751245 - DNA, 19 bp, Mus musculus
  siRNA target sequence for V1rf3 (NM_134200.1,72-90).
cttcttagtctaccattat

SEQ ID NO: 751246 - DNA, 19 bp, Mus musculus
  siRNA target sequence for V1rf3 (NM_134200.1,91-109).
ctgatgctttactacatga

SEQ ID NO: 751247 - DNA, 19 bp, Mus musculus
  siRNA target sequence for V1rf3 (NM_134200.1,242-260).
gtaaactgaccttctatct

SEQ ID NO: 751248 - DNA, 19 bp, Mus musculus
  siRNA target sequence for V1rf3 (NM_134200.1,365-383).
ccaagtctcccagttacat

SEQ ID NO: 751249 - DNA, 19 bp, Mus musculus
  siRNA target sequence for V1rf3 (NM_134200.1,404-422).
gttgggccctgtcattctt

SEQ ID NO: 751250 - DNA, 19 bp, Mus musculus
  siRNA target sequence for V1rf3 (NM_134200.1,407-425).
gggccctgtcattcttagt

SEQ ID NO: 751251 - DNA, 19 bp, Mus musculus
  siRNA target sequence for V1rf3 (NM_134200.1,411-429).
cctgtcattcttagtaaat

SEQ ID NO: 751252 - DNA, 19 bp, Mus musculus
  siRNA target sequence for V1rf3 (NM_134200.1,412-430).
ctgtcattcttagtaaata

SEQ ID NO: 751253 - DNA, 19 bp, Mus musculus
  siRNA target sequence for V1rf3 (NM_134200.1,414-432).
gtcattcttagtaaatata

SEQ ID NO: 751254 - DNA, 19 bp, Mus musculus
  siRNA target sequence for V1rf3 (NM_134200.1,420-438).
cttagtaaatatagctttt

SEQ ID NO: 751255 - DNA, 19 bp, Mus musculus
  siRNA target sequence for V1rf3 (NM_134200.1,481-499).
cgcctaagggtgtatggta

SEQ ID NO: 751256 - DNA, 19 bp, Mus musculus
  siRNA target sequence for V1rf3 (NM_134200.1,482-500).
gcctaagggtgtatggtat

SEQ ID NO: 751257 - DNA, 19 bp, Mus musculus
  siRNA target sequence for V1rf3 (NM_134200.1,501-519).
ctgttctactgttcatcat

SEQ ID NO: 751258 - DNA, 19 bp, Mus musculus
  siRNA target sequence for V1rf3 (NM_134200.1,506-524).
ctactgttcatcataacaa

SEQ ID NO: 751259 - DNA, 19 bp, Mus musculus
  siRNA target sequence for V1rf3 (NM_134200.1,599-617).
gtggctacatggtttgtat

SEQ ID NO: 751260 - DNA, 19 bp, Mus musculus
  siRNA target sequence for V1rf3 (NM_134200.1,652-670).
cataggagtaccttttcat

SEQ ID NO: 751261 - DNA, 19 bp, Mus musculus
  siRNA target sequence for V1rf3 (NM_134200.1,791-809).
cctcattatgggtgaacat

SEQ ID NO: 751262 - DNA, 19 bp, Mus musculus
  siRNA target sequence for V1rf3 (NM_134200.1,807-825).
catggcttcagtagttact

SEQ ID NO: 751263 - DNA, 19 bp, Mus musculus
  siRNA target sequence for V1rf4 (NM_134201.1,4-22).
gattcatttaggatagaga

SEQ ID NO: 751264 - DNA, 19 bp, Mus musculus
  siRNA target sequence for V1rf4 (NM_134201.1,63-81).
cctcagtttgagaacaaga

SEQ ID NO: 751265 - DNA, 19 bp, Mus musculus
  siRNA target sequence for V1rf4 (NM_134201.1,94-112).
gaagccagtgagttgtcta

SEQ ID NO: 751266 - DNA, 19 bp, Mus musculus
  siRNA target sequence for V1rf4 (NM_134201.1,103-121).
gagttgtctataggaataa

SEQ ID NO: 751267 - DNA, 19 bp, Mus musculus
  siRNA target sequence for V1rf4 (NM_134201.1,110-128).
ctataggaataatattcat

SEQ ID NO: 751268 - DNA, 19 bp, Mus musculus
  siRNA target sequence for V1rf4 (NM_134201.1,131-149).
ctctgactataattggaat

SEQ ID NO: 751269 - DNA, 19 bp, Mus musculus
  siRNA target sequence for V1rf4 (NM_134201.1,145-163).
ggaattctagggaatgtca

SEQ ID NO: 751270 - DNA, 19 bp, Mus musculus
  siRNA target sequence for V1rf4 (NM_134201.1,155-173).
ggaatgtcactcttctata

SEQ ID NO: 751271 - DNA, 19 bp, Mus musculus
  siRNA target sequence for V1rf4 (NM_134201.1,177-195).
ctatacatatttttaccta

SEQ ID NO: 751272 - DNA, 19 bp, Mus musculus
  siRNA target sequence for V1rf4 (NM_134201.1,192-210).
cctaacaaggtacaagtta

SEQ ID NO: 751273 - DNA, 19 bp, Mus musculus
  siRNA target sequence for V1rf4 (NM_134201.1,193-211).
ctaacaaggtacaagttaa

SEQ ID NO: 751274 - DNA, 19 bp, Mus musculus
  siRNA target sequence for V1rf4 (NM_134201.1,215-233).
ctacagactggattctaat

SEQ ID NO: 751275 - DNA, 19 bp, Mus musculus
  siRNA target sequence for V1rf4 (NM_134201.1,274-292).
ggagtgccccagacaatat

SEQ ID NO: 751276 - DNA, 19 bp, Mus musculus
  siRNA target sequence for V1rf4 (NM_134201.1,293-311).
cctcatttgggtttaaaga

SEQ ID NO: 751277 - DNA, 19 bp, Mus musculus
  siRNA target sequence for V1rf4 (NM_134201.1,379-397).
ggcagcacctcatttctta

SEQ ID NO: 751278 - DNA, 19 bp, Mus musculus
  siRNA target sequence for V1rf4 (NM_134201.1,434-452).
ccagggattcagaacttaa

SEQ ID NO: 751279 - DNA, 19 bp, Mus musculus
  siRNA target sequence for V1rf4 (NM_134201.1,490-508).
ctcaactgggtgatttatt

SEQ ID NO: 751280 - DNA, 19 bp, Mus musculus
  siRNA target sequence for V1rf4 (NM_134201.1,647-665).
caggtcctgaagtgctttt

SEQ ID NO: 751281 - DNA, 19 bp, Mus musculus
  siRNA target sequence for V1rf4 (NM_134201.1,724-742).
cagatgatgcaatacatgt

SEQ ID NO: 751282 - DNA, 19 bp, Mus musculus
  siRNA target sequence for V1rf4 (NM_134201.1,839-857).
cttctgtttgtcaatcctt

SEQ ID NO: 751283 - DNA, 19 bp, Mus musculus
  siRNA target sequence for V1rf4 (NM_134201.1,868-886).
ctttataatcccaaatggt

SEQ ID NO: 751284 - DNA, 19 bp, Mus musculus
  siRNA target sequence for V1rf4 (NM_134201.1,962-980).
ctcggatttccagttactt

SEQ ID NO: 751285 - DNA, 19 bp, Mus musculus
  siRNA target sequence for V1rf4 (NM_134201.1,964-982).
cggatttccagttacttga

SEQ ID NO: 751286 - DNA, 19 bp, Mus musculus
  siRNA target sequence for V1rf4 (NM_134201.1,965-983).
ggatttccagttacttgaa

SEQ ID NO: 751287 - DNA, 19 bp, Mus musculus
  siRNA target sequence for V1rf4 (NM_134201.1,966-984).
gatttccagttacttgaaa

SEQ ID NO: 751288 - DNA, 19 bp, Mus musculus
  siRNA target sequence for V1rf5 (NM_134202.1,43-61).
gtaggagtgatcatcttgt

SEQ ID NO: 751289 - DNA, 19 bp, Mus musculus
  siRNA target sequence for V1rf5 (NM_134202.1,47-65).
gagtgatcatcttgtttca

SEQ ID NO: 751290 - DNA, 19 bp, Mus musculus
  siRNA target sequence for V1rf5 (NM_134202.1,99-117).
cctctaccactatatgttt

SEQ ID NO: 751291 - DNA, 19 bp, Mus musculus
  siRNA target sequence for V1rf5 (NM_134202.1,102-120).
ctaccactatatgtttctt

SEQ ID NO: 751292 - DNA, 19 bp, Mus musculus
  siRNA target sequence for V1rf5 (NM_134202.1,186-204).
cttaacagtactgttcaaa

SEQ ID NO: 751293 - DNA, 19 bp, Mus musculus
  siRNA target sequence for V1rf5 (NM_134202.1,355-373).
cccagcgactccagacatt

SEQ ID NO: 751294 - DNA, 19 bp, Mus musculus
  siRNA target sequence for V1rf5 (NM_134202.1,359-377).
gcgactccagacattcaga

SEQ ID NO: 751295 - DNA, 19 bp, Mus musculus
  siRNA target sequence for V1rf5 (NM_134202.1,366-384).
cagacattcagagcttaaa

SEQ ID NO: 751296 - DNA, 19 bp, Mus musculus
  siRNA target sequence for V1rf5 (NM_134202.1,393-411).
gcacaaatgcattggttat

SEQ ID NO: 751297 - DNA, 19 bp, Mus musculus
  siRNA target sequence for V1rf5 (NM_134202.1,394-412).
cacaaatgcattggttatt

SEQ ID NO: 751298 - DNA, 19 bp, Mus musculus
  siRNA target sequence for V1rf5 (NM_134202.1,396-414).
caaatgcattggttattct

SEQ ID NO: 751299 - DNA, 19 bp, Mus musculus
  siRNA target sequence for V1rf5 (NM_134202.1,417-435).
gtacctgaactgggtaatt

SEQ ID NO: 751300 - DNA, 19 bp, Mus musculus
  siRNA target sequence for V1rf5 (NM_134202.1,420-438).
cctgaactgggtaattcat

SEQ ID NO: 751301 - DNA, 19 bp, Mus musculus
  siRNA target sequence for V1rf5 (NM_134202.1,426-444).
ctgggtaattcatttcatt

SEQ ID NO: 751302 - DNA, 19 bp, Mus musculus
  siRNA target sequence for V1rf5 (NM_134202.1,428-446).
gggtaattcatttcattat

SEQ ID NO: 751303 - DNA, 19 bp, Mus musculus
  siRNA target sequence for V1rf5 (NM_134202.1,495-513).
cacaacaaacctaaaatct

SEQ ID NO: 751304 - DNA, 19 bp, Mus musculus
  siRNA target sequence for V1rf5 (NM_134202.1,497-515).
caacaaacctaaaatcttt

SEQ ID NO: 751305 - DNA, 19 bp, Mus musculus
  siRNA target sequence for V1rf5 (NM_134202.1,525-543).
ctatgctgtgcgtcatgat

SEQ ID NO: 751306 - DNA, 19 bp, Mus musculus
  siRNA target sequence for V1rf5 (NM_134202.1,555-573).
catcctgtatgcagcatta

SEQ ID NO: 751307 - DNA, 19 bp, Mus musculus
  siRNA target sequence for V1rf5 (NM_134202.1,576-594).
gtcaagtcctgatatactt

SEQ ID NO: 751308 - DNA, 19 bp, Mus musculus
  siRNA target sequence for V1rf5 (NM_134202.1,578-596).
caagtcctgatatactttt

SEQ ID NO: 751309 - DNA, 19 bp, Mus musculus
  siRNA target sequence for V1rf5 (NM_134202.1,597-615).
gctaggactcatgctatat

SEQ ID NO: 751310 - DNA, 19 bp, Mus musculus
  siRNA target sequence for V1rf5 (NM_134202.1,729-747).
cctcctactcgttagcata

SEQ ID NO: 751311 - DNA, 19 bp, Mus musculus
  siRNA target sequence for V1rf5 (NM_134202.1,730-748).
ctcctactcgttagcatat

SEQ ID NO: 751312 - DNA, 19 bp, Mus musculus
  siRNA target sequence for V1rf5 (NM_134202.1,732-750).
cctactcgttagcatattt

SEQ ID NO: 751313 - DNA, 19 bp, Mus musculus
  siRNA target sequence for V1rf5 (NM_134202.1,758-776).
gttacacaatctctactat

SEQ ID NO: 751314 - DNA, 19 bp, Mus musculus
  siRNA target sequence for V1rg2 (NM_134203.1,104-122).
ctactggaaagcctttaat

SEQ ID NO: 751315 - DNA, 19 bp, Mus musculus
  siRNA target sequence for V1rg2 (NM_134203.1,232-250).
gatattggatgtaagttaa

SEQ ID NO: 751316 - DNA, 19 bp, Mus musculus
  siRNA target sequence for V1rg2 (NM_134203.1,238-256).
ggatgtaagttaataaact

SEQ ID NO: 751317 - DNA, 19 bp, Mus musculus
  siRNA target sequence for V1rg2 (NM_134203.1,255-273).
ctatgtttaccgaataaca

SEQ ID NO: 751318 - DNA, 19 bp, Mus musculus
  siRNA target sequence for V1rg2 (NM_134203.1,326-344).
caattagccccaacaacta

SEQ ID NO: 751319 - DNA, 19 bp, Mus musculus
  siRNA target sequence for V1rg2 (NM_134203.1,347-365).
ggtgggtgacacttaaaca

SEQ ID NO: 751320 - DNA, 19 bp, Mus musculus
  siRNA target sequence for V1rg2 (NM_134203.1,348-366).
gtgggtgacacttaaacaa

SEQ ID NO: 751321 - DNA, 19 bp, Mus musculus
  siRNA target sequence for V1rg2 (NM_134203.1,351-369).
ggtgacacttaaacaaaga

SEQ ID NO: 751322 - DNA, 19 bp, Mus musculus
  siRNA target sequence for V1rg2 (NM_134203.1,475-493).
gtgactaagtgggagattt

SEQ ID NO: 751323 - DNA, 19 bp, Mus musculus
  siRNA target sequence for V1rg2 (NM_134203.1,477-495).
gactaagtgggagatttat

SEQ ID NO: 751324 - DNA, 19 bp, Mus musculus
  siRNA target sequence for V1rg2 (NM_134203.1,504-522).
ctcatggtttacttttgga

SEQ ID NO: 751325 - DNA, 19 bp, Mus musculus
  siRNA target sequence for V1rg2 (NM_134203.1,529-547).
ggagctgcattgtatatgt

SEQ ID NO: 751326 - DNA, 19 bp, Mus musculus
  siRNA target sequence for V1rg2 (NM_134203.1,530-548).
gagctgcattgtatatgtt

SEQ ID NO: 751327 - DNA, 19 bp, Mus musculus
  siRNA target sequence for V1rg2 (NM_134203.1,640-658).
gtcaaatatatccatagtt

SEQ ID NO: 751328 - DNA, 19 bp, Mus musculus
  siRNA target sequence for V1rg2 (NM_134203.1,642-660).
caaatatatccatagttct

SEQ ID NO: 751329 - DNA, 19 bp, Mus musculus
  siRNA target sequence for V1rg2 (NM_134203.1,730-748).
gtcatctcttatttgttct

SEQ ID NO: 751330 - DNA, 19 bp, Mus musculus
  siRNA target sequence for V1rg2 (NM_134203.1,744-762).
gttctcctccattatggtt

SEQ ID NO: 751331 - DNA, 19 bp, Mus musculus
  siRNA target sequence for V1rg2 (NM_134203.1,747-765).
ctcctccattatggttata

SEQ ID NO: 751332 - DNA, 19 bp, Mus musculus
  siRNA target sequence for V1rg2 (NM_134203.1,749-767).
cctccattatggttatatt

SEQ ID NO: 751333 - DNA, 19 bp, Mus musculus
  siRNA target sequence for V1rg2 (NM_134203.1,771-789).
gtcctacttcaaatatcca

SEQ ID NO: 751334 - DNA, 19 bp, Mus musculus
  siRNA target sequence for V1rg2 (NM_134203.1,792-810).
gttactgcgagtaagtgta

SEQ ID NO: 751335 - DNA, 19 bp, Mus musculus
  siRNA target sequence for V1rg2 (NM_134203.1,796-814).
ctgcgagtaagtgtattta

SEQ ID NO: 751336 - DNA, 19 bp, Mus musculus
  siRNA target sequence for V1rg3 (NM_134204.1,407-425).
ggcttgtgcattcatttct

SEQ ID NO: 751337 - DNA, 19 bp, Mus musculus
  siRNA target sequence for V1rg3 (NM_134204.1,408-426).
gcttgtgcattcatttcta

SEQ ID NO: 751338 - DNA, 19 bp, Mus musculus
  siRNA target sequence for V1rg3 (NM_134204.1,766-784).
gttacggcctactccaaat

SEQ ID NO: 751339 - DNA, 19 bp, Mus musculus
  siRNA target sequence for V1rg3 (NM_134204.1,875-893).
ctatttccaacctgtttct

SEQ ID NO: 751340 - DNA, 19 bp, Mus musculus
  siRNA target sequence for V1rg3 (NM_134204.1,896-914).
cctgctttcataataactt

SEQ ID NO: 751341 - DNA, 19 bp, Mus musculus
  siRNA target sequence for V1rg4 (NM_134205.1,9-27).
ctctggtctcataccaata

SEQ ID NO: 751342 - DNA, 19 bp, Mus musculus
  siRNA target sequence for V1rg4 (NM_134205.1,11-29).
ctggtctcataccaataat

SEQ ID NO: 751343 - DNA, 19 bp, Mus musculus
  siRNA target sequence for V1rg4 (NM_134205.1,13-31).
ggtctcataccaataataa

SEQ ID NO: 751344 - DNA, 19 bp, Mus musculus
  siRNA target sequence for V1rg4 (NM_134205.1,337-355).
ggggtgtcattttatgcta

SEQ ID NO: 751345 - DNA, 19 bp, Mus musculus
  siRNA target sequence for V1rg4 (NM_134205.1,338-356).
gggtgtcattttatgctat

SEQ ID NO: 751346 - DNA, 19 bp, Mus musculus
  siRNA target sequence for V1rg4 (NM_134205.1,566-584).
catggttctccttaagcaa

SEQ ID NO: 751347 - DNA, 19 bp, Mus musculus
  siRNA target sequence for V1rg4 (NM_134205.1,569-587).
ggttctccttaagcaattt

SEQ ID NO: 751348 - DNA, 19 bp, Mus musculus
  siRNA target sequence for V1rg4 (NM_134205.1,573-591).
ctccttaagcaattttgca

SEQ ID NO: 751349 - DNA, 19 bp, Mus musculus
  siRNA target sequence for V1rg4 (NM_134205.1,595-613).
gcactgtacttgttcttat

SEQ ID NO: 751350 - DNA, 19 bp, Mus musculus
  siRNA target sequence for V1rg4 (NM_134205.1,852-870).
gctatggagcataagtgta

SEQ ID NO: 751351 - DNA, 19 bp, Mus musculus
  siRNA target sequence for V1rg4 (NM_134205.1,858-876).
gagcataagtgtatttaca

SEQ ID NO: 751352 - DNA, 19 bp, Mus musculus
  siRNA target sequence for V1rg5 (NM_134206.1,197-215).
cactgtcaaattatggata

SEQ ID NO: 751353 - DNA, 19 bp, Mus musculus
  siRNA target sequence for V1rg5 (NM_134206.1,199-217).
ctgtcaaattatggatata

SEQ ID NO: 751354 - DNA, 19 bp, Mus musculus
  siRNA target sequence for V1rg5 (NM_134206.1,201-219).
gtcaaattatggatataaa

SEQ ID NO: 751355 - DNA, 19 bp, Mus musculus
  siRNA target sequence for V1rg5 (NM_134206.1,249-267).
gataatatatgcttatcga

SEQ ID NO: 751356 - DNA, 19 bp, Mus musculus
  siRNA target sequence for V1rg5 (NM_134206.1,448-466).
gtgtcaggtccccattaca

SEQ ID NO: 751357 - DNA, 19 bp, Mus musculus
  siRNA target sequence for V1rg5 (NM_134206.1,452-470).
caggtccccattacaacaa

SEQ ID NO: 751358 - DNA, 19 bp, Mus musculus
  siRNA target sequence for V1rg5 (NM_134206.1,457-475).
ccccattacaacaaaaata

SEQ ID NO: 751359 - DNA, 19 bp, Mus musculus
  siRNA target sequence for V1rg5 (NM_134206.1,490-508).
catcttgggtactgttcat

SEQ ID NO: 751360 - DNA, 19 bp, Mus musculus
  siRNA target sequence for V1rg5 (NM_134206.1,730-748).
gtcctatcttacttatact

SEQ ID NO: 751361 - DNA, 19 bp, Mus musculus
  siRNA target sequence for V1rg5 (NM_134206.1,749-767).
cctctattttgataatctt

SEQ ID NO: 751362 - DNA, 19 bp, Mus musculus
  siRNA target sequence for V1rg5 (NM_134206.1,750-768).
ctctattttgataatcttt

SEQ ID NO: 751363 - DNA, 19 bp, Mus musculus
  siRNA target sequence for V1rg5 (NM_134206.1,793-811).
ctatgggtggtaagtatat

SEQ ID NO: 751364 - DNA, 19 bp, Mus musculus
  siRNA target sequence for V1rg5 (NM_134206.1,798-816).
ggtggtaagtatatttaca

SEQ ID NO: 751365 - DNA, 19 bp, Mus musculus
  siRNA target sequence for V1rg5 (NM_134206.1,875-893).
ctaggtccagcatactttt

SEQ ID NO: 751366 - DNA, 19 bp, Mus musculus
  siRNA target sequence for V1rg6 (NM_134207.1,10-28).
gctaccaggcattttgcaa

SEQ ID NO: 751367 - DNA, 19 bp, Mus musculus
  siRNA target sequence for V1rg6 (NM_134207.1,856-874).
gttatcattagcaacatga

SEQ ID NO: 751368 - DNA, 19 bp, Mus musculus
  siRNA target sequence for V1rg7 (NM_134208.1,24-42).
ggcaacgggaatattcttt

SEQ ID NO: 751369 - DNA, 19 bp, Mus musculus
  siRNA target sequence for V1rg7 (NM_134208.1,25-43).
gcaacgggaatattctttt

SEQ ID NO: 751370 - DNA, 19 bp, Mus musculus
  siRNA target sequence for V1rg7 (NM_134208.1,26-44).
caacgggaatattcttttt

SEQ ID NO: 751371 - DNA, 19 bp, Mus musculus
  siRNA target sequence for V1rg7 (NM_134208.1,105-123).
gataaccaccagaaagcat

SEQ ID NO: 751372 - DNA, 19 bp, Mus musculus
  siRNA target sequence for V1rg7 (NM_134208.1,163-181).
gctaactgcttaactatca

SEQ ID NO: 751373 - DNA, 19 bp, Mus musculus
  siRNA target sequence for V1rg7 (NM_134208.1,164-182).
ctaactgcttaactatcat

SEQ ID NO: 751374 - DNA, 19 bp, Mus musculus
  siRNA target sequence for V1rg7 (NM_134208.1,168-186).
ctgcttaactatcatttca

SEQ ID NO: 751375 - DNA, 19 bp, Mus musculus
  siRNA target sequence for V1rg7 (NM_134208.1,414-432).
gcttgtgtacatgctttta

SEQ ID NO: 751376 - DNA, 19 bp, Mus musculus
  siRNA target sequence for V1rg7 (NM_134208.1,460-478).
ggacccagttataacaaaa

SEQ ID NO: 751377 - DNA, 19 bp, Mus musculus
  siRNA target sequence for V1rg7 (NM_134208.1,461-479).
gacccagttataacaaaaa

SEQ ID NO: 751378 - DNA, 19 bp, Mus musculus
  siRNA target sequence for V1rg7 (NM_134208.1,465-483).
cagttataacaaaaatgta

SEQ ID NO: 751379 - DNA, 19 bp, Mus musculus
  siRNA target sequence for V1rg7 (NM_134208.1,481-499).
gtaactaacatggtgaatt

SEQ ID NO: 751380 - DNA, 19 bp, Mus musculus
  siRNA target sequence for V1rg7 (NM_134208.1,542-560).
ctctgtatatgtttctact

SEQ ID NO: 751381 - DNA, 19 bp, Mus musculus
  siRNA target sequence for V1rg7 (NM_134208.1,755-773).
cttctatacatgtaatatt

SEQ ID NO: 751382 - DNA, 19 bp, Mus musculus
  siRNA target sequence for V1rg7 (NM_134208.1,917-935).
gatggcttccttcaaatat

SEQ ID NO: 751383 - DNA, 19 bp, Mus musculus
  siRNA target sequence for V1rg7 (NM_134208.1,921-939).
gcttccttcaaatattgca

SEQ ID NO: 751384 - DNA, 19 bp, Mus musculus
  siRNA target sequence for V1rg7 (NM_134208.1,922-940).
cttccttcaaatattgcat

SEQ ID NO: 751385 - DNA, 19 bp, Mus musculus
  siRNA target sequence for V1rg8 (NM_134209.1,25-43).
gtagtgggaatattactct

SEQ ID NO: 751386 - DNA, 19 bp, Mus musculus
  siRNA target sequence for V1rg8 (NM_134209.1,111-129).
cactgggaaacatttaaca

SEQ ID NO: 751387 - DNA, 19 bp, Mus musculus
  siRNA target sequence for V1rg8 (NM_134209.1,462-480).
ccccatttctagcaaaaat

SEQ ID NO: 751388 - DNA, 19 bp, Mus musculus
  siRNA target sequence for V1rg8 (NM_134209.1,481-499).
gtgacgaacgtgatgagtt

SEQ ID NO: 751389 - DNA, 19 bp, Mus musculus
  siRNA target sequence for V1rg8 (NM_134209.1,483-501).
gacgaacgtgatgagttat

SEQ ID NO: 751390 - DNA, 19 bp, Mus musculus
  siRNA target sequence for V1rg9 (NM_134210.1,39-57).
cctcttttcccagattgta

SEQ ID NO: 751391 - DNA, 19 bp, Mus musculus
  siRNA target sequence for V1rg9 (NM_134210.1,203-221).
cattgtctgattttggatt

SEQ ID NO: 751392 - DNA, 19 bp, Mus musculus
  siRNA target sequence for V1rg9 (NM_134210.1,454-472).
gtgacagtccccacttaca

SEQ ID NO: 751393 - DNA, 19 bp, Mus musculus
  siRNA target sequence for V1rg9 (NM_134210.1,460-478).
gtccccacttacagcaaaa

SEQ ID NO: 751394 - DNA, 19 bp, Mus musculus
  siRNA target sequence for V1rg9 (NM_134210.1,462-480).
ccccacttacagcaaaaat

SEQ ID NO: 751395 - DNA, 19 bp, Mus musculus
  siRNA target sequence for V1rg9 (NM_134210.1,481-499).
gtgacaaacacgaatagtt

SEQ ID NO: 751396 - DNA, 19 bp, Mus musculus
  siRNA target sequence for V1rg9 (NM_134210.1,483-501).
gacaaacacgaatagttat

SEQ ID NO: 751397 - DNA, 19 bp, Mus musculus
  siRNA target sequence for V1rg9 (NM_134210.1,605-623).
gtgtctctatgatgaatat

SEQ ID NO: 751398 - DNA, 19 bp, Mus musculus
  siRNA target sequence for V1rh1 (NM_134211.1,91-109).
gtttgcatcctgtatacaa

SEQ ID NO: 751399 - DNA, 19 bp, Mus musculus
  siRNA target sequence for V1rh1 (NM_134211.1,95-113).
gcatcctgtatacaagttt

SEQ ID NO: 751400 - DNA, 19 bp, Mus musculus
  siRNA target sequence for V1rh1 (NM_134211.1,141-159).
gaagtacattgaggaaatt

SEQ ID NO: 751401 - DNA, 19 bp, Mus musculus
  siRNA target sequence for V1rh1 (NM_134211.1,314-332).
gactgcccaaggcaataga

SEQ ID NO: 751402 - DNA, 19 bp, Mus musculus
  siRNA target sequence for V1rh1 (NM_134211.1,318-336).
gcccaaggcaatagaaact

SEQ ID NO: 751403 - DNA, 19 bp, Mus musculus
  siRNA target sequence for V1rh3 (NM_134212.1,478-496).
gagaatagagacagctatt

SEQ ID NO: 751404 - DNA, 19 bp, Mus musculus
  siRNA target sequence for V1rh3 (NM_134212.1,914-932).
gttactctcgtttatatgt

SEQ ID NO: 751405 - DNA, 19 bp, Mus musculus
  siRNA target sequence for V1rh4 (NM_134213.1,609-627).
gactgatagcaataattgt

SEQ ID NO: 751406 - DNA, 19 bp, Mus musculus
  siRNA target sequence for V1rh4 (NM_134213.1,611-629).
ctgatagcaataattgtta

SEQ ID NO: 751407 - DNA, 19 bp, Mus musculus
  siRNA target sequence for V1rh4 (NM_134213.1,613-631).
gatagcaataattgttatt

SEQ ID NO: 751408 - DNA, 19 bp, Mus musculus
  siRNA target sequence for V1rh5 (NM_134214.1,25-43).
cacaagaaaatgctattat

SEQ ID NO: 751409 - DNA, 19 bp, Mus musculus
  siRNA target sequence for V1rh5 (NM_134214.1,344-362).
gaaacttcctaaataactt

SEQ ID NO: 751410 - DNA, 19 bp, Mus musculus
  siRNA target sequence for V1rh5 (NM_134214.1,609-627).
gagtgatgacaactattgt

SEQ ID NO: 751411 - DNA, 19 bp, Mus musculus
  siRNA target sequence for V1rh5 (NM_134214.1,611-629).
gtgatgacaactattgtta

SEQ ID NO: 751412 - DNA, 19 bp, Mus musculus
  siRNA target sequence for V1rh5 (NM_134214.1,1013-1031).
gtcatgctcagttgaagaa

SEQ ID NO: 751413 - DNA, 19 bp, Mus musculus
  siRNA target sequence for V1rh7 (NM_134216.1,382-400).
cttttattcttcctatact

SEQ ID NO: 751414 - DNA, 19 bp, Mus musculus
  siRNA target sequence for V1rh8 (NM_134217.1,536-554).
cactacaaaatcaggatat

SEQ ID NO: 751415 - DNA, 19 bp, Mus musculus
  siRNA target sequence for V1ri2 (NM_134219.1,61-79).
gtgggaaatatgctaatat

SEQ ID NO: 751416 - DNA, 19 bp, Mus musculus
  siRNA target sequence for V1ri2 (NM_134219.1,120-138).
gaaacctgtcgaccttatt

SEQ ID NO: 751417 - DNA, 19 bp, Mus musculus
  siRNA target sequence for V1ri2 (NM_134219.1,124-142).
cctgtcgaccttattgtaa

SEQ ID NO: 751418 - DNA, 19 bp, Mus musculus
  siRNA target sequence for V1ri2 (NM_134219.1,125-143).
ctgtcgaccttattgtaat

SEQ ID NO: 751419 - DNA, 19 bp, Mus musculus
  siRNA target sequence for V1ri2 (NM_134219.1,165-183).
gattactatttgtacaact

SEQ ID NO: 751420 - DNA, 19 bp, Mus musculus
  siRNA target sequence for V1ri2 (NM_134219.1,853-871).
gttcttatcagtagatata

SEQ ID NO: 751421 - DNA, 19 bp, Mus musculus
  siRNA target sequence for V1ri3 (NM_134220.1,11-29).
gtaatgttatccacactat

SEQ ID NO: 751422 - DNA, 19 bp, Mus musculus
  siRNA target sequence for V1ri3 (NM_134220.1,82-100).
gcgagacttgggtacactt

SEQ ID NO: 751423 - DNA, 19 bp, Mus musculus
  siRNA target sequence for V1ri3 (NM_134220.1,124-142).
cccattgacgtaattctca

SEQ ID NO: 751424 - DNA, 19 bp, Mus musculus
  siRNA target sequence for V1ri3 (NM_134220.1,125-143).
ccattgacgtaattctcat

SEQ ID NO: 751425 - DNA, 19 bp, Mus musculus
  siRNA target sequence for V1ri3 (NM_134220.1,176-194).
gtacaacagggttgaaaga

SEQ ID NO: 751426 - DNA, 19 bp, Mus musculus
  siRNA target sequence for V1ri3 (NM_134220.1,193-211).
gagcttgccacagtgtttt

SEQ ID NO: 751427 - DNA, 19 bp, Mus musculus
  siRNA target sequence for V1ri3 (NM_134220.1,195-213).
gcttgccacagtgttttat

SEQ ID NO: 751428 - DNA, 19 bp, Mus musculus
  siRNA target sequence for V1ri3 (NM_134220.1,232-250).
gatattggctgcaaaacta

SEQ ID NO: 751429 - DNA, 19 bp, Mus musculus
  siRNA target sequence for V1ri3 (NM_134220.1,238-256).
ggctgcaaaactacagttt

SEQ ID NO: 751430 - DNA, 19 bp, Mus musculus
  siRNA target sequence for V1ri3 (NM_134220.1,240-258).
ctgcaaaactacagtttat

SEQ ID NO: 751431 - DNA, 19 bp, Mus musculus
  siRNA target sequence for V1ri3 (NM_134220.1,339-357).
gaccaccttttggacaaaa

SEQ ID NO: 751432 - DNA, 19 bp, Mus musculus
  siRNA target sequence for V1ri3 (NM_134220.1,476-494).
ctgtggctataatgtacat

SEQ ID NO: 751433 - DNA, 19 bp, Mus musculus
  siRNA target sequence for V1ri3 (NM_134220.1,871-889).
gttcgtgtccctaatacct

SEQ ID NO: 751434 - DNA, 19 bp, Mus musculus
  siRNA target sequence for V1ri4 (NM_134221.1,82-100).
gtgagatatgtgcacaatt

SEQ ID NO: 751435 - DNA, 19 bp, Mus musculus
  siRNA target sequence for V1ri4 (NM_134221.1,124-142).
cctctcgacctcattctca

SEQ ID NO: 751436 - DNA, 19 bp, Mus musculus
  siRNA target sequence for V1ri4 (NM_134221.1,125-143).
ctctcgacctcattctcat

SEQ ID NO: 751437 - DNA, 19 bp, Mus musculus
  siRNA target sequence for V1ri4 (NM_134221.1,239-257).
gctgtaaagctgcagttta

SEQ ID NO: 751438 - DNA, 19 bp, Mus musculus
  siRNA target sequence for V1ri4 (NM_134221.1,873-891).
ccatgttcctaatgtctta

SEQ ID NO: 751439 - DNA, 19 bp, Mus musculus
  siRNA target sequence for V1ri5 (NM_134222.1,49-67).
ggagttgtaggaaatatct

SEQ ID NO: 751440 - DNA, 19 bp, Mus musculus
  siRNA target sequence for V1ri5 (NM_134222.1,116-134).
gaccgatagatcttattct

SEQ ID NO: 751441 - DNA, 19 bp, Mus musculus
  siRNA target sequence for V1ri5 (NM_134222.1,118-136).
ccgatagatcttattctca

SEQ ID NO: 751442 - DNA, 19 bp, Mus musculus
  siRNA target sequence for V1ri5 (NM_134222.1,174-192).
cacaggagtcacagatata

SEQ ID NO: 751443 - DNA, 19 bp, Mus musculus
  siRNA target sequence for V1ri5 (NM_134222.1,232-250).
ggctgtaaaatgatggttt

SEQ ID NO: 751444 - DNA, 19 bp, Mus musculus
  siRNA target sequence for V1ri6 (NM_134223.1,26-44).
gagtaatcttcctttctct

SEQ ID NO: 751445 - DNA, 19 bp, Mus musculus
  siRNA target sequence for V1ri6 (NM_134223.1,60-78).
cttaggaaacatccttata

SEQ ID NO: 751446 - DNA, 19 bp, Mus musculus
  siRNA target sequence for V1ri6 (NM_134223.1,82-100).
gtgagacatgtgcttacat

SEQ ID NO: 751447 - DNA, 19 bp, Mus musculus
  siRNA target sequence for V1ri6 (NM_134223.1,88-106).
catgtgcttacatttacca

SEQ ID NO: 751448 - DNA, 19 bp, Mus musculus
  siRNA target sequence for V1ri6 (NM_134223.1,104-122).
ccatgggttctgagaaaaa

SEQ ID NO: 751449 - DNA, 19 bp, Mus musculus
  siRNA target sequence for V1ri6 (NM_134223.1,178-196).
ggtacttcggggatcagat

SEQ ID NO: 751450 - DNA, 19 bp, Mus musculus
  siRNA target sequence for V1ri6 (NM_134223.1,179-197).
gtacttcggggatcagata

SEQ ID NO: 751451 - DNA, 19 bp, Mus musculus
  siRNA target sequence for V1ri6 (NM_134223.1,182-200).
cttcggggatcagatatgt

SEQ ID NO: 751452 - DNA, 19 bp, Mus musculus
  siRNA target sequence for V1ri6 (NM_134223.1,194-212).
gatatgtagccacaaaact

SEQ ID NO: 751453 - DNA, 19 bp, Mus musculus
  siRNA target sequence for V1ri6 (NM_134223.1,231-249).
gggcattgcaggctgtaaa

SEQ ID NO: 751454 - DNA, 19 bp, Mus musculus
  siRNA target sequence for V1ri6 (NM_134223.1,360-378).
gttcagaccacaaacaata

SEQ ID NO: 751455 - DNA, 19 bp, Mus musculus
  siRNA target sequence for V1ri6 (NM_134223.1,431-449).
gctccaatttgcttcatca

SEQ ID NO: 751456 - DNA, 19 bp, Mus musculus
  siRNA target sequence for V1ri6 (NM_134223.1,432-450).
ctccaatttgcttcatcat

SEQ ID NO: 751457 - DNA, 19 bp, Mus musculus
  siRNA target sequence for V1ri6 (NM_134223.1,462-480).
cagcagtttgaatagatct

SEQ ID NO: 751458 - DNA, 19 bp, Mus musculus
  siRNA target sequence for V1ri6 (NM_134223.1,612-630).
ggcgctccgtctgtataaa

SEQ ID NO: 751459 - DNA, 19 bp, Mus musculus
  siRNA target sequence for V1ri6 (NM_134223.1,657-675).
cacctccaggcttgcaaat

SEQ ID NO: 751460 - DNA, 19 bp, Mus musculus
  siRNA target sequence for V1ri6 (NM_134223.1,788-806).
ctcttgactccataatact

SEQ ID NO: 751461 - DNA, 19 bp, Mus musculus
  siRNA target sequence for V1ri6 (NM_134223.1,849-867).
cccctttgtcctgctaata

SEQ ID NO: 751462 - DNA, 19 bp, Mus musculus
  siRNA target sequence for V1ri6 (NM_134223.1,913-931).
gaggaaacaactttctata

SEQ ID NO: 751463 - DNA, 19 bp, Mus musculus
  siRNA target sequence for V1ri7 (NM_134224.1,18-36).
ggaccttatccaaagagta

SEQ ID NO: 751464 - DNA, 19 bp, Mus musculus
  siRNA target sequence for V1ri7 (NM_134224.1,21-39).
ccttatccaaagagtaatt

SEQ ID NO: 751465 - DNA, 19 bp, Mus musculus
  siRNA target sequence for V1ri7 (NM_134224.1,200-218).
ccatagccatgatttttta

SEQ ID NO: 751466 - DNA, 19 bp, Mus musculus
  siRNA target sequence for V1ri7 (NM_134224.1,201-219).
catagccatgattttttat

SEQ ID NO: 751467 - DNA, 19 bp, Mus musculus
  siRNA target sequence for V1ri7 (NM_134224.1,207-225).
catgattttttatattaga

SEQ ID NO: 751468 - DNA, 19 bp, Mus musculus
  siRNA target sequence for V1ri7 (NM_134224.1,809-827).
caagtatgaaagcgttttt

SEQ ID NO: 751469 - DNA, 19 bp, Mus musculus
  siRNA target sequence for V1ri9 (NM_134225.1,72-90).
cctcatcgaggggacaatt

SEQ ID NO: 751470 - DNA, 19 bp, Mus musculus
  siRNA target sequence for V1ri9 (NM_134225.1,78-96).
cgaggggacaattttcctt

SEQ ID NO: 751471 - DNA, 19 bp, Mus musculus
  siRNA target sequence for V1ri9 (NM_134225.1,84-102).
gacaattttcctttcactt

SEQ ID NO: 751472 - DNA, 19 bp, Mus musculus
  siRNA target sequence for V1ri9 (NM_134225.1,651-669).
cagcagtgggtctatgtct

SEQ ID NO: 751473 - DNA, 19 bp, Mus musculus
  siRNA target sequence for V1ri9 (NM_134225.1,918-936).
catcaaggatatttgtgtt

SEQ ID NO: 751474 - DNA, 19 bp, Mus musculus
  siRNA target sequence for V1rj2 (NM_134226.1,144-162).
catgcacctgacaatagtt

SEQ ID NO: 751475 - DNA, 19 bp, Mus musculus
  siRNA target sequence for V1rj2 (NM_134226.1,147-165).
gcacctgacaatagttaat

SEQ ID NO: 751476 - DNA, 19 bp, Mus musculus
  siRNA target sequence for V1rj2 (NM_134226.1,151-169).
ctgacaatagttaatatgt

SEQ ID NO: 751477 - DNA, 19 bp, Mus musculus
  siRNA target sequence for V1rj2 (NM_134226.1,168-186).
gttgacaatcgcattcaca

SEQ ID NO: 751478 - DNA, 19 bp, Mus musculus
  siRNA target sequence for V1rj2 (NM_134226.1,177-195).
cgcattcacattgataaaa

SEQ ID NO: 751479 - DNA, 19 bp, Mus musculus
  siRNA target sequence for V1rj2 (NM_134226.1,189-207).
gataaaagatatcatgtta

SEQ ID NO: 751480 - DNA, 19 bp, Mus musculus
  siRNA target sequence for V1rj2 (NM_134226.1,209-227).
cctttggagtaccaaattt

SEQ ID NO: 751481 - DNA, 19 bp, Mus musculus
  siRNA target sequence for V1rj2 (NM_134226.1,407-425).
gctcctggcttattaacct

SEQ ID NO: 751482 - DNA, 19 bp, Mus musculus
  siRNA target sequence for V1rj2 (NM_134226.1,408-426).
ctcctggcttattaaccta

SEQ ID NO: 751483 - DNA, 19 bp, Mus musculus
  siRNA target sequence for V1rj2 (NM_134226.1,413-431).
ggcttattaacctagtcat

SEQ ID NO: 751484 - DNA, 19 bp, Mus musculus
  siRNA target sequence for V1rj2 (NM_134226.1,453-471).
ggtaatagccaaaaccaat

SEQ ID NO: 751485 - DNA, 19 bp, Mus musculus
  siRNA target sequence for V1rj2 (NM_134226.1,477-495).
ccatgttggcaatggatat

SEQ ID NO: 751486 - DNA, 19 bp, Mus musculus
  siRNA target sequence for V1rj2 (NM_134226.1,520-538).
cactttgggaaccacaatt

SEQ ID NO: 751487 - DNA, 19 bp, Mus musculus
  siRNA target sequence for V1rj2 (NM_134226.1,522-540).
ctttgggaaccacaattca

SEQ ID NO: 751488 - DNA, 19 bp, Mus musculus
  siRNA target sequence for V1rj2 (NM_134226.1,531-549).
ccacaattcagggtcattt

SEQ ID NO: 751489 - DNA, 19 bp, Mus musculus
  siRNA target sequence for V1rj2 (NM_134226.1,564-582).
cactcacgatctcttctat

SEQ ID NO: 751490 - DNA, 19 bp, Mus musculus
  siRNA target sequence for V1rj2 (NM_134226.1,694-712).
cgcaaagccactcataaca

SEQ ID NO: 751491 - DNA, 19 bp, Mus musculus
  siRNA target sequence for V1rj2 (NM_134226.1,723-741).
ggtgagctgctttgtgtta

SEQ ID NO: 751492 - DNA, 19 bp, Mus musculus
  siRNA target sequence for V1rj2 (NM_134226.1,726-744).
gagctgctttgtgttaatt

SEQ ID NO: 751493 - DNA, 19 bp, Mus musculus
  siRNA target sequence for V1rj2 (NM_134226.1,807-825).
ggagtcaattaatgcaatt

SEQ ID NO: 751494 - DNA, 19 bp, Mus musculus
  siRNA target sequence for V1rj2 (NM_134226.1,889-907).
caattcacttcttcatttt

SEQ ID NO: 751495 - DNA, 19 bp, Mus musculus
  siRNA target sequence for V1rj2 (NM_134226.1,918-936).
gatgacatgtcatcaaagt

SEQ ID NO: 751496 - DNA, 19 bp, Mus musculus
  siRNA target sequence for V1rk1 (NM_134227.1,13-31).
ctcctcttcatactataca

SEQ ID NO: 751497 - DNA, 19 bp, Mus musculus
  siRNA target sequence for V1rk1 (NM_134227.1,16-34).
ctcttcatactatacatgt

SEQ ID NO: 751498 - DNA, 19 bp, Mus musculus
  siRNA target sequence for V1rk1 (NM_134227.1,58-76).
cagaagaagcccgtagata

SEQ ID NO: 751499 - DNA, 19 bp, Mus musculus
  siRNA target sequence for V1rk1 (NM_134227.1,67-85).
cccgtagatatgatcttca

SEQ ID NO: 751500 - DNA, 19 bp, Mus musculus
  siRNA target sequence for V1rk1 (NM_134227.1,86-104).
cacatctaatgcttgtcaa

SEQ ID NO: 751501 - DNA, 19 bp, Mus musculus
  siRNA target sequence for V1rk1 (NM_134227.1,198-216).
gtatgcatacagtgttact

SEQ ID NO: 751502 - DNA, 19 bp, Mus musculus
  siRNA target sequence for V1rk1 (NM_134227.1,220-238).
ggcctttccctctgtacta

SEQ ID NO: 751503 - DNA, 19 bp, Mus musculus
  siRNA target sequence for V1rk1 (NM_134227.1,264-282).
catcactctcagttctaaa

SEQ ID NO: 751504 - DNA, 19 bp, Mus musculus
  siRNA target sequence for V1rk1 (NM_134227.1,288-306).
caagtgggcatggcttaaa

SEQ ID NO: 751505 - DNA, 19 bp, Mus musculus
  siRNA target sequence for V1rk1 (NM_134227.1,348-366).
gtggatcatcaacacattt

SEQ ID NO: 751506 - DNA, 19 bp, Mus musculus
  siRNA target sequence for V1rk1 (NM_134227.1,373-391).
cttcccatggttgaaaaca

SEQ ID NO: 751507 - DNA, 19 bp, Mus musculus
  siRNA target sequence for V1rk1 (NM_134227.1,471-489).
caccaccaagtcacttgta

SEQ ID NO: 751508 - DNA, 19 bp, Mus musculus
  siRNA target sequence for V1rk1 (NM_134227.1,482-500).
cacttgtaactgcactaat

SEQ ID NO: 751509 - DNA, 19 bp, Mus musculus
  siRNA target sequence for V1rk1 (NM_134227.1,484-502).
cttgtaactgcactaataa

SEQ ID NO: 751510 - DNA, 19 bp, Mus musculus
  siRNA target sequence for V1rk1 (NM_134227.1,491-509).
ctgcactaataattagaga

SEQ ID NO: 751511 - DNA, 19 bp, Mus musculus
  siRNA target sequence for V1rk1 (NM_134227.1,586-604).
cggcatgtccacagtttca

SEQ ID NO: 751512 - DNA, 19 bp, Mus musculus
  siRNA target sequence for V1rk1 (NM_134227.1,704-722).
ccttctattcactttacca

SEQ ID NO: 751513 - DNA, 19 bp, Mus musculus
  siRNA target sequence for V1rk1 (NM_134227.1,729-747).
gagcaacccagtattggat

SEQ ID NO: 751514 - DNA, 19 bp, Mus musculus
  siRNA target sequence for V1rk1 (NM_134227.1,735-753).
cccagtattggatctgatt

SEQ ID NO: 751515 - DNA, 19 bp, Mus musculus
  siRNA target sequence for V1rk1 (NM_134227.1,750-768).
gattggtggagttttatca

SEQ ID NO: 751516 - DNA, 19 bp, Mus musculus
  siRNA target sequence for V1rk1 (NM_134227.1,779-797).
caactgtctgcccttatgt

SEQ ID NO: 751517 - DNA, 19 bp, Mus musculus
  siRNA target sequence for V1rk1 (NM_134227.1,796-814).
gttctgttgaacaatagga

SEQ ID NO: 751518 - DNA, 19 bp, Mus musculus
  siRNA target sequence for V1rk1 (NM_134227.1,801-819).
gttgaacaataggaaactt

SEQ ID NO: 751519 - DNA, 19 bp, Mus musculus
  siRNA target sequence for V1re10 (NM_134229.1,229-247).
gatcttggatgcagattaa

SEQ ID NO: 751520 - DNA, 19 bp, Mus musculus
  siRNA target sequence for V1re10 (NM_134229.1,444-462).
catacttgtcaaaaggaat

SEQ ID NO: 751521 - DNA, 19 bp, Mus musculus
  siRNA target sequence for V1re10 (NM_134229.1,474-492).
gacaagaaaccgaaatttt

SEQ ID NO: 751522 - DNA, 19 bp, Mus musculus
  siRNA target sequence for V1re10 (NM_134229.1,479-497).
gaaaccgaaattttgagta

SEQ ID NO: 751523 - DNA, 19 bp, Mus musculus
  siRNA target sequence for V1re10 (NM_134229.1,484-502).
cgaaattttgagtactgtt

SEQ ID NO: 751524 - DNA, 19 bp, Mus musculus
  siRNA target sequence for V1re10 (NM_134229.1,531-549).
ctcactctatacagcatta

SEQ ID NO: 751525 - DNA, 19 bp, Mus musculus
  siRNA target sequence for V1re10 (NM_134229.1,533-551).
cactctatacagcattagt

SEQ ID NO: 751526 - DNA, 19 bp, Mus musculus
  siRNA target sequence for V1re10 (NM_134229.1,649-667).
cacagcaatactatttaca

SEQ ID NO: 751527 - DNA, 19 bp, Mus musculus
  siRNA target sequence for V1re10 (NM_134229.1,842-860).
gacccttcgttcttatgaa

SEQ ID NO: 751528 - DNA, 19 bp, Mus musculus
  siRNA target sequence for V1re10 (NM_134229.1,849-867).
cgttcttatgaatcattgt

SEQ ID NO: 751529 - DNA, 19 bp, Mus musculus
  siRNA target sequence for V1re10 (NM_134229.1,850-868).
gttcttatgaatcattgta

SEQ ID NO: 751530 - DNA, 19 bp, Mus musculus
  siRNA target sequence for V1re10 (NM_134229.1,853-871).
cttatgaatcattgtactt

SEQ ID NO: 751531 - DNA, 19 bp, Mus musculus
  siRNA target sequence for V1re12 (NM_134231.1,138-156).
gcctacagatttcattcta

SEQ ID NO: 751532 - DNA, 19 bp, Mus musculus
  siRNA target sequence for V1re12 (NM_134231.1,163-181).
ctactggcagccaattcct

SEQ ID NO: 751533 - DNA, 19 bp, Mus musculus
  siRNA target sequence for V1re12 (NM_134231.1,169-187).
gcagccaattccttgttca

SEQ ID NO: 751534 - DNA, 19 bp, Mus musculus
  siRNA target sequence for V1re12 (NM_134231.1,174-192).
caattccttgttcattctt

SEQ ID NO: 751535 - DNA, 19 bp, Mus musculus
  siRNA target sequence for V1re12 (NM_134231.1,202-220).
gtgccccacataatagcat

SEQ ID NO: 751536 - DNA, 19 bp, Mus musculus
  siRNA target sequence for V1re12 (NM_134231.1,257-275).
gtgagttcctattctatat

SEQ ID NO: 751537 - DNA, 19 bp, Mus musculus
  siRNA target sequence for V1re12 (NM_134231.1,286-304).
gggagaagtgtgtccattt

SEQ ID NO: 751538 - DNA, 19 bp, Mus musculus
  siRNA target sequence for V1re12 (NM_134231.1,359-377).
cctgttggaaggatcataa

SEQ ID NO: 751539 - DNA, 19 bp, Mus musculus
  siRNA target sequence for V1re12 (NM_134231.1,360-378).
ctgttggaaggatcataaa

SEQ ID NO: 751540 - DNA, 19 bp, Mus musculus
  siRNA target sequence for V1re12 (NM_134231.1,373-391).
cataaagtcaaagctataa

SEQ ID NO: 751541 - DNA, 19 bp, Mus musculus
  siRNA target sequence for V1re12 (NM_134231.1,393-411).
gcacaatggctgttccatt

SEQ ID NO: 751542 - DNA, 19 bp, Mus musculus
  siRNA target sequence for V1re12 (NM_134231.1,394-412).
cacaatggctgttccattt

SEQ ID NO: 751543 - DNA, 19 bp, Mus musculus
  siRNA target sequence for V1re12 (NM_134231.1,429-447).
gcacatgctaatgcatttt

SEQ ID NO: 751544 - DNA, 19 bp, Mus musculus
  siRNA target sequence for V1re12 (NM_134231.1,453-471).
ctttgtgtacccatttata

SEQ ID NO: 751545 - DNA, 19 bp, Mus musculus
  siRNA target sequence for V1re12 (NM_134231.1,482-500).
gtaaaaatgtgacaaaact

SEQ ID NO: 751546 - DNA, 19 bp, Mus musculus
  siRNA target sequence for V1re12 (NM_134231.1,518-536).
gctcagtagtaaagaaaca

SEQ ID NO: 751547 - DNA, 19 bp, Mus musculus
  siRNA target sequence for V1re12 (NM_134231.1,519-537).
ctcagtagtaaagaaacaa

SEQ ID NO: 751548 - DNA, 19 bp, Mus musculus
  siRNA target sequence for V1re12 (NM_134231.1,620-638).
ccatgatagtcattctatt

SEQ ID NO: 751549 - DNA, 19 bp, Mus musculus
  siRNA target sequence for V1re12 (NM_134231.1,788-806).
ctcttttgtacaattacaa

SEQ ID NO: 751550 - DNA, 19 bp, Mus musculus
  siRNA target sequence for V1re12 (NM_134231.1,790-808).
cttttgtacaattacaatt

SEQ ID NO: 751551 - DNA, 19 bp, Mus musculus
  siRNA target sequence for V1re12 (NM_134231.1,866-884).
gtgttttcatgagaagtta

SEQ ID NO: 751552 - DNA, 19 bp, Mus musculus
  siRNA target sequence for V1re12 (NM_134231.1,868-886).
gttttcatgagaagttact

SEQ ID NO: 751553 - DNA, 19 bp, Mus musculus
  siRNA target sequence for V1re12 (NM_134231.1,935-953).
ctcctaacttagttataaa

SEQ ID NO: 751554 - DNA, 19 bp, Mus musculus
  siRNA target sequence for V1rg10 (NM_134232.1,14-32).
ctggaaattttgcaataga

SEQ ID NO: 751555 - DNA, 19 bp, Mus musculus
  siRNA target sequence for V1rg10 (NM_134232.1,171-189).
cttgactgtcatcttaaga

SEQ ID NO: 751556 - DNA, 19 bp, Mus musculus
  siRNA target sequence for V1rg10 (NM_134232.1,188-206).
gagggtttccacagacaat

SEQ ID NO: 751557 - DNA, 19 bp, Mus musculus
  siRNA target sequence for V1rg10 (NM_134232.1,348-366).
ctccaggtggataaagctt

SEQ ID NO: 751558 - DNA, 19 bp, Mus musculus
  siRNA target sequence for V1rg10 (NM_134232.1,353-371).
ggtggataaagcttaaata

SEQ ID NO: 751559 - DNA, 19 bp, Mus musculus
  siRNA target sequence for V1rg10 (NM_134232.1,452-470).
gagaatcaggcaccaatta

SEQ ID NO: 751560 - DNA, 19 bp, Mus musculus
  siRNA target sequence for V1rg10 (NM_134232.1,526-544).
gacagtgtagcaactacat

SEQ ID NO: 751561 - DNA, 19 bp, Mus musculus
  siRNA target sequence for V1rg10 (NM_134232.1,535-553).
gcaactacattgtatatat

SEQ ID NO: 751562 - DNA, 19 bp, Mus musculus
  siRNA target sequence for V1rg10 (NM_134232.1,542-560).
cattgtatatatctttagt

SEQ ID NO: 751563 - DNA, 19 bp, Mus musculus
  siRNA target sequence for V1rg10 (NM_134232.1,759-777).
cattgtggctatcattaga

SEQ ID NO: 751564 - DNA, 19 bp, Mus musculus
  siRNA target sequence for V1rg10 (NM_134232.1,798-816).
gatatggggagtaaatata

SEQ ID NO: 751565 - DNA, 19 bp, Mus musculus
  siRNA target sequence for V1rg11 (NM_134233.1,96-114).
ccttggtaactggtcaatt

SEQ ID NO: 751566 - DNA, 19 bp, Mus musculus
  siRNA target sequence for V1rg11 (NM_134233.1,101-119).
gtaactggtcaattcttct

SEQ ID NO: 751567 - DNA, 19 bp, Mus musculus
  siRNA target sequence for V1rg11 (NM_134233.1,107-125).
ggtcaattcttcttcatta

SEQ ID NO: 751568 - DNA, 19 bp, Mus musculus
  siRNA target sequence for V1rg11 (NM_134233.1,108-126).
gtcaattcttcttcattat

SEQ ID NO: 751569 - DNA, 19 bp, Mus musculus
  siRNA target sequence for V1rg11 (NM_134233.1,184-202).
ctgactttagccaattcct

SEQ ID NO: 751570 - DNA, 19 bp, Mus musculus
  siRNA target sequence for V1rg11 (NM_134233.1,204-222).
ggttattatctcaagagta

SEQ ID NO: 751571 - DNA, 19 bp, Mus musculus
  siRNA target sequence for V1rg11 (NM_134233.1,218-236).
gagtaacacctcacataat

SEQ ID NO: 751572 - DNA, 19 bp, Mus musculus
  siRNA target sequence for V1rg11 (NM_134233.1,227-245).
ctcacataatggtacaact

SEQ ID NO: 751573 - DNA, 19 bp, Mus musculus
  siRNA target sequence for V1rg11 (NM_134233.1,259-277).
ctcctggatgacctcttat

SEQ ID NO: 751574 - DNA, 19 bp, Mus musculus
  siRNA target sequence for V1rg11 (NM_134233.1,268-286).
gacctcttatgtaaactta

SEQ ID NO: 751575 - DNA, 19 bp, Mus musculus
  siRNA target sequence for V1rg11 (NM_134233.1,420-438).
gattcagttctgctctata

SEQ ID NO: 751576 - DNA, 19 bp, Mus musculus
  siRNA target sequence for V1rg11 (NM_134233.1,465-483).
catcaagacagctatagat

SEQ ID NO: 751577 - DNA, 19 bp, Mus musculus
  siRNA target sequence for V1rg11 (NM_134233.1,484-502).
gtgattggaccaaatacta

SEQ ID NO: 751578 - DNA, 19 bp, Mus musculus
  siRNA target sequence for V1rg11 (NM_134233.1,486-504).
gattggaccaaatactata

SEQ ID NO: 751579 - DNA, 19 bp, Mus musculus
  siRNA target sequence for V1rg11 (NM_134233.1,563-581).
gtgttactggcctacattt

SEQ ID NO: 751580 - DNA, 19 bp, Mus musculus
  siRNA target sequence for V1rg11 (NM_134233.1,569-587).
ctggcctacatttgttctt

SEQ ID NO: 751581 - DNA, 19 bp, Mus musculus
  siRNA target sequence for V1rg11 (NM_134233.1,625-643).
gtatgggccagtatcttta

SEQ ID NO: 751582 - DNA, 19 bp, Mus musculus
  siRNA target sequence for V1rg11 (NM_134233.1,629-647).
gggccagtatctttatggt

SEQ ID NO: 751583 - DNA, 19 bp, Mus musculus
  siRNA target sequence for V1rg11 (NM_134233.1,774-792).
ctactccatgtccttcata

SEQ ID NO: 751584 - DNA, 19 bp, Mus musculus
  siRNA target sequence for V1rg11 (NM_134233.1,786-804).
cttcatactcattatctat

SEQ ID NO: 751585 - DNA, 19 bp, Mus musculus
  siRNA target sequence for V1rg11 (NM_134233.1,884-902).
ccttcatccttatcagtaa

SEQ ID NO: 751586 - DNA, 19 bp, Mus musculus
  siRNA target sequence for V1rg11 (NM_134233.1,891-909).
ccttatcagtaataaccaa

SEQ ID NO: 751587 - DNA, 19 bp, Mus musculus
  siRNA target sequence for V1rg11 (NM_134233.1,892-910).
cttatcagtaataaccaat

SEQ ID NO: 751588 - DNA, 19 bp, Mus musculus
  siRNA target sequence for V1rg11 (NM_134233.1,936-954).
ctgtagtagaaggaattta

SEQ ID NO: 751589 - DNA, 19 bp, Mus musculus
  siRNA target sequence for V1rg12 (NM_134234.1,36-54).
catcctgcagactactgta

SEQ ID NO: 751590 - DNA, 19 bp, Mus musculus
  siRNA target sequence for V1rg12 (NM_134234.1,71-89).
cctcagttctgcttcatta

SEQ ID NO: 751591 - DNA, 19 bp, Mus musculus
  siRNA target sequence for V1rg12 (NM_134234.1,100-118).
ggatttactgggaaaggtt

SEQ ID NO: 751592 - DNA, 19 bp, Mus musculus
  siRNA target sequence for V1rg12 (NM_134234.1,123-141).
gctcaaaaccctaattgta

SEQ ID NO: 751593 - DNA, 19 bp, Mus musculus
  siRNA target sequence for V1rg12 (NM_134234.1,154-172).
ctggccaactccttgtcta

SEQ ID NO: 751594 - DNA, 19 bp, Mus musculus
  siRNA target sequence for V1rg12 (NM_134234.1,182-200).
gaggaattccacagataat

SEQ ID NO: 751595 - DNA, 19 bp, Mus musculus
  siRNA target sequence for V1rg12 (NM_134234.1,247-265).
cttgtactttacctttata

SEQ ID NO: 751596 - DNA, 19 bp, Mus musculus
  siRNA target sequence for V1rg12 (NM_134234.1,277-295).
ggggtttcactatatacaa

SEQ ID NO: 751597 - DNA, 19 bp, Mus musculus
  siRNA target sequence for V1rg12 (NM_134234.1,279-297).
ggtttcactatatacaaca

SEQ ID NO: 751598 - DNA, 19 bp, Mus musculus
  siRNA target sequence for V1rg12 (NM_134234.1,280-298).
gtttcactatatacaacat

SEQ ID NO: 751599 - DNA, 19 bp, Mus musculus
  siRNA target sequence for V1rg12 (NM_134234.1,311-329).
gtttccaagcggccataat

SEQ ID NO: 751600 - DNA, 19 bp, Mus musculus
  siRNA target sequence for V1rg12 (NM_134234.1,341-359).
ccaccaaatggatgaagtt

SEQ ID NO: 751601 - DNA, 19 bp, Mus musculus
  siRNA target sequence for V1rg12 (NM_134234.1,398-416).
cactcagttggcctatgaa

SEQ ID NO: 751602 - DNA, 19 bp, Mus musculus
  siRNA target sequence for V1rg12 (NM_134234.1,467-485).
gaaggaatgccactaagaa

SEQ ID NO: 751603 - DNA, 19 bp, Mus musculus
  siRNA target sequence for V1rg12 (NM_134234.1,470-488).
ggaatgccactaagaaact

SEQ ID NO: 751604 - DNA, 19 bp, Mus musculus
  siRNA target sequence for V1rg12 (NM_134234.1,552-570).
gctcagcttcactgatgtt

SEQ ID NO: 751605 - DNA, 19 bp, Mus musculus
  siRNA target sequence for V1rg12 (NM_134234.1,690-708).
cagggccacccaaaccata

SEQ ID NO: 751606 - DNA, 19 bp, Mus musculus
  siRNA target sequence for V1rg12 (NM_134234.1,695-713).
ccacccaaaccatactaat

SEQ ID NO: 751607 - DNA, 19 bp, Mus musculus
  siRNA target sequence for V1rg12 (NM_134234.1,698-716).
cccaaaccatactaatcct

SEQ ID NO: 751608 - DNA, 19 bp, Mus musculus
  siRNA target sequence for V1rg12 (NM_134234.1,715-733).
cttgcatgcacttttgtta

SEQ ID NO: 751609 - DNA, 19 bp, Mus musculus
  siRNA target sequence for V1rg12 (NM_134234.1,719-737).
catgcacttttgttacctt

SEQ ID NO: 751610 - DNA, 19 bp, Mus musculus
  siRNA target sequence for V1rg12 (NM_134234.1,791-809).
gattgtgggttatcaacat

SEQ ID NO: 751611 - DNA, 19 bp, Mus musculus
  siRNA target sequence for V1rg12 (NM_134234.1,853-871).
gtgctcattagtaataaca

SEQ ID NO: 751612 - DNA, 19 bp, Mus musculus
  siRNA target sequence for V1rg12 (NM_134234.1,895-913).
cactgttggtggaaacgtt

SEQ ID NO: 751613 - DNA, 19 bp, Mus musculus
  siRNA target sequence for V1rh10 (NM_134235.1,783-801).
caataacctgatgctaaat

SEQ ID NO: 751614 - DNA, 19 bp, Mus musculus
  siRNA target sequence for V1rh11 (NM_134236.1,822-840).
gatggtaaacactcgaaat

SEQ ID NO: 751615 - DNA, 19 bp, Mus musculus
  siRNA target sequence for V1rh11 (NM_134236.1,890-908).
gggatggcctttggttaaa

SEQ ID NO: 751616 - DNA, 19 bp, Mus musculus
  siRNA target sequence for V1rh11 (NM_134236.1,892-910).
gatggcctttggttaaatt

SEQ ID NO: 751617 - DNA, 19 bp, Mus musculus
  siRNA target sequence for V1rh12 (NM_134237.1,489-507).
cgactattgctatttgaca

SEQ ID NO: 751618 - DNA, 19 bp, Mus musculus
  siRNA target sequence for V1rh12 (NM_134237.1,498-516).
ctatttgacaccagaaagt

SEQ ID NO: 751619 - DNA, 19 bp, Mus musculus
  siRNA target sequence for V1rh13 (NM_134238.1,489-507).
caactattgttatatgaca

SEQ ID NO: 751620 - DNA, 19 bp, Mus musculus
  siRNA target sequence for V1rh13 (NM_134238.1,773-791).
ctttaggggactatttgtt

SEQ ID NO: 751621 - DNA, 19 bp, Mus musculus
  siRNA target sequence for V1rh13 (NM_134238.1,862-880).
gatggacttttgactgaat

SEQ ID NO: 751622 - DNA, 19 bp, Mus musculus
  siRNA target sequence for V1rh14 (NM_134239.1,483-501).
cagcaagaactattgctat

SEQ ID NO: 751623 - DNA, 19 bp, Mus musculus
  siRNA target sequence for V1rh14 (NM_134239.1,485-503).
gcaagaactattgctattt

SEQ ID NO: 751624 - DNA, 19 bp, Mus musculus
  siRNA target sequence for V1rh14 (NM_134239.1,507-525).
gccagaaagtcgagaaata

SEQ ID NO: 751625 - DNA, 19 bp, Mus musculus
  siRNA target sequence for V1rh14 (NM_134239.1,508-526).
ccagaaagtcgagaaataa

SEQ ID NO: 751626 - DNA, 19 bp, Mus musculus
  siRNA target sequence for V1rh14 (NM_134239.1,509-527).
cagaaagtcgagaaataaa

SEQ ID NO: 751627 - DNA, 19 bp, Mus musculus
  siRNA target sequence for V1rh18 (NM_134241.1,914-932).
cgctcatttacctgttcaa

SEQ ID NO: 751628 - DNA, 19 bp, Mus musculus
  siRNA target sequence for V1rh18 (NM_134241.1,982-1000).
gatcccaccaagaaggtta

SEQ ID NO: 751629 - DNA, 19 bp, Mus musculus
  siRNA target sequence for V1rh18 (NM_134241.1,990-1008).
caagaaggttaagaatcta

SEQ ID NO: 751630 - DNA, 19 bp, Mus musculus
  siRNA target sequence for V1rh18 (NM_134241.1,1028-1046).
gtgactcaagccttgaact

SEQ ID NO: 751631 - DNA, 19 bp, Mus musculus
  siRNA target sequence for V1rh20 (NM_134243.1,57-75).
cgttgggaacagcttagtt

SEQ ID NO: 751632 - DNA, 19 bp, Mus musculus
  siRNA target sequence for V1rh20 (NM_134243.1,58-76).
gttgggaacagcttagttt

SEQ ID NO: 751633 - DNA, 19 bp, Mus musculus
  siRNA target sequence for V1rh20 (NM_134243.1,62-80).
ggaacagcttagtttttgt

SEQ ID NO: 751634 - DNA, 19 bp, Mus musculus
  siRNA target sequence for V1rh20 (NM_134243.1,180-198).
gattcgaaggacaatagga

SEQ ID NO: 751635 - DNA, 19 bp, Mus musculus
  siRNA target sequence for V1rh20 (NM_134243.1,188-206).
ggacaataggagcctttaa

SEQ ID NO: 751636 - DNA, 19 bp, Mus musculus
  siRNA target sequence for V1rh20 (NM_134243.1,191-209).
caataggagcctttaattt

SEQ ID NO: 751637 - DNA, 19 bp, Mus musculus
  siRNA target sequence for V1rh20 (NM_134243.1,344-362).
gtcagaggctcaaactaaa

SEQ ID NO: 751638 - DNA, 19 bp, Mus musculus
  siRNA target sequence for V1rh20 (NM_134243.1,413-431).
ccttgatcagcatgaactt

SEQ ID NO: 751639 - DNA, 19 bp, Mus musculus
  siRNA target sequence for V1rh20 (NM_134243.1,414-432).
cttgatcagcatgaactta

SEQ ID NO: 751640 - DNA, 19 bp, Mus musculus
  siRNA target sequence for V1rh20 (NM_134243.1,417-435).
gatcagcatgaacttacta

SEQ ID NO: 751641 - DNA, 19 bp, Mus musculus
  siRNA target sequence for V1rh20 (NM_134243.1,420-438).
cagcatgaacttactatct

SEQ ID NO: 751642 - DNA, 19 bp, Mus musculus
  siRNA target sequence for V1rh20 (NM_134243.1,451-469).
gtcaatcgtgtaaacatca

SEQ ID NO: 751643 - DNA, 19 bp, Mus musculus
  siRNA target sequence for V1rh20 (NM_134243.1,518-536).
ggataacaagatggatttt

SEQ ID NO: 751644 - DNA, 19 bp, Mus musculus
  siRNA target sequence for V1rh20 (NM_134243.1,706-724).
cttctgatgatgtgtttta

SEQ ID NO: 751645 - DNA, 19 bp, Mus musculus
  siRNA target sequence for V1rh20 (NM_134243.1,774-792).
catagagaattattctaca

SEQ ID NO: 751646 - DNA, 19 bp, Mus musculus
  siRNA target sequence for V1rh20 (NM_134243.1,780-798).
gaattattctacagtacta

SEQ ID NO: 751647 - DNA, 19 bp, Mus musculus
  siRNA target sequence for V1rh20 (NM_134243.1,810-828).
gtttttaaccattggttat

SEQ ID NO: 751648 - DNA, 19 bp, Mus musculus
  siRNA target sequence for V1rh20 (NM_134243.1,839-857).
gccccttcatactgattca

SEQ ID NO: 751649 - DNA, 19 bp, Mus musculus
  siRNA target sequence for V1rh20 (NM_134243.1,852-870).
gattcatagagatgaacat

SEQ ID NO: 751650 - DNA, 19 bp, Mus musculus
  siRNA target sequence for V1ri10 (NM_134245.1,22-40).
ctcgtccagggaataattt

SEQ ID NO: 751651 - DNA, 19 bp, Mus musculus
  siRNA target sequence for V1ri10 (NM_134245.1,27-45).
ccagggaataattttcatt

SEQ ID NO: 751652 - DNA, 19 bp, Mus musculus
  siRNA target sequence for V1ri10 (NM_134245.1,28-46).
cagggaataattttcattt

SEQ ID NO: 751653 - DNA, 19 bp, Mus musculus
  siRNA target sequence for V1ri10 (NM_134245.1,42-60).
catttcacttactggattt

SEQ ID NO: 751654 - DNA, 19 bp, Mus musculus
  siRNA target sequence for V1ri10 (NM_134245.1,359-377).
gaaaactcaaacagcatat

SEQ ID NO: 751655 - DNA, 19 bp, Mus musculus
  siRNA target sequence for V1ri10 (NM_134245.1,603-621).
ggttctccatctatacaaa

SEQ ID NO: 751656 - DNA, 19 bp, Mus musculus
  siRNA target sequence for V1ri10 (NM_134245.1,756-774).
cttatatataggttctaca

SEQ ID NO: 751657 - DNA, 19 bp, Mus musculus
  siRNA target sequence for B430212I04Rik (NM_134247.2,605-623).
caggcatcatcgatgttta

SEQ ID NO: 751658 - DNA, 19 bp, Mus musculus
  siRNA target sequence for B430212I04Rik (NM_134247.2,609-627).
catcatcgatgtttatggt

SEQ ID NO: 751659 - DNA, 19 bp, Mus musculus
  siRNA target sequence for B430212I04Rik (NM_134247.2,777-795).
gcttcgacatccaaaggta

SEQ ID NO: 751660 - DNA, 19 bp, Mus musculus
  siRNA target sequence for B430212I04Rik (NM_134247.2,778-796).
cttcgacatccaaaggtaa

SEQ ID NO: 751661 - DNA, 19 bp, Mus musculus
  siRNA target sequence for B430212I04Rik (NM_134247.2,836-854).
ctgatgtctgtctgatcat

SEQ ID NO: 751662 - DNA, 19 bp, Mus musculus
  siRNA target sequence for B430212I04Rik (NM_134247.2,894-912).
caatggctctgcattcagt

SEQ ID NO: 751663 - DNA, 19 bp, Mus musculus
  siRNA target sequence for B430212I04Rik (NM_134247.2,961-979).
catgacctgaggagaatga

SEQ ID NO: 751664 - DNA, 19 bp, Mus musculus
  siRNA target sequence for B430212I04Rik (NM_134247.2,992-1010).
ctggcattctggacattgt

SEQ ID NO: 751665 - DNA, 19 bp, Mus musculus
  siRNA target sequence for B430212I04Rik (NM_134247.2,1049-1067).
ccagcatgataccaataga

SEQ ID NO: 751666 - DNA, 19 bp, Mus musculus
  siRNA target sequence for B430212I04Rik (NM_134247.2,1095-1113).
ggctggccaggatgatcat

SEQ ID NO: 751667 - DNA, 19 bp, Mus musculus
  siRNA target sequence for B430212I04Rik (NM_134247.2,1115-1133).
gctggaggagtgagttata

SEQ ID NO: 751668 - DNA, 19 bp, Mus musculus
  siRNA target sequence for B430212I04Rik (NM_134247.2,1116-1134).
ctggaggagtgagttatat

SEQ ID NO: 751669 - DNA, 19 bp, Mus musculus
  siRNA target sequence for B430212I04Rik (NM_134247.2,1119-1137).
gaggagtgagttatatact

SEQ ID NO: 751670 - DNA, 19 bp, Mus musculus
  siRNA target sequence for B430212I04Rik (NM_134247.2,1121-1139).
ggagtgagttatatactca

SEQ ID NO: 751671 - DNA, 19 bp, Mus musculus
  siRNA target sequence for B430212I04Rik (NM_134247.2,1178-1196).
ggccccaggtactctctta

SEQ ID NO: 751672 - DNA, 19 bp, Mus musculus
  siRNA target sequence for B430212I04Rik (NM_134247.2,1199-1217).
ctgggactgggcattacat

SEQ ID NO: 751673 - DNA, 19 bp, Mus musculus
  siRNA target sequence for B430212I04Rik (NM_134247.2,1215-1233).
catcgaaccaccttacttt

SEQ ID NO: 751674 - DNA, 19 bp, Mus musculus
  siRNA target sequence for B430212I04Rik (NM_134247.2,1243-1261).
ccagcttccctgcacaaaa

SEQ ID NO: 751675 - DNA, 19 bp, Mus musculus
  siRNA target sequence for B430212I04Rik (NM_134247.2,1244-1262).
cagcttccctgcacaaaat

SEQ ID NO: 751676 - DNA, 19 bp, Mus musculus
  siRNA target sequence for B430212I04Rik (NM_134247.2,1247-1265).
cttccctgcacaaaatagt

SEQ ID NO: 751677 - DNA, 19 bp, Mus musculus
  siRNA target sequence for Havcr1 (NM_134248.1,107-125).
catgtacttactcaacata

SEQ ID NO: 751678 - DNA, 19 bp, Mus musculus
  siRNA target sequence for Havcr1 (NM_134248.1,130-148).
ggaatcacaacgacatgtt

SEQ ID NO: 751679 - DNA, 19 bp, Mus musculus
  siRNA target sequence for Havcr1 (NM_134248.1,175-193).
gcttgtcaaaatacactta

SEQ ID NO: 751680 - DNA, 19 bp, Mus musculus
  siRNA target sequence for Havcr1 (NM_134248.1,230-248).
gcagtcggtacaacttaaa

SEQ ID NO: 751681 - DNA, 19 bp, Mus musculus
  siRNA target sequence for Havcr1 (NM_134248.1,243-261).
cttaaaggggcatatttca

SEQ ID NO: 751682 - DNA, 19 bp, Mus musculus
  siRNA target sequence for Havcr1 (NM_134248.1,330-348).
ggagattcctggatggttt

SEQ ID NO: 751683 - DNA, 19 bp, Mus musculus
  siRNA target sequence for Havcr1 (NM_134248.1,333-351).
gattcctggatggtttaat

SEQ ID NO: 751684 - DNA, 19 bp, Mus musculus
  siRNA target sequence for Havcr1 (NM_134248.1,338-356).
ctggatggtttaatgatca

SEQ ID NO: 751685 - DNA, 19 bp, Mus musculus
  siRNA target sequence for Havcr1 (NM_134248.1,699-717).
ccctactaagggcttctat

SEQ ID NO: 751686 - DNA, 19 bp, Mus musculus
  siRNA target sequence for Havcr1 (NM_134248.1,828-846).
ccgtgtctctaagattgaa

SEQ ID NO: 751687 - DNA, 19 bp, Mus musculus
  siRNA target sequence for Havcr1 (NM_134248.1,875-893).
cccgagctgaagacaacat

SEQ ID NO: 751688 - DNA, 19 bp, Mus musculus
  siRNA target sequence for Havcr1 (NM_134248.1,877-895).
cgagctgaagacaacatct

SEQ ID NO: 751689 - DNA, 19 bp, Mus musculus
  siRNA target sequence for Havcr1 (NM_134248.1,878-896).
gagctgaagacaacatcta

SEQ ID NO: 751690 - DNA, 19 bp, Mus musculus
  siRNA target sequence for Timd2 (NM_134249.3,190-208).
ggtgccgtggagtctcata

SEQ ID NO: 751691 - DNA, 19 bp, Mus musculus
  siRNA target sequence for Timd2 (NM_134249.3,274-292).
ggaatcgttcctatgtgtt

SEQ ID NO: 751692 - DNA, 19 bp, Mus musculus
  siRNA target sequence for Timd2 (NM_134249.3,301-319).
ggggaatgccgccattctt

SEQ ID NO: 751693 - DNA, 19 bp, Mus musculus
  siRNA target sequence for Timd2 (NM_134249.3,302-320).
gggaatgccgccattctta

SEQ ID NO: 751694 - DNA, 19 bp, Mus musculus
  siRNA target sequence for Timd2 (NM_134249.3,303-321).
ggaatgccgccattcttat

SEQ ID NO: 751695 - DNA, 19 bp, Mus musculus
  siRNA target sequence for Timd2 (NM_134249.3,304-322).
gaatgccgccattcttatt

SEQ ID NO: 751696 - DNA, 19 bp, Mus musculus
  siRNA target sequence for Timd2 (NM_134249.3,309-327).
ccgccattcttattgtata

SEQ ID NO: 751697 - DNA, 19 bp, Mus musculus
  siRNA target sequence for Timd2 (NM_134249.3,493-511).
cattttgtggactatatgt

SEQ ID NO: 751698 - DNA, 19 bp, Mus musculus
  siRNA target sequence for Timd2 (NM_134249.3,502-520).
gactatatgttggaagtta

SEQ ID NO: 751699 - DNA, 19 bp, Mus musculus
  siRNA target sequence for Timd2 (NM_134249.3,733-751).
cctgcagactggcataaca

SEQ ID NO: 751700 - DNA, 19 bp, Mus musculus
  siRNA target sequence for Timd2 (NM_134249.3,766-784).
gatgacccttgggatgata

SEQ ID NO: 751701 - DNA, 19 bp, Mus musculus
  siRNA target sequence for Timd2 (NM_134249.3,769-787).
gacccttgggatgataaca

SEQ ID NO: 751702 - DNA, 19 bp, Mus musculus
  siRNA target sequence for Timd2 (NM_134249.3,990-1008).
cgaacggaccagatgtgaa

SEQ ID NO: 751703 - DNA, 19 bp, Mus musculus
  siRNA target sequence for Timd2 (NM_134249.3,1006-1024).
gaagaccaggtctacatta

SEQ ID NO: 751704 - DNA, 19 bp, Mus musculus
  siRNA target sequence for Bnipl (NM_134253.1,496-514).
ggacagcggacatgagttt

SEQ ID NO: 751705 - DNA, 19 bp, Mus musculus
  siRNA target sequence for Bnipl (NM_134253.1,499-517).
cagcggacatgagtttgaa

SEQ ID NO: 751706 - DNA, 19 bp, Mus musculus
  siRNA target sequence for Bnipl (NM_134253.1,787-805).
ctacatcatggaacactta

SEQ ID NO: 751707 - DNA, 19 bp, Mus musculus
  siRNA target sequence for Bnipl (NM_134253.1,939-957).
ggaggcttcggaaaaacct

SEQ ID NO: 751708 - DNA, 19 bp, Mus musculus
  siRNA target sequence for Bnipl (NM_134253.1,977-995).
cacgctacgtggtatgtga

SEQ ID NO: 751709 - DNA, 19 bp, Mus musculus
  siRNA target sequence for Bnipl (NM_134253.1,1032-1050).
ccaagttcacacgaaagat

SEQ ID NO: 751710 - DNA, 19 bp, Mus musculus
  siRNA target sequence for Trpm2 (NM_138301.1,454-472).
cttggaccggagaagaact

SEQ ID NO: 751711 - DNA, 19 bp, Mus musculus
  siRNA target sequence for Trpm2 (NM_138301.1,538-556).
caatctccgacgaagcaat

SEQ ID NO: 751712 - DNA, 19 bp, Mus musculus
  siRNA target sequence for Trpm2 (NM_138301.1,542-560).
ctccgacgaagcaatagca

SEQ ID NO: 751713 - DNA, 19 bp, Mus musculus
  siRNA target sequence for Trpm2 (NM_138301.1,567-585).
gcaagagcaggagatttct

SEQ ID NO: 751714 - DNA, 19 bp, Mus musculus
  siRNA target sequence for Trpm2 (NM_138301.1,624-642).
catggattcccgagaatat

SEQ ID NO: 751715 - DNA, 19 bp, Mus musculus
  siRNA target sequence for Trpm2 (NM_138301.1,627-645).
ggattcccgagaatatcaa

SEQ ID NO: 751716 - DNA, 19 bp, Mus musculus
  siRNA target sequence for Trpm2 (NM_138301.1,659-677).
gtgtacttcgtggaaagtt

SEQ ID NO: 751717 - DNA, 19 bp, Mus musculus
  siRNA target sequence for Trpm2 (NM_138301.1,664-682).
cttcgtggaaagttccaaa

SEQ ID NO: 751718 - DNA, 19 bp, Mus musculus
  siRNA target sequence for Trpm2 (NM_138301.1,771-789).
gcaaggagtgggatccaaa

SEQ ID NO: 751719 - DNA, 19 bp, Mus musculus
  siRNA target sequence for Trpm2 (NM_138301.1,775-793).
ggagtgggatccaaagaaa

SEQ ID NO: 751720 - DNA, 19 bp, Mus musculus
  siRNA target sequence for Trpm2 (NM_138301.1,818-836).
gcctttggtgacatcgttt

SEQ ID NO: 751721 - DNA, 19 bp, Mus musculus
  siRNA target sequence for Trpm2 (NM_138301.1,888-906).
cgccctccagtgtcatcta

SEQ ID NO: 751722 - DNA, 19 bp, Mus musculus
  siRNA target sequence for Trpm2 (NM_138301.1,1071-1089).
cccacacaggcgtgatgaa

SEQ ID NO: 751723 - DNA, 19 bp, Mus musculus
  siRNA target sequence for Trpm2 (NM_138301.1,1278-1296).
gcaaccattcccacttcat

SEQ ID NO: 751724 - DNA, 19 bp, Mus musculus
  siRNA target sequence for Trpm2 (NM_138301.1,1312-1330).
gacccacgggcaatatggt

SEQ ID NO: 751725 - DNA, 19 bp, Mus musculus
  siRNA target sequence for Trpm2 (NM_138301.1,1443-1461).
ctggcactctgcatacaat

SEQ ID NO: 751726 - DNA, 19 bp, Mus musculus
  siRNA target sequence for Trpm2 (NM_138301.1,1446-1464).
gcactctgcatacaatcta

SEQ ID NO: 751727 - DNA, 19 bp, Mus musculus
  siRNA target sequence for Trpm2 (NM_138301.1,1482-1500).
gcacaccctgcgtgatagt

SEQ ID NO: 751728 - DNA, 19 bp, Mus musculus
  siRNA target sequence for Trpm2 (NM_138301.1,1650-1668).
ccaaaaagatccaagacat

SEQ ID NO: 751729 - DNA, 19 bp, Mus musculus
  siRNA target sequence for Trpm2 (NM_138301.1,1797-1815).
gggaccaccaactgaagtt

SEQ ID NO: 751730 - DNA, 19 bp, Mus musculus
  siRNA target sequence for Trpm2 (NM_138301.1,1844-1862).
gctcgcagtgagatcttca

SEQ ID NO: 751731 - DNA, 19 bp, Mus musculus
  siRNA target sequence for Trpm2 (NM_138301.1,1853-1871).
gagatcttcaccgatgaat

SEQ ID NO: 751732 - DNA, 19 bp, Mus musculus
  siRNA target sequence for Trpm2 (NM_138301.1,1889-1907).
gatctgcatcccatgatga

SEQ ID NO: 751733 - DNA, 19 bp, Mus musculus
  siRNA target sequence for Trpm2 (NM_138301.1,2072-2090).
cagcgcttagcctatgcat

SEQ ID NO: 751734 - DNA, 19 bp, Mus musculus
  siRNA target sequence for Trpm2 (NM_138301.1,2247-2265).
gcctccggtccctctataa

SEQ ID NO: 751735 - DNA, 19 bp, Mus musculus
  siRNA target sequence for Trpm2 (NM_138301.1,2301-2319).
cagtccgtgaccttctcat

SEQ ID NO: 751736 - DNA, 19 bp, Mus musculus
  siRNA target sequence for Trpm2 (NM_138301.1,2303-2321).
gtccgtgaccttctcattt

SEQ ID NO: 751737 - DNA, 19 bp, Mus musculus
  siRNA target sequence for Trpm2 (NM_138301.1,2482-2500).
gtttgagcacagagctata

SEQ ID NO: 751738 - DNA, 19 bp, Mus musculus
  siRNA target sequence for Trpm2 (NM_138301.1,2610-2628).
ccaaggacatgaaattcgt

SEQ ID NO: 751739 - DNA, 19 bp, Mus musculus
  siRNA target sequence for Trpm2 (NM_138301.1,2825-2843).
gtcatcttccacatgaata

SEQ ID NO: 751740 - DNA, 19 bp, Mus musculus
  siRNA target sequence for Trpm2 (NM_138301.1,2916-2934).
ggtgcgagtacctcatcta

SEQ ID NO: 751741 - DNA, 19 bp, Mus musculus
  siRNA target sequence for Trpm2 (NM_138301.1,2997-3015).
gctgtggactaatgaagat

SEQ ID NO: 751742 - DNA, 19 bp, Mus musculus
  siRNA target sequence for Trpm2 (NM_138301.1,3138-3156).
ctttggacttcatcatgtt

SEQ ID NO: 751743 - DNA, 19 bp, Mus musculus
  siRNA target sequence for Trpm2 (NM_138301.1,3173-3191).
cacatcttcactattagca

SEQ ID NO: 751744 - DNA, 19 bp, Mus musculus
  siRNA target sequence for Trpm2 (NM_138301.1,3295-3313).
gcaggccattctcatacat

SEQ ID NO: 751745 - DNA, 19 bp, Mus musculus
  siRNA target sequence for Trpm2 (NM_138301.1,3300-3318).
ccattctcatacataacga

SEQ ID NO: 751746 - DNA, 19 bp, Mus musculus
  siRNA target sequence for Trpm2 (NM_138301.1,3337-3355).
cttccgtggggttgtctat

SEQ ID NO: 751747 - DNA, 19 bp, Mus musculus
  siRNA target sequence for Trpm2 (NM_138301.1,3341-3359).
cgtggggttgtctatcact

SEQ ID NO: 751748 - DNA, 19 bp, Mus musculus
  siRNA target sequence for Trpm2 (NM_138301.1,3391-3409).
ctacattgacggtgtgaat

SEQ ID NO: 751749 - DNA, 19 bp, Mus musculus
  siRNA target sequence for Trpm2 (NM_138301.1,4114-4132).
gagtatcaggaggaaagta

SEQ ID NO: 751750 - DNA, 19 bp, Mus musculus
  siRNA target sequence for Trpm2 (NM_138301.1,4233-4251).
cggcagagtttctgatcta

SEQ ID NO: 751751 - DNA, 19 bp, Mus musculus
  siRNA target sequence for Trpm2 (NM_138301.1,4313-4331).
gcagaacctctgtctaaga

SEQ ID NO: 751752 - DNA, 19 bp, Mus musculus
  siRNA target sequence for Trpm2 (NM_138301.1,4694-4712).
caaggtacagaggtataca

SEQ ID NO: 751753 - DNA, 19 bp, Mus musculus
  siRNA target sequence for Trpm2 (NM_138301.1,4822-4840).
gaacctgcacactcatgat

SEQ ID NO: 751754 - DNA, 19 bp, Mus musculus
  siRNA target sequence for 1300010K09Rik (NM_138303.1,357-375).
gaagaggatgacaagacat

SEQ ID NO: 751755 - DNA, 19 bp, Mus musculus
  siRNA target sequence for 1300010K09Rik (NM_138303.1,403-421).
ccagattctggacatttga

SEQ ID NO: 751756 - DNA, 19 bp, Mus musculus
  siRNA target sequence for 1300010K09Rik (NM_138303.1,422-440).
ctactatcagagctttttt

SEQ ID NO: 751757 - DNA, 19 bp, Mus musculus
  siRNA target sequence for 1300010K09Rik (NM_138303.1,510-528).
gtgcggcaccatcttagaa

SEQ ID NO: 751758 - DNA, 19 bp, Mus musculus
  siRNA target sequence for 1300010K09Rik (NM_138303.1,526-544).
gaaaccgtcccgacctata

SEQ ID NO: 751759 - DNA, 19 bp, Mus musculus
  siRNA target sequence for 1300010K09Rik (NM_138303.1,794-812).
ctacggctactcactcttt

SEQ ID NO: 751760 - DNA, 19 bp, Mus musculus
  siRNA target sequence for 1300010K09Rik (NM_138303.1,798-816).
ggctactcactctttgtct

SEQ ID NO: 751761 - DNA, 19 bp, Mus musculus
  siRNA target sequence for 1300010K09Rik (NM_138303.1,799-817).
gctactcactctttgtctt

SEQ ID NO: 751762 - DNA, 19 bp, Mus musculus
  siRNA target sequence for 1300010K09Rik (NM_138303.1,951-969).
gtggctgcggcactattgt

SEQ ID NO: 751763 - DNA, 19 bp, Mus musculus
  siRNA target sequence for 1300010K09Rik (NM_138303.1,953-971).
ggctgcggcactattgtct

SEQ ID NO: 751764 - DNA, 19 bp, Mus musculus
  siRNA target sequence for 1300010K09Rik (NM_138303.1,954-972).
gctgcggcactattgtcta

SEQ ID NO: 751765 - DNA, 19 bp, Mus musculus
  siRNA target sequence for 1300010K09Rik (NM_138303.1,1086-1104).
gtcctgctgcccagttcaa

SEQ ID NO: 751766 - DNA, 19 bp, Mus musculus
  siRNA target sequence for AW260063 (NM_138313.2,39-57).
ggcgtattttggaaacaat

SEQ ID NO: 751767 - DNA, 19 bp, Mus musculus
  siRNA target sequence for AW260063 (NM_138313.2,40-58).
gcgtattttggaaacaata

SEQ ID NO: 751768 - DNA, 19 bp, Mus musculus
  siRNA target sequence for AW260063 (NM_138313.2,469-487).
ccataagccaggaagacaa

SEQ ID NO: 751769 - DNA, 19 bp, Mus musculus
  siRNA target sequence for AW260063 (NM_138313.2,688-706).
ccagaaagcttcagtgtat

SEQ ID NO: 751770 - DNA, 19 bp, Mus musculus
  siRNA target sequence for AW260063 (NM_138313.2,714-732).
cagttccatcggcttcata

SEQ ID NO: 751771 - DNA, 19 bp, Mus musculus
  siRNA target sequence for Triobp (NM_138579.2,136-154).
cgcccgatctgctcaactt

SEQ ID NO: 751772 - DNA, 19 bp, Mus musculus
  siRNA target sequence for Triobp (NM_138579.2,138-156).
cccgatctgctcaacttca

SEQ ID NO: 751773 - DNA, 19 bp, Mus musculus
  siRNA target sequence for Triobp (NM_138579.2,220-238).
cggattcaagcctcaaata

SEQ ID NO: 751774 - DNA, 19 bp, Mus musculus
  siRNA target sequence for Triobp (NM_138579.2,353-371).
caccaaggacgccgtttat

SEQ ID NO: 751775 - DNA, 19 bp, Mus musculus
  siRNA target sequence for Triobp (NM_138579.2,464-482).
gctctccgactgcaataaa

SEQ ID NO: 751776 - DNA, 19 bp, Mus musculus
  siRNA target sequence for Triobp (NM_138579.2,541-559).
ggacaggctctgaggttat

SEQ ID NO: 751777 - DNA, 19 bp, Mus musculus
  siRNA target sequence for Triobp (NM_138579.2,611-629).
cgtggagctctctccatta

SEQ ID NO: 751778 - DNA, 19 bp, Mus musculus
  siRNA target sequence for Triobp (NM_138579.2,1241-1259).
cacggcctcagctattgaa

SEQ ID NO: 751779 - DNA, 19 bp, Mus musculus
  siRNA target sequence for Triobp (NM_138579.2,1262-1280).
catgaagaaggcgtatcaa

SEQ ID NO: 751780 - DNA, 19 bp, Mus musculus
  siRNA target sequence for D17H6S56E-3 (NM_138582.1,446-464).
ccctcctcgccgatgacat

SEQ ID NO: 751781 - DNA, 19 bp, Mus musculus
  siRNA target sequence for D17H6S56E-3 (NM_138582.1,501-519).
gcggttcagggcagcttta

SEQ ID NO: 751782 - DNA, 19 bp, Mus musculus
  siRNA target sequence for D17H6S56E-3 (NM_138582.1,656-674).
ctgccagagccctcgaata

SEQ ID NO: 751783 - DNA, 19 bp, Mus musculus
  siRNA target sequence for D17H6S56E-3 (NM_138582.1,658-676).
gccagagccctcgaatata

SEQ ID NO: 751784 - DNA, 19 bp, Mus musculus
  siRNA target sequence for D17H6S56E-3 (NM_138582.1,693-711).
cctaggggctgcacttcat

SEQ ID NO: 751785 - DNA, 19 bp, Mus musculus
  siRNA target sequence for D17H6S56E-3 (NM_138582.1,712-730).
gccctgcaggatttctata

SEQ ID NO: 751786 - DNA, 19 bp, Mus musculus
  siRNA target sequence for D17H6S56E-3 (NM_138582.1,1013-1031).
gtttctccccgcaccataa

SEQ ID NO: 751787 - DNA, 19 bp, Mus musculus
  siRNA target sequence for D17H6S56E-3 (NM_138582.1,1178-1196).
gcagtatgggcgaggaaat

SEQ ID NO: 751788 - DNA, 19 bp, Mus musculus
  siRNA target sequence for D17H6S56E-3 (NM_138582.1,1249-1267).
cccatggagcctgttttct

SEQ ID NO: 751789 - DNA, 19 bp, Mus musculus
  siRNA target sequence for D17H6S56E-3 (NM_138582.1,1250-1268).
ccatggagcctgttttcta

SEQ ID NO: 751790 - DNA, 19 bp, Mus musculus
  siRNA target sequence for D17H6S56E-3 (NM_138582.1,1515-1533).
gcgctgcagggtgacattt

SEQ ID NO: 751791 - DNA, 19 bp, Mus musculus
  siRNA target sequence for D17H6S56E-3 (NM_138582.1,1527-1545).
gacatttctagtaactgaa

SEQ ID NO: 751792 - DNA, 19 bp, Mus musculus
  siRNA target sequence for D17H6S56E-3 (NM_138582.1,1587-1605).
gtctcctctgcgttttgaa

SEQ ID NO: 751793 - DNA, 19 bp, Mus musculus
  siRNA target sequence for D17H6S56E-3 (NM_138582.1,1592-1610).
ctctgcgttttgaaccata

SEQ ID NO: 751794 - DNA, 19 bp, Mus musculus
  siRNA target sequence for D17H6S56E-3 (NM_138582.1,1596-1614).
gcgttttgaaccatatgaa

SEQ ID NO: 751795 - DNA, 19 bp, Mus musculus
  siRNA target sequence for D17H6S56E-3 (NM_138582.1,1633-1651).
gggggagaggtgatcttca

SEQ ID NO: 751796 - DNA, 19 bp, Mus musculus
  siRNA target sequence for D17H6S56E-3 (NM_138582.1,1891-1909).
cgtcgctttgggcaattct

SEQ ID NO: 751797 - DNA, 19 bp, Mus musculus
  siRNA target sequence for D17H6S56E-3 (NM_138582.1,2149-2167).
ggtggccagccacagtttt

SEQ ID NO: 751798 - DNA, 19 bp, Mus musculus
  siRNA target sequence for D17H6S56E-3 (NM_138582.1,2398-2416).
ggccctccagatttcttga

SEQ ID NO: 751799 - DNA, 19 bp, Mus musculus
  siRNA target sequence for D17H6S56E-3 (NM_138582.1,2532-2550).
ggctcgcctgggactgaat

SEQ ID NO: 751800 - DNA, 19 bp, Mus musculus
  siRNA target sequence for D17H6S56E-3 (NM_138582.1,2536-2554).
cgcctgggactgaatgagt

SEQ ID NO: 751801 - DNA, 19 bp, Mus musculus
  siRNA target sequence for D16H22S680E (NM_138583.1,54-72).
gcatcatcttctttaagtt

SEQ ID NO: 751802 - DNA, 19 bp, Mus musculus
  siRNA target sequence for D16H22S680E (NM_138583.1,58-76).
catcttctttaagtttgat

SEQ ID NO: 751803 - DNA, 19 bp, Mus musculus
  siRNA target sequence for D16H22S680E (NM_138583.1,77-95).
cctcgtcctgtttccaaaa

SEQ ID NO: 751804 - DNA, 19 bp, Mus musculus
  siRNA target sequence for D16H22S680E (NM_138583.1,78-96).
ctcgtcctgtttccaaaaa

SEQ ID NO: 751805 - DNA, 19 bp, Mus musculus
  siRNA target sequence for D16H22S680E (NM_138583.1,120-138).
ccaacagagatgaattcta

SEQ ID NO: 751806 - DNA, 19 bp, Mus musculus
  siRNA target sequence for D16H22S680E (NM_138583.1,304-322).
ccgtggtagaggtgaactt

SEQ ID NO: 751807 - DNA, 19 bp, Mus musculus
  siRNA target sequence for D16H22S680E (NM_138583.1,381-399).
cagagggccacctgtataa

SEQ ID NO: 751808 - DNA, 19 bp, Mus musculus
  siRNA target sequence for D16H22S680E (NM_138583.1,424-442).
cctgagcacgtcaaaagga

SEQ ID NO: 751809 - DNA, 19 bp, Mus musculus
  siRNA target sequence for D16H22S680E (NM_138583.1,430-448).
cacgtcaaaaggagatgtt

SEQ ID NO: 751810 - DNA, 19 bp, Mus musculus
  siRNA target sequence for D16H22S680E (NM_138583.1,432-450).
cgtcaaaaggagatgttgt

SEQ ID NO: 751811 - DNA, 19 bp, Mus musculus
  siRNA target sequence for D16H22S680E (NM_138583.1,433-451).
gtcaaaaggagatgttgtt

SEQ ID NO: 751812 - DNA, 19 bp, Mus musculus
  siRNA target sequence for D16H22S680E (NM_138583.1,490-508).
cttgacaccaggaacctat

SEQ ID NO: 751813 - DNA, 19 bp, Mus musculus
  siRNA target sequence for D16H22S680E (NM_138583.1,552-570).
gctttggcaaacaactctt

SEQ ID NO: 751814 - DNA, 19 bp, Mus musculus
  siRNA target sequence for D16H22S680E (NM_138583.1,703-721).
gccaattctgaacaagtat

SEQ ID NO: 751815 - DNA, 19 bp, Mus musculus
  siRNA target sequence for D7Wsu128e (NM_138589.1,353-371).
gcacggggtccgagctaaa

SEQ ID NO: 751816 - DNA, 19 bp, Mus musculus
  siRNA target sequence for D7Wsu128e (NM_138589.1,356-374).
cggggtccgagctaaagca

SEQ ID NO: 751817 - DNA, 19 bp, Mus musculus
  siRNA target sequence for D7Wsu128e (NM_138589.1,411-429).
gcagaaggtcatgtataaa

SEQ ID NO: 751818 - DNA, 19 bp, Mus musculus
  siRNA target sequence for D7Wsu128e (NM_138589.1,431-449).
gacttgttcctgaagacaa

SEQ ID NO: 751819 - DNA, 19 bp, Mus musculus
  siRNA target sequence for D7Wsu128e (NM_138589.1,473-491).
ccagtggggccaagatcat

SEQ ID NO: 751820 - DNA, 19 bp, Mus musculus
  siRNA target sequence for D7Wsu128e (NM_138589.1,492-510).
ggtggttggttctactata

SEQ ID NO: 751821 - DNA, 19 bp, Mus musculus
  siRNA target sequence for D7Wsu128e (NM_138589.1,493-511).
gtggttggttctactataa

SEQ ID NO: 751822 - DNA, 19 bp, Mus musculus
  siRNA target sequence for D7Wsu128e (NM_138589.1,495-513).
ggttggttctactataaat

SEQ ID NO: 751823 - DNA, 19 bp, Mus musculus
  siRNA target sequence for D3Wsu161e (NM_138593.1,202-220).
cgggcaggaaacaagtcaa

SEQ ID NO: 751824 - DNA, 19 bp, Mus musculus
  siRNA target sequence for D3Wsu161e (NM_138593.1,230-248).
ggccacaatctcagaagtt

SEQ ID NO: 751825 - DNA, 19 bp, Mus musculus
  siRNA target sequence for D3Wsu161e (NM_138593.1,232-250).
ccacaatctcagaagttgt

SEQ ID NO: 751826 - DNA, 19 bp, Mus musculus
  siRNA target sequence for D3Wsu161e (NM_138593.1,233-251).
cacaatctcagaagttgtt

SEQ ID NO: 751827 - DNA, 19 bp, Mus musculus
  siRNA target sequence for D3Wsu161e (NM_138593.1,279-297).
gaatgccatgcccgattta

SEQ ID NO: 751828 - DNA, 19 bp, Mus musculus
  siRNA target sequence for D3Wsu161e (NM_138593.1,407-425).
gaagattttggtagataga

SEQ ID NO: 751829 - DNA, 19 bp, Mus musculus
  siRNA target sequence for D3Wsu161e (NM_138593.1,494-512).
gattagactggctaagact

SEQ ID NO: 751830 - DNA, 19 bp, Mus musculus
  siRNA target sequence for D3Wsu161e (NM_138593.1,530-548).
catccgtttctctgagtat

SEQ ID NO: 751831 - DNA, 19 bp, Mus musculus
  siRNA target sequence for D3Wsu161e (NM_138593.1,534-552).
cgtttctctgagtatgact

SEQ ID NO: 751832 - DNA, 19 bp, Mus musculus
  siRNA target sequence for D6Wsu163e (NM_138594.2,117-135).
gggaatttgtgtacaagtt

SEQ ID NO: 751833 - DNA, 19 bp, Mus musculus
  siRNA target sequence for D6Wsu163e (NM_138594.2,244-262).
cttcatagagagtgactta

SEQ ID NO: 751834 - DNA, 19 bp, Mus musculus
  siRNA target sequence for D6Wsu163e (NM_138594.2,270-288).
ctctgagccggtttataga

SEQ ID NO: 751835 - DNA, 19 bp, Mus musculus
  siRNA target sequence for D6Wsu163e (NM_138594.2,274-292).
gagccggtttatagaagaa

SEQ ID NO: 751836 - DNA, 19 bp, Mus musculus
  siRNA target sequence for D6Wsu163e (NM_138594.2,340-358).
cgttaaatccggtgaagta

SEQ ID NO: 751837 - DNA, 19 bp, Mus musculus
  siRNA target sequence for D6Wsu163e (NM_138594.2,378-396).
gtgcgtgggccaaagctta

SEQ ID NO: 751838 - DNA, 19 bp, Mus musculus
  siRNA target sequence for D6Wsu163e (NM_138594.2,435-453).
ctgactgggacgaagactt

SEQ ID NO: 751839 - DNA, 19 bp, Mus musculus
  siRNA target sequence for D6Wsu163e (NM_138594.2,512-530).
gaacacaactacttcgtta

SEQ ID NO: 751840 - DNA, 19 bp, Mus musculus
  siRNA target sequence for D6Wsu163e (NM_138594.2,557-575).
gacgtggagctgaaaaagt

SEQ ID NO: 751841 - DNA, 19 bp, Mus musculus
  siRNA target sequence for D6Wsu163e (NM_138594.2,581-599).
gagagacaaggtattgaaa

SEQ ID NO: 751842 - DNA, 19 bp, Mus musculus
  siRNA target sequence for D6Wsu163e (NM_138594.2,625-643).
gaaatcgctcacagatcaa

SEQ ID NO: 751843 - DNA, 19 bp, Mus musculus
  siRNA target sequence for D6Wsu163e (NM_138594.2,630-648).
cgctcacagatcaagatgt

SEQ ID NO: 751844 - DNA, 19 bp, Mus musculus
  siRNA target sequence for D6Wsu163e (NM_138594.2,678-696).
cccagcaagacttagagaa

SEQ ID NO: 751845 - DNA, 19 bp, Mus musculus
  siRNA target sequence for D6Wsu163e (NM_138594.2,679-697).
ccagcaagacttagagaat

SEQ ID NO: 751846 - DNA, 19 bp, Mus musculus
  siRNA target sequence for D6Wsu163e (NM_138594.2,680-698).
cagcaagacttagagaata

SEQ ID NO: 751847 - DNA, 19 bp, Mus musculus
  siRNA target sequence for D6Wsu163e (NM_138594.2,751-769).
ggaatgggtgataaagctt

SEQ ID NO: 751848 - DNA, 19 bp, Mus musculus
  siRNA target sequence for D6Wsu163e (NM_138594.2,756-774).
gggtgataaagcttcatca

SEQ ID NO: 751849 - DNA, 19 bp, Mus musculus
  siRNA target sequence for D6Wsu163e (NM_138594.2,798-816).
gctccctcagtgaagagat

SEQ ID NO: 751850 - DNA, 19 bp, Mus musculus
  siRNA target sequence for D6Wsu163e (NM_138594.2,959-977).
gacatgctggacttctgta

SEQ ID NO: 751851 - DNA, 19 bp, Mus musculus
  siRNA target sequence for D6Wsu163e (NM_138594.2,965-983).
ctggacttctgtaagcata

SEQ ID NO: 751852 - DNA, 19 bp, Mus musculus
  siRNA target sequence for D6Wsu163e (NM_138594.2,1059-1077).
gcctggttttgctagtaga

SEQ ID NO: 751853 - DNA, 19 bp, Mus musculus
  siRNA target sequence for D6Wsu163e (NM_138594.2,1060-1078).
cctggttttgctagtagat

SEQ ID NO: 751854 - DNA, 19 bp, Mus musculus
  siRNA target sequence for D6Wsu163e (NM_138594.2,1061-1079).
ctggttttgctagtagata

SEQ ID NO: 751855 - DNA, 19 bp, Mus musculus
  siRNA target sequence for D6Wsu163e (NM_138594.2,1063-1081).
ggttttgctagtagataat

SEQ ID NO: 751856 - DNA, 19 bp, Mus musculus
  siRNA target sequence for D6Wsu163e (NM_138594.2,1069-1087).
gctagtagataatcgaatt

SEQ ID NO: 751857 - DNA, 19 bp, Mus musculus
  siRNA target sequence for D6Wsu163e (NM_138594.2,1070-1088).
ctagtagataatcgaatta

SEQ ID NO: 751858 - DNA, 19 bp, Mus musculus
  siRNA target sequence for D6Wsu163e (NM_138594.2,1073-1091).
gtagataatcgaattaatt

SEQ ID NO: 751859 - DNA, 19 bp, Mus musculus
  siRNA target sequence for D6Wsu163e (NM_138594.2,1118-1136).
gccacagtttgccaagaat

SEQ ID NO: 751860 - DNA, 19 bp, Mus musculus
  siRNA target sequence for D6Wsu163e (NM_138594.2,1155-1173).
cacggattgaggaacaact

SEQ ID NO: 751861 - DNA, 19 bp, Mus musculus
  siRNA target sequence for D6Wsu163e (NM_138594.2,1238-1256).
cgcgattctggaaaccaaa

SEQ ID NO: 751862 - DNA, 19 bp, Mus musculus
  siRNA target sequence for D6Wsu163e (NM_138594.2,1239-1257).
gcgattctggaaaccaaaa

SEQ ID NO: 751863 - DNA, 19 bp, Mus musculus
  siRNA target sequence for D6Wsu163e (NM_138594.2,1262-1280).
ggaagtgatgataagtcta

SEQ ID NO: 751864 - DNA, 19 bp, Mus musculus
  siRNA target sequence for D6Wsu163e (NM_138594.2,1263-1281).
gaagtgatgataagtctaa

SEQ ID NO: 751865 - DNA, 19 bp, Mus musculus
  siRNA target sequence for D6Wsu163e (NM_138594.2,1341-1359).
ctaatctctcggaaatcca

SEQ ID NO: 751866 - DNA, 19 bp, Mus musculus
  siRNA target sequence for D6Wsu163e (NM_138594.2,1350-1368).
cggaaatccatgttgcttt

SEQ ID NO: 751867 - DNA, 19 bp, Mus musculus
  siRNA target sequence for D6Wsu163e (NM_138594.2,1393-1411).
gaagtcgggaaatatcact

SEQ ID NO: 751868 - DNA, 19 bp, Mus musculus
  siRNA target sequence for D6Wsu163e (NM_138594.2,1412-1430).
gctcgggatcccgctatta

SEQ ID NO: 751869 - DNA, 19 bp, Mus musculus
  siRNA target sequence for D6Wsu163e (NM_138594.2,1434-1452).
gactccgaaacattctcaa

SEQ ID NO: 751870 - DNA, 19 bp, Mus musculus
  siRNA target sequence for D6Wsu163e (NM_138594.2,1439-1457).
cgaaacattctcaaagtct

SEQ ID NO: 751871 - DNA, 19 bp, Mus musculus
  siRNA target sequence for D6Wsu163e (NM_138594.2,1465-1483).
ccatgatatcacaacgata

SEQ ID NO: 751872 - DNA, 19 bp, Mus musculus
  siRNA target sequence for D6Wsu163e (NM_138594.2,1466-1484).
catgatatcacaacgataa

SEQ ID NO: 751873 - DNA, 19 bp, Mus musculus
  siRNA target sequence for D6Wsu163e (NM_138594.2,1493-1511).
ctcttgctggtgcatgata

SEQ ID NO: 751874 - DNA, 19 bp, Mus musculus
  siRNA target sequence for D6Wsu163e (NM_138594.2,1498-1516).
gctggtgcatgatatgtca

SEQ ID NO: 751875 - DNA, 19 bp, Mus musculus
  siRNA target sequence for D6Wsu163e (NM_138594.2,1517-1535).
gaggaaatgactatacctt

SEQ ID NO: 751876 - DNA, 19 bp, Mus musculus
  siRNA target sequence for D6Wsu163e (NM_138594.2,1525-1543).
gactataccttggtgttta

SEQ ID NO: 751877 - DNA, 19 bp, Mus musculus
  siRNA target sequence for D6Wsu163e (NM_138594.2,1617-1635).
ctcggacagtgcaatttct

SEQ ID NO: 751878 - DNA, 19 bp, Mus musculus
  siRNA target sequence for D13Wsu50e (NM_138596.1,308-326).
ggagagggctctagctaaa

SEQ ID NO: 751879 - DNA, 19 bp, Mus musculus
  siRNA target sequence for D13Wsu50e (NM_138596.1,309-327).
gagagggctctagctaaaa

SEQ ID NO: 751880 - DNA, 19 bp, Mus musculus
  siRNA target sequence for D13Wsu50e (NM_138596.1,313-331).
gggctctagctaaaaacga

SEQ ID NO: 751881 - DNA, 19 bp, Mus musculus
  siRNA target sequence for D13Wsu50e (NM_138596.1,384-402).
caggaactttctaaagtgt

SEQ ID NO: 751882 - DNA, 19 bp, Mus musculus
  siRNA target sequence for D10Jhu81e (NM_138601.1,181-199).
gtcgggctgtggagtctat

SEQ ID NO: 751883 - DNA, 19 bp, Mus musculus
  siRNA target sequence for D10Jhu81e (NM_138601.1,183-201).
cgggctgtggagtctatga

SEQ ID NO: 751884 - DNA, 19 bp, Mus musculus
  siRNA target sequence for D10Jhu81e (NM_138601.1,367-385).
gattgcccgaggcaagatt

SEQ ID NO: 751885 - DNA, 19 bp, Mus musculus
  siRNA target sequence for D10Jhu81e (NM_138601.1,371-389).
gcccgaggcaagattacca

SEQ ID NO: 751886 - DNA, 19 bp, Mus musculus
  siRNA target sequence for D10Jhu81e (NM_138601.1,400-418).
gctcaatgctgctaaccat

SEQ ID NO: 751887 - DNA, 19 bp, Mus musculus
  siRNA target sequence for D10Jhu81e (NM_138601.1,482-500).
ggaaaggactgcaaggtta

SEQ ID NO: 751888 - DNA, 19 bp, Mus musculus
  siRNA target sequence for D10Jhu81e (NM_138601.1,483-501).
gaaaggactgcaaggttaa

SEQ ID NO: 751889 - DNA, 19 bp, Mus musculus
  siRNA target sequence for D10Jhu81e (NM_138601.1,637-655).
cggcaagtggccttatgct

SEQ ID NO: 751890 - DNA, 19 bp, Mus musculus
  siRNA target sequence for DXImx39e (NM_138602.1,112-130).
ggtgtcaccgcgtcatcaa

SEQ ID NO: 751891 - DNA, 19 bp, Mus musculus
  siRNA target sequence for DXImx39e (NM_138602.1,115-133).
gtcaccgcgtcatcaacaa

SEQ ID NO: 751892 - DNA, 19 bp, Mus musculus
  siRNA target sequence for DXImx39e (NM_138602.1,137-155).
cctctactaccaaaccaat

SEQ ID NO: 751893 - DNA, 19 bp, Mus musculus
  siRNA target sequence for DXImx39e (NM_138602.1,138-156).
ctctactaccaaaccaatt

SEQ ID NO: 751894 - DNA, 19 bp, Mus musculus
  siRNA target sequence for DXImx39e (NM_138602.1,397-415).
cagcgcctgtgtttttgat

SEQ ID NO: 751895 - DNA, 19 bp, Mus musculus
  siRNA target sequence for DXImx39e (NM_138602.1,432-450).
ctgcgtctgagaaacctta

SEQ ID NO: 751896 - DNA, 19 bp, Mus musculus
  siRNA target sequence for DXImx40e (NM_138603.2,113-131).
gaccgaatcctcatccatt

SEQ ID NO: 751897 - DNA, 19 bp, Mus musculus
  siRNA target sequence for DXImx40e (NM_138603.2,117-135).
gaatcctcatccattcctt

SEQ ID NO: 751898 - DNA, 19 bp, Mus musculus
  siRNA target sequence for DXImx40e (NM_138603.2,217-235).
ccgatgccttcgagtgatt

SEQ ID NO: 751899 - DNA, 19 bp, Mus musculus
  siRNA target sequence for DXImx40e (NM_138603.2,218-236).
cgatgccttcgagtgatta

SEQ ID NO: 751900 - DNA, 19 bp, Mus musculus
  siRNA target sequence for DXImx40e (NM_138603.2,219-237).
gatgccttcgagtgattaa

SEQ ID NO: 751901 - DNA, 19 bp, Mus musculus
  siRNA target sequence for DXImx40e (NM_138603.2,223-241).
ccttcgagtgattaatcct

SEQ ID NO: 751902 - DNA, 19 bp, Mus musculus
  siRNA target sequence for DXImx40e (NM_138603.2,389-407).
cttcgagatctgcttcttt

SEQ ID NO: 751903 - DNA, 19 bp, Mus musculus
  siRNA target sequence for DXImx40e (NM_138603.2,458-476).
gcaggtgactcggctattt

SEQ ID NO: 751904 - DNA, 19 bp, Mus musculus
  siRNA target sequence for DXImx40e (NM_138603.2,459-477).
caggtgactcggctatttt

SEQ ID NO: 751905 - DNA, 19 bp, Mus musculus
  siRNA target sequence for DXImx40e (NM_138603.2,607-625).
ggttctacctgagttgaat

SEQ ID NO: 751906 - DNA, 19 bp, Mus musculus
  siRNA target sequence for DXImx40e (NM_138603.2,608-626).
gttctacctgagttgaatt

SEQ ID NO: 751907 - DNA, 19 bp, Mus musculus
  siRNA target sequence for DXImx40e (NM_138603.2,847-865).
caagcagctgattgaacat

SEQ ID NO: 751908 - DNA, 19 bp, Mus musculus
  siRNA target sequence for DXImx40e (NM_138603.2,937-955).
gggtgctagggctatgact

SEQ ID NO: 751909 - DNA, 19 bp, Mus musculus
  siRNA target sequence for DXImx40e (NM_138603.2,972-990).
cccgcttcacccattcaga

SEQ ID NO: 751910 - DNA, 19 bp, Mus musculus
  siRNA target sequence for DXImx40e (NM_138603.2,1043-1061).
gtaccagctacctctcaaa

SEQ ID NO: 751911 - DNA, 19 bp, Mus musculus
  siRNA target sequence for DXImx40e (NM_138603.2,1053-1071).
cctctcaaaggcttgaaca

SEQ ID NO: 751912 - DNA, 19 bp, Mus musculus
  siRNA target sequence for DXImx40e (NM_138603.2,1125-1143).
cgagtgtgaaccacaacat

SEQ ID NO: 751913 - DNA, 19 bp, Mus musculus
  siRNA target sequence for DXImx40e (NM_138603.2,1200-1218).
ccgagtgccgacaaagtga

SEQ ID NO: 751914 - DNA, 19 bp, Mus musculus
  siRNA target sequence for DXImx40e (NM_138603.2,1440-1458).
ctcgacggctggcagaaat

SEQ ID NO: 751915 - DNA, 19 bp, Mus musculus
  siRNA target sequence for DXImx40e (NM_138603.2,1506-1524).
ggaaggaggaggtctataa

SEQ ID NO: 751916 - DNA, 19 bp, Mus musculus
  siRNA target sequence for DXImx40e (NM_138603.2,1564-1582).
gtcccggctggcctatact

SEQ ID NO: 751917 - DNA, 19 bp, Mus musculus
  siRNA target sequence for DXImx40e (NM_138603.2,1628-1646).
gagatcactaagatcttgt

SEQ ID NO: 751918 - DNA, 19 bp, Mus musculus
  siRNA target sequence for DXImx40e (NM_138603.2,1642-1660).
cttgtcggacacaaaggaa

SEQ ID NO: 751919 - DNA, 19 bp, Mus musculus
  siRNA target sequence for DXImx40e (NM_138603.2,1690-1708).
gaagctcgaccggacattt

SEQ ID NO: 751920 - DNA, 19 bp, Mus musculus
  siRNA target sequence for DXImx40e (NM_138603.2,1693-1711).
gctcgaccggacatttgca

SEQ ID NO: 751921 - DNA, 19 bp, Mus musculus
  siRNA target sequence for DXImx40e (NM_138603.2,1757-1775).
gttcggaaagcctacaagt

SEQ ID NO: 751922 - DNA, 19 bp, Mus musculus
  siRNA target sequence for DXImx46e (NM_138604.2,797-815).
gtcggagcgggctacaaca

SEQ ID NO: 751923 - DNA, 19 bp, Mus musculus
  siRNA target sequence for DXImx46e (NM_138604.2,1254-1272).
gctaccaccggaatatcca

SEQ ID NO: 751924 - DNA, 19 bp, Mus musculus
  siRNA target sequence for DXImx46e (NM_138604.2,1259-1277).
caccggaatatccactata

SEQ ID NO: 751925 - DNA, 19 bp, Mus musculus
  siRNA target sequence for DXImx46e (NM_138604.2,1261-1279).
ccggaatatccactataat

SEQ ID NO: 751926 - DNA, 19 bp, Mus musculus
  siRNA target sequence for DXImx46e (NM_138604.2,1262-1280).
cggaatatccactataatt

SEQ ID NO: 751927 - DNA, 19 bp, Mus musculus
  siRNA target sequence for DXImx46e (NM_138604.2,1264-1282).
gaatatccactataattca

SEQ ID NO: 751928 - DNA, 19 bp, Mus musculus
  siRNA target sequence for DXImx46e (NM_138604.2,1281-1299).
cagtggtgaatcctaacaa

SEQ ID NO: 751929 - DNA, 19 bp, Mus musculus
  siRNA target sequence for DXImx46e (NM_138604.2,1319-1337).
ctgggcctaccgtcattta

SEQ ID NO: 751930 - DNA, 19 bp, Mus musculus
  siRNA target sequence for DXImx46e (NM_138604.2,1350-1368).
cagagcagtccctgatgaa

SEQ ID NO: 751931 - DNA, 19 bp, Mus musculus
  siRNA target sequence for DXImx46e (NM_138604.2,1354-1372).
gcagtccctgatgaagaat

SEQ ID NO: 751932 - DNA, 19 bp, Mus musculus
  siRNA target sequence for DXImx46e (NM_138604.2,1395-1413).
catggattgaacagcaaat

SEQ ID NO: 751933 - DNA, 19 bp, Mus musculus
  siRNA target sequence for DXImx46e (NM_138604.2,1477-1495).
ggctcgagaatcttacctt

SEQ ID NO: 751934 - DNA, 19 bp, Mus musculus
  siRNA target sequence for DXImx46e (NM_138604.2,1627-1645).
cccacggcaacgaagttca

SEQ ID NO: 751935 - DNA, 19 bp, Mus musculus
  siRNA target sequence for DXImx46e (NM_138604.2,1915-1933).
gtcccaacaggaataccta

SEQ ID NO: 751936 - DNA, 19 bp, Mus musculus
  siRNA target sequence for DXImx46e (NM_138604.2,1925-1943).
gaatacctagacagtatga

SEQ ID NO: 751937 - DNA, 19 bp, Mus musculus
  siRNA target sequence for DXImx46e (NM_138604.2,1930-1948).
cctagacagtatgaagaaa

SEQ ID NO: 751938 - DNA, 19 bp, Mus musculus
  siRNA target sequence for DXImx48e (NM_138605.1,865-883).
gaggcgcaggccttttgaa

SEQ ID NO: 751939 - DNA, 19 bp, Mus musculus
  siRNA target sequence for DXImx48e (NM_138605.1,867-885).
ggcgcaggccttttgaaga

SEQ ID NO: 751940 - DNA, 19 bp, Mus musculus
  siRNA target sequence for DXImx48e (NM_138605.1,868-886).
gcgcaggccttttgaagaa

SEQ ID NO: 751941 - DNA, 19 bp, Mus musculus
  siRNA target sequence for DXImx48e (NM_138605.1,898-916).
gaggagtgcggacgataat

SEQ ID NO: 751942 - DNA, 19 bp, Mus musculus
  siRNA target sequence for DXImx48e (NM_138605.1,1001-1019).
cttcaggtgcccgaagtta

SEQ ID NO: 751943 - DNA, 19 bp, Mus musculus
  siRNA target sequence for DXImx48e (NM_138605.1,1004-1022).
caggtgcccgaagttatgt

SEQ ID NO: 751944 - DNA, 19 bp, Mus musculus
  siRNA target sequence for DXImx48e (NM_138605.1,1007-1025).
gtgcccgaagttatgttga

SEQ ID NO: 751945 - DNA, 19 bp, Mus musculus
  siRNA target sequence for DXImx48e (NM_138605.1,1066-1084).
cccacctgtggcttttaca

SEQ ID NO: 751946 - DNA, 19 bp, Mus musculus
  siRNA target sequence for DXImx48e (NM_138605.1,1457-1475).
gaccgtgacctgatcttga

SEQ ID NO: 751947 - DNA, 19 bp, Mus musculus
  siRNA target sequence for DXImx48e (NM_138605.1,1640-1658).
gggggcagccctaaggaat

SEQ ID NO: 751948 - DNA, 19 bp, Mus musculus
  siRNA target sequence for DXImx48e (NM_138605.1,1682-1700).
gcccgctctgtgatagcta

SEQ ID NO: 751949 - DNA, 19 bp, Mus musculus
  siRNA target sequence for DXImx48e (NM_138605.1,1686-1704).
gctctgtgatagctactat

SEQ ID NO: 751950 - DNA, 19 bp, Mus musculus
  siRNA target sequence for DXImx48e (NM_138605.1,1730-1748).
gagcgctctagctctagat

SEQ ID NO: 751951 - DNA, 19 bp, Mus musculus
  siRNA target sequence for DXImx48e (NM_138605.1,1732-1750).
gcgctctagctctagatgt

SEQ ID NO: 751952 - DNA, 19 bp, Mus musculus
  siRNA target sequence for DXImx48e (NM_138605.1,1735-1753).
ctctagctctagatgtgat

SEQ ID NO: 751953 - DNA, 19 bp, Mus musculus
  siRNA target sequence for DXImx48e (NM_138605.1,1777-1795).
gggtcagttcactgagaat

SEQ ID NO: 751954 - DNA, 19 bp, Mus musculus
  siRNA target sequence for DXImx48e (NM_138605.1,1831-1849).
gcacctgaatagggtaata

SEQ ID NO: 751955 - DNA, 19 bp, Mus musculus
  siRNA target sequence for DXImx48e (NM_138605.1,1924-1942).
cagctgggtacctagttct

SEQ ID NO: 751956 - DNA, 19 bp, Mus musculus
  siRNA target sequence for DXImx48e (NM_138605.1,1930-1948).
ggtacctagttctgagaaa

SEQ ID NO: 751957 - DNA, 19 bp, Mus musculus
  siRNA target sequence for D0HXS9928E (NM_138607.1,218-236).
gacgcgccatgcacctaat

SEQ ID NO: 751958 - DNA, 19 bp, Mus musculus
  siRNA target sequence for D0HXS9928E (NM_138607.1,220-238).
cgcgccatgcacctaatga

SEQ ID NO: 751959 - DNA, 19 bp, Mus musculus
  siRNA target sequence for D0HXS9928E (NM_138607.1,221-239).
gcgccatgcacctaatgaa

SEQ ID NO: 751960 - DNA, 19 bp, Mus musculus
  siRNA target sequence for D0HXS9928E (NM_138607.1,468-486).
ggagctacagctgaaacta

SEQ ID NO: 751961 - DNA, 19 bp, Mus musculus
  siRNA target sequence for D0HXS9928E (NM_138607.1,933-951).
gtacatcaaggaggattta

SEQ ID NO: 751962 - DNA, 19 bp, Mus musculus
  siRNA target sequence for D0HXS9928E (NM_138607.1,960-978).
ccatcatcacagcttctat

SEQ ID NO: 751963 - DNA, 19 bp, Mus musculus
  siRNA target sequence for D0HXS9928E (NM_138607.1,964-982).
catcacagcttctatgact

SEQ ID NO: 751964 - DNA, 19 bp, Mus musculus
  siRNA target sequence for D0HXS9928E (NM_138607.1,1010-1028).
gtgggccactcttcaactt

SEQ ID NO: 751965 - DNA, 19 bp, Mus musculus
  siRNA target sequence for D0HXS9928E (NM_138607.1,1029-1047).
cgacgttcatgatgatgta

SEQ ID NO: 751966 - DNA, 19 bp, Mus musculus
  siRNA target sequence for D0HXS9928E (NM_138607.1,1083-1101).
gtcacatgcaggcaaagta

SEQ ID NO: 751967 - DNA, 19 bp, Mus musculus
  siRNA target sequence for 2310001N14Rik (NM_138628.1,435-453).
cacagaggcaccagacaat

SEQ ID NO: 751968 - DNA, 19 bp, Mus musculus
  siRNA target sequence for 2310001N14Rik (NM_138628.1,450-468).
caatgaggatgttgactat

SEQ ID NO: 751969 - DNA, 19 bp, Mus musculus
  siRNA target sequence for 2310001N14Rik (NM_138628.1,542-560).
gcaataaagagcaaaagct

SEQ ID NO: 751970 - DNA, 19 bp, Mus musculus
  siRNA target sequence for 2310001N14Rik (NM_138628.1,581-599).
gattaggtaaagaagctaa

SEQ ID NO: 751971 - DNA, 19 bp, Mus musculus
  siRNA target sequence for 2310001N14Rik (NM_138628.1,688-706).
catcgcaccgagcaaaaga

SEQ ID NO: 751972 - DNA, 19 bp, Mus musculus
  siRNA target sequence for 2310001N14Rik (NM_138628.1,692-710).
gcaccgagcaaaagaaact

SEQ ID NO: 751973 - DNA, 19 bp, Mus musculus
  siRNA target sequence for 2310001N14Rik (NM_138628.1,783-801).
cgtccttgctcgaagcaaa

SEQ ID NO: 751974 - DNA, 19 bp, Mus musculus
  siRNA target sequence for 2310001N14Rik (NM_138628.1,823-841).
ctacagaggcacaacaaga

SEQ ID NO: 751975 - DNA, 19 bp, Mus musculus
  siRNA target sequence for 2310001N14Rik (NM_138628.1,897-915).
gatcacaagtcactttcaa

SEQ ID NO: 751976 - DNA, 19 bp, Mus musculus
  siRNA target sequence for 2310001N14Rik (NM_138628.1,900-918).
cacaagtcactttcaaact

SEQ ID NO: 751977 - DNA, 19 bp, Mus musculus
  siRNA target sequence for 2310001N14Rik (NM_138628.1,913-931).
caaactaccctgacagata

SEQ ID NO: 751978 - DNA, 19 bp, Mus musculus
  siRNA target sequence for 2310001N14Rik (NM_138628.1,917-935).
ctaccctgacagatatcca

SEQ ID NO: 751979 - DNA, 19 bp, Mus musculus
  siRNA target sequence for 2310001N14Rik (NM_138628.1,952-970).
cagagtgagcgcaatatga

SEQ ID NO: 751980 - DNA, 19 bp, Mus musculus
  siRNA target sequence for 2310001N14Rik (NM_138628.1,1146-1164).
cagacgggagaaggaatat

SEQ ID NO: 751981 - DNA, 19 bp, Mus musculus
  siRNA target sequence for 2310001N14Rik (NM_138628.1,1176-1194).
ggcggcagagtggaaactt

SEQ ID NO: 751982 - DNA, 19 bp, Mus musculus
  siRNA target sequence for 2310001N14Rik (NM_138628.1,1272-1290).
ccagagtacactgacaaaa

SEQ ID NO: 751983 - DNA, 19 bp, Mus musculus
  siRNA target sequence for 2310001N14Rik (NM_138628.1,1273-1291).
cagagtacactgacaaaaa

SEQ ID NO: 751984 - DNA, 19 bp, Mus musculus
  siRNA target sequence for 2310001N14Rik (NM_138628.1,1277-1295).
gtacactgacaaaaagcaa

SEQ ID NO: 751985 - DNA, 19 bp, Mus musculus
  siRNA target sequence for 2310001N14Rik (NM_138628.1,1373-1391).
cgtggaaagcccgatttga

SEQ ID NO: 751986 - DNA, 19 bp, Mus musculus
  siRNA target sequence for 2310001N14Rik (NM_138628.1,1376-1394).
ggaaagcccgatttgagaa

SEQ ID NO: 751987 - DNA, 19 bp, Mus musculus
  siRNA target sequence for 2310001N14Rik (NM_138628.1,1377-1395).
gaaagcccgatttgagaat

SEQ ID NO: 751988 - DNA, 19 bp, Mus musculus
  siRNA target sequence for 2310001N14Rik (NM_138628.1,1381-1399).
gcccgatttgagaattgta

SEQ ID NO: 751989 - DNA, 19 bp, Mus musculus
  siRNA target sequence for 2310001N14Rik (NM_138628.1,1382-1400).
cccgatttgagaattgtaa

SEQ ID NO: 751990 - DNA, 19 bp, Mus musculus
  siRNA target sequence for 2310001N14Rik (NM_138628.1,1384-1402).
cgatttgagaattgtaaca

SEQ ID NO: 751991 - DNA, 19 bp, Mus musculus
  siRNA target sequence for 2310001N14Rik (NM_138628.1,1413-1431).
ggacatgatcgaagagaaa

SEQ ID NO: 751992 - DNA, 19 bp, Mus musculus
  siRNA target sequence for 2310001N14Rik (NM_138628.1,1428-1446).
gaaagccctgcgagctaaa

SEQ ID NO: 751993 - DNA, 19 bp, Mus musculus
  siRNA target sequence for 2310001N14Rik (NM_138628.1,1432-1450).
gccctgcgagctaaagaat

SEQ ID NO: 751994 - DNA, 19 bp, Mus musculus
  siRNA target sequence for 2310001N14Rik (NM_138628.1,1433-1451).
ccctgcgagctaaagaata

SEQ ID NO: 751995 - DNA, 19 bp, Mus musculus
  siRNA target sequence for 2310001N14Rik (NM_138628.1,1442-1460).
ctaaagaatacgagtgttt

SEQ ID NO: 751996 - DNA, 19 bp, Mus musculus
  siRNA target sequence for 2310001N14Rik (NM_138628.1,1452-1470).
cgagtgtttcgtgatgaaa

SEQ ID NO: 751997 - DNA, 19 bp, Mus musculus
  siRNA target sequence for 2310001N14Rik (NM_138628.1,1453-1471).
gagtgtttcgtgatgaaaa

SEQ ID NO: 751998 - DNA, 19 bp, Mus musculus
  siRNA target sequence for 2310001N14Rik (NM_138628.1,1457-1475).
gtttcgtgatgaaaatcca

SEQ ID NO: 751999 - DNA, 19 bp, Mus musculus
  siRNA target sequence for 2310001N14Rik (NM_138628.1,1544-1562).
caaaaatgtccgaaaagga

SEQ ID NO: 752000 - DNA, 19 bp, Mus musculus
  siRNA target sequence for 2310001N14Rik (NM_138628.1,1599-1617).
gccaagcgtctctgaaaat

SEQ ID NO: 752001 - DNA, 19 bp, Mus musculus
  siRNA target sequence for 2310001N14Rik (NM_138628.1,1635-1653).
ggaagccaacagttttcaa

SEQ ID NO: 752002 - DNA, 19 bp, Mus musculus
  siRNA target sequence for 2310001N14Rik (NM_138628.1,1962-1980).
gggtccgaagccccataaa

SEQ ID NO: 752003 - DNA, 19 bp, Mus musculus
  siRNA target sequence for 2310001N14Rik (NM_138628.1,2022-2040).
ccagggctccctatctgta

SEQ ID NO: 752004 - DNA, 19 bp, Mus musculus
  siRNA target sequence for 2310001N14Rik (NM_138628.1,2025-2043).
gggctccctatctgtagta

SEQ ID NO: 752005 - DNA, 19 bp, Mus musculus
  siRNA target sequence for 2310001N14Rik (NM_138628.1,2027-2045).
gctccctatctgtagtaga

SEQ ID NO: 752006 - DNA, 19 bp, Mus musculus
  siRNA target sequence for 2310001N14Rik (NM_138628.1,2041-2059).
gtagaggcaaaatatgata

SEQ ID NO: 752007 - DNA, 19 bp, Mus musculus
  siRNA target sequence for 2310001N14Rik (NM_138628.1,2046-2064).
ggcaaaatatgatatttca

SEQ ID NO: 752008 - DNA, 19 bp, Mus musculus
  siRNA target sequence for Lass1 (NM_138647.1,123-141).
cgagttatgcgcagatgtt

SEQ ID NO: 752009 - DNA, 19 bp, Mus musculus
  siRNA target sequence for Lass1 (NM_138647.1,715-733).
gcagctggagttcacaaaa

SEQ ID NO: 752010 - DNA, 19 bp, Mus musculus
  siRNA target sequence for Lass1 (NM_138647.1,899-917).
cctgacattccgtactact

SEQ ID NO: 752011 - DNA, 19 bp, Mus musculus
  siRNA target sequence for Lass1 (NM_138647.1,900-918).
ctgacattccgtactactt

SEQ ID NO: 752012 - DNA, 19 bp, Mus musculus
  siRNA target sequence for Lass1 (NM_138647.1,902-920).
gacattccgtactacttct

SEQ ID NO: 752013 - DNA, 19 bp, Mus musculus
  siRNA target sequence for Lass1 (NM_138647.1,908-926).
ccgtactacttcttcttca

SEQ ID NO: 752014 - DNA, 19 bp, Mus musculus
  siRNA target sequence for Lass1 (NM_138647.1,909-927).
cgtactacttcttcttcaa

SEQ ID NO: 752015 - DNA, 19 bp, Mus musculus
  siRNA target sequence for Sang (NM_138658.1,479-497).
gtgctgattctcagaaact

SEQ ID NO: 752016 - DNA, 19 bp, Mus musculus
  siRNA target sequence for Sang (NM_138658.1,481-499).
gctgattctcagaaactca

SEQ ID NO: 752017 - DNA, 19 bp, Mus musculus
  siRNA target sequence for Sang (NM_138658.1,492-510).
gaaactcatcccgaatgaa

SEQ ID NO: 752018 - DNA, 19 bp, Mus musculus
  siRNA target sequence for Sang (NM_138658.1,498-516).
catcccgaatgaagtactt

SEQ ID NO: 752019 - DNA, 19 bp, Mus musculus
  siRNA target sequence for Sang (NM_138658.1,579-597).
gagcgaactctggaaagta

SEQ ID NO: 752020 - DNA, 19 bp, Mus musculus
  siRNA target sequence for Sang (NM_138658.1,581-599).
gcgaactctggaaagtagt

SEQ ID NO: 752021 - DNA, 19 bp, Mus musculus
  siRNA target sequence for Sang (NM_138658.1,590-608).
ggaaagtagtcctcaatct

SEQ ID NO: 752022 - DNA, 19 bp, Mus musculus
  siRNA target sequence for Sang (NM_138658.1,591-609).
gaaagtagtcctcaatctt

SEQ ID NO: 752023 - DNA, 19 bp, Mus musculus
  siRNA target sequence for Sang (NM_138658.1,616-634).
gccagcgaggactttctca

SEQ ID NO: 752024 - DNA, 19 bp, Mus musculus
  siRNA target sequence for Sang (NM_138658.1,753-771).
cccgaatgaccatgttgta

SEQ ID NO: 752025 - DNA, 19 bp, Mus musculus
  siRNA target sequence for Sang (NM_138658.1,1073-1091).
gccttggcatgctcataga

SEQ ID NO: 752026 - DNA, 19 bp, Mus musculus
  siRNA target sequence for Sang (NM_138658.1,1074-1092).
ccttggcatgctcatagaa

SEQ ID NO: 752027 - DNA, 19 bp, Mus musculus
  siRNA target sequence for Sang (NM_138658.1,1222-1240).
ggcctccttcaggttgttt

SEQ ID NO: 752028 - DNA, 19 bp, Mus musculus
  siRNA target sequence for Sang (NM_138658.1,1223-1241).
gcctccttcaggttgtttt

SEQ ID NO: 752029 - DNA, 19 bp, Mus musculus
  siRNA target sequence for Prpf8 (NM_138659.1,99-117).
ccgctgccggattatatgt

SEQ ID NO: 752030 - DNA, 19 bp, Mus musculus
  siRNA target sequence for Prpf8 (NM_138659.1,101-119).
gctgccggattatatgtca

SEQ ID NO: 752031 - DNA, 19 bp, Mus musculus
  siRNA target sequence for Prpf8 (NM_138659.1,161-179).
gcaggccaagcgatatgca

SEQ ID NO: 752032 - DNA, 19 bp, Mus musculus
  siRNA target sequence for Prpf8 (NM_138659.1,278-296).
gaagttccgtcatgacaaa

SEQ ID NO: 752033 - DNA, 19 bp, Mus musculus
  siRNA target sequence for Prpf8 (NM_138659.1,288-306).
catgacaaaagggtctatt

SEQ ID NO: 752034 - DNA, 19 bp, Mus musculus
  siRNA target sequence for Prpf8 (NM_138659.1,485-503).
gatcatgatgcgtagagaa

SEQ ID NO: 752035 - DNA, 19 bp, Mus musculus
  siRNA target sequence for Prpf8 (NM_138659.1,488-506).
catgatgcgtagagaaaaa

SEQ ID NO: 752036 - DNA, 19 bp, Mus musculus
  siRNA target sequence for Prpf8 (NM_138659.1,491-509).
gatgcgtagagaaaaaaga

SEQ ID NO: 752037 - DNA, 19 bp, Mus musculus
  siRNA target sequence for Prpf8 (NM_138659.1,533-551).
gcgtttcccccctttcgat

SEQ ID NO: 752038 - DNA, 19 bp, Mus musculus
  siRNA target sequence for Prpf8 (NM_138659.1,570-588).
gattatgccgacaacatct

SEQ ID NO: 752039 - DNA, 19 bp, Mus musculus
  siRNA target sequence for Prpf8 (NM_138659.1,578-596).
cgacaacatcttagatgtt

SEQ ID NO: 752040 - DNA, 19 bp, Mus musculus
  siRNA target sequence for Prpf8 (NM_138659.1,684-702).
gacagtaggaagtacgtta

SEQ ID NO: 752041 - DNA, 19 bp, Mus musculus
  siRNA target sequence for Prpf8 (NM_138659.1,686-704).
cagtaggaagtacgttaat

SEQ ID NO: 752042 - DNA, 19 bp, Mus musculus
  siRNA target sequence for Prpf8 (NM_138659.1,717-735).
caacgctggcagttcacat

SEQ ID NO: 752043 - DNA, 19 bp, Mus musculus
  siRNA target sequence for Prpf8 (NM_138659.1,795-813).
gacaactacttctatctct

SEQ ID NO: 752044 - DNA, 19 bp, Mus musculus
  siRNA target sequence for Prpf8 (NM_138659.1,835-853).
cctctaaggcactcaacat

SEQ ID NO: 752045 - DNA, 19 bp, Mus musculus
  siRNA target sequence for Prpf8 (NM_138659.1,885-903).
cttgttcgagacatcaact

SEQ ID NO: 752046 - DNA, 19 bp, Mus musculus
  siRNA target sequence for Prpf8 (NM_138659.1,912-930).
gaagactggaatgaattta

SEQ ID NO: 752047 - DNA, 19 bp, Mus musculus
  siRNA target sequence for Prpf8 (NM_138659.1,917-935).
ctggaatgaatttaacgat

SEQ ID NO: 752048 - DNA, 19 bp, Mus musculus
  siRNA target sequence for Prpf8 (NM_138659.1,919-937).
ggaatgaatttaacgatat

SEQ ID NO: 752049 - DNA, 19 bp, Mus musculus
  siRNA target sequence for Prpf8 (NM_138659.1,950-968).
catccgtcagcctattcgt

SEQ ID NO: 752050 - DNA, 19 bp, Mus musculus
  siRNA target sequence for Prpf8 (NM_138659.1,961-979).
ctattcgtactgagtacaa

SEQ ID NO: 752051 - DNA, 19 bp, Mus musculus
  siRNA target sequence for Prpf8 (NM_138659.1,974-992).
gtacaagattgcttttcct

SEQ ID NO: 752052 - DNA, 19 bp, Mus musculus
  siRNA target sequence for Prpf8 (NM_138659.1,1044-1062).
cccaacgttgtgttcatca

SEQ ID NO: 752053 - DNA, 19 bp, Mus musculus
  siRNA target sequence for Prpf8 (NM_138659.1,1045-1063).
ccaacgttgtgttcatcaa

SEQ ID NO: 752054 - DNA, 19 bp, Mus musculus
  siRNA target sequence for Prpf8 (NM_138659.1,1077-1095).
gatctgccagctttctact

SEQ ID NO: 752055 - DNA, 19 bp, Mus musculus
  siRNA target sequence for Prpf8 (NM_138659.1,1368-1386).
gttcgagtctcttatcaga

SEQ ID NO: 752056 - DNA, 19 bp, Mus musculus
  siRNA target sequence for Prpf8 (NM_138659.1,1378-1396).
cttatcagaagctgcttaa

SEQ ID NO: 752057 - DNA, 19 bp, Mus musculus
  siRNA target sequence for Prpf8 (NM_138659.1,1450-1468).
ggtatctgttccgttcttt

SEQ ID NO: 752058 - DNA, 19 bp, Mus musculus
  siRNA target sequence for Prpf8 (NM_138659.1,1465-1483).
ctttcaaagctaccaaatt

SEQ ID NO: 752059 - DNA, 19 bp, Mus musculus
  siRNA target sequence for Prpf8 (NM_138659.1,1531-1549).
gccgccagggctacaacat

SEQ ID NO: 752060 - DNA, 19 bp, Mus musculus
  siRNA target sequence for Prpf8 (NM_138659.1,1590-1608).
cacttggactacaacttca

SEQ ID NO: 752061 - DNA, 19 bp, Mus musculus
  siRNA target sequence for Prpf8 (NM_138659.1,1654-1672).
cccgttttgggaatgcttt

SEQ ID NO: 752062 - DNA, 19 bp, Mus musculus
  siRNA target sequence for Prpf8 (NM_138659.1,1683-1701).
cgggaagtactgcgtttaa

SEQ ID NO: 752063 - DNA, 19 bp, Mus musculus
  siRNA target sequence for Prpf8 (NM_138659.1,1730-1748).
gtatcgcttgggcaatgta

SEQ ID NO: 752064 - DNA, 19 bp, Mus musculus
  siRNA target sequence for Prpf8 (NM_138659.1,1764-1782).
gcagatggtttgcagtata

SEQ ID NO: 752065 - DNA, 19 bp, Mus musculus
  siRNA target sequence for Prpf8 (NM_138659.1,1767-1785).
gatggtttgcagtatatat

SEQ ID NO: 752066 - DNA, 19 bp, Mus musculus
  siRNA target sequence for Prpf8 (NM_138659.1,1807-1825).
caggcatgtatcgatacaa

SEQ ID NO: 752067 - DNA, 19 bp, Mus musculus
  siRNA target sequence for Prpf8 (NM_138659.1,1810-1828).
gcatgtatcgatacaaata

SEQ ID NO: 752068 - DNA, 19 bp, Mus musculus
  siRNA target sequence for Prpf8 (NM_138659.1,1811-1829).
catgtatcgatacaaatat

SEQ ID NO: 752069 - DNA, 19 bp, Mus musculus
  siRNA target sequence for Prpf8 (NM_138659.1,1853-1871).
gtgcaaggacttgaaacat

SEQ ID NO: 752070 - DNA, 19 bp, Mus musculus
  siRNA target sequence for Prpf8 (NM_138659.1,1943-1961).
gcgggtctggctgttcttt

SEQ ID NO: 752071 - DNA, 19 bp, Mus musculus
  siRNA target sequence for Prpf8 (NM_138659.1,1955-1973).
gttctttatgcgtggaatt

SEQ ID NO: 752072 - DNA, 19 bp, Mus musculus
  siRNA target sequence for Prpf8 (NM_138659.1,2068-2086).
gggtggagtcgcactttga

SEQ ID NO: 752073 - DNA, 19 bp, Mus musculus
  siRNA target sequence for Prpf8 (NM_138659.1,2104-2122).
ctgtgatgcacgacattct

SEQ ID NO: 752074 - DNA, 19 bp, Mus musculus
  siRNA target sequence for Prpf8 (NM_138659.1,2230-2248).
gactgccaacacctataga

SEQ ID NO: 752075 - DNA, 19 bp, Mus musculus
  siRNA target sequence for Prpf8 (NM_138659.1,2232-2250).
ctgccaacacctatagaga

SEQ ID NO: 752076 - DNA, 19 bp, Mus musculus
  siRNA target sequence for Prpf8 (NM_138659.1,2234-2252).
gccaacacctatagagaat

SEQ ID NO: 752077 - DNA, 19 bp, Mus musculus
  siRNA target sequence for Prpf8 (NM_138659.1,2235-2253).
ccaacacctatagagaata

SEQ ID NO: 752078 - DNA, 19 bp, Mus musculus
  siRNA target sequence for Prpf8 (NM_138659.1,2236-2254).
caacacctatagagaatat

SEQ ID NO: 752079 - DNA, 19 bp, Mus musculus
  siRNA target sequence for Prpf8 (NM_138659.1,2242-2260).
ctatagagaatatgattct

SEQ ID NO: 752080 - DNA, 19 bp, Mus musculus
  siRNA target sequence for Prpf8 (NM_138659.1,2280-2298).
gctgattggtggaccaata

SEQ ID NO: 752081 - DNA, 19 bp, Mus musculus
  siRNA target sequence for Prpf8 (NM_138659.1,2293-2311).
ccaatactgcccactacaa

SEQ ID NO: 752082 - DNA, 19 bp, Mus musculus
  siRNA target sequence for Prpf8 (NM_138659.1,2374-2392).
gcctcactcgcctgtatct

SEQ ID NO: 752083 - DNA, 19 bp, Mus musculus
  siRNA target sequence for Prpf8 (NM_138659.1,2403-2421).
caggagcggcagcacaatt

SEQ ID NO: 752084 - DNA, 19 bp, Mus musculus
  siRNA target sequence for Prpf8 (NM_138659.1,2490-2508).
ctggagagccggagattct

SEQ ID NO: 752085 - DNA, 19 bp, Mus musculus
  siRNA target sequence for Prpf8 (NM_138659.1,2529-2547).
ctctcctacaagcatgata

SEQ ID NO: 752086 - DNA, 19 bp, Mus musculus
  siRNA target sequence for Prpf8 (NM_138659.1,2573-2591).
gcgtctcaaggaagcttat

SEQ ID NO: 752087 - DNA, 19 bp, Mus musculus
  siRNA target sequence for Prpf8 (NM_138659.1,2574-2592).
cgtctcaaggaagcttata

SEQ ID NO: 752088 - DNA, 19 bp, Mus musculus
  siRNA target sequence for Prpf8 (NM_138659.1,2586-2604).
gcttatagtgtgaagtcta

SEQ ID NO: 752089 - DNA, 19 bp, Mus musculus
  siRNA target sequence for Prpf8 (NM_138659.1,2593-2611).
gtgtgaagtctaggttaaa

SEQ ID NO: 752090 - DNA, 19 bp, Mus musculus
  siRNA target sequence for Prpf8 (NM_138659.1,2701-2719).
cacagagagcctttaagga

SEQ ID NO: 752091 - DNA, 19 bp, Mus musculus
  siRNA target sequence for Prpf8 (NM_138659.1,2819-2837).
gtggtatgaagcagataaa

SEQ ID NO: 752092 - DNA, 19 bp, Mus musculus
  siRNA target sequence for Prpf8 (NM_138659.1,2830-2848).
cagataaacgccgtctttt

SEQ ID NO: 752093 - DNA, 19 bp, Mus musculus
  siRNA target sequence for Prpf8 (NM_138659.1,2881-2899).
cacctccactgcttgttta

SEQ ID NO: 752094 - DNA, 19 bp, Mus musculus
  siRNA target sequence for Prpf8 (NM_138659.1,2886-2904).
ccactgcttgtttacaagt

SEQ ID NO: 752095 - DNA, 19 bp, Mus musculus
  siRNA target sequence for Prpf8 (NM_138659.1,2903-2921).
gtggtgtcaaggcattaat

SEQ ID NO: 752096 - DNA, 19 bp, Mus musculus
  siRNA target sequence for Prpf8 (NM_138659.1,2905-2923).
ggtgtcaaggcattaataa

SEQ ID NO: 752097 - DNA, 19 bp, Mus musculus
  siRNA target sequence for Prpf8 (NM_138659.1,2908-2926).
gtcaaggcattaataacct

SEQ ID NO: 752098 - DNA, 19 bp, Mus musculus
  siRNA target sequence for Prpf8 (NM_138659.1,2970-2988).
ctggagtctcggtttgaga

SEQ ID NO: 752099 - DNA, 19 bp, Mus musculus
  siRNA target sequence for Prpf8 (NM_138659.1,2977-2995).
ctcggtttgagaagatgta

SEQ ID NO: 752100 - DNA, 19 bp, Mus musculus
  siRNA target sequence for Prpf8 (NM_138659.1,3023-3041).
caggctgctgcgactcatt

SEQ ID NO: 752101 - DNA, 19 bp, Mus musculus
  siRNA target sequence for Prpf8 (NM_138659.1,3038-3056).
cattgtggaccacaacata

SEQ ID NO: 752102 - DNA, 19 bp, Mus musculus
  siRNA target sequence for Prpf8 (NM_138659.1,3073-3091).
ccaagaacaacgtagtcat

SEQ ID NO: 752103 - DNA, 19 bp, Mus musculus
  siRNA target sequence for Prpf8 (NM_138659.1,3080-3098).
caacgtagtcatcaactat

SEQ ID NO: 752104 - DNA, 19 bp, Mus musculus
  siRNA target sequence for Prpf8 (NM_138659.1,3102-3120).
gacatgaaccatacaaact

SEQ ID NO: 752105 - DNA, 19 bp, Mus musculus
  siRNA target sequence for Prpf8 (NM_138659.1,3146-3164).
gtttgcctcattcattgta

SEQ ID NO: 752106 - DNA, 19 bp, Mus musculus
  siRNA target sequence for Prpf8 (NM_138659.1,3151-3169).
cctcattcattgtacagta

SEQ ID NO: 752107 - DNA, 19 bp, Mus musculus
  siRNA target sequence for Prpf8 (NM_138659.1,3154-3172).
cattcattgtacagtacta

SEQ ID NO: 752108 - DNA, 19 bp, Mus musculus
  siRNA target sequence for Prpf8 (NM_138659.1,3234-3252).
cctcagatgccaaatgact

SEQ ID NO: 752109 - DNA, 19 bp, Mus musculus
  siRNA target sequence for Prpf8 (NM_138659.1,3291-3309).
ccaatccgactcttctgta

SEQ ID NO: 752110 - DNA, 19 bp, Mus musculus
  siRNA target sequence for Prpf8 (NM_138659.1,3314-3332).
cattgatcgcatccatatt

SEQ ID NO: 752111 - DNA, 19 bp, Mus musculus
  siRNA target sequence for Prpf8 (NM_138659.1,3321-3339).
cgcatccatattttcttca

SEQ ID NO: 752112 - DNA, 19 bp, Mus musculus
  siRNA target sequence for Prpf8 (NM_138659.1,3454-3472).
cccgaatgcggctcatgaa

SEQ ID NO: 752113 - DNA, 19 bp, Mus musculus
  siRNA target sequence for Prpf8 (NM_138659.1,3496-3514).
cagtgttctgggacatcaa

SEQ ID NO: 752114 - DNA, 19 bp, Mus musculus
  siRNA target sequence for Prpf8 (NM_138659.1,3543-3561).
gtacagtgggagaatagct

SEQ ID NO: 752115 - DNA, 19 bp, Mus musculus
  siRNA target sequence for Prpf8 (NM_138659.1,3568-3586).
ctgtgtacagtaaagacaa

SEQ ID NO: 752116 - DNA, 19 bp, Mus musculus
  siRNA target sequence for Prpf8 (NM_138659.1,3638-3656).
gtgccgtaccagctatgaa

SEQ ID NO: 752117 - DNA, 19 bp, Mus musculus
  siRNA target sequence for Prpf8 (NM_138659.1,3640-3658).
gccgtaccagctatgaaga

SEQ ID NO: 752118 - DNA, 19 bp, Mus musculus
  siRNA target sequence for Prpf8 (NM_138659.1,3748-3766).
caatgcaacgcttccataa

SEQ ID NO: 752119 - DNA, 19 bp, Mus musculus
  siRNA target sequence for Prpf8 (NM_138659.1,3768-3786).
cgtgtgcggcagattctga

SEQ ID NO: 752120 - DNA, 19 bp, Mus musculus
  siRNA target sequence for Prpf8 (NM_138659.1,3769-3787).
gtgtgcggcagattctgat

SEQ ID NO: 752121 - DNA, 19 bp, Mus musculus
  siRNA target sequence for Prpf8 (NM_138659.1,3806-3824).
gttcaccaagattgtgaat

SEQ ID NO: 752122 - DNA, 19 bp, Mus musculus
  siRNA target sequence for Prpf8 (NM_138659.1,3842-3860).
catcggccttatgacatat

SEQ ID NO: 752123 - DNA, 19 bp, Mus musculus
  siRNA target sequence for Prpf8 (NM_138659.1,3845-3863).
cggccttatgacatatttt

SEQ ID NO: 752124 - DNA, 19 bp, Mus musculus
  siRNA target sequence for Prpf8 (NM_138659.1,3864-3882).
cgagaggctgtggtgaata

SEQ ID NO: 752125 - DNA, 19 bp, Mus musculus
  siRNA target sequence for Prpf8 (NM_138659.1,3931-3949).
cacgtatcaagattggatt

SEQ ID NO: 752126 - DNA, 19 bp, Mus musculus
  siRNA target sequence for Prpf8 (NM_138659.1,3968-3986).
ccggttcccgcctgttgta

SEQ ID NO: 752127 - DNA, 19 bp, Mus musculus
  siRNA target sequence for Prpf8 (NM_138659.1,3969-3987).
cggttcccgcctgttgtat

SEQ ID NO: 752128 - DNA, 19 bp, Mus musculus
  siRNA target sequence for Prpf8 (NM_138659.1,3970-3988).
ggttcccgcctgttgtatt

SEQ ID NO: 752129 - DNA, 19 bp, Mus musculus
  siRNA target sequence for Prpf8 (NM_138659.1,4139-4157).
caacttgtaccgctacata

SEQ ID NO: 752130 - DNA, 19 bp, Mus musculus
  siRNA target sequence for Prpf8 (NM_138659.1,4165-4183).
gggagagcgagttcattga

SEQ ID NO: 752131 - DNA, 19 bp, Mus musculus
  siRNA target sequence for Prpf8 (NM_138659.1,4217-4235).
gagacaagaggctattgct

SEQ ID NO: 752132 - DNA, 19 bp, Mus musculus
  siRNA target sequence for Prpf8 (NM_138659.1,4236-4254).
cagaacagacgcttgactt

SEQ ID NO: 752133 - DNA, 19 bp, Mus musculus
  siRNA target sequence for Prpf8 (NM_138659.1,4238-4256).
gaacagacgcttgacttta

SEQ ID NO: 752134 - DNA, 19 bp, Mus musculus
  siRNA target sequence for Prpf8 (NM_138659.1,4241-4259).
cagacgcttgactttagaa

SEQ ID NO: 752135 - DNA, 19 bp, Mus musculus
  siRNA target sequence for Prpf8 (NM_138659.1,4243-4261).
gacgcttgactttagaaga

SEQ ID NO: 752136 - DNA, 19 bp, Mus musculus
  siRNA target sequence for Prpf8 (NM_138659.1,4245-4263).
cgcttgactttagaagatt

SEQ ID NO: 752137 - DNA, 19 bp, Mus musculus
  siRNA target sequence for Prpf8 (NM_138659.1,4246-4264).
gcttgactttagaagattt

SEQ ID NO: 752138 - DNA, 19 bp, Mus musculus
  siRNA target sequence for Prpf8 (NM_138659.1,4602-4620).
gctcagcgatcaggattaa

SEQ ID NO: 752139 - DNA, 19 bp, Mus musculus
  siRNA target sequence for Prpf8 (NM_138659.1,4603-4621).
ctcagcgatcaggattaaa

SEQ ID NO: 752140 - DNA, 19 bp, Mus musculus
  siRNA target sequence for Prpf8 (NM_138659.1,4884-4902).
catccccgaaagtcctata

SEQ ID NO: 752141 - DNA, 19 bp, Mus musculus
  siRNA target sequence for Prpf8 (NM_138659.1,4887-4905).
ccccgaaagtcctataaga

SEQ ID NO: 752142 - DNA, 19 bp, Mus musculus
  siRNA target sequence for Prpf8 (NM_138659.1,4888-4906).
cccgaaagtcctataagat

SEQ ID NO: 752143 - DNA, 19 bp, Mus musculus
  siRNA target sequence for Prpf8 (NM_138659.1,4910-4928).
ctcttcctgtgcggatata

SEQ ID NO: 752144 - DNA, 19 bp, Mus musculus
  siRNA target sequence for Prpf8 (NM_138659.1,4912-4930).
cttcctgtgcggatatact

SEQ ID NO: 752145 - DNA, 19 bp, Mus musculus
  siRNA target sequence for Prpf8 (NM_138659.1,4918-4936).
gtgcggatatactactctt

SEQ ID NO: 752146 - DNA, 19 bp, Mus musculus
  siRNA target sequence for Prpf8 (NM_138659.1,4929-4947).
ctactctttgcctcctata

SEQ ID NO: 752147 - DNA, 19 bp, Mus musculus
  siRNA target sequence for Prpf8 (NM_138659.1,5013-5031).
cagaagtattggattgaca

SEQ ID NO: 752148 - DNA, 19 bp, Mus musculus
  siRNA target sequence for Prpf8 (NM_138659.1,5040-5058).
cgctggggagactatgatt

SEQ ID NO: 752149 - DNA, 19 bp, Mus musculus
  siRNA target sequence for Prpf8 (NM_138659.1,5049-5067).
gactatgattcccatgata

SEQ ID NO: 752150 - DNA, 19 bp, Mus musculus
  siRNA target sequence for Prpf8 (NM_138659.1,5104-5122).
ccacagacaacatgagtat

SEQ ID NO: 752151 - DNA, 19 bp, Mus musculus
  siRNA target sequence for Prpf8 (NM_138659.1,5107-5125).
cagacaacatgagtatcta

SEQ ID NO: 752152 - DNA, 19 bp, Mus musculus
  siRNA target sequence for Prpf8 (NM_138659.1,5172-5190).
ctacacagtgcctatggaa

SEQ ID NO: 752153 - DNA, 19 bp, Mus musculus
  siRNA target sequence for Prpf8 (NM_138659.1,5203-5221).
gcagcaagcctctcataca

SEQ ID NO: 752154 - DNA, 19 bp, Mus musculus
  siRNA target sequence for Prpf8 (NM_138659.1,5246-5264).
ggcaaaccctgcgttgtat

SEQ ID NO: 752155 - DNA, 19 bp, Mus musculus
  siRNA target sequence for Prpf8 (NM_138659.1,5252-5270).
ccctgcgttgtatgtgtta

SEQ ID NO: 752156 - DNA, 19 bp, Mus musculus
  siRNA target sequence for Prpf8 (NM_138659.1,5274-5292).
gaacggatacgcaaaggat

SEQ ID NO: 752157 - DNA, 19 bp, Mus musculus
  siRNA target sequence for Prpf8 (NM_138659.1,5278-5296).
ggatacgcaaaggattaca

SEQ ID NO: 752158 - DNA, 19 bp, Mus musculus
  siRNA target sequence for Prpf8 (NM_138659.1,5387-5405).
caccaatgtctatagagta

SEQ ID NO: 752159 - DNA, 19 bp, Mus musculus
  siRNA target sequence for Prpf8 (NM_138659.1,5424-5442).
gaggggaacttgacaacta

SEQ ID NO: 752160 - DNA, 19 bp, Mus musculus
  siRNA target sequence for Prpf8 (NM_138659.1,5426-5444).
ggggaacttgacaactaaa

SEQ ID NO: 752161 - DNA, 19 bp, Mus musculus
  siRNA target sequence for Prpf8 (NM_138659.1,5435-5453).
gacaactaaacccatcaat

SEQ ID NO: 752162 - DNA, 19 bp, Mus musculus
  siRNA target sequence for Prpf8 (NM_138659.1,5485-5503).
gacagctgttcctcaagat

SEQ ID NO: 752163 - DNA, 19 bp, Mus musculus
  siRNA target sequence for Prpf8 (NM_138659.1,5501-5519).
gataatccacacatctgta

SEQ ID NO: 752164 - DNA, 19 bp, Mus musculus
  siRNA target sequence for Prpf8 (NM_138659.1,5613-5631).
cctaaacagatcattgtca

SEQ ID NO: 752165 - DNA, 19 bp, Mus musculus
  siRNA target sequence for Prpf8 (NM_138659.1,5673-5691).
gatttccccaatattgtga

SEQ ID NO: 752166 - DNA, 19 bp, Mus musculus
  siRNA target sequence for Prpf8 (NM_138659.1,5786-5804).
ccttttcaacctctatgat

SEQ ID NO: 752167 - DNA, 19 bp, Mus musculus
  siRNA target sequence for Prpf8 (NM_138659.1,5802-5820).
gatgactggctcaagacta

SEQ ID NO: 752168 - DNA, 19 bp, Mus musculus
  siRNA target sequence for Prpf8 (NM_138659.1,5805-5823).
gactggctcaagactatct

SEQ ID NO: 752169 - DNA, 19 bp, Mus musculus
  siRNA target sequence for Prpf8 (NM_138659.1,5834-5852).
ggctttctcccgtctcatt

SEQ ID NO: 752170 - DNA, 19 bp, Mus musculus
  siRNA target sequence for Prpf8 (NM_138659.1,5840-5858).
ctcccgtctcattctgatt

SEQ ID NO: 752171 - DNA, 19 bp, Mus musculus
  siRNA target sequence for Prpf8 (NM_138659.1,5863-5881).
gggctttgcatgtgaacaa

SEQ ID NO: 752172 - DNA, 19 bp, Mus musculus
  siRNA target sequence for Prpf8 (NM_138659.1,5870-5888).
gcatgtgaacaatgataga

SEQ ID NO: 752173 - DNA, 19 bp, Mus musculus
  siRNA target sequence for Prpf8 (NM_138659.1,6005-6023).
ggctgactacggcaagaaa

SEQ ID NO: 752174 - DNA, 19 bp, Mus musculus
  siRNA target sequence for Prpf8 (NM_138659.1,6006-6024).
gctgactacggcaagaaaa

SEQ ID NO: 752175 - DNA, 19 bp, Mus musculus
  siRNA target sequence for Prpf8 (NM_138659.1,6007-6025).
ctgactacggcaagaaaaa

SEQ ID NO: 752176 - DNA, 19 bp, Mus musculus
  siRNA target sequence for Prpf8 (NM_138659.1,6009-6027).
gactacggcaagaaaaaca

SEQ ID NO: 752177 - DNA, 19 bp, Mus musculus
  siRNA target sequence for Prpf8 (NM_138659.1,6189-6207).
cacggtgacgagattatca

SEQ ID NO: 752178 - DNA, 19 bp, Mus musculus
  siRNA target sequence for Prpf8 (NM_138659.1,6192-6210).
ggtgacgagattatcactt

SEQ ID NO: 752179 - DNA, 19 bp, Mus musculus
  siRNA target sequence for Prpf8 (NM_138659.1,6195-6213).
gacgagattatcacttcaa

SEQ ID NO: 752180 - DNA, 19 bp, Mus musculus
  siRNA target sequence for Prpf8 (NM_138659.1,6236-6254).
gaccttctcatcaaagact

SEQ ID NO: 752181 - DNA, 19 bp, Mus musculus
  siRNA target sequence for Prpf8 (NM_138659.1,6291-6309).
catctgcggaccaatcata

SEQ ID NO: 752182 - DNA, 19 bp, Mus musculus
  siRNA target sequence for Prpf8 (NM_138659.1,6294-6312).
ctgcggaccaatcatattt

SEQ ID NO: 752183 - DNA, 19 bp, Mus musculus
  siRNA target sequence for Prpf8 (NM_138659.1,6296-6314).
gcggaccaatcatatttat

SEQ ID NO: 752184 - DNA, 19 bp, Mus musculus
  siRNA target sequence for Prpf8 (NM_138659.1,6299-6317).
gaccaatcatatttatgtt

SEQ ID NO: 752185 - DNA, 19 bp, Mus musculus
  siRNA target sequence for Prpf8 (NM_138659.1,6315-6333).
gtttcatctgatgacatta

SEQ ID NO: 752186 - DNA, 19 bp, Mus musculus
  siRNA target sequence for Prpf8 (NM_138659.1,6329-6347).
cattaaggagactggttat

SEQ ID NO: 752187 - DNA, 19 bp, Mus musculus
  siRNA target sequence for Prpf8 (NM_138659.1,6360-6378).
ccgaaaaacgtgcttaaga

SEQ ID NO: 752188 - DNA, 19 bp, Mus musculus
  siRNA target sequence for Prpf8 (NM_138659.1,6361-6379).
cgaaaaacgtgcttaagaa

SEQ ID NO: 752189 - DNA, 19 bp, Mus musculus
  siRNA target sequence for Prpf8 (NM_138659.1,6369-6387).
gtgcttaagaagttcatct

SEQ ID NO: 752190 - DNA, 19 bp, Mus musculus
  siRNA target sequence for Prpf8 (NM_138659.1,6380-6398).
gttcatctgcatatctgat

SEQ ID NO: 752191 - DNA, 19 bp, Mus musculus
  siRNA target sequence for Prpf8 (NM_138659.1,6430-6448).
gggtgagccctccagataa

SEQ ID NO: 752192 - DNA, 19 bp, Mus musculus
  siRNA target sequence for Prpf8 (NM_138659.1,6458-6476).
gaaggagatccgttgtatt

SEQ ID NO: 752193 - DNA, 19 bp, Mus musculus
  siRNA target sequence for Prpf8 (NM_138659.1,6462-6480).
gagatccgttgtattgtga

SEQ ID NO: 752194 - DNA, 19 bp, Mus musculus
  siRNA target sequence for Prpf8 (NM_138659.1,6576-6594).
cacactcagcccaatgaat

SEQ ID NO: 752195 - DNA, 19 bp, Mus musculus
  siRNA target sequence for Prpf8 (NM_138659.1,6660-6678).
gatggggagaagactatta

SEQ ID NO: 752196 - DNA, 19 bp, Mus musculus
  siRNA target sequence for Prpf8 (NM_138659.1,6663-6681).
ggggagaagactattatca

SEQ ID NO: 752197 - DNA, 19 bp, Mus musculus
  siRNA target sequence for Prpf8 (NM_138659.1,6874-6892).
cctggaactacaactttat

SEQ ID NO: 752198 - DNA, 19 bp, Mus musculus
  siRNA target sequence for Prpf8 (NM_138659.1,6900-6918).
cgacatgatcccaacatga

SEQ ID NO: 752199 - DNA, 19 bp, Mus musculus
  siRNA target sequence for Prpf8 (NM_138659.1,6936-6954).
gcaaaccccaaggaattct

SEQ ID NO: 752200 - DNA, 19 bp, Mus musculus
  siRNA target sequence for Prpf8 (NM_138659.1,6937-6955).
caaaccccaaggaattcta

SEQ ID NO: 752201 - DNA, 19 bp, Mus musculus
  siRNA target sequence for Mln51 (NM_138660.1,634-652).
gattcctctgcgaaagaaa

SEQ ID NO: 752202 - DNA, 19 bp, Mus musculus
  siRNA target sequence for Mln51 (NM_138660.1,660-678).
ggaaaagcctgagtctaaa

SEQ ID NO: 752203 - DNA, 19 bp, Mus musculus
  siRNA target sequence for Mln51 (NM_138660.1,876-894).
gggacggcagcgaaagcta

SEQ ID NO: 752204 - DNA, 19 bp, Mus musculus
  siRNA target sequence for Mln51 (NM_138660.1,877-895).
ggacggcagcgaaagctat

SEQ ID NO: 752205 - DNA, 19 bp, Mus musculus
  siRNA target sequence for Mln51 (NM_138660.1,881-899).
ggcagcgaaagctatggaa

SEQ ID NO: 752206 - DNA, 19 bp, Mus musculus
  siRNA target sequence for Mln51 (NM_138660.1,885-903).
gcgaaagctatggaaagat

SEQ ID NO: 752207 - DNA, 19 bp, Mus musculus
  siRNA target sequence for Mln51 (NM_138660.1,887-905).
gaaagctatggaaagatga

SEQ ID NO: 752208 - DNA, 19 bp, Mus musculus
  siRNA target sequence for Mln51 (NM_138660.1,906-924).
gggtcgctgggaacatgat

SEQ ID NO: 752209 - DNA, 19 bp, Mus musculus
  siRNA target sequence for Mln51 (NM_138660.1,907-925).
ggtcgctgggaacatgata

SEQ ID NO: 752210 - DNA, 19 bp, Mus musculus
  siRNA target sequence for Mln51 (NM_138660.1,908-926).
gtcgctgggaacatgataa

SEQ ID NO: 752211 - DNA, 19 bp, Mus musculus
  siRNA target sequence for Mln51 (NM_138660.1,910-928).
cgctgggaacatgataagt

SEQ ID NO: 752212 - DNA, 19 bp, Mus musculus
  siRNA target sequence for Mln51 (NM_138660.1,973-991).
gcactttatggttatgaca

SEQ ID NO: 752213 - DNA, 19 bp, Mus musculus
  siRNA target sequence for Mln51 (NM_138660.1,974-992).
cactttatggttatgacat

SEQ ID NO: 752214 - DNA, 19 bp, Mus musculus
  siRNA target sequence for Mln51 (NM_138660.1,1036-1054).
cggaaacctcgatttggaa

SEQ ID NO: 752215 - DNA, 19 bp, Mus musculus
  siRNA target sequence for Mln51 (NM_138660.1,1052-1070).
gaagttccccacaaagaga

SEQ ID NO: 752216 - DNA, 19 bp, Mus musculus
  siRNA target sequence for Mln51 (NM_138660.1,1084-1102).
ggtgatcgatcaagcaaat

SEQ ID NO: 752217 - DNA, 19 bp, Mus musculus
  siRNA target sequence for Mln51 (NM_138660.1,1132-1150).
ctaccacctaggacattta

SEQ ID NO: 752218 - DNA, 19 bp, Mus musculus
  siRNA target sequence for Mln51 (NM_138660.1,1135-1153).
ccacctaggacatttatta

SEQ ID NO: 752219 - DNA, 19 bp, Mus musculus
  siRNA target sequence for Mln51 (NM_138660.1,1136-1154).
cacctaggacatttattaa

SEQ ID NO: 752220 - DNA, 19 bp, Mus musculus
  siRNA target sequence for Mln51 (NM_138660.1,1222-1240).
gatggccgcactagtttca

SEQ ID NO: 752221 - DNA, 19 bp, Mus musculus
  siRNA target sequence for Mln51 (NM_138660.1,1273-1291).
cggtctgctgagactctta

SEQ ID NO: 752222 - DNA, 19 bp, Mus musculus
  siRNA target sequence for Mln51 (NM_138660.1,1274-1292).
ggtctgctgagactcttaa

SEQ ID NO: 752223 - DNA, 19 bp, Mus musculus
  siRNA target sequence for Mln51 (NM_138660.1,1444-1462).
cctgacaggcccattgaga

SEQ ID NO: 752224 - DNA, 19 bp, Mus musculus
  siRNA target sequence for Mln51 (NM_138660.1,1581-1599).
gactccagctgctaagact

SEQ ID NO: 752225 - DNA, 19 bp, Mus musculus
  siRNA target sequence for Mln51 (NM_138660.1,1648-1666).
gatgtggcgcagctaaata

SEQ ID NO: 752226 - DNA, 19 bp, Mus musculus
  siRNA target sequence for Mln51 (NM_138660.1,1653-1671).
ggcgcagctaaatatagca

SEQ ID NO: 752227 - DNA, 19 bp, Mus musculus
  siRNA target sequence for Mln51 (NM_138660.1,1756-1774).
ggacccccacctcagttta

SEQ ID NO: 752228 - DNA, 19 bp, Mus musculus
  siRNA target sequence for Mln51 (NM_138660.1,1807-1825).
cgagctaagcgttactcat

SEQ ID NO: 752229 - DNA, 19 bp, Mus musculus
  siRNA target sequence for Mln51 (NM_138660.1,1858-1876).
gctcctcctgtgcatatca

SEQ ID NO: 752230 - DNA, 19 bp, Mus musculus
  siRNA target sequence for Mln51 (NM_138660.1,1861-1879).
cctcctgtgcatatcagta

SEQ ID NO: 752231 - DNA, 19 bp, Mus musculus
  siRNA target sequence for Mln51 (NM_138660.1,1877-1895).
gtatcatggagggacatta

SEQ ID NO: 752232 - DNA, 19 bp, Mus musculus
  siRNA target sequence for Mln51 (NM_138660.1,1911-1929).
gttccagggaccaatctat

SEQ ID NO: 752233 - DNA, 19 bp, Mus musculus
  siRNA target sequence for Mln51 (NM_138660.1,2125-2143).
gctccgggtgtcatgaatt

SEQ ID NO: 752234 - DNA, 19 bp, Mus musculus
  siRNA target sequence for Mln51 (NM_138660.1,2132-2150).
gtgtcatgaattttggtaa

SEQ ID NO: 752235 - DNA, 19 bp, Mus musculus
  siRNA target sequence for Mln51 (NM_138660.1,2151-2169).
ccccaattacccttatgct

SEQ ID NO: 752236 - DNA, 19 bp, Mus musculus
  siRNA target sequence for Pcdha9 (NM_138661.1,10-28).
ggaaatcgaccagaagata

SEQ ID NO: 752237 - DNA, 19 bp, Mus musculus
  siRNA target sequence for Pcdha9 (NM_138661.1,11-29).
gaaatcgaccagaagatat

SEQ ID NO: 752238 - DNA, 19 bp, Mus musculus
  siRNA target sequence for Pcdha9 (NM_138661.1,16-34).
cgaccagaagatattagaa

SEQ ID NO: 752239 - DNA, 19 bp, Mus musculus
  siRNA target sequence for Pcdha9 (NM_138661.1,121-139).
gcttggcgcctgctacttt

SEQ ID NO: 752240 - DNA, 19 bp, Mus musculus
  siRNA target sequence for Pcdha9 (NM_138661.1,472-490).
gacaaccctccgatattct

SEQ ID NO: 752241 - DNA, 19 bp, Mus musculus
  siRNA target sequence for Pcdha9 (NM_138661.1,491-509).
ccgtagcggaacaaaagat

SEQ ID NO: 752242 - DNA, 19 bp, Mus musculus
  siRNA target sequence for Pcdha9 (NM_138661.1,493-511).
gtagcggaacaaaagatct

SEQ ID NO: 752243 - DNA, 19 bp, Mus musculus
  siRNA target sequence for Pcdha9 (NM_138661.1,507-525).
gatcttggtagctgaatct

SEQ ID NO: 752244 - DNA, 19 bp, Mus musculus
  siRNA target sequence for Pcdha9 (NM_138661.1,571-589).
gatgttggagagaactcta

SEQ ID NO: 752245 - DNA, 19 bp, Mus musculus
  siRNA target sequence for Pcdha9 (NM_138661.1,577-595).
ggagagaactctatgctta

SEQ ID NO: 752246 - DNA, 19 bp, Mus musculus
  siRNA target sequence for Pcdha9 (NM_138661.1,580-598).
gagaactctatgcttactt

SEQ ID NO: 752247 - DNA, 19 bp, Mus musculus
  siRNA target sequence for Pcdha9 (NM_138661.1,596-614).
cttacaaactcagttcaaa

SEQ ID NO: 752248 - DNA, 19 bp, Mus musculus
  siRNA target sequence for Pcdha9 (NM_138661.1,604-622).
ctcagttcaaatgagtttt

SEQ ID NO: 752249 - DNA, 19 bp, Mus musculus
  siRNA target sequence for Pcdha9 (NM_138661.1,687-705).
gatagatcgagaagaaaat

SEQ ID NO: 752250 - DNA, 19 bp, Mus musculus
  siRNA target sequence for Pcdha9 (NM_138661.1,700-718).
gaaaatcctcagctaaagt

SEQ ID NO: 752251 - DNA, 19 bp, Mus musculus
  siRNA target sequence for Pcdha9 (NM_138661.1,739-757).
ggaggcaaacctgaattta

SEQ ID NO: 752252 - DNA, 19 bp, Mus musculus
  siRNA target sequence for Pcdha9 (NM_138661.1,761-779).
gatcggtttctctgttgat

SEQ ID NO: 752253 - DNA, 19 bp, Mus musculus
  siRNA target sequence for Pcdha9 (NM_138661.1,821-839).
gatctgtttacgaagttaa

SEQ ID NO: 752254 - DNA, 19 bp, Mus musculus
  siRNA target sequence for Pcdha9 (NM_138661.1,843-861).
gtatgagaatcaagagaat

SEQ ID NO: 752255 - DNA, 19 bp, Mus musculus
  siRNA target sequence for Pcdha9 (NM_138661.1,936-954).
ctctttagcctcatcgatt

SEQ ID NO: 752256 - DNA, 19 bp, Mus musculus
  siRNA target sequence for Pcdha9 (NM_138661.1,938-956).
ctttagcctcatcgattat

SEQ ID NO: 752257 - DNA, 19 bp, Mus musculus
  siRNA target sequence for Pcdha9 (NM_138661.1,944-962).
cctcatcgattataagaca

SEQ ID NO: 752258 - DNA, 19 bp, Mus musculus
  siRNA target sequence for Pcdha9 (NM_138661.1,963-981).
gaaatttctaataaacgaa

SEQ ID NO: 752259 - DNA, 19 bp, Mus musculus
  siRNA target sequence for Pcdha9 (NM_138661.1,978-996).
cgaaaagactggagagata

SEQ ID NO: 752260 - DNA, 19 bp, Mus musculus
  siRNA target sequence for Pcdha9 (NM_138661.1,1023-1041).
ggagagtaacaattatgaa

SEQ ID NO: 752261 - DNA, 19 bp, Mus musculus
  siRNA target sequence for Pcdha9 (NM_138661.1,1024-1042).
gagagtaacaattatgaaa

SEQ ID NO: 752262 - DNA, 19 bp, Mus musculus
  siRNA target sequence for Pcdha9 (NM_138661.1,1050-1068).
ggatgctacagataaagga

SEQ ID NO: 752263 - DNA, 19 bp, Mus musculus
  siRNA target sequence for Pcdha9 (NM_138661.1,1091-1109).
gcaccgtactcgtggaaat

SEQ ID NO: 752264 - DNA, 19 bp, Mus musculus
  siRNA target sequence for Pcdha9 (NM_138661.1,1094-1112).
ccgtactcgtggaaatctt

SEQ ID NO: 752265 - DNA, 19 bp, Mus musculus
  siRNA target sequence for Pcdha9 (NM_138661.1,1132-1150).
ccggagatagtccttactt

SEQ ID NO: 752266 - DNA, 19 bp, Mus musculus
  siRNA target sequence for Pcdha9 (NM_138661.1,1134-1152).
ggagatagtccttacttct

SEQ ID NO: 752267 - DNA, 19 bp, Mus musculus
  siRNA target sequence for Pcdha9 (NM_138661.1,1155-1173).
gtctttgccggtgaaagaa

SEQ ID NO: 752268 - DNA, 19 bp, Mus musculus
  siRNA target sequence for Pcdha9 (NM_138661.1,1157-1175).
ctttgccggtgaaagaaga

SEQ ID NO: 752269 - DNA, 19 bp, Mus musculus
  siRNA target sequence for Pcdha9 (NM_138661.1,1218-1236).
caaagactctggtgtcaat

SEQ ID NO: 752270 - DNA, 19 bp, Mus musculus
  siRNA target sequence for Pcdha9 (NM_138661.1,1804-1822).
ggacctgctggcgaattta

SEQ ID NO: 752271 - DNA, 19 bp, Mus musculus
  siRNA target sequence for Pcdha9 (NM_138661.1,2047-2065).
cacggcgaacctatgttga

SEQ ID NO: 752272 - DNA, 19 bp, Mus musculus
  siRNA target sequence for Pcdha9 (NM_138661.1,2104-2122).
ggccaggtgccaaaagctt

SEQ ID NO: 752273 - DNA, 19 bp, Mus musculus
  siRNA target sequence for Pcdha9 (NM_138661.1,2164-2182).
ctgatggatgtcaatgtat

SEQ ID NO: 752274 - DNA, 19 bp, Mus musculus
  siRNA target sequence for Pcdha3 (NM_138662.1,392-410).
cagtagccacaaagaatct

SEQ ID NO: 752275 - DNA, 19 bp, Mus musculus
  siRNA target sequence for Pcdha3 (NM_138662.1,482-500).
ccaattcgttgttgtctta

SEQ ID NO: 752276 - DNA, 19 bp, Mus musculus
  siRNA target sequence for Pcdha3 (NM_138662.1,495-513).
gtcttacagtcttaactca

SEQ ID NO: 752277 - DNA, 19 bp, Mus musculus
  siRNA target sequence for Pcdha3 (NM_138662.1,501-519).
cagtcttaactcaagtgaa

SEQ ID NO: 752278 - DNA, 19 bp, Mus musculus
  siRNA target sequence for Pcdha3 (NM_138662.1,503-521).
gtcttaactcaagtgaata

SEQ ID NO: 752279 - DNA, 19 bp, Mus musculus
  siRNA target sequence for Pcdha3 (NM_138662.1,510-528).
ctcaagtgaatacttttct

SEQ ID NO: 752280 - DNA, 19 bp, Mus musculus
  siRNA target sequence for Pcdha3 (NM_138662.1,563-581).
ccctgggactcgtgttgaa

SEQ ID NO: 752281 - DNA, 19 bp, Mus musculus
  siRNA target sequence for Pcdha3 (NM_138662.1,564-582).
cctgggactcgtgttgaaa

SEQ ID NO: 752282 - DNA, 19 bp, Mus musculus
  siRNA target sequence for Pcdha3 (NM_138662.1,565-583).
ctgggactcgtgttgaaaa

SEQ ID NO: 752283 - DNA, 19 bp, Mus musculus
  siRNA target sequence for Pcdha3 (NM_138662.1,567-585).
gggactcgtgttgaaaaaa

SEQ ID NO: 752284 - DNA, 19 bp, Mus musculus
  siRNA target sequence for Pcdha3 (NM_138662.1,571-589).
ctcgtgttgaaaaaacttt

SEQ ID NO: 752285 - DNA, 19 bp, Mus musculus
  siRNA target sequence for Pcdha3 (NM_138662.1,573-591).
cgtgttgaaaaaactttta

SEQ ID NO: 752286 - DNA, 19 bp, Mus musculus
  siRNA target sequence for Pcdha3 (NM_138662.1,610-628).
gaacataatttattgataa

SEQ ID NO: 752287 - DNA, 19 bp, Mus musculus
  siRNA target sequence for Pcdha3 (NM_138662.1,659-677).
ctggcaccactcaagtgaa

SEQ ID NO: 752288 - DNA, 19 bp, Mus musculus
  siRNA target sequence for Pcdha3 (NM_138662.1,675-693).
gaagatcactgttctagat

SEQ ID NO: 752289 - DNA, 19 bp, Mus musculus
  siRNA target sequence for Pcdha3 (NM_138662.1,725-743).
cattctacaaagtcagatt

SEQ ID NO: 752290 - DNA, 19 bp, Mus musculus
  siRNA target sequence for Pcdha3 (NM_138662.1,738-756).
cagattacccgaaaatgct

SEQ ID NO: 752291 - DNA, 19 bp, Mus musculus
  siRNA target sequence for Pcdha3 (NM_138662.1,758-776).
caaatggtactgtagtagt

SEQ ID NO: 752292 - DNA, 19 bp, Mus musculus
  siRNA target sequence for Pcdha3 (NM_138662.1,838-856).
caggatatgtcacttgaaa

SEQ ID NO: 752293 - DNA, 19 bp, Mus musculus
  siRNA target sequence for Pcdha3 (NM_138662.1,899-917).
ctgtaaaaggtaacataga

SEQ ID NO: 752294 - DNA, 19 bp, Mus musculus
  siRNA target sequence for Pcdha3 (NM_138662.1,901-919).
gtaaaaggtaacatagatt

SEQ ID NO: 752295 - DNA, 19 bp, Mus musculus
  siRNA target sequence for Pcdha3 (NM_138662.1,972-990).
ccctccaatgacagatcat

SEQ ID NO: 752296 - DNA, 19 bp, Mus musculus
  siRNA target sequence for Pcdha3 (NM_138662.1,973-991).
cctccaatgacagatcatt

SEQ ID NO: 752297 - DNA, 19 bp, Mus musculus
  siRNA target sequence for Pcdha3 (NM_138662.1,992-1010).
gcacggttctagttgaaat

SEQ ID NO: 752298 - DNA, 19 bp, Mus musculus
  siRNA target sequence for Pcdha3 (NM_138662.1,993-1011).
cacggttctagttgaaatt

SEQ ID NO: 752299 - DNA, 19 bp, Mus musculus
  siRNA target sequence for Pcdha3 (NM_138662.1,995-1013).
cggttctagttgaaattgt

SEQ ID NO: 752300 - DNA, 19 bp, Mus musculus
  siRNA target sequence for Pcdha3 (NM_138662.1,1041-1059).
ggtcatcaagtcattatca

SEQ ID NO: 752301 - DNA, 19 bp, Mus musculus
  siRNA target sequence for Pcdha3 (NM_138662.1,1044-1062).
catcaagtcattatcactt

SEQ ID NO: 752302 - DNA, 19 bp, Mus musculus
  siRNA target sequence for Pcdha3 (NM_138662.1,1362-1380).
gccggagtacacagtgttt

SEQ ID NO: 752303 - DNA, 19 bp, Mus musculus
  siRNA target sequence for Pcdha3 (NM_138662.1,2048-2066).
gggaggcttcgcttgtaga

SEQ ID NO: 752304 - DNA, 19 bp, Mus musculus
  siRNA target sequence for Pcdha3 (NM_138662.1,2049-2067).
ggaggcttcgcttgtagat

SEQ ID NO: 752305 - DNA, 19 bp, Mus musculus
  siRNA target sequence for Pcdha3 (NM_138662.1,2050-2068).
gaggcttcgcttgtagata

SEQ ID NO: 752306 - DNA, 19 bp, Mus musculus
  siRNA target sequence for Pcdha3 (NM_138662.1,2053-2071).
gcttcgcttgtagatatca

SEQ ID NO: 752307 - DNA, 19 bp, Mus musculus
  siRNA target sequence for Pcdha3 (NM_138662.1,2054-2072).
cttcgcttgtagatatcaa

SEQ ID NO: 752308 - DNA, 19 bp, Mus musculus
  siRNA target sequence for Pcdha3 (NM_138662.1,2309-2327).
catgcccagttaatcaaga

SEQ ID NO: 752309 - DNA, 19 bp, Mus musculus
  siRNA target sequence for Pcdha3 (NM_138662.1,2312-2330).
gcccagttaatcaagataa

SEQ ID NO: 752310 - DNA, 19 bp, Mus musculus
  siRNA target sequence for Pcdha3 (NM_138662.1,2313-2331).
cccagttaatcaagataaa

SEQ ID NO: 752311 - DNA, 19 bp, Mus musculus
  siRNA target sequence for Pcdha3 (NM_138662.1,2352-2370).
cattgatttctccatcaaa

SEQ ID NO: 752312 - DNA, 19 bp, Mus musculus
  siRNA target sequence for Pcdha12 (NM_138663.2,432-450).
gtcgagacctccagaaact

SEQ ID NO: 752313 - DNA, 19 bp, Mus musculus
  siRNA target sequence for Pcdha12 (NM_138663.2,501-519).
cttgacctaccgattggat

SEQ ID NO: 752314 - DNA, 19 bp, Mus musculus
  siRNA target sequence for Pcdha12 (NM_138663.2,535-553).
gctttggacacgcaaaaca

SEQ ID NO: 752315 - DNA, 19 bp, Mus musculus
  siRNA target sequence for Pcdha12 (NM_138663.2,536-554).
ctttggacacgcaaaacaa

SEQ ID NO: 752316 - DNA, 19 bp, Mus musculus
  siRNA target sequence for Pcdha12 (NM_138663.2,552-570).
caatcgtgagcgaacttct

SEQ ID NO: 752317 - DNA, 19 bp, Mus musculus
  siRNA target sequence for Pcdha12 (NM_138663.2,559-577).
gagcgaacttcttcgttat

SEQ ID NO: 752318 - DNA, 19 bp, Mus musculus
  siRNA target sequence for Pcdha12 (NM_138663.2,569-587).
cttcgttatcccttgtgtt

SEQ ID NO: 752319 - DNA, 19 bp, Mus musculus
  siRNA target sequence for Pcdha12 (NM_138663.2,610-628).
gaaattcaggagtatagtt

SEQ ID NO: 752320 - DNA, 19 bp, Mus musculus
  siRNA target sequence for Pcdha12 (NM_138663.2,618-636).
ggagtatagtttattacta

SEQ ID NO: 752321 - DNA, 19 bp, Mus musculus
  siRNA target sequence for Pcdha12 (NM_138663.2,619-637).
gagtatagtttattactaa

SEQ ID NO: 752322 - DNA, 19 bp, Mus musculus
  siRNA target sequence for Pcdha12 (NM_138663.2,621-639).
gtatagtttattactaaca

SEQ ID NO: 752323 - DNA, 19 bp, Mus musculus
  siRNA target sequence for Pcdha12 (NM_138663.2,721-739).
gagtttgatcggttcgttt

SEQ ID NO: 752324 - DNA, 19 bp, Mus musculus
  siRNA target sequence for Pcdha12 (NM_138663.2,730-748).
cggttcgtttacaaagtta

SEQ ID NO: 752325 - DNA, 19 bp, Mus musculus
  siRNA target sequence for Pcdha12 (NM_138663.2,732-750).
gttcgtttacaaagttaaa

SEQ ID NO: 752326 - DNA, 19 bp, Mus musculus
  siRNA target sequence for Pcdha12 (NM_138663.2,753-771).
gttagaggatgcacttaat

SEQ ID NO: 752327 - DNA, 19 bp, Mus musculus
  siRNA target sequence for Pcdha12 (NM_138663.2,772-790).
ggaacgttggtgattaact

SEQ ID NO: 752328 - DNA, 19 bp, Mus musculus
  siRNA target sequence for Pcdha12 (NM_138663.2,773-791).
gaacgttggtgattaactt

SEQ ID NO: 752329 - DNA, 19 bp, Mus musculus
  siRNA target sequence for Pcdha12 (NM_138663.2,776-794).
cgttggtgattaacttaaa

SEQ ID NO: 752330 - DNA, 19 bp, Mus musculus
  siRNA target sequence for Pcdha12 (NM_138663.2,802-820).
gatcctgacgagggtataa

SEQ ID NO: 752331 - DNA, 19 bp, Mus musculus
  siRNA target sequence for Pcdha12 (NM_138663.2,814-832).
ggtataaatggagatataa

SEQ ID NO: 752332 - DNA, 19 bp, Mus musculus
  siRNA target sequence for Pcdha12 (NM_138663.2,815-833).
gtataaatggagatataat

SEQ ID NO: 752333 - DNA, 19 bp, Mus musculus
  siRNA target sequence for Pcdha12 (NM_138663.2,871-889).
catgcatttaatatagatt

SEQ ID NO: 752334 - DNA, 19 bp, Mus musculus
  siRNA target sequence for Pcdha12 (NM_138663.2,915-933).
ggggctactggatttcgaa

SEQ ID NO: 752335 - DNA, 19 bp, Mus musculus
  siRNA target sequence for Pcdha12 (NM_138663.2,930-948).
cgaagaaattaaactatat

SEQ ID NO: 752336 - DNA, 19 bp, Mus musculus
  siRNA target sequence for Pcdha12 (NM_138663.2,956-974).
ccgtggaggcagtagacaa

SEQ ID NO: 752337 - DNA, 19 bp, Mus musculus
  siRNA target sequence for Pcdha12 (NM_138663.2,970-988).
gacaaaggcaatattccaa

SEQ ID NO: 752338 - DNA, 19 bp, Mus musculus
  siRNA target sequence for Pcdha12 (NM_138663.2,985-1003).
ccaatgacaggccattgta

SEQ ID NO: 752339 - DNA, 19 bp, Mus musculus
  siRNA target sequence for Pcdha12 (NM_138663.2,1004-1022).
cccttctggtggaattact

SEQ ID NO: 752340 - DNA, 19 bp, Mus musculus
  siRNA target sequence for Pcdha12 (NM_138663.2,1012-1030).
gtggaattactggatgtaa

SEQ ID NO: 752341 - DNA, 19 bp, Mus musculus
  siRNA target sequence for Pcdha12 (NM_138663.2,1014-1032).
ggaattactggatgtaaat

SEQ ID NO: 752342 - DNA, 19 bp, Mus musculus
  siRNA target sequence for Pcdha12 (NM_138663.2,1042-1060).
ccagaggtcacgattactt

SEQ ID NO: 752343 - DNA, 19 bp, Mus musculus
  siRNA target sequence for Pcdha12 (NM_138663.2,2020-2038).
caagcacccaagatatctt

SEQ ID NO: 752344 - DNA, 19 bp, Mus musculus
  siRNA target sequence for Pcdha12 (NM_138663.2,2372-2390).
ggcaggtagaacatttgaa

SEQ ID NO: 752345 - DNA, 19 bp, Mus musculus
  siRNA target sequence for Nlgn1 (NM_138666.2,1316-1334).
gatgcatgtggccaaatta

SEQ ID NO: 752346 - DNA, 19 bp, Mus musculus
  siRNA target sequence for Nlgn1 (NM_138666.2,1319-1337).
gcatgtggccaaattatgt

SEQ ID NO: 752347 - DNA, 19 bp, Mus musculus
  siRNA target sequence for Nlgn1 (NM_138666.2,1426-1444).
cacgtactctctcaaaagt

SEQ ID NO: 752348 - DNA, 19 bp, Mus musculus
  siRNA target sequence for Nlgn1 (NM_138666.2,1453-1471).
gtagacccattggttacta

SEQ ID NO: 752349 - DNA, 19 bp, Mus musculus
  siRNA target sequence for Nlgn1 (NM_138666.2,1568-1586).
caacaggagaacatcgttt

SEQ ID NO: 752350 - DNA, 19 bp, Mus musculus
  siRNA target sequence for Nlgn1 (NM_138666.2,1652-1670).
gtccccagaatatcattga

SEQ ID NO: 752351 - DNA, 19 bp, Mus musculus
  siRNA target sequence for Nlgn1 (NM_138666.2,1676-1694).
gattgcctgaagttatgct

SEQ ID NO: 752352 - DNA, 19 bp, Mus musculus
  siRNA target sequence for Nlgn1 (NM_138666.2,1693-1711).
cttcctgtgtggttcacta

SEQ ID NO: 752353 - DNA, 19 bp, Mus musculus
  siRNA target sequence for Nlgn1 (NM_138666.2,1699-1717).
gtgtggttcactaataact

SEQ ID NO: 752354 - DNA, 19 bp, Mus musculus
  siRNA target sequence for Nlgn1 (NM_138666.2,1747-1765).
cagagtgaagactgtctat

SEQ ID NO: 752355 - DNA, 19 bp, Mus musculus
  siRNA target sequence for Nlgn1 (NM_138666.2,1751-1769).
gtgaagactgtctatactt

SEQ ID NO: 752356 - DNA, 19 bp, Mus musculus
  siRNA target sequence for Nlgn1 (NM_138666.2,1753-1771).
gaagactgtctatacttaa

SEQ ID NO: 752357 - DNA, 19 bp, Mus musculus
  siRNA target sequence for Nlgn1 (NM_138666.2,1756-1774).
gactgtctatacttaaaca

SEQ ID NO: 752358 - DNA, 19 bp, Mus musculus
  siRNA target sequence for Nlgn1 (NM_138666.2,1760-1778).
gtctatacttaaacatcta

SEQ ID NO: 752359 - DNA, 19 bp, Mus musculus
  siRNA target sequence for Nlgn1 (NM_138666.2,1792-1810).
gatggtccccttacaaaga

SEQ ID NO: 752360 - DNA, 19 bp, Mus musculus
  siRNA target sequence for Nlgn1 (NM_138666.2,1817-1835).
cagatgatttaggtgataa

SEQ ID NO: 752361 - DNA, 19 bp, Mus musculus
  siRNA target sequence for Nlgn1 (NM_138666.2,1914-1932).
catggaaggtactggaaat

SEQ ID NO: 752362 - DNA, 19 bp, Mus musculus
  siRNA target sequence for Nlgn1 (NM_138666.2,1944-1962).
gagtgtcttggcaagctat

SEQ ID NO: 752363 - DNA, 19 bp, Mus musculus
  siRNA target sequence for Nlgn1 (NM_138666.2,1955-1973).
caagctatggcaatgtgat

SEQ ID NO: 752364 - DNA, 19 bp, Mus musculus
  siRNA target sequence for Nlgn1 (NM_138666.2,2078-2096).
gatggaccagcgagaacat

SEQ ID NO: 752365 - DNA, 19 bp, Mus musculus
  siRNA target sequence for Nlgn1 (NM_138666.2,2088-2106).
cgagaacattgggttcttt

SEQ ID NO: 752366 - DNA, 19 bp, Mus musculus
  siRNA target sequence for Nlgn1 (NM_138666.2,2161-2179).
gtcaacctgctgactttat

SEQ ID NO: 752367 - DNA, 19 bp, Mus musculus
  siRNA target sequence for Nlgn1 (NM_138666.2,2172-2190).
gactttatcccattattct

SEQ ID NO: 752368 - DNA, 19 bp, Mus musculus
  siRNA target sequence for Nlgn1 (NM_138666.2,2194-2212).
ggtaaccgttggagcaatt

SEQ ID NO: 752369 - DNA, 19 bp, Mus musculus
  siRNA target sequence for Nlgn1 (NM_138666.2,2288-2306).
ctgcaaaatacgctagaat

SEQ ID NO: 752370 - DNA, 19 bp, Mus musculus
  siRNA target sequence for Nlgn1 (NM_138666.2,2291-2309).
caaaatacgctagaattct

SEQ ID NO: 752371 - DNA, 19 bp, Mus musculus
  siRNA target sequence for Nlgn1 (NM_138666.2,2303-2321).
gaattctggccacaaaagt

SEQ ID NO: 752372 - DNA, 19 bp, Mus musculus
  siRNA target sequence for Nlgn1 (NM_138666.2,2327-2345).
gcaatgtttcagatacagt

SEQ ID NO: 752373 - DNA, 19 bp, Mus musculus
  siRNA target sequence for Nlgn1 (NM_138666.2,2328-2346).
caatgtttcagatacagta

SEQ ID NO: 752374 - DNA, 19 bp, Mus musculus
  siRNA target sequence for Nlgn1 (NM_138666.2,2336-2354).
cagatacagtagagttagt

SEQ ID NO: 752375 - DNA, 19 bp, Mus musculus
  siRNA target sequence for Nlgn1 (NM_138666.2,2379-2397).
caaagaacttgttgatcaa

SEQ ID NO: 752376 - DNA, 19 bp, Mus musculus
  siRNA target sequence for Nlgn1 (NM_138666.2,2461-2479).
gatgaccctcagatactga

SEQ ID NO: 752377 - DNA, 19 bp, Mus musculus
  siRNA target sequence for Nlgn1 (NM_138666.2,2531-2549).
gggaagggttgaagtttgt

SEQ ID NO: 752378 - DNA, 19 bp, Mus musculus
  siRNA target sequence for Nlgn1 (NM_138666.2,2544-2562).
gtttgtcgaaaatatagta

SEQ ID NO: 752379 - DNA, 19 bp, Mus musculus
  siRNA target sequence for Nlgn1 (NM_138666.2,2548-2566).
gtcgaaaatatagtagata

SEQ ID NO: 752380 - DNA, 19 bp, Mus musculus
  siRNA target sequence for Nlgn1 (NM_138666.2,2550-2568).
cgaaaatatagtagatagt

SEQ ID NO: 752381 - DNA, 19 bp, Mus musculus
  siRNA target sequence for Nlgn1 (NM_138666.2,2576-2594).
gtgtatcagccagtgattt

SEQ ID NO: 752382 - DNA, 19 bp, Mus musculus
  siRNA target sequence for Nlgn1 (NM_138666.2,2688-2706).
ctgggctgatcgccataat

SEQ ID NO: 752383 - DNA, 19 bp, Mus musculus
  siRNA target sequence for Nlgn1 (NM_138666.2,2691-2709).
ggctgatcgccataatcct

SEQ ID NO: 752384 - DNA, 19 bp, Mus musculus
  siRNA target sequence for Nlgn1 (NM_138666.2,2698-2716).
cgccataatcctgaaacta

SEQ ID NO: 752385 - DNA, 19 bp, Mus musculus
  siRNA target sequence for Nlgn1 (NM_138666.2,2710-2728).
gaaactagaaggaagacat

SEQ ID NO: 752386 - DNA, 19 bp, Mus musculus
  siRNA target sequence for Nlgn1 (NM_138666.2,2817-2835).
ctatgccttttatcatcat

SEQ ID NO: 752387 - DNA, 19 bp, Mus musculus
  siRNA target sequence for Nlgn1 (NM_138666.2,2881-2899).
gatgaggttccctatgtgt

SEQ ID NO: 752388 - DNA, 19 bp, Mus musculus
  siRNA target sequence for Nlgn1 (NM_138666.2,2898-2916).
gttgggaatccccatgatt

SEQ ID NO: 752389 - DNA, 19 bp, Mus musculus
  siRNA target sequence for Nlgn1 (NM_138666.2,2919-2937).
ccctacagagttatttcct

SEQ ID NO: 752390 - DNA, 19 bp, Mus musculus
  siRNA target sequence for Nlgn1 (NM_138666.2,2961-2979).
gatgttgagtgcagtagta

SEQ ID NO: 752391 - DNA, 19 bp, Mus musculus
  siRNA target sequence for Nlgn1 (NM_138666.2,2971-2989).
gcagtagtaatgacatact

SEQ ID NO: 752392 - DNA, 19 bp, Mus musculus
  siRNA target sequence for Nlgn1 (NM_138666.2,3028-3046).
gttcctcaagacacaaaat

SEQ ID NO: 752393 - DNA, 19 bp, Mus musculus
  siRNA target sequence for Nlgn1 (NM_138666.2,3079-3097).
gtagcatggaccagatatt

SEQ ID NO: 752394 - DNA, 19 bp, Mus musculus
  siRNA target sequence for Nlgn1 (NM_138666.2,3111-3129).
gctttatctccatattgga

SEQ ID NO: 752395 - DNA, 19 bp, Mus musculus
  siRNA target sequence for Nlgn1 (NM_138666.2,3137-3155).
cgagagttaaagagcatta

SEQ ID NO: 752396 - DNA, 19 bp, Mus musculus
  siRNA target sequence for Nlgn1 (NM_138666.2,3160-3178).
gccaataaggtaaatctct

SEQ ID NO: 752397 - DNA, 19 bp, Mus musculus
  siRNA target sequence for Nlgn1 (NM_138666.2,3202-3220).
cataatctcaatgacattt

SEQ ID NO: 752398 - DNA, 19 bp, Mus musculus
  siRNA target sequence for Nlgn1 (NM_138666.2,3210-3228).
caatgacatttctcagtat

SEQ ID NO: 752399 - DNA, 19 bp, Mus musculus
  siRNA target sequence for Nlgn1 (NM_138666.2,3214-3232).
gacatttctcagtatacct

SEQ ID NO: 752400 - DNA, 19 bp, Mus musculus
  siRNA target sequence for Nlgn1 (NM_138666.2,3230-3248).
cctcgacaacaactaaagt

SEQ ID NO: 752401 - DNA, 19 bp, Mus musculus
  siRNA target sequence for Nlgn1 (NM_138666.2,3429-3447).
caacatcttggcttttgca

SEQ ID NO: 752402 - DNA, 19 bp, Mus musculus
  siRNA target sequence for Nlgn1 (NM_138666.2,3446-3464).
cagccctgtactacaagaa

SEQ ID NO: 752403 - DNA, 19 bp, Mus musculus
  siRNA target sequence for Nlgn1 (NM_138666.2,3629-3647).
ccgcctgtcccccagatta

SEQ ID NO: 752404 - DNA, 19 bp, Mus musculus
  siRNA target sequence for Nlgn1 (NM_138666.2,3630-3648).
cgcctgtcccccagattat

SEQ ID NO: 752405 - DNA, 19 bp, Mus musculus
  siRNA target sequence for Nlgn1 (NM_138666.2,3631-3649).
gcctgtcccccagattata

SEQ ID NO: 752406 - DNA, 19 bp, Mus musculus
  siRNA target sequence for Nlgn1 (NM_138666.2,3635-3653).
gtcccccagattatactct

SEQ ID NO: 752407 - DNA, 19 bp, Mus musculus
  siRNA target sequence for Nlgn1 (NM_138666.2,3641-3659).
cagattatactctagctat

SEQ ID NO: 752408 - DNA, 19 bp, Mus musculus
  siRNA target sequence for Nlgn1 (NM_138666.2,3662-3680).
ggaggtcacctgatgatat

SEQ ID NO: 752409 - DNA, 19 bp, Mus musculus
  siRNA target sequence for Nlgn1 (NM_138666.2,3663-3681).
gaggtcacctgatgatatt

SEQ ID NO: 752410 - DNA, 19 bp, Mus musculus
  siRNA target sequence for Nlgn1 (NM_138666.2,3671-3689).
ctgatgatattccactaat

SEQ ID NO: 752411 - DNA, 19 bp, Mus musculus
  siRNA target sequence for Nlgn1 (NM_138666.2,3692-3710).
cacctaacaccatcacaat

SEQ ID NO: 752412 - DNA, 19 bp, Mus musculus
  siRNA target sequence for Nlgn1 (NM_138666.2,3711-3729).
gattcccaacactatacca

SEQ ID NO: 752413 - DNA, 19 bp, Mus musculus
  siRNA target sequence for Nlgn1 (NM_138666.2,3730-3748).
gggattcagcccttacata

SEQ ID NO: 752414 - DNA, 19 bp, Mus musculus
  siRNA target sequence for Nlgn1 (NM_138666.2,3732-3750).
gattcagcccttacataca

SEQ ID NO: 752415 - DNA, 19 bp, Mus musculus
  siRNA target sequence for Nlgn1 (NM_138666.2,3736-3754).
cagcccttacatacattca

SEQ ID NO: 752416 - DNA, 19 bp, Mus musculus
  siRNA target sequence for Map3k7ip2 (NM_138667.1,116-134).
catgacctgcgacaaaaat

SEQ ID NO: 752417 - DNA, 19 bp, Mus musculus
  siRNA target sequence for Map3k7ip2 (NM_138667.1,143-161).
gtgcctgaagttgttgtat

SEQ ID NO: 752418 - DNA, 19 bp, Mus musculus
  siRNA target sequence for Map3k7ip2 (NM_138667.1,220-238).
ggagagtacaaggtatctt

SEQ ID NO: 752419 - DNA, 19 bp, Mus musculus
  siRNA target sequence for Map3k7ip2 (NM_138667.1,221-239).
gagagtacaaggtatcttt

SEQ ID NO: 752420 - DNA, 19 bp, Mus musculus
  siRNA target sequence for Map3k7ip2 (NM_138667.1,242-260).
ggtgaaggagacctgaatt

SEQ ID NO: 752421 - DNA, 19 bp, Mus musculus
  siRNA target sequence for Map3k7ip2 (NM_138667.1,282-300).
ctggtctacgcaatcacat

SEQ ID NO: 752422 - DNA, 19 bp, Mus musculus
  siRNA target sequence for Map3k7ip2 (NM_138667.1,287-305).
ctacgcaatcacatgactt

SEQ ID NO: 752423 - DNA, 19 bp, Mus musculus
  siRNA target sequence for Map3k7ip2 (NM_138667.1,316-334).
ggacttgcagtcacagaat

SEQ ID NO: 752424 - DNA, 19 bp, Mus musculus
  siRNA target sequence for Map3k7ip2 (NM_138667.1,367-385).
gaatggaagcaggacttta

SEQ ID NO: 752425 - DNA, 19 bp, Mus musculus
  siRNA target sequence for Map3k7ip2 (NM_138667.1,372-390).
gaagcaggactttaacaca

SEQ ID NO: 752426 - DNA, 19 bp, Mus musculus
  siRNA target sequence for Map3k7ip2 (NM_138667.1,413-431).
cacggtgggcagtccaata

SEQ ID NO: 752427 - DNA, 19 bp, Mus musculus
  siRNA target sequence for Map3k7ip2 (NM_138667.1,417-435).
gtgggcagtccaataacga

SEQ ID NO: 752428 - DNA, 19 bp, Mus musculus
  siRNA target sequence for Map3k7ip2 (NM_138667.1,424-442).
gtccaataacgaactgttt

SEQ ID NO: 752429 - DNA, 19 bp, Mus musculus
  siRNA target sequence for Map3k7ip2 (NM_138667.1,426-444).
ccaataacgaactgtttca

SEQ ID NO: 752430 - DNA, 19 bp, Mus musculus
  siRNA target sequence for Map3k7ip2 (NM_138667.1,528-546).
caacaccgcatcttggatt

SEQ ID NO: 752431 - DNA, 19 bp, Mus musculus
  siRNA target sequence for Map3k7ip2 (NM_138667.1,565-583).
gacatcaaacctttctcaa

SEQ ID NO: 752432 - DNA, 19 bp, Mus musculus
  siRNA target sequence for Map3k7ip2 (NM_138667.1,590-608).
cccaggttcaatcctatta

SEQ ID NO: 752433 - DNA, 19 bp, Mus musculus
  siRNA target sequence for Map3k7ip2 (NM_138667.1,594-612).
ggttcaatcctattatggt

SEQ ID NO: 752434 - DNA, 19 bp, Mus musculus
  siRNA target sequence for Map3k7ip2 (NM_138667.1,595-613).
gttcaatcctattatggta

SEQ ID NO: 752435 - DNA, 19 bp, Mus musculus
  siRNA target sequence for Map3k7ip2 (NM_138667.1,615-633).
ctttagccccaaacataca

SEQ ID NO: 752436 - DNA, 19 bp, Mus musculus
  siRNA target sequence for Map3k7ip2 (NM_138667.1,640-658).
ccgtagtactcctacatct

SEQ ID NO: 752437 - DNA, 19 bp, Mus musculus
  siRNA target sequence for Map3k7ip2 (NM_138667.1,641-659).
cgtagtactcctacatctt

SEQ ID NO: 752438 - DNA, 19 bp, Mus musculus
  siRNA target sequence for Map3k7ip2 (NM_138667.1,715-733).
ctatattaggccttatatt

SEQ ID NO: 752439 - DNA, 19 bp, Mus musculus
  siRNA target sequence for Map3k7ip2 (NM_138667.1,753-771).
ctcggcagacacaacaaca

SEQ ID NO: 752440 - DNA, 19 bp, Mus musculus
  siRNA target sequence for Map3k7ip2 (NM_138667.1,755-773).
cggcagacacaacaacatt

SEQ ID NO: 752441 - DNA, 19 bp, Mus musculus
  siRNA target sequence for Map3k7ip2 (NM_138667.1,757-775).
gcagacacaacaacattct

SEQ ID NO: 752442 - DNA, 19 bp, Mus musculus
  siRNA target sequence for Map3k7ip2 (NM_138667.1,778-796).
ctgggtgtctcagtttaat

SEQ ID NO: 752443 - DNA, 19 bp, Mus musculus
  siRNA target sequence for Map3k7ip2 (NM_138667.1,923-941).
gtctacatgcctatcagtt

SEQ ID NO: 752444 - DNA, 19 bp, Mus musculus
  siRNA target sequence for Map3k7ip2 (NM_138667.1,956-974).
caaccgccaaccattcact

SEQ ID NO: 752445 - DNA, 19 bp, Mus musculus
  siRNA target sequence for Map3k7ip2 (NM_138667.1,996-1014).
ctgcccatagccaatataa

SEQ ID NO: 752446 - DNA, 19 bp, Mus musculus
  siRNA target sequence for Map3k7ip2 (NM_138667.1,998-1016).
gcccatagccaatataaca

SEQ ID NO: 752447 - DNA, 19 bp, Mus musculus
  siRNA target sequence for Map3k7ip2 (NM_138667.1,999-1017).
cccatagccaatataacat

SEQ ID NO: 752448 - DNA, 19 bp, Mus musculus
  siRNA target sequence for Map3k7ip2 (NM_138667.1,1029-1047).
caacaggacctcgaaagaa

SEQ ID NO: 752449 - DNA, 19 bp, Mus musculus
  siRNA target sequence for Map3k7ip2 (NM_138667.1,1038-1056).
ctcgaaagaaccagataga

SEQ ID NO: 752450 - DNA, 19 bp, Mus musculus
  siRNA target sequence for Map3k7ip2 (NM_138667.1,1040-1058).
cgaaagaaccagatagaaa

SEQ ID NO: 752451 - DNA, 19 bp, Mus musculus
  siRNA target sequence for Map3k7ip2 (NM_138667.1,1045-1063).
gaaccagatagaaatcaaa

SEQ ID NO: 752452 - DNA, 19 bp, Mus musculus
  siRNA target sequence for Map3k7ip2 (NM_138667.1,1084-1102).
cagttcttcaaaattacgt

SEQ ID NO: 752453 - DNA, 19 bp, Mus musculus
  siRNA target sequence for Map3k7ip2 (NM_138667.1,1161-1179).
gaaatcagcccactgttta

SEQ ID NO: 752454 - DNA, 19 bp, Mus musculus
  siRNA target sequence for Map3k7ip2 (NM_138667.1,1189-1207).
cagtcctccaaatactgat

SEQ ID NO: 752455 - DNA, 19 bp, Mus musculus
  siRNA target sequence for Map3k7ip2 (NM_138667.1,1210-1228).
gatgatctcccgtagtcaa

SEQ ID NO: 752456 - DNA, 19 bp, Mus musculus
  siRNA target sequence for Map3k7ip2 (NM_138667.1,1226-1244).
caacccaaggtctatattt

SEQ ID NO: 752457 - DNA, 19 bp, Mus musculus
  siRNA target sequence for Map3k7ip2 (NM_138667.1,1270-1288).
gcaaggcatgcggaatcaa

SEQ ID NO: 752458 - DNA, 19 bp, Mus musculus
  siRNA target sequence for Map3k7ip2 (NM_138667.1,1289-1307).
ccgacactcttcatatcta

SEQ ID NO: 752459 - DNA, 19 bp, Mus musculus
  siRNA target sequence for Map3k7ip2 (NM_138667.1,1291-1309).
gacactcttcatatctaca

SEQ ID NO: 752460 - DNA, 19 bp, Mus musculus
  siRNA target sequence for Map3k7ip2 (NM_138667.1,1439-1457).
gtcactcaacccaacacaa

SEQ ID NO: 752461 - DNA, 19 bp, Mus musculus
  siRNA target sequence for Map3k7ip2 (NM_138667.1,1513-1531).
ggtggtctccccaaccttt

SEQ ID NO: 752462 - DNA, 19 bp, Mus musculus
  siRNA target sequence for Map3k7ip2 (NM_138667.1,1607-1625).
ctagcacatgtggatagaa

SEQ ID NO: 752463 - DNA, 19 bp, Mus musculus
  siRNA target sequence for Map3k7ip2 (NM_138667.1,2088-2106).
ctgcctgtacgtttctgaa

SEQ ID NO: 752464 - DNA, 19 bp, Mus musculus
  siRNA target sequence for 1810047C23Rik (NM_138668.1,88-106).
ggatatactcttcagaata

SEQ ID NO: 752465 - DNA, 19 bp, Mus musculus
  siRNA target sequence for 1810047C23Rik (NM_138668.1,114-132).
gcttcgatctggcttttca

SEQ ID NO: 752466 - DNA, 19 bp, Mus musculus
  siRNA target sequence for 1810047C23Rik (NM_138668.1,133-151).
gctagcaccacctaaagaa

SEQ ID NO: 752467 - DNA, 19 bp, Mus musculus
  siRNA target sequence for 1810047C23Rik (NM_138668.1,307-325).
gaacgtagtgcgcttcatt

SEQ ID NO: 752468 - DNA, 19 bp, Mus musculus
  siRNA target sequence for 1810047C23Rik (NM_138668.1,310-328).
cgtagtgcgcttcattcaa

SEQ ID NO: 752469 - DNA, 19 bp, Mus musculus
  siRNA target sequence for 1810047C23Rik (NM_138668.1,311-329).
gtagtgcgcttcattcaat

SEQ ID NO: 752470 - DNA, 19 bp, Mus musculus
  siRNA target sequence for 1810047C23Rik (NM_138668.1,316-334).
gcgcttcattcaatttgat

SEQ ID NO: 752471 - DNA, 19 bp, Mus musculus
  siRNA target sequence for 1810047C23Rik (NM_138668.1,319-337).
cttcattcaatttgatcaa

SEQ ID NO: 752472 - DNA, 19 bp, Mus musculus
  siRNA target sequence for 1810047C23Rik (NM_138668.1,387-405).
ctgacacgcaacagatagt

SEQ ID NO: 752473 - DNA, 19 bp, Mus musculus
  siRNA target sequence for 1810047C23Rik (NM_138668.1,389-407).
gacacgcaacagatagtaa

SEQ ID NO: 752474 - DNA, 19 bp, Mus musculus
  siRNA target sequence for 1810047C23Rik (NM_138668.1,391-409).
cacgcaacagatagtaaat

SEQ ID NO: 752475 - DNA, 19 bp, Mus musculus
  siRNA target sequence for 1810047C23Rik (NM_138668.1,393-411).
cgcaacagatagtaaatat

SEQ ID NO: 752476 - DNA, 19 bp, Mus musculus
  siRNA target sequence for 1810047C23Rik (NM_138668.1,394-412).
gcaacagatagtaaatata

SEQ ID NO: 752477 - DNA, 19 bp, Mus musculus
  siRNA target sequence for 1810047C23Rik (NM_138668.1,416-434).
ctcatgctggagatatcga

SEQ ID NO: 752478 - DNA, 19 bp, Mus musculus
  siRNA target sequence for 1810047C23Rik (NM_138668.1,482-500).
caccactacattaacatga

SEQ ID NO: 752479 - DNA, 19 bp, Mus musculus
  siRNA target sequence for 1810047C23Rik (NM_138668.1,547-565).
gggaaaagtgcgcaaactt

SEQ ID NO: 752480 - DNA, 19 bp, Mus musculus
  siRNA target sequence for 1810047C23Rik (NM_138668.1,549-567).
gaaaagtgcgcaaacttct

SEQ ID NO: 752481 - DNA, 19 bp, Mus musculus
  siRNA target sequence for 1810047C23Rik (NM_138668.1,648-666).
ccgagccactgcactttca

SEQ ID NO: 752482 - DNA, 19 bp, Mus musculus
  siRNA target sequence for 1810047C23Rik (NM_138668.1,649-667).
cgagccactgcactttcaa

SEQ ID NO: 752483 - DNA, 19 bp, Mus musculus
  siRNA target sequence for 1810047C23Rik (NM_138668.1,650-668).
gagccactgcactttcaat

SEQ ID NO: 752484 - DNA, 19 bp, Mus musculus
  siRNA target sequence for 1810047C23Rik (NM_138668.1,682-700).
gaatcttgtaacggtttta

SEQ ID NO: 752485 - DNA, 19 bp, Mus musculus
  siRNA target sequence for 1810047C23Rik (NM_138668.1,689-707).
gtaacggttttatatccat

SEQ ID NO: 752486 - DNA, 19 bp, Mus musculus
  siRNA target sequence for 1810047C23Rik (NM_138668.1,708-726).
caggaatcccagatgatca

SEQ ID NO: 752487 - DNA, 19 bp, Mus musculus
  siRNA target sequence for 1810047C23Rik (NM_138668.1,725-743).
cagctccaagcctatcgaa

SEQ ID NO: 752488 - DNA, 19 bp, Mus musculus
  siRNA target sequence for 1810047C23Rik (NM_138668.1,735-753).
cctatcgaaaggagttaca

SEQ ID NO: 752489 - DNA, 19 bp, Mus musculus
  siRNA target sequence for 1810047C23Rik (NM_138668.1,741-759).
gaaaggagttacatgatct

SEQ ID NO: 752490 - DNA, 19 bp, Mus musculus
  siRNA target sequence for 1810047C23Rik (NM_138668.1,769-787).
gcctcatgacagaccttat

SEQ ID NO: 752491 - DNA, 19 bp, Mus musculus
  siRNA target sequence for 1810047C23Rik (NM_138668.1,773-791).
catgacagaccttatttca

SEQ ID NO: 752492 - DNA, 19 bp, Mus musculus
  siRNA target sequence for 1810047C23Rik (NM_138668.1,780-798).
gaccttatttcaaaaggat

SEQ ID NO: 752493 - DNA, 19 bp, Mus musculus
  siRNA target sequence for 1810047C23Rik (NM_138668.1,809-827).
cactttccagatgaactat

SEQ ID NO: 752494 - DNA, 19 bp, Mus musculus
  siRNA target sequence for 1810047C23Rik (NM_138668.1,811-829).
ctttccagatgaactatat

SEQ ID NO: 752495 - DNA, 19 bp, Mus musculus
  siRNA target sequence for 1810047C23Rik (NM_138668.1,816-834).
cagatgaactatataaaga

SEQ ID NO: 752496 - DNA, 19 bp, Mus musculus
  siRNA target sequence for 1810047C23Rik (NM_138668.1,877-895).
catagagggtagtatgatt

SEQ ID NO: 752497 - DNA, 19 bp, Mus musculus
  siRNA target sequence for 1810047C23Rik (NM_138668.1,1423-1441).
ggatgcatactataactta

SEQ ID NO: 752498 - DNA, 19 bp, Mus musculus
  siRNA target sequence for 1810047C23Rik (NM_138668.1,1444-1462).
ccttcctcaacgacctaat

SEQ ID NO: 752499 - DNA, 19 bp, Mus musculus
  siRNA target sequence for BC019367 (NM_138675.2,42-60).
gggagacaggccgaagata

SEQ ID NO: 752500 - DNA, 19 bp, Mus musculus
  siRNA target sequence for BC019367 (NM_138675.2,174-192).
ggcgcgaaggaggagaatt

SEQ ID NO: 752501 - DNA, 19 bp, Mus musculus
  siRNA target sequence for BC019367 (NM_138675.2,175-193).
gcgcgaaggaggagaatta

SEQ ID NO: 752502 - DNA, 19 bp, Mus musculus
  siRNA target sequence for BC019367 (NM_138675.2,177-195).
gcgaaggaggagaattact

SEQ ID NO: 752503 - DNA, 19 bp, Mus musculus
  siRNA target sequence for BC019367 (NM_138675.2,264-282).
ctgaacgccctcaaaacca

SEQ ID NO: 752504 - DNA, 19 bp, Mus musculus
  siRNA target sequence for Butr1 (NM_138678.1,217-235).
gggaacggaaaatcagatt

SEQ ID NO: 752505 - DNA, 19 bp, Mus musculus
  siRNA target sequence for Butr1 (NM_138678.1,218-236).
ggaacggaaaatcagattt

SEQ ID NO: 752506 - DNA, 19 bp, Mus musculus
  siRNA target sequence for Butr1 (NM_138678.1,362-380).
cgtcagtcgtgcatgtgta

SEQ ID NO: 752507 - DNA, 19 bp, Mus musculus
  siRNA target sequence for Butr1 (NM_138678.1,365-383).
cagtcgtgcatgtgtacaa

SEQ ID NO: 752508 - DNA, 19 bp, Mus musculus
  siRNA target sequence for Butr1 (NM_138678.1,367-385).
gtcgtgcatgtgtacaaga

SEQ ID NO: 752509 - DNA, 19 bp, Mus musculus
  siRNA target sequence for Butr1 (NM_138678.1,369-387).
cgtgcatgtgtacaagaat

SEQ ID NO: 752510 - DNA, 19 bp, Mus musculus
  siRNA target sequence for Butr1 (NM_138678.1,384-402).
gaatggggaggatgtgtat

SEQ ID NO: 752511 - DNA, 19 bp, Mus musculus
  siRNA target sequence for Butr1 (NM_138678.1,405-423).
cgagcagatggtggaatat

SEQ ID NO: 752512 - DNA, 19 bp, Mus musculus
  siRNA target sequence for Butr1 (NM_138678.1,498-516).
gtttgacaacgggacttat

SEQ ID NO: 752513 - DNA, 19 bp, Mus musculus
  siRNA target sequence for Butr1 (NM_138678.1,502-520).
gacaacgggacttatcact

SEQ ID NO: 752514 - DNA, 19 bp, Mus musculus
  siRNA target sequence for Butr1 (NM_138678.1,678-696).
gtggctggaccttaaagga

SEQ ID NO: 752515 - DNA, 19 bp, Mus musculus
  siRNA target sequence for Butr1 (NM_138678.1,850-868).
gcagccgtagttaaggtat

SEQ ID NO: 752516 - DNA, 19 bp, Mus musculus
  siRNA target sequence for Butr1 (NM_138678.1,854-872).
ccgtagttaaggtatctgt

SEQ ID NO: 752517 - DNA, 19 bp, Mus musculus
  siRNA target sequence for Luc7l2 (NM_138680.1,354-372).
gctatgctggaccagttaa

SEQ ID NO: 752518 - DNA, 19 bp, Mus musculus
  siRNA target sequence for Luc7l2 (NM_138680.1,355-373).
ctatgctggaccagttaat

SEQ ID NO: 752519 - DNA, 19 bp, Mus musculus
  siRNA target sequence for Luc7l2 (NM_138680.1,380-398).
ctctcgggacggagatact

SEQ ID NO: 752520 - DNA, 19 bp, Mus musculus
  siRNA target sequence for Luc7l2 (NM_138680.1,397-415).
ctactcgtcaacgaatcaa

SEQ ID NO: 752521 - DNA, 19 bp, Mus musculus
  siRNA target sequence for Luc7l2 (NM_138680.1,400-418).
ctcgtcaacgaatcaaatt

SEQ ID NO: 752522 - DNA, 19 bp, Mus musculus
  siRNA target sequence for Luc7l2 (NM_138680.1,402-420).
cgtcaacgaatcaaattca

SEQ ID NO: 752523 - DNA, 19 bp, Mus musculus
  siRNA target sequence for Luc7l2 (NM_138680.1,421-439).
gcgatgacagagtatgcaa

SEQ ID NO: 752524 - DNA, 19 bp, Mus musculus
  siRNA target sequence for Luc7l2 (NM_138680.1,471-489).
gtcctttctggaacaagaa

SEQ ID NO: 752525 - DNA, 19 bp, Mus musculus
  siRNA target sequence for Luc7l2 (NM_138680.1,513-531).
gtccatgacctggctttaa

SEQ ID NO: 752526 - DNA, 19 bp, Mus musculus
  siRNA target sequence for Luc7l2 (NM_138680.1,515-533).
ccatgacctggctttaaga

SEQ ID NO: 752527 - DNA, 19 bp, Mus musculus
  siRNA target sequence for Luc7l2 (NM_138680.1,524-542).
ggctttaagagcagattat

SEQ ID NO: 752528 - DNA, 19 bp, Mus musculus
  siRNA target sequence for Luc7l2 (NM_138680.1,551-569).
gtccaaagaacaagacttt

SEQ ID NO: 752529 - DNA, 19 bp, Mus musculus
  siRNA target sequence for Luc7l2 (NM_138680.1,608-626).
cattgcagattgtgataga

SEQ ID NO: 752530 - DNA, 19 bp, Mus musculus
  siRNA target sequence for Luc7l2 (NM_138680.1,621-639).
gatagaagaacagaagtat

SEQ ID NO: 752531 - DNA, 19 bp, Mus musculus
  siRNA target sequence for Luc7l2 (NM_138680.1,625-643).
gaagaacagaagtatctaa

SEQ ID NO: 752532 - DNA, 19 bp, Mus musculus
  siRNA target sequence for Luc7l2 (NM_138680.1,697-715).
cagagcgtgttcatgagtt

SEQ ID NO: 752533 - DNA, 19 bp, Mus musculus
  siRNA target sequence for Luc7l2 (NM_138680.1,699-717).
gagcgtgttcatgagttaa

SEQ ID NO: 752534 - DNA, 19 bp, Mus musculus
  siRNA target sequence for Luc7l2 (NM_138680.1,840-858).
gaagtttatcggaactcta

SEQ ID NO: 752535 - DNA, 19 bp, Mus musculus
  siRNA target sequence for Luc7l2 (NM_138680.1,905-923).
ctgctctgcgtatttaggt

SEQ ID NO: 752536 - DNA, 19 bp, Mus musculus
  siRNA target sequence for Luc7l2 (NM_138680.1,913-931).
cgtatttaggtcttcatga

SEQ ID NO: 752537 - DNA, 19 bp, Mus musculus
  siRNA target sequence for Luc7l2 (NM_138680.1,938-956).
caggcgactggctgatcat

SEQ ID NO: 752538 - DNA, 19 bp, Mus musculus
  siRNA target sequence for Luc7l2 (NM_138680.1,940-958).
ggcgactggctgatcattt

SEQ ID NO: 752539 - DNA, 19 bp, Mus musculus
  siRNA target sequence for Luc7l2 (NM_138680.1,951-969).
gatcattttgggggtaaat

SEQ ID NO: 752540 - DNA, 19 bp, Mus musculus
  siRNA target sequence for Luc7l2 (NM_138680.1,971-989).
gcacctgggatttattgaa

SEQ ID NO: 752541 - DNA, 19 bp, Mus musculus
  siRNA target sequence for Luc7l2 (NM_138680.1,975-993).
ctgggatttattgaaataa

SEQ ID NO: 752542 - DNA, 19 bp, Mus musculus
  siRNA target sequence for Luc7l2 (NM_138680.1,1108-1126).
ggtcccgatcacatagcaa

SEQ ID NO: 752543 - DNA, 19 bp, Mus musculus
  siRNA target sequence for Luc7l2 (NM_138680.1,1112-1130).
ccgatcacatagcaagaat

SEQ ID NO: 752544 - DNA, 19 bp, Mus musculus
  siRNA target sequence for Luc7l2 (NM_138680.1,1124-1142).
caagaatcccaaaagatct

SEQ ID NO: 752545 - DNA, 19 bp, Mus musculus
  siRNA target sequence for Luc7l2 (NM_138680.1,1287-1305).
cggcacagttcaagagata

SEQ ID NO: 752546 - DNA, 19 bp, Mus musculus
  siRNA target sequence for Luc7l2 (NM_138680.1,1325-1343).
gaggagatcctcaaaagaa

SEQ ID NO: 752547 - DNA, 19 bp, Mus musculus
  siRNA target sequence for Luc7l2 (NM_138680.1,1405-1423).
ctcgtgaccgagatcgaaa

SEQ ID NO: 752548 - DNA, 19 bp, Mus musculus
  siRNA target sequence for Luc7l2 (NM_138680.1,1410-1428).
gaccgagatcgaaaagata

SEQ ID NO: 752549 - DNA, 19 bp, Mus musculus
  siRNA target sequence for Luc7l2 (NM_138680.1,1413-1431).
cgagatcgaaaagataaga

SEQ ID NO: 752550 - DNA, 19 bp, Mus musculus
  siRNA target sequence for Luc7l2 (NM_138680.1,1436-1454).
gtcctatgagagtgctaat

SEQ ID NO: 752551 - DNA, 19 bp, Mus musculus
  siRNA target sequence for Lrrc4 (NM_138682.1,175-193).
gcgcaagtgtggattctgt

SEQ ID NO: 752552 - DNA, 19 bp, Mus musculus
  siRNA target sequence for Lrrc4 (NM_138682.1,303-321).
ggtcccacagggtattcct

SEQ ID NO: 752553 - DNA, 19 bp, Mus musculus
  siRNA target sequence for Lrrc4 (NM_138682.1,304-322).
gtcccacagggtattcctt

SEQ ID NO: 752554 - DNA, 19 bp, Mus musculus
  siRNA target sequence for Lrrc4 (NM_138682.1,323-341).
ccaacacccggtatctcaa

SEQ ID NO: 752555 - DNA, 19 bp, Mus musculus
  siRNA target sequence for Lrrc4 (NM_138682.1,562-580).
cgaaacaatcccattgaga

SEQ ID NO: 752556 - DNA, 19 bp, Mus musculus
  siRNA target sequence for Lrrc4 (NM_138682.1,726-744).
ggatatgcccaatcttaca

SEQ ID NO: 752557 - DNA, 19 bp, Mus musculus
  siRNA target sequence for Lrrc4 (NM_138682.1,817-835).
ggcctaagctccctcaaaa

SEQ ID NO: 752558 - DNA, 19 bp, Mus musculus
  siRNA target sequence for Lrrc4 (NM_138682.1,818-836).
gcctaagctccctcaaaaa

SEQ ID NO: 752559 - DNA, 19 bp, Mus musculus
  siRNA target sequence for Lrrc4 (NM_138682.1,887-905).
ccctcgtggaactcaactt

SEQ ID NO: 752560 - DNA, 19 bp, Mus musculus
  siRNA target sequence for Lrrc4 (NM_138682.1,888-906).
cctcgtggaactcaactta

SEQ ID NO: 752561 - DNA, 19 bp, Mus musculus
  siRNA target sequence for Lrrc4 (NM_138682.1,910-928).
cacaataacctctcatctt

SEQ ID NO: 752562 - DNA, 19 bp, Mus musculus
  siRNA target sequence for Lrrc4 (NM_138682.1,973-991).
cacctacaccacaatcctt

SEQ ID NO: 752563 - DNA, 19 bp, Mus musculus
  siRNA target sequence for Lrrc4 (NM_138682.1,993-1011).
gaactgtgattgtgatatt

SEQ ID NO: 752564 - DNA, 19 bp, Mus musculus
  siRNA target sequence for Lrrc4 (NM_138682.1,1025-1043).
ggtggcttcgggagtatat

SEQ ID NO: 752565 - DNA, 19 bp, Mus musculus
  siRNA target sequence for Lrrc4 (NM_138682.1,1036-1054).
gagtatatcccaaccaatt

SEQ ID NO: 752566 - DNA, 19 bp, Mus musculus
  siRNA target sequence for Lrrc4 (NM_138682.1,1283-1301).
cccggatctctgttctcaa

SEQ ID NO: 752567 - DNA, 19 bp, Mus musculus
  siRNA target sequence for Lrrc4 (NM_138682.1,1286-1304).
ggatctctgttctcaatga

SEQ ID NO: 752568 - DNA, 19 bp, Mus musculus
  siRNA target sequence for Lrrc4 (NM_138682.1,1287-1305).
gatctctgttctcaatgat

SEQ ID NO: 752569 - DNA, 19 bp, Mus musculus
  siRNA target sequence for Lrrc4 (NM_138682.1,1322-1340).
ctcgtgtgctgctcataga

SEQ ID NO: 752570 - DNA, 19 bp, Mus musculus
  siRNA target sequence for Lrrc4 (NM_138682.1,1391-1409).
cctcggcctacctcaatgt

SEQ ID NO: 752571 - DNA, 19 bp, Mus musculus
  siRNA target sequence for Lrrc4 (NM_138682.1,1443-1461).
cttcttcaccactgtaaca

SEQ ID NO: 752572 - DNA, 19 bp, Mus musculus
  siRNA target sequence for Lrrc4 (NM_138682.1,1489-1507).
gacataacacggaagtaca

SEQ ID NO: 752573 - DNA, 19 bp, Mus musculus
  siRNA target sequence for Lrrc4 (NM_138682.1,1531-1549).
ggttaccagccggcatata

SEQ ID NO: 752574 - DNA, 19 bp, Mus musculus
  siRNA target sequence for Lrrc4 (NM_138682.1,1702-1720).
ctagctgctgccatgttga

SEQ ID NO: 752575 - DNA, 19 bp, Mus musculus
  siRNA target sequence for Lrrc4 (NM_138682.1,1884-1902).
cacaatacatgaccatatt

SEQ ID NO: 752576 - DNA, 19 bp, Mus musculus
  siRNA target sequence for Lrrc4 (NM_138682.1,1886-1904).
caatacatgaccatattaa

SEQ ID NO: 752577 - DNA, 19 bp, Mus musculus
  siRNA target sequence for Lrrc4 (NM_138682.1,1894-1912).
gaccatattaactacaaca

SEQ ID NO: 752578 - DNA, 19 bp, Mus musculus
  siRNA target sequence for Lrrc4 (NM_138682.1,1982-2000).
ccactatctctgaacctta

SEQ ID NO: 752579 - DNA, 19 bp, Mus musculus
  siRNA target sequence for Lrrc4 (NM_138682.1,1983-2001).
cactatctctgaaccttat

SEQ ID NO: 752580 - DNA, 19 bp, Mus musculus
  siRNA target sequence for Lrrc4 (NM_138682.1,1985-2003).
ctatctctgaaccttatat

SEQ ID NO: 752581 - DNA, 19 bp, Mus musculus
  siRNA target sequence for Lrrc4 (NM_138682.1,1989-2007).
ctctgaaccttatataatt

SEQ ID NO: 752582 - DNA, 19 bp, Mus musculus
  siRNA target sequence for Lrrc4 (NM_138682.1,2028-2046).
ggtacaggaaactcaaata

SEQ ID NO: 752583 - DNA, 19 bp, Mus musculus
  siRNA target sequence for Lrrc4 (NM_138682.1,2029-2047).
gtacaggaaactcaaatat

SEQ ID NO: 752584 - DNA, 19 bp, Mus musculus
  siRNA target sequence for Rspondin (NM_138683.1,650-668).
ctcgcccaagctcttcatt

SEQ ID NO: 752585 - DNA, 19 bp, Mus musculus
  siRNA target sequence for Rspondin (NM_138683.1,652-670).
cgcccaagctcttcattct

SEQ ID NO: 752586 - DNA, 19 bp, Mus musculus
  siRNA target sequence for Rspondin (NM_138683.1,718-736).
gcccacctggatactttga

SEQ ID NO: 752587 - DNA, 19 bp, Mus musculus
  siRNA target sequence for Rspondin (NM_138683.1,719-737).
cccacctggatactttgat

SEQ ID NO: 752588 - DNA, 19 bp, Mus musculus
  siRNA target sequence for Rspondin (NM_138683.1,739-757).
cccgcaaccccgacatgaa

SEQ ID NO: 752589 - DNA, 19 bp, Mus musculus
  siRNA target sequence for Rspondin (NM_138683.1,742-760).
gcaaccccgacatgaacaa

SEQ ID NO: 752590 - DNA, 19 bp, Mus musculus
  siRNA target sequence for Rspondin (NM_138683.1,747-765).
cccgacatgaacaaatgca

SEQ ID NO: 752591 - DNA, 19 bp, Mus musculus
  siRNA target sequence for Rspondin (NM_138683.1,748-766).
ccgacatgaacaaatgcat

SEQ ID NO: 752592 - DNA, 19 bp, Mus musculus
  siRNA target sequence for Rspondin (NM_138683.1,908-926).
cggcagtcctgcacaatgt

SEQ ID NO: 752593 - DNA, 19 bp, Mus musculus
  siRNA target sequence for Rspondin (NM_138683.1,910-928).
gcagtcctgcacaatgtga

SEQ ID NO: 752594 - DNA, 19 bp, Mus musculus
  siRNA target sequence for Rspondin (NM_138683.1,915-933).
cctgcacaatgtgaaatga

SEQ ID NO: 752595 - DNA, 19 bp, Mus musculus
  siRNA target sequence for Rspondin (NM_138683.1,951-969).
ggaccctgctccaagaaga

SEQ ID NO: 752596 - DNA, 19 bp, Mus musculus
  siRNA target sequence for Rspondin (NM_138683.1,1193-1211).
caactctcggagacacaaa

SEQ ID NO: 752597 - DNA, 19 bp, Mus musculus
  siRNA target sequence for Sdpr (NM_138741.1,290-308).
gttccagcatccaaacaca

SEQ ID NO: 752598 - DNA, 19 bp, Mus musculus
  siRNA target sequence for Sdpr (NM_138741.1,435-453).
cacacactcctggataaat

SEQ ID NO: 752599 - DNA, 19 bp, Mus musculus
  siRNA target sequence for Sdpr (NM_138741.1,478-496).
gggagaaccagcacaacat

SEQ ID NO: 752600 - DNA, 19 bp, Mus musculus
  siRNA target sequence for Sdpr (NM_138741.1,710-728).
ccgacgcaaccacttcaaa

SEQ ID NO: 752601 - DNA, 19 bp, Mus musculus
  siRNA target sequence for Sdpr (NM_138741.1,712-730).
gacgcaaccacttcaaagt

SEQ ID NO: 752602 - DNA, 19 bp, Mus musculus
  siRNA target sequence for Sdpr (NM_138741.1,755-773).
gatccctgccagtgtgttt

SEQ ID NO: 752603 - DNA, 19 bp, Mus musculus
  siRNA target sequence for Sdpr (NM_138741.1,983-1001).
cctcaagaaagcgttttct

SEQ ID NO: 752604 - DNA, 19 bp, Mus musculus
  siRNA target sequence for Sdpr (NM_138741.1,994-1012).
cgttttctcgtcagaacat

SEQ ID NO: 752605 - DNA, 19 bp, Mus musculus
  siRNA target sequence for Sdpr (NM_138741.1,1002-1020).
cgtcagaacatcgagaaaa

SEQ ID NO: 752606 - DNA, 19 bp, Mus musculus
  siRNA target sequence for Sdpr (NM_138741.1,1032-1050).
ctgggaaccaagatcgtat

SEQ ID NO: 752607 - DNA, 19 bp, Mus musculus
  siRNA target sequence for Sdpr (NM_138741.1,1036-1054).
gaaccaagatcgtatctgt

SEQ ID NO: 752608 - DNA, 19 bp, Mus musculus
  siRNA target sequence for Sdpr (NM_138741.1,1145-1163).
ctcctttggtcgtaagaaa

SEQ ID NO: 752609 - DNA, 19 bp, Mus musculus
  siRNA target sequence for Sdpr (NM_138741.1,1147-1165).
cctttggtcgtaagaaagt

SEQ ID NO: 752610 - DNA, 19 bp, Mus musculus
  siRNA target sequence for Sdpr (NM_138741.1,1172-1190).
gggagaaagctctgtagaa

SEQ ID NO: 752611 - DNA, 19 bp, Mus musculus
  siRNA target sequence for Sdpr (NM_138741.1,1457-1475).
ggaggaacccagtgagaaa

SEQ ID NO: 752612 - DNA, 19 bp, Mus musculus
  siRNA target sequence for Nol1 (NM_138747.1,117-135).
gccgaaaggcccgaaaaca

SEQ ID NO: 752613 - DNA, 19 bp, Mus musculus
  siRNA target sequence for Nol1 (NM_138747.1,141-159).
gtgcggagaccgaattggt

SEQ ID NO: 752614 - DNA, 19 bp, Mus musculus
  siRNA target sequence for Nol1 (NM_138747.1,148-166).
gaccgaattggtcagattt

SEQ ID NO: 752615 - DNA, 19 bp, Mus musculus
  siRNA target sequence for Nol1 (NM_138747.1,173-191).
gcagctggcgatgagaatt

SEQ ID NO: 752616 - DNA, 19 bp, Mus musculus
  siRNA target sequence for Nol1 (NM_138747.1,177-195).
ctggcgatgagaattccaa

SEQ ID NO: 752617 - DNA, 19 bp, Mus musculus
  siRNA target sequence for Nol1 (NM_138747.1,251-269).
gacgtccctaagccaaata

SEQ ID NO: 752618 - DNA, 19 bp, Mus musculus
  siRNA target sequence for Nol1 (NM_138747.1,256-274).
ccctaagccaaataagtct

SEQ ID NO: 752619 - DNA, 19 bp, Mus musculus
  siRNA target sequence for Nol1 (NM_138747.1,292-310).
gcctggagagttatccaaa

SEQ ID NO: 752620 - DNA, 19 bp, Mus musculus
  siRNA target sequence for Nol1 (NM_138747.1,496-514).
gctgttgcctattgaaaga

SEQ ID NO: 752621 - DNA, 19 bp, Mus musculus
  siRNA target sequence for Nol1 (NM_138747.1,613-631).
gtcccaccccagaaaggat

SEQ ID NO: 752622 - DNA, 19 bp, Mus musculus
  siRNA target sequence for Nol1 (NM_138747.1,641-659).
gagggggatttgcagatta

SEQ ID NO: 752623 - DNA, 19 bp, Mus musculus
  siRNA target sequence for Nol1 (NM_138747.1,805-823).
ccggtctcgagctgagtat

SEQ ID NO: 752624 - DNA, 19 bp, Mus musculus
  siRNA target sequence for Nol1 (NM_138747.1,842-860).
gacctggccacttactatt

SEQ ID NO: 752625 - DNA, 19 bp, Mus musculus
  siRNA target sequence for Nol1 (NM_138747.1,844-862).
cctggccacttactattct

SEQ ID NO: 752626 - DNA, 19 bp, Mus musculus
  siRNA target sequence for Nol1 (NM_138747.1,850-868).
cacttactattcttatgga

SEQ ID NO: 752627 - DNA, 19 bp, Mus musculus
  siRNA target sequence for Nol1 (NM_138747.1,909-927).
ctgagttgatcgagttctt

SEQ ID NO: 752628 - DNA, 19 bp, Mus musculus
  siRNA target sequence for Nol1 (NM_138747.1,913-931).
gttgatcgagttcttagaa

SEQ ID NO: 752629 - DNA, 19 bp, Mus musculus
  siRNA target sequence for Nol1 (NM_138747.1,919-937).
cgagttcttagaagctaat

SEQ ID NO: 752630 - DNA, 19 bp, Mus musculus
  siRNA target sequence for Nol1 (NM_138747.1,1009-1027).
gatcaatcgtggggttaat

SEQ ID NO: 752631 - DNA, 19 bp, Mus musculus
  siRNA target sequence for Nol1 (NM_138747.1,1037-1055).
ctggggaagtggtcaaagt

SEQ ID NO: 752632 - DNA, 19 bp, Mus musculus
  siRNA target sequence for Nol1 (NM_138747.1,1105-1123).
gtacctcgctggacactat

SEQ ID NO: 752633 - DNA, 19 bp, Mus musculus
  siRNA target sequence for Nol1 (NM_138747.1,1130-1148).
cagggagcttccagtatgt

SEQ ID NO: 752634 - DNA, 19 bp, Mus musculus
  siRNA target sequence for Nol1 (NM_138747.1,1178-1196).
catgagcggatcttagaca

SEQ ID NO: 752635 - DNA, 19 bp, Mus musculus
  siRNA target sequence for Nol1 (NM_138747.1,1336-1354).
catcatcagccactatgat

SEQ ID NO: 752636 - DNA, 19 bp, Mus musculus
  siRNA target sequence for Nol1 (NM_138747.1,1372-1390).
ggtggtagggggctttgat

SEQ ID NO: 752637 - DNA, 19 bp, Mus musculus
  siRNA target sequence for Nol1 (NM_138747.1,1578-1596).
ccattacggtggaagagaa

SEQ ID NO: 752638 - DNA, 19 bp, Mus musculus
  siRNA target sequence for Nol1 (NM_138747.1,1732-1750).
ctaccctcacactcacaat

SEQ ID NO: 752639 - DNA, 19 bp, Mus musculus
  siRNA target sequence for Nol1 (NM_138747.1,1737-1755).
ctcacactcacaatatgga

SEQ ID NO: 752640 - DNA, 19 bp, Mus musculus
  siRNA target sequence for Nol1 (NM_138747.1,1747-1765).
caatatggacggtttcttt

SEQ ID NO: 752641 - DNA, 19 bp, Mus musculus
  siRNA target sequence for Nol1 (NM_138747.1,1768-1786).
cgccaagttcaagaaattt

SEQ ID NO: 752642 - DNA, 19 bp, Mus musculus
  siRNA target sequence for Nol1 (NM_138747.1,1769-1787).
gccaagttcaagaaatttt

SEQ ID NO: 752643 - DNA, 19 bp, Mus musculus
  siRNA target sequence for Nol1 (NM_138747.1,2069-2087).
gacgtgaacagcaaacgaa

SEQ ID NO: 752644 - DNA, 19 bp, Mus musculus
  siRNA target sequence for Tm4sf10 (NM_138751.1,292-310).
ggctggtgtgcatcttctt

SEQ ID NO: 752645 - DNA, 19 bp, Mus musculus
  siRNA target sequence for Tm4sf10 (NM_138751.1,358-376).
ccgcggaccaccagtacta

SEQ ID NO: 752646 - DNA, 19 bp, Mus musculus
  siRNA target sequence for Tm4sf10 (NM_138751.1,405-423).
cccgccaacctggatatct

SEQ ID NO: 752647 - DNA, 19 bp, Mus musculus
  siRNA target sequence for Tm4sf10 (NM_138751.1,482-500).
gggcggtgctgccatcatt

SEQ ID NO: 752648 - DNA, 19 bp, Mus musculus
  siRNA target sequence for Tm4sf10 (NM_138751.1,484-502).
gcggtgctgccatcattct

SEQ ID NO: 752649 - DNA, 19 bp, Mus musculus
  siRNA target sequence for Tm4sf10 (NM_138751.1,492-510).
gccatcattctcattgcat

SEQ ID NO: 752650 - DNA, 19 bp, Mus musculus
  siRNA target sequence for Tm4sf10 (NM_138751.1,578-596).
gctttttgcagcagttgtt

SEQ ID NO: 752651 - DNA, 19 bp, Mus musculus
  siRNA target sequence for Tm4sf10 (NM_138751.1,603-621).
gtctgcagcctggttcttt

SEQ ID NO: 752652 - DNA, 19 bp, Mus musculus
  siRNA target sequence for Tm4sf10 (NM_138751.1,689-707).
ggcctggggtgcaactata

SEQ ID NO: 752653 - DNA, 19 bp, Mus musculus
  siRNA target sequence for Tm4sf10 (NM_138751.1,690-708).
gcctggggtgcaactatat

SEQ ID NO: 752654 - DNA, 19 bp, Mus musculus
  siRNA target sequence for Tm4sf10 (NM_138751.1,691-709).
cctggggtgcaactatatt

SEQ ID NO: 752655 - DNA, 19 bp, Mus musculus
  siRNA target sequence for Tm4sf10 (NM_138751.1,692-710).
ctggggtgcaactatattt

SEQ ID NO: 752656 - DNA, 19 bp, Mus musculus
  siRNA target sequence for Tm4sf10 (NM_138751.1,696-714).
ggtgcaactatattttcat

SEQ ID NO: 752657 - DNA, 19 bp, Mus musculus
  siRNA target sequence for Tm4sf10 (NM_138751.1,717-735).
gggggtgccattctttatt

SEQ ID NO: 752658 - DNA, 19 bp, Mus musculus
  siRNA target sequence for Tm4sf10 (NM_138751.1,740-758).
gaaccctaagaactatgaa

SEQ ID NO: 752659 - DNA, 19 bp, Mus musculus
  siRNA target sequence for AI194308 (NM_138752.1,1737-1755).
cgaggacatctatgagttt

SEQ ID NO: 752660 - DNA, 19 bp, Mus musculus
  siRNA target sequence for AI194308 (NM_138752.1,1738-1756).
gaggacatctatgagttta

SEQ ID NO: 752661 - DNA, 19 bp, Mus musculus
  siRNA target sequence for AI194308 (NM_138752.1,1821-1839).
gcaaagaagcgaagatttt

SEQ ID NO: 752662 - DNA, 19 bp, Mus musculus
  siRNA target sequence for AI194308 (NM_138752.1,1840-1858).
gacatctatacattgtact

SEQ ID NO: 752663 - DNA, 19 bp, Mus musculus
  siRNA target sequence for AI194308 (NM_138752.1,1850-1868).
cattgtactgcatgaacta

SEQ ID NO: 752664 - DNA, 19 bp, Mus musculus
  siRNA target sequence for AI194308 (NM_138752.1,2345-2363).
cctacaagggccacatctt

SEQ ID NO: 752665 - DNA, 19 bp, Mus musculus
  siRNA target sequence for AI194308 (NM_138752.1,2395-2413).
cgggaccccttaggattta

SEQ ID NO: 752666 - DNA, 19 bp, Mus musculus
  siRNA target sequence for AI194308 (NM_138752.1,2730-2748).
gccagcaaaggaagcttat

SEQ ID NO: 752667 - DNA, 19 bp, Mus musculus
  siRNA target sequence for AI194308 (NM_138752.1,2732-2750).
cagcaaaggaagcttatgt

SEQ ID NO: 752668 - DNA, 19 bp, Mus musculus
  siRNA target sequence for AI194308 (NM_138752.1,2735-2753).
caaaggaagcttatgtcat

SEQ ID NO: 752669 - DNA, 19 bp, Mus musculus
  siRNA target sequence for AI194308 (NM_138752.1,2739-2757).
ggaagcttatgtcattttt

SEQ ID NO: 752670 - DNA, 19 bp, Mus musculus
  siRNA target sequence for AI194308 (NM_138752.1,2889-2907).
cccgtcggggacttccata

SEQ ID NO: 752671 - DNA, 19 bp, Mus musculus
  siRNA target sequence for AI194308 (NM_138752.1,2890-2908).
ccgtcggggacttccataa

SEQ ID NO: 752672 - DNA, 19 bp, Mus musculus
  siRNA target sequence for AI194308 (NM_138752.1,2892-2910).
gtcggggacttccataact

SEQ ID NO: 752673 - DNA, 19 bp, Mus musculus
  siRNA target sequence for AI194308 (NM_138752.1,3016-3034).
gaacccctcccgttccaat

SEQ ID NO: 752674 - DNA, 19 bp, Mus musculus
  siRNA target sequence for AI194308 (NM_138752.1,3134-3152).
gttcgagcgcagctgaaat

SEQ ID NO: 752675 - DNA, 19 bp, Mus musculus
  siRNA target sequence for AI194308 (NM_138752.1,3506-3524).
gcacctcggtccaaggatt

SEQ ID NO: 752676 - DNA, 19 bp, Mus musculus
  siRNA target sequence for AI194308 (NM_138752.1,3537-3555).
ggaataccgctcttgttca

SEQ ID NO: 752677 - DNA, 19 bp, Mus musculus
  siRNA target sequence for AI194308 (NM_138752.1,3630-3648).
cctggaggactctgatctt

SEQ ID NO: 752678 - DNA, 19 bp, Mus musculus
  siRNA target sequence for AI194308 (NM_138752.1,3631-3649).
ctggaggactctgatctta

SEQ ID NO: 752679 - DNA, 19 bp, Mus musculus
  siRNA target sequence for AI194308 (NM_138752.1,3672-3690).
gacaggaatgccacattca

SEQ ID NO: 752680 - DNA, 19 bp, Mus musculus
  siRNA target sequence for AI194308 (NM_138752.1,3961-3979).
gctgccacacctttgtgta

SEQ ID NO: 752681 - DNA, 19 bp, Mus musculus
  siRNA target sequence for AI194308 (NM_138752.1,3966-3984).
cacacctttgtgtattcaa

SEQ ID NO: 752682 - DNA, 19 bp, Mus musculus
  siRNA target sequence for AI194308 (NM_138752.1,4002-4020).
ccagaatctaaatgtttca

SEQ ID NO: 752683 - DNA, 19 bp, Mus musculus
  siRNA target sequence for AI194308 (NM_138752.1,4033-4051).
caaggccatctgagtagta

SEQ ID NO: 752684 - DNA, 19 bp, Mus musculus
  siRNA target sequence for AI194308 (NM_138752.1,4036-4054).
ggccatctgagtagtaact

SEQ ID NO: 752685 - DNA, 19 bp, Mus musculus
  siRNA target sequence for AI194308 (NM_138752.1,4373-4391).
gagacgtcagcattgatca

SEQ ID NO: 752686 - DNA, 19 bp, Mus musculus
  siRNA target sequence for AI194308 (NM_138752.1,4571-4589).
gcaaccctctaccatcttt

SEQ ID NO: 752687 - DNA, 19 bp, Mus musculus
  siRNA target sequence for AI194308 (NM_138752.1,4735-4753).
ccagctcccagactcttat

SEQ ID NO: 752688 - DNA, 19 bp, Mus musculus
  siRNA target sequence for AI194308 (NM_138752.1,4738-4756).
gctcccagactcttatctt

SEQ ID NO: 752689 - DNA, 19 bp, Mus musculus
  siRNA target sequence for AI194308 (NM_138752.1,4803-4821).
cgtgcctttgactgaacaa

SEQ ID NO: 752690 - DNA, 19 bp, Mus musculus
  siRNA target sequence for AI194308 (NM_138752.1,4833-4851).
ggatctgcaaggcctaatt

SEQ ID NO: 752691 - DNA, 19 bp, Mus musculus
  siRNA target sequence for AI194308 (NM_138752.1,4834-4852).
gatctgcaaggcctaatta

SEQ ID NO: 752692 - DNA, 19 bp, Mus musculus
  siRNA target sequence for AI194308 (NM_138752.1,4837-4855).
ctgcaaggcctaattactt

SEQ ID NO: 752693 - DNA, 19 bp, Mus musculus
  siRNA target sequence for AI194308 (NM_138752.1,4883-4901).
ccaaaccaaggggtttagt

SEQ ID NO: 752694 - DNA, 19 bp, Mus musculus
  siRNA target sequence for AI194308 (NM_138752.1,5172-5190).
ctatgccaccacagttagt

SEQ ID NO: 752695 - DNA, 19 bp, Mus musculus
  siRNA target sequence for AI194308 (NM_138752.1,5231-5249).
ctcaggtccggctaaacca

SEQ ID NO: 752696 - DNA, 19 bp, Mus musculus
  siRNA target sequence for 4933424B01Rik (NM_138757.1,478-496).
gaagattttttctgaatct

SEQ ID NO: 752697 - DNA, 19 bp, Mus musculus
  siRNA target sequence for 4933424B01Rik (NM_138757.1,628-646).
gtggacttgctcagtagaa

SEQ ID NO: 752698 - DNA, 19 bp, Mus musculus
  siRNA target sequence for 4933424B01Rik (NM_138757.1,703-721).
gaatttcattgttagtgat

SEQ ID NO: 752699 - DNA, 19 bp, Mus musculus
  siRNA target sequence for 4933424B01Rik (NM_138757.1,866-884).
gaaaccctttgcaagatta

SEQ ID NO: 752700 - DNA, 19 bp, Mus musculus
  siRNA target sequence for 4933424B01Rik (NM_138757.1,876-894).
gcaagattaccgaatacca

SEQ ID NO: 752701 - DNA, 19 bp, Mus musculus
  siRNA target sequence for 4933424B01Rik (NM_138757.1,895-913).
gcatgaggctcgcacttta

SEQ ID NO: 752702 - DNA, 19 bp, Mus musculus
  siRNA target sequence for 4933424B01Rik (NM_138757.1,951-969).
ggataatctgcatcacaaa

SEQ ID NO: 752703 - DNA, 19 bp, Mus musculus
  siRNA target sequence for 4933424B01Rik (NM_138757.1,952-970).
gataatctgcatcacaaat

SEQ ID NO: 752704 - DNA, 19 bp, Mus musculus
  siRNA target sequence for 4933424B01Rik (NM_138757.1,989-1007).
gtccgaatgctcgaagatt

SEQ ID NO: 752705 - DNA, 19 bp, Mus musculus
  siRNA target sequence for 4933424B01Rik (NM_138757.1,991-1009).
ccgaatgctcgaagattgt

SEQ ID NO: 752706 - DNA, 19 bp, Mus musculus
  siRNA target sequence for 4933424B01Rik (NM_138757.1,1008-1026).
gtgtccaggaaacaattca

SEQ ID NO: 752707 - DNA, 19 bp, Mus musculus
  siRNA target sequence for 4933424B01Rik (NM_138757.1,1047-1065).
caaattcagatcatctcat

SEQ ID NO: 752708 - DNA, 19 bp, Mus musculus
  siRNA target sequence for 4933424B01Rik (NM_138757.1,1058-1076).
catctcatgcagattcaaa

SEQ ID NO: 752709 - DNA, 19 bp, Mus musculus
  siRNA target sequence for 4933424B01Rik (NM_138757.1,1061-1079).
ctcatgcagattcaaaaat

SEQ ID NO: 752710 - DNA, 19 bp, Mus musculus
  siRNA target sequence for 4933424B01Rik (NM_138757.1,1080-1098).
gtgagttggtcttgattca

SEQ ID NO: 752711 - DNA, 19 bp, Mus musculus
  siRNA target sequence for 4933424B01Rik (NM_138757.1,1082-1100).
gagttggtcttgattcaca

SEQ ID NO: 752712 - DNA, 19 bp, Mus musculus
  siRNA target sequence for 4933424B01Rik (NM_138757.1,1127-1145).
gtgtctgaccgtcctaaaa

SEQ ID NO: 752713 - DNA, 19 bp, Mus musculus
  siRNA target sequence for 4933424B01Rik (NM_138757.1,1129-1147).
gtctgaccgtcctaaaaaa

SEQ ID NO: 752714 - DNA, 19 bp, Mus musculus
  siRNA target sequence for 4933424B01Rik (NM_138757.1,1131-1149).
ctgaccgtcctaaaaaaga

SEQ ID NO: 752715 - DNA, 19 bp, Mus musculus
  siRNA target sequence for 4933424B01Rik (NM_138757.1,1199-1217).
catcttgctaccaagttga

SEQ ID NO: 752716 - DNA, 19 bp, Mus musculus
  siRNA target sequence for 4933424B01Rik (NM_138757.1,1210-1228).
caagttgaatgttctagta

SEQ ID NO: 752717 - DNA, 19 bp, Mus musculus
  siRNA target sequence for 4933424B01Rik (NM_138757.1,1220-1238).
gttctagtacagcaacatt

SEQ ID NO: 752718 - DNA, 19 bp, Mus musculus
  siRNA target sequence for 4933424B01Rik (NM_138757.1,1226-1244).
gtacagcaacattttgact

SEQ ID NO: 752719 - DNA, 19 bp, Mus musculus
  siRNA target sequence for 4933424B01Rik (NM_138757.1,1251-1269).
caacgaccatcacaaacat

SEQ ID NO: 752720 - DNA, 19 bp, Mus musculus
  siRNA target sequence for 4933424B01Rik (NM_138757.1,1321-1339).
gctacttcatcacaaagat

SEQ ID NO: 752721 - DNA, 19 bp, Mus musculus
  siRNA target sequence for 4933424B01Rik (NM_138757.1,1443-1461).
ccaacagcattgaattgca

SEQ ID NO: 752722 - DNA, 19 bp, Mus musculus
  siRNA target sequence for 4933424B01Rik (NM_138757.1,1664-1682).
gaagatccgccttcaatta

SEQ ID NO: 752723 - DNA, 19 bp, Mus musculus
  siRNA target sequence for 4933424B01Rik (NM_138757.1,1707-1725).
cagactaccggattacaga

SEQ ID NO: 752724 - DNA, 19 bp, Mus musculus
  siRNA target sequence for 4933424B01Rik (NM_138757.1,1709-1727).
gactaccggattacagatt

SEQ ID NO: 752725 - DNA, 19 bp, Mus musculus
  siRNA target sequence for 4933424B01Rik (NM_138757.1,1711-1729).
ctaccggattacagatttt

SEQ ID NO: 752726 - DNA, 19 bp, Mus musculus
  siRNA target sequence for 4933424B01Rik (NM_138757.1,1714-1732).
ccggattacagattttggt

SEQ ID NO: 752727 - DNA, 19 bp, Mus musculus
  siRNA target sequence for 4933424B01Rik (NM_138757.1,1750-1768).
caggttaactccttttcta

SEQ ID NO: 752728 - DNA, 19 bp, Mus musculus
  siRNA target sequence for 4933424B01Rik (NM_138757.1,1752-1770).
ggttaactccttttctaga

SEQ ID NO: 752729 - DNA, 19 bp, Mus musculus
  siRNA target sequence for 4933424B01Rik (NM_138757.1,1771-1789).
ccccagatataaaatcgat

SEQ ID NO: 752730 - DNA, 19 bp, Mus musculus
  siRNA target sequence for 4933424B01Rik (NM_138757.1,1807-1825).
gttggagcgtgcaaaggat

SEQ ID NO: 752731 - DNA, 19 bp, Mus musculus
  siRNA target sequence for 4933424B01Rik (NM_138757.1,1813-1831).
gcgtgcaaaggatcagtta

SEQ ID NO: 752732 - DNA, 19 bp, Mus musculus
  siRNA target sequence for 4933424B01Rik (NM_138757.1,1815-1833).
gtgcaaaggatcagttaga

SEQ ID NO: 752733 - DNA, 19 bp, Mus musculus
  siRNA target sequence for 4933424B01Rik (NM_138757.1,1817-1835).
gcaaaggatcagttagaaa

SEQ ID NO: 752734 - DNA, 19 bp, Mus musculus
  siRNA target sequence for 4933424B01Rik (NM_138757.1,1818-1836).
caaaggatcagttagaaaa

SEQ ID NO: 752735 - DNA, 19 bp, Mus musculus
  siRNA target sequence for 4933424B01Rik (NM_138757.1,1843-1861).
ccgttactggcccatgatt

SEQ ID NO: 752736 - DNA, 19 bp, Mus musculus
  siRNA target sequence for 4933424B01Rik (NM_138757.1,1844-1862).
cgttactggcccatgatta

SEQ ID NO: 752737 - DNA, 19 bp, Mus musculus
  siRNA target sequence for 4933424B01Rik (NM_138757.1,1845-1863).
gttactggcccatgattat

SEQ ID NO: 752738 - DNA, 19 bp, Mus musculus
  siRNA target sequence for 4933424B01Rik (NM_138757.1,1849-1867).
ctggcccatgattatttca

SEQ ID NO: 752739 - DNA, 19 bp, Mus musculus
  siRNA target sequence for 4933424B01Rik (NM_138757.1,1851-1869).
ggcccatgattatttcaca

SEQ ID NO: 752740 - DNA, 19 bp, Mus musculus
  siRNA target sequence for 4933424B01Rik (NM_138757.1,1868-1886).
caaaccaccattttcaaca

SEQ ID NO: 752741 - DNA, 19 bp, Mus musculus
  siRNA target sequence for 4933424B01Rik (NM_138757.1,1888-1906).
gcaagcggtagttccatta

SEQ ID NO: 752742 - DNA, 19 bp, Mus musculus
  siRNA target sequence for 4933424B01Rik (NM_138757.1,1902-1920).
cattagctggtgtcattgt

SEQ ID NO: 752743 - DNA, 19 bp, Mus musculus
  siRNA target sequence for 4933424B01Rik (NM_138757.1,1937-1955).
gaagaggatgtgttaaact

SEQ ID NO: 752744 - DNA, 19 bp, Mus musculus
  siRNA target sequence for 4933424B01Rik (NM_138757.1,1960-1978).
gaagaccatatacaactta

SEQ ID NO: 752745 - DNA, 19 bp, Mus musculus
  siRNA target sequence for 4933424B01Rik (NM_138757.1,1963-1981).
gaccatatacaacttagtt

SEQ ID NO: 752746 - DNA, 19 bp, Mus musculus
  siRNA target sequence for 4933424B01Rik (NM_138757.1,1965-1983).
ccatatacaacttagttga

SEQ ID NO: 752747 - DNA, 19 bp, Mus musculus
  siRNA target sequence for 4933424B01Rik (NM_138757.1,1966-1984).
catatacaacttagttgat

SEQ ID NO: 752748 - DNA, 19 bp, Mus musculus
  siRNA target sequence for 4933424B01Rik (NM_138757.1,1972-1990).
caacttagttgatatggaa

SEQ ID NO: 752749 - DNA, 19 bp, Mus musculus
  siRNA target sequence for 4933424B01Rik (NM_138757.1,2054-2072).
gaacagtaccggatcatgt

SEQ ID NO: 752750 - DNA, 19 bp, Mus musculus
  siRNA target sequence for 4933424B01Rik (NM_138757.1,2062-2080).
ccggatcatgtggaatgaa

SEQ ID NO: 752751 - DNA, 19 bp, Mus musculus
  siRNA target sequence for 4933424B01Rik (NM_138757.1,2064-2082).
ggatcatgtggaatgaact

SEQ ID NO: 752752 - DNA, 19 bp, Mus musculus
  siRNA target sequence for 4933424B01Rik (NM_138757.1,2267-2285).
ccggatgcagacagattga

SEQ ID NO: 752753 - DNA, 19 bp, Mus musculus
  siRNA target sequence for 4933424B01Rik (NM_138757.1,2399-2417).
ccacacatggaaaagtcta

SEQ ID NO: 752754 - DNA, 19 bp, Mus musculus
  siRNA target sequence for 4933424B01Rik (NM_138757.1,2420-2438).
gggccagtgtccttattat

SEQ ID NO: 752755 - DNA, 19 bp, Mus musculus
  siRNA target sequence for 4933424B01Rik (NM_138757.1,2439-2457).
ccttgtggagtaacagaat

SEQ ID NO: 752756 - DNA, 19 bp, Mus musculus
  siRNA target sequence for 4933424B01Rik (NM_138757.1,2446-2464).
gagtaacagaataaacact

SEQ ID NO: 752757 - DNA, 19 bp, Mus musculus
  siRNA target sequence for 4933424B01Rik (NM_138757.1,2497-2515).
gcgtttgaactctgtcaat

SEQ ID NO: 752758 - DNA, 19 bp, Mus musculus
  siRNA target sequence for 4933424B01Rik (NM_138757.1,2503-2521).
gaactctgtcaataacaga

SEQ ID NO: 752759 - DNA, 19 bp, Mus musculus
  siRNA target sequence for 4933424B01Rik (NM_138757.1,2586-2604).
gaactgcaatccctttctt

SEQ ID NO: 752760 - DNA, 19 bp, Mus musculus
  siRNA target sequence for 4933424B01Rik (NM_138757.1,2589-2607).
ctgcaatccctttcttaaa

SEQ ID NO: 752761 - DNA, 19 bp, Mus musculus
  siRNA target sequence for 4933424B01Rik (NM_138757.1,2615-2633).
cgttctcctgttgtgaata

SEQ ID NO: 752762 - DNA, 19 bp, Mus musculus
  siRNA target sequence for BC021608 (NM_138951.1,510-528).
cgggctactggcgagattt

SEQ ID NO: 752763 - DNA, 19 bp, Mus musculus
  siRNA target sequence for BC021608 (NM_138951.1,512-530).
ggctactggcgagatttca

SEQ ID NO: 752764 - DNA, 19 bp, Mus musculus
  siRNA target sequence for Ell2 (NM_138953.1,558-576).
gcatccagtgtctcacaaa

SEQ ID NO: 752765 - DNA, 19 bp, Mus musculus
  siRNA target sequence for Ell2 (NM_138953.1,579-597).
gtccaaaaagaagtctaaa

SEQ ID NO: 752766 - DNA, 19 bp, Mus musculus
  siRNA target sequence for Ell2 (NM_138953.1,607-625).
gaaaaggaccaaataaaga

SEQ ID NO: 752767 - DNA, 19 bp, Mus musculus
  siRNA target sequence for Ell2 (NM_138953.1,690-708).
gagtaatgccagtccaaat

SEQ ID NO: 752768 - DNA, 19 bp, Mus musculus
  siRNA target sequence for Ell2 (NM_138953.1,699-717).
cagtccaaatcccaatgaa

SEQ ID NO: 752769 - DNA, 19 bp, Mus musculus
  siRNA target sequence for Ell2 (NM_138953.1,750-768).
gccttcttcagcacttgaa

SEQ ID NO: 752770 - DNA, 19 bp, Mus musculus
  siRNA target sequence for Ell2 (NM_138953.1,761-779).
cacttgaactcccagatta

SEQ ID NO: 752771 - DNA, 19 bp, Mus musculus
  siRNA target sequence for Ell2 (NM_138953.1,766-784).
gaactcccagattatttga

SEQ ID NO: 752772 - DNA, 19 bp, Mus musculus
  siRNA target sequence for Ell2 (NM_138953.1,769-787).
ctcccagattatttgataa

SEQ ID NO: 752773 - DNA, 19 bp, Mus musculus
  siRNA target sequence for Ell2 (NM_138953.1,783-801).
gataaaatatattgctatt

SEQ ID NO: 752774 - DNA, 19 bp, Mus musculus
  siRNA target sequence for Ell2 (NM_138953.1,811-829).
gagcaacgccagaattaca

SEQ ID NO: 752775 - DNA, 19 bp, Mus musculus
  siRNA target sequence for Ell2 (NM_138953.1,837-855).
cttcaatgctgagtatgat

SEQ ID NO: 752776 - DNA, 19 bp, Mus musculus
  siRNA target sequence for Ell2 (NM_138953.1,889-907).
gtagccaggagatttatta

SEQ ID NO: 752777 - DNA, 19 bp, Mus musculus
  siRNA target sequence for Ell2 (NM_138953.1,1010-1028).
ccaattaccatgaagaaaa

SEQ ID NO: 752778 - DNA, 19 bp, Mus musculus
  siRNA target sequence for Ell2 (NM_138953.1,1053-1071).
caagctggctcacatcaaa

SEQ ID NO: 752779 - DNA, 19 bp, Mus musculus
  siRNA target sequence for Ell2 (NM_138953.1,1061-1079).
ctcacatcaaaagactaat

SEQ ID NO: 752780 - DNA, 19 bp, Mus musculus
  siRNA target sequence for Vps54 (NM_139061.1,148-166).
ggaagcagcagtgatgttt

SEQ ID NO: 752781 - DNA, 19 bp, Mus musculus
  siRNA target sequence for Vps54 (NM_139061.1,237-255).
ggaacccacaggtgattca

SEQ ID NO: 752782 - DNA, 19 bp, Mus musculus
  siRNA target sequence for Vps54 (NM_139061.1,243-261).
cacaggtgattcacatact

SEQ ID NO: 752783 - DNA, 19 bp, Mus musculus
  siRNA target sequence for Vps54 (NM_139061.1,247-265).
ggtgattcacatactttat

SEQ ID NO: 752784 - DNA, 19 bp, Mus musculus
  siRNA target sequence for Vps54 (NM_139061.1,268-286).
gttgccccatctctagtta

SEQ ID NO: 752785 - DNA, 19 bp, Mus musculus
  siRNA target sequence for Vps54 (NM_139061.1,307-325).
gtgtatcattccaaagtaa

SEQ ID NO: 752786 - DNA, 19 bp, Mus musculus
  siRNA target sequence for Vps54 (NM_139061.1,309-327).
gtatcattccaaagtaaat

SEQ ID NO: 752787 - DNA, 19 bp, Mus musculus
  siRNA target sequence for Vps54 (NM_139061.1,346-364).
gatcctacactagcaaaaa

SEQ ID NO: 752788 - DNA, 19 bp, Mus musculus
  siRNA target sequence for Vps54 (NM_139061.1,373-391).
gacttcttcacaaaaactt

SEQ ID NO: 752789 - DNA, 19 bp, Mus musculus
  siRNA target sequence for Vps54 (NM_139061.1,389-407).
cttggggattggactttgt

SEQ ID NO: 752790 - DNA, 19 bp, Mus musculus
  siRNA target sequence for Vps54 (NM_139061.1,450-468).
caaggagaattttatagca

SEQ ID NO: 752791 - DNA, 19 bp, Mus musculus
  siRNA target sequence for Vps54 (NM_139061.1,507-525).
gagatgcaagaatatttgt

SEQ ID NO: 752792 - DNA, 19 bp, Mus musculus
  siRNA target sequence for Vps54 (NM_139061.1,524-542).
gtcctcctaaagatacctt

SEQ ID NO: 752793 - DNA, 19 bp, Mus musculus
  siRNA target sequence for Vps54 (NM_139061.1,529-547).
cctaaagatacctttgaca

SEQ ID NO: 752794 - DNA, 19 bp, Mus musculus
  siRNA target sequence for Vps54 (NM_139061.1,548-566).
ggactcttttacatattca

SEQ ID NO: 752795 - DNA, 19 bp, Mus musculus
  siRNA target sequence for Vps54 (NM_139061.1,588-606).
ggagcaagtacctaagatt

SEQ ID NO: 752796 - DNA, 19 bp, Mus musculus
  siRNA target sequence for Vps54 (NM_139061.1,589-607).
gagcaagtacctaagattt

SEQ ID NO: 752797 - DNA, 19 bp, Mus musculus
  siRNA target sequence for Vps54 (NM_139061.1,592-610).
caagtacctaagattttta

SEQ ID NO: 752798 - DNA, 19 bp, Mus musculus
  siRNA target sequence for Vps54 (NM_139061.1,619-637).
gattttgccttggatgatt

SEQ ID NO: 752799 - DNA, 19 bp, Mus musculus
  siRNA target sequence for Vps54 (NM_139061.1,627-645).
cttggatgattctttaact

SEQ ID NO: 752800 - DNA, 19 bp, Mus musculus
  siRNA target sequence for Vps54 (NM_139061.1,655-673).
gttttaccatggtctcatt

SEQ ID NO: 752801 - DNA, 19 bp, Mus musculus
  siRNA target sequence for Vps54 (NM_139061.1,661-679).
ccatggtctcattttaata

SEQ ID NO: 752802 - DNA, 19 bp, Mus musculus
  siRNA target sequence for Vps54 (NM_139061.1,729-747).
ggaaaagctgagccattat

SEQ ID NO: 752803 - DNA, 19 bp, Mus musculus
  siRNA target sequence for Vps54 (NM_139061.1,780-798).
gatctctctacgttcagaa

SEQ ID NO: 752804 - DNA, 19 bp, Mus musculus
  siRNA target sequence for Vps54 (NM_139061.1,785-803).
ctctacgttcagaagcatt

SEQ ID NO: 752805 - DNA, 19 bp, Mus musculus
  siRNA target sequence for Vps54 (NM_139061.1,818-836).
cctctcaacacgaattgca

SEQ ID NO: 752806 - DNA, 19 bp, Mus musculus
  siRNA target sequence for Vps54 (NM_139061.1,837-855).
ggactacctcaagaaaact

SEQ ID NO: 752807 - DNA, 19 bp, Mus musculus
  siRNA target sequence for Vps54 (NM_139061.1,873-891).
gcttcgagataaaattgca

SEQ ID NO: 752808 - DNA, 19 bp, Mus musculus
  siRNA target sequence for Vps54 (NM_139061.1,889-907).
gcacagattgataaagtta

SEQ ID NO: 752809 - DNA, 19 bp, Mus musculus
  siRNA target sequence for Vps54 (NM_139061.1,916-934).
ggatcactacagattttaa

SEQ ID NO: 752810 - DNA, 19 bp, Mus musculus
  siRNA target sequence for Vps54 (NM_139061.1,937-955).
ctggcacttaccagaaata

SEQ ID NO: 752811 - DNA, 19 bp, Mus musculus
  siRNA target sequence for Vps54 (NM_139061.1,939-957).
ggcacttaccagaaataat

SEQ ID NO: 752812 - DNA, 19 bp, Mus musculus
  siRNA target sequence for Vps54 (NM_139061.1,992-1010).
ccactgtacaccaaactca

SEQ ID NO: 752813 - DNA, 19 bp, Mus musculus
  siRNA target sequence for Vps54 (NM_139061.1,1018-1036).
gtgcaggtgttgttatcta

SEQ ID NO: 752814 - DNA, 19 bp, Mus musculus
  siRNA target sequence for Vps54 (NM_139061.1,1023-1041).
ggtgttgttatctacttct

SEQ ID NO: 752815 - DNA, 19 bp, Mus musculus
  siRNA target sequence for Vps54 (NM_139061.1,1048-1066).
gttggagcgttggacttaa

SEQ ID NO: 752816 - DNA, 19 bp, Mus musculus
  siRNA target sequence for Vps54 (NM_139061.1,1059-1077).
ggacttaatagcaacaact

SEQ ID NO: 752817 - DNA, 19 bp, Mus musculus
  siRNA target sequence for Vps54 (NM_139061.1,1062-1080).
cttaatagcaacaactcaa

SEQ ID NO: 752818 - DNA, 19 bp, Mus musculus
  siRNA target sequence for Vps54 (NM_139061.1,1133-1151).
cacagctttgtgaattaga

SEQ ID NO: 752819 - DNA, 19 bp, Mus musculus
  siRNA target sequence for Vps54 (NM_139061.1,1347-1365).
cattaaagagcgtgtgatt

SEQ ID NO: 752820 - DNA, 19 bp, Mus musculus
  siRNA target sequence for Vps54 (NM_139061.1,1356-1374).
gcgtgtgattaataaagtt

SEQ ID NO: 752821 - DNA, 19 bp, Mus musculus
  siRNA target sequence for Vps54 (NM_139061.1,1357-1375).
cgtgtgattaataaagttt

SEQ ID NO: 752822 - DNA, 19 bp, Mus musculus
  siRNA target sequence for Vps54 (NM_139061.1,1397-1415).
cagacgttgttgtaaagct

SEQ ID NO: 752823 - DNA, 19 bp, Mus musculus
  siRNA target sequence for Vps54 (NM_139061.1,1418-1436).
cagatcaaatgagaatgtt

SEQ ID NO: 752824 - DNA, 19 bp, Mus musculus
  siRNA target sequence for Vps54 (NM_139061.1,1445-1463).
cccagtggattgatctgtt

SEQ ID NO: 752825 - DNA, 19 bp, Mus musculus
  siRNA target sequence for Vps54 (NM_139061.1,1446-1464).
ccagtggattgatctgtta

SEQ ID NO: 752826 - DNA, 19 bp, Mus musculus
  siRNA target sequence for Vps54 (NM_139061.1,1502-1520).
gagttaaggcaacattgaa

SEQ ID NO: 752827 - DNA, 19 bp, Mus musculus
  siRNA target sequence for Vps54 (NM_139061.1,1504-1522).
gttaaggcaacattgaata

SEQ ID NO: 752828 - DNA, 19 bp, Mus musculus
  siRNA target sequence for Vps54 (NM_139061.1,1511-1529).
caacattgaatattatcca

SEQ ID NO: 752829 - DNA, 19 bp, Mus musculus
  siRNA target sequence for Vps54 (NM_139061.1,1653-1671).
gggctggttcataagtgat

SEQ ID NO: 752830 - DNA, 19 bp, Mus musculus
  siRNA target sequence for Vps54 (NM_139061.1,1662-1680).
cataagtgatgctttcagt

SEQ ID NO: 752831 - DNA, 19 bp, Mus musculus
  siRNA target sequence for Vps54 (NM_139061.1,1764-1782).
ggtatcagaaccagaatgt

SEQ ID NO: 752832 - DNA, 19 bp, Mus musculus
  siRNA target sequence for Vps54 (NM_139061.1,1777-1795).
gaatgtactactgattctt

SEQ ID NO: 752833 - DNA, 19 bp, Mus musculus
  siRNA target sequence for Vps54 (NM_139061.1,1826-1844).
ctcctccaggaggtataga

SEQ ID NO: 752834 - DNA, 19 bp, Mus musculus
  siRNA target sequence for Vps54 (NM_139061.1,1832-1850).
caggaggtatagagattat

SEQ ID NO: 752835 - DNA, 19 bp, Mus musculus
  siRNA target sequence for Vps54 (NM_139061.1,1835-1853).
gaggtatagagattatagt

SEQ ID NO: 752836 - DNA, 19 bp, Mus musculus
  siRNA target sequence for Vps54 (NM_139061.1,1837-1855).
ggtatagagattatagtca

SEQ ID NO: 752837 - DNA, 19 bp, Mus musculus
  siRNA target sequence for Vps54 (NM_139061.1,1901-1919).
gtaacatccaggagttact

SEQ ID NO: 752838 - DNA, 19 bp, Mus musculus
  siRNA target sequence for Vps54 (NM_139061.1,1911-1929).
ggagttactgtgtaatgct

SEQ ID NO: 752839 - DNA, 19 bp, Mus musculus
  siRNA target sequence for Vps54 (NM_139061.1,1912-1930).
gagttactgtgtaatgctt

SEQ ID NO: 752840 - DNA, 19 bp, Mus musculus
  siRNA target sequence for Vps54 (NM_139061.1,1941-1959).
ccatgatcgagctgtcaaa

SEQ ID NO: 752841 - DNA, 19 bp, Mus musculus
  siRNA target sequence for Vps54 (NM_139061.1,1942-1960).
catgatcgagctgtcaaat

SEQ ID NO: 752842 - DNA, 19 bp, Mus musculus
  siRNA target sequence for Vps54 (NM_139061.1,1948-1966).
cgagctgtcaaatttctca

SEQ ID NO: 752843 - DNA, 19 bp, Mus musculus
  siRNA target sequence for Vps54 (NM_139061.1,2016-2034).
catagcactctcgagatta

SEQ ID NO: 752844 - DNA, 19 bp, Mus musculus
  siRNA target sequence for Vps54 (NM_139061.1,2021-2039).
cactctcgagattaatgga

SEQ ID NO: 752845 - DNA, 19 bp, Mus musculus
  siRNA target sequence for Vps54 (NM_139061.1,2027-2045).
cgagattaatggagacatt

SEQ ID NO: 752846 - DNA, 19 bp, Mus musculus
  siRNA target sequence for Vps54 (NM_139061.1,2108-2126).
gccaagcaaataagtttgt

SEQ ID NO: 752847 - DNA, 19 bp, Mus musculus
  siRNA target sequence for Vps54 (NM_139061.1,2121-2139).
gtttgtgaacaggtttcat

SEQ ID NO: 752848 - DNA, 19 bp, Mus musculus
  siRNA target sequence for Vps54 (NM_139061.1,2231-2249).
ctatagcggatggaaagat

SEQ ID NO: 752849 - DNA, 19 bp, Mus musculus
  siRNA target sequence for Vps54 (NM_139061.1,2236-2254).
gcggatggaaagattgctt

SEQ ID NO: 752850 - DNA, 19 bp, Mus musculus
  siRNA target sequence for Vps54 (NM_139061.1,2237-2255).
cggatggaaagattgcttt

SEQ ID NO: 752851 - DNA, 19 bp, Mus musculus
  siRNA target sequence for Vps54 (NM_139061.1,2338-2356).
ggaaccgtcttgctgttaa

SEQ ID NO: 752852 - DNA, 19 bp, Mus musculus
  siRNA target sequence for Vps54 (NM_139061.1,2339-2357).
gaaccgtcttgctgttaat

SEQ ID NO: 752853 - DNA, 19 bp, Mus musculus
  siRNA target sequence for Vps54 (NM_139061.1,2349-2367).
gctgttaataagaatcatt

SEQ ID NO: 752854 - DNA, 19 bp, Mus musculus
  siRNA target sequence for Vps54 (NM_139061.1,2445-2463).
gtacttcaattcaagaagt

SEQ ID NO: 752855 - DNA, 19 bp, Mus musculus
  siRNA target sequence for Vps54 (NM_139061.1,2456-2474).
caagaagttgccagttagt

SEQ ID NO: 752856 - DNA, 19 bp, Mus musculus
  siRNA target sequence for Vps54 (NM_139061.1,2483-2501).
ctggtgctttgcaagttgt

SEQ ID NO: 752857 - DNA, 19 bp, Mus musculus
  siRNA target sequence for Vps54 (NM_139061.1,2497-2515).
gttgttggactaaaaacaa

SEQ ID NO: 752858 - DNA, 19 bp, Mus musculus
  siRNA target sequence for Vps54 (NM_139061.1,2543-2561).
cacggtgtctgcagttgat

SEQ ID NO: 752859 - DNA, 19 bp, Mus musculus
  siRNA target sequence for Vps54 (NM_139061.1,2546-2564).
ggtgtctgcagttgattgt

SEQ ID NO: 752860 - DNA, 19 bp, Mus musculus
  siRNA target sequence for Vps54 (NM_139061.1,2577-2595).
cgtgatccgggctcacttt

SEQ ID NO: 752861 - DNA, 19 bp, Mus musculus
  siRNA target sequence for Vps54 (NM_139061.1,2621-2639).
ggagcatgcttagacattt

SEQ ID NO: 752862 - DNA, 19 bp, Mus musculus
  siRNA target sequence for Vps54 (NM_139061.1,2651-2669).
caaaggattaccatgatca

SEQ ID NO: 752863 - DNA, 19 bp, Mus musculus
  siRNA target sequence for Vps54 (NM_139061.1,2655-2673).
ggattaccatgatcatata

SEQ ID NO: 752864 - DNA, 19 bp, Mus musculus
  siRNA target sequence for Vps54 (NM_139061.1,2687-2705).
ctaagcttgtagcgataat

SEQ ID NO: 752865 - DNA, 19 bp, Mus musculus
  siRNA target sequence for Vps54 (NM_139061.1,2691-2709).
gcttgtagcgataatggat

SEQ ID NO: 752866 - DNA, 19 bp, Mus musculus
  siRNA target sequence for Vps54 (NM_139061.1,2692-2710).
cttgtagcgataatggata

SEQ ID NO: 752867 - DNA, 19 bp, Mus musculus
  siRNA target sequence for Vps54 (NM_139061.1,2700-2718).
gataatggatagcctattt

SEQ ID NO: 752868 - DNA, 19 bp, Mus musculus
  siRNA target sequence for Vps54 (NM_139061.1,2858-2876).
gaattaatgcaagttacaa

SEQ ID NO: 752869 - DNA, 19 bp, Mus musculus
  siRNA target sequence for Vps54 (NM_139061.1,2883-2901).
cttgaaaaaacagttatca

SEQ ID NO: 752870 - DNA, 19 bp, Mus musculus
  siRNA target sequence for Vps54 (NM_139061.1,2972-2990).
gaaatcttcaagccttaaa

SEQ ID NO: 752871 - DNA, 19 bp, Mus musculus
  siRNA target sequence for Vps54 (NM_139061.1,2984-3002).
ccttaaaaggccttaaaga

SEQ ID NO: 752872 - DNA, 19 bp, Mus musculus
  siRNA target sequence for Vps54 (NM_139061.1,3020-3038).
ccgagatctgggaacagaa

SEQ ID NO: 752873 - DNA, 19 bp, Mus musculus
  siRNA target sequence for Plac8 (NM_139198.1,95-113).
gctcaggcaccaacagtta

SEQ ID NO: 752874 - DNA, 19 bp, Mus musculus
  siRNA target sequence for Plac8 (NM_139198.1,96-114).
ctcaggcaccaacagttat

SEQ ID NO: 752875 - DNA, 19 bp, Mus musculus
  siRNA target sequence for Plac8 (NM_139198.1,118-136).
gactcaacctggattcgtt

SEQ ID NO: 752876 - DNA, 19 bp, Mus musculus
  siRNA target sequence for Plac8 (NM_139198.1,133-151).
cgttcgtgctccccaaaat

SEQ ID NO: 752877 - DNA, 19 bp, Mus musculus
  siRNA target sequence for Plac8 (NM_139198.1,134-152).
gttcgtgctccccaaaatt

SEQ ID NO: 752878 - DNA, 19 bp, Mus musculus
  siRNA target sequence for Plac8 (NM_139198.1,161-179).
cagaccagcctgtgtgatt

SEQ ID NO: 752879 - DNA, 19 bp, Mus musculus
  siRNA target sequence for Plac8 (NM_139198.1,223-241).
cacttgtcttggatgtcaa

SEQ ID NO: 752880 - DNA, 19 bp, Mus musculus
  siRNA target sequence for Plac8 (NM_139198.1,327-345).
gatctatttgtgatgacta

SEQ ID NO: 752881 - DNA, 19 bp, Mus musculus
  siRNA target sequence for Plac8 (NM_139198.1,382-400).
ccaactcaagagagacatt

SEQ ID NO: 752882 - DNA, 19 bp, Mus musculus
  siRNA target sequence for Plac8 (NM_139198.1,383-401).
caactcaagagagacatta

SEQ ID NO: 752883 - DNA, 19 bp, Mus musculus
  siRNA target sequence for Defb9 (NM_139219.1,84-102).
cccagctgccaactctata

SEQ ID NO: 752884 - DNA, 19 bp, Mus musculus
  siRNA target sequence for Defb9 (NM_139219.1,96-114).
ctctataatcggtgtatca

SEQ ID NO: 752885 - DNA, 19 bp, Mus musculus
  siRNA target sequence for Defb9 (NM_139219.1,98-116).
ctataatcggtgtatcaga

SEQ ID NO: 752886 - DNA, 19 bp, Mus musculus
  siRNA target sequence for Defb9 (NM_139219.1,105-123).
cggtgtatcagaaatggaa

SEQ ID NO: 752887 - DNA, 19 bp, Mus musculus
  siRNA target sequence for Defb9 (NM_139219.1,120-138).
ggaacggtgccacaagaaa

SEQ ID NO: 752888 - DNA, 19 bp, Mus musculus
  siRNA target sequence for Defb7 (NM_139220.1,89-107).
cagtaaacgagcttgctat

SEQ ID NO: 752889 - DNA, 19 bp, Mus musculus
  siRNA target sequence for Defb7 (NM_139220.1,133-151).
ggtgcattggcctttttca

SEQ ID NO: 752890 - DNA, 19 bp, Mus musculus
  siRNA target sequence for Defb7 (NM_139220.1,136-154).
gcattggcctttttcataa

SEQ ID NO: 752891 - DNA, 19 bp, Mus musculus
  siRNA target sequence for Defb7 (NM_139220.1,163-181).
cttgtaattttcgtttcaa

SEQ ID NO: 752892 - DNA, 19 bp, Mus musculus
  siRNA target sequence for Defb13 (NM_139223.1,63-81).
gttcttctcattcaacttt

SEQ ID NO: 752893 - DNA, 19 bp, Mus musculus
  siRNA target sequence for Defb13 (NM_139223.1,106-124).
gaaggttcctctgtaaaaa

SEQ ID NO: 752894 - DNA, 19 bp, Mus musculus
  siRNA target sequence for Defb13 (NM_139223.1,113-131).
cctctgtaaaaagatgaat

SEQ ID NO: 752895 - DNA, 19 bp, Mus musculus
  siRNA target sequence for Nol6 (NM_139236.1,164-182).
gagaaggcaccctcaagaa

SEQ ID NO: 752896 - DNA, 19 bp, Mus musculus
  siRNA target sequence for Nol6 (NM_139236.1,250-268).
gtacaaggagcctacaaat

SEQ ID NO: 752897 - DNA, 19 bp, Mus musculus
  siRNA target sequence for Nol6 (NM_139236.1,287-305).
cgtgagaccgagatcttgt

SEQ ID NO: 752898 - DNA, 19 bp, Mus musculus
  siRNA target sequence for Nol6 (NM_139236.1,310-328).
ctccaccttgcttcgttta

SEQ ID NO: 752899 - DNA, 19 bp, Mus musculus
  siRNA target sequence for Nol6 (NM_139236.1,312-330).
ccaccttgcttcgtttaca

SEQ ID NO: 752900 - DNA, 19 bp, Mus musculus
  siRNA target sequence for Nol6 (NM_139236.1,313-331).
caccttgcttcgtttacaa

SEQ ID NO: 752901 - DNA, 19 bp, Mus musculus
  siRNA target sequence for Nol6 (NM_139236.1,315-333).
ccttgcttcgtttacaagt

SEQ ID NO: 752902 - DNA, 19 bp, Mus musculus
  siRNA target sequence for Nol6 (NM_139236.1,370-388).
gaagaaagagaggattgat

SEQ ID NO: 752903 - DNA, 19 bp, Mus musculus
  siRNA target sequence for Nol6 (NM_139236.1,373-391).
gaaagagaggattgataat

SEQ ID NO: 752904 - DNA, 19 bp, Mus musculus
  siRNA target sequence for Nol6 (NM_139236.1,408-426).
ccaagcggatccagaaagt

SEQ ID NO: 752905 - DNA, 19 bp, Mus musculus
  siRNA target sequence for Nol6 (NM_139236.1,579-597).
cttgtatgcgaccagatat

SEQ ID NO: 752906 - DNA, 19 bp, Mus musculus
  siRNA target sequence for Nol6 (NM_139236.1,582-600).
gtatgcgaccagatatcaa

SEQ ID NO: 752907 - DNA, 19 bp, Mus musculus
  siRNA target sequence for Nol6 (NM_139236.1,672-690).
gcaagcgagccctttacct

SEQ ID NO: 752908 - DNA, 19 bp, Mus musculus
  siRNA target sequence for Nol6 (NM_139236.1,732-750).
gcagcgtacgcttctctta

SEQ ID NO: 752909 - DNA, 19 bp, Mus musculus
  siRNA target sequence for Nol6 (NM_139236.1,735-753).
gcgtacgcttctcttacat

SEQ ID NO: 752910 - DNA, 19 bp, Mus musculus
  siRNA target sequence for Nol6 (NM_139236.1,737-755).
gtacgcttctcttacatga

SEQ ID NO: 752911 - DNA, 19 bp, Mus musculus
  siRNA target sequence for Nol6 (NM_139236.1,802-820).
ggatgagcgcctagttact

SEQ ID NO: 752912 - DNA, 19 bp, Mus musculus
  siRNA target sequence for Nol6 (NM_139236.1,864-882).
gccgcttgctgccaactaa

SEQ ID NO: 752913 - DNA, 19 bp, Mus musculus
  siRNA target sequence for Nol6 (NM_139236.1,866-884).
cgcttgctgccaactaaga

SEQ ID NO: 752914 - DNA, 19 bp, Mus musculus
  siRNA target sequence for Nol6 (NM_139236.1,871-889).
gctgccaactaagaacaat

SEQ ID NO: 752915 - DNA, 19 bp, Mus musculus
  siRNA target sequence for Nol6 (NM_139236.1,935-953).
ccgcctaccccccactata

SEQ ID NO: 752916 - DNA, 19 bp, Mus musculus
  siRNA target sequence for Nol6 (NM_139236.1,936-954).
cgcctaccccccactataa

SEQ ID NO: 752917 - DNA, 19 bp, Mus musculus
  siRNA target sequence for Nol6 (NM_139236.1,938-956).
cctaccccccactataaca

SEQ ID NO: 752918 - DNA, 19 bp, Mus musculus
  siRNA target sequence for Nol6 (NM_139236.1,1084-1102).
caagggcctgggtggattt

SEQ ID NO: 752919 - DNA, 19 bp, Mus musculus
  siRNA target sequence for Nol6 (NM_139236.1,1095-1113).
gtggatttaacggattcat

SEQ ID NO: 752920 - DNA, 19 bp, Mus musculus
  siRNA target sequence for Nol6 (NM_139236.1,1098-1116).
gatttaacggattcatcat

SEQ ID NO: 752921 - DNA, 19 bp, Mus musculus
  siRNA target sequence for Nol6 (NM_139236.1,1209-1227).
ccactaccgatctgacaat

SEQ ID NO: 752922 - DNA, 19 bp, Mus musculus
  siRNA target sequence for Nol6 (NM_139236.1,1212-1230).
ctaccgatctgacaatcaa

SEQ ID NO: 752923 - DNA, 19 bp, Mus musculus
  siRNA target sequence for Nol6 (NM_139236.1,1224-1242).
caatcaatggaatcagttt

SEQ ID NO: 752924 - DNA, 19 bp, Mus musculus
  siRNA target sequence for Nol6 (NM_139236.1,1278-1296).
ctgaattccaccagctttt

SEQ ID NO: 752925 - DNA, 19 bp, Mus musculus
  siRNA target sequence for Nol6 (NM_139236.1,1291-1309).
gcttttcgcggttgtgttt

SEQ ID NO: 752926 - DNA, 19 bp, Mus musculus
  siRNA target sequence for Nol6 (NM_139236.1,1346-1364).
gttacagcttccacttaca

SEQ ID NO: 752927 - DNA, 19 bp, Mus musculus
  siRNA target sequence for Nol6 (NM_139236.1,1410-1428).
gcaaagctgacgatggatt

SEQ ID NO: 752928 - DNA, 19 bp, Mus musculus
  siRNA target sequence for Nol6 (NM_139236.1,1515-1533).
cctgtcaccagctaaagct

SEQ ID NO: 752929 - DNA, 19 bp, Mus musculus
  siRNA target sequence for Nol6 (NM_139236.1,1587-1605).
cactaaccaacattttggt

SEQ ID NO: 752930 - DNA, 19 bp, Mus musculus
  siRNA target sequence for Nol6 (NM_139236.1,1736-1754).
gagggactgaccagtgtta

SEQ ID NO: 752931 - DNA, 19 bp, Mus musculus
  siRNA target sequence for Nol6 (NM_139236.1,1740-1758).
gactgaccagtgttattga

SEQ ID NO: 752932 - DNA, 19 bp, Mus musculus
  siRNA target sequence for Nol6 (NM_139236.1,1744-1762).
gaccagtgttattgatctt

SEQ ID NO: 752933 - DNA, 19 bp, Mus musculus
  siRNA target sequence for Nol6 (NM_139236.1,1885-1903).
gtttgagaagcgtcttatt

SEQ ID NO: 752934 - DNA, 19 bp, Mus musculus
  siRNA target sequence for Nol6 (NM_139236.1,1982-2000).
cttgatgcattgatccaaa

SEQ ID NO: 752935 - DNA, 19 bp, Mus musculus
  siRNA target sequence for Nol6 (NM_139236.1,2044-2062).
ggctgtgcgttgctatgat

SEQ ID NO: 752936 - DNA, 19 bp, Mus musculus
  siRNA target sequence for Nol6 (NM_139236.1,2089-2107).
ggagggtctcccacttact

SEQ ID NO: 752937 - DNA, 19 bp, Mus musculus
  siRNA target sequence for Nol6 (NM_139236.1,2426-2444).
gatgggttcgtgtttagga

SEQ ID NO: 752938 - DNA, 19 bp, Mus musculus
  siRNA target sequence for Nol6 (NM_139236.1,2765-2783).
cggttcctttacttggtat

SEQ ID NO: 752939 - DNA, 19 bp, Mus musculus
  siRNA target sequence for Nol6 (NM_139236.1,3066-3084).
ggccacccttcgacatgta

SEQ ID NO: 752940 - DNA, 19 bp, Mus musculus
  siRNA target sequence for Nol6 (NM_139236.1,3067-3085).
gccacccttcgacatgtat

SEQ ID NO: 752941 - DNA, 19 bp, Mus musculus
  siRNA target sequence for Nol6 (NM_139236.1,3249-3267).
gggaggcctttgaagatct

SEQ ID NO: 752942 - DNA, 19 bp, Mus musculus
  siRNA target sequence for Nol6 (NM_139236.1,3263-3281).
gatctggctctcttcttct

SEQ ID NO: 752943 - DNA, 19 bp, Mus musculus
  siRNA target sequence for Nol6 (NM_139236.1,3411-3429).
ccaacatagaagcaatctt

SEQ ID NO: 752944 - DNA, 19 bp, Mus musculus
  siRNA target sequence for Hrasls3 (NM_139269.1,443-461).
gcactttgtgaatgaacta

SEQ ID NO: 752945 - DNA, 19 bp, Mus musculus
  siRNA target sequence for Hrasls3 (NM_139269.1,555-573).
gtcatgctctccagaaaca

SEQ ID NO: 752946 - DNA, 19 bp, Mus musculus
  siRNA target sequence for Dp1l1 (NM_139292.1,75-93).
gccagcgcttcgaacgttt

SEQ ID NO: 752947 - DNA, 19 bp, Mus musculus
  siRNA target sequence for Dp1l1 (NM_139292.1,76-94).
ccagcgcttcgaacgtttt

SEQ ID NO: 752948 - DNA, 19 bp, Mus musculus
  siRNA target sequence for Dp1l1 (NM_139292.1,141-159).
caaggaccggtgtagagaa

SEQ ID NO: 752949 - DNA, 19 bp, Mus musculus
  siRNA target sequence for Dp1l1 (NM_139292.1,234-252).
gcaatgtcatcggatttgt

SEQ ID NO: 752950 - DNA, 19 bp, Mus musculus
  siRNA target sequence for Dp1l1 (NM_139292.1,251-269).
gtataccccgcatatgctt

SEQ ID NO: 752951 - DNA, 19 bp, Mus musculus
  siRNA target sequence for Dp1l1 (NM_139292.1,259-277).
cgcatatgcttcagtcaaa

SEQ ID NO: 752952 - DNA, 19 bp, Mus musculus
  siRNA target sequence for Dp1l1 (NM_139292.1,347-365).
ggtctggtcgaattcttca

SEQ ID NO: 752953 - DNA, 19 bp, Mus musculus
  siRNA target sequence for Dp1l1 (NM_139292.1,444-462).
cctggaacggggcattact

SEQ ID NO: 752954 - DNA, 19 bp, Mus musculus
  siRNA target sequence for Dp1l1 (NM_139292.1,445-463).
ctggaacggggcattacta

SEQ ID NO: 752955 - DNA, 19 bp, Mus musculus
  siRNA target sequence for Dp1l1 (NM_139292.1,447-465).
ggaacggggcattactact

SEQ ID NO: 752956 - DNA, 19 bp, Mus musculus
  siRNA target sequence for Dp1l1 (NM_139292.1,448-466).
gaacggggcattactacta

SEQ ID NO: 752957 - DNA, 19 bp, Mus musculus
  siRNA target sequence for Dp1l1 (NM_139292.1,453-471).
gggcattactactatacca

SEQ ID NO: 752958 - DNA, 19 bp, Mus musculus
  siRNA target sequence for Dp1l1 (NM_139292.1,454-472).
ggcattactactataccat

SEQ ID NO: 752959 - DNA, 19 bp, Mus musculus
  siRNA target sequence for Dp1l1 (NM_139292.1,464-482).
ctataccatcgcgtcataa

SEQ ID NO: 752960 - DNA, 19 bp, Mus musculus
  siRNA target sequence for Dp1l1 (NM_139292.1,475-493).
cgtcataagaccactcttt

SEQ ID NO: 752961 - DNA, 19 bp, Mus musculus
  siRNA target sequence for Dp1l1 (NM_139292.1,478-496).
cataagaccactctttcta

SEQ ID NO: 752962 - DNA, 19 bp, Mus musculus
  siRNA target sequence for Sh3glb2 (NM_139302.1,89-107).
gttcacagaggagaagttt

SEQ ID NO: 752963 - DNA, 19 bp, Mus musculus
  siRNA target sequence for Sh3glb2 (NM_139302.1,128-146).
gcttgacgcccactttgaa

SEQ ID NO: 752964 - DNA, 19 bp, Mus musculus
  siRNA target sequence for Sh3glb2 (NM_139302.1,237-255).
cgagtggaggagttcctat

SEQ ID NO: 752965 - DNA, 19 bp, Mus musculus
  siRNA target sequence for Sh3glb2 (NM_139302.1,238-256).
gagtggaggagttcctata

SEQ ID NO: 752966 - DNA, 19 bp, Mus musculus
  siRNA target sequence for Sh3glb2 (NM_139302.1,406-424).
cagcagagcgggatttcat

SEQ ID NO: 752967 - DNA, 19 bp, Mus musculus
  siRNA target sequence for Sh3glb2 (NM_139302.1,409-427).
cagagcgggatttcattca

SEQ ID NO: 752968 - DNA, 19 bp, Mus musculus
  siRNA target sequence for Sh3glb2 (NM_139302.1,411-429).
gagcgggatttcattcaca

SEQ ID NO: 752969 - DNA, 19 bp, Mus musculus
  siRNA target sequence for Sh3glb2 (NM_139302.1,471-489).
gagggggactggaaaacga

SEQ ID NO: 752970 - DNA, 19 bp, Mus musculus
  siRNA target sequence for Sh3glb2 (NM_139302.1,477-495).
gactggaaaacgatttcga

SEQ ID NO: 752971 - DNA, 19 bp, Mus musculus
  siRNA target sequence for Sh3glb2 (NM_139302.1,584-602).
cacgacggtgcctgacttt

SEQ ID NO: 752972 - DNA, 19 bp, Mus musculus
  siRNA target sequence for Sh3glb2 (NM_139302.1,605-623).
ggagactagacctcgtaat

SEQ ID NO: 752973 - DNA, 19 bp, Mus musculus
  siRNA target sequence for Sh3glb2 (NM_139302.1,606-624).
gagactagacctcgtaatt

SEQ ID NO: 752974 - DNA, 19 bp, Mus musculus
  siRNA target sequence for Sh3glb2 (NM_139302.1,610-628).
ctagacctcgtaattacat

SEQ ID NO: 752975 - DNA, 19 bp, Mus musculus
  siRNA target sequence for Sh3glb2 (NM_139302.1,615-633).
cctcgtaattacattctat

SEQ ID NO: 752976 - DNA, 19 bp, Mus musculus
  siRNA target sequence for Sh3glb2 (NM_139302.1,640-658).
gcgcctccgcgctttggaa

SEQ ID NO: 752977 - DNA, 19 bp, Mus musculus
  siRNA target sequence for Sh3glb2 (NM_139302.1,649-667).
cgctttggaacgatgaagt

SEQ ID NO: 752978 - DNA, 19 bp, Mus musculus
  siRNA target sequence for Sh3glb2 (NM_139302.1,746-764).
ggggatcagcagtactcat

SEQ ID NO: 752979 - DNA, 19 bp, Mus musculus
  siRNA target sequence for Car9 (NM_139305.1,277-295).
ggatccacctgaagttaat

SEQ ID NO: 752980 - DNA, 19 bp, Mus musculus
  siRNA target sequence for Car9 (NM_139305.1,278-296).
gatccacctgaagttaatt

SEQ ID NO: 752981 - DNA, 19 bp, Mus musculus
  siRNA target sequence for Car9 (NM_139305.1,368-386).
ggttcccacggggatgaaa

SEQ ID NO: 752982 - DNA, 19 bp, Mus musculus
  siRNA target sequence for Car9 (NM_139305.1,558-576).
cggaactgagcctatccaa

SEQ ID NO: 752983 - DNA, 19 bp, Mus musculus
  siRNA target sequence for Car9 (NM_139305.1,651-669).
ccttgcagttgcatctaca

SEQ ID NO: 752984 - DNA, 19 bp, Mus musculus
  siRNA target sequence for Car9 (NM_139305.1,756-774).
ctgctttctccgaacttca

SEQ ID NO: 752985 - DNA, 19 bp, Mus musculus
  siRNA target sequence for Car9 (NM_139305.1,890-908).
gaaggctccaagattgaga

SEQ ID NO: 752986 - DNA, 19 bp, Mus musculus
  siRNA target sequence for Car9 (NM_139305.1,951-969).
gccgctactaccgatatga

SEQ ID NO: 752987 - DNA, 19 bp, Mus musculus
  siRNA target sequence for Car9 (NM_139305.1,952-970).
ccgctactaccgatatgaa

SEQ ID NO: 752988 - DNA, 19 bp, Mus musculus
  siRNA target sequence for Car9 (NM_139305.1,1044-1062).
ctaagcagctccatactct

SEQ ID NO: 752989 - DNA, 19 bp, Mus musculus
  siRNA target sequence for Car9 (NM_139305.1,1126-1144).
cttgaatgggcgaacgatt

SEQ ID NO: 752990 - DNA, 19 bp, Mus musculus
  siRNA target sequence for Car9 (NM_139305.1,1179-1197).
ctgagccagtccatgtgaa

SEQ ID NO: 752991 - DNA, 19 bp, Mus musculus
  siRNA target sequence for Car9 (NM_139305.1,1181-1199).
gagccagtccatgtgaatt

SEQ ID NO: 752992 - DNA, 19 bp, Mus musculus
  siRNA target sequence for Car9 (NM_139305.1,1300-1318).
cagaagtgggaccaaagat

SEQ ID NO: 752993 - DNA, 19 bp, Mus musculus
  siRNA target sequence for Car9 (NM_139305.1,1305-1323).
gtgggaccaaagatagagt

SEQ ID NO: 752994 - DNA, 19 bp, Mus musculus
  siRNA target sequence for Car9 (NM_139305.1,1307-1325).
gggaccaaagatagagtta

SEQ ID NO: 752995 - DNA, 19 bp, Mus musculus
  siRNA target sequence for Car9 (NM_139305.1,1311-1329).
ccaaagatagagttagcta

SEQ ID NO: 752996 - DNA, 19 bp, Mus musculus
  siRNA target sequence for CRG-L1 (NM_139306.1,93-111).
gcgaggacaactacactat

SEQ ID NO: 752997 - DNA, 19 bp, Mus musculus
  siRNA target sequence for CRG-L1 (NM_139306.1,117-135).
ctgccattgccgagttcta

SEQ ID NO: 752998 - DNA, 19 bp, Mus musculus
  siRNA target sequence for CRG-L1 (NM_139306.1,119-137).
gccattgccgagttctaca

SEQ ID NO: 752999 - DNA, 19 bp, Mus musculus
  siRNA target sequence for CRG-L1 (NM_139306.1,120-138).
ccattgccgagttctacaa

SEQ ID NO: 753000 - DNA, 19 bp, Mus musculus
  siRNA target sequence for CRG-L1 (NM_139306.1,141-159).
cgatcagcaacgtcttgtt

SEQ ID NO: 753001 - DNA, 19 bp, Mus musculus
  siRNA target sequence for CRG-L1 (NM_139306.1,142-160).
gatcagcaacgtcttgttt

SEQ ID NO: 753002 - DNA, 19 bp, Mus musculus
  siRNA target sequence for CRG-L1 (NM_139306.1,214-232).
caacagcggcatctactta

SEQ ID NO: 753003 - DNA, 19 bp, Mus musculus
  siRNA target sequence for CRG-L1 (NM_139306.1,217-235).
cagcggcatctacttaata

SEQ ID NO: 753004 - DNA, 19 bp, Mus musculus
  siRNA target sequence for CRG-L1 (NM_139306.1,237-255).
ggacgctcctagttgtagt

SEQ ID NO: 753005 - DNA, 19 bp, Mus musculus
  siRNA target sequence for CRG-L1 (NM_139306.1,248-266).
gttgtagtggggattggat

SEQ ID NO: 753006 - DNA, 19 bp, Mus musculus
  siRNA target sequence for CRG-L1 (NM_139306.1,357-375).
ggtttcccaggaggtattt

SEQ ID NO: 753007 - DNA, 19 bp, Mus musculus
  siRNA target sequence for CRG-L1 (NM_139306.1,444-462).
cgtgcttggcgtttatcaa

SEQ ID NO: 753008 - DNA, 19 bp, Mus musculus
  siRNA target sequence for CRG-L1 (NM_139306.1,475-493).
caatatttccctgatgatt

SEQ ID NO: 753009 - DNA, 19 bp, Mus musculus
  siRNA target sequence for CRG-L1 (NM_139306.1,542-560).
gacaatgtgcgtgtgttta

SEQ ID NO: 753010 - DNA, 19 bp, Mus musculus
  siRNA target sequence for CRG-L1 (NM_139306.1,664-682).
gcactgtgtgtggcatatt

SEQ ID NO: 753011 - DNA, 19 bp, Mus musculus
  siRNA target sequence for CRG-L1 (NM_139306.1,715-733).
gtgcttcgcctactttgat

SEQ ID NO: 753012 - DNA, 19 bp, Mus musculus
  siRNA target sequence for CRG-L1 (NM_139306.1,783-801).
gcgagaaatgggcttttat

SEQ ID NO: 753013 - DNA, 19 bp, Mus musculus
  siRNA target sequence for Slitl2 (NM_139307.2,353-371).
cggcatcacgacacttgat

SEQ ID NO: 753014 - DNA, 19 bp, Mus musculus
  siRNA target sequence for Slitl2 (NM_139307.2,460-478).
cacttgttaacctcagtaa

SEQ ID NO: 753015 - DNA, 19 bp, Mus musculus
  siRNA target sequence for Slitl2 (NM_139307.2,623-641).
gctcaagctgccagacaat

SEQ ID NO: 753016 - DNA, 19 bp, Mus musculus
  siRNA target sequence for Slitl2 (NM_139307.2,785-803).
gctggatgaggggcttttt

SEQ ID NO: 753017 - DNA, 19 bp, Mus musculus
  siRNA target sequence for Slitl2 (NM_139307.2,958-976).
ctgccctacaggaattgga

SEQ ID NO: 753018 - DNA, 19 bp, Mus musculus
  siRNA target sequence for Slitl2 (NM_139307.2,1139-1157).
ggagacgcgttgtcacttt

SEQ ID NO: 753019 - DNA, 19 bp, Mus musculus
  siRNA target sequence for Slitl2 (NM_139307.2,1231-1249).
cggccacagtacctactat

SEQ ID NO: 753020 - DNA, 19 bp, Mus musculus
  siRNA target sequence for Slitl2 (NM_139307.2,1232-1250).
ggccacagtacctactata

SEQ ID NO: 753021 - DNA, 19 bp, Mus musculus
  siRNA target sequence for Slitl2 (NM_139307.2,1233-1251).
gccacagtacctactataa

SEQ ID NO: 753022 - DNA, 19 bp, Mus musculus
  siRNA target sequence for Slitl2 (NM_139307.2,1242-1260).
cctactataaggtctacta

SEQ ID NO: 753023 - DNA, 19 bp, Mus musculus
  siRNA target sequence for Slitl2 (NM_139307.2,1243-1261).
ctactataaggtctactat

SEQ ID NO: 753024 - DNA, 19 bp, Mus musculus
  siRNA target sequence for Slitl2 (NM_139307.2,1262-1280).
cagggaacccacactttca

SEQ ID NO: 753025 - DNA, 19 bp, Mus musculus
  siRNA target sequence for Slitl2 (NM_139307.2,1269-1287).
cccacactttcaacttcta

SEQ ID NO: 753026 - DNA, 19 bp, Mus musculus
  siRNA target sequence for Slitl2 (NM_139307.2,1329-1347).
caggcctccaccgtactat

SEQ ID NO: 753027 - DNA, 19 bp, Mus musculus
  siRNA target sequence for Slitl2 (NM_139307.2,1682-1700).
caaacgactggtgacatta

SEQ ID NO: 753028 - DNA, 19 bp, Mus musculus
  siRNA target sequence for Slitl2 (NM_139307.2,1743-1761).
cgacccaatgccacctatt

SEQ ID NO: 753029 - DNA, 19 bp, Mus musculus
  siRNA target sequence for Slitl2 (NM_139307.2,1746-1764).
cccaatgccacctattcta

SEQ ID NO: 753030 - DNA, 19 bp, Mus musculus
  siRNA target sequence for Slitl2 (NM_139307.2,1747-1765).
ccaatgccacctattctat

SEQ ID NO: 753031 - DNA, 19 bp, Mus musculus
  siRNA target sequence for Slitl2 (NM_139307.2,1909-1927).
ccctggctgctgtacttct

SEQ ID NO: 753032 - DNA, 19 bp, Mus musculus
  siRNA target sequence for Stard7 (NM_139308.1,634-652).
gttgcagaggtccattaat

SEQ ID NO: 753033 - DNA, 19 bp, Mus musculus
  siRNA target sequence for Stard7 (NM_139308.1,638-656).
cagaggtccattaatgaga

SEQ ID NO: 753034 - DNA, 19 bp, Mus musculus
  siRNA target sequence for Stard7 (NM_139308.1,643-661).
gtccattaatgagatgaaa

SEQ ID NO: 753035 - DNA, 19 bp, Mus musculus
  siRNA target sequence for Stard7 (NM_139308.1,662-680).
cggttggaagaaatgtcaa

SEQ ID NO: 753036 - DNA, 19 bp, Mus musculus
  siRNA target sequence for Stard7 (NM_139308.1,737-755).
ggagggaatgaaaagtcaa

SEQ ID NO: 753037 - DNA, 19 bp, Mus musculus
  siRNA target sequence for Stard7 (NM_139308.1,782-800).
gtgatggacaagaaacact

SEQ ID NO: 753038 - DNA, 19 bp, Mus musculus
  siRNA target sequence for Stard7 (NM_139308.1,841-859).
ccagtaccgagtttttgga

SEQ ID NO: 753039 - DNA, 19 bp, Mus musculus
  siRNA target sequence for Stard7 (NM_139308.1,842-860).
cagtaccgagtttttggaa

SEQ ID NO: 753040 - DNA, 19 bp, Mus musculus
  siRNA target sequence for Stard7 (NM_139308.1,848-866).
cgagtttttggaacataca

SEQ ID NO: 753041 - DNA, 19 bp, Mus musculus
  siRNA target sequence for Stard7 (NM_139308.1,879-897).
cccgacagttcttcaatgt

SEQ ID NO: 753042 - DNA, 19 bp, Mus musculus
  siRNA target sequence for Stard7 (NM_139308.1,880-898).
ccgacagttcttcaatgtt

SEQ ID NO: 753043 - DNA, 19 bp, Mus musculus
  siRNA target sequence for Stard7 (NM_139308.1,905-923).
gatacagagtacaggaaaa

SEQ ID NO: 753044 - DNA, 19 bp, Mus musculus
  siRNA target sequence for Stard7 (NM_139308.1,927-945).
gggatgcccttgtgatcaa

SEQ ID NO: 753045 - DNA, 19 bp, Mus musculus
  siRNA target sequence for Stard7 (NM_139308.1,975-993).
gtggttctgaggttcttca

SEQ ID NO: 753046 - DNA, 19 bp, Mus musculus
  siRNA target sequence for Stard7 (NM_139308.1,1017-1035).
caatgtactctcgtgatta

SEQ ID NO: 753047 - DNA, 19 bp, Mus musculus
  siRNA target sequence for Stard7 (NM_139308.1,1117-1135).
gccagagtctccagagttt

SEQ ID NO: 753048 - DNA, 19 bp, Mus musculus
  siRNA target sequence for Stard7 (NM_139308.1,1176-1194).
ctcacaagtcgtttgatga

SEQ ID NO: 753049 - DNA, 19 bp, Mus musculus
  siRNA target sequence for Stard7 (NM_139308.1,1195-1213).
gaatggctttgactactta

SEQ ID NO: 753050 - DNA, 19 bp, Mus musculus
  siRNA target sequence for Stard7 (NM_139308.1,1205-1223).
gactacttactgacataca

SEQ ID NO: 753051 - DNA, 19 bp, Mus musculus
  siRNA target sequence for Stard7 (NM_139308.1,1207-1225).
ctacttactgacatacagt

SEQ ID NO: 753052 - DNA, 19 bp, Mus musculus
  siRNA target sequence for Stard7 (NM_139308.1,1362-1380).
cggctaagcctctggaaat

SEQ ID NO: 753053 - DNA, 19 bp, Mus musculus
  siRNA target sequence for Stard7 (NM_139308.1,1410-1428).
cccctgagcggaagaatga

SEQ ID NO: 753054 - DNA, 19 bp, Mus musculus
  siRNA target sequence for Stard7 (NM_139308.1,1445-1463).
gctcggattgagtatgctt

SEQ ID NO: 753055 - DNA, 19 bp, Mus musculus
  siRNA target sequence for Dph2l1 (NM_144491.1,92-110).
ggcgactggccaatcagat

SEQ ID NO: 753056 - DNA, 19 bp, Mus musculus
  siRNA target sequence for Dph2l1 (NM_144491.1,157-175).
gttctgccttctaactaca

SEQ ID NO: 753057 - DNA, 19 bp, Mus musculus
  siRNA target sequence for Dph2l1 (NM_144491.1,162-180).
gccttctaactacaacttt

SEQ ID NO: 753058 - DNA, 19 bp, Mus musculus
  siRNA target sequence for Dph2l1 (NM_144491.1,164-182).
cttctaactacaactttga

SEQ ID NO: 753059 - DNA, 19 bp, Mus musculus
  siRNA target sequence for Dph2l1 (NM_144491.1,222-240).
caagaaggtggccttacaa

SEQ ID NO: 753060 - DNA, 19 bp, Mus musculus
  siRNA target sequence for Dph2l1 (NM_144491.1,266-284).
cctgcactattgtggatat

SEQ ID NO: 753061 - DNA, 19 bp, Mus musculus
  siRNA target sequence for Dph2l1 (NM_144491.1,269-287).
gcactattgtggatatctt

SEQ ID NO: 753062 - DNA, 19 bp, Mus musculus
  siRNA target sequence for Dph2l1 (NM_144491.1,463-481).
gtggatatccggatagaca

SEQ ID NO: 753063 - DNA, 19 bp, Mus musculus
  siRNA target sequence for Dph2l1 (NM_144491.1,538-556).
ctggtcagcaccattcagt

SEQ ID NO: 753064 - DNA, 19 bp, Mus musculus
  siRNA target sequence for Dph2l1 (NM_144491.1,540-558).
ggtcagcaccattcagttt

SEQ ID NO: 753065 - DNA, 19 bp, Mus musculus
  siRNA target sequence for Dph2l1 (NM_144491.1,704-722).
gagatggccgctttcatct

SEQ ID NO: 753066 - DNA, 19 bp, Mus musculus
  siRNA target sequence for Dph2l1 (NM_144491.1,735-753).
gattgccaaccctaatata

SEQ ID NO: 753067 - DNA, 19 bp, Mus musculus
  siRNA target sequence for Dph2l1 (NM_144491.1,850-868).
gcacgctcagccaaatcct

SEQ ID NO: 753068 - DNA, 19 bp, Mus musculus
  siRNA target sequence for Dph2l1 (NM_144491.1,1139-1157).
cctaccccatggacttcta

SEQ ID NO: 753069 - DNA, 19 bp, Mus musculus
  siRNA target sequence for Dph2l1 (NM_144491.1,1175-1193).
ggccatggacagtgaacta

SEQ ID NO: 753070 - DNA, 19 bp, Mus musculus
  siRNA target sequence for Murr1 (NM_144514.1,705-723).
gcgtaccatcttccattaa

SEQ ID NO: 753071 - DNA, 19 bp, Mus musculus
  siRNA target sequence for Murr1 (NM_144514.1,706-724).
cgtaccatcttccattaaa

SEQ ID NO: 753072 - DNA, 19 bp, Mus musculus
  siRNA target sequence for Murr1 (NM_144514.1,710-728).
ccatcttccattaaagaga

SEQ ID NO: 753073 - DNA, 19 bp, Mus musculus
  siRNA target sequence for Murr1 (NM_144514.1,826-844).
cctttcccacgttcttgaa

SEQ ID NO: 753074 - DNA, 19 bp, Mus musculus
  siRNA target sequence for Murr1 (NM_144514.1,851-869).
cagcacgtcatggtagaaa

SEQ ID NO: 753075 - DNA, 19 bp, Mus musculus
  siRNA target sequence for Murr1 (NM_144514.1,856-874).
cgtcatggtagaaatccaa

SEQ ID NO: 753076 - DNA, 19 bp, Mus musculus
  siRNA target sequence for Murr1 (NM_144514.1,890-908).
gcatctgcagacatggatt

SEQ ID NO: 753077 - DNA, 19 bp, Mus musculus
  siRNA target sequence for Murr1 (NM_144514.1,891-909).
catctgcagacatggattt

SEQ ID NO: 753078 - DNA, 19 bp, Mus musculus
  siRNA target sequence for Murr1 (NM_144514.1,894-912).
ctgcagacatggatttcaa

SEQ ID NO: 753079 - DNA, 19 bp, Mus musculus
  siRNA target sequence for Murr1 (NM_144514.1,928-946).
cctgactgctcaaaccaaa

SEQ ID NO: 753080 - DNA, 19 bp, Mus musculus
  siRNA target sequence for Murr1 (NM_144514.1,977-995).
gcagtcatctccaagtttt

SEQ ID NO: 753081 - DNA, 19 bp, Mus musculus
  siRNA target sequence for Murr1 (NM_144514.1,1122-1140).
gccctgttgccataataga

SEQ ID NO: 753082 - DNA, 19 bp, Mus musculus
  siRNA target sequence for Murr1 (NM_144514.1,1131-1149).
ccataatagagctggaatt

SEQ ID NO: 753083 - DNA, 19 bp, Mus musculus
  siRNA target sequence for Murr1 (NM_144514.1,1161-1179).
gacaggaatctgaattttt

SEQ ID NO: 753084 - DNA, 19 bp, Mus musculus
  siRNA target sequence for 2810453K03Rik (NM_144517.2,204-222).
cagactcgaatcactcaaa

SEQ ID NO: 753085 - DNA, 19 bp, Mus musculus
  siRNA target sequence for 2810453K03Rik (NM_144517.2,206-224).
gactcgaatcactcaaaga

SEQ ID NO: 753086 - DNA, 19 bp, Mus musculus
  siRNA target sequence for 2810453K03Rik (NM_144517.2,326-344).
caccccctgagcatctcaa

SEQ ID NO: 753087 - DNA, 19 bp, Mus musculus
  siRNA target sequence for 2810453K03Rik (NM_144517.2,329-347).
cccctgagcatctcaaaga

SEQ ID NO: 753088 - DNA, 19 bp, Mus musculus
  siRNA target sequence for 2810453K03Rik (NM_144517.2,435-453).
cccactagcacgaaagaga

SEQ ID NO: 753089 - DNA, 19 bp, Mus musculus
  siRNA target sequence for 2810453K03Rik (NM_144517.2,500-518).
gaacggatgagccagattt

SEQ ID NO: 753090 - DNA, 19 bp, Mus musculus
  siRNA target sequence for 2810453K03Rik (NM_144517.2,510-528).
gccagatttaagccttttt

SEQ ID NO: 753091 - DNA, 19 bp, Mus musculus
  siRNA target sequence for 2810453K03Rik (NM_144517.2,522-540).
cctttttcgacccgtttat

SEQ ID NO: 753092 - DNA, 19 bp, Mus musculus
  siRNA target sequence for 2810453K03Rik (NM_144517.2,576-594).
ccgcaacccaaattatgaa

SEQ ID NO: 753093 - DNA, 19 bp, Mus musculus
  siRNA target sequence for 2810453K03Rik (NM_144517.2,578-596).
gcaacccaaattatgaaaa

SEQ ID NO: 753094 - DNA, 19 bp, Mus musculus
  siRNA target sequence for 2810453K03Rik (NM_144517.2,607-625).
cttagttttaggactcatt

SEQ ID NO: 753095 - DNA, 19 bp, Mus musculus
  siRNA target sequence for 2810453K03Rik (NM_144517.2,617-635).
ggactcatttgggtttaat

SEQ ID NO: 753096 - DNA, 19 bp, Mus musculus
  siRNA target sequence for 2810453K03Rik (NM_144517.2,644-662).
ctctgaaagtaaaagacat

SEQ ID NO: 753097 - DNA, 19 bp, Mus musculus
  siRNA target sequence for 2810453K03Rik (NM_144517.2,685-703).
gtagaacttggcttaaaca

SEQ ID NO: 753098 - DNA, 19 bp, Mus musculus
  siRNA target sequence for 2810453K03Rik (NM_144517.2,707-725).
gacaactgggaatagatga

SEQ ID NO: 753099 - DNA, 19 bp, Mus musculus
  siRNA target sequence for 2810453K03Rik (NM_144517.2,733-751).
caagtgcctcctgaacttt

SEQ ID NO: 753100 - DNA, 19 bp, Mus musculus
  siRNA target sequence for 2810453K03Rik (NM_144517.2,738-756).
gcctcctgaactttttgaa

SEQ ID NO: 753101 - DNA, 19 bp, Mus musculus
  siRNA target sequence for 2810453K03Rik (NM_144517.2,863-881).
gggcgctcattctgaatat

SEQ ID NO: 753102 - DNA, 19 bp, Mus musculus
  siRNA target sequence for 2810453K03Rik (NM_144517.2,865-883).
gcgctcattctgaatatct

SEQ ID NO: 753103 - DNA, 19 bp, Mus musculus
  siRNA target sequence for 2810453K03Rik (NM_144517.2,887-905).
gtcagcctgaggatatcct

SEQ ID NO: 753104 - DNA, 19 bp, Mus musculus
  siRNA target sequence for 2810453K03Rik (NM_144517.2,892-910).
cctgaggatatcctgtatt

SEQ ID NO: 753105 - DNA, 19 bp, Mus musculus
  siRNA target sequence for 2810453K03Rik (NM_144517.2,978-996).
gaagctgacagcaagcaat

SEQ ID NO: 753106 - DNA, 19 bp, Mus musculus
  siRNA target sequence for 2810453K03Rik (NM_144517.2,988-1006).
gcaagcaatgatgattact

SEQ ID NO: 753107 - DNA, 19 bp, Mus musculus
  siRNA target sequence for 2810453K03Rik (NM_144517.2,1066-1084).
gtactgggccactttgcat

SEQ ID NO: 753108 - DNA, 19 bp, Mus musculus
  siRNA target sequence for 2810453K03Rik (NM_144517.2,1072-1090).
ggccactttgcatacaaca

SEQ ID NO: 753109 - DNA, 19 bp, Mus musculus
  siRNA target sequence for 2810453K03Rik (NM_144517.2,1093-1111).
gcttcaccgccgaagtcat

SEQ ID NO: 753110 - DNA, 19 bp, Mus musculus
  siRNA target sequence for 2810453K03Rik (NM_144517.2,1097-1115).
caccgccgaagtcatacat

SEQ ID NO: 753111 - DNA, 19 bp, Mus musculus
  siRNA target sequence for 2810453K03Rik (NM_144517.2,1099-1117).
ccgccgaagtcatacatca

SEQ ID NO: 753112 - DNA, 19 bp, Mus musculus
  siRNA target sequence for 2810453K03Rik (NM_144517.2,1118-1136).
gaggaaaactaggattaga

SEQ ID NO: 753113 - DNA, 19 bp, Mus musculus
  siRNA target sequence for 2810453K03Rik (NM_144517.2,1222-1240).
catgaaccttacaaattgt

SEQ ID NO: 753114 - DNA, 19 bp, Mus musculus
  siRNA target sequence for 2810453K03Rik (NM_144517.2,1329-1347).
gctgtttgaaactcttctt

SEQ ID NO: 753115 - DNA, 19 bp, Mus musculus
  siRNA target sequence for 2810453K03Rik (NM_144517.2,1396-1414).
caaccacttcggatatcat

SEQ ID NO: 753116 - DNA, 19 bp, Mus musculus
  siRNA target sequence for 2810453K03Rik (NM_144517.2,1400-1418).
cacttcggatatcatttaa

SEQ ID NO: 753117 - DNA, 19 bp, Mus musculus
  siRNA target sequence for 2810453K03Rik (NM_144517.2,1402-1420).
cttcggatatcatttaaat

SEQ ID NO: 753118 - DNA, 19 bp, Mus musculus
  siRNA target sequence for 2810453K03Rik (NM_144517.2,1405-1423).
cggatatcatttaaatgga

SEQ ID NO: 753119 - DNA, 19 bp, Mus musculus
  siRNA target sequence for 2810453K03Rik (NM_144517.2,1406-1424).
ggatatcatttaaatggat

SEQ ID NO: 753120 - DNA, 19 bp, Mus musculus
  siRNA target sequence for 2810453K03Rik (NM_144517.2,1422-1440).
gatggttcgagctttttct

SEQ ID NO: 753121 - DNA, 19 bp, Mus musculus
  siRNA target sequence for 2810453K03Rik (NM_144517.2,1591-1609).
gttctggctgacctttcta

SEQ ID NO: 753122 - DNA, 19 bp, Mus musculus
  siRNA target sequence for 2810453K03Rik (NM_144517.2,1594-1612).
ctggctgacctttctactt

SEQ ID NO: 753123 - DNA, 19 bp, Mus musculus
  siRNA target sequence for 2900011O08Rik (NM_144518.2,232-250).
gaagccagctagacatcat

SEQ ID NO: 753124 - DNA, 19 bp, Mus musculus
  siRNA target sequence for 2900011O08Rik (NM_144518.2,576-594).
gatttcctgagaatcaagt

SEQ ID NO: 753125 - DNA, 19 bp, Mus musculus
  siRNA target sequence for 2900011O08Rik (NM_144518.2,593-611).
gttaaaacctctagacaaa

SEQ ID NO: 753126 - DNA, 19 bp, Mus musculus
  siRNA target sequence for 2900011O08Rik (NM_144518.2,601-619).
ctctagacaaagtaaccaa

SEQ ID NO: 753127 - DNA, 19 bp, Mus musculus
  siRNA target sequence for 6230400O18Rik (NM_144519.2,458-476).
cccttctcgctattcagat

SEQ ID NO: 753128 - DNA, 19 bp, Mus musculus
  siRNA target sequence for 6230400O18Rik (NM_144519.2,459-477).
ccttctcgctattcagatt

SEQ ID NO: 753129 - DNA, 19 bp, Mus musculus
  siRNA target sequence for 6230400O18Rik (NM_144519.2,740-758).
gatctgtgatgaagaatgt

SEQ ID NO: 753130 - DNA, 19 bp, Mus musculus
  siRNA target sequence for 6230400O18Rik (NM_144519.2,794-812).
ggagagccctatagaagtt

SEQ ID NO: 753131 - DNA, 19 bp, Mus musculus
  siRNA target sequence for 6230400O18Rik (NM_144519.2,924-942).
gaaccaccagctaaactct

SEQ ID NO: 753132 - DNA, 19 bp, Mus musculus
  siRNA target sequence for 6230400O18Rik (NM_144519.2,928-946).
caccagctaaactctgtaa

SEQ ID NO: 753133 - DNA, 19 bp, Mus musculus
  siRNA target sequence for 6230400O18Rik (NM_144519.2,930-948).
ccagctaaactctgtaaaa

SEQ ID NO: 753134 - DNA, 19 bp, Mus musculus
  siRNA target sequence for 6230400O18Rik (NM_144519.2,1033-1051).
gtgaactttgtgaatttaa

SEQ ID NO: 753135 - DNA, 19 bp, Mus musculus
  siRNA target sequence for 6230400O18Rik (NM_144519.2,1066-1084).
ctgacctaaagcaacatgt

SEQ ID NO: 753136 - DNA, 19 bp, Mus musculus
  siRNA target sequence for 6230400O18Rik (NM_144519.2,1101-1119).
cgcactgactcgaatgtgt

SEQ ID NO: 753137 - DNA, 19 bp, Mus musculus
  siRNA target sequence for 6230400O18Rik (NM_144519.2,1169-1187).
cgccaaactccatgaagaa

SEQ ID NO: 753138 - DNA, 19 bp, Mus musculus
  siRNA target sequence for 6230400O18Rik (NM_144519.2,1185-1203).
gaagacccctacatctgta

SEQ ID NO: 753139 - DNA, 19 bp, Mus musculus
  siRNA target sequence for 6230400O18Rik (NM_144519.2,1188-1206).
gacccctacatctgtaagt

SEQ ID NO: 753140 - DNA, 19 bp, Mus musculus
  siRNA target sequence for 6230400O18Rik (NM_144519.2,1433-1451).
gcacgctcgcagactgatt

SEQ ID NO: 753141 - DNA, 19 bp, Mus musculus
  siRNA target sequence for 6230400O18Rik (NM_144519.2,1488-1506).
cagtgcagccttttaagca

SEQ ID NO: 753142 - DNA, 19 bp, Mus musculus
  siRNA target sequence for 6230400O18Rik (NM_144519.2,1593-1611).
gtggctatcgagcatacta

SEQ ID NO: 753143 - DNA, 19 bp, Mus musculus
  siRNA target sequence for 6230400O18Rik (NM_144519.2,1595-1613).
ggctatcgagcatactaaa

SEQ ID NO: 753144 - DNA, 19 bp, Mus musculus
  siRNA target sequence for 6230400O18Rik (NM_144519.2,1596-1614).
gctatcgagcatactaaaa

SEQ ID NO: 753145 - DNA, 19 bp, Mus musculus
  siRNA target sequence for 6230400O18Rik (NM_144519.2,1657-1675).
gcatgttggaatattgcaa

SEQ ID NO: 753146 - DNA, 19 bp, Mus musculus
  siRNA target sequence for 6230400O18Rik (NM_144519.2,1676-1694).
gcatctaaattcacatcta

SEQ ID NO: 753147 - DNA, 19 bp, Mus musculus
  siRNA target sequence for 6230400O18Rik (NM_144519.2,1692-1710).
ctatctgaagggatttact

SEQ ID NO: 753148 - DNA, 19 bp, Mus musculus
  siRNA target sequence for 6230400O18Rik (NM_144519.2,1737-1755).
ggacaaattgacgatctta

SEQ ID NO: 753149 - DNA, 19 bp, Mus musculus
  siRNA target sequence for 6230400O18Rik (NM_144519.2,1738-1756).
gacaaattgacgatcttaa

SEQ ID NO: 753150 - DNA, 19 bp, Mus musculus
  siRNA target sequence for 6230400O18Rik (NM_144519.2,1748-1766).
cgatcttaaaattcatcta

SEQ ID NO: 753151 - DNA, 19 bp, Mus musculus
  siRNA target sequence for 6230400O18Rik (NM_144519.2,1752-1770).
cttaaaattcatctagatt

SEQ ID NO: 753152 - DNA, 19 bp, Mus musculus
  siRNA target sequence for 6230400O18Rik (NM_144519.2,1780-1798).
cagctgacttgcctcataa

SEQ ID NO: 753153 - DNA, 19 bp, Mus musculus
  siRNA target sequence for 6230400O18Rik (NM_144519.2,1782-1800).
gctgacttgcctcataaat

SEQ ID NO: 753154 - DNA, 19 bp, Mus musculus
  siRNA target sequence for 6230400O18Rik (NM_144519.2,1785-1803).
gacttgcctcataaatgta

SEQ ID NO: 753155 - DNA, 19 bp, Mus musculus
  siRNA target sequence for 6230400O18Rik (NM_144519.2,1825-1843).
ggaacgaaagggacttact

SEQ ID NO: 753156 - DNA, 19 bp, Mus musculus
  siRNA target sequence for 1110031B06Rik (NM_144521.1,100-118).
gtccactcctggtcttgtt

SEQ ID NO: 753157 - DNA, 19 bp, Mus musculus
  siRNA target sequence for 1110031B06Rik (NM_144521.1,108-126).
ctggtcttgttcctactat

SEQ ID NO: 753158 - DNA, 19 bp, Mus musculus
  siRNA target sequence for 1110031B06Rik (NM_144521.1,110-128).
ggtcttgttcctactatct

SEQ ID NO: 753159 - DNA, 19 bp, Mus musculus
  siRNA target sequence for 1110031B06Rik (NM_144521.1,162-180).
gaccctgactcctcattca

SEQ ID NO: 753160 - DNA, 19 bp, Mus musculus
  siRNA target sequence for 1110031B06Rik (NM_144521.1,170-188).
ctcctcattcactgaagtt

SEQ ID NO: 753161 - DNA, 19 bp, Mus musculus
  siRNA target sequence for 1110031B06Rik (NM_144521.1,172-190).
cctcattcactgaagttca

SEQ ID NO: 753162 - DNA, 19 bp, Mus musculus
  siRNA target sequence for 1110031B06Rik (NM_144521.1,256-274).
gagtcatctctctttatct

SEQ ID NO: 753163 - DNA, 19 bp, Mus musculus
  siRNA target sequence for 1110031B06Rik (NM_144521.1,338-356).
gtcgaaatgtggtcttcaa

SEQ ID NO: 753164 - DNA, 19 bp, Mus musculus
  siRNA target sequence for 1110031B06Rik (NM_144521.1,578-596).
gattgctgacagaattgga

SEQ ID NO: 753165 - DNA, 19 bp, Mus musculus
  siRNA target sequence for 1110031B06Rik (NM_144521.1,611-629).
ggccttttggctctaagtt

SEQ ID NO: 753166 - DNA, 19 bp, Mus musculus
  siRNA target sequence for 1110031B06Rik (NM_144521.1,612-630).
gccttttggctctaagttt

SEQ ID NO: 753167 - DNA, 19 bp, Mus musculus
  siRNA target sequence for 1110031B06Rik (NM_144521.1,636-654).
gatgccggcagaagaaaat

SEQ ID NO: 753168 - DNA, 19 bp, Mus musculus
  siRNA target sequence for 1110031B06Rik (NM_144521.1,641-659).
cggcagaagaaaatctcaa

SEQ ID NO: 753169 - DNA, 19 bp, Mus musculus
  siRNA target sequence for 1110031B06Rik (NM_144521.1,708-726).
gatcacggtccctgctatt

SEQ ID NO: 753170 - DNA, 19 bp, Mus musculus
  siRNA target sequence for 1110031B06Rik (NM_144521.1,711-729).
cacggtccctgctattatt

SEQ ID NO: 753171 - DNA, 19 bp, Mus musculus
  siRNA target sequence for 1110031B06Rik (NM_144521.1,737-755).
gagcagagtctcattccaa

SEQ ID NO: 753172 - DNA, 19 bp, Mus musculus
  siRNA target sequence for 1110031B06Rik (NM_144521.1,780-798).
ctccgctctggaaatctat

SEQ ID NO: 753173 - DNA, 19 bp, Mus musculus
  siRNA target sequence for 1110031B06Rik (NM_144521.1,784-802).
gctctggaaatctatgact

SEQ ID NO: 753174 - DNA, 19 bp, Mus musculus
  siRNA target sequence for 1110031B06Rik (NM_144521.1,852-870).
caaggttcactctccttat

SEQ ID NO: 753175 - DNA, 19 bp, Mus musculus
  siRNA target sequence for 1110031B06Rik (NM_144521.1,910-928).
gtggcttaccagctgatat

SEQ ID NO: 753176 - DNA, 19 bp, Mus musculus
  siRNA target sequence for 1110031B06Rik (NM_144521.1,1293-1311).
gcaaaaccggcgtatgaga

SEQ ID NO: 753177 - DNA, 19 bp, Mus musculus
  siRNA target sequence for 1110031B06Rik (NM_144521.1,1294-1312).
caaaaccggcgtatgagaa

SEQ ID NO: 753178 - DNA, 19 bp, Mus musculus
  siRNA target sequence for 1110030H02Rik (NM_144524.1,90-108).
cgtcgtgcctgtattacct

SEQ ID NO: 753179 - DNA, 19 bp, Mus musculus
  siRNA target sequence for 1110030H02Rik (NM_144524.1,125-143).
cgcctcttccgctttctct

SEQ ID NO: 753180 - DNA, 19 bp, Mus musculus
  siRNA target sequence for 1110030H02Rik (NM_144524.1,154-172).
ctttacatgtcgaaaaaat

SEQ ID NO: 753181 - DNA, 19 bp, Mus musculus
  siRNA target sequence for 1110030H02Rik (NM_144524.1,198-216).
cccaggtagagggtaactt

SEQ ID NO: 753182 - DNA, 19 bp, Mus musculus
  siRNA target sequence for 1110030H02Rik (NM_144524.1,199-217).
ccaggtagagggtaacttt

SEQ ID NO: 753183 - DNA, 19 bp, Mus musculus
  siRNA target sequence for 1110030H02Rik (NM_144524.1,353-371).
ctggccctcctgatggata

SEQ ID NO: 753184 - DNA, 19 bp, Mus musculus
  siRNA target sequence for 1110030H02Rik (NM_144524.1,355-373).
ggccctcctgatggataat

SEQ ID NO: 753185 - DNA, 19 bp, Mus musculus
  siRNA target sequence for 1110030H02Rik (NM_144524.1,356-374).
gccctcctgatggataatt

SEQ ID NO: 753186 - DNA, 19 bp, Mus musculus
  siRNA target sequence for 1110030H02Rik (NM_144524.1,700-718).
cccaatggaaataccttat

SEQ ID NO: 753187 - DNA, 19 bp, Mus musculus
  siRNA target sequence for 1110030H02Rik (NM_144524.1,706-724).
ggaaataccttatcatgaa

SEQ ID NO: 753188 - DNA, 19 bp, Mus musculus
  siRNA target sequence for 1110030H02Rik (NM_144524.1,707-725).
gaaataccttatcatgaaa

SEQ ID NO: 753189 - DNA, 19 bp, Mus musculus
  siRNA target sequence for 1110030H02Rik (NM_144524.1,734-752).
cgagaatgggaggatttct

SEQ ID NO: 753190 - DNA, 19 bp, Mus musculus
  siRNA target sequence for 1110030H02Rik (NM_144524.1,808-826).
cactctgatgtcgtataat

SEQ ID NO: 753191 - DNA, 19 bp, Mus musculus
  siRNA target sequence for 1110030H02Rik (NM_144524.1,884-902).
gacatcctcaactggaatt

SEQ ID NO: 753192 - DNA, 19 bp, Mus musculus
  siRNA target sequence for 1110030H02Rik (NM_144524.1,1157-1175).
gacaatgtgggcttagtgt

SEQ ID NO: 753193 - DNA, 19 bp, Mus musculus
  siRNA target sequence for 1110030H02Rik (NM_144524.1,1226-1244).
cccctgtgtgtggcaaata

SEQ ID NO: 753194 - DNA, 19 bp, Mus musculus
  siRNA target sequence for 1110030H02Rik (NM_144524.1,1263-1281).
cgcgtcggggtgatgtcaa

SEQ ID NO: 753195 - DNA, 19 bp, Mus musculus
  siRNA target sequence for 1110030H02Rik (NM_144524.1,1346-1364).
cactgccccatcatcttgt

SEQ ID NO: 753196 - DNA, 19 bp, Mus musculus
  siRNA target sequence for 1110030H02Rik (NM_144524.1,1392-1410).
cacctctctacaacttcat

SEQ ID NO: 753197 - DNA, 19 bp, Mus musculus
  siRNA target sequence for 1110030H02Rik (NM_144524.1,1538-1556).
gactgctgtcaatatgtca

SEQ ID NO: 753198 - DNA, 19 bp, Mus musculus
  siRNA target sequence for 1110030H02Rik (NM_144524.1,1599-1617).
gagacttcctactacgatt

SEQ ID NO: 753199 - DNA, 19 bp, Mus musculus
  siRNA target sequence for 1110030H02Rik (NM_144524.1,1701-1719).
ctggttgggccgagtgtat

SEQ ID NO: 753200 - DNA, 19 bp, Mus musculus
  siRNA target sequence for 1110030H02Rik (NM_144524.1,1703-1721).
ggttgggccgagtgtatct

SEQ ID NO: 753201 - DNA, 19 bp, Mus musculus
  siRNA target sequence for 1110030H02Rik (NM_144524.1,1707-1725).
gggccgagtgtatctttga

SEQ ID NO: 753202 - DNA, 19 bp, Mus musculus
  siRNA target sequence for 1110030H02Rik (NM_144524.1,1865-1883).
gggatgacagtggattaca

SEQ ID NO: 753203 - DNA, 19 bp, Mus musculus
  siRNA target sequence for 1110030H02Rik (NM_144524.1,1867-1885).
gatgacagtggattacatt

SEQ ID NO: 753204 - DNA, 19 bp, Mus musculus
  siRNA target sequence for 6720460F02Rik (NM_144526.2,105-123).
gcagacgatcactcctaaa

SEQ ID NO: 753205 - DNA, 19 bp, Mus musculus
  siRNA target sequence for 6720460F02Rik (NM_144526.2,108-126).
gacgatcactcctaaagga

SEQ ID NO: 753206 - DNA, 19 bp, Mus musculus
  siRNA target sequence for 2410030J07Rik (NM_144527.2,174-192).
caggttccaatgtgattca

SEQ ID NO: 753207 - DNA, 19 bp, Mus musculus
  siRNA target sequence for 2410030J07Rik (NM_144527.2,176-194).
ggttccaatgtgattcaaa

SEQ ID NO: 753208 - DNA, 19 bp, Mus musculus
  siRNA target sequence for 2410030J07Rik (NM_144527.2,370-388).
caaaagccacataaccatt

SEQ ID NO: 753209 - DNA, 19 bp, Mus musculus
  siRNA target sequence for 2410030J07Rik (NM_144527.2,398-416).
catgtgatgccttctactt

SEQ ID NO: 753210 - DNA, 19 bp, Mus musculus
  siRNA target sequence for 2410030J07Rik (NM_144527.2,494-512).
gaaggcgtggggatgacaa

SEQ ID NO: 753211 - DNA, 19 bp, Mus musculus
  siRNA target sequence for 2410030J07Rik (NM_144527.2,548-566).
ggcctagcaagggatttta

SEQ ID NO: 753212 - DNA, 19 bp, Mus musculus
  siRNA target sequence for 2410030J07Rik (NM_144527.2,551-569).
ctagcaagggattttatgt

SEQ ID NO: 753213 - DNA, 19 bp, Mus musculus
  siRNA target sequence for 2410030J07Rik (NM_144527.2,695-713).
gccatgctagagacgttat

SEQ ID NO: 753214 - DNA, 19 bp, Mus musculus
  siRNA target sequence for 2410030J07Rik (NM_144527.2,696-714).
ccatgctagagacgttata

SEQ ID NO: 753215 - DNA, 19 bp, Mus musculus
  siRNA target sequence for 2410030J07Rik (NM_144527.2,700-718).
gctagagacgttatactca

SEQ ID NO: 753216 - DNA, 19 bp, Mus musculus
  siRNA target sequence for 2410030J07Rik (NM_144527.2,753-771).
gacctgatacaaataagga

SEQ ID NO: 753217 - DNA, 19 bp, Mus musculus
  siRNA target sequence for 2410030J07Rik (NM_144527.2,758-776).
gatacaaataaggatgtat

SEQ ID NO: 753218 - DNA, 19 bp, Mus musculus
  siRNA target sequence for 2410030J07Rik (NM_144527.2,980-998).
cgacagcagttggaattga

SEQ ID NO: 753219 - DNA, 19 bp, Mus musculus
  siRNA target sequence for 2410030J07Rik (NM_144527.2,992-1010).
gaattgatccgtttacaga

SEQ ID NO: 753220 - DNA, 19 bp, Mus musculus
  siRNA target sequence for 2410030J07Rik (NM_144527.2,1056-1074).
ctgctttcgctccattact

SEQ ID NO: 753221 - DNA, 19 bp, Mus musculus
  siRNA target sequence for 2410030J07Rik (NM_144527.2,1285-1303).
gcgagagaacactttctta

SEQ ID NO: 753222 - DNA, 19 bp, Mus musculus
  siRNA target sequence for 2410030J07Rik (NM_144527.2,1352-1370).
gagcttgaaaagaaactct

SEQ ID NO: 753223 - DNA, 19 bp, Mus musculus
  siRNA target sequence for 2410030J07Rik (NM_144527.2,1394-1412).
ctcattagggagtctctaa

SEQ ID NO: 753224 - DNA, 19 bp, Mus musculus
  siRNA target sequence for 2410030J07Rik (NM_144527.2,1396-1414).
cattagggagtctctaaaa

SEQ ID NO: 753225 - DNA, 19 bp, Mus musculus
  siRNA target sequence for 2410030J07Rik (NM_144527.2,1461-1479).
gggtcaaaggtcgtgataa

SEQ ID NO: 753226 - DNA, 19 bp, Mus musculus
  siRNA target sequence for 2410030J07Rik (NM_144527.2,1462-1480).
ggtcaaaggtcgtgataaa

SEQ ID NO: 753227 - DNA, 19 bp, Mus musculus
  siRNA target sequence for 2410030J07Rik (NM_144527.2,1465-1483).
caaaggtcgtgataaacat

SEQ ID NO: 753228 - DNA, 19 bp, Mus musculus
  siRNA target sequence for 2410030J07Rik (NM_144527.2,1469-1487).
ggtcgtgataaacatatca

SEQ ID NO: 753229 - DNA, 19 bp, Mus musculus
  siRNA target sequence for 2410030J07Rik (NM_144527.2,1615-1633).
gcttaaggacgctgaatta

SEQ ID NO: 753230 - DNA, 19 bp, Mus musculus
  siRNA target sequence for 2410030J07Rik (NM_144527.2,1721-1739).
ctggaaagtctgagacaaa

SEQ ID NO: 753231 - DNA, 19 bp, Mus musculus
  siRNA target sequence for 2410030J07Rik (NM_144527.2,1750-1768).
cctctcctctgctagacat

SEQ ID NO: 753232 - DNA, 19 bp, Mus musculus
  siRNA target sequence for 2410030J07Rik (NM_144527.2,1764-1782).
gacatagctttcaagataa

SEQ ID NO: 753233 - DNA, 19 bp, Mus musculus
  siRNA target sequence for 2410030J07Rik (NM_144527.2,1814-1832).
ctcagagtggacatggaat

SEQ ID NO: 753234 - DNA, 19 bp, Mus musculus
  siRNA target sequence for 2410030J07Rik (NM_144527.2,1848-1866).
gtgactccctccgaaagat

SEQ ID NO: 753235 - DNA, 19 bp, Mus musculus
  siRNA target sequence for 2410030J07Rik (NM_144527.2,2013-2031).
ccgtgaaggagctttcagt

SEQ ID NO: 753236 - DNA, 19 bp, Mus musculus
  siRNA target sequence for 2410030J07Rik (NM_144527.2,2152-2170).
ggccagttgccttcaagat

SEQ ID NO: 753237 - DNA, 19 bp, Mus musculus
  siRNA target sequence for 2410030J07Rik (NM_144527.2,2154-2172).
ccagttgccttcaagatct

SEQ ID NO: 753238 - DNA, 19 bp, Mus musculus
  siRNA target sequence for 2410030J07Rik (NM_144527.2,2205-2223).
cccagggccacaatcctaa

SEQ ID NO: 753239 - DNA, 19 bp, Mus musculus
  siRNA target sequence for 2410030J07Rik (NM_144527.2,2262-2280).
cagggacgcagctagatct

SEQ ID NO: 753240 - DNA, 19 bp, Mus musculus
  siRNA target sequence for 2410030J07Rik (NM_144527.2,2265-2283).
ggacgcagctagatctaca

SEQ ID NO: 753241 - DNA, 19 bp, Mus musculus
  siRNA target sequence for 2410030J07Rik (NM_144527.2,2333-2351).
catgacattgaggacttaa

SEQ ID NO: 753242 - DNA, 19 bp, Mus musculus
  siRNA target sequence for 2610010O19Rik (NM_144528.1,116-134).
cagcccggacggtacttct

SEQ ID NO: 753243 - DNA, 19 bp, Mus musculus
  siRNA target sequence for 2610010O19Rik (NM_144528.1,164-182).
cgcctgccggattacatct

SEQ ID NO: 753244 - DNA, 19 bp, Mus musculus
  siRNA target sequence for 2610010O19Rik (NM_144528.1,192-210).
gcgagtctggcttcattga

SEQ ID NO: 753245 - DNA, 19 bp, Mus musculus
  siRNA target sequence for 2610010O19Rik (NM_144528.1,280-298).
ccggcagccatttgagaat

SEQ ID NO: 753246 - DNA, 19 bp, Mus musculus
  siRNA target sequence for 2610010O19Rik (NM_144528.1,351-369).
gcatcttcgacgatagctt

SEQ ID NO: 753247 - DNA, 19 bp, Mus musculus
  siRNA target sequence for 2610010O19Rik (NM_144528.1,352-370).
catcttcgacgatagcttt

SEQ ID NO: 753248 - DNA, 19 bp, Mus musculus
  siRNA target sequence for 2610010O19Rik (NM_144528.1,358-376).
cgacgatagctttgagatt

SEQ ID NO: 753249 - DNA, 19 bp, Mus musculus
  siRNA target sequence for 2610010O19Rik (NM_144528.1,554-572).
ctcgtgaatggcatcatct

SEQ ID NO: 753250 - DNA, 19 bp, Mus musculus
  siRNA target sequence for 2610010O19Rik (NM_144528.1,675-693).
cgcagctcctcaatcagtt

SEQ ID NO: 753251 - DNA, 19 bp, Mus musculus
  siRNA target sequence for 2610010O19Rik (NM_144528.1,680-698).
ctcctcaatcagtttgaga

SEQ ID NO: 753252 - DNA, 19 bp, Mus musculus
  siRNA target sequence for 2610010O19Rik (NM_144528.1,954-972).
gcttgaccggtgtaggttt

SEQ ID NO: 753253 - DNA, 19 bp, Mus musculus
  siRNA target sequence for 2610010O19Rik (NM_144528.1,1002-1020).
gctcgcccagcaatgagaa

SEQ ID NO: 753254 - DNA, 19 bp, Mus musculus
  siRNA target sequence for 5730403H17Rik (NM_144529.1,173-191).
cgaagtcctcagtgaagat

SEQ ID NO: 753255 - DNA, 19 bp, Mus musculus
  siRNA target sequence for 5730403H17Rik (NM_144529.1,216-234).
gacactgtgcgttcaatgt

SEQ ID NO: 753256 - DNA, 19 bp, Mus musculus
  siRNA target sequence for 5730403H17Rik (NM_144529.1,288-306).
gatgccgagaggagacata

SEQ ID NO: 753257 - DNA, 19 bp, Mus musculus
  siRNA target sequence for 5730403H17Rik (NM_144529.1,296-314).
gaggagacataaaaagctt

SEQ ID NO: 753258 - DNA, 19 bp, Mus musculus
  siRNA target sequence for 5730403H17Rik (NM_144529.1,322-340).
cagctcttgcccagaacat

SEQ ID NO: 753259 - DNA, 19 bp, Mus musculus
  siRNA target sequence for 5730403H17Rik (NM_144529.1,433-451).
cacaacatgaagtctttgt

SEQ ID NO: 753260 - DNA, 19 bp, Mus musculus
  siRNA target sequence for 5730403H17Rik (NM_144529.1,587-605).
gtcttcaggaaccaacttt

SEQ ID NO: 753261 - DNA, 19 bp, Mus musculus
  siRNA target sequence for 5730403H17Rik (NM_144529.1,606-624).
caggggcttccatccaaaa

SEQ ID NO: 753262 - DNA, 19 bp, Mus musculus
  siRNA target sequence for 5730403H17Rik (NM_144529.1,608-626).
ggggcttccatccaaaata

SEQ ID NO: 753263 - DNA, 19 bp, Mus musculus
  siRNA target sequence for 5730403H17Rik (NM_144529.1,611-629).
gcttccatccaaaatagat

SEQ ID NO: 753264 - DNA, 19 bp, Mus musculus
  siRNA target sequence for 5730403H17Rik (NM_144529.1,612-630).
cttccatccaaaatagata

SEQ ID NO: 753265 - DNA, 19 bp, Mus musculus
  siRNA target sequence for 5730403H17Rik (NM_144529.1,737-755).
gttcttcgtgacgttatta

SEQ ID NO: 753266 - DNA, 19 bp, Mus musculus
  siRNA target sequence for 5730403H17Rik (NM_144529.1,740-758).
cttcgtgacgttattagaa

SEQ ID NO: 753267 - DNA, 19 bp, Mus musculus
  siRNA target sequence for 5730403H17Rik (NM_144529.1,759-777).
gcccaagcagattaccata

SEQ ID NO: 753268 - DNA, 19 bp, Mus musculus
  siRNA target sequence for 5730403H17Rik (NM_144529.1,978-996).
gctggagcctccaagttga

SEQ ID NO: 753269 - DNA, 19 bp, Mus musculus
  siRNA target sequence for 5730403H17Rik (NM_144529.1,1030-1048).
cgcatctggatgaattcta

SEQ ID NO: 753270 - DNA, 19 bp, Mus musculus
  siRNA target sequence for 5730403H17Rik (NM_144529.1,1037-1055).
ggatgaattctattctgat

SEQ ID NO: 753271 - DNA, 19 bp, Mus musculus
  siRNA target sequence for 5730403H17Rik (NM_144529.1,1062-1080).
gctgtcgcaggtgctttaa

SEQ ID NO: 753272 - DNA, 19 bp, Mus musculus
  siRNA target sequence for 5730403H17Rik (NM_144529.1,1063-1081).
ctgtcgcaggtgctttaaa

SEQ ID NO: 753273 - DNA, 19 bp, Mus musculus
  siRNA target sequence for 5730403H17Rik (NM_144529.1,1065-1083).
gtcgcaggtgctttaaagt

SEQ ID NO: 753274 - DNA, 19 bp, Mus musculus
  siRNA target sequence for 5730403H17Rik (NM_144529.1,1102-1120).
ctgagcccttaatgacttt

SEQ ID NO: 753275 - DNA, 19 bp, Mus musculus
  siRNA target sequence for 5730403H17Rik (NM_144529.1,1104-1122).
gagcccttaatgactttca

SEQ ID NO: 753276 - DNA, 19 bp, Mus musculus
  siRNA target sequence for 5730403H17Rik (NM_144529.1,1106-1124).
gcccttaatgactttcagt

SEQ ID NO: 753277 - DNA, 19 bp, Mus musculus
  siRNA target sequence for 5730403H17Rik (NM_144529.1,1115-1133).
gactttcagtctgtatgaa

SEQ ID NO: 753278 - DNA, 19 bp, Mus musculus
  siRNA target sequence for 5730403H17Rik (NM_144529.1,1150-1168).
caagtgtgcaggatcaaga

SEQ ID NO: 753279 - DNA, 19 bp, Mus musculus
  siRNA target sequence for 5730403H17Rik (NM_144529.1,1153-1171).
gtgtgcaggatcaagacaa

SEQ ID NO: 753280 - DNA, 19 bp, Mus musculus
  siRNA target sequence for 5730403H17Rik (NM_144529.1,1155-1173).
gtgcaggatcaagacaaaa

SEQ ID NO: 753281 - DNA, 19 bp, Mus musculus
  siRNA target sequence for 5730403H17Rik (NM_144529.1,1202-1220).
gaagttgccgccacaaaat

SEQ ID NO: 753282 - DNA, 19 bp, Mus musculus
  siRNA target sequence for 5730403H17Rik (NM_144529.1,1205-1223).
gttgccgccacaaaatttt

SEQ ID NO: 753283 - DNA, 19 bp, Mus musculus
  siRNA target sequence for 5730403H17Rik (NM_144529.1,1208-1226).
gccgccacaaaattttgtt

SEQ ID NO: 753284 - DNA, 19 bp, Mus musculus
  siRNA target sequence for 5730403H17Rik (NM_144529.1,1209-1227).
ccgccacaaaattttgtta

SEQ ID NO: 753285 - DNA, 19 bp, Mus musculus
  siRNA target sequence for 5730403H17Rik (NM_144529.1,1212-1230).
ccacaaaattttgttaact

SEQ ID NO: 753286 - DNA, 19 bp, Mus musculus
  siRNA target sequence for 5730403H17Rik (NM_144529.1,1264-1282).
cccagaccagtgacgttaa

SEQ ID NO: 753287 - DNA, 19 bp, Mus musculus
  siRNA target sequence for 5730403H17Rik (NM_144529.1,1266-1284).
cagaccagtgacgttaata

SEQ ID NO: 753288 - DNA, 19 bp, Mus musculus
  siRNA target sequence for 5730403H17Rik (NM_144529.1,1268-1286).
gaccagtgacgttaataaa

SEQ ID NO: 753289 - DNA, 19 bp, Mus musculus
  siRNA target sequence for 5730403H17Rik (NM_144529.1,1270-1288).
ccagtgacgttaataaaat

SEQ ID NO: 753290 - DNA, 19 bp, Mus musculus
  siRNA target sequence for 5730403H17Rik (NM_144529.1,1328-1346).
cctgtgggccaaacaagaa

SEQ ID NO: 753291 - DNA, 19 bp, Mus musculus
  siRNA target sequence for 5730403H17Rik (NM_144529.1,1438-1456).
gagaggtagaattcaatgt

SEQ ID NO: 753292 - DNA, 19 bp, Mus musculus
  siRNA target sequence for 5730403H17Rik (NM_144529.1,1451-1469).
caatgtatcagaagcattt

SEQ ID NO: 753293 - DNA, 19 bp, Mus musculus
  siRNA target sequence for 5730403H17Rik (NM_144529.1,1476-1494).
cttgctaccccgaattcta

SEQ ID NO: 753294 - DNA, 19 bp, Mus musculus
  siRNA target sequence for 5730403H17Rik (NM_144529.1,1480-1498).
ctaccccgaattctaatca

SEQ ID NO: 753295 - DNA, 19 bp, Mus musculus
  siRNA target sequence for 5730403H17Rik (NM_144529.1,1499-1517).
ctcatcccatactggaaat

SEQ ID NO: 753296 - DNA, 19 bp, Mus musculus
  siRNA target sequence for 5730403H17Rik (NM_144529.1,1638-1656).
ggtggcactctaaatagaa

SEQ ID NO: 753297 - DNA, 19 bp, Mus musculus
  siRNA target sequence for 5730403H17Rik (NM_144529.1,1994-2012).
gcgtcgggctgtgaagaaa

SEQ ID NO: 753298 - DNA, 19 bp, Mus musculus
  siRNA target sequence for 5730403H17Rik (NM_144529.1,2511-2529).
gtcactgacaccaattcta

SEQ ID NO: 753299 - DNA, 19 bp, Mus musculus
  siRNA target sequence for 5730454B08Rik (NM_144530.1,391-409).
cagccagtgggatgtcaaa

SEQ ID NO: 753300 - DNA, 19 bp, Mus musculus
  siRNA target sequence for 5730454B08Rik (NM_144530.1,393-411).
gccagtgggatgtcaaaaa

SEQ ID NO: 753301 - DNA, 19 bp, Mus musculus
  siRNA target sequence for 5730454B08Rik (NM_144530.1,397-415).
gtgggatgtcaaaaactaa

SEQ ID NO: 753302 - DNA, 19 bp, Mus musculus
  siRNA target sequence for 5730454B08Rik (NM_144530.1,400-418).
ggatgtcaaaaactaaact

SEQ ID NO: 753303 - DNA, 19 bp, Mus musculus
  siRNA target sequence for 5730454B08Rik (NM_144530.1,1111-1129).
gaatcgccagaaactaaca

SEQ ID NO: 753304 - DNA, 19 bp, Mus musculus
  siRNA target sequence for 5730454B08Rik (NM_144530.1,1397-1415).
gttgcctcacgctaacaga

SEQ ID NO: 753305 - DNA, 19 bp, Mus musculus
  siRNA target sequence for 5730454B08Rik (NM_144530.1,1449-1467).
cactgttgctgttagcaaa

SEQ ID NO: 753306 - DNA, 19 bp, Mus musculus
  siRNA target sequence for 5730454B08Rik (NM_144530.1,1643-1661).
ccaagagagcaggtgtaaa

SEQ ID NO: 753307 - DNA, 19 bp, Mus musculus
  siRNA target sequence for 5730454B08Rik (NM_144530.1,1649-1667).
gagcaggtgtaaaagaaga

SEQ ID NO: 753308 - DNA, 19 bp, Mus musculus
  siRNA target sequence for 5730454B08Rik (NM_144530.1,1873-1891).
ggagatgaggcttcttctt

SEQ ID NO: 753309 - DNA, 19 bp, Mus musculus
  siRNA target sequence for 5730454B08Rik (NM_144530.1,1876-1894).
gatgaggcttcttcttata

SEQ ID NO: 753310 - DNA, 19 bp, Mus musculus
  siRNA target sequence for 9030409G11Rik (NM_144531.2,388-406).
gaaggtgaccggtcatcta

SEQ ID NO: 753311 - DNA, 19 bp, Mus musculus
  siRNA target sequence for 9030409G11Rik (NM_144531.2,404-422).
ctacaccaagcgacatcaa

SEQ ID NO: 753312 - DNA, 19 bp, Mus musculus
  siRNA target sequence for 9030409G11Rik (NM_144531.2,1064-1082).
ggaggatgctgaattcact

SEQ ID NO: 753313 - DNA, 19 bp, Mus musculus
  siRNA target sequence for 9030409G11Rik (NM_144531.2,1108-1126).
ctgaacgtgtccaagaagt

SEQ ID NO: 753314 - DNA, 19 bp, Mus musculus
  siRNA target sequence for 9030409G11Rik (NM_144531.2,1297-1315).
gcagacaacctgaccaata

SEQ ID NO: 753315 - DNA, 19 bp, Mus musculus
  siRNA target sequence for 9030409G11Rik (NM_144531.2,1391-1409).
ccagcgggaagcacatact

SEQ ID NO: 753316 - DNA, 19 bp, Mus musculus
  siRNA target sequence for 1110001E17Rik (NM_144534.1,302-320).
cccttggacctcttctaca

SEQ ID NO: 753317 - DNA, 19 bp, Mus musculus
  siRNA target sequence for 1110001E17Rik (NM_144534.1,303-321).
ccttggacctcttctacaa

SEQ ID NO: 753318 - DNA, 19 bp, Mus musculus
  siRNA target sequence for 1110001E17Rik (NM_144534.1,328-346).
ctgctttctgcccgtaaaa

SEQ ID NO: 753319 - DNA, 19 bp, Mus musculus
  siRNA target sequence for 1110001E17Rik (NM_144534.1,330-348).
gctttctgcccgtaaaact

SEQ ID NO: 753320 - DNA, 19 bp, Mus musculus
  siRNA target sequence for 1110001E17Rik (NM_144534.1,337-355).
gcccgtaaaactcatcttt

SEQ ID NO: 753321 - DNA, 19 bp, Mus musculus
  siRNA target sequence for 1110001E17Rik (NM_144534.1,425-443).
caccacgggtggttcatca

SEQ ID NO: 753322 - DNA, 19 bp, Mus musculus
  siRNA target sequence for 1110001E17Rik (NM_144534.1,428-446).
cacgggtggttcatcatga

SEQ ID NO: 753323 - DNA, 19 bp, Mus musculus
  siRNA target sequence for 1110001E17Rik (NM_144534.1,702-720).
gttctccatttgatatcct

SEQ ID NO: 753324 - DNA, 19 bp, Mus musculus
  siRNA target sequence for 4932432K03Rik (NM_144535.2,319-337).
cgatacccaactgttgaaa

SEQ ID NO: 753325 - DNA, 19 bp, Mus musculus
  siRNA target sequence for 4932432K03Rik (NM_144535.2,320-338).
gatacccaactgttgaaaa

SEQ ID NO: 753326 - DNA, 19 bp, Mus musculus
  siRNA target sequence for 4932432K03Rik (NM_144535.2,339-357).
gcgagccaaagccttcaat

SEQ ID NO: 753327 - DNA, 19 bp, Mus musculus
  siRNA target sequence for 4932432K03Rik (NM_144535.2,408-426).
gctctttcaacttagacta

SEQ ID NO: 753328 - DNA, 19 bp, Mus musculus
  siRNA target sequence for 4932432K03Rik (NM_144535.2,409-427).
ctctttcaacttagactat

SEQ ID NO: 753329 - DNA, 19 bp, Mus musculus
  siRNA target sequence for 4932432K03Rik (NM_144535.2,422-440).
gactattggatgatgataa

SEQ ID NO: 753330 - DNA, 19 bp, Mus musculus
  siRNA target sequence for 4932432K03Rik (NM_144535.2,464-482).
gctgctcacgcatcaataa

SEQ ID NO: 753331 - DNA, 19 bp, Mus musculus
  siRNA target sequence for 4932432K03Rik (NM_144535.2,465-483).
ctgctcacgcatcaataaa

SEQ ID NO: 753332 - DNA, 19 bp, Mus musculus
  siRNA target sequence for 4932432K03Rik (NM_144535.2,536-554).
ccttcctgagggatagcat

SEQ ID NO: 753333 - DNA, 19 bp, Mus musculus
  siRNA target sequence for 4932432K03Rik (NM_144535.2,540-558).
cctgagggatagcatgata

SEQ ID NO: 753334 - DNA, 19 bp, Mus musculus
  siRNA target sequence for 4932432K03Rik (NM_144535.2,541-559).
ctgagggatagcatgatat

SEQ ID NO: 753335 - DNA, 19 bp, Mus musculus
  siRNA target sequence for 4932432K03Rik (NM_144535.2,543-561).
gagggatagcatgatatat

SEQ ID NO: 753336 - DNA, 19 bp, Mus musculus
  siRNA target sequence for 4932432K03Rik (NM_144535.2,547-565).
gatagcatgatatatgcaa

SEQ ID NO: 753337 - DNA, 19 bp, Mus musculus
  siRNA target sequence for 4932432K03Rik (NM_144535.2,552-570).
catgatatatgcaagtgtt

SEQ ID NO: 753338 - DNA, 19 bp, Mus musculus
  siRNA target sequence for 4932432K03Rik (NM_144535.2,598-616).
cgcccacctttaattagca

SEQ ID NO: 753339 - DNA, 19 bp, Mus musculus
  siRNA target sequence for 4932432K03Rik (NM_144535.2,599-617).
gcccacctttaattagcat

SEQ ID NO: 753340 - DNA, 19 bp, Mus musculus
  siRNA target sequence for 4932432K03Rik (NM_144535.2,600-618).
cccacctttaattagcatt

SEQ ID NO: 753341 - DNA, 19 bp, Mus musculus
  siRNA target sequence for 4932432K03Rik (NM_144535.2,601-619).
ccacctttaattagcatta

SEQ ID NO: 753342 - DNA, 19 bp, Mus musculus
  siRNA target sequence for 4932432K03Rik (NM_144535.2,651-669).
ggggatacaggattttctt

SEQ ID NO: 753343 - DNA, 19 bp, Mus musculus
  siRNA target sequence for 4932432K03Rik (NM_144535.2,667-685).
ctttactcgagtcagaaaa

SEQ ID NO: 753344 - DNA, 19 bp, Mus musculus
  siRNA target sequence for 4932432K03Rik (NM_144535.2,763-781).
gatgctaacttgcagaatt

SEQ ID NO: 753345 - DNA, 19 bp, Mus musculus
  siRNA target sequence for 4932432K03Rik (NM_144535.2,777-795).
gaattcactgaatagcatt

SEQ ID NO: 753346 - DNA, 19 bp, Mus musculus
  siRNA target sequence for 4932432K03Rik (NM_144535.2,791-809).
gcattaattccgtatctgt

SEQ ID NO: 753347 - DNA, 19 bp, Mus musculus
  siRNA target sequence for 4932432K03Rik (NM_144535.2,836-854).
ggaaagttggagcatacaa

SEQ ID NO: 753348 - DNA, 19 bp, Mus musculus
  siRNA target sequence for 4932432K03Rik (NM_144535.2,837-855).
gaaagttggagcatacaaa

SEQ ID NO: 753349 - DNA, 19 bp, Mus musculus
  siRNA target sequence for 4932432K03Rik (NM_144535.2,884-902).
ccgaaacggtaaaatgcat

SEQ ID NO: 753350 - DNA, 19 bp, Mus musculus
  siRNA target sequence for 4932432K03Rik (NM_144535.2,1025-1043).
ctccacttcaggatattat

SEQ ID NO: 753351 - DNA, 19 bp, Mus musculus
  siRNA target sequence for 4932432K03Rik (NM_144535.2,1028-1046).
cacttcaggatattattgt

SEQ ID NO: 753352 - DNA, 19 bp, Mus musculus
  siRNA target sequence for 4932432K03Rik (NM_144535.2,1075-1093).
gccattctgacttctagta

SEQ ID NO: 753353 - DNA, 19 bp, Mus musculus
  siRNA target sequence for 4932432K03Rik (NM_144535.2,1088-1106).
ctagtagcattgacacaat

SEQ ID NO: 753354 - DNA, 19 bp, Mus musculus
  siRNA target sequence for 4932432K03Rik (NM_144535.2,1107-1125).
ggaggattctgcatttagt

SEQ ID NO: 753355 - DNA, 19 bp, Mus musculus
  siRNA target sequence for 4932432K03Rik (NM_144535.2,1118-1136).
catttagtgggccgtataa

SEQ ID NO: 753356 - DNA, 19 bp, Mus musculus
  siRNA target sequence for 4932432K03Rik (NM_144535.2,1126-1144).
gggccgtataaatttccat

SEQ ID NO: 753357 - DNA, 19 bp, Mus musculus
  siRNA target sequence for 4932432K03Rik (NM_144535.2,1127-1145).
ggccgtataaatttccatt

SEQ ID NO: 753358 - DNA, 19 bp, Mus musculus
  siRNA target sequence for 4932432K03Rik (NM_144535.2,1142-1160).
cattcactccgcctttaga

SEQ ID NO: 753359 - DNA, 19 bp, Mus musculus
  siRNA target sequence for 4932432K03Rik (NM_144535.2,1154-1172).
ctttagagtccttcaactt

SEQ ID NO: 753360 - DNA, 19 bp, Mus musculus
  siRNA target sequence for 4932432K03Rik (NM_144535.2,1237-1255).
ggagtacagctaaaagtaa

SEQ ID NO: 753361 - DNA, 19 bp, Mus musculus
  siRNA target sequence for 4932432K03Rik (NM_144535.2,1409-1427).
ggattatcggccagaagtt

SEQ ID NO: 753362 - DNA, 19 bp, Mus musculus
  siRNA target sequence for 4932432K03Rik (NM_144535.2,1419-1437).
ccagaagttccccaaatca

SEQ ID NO: 753363 - DNA, 19 bp, Mus musculus
  siRNA target sequence for 4932432K03Rik (NM_144535.2,1425-1443).
gttccccaaatcaatggaa

SEQ ID NO: 753364 - DNA, 19 bp, Mus musculus
  siRNA target sequence for 4932432K03Rik (NM_144535.2,1431-1449).
caaatcaatggaaattagt

SEQ ID NO: 753365 - DNA, 19 bp, Mus musculus
  siRNA target sequence for 4932432K03Rik (NM_144535.2,1471-1489).
ggagttaagggccataaca

SEQ ID NO: 753366 - DNA, 19 bp, Mus musculus
  siRNA target sequence for 4932432K03Rik (NM_144535.2,1472-1490).
gagttaagggccataacaa

SEQ ID NO: 753367 - DNA, 19 bp, Mus musculus
  siRNA target sequence for 4932432K03Rik (NM_144535.2,1494-1512).
gccatttgatcacatttgt

SEQ ID NO: 753368 - DNA, 19 bp, Mus musculus
  siRNA target sequence for 4932432K03Rik (NM_144535.2,1495-1513).
ccatttgatcacatttgta

SEQ ID NO: 753369 - DNA, 19 bp, Mus musculus
  siRNA target sequence for 4932432K03Rik (NM_144535.2,1516-1534).
ggaaatacagcgtatataa

SEQ ID NO: 753370 - DNA, 19 bp, Mus musculus
  siRNA target sequence for 4932432K03Rik (NM_144535.2,1523-1541).
cagcgtatataaagcttaa

SEQ ID NO: 753371 - DNA, 19 bp, Mus musculus
  siRNA target sequence for 4932432K03Rik (NM_144535.2,1525-1543).
gcgtatataaagcttaact

SEQ ID NO: 753372 - DNA, 19 bp, Mus musculus
  siRNA target sequence for 4932432K03Rik (NM_144535.2,1526-1544).
cgtatataaagcttaactt

SEQ ID NO: 753373 - DNA, 19 bp, Mus musculus
  siRNA target sequence for 4932432K03Rik (NM_144535.2,1547-1565).
ggattgcagattatacact

SEQ ID NO: 753374 - DNA, 19 bp, Mus musculus
  siRNA target sequence for 4932432K03Rik (NM_144535.2,1628-1646).
gtgcatatcggaaactaat

SEQ ID NO: 753375 - DNA, 19 bp, Mus musculus
  siRNA target sequence for 4932432K03Rik (NM_144535.2,1630-1648).
gcatatcggaaactaattt

SEQ ID NO: 753376 - DNA, 19 bp, Mus musculus
  siRNA target sequence for 4932432K03Rik (NM_144535.2,1688-1706).
cagtaacatacgcatcatt

SEQ ID NO: 753377 - DNA, 19 bp, Mus musculus
  siRNA target sequence for 4932432K03Rik (NM_144535.2,1690-1708).
gtaacatacgcatcattgt

SEQ ID NO: 753378 - DNA, 19 bp, Mus musculus
  siRNA target sequence for 1200014K04Rik (NM_144538.1,145-163).
cagtcccctggaaaaacct

SEQ ID NO: 753379 - DNA, 19 bp, Mus musculus
  siRNA target sequence for 1200014K04Rik (NM_144538.1,313-331).
gctccgagttcctaaagga

SEQ ID NO: 753380 - DNA, 19 bp, Mus musculus
  siRNA target sequence for 1200014K04Rik (NM_144538.1,377-395).
gtgtgaacggctttgcaaa

SEQ ID NO: 753381 - DNA, 19 bp, Mus musculus
  siRNA target sequence for 1200014K04Rik (NM_144538.1,787-805).
cttcacctaccctggataa

SEQ ID NO: 753382 - DNA, 19 bp, Mus musculus
  siRNA target sequence for 1200014K04Rik (NM_144538.1,1015-1033).
gtacctgccaccatcgaat

SEQ ID NO: 753383 - DNA, 19 bp, Mus musculus
  siRNA target sequence for 1200014K04Rik (NM_144538.1,1050-1068).
gacagccactattacatct

SEQ ID NO: 753384 - DNA, 19 bp, Mus musculus
  siRNA target sequence for 1200014K04Rik (NM_144538.1,1087-1105).
ggatcaccgcagtatgcaa

SEQ ID NO: 753385 - DNA, 19 bp, Mus musculus
  siRNA target sequence for 1200014K04Rik (NM_144538.1,1093-1111).
ccgcagtatgcaacttctt

SEQ ID NO: 753386 - DNA, 19 bp, Mus musculus
  siRNA target sequence for 1200014K04Rik (NM_144538.1,1152-1170).
gatgctgagccgatgttct

SEQ ID NO: 753387 - DNA, 19 bp, Mus musculus
  siRNA target sequence for 1200014K04Rik (NM_144538.1,1162-1180).
cgatgttctgggagatcat

SEQ ID NO: 753388 - DNA, 19 bp, Mus musculus
  siRNA target sequence for Slamf7 (NM_144539.2,461-479).
cgtttctcaacgtacatca

SEQ ID NO: 753389 - DNA, 19 bp, Mus musculus
  siRNA target sequence for Slamf7 (NM_144539.2,462-480).
gtttctcaacgtacatcat

SEQ ID NO: 753390 - DNA, 19 bp, Mus musculus
  siRNA target sequence for Slamf7 (NM_144539.2,466-484).
ctcaacgtacatcatcttt

SEQ ID NO: 753391 - DNA, 19 bp, Mus musculus
  siRNA target sequence for Slamf7 (NM_144539.2,563-581).
gtgacattcactctgaata

SEQ ID NO: 753392 - DNA, 19 bp, Mus musculus
  siRNA target sequence for Slamf7 (NM_144539.2,585-603).
ctgaaataaaggttgacta

SEQ ID NO: 753393 - DNA, 19 bp, Mus musculus
  siRNA target sequence for Slamf7 (NM_144539.2,605-623).
gttgtatggacgttcaaca

SEQ ID NO: 753394 - DNA, 19 bp, Mus musculus
  siRNA target sequence for Slamf7 (NM_144539.2,608-626).
gtatggacgttcaacacat

SEQ ID NO: 753395 - DNA, 19 bp, Mus musculus
  siRNA target sequence for Slamf7 (NM_144539.2,613-631).
gacgttcaacacattcttt

SEQ ID NO: 753396 - DNA, 19 bp, Mus musculus
  siRNA target sequence for Slamf7 (NM_144539.2,615-633).
cgttcaacacattctttct

SEQ ID NO: 753397 - DNA, 19 bp, Mus musculus
  siRNA target sequence for Slamf7 (NM_144539.2,650-668).
gacggcgttacatcacaaa

SEQ ID NO: 753398 - DNA, 19 bp, Mus musculus
  siRNA target sequence for Slamf7 (NM_144539.2,653-671).
ggcgttacatcacaaagta

SEQ ID NO: 753399 - DNA, 19 bp, Mus musculus
  siRNA target sequence for Slamf7 (NM_144539.2,655-673).
cgttacatcacaaagtagt

SEQ ID NO: 753400 - DNA, 19 bp, Mus musculus
  siRNA target sequence for Slamf7 (NM_144539.2,725-743).
caattgaagaagaatgact

SEQ ID NO: 753401 - DNA, 19 bp, Mus musculus
  siRNA target sequence for Slamf7 (NM_144539.2,749-767).
gcctaccgtgcagagattt

SEQ ID NO: 753402 - DNA, 19 bp, Mus musculus
  siRNA target sequence for Slamf7 (NM_144539.2,750-768).
cctaccgtgcagagattta

SEQ ID NO: 753403 - DNA, 19 bp, Mus musculus
  siRNA target sequence for Slamf7 (NM_144539.2,754-772).
ccgtgcagagatttacagt

SEQ ID NO: 753404 - DNA, 19 bp, Mus musculus
  siRNA target sequence for Slamf7 (NM_144539.2,777-795).
cgagtcaggcttccttaat

SEQ ID NO: 753405 - DNA, 19 bp, Mus musculus
  siRNA target sequence for Slamf7 (NM_144539.2,812-830).
catgtctacaagcatttgt

SEQ ID NO: 753406 - DNA, 19 bp, Mus musculus
  siRNA target sequence for Slamf7 (NM_144539.2,881-899).
gtaatcaatctgacatgtt

SEQ ID NO: 753407 - DNA, 19 bp, Mus musculus
  siRNA target sequence for Slamf7 (NM_144539.2,908-926).
caggacggggagaatgtaa

SEQ ID NO: 753408 - DNA, 19 bp, Mus musculus
  siRNA target sequence for Slamf7 (NM_144539.2,948-966).
ggcagggggacaatcagtt

SEQ ID NO: 753409 - DNA, 19 bp, Mus musculus
  siRNA target sequence for Slamf7 (NM_144539.2,949-967).
gcagggggacaatcagttt

SEQ ID NO: 753410 - DNA, 19 bp, Mus musculus
  siRNA target sequence for Slamf7 (NM_144539.2,952-970).
gggggacaatcagtttcat

SEQ ID NO: 753411 - DNA, 19 bp, Mus musculus
  siRNA target sequence for Slamf7 (NM_144539.2,954-972).
gggacaatcagtttcatga

SEQ ID NO: 753412 - DNA, 19 bp, Mus musculus
  siRNA target sequence for Slamf7 (NM_144539.2,955-973).
ggacaatcagtttcatgat

SEQ ID NO: 753413 - DNA, 19 bp, Mus musculus
  siRNA target sequence for Slamf7 (NM_144539.2,1046-1064).
gtcagcaacagtttctcaa

SEQ ID NO: 753414 - DNA, 19 bp, Mus musculus
  siRNA target sequence for Slamf7 (NM_144539.2,1094-1112).
gatgctgccacggatctaa

SEQ ID NO: 753415 - DNA, 19 bp, Mus musculus
  siRNA target sequence for Slamf7 (NM_144539.2,1118-1136).
ctcaggggcatcctataca

SEQ ID NO: 753416 - DNA, 19 bp, Mus musculus
  siRNA target sequence for Slamf7 (NM_144539.2,1149-1167).
cagcagtgctcatcctatt

SEQ ID NO: 753417 - DNA, 19 bp, Mus musculus
  siRNA target sequence for Slamf7 (NM_144539.2,1264-1282).
cgacttgtgccctcactta

SEQ ID NO: 753418 - DNA, 19 bp, Mus musculus
  siRNA target sequence for Slamf7 (NM_144539.2,1343-1361).
gcaccaaacacattttatt

SEQ ID NO: 753419 - DNA, 19 bp, Mus musculus
  siRNA target sequence for Slamf7 (NM_144539.2,1418-1436).
ctcgtgccaaggtcattaa

SEQ ID NO: 753420 - DNA, 19 bp, Mus musculus
  siRNA target sequence for Slamf7 (NM_144539.2,1423-1441).
gccaaggtcattaagcttt

SEQ ID NO: 753421 - DNA, 19 bp, Mus musculus
  siRNA target sequence for A930014I12Rik (NM_144542.1,210-228).
gggatcctggaaattgtaa

SEQ ID NO: 753422 - DNA, 19 bp, Mus musculus
  siRNA target sequence for A930014I12Rik (NM_144542.1,211-229).
ggatcctggaaattgtaat

SEQ ID NO: 753423 - DNA, 19 bp, Mus musculus
  siRNA target sequence for A930014I12Rik (NM_144542.1,212-230).
gatcctggaaattgtaatt

SEQ ID NO: 753424 - DNA, 19 bp, Mus musculus
  siRNA target sequence for A930014I12Rik (NM_144542.1,219-237).
gaaattgtaatttggataa

SEQ ID NO: 753425 - DNA, 19 bp, Mus musculus
  siRNA target sequence for A930014I12Rik (NM_144542.1,255-273).
ctgactcatcattggataa

SEQ ID NO: 753426 - DNA, 19 bp, Mus musculus
  siRNA target sequence for A930014I12Rik (NM_144542.1,264-282).
cattggataatcagatgaa

SEQ ID NO: 753427 - DNA, 19 bp, Mus musculus
  siRNA target sequence for A930014I12Rik (NM_144542.1,268-286).
ggataatcagatgaaactt

SEQ ID NO: 753428 - DNA, 19 bp, Mus musculus
  siRNA target sequence for A930014I12Rik (NM_144542.1,305-323).
gatcagaatttcagcatat

SEQ ID NO: 753429 - DNA, 19 bp, Mus musculus
  siRNA target sequence for A930014I12Rik (NM_144542.1,310-328).
gaatttcagcatatgttca

SEQ ID NO: 753430 - DNA, 19 bp, Mus musculus
  siRNA target sequence for A930014I12Rik (NM_144542.1,335-353).
gaggtggagactaatccat

SEQ ID NO: 753431 - DNA, 19 bp, Mus musculus
  siRNA target sequence for A930014I12Rik (NM_144542.1,337-355).
ggtggagactaatccatta

SEQ ID NO: 753432 - DNA, 19 bp, Mus musculus
  siRNA target sequence for A930014I12Rik (NM_144542.1,340-358).
ggagactaatccattagaa

SEQ ID NO: 753433 - DNA, 19 bp, Mus musculus
  siRNA target sequence for A930014I12Rik (NM_144542.1,387-405).
gtcaagctaagattgatga

SEQ ID NO: 753434 - DNA, 19 bp, Mus musculus
  siRNA target sequence for A930014I12Rik (NM_144542.1,420-438).
caggttcagctcctaatca

SEQ ID NO: 753435 - DNA, 19 bp, Mus musculus
  siRNA target sequence for A930014I12Rik (NM_144542.1,445-463).
cagtgtactcagtgatgaa

SEQ ID NO: 753436 - DNA, 19 bp, Mus musculus
  siRNA target sequence for A930014I12Rik (NM_144542.1,456-474).
gtgatgaagcgtctatcaa

SEQ ID NO: 753437 - DNA, 19 bp, Mus musculus
  siRNA target sequence for A930014I12Rik (NM_144542.1,458-476).
gatgaagcgtctatcaaca

SEQ ID NO: 753438 - DNA, 19 bp, Mus musculus
  siRNA target sequence for A930014I12Rik (NM_144542.1,461-479).
gaagcgtctatcaacagaa

SEQ ID NO: 753439 - DNA, 19 bp, Mus musculus
  siRNA target sequence for A930014I12Rik (NM_144542.1,464-482).
gcgtctatcaacagaaaga

SEQ ID NO: 753440 - DNA, 19 bp, Mus musculus
  siRNA target sequence for A930014I12Rik (NM_144542.1,465-483).
cgtctatcaacagaaagaa

SEQ ID NO: 753441 - DNA, 19 bp, Mus musculus
  siRNA target sequence for A930014I12Rik (NM_144542.1,511-529).
gctgaagcatgattctcat

SEQ ID NO: 753442 - DNA, 19 bp, Mus musculus
  siRNA target sequence for A930014I12Rik (NM_144542.1,512-530).
ctgaagcatgattctcatt

SEQ ID NO: 753443 - DNA, 19 bp, Mus musculus
  siRNA target sequence for A930014I12Rik (NM_144542.1,598-616).
catagatgcaggacacaaa

SEQ ID NO: 753444 - DNA, 19 bp, Mus musculus
  siRNA target sequence for A930014I12Rik (NM_144542.1,602-620).
gatgcaggacacaaacgat

SEQ ID NO: 753445 - DNA, 19 bp, Mus musculus
  siRNA target sequence for A930014I12Rik (NM_144542.1,751-769).
ccacgagtgtggatctgaa

SEQ ID NO: 753446 - DNA, 19 bp, Mus musculus
  siRNA target sequence for A930014I12Rik (NM_144542.1,754-772).
cgagtgtggatctgaagaa

SEQ ID NO: 753447 - DNA, 19 bp, Mus musculus
  siRNA target sequence for A930014I12Rik (NM_144542.1,788-806).
ctttttttgagtatgtcta

SEQ ID NO: 753448 - DNA, 19 bp, Mus musculus
  siRNA target sequence for A930014I12Rik (NM_144542.1,798-816).
gtatgtctaacttcagata

SEQ ID NO: 753449 - DNA, 19 bp, Mus musculus
  siRNA target sequence for A930014I12Rik (NM_144542.1,802-820).
gtctaacttcagatacaca

SEQ ID NO: 753450 - DNA, 19 bp, Mus musculus
  siRNA target sequence for Thy28 (NM_144543.1,166-184).
cgggaaacgtactaaaact

SEQ ID NO: 753451 - DNA, 19 bp, Mus musculus
  siRNA target sequence for Thy28 (NM_144543.1,185-203).
gaaaactcagaaagtacat

SEQ ID NO: 753452 - DNA, 19 bp, Mus musculus
  siRNA target sequence for Thy28 (NM_144543.1,201-219).
catcagtcaagctagagaa

SEQ ID NO: 753453 - DNA, 19 bp, Mus musculus
  siRNA target sequence for Thy28 (NM_144543.1,235-253).
gacgacaacctttaaaaat

SEQ ID NO: 753454 - DNA, 19 bp, Mus musculus
  siRNA target sequence for Thy28 (NM_144543.1,254-272).
ggtggcaagaatttaagca

SEQ ID NO: 753455 - DNA, 19 bp, Mus musculus
  siRNA target sequence for Thy28 (NM_144543.1,303-321).
gccggctagagaaaggtat

SEQ ID NO: 753456 - DNA, 19 bp, Mus musculus
  siRNA target sequence for Thy28 (NM_144543.1,304-322).
ccggctagagaaaggtata

SEQ ID NO: 753457 - DNA, 19 bp, Mus musculus
  siRNA target sequence for Thy28 (NM_144543.1,379-397).
ggatggtgttcgcaactat

SEQ ID NO: 753458 - DNA, 19 bp, Mus musculus
  siRNA target sequence for Thy28 (NM_144543.1,463-481).
caaacagcctggcattgtt

SEQ ID NO: 753459 - DNA, 19 bp, Mus musculus
  siRNA target sequence for Thy28 (NM_144543.1,473-491).
ggcattgttggacttatga

SEQ ID NO: 753460 - DNA, 19 bp, Mus musculus
  siRNA target sequence for Thy28 (NM_144543.1,474-492).
gcattgttggacttatgaa

SEQ ID NO: 753461 - DNA, 19 bp, Mus musculus
  siRNA target sequence for Thy28 (NM_144543.1,566-584).
gaggacgaccctaaatggt

SEQ ID NO: 753462 - DNA, 19 bp, Mus musculus
  siRNA target sequence for Thy28 (NM_144543.1,589-607).
ggtggatgtacagtttgtt

SEQ ID NO: 753463 - DNA, 19 bp, Mus musculus
  siRNA target sequence for Thy28 (NM_144543.1,629-647).
cctctggaggagcttaaaa

SEQ ID NO: 753464 - DNA, 19 bp, Mus musculus
  siRNA target sequence for Zfp119 (NM_144546.2,141-159).
gaaagaccacgataatgaa

SEQ ID NO: 753465 - DNA, 19 bp, Mus musculus
  siRNA target sequence for Zfp119 (NM_144546.2,145-163).
gaccacgataatgaagaat

SEQ ID NO: 753466 - DNA, 19 bp, Mus musculus
  siRNA target sequence for Zfp119 (NM_144546.2,147-165).
ccacgataatgaagaatat

SEQ ID NO: 753467 - DNA, 19 bp, Mus musculus
  siRNA target sequence for Zfp119 (NM_144546.2,148-166).
cacgataatgaagaatatt

SEQ ID NO: 753468 - DNA, 19 bp, Mus musculus
  siRNA target sequence for Zfp119 (NM_144546.2,715-733).
ggagataaatcctttgcat

SEQ ID NO: 753469 - DNA, 19 bp, Mus musculus
  siRNA target sequence for Zfp119 (NM_144546.2,772-790).
gaaaaaaattatgagtata

SEQ ID NO: 753470 - DNA, 19 bp, Mus musculus
  siRNA target sequence for Zfp119 (NM_144546.2,798-816).
gggtaaagctttttcgtat

SEQ ID NO: 753471 - DNA, 19 bp, Mus musculus
  siRNA target sequence for Zfp119 (NM_144546.2,967-985).
ggtaaagcattttcatcta

SEQ ID NO: 753472 - DNA, 19 bp, Mus musculus
  siRNA target sequence for Zfp119 (NM_144546.2,973-991).
gcattttcatctaacagta

SEQ ID NO: 753473 - DNA, 19 bp, Mus musculus
  siRNA target sequence for Zfp119 (NM_144546.2,974-992).
cattttcatctaacagtaa

SEQ ID NO: 753474 - DNA, 19 bp, Mus musculus
  siRNA target sequence for Zfp119 (NM_144546.2,1208-1226).
gttttgaatgtggtaaaca

SEQ ID NO: 753475 - DNA, 19 bp, Mus musculus
  siRNA target sequence for D16Ertd480e (NM_144550.2,134-152).
gcaagaatgggataatact

SEQ ID NO: 753476 - DNA, 19 bp, Mus musculus
  siRNA target sequence for D16Ertd480e (NM_144550.2,142-160).
gggataatactgtgaatga

SEQ ID NO: 753477 - DNA, 19 bp, Mus musculus
  siRNA target sequence for D16Ertd480e (NM_144550.2,143-161).
ggataatactgtgaatgat

SEQ ID NO: 753478 - DNA, 19 bp, Mus musculus
  siRNA target sequence for D16Ertd480e (NM_144550.2,151-169).
ctgtgaatgatctaacagt

SEQ ID NO: 753479 - DNA, 19 bp, Mus musculus
  siRNA target sequence for D16Ertd480e (NM_144550.2,173-191).
ccgggcaactcctgaagat

SEQ ID NO: 753480 - DNA, 19 bp, Mus musculus
  siRNA target sequence for D16Ertd480e (NM_144550.2,175-193).
gggcaactcctgaagatct

SEQ ID NO: 753481 - DNA, 19 bp, Mus musculus
  siRNA target sequence for D16Ertd480e (NM_144550.2,178-196).
caactcctgaagatctagt

SEQ ID NO: 753482 - DNA, 19 bp, Mus musculus
  siRNA target sequence for D16Ertd480e (NM_144550.2,209-227).
gatgcacaagtcaaagaat

SEQ ID NO: 753483 - DNA, 19 bp, Mus musculus
  siRNA target sequence for D16Ertd480e (NM_144550.2,212-230).
gcacaagtcaaagaataga

SEQ ID NO: 753484 - DNA, 19 bp, Mus musculus
  siRNA target sequence for D16Ertd480e (NM_144550.2,236-254).
ggtgcactgggaacttcaa

SEQ ID NO: 753485 - DNA, 19 bp, Mus musculus
  siRNA target sequence for D16Ertd480e (NM_144550.2,325-343).
ctatcatgaaggagattct

SEQ ID NO: 753486 - DNA, 19 bp, Mus musculus
  siRNA target sequence for D16Ertd480e (NM_144550.2,335-353).
ggagattctctctgatcaa

SEQ ID NO: 753487 - DNA, 19 bp, Mus musculus
  siRNA target sequence for D16Ertd480e (NM_144550.2,361-379).
cacaggatgtgctggaaaa

SEQ ID NO: 753488 - DNA, 19 bp, Mus musculus
  siRNA target sequence for D16Ertd480e (NM_144550.2,363-381).
caggatgtgctggaaaagt

SEQ ID NO: 753489 - DNA, 19 bp, Mus musculus
  siRNA target sequence for D16Ertd480e (NM_144550.2,434-452).
gcgcacagggtttccaaat

SEQ ID NO: 753490 - DNA, 19 bp, Mus musculus
  siRNA target sequence for D16Ertd480e (NM_144550.2,507-525).
gtcacccagtctatcctta

SEQ ID NO: 753491 - DNA, 19 bp, Mus musculus
  siRNA target sequence for D16Ertd480e (NM_144550.2,509-527).
cacccagtctatccttaat

SEQ ID NO: 753492 - DNA, 19 bp, Mus musculus
  siRNA target sequence for D16Ertd480e (NM_144550.2,511-529).
cccagtctatccttaatga

SEQ ID NO: 753493 - DNA, 19 bp, Mus musculus
  siRNA target sequence for D16Ertd480e (NM_144550.2,512-530).
ccagtctatccttaatgaa

SEQ ID NO: 753494 - DNA, 19 bp, Mus musculus
  siRNA target sequence for D16Ertd480e (NM_144550.2,515-533).
gtctatccttaatgaatca

SEQ ID NO: 753495 - DNA, 19 bp, Mus musculus
  siRNA target sequence for D16Ertd480e (NM_144550.2,521-539).
ccttaatgaatcaatcata

SEQ ID NO: 753496 - DNA, 19 bp, Mus musculus
  siRNA target sequence for D16Ertd480e (NM_144550.2,664-682).
ggtttcttcaccaactaaa

SEQ ID NO: 753497 - DNA, 19 bp, Mus musculus
  siRNA target sequence for D16Ertd480e (NM_144550.2,694-712).
ccgagttaatcaatcaact

SEQ ID NO: 753498 - DNA, 19 bp, Mus musculus
  siRNA target sequence for D16Ertd480e (NM_144550.2,737-755).
cgctacccagtcacaaaga

SEQ ID NO: 753499 - DNA, 19 bp, Mus musculus
  siRNA target sequence for D16Ertd480e (NM_144550.2,738-756).
gctacccagtcacaaagaa

SEQ ID NO: 753500 - DNA, 19 bp, Mus musculus
  siRNA target sequence for D16Ertd480e (NM_144550.2,900-918).
ggacaggtgctaaacacaa

SEQ ID NO: 753501 - DNA, 19 bp, Mus musculus
  siRNA target sequence for D16Ertd480e (NM_144550.2,931-949).
cgctgctagctaaagtgaa

SEQ ID NO: 753502 - DNA, 19 bp, Mus musculus
  siRNA target sequence for D16Ertd480e (NM_144550.2,932-950).
gctgctagctaaagtgaaa

SEQ ID NO: 753503 - DNA, 19 bp, Mus musculus
  siRNA target sequence for D16Ertd480e (NM_144550.2,935-953).
gctagctaaagtgaaaaga

SEQ ID NO: 753504 - DNA, 19 bp, Mus musculus
  siRNA target sequence for D16Ertd480e (NM_144550.2,1045-1063).
gcctggacgttctcaaaca

SEQ ID NO: 753505 - DNA, 19 bp, Mus musculus
  siRNA target sequence for D16Ertd480e (NM_144550.2,1082-1100).
gcacgagatggaagagtat

SEQ ID NO: 753506 - DNA, 19 bp, Mus musculus
  siRNA target sequence for D16Ertd480e (NM_144550.2,1188-1206).
cgcctggttcggtacctta

SEQ ID NO: 753507 - DNA, 19 bp, Mus musculus
  siRNA target sequence for D16Ertd480e (NM_144550.2,1189-1207).
gcctggttcggtaccttaa

SEQ ID NO: 753508 - DNA, 19 bp, Mus musculus
  siRNA target sequence for D16Ertd480e (NM_144550.2,1190-1208).
cctggttcggtaccttaaa

SEQ ID NO: 753509 - DNA, 19 bp, Mus musculus
  siRNA target sequence for D16Ertd480e (NM_144550.2,1194-1212).
gttcggtaccttaaagaga

SEQ ID NO: 753510 - DNA, 19 bp, Mus musculus
  siRNA target sequence for D16Ertd480e (NM_144550.2,1345-1363).
cgagacttcagcagtacat

SEQ ID NO: 753511 - DNA, 19 bp, Mus musculus
  siRNA target sequence for D16Ertd480e (NM_144550.2,1471-1489).
gtagaagacttgtggataa

SEQ ID NO: 753512 - DNA, 19 bp, Mus musculus
  siRNA target sequence for D16Ertd480e (NM_144550.2,1474-1492).
gaagacttgtggataatgt

SEQ ID NO: 753513 - DNA, 19 bp, Mus musculus
  siRNA target sequence for D16Ertd480e (NM_144550.2,1568-1586).
ggaagagttgcctgttaaa

SEQ ID NO: 753514 - DNA, 19 bp, Mus musculus
  siRNA target sequence for D16Ertd480e (NM_144550.2,1572-1590).
gagttgcctgttaaactat

SEQ ID NO: 753515 - DNA, 19 bp, Mus musculus
  siRNA target sequence for D16Ertd480e (NM_144550.2,1653-1671).
gagccagctgtgatgctaa

SEQ ID NO: 753516 - DNA, 19 bp, Mus musculus
  siRNA target sequence for D16Ertd480e (NM_144550.2,1762-1780).
cccccactgtggaagttat

SEQ ID NO: 753517 - DNA, 19 bp, Mus musculus
  siRNA target sequence for D16Ertd480e (NM_144550.2,1763-1781).
ccccactgtggaagttata

SEQ ID NO: 753518 - DNA, 19 bp, Mus musculus
  siRNA target sequence for D16Ertd480e (NM_144550.2,1805-1823).
gaaggccctgcctattgat

SEQ ID NO: 753519 - DNA, 19 bp, Mus musculus
  siRNA target sequence for D16Ertd480e (NM_144550.2,1911-1929).
gggcagccagcatttgtta

SEQ ID NO: 753520 - DNA, 19 bp, Mus musculus
  siRNA target sequence for D16Ertd480e (NM_144550.2,1934-1952).
gtcacagccgccttgtagt

SEQ ID NO: 753521 - DNA, 19 bp, Mus musculus
  siRNA target sequence for D16Ertd480e (NM_144550.2,2111-2129).
ggcccacctgaacaatatt

SEQ ID NO: 753522 - DNA, 19 bp, Mus musculus
  siRNA target sequence for D16Ertd480e (NM_144550.2,2115-2133).
cacctgaacaatattacca

SEQ ID NO: 753523 - DNA, 19 bp, Mus musculus
  siRNA target sequence for D16Ertd480e (NM_144550.2,2191-2209).
gtgaagtgtctactaattt

SEQ ID NO: 753524 - DNA, 19 bp, Mus musculus
  siRNA target sequence for D16Ertd480e (NM_144550.2,2322-2340).
cttgtgggcttgaaccttt

SEQ ID NO: 753525 - DNA, 19 bp, Mus musculus
  siRNA target sequence for D16Ertd480e (NM_144550.2,2437-2455).
cagagagttcaaaatgcaa

SEQ ID NO: 753526 - DNA, 19 bp, Mus musculus
  siRNA target sequence for D16Ertd480e (NM_144550.2,2441-2459).
gagttcaaaatgcaatact

SEQ ID NO: 753527 - DNA, 19 bp, Mus musculus
  siRNA target sequence for D16Ertd480e (NM_144550.2,2466-2484).
cctgtcagtgggaacagtt

SEQ ID NO: 753528 - DNA, 19 bp, Mus musculus
  siRNA target sequence for D16Ertd480e (NM_144550.2,2501-2519).
ggcgatcagcaattcttgt

SEQ ID NO: 753529 - DNA, 19 bp, Mus musculus
  siRNA target sequence for D16Ertd480e (NM_144550.2,2502-2520).
gcgatcagcaattcttgtt

SEQ ID NO: 753530 - DNA, 19 bp, Mus musculus
  siRNA target sequence for D16Ertd480e (NM_144550.2,2504-2522).
gatcagcaattcttgttct

SEQ ID NO: 753531 - DNA, 19 bp, Mus musculus
  siRNA target sequence for D16Ertd480e (NM_144550.2,2552-2570).
gttcacaccagttaatcca

SEQ ID NO: 753532 - DNA, 19 bp, Mus musculus
  siRNA target sequence for Stxbp6 (NM_144552.1,220-238).
ctgccatcagcaaggaaat

SEQ ID NO: 753533 - DNA, 19 bp, Mus musculus
  siRNA target sequence for Stxbp6 (NM_144552.1,321-339).
gggggtcaaggcgaatact

SEQ ID NO: 753534 - DNA, 19 bp, Mus musculus
  siRNA target sequence for Stxbp6 (NM_144552.1,322-340).
ggggtcaaggcgaatactt

SEQ ID NO: 753535 - DNA, 19 bp, Mus musculus
  siRNA target sequence for Stxbp6 (NM_144552.1,323-341).
gggtcaaggcgaatactta

SEQ ID NO: 753536 - DNA, 19 bp, Mus musculus
  siRNA target sequence for Stxbp6 (NM_144552.1,324-342).
ggtcaaggcgaatacttaa

SEQ ID NO: 753537 - DNA, 19 bp, Mus musculus
  siRNA target sequence for Stxbp6 (NM_144552.1,327-345).
caaggcgaatacttaactt

SEQ ID NO: 753538 - DNA, 19 bp, Mus musculus
  siRNA target sequence for Stxbp6 (NM_144552.1,330-348).
ggcgaatacttaacttata

SEQ ID NO: 753539 - DNA, 19 bp, Mus musculus
  siRNA target sequence for Stxbp6 (NM_144552.1,331-349).
gcgaatacttaacttatat

SEQ ID NO: 753540 - DNA, 19 bp, Mus musculus
  siRNA target sequence for Stxbp6 (NM_144552.1,333-351).
gaatacttaacttatatct

SEQ ID NO: 753541 - DNA, 19 bp, Mus musculus
  siRNA target sequence for Stxbp6 (NM_144552.1,375-393).
cccacacaggcatctatca

SEQ ID NO: 753542 - DNA, 19 bp, Mus musculus
  siRNA target sequence for Stxbp6 (NM_144552.1,388-406).
ctatcacgaaggtcaaaca

SEQ ID NO: 753543 - DNA, 19 bp, Mus musculus
  siRNA target sequence for Stxbp6 (NM_144552.1,455-473).
gcagcttcgccaagttaat

SEQ ID NO: 753544 - DNA, 19 bp, Mus musculus
  siRNA target sequence for Stxbp6 (NM_144552.1,458-476).
gcttcgccaagttaatggt

SEQ ID NO: 753545 - DNA, 19 bp, Mus musculus
  siRNA target sequence for Stxbp6 (NM_144552.1,459-477).
cttcgccaagttaatggta

SEQ ID NO: 753546 - DNA, 19 bp, Mus musculus
  siRNA target sequence for Stxbp6 (NM_144552.1,464-482).
ccaagttaatggtattgat

SEQ ID NO: 753547 - DNA, 19 bp, Mus musculus
  siRNA target sequence for Stxbp6 (NM_144552.1,490-508).
gggattctgcagagtttga

SEQ ID NO: 753548 - DNA, 19 bp, Mus musculus
  siRNA target sequence for Stxbp6 (NM_144552.1,498-516).
gcagagtttgatttgttgt

SEQ ID NO: 753549 - DNA, 19 bp, Mus musculus
  siRNA target sequence for Stxbp6 (NM_144552.1,544-562).
ctagcacggcctcagaaaa

SEQ ID NO: 753550 - DNA, 19 bp, Mus musculus
  siRNA target sequence for Stxbp6 (NM_144552.1,671-689).
ccattcagcagctgatagt

SEQ ID NO: 753551 - DNA, 19 bp, Mus musculus
  siRNA target sequence for Stxbp6 (NM_144552.1,815-833).
gcttgccatgaagcataaa

SEQ ID NO: 753552 - DNA, 19 bp, Mus musculus
  siRNA target sequence for Stxbp6 (NM_144552.1,816-834).
cttgccatgaagcataaat

SEQ ID NO: 753553 - DNA, 19 bp, Mus musculus
  siRNA target sequence for Stxbp6 (NM_144552.1,819-837).
gccatgaagcataaatgtt

SEQ ID NO: 753554 - DNA, 19 bp, Mus musculus
  siRNA target sequence for Hurp (NM_144553.1,362-380).
ccaacttggctcatagaaa

SEQ ID NO: 753555 - DNA, 19 bp, Mus musculus
  siRNA target sequence for Hurp (NM_144553.1,437-455).
gtttgaaggacgtcaacat

SEQ ID NO: 753556 - DNA, 19 bp, Mus musculus
  siRNA target sequence for Hurp (NM_144553.1,467-485).
ggcgagagcttggtaatat

SEQ ID NO: 753557 - DNA, 19 bp, Mus musculus
  siRNA target sequence for Hurp (NM_144553.1,468-486).
gcgagagcttggtaatata

SEQ ID NO: 753558 - DNA, 19 bp, Mus musculus
  siRNA target sequence for Hurp (NM_144553.1,470-488).
gagagcttggtaatataca

SEQ ID NO: 753559 - DNA, 19 bp, Mus musculus
  siRNA target sequence for Hurp (NM_144553.1,781-799).
gagcagactaagattggta

SEQ ID NO: 753560 - DNA, 19 bp, Mus musculus
  siRNA target sequence for Hurp (NM_144553.1,797-815).
gtagcaggaatgttcctaa

SEQ ID NO: 753561 - DNA, 19 bp, Mus musculus
  siRNA target sequence for Hurp (NM_144553.1,801-819).
caggaatgttcctaaagca

SEQ ID NO: 753562 - DNA, 19 bp, Mus musculus
  siRNA target sequence for Hurp (NM_144553.1,836-854).
gacaaacttctgaaaaaca

SEQ ID NO: 753563 - DNA, 19 bp, Mus musculus
  siRNA target sequence for Hurp (NM_144553.1,842-860).
cttctgaaaaacaaccatt

SEQ ID NO: 753564 - DNA, 19 bp, Mus musculus
  siRNA target sequence for Hurp (NM_144553.1,845-863).
ctgaaaaacaaccattaga

SEQ ID NO: 753565 - DNA, 19 bp, Mus musculus
  siRNA target sequence for Hurp (NM_144553.1,986-1004).
caagagccacgaatgagaa

SEQ ID NO: 753566 - DNA, 19 bp, Mus musculus
  siRNA target sequence for Hurp (NM_144553.1,991-1009).
gccacgaatgagaaaggat

SEQ ID NO: 753567 - DNA, 19 bp, Mus musculus
  siRNA target sequence for Hurp (NM_144553.1,1090-1108).
gagcgggacgaaaagcatt

SEQ ID NO: 753568 - DNA, 19 bp, Mus musculus
  siRNA target sequence for Hurp (NM_144553.1,1096-1114).
gacgaaaagcatttggatt

SEQ ID NO: 753569 - DNA, 19 bp, Mus musculus
  siRNA target sequence for Hurp (NM_144553.1,1305-1323).
cctgacacccaattgtgat

SEQ ID NO: 753570 - DNA, 19 bp, Mus musculus
  siRNA target sequence for Hurp (NM_144553.1,1306-1324).
ctgacacccaattgtgatt

SEQ ID NO: 753571 - DNA, 19 bp, Mus musculus
  siRNA target sequence for Hurp (NM_144553.1,1310-1328).
cacccaattgtgattggaa

SEQ ID NO: 753572 - DNA, 19 bp, Mus musculus
  siRNA target sequence for Hurp (NM_144553.1,1329-1347).
ccagttaagaccagaagtt

SEQ ID NO: 753573 - DNA, 19 bp, Mus musculus
  siRNA target sequence for Hurp (NM_144553.1,1330-1348).
cagttaagaccagaagttt

SEQ ID NO: 753574 - DNA, 19 bp, Mus musculus
  siRNA target sequence for Hurp (NM_144553.1,1353-1371).
cactacaactcaagacaaa

SEQ ID NO: 753575 - DNA, 19 bp, Mus musculus
  siRNA target sequence for Hurp (NM_144553.1,1397-1415).
gattggagtcgctaacaga

SEQ ID NO: 753576 - DNA, 19 bp, Mus musculus
  siRNA target sequence for Hurp (NM_144553.1,1406-1424).
cgctaacagaccgtagtaa

SEQ ID NO: 753577 - DNA, 19 bp, Mus musculus
  siRNA target sequence for Hurp (NM_144553.1,1407-1425).
gctaacagaccgtagtaaa

SEQ ID NO: 753578 - DNA, 19 bp, Mus musculus
  siRNA target sequence for Hurp (NM_144553.1,1412-1430).
cagaccgtagtaaagaaca

SEQ ID NO: 753579 - DNA, 19 bp, Mus musculus
  siRNA target sequence for Hurp (NM_144553.1,1418-1436).
gtagtaaagaacatgtctt

SEQ ID NO: 753580 - DNA, 19 bp, Mus musculus
  siRNA target sequence for Hurp (NM_144553.1,1454-1472).
ctacttcagattcaaatca

SEQ ID NO: 753581 - DNA, 19 bp, Mus musculus
  siRNA target sequence for Hurp (NM_144553.1,1534-1552).
cacgatgtgccatacttca

SEQ ID NO: 753582 - DNA, 19 bp, Mus musculus
  siRNA target sequence for Hurp (NM_144553.1,1537-1555).
gatgtgccatacttcagaa

SEQ ID NO: 753583 - DNA, 19 bp, Mus musculus
  siRNA target sequence for Hurp (NM_144553.1,1667-1685).
gtcaaacaagactccttat

SEQ ID NO: 753584 - DNA, 19 bp, Mus musculus
  siRNA target sequence for Hurp (NM_144553.1,1669-1687).
caaacaagactccttatca

SEQ ID NO: 753585 - DNA, 19 bp, Mus musculus
  siRNA target sequence for Hurp (NM_144553.1,1681-1699).
cttatcaaggagagattca

SEQ ID NO: 753586 - DNA, 19 bp, Mus musculus
  siRNA target sequence for Hurp (NM_144553.1,1689-1707).
ggagagattcagacagttt

SEQ ID NO: 753587 - DNA, 19 bp, Mus musculus
  siRNA target sequence for Hurp (NM_144553.1,1717-1735).
gtggacaactgcgagtata

SEQ ID NO: 753588 - DNA, 19 bp, Mus musculus
  siRNA target sequence for Hurp (NM_144553.1,1719-1737).
ggacaactgcgagtataaa

SEQ ID NO: 753589 - DNA, 19 bp, Mus musculus
  siRNA target sequence for Hurp (NM_144553.1,1781-1799).
gggatatggttagttttca

SEQ ID NO: 753590 - DNA, 19 bp, Mus musculus
  siRNA target sequence for Hurp (NM_144553.1,1793-1811).
gttttcaggtcgatgatgt

SEQ ID NO: 753591 - DNA, 19 bp, Mus musculus
  siRNA target sequence for Hurp (NM_144553.1,1804-1822).
gatgatgtgaaccagaaat

SEQ ID NO: 753592 - DNA, 19 bp, Mus musculus
  siRNA target sequence for Hurp (NM_144553.1,1846-1864).
gcgtcaggatggaaagaca

SEQ ID NO: 753593 - DNA, 19 bp, Mus musculus
  siRNA target sequence for Hurp (NM_144553.1,1857-1875).
gaaagacagcaataatcca

SEQ ID NO: 753594 - DNA, 19 bp, Mus musculus
  siRNA target sequence for Hurp (NM_144553.1,1909-1927).
ggtagaacaagcaaagcaa

SEQ ID NO: 753595 - DNA, 19 bp, Mus musculus
  siRNA target sequence for Hurp (NM_144553.1,2131-2149).
cgttctcaaagatttggaa

SEQ ID NO: 753596 - DNA, 19 bp, Mus musculus
  siRNA target sequence for Hurp (NM_144553.1,2257-2275).
catgttgatcggacgtttt

SEQ ID NO: 753597 - DNA, 19 bp, Mus musculus
  siRNA target sequence for Hurp (NM_144553.1,2291-2309).
gcaggtgccacgtagaaga

SEQ ID NO: 753598 - DNA, 19 bp, Mus musculus
  siRNA target sequence for Hurp (NM_144553.1,2328-2346).
gcaagattcaagtgacata

SEQ ID NO: 753599 - DNA, 19 bp, Mus musculus
  siRNA target sequence for Hurp (NM_144553.1,2341-2359).
gacatagagcatgatgtaa

SEQ ID NO: 753600 - DNA, 19 bp, Mus musculus
  siRNA target sequence for Hurp (NM_144553.1,2384-2402).
gtttctctgttgaaacgaa

SEQ ID NO: 753601 - DNA, 19 bp, Mus musculus
  siRNA target sequence for Hurp (NM_144553.1,2417-2435).
ctggtgatgctaataccaa

SEQ ID NO: 753602 - DNA, 19 bp, Mus musculus
  siRNA target sequence for Hurp (NM_144553.1,2426-2444).
ctaataccaatcaaaaaga

SEQ ID NO: 753603 - DNA, 19 bp, Mus musculus
  siRNA target sequence for Hurp (NM_144553.1,2561-2579).
cgtcgcagtcagtactgtt

SEQ ID NO: 753604 - DNA, 19 bp, Mus musculus
  siRNA target sequence for Hurp (NM_144553.1,2562-2580).
gtcgcagtcagtactgtta

SEQ ID NO: 753605 - DNA, 19 bp, Mus musculus
  siRNA target sequence for AB041803 (NM_144555.1,410-428).
cactttcgggagtctctta

SEQ ID NO: 753606 - DNA, 19 bp, Mus musculus
  siRNA target sequence for AB041803 (NM_144555.1,442-460).
gattcctagcgttagaaga

SEQ ID NO: 753607 - DNA, 19 bp, Mus musculus
  siRNA target sequence for AB041803 (NM_144555.1,646-664).
cacgtgcagttctccattt

SEQ ID NO: 753608 - DNA, 19 bp, Mus musculus
  siRNA target sequence for Lgi4 (NM_144556.2,145-163).
ggagtccccccaaaggaaa

SEQ ID NO: 753609 - DNA, 19 bp, Mus musculus
  siRNA target sequence for Lgi4 (NM_144556.2,287-305).
gaaggctggcagcttctta

SEQ ID NO: 753610 - DNA, 19 bp, Mus musculus
  siRNA target sequence for Lgi4 (NM_144556.2,330-348).
ctcttcacatccaatacct

SEQ ID NO: 753611 - DNA, 19 bp, Mus musculus
  siRNA target sequence for Lgi4 (NM_144556.2,914-932).
gggcccacgcctcttcata

SEQ ID NO: 753612 - DNA, 19 bp, Mus musculus
  siRNA target sequence for Lgi4 (NM_144556.2,1355-1373).
gtgcctgacgcgatacatt

SEQ ID NO: 753613 - DNA, 19 bp, Mus musculus
  siRNA target sequence for Lgi4 (NM_144556.2,1403-1421).
ctccatgttccgactgtta

SEQ ID NO: 753614 - DNA, 19 bp, Mus musculus
  siRNA target sequence for Lgi4 (NM_144556.2,1523-1541).
ccgctttgagtccgataaa

SEQ ID NO: 753615 - DNA, 19 bp, Mus musculus
  siRNA target sequence for Lgi4 (NM_144556.2,1670-1688).
ccagcaccatgaattggat

SEQ ID NO: 753616 - DNA, 19 bp, Mus musculus
  siRNA target sequence for Bivm (NM_144558.2,487-505).
gctgtaccatctttctata

SEQ ID NO: 753617 - DNA, 19 bp, Mus musculus
  siRNA target sequence for Bivm (NM_144558.2,490-508).
gtaccatctttctatacaa

SEQ ID NO: 753618 - DNA, 19 bp, Mus musculus
  siRNA target sequence for Bivm (NM_144558.2,538-556).
ggagatgggcattatccat

SEQ ID NO: 753619 - DNA, 19 bp, Mus musculus
  siRNA target sequence for Bivm (NM_144558.2,576-594).
cactcgagagaaaatttat

SEQ ID NO: 753620 - DNA, 19 bp, Mus musculus
  siRNA target sequence for Bivm (NM_144558.2,665-683).
ctgcttgcctccctgataa

SEQ ID NO: 753621 - DNA, 19 bp, Mus musculus
  siRNA target sequence for Bivm (NM_144558.2,676-694).
cctgataacacctctcttt

SEQ ID NO: 753622 - DNA, 19 bp, Mus musculus
  siRNA target sequence for Bivm (NM_144558.2,698-716).
ctggaaatactacaagata

SEQ ID NO: 753623 - DNA, 19 bp, Mus musculus
  siRNA target sequence for Bivm (NM_144558.2,700-718).
ggaaatactacaagatata

SEQ ID NO: 753624 - DNA, 19 bp, Mus musculus
  siRNA target sequence for Bivm (NM_144558.2,721-739).
ggaatttcaactagtacat

SEQ ID NO: 753625 - DNA, 19 bp, Mus musculus
  siRNA target sequence for Bivm (NM_144558.2,731-749).
ctagtacatcagaaataat

SEQ ID NO: 753626 - DNA, 19 bp, Mus musculus
  siRNA target sequence for Bivm (NM_144558.2,734-752).
gtacatcagaaataatcta

SEQ ID NO: 753627 - DNA, 19 bp, Mus musculus
  siRNA target sequence for Bivm (NM_144558.2,803-821).
ctcttgcatgggagattga

SEQ ID NO: 753628 - DNA, 19 bp, Mus musculus
  siRNA target sequence for Bivm (NM_144558.2,808-826).
gcatgggagattgataaat

SEQ ID NO: 753629 - DNA, 19 bp, Mus musculus
  siRNA target sequence for Bivm (NM_144558.2,835-853).
gatggggtgactacaaatt

SEQ ID NO: 753630 - DNA, 19 bp, Mus musculus
  siRNA target sequence for Bivm (NM_144558.2,843-861).
gactacaaatttgatacat

SEQ ID NO: 753631 - DNA, 19 bp, Mus musculus
  siRNA target sequence for Bivm (NM_144558.2,845-863).
ctacaaatttgatacataa

SEQ ID NO: 753632 - DNA, 19 bp, Mus musculus
  siRNA target sequence for Bivm (NM_144558.2,859-877).
cataagtcaggcaatgtaa

SEQ ID NO: 753633 - DNA, 19 bp, Mus musculus
  siRNA target sequence for Bivm (NM_144558.2,894-912).
gaagaaaacgtcggataaa

SEQ ID NO: 753634 - DNA, 19 bp, Mus musculus
  siRNA target sequence for Bivm (NM_144558.2,897-915).
gaaaacgtcggataaaaaa

SEQ ID NO: 753635 - DNA, 19 bp, Mus musculus
  siRNA target sequence for Bivm (NM_144558.2,930-948).
ggagtgtctccactattct

SEQ ID NO: 753636 - DNA, 19 bp, Mus musculus
  siRNA target sequence for Bivm (NM_144558.2,939-957).
ccactattctcctcttgat

SEQ ID NO: 753637 - DNA, 19 bp, Mus musculus
  siRNA target sequence for Bivm (NM_144558.2,942-960).
ctattctcctcttgatgat

SEQ ID NO: 753638 - DNA, 19 bp, Mus musculus
  siRNA target sequence for Bivm (NM_144558.2,1009-1027).
cgaccacagtacaagactt

SEQ ID NO: 753639 - DNA, 19 bp, Mus musculus
  siRNA target sequence for Bivm (NM_144558.2,1031-1049).
gtggtatctcctcattgat

SEQ ID NO: 753640 - DNA, 19 bp, Mus musculus
  siRNA target sequence for Bivm (NM_144558.2,1033-1051).
ggtatctcctcattgattt

SEQ ID NO: 753641 - DNA, 19 bp, Mus musculus
  siRNA target sequence for Bivm (NM_144558.2,1087-1105).
gggaatctcccacctatta

SEQ ID NO: 753642 - DNA, 19 bp, Mus musculus
  siRNA target sequence for Bivm (NM_144558.2,1097-1115).
cacctattacccaagaaga

SEQ ID NO: 753643 - DNA, 19 bp, Mus musculus
  siRNA target sequence for Bivm (NM_144558.2,1106-1124).
cccaagaagaggcattaca

SEQ ID NO: 753644 - DNA, 19 bp, Mus musculus
  siRNA target sequence for Bivm (NM_144558.2,1107-1125).
ccaagaagaggcattacat

SEQ ID NO: 753645 - DNA, 19 bp, Mus musculus
  siRNA target sequence for Bivm (NM_144558.2,1108-1126).
caagaagaggcattacata

SEQ ID NO: 753646 - DNA, 19 bp, Mus musculus
  siRNA target sequence for Bivm (NM_144558.2,1111-1129).
gaagaggcattacatattt

SEQ ID NO: 753647 - DNA, 19 bp, Mus musculus
  siRNA target sequence for Bivm (NM_144558.2,1134-1152).
cttccaacccccatttgaa

SEQ ID NO: 753648 - DNA, 19 bp, Mus musculus
  siRNA target sequence for Bivm (NM_144558.2,1167-1185).
ccctttcactggaaataca

SEQ ID NO: 753649 - DNA, 19 bp, Mus musculus
  siRNA target sequence for Bivm (NM_144558.2,1199-1217).
ggtttagacaaattaatga

SEQ ID NO: 753650 - DNA, 19 bp, Mus musculus
  siRNA target sequence for Bivm (NM_144558.2,1219-1237).
cactttcatgtgaaaggat

SEQ ID NO: 753651 - DNA, 19 bp, Mus musculus
  siRNA target sequence for Bivm (NM_144558.2,1238-1256).
gctcttatgttctatataa

SEQ ID NO: 753652 - DNA, 19 bp, Mus musculus
  siRNA target sequence for Bivm (NM_144558.2,1291-1309).
gctccaggggccttatcaa

SEQ ID NO: 753653 - DNA, 19 bp, Mus musculus
  siRNA target sequence for Bivm (NM_144558.2,1297-1315).
ggggccttatcaaagttga

SEQ ID NO: 753654 - DNA, 19 bp, Mus musculus
  siRNA target sequence for Bivm (NM_144558.2,1311-1329).
gttgacccgaggattgaaa

SEQ ID NO: 753655 - DNA, 19 bp, Mus musculus
  siRNA target sequence for Bivm (NM_144558.2,1314-1332).
gacccgaggattgaaagat

SEQ ID NO: 753656 - DNA, 19 bp, Mus musculus
  siRNA target sequence for Bivm (NM_144558.2,1330-1348).
gatgagtcactggcttata

SEQ ID NO: 753657 - DNA, 19 bp, Mus musculus
  siRNA target sequence for Bivm (NM_144558.2,1335-1353).
gtcactggcttatatctat

SEQ ID NO: 753658 - DNA, 19 bp, Mus musculus
  siRNA target sequence for Bivm (NM_144558.2,1337-1355).
cactggcttatatctatca

SEQ ID NO: 753659 - DNA, 19 bp, Mus musculus
  siRNA target sequence for Bivm (NM_144558.2,1339-1357).
ctggcttatatctatcatt

SEQ ID NO: 753660 - DNA, 19 bp, Mus musculus
  siRNA target sequence for Bivm (NM_144558.2,1354-1372).
cattgccaaaatcactatt

SEQ ID NO: 753661 - DNA, 19 bp, Mus musculus
  siRNA target sequence for Bivm (NM_144558.2,1359-1377).
ccaaaatcactatttctgt

SEQ ID NO: 753662 - DNA, 19 bp, Mus musculus
  siRNA target sequence for Bivm (NM_144558.2,1394-1412).
caacccctgtgaaagctaa

SEQ ID NO: 753663 - DNA, 19 bp, Mus musculus
  siRNA target sequence for Bivm (NM_144558.2,1398-1416).
ccctgtgaaagctaataaa

SEQ ID NO: 753664 - DNA, 19 bp, Mus musculus
  siRNA target sequence for Bivm (NM_144558.2,1402-1420).
gtgaaagctaataaagcat

SEQ ID NO: 753665 - DNA, 19 bp, Mus musculus
  siRNA target sequence for Bivm (NM_144558.2,1433-1451).
ccctctcttcacaagaagt

SEQ ID NO: 753666 - DNA, 19 bp, Mus musculus
  siRNA target sequence for Bivm (NM_144558.2,1495-1513).
gccattcactgtaaaagat

SEQ ID NO: 753667 - DNA, 19 bp, Mus musculus
  siRNA target sequence for Bivm (NM_144558.2,1584-1602).
gctgcagttccggaaaaca

SEQ ID NO: 753668 - DNA, 19 bp, Mus musculus
  siRNA target sequence for Bivm (NM_144558.2,1585-1603).
ctgcagttccggaaaacaa

SEQ ID NO: 753669 - DNA, 19 bp, Mus musculus
  siRNA target sequence for Bivm (NM_144558.2,1613-1631).
gaggaaatttgcattgcat

SEQ ID NO: 753670 - DNA, 19 bp, Mus musculus
  siRNA target sequence for Bivm (NM_144558.2,1657-1675).
cagagatttggcttttgga

SEQ ID NO: 753671 - DNA, 19 bp, Mus musculus
  siRNA target sequence for Bivm (NM_144558.2,1682-1700).
catttggaaccattacaca

SEQ ID NO: 753672 - DNA, 19 bp, Mus musculus
  siRNA target sequence for Bivm (NM_144558.2,1691-1709).
ccattacacaagaatcaca

SEQ ID NO: 753673 - DNA, 19 bp, Mus musculus
  siRNA target sequence for Bivm (NM_144558.2,1744-1762).
gagagtgaggacaatatct

SEQ ID NO: 753674 - DNA, 19 bp, Mus musculus
  siRNA target sequence for Bivm (NM_144558.2,1746-1764).
gagtgaggacaatatctct

SEQ ID NO: 753675 - DNA, 19 bp, Mus musculus
  siRNA target sequence for Bivm (NM_144558.2,1748-1766).
gtgaggacaatatctctaa

SEQ ID NO: 753676 - DNA, 19 bp, Mus musculus
  siRNA target sequence for Bivm (NM_144558.2,1750-1768).
gaggacaatatctctaaga

SEQ ID NO: 753677 - DNA, 19 bp, Mus musculus
  siRNA target sequence for Bivm (NM_144558.2,1794-1812).
cttcagtgcgagtttccat

SEQ ID NO: 753678 - DNA, 19 bp, Mus musculus
  siRNA target sequence for Bivm (NM_144558.2,1866-1884).
ctaccacagctttagagat

SEQ ID NO: 753679 - DNA, 19 bp, Mus musculus
  siRNA target sequence for Bivm (NM_144558.2,1870-1888).
cacagctttagagattata

SEQ ID NO: 753680 - DNA, 19 bp, Mus musculus
  siRNA target sequence for Bivm (NM_144558.2,1882-1900).
gattataatggcaatgact

SEQ ID NO: 753681 - DNA, 19 bp, Mus musculus
  siRNA target sequence for 2410141F18Rik (NM_144787.1,182-200).
ggtggagagtcccctaaat

SEQ ID NO: 753682 - DNA, 19 bp, Mus musculus
  siRNA target sequence for 2410141F18Rik (NM_144787.1,195-213).
ctaaatcccagctgtaaga

SEQ ID NO: 753683 - DNA, 19 bp, Mus musculus
  siRNA target sequence for 2410141F18Rik (NM_144787.1,242-260).
gtttcgggagttcaacaaa

SEQ ID NO: 753684 - DNA, 19 bp, Mus musculus
  siRNA target sequence for 2410141F18Rik (NM_144787.1,247-265).
gggagttcaacaaatacct

SEQ ID NO: 753685 - DNA, 19 bp, Mus musculus
  siRNA target sequence for 2410141F18Rik (NM_144787.1,266-284).
cgcatacatggaatccaaa

SEQ ID NO: 753686 - DNA, 19 bp, Mus musculus
  siRNA target sequence for 2410141F18Rik (NM_144787.1,411-429).
ggactgttcacgcaataca

SEQ ID NO: 753687 - DNA, 19 bp, Mus musculus
  siRNA target sequence for 2410141F18Rik (NM_144787.1,412-430).
gactgttcacgcaatacaa

SEQ ID NO: 753688 - DNA, 19 bp, Mus musculus
  siRNA target sequence for 2410141F18Rik (NM_144787.1,414-432).
ctgttcacgcaatacaaca

SEQ ID NO: 753689 - DNA, 19 bp, Mus musculus
  siRNA target sequence for 2410141F18Rik (NM_144787.1,471-489).
ctggctaacagcagcaaat

SEQ ID NO: 753690 - DNA, 19 bp, Mus musculus
  siRNA target sequence for 2410141F18Rik (NM_144787.1,538-556).
ggaaaaacttaacttttgt

SEQ ID NO: 753691 - DNA, 19 bp, Mus musculus
  siRNA target sequence for 2410141F18Rik (NM_144787.1,550-568).
cttttgtggcacctattta

SEQ ID NO: 753692 - DNA, 19 bp, Mus musculus
  siRNA target sequence for 2410141F18Rik (NM_144787.1,608-626).
ggatgaatggaatatagct

SEQ ID NO: 753693 - DNA, 19 bp, Mus musculus
  siRNA target sequence for 2410141F18Rik (NM_144787.1,617-635).
gaatatagctcgcctaaat

SEQ ID NO: 753694 - DNA, 19 bp, Mus musculus
  siRNA target sequence for 2410141F18Rik (NM_144787.1,657-675).
gaagagtgtggtatttcta

SEQ ID NO: 753695 - DNA, 19 bp, Mus musculus
  siRNA target sequence for 2410141F18Rik (NM_144787.1,692-710).
cccttatctctattttgga

SEQ ID NO: 753696 - DNA, 19 bp, Mus musculus
  siRNA target sequence for 2410141F18Rik (NM_144787.1,746-764).
catggatctctacagtatt

SEQ ID NO: 753697 - DNA, 19 bp, Mus musculus
  siRNA target sequence for 2410141F18Rik (NM_144787.1,749-767).
ggatctctacagtattaat

SEQ ID NO: 753698 - DNA, 19 bp, Mus musculus
  siRNA target sequence for 2410141F18Rik (NM_144787.1,786-804).
cccaagtcttggtatgcta

SEQ ID NO: 753699 - DNA, 19 bp, Mus musculus
  siRNA target sequence for 2410141F18Rik (NM_144787.1,815-833).
gcatggaaagcgacttgaa

SEQ ID NO: 753700 - DNA, 19 bp, Mus musculus
  siRNA target sequence for 2410141F18Rik (NM_144787.1,816-834).
catggaaagcgacttgaaa

SEQ ID NO: 753701 - DNA, 19 bp, Mus musculus
  siRNA target sequence for 2410141F18Rik (NM_144787.1,820-838).
gaaagcgacttgaaagact

SEQ ID NO: 753702 - DNA, 19 bp, Mus musculus
  siRNA target sequence for 2410141F18Rik (NM_144787.1,980-998).
cacttttccttatggatat

SEQ ID NO: 753703 - DNA, 19 bp, Mus musculus
  siRNA target sequence for 2410141F18Rik (NM_144787.1,1027-1045).
gtgctgagtctacaaattt

SEQ ID NO: 753704 - DNA, 19 bp, Mus musculus
  siRNA target sequence for 2410141F18Rik (NM_144787.1,1090-1108).
gcacttgtcggaatgacat

SEQ ID NO: 753705 - DNA, 19 bp, Mus musculus
  siRNA target sequence for 2410141F18Rik (NM_144787.1,1290-1308).
ggcaataagccactttgta

SEQ ID NO: 753706 - DNA, 19 bp, Mus musculus
  siRNA target sequence for 2410141F18Rik (NM_144787.1,1292-1310).
caataagccactttgtaaa

SEQ ID NO: 753707 - DNA, 19 bp, Mus musculus
  siRNA target sequence for 2410141F18Rik (NM_144787.1,1334-1352).
ggaatttgctgaatttagt

SEQ ID NO: 753708 - DNA, 19 bp, Mus musculus
  siRNA target sequence for 2410141F18Rik (NM_144787.1,1514-1532).
ctcgggaaaaggttgcata

SEQ ID NO: 753709 - DNA, 19 bp, Mus musculus
  siRNA target sequence for 2410141F18Rik (NM_144787.1,1517-1535).
gggaaaaggttgcataagt

SEQ ID NO: 753710 - DNA, 19 bp, Mus musculus
  siRNA target sequence for 2410141F18Rik (NM_144787.1,1518-1536).
ggaaaaggttgcataagtt

SEQ ID NO: 753711 - DNA, 19 bp, Mus musculus
  siRNA target sequence for 2410141F18Rik (NM_144787.1,1662-1680).
catctacttaagattctaa

SEQ ID NO: 753712 - DNA, 19 bp, Mus musculus
  siRNA target sequence for 2410141F18Rik (NM_144787.1,1673-1691).
gattctaaagcttgaatct

SEQ ID NO: 753713 - DNA, 19 bp, Mus musculus
  siRNA target sequence for 2410141F18Rik (NM_144787.1,1706-1724).
ccccctgccagaaagtaat

SEQ ID NO: 753714 - DNA, 19 bp, Mus musculus
  siRNA target sequence for 2410141F18Rik (NM_144787.1,1707-1725).
cccctgccagaaagtaata

SEQ ID NO: 753715 - DNA, 19 bp, Mus musculus
  siRNA target sequence for 2410141F18Rik (NM_144787.1,1760-1778).
gggccatggaagtaacctt

SEQ ID NO: 753716 - DNA, 19 bp, Mus musculus
  siRNA target sequence for 2410141F18Rik (NM_144787.1,1851-1869).
cagccaaaaactactaaga

SEQ ID NO: 753717 - DNA, 19 bp, Mus musculus
  siRNA target sequence for 2410141F18Rik (NM_144787.1,1906-1924).
ccccaatgacacttgtgaa

SEQ ID NO: 753718 - DNA, 19 bp, Mus musculus
  siRNA target sequence for 2410141F18Rik (NM_144787.1,1928-1946).
gcaggtagcgagtgatgaa

SEQ ID NO: 753719 - DNA, 19 bp, Mus musculus
  siRNA target sequence for 2410141F18Rik (NM_144787.1,1931-1949).
ggtagcgagtgatgaagaa

SEQ ID NO: 753720 - DNA, 19 bp, Mus musculus
  siRNA target sequence for 2410141F18Rik (NM_144787.1,1932-1950).
gtagcgagtgatgaagaat

SEQ ID NO: 753721 - DNA, 19 bp, Mus musculus
  siRNA target sequence for 2410141F18Rik (NM_144787.1,1947-1965).
gaattgcctgaggttctaa

SEQ ID NO: 753722 - DNA, 19 bp, Mus musculus
  siRNA target sequence for 2410141F18Rik (NM_144787.1,1966-1984).
gcattgacgaagaagttga

SEQ ID NO: 753723 - DNA, 19 bp, Mus musculus
  siRNA target sequence for 2410141F18Rik (NM_144787.1,2016-2034).
cacctttggcagacaaagt

SEQ ID NO: 753724 - DNA, 19 bp, Mus musculus
  siRNA target sequence for 2410141F18Rik (NM_144787.1,2018-2036).
cctttggcagacaaagtct

SEQ ID NO: 753725 - DNA, 19 bp, Mus musculus
  siRNA target sequence for 2410141F18Rik (NM_144787.1,2027-2045).
gacaaagtctcctaacttt

SEQ ID NO: 753726 - DNA, 19 bp, Mus musculus
  siRNA target sequence for 2410141F18Rik (NM_144787.1,2029-2047).
caaagtctcctaactttat

SEQ ID NO: 753727 - DNA, 19 bp, Mus musculus
  siRNA target sequence for 2410141F18Rik (NM_144787.1,2048-2066).
ggctgaacaggagtacaat

SEQ ID NO: 753728 - DNA, 19 bp, Mus musculus
  siRNA target sequence for 2410141F18Rik (NM_144787.1,2175-2193).
gtaaatgaagtggttcaat

SEQ ID NO: 753729 - DNA, 19 bp, Mus musculus
  siRNA target sequence for 2410141F18Rik (NM_144787.1,2187-2205).
gttcaatctggaagaaaga

SEQ ID NO: 753730 - DNA, 19 bp, Mus musculus
  siRNA target sequence for 2410141F18Rik (NM_144787.1,2204-2222).
gactaagcccattattcca

SEQ ID NO: 753731 - DNA, 19 bp, Mus musculus
  siRNA target sequence for 2410141F18Rik (NM_144787.1,2330-2348).
gcgggttcatgcaagttgt

SEQ ID NO: 753732 - DNA, 19 bp, Mus musculus
  siRNA target sequence for 2410141F18Rik (NM_144787.1,2331-2349).
cgggttcatgcaagttgtt

SEQ ID NO: 753733 - DNA, 19 bp, Mus musculus
  siRNA target sequence for 2410141F18Rik (NM_144787.1,2333-2351).
ggttcatgcaagttgttat

SEQ ID NO: 753734 - DNA, 19 bp, Mus musculus
  siRNA target sequence for 2410141F18Rik (NM_144787.1,2393-2411).
ccggtgcaagagaaatgca

SEQ ID NO: 753735 - DNA, 19 bp, Mus musculus
  siRNA target sequence for 2410141F18Rik (NM_144787.1,2421-2439).
gaatgctgtctctgcaatt

SEQ ID NO: 753736 - DNA, 19 bp, Mus musculus
  siRNA target sequence for 2410141F18Rik (NM_144787.1,2443-2461).
ggggaggtgctctgaaaca

SEQ ID NO: 753737 - DNA, 19 bp, Mus musculus
  siRNA target sequence for 2410141F18Rik (NM_144787.1,2445-2463).
ggaggtgctctgaaacaga

SEQ ID NO: 753738 - DNA, 19 bp, Mus musculus
  siRNA target sequence for 2410141F18Rik (NM_144787.1,2449-2467).
gtgctctgaaacagactaa

SEQ ID NO: 753739 - DNA, 19 bp, Mus musculus
  siRNA target sequence for 2410141F18Rik (NM_144787.1,2477-2495).
gtgggctcatgtcatatgt

SEQ ID NO: 753740 - DNA, 19 bp, Mus musculus
  siRNA target sequence for 2410141F18Rik (NM_144787.1,2509-2527).
cagaagtgcgattcactaa

SEQ ID NO: 753741 - DNA, 19 bp, Mus musculus
  siRNA target sequence for 2410141F18Rik (NM_144787.1,2531-2549).
cccagaacggacacaaata

SEQ ID NO: 753742 - DNA, 19 bp, Mus musculus
  siRNA target sequence for 2410141F18Rik (NM_144787.1,2533-2551).
cagaacggacacaaataga

SEQ ID NO: 753743 - DNA, 19 bp, Mus musculus
  siRNA target sequence for 2410141F18Rik (NM_144787.1,2550-2568).
gatgtagacagaatacctt

SEQ ID NO: 753744 - DNA, 19 bp, Mus musculus
  siRNA target sequence for 2410141F18Rik (NM_144787.1,2556-2574).
gacagaatacctttacaga

SEQ ID NO: 753745 - DNA, 19 bp, Mus musculus
  siRNA target sequence for 2410141F18Rik (NM_144787.1,2597-2615).
ctgtagacaccgggttaaa

SEQ ID NO: 753746 - DNA, 19 bp, Mus musculus
  siRNA target sequence for 2410141F18Rik (NM_144787.1,2599-2617).
gtagacaccgggttaaaaa

SEQ ID NO: 753747 - DNA, 19 bp, Mus musculus
  siRNA target sequence for 2410141F18Rik (NM_144787.1,2602-2620).
gacaccgggttaaaaaggt

SEQ ID NO: 753748 - DNA, 19 bp, Mus musculus
  siRNA target sequence for 2410141F18Rik (NM_144787.1,2604-2622).
caccgggttaaaaaggttt

SEQ ID NO: 753749 - DNA, 19 bp, Mus musculus
  siRNA target sequence for 2410141F18Rik (NM_144787.1,2658-2676).
ccagcttcattccatgtta

SEQ ID NO: 753750 - DNA, 19 bp, Mus musculus
  siRNA target sequence for 2410141F18Rik (NM_144787.1,2719-2737).
ggccttacgtggtaaacat

SEQ ID NO: 753751 - DNA, 19 bp, Mus musculus
  siRNA target sequence for 2410141F18Rik (NM_144787.1,2721-2739).
ccttacgtggtaaacatca

SEQ ID NO: 753752 - DNA, 19 bp, Mus musculus
  siRNA target sequence for 2410141F18Rik (NM_144787.1,2762-2780).
ctcaaacgcgaaatccaaa

SEQ ID NO: 753753 - DNA, 19 bp, Mus musculus
  siRNA target sequence for 2410141F18Rik (NM_144787.1,2768-2786).
cgcgaaatccaaaacttgt

SEQ ID NO: 753754 - DNA, 19 bp, Mus musculus
  siRNA target sequence for 2410141F18Rik (NM_144787.1,2805-2823).
ggtcagacagtcatcacaa

SEQ ID NO: 753755 - DNA, 19 bp, Mus musculus
  siRNA target sequence for 2410141F18Rik (NM_144787.1,2829-2847).
cgaaacactcggtactaca

SEQ ID NO: 753756 - DNA, 19 bp, Mus musculus
  siRNA target sequence for 2410141F18Rik (NM_144787.1,2848-2866).
gctgcagagtgatagatgt

SEQ ID NO: 753757 - DNA, 19 bp, Mus musculus
  siRNA target sequence for 2410141F18Rik (NM_144787.1,2867-2885).
gacatctcaaaccttctat

SEQ ID NO: 753758 - DNA, 19 bp, Mus musculus
  siRNA target sequence for 2410141F18Rik (NM_144787.1,2878-2896).
ccttctatgaggtcatgtt

SEQ ID NO: 753759 - DNA, 19 bp, Mus musculus
  siRNA target sequence for 2410141F18Rik (NM_144787.1,2908-2926).
ccttcagcagagacacatt

SEQ ID NO: 753760 - DNA, 19 bp, Mus musculus
  siRNA target sequence for 2410141F18Rik (NM_144787.1,2909-2927).
cttcagcagagacacattt

SEQ ID NO: 753761 - DNA, 19 bp, Mus musculus
  siRNA target sequence for 2410141F18Rik (NM_144787.1,2912-2930).
cagcagagacacatttcct

SEQ ID NO: 753762 - DNA, 19 bp, Mus musculus
  siRNA target sequence for 2410141F18Rik (NM_144787.1,2980-2998).
gagaagtcatccaagtcaa

SEQ ID NO: 753763 - DNA, 19 bp, Mus musculus
  siRNA target sequence for 2410141F18Rik (NM_144787.1,2996-3014).
caaatggcctgatggtaaa

SEQ ID NO: 753764 - DNA, 19 bp, Mus musculus
  siRNA target sequence for 2410141F18Rik (NM_144787.1,3017-3035).
ctatggggcaaagtatctt

SEQ ID NO: 753765 - DNA, 19 bp, Mus musculus
  siRNA target sequence for 2410141F18Rik (NM_144787.1,3025-3043).
caaagtatcttggatcaaa

SEQ ID NO: 753766 - DNA, 19 bp, Mus musculus
  siRNA target sequence for 2410141F18Rik (NM_144787.1,3029-3047).
gtatcttggatcaaatgtt

SEQ ID NO: 753767 - DNA, 19 bp, Mus musculus
  siRNA target sequence for 2410141F18Rik (NM_144787.1,3079-3097).
gatcgcagattgcaatgaa

SEQ ID NO: 753768 - DNA, 19 bp, Mus musculus
  siRNA target sequence for 2410141F18Rik (NM_144787.1,3126-3144).
gagttacccaagagagtaa

SEQ ID NO: 753769 - DNA, 19 bp, Mus musculus
  siRNA target sequence for 2410141F18Rik (NM_144787.1,3137-3155).
gagagtaaaggctcgtttt

SEQ ID NO: 753770 - DNA, 19 bp, Mus musculus
  siRNA target sequence for 2410141F18Rik (NM_144787.1,3141-3159).
gtaaaggctcgtttttcca

SEQ ID NO: 753771 - DNA, 19 bp, Mus musculus
  siRNA target sequence for 2410141F18Rik (NM_144787.1,3163-3181).
cctccgacatgcgatttga

SEQ ID NO: 753772 - DNA, 19 bp, Mus musculus
  siRNA target sequence for 2410141F18Rik (NM_144787.1,3164-3182).
ctccgacatgcgatttgaa

SEQ ID NO: 753773 - DNA, 19 bp, Mus musculus
  siRNA target sequence for 2410141F18Rik (NM_144787.1,3175-3193).
gatttgaagacacatttta

SEQ ID NO: 753774 - DNA, 19 bp, Mus musculus
  siRNA target sequence for 2410141F18Rik (NM_144787.1,3241-3259).
gctccaggctcaagaatga

SEQ ID NO: 753775 - DNA, 19 bp, Mus musculus
  siRNA target sequence for 2410141F18Rik (NM_144787.1,3267-3285).
gatgaccctgtgtatcgta

SEQ ID NO: 753776 - DNA, 19 bp, Mus musculus
  siRNA target sequence for 2410141F18Rik (NM_144787.1,3282-3300).
cgtactttcctgaagagtt

SEQ ID NO: 753777 - DNA, 19 bp, Mus musculus
  siRNA target sequence for Prdm15 (NM_144789.1,343-361).
gcacagagttgccaactat

SEQ ID NO: 753778 - DNA, 19 bp, Mus musculus
  siRNA target sequence for Prdm15 (NM_144789.1,385-403).
gcctccatgagcagacata

SEQ ID NO: 753779 - DNA, 19 bp, Mus musculus
  siRNA target sequence for Prdm15 (NM_144789.1,386-404).
cctccatgagcagacatat

SEQ ID NO: 753780 - DNA, 19 bp, Mus musculus
  siRNA target sequence for Prdm15 (NM_144789.1,622-640).
gataccaccttcagtgaat

SEQ ID NO: 753781 - DNA, 19 bp, Mus musculus
  siRNA target sequence for Prdm15 (NM_144789.1,635-653).
gtgaataccccgaaaagga

SEQ ID NO: 753782 - DNA, 19 bp, Mus musculus
  siRNA target sequence for Prdm15 (NM_144789.1,671-689).
gtgtgggtgacgagacaaa

SEQ ID NO: 753783 - DNA, 19 bp, Mus musculus
  siRNA target sequence for Prdm15 (NM_144789.1,675-693).
gggtgacgagacaaattct

SEQ ID NO: 753784 - DNA, 19 bp, Mus musculus
  siRNA target sequence for Prdm15 (NM_144789.1,727-745).
ctaggggaccccaatgtga

SEQ ID NO: 753785 - DNA, 19 bp, Mus musculus
  siRNA target sequence for Prdm15 (NM_144789.1,763-781).
gttggtctaaccaacatca

SEQ ID NO: 753786 - DNA, 19 bp, Mus musculus
  siRNA target sequence for Prdm15 (NM_144789.1,865-883).
cgccagctacagctagata

SEQ ID NO: 753787 - DNA, 19 bp, Mus musculus
  siRNA target sequence for Prdm15 (NM_144789.1,866-884).
gccagctacagctagataa

SEQ ID NO: 753788 - DNA, 19 bp, Mus musculus
  siRNA target sequence for Prdm15 (NM_144789.1,868-886).
cagctacagctagataact

SEQ ID NO: 753789 - DNA, 19 bp, Mus musculus
  siRNA target sequence for Prdm15 (NM_144789.1,933-951).
gcacaaccggcaaaatgat

SEQ ID NO: 753790 - DNA, 19 bp, Mus musculus
  siRNA target sequence for Prdm15 (NM_144789.1,1012-1030).
cttaccacactggtaaact

SEQ ID NO: 753791 - DNA, 19 bp, Mus musculus
  siRNA target sequence for Prdm15 (NM_144789.1,1173-1191).
cagatgtacagctactgat

SEQ ID NO: 753792 - DNA, 19 bp, Mus musculus
  siRNA target sequence for A930021G21Rik (NM_144790.1,452-470).
ggcaagacagccttggaat

SEQ ID NO: 753793 - DNA, 19 bp, Mus musculus
  siRNA target sequence for A930021G21Rik (NM_144790.1,571-589).
gccagccttggctcaactt

SEQ ID NO: 753794 - DNA, 19 bp, Mus musculus
  siRNA target sequence for A930021G21Rik (NM_144790.1,573-591).
cagccttggctcaacttgt

SEQ ID NO: 753795 - DNA, 19 bp, Mus musculus
  siRNA target sequence for A930021G21Rik (NM_144790.1,795-813).
gcactagaggcaaatcagt

SEQ ID NO: 753796 - DNA, 19 bp, Mus musculus
  siRNA target sequence for A930021G21Rik (NM_144790.1,902-920).
caaagccctcagagtatgt

SEQ ID NO: 753797 - DNA, 19 bp, Mus musculus
  siRNA target sequence for A930021G21Rik (NM_144790.1,966-984).
ctaagatcctcctctctaa

SEQ ID NO: 753798 - DNA, 19 bp, Mus musculus
  siRNA target sequence for MGC6357 (NM_144791.1,220-238).
cgacgggaagtgaggtttt

SEQ ID NO: 753799 - DNA, 19 bp, Mus musculus
  siRNA target sequence for MGC6357 (NM_144791.1,625-643).
gaccctataagcaacttat

SEQ ID NO: 753800 - DNA, 19 bp, Mus musculus
  siRNA target sequence for MGC6357 (NM_144791.1,680-698).
cataccaaacaaatggaaa

SEQ ID NO: 753801 - DNA, 19 bp, Mus musculus
  siRNA target sequence for MGC6357 (NM_144791.1,684-702).
ccaaacaaatggaaatact

SEQ ID NO: 753802 - DNA, 19 bp, Mus musculus
  siRNA target sequence for MGC6357 (NM_144791.1,758-776).
gagaaaccgaagatgatct

SEQ ID NO: 753803 - DNA, 19 bp, Mus musculus
  siRNA target sequence for MGC6357 (NM_144791.1,772-790).
gatctcgagagctcttaca

SEQ ID NO: 753804 - DNA, 19 bp, Mus musculus
  siRNA target sequence for MGC6357 (NM_144791.1,785-803).
cttacagtgacatcactat

SEQ ID NO: 753805 - DNA, 19 bp, Mus musculus
  siRNA target sequence for MGC6357 (NM_144791.1,913-931).
gcagtgggactattttggt

SEQ ID NO: 753806 - DNA, 19 bp, Mus musculus
  siRNA target sequence for MGC6357 (NM_144791.1,918-936).
gggactattttggttcttt

SEQ ID NO: 753807 - DNA, 19 bp, Mus musculus
  siRNA target sequence for MGC6357 (NM_144791.1,959-977).
ctgccgttcaagaattcca

SEQ ID NO: 753808 - DNA, 19 bp, Mus musculus
  siRNA target sequence for MGC6357 (NM_144791.1,1001-1019).
ctaagtaccagagtcaaaa

SEQ ID NO: 753809 - DNA, 19 bp, Mus musculus
  siRNA target sequence for MGC6357 (NM_144791.1,1039-1057).
ggcaccaccttcctagaaa

SEQ ID NO: 753810 - DNA, 19 bp, Mus musculus
  siRNA target sequence for MGC6357 (NM_144791.1,1040-1058).
gcaccaccttcctagaaaa

SEQ ID NO: 753811 - DNA, 19 bp, Mus musculus
  siRNA target sequence for MGC6357 (NM_144791.1,1044-1062).
caccttcctagaaaaacat

SEQ ID NO: 753812 - DNA, 19 bp, Mus musculus
  siRNA target sequence for MGC6357 (NM_144791.1,1104-1122).
gctcactgcagctcaagat

SEQ ID NO: 753813 - DNA, 19 bp, Mus musculus
  siRNA target sequence for MGC6357 (NM_144791.1,1137-1155).
caagtgtctgagtgaacaa

SEQ ID NO: 753814 - DNA, 19 bp, Mus musculus
  siRNA target sequence for MGC6357 (NM_144791.1,1140-1158).
gtgtctgagtgaacaaatt

SEQ ID NO: 753815 - DNA, 19 bp, Mus musculus
  siRNA target sequence for MGC6357 (NM_144791.1,1200-1218).
gattgacggggcaggtaaa

SEQ ID NO: 753816 - DNA, 19 bp, Mus musculus
  siRNA target sequence for MGC6357 (NM_144791.1,1230-1248).
cagtgacctcgttaagcat

SEQ ID NO: 753817 - DNA, 19 bp, Mus musculus
  siRNA target sequence for MGC6357 (NM_144791.1,1332-1350).
ctcaaccttgatcttctat

SEQ ID NO: 753818 - DNA, 19 bp, Mus musculus
  siRNA target sequence for MGC6357 (NM_144791.1,1334-1352).
caaccttgatcttctataa

SEQ ID NO: 753819 - DNA, 19 bp, Mus musculus
  siRNA target sequence for MGC6357 (NM_144791.1,1433-1451).
ccagtttaggcctaaagga

SEQ ID NO: 753820 - DNA, 19 bp, Mus musculus
  siRNA target sequence for MGC6357 (NM_144791.1,1434-1452).
cagtttaggcctaaaggaa

SEQ ID NO: 753821 - DNA, 19 bp, Mus musculus
  siRNA target sequence for MGC6357 (NM_144791.1,1436-1454).
gtttaggcctaaaggaaat

SEQ ID NO: 753822 - DNA, 19 bp, Mus musculus
  siRNA target sequence for MGC6357 (NM_144791.1,1469-1487).
gggatttccttaaagtcaa

SEQ ID NO: 753823 - DNA, 19 bp, Mus musculus
  siRNA target sequence for 9530058O11Rik (NM_144792.2,443-461).
caggccaggacttaatcaa

SEQ ID NO: 753824 - DNA, 19 bp, Mus musculus
  siRNA target sequence for 9530058O11Rik (NM_144792.2,448-466).
caggacttaatcaacctaa

SEQ ID NO: 753825 - DNA, 19 bp, Mus musculus
  siRNA target sequence for 9530058O11Rik (NM_144792.2,463-481).
ctaacccaagaggatttca

SEQ ID NO: 753826 - DNA, 19 bp, Mus musculus
  siRNA target sequence for 9530058O11Rik (NM_144792.2,517-535).
gggcagcgactcttagaca

SEQ ID NO: 753827 - DNA, 19 bp, Mus musculus
  siRNA target sequence for 9530058O11Rik (NM_144792.2,518-536).
ggcagcgactcttagacat

SEQ ID NO: 753828 - DNA, 19 bp, Mus musculus
  siRNA target sequence for 9530058O11Rik (NM_144792.2,522-540).
gcgactcttagacatgata

SEQ ID NO: 753829 - DNA, 19 bp, Mus musculus
  siRNA target sequence for 9530058O11Rik (NM_144792.2,526-544).
ctcttagacatgatagaga

SEQ ID NO: 753830 - DNA, 19 bp, Mus musculus
  siRNA target sequence for 9530058O11Rik (NM_144792.2,790-808).
ctcactacagtgatgatct

SEQ ID NO: 753831 - DNA, 19 bp, Mus musculus
  siRNA target sequence for 9530058O11Rik (NM_144792.2,850-868).
ccactaccggacacgtttt

SEQ ID NO: 753832 - DNA, 19 bp, Mus musculus
  siRNA target sequence for 9530058O11Rik (NM_144792.2,851-869).
cactaccggacacgttttt

SEQ ID NO: 753833 - DNA, 19 bp, Mus musculus
  siRNA target sequence for 9530058O11Rik (NM_144792.2,861-879).
cacgttttttgaccatttt

SEQ ID NO: 753834 - DNA, 19 bp, Mus musculus
  siRNA target sequence for 9530058O11Rik (NM_144792.2,885-903).
ggtgcagtgggcgttttct

SEQ ID NO: 753835 - DNA, 19 bp, Mus musculus
  siRNA target sequence for 9530058O11Rik (NM_144792.2,886-904).
gtgcagtgggcgttttcta

SEQ ID NO: 753836 - DNA, 19 bp, Mus musculus
  siRNA target sequence for 9530058O11Rik (NM_144792.2,888-906).
gcagtgggcgttttctatt

SEQ ID NO: 753837 - DNA, 19 bp, Mus musculus
  siRNA target sequence for 9530058O11Rik (NM_144792.2,1014-1032).
gtacctgtatcggtgtatt

SEQ ID NO: 753838 - DNA, 19 bp, Mus musculus
  siRNA target sequence for 9530058O11Rik (NM_144792.2,1017-1035).
cctgtatcggtgtattaca

SEQ ID NO: 753839 - DNA, 19 bp, Mus musculus
  siRNA target sequence for 9530058O11Rik (NM_144792.2,1025-1043).
ggtgtattacaatgtatgt

SEQ ID NO: 753840 - DNA, 19 bp, Mus musculus
  siRNA target sequence for 9530058O11Rik (NM_144792.2,1026-1044).
gtgtattacaatgtatgta

SEQ ID NO: 753841 - DNA, 19 bp, Mus musculus
  siRNA target sequence for 9530058O11Rik (NM_144792.2,1055-1073).
cagtacctggcatgcattt

SEQ ID NO: 753842 - DNA, 19 bp, Mus musculus
  siRNA target sequence for 9530058O11Rik (NM_144792.2,1060-1078).
cctggcatgcatttcaact

SEQ ID NO: 753843 - DNA, 19 bp, Mus musculus
  siRNA target sequence for 9530058O11Rik (NM_144792.2,1063-1081).
ggcatgcatttcaactgtt

SEQ ID NO: 753844 - DNA, 19 bp, Mus musculus
  siRNA target sequence for 9530058O11Rik (NM_144792.2,1198-1216).
ggccacacggtcatgctaa

SEQ ID NO: 753845 - DNA, 19 bp, Mus musculus
  siRNA target sequence for 9530058O11Rik (NM_144792.2,1213-1231).
ctaacgctcacctacctat

SEQ ID NO: 753846 - DNA, 19 bp, Mus musculus
  siRNA target sequence for 9530058O11Rik (NM_144792.2,1217-1235).
cgctcacctacctatttat

SEQ ID NO: 753847 - DNA, 19 bp, Mus musculus
  siRNA target sequence for 9530058O11Rik (NM_144792.2,1219-1237).
ctcacctacctatttatca

SEQ ID NO: 753848 - DNA, 19 bp, Mus musculus
  siRNA target sequence for 9530058O11Rik (NM_144792.2,1221-1239).
cacctacctatttatcaaa

SEQ ID NO: 753849 - DNA, 19 bp, Mus musculus
  siRNA target sequence for 9530058O11Rik (NM_144792.2,1223-1241).
cctacctatttatcaaaga

SEQ ID NO: 753850 - DNA, 19 bp, Mus musculus
  siRNA target sequence for 9530058O11Rik (NM_144792.2,1294-1312).
gtcgttggaatcttctgta

SEQ ID NO: 753851 - DNA, 19 bp, Mus musculus
  siRNA target sequence for 9530058O11Rik (NM_144792.2,1461-1479).
caggccatttcagtacttt

SEQ ID NO: 753852 - DNA, 19 bp, Mus musculus
  siRNA target sequence for 9530058O11Rik (NM_144792.2,1463-1481).
ggccatttcagtactttga

SEQ ID NO: 753853 - DNA, 19 bp, Mus musculus
  siRNA target sequence for 9530058O11Rik (NM_144792.2,1464-1482).
gccatttcagtactttgaa

SEQ ID NO: 753854 - DNA, 19 bp, Mus musculus
  siRNA target sequence for 9530058O11Rik (NM_144792.2,1465-1483).
ccatttcagtactttgaaa

SEQ ID NO: 753855 - DNA, 19 bp, Mus musculus
  siRNA target sequence for 9530058O11Rik (NM_144792.2,1496-1514).
gaattgtacctcgatctta

SEQ ID NO: 753856 - DNA, 19 bp, Mus musculus
  siRNA target sequence for 9530058O11Rik (NM_144792.2,1501-1519).
gtacctcgatcttaccatt

SEQ ID NO: 753857 - DNA, 19 bp, Mus musculus
  siRNA target sequence for 9530058O11Rik (NM_144792.2,1534-1552).
ccggtagtccaccttagta

SEQ ID NO: 753858 - DNA, 19 bp, Mus musculus
  siRNA target sequence for 9530058O11Rik (NM_144792.2,1543-1561).
caccttagtaggcaagtta

SEQ ID NO: 753859 - DNA, 19 bp, Mus musculus
  siRNA target sequence for 9530058O11Rik (NM_144792.2,1546-1564).
cttagtaggcaagttaaat

SEQ ID NO: 753860 - DNA, 19 bp, Mus musculus
  siRNA target sequence for E430021N18Rik (NM_144796.2,523-541).
gctgagattcgaaacaaga

SEQ ID NO: 753861 - DNA, 19 bp, Mus musculus
  siRNA target sequence for E430021N18Rik (NM_144796.2,609-627).
gtacaacctggtttcgtta

SEQ ID NO: 753862 - DNA, 19 bp, Mus musculus
  siRNA target sequence for E430021N18Rik (NM_144796.2,880-898).
gtaagtcacggagatttca

SEQ ID NO: 753863 - DNA, 19 bp, Mus musculus
  siRNA target sequence for E430021N18Rik (NM_144796.2,935-953).
gaactgtggtggagttcta

SEQ ID NO: 753864 - DNA, 19 bp, Mus musculus
  siRNA target sequence for E430021N18Rik (NM_144796.2,1030-1048).
caagtctactgcatcaaat

SEQ ID NO: 753865 - DNA, 19 bp, Mus musculus
  siRNA target sequence for E430021N18Rik (NM_144796.2,1329-1347).
gggccagggctgtccttta

SEQ ID NO: 753866 - DNA, 19 bp, Mus musculus
  siRNA target sequence for E430021N18Rik (NM_144796.2,1447-1465).
gagatgctccagagtctat

SEQ ID NO: 753867 - DNA, 19 bp, Mus musculus
  siRNA target sequence for E430021N18Rik (NM_144796.2,1452-1470).
gctccagagtctatattca

SEQ ID NO: 753868 - DNA, 19 bp, Mus musculus
  siRNA target sequence for E430021N18Rik (NM_144796.2,1507-1525).
gacacccctgacacgattt

SEQ ID NO: 753869 - DNA, 19 bp, Mus musculus
  siRNA target sequence for E430021N18Rik (NM_144796.2,1509-1527).
cacccctgacacgatttca

SEQ ID NO: 753870 - DNA, 19 bp, Mus musculus
  siRNA target sequence for BC019776 (NM_144797.2,539-557).
ctcctctggagccaatatt

SEQ ID NO: 753871 - DNA, 19 bp, Mus musculus
  siRNA target sequence for BC019776 (NM_144797.2,547-565).
gagccaatatttatttgga

SEQ ID NO: 753872 - DNA, 19 bp, Mus musculus
  siRNA target sequence for BC019776 (NM_144797.2,786-804).
gtcctccttgccatctgta

SEQ ID NO: 753873 - DNA, 19 bp, Mus musculus
  siRNA target sequence for BC019776 (NM_144797.2,800-818).
ctgtaccagtgactttgtt

SEQ ID NO: 753874 - DNA, 19 bp, Mus musculus
  siRNA target sequence for BC019776 (NM_144797.2,1055-1073).
cccacgctttagtgacttt

SEQ ID NO: 753875 - DNA, 19 bp, Mus musculus
  siRNA target sequence for Lmcd1 (NM_144799.1,313-331).
ggacgatgatcggaaaatt

SEQ ID NO: 753876 - DNA, 19 bp, Mus musculus
  siRNA target sequence for Lmcd1 (NM_144799.1,340-358).
gctgatggactccaagtat

SEQ ID NO: 753877 - DNA, 19 bp, Mus musculus
  siRNA target sequence for Lmcd1 (NM_144799.1,455-473).
cccacctttgacactatca

SEQ ID NO: 753878 - DNA, 19 bp, Mus musculus
  siRNA target sequence for Lmcd1 (NM_144799.1,598-616).
gcatcagctccctatctat

SEQ ID NO: 753879 - DNA, 19 bp, Mus musculus
  siRNA target sequence for Lmcd1 (NM_144799.1,740-758).
ggcttgcccaaggaagaaa

SEQ ID NO: 753880 - DNA, 19 bp, Mus musculus
  siRNA target sequence for Lmcd1 (NM_144799.1,817-835).
cctgggtgatccatccaaa

SEQ ID NO: 753881 - DNA, 19 bp, Mus musculus
  siRNA target sequence for Lmcd1 (NM_144799.1,820-838).
gggtgatccatccaaagaa

SEQ ID NO: 753882 - DNA, 19 bp, Mus musculus
  siRNA target sequence for Lmcd1 (NM_144799.1,822-840).
gtgatccatccaaagaagt

SEQ ID NO: 753883 - DNA, 19 bp, Mus musculus
  siRNA target sequence for Lmcd1 (NM_144799.1,929-947).
caccccacgtgctttcagt

SEQ ID NO: 753884 - DNA, 19 bp, Mus musculus
  siRNA target sequence for Lmcd1 (NM_144799.1,933-951).
ccacgtgctttcagtgtat

SEQ ID NO: 753885 - DNA, 19 bp, Mus musculus
  siRNA target sequence for Lmcd1 (NM_144799.1,1107-1125).
ggcatcggaagcacttcat

SEQ ID NO: 753886 - DNA, 19 bp, Mus musculus
  siRNA target sequence for 2310076O21Rik (NM_144801.1,149-167).
ggggtgtaccgcaagatgt

SEQ ID NO: 753887 - DNA, 19 bp, Mus musculus
  siRNA target sequence for 2310076O21Rik (NM_144801.1,202-220).
gtaccgcgagcgcttcatt

SEQ ID NO: 753888 - DNA, 19 bp, Mus musculus
  siRNA target sequence for 2310076O21Rik (NM_144801.1,206-224).
cgcgagcgcttcattccat

SEQ ID NO: 753889 - DNA, 19 bp, Mus musculus
  siRNA target sequence for 2310076O21Rik (NM_144801.1,207-225).
gcgagcgcttcattccatt

SEQ ID NO: 753890 - DNA, 19 bp, Mus musculus
  siRNA target sequence for 2310076O21Rik (NM_144801.1,308-326).
gctcacgtggacttctgta

SEQ ID NO: 753891 - DNA, 19 bp, Mus musculus
  siRNA target sequence for 2310076O21Rik (NM_144801.1,551-569).
gaggtccaggtgacaataa

SEQ ID NO: 753892 - DNA, 19 bp, Mus musculus
  siRNA target sequence for 2310076O21Rik (NM_144801.1,553-571).
ggtccaggtgacaataaat

SEQ ID NO: 753893 - DNA, 19 bp, Mus musculus
  siRNA target sequence for 2310076O21Rik (NM_144801.1,578-596).
cagtatatctacatacagt

SEQ ID NO: 753894 - DNA, 19 bp, Mus musculus
  siRNA target sequence for 2310076O21Rik (NM_144801.1,683-701).
gtggagaggagatacttca

SEQ ID NO: 753895 - DNA, 19 bp, Mus musculus
  siRNA target sequence for 2310076O21Rik (NM_144801.1,854-872).
gtctcaggcgtcatgatct

SEQ ID NO: 753896 - DNA, 19 bp, Mus musculus
  siRNA target sequence for 2310076O21Rik (NM_144801.1,1028-1046).
cgaagcacgtccaacaact

SEQ ID NO: 753897 - DNA, 19 bp, Mus musculus
  siRNA target sequence for 2310076O21Rik (NM_144801.1,1073-1091).
cgagcccaggaggaacata

SEQ ID NO: 753898 - DNA, 19 bp, Mus musculus
  siRNA target sequence for 2310076O21Rik (NM_144801.1,1207-1225).
ccaatcaggctgtgatgta

SEQ ID NO: 753899 - DNA, 19 bp, Mus musculus
  siRNA target sequence for 2310076O21Rik (NM_144801.1,1216-1234).
ctgtgatgtaaccttcaat

SEQ ID NO: 753900 - DNA, 19 bp, Mus musculus
  siRNA target sequence for 9030407H20Rik (NM_144805.1,85-103).
gggaaacggaagatcacta

SEQ ID NO: 753901 - DNA, 19 bp, Mus musculus
  siRNA target sequence for 9030407H20Rik (NM_144805.1,322-340).
gggaactggaagtgctaaa

SEQ ID NO: 753902 - DNA, 19 bp, Mus musculus
  siRNA target sequence for 9030407H20Rik (NM_144805.1,476-494).
ggatgatgagtttttccat

SEQ ID NO: 753903 - DNA, 19 bp, Mus musculus
  siRNA target sequence for 9030407H20Rik (NM_144805.1,520-538).
gagccttgctggtgtgtta

SEQ ID NO: 753904 - DNA, 19 bp, Mus musculus
  siRNA target sequence for 9030407H20Rik (NM_144805.1,530-548).
ggtgtgttaccactactat

SEQ ID NO: 753905 - DNA, 19 bp, Mus musculus
  siRNA target sequence for BC012016 (NM_144809.1,542-560).
ccatttagtggtgaatcta

SEQ ID NO: 753906 - DNA, 19 bp, Mus musculus
  siRNA target sequence for BC012016 (NM_144809.1,701-719).
gttgaagtgaaaatgtaca

SEQ ID NO: 753907 - DNA, 19 bp, Mus musculus
  siRNA target sequence for BC012016 (NM_144809.1,767-785).
caggatgatgactatctct

SEQ ID NO: 753908 - DNA, 19 bp, Mus musculus
  siRNA target sequence for BC012016 (NM_144809.1,769-787).
ggatgatgactatctctat

SEQ ID NO: 753909 - DNA, 19 bp, Mus musculus
  siRNA target sequence for BC012016 (NM_144809.1,770-788).
gatgatgactatctctatt

SEQ ID NO: 753910 - DNA, 19 bp, Mus musculus
  siRNA target sequence for BC012016 (NM_144809.1,789-807).
gtgagaagtgccagaattt

SEQ ID NO: 753911 - DNA, 19 bp, Mus musculus
  siRNA target sequence for BC012016 (NM_144809.1,829-847).
ccatgggcctcctttattt

SEQ ID NO: 753912 - DNA, 19 bp, Mus musculus
  siRNA target sequence for BC012016 (NM_144809.1,833-851).
gggcctcctttatttgtaa

SEQ ID NO: 753913 - DNA, 19 bp, Mus musculus
  siRNA target sequence for BC012016 (NM_144809.1,834-852).
ggcctcctttatttgtaaa

SEQ ID NO: 753914 - DNA, 19 bp, Mus musculus
  siRNA target sequence for BC012016 (NM_144809.1,902-920).
ccccctgggctaagaatta

SEQ ID NO: 753915 - DNA, 19 bp, Mus musculus
  siRNA target sequence for BC012016 (NM_144809.1,1043-1061).
ggttactcctggctgatta

SEQ ID NO: 753916 - DNA, 19 bp, Mus musculus
  siRNA target sequence for BC012016 (NM_144809.1,1159-1177).
gaacctggtagcctttcaa

SEQ ID NO: 753917 - DNA, 19 bp, Mus musculus
  siRNA target sequence for BC012016 (NM_144809.1,1162-1180).
cctggtagcctttcaatat

SEQ ID NO: 753918 - DNA, 19 bp, Mus musculus
  siRNA target sequence for BC012016 (NM_144809.1,1166-1184).
gtagcctttcaatatcaca

SEQ ID NO: 753919 - DNA, 19 bp, Mus musculus
  siRNA target sequence for BC012016 (NM_144809.1,1199-1217).
cgaacctgccgggttatca

SEQ ID NO: 753920 - DNA, 19 bp, Mus musculus
  siRNA target sequence for BC012016 (NM_144809.1,1317-1335).
gaggtgggcactattatga

SEQ ID NO: 753921 - DNA, 19 bp, Mus musculus
  siRNA target sequence for BC012016 (NM_144809.1,1319-1337).
ggtgggcactattatgatt

SEQ ID NO: 753922 - DNA, 19 bp, Mus musculus
  siRNA target sequence for BC012016 (NM_144809.1,1323-1341).
ggcactattatgattcctt

SEQ ID NO: 753923 - DNA, 19 bp, Mus musculus
  siRNA target sequence for BC012016 (NM_144809.1,1324-1342).
gcactattatgattcctta

SEQ ID NO: 753924 - DNA, 19 bp, Mus musculus
  siRNA target sequence for BC012016 (NM_144809.1,1325-1343).
cactattatgattccttaa

SEQ ID NO: 753925 - DNA, 19 bp, Mus musculus
  siRNA target sequence for BC012016 (NM_144809.1,1359-1377).
gggaattctccttgagaat

SEQ ID NO: 753926 - DNA, 19 bp, Mus musculus
  siRNA target sequence for BC012016 (NM_144809.1,1360-1378).
ggaattctccttgagaatt

SEQ ID NO: 753927 - DNA, 19 bp, Mus musculus
  siRNA target sequence for BC012016 (NM_144809.1,1361-1379).
gaattctccttgagaattt

SEQ ID NO: 753928 - DNA, 19 bp, Mus musculus
  siRNA target sequence for A630065K24Rik (NM_144810.2,759-777).
cgggggatgtgatgacaat

SEQ ID NO: 753929 - DNA, 19 bp, Mus musculus
  siRNA target sequence for A630065K24Rik (NM_144810.2,869-887).
cgatcactgccctaggaaa

SEQ ID NO: 753930 - DNA, 19 bp, Mus musculus
  siRNA target sequence for A630065K24Rik (NM_144810.2,1066-1084).
ctacgtccacacaactact

SEQ ID NO: 753931 - DNA, 19 bp, Mus musculus
  siRNA target sequence for A630065K24Rik (NM_144810.2,1077-1095).
caactacttgcaacactat

SEQ ID NO: 753932 - DNA, 19 bp, Mus musculus
  siRNA target sequence for A630065K24Rik (NM_144810.2,1188-1206).
gctggggggacgacaatct

SEQ ID NO: 753933 - DNA, 19 bp, Mus musculus
  siRNA target sequence for A630065K24Rik (NM_144810.2,1189-1207).
ctggggggacgacaatcta

SEQ ID NO: 753934 - DNA, 19 bp, Mus musculus
  siRNA target sequence for A630065K24Rik (NM_144810.2,1192-1210).
gggggacgacaatctaagt

SEQ ID NO: 753935 - DNA, 19 bp, Mus musculus
  siRNA target sequence for A630065K24Rik (NM_144810.2,1193-1211).
ggggacgacaatctaagta

SEQ ID NO: 753936 - DNA, 19 bp, Mus musculus
  siRNA target sequence for A630065K24Rik (NM_144810.2,1194-1212).
gggacgacaatctaagtat

SEQ ID NO: 753937 - DNA, 19 bp, Mus musculus
  siRNA target sequence for A630065K24Rik (NM_144810.2,1222-1240).
gccttcgaggtctttgata

SEQ ID NO: 753938 - DNA, 19 bp, Mus musculus
  siRNA target sequence for A630065K24Rik (NM_144810.2,1223-1241).
ccttcgaggtctttgatat

SEQ ID NO: 753939 - DNA, 19 bp, Mus musculus
  siRNA target sequence for A630065K24Rik (NM_144810.2,1307-1325).
ccctggacaaccacttata

SEQ ID NO: 753940 - DNA, 19 bp, Mus musculus
  siRNA target sequence for A630065K24Rik (NM_144810.2,1309-1327).
ctggacaaccacttataca

SEQ ID NO: 753941 - DNA, 19 bp, Mus musculus
  siRNA target sequence for A630065K24Rik (NM_144810.2,1371-1389).
gttcctccggacaatggat

SEQ ID NO: 753942 - DNA, 19 bp, Mus musculus
  siRNA target sequence for A630065K24Rik (NM_144810.2,1544-1562).
cattccaccctgagaagaa

SEQ ID NO: 753943 - DNA, 19 bp, Mus musculus
  siRNA target sequence for A630065K24Rik (NM_144810.2,1675-1693).
gtagaggcactgtttgtct

SEQ ID NO: 753944 - DNA, 19 bp, Mus musculus
  siRNA target sequence for D230019K20Rik (NM_144812.1,641-659).
gctctgtccgtcctagtta

SEQ ID NO: 753945 - DNA, 19 bp, Mus musculus
  siRNA target sequence for D230019K20Rik (NM_144812.1,675-693).
caatctcaccccacagatt

SEQ ID NO: 753946 - DNA, 19 bp, Mus musculus
  siRNA target sequence for D230019K20Rik (NM_144812.1,1160-1178).
gcagccctgctcctttact

SEQ ID NO: 753947 - DNA, 19 bp, Mus musculus
  siRNA target sequence for D230019K20Rik (NM_144812.1,1161-1179).
cagccctgctcctttacta

SEQ ID NO: 753948 - DNA, 19 bp, Mus musculus
  siRNA target sequence for D230019K20Rik (NM_144812.1,1195-1213).
ggaggagggtcggattcaa

SEQ ID NO: 753949 - DNA, 19 bp, Mus musculus
  siRNA target sequence for D230019K20Rik (NM_144812.1,1196-1214).
gaggagggtcggattcaat

SEQ ID NO: 753950 - DNA, 19 bp, Mus musculus
  siRNA target sequence for D230019K20Rik (NM_144812.1,1198-1216).
ggagggtcggattcaatct

SEQ ID NO: 753951 - DNA, 19 bp, Mus musculus
  siRNA target sequence for Cecr5 (NM_144815.1,295-313).
catcttgcagcataacaaa

SEQ ID NO: 753952 - DNA, 19 bp, Mus musculus
  siRNA target sequence for Cecr5 (NM_144815.1,472-490).
gaatgtggtgacaatagat

SEQ ID NO: 753953 - DNA, 19 bp, Mus musculus
  siRNA target sequence for Cecr5 (NM_144815.1,606-624).
cagtccgctgggagacaaa

SEQ ID NO: 753954 - DNA, 19 bp, Mus musculus
  siRNA target sequence for Cecr5 (NM_144815.1,845-863).
ggcaaacccagcatcctta

SEQ ID NO: 753955 - DNA, 19 bp, Mus musculus
  siRNA target sequence for Cecr5 (NM_144815.1,978-996).
ccaacctattccatcagta

SEQ ID NO: 753956 - DNA, 19 bp, Mus musculus
  siRNA target sequence for Cecr5 (NM_144815.1,1091-1109).
gtatgcactggcatataca

SEQ ID NO: 753957 - DNA, 19 bp, Mus musculus
  siRNA target sequence for Cecr5 (NM_144815.1,1210-1228).
ctcccacattgttcatgat

SEQ ID NO: 753958 - DNA, 19 bp, Mus musculus
  siRNA target sequence for Cecr5 (NM_144815.1,1212-1230).
cccacattgttcatgatgt

SEQ ID NO: 753959 - DNA, 19 bp, Mus musculus
  siRNA target sequence for Cecr5 (NM_144815.1,1213-1231).
ccacattgttcatgatgta

SEQ ID NO: 753960 - DNA, 19 bp, Mus musculus
  siRNA target sequence for A730011O11Rik (NM_144818.1,208-226).
cgaagactttcctcagaat

SEQ ID NO: 753961 - DNA, 19 bp, Mus musculus
  siRNA target sequence for A730011O11Rik (NM_144818.1,255-273).
gacgctccagggtctttga

SEQ ID NO: 753962 - DNA, 19 bp, Mus musculus
  siRNA target sequence for A730011O11Rik (NM_144818.1,280-298).
gttcagtacagattcgatt

SEQ ID NO: 753963 - DNA, 19 bp, Mus musculus
  siRNA target sequence for A730011O11Rik (NM_144818.1,305-323).
gcctcccctaacaggaata

SEQ ID NO: 753964 - DNA, 19 bp, Mus musculus
  siRNA target sequence for A730011O11Rik (NM_144818.1,306-324).
cctcccctaacaggaatat

SEQ ID NO: 753965 - DNA, 19 bp, Mus musculus
  siRNA target sequence for A730011O11Rik (NM_144818.1,307-325).
ctcccctaacaggaatatt

SEQ ID NO: 753966 - DNA, 19 bp, Mus musculus
  siRNA target sequence for A730011O11Rik (NM_144818.1,309-327).
cccctaacaggaatattga

SEQ ID NO: 753967 - DNA, 19 bp, Mus musculus
  siRNA target sequence for A730011O11Rik (NM_144818.1,312-330).
ctaacaggaatattgatgt

SEQ ID NO: 753968 - DNA, 19 bp, Mus musculus
  siRNA target sequence for A730011O11Rik (NM_144818.1,326-344).
gatgtttcaactaccatat

SEQ ID NO: 753969 - DNA, 19 bp, Mus musculus
  siRNA target sequence for A730011O11Rik (NM_144818.1,333-351).
caactaccatatctaagtt

SEQ ID NO: 753970 - DNA, 19 bp, Mus musculus
  siRNA target sequence for A730011O11Rik (NM_144818.1,358-376).
cacacagattacagaacat

SEQ ID NO: 753971 - DNA, 19 bp, Mus musculus
  siRNA target sequence for A730011O11Rik (NM_144818.1,360-378).
cacagattacagaacatta

SEQ ID NO: 753972 - DNA, 19 bp, Mus musculus
  siRNA target sequence for A730011O11Rik (NM_144818.1,433-451).
cggcttgcatttgattgat

SEQ ID NO: 753973 - DNA, 19 bp, Mus musculus
  siRNA target sequence for A730011O11Rik (NM_144818.1,434-452).
ggcttgcatttgattgatt

SEQ ID NO: 753974 - DNA, 19 bp, Mus musculus
  siRNA target sequence for A730011O11Rik (NM_144818.1,435-453).
gcttgcatttgattgattt

SEQ ID NO: 753975 - DNA, 19 bp, Mus musculus
  siRNA target sequence for A730011O11Rik (NM_144818.1,440-458).
catttgattgatttcatgt

SEQ ID NO: 753976 - DNA, 19 bp, Mus musculus
  siRNA target sequence for A730011O11Rik (NM_144818.1,560-578).
gtccatgctgatgtataca

SEQ ID NO: 753977 - DNA, 19 bp, Mus musculus
  siRNA target sequence for A730011O11Rik (NM_144818.1,694-712).
gcagtcctgcaaaaccatt

SEQ ID NO: 753978 - DNA, 19 bp, Mus musculus
  siRNA target sequence for A730011O11Rik (NM_144818.1,702-720).
gcaaaaccattgaacagaa

SEQ ID NO: 753979 - DNA, 19 bp, Mus musculus
  siRNA target sequence for A730011O11Rik (NM_144818.1,716-734).
cagaatctcagcaatatca

SEQ ID NO: 753980 - DNA, 19 bp, Mus musculus
  siRNA target sequence for A730011O11Rik (NM_144818.1,718-736).
gaatctcagcaatatcaat

SEQ ID NO: 753981 - DNA, 19 bp, Mus musculus
  siRNA target sequence for A730011O11Rik (NM_144818.1,762-780).
cggtggatcctatgtttca

SEQ ID NO: 753982 - DNA, 19 bp, Mus musculus
  siRNA target sequence for A730011O11Rik (NM_144818.1,764-782).
gtggatcctatgtttcaga

SEQ ID NO: 753983 - DNA, 19 bp, Mus musculus
  siRNA target sequence for A730011O11Rik (NM_144818.1,808-826).
cagcacgactggggtattt

SEQ ID NO: 753984 - DNA, 19 bp, Mus musculus
  siRNA target sequence for A730011O11Rik (NM_144818.1,810-828).
gcacgactggggtatttct

SEQ ID NO: 753985 - DNA, 19 bp, Mus musculus
  siRNA target sequence for A730011O11Rik (NM_144818.1,839-857).
cactgccaggactacagaa

SEQ ID NO: 753986 - DNA, 19 bp, Mus musculus
  siRNA target sequence for A730011O11Rik (NM_144818.1,916-934).
gccggatctgggtttcgta

SEQ ID NO: 753987 - DNA, 19 bp, Mus musculus
  siRNA target sequence for A730011O11Rik (NM_144818.1,1003-1021).
cgggttccagtttactaaa

SEQ ID NO: 753988 - DNA, 19 bp, Mus musculus
  siRNA target sequence for A730011O11Rik (NM_144818.1,1004-1022).
gggttccagtttactaaat

SEQ ID NO: 753989 - DNA, 19 bp, Mus musculus
  siRNA target sequence for A730011O11Rik (NM_144818.1,1023-1041).
gggacagcgaaacacataa

SEQ ID NO: 753990 - DNA, 19 bp, Mus musculus
  siRNA target sequence for A730011O11Rik (NM_144818.1,1024-1042).
ggacagcgaaacacataat

SEQ ID NO: 753991 - DNA, 19 bp, Mus musculus
  siRNA target sequence for A730011O11Rik (NM_144818.1,1061-1079).
gtggacaagtttaagaaga

SEQ ID NO: 753992 - DNA, 19 bp, Mus musculus
  siRNA target sequence for A730011O11Rik (NM_144818.1,1143-1161).
ccctggtggaggattttgt

SEQ ID NO: 753993 - DNA, 19 bp, Mus musculus
  siRNA target sequence for A730011O11Rik (NM_144818.1,1144-1162).
cctggtggaggattttgtt

SEQ ID NO: 753994 - DNA, 19 bp, Mus musculus
  siRNA target sequence for A730011O11Rik (NM_144818.1,1150-1168).
ggaggattttgttgacaat

SEQ ID NO: 753995 - DNA, 19 bp, Mus musculus
  siRNA target sequence for A730011O11Rik (NM_144818.1,1306-1324).
catgaaacctggggaatat

SEQ ID NO: 753996 - DNA, 19 bp, Mus musculus
  siRNA target sequence for A730011O11Rik (NM_144818.1,1337-1355).
ccccggaccatgaagatgt

SEQ ID NO: 753997 - DNA, 19 bp, Mus musculus
  siRNA target sequence for A730011O11Rik (NM_144818.1,1413-1431).
gcacagagcacaaaaagaa

SEQ ID NO: 753998 - DNA, 19 bp, Mus musculus
  siRNA target sequence for A730011O11Rik (NM_144818.1,1434-1452).
gtgcaaagaaagactttga

SEQ ID NO: 753999 - DNA, 19 bp, Mus musculus
  siRNA target sequence for A730011O11Rik (NM_144818.1,1481-1499).
gatgcatattttcagaaaa

SEQ ID NO: 754000 - DNA, 19 bp, Mus musculus
  siRNA target sequence for A730011O11Rik (NM_144818.1,1576-1594).
ccactatgaaactgataat

SEQ ID NO: 754001 - DNA, 19 bp, Mus musculus
  siRNA target sequence for A730011O11Rik (NM_144818.1,1610-1628).
ctcaaaccaggcaaaaggt

SEQ ID NO: 754002 - DNA, 19 bp, Mus musculus
  siRNA target sequence for A730011O11Rik (NM_144818.1,1619-1637).
ggcaaaaggtcacttaaga

SEQ ID NO: 754003 - DNA, 19 bp, Mus musculus
  siRNA target sequence for A730011O11Rik (NM_144818.1,1645-1663).
ggaccagaaggctaagact

SEQ ID NO: 754004 - DNA, 19 bp, Mus musculus
  siRNA target sequence for A730011O11Rik (NM_144818.1,1662-1680).
ctgagcactatgaggaaat

SEQ ID NO: 754005 - DNA, 19 bp, Mus musculus
  siRNA target sequence for A730011O11Rik (NM_144818.1,1666-1684).
gcactatgaggaaattgaa

SEQ ID NO: 754006 - DNA, 19 bp, Mus musculus
  siRNA target sequence for A730011O11Rik (NM_144818.1,1708-1726).
cgacacctccaactattgt

SEQ ID NO: 754007 - DNA, 19 bp, Mus musculus
  siRNA target sequence for A730011O11Rik (NM_144818.1,1826-1844).
caagagaatggtcacattt

SEQ ID NO: 754008 - DNA, 19 bp, Mus musculus
  siRNA target sequence for A730011O11Rik (NM_144818.1,1856-1874).
caaggagtagatatcacaa

SEQ ID NO: 754009 - DNA, 19 bp, Mus musculus
  siRNA target sequence for A730011O11Rik (NM_144818.1,1859-1877).
ggagtagatatcacaactt

SEQ ID NO: 754010 - DNA, 19 bp, Mus musculus
  siRNA target sequence for A730011O11Rik (NM_144818.1,1901-1919).
gagcctcaaaaggtgaata

SEQ ID NO: 754011 - DNA, 19 bp, Mus musculus
  siRNA target sequence for A730011O11Rik (NM_144818.1,1987-2005).
gagtctgctgacgaagttt

SEQ ID NO: 754012 - DNA, 19 bp, Mus musculus
  siRNA target sequence for A730011O11Rik (NM_144818.1,1991-2009).
ctgctgacgaagttttcta

SEQ ID NO: 754013 - DNA, 19 bp, Mus musculus
  siRNA target sequence for A730011O11Rik (NM_144818.1,2075-2093).
gctgatgagaagaaactca

SEQ ID NO: 754014 - DNA, 19 bp, Mus musculus
  siRNA target sequence for A730011O11Rik (NM_144818.1,2182-2200).
cttagcaaatgaaaagaat

SEQ ID NO: 754015 - DNA, 19 bp, Mus musculus
  siRNA target sequence for D5Bwg0834e (NM_144819.1,293-311).
gcacagatctaacatatga

SEQ ID NO: 754016 - DNA, 19 bp, Mus musculus
  siRNA target sequence for D5Bwg0834e (NM_144819.1,315-333).
gacactcaaaagtttcgaa

SEQ ID NO: 754017 - DNA, 19 bp, Mus musculus
  siRNA target sequence for D5Bwg0834e (NM_144819.1,755-773).
cactgcaccccgagtttga

SEQ ID NO: 754018 - DNA, 19 bp, Mus musculus
  siRNA target sequence for D5Bwg0834e (NM_144819.1,987-1005).
ggtggctcaccgcattcat

SEQ ID NO: 754019 - DNA, 19 bp, Mus musculus
  siRNA target sequence for 1700009P13Rik (NM_144820.1,447-465).
ctcagcctgctgaacgatt

SEQ ID NO: 754020 - DNA, 19 bp, Mus musculus
  siRNA target sequence for 1700009P13Rik (NM_144820.1,451-469).
gcctgctgaacgatttcca

SEQ ID NO: 754021 - DNA, 19 bp, Mus musculus
  siRNA target sequence for 1700009P13Rik (NM_144820.1,528-546).
cggggaatgcaggagaaat

SEQ ID NO: 754022 - DNA, 19 bp, Mus musculus
  siRNA target sequence for 1700009P13Rik (NM_144820.1,529-547).
ggggaatgcaggagaaatt

SEQ ID NO: 754023 - DNA, 19 bp, Mus musculus
  siRNA target sequence for 1700009P13Rik (NM_144820.1,542-560).
gaaattagctcgcttgaat

SEQ ID NO: 754024 - DNA, 19 bp, Mus musculus
  siRNA target sequence for 1700009P13Rik (NM_144820.1,643-661).
cggacggggctgaaaagct

SEQ ID NO: 754025 - DNA, 19 bp, Mus musculus
  siRNA target sequence for BC021790 (NM_144824.1,281-299).
gtcggaggagcgactctta

SEQ ID NO: 754026 - DNA, 19 bp, Mus musculus
  siRNA target sequence for BC021790 (NM_144824.1,483-501).
cctctggaagtagaattta

SEQ ID NO: 754027 - DNA, 19 bp, Mus musculus
  siRNA target sequence for BC021790 (NM_144824.1,526-544).
gaatcgaggagcaagatgt

SEQ ID NO: 754028 - DNA, 19 bp, Mus musculus
  siRNA target sequence for BC021790 (NM_144824.1,536-554).
gcaagatgtttctgaacat

SEQ ID NO: 754029 - DNA, 19 bp, Mus musculus
  siRNA target sequence for BC021790 (NM_144824.1,642-660).
gatgagggggacacctttt

SEQ ID NO: 754030 - DNA, 19 bp, Mus musculus
  siRNA target sequence for BC021790 (NM_144824.1,721-739).
cccgctccgagaacttctt

SEQ ID NO: 754031 - DNA, 19 bp, Mus musculus
  siRNA target sequence for BC021790 (NM_144824.1,723-741).
cgctccgagaacttcttga

SEQ ID NO: 754032 - DNA, 19 bp, Mus musculus
  siRNA target sequence for BC021790 (NM_144824.1,724-742).
gctccgagaacttcttgaa

SEQ ID NO: 754033 - DNA, 19 bp, Mus musculus
  siRNA target sequence for BC021790 (NM_144824.1,725-743).
ctccgagaacttcttgaaa

SEQ ID NO: 754034 - DNA, 19 bp, Mus musculus
  siRNA target sequence for BC021790 (NM_144824.1,759-777).
cctgacggttcctgtatct

SEQ ID NO: 754035 - DNA, 19 bp, Mus musculus
  siRNA target sequence for BC021790 (NM_144824.1,760-778).
ctgacggttcctgtatctt

SEQ ID NO: 754036 - DNA, 19 bp, Mus musculus
  siRNA target sequence for BC021790 (NM_144824.1,770-788).
ctgtatcttgaccaatagt

SEQ ID NO: 754037 - DNA, 19 bp, Mus musculus
  siRNA target sequence for BC021790 (NM_144824.1,851-869).
ggattacgccgaaatggtt

SEQ ID NO: 754038 - DNA, 19 bp, Mus musculus
  siRNA target sequence for BC021790 (NM_144824.1,887-905).
ggagggcgacaccatctat

SEQ ID NO: 754039 - DNA, 19 bp, Mus musculus
  siRNA target sequence for BC021790 (NM_144824.1,890-908).
gggcgacaccatctatgat

SEQ ID NO: 754040 - DNA, 19 bp, Mus musculus
  siRNA target sequence for BC021790 (NM_144824.1,891-909).
ggcgacaccatctatgatt

SEQ ID NO: 754041 - DNA, 19 bp, Mus musculus
  siRNA target sequence for BC021790 (NM_144824.1,892-910).
gcgacaccatctatgatta

SEQ ID NO: 754042 - DNA, 19 bp, Mus musculus
  siRNA target sequence for BC021790 (NM_144824.1,972-990).
cgggagaacccgattcaca

SEQ ID NO: 754043 - DNA, 19 bp, Mus musculus
  siRNA target sequence for BC021790 (NM_144824.1,973-991).
gggagaacccgattcacat

SEQ ID NO: 754044 - DNA, 19 bp, Mus musculus
  siRNA target sequence for BC021790 (NM_144824.1,1021-1039).
cttcctttcgcgcttacaa

SEQ ID NO: 754045 - DNA, 19 bp, Mus musculus
  siRNA target sequence for BC021790 (NM_144824.1,1062-1080).
gcccactcgctctgtttct

SEQ ID NO: 754046 - DNA, 19 bp, Mus musculus
  siRNA target sequence for BC021790 (NM_144824.1,1084-1102).
cggatggttcccaactctt

SEQ ID NO: 754047 - DNA, 19 bp, Mus musculus
  siRNA target sequence for BC021790 (NM_144824.1,1199-1217).
cggtatcatctcctgtata

SEQ ID NO: 754048 - DNA, 19 bp, Mus musculus
  siRNA target sequence for BC021790 (NM_144824.1,1350-1368).
caccctgatggcaatctct

SEQ ID NO: 754049 - DNA, 19 bp, Mus musculus
  siRNA target sequence for BC021790 (NM_144824.1,1354-1372).
ctgatggcaatctcttctt

SEQ ID NO: 754050 - DNA, 19 bp, Mus musculus
  siRNA target sequence for BC021790 (NM_144824.1,1462-1480).
ctaatcagcgcatctactt

SEQ ID NO: 754051 - DNA, 19 bp, Mus musculus
  siRNA target sequence for BC021790 (NM_144824.1,1533-1551).
gtctctgtgtgggatatca

SEQ ID NO: 754052 - DNA, 19 bp, Mus musculus
  siRNA target sequence for MGC29021 (NM_144825.1,411-429).
ccagagcacacctaaaaaa

SEQ ID NO: 754053 - DNA, 19 bp, Mus musculus
  siRNA target sequence for MGC29021 (NM_144825.1,506-524).
gacgtcaaaggcagtatct

SEQ ID NO: 754054 - DNA, 19 bp, Mus musculus
  siRNA target sequence for MGC29021 (NM_144825.1,532-550).
gaatgtcgtcgcttcaaaa

SEQ ID NO: 754055 - DNA, 19 bp, Mus musculus
  siRNA target sequence for MGC29021 (NM_144825.1,538-556).
cgtcgcttcaaaagaagaa

SEQ ID NO: 754056 - DNA, 19 bp, Mus musculus
  siRNA target sequence for MGC29021 (NM_144825.1,539-557).
gtcgcttcaaaagaagaat

SEQ ID NO: 754057 - DNA, 19 bp, Mus musculus
  siRNA target sequence for MGC29021 (NM_144825.1,541-559).
cgcttcaaaagaagaatgt

SEQ ID NO: 754058 - DNA, 19 bp, Mus musculus
  siRNA target sequence for MGC29021 (NM_144825.1,630-648).
cttggaacatgcaatgcta

SEQ ID NO: 754059 - DNA, 19 bp, Mus musculus
  siRNA target sequence for MGC29021 (NM_144825.1,646-664).
ctattgcgacagcatgaat

SEQ ID NO: 754060 - DNA, 19 bp, Mus musculus
  siRNA target sequence for MGC29021 (NM_144825.1,686-704).
gccatctcaacactattca

SEQ ID NO: 754061 - DNA, 19 bp, Mus musculus
  siRNA target sequence for MGC29021 (NM_144825.1,726-744).
cagactgcagcatcaaact

SEQ ID NO: 754062 - DNA, 19 bp, Mus musculus
  siRNA target sequence for MGC29021 (NM_144825.1,807-825).
catggaagttcgacaacaa

SEQ ID NO: 754063 - DNA, 19 bp, Mus musculus
  siRNA target sequence for MGC29021 (NM_144825.1,827-845).
ctaagagtctgaagtctaa

SEQ ID NO: 754064 - DNA, 19 bp, Mus musculus
  siRNA target sequence for MGC29021 (NM_144825.1,898-916).
cagtacaaagcattaagga

SEQ ID NO: 754065 - DNA, 19 bp, Mus musculus
  siRNA target sequence for MGC29021 (NM_144825.1,900-918).
gtacaaagcattaaggaat

SEQ ID NO: 754066 - DNA, 19 bp, Mus musculus
  siRNA target sequence for MGC29021 (NM_144825.1,978-996).
ggaacagactcgaaagtta

SEQ ID NO: 754067 - DNA, 19 bp, Mus musculus
  siRNA target sequence for MGC29021 (NM_144825.1,1006-1024).
gctgagcagtatgatcata

SEQ ID NO: 754068 - DNA, 19 bp, Mus musculus
  siRNA target sequence for MGC29021 (NM_144825.1,1011-1029).
gcagtatgatcatagcatt

SEQ ID NO: 754069 - DNA, 19 bp, Mus musculus
  siRNA target sequence for MGC29021 (NM_144825.1,1012-1030).
cagtatgatcatagcatta

SEQ ID NO: 754070 - DNA, 19 bp, Mus musculus
  siRNA target sequence for MGC29021 (NM_144825.1,1119-1137).
ggagctgctgaatgcttat

SEQ ID NO: 754071 - DNA, 19 bp, Mus musculus
  siRNA target sequence for MGC29021 (NM_144825.1,1123-1141).
ctgctgaatgcttatcaga

SEQ ID NO: 754072 - DNA, 19 bp, Mus musculus
  siRNA target sequence for MGC29021 (NM_144825.1,1214-1232).
gcagagcgctcttagaaca

SEQ ID NO: 754073 - DNA, 19 bp, Mus musculus
  siRNA target sequence for MGC29021 (NM_144825.1,1217-1235).
gagcgctcttagaacaaaa

SEQ ID NO: 754074 - DNA, 19 bp, Mus musculus
  siRNA target sequence for MGC29021 (NM_144825.1,1219-1237).
gcgctcttagaacaaaaga

SEQ ID NO: 754075 - DNA, 19 bp, Mus musculus
  siRNA target sequence for MGC29021 (NM_144825.1,1270-1288).
cgcacagaacgaatacgta

SEQ ID NO: 754076 - DNA, 19 bp, Mus musculus
  siRNA target sequence for MGC29021 (NM_144825.1,1307-1325).
ccagagaaattgaagcatt

SEQ ID NO: 754077 - DNA, 19 bp, Mus musculus
  siRNA target sequence for MGC29021 (NM_144825.1,1355-1373).
gtaacatggtcctttctaa

SEQ ID NO: 754078 - DNA, 19 bp, Mus musculus
  siRNA target sequence for MGC29021 (NM_144825.1,1649-1667).
cgagtgtcacttcacaaat

SEQ ID NO: 754079 - DNA, 19 bp, Mus musculus
  siRNA target sequence for MGC29021 (NM_144825.1,1677-1695).
gtcacacatgtcttacaca

SEQ ID NO: 754080 - DNA, 19 bp, Mus musculus
  siRNA target sequence for 2310044P18Rik (NM_144829.1,395-413).
cggttgctgaccttctctt

SEQ ID NO: 754081 - DNA, 19 bp, Mus musculus
  siRNA target sequence for 2310044P18Rik (NM_144829.1,446-464).
gactccggagtgtgattga

SEQ ID NO: 754082 - DNA, 19 bp, Mus musculus
  siRNA target sequence for 2310044P18Rik (NM_144829.1,510-528).
gcagagtgtcaatcagaaa

SEQ ID NO: 754083 - DNA, 19 bp, Mus musculus
  siRNA target sequence for 2310044P18Rik (NM_144829.1,511-529).
cagagtgtcaatcagaaaa

SEQ ID NO: 754084 - DNA, 19 bp, Mus musculus
  siRNA target sequence for 2310044P18Rik (NM_144829.1,602-620).
ggggtttgcccgatgatca

SEQ ID NO: 754085 - DNA, 19 bp, Mus musculus
  siRNA target sequence for 2310044P18Rik (NM_144829.1,603-621).
gggtttgcccgatgatcat

SEQ ID NO: 754086 - DNA, 19 bp, Mus musculus
  siRNA target sequence for 2310044P18Rik (NM_144829.1,625-643).
gggcccattcgagttgtta

SEQ ID NO: 754087 - DNA, 19 bp, Mus musculus
  siRNA target sequence for 2310044P18Rik (NM_144829.1,629-647).
ccattcgagttgttaccat

SEQ ID NO: 754088 - DNA, 19 bp, Mus musculus
  siRNA target sequence for 2310044P18Rik (NM_144829.1,652-670).
ggtgtagactccaacatgt

SEQ ID NO: 754089 - DNA, 19 bp, Mus musculus
  siRNA target sequence for 2310044P18Rik (NM_144829.1,770-788).
ctgggaatcgggtactgaa

SEQ ID NO: 754090 - DNA, 19 bp, Mus musculus
  siRNA target sequence for 2310044P18Rik (NM_144829.1,798-816).
gcgaagtcatggaagtgaa

SEQ ID NO: 754091 - DNA, 19 bp, Mus musculus
  siRNA target sequence for 2310044P18Rik (NM_144829.1,800-818).
gaagtcatggaagtgaaaa

SEQ ID NO: 754092 - DNA, 19 bp, Mus musculus
  siRNA target sequence for 2310044P18Rik (NM_144829.1,842-860).
gtggcgttgaggatcatgt

SEQ ID NO: 754093 - DNA, 19 bp, Mus musculus
  siRNA target sequence for 2310044P18Rik (NM_144829.1,856-874).
catgtggaagcagtaaaaa

SEQ ID NO: 754094 - DNA, 19 bp, Mus musculus
  siRNA target sequence for 2310044P18Rik (NM_144829.1,1006-1024).
ggtgattctgaattcatga

SEQ ID NO: 754095 - DNA, 19 bp, Mus musculus
  siRNA target sequence for 2310044P18Rik (NM_144829.1,1007-1025).
gtgattctgaattcatgaa

SEQ ID NO: 754096 - DNA, 19 bp, Mus musculus
  siRNA target sequence for 2310044P18Rik (NM_144829.1,1089-1107).
gggtgctgggctcttctta

SEQ ID NO: 754097 - DNA, 19 bp, Mus musculus
  siRNA target sequence for BC022145 (NM_144830.1,357-375).
ctcctgtatgccttatgaa

SEQ ID NO: 754098 - DNA, 19 bp, Mus musculus
  siRNA target sequence for BC022145 (NM_144830.1,497-515).
gacgcacgaagctctttgt

SEQ ID NO: 754099 - DNA, 19 bp, Mus musculus
  siRNA target sequence for BC022145 (NM_144830.1,499-517).
cgcacgaagctctttgtgt

SEQ ID NO: 754100 - DNA, 19 bp, Mus musculus
  siRNA target sequence for BC022145 (NM_144830.1,595-613).
cctgtcggcctcaactctt

SEQ ID NO: 754101 - DNA, 19 bp, Mus musculus
  siRNA target sequence for BC022145 (NM_144830.1,653-671).
cgacgaatgtcctgaacat

SEQ ID NO: 754102 - DNA, 19 bp, Mus musculus
  siRNA target sequence for BC022145 (NM_144830.1,873-891).
ccaccatattcttttgaat

SEQ ID NO: 754103 - DNA, 19 bp, Mus musculus
  siRNA target sequence for BC022145 (NM_144830.1,939-957).
gcccttcgagagctttgaa

SEQ ID NO: 754104 - DNA, 19 bp, Mus musculus
  siRNA target sequence for BC022145 (NM_144830.1,940-958).
cccttcgagagctttgaat

SEQ ID NO: 754105 - DNA, 19 bp, Mus musculus
  siRNA target sequence for BC022145 (NM_144830.1,942-960).
cttcgagagctttgaatat

SEQ ID NO: 754106 - DNA, 19 bp, Mus musculus
  siRNA target sequence for BC022145 (NM_144830.1,961-979).
gtagactgcagagaaaaca

SEQ ID NO: 754107 - DNA, 19 bp, Mus musculus
  siRNA target sequence for Dhx8 (NM_144831.1,106-124).
ccaatgtaccggaaatcca

SEQ ID NO: 754108 - DNA, 19 bp, Mus musculus
  siRNA target sequence for Dhx8 (NM_144831.1,158-176).
caaggccatgggtattaat

SEQ ID NO: 754109 - DNA, 19 bp, Mus musculus
  siRNA target sequence for Dhx8 (NM_144831.1,205-223).
ccccaccgatggaaactct

SEQ ID NO: 754110 - DNA, 19 bp, Mus musculus
  siRNA target sequence for Dhx8 (NM_144831.1,318-336).
gagccaatgctgtgcaaaa

SEQ ID NO: 754111 - DNA, 19 bp, Mus musculus
  siRNA target sequence for Dhx8 (NM_144831.1,439-457).
cccttgcagatcagaagaa

SEQ ID NO: 754112 - DNA, 19 bp, Mus musculus
  siRNA target sequence for Dhx8 (NM_144831.1,493-511).
ccctgctggccgtatacaa

SEQ ID NO: 754113 - DNA, 19 bp, Mus musculus
  siRNA target sequence for Dhx8 (NM_144831.1,495-513).
ctgctggccgtatacaact

SEQ ID NO: 754114 - DNA, 19 bp, Mus musculus
  siRNA target sequence for Dhx8 (NM_144831.1,540-558).
ccgtggtgctatgagaatt

SEQ ID NO: 754115 - DNA, 19 bp, Mus musculus
  siRNA target sequence for Dhx8 (NM_144831.1,541-559).
cgtggtgctatgagaattt

SEQ ID NO: 754116 - DNA, 19 bp, Mus musculus
  siRNA target sequence for Dhx8 (NM_144831.1,593-611).
cattcggaagcagatgtta

SEQ ID NO: 754117 - DNA, 19 bp, Mus musculus
  siRNA target sequence for Dhx8 (NM_144831.1,799-817).
ccgaatgggtggtatacca

SEQ ID NO: 754118 - DNA, 19 bp, Mus musculus
  siRNA target sequence for Dhx8 (NM_144831.1,892-910).
ctccggctttcttcaaagt

SEQ ID NO: 754119 - DNA, 19 bp, Mus musculus
  siRNA target sequence for BC017643 (NM_144832.1,359-377).
ccctgctggtcggaatatt

SEQ ID NO: 754120 - DNA, 19 bp, Mus musculus
  siRNA target sequence for BC017643 (NM_144832.1,360-378).
cctgctggtcggaatatta

SEQ ID NO: 754121 - DNA, 19 bp, Mus musculus
  siRNA target sequence for BC017643 (NM_144832.1,361-379).
ctgctggtcggaatattat

SEQ ID NO: 754122 - DNA, 19 bp, Mus musculus
  siRNA target sequence for BC017643 (NM_144832.1,390-408).
ggctgctgcctattacagt

SEQ ID NO: 754123 - DNA, 19 bp, Mus musculus
  siRNA target sequence for BC017643 (NM_144832.1,487-505).
gaggccattttcaacaaga

SEQ ID NO: 754124 - DNA, 19 bp, Mus musculus
  siRNA target sequence for BC017643 (NM_144832.1,661-679).
gtggtgctccggtttgcaa

SEQ ID NO: 754125 - DNA, 19 bp, Mus musculus
  siRNA target sequence for D12Ertd748e (NM_144833.1,221-239).
gttatcagatgagttagaa

SEQ ID NO: 754126 - DNA, 19 bp, Mus musculus
  siRNA target sequence for D12Ertd748e (NM_144833.1,261-279).
cagtttgttcagaatacct

SEQ ID NO: 754127 - DNA, 19 bp, Mus musculus
  siRNA target sequence for D12Ertd748e (NM_144833.1,290-308).
gggacaagggctagtagaa

SEQ ID NO: 754128 - DNA, 19 bp, Mus musculus
  siRNA target sequence for D12Ertd748e (NM_144833.1,361-379).
cagaatgcagccgactaat

SEQ ID NO: 754129 - DNA, 19 bp, Mus musculus
  siRNA target sequence for D12Ertd748e (NM_144833.1,396-414).
ccaaatcatgctaattcct

SEQ ID NO: 754130 - DNA, 19 bp, Mus musculus
  siRNA target sequence for D12Ertd748e (NM_144833.1,487-505).
gggctcagactgtacagaa

SEQ ID NO: 754131 - DNA, 19 bp, Mus musculus
  siRNA target sequence for D12Ertd748e (NM_144833.1,538-556).
ctagcttgttgcaagatct

SEQ ID NO: 754132 - DNA, 19 bp, Mus musculus
  siRNA target sequence for D12Ertd748e (NM_144833.1,552-570).
gatctacagccaagtgata

SEQ ID NO: 754133 - DNA, 19 bp, Mus musculus
  siRNA target sequence for D12Ertd748e (NM_144833.1,820-838).
ctggtgatgggcaaccaaa

SEQ ID NO: 754134 - DNA, 19 bp, Mus musculus
  siRNA target sequence for D12Ertd748e (NM_144833.1,823-841).
gtgatgggcaaccaaaaga

SEQ ID NO: 754135 - DNA, 19 bp, Mus musculus
  siRNA target sequence for D12Ertd748e (NM_144833.1,872-890).
gctcaagtgcacagttgaa

SEQ ID NO: 754136 - DNA, 19 bp, Mus musculus
  siRNA target sequence for D12Ertd748e (NM_144833.1,913-931).
ggccagctcacttcaagta

SEQ ID NO: 754137 - DNA, 19 bp, Mus musculus
  siRNA target sequence for D12Ertd748e (NM_144833.1,982-1000).
gttgtgggaaaagctttta

SEQ ID NO: 754138 - DNA, 19 bp, Mus musculus
  siRNA target sequence for D12Ertd748e (NM_144833.1,1273-1291).
ggagtaggaatgtgcatat

SEQ ID NO: 754139 - DNA, 19 bp, Mus musculus
  siRNA target sequence for D12Ertd748e (NM_144833.1,1279-1297).
ggaatgtgcatatgagaaa

SEQ ID NO: 754140 - DNA, 19 bp, Mus musculus
  siRNA target sequence for D12Ertd748e (NM_144833.1,1316-1334).
gacaactgggagtcaagaa

SEQ ID NO: 754141 - DNA, 19 bp, Mus musculus
  siRNA target sequence for D12Ertd748e (NM_144833.1,1353-1371).
ccactaatgggcagtagtt

SEQ ID NO: 754142 - DNA, 19 bp, Mus musculus
  siRNA target sequence for D12Ertd748e (NM_144833.1,1354-1372).
cactaatgggcagtagttt

SEQ ID NO: 754143 - DNA, 19 bp, Mus musculus
  siRNA target sequence for D12Ertd748e (NM_144833.1,1373-1391).
gcttgaagacgcttcagtt

SEQ ID NO: 754144 - DNA, 19 bp, Mus musculus
  siRNA target sequence for D12Ertd748e (NM_144833.1,1382-1400).
cgcttcagttcccaataaa

SEQ ID NO: 754145 - DNA, 19 bp, Mus musculus
  siRNA target sequence for D12Ertd748e (NM_144833.1,1387-1405).
cagttcccaataaaaacct

SEQ ID NO: 754146 - DNA, 19 bp, Mus musculus
  siRNA target sequence for D12Ertd748e (NM_144833.1,1442-1460).
gtccttgaatctatcaaat

SEQ ID NO: 754147 - DNA, 19 bp, Mus musculus
  siRNA target sequence for D12Ertd748e (NM_144833.1,1452-1470).
ctatcaaataccaattcta

SEQ ID NO: 754148 - DNA, 19 bp, Mus musculus
  siRNA target sequence for D12Ertd748e (NM_144833.1,1485-1503).
gatgaggtgcttactgaaa

SEQ ID NO: 754149 - DNA, 19 bp, Mus musculus
  siRNA target sequence for D12Ertd748e (NM_144833.1,1531-1549).
ctgatgtgacacatcactt

SEQ ID NO: 754150 - DNA, 19 bp, Mus musculus
  siRNA target sequence for D12Ertd748e (NM_144833.1,1571-1589).
gcagtcctatgaagtttct

SEQ ID NO: 754151 - DNA, 19 bp, Mus musculus
  siRNA target sequence for D12Ertd748e (NM_144833.1,1609-1627).
cgcaggagttactaaacca

SEQ ID NO: 754152 - DNA, 19 bp, Mus musculus
  siRNA target sequence for D12Ertd748e (NM_144833.1,1626-1644).
caaggagatttaactgaaa

SEQ ID NO: 754153 - DNA, 19 bp, Mus musculus
  siRNA target sequence for BC019693 (NM_144835.2,406-424).
gtgattcacctagagaaaa

SEQ ID NO: 754154 - DNA, 19 bp, Mus musculus
  siRNA target sequence for BC019693 (NM_144835.2,418-436).
gagaaaatcactagagaaa

SEQ ID NO: 754155 - DNA, 19 bp, Mus musculus
  siRNA target sequence for BC019693 (NM_144835.2,463-481).
cgcctgacagctcttaaaa

SEQ ID NO: 754156 - DNA, 19 bp, Mus musculus
  siRNA target sequence for BC019693 (NM_144835.2,464-482).
gcctgacagctcttaaaaa

SEQ ID NO: 754157 - DNA, 19 bp, Mus musculus
  siRNA target sequence for BC019693 (NM_144835.2,520-538).
ccagccattagcaagactt

SEQ ID NO: 754158 - DNA, 19 bp, Mus musculus
  siRNA target sequence for BC019693 (NM_144835.2,521-539).
cagccattagcaagacttt

SEQ ID NO: 754159 - DNA, 19 bp, Mus musculus
  siRNA target sequence for BC019693 (NM_144835.2,576-594).
cccatttatgagcatctta

SEQ ID NO: 754160 - DNA, 19 bp, Mus musculus
  siRNA target sequence for BC019693 (NM_144835.2,642-660).
gtctcagctgaccacattt

SEQ ID NO: 754161 - DNA, 19 bp, Mus musculus
  siRNA target sequence for BC019693 (NM_144835.2,725-743).
cggaaggttggatcattga

SEQ ID NO: 754162 - DNA, 19 bp, Mus musculus
  siRNA target sequence for BC019693 (NM_144835.2,727-745).
gaaggttggatcattgact

SEQ ID NO: 754163 - DNA, 19 bp, Mus musculus
  siRNA target sequence for BC019693 (NM_144835.2,840-858).
ggacaggctgttgacattt

SEQ ID NO: 754164 - DNA, 19 bp, Mus musculus
  siRNA target sequence for BC019693 (NM_144835.2,845-863).
ggctgttgacattttacaa

SEQ ID NO: 754165 - DNA, 19 bp, Mus musculus
  siRNA target sequence for BC019693 (NM_144835.2,916-934).
ggccacttggtgaaacctt

SEQ ID NO: 754166 - DNA, 19 bp, Mus musculus
  siRNA target sequence for BC019693 (NM_144835.2,917-935).
gccacttggtgaaaccttt

SEQ ID NO: 754167 - DNA, 19 bp, Mus musculus
  siRNA target sequence for BC019693 (NM_144835.2,952-970).
caagtaaacatctccaaaa

SEQ ID NO: 754168 - DNA, 19 bp, Mus musculus
  siRNA target sequence for BC019693 (NM_144835.2,971-989).
cagacgaagccttctttga

SEQ ID NO: 754169 - DNA, 19 bp, Mus musculus
  siRNA target sequence for BC019693 (NM_144835.2,973-991).
gacgaagccttctttgact

SEQ ID NO: 754170 - DNA, 19 bp, Mus musculus
  siRNA target sequence for BC019693 (NM_144835.2,1016-1034).
gcttgttgctgcagtttat

SEQ ID NO: 754171 - DNA, 19 bp, Mus musculus
  siRNA target sequence for BC019693 (NM_144835.2,1066-1084).
gacacccagaatttcatga

SEQ ID NO: 754172 - DNA, 19 bp, Mus musculus
  siRNA target sequence for BC019693 (NM_144835.2,1240-1258).
cccctgaactaccagattt

SEQ ID NO: 754173 - DNA, 19 bp, Mus musculus
  siRNA target sequence for Sgtb (NM_144838.1,212-230).
gaagcccctagtttatgca

SEQ ID NO: 754174 - DNA, 19 bp, Mus musculus
  siRNA target sequence for Sgtb (NM_144838.1,222-240).
gtttatgcagttattcgtt

SEQ ID NO: 754175 - DNA, 19 bp, Mus musculus
  siRNA target sequence for Sgtb (NM_144838.1,237-255).
cgtttcttgcgggaacaaa

SEQ ID NO: 754176 - DNA, 19 bp, Mus musculus
  siRNA target sequence for Sgtb (NM_144838.1,263-281).
ggatgcatatacttctgat

SEQ ID NO: 754177 - DNA, 19 bp, Mus musculus
  siRNA target sequence for Sgtb (NM_144838.1,388-406).
caaactccgtctgtaagaa

SEQ ID NO: 754178 - DNA, 19 bp, Mus musculus
  siRNA target sequence for Sgtb (NM_144838.1,520-538).
gctacacgcaggcaataga

SEQ ID NO: 754179 - DNA, 19 bp, Mus musculus
  siRNA target sequence for Sgtb (NM_144838.1,521-539).
ctacacgcaggcaatagaa

SEQ ID NO: 754180 - DNA, 19 bp, Mus musculus
  siRNA target sequence for Sgtb (NM_144838.1,546-564).
cccaacaatgccgtttatt

SEQ ID NO: 754181 - DNA, 19 bp, Mus musculus
  siRNA target sequence for Sgtb (NM_144838.1,574-592).
gggctgctgctcaaagcaa

SEQ ID NO: 754182 - DNA, 19 bp, Mus musculus
  siRNA target sequence for Sgtb (NM_144838.1,577-595).
ctgctgctcaaagcaaatt

SEQ ID NO: 754183 - DNA, 19 bp, Mus musculus
  siRNA target sequence for Sgtb (NM_144838.1,583-601).
ctcaaagcaaattaagtca

SEQ ID NO: 754184 - DNA, 19 bp, Mus musculus
  siRNA target sequence for Sgtb (NM_144838.1,625-643).
gcgagaaagccattgcaat

SEQ ID NO: 754185 - DNA, 19 bp, Mus musculus
  siRNA target sequence for Sgtb (NM_144838.1,626-644).
cgagaaagccattgcaatt

SEQ ID NO: 754186 - DNA, 19 bp, Mus musculus
  siRNA target sequence for Sgtb (NM_144838.1,639-657).
gcaattgactcgaaataca

SEQ ID NO: 754187 - DNA, 19 bp, Mus musculus
  siRNA target sequence for Sgtb (NM_144838.1,740-758).
ggatctcgatcctgagaat

SEQ ID NO: 754188 - DNA, 19 bp, Mus musculus
  siRNA target sequence for Sgtb (NM_144838.1,744-762).
ctcgatcctgagaatgatt

SEQ ID NO: 754189 - DNA, 19 bp, Mus musculus
  siRNA target sequence for Sgtb (NM_144838.1,750-768).
cctgagaatgattcgtata

SEQ ID NO: 754190 - DNA, 19 bp, Mus musculus
  siRNA target sequence for Sgtb (NM_144838.1,751-769).
ctgagaatgattcgtataa

SEQ ID NO: 754191 - DNA, 19 bp, Mus musculus
  siRNA target sequence for Sgtb (NM_144838.1,753-771).
gagaatgattcgtataagt

SEQ ID NO: 754192 - DNA, 19 bp, Mus musculus
  siRNA target sequence for Sgtb (NM_144838.1,755-773).
gaatgattcgtataagtca

SEQ ID NO: 754193 - DNA, 19 bp, Mus musculus
  siRNA target sequence for Sgtb (NM_144838.1,763-781).
cgtataagtcaaatctgaa

SEQ ID NO: 754194 - DNA, 19 bp, Mus musculus
  siRNA target sequence for Sgtb (NM_144838.1,826-844).
ccgggctgagctttgacat

SEQ ID NO: 754195 - DNA, 19 bp, Mus musculus
  siRNA target sequence for Sgtb (NM_144838.1,840-858).
gacatggctagcttgataa

SEQ ID NO: 754196 - DNA, 19 bp, Mus musculus
  siRNA target sequence for Sgtb (NM_144838.1,875-893).
caccatggctgcaagttta

SEQ ID NO: 754197 - DNA, 19 bp, Mus musculus
  siRNA target sequence for Sgtb (NM_144838.1,964-982).
gagttggaggcctaacaga

SEQ ID NO: 754198 - DNA, 19 bp, Mus musculus
  siRNA target sequence for Sgtb (NM_144838.1,983-1001).
cctgtctagcctaatccaa

SEQ ID NO: 754199 - DNA, 19 bp, Mus musculus
  siRNA target sequence for Sgtb (NM_144838.1,1013-1031).
gtttgcgcagcagatacaa

SEQ ID NO: 754200 - DNA, 19 bp, Mus musculus
  siRNA target sequence for Sgtb (NM_144838.1,1034-1052).
gcagaatccggaactcata

SEQ ID NO: 754201 - DNA, 19 bp, Mus musculus
  siRNA target sequence for E030034C22Rik (NM_144840.1,69-87).
ggaggagtgtaataaagaa

SEQ ID NO: 754202 - DNA, 19 bp, Mus musculus
  siRNA target sequence for E030034C22Rik (NM_144840.1,230-248).
ccctcacagacctaagaca

SEQ ID NO: 754203 - DNA, 19 bp, Mus musculus
  siRNA target sequence for E030034C22Rik (NM_144840.1,297-315).
gaagcagcgcggattctat

SEQ ID NO: 754204 - DNA, 19 bp, Mus musculus
  siRNA target sequence for E030034C22Rik (NM_144840.1,300-318).
gcagcgcggattctattct

SEQ ID NO: 754205 - DNA, 19 bp, Mus musculus
  siRNA target sequence for E030034C22Rik (NM_144840.1,370-388).
ccctacatgtcccagaatt

SEQ ID NO: 754206 - DNA, 19 bp, Mus musculus
  siRNA target sequence for E030034C22Rik (NM_144840.1,375-393).
catgtcccagaatttgatt

SEQ ID NO: 754207 - DNA, 19 bp, Mus musculus
  siRNA target sequence for E030034C22Rik (NM_144840.1,411-429).
caagttcaccccaaaagtt

SEQ ID NO: 754208 - DNA, 19 bp, Mus musculus
  siRNA target sequence for E030034C22Rik (NM_144840.1,419-437).
ccccaaaagttgactcatt

SEQ ID NO: 754209 - DNA, 19 bp, Mus musculus
  siRNA target sequence for E030034C22Rik (NM_144840.1,573-591).
ccagtgccctcggaagatt

SEQ ID NO: 754210 - DNA, 19 bp, Mus musculus
  siRNA target sequence for E030034C22Rik (NM_144840.1,650-668).
gcgagggcatcgactctaa

SEQ ID NO: 754211 - DNA, 19 bp, Mus musculus
  siRNA target sequence for E030034C22Rik (NM_144840.1,652-670).
gagggcatcgactctaaca

SEQ ID NO: 754212 - DNA, 19 bp, Mus musculus
  siRNA target sequence for E030034C22Rik (NM_144840.1,751-769).
ccactgaaggtgtttgata

SEQ ID NO: 754213 - DNA, 19 bp, Mus musculus
  siRNA target sequence for E030034C22Rik (NM_144840.1,766-784).
gataatgaagagtttgatt

SEQ ID NO: 754214 - DNA, 19 bp, Mus musculus
  siRNA target sequence for E030034C22Rik (NM_144840.1,820-838).
gagccaggctcacaaaaca

SEQ ID NO: 754215 - DNA, 19 bp, Mus musculus
  siRNA target sequence for E030034C22Rik (NM_144840.1,907-925).
caggaactggactatagat

SEQ ID NO: 754216 - DNA, 19 bp, Mus musculus
  siRNA target sequence for E030034C22Rik (NM_144840.1,943-961).
cttgactacgatgaagaaa

SEQ ID NO: 754217 - DNA, 19 bp, Mus musculus
  siRNA target sequence for E030034C22Rik (NM_144840.1,946-964).
gactacgatgaagaaaaaa

SEQ ID NO: 754218 - DNA, 19 bp, Mus musculus
  siRNA target sequence for E030034C22Rik (NM_144840.1,998-1016).
gcttggtgcgcgatgagat

SEQ ID NO: 754219 - DNA, 19 bp, Mus musculus
  siRNA target sequence for E030034C22Rik (NM_144840.1,1250-1268).
gcttgagcaagataaagca

SEQ ID NO: 754220 - DNA, 19 bp, Mus musculus
  siRNA target sequence for E030034C22Rik (NM_144840.1,1360-1378).
cgtagcatgaacaagatca

SEQ ID NO: 754221 - DNA, 19 bp, Mus musculus
  siRNA target sequence for E030034C22Rik (NM_144840.1,1361-1379).
gtagcatgaacaagatcaa

SEQ ID NO: 754222 - DNA, 19 bp, Mus musculus
  siRNA target sequence for E030034C22Rik (NM_144840.1,1374-1392).
gatcaactttgaccaaatt

SEQ ID NO: 754223 - DNA, 19 bp, Mus musculus
  siRNA target sequence for E030034C22Rik (NM_144840.1,1397-1415).
cttctaacccagagacatt

SEQ ID NO: 754224 - DNA, 19 bp, Mus musculus
  siRNA target sequence for MGC38922 (NM_144842.2,159-177).
ctcatctcgcagatatgga

SEQ ID NO: 754225 - DNA, 19 bp, Mus musculus
  siRNA target sequence for MGC38922 (NM_144842.2,164-182).
ctcgcagatatggaatcat

SEQ ID NO: 754226 - DNA, 19 bp, Mus musculus
  siRNA target sequence for MGC38922 (NM_144842.2,166-184).
cgcagatatggaatcatct

SEQ ID NO: 754227 - DNA, 19 bp, Mus musculus
  siRNA target sequence for MGC38922 (NM_144842.2,185-203).
gggggtccaactagttctt

SEQ ID NO: 754228 - DNA, 19 bp, Mus musculus
  siRNA target sequence for MGC38922 (NM_144842.2,186-204).
ggggtccaactagttcttt

SEQ ID NO: 754229 - DNA, 19 bp, Mus musculus
  siRNA target sequence for MGC38922 (NM_144842.2,187-205).
gggtccaactagttcttta

SEQ ID NO: 754230 - DNA, 19 bp, Mus musculus
  siRNA target sequence for MGC38922 (NM_144842.2,206-224).
gccggtacatctagaaaca

SEQ ID NO: 754231 - DNA, 19 bp, Mus musculus
  siRNA target sequence for MGC38922 (NM_144842.2,208-226).
cggtacatctagaaacaca

SEQ ID NO: 754232 - DNA, 19 bp, Mus musculus
  siRNA target sequence for MGC38922 (NM_144842.2,279-297).
gtgctccagcaatacctaa

SEQ ID NO: 754233 - DNA, 19 bp, Mus musculus
  siRNA target sequence for MGC38922 (NM_144842.2,282-300).
ctccagcaatacctaatga

SEQ ID NO: 754234 - DNA, 19 bp, Mus musculus
  siRNA target sequence for MGC38922 (NM_144842.2,344-362).
ggaactgattccacaattt

SEQ ID NO: 754235 - DNA, 19 bp, Mus musculus
  siRNA target sequence for MGC38922 (NM_144842.2,365-383).
ccttcttggagagatttga

SEQ ID NO: 754236 - DNA, 19 bp, Mus musculus
  siRNA target sequence for MGC38922 (NM_144842.2,394-412).
gggaaatctatgtgaaaca

SEQ ID NO: 754237 - DNA, 19 bp, Mus musculus
  siRNA target sequence for MGC38922 (NM_144842.2,401-419).
ctatgtgaaacaattgtaa

SEQ ID NO: 754238 - DNA, 19 bp, Mus musculus
  siRNA target sequence for MGC38922 (NM_144842.2,452-470).
ggggaggagaaaaatccta

SEQ ID NO: 754239 - DNA, 19 bp, Mus musculus
  siRNA target sequence for MGC38922 (NM_144842.2,467-485).
cctaccgactttattgaat

SEQ ID NO: 754240 - DNA, 19 bp, Mus musculus
  siRNA target sequence for MGC38922 (NM_144842.2,486-504).
ggggaccgaatggaaataa

SEQ ID NO: 754241 - DNA, 19 bp, Mus musculus
  siRNA target sequence for MGC38922 (NM_144842.2,491-509).
ccgaatggaaataaaagta

SEQ ID NO: 754242 - DNA, 19 bp, Mus musculus
  siRNA target sequence for MGC38922 (NM_144842.2,529-547).
ccccattgccagtctatca

SEQ ID NO: 754243 - DNA, 19 bp, Mus musculus
  siRNA target sequence for MGC38922 (NM_144842.2,532-550).
cattgccagtctatcaaga

SEQ ID NO: 754244 - DNA, 19 bp, Mus musculus
  siRNA target sequence for MGC38922 (NM_144842.2,599-617).
gtcacggatgcgtttcaga

SEQ ID NO: 754245 - DNA, 19 bp, Mus musculus
  siRNA target sequence for MGC38922 (NM_144842.2,601-619).
cacggatgcgtttcagaat

SEQ ID NO: 754246 - DNA, 19 bp, Mus musculus
  siRNA target sequence for MGC38922 (NM_144842.2,621-639).
gaagatttgcagttcatca

SEQ ID NO: 754247 - DNA, 19 bp, Mus musculus
  siRNA target sequence for MGC38922 (NM_144842.2,624-642).
gatttgcagttcatcacaa

SEQ ID NO: 754248 - DNA, 19 bp, Mus musculus
  siRNA target sequence for MGC38922 (NM_144842.2,907-925).
gacacggaatgtaatgtgt

SEQ ID NO: 754249 - DNA, 19 bp, Mus musculus
  siRNA target sequence for MGC38922 (NM_144842.2,938-956).
cctgtgagaaccacaacta

SEQ ID NO: 754250 - DNA, 19 bp, Mus musculus
  siRNA target sequence for MGC38922 (NM_144842.2,943-961).
gagaaccacaactattgtt

SEQ ID NO: 754251 - DNA, 19 bp, Mus musculus
  siRNA target sequence for MGC38922 (NM_144842.2,978-996).
gcaagtccttacaaggatt

SEQ ID NO: 754252 - DNA, 19 bp, Mus musculus
  siRNA target sequence for MGC38922 (NM_144842.2,979-997).
caagtccttacaaggattt

SEQ ID NO: 754253 - DNA, 19 bp, Mus musculus
  siRNA target sequence for MGC38922 (NM_144842.2,1008-1026).
cgctatctccctatgaaaa

SEQ ID NO: 754254 - DNA, 19 bp, Mus musculus
  siRNA target sequence for MGC38922 (NM_144842.2,1010-1028).
ctatctccctatgaaaact

SEQ ID NO: 754255 - DNA, 19 bp, Mus musculus
  siRNA target sequence for MGC38922 (NM_144842.2,1027-1045).
ctgccagagtcttaggaaa

SEQ ID NO: 754256 - DNA, 19 bp, Mus musculus
  siRNA target sequence for MGC38922 (NM_144842.2,1046-1064).
gaagtttttactaagtcaa

SEQ ID NO: 754257 - DNA, 19 bp, Mus musculus
  siRNA target sequence for MGC38922 (NM_144842.2,1049-1067).
gtttttactaagtcaagat

SEQ ID NO: 754258 - DNA, 19 bp, Mus musculus
  siRNA target sequence for 0910001A06Rik (NM_144846.2,307-325).
ggggaatcttcttaaagtt

SEQ ID NO: 754259 - DNA, 19 bp, Mus musculus
  siRNA target sequence for 0910001A06Rik (NM_144846.2,309-327).
ggaatcttcttaaagtttt

SEQ ID NO: 754260 - DNA, 19 bp, Mus musculus
  siRNA target sequence for 0910001A06Rik (NM_144846.2,344-362).
gagcaggggccaaattttt

SEQ ID NO: 754261 - DNA, 19 bp, Mus musculus
  siRNA target sequence for 0910001A06Rik (NM_144846.2,392-410).
gagtctgagaaggaaatat

SEQ ID NO: 754262 - DNA, 19 bp, Mus musculus
  siRNA target sequence for 0910001A06Rik (NM_144846.2,394-412).
gtctgagaaggaaatatat

SEQ ID NO: 754263 - DNA, 19 bp, Mus musculus
  siRNA target sequence for 0910001A06Rik (NM_144846.2,396-414).
ctgagaaggaaatatataa

SEQ ID NO: 754264 - DNA, 19 bp, Mus musculus
  siRNA target sequence for 0910001A06Rik (NM_144846.2,557-575).
ccactagtaggcaaattaa

SEQ ID NO: 754265 - DNA, 19 bp, Mus musculus
  siRNA target sequence for 0910001A06Rik (NM_144846.2,558-576).
cactagtaggcaaattaaa

SEQ ID NO: 754266 - DNA, 19 bp, Mus musculus
  siRNA target sequence for 0910001A06Rik (NM_144846.2,560-578).
ctagtaggcaaattaaaga

SEQ ID NO: 754267 - DNA, 19 bp, Mus musculus
  siRNA target sequence for 0910001A06Rik (NM_144846.2,567-585).
gcaaattaaagaagtttta

SEQ ID NO: 754268 - DNA, 19 bp, Mus musculus
  siRNA target sequence for 0910001A06Rik (NM_144846.2,577-595).
gaagttttacgaattttct

SEQ ID NO: 754269 - DNA, 19 bp, Mus musculus
  siRNA target sequence for 0910001A06Rik (NM_144846.2,626-644).
ctgggagccttgactagta

SEQ ID NO: 754270 - DNA, 19 bp, Mus musculus
  siRNA target sequence for 0910001A06Rik (NM_144846.2,652-670).
ctcgcccacccaacatcta

SEQ ID NO: 754271 - DNA, 19 bp, Mus musculus
  siRNA target sequence for 0910001A06Rik (NM_144846.2,654-672).
cgcccacccaacatctaga

SEQ ID NO: 754272 - DNA, 19 bp, Mus musculus
  siRNA target sequence for 0910001A06Rik (NM_144846.2,680-698).
caggctctcgctaaacagt

SEQ ID NO: 754273 - DNA, 19 bp, Mus musculus
  siRNA target sequence for 0910001A06Rik (NM_144846.2,682-700).
ggctctcgctaaacagttt

SEQ ID NO: 754274 - DNA, 19 bp, Mus musculus
  siRNA target sequence for 0910001A06Rik (NM_144846.2,715-733).
cttcacactccggtttgat

SEQ ID NO: 754275 - DNA, 19 bp, Mus musculus
  siRNA target sequence for 0910001A06Rik (NM_144846.2,745-763).
gacaaatcctgccatacaa

SEQ ID NO: 754276 - DNA, 19 bp, Mus musculus
  siRNA target sequence for 0910001A06Rik (NM_144846.2,798-816).
gtatgagaattaataatgt

SEQ ID NO: 754277 - DNA, 19 bp, Mus musculus
  siRNA target sequence for 0910001A06Rik (NM_144846.2,854-872).
gcaaatcgaatgtcattgt

SEQ ID NO: 754278 - DNA, 19 bp, Mus musculus
  siRNA target sequence for 0910001A06Rik (NM_144846.2,904-922).
cttaagtgatgcaacaaca

SEQ ID NO: 754279 - DNA, 19 bp, Mus musculus
  siRNA target sequence for 0910001A06Rik (NM_144846.2,909-927).
gtgatgcaacaacaaaatt

SEQ ID NO: 754280 - DNA, 19 bp, Mus musculus
  siRNA target sequence for 0910001A06Rik (NM_144846.2,1039-1057).
caatgaagagacagtatca

SEQ ID NO: 754281 - DNA, 19 bp, Mus musculus
  siRNA target sequence for 0910001A06Rik (NM_144846.2,1043-1061).
gaagagacagtatcattct

SEQ ID NO: 754282 - DNA, 19 bp, Mus musculus
  siRNA target sequence for 0910001A06Rik (NM_144846.2,1069-1087).
ggtaatggtgggtgtcata

SEQ ID NO: 754283 - DNA, 19 bp, Mus musculus
  siRNA target sequence for 0910001A06Rik (NM_144846.2,1070-1088).
gtaatggtgggtgtcataa

SEQ ID NO: 754284 - DNA, 19 bp, Mus musculus
  siRNA target sequence for 0910001A06Rik (NM_144846.2,1076-1094).
gtgggtgtcataatactct

SEQ ID NO: 754285 - DNA, 19 bp, Mus musculus
  siRNA target sequence for 0910001A06Rik (NM_144846.2,1078-1096).
gggtgtcataatactctat

SEQ ID NO: 754286 - DNA, 19 bp, Mus musculus
  siRNA target sequence for 0910001A06Rik (NM_144846.2,1080-1098).
gtgtcataatactctatga

SEQ ID NO: 754287 - DNA, 19 bp, Mus musculus
  siRNA target sequence for 0910001A06Rik (NM_144846.2,1105-1123).
ccatccagtgggagcattt

SEQ ID NO: 754288 - DNA, 19 bp, Mus musculus
  siRNA target sequence for 0910001A06Rik (NM_144846.2,1114-1132).
gggagcatttgccaaaact

SEQ ID NO: 754289 - DNA, 19 bp, Mus musculus
  siRNA target sequence for 0910001A06Rik (NM_144846.2,1115-1133).
ggagcatttgccaaaactt

SEQ ID NO: 754290 - DNA, 19 bp, Mus musculus
  siRNA target sequence for 0910001A06Rik (NM_144846.2,1119-1137).
catttgccaaaacttctaa

SEQ ID NO: 754291 - DNA, 19 bp, Mus musculus
  siRNA target sequence for 0910001A06Rik (NM_144846.2,1243-1261).
gactacctccaagcaaatt

SEQ ID NO: 754292 - DNA, 19 bp, Mus musculus
  siRNA target sequence for C730048E16Rik (NM_144849.1,299-317).
cgaactgcgttgcaagatt

SEQ ID NO: 754293 - DNA, 19 bp, Mus musculus
  siRNA target sequence for C730048E16Rik (NM_144849.1,465-483).
ccctgcgcagcggatgata

SEQ ID NO: 754294 - DNA, 19 bp, Mus musculus
  siRNA target sequence for C730048E16Rik (NM_144849.1,466-484).
cctgcgcagcggatgataa

SEQ ID NO: 754295 - DNA, 19 bp, Mus musculus
  siRNA target sequence for C730048E16Rik (NM_144849.1,467-485).
ctgcgcagcggatgataaa

SEQ ID NO: 754296 - DNA, 19 bp, Mus musculus
  siRNA target sequence for C730048E16Rik (NM_144849.1,487-505).
gcagaactgccctccattt

SEQ ID NO: 754297 - DNA, 19 bp, Mus musculus
  siRNA target sequence for ORF63 (NM_144854.1,365-383).
cgcgtttagcctcaatgat

SEQ ID NO: 754298 - DNA, 19 bp, Mus musculus
  siRNA target sequence for ORF63 (NM_144854.1,482-500).
gtccatgcaggtgtttaaa

SEQ ID NO: 754299 - DNA, 19 bp, Mus musculus
  siRNA target sequence for ORF63 (NM_144854.1,484-502).
ccatgcaggtgtttaaaca

SEQ ID NO: 754300 - DNA, 19 bp, Mus musculus
  siRNA target sequence for ORF63 (NM_144854.1,522-540).
gagtaccatgaagtcaaaa

SEQ ID NO: 754301 - DNA, 19 bp, Mus musculus
  siRNA target sequence for BC011248 (NM_144857.1,62-80).
gacacatctgacatgtcat

SEQ ID NO: 754302 - DNA, 19 bp, Mus musculus
  siRNA target sequence for BC011248 (NM_144857.1,64-82).
cacatctgacatgtcattt

SEQ ID NO: 754303 - DNA, 19 bp, Mus musculus
  siRNA target sequence for BC011248 (NM_144857.1,66-84).
catctgacatgtcatttga

SEQ ID NO: 754304 - DNA, 19 bp, Mus musculus
  siRNA target sequence for BC011248 (NM_144857.1,245-263).
caggtggtgcccatcagta

SEQ ID NO: 754305 - DNA, 19 bp, Mus musculus
  siRNA target sequence for BC011248 (NM_144857.1,248-266).
gtggtgcccatcagtaaaa

SEQ ID NO: 754306 - DNA, 19 bp, Mus musculus
  siRNA target sequence for BC011248 (NM_144857.1,293-311).
gatctgtcaggggactata

SEQ ID NO: 754307 - DNA, 19 bp, Mus musculus
  siRNA target sequence for BC011248 (NM_144857.1,408-426).
gggaggagcatgacaaact

SEQ ID NO: 754308 - DNA, 19 bp, Mus musculus
  siRNA target sequence for BC011248 (NM_144857.1,546-564).
ggccatacttcctgaagaa

SEQ ID NO: 754309 - DNA, 19 bp, Mus musculus
  siRNA target sequence for Mib1 (NM_144860.2,917-935).
gcatgatggaactatgtgt

SEQ ID NO: 754310 - DNA, 19 bp, Mus musculus
  siRNA target sequence for Mib1 (NM_144860.2,921-939).
gatggaactatgtgtgata

SEQ ID NO: 754311 - DNA, 19 bp, Mus musculus
  siRNA target sequence for Mib1 (NM_144860.2,943-961).
gccgccagcaaccaatcat

SEQ ID NO: 754312 - DNA, 19 bp, Mus musculus
  siRNA target sequence for Mib1 (NM_144860.2,944-962).
ccgccagcaaccaatcatt

SEQ ID NO: 754313 - DNA, 19 bp, Mus musculus
  siRNA target sequence for Mib1 (NM_144860.2,979-997).
gtgcagagtgcaccaatta

SEQ ID NO: 754314 - DNA, 19 bp, Mus musculus
  siRNA target sequence for Mib1 (NM_144860.2,982-1000).
cagagtgcaccaattatga

SEQ ID NO: 754315 - DNA, 19 bp, Mus musculus
  siRNA target sequence for Mib1 (NM_144860.2,984-1002).
gagtgcaccaattatgatt

SEQ ID NO: 754316 - DNA, 19 bp, Mus musculus
  siRNA target sequence for Mib1 (NM_144860.2,1004-1022).
gtgcactgtttgttatcat

SEQ ID NO: 754317 - DNA, 19 bp, Mus musculus
  siRNA target sequence for Mib1 (NM_144860.2,1037-1055).
cttaaggcatcgcttttat

SEQ ID NO: 754318 - DNA, 19 bp, Mus musculus
  siRNA target sequence for Mib1 (NM_144860.2,1042-1060).
ggcatcgcttttataggat

SEQ ID NO: 754319 - DNA, 19 bp, Mus musculus
  siRNA target sequence for Mib1 (NM_144860.2,1043-1061).
gcatcgcttttataggatt

SEQ ID NO: 754320 - DNA, 19 bp, Mus musculus
  siRNA target sequence for Mib1 (NM_144860.2,1044-1062).
catcgcttttataggatta

SEQ ID NO: 754321 - DNA, 19 bp, Mus musculus
  siRNA target sequence for Mib1 (NM_144860.2,1047-1065).
cgcttttataggattacta

SEQ ID NO: 754322 - DNA, 19 bp, Mus musculus
  siRNA target sequence for Mib1 (NM_144860.2,1072-1090).
gaagtgaacgggttctgtt

SEQ ID NO: 754323 - DNA, 19 bp, Mus musculus
  siRNA target sequence for Mib1 (NM_144860.2,1075-1093).
gtgaacgggttctgttaga

SEQ ID NO: 754324 - DNA, 19 bp, Mus musculus
  siRNA target sequence for Mib1 (NM_144860.2,1092-1110).
gagtctcgtagaaaatcta

SEQ ID NO: 754325 - DNA, 19 bp, Mus musculus
  siRNA target sequence for Mib1 (NM_144860.2,1096-1114).
ctcgtagaaaatctaagaa

SEQ ID NO: 754326 - DNA, 19 bp, Mus musculus
  siRNA target sequence for Mib1 (NM_144860.2,1098-1116).
cgtagaaaatctaagaaga

SEQ ID NO: 754327 - DNA, 19 bp, Mus musculus
  siRNA target sequence for Mib1 (NM_144860.2,1270-1288).
gggataacggtgctaagaa

SEQ ID NO: 754328 - DNA, 19 bp, Mus musculus
  siRNA target sequence for Mib1 (NM_144860.2,1341-1359).
gccaaaggaggttctttct

SEQ ID NO: 754329 - DNA, 19 bp, Mus musculus
  siRNA target sequence for Mib1 (NM_144860.2,1505-1523).
gtttgagactttaactaca

SEQ ID NO: 754330 - DNA, 19 bp, Mus musculus
  siRNA target sequence for Mib1 (NM_144860.2,1532-1550).
cgtctgtggcattgatgaa

SEQ ID NO: 754331 - DNA, 19 bp, Mus musculus
  siRNA target sequence for Mib1 (NM_144860.2,1582-1600).
gcaatagatggactttcaa

SEQ ID NO: 754332 - DNA, 19 bp, Mus musculus
  siRNA target sequence for Mib1 (NM_144860.2,1583-1601).
caatagatggactttcaat

SEQ ID NO: 754333 - DNA, 19 bp, Mus musculus
  siRNA target sequence for Mib1 (NM_144860.2,1666-1684).
gcacctcacagtttcaagt

SEQ ID NO: 754334 - DNA, 19 bp, Mus musculus
  siRNA target sequence for Mib1 (NM_144860.2,1705-1723).
gttatgatctggaaagaat

SEQ ID NO: 754335 - DNA, 19 bp, Mus musculus
  siRNA target sequence for Mib1 (NM_144860.2,1766-1784).
gcttccaactttaggtaaa

SEQ ID NO: 754336 - DNA, 19 bp, Mus musculus
  siRNA target sequence for Mib1 (NM_144860.2,1788-1806).
ggccgagtacaacagattt

SEQ ID NO: 754337 - DNA, 19 bp, Mus musculus
  siRNA target sequence for Mib1 (NM_144860.2,1789-1807).
gccgagtacaacagattta

SEQ ID NO: 754338 - DNA, 19 bp, Mus musculus
  siRNA target sequence for Mib1 (NM_144860.2,1790-1808).
ccgagtacaacagatttat

SEQ ID NO: 754339 - DNA, 19 bp, Mus musculus
  siRNA target sequence for Mib1 (NM_144860.2,1791-1809).
cgagtacaacagatttatt

SEQ ID NO: 754340 - DNA, 19 bp, Mus musculus
  siRNA target sequence for Mib1 (NM_144860.2,1810-1828).
cggacagtgacttaaaggt

SEQ ID NO: 754341 - DNA, 19 bp, Mus musculus
  siRNA target sequence for Mib1 (NM_144860.2,1839-1857).
ggaacatcttggacgtata

SEQ ID NO: 754342 - DNA, 19 bp, Mus musculus
  siRNA target sequence for Mib1 (NM_144860.2,1840-1858).
gaacatcttggacgtataa

SEQ ID NO: 754343 - DNA, 19 bp, Mus musculus
  siRNA target sequence for Mib1 (NM_144860.2,2010-2028).
gtggctaaagtggaagatt

SEQ ID NO: 754344 - DNA, 19 bp, Mus musculus
  siRNA target sequence for Mib1 (NM_144860.2,2038-2056).
gaccagatgtggatgtaaa

SEQ ID NO: 754345 - DNA, 19 bp, Mus musculus
  siRNA target sequence for Mib1 (NM_144860.2,2095-2113).
gtcagaacggacatgttga

SEQ ID NO: 754346 - DNA, 19 bp, Mus musculus
  siRNA target sequence for Mib1 (NM_144860.2,2097-2115).
cagaacggacatgttgata

SEQ ID NO: 754347 - DNA, 19 bp, Mus musculus
  siRNA target sequence for Mib1 (NM_144860.2,2099-2117).
gaacggacatgttgatatt

SEQ ID NO: 754348 - DNA, 19 bp, Mus musculus
  siRNA target sequence for Mib1 (NM_144860.2,2103-2121).
ggacatgttgatattttga

SEQ ID NO: 754349 - DNA, 19 bp, Mus musculus
  siRNA target sequence for Mib1 (NM_144860.2,2244-2262).
gacctgaatgctcgtaata

SEQ ID NO: 754350 - DNA, 19 bp, Mus musculus
  siRNA target sequence for Mib1 (NM_144860.2,2269-2287).
gacagacgcctcttcatat

SEQ ID NO: 754351 - DNA, 19 bp, Mus musculus
  siRNA target sequence for Mib1 (NM_144860.2,2302-2320).
gtcatcttcaagttgtgaa

SEQ ID NO: 754352 - DNA, 19 bp, Mus musculus
  siRNA target sequence for Mib1 (NM_144860.2,2395-2413).
gtaagaaacgggatgacat

SEQ ID NO: 754353 - DNA, 19 bp, Mus musculus
  siRNA target sequence for Mib1 (NM_144860.2,2456-2474).
gaacaataacgggttcaat

SEQ ID NO: 754354 - DNA, 19 bp, Mus musculus
  siRNA target sequence for Mib1 (NM_144860.2,2506-2524).
ccagtgcaatgcgtgtttt

SEQ ID NO: 754355 - DNA, 19 bp, Mus musculus
  siRNA target sequence for Mib1 (NM_144860.2,2507-2525).
cagtgcaatgcgtgtttta

SEQ ID NO: 754356 - DNA, 19 bp, Mus musculus
  siRNA target sequence for Mib1 (NM_144860.2,2509-2527).
gtgcaatgcgtgttttact

SEQ ID NO: 754357 - DNA, 19 bp, Mus musculus
  siRNA target sequence for Mib1 (NM_144860.2,2516-2534).
gcgtgttttactctcaaaa

SEQ ID NO: 754358 - DNA, 19 bp, Mus musculus
  siRNA target sequence for Mib1 (NM_144860.2,2548-2566).
ggattgtggatgagaagaa

SEQ ID NO: 754359 - DNA, 19 bp, Mus musculus
  siRNA target sequence for Mib1 (NM_144860.2,2594-2612).
ggctgccctgaataatcat

SEQ ID NO: 754360 - DNA, 19 bp, Mus musculus
  siRNA target sequence for Mib1 (NM_144860.2,2596-2614).
ctgccctgaataatcatgt

SEQ ID NO: 754361 - DNA, 19 bp, Mus musculus
  siRNA target sequence for Mib1 (NM_144860.2,2655-2673).
ctggatatccagaatgtga

SEQ ID NO: 754362 - DNA, 19 bp, Mus musculus
  siRNA target sequence for Mib1 (NM_144860.2,2738-2756).
ccgtgcaggtgctaagcta

SEQ ID NO: 754363 - DNA, 19 bp, Mus musculus
  siRNA target sequence for Mib1 (NM_144860.2,2746-2764).
gtgctaagctagacattca

SEQ ID NO: 754364 - DNA, 19 bp, Mus musculus
  siRNA target sequence for Mib1 (NM_144860.2,2796-2814).
gctttgagacatcatactt

SEQ ID NO: 754365 - DNA, 19 bp, Mus musculus
  siRNA target sequence for Mib1 (NM_144860.2,2927-2945).
gaagagtgcagcatccatt

SEQ ID NO: 754366 - DNA, 19 bp, Mus musculus
  siRNA target sequence for Mib1 (NM_144860.2,2937-2955).
gcatccattgcgtgtttct

SEQ ID NO: 754367 - DNA, 19 bp, Mus musculus
  siRNA target sequence for Mib1 (NM_144860.2,2971-2989).
ctgatctcagcattcgaaa

SEQ ID NO: 754368 - DNA, 19 bp, Mus musculus
  siRNA target sequence for Mib1 (NM_144860.2,2973-2991).
gatctcagcattcgaaata

SEQ ID NO: 754369 - DNA, 19 bp, Mus musculus
  siRNA target sequence for Mib1 (NM_144860.2,2976-2994).
ctcagcattcgaaataaga

SEQ ID NO: 754370 - DNA, 19 bp, Mus musculus
  siRNA target sequence for Mib1 (NM_144860.2,3042-3060).
gctttggcaaaatgtcata

SEQ ID NO: 754371 - DNA, 19 bp, Mus musculus
  siRNA target sequence for Mib1 (NM_144860.2,3043-3061).
ctttggcaaaatgtcataa

SEQ ID NO: 754372 - DNA, 19 bp, Mus musculus
  siRNA target sequence for Mib1 (NM_144860.2,3085-3103).
gttctcggagtccttctat

SEQ ID NO: 754373 - DNA, 19 bp, Mus musculus
  siRNA target sequence for Mib1 (NM_144860.2,3094-3112).
gtccttctatgattagcaa

SEQ ID NO: 754374 - DNA, 19 bp, Mus musculus
  siRNA target sequence for Mib1 (NM_144860.2,3104-3122).
gattagcaacgattctgaa

SEQ ID NO: 754375 - DNA, 19 bp, Mus musculus
  siRNA target sequence for Mib1 (NM_144860.2,3152-3170).
catgaagagagatactctt

SEQ ID NO: 754376 - DNA, 19 bp, Mus musculus
  siRNA target sequence for Mib1 (NM_144860.2,3158-3176).
gagagatactctttttggt

SEQ ID NO: 754377 - DNA, 19 bp, Mus musculus
  siRNA target sequence for Mib1 (NM_144860.2,3177-3195).
ccgtgtggacacattgcaa

SEQ ID NO: 754378 - DNA, 19 bp, Mus musculus
  siRNA target sequence for Mib1 (NM_144860.2,3281-3299).
ggtgtgctccgacaagaaa

SEQ ID NO: 754379 - DNA, 19 bp, Mus musculus
  siRNA target sequence for Mib1 (NM_144860.2,3353-3371).
cagcctgatgaaaaagtgt

SEQ ID NO: 754380 - DNA, 19 bp, Mus musculus
  siRNA target sequence for Mib1 (NM_144860.2,3441-3459).
gacccctctgatgaaatct

SEQ ID NO: 754381 - DNA, 19 bp, Mus musculus
  siRNA target sequence for Mib1 (NM_144860.2,3647-3665).
gagtgaatgcccaatttgt

SEQ ID NO: 754382 - DNA, 19 bp, Mus musculus
  siRNA target sequence for Mib1 (NM_144860.2,3671-3689).
ggcaattgaacgaaggatt

SEQ ID NO: 754383 - DNA, 19 bp, Mus musculus
  siRNA target sequence for Mib1 (NM_144860.2,3678-3696).
gaacgaaggattcttttgt

SEQ ID NO: 754384 - DNA, 19 bp, Mus musculus
  siRNA target sequence for Mib1 (NM_144860.2,3681-3699).
cgaaggattcttttgtact

SEQ ID NO: 754385 - DNA, 19 bp, Mus musculus
  siRNA target sequence for BC021395 (NM_144861.1,247-265).
cccaacaggaagcttactt

SEQ ID NO: 754386 - DNA, 19 bp, Mus musculus
  siRNA target sequence for BC021395 (NM_144861.1,273-291).
cttggccaatgatgtcatt

SEQ ID NO: 754387 - DNA, 19 bp, Mus musculus
  siRNA target sequence for BC021395 (NM_144861.1,311-329).
ggccagagttcacaaaaga

SEQ ID NO: 754388 - DNA, 19 bp, Mus musculus
  siRNA target sequence for BC021395 (NM_144861.1,357-375).
caagcatgtttcaagtgaa

SEQ ID NO: 754389 - DNA, 19 bp, Mus musculus
  siRNA target sequence for BC021395 (NM_144861.1,360-378).
gcatgtttcaagtgaaact

SEQ ID NO: 754390 - DNA, 19 bp, Mus musculus
  siRNA target sequence for BC021395 (NM_144861.1,400-418).
cttggaagagtgttatcta

SEQ ID NO: 754391 - DNA, 19 bp, Mus musculus
  siRNA target sequence for BC021395 (NM_144861.1,422-440).
gggaagaacgatctgttta

SEQ ID NO: 754392 - DNA, 19 bp, Mus musculus
  siRNA target sequence for BC021395 (NM_144861.1,423-441).
ggaagaacgatctgtttat

SEQ ID NO: 754393 - DNA, 19 bp, Mus musculus
  siRNA target sequence for BC021395 (NM_144861.1,501-519).
gaggacttatgagcaaata

SEQ ID NO: 754394 - DNA, 19 bp, Mus musculus
  siRNA target sequence for BC021395 (NM_144861.1,506-524).
cttatgagcaaataaaggt

SEQ ID NO: 754395 - DNA, 19 bp, Mus musculus
  siRNA target sequence for BC021395 (NM_144861.1,574-592).
cagactctcgaccttgtta

SEQ ID NO: 754396 - DNA, 19 bp, Mus musculus
  siRNA target sequence for BC021395 (NM_144861.1,576-594).
gactctcgaccttgttaga

SEQ ID NO: 754397 - DNA, 19 bp, Mus musculus
  siRNA target sequence for BC021395 (NM_144861.1,582-600).
cgaccttgttagagcatta

SEQ ID NO: 754398 - DNA, 19 bp, Mus musculus
  siRNA target sequence for BC021395 (NM_144861.1,593-611).
gagcattacaagatttaga

SEQ ID NO: 754399 - DNA, 19 bp, Mus musculus
  siRNA target sequence for BC021395 (NM_144861.1,660-678).
gcctgtcgaagttcaagaa

SEQ ID NO: 754400 - DNA, 19 bp, Mus musculus
  siRNA target sequence for BC021395 (NM_144861.1,662-680).
ctgtcgaagttcaagaagt

SEQ ID NO: 754401 - DNA, 19 bp, Mus musculus
  siRNA target sequence for BC021395 (NM_144861.1,684-702).
cctgcttgagaagataaca

SEQ ID NO: 754402 - DNA, 19 bp, Mus musculus
  siRNA target sequence for BC021395 (NM_144861.1,720-738).
gaggctttctaaaatggta

SEQ ID NO: 754403 - DNA, 19 bp, Mus musculus
  siRNA target sequence for BC021395 (NM_144861.1,749-767).
gtatgctgctggcagatta

SEQ ID NO: 754404 - DNA, 19 bp, Mus musculus
  siRNA target sequence for BC021395 (NM_144861.1,753-771).
gctgctggcagattataat

SEQ ID NO: 754405 - DNA, 19 bp, Mus musculus
  siRNA target sequence for BC021395 (NM_144861.1,773-791).
gcagactggcggcagaaat

SEQ ID NO: 754406 - DNA, 19 bp, Mus musculus
  siRNA target sequence for BC021395 (NM_144861.1,774-792).
cagactggcggcagaaata

SEQ ID NO: 754407 - DNA, 19 bp, Mus musculus
  siRNA target sequence for BC021395 (NM_144861.1,783-801).
ggcagaaatagatgataga

SEQ ID NO: 754408 - DNA, 19 bp, Mus musculus
  siRNA target sequence for BC021395 (NM_144861.1,908-926).
ccctggtacgcaaagaact

SEQ ID NO: 754409 - DNA, 19 bp, Mus musculus
  siRNA target sequence for BC021395 (NM_144861.1,909-927).
cctggtacgcaaagaacta

SEQ ID NO: 754410 - DNA, 19 bp, Mus musculus
  siRNA target sequence for BC021395 (NM_144861.1,910-928).
ctggtacgcaaagaactaa

SEQ ID NO: 754411 - DNA, 19 bp, Mus musculus
  siRNA target sequence for BC021395 (NM_144861.1,942-960).
gagcctgccagatttatct

SEQ ID NO: 754412 - DNA, 19 bp, Mus musculus
  siRNA target sequence for 5730444A13Rik (NM_144863.2,321-339).
gtctggttgcagtaagtaa

SEQ ID NO: 754413 - DNA, 19 bp, Mus musculus
  siRNA target sequence for 5730444A13Rik (NM_144863.2,325-343).
ggttgcagtaagtaactct

SEQ ID NO: 754414 - DNA, 19 bp, Mus musculus
  siRNA target sequence for 5730444A13Rik (NM_144863.2,372-390).
ccgatgggaggctagtctt

SEQ ID NO: 754415 - DNA, 19 bp, Mus musculus
  siRNA target sequence for 5730444A13Rik (NM_144863.2,417-435).
catttgcccggaataaaga

SEQ ID NO: 754416 - DNA, 19 bp, Mus musculus
  siRNA target sequence for 5730444A13Rik (NM_144863.2,424-442).
ccggaataaagagatagta

SEQ ID NO: 754417 - DNA, 19 bp, Mus musculus
  siRNA target sequence for 5730444A13Rik (NM_144863.2,512-530).
gatactgacagcgttctta

SEQ ID NO: 754418 - DNA, 19 bp, Mus musculus
  siRNA target sequence for 5730444A13Rik (NM_144863.2,516-534).
ctgacagcgttcttattat

SEQ ID NO: 754419 - DNA, 19 bp, Mus musculus
  siRNA target sequence for 5730444A13Rik (NM_144863.2,518-536).
gacagcgttcttattattt

SEQ ID NO: 754420 - DNA, 19 bp, Mus musculus
  siRNA target sequence for 5730444A13Rik (NM_144863.2,611-629).
catccaagcacctatttga

SEQ ID NO: 754421 - DNA, 19 bp, Mus musculus
  siRNA target sequence for 5730444A13Rik (NM_144863.2,660-678).
gcctacagttatggaatat

SEQ ID NO: 754422 - DNA, 19 bp, Mus musculus
  siRNA target sequence for 5730444A13Rik (NM_144863.2,662-680).
ctacagttatggaatataa

SEQ ID NO: 754423 - DNA, 19 bp, Mus musculus
  siRNA target sequence for 5730444A13Rik (NM_144863.2,780-798).
ctggtcaagttgtcattca

SEQ ID NO: 754424 - DNA, 19 bp, Mus musculus
  siRNA target sequence for 5730444A13Rik (NM_144863.2,782-800).
ggtcaagttgtcattcaca

SEQ ID NO: 754425 - DNA, 19 bp, Mus musculus
  siRNA target sequence for 5730444A13Rik (NM_144863.2,802-820).
cattaagtatgatgaaaca

SEQ ID NO: 754426 - DNA, 19 bp, Mus musculus
  siRNA target sequence for 5730444A13Rik (NM_144863.2,838-856).
ggactggggacccattact

SEQ ID NO: 754427 - DNA, 19 bp, Mus musculus
  siRNA target sequence for 5730444A13Rik (NM_144863.2,839-857).
gactggggacccattactt

SEQ ID NO: 754428 - DNA, 19 bp, Mus musculus
  siRNA target sequence for 5730444A13Rik (NM_144863.2,870-888).
gcacagatggtcatccaat

SEQ ID NO: 754429 - DNA, 19 bp, Mus musculus
  siRNA target sequence for 5730444A13Rik (NM_144863.2,871-889).
cacagatggtcatccaata

SEQ ID NO: 754430 - DNA, 19 bp, Mus musculus
  siRNA target sequence for 5730444A13Rik (NM_144863.2,929-947).
gatctggaagacaaaaaat

SEQ ID NO: 754431 - DNA, 19 bp, Mus musculus
  siRNA target sequence for 5730444A13Rik (NM_144863.2,968-986).
gcacactctacagcaatat

SEQ ID NO: 754432 - DNA, 19 bp, Mus musculus
  siRNA target sequence for 5730444A13Rik (NM_144863.2,981-999).
caatatctgggctgacatt

SEQ ID NO: 754433 - DNA, 19 bp, Mus musculus
  siRNA target sequence for 5730444A13Rik (NM_144863.2,1010-1028).
gagccgttgcttgttacaa

SEQ ID NO: 754434 - DNA, 19 bp, Mus musculus
  siRNA target sequence for 5730444A13Rik (NM_144863.2,1037-1055).
gataatgctcttaggatat

SEQ ID NO: 754435 - DNA, 19 bp, Mus musculus
  siRNA target sequence for 5730444A13Rik (NM_144863.2,1079-1097).
gaaggacggttgttgagat

SEQ ID NO: 754436 - DNA, 19 bp, Mus musculus
  siRNA target sequence for 5730444A13Rik (NM_144863.2,1082-1100).
ggacggttgttgagattca

SEQ ID NO: 754437 - DNA, 19 bp, Mus musculus
  siRNA target sequence for 5730444A13Rik (NM_144863.2,1085-1103).
cggttgttgagattcagaa

SEQ ID NO: 754438 - DNA, 19 bp, Mus musculus
  siRNA target sequence for 5730444A13Rik (NM_144863.2,1106-1124).
gggcatagtgcttctctta

SEQ ID NO: 754439 - DNA, 19 bp, Mus musculus
  siRNA target sequence for 5730444A13Rik (NM_144863.2,1119-1137).
ctcttaccaagattagata

SEQ ID NO: 754440 - DNA, 19 bp, Mus musculus
  siRNA target sequence for 5730444A13Rik (NM_144863.2,1121-1139).
cttaccaagattagatatt

SEQ ID NO: 754441 - DNA, 19 bp, Mus musculus
  siRNA target sequence for 5730444A13Rik (NM_144863.2,1126-1144).
caagattagatattatgga

SEQ ID NO: 754442 - DNA, 19 bp, Mus musculus
  siRNA target sequence for 5730444A13Rik (NM_144863.2,1159-1177).
gattttaagtgcaagtcaa

SEQ ID NO: 754443 - DNA, 19 bp, Mus musculus
  siRNA target sequence for 5730444A13Rik (NM_144863.2,1181-1199).
gggactctacagtcatttt

SEQ ID NO: 754444 - DNA, 19 bp, Mus musculus
  siRNA target sequence for 5730444A13Rik (NM_144863.2,1232-1250).
ggtcatggattagtaaaca

SEQ ID NO: 754445 - DNA, 19 bp, Mus musculus
  siRNA target sequence for 5730444A13Rik (NM_144863.2,1233-1251).
gtcatggattagtaaacaa

SEQ ID NO: 754446 - DNA, 19 bp, Mus musculus
  siRNA target sequence for 5730444A13Rik (NM_144863.2,1238-1256).
ggattagtaaacaaaaaga

SEQ ID NO: 754447 - DNA, 19 bp, Mus musculus
  siRNA target sequence for 5730444A13Rik (NM_144863.2,1300-1318).
cccacctatcacacagttt

SEQ ID NO: 754448 - DNA, 19 bp, Mus musculus
  siRNA target sequence for 5730444A13Rik (NM_144863.2,1589-1607).
gctcacaccggctctgtta

SEQ ID NO: 754449 - DNA, 19 bp, Mus musculus
  siRNA target sequence for 5730444A13Rik (NM_144863.2,1617-1635).
ccgtggatggattaaacca

SEQ ID NO: 754450 - DNA, 19 bp, Mus musculus
  siRNA target sequence for 5730444A13Rik (NM_144863.2,1656-1674).
gtgaacggttactcaaatt

SEQ ID NO: 754451 - DNA, 19 bp, Mus musculus
  siRNA target sequence for 5730444A13Rik (NM_144863.2,1715-1733).
cttgattcgtctccaaata

SEQ ID NO: 754452 - DNA, 19 bp, Mus musculus
  siRNA target sequence for 5730444A13Rik (NM_144863.2,1718-1736).
gattcgtctccaaatatga

SEQ ID NO: 754453 - DNA, 19 bp, Mus musculus
  siRNA target sequence for 5730444A13Rik (NM_144863.2,1762-1780).
cctgggccttgctatggat

SEQ ID NO: 754454 - DNA, 19 bp, Mus musculus
  siRNA target sequence for 5730444A13Rik (NM_144863.2,1793-1811).
gctgtcctcgacatagaga

SEQ ID NO: 754455 - DNA, 19 bp, Mus musculus
  siRNA target sequence for 5730444A13Rik (NM_144863.2,1816-1834).
gaagatcgtcagagagttt

SEQ ID NO: 754456 - DNA, 19 bp, Mus musculus
  siRNA target sequence for 5730444A13Rik (NM_144863.2,1838-1856).
ggacaccacggccaaataa

SEQ ID NO: 754457 - DNA, 19 bp, Mus musculus
  siRNA target sequence for 5730444A13Rik (NM_144863.2,1839-1857).
gacaccacggccaaataaa

SEQ ID NO: 754458 - DNA, 19 bp, Mus musculus
  siRNA target sequence for 5730444A13Rik (NM_144863.2,1903-1921).
ctgtttaggagaaagatgt

SEQ ID NO: 754459 - DNA, 19 bp, Mus musculus
  siRNA target sequence for BC020184 (NM_144865.1,245-263).
cacagctgagacacttaca

SEQ ID NO: 754460 - DNA, 19 bp, Mus musculus
  siRNA target sequence for BC020184 (NM_144865.1,250-268).
ctgagacacttacagatat

SEQ ID NO: 754461 - DNA, 19 bp, Mus musculus
  siRNA target sequence for BC020184 (NM_144865.1,252-270).
gagacacttacagatataa

SEQ ID NO: 754462 - DNA, 19 bp, Mus musculus
  siRNA target sequence for BC020184 (NM_144865.1,302-320).
caagattgcctttgtgata

SEQ ID NO: 754463 - DNA, 19 bp, Mus musculus
  siRNA target sequence for BC020184 (NM_144865.1,402-420).
gagatcgacgaatacatca

SEQ ID NO: 754464 - DNA, 19 bp, Mus musculus
  siRNA target sequence for BC020184 (NM_144865.1,429-447).
cgagacaagagctatgaga

SEQ ID NO: 754465 - DNA, 19 bp, Mus musculus
  siRNA target sequence for BC020184 (NM_144865.1,523-541).
gggtgctgtcggaaaagct

SEQ ID NO: 754466 - DNA, 19 bp, Mus musculus
  siRNA target sequence for BC020184 (NM_144865.1,753-771).
cccaagaggaccaaaccta

SEQ ID NO: 754467 - DNA, 19 bp, Mus musculus
  siRNA target sequence for BC020184 (NM_144865.1,754-772).
ccaagaggaccaaacctat

SEQ ID NO: 754468 - DNA, 19 bp, Mus musculus
  siRNA target sequence for BC020184 (NM_144865.1,758-776).
gaggaccaaacctatcaaa

SEQ ID NO: 754469 - DNA, 19 bp, Mus musculus
  siRNA target sequence for BC020184 (NM_144865.1,760-778).
ggaccaaacctatcaaaaa

SEQ ID NO: 754470 - DNA, 19 bp, Mus musculus
  siRNA target sequence for BC020184 (NM_144865.1,761-779).
gaccaaacctatcaaaaaa

SEQ ID NO: 754471 - DNA, 19 bp, Mus musculus
  siRNA target sequence for MGC28728 (NM_144867.1,213-231).
gcctcgtgcgagcgatttt

SEQ ID NO: 754472 - DNA, 19 bp, Mus musculus
  siRNA target sequence for MGC28728 (NM_144867.1,278-296).
gatccggctgccaggaaaa

SEQ ID NO: 754473 - DNA, 19 bp, Mus musculus
  siRNA target sequence for MGC28728 (NM_144867.1,417-435).
ctgtgaagggaattagctt

SEQ ID NO: 754474 - DNA, 19 bp, Mus musculus
  siRNA target sequence for MGC28728 (NM_144867.1,455-473).
ctgatggccaccacgatat

SEQ ID NO: 754475 - DNA, 19 bp, Mus musculus
  siRNA target sequence for MGC28728 (NM_144867.1,468-486).
cgatatcctccaatgctaa

SEQ ID NO: 754476 - DNA, 19 bp, Mus musculus
  siRNA target sequence for MGC28728 (NM_144867.1,491-509).
gggtgggctgccattgagt

SEQ ID NO: 754477 - DNA, 19 bp, Mus musculus
  siRNA target sequence for MGC28728 (NM_144867.1,497-515).
gctgccattgagtggataa

SEQ ID NO: 754478 - DNA, 19 bp, Mus musculus
  siRNA target sequence for Pcnxl3 (NM_144868.1,93-111).
caactgcttccatctctat

SEQ ID NO: 754479 - DNA, 19 bp, Mus musculus
  siRNA target sequence for Pcnxl3 (NM_144868.1,199-217).
gtagctgtcatctttgcta

SEQ ID NO: 754480 - DNA, 19 bp, Mus musculus
  siRNA target sequence for Pcnxl3 (NM_144868.1,718-736).
gtccatgaagccagcaatt

SEQ ID NO: 754481 - DNA, 19 bp, Mus musculus
  siRNA target sequence for Pcnxl3 (NM_144868.1,784-802).
ggtgtacgacggtcgtata

SEQ ID NO: 754482 - DNA, 19 bp, Mus musculus
  siRNA target sequence for Pcnxl3 (NM_144868.1,787-805).
gtacgacggtcgtatacct

SEQ ID NO: 754483 - DNA, 19 bp, Mus musculus
  siRNA target sequence for Pcnxl3 (NM_144868.1,951-969).
gccaaggccagtagttctt

SEQ ID NO: 754484 - DNA, 19 bp, Mus musculus
  siRNA target sequence for Pcnxl3 (NM_144868.1,1046-1064).
cccagcacagctacaagta

SEQ ID NO: 754485 - DNA, 19 bp, Mus musculus
  siRNA target sequence for Pcnxl3 (NM_144868.1,1133-1151).
ggacacgtggggtaatgga

SEQ ID NO: 754486 - DNA, 19 bp, Mus musculus
  siRNA target sequence for Pcnxl3 (NM_144868.1,1139-1157).
gtggggtaatggagaacat

SEQ ID NO: 754487 - DNA, 19 bp, Mus musculus
  siRNA target sequence for Pcnxl3 (NM_144868.1,1141-1159).
ggggtaatggagaacattt

SEQ ID NO: 754488 - DNA, 19 bp, Mus musculus
  siRNA target sequence for Pcnxl3 (NM_144868.1,1324-1342).
cacaactgggtgattgcat

SEQ ID NO: 754489 - DNA, 19 bp, Mus musculus
  siRNA target sequence for Pcnxl3 (NM_144868.1,1806-1824).
gtctctagtccggagtaaa

SEQ ID NO: 754490 - DNA, 19 bp, Mus musculus
  siRNA target sequence for Pcnxl3 (NM_144868.1,1808-1826).
ctctagtccggagtaaact

SEQ ID NO: 754491 - DNA, 19 bp, Mus musculus
  siRNA target sequence for Pcnxl3 (NM_144868.1,1810-1828).
ctagtccggagtaaactct

SEQ ID NO: 754492 - DNA, 19 bp, Mus musculus
  siRNA target sequence for Pcnxl3 (NM_144868.1,2008-2026).
gttctgggcttcgtgttat

SEQ ID NO: 754493 - DNA, 19 bp, Mus musculus
  siRNA target sequence for Pcnxl3 (NM_144868.1,2048-2066).
gcttcttcacgcattacct

SEQ ID NO: 754494 - DNA, 19 bp, Mus musculus
  siRNA target sequence for Pcnxl3 (NM_144868.1,2119-2137).
ctgaagccactggagtata

SEQ ID NO: 754495 - DNA, 19 bp, Mus musculus
  siRNA target sequence for Pcnxl3 (NM_144868.1,2272-2290).
gtcagccacccagacaaat

SEQ ID NO: 754496 - DNA, 19 bp, Mus musculus
  siRNA target sequence for Pcnxl3 (NM_144868.1,2341-2359).
ctgcgctcggccttctgtt

SEQ ID NO: 754497 - DNA, 19 bp, Mus musculus
  siRNA target sequence for Pcnxl3 (NM_144868.1,2493-2511).
gtacaagctgcgttttgta

SEQ ID NO: 754498 - DNA, 19 bp, Mus musculus
  siRNA target sequence for Pcnxl3 (NM_144868.1,2683-2701).
gcaaggcccctcaagttct

SEQ ID NO: 754499 - DNA, 19 bp, Mus musculus
  siRNA target sequence for Pcnxl3 (NM_144868.1,2774-2792).
caggcgctgatgacaacaa

SEQ ID NO: 754500 - DNA, 19 bp, Mus musculus
  siRNA target sequence for Pcnxl3 (NM_144868.1,2924-2942).
cgctagtgcacctcattga

SEQ ID NO: 754501 - DNA, 19 bp, Mus musculus
  siRNA target sequence for Pcnxl3 (NM_144868.1,3218-3236).
gcaagatcctcgtcactta

SEQ ID NO: 754502 - DNA, 19 bp, Mus musculus
  siRNA target sequence for Pcnxl3 (NM_144868.1,3222-3240).
gatcctcgtcacttactat

SEQ ID NO: 754503 - DNA, 19 bp, Mus musculus
  siRNA target sequence for Pcnxl3 (NM_144868.1,3226-3244).
ctcgtcacttactatgtca

SEQ ID NO: 754504 - DNA, 19 bp, Mus musculus
  siRNA target sequence for Pcnxl3 (NM_144868.1,3264-3282).
gagccgctctccaaagcta

SEQ ID NO: 754505 - DNA, 19 bp, Mus musculus
  siRNA target sequence for Pcnxl3 (NM_144868.1,3899-3917).
cttctgacgagtacaagat

SEQ ID NO: 754506 - DNA, 19 bp, Mus musculus
  siRNA target sequence for Pcnxl3 (NM_144868.1,4072-4090).
cgcaacatgatcaattcct

SEQ ID NO: 754507 - DNA, 19 bp, Mus musculus
  siRNA target sequence for Pcnxl3 (NM_144868.1,4226-4244).
gctgggagagacttcataa

SEQ ID NO: 754508 - DNA, 19 bp, Mus musculus
  siRNA target sequence for Pcnxl3 (NM_144868.1,4347-4365).
ccctacgcctgaaaatgca

SEQ ID NO: 754509 - DNA, 19 bp, Mus musculus
  siRNA target sequence for C630029K18Rik (NM_144871.2,819-837).
gaggcaagttgtctaatga

SEQ ID NO: 754510 - DNA, 19 bp, Mus musculus
  siRNA target sequence for C630029K18Rik (NM_144871.2,844-862).
gcagaatcaatcaaaatta

SEQ ID NO: 754511 - DNA, 19 bp, Mus musculus
  siRNA target sequence for C630029K18Rik (NM_144871.2,1000-1018).
ctgtgagaacgatgactta

SEQ ID NO: 754512 - DNA, 19 bp, Mus musculus
  siRNA target sequence for C630029K18Rik (NM_144871.2,1004-1022).
gagaacgatgacttagcaa

SEQ ID NO: 754513 - DNA, 19 bp, Mus musculus
  siRNA target sequence for C630029K18Rik (NM_144871.2,1015-1033).
cttagcaaccagtttggtt

SEQ ID NO: 754514 - DNA, 19 bp, Mus musculus
  siRNA target sequence for C630029K18Rik (NM_144871.2,1030-1048).
ggttcttgatccctactta

SEQ ID NO: 754515 - DNA, 19 bp, Mus musculus
  siRNA target sequence for C630029K18Rik (NM_144871.2,1063-1081).
caaaatgaacactagattt

SEQ ID NO: 754516 - DNA, 19 bp, Mus musculus
  siRNA target sequence for C630029K18Rik (NM_144871.2,1074-1092).
ctagatttcggcctataaa

SEQ ID NO: 754517 - DNA, 19 bp, Mus musculus
  siRNA target sequence for C630029K18Rik (NM_144871.2,1118-1136).
gtaattgaacgctttaaga

SEQ ID NO: 754518 - DNA, 19 bp, Mus musculus
  siRNA target sequence for C630029K18Rik (NM_144871.2,1157-1175).
gctttcaaatgtttgactt

SEQ ID NO: 754519 - DNA, 19 bp, Mus musculus
  siRNA target sequence for C630029K18Rik (NM_144871.2,1180-1198).
ggaatgggcacggcattat

SEQ ID NO: 754520 - DNA, 19 bp, Mus musculus
  siRNA target sequence for C630029K18Rik (NM_144871.2,1181-1199).
gaatgggcacggcattatt

SEQ ID NO: 754521 - DNA, 19 bp, Mus musculus
  siRNA target sequence for C630029K18Rik (NM_144871.2,1185-1203).
gggcacggcattattttct

SEQ ID NO: 754522 - DNA, 19 bp, Mus musculus
  siRNA target sequence for C630029K18Rik (NM_144871.2,1187-1205).
gcacggcattattttctca

SEQ ID NO: 754523 - DNA, 19 bp, Mus musculus
  siRNA target sequence for C630029K18Rik (NM_144871.2,1191-1209).
ggcattattttctcaacaa

SEQ ID NO: 754524 - DNA, 19 bp, Mus musculus
  siRNA target sequence for C630029K18Rik (NM_144871.2,1292-1310).
ctgccttgtaatagatatt

SEQ ID NO: 754525 - DNA, 19 bp, Mus musculus
  siRNA target sequence for C630029K18Rik (NM_144871.2,1294-1312).
gccttgtaatagatattct

SEQ ID NO: 754526 - DNA, 19 bp, Mus musculus
  siRNA target sequence for C630029K18Rik (NM_144871.2,1295-1313).
ccttgtaatagatattctt

SEQ ID NO: 754527 - DNA, 19 bp, Mus musculus
  siRNA target sequence for C630029K18Rik (NM_144871.2,1349-1367).
gagtggaaacgaaatgaca

SEQ ID NO: 754528 - DNA, 19 bp, Mus musculus
  siRNA target sequence for C630029K18Rik (NM_144871.2,1351-1369).
gtggaaacgaaatgacaaa

SEQ ID NO: 754529 - DNA, 19 bp, Mus musculus
  siRNA target sequence for C630029K18Rik (NM_144871.2,1385-1403).
ggttgtattgccgaacttt

SEQ ID NO: 754530 - DNA, 19 bp, Mus musculus
  siRNA target sequence for C630029K18Rik (NM_144871.2,1412-1430).
gaggagaacatgctactta

SEQ ID NO: 754531 - DNA, 19 bp, Mus musculus
  siRNA target sequence for C630029K18Rik (NM_144871.2,1414-1432).
ggagaacatgctacttaga

SEQ ID NO: 754532 - DNA, 19 bp, Mus musculus
  siRNA target sequence for C630029K18Rik (NM_144871.2,1444-1462).
cgacttcagtgtcatgtat

SEQ ID NO: 754533 - DNA, 19 bp, Mus musculus
  siRNA target sequence for C630029K18Rik (NM_144871.2,1495-1513).
cggtcctgctgcatttata

SEQ ID NO: 754534 - DNA, 19 bp, Mus musculus
  siRNA target sequence for C630029K18Rik (NM_144871.2,1546-1564).
gtcaactggtcgagataca

SEQ ID NO: 754535 - DNA, 19 bp, Mus musculus
  siRNA target sequence for C630029K18Rik (NM_144871.2,1649-1667).
gagttctgcgaatgttata

SEQ ID NO: 754536 - DNA, 19 bp, Mus musculus
  siRNA target sequence for C630029K18Rik (NM_144871.2,1651-1669).
gttctgcgaatgttatact

SEQ ID NO: 754537 - DNA, 19 bp, Mus musculus
  siRNA target sequence for C630029K18Rik (NM_144871.2,1654-1672).
ctgcgaatgttatacttgt

SEQ ID NO: 754538 - DNA, 19 bp, Mus musculus
  siRNA target sequence for C630029K18Rik (NM_144871.2,1679-1697).
cggggaactggtgctttta

SEQ ID NO: 754539 - DNA, 19 bp, Mus musculus
  siRNA target sequence for C630029K18Rik (NM_144871.2,1682-1700).
ggaactggtgcttttaaat

SEQ ID NO: 754540 - DNA, 19 bp, Mus musculus
  siRNA target sequence for C630029K18Rik (NM_144871.2,1721-1739).
cctgctcctgttatcaata

SEQ ID NO: 754541 - DNA, 19 bp, Mus musculus
  siRNA target sequence for C630029K18Rik (NM_144871.2,1747-1765).
cggacttagagaaacagat

SEQ ID NO: 754542 - DNA, 19 bp, Mus musculus
  siRNA target sequence for C630029K18Rik (NM_144871.2,1867-1885).
caatgcaacttctaatcga

SEQ ID NO: 754543 - DNA, 19 bp, Mus musculus
  siRNA target sequence for C630029K18Rik (NM_144871.2,1871-1889).
gcaacttctaatcgaaaat

SEQ ID NO: 754544 - DNA, 19 bp, Mus musculus
  siRNA target sequence for C630029K18Rik (NM_144871.2,1890-1908).
cttcagttggtgtgaaaaa

SEQ ID NO: 754545 - DNA, 19 bp, Mus musculus
  siRNA target sequence for C630029K18Rik (NM_144871.2,1955-1973).
ccggctgcttccaactcta

SEQ ID NO: 754546 - DNA, 19 bp, Mus musculus
  siRNA target sequence for C630029K18Rik (NM_144871.2,1984-2002).
gctagtgcacaccaacaat

SEQ ID NO: 754547 - DNA, 19 bp, Mus musculus
  siRNA target sequence for C630029K18Rik (NM_144871.2,2006-2024).
cgggtaccaaagaaactga

SEQ ID NO: 754548 - DNA, 19 bp, Mus musculus
  siRNA target sequence for C630029K18Rik (NM_144871.2,2039-2057).
cctttactctccaagatca

SEQ ID NO: 754549 - DNA, 19 bp, Mus musculus
  siRNA target sequence for C630029K18Rik (NM_144871.2,2118-2136).
ggagcttagtgcttaagga

SEQ ID NO: 754550 - DNA, 19 bp, Mus musculus
  siRNA target sequence for C630029K18Rik (NM_144871.2,2139-2157).
ccaaagtcgtgctatataa

SEQ ID NO: 754551 - DNA, 19 bp, Mus musculus
  siRNA target sequence for C630029K18Rik (NM_144871.2,2140-2158).
caaagtcgtgctatataaa

SEQ ID NO: 754552 - DNA, 19 bp, Mus musculus
  siRNA target sequence for C630029K18Rik (NM_144871.2,2213-2231).
gggagtgggtgcttgacta

SEQ ID NO: 754553 - DNA, 19 bp, Mus musculus
  siRNA target sequence for C630029K18Rik (NM_144871.2,2376-2394).
gtcccttggatggctataa

SEQ ID NO: 754554 - DNA, 19 bp, Mus musculus
  siRNA target sequence for C630029K18Rik (NM_144871.2,2378-2396).
cccttggatggctataaaa

SEQ ID NO: 754555 - DNA, 19 bp, Mus musculus
  siRNA target sequence for C630029K18Rik (NM_144871.2,2379-2397).
ccttggatggctataaaaa

SEQ ID NO: 754556 - DNA, 19 bp, Mus musculus
  siRNA target sequence for C630029K18Rik (NM_144871.2,2388-2406).
gctataaaaatggtatact

SEQ ID NO: 754557 - DNA, 19 bp, Mus musculus
  siRNA target sequence for C630029K18Rik (NM_144871.2,2520-2538).
gcctgtcacgaaagaaatt

SEQ ID NO: 754558 - DNA, 19 bp, Mus musculus
  siRNA target sequence for C630029K18Rik (NM_144871.2,2521-2539).
cctgtcacgaaagaaattt

SEQ ID NO: 754559 - DNA, 19 bp, Mus musculus
  siRNA target sequence for C630029K18Rik (NM_144871.2,2524-2542).
gtcacgaaagaaatttcga

SEQ ID NO: 754560 - DNA, 19 bp, Mus musculus
  siRNA target sequence for C630029K18Rik (NM_144871.2,2533-2551).
gaaatttcgacaagtgaaa

SEQ ID NO: 754561 - DNA, 19 bp, Mus musculus
  siRNA target sequence for C630029K18Rik (NM_144871.2,2546-2564).
gtgaaacctgtgaaacact

SEQ ID NO: 754562 - DNA, 19 bp, Mus musculus
  siRNA target sequence for C630029K18Rik (NM_144871.2,2552-2570).
cctgtgaaacacttagcaa

SEQ ID NO: 754563 - DNA, 19 bp, Mus musculus
  siRNA target sequence for C630029K18Rik (NM_144871.2,2729-2747).
gcacccgacagcttcacaa

SEQ ID NO: 754564 - DNA, 19 bp, Mus musculus
  siRNA target sequence for C630029K18Rik (NM_144871.2,2730-2748).
cacccgacagcttcacaaa

SEQ ID NO: 754565 - DNA, 19 bp, Mus musculus
  siRNA target sequence for C630029K18Rik (NM_144871.2,2913-2931).
ccaagatcagcatcaaact

SEQ ID NO: 754566 - DNA, 19 bp, Mus musculus
  siRNA target sequence for C630029K18Rik (NM_144871.2,3259-3277).
gcggctgaggctaattgtt

SEQ ID NO: 754567 - DNA, 19 bp, Mus musculus
  siRNA target sequence for C630029K18Rik (NM_144871.2,3267-3285).
ggctaattgttggtaaaga

SEQ ID NO: 754568 - DNA, 19 bp, Mus musculus
  siRNA target sequence for C630029K18Rik (NM_144871.2,3269-3287).
ctaattgttggtaaagact

SEQ ID NO: 754569 - DNA, 19 bp, Mus musculus
  siRNA target sequence for C630029K18Rik (NM_144871.2,3279-3297).
gtaaagactccatagatat

SEQ ID NO: 754570 - DNA, 19 bp, Mus musculus
  siRNA target sequence for C630029K18Rik (NM_144871.2,3289-3307).
catagatattgacatttct

SEQ ID NO: 754571 - DNA, 19 bp, Mus musculus
  siRNA target sequence for BC022146 (NM_144872.1,396-414).
gcagggctctggcatatca

SEQ ID NO: 754572 - DNA, 19 bp, Mus musculus
  siRNA target sequence for BC022146 (NM_144872.1,767-785).
cctcagctaacctgctatt

SEQ ID NO: 754573 - DNA, 19 bp, Mus musculus
  siRNA target sequence for BC022146 (NM_144872.1,847-865).
ggatctcggaggagcaatt

SEQ ID NO: 754574 - DNA, 19 bp, Mus musculus
  siRNA target sequence for BC022146 (NM_144872.1,848-866).
gatctcggaggagcaatta

SEQ ID NO: 754575 - DNA, 19 bp, Mus musculus
  siRNA target sequence for BC022146 (NM_144872.1,851-869).
ctcggaggagcaattataa

SEQ ID NO: 754576 - DNA, 19 bp, Mus musculus
  siRNA target sequence for BC022146 (NM_144872.1,853-871).
cggaggagcaattataact

SEQ ID NO: 754577 - DNA, 19 bp, Mus musculus
  siRNA target sequence for BC022146 (NM_144872.1,930-948).
gtctggcatccgaagtctt

SEQ ID NO: 754578 - DNA, 19 bp, Mus musculus
  siRNA target sequence for BC022146 (NM_144872.1,984-1002).
gagcctcgactgggtttat

SEQ ID NO: 754579 - DNA, 19 bp, Mus musculus
  siRNA target sequence for BC022146 (NM_144872.1,1005-1023).
gtacaggggtcgtgattct

SEQ ID NO: 754580 - DNA, 19 bp, Mus musculus
  siRNA target sequence for BC022146 (NM_144872.1,1016-1034).
gtgattctcgctctaatct

SEQ ID NO: 754581 - DNA, 19 bp, Mus musculus
  siRNA target sequence for BC022146 (NM_144872.1,1018-1036).
gattctcgctctaatctat

SEQ ID NO: 754582 - DNA, 19 bp, Mus musculus
  siRNA target sequence for BC022146 (NM_144872.1,1022-1040).
ctcgctctaatctatttgt

SEQ ID NO: 754583 - DNA, 19 bp, Mus musculus
  siRNA target sequence for BC022146 (NM_144872.1,1349-1367).
cggatcaaggtgcttttct

SEQ ID NO: 754584 - DNA, 19 bp, Mus musculus
  siRNA target sequence for BC022146 (NM_144872.1,1426-1444).
gtgaagctggctgagatta

SEQ ID NO: 754585 - DNA, 19 bp, Mus musculus
  siRNA target sequence for BC022146 (NM_144872.1,1435-1453).
gctgagattaagagtacaa

SEQ ID NO: 754586 - DNA, 19 bp, Mus musculus
  siRNA target sequence for BC022146 (NM_144872.1,1436-1454).
ctgagattaagagtacaaa

SEQ ID NO: 754587 - DNA, 19 bp, Mus musculus
  siRNA target sequence for BC022146 (NM_144872.1,1487-1505).
gtgacagcagctgtattgt

SEQ ID NO: 754588 - DNA, 19 bp, Mus musculus
  siRNA target sequence for BC022146 (NM_144872.1,1520-1538).
cgcatgtccacttttggaa

SEQ ID NO: 754589 - DNA, 19 bp, Mus musculus
  siRNA target sequence for BC022146 (NM_144872.1,1696-1714).
ggtcgaagtgtctcagatt

SEQ ID NO: 754590 - DNA, 19 bp, Mus musculus
  siRNA target sequence for BC022146 (NM_144872.1,1892-1910).
cagagattccagaacactt

SEQ ID NO: 754591 - DNA, 19 bp, Mus musculus
  siRNA target sequence for BC022146 (NM_144872.1,1964-1982).
ccacaaagaatgcattact

SEQ ID NO: 754592 - DNA, 19 bp, Mus musculus
  siRNA target sequence for BC022146 (NM_144872.1,2138-2156).
ggagcatggacctaaagga

SEQ ID NO: 754593 - DNA, 19 bp, Mus musculus
  siRNA target sequence for BC022146 (NM_144872.1,2149-2167).
ctaaaggagacgggtttat

SEQ ID NO: 754594 - DNA, 19 bp, Mus musculus
  siRNA target sequence for BC022146 (NM_144872.1,2316-2334).
gttgtacctggctattggt

SEQ ID NO: 754595 - DNA, 19 bp, Mus musculus
  siRNA target sequence for BC022146 (NM_144872.1,2346-2364).
catgatctacatctatagt

SEQ ID NO: 754596 - DNA, 19 bp, Mus musculus
  siRNA target sequence for BC022146 (NM_144872.1,2349-2367).
gatctacatctatagtgtt

SEQ ID NO: 754597 - DNA, 19 bp, Mus musculus
  siRNA target sequence for BC022146 (NM_144872.1,2412-2430).
gcactccagttttatcact

SEQ ID NO: 754598 - DNA, 19 bp, Mus musculus
  siRNA target sequence for BC022146 (NM_144872.1,2449-2467).
gatgggaatttcatcatgt

SEQ ID NO: 754599 - DNA, 19 bp, Mus musculus
  siRNA target sequence for BC022146 (NM_144872.1,2468-2486).
ccaattctggggattatga

SEQ ID NO: 754600 - DNA, 19 bp, Mus musculus
  siRNA target sequence for BC022146 (NM_144872.1,2477-2495).
gggattatgagattcttta

SEQ ID NO: 754601 - DNA, 19 bp, Mus musculus
  siRNA target sequence for BC022146 (NM_144872.1,2524-2542).
ctgaggaaccgctatgaga

SEQ ID NO: 754602 - DNA, 19 bp, Mus musculus
  siRNA target sequence for BC022146 (NM_144872.1,2550-2568).
ccgggagtgggctacctat

SEQ ID NO: 754603 - DNA, 19 bp, Mus musculus
  siRNA target sequence for BC022146 (NM_144872.1,2551-2569).
cgggagtgggctacctata

SEQ ID NO: 754604 - DNA, 19 bp, Mus musculus
  siRNA target sequence for BC022146 (NM_144872.1,2728-2746).
gcgccaagtcgtatgtact

SEQ ID NO: 754605 - DNA, 19 bp, Mus musculus
  siRNA target sequence for BC022146 (NM_144872.1,2875-2893).
cctgccacaccatctagaa

SEQ ID NO: 754606 - DNA, 19 bp, Mus musculus
  siRNA target sequence for B130052G07Rik (NM_144879.1,461-479).
cctggctaagccttcaatt

SEQ ID NO: 754607 - DNA, 19 bp, Mus musculus
  siRNA target sequence for B130052G07Rik (NM_144879.1,604-622).
gacctctgagcgggttaat

SEQ ID NO: 754608 - DNA, 19 bp, Mus musculus
  siRNA target sequence for B130052G07Rik (NM_144879.1,723-741).
cggttccctatcagcttta

SEQ ID NO: 754609 - DNA, 19 bp, Mus musculus
  siRNA target sequence for B130052G07Rik (NM_144879.1,724-742).
ggttccctatcagctttaa

SEQ ID NO: 754610 - DNA, 19 bp, Mus musculus
  siRNA target sequence for B130052G07Rik (NM_144879.1,729-747).
cctatcagctttaaaacct

SEQ ID NO: 754611 - DNA, 19 bp, Mus musculus
  siRNA target sequence for B130052G07Rik (NM_144879.1,885-903).
gacttcgaagattcctata

SEQ ID NO: 754612 - DNA, 19 bp, Mus musculus
  siRNA target sequence for B130052G07Rik (NM_144879.1,1170-1188).
ctcggcaggcgagacaaat

SEQ ID NO: 754613 - DNA, 19 bp, Mus musculus
  siRNA target sequence for 2810432O22Rik (NM_144881.2,136-154).
cttccgctctttctatgaa

SEQ ID NO: 754614 - DNA, 19 bp, Mus musculus
  siRNA target sequence for 2810432O22Rik (NM_144881.2,139-157).
ccgctctttctatgaagtt

SEQ ID NO: 754615 - DNA, 19 bp, Mus musculus
  siRNA target sequence for 2810432O22Rik (NM_144881.2,140-158).
cgctctttctatgaagttt

SEQ ID NO: 754616 - DNA, 19 bp, Mus musculus
  siRNA target sequence for 2810432O22Rik (NM_144881.2,206-224).
ctggagatggacactctat

SEQ ID NO: 754617 - DNA, 19 bp, Mus musculus
  siRNA target sequence for 2810432O22Rik (NM_144881.2,211-229).
gatggacactctatttgga

SEQ ID NO: 754618 - DNA, 19 bp, Mus musculus
  siRNA target sequence for 2810432O22Rik (NM_144881.2,238-256).
gaaggacccgactgatttt

SEQ ID NO: 754619 - DNA, 19 bp, Mus musculus
  siRNA target sequence for 2810432O22Rik (NM_144881.2,242-260).
gacccgactgattttgagt

SEQ ID NO: 754620 - DNA, 19 bp, Mus musculus
  siRNA target sequence for 2810432O22Rik (NM_144881.2,336-354).
ccacgttactcacaaagaa

SEQ ID NO: 754621 - DNA, 19 bp, Mus musculus
  siRNA target sequence for 2810432O22Rik (NM_144881.2,519-537).
ccctaaggctgcaaagtgt

SEQ ID NO: 754622 - DNA, 19 bp, Mus musculus
  siRNA target sequence for 2810432O22Rik (NM_144881.2,530-548).
caaagtgtggaggaagtta

SEQ ID NO: 754623 - DNA, 19 bp, Mus musculus
  siRNA target sequence for 2810432O22Rik (NM_144881.2,567-585).
cagagaacgagtattacct

SEQ ID NO: 754624 - DNA, 19 bp, Mus musculus
  siRNA target sequence for 2810432O22Rik (NM_144881.2,603-621).
ctgttcgctgcctgtacta

SEQ ID NO: 754625 - DNA, 19 bp, Mus musculus
  siRNA target sequence for 2810432O22Rik (NM_144881.2,605-623).
gttcgctgcctgtactaca

SEQ ID NO: 754626 - DNA, 19 bp, Mus musculus
  siRNA target sequence for 2810432O22Rik (NM_144881.2,713-731).
ctgacctacgtcttctatt

SEQ ID NO: 754627 - DNA, 19 bp, Mus musculus
  siRNA target sequence for 2810432O22Rik (NM_144881.2,715-733).
gacctacgtcttctattat

SEQ ID NO: 754628 - DNA, 19 bp, Mus musculus
  siRNA target sequence for 2810432O22Rik (NM_144881.2,814-832).
gcacagcctctgcattgta

SEQ ID NO: 754629 - DNA, 19 bp, Mus musculus
  siRNA target sequence for 2810432O22Rik (NM_144881.2,1115-1133).
gatgttggactacacaatt

SEQ ID NO: 754630 - DNA, 19 bp, Mus musculus
  siRNA target sequence for 2810432O22Rik (NM_144881.2,1122-1140).
gactacacaatttcttaat

SEQ ID NO: 754631 - DNA, 19 bp, Mus musculus
  siRNA target sequence for 2810432O22Rik (NM_144881.2,1186-1204).
ggggacactgctttctact

SEQ ID NO: 754632 - DNA, 19 bp, Mus musculus
  siRNA target sequence for 2810432O22Rik (NM_144881.2,1520-1538).
ggattcctgtactgctatt

SEQ ID NO: 754633 - DNA, 19 bp, Mus musculus
  siRNA target sequence for 2810022L02Rik (NM_144882.2,273-291).
ctcatgtgaacatcaaaga

SEQ ID NO: 754634 - DNA, 19 bp, Mus musculus
  siRNA target sequence for 2810022L02Rik (NM_144882.2,295-313).
gatctacgcagttagatca

SEQ ID NO: 754635 - DNA, 19 bp, Mus musculus
  siRNA target sequence for 2810022L02Rik (NM_144882.2,298-316).
ctacgcagttagatcagtt

SEQ ID NO: 754636 - DNA, 19 bp, Mus musculus
  siRNA target sequence for 2810022L02Rik (NM_144882.2,301-319).
cgcagttagatcagttgtt

SEQ ID NO: 754637 - DNA, 19 bp, Mus musculus
  siRNA target sequence for 2810022L02Rik (NM_144882.2,314-332).
gttgttccgaacaaaagca

SEQ ID NO: 754638 - DNA, 19 bp, Mus musculus
  siRNA target sequence for 2810022L02Rik (NM_144882.2,317-335).
gttccgaacaaaagcaata

SEQ ID NO: 754639 - DNA, 19 bp, Mus musculus
  siRNA target sequence for 2810022L02Rik (NM_144882.2,349-367).
ggtactccaacagtttgat

SEQ ID NO: 754640 - DNA, 19 bp, Mus musculus
  siRNA target sequence for 2810022L02Rik (NM_144882.2,353-371).
ctccaacagtttgatttta

SEQ ID NO: 754641 - DNA, 19 bp, Mus musculus
  siRNA target sequence for 2810022L02Rik (NM_144882.2,408-426).
gtgctattcaagttcttaa

SEQ ID NO: 754642 - DNA, 19 bp, Mus musculus
  siRNA target sequence for 2810022L02Rik (NM_144882.2,484-502).
gcagcatcaaggcaacaaa

SEQ ID NO: 754643 - DNA, 19 bp, Mus musculus
  siRNA target sequence for 2810022L02Rik (NM_144882.2,487-505).
gcatcaaggcaacaaagat

SEQ ID NO: 754644 - DNA, 19 bp, Mus musculus
  siRNA target sequence for 2810022L02Rik (NM_144882.2,551-569).
caggcaccactggtacaaa

SEQ ID NO: 754645 - DNA, 19 bp, Mus musculus
  siRNA target sequence for 2810022L02Rik (NM_144882.2,553-571).
ggcaccactggtacaaaat

SEQ ID NO: 754646 - DNA, 19 bp, Mus musculus
  siRNA target sequence for 2810022L02Rik (NM_144882.2,634-652).
cctcacaccacgtgagaaa

SEQ ID NO: 754647 - DNA, 19 bp, Mus musculus
  siRNA target sequence for 2810022L02Rik (NM_144882.2,639-657).
caccacgtgagaaaaagat

SEQ ID NO: 754648 - DNA, 19 bp, Mus musculus
  siRNA target sequence for 2810022L02Rik (NM_144882.2,641-659).
ccacgtgagaaaaagatct

SEQ ID NO: 754649 - DNA, 19 bp, Mus musculus
  siRNA target sequence for 2810022L02Rik (NM_144882.2,742-760).
gaaccccagagcgattcat

SEQ ID NO: 754650 - DNA, 19 bp, Mus musculus
  siRNA target sequence for 2810022L02Rik (NM_144882.2,823-841).
gcctaaggcaaaaacatct

SEQ ID NO: 754651 - DNA, 19 bp, Mus musculus
  siRNA target sequence for 2810022L02Rik (NM_144882.2,831-849).
caaaaacatctcctgttaa

SEQ ID NO: 754652 - DNA, 19 bp, Mus musculus
  siRNA target sequence for 2810022L02Rik (NM_144882.2,863-881).
gcagctcatcttgaaataa

SEQ ID NO: 754653 - DNA, 19 bp, Mus musculus
  siRNA target sequence for 2810022L02Rik (NM_144882.2,901-919).
gaaaagaggcccaaatatt

SEQ ID NO: 754654 - DNA, 19 bp, Mus musculus
  siRNA target sequence for 2810022L02Rik (NM_144882.2,906-924).
gaggcccaaatattgagaa

SEQ ID NO: 754655 - DNA, 19 bp, Mus musculus
  siRNA target sequence for 2810022L02Rik (NM_144882.2,963-981).
cgagataccgcgtcatgat

SEQ ID NO: 754656 - DNA, 19 bp, Mus musculus
  siRNA target sequence for 2810022L02Rik (NM_144882.2,966-984).
gataccgcgtcatgatcaa

SEQ ID NO: 754657 - DNA, 19 bp, Mus musculus
  siRNA target sequence for 2810022L02Rik (NM_144882.2,995-1013).
gacagttccgtgaagaaga

SEQ ID NO: 754658 - DNA, 19 bp, Mus musculus
  siRNA target sequence for 2810022L02Rik (NM_144882.2,1045-1063).
catcattgacaaagaagtt

SEQ ID NO: 754659 - DNA, 19 bp, Mus musculus
  siRNA target sequence for 2810022L02Rik (NM_144882.2,1048-1066).
cattgacaaagaagtttca

SEQ ID NO: 754660 - DNA, 19 bp, Mus musculus
  siRNA target sequence for 2810022L02Rik (NM_144882.2,1072-1090).
ggcagaaatggacaaagtt

SEQ ID NO: 754661 - DNA, 19 bp, Mus musculus
  siRNA target sequence for 2810022L02Rik (NM_144882.2,1267-1285).
ctcctgtgacattgaacaa

SEQ ID NO: 754662 - DNA, 19 bp, Mus musculus
  siRNA target sequence for 2810022L02Rik (NM_144882.2,1269-1287).
cctgtgacattgaacaact

SEQ ID NO: 754663 - DNA, 19 bp, Mus musculus
  siRNA target sequence for 2810022L02Rik (NM_144882.2,1272-1290).
gtgacattgaacaactgaa

SEQ ID NO: 754664 - DNA, 19 bp, Mus musculus
  siRNA target sequence for 2810022L02Rik (NM_144882.2,1301-1319).
ctgatctgtggagaaatta

SEQ ID NO: 754665 - DNA, 19 bp, Mus musculus
  siRNA target sequence for 2810022L02Rik (NM_144882.2,1398-1416).
ccgggaaacaggggaattt

SEQ ID NO: 754666 - DNA, 19 bp, Mus musculus
  siRNA target sequence for 2810022L02Rik (NM_144882.2,1514-1532).
cagaccatgcccactaaca

SEQ ID NO: 754667 - DNA, 19 bp, Mus musculus
  siRNA target sequence for 2810022L02Rik (NM_144882.2,1551-1569).
ccagccaaagacgaagatt

SEQ ID NO: 754668 - DNA, 19 bp, Mus musculus
  siRNA target sequence for 2810022L02Rik (NM_144882.2,1566-1584).
gatttaatccacagtatca

SEQ ID NO: 754669 - DNA, 19 bp, Mus musculus
  siRNA target sequence for 2810022L02Rik (NM_144882.2,1609-1627).
gtcacagggtggtggtaat

SEQ ID NO: 754670 - DNA, 19 bp, Mus musculus
  siRNA target sequence for 2810022L02Rik (NM_144882.2,1650-1668).
gcaacagccgccatgaaca

SEQ ID NO: 754671 - DNA, 19 bp, Mus musculus
  siRNA target sequence for 2810022L02Rik (NM_144882.2,1669-1687).
cagaagacagccacataat

SEQ ID NO: 754672 - DNA, 19 bp, Mus musculus
  siRNA target sequence for 2810022L02Rik (NM_144882.2,1688-1706).
ggtttccgtcccaaaaaca

SEQ ID NO: 754673 - DNA, 19 bp, Mus musculus
  siRNA target sequence for 2810022L02Rik (NM_144882.2,1689-1707).
gtttccgtcccaaaaacaa

SEQ ID NO: 754674 - DNA, 19 bp, Mus musculus
  siRNA target sequence for 2810022L02Rik (NM_144882.2,1792-1810).
gcatgctgcagacaactta

SEQ ID NO: 754675 - DNA, 19 bp, Mus musculus
  siRNA target sequence for 2810022L02Rik (NM_144882.2,1819-1837).
gcctttccggggtaatgtt

SEQ ID NO: 754676 - DNA, 19 bp, Mus musculus
  siRNA target sequence for 2810022L02Rik (NM_144882.2,1843-1861).
ggtttcacagtgcaatctt

SEQ ID NO: 754677 - DNA, 19 bp, Mus musculus
  siRNA target sequence for 2810022L02Rik (NM_144882.2,1844-1862).
gtttcacagtgcaatcttt

SEQ ID NO: 754678 - DNA, 19 bp, Mus musculus
  siRNA target sequence for 5430407P10Rik (NM_144883.1,447-465).
gttcgcggtccagaagttt

SEQ ID NO: 754679 - DNA, 19 bp, Mus musculus
  siRNA target sequence for 5430407P10Rik (NM_144883.1,452-470).
cggtccagaagtttcacta

SEQ ID NO: 754680 - DNA, 19 bp, Mus musculus
  siRNA target sequence for 5430407P10Rik (NM_144883.1,453-471).
ggtccagaagtttcactat

SEQ ID NO: 754681 - DNA, 19 bp, Mus musculus
  siRNA target sequence for 5430407P10Rik (NM_144883.1,514-532).
cgttatcctgttctttgaa

SEQ ID NO: 754682 - DNA, 19 bp, Mus musculus
  siRNA target sequence for 5430407P10Rik (NM_144883.1,644-662).
cccgaagatgtcatcgatt

SEQ ID NO: 754683 - DNA, 19 bp, Mus musculus
  siRNA target sequence for 5430407P10Rik (NM_144883.1,645-663).
ccgaagatgtcatcgattt

SEQ ID NO: 754684 - DNA, 19 bp, Mus musculus
  siRNA target sequence for 5430407P10Rik (NM_144883.1,646-664).
cgaagatgtcatcgattta

SEQ ID NO: 754685 - DNA, 19 bp, Mus musculus
  siRNA target sequence for 5430407P10Rik (NM_144883.1,693-711).
ctgagagccttccagatat

SEQ ID NO: 754686 - DNA, 19 bp, Mus musculus
  siRNA target sequence for 5430407P10Rik (NM_144883.1,816-834).
gccctgaggtgtttccttt

SEQ ID NO: 754687 - DNA, 19 bp, Mus musculus
  siRNA target sequence for 5430407P10Rik (NM_144883.1,1121-1139).
cgcttccccagcaacataa

SEQ ID NO: 754688 - DNA, 19 bp, Mus musculus
  siRNA target sequence for 5430407P10Rik (NM_144883.1,1180-1198).
ctccaaggcggctgtcaat

SEQ ID NO: 754689 - DNA, 19 bp, Mus musculus
  siRNA target sequence for 5430407P10Rik (NM_144883.1,1182-1200).
ccaaggcggctgtcaatgt

SEQ ID NO: 754690 - DNA, 19 bp, Mus musculus
  siRNA target sequence for 5430407P10Rik (NM_144883.1,1563-1581).
ccagccgcagcctatacga

SEQ ID NO: 754691 - DNA, 19 bp, Mus musculus
  siRNA target sequence for BC005624 (NM_144885.1,29-47).
gcggattactgggaaaaca

SEQ ID NO: 754692 - DNA, 19 bp, Mus musculus
  siRNA target sequence for BC005624 (NM_144885.1,30-48).
cggattactgggaaaacat

SEQ ID NO: 754693 - DNA, 19 bp, Mus musculus
  siRNA target sequence for D430028G21Rik (NM_144888.1,286-304).
gctgaggacaagacctata

SEQ ID NO: 754694 - DNA, 19 bp, Mus musculus
  siRNA target sequence for D430028G21Rik (NM_144888.1,287-305).
ctgaggacaagacctataa

SEQ ID NO: 754695 - DNA, 19 bp, Mus musculus
  siRNA target sequence for D430028G21Rik (NM_144888.1,439-457).
ctctggggactcttcaata

SEQ ID NO: 754696 - DNA, 19 bp, Mus musculus
  siRNA target sequence for D430028G21Rik (NM_144888.1,443-461).
ggggactcttcaataatct

SEQ ID NO: 754697 - DNA, 19 bp, Mus musculus
  siRNA target sequence for D430028G21Rik (NM_144888.1,538-556).
gtgactcgagtttatcaga

SEQ ID NO: 754698 - DNA, 19 bp, Mus musculus
  siRNA target sequence for D430028G21Rik (NM_144888.1,725-743).
cagagtccccagtagagaa

SEQ ID NO: 754699 - DNA, 19 bp, Mus musculus
  siRNA target sequence for D430028G21Rik (NM_144888.1,727-745).
gagtccccagtagagaatt

SEQ ID NO: 754700 - DNA, 19 bp, Mus musculus
  siRNA target sequence for D430028G21Rik (NM_144888.1,1041-1059).
gtccactggatcagctttt

SEQ ID NO: 754701 - DNA, 19 bp, Mus musculus
  siRNA target sequence for D430028G21Rik (NM_144888.1,1149-1167).
cagattggtcccagtaaaa

SEQ ID NO: 754702 - DNA, 19 bp, Mus musculus
  siRNA target sequence for D430028G21Rik (NM_144888.1,1232-1250).
ccaatacagcgccatcaaa

SEQ ID NO: 754703 - DNA, 19 bp, Mus musculus
  siRNA target sequence for D430028G21Rik (NM_144888.1,1233-1251).
caatacagcgccatcaaaa

SEQ ID NO: 754704 - DNA, 19 bp, Mus musculus
  siRNA target sequence for D430028G21Rik (NM_144888.1,1375-1393).
ggtccagcaaccaaagtca

SEQ ID NO: 754705 - DNA, 19 bp, Mus musculus
  siRNA target sequence for D430028G21Rik (NM_144888.1,1570-1588).
gaggagaatgagtattcgt

SEQ ID NO: 754706 - DNA, 19 bp, Mus musculus
  siRNA target sequence for D430028G21Rik (NM_144888.1,1579-1597).
gagtattcgtcctttagaa

SEQ ID NO: 754707 - DNA, 19 bp, Mus musculus
  siRNA target sequence for D430028G21Rik (NM_144888.1,1614-1632).
ccccagtgctgatctatta

SEQ ID NO: 754708 - DNA, 19 bp, Mus musculus
  siRNA target sequence for D430028G21Rik (NM_144888.1,1678-1696).
gaacattgtgccagttcaa

SEQ ID NO: 754709 - DNA, 19 bp, Mus musculus
  siRNA target sequence for Psmf1 (NM_144889.1,123-141).
cgggtctcgaggttctctt

SEQ ID NO: 754710 - DNA, 19 bp, Mus musculus
  siRNA target sequence for Psmf1 (NM_144889.1,208-226).
ggtgacaaacggctactat

SEQ ID NO: 754711 - DNA, 19 bp, Mus musculus
  siRNA target sequence for Psmf1 (NM_144889.1,248-266).
ccaggtcccagtgataaga

SEQ ID NO: 754712 - DNA, 19 bp, Mus musculus
  siRNA target sequence for Psmf1 (NM_144889.1,249-267).
caggtcccagtgataagaa

SEQ ID NO: 754713 - DNA, 19 bp, Mus musculus
  siRNA target sequence for Psmf1 (NM_144889.1,251-269).
ggtcccagtgataagaaat

SEQ ID NO: 754714 - DNA, 19 bp, Mus musculus
  siRNA target sequence for Psmf1 (NM_144889.1,315-333).
ccctccggtatgagtctaa

SEQ ID NO: 754715 - DNA, 19 bp, Mus musculus
  siRNA target sequence for Psmf1 (NM_144889.1,319-337).
ccggtatgagtctaaggat

SEQ ID NO: 754716 - DNA, 19 bp, Mus musculus
  siRNA target sequence for Psmf1 (NM_144889.1,371-389).
gtggagaacggcatgatca

SEQ ID NO: 754717 - DNA, 19 bp, Mus musculus
  siRNA target sequence for Psmf1 (NM_144889.1,434-452).
ctgaacttagatgattata

SEQ ID NO: 754718 - DNA, 19 bp, Mus musculus
  siRNA target sequence for Psmf1 (NM_144889.1,473-491).
gacttccacaggacctata

SEQ ID NO: 754719 - DNA, 19 bp, Mus musculus
  siRNA target sequence for Psmf1 (NM_144889.1,559-577).
gaaggctcgtgcaaacagt

SEQ ID NO: 754720 - DNA, 19 bp, Mus musculus
  siRNA target sequence for BC018465 (NM_144890.1,231-249).
gagctcgttgacaagaaga

SEQ ID NO: 754721 - DNA, 19 bp, Mus musculus
  siRNA target sequence for BC018465 (NM_144890.1,325-343).
cagccgggttggtcataga

SEQ ID NO: 754722 - DNA, 19 bp, Mus musculus
  siRNA target sequence for BC018465 (NM_144890.1,328-346).
ccgggttggtcatagaaga

SEQ ID NO: 754723 - DNA, 19 bp, Mus musculus
  siRNA target sequence for BC018465 (NM_144890.1,329-347).
cgggttggtcatagaagat

SEQ ID NO: 754724 - DNA, 19 bp, Mus musculus
  siRNA target sequence for BC018465 (NM_144890.1,365-383).
caccctgcaaattctaagt

SEQ ID NO: 754725 - DNA, 19 bp, Mus musculus
  siRNA target sequence for BC018465 (NM_144890.1,367-385).
ccctgcaaattctaagtga

SEQ ID NO: 754726 - DNA, 19 bp, Mus musculus
  siRNA target sequence for BC018465 (NM_144890.1,412-430).
gcaagctgtacctctcatt

SEQ ID NO: 754727 - DNA, 19 bp, Mus musculus
  siRNA target sequence for BC018465 (NM_144890.1,475-493).
gagtacggctagaacagat

SEQ ID NO: 754728 - DNA, 19 bp, Mus musculus
  siRNA target sequence for BC018465 (NM_144890.1,639-657).
ctcctccagaagatagtgt

SEQ ID NO: 754729 - DNA, 19 bp, Mus musculus
  siRNA target sequence for BC018465 (NM_144890.1,666-684).
gccacaaacctgatcaact

SEQ ID NO: 754730 - DNA, 19 bp, Mus musculus
  siRNA target sequence for BC018465 (NM_144890.1,730-748).
ctggtcccgatgatttcca

SEQ ID NO: 754731 - DNA, 19 bp, Mus musculus
  siRNA target sequence for BC018465 (NM_144890.1,884-902).
gaacagcatggcagatctt

SEQ ID NO: 754732 - DNA, 19 bp, Mus musculus
  siRNA target sequence for BC018465 (NM_144890.1,1035-1053).
cccaaggcttataatctga

SEQ ID NO: 754733 - DNA, 19 bp, Mus musculus
  siRNA target sequence for BC018465 (NM_144890.1,1132-1150).
cccagcagggcttactgat

SEQ ID NO: 754734 - DNA, 19 bp, Mus musculus
  siRNA target sequence for BC018465 (NM_144890.1,1206-1224).
ggcgagttctccttaagga

SEQ ID NO: 754735 - DNA, 19 bp, Mus musculus
  siRNA target sequence for BC018465 (NM_144890.1,1279-1297).
cctaccccactatcattaa

SEQ ID NO: 754736 - DNA, 19 bp, Mus musculus
  siRNA target sequence for BC018465 (NM_144890.1,1353-1371).
ctgcctcaccacaatgagt

SEQ ID NO: 754737 - DNA, 19 bp, Mus musculus
  siRNA target sequence for Gdap1l (NM_144891.1,403-421).
gtgactatgaccagatcat

SEQ ID NO: 754738 - DNA, 19 bp, Mus musculus
  siRNA target sequence for Gdap1l (NM_144891.1,570-588).
cctgagctcaccacagatt

SEQ ID NO: 754739 - DNA, 19 bp, Mus musculus
  siRNA target sequence for Gdap1l (NM_144891.1,612-630).
gctgagatccgcagacatt

SEQ ID NO: 754740 - DNA, 19 bp, Mus musculus
  siRNA target sequence for Gdap1l (NM_144891.1,613-631).
ctgagatccgcagacattt

SEQ ID NO: 754741 - DNA, 19 bp, Mus musculus
  siRNA target sequence for Gdap1l (NM_144891.1,692-710).
gccctacctttctaaacaa

SEQ ID NO: 754742 - DNA, 19 bp, Mus musculus
  siRNA target sequence for Gdap1l (NM_144891.1,1085-1103).
gaaaccgccatccttcttt

SEQ ID NO: 754743 - DNA, 19 bp, Mus musculus
  siRNA target sequence for Gdap1l (NM_144891.1,1130-1148).
gggtgggatgggctacttt

SEQ ID NO: 754744 - DNA, 19 bp, Mus musculus
  siRNA target sequence for Gdap1l (NM_144891.1,1150-1168).
cctactggtacctcaagaa

SEQ ID NO: 754745 - DNA, 19 bp, Mus musculus
  siRNA target sequence for Gdap1l (NM_144891.1,1161-1179).
ctcaagaaaaaatacatct

SEQ ID NO: 754746 - DNA, 19 bp, Mus musculus
  siRNA target sequence for Spg20 (NM_144895.1,111-129).
gctgaaattaagatcatca

SEQ ID NO: 754747 - DNA, 19 bp, Mus musculus
  siRNA target sequence for Spg20 (NM_144895.1,140-158).
cgagaaggcctttatgttt

SEQ ID NO: 754748 - DNA, 19 bp, Mus musculus
  siRNA target sequence for Spg20 (NM_144895.1,201-219).
gaagcaaagaactattaca

SEQ ID NO: 754749 - DNA, 19 bp, Mus musculus
  siRNA target sequence for Spg20 (NM_144895.1,402-420).
caggatgtgcccaagctat

SEQ ID NO: 754750 - DNA, 19 bp, Mus musculus
  siRNA target sequence for Spg20 (NM_144895.1,424-442).
cagagttcccgcctaaaga

SEQ ID NO: 754751 - DNA, 19 bp, Mus musculus
  siRNA target sequence for Spg20 (NM_144895.1,462-480).
gagcaggagtccgttagta

SEQ ID NO: 754752 - DNA, 19 bp, Mus musculus
  siRNA target sequence for Spg20 (NM_144895.1,623-641).
ccactacactgtttcctat

SEQ ID NO: 754753 - DNA, 19 bp, Mus musculus
  siRNA target sequence for Spg20 (NM_144895.1,724-742).
ggctcgatgcagatgagtt

SEQ ID NO: 754754 - DNA, 19 bp, Mus musculus
  siRNA target sequence for Spg20 (NM_144895.1,754-772).
caaacggagtgcagatctt

SEQ ID NO: 754755 - DNA, 19 bp, Mus musculus
  siRNA target sequence for Spg20 (NM_144895.1,758-776).
cggagtgcagatctttttt

SEQ ID NO: 754756 - DNA, 19 bp, Mus musculus
  siRNA target sequence for Spg20 (NM_144895.1,830-848).
cgtgcggttcttggataat

SEQ ID NO: 754757 - DNA, 19 bp, Mus musculus
  siRNA target sequence for Spg20 (NM_144895.1,833-851).
gcggttcttggataattct

SEQ ID NO: 754758 - DNA, 19 bp, Mus musculus
  siRNA target sequence for Spg20 (NM_144895.1,899-917).
ctggttataccctctagtt

SEQ ID NO: 754759 - DNA, 19 bp, Mus musculus
  siRNA target sequence for Spg20 (NM_144895.1,994-1012).
gcttcgtaggggttgttct

SEQ ID NO: 754760 - DNA, 19 bp, Mus musculus
  siRNA target sequence for Spg20 (NM_144895.1,998-1016).
cgtaggggttgttctttca

SEQ ID NO: 754761 - DNA, 19 bp, Mus musculus
  siRNA target sequence for Spg20 (NM_144895.1,999-1017).
gtaggggttgttctttcat

SEQ ID NO: 754762 - DNA, 19 bp, Mus musculus
  siRNA target sequence for Spg20 (NM_144895.1,1181-1199).
caggcagtcaagttcttca

SEQ ID NO: 754763 - DNA, 19 bp, Mus musculus
  siRNA target sequence for Spg20 (NM_144895.1,1251-1269).
gggaaaaagaccaaagatt

SEQ ID NO: 754764 - DNA, 19 bp, Mus musculus
  siRNA target sequence for Spg20 (NM_144895.1,1315-1333).
gttcagaagaaaaatcgaa

SEQ ID NO: 754765 - DNA, 19 bp, Mus musculus
  siRNA target sequence for Spg20 (NM_144895.1,1342-1360).
ctgaatggagcgagaaagt

SEQ ID NO: 754766 - DNA, 19 bp, Mus musculus
  siRNA target sequence for Spg20 (NM_144895.1,1390-1408).
gggtgagctggggtttagt

SEQ ID NO: 754767 - DNA, 19 bp, Mus musculus
  siRNA target sequence for Spg20 (NM_144895.1,1392-1410).
gtgagctggggtttagtca

SEQ ID NO: 754768 - DNA, 19 bp, Mus musculus
  siRNA target sequence for Spg20 (NM_144895.1,1394-1412).
gagctggggtttagtcaaa

SEQ ID NO: 754769 - DNA, 19 bp, Mus musculus
  siRNA target sequence for Spg20 (NM_144895.1,1407-1425).
gtcaaaggtgctgaattta

SEQ ID NO: 754770 - DNA, 19 bp, Mus musculus
  siRNA target sequence for Spg20 (NM_144895.1,1419-1437).
gaatttactggcaaagcaa

SEQ ID NO: 754771 - DNA, 19 bp, Mus musculus
  siRNA target sequence for Spg20 (NM_144895.1,1511-1529).
caccaggggtctctacata

SEQ ID NO: 754772 - DNA, 19 bp, Mus musculus
  siRNA target sequence for Spg20 (NM_144895.1,1586-1604).
ctgcacagtagcgaattgt

SEQ ID NO: 754773 - DNA, 19 bp, Mus musculus
  siRNA target sequence for Spg20 (NM_144895.1,1588-1606).
gcacagtagcgaattgtgt

SEQ ID NO: 754774 - DNA, 19 bp, Mus musculus
  siRNA target sequence for Spg20 (NM_144895.1,1589-1607).
cacagtagcgaattgtgtt

SEQ ID NO: 754775 - DNA, 19 bp, Mus musculus
  siRNA target sequence for Spg20 (NM_144895.1,1597-1615).
cgaattgtgttggtaaaga

SEQ ID NO: 754776 - DNA, 19 bp, Mus musculus
  siRNA target sequence for Spg20 (NM_144895.1,1712-1730).
cgtggcagcgagtagtgtt

SEQ ID NO: 754777 - DNA, 19 bp, Mus musculus
  siRNA target sequence for Spg20 (NM_144895.1,1720-1738).
cgagtagtgttcaaggatt

SEQ ID NO: 754778 - DNA, 19 bp, Mus musculus
  siRNA target sequence for Spg20 (NM_144895.1,1767-1785).
gcagctaaatgcatcgtta

SEQ ID NO: 754779 - DNA, 19 bp, Mus musculus
  siRNA target sequence for Spg20 (NM_144895.1,1768-1786).
cagctaaatgcatcgttaa

SEQ ID NO: 754780 - DNA, 19 bp, Mus musculus
  siRNA target sequence for Spg20 (NM_144895.1,1770-1788).
gctaaatgcatcgttaaca

SEQ ID NO: 754781 - DNA, 19 bp, Mus musculus
  siRNA target sequence for Spg20 (NM_144895.1,1771-1789).
ctaaatgcatcgttaacaa

SEQ ID NO: 754782 - DNA, 19 bp, Mus musculus
  siRNA target sequence for Spg20 (NM_144895.1,1839-1857).
gcaggagaagctacacata

SEQ ID NO: 754783 - DNA, 19 bp, Mus musculus
  siRNA target sequence for Spg20 (NM_144895.1,1840-1858).
caggagaagctacacataa

SEQ ID NO: 754784 - DNA, 19 bp, Mus musculus
  siRNA target sequence for Spg20 (NM_144895.1,1861-1879).
cagtggattcagctatcaa

SEQ ID NO: 754785 - DNA, 19 bp, Mus musculus
  siRNA target sequence for MGC11722 (NM_144898.1,163-181).
cccgacgtcttgtacagaa

SEQ ID NO: 754786 - DNA, 19 bp, Mus musculus
  siRNA target sequence for MGC11722 (NM_144898.1,195-213).
gcatggccaggaaacctat

SEQ ID NO: 754787 - DNA, 19 bp, Mus musculus
  siRNA target sequence for MGC11722 (NM_144898.1,196-214).
catggccaggaaacctata

SEQ ID NO: 754788 - DNA, 19 bp, Mus musculus
  siRNA target sequence for MGC11722 (NM_144898.1,215-233).
cgcctcgactcatcctaat

SEQ ID NO: 754789 - DNA, 19 bp, Mus musculus
  siRNA target sequence for MGC11722 (NM_144898.1,218-236).
ctcgactcatcctaatgga

SEQ ID NO: 754790 - DNA, 19 bp, Mus musculus
  siRNA target sequence for MGC11722 (NM_144898.1,225-243).
catcctaatggatctgaaa

SEQ ID NO: 754791 - DNA, 19 bp, Mus musculus
  siRNA target sequence for MGC11722 (NM_144898.1,412-430).
gcctggagggccaaactga

SEQ ID NO: 754792 - DNA, 19 bp, Mus musculus
  siRNA target sequence for MGC11722 (NM_144898.1,413-431).
cctggagggccaaactgat

SEQ ID NO: 754793 - DNA, 19 bp, Mus musculus
  siRNA target sequence for MGC11722 (NM_144898.1,414-432).
ctggagggccaaactgatt

SEQ ID NO: 754794 - DNA, 19 bp, Mus musculus
  siRNA target sequence for MGC11722 (NM_144898.1,416-434).
ggagggccaaactgattca

SEQ ID NO: 754795 - DNA, 19 bp, Mus musculus
  siRNA target sequence for MGC11722 (NM_144898.1,419-437).
gggccaaactgattcagaa

SEQ ID NO: 754796 - DNA, 19 bp, Mus musculus
  siRNA target sequence for MGC11722 (NM_144898.1,796-814).
gagcctcagaaaaacatct

SEQ ID NO: 754797 - DNA, 19 bp, Mus musculus
  siRNA target sequence for MGC11722 (NM_144898.1,798-816).
gcctcagaaaaacatctat

SEQ ID NO: 754798 - DNA, 19 bp, Mus musculus
  siRNA target sequence for MGC11722 (NM_144898.1,822-840).
cttaaacacggcatttggt

SEQ ID NO: 754799 - DNA, 19 bp, Mus musculus
  siRNA target sequence for MGC11722 (NM_144898.1,1017-1035).
cctgcgctcctcaatggtt

SEQ ID NO: 754800 - DNA, 19 bp, Mus musculus
  siRNA target sequence for MGC11722 (NM_144898.1,1018-1036).
ctgcgctcctcaatggtta

SEQ ID NO: 754801 - DNA, 19 bp, Mus musculus
  siRNA target sequence for MGC11722 (NM_144898.1,1051-1069).
gctgatgtgctaagtttct

SEQ ID NO: 754802 - DNA, 19 bp, Mus musculus
  siRNA target sequence for MGC11722 (NM_144898.1,1310-1328).
gcgcctctggagaagaagt

SEQ ID NO: 754803 - DNA, 19 bp, Mus musculus
  siRNA target sequence for MGC11722 (NM_144898.1,1504-1522).
ggggccttgcgttcaactt

SEQ ID NO: 754804 - DNA, 19 bp, Mus musculus
  siRNA target sequence for MGC11722 (NM_144898.1,1506-1524).
ggccttgcgttcaacttca

SEQ ID NO: 754805 - DNA, 19 bp, Mus musculus
  siRNA target sequence for Tsrc1 (NM_144899.2,308-326).
gcgcaggagccgaacatgt

SEQ ID NO: 754806 - DNA, 19 bp, Mus musculus
  siRNA target sequence for Tsrc1 (NM_144899.2,1102-1120).
ctggggaaagtgaacagat

SEQ ID NO: 754807 - DNA, 19 bp, Mus musculus
  siRNA target sequence for Tsrc1 (NM_144899.2,1186-1204).
cctttgactcccaggaatt

SEQ ID NO: 754808 - DNA, 19 bp, Mus musculus
  siRNA target sequence for Tsrc1 (NM_144899.2,1280-1298).
ccgtggcttccgattctat

SEQ ID NO: 754809 - DNA, 19 bp, Mus musculus
  siRNA target sequence for Tsrc1 (NM_144899.2,1282-1300).
gtggcttccgattctatgt

SEQ ID NO: 754810 - DNA, 19 bp, Mus musculus
  siRNA target sequence for Tsrc1 (NM_144899.2,1462-1480).
gcctggtttcgggaaatct

SEQ ID NO: 754811 - DNA, 19 bp, Mus musculus
  siRNA target sequence for Tsrc1 (NM_144899.2,1464-1482).
ctggtttcgggaaatctca

SEQ ID NO: 754812 - DNA, 19 bp, Mus musculus
  siRNA target sequence for Tsrc1 (NM_144899.2,1559-1577).
gttgcgacccagttccaat

SEQ ID NO: 754813 - DNA, 19 bp, Mus musculus
  siRNA target sequence for Tsrc1 (NM_144899.2,1635-1653).
gatcctccagggtcctata

SEQ ID NO: 754814 - DNA, 19 bp, Mus musculus
  siRNA target sequence for Tsrc1 (NM_144899.2,1662-1680).
gggactgtcttccagtata

SEQ ID NO: 754815 - DNA, 19 bp, Mus musculus
  siRNA target sequence for Tsrc1 (NM_144899.2,1663-1681).
ggactgtcttccagtataa

SEQ ID NO: 754816 - DNA, 19 bp, Mus musculus
  siRNA target sequence for Tsrc1 (NM_144899.2,1746-1764).
gtggacgtctatatgatct

SEQ ID NO: 754817 - DNA, 19 bp, Mus musculus
  siRNA target sequence for Tsrc1 (NM_144899.2,1748-1766).
ggacgtctatatgatcttt

SEQ ID NO: 754818 - DNA, 19 bp, Mus musculus
  siRNA target sequence for Tsrc1 (NM_144899.2,1751-1769).
cgtctatatgatctttcaa

SEQ ID NO: 754819 - DNA, 19 bp, Mus musculus
  siRNA target sequence for Tsrc1 (NM_144899.2,1780-1798).
caggtgttttttatcagta

SEQ ID NO: 754820 - DNA, 19 bp, Mus musculus
  siRNA target sequence for Tsrc1 (NM_144899.2,2002-2020).
ctggatactggaaacaagt

SEQ ID NO: 754821 - DNA, 19 bp, Mus musculus
  siRNA target sequence for Tsrc1 (NM_144899.2,2056-2074).
gtgtttggcaccccatttt

SEQ ID NO: 754822 - DNA, 19 bp, Mus musculus
  siRNA target sequence for Tsrc1 (NM_144899.2,2358-2376).
ggccactgggagattagct

SEQ ID NO: 754823 - DNA, 19 bp, Mus musculus
  siRNA target sequence for Tsrc1 (NM_144899.2,2791-2809).
cacaacacagagacattat

SEQ ID NO: 754824 - DNA, 19 bp, Mus musculus
  siRNA target sequence for Tsrc1 (NM_144899.2,3085-3103).
gaccagatgaccaatgcaa

SEQ ID NO: 754825 - DNA, 19 bp, Mus musculus
  siRNA target sequence for Tsrc1 (NM_144899.2,3150-3168).
gtctacccctactacacaa

SEQ ID NO: 754826 - DNA, 19 bp, Mus musculus
  siRNA target sequence for 3110007P09Rik (NM_144906.1,199-217).
ggaaggactgaaaaaacgt

SEQ ID NO: 754827 - DNA, 19 bp, Mus musculus
  siRNA target sequence for 3110007P09Rik (NM_144906.1,305-323).
cacgagccaccctaccata

SEQ ID NO: 754828 - DNA, 19 bp, Mus musculus
  siRNA target sequence for 3110007P09Rik (NM_144906.1,377-395).
ggggcaccaaatggatttt

SEQ ID NO: 754829 - DNA, 19 bp, Mus musculus
  siRNA target sequence for 3110007P09Rik (NM_144906.1,378-396).
gggcaccaaatggatttta

SEQ ID NO: 754830 - DNA, 19 bp, Mus musculus
  siRNA target sequence for 3110007P09Rik (NM_144906.1,379-397).
ggcaccaaatggattttat

SEQ ID NO: 754831 - DNA, 19 bp, Mus musculus
  siRNA target sequence for 3110007P09Rik (NM_144906.1,466-484).
ggaaccaggctctaccaaa

SEQ ID NO: 754832 - DNA, 19 bp, Mus musculus
  siRNA target sequence for 3110007P09Rik (NM_144906.1,493-511).
cttttattcctcaagtgaa

SEQ ID NO: 754833 - DNA, 19 bp, Mus musculus
  siRNA target sequence for 3110007P09Rik (NM_144906.1,527-545).
gagtcgcacaagaaattca

SEQ ID NO: 754834 - DNA, 19 bp, Mus musculus
  siRNA target sequence for 3110007P09Rik (NM_144906.1,675-693).
cgggtgcaattaaaaggaa

SEQ ID NO: 754835 - DNA, 19 bp, Mus musculus
  siRNA target sequence for 3110007P09Rik (NM_144906.1,680-698).
gcaattaaaaggaacttat

SEQ ID NO: 754836 - DNA, 19 bp, Mus musculus
  siRNA target sequence for 3110007P09Rik (NM_144906.1,832-850).
gacggaagttcttttagat

SEQ ID NO: 754837 - DNA, 19 bp, Mus musculus
  siRNA target sequence for 3110007P09Rik (NM_144906.1,1096-1114).
caagtctgttgctgttaat

SEQ ID NO: 754838 - DNA, 19 bp, Mus musculus
  siRNA target sequence for 3110007P09Rik (NM_144906.1,1099-1117).
gtctgttgctgttaatact

SEQ ID NO: 754839 - DNA, 19 bp, Mus musculus
  siRNA target sequence for 3110007P09Rik (NM_144906.1,1298-1316).
gtaccatctccgctcaatt

SEQ ID NO: 754840 - DNA, 19 bp, Mus musculus
  siRNA target sequence for 3110007P09Rik (NM_144906.1,1302-1320).
catctccgctcaatttaga

SEQ ID NO: 754841 - DNA, 19 bp, Mus musculus
  siRNA target sequence for 3110007P09Rik (NM_144906.1,1340-1358).
gctgagcagaccttcatta

SEQ ID NO: 754842 - DNA, 19 bp, Mus musculus
  siRNA target sequence for 3110007P09Rik (NM_144906.1,1625-1643).
gatgtgtccagacctttta

SEQ ID NO: 754843 - DNA, 19 bp, Mus musculus
  siRNA target sequence for 3110007P09Rik (NM_144906.1,1693-1711).
ggctgaaagcacttcttca

SEQ ID NO: 754844 - DNA, 19 bp, Mus musculus
  siRNA target sequence for 3110007P09Rik (NM_144906.1,1695-1713).
ctgaaagcacttcttcaat

SEQ ID NO: 754845 - DNA, 19 bp, Mus musculus
  siRNA target sequence for 3110007P09Rik (NM_144906.1,1707-1725).
cttcaatatcgtcaactaa

SEQ ID NO: 754846 - DNA, 19 bp, Mus musculus
  siRNA target sequence for 3110007P09Rik (NM_144906.1,1810-1828).
ggtcgcagcagctttcaca

SEQ ID NO: 754847 - DNA, 19 bp, Mus musculus
  siRNA target sequence for 3110007P09Rik (NM_144906.1,1862-1880).
ccaagcaagtgcattgtta

SEQ ID NO: 754848 - DNA, 19 bp, Mus musculus
  siRNA target sequence for 3110007P09Rik (NM_144906.1,1863-1881).
caagcaagtgcattgttaa

SEQ ID NO: 754849 - DNA, 19 bp, Mus musculus
  siRNA target sequence for 3110007P09Rik (NM_144906.1,2036-2054).
caaaatgatgccaatacca

SEQ ID NO: 754850 - DNA, 19 bp, Mus musculus
  siRNA target sequence for 3110007P09Rik (NM_144906.1,2045-2063).
gccaataccaaggaattct

SEQ ID NO: 754851 - DNA, 19 bp, Mus musculus
  siRNA target sequence for 3110007P09Rik (NM_144906.1,2098-2116).
gaaagtctctgaacaaaaa

SEQ ID NO: 754852 - DNA, 19 bp, Mus musculus
  siRNA target sequence for 3110007P09Rik (NM_144906.1,2118-2136).
cccaggctacatactataa

SEQ ID NO: 754853 - DNA, 19 bp, Mus musculus
  siRNA target sequence for 3110007P09Rik (NM_144906.1,2119-2137).
ccaggctacatactataat

SEQ ID NO: 754854 - DNA, 19 bp, Mus musculus
  siRNA target sequence for 3110007P09Rik (NM_144906.1,2229-2247).
ctgacctgcgcatagacta

SEQ ID NO: 754855 - DNA, 19 bp, Mus musculus
  siRNA target sequence for 3110007P09Rik (NM_144906.1,2231-2249).
gacctgcgcatagactata

SEQ ID NO: 754856 - DNA, 19 bp, Mus musculus
  siRNA target sequence for 3110007P09Rik (NM_144906.1,2234-2252).
ctgcgcatagactataagt

SEQ ID NO: 754857 - DNA, 19 bp, Mus musculus
  siRNA target sequence for 3110007P09Rik (NM_144906.1,2237-2255).
cgcatagactataagtaca

SEQ ID NO: 754858 - DNA, 19 bp, Mus musculus
  siRNA target sequence for 3110007P09Rik (NM_144906.1,2238-2256).
gcatagactataagtacaa

SEQ ID NO: 754859 - DNA, 19 bp, Mus musculus
  siRNA target sequence for 3110007P09Rik (NM_144906.1,2362-2380).
gaatgctgaacaacaaaga

SEQ ID NO: 754860 - DNA, 19 bp, Mus musculus
  siRNA target sequence for 3110007P09Rik (NM_144906.1,2367-2385).
ctgaacaacaaagaatatt

SEQ ID NO: 754861 - DNA, 19 bp, Mus musculus
  siRNA target sequence for 3110007P09Rik (NM_144906.1,2424-2442).
gaggcgtaggttctttact

SEQ ID NO: 754862 - DNA, 19 bp, Mus musculus
  siRNA target sequence for 3110007P09Rik (NM_144906.1,2436-2454).
ctttactggcgagatttca

SEQ ID NO: 754863 - DNA, 19 bp, Mus musculus
  siRNA target sequence for 3110007P09Rik (NM_144906.1,2462-2480).
gaaggcccgagcaaacctt

SEQ ID NO: 754864 - DNA, 19 bp, Mus musculus
  siRNA target sequence for 3110007P09Rik (NM_144906.1,2526-2544).
gctgtgacattgaacttgt

SEQ ID NO: 754865 - DNA, 19 bp, Mus musculus
  siRNA target sequence for 3110007P09Rik (NM_144906.1,2527-2545).
ctgtgacattgaacttgtt

SEQ ID NO: 754866 - DNA, 19 bp, Mus musculus
  siRNA target sequence for 3110007P09Rik (NM_144906.1,2550-2568).
caggctaccggttttcact

SEQ ID NO: 754867 - DNA, 19 bp, Mus musculus
  siRNA target sequence for 3110007P09Rik (NM_144906.1,2554-2572).
ctaccggttttcactcatt

SEQ ID NO: 754868 - DNA, 19 bp, Mus musculus
  siRNA target sequence for 3110007P09Rik (NM_144906.1,2558-2576).
cggttttcactcattaaga

SEQ ID NO: 754869 - DNA, 19 bp, Mus musculus
  siRNA target sequence for 4932442K20Rik (NM_144910.1,89-107).
ccagatcctcgcagaattt

SEQ ID NO: 754870 - DNA, 19 bp, Mus musculus
  siRNA target sequence for 4932442K20Rik (NM_144910.1,90-108).
cagatcctcgcagaattta

SEQ ID NO: 754871 - DNA, 19 bp, Mus musculus
  siRNA target sequence for 4932442K20Rik (NM_144910.1,92-110).
gatcctcgcagaatttaca

SEQ ID NO: 754872 - DNA, 19 bp, Mus musculus
  siRNA target sequence for 4932442K20Rik (NM_144910.1,150-168).
ctcactgggcagagttaga

SEQ ID NO: 754873 - DNA, 19 bp, Mus musculus
  siRNA target sequence for 4932442K20Rik (NM_144910.1,152-170).
cactgggcagagttagaga

SEQ ID NO: 754874 - DNA, 19 bp, Mus musculus
  siRNA target sequence for 4932442K20Rik (NM_144910.1,201-219).
cactctggtcattaacaca

SEQ ID NO: 754875 - DNA, 19 bp, Mus musculus
  siRNA target sequence for 4932442K20Rik (NM_144910.1,255-273).
ctcgcattccacctgatat

SEQ ID NO: 754876 - DNA, 19 bp, Mus musculus
  siRNA target sequence for 4932442K20Rik (NM_144910.1,312-330).
ccaataaactcagaagttt

SEQ ID NO: 754877 - DNA, 19 bp, Mus musculus
  siRNA target sequence for 4932442K20Rik (NM_144910.1,357-375).
ctctcagggaattgctttt

SEQ ID NO: 754878 - DNA, 19 bp, Mus musculus
  siRNA target sequence for 4932442K20Rik (NM_144910.1,359-377).
ctcagggaattgcttttaa

SEQ ID NO: 754879 - DNA, 19 bp, Mus musculus
  siRNA target sequence for 4932442K20Rik (NM_144910.1,393-411).
gggtgttgccttatgaact

SEQ ID NO: 754880 - DNA, 19 bp, Mus musculus
  siRNA target sequence for 4932442K20Rik (NM_144910.1,416-434).
cggctcttccagctacaaa

SEQ ID NO: 754881 - DNA, 19 bp, Mus musculus
  siRNA target sequence for 4932442K20Rik (NM_144910.1,418-436).
gctcttccagctacaaact

SEQ ID NO: 754882 - DNA, 19 bp, Mus musculus
  siRNA target sequence for 4932442K20Rik (NM_144910.1,421-439).
cttccagctacaaactcta

SEQ ID NO: 754883 - DNA, 19 bp, Mus musculus
  siRNA target sequence for 4932442K20Rik (NM_144910.1,440-458).
ggtttaacaggcaatcctt

SEQ ID NO: 754884 - DNA, 19 bp, Mus musculus
  siRNA target sequence for 4932442K20Rik (NM_144910.1,441-459).
gtttaacaggcaatccttt

SEQ ID NO: 754885 - DNA, 19 bp, Mus musculus
  siRNA target sequence for 4932442K20Rik (NM_144910.1,455-473).
cctttatcacaggatatta

SEQ ID NO: 754886 - DNA, 19 bp, Mus musculus
  siRNA target sequence for 4932442K20Rik (NM_144910.1,456-474).
ctttatcacaggatattat

SEQ ID NO: 754887 - DNA, 19 bp, Mus musculus
  siRNA target sequence for 4932442K20Rik (NM_144910.1,464-482).
caggatattatgagcttat

SEQ ID NO: 754888 - DNA, 19 bp, Mus musculus
  siRNA target sequence for 4932442K20Rik (NM_144910.1,498-516).
gaacccgaaagctactgaa

SEQ ID NO: 754889 - DNA, 19 bp, Mus musculus
  siRNA target sequence for 4932442K20Rik (NM_144910.1,501-519).
cccgaaagctactgaactt

SEQ ID NO: 754890 - DNA, 19 bp, Mus musculus
  siRNA target sequence for 4932442K20Rik (NM_144910.1,503-521).
cgaaagctactgaacttca

SEQ ID NO: 754891 - DNA, 19 bp, Mus musculus
  siRNA target sequence for 4932442K20Rik (NM_144910.1,608-626).
gcatcattcacggttatgt

SEQ ID NO: 754892 - DNA, 19 bp, Mus musculus
  siRNA target sequence for 4932442K20Rik (NM_144910.1,616-634).
cacggttatgtgttacaat

SEQ ID NO: 754893 - DNA, 19 bp, Mus musculus
  siRNA target sequence for 4932442K20Rik (NM_144910.1,618-636).
cggttatgtgttacaatgt

SEQ ID NO: 754894 - DNA, 19 bp, Mus musculus
  siRNA target sequence for 4932442K20Rik (NM_144910.1,627-645).
gttacaatgtgttatgtga

SEQ ID NO: 754895 - DNA, 19 bp, Mus musculus
  siRNA target sequence for 4932442K20Rik (NM_144910.1,742-760).
ggacgcagatatcattagt

SEQ ID NO: 754896 - DNA, 19 bp, Mus musculus
  siRNA target sequence for 4932442K20Rik (NM_144910.1,745-763).
cgcagatatcattagtctt

SEQ ID NO: 754897 - DNA, 19 bp, Mus musculus
  siRNA target sequence for 4932442K20Rik (NM_144910.1,770-788).
gtggaaacagagcaatact

SEQ ID NO: 754898 - DNA, 19 bp, Mus musculus
  siRNA target sequence for 4932442K20Rik (NM_144910.1,772-790).
ggaaacagagcaatacttt

SEQ ID NO: 754899 - DNA, 19 bp, Mus musculus
  siRNA target sequence for 4932442K20Rik (NM_144910.1,773-791).
gaaacagagcaatacttta

SEQ ID NO: 754900 - DNA, 19 bp, Mus musculus
  siRNA target sequence for 4932442K20Rik (NM_144910.1,781-799).
gcaatactttactctcttt

SEQ ID NO: 754901 - DNA, 19 bp, Mus musculus
  siRNA target sequence for 4932442K20Rik (NM_144910.1,983-1001).
ggatccgaagcaatgctaa

SEQ ID NO: 754902 - DNA, 19 bp, Mus musculus
  siRNA target sequence for 4932442K20Rik (NM_144910.1,984-1002).
gatccgaagcaatgctaaa

SEQ ID NO: 754903 - DNA, 19 bp, Mus musculus
  siRNA target sequence for 4932442K20Rik (NM_144910.1,993-1011).
caatgctaaacagagtaat

SEQ ID NO: 754904 - DNA, 19 bp, Mus musculus
  siRNA target sequence for 4932442K20Rik (NM_144910.1,1003-1021).
cagagtaatgacgaaagat

SEQ ID NO: 754905 - DNA, 19 bp, Mus musculus
  siRNA target sequence for 4932442K20Rik (NM_144910.1,1005-1023).
gagtaatgacgaaagataa

SEQ ID NO: 754906 - DNA, 19 bp, Mus musculus
  siRNA target sequence for 4932442K20Rik (NM_144910.1,1071-1089).
caggtatgaagcctattca

SEQ ID NO: 754907 - DNA, 19 bp, Mus musculus
  siRNA target sequence for 4932442K20Rik (NM_144910.1,1138-1156).
ggacccagagtattctgat

SEQ ID NO: 754908 - DNA, 19 bp, Mus musculus
  siRNA target sequence for 4932442K20Rik (NM_144910.1,1147-1165).
gtattctgatgtgaaactt

SEQ ID NO: 754909 - DNA, 19 bp, Mus musculus
  siRNA target sequence for 4932442K20Rik (NM_144910.1,1163-1181).
cttattcagaccatgatgt

SEQ ID NO: 754910 - DNA, 19 bp, Mus musculus
  siRNA target sequence for 4932442K20Rik (NM_144910.1,1264-1282).
ggtgctatgtgcagatctt

SEQ ID NO: 754911 - DNA, 19 bp, Mus musculus
  siRNA target sequence for 4932442K20Rik (NM_144910.1,1268-1286).
ctatgtgcagatcttaact

SEQ ID NO: 754912 - DNA, 19 bp, Mus musculus
  siRNA target sequence for 4932442K20Rik (NM_144910.1,1272-1290).
gtgcagatcttaactcatt

SEQ ID NO: 754913 - DNA, 19 bp, Mus musculus
  siRNA target sequence for 4932442K20Rik (NM_144910.1,1301-1319).
ggtgttgtggaatatttaa

SEQ ID NO: 754914 - DNA, 19 bp, Mus musculus
  siRNA target sequence for 4932442K20Rik (NM_144910.1,1334-1352).
gctgacaaccataaagact

SEQ ID NO: 754915 - DNA, 19 bp, Mus musculus
  siRNA target sequence for 4932442K20Rik (NM_144910.1,1335-1353).
ctgacaaccataaagactt

SEQ ID NO: 754916 - DNA, 19 bp, Mus musculus
  siRNA target sequence for 4932442K20Rik (NM_144910.1,1358-1376).
gaactaaggtacaatgagt

SEQ ID NO: 754917 - DNA, 19 bp, Mus musculus
  siRNA target sequence for 4932442K20Rik (NM_144910.1,1373-1391).
gagtgtcttatgaacttca

SEQ ID NO: 754918 - DNA, 19 bp, Mus musculus
  siRNA target sequence for 4932442K20Rik (NM_144910.1,1445-1463).
cttaagagcgcctatgaaa

SEQ ID NO: 754919 - DNA, 19 bp, Mus musculus
  siRNA target sequence for 4932442K20Rik (NM_144910.1,1452-1470).
gcgcctatgaaaataactt

SEQ ID NO: 754920 - DNA, 19 bp, Mus musculus
  siRNA target sequence for 4932442K20Rik (NM_144910.1,1639-1657).
ctcactgttaacacaactt

SEQ ID NO: 754921 - DNA, 19 bp, Mus musculus
  siRNA target sequence for AW060207 (NM_144911.1,115-133).
gagatgctaccggtactaa

SEQ ID NO: 754922 - DNA, 19 bp, Mus musculus
  siRNA target sequence for AW060207 (NM_144911.1,120-138).
gctaccggtactaaacaga

SEQ ID NO: 754923 - DNA, 19 bp, Mus musculus
  siRNA target sequence for AW060207 (NM_144911.1,327-345).
gatgagcggtccatcatca

SEQ ID NO: 754924 - DNA, 19 bp, Mus musculus
  siRNA target sequence for AW060207 (NM_144911.1,381-399).
ggggttatcccgaaacaga

SEQ ID NO: 754925 - DNA, 19 bp, Mus musculus
  siRNA target sequence for AW060207 (NM_144911.1,382-400).
gggttatcccgaaacagaa

SEQ ID NO: 754926 - DNA, 19 bp, Mus musculus
  siRNA target sequence for AW060207 (NM_144911.1,383-401).
ggttatcccgaaacagaaa

SEQ ID NO: 754927 - DNA, 19 bp, Mus musculus
  siRNA target sequence for AW060207 (NM_144911.1,384-402).
gttatcccgaaacagaaat

SEQ ID NO: 754928 - DNA, 19 bp, Mus musculus
  siRNA target sequence for AW060207 (NM_144911.1,389-407).
cccgaaacagaaatatcga

SEQ ID NO: 754929 - DNA, 19 bp, Mus musculus
  siRNA target sequence for AW060207 (NM_144911.1,390-408).
ccgaaacagaaatatcgaa

SEQ ID NO: 754930 - DNA, 19 bp, Mus musculus
  siRNA target sequence for AW060207 (NM_144911.1,405-423).
cgaatttctactaaaacca

SEQ ID NO: 754931 - DNA, 19 bp, Mus musculus
  siRNA target sequence for AW060207 (NM_144911.1,478-496).
gagcatctaaattttttga

SEQ ID NO: 754932 - DNA, 19 bp, Mus musculus
  siRNA target sequence for AW060207 (NM_144911.1,589-607).
gagaagtagtacagttctt

SEQ ID NO: 754933 - DNA, 19 bp, Mus musculus
  siRNA target sequence for AW060207 (NM_144911.1,911-929).
cacttgtaaacgtccttta

SEQ ID NO: 754934 - DNA, 19 bp, Mus musculus
  siRNA target sequence for AW060207 (NM_144911.1,913-931).
cttgtaaacgtcctttaaa

SEQ ID NO: 754935 - DNA, 19 bp, Mus musculus
  siRNA target sequence for AW060207 (NM_144911.1,961-979).
gccctttgtgtgacagatt

SEQ ID NO: 754936 - DNA, 19 bp, Mus musculus
  siRNA target sequence for AW060207 (NM_144911.1,962-980).
ccctttgtgtgacagattt

SEQ ID NO: 754937 - DNA, 19 bp, Mus musculus
  siRNA target sequence for AW060207 (NM_144911.1,963-981).
cctttgtgtgacagattta

SEQ ID NO: 754938 - DNA, 19 bp, Mus musculus
  siRNA target sequence for AW060207 (NM_144911.1,964-982).
ctttgtgtgacagatttaa

SEQ ID NO: 754939 - DNA, 19 bp, Mus musculus
  siRNA target sequence for AW060207 (NM_144911.1,1070-1088).
caaatttgccaagtcaaat

SEQ ID NO: 754940 - DNA, 19 bp, Mus musculus
  siRNA target sequence for AW060207 (NM_144911.1,1489-1507).
ccaagtctcaggactctaa

SEQ ID NO: 754941 - DNA, 19 bp, Mus musculus
  siRNA target sequence for AW060207 (NM_144911.1,1800-1818).
gtggtttttacacagttta

SEQ ID NO: 754942 - DNA, 19 bp, Mus musculus
  siRNA target sequence for AW060207 (NM_144911.1,1853-1871).
cgaagatcttgaaaaatta

SEQ ID NO: 754943 - DNA, 19 bp, Mus musculus
  siRNA target sequence for Rad9b (NM_144912.1,666-684).
ggacttgataccgagataa

SEQ ID NO: 754944 - DNA, 19 bp, Mus musculus
  siRNA target sequence for Rad9b (NM_144912.1,669-687).
cttgataccgagataacat

SEQ ID NO: 754945 - DNA, 19 bp, Mus musculus
  siRNA target sequence for Rad9b (NM_144912.1,676-694).
ccgagataacattttgctt

SEQ ID NO: 754946 - DNA, 19 bp, Mus musculus
  siRNA target sequence for Rad9b (NM_144912.1,677-695).
cgagataacattttgcttt

SEQ ID NO: 754947 - DNA, 19 bp, Mus musculus
  siRNA target sequence for Rad9b (NM_144912.1,744-762).
ctagccatctactttgact

SEQ ID NO: 754948 - DNA, 19 bp, Mus musculus
  siRNA target sequence for Rad9b (NM_144912.1,766-784).
ctggaaaaccggttgtttt

SEQ ID NO: 754949 - DNA, 19 bp, Mus musculus
  siRNA target sequence for Rad9b (NM_144912.1,768-786).
ggaaaaccggttgttttga

SEQ ID NO: 754950 - DNA, 19 bp, Mus musculus
  siRNA target sequence for Rad9b (NM_144912.1,776-794).
ggttgttttgagtgttgaa

SEQ ID NO: 754951 - DNA, 19 bp, Mus musculus
  siRNA target sequence for Rad9b (NM_144912.1,824-842).
ggccacgttagtggattat

SEQ ID NO: 754952 - DNA, 19 bp, Mus musculus
  siRNA target sequence for Rad9b (NM_144912.1,834-852).
gtggattatccgagtagaa

SEQ ID NO: 754953 - DNA, 19 bp, Mus musculus
  siRNA target sequence for Rad9b (NM_144912.1,837-855).
gattatccgagtagaacat

SEQ ID NO: 754954 - DNA, 19 bp, Mus musculus
  siRNA target sequence for Rad9b (NM_144912.1,964-982).
gagcagcgcccaaaagact

SEQ ID NO: 754955 - DNA, 19 bp, Mus musculus
  siRNA target sequence for Rad9b (NM_144912.1,966-984).
gcagcgcccaaaagactat

SEQ ID NO: 754956 - DNA, 19 bp, Mus musculus
  siRNA target sequence for Rad9b (NM_144912.1,967-985).
cagcgcccaaaagactatt

SEQ ID NO: 754957 - DNA, 19 bp, Mus musculus
  siRNA target sequence for Rad9b (NM_144912.1,1055-1073).
cttcgaagtgcctgaaagt

SEQ ID NO: 754958 - DNA, 19 bp, Mus musculus
  siRNA target sequence for Rad9b (NM_144912.1,1058-1076).
cgaagtgcctgaaagtgtt

SEQ ID NO: 754959 - DNA, 19 bp, Mus musculus
  siRNA target sequence for Rad9b (NM_144912.1,1062-1080).
gtgcctgaaagtgttgtta

SEQ ID NO: 754960 - DNA, 19 bp, Mus musculus
  siRNA target sequence for Rad9b (NM_144912.1,1064-1082).
gcctgaaagtgttgttagt

SEQ ID NO: 754961 - DNA, 19 bp, Mus musculus
  siRNA target sequence for Rad9b (NM_144912.1,1066-1084).
ctgaaagtgttgttagtga

SEQ ID NO: 754962 - DNA, 19 bp, Mus musculus
  siRNA target sequence for Rad9b (NM_144912.1,1133-1151).
gttctttggagctgtatct

SEQ ID NO: 754963 - DNA, 19 bp, Mus musculus
  siRNA target sequence for BC019731 (NM_144914.2,370-388).
cgtttcaggcgtgtttgta

SEQ ID NO: 754964 - DNA, 19 bp, Mus musculus
  siRNA target sequence for BC019731 (NM_144914.2,371-389).
gtttcaggcgtgtttgtat

SEQ ID NO: 754965 - DNA, 19 bp, Mus musculus
  siRNA target sequence for BC019731 (NM_144914.2,570-588).
gagactgctacgaagcatt

SEQ ID NO: 754966 - DNA, 19 bp, Mus musculus
  siRNA target sequence for BC019731 (NM_144914.2,576-594).
gctacgaagcatttgtcat

SEQ ID NO: 754967 - DNA, 19 bp, Mus musculus
  siRNA target sequence for BC019731 (NM_144914.2,584-602).
gcatttgtcatctacagtt

SEQ ID NO: 754968 - DNA, 19 bp, Mus musculus
  siRNA target sequence for BC019731 (NM_144914.2,585-603).
catttgtcatctacagttt

SEQ ID NO: 754969 - DNA, 19 bp, Mus musculus
  siRNA target sequence for BC019731 (NM_144914.2,673-691).
caggtccagctgcttctat

SEQ ID NO: 754970 - DNA, 19 bp, Mus musculus
  siRNA target sequence for BC019731 (NM_144914.2,718-736).
ctactccatcacgttctta

SEQ ID NO: 754971 - DNA, 19 bp, Mus musculus
  siRNA target sequence for BC019731 (NM_144914.2,827-845).
cacgatggggacttcaaca

SEQ ID NO: 754972 - DNA, 19 bp, Mus musculus
  siRNA target sequence for BC019731 (NM_144914.2,865-883).
cgtgaccctcgtgtacaat

SEQ ID NO: 754973 - DNA, 19 bp, Mus musculus
  siRNA target sequence for BC019731 (NM_144914.2,951-969).
ccttcgagccggtactcaa

SEQ ID NO: 754974 - DNA, 19 bp, Mus musculus
  siRNA target sequence for BC019731 (NM_144914.2,1100-1118).
gccgctggctaccagaatt

SEQ ID NO: 754975 - DNA, 19 bp, Mus musculus
  siRNA target sequence for BC019731 (NM_144914.2,1101-1119).
ccgctggctaccagaattt

SEQ ID NO: 754976 - DNA, 19 bp, Mus musculus
  siRNA target sequence for BC019731 (NM_144914.2,1171-1189).
ccccagccaggtgtattca

SEQ ID NO: 754977 - DNA, 19 bp, Mus musculus
  siRNA target sequence for BC019731 (NM_144914.2,1215-1233).
cagcacctatgcaaagcat

SEQ ID NO: 754978 - DNA, 19 bp, Mus musculus
  siRNA target sequence for BC019731 (NM_144914.2,1230-1248).
gcatatccagtggcttaaa

SEQ ID NO: 754979 - DNA, 19 bp, Mus musculus
  siRNA target sequence for BC019731 (NM_144914.2,1420-1438).
gagtcgcaacatagagaaa

SEQ ID NO: 754980 - DNA, 19 bp, Mus musculus
  siRNA target sequence for BC014685 (NM_144916.1,232-250).
cggcatatggactgtgtat

SEQ ID NO: 754981 - DNA, 19 bp, Mus musculus
  siRNA target sequence for BC014685 (NM_144916.1,497-515).
cggcactcctggatcaata

SEQ ID NO: 754982 - DNA, 19 bp, Mus musculus
  siRNA target sequence for BC014685 (NM_144916.1,556-574).
cgtggtggtcggcaatttt

SEQ ID NO: 754983 - DNA, 19 bp, Mus musculus
  siRNA target sequence for BC014685 (NM_144916.1,588-606).
ccaagtctctacactacat

SEQ ID NO: 754984 - DNA, 19 bp, Mus musculus
  siRNA target sequence for BC014685 (NM_144916.1,816-834).
gggtgtttgtcctcgatat

SEQ ID NO: 754985 - DNA, 19 bp, Mus musculus
  siRNA target sequence for BC014685 (NM_144916.1,824-842).
gtcctcgatatcctcattt

SEQ ID NO: 754986 - DNA, 19 bp, Mus musculus
  siRNA target sequence for BC014685 (NM_144916.1,977-995).
gagagtattgccatgatct

SEQ ID NO: 754987 - DNA, 19 bp, Mus musculus
  siRNA target sequence for Smyd5 (NM_144918.1,447-465).
ggcaccccctcaataagct

SEQ ID NO: 754988 - DNA, 19 bp, Mus musculus
  siRNA target sequence for Smyd5 (NM_144918.1,497-515).
cctgagactgcgagtataa

SEQ ID NO: 754989 - DNA, 19 bp, Mus musculus
  siRNA target sequence for Smyd5 (NM_144918.1,498-516).
ctgagactgcgagtataat

SEQ ID NO: 754990 - DNA, 19 bp, Mus musculus
  siRNA target sequence for Smyd5 (NM_144918.1,762-780).
ggaccaatggtcaaggaat

SEQ ID NO: 754991 - DNA, 19 bp, Mus musculus
  siRNA target sequence for Smyd5 (NM_144918.1,901-919).
cggagagttccttaactgt

SEQ ID NO: 754992 - DNA, 19 bp, Mus musculus
  siRNA target sequence for Smyd5 (NM_144918.1,1000-1018).
caacttcgttttacatgtt

SEQ ID NO: 754993 - DNA, 19 bp, Mus musculus
  siRNA target sequence for Smyd5 (NM_144918.1,1020-1038).
ctgccctggaggatattaa

SEQ ID NO: 754994 - DNA, 19 bp, Mus musculus
  siRNA target sequence for Smyd5 (NM_144918.1,1039-1057).
gccaggcgaggaaatatgt

SEQ ID NO: 754995 - DNA, 19 bp, Mus musculus
  siRNA target sequence for Smyd5 (NM_144918.1,1040-1058).
ccaggcgaggaaatatgta

SEQ ID NO: 754996 - DNA, 19 bp, Mus musculus
  siRNA target sequence for Smyd5 (NM_144918.1,1041-1059).
caggcgaggaaatatgtat

SEQ ID NO: 754997 - DNA, 19 bp, Mus musculus
  siRNA target sequence for Smyd5 (NM_144918.1,1043-1061).
ggcgaggaaatatgtatca

SEQ ID NO: 754998 - DNA, 19 bp, Mus musculus
  siRNA target sequence for 2810431N21Rik (NM_144920.2,251-269).
gatgaaggccatgttagat

SEQ ID NO: 754999 - DNA, 19 bp, Mus musculus
  siRNA target sequence for 2810431N21Rik (NM_144920.2,328-346).
catcaaccaaagaaaccaa

SEQ ID NO: 755000 - DNA, 19 bp, Mus musculus
  siRNA target sequence for 2810431N21Rik (NM_144920.2,359-377).
ccacagagttctcattaga

SEQ ID NO: 755001 - DNA, 19 bp, Mus musculus
  siRNA target sequence for 2810431N21Rik (NM_144920.2,376-394).
gacccgaggtccaaaacca

SEQ ID NO: 755002 - DNA, 19 bp, Mus musculus
  siRNA target sequence for 2810431N21Rik (NM_144920.2,387-405).
caaaaccatcagaagaata

SEQ ID NO: 755003 - DNA, 19 bp, Mus musculus
  siRNA target sequence for 2810431N21Rik (NM_144920.2,445-463).
ctgaaagatacggatttca

SEQ ID NO: 755004 - DNA, 19 bp, Mus musculus
  siRNA target sequence for 2810431N21Rik (NM_144920.2,447-465).
gaaagatacggatttcaga

SEQ ID NO: 755005 - DNA, 19 bp, Mus musculus
  siRNA target sequence for 2810431N21Rik (NM_144920.2,470-488).
cgggcaagatagaccatta

SEQ ID NO: 755006 - DNA, 19 bp, Mus musculus
  siRNA target sequence for 2810431N21Rik (NM_144920.2,471-489).
gggcaagatagaccattaa

SEQ ID NO: 755007 - DNA, 19 bp, Mus musculus
  siRNA target sequence for 2810431N21Rik (NM_144920.2,473-491).
gcaagatagaccattaaca

SEQ ID NO: 755008 - DNA, 19 bp, Mus musculus
  siRNA target sequence for 2810431N21Rik (NM_144920.2,477-495).
gatagaccattaacaaaaa

SEQ ID NO: 755009 - DNA, 19 bp, Mus musculus
  siRNA target sequence for 2810431N21Rik (NM_144920.2,576-594).
cccatcaatgtgaatagtt

SEQ ID NO: 755010 - DNA, 19 bp, Mus musculus
  siRNA target sequence for 2810431N21Rik (NM_144920.2,578-596).
catcaatgtgaatagttct

SEQ ID NO: 755011 - DNA, 19 bp, Mus musculus
  siRNA target sequence for 2810431N21Rik (NM_144920.2,600-618).
ggcaaagcggtgaatgtca

SEQ ID NO: 755012 - DNA, 19 bp, Mus musculus
  siRNA target sequence for 2810431N21Rik (NM_144920.2,675-693).
gccgaccgagtcattcaga

SEQ ID NO: 755013 - DNA, 19 bp, Mus musculus
  siRNA target sequence for 2810431N21Rik (NM_144920.2,684-702).
gtcattcagagaacgaatt

SEQ ID NO: 755014 - DNA, 19 bp, Mus musculus
  siRNA target sequence for 2810431N21Rik (NM_144920.2,686-704).
cattcagagaacgaattca

SEQ ID NO: 755015 - DNA, 19 bp, Mus musculus
  siRNA target sequence for 2810431N21Rik (NM_144920.2,692-710).
gagaacgaattcaatgcaa

SEQ ID NO: 755016 - DNA, 19 bp, Mus musculus
  siRNA target sequence for 2810431N21Rik (NM_144920.2,711-729).
cagctagagcagtggatta

SEQ ID NO: 755017 - DNA, 19 bp, Mus musculus
  siRNA target sequence for 2810431N21Rik (NM_144920.2,737-755).
gaaaggacggggtcttgaa

SEQ ID NO: 755018 - DNA, 19 bp, Mus musculus
  siRNA target sequence for 2810431N21Rik (NM_144920.2,764-782).
cagaggagtaatttcttat

SEQ ID NO: 755019 - DNA, 19 bp, Mus musculus
  siRNA target sequence for 2810431N21Rik (NM_144920.2,766-784).
gaggagtaatttcttatca

SEQ ID NO: 755020 - DNA, 19 bp, Mus musculus
  siRNA target sequence for 2810431N21Rik (NM_144920.2,768-786).
ggagtaatttcttatcaaa

SEQ ID NO: 755021 - DNA, 19 bp, Mus musculus
  siRNA target sequence for 2810431N21Rik (NM_144920.2,771-789).
gtaatttcttatcaaacat

SEQ ID NO: 755022 - DNA, 19 bp, Mus musculus
  siRNA target sequence for 2810431N21Rik (NM_144920.2,783-801).
caaacattgccaagaaata

SEQ ID NO: 755023 - DNA, 19 bp, Mus musculus
  siRNA target sequence for 2810431N21Rik (NM_144920.2,849-867).
cggacactcccgagaaaca

SEQ ID NO: 755024 - DNA, 19 bp, Mus musculus
  siRNA target sequence for 2810431N21Rik (NM_144920.2,988-1006).
ggcagcagcgccagtttta

SEQ ID NO: 755025 - DNA, 19 bp, Mus musculus
  siRNA target sequence for 2810431N21Rik (NM_144920.2,1217-1235).
gcctcatcaccctaagcat

SEQ ID NO: 755026 - DNA, 19 bp, Mus musculus
  siRNA target sequence for 2810431N21Rik (NM_144920.2,1310-1328).
cagaacgctgtcacaagat

SEQ ID NO: 755027 - DNA, 19 bp, Mus musculus
  siRNA target sequence for 2810431N21Rik (NM_144920.2,1312-1330).
gaacgctgtcacaagatga

SEQ ID NO: 755028 - DNA, 19 bp, Mus musculus
  siRNA target sequence for 2810431N21Rik (NM_144920.2,1316-1334).
gctgtcacaagatgaatgt

SEQ ID NO: 755029 - DNA, 19 bp, Mus musculus
  siRNA target sequence for 2810431N21Rik (NM_144920.2,1319-1337).
gtcacaagatgaatgtaga

SEQ ID NO: 755030 - DNA, 19 bp, Mus musculus
  siRNA target sequence for 2810431N21Rik (NM_144920.2,1329-1347).
gaatgtagaggcacattat

SEQ ID NO: 755031 - DNA, 19 bp, Mus musculus
  siRNA target sequence for 2810431N21Rik (NM_144920.2,1333-1351).
gtagaggcacattatacaa

SEQ ID NO: 755032 - DNA, 19 bp, Mus musculus
  siRNA target sequence for 2810431N21Rik (NM_144920.2,1369-1387).
caggtattgatgccaaatt

SEQ ID NO: 755033 - DNA, 19 bp, Mus musculus
  siRNA target sequence for 2810431N21Rik (NM_144920.2,1371-1389).
ggtattgatgccaaattaa

SEQ ID NO: 755034 - DNA, 19 bp, Mus musculus
  siRNA target sequence for 2810431N21Rik (NM_144920.2,1493-1511).
ccaagagatagagatgaat

SEQ ID NO: 755035 - DNA, 19 bp, Mus musculus
  siRNA target sequence for 2810431N21Rik (NM_144920.2,1617-1635).
gaacgagcctggagagaat

SEQ ID NO: 755036 - DNA, 19 bp, Mus musculus
  siRNA target sequence for 2810431N21Rik (NM_144920.2,1627-1645).
ggagagaatatgacaagtt

SEQ ID NO: 755037 - DNA, 19 bp, Mus musculus
  siRNA target sequence for 2810431N21Rik (NM_144920.2,1647-1665).
gaatatgatgtgactgtta

SEQ ID NO: 755038 - DNA, 19 bp, Mus musculus
  siRNA target sequence for 2810431N21Rik (NM_144920.2,1712-1730).
gagtgagtcggcaggaatt

SEQ ID NO: 755039 - DNA, 19 bp, Mus musculus
  siRNA target sequence for 2810431N21Rik (NM_144920.2,1714-1732).
gtgagtcggcaggaattca

SEQ ID NO: 755040 - DNA, 19 bp, Mus musculus
  siRNA target sequence for 2810431N21Rik (NM_144920.2,1731-1749).
caacgggcacagattcaaa

SEQ ID NO: 755041 - DNA, 19 bp, Mus musculus
  siRNA target sequence for 2810431N21Rik (NM_144920.2,1735-1753).
gggcacagattcaaaagga

SEQ ID NO: 755042 - DNA, 19 bp, Mus musculus
  siRNA target sequence for 2810431N21Rik (NM_144920.2,1751-1769).
ggagctctggagaattcaa

SEQ ID NO: 755043 - DNA, 19 bp, Mus musculus
  siRNA target sequence for 2810431N21Rik (NM_144920.2,1759-1777).
ggagaattcaagatgtcat

SEQ ID NO: 755044 - DNA, 19 bp, Mus musculus
  siRNA target sequence for 2810431N21Rik (NM_144920.2,1781-1799).
ggggttgagcaaacacaaa

SEQ ID NO: 755045 - DNA, 19 bp, Mus musculus
  siRNA target sequence for 2810431N21Rik (NM_144920.2,1836-1854).
ggatcaaagcctttctcat

SEQ ID NO: 755046 - DNA, 19 bp, Mus musculus
  siRNA target sequence for 2810431N21Rik (NM_144920.2,1868-1886).
gagcgagggtccagattat

SEQ ID NO: 755047 - DNA, 19 bp, Mus musculus
  siRNA target sequence for 2810431N21Rik (NM_144920.2,1871-1889).
cgagggtccagattataga

SEQ ID NO: 755048 - DNA, 19 bp, Mus musculus
  siRNA target sequence for 2810431N21Rik (NM_144920.2,1879-1897).
cagattatagactctacaa

SEQ ID NO: 755049 - DNA, 19 bp, Mus musculus
  siRNA target sequence for 2810431N21Rik (NM_144920.2,1881-1899).
gattatagactctacaaga

SEQ ID NO: 755050 - DNA, 19 bp, Mus musculus
  siRNA target sequence for 2810431N21Rik (NM_144920.2,1920-1938).
gtggcagaagtcgatgaat

SEQ ID NO: 755051 - DNA, 19 bp, Mus musculus
  siRNA target sequence for 2810431N21Rik (NM_144920.2,1922-1940).
ggcagaagtcgatgaatct

SEQ ID NO: 755052 - DNA, 19 bp, Mus musculus
  siRNA target sequence for 2810431N21Rik (NM_144920.2,1924-1942).
cagaagtcgatgaatctaa

SEQ ID NO: 755053 - DNA, 19 bp, Mus musculus
  siRNA target sequence for 2810431N21Rik (NM_144920.2,1980-1998).
gctccagtcgttaaaggtt

SEQ ID NO: 755054 - DNA, 19 bp, Mus musculus
  siRNA target sequence for 2810431N21Rik (NM_144920.2,1988-2006).
cgttaaaggttcccatttt

SEQ ID NO: 755055 - DNA, 19 bp, Mus musculus
  siRNA target sequence for 2810431N21Rik (NM_144920.2,2046-2064).
gagtcctccacgatagctt

SEQ ID NO: 755056 - DNA, 19 bp, Mus musculus
  siRNA target sequence for 2810431N21Rik (NM_144920.2,2284-2302).
gtccactcaggcttactca

SEQ ID NO: 755057 - DNA, 19 bp, Mus musculus
  siRNA target sequence for 2810431N21Rik (NM_144920.2,2311-2329).
ggagggatgataacgttaa

SEQ ID NO: 755058 - DNA, 19 bp, Mus musculus
  siRNA target sequence for 2810431N21Rik (NM_144920.2,2314-2332).
gggatgataacgttaagga

SEQ ID NO: 755059 - DNA, 19 bp, Mus musculus
  siRNA target sequence for 2810431N21Rik (NM_144920.2,2430-2448).
gacatcggcagaaagctaa

SEQ ID NO: 755060 - DNA, 19 bp, Mus musculus
  siRNA target sequence for 2810431N21Rik (NM_144920.2,2432-2450).
catcggcagaaagctaaaa

SEQ ID NO: 755061 - DNA, 19 bp, Mus musculus
  siRNA target sequence for 2810431N21Rik (NM_144920.2,2483-2501).
cacacctgaaccaaatgga

SEQ ID NO: 755062 - DNA, 19 bp, Mus musculus
  siRNA target sequence for 2810431N21Rik (NM_144920.2,2485-2503).
cacctgaaccaaatggaat

SEQ ID NO: 755063 - DNA, 19 bp, Mus musculus
  siRNA target sequence for 2810431N21Rik (NM_144920.2,2773-2791).
gggaaggatcgcatttcat

SEQ ID NO: 755064 - DNA, 19 bp, Mus musculus
  siRNA target sequence for 2810431N21Rik (NM_144920.2,2775-2793).
gaaggatcgcatttcatgt

SEQ ID NO: 755065 - DNA, 19 bp, Mus musculus
  siRNA target sequence for Blvrb (NM_144923.2,206-224).
ggcggtgcaagcaggttat

SEQ ID NO: 755066 - DNA, 19 bp, Mus musculus
  siRNA target sequence for Blvrb (NM_144923.2,208-226).
cggtgcaagcaggttatga

SEQ ID NO: 755067 - DNA, 19 bp, Mus musculus
  siRNA target sequence for Blvrb (NM_144923.2,534-552).
cacatccggatgcataaga

SEQ ID NO: 755068 - DNA, 19 bp, Mus musculus
  siRNA target sequence for Blvrb (NM_144923.2,536-554).
catccggatgcataagatt

SEQ ID NO: 755069 - DNA, 19 bp, Mus musculus
  siRNA target sequence for Blvrb (NM_144923.2,651-669).
gggccctcgagggtcatat

SEQ ID NO: 755070 - DNA, 19 bp, Mus musculus
  siRNA target sequence for BC017607 (NM_144924.1,224-242).
gctacagggtggtgtttga

SEQ ID NO: 755071 - DNA, 19 bp, Mus musculus
  siRNA target sequence for BC017607 (NM_144924.1,225-243).
ctacagggtggtgtttgaa

SEQ ID NO: 755072 - DNA, 19 bp, Mus musculus
  siRNA target sequence for BC017607 (NM_144924.1,890-908).
ctcgagtgaccaacttctt

SEQ ID NO: 755073 - DNA, 19 bp, Mus musculus
  siRNA target sequence for BC017607 (NM_144924.1,1221-1239).
ggcgcatgtgcggaagaaa

SEQ ID NO: 755074 - DNA, 19 bp, Mus musculus
  siRNA target sequence for BC017607 (NM_144924.1,1319-1337).
gataccgaagcctcattga

SEQ ID NO: 755075 - DNA, 19 bp, Mus musculus
  siRNA target sequence for BC017607 (NM_144924.1,1351-1369).
cgcacggacaggactaaca

SEQ ID NO: 755076 - DNA, 19 bp, Mus musculus
  siRNA target sequence for BC017607 (NM_144924.1,1352-1370).
gcacggacaggactaacaa

SEQ ID NO: 755077 - DNA, 19 bp, Mus musculus
  siRNA target sequence for BC017607 (NM_144924.1,1355-1373).
cggacaggactaacaagtt

SEQ ID NO: 755078 - DNA, 19 bp, Mus musculus
  siRNA target sequence for BC017607 (NM_144924.1,1455-1473).
ctacgttcagggtatgagt

SEQ ID NO: 755079 - DNA, 19 bp, Mus musculus
  siRNA target sequence for BC017607 (NM_144924.1,1783-1801).
ggcttcctggccccaattt

SEQ ID NO: 755080 - DNA, 19 bp, Mus musculus
  siRNA target sequence for BC017607 (NM_144924.1,1815-1833).
gcctgtgccatcttggata

SEQ ID NO: 755081 - DNA, 19 bp, Mus musculus
  siRNA target sequence for BC017607 (NM_144924.1,1816-1834).
cctgtgccatcttggatat

SEQ ID NO: 755082 - DNA, 19 bp, Mus musculus
  siRNA target sequence for BC019943 (NM_144927.2,679-697).
caagaaatgcggctcttaa

SEQ ID NO: 755083 - DNA, 19 bp, Mus musculus
  siRNA target sequence for BC019943 (NM_144927.2,701-719).
cctcggcgctttaatagaa

SEQ ID NO: 755084 - DNA, 19 bp, Mus musculus
  siRNA target sequence for BC019943 (NM_144927.2,723-741).
gccgaaggtgacagattct

SEQ ID NO: 755085 - DNA, 19 bp, Mus musculus
  siRNA target sequence for BC019943 (NM_144927.2,724-742).
ccgaaggtgacagattctt

SEQ ID NO: 755086 - DNA, 19 bp, Mus musculus
  siRNA target sequence for BC019943 (NM_144927.2,872-890).
cgagaaggcgactgaagtt

SEQ ID NO: 755087 - DNA, 19 bp, Mus musculus
  siRNA target sequence for BC019943 (NM_144927.2,888-906).
gttggctcactgtttctaa

SEQ ID NO: 755088 - DNA, 19 bp, Mus musculus
  siRNA target sequence for BC019943 (NM_144927.2,980-998).
gtcaggacccgtgtatatt

SEQ ID NO: 755089 - DNA, 19 bp, Mus musculus
  siRNA target sequence for BC019943 (NM_144927.2,982-1000).
caggacccgtgtatatttt

SEQ ID NO: 755090 - DNA, 19 bp, Mus musculus
  siRNA target sequence for BC019943 (NM_144927.2,1002-1020).
gccatcactcacagattga

SEQ ID NO: 755091 - DNA, 19 bp, Mus musculus
  siRNA target sequence for BC019943 (NM_144927.2,1070-1088).
gtctttattgcttagagtt

SEQ ID NO: 755092 - DNA, 19 bp, Mus musculus
  siRNA target sequence for BC019943 (NM_144927.2,1115-1133).
cctatgcggagaaaatgaa

SEQ ID NO: 755093 - DNA, 19 bp, Mus musculus
  siRNA target sequence for BC019943 (NM_144927.2,1136-1154).
cgatcgagggagatttgct

SEQ ID NO: 755094 - DNA, 19 bp, Mus musculus
  siRNA target sequence for BC019943 (NM_144927.2,1167-1185).
cttcttaagccccatttga

SEQ ID NO: 755095 - DNA, 19 bp, Mus musculus
  siRNA target sequence for BC019943 (NM_144927.2,1170-1188).
cttaagccccatttgaata

SEQ ID NO: 755096 - DNA, 19 bp, Mus musculus
  siRNA target sequence for BC019943 (NM_144927.2,1175-1193).
gccccatttgaataaggaa

SEQ ID NO: 755097 - DNA, 19 bp, Mus musculus
  siRNA target sequence for BC019943 (NM_144927.2,1176-1194).
ccccatttgaataaggaaa

SEQ ID NO: 755098 - DNA, 19 bp, Mus musculus
  siRNA target sequence for BC019943 (NM_144927.2,1261-1279).
ggctgaatcagcatctaga

SEQ ID NO: 755099 - DNA, 19 bp, Mus musculus
  siRNA target sequence for BC019943 (NM_144927.2,1346-1364).
ccagtgcctccatcacatt

SEQ ID NO: 755100 - DNA, 19 bp, Mus musculus
  siRNA target sequence for BC019943 (NM_144927.2,1383-1401).
gcggacttgctgcagtata

SEQ ID NO: 755101 - DNA, 19 bp, Mus musculus
  siRNA target sequence for BC019943 (NM_144927.2,1384-1402).
cggacttgctgcagtataa

SEQ ID NO: 755102 - DNA, 19 bp, Mus musculus
  siRNA target sequence for BC019943 (NM_144927.2,1418-1436).
gtaccacgccctcttcaat

SEQ ID NO: 755103 - DNA, 19 bp, Mus musculus
  siRNA target sequence for BC019943 (NM_144927.2,1450-1468).
ctgagcaccacctcattca

SEQ ID NO: 755104 - DNA, 19 bp, Mus musculus
  siRNA target sequence for BC019943 (NM_144927.2,1547-1565).
caccacacactgtcatgaa

SEQ ID NO: 755105 - DNA, 19 bp, Mus musculus
  siRNA target sequence for BC019943 (NM_144927.2,1657-1675).
ggttggggatcctaactgt

SEQ ID NO: 755106 - DNA, 19 bp, Mus musculus
  siRNA target sequence for BC019943 (NM_144927.2,1787-1805).
gtatacttggcccagaatt

SEQ ID NO: 755107 - DNA, 19 bp, Mus musculus
  siRNA target sequence for BC019943 (NM_144927.2,1884-1902).
gaggccgctaagagtacaa

SEQ ID NO: 755108 - DNA, 19 bp, Mus musculus
  siRNA target sequence for BC022744 (NM_144929.1,665-683).
caagcccagaatgtgaatt

SEQ ID NO: 755109 - DNA, 19 bp, Mus musculus
  siRNA target sequence for BC022744 (NM_144929.1,794-812).
cctgccaagcagattttat

SEQ ID NO: 755110 - DNA, 19 bp, Mus musculus
  siRNA target sequence for BC022744 (NM_144929.1,1011-1029).
ctggatttcaaatgttgta

SEQ ID NO: 755111 - DNA, 19 bp, Mus musculus
  siRNA target sequence for BC022744 (NM_144929.1,1059-1077).
cagccccgagccaatgttt

SEQ ID NO: 755112 - DNA, 19 bp, Mus musculus
  siRNA target sequence for BC022744 (NM_144929.1,1068-1086).
gccaatgtttggctttcaa

SEQ ID NO: 755113 - DNA, 19 bp, Mus musculus
  siRNA target sequence for Crsp6 (NM_144933.1,309-327).
gacgaggaggggttggtaa

SEQ ID NO: 755114 - DNA, 19 bp, Mus musculus
  siRNA target sequence for Crsp6 (NM_144933.1,317-335).
ggggttggtaaaattccaa

SEQ ID NO: 755115 - DNA, 19 bp, Mus musculus
  siRNA target sequence for Crsp6 (NM_144933.1,354-372).
gactctgtgaggaacaatt

SEQ ID NO: 755116 - DNA, 19 bp, Mus musculus
  siRNA target sequence for Crsp6 (NM_144933.1,602-620).
gctccagcgagacttcaat

SEQ ID NO: 755117 - DNA, 19 bp, Mus musculus
  siRNA target sequence for Crsp6 (NM_144933.1,605-623).
ccagcgagacttcaattct

SEQ ID NO: 755118 - DNA, 19 bp, Mus musculus
  siRNA target sequence for Crsp6 (NM_144933.1,726-744).
ggtacctttgaagtgataa

SEQ ID NO: 755119 - DNA, 19 bp, Mus musculus
  siRNA target sequence for Crsp6 (NM_144933.1,795-813).
ctggatgtccaaattccta

SEQ ID NO: 755120 - DNA, 19 bp, Mus musculus
  siRNA target sequence for Crsp6 (NM_144933.1,822-840).
gaggggtctgcgtatatca

SEQ ID NO: 755121 - DNA, 19 bp, Mus musculus
  siRNA target sequence for Crsp6 (NM_144933.1,831-849).
gcgtatatcaaggtttcta

SEQ ID NO: 755122 - DNA, 19 bp, Mus musculus
  siRNA target sequence for Crsp6 (NM_144933.1,832-850).
cgtatatcaaggtttctat

SEQ ID NO: 755123 - DNA, 19 bp, Mus musculus
  siRNA target sequence for Crsp6 (NM_144933.1,833-851).
gtatatcaaggtttctatt

SEQ ID NO: 755124 - DNA, 19 bp, Mus musculus
  siRNA target sequence for Crsp6 (NM_144933.1,904-922).
gacctttgcccaaatccaa

SEQ ID NO: 755125 - DNA, 19 bp, Mus musculus
  siRNA target sequence for Crsp6 (NM_144933.1,938-956).
ctggcagacaaaattagaa

SEQ ID NO: 755126 - DNA, 19 bp, Mus musculus
  siRNA target sequence for Crsp6 (NM_144933.1,1003-1021).
cccgggaagccgttcagat

SEQ ID NO: 755127 - DNA, 19 bp, Mus musculus
  siRNA target sequence for Crsp6 (NM_144933.1,1004-1022).
ccgggaagccgttcagatt

SEQ ID NO: 755128 - DNA, 19 bp, Mus musculus
  siRNA target sequence for Crsp6 (NM_144933.1,1047-1065).
gtgaaaaaccagatcatct

SEQ ID NO: 755129 - DNA, 19 bp, Mus musculus
  siRNA target sequence for Crsp6 (NM_144933.1,1103-1121).
gtgccactcctcagatgat

SEQ ID NO: 755130 - DNA, 19 bp, Mus musculus
  siRNA target sequence for Crsp6 (NM_144933.1,1199-1217).
gctgatcagagagtttcat

SEQ ID NO: 755131 - DNA, 19 bp, Mus musculus
  siRNA target sequence for Crsp6 (NM_144933.1,1200-1218).
ctgatcagagagtttcata

SEQ ID NO: 755132 - DNA, 19 bp, Mus musculus
  siRNA target sequence for Crsp6 (NM_144933.1,1225-1243).
ccttgagttccattgtgat

SEQ ID NO: 755133 - DNA, 19 bp, Mus musculus
  siRNA target sequence for Crsp6 (NM_144933.1,1293-1311).
ggtcctcaagcttttgata

SEQ ID NO: 755134 - DNA, 19 bp, Mus musculus
  siRNA target sequence for Crsp6 (NM_144933.1,1296-1314).
cctcaagcttttgataaaa

SEQ ID NO: 755135 - DNA, 19 bp, Mus musculus
  siRNA target sequence for Crsp6 (NM_144933.1,1297-1315).
ctcaagcttttgataaaaa

SEQ ID NO: 755136 - DNA, 19 bp, Mus musculus
  siRNA target sequence for Crsp6 (NM_144933.1,1449-1467).
caggcccactggtcaaaca

SEQ ID NO: 755137 - DNA, 19 bp, Mus musculus
  siRNA target sequence for Crsp6 (NM_144933.1,1454-1472).
ccactggtcaaacatcaat

SEQ ID NO: 755138 - DNA, 19 bp, Mus musculus
  siRNA target sequence for Crsp6 (NM_144933.1,1459-1477).
ggtcaaacatcaatgatgt

SEQ ID NO: 755139 - DNA, 19 bp, Mus musculus
  siRNA target sequence for Crsp6 (NM_144933.1,1462-1480).
caaacatcaatgatgtgta

SEQ ID NO: 755140 - DNA, 19 bp, Mus musculus
  siRNA target sequence for Crsp6 (NM_144933.1,1476-1494).
gtgtatgagtctagtgtaa

SEQ ID NO: 755141 - DNA, 19 bp, Mus musculus
  siRNA target sequence for Crsp6 (NM_144933.1,1478-1496).
gtatgagtctagtgtaaaa

SEQ ID NO: 755142 - DNA, 19 bp, Mus musculus
  siRNA target sequence for Crsp6 (NM_144933.1,1482-1500).
gagtctagtgtaaaagttt

SEQ ID NO: 755143 - DNA, 19 bp, Mus musculus
  siRNA target sequence for Crsp6 (NM_144933.1,1486-1504).
ctagtgtaaaagttttgat

SEQ ID NO: 755144 - DNA, 19 bp, Mus musculus
  siRNA target sequence for Crsp6 (NM_144933.1,1510-1528).
ctcagggttatgaacagat

SEQ ID NO: 755145 - DNA, 19 bp, Mus musculus
  siRNA target sequence for Crsp6 (NM_144933.1,1588-1606).
gagatggtcgggtaatcat

SEQ ID NO: 755146 - DNA, 19 bp, Mus musculus
  siRNA target sequence for Crsp6 (NM_144933.1,1590-1608).
gatggtcgggtaatcatgt

SEQ ID NO: 755147 - DNA, 19 bp, Mus musculus
  siRNA target sequence for Crsp6 (NM_144933.1,1593-1611).
ggtcgggtaatcatgttgt

SEQ ID NO: 755148 - DNA, 19 bp, Mus musculus
  siRNA target sequence for Crsp6 (NM_144933.1,1680-1698).
cagcagcttgccaaggtta

SEQ ID NO: 755149 - DNA, 19 bp, Mus musculus
  siRNA target sequence for Crsp6 (NM_144933.1,1734-1752).
ggacttgggcccatagaga

SEQ ID NO: 755150 - DNA, 19 bp, Mus musculus
  siRNA target sequence for Crsp6 (NM_144933.1,1831-1849).
gtggcagcaagattatggt

SEQ ID NO: 755151 - DNA, 19 bp, Mus musculus
  siRNA target sequence for Crsp6 (NM_144933.1,1877-1895).
ccttccgaagagtgatgtt

SEQ ID NO: 755152 - DNA, 19 bp, Mus musculus
  siRNA target sequence for Crsp6 (NM_144933.1,1959-1977).
gaaggccgaaacttcgttt

SEQ ID NO: 755153 - DNA, 19 bp, Mus musculus
  siRNA target sequence for Crsp6 (NM_144933.1,1962-1980).
ggccgaaacttcgtttata

SEQ ID NO: 755154 - DNA, 19 bp, Mus musculus
  siRNA target sequence for Crsp6 (NM_144933.1,1964-1982).
ccgaaacttcgtttataaa

SEQ ID NO: 755155 - DNA, 19 bp, Mus musculus
  siRNA target sequence for Crsp6 (NM_144933.1,1965-1983).
cgaaacttcgtttataaaa

SEQ ID NO: 755156 - DNA, 19 bp, Mus musculus
  siRNA target sequence for Mbd3l2 (NM_144934.2,239-257).
gaagtatgatactcaacaa

SEQ ID NO: 755157 - DNA, 19 bp, Mus musculus
  siRNA target sequence for Mbd3l2 (NM_144934.2,242-260).
gtatgatactcaacaaatt

SEQ ID NO: 755158 - DNA, 19 bp, Mus musculus
  siRNA target sequence for Mbd3l2 (NM_144934.2,278-296).
cccagattgtcccgaaaaa

SEQ ID NO: 755159 - DNA, 19 bp, Mus musculus
  siRNA target sequence for Mbd3l2 (NM_144934.2,282-300).
gattgtcccgaaaaagata

SEQ ID NO: 755160 - DNA, 19 bp, Mus musculus
  siRNA target sequence for Mbd3l2 (NM_144934.2,319-337).
ggtgttacttccaaagatt

SEQ ID NO: 755161 - DNA, 19 bp, Mus musculus
  siRNA target sequence for Mbd3l2 (NM_144934.2,322-340).
gttacttccaaagattcta

SEQ ID NO: 755162 - DNA, 19 bp, Mus musculus
  siRNA target sequence for Mbd3l2 (NM_144934.2,369-387).
gccagtgaccacaataact

SEQ ID NO: 755163 - DNA, 19 bp, Mus musculus
  siRNA target sequence for Mbd3l2 (NM_144934.2,499-517).
caggacctgtcatgtcaat

SEQ ID NO: 755164 - DNA, 19 bp, Mus musculus
  siRNA target sequence for Mbd3l2 (NM_144934.2,502-520).
gacctgtcatgtcaattga

SEQ ID NO: 755165 - DNA, 19 bp, Mus musculus
  siRNA target sequence for Mbd3l2 (NM_144934.2,527-545).
caaaccctgtagaaagaat

SEQ ID NO: 755166 - DNA, 19 bp, Mus musculus
  siRNA target sequence for Mbd3l2 (NM_144934.2,550-568).
ctgggaatgcgggatgaaa

SEQ ID NO: 755167 - DNA, 19 bp, Mus musculus
  siRNA target sequence for Mbd3l2 (NM_144934.2,552-570).
gggaatgcgggatgaaact

SEQ ID NO: 755168 - DNA, 19 bp, Mus musculus
  siRNA target sequence for Mbd3l2 (NM_144934.2,553-571).
ggaatgcgggatgaaacta

SEQ ID NO: 755169 - DNA, 19 bp, Mus musculus
  siRNA target sequence for Mbd3l2 (NM_144934.2,554-572).
gaatgcgggatgaaactaa

SEQ ID NO: 755170 - DNA, 19 bp, Mus musculus
  siRNA target sequence for Mbd3l2 (NM_144934.2,597-615).
gcttactcctggagaagtt

SEQ ID NO: 755171 - DNA, 19 bp, Mus musculus
  siRNA target sequence for Mbd3l2 (NM_144934.2,598-616).
cttactcctggagaagtta

SEQ ID NO: 755172 - DNA, 19 bp, Mus musculus
  siRNA target sequence for Mbd3l2 (NM_144934.2,715-733).
catctgtcaccatcttact

SEQ ID NO: 755173 - DNA, 19 bp, Mus musculus
  siRNA target sequence for Mbd3l2 (NM_144934.2,718-736).
ctgtcaccatcttacttca

SEQ ID NO: 755174 - DNA, 19 bp, Mus musculus
  siRNA target sequence for Mbd3l2 (NM_144934.2,728-746).
cttacttcatccaagaagt

SEQ ID NO: 755175 - DNA, 19 bp, Mus musculus
  siRNA target sequence for Mbd3l2 (NM_144934.2,738-756).
ccaagaagtaactattgca

SEQ ID NO: 755176 - DNA, 19 bp, Mus musculus
  siRNA target sequence for BC018242 (NM_144935.1,324-342).
cacctgaagcggagtttct

SEQ ID NO: 755177 - DNA, 19 bp, Mus musculus
  siRNA target sequence for BC018242 (NM_144935.1,327-345).
ctgaagcggagtttctcta

SEQ ID NO: 755178 - DNA, 19 bp, Mus musculus
  siRNA target sequence for BC018242 (NM_144935.1,692-710).
cctgggggtgtactctttt

SEQ ID NO: 755179 - DNA, 19 bp, Mus musculus
  siRNA target sequence for BC018242 (NM_144935.1,714-732).
ctcttcaccacgaccattt

SEQ ID NO: 755180 - DNA, 19 bp, Mus musculus
  siRNA target sequence for BC018242 (NM_144935.1,716-734).
cttcaccacgaccattttt

SEQ ID NO: 755181 - DNA, 19 bp, Mus musculus
  siRNA target sequence for BC018242 (NM_144935.1,786-804).
gtgtgtcgccccaactaca

SEQ ID NO: 755182 - DNA, 19 bp, Mus musculus
  siRNA target sequence for BC018242 (NM_144935.1,945-963).
gcctacgctgtcacctata

SEQ ID NO: 755183 - DNA, 19 bp, Mus musculus
  siRNA target sequence for BC018242 (NM_144935.1,1074-1092).
gcggagtatcgcaaccatt

SEQ ID NO: 755184 - DNA, 19 bp, Mus musculus
  siRNA target sequence for BC018242 (NM_144935.1,1125-1143).
gcagccatcgccacctttt

SEQ ID NO: 755185 - DNA, 19 bp, Mus musculus
  siRNA target sequence for BC018242 (NM_144935.1,1150-1168).
cctgtgttgtgcacaattt

SEQ ID NO: 755186 - DNA, 19 bp, Mus musculus
  siRNA target sequence for BC018242 (NM_144935.1,1153-1171).
gtgttgtgcacaatttcca

SEQ ID NO: 755187 - DNA, 19 bp, Mus musculus
  siRNA target sequence for BC018222 (NM_144936.1,161-179).
gtacccactgaagtacttt

SEQ ID NO: 755188 - DNA, 19 bp, Mus musculus
  siRNA target sequence for BC018222 (NM_144936.1,183-201).
cacaagggcttgaagaata

SEQ ID NO: 755189 - DNA, 19 bp, Mus musculus
  siRNA target sequence for BC018222 (NM_144936.1,224-242).
gcgcattgagatcattgaa

SEQ ID NO: 755190 - DNA, 19 bp, Mus musculus
  siRNA target sequence for BC018222 (NM_144936.1,249-267).
gtgaagactctgtttgcaa

SEQ ID NO: 755191 - DNA, 19 bp, Mus musculus
  siRNA target sequence for BC018222 (NM_144936.1,318-336).
ctctaccacgagaaccaat

SEQ ID NO: 755192 - DNA, 19 bp, Mus musculus
  siRNA target sequence for BC018222 (NM_144936.1,364-382).
gcaccatgtacctattctt

SEQ ID NO: 755193 - DNA, 19 bp, Mus musculus
  siRNA target sequence for BC018222 (NM_144936.1,393-411).
ggactcatggacatgatca

SEQ ID NO: 755194 - DNA, 19 bp, Mus musculus
  siRNA target sequence for BC018222 (NM_144936.1,432-450).
gtgcccctggggttagaca

SEQ ID NO: 755195 - DNA, 19 bp, Mus musculus
  siRNA target sequence for BC018222 (NM_144936.1,442-460).
ggttagacagagtggtttt

SEQ ID NO: 755196 - DNA, 19 bp, Mus musculus
  siRNA target sequence for BC018222 (NM_144936.1,461-479).
ggctatggccgtattcatt

SEQ ID NO: 755197 - DNA, 19 bp, Mus musculus
  siRNA target sequence for BC018222 (NM_144936.1,463-481).
ctatggccgtattcattga

SEQ ID NO: 755198 - DNA, 19 bp, Mus musculus
  siRNA target sequence for BC018222 (NM_144936.1,469-487).
ccgtattcattgaaggttt

SEQ ID NO: 755199 - DNA, 19 bp, Mus musculus
  siRNA target sequence for BC018222 (NM_144936.1,470-488).
cgtattcattgaaggtttt

SEQ ID NO: 755200 - DNA, 19 bp, Mus musculus
  siRNA target sequence for BC018222 (NM_144936.1,577-595).
gcatctctctggaggttat

SEQ ID NO: 755201 - DNA, 19 bp, Mus musculus
  siRNA target sequence for BC018222 (NM_144936.1,591-609).
gttatccttcgggataaca

SEQ ID NO: 755202 - DNA, 19 bp, Mus musculus
  siRNA target sequence for BC018222 (NM_144936.1,627-645).
cgaaccagtctccttatct

SEQ ID NO: 755203 - DNA, 19 bp, Mus musculus
  siRNA target sequence for BC018222 (NM_144936.1,628-646).
gaaccagtctccttatctt

SEQ ID NO: 755204 - DNA, 19 bp, Mus musculus
  siRNA target sequence for BC018222 (NM_144936.1,680-698).
cctgttcccgccatttgga

SEQ ID NO: 755205 - DNA, 19 bp, Mus musculus
  siRNA target sequence for BC018222 (NM_144936.1,781-799).
gcatcgtagccatcaacta

SEQ ID NO: 755206 - DNA, 19 bp, Mus musculus
  siRNA target sequence for BC018222 (NM_144936.1,849-867).
gaaatcattgggattcaga

SEQ ID NO: 755207 - DNA, 19 bp, Mus musculus
  siRNA target sequence for BC019977 (NM_144941.2,268-286).
cgcacccgcagctgtgtta

SEQ ID NO: 755208 - DNA, 19 bp, Mus musculus
  siRNA target sequence for BC019977 (NM_144941.2,990-1008).
gctccgtgtcggcagtaaa

SEQ ID NO: 755209 - DNA, 19 bp, Mus musculus
  siRNA target sequence for BC019977 (NM_144941.2,993-1011).
ccgtgtcggcagtaaacct

SEQ ID NO: 755210 - DNA, 19 bp, Mus musculus
  siRNA target sequence for BC019977 (NM_144941.2,1014-1032).
ccaaacacgtggactctat

SEQ ID NO: 755211 - DNA, 19 bp, Mus musculus
  siRNA target sequence for BC019977 (NM_144941.2,1015-1033).
caaacacgtggactctata

SEQ ID NO: 755212 - DNA, 19 bp, Mus musculus
  siRNA target sequence for BC019977 (NM_144941.2,1019-1037).
cacgtggactctataatca

SEQ ID NO: 755213 - DNA, 19 bp, Mus musculus
  siRNA target sequence for BC019977 (NM_144941.2,1022-1040).
gtggactctataatcaaca

SEQ ID NO: 755214 - DNA, 19 bp, Mus musculus
  siRNA target sequence for BC019977 (NM_144941.2,1464-1482).
ccacgccggtgcagaaaaa

SEQ ID NO: 755215 - DNA, 19 bp, Mus musculus
  siRNA target sequence for BC019977 (NM_144941.2,1467-1485).
cgccggtgcagaaaaagga

SEQ ID NO: 755216 - DNA, 19 bp, Mus musculus
  siRNA target sequence for BC019977 (NM_144941.2,1536-1554).
gcgaacggaacctcaagaa

SEQ ID NO: 755217 - DNA, 19 bp, Mus musculus
  siRNA target sequence for BC019977 (NM_144941.2,1996-2014).
ctcggtgacccctagcaaa

SEQ ID NO: 755218 - DNA, 19 bp, Mus musculus
  siRNA target sequence for BC019977 (NM_144941.2,2049-2067).
cgcggctcctggctgaaaa

SEQ ID NO: 755219 - DNA, 19 bp, Mus musculus
  siRNA target sequence for BC019977 (NM_144941.2,2401-2419).
gaggactcggaaatcagaa

SEQ ID NO: 755220 - DNA, 19 bp, Mus musculus
  siRNA target sequence for BC019977 (NM_144941.2,2449-2467).
ggagaccgcagctaacaat

SEQ ID NO: 755221 - DNA, 19 bp, Mus musculus
  siRNA target sequence for BC019977 (NM_144941.2,2450-2468).
gagaccgcagctaacaatt

SEQ ID NO: 755222 - DNA, 19 bp, Mus musculus
  siRNA target sequence for BC019977 (NM_144941.2,2510-2528).
gggctacagaaggattcta

SEQ ID NO: 755223 - DNA, 19 bp, Mus musculus
  siRNA target sequence for BC019977 (NM_144941.2,2511-2529).
ggctacagaaggattctat

SEQ ID NO: 755224 - DNA, 19 bp, Mus musculus
  siRNA target sequence for BC019977 (NM_144941.2,2587-2605).
gccagggtccctggtaaat

SEQ ID NO: 755225 - DNA, 19 bp, Mus musculus
  siRNA target sequence for BC019977 (NM_144941.2,2751-2769).
cacaggtcacagaagttct

SEQ ID NO: 755226 - DNA, 19 bp, Mus musculus
  siRNA target sequence for Lgi2 (NM_144945.1,361-379).
cctgagcctagtaaatgga

SEQ ID NO: 755227 - DNA, 19 bp, Mus musculus
  siRNA target sequence for Lgi2 (NM_144945.1,430-448).
gctgctattgctgaattct

SEQ ID NO: 755228 - DNA, 19 bp, Mus musculus
  siRNA target sequence for Lgi2 (NM_144945.1,434-452).
ctattgctgaattctaact

SEQ ID NO: 755229 - DNA, 19 bp, Mus musculus
  siRNA target sequence for Lgi2 (NM_144945.1,440-458).
ctgaattctaactcattca

SEQ ID NO: 755230 - DNA, 19 bp, Mus musculus
  siRNA target sequence for Lgi2 (NM_144945.1,486-504).
gcctttttcatcttgaata

SEQ ID NO: 755231 - DNA, 19 bp, Mus musculus
  siRNA target sequence for Lgi2 (NM_144945.1,508-526).
gttcattgaagggaacaaa

SEQ ID NO: 755232 - DNA, 19 bp, Mus musculus
  siRNA target sequence for Lgi2 (NM_144945.1,568-586).
cctgactcacctagactta

SEQ ID NO: 755233 - DNA, 19 bp, Mus musculus
  siRNA target sequence for Lgi2 (NM_144945.1,569-587).
ctgactcacctagacttaa

SEQ ID NO: 755234 - DNA, 19 bp, Mus musculus
  siRNA target sequence for Lgi2 (NM_144945.1,578-596).
ctagacttaaggggtaata

SEQ ID NO: 755235 - DNA, 19 bp, Mus musculus
  siRNA target sequence for Lgi2 (NM_144945.1,675-693).
gtatcggtccaccagaata

SEQ ID NO: 755236 - DNA, 19 bp, Mus musculus
  siRNA target sequence for Lgi2 (NM_144945.1,791-809).
gaactctccctgggatttt

SEQ ID NO: 755237 - DNA, 19 bp, Mus musculus
  siRNA target sequence for Lgi2 (NM_144945.1,810-828).
gtgaactaatatttgtttt

SEQ ID NO: 755238 - DNA, 19 bp, Mus musculus
  siRNA target sequence for Lgi2 (NM_144945.1,830-848).
caacacccactctcagatt

SEQ ID NO: 755239 - DNA, 19 bp, Mus musculus
  siRNA target sequence for Lgi2 (NM_144945.1,843-861).
cagattttgtcgttcatca

SEQ ID NO: 755240 - DNA, 19 bp, Mus musculus
  siRNA target sequence for Lgi2 (NM_144945.1,961-979).
ggagtgggaccacatagaa

SEQ ID NO: 755241 - DNA, 19 bp, Mus musculus
  siRNA target sequence for Lgi2 (NM_144945.1,962-980).
gagtgggaccacatagaaa

SEQ ID NO: 755242 - DNA, 19 bp, Mus musculus
  siRNA target sequence for Lgi2 (NM_144945.1,967-985).
ggaccacatagaaatgaat

SEQ ID NO: 755243 - DNA, 19 bp, Mus musculus
  siRNA target sequence for Lgi2 (NM_144945.1,1083-1101).
gtggctctcacatttacaa

SEQ ID NO: 755244 - DNA, 19 bp, Mus musculus
  siRNA target sequence for Lgi2 (NM_144945.1,1108-1126).
cgagagctggaccaagttt

SEQ ID NO: 755245 - DNA, 19 bp, Mus musculus
  siRNA target sequence for Lgi2 (NM_144945.1,1116-1134).
ggaccaagtttgtcaagtt

SEQ ID NO: 755246 - DNA, 19 bp, Mus musculus
  siRNA target sequence for Lgi2 (NM_144945.1,1161-1179).
ccaagcccaacgacattga

SEQ ID NO: 755247 - DNA, 19 bp, Mus musculus
  siRNA target sequence for Lgi2 (NM_144945.1,1238-1256).
ctgtccacagtttacaagt

SEQ ID NO: 755248 - DNA, 19 bp, Mus musculus
  siRNA target sequence for Lgi2 (NM_144945.1,1276-1294).
ctcctaccagtcactacat

SEQ ID NO: 755249 - DNA, 19 bp, Mus musculus
  siRNA target sequence for Lgi2 (NM_144945.1,1595-1613).
cccttctccttcaaagata

SEQ ID NO: 755250 - DNA, 19 bp, Mus musculus
  siRNA target sequence for Lgi2 (NM_144945.1,1740-1758).
ccaccgacaggagagattt

SEQ ID NO: 755251 - DNA, 19 bp, Mus musculus
  siRNA target sequence for Lgi2 (NM_144945.1,1743-1761).
ccgacaggagagatttctt

SEQ ID NO: 755252 - DNA, 19 bp, Mus musculus
  siRNA target sequence for Lgi2 (NM_144945.1,1744-1762).
cgacaggagagatttcttt

SEQ ID NO: 755253 - DNA, 19 bp, Mus musculus
  siRNA target sequence for Lgi2 (NM_144945.1,1786-1804).
gacaaagatttttgaacat

SEQ ID NO: 755254 - DNA, 19 bp, Mus musculus
  siRNA target sequence for Neto1 (NM_144946.2,938-956).
ctatggacgcagtttgttt

SEQ ID NO: 755255 - DNA, 19 bp, Mus musculus
  siRNA target sequence for Neto1 (NM_144946.2,943-961).
gacgcagtttgtttcacat

SEQ ID NO: 755256 - DNA, 19 bp, Mus musculus
  siRNA target sequence for Neto1 (NM_144946.2,957-975).
cacattatagcaagtttaa

SEQ ID NO: 755257 - DNA, 19 bp, Mus musculus
  siRNA target sequence for Neto1 (NM_144946.2,1077-1095).
gagggaggtgtctttacgt

SEQ ID NO: 755258 - DNA, 19 bp, Mus musculus
  siRNA target sequence for Neto1 (NM_144946.2,1128-1146).
cgagagtgtgtctacatca

SEQ ID NO: 755259 - DNA, 19 bp, Mus musculus
  siRNA target sequence for Neto1 (NM_144946.2,1129-1147).
gagagtgtgtctacatcat

SEQ ID NO: 755260 - DNA, 19 bp, Mus musculus
  siRNA target sequence for Neto1 (NM_144946.2,1207-1225).
catcttgggagtgcaaatt

SEQ ID NO: 755261 - DNA, 19 bp, Mus musculus
  siRNA target sequence for Neto1 (NM_144946.2,1219-1237).
gcaaatttgatcatattga

SEQ ID NO: 755262 - DNA, 19 bp, Mus musculus
  siRNA target sequence for Neto1 (NM_144946.2,1220-1238).
caaatttgatcatattgaa

SEQ ID NO: 755263 - DNA, 19 bp, Mus musculus
  siRNA target sequence for Neto1 (NM_144946.2,1293-1311).
cagaatccacctgtaataa

SEQ ID NO: 755264 - DNA, 19 bp, Mus musculus
  siRNA target sequence for Neto1 (NM_144946.2,1370-1388).
gggattttcagctcgatat

SEQ ID NO: 755265 - DNA, 19 bp, Mus musculus
  siRNA target sequence for Neto1 (NM_144946.2,1371-1389).
ggattttcagctcgatata

SEQ ID NO: 755266 - DNA, 19 bp, Mus musculus
  siRNA target sequence for Neto1 (NM_144946.2,1372-1390).
gattttcagctcgatataa

SEQ ID NO: 755267 - DNA, 19 bp, Mus musculus
  siRNA target sequence for Neto1 (NM_144946.2,1440-1458).
ccagcgtgtgagtttgaga

SEQ ID NO: 755268 - DNA, 19 bp, Mus musculus
  siRNA target sequence for Neto1 (NM_144946.2,1441-1459).
cagcgtgtgagtttgagat

SEQ ID NO: 755269 - DNA, 19 bp, Mus musculus
  siRNA target sequence for Neto1 (NM_144946.2,1524-1542).
gaagccgtggattgcaaat

SEQ ID NO: 755270 - DNA, 19 bp, Mus musculus
  siRNA target sequence for Neto1 (NM_144946.2,1556-1574).
cccaccacgatccaagatt

SEQ ID NO: 755271 - DNA, 19 bp, Mus musculus
  siRNA target sequence for Neto1 (NM_144946.2,1557-1575).
ccaccacgatccaagattt

SEQ ID NO: 755272 - DNA, 19 bp, Mus musculus
  siRNA target sequence for Neto1 (NM_144946.2,1558-1576).
caccacgatccaagattta

SEQ ID NO: 755273 - DNA, 19 bp, Mus musculus
  siRNA target sequence for Neto1 (NM_144946.2,1560-1578).
ccacgatccaagatttact

SEQ ID NO: 755274 - DNA, 19 bp, Mus musculus
  siRNA target sequence for Neto1 (NM_144946.2,1561-1579).
cacgatccaagatttactt

SEQ ID NO: 755275 - DNA, 19 bp, Mus musculus
  siRNA target sequence for Neto1 (NM_144946.2,1581-1599).
cgtttcttggactatgaga

SEQ ID NO: 755276 - DNA, 19 bp, Mus musculus
  siRNA target sequence for Neto1 (NM_144946.2,1651-1669).
gcagctccgtggaggattt

SEQ ID NO: 755277 - DNA, 19 bp, Mus musculus
  siRNA target sequence for Neto1 (NM_144946.2,1758-1776).
cgtaacagcaggtttcaga

SEQ ID NO: 755278 - DNA, 19 bp, Mus musculus
  siRNA target sequence for Neto1 (NM_144946.2,1819-1837).
cattcttctgccacagtaa

SEQ ID NO: 755279 - DNA, 19 bp, Mus musculus
  siRNA target sequence for Neto1 (NM_144946.2,1828-1846).
gccacagtaacatgtgtat

SEQ ID NO: 755280 - DNA, 19 bp, Mus musculus
  siRNA target sequence for Neto1 (NM_144946.2,1834-1852).
gtaacatgtgtattaacaa

SEQ ID NO: 755281 - DNA, 19 bp, Mus musculus
  siRNA target sequence for Neto1 (NM_144946.2,1869-1887).
gggctccagaactgtgtat

SEQ ID NO: 755282 - DNA, 19 bp, Mus musculus
  siRNA target sequence for Neto1 (NM_144946.2,1870-1888).
ggctccagaactgtgtata

SEQ ID NO: 755283 - DNA, 19 bp, Mus musculus
  siRNA target sequence for Neto1 (NM_144946.2,1871-1889).
gctccagaactgtgtatat

SEQ ID NO: 755284 - DNA, 19 bp, Mus musculus
  siRNA target sequence for Neto1 (NM_144946.2,1884-1902).
gtatatccctgggatgaaa

SEQ ID NO: 755285 - DNA, 19 bp, Mus musculus
  siRNA target sequence for Neto1 (NM_144946.2,1978-1996).
cttcctgcattgtgatcat

SEQ ID NO: 755286 - DNA, 19 bp, Mus musculus
  siRNA target sequence for Neto1 (NM_144946.2,1984-2002).
gcattgtgatcatccttat

SEQ ID NO: 755287 - DNA, 19 bp, Mus musculus
  siRNA target sequence for Neto1 (NM_144946.2,1991-2009).
gatcatccttattatcgtt

SEQ ID NO: 755288 - DNA, 19 bp, Mus musculus
  siRNA target sequence for Neto1 (NM_144946.2,2024-2042).
gatcaaacagcctcgtaaa

SEQ ID NO: 755289 - DNA, 19 bp, Mus musculus
  siRNA target sequence for Neto1 (NM_144946.2,2027-2045).
caaacagcctcgtaaaaaa

SEQ ID NO: 755290 - DNA, 19 bp, Mus musculus
  siRNA target sequence for Neto1 (NM_144946.2,2097-2115).
gagcctccccactatgagt

SEQ ID NO: 755291 - DNA, 19 bp, Mus musculus
  siRNA target sequence for Neto1 (NM_144946.2,2099-2117).
gcctccccactatgagtta

SEQ ID NO: 755292 - DNA, 19 bp, Mus musculus
  siRNA target sequence for Neto1 (NM_144946.2,2155-2173).
cagacgtggcggaagactt

SEQ ID NO: 755293 - DNA, 19 bp, Mus musculus
  siRNA target sequence for Neto1 (NM_144946.2,2164-2182).
cggaagactttgaaaatta

SEQ ID NO: 755294 - DNA, 19 bp, Mus musculus
  siRNA target sequence for Neto1 (NM_144946.2,2175-2193).
gaaaattaccataaactga

SEQ ID NO: 755295 - DNA, 19 bp, Mus musculus
  siRNA target sequence for Neto1 (NM_144946.2,2197-2215).
gatcatcttccaaatgcat

SEQ ID NO: 755296 - DNA, 19 bp, Mus musculus
  siRNA target sequence for Neto1 (NM_144946.2,2276-2294).
cacaagggacgcttccatt

SEQ ID NO: 755297 - DNA, 19 bp, Mus musculus
  siRNA target sequence for Neto1 (NM_144946.2,2278-2296).
caagggacgcttccatttt

SEQ ID NO: 755298 - DNA, 19 bp, Mus musculus
  siRNA target sequence for Neto1 (NM_144946.2,2361-2379).
gtcatgaaacacaactact

SEQ ID NO: 755299 - DNA, 19 bp, Mus musculus
  siRNA target sequence for Neto1 (NM_144946.2,2445-2463).
ctatccagacacgaaaaat

SEQ ID NO: 755300 - DNA, 19 bp, Mus musculus
  siRNA target sequence for Neto1 (NM_144946.2,2497-2515).
gcaaacatgaatctgaata

SEQ ID NO: 755301 - DNA, 19 bp, Mus musculus
  siRNA target sequence for Neto1 (NM_144946.2,2505-2523).
gaatctgaatacaacacaa

SEQ ID NO: 755302 - DNA, 19 bp, Mus musculus
  siRNA target sequence for 1700019D03Rik (NM_144953.1,435-453).
ccacattggacattgacaa

SEQ ID NO: 755303 - DNA, 19 bp, Mus musculus
  siRNA target sequence for 1700019D03Rik (NM_144953.1,485-503).
gatgacagcagtcaatata

SEQ ID NO: 755304 - DNA, 19 bp, Mus musculus
  siRNA target sequence for 1700019D03Rik (NM_144953.1,575-593).
ggtgccctgatccttgaat

SEQ ID NO: 755305 - DNA, 19 bp, Mus musculus
  siRNA target sequence for 1700019D03Rik (NM_144953.1,576-594).
gtgccctgatccttgaatt

SEQ ID NO: 755306 - DNA, 19 bp, Mus musculus
  siRNA target sequence for 1700019D03Rik (NM_144953.1,648-666).
gtgaaaacatccagtacta

SEQ ID NO: 755307 - DNA, 19 bp, Mus musculus
  siRNA target sequence for 1700019D03Rik (NM_144953.1,650-668).
gaaaacatccagtactaca

SEQ ID NO: 755308 - DNA, 19 bp, Mus musculus
  siRNA target sequence for 2610305D13Rik (NM_145078.1,833-851).
gcaacaatcccttcttagt

SEQ ID NO: 755309 - DNA, 19 bp, Mus musculus
  siRNA target sequence for 2610305D13Rik (NM_145078.1,841-859).
cccttcttagtaatcatga

SEQ ID NO: 755310 - DNA, 19 bp, Mus musculus
  siRNA target sequence for 2700050C12Rik (NM_145100.2,338-356).
ggcatcgcagcaacttttt

SEQ ID NO: 755311 - DNA, 19 bp, Mus musculus
  siRNA target sequence for 2700050C12Rik (NM_145100.2,348-366).
caactttttgcggattgtt

SEQ ID NO: 755312 - DNA, 19 bp, Mus musculus
  siRNA target sequence for 2700050C12Rik (NM_145100.2,375-393).
cagggctggcgctgcaaat

SEQ ID NO: 755313 - DNA, 19 bp, Mus musculus
  siRNA target sequence for 2700050C12Rik (NM_145100.2,378-396).
ggctggcgctgcaaattca

SEQ ID NO: 755314 - DNA, 19 bp, Mus musculus
  siRNA target sequence for 2700050C12Rik (NM_145100.2,380-398).
ctggcgctgcaaattcagt

SEQ ID NO: 755315 - DNA, 19 bp, Mus musculus
  siRNA target sequence for 2700050C12Rik (NM_145100.2,442-460).
ccctgagttcatcgtaaat

SEQ ID NO: 755316 - DNA, 19 bp, Mus musculus
  siRNA target sequence for 2700050C12Rik (NM_145100.2,443-461).
cctgagttcatcgtaaatt

SEQ ID NO: 755317 - DNA, 19 bp, Mus musculus
  siRNA target sequence for 2700050C12Rik (NM_145100.2,446-464).
gagttcatcgtaaattgca

SEQ ID NO: 755318 - DNA, 19 bp, Mus musculus
  siRNA target sequence for 2700050C12Rik (NM_145100.2,462-480).
gcaccgtgaacgttcaaga

SEQ ID NO: 755319 - DNA, 19 bp, Mus musculus
  siRNA target sequence for 2700050C12Rik (NM_145100.2,465-483).
ccgtgaacgttcaagacat

SEQ ID NO: 755320 - DNA, 19 bp, Mus musculus
  siRNA target sequence for 2700050C12Rik (NM_145100.2,572-590).
gggtaccagtccttctgtt

SEQ ID NO: 755321 - DNA, 19 bp, Mus musculus
  siRNA target sequence for 2700050C12Rik (NM_145100.2,627-645).
gcaacacccctctttgcaa

SEQ ID NO: 755322 - DNA, 19 bp, Mus musculus
  siRNA target sequence for 2700050C12Rik (NM_145100.2,628-646).
caacacccctctttgcaat

SEQ ID NO: 755323 - DNA, 19 bp, Mus musculus
  siRNA target sequence for Pex16 (NM_145122.1,179-197).
gtcgcttctccgattcaca

SEQ ID NO: 755324 - DNA, 19 bp, Mus musculus
  siRNA target sequence for Pex16 (NM_145122.1,545-563).
gcagccaggagccatcata

SEQ ID NO: 755325 - DNA, 19 bp, Mus musculus
  siRNA target sequence for Pex16 (NM_145122.1,546-564).
cagccaggagccatcatat

SEQ ID NO: 755326 - DNA, 19 bp, Mus musculus
  siRNA target sequence for Pex16 (NM_145122.1,548-566).
gccaggagccatcatatgt

SEQ ID NO: 755327 - DNA, 19 bp, Mus musculus
  siRNA target sequence for Pex16 (NM_145122.1,639-657).
ccctcagcagcgggaaatt

SEQ ID NO: 755328 - DNA, 19 bp, Mus musculus
  siRNA target sequence for Pex16 (NM_145122.1,808-826).
ctgtctggtgtggtagata

SEQ ID NO: 755329 - DNA, 19 bp, Mus musculus
  siRNA target sequence for Pex16 (NM_145122.1,814-832).
ggtgtggtagatatgacta

SEQ ID NO: 755330 - DNA, 19 bp, Mus musculus
  siRNA target sequence for Pex16 (NM_145122.1,1046-1064).
ggcagaaaatctatttcta

SEQ ID NO: 755331 - DNA, 19 bp, Mus musculus
  siRNA target sequence for 2210008I11Rik (NM_145124.1,470-488).
cgcggaatggactggaaat

SEQ ID NO: 755332 - DNA, 19 bp, Mus musculus
  siRNA target sequence for 2210008I11Rik (NM_145124.1,595-613).
gggcacacgtaccaactat

SEQ ID NO: 755333 - DNA, 19 bp, Mus musculus
  siRNA target sequence for 2210008I11Rik (NM_145124.1,638-656).
gacctgttgctctatgaca

SEQ ID NO: 755334 - DNA, 19 bp, Mus musculus
  siRNA target sequence for 2210008I11Rik (NM_145124.1,741-759).
gcgtctgctttgactatga

SEQ ID NO: 755335 - DNA, 19 bp, Mus musculus
  siRNA target sequence for 2210008I11Rik (NM_145124.1,1101-1119).
cagctggcggcttttacta

SEQ ID NO: 755336 - DNA, 19 bp, Mus musculus
  siRNA target sequence for 2210008I11Rik (NM_145124.1,1123-1141).
ggagcacctcccaaagctt

SEQ ID NO: 755337 - DNA, 19 bp, Mus musculus
  siRNA target sequence for 2210008I11Rik (NM_145124.1,1696-1714).
caagaaccagggtagaact

SEQ ID NO: 755338 - DNA, 19 bp, Mus musculus
  siRNA target sequence for 2210008I11Rik (NM_145124.1,1938-1956).
gcttcctagaggtggtaaa

SEQ ID NO: 755339 - DNA, 19 bp, Mus musculus
  siRNA target sequence for 2210008I11Rik (NM_145124.1,1963-1981).
gtgtgaacgtggttgtgat

SEQ ID NO: 755340 - DNA, 19 bp, Mus musculus
  siRNA target sequence for 2210008I11Rik (NM_145124.1,2086-2104).
cgatgtcactgctaccaat

SEQ ID NO: 755341 - DNA, 19 bp, Mus musculus
  siRNA target sequence for 2210008I11Rik (NM_145124.1,2281-2299).
gggtcgctgtgatgtgaat

SEQ ID NO: 755342 - DNA, 19 bp, Mus musculus
  siRNA target sequence for 2210008I11Rik (NM_145124.1,2314-2332).
gcttcagtctccacttcat

SEQ ID NO: 755343 - DNA, 19 bp, Mus musculus
  siRNA target sequence for 2210008I11Rik (NM_145124.1,2829-2847).
cggagctggcattgctaat

SEQ ID NO: 755344 - DNA, 19 bp, Mus musculus
  siRNA target sequence for 2210008I11Rik (NM_145124.1,2830-2848).
ggagctggcattgctaatt

SEQ ID NO: 755345 - DNA, 19 bp, Mus musculus
  siRNA target sequence for 2210008I11Rik (NM_145124.1,3165-3183).
gcgaccgcattcagatctt

SEQ ID NO: 755346 - DNA, 19 bp, Mus musculus
  siRNA target sequence for Rnh1 (NM_145135.2,208-226).
ctctgatccagcaatacga

SEQ ID NO: 755347 - DNA, 19 bp, Mus musculus
  siRNA target sequence for Rnh1 (NM_145135.2,258-276).
gaagtgcggtgcaaagaca

SEQ ID NO: 755348 - DNA, 19 bp, Mus musculus
  siRNA target sequence for Rnh1 (NM_145135.2,317-335).
cagccttcgcaccaatgaa

SEQ ID NO: 755349 - DNA, 19 bp, Mus musculus
  siRNA target sequence for Rnh1 (NM_145135.2,319-337).
gccttcgcaccaatgaact

SEQ ID NO: 755350 - DNA, 19 bp, Mus musculus
  siRNA target sequence for Rnh1 (NM_145135.2,475-493).
ccctgcgtgagctacatct

SEQ ID NO: 755351 - DNA, 19 bp, Mus musculus
  siRNA target sequence for Rnh1 (NM_145135.2,481-499).
gtgagctacatctcaatga

SEQ ID NO: 755352 - DNA, 19 bp, Mus musculus
  siRNA target sequence for Rnh1 (NM_145135.2,483-501).
gagctacatctcaatgata

SEQ ID NO: 755353 - DNA, 19 bp, Mus musculus
  siRNA target sequence for Rnh1 (NM_145135.2,553-571).
cccagtgccgtcttgagaa

SEQ ID NO: 755354 - DNA, 19 bp, Mus musculus
  siRNA target sequence for Rnh1 (NM_145135.2,572-590).
gcttcagttggaatactgt

SEQ ID NO: 755355 - DNA, 19 bp, Mus musculus
  siRNA target sequence for Rnh1 (NM_145135.2,838-856).
gcagcaacaagctaggtaa

SEQ ID NO: 755356 - DNA, 19 bp, Mus musculus
  siRNA target sequence for Rnh1 (NM_145135.2,839-857).
cagcaacaagctaggtaat

SEQ ID NO: 755357 - DNA, 19 bp, Mus musculus
  siRNA target sequence for Rnh1 (NM_145135.2,842-860).
caacaagctaggtaatgca

SEQ ID NO: 755358 - DNA, 19 bp, Mus musculus
  siRNA target sequence for Rnh1 (NM_145135.2,917-935).
gtggctctgggaatgtgat

SEQ ID NO: 755359 - DNA, 19 bp, Mus musculus
  siRNA target sequence for Rnh1 (NM_145135.2,919-937).
ggctctgggaatgtgatat

SEQ ID NO: 755360 - DNA, 19 bp, Mus musculus
  siRNA target sequence for Rnh1 (NM_145135.2,923-941).
ctgggaatgtgatatcact

SEQ ID NO: 755361 - DNA, 19 bp, Mus musculus
  siRNA target sequence for Rnh1 (NM_145135.2,1043-1061).
gctgtgtgagagcctatta

SEQ ID NO: 755362 - DNA, 19 bp, Mus musculus
  siRNA target sequence for Rnh1 (NM_145135.2,1080-1098).
gagtcactgtggataaaga

SEQ ID NO: 755363 - DNA, 19 bp, Mus musculus
  siRNA target sequence for Rnh1 (NM_145135.2,1226-1244).
cctgagccagccagataca

SEQ ID NO: 755364 - DNA, 19 bp, Mus musculus
  siRNA target sequence for Rnh1 (NM_145135.2,1269-1287).
gactgtgatgtgacaaata

SEQ ID NO: 755365 - DNA, 19 bp, Mus musculus
  siRNA target sequence for Rnh1 (NM_145135.2,1271-1289).
ctgtgatgtgacaaatagt

SEQ ID NO: 755366 - DNA, 19 bp, Mus musculus
  siRNA target sequence for Rnh1 (NM_145135.2,1427-1445).
gctcgtcctgtatgacatt

SEQ ID NO: 755367 - DNA, 19 bp, Mus musculus
  siRNA target sequence for Rnh1 (NM_145135.2,1497-1515).
ccttccctgaggatcattt

SEQ ID NO: 755368 - DNA, 19 bp, Mus musculus
  siRNA target sequence for Afm (NM_145146.1,109-127).
gcctcaggacgtagatcat

SEQ ID NO: 755369 - DNA, 19 bp, Mus musculus
  siRNA target sequence for Afm (NM_145146.1,110-128).
cctcaggacgtagatcatt

SEQ ID NO: 755370 - DNA, 19 bp, Mus musculus
  siRNA target sequence for Afm (NM_145146.1,111-129).
ctcaggacgtagatcattt

SEQ ID NO: 755371 - DNA, 19 bp, Mus musculus
  siRNA target sequence for Afm (NM_145146.1,113-131).
caggacgtagatcatttca

SEQ ID NO: 755372 - DNA, 19 bp, Mus musculus
  siRNA target sequence for Afm (NM_145146.1,115-133).
ggacgtagatcatttcaat

SEQ ID NO: 755373 - DNA, 19 bp, Mus musculus
  siRNA target sequence for Afm (NM_145146.1,119-137).
gtagatcatttcaatgcta

SEQ ID NO: 755374 - DNA, 19 bp, Mus musculus
  siRNA target sequence for Afm (NM_145146.1,135-153).
ctacccagaaattcataga

SEQ ID NO: 755375 - DNA, 19 bp, Mus musculus
  siRNA target sequence for Afm (NM_145146.1,281-299).
cttccagagtgttcaaaga

SEQ ID NO: 755376 - DNA, 19 bp, Mus musculus
  siRNA target sequence for Afm (NM_145146.1,289-307).
gtgttcaaagacagctaat

SEQ ID NO: 755377 - DNA, 19 bp, Mus musculus
  siRNA target sequence for Afm (NM_145146.1,349-367).
gcagaagcacaacttttct

SEQ ID NO: 755378 - DNA, 19 bp, Mus musculus
  siRNA target sequence for Afm (NM_145146.1,377-395).
gggaaagccggctttccaa

SEQ ID NO: 755379 - DNA, 19 bp, Mus musculus
  siRNA target sequence for Afm (NM_145146.1,593-611).
gaggcagcgaccacatgtt

SEQ ID NO: 755380 - DNA, 19 bp, Mus musculus
  siRNA target sequence for Afm (NM_145146.1,595-613).
ggcagcgaccacatgttgt

SEQ ID NO: 755381 - DNA, 19 bp, Mus musculus
  siRNA target sequence for Afm (NM_145146.1,609-627).
gttgtgaacagcaacagaa

SEQ ID NO: 755382 - DNA, 19 bp, Mus musculus
  siRNA target sequence for Afm (NM_145146.1,959-977).
gaacgtgaagcctgtataa

SEQ ID NO: 755383 - DNA, 19 bp, Mus musculus
  siRNA target sequence for Afm (NM_145146.1,962-980).
cgtgaagcctgtataatta

SEQ ID NO: 755384 - DNA, 19 bp, Mus musculus
  siRNA target sequence for Afm (NM_145146.1,963-981).
gtgaagcctgtataattaa

SEQ ID NO: 755385 - DNA, 19 bp, Mus musculus
  siRNA target sequence for Afm (NM_145146.1,968-986).
gcctgtataattaatgcaa

SEQ ID NO: 755386 - DNA, 19 bp, Mus musculus
  siRNA target sequence for Afm (NM_145146.1,997-1015).
cagaccggagggcttatct

SEQ ID NO: 755387 - DNA, 19 bp, Mus musculus
  siRNA target sequence for Afm (NM_145146.1,999-1017).
gaccggagggcttatctct

SEQ ID NO: 755388 - DNA, 19 bp, Mus musculus
  siRNA target sequence for Afm (NM_145146.1,1322-1340).
catttccttgtcaagttca

SEQ ID NO: 755389 - DNA, 19 bp, Mus musculus
  siRNA target sequence for Afm (NM_145146.1,1370-1388).
gaactggtctcccttagta

SEQ ID NO: 755390 - DNA, 19 bp, Mus musculus
  siRNA target sequence for Afm (NM_145146.1,1450-1468).
caacttggcagatttagtt

SEQ ID NO: 755391 - DNA, 19 bp, Mus musculus
  siRNA target sequence for Afm (NM_145146.1,1475-1493).
gagttatgtggggtaaata

SEQ ID NO: 755392 - DNA, 19 bp, Mus musculus
  siRNA target sequence for Afm (NM_145146.1,1477-1495).
gttatgtggggtaaataca

SEQ ID NO: 755393 - DNA, 19 bp, Mus musculus
  siRNA target sequence for Afm (NM_145146.1,1484-1502).
ggggtaaatacaaatcgaa

SEQ ID NO: 755394 - DNA, 19 bp, Mus musculus
  siRNA target sequence for Afm (NM_145146.1,1573-1591).
gaaagctgatacaacgtat

SEQ ID NO: 755395 - DNA, 19 bp, Mus musculus
  siRNA target sequence for Afm (NM_145146.1,1733-1751).
ctgtgcttgttcacaaagt

SEQ ID NO: 755396 - DNA, 19 bp, Mus musculus
  siRNA target sequence for Pgbpll (NM_145147.2,839-857).
cgggaccaaccgtttgcta

SEQ ID NO: 755397 - DNA, 19 bp, Mus musculus
  siRNA target sequence for Pgbpll (NM_145147.2,844-862).
ccaaccgtttgctactctt

SEQ ID NO: 755398 - DNA, 19 bp, Mus musculus
  siRNA target sequence for Pgbpll (NM_145147.2,849-867).
cgtttgctactcttgatgt

SEQ ID NO: 755399 - DNA, 19 bp, Mus musculus
  siRNA target sequence for Pgbpll (NM_145147.2,894-912).
cacgcctgcgcatcttgta

SEQ ID NO: 755400 - DNA, 19 bp, Mus musculus
  siRNA target sequence for Pgbpll (NM_145147.2,1292-1310).
caacttggctggctctata

SEQ ID NO: 755401 - DNA, 19 bp, Mus musculus
  siRNA target sequence for Prc1 (NM_145150.1,83-101).
ctagcagatgagtctatca

SEQ ID NO: 755402 - DNA, 19 bp, Mus musculus
  siRNA target sequence for Prc1 (NM_145150.1,106-124).
cctgcagaaagctctaact

SEQ ID NO: 755403 - DNA, 19 bp, Mus musculus
  siRNA target sequence for Prc1 (NM_145150.1,185-203).
gaggttgtaaagaagcata

SEQ ID NO: 755404 - DNA, 19 bp, Mus musculus
  siRNA target sequence for Prc1 (NM_145150.1,345-363).
caaccatcttgcaactaga

SEQ ID NO: 755405 - DNA, 19 bp, Mus musculus
  siRNA target sequence for Prc1 (NM_145150.1,348-366).
ccatcttgcaactagaaaa

SEQ ID NO: 755406 - DNA, 19 bp, Mus musculus
  siRNA target sequence for Prc1 (NM_145150.1,499-517).
ctctgtccccaccttagaa

SEQ ID NO: 755407 - DNA, 19 bp, Mus musculus
  siRNA target sequence for Prc1 (NM_145150.1,570-588).
cgaggcgtgaagaatttgt

SEQ ID NO: 755408 - DNA, 19 bp, Mus musculus
  siRNA target sequence for Prc1 (NM_145150.1,573-591).
ggcgtgaagaatttgtcaa

SEQ ID NO: 755409 - DNA, 19 bp, Mus musculus
  siRNA target sequence for Prc1 (NM_145150.1,598-616).
gaaacaaatcatattgtgt

SEQ ID NO: 755410 - DNA, 19 bp, Mus musculus
  siRNA target sequence for Prc1 (NM_145150.1,629-647).
gaacactctccagatacaa

SEQ ID NO: 755411 - DNA, 19 bp, Mus musculus
  siRNA target sequence for Prc1 (NM_145150.1,690-708).
gtttatcactggagaacat

SEQ ID NO: 755412 - DNA, 19 bp, Mus musculus
  siRNA target sequence for Prc1 (NM_145150.1,795-813).
gagagctctgggataggtt

SEQ ID NO: 755413 - DNA, 19 bp, Mus musculus
  siRNA target sequence for Prc1 (NM_145150.1,799-817).
gctctgggataggttacaa

SEQ ID NO: 755414 - DNA, 19 bp, Mus musculus
  siRNA target sequence for Prc1 (NM_145150.1,802-820).
ctgggataggttacaaata

SEQ ID NO: 755415 - DNA, 19 bp, Mus musculus
  siRNA target sequence for Prc1 (NM_145150.1,805-823).
ggataggttacaaatacct

SEQ ID NO: 755416 - DNA, 19 bp, Mus musculus
  siRNA target sequence for Prc1 (NM_145150.1,849-867).
caattatgactggatcaaa

SEQ ID NO: 755417 - DNA, 19 bp, Mus musculus
  siRNA target sequence for Prc1 (NM_145150.1,877-895).
caggaatgcgctgaaatta

SEQ ID NO: 755418 - DNA, 19 bp, Mus musculus
  siRNA target sequence for Prc1 (NM_145150.1,879-897).
ggaatgcgctgaaattaga

SEQ ID NO: 755419 - DNA, 19 bp, Mus musculus
  siRNA target sequence for Prc1 (NM_145150.1,880-898).
gaatgcgctgaaattagaa

SEQ ID NO: 755420 - DNA, 19 bp, Mus musculus
  siRNA target sequence for Prc1 (NM_145150.1,976-994).
ctgggaccagtgtttttat

SEQ ID NO: 755421 - DNA, 19 bp, Mus musculus
  siRNA target sequence for Prc1 (NM_145150.1,1072-1090).
cgagattgtacggttaaga

SEQ ID NO: 755422 - DNA, 19 bp, Mus musculus
  siRNA target sequence for Prc1 (NM_145150.1,1073-1091).
gagattgtacggttaagaa

SEQ ID NO: 755423 - DNA, 19 bp, Mus musculus
  siRNA target sequence for Prc1 (NM_145150.1,1079-1097).
gtacggttaagaaactact

SEQ ID NO: 755424 - DNA, 19 bp, Mus musculus
  siRNA target sequence for Prc1 (NM_145150.1,1149-1167).
ggaaacttttcctagagtt

SEQ ID NO: 755425 - DNA, 19 bp, Mus musculus
  siRNA target sequence for Prc1 (NM_145150.1,1200-1218).
caaaccgagggggaaatct

SEQ ID NO: 755426 - DNA, 19 bp, Mus musculus
  siRNA target sequence for Prc1 (NM_145150.1,1204-1222).
ccgagggggaaatctttta

SEQ ID NO: 755427 - DNA, 19 bp, Mus musculus
  siRNA target sequence for Prc1 (NM_145150.1,1205-1223).
cgagggggaaatcttttaa

SEQ ID NO: 755428 - DNA, 19 bp, Mus musculus
  siRNA target sequence for Prc1 (NM_145150.1,1206-1224).
gagggggaaatcttttaaa

SEQ ID NO: 755429 - DNA, 19 bp, Mus musculus
  siRNA target sequence for Prc1 (NM_145150.1,1279-1297).
gttgaaagcacggattgaa

SEQ ID NO: 755430 - DNA, 19 bp, Mus musculus
  siRNA target sequence for Prc1 (NM_145150.1,1328-1346).
gtggtgaatgggcagaaat

SEQ ID NO: 755431 - DNA, 19 bp, Mus musculus
  siRNA target sequence for Prc1 (NM_145150.1,1468-1486).
ccggacacctagcaaaaga

SEQ ID NO: 755432 - DNA, 19 bp, Mus musculus
  siRNA target sequence for Prc1 (NM_145150.1,1585-1603).
gtaccggtcacctatgtct

SEQ ID NO: 755433 - DNA, 19 bp, Mus musculus
  siRNA target sequence for Prc1 (NM_145150.1,1796-1814).
gagttttcgcgagaacttt

SEQ ID NO: 755434 - DNA, 19 bp, Mus musculus
  siRNA target sequence for Prc1 (NM_145150.1,1798-1816).
gttttcgcgagaactttca

SEQ ID NO: 755435 - DNA, 19 bp, Mus musculus
  siRNA target sequence for Lrrc3 (NM_145152.2,294-312).
caggggtcttgcttcttca

SEQ ID NO: 755436 - DNA, 19 bp, Mus musculus
  siRNA target sequence for Lrrc3 (NM_145152.2,436-454).
ccgacacggtgcttctgaa

SEQ ID NO: 755437 - DNA, 19 bp, Mus musculus
  siRNA target sequence for Lrrc3 (NM_145152.2,437-455).
cgacacggtgcttctgaaa

SEQ ID NO: 755438 - DNA, 19 bp, Mus musculus
  siRNA target sequence for Lrrc3 (NM_145152.2,440-458).
cacggtgcttctgaaacta

SEQ ID NO: 755439 - DNA, 19 bp, Mus musculus
  siRNA target sequence for Lrrc3 (NM_145152.2,442-460).
cggtgcttctgaaactaga

SEQ ID NO: 755440 - DNA, 19 bp, Mus musculus
  siRNA target sequence for Lrrc3 (NM_145152.2,456-474).
ctagacgccaacagaatct

SEQ ID NO: 755441 - DNA, 19 bp, Mus musculus
  siRNA target sequence for Lrrc3 (NM_145152.2,611-629).
caatcgcatccgaagaatt

SEQ ID NO: 755442 - DNA, 19 bp, Mus musculus
  siRNA target sequence for Lrrc3 (NM_145152.2,615-633).
cgcatccgaagaattccaa

SEQ ID NO: 755443 - DNA, 19 bp, Mus musculus
  siRNA target sequence for Lrrc3 (NM_145152.2,636-654).
gacgccctgggcaagttga

SEQ ID NO: 755444 - DNA, 19 bp, Mus musculus
  siRNA target sequence for Lrrc3 (NM_145152.2,736-754).
cggactccgtggatgaaat

SEQ ID NO: 755445 - DNA, 19 bp, Mus musculus
  siRNA target sequence for Angptl6 (NM_145154.1,197-215).
gccgcgtcaccctagtttt

SEQ ID NO: 755446 - DNA, 19 bp, Mus musculus
  siRNA target sequence for Angptl6 (NM_145154.1,199-217).
cgcgtcaccctagttttgt

SEQ ID NO: 755447 - DNA, 19 bp, Mus musculus
  siRNA target sequence for Angptl6 (NM_145154.1,1010-1028).
ccaactggcagcactacaa

SEQ ID NO: 755448 - DNA, 19 bp, Mus musculus
  siRNA target sequence for Angptl6 (NM_145154.1,1040-1058).
ggcgtccagaaggagaata

SEQ ID NO: 755449 - DNA, 19 bp, Mus musculus
  siRNA target sequence for Angptl6 (NM_145154.1,1042-1060).
cgtccagaaggagaatact

SEQ ID NO: 755450 - DNA, 19 bp, Mus musculus
  siRNA target sequence for Angptl6 (NM_145154.1,1238-1256).
ccctctcttggcacaatga

SEQ ID NO: 755451 - DNA, 19 bp, Mus musculus
  siRNA target sequence for Angptl6 (NM_145154.1,1242-1260).
ctcttggcacaatgacaaa

SEQ ID NO: 755452 - DNA, 19 bp, Mus musculus
  siRNA target sequence for Angptl6 (NM_145154.1,1247-1265).
ggcacaatgacaaaccttt

SEQ ID NO: 755453 - DNA, 19 bp, Mus musculus
  siRNA target sequence for Angptl6 (NM_145154.1,1290-1308).
ctcatattctggtaactgt

SEQ ID NO: 755454 - DNA, 19 bp, Mus musculus
  siRNA target sequence for Angptl6 (NM_145154.1,1439-1457).
gggcgtactctctgaagaa

SEQ ID NO: 755455 - DNA, 19 bp, Mus musculus
  siRNA target sequence for Wasf3 (NM_145155.1,526-544).
gcacgctcgctgcaatcat

SEQ ID NO: 755456 - DNA, 19 bp, Mus musculus
  siRNA target sequence for Wasf3 (NM_145155.1,614-632).
cttctacatcagagcaaat

SEQ ID NO: 755457 - DNA, 19 bp, Mus musculus
  siRNA target sequence for Wasf3 (NM_145155.1,650-668).
cgatcggcttgctgtcaaa

SEQ ID NO: 755458 - DNA, 19 bp, Mus musculus
  siRNA target sequence for Wasf3 (NM_145155.1,654-672).
cggcttgctgtcaaagtca

SEQ ID NO: 755459 - DNA, 19 bp, Mus musculus
  siRNA target sequence for Wasf3 (NM_145155.1,703-721).
cactacaggatatcaacat

SEQ ID NO: 755460 - DNA, 19 bp, Mus musculus
  siRNA target sequence for Wasf3 (NM_145155.1,705-723).
ctacaggatatcaacatga

SEQ ID NO: 755461 - DNA, 19 bp, Mus musculus
  siRNA target sequence for Wasf3 (NM_145155.1,789-807).
cctgttgctgacatttata

SEQ ID NO: 755462 - DNA, 19 bp, Mus musculus
  siRNA target sequence for Wasf3 (NM_145155.1,844-862).
caccgtacagagatgacaa

SEQ ID NO: 755463 - DNA, 19 bp, Mus musculus
  siRNA target sequence for Wasf3 (NM_145155.1,847-865).
cgtacagagatgacaagaa

SEQ ID NO: 755464 - DNA, 19 bp, Mus musculus
  siRNA target sequence for Wasf3 (NM_145155.1,886-904).
cggatccctcttacttctt

SEQ ID NO: 755465 - DNA, 19 bp, Mus musculus
  siRNA target sequence for Wasf3 (NM_145155.1,994-1012).
ccacccgagaggtgaaaaa

SEQ ID NO: 755466 - DNA, 19 bp, Mus musculus
  siRNA target sequence for Wasf3 (NM_145155.1,1002-1020).
gaggtgaaaaaggttagaa

SEQ ID NO: 755467 - DNA, 19 bp, Mus musculus
  siRNA target sequence for Wasf3 (NM_145155.1,1769-1787).
catccggatgggaatccaa

SEQ ID NO: 755468 - DNA, 19 bp, Mus musculus
  siRNA target sequence for Wasf3 (NM_145155.1,1898-1916).
cgacgactctgagtttgat

SEQ ID NO: 755469 - DNA, 19 bp, Mus musculus
  siRNA target sequence for Tdl (NM_145157.1,98-116).
ggtcgtgtctggcaaaaat

SEQ ID NO: 755470 - DNA, 19 bp, Mus musculus
  siRNA target sequence for Tdl (NM_145157.1,102-120).
gtgtctggcaaaaatccta

SEQ ID NO: 755471 - DNA, 19 bp, Mus musculus
  siRNA target sequence for Tdl (NM_145157.1,134-152).
gggtaacagaggattctgt

SEQ ID NO: 755472 - DNA, 19 bp, Mus musculus
  siRNA target sequence for Tdl (NM_145157.1,135-153).
ggtaacagaggattctgta

SEQ ID NO: 755473 - DNA, 19 bp, Mus musculus
  siRNA target sequence for Tdl (NM_145157.1,174-192).
gaacaggcctacttctact

SEQ ID NO: 755474 - DNA, 19 bp, Mus musculus
  siRNA target sequence for Tdl (NM_145157.1,238-256).
gcctcacaggagtagatga

SEQ ID NO: 755475 - DNA, 19 bp, Mus musculus
  siRNA target sequence for Tdl (NM_145157.1,246-264).
ggagtagatgacaacacta

SEQ ID NO: 755476 - DNA, 19 bp, Mus musculus
  siRNA target sequence for Tdl (NM_145157.1,249-267).
gtagatgacaacactaact

SEQ ID NO: 755477 - DNA, 19 bp, Mus musculus
  siRNA target sequence for Emilin2 (NM_145158.2,515-533).
gcccagtgccaggaacaaa

SEQ ID NO: 755478 - DNA, 19 bp, Mus musculus
  siRNA target sequence for Emilin2 (NM_145158.2,516-534).
cccagtgccaggaacaaaa

SEQ ID NO: 755479 - DNA, 19 bp, Mus musculus
  siRNA target sequence for Emilin2 (NM_145158.2,541-559).
gcgcctacatcgtgaataa

SEQ ID NO: 755480 - DNA, 19 bp, Mus musculus
  siRNA target sequence for Emilin2 (NM_145158.2,543-561).
gcctacatcgtgaataaga

SEQ ID NO: 755481 - DNA, 19 bp, Mus musculus
  siRNA target sequence for Emilin2 (NM_145158.2,544-562).
cctacatcgtgaataagaa

SEQ ID NO: 755482 - DNA, 19 bp, Mus musculus
  siRNA target sequence for Emilin2 (NM_145158.2,581-599).
ggagggaagcgagagtttt

SEQ ID NO: 755483 - DNA, 19 bp, Mus musculus
  siRNA target sequence for Emilin2 (NM_145158.2,582-600).
gagggaagcgagagtttta

SEQ ID NO: 755484 - DNA, 19 bp, Mus musculus
  siRNA target sequence for Emilin2 (NM_145158.2,586-604).
gaagcgagagttttattca

SEQ ID NO: 755485 - DNA, 19 bp, Mus musculus
  siRNA target sequence for Emilin2 (NM_145158.2,651-669).
ctggtgtatcgggtaaact

SEQ ID NO: 755486 - DNA, 19 bp, Mus musculus
  siRNA target sequence for Emilin2 (NM_145158.2,653-671).
ggtgtatcgggtaaacttt

SEQ ID NO: 755487 - DNA, 19 bp, Mus musculus
  siRNA target sequence for Emilin2 (NM_145158.2,654-672).
gtgtatcgggtaaacttta

SEQ ID NO: 755488 - DNA, 19 bp, Mus musculus
  siRNA target sequence for Emilin2 (NM_145158.2,656-674).
gtatcgggtaaactttaga

SEQ ID NO: 755489 - DNA, 19 bp, Mus musculus
  siRNA target sequence for Emilin2 (NM_145158.2,675-693).
cccagatttgtcactagat

SEQ ID NO: 755490 - DNA, 19 bp, Mus musculus
  siRNA target sequence for Emilin2 (NM_145158.2,791-809).
cccatcagctcgaccaaaa

SEQ ID NO: 755491 - DNA, 19 bp, Mus musculus
  siRNA target sequence for Emilin2 (NM_145158.2,792-810).
ccatcagctcgaccaaaaa

SEQ ID NO: 755492 - DNA, 19 bp, Mus musculus
  siRNA target sequence for Emilin2 (NM_145158.2,853-871).
ctcagcctaagaaaacgtt

SEQ ID NO: 755493 - DNA, 19 bp, Mus musculus
  siRNA target sequence for Emilin2 (NM_145158.2,898-916).
gtcaggttgcagatgcaaa

SEQ ID NO: 755494 - DNA, 19 bp, Mus musculus
  siRNA target sequence for Emilin2 (NM_145158.2,929-947).
ggaacttcagcaatccaaa

SEQ ID NO: 755495 - DNA, 19 bp, Mus musculus
  siRNA target sequence for Emilin2 (NM_145158.2,1034-1052).
caaacacaccattcaagat

SEQ ID NO: 755496 - DNA, 19 bp, Mus musculus
  siRNA target sequence for Emilin2 (NM_145158.2,1314-1332).
cccacggtcaccatgacaa

SEQ ID NO: 755497 - DNA, 19 bp, Mus musculus
  siRNA target sequence for Emilin2 (NM_145158.2,1319-1337).
ggtcaccatgacaaccaat

SEQ ID NO: 755498 - DNA, 19 bp, Mus musculus
  siRNA target sequence for Emilin2 (NM_145158.2,1416-1434).
gctgacctgaagaatacgt

SEQ ID NO: 755499 - DNA, 19 bp, Mus musculus
  siRNA target sequence for Emilin2 (NM_145158.2,1484-1502).
cagctacctcggagtgata

SEQ ID NO: 755500 - DNA, 19 bp, Mus musculus
  siRNA target sequence for Emilin2 (NM_145158.2,1486-1504).
gctacctcggagtgataga

SEQ ID NO: 755501 - DNA, 19 bp, Mus musculus
  siRNA target sequence for Emilin2 (NM_145158.2,1588-1606).
gctgttgcaatggtcaaaa

SEQ ID NO: 755502 - DNA, 19 bp, Mus musculus
  siRNA target sequence for Emilin2 (NM_145158.2,1636-1654).
cgctagaccagaaaatcga

SEQ ID NO: 755503 - DNA, 19 bp, Mus musculus
  siRNA target sequence for Emilin2 (NM_145158.2,1727-1745).
gccagacgcagactttgat

SEQ ID NO: 755504 - DNA, 19 bp, Mus musculus
  siRNA target sequence for Emilin2 (NM_145158.2,1760-1778).
gctcgacgcaaggatcaat

SEQ ID NO: 755505 - DNA, 19 bp, Mus musculus
  siRNA target sequence for Emilin2 (NM_145158.2,1764-1782).
gacgcaaggatcaatgtga

SEQ ID NO: 755506 - DNA, 19 bp, Mus musculus
  siRNA target sequence for Emilin2 (NM_145158.2,1793-1811).
cgcagaggagcattgcttt

SEQ ID NO: 755507 - DNA, 19 bp, Mus musculus
  siRNA target sequence for Emilin2 (NM_145158.2,1794-1812).
gcagaggagcattgctttt

SEQ ID NO: 755508 - DNA, 19 bp, Mus musculus
  siRNA target sequence for Emilin2 (NM_145158.2,1797-1815).
gaggagcattgcttttaca

SEQ ID NO: 755509 - DNA, 19 bp, Mus musculus
  siRNA target sequence for Emilin2 (NM_145158.2,2017-2035).
gccgcctgaaggacaaagt

SEQ ID NO: 755510 - DNA, 19 bp, Mus musculus
  siRNA target sequence for Emilin2 (NM_145158.2,2229-2247).
ctgaatcactccgaatgta

SEQ ID NO: 755511 - DNA, 19 bp, Mus musculus
  siRNA target sequence for Emilin2 (NM_145158.2,2241-2259).
gaatgtacggggacttact

SEQ ID NO: 755512 - DNA, 19 bp, Mus musculus
  siRNA target sequence for Emilin2 (NM_145158.2,2304-2322).
gcaagtgggtttactaaga

SEQ ID NO: 755513 - DNA, 19 bp, Mus musculus
  siRNA target sequence for Emilin2 (NM_145158.2,2567-2585).
ggaggggctcggtaagcat

SEQ ID NO: 755514 - DNA, 19 bp, Mus musculus
  siRNA target sequence for Emilin2 (NM_145158.2,2704-2722).
ctaccgacttgcaagatct

SEQ ID NO: 755515 - DNA, 19 bp, Mus musculus
  siRNA target sequence for Emilin2 (NM_145158.2,2971-2989).
gctctagtggcgtcatcat

SEQ ID NO: 755516 - DNA, 19 bp, Mus musculus
  siRNA target sequence for Emilin2 (NM_145158.2,3159-3177).
cccactctggtgtcctttt

SEQ ID NO: 755517 - DNA, 19 bp, Mus musculus
  siRNA target sequence for Emilin2 (NM_145158.2,3208-3226).
gcgatggaggcgttgttct

SEQ ID NO: 755518 - DNA, 19 bp, Mus musculus
  siRNA target sequence for Emilin2 (NM_145158.2,3214-3232).
gaggcgttgttctcttcaa

SEQ ID NO: 755519 - DNA, 19 bp, Mus musculus
  siRNA target sequence for Emilin2 (NM_145158.2,3216-3234).
ggcgttgttctcttcaata

SEQ ID NO: 755520 - DNA, 19 bp, Mus musculus
  siRNA target sequence for Emilin2 (NM_145158.2,3539-3557).
ggctcacacagactttgat

SEQ ID NO: 755521 - DNA, 19 bp, Mus musculus
  siRNA target sequence for Emilin2 (NM_145158.2,3547-3565).
cagactttgatgaaatgta

SEQ ID NO: 755522 - DNA, 19 bp, Mus musculus
  siRNA target sequence for Wbscr17 (NM_145218.2,537-555).
cgtctacaggcagcttaat

SEQ ID NO: 755523 - DNA, 19 bp, Mus musculus
  siRNA target sequence for Wbscr17 (NM_145218.2,547-565).
cagcttaatggcttatcta

SEQ ID NO: 755524 - DNA, 19 bp, Mus musculus
  siRNA target sequence for Wbscr17 (NM_145218.2,702-720).
ctccttggaccggtctatt

SEQ ID NO: 755525 - DNA, 19 bp, Mus musculus
  siRNA target sequence for Wbscr17 (NM_145218.2,705-723).
cttggaccggtctattcca

SEQ ID NO: 755526 - DNA, 19 bp, Mus musculus
  siRNA target sequence for Wbscr17 (NM_145218.2,711-729).
ccggtctattccagattat

SEQ ID NO: 755527 - DNA, 19 bp, Mus musculus
  siRNA target sequence for Wbscr17 (NM_145218.2,714-732).
gtctattccagattatcgt

SEQ ID NO: 755528 - DNA, 19 bp, Mus musculus
  siRNA target sequence for Wbscr17 (NM_145218.2,766-784).
gagttgccccagatatcca

SEQ ID NO: 755529 - DNA, 19 bp, Mus musculus
  siRNA target sequence for Wbscr17 (NM_145218.2,772-790).
ccccagatatccatcatct

SEQ ID NO: 755530 - DNA, 19 bp, Mus musculus
  siRNA target sequence for Wbscr17 (NM_145218.2,775-793).
cagatatccatcatcttca

SEQ ID NO: 755531 - DNA, 19 bp, Mus musculus
  siRNA target sequence for Wbscr17 (NM_145218.2,835-853).
cacagcgctgtcaatcaca

SEQ ID NO: 755532 - DNA, 19 bp, Mus musculus
  siRNA target sequence for Wbscr17 (NM_145218.2,963-981).
gaaggtggtacgcaatcaa

SEQ ID NO: 755533 - DNA, 19 bp, Mus musculus
  siRNA target sequence for Wbscr17 (NM_145218.2,1038-1056).
ggtcactggctttttcgat

SEQ ID NO: 755534 - DNA, 19 bp, Mus musculus
  siRNA target sequence for Wbscr17 (NM_145218.2,1210-1228).
gagctgtggtgcatgtaca

SEQ ID NO: 755535 - DNA, 19 bp, Mus musculus
  siRNA target sequence for Wbscr17 (NM_145218.2,1278-1296).
cagaacaccagccatgatt

SEQ ID NO: 755536 - DNA, 19 bp, Mus musculus
  siRNA target sequence for Wbscr17 (NM_145218.2,1290-1308).
catgattggctgctcattt

SEQ ID NO: 755537 - DNA, 19 bp, Mus musculus
  siRNA target sequence for Wbscr17 (NM_145218.2,1309-1327).
gtggtcaacaggaaattct

SEQ ID NO: 755538 - DNA, 19 bp, Mus musculus
  siRNA target sequence for Wbscr17 (NM_145218.2,1365-1383).
gtacggaggagagaatatt

SEQ ID NO: 755539 - DNA, 19 bp, Mus musculus
  siRNA target sequence for Wbscr17 (NM_145218.2,1384-1402).
gaacttgggatcaaggtat

SEQ ID NO: 755540 - DNA, 19 bp, Mus musculus
  siRNA target sequence for Wbscr17 (NM_145218.2,1422-1440).
ggaggtccttccatgttca

SEQ ID NO: 755541 - DNA, 19 bp, Mus musculus
  siRNA target sequence for Wbscr17 (NM_145218.2,1439-1457).
caagggtggcccacattga

SEQ ID NO: 755542 - DNA, 19 bp, Mus musculus
  siRNA target sequence for Wbscr17 (NM_145218.2,1464-1482).
gaagaaaccgtataacagt

SEQ ID NO: 755543 - DNA, 19 bp, Mus musculus
  siRNA target sequence for Wbscr17 (NM_145218.2,1582-1600).
gagaatccaggcatcgata

SEQ ID NO: 755544 - DNA, 19 bp, Mus musculus
  siRNA target sequence for Wbscr17 (NM_145218.2,1609-1627).
gtctcagaaagaaaagcat

SEQ ID NO: 755545 - DNA, 19 bp, Mus musculus
  siRNA target sequence for Wbscr17 (NM_145218.2,1675-1693).
gtttacccagaaatgagaa

SEQ ID NO: 755546 - DNA, 19 bp, Mus musculus
  siRNA target sequence for Wbscr17 (NM_145218.2,1684-1702).
gaaatgagaagatacaaca

SEQ ID NO: 755547 - DNA, 19 bp, Mus musculus
  siRNA target sequence for Wbscr17 (NM_145218.2,1691-1709).
gaagatacaacaacactat

SEQ ID NO: 755548 - DNA, 19 bp, Mus musculus
  siRNA target sequence for Wbscr17 (NM_145218.2,1712-1730).
cctatggggagcttcgtaa

SEQ ID NO: 755549 - DNA, 19 bp, Mus musculus
  siRNA target sequence for Wbscr17 (NM_145218.2,1713-1731).
ctatggggagcttcgtaat

SEQ ID NO: 755550 - DNA, 19 bp, Mus musculus
  siRNA target sequence for Wbscr17 (NM_145218.2,1717-1735).
ggggagcttcgtaataata

SEQ ID NO: 755551 - DNA, 19 bp, Mus musculus
  siRNA target sequence for Wbscr17 (NM_145218.2,1718-1736).
gggagcttcgtaataataa

SEQ ID NO: 755552 - DNA, 19 bp, Mus musculus
  siRNA target sequence for Wbscr17 (NM_145218.2,1925-1943).
cgcagctcctggattgtga

SEQ ID NO: 755553 - DNA, 19 bp, Mus musculus
  siRNA target sequence for Wbscr17 (NM_145218.2,2085-2103).
gagatgggcaatcaagaat

SEQ ID NO: 755554 - DNA, 19 bp, Mus musculus
  siRNA target sequence for Dip3b (NM_145220.1,145-163).
ctccttgctgagtgtattt

SEQ ID NO: 755555 - DNA, 19 bp, Mus musculus
  siRNA target sequence for Dip3b (NM_145220.1,174-192).
ctggcaccctcacagatta

SEQ ID NO: 755556 - DNA, 19 bp, Mus musculus
  siRNA target sequence for Dip3b (NM_145220.1,176-194).
ggcaccctcacagattaca

SEQ ID NO: 755557 - DNA, 19 bp, Mus musculus
  siRNA target sequence for Dip3b (NM_145220.1,230-248).
ggcgcacagaatgaaatgt

SEQ ID NO: 755558 - DNA, 19 bp, Mus musculus
  siRNA target sequence for Dip3b (NM_145220.1,274-292).
gcagctgctggcatatgaa

SEQ ID NO: 755559 - DNA, 19 bp, Mus musculus
  siRNA target sequence for Dip3b (NM_145220.1,319-337).
cgatgaagaagtaatttca

SEQ ID NO: 755560 - DNA, 19 bp, Mus musculus
  siRNA target sequence for Dip3b (NM_145220.1,329-347).
gtaatttcaacactacatt

SEQ ID NO: 755561 - DNA, 19 bp, Mus musculus
  siRNA target sequence for Dip3b (NM_145220.1,419-437).
gttctccctgttatacagt

SEQ ID NO: 755562 - DNA, 19 bp, Mus musculus
  siRNA target sequence for Dip3b (NM_145220.1,465-483).
gcactttgaaggatctctt

SEQ ID NO: 755563 - DNA, 19 bp, Mus musculus
  siRNA target sequence for Dip3b (NM_145220.1,498-516).
gcgagcacgacctgtcaat

SEQ ID NO: 755564 - DNA, 19 bp, Mus musculus
  siRNA target sequence for Dip3b (NM_145220.1,528-546).
gcaggctccctaagaagaa

SEQ ID NO: 755565 - DNA, 19 bp, Mus musculus
  siRNA target sequence for Dip3b (NM_145220.1,560-578).
gcgaagacggaaattgtga

SEQ ID NO: 755566 - DNA, 19 bp, Mus musculus
  siRNA target sequence for Dip3b (NM_145220.1,561-579).
cgaagacggaaattgtgaa

SEQ ID NO: 755567 - DNA, 19 bp, Mus musculus
  siRNA target sequence for Dip3b (NM_145220.1,696-714).
cccacggacagatcaactt

SEQ ID NO: 755568 - DNA, 19 bp, Mus musculus
  siRNA target sequence for Dip3b (NM_145220.1,697-715).
ccacggacagatcaacttt

SEQ ID NO: 755569 - DNA, 19 bp, Mus musculus
  siRNA target sequence for Dip3b (NM_145220.1,698-716).
cacggacagatcaactttt

SEQ ID NO: 755570 - DNA, 19 bp, Mus musculus
  siRNA target sequence for Dip3b (NM_145220.1,731-749).
gagatgttctccaaaagta

SEQ ID NO: 755571 - DNA, 19 bp, Mus musculus
  siRNA target sequence for Dip3b (NM_145220.1,847-865).
gctttcggtcagtgaatct

SEQ ID NO: 755572 - DNA, 19 bp, Mus musculus
  siRNA target sequence for Dip3b (NM_145220.1,852-870).
cggtcagtgaatctgttta

SEQ ID NO: 755573 - DNA, 19 bp, Mus musculus
  siRNA target sequence for Dip3b (NM_145220.1,890-908).
gccacagcgcagatcaaca

SEQ ID NO: 755574 - DNA, 19 bp, Mus musculus
  siRNA target sequence for Dip3b (NM_145220.1,1128-1146).
gtggcaaaccgggaataat

SEQ ID NO: 755575 - DNA, 19 bp, Mus musculus
  siRNA target sequence for Dip3b (NM_145220.1,1131-1149).
gcaaaccgggaataattct

SEQ ID NO: 755576 - DNA, 19 bp, Mus musculus
  siRNA target sequence for Dip3b (NM_145220.1,1442-1460).
gtacttccggcaacagaat

SEQ ID NO: 755577 - DNA, 19 bp, Mus musculus
  siRNA target sequence for Dip3b (NM_145220.1,1602-1620).
gcacggctgaagtgattta

SEQ ID NO: 755578 - DNA, 19 bp, Mus musculus
  siRNA target sequence for Dip3b (NM_145220.1,1603-1621).
cacggctgaagtgatttat

SEQ ID NO: 755579 - DNA, 19 bp, Mus musculus
  siRNA target sequence for Dip3b (NM_145220.1,1605-1623).
cggctgaagtgatttatga

SEQ ID NO: 755580 - DNA, 19 bp, Mus musculus
  siRNA target sequence for Dip3b (NM_145220.1,1644-1662).
ctgctcgagctattcacaa

SEQ ID NO: 755581 - DNA, 19 bp, Mus musculus
  siRNA target sequence for Dip3b (NM_145220.1,1891-1909).
gatatgctatgctattaat

SEQ ID NO: 755582 - DNA, 19 bp, Mus musculus
  siRNA target sequence for Dip3b (NM_145220.1,1946-1964).
gaagcactggctcgattaa

SEQ ID NO: 755583 - DNA, 19 bp, Mus musculus
  siRNA target sequence for Dip3b (NM_145220.1,1950-1968).
cactggctcgattaatgct

SEQ ID NO: 755584 - DNA, 19 bp, Mus musculus
  siRNA target sequence for Dip3b (NM_145220.1,1969-1987).
gtctgtaccactaaccaat

SEQ ID NO: 755585 - DNA, 19 bp, Mus musculus
  siRNA target sequence for Dip3b (NM_145220.1,2030-2048).
ggcggaagtccaagtgaaa

SEQ ID NO: 755586 - DNA, 19 bp, Mus musculus
  siRNA target sequence for Dip3b (NM_145220.1,2031-2049).
gcggaagtccaagtgaaaa

SEQ ID NO: 755587 - DNA, 19 bp, Mus musculus
  siRNA target sequence for 2900057D21Rik (NM_145221.1,112-130).
cgcagacaaggtctttact

SEQ ID NO: 755588 - DNA, 19 bp, Mus musculus
  siRNA target sequence for 2900057D21Rik (NM_145221.1,121-139).
ggtctttacttggtgtatt

SEQ ID NO: 755589 - DNA, 19 bp, Mus musculus
  siRNA target sequence for 2900057D21Rik (NM_145221.1,150-168).
gctactgctatttcaaatt

SEQ ID NO: 755590 - DNA, 19 bp, Mus musculus
  siRNA target sequence for 2900057D21Rik (NM_145221.1,190-208).
ctatgcatcggatttatga

SEQ ID NO: 755591 - DNA, 19 bp, Mus musculus
  siRNA target sequence for 2900057D21Rik (NM_145221.1,237-255).
cacctgacttcgaaacttt

SEQ ID NO: 755592 - DNA, 19 bp, Mus musculus
  siRNA target sequence for 2900057D21Rik (NM_145221.1,288-306).
gggggtgatgatgaagtta

SEQ ID NO: 755593 - DNA, 19 bp, Mus musculus
  siRNA target sequence for 2900057D21Rik (NM_145221.1,291-309).
ggtgatgatgaagttatga

SEQ ID NO: 755594 - DNA, 19 bp, Mus musculus
  siRNA target sequence for 2900057D21Rik (NM_145221.1,300-318).
gaagttatgagctctactt

SEQ ID NO: 755595 - DNA, 19 bp, Mus musculus
  siRNA target sequence for 2900057D21Rik (NM_145221.1,316-334).
ctttgcagcagttttccaa

SEQ ID NO: 755596 - DNA, 19 bp, Mus musculus
  siRNA target sequence for 2900057D21Rik (NM_145221.1,338-356).
catagatgagcttagttct

SEQ ID NO: 755597 - DNA, 19 bp, Mus musculus
  siRNA target sequence for 2900057D21Rik (NM_145221.1,477-495).
gatcatgatgccgcaatta

SEQ ID NO: 755598 - DNA, 19 bp, Mus musculus
  siRNA target sequence for 2900057D21Rik (NM_145221.1,480-498).
catgatgccgcaattaata

SEQ ID NO: 755599 - DNA, 19 bp, Mus musculus
  siRNA target sequence for 2900057D21Rik (NM_145221.1,483-501).
gatgccgcaattaataggt

SEQ ID NO: 755600 - DNA, 19 bp, Mus musculus
  siRNA target sequence for 2900057D21Rik (NM_145221.1,499-517).
ggtacagtcggttgtcaaa

SEQ ID NO: 755601 - DNA, 19 bp, Mus musculus
  siRNA target sequence for 2900057D21Rik (NM_145221.1,500-518).
gtacagtcggttgtcaaaa

SEQ ID NO: 755602 - DNA, 19 bp, Mus musculus
  siRNA target sequence for 2900057D21Rik (NM_145221.1,536-554).
ggtaaaatatgaagttaca

SEQ ID NO: 755603 - DNA, 19 bp, Mus musculus
  siRNA target sequence for 2900057D21Rik (NM_145221.1,590-608).
gaccatgatgcattatttt

SEQ ID NO: 755604 - DNA, 19 bp, Mus musculus
  siRNA target sequence for 2900057D21Rik (NM_145221.1,613-631).
cactaaatactcttcagta

SEQ ID NO: 755605 - DNA, 19 bp, Mus musculus
  siRNA target sequence for 2900057D21Rik (NM_145221.1,638-656).
gaaaatagctttgttagaa

SEQ ID NO: 755606 - DNA, 19 bp, Mus musculus
  siRNA target sequence for 2900057D21Rik (NM_145221.1,671-689).
catgcaggctcagataagt

SEQ ID NO: 755607 - DNA, 19 bp, Mus musculus
  siRNA target sequence for 2900057D21Rik (NM_145221.1,675-693).
caggctcagataagtttct

SEQ ID NO: 755608 - DNA, 19 bp, Mus musculus
  siRNA target sequence for 2900057D21Rik (NM_145221.1,677-695).
ggctcagataagtttcttt

SEQ ID NO: 755609 - DNA, 19 bp, Mus musculus
  siRNA target sequence for 2900057D21Rik (NM_145221.1,678-696).
gctcagataagtttcttta

SEQ ID NO: 755610 - DNA, 19 bp, Mus musculus
  siRNA target sequence for 2900057D21Rik (NM_145221.1,797-815).
gaccatgcagcagacaata

SEQ ID NO: 755611 - DNA, 19 bp, Mus musculus
  siRNA target sequence for 2900057D21Rik (NM_145221.1,799-817).
ccatgcagcagacaataga

SEQ ID NO: 755612 - DNA, 19 bp, Mus musculus
  siRNA target sequence for 2900057D21Rik (NM_145221.1,800-818).
catgcagcagacaatagaa

SEQ ID NO: 755613 - DNA, 19 bp, Mus musculus
  siRNA target sequence for 2900057D21Rik (NM_145221.1,872-890).
gtttcccatcaatcgaaat

SEQ ID NO: 755614 - DNA, 19 bp, Mus musculus
  siRNA target sequence for 2900057D21Rik (NM_145221.1,876-894).
cccatcaatcgaaatttaa

SEQ ID NO: 755615 - DNA, 19 bp, Mus musculus
  siRNA target sequence for 2900057D21Rik (NM_145221.1,896-914).
ccgaaaggctggataccta

SEQ ID NO: 755616 - DNA, 19 bp, Mus musculus
  siRNA target sequence for 2900057D21Rik (NM_145221.1,897-915).
cgaaaggctggatacctaa

SEQ ID NO: 755617 - DNA, 19 bp, Mus musculus
  siRNA target sequence for 2900057D21Rik (NM_145221.1,898-916).
gaaaggctggatacctaaa

SEQ ID NO: 755618 - DNA, 19 bp, Mus musculus
  siRNA target sequence for 2900057D21Rik (NM_145221.1,902-920).
ggctggatacctaaatgct

SEQ ID NO: 755619 - DNA, 19 bp, Mus musculus
  siRNA target sequence for 2900057D21Rik (NM_145221.1,903-921).
gctggatacctaaatgcta

SEQ ID NO: 755620 - DNA, 19 bp, Mus musculus
  siRNA target sequence for 2900057D21Rik (NM_145221.1,943-961).
catctacctgggatagaca

SEQ ID NO: 755621 - DNA, 19 bp, Mus musculus
  siRNA target sequence for 2900057D21Rik (NM_145221.1,949-967).
cctgggatagacagtttta

SEQ ID NO: 755622 - DNA, 19 bp, Mus musculus
  siRNA target sequence for 2900057D21Rik (NM_145221.1,952-970).
gggatagacagttttactt

SEQ ID NO: 755623 - DNA, 19 bp, Mus musculus
  siRNA target sequence for 2900057D21Rik (NM_145221.1,973-991).
cgcagggtggaaacttaat

SEQ ID NO: 755624 - DNA, 19 bp, Mus musculus
  siRNA target sequence for 2900057D21Rik (NM_145221.1,975-993).
cagggtggaaacttaatga

SEQ ID NO: 755625 - DNA, 19 bp, Mus musculus
  siRNA target sequence for 2900057D21Rik (NM_145221.1,977-995).
gggtggaaacttaatgagt

SEQ ID NO: 755626 - DNA, 19 bp, Mus musculus
  siRNA target sequence for 2900057D21Rik (NM_145221.1,1149-1167).
catgaagagtggatctgta

SEQ ID NO: 755627 - DNA, 19 bp, Mus musculus
  siRNA target sequence for 2900057D21Rik (NM_145221.1,1159-1177).
ggatctgtacaataaacaa

SEQ ID NO: 755628 - DNA, 19 bp, Mus musculus
  siRNA target sequence for 2900057D21Rik (NM_145221.1,1163-1181).
ctgtacaataaacaacata

SEQ ID NO: 755629 - DNA, 19 bp, Mus musculus
  siRNA target sequence for 2900057D21Rik (NM_145221.1,1219-1237).
ctgctgcacgagtgaatca

SEQ ID NO: 755630 - DNA, 19 bp, Mus musculus
  siRNA target sequence for 2900057D21Rik (NM_145221.1,1232-1250).
gaatcagtctgctctagaa

SEQ ID NO: 755631 - DNA, 19 bp, Mus musculus
  siRNA target sequence for 2900057D21Rik (NM_145221.1,1295-1313).
gcgtccaggaggacaatct

SEQ ID NO: 755632 - DNA, 19 bp, Mus musculus
  siRNA target sequence for 2900057D21Rik (NM_145221.1,1354-1372).
gatcagagtctacaaattt

SEQ ID NO: 755633 - DNA, 19 bp, Mus musculus
  siRNA target sequence for 2900057D21Rik (NM_145221.1,1402-1420).
ctccggatacaccaataca

SEQ ID NO: 755634 - DNA, 19 bp, Mus musculus
  siRNA target sequence for 2900057D21Rik (NM_145221.1,1404-1422).
ccggatacaccaatacagt

SEQ ID NO: 755635 - DNA, 19 bp, Mus musculus
  siRNA target sequence for 2900057D21Rik (NM_145221.1,1406-1424).
ggatacaccaatacagttt

SEQ ID NO: 755636 - DNA, 19 bp, Mus musculus
  siRNA target sequence for 2900057D21Rik (NM_145221.1,1414-1432).
caatacagtttgatataat

SEQ ID NO: 755637 - DNA, 19 bp, Mus musculus
  siRNA target sequence for 2900057D21Rik (NM_145221.1,1485-1503).
ggcaggcgtacaaatccat

SEQ ID NO: 755638 - DNA, 19 bp, Mus musculus
  siRNA target sequence for 2900057D21Rik (NM_145221.1,1486-1504).
gcaggcgtacaaatccatt

SEQ ID NO: 755639 - DNA, 19 bp, Mus musculus
  siRNA target sequence for 2900057D21Rik (NM_145221.1,1487-1505).
caggcgtacaaatccattt

SEQ ID NO: 755640 - DNA, 19 bp, Mus musculus
  siRNA target sequence for 2900057D21Rik (NM_145221.1,1546-1564).
ctattcttcatcagttatt

SEQ ID NO: 755641 - DNA, 19 bp, Mus musculus
  siRNA target sequence for 2900057D21Rik (NM_145221.1,1581-1599).
ggttctatggaggtaaagt

SEQ ID NO: 755642 - DNA, 19 bp, Mus musculus
  siRNA target sequence for 2900057D21Rik (NM_145221.1,1607-1625).
ccatccagatgttgtctat

SEQ ID NO: 755643 - DNA, 19 bp, Mus musculus
  siRNA target sequence for 2900057D21Rik (NM_145221.1,1651-1669).
ctcgggccatccacaacat

SEQ ID NO: 755644 - DNA, 19 bp, Mus musculus
  siRNA target sequence for 2900057D21Rik (NM_145221.1,1683-1701).
gaatcacatttattagtca

SEQ ID NO: 755645 - DNA, 19 bp, Mus musculus
  siRNA target sequence for 2900057D21Rik (NM_145221.1,1702-1720).
cttgtgactgcttgaagtt

SEQ ID NO: 755646 - DNA, 19 bp, Mus musculus
  siRNA target sequence for 2900057D21Rik (NM_145221.1,1705-1723).
gtgactgcttgaagttaat

SEQ ID NO: 755647 - DNA, 19 bp, Mus musculus
  siRNA target sequence for 2900057D21Rik (NM_145221.1,1725-1743).
gatccgcagacccaagtta

SEQ ID NO: 755648 - DNA, 19 bp, Mus musculus
  siRNA target sequence for 2900057D21Rik (NM_145221.1,1728-1746).
ccgcagacccaagttacaa

SEQ ID NO: 755649 - DNA, 19 bp, Mus musculus
  siRNA target sequence for 2900057D21Rik (NM_145221.1,1759-1777).
cattgccgtgtgtagttct

SEQ ID NO: 755650 - DNA, 19 bp, Mus musculus
  siRNA target sequence for 2900057D21Rik (NM_145221.1,1763-1781).
gccgtgtgtagttctgtat

SEQ ID NO: 755651 - DNA, 19 bp, Mus musculus
  siRNA target sequence for 2900057D21Rik (NM_145221.1,1783-1801).
ctacgcaccaggaaaataa

SEQ ID NO: 755652 - DNA, 19 bp, Mus musculus
  siRNA target sequence for 2900057D21Rik (NM_145221.1,1826-1844).
gacatcaggcggaagaagt

SEQ ID NO: 755653 - DNA, 19 bp, Mus musculus
  siRNA target sequence for 2900057D21Rik (NM_145221.1,1856-1874).
gtcatcagtctgctatata

SEQ ID NO: 755654 - DNA, 19 bp, Mus musculus
  siRNA target sequence for 2900057D21Rik (NM_145221.1,1858-1876).
catcagtctgctatatatt

SEQ ID NO: 755655 - DNA, 19 bp, Mus musculus
  siRNA target sequence for 2900057D21Rik (NM_145221.1,1861-1879).
cagtctgctatatatttga

SEQ ID NO: 755656 - DNA, 19 bp, Mus musculus
  siRNA target sequence for 2900057D21Rik (NM_145221.1,1865-1883).
ctgctatatatttgaatca

SEQ ID NO: 755657 - DNA, 19 bp, Mus musculus
  siRNA target sequence for 2900057D21Rik (NM_145221.1,1867-1885).
gctatatatttgaatcaaa

SEQ ID NO: 755658 - DNA, 19 bp, Mus musculus
  siRNA target sequence for 2900057D21Rik (NM_145221.1,1912-1930).
ctgttggactggcaaaaca

SEQ ID NO: 755659 - DNA, 19 bp, Mus musculus
  siRNA target sequence for 2900057D21Rik (NM_145221.1,1952-1970).
ggatcgtagggcatcagaa

SEQ ID NO: 755660 - DNA, 19 bp, Mus musculus
  siRNA target sequence for 2900057D21Rik (NM_145221.1,1953-1971).
gatcgtagggcatcagaaa

SEQ ID NO: 755661 - DNA, 19 bp, Mus musculus
  siRNA target sequence for 2900057D21Rik (NM_145221.1,1957-1975).
gtagggcatcagaaaaaca

SEQ ID NO: 755662 - DNA, 19 bp, Mus musculus
  siRNA target sequence for 2900057D21Rik (NM_145221.1,2130-2148).
caatcagaggagagtgatt

SEQ ID NO: 755663 - DNA, 19 bp, Mus musculus
  siRNA target sequence for Mcpr1 (NM_145229.1,345-363).
ctttggctgcggtctgtat

SEQ ID NO: 755664 - DNA, 19 bp, Mus musculus
  siRNA target sequence for Mcpr1 (NM_145229.1,349-367).
ggctgcggtctgtattaga

SEQ ID NO: 755665 - DNA, 19 bp, Mus musculus
  siRNA target sequence for Mcpr1 (NM_145229.1,487-505).
caactgtatagacaaatca

SEQ ID NO: 755666 - DNA, 19 bp, Mus musculus
  siRNA target sequence for Mcpr1 (NM_145229.1,520-538).
ccagtcttgccccttaaca

SEQ ID NO: 755667 - DNA, 19 bp, Mus musculus
  siRNA target sequence for Mcpr1 (NM_145229.1,525-543).
cttgccccttaacagtttt

SEQ ID NO: 755668 - DNA, 19 bp, Mus musculus
  siRNA target sequence for Mcpr1 (NM_145229.1,553-571).
cttcctcttagcctcattt

SEQ ID NO: 755669 - DNA, 19 bp, Mus musculus
  siRNA target sequence for D17Wsu94e (NM_145353.1,173-191).
cagcggcgtccgaaatggt

SEQ ID NO: 755670 - DNA, 19 bp, Mus musculus
  siRNA target sequence for D17Wsu94e (NM_145353.1,208-226).
gaggcttcgaagaaaacat

SEQ ID NO: 755671 - DNA, 19 bp, Mus musculus
  siRNA target sequence for D17Wsu94e (NM_145353.1,235-253).
ggggttcggctgtgattga

SEQ ID NO: 755672 - DNA, 19 bp, Mus musculus
  siRNA target sequence for D17Wsu94e (NM_145353.1,237-255).
ggttcggctgtgattgata

SEQ ID NO: 755673 - DNA, 19 bp, Mus musculus
  siRNA target sequence for D17Wsu94e (NM_145353.1,238-256).
gttcggctgtgattgatat

SEQ ID NO: 755674 - DNA, 19 bp, Mus musculus
  siRNA target sequence for D17Wsu94e (NM_145353.1,241-259).
cggctgtgattgatatgga

SEQ ID NO: 755675 - DNA, 19 bp, Mus musculus
  siRNA target sequence for D17Wsu94e (NM_145353.1,317-335).
cctgcgggaggaagaagta

SEQ ID NO: 755676 - DNA, 19 bp, Mus musculus
  siRNA target sequence for D17Wsu94e (NM_145353.1,458-476).
cagggccttcagcttgtat

SEQ ID NO: 755677 - DNA, 19 bp, Mus musculus
  siRNA target sequence for D17Wsu94e (NM_145353.1,467-485).
cagcttgtatgccaacatt

SEQ ID NO: 755678 - DNA, 19 bp, Mus musculus
  siRNA target sequence for D17Wsu94e (NM_145353.1,736-754).
cgtccttcatttatttcct

SEQ ID NO: 755679 - DNA, 19 bp, Mus musculus
  siRNA target sequence for D17Wsu94e (NM_145353.1,834-852).
gtcctgttcatcacctata

SEQ ID NO: 755680 - DNA, 19 bp, Mus musculus
  siRNA target sequence for D13Wsu123e (NM_145354.2,216-234).
gccatgccaaagagattct

SEQ ID NO: 755681 - DNA, 19 bp, Mus musculus
  siRNA target sequence for D13Wsu123e (NM_145354.2,319-337).
ctggtaccctgaagaactt

SEQ ID NO: 755682 - DNA, 19 bp, Mus musculus
  siRNA target sequence for D13Wsu123e (NM_145354.2,348-366).
caaacttaagtcggaaaat

SEQ ID NO: 755683 - DNA, 19 bp, Mus musculus
  siRNA target sequence for D13Wsu123e (NM_145354.2,378-396).
ccccgttgttggcaaagtt

SEQ ID NO: 755684 - DNA, 19 bp, Mus musculus
  siRNA target sequence for D13Wsu123e (NM_145354.2,489-507).
cacaccataagatcttaga

SEQ ID NO: 755685 - DNA, 19 bp, Mus musculus
  siRNA target sequence for D13Wsu123e (NM_145354.2,491-509).
caccataagatcttagaca

SEQ ID NO: 755686 - DNA, 19 bp, Mus musculus
  siRNA target sequence for D13Wsu123e (NM_145354.2,532-550).
gaccacacagttaattgaa

SEQ ID NO: 755687 - DNA, 19 bp, Mus musculus
  siRNA target sequence for D13Wsu123e (NM_145354.2,577-595).
ctttccagagggatttgta

SEQ ID NO: 755688 - DNA, 19 bp, Mus musculus
  siRNA target sequence for D13Wsu123e (NM_145354.2,588-606).
gatttgtaatcgcaaatga

SEQ ID NO: 755689 - DNA, 19 bp, Mus musculus
  siRNA target sequence for D13Wsu123e (NM_145354.2,686-704).
gacgcatccagcataccta

SEQ ID NO: 755690 - DNA, 19 bp, Mus musculus
  siRNA target sequence for D13Wsu123e (NM_145354.2,694-712).
cagcatacctagacttaca

SEQ ID NO: 755691 - DNA, 19 bp, Mus musculus
  siRNA target sequence for D13Wsu123e (NM_145354.2,696-714).
gcatacctagacttacagt

SEQ ID NO: 755692 - DNA, 19 bp, Mus musculus
  siRNA target sequence for D13Wsu123e (NM_145354.2,697-715).
catacctagacttacagta

SEQ ID NO: 755693 - DNA, 19 bp, Mus musculus
  siRNA target sequence for D13Wsu123e (NM_145354.2,729-747).
ggaaagagattctcttcta

SEQ ID NO: 755694 - DNA, 19 bp, Mus musculus
  siRNA target sequence for D13Wsu123e (NM_145354.2,740-758).
ctcttctatgatcgaattt

SEQ ID NO: 755695 - DNA, 19 bp, Mus musculus
  siRNA target sequence for D13Wsu123e (NM_145354.2,742-760).
cttctatgatcgaatttta

SEQ ID NO: 755696 - DNA, 19 bp, Mus musculus
  siRNA target sequence for D13Wsu123e (NM_145354.2,779-797).
ggcgatggcacaatgagaa

SEQ ID NO: 755697 - DNA, 19 bp, Mus musculus
  siRNA target sequence for D13Wsu123e (NM_145354.2,780-798).
gcgatggcacaatgagaaa

SEQ ID NO: 755698 - DNA, 19 bp, Mus musculus
  siRNA target sequence for D13Wsu123e (NM_145354.2,781-799).
cgatggcacaatgagaaaa

SEQ ID NO: 755699 - DNA, 19 bp, Mus musculus
  siRNA target sequence for D13Wsu123e (NM_145354.2,854-872).
ctgcagcttcggattgcaa

SEQ ID NO: 755700 - DNA, 19 bp, Mus musculus
  siRNA target sequence for D13Wsu123e (NM_145354.2,1105-1123).
ccagggcaggcatacacaa

SEQ ID NO: 755701 - DNA, 19 bp, Mus musculus
  siRNA target sequence for D13Wsu123e (NM_145354.2,1201-1219).
gccccatcatcagaatact

SEQ ID NO: 755702 - DNA, 19 bp, Mus musculus
  siRNA target sequence for D13Wsu123e (NM_145354.2,1234-1252).
ggcagtattggtcaagaaa

SEQ ID NO: 755703 - DNA, 19 bp, Mus musculus
  siRNA target sequence for D13Wsu123e (NM_145354.2,1279-1297).
gcccaaggtccagaataaa

SEQ ID NO: 755704 - DNA, 19 bp, Mus musculus
  siRNA target sequence for D13Wsu123e (NM_145354.2,1282-1300).
caaggtccagaataaatct

SEQ ID NO: 755705 - DNA, 19 bp, Mus musculus
  siRNA target sequence for D13Wsu123e (NM_145354.2,1373-1391).
ctggaaagtcagatgataa

SEQ ID NO: 755706 - DNA, 19 bp, Mus musculus
  siRNA target sequence for D13Wsu123e (NM_145354.2,1470-1488).
ctcctccatcaaagaaaat

SEQ ID NO: 755707 - DNA, 19 bp, Mus musculus
  siRNA target sequence for D13Wsu123e (NM_145354.2,1542-1560).
ctttatttccacctattga

SEQ ID NO: 755708 - DNA, 19 bp, Mus musculus
  siRNA target sequence for D13Wsu123e (NM_145354.2,1551-1569).
cacctattgagaagtttta

SEQ ID NO: 755709 - DNA, 19 bp, Mus musculus
  siRNA target sequence for D13Wsu123e (NM_145354.2,1589-1607).
ccgaggatgaatctgttaa

SEQ ID NO: 755710 - DNA, 19 bp, Mus musculus
  siRNA target sequence for D13Wsu123e (NM_145354.2,1651-1669).
caaggagctgaggaatgta

SEQ ID NO: 755711 - DNA, 19 bp, Mus musculus
  siRNA target sequence for D13Wsu123e (NM_145354.2,1690-1708).
gatgaaggtcattaacact

SEQ ID NO: 755712 - DNA, 19 bp, Mus musculus
  siRNA target sequence for D13Wsu123e (NM_145354.2,1720-1738).
ctggtgtcgaaataacagt

SEQ ID NO: 755713 - DNA, 19 bp, Mus musculus
  siRNA target sequence for D13Wsu123e (NM_145354.2,1735-1753).
cagtggtgaagaattcgat

SEQ ID NO: 755714 - DNA, 19 bp, Mus musculus
  siRNA target sequence for D13Wsu123e (NM_145354.2,1788-1806).
cattgtatccatttatcaa

SEQ ID NO: 755715 - DNA, 19 bp, Mus musculus
  siRNA target sequence for D13Wsu123e (NM_145354.2,1797-1815).
catttatcaattcaagaat

SEQ ID NO: 755716 - DNA, 19 bp, Mus musculus
  siRNA target sequence for D13Wsu123e (NM_145354.2,1816-1834).
catcactgtatcaatggaa

SEQ ID NO: 755717 - DNA, 19 bp, Mus musculus
  siRNA target sequence for D13Wsu123e (NM_145354.2,1865-1883).
ccattctttagaaaactga

SEQ ID NO: 755718 - DNA, 19 bp, Mus musculus
  siRNA target sequence for D13Wsu123e (NM_145354.2,2010-2028).
cctctattcgaacttttgt

SEQ ID NO: 755719 - DNA, 19 bp, Mus musculus
  siRNA target sequence for D13Wsu123e (NM_145354.2,2022-2040).
cttttgtgcccaaaaatga

SEQ ID NO: 755720 - DNA, 19 bp, Mus musculus
  siRNA target sequence for D13Wsu123e (NM_145354.2,2098-2116).
gggagtcattcttaccaat

SEQ ID NO: 755721 - DNA, 19 bp, Mus musculus
  siRNA target sequence for D13Wsu123e (NM_145354.2,2102-2120).
gtcattcttaccaatgaga

SEQ ID NO: 755722 - DNA, 19 bp, Mus musculus
  siRNA target sequence for 1700022N24Rik (NM_145355.2,201-219).
gttctgcagacctatcaat

SEQ ID NO: 755723 - DNA, 19 bp, Mus musculus
  siRNA target sequence for 1700022N24Rik (NM_145355.2,204-222).
ctgcagacctatcaatcaa

SEQ ID NO: 755724 - DNA, 19 bp, Mus musculus
  siRNA target sequence for 1700022N24Rik (NM_145355.2,379-397).
caggacagcacctttgagt

SEQ ID NO: 755725 - DNA, 19 bp, Mus musculus
  siRNA target sequence for 1700022N24Rik (NM_145355.2,456-474).
ctgttggccgtgtttacat

SEQ ID NO: 755726 - DNA, 19 bp, Mus musculus
  siRNA target sequence for 1700022N24Rik (NM_145355.2,641-659).
gagggggatttcaaggatt

SEQ ID NO: 755727 - DNA, 19 bp, Mus musculus
  siRNA target sequence for 1700022N24Rik (NM_145355.2,645-663).
gggatttcaaggatttgga

SEQ ID NO: 755728 - DNA, 19 bp, Mus musculus
  siRNA target sequence for 1700022N24Rik (NM_145355.2,673-691).
ggtggctttcagatgtctt

SEQ ID NO: 755729 - DNA, 19 bp, Mus musculus
  siRNA target sequence for 1700022N24Rik (NM_145355.2,678-696).
ctttcagatgtcttttgga

SEQ ID NO: 755730 - DNA, 19 bp, Mus musculus
  siRNA target sequence for 1700022N24Rik (NM_145355.2,694-712).
ggaattggagcatttccat

SEQ ID NO: 755731 - DNA, 19 bp, Mus musculus
  siRNA target sequence for 1700022N24Rik (NM_145355.2,724-742).
gccacagcatttaacataa

SEQ ID NO: 755732 - DNA, 19 bp, Mus musculus
  siRNA target sequence for 1700022N24Rik (NM_145355.2,725-743).
ccacagcatttaacataaa

SEQ ID NO: 755733 - DNA, 19 bp, Mus musculus
  siRNA target sequence for 1700022N24Rik (NM_145355.2,726-744).
cacagcatttaacataaat

SEQ ID NO: 755734 - DNA, 19 bp, Mus musculus
  siRNA target sequence for 1700022N24Rik (NM_145355.2,770-788).
ctgggacaccccagtatgt

SEQ ID NO: 755735 - DNA, 19 bp, Mus musculus
  siRNA target sequence for 1700022N24Rik (NM_145355.2,823-841).
gtcgccctggtgatcatgt

SEQ ID NO: 755736 - DNA, 19 bp, Mus musculus
  siRNA target sequence for BC023105 (NM_145357.1,376-394).
gaagaagggggacattcaa

SEQ ID NO: 755737 - DNA, 19 bp, Mus musculus
  siRNA target sequence for BC023105 (NM_145357.1,720-738).
caaaccatgaaatagaact

SEQ ID NO: 755738 - DNA, 19 bp, Mus musculus
  siRNA target sequence for BC023105 (NM_145357.1,1281-1299).
cttatttgttggaacttga

SEQ ID NO: 755739 - DNA, 19 bp, Mus musculus
  siRNA target sequence for BC023105 (NM_145357.1,1308-1326).
cattaggaggattgatttt

SEQ ID NO: 755740 - DNA, 19 bp, Mus musculus
  siRNA target sequence for BC023105 (NM_145357.1,1313-1331).
ggaggattgattttgaact

SEQ ID NO: 755741 - DNA, 19 bp, Mus musculus
  siRNA target sequence for BC023105 (NM_145357.1,1387-1405).
caggaaaacctattaccta

SEQ ID NO: 755742 - DNA, 19 bp, Mus musculus
  siRNA target sequence for BC023105 (NM_145357.1,1431-1449).
ctgaagatgccaaagttct

SEQ ID NO: 755743 - DNA, 19 bp, Mus musculus
  siRNA target sequence for BC023105 (NM_145357.1,1440-1458).
ccaaagttctccttaaaga

SEQ ID NO: 755744 - DNA, 19 bp, Mus musculus
  siRNA target sequence for BC023105 (NM_145357.1,1448-1466).
ctccttaaagaggcatatt

SEQ ID NO: 755745 - DNA, 19 bp, Mus musculus
  siRNA target sequence for Ocsp (NM_145363.1,163-181).
gtccacctaccgcaaatat

SEQ ID NO: 755746 - DNA, 19 bp, Mus musculus
  siRNA target sequence for Ocsp (NM_145363.1,299-317).
gagcaactgtgtcaaatat

SEQ ID NO: 755747 - DNA, 19 bp, Mus musculus
  siRNA target sequence for Ocsp (NM_145363.1,301-319).
gcaactgtgtcaaatatct

SEQ ID NO: 755748 - DNA, 19 bp, Mus musculus
  siRNA target sequence for Ocsp (NM_145363.1,504-522).
ggtgctttctgtgagaata

SEQ ID NO: 755749 - DNA, 19 bp, Mus musculus
  siRNA target sequence for Ocsp (NM_145363.1,577-595).
ccctggcaggggttctcat

SEQ ID NO: 755750 - DNA, 19 bp, Mus musculus
  siRNA target sequence for Ocsp (NM_145363.1,617-635).
gcaagatagcctgaagtat

SEQ ID NO: 755751 - DNA, 19 bp, Mus musculus
  siRNA target sequence for Ocsp (NM_145363.1,618-636).
caagatagcctgaagtata

SEQ ID NO: 755752 - DNA, 19 bp, Mus musculus
  siRNA target sequence for Ocsp (NM_145363.1,626-644).
cctgaagtatacacttcat

SEQ ID NO: 755753 - DNA, 19 bp, Mus musculus
  siRNA target sequence for Ocsp (NM_145363.1,747-765).
caacagaacctgtacttta

SEQ ID NO: 755754 - DNA, 19 bp, Mus musculus
  siRNA target sequence for Ocsp (NM_145363.1,750-768).
cagaacctgtactttaact

SEQ ID NO: 755755 - DNA, 19 bp, Mus musculus
  siRNA target sequence for Ocsp (NM_145363.1,892-910).
ctggacaagtagtattcct

SEQ ID NO: 755756 - DNA, 19 bp, Mus musculus
  siRNA target sequence for Akr1d1 (NM_145364.1,341-359).
cagagcatgtcccatcaat

SEQ ID NO: 755757 - DNA, 19 bp, Mus musculus
  siRNA target sequence for Akr1d1 (NM_145364.1,391-409).
gccctcaaactagattaca

SEQ ID NO: 755758 - DNA, 19 bp, Mus musculus
  siRNA target sequence for Akr1d1 (NM_145364.1,392-410).
ccctcaaactagattacat

SEQ ID NO: 755759 - DNA, 19 bp, Mus musculus
  siRNA target sequence for Akr1d1 (NM_145364.1,393-411).
cctcaaactagattacata

SEQ ID NO: 755760 - DNA, 19 bp, Mus musculus
  siRNA target sequence for Akr1d1 (NM_145364.1,456-474).
ggaaatttaccctagagat

SEQ ID NO: 755761 - DNA, 19 bp, Mus musculus
  siRNA target sequence for Akr1d1 (NM_145364.1,475-493).
gaaaatggccgaattatat

SEQ ID NO: 755762 - DNA, 19 bp, Mus musculus
  siRNA target sequence for Akr1d1 (NM_145364.1,481-499).
ggccgaattatatatgaca

SEQ ID NO: 755763 - DNA, 19 bp, Mus musculus
  siRNA target sequence for Akr1d1 (NM_145364.1,482-500).
gccgaattatatatgacaa

SEQ ID NO: 755764 - DNA, 19 bp, Mus musculus
  siRNA target sequence for Akr1d1 (NM_145364.1,483-501).
ccgaattatatatgacaaa

SEQ ID NO: 755765 - DNA, 19 bp, Mus musculus
  siRNA target sequence for Akr1d1 (NM_145364.1,525-543).
ggcattggaagcttgcaaa

SEQ ID NO: 755766 - DNA, 19 bp, Mus musculus
  siRNA target sequence for Akr1d1 (NM_145364.1,662-680).
cgtatttcacccagacaaa

SEQ ID NO: 755767 - DNA, 19 bp, Mus musculus
  siRNA target sequence for Akr1d1 (NM_145364.1,671-689).
cccagacaaaactcttgaa

SEQ ID NO: 755768 - DNA, 19 bp, Mus musculus
  siRNA target sequence for Akr1d1 (NM_145364.1,773-791).
ctccacccttgttaaatga

SEQ ID NO: 755769 - DNA, 19 bp, Mus musculus
  siRNA target sequence for Akr1d1 (NM_145364.1,858-876).
catccagcgagggatagtt

SEQ ID NO: 755770 - DNA, 19 bp, Mus musculus
  siRNA target sequence for Akr1d1 (NM_145364.1,864-882).
gcgagggatagttgtcatt

SEQ ID NO: 755771 - DNA, 19 bp, Mus musculus
  siRNA target sequence for Akr1d1 (NM_145364.1,874-892).
gttgtcattcctaaaagct

SEQ ID NO: 755772 - DNA, 19 bp, Mus musculus
  siRNA target sequence for Akr1d1 (NM_145364.1,877-895).
gtcattcctaaaagcttta

SEQ ID NO: 755773 - DNA, 19 bp, Mus musculus
  siRNA target sequence for Akr1d1 (NM_145364.1,890-908).
gctttacccccgaaaggat

SEQ ID NO: 755774 - DNA, 19 bp, Mus musculus
  siRNA target sequence for Akr1d1 (NM_145364.1,1022-1040).
ctgaatacccatttcatga

SEQ ID NO: 755775 - DNA, 19 bp, Mus musculus
  siRNA target sequence for Akr1d1 (NM_145364.1,1030-1048).
ccatttcatgacgaatact

SEQ ID NO: 755776 - DNA, 19 bp, Mus musculus
  siRNA target sequence for Txndc5 (NM_145367.1,454-472).
ccagggtcctagagacttt

SEQ ID NO: 755777 - DNA, 19 bp, Mus musculus
  siRNA target sequence for Txndc5 (NM_145367.1,457-475).
gggtcctagagactttgaa

SEQ ID NO: 755778 - DNA, 19 bp, Mus musculus
  siRNA target sequence for Txndc5 (NM_145367.1,559-577).
gctcaaacaggggttgtat

SEQ ID NO: 755779 - DNA, 19 bp, Mus musculus
  siRNA target sequence for Txndc5 (NM_145367.1,578-596).
gagctctcggccaacaact

SEQ ID NO: 755780 - DNA, 19 bp, Mus musculus
  siRNA target sequence for Txndc5 (NM_145367.1,618-636).
gcaaccactttatcaagtt

SEQ ID NO: 755781 - DNA, 19 bp, Mus musculus
  siRNA target sequence for Txndc5 (NM_145367.1,697-715).
gggccttgaacattctgaa

SEQ ID NO: 755782 - DNA, 19 bp, Mus musculus
  siRNA target sequence for Txndc5 (NM_145367.1,813-831).
gcaagaaggtggatcagta

SEQ ID NO: 755783 - DNA, 19 bp, Mus musculus
  siRNA target sequence for Txndc5 (NM_145367.1,988-1006).
gagcttcgaggacactatt

SEQ ID NO: 755784 - DNA, 19 bp, Mus musculus
  siRNA target sequence for Txndc5 (NM_145367.1,991-1009).
cttcgaggacactattgca

SEQ ID NO: 755785 - DNA, 19 bp, Mus musculus
  siRNA target sequence for Txndc5 (NM_145367.1,1077-1095).
gggaggagctctctaaaaa

SEQ ID NO: 755786 - DNA, 19 bp, Mus musculus
  siRNA target sequence for Txndc5 (NM_145367.1,1082-1100).
gagctctctaaaaaggaat

SEQ ID NO: 755787 - DNA, 19 bp, Mus musculus
  siRNA target sequence for Txndc5 (NM_145367.1,1244-1262).
gacctcgactccttacaca

SEQ ID NO: 755788 - DNA, 19 bp, Mus musculus
  siRNA target sequence for Txndc5 (NM_145367.1,1277-1295).
caggcaaaggatgaactat

SEQ ID NO: 755789 - DNA, 19 bp, Mus musculus
  siRNA target sequence for Gps1 (NM_145370.1,1387-1405).
cattctggagggccttatt

SEQ ID NO: 755790 - DNA, 19 bp, Mus musculus
  siRNA target sequence for Gps1 (NM_145370.1,1422-1440).
cacacagcaagatactgta

SEQ ID NO: 755791 - DNA, 19 bp, Mus musculus
  siRNA target sequence for Gps1 (NM_145370.1,1460-1478).
cgtagcaccacctttgaga

SEQ ID NO: 755792 - DNA, 19 bp, Mus musculus
  siRNA target sequence for Gps1 (NM_145370.1,1461-1479).
gtagcaccacctttgagaa

SEQ ID NO: 755793 - DNA, 19 bp, Mus musculus
  siRNA target sequence for Gps1 (NM_145370.1,1505-1523).
caacgacgtgccaaagcta

SEQ ID NO: 755794 - DNA, 19 bp, Mus musculus
  siRNA target sequence for Gps1 (NM_145370.1,1509-1527).
gacgtgccaaagctatgat

SEQ ID NO: 755795 - DNA, 19 bp, Mus musculus
  siRNA target sequence for Gps1 (NM_145370.1,1514-1532).
gccaaagctatgattctga

SEQ ID NO: 755796 - DNA, 19 bp, Mus musculus
  siRNA target sequence for BC020002 (NM_145374.1,288-306).
cggtaccaagcccgatatt

SEQ ID NO: 755797 - DNA, 19 bp, Mus musculus
  siRNA target sequence for BC020002 (NM_145374.1,289-307).
ggtaccaagcccgatattt

SEQ ID NO: 755798 - DNA, 19 bp, Mus musculus
  siRNA target sequence for BC020002 (NM_145374.1,290-308).
gtaccaagcccgatatttt

SEQ ID NO: 755799 - DNA, 19 bp, Mus musculus
  siRNA target sequence for BC020002 (NM_145374.1,311-329).
gggcaccacaccaagttga

SEQ ID NO: 755800 - DNA, 19 bp, Mus musculus
  siRNA target sequence for BC020002 (NM_145374.1,313-331).
gcaccacaccaagttgata

SEQ ID NO: 755801 - DNA, 19 bp, Mus musculus
  siRNA target sequence for BC020002 (NM_145374.1,316-334).
ccacaccaagttgatagat

SEQ ID NO: 755802 - DNA, 19 bp, Mus musculus
  siRNA target sequence for BC020002 (NM_145374.1,340-358).
gtatgtgactcagaattga

SEQ ID NO: 755803 - DNA, 19 bp, Mus musculus
  siRNA target sequence for BC020002 (NM_145374.1,370-388).
gtggaatcggctgtgaatt

SEQ ID NO: 755804 - DNA, 19 bp, Mus musculus
  siRNA target sequence for BC020002 (NM_145374.1,372-390).
ggaatcggctgtgaattca

SEQ ID NO: 755805 - DNA, 19 bp, Mus musculus
  siRNA target sequence for BC020002 (NM_145374.1,400-418).
gctggatcgttacgtttat

SEQ ID NO: 755806 - DNA, 19 bp, Mus musculus
  siRNA target sequence for BC020002 (NM_145374.1,404-422).
gatcgttacgtttatctga

SEQ ID NO: 755807 - DNA, 19 bp, Mus musculus
  siRNA target sequence for BC020002 (NM_145374.1,433-451).
gcgacattgctgtcaataa

SEQ ID NO: 755808 - DNA, 19 bp, Mus musculus
  siRNA target sequence for BC020002 (NM_145374.1,434-452).
cgacattgctgtcaataaa

SEQ ID NO: 755809 - DNA, 19 bp, Mus musculus
  siRNA target sequence for BC020002 (NM_145374.1,482-500).
cgtggtatctcaattatga

SEQ ID NO: 755810 - DNA, 19 bp, Mus musculus
  siRNA target sequence for BC020002 (NM_145374.1,530-548).
caaatggtcgagttgtact

SEQ ID NO: 755811 - DNA, 19 bp, Mus musculus
  siRNA target sequence for BC020002 (NM_145374.1,535-553).
ggtcgagttgtacttacaa

SEQ ID NO: 755812 - DNA, 19 bp, Mus musculus
  siRNA target sequence for BC020002 (NM_145374.1,551-569).
caagtcttggtcaagatca

SEQ ID NO: 755813 - DNA, 19 bp, Mus musculus
  siRNA target sequence for BC020002 (NM_145374.1,556-574).
cttggtcaagatcataact

SEQ ID NO: 755814 - DNA, 19 bp, Mus musculus
  siRNA target sequence for BC020002 (NM_145374.1,562-580).
caagatcataactctaagt

SEQ ID NO: 755815 - DNA, 19 bp, Mus musculus
  siRNA target sequence for BC020002 (NM_145374.1,575-593).
ctaagttcaaagatttgat

SEQ ID NO: 755816 - DNA, 19 bp, Mus musculus
  siRNA target sequence for BC020002 (NM_145374.1,615-633).
gcatgctcgccaatgcaat

SEQ ID NO: 755817 - DNA, 19 bp, Mus musculus
  siRNA target sequence for BC020002 (NM_145374.1,616-634).
catgctcgccaatgcaata

SEQ ID NO: 755818 - DNA, 19 bp, Mus musculus
  siRNA target sequence for BC020002 (NM_145374.1,630-648).
caatacccttgcatggaat

SEQ ID NO: 755819 - DNA, 19 bp, Mus musculus
  siRNA target sequence for BC020002 (NM_145374.1,644-662).
ggaatccactggatagtaa

SEQ ID NO: 755820 - DNA, 19 bp, Mus musculus
  siRNA target sequence for BC020002 (NM_145374.1,671-689).
ctgctggtctcgacaaaca

SEQ ID NO: 755821 - DNA, 19 bp, Mus musculus
  siRNA target sequence for BC020002 (NM_145374.1,673-691).
gctggtctcgacaaacaca

SEQ ID NO: 755822 - DNA, 19 bp, Mus musculus
  siRNA target sequence for BC020002 (NM_145374.1,728-746).
gcaaatatactcctgatat

SEQ ID NO: 755823 - DNA, 19 bp, Mus musculus
  siRNA target sequence for BC020002 (NM_145374.1,829-847).
cagaatgacgcttctctat

SEQ ID NO: 755824 - DNA, 19 bp, Mus musculus
  siRNA target sequence for BC020002 (NM_145374.1,831-849).
gaatgacgcttctctatct

SEQ ID NO: 755825 - DNA, 19 bp, Mus musculus
  siRNA target sequence for BC020002 (NM_145374.1,887-905).
ctggcatgcatcgtaatct

SEQ ID NO: 755826 - DNA, 19 bp, Mus musculus
  siRNA target sequence for BC020002 (NM_145374.1,894-912).
gcatcgtaatctagcaata

SEQ ID NO: 755827 - DNA, 19 bp, Mus musculus
  siRNA target sequence for BC020002 (NM_145374.1,895-913).
catcgtaatctagcaatat

SEQ ID NO: 755828 - DNA, 19 bp, Mus musculus
  siRNA target sequence for BC020002 (NM_145374.1,899-917).
gtaatctagcaatatttga

SEQ ID NO: 755829 - DNA, 19 bp, Mus musculus
  siRNA target sequence for BC020002 (NM_145374.1,942-960).
gtttgtaaatacaaaagct

SEQ ID NO: 755830 - DNA, 19 bp, Mus musculus
  siRNA target sequence for BC020002 (NM_145374.1,1785-1803).
gaaaggaacggatgtagat

SEQ ID NO: 755831 - DNA, 19 bp, Mus musculus
  siRNA target sequence for BC020002 (NM_145374.1,1856-1874).
ctgctgtggctttgttcaa

SEQ ID NO: 755832 - DNA, 19 bp, Mus musculus
  siRNA target sequence for BC020002 (NM_145374.1,1886-1904).
ggcgagcaatccaaatcct

SEQ ID NO: 755833 - DNA, 19 bp, Mus musculus
  siRNA target sequence for BC020002 (NM_145374.1,1914-1932).
ggcgtcttcagaaaaagga

SEQ ID NO: 755834 - DNA, 19 bp, Mus musculus
  siRNA target sequence for BC020002 (NM_145374.1,1931-1949).
gagatctgaatctcaatgt

SEQ ID NO: 755835 - DNA, 19 bp, Mus musculus
  siRNA target sequence for BC020002 (NM_145374.1,1970-1988).
ggtatacggacgagaagaa

SEQ ID NO: 755836 - DNA, 19 bp, Mus musculus
  siRNA target sequence for BC020002 (NM_145374.1,2029-2047).
ctcaacaacccctatctgt

SEQ ID NO: 755837 - DNA, 19 bp, Mus musculus
  siRNA target sequence for BC020002 (NM_145374.1,2129-2147).
gagtggcattcgcttgtaa

SEQ ID NO: 755838 - DNA, 19 bp, Mus musculus
  siRNA target sequence for BC020002 (NM_145374.1,2135-2153).
cattcgcttgtaaattcct

SEQ ID NO: 755839 - DNA, 19 bp, Mus musculus
  siRNA target sequence for BC020002 (NM_145374.1,2151-2169).
ccttggtgatgctcagtta

SEQ ID NO: 755840 - DNA, 19 bp, Mus musculus
  siRNA target sequence for BC020002 (NM_145374.1,2152-2170).
cttggtgatgctcagttaa

SEQ ID NO: 755841 - DNA, 19 bp, Mus musculus
  siRNA target sequence for BC020002 (NM_145374.1,2232-2250).
gcttacaggcctcactaaa

SEQ ID NO: 755842 - DNA, 19 bp, Mus musculus
  siRNA target sequence for BC020002 (NM_145374.1,2319-2337).
gttacagggttcaccttta

SEQ ID NO: 755843 - DNA, 19 bp, Mus musculus
  siRNA target sequence for BC020002 (NM_145374.1,2327-2345).
gttcacctttagatgttct

SEQ ID NO: 755844 - DNA, 19 bp, Mus musculus
  siRNA target sequence for BC020002 (NM_145374.1,2330-2348).
cacctttagatgttctgaa

SEQ ID NO: 755845 - DNA, 19 bp, Mus musculus
  siRNA target sequence for BC020002 (NM_145374.1,2353-2371).
gaaagggttcaatattgga

SEQ ID NO: 755846 - DNA, 19 bp, Mus musculus
  siRNA target sequence for BC020002 (NM_145374.1,2415-2433).
caaaagggcagaatttgat

SEQ ID NO: 755847 - DNA, 19 bp, Mus musculus
  siRNA target sequence for BC020002 (NM_145374.1,2457-2475).
cagttccaagcctttagca

SEQ ID NO: 755848 - DNA, 19 bp, Mus musculus
  siRNA target sequence for BC020002 (NM_145374.1,2547-2565).
cagagggtttagtcagtat

SEQ ID NO: 755849 - DNA, 19 bp, Mus musculus
  siRNA target sequence for BC020002 (NM_145374.1,2576-2594).
gctcaccaacaaaatccaa

SEQ ID NO: 755850 - DNA, 19 bp, Mus musculus
  siRNA target sequence for BC020002 (NM_145374.1,2636-2654).
gtgcactttgcctcattaa

SEQ ID NO: 755851 - DNA, 19 bp, Mus musculus
  siRNA target sequence for BC020002 (NM_145374.1,2638-2656).
gcactttgcctcattaata

SEQ ID NO: 755852 - DNA, 19 bp, Mus musculus
  siRNA target sequence for BC020002 (NM_145374.1,2715-2733).
gagcaaggacaaaaagtta

SEQ ID NO: 755853 - DNA, 19 bp, Mus musculus
  siRNA target sequence for BC020002 (NM_145374.1,2780-2798).
gtgggcatgccggacatat

SEQ ID NO: 755854 - DNA, 19 bp, Mus musculus
  siRNA target sequence for BC020002 (NM_145374.1,2783-2801).
ggcatgccggacatatgct

SEQ ID NO: 755855 - DNA, 19 bp, Mus musculus
  siRNA target sequence for BC020002 (NM_145374.1,2839-2857).
gcatgcacgtgtaaatgta

SEQ ID NO: 755856 - DNA, 19 bp, Mus musculus
  siRNA target sequence for Trim41 (NM_145377.1,451-469).
cgtgaatcaacccatcata

SEQ ID NO: 755857 - DNA, 19 bp, Mus musculus
  siRNA target sequence for Trim41 (NM_145377.1,452-470).
gtgaatcaacccatcataa

SEQ ID NO: 755858 - DNA, 19 bp, Mus musculus
  siRNA target sequence for Trim41 (NM_145377.1,518-536).
gctcctcacgccatcatca

SEQ ID NO: 755859 - DNA, 19 bp, Mus musculus
  siRNA target sequence for Trim41 (NM_145377.1,519-537).
ctcctcacgccatcatcat

SEQ ID NO: 755860 - DNA, 19 bp, Mus musculus
  siRNA target sequence for Trim41 (NM_145377.1,598-616).
ggcacccacggcaaacgat

SEQ ID NO: 755861 - DNA, 19 bp, Mus musculus
  siRNA target sequence for Trim41 (NM_145377.1,599-617).
gcacccacggcaaacgata

SEQ ID NO: 755862 - DNA, 19 bp, Mus musculus
  siRNA target sequence for Trim41 (NM_145377.1,648-666).
gctcagcccatgtgagaaa

SEQ ID NO: 755863 - DNA, 19 bp, Mus musculus
  siRNA target sequence for Trim41 (NM_145377.1,671-689).
ggcgctttggcgtatacct

SEQ ID NO: 755864 - DNA, 19 bp, Mus musculus
  siRNA target sequence for Trim41 (NM_145377.1,717-735).
ctacaatgcggatacctta

SEQ ID NO: 755865 - DNA, 19 bp, Mus musculus
  siRNA target sequence for Trim41 (NM_145377.1,772-790).
gagcgtgttttcccttttt

SEQ ID NO: 755866 - DNA, 19 bp, Mus musculus
  siRNA target sequence for Trim41 (NM_145377.1,784-802).
ccttttttccgggtacttt

SEQ ID NO: 755867 - DNA, 19 bp, Mus musculus
  siRNA target sequence for Ga17 (NM_145380.1,1130-1148).
gtgaaaaatagccttttga

SEQ ID NO: 755868 - DNA, 19 bp, Mus musculus
  siRNA target sequence for Ga17 (NM_145380.1,1132-1150).
gaaaaatagccttttgagt

SEQ ID NO: 755869 - DNA, 19 bp, Mus musculus
  siRNA target sequence for Lactb2 (NM_145381.1,345-363).
gacaccacctactgcatta

SEQ ID NO: 755870 - DNA, 19 bp, Mus musculus
  siRNA target sequence for Lactb2 (NM_145381.1,352-370).
cctactgcattaaaaaact

SEQ ID NO: 755871 - DNA, 19 bp, Mus musculus
  siRNA target sequence for Lactb2 (NM_145381.1,459-477).
ggagccactctcagagttt

SEQ ID NO: 755872 - DNA, 19 bp, Mus musculus
  siRNA target sequence for Lactb2 (NM_145381.1,460-478).
gagccactctcagagtttt

SEQ ID NO: 755873 - DNA, 19 bp, Mus musculus
  siRNA target sequence for Lactb2 (NM_145381.1,561-579).
ggagaagggacgacaatat

SEQ ID NO: 755874 - DNA, 19 bp, Mus musculus
  siRNA target sequence for Lactb2 (NM_145381.1,562-580).
gagaagggacgacaatatt

SEQ ID NO: 755875 - DNA, 19 bp, Mus musculus
  siRNA target sequence for Lactb2 (NM_145381.1,568-586).
ggacgacaatatttgaaga

SEQ ID NO: 755876 - DNA, 19 bp, Mus musculus
  siRNA target sequence for Lactb2 (NM_145381.1,585-603).
gacctctatgattatatga

SEQ ID NO: 755877 - DNA, 19 bp, Mus musculus
  siRNA target sequence for Lactb2 (NM_145381.1,602-620).
gaactccctaaacaactta

SEQ ID NO: 755878 - DNA, 19 bp, Mus musculus
  siRNA target sequence for Lactb2 (NM_145381.1,607-625).
ccctaaacaacttactaaa

SEQ ID NO: 755879 - DNA, 19 bp, Mus musculus
  siRNA target sequence for Lactb2 (NM_145381.1,608-626).
cctaaacaacttactaaaa

SEQ ID NO: 755880 - DNA, 19 bp, Mus musculus
  siRNA target sequence for Lactb2 (NM_145381.1,609-627).
ctaaacaacttactaaaaa

SEQ ID NO: 755881 - DNA, 19 bp, Mus musculus
  siRNA target sequence for Lactb2 (NM_145381.1,659-677).
cccagtcatccataatgct

SEQ ID NO: 755882 - DNA, 19 bp, Mus musculus
  siRNA target sequence for Lactb2 (NM_145381.1,716-734).
ccgagaagaacagattatt

SEQ ID NO: 755883 - DNA, 19 bp, Mus musculus
  siRNA target sequence for Lactb2 (NM_145381.1,717-735).
cgagaagaacagattattt

SEQ ID NO: 755884 - DNA, 19 bp, Mus musculus
  siRNA target sequence for Lactb2 (NM_145381.1,720-738).
gaagaacagattatttcat

SEQ ID NO: 755885 - DNA, 19 bp, Mus musculus
  siRNA target sequence for Lactb2 (NM_145381.1,736-754).
cattattccgtgataactt

SEQ ID NO: 755886 - DNA, 19 bp, Mus musculus
  siRNA target sequence for Lactb2 (NM_145381.1,775-793).
cggaacttaggacaatgat

SEQ ID NO: 755887 - DNA, 19 bp, Mus musculus
  siRNA target sequence for Lactb2 (NM_145381.1,777-795).
gaacttaggacaatgattt

SEQ ID NO: 755888 - DNA, 19 bp, Mus musculus
  siRNA target sequence for Lactb2 (NM_145381.1,780-798).
cttaggacaatgatttaca

SEQ ID NO: 755889 - DNA, 19 bp, Mus musculus
  siRNA target sequence for BC021381 (NM_145382.2,931-949).
gcaggtgaatcgtgtttct

SEQ ID NO: 755890 - DNA, 19 bp, Mus musculus
  siRNA target sequence for BC021381 (NM_145382.2,1004-1022).
gaactggaccgcgtcaata

SEQ ID NO: 755891 - DNA, 19 bp, Mus musculus
  siRNA target sequence for BC021381 (NM_145382.2,1007-1025).
ctggaccgcgtcaatagct

SEQ ID NO: 755892 - DNA, 19 bp, Mus musculus
  siRNA target sequence for BC021381 (NM_145382.2,1450-1468).
ggaagttcccagttgcaaa

SEQ ID NO: 755893 - DNA, 19 bp, Mus musculus
  siRNA target sequence for BC021381 (NM_145382.2,1458-1476).
ccagttgcaaacaggaatt

SEQ ID NO: 755894 - DNA, 19 bp, Mus musculus
  siRNA target sequence for BC021381 (NM_145382.2,1711-1729).
ggctgacagccccaaaact

SEQ ID NO: 755895 - DNA, 19 bp, Mus musculus
  siRNA target sequence for BC019216 (NM_145384.1,543-561).
gacctacacggctgtgtat

SEQ ID NO: 755896 - DNA, 19 bp, Mus musculus
  siRNA target sequence for BC019216 (NM_145384.1,545-563).
cctacacggctgtgtatta

SEQ ID NO: 755897 - DNA, 19 bp, Mus musculus
  siRNA target sequence for BC019216 (NM_145384.1,586-604).
ctgacgctgtacttccatt

SEQ ID NO: 755898 - DNA, 19 bp, Mus musculus
  siRNA target sequence for BC019216 (NM_145384.1,590-608).
cgctgtacttccattataa

SEQ ID NO: 755899 - DNA, 19 bp, Mus musculus
  siRNA target sequence for BC019216 (NM_145384.1,629-647).
cgttgtctgcccctatcaa

SEQ ID NO: 755900 - DNA, 19 bp, Mus musculus
  siRNA target sequence for BC019216 (NM_145384.1,630-648).
gttgtctgcccctatcaat

SEQ ID NO: 755901 - DNA, 19 bp, Mus musculus
  siRNA target sequence for BC019216 (NM_145384.1,633-651).
gtctgcccctatcaattct

SEQ ID NO: 755902 - DNA, 19 bp, Mus musculus
  siRNA target sequence for BC019216 (NM_145384.1,635-653).
ctgcccctatcaattctgt

SEQ ID NO: 755903 - DNA, 19 bp, Mus musculus
  siRNA target sequence for BC019216 (NM_145384.1,669-687).
ggggacggtgtgtatcaca

SEQ ID NO: 755904 - DNA, 19 bp, Mus musculus
  siRNA target sequence for BC019216 (NM_145384.1,755-773).
ctgtggagccaggcaataa

SEQ ID NO: 755905 - DNA, 19 bp, Mus musculus
  siRNA target sequence for BC019216 (NM_145384.1,766-784).
ggcaataagcccttcacaa

SEQ ID NO: 755906 - DNA, 19 bp, Mus musculus
  siRNA target sequence for BC019216 (NM_145384.1,851-869).
ctcagattcgcaccaattt

SEQ ID NO: 755907 - DNA, 19 bp, Mus musculus
  siRNA target sequence for BC019216 (NM_145384.1,855-873).
gattcgcaccaatttcata

SEQ ID NO: 755908 - DNA, 19 bp, Mus musculus
  siRNA target sequence for BC019216 (NM_145384.1,1039-1057).
ctgctcgacaccatcgtat

SEQ ID NO: 755909 - DNA, 19 bp, Mus musculus
  siRNA target sequence for BC019216 (NM_145384.1,1133-1151).
ccacccctctgtctacata

SEQ ID NO: 755910 - DNA, 19 bp, Mus musculus
  siRNA target sequence for BC019216 (NM_145384.1,1191-1209).
gtgtgtccttccatctaca

SEQ ID NO: 755911 - DNA, 19 bp, Mus musculus
  siRNA target sequence for BC019216 (NM_145384.1,1217-1235).
ctttaaccacccttcattt

SEQ ID NO: 755912 - DNA, 19 bp, Mus musculus
  siRNA target sequence for BC019216 (NM_145384.1,1259-1277).
cccatcacccacttagaca

SEQ ID NO: 755913 - DNA, 19 bp, Mus musculus
  siRNA target sequence for BC023151 (NM_145387.1,440-458).
caggggtgttctgtataca

SEQ ID NO: 755914 - DNA, 19 bp, Mus musculus
  siRNA target sequence for BC023151 (NM_145387.1,442-460).
ggggtgttctgtatacaat

SEQ ID NO: 755915 - DNA, 19 bp, Mus musculus
  siRNA target sequence for BC023151 (NM_145387.1,580-598).
ctggcactcaaggattcat

SEQ ID NO: 755916 - DNA, 19 bp, Mus musculus
  siRNA target sequence for BC023151 (NM_145387.1,634-652).
ggagtaaggaggaatgcta

SEQ ID NO: 755917 - DNA, 19 bp, Mus musculus
  siRNA target sequence for BC023151 (NM_145387.1,649-667).
gctactggggccatatctt

SEQ ID NO: 755918 - DNA, 19 bp, Mus musculus
  siRNA target sequence for BC023151 (NM_145387.1,723-741).
gccagggccatcctagaat

SEQ ID NO: 755919 - DNA, 19 bp, Mus musculus
  siRNA target sequence for BC023151 (NM_145387.1,724-742).
ccagggccatcctagaata

SEQ ID NO: 755920 - DNA, 19 bp, Mus musculus
  siRNA target sequence for BC023151 (NM_145387.1,791-809).
ctaccagggagccaagttt

SEQ ID NO: 755921 - DNA, 19 bp, Mus musculus
  siRNA target sequence for BC023151 (NM_145387.1,795-813).
cagggagccaagtttgctt

SEQ ID NO: 755922 - DNA, 19 bp, Mus musculus
  siRNA target sequence for BC023151 (NM_145387.1,861-879).
gggacccaggagatccata

SEQ ID NO: 755923 - DNA, 19 bp, Mus musculus
  siRNA target sequence for BC023151 (NM_145387.1,862-880).
ggacccaggagatccatat

SEQ ID NO: 755924 - DNA, 19 bp, Mus musculus
  siRNA target sequence for BC023151 (NM_145387.1,865-883).
cccaggagatccatatcaa

SEQ ID NO: 755925 - DNA, 19 bp, Mus musculus
  siRNA target sequence for BC023151 (NM_145387.1,866-884).
ccaggagatccatatcaat

SEQ ID NO: 755926 - DNA, 19 bp, Mus musculus
  siRNA target sequence for BC023151 (NM_145387.1,900-918).
gcctttcagctgtattact

SEQ ID NO: 755927 - DNA, 19 bp, Mus musculus
  siRNA target sequence for BC023151 (NM_145387.1,901-919).
cctttcagctgtattacta

SEQ ID NO: 755928 - DNA, 19 bp, Mus musculus
  siRNA target sequence for BC023151 (NM_145387.1,1065-1083).
cattcaggagtcaacaact

SEQ ID NO: 755929 - DNA, 19 bp, Mus musculus
  siRNA target sequence for BC023151 (NM_145387.1,1185-1203).
gataggatcaagataccat

SEQ ID NO: 755930 - DNA, 19 bp, Mus musculus
  siRNA target sequence for BC016579 (NM_145389.1,311-329).
cattatagtgatcgttata

SEQ ID NO: 755931 - DNA, 19 bp, Mus musculus
  siRNA target sequence for BC016579 (NM_145389.1,339-357).
cttgtaggagtgacgtata

SEQ ID NO: 755932 - DNA, 19 bp, Mus musculus
  siRNA target sequence for BC016579 (NM_145389.1,350-368).
gacgtatatcgatgaagat

SEQ ID NO: 755933 - DNA, 19 bp, Mus musculus
  siRNA target sequence for BC016579 (NM_145389.1,353-371).
gtatatcgatgaagatgaa

SEQ ID NO: 755934 - DNA, 19 bp, Mus musculus
  siRNA target sequence for BC016579 (NM_145389.1,375-393).
gaaatactcgaattatcgt

SEQ ID NO: 755935 - DNA, 19 bp, Mus musculus
  siRNA target sequence for BC016579 (NM_145389.1,383-401).
cgaattatcgtcaaacaaa

SEQ ID NO: 755936 - DNA, 19 bp, Mus musculus
  siRNA target sequence for BC016579 (NM_145389.1,384-402).
gaattatcgtcaaacaaaa

SEQ ID NO: 755937 - DNA, 19 bp, Mus musculus
  siRNA target sequence for BC016579 (NM_145389.1,391-409).
cgtcaaacaaaacattctt

SEQ ID NO: 755938 - DNA, 19 bp, Mus musculus
  siRNA target sequence for BC016579 (NM_145389.1,456-474).
catcacttgctcactgaaa

SEQ ID NO: 755939 - DNA, 19 bp, Mus musculus
  siRNA target sequence for BC016579 (NM_145389.1,507-525).
ctgagtcgttttttcactt

SEQ ID NO: 755940 - DNA, 19 bp, Mus musculus
  siRNA target sequence for BC016579 (NM_145389.1,536-554).
cttggatttcagtgttgaa

SEQ ID NO: 755941 - DNA, 19 bp, Mus musculus
  siRNA target sequence for BC016579 (NM_145389.1,558-576).
gccacggtaacctatcact

SEQ ID NO: 755942 - DNA, 19 bp, Mus musculus
  siRNA target sequence for BC016579 (NM_145389.1,559-577).
ccacggtaacctatcactt

SEQ ID NO: 755943 - DNA, 19 bp, Mus musculus
  siRNA target sequence for BC016579 (NM_145389.1,581-599).
gtttggagttccatctgaa

SEQ ID NO: 755944 - DNA, 19 bp, Mus musculus
  siRNA target sequence for BC016579 (NM_145389.1,662-680).
cttccacgataagaacata

SEQ ID NO: 755945 - DNA, 19 bp, Mus musculus
  siRNA target sequence for BC016579 (NM_145389.1,665-683).
ccacgataagaacatatct

SEQ ID NO: 755946 - DNA, 19 bp, Mus musculus
  siRNA target sequence for BC016579 (NM_145389.1,666-684).
cacgataagaacatatcta

SEQ ID NO: 755947 - DNA, 19 bp, Mus musculus
  siRNA target sequence for LOC213233 (NM_145391.1,370-388).
ccacggacatcatcttaga

SEQ ID NO: 755948 - DNA, 19 bp, Mus musculus
  siRNA target sequence for LOC213233 (NM_145391.1,540-558).
caggattcacctgttatct

SEQ ID NO: 755949 - DNA, 19 bp, Mus musculus
  siRNA target sequence for LOC213233 (NM_145391.1,638-656).
ctgcgagatctccaagtat

SEQ ID NO: 755950 - DNA, 19 bp, Mus musculus
  siRNA target sequence for LOC213233 (NM_145391.1,640-658).
gcgagatctccaagtattt

SEQ ID NO: 755951 - DNA, 19 bp, Mus musculus
  siRNA target sequence for LOC213233 (NM_145391.1,670-688).
gacaagaggccacttttga

SEQ ID NO: 755952 - DNA, 19 bp, Mus musculus
  siRNA target sequence for LOC213233 (NM_145391.1,710-728).
caacatgcaggtttctaga

SEQ ID NO: 755953 - DNA, 19 bp, Mus musculus
  siRNA target sequence for LOC213233 (NM_145391.1,956-974).
gtggcggctgcagcataaa

SEQ ID NO: 755954 - DNA, 19 bp, Mus musculus
  siRNA target sequence for LOC213233 (NM_145391.1,1091-1109).
caacctcactctaaaggat

SEQ ID NO: 755955 - DNA, 19 bp, Mus musculus
  siRNA target sequence for LOC213233 (NM_145391.1,1241-1259).
cagcattgccggctactat

SEQ ID NO: 755956 - DNA, 19 bp, Mus musculus
  siRNA target sequence for LOC213233 (NM_145391.1,1292-1310).
ggagctgggtggaattcca

SEQ ID NO: 755957 - DNA, 19 bp, Mus musculus
  siRNA target sequence for LOC213233 (NM_145391.1,1443-1461).
ctggaggagccccttacaa

SEQ ID NO: 755958 - DNA, 19 bp, Mus musculus
  siRNA target sequence for LOC213233 (NM_145391.1,1533-1551).
ctttctgcgctgttgttgt

SEQ ID NO: 755959 - DNA, 19 bp, Mus musculus
  siRNA target sequence for 9430020E02Rik (NM_145393.2,1683-1701).
ggaagggtcccgtgtactt

SEQ ID NO: 755960 - DNA, 19 bp, Mus musculus
  siRNA target sequence for 9430020E02Rik (NM_145393.2,1684-1702).
gaagggtcccgtgtactta

SEQ ID NO: 755961 - DNA, 19 bp, Mus musculus
  siRNA target sequence for BC010552 (NM_145394.1,408-426).
gggcaggacatgactctaa

SEQ ID NO: 755962 - DNA, 19 bp, Mus musculus
  siRNA target sequence for BC010552 (NM_145394.1,409-427).
ggcaggacatgactctaaa

SEQ ID NO: 755963 - DNA, 19 bp, Mus musculus
  siRNA target sequence for BC010552 (NM_145394.1,410-428).
gcaggacatgactctaaaa

SEQ ID NO: 755964 - DNA, 19 bp, Mus musculus
  siRNA target sequence for BC010552 (NM_145394.1,413-431).
ggacatgactctaaaaaaa

SEQ ID NO: 755965 - DNA, 19 bp, Mus musculus
  siRNA target sequence for BC010552 (NM_145394.1,446-464).
gaatgcctgcaatcttgaa

SEQ ID NO: 755966 - DNA, 19 bp, Mus musculus
  siRNA target sequence for BC010552 (NM_145394.1,582-600).
gtgtatagtttgaattcct

SEQ ID NO: 755967 - DNA, 19 bp, Mus musculus
  siRNA target sequence for BC010552 (NM_145394.1,605-623).
ctacactcagagttcaagt

SEQ ID NO: 755968 - DNA, 19 bp, Mus musculus
  siRNA target sequence for BC010552 (NM_145394.1,704-722).
cgagtgctattccttgttt

SEQ ID NO: 755969 - DNA, 19 bp, Mus musculus
  siRNA target sequence for BC010552 (NM_145394.1,719-737).
gtttgcatcagtcttgata

SEQ ID NO: 755970 - DNA, 19 bp, Mus musculus
  siRNA target sequence for BC010552 (NM_145394.1,749-767).
cgctctccatcggattcta

SEQ ID NO: 755971 - DNA, 19 bp, Mus musculus
  siRNA target sequence for BC010552 (NM_145394.1,750-768).
gctctccatcggattctaa

SEQ ID NO: 755972 - DNA, 19 bp, Mus musculus
  siRNA target sequence for BC010552 (NM_145394.1,759-777).
cggattctaagtggaataa

SEQ ID NO: 755973 - DNA, 19 bp, Mus musculus
  siRNA target sequence for BC010552 (NM_145394.1,760-778).
ggattctaagtggaataat

SEQ ID NO: 755974 - DNA, 19 bp, Mus musculus
  siRNA target sequence for BC010552 (NM_145394.1,867-885).
cttctgatccacattatca

SEQ ID NO: 755975 - DNA, 19 bp, Mus musculus
  siRNA target sequence for BC010552 (NM_145394.1,870-888).
ctgatccacattatcatct

SEQ ID NO: 755976 - DNA, 19 bp, Mus musculus
  siRNA target sequence for BC010552 (NM_145394.1,911-929).
gttcgtctgcggtgtctta

SEQ ID NO: 755977 - DNA, 19 bp, Mus musculus
  siRNA target sequence for BC010552 (NM_145394.1,915-933).
gtctgcggtgtcttatggt

SEQ ID NO: 755978 - DNA, 19 bp, Mus musculus
  siRNA target sequence for BC010552 (NM_145394.1,926-944).
cttatggtggctgtattat

SEQ ID NO: 755979 - DNA, 19 bp, Mus musculus
  siRNA target sequence for BC010552 (NM_145394.1,1162-1180).
gtgccatcctcattttctt

SEQ ID NO: 755980 - DNA, 19 bp, Mus musculus
  siRNA target sequence for BC010552 (NM_145394.1,1246-1264).
gtggccaagtggaatataa

SEQ ID NO: 755981 - DNA, 19 bp, Mus musculus
  siRNA target sequence for BC010552 (NM_145394.1,1365-1383).
gcaatggttgcttgttatt

SEQ ID NO: 755982 - DNA, 19 bp, Mus musculus
  siRNA target sequence for BC010552 (NM_145394.1,1371-1389).
gttgcttgttatttcaaca

SEQ ID NO: 755983 - DNA, 19 bp, Mus musculus
  siRNA target sequence for BC010552 (NM_145394.1,1407-1425).
cctgcccgtccaatccttt

SEQ ID NO: 755984 - DNA, 19 bp, Mus musculus
  siRNA target sequence for BC010552 (NM_145394.1,1426-1444).
cgtctctcttcgtactttt

SEQ ID NO: 755985 - DNA, 19 bp, Mus musculus
  siRNA target sequence for BC010552 (NM_145394.1,1464-1482).
gcggtgaaagggtcatttt

SEQ ID NO: 755986 - DNA, 19 bp, Mus musculus
  siRNA target sequence for BC010552 (NM_145394.1,1603-1621).
gtctccttaaatatctgta

SEQ ID NO: 755987 - DNA, 19 bp, Mus musculus
  siRNA target sequence for BC010552 (NM_145394.1,1661-1679).
cgggacagacttttgtaca

SEQ ID NO: 755988 - DNA, 19 bp, Mus musculus
  siRNA target sequence for BC010552 (NM_145394.1,1697-1715).
cacaatcatagccaagaat

SEQ ID NO: 755989 - DNA, 19 bp, Mus musculus
  siRNA target sequence for BC010552 (NM_145394.1,1720-1738).
gtcatctcacgtctgttaa

SEQ ID NO: 755990 - DNA, 19 bp, Mus musculus
  siRNA target sequence for BC010552 (NM_145394.1,1722-1740).
catctcacgtctgttaact

SEQ ID NO: 755991 - DNA, 19 bp, Mus musculus
  siRNA target sequence for BC010552 (NM_145394.1,1801-1819).
ggggtctgatggcgtttaa

SEQ ID NO: 755992 - DNA, 19 bp, Mus musculus
  siRNA target sequence for BC010552 (NM_145394.1,1804-1822).
gtctgatggcgtttaacta

SEQ ID NO: 755993 - DNA, 19 bp, Mus musculus
  siRNA target sequence for BC010552 (NM_145394.1,1806-1824).
ctgatggcgtttaactaca

SEQ ID NO: 755994 - DNA, 19 bp, Mus musculus
  siRNA target sequence for BC010552 (NM_145394.1,1894-1912).
gtttcctatccgtgtttga

SEQ ID NO: 755995 - DNA, 19 bp, Mus musculus
  siRNA target sequence for BC010552 (NM_145394.1,1915-1933).
ctgcgctggatatcctttt

SEQ ID NO: 755996 - DNA, 19 bp, Mus musculus
  siRNA target sequence for BC010552 (NM_145394.1,1973-1991).
gtcggagaaaccgtacttt

SEQ ID NO: 755997 - DNA, 19 bp, Mus musculus
  siRNA target sequence for BC010552 (NM_145394.1,1975-1993).
cggagaaaccgtactttat

SEQ ID NO: 755998 - DNA, 19 bp, Mus musculus
  siRNA target sequence for BC010552 (NM_145394.1,1994-2012).
ggacccagggtttttgagt

SEQ ID NO: 755999 - DNA, 19 bp, Mus musculus
  siRNA target sequence for BC010552 (NM_145394.1,2058-2076).
caaaaggatgctttaccaa

SEQ ID NO: 756000 - DNA, 19 bp, Mus musculus
  siRNA target sequence for BC010552 (NM_145394.1,2091-2109).
gaactccagcccattgtga

SEQ ID NO: 756001 - DNA, 19 bp, Mus musculus
  siRNA target sequence for BC019755 (NM_145395.1,325-343).
ccaagccaacctttccaat

SEQ ID NO: 756002 - DNA, 19 bp, Mus musculus
  siRNA target sequence for BC019755 (NM_145395.1,511-529).
ggtctgtgggccatgtcaa

SEQ ID NO: 756003 - DNA, 19 bp, Mus musculus
  siRNA target sequence for BC019755 (NM_145395.1,522-540).
catgtcaacgccaacacaa

SEQ ID NO: 756004 - DNA, 19 bp, Mus musculus
  siRNA target sequence for BC019755 (NM_145395.1,530-548).
cgccaacacaacgtacaaa

SEQ ID NO: 756005 - DNA, 19 bp, Mus musculus
  siRNA target sequence for BC019755 (NM_145395.1,642-660).
ctgaatgaaaccatcaact

SEQ ID NO: 756006 - DNA, 19 bp, Mus musculus
  siRNA target sequence for BC019755 (NM_145395.1,778-796).
gcccatgtggcctgtacaa

SEQ ID NO: 756007 - DNA, 19 bp, Mus musculus
  siRNA target sequence for BC019755 (NM_145395.1,881-899).
gatgccagtgctggtttat

SEQ ID NO: 756008 - DNA, 19 bp, Mus musculus
  siRNA target sequence for BC019755 (NM_145395.1,884-902).
gccagtgctggtttatggt

SEQ ID NO: 756009 - DNA, 19 bp, Mus musculus
  siRNA target sequence for BC019755 (NM_145395.1,959-977).
catgaccacgtcactcata

SEQ ID NO: 756010 - DNA, 19 bp, Mus musculus
  siRNA target sequence for Tbl3 (NM_145396.3,108-126).
gggattgtgccgcttcaaa

SEQ ID NO: 756011 - DNA, 19 bp, Mus musculus
  siRNA target sequence for Tbl3 (NM_145396.3,117-135).
ccgcttcaaagccaactat

SEQ ID NO: 756012 - DNA, 19 bp, Mus musculus
  siRNA target sequence for Tbl3 (NM_145396.3,146-164).
gaaagattgaacctttcta

SEQ ID NO: 756013 - DNA, 19 bp, Mus musculus
  siRNA target sequence for Tbl3 (NM_145396.3,218-236).
gtggtaccaaagttaacat

SEQ ID NO: 756014 - DNA, 19 bp, Mus musculus
  siRNA target sequence for Tbl3 (NM_145396.3,283-301).
gaccaagaggacattacct

SEQ ID NO: 756015 - DNA, 19 bp, Mus musculus
  siRNA target sequence for Tbl3 (NM_145396.3,309-327).
cctcagtcctgatgatgaa

SEQ ID NO: 756016 - DNA, 19 bp, Mus musculus
  siRNA target sequence for Tbl3 (NM_145396.3,397-415).
ctgtggaaggcgatacaca

SEQ ID NO: 756017 - DNA, 19 bp, Mus musculus
  siRNA target sequence for Tbl3 (NM_145396.3,701-719).
gtgagggtggccacactat

SEQ ID NO: 756018 - DNA, 19 bp, Mus musculus
  siRNA target sequence for Tbl3 (NM_145396.3,725-743).
gctctggccgtgacaagat

SEQ ID NO: 756019 - DNA, 19 bp, Mus musculus
  siRNA target sequence for Tbl3 (NM_145396.3,782-800).
ggacggtgccagtgtttga

SEQ ID NO: 756020 - DNA, 19 bp, Mus musculus
  siRNA target sequence for Tbl3 (NM_145396.3,1048-1066).
gaggcacactccttacagt

SEQ ID NO: 756021 - DNA, 19 bp, Mus musculus
  siRNA target sequence for Tbl3 (NM_145396.3,1058-1076).
ccttacagttgcagaaaca

SEQ ID NO: 756022 - DNA, 19 bp, Mus musculus
  siRNA target sequence for Tbl3 (NM_145396.3,1084-1102).
ggctatagtgaggaagtat

SEQ ID NO: 756023 - DNA, 19 bp, Mus musculus
  siRNA target sequence for Tbl3 (NM_145396.3,1085-1103).
gctatagtgaggaagtatt

SEQ ID NO: 756024 - DNA, 19 bp, Mus musculus
  siRNA target sequence for Tbl3 (NM_145396.3,1339-1357).
ggttctggccacacacata

SEQ ID NO: 756025 - DNA, 19 bp, Mus musculus
  siRNA target sequence for Tbl3 (NM_145396.3,1373-1391).
gctgttctaggctaaaaga

SEQ ID NO: 756026 - DNA, 19 bp, Mus musculus
  siRNA target sequence for Tbl3 (NM_145396.3,1514-1532).
ggcgatgccacgacaaaga

SEQ ID NO: 756027 - DNA, 19 bp, Mus musculus
  siRNA target sequence for Tbl3 (NM_145396.3,1516-1534).
cgatgccacgacaaagaca

SEQ ID NO: 756028 - DNA, 19 bp, Mus musculus
  siRNA target sequence for Tbl3 (NM_145396.3,1517-1535).
gatgccacgacaaagacat

SEQ ID NO: 756029 - DNA, 19 bp, Mus musculus
  siRNA target sequence for Tbl3 (NM_145396.3,1614-1632).
gcctcagtgccaactgtta

SEQ ID NO: 756030 - DNA, 19 bp, Mus musculus
  siRNA target sequence for Tbl3 (NM_145396.3,1622-1640).
gccaactgttaggtgtttt

SEQ ID NO: 756031 - DNA, 19 bp, Mus musculus
  siRNA target sequence for Tbl3 (NM_145396.3,1623-1641).
ccaactgttaggtgttttt

SEQ ID NO: 756032 - DNA, 19 bp, Mus musculus
  siRNA target sequence for Tbl3 (NM_145396.3,1624-1642).
caactgttaggtgttttta

SEQ ID NO: 756033 - DNA, 19 bp, Mus musculus
  siRNA target sequence for Tbl3 (NM_145396.3,1749-1767).
cagttgcctcaagacattt

SEQ ID NO: 756034 - DNA, 19 bp, Mus musculus
  siRNA target sequence for Tbl3 (NM_145396.3,1751-1769).
gttgcctcaagacatttga

SEQ ID NO: 756035 - DNA, 19 bp, Mus musculus
  siRNA target sequence for Tbl3 (NM_145396.3,1770-1788).
gggacacgatgcttctgta

SEQ ID NO: 756036 - DNA, 19 bp, Mus musculus
  siRNA target sequence for Tbl3 (NM_145396.3,1961-1979).
gcagtgactcccgaatcat

SEQ ID NO: 756037 - DNA, 19 bp, Mus musculus
  siRNA target sequence for Tbl3 (NM_145396.3,1964-1982).
gtgactcccgaatcattct

SEQ ID NO: 756038 - DNA, 19 bp, Mus musculus
  siRNA target sequence for Tbl3 (NM_145396.3,1966-1984).
gactcccgaatcattctct

SEQ ID NO: 756039 - DNA, 19 bp, Mus musculus
  siRNA target sequence for Tbl3 (NM_145396.3,2132-2150).
ctgtgctgaccgttatcca

SEQ ID NO: 756040 - DNA, 19 bp, Mus musculus
  siRNA target sequence for BC002059 (NM_145397.1,334-352).
gggaacaacacataatgga

SEQ ID NO: 756041 - DNA, 19 bp, Mus musculus
  siRNA target sequence for BC002059 (NM_145397.1,1070-1088).
gtttggacgtcttcaaagt

SEQ ID NO: 756042 - DNA, 19 bp, Mus musculus
  siRNA target sequence for Cast1 (NM_145398.2,226-244).
ccgctaccgaggcaatgat

SEQ ID NO: 756043 - DNA, 19 bp, Mus musculus
  siRNA target sequence for Cast1 (NM_145398.2,227-245).
cgctaccgaggcaatgatt

SEQ ID NO: 756044 - DNA, 19 bp, Mus musculus
  siRNA target sequence for Cast1 (NM_145398.2,237-255).
gcaatgattcgtgtgaata

SEQ ID NO: 756045 - DNA, 19 bp, Mus musculus
  siRNA target sequence for Cast1 (NM_145398.2,262-280).
ctcgagcggcagatttctt

SEQ ID NO: 756046 - DNA, 19 bp, Mus musculus
  siRNA target sequence for Cast1 (NM_145398.2,294-312).
ggcaacctcacagttgtat

SEQ ID NO: 756047 - DNA, 19 bp, Mus musculus
  siRNA target sequence for Cast1 (NM_145398.2,296-314).
caacctcacagttgtatga

SEQ ID NO: 756048 - DNA, 19 bp, Mus musculus
  siRNA target sequence for Cast1 (NM_145398.2,306-324).
gttgtatgatgcataaata

SEQ ID NO: 756049 - DNA, 19 bp, Mus musculus
  siRNA target sequence for Cast1 (NM_145398.2,343-361).
gacttgccttgtagataaa

SEQ ID NO: 756050 - DNA, 19 bp, Mus musculus
  siRNA target sequence for Cast1 (NM_145398.2,345-363).
cttgccttgtagataaaca

SEQ ID NO: 756051 - DNA, 19 bp, Mus musculus
  siRNA target sequence for Cast1 (NM_145398.2,387-405).
ggatccgtcaattatttta

SEQ ID NO: 756052 - DNA, 19 bp, Mus musculus
  siRNA target sequence for Cast1 (NM_145398.2,388-406).
gatccgtcaattattttat

SEQ ID NO: 756053 - DNA, 19 bp, Mus musculus
  siRNA target sequence for Cast1 (NM_145398.2,476-494).
gacaaggctgcatcagtta

SEQ ID NO: 756054 - DNA, 19 bp, Mus musculus
  siRNA target sequence for Cast1 (NM_145398.2,478-496).
caaggctgcatcagttaaa

SEQ ID NO: 756055 - DNA, 19 bp, Mus musculus
  siRNA target sequence for Cast1 (NM_145398.2,531-549).
ccatgaaacaatgtatcaa

SEQ ID NO: 756056 - DNA, 19 bp, Mus musculus
  siRNA target sequence for Cast1 (NM_145398.2,558-576).
ctgaggactcggttttgaa

SEQ ID NO: 756057 - DNA, 19 bp, Mus musculus
  siRNA target sequence for Cast1 (NM_145398.2,602-620).
gccacatggtccatcaaga

SEQ ID NO: 756058 - DNA, 19 bp, Mus musculus
  siRNA target sequence for Cast1 (NM_145398.2,609-627).
ggtccatcaagattcataa

SEQ ID NO: 756059 - DNA, 19 bp, Mus musculus
  siRNA target sequence for Cast1 (NM_145398.2,640-658).
ggcactagctcagtataaa

SEQ ID NO: 756060 - DNA, 19 bp, Mus musculus
  siRNA target sequence for Cast1 (NM_145398.2,641-659).
gcactagctcagtataaaa

SEQ ID NO: 756061 - DNA, 19 bp, Mus musculus
  siRNA target sequence for Cast1 (NM_145398.2,642-660).
cactagctcagtataaaat

SEQ ID NO: 756062 - DNA, 19 bp, Mus musculus
  siRNA target sequence for Cast1 (NM_145398.2,644-662).
ctagctcagtataaaatga

SEQ ID NO: 756063 - DNA, 19 bp, Mus musculus
  siRNA target sequence for Cast1 (NM_145398.2,672-690).
ccatagcaccactcttaga

SEQ ID NO: 756064 - DNA, 19 bp, Mus musculus
  siRNA target sequence for Cast1 (NM_145398.2,673-691).
catagcaccactcttagaa

SEQ ID NO: 756065 - DNA, 19 bp, Mus musculus
  siRNA target sequence for Cast1 (NM_145398.2,677-695).
gcaccactcttagaaaaat

SEQ ID NO: 756066 - DNA, 19 bp, Mus musculus
  siRNA target sequence for Cast1 (NM_145398.2,689-707).
gaaaaattggccaagacta

SEQ ID NO: 756067 - DNA, 19 bp, Mus musculus
  siRNA target sequence for Cast1 (NM_145398.2,697-715).
ggccaagactagtgatgtt

SEQ ID NO: 756068 - DNA, 19 bp, Mus musculus
  siRNA target sequence for Cast1 (NM_145398.2,751-769).
cttaagtgaaaataggaaa

SEQ ID NO: 756069 - DNA, 19 bp, Mus musculus
  siRNA target sequence for Cast1 (NM_145398.2,840-858).
cctctaagtccaatgtgaa

SEQ ID NO: 756070 - DNA, 19 bp, Mus musculus
  siRNA target sequence for Cast1 (NM_145398.2,926-944).
cctgaatcgagcagagaaa

SEQ ID NO: 756071 - DNA, 19 bp, Mus musculus
  siRNA target sequence for Cast1 (NM_145398.2,964-982).
gaacgtgtactgcaataaa

SEQ ID NO: 756072 - DNA, 19 bp, Mus musculus
  siRNA target sequence for Cast1 (NM_145398.2,967-985).
cgtgtactgcaataaagtt

SEQ ID NO: 756073 - DNA, 19 bp, Mus musculus
  siRNA target sequence for Cast1 (NM_145398.2,1056-1074).
gctttttcactttatccat

SEQ ID NO: 756074 - DNA, 19 bp, Mus musculus
  siRNA target sequence for Cast1 (NM_145398.2,1072-1090).
cattattgggtatttcatt

SEQ ID NO: 756075 - DNA, 19 bp, Mus musculus
  siRNA target sequence for Cast1 (NM_145398.2,1080-1098).
ggtatttcattttctatgt

SEQ ID NO: 756076 - DNA, 19 bp, Mus musculus
  siRNA target sequence for Cast1 (NM_145398.2,1081-1099).
gtatttcattttctatgta

SEQ ID NO: 756077 - DNA, 19 bp, Mus musculus
  siRNA target sequence for Cast1 (NM_145398.2,1093-1111).
ctatgtaattcatcgtaat

SEQ ID NO: 756078 - DNA, 19 bp, Mus musculus
  siRNA target sequence for Cast1 (NM_145398.2,1115-1133).
caccggaagaataaaccat

SEQ ID NO: 756079 - DNA, 19 bp, Mus musculus
  siRNA target sequence for Cast1 (NM_145398.2,1123-1141).
gaataaaccatgtactgat

SEQ ID NO: 756080 - DNA, 19 bp, Mus musculus
  siRNA target sequence for Cast1 (NM_145398.2,1149-1167).
gtggcgaggaaaagaagaa

SEQ ID NO: 756081 - DNA, 19 bp, Mus musculus
  siRNA target sequence for Cast1 (NM_145398.2,1151-1169).
ggcgaggaaaagaagaata

SEQ ID NO: 756082 - DNA, 19 bp, Mus musculus
  siRNA target sequence for Cast1 (NM_145398.2,1181-1199).
cctgtgtcttcattagaaa

SEQ ID NO: 756083 - DNA, 19 bp, Mus musculus
  siRNA target sequence for Cast1 (NM_145398.2,1226-1244).
ggcctgattatggcttatt

SEQ ID NO: 756084 - DNA, 19 bp, Mus musculus
  siRNA target sequence for Cast1 (NM_145398.2,1256-1274).
gaccgtgcaaacctgttta

SEQ ID NO: 756085 - DNA, 19 bp, Mus musculus
  siRNA target sequence for Cast1 (NM_145398.2,1260-1278).
gtgcaaacctgtttatgaa

SEQ ID NO: 756086 - DNA, 19 bp, Mus musculus
  siRNA target sequence for Cast1 (NM_145398.2,1339-1357).
gggagtattttacaatgaa

SEQ ID NO: 756087 - DNA, 19 bp, Mus musculus
  siRNA target sequence for Cast1 (NM_145398.2,1369-1387).
gactaaagtgttaaataga

SEQ ID NO: 756088 - DNA, 19 bp, Mus musculus
  siRNA target sequence for Cast1 (NM_145398.2,1371-1389).
ctaaagtgttaaatagaga

SEQ ID NO: 756089 - DNA, 19 bp, Mus musculus
  siRNA target sequence for Cast1 (NM_145398.2,1410-1428).
gctggatgcagcttgtgat

SEQ ID NO: 756090 - DNA, 19 bp, Mus musculus
  siRNA target sequence for Cast1 (NM_145398.2,1411-1429).
ctggatgcagcttgtgatt

SEQ ID NO: 756091 - DNA, 19 bp, Mus musculus
  siRNA target sequence for Cast1 (NM_145398.2,1424-1442).
gtgattttgatctatcaca

SEQ ID NO: 756092 - DNA, 19 bp, Mus musculus
  siRNA target sequence for Cast1 (NM_145398.2,1446-1464).
cgggagcaagcacatttct

SEQ ID NO: 756093 - DNA, 19 bp, Mus musculus
  siRNA target sequence for Cast1 (NM_145398.2,1517-1535).
gggtacgggcatttctctt

SEQ ID NO: 756094 - DNA, 19 bp, Mus musculus
  siRNA target sequence for Cast1 (NM_145398.2,1518-1536).
ggtacgggcatttctctta

SEQ ID NO: 756095 - DNA, 19 bp, Mus musculus
  siRNA target sequence for Cast1 (NM_145398.2,1522-1540).
cgggcatttctcttacttt

SEQ ID NO: 756096 - DNA, 19 bp, Mus musculus
  siRNA target sequence for Cast1 (NM_145398.2,1573-1591).
gtgtcaggtcttatttcgt

SEQ ID NO: 756097 - DNA, 19 bp, Mus musculus
  siRNA target sequence for Cast1 (NM_145398.2,1579-1597).
ggtcttatttcgtctcaat

SEQ ID NO: 756098 - DNA, 19 bp, Mus musculus
  siRNA target sequence for Cast1 (NM_145398.2,1580-1598).
gtcttatttcgtctcaatt

SEQ ID NO: 756099 - DNA, 19 bp, Mus musculus
  siRNA target sequence for Cast1 (NM_145398.2,1600-1618).
cctggttgtggtgttatgt

SEQ ID NO: 756100 - DNA, 19 bp, Mus musculus
  siRNA target sequence for Cast1 (NM_145398.2,1607-1625).
gtggtgttatgtatcgtaa

SEQ ID NO: 756101 - DNA, 19 bp, Mus musculus
  siRNA target sequence for Cast1 (NM_145398.2,1621-1639).
cgtaatggatcgaccatat

SEQ ID NO: 756102 - DNA, 19 bp, Mus musculus
  siRNA target sequence for Cast1 (NM_145398.2,1631-1649).
cgaccatatcagttctatt

SEQ ID NO: 756103 - DNA, 19 bp, Mus musculus
  siRNA target sequence for Cast1 (NM_145398.2,1632-1650).
gaccatatcagttctatta

SEQ ID NO: 756104 - DNA, 19 bp, Mus musculus
  siRNA target sequence for Cast1 (NM_145398.2,1634-1652).
ccatatcagttctattact

SEQ ID NO: 756105 - DNA, 19 bp, Mus musculus
  siRNA target sequence for Cast1 (NM_145398.2,1670-1688).
gtgtggttcatggtcatat

SEQ ID NO: 756106 - DNA, 19 bp, Mus musculus
  siRNA target sequence for Cast1 (NM_145398.2,1681-1699).
ggtcatatatgtcacttta

SEQ ID NO: 756107 - DNA, 19 bp, Mus musculus
  siRNA target sequence for Cast1 (NM_145398.2,1684-1702).
catatatgtcactttagca

SEQ ID NO: 756108 - DNA, 19 bp, Mus musculus
  siRNA target sequence for Cast1 (NM_145398.2,1749-1767).
ggtatctcggcttactgtt

SEQ ID NO: 756109 - DNA, 19 bp, Mus musculus
  siRNA target sequence for Cast1 (NM_145398.2,1756-1774).
cggcttactgttgaaacta

SEQ ID NO: 756110 - DNA, 19 bp, Mus musculus
  siRNA target sequence for Cast1 (NM_145398.2,1817-1835).
ggtgcatttgagaagatct

SEQ ID NO: 756111 - DNA, 19 bp, Mus musculus
  siRNA target sequence for Cast1 (NM_145398.2,1820-1838).
gcatttgagaagatctttt

SEQ ID NO: 756112 - DNA, 19 bp, Mus musculus
  siRNA target sequence for Cast1 (NM_145398.2,1826-1844).
gagaagatcttttctctat

SEQ ID NO: 756113 - DNA, 19 bp, Mus musculus
  siRNA target sequence for Cast1 (NM_145398.2,1854-1872).
ccaaatgttttgaactaga

SEQ ID NO: 756114 - DNA, 19 bp, Mus musculus
  siRNA target sequence for Cast1 (NM_145398.2,1871-1889).
gaagggagcgtgtatgaat

SEQ ID NO: 756115 - DNA, 19 bp, Mus musculus
  siRNA target sequence for Cast1 (NM_145398.2,1968-1986).
gacggcaaatactttctga

SEQ ID NO: 756116 - DNA, 19 bp, Mus musculus
  siRNA target sequence for Cast1 (NM_145398.2,1993-2011).
gggtgaaccactcttttca

SEQ ID NO: 756117 - DNA, 19 bp, Mus musculus
  siRNA target sequence for Cast1 (NM_145398.2,1994-2012).
ggtgaaccactcttttcaa

SEQ ID NO: 756118 - DNA, 19 bp, Mus musculus
  siRNA target sequence for Cast1 (NM_145398.2,1997-2015).
gaaccactcttttcaaaca

SEQ ID NO: 756119 - DNA, 19 bp, Mus musculus
  siRNA target sequence for Cast1 (NM_145398.2,2048-2066).
gtgtctttcttgacctatt

SEQ ID NO: 756120 - DNA, 19 bp, Mus musculus
  siRNA target sequence for Cast1 (NM_145398.2,2052-2070).
ctttcttgacctattccat

SEQ ID NO: 756121 - DNA, 19 bp, Mus musculus
  siRNA target sequence for Cast1 (NM_145398.2,2092-2110).
caaagcagagtgtaacgaa

SEQ ID NO: 756122 - DNA, 19 bp, Mus musculus
  siRNA target sequence for Cast1 (NM_145398.2,2149-2167).
catcctgataaggaacata

SEQ ID NO: 756123 - DNA, 19 bp, Mus musculus
  siRNA target sequence for Cast1 (NM_145398.2,2169-2187).
ctggatatgcccgttctat

SEQ ID NO: 756124 - DNA, 19 bp, Mus musculus
  siRNA target sequence for Cast1 (NM_145398.2,2171-2189).
ggatatgcccgttctatat

SEQ ID NO: 756125 - DNA, 19 bp, Mus musculus
  siRNA target sequence for Cast1 (NM_145398.2,2172-2190).
gatatgcccgttctatata

SEQ ID NO: 756126 - DNA, 19 bp, Mus musculus
  siRNA target sequence for Cast1 (NM_145398.2,2177-2195).
gcccgttctatatacagtt

SEQ ID NO: 756127 - DNA, 19 bp, Mus musculus
  siRNA target sequence for Cast1 (NM_145398.2,2209-2227).
gtttggaaaaatttcacta

SEQ ID NO: 756128 - DNA, 19 bp, Mus musculus
  siRNA target sequence for Cast1 (NM_145398.2,2298-2316).
gaaacccgacactcaacat

SEQ ID NO: 756129 - DNA, 19 bp, Mus musculus
  siRNA target sequence for Cast1 (NM_145398.2,2328-2346).
cgttcatcttcgtttgtgt

SEQ ID NO: 756130 - DNA, 19 bp, Mus musculus
  siRNA target sequence for Cast1 (NM_145398.2,2377-2395).
cctcgcgcaggtcgttatt

SEQ ID NO: 756131 - DNA, 19 bp, Mus musculus
  siRNA target sequence for Cast1 (NM_145398.2,2380-2398).
cgcgcaggtcgttattcct

SEQ ID NO: 756132 - DNA, 19 bp, Mus musculus
  siRNA target sequence for Cast1 (NM_145398.2,2381-2399).
gcgcaggtcgttattccta

SEQ ID NO: 756133 - DNA, 19 bp, Mus musculus
  siRNA target sequence for Cast1 (NM_145398.2,2382-2400).
cgcaggtcgttattcctaa

SEQ ID NO: 756134 - DNA, 19 bp, Mus musculus
  siRNA target sequence for Cast1 (NM_145398.2,2383-2401).
gcaggtcgttattcctaaa

SEQ ID NO: 756135 - DNA, 19 bp, Mus musculus
  siRNA target sequence for Cast1 (NM_145398.2,2386-2404).
ggtcgttattcctaaagat

SEQ ID NO: 756136 - DNA, 19 bp, Mus musculus
  siRNA target sequence for Cast1 (NM_145398.2,2426-2444).
ctggcatgtacgattgcat

SEQ ID NO: 756137 - DNA, 19 bp, Mus musculus
  siRNA target sequence for Cast1 (NM_145398.2,2430-2448).
catgtacgattgcattctt

SEQ ID NO: 756138 - DNA, 19 bp, Mus musculus
  siRNA target sequence for Cast1 (NM_145398.2,2450-2468).
ggtggagtcctcatcttat

SEQ ID NO: 756139 - DNA, 19 bp, Mus musculus
  siRNA target sequence for Cast1 (NM_145398.2,2461-2479).
catcttatcctccattcaa

SEQ ID NO: 756140 - DNA, 19 bp, Mus musculus
  siRNA target sequence for Cast1 (NM_145398.2,2464-2482).
cttatcctccattcaagat

SEQ ID NO: 756141 - DNA, 19 bp, Mus musculus
  siRNA target sequence for 2410051C13Rik (NM_145401.1,451-469).
gatggagatgtggagaatt

SEQ ID NO: 756142 - DNA, 19 bp, Mus musculus
  siRNA target sequence for 2410051C13Rik (NM_145401.1,864-882).
cccagagagccgcatctat

SEQ ID NO: 756143 - DNA, 19 bp, Mus musculus
  siRNA target sequence for 2410051C13Rik (NM_145401.1,868-886).
gagagccgcatctatgctt

SEQ ID NO: 756144 - DNA, 19 bp, Mus musculus
  siRNA target sequence for 2410051C13Rik (NM_145401.1,1092-1110).
gaggtcacacaagtgttat

SEQ ID NO: 756145 - DNA, 19 bp, Mus musculus
  siRNA target sequence for 2410051C13Rik (NM_145401.1,1094-1112).
ggtcacacaagtgttatga

SEQ ID NO: 756146 - DNA, 19 bp, Mus musculus
  siRNA target sequence for 2410051C13Rik (NM_145401.1,1097-1115).
cacacaagtgttatgacat

SEQ ID NO: 756147 - DNA, 19 bp, Mus musculus
  siRNA target sequence for 2410051C13Rik (NM_145401.1,1151-1169).
ctacgttgcaagtcaaaaa

SEQ ID NO: 756148 - DNA, 19 bp, Mus musculus
  siRNA target sequence for 2410051C13Rik (NM_145401.1,1240-1258).
gtaggaatgctcacgatta

SEQ ID NO: 756149 - DNA, 19 bp, Mus musculus
  siRNA target sequence for 2410051C13Rik (NM_145401.1,1244-1262).
gaatgctcacgattacaga

SEQ ID NO: 756150 - DNA, 19 bp, Mus musculus
  siRNA target sequence for 2410051C13Rik (NM_145401.1,1249-1267).
ctcacgattacagatttca

SEQ ID NO: 756151 - DNA, 19 bp, Mus musculus
  siRNA target sequence for 2410051C13Rik (NM_145401.1,1251-1269).
cacgattacagatttcata

SEQ ID NO: 756152 - DNA, 19 bp, Mus musculus
  siRNA target sequence for 2410051C13Rik (NM_145401.1,1253-1271).
cgattacagatttcataaa

SEQ ID NO: 756153 - DNA, 19 bp, Mus musculus
  siRNA target sequence for 2410051C13Rik (NM_145401.1,1298-1316).
ccatggtacagatttatga

SEQ ID NO: 756154 - DNA, 19 bp, Mus musculus
  siRNA target sequence for 2410051C13Rik (NM_145401.1,1343-1361).
ggagggagttgtacttaca

SEQ ID NO: 756155 - DNA, 19 bp, Mus musculus
  siRNA target sequence for 2410051C13Rik (NM_145401.1,1344-1362).
gagggagttgtacttacaa

SEQ ID NO: 756156 - DNA, 19 bp, Mus musculus
  siRNA target sequence for 2410051C13Rik (NM_145401.1,1347-1365).
ggagttgtacttacaagaa

SEQ ID NO: 756157 - DNA, 19 bp, Mus musculus
  siRNA target sequence for 2410051C13Rik (NM_145401.1,1348-1366).
gagttgtacttacaagaaa

SEQ ID NO: 756158 - DNA, 19 bp, Mus musculus
  siRNA target sequence for 2410051C13Rik (NM_145401.1,1403-1421).
gcctcttcgatgctgtata

SEQ ID NO: 756159 - DNA, 19 bp, Mus musculus
  siRNA target sequence for 2410051C13Rik (NM_145401.1,1405-1423).
ctcttcgatgctgtatact

SEQ ID NO: 756160 - DNA, 19 bp, Mus musculus
  siRNA target sequence for 2410051C13Rik (NM_145401.1,1414-1432).
gctgtatactcgttgatca

SEQ ID NO: 756161 - DNA, 19 bp, Mus musculus
  siRNA target sequence for 2410051C13Rik (NM_145401.1,1415-1433).
ctgtatactcgttgatcaa

SEQ ID NO: 756162 - DNA, 19 bp, Mus musculus
  siRNA target sequence for 2410051C13Rik (NM_145401.1,1417-1435).
gtatactcgttgatcaaaa

SEQ ID NO: 756163 - DNA, 19 bp, Mus musculus
  siRNA target sequence for 2410051C13Rik (NM_145401.1,1475-1493).
ggaacgcactttatatact

SEQ ID NO: 756164 - DNA, 19 bp, Mus musculus
  siRNA target sequence for 2410051C13Rik (NM_145401.1,1544-1562).
caaagcctgccttcatgaa

SEQ ID NO: 756165 - DNA, 19 bp, Mus musculus
  siRNA target sequence for 2410051C13Rik (NM_145401.1,1587-1605).
cggaacgtaccacaatatt

SEQ ID NO: 756166 - DNA, 19 bp, Mus musculus
  siRNA target sequence for 2410051C13Rik (NM_145401.1,1596-1614).
ccacaatattgccttcatt

SEQ ID NO: 756167 - DNA, 19 bp, Mus musculus
  siRNA target sequence for 2410051C13Rik (NM_145401.1,1744-1762).
gctgagaaaacgtacaata

SEQ ID NO: 756168 - DNA, 19 bp, Mus musculus
  siRNA target sequence for 2410051C13Rik (NM_145401.1,1792-1810).
cagcaccgctcgcagtatt

SEQ ID NO: 756169 - DNA, 19 bp, Mus musculus
  siRNA target sequence for 2410051C13Rik (NM_145401.1,1794-1812).
gcaccgctcgcagtatttt

SEQ ID NO: 756170 - DNA, 19 bp, Mus musculus
  siRNA target sequence for BC003277 (NM_145402.2,600-618).
ctcaagagcaagacgtttt

SEQ ID NO: 756171 - DNA, 19 bp, Mus musculus
  siRNA target sequence for BC003277 (NM_145402.2,602-620).
caagagcaagacgttttca

SEQ ID NO: 756172 - DNA, 19 bp, Mus musculus
  siRNA target sequence for BC003277 (NM_145402.2,814-832).
cgagctacgaggaagtgat

SEQ ID NO: 756173 - DNA, 19 bp, Mus musculus
  siRNA target sequence for BC003277 (NM_145402.2,975-993).
gctccggacaggcaaaact

SEQ ID NO: 756174 - DNA, 19 bp, Mus musculus
  siRNA target sequence for BC003277 (NM_145402.2,1020-1038).
ctcaaagttcgaaggatta

SEQ ID NO: 756175 - DNA, 19 bp, Mus musculus
  siRNA target sequence for BC003277 (NM_145402.2,1033-1051).
ggattaaatccgaaaagct

SEQ ID NO: 756176 - DNA, 19 bp, Mus musculus
  siRNA target sequence for BC003277 (NM_145402.2,1034-1052).
gattaaatccgaaaagctt

SEQ ID NO: 756177 - DNA, 19 bp, Mus musculus
  siRNA target sequence for BC003277 (NM_145402.2,1103-1121).
ctctatcgagcctttgact

SEQ ID NO: 756178 - DNA, 19 bp, Mus musculus
  siRNA target sequence for Ubl4 (NM_145405.1,208-226).
ggccctagcagatgaaaaa

SEQ ID NO: 756179 - DNA, 19 bp, Mus musculus
  siRNA target sequence for Ubl4 (NM_145405.1,258-276).
ctaagctcaacctagttgt

SEQ ID NO: 756180 - DNA, 19 bp, Mus musculus
  siRNA target sequence for Ubl4 (NM_145405.1,405-423).
gggtcctggaacaactaca

SEQ ID NO: 756181 - DNA, 19 bp, Mus musculus
  siRNA target sequence for Ubl4 (NM_145405.1,441-459).
ccttgagccgcctaacact

SEQ ID NO: 756182 - DNA, 19 bp, Mus musculus
  siRNA target sequence for Ubl4 (NM_145405.1,505-523).
gactgaggctatggaaaaa

SEQ ID NO: 756183 - DNA, 19 bp, Mus musculus
  siRNA target sequence for Ubl4 (NM_145405.1,518-536).
gaaaaagggttctgcaaat

SEQ ID NO: 756184 - DNA, 19 bp, Mus musculus
  siRNA target sequence for 5830457O10Rik (NM_145412.2,576-594).
gacggagggcctgttatga

SEQ ID NO: 756185 - DNA, 19 bp, Mus musculus
  siRNA target sequence for 5830457O10Rik (NM_145412.2,750-768).
cgcgacccaggcatgactt

SEQ ID NO: 756186 - DNA, 19 bp, Mus musculus
  siRNA target sequence for 5830457O10Rik (NM_145412.2,844-862).
gaccaggaccaggtttaaa

SEQ ID NO: 756187 - DNA, 19 bp, Mus musculus
  siRNA target sequence for 5830457O10Rik (NM_145412.2,885-903).
ggcccagggcctatgtcta

SEQ ID NO: 756188 - DNA, 19 bp, Mus musculus
  siRNA target sequence for 5830457O10Rik (NM_145412.2,886-904).
gcccagggcctatgtctaa

SEQ ID NO: 756189 - DNA, 19 bp, Mus musculus
  siRNA target sequence for 5830457O10Rik (NM_145412.2,899-917).
gtctaaccccagattagga

SEQ ID NO: 756190 - DNA, 19 bp, Mus musculus
  siRNA target sequence for 5830457O10Rik (NM_145412.2,1109-1127).
gagatcaagctttttaggt

SEQ ID NO: 756191 - DNA, 19 bp, Mus musculus
  siRNA target sequence for 5830457O10Rik (NM_145412.2,1138-1156).
cccctaggtcgggtatgtt

SEQ ID NO: 756192 - DNA, 19 bp, Mus musculus
  siRNA target sequence for 5830457O10Rik (NM_145412.2,1139-1157).
ccctaggtcgggtatgttt

SEQ ID NO: 756193 - DNA, 19 bp, Mus musculus
  siRNA target sequence for 5830457O10Rik (NM_145412.2,1282-1300).
gtacaggatctggtcttaa

SEQ ID NO: 756194 - DNA, 19 bp, Mus musculus
  siRNA target sequence for 5830457O10Rik (NM_145412.2,1346-1364).
gagggcagcaggtctttta

SEQ ID NO: 756195 - DNA, 19 bp, Mus musculus
  siRNA target sequence for 5830457O10Rik (NM_145412.2,1356-1374).
ggtcttttagggacaaatt

SEQ ID NO: 756196 - DNA, 19 bp, Mus musculus
  siRNA target sequence for 5830457O10Rik (NM_145412.2,1387-1405).
cccaggcttctggaaacat

SEQ ID NO: 756197 - DNA, 19 bp, Mus musculus
  siRNA target sequence for 5830457O10Rik (NM_145412.2,1418-1436).
gcccaccatgacaagagta

SEQ ID NO: 756198 - DNA, 19 bp, Mus musculus
  siRNA target sequence for 5830457O10Rik (NM_145412.2,1442-1460).
ccccataggtccaaacaca

SEQ ID NO: 756199 - DNA, 19 bp, Mus musculus
  siRNA target sequence for 5830457O10Rik (NM_145412.2,1526-1544).
ccccatgggtcctaattca

SEQ ID NO: 756200 - DNA, 19 bp, Mus musculus
  siRNA target sequence for 5830457O10Rik (NM_145412.2,1534-1552).
gtcctaattcagctcattt

SEQ ID NO: 756201 - DNA, 19 bp, Mus musculus
  siRNA target sequence for 5830457O10Rik (NM_145412.2,1568-1586).
ccccatgggggtaaatgct

SEQ ID NO: 756202 - DNA, 19 bp, Mus musculus
  siRNA target sequence for 5830457O10Rik (NM_145412.2,1693-1711).
gcctccagggctcaaatca

SEQ ID NO: 756203 - DNA, 19 bp, Mus musculus
  siRNA target sequence for 5830457O10Rik (NM_145412.2,1694-1712).
cctccagggctcaaatcaa

SEQ ID NO: 756204 - DNA, 19 bp, Mus musculus
  siRNA target sequence for 5830457O10Rik (NM_145412.2,1885-1903).
caggccctgtgggtatcaa

SEQ ID NO: 756205 - DNA, 19 bp, Mus musculus
  siRNA target sequence for 5830457O10Rik (NM_145412.2,1901-1919).
caacccagctccttttgca

SEQ ID NO: 756206 - DNA, 19 bp, Mus musculus
  siRNA target sequence for 5830457O10Rik (NM_145412.2,1971-1989).
ggccctgtaggtaagactt

SEQ ID NO: 756207 - DNA, 19 bp, Mus musculus
  siRNA target sequence for 5830457O10Rik (NM_145412.2,1972-1990).
gccctgtaggtaagacttt

SEQ ID NO: 756208 - DNA, 19 bp, Mus musculus
  siRNA target sequence for 5830457O10Rik (NM_145412.2,2056-2074).
gtccaatggctgcaatgta

SEQ ID NO: 756209 - DNA, 19 bp, Mus musculus
  siRNA target sequence for 5830457O10Rik (NM_145412.2,2067-2085).
gcaatgtacccaaatggaa

SEQ ID NO: 756210 - DNA, 19 bp, Mus musculus
  siRNA target sequence for 5830457O10Rik (NM_145412.2,2068-2086).
caatgtacccaaatggaat

SEQ ID NO: 756211 - DNA, 19 bp, Mus musculus
  siRNA target sequence for C530043G21Rik (NM_145413.2,400-418).
cgagttgtgctgttagcaa

SEQ ID NO: 756212 - DNA, 19 bp, Mus musculus
  siRNA target sequence for C530043G21Rik (NM_145413.2,401-419).
gagttgtgctgttagcaat

SEQ ID NO: 756213 - DNA, 19 bp, Mus musculus
  siRNA target sequence for C530043G21Rik (NM_145413.2,416-434).
caatactcctcgtcatttt

SEQ ID NO: 756214 - DNA, 19 bp, Mus musculus
  siRNA target sequence for C530043G21Rik (NM_145413.2,421-439).
ctcctcgtcatttttatct

SEQ ID NO: 756215 - DNA, 19 bp, Mus musculus
  siRNA target sequence for C530043G21Rik (NM_145413.2,453-471).
cctgatagacaatttagat

SEQ ID NO: 756216 - DNA, 19 bp, Mus musculus
  siRNA target sequence for C530043G21Rik (NM_145413.2,454-472).
ctgatagacaatttagata

SEQ ID NO: 756217 - DNA, 19 bp, Mus musculus
  siRNA target sequence for C530043G21Rik (NM_145413.2,456-474).
gatagacaatttagataca

SEQ ID NO: 756218 - DNA, 19 bp, Mus musculus
  siRNA target sequence for C530043G21Rik (NM_145413.2,500-518).
gggcttttcaccgaatgat

SEQ ID NO: 756219 - DNA, 19 bp, Mus musculus
  siRNA target sequence for C530043G21Rik (NM_145413.2,502-520).
gcttttcaccgaatgatga

SEQ ID NO: 756220 - DNA, 19 bp, Mus musculus
  siRNA target sequence for C530043G21Rik (NM_145413.2,629-647).
cagagctgggagcaatcat

SEQ ID NO: 756221 - DNA, 19 bp, Mus musculus
  siRNA target sequence for C530043G21Rik (NM_145413.2,658-676).
gccactaagaaaatcatta

SEQ ID NO: 756222 - DNA, 19 bp, Mus musculus
  siRNA target sequence for C530043G21Rik (NM_145413.2,734-752).
gacagaaagttgtctttaa

SEQ ID NO: 756223 - DNA, 19 bp, Mus musculus
  siRNA target sequence for C530043G21Rik (NM_145413.2,759-777).
gcggtacagcagagactat

SEQ ID NO: 756224 - DNA, 19 bp, Mus musculus
  siRNA target sequence for C530043G21Rik (NM_145413.2,793-811).
ccatacgctggttatgaca

SEQ ID NO: 756225 - DNA, 19 bp, Mus musculus
  siRNA target sequence for C530043G21Rik (NM_145413.2,873-891).
cttggtggtgggcagatat

SEQ ID NO: 756226 - DNA, 19 bp, Mus musculus
  siRNA target sequence for C530043G21Rik (NM_145413.2,876-894).
ggtggtgggcagatatgtt

SEQ ID NO: 756227 - DNA, 19 bp, Mus musculus
  siRNA target sequence for C530043G21Rik (NM_145413.2,877-895).
gtggtgggcagatatgtta

SEQ ID NO: 756228 - DNA, 19 bp, Mus musculus
  siRNA target sequence for C530043G21Rik (NM_145413.2,939-957).
gagcaccttcctaactgta

SEQ ID NO: 756229 - DNA, 19 bp, Mus musculus
  siRNA target sequence for C530043G21Rik (NM_145413.2,959-977).
ggaacaatacttgtttcta

SEQ ID NO: 756230 - DNA, 19 bp, Mus musculus
  siRNA target sequence for C530043G21Rik (NM_145413.2,987-1005).
ctactactgccgagaaaca

SEQ ID NO: 756231 - DNA, 19 bp, Mus musculus
  siRNA target sequence for C530043G21Rik (NM_145413.2,1016-1034).
gtgctgacggtgacatgat

SEQ ID NO: 756232 - DNA, 19 bp, Mus musculus
  siRNA target sequence for C530043G21Rik (NM_145413.2,1036-1054).
gagggctctgtcacacttt

SEQ ID NO: 756233 - DNA, 19 bp, Mus musculus
  siRNA target sequence for C530043G21Rik (NM_145413.2,1193-1211).
cgcgtctcctggacatcat

SEQ ID NO: 756234 - DNA, 19 bp, Mus musculus
  siRNA target sequence for C530043G21Rik (NM_145413.2,1194-1212).
gcgtctcctggacatcatt

SEQ ID NO: 756235 - DNA, 19 bp, Mus musculus
  siRNA target sequence for C530043G21Rik (NM_145413.2,1213-1231).
gacacggctgtctttgatt

SEQ ID NO: 756236 - DNA, 19 bp, Mus musculus
  siRNA target sequence for C530043G21Rik (NM_145413.2,1217-1235).
cggctgtctttgattactt

SEQ ID NO: 756237 - DNA, 19 bp, Mus musculus
  siRNA target sequence for C530043G21Rik (NM_145413.2,1266-1284).
gagctttcaagatgatgaa

SEQ ID NO: 756238 - DNA, 19 bp, Mus musculus
  siRNA target sequence for C530043G21Rik (NM_145413.2,1282-1300).
gaaggcgcgagcatgctta

SEQ ID NO: 756239 - DNA, 19 bp, Mus musculus
  siRNA target sequence for C530043G21Rik (NM_145413.2,1287-1305).
cgcgagcatgcttattctt

SEQ ID NO: 756240 - DNA, 19 bp, Mus musculus
  siRNA target sequence for C530043G21Rik (NM_145413.2,1296-1314).
gcttattcttcttgataat

SEQ ID NO: 756241 - DNA, 19 bp, Mus musculus
  siRNA target sequence for C530043G21Rik (NM_145413.2,1353-1371).
cattcttgcccctctctat

SEQ ID NO: 756242 - DNA, 19 bp, Mus musculus
  siRNA target sequence for C530043G21Rik (NM_145413.2,1387-1405).
cgggtttcaacctggaata

SEQ ID NO: 756243 - DNA, 19 bp, Mus musculus
  siRNA target sequence for C530043G21Rik (NM_145413.2,1389-1407).
ggtttcaacctggaataga

SEQ ID NO: 756244 - DNA, 19 bp, Mus musculus
  siRNA target sequence for C530043G21Rik (NM_145413.2,1398-1416).
ctggaatagactgaattat

SEQ ID NO: 756245 - DNA, 19 bp, Mus musculus
  siRNA target sequence for C530043G21Rik (NM_145413.2,1400-1418).
ggaatagactgaattatct

SEQ ID NO: 756246 - DNA, 19 bp, Mus musculus
  siRNA target sequence for C530043G21Rik (NM_145413.2,1401-1419).
gaatagactgaattatcta

SEQ ID NO: 756247 - DNA, 19 bp, Mus musculus
  siRNA target sequence for C530043G21Rik (NM_145413.2,1406-1424).
gactgaattatctaaagaa

SEQ ID NO: 756248 - DNA, 19 bp, Mus musculus
  siRNA target sequence for C530043G21Rik (NM_145413.2,1422-1440).
gaatggagtactaaagtct

SEQ ID NO: 756249 - DNA, 19 bp, Mus musculus
  siRNA target sequence for 9830109N13Rik (NM_145414.1,236-254).
ccaaggtgctagtgtatga

SEQ ID NO: 756250 - DNA, 19 bp, Mus musculus
  siRNA target sequence for 9830109N13Rik (NM_145414.1,240-258).
ggtgctagtgtatgaatta

SEQ ID NO: 756251 - DNA, 19 bp, Mus musculus
  siRNA target sequence for 9830109N13Rik (NM_145414.1,462-480).
ccctgaggatgcaatcgat

SEQ ID NO: 756252 - DNA, 19 bp, Mus musculus
  siRNA target sequence for 9830109N13Rik (NM_145414.1,463-481).
cctgaggatgcaatcgatt

SEQ ID NO: 756253 - DNA, 19 bp, Mus musculus
  siRNA target sequence for 9830109N13Rik (NM_145414.1,464-482).
ctgaggatgcaatcgatta

SEQ ID NO: 756254 - DNA, 19 bp, Mus musculus
  siRNA target sequence for 9830109N13Rik (NM_145414.1,466-484).
gaggatgcaatcgattatt

SEQ ID NO: 756255 - DNA, 19 bp, Mus musculus
  siRNA target sequence for 9830109N13Rik (NM_145414.1,472-490).
gcaatcgattatttcaaga

SEQ ID NO: 756256 - DNA, 19 bp, Mus musculus
  siRNA target sequence for 9830109N13Rik (NM_145414.1,542-560).
ctctcaaggggcagcattt

SEQ ID NO: 756257 - DNA, 19 bp, Mus musculus
  siRNA target sequence for 9830109N13Rik (NM_145414.1,577-595).
ctgcctgagcttcttgtat

SEQ ID NO: 756258 - DNA, 19 bp, Mus musculus
  siRNA target sequence for 9830109N13Rik (NM_145414.1,579-597).
gcctgagcttcttgtattt

SEQ ID NO: 756259 - DNA, 19 bp, Mus musculus
  siRNA target sequence for 9830109N13Rik (NM_145414.1,699-717).
gccaggctcccatgtcatt

SEQ ID NO: 756260 - DNA, 19 bp, Mus musculus
  siRNA target sequence for 9830109N13Rik (NM_145414.1,771-789).
gaaccaggggaagatcttt

SEQ ID NO: 756261 - DNA, 19 bp, Mus musculus
  siRNA target sequence for 9830109N13Rik (NM_145414.1,933-951).
gctggatccttcttgtagt

SEQ ID NO: 756262 - DNA, 19 bp, Mus musculus
  siRNA target sequence for 9830109N13Rik (NM_145414.1,1073-1091).
ctctgcagcgcctagtcta

SEQ ID NO: 756263 - DNA, 19 bp, Mus musculus
  siRNA target sequence for 9830109N13Rik (NM_145414.1,1150-1168).
cacaactcggggacattca

SEQ ID NO: 756264 - DNA, 19 bp, Mus musculus
  siRNA target sequence for 9830109N13Rik (NM_145414.1,1200-1218).
ccgaggtctgagtaccttt

SEQ ID NO: 756265 - DNA, 19 bp, Mus musculus
  siRNA target sequence for AA408296 (NM_145415.1,203-221).
gaagccaagccgcagattt

SEQ ID NO: 756266 - DNA, 19 bp, Mus musculus
  siRNA target sequence for AA408296 (NM_145415.1,229-247).
gccagagagttcagattct

SEQ ID NO: 756267 - DNA, 19 bp, Mus musculus
  siRNA target sequence for AA408296 (NM_145415.1,301-319).
cagactgcttgctacatta

SEQ ID NO: 756268 - DNA, 19 bp, Mus musculus
  siRNA target sequence for AA408296 (NM_145415.1,474-492).
ctgagacacaggaacatat

SEQ ID NO: 756269 - DNA, 19 bp, Mus musculus
  siRNA target sequence for AA408296 (NM_145415.1,495-513).
ctctagctgacaactcaaa

SEQ ID NO: 756270 - DNA, 19 bp, Mus musculus
  siRNA target sequence for AA408296 (NM_145415.1,539-557).
ggtgtatcacagaaatcct

SEQ ID NO: 756271 - DNA, 19 bp, Mus musculus
  siRNA target sequence for AA408296 (NM_145415.1,592-610).
gttcagcctggaaactaat

SEQ ID NO: 756272 - DNA, 19 bp, Mus musculus
  siRNA target sequence for AA408296 (NM_145415.1,663-681).
cgtttcaacaacatgtcaa

SEQ ID NO: 756273 - DNA, 19 bp, Mus musculus
  siRNA target sequence for AA408296 (NM_145415.1,731-749).
gctacccagcaactgaaat

SEQ ID NO: 756274 - DNA, 19 bp, Mus musculus
  siRNA target sequence for AA408296 (NM_145415.1,753-771).
cagtcctgggacatcttgt

SEQ ID NO: 756275 - DNA, 19 bp, Mus musculus
  siRNA target sequence for AA408296 (NM_145415.1,842-860).
cttcagaagcctctagaat

SEQ ID NO: 756276 - DNA, 19 bp, Mus musculus
  siRNA target sequence for AA408296 (NM_145415.1,862-880).
cacctgggcaaaaaccaat

SEQ ID NO: 756277 - DNA, 19 bp, Mus musculus
  siRNA target sequence for AA408296 (NM_145415.1,877-895).
caatagccaatttctatct

SEQ ID NO: 756278 - DNA, 19 bp, Mus musculus
  siRNA target sequence for AA408296 (NM_145415.1,896-914).
ggacctcaaaaatcaaata

SEQ ID NO: 756279 - DNA, 19 bp, Mus musculus
  siRNA target sequence for AA408296 (NM_145415.1,932-950).
cagaaagagctgttcttaa

SEQ ID NO: 756280 - DNA, 19 bp, Mus musculus
  siRNA target sequence for AA408296 (NM_145415.1,960-978).
cttaccgggacctgttcta

SEQ ID NO: 756281 - DNA, 19 bp, Mus musculus
  siRNA target sequence for AA408296 (NM_145415.1,1010-1028).
gaagtccgccatgtatact

SEQ ID NO: 756282 - DNA, 19 bp, Mus musculus
  siRNA target sequence for AA408296 (NM_145415.1,1029-1047).
gcctgcatgccataaacca

SEQ ID NO: 756283 - DNA, 19 bp, Mus musculus
  siRNA target sequence for AA408296 (NM_145415.1,1030-1048).
cctgcatgccataaaccat

SEQ ID NO: 756284 - DNA, 19 bp, Mus musculus
  siRNA target sequence for AA408296 (NM_145415.1,1065-1083).
ctcaggtgctggctaacaa

SEQ ID NO: 756285 - DNA, 19 bp, Mus musculus
  siRNA target sequence for AA408296 (NM_145415.1,1070-1088).
gtgctggctaacaacagta

SEQ ID NO: 756286 - DNA, 19 bp, Mus musculus
  siRNA target sequence for AA408296 (NM_145415.1,1144-1162).
gctcaccaggcctaaggta

SEQ ID NO: 756287 - DNA, 19 bp, Mus musculus
  siRNA target sequence for AA408296 (NM_145415.1,1150-1168).
caggcctaaggtacttata

SEQ ID NO: 756288 - DNA, 19 bp, Mus musculus
  siRNA target sequence for AA408296 (NM_145415.1,1152-1170).
ggcctaaggtacttatagt

SEQ ID NO: 756289 - DNA, 19 bp, Mus musculus
  siRNA target sequence for AA408296 (NM_145415.1,1341-1359).
ctgtgttcgtgggcaatat

SEQ ID NO: 756290 - DNA, 19 bp, Mus musculus
  siRNA target sequence for AA408296 (NM_145415.1,1345-1363).
gttcgtgggcaatattgat

SEQ ID NO: 756291 - DNA, 19 bp, Mus musculus
  siRNA target sequence for AA408296 (NM_145415.1,1374-1392).
ggattggagtggcaatact

SEQ ID NO: 756292 - DNA, 19 bp, Mus musculus
  siRNA target sequence for AA408296 (NM_145415.1,1375-1393).
gattggagtggcaatactt

SEQ ID NO: 756293 - DNA, 19 bp, Mus musculus
  siRNA target sequence for AA408296 (NM_145415.1,1518-1536).
ccgttgagctgctcatcat

SEQ ID NO: 756294 - DNA, 19 bp, Mus musculus
  siRNA target sequence for AA408296 (NM_145415.1,1519-1537).
cgttgagctgctcatcatt

SEQ ID NO: 756295 - DNA, 19 bp, Mus musculus
  siRNA target sequence for AA408296 (NM_145415.1,1970-1988).
gtgcgtctccgaaattact

SEQ ID NO: 756296 - DNA, 19 bp, Mus musculus
  siRNA target sequence for AA408296 (NM_145415.1,1973-1991).
cgtctccgaaattacttca

SEQ ID NO: 756297 - DNA, 19 bp, Mus musculus
  siRNA target sequence for AA408296 (NM_145415.1,1974-1992).
gtctccgaaattacttcaa

SEQ ID NO: 756298 - DNA, 19 bp, Mus musculus
  siRNA target sequence for AA408296 (NM_145415.1,1976-1994).
ctccgaaattacttcaaga

SEQ ID NO: 756299 - DNA, 19 bp, Mus musculus
  siRNA target sequence for AA408296 (NM_145415.1,2049-2067).
ccagggctcgacacttctt

SEQ ID NO: 756300 - DNA, 19 bp, Mus musculus
  siRNA target sequence for AA408296 (NM_145415.1,2050-2068).
cagggctcgacacttcttt

SEQ ID NO: 756301 - DNA, 19 bp, Mus musculus
  siRNA target sequence for AA408296 (NM_145415.1,2096-2114).
ctcacagaacgcttccatt

SEQ ID NO: 756302 - DNA, 19 bp, Mus musculus
  siRNA target sequence for AA408296 (NM_145415.1,2102-2120).
gaacgcttccatttctaca

SEQ ID NO: 756303 - DNA, 19 bp, Mus musculus
  siRNA target sequence for AA408296 (NM_145415.1,2119-2137).
caaaaggtacacaataaaa

SEQ ID NO: 756304 - DNA, 19 bp, Mus musculus
  siRNA target sequence for AA408296 (NM_145415.1,2138-2156).
ggcatcaggaacctgatat

SEQ ID NO: 756305 - DNA, 19 bp, Mus musculus
  siRNA target sequence for AA408296 (NM_145415.1,2139-2157).
gcatcaggaacctgatatt

SEQ ID NO: 756306 - DNA, 19 bp, Mus musculus
  siRNA target sequence for AA408296 (NM_145415.1,2169-2187).
caacgtaccctcacttcta

SEQ ID NO: 756307 - DNA, 19 bp, Mus musculus
  siRNA target sequence for AA408296 (NM_145415.1,2247-2265).
gcaccgtgctgtattccaa

SEQ ID NO: 756308 - DNA, 19 bp, Mus musculus
  siRNA target sequence for AA408296 (NM_145415.1,2251-2269).
cgtgctgtattccaagtat

SEQ ID NO: 756309 - DNA, 19 bp, Mus musculus
  siRNA target sequence for AA408296 (NM_145415.1,2347-2365).
cttcgtcaccggagaaaaa

SEQ ID NO: 756310 - DNA, 19 bp, Mus musculus
  siRNA target sequence for BC021438 (NM_145416.1,454-472).
cacaggctccaggaaacat

SEQ ID NO: 756311 - DNA, 19 bp, Mus musculus
  siRNA target sequence for BC021438 (NM_145416.1,466-484).
gaaacatccacaaagagtt

SEQ ID NO: 756312 - DNA, 19 bp, Mus musculus
  siRNA target sequence for BC021438 (NM_145416.1,473-491).
ccacaaagagttatgtaga

SEQ ID NO: 756313 - DNA, 19 bp, Mus musculus
  siRNA target sequence for BC021438 (NM_145416.1,749-767).
gggattatatcctcaacaa

SEQ ID NO: 756314 - DNA, 19 bp, Mus musculus
  siRNA target sequence for BC021438 (NM_145416.1,750-768).
ggattatatcctcaacaaa

SEQ ID NO: 756315 - DNA, 19 bp, Mus musculus
  siRNA target sequence for BC021438 (NM_145416.1,857-875).
cagatgaaggggagctatt

SEQ ID NO: 756316 - DNA, 19 bp, Mus musculus
  siRNA target sequence for BC021438 (NM_145416.1,935-953).
cagcctcagtcaagacata

SEQ ID NO: 756317 - DNA, 19 bp, Mus musculus
  siRNA target sequence for BC021438 (NM_145416.1,1198-1216).
cagctcatgcagaaatgtt

SEQ ID NO: 756318 - DNA, 19 bp, Mus musculus
  siRNA target sequence for BC021438 (NM_145416.1,1200-1218).
gctcatgcagaaatgtttt

SEQ ID NO: 756319 - DNA, 19 bp, Mus musculus
  siRNA target sequence for BC021438 (NM_145416.1,1235-1253).
gtactgcggaggaagagaa

SEQ ID NO: 756320 - DNA, 19 bp, Mus musculus
  siRNA target sequence for BC021438 (NM_145416.1,1355-1373).
gtgaggaccctgactttaa

SEQ ID NO: 756321 - DNA, 19 bp, Mus musculus
  siRNA target sequence for BC021438 (NM_145416.1,1446-1464).
gcgcaagtctccatttgca

SEQ ID NO: 756322 - DNA, 19 bp, Mus musculus
  siRNA target sequence for BC021438 (NM_145416.1,1570-1588).
ctgccctgtcgtttcaagt

SEQ ID NO: 756323 - DNA, 19 bp, Mus musculus
  siRNA target sequence for BC021438 (NM_145416.1,1738-1756).
cagaaggcccagaacatgt

SEQ ID NO: 756324 - DNA, 19 bp, Mus musculus
  siRNA target sequence for BC021438 (NM_145416.1,1781-1799).
ctctgtgccaggaagagat

SEQ ID NO: 756325 - DNA, 19 bp, Mus musculus
  siRNA target sequence for BC021438 (NM_145416.1,1787-1805).
gccaggaagagatggaaat

SEQ ID NO: 756326 - DNA, 19 bp, Mus musculus
  siRNA target sequence for BC021438 (NM_145416.1,1836-1854).
caaggccagcccacaagta

SEQ ID NO: 756327 - DNA, 19 bp, Mus musculus
  siRNA target sequence for BC021438 (NM_145416.1,2011-2029).
cttggaggtcacaagttca

SEQ ID NO: 756328 - DNA, 19 bp, Mus musculus
  siRNA target sequence for Ube2d1 (NM_145420.1,122-140).
cggatccagaaagaattaa

SEQ ID NO: 756329 - DNA, 19 bp, Mus musculus
  siRNA target sequence for Ube2d1 (NM_145420.1,229-247).
ccctgacagcgcctatcaa

SEQ ID NO: 756330 - DNA, 19 bp, Mus musculus
  siRNA target sequence for Ube2d1 (NM_145420.1,271-289).
ccactttccgacagactat

SEQ ID NO: 756331 - DNA, 19 bp, Mus musculus
  siRNA target sequence for Ube2d1 (NM_145420.1,279-297).
cgacagactatccctttaa

SEQ ID NO: 756332 - DNA, 19 bp, Mus musculus
  siRNA target sequence for Ube2d1 (NM_145420.1,280-298).
gacagactatccctttaaa

SEQ ID NO: 756333 - DNA, 19 bp, Mus musculus
  siRNA target sequence for Ube2d1 (NM_145420.1,393-411).
ccgctttgactgtatcgaa

SEQ ID NO: 756334 - DNA, 19 bp, Mus musculus
  siRNA target sequence for Ube2d1 (NM_145420.1,394-412).
cgctttgactgtatcgaaa

SEQ ID NO: 756335 - DNA, 19 bp, Mus musculus
  siRNA target sequence for Ube2d1 (NM_145420.1,432-450).
cgctgctctgtgatcctaa

SEQ ID NO: 756336 - DNA, 19 bp, Mus musculus
  siRNA target sequence for Ube2d1 (NM_145420.1,433-451).
gctgctctgtgatcctaat

SEQ ID NO: 756337 - DNA, 19 bp, Mus musculus
  siRNA target sequence for Ube2d1 (NM_145420.1,436-454).
gctctgtgatcctaatcca

SEQ ID NO: 756338 - DNA, 19 bp, Mus musculus
  siRNA target sequence for Ube2d1 (NM_145420.1,463-481).
cttagtaccagatattgca

SEQ ID NO: 756339 - DNA, 19 bp, Mus musculus
  siRNA target sequence for Ube2d1 (NM_145420.1,511-529).
caacaggcacgcaagagaa

SEQ ID NO: 756340 - DNA, 19 bp, Mus musculus
  siRNA target sequence for AV249152 (NM_145425.2,187-205).
cggcgtctaccagtactat

SEQ ID NO: 756341 - DNA, 19 bp, Mus musculus
  siRNA target sequence for AV249152 (NM_145425.2,189-207).
gcgtctaccagtactatga

SEQ ID NO: 756342 - DNA, 19 bp, Mus musculus
  siRNA target sequence for AV249152 (NM_145425.2,191-209).
gtctaccagtactatgaca

SEQ ID NO: 756343 - DNA, 19 bp, Mus musculus
  siRNA target sequence for AV249152 (NM_145425.2,208-226).
caagaaagatccatcagta

SEQ ID NO: 756344 - DNA, 19 bp, Mus musculus
  siRNA target sequence for AV249152 (NM_145425.2,228-246).
cagcaacagagcatggtaa

SEQ ID NO: 756345 - DNA, 19 bp, Mus musculus
  siRNA target sequence for AV249152 (NM_145425.2,231-249).
caacagagcatggtaactt

SEQ ID NO: 756346 - DNA, 19 bp, Mus musculus
  siRNA target sequence for AV249152 (NM_145425.2,238-256).
gcatggtaacttagaagaa

SEQ ID NO: 756347 - DNA, 19 bp, Mus musculus
  siRNA target sequence for AV249152 (NM_145425.2,268-286).
ggcagaatcacgagattat

SEQ ID NO: 756348 - DNA, 19 bp, Mus musculus
  siRNA target sequence for AV249152 (NM_145425.2,427-445).
gctggtgtccctaagtctt

SEQ ID NO: 756349 - DNA, 19 bp, Mus musculus
  siRNA target sequence for AV249152 (NM_145425.2,428-446).
ctggtgtccctaagtcttt

SEQ ID NO: 756350 - DNA, 19 bp, Mus musculus
  siRNA target sequence for AV249152 (NM_145425.2,524-542).
ctccttacagacagtttca

SEQ ID NO: 756351 - DNA, 19 bp, Mus musculus
  siRNA target sequence for AV249152 (NM_145425.2,533-551).
gacagtttcatcatcttat

SEQ ID NO: 756352 - DNA, 19 bp, Mus musculus
  siRNA target sequence for AV249152 (NM_145425.2,535-553).
cagtttcatcatcttatca

SEQ ID NO: 756353 - DNA, 19 bp, Mus musculus
  siRNA target sequence for AV249152 (NM_145425.2,557-575).
ctggcacaaaacaaactat

SEQ ID NO: 756354 - DNA, 19 bp, Mus musculus
  siRNA target sequence for AV249152 (NM_145425.2,559-577).
ggcacaaaacaaactatgt

SEQ ID NO: 756355 - DNA, 19 bp, Mus musculus
  siRNA target sequence for AV249152 (NM_145425.2,560-578).
gcacaaaacaaactatgtt

SEQ ID NO: 756356 - DNA, 19 bp, Mus musculus
  siRNA target sequence for AV249152 (NM_145425.2,595-613).
gaaaatggattctcttgat

SEQ ID NO: 756357 - DNA, 19 bp, Mus musculus
  siRNA target sequence for AV249152 (NM_145425.2,647-665).
gaccttaagatttcctatt

SEQ ID NO: 756358 - DNA, 19 bp, Mus musculus
  siRNA target sequence for AV249152 (NM_145425.2,691-709).
gacaatagatcgtcactta

SEQ ID NO: 756359 - DNA, 19 bp, Mus musculus
  siRNA target sequence for AV249152 (NM_145425.2,720-738).
ccactcaggatctagttgt

SEQ ID NO: 756360 - DNA, 19 bp, Mus musculus
  siRNA target sequence for AV249152 (NM_145425.2,817-835).
gttgctgggctttactcaa

SEQ ID NO: 756361 - DNA, 19 bp, Mus musculus
  siRNA target sequence for AV249152 (NM_145425.2,839-857).
ggattggaggttctaagtt

SEQ ID NO: 756362 - DNA, 19 bp, Mus musculus
  siRNA target sequence for AV249152 (NM_145425.2,840-858).
gattggaggttctaagttt

SEQ ID NO: 756363 - DNA, 19 bp, Mus musculus
  siRNA target sequence for AV249152 (NM_145425.2,873-891).
ggagtcccctggatgttca

SEQ ID NO: 756364 - DNA, 19 bp, Mus musculus
  siRNA target sequence for AV249152 (NM_145425.2,876-894).
gtcccctggatgttcactt

SEQ ID NO: 756365 - DNA, 19 bp, Mus musculus
  siRNA target sequence for AV249152 (NM_145425.2,895-913).
cggcaccaaacaaccttat

SEQ ID NO: 756366 - DNA, 19 bp, Mus musculus
  siRNA target sequence for AV249152 (NM_145425.2,897-915).
gcaccaaacaaccttatca

SEQ ID NO: 756367 - DNA, 19 bp, Mus musculus
  siRNA target sequence for AV249152 (NM_145425.2,958-976).
catggctgacagctgtatt

SEQ ID NO: 756368 - DNA, 19 bp, Mus musculus
  siRNA target sequence for AV249152 (NM_145425.2,1006-1024).
cgtgtcagttaccagaata

SEQ ID NO: 756369 - DNA, 19 bp, Mus musculus
  siRNA target sequence for AV249152 (NM_145425.2,1009-1027).
gtcagttaccagaatacca

SEQ ID NO: 756370 - DNA, 19 bp, Mus musculus
  siRNA target sequence for AV249152 (NM_145425.2,1098-1116).
cttcagtaattctctatga

SEQ ID NO: 756371 - DNA, 19 bp, Mus musculus
  siRNA target sequence for AV249152 (NM_145425.2,1151-1169).
gaacttaggccttcattga

SEQ ID NO: 756372 - DNA, 19 bp, Mus musculus
  siRNA target sequence for AV249152 (NM_145425.2,1154-1172).
cttaggccttcattgataa

SEQ ID NO: 756373 - DNA, 19 bp, Mus musculus
  siRNA target sequence for AV249152 (NM_145425.2,1180-1198).
cccaagtggcgccattctt

SEQ ID NO: 756374 - DNA, 19 bp, Mus musculus
  siRNA target sequence for AV249152 (NM_145425.2,1182-1200).
caagtggcgccattcttct

SEQ ID NO: 756375 - DNA, 19 bp, Mus musculus
  siRNA target sequence for AV249152 (NM_145425.2,1213-1231).
ccaaggggagctacaaatt

SEQ ID NO: 756376 - DNA, 19 bp, Mus musculus
  siRNA target sequence for AV249152 (NM_145425.2,1214-1232).
caaggggagctacaaattt

SEQ ID NO: 756377 - DNA, 19 bp, Mus musculus
  siRNA target sequence for AV249152 (NM_145425.2,1220-1238).
gagctacaaatttttgata

SEQ ID NO: 756378 - DNA, 19 bp, Mus musculus
  siRNA target sequence for AV249152 (NM_145425.2,1265-1283).
ctcttggcagaagattact

SEQ ID NO: 756379 - DNA, 19 bp, Mus musculus
  siRNA target sequence for AV249152 (NM_145425.2,1296-1314).
ctctgcaattcaagaagtt

SEQ ID NO: 756380 - DNA, 19 bp, Mus musculus
  siRNA target sequence for AV249152 (NM_145425.2,1600-1618).
catcgtgaaccatcttctt

SEQ ID NO: 756381 - DNA, 19 bp, Mus musculus
  siRNA target sequence for AV249152 (NM_145425.2,1699-1717).
ggatacaactattttggaa

SEQ ID NO: 756382 - DNA, 19 bp, Mus musculus
  siRNA target sequence for AV249152 (NM_145425.2,1768-1786).
caggtacaagagatttgaa

SEQ ID NO: 756383 - DNA, 19 bp, Mus musculus
  siRNA target sequence for AV249152 (NM_145425.2,1815-1833).
gagctcgtgacctgttcat

SEQ ID NO: 756384 - DNA, 19 bp, Mus musculus
  siRNA target sequence for AV249152 (NM_145425.2,1831-1849).
catggacattcattacctt

SEQ ID NO: 756385 - DNA, 19 bp, Mus musculus
  siRNA target sequence for AV249152 (NM_145425.2,1841-1859).
cattaccttgctctagata

SEQ ID NO: 756386 - DNA, 19 bp, Mus musculus
  siRNA target sequence for AV249152 (NM_145425.2,1890-1908).
gaagaagggcgcatgatat

SEQ ID NO: 756387 - DNA, 19 bp, Mus musculus
  siRNA target sequence for AV249152 (NM_145425.2,1893-1911).
gaagggcgcatgatattga

SEQ ID NO: 756388 - DNA, 19 bp, Mus musculus
  siRNA target sequence for AV249152 (NM_145425.2,1896-1914).
gggcgcatgatattgatgt

SEQ ID NO: 756389 - DNA, 19 bp, Mus musculus
  siRNA target sequence for AV249152 (NM_145425.2,1897-1915).
ggcgcatgatattgatgtt

SEQ ID NO: 756390 - DNA, 19 bp, Mus musculus
  siRNA target sequence for AV249152 (NM_145425.2,1899-1917).
cgcatgatattgatgttga

SEQ ID NO: 756391 - DNA, 19 bp, Mus musculus
  siRNA target sequence for AV249152 (NM_145425.2,2253-2271).
ctctcagaatggttcactt

SEQ ID NO: 756392 - DNA, 19 bp, Mus musculus
  siRNA target sequence for 2700079M14Rik (NM_145426.1,279-297).
ccactgggagcgaatcaaa

SEQ ID NO: 756393 - DNA, 19 bp, Mus musculus
  siRNA target sequence for 2700079M14Rik (NM_145426.1,285-303).
ggagcgaatcaaagttctt

SEQ ID NO: 756394 - DNA, 19 bp, Mus musculus
  siRNA target sequence for 2700079M14Rik (NM_145426.1,286-304).
gagcgaatcaaagttctta

SEQ ID NO: 756395 - DNA, 19 bp, Mus musculus
  siRNA target sequence for 2700079M14Rik (NM_145426.1,288-306).
gcgaatcaaagttcttaca

SEQ ID NO: 756396 - DNA, 19 bp, Mus musculus
  siRNA target sequence for 2700079M14Rik (NM_145426.1,294-312).
caaagttcttacaatgcat

SEQ ID NO: 756397 - DNA, 19 bp, Mus musculus
  siRNA target sequence for 2700079M14Rik (NM_145426.1,298-316).
gttcttacaatgcatcatt

SEQ ID NO: 756398 - DNA, 19 bp, Mus musculus
  siRNA target sequence for 2700079M14Rik (NM_145426.1,301-319).
cttacaatgcatcatttct

SEQ ID NO: 756399 - DNA, 19 bp, Mus musculus
  siRNA target sequence for 2700079M14Rik (NM_145426.1,378-396).
gagggaacaaatgtttcat

SEQ ID NO: 756400 - DNA, 19 bp, Mus musculus
  siRNA target sequence for 2700079M14Rik (NM_145426.1,429-447).
gaagtccactggtacaact

SEQ ID NO: 756401 - DNA, 19 bp, Mus musculus
  siRNA target sequence for 2700079M14Rik (NM_145426.1,432-450).
gtccactggtacaactcaa

SEQ ID NO: 756402 - DNA, 19 bp, Mus musculus
  siRNA target sequence for 2700079M14Rik (NM_145426.1,434-452).
ccactggtacaactcaaaa

SEQ ID NO: 756403 - DNA, 19 bp, Mus musculus
  siRNA target sequence for 2700079M14Rik (NM_145426.1,437-455).
ctggtacaactcaaaagga

SEQ ID NO: 756404 - DNA, 19 bp, Mus musculus
  siRNA target sequence for 2700079M14Rik (NM_145426.1,469-487).
gcagaggtggaaaatggtt

SEQ ID NO: 756405 - DNA, 19 bp, Mus musculus
  siRNA target sequence for 2700079M14Rik (NM_145426.1,512-530).
caccagcgtagcctttgat

SEQ ID NO: 756406 - DNA, 19 bp, Mus musculus
  siRNA target sequence for 2700079M14Rik (NM_145426.1,514-532).
ccagcgtagcctttgatga

SEQ ID NO: 756407 - DNA, 19 bp, Mus musculus
  siRNA target sequence for 2700079M14Rik (NM_145426.1,531-549).
gaccgtgggctctatacat

SEQ ID NO: 756408 - DNA, 19 bp, Mus musculus
  siRNA target sequence for 2700079M14Rik (NM_145426.1,533-551).
ccgtgggctctatacatgt

SEQ ID NO: 756409 - DNA, 19 bp, Mus musculus
  siRNA target sequence for 2700079M14Rik (NM_145426.1,534-552).
cgtgggctctatacatgta

SEQ ID NO: 756410 - DNA, 19 bp, Mus musculus
  siRNA target sequence for 2700079M14Rik (NM_145426.1,537-555).
gggctctatacatgtatca

SEQ ID NO: 756411 - DNA, 19 bp, Mus musculus
  siRNA target sequence for 2700079M14Rik (NM_145426.1,540-558).
ctctatacatgtatcatca

SEQ ID NO: 756412 - DNA, 19 bp, Mus musculus
  siRNA target sequence for 2700079M14Rik (NM_145426.1,643-661).
gcctgatcgccttcacaat

SEQ ID NO: 756413 - DNA, 19 bp, Mus musculus
  siRNA target sequence for 2700079M14Rik (NM_145426.1,645-663).
ctgatcgccttcacaatca

SEQ ID NO: 756414 - DNA, 19 bp, Mus musculus
  siRNA target sequence for 2700079M14Rik (NM_145426.1,746-764).
gaccgagggggctgagaaa

SEQ ID NO: 756415 - DNA, 19 bp, Mus musculus
  siRNA target sequence for 2700079M14Rik (NM_145426.1,748-766).
ccgagggggctgagaaact

SEQ ID NO: 756416 - DNA, 19 bp, Mus musculus
  siRNA target sequence for 2700079M14Rik (NM_145426.1,857-875).
ggagtttgcccgatatatt

SEQ ID NO: 756417 - DNA, 19 bp, Mus musculus
  siRNA target sequence for 2700079M14Rik (NM_145426.1,1013-1031).
cgctcaaagtggcatctat

SEQ ID NO: 756418 - DNA, 19 bp, Mus musculus
  siRNA target sequence for 2700079M14Rik (NM_145426.1,1021-1039).
gtggcatctatgtgattaa

SEQ ID NO: 756419 - DNA, 19 bp, Mus musculus
  siRNA target sequence for 2700079M14Rik (NM_145426.1,1061-1079).
ctctcctggtggagattca

SEQ ID NO: 756420 - DNA, 19 bp, Mus musculus
  siRNA target sequence for 2700079M14Rik (NM_145426.1,1157-1175).
cattgggacagattctcaa

SEQ ID NO: 756421 - DNA, 19 bp, Mus musculus
  siRNA target sequence for Atpaf2 (NM_145427.1,239-257).
ctatgtcccgccaacagaa

SEQ ID NO: 756422 - DNA, 19 bp, Mus musculus
  siRNA target sequence for Atpaf2 (NM_145427.1,340-358).
ctccccaagccaagctttt

SEQ ID NO: 756423 - DNA, 19 bp, Mus musculus
  siRNA target sequence for Atpaf2 (NM_145427.1,411-429).
cagcaggataccatcaagt

SEQ ID NO: 756424 - DNA, 19 bp, Mus musculus
  siRNA target sequence for Atpaf2 (NM_145427.1,476-494).
cccaacccagcgaagtaaa

SEQ ID NO: 756425 - DNA, 19 bp, Mus musculus
  siRNA target sequence for Atpaf2 (NM_145427.1,478-496).
caacccagcgaagtaaaga

SEQ ID NO: 756426 - DNA, 19 bp, Mus musculus
  siRNA target sequence for Atpaf2 (NM_145427.1,509-527).
ggcagctgtgaagtttcta

SEQ ID NO: 756427 - DNA, 19 bp, Mus musculus
  siRNA target sequence for Atpaf2 (NM_145427.1,609-627).
gagtgggctgagaaaaggt

SEQ ID NO: 756428 - DNA, 19 bp, Mus musculus
  siRNA target sequence for Atpaf2 (NM_145427.1,643-661).
gctcctccaccagcataat

SEQ ID NO: 756429 - DNA, 19 bp, Mus musculus
  siRNA target sequence for Atpaf2 (NM_145427.1,750-768).
gtagtggcccagctcaaat

SEQ ID NO: 756430 - DNA, 19 bp, Mus musculus
  siRNA target sequence for BC017647 (NM_145430.1,393-411).
gaattggacgcgtatgcta

SEQ ID NO: 756431 - DNA, 19 bp, Mus musculus
  siRNA target sequence for BC017647 (NM_145430.1,409-427).
ctaagaaggtcgcaaacaa

SEQ ID NO: 756432 - DNA, 19 bp, Mus musculus
  siRNA target sequence for BC017647 (NM_145430.1,429-447).
ccactgactataaaaatct

SEQ ID NO: 756433 - DNA, 19 bp, Mus musculus
  siRNA target sequence for BC017647 (NM_145430.1,430-448).
cactgactataaaaatctt

SEQ ID NO: 756434 - DNA, 19 bp, Mus musculus
  siRNA target sequence for BC017647 (NM_145430.1,657-675).
ccagtggcaccctatgcta

SEQ ID NO: 756435 - DNA, 19 bp, Mus musculus
  siRNA target sequence for BC017647 (NM_145430.1,972-990).
gatgcacccccgaatgtga

SEQ ID NO: 756436 - DNA, 19 bp, Mus musculus
  siRNA target sequence for BC017647 (NM_145430.1,1003-1021).
caactatccccctttcaat

SEQ ID NO: 756437 - DNA, 19 bp, Mus musculus
  siRNA target sequence for BC017647 (NM_145430.1,1063-1081).
gcattgtgcaccagatcaa

SEQ ID NO: 756438 - DNA, 19 bp, Mus musculus
  siRNA target sequence for BC017647 (NM_145430.1,1159-1177).
gtcgcagtctgctcatcaa

SEQ ID NO: 756439 - DNA, 19 bp, Mus musculus
  siRNA target sequence for BC017647 (NM_145430.1,1422-1440).
ggcctgacaggcaaacata

SEQ ID NO: 756440 - DNA, 19 bp, Mus musculus
  siRNA target sequence for BC017647 (NM_145430.1,1454-1472).
gttggcagggcctggtttt

SEQ ID NO: 756441 - DNA, 19 bp, Mus musculus
  siRNA target sequence for BC017647 (NM_145430.1,1618-1636).
ccctgtggaacaacattct

SEQ ID NO: 756442 - DNA, 19 bp, Mus musculus
  siRNA target sequence for BC017647 (NM_145430.1,1619-1637).
cctgtggaacaacattcta

SEQ ID NO: 756443 - DNA, 19 bp, Mus musculus
  siRNA target sequence for BC017647 (NM_145430.1,1663-1681).
ggtctcaagacctaaccat

SEQ ID NO: 756444 - DNA, 19 bp, Mus musculus
  siRNA target sequence for BC017647 (NM_145430.1,1673-1691).
cctaaccatgccattccat

SEQ ID NO: 756445 - DNA, 19 bp, Mus musculus
  siRNA target sequence for BC017647 (NM_145430.1,1896-1914).
gcccctgatcccacagata

SEQ ID NO: 756446 - DNA, 19 bp, Mus musculus
  siRNA target sequence for BC017647 (NM_145430.1,1907-1925).
cacagatagtcgaagtctt

SEQ ID NO: 756447 - DNA, 19 bp, Mus musculus
  siRNA target sequence for BC017647 (NM_145430.1,1911-1929).
gatagtcgaagtcttcata

SEQ ID NO: 756448 - DNA, 19 bp, Mus musculus
  siRNA target sequence for BC017647 (NM_145430.1,1915-1933).
gtcgaagtcttcatattca

SEQ ID NO: 756449 - DNA, 19 bp, Mus musculus
  siRNA target sequence for 4732429D16Rik (NM_145437.1,249-267).
ctcagagatcatgtgatat

SEQ ID NO: 756450 - DNA, 19 bp, Mus musculus
  siRNA target sequence for 4732429D16Rik (NM_145437.1,452-470).
gaccaagccccaaaaagtt

SEQ ID NO: 756451 - DNA, 19 bp, Mus musculus
  siRNA target sequence for 4732429D16Rik (NM_145437.1,454-472).
ccaagccccaaaaagttca

SEQ ID NO: 756452 - DNA, 19 bp, Mus musculus
  siRNA target sequence for 4732429D16Rik (NM_145437.1,455-473).
caagccccaaaaagttcaa

SEQ ID NO: 756453 - DNA, 19 bp, Mus musculus
  siRNA target sequence for 4732429D16Rik (NM_145437.1,458-476).
gccccaaaaagttcaatga

SEQ ID NO: 756454 - DNA, 19 bp, Mus musculus
  siRNA target sequence for Llglh2 (NM_145438.1,145-163).
ggctgaagcgggatctgtt

SEQ ID NO: 756455 - DNA, 19 bp, Mus musculus
  siRNA target sequence for Llglh2 (NM_145438.1,154-172).
gggatctgttccagtttaa

SEQ ID NO: 756456 - DNA, 19 bp, Mus musculus
  siRNA target sequence for Llglh2 (NM_145438.1,259-277).
ctggagctgtcaagctata

SEQ ID NO: 756457 - DNA, 19 bp, Mus musculus
  siRNA target sequence for Llglh2 (NM_145438.1,488-506).
cacgcaggtcactgagatt

SEQ ID NO: 756458 - DNA, 19 bp, Mus musculus
  siRNA target sequence for Llglh2 (NM_145438.1,594-612).
cacgacaggaccatctgtt

SEQ ID NO: 756459 - DNA, 19 bp, Mus musculus
  siRNA target sequence for Llglh2 (NM_145438.1,649-667).
gccaccggcgagtgtttga

SEQ ID NO: 756460 - DNA, 19 bp, Mus musculus
  siRNA target sequence for Llglh2 (NM_145438.1,651-669).
caccggcgagtgtttgaga

SEQ ID NO: 756461 - DNA, 19 bp, Mus musculus
  siRNA target sequence for Llglh2 (NM_145438.1,694-712).
ctcgagaccccaaccaaat

SEQ ID NO: 756462 - DNA, 19 bp, Mus musculus
  siRNA target sequence for Llglh2 (NM_145438.1,763-781).
gccgagcgctcagtcattt

SEQ ID NO: 756463 - DNA, 19 bp, Mus musculus
  siRNA target sequence for Llglh2 (NM_145438.1,822-840).
gatggctgcctgattgtca

SEQ ID NO: 756464 - DNA, 19 bp, Mus musculus
  siRNA target sequence for Llglh2 (NM_145438.1,906-924).
ctgcgcagctctatacctt

SEQ ID NO: 756465 - DNA, 19 bp, Mus musculus
  siRNA target sequence for Llglh2 (NM_145438.1,921-939).
ccttacggtccctttcctt

SEQ ID NO: 756466 - DNA, 19 bp, Mus musculus
  siRNA target sequence for Llglh2 (NM_145438.1,926-944).
cggtccctttccttgcaaa

SEQ ID NO: 756467 - DNA, 19 bp, Mus musculus
  siRNA target sequence for Llglh2 (NM_145438.1,936-954).
ccttgcaaagctataacga

SEQ ID NO: 756468 - DNA, 19 bp, Mus musculus
  siRNA target sequence for Llglh2 (NM_145438.1,937-955).
cttgcaaagctataacgaa

SEQ ID NO: 756469 - DNA, 19 bp, Mus musculus
  siRNA target sequence for Llglh2 (NM_145438.1,940-958).
gcaaagctataacgaaaat

SEQ ID NO: 756470 - DNA, 19 bp, Mus musculus
  siRNA target sequence for Llglh2 (NM_145438.1,1129-1147).
ctgcggctgcctttgatga

SEQ ID NO: 756471 - DNA, 19 bp, Mus musculus
  siRNA target sequence for Llglh2 (NM_145438.1,1175-1193).
ggaggaactggtagtcatt

SEQ ID NO: 756472 - DNA, 19 bp, Mus musculus
  siRNA target sequence for Llglh2 (NM_145438.1,1352-1370).
catggagtggcccatagat

SEQ ID NO: 756473 - DNA, 19 bp, Mus musculus
  siRNA target sequence for Llglh2 (NM_145438.1,1816-1834).
gctttgaggcgggatttca

SEQ ID NO: 756474 - DNA, 19 bp, Mus musculus
  siRNA target sequence for Llglh2 (NM_145438.1,1826-1844).
gggatttcagccctttgta

SEQ ID NO: 756475 - DNA, 19 bp, Mus musculus
  siRNA target sequence for Llglh2 (NM_145438.1,2161-2179).
ggacgggcctgcagaacat

SEQ ID NO: 756476 - DNA, 19 bp, Mus musculus
  siRNA target sequence for Llglh2 (NM_145438.1,2191-2209).
ccgtgcaacggaagattga

SEQ ID NO: 756477 - DNA, 19 bp, Mus musculus
  siRNA target sequence for Llglh2 (NM_145438.1,2787-2805).
gacgtcagcggcatagctt

SEQ ID NO: 756478 - DNA, 19 bp, Mus musculus
  siRNA target sequence for Llglh2 (NM_145438.1,2855-2873).
ggagttcgagcgcttttct

SEQ ID NO: 756479 - DNA, 19 bp, Mus musculus
  siRNA target sequence for Llglh2 (NM_145438.1,2901-2919).
cggtgtttggtggattcaa

SEQ ID NO: 756480 - DNA, 19 bp, Mus musculus
  siRNA target sequence for Llglh2 (NM_145438.1,3068-3086).
cgcctgggtcctaaaggaa

SEQ ID NO: 756481 - DNA, 19 bp, Mus musculus
  siRNA target sequence for 6330407P03Rik (NM_145441.2,198-216).
gataatcttgacagtataa

SEQ ID NO: 756482 - DNA, 19 bp, Mus musculus
  siRNA target sequence for Mbip (NM_145442.1,87-105).
gctgctgcggagcttagtt

SEQ ID NO: 756483 - DNA, 19 bp, Mus musculus
  siRNA target sequence for Mbip (NM_145442.1,220-238).
gagatgatgtggtgaaaat

SEQ ID NO: 756484 - DNA, 19 bp, Mus musculus
  siRNA target sequence for Mbip (NM_145442.1,230-248).
ggtgaaaattacaatcgat

SEQ ID NO: 756485 - DNA, 19 bp, Mus musculus
  siRNA target sequence for Mbip (NM_145442.1,293-311).
ccttactgcacttgaacaa

SEQ ID NO: 756486 - DNA, 19 bp, Mus musculus
  siRNA target sequence for Mbip (NM_145442.1,301-319).
cacttgaacaacacgtttt

SEQ ID NO: 756487 - DNA, 19 bp, Mus musculus
  siRNA target sequence for Mbip (NM_145442.1,303-321).
cttgaacaacacgttttgt

SEQ ID NO: 756488 - DNA, 19 bp, Mus musculus
  siRNA target sequence for Mbip (NM_145442.1,306-324).
gaacaacacgttttgtatt

SEQ ID NO: 756489 - DNA, 19 bp, Mus musculus
  siRNA target sequence for Mbip (NM_145442.1,340-358).
caaaacttcagtctttaat

SEQ ID NO: 756490 - DNA, 19 bp, Mus musculus
  siRNA target sequence for Mbip (NM_145442.1,368-386).
ctcaacagctacagagata

SEQ ID NO: 756491 - DNA, 19 bp, Mus musculus
  siRNA target sequence for Mbip (NM_145442.1,402-420).
gagaccaagagtgaactaa

SEQ ID NO: 756492 - DNA, 19 bp, Mus musculus
  siRNA target sequence for Mbip (NM_145442.1,503-521).
cctttttgacccagaagta

SEQ ID NO: 756493 - DNA, 19 bp, Mus musculus
  siRNA target sequence for Mbip (NM_145442.1,527-545).
gatcaaggctggaaaagca

SEQ ID NO: 756494 - DNA, 19 bp, Mus musculus
  siRNA target sequence for Mbip (NM_145442.1,554-572).
cagacgaatatctgcattt

SEQ ID NO: 756495 - DNA, 19 bp, Mus musculus
  siRNA target sequence for Mbip (NM_145442.1,556-574).
gacgaatatctgcatttat

SEQ ID NO: 756496 - DNA, 19 bp, Mus musculus
  siRNA target sequence for Mbip (NM_145442.1,559-577).
gaatatctgcatttattga

SEQ ID NO: 756497 - DNA, 19 bp, Mus musculus
  siRNA target sequence for Mbip (NM_145442.1,568-586).
catttattgagagaaaaca

SEQ ID NO: 756498 - DNA, 19 bp, Mus musculus
  siRNA target sequence for Mbip (NM_145442.1,611-629).
cagggaattttgcaatgtt

SEQ ID NO: 756499 - DNA, 19 bp, Mus musculus
  siRNA target sequence for Mbip (NM_145442.1,622-640).
gcaatgttattgattgtaa

SEQ ID NO: 756500 - DNA, 19 bp, Mus musculus
  siRNA target sequence for Mbip (NM_145442.1,710-728).
ggtttctagagttgtgaat

SEQ ID NO: 756501 - DNA, 19 bp, Mus musculus
  siRNA target sequence for Mbip (NM_145442.1,711-729).
gtttctagagttgtgaata

SEQ ID NO: 756502 - DNA, 19 bp, Mus musculus
  siRNA target sequence for Mbip (NM_145442.1,715-733).
ctagagttgtgaatacata

SEQ ID NO: 756503 - DNA, 19 bp, Mus musculus
  siRNA target sequence for Mbip (NM_145442.1,743-761).
gactagacctgaaggaatt

SEQ ID NO: 756504 - DNA, 19 bp, Mus musculus
  siRNA target sequence for Mbip (NM_145442.1,791-809).
gcttcgagattgtggtaat

SEQ ID NO: 756505 - DNA, 19 bp, Mus musculus
  siRNA target sequence for Mbip (NM_145442.1,805-823).
gtaatcaggcggtagaaga

SEQ ID NO: 756506 - DNA, 19 bp, Mus musculus
  siRNA target sequence for Mbip (NM_145442.1,819-837).
gaagaacgactccagaata

SEQ ID NO: 756507 - DNA, 19 bp, Mus musculus
  siRNA target sequence for Mbip (NM_145442.1,871-889).
cagtaccaagagacatcta

SEQ ID NO: 756508 - DNA, 19 bp, Mus musculus
  siRNA target sequence for Mbip (NM_145442.1,909-927).
gaagataaaatccttgaat

SEQ ID NO: 756509 - DNA, 19 bp, Mus musculus
  siRNA target sequence for Mbip (NM_145442.1,945-963).
gaatacttccaatctgtaa

SEQ ID NO: 756510 - DNA, 19 bp, Mus musculus
  siRNA target sequence for Mbip (NM_145442.1,997-1015).
ctcaacagaactattcact

SEQ ID NO: 756511 - DNA, 19 bp, Mus musculus
  siRNA target sequence for BC016076 (NM_145444.1,723-741).
gatgacctccctaaggtta

SEQ ID NO: 756512 - DNA, 19 bp, Mus musculus
  siRNA target sequence for BC016076 (NM_145444.1,729-747).
ctccctaaggttatagaca

SEQ ID NO: 756513 - DNA, 19 bp, Mus musculus
  siRNA target sequence for BC016076 (NM_145444.1,749-767).
ccttcatctggagtacttt

SEQ ID NO: 756514 - DNA, 19 bp, Mus musculus
  siRNA target sequence for BC016076 (NM_145444.1,910-928).
gcgccacggtcaacgttat

SEQ ID NO: 756515 - DNA, 19 bp, Mus musculus
  siRNA target sequence for BC016076 (NM_145444.1,911-929).
cgccacggtcaacgttatt

SEQ ID NO: 756516 - DNA, 19 bp, Mus musculus
  siRNA target sequence for BC016076 (NM_145444.1,912-930).
gccacggtcaacgttattt

SEQ ID NO: 756517 - DNA, 19 bp, Mus musculus
  siRNA target sequence for BC016076 (NM_145444.1,914-932).
cacggtcaacgttatttca

SEQ ID NO: 756518 - DNA, 19 bp, Mus musculus
  siRNA target sequence for BC016076 (NM_145444.1,917-935).
ggtcaacgttatttcaaca

SEQ ID NO: 756519 - DNA, 19 bp, Mus musculus
  siRNA target sequence for BC016076 (NM_145444.1,918-936).
gtcaacgttatttcaacat

SEQ ID NO: 756520 - DNA, 19 bp, Mus musculus
  siRNA target sequence for BC016076 (NM_145444.1,920-938).
caacgttatttcaacatta

SEQ ID NO: 756521 - DNA, 19 bp, Mus musculus
  siRNA target sequence for BC011209 (NM_145447.1,571-589).
cggtttgacccatcatagt

SEQ ID NO: 756522 - DNA, 19 bp, Mus musculus
  siRNA target sequence for BC011209 (NM_145447.1,572-590).
ggtttgacccatcatagta

SEQ ID NO: 756523 - DNA, 19 bp, Mus musculus
  siRNA target sequence for BC011209 (NM_145447.1,699-717).
gctccatcaataacatctt

SEQ ID NO: 756524 - DNA, 19 bp, Mus musculus
  siRNA target sequence for BC011209 (NM_145447.1,806-824).
gcctggatgctggagaaat

SEQ ID NO: 756525 - DNA, 19 bp, Mus musculus
  siRNA target sequence for BC011209 (NM_145447.1,1045-1063).
caatcagcttggaattgca

SEQ ID NO: 756526 - DNA, 19 bp, Mus musculus
  siRNA target sequence for BC011209 (NM_145447.1,1056-1074).
gaattgcaattgggttttt

SEQ ID NO: 756527 - DNA, 19 bp, Mus musculus
  siRNA target sequence for BC011209 (NM_145447.1,1085-1103).
gttctggtacccaacatca

SEQ ID NO: 756528 - DNA, 19 bp, Mus musculus
  siRNA target sequence for BC011209 (NM_145447.1,1138-1156).
catgttctacataatagga

SEQ ID NO: 756529 - DNA, 19 bp, Mus musculus
  siRNA target sequence for BC011209 (NM_145447.1,1281-1299).
ccattgtccgactcttcaa

SEQ ID NO: 756530 - DNA, 19 bp, Mus musculus
  siRNA target sequence for BC011209 (NM_145447.1,1282-1300).
cattgtccgactcttcaaa

SEQ ID NO: 756531 - DNA, 19 bp, Mus musculus
  siRNA target sequence for BC011209 (NM_145447.1,1441-1459).
cgtcattgcaggaatgttt

SEQ ID NO: 756532 - DNA, 19 bp, Mus musculus
  siRNA target sequence for BC011209 (NM_145447.1,1475-1493).
ggcatctggctggataaat

SEQ ID NO: 756533 - DNA, 19 bp, Mus musculus
  siRNA target sequence for BC011209 (NM_145447.1,1484-1502).
ctggataaatccaaaacct

SEQ ID NO: 756534 - DNA, 19 bp, Mus musculus
  siRNA target sequence for BC011209 (NM_145447.1,1510-1528).
gacaaccctggtagtgtat

SEQ ID NO: 756535 - DNA, 19 bp, Mus musculus
  siRNA target sequence for BC011209 (NM_145447.1,1512-1530).
caaccctggtagtgtatat

SEQ ID NO: 756536 - DNA, 19 bp, Mus musculus
  siRNA target sequence for BC011209 (NM_145447.1,1515-1533).
ccctggtagtgtatatcat

SEQ ID NO: 756537 - DNA, 19 bp, Mus musculus
  siRNA target sequence for BC011209 (NM_145447.1,1517-1535).
ctggtagtgtatatcatga

SEQ ID NO: 756538 - DNA, 19 bp, Mus musculus
  siRNA target sequence for BC011209 (NM_145447.1,1711-1729).
cgtgtcggcacaggtattt

SEQ ID NO: 756539 - DNA, 19 bp, Mus musculus
  siRNA target sequence for BC011209 (NM_145447.1,1721-1739).
caggtatttgggatcgttt

SEQ ID NO: 756540 - DNA, 19 bp, Mus musculus
  siRNA target sequence for BC011209 (NM_145447.1,1724-1742).
gtatttgggatcgttttca

SEQ ID NO: 756541 - DNA, 19 bp, Mus musculus
  siRNA target sequence for BC011209 (NM_145447.1,1747-1765).
ctctcaaggccagattatt

SEQ ID NO: 756542 - DNA, 19 bp, Mus musculus
  siRNA target sequence for BC011209 (NM_145447.1,1768-1786).
caaccatggaaccatgttt

SEQ ID NO: 756543 - DNA, 19 bp, Mus musculus
  siRNA target sequence for BC011209 (NM_145447.1,1826-1844).
gctctaacagctttcatta

SEQ ID NO: 756544 - DNA, 19 bp, Mus musculus
  siRNA target sequence for BC011209 (NM_145447.1,1857-1875).
ggagacagagggcaaacaa

SEQ ID NO: 756545 - DNA, 19 bp, Mus musculus
  siRNA target sequence for BC011209 (NM_145447.1,1913-1931).
gaggaggaggggagcaata

SEQ ID NO: 756546 - DNA, 19 bp, Mus musculus
  siRNA target sequence for 1810023F06Rik (NM_145449.1,279-297).
ccacaataaccaacatcat

SEQ ID NO: 756547 - DNA, 19 bp, Mus musculus
  siRNA target sequence for 1810023F06Rik (NM_145449.1,654-672).
ccacatcaaccaatatcat

SEQ ID NO: 756548 - DNA, 19 bp, Mus musculus
  siRNA target sequence for BC022687 (NM_145450.2,504-522).
gacagagtggtgatggttt

SEQ ID NO: 756549 - DNA, 19 bp, Mus musculus
  siRNA target sequence for BC022687 (NM_145450.2,508-526).
gagtggtgatggtttggaa

SEQ ID NO: 756550 - DNA, 19 bp, Mus musculus
  siRNA target sequence for BC022687 (NM_145450.2,677-695).
gctaagtcggagcagtttt

SEQ ID NO: 756551 - DNA, 19 bp, Mus musculus
  siRNA target sequence for BC022687 (NM_145450.2,758-776).
cccgaagagggcagttctt

SEQ ID NO: 756552 - DNA, 19 bp, Mus musculus
  siRNA target sequence for BC022687 (NM_145450.2,1035-1053).
gtctctggggcgaatctca

SEQ ID NO: 756553 - DNA, 19 bp, Mus musculus
  siRNA target sequence for BC022687 (NM_145450.2,1306-1324).
catcaccattccacaaaaa

SEQ ID NO: 756554 - DNA, 19 bp, Mus musculus
  siRNA target sequence for BC022687 (NM_145450.2,1335-1353).
ctccacgcaacctgaaaat

SEQ ID NO: 756555 - DNA, 19 bp, Mus musculus
  siRNA target sequence for BC022687 (NM_145450.2,1354-1372).
ggcattctttaataatgat

SEQ ID NO: 756556 - DNA, 19 bp, Mus musculus
  siRNA target sequence for Zfp503 (NM_145459.2,512-530).
cagcgcgctttctggaaat

SEQ ID NO: 756557 - DNA, 19 bp, Mus musculus
  siRNA target sequence for Zfp503 (NM_145459.2,516-534).
gcgctttctggaaattgct

SEQ ID NO: 756558 - DNA, 19 bp, Mus musculus
  siRNA target sequence for Zfp503 (NM_145459.2,752-770).
ggcgctgctggctcaaaca

SEQ ID NO: 756559 - DNA, 19 bp, Mus musculus
  siRNA target sequence for Zfp503 (NM_145459.2,753-771).
gcgctgctggctcaaacat

SEQ ID NO: 756560 - DNA, 19 bp, Mus musculus
  siRNA target sequence for Zfp503 (NM_145459.2,947-965).
ctccaaacccggttcagat

SEQ ID NO: 756561 - DNA, 19 bp, Mus musculus
  siRNA target sequence for Zfp503 (NM_145459.2,949-967).
ccaaacccggttcagataa

SEQ ID NO: 756562 - DNA, 19 bp, Mus musculus
  siRNA target sequence for Zfp503 (NM_145459.2,1760-1778).
cgcctcgtgcgctcatgat

SEQ ID NO: 756563 - DNA, 19 bp, Mus musculus
  siRNA target sequence for Zfp503 (NM_145459.2,1807-1825).
cgggatacccgctagtata

SEQ ID NO: 756564 - DNA, 19 bp, Mus musculus
  siRNA target sequence for Zfp503 (NM_145459.2,2217-2235).
cgctaccacccgtattcca

SEQ ID NO: 756565 - DNA, 19 bp, Mus musculus
  siRNA target sequence for Zfp503 (NM_145459.2,2218-2236).
gctaccacccgtattccaa

SEQ ID NO: 756566 - DNA, 19 bp, Mus musculus
  siRNA target sequence for Zfp503 (NM_145459.2,2278-2296).
ccgccaccggaccatacta

SEQ ID NO: 756567 - DNA, 19 bp, Mus musculus
  siRNA target sequence for Zfp503 (NM_145459.2,2280-2298).
gccaccggaccatactact

SEQ ID NO: 756568 - DNA, 19 bp, Mus musculus
  siRNA target sequence for 9430093H08Rik (NM_145462.1,268-286).
gacggaagaggatctcata

SEQ ID NO: 756569 - DNA, 19 bp, Mus musculus
  siRNA target sequence for 9430093H08Rik (NM_145462.1,325-343).
ccagcacgtggatgaaagt

SEQ ID NO: 756570 - DNA, 19 bp, Mus musculus
  siRNA target sequence for 9430093H08Rik (NM_145462.1,411-429).
catggctgaggtatgagat

SEQ ID NO: 756571 - DNA, 19 bp, Mus musculus
  siRNA target sequence for 9430093H08Rik (NM_145462.1,415-433).
gctgaggtatgagatctta

SEQ ID NO: 756572 - DNA, 19 bp, Mus musculus
  siRNA target sequence for 9430093H08Rik (NM_145462.1,451-469).
gctgctcgtggactactat

SEQ ID NO: 756573 - DNA, 19 bp, Mus musculus
  siRNA target sequence for 9430093H08Rik (NM_145462.1,475-493).
ggcccaagacacaaaccta

SEQ ID NO: 756574 - DNA, 19 bp, Mus musculus
  siRNA target sequence for 9430093H08Rik (NM_145462.1,476-494).
gcccaagacacaaacctaa

SEQ ID NO: 756575 - DNA, 19 bp, Mus musculus
  siRNA target sequence for 9430093H08Rik (NM_145462.1,490-508).
cctaacctccgaagacaaa

SEQ ID NO: 756576 - DNA, 19 bp, Mus musculus
  siRNA target sequence for 9430093H08Rik (NM_145462.1,491-509).
ctaacctccgaagacaaaa

SEQ ID NO: 756577 - DNA, 19 bp, Mus musculus
  siRNA target sequence for 9430093H08Rik (NM_145462.1,496-514).
ctccgaagacaaaaagttt

SEQ ID NO: 756578 - DNA, 19 bp, Mus musculus
  siRNA target sequence for 9430093H08Rik (NM_145462.1,498-516).
ccgaagacaaaaagtttca

SEQ ID NO: 756579 - DNA, 19 bp, Mus musculus
  siRNA target sequence for 9430093H08Rik (NM_145462.1,499-517).
cgaagacaaaaagtttcat

SEQ ID NO: 756580 - DNA, 19 bp, Mus musculus
  siRNA target sequence for 9430093H08Rik (NM_145462.1,646-664).
ggatttcgtgtggatgaaa

SEQ ID NO: 756581 - DNA, 19 bp, Mus musculus
  siRNA target sequence for 9430093H08Rik (NM_145462.1,728-746).
catgaccccagttcagata

SEQ ID NO: 756582 - DNA, 19 bp, Mus musculus
  siRNA target sequence for 9430093H08Rik (NM_145462.1,733-751).
ccccagttcagatactgat

SEQ ID NO: 756583 - DNA, 19 bp, Mus musculus
  siRNA target sequence for 9430093H08Rik (NM_145462.1,955-973).
cgagctagaccgcatcaat

SEQ ID NO: 756584 - DNA, 19 bp, Mus musculus
  siRNA target sequence for 9430093H08Rik (NM_145462.1,1037-1055).
gtcttgtctgacacttaca

SEQ ID NO: 756585 - DNA, 19 bp, Mus musculus
  siRNA target sequence for 9430059P22Rik (NM_145463.3,1392-1410).
ggaaccatgaacaatgtgt

SEQ ID NO: 756586 - DNA, 19 bp, Mus musculus
  siRNA target sequence for 9430059P22Rik (NM_145463.3,1393-1411).
gaaccatgaacaatgtgta

SEQ ID NO: 756587 - DNA, 19 bp, Mus musculus
  siRNA target sequence for 9430059P22Rik (NM_145463.3,1426-1444).
caaatttctcagtactcaa

SEQ ID NO: 756588 - DNA, 19 bp, Mus musculus
  siRNA target sequence for 9430059P22Rik (NM_145463.3,1484-1502).
gtacctgcatactccatat

SEQ ID NO: 756589 - DNA, 19 bp, Mus musculus
  siRNA target sequence for 9430059P22Rik (NM_145463.3,1487-1505).
cctgcatactccatatgta

SEQ ID NO: 756590 - DNA, 19 bp, Mus musculus
  siRNA target sequence for 9430059P22Rik (NM_145463.3,1596-1614).
ccctttgctcacactaaca

SEQ ID NO: 756591 - DNA, 19 bp, Mus musculus
  siRNA target sequence for 9330161F08Rik (NM_145469.1,237-255).
ccagaaatattctcatctt

SEQ ID NO: 756592 - DNA, 19 bp, Mus musculus
  siRNA target sequence for 9330161F08Rik (NM_145469.1,391-409).
ctggggtgcatgtcagtta

SEQ ID NO: 756593 - DNA, 19 bp, Mus musculus
  siRNA target sequence for 9330161F08Rik (NM_145469.1,393-411).
ggggtgcatgtcagttaca

SEQ ID NO: 756594 - DNA, 19 bp, Mus musculus
  siRNA target sequence for 9330161F08Rik (NM_145469.1,453-471).
gagagcctcggatttacta

SEQ ID NO: 756595 - DNA, 19 bp, Mus musculus
  siRNA target sequence for 9330161F08Rik (NM_145469.1,462-480).
ggatttactaggtatgaca

SEQ ID NO: 756596 - DNA, 19 bp, Mus musculus
  siRNA target sequence for 9330161F08Rik (NM_145469.1,534-552).
ggctatctcagcaagaaca

SEQ ID NO: 756597 - DNA, 19 bp, Mus musculus
  siRNA target sequence for 9330161F08Rik (NM_145469.1,544-562).
gcaagaacagtacagtatt

SEQ ID NO: 756598 - DNA, 19 bp, Mus musculus
  siRNA target sequence for 9330161F08Rik (NM_145469.1,545-563).
caagaacagtacagtatta

SEQ ID NO: 756599 - DNA, 19 bp, Mus musculus
  siRNA target sequence for 9330161F08Rik (NM_145469.1,551-569).
cagtacagtattactttgt

SEQ ID NO: 756600 - DNA, 19 bp, Mus musculus
  siRNA target sequence for 9330161F08Rik (NM_145469.1,575-593).
ggcaattcctggtctatgt

SEQ ID NO: 756601 - DNA, 19 bp, Mus musculus
  siRNA target sequence for 9330161F08Rik (NM_145469.1,577-595).
caattcctggtctatgtga

SEQ ID NO: 756602 - DNA, 19 bp, Mus musculus
  siRNA target sequence for 9330161F08Rik (NM_145469.1,728-746).
gcatgatcactctttctgt

SEQ ID NO: 756603 - DNA, 19 bp, Mus musculus
  siRNA target sequence for 9330161F08Rik (NM_145469.1,739-757).
ctttctgtgacgggtaaaa

SEQ ID NO: 756604 - DNA, 19 bp, Mus musculus
  siRNA target sequence for 9330161F08Rik (NM_145469.1,752-770).
gtaaaatgcagctaactta

SEQ ID NO: 756605 - DNA, 19 bp, Mus musculus
  siRNA target sequence for 9330161F08Rik (NM_145469.1,763-781).
ctaacttatgccatcttct

SEQ ID NO: 756606 - DNA, 19 bp, Mus musculus
  siRNA target sequence for 9330161F08Rik (NM_145469.1,946-964).
gctgcttttctcactgtat

SEQ ID NO: 756607 - DNA, 19 bp, Mus musculus
  siRNA target sequence for 9330161F08Rik (NM_145469.1,992-1010).
cattccttggagtattttt

SEQ ID NO: 756608 - DNA, 19 bp, Mus musculus
  siRNA target sequence for 9330161F08Rik (NM_145469.1,1138-1156).
gatggaggcgactcaacaa

SEQ ID NO: 756609 - DNA, 19 bp, Mus musculus
  siRNA target sequence for Cerk (NM_145475.2,648-666).
cgaagcacttgctggtatt

SEQ ID NO: 756610 - DNA, 19 bp, Mus musculus
  siRNA target sequence for Cerk (NM_145475.2,808-826).
caacacagacagctatgat

SEQ ID NO: 756611 - DNA, 19 bp, Mus musculus
  siRNA target sequence for Cerk (NM_145475.2,842-860).
ggtggggacggcatgttca

SEQ ID NO: 756612 - DNA, 19 bp, Mus musculus
  siRNA target sequence for Cerk (NM_145475.2,949-967).
cctcaggatcggcatcata

SEQ ID NO: 756613 - DNA, 19 bp, Mus musculus
  siRNA target sequence for Cerk (NM_145475.2,968-986).
cccgcagggtccacagatt

SEQ ID NO: 756614 - DNA, 19 bp, Mus musculus
  siRNA target sequence for Cerk (NM_145475.2,970-988).
cgcagggtccacagattgt

SEQ ID NO: 756615 - DNA, 19 bp, Mus musculus
  siRNA target sequence for Cerk (NM_145475.2,983-1001).
gattgtgtgtgttactcaa

SEQ ID NO: 756616 - DNA, 19 bp, Mus musculus
  siRNA target sequence for Cerk (NM_145475.2,1029-1047).
cggctttgcacatcattat

SEQ ID NO: 756617 - DNA, 19 bp, Mus musculus
  siRNA target sequence for Cerk (NM_145475.2,1074-1092).
cctctgtgcactaccataa

SEQ ID NO: 756618 - DNA, 19 bp, Mus musculus
  siRNA target sequence for Cerk (NM_145475.2,1130-1148).
ggtttctacggggacttaa

SEQ ID NO: 756619 - DNA, 19 bp, Mus musculus
  siRNA target sequence for Cerk (NM_145475.2,1177-1195).
gggcctcgtccggtatgat

SEQ ID NO: 756620 - DNA, 19 bp, Mus musculus
  siRNA target sequence for Cerk (NM_145475.2,1178-1196).
ggcctcgtccggtatgatt

SEQ ID NO: 756621 - DNA, 19 bp, Mus musculus
  siRNA target sequence for Cerk (NM_145475.2,1181-1199).
ctcgtccggtatgatttct

SEQ ID NO: 756622 - DNA, 19 bp, Mus musculus
  siRNA target sequence for Cerk (NM_145475.2,1183-1201).
cgtccggtatgatttctca

SEQ ID NO: 756623 - DNA, 19 bp, Mus musculus
  siRNA target sequence for Cerk (NM_145475.2,1202-1220).
gggttgaagacctttctct

SEQ ID NO: 756624 - DNA, 19 bp, Mus musculus
  siRNA target sequence for Cerk (NM_145475.2,1275-1293).
gatctccacgggacaataa

SEQ ID NO: 756625 - DNA, 19 bp, Mus musculus
  siRNA target sequence for BC021340 (NM_145481.1,173-191).
gaacaccctggttttggaa

SEQ ID NO: 756626 - DNA, 19 bp, Mus musculus
  siRNA target sequence for BC021340 (NM_145481.1,264-282).
ctaaaggaactgattacca

SEQ ID NO: 756627 - DNA, 19 bp, Mus musculus
  siRNA target sequence for BC021340 (NM_145481.1,398-416).
gaagaaaacttcgattcaa

SEQ ID NO: 756628 - DNA, 19 bp, Mus musculus
  siRNA target sequence for BC021340 (NM_145481.1,401-419).
gaaaacttcgattcaagtt

SEQ ID NO: 756629 - DNA, 19 bp, Mus musculus
  siRNA target sequence for BC021340 (NM_145481.1,410-428).
gattcaagtttcaggaatt

SEQ ID NO: 756630 - DNA, 19 bp, Mus musculus
  siRNA target sequence for BC021340 (NM_145481.1,414-432).
caagtttcaggaattagca

SEQ ID NO: 756631 - DNA, 19 bp, Mus musculus
  siRNA target sequence for BC021340 (NM_145481.1,437-455).
cgtgataaaagctagagat

SEQ ID NO: 756632 - DNA, 19 bp, Mus musculus
  siRNA target sequence for BC021340 (NM_145481.1,478-496).
gcattcgattggctaaaga

SEQ ID NO: 756633 - DNA, 19 bp, Mus musculus
  siRNA target sequence for BC021340 (NM_145481.1,479-497).
cattcgattggctaaagaa

SEQ ID NO: 756634 - DNA, 19 bp, Mus musculus
  siRNA target sequence for BC021340 (NM_145481.1,507-525).
caggcagactacatctcta

SEQ ID NO: 756635 - DNA, 19 bp, Mus musculus
  siRNA target sequence for BC021340 (NM_145481.1,533-551).
ggaatggcagtatattgat

SEQ ID NO: 756636 - DNA, 19 bp, Mus musculus
  siRNA target sequence for BC021340 (NM_145481.1,534-552).
gaatggcagtatattgata

SEQ ID NO: 756637 - DNA, 19 bp, Mus musculus
  siRNA target sequence for BC021340 (NM_145481.1,628-646).
cggttgtccaaattcacaa

SEQ ID NO: 756638 - DNA, 19 bp, Mus musculus
  siRNA target sequence for BC021340 (NM_145481.1,629-647).
ggttgtccaaattcacaat

SEQ ID NO: 756639 - DNA, 19 bp, Mus musculus
  siRNA target sequence for BC021340 (NM_145481.1,692-710).
ccaaggccagactttcact

SEQ ID NO: 756640 - DNA, 19 bp, Mus musculus
  siRNA target sequence for BC021340 (NM_145481.1,759-777).
gacatgaagcaggacaaat

SEQ ID NO: 756641 - DNA, 19 bp, Mus musculus
  siRNA target sequence for BC021340 (NM_145481.1,799-817).
ccagtgatcccgaatacaa

SEQ ID NO: 756642 - DNA, 19 bp, Mus musculus
  siRNA target sequence for BC021340 (NM_145481.1,802-820).
gtgatcccgaatacaacat

SEQ ID NO: 756643 - DNA, 19 bp, Mus musculus
  siRNA target sequence for BC021340 (NM_145481.1,904-922).
ggtatcaggcatacaaaaa

SEQ ID NO: 756644 - DNA, 19 bp, Mus musculus
  siRNA target sequence for BC021340 (NM_145481.1,938-956).
gaatggcaatgtaagaaat

SEQ ID NO: 756645 - DNA, 19 bp, Mus musculus
  siRNA target sequence for BC021340 (NM_145481.1,942-960).
ggcaatgtaagaaatgaga

SEQ ID NO: 756646 - DNA, 19 bp, Mus musculus
  siRNA target sequence for BC021340 (NM_145481.1,1055-1073).
cgggaaaggaacctatttt

SEQ ID NO: 756647 - DNA, 19 bp, Mus musculus
  siRNA target sequence for BC021340 (NM_145481.1,1121-1139).
caccaatgggagaaagtat

SEQ ID NO: 756648 - DNA, 19 bp, Mus musculus
  siRNA target sequence for BC021340 (NM_145481.1,1123-1141).
ccaatgggagaaagtatat

SEQ ID NO: 756649 - DNA, 19 bp, Mus musculus
  siRNA target sequence for BC021340 (NM_145481.1,1153-1171).
gggttctcactggaaacta

SEQ ID NO: 756650 - DNA, 19 bp, Mus musculus
  siRNA target sequence for BC021340 (NM_145481.1,1155-1173).
gttctcactggaaactaca

SEQ ID NO: 756651 - DNA, 19 bp, Mus musculus
  siRNA target sequence for BC021340 (NM_145481.1,1180-1198).
gaaacgcgtcactgattgt

SEQ ID NO: 756652 - DNA, 19 bp, Mus musculus
  siRNA target sequence for BC021340 (NM_145481.1,1204-1222).
cctcgagggaccctcaaaa

SEQ ID NO: 756653 - DNA, 19 bp, Mus musculus
  siRNA target sequence for BC021340 (NM_145481.1,1205-1223).
ctcgagggaccctcaaaat

SEQ ID NO: 756654 - DNA, 19 bp, Mus musculus
  siRNA target sequence for BC021340 (NM_145481.1,1243-1261).
ccgtcacagataatgataa

SEQ ID NO: 756655 - DNA, 19 bp, Mus musculus
  siRNA target sequence for BC021340 (NM_145481.1,1244-1262).
cgtcacagataatgataaa

SEQ ID NO: 756656 - DNA, 19 bp, Mus musculus
  siRNA target sequence for BC021340 (NM_145481.1,1295-1313).
ccaaacgtaccctgagtat

SEQ ID NO: 756657 - DNA, 19 bp, Mus musculus
  siRNA target sequence for ORF21 (NM_145482.1,494-512).
gagctacagatcagaattt

SEQ ID NO: 756658 - DNA, 19 bp, Mus musculus
  siRNA target sequence for ORF21 (NM_145482.1,662-680).
caccacggacactgtgatt

SEQ ID NO: 756659 - DNA, 19 bp, Mus musculus
  siRNA target sequence for ORF21 (NM_145482.1,781-799).
ggtccctctggaagtctta

SEQ ID NO: 756660 - DNA, 19 bp, Mus musculus
  siRNA target sequence for ORF21 (NM_145482.1,794-812).
gtcttacctggacatctta

SEQ ID NO: 756661 - DNA, 19 bp, Mus musculus
  siRNA target sequence for ORF21 (NM_145482.1,804-822).
gacatcttacccaagtcat

SEQ ID NO: 756662 - DNA, 19 bp, Mus musculus
  siRNA target sequence for ORF21 (NM_145482.1,1146-1164).
gcggcgtttaacgagaaaa

SEQ ID NO: 756663 - DNA, 19 bp, Mus musculus
  siRNA target sequence for ORF21 (NM_145482.1,1149-1167).
gcgtttaacgagaaaacca

SEQ ID NO: 756664 - DNA, 19 bp, Mus musculus
  siRNA target sequence for ORF21 (NM_145482.1,1166-1184).
caggtgctatgagattaga

SEQ ID NO: 756665 - DNA, 19 bp, Mus musculus
  siRNA target sequence for ORF21 (NM_145482.1,1309-1327).
cggcagacatgctggttaa

SEQ ID NO: 756666 - DNA, 19 bp, Mus musculus
  siRNA target sequence for ORF21 (NM_145482.1,1312-1330).
cagacatgctggttaagtt

SEQ ID NO: 756667 - DNA, 19 bp, Mus musculus
  siRNA target sequence for ORF21 (NM_145482.1,1376-1394).
gaaggatcatggctttaca

SEQ ID NO: 756668 - DNA, 19 bp, Mus musculus
  siRNA target sequence for ORF21 (NM_145482.1,1541-1559).
gggcgtggcccagaaaata

SEQ ID NO: 756669 - DNA, 19 bp, Mus musculus
  siRNA target sequence for ORF21 (NM_145482.1,1542-1560).
ggcgtggcccagaaaatat

SEQ ID NO: 756670 - DNA, 19 bp, Mus musculus
  siRNA target sequence for ORF21 (NM_145482.1,1667-1685).
gatggaagagcttaggatt

SEQ ID NO: 756671 - DNA, 19 bp, Mus musculus
  siRNA target sequence for LOC224598 (NM_145484.1,686-704).
gatgagacattttactcta

SEQ ID NO: 756672 - DNA, 19 bp, Mus musculus
  siRNA target sequence for LOC224598 (NM_145484.1,1033-1051).
ccaaaaatttagccttatt

SEQ ID NO: 756673 - DNA, 19 bp, Mus musculus
  siRNA target sequence for LOC224598 (NM_145484.1,1034-1052).
caaaaatttagccttatta

SEQ ID NO: 756674 - DNA, 19 bp, Mus musculus
  siRNA target sequence for LOC224598 (NM_145484.1,1819-1837).
gattcatgcaagagcaaaa

SEQ ID NO: 756675 - DNA, 19 bp, Mus musculus
  siRNA target sequence for LOC224833 (NM_145489.1,295-313).
gggaaccagggactttgat

SEQ ID NO: 756676 - DNA, 19 bp, Mus musculus
  siRNA target sequence for LOC224833 (NM_145489.1,326-344).
ggagacaatcggttcaaca

SEQ ID NO: 756677 - DNA, 19 bp, Mus musculus
  siRNA target sequence for LOC224833 (NM_145489.1,495-513).
gtaccagcacactagtgaa

SEQ ID NO: 756678 - DNA, 19 bp, Mus musculus
  siRNA target sequence for LOC224833 (NM_145489.1,565-583).
cgatctggactcatccatt

SEQ ID NO: 756679 - DNA, 19 bp, Mus musculus
  siRNA target sequence for LOC224833 (NM_145489.1,613-631).
gccaccccaggacatttca

SEQ ID NO: 756680 - DNA, 19 bp, Mus musculus
  siRNA target sequence for LOC224833 (NM_145489.1,703-721).
gggaggtcgcacaaggtat

SEQ ID NO: 756681 - DNA, 19 bp, Mus musculus
  siRNA target sequence for LOC224833 (NM_145489.1,704-722).
ggaggtcgcacaaggtatt

SEQ ID NO: 756682 - DNA, 19 bp, Mus musculus
  siRNA target sequence for LOC224833 (NM_145489.1,705-723).
gaggtcgcacaaggtatta

SEQ ID NO: 756683 - DNA, 19 bp, Mus musculus
  siRNA target sequence for LOC224833 (NM_145489.1,707-725).
ggtcgcacaaggtattata

SEQ ID NO: 756684 - DNA, 19 bp, Mus musculus
  siRNA target sequence for LOC224833 (NM_145489.1,710-728).
cgcacaaggtattataggt

SEQ ID NO: 756685 - DNA, 19 bp, Mus musculus
  siRNA target sequence for BC011426 (NM_145490.2,1466-1484).
gtaaaccctttgatcgtaa

SEQ ID NO: 756686 - DNA, 19 bp, Mus musculus
  siRNA target sequence for BC011426 (NM_145490.2,1471-1489).
ccctttgatcgtaaaaggt

SEQ ID NO: 756687 - DNA, 19 bp, Mus musculus
  siRNA target sequence for BC011426 (NM_145490.2,1472-1490).
cctttgatcgtaaaaggta

SEQ ID NO: 756688 - DNA, 19 bp, Mus musculus
  siRNA target sequence for BC011426 (NM_145490.2,1473-1491).
ctttgatcgtaaaaggtat

SEQ ID NO: 756689 - DNA, 19 bp, Mus musculus
  siRNA target sequence for Cplx4 (NM_145493.1,247-265).
ggatgactagagaggaata

SEQ ID NO: 756690 - DNA, 19 bp, Mus musculus
  siRNA target sequence for Cplx4 (NM_145493.1,256-274).
gagaggaatacgaggaata

SEQ ID NO: 756691 - DNA, 19 bp, Mus musculus
  siRNA target sequence for Cplx4 (NM_145493.1,312-330).
gccgcatttacgcagaaaa

SEQ ID NO: 756692 - DNA, 19 bp, Mus musculus
  siRNA target sequence for Cplx4 (NM_145493.1,313-331).
ccgcatttacgcagaaaaa

SEQ ID NO: 756693 - DNA, 19 bp, Mus musculus
  siRNA target sequence for Cplx4 (NM_145493.1,439-457).
cagaagatctccgaaagat

SEQ ID NO: 756694 - DNA, 19 bp, Mus musculus
  siRNA target sequence for Cplx4 (NM_145493.1,485-503).
ggagaaggattctatcctt

SEQ ID NO: 756695 - DNA, 19 bp, Mus musculus
  siRNA target sequence for BC016129 (NM_145500.2,249-267).
cgcaatgagcccttgaaga

SEQ ID NO: 756696 - DNA, 19 bp, Mus musculus
  siRNA target sequence for BC016129 (NM_145500.2,250-268).
gcaatgagcccttgaagaa

SEQ ID NO: 756697 - DNA, 19 bp, Mus musculus
  siRNA target sequence for BC016129 (NM_145500.2,469-487).
ctcatggaactctttgtga

SEQ ID NO: 756698 - DNA, 19 bp, Mus musculus
  siRNA target sequence for BC016129 (NM_145500.2,512-530).
ctatcaactgcccatctat

SEQ ID NO: 756699 - DNA, 19 bp, Mus musculus
  siRNA target sequence for BC016129 (NM_145500.2,604-622).
ctagtgtgcgccgtgaatt

SEQ ID NO: 756700 - DNA, 19 bp, Mus musculus
  siRNA target sequence for BC016129 (NM_145500.2,614-632).
ccgtgaattcccactgaaa

SEQ ID NO: 756701 - DNA, 19 bp, Mus musculus
  siRNA target sequence for BC016129 (NM_145500.2,616-634).
gtgaattcccactgaaagt

SEQ ID NO: 756702 - DNA, 19 bp, Mus musculus
  siRNA target sequence for BC016129 (NM_145500.2,816-834).
gtcatccaggtcatcatca

SEQ ID NO: 756703 - DNA, 19 bp, Mus musculus
  siRNA target sequence for Keo4 (NM_145502.2,257-275).
gacacttggccgtgtacta

SEQ ID NO: 756704 - DNA, 19 bp, Mus musculus
  siRNA target sequence for Keo4 (NM_145502.2,310-328).
ccaggctatcatatcatgt

SEQ ID NO: 756705 - DNA, 19 bp, Mus musculus
  siRNA target sequence for Keo4 (NM_145502.2,311-329).
caggctatcatatcatgtt

SEQ ID NO: 756706 - DNA, 19 bp, Mus musculus
  siRNA target sequence for Keo4 (NM_145502.2,365-383).
cactacaaacggatgaagt

SEQ ID NO: 756707 - DNA, 19 bp, Mus musculus
  siRNA target sequence for Keo4 (NM_145502.2,367-385).
ctacaaacggatgaagtta

SEQ ID NO: 756708 - DNA, 19 bp, Mus musculus
  siRNA target sequence for Keo4 (NM_145502.2,404-422).
caagtggtggagtcatgat

SEQ ID NO: 756709 - DNA, 19 bp, Mus musculus
  siRNA target sequence for Keo4 (NM_145502.2,413-431).
gagtcatgatctatattga

SEQ ID NO: 756710 - DNA, 19 bp, Mus musculus
  siRNA target sequence for Keo4 (NM_145502.2,423-441).
ctatattgaccgaatagaa

SEQ ID NO: 756711 - DNA, 19 bp, Mus musculus
  siRNA target sequence for Keo4 (NM_145502.2,432-450).
ccgaatagaagtggttaat

SEQ ID NO: 756712 - DNA, 19 bp, Mus musculus
  siRNA target sequence for Keo4 (NM_145502.2,433-451).
cgaatagaagtggttaata

SEQ ID NO: 756713 - DNA, 19 bp, Mus musculus
  siRNA target sequence for Keo4 (NM_145502.2,434-452).
gaatagaagtggttaatat

SEQ ID NO: 756714 - DNA, 19 bp, Mus musculus
  siRNA target sequence for Keo4 (NM_145502.2,458-476).
ctccttatgcagtgtttga

SEQ ID NO: 756715 - DNA, 19 bp, Mus musculus
  siRNA target sequence for Keo4 (NM_145502.2,460-478).
ccttatgcagtgtttgaca

SEQ ID NO: 756716 - DNA, 19 bp, Mus musculus
  siRNA target sequence for Keo4 (NM_145502.2,475-493).
gacattgtgaggaactata

SEQ ID NO: 756717 - DNA, 19 bp, Mus musculus
  siRNA target sequence for Keo4 (NM_145502.2,496-514).
gcagactacgacaagactt

SEQ ID NO: 756718 - DNA, 19 bp, Mus musculus
  siRNA target sequence for Keo4 (NM_145502.2,499-517).
gactacgacaagactttaa

SEQ ID NO: 756719 - DNA, 19 bp, Mus musculus
  siRNA target sequence for Keo4 (NM_145502.2,505-523).
gacaagactttaatcttca

SEQ ID NO: 756720 - DNA, 19 bp, Mus musculus
  siRNA target sequence for Keo4 (NM_145502.2,510-528).
gactttaatcttcaataaa

SEQ ID NO: 756721 - DNA, 19 bp, Mus musculus
  siRNA target sequence for Keo4 (NM_145502.2,619-637).
caggccctgcaaaaagatt

SEQ ID NO: 756722 - DNA, 19 bp, Mus musculus
  siRNA target sequence for Keo4 (NM_145502.2,667-685).
caggctgtgcgtgttacaa

SEQ ID NO: 756723 - DNA, 19 bp, Mus musculus
  siRNA target sequence for Keo4 (NM_145502.2,669-687).
ggctgtgcgtgttacaaaa

SEQ ID NO: 756724 - DNA, 19 bp, Mus musculus
  siRNA target sequence for Keo4 (NM_145502.2,803-821).
ggaaaagggctgttataga

SEQ ID NO: 756725 - DNA, 19 bp, Mus musculus
  siRNA target sequence for Keo4 (NM_145502.2,954-972).
gtattacgctgcacacaaa

SEQ ID NO: 756726 - DNA, 19 bp, Mus musculus
  siRNA target sequence for Keo4 (NM_145502.2,1032-1050).
ggccattgcctcaaacagt

SEQ ID NO: 756727 - DNA, 19 bp, Mus musculus
  siRNA target sequence for Keo4 (NM_145502.2,1033-1051).
gccattgcctcaaacagta

SEQ ID NO: 756728 - DNA, 19 bp, Mus musculus
  siRNA target sequence for Keo4 (NM_145502.2,1034-1052).
ccattgcctcaaacagtaa

SEQ ID NO: 756729 - DNA, 19 bp, Mus musculus
  siRNA target sequence for Keo4 (NM_145502.2,1068-1086).
caacatccccagcatgttt

SEQ ID NO: 756730 - DNA, 19 bp, Mus musculus
  siRNA target sequence for Keo4 (NM_145502.2,1177-1195).
gagagccccatccaaaaca

SEQ ID NO: 756731 - DNA, 19 bp, Mus musculus
  siRNA target sequence for BC014695 (NM_145503.1,284-302).
ctgtcccaggcaatagctt

SEQ ID NO: 756732 - DNA, 19 bp, Mus musculus
  siRNA target sequence for BC014695 (NM_145503.1,286-304).
gtcccaggcaatagcttta

SEQ ID NO: 756733 - DNA, 19 bp, Mus musculus
  siRNA target sequence for BC014695 (NM_145503.1,299-317).
gctttacctatgtcaatga

SEQ ID NO: 756734 - DNA, 19 bp, Mus musculus
  siRNA target sequence for BC014695 (NM_145503.1,694-712).
gactctggccgaaattctt

SEQ ID NO: 756735 - DNA, 19 bp, Mus musculus
  siRNA target sequence for BC014695 (NM_145503.1,696-714).
ctctggccgaaattcttta

SEQ ID NO: 756736 - DNA, 19 bp, Mus musculus
  siRNA target sequence for BC014695 (NM_145503.1,700-718).
ggccgaaattctttatcca

SEQ ID NO: 756737 - DNA, 19 bp, Mus musculus
  siRNA target sequence for BC014695 (NM_145503.1,1068-1086).
gctgcgggacagtatggat

SEQ ID NO: 756738 - DNA, 19 bp, Mus musculus
  siRNA target sequence for AI450540 (NM_145505.2,700-718).
cgtctctcccgttacaaga

SEQ ID NO: 756739 - DNA, 19 bp, Mus musculus
  siRNA target sequence for AI450540 (NM_145505.2,701-719).
gtctctcccgttacaagaa

SEQ ID NO: 756740 - DNA, 19 bp, Mus musculus
  siRNA target sequence for AI450540 (NM_145505.2,707-725).
cccgttacaagaagatttt

SEQ ID NO: 756741 - DNA, 19 bp, Mus musculus
  siRNA target sequence for AI450540 (NM_145505.2,717-735).
gaagattttgtttatcact

SEQ ID NO: 756742 - DNA, 19 bp, Mus musculus
  siRNA target sequence for AI450540 (NM_145505.2,743-761).
gattacacactactacata

SEQ ID NO: 756743 - DNA, 19 bp, Mus musculus
  siRNA target sequence for AI450540 (NM_145505.2,750-768).
cactactacatagaaactt

SEQ ID NO: 756744 - DNA, 19 bp, Mus musculus
  siRNA target sequence for AI450540 (NM_145505.2,874-892).
ggccatgcatggaatacct

SEQ ID NO: 756745 - DNA, 19 bp, Mus musculus
  siRNA target sequence for AI450540 (NM_145505.2,902-920).
caagatcttggaaacgtta

SEQ ID NO: 756746 - DNA, 19 bp, Mus musculus
  siRNA target sequence for AI450540 (NM_145505.2,962-980).
gcaggttttggtgttctat

SEQ ID NO: 756747 - DNA, 19 bp, Mus musculus
  siRNA target sequence for AI450540 (NM_145505.2,1034-1052).
caggcctgtgcagaaatta

SEQ ID NO: 756748 - DNA, 19 bp, Mus musculus
  siRNA target sequence for AI450540 (NM_145505.2,1036-1054).
ggcctgtgcagaaattaat

SEQ ID NO: 756749 - DNA, 19 bp, Mus musculus
  siRNA target sequence for AI450540 (NM_145505.2,1078-1096).
caacgccaacggagaatga

SEQ ID NO: 756750 - DNA, 19 bp, Mus musculus
  siRNA target sequence for AI450540 (NM_145505.2,1081-1099).
cgccaacggagaatgaaga

SEQ ID NO: 756751 - DNA, 19 bp, Mus musculus
  siRNA target sequence for AI450540 (NM_145505.2,1360-1378).
gcctagatgacctcaatgt

SEQ ID NO: 756752 - DNA, 19 bp, Mus musculus
  siRNA target sequence for AI450540 (NM_145505.2,1416-1434).
caggactacaacttagtga

SEQ ID NO: 756753 - DNA, 19 bp, Mus musculus
  siRNA target sequence for AI450540 (NM_145505.2,1418-1436).
ggactacaacttagtgaat

SEQ ID NO: 756754 - DNA, 19 bp, Mus musculus
  siRNA target sequence for AI450540 (NM_145505.2,1421-1439).
ctacaacttagtgaattct

SEQ ID NO: 756755 - DNA, 19 bp, Mus musculus
  siRNA target sequence for AI450540 (NM_145505.2,1619-1637).
ggaccccttagacattgaa

SEQ ID NO: 756756 - DNA, 19 bp, Mus musculus
  siRNA target sequence for AI450540 (NM_145505.2,1620-1638).
gaccccttagacattgaaa

SEQ ID NO: 756757 - DNA, 19 bp, Mus musculus
  siRNA target sequence for AI450540 (NM_145505.2,1760-1778).
caaggaggcacaaaagact

SEQ ID NO: 756758 - DNA, 19 bp, Mus musculus
  siRNA target sequence for AI450540 (NM_145505.2,1802-1820).
catccacgaaaggttcttt

SEQ ID NO: 756759 - DNA, 19 bp, Mus musculus
  siRNA target sequence for AI450540 (NM_145505.2,1990-2008).
gcagacatcctctaagaca

SEQ ID NO: 756760 - DNA, 19 bp, Mus musculus
  siRNA target sequence for AI450540 (NM_145505.2,1998-2016).
cctctaagacataggttaa

SEQ ID NO: 756761 - DNA, 19 bp, Mus musculus
  siRNA target sequence for AI450540 (NM_145505.2,1999-2017).
ctctaagacataggttaat

SEQ ID NO: 756762 - DNA, 19 bp, Mus musculus
  siRNA target sequence for AI450540 (NM_145505.2,2007-2025).
cataggttaatcgaacatt

SEQ ID NO: 756763 - DNA, 19 bp, Mus musculus
  siRNA target sequence for AI450540 (NM_145505.2,2018-2036).
cgaacattgcgatcacata

SEQ ID NO: 756764 - DNA, 19 bp, Mus musculus
  siRNA target sequence for AI450540 (NM_145505.2,2019-2037).
gaacattgcgatcacatat

SEQ ID NO: 756765 - DNA, 19 bp, Mus musculus
  siRNA target sequence for AI450540 (NM_145505.2,2054-2072).
catgaccctgaggatgttt

SEQ ID NO: 756766 - DNA, 19 bp, Mus musculus
  siRNA target sequence for AI450540 (NM_145505.2,2081-2099).
cctacaaaagcccaatgaa

SEQ ID NO: 756767 - DNA, 19 bp, Mus musculus
  siRNA target sequence for AI450540 (NM_145505.2,2140-2158).
gaaactatacggagaacaa

SEQ ID NO: 756768 - DNA, 19 bp, Mus musculus
  siRNA target sequence for AI450540 (NM_145505.2,2223-2241).
gaggaagatccattattta

SEQ ID NO: 756769 - DNA, 19 bp, Mus musculus
  siRNA target sequence for AI450540 (NM_145505.2,2326-2344).
gcaagacggaagtgcataa

SEQ ID NO: 756770 - DNA, 19 bp, Mus musculus
  siRNA target sequence for AI450540 (NM_145505.2,2327-2345).
caagacggaagtgcataaa

SEQ ID NO: 756771 - DNA, 19 bp, Mus musculus
  siRNA target sequence for AI450540 (NM_145505.2,2340-2358).
cataaagtggtcaacagtt

SEQ ID NO: 756772 - DNA, 19 bp, Mus musculus
  siRNA target sequence for AI450540 (NM_145505.2,2740-2758).
gtgacctcatggttcgaat

SEQ ID NO: 756773 - DNA, 19 bp, Mus musculus
  siRNA target sequence for AI450540 (NM_145505.2,2858-2876).
ggagggtgtgattgtgtta

SEQ ID NO: 756774 - DNA, 19 bp, Mus musculus
  siRNA target sequence for AI450540 (NM_145505.2,2902-2920).
ccattgcctttgttaagta

SEQ ID NO: 756775 - DNA, 19 bp, Mus musculus
  siRNA target sequence for BC003331 (NM_145511.1,285-303).
cttgtggttcttggaatat

SEQ ID NO: 756776 - DNA, 19 bp, Mus musculus
  siRNA target sequence for BC003331 (NM_145511.1,345-363).
gccctgcgcagactaatat

SEQ ID NO: 756777 - DNA, 19 bp, Mus musculus
  siRNA target sequence for BC003331 (NM_145511.1,346-364).
ccctgcgcagactaatatt

SEQ ID NO: 756778 - DNA, 19 bp, Mus musculus
  siRNA target sequence for BC003331 (NM_145511.1,347-365).
cctgcgcagactaatattt

SEQ ID NO: 756779 - DNA, 19 bp, Mus musculus
  siRNA target sequence for BC003331 (NM_145511.1,348-366).
ctgcgcagactaatatttt

SEQ ID NO: 756780 - DNA, 19 bp, Mus musculus
  siRNA target sequence for BC003331 (NM_145511.1,350-368).
gcgcagactaatattttct

SEQ ID NO: 756781 - DNA, 19 bp, Mus musculus
  siRNA target sequence for BC003331 (NM_145511.1,351-369).
cgcagactaatattttcta

SEQ ID NO: 756782 - DNA, 19 bp, Mus musculus
  siRNA target sequence for BC003331 (NM_145511.1,372-390).
gaaaaatctatgagtagaa

SEQ ID NO: 756783 - DNA, 19 bp, Mus musculus
  siRNA target sequence for BC003331 (NM_145511.1,429-447).
cgagtgacacttcacattt

SEQ ID NO: 756784 - DNA, 19 bp, Mus musculus
  siRNA target sequence for BC003331 (NM_145511.1,514-532).
ccgcagattggaagtatca

SEQ ID NO: 756785 - DNA, 19 bp, Mus musculus
  siRNA target sequence for BC003331 (NM_145511.1,557-575).
gtctctagactgtactgtt

SEQ ID NO: 756786 - DNA, 19 bp, Mus musculus
  siRNA target sequence for BC003331 (NM_145511.1,573-591).
gttcacgttaacattcaca

SEQ ID NO: 756787 - DNA, 19 bp, Mus musculus
  siRNA target sequence for BC003331 (NM_145511.1,593-611).
cccactgtcggctacttct

SEQ ID NO: 756788 - DNA, 19 bp, Mus musculus
  siRNA target sequence for BC003331 (NM_145511.1,601-619).
cggctacttctgtcagtta

SEQ ID NO: 756789 - DNA, 19 bp, Mus musculus
  siRNA target sequence for BC003331 (NM_145511.1,635-653).
cacaaagagtggacttaca

SEQ ID NO: 756790 - DNA, 19 bp, Mus musculus
  siRNA target sequence for BC003331 (NM_145511.1,662-680).
caagcaaatagaaaatggt

SEQ ID NO: 756791 - DNA, 19 bp, Mus musculus
  siRNA target sequence for BC003331 (NM_145511.1,687-705).
ctgattaatggacaagtta

SEQ ID NO: 756792 - DNA, 19 bp, Mus musculus
  siRNA target sequence for BC003331 (NM_145511.1,699-717).
caagttaaaggcaacgatt

SEQ ID NO: 756793 - DNA, 19 bp, Mus musculus
  siRNA target sequence for BC003331 (NM_145511.1,708-726).
ggcaacgattgtgacttat

SEQ ID NO: 756794 - DNA, 19 bp, Mus musculus
  siRNA target sequence for BC003331 (NM_145511.1,709-727).
gcaacgattgtgacttatt

SEQ ID NO: 756795 - DNA, 19 bp, Mus musculus
  siRNA target sequence for BC003331 (NM_145511.1,710-728).
caacgattgtgacttatta

SEQ ID NO: 756796 - DNA, 19 bp, Mus musculus
  siRNA target sequence for BC003331 (NM_145511.1,713-731).
cgattgtgacttattagaa

SEQ ID NO: 756797 - DNA, 19 bp, Mus musculus
  siRNA target sequence for BC003331 (NM_145511.1,781-799).
gcagtggttctgtaaatct

SEQ ID NO: 756798 - DNA, 19 bp, Mus musculus
  siRNA target sequence for BC003331 (NM_145511.1,810-828).
gtgaaatgcagagcttata

SEQ ID NO: 756799 - DNA, 19 bp, Mus musculus
  siRNA target sequence for BC003331 (NM_145511.1,820-838).
gagcttatatccatagcaa

SEQ ID NO: 756800 - DNA, 19 bp, Mus musculus
  siRNA target sequence for BC003331 (NM_145511.1,894-912).
gttgctgatcgctgtgaaa

SEQ ID NO: 756801 - DNA, 19 bp, Mus musculus
  siRNA target sequence for BC003331 (NM_145511.1,898-916).
ctgatcgctgtgaaatact

SEQ ID NO: 756802 - DNA, 19 bp, Mus musculus
  siRNA target sequence for BC003331 (NM_145511.1,923-941).
ggacctgcttctgaatgaa

SEQ ID NO: 756803 - DNA, 19 bp, Mus musculus
  siRNA target sequence for BC003331 (NM_145511.1,993-1011).
cctggatctactgtaatgt

SEQ ID NO: 756804 - DNA, 19 bp, Mus musculus
  siRNA target sequence for BC003331 (NM_145511.1,1019-1037).
ctataagtttggtgatgaa

SEQ ID NO: 756805 - DNA, 19 bp, Mus musculus
  siRNA target sequence for BC003331 (NM_145511.1,1073-1091).
gttagatcatgagattcaa

SEQ ID NO: 756806 - DNA, 19 bp, Mus musculus
  siRNA target sequence for BC003331 (NM_145511.1,1169-1187).
caacacaagtgaagaacaa

SEQ ID NO: 756807 - DNA, 19 bp, Mus musculus
  siRNA target sequence for BC003331 (NM_145511.1,1213-1231).
gagtgaaaattcagcaaaa

SEQ ID NO: 756808 - DNA, 19 bp, Mus musculus
  siRNA target sequence for BC003331 (NM_145511.1,1272-1290).
gcgggcatctccttccatt

SEQ ID NO: 756809 - DNA, 19 bp, Mus musculus
  siRNA target sequence for 2010005O13Rik (NM_145512.2,106-124).
ctggggcaccagaataaaa

SEQ ID NO: 756810 - DNA, 19 bp, Mus musculus
  siRNA target sequence for 2010005O13Rik (NM_145512.2,205-223).
cggcctctttgcagtgttt

SEQ ID NO: 756811 - DNA, 19 bp, Mus musculus
  siRNA target sequence for 2010005O13Rik (NM_145512.2,310-328).
gcgtctcatcgccacaatt

SEQ ID NO: 756812 - DNA, 19 bp, Mus musculus
  siRNA target sequence for 2010005O13Rik (NM_145512.2,312-330).
gtctcatcgccacaattct

SEQ ID NO: 756813 - DNA, 19 bp, Mus musculus
  siRNA target sequence for 2010005O13Rik (NM_145512.2,383-401).
ggacttgcactcatcttct

SEQ ID NO: 756814 - DNA, 19 bp, Mus musculus
  siRNA target sequence for 2010005O13Rik (NM_145512.2,429-447).
ggtatagcctttcctatat

SEQ ID NO: 756815 - DNA, 19 bp, Mus musculus
  siRNA target sequence for 2010005O13Rik (NM_145512.2,430-448).
gtatagcctttcctatata

SEQ ID NO: 756816 - DNA, 19 bp, Mus musculus
  siRNA target sequence for 1810011K17Rik (NM_145513.2,263-281).
gagacaacgttctaaggat

SEQ ID NO: 756817 - DNA, 19 bp, Mus musculus
  siRNA target sequence for 1810011K17Rik (NM_145513.2,332-350).
gatgtgtgaacaactatca

SEQ ID NO: 756818 - DNA, 19 bp, Mus musculus
  siRNA target sequence for 1810011K17Rik (NM_145513.2,405-423).
cgaacactccaaagaagtt

SEQ ID NO: 756819 - DNA, 19 bp, Mus musculus
  siRNA target sequence for 1810011K17Rik (NM_145513.2,421-439).
gttattaaaccatatgact

SEQ ID NO: 756820 - DNA, 19 bp, Mus musculus
  siRNA target sequence for 1810011K17Rik (NM_145513.2,430-448).
ccatatgactggacctata

SEQ ID NO: 756821 - DNA, 19 bp, Mus musculus
  siRNA target sequence for 1810011K17Rik (NM_145513.2,438-456).
ctggacctatacaacagat

SEQ ID NO: 756822 - DNA, 19 bp, Mus musculus
  siRNA target sequence for 1810011K17Rik (NM_145513.2,440-458).
ggacctatacaacagatta

SEQ ID NO: 756823 - DNA, 19 bp, Mus musculus
  siRNA target sequence for 1810011K17Rik (NM_145513.2,441-459).
gacctatacaacagattat

SEQ ID NO: 756824 - DNA, 19 bp, Mus musculus
  siRNA target sequence for 1810011K17Rik (NM_145513.2,443-461).
cctatacaacagattataa

SEQ ID NO: 756825 - DNA, 19 bp, Mus musculus
  siRNA target sequence for 1810011K17Rik (NM_145513.2,444-462).
ctatacaacagattataaa

SEQ ID NO: 756826 - DNA, 19 bp, Mus musculus
  siRNA target sequence for 1810011K17Rik (NM_145513.2,495-513).
ggttgtacctacaacagat

SEQ ID NO: 756827 - DNA, 19 bp, Mus musculus
  siRNA target sequence for 1810011K17Rik (NM_145513.2,499-517).
gtacctacaacagatcata

SEQ ID NO: 756828 - DNA, 19 bp, Mus musculus
  siRNA target sequence for 1810011K17Rik (NM_145513.2,503-521).
ctacaacagatcatataga

SEQ ID NO: 756829 - DNA, 19 bp, Mus musculus
  siRNA target sequence for 1810011K17Rik (NM_145513.2,511-529).
gatcatatagatacagaaa

SEQ ID NO: 756830 - DNA, 19 bp, Mus musculus
  siRNA target sequence for 1810011K17Rik (NM_145513.2,660-678).
gcggtttttcctgagaatt

SEQ ID NO: 756831 - DNA, 19 bp, Mus musculus
  siRNA target sequence for 1810011K17Rik (NM_145513.2,662-680).
ggtttttcctgagaattga

SEQ ID NO: 756832 - DNA, 19 bp, Mus musculus
  siRNA target sequence for 1810011K17Rik (NM_145513.2,684-702).
ggtgctcatcagaatgaat

SEQ ID NO: 756833 - DNA, 19 bp, Mus musculus
  siRNA target sequence for 1810011K17Rik (NM_145513.2,734-752).
cctacatgttacgagaata

SEQ ID NO: 756834 - DNA, 19 bp, Mus musculus
  siRNA target sequence for 1810011K17Rik (NM_145513.2,735-753).
ctacatgttacgagaatat

SEQ ID NO: 756835 - DNA, 19 bp, Mus musculus
  siRNA target sequence for 1810011K17Rik (NM_145513.2,738-756).
catgttacgagaatataca

SEQ ID NO: 756836 - DNA, 19 bp, Mus musculus
  siRNA target sequence for 1810011K17Rik (NM_145513.2,761-779).
gagagagcaaaattgctaa

SEQ ID NO: 756837 - DNA, 19 bp, Mus musculus
  siRNA target sequence for 1810011K17Rik (NM_145513.2,763-781).
gagagcaaaattgctaatt

SEQ ID NO: 756838 - DNA, 19 bp, Mus musculus
  siRNA target sequence for 1810011K17Rik (NM_145513.2,765-783).
gagcaaaattgctaattta

SEQ ID NO: 756839 - DNA, 19 bp, Mus musculus
  siRNA target sequence for 1810011K17Rik (NM_145513.2,801-819).
cctcttcacggaacctaat

SEQ ID NO: 756840 - DNA, 19 bp, Mus musculus
  siRNA target sequence for 1810011K17Rik (NM_145513.2,804-822).
cttcacggaacctaatgaa

SEQ ID NO: 756841 - DNA, 19 bp, Mus musculus
  siRNA target sequence for 1810011K17Rik (NM_145513.2,807-825).
cacggaacctaatgaaata

SEQ ID NO: 756842 - DNA, 19 bp, Mus musculus
  siRNA target sequence for 1810011K17Rik (NM_145513.2,814-832).
cctaatgaaatatcacaat

SEQ ID NO: 756843 - DNA, 19 bp, Mus musculus
  siRNA target sequence for 1810011K17Rik (NM_145513.2,864-882).
gctcgtatttccagaaaga

SEQ ID NO: 756844 - DNA, 19 bp, Mus musculus
  siRNA target sequence for 1810011K17Rik (NM_145513.2,865-883).
ctcgtatttccagaaagaa

SEQ ID NO: 756845 - DNA, 19 bp, Mus musculus
  siRNA target sequence for 1810011K17Rik (NM_145513.2,894-912).
cccagtggactcacaaagt

SEQ ID NO: 756846 - DNA, 19 bp, Mus musculus
  siRNA target sequence for 1810011K17Rik (NM_145513.2,895-913).
ccagtggactcacaaagta

SEQ ID NO: 756847 - DNA, 19 bp, Mus musculus
  siRNA target sequence for 1810011K17Rik (NM_145513.2,907-925).
caaagtacgccctcagaat

SEQ ID NO: 756848 - DNA, 19 bp, Mus musculus
  siRNA target sequence for Wdr26 (NM_145514.2,628-646).
caagcttcagacctattta

SEQ ID NO: 756849 - DNA, 19 bp, Mus musculus
  siRNA target sequence for Wdr26 (NM_145514.2,631-649).
gcttcagacctatttacca

SEQ ID NO: 756850 - DNA, 19 bp, Mus musculus
  siRNA target sequence for Wdr26 (NM_145514.2,665-683).
cccccacggcgtttacaga

SEQ ID NO: 756851 - DNA, 19 bp, Mus musculus
  siRNA target sequence for Wdr26 (NM_145514.2,693-711).
ggcaggcggtggaactaca

SEQ ID NO: 756852 - DNA, 19 bp, Mus musculus
  siRNA target sequence for Wdr26 (NM_145514.2,694-712).
gcaggcggtggaactacaa

SEQ ID NO: 756853 - DNA, 19 bp, Mus musculus
  siRNA target sequence for Wdr26 (NM_145514.2,714-732).
gggatcggtgcctatatca

SEQ ID NO: 756854 - DNA, 19 bp, Mus musculus
  siRNA target sequence for Wdr26 (NM_145514.2,716-734).
gatcggtgcctatatcaca

SEQ ID NO: 756855 - DNA, 19 bp, Mus musculus
  siRNA target sequence for Wdr26 (NM_145514.2,723-741).
gcctatatcacaataccaa

SEQ ID NO: 756856 - DNA, 19 bp, Mus musculus
  siRNA target sequence for Wdr26 (NM_145514.2,724-742).
cctatatcacaataccaaa

SEQ ID NO: 756857 - DNA, 19 bp, Mus musculus
  siRNA target sequence for Wdr26 (NM_145514.2,739-757).
caaacttgacaataatcta

SEQ ID NO: 756858 - DNA, 19 bp, Mus musculus
  siRNA target sequence for Wdr26 (NM_145514.2,770-788).
ctacttatagatcatgttt

SEQ ID NO: 756859 - DNA, 19 bp, Mus musculus
  siRNA target sequence for Wdr26 (NM_145514.2,810-828).
gttacactcaacagatact

SEQ ID NO: 756860 - DNA, 19 bp, Mus musculus
  siRNA target sequence for Wdr26 (NM_145514.2,848-866).
gtgtggttctgtaaatttt

SEQ ID NO: 756861 - DNA, 19 bp, Mus musculus
  siRNA target sequence for Wdr26 (NM_145514.2,852-870).
ggttctgtaaattttctaa

SEQ ID NO: 756862 - DNA, 19 bp, Mus musculus
  siRNA target sequence for Wdr26 (NM_145514.2,932-950).
ccggatacgcacctgttaa

SEQ ID NO: 756863 - DNA, 19 bp, Mus musculus
  siRNA target sequence for Wdr26 (NM_145514.2,933-951).
cggatacgcacctgttaaa

SEQ ID NO: 756864 - DNA, 19 bp, Mus musculus
  siRNA target sequence for Wdr26 (NM_145514.2,934-952).
ggatacgcacctgttaaaa

SEQ ID NO: 756865 - DNA, 19 bp, Mus musculus
  siRNA target sequence for Wdr26 (NM_145514.2,977-995).
gcgtatggtgtctcttata

SEQ ID NO: 756866 - DNA, 19 bp, Mus musculus
  siRNA target sequence for Wdr26 (NM_145514.2,978-996).
cgtatggtgtctcttatat

SEQ ID NO: 756867 - DNA, 19 bp, Mus musculus
  siRNA target sequence for Wdr26 (NM_145514.2,979-997).
gtatggtgtctcttatata

SEQ ID NO: 756868 - DNA, 19 bp, Mus musculus
  siRNA target sequence for Wdr26 (NM_145514.2,1054-1072).
gctttggctttggaatgta

SEQ ID NO: 756869 - DNA, 19 bp, Mus musculus
  siRNA target sequence for Wdr26 (NM_145514.2,1070-1088).
gtacagacgggagaattaa

SEQ ID NO: 756870 - DNA, 19 bp, Mus musculus
  siRNA target sequence for Wdr26 (NM_145514.2,1073-1091).
cagacgggagaattaagaa

SEQ ID NO: 756871 - DNA, 19 bp, Mus musculus
  siRNA target sequence for Wdr26 (NM_145514.2,1170-1188).
gtcagcgtggtcagttcta

SEQ ID NO: 756872 - DNA, 19 bp, Mus musculus
  siRNA target sequence for Wdr26 (NM_145514.2,1194-1212).
gtgacctggacggaaatct

SEQ ID NO: 756873 - DNA, 19 bp, Mus musculus
  siRNA target sequence for Wdr26 (NM_145514.2,1322-1340).
gacctgacagatagaaaca

SEQ ID NO: 756874 - DNA, 19 bp, Mus musculus
  siRNA target sequence for Wdr26 (NM_145514.2,1327-1345).
gacagatagaaacatagta

SEQ ID NO: 756875 - DNA, 19 bp, Mus musculus
  siRNA target sequence for Wdr26 (NM_145514.2,1339-1357).
catagtacaggaagatcat

SEQ ID NO: 756876 - DNA, 19 bp, Mus musculus
  siRNA target sequence for Wdr26 (NM_145514.2,1346-1364).
caggaagatcatcctatta

SEQ ID NO: 756877 - DNA, 19 bp, Mus musculus
  siRNA target sequence for Wdr26 (NM_145514.2,1349-1367).
gaagatcatcctattatgt

SEQ ID NO: 756878 - DNA, 19 bp, Mus musculus
  siRNA target sequence for Wdr26 (NM_145514.2,1352-1370).
gatcatcctattatgtcat

SEQ ID NO: 756879 - DNA, 19 bp, Mus musculus
  siRNA target sequence for Wdr26 (NM_145514.2,1358-1376).
cctattatgtcatttacta

SEQ ID NO: 756880 - DNA, 19 bp, Mus musculus
  siRNA target sequence for Wdr26 (NM_145514.2,1390-1408).
ccgattagctttgttaaat

SEQ ID NO: 756881 - DNA, 19 bp, Mus musculus
  siRNA target sequence for Wdr26 (NM_145514.2,1438-1456).
cttgcaagacagagtttta

SEQ ID NO: 756882 - DNA, 19 bp, Mus musculus
  siRNA target sequence for Wdr26 (NM_145514.2,1441-1459).
gcaagacagagttttagta

SEQ ID NO: 756883 - DNA, 19 bp, Mus musculus
  siRNA target sequence for Wdr26 (NM_145514.2,1473-1491).
gtgttacccaagggtttta

SEQ ID NO: 756884 - DNA, 19 bp, Mus musculus
  siRNA target sequence for Wdr26 (NM_145514.2,1475-1493).
gttacccaagggttttata

SEQ ID NO: 756885 - DNA, 19 bp, Mus musculus
  siRNA target sequence for Wdr26 (NM_145514.2,1479-1497).
cccaagggttttatacaat

SEQ ID NO: 756886 - DNA, 19 bp, Mus musculus
  siRNA target sequence for Wdr26 (NM_145514.2,1506-1524).
gttttggaggccataatga

SEQ ID NO: 756887 - DNA, 19 bp, Mus musculus
  siRNA target sequence for Wdr26 (NM_145514.2,1536-1554).
ctagtggcagcgaagatca

SEQ ID NO: 756888 - DNA, 19 bp, Mus musculus
  siRNA target sequence for Wdr26 (NM_145514.2,1539-1557).
gtggcagcgaagatcacaa

SEQ ID NO: 756889 - DNA, 19 bp, Mus musculus
  siRNA target sequence for Wdr26 (NM_145514.2,1545-1563).
gcgaagatcacaaggttta

SEQ ID NO: 756890 - DNA, 19 bp, Mus musculus
  siRNA target sequence for Wdr26 (NM_145514.2,1607-1625).
gggcacacgcgcacagtaa

SEQ ID NO: 756891 - DNA, 19 bp, Mus musculus
  siRNA target sequence for Wdr26 (NM_145514.2,1610-1628).
cacacgcgcacagtaaatt

SEQ ID NO: 756892 - DNA, 19 bp, Mus musculus
  siRNA target sequence for Wdr26 (NM_145514.2,1612-1630).
cacgcgcacagtaaattgt

SEQ ID NO: 756893 - DNA, 19 bp, Mus musculus
  siRNA target sequence for Wdr26 (NM_145514.2,1614-1632).
cgcgcacagtaaattgtgt

SEQ ID NO: 756894 - DNA, 19 bp, Mus musculus
  siRNA target sequence for Wdr26 (NM_145514.2,1615-1633).
gcgcacagtaaattgtgtt

SEQ ID NO: 756895 - DNA, 19 bp, Mus musculus
  siRNA target sequence for Wdr26 (NM_145514.2,1616-1634).
cgcacagtaaattgtgtta

SEQ ID NO: 756896 - DNA, 19 bp, Mus musculus
  siRNA target sequence for Wdr26 (NM_145514.2,1678-1696).
cgatggcactgttagaata

SEQ ID NO: 756897 - DNA, 19 bp, Mus musculus
  siRNA target sequence for Wdr26 (NM_145514.2,1698-1716).
ggggaccagcacctttcat

SEQ ID NO: 756898 - DNA, 19 bp, Mus musculus
  siRNA target sequence for Wdr26 (NM_145514.2,1699-1717).
gggaccagcacctttcata

SEQ ID NO: 756899 - DNA, 19 bp, Mus musculus
  siRNA target sequence for Wdr26 (NM_145514.2,1701-1719).
gaccagcacctttcataga

SEQ ID NO: 756900 - DNA, 19 bp, Mus musculus
  siRNA target sequence for Plekhb2 (NM_145516.1,156-174).
cagacggtcacctgatcta

SEQ ID NO: 756901 - DNA, 19 bp, Mus musculus
  siRNA target sequence for Plekhb2 (NM_145516.1,158-176).
gacggtcacctgatctact

SEQ ID NO: 756902 - DNA, 19 bp, Mus musculus
  siRNA target sequence for Plekhb2 (NM_145516.1,220-238).
gcccgtggactgcatcaat

SEQ ID NO: 756903 - DNA, 19 bp, Mus musculus
  siRNA target sequence for Plekhb2 (NM_145516.1,221-239).
cccgtggactgcatcaata

SEQ ID NO: 756904 - DNA, 19 bp, Mus musculus
  siRNA target sequence for Plekhb2 (NM_145516.1,222-240).
ccgtggactgcatcaatat

SEQ ID NO: 756905 - DNA, 19 bp, Mus musculus
  siRNA target sequence for Plekhb2 (NM_145516.1,386-404).
caggattccagaacaaaca

SEQ ID NO: 756906 - DNA, 19 bp, Mus musculus
  siRNA target sequence for Plekhb2 (NM_145516.1,531-549).
ccgcaggaactcaagttgt

SEQ ID NO: 756907 - DNA, 19 bp, Mus musculus
  siRNA target sequence for Plekhb2 (NM_145516.1,559-577).
caacgggcaggcatatgca

SEQ ID NO: 756908 - DNA, 19 bp, Mus musculus
  siRNA target sequence for Plekhb2 (NM_145516.1,592-610).
cccgtatgcaggagtttat

SEQ ID NO: 756909 - DNA, 19 bp, Mus musculus
  siRNA target sequence for C730042F17Rik (NM_145517.2,118-136).
cccaatactcgtgtaatga

SEQ ID NO: 756910 - DNA, 19 bp, Mus musculus
  siRNA target sequence for C730042F17Rik (NM_145517.2,169-187).
ggagttggcctgcttcata

SEQ ID NO: 756911 - DNA, 19 bp, Mus musculus
  siRNA target sequence for C730042F17Rik (NM_145517.2,170-188).
gagttggcctgcttcatat

SEQ ID NO: 756912 - DNA, 19 bp, Mus musculus
  siRNA target sequence for C730042F17Rik (NM_145517.2,230-248).
ggaccttaaccaacataat

SEQ ID NO: 756913 - DNA, 19 bp, Mus musculus
  siRNA target sequence for C730042F17Rik (NM_145517.2,354-372).
ctacggagtacagtttaca

SEQ ID NO: 756914 - DNA, 19 bp, Mus musculus
  siRNA target sequence for C730042F17Rik (NM_145517.2,357-375).
cggagtacagtttacatct

SEQ ID NO: 756915 - DNA, 19 bp, Mus musculus
  siRNA target sequence for C730042F17Rik (NM_145517.2,379-397).
cggaagtttttcacaattt

SEQ ID NO: 756916 - DNA, 19 bp, Mus musculus
  siRNA target sequence for C730042F17Rik (NM_145517.2,421-439).
gcaagtttctatacaaagt

SEQ ID NO: 756917 - DNA, 19 bp, Mus musculus
  siRNA target sequence for C730042F17Rik (NM_145517.2,515-533).
gtgttcgcatctttggaat

SEQ ID NO: 756918 - DNA, 19 bp, Mus musculus
  siRNA target sequence for Farp2 (NM_145519.1,107-125).
gatagaaggaacatacaga

SEQ ID NO: 756919 - DNA, 19 bp, Mus musculus
  siRNA target sequence for Farp2 (NM_145519.1,252-270).
gacagcactgtagagttat

SEQ ID NO: 756920 - DNA, 19 bp, Mus musculus
  siRNA target sequence for Farp2 (NM_145519.1,254-272).
cagcactgtagagttattt

SEQ ID NO: 756921 - DNA, 19 bp, Mus musculus
  siRNA target sequence for Farp2 (NM_145519.1,256-274).
gcactgtagagttatttga

SEQ ID NO: 756922 - DNA, 19 bp, Mus musculus
  siRNA target sequence for Farp2 (NM_145519.1,289-307).
gtgacgggcaggtcttact

SEQ ID NO: 756923 - DNA, 19 bp, Mus musculus
  siRNA target sequence for Farp2 (NM_145519.1,385-403).
ggatttggcttgaacctat

SEQ ID NO: 756924 - DNA, 19 bp, Mus musculus
  siRNA target sequence for Farp2 (NM_145519.1,399-417).
cctatgaaacccatcatta

SEQ ID NO: 756925 - DNA, 19 bp, Mus musculus
  siRNA target sequence for Farp2 (NM_145519.1,446-464).
gcttcgcctggcagtaaaa

SEQ ID NO: 756926 - DNA, 19 bp, Mus musculus
  siRNA target sequence for Farp2 (NM_145519.1,572-590).
cactgcagcccttctcata

SEQ ID NO: 756927 - DNA, 19 bp, Mus musculus
  siRNA target sequence for Farp2 (NM_145519.1,605-623).
gtcggaaatcggagattat

SEQ ID NO: 756928 - DNA, 19 bp, Mus musculus
  siRNA target sequence for Farp2 (NM_145519.1,607-625).
cggaaatcggagattatga

SEQ ID NO: 756929 - DNA, 19 bp, Mus musculus
  siRNA target sequence for Farp2 (NM_145519.1,648-666).
ctcaaagccaatgaatact

SEQ ID NO: 756930 - DNA, 19 bp, Mus musculus
  siRNA target sequence for Farp2 (NM_145519.1,750-768).
caggtgcttgagattgcaa

SEQ ID NO: 756931 - DNA, 19 bp, Mus musculus
  siRNA target sequence for Farp2 (NM_145519.1,869-887).
gggtaccaccaaaatcaat

SEQ ID NO: 756932 - DNA, 19 bp, Mus musculus
  siRNA target sequence for Farp2 (NM_145519.1,870-888).
ggtaccaccaaaatcaata

SEQ ID NO: 756933 - DNA, 19 bp, Mus musculus
  siRNA target sequence for Farp2 (NM_145519.1,874-892).
ccaccaaaatcaatacctt

SEQ ID NO: 756934 - DNA, 19 bp, Mus musculus
  siRNA target sequence for Farp2 (NM_145519.1,898-916).
ggtccaaagtccgtaaact

SEQ ID NO: 756935 - DNA, 19 bp, Mus musculus
  siRNA target sequence for Farp2 (NM_145519.1,899-917).
gtccaaagtccgtaaacta

SEQ ID NO: 756936 - DNA, 19 bp, Mus musculus
  siRNA target sequence for Farp2 (NM_145519.1,1040-1058).
ggagtaccatacctttttt

SEQ ID NO: 756937 - DNA, 19 bp, Mus musculus
  siRNA target sequence for Farp2 (NM_145519.1,1041-1059).
gagtaccatacctttttta

SEQ ID NO: 756938 - DNA, 19 bp, Mus musculus
  siRNA target sequence for Farp2 (NM_145519.1,1043-1061).
gtaccataccttttttaga

SEQ ID NO: 756939 - DNA, 19 bp, Mus musculus
  siRNA target sequence for Farp2 (NM_145519.1,1110-1128).
ggctcctccttcagataca

SEQ ID NO: 756940 - DNA, 19 bp, Mus musculus
  siRNA target sequence for Farp2 (NM_145519.1,1112-1130).
ctcctccttcagatacagt

SEQ ID NO: 756941 - DNA, 19 bp, Mus musculus
  siRNA target sequence for Farp2 (NM_145519.1,1146-1164).
caactagtagattatgtca

SEQ ID NO: 756942 - DNA, 19 bp, Mus musculus
  siRNA target sequence for Farp2 (NM_145519.1,1169-1187).
cggtggaatgaagagaatt

SEQ ID NO: 756943 - DNA, 19 bp, Mus musculus
  siRNA target sequence for Farp2 (NM_145519.1,1178-1196).
gaagagaattccatacgaa

SEQ ID NO: 756944 - DNA, 19 bp, Mus musculus
  siRNA target sequence for Farp2 (NM_145519.1,1211-1229).
gactcggacatctcttcat

SEQ ID NO: 756945 - DNA, 19 bp, Mus musculus
  siRNA target sequence for Farp2 (NM_145519.1,1239-1257).
gtagatctgcctaaacaga

SEQ ID NO: 756946 - DNA, 19 bp, Mus musculus
  siRNA target sequence for Farp2 (NM_145519.1,1292-1310).
ctccctgtcttcagcaaat

SEQ ID NO: 756947 - DNA, 19 bp, Mus musculus
  siRNA target sequence for Farp2 (NM_145519.1,1348-1366).
ctcctggtctgcccaattt

SEQ ID NO: 756948 - DNA, 19 bp, Mus musculus
  siRNA target sequence for Farp2 (NM_145519.1,1350-1368).
cctggtctgcccaatttga

SEQ ID NO: 756949 - DNA, 19 bp, Mus musculus
  siRNA target sequence for Farp2 (NM_145519.1,1351-1369).
ctggtctgcccaatttgaa

SEQ ID NO: 756950 - DNA, 19 bp, Mus musculus
  siRNA target sequence for Farp2 (NM_145519.1,1396-1414).
cgcaggctcccgtcatcaa

SEQ ID NO: 756951 - DNA, 19 bp, Mus musculus
  siRNA target sequence for Farp2 (NM_145519.1,1433-1451).
gagcagcggaccatcatca

SEQ ID NO: 756952 - DNA, 19 bp, Mus musculus
  siRNA target sequence for Farp2 (NM_145519.1,1436-1454).
cagcggaccatcatcatct

SEQ ID NO: 756953 - DNA, 19 bp, Mus musculus
  siRNA target sequence for Farp2 (NM_145519.1,1506-1524).
cctggtccaggcttttcta

SEQ ID NO: 756954 - DNA, 19 bp, Mus musculus
  siRNA target sequence for Farp2 (NM_145519.1,1739-1757).
cgctacagaacgaacctat

SEQ ID NO: 756955 - DNA, 19 bp, Mus musculus
  siRNA target sequence for Farp2 (NM_145519.1,1744-1762).
cagaacgaacctatctgaa

SEQ ID NO: 756956 - DNA, 19 bp, Mus musculus
  siRNA target sequence for Farp2 (NM_145519.1,1750-1768).
gaacctatctgaaggattt

SEQ ID NO: 756957 - DNA, 19 bp, Mus musculus
  siRNA target sequence for Farp2 (NM_145519.1,1753-1771).
cctatctgaaggatttaga

SEQ ID NO: 756958 - DNA, 19 bp, Mus musculus
  siRNA target sequence for Farp2 (NM_145519.1,1981-1999).
ggaacatgcgtcagttaaa

SEQ ID NO: 756959 - DNA, 19 bp, Mus musculus
  siRNA target sequence for Farp2 (NM_145519.1,1989-2007).
cgtcagttaaaggaattta

SEQ ID NO: 756960 - DNA, 19 bp, Mus musculus
  siRNA target sequence for Farp2 (NM_145519.1,1992-2010).
cagttaaaggaatttacta

SEQ ID NO: 756961 - DNA, 19 bp, Mus musculus
  siRNA target sequence for Farp2 (NM_145519.1,2027-2045).
cgatgaggtcctaacagaa

SEQ ID NO: 756962 - DNA, 19 bp, Mus musculus
  siRNA target sequence for Farp2 (NM_145519.1,2055-2073).
gccacaaaacactgtaaaa

SEQ ID NO: 756963 - DNA, 19 bp, Mus musculus
  siRNA target sequence for Farp2 (NM_145519.1,2284-2302).
gccttacccggctggaaaa

SEQ ID NO: 756964 - DNA, 19 bp, Mus musculus
  siRNA target sequence for Farp2 (NM_145519.1,2331-2349).
gacctggtcggtgtagaaa

SEQ ID NO: 756965 - DNA, 19 bp, Mus musculus
  siRNA target sequence for Farp2 (NM_145519.1,2358-2376).
gctcctgggagggagttta

SEQ ID NO: 756966 - DNA, 19 bp, Mus musculus
  siRNA target sequence for Farp2 (NM_145519.1,2359-2377).
ctcctgggagggagtttat

SEQ ID NO: 756967 - DNA, 19 bp, Mus musculus
  siRNA target sequence for Farp2 (NM_145519.1,2414-2432).
cctgcaacagaggatgttt

SEQ ID NO: 756968 - DNA, 19 bp, Mus musculus
  siRNA target sequence for Farp2 (NM_145519.1,2472-2490).
gtcacaggagccagtcatt

SEQ ID NO: 756969 - DNA, 19 bp, Mus musculus
  siRNA target sequence for Farp2 (NM_145519.1,2607-2625).
gccagcactcggctagaaa

SEQ ID NO: 756970 - DNA, 19 bp, Mus musculus
  siRNA target sequence for Farp2 (NM_145519.1,2608-2626).
ccagcactcggctagaaaa

SEQ ID NO: 756971 - DNA, 19 bp, Mus musculus
  siRNA target sequence for Farp2 (NM_145519.1,2612-2630).
cactcggctagaaaaggaa

SEQ ID NO: 756972 - DNA, 19 bp, Mus musculus
  siRNA target sequence for Farp2 (NM_145519.1,2614-2632).
ctcggctagaaaaggaaaa

SEQ ID NO: 756973 - DNA, 19 bp, Mus musculus
  siRNA target sequence for Farp2 (NM_145519.1,2726-2744).
ccctagatcttctgatgaa

SEQ ID NO: 756974 - DNA, 19 bp, Mus musculus
  siRNA target sequence for Farp2 (NM_145519.1,2813-2831).
ggccaatacaacaatgcat

SEQ ID NO: 756975 - DNA, 19 bp, Mus musculus
  siRNA target sequence for Farp2 (NM_145519.1,2834-2852).
gtgctggtaccgtaataca

SEQ ID NO: 756976 - DNA, 19 bp, Mus musculus
  siRNA target sequence for Farp2 (NM_145519.1,2837-2855).
ctggtaccgtaatacaagt

SEQ ID NO: 756977 - DNA, 19 bp, Mus musculus
  siRNA target sequence for Farp2 (NM_145519.1,2888-2906).
gaaccagctttcaggatat

SEQ ID NO: 756978 - DNA, 19 bp, Mus musculus
  siRNA target sequence for Farp2 (NM_145519.1,2901-2919).
ggatatctgctgagaaagt

SEQ ID NO: 756979 - DNA, 19 bp, Mus musculus
  siRNA target sequence for Farp2 (NM_145519.1,2946-2964).
ctctgggtggtctttacca

SEQ ID NO: 756980 - DNA, 19 bp, Mus musculus
  siRNA target sequence for Farp2 (NM_145519.1,3120-3138).
cgggctgagagcaagtaca

SEQ ID NO: 756981 - DNA, 19 bp, Mus musculus
  siRNA target sequence for Farp2 (NM_145519.1,3148-3166).
ggtggatggacgtcatcaa

SEQ ID NO: 756982 - DNA, 19 bp, Mus musculus
  siRNA target sequence for Farp2 (NM_145519.1,3149-3167).
gtggatggacgtcatcaaa

SEQ ID NO: 756983 - DNA, 19 bp, Mus musculus
  siRNA target sequence for D830019K17Rik (NM_145521.2,191-209).
ccagggatcgcaacaatgt

SEQ ID NO: 756984 - DNA, 19 bp, Mus musculus
  siRNA target sequence for D830019K17Rik (NM_145521.2,584-602).
gccaagaggtgctcatgaa

SEQ ID NO: 756985 - DNA, 19 bp, Mus musculus
  siRNA target sequence for D830019K17Rik (NM_145521.2,644-662).
gagtccagaagctcatcaa

SEQ ID NO: 756986 - DNA, 19 bp, Mus musculus
  siRNA target sequence for D830019K17Rik (NM_145521.2,839-857).
gcttgtctcgggtgatgat

SEQ ID NO: 756987 - DNA, 19 bp, Mus musculus
  siRNA target sequence for D830019K17Rik (NM_145521.2,858-876).
cggacgccaccacattaca

SEQ ID NO: 756988 - DNA, 19 bp, Mus musculus
  siRNA target sequence for D830019K17Rik (NM_145521.2,860-878).
gacgccaccacattacaga

SEQ ID NO: 756989 - DNA, 19 bp, Mus musculus
  siRNA target sequence for 9530020D24Rik (NM_145522.2,94-112).
gccacatggtacactttga

SEQ ID NO: 756990 - DNA, 19 bp, Mus musculus
  siRNA target sequence for 9530020D24Rik (NM_145522.2,145-163).
ggccacagctgctcatatt

SEQ ID NO: 756991 - DNA, 19 bp, Mus musculus
  siRNA target sequence for 9530020D24Rik (NM_145522.2,201-219).
cattgtcgggggagcaaat

SEQ ID NO: 756992 - DNA, 19 bp, Mus musculus
  siRNA target sequence for 9530020D24Rik (NM_145522.2,225-243).
ccaaagtttctcagatgta

SEQ ID NO: 756993 - DNA, 19 bp, Mus musculus
  siRNA target sequence for 9530020D24Rik (NM_145522.2,375-393).
gtcaggaaatcgaaactgt

SEQ ID NO: 756994 - DNA, 19 bp, Mus musculus
  siRNA target sequence for 9530020D24Rik (NM_145522.2,483-501).
cgcagctatcggaaaccaa

SEQ ID NO: 756995 - DNA, 19 bp, Mus musculus
  siRNA target sequence for 9530020D24Rik (NM_145522.2,487-505).
gctatcggaaaccaactat

SEQ ID NO: 756996 - DNA, 19 bp, Mus musculus
  siRNA target sequence for 9530020D24Rik (NM_145522.2,488-506).
ctatcggaaaccaactata

SEQ ID NO: 756997 - DNA, 19 bp, Mus musculus
  siRNA target sequence for 9530020D24Rik (NM_145522.2,547-565).
gacgtgaagttgcatgtat

SEQ ID NO: 756998 - DNA, 19 bp, Mus musculus
  siRNA target sequence for 9530020D24Rik (NM_145522.2,549-567).
cgtgaagttgcatgtattt

SEQ ID NO: 756999 - DNA, 19 bp, Mus musculus
  siRNA target sequence for 9530020D24Rik (NM_145522.2,642-660).
ggtggcagcgggcacaaaa

SEQ ID NO: 757000 - DNA, 19 bp, Mus musculus
  siRNA target sequence for 9530020D24Rik (NM_145522.2,646-664).
gcagcgggcacaaaactct

SEQ ID NO: 757001 - DNA, 19 bp, Mus musculus
  siRNA target sequence for 9530020D24Rik (NM_145522.2,650-668).
cgggcacaaaactcttcat

SEQ ID NO: 757002 - DNA, 19 bp, Mus musculus
  siRNA target sequence for 9530020D24Rik (NM_145522.2,677-695).
gattggcaggggacaagtt

SEQ ID NO: 757003 - DNA, 19 bp, Mus musculus
  siRNA target sequence for 9530020D24Rik (NM_145522.2,703-721).
gatctccattgcattgata

SEQ ID NO: 757004 - DNA, 19 bp, Mus musculus
  siRNA target sequence for 9530020D24Rik (NM_145522.2,797-815).
ctgtgggacaccatgtata

SEQ ID NO: 757005 - DNA, 19 bp, Mus musculus
  siRNA target sequence for 9530020D24Rik (NM_145522.2,799-817).
gtgggacaccatgtatata

SEQ ID NO: 757006 - DNA, 19 bp, Mus musculus
  siRNA target sequence for 9530020D24Rik (NM_145522.2,802-820).
ggacaccatgtatatatgt

SEQ ID NO: 757007 - DNA, 19 bp, Mus musculus
  siRNA target sequence for 9530020D24Rik (NM_145522.2,841-859).
ggagcactgaacatgatgt

SEQ ID NO: 757008 - DNA, 19 bp, Mus musculus
  siRNA target sequence for 9530020D24Rik (NM_145522.2,842-860).
gagcactgaacatgatgta

SEQ ID NO: 757009 - DNA, 19 bp, Mus musculus
  siRNA target sequence for 9530020D24Rik (NM_145522.2,847-865).
ctgaacatgatgtacaagt

SEQ ID NO: 757010 - DNA, 19 bp, Mus musculus
  siRNA target sequence for 9530020D24Rik (NM_145522.2,887-905).
ggactgtacttcagtttga

SEQ ID NO: 757011 - DNA, 19 bp, Mus musculus
  siRNA target sequence for 9530020D24Rik (NM_145522.2,966-984).
gtctacctctgagaataaa

SEQ ID NO: 757012 - DNA, 19 bp, Mus musculus
  siRNA target sequence for 9530020D24Rik (NM_145522.2,1119-1137).
cacagaaggggaggtttat

SEQ ID NO: 757013 - DNA, 19 bp, Mus musculus
  siRNA target sequence for 9530020D24Rik (NM_145522.2,1140-1158).
cgactgtctcgtaactgta

SEQ ID NO: 757014 - DNA, 19 bp, Mus musculus
  siRNA target sequence for BC004636 (NM_145524.1,346-364).
cgcagctagaaaaaaggta

SEQ ID NO: 757015 - DNA, 19 bp, Mus musculus
  siRNA target sequence for BC004636 (NM_145524.1,449-467).
cagacccataagaataagt

SEQ ID NO: 757016 - DNA, 19 bp, Mus musculus
  siRNA target sequence for BC004636 (NM_145524.1,451-469).
gacccataagaataagttt

SEQ ID NO: 757017 - DNA, 19 bp, Mus musculus
  siRNA target sequence for BC004636 (NM_145524.1,466-484).
gtttttcaagaatcgtaat

SEQ ID NO: 757018 - DNA, 19 bp, Mus musculus
  siRNA target sequence for BC004636 (NM_145524.1,566-584).
gtcggaagcagcatctcta

SEQ ID NO: 757019 - DNA, 19 bp, Mus musculus
  siRNA target sequence for BC004636 (NM_145524.1,594-612).
gaacagaaacccattgtca

SEQ ID NO: 757020 - DNA, 19 bp, Mus musculus
  siRNA target sequence for BC004636 (NM_145524.1,603-621).
cccattgtcaagagagttt

SEQ ID NO: 757021 - DNA, 19 bp, Mus musculus
  siRNA target sequence for BC004636 (NM_145524.1,706-724).
gccgtttcctggtagcaat

SEQ ID NO: 757022 - DNA, 19 bp, Mus musculus
  siRNA target sequence for BC004636 (NM_145524.1,726-744).
ccacttttcgaatactaga

SEQ ID NO: 757023 - DNA, 19 bp, Mus musculus
  siRNA target sequence for BC004636 (NM_145524.1,749-767).
ggctgtggtgctggaaata

SEQ ID NO: 757024 - DNA, 19 bp, Mus musculus
  siRNA target sequence for BC004636 (NM_145524.1,761-779).
ggaaatagcgtgtttccaa

SEQ ID NO: 757025 - DNA, 19 bp, Mus musculus
  siRNA target sequence for BC004636 (NM_145524.1,762-780).
gaaatagcgtgtttccaat

SEQ ID NO: 757026 - DNA, 19 bp, Mus musculus
  siRNA target sequence for BC004636 (NM_145524.1,968-986).
gtctttgtgctctcatcta

SEQ ID NO: 757027 - DNA, 19 bp, Mus musculus
  siRNA target sequence for D2Ertd391e (NM_145528.1,377-395).
gacttggacaagtttatta

SEQ ID NO: 757028 - DNA, 19 bp, Mus musculus
  siRNA target sequence for D2Ertd391e (NM_145528.1,434-452).
gctcgacttggagaaaaga

SEQ ID NO: 757029 - DNA, 19 bp, Mus musculus
  siRNA target sequence for D2Ertd391e (NM_145528.1,477-495).
cgacgggttcagattggtt

SEQ ID NO: 757030 - DNA, 19 bp, Mus musculus
  siRNA target sequence for D2Ertd391e (NM_145528.1,488-506).
gattggttcaatttagcaa

SEQ ID NO: 757031 - DNA, 19 bp, Mus musculus
  siRNA target sequence for D2Ertd391e (NM_145528.1,564-582).
ctgctgtggggcgatctat

SEQ ID NO: 757032 - DNA, 19 bp, Mus musculus
  siRNA target sequence for D2Ertd391e (NM_145528.1,566-584).
gctgtggggcgatctatgt

SEQ ID NO: 757033 - DNA, 19 bp, Mus musculus
  siRNA target sequence for D2Ertd391e (NM_145528.1,590-608).
gaaatctcactcaagactt

SEQ ID NO: 757034 - DNA, 19 bp, Mus musculus
  siRNA target sequence for D2Ertd391e (NM_145528.1,604-622).
gacttctgagggagattct

SEQ ID NO: 757035 - DNA, 19 bp, Mus musculus
  siRNA target sequence for D2Ertd391e (NM_145528.1,606-624).
cttctgagggagattctat

SEQ ID NO: 757036 - DNA, 19 bp, Mus musculus
  siRNA target sequence for D2Ertd391e (NM_145528.1,617-635).
gattctatggagttggaaa

SEQ ID NO: 757037 - DNA, 19 bp, Mus musculus
  siRNA target sequence for D2Ertd391e (NM_145528.1,639-657).
ggtgtcttgaaatgaatga

SEQ ID NO: 757038 - DNA, 19 bp, Mus musculus
  siRNA target sequence for D2Ertd391e (NM_145528.1,640-658).
gtgtcttgaaatgaatgaa

SEQ ID NO: 757039 - DNA, 19 bp, Mus musculus
  siRNA target sequence for D2Ertd391e (NM_145528.1,772-790).
gcaagggcatgaatatgta

SEQ ID NO: 757040 - DNA, 19 bp, Mus musculus
  siRNA target sequence for D2Ertd391e (NM_145528.1,776-794).
gggcatgaatatgtaattt

SEQ ID NO: 757041 - DNA, 19 bp, Mus musculus
  siRNA target sequence for D2Ertd391e (NM_145528.1,959-977).
cctatcatggggattatca

SEQ ID NO: 757042 - DNA, 19 bp, Mus musculus
  siRNA target sequence for D2Ertd391e (NM_145528.1,964-982).
catggggattatcattgat

SEQ ID NO: 757043 - DNA, 19 bp, Mus musculus
  siRNA target sequence for D2Ertd391e (NM_145528.1,1319-1337).
gacatcttggagactatct

SEQ ID NO: 757044 - DNA, 19 bp, Mus musculus
  siRNA target sequence for D2Ertd391e (NM_145528.1,1332-1350).
ctatctttgtccgaaaagt

SEQ ID NO: 757045 - DNA, 19 bp, Mus musculus
  siRNA target sequence for D2Ertd391e (NM_145528.1,1342-1360).
ccgaaaagtgggagcattt

SEQ ID NO: 757046 - DNA, 19 bp, Mus musculus
  siRNA target sequence for D2Ertd391e (NM_145528.1,1392-1410).
cgagtttggacataccttt

SEQ ID NO: 757047 - DNA, 19 bp, Mus musculus
  siRNA target sequence for D2Ertd391e (NM_145528.1,1402-1420).
catacctttcgccatgttt

SEQ ID NO: 757048 - DNA, 19 bp, Mus musculus
  siRNA target sequence for D2Ertd391e (NM_145528.1,1414-1432).
catgtttgctcccaagaat

SEQ ID NO: 757049 - DNA, 19 bp, Mus musculus
  siRNA target sequence for D2Ertd391e (NM_145528.1,1545-1563).
gcacacatgacgactttgt

SEQ ID NO: 757050 - DNA, 19 bp, Mus musculus
  siRNA target sequence for D2Ertd391e (NM_145528.1,1548-1566).
cacatgacgactttgttat

SEQ ID NO: 757051 - DNA, 19 bp, Mus musculus
  siRNA target sequence for D2Ertd391e (NM_145528.1,1550-1568).
catgacgactttgttatga

SEQ ID NO: 757052 - DNA, 19 bp, Mus musculus
  siRNA target sequence for D2Ertd391e (NM_145528.1,1571-1589).
gactttaaaccagcttttt

SEQ ID NO: 757053 - DNA, 19 bp, Mus musculus
  siRNA target sequence for D2Ertd391e (NM_145528.1,1659-1677).
gcagcctctccatagattt

SEQ ID NO: 757054 - DNA, 19 bp, Mus musculus
  siRNA target sequence for D2Ertd391e (NM_145528.1,1663-1681).
cctctccatagattttgga

SEQ ID NO: 757055 - DNA, 19 bp, Mus musculus
  siRNA target sequence for D2Ertd391e (NM_145528.1,1685-1703).
cagtctatggcggaagatt

SEQ ID NO: 757056 - DNA, 19 bp, Mus musculus
  siRNA target sequence for D2Ertd391e (NM_145528.1,1741-1759).
gaatgtccgagaattcgat

SEQ ID NO: 757057 - DNA, 19 bp, Mus musculus
  siRNA target sequence for C77668 (NM_145540.2,783-801).
gggaggctgctactttcaa

SEQ ID NO: 757058 - DNA, 19 bp, Mus musculus
  siRNA target sequence for C77668 (NM_145540.2,884-902).
cgagagagaggccaatgat

SEQ ID NO: 757059 - DNA, 19 bp, Mus musculus
  siRNA target sequence for C77668 (NM_145540.2,952-970).
gcctaggcctgtttactct

SEQ ID NO: 757060 - DNA, 19 bp, Mus musculus
  siRNA target sequence for C77668 (NM_145540.2,987-1005).
gcccaagcccagaagtgtt

SEQ ID NO: 757061 - DNA, 19 bp, Mus musculus
  siRNA target sequence for C77668 (NM_145540.2,988-1006).
cccaagcccagaagtgtta

SEQ ID NO: 757062 - DNA, 19 bp, Mus musculus
  siRNA target sequence for C77668 (NM_145540.2,1068-1086).
ctacttatggagaagtact

SEQ ID NO: 757063 - DNA, 19 bp, Mus musculus
  siRNA target sequence for C77668 (NM_145540.2,1123-1141).
ggttggttcgggaactagt

SEQ ID NO: 757064 - DNA, 19 bp, Mus musculus
  siRNA target sequence for C77668 (NM_145540.2,1124-1142).
gttggttcgggaactagta

SEQ ID NO: 757065 - DNA, 19 bp, Mus musculus
  siRNA target sequence for C77668 (NM_145540.2,1128-1146).
gttcgggaactagtaaaga

SEQ ID NO: 757066 - DNA, 19 bp, Mus musculus
  siRNA target sequence for C77668 (NM_145540.2,1164-1182).
gatggcgtttgcatgacat

SEQ ID NO: 757067 - DNA, 19 bp, Mus musculus
  siRNA target sequence for C77668 (NM_145540.2,1168-1186).
gcgtttgcatgacatttat

SEQ ID NO: 757068 - DNA, 19 bp, Mus musculus
  siRNA target sequence for C77668 (NM_145540.2,1170-1188).
gtttgcatgacatttatga

SEQ ID NO: 757069 - DNA, 19 bp, Mus musculus
  siRNA target sequence for C77668 (NM_145540.2,1313-1331).
cacgtacctccgacttatt

SEQ ID NO: 757070 - DNA, 19 bp, Mus musculus
  siRNA target sequence for C77668 (NM_145540.2,1315-1333).
cgtacctccgacttattgt

SEQ ID NO: 757071 - DNA, 19 bp, Mus musculus
  siRNA target sequence for C77668 (NM_145540.2,1404-1422).
cgggaacggttcatggaat

SEQ ID NO: 757072 - DNA, 19 bp, Mus musculus
  siRNA target sequence for C77668 (NM_145540.2,1407-1425).
gaacggttcatggaatgtt

SEQ ID NO: 757073 - DNA, 19 bp, Mus musculus
  siRNA target sequence for C77668 (NM_145540.2,1410-1428).
cggttcatggaatgtttga

SEQ ID NO: 757074 - DNA, 19 bp, Mus musculus
  siRNA target sequence for C77668 (NM_145540.2,1488-1506).
ctactgtggaaagatatca

SEQ ID NO: 757075 - DNA, 19 bp, Mus musculus
  siRNA target sequence for C77668 (NM_145540.2,1495-1513).
ggaaagatatcatccataa

SEQ ID NO: 757076 - DNA, 19 bp, Mus musculus
  siRNA target sequence for C77668 (NM_145540.2,1523-1541).
cttgagtcctcagtttaca

SEQ ID NO: 757077 - DNA, 19 bp, Mus musculus
  siRNA target sequence for C77668 (NM_145540.2,1551-1569).
cagctacttcagtcaagaa

SEQ ID NO: 757078 - DNA, 19 bp, Mus musculus
  siRNA target sequence for C77668 (NM_145540.2,1567-1585).
gaacatcccgaaaatttct

SEQ ID NO: 757079 - DNA, 19 bp, Mus musculus
  siRNA target sequence for C77668 (NM_145540.2,1719-1737).
cgctgtgacctcattcgat

SEQ ID NO: 757080 - DNA, 19 bp, Mus musculus
  siRNA target sequence for C77668 (NM_145540.2,1720-1738).
gctgtgacctcattcgata

SEQ ID NO: 757081 - DNA, 19 bp, Mus musculus
  siRNA target sequence for C77668 (NM_145540.2,1723-1741).
gtgacctcattcgatacat

SEQ ID NO: 757082 - DNA, 19 bp, Mus musculus
  siRNA target sequence for C77668 (NM_145540.2,1891-1909).
gcccagaaaaggatagtat

SEQ ID NO: 757083 - DNA, 19 bp, Mus musculus
  siRNA target sequence for C77668 (NM_145540.2,1892-1910).
cccagaaaaggatagtatt

SEQ ID NO: 757084 - DNA, 19 bp, Mus musculus
  siRNA target sequence for C77668 (NM_145540.2,1893-1911).
ccagaaaaggatagtatta

SEQ ID NO: 757085 - DNA, 19 bp, Mus musculus
  siRNA target sequence for C77668 (NM_145540.2,1894-1912).
cagaaaaggatagtattat

SEQ ID NO: 757086 - DNA, 19 bp, Mus musculus
  siRNA target sequence for C77668 (NM_145540.2,1988-2006).
cttcatgtgccgaatcatt

SEQ ID NO: 757087 - DNA, 19 bp, Mus musculus
  siRNA target sequence for C77668 (NM_145540.2,1996-2014).
gccgaatcattcctaactt

SEQ ID NO: 757088 - DNA, 19 bp, Mus musculus
  siRNA target sequence for C77668 (NM_145540.2,1998-2016).
cgaatcattcctaacttct

SEQ ID NO: 757089 - DNA, 19 bp, Mus musculus
  siRNA target sequence for C77668 (NM_145540.2,2012-2030).
cttctacccaccattggaa

SEQ ID NO: 757090 - DNA, 19 bp, Mus musculus
  siRNA target sequence for C77668 (NM_145540.2,2036-2054).
cgttcggcagggtgtcttt

SEQ ID NO: 757091 - DNA, 19 bp, Mus musculus
  siRNA target sequence for C77668 (NM_145540.2,2037-2055).
gttcggcagggtgtctttt

SEQ ID NO: 757092 - DNA, 19 bp, Mus musculus
  siRNA target sequence for C77668 (NM_145540.2,2106-2124).
ctgtttgacaaccctaaat

SEQ ID NO: 757093 - DNA, 19 bp, Mus musculus
  siRNA target sequence for C77668 (NM_145540.2,2112-2130).
gacaaccctaaattggata

SEQ ID NO: 757094 - DNA, 19 bp, Mus musculus
  siRNA target sequence for C77668 (NM_145540.2,2237-2255).
ccacctctcagataaggat

SEQ ID NO: 757095 - DNA, 19 bp, Mus musculus
  siRNA target sequence for C77668 (NM_145540.2,2253-2271).
gatgagagttgctatgaca

SEQ ID NO: 757096 - DNA, 19 bp, Mus musculus
  siRNA target sequence for C77668 (NM_145540.2,2295-2313).
gatgaggaggatcttaata

SEQ ID NO: 757097 - DNA, 19 bp, Mus musculus
  siRNA target sequence for C77668 (NM_145540.2,2298-2316).
gaggaggatcttaatagca

SEQ ID NO: 757098 - DNA, 19 bp, Mus musculus
  siRNA target sequence for C77668 (NM_145540.2,2629-2647).
ggaaaccactgtacctaat

SEQ ID NO: 757099 - DNA, 19 bp, Mus musculus
  siRNA target sequence for C77668 (NM_145540.2,2630-2648).
gaaaccactgtacctaata

SEQ ID NO: 757100 - DNA, 19 bp, Mus musculus
  siRNA target sequence for C77668 (NM_145540.2,2634-2652).
ccactgtacctaatattta

SEQ ID NO: 757101 - DNA, 19 bp, Mus musculus
  siRNA target sequence for C77668 (NM_145540.2,2637-2655).
ctgtacctaatatttagga

SEQ ID NO: 757102 - DNA, 19 bp, Mus musculus
  siRNA target sequence for C77668 (NM_145540.2,2713-2731).
ccgagctgtatcaaaagca

SEQ ID NO: 757103 - DNA, 19 bp, Mus musculus
  siRNA target sequence for C77668 (NM_145540.2,2714-2732).
cgagctgtatcaaaagcaa

SEQ ID NO: 757104 - DNA, 19 bp, Mus musculus
  siRNA target sequence for C77668 (NM_145540.2,2743-2761).
gctaccacctgctctacta

SEQ ID NO: 757105 - DNA, 19 bp, Mus musculus
  siRNA target sequence for C77668 (NM_145540.2,2759-2777).
ctacttgagggcaagcaaa

SEQ ID NO: 757106 - DNA, 19 bp, Mus musculus
  siRNA target sequence for C77668 (NM_145540.2,2835-2853).
gatctgcacacctgtctaa

SEQ ID NO: 757107 - DNA, 19 bp, Mus musculus
  siRNA target sequence for C77668 (NM_145540.2,3055-3073).
cagtcctcaacatactcat

SEQ ID NO: 757108 - DNA, 19 bp, Mus musculus
  siRNA target sequence for C77668 (NM_145540.2,3060-3078).
ctcaacatactcattcaga

SEQ ID NO: 757109 - DNA, 19 bp, Mus musculus
  siRNA target sequence for C77668 (NM_145540.2,3079-3097).
gcctagactgggaaacgtt

SEQ ID NO: 757110 - DNA, 19 bp, Mus musculus
  siRNA target sequence for C77668 (NM_145540.2,3080-3098).
cctagactgggaaacgttt

SEQ ID NO: 757111 - DNA, 19 bp, Mus musculus
  siRNA target sequence for C77668 (NM_145540.2,3146-3164).
ggagaccattattcctatt

SEQ ID NO: 757112 - DNA, 19 bp, Mus musculus
  siRNA target sequence for C77668 (NM_145540.2,3487-3505).
ccaacaccaagcagaactt

SEQ ID NO: 757113 - DNA, 19 bp, Mus musculus
  siRNA target sequence for C77668 (NM_145540.2,3593-3611).
ctccctggcggaggaatat

SEQ ID NO: 757114 - DNA, 19 bp, Mus musculus
  siRNA target sequence for C77668 (NM_145540.2,3664-3682).
gccctcgaagtcgaaagaa

SEQ ID NO: 757115 - DNA, 19 bp, Mus musculus
  siRNA target sequence for C77668 (NM_145540.2,3669-3687).
cgaagtcgaaagaatgcta

SEQ ID NO: 757116 - DNA, 19 bp, Mus musculus
  siRNA target sequence for C77668 (NM_145540.2,3753-3771).
cctaagcctaccaaacgaa

SEQ ID NO: 757117 - DNA, 19 bp, Mus musculus
  siRNA target sequence for C77668 (NM_145540.2,3754-3772).
ctaagcctaccaaacgaaa

SEQ ID NO: 757118 - DNA, 19 bp, Mus musculus
  siRNA target sequence for Mclc (NM_145543.1,119-137).
gtcggctgctcctttgtga

SEQ ID NO: 757119 - DNA, 19 bp, Mus musculus
  siRNA target sequence for Mclc (NM_145543.1,147-165).
gctgataacgggttatgct

SEQ ID NO: 757120 - DNA, 19 bp, Mus musculus
  siRNA target sequence for Mclc (NM_145543.1,155-173).
cgggttatgctcatgatga

SEQ ID NO: 757121 - DNA, 19 bp, Mus musculus
  siRNA target sequence for Mclc (NM_145543.1,179-197).
ggattgacccaacagatat

SEQ ID NO: 757122 - DNA, 19 bp, Mus musculus
  siRNA target sequence for Mclc (NM_145543.1,184-202).
gacccaacagatatgctta

SEQ ID NO: 757123 - DNA, 19 bp, Mus musculus
  siRNA target sequence for Mclc (NM_145543.1,187-205).
ccaacagatatgcttaact

SEQ ID NO: 757124 - DNA, 19 bp, Mus musculus
  siRNA target sequence for Mclc (NM_145543.1,188-206).
caacagatatgcttaacta

SEQ ID NO: 757125 - DNA, 19 bp, Mus musculus
  siRNA target sequence for Mclc (NM_145543.1,339-357).
caaggttgatagttgtgaa

SEQ ID NO: 757126 - DNA, 19 bp, Mus musculus
  siRNA target sequence for Mclc (NM_145543.1,383-401).
gtcaaagtaatcctgtttt

SEQ ID NO: 757127 - DNA, 19 bp, Mus musculus
  siRNA target sequence for Mclc (NM_145543.1,405-423).
gagatatctaaataagatt

SEQ ID NO: 757128 - DNA, 19 bp, Mus musculus
  siRNA target sequence for Mclc (NM_145543.1,474-492).
gcgttacgatgctgagatt

SEQ ID NO: 757129 - DNA, 19 bp, Mus musculus
  siRNA target sequence for Mclc (NM_145543.1,476-494).
gttacgatgctgagattct

SEQ ID NO: 757130 - DNA, 19 bp, Mus musculus
  siRNA target sequence for Mclc (NM_145543.1,561-579).
cctggacgacgcactaagt

SEQ ID NO: 757131 - DNA, 19 bp, Mus musculus
  siRNA target sequence for Mclc (NM_145543.1,567-585).
cgacgcactaagtgacatt

SEQ ID NO: 757132 - DNA, 19 bp, Mus musculus
  siRNA target sequence for Mclc (NM_145543.1,568-586).
gacgcactaagtgacattt

SEQ ID NO: 757133 - DNA, 19 bp, Mus musculus
  siRNA target sequence for Mclc (NM_145543.1,624-642).
gtggcagtttgaagattat

SEQ ID NO: 757134 - DNA, 19 bp, Mus musculus
  siRNA target sequence for Mclc (NM_145543.1,626-644).
ggcagtttgaagattattt

SEQ ID NO: 757135 - DNA, 19 bp, Mus musculus
  siRNA target sequence for Mclc (NM_145543.1,627-645).
gcagtttgaagattatttt

SEQ ID NO: 757136 - DNA, 19 bp, Mus musculus
  siRNA target sequence for Mclc (NM_145543.1,656-674).
catataatgtgtttatggt

SEQ ID NO: 757137 - DNA, 19 bp, Mus musculus
  siRNA target sequence for Mclc (NM_145543.1,743-761).
cacagatgaaacggatttt

SEQ ID NO: 757138 - DNA, 19 bp, Mus musculus
  siRNA target sequence for Mclc (NM_145543.1,782-800).
gtttagcatggaattggat

SEQ ID NO: 757139 - DNA, 19 bp, Mus musculus
  siRNA target sequence for Mclc (NM_145543.1,788-806).
catggaattggatatatct

SEQ ID NO: 757140 - DNA, 19 bp, Mus musculus
  siRNA target sequence for Mclc (NM_145543.1,791-809).
ggaattggatatatctgta

SEQ ID NO: 757141 - DNA, 19 bp, Mus musculus
  siRNA target sequence for Mclc (NM_145543.1,792-810).
gaattggatatatctgtat

SEQ ID NO: 757142 - DNA, 19 bp, Mus musculus
  siRNA target sequence for Mclc (NM_145543.1,852-870).
ggagcctttcgacaattta

SEQ ID NO: 757143 - DNA, 19 bp, Mus musculus
  siRNA target sequence for Mclc (NM_145543.1,855-873).
gcctttcgacaatttatgt

SEQ ID NO: 757144 - DNA, 19 bp, Mus musculus
  siRNA target sequence for Mclc (NM_145543.1,903-921).
ctgggaatggtttacaagt

SEQ ID NO: 757145 - DNA, 19 bp, Mus musculus
  siRNA target sequence for Mclc (NM_145543.1,917-935).
caagttcatggacctataa

SEQ ID NO: 757146 - DNA, 19 bp, Mus musculus
  siRNA target sequence for Mclc (NM_145543.1,920-938).
gttcatggacctataagga

SEQ ID NO: 757147 - DNA, 19 bp, Mus musculus
  siRNA target sequence for Mclc (NM_145543.1,937-955).
gatgacccatgccaaaagt

SEQ ID NO: 757148 - DNA, 19 bp, Mus musculus
  siRNA target sequence for Mclc (NM_145543.1,940-958).
gacccatgccaaaagtact

SEQ ID NO: 757149 - DNA, 19 bp, Mus musculus
  siRNA target sequence for Mclc (NM_145543.1,942-960).
cccatgccaaaagtactat

SEQ ID NO: 757150 - DNA, 19 bp, Mus musculus
  siRNA target sequence for Mclc (NM_145543.1,944-962).
catgccaaaagtactatga

SEQ ID NO: 757151 - DNA, 19 bp, Mus musculus
  siRNA target sequence for Mclc (NM_145543.1,954-972).
gtactatgagctcctaata

SEQ ID NO: 757152 - DNA, 19 bp, Mus musculus
  siRNA target sequence for Mclc (NM_145543.1,967-985).
ctaatagtcaaccctattt

SEQ ID NO: 757153 - DNA, 19 bp, Mus musculus
  siRNA target sequence for Mclc (NM_145543.1,1009-1027).
ctggcgattacattcacta

SEQ ID NO: 757154 - DNA, 19 bp, Mus musculus
  siRNA target sequence for Mclc (NM_145543.1,1012-1030).
gcgattacattcactaact

SEQ ID NO: 757155 - DNA, 19 bp, Mus musculus
  siRNA target sequence for Mclc (NM_145543.1,1013-1031).
cgattacattcactaactt

SEQ ID NO: 757156 - DNA, 19 bp, Mus musculus
  siRNA target sequence for Mclc (NM_145543.1,1014-1032).
gattacattcactaacttt

SEQ ID NO: 757157 - DNA, 19 bp, Mus musculus
  siRNA target sequence for Mclc (NM_145543.1,1029-1047).
ctttgtaacggaaccatta

SEQ ID NO: 757158 - DNA, 19 bp, Mus musculus
  siRNA target sequence for Mclc (NM_145543.1,1042-1060).
ccattaaagcacattggaa

SEQ ID NO: 757159 - DNA, 19 bp, Mus musculus
  siRNA target sequence for Mclc (NM_145543.1,1043-1061).
cattaaagcacattggaaa

SEQ ID NO: 757160 - DNA, 19 bp, Mus musculus
  siRNA target sequence for Mclc (NM_145543.1,1063-1081).
ggagcaggtgaattcatta

SEQ ID NO: 757161 - DNA, 19 bp, Mus musculus
  siRNA target sequence for Mclc (NM_145543.1,1169-1187).
ctggaaggtcagttcctat

SEQ ID NO: 757162 - DNA, 19 bp, Mus musculus
  siRNA target sequence for Mclc (NM_145543.1,1255-1273).
cagaagggacttgactata

SEQ ID NO: 757163 - DNA, 19 bp, Mus musculus
  siRNA target sequence for Mclc (NM_145543.1,1257-1275).
gaagggacttgactataga

SEQ ID NO: 757164 - DNA, 19 bp, Mus musculus
  siRNA target sequence for Mclc (NM_145543.1,1286-1304).
gagcaggtgatgcagattt

SEQ ID NO: 757165 - DNA, 19 bp, Mus musculus
  siRNA target sequence for Mclc (NM_145543.1,1288-1306).
gcaggtgatgcagatttct

SEQ ID NO: 757166 - DNA, 19 bp, Mus musculus
  siRNA target sequence for Mclc (NM_145543.1,1291-1309).
ggtgatgcagatttctctt

SEQ ID NO: 757167 - DNA, 19 bp, Mus musculus
  siRNA target sequence for Mclc (NM_145543.1,1292-1310).
gtgatgcagatttctctta

SEQ ID NO: 757168 - DNA, 19 bp, Mus musculus
  siRNA target sequence for Mclc (NM_145543.1,1294-1312).
gatgcagatttctcttaca

SEQ ID NO: 757169 - DNA, 19 bp, Mus musculus
  siRNA target sequence for Mclc (NM_145543.1,1333-1351).
gagcaaggcccttatgaca

SEQ ID NO: 757170 - DNA, 19 bp, Mus musculus
  siRNA target sequence for Mclc (NM_145543.1,1417-1435).
gtgctccgggcatttgact

SEQ ID NO: 757171 - DNA, 19 bp, Mus musculus
  siRNA target sequence for Mclc (NM_145543.1,1419-1437).
gctccgggcatttgactta

SEQ ID NO: 757172 - DNA, 19 bp, Mus musculus
  siRNA target sequence for Mclc (NM_145543.1,1470-1488).
ggtccccagccataaatca

SEQ ID NO: 757173 - DNA, 19 bp, Mus musculus
  siRNA target sequence for Mclc (NM_145543.1,1480-1498).
cataaatcacccattatga

SEQ ID NO: 757174 - DNA, 19 bp, Mus musculus
  siRNA target sequence for Mclc (NM_145543.1,1531-1549).
gaaagcaccccgacagaat

SEQ ID NO: 757175 - DNA, 19 bp, Mus musculus
  siRNA target sequence for Mclc (NM_145543.1,1585-1603).
cccagcgctggcaaaagct

SEQ ID NO: 757176 - DNA, 19 bp, Mus musculus
  siRNA target sequence for Rap1gds1 (NM_145544.1,185-203).
cagttgtttgcaaatctgt

SEQ ID NO: 757177 - DNA, 19 bp, Mus musculus
  siRNA target sequence for Rap1gds1 (NM_145544.1,285-303).
gtgtagatgctggattgat

SEQ ID NO: 757178 - DNA, 19 bp, Mus musculus
  siRNA target sequence for Rap1gds1 (NM_145544.1,311-329).
ctggtacagctgttaaata

SEQ ID NO: 757179 - DNA, 19 bp, Mus musculus
  siRNA target sequence for Rap1gds1 (NM_145544.1,371-389).
ggaaacatatgctacgata

SEQ ID NO: 757180 - DNA, 19 bp, Mus musculus
  siRNA target sequence for Rap1gds1 (NM_145544.1,397-415).
ccttcaggcccagcttatt

SEQ ID NO: 757181 - DNA, 19 bp, Mus musculus
  siRNA target sequence for Rap1gds1 (NM_145544.1,398-416).
cttcaggcccagcttatta

SEQ ID NO: 757182 - DNA, 19 bp, Mus musculus
  siRNA target sequence for Rap1gds1 (NM_145544.1,401-419).
caggcccagcttattagca

SEQ ID NO: 757183 - DNA, 19 bp, Mus musculus
  siRNA target sequence for Rap1gds1 (NM_145544.1,425-443).
gttatcccgaccttagtga

SEQ ID NO: 757184 - DNA, 19 bp, Mus musculus
  siRNA target sequence for Rap1gds1 (NM_145544.1,493-511).
cgttgcgttcgggaattta

SEQ ID NO: 757185 - DNA, 19 bp, Mus musculus
  siRNA target sequence for Rap1gds1 (NM_145544.1,502-520).
cgggaatttagcagaactt

SEQ ID NO: 757186 - DNA, 19 bp, Mus musculus
  siRNA target sequence for Rap1gds1 (NM_145544.1,504-522).
ggaatttagcagaacttga

SEQ ID NO: 757187 - DNA, 19 bp, Mus musculus
  siRNA target sequence for Rap1gds1 (NM_145544.1,512-530).
gcagaacttgagtcaagta

SEQ ID NO: 757188 - DNA, 19 bp, Mus musculus
  siRNA target sequence for Rap1gds1 (NM_145544.1,598-616).
cgataaaagagagatgatt

SEQ ID NO: 757189 - DNA, 19 bp, Mus musculus
  siRNA target sequence for Rap1gds1 (NM_145544.1,599-617).
gataaaagagagatgattt

SEQ ID NO: 757190 - DNA, 19 bp, Mus musculus
  siRNA target sequence for Rap1gds1 (NM_145544.1,667-685).
ggttgaagcaggtttggta

SEQ ID NO: 757191 - DNA, 19 bp, Mus musculus
  siRNA target sequence for Rap1gds1 (NM_145544.1,736-754).
cgacgttgccgagcttaaa

SEQ ID NO: 757192 - DNA, 19 bp, Mus musculus
  siRNA target sequence for Rap1gds1 (NM_145544.1,737-755).
gacgttgccgagcttaaaa

SEQ ID NO: 757193 - DNA, 19 bp, Mus musculus
  siRNA target sequence for Rap1gds1 (NM_145544.1,739-757).
cgttgccgagcttaaaact

SEQ ID NO: 757194 - DNA, 19 bp, Mus musculus
  siRNA target sequence for Rap1gds1 (NM_145544.1,762-780).
ctgacctcatggttttatt

SEQ ID NO: 757195 - DNA, 19 bp, Mus musculus
  siRNA target sequence for Rap1gds1 (NM_145544.1,794-812).
gagtccatgcagaaacttt

SEQ ID NO: 757196 - DNA, 19 bp, Mus musculus
  siRNA target sequence for Rap1gds1 (NM_145544.1,890-908).
ggggcattagccattgcaa

SEQ ID NO: 757197 - DNA, 19 bp, Mus musculus
  siRNA target sequence for Rap1gds1 (NM_145544.1,891-909).
gggcattagccattgcaaa

SEQ ID NO: 757198 - DNA, 19 bp, Mus musculus
  siRNA target sequence for Rap1gds1 (NM_145544.1,892-910).
ggcattagccattgcaaat

SEQ ID NO: 757199 - DNA, 19 bp, Mus musculus
  siRNA target sequence for Rap1gds1 (NM_145544.1,914-932).
gccaggaacgatggaaatt

SEQ ID NO: 757200 - DNA, 19 bp, Mus musculus
  siRNA target sequence for Rap1gds1 (NM_145544.1,918-936).
ggaacgatggaaattgtat

SEQ ID NO: 757201 - DNA, 19 bp, Mus musculus
  siRNA target sequence for Rap1gds1 (NM_145544.1,922-940).
cgatggaaattgtattcat

SEQ ID NO: 757202 - DNA, 19 bp, Mus musculus
  siRNA target sequence for Rap1gds1 (NM_145544.1,943-961).
ggtagacaatgggattgta

SEQ ID NO: 757203 - DNA, 19 bp, Mus musculus
  siRNA target sequence for Rap1gds1 (NM_145544.1,947-965).
gacaatgggattgtagaaa

SEQ ID NO: 757204 - DNA, 19 bp, Mus musculus
  siRNA target sequence for Rap1gds1 (NM_145544.1,1049-1067).
gccatcccagttgtaaata

SEQ ID NO: 757205 - DNA, 19 bp, Mus musculus
  siRNA target sequence for Rap1gds1 (NM_145544.1,1051-1069).
catcccagttgtaaataaa

SEQ ID NO: 757206 - DNA, 19 bp, Mus musculus
  siRNA target sequence for Rap1gds1 (NM_145544.1,1054-1072).
cccagttgtaaataaagca

SEQ ID NO: 757207 - DNA, 19 bp, Mus musculus
  siRNA target sequence for Rap1gds1 (NM_145544.1,1091-1109).
gtcacggagacggttttga

SEQ ID NO: 757208 - DNA, 19 bp, Mus musculus
  siRNA target sequence for Rap1gds1 (NM_145544.1,1093-1111).
cacggagacggttttgaaa

SEQ ID NO: 757209 - DNA, 19 bp, Mus musculus
  siRNA target sequence for Rap1gds1 (NM_145544.1,1101-1119).
cggttttgaaattccttaa

SEQ ID NO: 757210 - DNA, 19 bp, Mus musculus
  siRNA target sequence for Rap1gds1 (NM_145544.1,1131-1149).
ccccagttcagttcaaact

SEQ ID NO: 757211 - DNA, 19 bp, Mus musculus
  siRNA target sequence for Rap1gds1 (NM_145544.1,1148-1166).
ctcctgggaacgctaagaa

SEQ ID NO: 757212 - DNA, 19 bp, Mus musculus
  siRNA target sequence for Rap1gds1 (NM_145544.1,1154-1172).
ggaacgctaagaatgttaa

SEQ ID NO: 757213 - DNA, 19 bp, Mus musculus
  siRNA target sequence for Rap1gds1 (NM_145544.1,1155-1173).
gaacgctaagaatgttaat

SEQ ID NO: 757214 - DNA, 19 bp, Mus musculus
  siRNA target sequence for Rap1gds1 (NM_145544.1,1158-1176).
cgctaagaatgttaataga

SEQ ID NO: 757215 - DNA, 19 bp, Mus musculus
  siRNA target sequence for Rap1gds1 (NM_145544.1,1159-1177).
gctaagaatgttaatagat

SEQ ID NO: 757216 - DNA, 19 bp, Mus musculus
  siRNA target sequence for Rap1gds1 (NM_145544.1,1265-1283).
ggcgtgatgggcgaatcaa

SEQ ID NO: 757217 - DNA, 19 bp, Mus musculus
  siRNA target sequence for Rap1gds1 (NM_145544.1,1266-1284).
gcgtgatgggcgaatcaaa

SEQ ID NO: 757218 - DNA, 19 bp, Mus musculus
  siRNA target sequence for Rap1gds1 (NM_145544.1,1268-1286).
gtgatgggcgaatcaaaca

SEQ ID NO: 757219 - DNA, 19 bp, Mus musculus
  siRNA target sequence for Rap1gds1 (NM_145544.1,1303-1321).
catccgacacagtaaatca

SEQ ID NO: 757220 - DNA, 19 bp, Mus musculus
  siRNA target sequence for Rap1gds1 (NM_145544.1,1308-1326).
gacacagtaaatcaaaaga

SEQ ID NO: 757221 - DNA, 19 bp, Mus musculus
  siRNA target sequence for Rap1gds1 (NM_145544.1,1312-1330).
cagtaaatcaaaagatgta

SEQ ID NO: 757222 - DNA, 19 bp, Mus musculus
  siRNA target sequence for Rap1gds1 (NM_145544.1,1375-1393).
catggcaactagtgaacat

SEQ ID NO: 757223 - DNA, 19 bp, Mus musculus
  siRNA target sequence for Rap1gds1 (NM_145544.1,1378-1396).
ggcaactagtgaacatgta

SEQ ID NO: 757224 - DNA, 19 bp, Mus musculus
  siRNA target sequence for Rap1gds1 (NM_145544.1,1476-1494).
gtgctcagcttgttcagat

SEQ ID NO: 757225 - DNA, 19 bp, Mus musculus
  siRNA target sequence for Rap1gds1 (NM_145544.1,1529-1547).
ccggagatcaagtacaatt

SEQ ID NO: 757226 - DNA, 19 bp, Mus musculus
  siRNA target sequence for Rap1gds1 (NM_145544.1,1574-1592).
ggatccgaatctctataca

SEQ ID NO: 757227 - DNA, 19 bp, Mus musculus
  siRNA target sequence for Rap1gds1 (NM_145544.1,1584-1602).
ctctatacaaggaagtaca

SEQ ID NO: 757228 - DNA, 19 bp, Mus musculus
  siRNA target sequence for Rap1gds1 (NM_145544.1,1627-1645).
ctccaaacttcgaagtcat

SEQ ID NO: 757229 - DNA, 19 bp, Mus musculus
  siRNA target sequence for C030002N13Rik (NM_145550.1,88-106).
gctgtggatgacttacagt

SEQ ID NO: 757230 - DNA, 19 bp, Mus musculus
  siRNA target sequence for C030002N13Rik (NM_145550.1,99-117).
cttacagtttgaagaattt

SEQ ID NO: 757231 - DNA, 19 bp, Mus musculus
  siRNA target sequence for C030002N13Rik (NM_145550.1,148-166).
ccagatgctaccacgataa

SEQ ID NO: 757232 - DNA, 19 bp, Mus musculus
  siRNA target sequence for C030002N13Rik (NM_145550.1,151-169).
gatgctaccacgataaaca

SEQ ID NO: 757233 - DNA, 19 bp, Mus musculus
  siRNA target sequence for C030002N13Rik (NM_145550.1,172-190).
gaggaccccagtgtatctt

SEQ ID NO: 757234 - DNA, 19 bp, Mus musculus
  siRNA target sequence for C030002N13Rik (NM_145550.1,174-192).
ggaccccagtgtatctttt

SEQ ID NO: 757235 - DNA, 19 bp, Mus musculus
  siRNA target sequence for C030002N13Rik (NM_145550.1,304-322).
cccttctggacattcgaat

SEQ ID NO: 757236 - DNA, 19 bp, Mus musculus
  siRNA target sequence for C030002N13Rik (NM_145550.1,305-323).
ccttctggacattcgaata

SEQ ID NO: 757237 - DNA, 19 bp, Mus musculus
  siRNA target sequence for C030002N13Rik (NM_145550.1,319-337).
gaatactatcagacattct

SEQ ID NO: 757238 - DNA, 19 bp, Mus musculus
  siRNA target sequence for C030002N13Rik (NM_145550.1,388-406).
ccggttcctggaaagaact

SEQ ID NO: 757239 - DNA, 19 bp, Mus musculus
  siRNA target sequence for C030002N13Rik (NM_145550.1,389-407).
cggttcctggaaagaactt

SEQ ID NO: 757240 - DNA, 19 bp, Mus musculus
  siRNA target sequence for C030002N13Rik (NM_145550.1,426-444).
cagcaatccagatctctat

SEQ ID NO: 757241 - DNA, 19 bp, Mus musculus
  siRNA target sequence for C030002N13Rik (NM_145550.1,441-459).
ctatggtcccttttggata

SEQ ID NO: 757242 - DNA, 19 bp, Mus musculus
  siRNA target sequence for C030002N13Rik (NM_145550.1,471-489).
ggtctttgccatagcaatt

SEQ ID NO: 757243 - DNA, 19 bp, Mus musculus
  siRNA target sequence for C030002N13Rik (NM_145550.1,472-490).
gtctttgccatagcaatta

SEQ ID NO: 757244 - DNA, 19 bp, Mus musculus
  siRNA target sequence for C030002N13Rik (NM_145550.1,474-492).
ctttgccatagcaattagt

SEQ ID NO: 757245 - DNA, 19 bp, Mus musculus
  siRNA target sequence for C030002N13Rik (NM_145550.1,547-565).
cccgaattccagaaagtgt

SEQ ID NO: 757246 - DNA, 19 bp, Mus musculus
  siRNA target sequence for C030002N13Rik (NM_145550.1,651-669).
gatgagcatggtttcctat

SEQ ID NO: 757247 - DNA, 19 bp, Mus musculus
  siRNA target sequence for C030002N13Rik (NM_145550.1,698-716).
gctactcgctgttcatcta

SEQ ID NO: 757248 - DNA, 19 bp, Mus musculus
  siRNA target sequence for C030002N13Rik (NM_145550.1,699-717).
ctactcgctgttcatctat

SEQ ID NO: 757249 - DNA, 19 bp, Mus musculus
  siRNA target sequence for C030002N13Rik (NM_145550.1,796-814).
ggctctgtgttggtaatga

SEQ ID NO: 757250 - DNA, 19 bp, Mus musculus
  siRNA target sequence for C030002N13Rik (NM_145550.1,800-818).
ctgtgttggtaatgacatt

SEQ ID NO: 757251 - DNA, 19 bp, Mus musculus
  siRNA target sequence for C030002N13Rik (NM_145550.1,824-842).
cagctgttcgtgaggataa

SEQ ID NO: 757252 - DNA, 19 bp, Mus musculus
  siRNA target sequence for C030002N13Rik (NM_145550.1,908-926).
gcttggcttacttctttga

SEQ ID NO: 757253 - DNA, 19 bp, Mus musculus
  siRNA target sequence for C030002N13Rik (NM_145550.1,946-964).
ctcccagcagctataacca

SEQ ID NO: 757254 - DNA, 19 bp, Mus musculus
  siRNA target sequence for C030002N13Rik (NM_145550.1,979-997).
gtaacagcggccaaatcca

SEQ ID NO: 757255 - DNA, 19 bp, Mus musculus
  siRNA target sequence for BC003262 (NM_145552.1,189-207).
gagggatcggggcacaatt

SEQ ID NO: 757256 - DNA, 19 bp, Mus musculus
  siRNA target sequence for BC003262 (NM_145552.1,240-258).
caggaacagtcgtggtaaa

SEQ ID NO: 757257 - DNA, 19 bp, Mus musculus
  siRNA target sequence for BC003262 (NM_145552.1,246-264).
cagtcgtggtaaagtgatt

SEQ ID NO: 757258 - DNA, 19 bp, Mus musculus
  siRNA target sequence for BC003262 (NM_145552.1,248-266).
gtcgtggtaaagtgattaa

SEQ ID NO: 757259 - DNA, 19 bp, Mus musculus
  siRNA target sequence for BC003262 (NM_145552.1,310-328).
cgagtggagccgaatatta

SEQ ID NO: 757260 - DNA, 19 bp, Mus musculus
  siRNA target sequence for BC003262 (NM_145552.1,311-329).
gagtggagccgaatattaa

SEQ ID NO: 757261 - DNA, 19 bp, Mus musculus
  siRNA target sequence for BC003262 (NM_145552.1,313-331).
gtggagccgaatattaaat

SEQ ID NO: 757262 - DNA, 19 bp, Mus musculus
  siRNA target sequence for BC003262 (NM_145552.1,316-334).
gagccgaatattaaatggt

SEQ ID NO: 757263 - DNA, 19 bp, Mus musculus
  siRNA target sequence for BC003262 (NM_145552.1,351-369).
gatcaagcaggcatcatta

SEQ ID NO: 757264 - DNA, 19 bp, Mus musculus
  siRNA target sequence for BC003262 (NM_145552.1,357-375).
gcaggcatcattacaaaaa

SEQ ID NO: 757265 - DNA, 19 bp, Mus musculus
  siRNA target sequence for BC003262 (NM_145552.1,402-420).
gaaggatccatacaaagtt

SEQ ID NO: 757266 - DNA, 19 bp, Mus musculus
  siRNA target sequence for BC003262 (NM_145552.1,410-428).
catacaaagttgtcatgaa

SEQ ID NO: 757267 - DNA, 19 bp, Mus musculus
  siRNA target sequence for BC003262 (NM_145552.1,449-467).
ctcttctgcacgatcgaat

SEQ ID NO: 757268 - DNA, 19 bp, Mus musculus
  siRNA target sequence for BC003262 (NM_145552.1,482-500).
caaaagtccacattcttga

SEQ ID NO: 757269 - DNA, 19 bp, Mus musculus
  siRNA target sequence for BC003262 (NM_145552.1,489-507).
ccacattcttgatactgaa

SEQ ID NO: 757270 - DNA, 19 bp, Mus musculus
  siRNA target sequence for BC003262 (NM_145552.1,490-508).
cacattcttgatactgaaa

SEQ ID NO: 757271 - DNA, 19 bp, Mus musculus
  siRNA target sequence for BC003262 (NM_145552.1,542-560).
gaaagcggccaaacttgtt

SEQ ID NO: 757272 - DNA, 19 bp, Mus musculus
  siRNA target sequence for BC003262 (NM_145552.1,547-565).
cggccaaacttgtttgcaa

SEQ ID NO: 757273 - DNA, 19 bp, Mus musculus
  siRNA target sequence for BC003262 (NM_145552.1,583-601).
ctagaaaacgctgaaatgt

SEQ ID NO: 757274 - DNA, 19 bp, Mus musculus
  siRNA target sequence for BC003262 (NM_145552.1,586-604).
gaaaacgctgaaatgtcta

SEQ ID NO: 757275 - DNA, 19 bp, Mus musculus
  siRNA target sequence for BC003262 (NM_145552.1,645-663).
ggaggacactggtgtaaga

SEQ ID NO: 757276 - DNA, 19 bp, Mus musculus
  siRNA target sequence for BC003262 (NM_145552.1,694-712).
gggcagtcaaaaagaatat

SEQ ID NO: 757277 - DNA, 19 bp, Mus musculus
  siRNA target sequence for BC003262 (NM_145552.1,729-747).
ggtgatagactcatcagat

SEQ ID NO: 757278 - DNA, 19 bp, Mus musculus
  siRNA target sequence for BC003262 (NM_145552.1,794-812).
ccccccacatcgaagctta

SEQ ID NO: 757279 - DNA, 19 bp, Mus musculus
  siRNA target sequence for BC003262 (NM_145552.1,797-815).
cccacatcgaagcttactt

SEQ ID NO: 757280 - DNA, 19 bp, Mus musculus
  siRNA target sequence for BC003262 (NM_145552.1,799-817).
cacatcgaagcttacttga

SEQ ID NO: 757281 - DNA, 19 bp, Mus musculus
  siRNA target sequence for BC003262 (NM_145552.1,801-819).
catcgaagcttacttgaaa

SEQ ID NO: 757282 - DNA, 19 bp, Mus musculus
  siRNA target sequence for BC003262 (NM_145552.1,841-859).
ctcatttttgtactcaata

SEQ ID NO: 757283 - DNA, 19 bp, Mus musculus
  siRNA target sequence for BC003262 (NM_145552.1,1033-1051).
gggttcattggctatccaa

SEQ ID NO: 757284 - DNA, 19 bp, Mus musculus
  siRNA target sequence for BC003262 (NM_145552.1,1034-1052).
ggttcattggctatccaaa

SEQ ID NO: 757285 - DNA, 19 bp, Mus musculus
  siRNA target sequence for BC003262 (NM_145552.1,1065-1083).
ctctgtgattaatacatta

SEQ ID NO: 757286 - DNA, 19 bp, Mus musculus
  siRNA target sequence for BC003262 (NM_145552.1,1069-1087).
gtgattaatacattacgat

SEQ ID NO: 757287 - DNA, 19 bp, Mus musculus
  siRNA target sequence for BC003262 (NM_145552.1,1079-1097).
cattacgatccaagaaagt

SEQ ID NO: 757288 - DNA, 19 bp, Mus musculus
  siRNA target sequence for BC003262 (NM_145552.1,1127-1145).
caaaggtctggcagtatat

SEQ ID NO: 757289 - DNA, 19 bp, Mus musculus
  siRNA target sequence for BC003262 (NM_145552.1,1132-1150).
gtctggcagtatattacct

SEQ ID NO: 757290 - DNA, 19 bp, Mus musculus
  siRNA target sequence for BC003262 (NM_145552.1,1148-1166).
ccttgatgcgtcgtatatt

SEQ ID NO: 757291 - DNA, 19 bp, Mus musculus
  siRNA target sequence for BC003262 (NM_145552.1,1159-1177).
cgtatattcctgattgact

SEQ ID NO: 757292 - DNA, 19 bp, Mus musculus
  siRNA target sequence for BC003262 (NM_145552.1,1227-1245).
caaaggagtggttcaagtt

SEQ ID NO: 757293 - DNA, 19 bp, Mus musculus
  siRNA target sequence for BC003262 (NM_145552.1,1232-1250).
gagtggttcaagttgagaa

SEQ ID NO: 757294 - DNA, 19 bp, Mus musculus
  siRNA target sequence for BC003262 (NM_145552.1,1236-1254).
ggttcaagttgagaaaatt

SEQ ID NO: 757295 - DNA, 19 bp, Mus musculus
  siRNA target sequence for BC003262 (NM_145552.1,1294-1312).
gcaaagccagagtatatca

SEQ ID NO: 757296 - DNA, 19 bp, Mus musculus
  siRNA target sequence for BC003262 (NM_145552.1,1313-1331).
gcaagacgtacaagattga

SEQ ID NO: 757297 - DNA, 19 bp, Mus musculus
  siRNA target sequence for BC003262 (NM_145552.1,1341-1359).
gaacgcggaggactttctt

SEQ ID NO: 757298 - DNA, 19 bp, Mus musculus
  siRNA target sequence for BC003262 (NM_145552.1,1375-1393).
cgcactgggaagttactga

SEQ ID NO: 757299 - DNA, 19 bp, Mus musculus
  siRNA target sequence for BC003262 (NM_145552.1,1422-1440).
gagcaagatggttctcaat

SEQ ID NO: 757300 - DNA, 19 bp, Mus musculus
  siRNA target sequence for BC003262 (NM_145552.1,1454-1472).
gccgaatccctttctttgt

SEQ ID NO: 757301 - DNA, 19 bp, Mus musculus
  siRNA target sequence for BC003262 (NM_145552.1,1456-1474).
cgaatccctttctttgtca

SEQ ID NO: 757302 - DNA, 19 bp, Mus musculus
  siRNA target sequence for BC003262 (NM_145552.1,1457-1475).
gaatccctttctttgtcaa

SEQ ID NO: 757303 - DNA, 19 bp, Mus musculus
  siRNA target sequence for BC003262 (NM_145552.1,1673-1691).
cacgagttcgccagaactt

SEQ ID NO: 757304 - DNA, 19 bp, Mus musculus
  siRNA target sequence for BC003262 (NM_145552.1,1684-1702).
cagaactttggcaaaatca

SEQ ID NO: 757305 - DNA, 19 bp, Mus musculus
  siRNA target sequence for BC003262 (NM_145552.1,1908-1926).
caagtaccagaggtttcta

SEQ ID NO: 757306 - DNA, 19 bp, Mus musculus
  siRNA target sequence for BC003262 (NM_145552.1,1911-1929).
gtaccagaggtttctaaat

SEQ ID NO: 757307 - DNA, 19 bp, Mus musculus
  siRNA target sequence for BC003262 (NM_145552.1,1947-1965).
gttctctgccgtcagaata

SEQ ID NO: 757308 - DNA, 19 bp, Mus musculus
  siRNA target sequence for BC003262 (NM_145552.1,1952-1970).
ctgccgtcagaatatccaa

SEQ ID NO: 757309 - DNA, 19 bp, Mus musculus
  siRNA target sequence for BC003262 (NM_145552.1,1971-1989).
ggacttaagtgaaaaggtt

SEQ ID NO: 757310 - DNA, 19 bp, Mus musculus
  siRNA target sequence for BC003262 (NM_145552.1,1972-1990).
gacttaagtgaaaaggttt

SEQ ID NO: 757311 - DNA, 19 bp, Mus musculus
  siRNA target sequence for BC003262 (NM_145552.1,2035-2053).
gatgcagcacccaccaaaa

SEQ ID NO: 757312 - DNA, 19 bp, Mus musculus
  siRNA target sequence for BC003262 (NM_145552.1,2109-2127).
gatgctgacgtgtaaggaa

SEQ ID NO: 757313 - DNA, 19 bp, Mus musculus
  siRNA target sequence for BC003262 (NM_145552.1,2137-2155).
gcagcacggcagcaacaat

SEQ ID NO: 757314 - DNA, 19 bp, Mus musculus
  siRNA target sequence for BC003262 (NM_145552.1,2141-2159).
cacggcagcaacaatccaa

SEQ ID NO: 757315 - DNA, 19 bp, Mus musculus
  siRNA target sequence for BC003262 (NM_145552.1,2143-2161).
cggcagcaacaatccaaaa

SEQ ID NO: 757316 - DNA, 19 bp, Mus musculus
  siRNA target sequence for BC003262 (NM_145552.1,2144-2162).
ggcagcaacaatccaaaaa

SEQ ID NO: 757317 - DNA, 19 bp, Mus musculus
  siRNA target sequence for BC003262 (NM_145552.1,2145-2163).
gcagcaacaatccaaaaaa

SEQ ID NO: 757318 - DNA, 19 bp, Mus musculus
  siRNA target sequence for A330049M08Rik (NM_145555.1,734-752).
ccgtcttctcgctgaacat

SEQ ID NO: 757319 - DNA, 19 bp, Mus musculus
  siRNA target sequence for A330049M08Rik (NM_145555.1,760-778).
ggagaggacgccctgtata

SEQ ID NO: 757320 - DNA, 19 bp, Mus musculus
  siRNA target sequence for A330049M08Rik (NM_145555.1,761-779).
gagaggacgccctgtataa

SEQ ID NO: 757321 - DNA, 19 bp, Mus musculus
  siRNA target sequence for A330049M08Rik (NM_145555.1,763-781).
gaggacgccctgtataaga

SEQ ID NO: 757322 - DNA, 19 bp, Mus musculus
  siRNA target sequence for 9430015G10Rik (NM_145557.1,277-295).
ggatgtggtagacttcaat

SEQ ID NO: 757323 - DNA, 19 bp, Mus musculus
  siRNA target sequence for 9430015G10Rik (NM_145557.1,386-404).
gggaccctcccgacataca

SEQ ID NO: 757324 - DNA, 19 bp, Mus musculus
  siRNA target sequence for 9430015G10Rik (NM_145557.1,387-405).
ggaccctcccgacatacaa

SEQ ID NO: 757325 - DNA, 19 bp, Mus musculus
  siRNA target sequence for 9430015G10Rik (NM_145557.1,388-406).
gaccctcccgacatacaat

SEQ ID NO: 757326 - DNA, 19 bp, Mus musculus
  siRNA target sequence for 9430015G10Rik (NM_145557.1,471-489).
cacctggacagccacattt

SEQ ID NO: 757327 - DNA, 19 bp, Mus musculus
  siRNA target sequence for 9430015G10Rik (NM_145557.1,580-598).
caagcgctccagcaaactt

SEQ ID NO: 757328 - DNA, 19 bp, Mus musculus
  siRNA target sequence for 9430015G10Rik (NM_145557.1,591-609).
gcaaacttcctgaggtttt

SEQ ID NO: 757329 - DNA, 19 bp, Mus musculus
  siRNA target sequence for 9430015G10Rik (NM_145557.1,712-730).
gcagcacccagacaagaat

SEQ ID NO: 757330 - DNA, 19 bp, Mus musculus
  siRNA target sequence for 9430015G10Rik (NM_145557.1,734-752).
gacccttctgccttctcta

SEQ ID NO: 757331 - DNA, 19 bp, Mus musculus
  siRNA target sequence for Hadhb (NM_145558.1,513-531).
gctggtggtgttgagttaa

SEQ ID NO: 757332 - DNA, 19 bp, Mus musculus
  siRNA target sequence for C130090K23Rik (NM_145560.1,182-200).
ggactgagccccatgatct

SEQ ID NO: 757333 - DNA, 19 bp, Mus musculus
  siRNA target sequence for C130090K23Rik (NM_145560.1,183-201).
gactgagccccatgatcta

SEQ ID NO: 757334 - DNA, 19 bp, Mus musculus
  siRNA target sequence for C130090K23Rik (NM_145560.1,260-278).
ctctctccgatactcttaa

SEQ ID NO: 757335 - DNA, 19 bp, Mus musculus
  siRNA target sequence for C130090K23Rik (NM_145560.1,264-282).
ctccgatactcttaacaat

SEQ ID NO: 757336 - DNA, 19 bp, Mus musculus
  siRNA target sequence for C130090K23Rik (NM_145560.1,290-308).
ctctggaaactcgtcaata

SEQ ID NO: 757337 - DNA, 19 bp, Mus musculus
  siRNA target sequence for C130090K23Rik (NM_145560.1,294-312).
ggaaactcgtcaataagaa

SEQ ID NO: 757338 - DNA, 19 bp, Mus musculus
  siRNA target sequence for C130090K23Rik (NM_145560.1,475-493).
caaaatctggggattcatt

SEQ ID NO: 757339 - DNA, 19 bp, Mus musculus
  siRNA target sequence for C130090K23Rik (NM_145560.1,496-514).
gggacacgtccttcttctt

SEQ ID NO: 757340 - DNA, 19 bp, Mus musculus
  siRNA target sequence for C130090K23Rik (NM_145560.1,509-527).
cttcttgtcctccgaatat

SEQ ID NO: 757341 - DNA, 19 bp, Mus musculus
  siRNA target sequence for C130090K23Rik (NM_145560.1,518-536).
ctccgaatatggtacacat

SEQ ID NO: 757342 - DNA, 19 bp, Mus musculus
  siRNA target sequence for C130090K23Rik (NM_145560.1,521-539).
cgaatatggtacacatcat

SEQ ID NO: 757343 - DNA, 19 bp, Mus musculus
  siRNA target sequence for C130090K23Rik (NM_145560.1,545-563).
ccaatttggagctatcaga

SEQ ID NO: 757344 - DNA, 19 bp, Mus musculus
  siRNA target sequence for C130090K23Rik (NM_145560.1,546-564).
caatttggagctatcagat

SEQ ID NO: 757345 - DNA, 19 bp, Mus musculus
  siRNA target sequence for C130090K23Rik (NM_145560.1,673-691).
gggcaggacctctctatct

SEQ ID NO: 757346 - DNA, 19 bp, Mus musculus
  siRNA target sequence for C130090K23Rik (NM_145560.1,674-692).
ggcaggacctctctatcta

SEQ ID NO: 757347 - DNA, 19 bp, Mus musculus
  siRNA target sequence for C130090K23Rik (NM_145560.1,676-694).
caggacctctctatctagt

SEQ ID NO: 757348 - DNA, 19 bp, Mus musculus
  siRNA target sequence for C130090K23Rik (NM_145560.1,799-817).
cccagggccagatcctaat

SEQ ID NO: 757349 - DNA, 19 bp, Mus musculus
  siRNA target sequence for C130090K23Rik (NM_145560.1,803-821).
gggccagatcctaatcctt

SEQ ID NO: 757350 - DNA, 19 bp, Mus musculus
  siRNA target sequence for C130090K23Rik (NM_145560.1,859-877).
gatgctatcgggttcatca

SEQ ID NO: 757351 - DNA, 19 bp, Mus musculus
  siRNA target sequence for C130090K23Rik (NM_145560.1,870-888).
gttcatcatggcttcatga

SEQ ID NO: 757352 - DNA, 19 bp, Mus musculus
  siRNA target sequence for C130090K23Rik (NM_145560.1,986-1004).
gtctttacggggtctatgt

SEQ ID NO: 757353 - DNA, 19 bp, Mus musculus
  siRNA target sequence for C130090K23Rik (NM_145560.1,1062-1080).
ccactggcatgatccttta

SEQ ID NO: 757354 - DNA, 19 bp, Mus musculus
  siRNA target sequence for C130090K23Rik (NM_145560.1,1063-1081).
cactggcatgatcctttat

SEQ ID NO: 757355 - DNA, 19 bp, Mus musculus
  siRNA target sequence for C130090K23Rik (NM_145560.1,1065-1083).
ctggcatgatcctttatgt

SEQ ID NO: 757356 - DNA, 19 bp, Mus musculus
  siRNA target sequence for C130090K23Rik (NM_145560.1,1067-1085).
ggcatgatcctttatgttt

SEQ ID NO: 757357 - DNA, 19 bp, Mus musculus
  siRNA target sequence for C130090K23Rik (NM_145560.1,1068-1086).
gcatgatcctttatgtttt

SEQ ID NO: 757358 - DNA, 19 bp, Mus musculus
  siRNA target sequence for C130090K23Rik (NM_145560.1,1072-1090).
gatcctttatgttttacaa

SEQ ID NO: 757359 - DNA, 19 bp, Mus musculus
  siRNA target sequence for C130090K23Rik (NM_145560.1,1104-1122).
cctggtgcacagcgtttaa

SEQ ID NO: 757360 - DNA, 19 bp, Mus musculus
  siRNA target sequence for C130090K23Rik (NM_145560.1,1107-1125).
ggtgcacagcgtttaagtt

SEQ ID NO: 757361 - DNA, 19 bp, Mus musculus
  siRNA target sequence for C130090K23Rik (NM_145560.1,1110-1128).
gcacagcgtttaagtttgt

SEQ ID NO: 757362 - DNA, 19 bp, Mus musculus
  siRNA target sequence for C130090K23Rik (NM_145560.1,1136-1154).
ggtgtctacgctagagaaa

SEQ ID NO: 757363 - DNA, 19 bp, Mus musculus
  siRNA target sequence for C130090K23Rik (NM_145560.1,1139-1157).
gtctacgctagagaaagat

SEQ ID NO: 757364 - DNA, 19 bp, Mus musculus
  siRNA target sequence for C130090K23Rik (NM_145560.1,1144-1162).
cgctagagaaagatctgat

SEQ ID NO: 757365 - DNA, 19 bp, Mus musculus
  siRNA target sequence for C130090K23Rik (NM_145560.1,1163-1181).
gtgcttttggggaccataa

SEQ ID NO: 757366 - DNA, 19 bp, Mus musculus
  siRNA target sequence for C130090K23Rik (NM_145560.1,1171-1189).
ggggaccataatggtaatt

SEQ ID NO: 757367 - DNA, 19 bp, Mus musculus
  siRNA target sequence for C130090K23Rik (NM_145560.1,1172-1190).
gggaccataatggtaatta

SEQ ID NO: 757368 - DNA, 19 bp, Mus musculus
  siRNA target sequence for C130090K23Rik (NM_145560.1,1173-1191).
ggaccataatggtaattat

SEQ ID NO: 757369 - DNA, 19 bp, Mus musculus
  siRNA target sequence for C130090K23Rik (NM_145560.1,1183-1201).
ggtaattattggattgagt

SEQ ID NO: 757370 - DNA, 19 bp, Mus musculus
  siRNA target sequence for C130090K23Rik (NM_145560.1,1265-1283).
cttttgagatgcagtgaaa

SEQ ID NO: 757371 - DNA, 19 bp, Mus musculus
  siRNA target sequence for C130090K23Rik (NM_145560.1,1536-1554).
ggaacaacgacttaacaat

SEQ ID NO: 757372 - DNA, 19 bp, Mus musculus
  siRNA target sequence for C130090K23Rik (NM_145560.1,1700-1718).
gccataaccatgacagtta

SEQ ID NO: 757373 - DNA, 19 bp, Mus musculus
  siRNA target sequence for C130090K23Rik (NM_145560.1,1701-1719).
ccataaccatgacagttaa

SEQ ID NO: 757374 - DNA, 19 bp, Mus musculus
  siRNA target sequence for C130090K23Rik (NM_145560.1,1750-1768).
gacacactttgggaatcat

SEQ ID NO: 757375 - DNA, 19 bp, Mus musculus
  siRNA target sequence for C130090K23Rik (NM_145560.1,1752-1770).
cacactttgggaatcatga

SEQ ID NO: 757376 - DNA, 19 bp, Mus musculus
  siRNA target sequence for C130090K23Rik (NM_145560.1,1786-1804).
gaagctacaggctattgca

SEQ ID NO: 757377 - DNA, 19 bp, Mus musculus
  siRNA target sequence for C130090K23Rik (NM_145560.1,1814-1832).
ctgctgaaaaattgttcaa

SEQ ID NO: 757378 - DNA, 19 bp, Mus musculus
  siRNA target sequence for C130090K23Rik (NM_145560.1,1827-1845).
gttcaaatcaagtgatatt

SEQ ID NO: 757379 - DNA, 19 bp, Mus musculus
  siRNA target sequence for C130090K23Rik (NM_145560.1,1830-1848).
caaatcaagtgatatttct

SEQ ID NO: 757380 - DNA, 19 bp, Mus musculus
  siRNA target sequence for C130090K23Rik (NM_145560.1,1872-1890).
gttccagagattacataca

SEQ ID NO: 757381 - DNA, 19 bp, Mus musculus
  siRNA target sequence for C130090K23Rik (NM_145560.1,1875-1893).
ccagagattacatacaact

SEQ ID NO: 757382 - DNA, 19 bp, Mus musculus
  siRNA target sequence for C130090K23Rik (NM_145560.1,1885-1903).
catacaactcacaaaacat

SEQ ID NO: 757383 - DNA, 19 bp, Mus musculus
  siRNA target sequence for C130090K23Rik (NM_145560.1,1901-1919).
catggcaacgtgaaggata

SEQ ID NO: 757384 - DNA, 19 bp, Mus musculus
  siRNA target sequence for C130090K23Rik (NM_145560.1,1905-1923).
gcaacgtgaaggatattga

SEQ ID NO: 757385 - DNA, 19 bp, Mus musculus
  siRNA target sequence for C130090K23Rik (NM_145560.1,1941-1959).
gatggtgtgagtacatcat

SEQ ID NO: 757386 - DNA, 19 bp, Mus musculus
  siRNA target sequence for C130090K23Rik (NM_145560.1,2049-2067).
cggatgatcccgccaatta

SEQ ID NO: 757387 - DNA, 19 bp, Mus musculus
  siRNA target sequence for C130090K23Rik (NM_145560.1,2051-2069).
gatgatcccgccaattaca

SEQ ID NO: 757388 - DNA, 19 bp, Mus musculus
  siRNA target sequence for C130090K23Rik (NM_145560.1,2133-2151).
gatttggctcctacaaaga

SEQ ID NO: 757389 - DNA, 19 bp, Mus musculus
  siRNA target sequence for C130090K23Rik (NM_145560.1,2172-2190).
cccatcattttcacatgaa

SEQ ID NO: 757390 - DNA, 19 bp, Mus musculus
  siRNA target sequence for 9130213B05Rik (NM_145562.1,297-315).
gtctctctcatgacaaaaa

SEQ ID NO: 757391 - DNA, 19 bp, Mus musculus
  siRNA target sequence for 9130213B05Rik (NM_145562.1,519-537).
gccgggttcccctcaacaa

SEQ ID NO: 757392 - DNA, 19 bp, Mus musculus
  siRNA target sequence for 9130213B05Rik (NM_145562.1,921-939).
gtggagaatgccttaagtt

SEQ ID NO: 757393 - DNA, 19 bp, Mus musculus
  siRNA target sequence for 9130213B05Rik (NM_145562.1,967-985).
cagtcatcgccgtagtgtt

SEQ ID NO: 757394 - DNA, 19 bp, Mus musculus
  siRNA target sequence for 9130213B05Rik (NM_145562.1,1066-1084).
cctgggggaactacaacaa

SEQ ID NO: 757395 - DNA, 19 bp, Mus musculus
  siRNA target sequence for Fbxo21 (NM_145564.2,271-289).
ggtggccctccctgatgaa

SEQ ID NO: 757396 - DNA, 19 bp, Mus musculus
  siRNA target sequence for Fbxo21 (NM_145564.2,300-318).
cccaccgactacgtcaatt

SEQ ID NO: 757397 - DNA, 19 bp, Mus musculus
  siRNA target sequence for Fbxo21 (NM_145564.2,304-322).
ccgactacgtcaattggtt

SEQ ID NO: 757398 - DNA, 19 bp, Mus musculus
  siRNA target sequence for Fbxo21 (NM_145564.2,305-323).
cgactacgtcaattggtta

SEQ ID NO: 757399 - DNA, 19 bp, Mus musculus
  siRNA target sequence for Fbxo21 (NM_145564.2,319-337).
ggttagaggaatataaagt

SEQ ID NO: 757400 - DNA, 19 bp, Mus musculus
  siRNA target sequence for Fbxo21 (NM_145564.2,320-338).
gttagaggaatataaagtt

SEQ ID NO: 757401 - DNA, 19 bp, Mus musculus
  siRNA target sequence for Fbxo21 (NM_145564.2,353-371).
gttagaagcccggaagatt

SEQ ID NO: 757402 - DNA, 19 bp, Mus musculus
  siRNA target sequence for Fbxo21 (NM_145564.2,380-398).
cttctccaagcggttcttt

SEQ ID NO: 757403 - DNA, 19 bp, Mus musculus
  siRNA target sequence for Fbxo21 (NM_145564.2,471-489).
gagctggtgtgtatcctaa

SEQ ID NO: 757404 - DNA, 19 bp, Mus musculus
  siRNA target sequence for Fbxo21 (NM_145564.2,474-492).
ctggtgtgtatcctaaaca

SEQ ID NO: 757405 - DNA, 19 bp, Mus musculus
  siRNA target sequence for Fbxo21 (NM_145564.2,508-526).
ctttgacctggaaatacta

SEQ ID NO: 757406 - DNA, 19 bp, Mus musculus
  siRNA target sequence for Fbxo21 (NM_145564.2,618-636).
ctcgaaggtgccgtttaca

SEQ ID NO: 757407 - DNA, 19 bp, Mus musculus
  siRNA target sequence for Fbxo21 (NM_145564.2,705-723).
gtggagcttgtgtgcaaaa

SEQ ID NO: 757408 - DNA, 19 bp, Mus musculus
  siRNA target sequence for Fbxo21 (NM_145564.2,769-787).
caggtgagtcctctatgat

SEQ ID NO: 757409 - DNA, 19 bp, Mus musculus
  siRNA target sequence for Fbxo21 (NM_145564.2,813-831).
gtgctggacgctatcaact

SEQ ID NO: 757410 - DNA, 19 bp, Mus musculus
  siRNA target sequence for Fbxo21 (NM_145564.2,815-833).
gctggacgctatcaactat

SEQ ID NO: 757411 - DNA, 19 bp, Mus musculus
  siRNA target sequence for Fbxo21 (NM_145564.2,862-880).
ggaaccgcatggactacta

SEQ ID NO: 757412 - DNA, 19 bp, Mus musculus
  siRNA target sequence for Fbxo21 (NM_145564.2,866-884).
ccgcatggactactataat

SEQ ID NO: 757413 - DNA, 19 bp, Mus musculus
  siRNA target sequence for Fbxo21 (NM_145564.2,1549-1567).
ggcttgtgatgaagcataa

SEQ ID NO: 757414 - DNA, 19 bp, Mus musculus
  siRNA target sequence for Fbxo21 (NM_145564.2,1626-1644).
gagtggatccgaaacatga

SEQ ID NO: 757415 - DNA, 19 bp, Mus musculus
  siRNA target sequence for Fbxo21 (NM_145564.2,1628-1646).
gtggatccgaaacatgaat

SEQ ID NO: 757416 - DNA, 19 bp, Mus musculus
  siRNA target sequence for Fbxo21 (NM_145564.2,1630-1648).
ggatccgaaacatgaatgt

SEQ ID NO: 757417 - DNA, 19 bp, Mus musculus
  siRNA target sequence for Fbxo21 (NM_145564.2,1714-1732).
gatatgcagcccaagaaaa

SEQ ID NO: 757418 - DNA, 19 bp, Mus musculus
  siRNA target sequence for AA792894 (NM_145568.2,415-433).
ggatgagaggggagtattt

SEQ ID NO: 757419 - DNA, 19 bp, Mus musculus
  siRNA target sequence for AA792894 (NM_145568.2,462-480).
gattccaggcccaggtata

SEQ ID NO: 757420 - DNA, 19 bp, Mus musculus
  siRNA target sequence for AA792894 (NM_145568.2,466-484).
ccaggcccaggtatagaat

SEQ ID NO: 757421 - DNA, 19 bp, Mus musculus
  siRNA target sequence for AA792894 (NM_145568.2,587-605).
caagataagactaaactct

SEQ ID NO: 757422 - DNA, 19 bp, Mus musculus
  siRNA target sequence for AA792894 (NM_145568.2,606-624).
ctgagctactgtcaattca

SEQ ID NO: 757423 - DNA, 19 bp, Mus musculus
  siRNA target sequence for AA792894 (NM_145568.2,628-646).
gggatggcttctcagaaaa

SEQ ID NO: 757424 - DNA, 19 bp, Mus musculus
  siRNA target sequence for AA792894 (NM_145568.2,629-647).
ggatggcttctcagaaaaa

SEQ ID NO: 757425 - DNA, 19 bp, Mus musculus
  siRNA target sequence for AA792894 (NM_145568.2,648-666).
ccagtccccttgaacctta

SEQ ID NO: 757426 - DNA, 19 bp, Mus musculus
  siRNA target sequence for AA792894 (NM_145568.2,687-705).
ggctcatatagtgtagaat

SEQ ID NO: 757427 - DNA, 19 bp, Mus musculus
  siRNA target sequence for AA792894 (NM_145568.2,689-707).
ctcatatagtgtagaatct

SEQ ID NO: 757428 - DNA, 19 bp, Mus musculus
  siRNA target sequence for AA792894 (NM_145568.2,691-709).
catatagtgtagaatctgt

SEQ ID NO: 757429 - DNA, 19 bp, Mus musculus
  siRNA target sequence for AA792894 (NM_145568.2,749-767).
ccctcaagtcagtcataga

SEQ ID NO: 757430 - DNA, 19 bp, Mus musculus
  siRNA target sequence for AA792894 (NM_145568.2,751-769).
ctcaagtcagtcatagaca

SEQ ID NO: 757431 - DNA, 19 bp, Mus musculus
  siRNA target sequence for AA792894 (NM_145568.2,818-836).
ggaagaacggcccaaacat

SEQ ID NO: 757432 - DNA, 19 bp, Mus musculus
  siRNA target sequence for AA792894 (NM_145568.2,927-945).
gatggtacagaaaagctta

SEQ ID NO: 757433 - DNA, 19 bp, Mus musculus
  siRNA target sequence for AA792894 (NM_145568.2,959-977).
gaaaaaaacccgagatgta

SEQ ID NO: 757434 - DNA, 19 bp, Mus musculus
  siRNA target sequence for AA792894 (NM_145568.2,969-987).
cgagatgtatcatctaaga

SEQ ID NO: 757435 - DNA, 19 bp, Mus musculus
  siRNA target sequence for AA792894 (NM_145568.2,970-988).
gagatgtatcatctaagaa

SEQ ID NO: 757436 - DNA, 19 bp, Mus musculus
  siRNA target sequence for AA792894 (NM_145568.2,996-1014).
cgtaagcgtaggaaggaaa

SEQ ID NO: 757437 - DNA, 19 bp, Mus musculus
  siRNA target sequence for AA792894 (NM_145568.2,1062-1080).
cagtctattcttggatttt

SEQ ID NO: 757438 - DNA, 19 bp, Mus musculus
  siRNA target sequence for BC014699 (NM_145570.1,393-411).
ctggcagcctggtcttata

SEQ ID NO: 757439 - DNA, 19 bp, Mus musculus
  siRNA target sequence for BC014699 (NM_145570.1,403-421).
ggtcttatatctcagaaaa

SEQ ID NO: 757440 - DNA, 19 bp, Mus musculus
  siRNA target sequence for BC014699 (NM_145570.1,432-450).
gccgctctgtactttgtct

SEQ ID NO: 757441 - DNA, 19 bp, Mus musculus
  siRNA target sequence for BC014699 (NM_145570.1,633-651).
cgcttcgagaggactttga

SEQ ID NO: 757442 - DNA, 19 bp, Mus musculus
  siRNA target sequence for BC014699 (NM_145570.1,634-652).
gcttcgagaggactttgaa

SEQ ID NO: 757443 - DNA, 19 bp, Mus musculus
  siRNA target sequence for BC014699 (NM_145570.1,639-657).
gagaggactttgaataaga

SEQ ID NO: 757444 - DNA, 19 bp, Mus musculus
  siRNA target sequence for BC014699 (NM_145570.1,705-723).
gagcgcgaacgaatcatca

SEQ ID NO: 757445 - DNA, 19 bp, Mus musculus
  siRNA target sequence for BC014699 (NM_145570.1,766-784).
ggagcctgaaccgatacta

SEQ ID NO: 757446 - DNA, 19 bp, Mus musculus
  siRNA target sequence for 4022402H07Rik (NM_145571.1,233-251).
cagccgctcttcgaaaaca

SEQ ID NO: 757447 - DNA, 19 bp, Mus musculus
  siRNA target sequence for 4022402H07Rik (NM_145571.1,235-253).
gccgctcttcgaaaacatt

SEQ ID NO: 757448 - DNA, 19 bp, Mus musculus
  siRNA target sequence for 4022402H07Rik (NM_145571.1,237-255).
cgctcttcgaaaacattca

SEQ ID NO: 757449 - DNA, 19 bp, Mus musculus
  siRNA target sequence for 4022402H07Rik (NM_145571.1,244-262).
cgaaaacattcaaaccaaa

SEQ ID NO: 757450 - DNA, 19 bp, Mus musculus
  siRNA target sequence for 4022402H07Rik (NM_145571.1,321-339).
ctcggaagtggcaatctga

SEQ ID NO: 757451 - DNA, 19 bp, Mus musculus
  siRNA target sequence for 4022402H07Rik (NM_145571.1,362-380).
gggagaggacctcaatgaa

SEQ ID NO: 757452 - DNA, 19 bp, Mus musculus
  siRNA target sequence for 4022402H07Rik (NM_145571.1,363-381).
ggagaggacctcaatgaat

SEQ ID NO: 757453 - DNA, 19 bp, Mus musculus
  siRNA target sequence for 4022402H07Rik (NM_145571.1,368-386).
ggacctcaatgaatggatt

SEQ ID NO: 757454 - DNA, 19 bp, Mus musculus
  siRNA target sequence for 4022402H07Rik (NM_145571.1,422-440).
catgttgtatggaaccatt

SEQ ID NO: 757455 - DNA, 19 bp, Mus musculus
  siRNA target sequence for 4022402H07Rik (NM_145571.1,479-497).
ggcaggtcccaggtatgaa

SEQ ID NO: 757456 - DNA, 19 bp, Mus musculus
  siRNA target sequence for 4022402H07Rik (NM_145571.1,480-498).
gcaggtcccaggtatgaat

SEQ ID NO: 757457 - DNA, 19 bp, Mus musculus
  siRNA target sequence for 4022402H07Rik (NM_145571.1,481-499).
caggtcccaggtatgaata

SEQ ID NO: 757458 - DNA, 19 bp, Mus musculus
  siRNA target sequence for 4022402H07Rik (NM_145571.1,505-523).
gggcagatggcactaatat

SEQ ID NO: 757459 - DNA, 19 bp, Mus musculus
  siRNA target sequence for 4022402H07Rik (NM_145571.1,506-524).
ggcagatggcactaatatt

SEQ ID NO: 757460 - DNA, 19 bp, Mus musculus
  siRNA target sequence for 4022402H07Rik (NM_145571.1,508-526).
cagatggcactaatattaa

SEQ ID NO: 757461 - DNA, 19 bp, Mus musculus
  siRNA target sequence for 4022402H07Rik (NM_145571.1,510-528).
gatggcactaatattaaaa

SEQ ID NO: 757462 - DNA, 19 bp, Mus musculus
  siRNA target sequence for 4022402H07Rik (NM_145571.1,590-608).
gcttgatgacgaaactctt

SEQ ID NO: 757463 - DNA, 19 bp, Mus musculus
  siRNA target sequence for 4022402H07Rik (NM_145571.1,591-609).
cttgatgacgaaactcttt

SEQ ID NO: 757464 - DNA, 19 bp, Mus musculus
  siRNA target sequence for 4022402H07Rik (NM_145571.1,627-645).
gtcccttttcccaaaaact

SEQ ID NO: 757465 - DNA, 19 bp, Mus musculus
  siRNA target sequence for 4022402H07Rik (NM_145571.1,654-672).
gtggcaaagactattctga

SEQ ID NO: 757466 - DNA, 19 bp, Mus musculus
  siRNA target sequence for 4022402H07Rik (NM_145571.1,685-703).
gggtttatgcccatatcta

SEQ ID NO: 757467 - DNA, 19 bp, Mus musculus
  siRNA target sequence for 4022402H07Rik (NM_145571.1,779-797).
ctttgttcaggagtttaat

SEQ ID NO: 757468 - DNA, 19 bp, Mus musculus
  siRNA target sequence for 4022402H07Rik (NM_145571.1,818-836).
ggcaccacttcaggaatta

SEQ ID NO: 757469 - DNA, 19 bp, Mus musculus
  siRNA target sequence for 4022402H07Rik (NM_145571.1,823-841).
cacttcaggaattaattga

SEQ ID NO: 757470 - DNA, 19 bp, Mus musculus
  siRNA target sequence for BC006583 (NM_145574.1,1545-1563).
cagcgaaagctgacacaaa

SEQ ID NO: 757471 - DNA, 19 bp, Mus musculus
  siRNA target sequence for BC006583 (NM_145574.1,1643-1661).
gttggcgaaccctcaagat

SEQ ID NO: 757472 - DNA, 19 bp, Mus musculus
  siRNA target sequence for BC006583 (NM_145574.1,1681-1699).
ccagttgtgagaataagtt

SEQ ID NO: 757473 - DNA, 19 bp, Mus musculus
  siRNA target sequence for BC006583 (NM_145574.1,1861-1879).
ctcagtcccccatgataaa

SEQ ID NO: 757474 - DNA, 19 bp, Mus musculus
  siRNA target sequence for BC006583 (NM_145574.1,1863-1881).
cagtcccccatgataaaaa

SEQ ID NO: 757475 - DNA, 19 bp, Mus musculus
  siRNA target sequence for BC006583 (NM_145574.1,1955-1973).
gagctccattgatgaaaat

SEQ ID NO: 757476 - DNA, 19 bp, Mus musculus
  siRNA target sequence for BC006583 (NM_145574.1,1968-1986).
gaaaatgagggctatcaga

SEQ ID NO: 757477 - DNA, 19 bp, Mus musculus
  siRNA target sequence for BC006583 (NM_145574.1,2438-2456).
gatgtggaagcctatggtt

SEQ ID NO: 757478 - DNA, 19 bp, Mus musculus
  siRNA target sequence for MGC30332 (NM_145580.1,348-366).
ctgtagcacatcctttcaa

SEQ ID NO: 757479 - DNA, 19 bp, Mus musculus
  siRNA target sequence for MGC30332 (NM_145580.1,350-368).
gtagcacatcctttcaaaa

SEQ ID NO: 757480 - DNA, 19 bp, Mus musculus
  siRNA target sequence for MGC30332 (NM_145580.1,677-695).
gtggtcttgctctctttgt

SEQ ID NO: 757481 - DNA, 19 bp, Mus musculus
  siRNA target sequence for MGC30332 (NM_145580.1,680-698).
gtcttgctctctttgttca

SEQ ID NO: 757482 - DNA, 19 bp, Mus musculus
  siRNA target sequence for MGC30332 (NM_145580.1,747-765).
ccagcacctctctacatta

SEQ ID NO: 757483 - DNA, 19 bp, Mus musculus
  siRNA target sequence for MGC30332 (NM_145580.1,905-923).
gaggagctgattatgctat

SEQ ID NO: 757484 - DNA, 19 bp, Mus musculus
  siRNA target sequence for MGC30332 (NM_145580.1,946-964).
cgggagcacggcttatggt

SEQ ID NO: 757485 - DNA, 19 bp, Mus musculus
  siRNA target sequence for MGC30332 (NM_145580.1,947-965).
gggagcacggcttatggta

SEQ ID NO: 757486 - DNA, 19 bp, Mus musculus
  siRNA target sequence for MGC30332 (NM_145580.1,1147-1165).
gcaggtgctatctaaactt

SEQ ID NO: 757487 - DNA, 19 bp, Mus musculus
  siRNA target sequence for Frag1 (NM_145583.1,242-260).
gtccggctccgcttcacta

SEQ ID NO: 757488 - DNA, 19 bp, Mus musculus
  siRNA target sequence for Frag1 (NM_145583.1,287-305).
ccacttgtcgccttcttct

SEQ ID NO: 757489 - DNA, 19 bp, Mus musculus
  siRNA target sequence for Frag1 (NM_145583.1,288-306).
cacttgtcgccttcttctt

SEQ ID NO: 757490 - DNA, 19 bp, Mus musculus
  siRNA target sequence for Frag1 (NM_145583.1,471-489).
cagccttcgcctattggaa

SEQ ID NO: 757491 - DNA, 19 bp, Mus musculus
  siRNA target sequence for Frag1 (NM_145583.1,528-546).
gccttctctgccgcattaa

SEQ ID NO: 757492 - DNA, 19 bp, Mus musculus
  siRNA target sequence for Frag1 (NM_145583.1,530-548).
cttctctgccgcattaact

SEQ ID NO: 757493 - DNA, 19 bp, Mus musculus
  siRNA target sequence for Frag1 (NM_145583.1,533-551).
ctctgccgcattaacttca

SEQ ID NO: 757494 - DNA, 19 bp, Mus musculus
  siRNA target sequence for Frag1 (NM_145583.1,541-559).
cattaacttcagtctcaat

SEQ ID NO: 757495 - DNA, 19 bp, Mus musculus
  siRNA target sequence for Frag1 (NM_145583.1,651-669).
cggcatccctcggttacat

SEQ ID NO: 757496 - DNA, 19 bp, Mus musculus
  siRNA target sequence for Frag1 (NM_145583.1,740-758).
cggctcttcgtcatcaact

SEQ ID NO: 757497 - DNA, 19 bp, Mus musculus
  siRNA target sequence for Frag1 (NM_145583.1,790-808).
cttccggcacaacatgtat

SEQ ID NO: 757498 - DNA, 19 bp, Mus musculus
  siRNA target sequence for Frag1 (NM_145583.1,793-811).
ccggcacaacatgtattgt

SEQ ID NO: 757499 - DNA, 19 bp, Mus musculus
  siRNA target sequence for Spon1 (NM_145584.1,273-291).
cgcagcgctagctttctca

SEQ ID NO: 757500 - DNA, 19 bp, Mus musculus
  siRNA target sequence for Spon1 (NM_145584.1,471-489).
cagaggtttcacgttaatt

SEQ ID NO: 757501 - DNA, 19 bp, Mus musculus
  siRNA target sequence for Spon1 (NM_145584.1,536-554).
gcaccttccagatcataga

SEQ ID NO: 757502 - DNA, 19 bp, Mus musculus
  siRNA target sequence for Spon1 (NM_145584.1,559-577).
gaagagacccagtttatga

SEQ ID NO: 757503 - DNA, 19 bp, Mus musculus
  siRNA target sequence for Spon1 (NM_145584.1,586-604).
cctgtggccgtcactgaaa

SEQ ID NO: 757504 - DNA, 19 bp, Mus musculus
  siRNA target sequence for Spon1 (NM_145584.1,691-709).
gtacagaaacgcataattt

SEQ ID NO: 757505 - DNA, 19 bp, Mus musculus
  siRNA target sequence for Spon1 (NM_145584.1,694-712).
cagaaacgcataatttatt

SEQ ID NO: 757506 - DNA, 19 bp, Mus musculus
  siRNA target sequence for Spon1 (NM_145584.1,696-714).
gaaacgcataatttatttt

SEQ ID NO: 757507 - DNA, 19 bp, Mus musculus
  siRNA target sequence for Spon1 (NM_145584.1,774-792).
gacggacagacccatctta

SEQ ID NO: 757508 - DNA, 19 bp, Mus musculus
  siRNA target sequence for Spon1 (NM_145584.1,776-794).
cggacagacccatcttaga

SEQ ID NO: 757509 - DNA, 19 bp, Mus musculus
  siRNA target sequence for Spon1 (NM_145584.1,819-837).
gtacagactcacgttttat

SEQ ID NO: 757510 - DNA, 19 bp, Mus musculus
  siRNA target sequence for Spon1 (NM_145584.1,1097-1115).
cagcaccctcagctgaatt

SEQ ID NO: 757511 - DNA, 19 bp, Mus musculus
  siRNA target sequence for Spon1 (NM_145584.1,1099-1117).
gcaccctcagctgaattct

SEQ ID NO: 757512 - DNA, 19 bp, Mus musculus
  siRNA target sequence for Spon1 (NM_145584.1,1223-1241).
gctgggtccagaaagtagt

SEQ ID NO: 757513 - DNA, 19 bp, Mus musculus
  siRNA target sequence for Spon1 (NM_145584.1,1307-1325).
ccacaattcctcaggaaaa

SEQ ID NO: 757514 - DNA, 19 bp, Mus musculus
  siRNA target sequence for Spon1 (NM_145584.1,1406-1424).
gagtcgtcatcgagagaat

SEQ ID NO: 757515 - DNA, 19 bp, Mus musculus
  siRNA target sequence for Spon1 (NM_145584.1,1461-1479).
caacgtggacgatattgta

SEQ ID NO: 757516 - DNA, 19 bp, Mus musculus
  siRNA target sequence for Spon1 (NM_145584.1,1519-1537).
cctgaaacctgcatctact

SEQ ID NO: 757517 - DNA, 19 bp, Mus musculus
  siRNA target sequence for Spon1 (NM_145584.1,1919-1937).
cctgtgggatgggtatgaa

SEQ ID NO: 757518 - DNA, 19 bp, Mus musculus
  siRNA target sequence for Spon1 (NM_145584.1,1943-1961).
ggcaccgtatggtcaagat

SEQ ID NO: 757519 - DNA, 19 bp, Mus musculus
  siRNA target sequence for Spon1 (NM_145584.1,1945-1963).
caccgtatggtcaagatga

SEQ ID NO: 757520 - DNA, 19 bp, Mus musculus
  siRNA target sequence for Spon1 (NM_145584.1,2110-2128).
cgccagcggatgctcaaat

SEQ ID NO: 757521 - DNA, 19 bp, Mus musculus
  siRNA target sequence for Spon1 (NM_145584.1,2223-2241).
gtcccagtggtctgaatgt

SEQ ID NO: 757522 - DNA, 19 bp, Mus musculus
  siRNA target sequence for Spon1 (NM_145584.1,2273-2291).
gaacccggacaatccaaat

SEQ ID NO: 757523 - DNA, 19 bp, Mus musculus
  siRNA target sequence for Spon1 (NM_145584.1,2276-2294).
cccggacaatccaaatgga

SEQ ID NO: 757524 - DNA, 19 bp, Mus musculus
  siRNA target sequence for 6330575P11Rik (NM_145585.1,248-266).
cggaaaagtttatagacaa

SEQ ID NO: 757525 - DNA, 19 bp, Mus musculus
  siRNA target sequence for 6330575P11Rik (NM_145585.1,384-402).
ggagagtggagcgaataat

SEQ ID NO: 757526 - DNA, 19 bp, Mus musculus
  siRNA target sequence for 6330575P11Rik (NM_145585.1,389-407).
gtggagcgaataatgtagt

SEQ ID NO: 757527 - DNA, 19 bp, Mus musculus
  siRNA target sequence for 6330575P11Rik (NM_145585.1,392-410).
gagcgaataatgtagtctt

SEQ ID NO: 757528 - DNA, 19 bp, Mus musculus
  siRNA target sequence for 6330575P11Rik (NM_145585.1,414-432).
caggacgcttgggatagaa

SEQ ID NO: 757529 - DNA, 19 bp, Mus musculus
  siRNA target sequence for 6330575P11Rik (NM_145585.1,436-454).
gagaaattagtgcatcata

SEQ ID NO: 757530 - DNA, 19 bp, Mus musculus
  siRNA target sequence for 6330575P11Rik (NM_145585.1,438-456).
gaaattagtgcatcatatt

SEQ ID NO: 757531 - DNA, 19 bp, Mus musculus
  siRNA target sequence for 6330575P11Rik (NM_145585.1,491-509).
caagggttattctacgaat

SEQ ID NO: 757532 - DNA, 19 bp, Mus musculus
  siRNA target sequence for 6330575P11Rik (NM_145585.1,519-537).
ctcaggcacatgtaaagct

SEQ ID NO: 757533 - DNA, 19 bp, Mus musculus
  siRNA target sequence for 6330575P11Rik (NM_145585.1,636-654).
caatagccatatgaataga

SEQ ID NO: 757534 - DNA, 19 bp, Mus musculus
  siRNA target sequence for 6330575P11Rik (NM_145585.1,642-660).
ccatatgaatagagaagaa

SEQ ID NO: 757535 - DNA, 19 bp, Mus musculus
  siRNA target sequence for 6330575P11Rik (NM_145585.1,648-666).
gaatagagaagaagttatt

SEQ ID NO: 757536 - DNA, 19 bp, Mus musculus
  siRNA target sequence for 6330575P11Rik (NM_145585.1,708-726).
caaagtggatctcactaat

SEQ ID NO: 757537 - DNA, 19 bp, Mus musculus
  siRNA target sequence for 6330575P11Rik (NM_145585.1,737-755).
cggtggtagtggaaatcat

SEQ ID NO: 757538 - DNA, 19 bp, Mus musculus
  siRNA target sequence for 6330575P11Rik (NM_145585.1,739-757).
gtggtagtggaaatcatca

SEQ ID NO: 757539 - DNA, 19 bp, Mus musculus
  siRNA target sequence for 6330575P11Rik (NM_145585.1,741-759).
ggtagtggaaatcatcaaa

SEQ ID NO: 757540 - DNA, 19 bp, Mus musculus
  siRNA target sequence for 8430420C20Rik (NM_145586.1,269-287).
gtctttcctgaataactca

SEQ ID NO: 757541 - DNA, 19 bp, Mus musculus
  siRNA target sequence for 8430420C20Rik (NM_145586.1,326-344).
cctggacagacatcctttt

SEQ ID NO: 757542 - DNA, 19 bp, Mus musculus
  siRNA target sequence for 8430420C20Rik (NM_145586.1,330-348).
gacagacatccttttgtga

SEQ ID NO: 757543 - DNA, 19 bp, Mus musculus
  siRNA target sequence for 8430420C20Rik (NM_145586.1,353-371).
caccgtgctgatgtttgtt

SEQ ID NO: 757544 - DNA, 19 bp, Mus musculus
  siRNA target sequence for 8430420C20Rik (NM_145586.1,659-677).
gtctgagaggctcatattt

SEQ ID NO: 757545 - DNA, 19 bp, Mus musculus
  siRNA target sequence for BC006909 (NM_145589.2,386-404).
gtgccgtcagcctctatct

SEQ ID NO: 757546 - DNA, 19 bp, Mus musculus
  siRNA target sequence for BC006909 (NM_145589.2,460-478).
ccccttcatccctagaaaa

SEQ ID NO: 757547 - DNA, 19 bp, Mus musculus
  siRNA target sequence for BC006909 (NM_145589.2,499-517).
ccgtggtgttggaagatgt

SEQ ID NO: 757548 - DNA, 19 bp, Mus musculus
  siRNA target sequence for BC006909 (NM_145589.2,658-676).
ctcctgacccactgcattt

SEQ ID NO: 757549 - DNA, 19 bp, Mus musculus
  siRNA target sequence for BC006909 (NM_145589.2,660-678).
cctgacccactgcatttgt

SEQ ID NO: 757550 - DNA, 19 bp, Mus musculus
  siRNA target sequence for BC006909 (NM_145589.2,753-771).
gaggagagcccctcaaaaa

SEQ ID NO: 757551 - DNA, 19 bp, Mus musculus
  siRNA target sequence for BC006909 (NM_145589.2,758-776).
gagcccctcaaaaaagaca

SEQ ID NO: 757552 - DNA, 19 bp, Mus musculus
  siRNA target sequence for BC006909 (NM_145589.2,882-900).
gcacaaagcaccttcagaa

SEQ ID NO: 757553 - DNA, 19 bp, Mus musculus
  siRNA target sequence for BC006909 (NM_145589.2,948-966).
gaagcacgcccaactctta

SEQ ID NO: 757554 - DNA, 19 bp, Mus musculus
  siRNA target sequence for BC006909 (NM_145589.2,1188-1206).
gtccgatcaaagcttgaaa

SEQ ID NO: 757555 - DNA, 19 bp, Mus musculus
  siRNA target sequence for BC006909 (NM_145589.2,1261-1279).
cacctcccatgaaattaga

SEQ ID NO: 757556 - DNA, 19 bp, Mus musculus
  siRNA target sequence for BC006909 (NM_145589.2,1386-1404).
ctagcacctgtctctaagt

SEQ ID NO: 757557 - DNA, 19 bp, Mus musculus
  siRNA target sequence for BC006909 (NM_145589.2,1691-1709).
ggagttaagagcctcaaaa

SEQ ID NO: 757558 - DNA, 19 bp, Mus musculus
  siRNA target sequence for BC006909 (NM_145589.2,1751-1769).
ggtttctagattcagaata

SEQ ID NO: 757559 - DNA, 19 bp, Mus musculus
  siRNA target sequence for BC006909 (NM_145589.2,1780-1798).
ctgtccgtctccaaccaaa

SEQ ID NO: 757560 - DNA, 19 bp, Mus musculus
  siRNA target sequence for BC006909 (NM_145589.2,1784-1802).
ccgtctccaaccaaacctt

SEQ ID NO: 757561 - DNA, 19 bp, Mus musculus
  siRNA target sequence for BC006909 (NM_145589.2,1821-1839).
cgaccaatcaggttgaata

SEQ ID NO: 757562 - DNA, 19 bp, Mus musculus
  siRNA target sequence for BC006909 (NM_145589.2,1822-1840).
gaccaatcaggttgaataa

SEQ ID NO: 757563 - DNA, 19 bp, Mus musculus
  siRNA target sequence for BC006909 (NM_145589.2,1825-1843).
caatcaggttgaataagaa

SEQ ID NO: 757564 - DNA, 19 bp, Mus musculus
  siRNA target sequence for BC006909 (NM_145589.2,1845-1863).
gagttcactttggaagaaa

SEQ ID NO: 757565 - DNA, 19 bp, Mus musculus
  siRNA target sequence for BC006909 (NM_145589.2,1904-1922).
gacctttgagaccatcttt

SEQ ID NO: 757566 - DNA, 19 bp, Mus musculus
  siRNA target sequence for BC006909 (NM_145589.2,1937-1955).
gcgcaatggaactctgatt

SEQ ID NO: 757567 - DNA, 19 bp, Mus musculus
  siRNA target sequence for BC006909 (NM_145589.2,1938-1956).
cgcaatggaactctgattt

SEQ ID NO: 757568 - DNA, 19 bp, Mus musculus
  siRNA target sequence for BC006909 (NM_145589.2,1973-1991).
gctccgaagggcagtagaa

SEQ ID NO: 757569 - DNA, 19 bp, Mus musculus
  siRNA target sequence for BC006909 (NM_145589.2,1974-1992).
ctccgaagggcagtagaat

SEQ ID NO: 757570 - DNA, 19 bp, Mus musculus
  siRNA target sequence for BC006909 (NM_145589.2,1976-1994).
ccgaagggcagtagaattt

SEQ ID NO: 757571 - DNA, 19 bp, Mus musculus
  siRNA target sequence for BC006909 (NM_145589.2,2094-2112).
gggtctctactgcaagaaa

SEQ ID NO: 757572 - DNA, 19 bp, Mus musculus
  siRNA target sequence for BC017158 (NM_145590.1,278-296).
gcgtcagcccggattacct

SEQ ID NO: 757573 - DNA, 19 bp, Mus musculus
  siRNA target sequence for BC017158 (NM_145590.1,356-374).
ccacccaagcagtattgca

SEQ ID NO: 757574 - DNA, 19 bp, Mus musculus
  siRNA target sequence for BC017158 (NM_145590.1,423-441).
cacctggctcgtgaaagat

SEQ ID NO: 757575 - DNA, 19 bp, Mus musculus
  siRNA target sequence for BC017158 (NM_145590.1,429-447).
gctcgtgaaagattcaact

SEQ ID NO: 757576 - DNA, 19 bp, Mus musculus
  siRNA target sequence for BC017158 (NM_145590.1,449-467).
gcatgttgggccgtatcat

SEQ ID NO: 757577 - DNA, 19 bp, Mus musculus
  siRNA target sequence for BC017158 (NM_145590.1,571-589).
cccatgtacccaatctttt

SEQ ID NO: 757578 - DNA, 19 bp, Mus musculus
  siRNA target sequence for BC017158 (NM_145590.1,572-590).
ccatgtacccaatcttttt

SEQ ID NO: 757579 - DNA, 19 bp, Mus musculus
  siRNA target sequence for BC017158 (NM_145590.1,615-633).
cctagccaagtgcattgtt

SEQ ID NO: 757580 - DNA, 19 bp, Mus musculus
  siRNA target sequence for BC017158 (NM_145590.1,825-843).
caccgccctccacatctat

SEQ ID NO: 757581 - DNA, 19 bp, Mus musculus
  siRNA target sequence for BC017158 (NM_145590.1,874-892).
ctggagaccttgaatgaaa

SEQ ID NO: 757582 - DNA, 19 bp, Mus musculus
  siRNA target sequence for BC017158 (NM_145590.1,1248-1266).
gcaggctgatcctaagaaa

SEQ ID NO: 757583 - DNA, 19 bp, Mus musculus
  siRNA target sequence for BC017158 (NM_145590.1,1312-1330).
ctgttcccaaagttcttga

SEQ ID NO: 757584 - DNA, 19 bp, Mus musculus
  siRNA target sequence for BC017158 (NM_145590.1,1358-1376).
cggagaaacaccatctaga

SEQ ID NO: 757585 - DNA, 19 bp, Mus musculus
  siRNA target sequence for Dkk4 (NM_145592.1,159-177).
cttggactcagctggtttt

SEQ ID NO: 757586 - DNA, 19 bp, Mus musculus
  siRNA target sequence for Dkk4 (NM_145592.1,195-213).
ctggttctggactttaaca

SEQ ID NO: 757587 - DNA, 19 bp, Mus musculus
  siRNA target sequence for Dkk4 (NM_145592.1,385-403).
gaacggtctgtgtgaatga

SEQ ID NO: 757588 - DNA, 19 bp, Mus musculus
  siRNA target sequence for Dkk4 (NM_145592.1,388-406).
cggtctgtgtgaatgatgt

SEQ ID NO: 757589 - DNA, 19 bp, Mus musculus
  siRNA target sequence for Dkk4 (NM_145592.1,524-542).
gcccagtacgaagaaatca

SEQ ID NO: 757590 - DNA, 19 bp, Mus musculus
  siRNA target sequence for Dkk4 (NM_145592.1,526-544).
ccagtacgaagaaatcaca

SEQ ID NO: 757591 - DNA, 19 bp, Mus musculus
  siRNA target sequence for Dkk4 (NM_145592.1,615-633).
cgccatttttggacaaaaa

SEQ ID NO: 757592 - DNA, 19 bp, Mus musculus
  siRNA target sequence for Dkk4 (NM_145592.1,758-776).
gaccagtaacagacaacat

SEQ ID NO: 757593 - DNA, 19 bp, Mus musculus
  siRNA target sequence for Dkk4 (NM_145592.1,774-792).
cattcaaggctaagagtat

SEQ ID NO: 757594 - DNA, 19 bp, Mus musculus
  siRNA target sequence for Fgl1 (NM_145594.1,185-203).
gacccgggtcaaacaacaa

SEQ ID NO: 757595 - DNA, 19 bp, Mus musculus
  siRNA target sequence for Fgl1 (NM_145594.1,187-205).
cccgggtcaaacaacaaca

SEQ ID NO: 757596 - DNA, 19 bp, Mus musculus
  siRNA target sequence for Fgl1 (NM_145594.1,258-276).
ggatcggagaacagtttca

SEQ ID NO: 757597 - DNA, 19 bp, Mus musculus
  siRNA target sequence for Fgl1 (NM_145594.1,259-277).
gatcggagaacagtttcat

SEQ ID NO: 757598 - DNA, 19 bp, Mus musculus
  siRNA target sequence for Fgl1 (NM_145594.1,262-280).
cggagaacagtttcattga

SEQ ID NO: 757599 - DNA, 19 bp, Mus musculus
  siRNA target sequence for Fgl1 (NM_145594.1,296-314).
gcagtatgcagattgttca

SEQ ID NO: 757600 - DNA, 19 bp, Mus musculus
  siRNA target sequence for Fgl1 (NM_145594.1,304-322).
cagattgttcagagattta

SEQ ID NO: 757601 - DNA, 19 bp, Mus musculus
  siRNA target sequence for Fgl1 (NM_145594.1,306-324).
gattgttcagagatttaca

SEQ ID NO: 757602 - DNA, 19 bp, Mus musculus
  siRNA target sequence for Fgl1 (NM_145594.1,377-395).
ggcagaattctctgtttat

SEQ ID NO: 757603 - DNA, 19 bp, Mus musculus
  siRNA target sequence for Fgl1 (NM_145594.1,447-465).
ggcagtgagaactttaaca

SEQ ID NO: 757604 - DNA, 19 bp, Mus musculus
  siRNA target sequence for Fgl1 (NM_145594.1,464-482).
caggggttggaatgactat

SEQ ID NO: 757605 - DNA, 19 bp, Mus musculus
  siRNA target sequence for Fgl1 (NM_145594.1,527-545).
gctgggtaacaaaaacatt

SEQ ID NO: 757606 - DNA, 19 bp, Mus musculus
  siRNA target sequence for Fgl1 (NM_145594.1,610-628).
gcagcttcgcacaatacca

SEQ ID NO: 757607 - DNA, 19 bp, Mus musculus
  siRNA target sequence for Fgl1 (NM_145594.1,631-649).
gttttaaagttggtgataa

SEQ ID NO: 757608 - DNA, 19 bp, Mus musculus
  siRNA target sequence for Fgl1 (NM_145594.1,639-657).
gttggtgataaaaagtctt

SEQ ID NO: 757609 - DNA, 19 bp, Mus musculus
  siRNA target sequence for Fgl1 (NM_145594.1,653-671).
gtctttttatgaactaaat

SEQ ID NO: 757610 - DNA, 19 bp, Mus musculus
  siRNA target sequence for Fgl1 (NM_145594.1,703-721).
ccctgtcaggaacttttca

SEQ ID NO: 757611 - DNA, 19 bp, Mus musculus
  siRNA target sequence for Fgl1 (NM_145594.1,766-784).
gcacgtgggacagagataa

SEQ ID NO: 757612 - DNA, 19 bp, Mus musculus
  siRNA target sequence for Fgl1 (NM_145594.1,769-787).
cgtgggacagagataacga

SEQ ID NO: 757613 - DNA, 19 bp, Mus musculus
  siRNA target sequence for Fgl1 (NM_145594.1,853-871).
caaacctgaacggtgttta

SEQ ID NO: 757614 - DNA, 19 bp, Mus musculus
  siRNA target sequence for Fgl1 (NM_145594.1,887-905).
cagggcagaaacggataat

SEQ ID NO: 757615 - DNA, 19 bp, Mus musculus
  siRNA target sequence for Fgl1 (NM_145594.1,890-908).
ggcagaaacggataatggt

SEQ ID NO: 757616 - DNA, 19 bp, Mus musculus
  siRNA target sequence for Fgl1 (NM_145594.1,927-945).
catgggtggtggtattcct

SEQ ID NO: 757617 - DNA, 19 bp, Mus musculus
  siRNA target sequence for Fgl1 (NM_145594.1,943-961).
ccttgaaatctgtggttat

SEQ ID NO: 757618 - DNA, 19 bp, Mus musculus
  siRNA target sequence for Fgl1 (NM_145594.1,976-994).
gtgattttattccaaatat

SEQ ID NO: 757619 - DNA, 19 bp, Mus musculus
  siRNA target sequence for BC031407 (NM_145596.2,808-826).
ctccctcgcctgatgtgat

SEQ ID NO: 757620 - DNA, 19 bp, Mus musculus
  siRNA target sequence for BC031407 (NM_145596.2,901-919).
gcactgaggcgctcttgaa

SEQ ID NO: 757621 - DNA, 19 bp, Mus musculus
  siRNA target sequence for BC031407 (NM_145596.2,902-920).
cactgaggcgctcttgaaa

SEQ ID NO: 757622 - DNA, 19 bp, Mus musculus
  siRNA target sequence for BC031407 (NM_145596.2,933-951).
gaacgagagcggatgatca

SEQ ID NO: 757623 - DNA, 19 bp, Mus musculus
  siRNA target sequence for BC031407 (NM_145596.2,1007-1025).
gctgcggcagagtcagata

SEQ ID NO: 757624 - DNA, 19 bp, Mus musculus
  siRNA target sequence for BC031407 (NM_145596.2,1097-1115).
gcggggtacccagaacatt

SEQ ID NO: 757625 - DNA, 19 bp, Mus musculus
  siRNA target sequence for BC031407 (NM_145596.2,1139-1157).
gacctcctccactcgaata

SEQ ID NO: 757626 - DNA, 19 bp, Mus musculus
  siRNA target sequence for BC031407 (NM_145596.2,1228-1246).
ccagctctcaagtagtcat

SEQ ID NO: 757627 - DNA, 19 bp, Mus musculus
  siRNA target sequence for BC031407 (NM_145596.2,1643-1661).
gcccagtgctgccaataat

SEQ ID NO: 757628 - DNA, 19 bp, Mus musculus
  siRNA target sequence for BC031407 (NM_145596.2,1650-1668).
gctgccaataatgagttta

SEQ ID NO: 757629 - DNA, 19 bp, Mus musculus
  siRNA target sequence for BC031407 (NM_145596.2,1651-1669).
ctgccaataatgagtttat

SEQ ID NO: 757630 - DNA, 19 bp, Mus musculus
  siRNA target sequence for BC031407 (NM_145596.2,2011-2029).
cgctgaagcaggtcataaa

SEQ ID NO: 757631 - DNA, 19 bp, Mus musculus
  siRNA target sequence for BC031407 (NM_145596.2,2137-2155).
gtggtgttctgcacacttt

SEQ ID NO: 757632 - DNA, 19 bp, Mus musculus
  siRNA target sequence for BC031407 (NM_145596.2,2314-2332).
caagcttggcagtacacaa

SEQ ID NO: 757633 - DNA, 19 bp, Mus musculus
  siRNA target sequence for BC031407 (NM_145596.2,2399-2417).
ccaatcagccacatggaaa

SEQ ID NO: 757634 - DNA, 19 bp, Mus musculus
  siRNA target sequence for BC021367 (NM_145597.2,134-152).
cagtctgttccggtacata

SEQ ID NO: 757635 - DNA, 19 bp, Mus musculus
  siRNA target sequence for BC021367 (NM_145597.2,177-195).
gcgctgtcagggaaactga

SEQ ID NO: 757636 - DNA, 19 bp, Mus musculus
  siRNA target sequence for BC021367 (NM_145597.2,311-329).
cctagtcctgcgcttcttt

SEQ ID NO: 757637 - DNA, 19 bp, Mus musculus
  siRNA target sequence for BC021367 (NM_145597.2,386-404).
cacagaggcctactatttt

SEQ ID NO: 757638 - DNA, 19 bp, Mus musculus
  siRNA target sequence for BC021367 (NM_145597.2,388-406).
cagaggcctactattttgt

SEQ ID NO: 757639 - DNA, 19 bp, Mus musculus
  siRNA target sequence for BC021367 (NM_145597.2,489-507).
gtgacccggctgtacttca

SEQ ID NO: 757640 - DNA, 19 bp, Mus musculus
  siRNA target sequence for BC021367 (NM_145597.2,523-541).
gtgagcgctccgtatgtct

SEQ ID NO: 757641 - DNA, 19 bp, Mus musculus
  siRNA target sequence for BC021367 (NM_145597.2,915-933).
gcacccacaaggaacatga

SEQ ID NO: 757642 - DNA, 19 bp, Mus musculus
  siRNA target sequence for BC021367 (NM_145597.2,1090-1108).
gcattgaggcccgtgaaat

SEQ ID NO: 757643 - DNA, 19 bp, Mus musculus
  siRNA target sequence for BC021367 (NM_145597.2,1429-1447).
gcctcttcggcctctattt

SEQ ID NO: 757644 - DNA, 19 bp, Mus musculus
  siRNA target sequence for BC004056 (NM_145599.1,396-414).
gcatgtaatcggagtaact

SEQ ID NO: 757645 - DNA, 19 bp, Mus musculus
  siRNA target sequence for BC004056 (NM_145599.1,430-448).
gacccctgttggtactttt

SEQ ID NO: 757646 - DNA, 19 bp, Mus musculus
  siRNA target sequence for BC004056 (NM_145599.1,432-450).
cccctgttggtactttttt

SEQ ID NO: 757647 - DNA, 19 bp, Mus musculus
  siRNA target sequence for BC004056 (NM_145599.1,468-486).
gtcgcggttccgatatgca

SEQ ID NO: 757648 - DNA, 19 bp, Mus musculus
  siRNA target sequence for BC004056 (NM_145599.1,470-488).
cgcggttccgatatgcatt

SEQ ID NO: 757649 - DNA, 19 bp, Mus musculus
  siRNA target sequence for BC004056 (NM_145599.1,471-489).
gcggttccgatatgcattt

SEQ ID NO: 757650 - DNA, 19 bp, Mus musculus
  siRNA target sequence for BC004056 (NM_145599.1,474-492).
gttccgatatgcatttgga

SEQ ID NO: 757651 - DNA, 19 bp, Mus musculus
  siRNA target sequence for BC004056 (NM_145599.1,513-531).
ggaatgcacacgaaatcct

SEQ ID NO: 757652 - DNA, 19 bp, Mus musculus
  siRNA target sequence for BC004056 (NM_145599.1,532-550).
ggtttatagctggaatatt

SEQ ID NO: 757653 - DNA, 19 bp, Mus musculus
  siRNA target sequence for BC004056 (NM_145599.1,588-606).
cttcaacatctggtacatt

SEQ ID NO: 757654 - DNA, 19 bp, Mus musculus
  siRNA target sequence for BC004056 (NM_145599.1,591-609).
caacatctggtacattaca

SEQ ID NO: 757655 - DNA, 19 bp, Mus musculus
  siRNA target sequence for BC004056 (NM_145599.1,630-648).
cccataataaggatcctat

SEQ ID NO: 757656 - DNA, 19 bp, Mus musculus
  siRNA target sequence for BC004056 (NM_145599.1,650-668).
gatggtcccaatatacagt

SEQ ID NO: 757657 - DNA, 19 bp, Mus musculus
  siRNA target sequence for BC004056 (NM_145599.1,676-694).
gttgggtggccttggtata

SEQ ID NO: 757658 - DNA, 19 bp, Mus musculus
  siRNA target sequence for BC004056 (NM_145599.1,685-703).
ccttggtatatcccaaaat

SEQ ID NO: 757659 - DNA, 19 bp, Mus musculus
  siRNA target sequence for BC004056 (NM_145599.1,686-704).
cttggtatatcccaaaatt

SEQ ID NO: 757660 - DNA, 19 bp, Mus musculus
  siRNA target sequence for BC004056 (NM_145599.1,689-707).
ggtatatcccaaaattgca

SEQ ID NO: 757661 - DNA, 19 bp, Mus musculus
  siRNA target sequence for BC004056 (NM_145599.1,690-708).
gtatatcccaaaattgcaa

SEQ ID NO: 757662 - DNA, 19 bp, Mus musculus
  siRNA target sequence for BC004056 (NM_145599.1,697-715).
ccaaaattgcaatatacgt

SEQ ID NO: 757663 - DNA, 19 bp, Mus musculus
  siRNA target sequence for BC004056 (NM_145599.1,727-745).
gggagtgttacgaagctta

SEQ ID NO: 757664 - DNA, 19 bp, Mus musculus
  siRNA target sequence for BC004056 (NM_145599.1,737-755).
cgaagcttacgtcatctat

SEQ ID NO: 757665 - DNA, 19 bp, Mus musculus
  siRNA target sequence for BC004056 (NM_145599.1,742-760).
cttacgtcatctataactt

SEQ ID NO: 757666 - DNA, 19 bp, Mus musculus
  siRNA target sequence for BC004056 (NM_145599.1,764-782).
gatctttcttaccaactat

SEQ ID NO: 757667 - DNA, 19 bp, Mus musculus
  siRNA target sequence for BC004056 (NM_145599.1,787-805).
caatccgattcccaaactt

SEQ ID NO: 757668 - DNA, 19 bp, Mus musculus
  siRNA target sequence for BC004056 (NM_145599.1,791-809).
ccgattcccaaacttgata

SEQ ID NO: 757669 - DNA, 19 bp, Mus musculus
  siRNA target sequence for BC004056 (NM_145599.1,792-810).
cgattcccaaacttgatat

SEQ ID NO: 757670 - DNA, 19 bp, Mus musculus
  siRNA target sequence for BC004056 (NM_145599.1,793-811).
gattcccaaacttgatatt

SEQ ID NO: 757671 - DNA, 19 bp, Mus musculus
  siRNA target sequence for BC004056 (NM_145599.1,815-833).
cctcgaagcgaaagatcaa

SEQ ID NO: 757672 - DNA, 19 bp, Mus musculus
  siRNA target sequence for BC004056 (NM_145599.1,823-841).
cgaaagatcaacaaaacca

SEQ ID NO: 757673 - DNA, 19 bp, Mus musculus
  siRNA target sequence for BC004056 (NM_145599.1,840-858).
cacatccttccgttatgct

SEQ ID NO: 757674 - DNA, 19 bp, Mus musculus
  siRNA target sequence for BC004056 (NM_145599.1,868-886).
cgtgggcgatgggagaaat

SEQ ID NO: 757675 - DNA, 19 bp, Mus musculus
  siRNA target sequence for BC004056 (NM_145599.1,878-896).
gggagaaatgctactcttt

SEQ ID NO: 757676 - DNA, 19 bp, Mus musculus
  siRNA target sequence for BC004056 (NM_145599.1,905-923).
gctaggagtgctgcaatat

SEQ ID NO: 757677 - DNA, 19 bp, Mus musculus
  siRNA target sequence for BC004056 (NM_145599.1,906-924).
ctaggagtgctgcaatata

SEQ ID NO: 757678 - DNA, 19 bp, Mus musculus
  siRNA target sequence for BC004056 (NM_145599.1,950-968).
cactgcactcgtatgtgaa

SEQ ID NO: 757679 - DNA, 19 bp, Mus musculus
  siRNA target sequence for BC004056 (NM_145599.1,952-970).
ctgcactcgtatgtgaaat

SEQ ID NO: 757680 - DNA, 19 bp, Mus musculus
  siRNA target sequence for BC004056 (NM_145599.1,955-973).
cactcgtatgtgaaatcct

SEQ ID NO: 757681 - DNA, 19 bp, Mus musculus
  siRNA target sequence for BC004056 (NM_145599.1,1015-1033).
ggacatacctcgttatact

SEQ ID NO: 757682 - DNA, 19 bp, Mus musculus
  siRNA target sequence for BC004056 (NM_145599.1,1018-1036).
catacctcgttatactaaa

SEQ ID NO: 757683 - DNA, 19 bp, Mus musculus
  siRNA target sequence for BC004056 (NM_145599.1,1022-1040).
cctcgttatactaaataat

SEQ ID NO: 757684 - DNA, 19 bp, Mus musculus
  siRNA target sequence for BC004056 (NM_145599.1,1190-1208).
ggttaaactgggcgttatt

SEQ ID NO: 757685 - DNA, 19 bp, Mus musculus
  siRNA target sequence for BC004056 (NM_145599.1,1191-1209).
gttaaactgggcgttattt

SEQ ID NO: 757686 - DNA, 19 bp, Mus musculus
  siRNA target sequence for BC004056 (NM_145599.1,1311-1329).
cactatacgttctcctata

SEQ ID NO: 757687 - DNA, 19 bp, Mus musculus
  siRNA target sequence for BC004056 (NM_145599.1,1313-1331).
ctatacgttctcctataaa

SEQ ID NO: 757688 - DNA, 19 bp, Mus musculus
  siRNA target sequence for BC004056 (NM_145599.1,1396-1414).
ccgatatcagagatgatat

SEQ ID NO: 757689 - DNA, 19 bp, Mus musculus
  siRNA target sequence for BC004056 (NM_145599.1,1397-1415).
cgatatcagagatgatatt

SEQ ID NO: 757690 - DNA, 19 bp, Mus musculus
  siRNA target sequence for BC004056 (NM_145599.1,1431-1449).
cgtgtcgggaggacaatga

SEQ ID NO: 757691 - DNA, 19 bp, Mus musculus
  siRNA target sequence for BC004056 (NM_145599.1,1442-1460).
gacaatgagaggttatcca

SEQ ID NO: 757692 - DNA, 19 bp, Mus musculus
  siRNA target sequence for BC004056 (NM_145599.1,1444-1462).
caatgagaggttatccaaa

SEQ ID NO: 757693 - DNA, 19 bp, Mus musculus
  siRNA target sequence for BC004056 (NM_145599.1,1497-1515).
gagcactcgagcctacttt

SEQ ID NO: 757694 - DNA, 19 bp, Mus musculus
  siRNA target sequence for BC004056 (NM_145599.1,1499-1517).
gcactcgagcctactttct

SEQ ID NO: 757695 - DNA, 19 bp, Mus musculus
  siRNA target sequence for BC004056 (NM_145599.1,1500-1518).
cactcgagcctactttctt

SEQ ID NO: 757696 - DNA, 19 bp, Mus musculus
  siRNA target sequence for BC004056 (NM_145599.1,1502-1520).
ctcgagcctactttcttct

SEQ ID NO: 757697 - DNA, 19 bp, Mus musculus
  siRNA target sequence for BC004056 (NM_145599.1,1533-1551).
ctaacttctggttcttcaa

SEQ ID NO: 757698 - DNA, 19 bp, Mus musculus
  siRNA target sequence for BC004056 (NM_145599.1,1581-1599).
ggttttggacacactattt

SEQ ID NO: 757699 - DNA, 19 bp, Mus musculus
  siRNA target sequence for BC004056 (NM_145599.1,1926-1944).
gaagaggtcttaattgaca

SEQ ID NO: 757700 - DNA, 19 bp, Mus musculus
  siRNA target sequence for BC004056 (NM_145599.1,2063-2081).
gaacgcaattcctgataat

SEQ ID NO: 757701 - DNA, 19 bp, Mus musculus
  siRNA target sequence for BC004056 (NM_145599.1,2074-2092).
ctgataatagccaatatca

SEQ ID NO: 757702 - DNA, 19 bp, Mus musculus
  siRNA target sequence for BC004056 (NM_145599.1,2178-2196).
cagcaggagtcttctgatt

SEQ ID NO: 757703 - DNA, 19 bp, Mus musculus
  siRNA target sequence for BC004056 (NM_145599.1,2180-2198).
gcaggagtcttctgattta

SEQ ID NO: 757704 - DNA, 19 bp, Mus musculus
  siRNA target sequence for BC004056 (NM_145599.1,2183-2201).
ggagtcttctgatttatgt

SEQ ID NO: 757705 - DNA, 19 bp, Mus musculus
  siRNA target sequence for BC004056 (NM_145599.1,2184-2202).
gagtcttctgatttatgta

SEQ ID NO: 757706 - DNA, 19 bp, Mus musculus
  siRNA target sequence for BC004056 (NM_145599.1,2193-2211).
gatttatgtaccgaatctt

SEQ ID NO: 757707 - DNA, 19 bp, Mus musculus
  siRNA target sequence for BC016201 (NM_145601.1,661-679).
ggtggcttgagcagaatct

SEQ ID NO: 757708 - DNA, 19 bp, Mus musculus
  siRNA target sequence for BC006874 (NM_145604.1,201-219).
cggtcgccattcttcagaa

SEQ ID NO: 757709 - DNA, 19 bp, Mus musculus
  siRNA target sequence for BC006874 (NM_145604.1,309-327).
ggatcacactactgtttga

SEQ ID NO: 757710 - DNA, 19 bp, Mus musculus
  siRNA target sequence for BC006874 (NM_145604.1,310-328).
gatcacactactgtttgat

SEQ ID NO: 757711 - DNA, 19 bp, Mus musculus
  siRNA target sequence for BC006874 (NM_145604.1,356-374).
gaagtttgtgagttgacaa

SEQ ID NO: 757712 - DNA, 19 bp, Mus musculus
  siRNA target sequence for BC006874 (NM_145604.1,365-383).
gagttgacaaaagtaaagt

SEQ ID NO: 757713 - DNA, 19 bp, Mus musculus
  siRNA target sequence for BC006874 (NM_145604.1,372-390).
caaaagtaaagttaaagta

SEQ ID NO: 757714 - DNA, 19 bp, Mus musculus
  siRNA target sequence for BC006874 (NM_145604.1,388-406).
gtattgtggagtgcatttt

SEQ ID NO: 757715 - DNA, 19 bp, Mus musculus
  siRNA target sequence for BC006874 (NM_145604.1,415-433).
ggccatcgctcctaccatt

SEQ ID NO: 757716 - DNA, 19 bp, Mus musculus
  siRNA target sequence for BC006874 (NM_145604.1,426-444).
ctaccattgagcaaattga

SEQ ID NO: 757717 - DNA, 19 bp, Mus musculus
  siRNA target sequence for BC006874 (NM_145604.1,436-454).
gcaaattgaccagtctttt

SEQ ID NO: 757718 - DNA, 19 bp, Mus musculus
  siRNA target sequence for BC006874 (NM_145604.1,462-480).
cccatcctggagtgtacaa

SEQ ID NO: 757719 - DNA, 19 bp, Mus musculus
  siRNA target sequence for BC006874 (NM_145604.1,464-482).
catcctggagtgtacaact

SEQ ID NO: 757720 - DNA, 19 bp, Mus musculus
  siRNA target sequence for BC006874 (NM_145604.1,467-485).
cctggagtgtacaactcta

SEQ ID NO: 757721 - DNA, 19 bp, Mus musculus
  siRNA target sequence for BC006874 (NM_145604.1,511-529).
ccgaggactgtctttctct

SEQ ID NO: 757722 - DNA, 19 bp, Mus musculus
  siRNA target sequence for BC006874 (NM_145604.1,512-530).
cgaggactgtctttctctt

SEQ ID NO: 757723 - DNA, 19 bp, Mus musculus
  siRNA target sequence for BC006874 (NM_145604.1,513-531).
gaggactgtctttctcttt

SEQ ID NO: 757724 - DNA, 19 bp, Mus musculus
  siRNA target sequence for BC006874 (NM_145604.1,547-565).
gacggaggctcccaagtat

SEQ ID NO: 757725 - DNA, 19 bp, Mus musculus
  siRNA target sequence for BC006874 (NM_145604.1,549-567).
cggaggctcccaagtatga

SEQ ID NO: 757726 - DNA, 19 bp, Mus musculus
  siRNA target sequence for BC006874 (NM_145604.1,559-577).
caagtatgagcccaatttt

SEQ ID NO: 757727 - DNA, 19 bp, Mus musculus
  siRNA target sequence for BC006874 (NM_145604.1,605-623).
ccccatggagcaactgtaa

SEQ ID NO: 757728 - DNA, 19 bp, Mus musculus
  siRNA target sequence for BC006874 (NM_145604.1,606-624).
cccatggagcaactgtaaa

SEQ ID NO: 757729 - DNA, 19 bp, Mus musculus
  siRNA target sequence for BC006874 (NM_145604.1,607-625).
ccatggagcaactgtaaaa

SEQ ID NO: 757730 - DNA, 19 bp, Mus musculus
  siRNA target sequence for BC006874 (NM_145604.1,694-712).
cctggggaatgtatatgct

SEQ ID NO: 757731 - DNA, 19 bp, Mus musculus
  siRNA target sequence for BC006874 (NM_145604.1,700-718).
gaatgtatatgctgaaagt

SEQ ID NO: 757732 - DNA, 19 bp, Mus musculus
  siRNA target sequence for BC006874 (NM_145604.1,803-821).
gatgccaaaatgagagtat

SEQ ID NO: 757733 - DNA, 19 bp, Mus musculus
  siRNA target sequence for BC006874 (NM_145604.1,852-870).
gccaagatgttcttagcat

SEQ ID NO: 757734 - DNA, 19 bp, Mus musculus
  siRNA target sequence for BC006874 (NM_145604.1,881-899).
ccacacaaagtcttctata

SEQ ID NO: 757735 - DNA, 19 bp, Mus musculus
  siRNA target sequence for BC006874 (NM_145604.1,930-948).
cttcccctcataaacaagt

SEQ ID NO: 757736 - DNA, 19 bp, Mus musculus
  siRNA target sequence for BC006874 (NM_145604.1,955-973).
caagtgcaacgactacttt

SEQ ID NO: 757737 - DNA, 19 bp, Mus musculus
  siRNA target sequence for BC006874 (NM_145604.1,958-976).
gtgcaacgactactttttt

SEQ ID NO: 757738 - DNA, 19 bp, Mus musculus
  siRNA target sequence for BC006874 (NM_145604.1,960-978).
gcaacgactacttttttaa

SEQ ID NO: 757739 - DNA, 19 bp, Mus musculus
  siRNA target sequence for BC006874 (NM_145604.1,1051-1069).
caattaccctgggcattat

SEQ ID NO: 757740 - DNA, 19 bp, Mus musculus
  siRNA target sequence for BC006874 (NM_145604.1,1111-1129).
ggccataaagaaagaaaat

SEQ ID NO: 757741 - DNA, 19 bp, Mus musculus
  siRNA target sequence for BC006874 (NM_145604.1,1253-1271).
ccgtttggctccacattct

SEQ ID NO: 757742 - DNA, 19 bp, Mus musculus
  siRNA target sequence for BC006874 (NM_145604.1,1277-1295).
ggtcttcagcggatgatct

SEQ ID NO: 757743 - DNA, 19 bp, Mus musculus
  siRNA target sequence for BC006874 (NM_145604.1,1278-1296).
gtcttcagcggatgatctt

SEQ ID NO: 757744 - DNA, 19 bp, Mus musculus
  siRNA target sequence for BC012312 (NM_145605.1,202-220).
ccctcatagcccatttcca

SEQ ID NO: 757745 - DNA, 19 bp, Mus musculus
  siRNA target sequence for BC012312 (NM_145605.1,268-286).
caccctccccacggttaaa

SEQ ID NO: 757746 - DNA, 19 bp, Mus musculus
  siRNA target sequence for BC012312 (NM_145605.1,296-314).
gtctgctcatcctgagaaa

SEQ ID NO: 757747 - DNA, 19 bp, Mus musculus
  siRNA target sequence for BC012312 (NM_145605.1,352-370).
gccaaaaaaccttcatgta

SEQ ID NO: 757748 - DNA, 19 bp, Mus musculus
  siRNA target sequence for BC012312 (NM_145605.1,361-379).
ccttcatgtataatgaact

SEQ ID NO: 757749 - DNA, 19 bp, Mus musculus
  siRNA target sequence for BC012312 (NM_145605.1,520-538).
ccgatggcgagcagttcta

SEQ ID NO: 757750 - DNA, 19 bp, Mus musculus
  siRNA target sequence for BC012312 (NM_145605.1,525-543).
ggcgagcagttctaccatt

SEQ ID NO: 757751 - DNA, 19 bp, Mus musculus
  siRNA target sequence for BC012312 (NM_145605.1,584-602).
ggaacagattcgatcaaca

SEQ ID NO: 757752 - DNA, 19 bp, Mus musculus
  siRNA target sequence for BC012312 (NM_145605.1,640-658).
cctggaagcgacagctaat

SEQ ID NO: 757753 - DNA, 19 bp, Mus musculus
  siRNA target sequence for BC012312 (NM_145605.1,641-659).
ctggaagcgacagctaatt

SEQ ID NO: 757754 - DNA, 19 bp, Mus musculus
  siRNA target sequence for BC012312 (NM_145605.1,643-661).
ggaagcgacagctaattct

SEQ ID NO: 757755 - DNA, 19 bp, Mus musculus
  siRNA target sequence for BC012312 (NM_145605.1,644-662).
gaagcgacagctaattctt

SEQ ID NO: 757756 - DNA, 19 bp, Mus musculus
  siRNA target sequence for BC012312 (NM_145605.1,647-665).
gcgacagctaattcttttt

SEQ ID NO: 757757 - DNA, 19 bp, Mus musculus
  siRNA target sequence for BC012312 (NM_145605.1,682-700).
gtgcaagggactacatcta

SEQ ID NO: 757758 - DNA, 19 bp, Mus musculus
  siRNA target sequence for BC012312 (NM_145605.1,685-703).
caagggactacatctacta

SEQ ID NO: 757759 - DNA, 19 bp, Mus musculus
  siRNA target sequence for BC012312 (NM_145605.1,931-949).
gggcttggaccaggattaa

SEQ ID NO: 757760 - DNA, 19 bp, Mus musculus
  siRNA target sequence for BC012312 (NM_145605.1,994-1012).
ctgtggctccaaatcatca

SEQ ID NO: 757761 - DNA, 19 bp, Mus musculus
  siRNA target sequence for BC012312 (NM_145605.1,998-1016).
ggctccaaatcatcagata

SEQ ID NO: 757762 - DNA, 19 bp, Mus musculus
  siRNA target sequence for BC012312 (NM_145605.1,1076-1094).
cagtgacctgtatatctat

SEQ ID NO: 757763 - DNA, 19 bp, Mus musculus
  siRNA target sequence for BC012312 (NM_145605.1,1270-1288).
cagtggtcaccattaagca

SEQ ID NO: 757764 - DNA, 19 bp, Mus musculus
  siRNA target sequence for BC012312 (NM_145605.1,1424-1442).
cgtctatggcggcatgttt

SEQ ID NO: 757765 - DNA, 19 bp, Mus musculus
  siRNA target sequence for BC012312 (NM_145605.1,1427-1445).
ctatggcggcatgtttgaa

SEQ ID NO: 757766 - DNA, 19 bp, Mus musculus
  siRNA target sequence for BC012312 (NM_145605.1,1669-1687).
cccgtggggagcaattcga

SEQ ID NO: 757767 - DNA, 19 bp, Mus musculus
  siRNA target sequence for BC012312 (NM_145605.1,1779-1797).
gcccaggccatggcaaaat

SEQ ID NO: 757768 - DNA, 19 bp, Mus musculus
  siRNA target sequence for BC012312 (NM_145605.1,1792-1810).
caaaatcatgctttgatga

SEQ ID NO: 757769 - DNA, 19 bp, Mus musculus
  siRNA target sequence for 8430410K20Rik (NM_145609.1,202-220).
gagactcagacccttttaa

SEQ ID NO: 757770 - DNA, 19 bp, Mus musculus
  siRNA target sequence for 8430410K20Rik (NM_145609.1,231-249).
caagaggaaggaagtcatt

SEQ ID NO: 757771 - DNA, 19 bp, Mus musculus
  siRNA target sequence for 8430410K20Rik (NM_145609.1,306-324).
gatcgcacagtgtgtgaat

SEQ ID NO: 757772 - DNA, 19 bp, Mus musculus
  siRNA target sequence for 8430410K20Rik (NM_145609.1,386-404).
gcgcactcatgaaaaggaa

SEQ ID NO: 757773 - DNA, 19 bp, Mus musculus
  siRNA target sequence for 8430410K20Rik (NM_145609.1,450-468).
gcccacgtctgatctagat

SEQ ID NO: 757774 - DNA, 19 bp, Mus musculus
  siRNA target sequence for 8430410K20Rik (NM_145609.1,452-470).
ccacgtctgatctagatga

SEQ ID NO: 757775 - DNA, 19 bp, Mus musculus
  siRNA target sequence for 8430410K20Rik (NM_145609.1,566-584).
ccttaacagaggtcaaagt

SEQ ID NO: 757776 - DNA, 19 bp, Mus musculus
  siRNA target sequence for 8430410K20Rik (NM_145609.1,687-705).
ccctgacttccctcacatt

SEQ ID NO: 757777 - DNA, 19 bp, Mus musculus
  siRNA target sequence for 8430410K20Rik (NM_145609.1,798-816).
ggaaaaacgccgacttgat

SEQ ID NO: 757778 - DNA, 19 bp, Mus musculus
  siRNA target sequence for 8430410K20Rik (NM_145609.1,925-943).
ctgcagatcgagagagaaa

SEQ ID NO: 757779 - DNA, 19 bp, Mus musculus
  siRNA target sequence for 8430410K20Rik (NM_145609.1,1084-1102).
gatcggctgcaatttttga

SEQ ID NO: 757780 - DNA, 19 bp, Mus musculus
  siRNA target sequence for 8430410K20Rik (NM_145609.1,1156-1174).
gagagactgcggattcaga

SEQ ID NO: 757781 - DNA, 19 bp, Mus musculus
  siRNA target sequence for Ppan (NM_145610.1,222-240).
cccgcctgcaggttcgaaa

SEQ ID NO: 757782 - DNA, 19 bp, Mus musculus
  siRNA target sequence for Ppan (NM_145610.1,315-333).
cagataacagtgtatactt

SEQ ID NO: 757783 - DNA, 19 bp, Mus musculus
  siRNA target sequence for Ppan (NM_145610.1,317-335).
gataacagtgtatacttga

SEQ ID NO: 757784 - DNA, 19 bp, Mus musculus
  siRNA target sequence for Ppan (NM_145610.1,579-597).
gctgcctcctcattaacta

SEQ ID NO: 757785 - DNA, 19 bp, Mus musculus
  siRNA target sequence for Ppan (NM_145610.1,582-600).
gcctcctcattaactacaa

SEQ ID NO: 757786 - DNA, 19 bp, Mus musculus
  siRNA target sequence for Ppan (NM_145610.1,741-759).
cgggtgtggggctatcaga

SEQ ID NO: 757787 - DNA, 19 bp, Mus musculus
  siRNA target sequence for Ppan (NM_145610.1,844-862).
gagcgccgtccgacttact

SEQ ID NO: 757788 - DNA, 19 bp, Mus musculus
  siRNA target sequence for Ppan (NM_145610.1,846-864).
gcgccgtccgacttactga

SEQ ID NO: 757789 - DNA, 19 bp, Mus musculus
  siRNA target sequence for Ppan (NM_145610.1,928-946).
cctcttccacagttttgta

SEQ ID NO: 757790 - DNA, 19 bp, Mus musculus
  siRNA target sequence for Ppan (NM_145610.1,1190-1208).
gaggatgacgctgagtatt

SEQ ID NO: 757791 - DNA, 19 bp, Mus musculus
  siRNA target sequence for Ppan (NM_145610.1,1310-1328).
gagcagaggcctggtaata

SEQ ID NO: 757792 - DNA, 19 bp, Mus musculus
  siRNA target sequence for Ppan (NM_145610.1,1312-1330).
gcagaggcctggtaataaa

SEQ ID NO: 757793 - DNA, 19 bp, Mus musculus
  siRNA target sequence for BC010245 (NM_145611.2,237-255).
gcctggacctggattttct

SEQ ID NO: 757794 - DNA, 19 bp, Mus musculus
  siRNA target sequence for BC010245 (NM_145611.2,811-829).
caagagccagaagtttcta

SEQ ID NO: 757795 - DNA, 19 bp, Mus musculus
  siRNA target sequence for BC010245 (NM_145611.2,969-987).
ctgccctggtagctaaagt

SEQ ID NO: 757796 - DNA, 19 bp, Mus musculus
  siRNA target sequence for BC010245 (NM_145611.2,1560-1578).
ccgcagaccctgaagtcaa

SEQ ID NO: 757797 - DNA, 19 bp, Mus musculus
  siRNA target sequence for BC010245 (NM_145611.2,1604-1622).
gtcaatggcgggtatgagt

SEQ ID NO: 757798 - DNA, 19 bp, Mus musculus
  siRNA target sequence for BC010245 (NM_145611.2,1831-1849).
cgatcctgaggaggaaatt

SEQ ID NO: 757799 - DNA, 19 bp, Mus musculus
  siRNA target sequence for BC010245 (NM_145611.2,1937-1955).
ctgaaagtggcctatacca

SEQ ID NO: 757800 - DNA, 19 bp, Mus musculus
  siRNA target sequence for BC010245 (NM_145611.2,2008-2026).
gcttgtgcggcgacatcta

SEQ ID NO: 757801 - DNA, 19 bp, Mus musculus
  siRNA target sequence for BC010245 (NM_145611.2,2189-2207).
gccggctacagccctatta

SEQ ID NO: 757802 - DNA, 19 bp, Mus musculus
  siRNA target sequence for BC010245 (NM_145611.2,2190-2208).
ccggctacagccctattat

SEQ ID NO: 757803 - DNA, 19 bp, Mus musculus
  siRNA target sequence for BC010245 (NM_145611.2,2193-2211).
gctacagccctattatgct

SEQ ID NO: 757804 - DNA, 19 bp, Mus musculus
  siRNA target sequence for BC010245 (NM_145611.2,2216-2234).
gccctggccacgttgaaga

SEQ ID NO: 757805 - DNA, 19 bp, Mus musculus
  siRNA target sequence for BC010245 (NM_145611.2,2269-2287).
ccggcttgggaatgtcaat

SEQ ID NO: 757806 - DNA, 19 bp, Mus musculus
  siRNA target sequence for BC010245 (NM_145611.2,2373-2391).
gtgaggcggacgtcaacat

SEQ ID NO: 757807 - DNA, 19 bp, Mus musculus
  siRNA target sequence for D430025H09Rik (NM_145616.2,83-101).
ctggccgagctgcaaataa

SEQ ID NO: 757808 - DNA, 19 bp, Mus musculus
  siRNA target sequence for D430025H09Rik (NM_145616.2,86-104).
gccgagctgcaaataacgt

SEQ ID NO: 757809 - DNA, 19 bp, Mus musculus
  siRNA target sequence for D430025H09Rik (NM_145616.2,110-128).
gtggacttcatctggttat

SEQ ID NO: 757810 - DNA, 19 bp, Mus musculus
  siRNA target sequence for D430025H09Rik (NM_145616.2,135-153).
gtcgtcactttctgacaaa

SEQ ID NO: 757811 - DNA, 19 bp, Mus musculus
  siRNA target sequence for D430025H09Rik (NM_145616.2,137-155).
cgtcactttctgacaaaaa

SEQ ID NO: 757812 - DNA, 19 bp, Mus musculus
  siRNA target sequence for D430025H09Rik (NM_145616.2,140-158).
cactttctgacaaaaacaa

SEQ ID NO: 757813 - DNA, 19 bp, Mus musculus
  siRNA target sequence for D430025H09Rik (NM_145616.2,168-186).
caggcttaacagagaaaca

SEQ ID NO: 757814 - DNA, 19 bp, Mus musculus
  siRNA target sequence for D430025H09Rik (NM_145616.2,220-238).
ctggagaggaactactcaa

SEQ ID NO: 757815 - DNA, 19 bp, Mus musculus
  siRNA target sequence for D430025H09Rik (NM_145616.2,247-265).
ggagacggaagagtaataa

SEQ ID NO: 757816 - DNA, 19 bp, Mus musculus
  siRNA target sequence for D430025H09Rik (NM_145616.2,266-284).
gtccttcgcctcgtaataa

SEQ ID NO: 757817 - DNA, 19 bp, Mus musculus
  siRNA target sequence for D430025H09Rik (NM_145616.2,268-286).
ccttcgcctcgtaataagt

SEQ ID NO: 757818 - DNA, 19 bp, Mus musculus
  siRNA target sequence for D430025H09Rik (NM_145616.2,274-292).
cctcgtaataagtcatcat

SEQ ID NO: 757819 - DNA, 19 bp, Mus musculus
  siRNA target sequence for D430025H09Rik (NM_145616.2,408-426).
ccggcagggctgtcatagt

SEQ ID NO: 757820 - DNA, 19 bp, Mus musculus
  siRNA target sequence for D430025H09Rik (NM_145616.2,499-517).
cgctcttctgaagagaaaa

SEQ ID NO: 757821 - DNA, 19 bp, Mus musculus
  siRNA target sequence for D430025H09Rik (NM_145616.2,529-547).
gacaggctgaccctagaaa

SEQ ID NO: 757822 - DNA, 19 bp, Mus musculus
  siRNA target sequence for D430025H09Rik (NM_145616.2,531-549).
caggctgaccctagaaaga

SEQ ID NO: 757823 - DNA, 19 bp, Mus musculus
  siRNA target sequence for D430025H09Rik (NM_145616.2,533-551).
ggctgaccctagaaagaca

SEQ ID NO: 757824 - DNA, 19 bp, Mus musculus
  siRNA target sequence for D430025H09Rik (NM_145616.2,534-552).
gctgaccctagaaagacaa

SEQ ID NO: 757825 - DNA, 19 bp, Mus musculus
  siRNA target sequence for D430025H09Rik (NM_145616.2,581-599).
gggaagagcaccttcgttt

SEQ ID NO: 757826 - DNA, 19 bp, Mus musculus
  siRNA target sequence for D430025H09Rik (NM_145616.2,586-604).
gagcaccttcgtttgttga

SEQ ID NO: 757827 - DNA, 19 bp, Mus musculus
  siRNA target sequence for D430025H09Rik (NM_145616.2,591-609).
ccttcgtttgttgaacttt

SEQ ID NO: 757828 - DNA, 19 bp, Mus musculus
  siRNA target sequence for D430025H09Rik (NM_145616.2,603-621).
gaactttcagcacaatttt

SEQ ID NO: 757829 - DNA, 19 bp, Mus musculus
  siRNA target sequence for D430025H09Rik (NM_145616.2,628-646).
cggatccaaaatatttcta

SEQ ID NO: 757830 - DNA, 19 bp, Mus musculus
  siRNA target sequence for D430025H09Rik (NM_145616.2,649-667).
ctacagaggctaatattct

SEQ ID NO: 757831 - DNA, 19 bp, Mus musculus
  siRNA target sequence for D430025H09Rik (NM_145616.2,733-751).
ctcctgttagggaaaaaca

SEQ ID NO: 757832 - DNA, 19 bp, Mus musculus
  siRNA target sequence for D430025H09Rik (NM_145616.2,735-753).
cctgttagggaaaaacaga

SEQ ID NO: 757833 - DNA, 19 bp, Mus musculus
  siRNA target sequence for D430025H09Rik (NM_145616.2,765-783).
ctcaaatctggagaatcta

SEQ ID NO: 757834 - DNA, 19 bp, Mus musculus
  siRNA target sequence for D430025H09Rik (NM_145616.2,772-790).
ctggagaatctaaaaaatt

SEQ ID NO: 757835 - DNA, 19 bp, Mus musculus
  siRNA target sequence for D430025H09Rik (NM_145616.2,802-820).
gaccttcatggaaatcaga

SEQ ID NO: 757836 - DNA, 19 bp, Mus musculus
  siRNA target sequence for D430025H09Rik (NM_145616.2,838-856).
gttaatcatttgtgtgatt

SEQ ID NO: 757837 - DNA, 19 bp, Mus musculus
  siRNA target sequence for D430025H09Rik (NM_145616.2,851-869).
gtgatttgagagttctaaa

SEQ ID NO: 757838 - DNA, 19 bp, Mus musculus
  siRNA target sequence for D430025H09Rik (NM_145616.2,906-924).
caacggcctggattcacta

SEQ ID NO: 757839 - DNA, 19 bp, Mus musculus
  siRNA target sequence for D430025H09Rik (NM_145616.2,920-938).
cactaacggaacttaacct

SEQ ID NO: 757840 - DNA, 19 bp, Mus musculus
  siRNA target sequence for D430025H09Rik (NM_145616.2,1102-1120).
gagtcatggtacaaacaca

SEQ ID NO: 757841 - DNA, 19 bp, Mus musculus
  siRNA target sequence for D430025H09Rik (NM_145616.2,1117-1135).
cacacggtccttcagaata

SEQ ID NO: 757842 - DNA, 19 bp, Mus musculus
  siRNA target sequence for D430025H09Rik (NM_145616.2,1147-1165).
cgccagctagacatgaaga

SEQ ID NO: 757843 - DNA, 19 bp, Mus musculus
  siRNA target sequence for D430025H09Rik (NM_145616.2,1193-1211).
catctgttgtggccaaaaa

SEQ ID NO: 757844 - DNA, 19 bp, Mus musculus
  siRNA target sequence for D430025H09Rik (NM_145616.2,1268-1286).
ggttaaccattaacaatgt

SEQ ID NO: 757845 - DNA, 19 bp, Mus musculus
  siRNA target sequence for D430025H09Rik (NM_145616.2,1308-1326).
gcagcgagtagccaacatt

SEQ ID NO: 757846 - DNA, 19 bp, Mus musculus
  siRNA target sequence for D430025H09Rik (NM_145616.2,1381-1399).
ctcgacggaggcaacatct

SEQ ID NO: 757847 - DNA, 19 bp, Mus musculus
  siRNA target sequence for D430025H09Rik (NM_145616.2,1437-1455).
gctcagcagtgcgttacaa

SEQ ID NO: 757848 - DNA, 19 bp, Mus musculus
  siRNA target sequence for D430025H09Rik (NM_145616.2,1543-1561).
cgaaactggagtgttcaaa

SEQ ID NO: 757849 - DNA, 19 bp, Mus musculus
  siRNA target sequence for D430025H09Rik (NM_145616.2,1573-1591).
gtcaccacggtctcattca

SEQ ID NO: 757850 - DNA, 19 bp, Mus musculus
  siRNA target sequence for D430025H09Rik (NM_145616.2,1726-1744).
cgggttgaccagttgacaa

SEQ ID NO: 757851 - DNA, 19 bp, Mus musculus
  siRNA target sequence for D430025H09Rik (NM_145616.2,1727-1745).
gggttgaccagttgacaat

SEQ ID NO: 757852 - DNA, 19 bp, Mus musculus
  siRNA target sequence for D430025H09Rik (NM_145616.2,1757-1775).
gaaacccagtggtcaactt

SEQ ID NO: 757853 - DNA, 19 bp, Mus musculus
  siRNA target sequence for D430025H09Rik (NM_145616.2,1763-1781).
cagtggtcaactttacact

SEQ ID NO: 757854 - DNA, 19 bp, Mus musculus
  siRNA target sequence for D430025H09Rik (NM_145616.2,1917-1935).
gccccagtaccgcatgatt

SEQ ID NO: 757855 - DNA, 19 bp, Mus musculus
  siRNA target sequence for D430025H09Rik (NM_145616.2,1918-1936).
ccccagtaccgcatgattt

SEQ ID NO: 757856 - DNA, 19 bp, Mus musculus
  siRNA target sequence for D430025H09Rik (NM_145616.2,1920-1938).
ccagtaccgcatgatttca

SEQ ID NO: 757857 - DNA, 19 bp, Mus musculus
  siRNA target sequence for D430025H09Rik (NM_145616.2,1921-1939).
cagtaccgcatgatttcaa

SEQ ID NO: 757858 - DNA, 19 bp, Mus musculus
  siRNA target sequence for D430025H09Rik (NM_145616.2,2059-2077).
cgcgctaccctgaattaca

SEQ ID NO: 757859 - DNA, 19 bp, Mus musculus
  siRNA target sequence for D430025H09Rik (NM_145616.2,2127-2145).
gaagttctgcaggttgtat

SEQ ID NO: 757860 - DNA, 19 bp, Mus musculus
  siRNA target sequence for D430025H09Rik (NM_145616.2,2174-2192).
ccatcaacatgaaaaacga

SEQ ID NO: 757861 - DNA, 19 bp, Mus musculus
  siRNA target sequence for D430025H09Rik (NM_145616.2,2237-2255).
gagacgctgtcatagagat

SEQ ID NO: 757862 - DNA, 19 bp, Mus musculus
  siRNA target sequence for Narg2 (NM_145618.2,219-237).
gctgaactgggatgttaca

SEQ ID NO: 757863 - DNA, 19 bp, Mus musculus
  siRNA target sequence for Narg2 (NM_145618.2,294-312).
ggctccaagtttaaaagaa

SEQ ID NO: 757864 - DNA, 19 bp, Mus musculus
  siRNA target sequence for Narg2 (NM_145618.2,324-342).
gtctaacagacgtatagga

SEQ ID NO: 757865 - DNA, 19 bp, Mus musculus
  siRNA target sequence for Narg2 (NM_145618.2,330-348).
cagacgtataggagaaaat

SEQ ID NO: 757866 - DNA, 19 bp, Mus musculus
  siRNA target sequence for Narg2 (NM_145618.2,334-352).
cgtataggagaaaatttga

SEQ ID NO: 757867 - DNA, 19 bp, Mus musculus
  siRNA target sequence for Narg2 (NM_145618.2,491-509).
gaacttatgtggatttgtt

SEQ ID NO: 757868 - DNA, 19 bp, Mus musculus
  siRNA target sequence for Narg2 (NM_145618.2,501-519).
ggatttgttggctaaatat

SEQ ID NO: 757869 - DNA, 19 bp, Mus musculus
  siRNA target sequence for Narg2 (NM_145618.2,520-538).
gcaaagctcccctcaagtt

SEQ ID NO: 757870 - DNA, 19 bp, Mus musculus
  siRNA target sequence for Narg2 (NM_145618.2,554-572).
caaataccaatgaatatct

SEQ ID NO: 757871 - DNA, 19 bp, Mus musculus
  siRNA target sequence for Narg2 (NM_145618.2,574-592).
cagtatctggatatgaaaa

SEQ ID NO: 757872 - DNA, 19 bp, Mus musculus
  siRNA target sequence for Narg2 (NM_145618.2,648-666).
gaaatgtgcacaggattat

SEQ ID NO: 757873 - DNA, 19 bp, Mus musculus
  siRNA target sequence for Narg2 (NM_145618.2,653-671).
gtgcacaggattataatat

SEQ ID NO: 757874 - DNA, 19 bp, Mus musculus
  siRNA target sequence for Narg2 (NM_145618.2,716-734).
cttgcattgaacaagtgaa

SEQ ID NO: 757875 - DNA, 19 bp, Mus musculus
  siRNA target sequence for Narg2 (NM_145618.2,732-750).
gaaaaagtacccagaattt

SEQ ID NO: 757876 - DNA, 19 bp, Mus musculus
  siRNA target sequence for Narg2 (NM_145618.2,741-759).
cccagaattttatactctt

SEQ ID NO: 757877 - DNA, 19 bp, Mus musculus
  siRNA target sequence for Narg2 (NM_145618.2,770-788).
ccagcctaatgggattctt

SEQ ID NO: 757878 - DNA, 19 bp, Mus musculus
  siRNA target sequence for Narg2 (NM_145618.2,841-859).
ggcagtgcaaagtttgtaa

SEQ ID NO: 757879 - DNA, 19 bp, Mus musculus
  siRNA target sequence for Narg2 (NM_145618.2,843-861).
cagtgcaaagtttgtaaaa

SEQ ID NO: 757880 - DNA, 19 bp, Mus musculus
  siRNA target sequence for Narg2 (NM_145618.2,907-925).
gacatgtcttccattgaga

SEQ ID NO: 757881 - DNA, 19 bp, Mus musculus
  siRNA target sequence for Narg2 (NM_145618.2,918-936).
cattgagaccccacaacaa

SEQ ID NO: 757882 - DNA, 19 bp, Mus musculus
  siRNA target sequence for Narg2 (NM_145618.2,951-969).
gcactgtgatattagtaaa

SEQ ID NO: 757883 - DNA, 19 bp, Mus musculus
  siRNA target sequence for Narg2 (NM_145618.2,979-997).
gcagagaagcttgtttcaa

SEQ ID NO: 757884 - DNA, 19 bp, Mus musculus
  siRNA target sequence for Narg2 (NM_145618.2,982-1000).
gagaagcttgtttcaagat

SEQ ID NO: 757885 - DNA, 19 bp, Mus musculus
  siRNA target sequence for Narg2 (NM_145618.2,1016-1034).
ctctgactagccaagcatt

SEQ ID NO: 757886 - DNA, 19 bp, Mus musculus
  siRNA target sequence for Narg2 (NM_145618.2,1018-1036).
ctgactagccaagcattat

SEQ ID NO: 757887 - DNA, 19 bp, Mus musculus
  siRNA target sequence for Narg2 (NM_145618.2,1038-1056).
caccttgctcaataaccat

SEQ ID NO: 757888 - DNA, 19 bp, Mus musculus
  siRNA target sequence for Narg2 (NM_145618.2,1121-1139).
ccaaaccagttaaagtaat

SEQ ID NO: 757889 - DNA, 19 bp, Mus musculus
  siRNA target sequence for Narg2 (NM_145618.2,1122-1140).
caaaccagttaaagtaatt

SEQ ID NO: 757890 - DNA, 19 bp, Mus musculus
  siRNA target sequence for Narg2 (NM_145618.2,1154-1172).
cacttcctcgaaagcaaat

SEQ ID NO: 757891 - DNA, 19 bp, Mus musculus
  siRNA target sequence for Narg2 (NM_145618.2,1160-1178).
ctcgaaagcaaatgacaat

SEQ ID NO: 757892 - DNA, 19 bp, Mus musculus
  siRNA target sequence for Narg2 (NM_145618.2,1162-1180).
cgaaagcaaatgacaatga

SEQ ID NO: 757893 - DNA, 19 bp, Mus musculus
  siRNA target sequence for Narg2 (NM_145618.2,1313-1331).
ctggtgagtgccgaaaaat

SEQ ID NO: 757894 - DNA, 19 bp, Mus musculus
  siRNA target sequence for Narg2 (NM_145618.2,1322-1340).
gccgaaaaattgaaactct

SEQ ID NO: 757895 - DNA, 19 bp, Mus musculus
  siRNA target sequence for Narg2 (NM_145618.2,1467-1485).
ccacgcagtccccaaaata

SEQ ID NO: 757896 - DNA, 19 bp, Mus musculus
  siRNA target sequence for Narg2 (NM_145618.2,1470-1488).
cgcagtccccaaaatagca

SEQ ID NO: 757897 - DNA, 19 bp, Mus musculus
  siRNA target sequence for Narg2 (NM_145618.2,1598-1616).
ctacacctaacattactga

SEQ ID NO: 757898 - DNA, 19 bp, Mus musculus
  siRNA target sequence for Narg2 (NM_145618.2,1603-1621).
cctaacattactgatgatt

SEQ ID NO: 757899 - DNA, 19 bp, Mus musculus
  siRNA target sequence for Narg2 (NM_145618.2,1608-1626).
cattactgatgattctaga

SEQ ID NO: 757900 - DNA, 19 bp, Mus musculus
  siRNA target sequence for Narg2 (NM_145618.2,1615-1633).
gatgattctagaagtttat

SEQ ID NO: 757901 - DNA, 19 bp, Mus musculus
  siRNA target sequence for Narg2 (NM_145618.2,1755-1773).
cagtgccaatgcaaaatct

SEQ ID NO: 757902 - DNA, 19 bp, Mus musculus
  siRNA target sequence for Narg2 (NM_145618.2,1757-1775).
gtgccaatgcaaaatctct

SEQ ID NO: 757903 - DNA, 19 bp, Mus musculus
  siRNA target sequence for Narg2 (NM_145618.2,1836-1854).
gctgtgtaccaatgatgaa

SEQ ID NO: 757904 - DNA, 19 bp, Mus musculus
  siRNA target sequence for Narg2 (NM_145618.2,1839-1857).
gtgtaccaatgatgaaaga

SEQ ID NO: 757905 - DNA, 19 bp, Mus musculus
  siRNA target sequence for Narg2 (NM_145618.2,1865-1883).
gtcaggggaatgcaaacaa

SEQ ID NO: 757906 - DNA, 19 bp, Mus musculus
  siRNA target sequence for Narg2 (NM_145618.2,1959-1977).
ggactgcttaatcattgat

SEQ ID NO: 757907 - DNA, 19 bp, Mus musculus
  siRNA target sequence for Narg2 (NM_145618.2,1960-1978).
gactgcttaatcattgata

SEQ ID NO: 757908 - DNA, 19 bp, Mus musculus
  siRNA target sequence for Narg2 (NM_145618.2,1975-1993).
gatacagagagtagaagtt

SEQ ID NO: 757909 - DNA, 19 bp, Mus musculus
  siRNA target sequence for Narg2 (NM_145618.2,2001-2019).
gaagacagctgatttaggt

SEQ ID NO: 757910 - DNA, 19 bp, Mus musculus
  siRNA target sequence for Narg2 (NM_145618.2,2090-2108).
gtgttttaaagaaacctat

SEQ ID NO: 757911 - DNA, 19 bp, Mus musculus
  siRNA target sequence for Narg2 (NM_145618.2,2105-2123).
ctatcaaaagagtctacaa

SEQ ID NO: 757912 - DNA, 19 bp, Mus musculus
  siRNA target sequence for Narg2 (NM_145618.2,2114-2132).
gagtctacaaaaaatttga

SEQ ID NO: 757913 - DNA, 19 bp, Mus musculus
  siRNA target sequence for Narg2 (NM_145618.2,2194-2212).
cctgagttgcccttgacta

SEQ ID NO: 757914 - DNA, 19 bp, Mus musculus
  siRNA target sequence for Narg2 (NM_145618.2,2195-2213).
ctgagttgcccttgactaa

SEQ ID NO: 757915 - DNA, 19 bp, Mus musculus
  siRNA target sequence for Narg2 (NM_145618.2,2197-2215).
gagttgcccttgactaatt

SEQ ID NO: 757916 - DNA, 19 bp, Mus musculus
  siRNA target sequence for Narg2 (NM_145618.2,2199-2217).
gttgcccttgactaattca

SEQ ID NO: 757917 - DNA, 19 bp, Mus musculus
  siRNA target sequence for Narg2 (NM_145618.2,2202-2220).
gcccttgactaattcagaa

SEQ ID NO: 757918 - DNA, 19 bp, Mus musculus
  siRNA target sequence for Narg2 (NM_145618.2,2208-2226).
gactaattcagaagaatct

SEQ ID NO: 757919 - DNA, 19 bp, Mus musculus
  siRNA target sequence for Narg2 (NM_145618.2,2294-2312).
ggccctctgcatttcagaa

SEQ ID NO: 757920 - DNA, 19 bp, Mus musculus
  siRNA target sequence for Narg2 (NM_145618.2,2330-2348).
catatgaacttcaagacta

SEQ ID NO: 757921 - DNA, 19 bp, Mus musculus
  siRNA target sequence for Narg2 (NM_145618.2,2344-2362).
gactatgtggaagatacat

SEQ ID NO: 757922 - DNA, 19 bp, Mus musculus
  siRNA target sequence for Narg2 (NM_145618.2,2346-2364).
ctatgtggaagatacatca

SEQ ID NO: 757923 - DNA, 19 bp, Mus musculus
  siRNA target sequence for Narg2 (NM_145618.2,2411-2429).
gcctacaagacctgttgtt

SEQ ID NO: 757924 - DNA, 19 bp, Mus musculus
  siRNA target sequence for Narg2 (NM_145618.2,2412-2430).
cctacaagacctgttgtta

SEQ ID NO: 757925 - DNA, 19 bp, Mus musculus
  siRNA target sequence for Narg2 (NM_145618.2,2498-2516).
gacaatttccagtttacgt

SEQ ID NO: 757926 - DNA, 19 bp, Mus musculus
  siRNA target sequence for Narg2 (NM_145618.2,2507-2525).
cagtttacgtgctaccaaa

SEQ ID NO: 757927 - DNA, 19 bp, Mus musculus
  siRNA target sequence for Narg2 (NM_145618.2,2517-2535).
gctaccaaaagtagagtat

SEQ ID NO: 757928 - DNA, 19 bp, Mus musculus
  siRNA target sequence for Narg2 (NM_145618.2,2532-2550).
gtatcaaggttgttatgga

SEQ ID NO: 757929 - DNA, 19 bp, Mus musculus
  siRNA target sequence for Narg2 (NM_145618.2,2551-2569).
gttgaagctctgactgaaa

SEQ ID NO: 757930 - DNA, 19 bp, Mus musculus
  siRNA target sequence for Narg2 (NM_145618.2,2581-2599).
cgcttctggactgaaagtt

SEQ ID NO: 757931 - DNA, 19 bp, Mus musculus
  siRNA target sequence for Narg2 (NM_145618.2,2588-2606).
ggactgaaagtttattgca

SEQ ID NO: 757932 - DNA, 19 bp, Mus musculus
  siRNA target sequence for Narg2 (NM_145618.2,2609-2627).
ccaactgctcgttttatgt

SEQ ID NO: 757933 - DNA, 19 bp, Mus musculus
  siRNA target sequence for Narg2 (NM_145618.2,2610-2628).
caactgctcgttttatgtt

SEQ ID NO: 757934 - DNA, 19 bp, Mus musculus
  siRNA target sequence for Narg2 (NM_145618.2,2629-2647).
gggcatattgatgcattta

SEQ ID NO: 757935 - DNA, 19 bp, Mus musculus
  siRNA target sequence for Narg2 (NM_145618.2,2733-2751).
cattctccagcacattcta

SEQ ID NO: 757936 - DNA, 19 bp, Mus musculus
  siRNA target sequence for Narg2 (NM_145618.2,2740-2758).
cagcacattctaaagaaat

SEQ ID NO: 757937 - DNA, 19 bp, Mus musculus
  siRNA target sequence for Narg2 (NM_145618.2,2810-2828).
cttcactcctgatctacaa

SEQ ID NO: 757938 - DNA, 19 bp, Mus musculus
  siRNA target sequence for Narg2 (NM_145618.2,2829-2847).
gacctcagatggaaaagtt

SEQ ID NO: 757939 - DNA, 19 bp, Mus musculus
  siRNA target sequence for Narg2 (NM_145618.2,2845-2863).
gttactagaacggcatata

SEQ ID NO: 757940 - DNA, 19 bp, Mus musculus
  siRNA target sequence for Narg2 (NM_145618.2,2849-2867).
ctagaacggcatataattt

SEQ ID NO: 757941 - DNA, 19 bp, Mus musculus
  siRNA target sequence for Narg2 (NM_145618.2,2855-2873).
cggcatataatttgcataa

SEQ ID NO: 757942 - DNA, 19 bp, Mus musculus
  siRNA target sequence for Narg2 (NM_145618.2,2939-2957).
gttacctgttaccatatca

SEQ ID NO: 757943 - DNA, 19 bp, Mus musculus
  siRNA target sequence for Narg2 (NM_145618.2,2946-2964).
gttaccatatcatatccat

SEQ ID NO: 757944 - DNA, 19 bp, Mus musculus
  siRNA target sequence for Narg2 (NM_145618.2,3005-3023).
gccctgcagcacaagcaaa

SEQ ID NO: 757945 - DNA, 19 bp, Mus musculus
  siRNA target sequence for Narg2 (NM_145618.2,3121-3139).
ggagtggctcggaataaaa

SEQ ID NO: 757946 - DNA, 19 bp, Mus musculus
  siRNA target sequence for Narg2 (NM_145618.2,3126-3144).
ggctcggaataaaaggaaa

SEQ ID NO: 757947 - DNA, 19 bp, Mus musculus
  siRNA target sequence for Narg2 (NM_145618.2,3127-3145).
gctcggaataaaaggaaaa

SEQ ID NO: 757948 - DNA, 19 bp, Mus musculus
  siRNA target sequence for D9Wsu10e (NM_145620.3,277-295).
ctacgcttggccaaactct

SEQ ID NO: 757949 - DNA, 19 bp, Mus musculus
  siRNA target sequence for D9Wsu10e (NM_145620.3,288-306).
caaactctaccttgaacaa

SEQ ID NO: 757950 - DNA, 19 bp, Mus musculus
  siRNA target sequence for D9Wsu10e (NM_145620.3,446-464).
ccaccgacattcgagtttt

SEQ ID NO: 757951 - DNA, 19 bp, Mus musculus
  siRNA target sequence for D9Wsu10e (NM_145620.3,469-487).
ggccaccagctctccatta

SEQ ID NO: 757952 - DNA, 19 bp, Mus musculus
  siRNA target sequence for D9Wsu10e (NM_145620.3,472-490).
caccagctctccattacgt

SEQ ID NO: 757953 - DNA, 19 bp, Mus musculus
  siRNA target sequence for D9Wsu10e (NM_145620.3,694-712).
cgcagcaagctcattctca

SEQ ID NO: 757954 - DNA, 19 bp, Mus musculus
  siRNA target sequence for D9Wsu10e (NM_145620.3,696-714).
cagcaagctcattctcatt

SEQ ID NO: 757955 - DNA, 19 bp, Mus musculus
  siRNA target sequence for D9Wsu10e (NM_145620.3,1290-1308).
catccccctggttggtttt

SEQ ID NO: 757956 - DNA, 19 bp, Mus musculus
  siRNA target sequence for D9Wsu10e (NM_145620.3,1380-1398).
ccggtggtggaggatcaaa

SEQ ID NO: 757957 - DNA, 19 bp, Mus musculus
  siRNA target sequence for 2610208M17Rik (NM_145626.1,582-600).
caccatcaggattgagaaa

SEQ ID NO: 757958 - DNA, 19 bp, Mus musculus
  siRNA target sequence for 2610208M17Rik (NM_145626.1,663-681).
gaatggcatagatttaact

SEQ ID NO: 757959 - DNA, 19 bp, Mus musculus
  siRNA target sequence for 2610208M17Rik (NM_145626.1,707-725).
caaggaaagaagatactta

SEQ ID NO: 757960 - DNA, 19 bp, Mus musculus
  siRNA target sequence for 2610208M17Rik (NM_145626.1,751-769).
ctccagaaacacgttgaaa

SEQ ID NO: 757961 - DNA, 19 bp, Mus musculus
  siRNA target sequence for D330003H11Rik (NM_145633.2,295-313).
ccagttcgagtcctatgtt

SEQ ID NO: 757962 - DNA, 19 bp, Mus musculus
  siRNA target sequence for D330003H11Rik (NM_145633.2,296-314).
cagttcgagtcctatgttt

SEQ ID NO: 757963 - DNA, 19 bp, Mus musculus
  siRNA target sequence for D330003H11Rik (NM_145633.2,301-319).
cgagtcctatgttttggta

SEQ ID NO: 757964 - DNA, 19 bp, Mus musculus
  siRNA target sequence for D330003H11Rik (NM_145633.2,357-375).
ctgtcgtcattgaaggaaa

SEQ ID NO: 757965 - DNA, 19 bp, Mus musculus
  siRNA target sequence for D330003H11Rik (NM_145633.2,536-554).
cctttctccctgaaaacca

SEQ ID NO: 757966 - DNA, 19 bp, Mus musculus
  siRNA target sequence for D330003H11Rik (NM_145633.2,622-640).
ccggacgttccgagaatgt

SEQ ID NO: 757967 - DNA, 19 bp, Mus musculus
  siRNA target sequence for D330003H11Rik (NM_145633.2,624-642).
ggacgttccgagaatgtga

SEQ ID NO: 757968 - DNA, 19 bp, Mus musculus
  siRNA target sequence for D330003H11Rik (NM_145633.2,625-643).
gacgttccgagaatgtgaa

SEQ ID NO: 757969 - DNA, 19 bp, Mus musculus
  siRNA target sequence for D330003H11Rik (NM_145633.2,653-671).
ctccgccaccacatagact

SEQ ID NO: 757970 - DNA, 19 bp, Mus musculus
  siRNA target sequence for D330003H11Rik (NM_145633.2,661-679).
ccacatagactccgtaaat

SEQ ID NO: 757971 - DNA, 19 bp, Mus musculus
  siRNA target sequence for D330003H11Rik (NM_145633.2,664-682).
catagactccgtaaatgct

SEQ ID NO: 757972 - DNA, 19 bp, Mus musculus
  siRNA target sequence for D330003H11Rik (NM_145633.2,769-787).
gcaggccgtagagatgtat

SEQ ID NO: 757973 - DNA, 19 bp, Mus musculus
  siRNA target sequence for D330003H11Rik (NM_145633.2,784-802).
gtatgtccatcacgatatt

SEQ ID NO: 757974 - DNA, 19 bp, Mus musculus
  siRNA target sequence for D330003H11Rik (NM_145633.2,843-861).
gcgaggatgccgcctttaa

SEQ ID NO: 757975 - DNA, 19 bp, Mus musculus
  siRNA target sequence for D330003H11Rik (NM_145633.2,845-863).
gaggatgccgcctttaaca

SEQ ID NO: 757976 - DNA, 19 bp, Mus musculus
  siRNA target sequence for D330003H11Rik (NM_145633.2,851-869).
gccgcctttaacaaaatca

SEQ ID NO: 757977 - DNA, 19 bp, Mus musculus
  siRNA target sequence for D330003H11Rik (NM_145633.2,868-886).
cacgagaagccttcaagat

SEQ ID NO: 757978 - DNA, 19 bp, Mus musculus
  siRNA target sequence for D330003H11Rik (NM_145633.2,931-949).
catccctcgggcaaagaga

SEQ ID NO: 757979 - DNA, 19 bp, Mus musculus
  siRNA target sequence for D330003H11Rik (NM_145633.2,953-971).
ctgggtcagttgaacaagt

SEQ ID NO: 757980 - DNA, 19 bp, Mus musculus
  siRNA target sequence for D330003H11Rik (NM_145633.2,956-974).
ggtcagttgaacaagtgta

SEQ ID NO: 757981 - DNA, 19 bp, Mus musculus
  siRNA target sequence for D330003H11Rik (NM_145633.2,1015-1033).
ccagctcatgacacaatct

SEQ ID NO: 757982 - DNA, 19 bp, Mus musculus
  siRNA target sequence for D330003H11Rik (NM_145633.2,1059-1077).
ccatgtgtgccgatgatct

SEQ ID NO: 757983 - DNA, 19 bp, Mus musculus
  siRNA target sequence for D330003H11Rik (NM_145633.2,1078-1096).
cctctcggtcctgttatat

SEQ ID NO: 757984 - DNA, 19 bp, Mus musculus
  siRNA target sequence for D330003H11Rik (NM_145633.2,1173-1191).
ccaaagatgagctaggata

SEQ ID NO: 757985 - DNA, 19 bp, Mus musculus
  siRNA target sequence for D330003H11Rik (NM_145633.2,1205-1223).
gtcgaggctgcgattgaat

SEQ ID NO: 757986 - DNA, 19 bp, Mus musculus
  siRNA target sequence for D330003H11Rik (NM_145633.2,1269-1287).
gatttggcgacagactatt

SEQ ID NO: 757987 - DNA, 19 bp, Mus musculus
  siRNA target sequence for D330003H11Rik (NM_145633.2,1274-1292).
ggcgacagactatttctca

SEQ ID NO: 757988 - DNA, 19 bp, Mus musculus
  siRNA target sequence for D330003H11Rik (NM_145633.2,1275-1293).
gcgacagactatttctcaa

SEQ ID NO: 757989 - DNA, 19 bp, Mus musculus
  siRNA target sequence for D330003H11Rik (NM_145633.2,1332-1350).
ccatcgactgcctgttcaa

SEQ ID NO: 757990 - DNA, 19 bp, Mus musculus
  siRNA target sequence for D330003H11Rik (NM_145633.2,1409-1427).
gacaaagacgccatgcaaa

SEQ ID NO: 757991 - DNA, 19 bp, Mus musculus
  siRNA target sequence for D330003H11Rik (NM_145633.2,1429-1447).
gatgtgccacccactttgt

SEQ ID NO: 757992 - DNA, 19 bp, Mus musculus
  siRNA target sequence for D330003H11Rik (NM_145633.2,1593-1611).
ccaaaggtgccgtagtgaa

SEQ ID NO: 757993 - DNA, 19 bp, Mus musculus
  siRNA target sequence for D330003H11Rik (NM_145633.2,1594-1612).
caaaggtgccgtagtgaat

SEQ ID NO: 757994 - DNA, 19 bp, Mus musculus
  siRNA target sequence for D330003H11Rik (NM_145633.2,1629-1647).
ggtccacccccttacatct

SEQ ID NO: 757995 - DNA, 19 bp, Mus musculus
  siRNA target sequence for D330003H11Rik (NM_145633.2,1780-1798).
ggccctggtctactatgat

SEQ ID NO: 757996 - DNA, 19 bp, Mus musculus
  siRNA target sequence for D330003H11Rik (NM_145633.2,1802-1820).
caggcctgcagattggata

SEQ ID NO: 757997 - DNA, 19 bp, Mus musculus
  siRNA target sequence for D330003H11Rik (NM_145633.2,1804-1822).
ggcctgcagattggatatt

SEQ ID NO: 757998 - DNA, 19 bp, Mus musculus
  siRNA target sequence for D330003H11Rik (NM_145633.2,1867-1885).
gggttacgagggcatcata

SEQ ID NO: 757999 - DNA, 19 bp, Mus musculus
  siRNA target sequence for D330003H11Rik (NM_145633.2,1869-1887).
gttacgagggcatcataga

SEQ ID NO: 758000 - DNA, 19 bp, Mus musculus
  siRNA target sequence for D330003H11Rik (NM_145633.2,2175-2193).
ctgatggcgatctagaaat

SEQ ID NO: 758001 - DNA, 19 bp, Mus musculus
  siRNA target sequence for D330003H11Rik (NM_145633.2,2189-2207).
gaaatggtacgataccttt

SEQ ID NO: 758002 - DNA, 19 bp, Mus musculus
  siRNA target sequence for D330003H11Rik (NM_145633.2,2253-2271).
gcacggtggatctcgaatt

SEQ ID NO: 758003 - DNA, 19 bp, Mus musculus
  siRNA target sequence for D330003H11Rik (NM_145633.2,2331-2349).
ctgccaatgggcttagtgt

SEQ ID NO: 758004 - DNA, 19 bp, Mus musculus
  siRNA target sequence for D330003H11Rik (NM_145633.2,2339-2357).
gggcttagtgtgaatgtga

SEQ ID NO: 758005 - DNA, 19 bp, Mus musculus
  siRNA target sequence for D330003H11Rik (NM_145633.2,2431-2449).
gaagcacggtgcttactca

SEQ ID NO: 758006 - DNA, 19 bp, Mus musculus
  siRNA target sequence for D330003H11Rik (NM_145633.2,2504-2522).
cactttcaggtggcaaaat

SEQ ID NO: 758007 - DNA, 19 bp, Mus musculus
  siRNA target sequence for D330003H11Rik (NM_145633.2,2525-2543).
ctcttagattccaatgcaa

SEQ ID NO: 758008 - DNA, 19 bp, Mus musculus
  siRNA target sequence for D330003H11Rik (NM_145633.2,2567-2585).
gggaacacacccctcattt

SEQ ID NO: 758009 - DNA, 19 bp, Mus musculus
  siRNA target sequence for D330003H11Rik (NM_145633.2,2742-2760).
cggttgacatcctgaacaa

SEQ ID NO: 758010 - DNA, 19 bp, Mus musculus
  siRNA target sequence for D330003H11Rik (NM_145633.2,2786-2804).
gccgagcaggactcaaaaa

SEQ ID NO: 758011 - DNA, 19 bp, Mus musculus
  siRNA target sequence for D330003H11Rik (NM_145633.2,2787-2805).
ccgagcaggactcaaaaat

SEQ ID NO: 758012 - DNA, 19 bp, Mus musculus
  siRNA target sequence for D330003H11Rik (NM_145633.2,2788-2806).
cgagcaggactcaaaaata

SEQ ID NO: 758013 - DNA, 19 bp, Mus musculus
  siRNA target sequence for D330003H11Rik (NM_145633.2,2949-2967).
gacagttttgcctcattaa

SEQ ID NO: 758014 - DNA, 19 bp, Mus musculus
  siRNA target sequence for BC054059 (NM_145635.1,232-250).
cgatcgtctggttgcattt

SEQ ID NO: 758015 - DNA, 19 bp, Mus musculus
  siRNA target sequence for 1700011J18Rik (NM_145692.1,694-712).
cttggagcttttactgaaa

SEQ ID NO: 758016 - DNA, 19 bp, Mus musculus
  siRNA target sequence for 1700011J18Rik (NM_145692.1,697-715).
ggagcttttactgaaaaaa

SEQ ID NO: 758017 - DNA, 19 bp, Mus musculus
  siRNA target sequence for 1700011J18Rik (NM_145692.1,752-770).
cctgtttgtcttaaaccaa

SEQ ID NO: 758018 - DNA, 19 bp, Mus musculus
  siRNA target sequence for 1700011J18Rik (NM_145692.1,753-771).
ctgtttgtcttaaaccaaa

SEQ ID NO: 758019 - DNA, 19 bp, Mus musculus
  siRNA target sequence for 1700011J18Rik (NM_145692.1,802-820).
gtcactggaatttcttgat

SEQ ID NO: 758020 - DNA, 19 bp, Mus musculus
  siRNA target sequence for 1700011J18Rik (NM_145692.1,854-872).
ctaatgaattggaaagcat

SEQ ID NO: 758021 - DNA, 19 bp, Mus musculus
  siRNA target sequence for 1700011J18Rik (NM_145692.1,927-945).
gcaactcctatataagtaa

SEQ ID NO: 758022 - DNA, 19 bp, Mus musculus
  siRNA target sequence for 1700011J18Rik (NM_145692.1,931-949).
ctcctatataagtaacttt

SEQ ID NO: 758023 - DNA, 19 bp, Mus musculus
  siRNA target sequence for 1700011J18Rik (NM_145692.1,933-951).
cctatataagtaactttga

SEQ ID NO: 758024 - DNA, 19 bp, Mus musculus
  siRNA target sequence for 1700011J18Rik (NM_145692.1,988-1006).
ggtgggtaagccaaaagta

SEQ ID NO: 758025 - DNA, 19 bp, Mus musculus
  siRNA target sequence for 1700011J18Rik (NM_145692.1,993-1011).
gtaagccaaaagtaatctt

SEQ ID NO: 758026 - DNA, 19 bp, Mus musculus
  siRNA target sequence for 1700011J18Rik (NM_145692.1,1015-1033).
ctccgatgtacagagatat

SEQ ID NO: 758027 - DNA, 19 bp, Mus musculus
  siRNA target sequence for 1700011J18Rik (NM_145692.1,1017-1035).
ccgatgtacagagatatct

SEQ ID NO: 758028 - DNA, 19 bp, Mus musculus
  siRNA target sequence for 1700011J18Rik (NM_145692.1,1018-1036).
cgatgtacagagatatctt

SEQ ID NO: 758029 - DNA, 19 bp, Mus musculus
  siRNA target sequence for 1700011J18Rik (NM_145692.1,1029-1047).
gatatcttgtacatggaaa

SEQ ID NO: 758030 - DNA, 19 bp, Mus musculus
  siRNA target sequence for 1700011J18Rik (NM_145692.1,1124-1142).
gaaagctcgctaacaaaaa

SEQ ID NO: 758031 - DNA, 19 bp, Mus musculus
  siRNA target sequence for 1700011J18Rik (NM_145692.1,1128-1146).
gctcgctaacaaaaaacga

SEQ ID NO: 758032 - DNA, 19 bp, Mus musculus
  siRNA target sequence for 2610529I12Rik (NM_145706.1,821-839).
gctcatgaggctgaaatgt

SEQ ID NO: 758033 - DNA, 19 bp, Mus musculus
  siRNA target sequence for 2610529I12Rik (NM_145706.1,959-977).
ggaggaagaagtagtactt

SEQ ID NO: 758034 - DNA, 19 bp, Mus musculus
  siRNA target sequence for 2610529I12Rik (NM_145706.1,975-993).
ctttcctgtcacatagctt

SEQ ID NO: 758035 - DNA, 19 bp, Mus musculus
  siRNA target sequence for 2610529I12Rik (NM_145706.1,979-997).
cctgtcacatagcttaagt

SEQ ID NO: 758036 - DNA, 19 bp, Mus musculus
  siRNA target sequence for 2610529I12Rik (NM_145706.1,980-998).
ctgtcacatagcttaagta

SEQ ID NO: 758037 - DNA, 19 bp, Mus musculus
  siRNA target sequence for 2610529I12Rik (NM_145706.1,1010-1028).
gttcaccagtctctagtaa

SEQ ID NO: 758038 - DNA, 19 bp, Mus musculus
  siRNA target sequence for 2610529I12Rik (NM_145706.1,1050-1068).
ctgccaaagaccgaattga

SEQ ID NO: 758039 - DNA, 19 bp, Mus musculus
  siRNA target sequence for 2610529I12Rik (NM_145706.1,1058-1076).
gaccgaattgaaatcacaa

SEQ ID NO: 758040 - DNA, 19 bp, Mus musculus
  siRNA target sequence for 2610529I12Rik (NM_145706.1,1089-1107).
gcaggactctgtctgtaaa

SEQ ID NO: 758041 - DNA, 19 bp, Mus musculus
  siRNA target sequence for 2610529I12Rik (NM_145706.1,1166-1184).
gttaccagacaactatttt

SEQ ID NO: 758042 - DNA, 19 bp, Mus musculus
  siRNA target sequence for Lace1 (NM_145743.1,242-260).
gaccactacgactttctga

SEQ ID NO: 758043 - DNA, 19 bp, Mus musculus
  siRNA target sequence for Lace1 (NM_145743.1,322-340).
gttacaggaggaccttaaa

SEQ ID NO: 758044 - DNA, 19 bp, Mus musculus
  siRNA target sequence for Lace1 (NM_145743.1,353-371).
gaggaaggagggctctttt

SEQ ID NO: 758045 - DNA, 19 bp, Mus musculus
  siRNA target sequence for Lace1 (NM_145743.1,356-374).
gaaggagggctcttttcaa

SEQ ID NO: 758046 - DNA, 19 bp, Mus musculus
  siRNA target sequence for Lace1 (NM_145743.1,364-382).
gctcttttcaaagcttttt

SEQ ID NO: 758047 - DNA, 19 bp, Mus musculus
  siRNA target sequence for Lace1 (NM_145743.1,399-417).
caaagggcctctatgttta

SEQ ID NO: 758048 - DNA, 19 bp, Mus musculus
  siRNA target sequence for Lace1 (NM_145743.1,403-421).
gggcctctatgtttatgga

SEQ ID NO: 758049 - DNA, 19 bp, Mus musculus
  siRNA target sequence for Lace1 (NM_145743.1,424-442).
cgttggtacaggaaaaaca

SEQ ID NO: 758050 - DNA, 19 bp, Mus musculus
  siRNA target sequence for Lace1 (NM_145743.1,445-463).
ggtgatggacatgttttat

SEQ ID NO: 758051 - DNA, 19 bp, Mus musculus
  siRNA target sequence for Lace1 (NM_145743.1,448-466).
gatggacatgttttatgca

SEQ ID NO: 758052 - DNA, 19 bp, Mus musculus
  siRNA target sequence for Lace1 (NM_145743.1,517-535).
ggacgtgcacagaaggata

SEQ ID NO: 758053 - DNA, 19 bp, Mus musculus
  siRNA target sequence for Lace1 (NM_145743.1,528-546).
gaaggatacaccaccttaa

SEQ ID NO: 758054 - DNA, 19 bp, Mus musculus
  siRNA target sequence for Lace1 (NM_145743.1,571-589).
gggattcatggctaagtca

SEQ ID NO: 758055 - DNA, 19 bp, Mus musculus
  siRNA target sequence for Lace1 (NM_145743.1,572-590).
ggattcatggctaagtcat

SEQ ID NO: 758056 - DNA, 19 bp, Mus musculus
  siRNA target sequence for Lace1 (NM_145743.1,573-591).
gattcatggctaagtcata

SEQ ID NO: 758057 - DNA, 19 bp, Mus musculus
  siRNA target sequence for Lace1 (NM_145743.1,603-621).
ctcccatagccgaggaaat

SEQ ID NO: 758058 - DNA, 19 bp, Mus musculus
  siRNA target sequence for Lace1 (NM_145743.1,605-623).
cccatagccgaggaaatca

SEQ ID NO: 758059 - DNA, 19 bp, Mus musculus
  siRNA target sequence for Lace1 (NM_145743.1,607-625).
catagccgaggaaatcagt

SEQ ID NO: 758060 - DNA, 19 bp, Mus musculus
  siRNA target sequence for Lace1 (NM_145743.1,616-634).
ggaaatcagtcaagaaact

SEQ ID NO: 758061 - DNA, 19 bp, Mus musculus
  siRNA target sequence for Lace1 (NM_145743.1,670-688).
catcgccgacgccatgatt

SEQ ID NO: 758062 - DNA, 19 bp, Mus musculus
  siRNA target sequence for Lace1 (NM_145743.1,674-692).
gccgacgccatgattctga

SEQ ID NO: 758063 - DNA, 19 bp, Mus musculus
  siRNA target sequence for Lace1 (NM_145743.1,675-693).
ccgacgccatgattctgaa

SEQ ID NO: 758064 - DNA, 19 bp, Mus musculus
  siRNA target sequence for Lace1 (NM_145743.1,676-694).
cgacgccatgattctgaaa

SEQ ID NO: 758065 - DNA, 19 bp, Mus musculus
  siRNA target sequence for Lace1 (NM_145743.1,777-795).
gactccagagggctaactt

SEQ ID NO: 758066 - DNA, 19 bp, Mus musculus
  siRNA target sequence for Lace1 (NM_145743.1,788-806).
gctaactttgtgccattta

SEQ ID NO: 758067 - DNA, 19 bp, Mus musculus
  siRNA target sequence for Lace1 (NM_145743.1,815-833).
ctgaaggaatattgtgata

SEQ ID NO: 758068 - DNA, 19 bp, Mus musculus
  siRNA target sequence for Lace1 (NM_145743.1,882-900).
ctgcaggaaaactctacta

SEQ ID NO: 758069 - DNA, 19 bp, Mus musculus
  siRNA target sequence for Lace1 (NM_145743.1,923-941).
gaggccgtcgtggataagt

SEQ ID NO: 758070 - DNA, 19 bp, Mus musculus
  siRNA target sequence for Lace1 (NM_145743.1,926-944).
gccgtcgtggataagttgt

SEQ ID NO: 758071 - DNA, 19 bp, Mus musculus
  siRNA target sequence for Lace1 (NM_145743.1,927-945).
ccgtcgtggataagttgtt

SEQ ID NO: 758072 - DNA, 19 bp, Mus musculus
  siRNA target sequence for Lace1 (NM_145743.1,928-946).
cgtcgtggataagttgttt

SEQ ID NO: 758073 - DNA, 19 bp, Mus musculus
  siRNA target sequence for Lace1 (NM_145743.1,931-949).
cgtggataagttgtttgat

SEQ ID NO: 758074 - DNA, 19 bp, Mus musculus
  siRNA target sequence for Lace1 (NM_145743.1,978-996).
ctagcccaaggattctgaa

SEQ ID NO: 758075 - DNA, 19 bp, Mus musculus
  siRNA target sequence for Lace1 (NM_145743.1,981-999).
gcccaaggattctgaaagt

SEQ ID NO: 758076 - DNA, 19 bp, Mus musculus
  siRNA target sequence for Lace1 (NM_145743.1,1039-1057).
cgttgccgactgcacattt

SEQ ID NO: 758077 - DNA, 19 bp, Mus musculus
  siRNA target sequence for Lace1 (NM_145743.1,1079-1097).
cttggagcaagtgactatt

SEQ ID NO: 758078 - DNA, 19 bp, Mus musculus
  siRNA target sequence for Lace1 (NM_145743.1,1083-1101).
gagcaagtgactatttgga

SEQ ID NO: 758079 - DNA, 19 bp, Mus musculus
  siRNA target sequence for Lace1 (NM_145743.1,1085-1103).
gcaagtgactatttggaat

SEQ ID NO: 758080 - DNA, 19 bp, Mus musculus
  siRNA target sequence for Lace1 (NM_145743.1,1086-1104).
caagtgactatttggaatt

SEQ ID NO: 758081 - DNA, 19 bp, Mus musculus
  siRNA target sequence for Lace1 (NM_145743.1,1118-1136).
gatacggtaatcatacgaa

SEQ ID NO: 758082 - DNA, 19 bp, Mus musculus
  siRNA target sequence for Lace1 (NM_145743.1,1122-1140).
cggtaatcatacgaaacat

SEQ ID NO: 758083 - DNA, 19 bp, Mus musculus
  siRNA target sequence for Lace1 (NM_145743.1,1123-1141).
ggtaatcatacgaaacatt

SEQ ID NO: 758084 - DNA, 19 bp, Mus musculus
  siRNA target sequence for Lace1 (NM_145743.1,1133-1151).
cgaaacattccgcagtttt

SEQ ID NO: 758085 - DNA, 19 bp, Mus musculus
  siRNA target sequence for Lace1 (NM_145743.1,1164-1182).
ggacgcaagcgagaagatt

SEQ ID NO: 758086 - DNA, 19 bp, Mus musculus
  siRNA target sequence for Lace1 (NM_145743.1,1179-1197).
gattcatcactctcattga

SEQ ID NO: 758087 - DNA, 19 bp, Mus musculus
  siRNA target sequence for Lace1 (NM_145743.1,1299-1317).
gaatcctgatggatgattt

SEQ ID NO: 758088 - DNA, 19 bp, Mus musculus
  siRNA target sequence for Lace1 (NM_145743.1,1356-1374).
cgggggaggaggaaatctt

SEQ ID NO: 758089 - DNA, 19 bp, Mus musculus
  siRNA target sequence for Lace1 (NM_145743.1,1376-1394).
gcctttcagcgcaccattt

SEQ ID NO: 758090 - DNA, 19 bp, Mus musculus
  siRNA target sequence for Lace1 (NM_145743.1,1417-1435).
ggagcagtactggattgaa

SEQ ID NO: 758091 - DNA, 19 bp, Mus musculus
  siRNA target sequence for Dusp15 (NM_145744.1,132-150).
cggaataagatcacacata

SEQ ID NO: 758092 - DNA, 19 bp, Mus musculus
  siRNA target sequence for Dusp15 (NM_145744.1,133-151).
ggaataagatcacacatat

SEQ ID NO: 758093 - DNA, 19 bp, Mus musculus
  siRNA target sequence for Dusp15 (NM_145744.1,177-195).
cctctgttgcaggatatca

SEQ ID NO: 758094 - DNA, 19 bp, Mus musculus
  siRNA target sequence for Dusp15 (NM_145744.1,225-243).
cctgaggtacccatcaaaa

SEQ ID NO: 758095 - DNA, 19 bp, Mus musculus
  siRNA target sequence for Oppo1 (NM_145746.1,107-125).
gaatccgagaggataagga

SEQ ID NO: 758096 - DNA, 19 bp, Mus musculus
  siRNA target sequence for Oppo1 (NM_145746.1,163-181).
ctccctattgccctttcaa

SEQ ID NO: 758097 - DNA, 19 bp, Mus musculus
  siRNA target sequence for Oppo1 (NM_145746.1,295-313).
ctctaagagtcgtttccat

SEQ ID NO: 758098 - DNA, 19 bp, Mus musculus
  siRNA target sequence for Oppo1 (NM_145746.1,317-335).
cgctacccccaaaatgtca

SEQ ID NO: 758099 - DNA, 19 bp, Mus musculus
  siRNA target sequence for Oppo1 (NM_145746.1,418-436).
caacggagaagacaatttt

SEQ ID NO: 758100 - DNA, 19 bp, Mus musculus
  siRNA target sequence for Oppo1 (NM_145746.1,464-482).
ggggtggctaagataagtt

SEQ ID NO: 758101 - DNA, 19 bp, Mus musculus
  siRNA target sequence for Oppo1 (NM_145746.1,465-483).
gggtggctaagataagttt

SEQ ID NO: 758102 - DNA, 19 bp, Mus musculus
  siRNA target sequence for Oppo1 (NM_145746.1,467-485).
gtggctaagataagtttca

SEQ ID NO: 758103 - DNA, 19 bp, Mus musculus
  siRNA target sequence for Oppo1 (NM_145746.1,680-698).
cccatcggctggagctatt

SEQ ID NO: 758104 - DNA, 19 bp, Mus musculus
  siRNA target sequence for Oppo1 (NM_145746.1,681-699).
ccatcggctggagctattt

SEQ ID NO: 758105 - DNA, 19 bp, Mus musculus
  siRNA target sequence for Oppo1 (NM_145746.1,685-703).
cggctggagctatttcatt

SEQ ID NO: 758106 - DNA, 19 bp, Mus musculus
  siRNA target sequence for Oppo1 (NM_145746.1,743-761).
ctttgctacctcaaccata

SEQ ID NO: 758107 - DNA, 19 bp, Mus musculus
  siRNA target sequence for Oppo1 (NM_145746.1,901-919).
gccatcaagtccagataaa

SEQ ID NO: 758108 - DNA, 19 bp, Mus musculus
  siRNA target sequence for Oppo1 (NM_145746.1,906-924).
caagtccagataaagtagt

SEQ ID NO: 758109 - DNA, 19 bp, Mus musculus
  siRNA target sequence for 2610103M17Rik (NM_145822.1,175-193).
cgccccacaatgtctcaat

SEQ ID NO: 758110 - DNA, 19 bp, Mus musculus
  siRNA target sequence for 2610103M17Rik (NM_145822.1,253-271).
gcaccgataccgggtattt

SEQ ID NO: 758111 - DNA, 19 bp, Mus musculus
  siRNA target sequence for 2610103M17Rik (NM_145822.1,254-272).
caccgataccgggtattta

SEQ ID NO: 758112 - DNA, 19 bp, Mus musculus
  siRNA target sequence for 2610103M17Rik (NM_145822.1,301-319).
cttgctcgcatcttcatca

SEQ ID NO: 758113 - DNA, 19 bp, Mus musculus
  siRNA target sequence for 2610103M17Rik (NM_145822.1,376-394).
ggagggtcctcaagaatat

SEQ ID NO: 758114 - DNA, 19 bp, Mus musculus
  siRNA target sequence for 2610103M17Rik (NM_145822.1,415-433).
gcagctgatccctacaagt

SEQ ID NO: 758115 - DNA, 19 bp, Mus musculus
  siRNA target sequence for 2610103M17Rik (NM_145822.1,1040-1058).
ctcatggtgaccgaacatt

SEQ ID NO: 758116 - DNA, 19 bp, Mus musculus
  siRNA target sequence for 2610103M17Rik (NM_145822.1,1181-1199).
ctagcacccagcaagaaaa

SEQ ID NO: 758117 - DNA, 19 bp, Mus musculus
  siRNA target sequence for 4432417N03Rik (NM_145824.3,100-118).
ggctgagcaaggcaaatct

SEQ ID NO: 758118 - DNA, 19 bp, Mus musculus
  siRNA target sequence for 4432417N03Rik (NM_145824.3,137-155).
ccccagtgacacaatagca

SEQ ID NO: 758119 - DNA, 19 bp, Mus musculus
  siRNA target sequence for 4432417N03Rik (NM_145824.3,290-308).
cttgtaccctgcggttaat

SEQ ID NO: 758120 - DNA, 19 bp, Mus musculus
  siRNA target sequence for 4432417N03Rik (NM_145824.3,342-360).
cccaaggacaagtacaact

SEQ ID NO: 758121 - DNA, 19 bp, Mus musculus
  siRNA target sequence for 4432417N03Rik (NM_145824.3,402-420).
ggtcatggcaaaaatcaca

SEQ ID NO: 758122 - DNA, 19 bp, Mus musculus
  siRNA target sequence for 4432417N03Rik (NM_145824.3,535-553).
cagcgcaaggcgttaacat

SEQ ID NO: 758123 - DNA, 19 bp, Mus musculus
  siRNA target sequence for 4432417N03Rik (NM_145824.3,537-555).
gcgcaaggcgttaacatga

SEQ ID NO: 758124 - DNA, 19 bp, Mus musculus
  siRNA target sequence for 4432417N03Rik (NM_145824.3,538-556).
cgcaaggcgttaacatgaa

SEQ ID NO: 758125 - DNA, 19 bp, Mus musculus
  siRNA target sequence for 4432417N03Rik (NM_145824.3,540-558).
caaggcgttaacatgaaca

SEQ ID NO: 758126 - DNA, 19 bp, Mus musculus
  siRNA target sequence for 4432417N03Rik (NM_145824.3,564-582).
cctggttgggacaagcatt

SEQ ID NO: 758127 - DNA, 19 bp, Mus musculus
  siRNA target sequence for 4432417N03Rik (NM_145824.3,568-586).
gttgggacaagcattccta

SEQ ID NO: 758128 - DNA, 19 bp, Mus musculus
  siRNA target sequence for 4432417N03Rik (NM_145824.3,573-591).
gacaagcattcctatggtt

SEQ ID NO: 758129 - DNA, 19 bp, Mus musculus
  siRNA target sequence for 4432417N03Rik (NM_145824.3,598-616).
gcgatgatgggcattcctt

SEQ ID NO: 758130 - DNA, 19 bp, Mus musculus
  siRNA target sequence for 4432417N03Rik (NM_145824.3,800-818).
gattgtggatgccaacttt

SEQ ID NO: 758131 - DNA, 19 bp, Mus musculus
  siRNA target sequence for 4432417N03Rik (NM_145824.3,890-908).
gcacggctttcccataagt

SEQ ID NO: 758132 - DNA, 19 bp, Mus musculus
  siRNA target sequence for 4432417N03Rik (NM_145824.3,1026-1044).
gaagagcaggcatccataa

SEQ ID NO: 758133 - DNA, 19 bp, Mus musculus
  siRNA target sequence for 4432417N03Rik (NM_145824.3,1344-1362).
gtcgcatccaccaagaaca

SEQ ID NO: 758134 - DNA, 19 bp, Mus musculus
  siRNA target sequence for 4432417N03Rik (NM_145824.3,1346-1364).
cgcatccaccaagaacaaa

SEQ ID NO: 758135 - DNA, 19 bp, Mus musculus
  siRNA target sequence for 4432417N03Rik (NM_145824.3,1432-1450).
ccccgtcctccgtcaatta

SEQ ID NO: 758136 - DNA, 19 bp, Mus musculus
  siRNA target sequence for 4432417N03Rik (NM_145824.3,1434-1452).
ccgtcctccgtcaattact

SEQ ID NO: 758137 - DNA, 19 bp, Mus musculus
  siRNA target sequence for 4432417N03Rik (NM_145824.3,1592-1610).
caatggggcctataagcat

SEQ ID NO: 758138 - DNA, 19 bp, Mus musculus
  siRNA target sequence for 4432417N03Rik (NM_145824.3,1746-1764).
cgggagtacggcaagaact

SEQ ID NO: 758139 - DNA, 19 bp, Mus musculus
  siRNA target sequence for 4432417N03Rik (NM_145824.3,1792-1810).
cctttagcctactagcata

SEQ ID NO: 758140 - DNA, 19 bp, Mus musculus
  siRNA target sequence for 4432417N03Rik (NM_145824.3,1879-1897).
ctctcaacagcgccatttt

SEQ ID NO: 758141 - DNA, 19 bp, Mus musculus
  siRNA target sequence for 4432417N03Rik (NM_145824.3,1945-1963).
gccaggcatctgaatgtct

SEQ ID NO: 758142 - DNA, 19 bp, Mus musculus
  siRNA target sequence for Il17re (NM_145826.2,586-604).
ctcttggtgaggaaatcta

SEQ ID NO: 758143 - DNA, 19 bp, Mus musculus
  siRNA target sequence for Il17re (NM_145826.2,588-606).
cttggtgaggaaatctaaa

SEQ ID NO: 758144 - DNA, 19 bp, Mus musculus
  siRNA target sequence for Il17re (NM_145826.2,611-629).
ctcctaaatttgaagacta

SEQ ID NO: 758145 - DNA, 19 bp, Mus musculus
  siRNA target sequence for Il17re (NM_145826.2,689-707).
ctgaggaaagccatcgaat

SEQ ID NO: 758146 - DNA, 19 bp, Mus musculus
  siRNA target sequence for Il17re (NM_145826.2,793-811).
cctgaagcagggtcacaaa

SEQ ID NO: 758147 - DNA, 19 bp, Mus musculus
  siRNA target sequence for Il17re (NM_145826.2,858-876).
ggctgttcgggtgactatt

SEQ ID NO: 758148 - DNA, 19 bp, Mus musculus
  siRNA target sequence for Il17re (NM_145826.2,893-911).
ccagtgtgcgcctttgtta

SEQ ID NO: 758149 - DNA, 19 bp, Mus musculus
  siRNA target sequence for Il17re (NM_145826.2,894-912).
cagtgtgcgcctttgttat

SEQ ID NO: 758150 - DNA, 19 bp, Mus musculus
  siRNA target sequence for Il17re (NM_145826.2,896-914).
gtgtgcgcctttgttatca

SEQ ID NO: 758151 - DNA, 19 bp, Mus musculus
  siRNA target sequence for Il17re (NM_145826.2,898-916).
gtgcgcctttgttatcagt

SEQ ID NO: 758152 - DNA, 19 bp, Mus musculus
  siRNA target sequence for Il17re (NM_145826.2,920-938).
cactggaatgtgaagactt

SEQ ID NO: 758153 - DNA, 19 bp, Mus musculus
  siRNA target sequence for Il17re (NM_145826.2,983-1001).
ctgtagacctgccttatga

SEQ ID NO: 758154 - DNA, 19 bp, Mus musculus
  siRNA target sequence for Il17re (NM_145826.2,1313-1331).
gctttaagttctcatttga

SEQ ID NO: 758155 - DNA, 19 bp, Mus musculus
  siRNA target sequence for Il17re (NM_145826.2,1335-1353).
cagcagccacgttgaatgt

SEQ ID NO: 758156 - DNA, 19 bp, Mus musculus
  siRNA target sequence for Il17re (NM_145826.2,1410-1428).
gcagctgacgcttcacttt

SEQ ID NO: 758157 - DNA, 19 bp, Mus musculus
  siRNA target sequence for Il17re (NM_145826.2,1414-1432).
ctgacgcttcacttttctt

SEQ ID NO: 758158 - DNA, 19 bp, Mus musculus
  siRNA target sequence for Il17re (NM_145826.2,1596-1614).
gaggtcagatgtccatttt

SEQ ID NO: 758159 - DNA, 19 bp, Mus musculus
  siRNA target sequence for Il17re (NM_145826.2,1692-1710).
cgctctagtgggtgtagtt

SEQ ID NO: 758160 - DNA, 19 bp, Mus musculus
  siRNA target sequence for Il17re (NM_145826.2,1748-1766).
gtcgaacaaggccagtttt

SEQ ID NO: 758161 - DNA, 19 bp, Mus musculus
  siRNA target sequence for Il17re (NM_145826.2,2214-2232).
ggctaagcggtgcttgaaa

SEQ ID NO: 758162 - DNA, 19 bp, Mus musculus
  siRNA target sequence for Il17re (NM_145826.2,2215-2233).
gctaagcggtgcttgaaaa

SEQ ID NO: 758163 - DNA, 19 bp, Mus musculus
  siRNA target sequence for Il17re (NM_145826.2,2216-2234).
ctaagcggtgcttgaaaaa

SEQ ID NO: 758164 - DNA, 19 bp, Mus musculus
  siRNA target sequence for Il17re (NM_145826.2,2283-2301).
ctaccaaggctcaaccaat

SEQ ID NO: 758165 - DNA, 19 bp, Mus musculus
  siRNA target sequence for Il17re (NM_145826.2,2286-2304).
ccaaggctcaaccaatagt

SEQ ID NO: 758166 - DNA, 19 bp, Mus musculus
  siRNA target sequence for Il17c (NM_145834.1,95-113).
gctactctgctgaggaatt

SEQ ID NO: 758167 - DNA, 19 bp, Mus musculus
  siRNA target sequence for Il17c (NM_145834.1,518-536).
ccttccacaccgagttcat

SEQ ID NO: 758168 - DNA, 19 bp, Mus musculus
  siRNA target sequence for Il17d (NM_145837.1,818-836).
gtgcctgaggcgtacagta

SEQ ID NO: 758169 - DNA, 19 bp, Mus musculus
  siRNA target sequence for Il17d (NM_145837.1,820-838).
gcctgaggcgtacagtatt

SEQ ID NO: 758170 - DNA, 19 bp, Mus musculus
  siRNA target sequence for Il17d (NM_145837.1,821-839).
cctgaggcgtacagtattt

SEQ ID NO: 758171 - DNA, 19 bp, Mus musculus
  siRNA target sequence for 4732452O09Rik (NM_145839.1,162-180).
ccccttctcagcaatgttt

SEQ ID NO: 758172 - DNA, 19 bp, Mus musculus
  siRNA target sequence for 4732452O09Rik (NM_145839.1,164-182).
ccttctcagcaatgtttga

SEQ ID NO: 758173 - DNA, 19 bp, Mus musculus
  siRNA target sequence for 4732452O09Rik (NM_145839.1,298-316).
gtacccaatgtggattact

SEQ ID NO: 758174 - DNA, 19 bp, Mus musculus
  siRNA target sequence for 4732452O09Rik (NM_145839.1,349-367).
cttagttctcggttattca

SEQ ID NO: 758175 - DNA, 19 bp, Mus musculus
  siRNA target sequence for 4732452O09Rik (NM_145839.1,430-448).
gaaggggacggcgataaga

SEQ ID NO: 758176 - DNA, 19 bp, Mus musculus
  siRNA target sequence for 4732452O09Rik (NM_145839.1,502-520).
gaaacatttccgtatgact

SEQ ID NO: 758177 - DNA, 19 bp, Mus musculus
  siRNA target sequence for 4732452O09Rik (NM_145839.1,523-541).
cgggacgagagaatgatga

SEQ ID NO: 758178 - DNA, 19 bp, Mus musculus
  siRNA target sequence for 4732452O09Rik (NM_145839.1,728-746).
ccatacagcgggacatcat

SEQ ID NO: 758179 - DNA, 19 bp, Mus musculus
  siRNA target sequence for 4732452O09Rik (NM_145839.1,753-771).
ctgcagcgacccttacaca

SEQ ID NO: 758180 - DNA, 19 bp, Mus musculus
  siRNA target sequence for 4732452O09Rik (NM_145839.1,755-773).
gcagcgacccttacacatt

SEQ ID NO: 758181 - DNA, 19 bp, Mus musculus
  siRNA target sequence for 4732452O09Rik (NM_145839.1,801-819).
ggagagactcaattacatt

SEQ ID NO: 758182 - DNA, 19 bp, Mus musculus
  siRNA target sequence for 4732452O09Rik (NM_145839.1,816-834).
cattggcccagaagagttt

SEQ ID NO: 758183 - DNA, 19 bp, Mus musculus
  siRNA target sequence for 4732452O09Rik (NM_145839.1,856-874).
gatcctttggacaacgata

SEQ ID NO: 758184 - DNA, 19 bp, Mus musculus
  siRNA target sequence for 4732452O09Rik (NM_145839.1,915-933).
ggcgtacgtagaatggttt

SEQ ID NO: 758185 - DNA, 19 bp, Mus musculus
  siRNA target sequence for 4732452O09Rik (NM_145839.1,916-934).
gcgtacgtagaatggttta

SEQ ID NO: 758186 - DNA, 19 bp, Mus musculus
  siRNA target sequence for 4732452O09Rik (NM_145839.1,917-935).
cgtacgtagaatggtttaa

SEQ ID NO: 758187 - DNA, 19 bp, Mus musculus
  siRNA target sequence for 4732452O09Rik (NM_145839.1,918-936).
gtacgtagaatggtttaat

SEQ ID NO: 758188 - DNA, 19 bp, Mus musculus
  siRNA target sequence for 4732452O09Rik (NM_145839.1,921-939).
cgtagaatggtttaatcgt

SEQ ID NO: 758189 - DNA, 19 bp, Mus musculus
  siRNA target sequence for 4732452O09Rik (NM_145839.1,929-947).
ggtttaatcgtctaagcta

SEQ ID NO: 758190 - DNA, 19 bp, Mus musculus
  siRNA target sequence for 4732452O09Rik (NM_145839.1,995-1013).
cgaggatgatcgagtattt

SEQ ID NO: 758191 - DNA, 19 bp, Mus musculus
  siRNA target sequence for 4732452O09Rik (NM_145839.1,998-1016).
ggatgatcgagtatttcat

SEQ ID NO: 758192 - DNA, 19 bp, Mus musculus
  siRNA target sequence for 4732452O09Rik (NM_145839.1,1041-1059).
cattggaaacttcaattct

SEQ ID NO: 758193 - DNA, 19 bp, Mus musculus
  siRNA target sequence for 4732452O09Rik (NM_145839.1,1091-1109).
gcccggtctcgagacttaa

SEQ ID NO: 758194 - DNA, 19 bp, Mus musculus
  siRNA target sequence for 4732452O09Rik (NM_145839.1,1093-1111).
ccggtctcgagacttaaga

SEQ ID NO: 758195 - DNA, 19 bp, Mus musculus
  siRNA target sequence for 4732452O09Rik (NM_145839.1,1094-1112).
cggtctcgagacttaagaa

SEQ ID NO: 758196 - DNA, 19 bp, Mus musculus
  siRNA target sequence for 4732452O09Rik (NM_145839.1,1095-1113).
ggtctcgagacttaagaaa

SEQ ID NO: 758197 - DNA, 19 bp, Mus musculus
  siRNA target sequence for 4732452O09Rik (NM_145839.1,1131-1149).
gactgcaaagtttgacatt

SEQ ID NO: 758198 - DNA, 19 bp, Mus musculus
  siRNA target sequence for 4732452O09Rik (NM_145839.1,1169-1187).
catccagcaatttctacaa

SEQ ID NO: 758199 - DNA, 19 bp, Mus musculus
  siRNA target sequence for 4732452O09Rik (NM_145839.1,1271-1289).
gtctcttaatcaaagacat

SEQ ID NO: 758200 - DNA, 19 bp, Mus musculus
  siRNA target sequence for 4732452O09Rik (NM_145839.1,1310-1328).
gtgtcaaccgtcttccaaa

SEQ ID NO: 758201 - DNA, 19 bp, Mus musculus
  siRNA target sequence for 4732452O09Rik (NM_145839.1,1363-1381).
gccaaacaagtgagtgaat

SEQ ID NO: 758202 - DNA, 19 bp, Mus musculus
  siRNA target sequence for 4732452O09Rik (NM_145839.1,1418-1436).
gggaccggaaggtcttaca

SEQ ID NO: 758203 - DNA, 19 bp, Mus musculus
  siRNA target sequence for 4732452O09Rik (NM_145839.1,1419-1437).
ggaccggaaggtcttacaa

SEQ ID NO: 758204 - DNA, 19 bp, Mus musculus
  siRNA target sequence for 4732452O09Rik (NM_145839.1,1420-1438).
gaccggaaggtcttacaat

SEQ ID NO: 758205 - DNA, 19 bp, Mus musculus
  siRNA target sequence for 4732452O09Rik (NM_145839.1,1446-1464).
ctccgtgcctgtattcagt

SEQ ID NO: 758206 - DNA, 19 bp, Mus musculus
  siRNA target sequence for 4732452O09Rik (NM_145839.1,1494-1512).
gagtgaaggacccgaaaat

SEQ ID NO: 758207 - DNA, 19 bp, Mus musculus
  siRNA target sequence for 4732452O09Rik (NM_145839.1,1496-1514).
gtgaaggacccgaaaataa

SEQ ID NO: 758208 - DNA, 19 bp, Mus musculus
  siRNA target sequence for 4732452O09Rik (NM_145839.1,1498-1516).
gaaggacccgaaaataata

SEQ ID NO: 758209 - DNA, 19 bp, Mus musculus
  siRNA target sequence for 4732452O09Rik (NM_145839.1,1502-1520).
gacccgaaaataatataga

SEQ ID NO: 758210 - DNA, 19 bp, Mus musculus
  siRNA target sequence for 4732452O09Rik (NM_145839.1,1505-1523).
ccgaaaataatatagagaa

SEQ ID NO: 758211 - DNA, 19 bp, Mus musculus
  siRNA target sequence for 4732452O09Rik (NM_145839.1,1525-1543).
gacagatggaagtctttaa

SEQ ID NO: 758212 - DNA, 19 bp, Mus musculus
  siRNA target sequence for Rgs9bp (NM_145840.2,374-392).
cagcgtgctaccatcactt

SEQ ID NO: 758213 - DNA, 19 bp, Mus musculus
  siRNA target sequence for Rgs9bp (NM_145840.2,377-395).
cgtgctaccatcacttagt

SEQ ID NO: 758214 - DNA, 19 bp, Mus musculus
  siRNA target sequence for Rgs9bp (NM_145840.2,511-529).
cgggaccggagcttagcta

SEQ ID NO: 758215 - DNA, 19 bp, Mus musculus
  siRNA target sequence for Rgs9bp (NM_145840.2,964-982).
ctggctgccaccgttttca

SEQ ID NO: 758216 - DNA, 19 bp, Mus musculus
  siRNA target sequence for V1rg1 (NM_145843.1,105-123).
gatgtccaccggaaagaat

SEQ ID NO: 758217 - DNA, 19 bp, Mus musculus
  siRNA target sequence for V1rg1 (NM_145843.1,108-126).
gtccaccggaaagaattta

SEQ ID NO: 758218 - DNA, 19 bp, Mus musculus
  siRNA target sequence for V1rg1 (NM_145843.1,234-252).
ggatgtcactggatgtaaa

SEQ ID NO: 758219 - DNA, 19 bp, Mus musculus
  siRNA target sequence for V1rg1 (NM_145843.1,235-253).
gatgtcactggatgtaaat

SEQ ID NO: 758220 - DNA, 19 bp, Mus musculus
  siRNA target sequence for V1rg1 (NM_145843.1,410-428).
gttggcttgtgcatatttt

SEQ ID NO: 758221 - DNA, 19 bp, Mus musculus
  siRNA target sequence for V1rg1 (NM_145843.1,639-657).
gagacaagtgagacatatt

SEQ ID NO: 758222 - DNA, 19 bp, Mus musculus
  siRNA target sequence for V1rg1 (NM_145843.1,821-839).
cattcgtggaaatatgttt

SEQ ID NO: 758223 - DNA, 19 bp, Mus musculus
  siRNA target sequence for V1rg1 (NM_145843.1,901-919).
ccctactttgttaagagat

SEQ ID NO: 758224 - DNA, 19 bp, Mus musculus
  siRNA target sequence for V1rh2 (NM_145844.1,792-810).
ggtggcaaatactctagaa

SEQ ID NO: 758225 - DNA, 19 bp, Mus musculus
  siRNA target sequence for V1rh2 (NM_145844.1,858-876).
caaggacgggcttctagtt

SEQ ID NO: 758226 - DNA, 19 bp, Mus musculus
  siRNA target sequence for V1ri1 (NM_145845.1,61-79).
ctgggaaataccctaatat

SEQ ID NO: 758227 - DNA, 19 bp, Mus musculus
  siRNA target sequence for V1ri1 (NM_145845.1,124-142).
cctgttgaccttattctca

SEQ ID NO: 758228 - DNA, 19 bp, Mus musculus
  siRNA target sequence for V1ri1 (NM_145845.1,125-143).
ctgttgaccttattctcat

SEQ ID NO: 758229 - DNA, 19 bp, Mus musculus
  siRNA target sequence for V1ri1 (NM_145845.1,858-876).
gatcagcagagattttcgt

SEQ ID NO: 758230 - DNA, 19 bp, Mus musculus
  siRNA target sequence for V1ri1 (NM_145845.1,866-884).
gagattttcgtgttcctaa

SEQ ID NO: 758231 - DNA, 19 bp, Mus musculus
  siRNA target sequence for V1ri8 (NM_145846.1,3-21).
gtcaatggaaccaagaaca

SEQ ID NO: 758232 - DNA, 19 bp, Mus musculus
  siRNA target sequence for V1ri8 (NM_145846.1,89-107).
cattccacggaagaaaaca

SEQ ID NO: 758233 - DNA, 19 bp, Mus musculus
  siRNA target sequence for V1ri8 (NM_145846.1,114-132).
ccacagacatgaactagat

SEQ ID NO: 758234 - DNA, 19 bp, Mus musculus
  siRNA target sequence for V1ri8 (NM_145846.1,156-174).
caggttattcctagcttta

SEQ ID NO: 758235 - DNA, 19 bp, Mus musculus
  siRNA target sequence for V1ri8 (NM_145846.1,196-214).
gacctcatccagaaaataa

SEQ ID NO: 758236 - DNA, 19 bp, Mus musculus
  siRNA target sequence for V1ri8 (NM_145846.1,656-674).
gttctgaagttggaatgtt

SEQ ID NO: 758237 - DNA, 19 bp, Mus musculus
  siRNA target sequence for V1rj3 (NM_145847.1,20-38).
ctatcttgggggttttcgt

SEQ ID NO: 758238 - DNA, 19 bp, Mus musculus
  siRNA target sequence for V1rj3 (NM_145847.1,27-45).
gggggttttcgtcatatct

SEQ ID NO: 758239 - DNA, 19 bp, Mus musculus
  siRNA target sequence for V1rj3 (NM_145847.1,29-47).
gggttttcgtcatatctga

SEQ ID NO: 758240 - DNA, 19 bp, Mus musculus
  siRNA target sequence for V1rj3 (NM_145847.1,48-66).
gttttgtgtgggagtctta

SEQ ID NO: 758241 - DNA, 19 bp, Mus musculus
  siRNA target sequence for V1rj3 (NM_145847.1,82-100).
ctcatgctgtatatattca

SEQ ID NO: 758242 - DNA, 19 bp, Mus musculus
  siRNA target sequence for V1rj3 (NM_145847.1,107-125).
gggtcaaagctcgctttaa

SEQ ID NO: 758243 - DNA, 19 bp, Mus musculus
  siRNA target sequence for V1rj3 (NM_145847.1,111-129).
caaagctcgctttaacaga

SEQ ID NO: 758244 - DNA, 19 bp, Mus musculus
  siRNA target sequence for V1rj3 (NM_145847.1,128-146).
gacagatcgatcccatttt

SEQ ID NO: 758245 - DNA, 19 bp, Mus musculus
  siRNA target sequence for V1rj3 (NM_145847.1,151-169).
cacctgatgatagtcaata

SEQ ID NO: 758246 - DNA, 19 bp, Mus musculus
  siRNA target sequence for V1rj3 (NM_145847.1,154-172).
ctgatgatagtcaatatgt

SEQ ID NO: 758247 - DNA, 19 bp, Mus musculus
  siRNA target sequence for V1rj3 (NM_145847.1,176-194).
caatcatatttgctatgat

SEQ ID NO: 758248 - DNA, 19 bp, Mus musculus
  siRNA target sequence for V1rj3 (NM_145847.1,213-231).
ctttggagtgcctagtttt

SEQ ID NO: 758249 - DNA, 19 bp, Mus musculus
  siRNA target sequence for V1rj3 (NM_145847.1,244-262).
ggctgtaaggcctttgtgt

SEQ ID NO: 758250 - DNA, 19 bp, Mus musculus
  siRNA target sequence for V1rj3 (NM_145847.1,245-263).
gctgtaaggcctttgtgta

SEQ ID NO: 758251 - DNA, 19 bp, Mus musculus
  siRNA target sequence for V1rj3 (NM_145847.1,248-266).
gtaaggcctttgtgtatat

SEQ ID NO: 758252 - DNA, 19 bp, Mus musculus
  siRNA target sequence for V1rj3 (NM_145847.1,252-270).
ggcctttgtgtatatctat

SEQ ID NO: 758253 - DNA, 19 bp, Mus musculus
  siRNA target sequence for V1rj3 (NM_145847.1,294-312).
ctctagcacttctattcta

SEQ ID NO: 758254 - DNA, 19 bp, Mus musculus
  siRNA target sequence for V1rj3 (NM_145847.1,417-435).
catcaacatggtcatatat

SEQ ID NO: 758255 - DNA, 19 bp, Mus musculus
  siRNA target sequence for V1rj3 (NM_145847.1,438-456).
gcacctgattgagaatgta

SEQ ID NO: 758256 - DNA, 19 bp, Mus musculus
  siRNA target sequence for V1rj3 (NM_145847.1,444-462).
gattgagaatgtaatagca

SEQ ID NO: 758257 - DNA, 19 bp, Mus musculus
  siRNA target sequence for V1rj3 (NM_145847.1,448-466).
gagaatgtaatagcaaaaa

SEQ ID NO: 758258 - DNA, 19 bp, Mus musculus
  siRNA target sequence for V1rj3 (NM_145847.1,454-472).
gtaatagcaaaaactaatt

SEQ ID NO: 758259 - DNA, 19 bp, Mus musculus
  siRNA target sequence for V1rj3 (NM_145847.1,467-485).
ctaattacactggtgttaa

SEQ ID NO: 758260 - DNA, 19 bp, Mus musculus
  siRNA target sequence for V1rj3 (NM_145847.1,528-546).
gtaccccaatccaggattt

SEQ ID NO: 758261 - DNA, 19 bp, Mus musculus
  siRNA target sequence for V1rj3 (NM_145847.1,549-567).
cctcggcgttatcataaca

SEQ ID NO: 758262 - DNA, 19 bp, Mus musculus
  siRNA target sequence for V1rj3 (NM_145847.1,552-570).
cggcgttatcataacaaga

SEQ ID NO: 758263 - DNA, 19 bp, Mus musculus
  siRNA target sequence for V1rj3 (NM_145847.1,759-777).
cttaatcaccctttatgat

SEQ ID NO: 758264 - DNA, 19 bp, Mus musculus
  siRNA target sequence for V1rj3 (NM_145847.1,765-783).
caccctttatgataggttt

SEQ ID NO: 758265 - DNA, 19 bp, Mus musculus
  siRNA target sequence for V1rj3 (NM_145847.1,802-820).
ggaaatctgggggcaatta

SEQ ID NO: 758266 - DNA, 19 bp, Mus musculus
  siRNA target sequence for V1rj3 (NM_145847.1,803-821).
gaaatctgggggcaattat

SEQ ID NO: 758267 - DNA, 19 bp, Mus musculus
  siRNA target sequence for V1rj3 (NM_145847.1,808-826).
ctgggggcaattatcacaa

SEQ ID NO: 758268 - DNA, 19 bp, Mus musculus
  siRNA target sequence for V1rj3 (NM_145847.1,810-828).
gggggcaattatcacaatt

SEQ ID NO: 758269 - DNA, 19 bp, Mus musculus
  siRNA target sequence for V1rj3 (NM_145847.1,854-872).
gcccatttttactaatgaa

SEQ ID NO: 758270 - DNA, 19 bp, Mus musculus
  siRNA target sequence for IL-17F (NM_145856.1,133-151).
gtgagagttgacattcgaa

SEQ ID NO: 758271 - DNA, 19 bp, Mus musculus
  siRNA target sequence for IL-17F (NM_145856.1,137-155).
gagttgacattcgaatctt

SEQ ID NO: 758272 - DNA, 19 bp, Mus musculus
  siRNA target sequence for IL-17F (NM_145856.1,139-157).
gttgacattcgaatcttca

SEQ ID NO: 758273 - DNA, 19 bp, Mus musculus
  siRNA target sequence for IL-17F (NM_145856.1,209-227).
ccccatgggattacaacat

SEQ ID NO: 758274 - DNA, 19 bp, Mus musculus
  siRNA target sequence for IL-17F (NM_145856.1,331-349).
gtcgccattcagcaagaaa

SEQ ID NO: 758275 - DNA, 19 bp, Mus musculus
  siRNA target sequence for IL-17F (NM_145856.1,335-353).
ccattcagcaagaaatcct

SEQ ID NO: 758276 - DNA, 19 bp, Mus musculus
  siRNA target sequence for Grhl1 (NM_145890.1,60-78).
cctaaacagcataccaaat

SEQ ID NO: 758277 - DNA, 19 bp, Mus musculus
  siRNA target sequence for Grhl1 (NM_145890.1,84-102).
ggagcagcccctcatttct

SEQ ID NO: 758278 - DNA, 19 bp, Mus musculus
  siRNA target sequence for Grhl1 (NM_145890.1,171-189).
gctgggcattgataagaga

SEQ ID NO: 758279 - DNA, 19 bp, Mus musculus
  siRNA target sequence for Grhl1 (NM_145890.1,196-214).
ctgacagctcccgatacaa

SEQ ID NO: 758280 - DNA, 19 bp, Mus musculus
  siRNA target sequence for Grhl1 (NM_145890.1,443-461).
gcgttcaggaggttttctt

SEQ ID NO: 758281 - DNA, 19 bp, Mus musculus
  siRNA target sequence for Grhl1 (NM_145890.1,529-547).
gggaacaactttgagtata

SEQ ID NO: 758282 - DNA, 19 bp, Mus musculus
  siRNA target sequence for Grhl1 (NM_145890.1,580-598).
caaggggacagcactatga

SEQ ID NO: 758283 - DNA, 19 bp, Mus musculus
  siRNA target sequence for Grhl1 (NM_145890.1,583-601).
ggggacagcactatgacat

SEQ ID NO: 758284 - DNA, 19 bp, Mus musculus
  siRNA target sequence for Grhl1 (NM_145890.1,584-602).
gggacagcactatgacata

SEQ ID NO: 758285 - DNA, 19 bp, Mus musculus
  siRNA target sequence for Grhl1 (NM_145890.1,593-611).
ctatgacatacctgaataa

SEQ ID NO: 758286 - DNA, 19 bp, Mus musculus
  siRNA target sequence for Grhl1 (NM_145890.1,606-624).
gaataaaggccagttctat

SEQ ID NO: 758287 - DNA, 19 bp, Mus musculus
  siRNA target sequence for Grhl1 (NM_145890.1,666-684).
ccaccctatcagcaaagtt

SEQ ID NO: 758288 - DNA, 19 bp, Mus musculus
  siRNA target sequence for Grhl1 (NM_145890.1,693-711).
gatcatggtggtttttgct

SEQ ID NO: 758289 - DNA, 19 bp, Mus musculus
  siRNA target sequence for Grhl1 (NM_145890.1,834-852).
cattgaggagatagcttat

SEQ ID NO: 758290 - DNA, 19 bp, Mus musculus
  siRNA target sequence for Grhl1 (NM_145890.1,847-865).
gcttataacgccatttcct

SEQ ID NO: 758291 - DNA, 19 bp, Mus musculus
  siRNA target sequence for Grhl1 (NM_145890.1,848-866).
cttataacgccatttcctt

SEQ ID NO: 758292 - DNA, 19 bp, Mus musculus
  siRNA target sequence for Grhl1 (NM_145890.1,869-887).
cgtgggacatcaatgatga

SEQ ID NO: 758293 - DNA, 19 bp, Mus musculus
  siRNA target sequence for Grhl1 (NM_145890.1,953-971).
gcttgccactcaacattca

SEQ ID NO: 758294 - DNA, 19 bp, Mus musculus
  siRNA target sequence for Grhl1 (NM_145890.1,954-972).
cttgccactcaacattcaa

SEQ ID NO: 758295 - DNA, 19 bp, Mus musculus
  siRNA target sequence for Grhl1 (NM_145890.1,959-977).
cactcaacattcaaatcga

SEQ ID NO: 758296 - DNA, 19 bp, Mus musculus
  siRNA target sequence for Grhl1 (NM_145890.1,1064-1082).
ggaaaattcgggatgaaga

SEQ ID NO: 758297 - DNA, 19 bp, Mus musculus
  siRNA target sequence for Grhl1 (NM_145890.1,1065-1083).
gaaaattcgggatgaagaa

SEQ ID NO: 758298 - DNA, 19 bp, Mus musculus
  siRNA target sequence for Grhl1 (NM_145890.1,1203-1221).
cattccggacgtgcatttt

SEQ ID NO: 758299 - DNA, 19 bp, Mus musculus
  siRNA target sequence for Grhl1 (NM_145890.1,1208-1226).
cggacgtgcattttaccaa

SEQ ID NO: 758300 - DNA, 19 bp, Mus musculus
  siRNA target sequence for Grhl1 (NM_145890.1,1304-1322).
cattcggaaccgaagatga

SEQ ID NO: 758301 - DNA, 19 bp, Mus musculus
  siRNA target sequence for Grhl1 (NM_145890.1,1381-1399).
ctctatgtccgaaaggaat

SEQ ID NO: 758302 - DNA, 19 bp, Mus musculus
  siRNA target sequence for Grhl1 (NM_145890.1,1426-1444).
ctcaagacgccgtctttga

SEQ ID NO: 758303 - DNA, 19 bp, Mus musculus
  siRNA target sequence for Grhl1 (NM_145890.1,1460-1478).
caatttcagacaagtatga

SEQ ID NO: 758304 - DNA, 19 bp, Mus musculus
  siRNA target sequence for AA536743 (NM_145923.1,361-379).
cctcatctgtcacttactt

SEQ ID NO: 758305 - DNA, 19 bp, Mus musculus
  siRNA target sequence for AA536743 (NM_145923.1,362-380).
ctcatctgtcacttactta

SEQ ID NO: 758306 - DNA, 19 bp, Mus musculus
  siRNA target sequence for AA536743 (NM_145923.1,369-387).
gtcacttacttaagaagaa

SEQ ID NO: 758307 - DNA, 19 bp, Mus musculus
  siRNA target sequence for AA536743 (NM_145923.1,449-467).
gagttgaatgacagtataa

SEQ ID NO: 758308 - DNA, 19 bp, Mus musculus
  siRNA target sequence for AA536743 (NM_145923.1,451-469).
gttgaatgacagtataaat

SEQ ID NO: 758309 - DNA, 19 bp, Mus musculus
  siRNA target sequence for AA536743 (NM_145923.1,490-508).
ccagattgtccagtacatt

SEQ ID NO: 758310 - DNA, 19 bp, Mus musculus
  siRNA target sequence for AA536743 (NM_145923.1,497-515).
gtccagtacattatgaaaa

SEQ ID NO: 758311 - DNA, 19 bp, Mus musculus
  siRNA target sequence for AA536743 (NM_145923.1,518-536).
gaagcgaatgcagatatct

SEQ ID NO: 758312 - DNA, 19 bp, Mus musculus
  siRNA target sequence for AA536743 (NM_145923.1,521-539).
gcgaatgcagatatcttga

SEQ ID NO: 758313 - DNA, 19 bp, Mus musculus
  siRNA target sequence for AA536743 (NM_145923.1,522-540).
cgaatgcagatatcttgaa

SEQ ID NO: 758314 - DNA, 19 bp, Mus musculus
  siRNA target sequence for AA536743 (NM_145923.1,527-545).
gcagatatcttgaaagcta

SEQ ID NO: 758315 - DNA, 19 bp, Mus musculus
  siRNA target sequence for AA536743 (NM_145923.1,528-546).
cagatatcttgaaagctat

SEQ ID NO: 758316 - DNA, 19 bp, Mus musculus
  siRNA target sequence for AA536743 (NM_145923.1,857-875).
gagcgcagaagtttgatgt

SEQ ID NO: 758317 - DNA, 19 bp, Mus musculus
  siRNA target sequence for Fshprh1 (NM_145924.1,277-295).
caaagggttactagaaact

SEQ ID NO: 758318 - DNA, 19 bp, Mus musculus
  siRNA target sequence for Fshprh1 (NM_145924.1,290-308).
gaaactcccagcaacaaaa

SEQ ID NO: 758319 - DNA, 19 bp, Mus musculus
  siRNA target sequence for Fshprh1 (NM_145924.1,300-318).
gcaacaaaacagaatttct

SEQ ID NO: 758320 - DNA, 19 bp, Mus musculus
  siRNA target sequence for Fshprh1 (NM_145924.1,333-351).
ccgtcaaaccagtctctta

SEQ ID NO: 758321 - DNA, 19 bp, Mus musculus
  siRNA target sequence for Fshprh1 (NM_145924.1,337-355).
caaaccagtctcttagact

SEQ ID NO: 758322 - DNA, 19 bp, Mus musculus
  siRNA target sequence for Fshprh1 (NM_145924.1,477-495).
ccagaaaggtcctaagaaa

SEQ ID NO: 758323 - DNA, 19 bp, Mus musculus
  siRNA target sequence for Fshprh1 (NM_145924.1,571-589).
gctccagaggcaattgata

SEQ ID NO: 758324 - DNA, 19 bp, Mus musculus
  siRNA target sequence for Fshprh1 (NM_145924.1,572-590).
ctccagaggcaattgatat

SEQ ID NO: 758325 - DNA, 19 bp, Mus musculus
  siRNA target sequence for Fshprh1 (NM_145924.1,629-647).
ctgtaaactcacggatatt

SEQ ID NO: 758326 - DNA, 19 bp, Mus musculus
  siRNA target sequence for Fshprh1 (NM_145924.1,631-649).
gtaaactcacggatattga

SEQ ID NO: 758327 - DNA, 19 bp, Mus musculus
  siRNA target sequence for Fshprh1 (NM_145924.1,677-695).
cagaagattccgtgcttaa

SEQ ID NO: 758328 - DNA, 19 bp, Mus musculus
  siRNA target sequence for Fshprh1 (NM_145924.1,730-748).
ggtaataccaaggtacttt

SEQ ID NO: 758329 - DNA, 19 bp, Mus musculus
  siRNA target sequence for Fshprh1 (NM_145924.1,731-749).
gtaataccaaggtactttt

SEQ ID NO: 758330 - DNA, 19 bp, Mus musculus
  siRNA target sequence for Fshprh1 (NM_145924.1,738-756).
caaggtacttttttatcgt

SEQ ID NO: 758331 - DNA, 19 bp, Mus musculus
  siRNA target sequence for Fshprh1 (NM_145924.1,767-785).
cgatgtttgactttattga

SEQ ID NO: 758332 - DNA, 19 bp, Mus musculus
  siRNA target sequence for Fshprh1 (NM_145924.1,784-802).
gatcataagaagcaaatta

SEQ ID NO: 758333 - DNA, 19 bp, Mus musculus
  siRNA target sequence for Fshprh1 (NM_145924.1,787-805).
cataagaagcaaattagtt

SEQ ID NO: 758334 - DNA, 19 bp, Mus musculus
  siRNA target sequence for Fshprh1 (NM_145924.1,795-813).
gcaaattagttctctgtat

SEQ ID NO: 758335 - DNA, 19 bp, Mus musculus
  siRNA target sequence for Fshprh1 (NM_145924.1,826-844).
gcttcattgcaagatgata

SEQ ID NO: 758336 - DNA, 19 bp, Mus musculus
  siRNA target sequence for Fshprh1 (NM_145924.1,830-848).
cattgcaagatgatactct

SEQ ID NO: 758337 - DNA, 19 bp, Mus musculus
  siRNA target sequence for Fshprh1 (NM_145924.1,853-871).
ccgtacgtttgccatttgt

SEQ ID NO: 758338 - DNA, 19 bp, Mus musculus
  siRNA target sequence for Fshprh1 (NM_145924.1,854-872).
cgtacgtttgccatttgtt

SEQ ID NO: 758339 - DNA, 19 bp, Mus musculus
  siRNA target sequence for Fshprh1 (NM_145924.1,884-902).
ccaaaagggagaatgtcaa

SEQ ID NO: 758340 - DNA, 19 bp, Mus musculus
  siRNA target sequence for Fshprh1 (NM_145924.1,885-903).
caaaagggagaatgtcaaa

SEQ ID NO: 758341 - DNA, 19 bp, Mus musculus
  siRNA target sequence for Fshprh1 (NM_145924.1,890-908).
gggagaatgtcaaaccatt

SEQ ID NO: 758342 - DNA, 19 bp, Mus musculus
  siRNA target sequence for Fshprh1 (NM_145924.1,894-912).
gaatgtcaaaccatttcgt

SEQ ID NO: 758343 - DNA, 19 bp, Mus musculus
  siRNA target sequence for Fshprh1 (NM_145924.1,958-976).
cacctccaggctttgttgt

SEQ ID NO: 758344 - DNA, 19 bp, Mus musculus
  siRNA target sequence for Fshprh1 (NM_145924.1,990-1008).
cttcgctcctactttgatt

SEQ ID NO: 758345 - DNA, 19 bp, Mus musculus
  siRNA target sequence for Fshprh1 (NM_145924.1,993-1011).
cgctcctactttgatttct

SEQ ID NO: 758346 - DNA, 19 bp, Mus musculus
  siRNA target sequence for Fshprh1 (NM_145924.1,1150-1168).
cgttctctaaagaggaaat

SEQ ID NO: 758347 - DNA, 19 bp, Mus musculus
  siRNA target sequence for Fshprh1 (NM_145924.1,1224-1242).
gaagacggcgagtctgttt

SEQ ID NO: 758348 - DNA, 19 bp, Mus musculus
  siRNA target sequence for Fshprh1 (NM_145924.1,1229-1247).
cggcgagtctgtttgatta

SEQ ID NO: 758349 - DNA, 19 bp, Mus musculus
  siRNA target sequence for Fshprh1 (NM_145924.1,1230-1248).
ggcgagtctgtttgattat

SEQ ID NO: 758350 - DNA, 19 bp, Mus musculus
  siRNA target sequence for Fshprh1 (NM_145924.1,1232-1250).
cgagtctgtttgattatct

SEQ ID NO: 758351 - DNA, 19 bp, Mus musculus
  siRNA target sequence for Fshprh1 (NM_145924.1,1243-1261).
gattatctcagcagtgaaa

SEQ ID NO: 758352 - DNA, 19 bp, Mus musculus
  siRNA target sequence for Fshprh1 (NM_145924.1,1262-1280).
gatcacttccactagaaca

SEQ ID NO: 758353 - DNA, 19 bp, Mus musculus
  siRNA target sequence for Fshprh1 (NM_145924.1,1359-1377).
ccctctgctacttcactat

SEQ ID NO: 758354 - DNA, 19 bp, Mus musculus
  siRNA target sequence for Fshprh1 (NM_145924.1,1363-1381).
ctgctacttcactatatta

SEQ ID NO: 758355 - DNA, 19 bp, Mus musculus
  siRNA target sequence for Fshprh1 (NM_145924.1,1374-1392).
ctatattaattgtgtcaaa

SEQ ID NO: 758356 - DNA, 19 bp, Mus musculus
  siRNA target sequence for Fshprh1 (NM_145924.1,1387-1405).
gtcaaagatgagtcaatct

SEQ ID NO: 758357 - DNA, 19 bp, Mus musculus
  siRNA target sequence for Fshprh1 (NM_145924.1,1393-1411).
gatgagtcaatcttactga

SEQ ID NO: 758358 - DNA, 19 bp, Mus musculus
  siRNA target sequence for Fshprh1 (NM_145924.1,1424-1442).
ggttgagtcaagcattaca

SEQ ID NO: 758359 - DNA, 19 bp, Mus musculus
  siRNA target sequence for Fshprh1 (NM_145924.1,1425-1443).
gttgagtcaagcattacaa

SEQ ID NO: 758360 - DNA, 19 bp, Mus musculus
  siRNA target sequence for Fshprh1 (NM_145924.1,1444-1462).
gaagaatgtgtgtggtata

SEQ ID NO: 758361 - DNA, 19 bp, Mus musculus
  siRNA target sequence for Fshprh1 (NM_145924.1,1453-1471).
gtgtggtataatataaata

SEQ ID NO: 758362 - DNA, 19 bp, Mus musculus
  siRNA target sequence for Fshprh1 (NM_145924.1,1455-1473).
gtggtataatataaataat

SEQ ID NO: 758363 - DNA, 19 bp, Mus musculus
  siRNA target sequence for Fshprh1 (NM_145924.1,1521-1539).
ggtacagtgcttcttacaa

SEQ ID NO: 758364 - DNA, 19 bp, Mus musculus
  siRNA target sequence for Fshprh1 (NM_145924.1,1556-1574).
gtgaggcattcctgtataa

SEQ ID NO: 758365 - DNA, 19 bp, Mus musculus
  siRNA target sequence for Fshprh1 (NM_145924.1,1687-1705).
gcacctctcttctttacat

SEQ ID NO: 758366 - DNA, 19 bp, Mus musculus
  siRNA target sequence for Fshprh1 (NM_145924.1,1690-1708).
cctctcttctttacatcaa

SEQ ID NO: 758367 - DNA, 19 bp, Mus musculus
  siRNA target sequence for Fshprh1 (NM_145924.1,1693-1711).
ctcttctttacatcaagta

SEQ ID NO: 758368 - DNA, 19 bp, Mus musculus
  siRNA target sequence for Fshprh1 (NM_145924.1,1722-1740).
gtgtagtgttcttcaaagt

SEQ ID NO: 758369 - DNA, 19 bp, Mus musculus
  siRNA target sequence for Fshprh1 (NM_145924.1,1724-1742).
gtagtgttcttcaaagtct

SEQ ID NO: 758370 - DNA, 19 bp, Mus musculus
  siRNA target sequence for Fshprh1 (NM_145924.1,1744-1762).
caagaattactgcagaatt

SEQ ID NO: 758371 - DNA, 19 bp, Mus musculus
  siRNA target sequence for Fshprh1 (NM_145924.1,1828-1846).
ctgggtggatccatgagtt

SEQ ID NO: 758372 - DNA, 19 bp, Mus musculus
  siRNA target sequence for Fshprh1 (NM_145924.1,1849-1867).
gtgtctcaattgattgagt

SEQ ID NO: 758373 - DNA, 19 bp, Mus musculus
  siRNA target sequence for Fshprh1 (NM_145924.1,1907-1925).
gcagcagtacattgttgtt

SEQ ID NO: 758374 - DNA, 19 bp, Mus musculus
  siRNA target sequence for Fshprh1 (NM_145924.1,1948-1966).
gagaaggtgtgtgatatat

SEQ ID NO: 758375 - DNA, 19 bp, Mus musculus
  siRNA target sequence for Fshprh1 (NM_145924.1,1950-1968).
gaaggtgtgtgatatatat

SEQ ID NO: 758376 - DNA, 19 bp, Mus musculus
  siRNA target sequence for Fshprh1 (NM_145924.1,1981-1999).
cttccgatagtggtattgt

SEQ ID NO: 758377 - DNA, 19 bp, Mus musculus
  siRNA target sequence for Fshprh1 (NM_145924.1,2059-2077).
ctctgttacattatgtaca

SEQ ID NO: 758378 - DNA, 19 bp, Mus musculus
  siRNA target sequence for Fshprh1 (NM_145924.1,2102-2120).
cgaagaaaaaccgctattt

SEQ ID NO: 758379 - DNA, 19 bp, Mus musculus
  siRNA target sequence for Fshprh1 (NM_145924.1,2157-2175).
gatctgtaaagagtataat

SEQ ID NO: 758380 - DNA, 19 bp, Mus musculus
  siRNA target sequence for Fshprh1 (NM_145924.1,2167-2185).
gagtataattactatttga

SEQ ID NO: 758381 - DNA, 19 bp, Mus musculus
  siRNA target sequence for Fshprh1 (NM_145924.1,2178-2196).
ctatttgacagctatggtt

SEQ ID NO: 758382 - DNA, 19 bp, Mus musculus
  siRNA target sequence for Fshprh1 (NM_145924.1,2188-2206).
gctatggtttgttgtctat

SEQ ID NO: 758383 - DNA, 19 bp, Mus musculus
  siRNA target sequence for Fshprh1 (NM_145924.1,2207-2225).
ggacgtccagaccatttaa

SEQ ID NO: 758384 - DNA, 19 bp, Mus musculus
  siRNA target sequence for Fshprh1 (NM_145924.1,2208-2226).
gacgtccagaccatttaaa

SEQ ID NO: 758385 - DNA, 19 bp, Mus musculus
  siRNA target sequence for Fshprh1 (NM_145924.1,2238-2256).
cactgaccccgaaaccata

SEQ ID NO: 758386 - DNA, 19 bp, Mus musculus
  siRNA target sequence for Fshprh1 (NM_145924.1,2242-2260).
gaccccgaaaccatagaaa

SEQ ID NO: 758387 - DNA, 19 bp, Mus musculus
  siRNA target sequence for Fshprh1 (NM_145924.1,2245-2263).
cccgaaaccatagaaaata

SEQ ID NO: 758388 - DNA, 19 bp, Mus musculus
  siRNA target sequence for Fshprh1 (NM_145924.1,2247-2265).
cgaaaccatagaaaatact

SEQ ID NO: 758389 - DNA, 19 bp, Mus musculus
  siRNA target sequence for Fshprh1 (NM_145924.1,2266-2284).
ggaggaacacagtataaaa

SEQ ID NO: 758390 - DNA, 19 bp, Mus musculus
  siRNA target sequence for Fshprh1 (NM_145924.1,2275-2293).
cagtataaaagcaccttaa

SEQ ID NO: 758391 - DNA, 19 bp, Mus musculus
  siRNA target sequence for Fshprh1 (NM_145924.1,2285-2303).
gcaccttaaatattgtcta

SEQ ID NO: 758392 - DNA, 19 bp, Mus musculus
  siRNA target sequence for Fshprh1 (NM_145924.1,2403-2421).
ctggtatttggactattta

SEQ ID NO: 758393 - DNA, 19 bp, Mus musculus
  siRNA target sequence for Fshprh1 (NM_145924.1,2405-2423).
ggtatttggactatttata

SEQ ID NO: 758394 - DNA, 19 bp, Mus musculus
  siRNA target sequence for Fshprh1 (NM_145924.1,2430-2448).
gggttttcagggcttaaaa

SEQ ID NO: 758395 - DNA, 19 bp, Mus musculus
  siRNA target sequence for Fshprh1 (NM_145924.1,2463-2481).
cagtgtccatagttctgta

SEQ ID NO: 758396 - DNA, 19 bp, Mus musculus
  siRNA target sequence for D14Ertd226e (NM_145928.1,101-119).
ctgctcttcagctacaata

SEQ ID NO: 758397 - DNA, 19 bp, Mus musculus
  siRNA target sequence for D14Ertd226e (NM_145928.1,231-249).
ccgtcgtgctggtcttgat

SEQ ID NO: 758398 - DNA, 19 bp, Mus musculus
  siRNA target sequence for D14Ertd226e (NM_145928.1,251-269).
gtgggcgtggtgatgttca

SEQ ID NO: 758399 - DNA, 19 bp, Mus musculus
  siRNA target sequence for D14Ertd226e (NM_145928.1,373-391).
ggccgtgttggccttttta

SEQ ID NO: 758400 - DNA, 19 bp, Mus musculus
  siRNA target sequence for D14Ertd226e (NM_145928.1,374-392).
gccgtgttggcctttttat

SEQ ID NO: 758401 - DNA, 19 bp, Mus musculus
  siRNA target sequence for D14Ertd226e (NM_145928.1,375-393).
ccgtgttggcctttttatt

SEQ ID NO: 758402 - DNA, 19 bp, Mus musculus
  siRNA target sequence for D14Ertd226e (NM_145928.1,379-397).
gttggcctttttattccaa

SEQ ID NO: 758403 - DNA, 19 bp, Mus musculus
  siRNA target sequence for D14Ertd226e (NM_145928.1,482-500).
gactcccttcagaaagcta

SEQ ID NO: 758404 - DNA, 19 bp, Mus musculus
  siRNA target sequence for D14Ertd226e (NM_145928.1,488-506).
cttcagaaagctaatcagt

SEQ ID NO: 758405 - DNA, 19 bp, Mus musculus
  siRNA target sequence for D14Ertd226e (NM_145928.1,571-589).
ctacagccgagagaaatgt

SEQ ID NO: 758406 - DNA, 19 bp, Mus musculus
  siRNA target sequence for D14Ertd226e (NM_145928.1,678-696).
gcaagtgggatgagttcat

SEQ ID NO: 758407 - DNA, 19 bp, Mus musculus
  siRNA target sequence for D14Ertd226e (NM_145928.1,732-750).
ggctgcccaggaacatcta

SEQ ID NO: 758408 - DNA, 19 bp, Mus musculus
  siRNA target sequence for AW549877 (NM_145930.1,124-142).
gccatcctggacatgacat

SEQ ID NO: 758409 - DNA, 19 bp, Mus musculus
  siRNA target sequence for AW549877 (NM_145930.1,125-143).
ccatcctggacatgacata

SEQ ID NO: 758410 - DNA, 19 bp, Mus musculus
  siRNA target sequence for AW549877 (NM_145930.1,126-144).
catcctggacatgacatat

SEQ ID NO: 758411 - DNA, 19 bp, Mus musculus
  siRNA target sequence for AW549877 (NM_145930.1,129-147).
cctggacatgacatatttt

SEQ ID NO: 758412 - DNA, 19 bp, Mus musculus
  siRNA target sequence for AW549877 (NM_145930.1,208-226).
gagctgctcgcgtttcttt

SEQ ID NO: 758413 - DNA, 19 bp, Mus musculus
  siRNA target sequence for AW549877 (NM_145930.1,213-231).
gctcgcgtttctttcagaa

SEQ ID NO: 758414 - DNA, 19 bp, Mus musculus
  siRNA target sequence for AW549877 (NM_145930.1,223-241).
ctttcagaaccagaaatct

SEQ ID NO: 758415 - DNA, 19 bp, Mus musculus
  siRNA target sequence for AW549877 (NM_145930.1,229-247).
gaaccagaaatcttagcta

SEQ ID NO: 758416 - DNA, 19 bp, Mus musculus
  siRNA target sequence for AW549877 (NM_145930.1,327-345).
cctgctgtacatgtattgt

SEQ ID NO: 758417 - DNA, 19 bp, Mus musculus
  siRNA target sequence for AW549877 (NM_145930.1,330-348).
gctgtacatgtattgtcat

SEQ ID NO: 758418 - DNA, 19 bp, Mus musculus
  siRNA target sequence for AW549877 (NM_145930.1,346-364).
cattcgctgactaagagaa

SEQ ID NO: 758419 - DNA, 19 bp, Mus musculus
  siRNA target sequence for AW549877 (NM_145930.1,371-389).
ggctcctcagaaaatccaa

SEQ ID NO: 758420 - DNA, 19 bp, Mus musculus
  siRNA target sequence for AW549877 (NM_145930.1,405-423).
ccttgttgatgggatcaat

SEQ ID NO: 758421 - DNA, 19 bp, Mus musculus
  siRNA target sequence for AW549877 (NM_145930.1,406-424).
cttgttgatgggatcaatt

SEQ ID NO: 758422 - DNA, 19 bp, Mus musculus
  siRNA target sequence for AW549877 (NM_145930.1,429-447).
gctacagatgctaaattat

SEQ ID NO: 758423 - DNA, 19 bp, Mus musculus
  siRNA target sequence for AW549877 (NM_145930.1,433-451).
cagatgctaaattatcgat

SEQ ID NO: 758424 - DNA, 19 bp, Mus musculus
  siRNA target sequence for AW549877 (NM_145930.1,448-466).
cgatgccctgtccagttaa

SEQ ID NO: 758425 - DNA, 19 bp, Mus musculus
  siRNA target sequence for AW549877 (NM_145930.1,487-505).
gacctagacacagctaaat

SEQ ID NO: 758426 - DNA, 19 bp, Mus musculus
  siRNA target sequence for AW549877 (NM_145930.1,569-587).
gctactgggggttaaagca

SEQ ID NO: 758427 - DNA, 19 bp, Mus musculus
  siRNA target sequence for AW549877 (NM_145930.1,666-684).
cttggatttccgagaagta

SEQ ID NO: 758428 - DNA, 19 bp, Mus musculus
  siRNA target sequence for AW549877 (NM_145930.1,750-768).
caccgcaaacgcaaagcaa

SEQ ID NO: 758429 - DNA, 19 bp, Mus musculus
  siRNA target sequence for AW549877 (NM_145930.1,752-770).
ccgcaaacgcaaagcaaat

SEQ ID NO: 758430 - DNA, 19 bp, Mus musculus
  siRNA target sequence for AW549877 (NM_145930.1,754-772).
gcaaacgcaaagcaaatct

SEQ ID NO: 758431 - DNA, 19 bp, Mus musculus
  siRNA target sequence for AW549877 (NM_145930.1,759-777).
cgcaaagcaaatcttaagt

SEQ ID NO: 758432 - DNA, 19 bp, Mus musculus
  siRNA target sequence for D630035O19Rik (NM_145932.2,366-384).
caggcaggactcatatcaa

SEQ ID NO: 758433 - DNA, 19 bp, Mus musculus
  siRNA target sequence for D630035O19Rik (NM_145932.2,370-388).
caggactcatatcaaactt

SEQ ID NO: 758434 - DNA, 19 bp, Mus musculus
  siRNA target sequence for D630035O19Rik (NM_145932.2,372-390).
ggactcatatcaaacttga

SEQ ID NO: 758435 - DNA, 19 bp, Mus musculus
  siRNA target sequence for D630035O19Rik (NM_145932.2,546-564).
gctcagttgccatttttct

SEQ ID NO: 758436 - DNA, 19 bp, Mus musculus
  siRNA target sequence for D630035O19Rik (NM_145932.2,566-584).
gaggatgctgtttacctat

SEQ ID NO: 758437 - DNA, 19 bp, Mus musculus
  siRNA target sequence for D630035O19Rik (NM_145932.2,639-657).
cacccacggtggtatctgt

SEQ ID NO: 758438 - DNA, 19 bp, Mus musculus
  siRNA target sequence for D630035O19Rik (NM_145932.2,689-707).
gccctcacacttgtagaaa

SEQ ID NO: 758439 - DNA, 19 bp, Mus musculus
  siRNA target sequence for D630035O19Rik (NM_145932.2,701-719).
gtagaaatggccataacct

SEQ ID NO: 758440 - DNA, 19 bp, Mus musculus
  siRNA target sequence for D630035O19Rik (NM_145932.2,709-727).
ggccataacctcgttttat

SEQ ID NO: 758441 - DNA, 19 bp, Mus musculus
  siRNA target sequence for D630035O19Rik (NM_145932.2,720-738).
cgttttatgccgtatgctt

SEQ ID NO: 758442 - DNA, 19 bp, Mus musculus
  siRNA target sequence for D630035O19Rik (NM_145932.2,721-739).
gttttatgccgtatgcttt

SEQ ID NO: 758443 - DNA, 19 bp, Mus musculus
  siRNA target sequence for D630035O19Rik (NM_145932.2,735-753).
gcttttacctgctgatgat

SEQ ID NO: 758444 - DNA, 19 bp, Mus musculus
  siRNA target sequence for D630035O19Rik (NM_145932.2,853-871).
ctgctgcccacctctcata

SEQ ID NO: 758445 - DNA, 19 bp, Mus musculus
  siRNA target sequence for D630035O19Rik (NM_145932.2,916-934).
gtacgccttcttcaagata

SEQ ID NO: 758446 - DNA, 19 bp, Mus musculus
  siRNA target sequence for D630035O19Rik (NM_145932.2,961-979).
catccctgacggcatctat

SEQ ID NO: 758447 - DNA, 19 bp, Mus musculus
  siRNA target sequence for D630035O19Rik (NM_145932.2,1008-1026).
cagctctctggatcaacaa

SEQ ID NO: 758448 - DNA, 19 bp, Mus musculus
  siRNA target sequence for D630035O19Rik (NM_145932.2,1177-1195).
ctccatcttggctaacagt

SEQ ID NO: 758449 - DNA, 19 bp, Mus musculus
  siRNA target sequence for D630035O19Rik (NM_145932.2,1287-1305).
cagtgctgacacgaatgta

SEQ ID NO: 758450 - DNA, 19 bp, Mus musculus
  siRNA target sequence for D630035O19Rik (NM_145932.2,1289-1307).
gtgctgacacgaatgtact

SEQ ID NO: 758451 - DNA, 19 bp, Mus musculus
  siRNA target sequence for D630035O19Rik (NM_145932.2,1291-1309).
gctgacacgaatgtactat

SEQ ID NO: 758452 - DNA, 19 bp, Mus musculus
  siRNA target sequence for AI463102 (NM_145937.1,272-290).
ccattcctgctggagtatt

SEQ ID NO: 758453 - DNA, 19 bp, Mus musculus
  siRNA target sequence for AI463102 (NM_145937.1,277-295).
cctgctggagtattcacaa

SEQ ID NO: 758454 - DNA, 19 bp, Mus musculus
  siRNA target sequence for AI463102 (NM_145937.1,278-296).
ctgctggagtattcacaat

SEQ ID NO: 758455 - DNA, 19 bp, Mus musculus
  siRNA target sequence for AI463102 (NM_145937.1,389-407).
gcaatgcggattttgagaa

SEQ ID NO: 758456 - DNA, 19 bp, Mus musculus
  siRNA target sequence for AI463102 (NM_145937.1,452-470).
gagactctttcgtctttga

SEQ ID NO: 758457 - DNA, 19 bp, Mus musculus
  siRNA target sequence for AI463102 (NM_145937.1,463-481).
gtctttgaaggcatgttga

SEQ ID NO: 758458 - DNA, 19 bp, Mus musculus
  siRNA target sequence for AI463102 (NM_145937.1,477-495).
gttgagcgagcaagtgaaa

SEQ ID NO: 758459 - DNA, 19 bp, Mus musculus
  siRNA target sequence for AI463102 (NM_145937.1,538-556).
cctgtcaagggagctaatt

SEQ ID NO: 758460 - DNA, 19 bp, Mus musculus
  siRNA target sequence for AI463102 (NM_145937.1,541-559).
gtcaagggagctaattgga

SEQ ID NO: 758461 - DNA, 19 bp, Mus musculus
  siRNA target sequence for AI463102 (NM_145937.1,572-590).
gtccggactccagtattct

SEQ ID NO: 758462 - DNA, 19 bp, Mus musculus
  siRNA target sequence for AI463102 (NM_145937.1,676-694).
gaggcagagtgggaataca

SEQ ID NO: 758463 - DNA, 19 bp, Mus musculus
  siRNA target sequence for AI463102 (NM_145937.1,857-875).
gctatggcttatacaacat

SEQ ID NO: 758464 - DNA, 19 bp, Mus musculus
  siRNA target sequence for AI463102 (NM_145937.1,911-929).
ggactgttcaccattctgt

SEQ ID NO: 758465 - DNA, 19 bp, Mus musculus
  siRNA target sequence for AI463102 (NM_145937.1,912-930).
gactgttcaccattctgtt

SEQ ID NO: 758466 - DNA, 19 bp, Mus musculus
  siRNA target sequence for AI463102 (NM_145937.1,965-983).
ggaaagaccgagtgaagaa

SEQ ID NO: 758467 - DNA, 19 bp, Mus musculus
  siRNA target sequence for AI463102 (NM_145937.1,1002-1020).
ccataagtcctattgctat

SEQ ID NO: 758468 - DNA, 19 bp, Mus musculus
  siRNA target sequence for Rnasep1 (NM_145938.2,207-225).
cattggaccctattactct

SEQ ID NO: 758469 - DNA, 19 bp, Mus musculus
  siRNA target sequence for Rnasep1 (NM_145938.2,301-319).
gcattaacatacaatacaa

SEQ ID NO: 758470 - DNA, 19 bp, Mus musculus
  siRNA target sequence for Rnasep1 (NM_145938.2,338-356).
ctgttgctctcctaccaaa

SEQ ID NO: 758471 - DNA, 19 bp, Mus musculus
  siRNA target sequence for Rnasep1 (NM_145938.2,393-411).
cgaagaaaccggacttcaa

SEQ ID NO: 758472 - DNA, 19 bp, Mus musculus
  siRNA target sequence for Rnasep1 (NM_145938.2,424-442).
cggtattctggcagaaaaa

SEQ ID NO: 758473 - DNA, 19 bp, Mus musculus
  siRNA target sequence for Rnasep1 (NM_145938.2,490-508).
ctggattctaagaagtaca

SEQ ID NO: 758474 - DNA, 19 bp, Mus musculus
  siRNA target sequence for Rnasep1 (NM_145938.2,534-552).
gaagaagcctttgaagttt

SEQ ID NO: 758475 - DNA, 19 bp, Mus musculus
  siRNA target sequence for Rnasep1 (NM_145938.2,600-618).
gatgtcgtacttttccaaa

SEQ ID NO: 758476 - DNA, 19 bp, Mus musculus
  siRNA target sequence for Rnasep1 (NM_145938.2,765-783).
ctgcagtgcggacctaaat

SEQ ID NO: 758477 - DNA, 19 bp, Mus musculus
  siRNA target sequence for Rnasep1 (NM_145938.2,767-785).
gcagtgcggacctaaataa

SEQ ID NO: 758478 - DNA, 19 bp, Mus musculus
  siRNA target sequence for Rnasep1 (NM_145938.2,770-788).
gtgcggacctaaataacga

SEQ ID NO: 758479 - DNA, 19 bp, Mus musculus
  siRNA target sequence for Rnasep1 (NM_145938.2,786-804).
cgagccttataacttcata

SEQ ID NO: 758480 - DNA, 19 bp, Mus musculus
  siRNA target sequence for Rnasep1 (NM_145938.2,787-805).
gagccttataacttcatat

SEQ ID NO: 758481 - DNA, 19 bp, Mus musculus
  siRNA target sequence for Rnasep1 (NM_145938.2,833-851).
ccgtggtagcccaagcttt

SEQ ID NO: 758482 - DNA, 19 bp, Mus musculus
  siRNA target sequence for Rnasep1 (NM_145938.2,857-875).
gtacaatcacaggtttcat

SEQ ID NO: 758483 - DNA, 19 bp, Mus musculus
  siRNA target sequence for Rnasep1 (NM_145938.2,948-966).
ggtcaccttgacagttcaa

SEQ ID NO: 758484 - DNA, 19 bp, Mus musculus
  siRNA target sequence for Rnasep1 (NM_145938.2,1026-1044).
cgagcacttgtacaatttt

SEQ ID NO: 758485 - DNA, 19 bp, Mus musculus
  siRNA target sequence for Rnasep1 (NM_145938.2,1038-1056).
caattttgtggttttcaat

SEQ ID NO: 758486 - DNA, 19 bp, Mus musculus
  siRNA target sequence for Alg3 (NM_145939.1,115-133).
cgggaaccgcgctacacat

SEQ ID NO: 758487 - DNA, 19 bp, Mus musculus
  siRNA target sequence for Alg3 (NM_145939.1,116-134).
gggaaccgcgctacacatt

SEQ ID NO: 758488 - DNA, 19 bp, Mus musculus
  siRNA target sequence for Alg3 (NM_145939.1,199-217).
gcatacacagagattgact

SEQ ID NO: 758489 - DNA, 19 bp, Mus musculus
  siRNA target sequence for Alg3 (NM_145939.1,307-325).
ccagctgggtttttgtaca

SEQ ID NO: 758490 - DNA, 19 bp, Mus musculus
  siRNA target sequence for Alg3 (NM_145939.1,313-331).
gggtttttgtacatcttta

SEQ ID NO: 758491 - DNA, 19 bp, Mus musculus
  siRNA target sequence for Alg3 (NM_145939.1,327-345).
ctttacggggctattctat

SEQ ID NO: 758492 - DNA, 19 bp, Mus musculus
  siRNA target sequence for Alg3 (NM_145939.1,451-469).
gtacctcccttcgtctttt

SEQ ID NO: 758493 - DNA, 19 bp, Mus musculus
  siRNA target sequence for Alg3 (NM_145939.1,488-506).
cttaccgtgtccattccat

SEQ ID NO: 758494 - DNA, 19 bp, Mus musculus
  siRNA target sequence for Alg3 (NM_145939.1,660-678).
gctattccttcttcttact

SEQ ID NO: 758495 - DNA, 19 bp, Mus musculus
  siRNA target sequence for Alg3 (NM_145939.1,800-818).
gtcgtcagtttcttttcca

SEQ ID NO: 758496 - DNA, 19 bp, Mus musculus
  siRNA target sequence for Alg3 (NM_145939.1,938-956).
gaacaggggaaagtattct

SEQ ID NO: 758497 - DNA, 19 bp, Mus musculus
  siRNA target sequence for Alg3 (NM_145939.1,1070-1088).
cgctccactaccagtttta

SEQ ID NO: 758498 - DNA, 19 bp, Mus musculus
  siRNA target sequence for Alg3 (NM_145939.1,1075-1093).
cactaccagttttatgtct

SEQ ID NO: 758499 - DNA, 19 bp, Mus musculus
  siRNA target sequence for Alg3 (NM_145939.1,1183-1201).
gagctctcctggaatacgt

SEQ ID NO: 758500 - DNA, 19 bp, Mus musculus
  siRNA target sequence for D11Ertd498e (NM_145940.1,172-190).
gaaccaaggccggttacaa

SEQ ID NO: 758501 - DNA, 19 bp, Mus musculus
  siRNA target sequence for D11Ertd498e (NM_145940.1,243-261).
gaaatccctgacgtgtata

SEQ ID NO: 758502 - DNA, 19 bp, Mus musculus
  siRNA target sequence for D11Ertd498e (NM_145940.1,310-328).
caaaacctcggcagatgaa

SEQ ID NO: 758503 - DNA, 19 bp, Mus musculus
  siRNA target sequence for D11Ertd498e (NM_145940.1,368-386).
cagctactccagcaacatt

SEQ ID NO: 758504 - DNA, 19 bp, Mus musculus
  siRNA target sequence for D11Ertd498e (NM_145940.1,436-454).
ccatctatatccacaacat

SEQ ID NO: 758505 - DNA, 19 bp, Mus musculus
  siRNA target sequence for D11Ertd498e (NM_145940.1,437-455).
catctatatccacaacatt

SEQ ID NO: 758506 - DNA, 19 bp, Mus musculus
  siRNA target sequence for D11Ertd498e (NM_145940.1,473-491).
gaagaccgtcctggatatt

SEQ ID NO: 758507 - DNA, 19 bp, Mus musculus
  siRNA target sequence for D11Ertd498e (NM_145940.1,516-534).
gccctgtctatcaaccatt

SEQ ID NO: 758508 - DNA, 19 bp, Mus musculus
  siRNA target sequence for D11Ertd498e (NM_145940.1,566-584).
gagtacaggcgagattgta

SEQ ID NO: 758509 - DNA, 19 bp, Mus musculus
  siRNA target sequence for D11Ertd498e (NM_145940.1,568-586).
gtacaggcgagattgtact

SEQ ID NO: 758510 - DNA, 19 bp, Mus musculus
  siRNA target sequence for D11Ertd498e (NM_145940.1,571-589).
caggcgagattgtactcta

SEQ ID NO: 758511 - DNA, 19 bp, Mus musculus
  siRNA target sequence for D11Ertd498e (NM_145940.1,575-593).
cgagattgtactctatgat

SEQ ID NO: 758512 - DNA, 19 bp, Mus musculus
  siRNA target sequence for D11Ertd498e (NM_145940.1,645-663).
gccgctatcaccttcaact

SEQ ID NO: 758513 - DNA, 19 bp, Mus musculus
  siRNA target sequence for D11Ertd498e (NM_145940.1,678-696).
ctagcaagcgcgtctgaaa

SEQ ID NO: 758514 - DNA, 19 bp, Mus musculus
  siRNA target sequence for D11Ertd498e (NM_145940.1,726-744).
cccgagggccagaaactct

SEQ ID NO: 758515 - DNA, 19 bp, Mus musculus
  siRNA target sequence for D11Ertd498e (NM_145940.1,727-745).
ccgagggccagaaactcta

SEQ ID NO: 758516 - DNA, 19 bp, Mus musculus
  siRNA target sequence for D11Ertd498e (NM_145940.1,728-746).
cgagggccagaaactctat

SEQ ID NO: 758517 - DNA, 19 bp, Mus musculus
  siRNA target sequence for D11Ertd498e (NM_145940.1,749-767).
gtttcgtcgaggaatgaaa

SEQ ID NO: 758518 - DNA, 19 bp, Mus musculus
  siRNA target sequence for D11Ertd498e (NM_145940.1,754-772).
gtcgaggaatgaaaaggta

SEQ ID NO: 758519 - DNA, 19 bp, Mus musculus
  siRNA target sequence for D11Ertd498e (NM_145940.1,835-853).
cggagaccgtgcacatctt

SEQ ID NO: 758520 - DNA, 19 bp, Mus musculus
  siRNA target sequence for D11Ertd498e (NM_145940.1,952-970).
cccaggtgtcggacatgat

SEQ ID NO: 758521 - DNA, 19 bp, Mus musculus
  siRNA target sequence for D11Ertd498e (NM_145940.1,1075-1093).
cctccgacggacaccttta

SEQ ID NO: 758522 - DNA, 19 bp, Mus musculus
  siRNA target sequence for D11Ertd498e (NM_145940.1,1078-1096).
ccgacggacacctttacat

SEQ ID NO: 758523 - DNA, 19 bp, Mus musculus
  siRNA target sequence for D11Ertd498e (NM_145940.1,1080-1098).
gacggacacctttacatct

SEQ ID NO: 758524 - DNA, 19 bp, Mus musculus
  siRNA target sequence for D11Ertd498e (NM_145940.1,1083-1101).
ggacacctttacatctaca

SEQ ID NO: 758525 - DNA, 19 bp, Mus musculus
  siRNA target sequence for D11Ertd498e (NM_145940.1,1084-1102).
gacacctttacatctacaa

SEQ ID NO: 758526 - DNA, 19 bp, Mus musculus
  siRNA target sequence for D11Ertd498e (NM_145940.1,1086-1104).
cacctttacatctacaact

SEQ ID NO: 758527 - DNA, 19 bp, Mus musculus
  siRNA target sequence for D11Ertd498e (NM_145940.1,1123-1141).
gagaatgtgtcctaatcaa

SEQ ID NO: 758528 - DNA, 19 bp, Mus musculus
  siRNA target sequence for D11Ertd498e (NM_145940.1,1259-1277).
cacggtgccaggatactct

SEQ ID NO: 758529 - DNA, 19 bp, Mus musculus
  siRNA target sequence for D11Ertd498e (NM_145940.1,1290-1308).
gcgctccgaggggaagtta

SEQ ID NO: 758530 - DNA, 19 bp, Mus musculus
  siRNA target sequence for D11Ertd498e (NM_145940.1,1291-1309).
cgctccgaggggaagttat

SEQ ID NO: 758531 - DNA, 19 bp, Mus musculus
  siRNA target sequence for D11Ertd498e (NM_145940.1,1292-1310).
gctccgaggggaagttatt

SEQ ID NO: 758532 - DNA, 19 bp, Mus musculus
  siRNA target sequence for D11Ertd498e (NM_145940.1,1342-1360).
gtctagacgacgagaatga

SEQ ID NO: 758533 - DNA, 19 bp, Mus musculus
  siRNA target sequence for D11Ertd498e (NM_145940.1,1344-1362).
ctagacgacgagaatgagt

SEQ ID NO: 758534 - DNA, 19 bp, Mus musculus
  siRNA target sequence for D11Ertd498e (NM_145940.1,1390-1408).
gtcagaagggcaaaacgaa

SEQ ID NO: 758535 - DNA, 19 bp, Mus musculus
  siRNA target sequence for BC031781 (NM_145943.1,102-120).
gctccgtgcgcgatgtgat

SEQ ID NO: 758536 - DNA, 19 bp, Mus musculus
  siRNA target sequence for BC031781 (NM_145943.1,105-123).
ccgtgcgcgatgtgatcta

SEQ ID NO: 758537 - DNA, 19 bp, Mus musculus
  siRNA target sequence for BC031781 (NM_145943.1,150-168).
ccgtggaatgcttctttgt

SEQ ID NO: 758538 - DNA, 19 bp, Mus musculus
  siRNA target sequence for BC031781 (NM_145943.1,212-230).
catggagccgtgtacagtt

SEQ ID NO: 758539 - DNA, 19 bp, Mus musculus
  siRNA target sequence for BC031781 (NM_145943.1,301-319).
gaagacaaccaatagagaa

SEQ ID NO: 758540 - DNA, 19 bp, Mus musculus
  siRNA target sequence for BC031781 (NM_145943.1,342-360).
ggagattacgagatgtcaa

SEQ ID NO: 758541 - DNA, 19 bp, Mus musculus
  siRNA target sequence for BC031781 (NM_145943.1,343-361).
gagattacgagatgtcaat

SEQ ID NO: 758542 - DNA, 19 bp, Mus musculus
  siRNA target sequence for BC031781 (NM_145943.1,345-363).
gattacgagatgtcaatca

SEQ ID NO: 758543 - DNA, 19 bp, Mus musculus
  siRNA target sequence for BC031781 (NM_145943.1,351-369).
gagatgtcaatcatgagaa

SEQ ID NO: 758544 - DNA, 19 bp, Mus musculus
  siRNA target sequence for BC031781 (NM_145943.1,527-545).
gactcagtcctcaaaggta

SEQ ID NO: 758545 - DNA, 19 bp, Mus musculus
  siRNA target sequence for BC031781 (NM_145943.1,591-609).
ctcggaaacggcctaacaa

SEQ ID NO: 758546 - DNA, 19 bp, Mus musculus
  siRNA target sequence for BC031781 (NM_145943.1,593-611).
cggaaacggcctaacaagt

SEQ ID NO: 758547 - DNA, 19 bp, Mus musculus
  siRNA target sequence for BC031781 (NM_145943.1,599-617).
cggcctaacaagtcaaaaa

SEQ ID NO: 758548 - DNA, 19 bp, Mus musculus
  siRNA target sequence for BC031781 (NM_145943.1,1064-1082).
gacagagctgccatggttt

SEQ ID NO: 758549 - DNA, 19 bp, Mus musculus
  siRNA target sequence for 2610528H13Rik (NM_145944.1,119-137).
caccagcagcagcgttaat

SEQ ID NO: 758550 - DNA, 19 bp, Mus musculus
  siRNA target sequence for 2610528H13Rik (NM_145944.1,122-140).
cagcagcagcgttaattca

SEQ ID NO: 758551 - DNA, 19 bp, Mus musculus
  siRNA target sequence for 2610528H13Rik (NM_145944.1,125-143).
cagcagcgttaattcatct

SEQ ID NO: 758552 - DNA, 19 bp, Mus musculus
  siRNA target sequence for 2610528H13Rik (NM_145944.1,130-148).
gcgttaattcatctactta

SEQ ID NO: 758553 - DNA, 19 bp, Mus musculus
  siRNA target sequence for 2610528H13Rik (NM_145944.1,205-223).
ggcctgaagatatttggtt

SEQ ID NO: 758554 - DNA, 19 bp, Mus musculus
  siRNA target sequence for 2610528H13Rik (NM_145944.1,206-224).
gcctgaagatatttggttt

SEQ ID NO: 758555 - DNA, 19 bp, Mus musculus
  siRNA target sequence for 2610528H13Rik (NM_145944.1,220-238).
ggtttcacgtggacaaact

SEQ ID NO: 758556 - DNA, 19 bp, Mus musculus
  siRNA target sequence for 2610528H13Rik (NM_145944.1,247-265).
cccatgtgtacctacgatt

SEQ ID NO: 758557 - DNA, 19 bp, Mus musculus
  siRNA target sequence for 2610528H13Rik (NM_145944.1,252-270).
gtgtacctacgattacaaa

SEQ ID NO: 758558 - DNA, 19 bp, Mus musculus
  siRNA target sequence for 2610528H13Rik (NM_145944.1,352-370).
gcaagatgaacaacgttaa

SEQ ID NO: 758559 - DNA, 19 bp, Mus musculus
  siRNA target sequence for 2610528H13Rik (NM_145944.1,353-371).
caagatgaacaacgttaat

SEQ ID NO: 758560 - DNA, 19 bp, Mus musculus
  siRNA target sequence for 2610528H13Rik (NM_145944.1,385-403).
catggtctaacctgaagaa

SEQ ID NO: 758561 - DNA, 19 bp, Mus musculus
  siRNA target sequence for 2610528H13Rik (NM_145944.1,658-676).
gctactcatcactcatgaa

SEQ ID NO: 758562 - DNA, 19 bp, Mus musculus
  siRNA target sequence for 2610528H13Rik (NM_145944.1,659-677).
ctactcatcactcatgaaa

SEQ ID NO: 758563 - DNA, 19 bp, Mus musculus
  siRNA target sequence for 2610528H13Rik (NM_145944.1,664-682).
catcactcatgaaagttga

SEQ ID NO: 758564 - DNA, 19 bp, Mus musculus
  siRNA target sequence for 2610528H13Rik (NM_145944.1,706-724).
gtaacgattccgatgagtt

SEQ ID NO: 758565 - DNA, 19 bp, Mus musculus
  siRNA target sequence for 2610528H13Rik (NM_145944.1,711-729).
gattccgatgagttcatgt

SEQ ID NO: 758566 - DNA, 19 bp, Mus musculus
  siRNA target sequence for AI315068 (NM_145948.2,44-62).
gtccagctggtctacaaca

SEQ ID NO: 758567 - DNA, 19 bp, Mus musculus
  siRNA target sequence for AI315068 (NM_145948.2,83-101).
gccacgggaggaaatgtta

SEQ ID NO: 758568 - DNA, 19 bp, Mus musculus
  siRNA target sequence for AI315068 (NM_145948.2,125-143).
gagaaggcttgctaccaat

SEQ ID NO: 758569 - DNA, 19 bp, Mus musculus
  siRNA target sequence for AI315068 (NM_145948.2,139-157).
ccaatccatcagtagctat

SEQ ID NO: 758570 - DNA, 19 bp, Mus musculus
  siRNA target sequence for AI315068 (NM_145948.2,270-288).
ccctcgcgtggtcttttca

SEQ ID NO: 758571 - DNA, 19 bp, Mus musculus
  siRNA target sequence for AI315068 (NM_145948.2,271-289).
cctcgcgtggtcttttcat

SEQ ID NO: 758572 - DNA, 19 bp, Mus musculus
  siRNA target sequence for AI315068 (NM_145948.2,274-292).
cgcgtggtcttttcatgaa

SEQ ID NO: 758573 - DNA, 19 bp, Mus musculus
  siRNA target sequence for AI315068 (NM_145948.2,354-372).
ctgatcggatggtagagat

SEQ ID NO: 758574 - DNA, 19 bp, Mus musculus
  siRNA target sequence for AI315068 (NM_145948.2,365-383).
gtagagatcctgttccatt

SEQ ID NO: 758575 - DNA, 19 bp, Mus musculus
  siRNA target sequence for AI315068 (NM_145948.2,370-388).
gatcctgttccattatgca

SEQ ID NO: 758576 - DNA, 19 bp, Mus musculus
  siRNA target sequence for AI315068 (NM_145948.2,389-407).
gatcgggctctgaaaaagt

SEQ ID NO: 758577 - DNA, 19 bp, Mus musculus
  siRNA target sequence for AI315068 (NM_145948.2,411-429).
cggaccaggggaaaatcca

SEQ ID NO: 758578 - DNA, 19 bp, Mus musculus
  siRNA target sequence for AI315068 (NM_145948.2,1046-1064).
gttcggactttgctacatt

SEQ ID NO: 758579 - DNA, 19 bp, Mus musculus
  siRNA target sequence for AI315068 (NM_145948.2,1144-1162).
gcagcgcattgtggatatt

SEQ ID NO: 758580 - DNA, 19 bp, Mus musculus
  siRNA target sequence for AI315068 (NM_145948.2,1147-1165).
gcgcattgtggatatttta

SEQ ID NO: 758581 - DNA, 19 bp, Mus musculus
  siRNA target sequence for AI315068 (NM_145948.2,1148-1166).
cgcattgtggatattttat

SEQ ID NO: 758582 - DNA, 19 bp, Mus musculus
  siRNA target sequence for AI315068 (NM_145948.2,1208-1226).
gtggggtgtctctttacgt

SEQ ID NO: 758583 - DNA, 19 bp, Mus musculus
  siRNA target sequence for AI315068 (NM_145948.2,1240-1258).
gctcgcaaagcctgacaat

SEQ ID NO: 758584 - DNA, 19 bp, Mus musculus
  siRNA target sequence for AI315068 (NM_145948.2,1241-1259).
ctcgcaaagcctgacaata

SEQ ID NO: 758585 - DNA, 19 bp, Mus musculus
  siRNA target sequence for AI315068 (NM_145948.2,1249-1267).
gcctgacaataccttgttt

SEQ ID NO: 758586 - DNA, 19 bp, Mus musculus
  siRNA target sequence for AI315068 (NM_145948.2,1273-1291).
caggaccctctttgatcaa

SEQ ID NO: 758587 - DNA, 19 bp, Mus musculus
  siRNA target sequence for AI315068 (NM_145948.2,1326-1344).
cccgccactctgaaagaca

SEQ ID NO: 758588 - DNA, 19 bp, Mus musculus
  siRNA target sequence for AI315068 (NM_145948.2,1366-1384).
gcaggccggaggcatagtt

SEQ ID NO: 758589 - DNA, 19 bp, Mus musculus
  siRNA target sequence for AI315068 (NM_145948.2,1369-1387).
ggccggaggcatagttcaa

SEQ ID NO: 758590 - DNA, 19 bp, Mus musculus
  siRNA target sequence for AI315068 (NM_145948.2,1370-1388).
gccggaggcatagttcaat

SEQ ID NO: 758591 - DNA, 19 bp, Mus musculus
  siRNA target sequence for AI315068 (NM_145948.2,1371-1389).
ccggaggcatagttcaatt

SEQ ID NO: 758592 - DNA, 19 bp, Mus musculus
  siRNA target sequence for AI315068 (NM_145948.2,1372-1390).
cggaggcatagttcaattt

SEQ ID NO: 758593 - DNA, 19 bp, Mus musculus
  siRNA target sequence for AI315068 (NM_145948.2,1374-1392).
gaggcatagttcaatttga

SEQ ID NO: 758594 - DNA, 19 bp, Mus musculus
  siRNA target sequence for AI315068 (NM_145948.2,2050-2068).
cctgctgaaaggtgttgaa

SEQ ID NO: 758595 - DNA, 19 bp, Mus musculus
  siRNA target sequence for AI315068 (NM_145948.2,2090-2108).
gctctttgccagagaaatt

SEQ ID NO: 758596 - DNA, 19 bp, Mus musculus
  siRNA target sequence for AI315068 (NM_145948.2,2280-2298).
cgtccatcctacagagaat

SEQ ID NO: 758597 - DNA, 19 bp, Mus musculus
  siRNA target sequence for AI315068 (NM_145948.2,2299-2317).
cttgcaggacccaatttat

SEQ ID NO: 758598 - DNA, 19 bp, Mus musculus
  siRNA target sequence for AI315068 (NM_145948.2,2302-2320).
gcaggacccaatttatgga

SEQ ID NO: 758599 - DNA, 19 bp, Mus musculus
  siRNA target sequence for AI315068 (NM_145948.2,2308-2326).
cccaatttatggaaaagga

SEQ ID NO: 758600 - DNA, 19 bp, Mus musculus
  siRNA target sequence for AI315068 (NM_145948.2,2477-2495).
cccaagcaggattactgtt

SEQ ID NO: 758601 - DNA, 19 bp, Mus musculus
  siRNA target sequence for AI315068 (NM_145948.2,2482-2500).
gcaggattactgttctata

SEQ ID NO: 758602 - DNA, 19 bp, Mus musculus
  siRNA target sequence for AI315068 (NM_145948.2,2485-2503).
ggattactgttctatatgt

SEQ ID NO: 758603 - DNA, 19 bp, Mus musculus
  siRNA target sequence for AI315068 (NM_145948.2,2562-2580).
gccatttgtatcattcatt

SEQ ID NO: 758604 - DNA, 19 bp, Mus musculus
  siRNA target sequence for AI315068 (NM_145948.2,2626-2644).
gagatgggcgtgtcacaaa

SEQ ID NO: 758605 - DNA, 19 bp, Mus musculus
  siRNA target sequence for AI315068 (NM_145948.2,2663-2681).
gcgggcaaactcagtgaaa

SEQ ID NO: 758606 - DNA, 19 bp, Mus musculus
  siRNA target sequence for AI315068 (NM_145948.2,2838-2856).
ggccatcctgtatatctga

SEQ ID NO: 758607 - DNA, 19 bp, Mus musculus
  siRNA target sequence for C230043N17Rik (NM_145949.1,142-160).
ccacatttctgaggaatat

SEQ ID NO: 758608 - DNA, 19 bp, Mus musculus
  siRNA target sequence for C230043N17Rik (NM_145949.1,400-418).
ggtgctgccaagatctctt

SEQ ID NO: 758609 - DNA, 19 bp, Mus musculus
  siRNA target sequence for C230043N17Rik (NM_145949.1,411-429).
gatctcttgccattccttt

SEQ ID NO: 758610 - DNA, 19 bp, Mus musculus
  siRNA target sequence for C230043N17Rik (NM_145949.1,513-531).
cagaaggaccgttggaaat

SEQ ID NO: 758611 - DNA, 19 bp, Mus musculus
  siRNA target sequence for C230043N17Rik (NM_145949.1,710-728).
ctctccatccaggatatca

SEQ ID NO: 758612 - DNA, 19 bp, Mus musculus
  siRNA target sequence for C230043N17Rik (NM_145949.1,739-757).
ggcccaaatgcatgattat

SEQ ID NO: 758613 - DNA, 19 bp, Mus musculus
  siRNA target sequence for C230043N17Rik (NM_145949.1,946-964).
ggaaagtgttggctttcta

SEQ ID NO: 758614 - DNA, 19 bp, Mus musculus
  siRNA target sequence for C230043N17Rik (NM_145949.1,1029-1047).
cttctctgagagactacat

SEQ ID NO: 758615 - DNA, 19 bp, Mus musculus
  siRNA target sequence for C230043N17Rik (NM_145949.1,1071-1089).
gcctgatggcctataacca

SEQ ID NO: 758616 - DNA, 19 bp, Mus musculus
  siRNA target sequence for C230043N17Rik (NM_145949.1,1114-1132).
gcgcagttaccacatcaat

SEQ ID NO: 758617 - DNA, 19 bp, Mus musculus
  siRNA target sequence for C230043N17Rik (NM_145949.1,1116-1134).
gcagttaccacatcaatgt

SEQ ID NO: 758618 - DNA, 19 bp, Mus musculus
  siRNA target sequence for C230043N17Rik (NM_145949.1,1136-1154).
gtggccagatacattatct

SEQ ID NO: 758619 - DNA, 19 bp, Mus musculus
  siRNA target sequence for C230043N17Rik (NM_145949.1,1173-1191).
ggagcagggggctaactaa

SEQ ID NO: 758620 - DNA, 19 bp, Mus musculus
  siRNA target sequence for C230043N17Rik (NM_145949.1,1174-1192).
gagcagggggctaactaat

SEQ ID NO: 758621 - DNA, 19 bp, Mus musculus
  siRNA target sequence for BC010311 (NM_145950.2,171-189).
gctccctggccggtcattt

SEQ ID NO: 758622 - DNA, 19 bp, Mus musculus
  siRNA target sequence for BC010311 (NM_145950.2,175-193).
cctggccggtcatttcaga

SEQ ID NO: 758623 - DNA, 19 bp, Mus musculus
  siRNA target sequence for BC010311 (NM_145950.2,176-194).
ctggccggtcatttcagaa

SEQ ID NO: 758624 - DNA, 19 bp, Mus musculus
  siRNA target sequence for BC010311 (NM_145950.2,179-197).
gccggtcatttcagaaact

SEQ ID NO: 758625 - DNA, 19 bp, Mus musculus
  siRNA target sequence for BC010311 (NM_145950.2,180-198).
ccggtcatttcagaaacta

SEQ ID NO: 758626 - DNA, 19 bp, Mus musculus
  siRNA target sequence for BC010311 (NM_145950.2,181-199).
cggtcatttcagaaactat

SEQ ID NO: 758627 - DNA, 19 bp, Mus musculus
  siRNA target sequence for BC010311 (NM_145950.2,182-200).
ggtcatttcagaaactata

SEQ ID NO: 758628 - DNA, 19 bp, Mus musculus
  siRNA target sequence for BC010311 (NM_145950.2,196-214).
ctatagtgacactgaaact

SEQ ID NO: 758629 - DNA, 19 bp, Mus musculus
  siRNA target sequence for BC010311 (NM_145950.2,242-260).
caatattttggtgacaatt

SEQ ID NO: 758630 - DNA, 19 bp, Mus musculus
  siRNA target sequence for BC010311 (NM_145950.2,280-298).
gatgccattagttgaagaa

SEQ ID NO: 758631 - DNA, 19 bp, Mus musculus
  siRNA target sequence for BC010311 (NM_145950.2,325-343).
gactttgcctatggtaata

SEQ ID NO: 758632 - DNA, 19 bp, Mus musculus
  siRNA target sequence for BC010311 (NM_145950.2,331-349).
gcctatggtaataattgga

SEQ ID NO: 758633 - DNA, 19 bp, Mus musculus
  siRNA target sequence for BC010311 (NM_145950.2,332-350).
cctatggtaataattggaa

SEQ ID NO: 758634 - DNA, 19 bp, Mus musculus
  siRNA target sequence for BC010311 (NM_145950.2,333-351).
ctatggtaataattggaaa

SEQ ID NO: 758635 - DNA, 19 bp, Mus musculus
  siRNA target sequence for BC010311 (NM_145950.2,387-405).
caggctacagaccgtattt

SEQ ID NO: 758636 - DNA, 19 bp, Mus musculus
  siRNA target sequence for BC010311 (NM_145950.2,411-429).
cggaagcaatacatccaaa

SEQ ID NO: 758637 - DNA, 19 bp, Mus musculus
  siRNA target sequence for BC010311 (NM_145950.2,412-430).
ggaagcaatacatccaaat

SEQ ID NO: 758638 - DNA, 19 bp, Mus musculus
  siRNA target sequence for BC010311 (NM_145950.2,569-587).
gctgacttcggatatgagt

SEQ ID NO: 758639 - DNA, 19 bp, Mus musculus
  siRNA target sequence for BC010311 (NM_145950.2,663-681).
gtggggcatggcataatat

SEQ ID NO: 758640 - DNA, 19 bp, Mus musculus
  siRNA target sequence for BC010311 (NM_145950.2,666-684).
gggcatggcataatatgga

SEQ ID NO: 758641 - DNA, 19 bp, Mus musculus
  siRNA target sequence for BC010311 (NM_145950.2,686-704).
ggttctatgttgacaatca

SEQ ID NO: 758642 - DNA, 19 bp, Mus musculus
  siRNA target sequence for BC010311 (NM_145950.2,838-856).
gggccttcagaagaatttt

SEQ ID NO: 758643 - DNA, 19 bp, Mus musculus
  siRNA target sequence for BC010311 (NM_145950.2,847-865).
gaagaattttcgagagaat

SEQ ID NO: 758644 - DNA, 19 bp, Mus musculus
  siRNA target sequence for BC010311 (NM_145950.2,850-868).
gaattttcgagagaatact

SEQ ID NO: 758645 - DNA, 19 bp, Mus musculus
  siRNA target sequence for BC010311 (NM_145950.2,860-878).
gagaatacttacataacct

SEQ ID NO: 758646 - DNA, 19 bp, Mus musculus
  siRNA target sequence for BC010311 (NM_145950.2,871-889).
cataacctctgtatcaaga

SEQ ID NO: 758647 - DNA, 19 bp, Mus musculus
  siRNA target sequence for BC010311 (NM_145950.2,915-933).
gtagtcaagacagagatat

SEQ ID NO: 758648 - DNA, 19 bp, Mus musculus
  siRNA target sequence for BC010311 (NM_145950.2,1106-1124).
gaagagtttccgtttgtgt

SEQ ID NO: 758649 - DNA, 19 bp, Mus musculus
  siRNA target sequence for BC010311 (NM_145950.2,1116-1134).
cgtttgtgtttcattcgat

SEQ ID NO: 758650 - DNA, 19 bp, Mus musculus
  siRNA target sequence for BC010311 (NM_145950.2,1148-1166).
gctgctataaacaaaggaa

SEQ ID NO: 758651 - DNA, 19 bp, Mus musculus
  siRNA target sequence for BC010311 (NM_145950.2,1231-1249).
gctctgtgcctataacaat

SEQ ID NO: 758652 - DNA, 19 bp, Mus musculus
  siRNA target sequence for BC010311 (NM_145950.2,1236-1254).
gtgcctataacaataatat

SEQ ID NO: 758653 - DNA, 19 bp, Mus musculus
  siRNA target sequence for BC010311 (NM_145950.2,1270-1288).
gtttcgcagacgagtaact

SEQ ID NO: 758654 - DNA, 19 bp, Mus musculus
  siRNA target sequence for BC010311 (NM_145950.2,1283-1301).
gtaactgatccaagcttaa

SEQ ID NO: 758655 - DNA, 19 bp, Mus musculus
  siRNA target sequence for BC010311 (NM_145950.2,1386-1404).
caggtcctctgtctgatta

SEQ ID NO: 758656 - DNA, 19 bp, Mus musculus
  siRNA target sequence for BC010311 (NM_145950.2,1388-1406).
ggtcctctgtctgattata

SEQ ID NO: 758657 - DNA, 19 bp, Mus musculus
  siRNA target sequence for BC010311 (NM_145950.2,1391-1409).
cctctgtctgattatacca

SEQ ID NO: 758658 - DNA, 19 bp, Mus musculus
  siRNA target sequence for BC010311 (NM_145950.2,1467-1485).
gtgtctctggattgaagaa

SEQ ID NO: 758659 - DNA, 19 bp, Mus musculus
  siRNA target sequence for BC010311 (NM_145950.2,1520-1538).
ggttctcatcctaacctat

SEQ ID NO: 758660 - DNA, 19 bp, Mus musculus
  siRNA target sequence for BC010311 (NM_145950.2,1524-1542).
ctcatcctaacctatcttt

SEQ ID NO: 758661 - DNA, 19 bp, Mus musculus
  siRNA target sequence for BC010311 (NM_145950.2,1608-1626).
ctgtggaggttgatgcata

SEQ ID NO: 758662 - DNA, 19 bp, Mus musculus
  siRNA target sequence for BC010311 (NM_145950.2,1629-1647).
cctatgaatgtgttaaaga

SEQ ID NO: 758663 - DNA, 19 bp, Mus musculus
  siRNA target sequence for BC010311 (NM_145950.2,1646-1664).
gaagccaatctttttgctt

SEQ ID NO: 758664 - DNA, 19 bp, Mus musculus
  siRNA target sequence for BC010311 (NM_145950.2,1668-1686).
gccctttggttggagataa

SEQ ID NO: 758665 - DNA, 19 bp, Mus musculus
  siRNA target sequence for BC010311 (NM_145950.2,1675-1693).
ggttggagataatttcgtt

SEQ ID NO: 758666 - DNA, 19 bp, Mus musculus
  siRNA target sequence for BC010311 (NM_145950.2,1680-1698).
gagataatttcgttcgatt

SEQ ID NO: 758667 - DNA, 19 bp, Mus musculus
  siRNA target sequence for BC010311 (NM_145950.2,1756-1774).
gcagcatttgtttgttcaa

SEQ ID NO: 758668 - DNA, 19 bp, Mus musculus
  siRNA target sequence for BC010311 (NM_145950.2,1759-1777).
gcatttgtttgttcaaaga

SEQ ID NO: 758669 - DNA, 19 bp, Mus musculus
  siRNA target sequence for BC033574 (NM_145952.1,89-107).
gatgttgaagtattttgca

SEQ ID NO: 758670 - DNA, 19 bp, Mus musculus
  siRNA target sequence for BC033574 (NM_145952.1,128-146).
ggaaaacctatccaaacta

SEQ ID NO: 758671 - DNA, 19 bp, Mus musculus
  siRNA target sequence for BC033574 (NM_145952.1,150-168).
cttcatttcaagtcgtata

SEQ ID NO: 758672 - DNA, 19 bp, Mus musculus
  siRNA target sequence for BC033574 (NM_145952.1,171-189).
ctgacaccagatatatatt

SEQ ID NO: 758673 - DNA, 19 bp, Mus musculus
  siRNA target sequence for BC033574 (NM_145952.1,208-226).
cattgtacagcaaatcact

SEQ ID NO: 758674 - DNA, 19 bp, Mus musculus
  siRNA target sequence for BC033574 (NM_145952.1,218-236).
caaatcactgccacttgat

SEQ ID NO: 758675 - DNA, 19 bp, Mus musculus
  siRNA target sequence for BC033574 (NM_145952.1,246-264).
cgagtctgggatgtgtttt

SEQ ID NO: 758676 - DNA, 19 bp, Mus musculus
  siRNA target sequence for BC033574 (NM_145952.1,304-322).
ggatcctccggctatatga

SEQ ID NO: 758677 - DNA, 19 bp, Mus musculus
  siRNA target sequence for BC033574 (NM_145952.1,305-323).
gatcctccggctatatgaa

SEQ ID NO: 758678 - DNA, 19 bp, Mus musculus
  siRNA target sequence for BC033574 (NM_145952.1,308-326).
cctccggctatatgaagat

SEQ ID NO: 758679 - DNA, 19 bp, Mus musculus
  siRNA target sequence for BC033574 (NM_145952.1,311-329).
ccggctatatgaagatata

SEQ ID NO: 758680 - DNA, 19 bp, Mus musculus
  siRNA target sequence for BC033574 (NM_145952.1,330-348).
ctcctacagatggacttta

SEQ ID NO: 758681 - DNA, 19 bp, Mus musculus
  siRNA target sequence for BC033574 (NM_145952.1,336-354).
cagatggactttattcata

SEQ ID NO: 758682 - DNA, 19 bp, Mus musculus
  siRNA target sequence for BC033574 (NM_145952.1,371-389).
caaattgccagaagatata

SEQ ID NO: 758683 - DNA, 19 bp, Mus musculus
  siRNA target sequence for BC033574 (NM_145952.1,412-430).
gcatcgcagccattcagat

SEQ ID NO: 758684 - DNA, 19 bp, Mus musculus
  siRNA target sequence for 1110007A13Rik (NM_145955.2,290-308).
cttcttcgcacaaaatgga

SEQ ID NO: 758685 - DNA, 19 bp, Mus musculus
  siRNA target sequence for 1110007A13Rik (NM_145955.2,601-619).
ctaccacttcggaaagaca

SEQ ID NO: 758686 - DNA, 19 bp, Mus musculus
  siRNA target sequence for 1110007A13Rik (NM_145955.2,1370-1388).
gtatacaagaagagatgta

SEQ ID NO: 758687 - DNA, 19 bp, Mus musculus
  siRNA target sequence for 1110007A13Rik (NM_145955.2,1386-1404).
gtacttcctctaggaaaat

SEQ ID NO: 758688 - DNA, 19 bp, Mus musculus
  siRNA target sequence for 1110007A13Rik (NM_145955.2,1422-1440).
ggttgcccgcagaacagta

SEQ ID NO: 758689 - DNA, 19 bp, Mus musculus
  siRNA target sequence for 1110007A13Rik (NM_145955.2,1462-1480).
ggatcatccaacatcttgt

SEQ ID NO: 758690 - DNA, 19 bp, Mus musculus
  siRNA target sequence for 1110007A13Rik (NM_145955.2,1497-1515).
ctacagatgacaatagaaa

SEQ ID NO: 758691 - DNA, 19 bp, Mus musculus
  siRNA target sequence for 1110007A13Rik (NM_145955.2,1533-1551).
ctcattccccacaaagact

SEQ ID NO: 758692 - DNA, 19 bp, Mus musculus
  siRNA target sequence for 1110007A13Rik (NM_145955.2,1580-1598).
ccttcagctgcccaacaat

SEQ ID NO: 758693 - DNA, 19 bp, Mus musculus
  siRNA target sequence for 1110007A13Rik (NM_145955.2,1581-1599).
cttcagctgcccaacaata

SEQ ID NO: 758694 - DNA, 19 bp, Mus musculus
  siRNA target sequence for 1110007A13Rik (NM_145955.2,1648-1666).
cgccaggtgttcataacgt

SEQ ID NO: 758695 - DNA, 19 bp, Mus musculus
  siRNA target sequence for 1110007A13Rik (NM_145955.2,1649-1667).
gccaggtgttcataacgta

SEQ ID NO: 758696 - DNA, 19 bp, Mus musculus
  siRNA target sequence for 1110007A13Rik (NM_145955.2,1693-1711).
ggcagaaggtggattacga

SEQ ID NO: 758697 - DNA, 19 bp, Mus musculus
  siRNA target sequence for 1110007A13Rik (NM_145955.2,1727-1745).
gatggagttcccatgcaat

SEQ ID NO: 758698 - DNA, 19 bp, Mus musculus
  siRNA target sequence for 1110007A13Rik (NM_145955.2,1731-1749).
gagttcccatgcaatatca

SEQ ID NO: 758699 - DNA, 19 bp, Mus musculus
  siRNA target sequence for 1110007A13Rik (NM_145955.2,1733-1751).
gttcccatgcaatatcaat

SEQ ID NO: 758700 - DNA, 19 bp, Mus musculus
  siRNA target sequence for 1110007A13Rik (NM_145955.2,1736-1754).
cccatgcaatatcaatgtt

SEQ ID NO: 758701 - DNA, 19 bp, Mus musculus
  siRNA target sequence for 1110007A13Rik (NM_145955.2,1738-1756).
catgcaatatcaatgttct

SEQ ID NO: 758702 - DNA, 19 bp, Mus musculus
  siRNA target sequence for 1110007A13Rik (NM_145955.2,1786-1804).
cggcagactgccagattca

SEQ ID NO: 758703 - DNA, 19 bp, Mus musculus
  siRNA target sequence for 1110007A13Rik (NM_145955.2,1872-1890).
ccgtccgtgctcaacaagt

SEQ ID NO: 758704 - DNA, 19 bp, Mus musculus
  siRNA target sequence for 1110007A13Rik (NM_145955.2,1948-1966).
ccaaggcggttgaagatga

SEQ ID NO: 758705 - DNA, 19 bp, Mus musculus
  siRNA target sequence for 1110007A13Rik (NM_145955.2,1949-1967).
caaggcggttgaagatgat

SEQ ID NO: 758706 - DNA, 19 bp, Mus musculus
  siRNA target sequence for C6.1A (NM_145956.2,44-62).
ctgtgcaggcggttcatct

SEQ ID NO: 758707 - DNA, 19 bp, Mus musculus
  siRNA target sequence for C6.1A (NM_145956.2,140-158).
gggagttgaatgatgacat

SEQ ID NO: 758708 - DNA, 19 bp, Mus musculus
  siRNA target sequence for C6.1A (NM_145956.2,162-180).
gagtgactccaaatttaca

SEQ ID NO: 758709 - DNA, 19 bp, Mus musculus
  siRNA target sequence for C6.1A (NM_145956.2,168-186).
ctccaaatttacatacact

SEQ ID NO: 758710 - DNA, 19 bp, Mus musculus
  siRNA target sequence for C6.1A (NM_145956.2,219-237).
ggataccatcagaattgtt

SEQ ID NO: 758711 - DNA, 19 bp, Mus musculus
  siRNA target sequence for C6.1A (NM_145956.2,640-658).
gcagtagagctgccaaaaa

SEQ ID NO: 758712 - DNA, 19 bp, Mus musculus
  siRNA target sequence for C6.1A (NM_145956.2,641-659).
cagtagagctgccaaaaat

SEQ ID NO: 758713 - DNA, 19 bp, Mus musculus
  siRNA target sequence for Kbtbd2 (NM_145958.1,80-98).
cacgacctcctcatagaca

SEQ ID NO: 758714 - DNA, 19 bp, Mus musculus
  siRNA target sequence for Kbtbd2 (NM_145958.1,108-126).
gcgacaacttaaatgtaga

SEQ ID NO: 758715 - DNA, 19 bp, Mus musculus
  siRNA target sequence for Kbtbd2 (NM_145958.1,109-127).
cgacaacttaaatgtagaa

SEQ ID NO: 758716 - DNA, 19 bp, Mus musculus
  siRNA target sequence for Kbtbd2 (NM_145958.1,153-171).
ccatgctctggctagagta

SEQ ID NO: 758717 - DNA, 19 bp, Mus musculus
  siRNA target sequence for Kbtbd2 (NM_145958.1,179-197).
gagtcacgatcccagtatt

SEQ ID NO: 758718 - DNA, 19 bp, Mus musculus
  siRNA target sequence for Kbtbd2 (NM_145958.1,266-284).
ggtctcccacccaacgata

SEQ ID NO: 758719 - DNA, 19 bp, Mus musculus
  siRNA target sequence for Kbtbd2 (NM_145958.1,267-285).
gtctcccacccaacgataa

SEQ ID NO: 758720 - DNA, 19 bp, Mus musculus
  siRNA target sequence for Kbtbd2 (NM_145958.1,269-287).
ctcccacccaacgataagt

SEQ ID NO: 758721 - DNA, 19 bp, Mus musculus
  siRNA target sequence for Kbtbd2 (NM_145958.1,271-289).
cccacccaacgataagtct

SEQ ID NO: 758722 - DNA, 19 bp, Mus musculus
  siRNA target sequence for Kbtbd2 (NM_145958.1,293-311).
gtggttcagggtctttata

SEQ ID NO: 758723 - DNA, 19 bp, Mus musculus
  siRNA target sequence for Kbtbd2 (NM_145958.1,299-317).
cagggtctttataagtcta

SEQ ID NO: 758724 - DNA, 19 bp, Mus musculus
  siRNA target sequence for Kbtbd2 (NM_145958.1,335-353).
cccagacttgggatgacta

SEQ ID NO: 758725 - DNA, 19 bp, Mus musculus
  siRNA target sequence for Kbtbd2 (NM_145958.1,336-354).
ccagacttgggatgactaa

SEQ ID NO: 758726 - DNA, 19 bp, Mus musculus
  siRNA target sequence for Kbtbd2 (NM_145958.1,385-403).
ctcagaaaacccttgtagt

SEQ ID NO: 758727 - DNA, 19 bp, Mus musculus
  siRNA target sequence for Kbtbd2 (NM_145958.1,394-412).
cccttgtagtctttactct

SEQ ID NO: 758728 - DNA, 19 bp, Mus musculus
  siRNA target sequence for Kbtbd2 (NM_145958.1,426-444).
gcccccaggcagaaaaagt

SEQ ID NO: 758729 - DNA, 19 bp, Mus musculus
  siRNA target sequence for Kbtbd2 (NM_145958.1,459-477).
gcccacccgctgatttgca

SEQ ID NO: 758730 - DNA, 19 bp, Mus musculus
  siRNA target sequence for Kbtbd2 (NM_145958.1,460-478).
cccacccgctgatttgcat

SEQ ID NO: 758731 - DNA, 19 bp, Mus musculus
  siRNA target sequence for Kbtbd2 (NM_145958.1,461-479).
ccacccgctgatttgcata

SEQ ID NO: 758732 - DNA, 19 bp, Mus musculus
  siRNA target sequence for Kbtbd2 (NM_145958.1,462-480).
cacccgctgatttgcataa

SEQ ID NO: 758733 - DNA, 19 bp, Mus musculus
  siRNA target sequence for Kbtbd2 (NM_145958.1,465-483).
ccgctgatttgcataaggt

SEQ ID NO: 758734 - DNA, 19 bp, Mus musculus
  siRNA target sequence for Kbtbd2 (NM_145958.1,494-512).
gtaactccggataatgata

SEQ ID NO: 758735 - DNA, 19 bp, Mus musculus
  siRNA target sequence for Kbtbd2 (NM_145958.1,498-516).
ctccggataatgatattta

SEQ ID NO: 758736 - DNA, 19 bp, Mus musculus
  siRNA target sequence for Kbtbd2 (NM_145958.1,500-518).
ccggataatgatatttaca

SEQ ID NO: 758737 - DNA, 19 bp, Mus musculus
  siRNA target sequence for Kbtbd2 (NM_145958.1,501-519).
cggataatgatatttacat

SEQ ID NO: 758738 - DNA, 19 bp, Mus musculus
  siRNA target sequence for Kbtbd2 (NM_145958.1,592-610).
ccgaactgtgaattgcttt

SEQ ID NO: 758739 - DNA, 19 bp, Mus musculus
  siRNA target sequence for Kbtbd2 (NM_145958.1,613-631).
ctggtttgatgcacaacaa

SEQ ID NO: 758740 - DNA, 19 bp, Mus musculus
  siRNA target sequence for Kbtbd2 (NM_145958.1,690-708).
gctgtgaaggctatatcta

SEQ ID NO: 758741 - DNA, 19 bp, Mus musculus
  siRNA target sequence for Kbtbd2 (NM_145958.1,823-841).
gagtgcagcagttgtagtt

SEQ ID NO: 758742 - DNA, 19 bp, Mus musculus
  siRNA target sequence for Kbtbd2 (NM_145958.1,842-860).
cacgactgcatctatgtga

SEQ ID NO: 758743 - DNA, 19 bp, Mus musculus
  siRNA target sequence for Kbtbd2 (NM_145958.1,850-868).
catctatgtgatgacatta

SEQ ID NO: 758744 - DNA, 19 bp, Mus musculus
  siRNA target sequence for Kbtbd2 (NM_145958.1,925-943).
gcagactagcagatctttt

SEQ ID NO: 758745 - DNA, 19 bp, Mus musculus
  siRNA target sequence for Kbtbd2 (NM_145958.1,928-946).
gactagcagatcttttgct

SEQ ID NO: 758746 - DNA, 19 bp, Mus musculus
  siRNA target sequence for Kbtbd2 (NM_145958.1,983-1001).
ggagggttgcatattgcta

SEQ ID NO: 758747 - DNA, 19 bp, Mus musculus
  siRNA target sequence for Kbtbd2 (NM_145958.1,988-1006).
gttgcatattgctaccaat

SEQ ID NO: 758748 - DNA, 19 bp, Mus musculus
  siRNA target sequence for Kbtbd2 (NM_145958.1,991-1009).
gcatattgctaccaattct

SEQ ID NO: 758749 - DNA, 19 bp, Mus musculus
  siRNA target sequence for Kbtbd2 (NM_145958.1,1002-1020).
ccaattctggcataagact

SEQ ID NO: 758750 - DNA, 19 bp, Mus musculus
  siRNA target sequence for Kbtbd2 (NM_145958.1,1021-1039).
cccctctggcactgtagat

SEQ ID NO: 758751 - DNA, 19 bp, Mus musculus
  siRNA target sequence for Kbtbd2 (NM_145958.1,1034-1052).
gtagatgggtcttcagtaa

SEQ ID NO: 758752 - DNA, 19 bp, Mus musculus
  siRNA target sequence for Kbtbd2 (NM_145958.1,1044-1062).
cttcagtaactgtggaaat

SEQ ID NO: 758753 - DNA, 19 bp, Mus musculus
  siRNA target sequence for Kbtbd2 (NM_145958.1,1057-1075).
ggaaatttatgatgtgaat

SEQ ID NO: 758754 - DNA, 19 bp, Mus musculus
  siRNA target sequence for Kbtbd2 (NM_145958.1,1097-1115).
gccaacatccctgctaaaa

SEQ ID NO: 758755 - DNA, 19 bp, Mus musculus
  siRNA target sequence for Kbtbd2 (NM_145958.1,1102-1120).
catccctgctaaaaggtat

SEQ ID NO: 758756 - DNA, 19 bp, Mus musculus
  siRNA target sequence for Kbtbd2 (NM_145958.1,1105-1123).
ccctgctaaaaggtattct

SEQ ID NO: 758757 - DNA, 19 bp, Mus musculus
  siRNA target sequence for Kbtbd2 (NM_145958.1,1107-1125).
ctgctaaaaggtattctga

SEQ ID NO: 758758 - DNA, 19 bp, Mus musculus
  siRNA target sequence for Kbtbd2 (NM_145958.1,1174-1192).
gcgagaaacccacttaaat

SEQ ID NO: 758759 - DNA, 19 bp, Mus musculus
  siRNA target sequence for Kbtbd2 (NM_145958.1,1193-1211).
gaacgagctaagtatgtca

SEQ ID NO: 758760 - DNA, 19 bp, Mus musculus
  siRNA target sequence for Kbtbd2 (NM_145958.1,1242-1260).
ggtctctgcggcagcatat

SEQ ID NO: 758761 - DNA, 19 bp, Mus musculus
  siRNA target sequence for Kbtbd2 (NM_145958.1,1249-1267).
gcggcagcatatatctgaa

SEQ ID NO: 758762 - DNA, 19 bp, Mus musculus
  siRNA target sequence for Kbtbd2 (NM_145958.1,1278-1296).
gggacctagggagagattt

SEQ ID NO: 758763 - DNA, 19 bp, Mus musculus
  siRNA target sequence for Kbtbd2 (NM_145958.1,1279-1297).
ggacctagggagagatttt

SEQ ID NO: 758764 - DNA, 19 bp, Mus musculus
  siRNA target sequence for Kbtbd2 (NM_145958.1,1300-1318).
gtgcactgtggggaaactt

SEQ ID NO: 758765 - DNA, 19 bp, Mus musculus
  siRNA target sequence for Kbtbd2 (NM_145958.1,1351-1369).
gccaccaacttaccttttt

SEQ ID NO: 758766 - DNA, 19 bp, Mus musculus
  siRNA target sequence for Kbtbd2 (NM_145958.1,1352-1370).
ccaccaacttacctttttt

SEQ ID NO: 758767 - DNA, 19 bp, Mus musculus
  siRNA target sequence for Kbtbd2 (NM_145958.1,1380-1398).
gaacagaggagtttgaact

SEQ ID NO: 758768 - DNA, 19 bp, Mus musculus
  siRNA target sequence for BC027127 (NM_145967.1,272-290).
gttcttttccgtgttatat

SEQ ID NO: 758769 - DNA, 19 bp, Mus musculus
  siRNA target sequence for BC027127 (NM_145967.1,325-343).
ccgagttgccgagaaatgt

SEQ ID NO: 758770 - DNA, 19 bp, Mus musculus
  siRNA target sequence for BC027127 (NM_145967.1,349-367).
ctaccgaagggcaaaatgt

SEQ ID NO: 758771 - DNA, 19 bp, Mus musculus
  siRNA target sequence for BC027127 (NM_145967.1,539-557).
gaaagtccaaggcaatgat

SEQ ID NO: 758772 - DNA, 19 bp, Mus musculus
  siRNA target sequence for BC027127 (NM_145967.1,560-578).
ctcccacaagcttcagata

SEQ ID NO: 758773 - DNA, 19 bp, Mus musculus
  siRNA target sequence for BC027127 (NM_145967.1,564-582).
cacaagcttcagatatcca

SEQ ID NO: 758774 - DNA, 19 bp, Mus musculus
  siRNA target sequence for BC027127 (NM_145967.1,619-637).
gggtgactgacgctaacta

SEQ ID NO: 758775 - DNA, 19 bp, Mus musculus
  siRNA target sequence for BC027127 (NM_145967.1,661-679).
cccaggcctatctgaaagt

SEQ ID NO: 758776 - DNA, 19 bp, Mus musculus
  siRNA target sequence for BC027127 (NM_145967.1,663-681).
caggcctatctgaaagtca

SEQ ID NO: 758777 - DNA, 19 bp, Mus musculus
  siRNA target sequence for BC027127 (NM_145967.1,829-847).
ctcaagcggtagccaaaat

SEQ ID NO: 758778 - DNA, 19 bp, Mus musculus
  siRNA target sequence for 2610315E15Rik (NM_145968.1,157-175).
gcagtctcgatggttcaaa

SEQ ID NO: 758779 - DNA, 19 bp, Mus musculus
  siRNA target sequence for 2610315E15Rik (NM_145968.1,158-176).
cagtctcgatggttcaaaa

SEQ ID NO: 758780 - DNA, 19 bp, Mus musculus
  siRNA target sequence for 2610315E15Rik (NM_145968.1,164-182).
cgatggttcaaaaacactt

SEQ ID NO: 758781 - DNA, 19 bp, Mus musculus
  siRNA target sequence for 2610315E15Rik (NM_145968.1,165-183).
gatggttcaaaaacactta

SEQ ID NO: 758782 - DNA, 19 bp, Mus musculus
  siRNA target sequence for 2610315E15Rik (NM_145968.1,187-205).
ctaacaacatggagacatt

SEQ ID NO: 758783 - DNA, 19 bp, Mus musculus
  siRNA target sequence for 2610315E15Rik (NM_145968.1,191-209).
caacatggagacattaatt

SEQ ID NO: 758784 - DNA, 19 bp, Mus musculus
  siRNA target sequence for 2610315E15Rik (NM_145968.1,197-215).
ggagacattaattgaatgt

SEQ ID NO: 758785 - DNA, 19 bp, Mus musculus
  siRNA target sequence for 2610315E15Rik (NM_145968.1,216-234).
cagtcagagggtgatatca

SEQ ID NO: 758786 - DNA, 19 bp, Mus musculus
  siRNA target sequence for 2610315E15Rik (NM_145968.1,359-377).
cttctctgggtcattggaa

SEQ ID NO: 758787 - DNA, 19 bp, Mus musculus
  siRNA target sequence for 2610315E15Rik (NM_145968.1,405-423).
caacccttgtcgatcatct

SEQ ID NO: 758788 - DNA, 19 bp, Mus musculus
  siRNA target sequence for 2610315E15Rik (NM_145968.1,490-508).
cttcaacggaagggatatt

SEQ ID NO: 758789 - DNA, 19 bp, Mus musculus
  siRNA target sequence for 2610315E15Rik (NM_145968.1,545-563).
gaaggaggggcttaactgt

SEQ ID NO: 758790 - DNA, 19 bp, Mus musculus
  siRNA target sequence for 2610315E15Rik (NM_145968.1,562-580).
gtggggtctccgtgaatct

SEQ ID NO: 758791 - DNA, 19 bp, Mus musculus
  siRNA target sequence for 2610315E15Rik (NM_145968.1,697-715).
ccaccgaggaggacagaat

SEQ ID NO: 758792 - DNA, 19 bp, Mus musculus
  siRNA target sequence for A630054L15Rik (NM_145969.1,299-317).
ggcggtggaggtgatatat

SEQ ID NO: 758793 - DNA, 19 bp, Mus musculus
  siRNA target sequence for A630054L15Rik (NM_145969.1,323-341).
gcattccaaacttactgat

SEQ ID NO: 758794 - DNA, 19 bp, Mus musculus
  siRNA target sequence for A630054L15Rik (NM_145969.1,324-342).
cattccaaacttactgata

SEQ ID NO: 758795 - DNA, 19 bp, Mus musculus
  siRNA target sequence for A630054L15Rik (NM_145969.1,462-480).
cttcttgatgaatttgaca

SEQ ID NO: 758796 - DNA, 19 bp, Mus musculus
  siRNA target sequence for A630054L15Rik (NM_145969.1,490-508).
cagtttacttaaagaaaga

SEQ ID NO: 758797 - DNA, 19 bp, Mus musculus
  siRNA target sequence for A630054L15Rik (NM_145969.1,511-529).
ctgcatatttttatggata

SEQ ID NO: 758798 - DNA, 19 bp, Mus musculus
  siRNA target sequence for A630054L15Rik (NM_145969.1,546-564).
gttcgagataaaactctta

SEQ ID NO: 758799 - DNA, 19 bp, Mus musculus
  siRNA target sequence for A630054L15Rik (NM_145969.1,570-588).
ggctactttcaaaagtcat

SEQ ID NO: 758800 - DNA, 19 bp, Mus musculus
  siRNA target sequence for A630054L15Rik (NM_145969.1,590-608).
ggttttgatcagcaaacta

SEQ ID NO: 758801 - DNA, 19 bp, Mus musculus
  siRNA target sequence for A630054L15Rik (NM_145969.1,599-617).
cagcaaactaccttatatt

SEQ ID NO: 758802 - DNA, 19 bp, Mus musculus
  siRNA target sequence for A630054L15Rik (NM_145969.1,601-619).
gcaaactaccttatattca

SEQ ID NO: 758803 - DNA, 19 bp, Mus musculus
  siRNA target sequence for A630054L15Rik (NM_145969.1,602-620).
caaactaccttatattcat

SEQ ID NO: 758804 - DNA, 19 bp, Mus musculus
  siRNA target sequence for A630054L15Rik (NM_145969.1,627-645).
cacaccgtactcaaacaga

SEQ ID NO: 758805 - DNA, 19 bp, Mus musculus
  siRNA target sequence for A630054L15Rik (NM_145969.1,629-647).
caccgtactcaaacagata

SEQ ID NO: 758806 - DNA, 19 bp, Mus musculus
  siRNA target sequence for A630054L15Rik (NM_145969.1,642-660).
cagatagcaccagagtatt

SEQ ID NO: 758807 - DNA, 19 bp, Mus musculus
  siRNA target sequence for A630054L15Rik (NM_145969.1,680-698).
cttggaagcagcttgtaat

SEQ ID NO: 758808 - DNA, 19 bp, Mus musculus
  siRNA target sequence for A630054L15Rik (NM_145969.1,736-754).
cgctgcacctgcctatcat

SEQ ID NO: 758809 - DNA, 19 bp, Mus musculus
  siRNA target sequence for A630054L15Rik (NM_145969.1,746-764).
gcctatcatgggactagta

SEQ ID NO: 758810 - DNA, 19 bp, Mus musculus
  siRNA target sequence for A630054L15Rik (NM_145969.1,747-765).
cctatcatgggactagtaa

SEQ ID NO: 758811 - DNA, 19 bp, Mus musculus
  siRNA target sequence for A630054L15Rik (NM_145969.1,748-766).
ctatcatgggactagtaat

SEQ ID NO: 758812 - DNA, 19 bp, Mus musculus
  siRNA target sequence for A630054L15Rik (NM_145969.1,809-827).
gcagatggtgcagttaact

SEQ ID NO: 758813 - DNA, 19 bp, Mus musculus
  siRNA target sequence for A630054L15Rik (NM_145969.1,870-888).
cacgaggtggatcttttca

SEQ ID NO: 758814 - DNA, 19 bp, Mus musculus
  siRNA target sequence for A630054L15Rik (NM_145969.1,966-984).
gcgccatcgccgtcagaat

SEQ ID NO: 758815 - DNA, 19 bp, Mus musculus
  siRNA target sequence for A630054L15Rik (NM_145969.1,968-986).
gccatcgccgtcagaatct

SEQ ID NO: 758816 - DNA, 19 bp, Mus musculus
  siRNA target sequence for A630054L15Rik (NM_145969.1,969-987).
ccatcgccgtcagaatctt

SEQ ID NO: 758817 - DNA, 19 bp, Mus musculus
  siRNA target sequence for A630054L15Rik (NM_145969.1,994-1012).
ctgtactggctcttgttaa

SEQ ID NO: 758818 - DNA, 19 bp, Mus musculus
  siRNA target sequence for A630054L15Rik (NM_145969.1,996-1014).
gtactggctcttgttaact

SEQ ID NO: 758819 - DNA, 19 bp, Mus musculus
  siRNA target sequence for A630054L15Rik (NM_145969.1,999-1017).
ctggctcttgttaactgta

SEQ ID NO: 758820 - DNA, 19 bp, Mus musculus
  siRNA target sequence for A630054L15Rik (NM_145969.1,1002-1020).
gctcttgttaactgtatct

SEQ ID NO: 758821 - DNA, 19 bp, Mus musculus
  siRNA target sequence for A630054L15Rik (NM_145969.1,1024-1042).
cattaaagtactttagtga

SEQ ID NO: 758822 - DNA, 19 bp, Mus musculus
  siRNA target sequence for A630054L15Rik (NM_145969.1,1049-1067).
gccttacttcacgattcat

SEQ ID NO: 758823 - DNA, 19 bp, Mus musculus
  siRNA target sequence for A630054L15Rik (NM_145969.1,1058-1076).
cacgattcatgatagtgaa

SEQ ID NO: 758824 - DNA, 19 bp, Mus musculus
  siRNA target sequence for A630054L15Rik (NM_145969.1,1158-1176).
cagcactggccacacatta

SEQ ID NO: 758825 - DNA, 19 bp, Mus musculus
  siRNA target sequence for A630054L15Rik (NM_145969.1,1160-1178).
gcactggccacacattatt

SEQ ID NO: 758826 - DNA, 19 bp, Mus musculus
  siRNA target sequence for A630054L15Rik (NM_145969.1,1163-1181).
ctggccacacattattcga

SEQ ID NO: 758827 - DNA, 19 bp, Mus musculus
  siRNA target sequence for A630054L15Rik (NM_145969.1,1165-1183).
ggccacacattattcgaat

SEQ ID NO: 758828 - DNA, 19 bp, Mus musculus
  siRNA target sequence for A630054L15Rik (NM_145969.1,1166-1184).
gccacacattattcgaata

SEQ ID NO: 758829 - DNA, 19 bp, Mus musculus
  siRNA target sequence for A630054L15Rik (NM_145969.1,1197-1215).
cctgcaggtgaaattccta

SEQ ID NO: 758830 - DNA, 19 bp, Mus musculus
  siRNA target sequence for A630054L15Rik (NM_145969.1,1213-1231).
ctaagcaagttaaagtgaa

SEQ ID NO: 758831 - DNA, 19 bp, Mus musculus
  siRNA target sequence for A630054L15Rik (NM_145969.1,1245-1263).
ctaaaaactctggattcta

SEQ ID NO: 758832 - DNA, 19 bp, Mus musculus
  siRNA target sequence for A630054L15Rik (NM_145969.1,1266-1284).
cctggagtttatacttctt

SEQ ID NO: 758833 - DNA, 19 bp, Mus musculus
  siRNA target sequence for A630054L15Rik (NM_145969.1,1282-1300).
cttacaagccatatctaaa

SEQ ID NO: 758834 - DNA, 19 bp, Mus musculus
  siRNA target sequence for A630054L15Rik (NM_145969.1,1301-1319).
cagagatgaggagatcata

SEQ ID NO: 758835 - DNA, 19 bp, Mus musculus
  siRNA target sequence for A630054L15Rik (NM_145969.1,1354-1372).
cttctgaggcccaaagtgt

SEQ ID NO: 758836 - DNA, 19 bp, Mus musculus
  siRNA target sequence for A630054L15Rik (NM_145969.1,1404-1422).
caaagtttcatcattccat

SEQ ID NO: 758837 - DNA, 19 bp, Mus musculus
  siRNA target sequence for A630054L15Rik (NM_145969.1,1408-1426).
gtttcatcattccattaga

SEQ ID NO: 758838 - DNA, 19 bp, Mus musculus
  siRNA target sequence for A630054L15Rik (NM_145969.1,1445-1463).
gatgcctttgcagaaaagt

SEQ ID NO: 758839 - DNA, 19 bp, Mus musculus
  siRNA target sequence for A630054L15Rik (NM_145969.1,1448-1466).
gcctttgcagaaaagtatt

SEQ ID NO: 758840 - DNA, 19 bp, Mus musculus
  siRNA target sequence for A630054L15Rik (NM_145969.1,1579-1597).
gactttaccggcagtttct

SEQ ID NO: 758841 - DNA, 19 bp, Mus musculus
  siRNA target sequence for A630054L15Rik (NM_145969.1,1581-1599).
ctttaccggcagtttctaa

SEQ ID NO: 758842 - DNA, 19 bp, Mus musculus
  siRNA target sequence for A630054L15Rik (NM_145969.1,1586-1604).
ccggcagtttctaaagtct

SEQ ID NO: 758843 - DNA, 19 bp, Mus musculus
  siRNA target sequence for A630054L15Rik (NM_145969.1,1658-1676).
ggaggcacttcatctagaa

SEQ ID NO: 758844 - DNA, 19 bp, Mus musculus
  siRNA target sequence for BC016188 (NM_145970.1,1150-1168).
cacgcatgcatgaacgaat

SEQ ID NO: 758845 - DNA, 19 bp, Mus musculus
  siRNA target sequence for BC016188 (NM_145970.1,1153-1171).
gcatgcatgaacgaattgt

SEQ ID NO: 758846 - DNA, 19 bp, Mus musculus
  siRNA target sequence for BC016188 (NM_145970.1,1161-1179).
gaacgaattgtcaagcaat

SEQ ID NO: 758847 - DNA, 19 bp, Mus musculus
  siRNA target sequence for BC016188 (NM_145970.1,1548-1566).
gcgctgcgtgccaagcaaa

SEQ ID NO: 758848 - DNA, 19 bp, Mus musculus
  siRNA target sequence for BC016188 (NM_145970.1,1549-1567).
cgctgcgtgccaagcaaaa

SEQ ID NO: 758849 - DNA, 19 bp, Mus musculus
  siRNA target sequence for BC016188 (NM_145970.1,1746-1764).
cgtcgctatggggaactta

SEQ ID NO: 758850 - DNA, 19 bp, Mus musculus
  siRNA target sequence for BC016188 (NM_145970.1,1750-1768).
gctatggggaacttaccaa

SEQ ID NO: 758851 - DNA, 19 bp, Mus musculus
  siRNA target sequence for BC016188 (NM_145970.1,1829-1847).
caacattgctgaaaccatt

SEQ ID NO: 758852 - DNA, 19 bp, Mus musculus
  siRNA target sequence for BC016188 (NM_145970.1,1878-1896).
cggagcatggacaccttaa

SEQ ID NO: 758853 - DNA, 19 bp, Mus musculus
  siRNA target sequence for BC016188 (NM_145970.1,1879-1897).
ggagcatggacaccttaaa

SEQ ID NO: 758854 - DNA, 19 bp, Mus musculus
  siRNA target sequence for BC016188 (NM_145970.1,1882-1900).
gcatggacaccttaaaaca

SEQ ID NO: 758855 - DNA, 19 bp, Mus musculus
  siRNA target sequence for BC016188 (NM_145970.1,1990-2008).
gtgacatgctcctgtttat

SEQ ID NO: 758856 - DNA, 19 bp, Mus musculus
  siRNA target sequence for BC016188 (NM_145970.1,2117-2135).
caagaccagtgtgatcaaa

SEQ ID NO: 758857 - DNA, 19 bp, Mus musculus
  siRNA target sequence for BC016188 (NM_145970.1,2140-2158).
cagactcccctgaatttaa

SEQ ID NO: 758858 - DNA, 19 bp, Mus musculus
  siRNA target sequence for BC016188 (NM_145970.1,2214-2232).
caaaccaagggcatcaagt

SEQ ID NO: 758859 - DNA, 19 bp, Mus musculus
  siRNA target sequence for BC016188 (NM_145970.1,2412-2430).
gcccagcagttggaaacta

SEQ ID NO: 758860 - DNA, 19 bp, Mus musculus
  siRNA target sequence for BC016188 (NM_145970.1,2417-2435).
gcagttggaaactacaact

SEQ ID NO: 758861 - DNA, 19 bp, Mus musculus
  siRNA target sequence for BC016188 (NM_145970.1,2443-2461).
ggctggtcattgatcacat

SEQ ID NO: 758862 - DNA, 19 bp, Mus musculus
  siRNA target sequence for BC016188 (NM_145970.1,2481-2499).
gtcactgggcccaaagcaa

SEQ ID NO: 758863 - DNA, 19 bp, Mus musculus
  siRNA target sequence for BC016188 (NM_145970.1,2508-2526).
ctcataccggcgtcttcaa

SEQ ID NO: 758864 - DNA, 19 bp, Mus musculus
  siRNA target sequence for BC016188 (NM_145970.1,2583-2601).
gaccaagagcggctagaaa

SEQ ID NO: 758865 - DNA, 19 bp, Mus musculus
  siRNA target sequence for BC016188 (NM_145970.1,2724-2742).
ctccgcagggagtatgcaa

SEQ ID NO: 758866 - DNA, 19 bp, Mus musculus
  siRNA target sequence for BC016188 (NM_145970.1,2754-2772).
cgccagctgcacttctata

SEQ ID NO: 758867 - DNA, 19 bp, Mus musculus
  siRNA target sequence for BC016188 (NM_145970.1,2815-2833).
ctgcaaaggaggcattgta

SEQ ID NO: 758868 - DNA, 19 bp, Mus musculus
  siRNA target sequence for BC027231 (NM_145972.1,235-253).
ccttggatgcggaagtaga

SEQ ID NO: 758869 - DNA, 19 bp, Mus musculus
  siRNA target sequence for BC027231 (NM_145972.1,236-254).
cttggatgcggaagtagat

SEQ ID NO: 758870 - DNA, 19 bp, Mus musculus
  siRNA target sequence for BC027231 (NM_145972.1,243-261).
gcggaagtagatgtgttat

SEQ ID NO: 758871 - DNA, 19 bp, Mus musculus
  siRNA target sequence for BC027231 (NM_145972.1,316-334).
ccctcagacaggtagaaca

SEQ ID NO: 758872 - DNA, 19 bp, Mus musculus
  siRNA target sequence for BC027231 (NM_145972.1,324-342).
caggtagaacagtgcttaa

SEQ ID NO: 758873 - DNA, 19 bp, Mus musculus
  siRNA target sequence for BC027231 (NM_145972.1,335-353).
gtgcttaaagcgtttgaaa

SEQ ID NO: 758874 - DNA, 19 bp, Mus musculus
  siRNA target sequence for BC027231 (NM_145972.1,338-356).
cttaaagcgtttgaaacat

SEQ ID NO: 758875 - DNA, 19 bp, Mus musculus
  siRNA target sequence for BC027231 (NM_145972.1,344-362).
gcgtttgaaacatatgaat

SEQ ID NO: 758876 - DNA, 19 bp, Mus musculus
  siRNA target sequence for BC027231 (NM_145972.1,345-363).
cgtttgaaacatatgaatt

SEQ ID NO: 758877 - DNA, 19 bp, Mus musculus
  siRNA target sequence for BC027231 (NM_145972.1,465-483).
gtggtgctgatgaaggttt

SEQ ID NO: 758878 - DNA, 19 bp, Mus musculus
  siRNA target sequence for BC027231 (NM_145972.1,485-503).
gggaggctgcaagttgtta

SEQ ID NO: 758879 - DNA, 19 bp, Mus musculus
  siRNA target sequence for BC027231 (NM_145972.1,551-569).
gcacttagggctaaaggaa

SEQ ID NO: 758880 - DNA, 19 bp, Mus musculus
  siRNA target sequence for BC027231 (NM_145972.1,558-576).
gggctaaaggaattcatta

SEQ ID NO: 758881 - DNA, 19 bp, Mus musculus
  siRNA target sequence for BC027231 (NM_145972.1,559-577).
ggctaaaggaattcattat

SEQ ID NO: 758882 - DNA, 19 bp, Mus musculus
  siRNA target sequence for BC027231 (NM_145972.1,610-628).
ggctatgggttctccataa

SEQ ID NO: 758883 - DNA, 19 bp, Mus musculus
  siRNA target sequence for BC027231 (NM_145972.1,638-656).
gagaaggctcatttcctta

SEQ ID NO: 758884 - DNA, 19 bp, Mus musculus
  siRNA target sequence for BC027231 (NM_145972.1,640-658).
gaaggctcatttccttata

SEQ ID NO: 758885 - DNA, 19 bp, Mus musculus
  siRNA target sequence for BC027231 (NM_145972.1,683-701).
ggagatctccagcattcat

SEQ ID NO: 758886 - DNA, 19 bp, Mus musculus
  siRNA target sequence for BC027231 (NM_145972.1,703-721).
ccatgccttacttcaaaga

SEQ ID NO: 758887 - DNA, 19 bp, Mus musculus
  siRNA target sequence for BC027231 (NM_145972.1,763-781).
cttaccttgaagtgttcaa

SEQ ID NO: 758888 - DNA, 19 bp, Mus musculus
  siRNA target sequence for BC027231 (NM_145972.1,768-786).
cttgaagtgttcaaggtaa

SEQ ID NO: 758889 - DNA, 19 bp, Mus musculus
  siRNA target sequence for BC027231 (NM_145972.1,804-822).
gctactaaaggagtaacaa

SEQ ID NO: 758890 - DNA, 19 bp, Mus musculus
  siRNA target sequence for BC027231 (NM_145972.1,805-823).
ctactaaaggagtaacaaa

SEQ ID NO: 758891 - DNA, 19 bp, Mus musculus
  siRNA target sequence for BC027231 (NM_145972.1,813-831).
ggagtaacaaagttgctaa

SEQ ID NO: 758892 - DNA, 19 bp, Mus musculus
  siRNA target sequence for BC027231 (NM_145972.1,814-832).
gagtaacaaagttgctaaa

SEQ ID NO: 758893 - DNA, 19 bp, Mus musculus
  siRNA target sequence for BC027231 (NM_145972.1,816-834).
gtaacaaagttgctaaata

SEQ ID NO: 758894 - DNA, 19 bp, Mus musculus
  siRNA target sequence for BC027231 (NM_145972.1,876-894).
gacactttagatagacttt

SEQ ID NO: 758895 - DNA, 19 bp, Mus musculus
  siRNA target sequence for BC027231 (NM_145972.1,1043-1061).
ggagaccaaccgtgacttt

SEQ ID NO: 758896 - DNA, 19 bp, Mus musculus
  siRNA target sequence for BC027231 (NM_145972.1,1044-1062).
gagaccaaccgtgacttta

SEQ ID NO: 758897 - DNA, 19 bp, Mus musculus
  siRNA target sequence for BC027231 (NM_145972.1,1052-1070).
ccgtgactttaaatattct

SEQ ID NO: 758898 - DNA, 19 bp, Mus musculus
  siRNA target sequence for BC027231 (NM_145972.1,1160-1178).
gacgttcgcccaactttct

SEQ ID NO: 758899 - DNA, 19 bp, Mus musculus
  siRNA target sequence for BC027231 (NM_145972.1,1162-1180).
cgttcgcccaactttctga

SEQ ID NO: 758900 - DNA, 19 bp, Mus musculus
  siRNA target sequence for BC027231 (NM_145972.1,1200-1218).
gtgtggtcccggagcaaaa

SEQ ID NO: 758901 - DNA, 19 bp, Mus musculus
  siRNA target sequence for BC027231 (NM_145972.1,1223-1241).
caagactcaggctaccttt

SEQ ID NO: 758902 - DNA, 19 bp, Mus musculus
  siRNA target sequence for BC027231 (NM_145972.1,1245-1263).
ggcaacaaacttcttaaga

SEQ ID NO: 758903 - DNA, 19 bp, Mus musculus
  siRNA target sequence for BC027231 (NM_145972.1,1250-1268).
caaacttcttaagagtaat

SEQ ID NO: 758904 - DNA, 19 bp, Mus musculus
  siRNA target sequence for BC027231 (NM_145972.1,1254-1272).
cttcttaagagtaataggt

SEQ ID NO: 758905 - DNA, 19 bp, Mus musculus
  siRNA target sequence for BC027231 (NM_145972.1,1293-1311).
ggctatagtttgacaaaga

SEQ ID NO: 758906 - DNA, 19 bp, Mus musculus
  siRNA target sequence for BC027231 (NM_145972.1,1294-1312).
gctatagtttgacaaagaa

SEQ ID NO: 758907 - DNA, 19 bp, Mus musculus
  siRNA target sequence for BC027231 (NM_145972.1,1314-1332).
ctccagtgcatgaaaacat

SEQ ID NO: 758908 - DNA, 19 bp, Mus musculus
  siRNA target sequence for BC027231 (NM_145972.1,1429-1447).
ggaaaccgcagagaaagtt

SEQ ID NO: 758909 - DNA, 19 bp, Mus musculus
  siRNA target sequence for BC027231 (NM_145972.1,1430-1448).
gaaaccgcagagaaagtta

SEQ ID NO: 758910 - DNA, 19 bp, Mus musculus
  siRNA target sequence for BC027231 (NM_145972.1,1434-1452).
ccgcagagaaagttacagt

SEQ ID NO: 758911 - DNA, 19 bp, Mus musculus
  siRNA target sequence for BC027231 (NM_145972.1,1445-1463).
gttacagtcaactctttta

SEQ ID NO: 758912 - DNA, 19 bp, Mus musculus
  siRNA target sequence for BC027231 (NM_145972.1,1488-1506).
gggactctgaagaacacta

SEQ ID NO: 758913 - DNA, 19 bp, Mus musculus
  siRNA target sequence for BC027231 (NM_145972.1,1570-1588).
gaaagcaggtcttgagaaa

SEQ ID NO: 758914 - DNA, 19 bp, Mus musculus
  siRNA target sequence for BC027231 (NM_145972.1,1574-1592).
gcaggtcttgagaaaactt

SEQ ID NO: 758915 - DNA, 19 bp, Mus musculus
  siRNA target sequence for BC027231 (NM_145972.1,1619-1637).
ggtggtccacgggaatctt

SEQ ID NO: 758916 - DNA, 19 bp, Mus musculus
  siRNA target sequence for BC027231 (NM_145972.1,1622-1640).
ggtccacgggaatcttaca

SEQ ID NO: 758917 - DNA, 19 bp, Mus musculus
  siRNA target sequence for BC027231 (NM_145972.1,1643-1661).
gggcagtagaaatgaatct

SEQ ID NO: 758918 - DNA, 19 bp, Mus musculus
  siRNA target sequence for BC027231 (NM_145972.1,1699-1717).
cgccagacactgctaaaga

SEQ ID NO: 758919 - DNA, 19 bp, Mus musculus
  siRNA target sequence for BC027231 (NM_145972.1,1711-1729).
ctaaagaggcagatgacat

SEQ ID NO: 758920 - DNA, 19 bp, Mus musculus
  siRNA target sequence for C330016O10Rik (NM_145974.2,494-512).
gagcggggtcgctttgaca

SEQ ID NO: 758921 - DNA, 19 bp, Mus musculus
  siRNA target sequence for C330016O10Rik (NM_145974.2,593-611).
cacaagggccagaagttgt

SEQ ID NO: 758922 - DNA, 19 bp, Mus musculus
  siRNA target sequence for C330016O10Rik (NM_145974.2,703-721).
cgctctcagcctagatgaa

SEQ ID NO: 758923 - DNA, 19 bp, Mus musculus
  siRNA target sequence for C330016O10Rik (NM_145974.2,807-825).
cctccttgggccacattaa

SEQ ID NO: 758924 - DNA, 19 bp, Mus musculus
  siRNA target sequence for C330016O10Rik (NM_145974.2,808-826).
ctccttgggccacattaat

SEQ ID NO: 758925 - DNA, 19 bp, Mus musculus
  siRNA target sequence for C330016O10Rik (NM_145974.2,908-926).
ccacctcccccctatgagt

SEQ ID NO: 758926 - DNA, 19 bp, Mus musculus
  siRNA target sequence for C330016O10Rik (NM_145974.2,992-1010).
ctcggtgaccaggatgttt

SEQ ID NO: 758927 - DNA, 19 bp, Mus musculus
  siRNA target sequence for C330016O10Rik (NM_145974.2,994-1012).
cggtgaccaggatgtttct

SEQ ID NO: 758928 - DNA, 19 bp, Mus musculus
  siRNA target sequence for C330016O10Rik (NM_145974.2,995-1013).
ggtgaccaggatgtttcta

SEQ ID NO: 758929 - DNA, 19 bp, Mus musculus
  siRNA target sequence for C330016O10Rik (NM_145974.2,996-1014).
gtgaccaggatgtttctaa

SEQ ID NO: 758930 - DNA, 19 bp, Mus musculus
  siRNA target sequence for C330016O10Rik (NM_145974.2,1701-1719).
ggagctacatggacatgta

SEQ ID NO: 758931 - DNA, 19 bp, Mus musculus
  siRNA target sequence for C330016O10Rik (NM_145974.2,1723-1741).
ccgcaaccaggcacttgaa

SEQ ID NO: 758932 - DNA, 19 bp, Mus musculus
  siRNA target sequence for C330016O10Rik (NM_145974.2,1725-1743).
gcaaccaggcacttgaaca

SEQ ID NO: 758933 - DNA, 19 bp, Mus musculus
  siRNA target sequence for 8430408G22Rik (NM_145980.1,189-207).
ccaacgattcgggaaatgt

SEQ ID NO: 758934 - DNA, 19 bp, Mus musculus
  siRNA target sequence for 8430408G22Rik (NM_145980.1,267-285).
gactacgtcaggtgtatct

SEQ ID NO: 758935 - DNA, 19 bp, Mus musculus
  siRNA target sequence for 8430408G22Rik (NM_145980.1,269-287).
ctacgtcaggtgtatctgt

SEQ ID NO: 758936 - DNA, 19 bp, Mus musculus
  siRNA target sequence for 8430408G22Rik (NM_145980.1,521-539).
caacaggactggttcttca

SEQ ID NO: 758937 - DNA, 19 bp, Mus musculus
  siRNA target sequence for 8430408G22Rik (NM_145980.1,524-542).
caggactggttcttcagat

SEQ ID NO: 758938 - DNA, 19 bp, Mus musculus
  siRNA target sequence for 8430408G22Rik (NM_145980.1,642-660).
cagacctccgacctgaaaa

SEQ ID NO: 758939 - DNA, 19 bp, Mus musculus
  siRNA target sequence for MGC27770 (NM_145986.1,595-613).
cgggttcctgtatacatca

SEQ ID NO: 758940 - DNA, 19 bp, Mus musculus
  siRNA target sequence for MGC27770 (NM_145986.1,619-637).
gatgagggtggagtgaaat

SEQ ID NO: 758941 - DNA, 19 bp, Mus musculus
  siRNA target sequence for MGC27770 (NM_145986.1,625-643).
ggtggagtgaaatactttt

SEQ ID NO: 758942 - DNA, 19 bp, Mus musculus
  siRNA target sequence for MGC27770 (NM_145986.1,710-728).
caggaattgggttctacat

SEQ ID NO: 758943 - DNA, 19 bp, Mus musculus
  siRNA target sequence for MGC27770 (NM_145986.1,748-766).
gggactctctcatcaaagt

SEQ ID NO: 758944 - DNA, 19 bp, Mus musculus
  siRNA target sequence for MGC27770 (NM_145986.1,774-792).
ggtcgatggggacaaagta

SEQ ID NO: 758945 - DNA, 19 bp, Mus musculus
  siRNA target sequence for MGC27770 (NM_145986.1,790-808).
gtagctaccggctctttca

SEQ ID NO: 758946 - DNA, 19 bp, Mus musculus
  siRNA target sequence for MGC27770 (NM_145986.1,953-971).
gcaggattggcctcaacta

SEQ ID NO: 758947 - DNA, 19 bp, Mus musculus
  siRNA target sequence for MGC27770 (NM_145986.1,978-996).
cacggtagctcgaaagctt

SEQ ID NO: 758948 - DNA, 19 bp, Mus musculus
  siRNA target sequence for MGC27770 (NM_145986.1,980-998).
cggtagctcgaaagcttat

SEQ ID NO: 758949 - DNA, 19 bp, Mus musculus
  siRNA target sequence for MGC27770 (NM_145986.1,1464-1482).
gcacaatgagggttccaat

SEQ ID NO: 758950 - DNA, 19 bp, Mus musculus
  siRNA target sequence for MGC27770 (NM_145986.1,1474-1492).
ggttccaatgccaacatat

SEQ ID NO: 758951 - DNA, 19 bp, Mus musculus
  siRNA target sequence for MGC27770 (NM_145986.1,1485-1503).
caacatatcaggtaaagga

SEQ ID NO: 758952 - DNA, 19 bp, Mus musculus
  siRNA target sequence for MGC37938 (NM_145987.1,192-210).
cttcgtggcctgtgtcaat

SEQ ID NO: 758953 - DNA, 19 bp, Mus musculus
  siRNA target sequence for MGC37938 (NM_145987.1,698-716).
cggcagtggctctcatcaa

SEQ ID NO: 758954 - DNA, 19 bp, Mus musculus
  siRNA target sequence for MGC37938 (NM_145987.1,701-719).
cagtggctctcatcaacaa

SEQ ID NO: 758955 - DNA, 19 bp, Mus musculus
  siRNA target sequence for MGC37938 (NM_145987.1,779-797).
cactgttggtcatctacat

SEQ ID NO: 758956 - DNA, 19 bp, Mus musculus
  siRNA target sequence for MGC37938 (NM_145987.1,907-925).
gatctcctgagtatctttt

SEQ ID NO: 758957 - DNA, 19 bp, Mus musculus
  siRNA target sequence for MGC37938 (NM_145987.1,956-974).
ccggtattcgcgccttaat

SEQ ID NO: 758958 - DNA, 19 bp, Mus musculus
  siRNA target sequence for MGC37938 (NM_145987.1,959-977).
gtattcgcgccttaatcga

SEQ ID NO: 758959 - DNA, 19 bp, Mus musculus
  siRNA target sequence for MGC37938 (NM_145987.1,1003-1021).
ccccagaggcctacagtaa

SEQ ID NO: 758960 - DNA, 19 bp, Mus musculus
  siRNA target sequence for MGC37938 (NM_145987.1,1005-1023).
ccagaggcctacagtaaca

SEQ ID NO: 758961 - DNA, 19 bp, Mus musculus
  siRNA target sequence for 1700108L22Rik (NM_145988.1,65-83).
ggccaacaccaggtgaatt

SEQ ID NO: 758962 - DNA, 19 bp, Mus musculus
  siRNA target sequence for 1700108L22Rik (NM_145988.1,73-91).
ccaggtgaattggttaaca

SEQ ID NO: 758963 - DNA, 19 bp, Mus musculus
  siRNA target sequence for 1700108L22Rik (NM_145988.1,129-147).
gccacaaattagaaaagaa

SEQ ID NO: 758964 - DNA, 19 bp, Mus musculus
  siRNA target sequence for 1700108L22Rik (NM_145988.1,287-305).
gggtaccactccacttaga

SEQ ID NO: 758965 - DNA, 19 bp, Mus musculus
  siRNA target sequence for 1700108L22Rik (NM_145988.1,288-306).
ggtaccactccacttagat

SEQ ID NO: 758966 - DNA, 19 bp, Mus musculus
  siRNA target sequence for 1700108L22Rik (NM_145988.1,342-360).
ccggaacagctctagatgt

SEQ ID NO: 758967 - DNA, 19 bp, Mus musculus
  siRNA target sequence for 1700108L22Rik (NM_145988.1,345-363).
gaacagctctagatgtcaa

SEQ ID NO: 758968 - DNA, 19 bp, Mus musculus
  siRNA target sequence for 1700108L22Rik (NM_145988.1,705-723).
gtacattaagcgccaaatt

SEQ ID NO: 758969 - DNA, 19 bp, Mus musculus
  siRNA target sequence for 1700108L22Rik (NM_145988.1,861-879).
cttggaggcacttaaggat

SEQ ID NO: 758970 - DNA, 19 bp, Mus musculus
  siRNA target sequence for E130014J05Rik (NM_145989.1,476-494).
gtggtggtcaccctcaata

SEQ ID NO: 758971 - DNA, 19 bp, Mus musculus
  siRNA target sequence for E130014J05Rik (NM_145989.1,478-496).
ggtggtcaccctcaataga

SEQ ID NO: 758972 - DNA, 19 bp, Mus musculus
  siRNA target sequence for E130014J05Rik (NM_145989.1,481-499).
ggtcaccctcaatagagaa

SEQ ID NO: 758973 - DNA, 19 bp, Mus musculus
  siRNA target sequence for E130014J05Rik (NM_145989.1,542-560).
cacgtgctgcctatgtaca

SEQ ID NO: 758974 - DNA, 19 bp, Mus musculus
  siRNA target sequence for E130014J05Rik (NM_145989.1,647-665).
cggaggagaagggtcataa

SEQ ID NO: 758975 - DNA, 19 bp, Mus musculus
  siRNA target sequence for E130014J05Rik (NM_145989.1,652-670).
gagaagggtcataaggata

SEQ ID NO: 758976 - DNA, 19 bp, Mus musculus
  siRNA target sequence for E130014J05Rik (NM_145989.1,818-836).
gcaagccatatgaaacaaa

SEQ ID NO: 758977 - DNA, 19 bp, Mus musculus
  siRNA target sequence for E130014J05Rik (NM_145989.1,819-837).
caagccatatgaaacaaat

SEQ ID NO: 758978 - DNA, 19 bp, Mus musculus
  siRNA target sequence for E130014J05Rik (NM_145989.1,1004-1022).
cagtctgttggttctcatt

SEQ ID NO: 758979 - DNA, 19 bp, Mus musculus
  siRNA target sequence for E130014J05Rik (NM_145989.1,1085-1103).
gcacacacctcagatattt

SEQ ID NO: 758980 - DNA, 19 bp, Mus musculus
  siRNA target sequence for E130014J05Rik (NM_145989.1,1143-1161).
ctcatgcctcgggttcata

SEQ ID NO: 758981 - DNA, 19 bp, Mus musculus
  siRNA target sequence for E130014J05Rik (NM_145989.1,1145-1163).
catgcctcgggttcatatt

SEQ ID NO: 758982 - DNA, 19 bp, Mus musculus
  siRNA target sequence for E130014J05Rik (NM_145989.1,1187-1205).
ccctaccttgggcttttga

SEQ ID NO: 758983 - DNA, 19 bp, Mus musculus
  siRNA target sequence for E130014J05Rik (NM_145989.1,1197-1215).
ggcttttgaatcagaataa

SEQ ID NO: 758984 - DNA, 19 bp, Mus musculus
  siRNA target sequence for E130014J05Rik (NM_145989.1,1204-1222).
gaatcagaataaccaatat

SEQ ID NO: 758985 - DNA, 19 bp, Mus musculus
  siRNA target sequence for E130014J05Rik (NM_145989.1,1216-1234).
ccaatatgcaccttttcca

SEQ ID NO: 758986 - DNA, 19 bp, Mus musculus
  siRNA target sequence for E130014J05Rik (NM_145989.1,1217-1235).
caatatgcaccttttccat

SEQ ID NO: 758987 - DNA, 19 bp, Mus musculus
  siRNA target sequence for E130014J05Rik (NM_145989.1,1247-1265).
gtgccagtggacaatggtt

SEQ ID NO: 758988 - DNA, 19 bp, Mus musculus
  siRNA target sequence for E130014J05Rik (NM_145989.1,1258-1276).
caatggttcccctttctta

SEQ ID NO: 758989 - DNA, 19 bp, Mus musculus
  siRNA target sequence for E130014J05Rik (NM_145989.1,1262-1280).
ggttcccctttcttaggtt

SEQ ID NO: 758990 - DNA, 19 bp, Mus musculus
  siRNA target sequence for E130014J05Rik (NM_145989.1,1300-1318).
gtccagggatctacataga

SEQ ID NO: 758991 - DNA, 19 bp, Mus musculus
  siRNA target sequence for E130014J05Rik (NM_145989.1,1303-1321).
cagggatctacatagatat

SEQ ID NO: 758992 - DNA, 19 bp, Mus musculus
  siRNA target sequence for E130014J05Rik (NM_145989.1,1306-1324).
ggatctacatagatatcca

SEQ ID NO: 758993 - DNA, 19 bp, Mus musculus
  siRNA target sequence for E130014J05Rik (NM_145989.1,1307-1325).
gatctacatagatatccaa

SEQ ID NO: 758994 - DNA, 19 bp, Mus musculus
  siRNA target sequence for E130014J05Rik (NM_145989.1,1388-1406).
ggggacagtccctctaagt

SEQ ID NO: 758995 - DNA, 19 bp, Mus musculus
  siRNA target sequence for E130014J05Rik (NM_145989.1,1389-1407).
gggacagtccctctaagta

SEQ ID NO: 758996 - DNA, 19 bp, Mus musculus
  siRNA target sequence for E130014J05Rik (NM_145989.1,1391-1409).
gacagtccctctaagtact

SEQ ID NO: 758997 - DNA, 19 bp, Mus musculus
  siRNA target sequence for E130014J05Rik (NM_145989.1,1393-1411).
cagtccctctaagtactta

SEQ ID NO: 758998 - DNA, 19 bp, Mus musculus
  siRNA target sequence for E130014J05Rik (NM_145989.1,1397-1415).
ccctctaagtacttaagtt

SEQ ID NO: 758999 - DNA, 19 bp, Mus musculus
  siRNA target sequence for E130014J05Rik (NM_145989.1,1398-1416).
cctctaagtacttaagtta

SEQ ID NO: 759000 - DNA, 19 bp, Mus musculus
  siRNA target sequence for E130014J05Rik (NM_145989.1,1413-1431).
gttatggaaaccaaaatat

SEQ ID NO: 759001 - DNA, 19 bp, Mus musculus
  siRNA target sequence for E130014J05Rik (NM_145989.1,1433-1451).
cagagagatgccttcacta

SEQ ID NO: 759002 - DNA, 19 bp, Mus musculus
  siRNA target sequence for E130014J05Rik (NM_145989.1,1439-1457).
gatgccttcactactaact

SEQ ID NO: 759003 - DNA, 19 bp, Mus musculus
  siRNA target sequence for E130014J05Rik (NM_145989.1,1456-1474).
ctccaccctaaaaccaaat

SEQ ID NO: 759004 - DNA, 19 bp, Mus musculus
  siRNA target sequence for E130014J05Rik (NM_145989.1,1461-1479).
ccctaaaaccaaatgtaca

SEQ ID NO: 759005 - DNA, 19 bp, Mus musculus
  siRNA target sequence for E130014J05Rik (NM_145989.1,1509-1527).
cccccaagatggatagtca

SEQ ID NO: 759006 - DNA, 19 bp, Mus musculus
  siRNA target sequence for E130014J05Rik (NM_145989.1,1511-1529).
cccaagatggatagtcatt

SEQ ID NO: 759007 - DNA, 19 bp, Mus musculus
  siRNA target sequence for E130014J05Rik (NM_145989.1,1512-1530).
ccaagatggatagtcattt

SEQ ID NO: 759008 - DNA, 19 bp, Mus musculus
  siRNA target sequence for E130014J05Rik (NM_145989.1,1564-1582).
cccacacactgactacaaa

SEQ ID NO: 759009 - DNA, 19 bp, Mus musculus
  siRNA target sequence for E130014J05Rik (NM_145989.1,1653-1671).
gccacgccttccacaacaa

SEQ ID NO: 759010 - DNA, 19 bp, Mus musculus
  siRNA target sequence for E130014J05Rik (NM_145989.1,1717-1735).
gtttaatcatgatagaact

SEQ ID NO: 759011 - DNA, 19 bp, Mus musculus
  siRNA target sequence for E130014J05Rik (NM_145989.1,1736-1754).
gcttctgcccaagaactat

SEQ ID NO: 759012 - DNA, 19 bp, Mus musculus
  siRNA target sequence for E130014J05Rik (NM_145989.1,1740-1758).
ctgcccaagaactattata

SEQ ID NO: 759013 - DNA, 19 bp, Mus musculus
  siRNA target sequence for E130014J05Rik (NM_145989.1,1818-1836).
ctgtgcaggaaattgagta

SEQ ID NO: 759014 - DNA, 19 bp, Mus musculus
  siRNA target sequence for E130014J05Rik (NM_145989.1,1820-1838).
gtgcaggaaattgagtatt

SEQ ID NO: 759015 - DNA, 19 bp, Mus musculus
  siRNA target sequence for E130014J05Rik (NM_145989.1,1896-1914).
caactcatgggtcaattct

SEQ ID NO: 759016 - DNA, 19 bp, Mus musculus
  siRNA target sequence for E130014J05Rik (NM_145989.1,1899-1917).
ctcatgggtcaattcttat

SEQ ID NO: 759017 - DNA, 19 bp, Mus musculus
  siRNA target sequence for E130014J05Rik (NM_145989.1,1904-1922).
gggtcaattcttattgagt

SEQ ID NO: 759018 - DNA, 19 bp, Mus musculus
  siRNA target sequence for E130014J05Rik (NM_145989.1,2000-2018).
ctgtataggcataagaatt

SEQ ID NO: 759019 - DNA, 19 bp, Mus musculus
  siRNA target sequence for E130014J05Rik (NM_145989.1,2083-2101).
ggaagagtgcggaaagaat

SEQ ID NO: 759020 - DNA, 19 bp, Mus musculus
  siRNA target sequence for E130014J05Rik (NM_145989.1,2087-2105).
gagtgcggaaagaatggat

SEQ ID NO: 759021 - DNA, 19 bp, Mus musculus
  siRNA target sequence for E130014J05Rik (NM_145989.1,2110-2128).
ccacgtgtctcagaaaaat

SEQ ID NO: 759022 - DNA, 19 bp, Mus musculus
  siRNA target sequence for E130014J05Rik (NM_145989.1,2172-2190).
ccagttacctgcgtttcat

SEQ ID NO: 759023 - DNA, 19 bp, Mus musculus
  siRNA target sequence for E130014J05Rik (NM_145989.1,2228-2246).
gattctaccgtgactacat

SEQ ID NO: 759024 - DNA, 19 bp, Mus musculus
  siRNA target sequence for E130014J05Rik (NM_145989.1,2239-2257).
gactacatcaccatatgct

SEQ ID NO: 759025 - DNA, 19 bp, Mus musculus
  siRNA target sequence for E130014J05Rik (NM_145989.1,2271-2289).
cagggccttacaacacatt

SEQ ID NO: 759026 - DNA, 19 bp, Mus musculus
  siRNA target sequence for E130014J05Rik (NM_145989.1,2274-2292).
ggccttacaacacatttgt

SEQ ID NO: 759027 - DNA, 19 bp, Mus musculus
  siRNA target sequence for BC027756 (NM_145991.1,77-95).
gcgtcctgcgacagtacaa

SEQ ID NO: 759028 - DNA, 19 bp, Mus musculus
  siRNA target sequence for BC027756 (NM_145991.1,147-165).
gttctcctggcccaagaat

SEQ ID NO: 759029 - DNA, 19 bp, Mus musculus
  siRNA target sequence for BC027756 (NM_145991.1,162-180).
gaatgtgaagaccaactat

SEQ ID NO: 759030 - DNA, 19 bp, Mus musculus
  siRNA target sequence for BC027756 (NM_145991.1,168-186).
gaagaccaactatgtagtt

SEQ ID NO: 759031 - DNA, 19 bp, Mus musculus
  siRNA target sequence for BC027756 (NM_145991.1,206-224).
gccaacccagagagtacta

SEQ ID NO: 759032 - DNA, 19 bp, Mus musculus
  siRNA target sequence for BC027756 (NM_145991.1,217-235).
gagtactacacattggatt

SEQ ID NO: 759033 - DNA, 19 bp, Mus musculus
  siRNA target sequence for BC027756 (NM_145991.1,285-303).
ccggcgtgcagctactgaa

SEQ ID NO: 759034 - DNA, 19 bp, Mus musculus
  siRNA target sequence for BC027756 (NM_145991.1,286-304).
cggcgtgcagctactgaaa

SEQ ID NO: 759035 - DNA, 19 bp, Mus musculus
  siRNA target sequence for BC027756 (NM_145991.1,287-305).
ggcgtgcagctactgaaaa

SEQ ID NO: 759036 - DNA, 19 bp, Mus musculus
  siRNA target sequence for BC027756 (NM_145991.1,288-306).
gcgtgcagctactgaaaat

SEQ ID NO: 759037 - DNA, 19 bp, Mus musculus
  siRNA target sequence for BC027756 (NM_145991.1,289-307).
cgtgcagctactgaaaata

SEQ ID NO: 759038 - DNA, 19 bp, Mus musculus
  siRNA target sequence for BC027756 (NM_145991.1,320-338).
gaagacccgaccgaaaaga

SEQ ID NO: 759039 - DNA, 19 bp, Mus musculus
  siRNA target sequence for BC027756 (NM_145991.1,323-341).
gacccgaccgaaaagatct

SEQ ID NO: 759040 - DNA, 19 bp, Mus musculus
  siRNA target sequence for BC027756 (NM_145991.1,326-344).
ccgaccgaaaagatctact

SEQ ID NO: 759041 - DNA, 19 bp, Mus musculus
  siRNA target sequence for BC027756 (NM_145991.1,327-345).
cgaccgaaaagatctactt

SEQ ID NO: 759042 - DNA, 19 bp, Mus musculus
  siRNA target sequence for BC027756 (NM_145991.1,337-355).
gatctacttggatatctca

SEQ ID NO: 759043 - DNA, 19 bp, Mus musculus
  siRNA target sequence for BC027756 (NM_145991.1,389-407).
ggagtgcccccttggaaat

SEQ ID NO: 759044 - DNA, 19 bp, Mus musculus
  siRNA target sequence for BC027756 (NM_145991.1,390-408).
gagtgcccccttggaaata

SEQ ID NO: 759045 - DNA, 19 bp, Mus musculus
  siRNA target sequence for BC027756 (NM_145991.1,417-435).
gcggtctactcaagtcaaa

SEQ ID NO: 759046 - DNA, 19 bp, Mus musculus
  siRNA target sequence for BC027756 (NM_145991.1,418-436).
cggtctactcaagtcaaaa

SEQ ID NO: 759047 - DNA, 19 bp, Mus musculus
  siRNA target sequence for BC027756 (NM_145991.1,492-510).
gtgtgtgcgccttgataaa

SEQ ID NO: 759048 - DNA, 19 bp, Mus musculus
  siRNA target sequence for BC027756 (NM_145991.1,494-512).
gtgtgcgccttgataaaga

SEQ ID NO: 759049 - DNA, 19 bp, Mus musculus
  siRNA target sequence for BC027756 (NM_145991.1,496-514).
gtgcgccttgataaagaga

SEQ ID NO: 759050 - DNA, 19 bp, Mus musculus
  siRNA target sequence for BC027756 (NM_145991.1,556-574).
cagactgagcagattaggt

SEQ ID NO: 759051 - DNA, 19 bp, Mus musculus
  siRNA target sequence for BC027756 (NM_145991.1,562-580).
gagcagattaggtctttgt

SEQ ID NO: 759052 - DNA, 19 bp, Mus musculus
  siRNA target sequence for BC027756 (NM_145991.1,630-648).
ggctaagaaaagatctact

SEQ ID NO: 759053 - DNA, 19 bp, Mus musculus
  siRNA target sequence for BC027756 (NM_145991.1,658-676).
gatctagatgatgatataa

SEQ ID NO: 759054 - DNA, 19 bp, Mus musculus
  siRNA target sequence for BC027756 (NM_145991.1,681-699).
ccttaaacagaggagtttt

SEQ ID NO: 759055 - DNA, 19 bp, Mus musculus
  siRNA target sequence for BC027756 (NM_145991.1,752-770).
ggaggacaagaacaactat

SEQ ID NO: 759056 - DNA, 19 bp, Mus musculus
  siRNA target sequence for BC027756 (NM_145991.1,811-829).
gcaattcttcaatctgtaa

SEQ ID NO: 759057 - DNA, 19 bp, Mus musculus
  siRNA target sequence for BC027756 (NM_145991.1,893-911).
ctacattgcgtacaaaaca

SEQ ID NO: 759058 - DNA, 19 bp, Mus musculus
  siRNA target sequence for BC027756 (NM_145991.1,923-941).
ctgcttacaacagatatga

SEQ ID NO: 759059 - DNA, 19 bp, Mus musculus
  siRNA target sequence for BC027756 (NM_145991.1,973-991).
gaaggctttaagatcgata

SEQ ID NO: 759060 - DNA, 19 bp, Mus musculus
  siRNA target sequence for BC027756 (NM_145991.1,976-994).
ggctttaagatcgatacta

SEQ ID NO: 759061 - DNA, 19 bp, Mus musculus
  siRNA target sequence for BC027756 (NM_145991.1,977-995).
gctttaagatcgatactat

SEQ ID NO: 759062 - DNA, 19 bp, Mus musculus
  siRNA target sequence for BC027756 (NM_145991.1,1005-1023).
ccatggcatgacactgaaa

SEQ ID NO: 759063 - DNA, 19 bp, Mus musculus
  siRNA target sequence for BC027756 (NM_145991.1,1127-1145).
ggtcacggacacccattat

SEQ ID NO: 759064 - DNA, 19 bp, Mus musculus
  siRNA target sequence for BC027756 (NM_145991.1,1128-1146).
gtcacggacacccattatt

SEQ ID NO: 759065 - DNA, 19 bp, Mus musculus
  siRNA target sequence for BC027756 (NM_145991.1,1130-1148).
cacggacacccattattat

SEQ ID NO: 759066 - DNA, 19 bp, Mus musculus
  siRNA target sequence for BC027756 (NM_145991.1,1132-1150).
cggacacccattattatta

SEQ ID NO: 759067 - DNA, 19 bp, Mus musculus
  siRNA target sequence for BC027756 (NM_145991.1,1163-1181).
ccacttctttaataactat

SEQ ID NO: 759068 - DNA, 19 bp, Mus musculus
  siRNA target sequence for BC027756 (NM_145991.1,1197-1215).
ccttctacaggatctgaaa

SEQ ID NO: 759069 - DNA, 19 bp, Mus musculus
  siRNA target sequence for BC027756 (NM_145991.1,1212-1230).
gaaatttgtcccatcagat

SEQ ID NO: 759070 - DNA, 19 bp, Mus musculus
  siRNA target sequence for BC027756 (NM_145991.1,1236-1254).
gaagaaacagggttgtcaa

SEQ ID NO: 759071 - DNA, 19 bp, Mus musculus
  siRNA target sequence for BC027756 (NM_145991.1,1245-1263).
gggttgtcaacgagaaaat

SEQ ID NO: 759072 - DNA, 19 bp, Mus musculus
  siRNA target sequence for BC027756 (NM_145991.1,1247-1265).
gttgtcaacgagaaaatga

SEQ ID NO: 759073 - DNA, 19 bp, Mus musculus
  siRNA target sequence for BC027756 (NM_145991.1,1255-1273).
cgagaaaatgaaacactaa

SEQ ID NO: 759074 - DNA, 19 bp, Mus musculus
  siRNA target sequence for BC027756 (NM_145991.1,1300-1318).
ccagggggcacagcaatta

SEQ ID NO: 759075 - DNA, 19 bp, Mus musculus
  siRNA target sequence for BC027756 (NM_145991.1,1304-1322).
ggggcacagcaattagtgt

SEQ ID NO: 759076 - DNA, 19 bp, Mus musculus
  siRNA target sequence for BC027756 (NM_145991.1,1405-1423).
ggtcctgcttggcaattca

SEQ ID NO: 759077 - DNA, 19 bp, Mus musculus
  siRNA target sequence for BC027756 (NM_145991.1,1450-1468).
ggatcaccagttgacatat

SEQ ID NO: 759078 - DNA, 19 bp, Mus musculus
  siRNA target sequence for BC027756 (NM_145991.1,1451-1469).
gatcaccagttgacatatt

SEQ ID NO: 759079 - DNA, 19 bp, Mus musculus
  siRNA target sequence for BC027756 (NM_145991.1,1462-1480).
gacatatttgcgaaaatta

SEQ ID NO: 759080 - DNA, 19 bp, Mus musculus
  siRNA target sequence for BC027756 (NM_145991.1,1464-1482).
catatttgcgaaaattaaa

SEQ ID NO: 759081 - DNA, 19 bp, Mus musculus
  siRNA target sequence for BC027756 (NM_145991.1,1485-1503).
cttccatctcaagtatgat

SEQ ID NO: 759082 - DNA, 19 bp, Mus musculus
  siRNA target sequence for BC027756 (NM_145991.1,1511-1529).
gtctagatccaaatgttca

SEQ ID NO: 759083 - DNA, 19 bp, Mus musculus
  siRNA target sequence for BC027756 (NM_145991.1,1533-1551).
gtgggatgtaacagtatta

SEQ ID NO: 759084 - DNA, 19 bp, Mus musculus
  siRNA target sequence for BC027756 (NM_145991.1,1535-1553).
gggatgtaacagtattaga

SEQ ID NO: 759085 - DNA, 19 bp, Mus musculus
  siRNA target sequence for BC027756 (NM_145991.1,1564-1582).
cataaacgtcacttggata

SEQ ID NO: 759086 - DNA, 19 bp, Mus musculus
  siRNA target sequence for BC027756 (NM_145991.1,1619-1637).
gatacatggtaaagcataa

SEQ ID NO: 759087 - DNA, 19 bp, Mus musculus
  siRNA target sequence for BC027092 (NM_145992.1,105-123).
ctcttgtgctagtctctaa

SEQ ID NO: 759088 - DNA, 19 bp, Mus musculus
  siRNA target sequence for BC027092 (NM_145992.1,110-128).
gtgctagtctctaaacttt

SEQ ID NO: 759089 - DNA, 19 bp, Mus musculus
  siRNA target sequence for BC027092 (NM_145992.1,608-626).
cctgctcccggtgtctatt

SEQ ID NO: 759090 - DNA, 19 bp, Mus musculus
  siRNA target sequence for BC027092 (NM_145992.1,609-627).
ctgctcccggtgtctattt

SEQ ID NO: 759091 - DNA, 19 bp, Mus musculus
  siRNA target sequence for BC027092 (NM_145992.1,639-657).
cattctgctgtcaacatca

SEQ ID NO: 759092 - DNA, 19 bp, Mus musculus
  siRNA target sequence for BC027092 (NM_145992.1,659-677).
ccagagcccttaattgtga

SEQ ID NO: 759093 - DNA, 19 bp, Mus musculus
  siRNA target sequence for BC027092 (NM_145992.1,664-682).
gcccttaattgtgacaaat

SEQ ID NO: 759094 - DNA, 19 bp, Mus musculus
  siRNA target sequence for BC027092 (NM_145992.1,665-683).
cccttaattgtgacaaata

SEQ ID NO: 759095 - DNA, 19 bp, Mus musculus
  siRNA target sequence for 2700050L05Rik (NM_145995.1,306-324).
gttcttggcaacataaaat

SEQ ID NO: 759096 - DNA, 19 bp, Mus musculus
  siRNA target sequence for 2700050L05Rik (NM_145995.1,348-366).
catcaaaggcctactacat

SEQ ID NO: 759097 - DNA, 19 bp, Mus musculus
  siRNA target sequence for 2700050L05Rik (NM_145995.1,355-373).
ggcctactacattttgtca

SEQ ID NO: 759098 - DNA, 19 bp, Mus musculus
  siRNA target sequence for 2700050L05Rik (NM_145995.1,397-415).
gtatggaagagcattgaga

SEQ ID NO: 759099 - DNA, 19 bp, Mus musculus
  siRNA target sequence for 2700050L05Rik (NM_145995.1,408-426).
cattgagatacattaagct

SEQ ID NO: 759100 - DNA, 19 bp, Mus musculus
  siRNA target sequence for 2700050L05Rik (NM_145995.1,431-449).
ctacagagccatgatactt

SEQ ID NO: 759101 - DNA, 19 bp, Mus musculus
  siRNA target sequence for 2700050L05Rik (NM_145995.1,434-452).
cagagccatgatacttact

SEQ ID NO: 759102 - DNA, 19 bp, Mus musculus
  siRNA target sequence for 2700050L05Rik (NM_145995.1,650-668).
gcatgggcaacagatctat

SEQ ID NO: 759103 - DNA, 19 bp, Mus musculus
  siRNA target sequence for 2700050L05Rik (NM_145995.1,655-673).
ggcaacagatctatctaca

SEQ ID NO: 759104 - DNA, 19 bp, Mus musculus
  siRNA target sequence for 2700050L05Rik (NM_145995.1,669-687).
ctacagacttagaaagtca

SEQ ID NO: 759105 - DNA, 19 bp, Mus musculus
  siRNA target sequence for 2700050L05Rik (NM_145995.1,680-698).
gaaagtcaactctcagtta

SEQ ID NO: 759106 - DNA, 19 bp, Mus musculus
  siRNA target sequence for 2700050L05Rik (NM_145995.1,720-738).
ctaatgaaatcttgcaatt

SEQ ID NO: 759107 - DNA, 19 bp, Mus musculus
  siRNA target sequence for 2700050L05Rik (NM_145995.1,742-760).
cgacttaaaaagtcagaat

SEQ ID NO: 759108 - DNA, 19 bp, Mus musculus
  siRNA target sequence for 2700050L05Rik (NM_145995.1,753-771).
gtcagaatccagaacacta

SEQ ID NO: 759109 - DNA, 19 bp, Mus musculus
  siRNA target sequence for 2700050L05Rik (NM_145995.1,757-775).
gaatccagaacactatgta

SEQ ID NO: 759110 - DNA, 19 bp, Mus musculus
  siRNA target sequence for 2700050L05Rik (NM_145995.1,804-822).
gaaatgaaatcggtgtatt

SEQ ID NO: 759111 - DNA, 19 bp, Mus musculus
  siRNA target sequence for 2700050L05Rik (NM_145995.1,809-827).
gaaatcggtgtattctaca

SEQ ID NO: 759112 - DNA, 19 bp, Mus musculus
  siRNA target sequence for 2700050L05Rik (NM_145995.1,814-832).
cggtgtattctacatgaat

SEQ ID NO: 759113 - DNA, 19 bp, Mus musculus
  siRNA target sequence for 2700050L05Rik (NM_145995.1,854-872).
gagcgagtagtgagcaaat

SEQ ID NO: 759114 - DNA, 19 bp, Mus musculus
  siRNA target sequence for 2700050L05Rik (NM_145995.1,856-874).
gcgagtagtgagcaaatct

SEQ ID NO: 759115 - DNA, 19 bp, Mus musculus
  siRNA target sequence for 2700050L05Rik (NM_145995.1,858-876).
gagtagtgagcaaatctgt

SEQ ID NO: 759116 - DNA, 19 bp, Mus musculus
  siRNA target sequence for 2700050L05Rik (NM_145995.1,898-916).
gtggaaaaaaagcttttct

SEQ ID NO: 759117 - DNA, 19 bp, Mus musculus
  siRNA target sequence for 2700050L05Rik (NM_145995.1,937-955).
caactttgagtcgattgat

SEQ ID NO: 759118 - DNA, 19 bp, Mus musculus
  siRNA target sequence for 2700050L05Rik (NM_145995.1,940-958).
ctttgagtcgattgatgat

SEQ ID NO: 759119 - DNA, 19 bp, Mus musculus
  siRNA target sequence for 2700050L05Rik (NM_145995.1,949-967).
gattgatgatgctacaaat

SEQ ID NO: 759120 - DNA, 19 bp, Mus musculus
  siRNA target sequence for 2700050L05Rik (NM_145995.1,1062-1080).
cagaggagggcttgtatta

SEQ ID NO: 759121 - DNA, 19 bp, Mus musculus
  siRNA target sequence for 2700050L05Rik (NM_145995.1,1083-1101).
gcaaggccgttgattacta

SEQ ID NO: 759122 - DNA, 19 bp, Mus musculus
  siRNA target sequence for 2700050L05Rik (NM_145995.1,1088-1106).
gccgttgattactatttga

SEQ ID NO: 759123 - DNA, 19 bp, Mus musculus
  siRNA target sequence for 2700050L05Rik (NM_145995.1,1131-1149).
gagacatgcacccaattgt

SEQ ID NO: 759124 - DNA, 19 bp, Mus musculus
  siRNA target sequence for 2700050L05Rik (NM_145995.1,1133-1151).
gacatgcacccaattgttt

SEQ ID NO: 759125 - DNA, 19 bp, Mus musculus
  siRNA target sequence for 2700050L05Rik (NM_145995.1,1167-1185).
gggaattgtccactacata

SEQ ID NO: 759126 - DNA, 19 bp, Mus musculus
  siRNA target sequence for 2700050L05Rik (NM_145995.1,1169-1187).
gaattgtccactacatact

SEQ ID NO: 759127 - DNA, 19 bp, Mus musculus
  siRNA target sequence for 2700050L05Rik (NM_145995.1,1196-1214).
gcgactctgcagcaagatt

SEQ ID NO: 759128 - DNA, 19 bp, Mus musculus
  siRNA target sequence for 2700050L05Rik (NM_145995.1,1197-1215).
cgactctgcagcaagatta

SEQ ID NO: 759129 - DNA, 19 bp, Mus musculus
  siRNA target sequence for 2700050L05Rik (NM_145995.1,1198-1216).
gactctgcagcaagattat

SEQ ID NO: 759130 - DNA, 19 bp, Mus musculus
  siRNA target sequence for 2700050L05Rik (NM_145995.1,1208-1226).
caagattatgctccattat

SEQ ID NO: 759131 - DNA, 19 bp, Mus musculus
  siRNA target sequence for 2700050L05Rik (NM_145995.1,1401-1419).
gtgatgagcatcttaggaa

SEQ ID NO: 759132 - DNA, 19 bp, Mus musculus
  siRNA target sequence for 2700050L05Rik (NM_145995.1,1491-1509).
cctgtgaactgcttagagt

SEQ ID NO: 759133 - DNA, 19 bp, Mus musculus
  siRNA target sequence for 2700050L05Rik (NM_145995.1,1587-1605).
ctggggcacttgatatcat

SEQ ID NO: 759134 - DNA, 19 bp, Mus musculus
  siRNA target sequence for 2700050L05Rik (NM_145995.1,1695-1713).
ctgattcttcacctaatct

SEQ ID NO: 759135 - DNA, 19 bp, Mus musculus
  siRNA target sequence for 2700050L05Rik (NM_145995.1,1727-1745).
gtgatcaaactccttagta

SEQ ID NO: 759136 - DNA, 19 bp, Mus musculus
  siRNA target sequence for 2700050L05Rik (NM_145995.1,1729-1747).
gatcaaactccttagtata

SEQ ID NO: 759137 - DNA, 19 bp, Mus musculus
  siRNA target sequence for 2700050L05Rik (NM_145995.1,1732-1750).
caaactccttagtatattt

SEQ ID NO: 759138 - DNA, 19 bp, Mus musculus
  siRNA target sequence for 2700050L05Rik (NM_145995.1,1790-1808).
ctgatgtcgtcatctaaaa

SEQ ID NO: 759139 - DNA, 19 bp, Mus musculus
  siRNA target sequence for 2700050L05Rik (NM_145995.1,1795-1813).
gtcgtcatctaaaaggaaa

SEQ ID NO: 759140 - DNA, 19 bp, Mus musculus
  siRNA target sequence for 2700050L05Rik (NM_145995.1,1816-1834).
gagcagtaacgctgaagaa

SEQ ID NO: 759141 - DNA, 19 bp, Mus musculus
  siRNA target sequence for 2700050L05Rik (NM_145995.1,1883-1901).
gcgactgccaacagaaact

SEQ ID NO: 759142 - DNA, 19 bp, Mus musculus
  siRNA target sequence for D430024K22Rik (NM_145996.2,223-241).
ggaagaacgtgtatgatga

SEQ ID NO: 759143 - DNA, 19 bp, Mus musculus
  siRNA target sequence for D430024K22Rik (NM_145996.2,227-245).
gaacgtgtatgatgaactt

SEQ ID NO: 759144 - DNA, 19 bp, Mus musculus
  siRNA target sequence for D430024K22Rik (NM_145996.2,313-331).
catatgtgcggcatctgaa

SEQ ID NO: 759145 - DNA, 19 bp, Mus musculus
  siRNA target sequence for D430024K22Rik (NM_145996.2,667-685).
cactggccaaaaagaaact

SEQ ID NO: 759146 - DNA, 19 bp, Mus musculus
  siRNA target sequence for D430024K22Rik (NM_145996.2,891-909).
cctacagcccccatgttct

SEQ ID NO: 759147 - DNA, 19 bp, Mus musculus
  siRNA target sequence for D430024K22Rik (NM_145996.2,971-989).
cttcttctccggccttaaa

SEQ ID NO: 759148 - DNA, 19 bp, Mus musculus
  siRNA target sequence for D430024K22Rik (NM_145996.2,1026-1044).
ggtccgacaaccaaagagt

SEQ ID NO: 759149 - DNA, 19 bp, Mus musculus
  siRNA target sequence for D430024K22Rik (NM_145996.2,1247-1265).
cgctcatggtggcaagaaa

SEQ ID NO: 759150 - DNA, 19 bp, Mus musculus
  siRNA target sequence for D430024K22Rik (NM_145996.2,1249-1267).
ctcatggtggcaagaaact

SEQ ID NO: 759151 - DNA, 19 bp, Mus musculus
  siRNA target sequence for D430024K22Rik (NM_145996.2,1407-1425).
ctgcggtgtcctctaaact

SEQ ID NO: 759152 - DNA, 19 bp, Mus musculus
  siRNA target sequence for D430024K22Rik (NM_145996.2,1410-1428).
cggtgtcctctaaacttca

SEQ ID NO: 759153 - DNA, 19 bp, Mus musculus
  siRNA target sequence for D430024K22Rik (NM_145996.2,1622-1640).
gccacccgtcacaacctat

SEQ ID NO: 759154 - DNA, 19 bp, Mus musculus
  siRNA target sequence for D030060M11Rik (NM_146000.1,161-179).
gggaatgcggattgttgat

SEQ ID NO: 759155 - DNA, 19 bp, Mus musculus
  siRNA target sequence for D030060M11Rik (NM_146000.1,163-181).
gaatgcggattgttgatga

SEQ ID NO: 759156 - DNA, 19 bp, Mus musculus
  siRNA target sequence for D030060M11Rik (NM_146000.1,366-384).
cacgatgaccaagattcat

SEQ ID NO: 759157 - DNA, 19 bp, Mus musculus
  siRNA target sequence for D030060M11Rik (NM_146000.1,707-725).
gagagtccgccatgactta

SEQ ID NO: 759158 - DNA, 19 bp, Mus musculus
  siRNA target sequence for D030060M11Rik (NM_146000.1,709-727).
gagtccgccatgacttaga

SEQ ID NO: 759159 - DNA, 19 bp, Mus musculus
  siRNA target sequence for D030060M11Rik (NM_146000.1,739-757).
ccaggaagtctcatcgtaa

SEQ ID NO: 759160 - DNA, 19 bp, Mus musculus
  siRNA target sequence for D030060M11Rik (NM_146000.1,740-758).
caggaagtctcatcgtaat

SEQ ID NO: 759161 - DNA, 19 bp, Mus musculus
  siRNA target sequence for D030060M11Rik (NM_146000.1,743-761).
gaagtctcatcgtaattct

SEQ ID NO: 759162 - DNA, 19 bp, Mus musculus
  siRNA target sequence for D030060M11Rik (NM_146000.1,746-764).
gtctcatcgtaattcttca

SEQ ID NO: 759163 - DNA, 19 bp, Mus musculus
  siRNA target sequence for D030060M11Rik (NM_146000.1,814-832).
cgagacagacccataacca

SEQ ID NO: 759164 - DNA, 19 bp, Mus musculus
  siRNA target sequence for D030060M11Rik (NM_146000.1,1057-1075).
cacggaaacggcaagcaaa

SEQ ID NO: 759165 - DNA, 19 bp, Mus musculus
  siRNA target sequence for D030060M11Rik (NM_146000.1,1171-1189).
cggggcaccaggattctga

SEQ ID NO: 759166 - DNA, 19 bp, Mus musculus
  siRNA target sequence for D030060M11Rik (NM_146000.1,1340-1358).
catgtattccggagcaaaa

SEQ ID NO: 759167 - DNA, 19 bp, Mus musculus
  siRNA target sequence for D030060M11Rik (NM_146000.1,1343-1361).
gtattccggagcaaaaact

SEQ ID NO: 759168 - DNA, 19 bp, Mus musculus
  siRNA target sequence for D030060M11Rik (NM_146000.1,1474-1492).
ctggtcggaagaggaattt

SEQ ID NO: 759169 - DNA, 19 bp, Mus musculus
  siRNA target sequence for D030060M11Rik (NM_146000.1,1537-1555).
cagagcgagatgagctata

SEQ ID NO: 759170 - DNA, 19 bp, Mus musculus
  siRNA target sequence for D030060M11Rik (NM_146000.1,1643-1661).
ccgctacatagatgatgaa

SEQ ID NO: 759171 - DNA, 19 bp, Mus musculus
  siRNA target sequence for D030060M11Rik (NM_146000.1,1700-1718).
ggacccgatggccaacttt

SEQ ID NO: 759172 - DNA, 19 bp, Mus musculus
  siRNA target sequence for D030060M11Rik (NM_146000.1,1701-1719).
gacccgatggccaacttta

SEQ ID NO: 759173 - DNA, 19 bp, Mus musculus
  siRNA target sequence for D030060M11Rik (NM_146000.1,1703-1721).
cccgatggccaactttatt

SEQ ID NO: 759174 - DNA, 19 bp, Mus musculus
  siRNA target sequence for D030060M11Rik (NM_146000.1,1704-1722).
ccgatggccaactttatta

SEQ ID NO: 759175 - DNA, 19 bp, Mus musculus
  siRNA target sequence for D030060M11Rik (NM_146000.1,1782-1800).
gctcctcctcccaatagat

SEQ ID NO: 759176 - DNA, 19 bp, Mus musculus
  siRNA target sequence for D030060M11Rik (NM_146000.1,1788-1806).
cctcccaatagattcaaca

SEQ ID NO: 759177 - DNA, 19 bp, Mus musculus
  siRNA target sequence for D030060M11Rik (NM_146000.1,1789-1807).
ctcccaatagattcaacat

SEQ ID NO: 759178 - DNA, 19 bp, Mus musculus
  siRNA target sequence for D030060M11Rik (NM_146000.1,1791-1809).
cccaatagattcaacattt

SEQ ID NO: 759179 - DNA, 19 bp, Mus musculus
  siRNA target sequence for 0610011L13Rik (NM_146002.1,80-98).
gtgccctccgccacattct

SEQ ID NO: 759180 - DNA, 19 bp, Mus musculus
  siRNA target sequence for 0610011L13Rik (NM_146002.1,83-101).
ccctccgccacattcttca

SEQ ID NO: 759181 - DNA, 19 bp, Mus musculus
  siRNA target sequence for 0610011L13Rik (NM_146002.1,194-212).
ctgcgcaactggcaagttt

SEQ ID NO: 759182 - DNA, 19 bp, Mus musculus
  siRNA target sequence for 0610011L13Rik (NM_146002.1,260-278).
ctctgtggcgccatcatca

SEQ ID NO: 759183 - DNA, 19 bp, Mus musculus
  siRNA target sequence for 0610011L13Rik (NM_146002.1,315-333).
gcaccgtccgccattgctt

SEQ ID NO: 759184 - DNA, 19 bp, Mus musculus
  siRNA target sequence for 0610011L13Rik (NM_146002.1,320-338).
gtccgccattgcttcttca

SEQ ID NO: 759185 - DNA, 19 bp, Mus musculus
  siRNA target sequence for 0610011L13Rik (NM_146002.1,432-450).
ggttcaccccagtagcttt

SEQ ID NO: 759186 - DNA, 19 bp, Mus musculus
  siRNA target sequence for 0610011L13Rik (NM_146002.1,589-607).
cgtctctggccttttgatt

SEQ ID NO: 759187 - DNA, 19 bp, Mus musculus
  siRNA target sequence for 0610011L13Rik (NM_146002.1,702-720).
ggaggattcccttgttcaa

SEQ ID NO: 759188 - DNA, 19 bp, Mus musculus
  siRNA target sequence for 0610011L13Rik (NM_146002.1,705-723).
ggattcccttgttcaagta

SEQ ID NO: 759189 - DNA, 19 bp, Mus musculus
  siRNA target sequence for 0610011L13Rik (NM_146002.1,731-749).
ggttcttctgccgaaagaa

SEQ ID NO: 759190 - DNA, 19 bp, Mus musculus
  siRNA target sequence for BC024997 (NM_146004.1,347-365).
gccaaacgctaccagaaaa

SEQ ID NO: 759191 - DNA, 19 bp, Mus musculus
  siRNA target sequence for BC024997 (NM_146004.1,430-448).
cccaccggtggacagaaat

SEQ ID NO: 759192 - DNA, 19 bp, Mus musculus
  siRNA target sequence for BC024997 (NM_146004.1,432-450).
caccggtggacagaaatct

SEQ ID NO: 759193 - DNA, 19 bp, Mus musculus
  siRNA target sequence for BC024997 (NM_146004.1,500-518).
ccgctgggggtcacacaaa

SEQ ID NO: 759194 - DNA, 19 bp, Mus musculus
  siRNA target sequence for BC024997 (NM_146004.1,502-520).
gctgggggtcacacaaact

SEQ ID NO: 759195 - DNA, 19 bp, Mus musculus
  siRNA target sequence for BC024997 (NM_146004.1,611-629).
ggatctgaaggaacattta

SEQ ID NO: 759196 - DNA, 19 bp, Mus musculus
  siRNA target sequence for BC024997 (NM_146004.1,791-809).
ggtcccgtcaacttgtcaa

SEQ ID NO: 759197 - DNA, 19 bp, Mus musculus
  siRNA target sequence for BC024997 (NM_146004.1,852-870).
ggtcaccgtggactttcat

SEQ ID NO: 759198 - DNA, 19 bp, Mus musculus
  siRNA target sequence for BC024997 (NM_146004.1,876-894).
ccttgggagttgttgtatt

SEQ ID NO: 759199 - DNA, 19 bp, Mus musculus
  siRNA target sequence for BC024997 (NM_146004.1,928-946).
ggcggatgacagtctttat

SEQ ID NO: 759200 - DNA, 19 bp, Mus musculus
  siRNA target sequence for BC024997 (NM_146004.1,930-948).
cggatgacagtctttatga

SEQ ID NO: 759201 - DNA, 19 bp, Mus musculus
  siRNA target sequence for BC024997 (NM_146004.1,931-949).
ggatgacagtctttatgaa

SEQ ID NO: 759202 - DNA, 19 bp, Mus musculus
  siRNA target sequence for BC024997 (NM_146004.1,932-950).
gatgacagtctttatgaat

SEQ ID NO: 759203 - DNA, 19 bp, Mus musculus
  siRNA target sequence for BC024997 (NM_146004.1,1000-1018).
gaaactgttaggtgtatca

SEQ ID NO: 759204 - DNA, 19 bp, Mus musculus
  siRNA target sequence for BC024997 (NM_146004.1,1080-1098).
gtcctcagggcgtgattta

SEQ ID NO: 759205 - DNA, 19 bp, Mus musculus
  siRNA target sequence for BC024997 (NM_146004.1,1082-1100).
cctcagggcgtgatttatt

SEQ ID NO: 759206 - DNA, 19 bp, Mus musculus
  siRNA target sequence for BC024997 (NM_146004.1,1083-1101).
ctcagggcgtgatttattt

SEQ ID NO: 759207 - DNA, 19 bp, Mus musculus
  siRNA target sequence for BC024997 (NM_146004.1,1088-1106).
ggcgtgatttatttctaca

SEQ ID NO: 759208 - DNA, 19 bp, Mus musculus
  siRNA target sequence for BC024997 (NM_146004.1,1330-1348).
gctggtgatgggtttctca

SEQ ID NO: 759209 - DNA, 19 bp, Mus musculus
  siRNA target sequence for BC024997 (NM_146004.1,1376-1394).
ctgtttcacccgttcagaa

SEQ ID NO: 759210 - DNA, 19 bp, Mus musculus
  siRNA target sequence for BC024997 (NM_146004.1,1454-1472).
gccctgcaggtgctttact

SEQ ID NO: 759211 - DNA, 19 bp, Mus musculus
  siRNA target sequence for BC024997 (NM_146004.1,1455-1473).
ccctgcaggtgctttacta

SEQ ID NO: 759212 - DNA, 19 bp, Mus musculus
  siRNA target sequence for BC024997 (NM_146004.1,1460-1478).
caggtgctttactatgctt

SEQ ID NO: 759213 - DNA, 19 bp, Mus musculus
  siRNA target sequence for BC024997 (NM_146004.1,1612-1630).
gttccggggtcacttttat

SEQ ID NO: 759214 - DNA, 19 bp, Mus musculus
  siRNA target sequence for BC024997 (NM_146004.1,1772-1790).
gagcagaggatcaactact

SEQ ID NO: 759215 - DNA, 19 bp, Mus musculus
  siRNA target sequence for E430026E19Rik (NM_146008.1,420-438).
cagcaaagaacttatcaga

SEQ ID NO: 759216 - DNA, 19 bp, Mus musculus
  siRNA target sequence for E430026E19Rik (NM_146008.1,439-457).
catgactctcgctcatgaa

SEQ ID NO: 759217 - DNA, 19 bp, Mus musculus
  siRNA target sequence for E430026E19Rik (NM_146008.1,442-460).
gactctcgctcatgaaata

SEQ ID NO: 759218 - DNA, 19 bp, Mus musculus
  siRNA target sequence for E430026E19Rik (NM_146008.1,478-496).
ccagctgaagcaaaatgct

SEQ ID NO: 759219 - DNA, 19 bp, Mus musculus
  siRNA target sequence for E430026E19Rik (NM_146008.1,583-601).
gcctcctcagtatgaatat

SEQ ID NO: 759220 - DNA, 19 bp, Mus musculus
  siRNA target sequence for E430026E19Rik (NM_146008.1,592-610).
gtatgaatatgccatcaaa

SEQ ID NO: 759221 - DNA, 19 bp, Mus musculus
  siRNA target sequence for E430026E19Rik (NM_146008.1,920-938).
cctcacatccagcatcatt

SEQ ID NO: 759222 - DNA, 19 bp, Mus musculus
  siRNA target sequence for E430026E19Rik (NM_146008.1,931-949).
gcatcatttggtggaatat

SEQ ID NO: 759223 - DNA, 19 bp, Mus musculus
  siRNA target sequence for E430026E19Rik (NM_146008.1,986-1004).
ccaaatgccctcagtcaaa

SEQ ID NO: 759224 - DNA, 19 bp, Mus musculus
  siRNA target sequence for E430026E19Rik (NM_146008.1,1015-1033).
gctgaaagagtccatagat

SEQ ID NO: 759225 - DNA, 19 bp, Mus musculus
  siRNA target sequence for E430026E19Rik (NM_146008.1,1022-1040).
gagtccatagataaagaat

SEQ ID NO: 759226 - DNA, 19 bp, Mus musculus
  siRNA target sequence for E430026E19Rik (NM_146008.1,1098-1116).
gccctctgttggtgcttaa

SEQ ID NO: 759227 - DNA, 19 bp, Mus musculus
  siRNA target sequence for E430026E19Rik (NM_146008.1,1099-1117).
ccctctgttggtgcttaat

SEQ ID NO: 759228 - DNA, 19 bp, Mus musculus
  siRNA target sequence for E430026E19Rik (NM_146008.1,1101-1119).
ctctgttggtgcttaataa

SEQ ID NO: 759229 - DNA, 19 bp, Mus musculus
  siRNA target sequence for E430026E19Rik (NM_146008.1,1219-1237).
caatcaattgaaaatgact

SEQ ID NO: 759230 - DNA, 19 bp, Mus musculus
  siRNA target sequence for E430026E19Rik (NM_146008.1,1236-1254).
ctgcctgcgtggccttaat

SEQ ID NO: 759231 - DNA, 19 bp, Mus musculus
  siRNA target sequence for E430026E19Rik (NM_146008.1,1238-1256).
gcctgcgtggccttaatca

SEQ ID NO: 759232 - DNA, 19 bp, Mus musculus
  siRNA target sequence for E430026E19Rik (NM_146008.1,1287-1305).
gcctgcctgaacttgctaa

SEQ ID NO: 759233 - DNA, 19 bp, Mus musculus
  siRNA target sequence for E430026E19Rik (NM_146008.1,1301-1319).
gctaacaggttaaaaagga

SEQ ID NO: 759234 - DNA, 19 bp, Mus musculus
  siRNA target sequence for E430026E19Rik (NM_146008.1,1302-1320).
ctaacaggttaaaaaggat

SEQ ID NO: 759235 - DNA, 19 bp, Mus musculus
  siRNA target sequence for E430026E19Rik (NM_146008.1,1306-1324).
caggttaaaaaggatttca

SEQ ID NO: 759236 - DNA, 19 bp, Mus musculus
  siRNA target sequence for E430026E19Rik (NM_146008.1,1333-1351).
gcttgaaggcatgaataaa

SEQ ID NO: 759237 - DNA, 19 bp, Mus musculus
  siRNA target sequence for E430026E19Rik (NM_146008.1,1429-1447).
gagaggctcgcccacttta

SEQ ID NO: 759238 - DNA, 19 bp, Mus musculus
  siRNA target sequence for E430026E19Rik (NM_146008.1,1431-1449).
gaggctcgcccactttaaa

SEQ ID NO: 759239 - DNA, 19 bp, Mus musculus
  siRNA target sequence for E430026E19Rik (NM_146008.1,1511-1529).
gtctgcaccttgatggata

SEQ ID NO: 759240 - DNA, 19 bp, Mus musculus
  siRNA target sequence for E430026E19Rik (NM_146008.1,1532-1550).
cggatccagttgtacatga

SEQ ID NO: 759241 - DNA, 19 bp, Mus musculus
  siRNA target sequence for E430026E19Rik (NM_146008.1,1533-1551).
ggatccagttgtacatgaa

SEQ ID NO: 759242 - DNA, 19 bp, Mus musculus
  siRNA target sequence for E430026E19Rik (NM_146008.1,1599-1617).
caggtggccttgatgtcat

SEQ ID NO: 759243 - DNA, 19 bp, Mus musculus
  siRNA target sequence for E430026E19Rik (NM_146008.1,1641-1659).
gctgccagtatgcaaacat

SEQ ID NO: 759244 - DNA, 19 bp, Mus musculus
  siRNA target sequence for E430026E19Rik (NM_146008.1,1642-1660).
ctgccagtatgcaaacatt

SEQ ID NO: 759245 - DNA, 19 bp, Mus musculus
  siRNA target sequence for E430026E19Rik (NM_146008.1,1648-1666).
gtatgcaaacattgtgaat

SEQ ID NO: 759246 - DNA, 19 bp, Mus musculus
  siRNA target sequence for E430026E19Rik (NM_146008.1,1652-1670).
gcaaacattgtgaatctca

SEQ ID NO: 759247 - DNA, 19 bp, Mus musculus
  siRNA target sequence for E430026E19Rik (NM_146008.1,1676-1694).
caggtgtatggaccatttt

SEQ ID NO: 759248 - DNA, 19 bp, Mus musculus
  siRNA target sequence for E430026E19Rik (NM_146008.1,1681-1699).
gtatggaccattttatgca

SEQ ID NO: 759249 - DNA, 19 bp, Mus musculus
  siRNA target sequence for BC004690 (NM_146009.1,191-209).
gacagtagcagaacaagat

SEQ ID NO: 759250 - DNA, 19 bp, Mus musculus
  siRNA target sequence for BC004690 (NM_146009.1,221-239).
ctcacttttgaccaaacta

SEQ ID NO: 759251 - DNA, 19 bp, Mus musculus
  siRNA target sequence for BC004690 (NM_146009.1,225-243).
cttttgaccaaactaaaga

SEQ ID NO: 759252 - DNA, 19 bp, Mus musculus
  siRNA target sequence for BC004690 (NM_146009.1,299-317).
gtttgaaaataccaaacta

SEQ ID NO: 759253 - DNA, 19 bp, Mus musculus
  siRNA target sequence for BC004690 (NM_146009.1,340-358).
gtgaggtaaagaaagtgaa

SEQ ID NO: 759254 - DNA, 19 bp, Mus musculus
  siRNA target sequence for BC004690 (NM_146009.1,401-419).
caaggactcccagagttta

SEQ ID NO: 759255 - DNA, 19 bp, Mus musculus
  siRNA target sequence for BC004690 (NM_146009.1,459-477).
gctccaacaaccacaatga

SEQ ID NO: 759256 - DNA, 19 bp, Mus musculus
  siRNA target sequence for BC004690 (NM_146009.1,469-487).
ccacaatgaggaatcttgt

SEQ ID NO: 759257 - DNA, 19 bp, Mus musculus
  siRNA target sequence for BC004690 (NM_146009.1,470-488).
cacaatgaggaatcttgta

SEQ ID NO: 759258 - DNA, 19 bp, Mus musculus
  siRNA target sequence for BC004690 (NM_146009.1,500-518).
gagccaactagccttgaaa

SEQ ID NO: 759259 - DNA, 19 bp, Mus musculus
  siRNA target sequence for BC004690 (NM_146009.1,579-597).
gcagctgaggaacgtataa

SEQ ID NO: 759260 - DNA, 19 bp, Mus musculus
  siRNA target sequence for BC004690 (NM_146009.1,580-598).
cagctgaggaacgtataat

SEQ ID NO: 759261 - DNA, 19 bp, Mus musculus
  siRNA target sequence for BC004690 (NM_146009.1,591-609).
cgtataatcgctgtaactt

SEQ ID NO: 759262 - DNA, 19 bp, Mus musculus
  siRNA target sequence for BC004690 (NM_146009.1,599-617).
cgctgtaacttctcaaaaa

SEQ ID NO: 759263 - DNA, 19 bp, Mus musculus
  siRNA target sequence for BC004690 (NM_146009.1,622-640).
caaatctcaatgttcaaca

SEQ ID NO: 759264 - DNA, 19 bp, Mus musculus
  siRNA target sequence for BC004690 (NM_146009.1,629-647).
caatgttcaacaagttgtt

SEQ ID NO: 759265 - DNA, 19 bp, Mus musculus
  siRNA target sequence for BC004690 (NM_146009.1,642-660).
gttgttgagcgccatacta

SEQ ID NO: 759266 - DNA, 19 bp, Mus musculus
  siRNA target sequence for BC004690 (NM_146009.1,801-819).
gcttataataaaatcctta

SEQ ID NO: 759267 - DNA, 19 bp, Mus musculus
  siRNA target sequence for BC004690 (NM_146009.1,857-875).
gagaagacagattaaaaga

SEQ ID NO: 759268 - DNA, 19 bp, Mus musculus
  siRNA target sequence for BC004690 (NM_146009.1,886-904).
gactgcagagcaaaacttt

SEQ ID NO: 759269 - DNA, 19 bp, Mus musculus
  siRNA target sequence for BC004690 (NM_146009.1,909-927).
gataacaagcaaagtttaa

SEQ ID NO: 759270 - DNA, 19 bp, Mus musculus
  siRNA target sequence for BC004690 (NM_146009.1,914-932).
caagcaaagtttaatcgat

SEQ ID NO: 759271 - DNA, 19 bp, Mus musculus
  siRNA target sequence for BC004690 (NM_146009.1,1001-1019).
gccggtgaaggaaaagagt

SEQ ID NO: 759272 - DNA, 19 bp, Mus musculus
  siRNA target sequence for BC004690 (NM_146009.1,1002-1020).
ccggtgaaggaaaagagta

SEQ ID NO: 759273 - DNA, 19 bp, Mus musculus
  siRNA target sequence for BC004690 (NM_146009.1,1007-1025).
gaaggaaaagagtagtaaa

SEQ ID NO: 759274 - DNA, 19 bp, Mus musculus
  siRNA target sequence for BC004690 (NM_146009.1,1051-1069).
gtaagaaatggcaaaccaa

SEQ ID NO: 759275 - DNA, 19 bp, Mus musculus
  siRNA target sequence for BC004690 (NM_146009.1,1055-1073).
gaaatggcaaaccaaagta

SEQ ID NO: 759276 - DNA, 19 bp, Mus musculus
  siRNA target sequence for BC004690 (NM_146009.1,1077-1095).
ggactacgaaacagactaa

SEQ ID NO: 759277 - DNA, 19 bp, Mus musculus
  siRNA target sequence for BC004690 (NM_146009.1,1233-1251).
ggagtgcgagctttggaat

SEQ ID NO: 759278 - DNA, 19 bp, Mus musculus
  siRNA target sequence for BC004690 (NM_146009.1,1238-1256).
gcgagctttggaatctgaa

SEQ ID NO: 759279 - DNA, 19 bp, Mus musculus
  siRNA target sequence for BC004690 (NM_146009.1,1352-1370).
ggaagacttacatttacaa

SEQ ID NO: 759280 - DNA, 19 bp, Mus musculus
  siRNA target sequence for BC004690 (NM_146009.1,1446-1464).
cggcttcggaaagaactta

SEQ ID NO: 759281 - DNA, 19 bp, Mus musculus
  siRNA target sequence for BC004690 (NM_146009.1,1485-1503).
gagaaactgcggatagcta

SEQ ID NO: 759282 - DNA, 19 bp, Mus musculus
  siRNA target sequence for BC004690 (NM_146009.1,1495-1513).
ggatagctaagaacaactt

SEQ ID NO: 759283 - DNA, 19 bp, Mus musculus
  siRNA target sequence for BC004690 (NM_146009.1,1536-1554).
gcagctcaactcgaagaaa

SEQ ID NO: 759284 - DNA, 19 bp, Mus musculus
  siRNA target sequence for BC004690 (NM_146009.1,1612-1630).
gcaagagctggaagtcaat

SEQ ID NO: 759285 - DNA, 19 bp, Mus musculus
  siRNA target sequence for BC004690 (NM_146009.1,1613-1631).
caagagctggaagtcaatt

SEQ ID NO: 759286 - DNA, 19 bp, Mus musculus
  siRNA target sequence for BC004690 (NM_146009.1,1683-1701).
gccaaaaagaatcaaagta

SEQ ID NO: 759287 - DNA, 19 bp, Mus musculus
  siRNA target sequence for BC004690 (NM_146009.1,1684-1702).
ccaaaaagaatcaaagtat

SEQ ID NO: 759288 - DNA, 19 bp, Mus musculus
  siRNA target sequence for BC004690 (NM_146009.1,1707-1725).
gaccttaaacagcttgtaa

SEQ ID NO: 759289 - DNA, 19 bp, Mus musculus
  siRNA target sequence for BC004690 (NM_146009.1,1709-1727).
ccttaaacagcttgtaaga

SEQ ID NO: 759290 - DNA, 19 bp, Mus musculus
  siRNA target sequence for BC004690 (NM_146009.1,1773-1791).
cttgaacaacagattgaga

SEQ ID NO: 759291 - DNA, 19 bp, Mus musculus
  siRNA target sequence for BC004690 (NM_146009.1,1891-1909).
cagaattaatccatcagat

SEQ ID NO: 759292 - DNA, 19 bp, Mus musculus
  siRNA target sequence for BC004690 (NM_146009.1,1902-1920).
catcagatagaaattaaca

SEQ ID NO: 759293 - DNA, 19 bp, Mus musculus
  siRNA target sequence for BC004690 (NM_146009.1,1940-1958).
cagtagcatacctgattct

SEQ ID NO: 759294 - DNA, 19 bp, Mus musculus
  siRNA target sequence for BC004690 (NM_146009.1,1942-1960).
gtagcatacctgattctga

SEQ ID NO: 759295 - DNA, 19 bp, Mus musculus
  siRNA target sequence for BC004690 (NM_146009.1,2025-2043).
cattcgaaggaggaagtta

SEQ ID NO: 759296 - DNA, 19 bp, Mus musculus
  siRNA target sequence for Tm4sf3 (NM_146010.1,324-342).
gtgtgagcagctgtttaaa

SEQ ID NO: 759297 - DNA, 19 bp, Mus musculus
  siRNA target sequence for Tm4sf3 (NM_146010.1,328-346).
gagcagctgtttaaagtat

SEQ ID NO: 759298 - DNA, 19 bp, Mus musculus
  siRNA target sequence for Tm4sf3 (NM_146010.1,470-488).
cccttcattgctgtgaata

SEQ ID NO: 759299 - DNA, 19 bp, Mus musculus
  siRNA target sequence for Tm4sf3 (NM_146010.1,498-516).
cagttgggtctatcatcat

SEQ ID NO: 759300 - DNA, 19 bp, Mus musculus
  siRNA target sequence for Tm4sf3 (NM_146010.1,558-576).
gccggtgcatgcttctctt

SEQ ID NO: 759301 - DNA, 19 bp, Mus musculus
  siRNA target sequence for Tm4sf3 (NM_146010.1,587-605).
ggcttgctgctgattctga

SEQ ID NO: 759302 - DNA, 19 bp, Mus musculus
  siRNA target sequence for Tm4sf3 (NM_146010.1,637-655).
cgctttcaaacctgagtat

SEQ ID NO: 759303 - DNA, 19 bp, Mus musculus
  siRNA target sequence for Tm4sf3 (NM_146010.1,639-657).
ctttcaaacctgagtataa

SEQ ID NO: 759304 - DNA, 19 bp, Mus musculus
  siRNA target sequence for Tm4sf3 (NM_146010.1,652-670).
gtataaccgaattctgaat

SEQ ID NO: 759305 - DNA, 19 bp, Mus musculus
  siRNA target sequence for Tm4sf3 (NM_146010.1,667-685).
gaatgaaacgctatatgaa

SEQ ID NO: 759306 - DNA, 19 bp, Mus musculus
  siRNA target sequence for Tm4sf3 (NM_146010.1,675-693).
cgctatatgaaaatgctaa

SEQ ID NO: 759307 - DNA, 19 bp, Mus musculus
  siRNA target sequence for Tm4sf3 (NM_146010.1,788-806).
gctgccgactggggaaata

SEQ ID NO: 759308 - DNA, 19 bp, Mus musculus
  siRNA target sequence for Tm4sf3 (NM_146010.1,789-807).
ctgccgactggggaaataa

SEQ ID NO: 759309 - DNA, 19 bp, Mus musculus
  siRNA target sequence for Tm4sf3 (NM_146010.1,791-809).
gccgactggggaaataatt

SEQ ID NO: 759310 - DNA, 19 bp, Mus musculus
  siRNA target sequence for Tm4sf3 (NM_146010.1,792-810).
ccgactggggaaataattt

SEQ ID NO: 759311 - DNA, 19 bp, Mus musculus
  siRNA target sequence for Tm4sf3 (NM_146010.1,793-811).
cgactggggaaataatttt

SEQ ID NO: 759312 - DNA, 19 bp, Mus musculus
  siRNA target sequence for Tm4sf3 (NM_146010.1,818-836).
gcaaaagagtcatgtcaat

SEQ ID NO: 759313 - DNA, 19 bp, Mus musculus
  siRNA target sequence for Tm4sf3 (NM_146010.1,843-861).
gaactgactgtgcaactta

SEQ ID NO: 759314 - DNA, 19 bp, Mus musculus
  siRNA target sequence for Tm4sf3 (NM_146010.1,922-940).
gaacattattattgtcatt

SEQ ID NO: 759315 - DNA, 19 bp, Mus musculus
  siRNA target sequence for Tm4sf3 (NM_146010.1,953-971).
ggactggccgttattgaga

SEQ ID NO: 759316 - DNA, 19 bp, Mus musculus
  siRNA target sequence for Tm4sf3 (NM_146010.1,954-972).
gactggccgttattgagat

SEQ ID NO: 759317 - DNA, 19 bp, Mus musculus
  siRNA target sequence for Tm4sf3 (NM_146010.1,974-992).
ctcggtttggtgttttcta

SEQ ID NO: 759318 - DNA, 19 bp, Mus musculus
  siRNA target sequence for Tm4sf3 (NM_146010.1,998-1016).
ctatactgccagattggaa

SEQ ID NO: 759319 - DNA, 19 bp, Mus musculus
  siRNA target sequence for AU043488 (NM_146011.1,328-346).
caaggagggcgcaaactca

SEQ ID NO: 759320 - DNA, 19 bp, Mus musculus
  siRNA target sequence for AU043488 (NM_146011.1,337-355).
cgcaaactcaggaagaact

SEQ ID NO: 759321 - DNA, 19 bp, Mus musculus
  siRNA target sequence for AU043488 (NM_146011.1,545-563).
cggtcccgggacatgagtt

SEQ ID NO: 759322 - DNA, 19 bp, Mus musculus
  siRNA target sequence for AU043488 (NM_146011.1,709-727).
gaggatgacgaattggaat

SEQ ID NO: 759323 - DNA, 19 bp, Mus musculus
  siRNA target sequence for AU043488 (NM_146011.1,757-775).
cttggcagccgcagaactt

SEQ ID NO: 759324 - DNA, 19 bp, Mus musculus
  siRNA target sequence for AU043488 (NM_146011.1,810-828).
ccgcgtgcggaacaagtta

SEQ ID NO: 759325 - DNA, 19 bp, Mus musculus
  siRNA target sequence for AU043488 (NM_146011.1,811-829).
cgcgtgcggaacaagttaa

SEQ ID NO: 759326 - DNA, 19 bp, Mus musculus
  siRNA target sequence for AU043488 (NM_146011.1,812-830).
gcgtgcggaacaagttaaa

SEQ ID NO: 759327 - DNA, 19 bp, Mus musculus
  siRNA target sequence for AU043488 (NM_146011.1,882-900).
gttccgagaccaggttttt

SEQ ID NO: 759328 - DNA, 19 bp, Mus musculus
  siRNA target sequence for AU043488 (NM_146011.1,950-968).
gctttgtccggctttgtgt

SEQ ID NO: 759329 - DNA, 19 bp, Mus musculus
  siRNA target sequence for AU043488 (NM_146011.1,951-969).
ctttgtccggctttgtgtt

SEQ ID NO: 759330 - DNA, 19 bp, Mus musculus
  siRNA target sequence for AU043488 (NM_146011.1,965-983).
gtgttgaggccgtggataa

SEQ ID NO: 759331 - DNA, 19 bp, Mus musculus
  siRNA target sequence for AU043488 (NM_146011.1,967-985).
gttgaggccgtggataaaa

SEQ ID NO: 759332 - DNA, 19 bp, Mus musculus
  siRNA target sequence for AU043488 (NM_146011.1,989-1007).
gtctagacgtggatggtat

SEQ ID NO: 759333 - DNA, 19 bp, Mus musculus
  siRNA target sequence for AU043488 (NM_146011.1,1082-1100).
ctgatgggagatacatgtt

SEQ ID NO: 759334 - DNA, 19 bp, Mus musculus
  siRNA target sequence for AU043488 (NM_146011.1,1123-1141).
ggcaaattagatttagaca

SEQ ID NO: 759335 - DNA, 19 bp, Mus musculus
  siRNA target sequence for AU043488 (NM_146011.1,1142-1160).
gtgccgaatgggatgatat

SEQ ID NO: 759336 - DNA, 19 bp, Mus musculus
  siRNA target sequence for AU043488 (NM_146011.1,1145-1163).
ccgaatgggatgatattca

SEQ ID NO: 759337 - DNA, 19 bp, Mus musculus
  siRNA target sequence for AU043488 (NM_146011.1,1243-1261).
cgtgatgcccttgaacttt

SEQ ID NO: 759338 - DNA, 19 bp, Mus musculus
  siRNA target sequence for AU043488 (NM_146011.1,1279-1297).
ctctccaaaatccagaaat

SEQ ID NO: 759339 - DNA, 19 bp, Mus musculus
  siRNA target sequence for AU043488 (NM_146011.1,1399-1417).
cacaacctgggaattgtgt

SEQ ID NO: 759340 - DNA, 19 bp, Mus musculus
  siRNA target sequence for AU043488 (NM_146011.1,1416-1434).
gtttggaccgacactgttt

SEQ ID NO: 759341 - DNA, 19 bp, Mus musculus
  siRNA target sequence for BC029157 (NM_146014.1,78-96).
ggaattgtgtcgccattta

SEQ ID NO: 759342 - DNA, 19 bp, Mus musculus
  siRNA target sequence for BC029157 (NM_146014.1,79-97).
gaattgtgtcgccatttaa

SEQ ID NO: 759343 - DNA, 19 bp, Mus musculus
  siRNA target sequence for BC029157 (NM_146014.1,107-125).
cctaaaaggtgaaaagagt

SEQ ID NO: 759344 - DNA, 19 bp, Mus musculus
  siRNA target sequence for BC029157 (NM_146014.1,108-126).
ctaaaaggtgaaaagagta

SEQ ID NO: 759345 - DNA, 19 bp, Mus musculus
  siRNA target sequence for BC029157 (NM_146014.1,239-257).
ggaggtgaagtatttaggt

SEQ ID NO: 759346 - DNA, 19 bp, Mus musculus
  siRNA target sequence for BC029157 (NM_146014.1,292-310).
ccagtaggacggaaatcct

SEQ ID NO: 759347 - DNA, 19 bp, Mus musculus
  siRNA target sequence for BC029157 (NM_146014.1,301-319).
cggaaatcctgcatttcat

SEQ ID NO: 759348 - DNA, 19 bp, Mus musculus
  siRNA target sequence for BC029157 (NM_146014.1,302-320).
ggaaatcctgcatttcata

SEQ ID NO: 759349 - DNA, 19 bp, Mus musculus
  siRNA target sequence for BC029157 (NM_146014.1,391-409).
ctgcctacaatgtcaagtt

SEQ ID NO: 759350 - DNA, 19 bp, Mus musculus
  siRNA target sequence for BC029157 (NM_146014.1,470-488).
ctcctatgtccgagatgat

SEQ ID NO: 759351 - DNA, 19 bp, Mus musculus
  siRNA target sequence for BC029157 (NM_146014.1,579-597).
gcaggttccttgtcagaaa

SEQ ID NO: 759352 - DNA, 19 bp, Mus musculus
  siRNA target sequence for BC029157 (NM_146014.1,685-703).
gccaggtcttccagattgt

SEQ ID NO: 759353 - DNA, 19 bp, Mus musculus
  siRNA target sequence for BC029157 (NM_146014.1,686-704).
ccaggtcttccagattgtt

SEQ ID NO: 759354 - DNA, 19 bp, Mus musculus
  siRNA target sequence for BC029157 (NM_146014.1,687-705).
caggtcttccagattgttt

SEQ ID NO: 759355 - DNA, 19 bp, Mus musculus
  siRNA target sequence for BC029157 (NM_146014.1,725-743).
ctttctggaccgagcaata

SEQ ID NO: 759356 - DNA, 19 bp, Mus musculus
  siRNA target sequence for BC029157 (NM_146014.1,731-749).
ggaccgagcaatatttgat

SEQ ID NO: 759357 - DNA, 19 bp, Mus musculus
  siRNA target sequence for BC029157 (NM_146014.1,799-817).
ccacgaaagtggacatgaa

SEQ ID NO: 759358 - DNA, 19 bp, Mus musculus
  siRNA target sequence for BC029157 (NM_146014.1,812-830).
catgaaggacagttacgat

SEQ ID NO: 759359 - DNA, 19 bp, Mus musculus
  siRNA target sequence for BC029157 (NM_146014.1,1027-1045).
cagctctgctacatgagta

SEQ ID NO: 759360 - DNA, 19 bp, Mus musculus
  siRNA target sequence for BC029157 (NM_146014.1,1049-1067).
caatggggcctctatccat

SEQ ID NO: 759361 - DNA, 19 bp, Mus musculus
  siRNA target sequence for BC029157 (NM_146014.1,1055-1073).
ggcctctatccatgagttt

SEQ ID NO: 759362 - DNA, 19 bp, Mus musculus
  siRNA target sequence for BC029157 (NM_146014.1,1056-1074).
gcctctatccatgagtttt

SEQ ID NO: 759363 - DNA, 19 bp, Mus musculus
  siRNA target sequence for BC029157 (NM_146014.1,1151-1169).
ggacagtcagcactttgaa

SEQ ID NO: 759364 - DNA, 19 bp, Mus musculus
  siRNA target sequence for BC029157 (NM_146014.1,1329-1347).
gagtgggaccgcatgattt

SEQ ID NO: 759365 - DNA, 19 bp, Mus musculus
  siRNA target sequence for BC029157 (NM_146014.1,1331-1349).
gtgggaccgcatgatttca

SEQ ID NO: 759366 - DNA, 19 bp, Mus musculus
  siRNA target sequence for BC029157 (NM_146014.1,1352-1370).
catcagtagtgatattgaa

SEQ ID NO: 759367 - DNA, 19 bp, Mus musculus
  siRNA target sequence for C230094A16Rik (NM_146016.1,452-470).
ccaaacacaccctttccat

SEQ ID NO: 759368 - DNA, 19 bp, Mus musculus
  siRNA target sequence for C230094A16Rik (NM_146016.1,484-502).
cacaccaagggggtgaatt

SEQ ID NO: 759369 - DNA, 19 bp, Mus musculus
  siRNA target sequence for C230094A16Rik (NM_146016.1,613-631).
ggccacctggaacgaatat

SEQ ID NO: 759370 - DNA, 19 bp, Mus musculus
  siRNA target sequence for C230094A16Rik (NM_146016.1,614-632).
gccacctggaacgaatatt

SEQ ID NO: 759371 - DNA, 19 bp, Mus musculus
  siRNA target sequence for C230094A16Rik (NM_146016.1,615-633).
ccacctggaacgaatattt

SEQ ID NO: 759372 - DNA, 19 bp, Mus musculus
  siRNA target sequence for C230094A16Rik (NM_146016.1,679-697).
ggagtcaaacatatgaagt

SEQ ID NO: 759373 - DNA, 19 bp, Mus musculus
  siRNA target sequence for C230094A16Rik (NM_146016.1,793-811).
ggtgctaacaaccttactt

SEQ ID NO: 759374 - DNA, 19 bp, Mus musculus
  siRNA target sequence for C230094A16Rik (NM_146016.1,794-812).
gtgctaacaaccttacttt

SEQ ID NO: 759375 - DNA, 19 bp, Mus musculus
  siRNA target sequence for C230094A16Rik (NM_146016.1,796-814).
gctaacaaccttactttta

SEQ ID NO: 759376 - DNA, 19 bp, Mus musculus
  siRNA target sequence for C230094A16Rik (NM_146016.1,822-840).
catcaatggagatgtctat

SEQ ID NO: 759377 - DNA, 19 bp, Mus musculus
  siRNA target sequence for C230094A16Rik (NM_146016.1,919-937).
cgagatgggcttattgtga

SEQ ID NO: 759378 - DNA, 19 bp, Mus musculus
  siRNA target sequence for C230094A16Rik (NM_146016.1,1061-1079).
gccgtggcaagggaaaaat

SEQ ID NO: 759379 - DNA, 19 bp, Mus musculus
  siRNA target sequence for C230094A16Rik (NM_146016.1,1080-1098).
cttagtaggaaccaaagat

SEQ ID NO: 759380 - DNA, 19 bp, Mus musculus
  siRNA target sequence for C230094A16Rik (NM_146016.1,1133-1151).
cttcaaacatcctgattga

SEQ ID NO: 759381 - DNA, 19 bp, Mus musculus
  siRNA target sequence for C230094A16Rik (NM_146016.1,1255-1273).
gacaagaaactgttaaaca

SEQ ID NO: 759382 - DNA, 19 bp, Mus musculus
  siRNA target sequence for C230094A16Rik (NM_146016.1,1372-1390).
gtgaacaccctgaaagttt

SEQ ID NO: 759383 - DNA, 19 bp, Mus musculus
  siRNA target sequence for C230094A16Rik (NM_146016.1,1417-1435).
gccatccaagatatcagaa

SEQ ID NO: 759384 - DNA, 19 bp, Mus musculus
  siRNA target sequence for C230094A16Rik (NM_146016.1,1439-1457).
gcccagacaacagattctt

SEQ ID NO: 759385 - DNA, 19 bp, Mus musculus
  siRNA target sequence for C230094A16Rik (NM_146016.1,1476-1494).
gcagacagttgacttctat

SEQ ID NO: 759386 - DNA, 19 bp, Mus musculus
  siRNA target sequence for C230094A16Rik (NM_146016.1,1638-1656).
cctggggaagcaagtaact

SEQ ID NO: 759387 - DNA, 19 bp, Mus musculus
  siRNA target sequence for C230094A16Rik (NM_146016.1,1641-1659).
ggggaagcaagtaactgaa

SEQ ID NO: 759388 - DNA, 19 bp, Mus musculus
  siRNA target sequence for C230094A16Rik (NM_146016.1,1857-1875).
caagcacaaacgttacttt

SEQ ID NO: 759389 - DNA, 19 bp, Mus musculus
  siRNA target sequence for C230094A16Rik (NM_146016.1,1908-1926).
ctcttccgatgacaagtat

SEQ ID NO: 759390 - DNA, 19 bp, Mus musculus
  siRNA target sequence for C230094A16Rik (NM_146016.1,1910-1928).
cttccgatgacaagtatgt

SEQ ID NO: 759391 - DNA, 19 bp, Mus musculus
  siRNA target sequence for C230094A16Rik (NM_146016.1,1942-1960).
ggagacgactgcagtgtat

SEQ ID NO: 759392 - DNA, 19 bp, Mus musculus
  siRNA target sequence for C230094A16Rik (NM_146016.1,1943-1961).
gagacgactgcagtgtatt

SEQ ID NO: 759393 - DNA, 19 bp, Mus musculus
  siRNA target sequence for B430214A04Rik (NM_146018.1,309-327).
cttctgcacggaagttcta

SEQ ID NO: 759394 - DNA, 19 bp, Mus musculus
  siRNA target sequence for B430214A04Rik (NM_146018.1,532-550).
ggctatatcagtcatgata

SEQ ID NO: 759395 - DNA, 19 bp, Mus musculus
  siRNA target sequence for B430214A04Rik (NM_146018.1,547-565).
gataaagagacctctatta

SEQ ID NO: 759396 - DNA, 19 bp, Mus musculus
  siRNA target sequence for B430214A04Rik (NM_146018.1,688-706).
gagcagcacggctttgtgt

SEQ ID NO: 759397 - DNA, 19 bp, Mus musculus
  siRNA target sequence for B430214A04Rik (NM_146018.1,787-805).
cggatctacctcatcaact

SEQ ID NO: 759398 - DNA, 19 bp, Mus musculus
  siRNA target sequence for B430214A04Rik (NM_146018.1,904-922).
cgtgcccagaggatgaaca

SEQ ID NO: 759399 - DNA, 19 bp, Mus musculus
  siRNA target sequence for B430214A04Rik (NM_146018.1,1049-1067).
gtagcaggctgacagaaaa

SEQ ID NO: 759400 - DNA, 19 bp, Mus musculus
  siRNA target sequence for B430214A04Rik (NM_146018.1,1173-1191).
ggagaaagctcctgttaca

SEQ ID NO: 759401 - DNA, 19 bp, Mus musculus
  siRNA target sequence for B430214A04Rik (NM_146018.1,1263-1281).
ctggcagcccccaaagctt

SEQ ID NO: 759402 - DNA, 19 bp, Mus musculus
  siRNA target sequence for B430214A04Rik (NM_146018.1,1463-1481).
cttacagcagccagtatga

SEQ ID NO: 759403 - DNA, 19 bp, Mus musculus
  siRNA target sequence for B430214A04Rik (NM_146018.1,1547-1565).
cctcagagttcgtagttgt

SEQ ID NO: 759404 - DNA, 19 bp, Mus musculus
  siRNA target sequence for B430214A04Rik (NM_146018.1,1623-1641).
ccagtccctcagcaagtat

SEQ ID NO: 759405 - DNA, 19 bp, Mus musculus
  siRNA target sequence for B430214A04Rik (NM_146018.1,1687-1705).
gggcccactatcctgaata

SEQ ID NO: 759406 - DNA, 19 bp, Mus musculus
  siRNA target sequence for B430214A04Rik (NM_146018.1,1688-1706).
ggcccactatcctgaataa

SEQ ID NO: 759407 - DNA, 19 bp, Mus musculus
  siRNA target sequence for B430214A04Rik (NM_146018.1,1784-1802).
ggatgaacaaagtgaaagt

SEQ ID NO: 759408 - DNA, 19 bp, Mus musculus
  siRNA target sequence for B430214A04Rik (NM_146018.1,1931-1949).
cctacaagtcccatctcat

SEQ ID NO: 759409 - DNA, 19 bp, Mus musculus
  siRNA target sequence for Chd3 (NM_146019.1,253-271).
gaggaacgagcagctattt

SEQ ID NO: 759410 - DNA, 19 bp, Mus musculus
  siRNA target sequence for Chd3 (NM_146019.1,256-274).
gaacgagcagctatttcct

SEQ ID NO: 759411 - DNA, 19 bp, Mus musculus
  siRNA target sequence for Chd3 (NM_146019.1,275-293).
cggggaaactcaatgagat

SEQ ID NO: 759412 - DNA, 19 bp, Mus musculus
  siRNA target sequence for Chd3 (NM_146019.1,366-384).
ccagaatgacgctcagttt

SEQ ID NO: 759413 - DNA, 19 bp, Mus musculus
  siRNA target sequence for Chd3 (NM_146019.1,386-404).
ccattatcaatgaaccatt

SEQ ID NO: 759414 - DNA, 19 bp, Mus musculus
  siRNA target sequence for Chd3 (NM_146019.1,387-405).
cattatcaatgaaccattt

SEQ ID NO: 759415 - DNA, 19 bp, Mus musculus
  siRNA target sequence for Chd3 (NM_146019.1,1054-1072).
cgagcaggggaggtgattt

SEQ ID NO: 759416 - DNA, 19 bp, Mus musculus
  siRNA target sequence for Chd3 (NM_146019.1,1057-1075).
gcaggggaggtgatttgta

SEQ ID NO: 759417 - DNA, 19 bp, Mus musculus
  siRNA target sequence for Chd3 (NM_146019.1,1058-1076).
caggggaggtgatttgtat

SEQ ID NO: 759418 - DNA, 19 bp, Mus musculus
  siRNA target sequence for C730027E14Rik (NM_146020.1,47-65).
gctggttccgccatgcaat

SEQ ID NO: 759419 - DNA, 19 bp, Mus musculus
  siRNA target sequence for C730027E14Rik (NM_146020.1,48-66).
ctggttccgccatgcaatt

SEQ ID NO: 759420 - DNA, 19 bp, Mus musculus
  siRNA target sequence for C730027E14Rik (NM_146020.1,62-80).
caattcccttcgctatctt

SEQ ID NO: 759421 - DNA, 19 bp, Mus musculus
  siRNA target sequence for C730027E14Rik (NM_146020.1,74-92).
ctatcttaacgctgttact

SEQ ID NO: 759422 - DNA, 19 bp, Mus musculus
  siRNA target sequence for C730027E14Rik (NM_146020.1,78-96).
cttaacgctgttacttctt

SEQ ID NO: 759423 - DNA, 19 bp, Mus musculus
  siRNA target sequence for C730027E14Rik (NM_146020.1,83-101).
cgctgttacttctttacat

SEQ ID NO: 759424 - DNA, 19 bp, Mus musculus
  siRNA target sequence for C730027E14Rik (NM_146020.1,85-103).
ctgttacttctttacatca

SEQ ID NO: 759425 - DNA, 19 bp, Mus musculus
  siRNA target sequence for C730027E14Rik (NM_146020.1,104-122).
gtatatggttcttctatga

SEQ ID NO: 759426 - DNA, 19 bp, Mus musculus
  siRNA target sequence for C730027E14Rik (NM_146020.1,162-180).
cggcctgcggggactcaaa

SEQ ID NO: 759427 - DNA, 19 bp, Mus musculus
  siRNA target sequence for C730027E14Rik (NM_146020.1,202-220).
ctcggctccctgcttagtt

SEQ ID NO: 759428 - DNA, 19 bp, Mus musculus
  siRNA target sequence for C730027E14Rik (NM_146020.1,414-432).
ggcaggatggagagaacta

SEQ ID NO: 759429 - DNA, 19 bp, Mus musculus
  siRNA target sequence for C730027E14Rik (NM_146020.1,416-434).
caggatggagagaactact

SEQ ID NO: 759430 - DNA, 19 bp, Mus musculus
  siRNA target sequence for C730027E14Rik (NM_146020.1,418-436).
ggatggagagaactactta

SEQ ID NO: 759431 - DNA, 19 bp, Mus musculus
  siRNA target sequence for C730027E14Rik (NM_146020.1,427-445).
gaactacttaggttcctaa

SEQ ID NO: 759432 - DNA, 19 bp, Mus musculus
  siRNA target sequence for C730027E14Rik (NM_146020.1,573-591).
gcggggagcaggattgcta

SEQ ID NO: 759433 - DNA, 19 bp, Mus musculus
  siRNA target sequence for C730027E14Rik (NM_146020.1,634-652).
ggctctcgaacgctacttt

SEQ ID NO: 759434 - DNA, 19 bp, Mus musculus
  siRNA target sequence for C730027E14Rik (NM_146020.1,635-653).
gctctcgaacgctactttt

SEQ ID NO: 759435 - DNA, 19 bp, Mus musculus
  siRNA target sequence for C730027E14Rik (NM_146020.1,638-656).
ctcgaacgctacttttgtt

SEQ ID NO: 759436 - DNA, 19 bp, Mus musculus
  siRNA target sequence for C730027E14Rik (NM_146020.1,905-923).
gcgtcctggaggatgtgta

SEQ ID NO: 759437 - DNA, 19 bp, Mus musculus
  siRNA target sequence for C730027E14Rik (NM_146020.1,913-931).
gaggatgtgtacaatcgta

SEQ ID NO: 759438 - DNA, 19 bp, Mus musculus
  siRNA target sequence for MGC7717 (NM_146022.1,166-184).
cccgtatgctgcagcttat

SEQ ID NO: 759439 - DNA, 19 bp, Mus musculus
  siRNA target sequence for MGC7717 (NM_146022.1,168-186).
cgtatgctgcagcttatga

SEQ ID NO: 759440 - DNA, 19 bp, Mus musculus
  siRNA target sequence for MGC7717 (NM_146022.1,177-195).
cagcttatgaccatcaaca

SEQ ID NO: 759441 - DNA, 19 bp, Mus musculus
  siRNA target sequence for MGC7717 (NM_146022.1,180-198).
cttatgaccatcaacatgt

SEQ ID NO: 759442 - DNA, 19 bp, Mus musculus
  siRNA target sequence for MGC7717 (NM_146022.1,206-224).
gcataactcccagttgaaa

SEQ ID NO: 759443 - DNA, 19 bp, Mus musculus
  siRNA target sequence for MGC7717 (NM_146022.1,225-243).
ggtaagggaaatctaattt

SEQ ID NO: 759444 - DNA, 19 bp, Mus musculus
  siRNA target sequence for Evi2b (NM_146023.2,561-579).
caagtatctggtcttcatt

SEQ ID NO: 759445 - DNA, 19 bp, Mus musculus
  siRNA target sequence for Evi2b (NM_146023.2,632-650).
caacagagcagcaatcact

SEQ ID NO: 759446 - DNA, 19 bp, Mus musculus
  siRNA target sequence for Evi2b (NM_146023.2,663-681).
cacaccgtcgttatatgtt

SEQ ID NO: 759447 - DNA, 19 bp, Mus musculus
  siRNA target sequence for Evi2b (NM_146023.2,667-685).
ccgtcgttatatgttacaa

SEQ ID NO: 759448 - DNA, 19 bp, Mus musculus
  siRNA target sequence for Evi2b (NM_146023.2,669-687).
gtcgttatatgttacaact

SEQ ID NO: 759449 - DNA, 19 bp, Mus musculus
  siRNA target sequence for Evi2b (NM_146023.2,812-830).
cttcaagcccacttactta

SEQ ID NO: 759450 - DNA, 19 bp, Mus musculus
  siRNA target sequence for Evi2b (NM_146023.2,815-833).
caagcccacttacttataa

SEQ ID NO: 759451 - DNA, 19 bp, Mus musculus
  siRNA target sequence for Evi2b (NM_146023.2,819-837).
cccacttacttataacatt

SEQ ID NO: 759452 - DNA, 19 bp, Mus musculus
  siRNA target sequence for Evi2b (NM_146023.2,850-868).
gaatcagcggtcaacaact

SEQ ID NO: 759453 - DNA, 19 bp, Mus musculus
  siRNA target sequence for Evi2b (NM_146023.2,867-885).
ctccttgcctcaaacatca

SEQ ID NO: 759454 - DNA, 19 bp, Mus musculus
  siRNA target sequence for Evi2b (NM_146023.2,1018-1036).
gaagtagagtctactcata

SEQ ID NO: 759455 - DNA, 19 bp, Mus musculus
  siRNA target sequence for Evi2b (NM_146023.2,1033-1051).
cataatcagcccacaaaat

SEQ ID NO: 759456 - DNA, 19 bp, Mus musculus
  siRNA target sequence for Evi2b (NM_146023.2,1046-1064).
caaaatcaacaccaactat

SEQ ID NO: 759457 - DNA, 19 bp, Mus musculus
  siRNA target sequence for Evi2b (NM_146023.2,1159-1177).
gcaattgctgccatattaa

SEQ ID NO: 759458 - DNA, 19 bp, Mus musculus
  siRNA target sequence for Evi2b (NM_146023.2,1169-1187).
ccatattaatcggtactat

SEQ ID NO: 759459 - DNA, 19 bp, Mus musculus
  siRNA target sequence for Evi2b (NM_146023.2,1170-1188).
catattaatcggtactatt

SEQ ID NO: 759460 - DNA, 19 bp, Mus musculus
  siRNA target sequence for Evi2b (NM_146023.2,1196-1214).
ctatgttggtagctatact

SEQ ID NO: 759461 - DNA, 19 bp, Mus musculus
  siRNA target sequence for Evi2b (NM_146023.2,1203-1221).
ggtagctatactcatgatt

SEQ ID NO: 759462 - DNA, 19 bp, Mus musculus
  siRNA target sequence for Evi2b (NM_146023.2,1204-1222).
gtagctatactcatgatta

SEQ ID NO: 759463 - DNA, 19 bp, Mus musculus
  siRNA target sequence for Evi2b (NM_146023.2,1245-1263).
gccagtcttaaatgatcaa

SEQ ID NO: 759464 - DNA, 19 bp, Mus musculus
  siRNA target sequence for Evi2b (NM_146023.2,1304-1322).
cagaaatgtgtatggataa

SEQ ID NO: 759465 - DNA, 19 bp, Mus musculus
  siRNA target sequence for Evi2b (NM_146023.2,1395-1413).
cacactgctagcagatgat

SEQ ID NO: 759466 - DNA, 19 bp, Mus musculus
  siRNA target sequence for Evi2b (NM_146023.2,1397-1415).
cactgctagcagatgattt

SEQ ID NO: 759467 - DNA, 19 bp, Mus musculus
  siRNA target sequence for Evi2b (NM_146023.2,1417-1435).
gaagttaagttgtttgaat

SEQ ID NO: 759468 - DNA, 19 bp, Mus musculus
  siRNA target sequence for Evi2b (NM_146023.2,1420-1438).
gttaagttgtttgaatcaa

SEQ ID NO: 759469 - DNA, 19 bp, Mus musculus
  siRNA target sequence for Evi2b (NM_146023.2,1461-1479).
caacctcaagactgataat

SEQ ID NO: 759470 - DNA, 19 bp, Mus musculus
  siRNA target sequence for Evi2b (NM_146023.2,1467-1485).
caagactgataatgtagaa

SEQ ID NO: 759471 - DNA, 19 bp, Mus musculus
  siRNA target sequence for Evi2b (NM_146023.2,1470-1488).
gactgataatgtagaagtt

SEQ ID NO: 759472 - DNA, 19 bp, Mus musculus
  siRNA target sequence for Evi2b (NM_146023.2,1667-1685).
catctccagatggtctaaa

SEQ ID NO: 759473 - DNA, 19 bp, Mus musculus
  siRNA target sequence for Evi2b (NM_146023.2,1670-1688).
ctccagatggtctaaatca

SEQ ID NO: 759474 - DNA, 19 bp, Mus musculus
  siRNA target sequence for Evi2b (NM_146023.2,1673-1691).
cagatggtctaaatcaagt

SEQ ID NO: 759475 - DNA, 19 bp, Mus musculus
  siRNA target sequence for Evi2b (NM_146023.2,1730-1748).
cgccaccccctgactcatt

SEQ ID NO: 759476 - DNA, 19 bp, Mus musculus
  siRNA target sequence for Evi2b (NM_146023.2,1731-1749).
gccaccccctgactcattt

SEQ ID NO: 759477 - DNA, 19 bp, Mus musculus
  siRNA target sequence for Evi2b (NM_146023.2,1732-1750).
ccaccccctgactcattta

SEQ ID NO: 759478 - DNA, 19 bp, Mus musculus
  siRNA target sequence for Evi2b (NM_146023.2,1736-1754).
cccctgactcatttaatgt

SEQ ID NO: 759479 - DNA, 19 bp, Mus musculus
  siRNA target sequence for Evi2b (NM_146023.2,1766-1784).
caggagattttataaacaa

SEQ ID NO: 759480 - DNA, 19 bp, Mus musculus
  siRNA target sequence for BC034054 (NM_146025.1,312-330).
ggacagcagcttacacaaa

SEQ ID NO: 759481 - DNA, 19 bp, Mus musculus
  siRNA target sequence for BC034054 (NM_146025.1,478-496).
ctgcgctcgcctctacatt

SEQ ID NO: 759482 - DNA, 19 bp, Mus musculus
  siRNA target sequence for BC034054 (NM_146025.1,509-527).
ccccagccagtggatcttt

SEQ ID NO: 759483 - DNA, 19 bp, Mus musculus
  siRNA target sequence for BC034054 (NM_146025.1,511-529).
ccagccagtggatctttct

SEQ ID NO: 759484 - DNA, 19 bp, Mus musculus
  siRNA target sequence for BC034054 (NM_146025.1,776-794).
ccatcggcttggacaagaa

SEQ ID NO: 759485 - DNA, 19 bp, Mus musculus
  siRNA target sequence for BC022765 (NM_146026.1,287-305).
gaccttcctccggaaaaaa

SEQ ID NO: 759486 - DNA, 19 bp, Mus musculus
  siRNA target sequence for BC022765 (NM_146026.1,315-333).
cccaaagtgctctacgaaa

SEQ ID NO: 759487 - DNA, 19 bp, Mus musculus
  siRNA target sequence for BC022765 (NM_146026.1,316-334).
ccaaagtgctctacgaaat

SEQ ID NO: 759488 - DNA, 19 bp, Mus musculus
  siRNA target sequence for BC022765 (NM_146026.1,393-411).
gaccctcacagcgacttta

SEQ ID NO: 759489 - DNA, 19 bp, Mus musculus
  siRNA target sequence for BC022765 (NM_146026.1,396-414).
cctcacagcgactttaaca

SEQ ID NO: 759490 - DNA, 19 bp, Mus musculus
  siRNA target sequence for BC022765 (NM_146026.1,470-488).
caactcaggccgcttcaaa

SEQ ID NO: 759491 - DNA, 19 bp, Mus musculus
  siRNA target sequence for BC022765 (NM_146026.1,521-539).
gaaccccaacctctttgat

SEQ ID NO: 759492 - DNA, 19 bp, Mus musculus
  siRNA target sequence for D11Moh48 (NM_146027.1,99-117).
cttgttcctgcgactgttt

SEQ ID NO: 759493 - DNA, 19 bp, Mus musculus
  siRNA target sequence for D11Moh48 (NM_146027.1,102-120).
gttcctgcgactgttttgt

SEQ ID NO: 759494 - DNA, 19 bp, Mus musculus
  siRNA target sequence for D11Moh48 (NM_146027.1,277-295).
gaagacacacgctgtgatt

SEQ ID NO: 759495 - DNA, 19 bp, Mus musculus
  siRNA target sequence for D11Moh48 (NM_146027.1,540-558).
gctatcacaacaccttttt

SEQ ID NO: 759496 - DNA, 19 bp, Mus musculus
  siRNA target sequence for D11Moh48 (NM_146027.1,628-646).
gggaggtgcccggaatatt

SEQ ID NO: 759497 - DNA, 19 bp, Mus musculus
  siRNA target sequence for D11Moh48 (NM_146027.1,629-647).
ggaggtgcccggaatattt

SEQ ID NO: 759498 - DNA, 19 bp, Mus musculus
  siRNA target sequence for D11Moh48 (NM_146027.1,632-650).
ggtgcccggaatatttcca

SEQ ID NO: 759499 - DNA, 19 bp, Mus musculus
  siRNA target sequence for D11Moh48 (NM_146027.1,633-651).
gtgcccggaatatttccaa

SEQ ID NO: 759500 - DNA, 19 bp, Mus musculus
  siRNA target sequence for D11Moh48 (NM_146027.1,732-750).
ggcagggcctctttgactt

SEQ ID NO: 759501 - DNA, 19 bp, Mus musculus
  siRNA target sequence for D11Moh48 (NM_146027.1,836-854).
cggcatcaagggaacatca

SEQ ID NO: 759502 - DNA, 19 bp, Mus musculus
  siRNA target sequence for D11Moh48 (NM_146027.1,1004-1022).
ccatccaggtcggtattca

SEQ ID NO: 759503 - DNA, 19 bp, Mus musculus
  siRNA target sequence for D11Moh48 (NM_146027.1,1005-1023).
catccaggtcggtattcaa

SEQ ID NO: 759504 - DNA, 19 bp, Mus musculus
  siRNA target sequence for BC006965 (NM_146031.1,92-110).
gggcagacccccttggatt

SEQ ID NO: 759505 - DNA, 19 bp, Mus musculus
  siRNA target sequence for BC006965 (NM_146031.1,93-111).
ggcagacccccttggattt

SEQ ID NO: 759506 - DNA, 19 bp, Mus musculus
  siRNA target sequence for BC006965 (NM_146031.1,112-130).
gcccacgtggagtttggat

SEQ ID NO: 759507 - DNA, 19 bp, Mus musculus
  siRNA target sequence for BC006965 (NM_146031.1,113-131).
cccacgtggagtttggata

SEQ ID NO: 759508 - DNA, 19 bp, Mus musculus
  siRNA target sequence for BC006965 (NM_146031.1,114-132).
ccacgtggagtttggatat

SEQ ID NO: 759509 - DNA, 19 bp, Mus musculus
  siRNA target sequence for 2610024I03Rik (NM_146032.2,124-142).
gccggaggagacgagaata

SEQ ID NO: 759510 - DNA, 19 bp, Mus musculus
  siRNA target sequence for 2610024I03Rik (NM_146032.2,125-143).
ccggaggagacgagaataa

SEQ ID NO: 759511 - DNA, 19 bp, Mus musculus
  siRNA target sequence for 2610024I03Rik (NM_146032.2,164-182).
ccggatcgaaggcaaacaa

SEQ ID NO: 759512 - DNA, 19 bp, Mus musculus
  siRNA target sequence for 2610024I03Rik (NM_146032.2,165-183).
cggatcgaaggcaaacaaa

SEQ ID NO: 759513 - DNA, 19 bp, Mus musculus
  siRNA target sequence for 2610024I03Rik (NM_146032.2,167-185).
gatcgaaggcaaacaaaga

SEQ ID NO: 759514 - DNA, 19 bp, Mus musculus
  siRNA target sequence for 2610024I03Rik (NM_146032.2,170-188).
cgaaggcaaacaaagagtt

SEQ ID NO: 759515 - DNA, 19 bp, Mus musculus
  siRNA target sequence for 2610024I03Rik (NM_146032.2,271-289).
cggtacaggggctactgtt

SEQ ID NO: 759516 - DNA, 19 bp, Mus musculus
  siRNA target sequence for 2610024I03Rik (NM_146032.2,309-327).
ccggaaaacactcaacttt

SEQ ID NO: 759517 - DNA, 19 bp, Mus musculus
  siRNA target sequence for 2610024I03Rik (NM_146032.2,310-328).
cggaaaacactcaacttta

SEQ ID NO: 759518 - DNA, 19 bp, Mus musculus
  siRNA target sequence for 2610024I03Rik (NM_146032.2,345-363).
caaattcacggggaagaaa

SEQ ID NO: 759519 - DNA, 19 bp, Mus musculus
  siRNA target sequence for 2610024I03Rik (NM_146032.2,373-391).
gagctcctgactgataaca

SEQ ID NO: 759520 - DNA, 19 bp, Mus musculus
  siRNA target sequence for 2610024I03Rik (NM_146032.2,408-426).
gctgatggatgcagaaaga

SEQ ID NO: 759521 - DNA, 19 bp, Mus musculus
  siRNA target sequence for 2610024I03Rik (NM_146032.2,492-510).
gctgtctcgccttcgaaaa

SEQ ID NO: 759522 - DNA, 19 bp, Mus musculus
  siRNA target sequence for 2610024I03Rik (NM_146032.2,611-629).
gaatgttgcgctttgaaca

SEQ ID NO: 759523 - DNA, 19 bp, Mus musculus
  siRNA target sequence for 2610024I03Rik (NM_146032.2,668-686).
gcaaaactatctatgagaa

SEQ ID NO: 759524 - DNA, 19 bp, Mus musculus
  siRNA target sequence for 2610024I03Rik (NM_146032.2,687-705).
gctagccagtgcattcaca

SEQ ID NO: 759525 - DNA, 19 bp, Mus musculus
  siRNA target sequence for 2610024I03Rik (NM_146032.2,760-778).
cgctactgtgcatacaaca

SEQ ID NO: 759526 - DNA, 19 bp, Mus musculus
  siRNA target sequence for 2610024I03Rik (NM_146032.2,782-800).
gggaccagtcagctatcaa

SEQ ID NO: 759527 - DNA, 19 bp, Mus musculus
  siRNA target sequence for 2610024I03Rik (NM_146032.2,783-801).
ggaccagtcagctatcaat

SEQ ID NO: 759528 - DNA, 19 bp, Mus musculus
  siRNA target sequence for 2610024I03Rik (NM_146032.2,843-861).
gctccttgctgaaaaactt

SEQ ID NO: 759529 - DNA, 19 bp, Mus musculus
  siRNA target sequence for 2610024I03Rik (NM_146032.2,938-956).
ccgtgaagatcgacaaagt

SEQ ID NO: 759530 - DNA, 19 bp, Mus musculus
  siRNA target sequence for 2610024I03Rik (NM_146032.2,1007-1025).
ctgaaagtgaagaaacgaa

SEQ ID NO: 759531 - DNA, 19 bp, Mus musculus
  siRNA target sequence for 2610024I03Rik (NM_146032.2,1136-1154).
ctgggaaggtgtcaaatct

SEQ ID NO: 759532 - DNA, 19 bp, Mus musculus
  siRNA target sequence for 2610024I03Rik (NM_146032.2,1488-1506).
cagagttctcaaatatgca

SEQ ID NO: 759533 - DNA, 19 bp, Mus musculus
  siRNA target sequence for 2610024I03Rik (NM_146032.2,1559-1577).
ccgacgtgcaagaactcat

SEQ ID NO: 759534 - DNA, 19 bp, Mus musculus
  siRNA target sequence for 2610024I03Rik (NM_146032.2,1630-1648).
gcaaacgactctcatcaaa

SEQ ID NO: 759535 - DNA, 19 bp, Mus musculus
  siRNA target sequence for 2610024I03Rik (NM_146032.2,1684-1702).
ctggttgaacggtttgagt

SEQ ID NO: 759536 - DNA, 19 bp, Mus musculus
  siRNA target sequence for 2610024I03Rik (NM_146032.2,1690-1708).
gaacggtttgagtcctttt

SEQ ID NO: 759537 - DNA, 19 bp, Mus musculus
  siRNA target sequence for 2610024I03Rik (NM_146032.2,1864-1882).
ggcctcacaggctacatca

SEQ ID NO: 759538 - DNA, 19 bp, Mus musculus
  siRNA target sequence for AI035571 (NM_146033.1,219-237).
gaagtgatcgggaaaggta

SEQ ID NO: 759539 - DNA, 19 bp, Mus musculus
  siRNA target sequence for AI035571 (NM_146033.1,249-267).
gccggaagactgttgtcta

SEQ ID NO: 759540 - DNA, 19 bp, Mus musculus
  siRNA target sequence for AI035571 (NM_146033.1,252-270).
ggaagactgttgtctagta

SEQ ID NO: 759541 - DNA, 19 bp, Mus musculus
  siRNA target sequence for AI035571 (NM_146033.1,253-271).
gaagactgttgtctagtaa

SEQ ID NO: 759542 - DNA, 19 bp, Mus musculus
  siRNA target sequence for AI035571 (NM_146033.1,260-278).
gttgtctagtaagaatgtt

SEQ ID NO: 759543 - DNA, 19 bp, Mus musculus
  siRNA target sequence for AI035571 (NM_146033.1,263-281).
gtctagtaagaatgttcat

SEQ ID NO: 759544 - DNA, 19 bp, Mus musculus
  siRNA target sequence for AI035571 (NM_146033.1,265-283).
ctagtaagaatgttcatgt

SEQ ID NO: 759545 - DNA, 19 bp, Mus musculus
  siRNA target sequence for AI035571 (NM_146033.1,407-425).
gtacacagccctcatgttt

SEQ ID NO: 759546 - DNA, 19 bp, Mus musculus
  siRNA target sequence for AI035571 (NM_146033.1,426-444).
gctgcgctttccggtaata

SEQ ID NO: 759547 - DNA, 19 bp, Mus musculus
  siRNA target sequence for AI035571 (NM_146033.1,427-445).
ctgcgctttccggtaataa

SEQ ID NO: 759548 - DNA, 19 bp, Mus musculus
  siRNA target sequence for AI035571 (NM_146033.1,475-493).
gcgcagagaccgatgttgt

SEQ ID NO: 759549 - DNA, 19 bp, Mus musculus
  siRNA target sequence for AI035571 (NM_146033.1,546-564).
gattgcgtggctatcatca

SEQ ID NO: 759550 - DNA, 19 bp, Mus musculus
  siRNA target sequence for AI035571 (NM_146033.1,555-573).
gctatcatcaacaatttct

SEQ ID NO: 759551 - DNA, 19 bp, Mus musculus
  siRNA target sequence for AI035571 (NM_146033.1,577-595).
ctcgagagagactggatta

SEQ ID NO: 759552 - DNA, 19 bp, Mus musculus
  siRNA target sequence for AI035571 (NM_146033.1,579-597).
cgagagagactggattatt

SEQ ID NO: 759553 - DNA, 19 bp, Mus musculus
  siRNA target sequence for AI035571 (NM_146033.1,582-600).
gagagactggattattaca

SEQ ID NO: 759554 - DNA, 19 bp, Mus musculus
  siRNA target sequence for AI035571 (NM_146033.1,584-602).
gagactggattattacact

SEQ ID NO: 759555 - DNA, 19 bp, Mus musculus
  siRNA target sequence for AI035571 (NM_146033.1,586-604).
gactggattattacactaa

SEQ ID NO: 759556 - DNA, 19 bp, Mus musculus
  siRNA target sequence for AI035571 (NM_146033.1,628-646).
caaaactgcctccaaagtt

SEQ ID NO: 759557 - DNA, 19 bp, Mus musculus
  siRNA target sequence for AI035571 (NM_146033.1,654-672).
ccgctacacaaaatcatca

SEQ ID NO: 759558 - DNA, 19 bp, Mus musculus
  siRNA target sequence for AI035571 (NM_146033.1,738-756).
gcagctgctctcggtaaat

SEQ ID NO: 759559 - DNA, 19 bp, Mus musculus
  siRNA target sequence for AI035571 (NM_146033.1,741-759).
gctgctctcggtaaatgct

SEQ ID NO: 759560 - DNA, 19 bp, Mus musculus
  siRNA target sequence for AI035571 (NM_146033.1,742-760).
ctgctctcggtaaatgcta

SEQ ID NO: 759561 - DNA, 19 bp, Mus musculus
  siRNA target sequence for AI035571 (NM_146033.1,757-775).
gctacagggtgatggattt

SEQ ID NO: 759562 - DNA, 19 bp, Mus musculus
  siRNA target sequence for AI035571 (NM_146033.1,781-799).
gtgagaaatgcatgaaaca

SEQ ID NO: 759563 - DNA, 19 bp, Mus musculus
  siRNA target sequence for AI035571 (NM_146033.1,894-912).
ctggacaccctgatcagaa

SEQ ID NO: 759564 - DNA, 19 bp, Mus musculus
  siRNA target sequence for AI035571 (NM_146033.1,976-994).
gcatccggaagtttccata

SEQ ID NO: 759565 - DNA, 19 bp, Mus musculus
  siRNA target sequence for AI035571 (NM_146033.1,980-998).
ccggaagtttccatactgt

SEQ ID NO: 759566 - DNA, 19 bp, Mus musculus
  siRNA target sequence for AI035571 (NM_146033.1,1030-1048).
gcatcgctccagttgaaat

SEQ ID NO: 759567 - DNA, 19 bp, Mus musculus
  siRNA target sequence for AI035571 (NM_146033.1,1034-1052).
cgctccagttgaaattgta

SEQ ID NO: 759568 - DNA, 19 bp, Mus musculus
  siRNA target sequence for AI035571 (NM_146033.1,1035-1053).
gctccagttgaaattgtaa

SEQ ID NO: 759569 - DNA, 19 bp, Mus musculus
  siRNA target sequence for AI035571 (NM_146033.1,1050-1068).
gtaaggctcctcttttgct

SEQ ID NO: 759570 - DNA, 19 bp, Mus musculus
  siRNA target sequence for Mgea6 (NM_146034.1,160-178).
gttggaattggcagtatgt

SEQ ID NO: 759571 - DNA, 19 bp, Mus musculus
  siRNA target sequence for Mgea6 (NM_146034.1,224-242).
ggcttccgatcaattcgaa

SEQ ID NO: 759572 - DNA, 19 bp, Mus musculus
  siRNA target sequence for Mgea6 (NM_146034.1,283-301).
gctttctgcactaattgaa

SEQ ID NO: 759573 - DNA, 19 bp, Mus musculus
  siRNA target sequence for Mgea6 (NM_146034.1,422-440).
gttgaaggatcacaaatat

SEQ ID NO: 759574 - DNA, 19 bp, Mus musculus
  siRNA target sequence for Mgea6 (NM_146034.1,550-568).
cgagctgatggctgatatt

SEQ ID NO: 759575 - DNA, 19 bp, Mus musculus
  siRNA target sequence for Mgea6 (NM_146034.1,863-881).
gtcacgagcctgctaaaga

SEQ ID NO: 759576 - DNA, 19 bp, Mus musculus
  siRNA target sequence for Mgea6 (NM_146034.1,1414-1432).
gcaggttatttctcatgaa

SEQ ID NO: 759577 - DNA, 19 bp, Mus musculus
  siRNA target sequence for Mgea6 (NM_146034.1,1417-1435).
ggttatttctcatgaaaaa

SEQ ID NO: 759578 - DNA, 19 bp, Mus musculus
  siRNA target sequence for Mgea6 (NM_146034.1,1634-1652).
ggccgacctccatctgaaa

SEQ ID NO: 759579 - DNA, 19 bp, Mus musculus
  siRNA target sequence for Mgea6 (NM_146034.1,1649-1667).
gaaacgagagcttttctct

SEQ ID NO: 759580 - DNA, 19 bp, Mus musculus
  siRNA target sequence for Mgea6 (NM_146034.1,1789-1807).
gtcaagctatgacagatta

SEQ ID NO: 759581 - DNA, 19 bp, Mus musculus
  siRNA target sequence for Mgea6 (NM_146034.1,1928-1946).
gatcggttttatcctaatt

SEQ ID NO: 759582 - DNA, 19 bp, Mus musculus
  siRNA target sequence for Mgea6 (NM_146034.1,2042-2060).
ggaaacggtaccaaagata

SEQ ID NO: 759583 - DNA, 19 bp, Mus musculus
  siRNA target sequence for Mgea6 (NM_146034.1,2047-2065).
cggtaccaaagataatctt

SEQ ID NO: 759584 - DNA, 19 bp, Mus musculus
  siRNA target sequence for Mgea6 (NM_146034.1,2177-2195).
ccaaggagccagttcatga

SEQ ID NO: 759585 - DNA, 19 bp, Mus musculus
  siRNA target sequence for Mgea6 (NM_146034.1,2240-2258).
gcagctcctcgagattatt

SEQ ID NO: 759586 - DNA, 19 bp, Mus musculus
  siRNA target sequence for Mgea6 (NM_146034.1,2241-2259).
cagctcctcgagattattt

SEQ ID NO: 759587 - DNA, 19 bp, Mus musculus
  siRNA target sequence for Mgea6 (NM_146034.1,2372-2390).
cccccacatcctgaaagta

SEQ ID NO: 759588 - DNA, 19 bp, Mus musculus
  siRNA target sequence for Mgea6 (NM_146034.1,2398-2416).
gctccccccagacttgatt

SEQ ID NO: 759589 - DNA, 19 bp, Mus musculus
  siRNA target sequence for Mgat2 (NM_146035.1,444-462).
gaggttccgcatctacaaa

SEQ ID NO: 759590 - DNA, 19 bp, Mus musculus
  siRNA target sequence for Mgat2 (NM_146035.1,507-525).
cgtcctctggagtagcaat

SEQ ID NO: 759591 - DNA, 19 bp, Mus musculus
  siRNA target sequence for Mgat2 (NM_146035.1,618-636).
ccgcagggtctcaaacgaa

SEQ ID NO: 759592 - DNA, 19 bp, Mus musculus
  siRNA target sequence for Mgat2 (NM_146035.1,619-637).
cgcagggtctcaaacgaat

SEQ ID NO: 759593 - DNA, 19 bp, Mus musculus
  siRNA target sequence for Mgat2 (NM_146035.1,704-722).
ccctggtgtaccagttgaa

SEQ ID NO: 759594 - DNA, 19 bp, Mus musculus
  siRNA target sequence for Mgat2 (NM_146035.1,861-879).
ggaagtcctagtcatcttt

SEQ ID NO: 759595 - DNA, 19 bp, Mus musculus
  siRNA target sequence for Mgat2 (NM_146035.1,970-988).
cagctgtacccgaatgagt

SEQ ID NO: 759596 - DNA, 19 bp, Mus musculus
  siRNA target sequence for Mgat2 (NM_146035.1,972-990).
gctgtacccgaatgagttt

SEQ ID NO: 759597 - DNA, 19 bp, Mus musculus
  siRNA target sequence for Mgat2 (NM_146035.1,993-1011).
gggtagtgaccctagagat

SEQ ID NO: 759598 - DNA, 19 bp, Mus musculus
  siRNA target sequence for Mgat2 (NM_146035.1,994-1012).
ggtagtgaccctagagatt

SEQ ID NO: 759599 - DNA, 19 bp, Mus musculus
  siRNA target sequence for Mgat2 (NM_146035.1,1044-1062).
gaagttggggtgcatcaat

SEQ ID NO: 759600 - DNA, 19 bp, Mus musculus
  siRNA target sequence for Mgat2 (NM_146035.1,1075-1093).
gactccttcggccattaca

SEQ ID NO: 759601 - DNA, 19 bp, Mus musculus
  siRNA target sequence for Mgat2 (NM_146035.1,1077-1095).
ctccttcggccattacaga

SEQ ID NO: 759602 - DNA, 19 bp, Mus musculus
  siRNA target sequence for Mgat2 (NM_146035.1,1096-1114).
gaggccaagttctcacaaa

SEQ ID NO: 759603 - DNA, 19 bp, Mus musculus
  siRNA target sequence for Mgat2 (NM_146035.1,1310-1328).
ccaccattcggagtttcta

SEQ ID NO: 759604 - DNA, 19 bp, Mus musculus
  siRNA target sequence for Mgat2 (NM_146035.1,1311-1329).
caccattcggagtttctat

SEQ ID NO: 759605 - DNA, 19 bp, Mus musculus
  siRNA target sequence for Mgat2 (NM_146035.1,1326-1344).
ctatggcattgctgacaaa

SEQ ID NO: 759606 - DNA, 19 bp, Mus musculus
  siRNA target sequence for Mgat2 (NM_146035.1,1337-1355).
ctgacaaagtagatgtgaa

SEQ ID NO: 759607 - DNA, 19 bp, Mus musculus
  siRNA target sequence for Mgat2 (NM_146035.1,1351-1369).
gtgaaaacttggaaatcga

SEQ ID NO: 759608 - DNA, 19 bp, Mus musculus
  siRNA target sequence for Mgat2 (NM_146035.1,1391-1409).
ccttgacccgagatgcata

SEQ ID NO: 759609 - DNA, 19 bp, Mus musculus
  siRNA target sequence for Mgat2 (NM_146035.1,1392-1410).
cttgacccgagatgcatat

SEQ ID NO: 759610 - DNA, 19 bp, Mus musculus
  siRNA target sequence for Mgat2 (NM_146035.1,1397-1415).
cccgagatgcatatcagaa

SEQ ID NO: 759611 - DNA, 19 bp, Mus musculus
  siRNA target sequence for Mgat2 (NM_146035.1,1402-1420).
gatgcatatcagaagctta

SEQ ID NO: 759612 - DNA, 19 bp, Mus musculus
  siRNA target sequence for Mgat2 (NM_146035.1,1406-1424).
catatcagaagcttatcga

SEQ ID NO: 759613 - DNA, 19 bp, Mus musculus
  siRNA target sequence for Mgat2 (NM_146035.1,1440-1458).
ctgtacttacgatgattat

SEQ ID NO: 759614 - DNA, 19 bp, Mus musculus
  siRNA target sequence for Mgat2 (NM_146035.1,1559-1577).
gtggtatgcatcacaagaa

SEQ ID NO: 759615 - DNA, 19 bp, Mus musculus
  siRNA target sequence for Mgat2 (NM_146035.1,1566-1584).
gcatcacaagaaaacatgt

SEQ ID NO: 759616 - DNA, 19 bp, Mus musculus
  siRNA target sequence for Mgat2 (NM_146035.1,1597-1615).
cagagtgcccaaattgagt

SEQ ID NO: 759617 - DNA, 19 bp, Mus musculus
  siRNA target sequence for Mgat2 (NM_146035.1,1601-1619).
gtgcccaaattgagtcatt

SEQ ID NO: 759618 - DNA, 19 bp, Mus musculus
  siRNA target sequence for Mgat2 (NM_146035.1,1604-1622).
cccaaattgagtcattatt

SEQ ID NO: 759619 - DNA, 19 bp, Mus musculus
  siRNA target sequence for Mgat2 (NM_146035.1,1605-1623).
ccaaattgagtcattatta

SEQ ID NO: 759620 - DNA, 19 bp, Mus musculus
  siRNA target sequence for Mgat2 (NM_146035.1,1606-1624).
caaattgagtcattattaa

SEQ ID NO: 759621 - DNA, 19 bp, Mus musculus
  siRNA target sequence for Mgat2 (NM_146035.1,1612-1630).
gagtcattattaaatagca

SEQ ID NO: 759622 - DNA, 19 bp, Mus musculus
  siRNA target sequence for Mgat2 (NM_146035.1,1641-1659).
cctgtttccggaaactcta

SEQ ID NO: 759623 - DNA, 19 bp, Mus musculus
  siRNA target sequence for Mgat2 (NM_146035.1,1711-1729).
ggagggtggggagatatta

SEQ ID NO: 759624 - DNA, 19 bp, Mus musculus
  siRNA target sequence for Mgat2 (NM_146035.1,1735-1753).
catgaactctgtaaaagtt

SEQ ID NO: 759625 - DNA, 19 bp, Mus musculus
  siRNA target sequence for Ahsa1 (NM_146036.1,179-197).
gccaccaacgtcaacaact

SEQ ID NO: 759626 - DNA, 19 bp, Mus musculus
  siRNA target sequence for Ahsa1 (NM_146036.1,256-274).
cctggccgttcgagtagaa

SEQ ID NO: 759627 - DNA, 19 bp, Mus musculus
  siRNA target sequence for Ahsa1 (NM_146036.1,257-275).
ctggccgttcgagtagaaa

SEQ ID NO: 759628 - DNA, 19 bp, Mus musculus
  siRNA target sequence for Ahsa1 (NM_146036.1,259-277).
ggccgttcgagtagaaaat

SEQ ID NO: 759629 - DNA, 19 bp, Mus musculus
  siRNA target sequence for Ahsa1 (NM_146036.1,261-279).
ccgttcgagtagaaaatga

SEQ ID NO: 759630 - DNA, 19 bp, Mus musculus
  siRNA target sequence for Ahsa1 (NM_146036.1,262-280).
cgttcgagtagaaaatgaa

SEQ ID NO: 759631 - DNA, 19 bp, Mus musculus
  siRNA target sequence for Ahsa1 (NM_146036.1,337-355).
caacaggaaaggcaaactt

SEQ ID NO: 759632 - DNA, 19 bp, Mus musculus
  siRNA target sequence for Ahsa1 (NM_146036.1,368-386).
gagtggaccatcaaactga

SEQ ID NO: 759633 - DNA, 19 bp, Mus musculus
  siRNA target sequence for Ahsa1 (NM_146036.1,391-409).
gacaggtacctctaagtca

SEQ ID NO: 759634 - DNA, 19 bp, Mus musculus
  siRNA target sequence for Ahsa1 (NM_146036.1,433-451).
ggaaatccccaatttgtct

SEQ ID NO: 759635 - DNA, 19 bp, Mus musculus
  siRNA target sequence for Ahsa1 (NM_146036.1,513-531).
caaatctcgtggccttaat

SEQ ID NO: 759636 - DNA, 19 bp, Mus musculus
  siRNA target sequence for Ahsa1 (NM_146036.1,563-581).
gcagtgggaatttacatca

SEQ ID NO: 759637 - DNA, 19 bp, Mus musculus
  siRNA target sequence for Ahsa1 (NM_146036.1,586-604).
cctcaagacagagtttact

SEQ ID NO: 759638 - DNA, 19 bp, Mus musculus
  siRNA target sequence for Ahsa1 (NM_146036.1,613-631).
gatcttgcccacagtgaat

SEQ ID NO: 759639 - DNA, 19 bp, Mus musculus
  siRNA target sequence for Ahsa1 (NM_146036.1,655-673).
ccagccagcactaaagact

SEQ ID NO: 759640 - DNA, 19 bp, Mus musculus
  siRNA target sequence for Ahsa1 (NM_146036.1,687-705).
ctaagtctgctccttcaaa

SEQ ID NO: 759641 - DNA, 19 bp, Mus musculus
  siRNA target sequence for Ahsa1 (NM_146036.1,778-796).
cccagaggagctctataga

SEQ ID NO: 759642 - DNA, 19 bp, Mus musculus
  siRNA target sequence for Ahsa1 (NM_146036.1,780-798).
cagaggagctctatagagt

SEQ ID NO: 759643 - DNA, 19 bp, Mus musculus
  siRNA target sequence for Ahsa1 (NM_146036.1,892-910).
cgtcaccggggagtttact

SEQ ID NO: 759644 - DNA, 19 bp, Mus musculus
  siRNA target sequence for Ahsa1 (NM_146036.1,914-932).
ctggtccccgagaaacaca

SEQ ID NO: 759645 - DNA, 19 bp, Mus musculus
  siRNA target sequence for Ahsa1 (NM_146036.1,916-934).
ggtccccgagaaacacatt

SEQ ID NO: 759646 - DNA, 19 bp, Mus musculus
  siRNA target sequence for Ahsa1 (NM_146036.1,920-938).
cccgagaaacacattgcta

SEQ ID NO: 759647 - DNA, 19 bp, Mus musculus
  siRNA target sequence for Ahsa1 (NM_146036.1,940-958).
gaagtggaggtttaagtca

SEQ ID NO: 759648 - DNA, 19 bp, Mus musculus
  siRNA target sequence for Ahsa1 (NM_146036.1,1076-1094).
ggctggcagcggtactact

SEQ ID NO: 759649 - DNA, 19 bp, Mus musculus
  siRNA target sequence for Ahsa1 (NM_146036.1,1077-1095).
gctggcagcggtactactt

SEQ ID NO: 759650 - DNA, 19 bp, Mus musculus
  siRNA target sequence for Ahsa1 (NM_146036.1,1078-1096).
ctggcagcggtactacttt

SEQ ID NO: 759651 - DNA, 19 bp, Mus musculus
  siRNA target sequence for D430033N04Rik (NM_146039.2,509-527).
cagacgggccaggaaagaa

SEQ ID NO: 759652 - DNA, 19 bp, Mus musculus
  siRNA target sequence for D430033N04Rik (NM_146039.2,904-922).
gagagaagcggcacaaaga

SEQ ID NO: 759653 - DNA, 19 bp, Mus musculus
  siRNA target sequence for D430033N04Rik (NM_146039.2,949-967).
gccgaagtcatgcagataa

SEQ ID NO: 759654 - DNA, 19 bp, Mus musculus
  siRNA target sequence for D430033N04Rik (NM_146039.2,950-968).
ccgaagtcatgcagataaa

SEQ ID NO: 759655 - DNA, 19 bp, Mus musculus
  siRNA target sequence for D430033N04Rik (NM_146039.2,993-1011).
cacaagaaaagggaattga

SEQ ID NO: 759656 - DNA, 19 bp, Mus musculus
  siRNA target sequence for D430033N04Rik (NM_146039.2,1044-1062).
gctactgggcctgatgaat

SEQ ID NO: 759657 - DNA, 19 bp, Mus musculus
  siRNA target sequence for D430033N04Rik (NM_146039.2,1045-1063).
ctactgggcctgatgaata

SEQ ID NO: 759658 - DNA, 19 bp, Mus musculus
  siRNA target sequence for D430033N04Rik (NM_146039.2,1067-1085).
gcccaacttagaagatgat

SEQ ID NO: 759659 - DNA, 19 bp, Mus musculus
  siRNA target sequence for D430033N04Rik (NM_146039.2,1214-1232).
ggcgatcagtgcagagaat

SEQ ID NO: 759660 - DNA, 19 bp, Mus musculus
  siRNA target sequence for D430033N04Rik (NM_146039.2,1233-1251).
gaaagggttggcgagttat

SEQ ID NO: 759661 - DNA, 19 bp, Mus musculus
  siRNA target sequence for D430033N04Rik (NM_146039.2,1239-1257).
gttggcgagttatctttga

SEQ ID NO: 759662 - DNA, 19 bp, Mus musculus
  siRNA target sequence for D430033N04Rik (NM_146039.2,1245-1263).
gagttatctttgaaaatgt

SEQ ID NO: 759663 - DNA, 19 bp, Mus musculus
  siRNA target sequence for D430033N04Rik (NM_146039.2,1272-1290).
caaggttggacggagtata

SEQ ID NO: 759664 - DNA, 19 bp, Mus musculus
  siRNA target sequence for D430033N04Rik (NM_146039.2,1275-1293).
ggttggacggagtatacaa

SEQ ID NO: 759665 - DNA, 19 bp, Mus musculus
  siRNA target sequence for D430033N04Rik (NM_146039.2,1276-1294).
gttggacggagtatacaaa

SEQ ID NO: 759666 - DNA, 19 bp, Mus musculus
  siRNA target sequence for BC006933 (NM_146040.1,93-111).
cccagatccccaaagaagt

SEQ ID NO: 759667 - DNA, 19 bp, Mus musculus
  siRNA target sequence for BC006933 (NM_146040.1,164-182).
gatgatgttcccatgcaaa

SEQ ID NO: 759668 - DNA, 19 bp, Mus musculus
  siRNA target sequence for BC006933 (NM_146040.1,243-261).
gcttccgttccaaatactt

SEQ ID NO: 759669 - DNA, 19 bp, Mus musculus
  siRNA target sequence for BC006933 (NM_146040.1,399-417).
cataccctgtgatgaatga

SEQ ID NO: 759670 - DNA, 19 bp, Mus musculus
  siRNA target sequence for BC006933 (NM_146040.1,488-506).
cttcgggtagcctttcagt

SEQ ID NO: 759671 - DNA, 19 bp, Mus musculus
  siRNA target sequence for BC006933 (NM_146040.1,503-521).
cagttccccaccaaaaaat

SEQ ID NO: 759672 - DNA, 19 bp, Mus musculus
  siRNA target sequence for BC006933 (NM_146040.1,551-569).
cacttgctggacagtaaga

SEQ ID NO: 759673 - DNA, 19 bp, Mus musculus
  siRNA target sequence for BC006933 (NM_146040.1,560-578).
gacagtaagacggatctta

SEQ ID NO: 759674 - DNA, 19 bp, Mus musculus
  siRNA target sequence for BC006933 (NM_146040.1,570-588).
cggatcttagaagaaagaa

SEQ ID NO: 759675 - DNA, 19 bp, Mus musculus
  siRNA target sequence for BC006933 (NM_146040.1,650-668).
gctgagagccaagagaatt

SEQ ID NO: 759676 - DNA, 19 bp, Mus musculus
  siRNA target sequence for BC006933 (NM_146040.1,680-698).
ctgaaaagggccatgaaca

SEQ ID NO: 759677 - DNA, 19 bp, Mus musculus
  siRNA target sequence for BC006933 (NM_146040.1,687-705).
gggccatgaacatcaaaga

SEQ ID NO: 759678 - DNA, 19 bp, Mus musculus
  siRNA target sequence for BC006933 (NM_146040.1,725-743).
cagttgttggcggaattga

SEQ ID NO: 759679 - DNA, 19 bp, Mus musculus
  siRNA target sequence for BC006933 (NM_146040.1,727-745).
gttgttggcggaattgaat

SEQ ID NO: 759680 - DNA, 19 bp, Mus musculus
  siRNA target sequence for BC006933 (NM_146040.1,860-878).
gcacgaccccctgaaaagt

SEQ ID NO: 759681 - DNA, 19 bp, Mus musculus
  siRNA target sequence for BC006933 (NM_146040.1,861-879).
cacgaccccctgaaaagtt

SEQ ID NO: 759682 - DNA, 19 bp, Mus musculus
  siRNA target sequence for BC006933 (NM_146040.1,962-980).
gggaaatgccagacgtata

SEQ ID NO: 759683 - DNA, 19 bp, Mus musculus
  siRNA target sequence for BC006933 (NM_146040.1,964-982).
gaaatgccagacgtataga

SEQ ID NO: 759684 - DNA, 19 bp, Mus musculus
  siRNA target sequence for BC006933 (NM_146040.1,983-1001).
cgtcatcggatatcttctt

SEQ ID NO: 759685 - DNA, 19 bp, Mus musculus
  siRNA target sequence for BC006933 (NM_146040.1,984-1002).
gtcatcggatatcttcttt

SEQ ID NO: 759686 - DNA, 19 bp, Mus musculus
  siRNA target sequence for BC006933 (NM_146040.1,999-1017).
ctttccgctcagtgaaaga

SEQ ID NO: 759687 - DNA, 19 bp, Mus musculus
  siRNA target sequence for BC006933 (NM_146040.1,1036-1054).
ggaaaacattgccataact

SEQ ID NO: 759688 - DNA, 19 bp, Mus musculus
  siRNA target sequence for BC006933 (NM_146040.1,1053-1071).
ctgtgcgtgataaagtcta

SEQ ID NO: 759689 - DNA, 19 bp, Mus musculus
  siRNA target sequence for BC006933 (NM_146040.1,1057-1075).
gcgtgataaagtctatgat

SEQ ID NO: 759690 - DNA, 19 bp, Mus musculus
  siRNA target sequence for BC006933 (NM_146040.1,1058-1076).
cgtgataaagtctatgata

SEQ ID NO: 759691 - DNA, 19 bp, Mus musculus
  siRNA target sequence for BC006933 (NM_146040.1,1059-1077).
gtgataaagtctatgataa

SEQ ID NO: 759692 - DNA, 19 bp, Mus musculus
  siRNA target sequence for BC006933 (NM_146040.1,1106-1124).
cggcagaagaccatcgata

SEQ ID NO: 759693 - DNA, 19 bp, Mus musculus
  siRNA target sequence for BC006933 (NM_146040.1,1256-1274).
cgtggcatctgcaattgca

SEQ ID NO: 759694 - DNA, 19 bp, Mus musculus
  siRNA target sequence for BC006933 (NM_146040.1,1297-1315).
ccgctgtgctactggaatt

SEQ ID NO: 759695 - DNA, 19 bp, Mus musculus
  siRNA target sequence for BC006933 (NM_146040.1,1302-1320).
gtgctactggaattctcat

SEQ ID NO: 759696 - DNA, 19 bp, Mus musculus
  siRNA target sequence for BC006933 (NM_146040.1,1329-1347).
ccaagttctacggttatga

SEQ ID NO: 759697 - DNA, 19 bp, Mus musculus
  siRNA target sequence for BC006933 (NM_146040.1,1330-1348).
caagttctacggttatgat

SEQ ID NO: 759698 - DNA, 19 bp, Mus musculus
  siRNA target sequence for BC006933 (NM_146040.1,1333-1351).
gttctacggttatgataat

SEQ ID NO: 759699 - DNA, 19 bp, Mus musculus
  siRNA target sequence for BC025007 (NM_146042.2,316-334).
caagagtgccagtgtatct

SEQ ID NO: 759700 - DNA, 19 bp, Mus musculus
  siRNA target sequence for BC025007 (NM_146042.2,343-361).
ccctgcctgaaacagtata

SEQ ID NO: 759701 - DNA, 19 bp, Mus musculus
  siRNA target sequence for BC025007 (NM_146042.2,344-362).
cctgcctgaaacagtatat

SEQ ID NO: 759702 - DNA, 19 bp, Mus musculus
  siRNA target sequence for BC025007 (NM_146042.2,486-504).
gtatcagcggctcaagttt

SEQ ID NO: 759703 - DNA, 19 bp, Mus musculus
  siRNA target sequence for BC025007 (NM_146042.2,559-577).
cagaccgtgtgccatattt

SEQ ID NO: 759704 - DNA, 19 bp, Mus musculus
  siRNA target sequence for BC025007 (NM_146042.2,752-770).
gcccggtttgccgcattta

SEQ ID NO: 759705 - DNA, 19 bp, Mus musculus
  siRNA target sequence for BC025007 (NM_146042.2,754-772).
ccggtttgccgcatttaca

SEQ ID NO: 759706 - DNA, 19 bp, Mus musculus
  siRNA target sequence for BC025007 (NM_146042.2,755-773).
cggtttgccgcatttacat

SEQ ID NO: 759707 - DNA, 19 bp, Mus musculus
  siRNA target sequence for BC025007 (NM_146042.2,756-774).
ggtttgccgcatttacatt

SEQ ID NO: 759708 - DNA, 19 bp, Mus musculus
  siRNA target sequence for BC025007 (NM_146042.2,887-905).
ggccatgcaggaataagct

SEQ ID NO: 759709 - DNA, 19 bp, Mus musculus
  siRNA target sequence for BC025007 (NM_146042.2,954-972).
gatccttgtgggattaggt

SEQ ID NO: 759710 - DNA, 19 bp, Mus musculus
  siRNA target sequence for BC025007 (NM_146042.2,1009-1027).
gcctctccctgtataatct

SEQ ID NO: 759711 - DNA, 19 bp, Mus musculus
  siRNA target sequence for BC025007 (NM_146042.2,1046-1064).
gtcgcggcaagaagaaaaa

SEQ ID NO: 759712 - DNA, 19 bp, Mus musculus
  siRNA target sequence for BC025007 (NM_146042.2,1050-1068).
cggcaagaagaaaaagcat

SEQ ID NO: 759713 - DNA, 19 bp, Mus musculus
  siRNA target sequence for C130052I12Rik (NM_146047.1,94-112).
ctgcagctgagtgtttaca

SEQ ID NO: 759714 - DNA, 19 bp, Mus musculus
  siRNA target sequence for C130052I12Rik (NM_146047.1,128-146).
gccttggtgcagagaacaa

SEQ ID NO: 759715 - DNA, 19 bp, Mus musculus
  siRNA target sequence for C130052I12Rik (NM_146047.1,129-147).
ccttggtgcagagaacaat

SEQ ID NO: 759716 - DNA, 19 bp, Mus musculus
  siRNA target sequence for C130052I12Rik (NM_146047.1,181-199).
gtggattccaaatttgaaa

SEQ ID NO: 759717 - DNA, 19 bp, Mus musculus
  siRNA target sequence for C130052I12Rik (NM_146047.1,196-214).
gaaaggacagttaatgttt

SEQ ID NO: 759718 - DNA, 19 bp, Mus musculus
  siRNA target sequence for C130052I12Rik (NM_146047.1,243-261).
gacgctgtatgcatatatt

SEQ ID NO: 759719 - DNA, 19 bp, Mus musculus
  siRNA target sequence for C130052I12Rik (NM_146047.1,343-361).
cccaaaccagaagaaatta

SEQ ID NO: 759720 - DNA, 19 bp, Mus musculus
  siRNA target sequence for C130052I12Rik (NM_146047.1,527-545).
ggtacatgaagatgattca

SEQ ID NO: 759721 - DNA, 19 bp, Mus musculus
  siRNA target sequence for C130052I12Rik (NM_146047.1,655-673).
gtgtcctacgacaagatct

SEQ ID NO: 759722 - DNA, 19 bp, Mus musculus
  siRNA target sequence for C130052I12Rik (NM_146047.1,659-677).
cctacgacaagatctcatt

SEQ ID NO: 759723 - DNA, 19 bp, Mus musculus
  siRNA target sequence for C130052I12Rik (NM_146047.1,726-744).
gcagcagttcgggttttca

SEQ ID NO: 759724 - DNA, 19 bp, Mus musculus
  siRNA target sequence for C130052I12Rik (NM_146047.1,777-795).
cgtagacaccaacttatat

SEQ ID NO: 759725 - DNA, 19 bp, Mus musculus
  siRNA target sequence for C130052I12Rik (NM_146047.1,781-799).
gacaccaacttatatctct

SEQ ID NO: 759726 - DNA, 19 bp, Mus musculus
  siRNA target sequence for C130052I12Rik (NM_146047.1,820-838).
gcagcctttcaccttcttt

SEQ ID NO: 759727 - DNA, 19 bp, Mus musculus
  siRNA target sequence for C130052I12Rik (NM_146047.1,894-912).
gattggaatgtctaccaaa

SEQ ID NO: 759728 - DNA, 19 bp, Mus musculus
  siRNA target sequence for C130052I12Rik (NM_146047.1,1010-1028).
ctgccattgagctttggaa

SEQ ID NO: 759729 - DNA, 19 bp, Mus musculus
  siRNA target sequence for C130052I12Rik (NM_146047.1,1038-1056).
ggcattgaaaattacagta

SEQ ID NO: 759730 - DNA, 19 bp, Mus musculus
  siRNA target sequence for C130052I12Rik (NM_146047.1,1086-1104).
gtttggtacccatagtgaa

SEQ ID NO: 759731 - DNA, 19 bp, Mus musculus
  siRNA target sequence for C130052I12Rik (NM_146047.1,1132-1150).
gctcaggccatgaagtact

SEQ ID NO: 759732 - DNA, 19 bp, Mus musculus
  siRNA target sequence for C130052I12Rik (NM_146047.1,1133-1151).
ctcaggccatgaagtactt

SEQ ID NO: 759733 - DNA, 19 bp, Mus musculus
  siRNA target sequence for C130052I12Rik (NM_146047.1,1189-1207).
gtctactcactcctaaata

SEQ ID NO: 759734 - DNA, 19 bp, Mus musculus
  siRNA target sequence for C130052I12Rik (NM_146047.1,1196-1214).
cactcctaaatatcaagta

SEQ ID NO: 759735 - DNA, 19 bp, Mus musculus
  siRNA target sequence for C130052I12Rik (NM_146047.1,1198-1216).
ctcctaaatatcaagtata

SEQ ID NO: 759736 - DNA, 19 bp, Mus musculus
  siRNA target sequence for C130052I12Rik (NM_146047.1,1234-1252).
ctcatcaacagctttgtga

SEQ ID NO: 759737 - DNA, 19 bp, Mus musculus
  siRNA target sequence for C130052I12Rik (NM_146047.1,1287-1305).
gccccagctttttgtcaat

SEQ ID NO: 759738 - DNA, 19 bp, Mus musculus
  siRNA target sequence for C130052I12Rik (NM_146047.1,1288-1306).
ccccagctttttgtcaatt

SEQ ID NO: 759739 - DNA, 19 bp, Mus musculus
  siRNA target sequence for C130052I12Rik (NM_146047.1,1289-1307).
cccagctttttgtcaatta

SEQ ID NO: 759740 - DNA, 19 bp, Mus musculus
  siRNA target sequence for C130052I12Rik (NM_146047.1,1291-1309).
cagctttttgtcaattaca

SEQ ID NO: 759741 - DNA, 19 bp, Mus musculus
  siRNA target sequence for C130052I12Rik (NM_146047.1,1294-1312).
ctttttgtcaattacaaga

SEQ ID NO: 759742 - DNA, 19 bp, Mus musculus
  siRNA target sequence for C130052I12Rik (NM_146047.1,1414-1432).
caccggctggcctgtttca

SEQ ID NO: 759743 - DNA, 19 bp, Mus musculus
  siRNA target sequence for C130052I12Rik (NM_146047.1,1474-1492).
ctttaccctgtggataaga

SEQ ID NO: 759744 - DNA, 19 bp, Mus musculus
  siRNA target sequence for C130052I12Rik (NM_146047.1,1491-1509).
gagcagggtcaatgaattt

SEQ ID NO: 759745 - DNA, 19 bp, Mus musculus
  siRNA target sequence for 3830406C13Rik (NM_146051.1,291-309).
ctcttgagggtaacaagaa

SEQ ID NO: 759746 - DNA, 19 bp, Mus musculus
  siRNA target sequence for BC019794 (NM_146052.2,608-626).
gtagcaatgcaaatctcaa

SEQ ID NO: 759747 - DNA, 19 bp, Mus musculus
  siRNA target sequence for BC019794 (NM_146052.2,692-710).
ccatccccaatgagatttt

SEQ ID NO: 759748 - DNA, 19 bp, Mus musculus
  siRNA target sequence for BC019794 (NM_146052.2,871-889).
gctagggctaggattgcta

SEQ ID NO: 759749 - DNA, 19 bp, Mus musculus
  siRNA target sequence for BC019794 (NM_146052.2,872-890).
ctagggctaggattgctaa

SEQ ID NO: 759750 - DNA, 19 bp, Mus musculus
  siRNA target sequence for BC019794 (NM_146052.2,875-893).
gggctaggattgctaacaa

SEQ ID NO: 759751 - DNA, 19 bp, Mus musculus
  siRNA target sequence for BC019794 (NM_146052.2,935-953).
gcatggcatccaatcatga

SEQ ID NO: 759752 - DNA, 19 bp, Mus musculus
  siRNA target sequence for BC019794 (NM_146052.2,1039-1057).
ctgtgtaacctccctaaaa

SEQ ID NO: 759753 - DNA, 19 bp, Mus musculus
  siRNA target sequence for BC019794 (NM_146052.2,1074-1092).
catgctcgtcactatgttt

SEQ ID NO: 759754 - DNA, 19 bp, Mus musculus
  siRNA target sequence for BC019794 (NM_146052.2,1153-1171).
gcccggagacaccttgaat

SEQ ID NO: 759755 - DNA, 19 bp, Mus musculus
  siRNA target sequence for BC019794 (NM_146052.2,1154-1172).
cccggagacaccttgaata

SEQ ID NO: 759756 - DNA, 19 bp, Mus musculus
  siRNA target sequence for BC019794 (NM_146052.2,1156-1174).
cggagacaccttgaatact

SEQ ID NO: 759757 - DNA, 19 bp, Mus musculus
  siRNA target sequence for BC019794 (NM_146052.2,1157-1175).
ggagacaccttgaatactt

SEQ ID NO: 759758 - DNA, 19 bp, Mus musculus
  siRNA target sequence for BC019794 (NM_146052.2,1160-1178).
gacaccttgaatacttgaa

SEQ ID NO: 759759 - DNA, 19 bp, Mus musculus
  siRNA target sequence for BC019794 (NM_146052.2,1162-1180).
caccttgaatacttgaaat

SEQ ID NO: 759760 - DNA, 19 bp, Mus musculus
  siRNA target sequence for BC025446 (NM_146058.1,328-346).
catctgccctactaatcct

SEQ ID NO: 759761 - DNA, 19 bp, Mus musculus
  siRNA target sequence for BC025446 (NM_146058.1,334-352).
ccctactaatcctgaaact

SEQ ID NO: 759762 - DNA, 19 bp, Mus musculus
  siRNA target sequence for 2410075B13Rik (NM_146059.1,387-405).
gccgcacgttccctcattt

SEQ ID NO: 759763 - DNA, 19 bp, Mus musculus
  siRNA target sequence for 2410075B13Rik (NM_146059.1,434-452).
cgggtatctccgacaagaa

SEQ ID NO: 759764 - DNA, 19 bp, Mus musculus
  siRNA target sequence for 2410075B13Rik (NM_146059.1,436-454).
ggtatctccgacaagaact

SEQ ID NO: 759765 - DNA, 19 bp, Mus musculus
  siRNA target sequence for 2410075B13Rik (NM_146059.1,646-664).
ggtcaaccagtcacgtttt

SEQ ID NO: 759766 - DNA, 19 bp, Mus musculus
  siRNA target sequence for 2410075B13Rik (NM_146059.1,734-752).
ctccaagactccatctata

SEQ ID NO: 759767 - DNA, 19 bp, Mus musculus
  siRNA target sequence for 2410075B13Rik (NM_146059.1,736-754).
ccaagactccatctatatt

SEQ ID NO: 759768 - DNA, 19 bp, Mus musculus
  siRNA target sequence for 2410075B13Rik (NM_146059.1,1089-1107).
gctgaagacgacacagaaa

SEQ ID NO: 759769 - DNA, 19 bp, Mus musculus
  siRNA target sequence for Arhgap8 (NM_146061.3,193-211).
cgcaggttgaagttcatga

SEQ ID NO: 759770 - DNA, 19 bp, Mus musculus
  siRNA target sequence for Arhgap8 (NM_146061.3,474-492).
gattcttcgtgacaagatt

SEQ ID NO: 759771 - DNA, 19 bp, Mus musculus
  siRNA target sequence for Arhgap8 (NM_146061.3,570-588).
cctgcaggccatcttctat

SEQ ID NO: 759772 - DNA, 19 bp, Mus musculus
  siRNA target sequence for Arhgap8 (NM_146061.3,756-774).
gggtgtgactgaagactat

SEQ ID NO: 759773 - DNA, 19 bp, Mus musculus
  siRNA target sequence for Arhgap8 (NM_146061.3,777-795).
gcgcctcgagacactgatt

SEQ ID NO: 759774 - DNA, 19 bp, Mus musculus
  siRNA target sequence for Arhgap8 (NM_146061.3,779-797).
gcctcgagacactgattca

SEQ ID NO: 759775 - DNA, 19 bp, Mus musculus
  siRNA target sequence for Arhgap8 (NM_146061.3,896-914).
cccgctctggggatatcct

SEQ ID NO: 759776 - DNA, 19 bp, Mus musculus
  siRNA target sequence for Arhgap8 (NM_146061.3,897-915).
ccgctctggggatatccta

SEQ ID NO: 759777 - DNA, 19 bp, Mus musculus
  siRNA target sequence for Arhgap8 (NM_146061.3,928-946).
gtggtgcgctccaaaagct

SEQ ID NO: 759778 - DNA, 19 bp, Mus musculus
  siRNA target sequence for 1600022A19Rik (NM_146062.1,267-285).
gaggctacagtagatatta

SEQ ID NO: 759779 - DNA, 19 bp, Mus musculus
  siRNA target sequence for 1600022A19Rik (NM_146062.1,269-287).
ggctacagtagatattaca

SEQ ID NO: 759780 - DNA, 19 bp, Mus musculus
  siRNA target sequence for 1600022A19Rik (NM_146062.1,271-289).
ctacagtagatattacagt

SEQ ID NO: 759781 - DNA, 19 bp, Mus musculus
  siRNA target sequence for 1600022A19Rik (NM_146062.1,381-399).
gatggctaagagatgatca

SEQ ID NO: 759782 - DNA, 19 bp, Mus musculus
  siRNA target sequence for 1600022A19Rik (NM_146062.1,620-638).
catcagtctcagcatagaa

SEQ ID NO: 759783 - DNA, 19 bp, Mus musculus
  siRNA target sequence for 1600022A19Rik (NM_146062.1,906-924).
cggcacccttatttattga

SEQ ID NO: 759784 - DNA, 19 bp, Mus musculus
  siRNA target sequence for 1600022A19Rik (NM_146062.1,940-958).
cgagtcaaacacagtagat

SEQ ID NO: 759785 - DNA, 19 bp, Mus musculus
  siRNA target sequence for 1600022A19Rik (NM_146062.1,960-978).
gtacagaactgtatgaaga

SEQ ID NO: 759786 - DNA, 19 bp, Mus musculus
  siRNA target sequence for 1600022A19Rik (NM_146062.1,1004-1022).
gccattgcctcgaaaacca

SEQ ID NO: 759787 - DNA, 19 bp, Mus musculus
  siRNA target sequence for 1600022A19Rik (NM_146062.1,1005-1023).
ccattgcctcgaaaaccaa

SEQ ID NO: 759788 - DNA, 19 bp, Mus musculus
  siRNA target sequence for 1600022A19Rik (NM_146062.1,1006-1024).
cattgcctcgaaaaccaaa

SEQ ID NO: 759789 - DNA, 19 bp, Mus musculus
  siRNA target sequence for 1600022A19Rik (NM_146062.1,1169-1187).
gagctcaagcgtttcatta

SEQ ID NO: 759790 - DNA, 19 bp, Mus musculus
  siRNA target sequence for 1600022A19Rik (NM_146062.1,1171-1189).
gctcaagcgtttcattact

SEQ ID NO: 759791 - DNA, 19 bp, Mus musculus
  siRNA target sequence for BC031593 (NM_146063.1,134-152).
gactttctccactaaagga

SEQ ID NO: 759792 - DNA, 19 bp, Mus musculus
  siRNA target sequence for BC031593 (NM_146063.1,758-776).
gaggaacgtacaggataat

SEQ ID NO: 759793 - DNA, 19 bp, Mus musculus
  siRNA target sequence for BC031593 (NM_146063.1,908-926).
cagcttgacacaagagatt

SEQ ID NO: 759794 - DNA, 19 bp, Mus musculus
  siRNA target sequence for BC031593 (NM_146063.1,910-928).
gcttgacacaagagattga

SEQ ID NO: 759795 - DNA, 19 bp, Mus musculus
  siRNA target sequence for BC031593 (NM_146063.1,982-1000).
ctgacaccaacgtgatact

SEQ ID NO: 759796 - DNA, 19 bp, Mus musculus
  siRNA target sequence for BC031593 (NM_146063.1,984-1002).
gacaccaacgtgatactgt

SEQ ID NO: 759797 - DNA, 19 bp, Mus musculus
  siRNA target sequence for BC031593 (NM_146063.1,1157-1175).
cagccttcgagacactaaa

SEQ ID NO: 759798 - DNA, 19 bp, Mus musculus
  siRNA target sequence for BC031593 (NM_146063.1,1160-1178).
ccttcgagacactaaaaat

SEQ ID NO: 759799 - DNA, 19 bp, Mus musculus
  siRNA target sequence for BC031593 (NM_146063.1,1297-1315).
cgctcaaggacgctaagaa

SEQ ID NO: 759800 - DNA, 19 bp, Mus musculus
  siRNA target sequence for Soat2 (NM_146064.1,325-343).
caagcaagacccaagagtt

SEQ ID NO: 759801 - DNA, 19 bp, Mus musculus
  siRNA target sequence for Soat2 (NM_146064.1,352-370).
gaaaacggaaagttttcat

SEQ ID NO: 759802 - DNA, 19 bp, Mus musculus
  siRNA target sequence for Soat2 (NM_146064.1,445-463).
gcctatgcgtcctgatcat

SEQ ID NO: 759803 - DNA, 19 bp, Mus musculus
  siRNA target sequence for Soat2 (NM_146064.1,447-465).
ctatgcgtcctgatcatca

SEQ ID NO: 759804 - DNA, 19 bp, Mus musculus
  siRNA target sequence for C130020M04Rik (NM_146065.1,203-221).
gaacggactcagtcatcat

SEQ ID NO: 759805 - DNA, 19 bp, Mus musculus
  siRNA target sequence for C130020M04Rik (NM_146065.1,233-251).
cgcctactccaactagatt

SEQ ID NO: 759806 - DNA, 19 bp, Mus musculus
  siRNA target sequence for C130020M04Rik (NM_146065.1,273-291).
ggggctcttcaatgaacta

SEQ ID NO: 759807 - DNA, 19 bp, Mus musculus
  siRNA target sequence for C130020M04Rik (NM_146065.1,307-325).
catgaatttaagaaagctt

SEQ ID NO: 759808 - DNA, 19 bp, Mus musculus
  siRNA target sequence for C130020M04Rik (NM_146065.1,491-509).
ccacaaaaccggttgtgat

SEQ ID NO: 759809 - DNA, 19 bp, Mus musculus
  siRNA target sequence for C130020M04Rik (NM_146065.1,516-534).
ccctacacctaccattgta

SEQ ID NO: 759810 - DNA, 19 bp, Mus musculus
  siRNA target sequence for C130020M04Rik (NM_146065.1,669-687).
catgcatcttgctaatgga

SEQ ID NO: 759811 - DNA, 19 bp, Mus musculus
  siRNA target sequence for C130020M04Rik (NM_146065.1,686-704).
gacagaccatgcctatgtt

SEQ ID NO: 759812 - DNA, 19 bp, Mus musculus
  siRNA target sequence for C130020M04Rik (NM_146065.1,765-783).
gcccaacattcctggtata

SEQ ID NO: 759813 - DNA, 19 bp, Mus musculus
  siRNA target sequence for C130020M04Rik (NM_146065.1,784-802).
cctggcccaccggttaaca

SEQ ID NO: 759814 - DNA, 19 bp, Mus musculus
  siRNA target sequence for C130020M04Rik (NM_146065.1,785-803).
ctggcccaccggttaacaa

SEQ ID NO: 759815 - DNA, 19 bp, Mus musculus
  siRNA target sequence for C130020M04Rik (NM_146065.1,787-805).
ggcccaccggttaacaaca

SEQ ID NO: 759816 - DNA, 19 bp, Mus musculus
  siRNA target sequence for C130020M04Rik (NM_146065.1,867-885).
cacgctgacccatcaagtt

SEQ ID NO: 759817 - DNA, 19 bp, Mus musculus
  siRNA target sequence for C130020M04Rik (NM_146065.1,877-895).
catcaagtttcttcaatca

SEQ ID NO: 759818 - DNA, 19 bp, Mus musculus
  siRNA target sequence for C130020M04Rik (NM_146065.1,941-959).
ctgcccgtccagagcaaaa

SEQ ID NO: 759819 - DNA, 19 bp, Mus musculus
  siRNA target sequence for C130020M04Rik (NM_146065.1,944-962).
cccgtccagagcaaaacca

SEQ ID NO: 759820 - DNA, 19 bp, Mus musculus
  siRNA target sequence for C130020M04Rik (NM_146065.1,1052-1070).
ggcgtacagtggatgaaga

SEQ ID NO: 759821 - DNA, 19 bp, Mus musculus
  siRNA target sequence for C130020M04Rik (NM_146065.1,1092-1110).
gtttttagagcgaaacaga

SEQ ID NO: 759822 - DNA, 19 bp, Mus musculus
  siRNA target sequence for C130020M04Rik (NM_146065.1,1129-1147).
cggcaaaagcggaaactgt

SEQ ID NO: 759823 - DNA, 19 bp, Mus musculus
  siRNA target sequence for C130020M04Rik (NM_146065.1,1191-1209).
gaacattcagctgagtaat

SEQ ID NO: 759824 - DNA, 19 bp, Mus musculus
  siRNA target sequence for C130020M04Rik (NM_146065.1,1203-1221).
gagtaatgaagtcacatta

SEQ ID NO: 759825 - DNA, 19 bp, Mus musculus
  siRNA target sequence for C130020M04Rik (NM_146065.1,1205-1223).
gtaatgaagtcacattact

SEQ ID NO: 759826 - DNA, 19 bp, Mus musculus
  siRNA target sequence for C130020M04Rik (NM_146065.1,1301-1319).
ctcaaggctacctaggtaa

SEQ ID NO: 759827 - DNA, 19 bp, Mus musculus
  siRNA target sequence for 2310008H04Rik (NM_146068.2,79-97).
ggcacgtccaagaggaaaa

SEQ ID NO: 759828 - DNA, 19 bp, Mus musculus
  siRNA target sequence for 2310008H04Rik (NM_146068.2,98-116).
ggaattggcatatagaaca

SEQ ID NO: 759829 - DNA, 19 bp, Mus musculus
  siRNA target sequence for 2310008H04Rik (NM_146068.2,145-163).
cagttgagacggggaaatt

SEQ ID NO: 759830 - DNA, 19 bp, Mus musculus
  siRNA target sequence for 2310008H04Rik (NM_146068.2,243-261).
cctgtcattagcaagtgaa

SEQ ID NO: 759831 - DNA, 19 bp, Mus musculus
  siRNA target sequence for 2310008H04Rik (NM_146068.2,244-262).
ctgtcattagcaagtgaaa

SEQ ID NO: 759832 - DNA, 19 bp, Mus musculus
  siRNA target sequence for 2310008H04Rik (NM_146068.2,285-303).
cctggaattatctccaaaa

SEQ ID NO: 759833 - DNA, 19 bp, Mus musculus
  siRNA target sequence for 2310008H04Rik (NM_146068.2,331-349).
gctagtgagcttccaaata

SEQ ID NO: 759834 - DNA, 19 bp, Mus musculus
  siRNA target sequence for 2310008H04Rik (NM_146068.2,337-355).
gagcttccaaatataatat

SEQ ID NO: 759835 - DNA, 19 bp, Mus musculus
  siRNA target sequence for 2310008H04Rik (NM_146068.2,340-358).
cttccaaatataatatgga

SEQ ID NO: 759836 - DNA, 19 bp, Mus musculus
  siRNA target sequence for 2310008H04Rik (NM_146068.2,373-391).
gatttctccgatgaagata

SEQ ID NO: 759837 - DNA, 19 bp, Mus musculus
  siRNA target sequence for 2310008H04Rik (NM_146068.2,546-564).
gcctagtgagtgtgaagat

SEQ ID NO: 759838 - DNA, 19 bp, Mus musculus
  siRNA target sequence for 2310008H04Rik (NM_146068.2,579-597).
ggacatctcagattgtgat

SEQ ID NO: 759839 - DNA, 19 bp, Mus musculus
  siRNA target sequence for 2310008H04Rik (NM_146068.2,636-654).
gccttctgagccaatttct

SEQ ID NO: 759840 - DNA, 19 bp, Mus musculus
  siRNA target sequence for 2310008H04Rik (NM_146068.2,666-684).
ggagtattcatcagatagt

SEQ ID NO: 759841 - DNA, 19 bp, Mus musculus
  siRNA target sequence for 2310008H04Rik (NM_146068.2,706-724).
cattccctgttcattgatt

SEQ ID NO: 759842 - DNA, 19 bp, Mus musculus
  siRNA target sequence for 2310008H04Rik (NM_146068.2,710-728).
ccctgttcattgattcaga

SEQ ID NO: 759843 - DNA, 19 bp, Mus musculus
  siRNA target sequence for 2310008H04Rik (NM_146068.2,712-730).
ctgttcattgattcagaat

SEQ ID NO: 759844 - DNA, 19 bp, Mus musculus
  siRNA target sequence for 2310008H04Rik (NM_146068.2,744-762).
ccaggcggattttaaatct

SEQ ID NO: 759845 - DNA, 19 bp, Mus musculus
  siRNA target sequence for 2310008H04Rik (NM_146068.2,770-788).
gatggtgtttggttagtca

SEQ ID NO: 759846 - DNA, 19 bp, Mus musculus
  siRNA target sequence for 2310008H04Rik (NM_146068.2,821-839).
cattgacaccccagaaata

SEQ ID NO: 759847 - DNA, 19 bp, Mus musculus
  siRNA target sequence for 2310008H04Rik (NM_146068.2,834-852).
gaaatatacggtcaagttt

SEQ ID NO: 759848 - DNA, 19 bp, Mus musculus
  siRNA target sequence for 2310008H04Rik (NM_146068.2,855-873).
gaagactccagaatattca

SEQ ID NO: 759849 - DNA, 19 bp, Mus musculus
  siRNA target sequence for 2310008H04Rik (NM_146068.2,908-926).
cagaaagactccaagaact

SEQ ID NO: 759850 - DNA, 19 bp, Mus musculus
  siRNA target sequence for 2310008H04Rik (NM_146068.2,957-975).
gtggagacatcgatgtgtt

SEQ ID NO: 759851 - DNA, 19 bp, Mus musculus
  siRNA target sequence for 2310008H04Rik (NM_146068.2,1133-1151).
cctacctgaaggtactctt

SEQ ID NO: 759852 - DNA, 19 bp, Mus musculus
  siRNA target sequence for 2310008H04Rik (NM_146068.2,1181-1199).
ggcatccccaggacatcat

SEQ ID NO: 759853 - DNA, 19 bp, Mus musculus
  siRNA target sequence for 2310008H04Rik (NM_146068.2,1182-1200).
gcatccccaggacatcatt

SEQ ID NO: 759854 - DNA, 19 bp, Mus musculus
  siRNA target sequence for 2310008H04Rik (NM_146068.2,1183-1201).
catccccaggacatcattt

SEQ ID NO: 759855 - DNA, 19 bp, Mus musculus
  siRNA target sequence for 2310008H04Rik (NM_146068.2,1241-1259).
gaagttgctccattattct

SEQ ID NO: 759856 - DNA, 19 bp, Mus musculus
  siRNA target sequence for 2310008H04Rik (NM_146068.2,1300-1318).
gtgcgcgaagacctataca

SEQ ID NO: 759857 - DNA, 19 bp, Mus musculus
  siRNA target sequence for 2310008H04Rik (NM_146068.2,1302-1320).
gcgcgaagacctatacagt

SEQ ID NO: 759858 - DNA, 19 bp, Mus musculus
  siRNA target sequence for 2310008H04Rik (NM_146068.2,1312-1330).
ctatacagtccggacatat

SEQ ID NO: 759859 - DNA, 19 bp, Mus musculus
  siRNA target sequence for 2310008H04Rik (NM_146068.2,1317-1335).
cagtccggacatatctctt

SEQ ID NO: 759860 - DNA, 19 bp, Mus musculus
  siRNA target sequence for 2310008H04Rik (NM_146068.2,1321-1339).
ccggacatatctctttcaa

SEQ ID NO: 759861 - DNA, 19 bp, Mus musculus
  siRNA target sequence for 2310008H04Rik (NM_146068.2,1356-1374).
ggcccagacatttagaatt

SEQ ID NO: 759862 - DNA, 19 bp, Mus musculus
  siRNA target sequence for 2310008H04Rik (NM_146068.2,1357-1375).
gcccagacatttagaatta

SEQ ID NO: 759863 - DNA, 19 bp, Mus musculus
  siRNA target sequence for 2310008H04Rik (NM_146068.2,1370-1388).
gaattaaggacataacaga

SEQ ID NO: 759864 - DNA, 19 bp, Mus musculus
  siRNA target sequence for 2310008H04Rik (NM_146068.2,1397-1415).
ccatcaatcagactacata

SEQ ID NO: 759865 - DNA, 19 bp, Mus musculus
  siRNA target sequence for 2310008H04Rik (NM_146068.2,1398-1416).
catcaatcagactacatat

SEQ ID NO: 759866 - DNA, 19 bp, Mus musculus
  siRNA target sequence for 2310008H04Rik (NM_146068.2,1550-1568).
gagtcagggtccaagtagt

SEQ ID NO: 759867 - DNA, 19 bp, Mus musculus
  siRNA target sequence for 2310008H04Rik (NM_146068.2,1655-1673).
catggtcctgccttctagt

SEQ ID NO: 759868 - DNA, 19 bp, Mus musculus
  siRNA target sequence for 2310008H04Rik (NM_146068.2,1696-1714).
ggggaagtgttcttgaaca

SEQ ID NO: 759869 - DNA, 19 bp, Mus musculus
  siRNA target sequence for 2310008H04Rik (NM_146068.2,1763-1781).
cgggagtgaaggttctaca

SEQ ID NO: 759870 - DNA, 19 bp, Mus musculus
  siRNA target sequence for 2310008H04Rik (NM_146068.2,1766-1784).
gagtgaaggttctacagaa

SEQ ID NO: 759871 - DNA, 19 bp, Mus musculus
  siRNA target sequence for 2310008H04Rik (NM_146068.2,1805-1823).
cagggctcttcagtttaat

SEQ ID NO: 759872 - DNA, 19 bp, Mus musculus
  siRNA target sequence for 2310008H04Rik (NM_146068.2,1808-1826).
ggctcttcagtttaattga

SEQ ID NO: 759873 - DNA, 19 bp, Mus musculus
  siRNA target sequence for 2310008H04Rik (NM_146068.2,1880-1898).
gtggagagacaaagactta

SEQ ID NO: 759874 - DNA, 19 bp, Mus musculus
  siRNA target sequence for 2310008H04Rik (NM_146068.2,1883-1901).
gagagacaaagacttatct

SEQ ID NO: 759875 - DNA, 19 bp, Mus musculus
  siRNA target sequence for 2310008H04Rik (NM_146068.2,1906-1924).
cctcctatcttctgttata

SEQ ID NO: 759876 - DNA, 19 bp, Mus musculus
  siRNA target sequence for 2310008H04Rik (NM_146068.2,1909-1927).
cctatcttctgttatatct

SEQ ID NO: 759877 - DNA, 19 bp, Mus musculus
  siRNA target sequence for 2310008H04Rik (NM_146068.2,1940-1958).
caacactgggacaaattga

SEQ ID NO: 759878 - DNA, 19 bp, Mus musculus
  siRNA target sequence for 2310008H04Rik (NM_146068.2,1949-1967).
gacaaattgatgcaattga

SEQ ID NO: 759879 - DNA, 19 bp, Mus musculus
  siRNA target sequence for 2310008H04Rik (NM_146068.2,1996-2014).
ccagttgtccgctgcttaa

SEQ ID NO: 759880 - DNA, 19 bp, Mus musculus
  siRNA target sequence for 2310008H04Rik (NM_146068.2,1997-2015).
cagttgtccgctgcttaaa

SEQ ID NO: 759881 - DNA, 19 bp, Mus musculus
  siRNA target sequence for 2310008H04Rik (NM_146068.2,2058-2076).
ctatgccagagtgatttat

SEQ ID NO: 759882 - DNA, 19 bp, Mus musculus
  siRNA target sequence for 2310008H04Rik (NM_146068.2,2062-2080).
gccagagtgatttatcaaa

SEQ ID NO: 759883 - DNA, 19 bp, Mus musculus
  siRNA target sequence for 2310008H04Rik (NM_146068.2,2063-2081).
ccagagtgatttatcaaaa

SEQ ID NO: 759884 - DNA, 19 bp, Mus musculus
  siRNA target sequence for 2310008H04Rik (NM_146068.2,2178-2196).
caaaaccctgcctgtctat

SEQ ID NO: 759885 - DNA, 19 bp, Mus musculus
  siRNA target sequence for 2310008H04Rik (NM_146068.2,2217-2235).
gggcccagaggttgtagaa

SEQ ID NO: 759886 - DNA, 19 bp, Mus musculus
  siRNA target sequence for 2310008H04Rik (NM_146068.2,2242-2260).
gccttgctggtgtcttata

SEQ ID NO: 759887 - DNA, 19 bp, Mus musculus
  siRNA target sequence for 2310008H04Rik (NM_146068.2,2243-2261).
ccttgctggtgtcttataa

SEQ ID NO: 759888 - DNA, 19 bp, Mus musculus
  siRNA target sequence for 2310008H04Rik (NM_146068.2,2266-2284).
ctcttcagggacgctttta

SEQ ID NO: 759889 - DNA, 19 bp, Mus musculus
  siRNA target sequence for 2310008H04Rik (NM_146068.2,2286-2304).
ggacaacggtcagattgtt

SEQ ID NO: 759890 - DNA, 19 bp, Mus musculus
  siRNA target sequence for 2310008H04Rik (NM_146068.2,2287-2305).
gacaacggtcagattgttt

SEQ ID NO: 759891 - DNA, 19 bp, Mus musculus
  siRNA target sequence for 2310008H04Rik (NM_146068.2,2292-2310).
cggtcagattgtttgtatt

SEQ ID NO: 759892 - DNA, 19 bp, Mus musculus
  siRNA target sequence for 2310008H04Rik (NM_146068.2,2381-2399).
cagtgacactggatgaact

SEQ ID NO: 759893 - DNA, 19 bp, Mus musculus
  siRNA target sequence for 2310008H04Rik (NM_146068.2,2441-2459).
gtactgtggttgatgtaga

SEQ ID NO: 759894 - DNA, 19 bp, Mus musculus
  siRNA target sequence for 2310008H04Rik (NM_146068.2,2649-2667).
gctattggagagcagtatt

SEQ ID NO: 759895 - DNA, 19 bp, Mus musculus
  siRNA target sequence for 2310008H04Rik (NM_146068.2,2650-2668).
ctattggagagcagtattt

SEQ ID NO: 759896 - DNA, 19 bp, Mus musculus
  siRNA target sequence for E430025L02Rik (NM_146069.2,1227-1245).
ctggaactggcaatgttgt

SEQ ID NO: 759897 - DNA, 19 bp, Mus musculus
  siRNA target sequence for E430025L02Rik (NM_146069.2,1230-1248).
gaactggcaatgttgttgt

SEQ ID NO: 759898 - DNA, 19 bp, Mus musculus
  siRNA target sequence for E430025L02Rik (NM_146069.2,1293-1311).
ggctttgcctgggttttca

SEQ ID NO: 759899 - DNA, 19 bp, Mus musculus
  siRNA target sequence for E430025L02Rik (NM_146069.2,1299-1317).
gcctgggttttcacttctt

SEQ ID NO: 759900 - DNA, 19 bp, Mus musculus
  siRNA target sequence for E430025L02Rik (NM_146069.2,1786-1804).
gctcgacgactctatcttt

SEQ ID NO: 759901 - DNA, 19 bp, Mus musculus
  siRNA target sequence for E430025L02Rik (NM_146069.2,1817-1835).
caccttgtagagctagatt

SEQ ID NO: 759902 - DNA, 19 bp, Mus musculus
  siRNA target sequence for E430025L02Rik (NM_146069.2,1832-1850).
gatttgcagagaaactaca

SEQ ID NO: 759903 - DNA, 19 bp, Mus musculus
  siRNA target sequence for E430025L02Rik (NM_146069.2,1837-1855).
gcagagaaactacatcttt

SEQ ID NO: 759904 - DNA, 19 bp, Mus musculus
  siRNA target sequence for E430025L02Rik (NM_146069.2,1959-1977).
ggttcctcaacgtcagtta

SEQ ID NO: 759905 - DNA, 19 bp, Mus musculus
  siRNA target sequence for E430025L02Rik (NM_146069.2,1960-1978).
gttcctcaacgtcagttat

SEQ ID NO: 759906 - DNA, 19 bp, Mus musculus
  siRNA target sequence for E430025L02Rik (NM_146069.2,1964-1982).
ctcaacgtcagttataaca

SEQ ID NO: 759907 - DNA, 19 bp, Mus musculus
  siRNA target sequence for E430025L02Rik (NM_146069.2,2009-2027).
gaggaggtggccttcgaat

SEQ ID NO: 759908 - DNA, 19 bp, Mus musculus
  siRNA target sequence for E430025L02Rik (NM_146069.2,2019-2037).
ccttcgaattggagatact

SEQ ID NO: 759909 - DNA, 19 bp, Mus musculus
  siRNA target sequence for E430025L02Rik (NM_146069.2,2127-2145).
gcttctacagggagcttta

SEQ ID NO: 759910 - DNA, 19 bp, Mus musculus
  siRNA target sequence for E430025L02Rik (NM_146069.2,2186-2204).
cttgtggacggcaatgtga

SEQ ID NO: 759911 - DNA, 19 bp, Mus musculus
  siRNA target sequence for E430025L02Rik (NM_146069.2,2295-2313).
ggcacttgccggatggttt

SEQ ID NO: 759912 - DNA, 19 bp, Mus musculus
  siRNA target sequence for E430025L02Rik (NM_146069.2,2304-2322).
cggatggtttcctgaagaa

SEQ ID NO: 759913 - DNA, 19 bp, Mus musculus
  siRNA target sequence for E430025L02Rik (NM_146069.2,2478-2496).
ggaacctccgggtgttcaa

SEQ ID NO: 759914 - DNA, 19 bp, Mus musculus
  siRNA target sequence for E430025L02Rik (NM_146069.2,2724-2742).
ggacctccctcactcattt

SEQ ID NO: 759915 - DNA, 19 bp, Mus musculus
  siRNA target sequence for E430025L02Rik (NM_146069.2,2725-2743).
gacctccctcactcattta

SEQ ID NO: 759916 - DNA, 19 bp, Mus musculus
  siRNA target sequence for E430025L02Rik (NM_146069.2,2754-2772).
gcaactggggggttctgaa

SEQ ID NO: 759917 - DNA, 19 bp, Mus musculus
  siRNA target sequence for E430025L02Rik (NM_146069.2,2755-2773).
caactggggggttctgaat

SEQ ID NO: 759918 - DNA, 19 bp, Mus musculus
  siRNA target sequence for E430025L02Rik (NM_146069.2,2794-2812).
ggctgttgccccgacatta

SEQ ID NO: 759919 - DNA, 19 bp, Mus musculus
  siRNA target sequence for E430025L02Rik (NM_146069.2,2960-2978).
ctcgacctccgcagaaact

SEQ ID NO: 759920 - DNA, 19 bp, Mus musculus
  siRNA target sequence for E430025L02Rik (NM_146069.2,2962-2980).
cgacctccgcagaaactct

SEQ ID NO: 759921 - DNA, 19 bp, Mus musculus
  siRNA target sequence for E430025L02Rik (NM_146069.2,3279-3297).
ctgtcgtcttcctcacttt

SEQ ID NO: 759922 - DNA, 19 bp, Mus musculus
  siRNA target sequence for E430025L02Rik (NM_146069.2,3281-3299).
gtcgtcttcctcactttta

SEQ ID NO: 759923 - DNA, 19 bp, Mus musculus
  siRNA target sequence for Muc20 (NM_146071.1,196-214).
caccaacctgattcagtat

SEQ ID NO: 759924 - DNA, 19 bp, Mus musculus
  siRNA target sequence for Muc20 (NM_146071.1,219-237).
ctctagacacgcaaactct

SEQ ID NO: 759925 - DNA, 19 bp, Mus musculus
  siRNA target sequence for Muc20 (NM_146071.1,240-258).
gcactgaatctgcttctaa

SEQ ID NO: 759926 - DNA, 19 bp, Mus musculus
  siRNA target sequence for Muc20 (NM_146071.1,308-326).
cagaccacctcttttgtaa

SEQ ID NO: 759927 - DNA, 19 bp, Mus musculus
  siRNA target sequence for Muc20 (NM_146071.1,312-330).
ccacctcttttgtaacaaa

SEQ ID NO: 759928 - DNA, 19 bp, Mus musculus
  siRNA target sequence for Muc20 (NM_146071.1,418-436).
gattacctccccaatagca

SEQ ID NO: 759929 - DNA, 19 bp, Mus musculus
  siRNA target sequence for Muc20 (NM_146071.1,706-724).
gaccatctcacctattgaa

SEQ ID NO: 759930 - DNA, 19 bp, Mus musculus
  siRNA target sequence for Muc20 (NM_146071.1,708-726).
ccatctcacctattgaatt

SEQ ID NO: 759931 - DNA, 19 bp, Mus musculus
  siRNA target sequence for Muc20 (NM_146071.1,729-747).
ccctaaagacccaaaccat

SEQ ID NO: 759932 - DNA, 19 bp, Mus musculus
  siRNA target sequence for Muc20 (NM_146071.1,763-781).
gaccagaacggtttcaata

SEQ ID NO: 759933 - DNA, 19 bp, Mus musculus
  siRNA target sequence for Muc20 (NM_146071.1,772-790).
ggtttcaataagaatacct

SEQ ID NO: 759934 - DNA, 19 bp, Mus musculus
  siRNA target sequence for Muc20 (NM_146071.1,792-810).
ctgacctcacggttatgca

SEQ ID NO: 759935 - DNA, 19 bp, Mus musculus
  siRNA target sequence for Muc20 (NM_146071.1,1097-1115).
gggttggttgccttcaaca

SEQ ID NO: 759936 - DNA, 19 bp, Mus musculus
  siRNA target sequence for Muc20 (NM_146071.1,1106-1124).
gccttcaacatcactcata

SEQ ID NO: 759937 - DNA, 19 bp, Mus musculus
  siRNA target sequence for Muc20 (NM_146071.1,1135-1153).
caactgcatcacagaaata

SEQ ID NO: 759938 - DNA, 19 bp, Mus musculus
  siRNA target sequence for Muc20 (NM_146071.1,1208-1226).
gcgacggcagctttgttca

SEQ ID NO: 759939 - DNA, 19 bp, Mus musculus
  siRNA target sequence for Muc20 (NM_146071.1,1222-1240).
gttcacttctgagatatta

SEQ ID NO: 759940 - DNA, 19 bp, Mus musculus
  siRNA target sequence for Muc20 (NM_146071.1,1225-1243).
cacttctgagatattaact

SEQ ID NO: 759941 - DNA, 19 bp, Mus musculus
  siRNA target sequence for Muc20 (NM_146071.1,1254-1272).
ccactgaggcaaaaccaat

SEQ ID NO: 759942 - DNA, 19 bp, Mus musculus
  siRNA target sequence for Muc20 (NM_146071.1,1276-1294).
ccccgagaccacaagctta

SEQ ID NO: 759943 - DNA, 19 bp, Mus musculus
  siRNA target sequence for Muc20 (NM_146071.1,1277-1295).
cccgagaccacaagcttat

SEQ ID NO: 759944 - DNA, 19 bp, Mus musculus
  siRNA target sequence for Muc20 (NM_146071.1,1279-1297).
cgagaccacaagcttatct

SEQ ID NO: 759945 - DNA, 19 bp, Mus musculus
  siRNA target sequence for Muc20 (NM_146071.1,1354-1372).
ctccactagtgcaatcaca

SEQ ID NO: 759946 - DNA, 19 bp, Mus musculus
  siRNA target sequence for Muc20 (NM_146071.1,1412-1430).
ggaacttcggtgacagtta

SEQ ID NO: 759947 - DNA, 19 bp, Mus musculus
  siRNA target sequence for Muc20 (NM_146071.1,1435-1453).
gaaccccctggaaaacact

SEQ ID NO: 759948 - DNA, 19 bp, Mus musculus
  siRNA target sequence for Muc20 (NM_146071.1,1450-1468).
cacttcaacactctctatt

SEQ ID NO: 759949 - DNA, 19 bp, Mus musculus
  siRNA target sequence for Muc20 (NM_146071.1,1452-1470).
cttcaacactctctattga

SEQ ID NO: 759950 - DNA, 19 bp, Mus musculus
  siRNA target sequence for Muc20 (NM_146071.1,1513-1531).
catggttgctggatcaaca

SEQ ID NO: 759951 - DNA, 19 bp, Mus musculus
  siRNA target sequence for Muc20 (NM_146071.1,1722-1740).
caaacatcaccttaaccaa

SEQ ID NO: 759952 - DNA, 19 bp, Mus musculus
  siRNA target sequence for Muc20 (NM_146071.1,1762-1780).
cccgacgcatcctacaaca

SEQ ID NO: 759953 - DNA, 19 bp, Mus musculus
  siRNA target sequence for Muc20 (NM_146071.1,1763-1781).
ccgacgcatcctacaacat

SEQ ID NO: 759954 - DNA, 19 bp, Mus musculus
  siRNA target sequence for Muc20 (NM_146071.1,1765-1783).
gacgcatcctacaacatct

SEQ ID NO: 759955 - DNA, 19 bp, Mus musculus
  siRNA target sequence for Muc20 (NM_146071.1,1789-1807).
cactgcttggataaggaaa

SEQ ID NO: 759956 - DNA, 19 bp, Mus musculus
  siRNA target sequence for Muc20 (NM_146071.1,1793-1811).
gcttggataaggaaaacca

SEQ ID NO: 759957 - DNA, 19 bp, Mus musculus
  siRNA target sequence for Zdhhc14 (NM_146073.2,960-978).
gcctcccagaaccaaagaa

SEQ ID NO: 759958 - DNA, 19 bp, Mus musculus
  siRNA target sequence for Zdhhc14 (NM_146073.2,962-980).
ctcccagaaccaaagaagt

SEQ ID NO: 759959 - DNA, 19 bp, Mus musculus
  siRNA target sequence for Zdhhc14 (NM_146073.2,971-989).
ccaaagaagtcgtcatcaa

SEQ ID NO: 759960 - DNA, 19 bp, Mus musculus
  siRNA target sequence for Zdhhc14 (NM_146073.2,972-990).
caaagaagtcgtcatcaat

SEQ ID NO: 759961 - DNA, 19 bp, Mus musculus
  siRNA target sequence for Zdhhc14 (NM_146073.2,991-1009).
ggccagaccgtgaaactaa

SEQ ID NO: 759962 - DNA, 19 bp, Mus musculus
  siRNA target sequence for Zdhhc14 (NM_146073.2,992-1010).
gccagaccgtgaaactaaa

SEQ ID NO: 759963 - DNA, 19 bp, Mus musculus
  siRNA target sequence for Zdhhc14 (NM_146073.2,1006-1024).
ctaaagtactgttttacct

SEQ ID NO: 759964 - DNA, 19 bp, Mus musculus
  siRNA target sequence for Zdhhc14 (NM_146073.2,1014-1032).
ctgttttacctgcaagatt

SEQ ID NO: 759965 - DNA, 19 bp, Mus musculus
  siRNA target sequence for Zdhhc14 (NM_146073.2,1074-1092).
ctgcgtagaacagtttgat

SEQ ID NO: 759966 - DNA, 19 bp, Mus musculus
  siRNA target sequence for Zdhhc14 (NM_146073.2,1167-1185).
gtcctttctgacagtcttt

SEQ ID NO: 759967 - DNA, 19 bp, Mus musculus
  siRNA target sequence for Zdhhc14 (NM_146073.2,1170-1188).
ctttctgacagtctttata

SEQ ID NO: 759968 - DNA, 19 bp, Mus musculus
  siRNA target sequence for Zdhhc14 (NM_146073.2,1176-1194).
gacagtctttatatttgca

SEQ ID NO: 759969 - DNA, 19 bp, Mus musculus
  siRNA target sequence for Zdhhc14 (NM_146073.2,1182-1200).
ctttatatttgcattcgtt

SEQ ID NO: 759970 - DNA, 19 bp, Mus musculus
  siRNA target sequence for Zdhhc14 (NM_146073.2,1270-1288).
gtgctagaggctgtaatat

SEQ ID NO: 759971 - DNA, 19 bp, Mus musculus
  siRNA target sequence for Zdhhc14 (NM_146073.2,1273-1291).
ctagaggctgtaatatgct

SEQ ID NO: 759972 - DNA, 19 bp, Mus musculus
  siRNA target sequence for Zdhhc14 (NM_146073.2,1386-1404).
gtccaataaaagaggtaaa

SEQ ID NO: 759973 - DNA, 19 bp, Mus musculus
  siRNA target sequence for Zdhhc14 (NM_146073.2,1534-1552).
ccatcaaatgggatcacta

SEQ ID NO: 759974 - DNA, 19 bp, Mus musculus
  siRNA target sequence for Zdhhc14 (NM_146073.2,1535-1553).
catcaaatgggatcactat

SEQ ID NO: 759975 - DNA, 19 bp, Mus musculus
  siRNA target sequence for Zdhhc14 (NM_146073.2,1601-1619).
gcattcagagcaccaaatt

SEQ ID NO: 759976 - DNA, 19 bp, Mus musculus
  siRNA target sequence for Zdhhc14 (NM_146073.2,1670-1688).
ccagcgaagagctgcatat

SEQ ID NO: 759977 - DNA, 19 bp, Mus musculus
  siRNA target sequence for Zdhhc14 (NM_146073.2,1779-1797).
ggccacactctcagacatt

SEQ ID NO: 759978 - DNA, 19 bp, Mus musculus
  siRNA target sequence for Zdhhc14 (NM_146073.2,1780-1798).
gccacactctcagacatta

SEQ ID NO: 759979 - DNA, 19 bp, Mus musculus
  siRNA target sequence for Zdhhc14 (NM_146073.2,1781-1799).
ccacactctcagacattat

SEQ ID NO: 759980 - DNA, 19 bp, Mus musculus
  siRNA target sequence for Zdhhc14 (NM_146073.2,1898-1916).
gccgtaccatgcacatgtt

SEQ ID NO: 759981 - DNA, 19 bp, Mus musculus
  siRNA target sequence for BC026588 (NM_146075.1,77-95).
ggcggaggacaacatgaaa

SEQ ID NO: 759982 - DNA, 19 bp, Mus musculus
  siRNA target sequence for BC026588 (NM_146075.1,171-189).
ctgcacgaactgtacaact

SEQ ID NO: 759983 - DNA, 19 bp, Mus musculus
  siRNA target sequence for BC026588 (NM_146075.1,195-213).
gccatccaggcaggtaatt

SEQ ID NO: 759984 - DNA, 19 bp, Mus musculus
  siRNA target sequence for BC026588 (NM_146075.1,196-214).
ccatccaggcaggtaattt

SEQ ID NO: 759985 - DNA, 19 bp, Mus musculus
  siRNA target sequence for BC026588 (NM_146075.1,203-221).
ggcaggtaattttgaatgt

SEQ ID NO: 759986 - DNA, 19 bp, Mus musculus
  siRNA target sequence for BC026588 (NM_146075.1,267-285).
gcgcaggagtacatagcta

SEQ ID NO: 759987 - DNA, 19 bp, Mus musculus
  siRNA target sequence for BC026588 (NM_146075.1,268-286).
cgcaggagtacatagctaa

SEQ ID NO: 759988 - DNA, 19 bp, Mus musculus
  siRNA target sequence for BC026588 (NM_146075.1,273-291).
gagtacatagctaatgtga

SEQ ID NO: 759989 - DNA, 19 bp, Mus musculus
  siRNA target sequence for BC026588 (NM_146075.1,298-316).
gtccctcttcgaggtttaa

SEQ ID NO: 759990 - DNA, 19 bp, Mus musculus
  siRNA target sequence for BC026588 (NM_146075.1,394-412).
cgactacagtggacaaagt

SEQ ID NO: 759991 - DNA, 19 bp, Mus musculus
  siRNA target sequence for BC026588 (NM_146075.1,681-699).
cacgtgcgggacagtctaa

SEQ ID NO: 759992 - DNA, 19 bp, Mus musculus
  siRNA target sequence for BC016608 (NM_146080.1,662-680).
cagttctgtcttaatagat

SEQ ID NO: 759993 - DNA, 19 bp, Mus musculus
  siRNA target sequence for BC016608 (NM_146080.1,671-689).
cttaatagattgtgtgtat

SEQ ID NO: 759994 - DNA, 19 bp, Mus musculus
  siRNA target sequence for BC016608 (NM_146080.1,682-700).
gtgtgtatcgtttttgtta

SEQ ID NO: 759995 - DNA, 19 bp, Mus musculus
  siRNA target sequence for BC016608 (NM_146080.1,697-715).
gttaccttttcttgatgtt

SEQ ID NO: 759996 - DNA, 19 bp, Mus musculus
  siRNA target sequence for Ppp4r1 (NM_146081.1,117-135).
caatgatgtcgtagaagaa

SEQ ID NO: 759997 - DNA, 19 bp, Mus musculus
  siRNA target sequence for Ppp4r1 (NM_146081.1,262-280).
gtggacagctccttactct

SEQ ID NO: 759998 - DNA, 19 bp, Mus musculus
  siRNA target sequence for Ppp4r1 (NM_146081.1,409-427).
gaccaggacatgttcaact

SEQ ID NO: 759999 - DNA, 19 bp, Mus musculus
  siRNA target sequence for Ppp4r1 (NM_146081.1,443-461).
ggactcctctacctaaaat

SEQ ID NO: 760000 - DNA, 19 bp, Mus musculus
  siRNA target sequence for Ppp4r1 (NM_146081.1,444-462).
gactcctctacctaaaata

SEQ ID NO: 760001 - DNA, 19 bp, Mus musculus
  siRNA target sequence for Ppp4r1 (NM_146081.1,454-472).
cctaaaatagatcttgata

SEQ ID NO: 760002 - DNA, 19 bp, Mus musculus
  siRNA target sequence for Ppp4r1 (NM_146081.1,544-562).
ccaggccctcccaatatca

SEQ ID NO: 760003 - DNA, 19 bp, Mus musculus
  siRNA target sequence for Ppp4r1 (NM_146081.1,569-587).
ctacccggaaggaactaga

SEQ ID NO: 760004 - DNA, 19 bp, Mus musculus
  siRNA target sequence for Ppp4r1 (NM_146081.1,618-636).
ggatgacccggatgtgaaa

SEQ ID NO: 760005 - DNA, 19 bp, Mus musculus
  siRNA target sequence for Ppp4r1 (NM_146081.1,746-764).
gtgagcttccagactgtaa

SEQ ID NO: 760006 - DNA, 19 bp, Mus musculus
  siRNA target sequence for Ppp4r1 (NM_146081.1,750-768).
gcttccagactgtaacata

SEQ ID NO: 760007 - DNA, 19 bp, Mus musculus
  siRNA target sequence for Ppp4r1 (NM_146081.1,751-769).
cttccagactgtaacataa

SEQ ID NO: 760008 - DNA, 19 bp, Mus musculus
  siRNA target sequence for Ppp4r1 (NM_146081.1,755-773).
cagactgtaacataagtca

SEQ ID NO: 760009 - DNA, 19 bp, Mus musculus
  siRNA target sequence for Ppp4r1 (NM_146081.1,869-887).
gcttcagcccggatgaaga

SEQ ID NO: 760010 - DNA, 19 bp, Mus musculus
  siRNA target sequence for Ppp4r1 (NM_146081.1,870-888).
cttcagcccggatgaagat

SEQ ID NO: 760011 - DNA, 19 bp, Mus musculus
  siRNA target sequence for Ppp4r1 (NM_146081.1,931-949).
gatcagtacttgtcaatga

SEQ ID NO: 760012 - DNA, 19 bp, Mus musculus
  siRNA target sequence for Ppp4r1 (NM_146081.1,1166-1184).
cagacctggttccaatctt

SEQ ID NO: 760013 - DNA, 19 bp, Mus musculus
  siRNA target sequence for Ppp4r1 (NM_146081.1,1170-1188).
cctggttccaatcttcaat

SEQ ID NO: 760014 - DNA, 19 bp, Mus musculus
  siRNA target sequence for Ppp4r1 (NM_146081.1,1174-1192).
gttccaatcttcaatggat

SEQ ID NO: 760015 - DNA, 19 bp, Mus musculus
  siRNA target sequence for Ppp4r1 (NM_146081.1,1234-1252).
cacttgcatgactttctga

SEQ ID NO: 760016 - DNA, 19 bp, Mus musculus
  siRNA target sequence for Ppp4r1 (NM_146081.1,1251-1269).
gaagcttcttcacattgat

SEQ ID NO: 760017 - DNA, 19 bp, Mus musculus
  siRNA target sequence for Ppp4r1 (NM_146081.1,1451-1469).
cagtccgctggatttccta

SEQ ID NO: 760018 - DNA, 19 bp, Mus musculus
  siRNA target sequence for Ppp4r1 (NM_146081.1,1456-1474).
cgctggatttcctacaagt

SEQ ID NO: 760019 - DNA, 19 bp, Mus musculus
  siRNA target sequence for Ppp4r1 (NM_146081.1,1517-1535).
caaccttcggagtagatct

SEQ ID NO: 760020 - DNA, 19 bp, Mus musculus
  siRNA target sequence for Ppp4r1 (NM_146081.1,1520-1538).
ccttcggagtagatctcat

SEQ ID NO: 760021 - DNA, 19 bp, Mus musculus
  siRNA target sequence for Ppp4r1 (NM_146081.1,1526-1544).
gagtagatctcatcaatga

SEQ ID NO: 760022 - DNA, 19 bp, Mus musculus
  siRNA target sequence for Ppp4r1 (NM_146081.1,1561-1579).
ggcaggtgtccaaaatggt

SEQ ID NO: 760023 - DNA, 19 bp, Mus musculus
  siRNA target sequence for Ppp4r1 (NM_146081.1,1690-1708).
gacagggttcccaatgtta

SEQ ID NO: 760024 - DNA, 19 bp, Mus musculus
  siRNA target sequence for Ppp4r1 (NM_146081.1,1694-1712).
gggttcccaatgttagagt

SEQ ID NO: 760025 - DNA, 19 bp, Mus musculus
  siRNA target sequence for Ppp4r1 (NM_146081.1,1790-1808).
ccgtggagcagacaatcat

SEQ ID NO: 760026 - DNA, 19 bp, Mus musculus
  siRNA target sequence for Ppp4r1 (NM_146081.1,1861-1879).
ccctccagtaccaaactct

SEQ ID NO: 760027 - DNA, 19 bp, Mus musculus
  siRNA target sequence for BC027072 (NM_146082.2,257-275).
gcgaagagtggcattcagt

SEQ ID NO: 760028 - DNA, 19 bp, Mus musculus
  siRNA target sequence for BC027072 (NM_146082.2,258-276).
cgaagagtggcattcagtt

SEQ ID NO: 760029 - DNA, 19 bp, Mus musculus
  siRNA target sequence for BC027072 (NM_146082.2,347-365).
gttcaaagttccactttct

SEQ ID NO: 760030 - DNA, 19 bp, Mus musculus
  siRNA target sequence for BC027072 (NM_146082.2,458-476).
cgtcagctcccaaaagcta

SEQ ID NO: 760031 - DNA, 19 bp, Mus musculus
  siRNA target sequence for BC027072 (NM_146082.2,530-548).
cacagggctacggacattt

SEQ ID NO: 760032 - DNA, 19 bp, Mus musculus
  siRNA target sequence for BC027072 (NM_146082.2,532-550).
cagggctacggacatttca

SEQ ID NO: 760033 - DNA, 19 bp, Mus musculus
  siRNA target sequence for BC027072 (NM_146082.2,534-552).
gggctacggacatttcatt

SEQ ID NO: 760034 - DNA, 19 bp, Mus musculus
  siRNA target sequence for BC027072 (NM_146082.2,536-554).
gctacggacatttcattca

SEQ ID NO: 760035 - DNA, 19 bp, Mus musculus
  siRNA target sequence for BC027072 (NM_146082.2,742-760).
ggcccaccagcatgcttat

SEQ ID NO: 760036 - DNA, 19 bp, Mus musculus
  siRNA target sequence for BC027072 (NM_146082.2,1132-1150).
gagcaccaagagaggtata

SEQ ID NO: 760037 - DNA, 19 bp, Mus musculus
  siRNA target sequence for BC027072 (NM_146082.2,1135-1153).
caccaagagaggtatagat

SEQ ID NO: 760038 - DNA, 19 bp, Mus musculus
  siRNA target sequence for BC027072 (NM_146082.2,1220-1238).
ctgggtccacccttatgct

SEQ ID NO: 760039 - DNA, 19 bp, Mus musculus
  siRNA target sequence for BC027072 (NM_146082.2,1443-1461).
cgagtcctaggatagcaaa

SEQ ID NO: 760040 - DNA, 19 bp, Mus musculus
  siRNA target sequence for BC027072 (NM_146082.2,1752-1770).
cgcgggaaagcctctttca

SEQ ID NO: 760041 - DNA, 19 bp, Mus musculus
  siRNA target sequence for BC027072 (NM_146082.2,1837-1855).
cagcgaaaggatcaagttt

SEQ ID NO: 760042 - DNA, 19 bp, Mus musculus
  siRNA target sequence for BC027072 (NM_146082.2,1839-1857).
gcgaaaggatcaagtttgt

SEQ ID NO: 760043 - DNA, 19 bp, Mus musculus
  siRNA target sequence for BC027072 (NM_146082.2,2217-2235).
gcattttgcccaatcaaga

SEQ ID NO: 760044 - DNA, 19 bp, Mus musculus
  siRNA target sequence for BC027072 (NM_146082.2,2394-2412).
cggttaagacgcttattga

SEQ ID NO: 760045 - DNA, 19 bp, Mus musculus
  siRNA target sequence for BC027072 (NM_146082.2,2396-2414).
gttaagacgcttattgaga

SEQ ID NO: 760046 - DNA, 19 bp, Mus musculus
  siRNA target sequence for BC027072 (NM_146082.2,2510-2528).
cccagatttcctatttaca

SEQ ID NO: 760047 - DNA, 19 bp, Mus musculus
  siRNA target sequence for BC027072 (NM_146082.2,2690-2708).
gaagtcctgatggacaaat

SEQ ID NO: 760048 - DNA, 19 bp, Mus musculus
  siRNA target sequence for BC027072 (NM_146082.2,2693-2711).
gtcctgatggacaaatcct

SEQ ID NO: 760049 - DNA, 19 bp, Mus musculus
  siRNA target sequence for BC027072 (NM_146082.2,2770-2788).
cctattaccaggtcttcaa

SEQ ID NO: 760050 - DNA, 19 bp, Mus musculus
  siRNA target sequence for BC027072 (NM_146082.2,2792-2810).
gctagccatccaaaaagaa

SEQ ID NO: 760051 - DNA, 19 bp, Mus musculus
  siRNA target sequence for BC027072 (NM_146082.2,2924-2942).
gtgggcgattccagaaagt

SEQ ID NO: 760052 - DNA, 19 bp, Mus musculus
  siRNA target sequence for BC027072 (NM_146082.2,2927-2945).
ggcgattccagaaagttga

SEQ ID NO: 760053 - DNA, 19 bp, Mus musculus
  siRNA target sequence for BC027072 (NM_146082.2,2951-2969).
gacctgaactctaagcaaa

SEQ ID NO: 760054 - DNA, 19 bp, Mus musculus
  siRNA target sequence for BC027072 (NM_146082.2,3013-3031).
ggcccgagcagagactata

SEQ ID NO: 760055 - DNA, 19 bp, Mus musculus
  siRNA target sequence for BC027072 (NM_146082.2,3016-3034).
ccgagcagagactatagca

SEQ ID NO: 760056 - DNA, 19 bp, Mus musculus
  siRNA target sequence for BC027072 (NM_146082.2,3340-3358).
cccaccagccacaaggaaa

SEQ ID NO: 760057 - DNA, 19 bp, Mus musculus
  siRNA target sequence for BC027072 (NM_146082.2,3416-3434).
gtccgacggacagaaacaa

SEQ ID NO: 760058 - DNA, 19 bp, Mus musculus
  siRNA target sequence for BC027072 (NM_146082.2,3486-3504).
ggtccaaggactcaattca

SEQ ID NO: 760059 - DNA, 19 bp, Mus musculus
  siRNA target sequence for BC027072 (NM_146082.2,3521-3539).
gctaccacagccaaagcat

SEQ ID NO: 760060 - DNA, 19 bp, Mus musculus
  siRNA target sequence for BC027072 (NM_146082.2,3543-3561).
ggaacacgtgttccatatt

SEQ ID NO: 760061 - DNA, 19 bp, Mus musculus
  siRNA target sequence for BC027072 (NM_146082.2,3547-3565).
cacgtgttccatattctat

SEQ ID NO: 760062 - DNA, 19 bp, Mus musculus
  siRNA target sequence for BC027072 (NM_146082.2,3571-3589).
cgccacttctctctttgaa

SEQ ID NO: 760063 - DNA, 19 bp, Mus musculus
  siRNA target sequence for BC027072 (NM_146082.2,3581-3599).
ctctttgaagctaaatctt

SEQ ID NO: 760064 - DNA, 19 bp, Mus musculus
  siRNA target sequence for BC027072 (NM_146082.2,3807-3825).
gctcagactgggaattcca

SEQ ID NO: 760065 - DNA, 19 bp, Mus musculus
  siRNA target sequence for BC027072 (NM_146082.2,3808-3826).
ctcagactgggaattccat

SEQ ID NO: 760066 - DNA, 19 bp, Mus musculus
  siRNA target sequence for BC027072 (NM_146082.2,4030-4048).
gccccagcacaaggaaata

SEQ ID NO: 760067 - DNA, 19 bp, Mus musculus
  siRNA target sequence for BC027072 (NM_146082.2,4034-4052).
cagcacaaggaaatatctt

SEQ ID NO: 760068 - DNA, 19 bp, Mus musculus
  siRNA target sequence for Apbb3 (NM_146085.1,439-457).
gatgctgcaggaacttatt

SEQ ID NO: 760069 - DNA, 19 bp, Mus musculus
  siRNA target sequence for Apbb3 (NM_146085.1,442-460).
gctgcaggaacttattatt

SEQ ID NO: 760070 - DNA, 19 bp, Mus musculus
  siRNA target sequence for Apbb3 (NM_146085.1,562-580).
ccccccaagggaagatctt

SEQ ID NO: 760071 - DNA, 19 bp, Mus musculus
  siRNA target sequence for Apbb3 (NM_146085.1,563-581).
cccccaagggaagatcttt

SEQ ID NO: 760072 - DNA, 19 bp, Mus musculus
  siRNA target sequence for Apbb3 (NM_146085.1,607-625).
cggagtaactctctaacat

SEQ ID NO: 760073 - DNA, 19 bp, Mus musculus
  siRNA target sequence for Apbb3 (NM_146085.1,617-635).
ctctaacatggtatagtga

SEQ ID NO: 760074 - DNA, 19 bp, Mus musculus
  siRNA target sequence for Apbb3 (NM_146085.1,786-804).
ccggagccagcctcatgat

SEQ ID NO: 760075 - DNA, 19 bp, Mus musculus
  siRNA target sequence for Apbb3 (NM_146085.1,834-852).
gatgatcctgaaaaaggat

SEQ ID NO: 760076 - DNA, 19 bp, Mus musculus
  siRNA target sequence for Apbb3 (NM_146085.1,951-969).
cagggacttcgcttttgtt

SEQ ID NO: 760077 - DNA, 19 bp, Mus musculus
  siRNA target sequence for Apbb3 (NM_146085.1,987-1005).
ctgtatgctcaaatgtcat

SEQ ID NO: 760078 - DNA, 19 bp, Mus musculus
  siRNA target sequence for Apbb3 (NM_146085.1,1024-1042).
cccgcaaaagccatagcaa

SEQ ID NO: 760079 - DNA, 19 bp, Mus musculus
  siRNA target sequence for Apbb3 (NM_146085.1,1124-1142).
ctatttcccctgaagactt

SEQ ID NO: 760080 - DNA, 19 bp, Mus musculus
  siRNA target sequence for Apbb3 (NM_146085.1,1211-1229).
ggatcctaccagtcactaa

SEQ ID NO: 760081 - DNA, 19 bp, Mus musculus
  siRNA target sequence for Apbb3 (NM_146085.1,1212-1230).
gatcctaccagtcactaaa

SEQ ID NO: 760082 - DNA, 19 bp, Mus musculus
  siRNA target sequence for Apbb3 (NM_146085.1,1394-1412).
ctgttcgccttgtaacctt

SEQ ID NO: 760083 - DNA, 19 bp, Mus musculus
  siRNA target sequence for Apbb3 (NM_146085.1,1401-1419).
ccttgtaacctttattggt

SEQ ID NO: 760084 - DNA, 19 bp, Mus musculus
  siRNA target sequence for Apbb3 (NM_146085.1,1424-1442).
gccgtgatccgcatacctt

SEQ ID NO: 760085 - DNA, 19 bp, Mus musculus
  siRNA target sequence for Apbb3 (NM_146085.1,1535-1553).
ccgcctgcatggttcagta

SEQ ID NO: 760086 - DNA, 19 bp, Mus musculus
  siRNA target sequence for Apbb3 (NM_146085.1,1721-1739).
ggggtgtcttctcatttct

SEQ ID NO: 760087 - DNA, 19 bp, Mus musculus
  siRNA target sequence for BC024400 (NM_146089.1,66-84).
ctgagtggttgaaaaaggt

SEQ ID NO: 760088 - DNA, 19 bp, Mus musculus
  siRNA target sequence for BC024400 (NM_146089.1,99-117).
ccatcccacaatatgagat

SEQ ID NO: 760089 - DNA, 19 bp, Mus musculus
  siRNA target sequence for BC024400 (NM_146089.1,104-122).
ccacaatatgagatgaact

SEQ ID NO: 760090 - DNA, 19 bp, Mus musculus
  siRNA target sequence for BC024400 (NM_146089.1,123-141).
cacggacgacagaaatttt

SEQ ID NO: 760091 - DNA, 19 bp, Mus musculus
  siRNA target sequence for BC024400 (NM_146089.1,126-144).
ggacgacagaaattttata

SEQ ID NO: 760092 - DNA, 19 bp, Mus musculus
  siRNA target sequence for BC024400 (NM_146089.1,127-145).
gacgacagaaattttatat

SEQ ID NO: 760093 - DNA, 19 bp, Mus musculus
  siRNA target sequence for BC024400 (NM_146089.1,178-196).
ggacatcagcctggtaata

SEQ ID NO: 760094 - DNA, 19 bp, Mus musculus
  siRNA target sequence for BC024400 (NM_146089.1,188-206).
ctggtaatagaggacttaa

SEQ ID NO: 760095 - DNA, 19 bp, Mus musculus
  siRNA target sequence for BC024400 (NM_146089.1,232-250).
cgaagccaaacgtcttgaa

SEQ ID NO: 760096 - DNA, 19 bp, Mus musculus
  siRNA target sequence for BC024400 (NM_146089.1,281-299).
cctgccaatctgtctaagt

SEQ ID NO: 760097 - DNA, 19 bp, Mus musculus
  siRNA target sequence for BC024400 (NM_146089.1,300-318).
ctggttcccggtttctgaa

SEQ ID NO: 760098 - DNA, 19 bp, Mus musculus
  siRNA target sequence for BC024400 (NM_146089.1,333-351).
gtgcaattgccctggaaat

SEQ ID NO: 760099 - DNA, 19 bp, Mus musculus
  siRNA target sequence for BC024400 (NM_146089.1,335-353).
gcaattgccctggaaataa

SEQ ID NO: 760100 - DNA, 19 bp, Mus musculus
  siRNA target sequence for BC024400 (NM_146089.1,341-359).
gccctggaaataaaagata

SEQ ID NO: 760101 - DNA, 19 bp, Mus musculus
  siRNA target sequence for BC024400 (NM_146089.1,343-361).
cctggaaataaaagatact

SEQ ID NO: 760102 - DNA, 19 bp, Mus musculus
  siRNA target sequence for BC024400 (NM_146089.1,344-362).
ctggaaataaaagatactt

SEQ ID NO: 760103 - DNA, 19 bp, Mus musculus
  siRNA target sequence for BC024400 (NM_146089.1,373-391).
cttcatccccgcagtgaat

SEQ ID NO: 760104 - DNA, 19 bp, Mus musculus
  siRNA target sequence for BC024400 (NM_146089.1,376-394).
catccccgcagtgaatgat

SEQ ID NO: 760105 - DNA, 19 bp, Mus musculus
  siRNA target sequence for BC024400 (NM_146089.1,380-398).
cccgcagtgaatgatttga

SEQ ID NO: 760106 - DNA, 19 bp, Mus musculus
  siRNA target sequence for BC024400 (NM_146089.1,397-415).
gacgtctgacctttttcgt

SEQ ID NO: 760107 - DNA, 19 bp, Mus musculus
  siRNA target sequence for BC024400 (NM_146089.1,404-422).
gacctttttcgtaccaaat

SEQ ID NO: 760108 - DNA, 19 bp, Mus musculus
  siRNA target sequence for BC024400 (NM_146089.1,407-425).
ctttttcgtaccaaatcca

SEQ ID NO: 760109 - DNA, 19 bp, Mus musculus
  siRNA target sequence for BC024400 (NM_146089.1,474-492).
cggcaacgctggtgttaga

SEQ ID NO: 760110 - DNA, 19 bp, Mus musculus
  siRNA target sequence for BC024400 (NM_146089.1,484-502).
ggtgttagaaaaatgtcta

SEQ ID NO: 760111 - DNA, 19 bp, Mus musculus
  siRNA target sequence for BC024400 (NM_146089.1,557-575).
gacagtcgccttcagaata

SEQ ID NO: 760112 - DNA, 19 bp, Mus musculus
  siRNA target sequence for BC024400 (NM_146089.1,561-579).
gtcgccttcagaatatgga

SEQ ID NO: 760113 - DNA, 19 bp, Mus musculus
  siRNA target sequence for BC024400 (NM_146089.1,599-617).
gcggagttccggtttggaa

SEQ ID NO: 760114 - DNA, 19 bp, Mus musculus
  siRNA target sequence for BC024400 (NM_146089.1,600-618).
cggagttccggtttggaat

SEQ ID NO: 760115 - DNA, 19 bp, Mus musculus
  siRNA target sequence for BC024400 (NM_146089.1,676-694).
gtcactagcggcactttca

SEQ ID NO: 760116 - DNA, 19 bp, Mus musculus
  siRNA target sequence for BC024400 (NM_146089.1,684-702).
cggcactttcagagaaact

SEQ ID NO: 760117 - DNA, 19 bp, Mus musculus
  siRNA target sequence for BC024400 (NM_146089.1,686-704).
gcactttcagagaaactct

SEQ ID NO: 760118 - DNA, 19 bp, Mus musculus
  siRNA target sequence for BC024400 (NM_146089.1,695-713).
gagaaactctcggagttaa

SEQ ID NO: 760119 - DNA, 19 bp, Mus musculus
  siRNA target sequence for BC024400 (NM_146089.1,742-760).
gttggagtcctatttagat

SEQ ID NO: 760120 - DNA, 19 bp, Mus musculus
  siRNA target sequence for BC024400 (NM_146089.1,745-763).
ggagtcctatttagattta

SEQ ID NO: 760121 - DNA, 19 bp, Mus musculus
  siRNA target sequence for BC024400 (NM_146089.1,777-795).
ctcttgctcaactgaaaat

SEQ ID NO: 760122 - DNA, 19 bp, Mus musculus
  siRNA target sequence for D19Ertd721e (NM_146093.1,293-311).
gagaaagcagacccatttt

SEQ ID NO: 760123 - DNA, 19 bp, Mus musculus
  siRNA target sequence for D19Ertd721e (NM_146093.1,295-313).
gaaagcagacccattttga

SEQ ID NO: 760124 - DNA, 19 bp, Mus musculus
  siRNA target sequence for D19Ertd721e (NM_146093.1,331-349).
gaacagaccaagagaatgt

SEQ ID NO: 760125 - DNA, 19 bp, Mus musculus
  siRNA target sequence for D19Ertd721e (NM_146093.1,369-387).
gcagcgggaacgtgaagaa

SEQ ID NO: 760126 - DNA, 19 bp, Mus musculus
  siRNA target sequence for D19Ertd721e (NM_146093.1,447-465).
gtcagttgcacgacagaaa

SEQ ID NO: 760127 - DNA, 19 bp, Mus musculus
  siRNA target sequence for D19Ertd721e (NM_146093.1,449-467).
cagttgcacgacagaaact

SEQ ID NO: 760128 - DNA, 19 bp, Mus musculus
  siRNA target sequence for D19Ertd721e (NM_146093.1,536-554).
gacaaagggttcgagaaaa

SEQ ID NO: 760129 - DNA, 19 bp, Mus musculus
  siRNA target sequence for D19Ertd721e (NM_146093.1,684-702).
gtatgaccagtgtcgtata

SEQ ID NO: 760130 - DNA, 19 bp, Mus musculus
  siRNA target sequence for 5730446C15Rik (NM_146096.2,23-41).
gaataatctgtcatttagt

SEQ ID NO: 760131 - DNA, 19 bp, Mus musculus
  siRNA target sequence for 5730446C15Rik (NM_146096.2,67-85).
caccttgcccagggaaaat

SEQ ID NO: 760132 - DNA, 19 bp, Mus musculus
  siRNA target sequence for 5730446C15Rik (NM_146096.2,108-126).
ccacctgatccaacttaca

SEQ ID NO: 760133 - DNA, 19 bp, Mus musculus
  siRNA target sequence for 5730446C15Rik (NM_146096.2,125-143).
cacactgatgtgtgatgaa

SEQ ID NO: 760134 - DNA, 19 bp, Mus musculus
  siRNA target sequence for 5730446C15Rik (NM_146096.2,191-209).
gtactcgtcccgagaaaaa

SEQ ID NO: 760135 - DNA, 19 bp, Mus musculus
  siRNA target sequence for 5730446C15Rik (NM_146096.2,194-212).
ctcgtcccgagaaaaagat

SEQ ID NO: 760136 - DNA, 19 bp, Mus musculus
  siRNA target sequence for 5730446C15Rik (NM_146096.2,200-218).
ccgagaaaaagatgctatt

SEQ ID NO: 760137 - DNA, 19 bp, Mus musculus
  siRNA target sequence for 5730446C15Rik (NM_146096.2,204-222).
gaaaaagatgctattgagt

SEQ ID NO: 760138 - DNA, 19 bp, Mus musculus
  siRNA target sequence for 5730446C15Rik (NM_146096.2,238-256).
ccagtaaaggcaacagaat

SEQ ID NO: 760139 - DNA, 19 bp, Mus musculus
  siRNA target sequence for 5730446C15Rik (NM_146096.2,272-290).
gcgttgttcaccaaatgct

SEQ ID NO: 760140 - DNA, 19 bp, Mus musculus
  siRNA target sequence for 5730446C15Rik (NM_146096.2,333-351).
ggtcagatgagcagttttt

SEQ ID NO: 760141 - DNA, 19 bp, Mus musculus
  siRNA target sequence for 5730446C15Rik (NM_146096.2,336-354).
cagatgagcagtttttata

SEQ ID NO: 760142 - DNA, 19 bp, Mus musculus
  siRNA target sequence for 5730446C15Rik (NM_146096.2,362-380).
gggttcccgcattaattgt

SEQ ID NO: 760143 - DNA, 19 bp, Mus musculus
  siRNA target sequence for 5730446C15Rik (NM_146096.2,363-381).
ggttcccgcattaattgta

SEQ ID NO: 760144 - DNA, 19 bp, Mus musculus
  siRNA target sequence for 5730446C15Rik (NM_146096.2,364-382).
gttcccgcattaattgtaa

SEQ ID NO: 760145 - DNA, 19 bp, Mus musculus
  siRNA target sequence for 5730446C15Rik (NM_146096.2,367-385).
cccgcattaattgtaacat

SEQ ID NO: 760146 - DNA, 19 bp, Mus musculus
  siRNA target sequence for 5730446C15Rik (NM_146096.2,368-386).
ccgcattaattgtaacata

SEQ ID NO: 760147 - DNA, 19 bp, Mus musculus
  siRNA target sequence for 5730446C15Rik (NM_146096.2,369-387).
cgcattaattgtaacatat

SEQ ID NO: 760148 - DNA, 19 bp, Mus musculus
  siRNA target sequence for 5730446C15Rik (NM_146096.2,499-517).
gtcctgaaaatgtgattat

SEQ ID NO: 760149 - DNA, 19 bp, Mus musculus
  siRNA target sequence for 5730446C15Rik (NM_146096.2,621-639).
gctttccctgatactaaga

SEQ ID NO: 760150 - DNA, 19 bp, Mus musculus
  siRNA target sequence for 5730446C15Rik (NM_146096.2,622-640).
ctttccctgatactaagaa

SEQ ID NO: 760151 - DNA, 19 bp, Mus musculus
  siRNA target sequence for 5730446C15Rik (NM_146096.2,643-661).
cctactgttttgatgcatt

SEQ ID NO: 760152 - DNA, 19 bp, Mus musculus
  siRNA target sequence for 5730446C15Rik (NM_146096.2,663-681).
ccaaacattgacaaaatct

SEQ ID NO: 760153 - DNA, 19 bp, Mus musculus
  siRNA target sequence for 5730446C15Rik (NM_146096.2,686-704).
gataacctctccagtatta

SEQ ID NO: 760154 - DNA, 19 bp, Mus musculus
  siRNA target sequence for 5730446C15Rik (NM_146096.2,715-733).
ggactgaagatgaagtcat

SEQ ID NO: 760155 - DNA, 19 bp, Mus musculus
  siRNA target sequence for 5730446C15Rik (NM_146096.2,716-734).
gactgaagatgaagtcatt

SEQ ID NO: 760156 - DNA, 19 bp, Mus musculus
  siRNA target sequence for 5730446C15Rik (NM_146096.2,742-760).
cccatggcctcgcattgtt

SEQ ID NO: 760157 - DNA, 19 bp, Mus musculus
  siRNA target sequence for 5730446C15Rik (NM_146096.2,743-761).
ccatggcctcgcattgttt

SEQ ID NO: 760158 - DNA, 19 bp, Mus musculus
  siRNA target sequence for 5730446C15Rik (NM_146096.2,824-842).
gctttatggacaatacctt

SEQ ID NO: 760159 - DNA, 19 bp, Mus musculus
  siRNA target sequence for 5730446C15Rik (NM_146096.2,834-852).
caataccttgagaggttaa

SEQ ID NO: 760160 - DNA, 19 bp, Mus musculus
  siRNA target sequence for 5730446C15Rik (NM_146096.2,867-885).
caggaactggtaaatttgt

SEQ ID NO: 760161 - DNA, 19 bp, Mus musculus
  siRNA target sequence for BC018472 (NM_146097.1,30-48).
gttacctgctgtgaaaact

SEQ ID NO: 760162 - DNA, 19 bp, Mus musculus
  siRNA target sequence for BC018472 (NM_146097.1,85-103).
gaattggtccccattgaga

SEQ ID NO: 760163 - DNA, 19 bp, Mus musculus
  siRNA target sequence for BC018472 (NM_146097.1,127-145).
cttgacttcatcactaaga

SEQ ID NO: 760164 - DNA, 19 bp, Mus musculus
  siRNA target sequence for BC018472 (NM_146097.1,140-158).
ctaagattccagtcacaat

SEQ ID NO: 760165 - DNA, 19 bp, Mus musculus
  siRNA target sequence for BC018472 (NM_146097.1,171-189).
cttaggtgctggaaagaca

SEQ ID NO: 760166 - DNA, 19 bp, Mus musculus
  siRNA target sequence for BC018472 (NM_146097.1,321-339).
gctggaacttagaaatggt

SEQ ID NO: 760167 - DNA, 19 bp, Mus musculus
  siRNA target sequence for BC018472 (NM_146097.1,322-340).
ctggaacttagaaatggtt

SEQ ID NO: 760168 - DNA, 19 bp, Mus musculus
  siRNA target sequence for BC018472 (NM_146097.1,363-381).
cagtggccttagagctata

SEQ ID NO: 760169 - DNA, 19 bp, Mus musculus
  siRNA target sequence for BC018472 (NM_146097.1,365-383).
gtggccttagagctataga

SEQ ID NO: 760170 - DNA, 19 bp, Mus musculus
  siRNA target sequence for BC018472 (NM_146097.1,374-392).
gagctatagagaatctgat

SEQ ID NO: 760171 - DNA, 19 bp, Mus musculus
  siRNA target sequence for BC018472 (NM_146097.1,404-422).
gcaagtttgactacatact

SEQ ID NO: 760172 - DNA, 19 bp, Mus musculus
  siRNA target sequence for BC018472 (NM_146097.1,452-470).
gtgcagtggcttctatgtt

SEQ ID NO: 760173 - DNA, 19 bp, Mus musculus
  siRNA target sequence for BC018472 (NM_146097.1,484-502).
gagttagggagtgatattt

SEQ ID NO: 760174 - DNA, 19 bp, Mus musculus
  siRNA target sequence for BC018472 (NM_146097.1,486-504).
gttagggagtgatatttat

SEQ ID NO: 760175 - DNA, 19 bp, Mus musculus
  siRNA target sequence for BC018472 (NM_146097.1,512-530).
gtatcataactgttgtaga

SEQ ID NO: 760176 - DNA, 19 bp, Mus musculus
  siRNA target sequence for BC018472 (NM_146097.1,521-539).
ctgttgtagattcaaaata

SEQ ID NO: 760177 - DNA, 19 bp, Mus musculus
  siRNA target sequence for BC018472 (NM_146097.1,590-608).
ctactaggcaagttgcatt

SEQ ID NO: 760178 - DNA, 19 bp, Mus musculus
  siRNA target sequence for BC018472 (NM_146097.1,605-623).
cattggcagacatgattct

SEQ ID NO: 760179 - DNA, 19 bp, Mus musculus
  siRNA target sequence for BC018472 (NM_146097.1,655-673).
gagctaaacaacttaagaa

SEQ ID NO: 760180 - DNA, 19 bp, Mus musculus
  siRNA target sequence for BC018472 (NM_146097.1,725-743).
caagagttcatctctcaaa

SEQ ID NO: 760181 - DNA, 19 bp, Mus musculus
  siRNA target sequence for BC018472 (NM_146097.1,730-748).
gttcatctctcaaatatat

SEQ ID NO: 760182 - DNA, 19 bp, Mus musculus
  siRNA target sequence for BC018472 (NM_146097.1,751-769).
gaccttcatgcctatgata

SEQ ID NO: 760183 - DNA, 19 bp, Mus musculus
  siRNA target sequence for BC018472 (NM_146097.1,753-771).
ccttcatgcctatgatatt

SEQ ID NO: 760184 - DNA, 19 bp, Mus musculus
  siRNA target sequence for BC018472 (NM_146097.1,766-784).
gatattctctctggaataa

SEQ ID NO: 760185 - DNA, 19 bp, Mus musculus
  siRNA target sequence for BC018472 (NM_146097.1,821-839).
cccaccttgatcagagtat

SEQ ID NO: 760186 - DNA, 19 bp, Mus musculus
  siRNA target sequence for BC018472 (NM_146097.1,822-840).
ccaccttgatcagagtatt

SEQ ID NO: 760187 - DNA, 19 bp, Mus musculus
  siRNA target sequence for BC018472 (NM_146097.1,826-844).
cttgatcagagtattgtta

SEQ ID NO: 760188 - DNA, 19 bp, Mus musculus
  siRNA target sequence for BC018472 (NM_146097.1,971-989).
gactggtgtctatcaaaga

SEQ ID NO: 760189 - DNA, 19 bp, Mus musculus
  siRNA target sequence for BC018472 (NM_146097.1,973-991).
ctggtgtctatcaaagaca

SEQ ID NO: 760190 - DNA, 19 bp, Mus musculus
  siRNA target sequence for BC018472 (NM_146097.1,988-1006).
gacaaaccacagcaaatga

SEQ ID NO: 760191 - DNA, 19 bp, Mus musculus
  siRNA target sequence for BC018472 (NM_146097.1,1079-1097).
cgtgtcagctggtcttcat

SEQ ID NO: 760192 - DNA, 19 bp, Mus musculus
  siRNA target sequence for BC018472 (NM_146097.1,1084-1102).
cagctggtcttcattggta

SEQ ID NO: 760193 - DNA, 19 bp, Mus musculus
  siRNA target sequence for BC018472 (NM_146097.1,1092-1110).
cttcattggtagaaattta

SEQ ID NO: 760194 - DNA, 19 bp, Mus musculus
  siRNA target sequence for BC018472 (NM_146097.1,1095-1113).
cattggtagaaatttagat

SEQ ID NO: 760195 - DNA, 19 bp, Mus musculus
  siRNA target sequence for BC018472 (NM_146097.1,1100-1118).
gtagaaatttagataagga

SEQ ID NO: 760196 - DNA, 19 bp, Mus musculus
  siRNA target sequence for AU041783 (NM_146102.1,249-267).
gtcaacggggaacaaaact

SEQ ID NO: 760197 - DNA, 19 bp, Mus musculus
  siRNA target sequence for AU041783 (NM_146102.1,365-383).
ccctccgcccaagatgatt

SEQ ID NO: 760198 - DNA, 19 bp, Mus musculus
  siRNA target sequence for AU041783 (NM_146102.1,422-440).
ccctgagggctactatgaa

SEQ ID NO: 760199 - DNA, 19 bp, Mus musculus
  siRNA target sequence for AU041783 (NM_146102.1,441-459).
gaggctgagccatttgaca

SEQ ID NO: 760200 - DNA, 19 bp, Mus musculus
  siRNA target sequence for AU041783 (NM_146102.1,793-811).
cgatgaacgctgacgttat

SEQ ID NO: 760201 - DNA, 19 bp, Mus musculus
  siRNA target sequence for AU041783 (NM_146102.1,1013-1031).
gatcccagagaccaaagat

SEQ ID NO: 760202 - DNA, 19 bp, Mus musculus
  siRNA target sequence for AU041783 (NM_146102.1,1149-1167).
gtgctggtgaacagtcaat

SEQ ID NO: 760203 - DNA, 19 bp, Mus musculus
  siRNA target sequence for AU041783 (NM_146102.1,1177-1195).
gctggtgcttcgttagaga

SEQ ID NO: 760204 - DNA, 19 bp, Mus musculus
  siRNA target sequence for AU041783 (NM_146102.1,1470-1488).
gtgagtgcggccaaaacct

SEQ ID NO: 760205 - DNA, 19 bp, Mus musculus
  siRNA target sequence for AU041783 (NM_146102.1,1478-1496).
ggccaaaacctctctctta

SEQ ID NO: 760206 - DNA, 19 bp, Mus musculus
  siRNA target sequence for AU041783 (NM_146102.1,1480-1498).
ccaaaacctctctcttact

SEQ ID NO: 760207 - DNA, 19 bp, Mus musculus
  siRNA target sequence for AU041783 (NM_146102.1,1558-1576).
gccaggacgatctgtatga

SEQ ID NO: 760208 - DNA, 19 bp, Mus musculus
  siRNA target sequence for AU041783 (NM_146102.1,1559-1577).
ccaggacgatctgtatgat

SEQ ID NO: 760209 - DNA, 19 bp, Mus musculus
  siRNA target sequence for AU041783 (NM_146102.1,1562-1580).
ggacgatctgtatgatgat

SEQ ID NO: 760210 - DNA, 19 bp, Mus musculus
  siRNA target sequence for AU041783 (NM_146102.1,1903-1921).
cgcgaatcaccatggttaa

SEQ ID NO: 760211 - DNA, 19 bp, Mus musculus
  siRNA target sequence for AU041783 (NM_146102.1,1906-1924).
gaatcaccatggttaagct

SEQ ID NO: 760212 - DNA, 19 bp, Mus musculus
  siRNA target sequence for AU041783 (NM_146102.1,2027-2045).
gaccagtgcagagatcaaa

SEQ ID NO: 760213 - DNA, 19 bp, Mus musculus
  siRNA target sequence for AU041783 (NM_146102.1,2030-2048).
cagtgcagagatcaaactt

SEQ ID NO: 760214 - DNA, 19 bp, Mus musculus
  siRNA target sequence for AU041783 (NM_146102.1,2058-2076).
cggacagaggcggaagtaa

SEQ ID NO: 760215 - DNA, 19 bp, Mus musculus
  siRNA target sequence for AU041783 (NM_146102.1,2059-2077).
ggacagaggcggaagtaaa

SEQ ID NO: 760216 - DNA, 19 bp, Mus musculus
  siRNA target sequence for AU041783 (NM_146102.1,2178-2196).
ctgttgagatgcacagata

SEQ ID NO: 760217 - DNA, 19 bp, Mus musculus
  siRNA target sequence for 2500001K11Rik (NM_146103.1,378-396).
cccagtaagttcctcattt

SEQ ID NO: 760218 - DNA, 19 bp, Mus musculus
  siRNA target sequence for 2500001K11Rik (NM_146103.1,610-628).
gcatccacctgctactact

SEQ ID NO: 760219 - DNA, 19 bp, Mus musculus
  siRNA target sequence for 2500001K11Rik (NM_146103.1,816-834).
ctgaggctggacaggatta

SEQ ID NO: 760220 - DNA, 19 bp, Mus musculus
  siRNA target sequence for 2500001K11Rik (NM_146103.1,1005-1023).
gtcgtgcccctgctcattt

SEQ ID NO: 760221 - DNA, 19 bp, Mus musculus
  siRNA target sequence for 2500001K11Rik (NM_146103.1,1047-1065).
ctggatgaccacaatacgt

SEQ ID NO: 760222 - DNA, 19 bp, Mus musculus
  siRNA target sequence for 2500001K11Rik (NM_146103.1,1058-1076).
caatacgttctcttacatt

SEQ ID NO: 760223 - DNA, 19 bp, Mus musculus
  siRNA target sequence for 2500001K11Rik (NM_146103.1,1088-1106).
cccgctttggctctcatta

SEQ ID NO: 760224 - DNA, 19 bp, Mus musculus
  siRNA target sequence for 2500001K11Rik (NM_146103.1,1090-1108).
cgctttggctctcattact

SEQ ID NO: 760225 - DNA, 19 bp, Mus musculus
  siRNA target sequence for 2500001K11Rik (NM_146103.1,1092-1110).
ctttggctctcattactga
